(19) United States
(12) Patent Application Publication
(10) Pub. No.: US 2024/0114883 A1
(43) Pub. Date: Apr. 11, 2024

(54) Genetically modified non-human having humanized gamma and delta TCR variable genes

(71) Applicant: inGenious Targeting Laboratories, Ronkonkoma, NY (US)

(72) Inventor: Wei Weng, Sayville, NY (US)

(21) Appl. No.: 18/233,507

(22) Filed: Aug. 14, 2023

Related U.S. Application Data
(60) Provisional application No. 63/397,633, filed on Aug. 12, 2022.

(51) Int. Cl. A01K 67/027; C07K 14/725

(52) U.S. Cl. CPC A01K 67/0278; A01K 67/0276; C07K 14/7051; A01K 2207/12; A01K 2207/15; A01K 2217/052; A01K 2217/072; A01K 2217/075; A01K 2217/15; A01K 2227/105; A01K 2267/01; A01K 2267/0331

(57) ABSTRACT

The invention provides a genetically modified non-human animal that comprises in its genome foreign γ and δ T cell receptor variable gene coding fragments, as well as its tissues, embryos, and cells. Also provided are constructs and methods for making said genetically modified non-human animal. Human T cell receptor (TCR) cloning and repertoire analysis are also included. Applications for using said animal in infectious diseases are also provided.

[0001] The present application claims the benefit of priority under 35 U.S.C. § 119(e) of Provisional Applications No. 63/397,633, filed on Aug. 12, 2022, the entire disclosure of which is hereby incorporated by reference.

### SEQUENCE LISTING

[0002] The instant application contains a Sequence Listing which has been submitted herewith and is hereby incorporated by reference in its entirety. Said .xml copy, created on Nov. 8, 2023 is named 140457583383, and is 44,476,257 bytes in size.

### BACKGROUND

### Field of the Invention

[0003] The present invention relates to a genetically modified non-human animal (e.g., a rodent, e.g., a mouse or a rat) that comprises in its genome human or humanized T Cell Receptor (TCR) variable region of DNA coding and/or gene loci (e.g., TCR δ. and TCR γ. variable gene loci). The invention further relates to a non-human animal engineered to express a human or humanized TCR δ or TCR γ on the surface of γ-δ T cells. The invention further relates to a non-human animal engineered to co-express both human or humanized TCR δ or TCR γ on the surface of γδ T cells. Methods for cloning and analysis of human or humanized TCR repertoire and human or humanized TCR expansion upon infection are provided. Methods for said animal that express human or humanized γδ T cell receptors or co-receptors for further developing therapies for human diseases are also provided. The invention further relates to unrearranged human TCR variable region gene segments (e.g., human V, D, and/or J segments) at endogenous non-human TCR γ 6 gene loci.

### Discussion of the Related Art

[0004] Like conventional αβ T cells and B cells, γδ T cells use V(D)J gene rearrangement to generate a set of highly diverse receptors to recognize antigens. This diversity is generated mainly in the complementary-determining region 3 (CDR3) of the T-cell antigen receptor (TCR). Unlike conventional αβ T cells, γδ T cells can be activated and expanded by non-peptide antigens. In contrast to conventional αβ T cells, γδ T cells are not dependent on classical MEC molecules presenting peptides. The efficacy of γδ T cells does not rely on recognizing classical HLA molecules.

[0005] These cells possess a distinctive quality in detecting antigen disruptions during various infections or cancers, a trait potentially shared universally among individuals and even across different animal species. As γδ T cells rapidly recognized the antigen disturbance, γδ T cells are considered to partially belong to the first line of immune defense (innate immune system), but they also can create immune memory (adaptive immune system) (Chien, Annu. Rev. Immunol. 32. 121-155 (2014)). Human γδ T cells are shown to be able to kill infected cells and cancers.

[0006] However, no non-human animal with the ability to generate diverse human γδ CDR3 has ever been developed. Thus, there is a need in the art for non-human animals (e.g., rodents, e.g., rats or mice) that comprise unrearranged human γδ T cell variable region gene segments capable of rearranging to form genes that encode human γδ T cell receptor variable domains, including domains that are cognate with one another, and including domains that specifically bind an antigen of interest and subsequently initiate the down-stream chemical and/or biological activity.

### SUMMARY

[0007] An embodiment of the invention relates to non-human animals, e.g., rodents, comprising unrearranged human or humanized γδ TCR coding DNA fragments and variable gene loci. The variable region further comprises human V, D, and J fragments. Methods of generating said animal are also provided. The genome of immune cells of said animal undergoes V(D)J recombination upon the activity of V(D)J recombinase enzyme (e.g. RAG1 and/or RAG2). The V(D)J recombination comprises processes that generate a large diversity of γ/δ TCR. The diversity increases the variability of the resulting functional genes.

[0008] Provided herein is a genetically modified non-human animal (e.g., a rodent, e.g., a mouse or a rat) that comprises in its genome human or humanized T Cell Receptor (TCR) variable region of DNA coding and/or gene loci (e.g., TCR δ and/or TCR γ variable gene loci).

[0009] In various embodiments, said animal comprises a nucleotide sequence encoding human TCR γ and/or δ variable region. In one embodiment, the human variable region fuses with non-human γ and/or δ TCR coding region to form a chimeric human/non-human TCR. In one embodiment, the nucleotide sequence of the non-human animal is replaced by the human sequence at an endogenous locus of γ and/or δ T cell receptor.

[0010] In one embodiment, the human V(D)J encodes the TCR CDR3 domain as part of a polypeptide which is linked to a non-human portion comprising transmembrane and cytoplasmic domains. In one embodiment, the portion of the polypeptide containing the CDR3 domain on the surface of γδ T cells served as the extra-cellular domain. In another aspect, the chimeric TCR comprises a human variable region and a non-human constant region on the surface of a γδ T cell.

[0011] In one aspect, a genetically modified non-human animal (e.g., a rodent, e.g, a mouse or a rat) is provided which comprises in its genome an unrearranged TCR γ and/or unrearranged TCR δ nucleotide sequence. The unrearranged TCR γ comprises at least one human Vγ variable segment and at least one human Jγ segment. The unrearranged TCR comprises at least one human Vδ segment, at least one human Dδ, and at least one human Jδ segment.

[0012] In one embodiment, a non-human animal (e.g., a rodent, e.g., a mouse or a rat) that comprises in its genome at least one human Vγ variable segment and at least one human Jγ segment, operably linked to a non-human (e.g., a rodent, e.g., a mouse or a rat) TCR γ constant gene sequence. The genome of said non-human animal further comprises at least one human Vδ segment, at least one human Dδ, and at least one human Jδ segment, operably linked to a non-human (e.g., a rodent, e.g., a mouse or a rat) TCR δ constant gene sequence.

[0013] In one embodiment, the human unrearranged TCR γ variable gene locus replaces one or more non-human TCR γ variable genes at an endogenous TCR γ variable gene locus.

[0014] In one embodiment, the human unrearranged TCR δ variable gene locus replaces one or more non-human TCR δ variable genes at an endogenous TCR δ variable gene locus.

[0015] In one aspect, the human variable region comprising Vγ and Jγ segments is fully or partially capable of rearranging to form a rearranged Vγ and Jγ sequence. In another aspect, the human variable region comprising Vδ, Dδ, and Jδ segments is fully or partially capable of rearranging to form a rearranged V(D)J δ sequence.

[0016] In some embodiments, a functional CDR3 domain is generated as a result of rearranging the human Vγ/Jγ sequence upon the activation of the recombinase enzyme. In some embodiments, a functional CDR3 domain is generated as a result of rearranging the human Vδ/Dδ/Jδ sequence upon the activation of the recombinase enzyme.

[0017] In some aspects, T cells of the non-human animal undergo T cell development in the thymus to human γδ positive T cells.

[0018] In various embodiments, the non-human animal generates a population of γδ T cells in the periphery, spleen, lung, liver, kidney, intestine, and skin.

[0019] In one aspect, the invention is related to the expression of human TCRγ and/or stretch of at least 10 amino acids in the human TCRγ of a non-human animal.

[0020] In some embodiments, the human TCR comprises the amino acid sequence which is one of the following: (a) human variable Vγ9, 10, 11 comprising SEQ ID NO (amino acid): 62, 63, 64, respectively; (b) a conservative amino acid sequence that is at least 90% identical to SEQ ID NO (amino acid): 62 or 63; and (c) a conservative amino acid sequence that is at least 70%, 71%, 72%, 73%, 74%, 75%, 80%, 85%, 90%, 96%, 97%, 98%, or 99% identical to SEQ ID NO: 62, 63, or 64.

[0021] In one aspect, the invention is related to the expression of human TCRδ and/or stretch of at least 10 amino acids in the human TCRδ of a non-human animal. In some embodiments, the human TCR comprises the amino acid sequence which is one of the following: (a) human variable V(δ) 1, 2, 3, 4, 5, 6, 7, or 8 comprising SEQ ID Nos: 65, 66, 67, 68, 69, 70 71, or 72, respectively; (b) a conservative amino acid sequence that is at least 90% identical to SEQ ID (amino acid) NO: 62 or 63; and (c) a conservative amino acid sequence that is at least 70%, 71%, 72%, 73%, 74%, 75%, 80%, 85%, 90%, 96%, 97%, 98%, or 99% identical to SEQ ID (amino acid) NO: 65, 66, 67, 68, 69, 70, 71, or 72.

[0022] In one aspect, the disclosure is related to a nucleic acid encoding an amino acid sequence of full or part of the endogenous non-human animal Vγ constant (C) region at the endogenous locus. In some embodiments, the Vγ C region comes from other species, which may be functional when linked to human VJγ. The human Vγ, Jγ, and functional C region can be introduced into the endogenous locus or randomly integrated into the genome of a non-human animal.

[0023] In some aspects, the constant region of the TCRδ comprises one or more conserved amino acid sequences: PSVF (SEQ ID No. 50789), MKNG (SEQ ID No. 50790), GTNVACL (SEQ ID No. 50791), SAVKLGQ (SEQ ID No. 50792), SVTCSV (SEQ ID No. 50793), KVNMMSL (SEQ ID No. 50794), VLGLR (SEQ ID No. 50795), LFAK (SEQ ID No. 50796), and/or NFLL (SEQ ID No. 50797).

[0024] In some aspects, the constant region of the TCRγ comprises one or more conserved amino acid sequences: PKPT (SEQ ID No. 50798), LCLL (SEQ ID No. 50799), KTKD (SEQ ID No. 50800), MKFSWLT (SEQ ID No. 50801), TSAYY (SEQ ID No. 50802), and/or LLLLLKS (SEQ ID No. 50803).

[0025] In one embodiment, the unrearranged TCRγ gene locus in the non-human animal described herein comprises 3 human Vγ segments and 3 human Jγ segments.

[0026] In one embodiment, the non-human animal described herein further comprises 8 human Vδ segments, 3 human Dδ segments, and 4 human Jγ segments.

[0027] In another embodiment, the unrearranged TCRγ gene locus in the non-human animal can form a functional repertoire of human γ CDR3 domain upon the activity of Rag1 and/or Rag2 or a combination of both or other related enzymes.

[0028] In another embodiment, the unrearranged TCRδ gene locus in the non-human animal can form a functional repertoire of human γ CDR3 domain upon the activity of Rag1 and/or Rag2 or a combination of both or other related enzymes.

[0029] In an additional embodiment, the non-human animal described herein (e.g., a rodent) further comprises nucleotide sequences of human TCRδ variable segments at a humanized TCRδ locus. In one embodiment, the non-human animal (e.g., rodent) further comprises at least one human Vδ, Dδ, and/or Jδ segment.

[0030] In one embodiment, the human TCRγ and mouse TCRγ can form a receptor complex and express on mouse T cells. In one embodiment, the human δ T cell receptor can form a receptor complex with a mouse γ T cell receptor to express on mouse γ/δ T cells.

[0031] In some embodiments, the invention related to a method of replacement of the endogenous non-human TCRγ with human TCRγ variable gene locus described herein was made in a single ES (embryonic stem) cell, and the single ES cell is introduced into a non-human (e.g., a rodent, e.g., a mouse or rat) embryo to make a genetically modified non-human animal (i.e., the first non-human animal, e.g., the human Vγ rodent); and the replacement of the endogenous non-human TCRδ with human Vδ variable gene locus described herein was made in a single ES cell, and the single ES cell was introduced into a non-human (e.g., a rodent, e.g., a mouse or rat) embryo to make a genetically modified non-human animal (the Vδ rodent). In one embodiment, the Vγ rodent and the Vδ rodent are bred to form a progeny, wherein the progeny comprises inits germline a humanized TCRγ variable locus and a humanized TCRδ variable locus.

[0032] In the method, the non-human animal is a rodent, e.g., a mouse, a genetically modified mouse.

[0033] This invention also provided herein cells, e.g., isolated T cells (e.g., γ/δ T cells, helper T cells, memory T cells, etc.), derived from non-human animals (e.g., rodents, e.g., mice or rats) described herein. Tissues and embryos derived from the non-human animals described herein are also provided.

[0034] In one aspect, a method for making a human TCR variable domain, includes: genetically modifying a rodent as described herein to comprise a humanized TCR γ locus and/or a humanized TCR δ locus: maintaining the rodent under conditions sufficient to form a T cell, wherein the T cell expresses a human TCR γ and/or a human TCR δ variable domain.

In some aspects, different non-human promoters for human Vδ are also provided, comprising promoters from γ/δ T cell-rich animals (e. g. bovine, rabbit). In other aspect, a non-human promoter for a human Vγ is also provided, comprising a promoter from a rodent (e. g. rat, or mouse). In one aspect, the non-human animal comprises promoters direct from human origin with un-rearranged sequences. In some other aspects, other human Vδ is inserted adjacent to the un-rearranged Vδ sequence.

[0035] In some aspects, methods of amplification of DNA fragment coding human TCRγ and TCRδ CDR3 after reverse-transcripted from mRNA are provided. Methods of sequencing PCR products containing the CDR3s by next-generation sequencing are also provided. Methods of Human γ/δ TCR repertoire analysis are further provided.

[0036] In some aspects, sequences of TCR(γ/δ) CDR3 from human Vδ1, Vδ2, Vδ3, Vδ4, Vδ6 are provided. In some aspects, sequences of TCRγ CDR3s from human Vγ9 and Vγ10 are provided. In further aspects, the invention also disclosed human γ and δ TCR, and their CDR3s are obtained from various tissues in non-human animals, comprising blood, intestine, thymus, liver, spleen, heart, skin, and lung.

[0037] In some aspects, in the non-human animal with human or humanized γ/δ T cell, the peptide sequence of CDR1 from the human Vδ1 comprises a conserved amino acid sequence comprising TSWWSYY (SEQ ID No. 50804), or at least one S, one W, one Y, or one T inside the CDR1 sequence. Mother aspect, the CDR2 sequence of the non-human animal Vδ1 comprises QGS, or at least one Q, one G, or one S. In a further aspect, the peptide sequence of CDR3 from the human Vδ1 comprises a conserved starting and ending sequence. The preferred amino acids for the first three amino acids of the CDR3 of the Vδ1 are ALG. Further preferred amino acids for the first four amino acids are ALGE (SEQ ID No. 5398), where position E can be any of G, A, D, V, E, or R. For the ending sequences, two amino acids out of the last five amino acids of the CDR3 of the Vδ1 are DK, LI, KL, TD, DT, PI, TA, TR, QL, or WD. In some aspects, the preferred amino acids for the last three amino acids of the CDR3 of the Vγ1 are KLI.

[0038] In one aspect, in the non-human animal with human or humanized γ/δ T cell, the peptide sequence of CDR1 from the human Vδ2 comprises a conserved amino acid sequence comprising GEAIGNYY (SEQ ID No. 50805), or at least one G, one E, one A, one I, one N, one Y inside the CDR1 sequence. In other aspect, the CDR2 sequence of the non-human animal Vδ2 comprises EKD, or at least one E, one K, or one D. In some aspects, for the starting sequences, amino acids at first three positions of the CDR3 of Vδ2 are ACD, ACG, ACE, ARD, or ASD. In some aspects, the first two amino acids of the CDR3 of the Vδ2 are AW, PV, or DC. Further preferred amino acids for the first four amino acids are ACDS (SEQ ID No. 51034), where the fourth position can be any of T, K, I, P, Y, C, L, M, or R. For the ending sequences, two amino acids out of the last five amino acids of the CDR3 of the Vδ2 are DK, LI, KL, TD, DT, PI, TA, TR, QL, SS, HI, TH, or PD. In some aspects, the preferred amino acids for the last three amino acids of the CDR3 of the Vδ2 are KLI.

[0039] CDRs of Human Vδ3

[0040] In one aspect, in the non-human animal with human or humanized γ/δ T cell, the peptide sequence of CDR1 from the human Vδ3 comprises a conserved amino acid sequence comprising TVYSNPD (SEQ ID No. 50806), or at least one T, one V, one Y, one S, one N, one P, or one D inside the CDR1 sequence. In other aspect, the CDR2 sequence of the non-human animal Vδ3 comprises GDNSR (SEQ ID No. 51035), or at least one G, one D, one N, one S, or one R. The peptide sequence of CDR3 from the human Vδ3 comprises a conserved starting sequence. The first two starting amino acid sequences of the CDR3 of Vδ3 are AF. In some aspects, the preferred amino acids for the first three amino acids of the CDR3 of the Vδ3 are AL, AS, AC, AY, AI, or AV. Further preferred amino acids for the first two amino acids are PF, TF, LF, GF, or GC.

[0041] CDRs of Human Vδ4

[0042] In one aspect, in the non-human animal with human or humanized γ/δ T cell, the peptide sequence of CDR1 from the human Vδ4 comprises a conserved amino acid sequence comprising TSDPSYG (SEQ ID No. 50807), or at least one S, one P, one G, one D, one Y, or one T inside the CDR1 sequence. In other aspect, the CDR2 sequence of the non-human animal Vδ4 comprises QGSYDQQN (SEQ ID No. 50808), or at least one Q, one G, one D, one Y, one N, or one S. In one aspect, in the non-human animal with human or humanized γ/δ T cells, the peptide sequence of CDR3 from the human Vδ4 comprises a conserved starting and ending sequence. For the starting sequences, the first three amino acids of the CDR3 of Vδ4 are AMR, ASP, AMS, AMT, AMG, AMI, AIR, AKR, ATR, EMR, VMR, PMR, and ALP. In one aspect, the preferred amino acids for the first three amino acids of the CDR3 of the Vδ4 are AMRE (SEQ ID No. 50809), where the fourth position can be any of G, C, D, V, N, A, L, V, T, or R. For the ending sequences, two amino acids out of the last five amino acids of the CDR3 of the Vδ4 are DK, LI, KL, TD, DT, PI, TA, TR, QL, PD, HI, KI, or SS. In some aspects, the preferred amino acids for the last four amino acids of the CDR3 of the Vδ4 are DKLI (SEQ ID No. 34084) or TRQM (SEQ ID No. 50810).

[0043] CDRs of Human Vδ6

[0044] In one aspect, in the non-human animal with human or humanized γ/δ T cell, the peptide sequence of CDR1 from the human Vδ6 comprises a conserved amino acid sequence comprising NTAFDY (SEQ ID No. 50811), or at least one N, one T, one A, one F, one D, or one T inside the CDR1 sequence. In other aspect, the CDR2 sequence of the non-human animal Vδ6 comprises IRPDVSE (SEQ ID No. 50812), or at least one I, one R, or one P, one D, one V, one S, or one E inside the CDR2 sequence. The peptide sequence of CDR3 from the human Vδ6 comprises a conserved starting and ending sequence. For the starting sequences, amino acids at the first and second position of the CDR3 of Vδ6 are AA. In some aspects, the preferred amino acids for the first three amino acids of the CDR3 of the Vδ6 are AAS or AAR. Further preferred amino acids for the first four amino acids are AASP, where the 4th position P can be any of T, G, M, V, L, or R. In some other aspects, the preferred amino acids for the first two amino acids of the CDR3 of the Vδ6 are QQ, EA, TA, QH, AV, SK, VA, ES, DA, SA, EG, or EP. For the ending sequences, two contiguous amino acids out of the last five amino acids of the CDR3 of the Vδ6 are DK, LI, KL, TD, DT, PI, TA, TR, PD, HI, HT, KI, or SS. In some aspects, the preferred amino acids for the last three amino acids of the CDR3 of the Vδ6 are TRQ, KLI, or KLN.

[0045] CDRs of Human Vγ9

[0046] In one aspect, the peptide sequence of CDR1 from the human Vγ9 comprises a conserved amino acid sequence comprising GITISATS (SEQ ID No. 50813), or at least one G, one A, one I, one T, or one S inside the CDR1 sequence. In other aspect, the CDR2 sequence of the non-human animal Vγ9 comprises ISYDGTV (SEQ ID No. 50814), or at least one I, one S, one Y, one G, one T, or one D. In one aspect, in the non-human animal with human or humanized γ/δ T cell, the peptide sequence of CDR3 from the human Vγ9 comprises a conserved starting and ending sequence. For the starting sequences, amino acids at the first four positions of the CDR3 of Vγ9 are ALWE (SEQ ID No. 50815), ALWG (SEQ ID No. 16756), ASWE (SEQ ID No. 50816), ALCE (SEQ ID No. 50817), ALLE (SEQ ID No. 50818), ALRE (SEQ ID No. 50819), PCGR (SEQ ID No. 50820), AWWE (SEQ ID No. 50821), DLWE (SEQ ID No. 50822), ASWE (SEQ ID No. 50816), or AMWE (SEQ ID No. 50823). In some aspects, the first five amino acids of the CDR3 of the Vγ9 are ALWEV (SEQ ID No. 42723), where the fifth position can be any of A, E, or M. In some aspects, in the starting sequence of ALWG (SEQ ID No. 16756), the fourth position can be any of D, V, R, or K. In further aspects, the first four amino acids of the CDR3 of the Vγ9 are TLWE (SEQ ID No. 50829), where the first position can be any of G, V, S, P, or A. In one aspect, the fourth position of CDR3 is an E. For the ending sequences, two contiguous amino acids out of the last five amino acids of the CDR3 of the Vγ9 are KK. In some aspects, the last two amino acids of the CDR3 of the Vγ9 are KTL, KEL, EKL, KNL, IKV, KSR, RNS, KNS, MKL, KRL, RKL, FKI, or KNQG (SEQ ID No. 50830).

[0047] CDRs of Human Vγ10

[0048] In one aspect, in the non-human animal with human or humanized γ/δ T cell, the peptide sequence of CDR1 from the human Vγ10 comprises a conserved amino acid sequence comprising STRFETDV (SEQ ID No. 50824), or at least one R, one F, one T, one E, one D, one V, or one S inside the CDR1 sequence. In other aspect, the CDR2 sequence of the non-human animal Vγ10 comprises IVSTKSAA (SEQ ID No. 50825), or at least one I, one S, one V, one K, one T, or one A. In some aspects, in the non-human animal with human or humanized γ/δ T cells, the peptide sequence of CDR3 from the human Vγ10 comprises a conserved starting and ending sequence. For the starting sequences, amino acids at the first three positions of the CDR3 of Vγ10 are AAW. In some aspects, the first four amino acids of the CDR3 of the Vγ10 are AAWF (SEQ ID No. 50826), where the fourth position can be any of F, L, A, R, G, C, or V. In some further aspects, the second position is an A and the first position can be any of S, Y, V, E, G, D, T, or P. In some aspects, the second position is an E and the first position can be any of S, D, or A. In some aspects, the first and second positions are PR or SS. In some aspects, the first position is an A, and the second position of any one of V, T, S, G, or E. In some aspects, the first two positions are any of VS, VF, or CE. For the ending sequences, in some aspects, the last three amino acids of the CDR3 of the Vγ10 are FKI. In one aspect, two contiguous amino acids out of the last three amino acids of the CDR3 of the Vγ10 are KK. In one aspect, the second to the last two amino acids of the CDR3 of the Vγ10 is a K. In other aspect, the last amino acid of the CDR3 of the Vγ10 is an I. In one aspect, the last amino acid of the CDR3 of the Vγ10 is an R. In other aspect, the second to the last two amino acids of the CDR3 of the V(γ) 10 is a T.

[0049] In one aspect, a method for making a nucleic acid sequence encoding a human γ/δ TCR variable domain that binds an antigen of interest includes: exposing a non-human animal as described herein to an antigen of interest or stimulating expression of internal antigen: and maintaining the non-human animal for developing a humanized γ/δ TCR to a particular antigen.

[0050] In some aspects, methods of introducing a foreign and/or endogenous antigen into the non-human γ/δ animal are provided. In one aspect, the antigen is from a biological and/or chemical source. In a further aspect, the antigen comprises a micro-organism or its extract (e. g. E. coli, Staphylococcus extracts), and mammalian organisms comprise mouse cancer (e. g. B16 melanoma) and/or human cancer (e. g. Daudi cells).

[0051] In further aspects, after said antigen has been introduced in the human γ/δ T cell mice, a particular population of human γ/δ T cells expanded.

[0052] In further aspects, the CDR3 sequences from before and after human γ/δ T cell expansion are sequenced and analyzed.

[0053] In one embodiment, the antigen-binding protein comprises a TCR variable domain comprising a human TCRγ and/or human TCRδ variable domain.

[0054] In one aspect, the use of a non-human as described herein is provided for making a non-human cell that expresses on its surface a humanized T cell receptor.

[0055] A genetically modified non-human animal, whose genome comprises: at least one unarranged human T cell receptor (TCR) Vδ gene segment, at least one unarranged human TCR Dδ gene segment, and at least one unarranged human TCR Jδ gene segment, wherein the at least one unarranged human TCR Vδ gene segment, the at least one unarranged human TCR Dδ gene segment, and the at least one unarranged human TCR Jδ gene segment are operably linked to a functional non-human TCRδ constant gene sequence.

[0056] The animal of the preceding embodiment, where the at least one unarranged human TCR Vδ gene segment, the at least one unarranged human TCR Dδ gene segment, and the at least one unarranged human TCR Jδ gene segment are inserted into the endogenous TCRδ variable gene locus.

[0057] The animal of any of the preceding embodiments where the at least one unarranged human TCR Vδ gene segment, the at least one unarranged human TCR Dδ gene segment, and the at least one un arranged human TCR Jδ gene segment, replace at least one gene segment of the repertoire of the unarranged endogenous TCR Vδ gene segments, and/or at least one gene segment of the repertoire of the unarranged endogenous TCR Dδ gene segments and/or at least one gene segment of the repertoire of the unarranged endogenous TCR Jδ gene segments.

[0058] The animal of any of the preceding embodiments where the at least one unarranged human TCR Vδ gene segment, the at least one unarranged human TCR Dδ gene segment, and the at least one unarranged human TCR Jδ gene segment, replace at least one nucleotide of one gene segment of the repertoire of the unarranged endogenous TCR Vδ gene segments, and/or at least one nucleotide of gene segment of the repertoire of the unarranged endogenous TCR Dδ gene segments and/or at least one nucleotide of one gene segment of the repertoire of the unarranged endogenous TCR Jδ gene segments.

[0059] The animal of any of the preceding embodiments where the animal is heterozygous for TCR δ.

[0060] The animal of any of the preceding embodiments where the at least one unarranged human TCR Vδ gene segment, the at least one unarranged human TCR Dδ gene segment, and the at least one unarranged human TCR Jδ gene segment replace the complete repertoire of unarranged endogenous TCR Vδ, Dδ and Jδ gene segments.

[0061] The animal of any of the preceding embodiments where the at least one unarranged human TCR Vδ gene segment is selected from the unarranged repertoire of the human TCR Vδ gene segments Vδ1, Vδ2, Vδ3, Vδ4, Vδ5, Vδ6, Vδ7, and Vδ8.

[0062] The animal of any of the preceding embodiments where the amino acid sequence of the at least one unarranged human TCR Vδ segment has a least 90% sequence identity with SEQ ID NO: 64, 65, 66, 67, 68, 69, 70, 71 and 72.

[0063] The animal of any of the preceding embodiments where the at least one unarranged human TCR Vδ gene segment, the at least one unarranged human TCR Dδ gene segment, and the at least one unarranged human TCR Jδ gene segment are capable of rearranging to form a rearranged human VDJ δ sequence.

[0064] The animal of any of the preceding embodiments where the animal expresses a humanized TCRδ variable region comprising the rearranged human VDJ δ sequence on the surface of a γδ T cell population.

[0065] A genetically modified non-human animal, whose genome the genome comprises: at least one unarranged human TCR Vγ gene segment and at least one human TCR Jγ gene segment, wherein the at least one unarranged human TCR Vγ gene segment and the at least one human TCR Jγ gene segment are operably linked to a functional non-human TCRγ constant gene.

[0066] The animal of the preceding embodiment where the at least one unarranged human TCR Vγ gene segment, and the at least one unarranged human TCR Jγ gene segment are inserted into the endogenous TCRγ variable gene locus.

[0067] The animal of any of the preceding embodiments where the at least one unarranged human TCR Vγ gene segment, and the at least one unarranged human TCR Jγ gene segment replace at least one gene segment of the repertoire of the unarranged endogenous TCR Vγ gene segments and/or at least one gene segment of the repertoire of the unarranged endogenous TCR Jγ gene segments.

[0068] The animal of any of the preceding embodiments where the at least one unarranged human TCR Vγ gene segment, and the at least one unarranged human TCR Jγ gene segment replace at least one nucleotide of one gene segment of the repertoire of the unarranged endogenous TCR Vγ gene segments and/or at least one nucleotide of one gene segment of the repertoire of the unarranged endogenous TCR Jγ gene segments.

[0069] The animal of any of the preceding embodiments where the at least one unarranged human TCR Vγ gene segment, and the at least one unarranged human TCR Jγ gene segment replace the complete repertoire of the unarranged endogenous TCR Vγ and Jγ gene segments.

[0070] The animal of any of the preceding embodiments where the animal is heterozygous for TCR γ.

[0071] The animal of any of the preceding embodiments where the at least one unarranged human TCR Vγ gene segment is selected from the unarranged repertoire of the human TCR Vγ gene segments Vγ2, Vγ3, Vγ4, Vγ5, Vγ8, Vγ9, Vγ10, and Vγ11, preferably Vγ9, Vγ10, and Vγ11.

[0072] The animal of any of the preceding embodiments where the amino acid sequence of at least one un arranged human TCR Vγ segment has at least 90% sequence identity with SEQ ID NO: 62, 63 or 64.

[0073] The animal of any of the preceding embodiments where the at least one unarranged human TCR Vγ gene segment, and the at least one unarranged human TCR Jγ gene segment are capable of rearranging to form a rearranged human VJ γ sequence.

[0074] The animal of any of the preceding embodiments where the animal expresses a humanized TCRγ variable region comprising the rearranged human VJ γ sequence on the surface of a γδ T cell population.

[0075] A genetically modified non-human animal, whose genome comprises: at least one unarranged human T cell receptor (TCR) Vδ gene segment, at least one unarranged human TCR Dδ gene segment, and at least one unarranged human TCR Jδ gene segment; and at least one unarranged human TCR Vγ gene segment and at least one human TCR Jγ gene segment, wherein the at least one unarranged human TCR Vδ gene segment, the at least one unarranged human TCR Do gene segment, and the at least one unarranged human TCR Jδ gene segment are operably linked to a functional non-human TCRδ constant gene, and wherein the at least one unarranged human TCR Vγ gene segment and the at least one human TCR Jγ gene segment are operably linked to a functional non-human TCRγ constant gene.

[0076] The animal of any of the preceding embodiments where the at least one unarranged human TCR Vδ gene segment, the at least one unarranged human TCR Dδ gene segment, and the at least one unarranged human TCR Jδ gene segment, replace at least one gene segment of the repertoire of the unarranged endogenous TCR Vδ gene segments, and/or at least one gene segment of the repertoire of the unarranged endogenous TCR Dδ gene segments and/or at least one gene segment of the repertoire of the unarranged endogenous TCR Jδ gene segments; and where the at least one unarranged human TCR Vγ gene segment, and the at least one unarranged human TCR Jγ gene segment replace at least one gene segment of the repertoire of the unarranged endogenous TCR Vγ gene segments and/or at least one gene segment of the repertoire of the unarranged endogenous TCR Jγ gene segments.

[0077] The animal of any of the preceding embodiments where the at least one unarranged human TCR Vδ gene segment, the at least one unarranged human TCR Dδ gene segment, and the at least one unarranged human TCR Jδ gene segment, replace at least one nucleotide of one gene segment of the repertoire of the unarranged endogenous TCR Vδ gene segments, and/or at least one nucleotide of one gene segment of the repertoire of the unarranged endogenous TCR Do gene segments and/or at least one nucleotide of one gene segment of the repertoire of the unarranged endogenous TCR Jδ gene segments; and where the at least one unarranged human TCR Vγ gene segment, and the at least one unarranged human TCR Jγ gene segment replace at least one nucleotide of one gene segment of the repertoire of the unarranged endogenous TCR Vγ gene segments and/or at least one nucleotide of one gene segment of the repertoire of the unarranged endogenous TCR Jγ gene segments.

[0078] The animal of any of the preceding embodiments where the at least one unarranged human TCR Vδ gene segment, the at least one unarranged human TCR Dδ gene segment, and the at least one unarranged human TCR Jδ gene segment are inserted into the endogenous TCRδ variable gene locus, and wherein the at least one unarranged human TCR Vγ gene segment, and the at least one unarranged human TCR Jγ gene segment are inserted into the endogenous TCRγ variable gene locus.

[0079] The animal of any of the preceding embodiments where the at least one unarranged human TCR Vδ gene segment, the at least one unarranged human TCR Dδ gene segment, and the at least one unarranged human TCR Jδ gene segment replace the complete repertoire of the unarranged endogenous TCR Vδ, Dδ and Jδ gene segments, and wherein the at least one unarranged human TCR Vγ gene segment, and the at least one unarranged human TCR. Jγ gene segment replace the complete repertoire of the unarranged endogenous TCR Vγ and Jγ gene segments.

[0080] The animal of any of the preceding embodiments where the at least one unarranged human TCR Vδ gene segment is selected from the unarranged repertoire of the human TCR Vδ gene segments Vδ1, Vδ2, Vδ3, Vδ4, Vδ5, Vδ6, Vδ7, and Vδ8, and wherein the at least one unarranged human TCR Vγ gene segment is selected from the unarranged repertoire of the human TCR Vγ gene segments Vγ2, Vγ3, Vγ4, Vγ5, Vγ8, Vγ9, Vγ10, and Vγ11.

[0081] The animal of any of the preceding embodiments where the at least one unarranged human TCR Vδ gene segment, the at least one unarranged human TCR Dδ gene segment, and the at least one unarranged human TCR Jδ gene segment are capable of rearranging to form a rearranged human VDJ δ sequence, and wherein the at least one unarranged human TCR Vγ gene segment, and the at least one unarranged human TCR Jγ gene segment are capable of rearranging to form a rearranged human VJγ sequence.

[0082] The animal of any of the preceding embodiments where the animal expresses a humanized TCRγδ comprising the rearranged human VDJ δ sequence and the rearranged human VJ γ sequence on the surface of a γδ T cell population.

[0083] The animal of any of the preceding embodiments where Vγ and Vδ have at least 90% sequence identity with human Vγ and Vδ.

[0084] The animal of any of the preceding embodiments where Dδ has at least 90% sequence identity with human Dδ.

[0085] The animal of any of the preceding embodiments where the Jγ and Jδ have at least 90% sequence identity with human Jγ and Jδ.

[0086] The animal of any of the preceding embodiments where the humanized TCR is expressed with at least one mouse CD3 on the surface of a γδ T cell population.

[0087] The animal of any of the preceding embodiments where the animal generates a population of central and effector memory γ/δ T cells to an internal or external antigen.

[0088] The animal of any of the preceding embodiments where the animal is heterozygous for TCRδ and/or TCRγ.

[0089] A method of producing a humanized TCR includes: administering an antigen of interest to the genetically modified animal of any of preceding embodiments; and obtaining a humanized TCR that recognizes said antigen of interest.

[0090] A method of determining and/or analyzing the TCR repertoire of the humanized TCR produced according to the preceding embodiment by next-generation sequencing.

[0091] A method of establishing cancer includes: administering a cancer cell to the genetically modified animal of any of the preceding embodiments, and determining cancer growth.

[0092] A method of establishing an infection includes: administering an antigen-derived pathogen to the genetically modified animal of any of the preceding embodiments; and determining the repertoire of TCR expansion by sequencing.

[0093] A method of making a genetically modified non-human animal, whose genome comprises: at least one unarranged human T cell receptor (TCR) Vδ gene segment, at least one unarranged human TCR Dδ gene segment, and at least one unarranged human TCR Jδ gene segment; and at least one unarranged human TCR Vγ gene segment and at least one human TCR Jγ gene segment, wherein the at least one unarranged human TCR Vδ gene segment, the at least one unarranged human TCR Dδ gene segment, and the at least one unarranged human TCR Jδ gene segment are operably linked to a functional non-human TCRδ constant gene, and wherein the at least one unarranged human TCR Vγ gene segment and the at least one human TCR Jγ gene segment are operably linked to a functional non-human TCRγ constant gene.

[0094] Unless otherwise defined, all technical and scientific terms used herein have the common meaning as understood by those skilled in the art. Unless otherwise defined, any of the aspects and embodiments herein can be used in conjunction with one other. Methods and materials are described herein for use in the present invention; other, suitable methods and materials known in the art can also be used. The materials, methods, and examples in the following detailed description are not restrictive of the invention as claimed. The accompanying figures are illustrative only and not intended to be limiting. In case of conflict, the present specification, including definitions, will govern.

### BRIEF DESCRIPTION OF THE DRAWINGS

[0095] FIG. 1 shows the strategy for replacing one of the mouse T cell γ locus with one of the human T cell γ locus. The representation in the figure is to the scale as shown by the scale bar on the left-bottom side of the figure. The top panel shows the general organization of endogenous mouse Vγ1, mouse Jγ4, mouse γ constant region C4, and the adjacent 5′ up-stream and 3′ down-stream mouse sequences on chromosome 13. The middle panel depicts the targeting vector used to replace the mousey region. The targeting vector has segments of a) 5′ up-stream mouse homology arm including 5′ UTR of mouse Vγ1, b) human Vγ9, human Vγ10, human Vγ11, human JγP1, human Jγ P, and human Jγ1; c) a selection cassette; d) 3′ down-stream mouse homology arm including mouse constant region C4 (from exon 1 to exon 4). The exons are represented by vertical bars. The bottom panel depicts the targeted event. The targeting vector with human sequence replaced mouse Vγ1 and mouse Jγ4 at the mouse endogenous locus on chromosome 13.

[0096] FIG. 2 shows the strategy for replacing part of the mouse T cell δ locus with part of the human T cell δ locus. The representation in the figure is to the scale as shown by the scale bar on the left-bottom side of the figure. The top panel shows the general organization of endogenous mouse Vδ4, mouse Dδ1, Dδ2, Jδ1, Jδ2, and mouse δ constant region C, and the adjacent 5′ up-stream and 3′ down-stream mouse sequences (including mouse Vδ5) on chromosome 14. The middle panel depicts the targeting vector used to replace the mouse δ region. The targeting vector has segments of a) 5′ up-stream mouse homology arm; b) human Vδ8 with a Vδ rabbit promoter 2; c) human Vδ7 with a Vδ rabbit promoter 1; d) human Vδ3 with a Vδ bovine promoter 1; e) human Vδ5 with its own human promoter; f) human Vδ4 with its own human promoter; g) human Vδ6 with its own human promoter; h) human Vδ1 with its own human promoter; i) human Vδ2 with its own human promoter; j) human Dδ1-3; k) human Jδ1-4; I) a selection cassette; m) 3′ down-stream mouse sequences including mouse δ C region (from exon 1 to exon 4). The exons are represented by vertical bars. The bottom panel depicts the targeted event. The targeting vector with human sequence replaced mouse Vδ4, mouse Dδ1, Dδ2, Jδ1, and Jδ2 at the mouse endogenous locus on chromosome 1.

[0097] FIG. 3 is a detailed illustration (not to scale) of a progressive strategy for putting together the human segments for the targeting vector. Human variable region gene segments are sequentially Added to a partially deleted human BAC, resulting in an additional 7 human Vδ on the original human Vδ2 locus.

[0098] FIG. 4 is the flow chart of humanized γδ T cells from the mouse spleen. In humanized γδ T cells mouse spleen, the majority of the γ/δ T cells are humanized Vδ1/humanized Vγ9 with an abundance of 61%, yet humanized Vδ2/humanized Vγ9 with an abundance of 7.6%.

[0099] FIG. 5 is the B16 melanoma cancer development in lungs of WT and humanized γδ T cells mice

[0100] FIG. 6 shows further humanization of mouse VγC1 region. Human Vγ1-8 was inserted in the region.

[0101] FIG. 7 shows the sequence of PCR product of human gamma TCR sequenced by the Sanger method

[0102] FIG. 8 shows the sequence of PCR product of human gamma TCR sequenced by the Sanger method

[0103] FIG. 9A-E provide the sequences of CDR3 of Bδ1-DV1

[0104] FIG. 10A-D provide the sequences of CDR3 of Vδ3-DV3

[0105] FIG. 11A-H provide the sequences of CDR3 of Vδ2-DV2

[0106] FIG. 12A-H provide the sequences of CDR3 of Vδ6-DVδ

[0107] FIG. 13A-L provide the sequences of CDR3 of Vδ4-DV4

[0108] FIG. 14A-B provide the sequences of CDR3 of Vγ9-G32G9

[0109] FIG. 15A-C provide the sequences of CDR3 of Vγ9-G33G9

[0110] FIG. 16A-G provide the sequences of CDR3 of Vγ10-G35G10

[0111] FIG. 17A-E provide the sequences of CDR3 of Vγ10-G37G10

[0112] FIG. 18A-J provide the sequences of CDR3 of Vγ10-G36G10

[0113] FIG. 19A-B provide the sequences of CDR3 of Vδ3-M4DV3

[0114] FIG. 20A-V provide the sequences of CDR3 of Vδ1M4DV1

[0115] FIG. 21A-B provide the sequences of CDR3 of Vδ3-M7DV3

[0116] FIG. 22A-K provide the sequences of CDR3 of Vδ6-M4DVδ

[0117] FIG. 23A-L provide the sequences of CDR3 of Vδ6-M7DVδ

[0118] FIG. 24A-U provide the sequences of CDR3 of Vδ1-M7DV1

### DETAILED DESCRIPTION

[0119] Some embodiments of the current invention are discussed in detail below and in the accompanying drawings. In describing embodiments, specific terminology is employed for the sake of clarity. However, the invention is not intended to be limited to the specific terminology so selected. The invention is also not intended to be limited to the embodiment depicted by the drawings. A person skilled in the relevant art will recognize that other equivalent components can be employed and other methods developed without departing from the broad concepts of the current invention. All references cited anywhere in this specification, including the Background and Detailed Description sections, are incorporated by reference as if each had been individually incorporated.

[0120] Definitions are included herein for the purpose of understanding the present subject matter and the appended patent claims and drawings. The abbreviations used herein have their conventional meanings within the chemical and biological arts.

[0121] While various embodiments and aspects of the present invention are shown and described herein, it will be obvious to those skilled in the art that such embodiments and aspects are provided by way of example only. Numerous variations, changes, and substitutions will occur to those skilled in the art without departing from the invention. It should be understood that various alternatives to the embodiments of the invention described herein may be employed in practicing the invention.

[0122] Unless defined otherwise, technical and scientific terms used herein have the same meaning as commonly understood by a person of ordinary skill in the art. See, e.g., Singleton et al., DICTIONARY OF MICROBIOLOGY AND MOLECULAR BIOLOGY 2nd ed., J. Wiley & Sons (New York, NY 1994); Sambrook et al., MOLECULAR CLONING, A LABORATORY MANUAL, Cold Springs Harbor Press (Cold Springs Harbor, N Y 1989). Any methods, devices, and materials similar or equivalent to those described herein can be used in the practice of this invention. The following definitions are provided to facilitate understanding of certain terms used frequently herein and are not meant to limit the scope of the present disclosure.

[0123] As used herein. “a,” “an,” or “the” can mean one or more than one. For example, “a” cell can mean a single cell or a multiplicity of cells.

[0124] As used herein, unless specifically indicated otherwise, the word “or” is used in the inclusive sense of “and/or” and not the exclusive sense of “either/or.”

[0125] As used herein with respect to recombinant proteins, the term “modification” means any insertion, deletion, or substitution of an amino acid residue in the recombinant sequence relative to a reference sequence (e.g., wild-type or a native sequence).

[0126] As used herein, the term “homologous recombination” or “HR” refers to the natural, cellular process in which a double-stranded DNA break is repaired using a homologous DNA sequence as the repair template (see, e.g., Cahill et al. (2006), From. Biosci. 11:1958-1976). The homologous DNA sequence may be an endogenous chromosomal sequence or an exogenous nucleic acid that was delivered to the cell.

[0127] The terms “recombinant DNA construct,” “recombinant construct,” “expression cassette,” “expression construct,” “chimeric construct,” “construct,” and “recombinant DNA fragment” are used interchangeably herein and are single or double-stranded polynucleotides. A recombinant construct comprises an artificial combination of single or double-stranded polynucleotides, including, without limitation, regulatory and coding sequences that are not found together in nature. For example, a recombinant DNA construct may comprise regulatory sequences and coding sequences that are derived from different sources, or regulatory sequences and coding sequences derived from the same source and arranged in a manner different than that found in nature. Such a construct may be used by itself or may be used in conjunction with a vector.

[0128] As used herein, the term “human TCR” or “humanized. TCR” refers to a partial or entire TCR that came from a human sequence.

[0129] The TCR CDR3 region was defined according to international ImMunoGeneTic (IMGT) nomenclature and a TCR numbering system. Likewise, gene names of V and J regions are designated according to the MGT nomenclature for T cell receptors of human or mouse.

[0130] This disclosure relates to genetically modified non-human animals with humanized γ and/or δ T cell receptors.

[0131] The term “transgenic and gene-targeted non-human animal,” when used to describe a genetically modified animal (e. g. mice or rat), one skilled in the art would understand that transgenic is achieved by foreign DNA sequence randomly integrated into any chromosome and gene-targeted is achieved by foreign DNA sequence integrated into a designed location of a particular chromosome. Non-human targeted animals may have better control of gene expression and protein translation. But transgenic non-human animals with the right sequence could also produce the correct protein. So adequate modification of the core targeting vector by adding or removing a few genetic segments could lead to a transgenic vector that could be randomly integrated into the non-human animal genome and achieves correct protein expression. One skilled in the art would understand DNA sequence works in gene targeting may also works in transgenic fashion.

[0132] The term “conservative” is used to describe an amino acid that can be substituted by another amino acid residue having a side chain R group with similar chemical properties (e.g, charge or hydrophobicity) without significantly changing the biological characters of the protein or peptides. Examples of groups of amino acids that have side chains with similar chemical properties include acidic side chains (e.g., aspartic acids, glutamic acid), basic side chains (e.g., lysine, arginine, histidine), uncharged polar side chains (e.g., asparagine, cysteine, glycine, glutamine, serine, threonine, tyrosine), nonpolar side chains (e.g., alanine, isoleucine, leucine, methionine, phenylalanine, proline, tryptophan, valine), aromatic side chains (e.g., histidine, phenylalanine, tyrosine, tryptophan) and beta-branched side chains (e.g., isoleucine, threonine, valine). Sequence similarity can be measured by if two sequences are identical or not identical but have similar physicochemical properties. The homology percentage, in many cases, is higher than the identity percentage. In some embodiments, alanine scanning mutagenesis can be used to substitute any native residue in a protein.

[0133] The term “conserved identical” refers to an amino acid having a similar bio-physical property with another amino acid and substituting an amino acid with a “conserved identical” amino acid will not cause detrimental change to the function of a protein, where the amino acid is in.

[0134] One skilled in the art would understand that the degeneracy of the genetic code may encode the polypeptides of the invention. The humanized γ/δ TCR poly peptides described by others may differ from those described herein.

[0135] Sequence Identity is the ratio of the number of identical amino acids between the 2 aligned sequences over the aligned length, expressed as a percentage. Two amino acid sequences have “100% amino acid sequence” which means amino acid residues of two amino acid sequences are identical and conserved identical when aligned for maximal correspondence. Sequence comparisons can be performed using standard software programs such as those included in the LASERGENE bioinformatics computing suite (DNASTAR. Madison, Wis.). Other methods for comparing two nucleotide or amino acid sequences by determining optimal alignment are well-known to those of skill in the art. (See, e.g., Peruski and Peruski, The Internet and the New Biology: Tools for Genomic and Molecular Research (ASM Press, Inc. 1997); Bishop (ed.), Guide to Human Genome Computing (2nd ed., Academic Press, Inc. 1998).) Two amino acid sequences are considered to have “substantial sequence similar or homology” if the two sequences have at least 80%, at least 85%, at least 90%, or at least 95% and above sequence identical relative to each other.

[0136] The term “C region” refers to a constant region of a γ/δ T cell receptor, commonly shared among all receptors. The constant region domain has separate gene segments for hinge, transmembrane, and cytoplasmic regions, which provide signal transduction after binding an antigen by the γ/δ T cell receptor.

[0137] The term “functional compatible C region” refers to a constant region coming from a specie that is different from the endogenous but retain the function fully or partially of proper signal transduction after binding an antigen by its γ/δ T cell receptor, including sequences that 70%, 75%, 80%, 85%, 90%, 95%, and 100% similar to the original C region of the specie.

[0138] The term “synthetical C region” refers to a sequence derived from simulation, substitution, and alternation to form a new C region that retains the function fully or partially of proper signal transduction after binding an antigen by its γ/δ T cell receptor, for example, substituting by a none-γ/δ C region (e.g., alpha/beta C region) or other receptor components.

[0139] In this invention the phrase “functional compatible C region” covers the term “synthetic C region” and vice versa.

[0140] A “polypeptide” or “polypeptide chain” is a polymer of amino acid residues joined by peptide bonds, that can be produced naturally or synthetically. A peptide commonly means a polypeptide of less than about 10 amino acid residues.

[0141] A “humanized γ/δ TCR” is mostly exchangeable with human γ/δ TCR in this invention of the non-human animal models, unless specifically indicated otherwise.

[0142] A “humanized γ/δ TCR” is a TCR comprising one or both of a humanized γ domain and a humanized δ domain constant region(s) need not be present, but if they are, they are entirely or substantially from human immunoglobulin constant regions.

[0143] This invention is related to an amino acid substituted by a conservative amino acid based on a functional human or humanized γ/δ CRD3. In some embodiments, conservative amino acid substitutions can be in the V region, D region, J region, C region, and CDR3 region. In some aspects, CDRs can come from non-human species, the CDRs herein can be engineered into human-like CDRs. In this regard, the identity of these CDRs in a human-like form is “substantially homology” with corresponding CDRs in human CDRs when at least 70%, at least 75%, at least 80%, at least 85%, at least 90%, at least 95% or 100% of corresponding residues (as defined by Kabat (or IMGT)) are identical between the respective CDRs including amino acids in their conserved group. In particular variations of a humanized TCRγ or TCRδ in which CDRs are substantially homology with human γ/δ TCR, the CDRs of the γ/δ TCR or δ TCR have no more than six (e.g., no more than five, no more than four, no more than three, no more than two, or nor more than one) amino acid substitutions (including conservative substitutions) across all three CDRs relative to the corresponding human γ/δ TCR. The framework sequences of humanized TCRγ or TCRδ variable region are “substantially homology” with a human framework sequence of at least about 80%, at least 85%, at least 90%, at least 95%, or 100% of corresponding residues defined by Kabat numbering convention. A sequence of a humanized γ/δ TCR constant region is homology with rodent (e.g., mouse) constant region when at least about 70%, at least 80%, at least 85%, at least 90%, at least 95%, or 100% of corresponding residues defined by Kabat numbering convention, including conserved amino acids.

[0144] All parts of a humanized γ/δ TCR, except the CDRs, are entirely or substantially from corresponding parts of natural human γ/δ TCR sequences.

[0145] Percentage sequence identities are determined with γ and/or δ sequences maximally aligned by the Kabat numbering convention. A subject TCR region (e.g., CDR1, CDR2, CDR3, or the entire variable domain of a γ/δ TCR) is being compared with the same region of a reference human TCRs, the percentage sequence identity between the subject and reference TCR regions is calculated by the number of positions occupied by the same amino acid in both the subject and reference TCR region divided by the total number of aligned positions of the two regions, with gaps not counted, multiplied by 100 to convert to percentage. In some aspects, the conserved amino acids (e.g., the same polar group, or the same non-polar group) may be considered identical or substitutable.

[0146] The term “homology” in reference to sequences (e.g., nucleotide or amino acid sequences) means two sequences which, upon comparison based on optimal alignment, are identical or substantially identical in at least about 75% of nucleotides or amino acids, at least about 80% of nucleotides or amino acids, at least about 90-95% nucleotides or amino acids (e.g, greater than 97% nucleotides or amino acids).

[0147] One skilled in the art would understand that gene targeting is based on homologous recombination occurring between the targeting construct and the targeted endogenous sequence through homology arms, two sequences on the targeting vector that are homologous to endogenous DNA sequences.

[0148] The term “operably linked” refers to at least two genetic or protein elements that are joined together in a manner that enables them to carry out their intended function. In this invention, portions of humanized protein may be operably linked to retaining proper folding, processing, transporting, expression, and other functional properties of the protein in the cell. Further, a nucleic acid sequence encoding a protein may be operably linked to DNA sequences (e.g., promoter, enhancer, silencer, insulator, etc.) to retain proper transcription.

[0149] The term “replacement” refers to a process comprised of placing exogenous genetic material at an endogenous gene locus, thereby all, a portion, or none of the endogenous genes are removed and an orthologous or homologous nucleic acid sequence is inserted where the endogenous gene is removed. In this invention, the endogenous non-human gene segment is replaced with a corresponding human gene segment. As demonstrated in the Examples below, nucleotide sequences of endogenous non-human TCR γ and δ variable gene loci were replaced by nucleotide sequences corresponding to human TCR γ and δ variable gene loci.

[0150] “Functional” as used herein, e.g., in reference to a functional protein, refers to a protein that retains at least one biological activity normally associated with the native protein, e.g., binding with antigen, regulating TCR on T cell surface, activate or de-activate down-stream signaling, inducing cell proliferation, infected cell recognition, and/or cancer cell recognition.

[0151] TCR γ/δ locus refers to the genomic DNA comprising the TCR γ/δ coding region including unrearranged V(D)J sequences, enhancer, silencer, insulator, constant domain sequence(s), and upstream or downstream (e.g., 5′ and 3′ UTR, regulatory regions, etc.), or intervening DNA sequence (e.g., introns, etc.), or RNA with regulatory functions. TCR variable locus (e.g., TCR γ variable gene locus or TCR δ variable gene locus), refers to genomic DNA comprising the region that includes TCR variable region segments (V(D)J region) but not includes TCR constant sequences. V region is not narrowly only V element of V(D)J region, instead, V region could mean all of V(D)J region in the following description.

[0152] As used herein, the term “chimeric protein” refers to a protein, where two or more portions of the protein are coming from different species. In this invention, a portion of the chimeric protein is of human origin.

[0153] V(D)J recombination refers to mechanisms that contribute to the diversity of γ/δ TCR in the vertebrate immune system. The mechanism requires cutting of the DNA boundaries (e.g., at V and J segments for TCRγ and DNA at V, D, and J segments for TCRδ) followed by rejoining of particular pairs of the resulting termini. The imprecision of the joining reaction contributes significantly to increasing the variability of the resulting functional genes. Signal sequences around V, D, and J segments may be diversified, yet still recognizable and processable by one of two or both nuclease RAG1 or/and RAG2, which cleaves the DNA at the border of the signal sequences.

[0154] In vivo and in vitro systems of human γ/δ T cells are provided, comprising humanized rodent cells, wherein the rodent cells express one or more humanized immune system molecules.

[0155] Unrearranged humanized γ/δ TCR rodent loci that encode humanized γ/δ TCR proteins are also provided. Non-human animals, e.g., rodents, comprising non-human cells that express humanized molecules that have a function in the cellular immune response are also provided.

[0156] Immune therapy is centered on identifying targets aberrantly expressed on the surface of infected or cancerous cells. So far, the majority of established and successful targets are proteins or peptides. Protein targets are suited for antibody intervention and peptide target are being recognized by MHC-dependent alpha-beta T cell receptors. As the newly discovered targets become scarce, a new type of non-protein, non-peptides targets are desirable for developing the next generation of immune therapy. As of growing interest in finding new categories of targets, γ/δ T cell receptors can bind to MHC-independent targets e.g., phospholipids, glycolipids, haptens, or small molecules (Willcox., Nat Immunol. (2019) 20:121-128), which αβ T cell receptors will not bind. γ/δ T cells and their receptors have been conserved for 450 million years among jawed vertebrates e.g., fish, mouse, and human. In humans, γ/δ T cell receptor is capable of binding to above mentioned MHC-independent antigens with a natural inclination to react against microbe-infected human cells and human malignant cells, but their molecular and biological interactions are largely unclear, partially because of a lack of human and human-like γ/δ T cell receptor animal model. Primates e.g., monkeys, chimpanzees do have human-like γ/δ T cells, but the availability and ethical issues limited their use in understanding human γ/δ T cell development, infection, and cancer intervention, ultimately γ/δ TCR based immune therapy.

[0157] γ/δ T cell receptor comprises a γ polypeptide chain and a δ polypeptide chain, which are bound together by a disulfide bridge. The γ chain comprises lead signal peptides, variable regions (Vγ regions and Jγ regions), a constant domain including a hinge domain, a transmembrane domain, and a cytoplasmic tail domain. The δ chain comprises its lead signal peptides, variable regions (Vδ regions, Dδ region, and Jδ regions), a constant domain including a hinge domain, a transmembrane domain, a cytoplasmic tail domain. 0.76 T cells use V(D)J gene rearrangement with the potential to generate a set of highly diverse receptors capable of recognizing antigens. This diversity is generated in regions of CDR1, CDR2, and CDR3, but mainly in complimentary determining region 3 (CDR3) of the T cell receptor (TCR) via combinatorial and functional diversity.

[0158] In humans, γ/δ T cells (including receptors) exist in many tissues e.g., blood, lung, liver, spleen, thymus, intestine, and reproductive tract. Four human γδ T-cell populations can be identified readily by the TCR Vδ expression (Vδ1, Vδ2, Vδ3, and Vδ5) (Zhao., J Transl Med (2018) 16(1)3). Vδ1, Vδ2, Vδ3, and Vγ2, Vγ3, Vγ4, Vγ5, Vγ8, Vγ9, and Vγ1.1 are the most frequently gene segments used in rearrangement of δ and γ chains, respectively (Adams., Cell Immunol (2015) 296(1):31-40). In addition, four subsets of γδ T-cells were detected (Vδ4, Vδ6, Vδ7, and Vδ8) in the peripheral blood of patients with B-cell non-Hodgkin lymphoma indicating their possible involvement of the developing human non-Hodgkin lymphoma. γδ T-cells expressing Vδ1 or Vδ3 TCR chain can be paired with various Vγ chains (Thedrez., Immunol Rev (2007) 215:123-35) and they are predominant in epithelial tissues of skin, lungs, intestine, and reproductive tract (Carding., Nat Rev Immunol (2002) 2(5):336-45), liver, spleen, and thymus (Bonneville., Nat Rev Immunol (2010) 10(7):467-78). In humans, most peripheral bloody T-cells express the Vδ2 TCR chain paired with the Vγ9 chain (Braza., Haematologica (2011) 96(3):400-7).

[0159] In wild-type mice, the TCRγ locus spans 205 kb and consists of four clusters of variable elements, one joining element, and one constant element. Cluster one contains Vγ4-7, Jγ1, and Cγ1. Cluster two contains Vγ3, Jγ3, and Cγ3. Cluster three contains Vγ2, Jγ2, and Cγ2. Cluster four contains Vγ1, Jγ4, and Cγ4 according to IMGT annotation (www.igmt.org). The Cγ4 gene is distinguished from the other Cγ genes in that it has an additional hinge-encoding exon. Enhancer elements are located downstream from the Cγ genes responsible for the regulation of the mouse γ TCR production.

[0160] In contrast, the human 7 locus spans 175 kb and consists of only one cluster of genes and gene segments on chromosome 7. Within the cluster, it has a stretch of Vγ1-11 and two sets of Jγs and Cγs elements downstream. Set one contains JPγ1, JPγ, Jγ1, and Cγ1 constant region and set two contains JPγ2, Jγ2, and Cγ2 constant region according to IMGT annotation. Enhancer elements are located downstream from the Cγ1 and Cγ2 genes responsible for the regulation of the human γ TCR production.

[0161] Very different from the γ locus, both mouse and human δ locus are located inside the α TCR locus, but have their own Vδ, Dδ, Jδ regions, their own Cδ region, and downstream enhancers, which are solely responsible for the regulation of δ TCR production. In the maturation process of αβ T cells, γ/δ locus will be completely deleted, so there is no γ/δ TCR in mature αβ T cells.

[0162] In wild-type mice, δ locus spans 2100 kb and consists of Vδ1-9 variable elements, two D elements (Dδ1 and Dδ2), two joining elements (Jδ1 and Jδ2), one constant element, and enhancers located on mouse chromosome 14 according to IMGT annotation.

[0163] The human δ locus has a similar structure to the mouse but has more Ds and Js. Human δ locus spans 1000 kb and consists of Vδ1-8 variable elements, three D elements (Dδ1, Dδ2, and Dδ3), four joining elements (Jδ1, Jδ2, Jδ3, and Jδ4), and one constant element (C6), and enhancers located on human chromosome 14 according to IMGT annotation.

[0164] γδ TCR complex is comprised of γδ TCR and various CD3 chains following the stoichiometry: TCRγδCD3δ2γδζ2 in humans and TCRγδCD3δ2γ2ζ2 in mice (Siegers., J Exp Med (2007) 204:2537-44). Through its constant region, γ/δ T cell receptor interacts with a variety of signaling proteins to initiate the phosphorylation of immunoreceptor tyrosine-based activation motifs (ITAMS) in the CD3 cytoplasmic domains by the Src-family kinases (SFKs) Lck and Fyn (Kuhns., Immunol Rev (2012) 250:120-43), which leads to recruitment, phosphorylation, and activation of Zap70 that facilitates phosphorylation of the scaffolding proteins SLY-76 and LAT. These cascade events lead to the formation of a supramolecular signalosome that recruits the phospholipase PLCγ1, resulting in the propagation of downstream signaling events (Smith-Garvin., Annu Rev Immunol (2009) 27:591-619). Unlike αβ T-cells, γ/δ T cell TCR complex is CD4 and CD8 co-receptor independent (Kuhns., Immunol Rev (2012) 250:120-43) and the development of γ/δ T cells are not blocked by the mutations on the binding site of PLCγ1 on LAT. In contrary, αβ T-cells, mutations on the binding site of PLCγ1 on LAT resulted in a severe block in murine αβ thymocyte development (Hayes., Immunol Rev (2003) 191:28-37 and Sullivan., J Immunol (2014) 192:2865-74), indicating the C region of γ/δ and αβ are quite different, indicating γ/δ t cell receptor C region plays a unique and dedicated role in the γ/δ t cell associated cascade signaling.

[0165] The present invention provides a genetically modified non-human animal (e.g., rodents, e.g., mice, rats) including in its genome an unrearranged human or humanized γ TCR locus which further comprises human Vγ and Jγ gene segments.

[0166] The present invention also provides genetically modified non-human animals (e.g., rodents, e.g., mice, rats) comprising in its genome an unrearranged human or humanized δTCR locus which further comprises human Vδ, Dδ, and Jδ gene segments.

[0167] The present invention further provides genetically modified non-human animals (e.g, rodents, e.g., mice, rats) comprising in its genome unrearranged human or humanized γ/δTCR locus which further comprises human Vγ, Jγ, Vδ, Dδ, and Jδ gene segments.

[0168] Upon enzymatic reaction (e.g., Rag1, Rag2, or other suitable recombinases), the unrearranged human or humanized γ/δ TCR is capable of rearranging to create a nucleotide sequence that encodes a γ/δ TCR protein sequence comprising a V region, a D region (only for δ), and a J region and a non-human Cγ and δ region. The generated γ/δ TCR comprises variable CDR1, CDR2, and CDR3. The present invention also provides that the non-human animal is capable of generating a diverse repertoire of human or humanized γ/δ TCRs before and after antigen stimulation, including but not limited to (e.g., E. coli, Staphylococcus extract).

[0169] In one embodiment, the DNA fragment of human Vγ and Jγ replaced endogenous non-human Vγ and Jγ at its endogenous Vγ and Jγ locus to generate a humanized γ TCR locus capable of producing humanized γ TCR with a non-human Cγ region. In other embodiment, the non-human Cγ region can be derived from a different non-human Cγ region other than the endogenous Cγ region, provided that these Cγ regions are functionally compatible, for example, including but not limited to replacing an endogenous Cγ region (a rat) with a rabbit Cγ region, replacing an endogenous Cγ region (a mouse) with a primate Cγ region without significantly hindering the function of γ TCR signaling.

[0170] In another embodiment, DNA fragment comprising human Vγ, Jγ, and non-human Cγ region is at a site in the genome other than the endogenous non-human γ TCR locus. The resulting non-human animal is a form of transgene. The non-human Cγ region can come from a functionally compatible Cγ region, not limited to, e.g., primates, rabbits, cows, mice, rats, a mix of different non-human, or a synthetic Cγ region.

[0171] In one embodiment, the invention provides a genetically modified non-human animal (e.g., rodent, e.g., rat or mouse) comprises in the germline of the non-human animal the human or humanized unrearranged Vγ and Jγ operably linked to a compatible Cγ region at an endogenous non-human TCR γ locus. The non-human animal comprises a single copy of the human or humanized unrearranged Vγ and Jγ. In some embodiments, the non-human animal comprises two copies of the human or humanized unrearranged Vγ and Jγ. In some embodiments, the non-human animal is a heterozygous or homozygous of the human or humanized unrearranged Vγ and Jγ.

[0172] In one embodiment, the human or humanized unrearranged Vγ and Jγ replaces the corresponding endogenous V and J region of non-human animals. In some embodiments, the human or humanized unrearranged Vγ and Jγ inserts, but does not replace the corresponding endogenous V and J region of non-human animals.

[0173] In one embodiment, the genetically modified non-human animal (e.g., rodent, e.g., rat or mouse) comprises a further genetically modified genome comprising removed Vγ of non-human and/or Jγ of non-human regions partially or fully. In other embodiment, the non-human animal is incapable of rearranging endogenous Vγ and/or Jγ but capable of rearranging human or humanized unrearranged Vγ and Jγ.

[0174] In some embodiments, the Vγ of the genetically modified non-human animal (e.g., rodent, e.g., rat or mouse) comprises a promoter that is from the endogenous animal Vγ. In other embodiment, the Vγ of the genetically modified non-human animal (e.g., rodent, e.g., rat or mouse) comprises a promoter that is from a Vγ promoter derived from a non-human animal other than the endogenous animal.

[0175] Similar to γ TCR, at the TCR δ TCR locus, in one embodiment, the DNA fragment of human V δ, Dδ, and Jδ replaced endogenous non-human V δ, Dδ, and Jδ at the endogenous V δ, Dδ, and Jδ locus to generate a humanized δ TCR locus with the capability of producing humanized δ TCR with a non-human Cδ region. In other embodiment, the non-human Cδ region can be derived from a different non-human Cδ region other than the endogenous C region, provided that these Cδ regions are functionally compatible, for example, including but not limited to replacing an endogenous Cδ region (a rat) with a rabbit Cδ region, replacing an endogenous Cδ region (a mouse) with a primate Cδ region without significantly compromising the function of δ TCR signaling.

[0176] In another embodiment, DNA fragment comprising human V δ, Dδ, Jδ, and non-human Cδ region is at a site in the genome other than the endogenous non-human TCR δ locus. The resulting non-human animal is transgenic. The non-human Cδ region can come from a functionally compatible Cδ region, not limited to, e.g., primates, rabbits, cows, mice, rats, a mix of different non-humans, or a synthetic Cδ region.

[0177] In some embodiments, the invention provides a genetically modified non-human animal (e.g., rodent, e.g., rat or mouse) comprises in the germline of the non-human animal, in which the human or humanized unrearranged Vδ, Dδ and Jδ, operably linked to a compatible Cδ region at an endogenous non-human TCR δ locus. The non-human animal comprises a single copy of the human or humanized unrearranged Vδ, Dδ, and Jδ. In some embodiments, the non-human animal comprises two copies of the human or humanized unrearranged Vδ, Dδ, and Jδ. In some embodiments, the non-human animal is a heterozygous or homozygous of the human or humanized unrearranged Vδ, Dδ, and Jδ.

[0178] In one embodiment, the human or humanized unrearranged Vδ, Dδ, and Jδ replace the corresponding endogenous Vδ, Dδ, and Jδ region of non-human animals. In some embodiments, the human or humanized unrearranged Vδ, Dδ, and Jδ inserts, but does not, or partially, replace the corresponding endogenous Vδ, Dδ, and Jδ region of non-human animals.

[0179] In one embodiment, the genetically modified non-human animal (e.g., rodent, e.g., rat or mouse) comprises a further genetically modified genome comprising removed Vδ, Dδ, and/or δ of non-human regions partially or fully. In some embodiments, the non-human animal is incapable of rearranging endogenous Vδ, Dδ, and/or Jδ but capable of rearranging human or humanized unrearranged Vδ, Dδ, and Jδ.

[0180] In one embodiment, the genetically modified non-human animal (e.g., rodent, e.g., rat or mouse) comprises a contiguous human sequence comprising human Vδ, Dδ, and Jδ. In some embodiments, the genetically modified non-human animal (e.g., rodent, e.g., rat or mouse) comprises a gene segment of the human sequence comprising human Vδ, Dδ, and Jδ. In some embodiments, the genetically modified non-human animal (e.g., rodent, e.g., rat or mouse) comprises a mix of small fragments comprising human Vδ in an order that is not naturally present in human V δ locus. In some embodiments, the Vδ of the genetically modified non-human animal (e.g., rodent, e.g., rat or mouse) comprises a promoter that is from the endogenous animal Vδ. In other embodiment, the Vδ of the genetically modified non-human animal (e.g., rodent, e.g., rat or mouse) comprises a promoter that is derived from a non-human animal other than the endogenous animal Vδ promoter.

[0181] In one embodiment, the genetically modified non-human animal (e.g., rodent, e.g., rat or mouse) comprises an inverted human Vδ, which is in the opposite direction as the endogenous C. In further embodiment, the inverted human Vδ is genetically modified to locate in the same direction as the endogenous Cδ.

[0182] In one embodiment, the genetically modified non-human animal (e.g., rodent, e.g., rat or mouse) comprises unrearranged human TCR γ (e.g., human Vγ and Jγ) with endogenous Cγ region or functionally compatible Cγ region and TCR δ (e.g., human Vδ, Dδ, and Jδ) with endogenous C region or functionally compatible C δ region. The human TCR γ and TCR δ are located at their corresponding TCR γ and TCR δ loci of the non-human animal. In some embodiments, the non-human animal is capable to rearrange the human Vγ and Vδ with its Ds, or Js to generate γ/δ TCR repertoires before and after antigen stimulation, including but not limited to e.g., E. coli and staphylococcus extract).

[0183] In one embodiment, the genetically modified non-human animal (e.g., rodent, e.g., rat or mouse) comprises unrearranged human TCR γ (e.g., human Vγ and Jγ) with endogenous C region or functionally compatible C region and TCR δ (e.g., human Vδ, Dδ, and Jδ) with endogenous C region or functionally compatible Cδ region. The human TCR γ and TCR δ are not located at their corresponding TCR γ and TCR δ loci of the non-human animal as transgenes. In some embodiments, the non-human animal is capable to rearrange the human V γ and Vδ with its Ds, or Js to generate γ/δ TCR repertoires before and after antigen stimulation, including but not limited to e.g., E. coli and staphylococcus extract). The non-human animal with human TCR γ and TCR δ can be double homozygous, one homozygous/one heterozygous, and both heterozygous.

[0184] In one embodiment, the genetically modified non-human animal (e.g., rodent, e.g., rat or mouse) comprises a genetic modification in the γ, and/or δ TCR locus.

[0185] In some embodiments, in the genetically modified non-human animal (e.g., rodent, e.g., rat or mouse), human Vγ and/or Vδ can have opposite orientations of Cγ and/or C6.

[0186] In some embodiments, in the genetically modified non-human animal (e.g., rodent, e.g., rat or mouse), the sequence between two human Vγ and/or Vδ can be shortened and in some embodiments, the sequence between two Vγ and/or Vδ can be lengthened.

[0187] In some embodiments, the natural order of human V γ and/or V δ in their locus (e.g., going towards the human Cδ region, following the order of Vδ4, Vδ1, Vδ5, Vδ7, Vδ8, Vδ3) can be followed. In some embodiments, the natural order of human Vγ and/or Vδ in their locus (e.g., the order of Vδ4, Vδ1, Vδ5, Vδ7, Vδ8, Vδ3) are not followed. Thus, a new order of human V γ and/or V δ is created, e.g., including but not limited to Vδ7, Vδ8, Vδ5, Vδ4, Vδ3, Vδ1, and Vδ2.

[0188] In some embodiments, the genetically modified non-human animal (e.g., rodent, e.g., rat or mouse) comprises as many as human Vγ and/or δ as in the human γ/δ TCR locus. In some embodiments, the genetically modified non-human animal (e.g., rodent, e.g., rat or mouse) can have more than in the human, e.g., including but not limited to, by duplication of Vγ and/or δ.

[0189] In some embodiments, the introduced sequences of Vγ and Jγ, and/or, Vδ, Dδ, and Jδ are highly homology to human Vγ and Jγ, and/or, Vδ, Dδ, and Jδ (e.g., at least 70%, 71%, 72%, 73%, 74%, 75%, 80%, 85%, 90%, 96%, 97%, 98%, or 99% identical to the amino acid sequence of human Vγ and Jγ and/or Vδ, Dδ, and Jδ including conserved amino acids described in the definition.

[0190] In some embodiments, the genetically modified non-human animal (e.g., rodent, e.g., rat or mouse) comprises less human Vγ and/or δ as in the human V γ/δ locus.

[0191] In some embodiments, the genetically modified non-human animal (e.g., rodent, e.g., rat or mouse) comprises at least one human Vγ and/or Jγ.

[0192] In some embodiments, the genetically modified non-human animal (e.g., rodent, e.g., rat or mouse) comprises at least one human Vγ and/or Jγ operably linked to a non-human Cγ region.

[0193] In some other embodiments, the genetically modified non-human animal (e.g., rodent, e.g., rat or mouse) comprises at least one human Vδ, Dδ, and/or Jδ.

[0194] In some other embodiments, the genetically modified non-human animal (e.g., rodent, e.g., rat or mouse) comprises at least one human Vδ, Dδ, and/or Jδ operably linked to a non-human Cδ region.

[0195] In some embodiments, in the genetically modified non-human animal (e.g., rodent, e.g., rat or mouse), as known to the skill of the art, the Vγ and/or δ pseudogene e.g., including but not limited to human Vγ5P, human Vγ6, human Vγ7, or human Vγ11 can turn into a mature protein by substituting the stop codon with a non-stop codon.

[0196] In some embodiments, in the genome of the genetically modified non-human animal (e.g., rodent, e.g., rat or mouse), endogenous Vγ and/or δ may be removed, as known to the skill of the art.

[0197] In some embodiments, in the genetically modified non-human animal (e.g., rodent, e.g., rat or mouse), human or humanized γ/δ TCR locus may comprise about 10%, about 20%, about 30%, about 40%, about 50%, about 60%, about 70%, about 80%, about 90%, about 95%, or 100% of human Vγ and/or V.

[0198] In one embodiment, the genetically modified non-human animal (e.g., rodent, e.g., rat or mouse) comprises a contiguous human sequence of human Vγ9, human Vγ10, human Vγ11, human JPγ1, human JPγ, and human Jγ1. In other embodiment, the genetically modified non-human animal (e.g., rodent, e.g., rat or mouse) comprises a non-contiguous human sequence of Vγ9, human Vγ10, human Vγ11, human JPγ1, human JPγ, and human Jγ1 and operably linked to an endogenous Cγ 4 region.

[0199] In one embodiment, the genetically modified non-human animal (e.g., rodent, e.g., rat or mouse) comprises a contiguous human sequence of human Vδ8 with a Vδ rabbit promoter 2, human Vδ1 with a Vδ rabbit promoter, human Vδ3 with a Vδ bovine promoter 1, human Vδ5 with its human promoter, human Vδ4 with its human promoter, a contiguous human sequence of human Vδ6 and Vδ1, a contiguous human sequence of human Vδ2, human Dδ, and human Jδ1-4.

[0200] In one embodiment, the genetically modified non-human animal (e.g., rodent, e.g., rat or mouse) comprises a contiguous human sequence of human Vδ8 with a Vδ rabbit promoter 2, human Vδ1 with a Vδ rabbit promoter, human Vδ3 with a Vδ bovine promoter 1, human Vδ5 with its native human promoter, human Vδ4 with its native human promoter, a contiguous human sequence of human Vδ6 and Vδ1, a contiguous human sequence of human Vδ2, human Dδ, human Jδ1-4 and operably linked to an endogenous Cδ region. In one aspect, the human Vδ3 is engineered to be located in the same direction as the endogenous Cδ region.

[0201] In some embodiments, the genetically modified non-human animal (e.g., rodent, e.g., rat or mouse) comprises a repertoire of human TCR γ variable segments. The genetically modified non-human animal (e.g., rodent, e.g., rat or mouse) is capable of using enzymatic activity, e.g., including but not limited to Rag1, and/or Rag2, and/or other suitable enzymatic activity, to remove the DNA sequence between Vγ and Jγ and also remove (similar to splicing) the DNA sequence between Jγ and endogenous Cγ region to generate a TCR coding repertoire. In one aspect, the order of removing DNA sequence between segments can remove sequence between Jγ and endogenous Cγ region prior to removing sequence between V γ and Jγ. In other aspect, the endogenous Cγ region can be replaced by a functionally compatible Cγ derived from a non-endogenous source other than from the non-human animal.

[0202] In similar embodiments, the genetically modified non-human animal (e.g., rodent e.g., rat or mouse) comprises a repertoire of human TCR δ variable segments. The genetically modified non-human animal (e.g., rodent, e.g., rat or mouse) is capable of using enzymatic activity, e.g., including but not limited to Rag1, and/or Rag2, and/or other suitable enzymatic activity, to remove the DNA sequence between Vδ, Dδ, and Jδ and also remove the DNA sequence between Jδ and endogenous Cδ region to generate a TCR coding repertoire. In one aspect, the order of removing DNA sequence between segments can vary, e.g., remove sequence between Jδ and endogenous C region prior to removing sequence between Vδ and D. In other aspect, the endogenous Cδ region can be replaced by a functionally compatible Cδ derived from a non-endogenous source other than from the non-human animal.

[0203] In some embodiments, in a cell of a genetically modified non-human animal (e.g, rodent, e.g., rat or mouse), the endogenous γ/δ T cell expressed human or humanized γ/δ T cell receptor on its surface.

[0204] In some embodiments, the antigen can be introduced into the genetically modified non-human animal (e.g., rodent, e.g., rat or mouse) through various routes, including but not limited to e.g., injection, spraying, skin absorption and grafting, eye dropping, or grafting. In some embodiments, antigens can be from various sources, including but not limited to e.g., a single or mixture of lipid, pyrophosphate, protein, sugar, or man-made molecules or materials. In some embodiments, the antigen can be a living or non-living form. In some embodiments, the antigen can be a virus. In some embodiments, the antigen can be on the surface or inside of an object, including but not limited to e.g., an oil or lipid drop, a liposome, a virus, a cell, including but not limited to e.g., a prokaryotic cell, a eukaryotic cell, a bacteria, a yeast, or fungi. In some embodiments, the antigen can be an infected or non-infected cell. In some embodiments, the antigen can be a cancerous or non-cancerous cell. In some embodiments, the antigen can be a DNA or RNA.

[0205] CDRs of Human Vδ1

[0206] According to IgBlast TCR CDR3 calculation (https://www.ncbi.nlm.nih.gov/igblast/) (Ye et al., “IgBLAST an immunoglobulin variable domain sequence analysis tool,” Nucleic Acids Research 41 (Web Server issue):W34-W40, 2013), in some aspects, in the non-human animal with human or humanized γ/δ T cell, the peptide sequence of CDR1 from the human Vδ1 comprises a conserved amino acid sequence comprising TSWWSYY (SEQ ID No. 50804), or at least one S, one W, one Y, or one T inside the CDR1 sequence. Mother aspect, the CDR2 sequence of the non-human animal Vδ1 comprises QGS, or at least one Q, one G, or one S.

[0207] According to the IgBlast TCR CDR3 calculation (https://www.ncbi.nlm.nih.gov/igblast/), in one aspect, in the non-human animal with human or humanized γ/δ T cell, the peptide sequence of CDR3 from the human Vδ1 comprises a conserved starting and ending sequence. For the starting sequences, amino acids at the second and third position of the CDR3 of Vδ1 are L and G, respectively. In other aspect, the preferred amino acids for the first three amino acids of the CDR3 of the Vδ1 are ALG. A further preferred aminoacids for the first four amino acids are ALGE (SEQ ID No. 5398), where position E can be any of G, A, D, V, E, or R. For the ending sequences, two amino acids out of the last five amino acids of the CDR3 of the Vδ1 are DK, LI, KL, TD, DT, PI, TA, TR, QL, or WD. In some aspects, the preferred amino acids for the last three amino acids of the CDR3 of the Vδ1 are KLI.

[0208] CDRs of Human Vδ2

[0209] According to the IgBlast TCR CDR3 calculation (https://www.ncbi.nlm.nih.gov/igblast/), in one aspect, in the non-human animal with human or humanized γ/δ T cell, the peptide sequence of CDR1 from the human Vδ2 comprises a conserved amino acid sequence comprising GEAIGNYY (SEQ ID No. 50805), or at least one G, one E, one A, one I, one N, one Y inside the CDR1 sequence. In other aspect, the CDR2 sequence of the non-human animal Vδ2 comprises EKD, or at least one E, one K, or one D.

[0210] According to the IgBlast TCR CDR3 calculation (https://www.ncbi.nlm.nih.gov/igblast/), in one aspect, in the non-human animal with human or humanized γ/δ T cell, the peptide sequence of CDR3 from the human Vδ2 comprises a conserved starting and ending sequence. For the starting sequences, amino acids at the first three positions of the CDR3 of Vδ2 are ACD, ACG, ACE, ARD, or ASD. In some aspects, the first two amino acids of the CDR3 of the Vδ2 are AW, PV, or DC. A further preferred amino acids for the first four amino acids are ACDS (SEQ ID No. 51034), where the fourth position can be any of T, K, I, P, Y, C, L, M, or R. For the ending sequences, two amino acids out of the last five amino acids of the CDR3 of the Vδ2 are DK, LI, KL, TD, DT, PI, TA, TR, QL, SS, HI, TH, or PD. In some aspects, the preferred amino acids for the last three amino acids of the CDR3 of the Vδ2 are KLI.

[0211] CDRs of Human Vδ3

[0212] According to the IgBlast TCR. CDR3 calculation (https://www.ncbi.nlm.nih.gov/igblast/), in one aspect, in the non-human animal with human or humanized γ/δ T cell, the peptide sequence of CDR1 from the human Vδ3 comprises a conserved amino acid sequence comprising TVYSNPD (SEQ ID No. 50806), or at least one T, one V, one Y, one S, one N, one P, or one D inside the CDR1 sequence. In other aspect, the CDR2 sequence of the non-human animal V (δ)3 comprises GDNSR, or at least one G, one D, one N, one S, or one R.

[0213] According to the IgBlast TCR CDR3 calculation (https://www.ncbi.nlm.nih.gov/igblast/), in one aspect, in the non-human animal with human or humanized γ/δ T cell, the peptide sequence of CDR3 from the human Vδ3 comprises a conserved starting sequence. The first two starting amino acid sequences of the CDR3 of Vδ3 are AF. In some aspects, the preferred amino acids for the first three amino acids of the CDR3 of the Vδ3 are AT, AS, AC, AY, AI, or AV. A further preferred amino acids for the first two amino acids are PF, TF, LF, GF, or GC.

[0214] CDRs of Human Vδ4

[0215] According to the IgBlast TCR CDR3 calculation (https://www.ncbi.nlm.nih.gov/igblast/), in one aspect, in the non-human animal with human or humanized γ/δ T cell, the peptide sequence of CDR1 from the human Vδ4 comprises a conserved amino acid sequence comprising TSDPSYG (SEQ ID No. 50807), or at least one S, one P, one G, one D, one Y, or one T inside the CDR1 sequence. In other aspect, the CDR2 sequence of the non-human animal Vδ4 comprises QGSYDQQN (SEQ ID No. 50808), or at least one Q, one G, one D, one Y, one N, or one S.

[0216] According to the IgBlast TCR CDR3 calculation (https://www.ncbi.nlm.nih.gov/igblast/), in one aspect, in the non-human animal with human or humanized γ/δ T cell, the peptide sequence of CDR3 from the human Vδ4 comprises a conserved starting and ending sequence. For the starting sequences, the first three amino acids of the CDR3 of Vδ4 are AMR, ASP, AMS, AMT, AMG, AMI, AIR, AKR, ATR, EMR, VMR, PMR, and ALP. In one aspect, the preferred amino acids for the first three amino acids of the CDR3 of the Vδ1 are AMRE (SEQ ID No. 50809), where the fourth position can be any of G, C, D, V, N, A, L, V, T, or R. For the ending sequences, two amino acids out of the last five amino acids of the CDR3 of the Vδ4 are DK, LI, KL, TD, DT, PI, TA, TR, QL, PD, HI, KI, or SS. In some aspects, the preferred amino acids for the last four amino acids of the CDR3 of the Vδ4 are DKLI (SEQ ID No. 34084) or TRQM (SEQ ID No. 50810).

[0217] CDRs of Human Vδ6

[0218] According to the IgBlast TCR CDR3 calculation (https://www.ncbi.nlm.nih.gov/igblast/), in one aspect, in the non-human animal with human or humanized γ/δ T cell, the peptide sequence of CDR1 from the human Vδ6 comprises a conserved amino acid sequence comprising NTAFDY (SEQ ID No. 50811), or at least one N, one T, one A, one F, one D, or one T inside the CDR1 sequence. In other aspect, the CDR2 sequence of the non-human animal Vδ6 comprises IRPDVSE (SEQ ID No. 50812), or at least one I, one R, or one P, one D, one V, one S, or one E inside the CDR2 sequence.

[0219] According to the IgBlast TCR CDR3 calculation (https://www.ncbi.nlm.nih.gov/igblast/), in one aspect, in the non-human animal with human or humanized γ/δ T cell, the peptide sequence of CDR3 from the human Vδ6 comprises a conserved starting and ending sequence. For the starting sequences, amino acids at the first and second position of the CDR3 of Vδ6 are AA. In some aspects, the preferred amino acids for the first three amino acids of the CDR3 of the Vδ6 are AAS or AAR. A further preferred amino acids for the first four amino acids are AASP (SEQ ID No. 50827), where the 4th position P can be any of T, G, M, V, L, or R. In some other aspects, the preferred amino acids for the first two amino acids of the CDR3 of the Vδ6 are QQ, EA, TA, QH, AV, SK, VA, ES, DA, SA, EG, or EP. For the ending sequences, two contiguous amino acids out of the last five amino acids of the CDR3 of the Vδ6 are DK, LI, KL, TD, DT, PI, TA, TR, PD, HI, HT, KI, or SS. In some aspects, the preferred amino acids for the last three amino acids of the CDR3 of the Vδ6 are TRQ, KLI, or KLN.

[0220] CDRs of Human Vγ9

[0221] According to the IgBlast TCR CDR3 calculation (https://www.ncbi.nlm.nih.gov/igblast/), in one aspect, in the non-human animal with human or humanized γ/δ T cell, the peptide sequence of CDR1 from the human Vγ9 comprises a conserved amino acid sequence comprising GMSATS (SEQ ID No. 50813), or at least one G, one A, one I, one T, or one S inside the CDR1 sequence. In other aspect, the CDR2 sequence of the non-human animal Vγ9 comprises ISYDGTV (SEQ ID No. 50828), or at least one I, one S, one Y, one G, one T, or one D.

[0222] According to the IgBlast TCR CDR3 calculation (https://www.ncbi.nlm.nih.gov/igblast/), in one aspect, in the non-human animal with human or humanized γ/δ T cell, the peptide sequence of CDR3 from the human Vγ9 comprises a conserved starting and ending sequence. For the starting sequences, amino acids at the first four positions of the CDR3 of Vγ9 are ALWE (SEQ ID No. 50815), ALWG (SEQ ID No. 16756), ASWE (SEQ ID No. 50816), ALCE (SEQ ID No. 50817), ALLE (SEQ ID No. 50818), ALRE (SEQ ID No. 50819), PCGR (SEQ ID No. 50820), AWWE (SEQ ID No. 50821), DLWE (SEQ ID No. 50822),

ASWE (SEQ ID No. 50816), or AMWE (SEQ ID No. 50823). In some aspects, the first five amino acids of the CDR3 of the Vγ9 are ALWEV (SEQ ID No. 42723), where the fifth position can be any of A, E, or M. In some aspects, in the starting sequence of ALWG (SEQ ID No. 16756), the fourth position can be any of D, V, R, or K. In further aspects, the first four amino acids of the CDR3 of the Vγ9 are TLWE (SEQ ID No. 50829), where the first position can be any of G, V, S, P, or A. In one aspect, the fourth position of CDR3 is an E. For the ending sequences, two contiguous amino acids out of the last five amino acids of the CDR3 of the Vγ9 are KK. In some aspects, the last amino acids of the CDR3 of the Vγ9 are KTL, KEL, EKL, KNL, IKV, KSR, RNS, KNS, MKL, KRL, RKL, FKI, or KNQG (SEQ ID No. 50830).

[0223] CDRs of Human Vγ10

[0224] According to the IgBlast TCR CDR3 calculation (https://www.ncbi.nlm.nih.gov/igblast/), in one aspect, in the non-human animal with human or humanized γ/δ T cell, the peptide sequence of CDR1 from the human Vγ10 comprises a conserved amino acid sequence comprising STRFETDV (SEQ ID No. 50824), or at least one R, one F, one T, one E, one D, one V, or one S inside the CDR1 sequence. In other aspect, the CDR2 sequence of the non-human animal Vγ10 comprises IVSTKSAA (SEQ ID No. 50825), or at least one I, one S, one V, one K, one T, ozone A.

[0225] According to the IgBlast TCR CDR3 calculation (https://www.ncbi.nlm.nih.gov/igblast/), in some aspects, in the non-human animal with human or humanized γ/δ T cells, the peptide sequence of CDR3 from the human Vγ10 comprises a conserved starting and ending sequence. For the starting sequences, amino acids at the first three positions of the CDR3 of Vγ10 are AAW. In some aspects, the first four amino acids of the CDR3 of the Vγ10 are AAWF (SEQ ID No. 50826), where the fourth position can be any of F, L, A, R, G, C, or V. In some further aspects, the second position is an A and the first position can be any of S, Y, V, E, G, D, T, or P. In some aspects, the second position is an E and the first position can be any of S, D, or A. In some aspects, the first and second positions are PR or SS. In some aspects, the first position is an A, and the second position of any one of V, T, S, G, or E. In some aspects, the first two positions are any of VS, VF, or CE. For the ending sequences, in some aspects, the last three amino acids of the CDR3 of the Vγ10 are FKI. In one aspect, two contiguous amino acids out of the last three amino acids of the CDR3 of the Vγ10 are KK. In one aspect, the second to the last two amino acids of the CDR3 of the Vγ10 is a K. In other aspect, the last amino acid of the CDR3 of the Vγ10 is an I. In one aspect, the last amino acid of the CDR3 of the Vγ10 is an R. In other aspect, the second to the last two amino acids of the CDR3 of the V(γ) 10 is a T.

[0226] An embodiment of the invention provides a TCR comprising two polypeptides (i.e., polypeptide chains), such as a γ chain of a TCR, a δ chain of a TCR, or a combination thereof. The polypeptides of the inventive TCR can comprise any amino acid sequence, provided that the TCR has antigen-binding specificity.

[0227] In an embodiment of the invention, the TCR comprises two polypeptide chains, each of which comprises a variable region comprising a complementary determining region CDR1, a CDR2, and a CDR3 of a γ/δ TCR.

[0228] The first group of TCR comprises 8 human or humanized δ chains.

[0229] The inventive TCRs further comprise a constant region from a non-human animal (e.g., rodent, murine-mouse). The inventive TCRs may further comprise a constant region derived from any suitable species such as, e.g., rabbit or goat.

[0230] In an embodiment of the invention, the TCRs further comprise a rabbit, cow, and maybe human constant region.

[0231] In an embodiment of the invention, the TCR comprises a murine constant region. For example, the TCR may be a chimeric TCR comprising a human variable region and a murine constant region. The murine constant region for TCR δ chain comprises SEQ ID (amino acid) NO: 73 (constant region of a murine δ TCR chain); The murine constant region for TCR γ chain comprises SEQ ID (amino acid) NO: 74 (constant region of a murine γ TCR chain); There are more than one γ constant regions.

[0232] In some aspects, the constant region of the TCR δ comprises one or more conserved amino acid sequences: PSVF (SEQ ID No. 50789), MKNG (SEQ ID No. 50790), GTNVACL (SEQ ID No. 50791), SAVKLGQ (SEQ ID No. 50792), SVTCSV (SEQ ID No. 50793), KVNMMSL (SEQ ID No. 50794), VLGLR (SEQ ID No. 50795), LFAK (SEQ ID No. 50796), and/or NFLL (SEQ ID No. 50797).

[0233] In some aspects, the constant region of the TCR γ comprises one or more conserved amino acid sequences: PKPT (SEQ ID No. 50798), LCLL (SEQ ID No. 50799), KTKD (SEQ ID No. 50800), IVIKFSWLT (SEQ ID No. 50801), TSAYY (SEQ ID No. 50802), and/or LLLLLKS (SEQ ID No. 50803).

[0234] It is as understood by those skilled in the art one or more amino acid substitution(s) in the murine or non-human animal constant region of the γ and/or δ chain can still yield a protein with functional 7 and/or δ chain.

[0235] Genetically Modified Non-Human Animal

[0236] As used herein, the term “genetically modified non-human animal” refers to a non-human animal having exogenous DNA in at least one chromosome of the animal's genome, in some aspects, existing as extra-chromosome DNA fragment (e.g., plasmid, mitochondria DNA). In some embodiments, at least one or more cells, e.g., at least 1%, 2%, 3%, 4%, 5%, 10%, 30%, 40%, or 50% of cells of the genetically modified non-human animal have the exogenous DNA in its genome. The cells having exogenous DNA comprise various kinds of cells, e.g., a somatic cell, a germ cell (e.g., a sperm, an egg, a blastocyst), an immune cell (e.g., a T cell, a B cell, a natural killer T cell, a mast cell), an antigen-presenting cell (e.g., a macrophage, a dendritic cell), or an endogenous tumor cell, or a brain cell. In some embodiments, the genetically modified non-human cell can also be introduced into a species that does or does not have the same genetically modified gene.

[0237] In some embodiments, genetically modified non-human animals are provided that comprise a modified endogenous γ/δ TCR locus that comprises an exogenous sequence (e.g., a human sequence), e.g., an insertion of exogenous sequence or a replacement of one or more non-human sequences with one or more human sequences through homologous recombination (HR) in mouse ES cells. The animals are generally able to pass the modification to progeny, i.e., through germline transmission.

[0238] The genetic modification of humanization of γ/d TCR may be created in other animals, e.g., a rat, rabbit, pig, bovine, deer, sheep, goat, chicken, cat, dog, ferret, primate (e.g., marmoset, rhesus monkey) by several techniques that are known in the art, including, e.g., nonhomologous end joining (NHEJ), homologous recombination (HR), zinc finger nucleases (ZFNs) (reviewed in Durai et al. (2005), Nucleic Acids Res 33, 5978), transcription activator-like effector-based nucleases (TALEN) (reviewed in Mak et al. (2013), Curr Opin Strict Biol. 23:93-9), and the clustered regularly interspaced short palindromic repeats (CRISPR)-Cas system (Ran et al. (2013), Nat Protoc. 8:2281-2308; Mali et al. (2013). Nat Methods 10:957-63). Many other methods are also provided and can be used in genome editing, e.g., micro-injecting a genetically modified nucleus into an enucleated oocyte or fusing an enucleated oocyte with another genetically modified cell, in further aspects, transferring the modified genome to a suitable cell, e.g., an oocyte, and gestating the modified cell (e.g., the modified oocyte) in a non-human animal under suitable conditions to form an embryo.

[0239] In one aspect, the animal is a mammal, e.g., of the superfamily Dipodoidea or Muroidea. In some embodiments, the genetically modified animal is a rodent. The rodent comprises a mouse, a rat, and/or a hamster. In some embodiments, the genetically modified animal is from a family selected from Platacanthomyidae, Spalacidae, and Eumuroida which further comprises Calomyscidae, (e.g., mouse-like hamsters), Cricetidae (e.g., hamster, New World rats and mice, voles), Muridae (true mice and rats, gerbils, spiny mice, crested rats), Nesomyidae (climbing mice, rock mice, with—tailed rats, Malagasy rats and mice). In some embodiments, the genetically modified rodent is selected from a true mouse or rat (family Muridae), a gerbil, a spiny mouse, and a crested rat. In some embodiments, the non-human animal is a mouse. In some embodiments, the mouse, a rat, and/or a hamster has at least 80%, 90%, 95% homology with C57BL strain mouse on the nucleotide sequence level.

[0240] In some embodiments, the animal is a mouse of a C57BL strain selected from C57BL/6, C57BL/6ByJ, C57BL/6J, C57BL/10, C57BL/6NJ, C57BL/6NIH, B6NTac, C57BL/A, C57BL/KaLwN, C57BL/GrFa, C57BL/10Cr, C579L/10ScSn, C57BL/An, and C57BL/Ola.

[0241] In some embodiments, the mouse is selected from the group of 129 strains comprising 129P1, 129P2, 129P3, 129X1, 129S1, 129S1/SV, 129S1/SvIm, 12952, 12954, 12955, 129S9/SvEvH, 129S6, 129/SvEvTac, 129S7, 129S8, 129T1, 129T2. These mice are documented in the full or part description, e.g., Mammalian Genome 10: 836 (1999); Auerbach et al., Establishment and Chimera Analysis of 129/SvEv- and C57BL/6-Derived Mouse Embryonic Stem Cell Lines (2000), both of which are incorporated herein by reference in the entirety. In some embodiments, as aforementioned, the genetically modified mouse is a mix of the 129 strain and the C57BL/6 strain. In some embodiments, the mouse is a mix of the 129 strains or a mix of the BL/6 strains. In some embodiments, the mouse is a BALB strain, e.g., BALB/c strain. In some embodiments, the mouse is a mix of a BALB strain and another strain. In some embodiments, the mouse is from a hybrid line (e.g., 50% BALB/c-50% 12954/Sv; or 50% C57BL/6-50% 129).

[0242] In some embodiments, the animal is a rat. The rat can be selected from a Wistar rat, a Long-Evans Agouti strain, a Sprague Dawley strain, a Fischer strain, F344, F6, and Dark Agouti strain. In some embodiments, the rat strain is a mix of two or more strains selected from the aforementioned group of rats.

[0243] Use of Genetically Modified Human or Humanized γ/δ T Cell Animals

[0244] There is growing interest in γ/δ T cell-based therapy in the art, as γ/δ TCRs recognize stress-induced self-antigens (Groh V, Science (1998) 279:1737-40 and Uldrich A R, Nat Immunol (2013) 14:1137-45), lipids or pyrophosphates secreted by microbes or overproduced in tumor cells (Hayday A. J Immunol. (2019), 203(2):311-320)

[0245] There is a special interest in Vγ9/Vδ2 T cell, as it is the main subset of γ/δ T cell in human blood, which accounts for 2-10% of all T cells. The γ/δ TCR recognizes self or foreign non-peptidic phosphorylated molecules called phosphoantigens (Espinosa, JBC (2001) 276:18337-44). Evidence suggests that V γ 9/V δ 2 T cell may exhibit pathogen specificity (Worku, (2001) J. Infect. Dis 184:525-532) as well as immune memory (Shen, Science (2002) 295:2255-58), two characteristics of adaptive immunity. After microbial exposure, γ/δ T cell of an infant experiences polyclonal expansion as well as Vδ1 expansion (Ravens, PNAS (2020) 117:18649-60), indicating TCR's recognition of specific pathogen antigens. Bioinformatic analyses of large meta-genomic datasets determined the relative abundance of γ/δ T cells within tumors significantly correlated with patient outcomes. Tumor-infiltrating γ/δ T cells were found in all tumor entities. A correlation between the relative abundance of γ/δ TILs and favorable response to immune checkpoint therapy in various cancers was demonstrated (Gentles, Nat. Med (2015)1-12). V γ 9/V δ 2 T cells have been shown to be able to recognize various stress markers (Dai, JBC (2012) 287:16812-19 and Gober, J. Exp. Med (2003) 197:163-8. γ/δ cells are also stimulated by certain tumor cells, such as the Daudi B lymphoma (Fisch, Eur. J. Immunol (1997) 27:3368-79).

[0246] But Vγ9/Vδ2 T cell and other human or humanized γ/δ subclasses are not existed in most experimental animals including but not limited to, rodents e.g., mouse, rat hamster, cat, dog, sheep, cow, chicken. The unavailability of human or humanized V γ Vγ9/Vδ2 T cell has hindered the research development of many areas including but not limited to, vaccine development, cancer therapy development, infection disease prevention, and slowing aging.

[0247] More specifically, the human or humanized γ/δ TCR mice can be a good model for human vaccine development. Small animals (such as mice) played an important role in vaccine development, as of low cost, easy to generate in large quantities, and capable of generating adaptive immune responses, yet provided limited value as a vast amount of clinical trials for infection disease failed with great variable results among individuals, even though most vaccine candidates had already tested and evaluated in such small animals (Dantzler, Clinical & Translational Immunology 2019; e1072). The adaptive immune responses generated in this animal is a result of a lengthy process, particularly, the bridging between innate and adaptive responses, which is not well understood in both human and animals. Among various immune cells, γδ T cell is unique in its category. It has a repertoire of tens of thousands of TCRs, public and private, representing group and individualism. γδ T cell has been well proven to play a role in innate (clone expanding, clone focusing, cytokine releasing, and immune cell calling) and adaptive (memory cell formation). In fact, γδ T cell-deficient mice had significantly delayed recovery from many bacteria and yeast infections.

[0248] The rationale of replacing mouse γδ TCR with human γδ TCR to make a better vaccine test model is based on the following reasons: 1) Mouse and human γδ TCR are not quite different. A particular vaccine may be able to generate a mouse γδ TCR, but the same vaccine may not generate a human γδ TCR. So the subsequent clinical trial is solely based on the results from mouse γδ TCR studies and mouse γδ TCR-initiated innate, bridging, and adaptive reactivates. In fact, γ9δ2, one of the most studied γδ TCR in human, do not even exist in the mouse. Using WT animals for vaccine study completely ignored the Vγ9Vδ2 or other human Vδ initiated immune responses. 2) Different from α/β, γδ TCR recognized non-protein antigens, such as phosphoantigen, which may share among many animals including humans. A cloned γδ TCR from a humanized mouse may directly interact with infected human cells, and vice versa, infected human cells can stimulate the expansion and focusing of human γδ T cells, which makes in vivo testing highly possible. 3) The humanized mouse offers further translational value as the sequences obtained from expanded and memory γδ T cells can be directly compared with the vast amount of existing human γδ repertoires. In fact, in the preliminary data provided with this application, numerous γ or δ TCRs are identical to human γδ TCRs discovered in previous human studies. 4) the formation of memory γδ T cells is one of the hallmarks of vaccine development. This human γδ T cell mouse can be challenged repetitively and monitored closely the process of γδ memory T cell formation, which could not be done in any other animals. In sum, the proposed humanized γδ T cell model offered us a unique platform for studying human or human-like innate, bridging, and adaptive immune response of the vaccine development.

[0249] In various embodiments, the present invention solves this problem by providing a genetically modified non-human animal comprising human or humanized γδ T cell receptors and expression of these TCRs, particularly human or humanized Vγ9Vδ2 T cells. Inside the non-human animal, a diversified γδ TCR repertoire was established which encodes for human or humanized γδ T cell receptors. With antigen stimulation including but not limited to e.g., E coli, Staphylococcus aureus aqueous suspension. The non-human animal undergoes clonal expansion and clonal focusing, indicating the non-human animal is capable of utilizing its internal mechanisms to process the introduced human genomic DNA to generate functional γδ T cell receptors. As γδ T cells have proven to have a broad application for adoptive cell immunotherapy, the antigen-specific sequences of human or humanized receptors can be cloned and expressed on cells of choice.

[0250] In some embodiments, the cells of choice can be including but are not limited to a non-immune cell, an immune cell, or a cell line.

[0251] In some embodiments, cancer cells from human and non-human origin are introduced into the non-human animal, tumor growth is monitored and provided in the present invention. The cancer cell lines include but are not limited to a mouse cancer cell line e.g., B16 mouse melanoma cancer cell line, and a human cell line e.g., a lymphoma Daudi B cell line.

[0252] A big advantage γδ T cell vs αβ T-cell is that αβ T-cell immune systems cannot be transferred because of the large diversity of HLA among individuals unless all of the HLA molecules are precisely matched. On the contrary, transferring γδ T-cell immune systems between individuals is less restricted because of common antigens, which allows the use of γδ T-cells from normal volunteers who would serve as “universal donors.” Therefore, well-characterized γδ T-cells and their receptors could, in principle, be an “off the shelf” product with one donor providing a T-cell product for a larger population reducing the developmental cost and time.

[0253] In some embodiments, the human or humanized γδ T cell comprises one human or humanized γ TCR and one human or humanized δ TCR. In other aspect, the human or humanized γδ T cell comprises two human or humanized γ TCR or two human or humanized δ TCR. In other aspect, the human or humanized γδ T cell comprises more than two human or humanized γ TCRs or more than two human or humanized δ TCRs.

[0254] In other aspect, the human or humanized γδ T cell comprises one or human or humanized γ TCR combined with other receptors to form a receptor complex. In other aspect, the human or humanized γδ T cell comprises one or two human or humanized δ TCR combined with other cell surface receptors to form a receptor complex.

[0255] In some embodiments, the human or humanized δ TCR can be fused through a molecular linker to a second entity that provides biochemical or cytotoxicity to kill infected cells or cancer cells. The second entity includes but is not limited to e.g., small molecules, radioisotopes, toxins, light-activated drugs, antibodies, prodrug, target activating molecules, enzyme-based drug release molecules, chemokine, cytokine, immune activation and inhibition molecules, an alpha. TCR, a beta TCR, an IgG heavy chain, or an IgG light chain.

[0256] In humans, γδ NKT cells develop in the neonatal thymus and migrate to peripheral sites such as the spleen, lymph nodes, and, most prominently, the liver (Azuara, V, 1997, Eur. J. Immunol. 27: 544-553). γδ NKT cells are considered an innate-like lineage based on the expression of the innate signature transcription factor PLZF (Kreslaysky, T, 2009, Proc. Natl. Acad. Sci. USA 106: 12453-124584 Mature γδ NKT cells are phenotypically CD24lowCD44highNK1.1+ and are capable of secreting various cytokines of IFN-γ, IL-4, and IL-13 upon TCR stimulation (Alonzo, E, Curr. Opin. Immunol. 23: 220-227.). These innate features provide γδ NKT cells with important functions in immune protection (Belles, C. 1996, J. Immunol. 156: 4280-4289.) as well as in immune disorders such as Sjögren's syndrome (Belle, I. 2014 Cytokine 69: 226-233.), dermatitis (Kreslaysky, T, 2009, Proc. Natl. Acad. Sci. USA 106: 12453-12458.), and asthma (Felices, M., Proc. Natl. Acad. Sci. USA 106: 8308-8313.). The γδ NKT cells were also identified in mice and the population size of γδ NKT cells is tightly regulated during thymic development and typically represents 10% of total γδ T cells in C57BL/6 mice (Verykokakis, M., 2010. PLoS One 5: e9303), so human or humanized γδ T mouse in this invention can also include this type of NKT cells with human γδ TCR. If this human γδ TCR-based mouse NKT can recognize human infected or cancerous cells, then the human TCR can be cloned and expressed on various cell types to fight against these degenerated cells.

### EXAMPLES

[0257] The invention is further described in the following examples, which do not limit the scope of the invention. The conventional methods that are known in the art are not described in detail in the Examples such as PCR, molecular cloning techniques, bacteria BAC recombineering, embryonic stem cell culture, micro-injection, animal breeding, etc. The CDR3 clone numbers were coming from actual experiments. It is understandable by the art that experimental data may vary according to different mice, different PCR and NGS procedures, different repertoire analysis software, and different ways of data presentation. The data shown herein are to support the claims, but not limit the claims.

### Example 1

[0258] Generation of Human or Humanized TCRγ Mice (Introducing Human Vγ9-11)

[0259] In this example, a non-human animal (such as a mouse) was modified so that the non-human animal contained a nucleic acid sequence comprising human TCRγ further comprising human TCR Vγ and Jγ. Specifically, an endogenous mouse sequence containing mouse TCR Vγ and Jγ was replaced with a sequence containing human TCR Vγ and Jγ and operably linked to a mouse TCR Cγ region.

[0260] More specifically, 2680 bp of mouse sequence including mouse TCR. Vγ1 and mouse Jγ4 was replaced with 48732 bp of human sequence corresponding to 3 human Vγ (Vγ9, Vγ10, and Vγ11) and 3 human Jγ (JPγ1, JPγ, and Jγ1). The human sequence ended 5′ upstream of the mouse endogenous Cγ4 region, so human γ Vs and Js were genetically linked to the mouse Cγ4 region. The humanization strategy was summarized in FIG. 1. Junctional nucleic acid sequences inside the targeting vector among mouse, human, and prokaryotic/eukaryotic selection cassettes are summarized in Table 1 and also provided in the Sequence Listing (Seq ID NO: 1-5).

TABLE 1
Junctional Nucleic acid sequences for
Vgamma Targeting Vector (vector ID NO: 1)

| SEQ ID NO | Description |
|---|---|
| 1 | 5' starting nucleic acid sequence of DNA segment |
| | NO: 2 of the 5' mouse homology arm |
| | inside mouse TCRgamma locus |
| 2 | Junctional nucleic acid sequence between 3' end |
| | of mouse S'arm (DNA segment NO: 2) |
| | and the starting of the 5' end of human |
| | sequence (DNA segment NO: 6) |
| 3 | Junctional nucleic acid sequence between 3' end of |
| | human sequence (DNA segment NO: 6) and 5' |
| | end of the selection cassette (DNA segment NO: 7) |
| 4 | Junctional nucleic acid sequence between 3' end of the |
| | selectioncassette (DNA segment NO: 7) and S' end of 3' |
| | mousehomology arm (DNA segment NO: 4) |
| 5 | 3' ending nucleic acid sequence of DNA segment |
| | NO: 4 of the 3' mouse homology arm inside |
| | mouse TCRgamma locus |

[0261] The first step of generation of a genetically modified mouse with human TCRγ was to construct a TCRγ targeting vector (Vector ID NO: 1), The targeting vector (Vector ID NO: 1) has four DNA segments: a 5′ mouse homology arm including mouse Vγ1 promoter (DNA segment NO: 2), a human sequence having human Vγ9, Vγ10, and Vγ11 and Vγ1, JPγ, and Jγ1 (DNA segment NO: 6), an antibiotic cassette used for eukaryotic selection flanked by Frt sites (DNA segment NO: 7), and a 3′ mouse homology, arm including mouse Cγ4 exon 1-3 (DNA se anent NO: 4).

[0262] Two BAC clones were used for the construction of the TCR γ targeting vector (Vector ID NO: 1) (a mouse RP23-475Cδ and a human CTD-256309, Invitrogen). The 5′ mouse homology arm including the mouse Vγ1 promoter (DNA segment NO: 2) has a DNA sequence length of 7052 bp. The 3′ mouse homology arm including mouse Cγ4 exon)-3 (DNA segment NO: 4) has a DNA sequence length of 8868 bp. Both 5′ and 3′ homology arms were from mouse BAC clone RP23-475Cδ and were modified by bacteria BAC recombineering. The human replacement sequence (DNA segment NO: 6) with a DNA sequence length of 48732 bp was cloned from human BAC clone CTD-256309 and was also modified by bacteria BAC recombineering. The antibiotic cassette DNA segment NO: 7) used for eukaryotic selection has a ubiquities promoter driving a Neo selection cassette flanked by Frt sites. The five DNA segments (DNA segment NO: 2, 6, 7, 4) and a BAC-based vector was put together (Vector ID NO: 1) through DNA ligation and bacteria homology recombination using a homology arm with an average length of 130 bp (various from 50-200 bp). The bacteria homology recombination was helped by using bacterial Spec and Kan selection cassettes. During the targeting vector construction process, a unique (not cutting into DNA segment NO: 2, 6, 7, 4) enzyme cutting site AscI was introduced to allow linearization of the targeting vector (Vector ID NO: 1). The linearized targeting vector (Vector ID NO: 1) was electroporated into a hybrid mouse embryonic stem (ES) cell line derived from a hybrid strain by crossing mice of two different inbred strains (B6 and 129). ES cells with correct targeted clones were identified and confirmed by a combination of various methods (e.g., PCR-based assays, long arm PCR, long-range PCR, southern, and/or human replacement PCR) known in the art. Targeted ES clones were expanded and micro-injected into mouse blastocysts to generate chimera mouse with human targeted gene segment (DNA segment NO: 6). Germline mouse was obtained by further mating the chimera with B6 inbreed and additional PCR confirmation was performed. The Neo cassette was removed by the activity of Flp recombinase ES cells or mouse tissues.

### Example 2

[0263] Generation of Human or Humanized TCR Mice

[0264] In this example, a non-human animal (such as a mouse) was modified so that the non-human animal contained a nucleic acid sequence comprising human TCRδ further comprising human TCR δ V, D, and J. Specifically, an endogenous mouse sequence containing mouse TCR δ V, D, and J. was replaced with a sequence containing human TCR δ V, D, and J. and operably linked to a mouse TCR Cδ region (FIG. 2).

[0265] More specifically, 67562 bp of mouse DNA sequence (DNA segment ID NO: 10) including mouse TCR Trdv4 (mouse Vδ1) corresponding to mDV4, mouse TCR TrDδ 1, 2 and Trdj 1, 2 corresponding to mD1, 2 and mJ1, 2 (respectively) was replaced with a total of 97,129 by of hybrid DNA sequences (82.4% is a human sequence) including 8 human Vs (hVδ1-8), 3 human Ds (hDδ1-3), and 4 human Js (hδJ1-4). The hybrid sequence ended 5′ upstream of the mouse endogenous Cδ region, so human δ Vs, Ds, and Js were genetically linked to the mouse Cδ region. The humanization strategy was summarized in FIG. 2. Junctional nucleic acid sequences inside the targeting vector among rabbit, bovine, mouse, human, and prokaryotic/eukaryotic selection cassettes are summarized in Table 2 and also provided in the Sequence Listing (Seq ID NO: 6-16).

TABLE 2
Junctional Nucleic acid sequences for Vdelta
Targeting Vector (vector ID NO: 7)

| SEQ ID NO | Description |
|---|---|
| 6 | 5' starting nucleic acid sequence of DNA segment NO: |
| | 9 of the 5 mouse homology arm inside mouse |
| | TCRdelta locus |
| 7 | Junctional nucleic acid sequence between 3' end of |
| | mouse S'arm (DNA segment NO: 9) and the starting |
| | of the S' end of rabbit VD2 Promoter sequence (DNA |
| | segment NO: 13) |
| 8 | Junctional nucleic acid sequence between 3' end of |
| | human DV8 sequence (DNA segment NO: 13) and S' |
| | end of the rabbit VD1 promoter sequence (DNA |
| | segment NO: 14) |
| 9 | Junctional nucleic acid sequence between 3' end of |
| | human DV7 sequence (DNA segment NO: 14) and 5' |
| | end of the bovine VD.1. promoter sequence |
| | (DNA segment NO: 15) |
| 10 | Junctional nucleic acid sequence between 3' end of |
| | human DV3 sequence (DNA segment NO: 15) and S' |
| | end of human VDS including promoter sequence |
| | (DNA segment NO: 16) |
| 11 | Junctional nucleic acid sequence between 3' end of |
| | human DV5 sequence (DNA segment NO: 16) and 5' |
| | end of human VD4 including promoter sequence |
| | (DNA segment NO: 17) |
| 12 | Junctional nucleic acid sequence between 3' end of |
| | human DV4 sequence (DNA segment NO: 17) and S' |
| | end of human VD6 including promoter |
| | sequence (DNA segment NO: 18) |
| 13 | Junctional nucleic acid sequence between 3' end of |
| | human DVI sequence (DNA segment NO: 18) and 5' |
| | end of human VD2 including promoter sequence |
| | (DNA segment NO: 19) |
| 14 | Junctional nucleic acid sequence between 3' end of |
| | human sequence (DNA segment NO: 19) and S' end of |
| | the selection cassette (DNA segment NO: 20) |
| 15 | Junctional nucleic acid sequence between 3' end of the |
| | selection cassette (DNA segment NO: 20) and 5' end of |
| | 3' mouse homology arm (DNA segment NO: 11) |
| 16 | 3' ending nucleic acid sequence of DNA segment NO: |
| | 11 of the 3' mouse homology arm inside mouse |
| | TCRdelta locus |

[0266] The initial step of generation of a genetically modified mouse with human TCR δ was to construct a TCR δ targeting vector (Vector ID NO: 7), which has ten DNA segments (DNA segment ID NO: 9, 13-20, 11) detailed description in Table 3.

TABLE 3
DNA Segments for Vdelta Targeting Vector (vector ID NO: 7)

| Segment ID | NO Description |
|---|---|
| 9 | A 5' mouse homology arm located 5281 bp up-stream |
| | of mouse Trdv4 (mouse V delta 1) |
| | has a DNA length of 10308 bp |
| 13 | A rabbit V delta promoter (VD2) with DNA length of |
| | 1161 bp linked with human V delta 8 with a |
| | DNA length of 950 bp |
| 14 | A rabbit V delta promoter (VD1) with DNA length of |
| | 1914 bp linked with human V delta 7 with a DNA |
| | length of 742 bp |
| 15 | A bovine V delta promoter (VD1) with ONA |
| | length of 2042 bp linked with human |
| | V delta 3 with a DNA length of |
| 16 | A human DNA sequence including human V |
| | 753 bp delta 5 with a DNA length of 9729 bp. |
| 17 | A human DNA sequence including human V delta 4 |
| | with a DNA length of 13417 bp |
| 18 | A human DNA sequence including human V delta |
| | 6 and 1 with a DNA length of 16820 bp |
| 19 | A human DNA sequence including human V delta 2, |
| | human D Delta 1-3, and human J delta 1-4 |
| | with a DNA length of 49601 bp |
| 20 | coding sequence and flanked by frt sites with a DNA |
| | length of A selection cassette including an Ub |
| | promoter and Kan/Neo 2727 bp |
| 11 | A 3' mouse homology arm located up-stream of mouse |
| | C delta Region with a DNA length of 10001 bp |

[0267] BAC clones were used for the construction of the TCR δ targeting vector (Vector ID NO: 7) including a mouse RP23-6A14 and human CTD-3112B11, CH17-153K15, CTG-3064K1, CTD-2012J23, CTD-2521H9, CTD-2124P16, CTD-3012C18, CTD-3112B11, CTD-2382D16, CTD2382D16 (Invitrogen). Prior to completing the TCR δ targeting vector (Vector ID NO: 7), five mini DNA vectors flanked with bacterial homology arms were constructed through DNA ligation and bacteria homology recombination so that they all share the same 5′ arm and the 3′ arm has sequences shared with DNA sequence of 5′ end of next insertion site (FIG. 3). The detailed description of the five mini DNA vectors was shown in Table 4. To complete the TCR δ targeting vector (Vector ID NO: 7), a strategy of alternative antibiotic selection (e.g., first Spec selection, second Zeo selection, third Spec selection, fourth Zeo selection, etc.) to introduce and connect different DNA segments was based on bacterial homology recombination and PCR confirmation to achieve a lineal sequence composed of DNA segment 9, 13-19. Based on bacterial homology recombination, DNA segments 20 and 11 were also connected to DNA segment 19 to complete the TCR δ targeting vector (Vector ID NO: 7). During the targeting vector construction process, a unique (not cutting into DNA segment NO: 9, 13-20, 11) enzyme cutting site AscI was introduced to allow linearization of the targeting vector (Vector ID NO: 7). The linearized targeting vector (Vector ID NO: 7) was electroporated into a hybrid mouse embryonic stem (ES) cell line derived from a hybrid strain by crossing mice of two different inbred strains (B6 and 129). ES cells with correct targeted clones were identified and confirmed by a combination of various methods (e.g., PCR-based essays, long arm PCR, long-range PCR, southern, and; or human replacement PCR) known in the art. Targeted ES clones were expanded and micro-injected into mouse blastocysts to generate chimera mice with human targeted gene segment (DNA segment NO: 13-19). Germline mouse was obtained by further mating the chimera with B6 inbreed and additional PCR confirmation was performed. The Neo cassette was removed by the activity of Flp recombinase in ES cells or mouse tissues.

TABLE 4
Vector IDs contributing to Vdelta
Targeting Vector (vector ID NO: 7)

| Vector ID NO | Description |
|---|---|
| 2 | Containing a S' bacterial homology arm, |
| | a Spec selection cassette, DNA sequence |
| | with DNA segments ID NO: 9, |
| | 13, 14, and a 3' bacterial homology arm |
| 3 | Containing a S' bacterial homology arm, |
| | a Zeo selection cassette, DNA sequence |
| | with DNA segments ID NO: 15, |
| | and a 3' bacterial homology arm |
| 4 | Containing a 5' bacterial homology arm, a |
| | Spec selectioncassette, DNA sequence |
| | with DNA segments ID NO: 16, |
| | and a 3' bacterial homology arm |
| 5 | Containing a S' bacterial homology arm, a |
| | Zeo selection cassette, DNA sequence |
| | with DNA segments ID NO: 17, |
| | and a 3' bacterial homology arm |
| 6 | Containing a S' bacterial homology arm, a |
| | Spec selection cassette, DNA sequence with |
| | DNA segments ID NO: 18,and a 3' bacterial |
| | homology arm which shared sequence |
| | with 5' end of DNA segment ID NO: 19 |

### Example 3

[0268] Generation of Double Homozygous for Humanized γ TCR

[0269] Humanized γ and δ heterozygous mice achieved in Examples 1 and 2 were inter-bred. The resulting progeny included WT, homozygous human γ TCR/heterozygous δ TCR mice, homozygous human δ TCR/heterozygous γ TCR mice, heterozygous human γ TCR, heterozygous δ TCR mice, and double homozygous human γδ TCR mice by PCR amplification of tail DNA from these mice. The disappearance of the WT PCR band at the replaced region of TCR γ and δ loci was the indication of homozygosity of human transgene.

### Example 4

[0270] Expression Analysis of TCRδ from Humanized TCRδ Mice

[0271] The TCRδ CDR3 repertoire diversity reflects TCRδ T cell development, maturation, clonal composition, potential antigenic recognition spectrum, and quantity of available T-cell responses. The humanized TCRδ mice were able to use the endogenous mouse VDJ recombination enzymatic system to recombine human Vδ, human Dδ, and human Jδ to form human TCRδ CDR3, which was fully contributed from human genomic sequence introduced by targeted replacement of mouse endogenous sequence at the TCRδ locus. Specifically, blood and various tissues were collected from a homozygous human Vδ mouse. Blood was first treated with Red Blood Cell Lysis buffer (0.8 g NH4Cl and 0.11 g NaHCO₃ in 100 ml water-based solution) to remove red blood cells and white blood cells including T cells were collected by centrifugation, which were processed the same way as rest of the tissues. Tissues including 1-Peritoneal fluid, 2-brain (olfactory), 3-ear (middle part), 4-nose, 5-tough, 6-lymph nodes, 7-throat, 8-lung, 9-spleen, 10-bone marrow, 11-Eye (eyeball), 12, 13, 14 (three beginning, middle, end) parts of the small intestine, 15-uterus track, 16-kidney, 17-thymus, 18-muscle, 19-heart, 20-liver, 21-skin, 22-blood were collected and total RNA was isolated by using RNeasy Mini Kit (Qiagen) according to manufacture suggestions. Total RNA was translated into cDNA by using random priming oligos provide with the Transcriptor First Strand cDNA Synthesis Kit (Roche) in the total volume of 15 ul. One microliter of resulting cDNA was used as a template to conduct a first round (round 1) of the PCR reaction (total 40 ul) with primer pairs covering human Vδ to mouse C region including CRD3 region. For each Vδ CDR3 detection, one primer was located at the 5° end of Vδ and a second primer was designed and located inside the exon 1 of mouse C region also served as a common anti-sense primer for all the Vδ1-8 PCR reaction (Seq ID NO: 18). For example, as shown in table 5, first round PCR of CDR3 of human Vδ1 was amplified between a primer (Seq ID NO: 19) and the common Cδ primer (Seq ID NO: 18). First round PCR of CDR3 of human Vδ2 was amplified between a primer (Seq ID NO: 20) and the common Cδ region primer (Seq ID NO: 18) and continued in the same fashion. Because of the un-purify of the total RNA, a second round of PCR is generally needed.

TABLE 5
Primers for detecting RNA Expression of human DV1-8 in humanized mouse
(PCR round 1)

| Human Vdelta | Primer sequence (5′-3′) | Seq ID NO | New SEQ ID No. |
|---|---|---|---|
| hDV1-8 | GTCAGTCGAGTGCACAGTTTCACTG | 18 | 51002 |
| | (common anti-sense) | | |
| hDV1 | CCCAGTCATCAGTATCCATGCCAG | 19 | 51003 |
| hDV2 | TGAACACCAAACAGTGCCTGTGTC | 20 | 51004 |
| hDV3 | GTTCCCCGGACCAGACGGTGGCGAG | 21 | 51005 |
| hDV4 | ACCCAACCAGGAATGTTCGTGCAG | 22 | 51006 |
| hDV5 | AACAGTCAACAGAAGAATGATGACCAG | 23 | 51007 |
| hDV6 | GAGAAAAGTGACCAGCAGCAGGTG | 24 | 51008 |
| hDV7 | TGAAGACAAGGTGGTACAAAGCCCTC | 25 | 51009 |
| hDV8 | AGACAGTCACTCAGTCTCAACCAGAG | 26 | 51010 |

[0272] For the second round of PCR, two primers were designed within the previous primers described in the first round of PCR. Typically, a primer 50-100 bp down-stream of the A 1 first round primer and a second common primer (Seq ID NO: 27), which is 50-100 bp up-stream of the common primer of the first round (Seq ID NO: 18). One microliter PCR product from round 1 was introduced as a template for second round PCR in a total volume of 40 ul. For example, as shown in Table 6, second round. PCR of CDR3 of human A 1 was amplified between a primer (Seq ID NO: 28) and the common C region primer (Seq ID NO: 27). Second round PCR of CDR3 of human Vδ2 was amplified between a primer (Seq ID NO: 29) and the common C region primer (Seq ID NO: 27) and continued in the same fashion (Table 7). The final PCR products of Vδ1-8 from various tissues were Sanger sequenced and the diversity of human TCR was estimated by examining the reduction of heights vs normal peak on the DNA sequencing chromatogram. H, M, and L represent high, medium, and low diversity of human δ TCR, respectively. As shown in Table 8, RNA of human TCR Vδ1-8 was expressed in the majority of tissues examined and many tissues represented high diversity TCRδ. Particularly, human Vδ1-4 and 6 expressed with high diversification in tissues including peritoneal fluid, spleen, bone marrow, small intestine, and thymus, where γδ T cells were highly presented also in native humans (Silva-Santos, B., 2021. nature reviews immunology 21:221-232 and Hayday, A., 2019. 203: 311-320), In sum, the mouse model with human δ locus was able to recapitulate VDJ recombination as in native humans.

TABLE 6
Primers for detecting RNA Expression of human DV1-8 in humanized mouse
(PCR round 2)

| Human Vdelta | Primer sequence (5′-3′) | Seq ID NO | New SEQ ID No. |
|---|---|---|---|
| hDV1-8 | CATACTGACCAAGCTTGACAGCACTG | 27 | 51011 |
| | (common anti-sense) | | |
| hDV1 | TGCCTGTATGAAACAAGTTGGTGGTC | 28 | 51012 |
| hDV2 | GGTACAGGAAGACCCAAGGTAACAC | 29 | 51013 |
| hDV3 | GGTGGTACTGCTCTGCACTTACGAC | 30 | 51014 |
| hDV4 | TTCTGGTACAAGCAGCCCAGCAGTG | 31 | 51015 |
| hDV5 | ACCATCCCTGAGCGTCCAGGAAG | 32 | 51016 |
| hDV6 | TGCTTATGAGAACACTGCGTTTGAC | 33 | 51017 |
| hDV7 | TCCACGAGGGAGACACCGTAACTC | 34 | 51018 |
| hDV8 | TGCACATATGACACCAGTGAGAGTG | 35 | 51019 |

TABLE 7
Human Vdelta Expression in Different Mouse Tissues

| Human | Tissues of Human TCRdelta Mice | | | | | | | | | | | | | | | | | | | | | |
|---|---|---|---|---|---|---|---|---|---|---|---|---|---|---|---|---|---|---|---|---|---|---|
| Vdelta | 1 | 2 | 3 | 4 | 5 | 6 | 7 | 8 | 9 | 10 | 11 | 12 | 13 | 14 | 15 | 16 | 17 | 18 | 19 | 20 | 21 | 22 |
| hDV1 | + | | + | + | + | | + | + | + | + | | + | + | + | + | + | | + | + | + | + | |
| hDV2 | + | | + | | | | | | + | + | | | + | + | | | + | | | | | + |
| hDV3 | + | | | | | | | | + | + | | + | + | + | | | + | | + | + | | + |
| hDV4 | + | | + | | | | + | + | + | + | | + | + | + | + | + | | | + | | | |
| hDV5 | | | | | | | | | + | | | | + | | | | + | | | | | |
| hDV6 | + | | + | | | | + | + | + | + | | + | + | + | | + | + | | | | + | + |
| hDV7 | | | | | | | | | | | | | + | + | | | | + | | | + | + |
| hDV8 | | | | | | | + | + | | | | | | + | + | | | | | | | |

1-Peritoneal fluid, 2-brain (olfactory), 3-ear (middle part), 4-nose, S-tough, 6-lymph
nodes, 7-throat, 8-lung, 9-spleen, 10-bone marrow, 11-Eye (eve ball), 12, 13, 14
(three beginning, middle, end) parts of small intestine, 15-uterus track, 16-kidney,
17-thymus, 18-muscle, 19-heart, 20-liver, 21-skin, 22-blood. Positive sign
represents expression of human delta CDR3.

TABLE 8
Human Vdelta Diversity in Different Mouse Tissues

| Human | Tissues of Human TCRdelta Mice | | | | | | | | | | | | | | | | | | | | | |
|---|---|---|---|---|---|---|---|---|---|---|---|---|---|---|---|---|---|---|---|---|---|---|
| Vdelta | 1 | 2 | 3 | 4 | 5 | 6 | 7 | 8 | 9 | 10 | 11 | 12 | 13 | 14 | 15 | 16 | 17 | 18 | 19 | 20 | 21 | 22 |
| hDV1 | H | | L | L | M | | H | H | H | H | | H | H | H. | M | M | H | | M | H | L | H |
| hDV2 | L | | L | | | | | | H | L | | M | M | | | | H | | | | | H |
| hDV3 | H | | | | | | | | H | H | | L | H | H | | | H | | L | L | | M |
| hDV4 | M | | M | | | | M | M | H | H | | H | H | H | L | M | | | H | | | |
| hDV5 | | | | | | | | | M | | | | L | | | | H | | | | | |
| hDV6 | M | | L | | | | H | M | H | H | | H | H | H | | L | H | | | | | H |
| hDV7 | | | | | | | | | | | | | L | L | | | L | | | L | | |
| hDV8 | | | | | | | L | L | | | | | L | | | | | | | | | |

1-Peritoneal fluid, 2-brain (olfactory), 3-ear (middle part), 4-nose, 5-tongue, 6-
lymph nodes, 7-throat, 8-lung, 9-spleen, 10-bone marrow, 11-Eye (eve ball), 12, 13,
14 (three beginning, middle, end) parts of small intestine, 15-uterus track, 16-
kidney, 17-thymus, 18-muscle, 19-heart, 20-liver, 21-skin, 22-blood. H-high
diversity, M-medium diversity, L-low diversity of human delta TCR.

### Example 5

[0273] Repertoire Analysis of TCRδ from Humanized TCRδ Mice

[0274] The TCRδ CDR3 repertoire diversity was confirmed by PCR (Example 3) and the CDR3-containing sequence was obtained by subsequently next-generation sequencing (NGS). (FIGS. 9-24)

[0275] Specifically, PCR products from the second round PCR using human TCRδ specific primer and mouse Cδ region primer were purified and submitted for next-generation sequencing (Genewiz). Because of over-sized sequence data, only the first 100,000 nucleotide sequences were subjected to repertoire analysis using a function of Analyze T cell receptor (TR) Sequences from IgBlast (https://www.ncbi.nlm.nih.gov/igblast/) to calculate the border and actual amino acid sequence of δ CDR3s. Amino acid sequences of various TCRδ CDR3s along with their respective percent abundance in the tissues of the human TCRδ mouse are listed in the table with their unique sequence IDs (There are other TCR CDR3 analysis platforms and will generate CDR3 sequences with slightly different on the beginning and ending of the border sequence. They can be re-analyzed by IgBlast to have comparable sequences with that of the invention described here).

[0276] CDR3s were generated from two experiments with two sets of different human TCR mice.

[0277] In the first experiment, blood was collected from two homozygous human TCR mice. PCR products of human TCRδ were obtained for human Vδ1, 3, and 6. The NGS data showed, inside the blood, the CDR3 amino acid sequences were highly diversified.

[0278] In mouse number one (M4), there was 8576 unique human Vδ1 CDR3s from only 100,000 DNA sequences from NGS-IgBlast analysis (NGS Seq ID NO: 1-8576) (FIG. 20A-V), and the top ten CDR3s are shown in Table 9. In mouse number two (M7) (Table 10), similarly, there was 8129 unique human Vδ1 CDR3s (NGS Seq ID NO: 8577-16705) (FIG. 24A-U). The Vδ1 CDR3s were highly individualized as there was very little common CDR3s shared by these two mice. In fact, among the top twenty CDR3s of mouse number one (M4), only one CRD3 matches with one from more than eight thousand unique sequences, indicating the VDJ recombination is not germline, but rather a somatic recombination with hypermutations including additions and deletions around the border and inside the D region. Furthermore, in mouse number one (M4) and mouse number two (M7), the CDR3 was not focused before encountering highly stimulating antigens. It is evidenced by the fact that the top two Vδ1 CDR3 from mouse one (M4) only counted for 3.87% and 3.71% respectively and there was a total of 38 CDR3s has more than 1% of total CRD3 s and 80.1% of CDR appeared only one or two times in the total CDR3s. Similarly, in mouse number two (M7), the top two Vδ1 CDR3 from mouse one (M4) only counted for 4.44% and 3.94% respectively and there was a total of 40 CDR3s has more than 1% of CDR3s (Table 10) and 79.7% of CDR3s appeared only one or two times in the total CDR3 s. The CDR3 diversification also reflected on the individual mouse level, as among the top twenty δ CDR3s from mouse number one (M4) only one matches with one CDR3 sequence from mouse number two (M7), and only two from M7 shared with M4. Individualized diversification is also observed in humans (Chen, H., J Immunol Methods. 2017. 443:9-17 and Ravens, S., Frontiers in Immunology 2018. https://doi.org/1.3389/fimmu.2018.00510, and Davey, M., Trends in immunology 2018. 36:446-459), indicating the human TCR mice in large part able to recapitulate what happened in humans.

TABLE 9
Top Ten TCR delta CDR3s in Blood of human V delta Mouse (M4)

| | | | Abundance | | | Abundance | |
|---|---|---|---|---|---|---|---|
| SEQ ID No. | CDR3 | | (%) | CDR3 | | (%) | SEQ ID No. |
| 1 | hDV1 | ALGELGSTDKLI | 3.9 | hDV3 | AFFLR | 83 | 16706 |
| 2 | | ALGELLGDTDKLI | 3.7 | | ALERETH | 2.7 | 16707 |
| 3 | | ALGEGDTDKLI | 2.6 | | ALERSTH | 2.2 | 16708 |
| 4 | | ALGEGGDTPDKLI | 2.3 | | AFFLLG | 0.8 | 16709 |
| 5 | | ALGEPGTTINSS | 2.2 | | ACFLR | 0.8 | 16710 |
| 6 | | ALGELWIHDKLI | 2 | | AFGD | 0.6 | 16711 |
| 7 | | ALGELPYRGIRTDK | 2 | | ASQSWY | 0.6 | 16712 |
| 8 | | ALGELLHTDKLI | 1.9 | | ALFLR | 0.6 | 16713 |
| 9 | | ALGELGDSSWDTR | 1.9 | | AFGDTD | 0.3 | 16714 |
| 10 | | ALGELGDTYPDKLI | 1.8 | | AFGGT | 0.3 | 16715 |

| | | | |
|---|---|---|---|
| 17859 | hDV6 | AASRGDTDKLI | 21 |
| 17860 | | AASPGGSDKLI | 21 |
| 17861 | | AASTYTDKLI | 15 |
| 17862 | | AARGGGYGWGLGTD | 11 |
| 17863 | | AASMRWGIRSWDTRQM | 6.8 |
| 17864 | | AASPGGSDKPI | 1.5 |
| 17865 | | AASRGDTEKLI | 1.1 |
| 17866 | | AASPGGSEKLI | 1 |
| 17867 | | AARGGGYGYWGLHT | 0.6 |
| 17868 | | AARGGGYGSWGLHTD | 0.4 |

TABLE 10
Top Ten TCR delta CDR3s in Blood of human V delta Mouse (M7)

| SEQ ID No. | CDR3 | | (%) | CDR3 | | (%) | SEQ ID No. |
|---|---|---|---|---|---|---|---|
| 8577 | hDV1 | ALGELGGYADKLI | 4.4 | hDV3 | ALWG | 51 | 16756 |
| 8578 | | ALGELGMTDKLI | 3.9 | | AFRWGGT | 34 | 16754 |
| 8579 | | ALGGGYSDKLI | 2.3 | | AFLLL | 1.7 | 17212 |
| 8580 | | ALGGTDKLI | 2.3 | | AFSLWG | 1.1 | 17213 |
| 8581 | | ALGERGITDKLI | 2.1 | | AL | 0.8 | |
| 8582 | | ALGEGKLI | 2 | | PSGG | 0.7 | 17215 |
| 8072 | | ALGELGADTDKLI | 1.9 | | AFLWGGT | 0.7 | 17024 |
| 8084 | | ALGELRDTDKLI | 1.8 | | AFRWGV | 0.7 | 17030 |
| 8585 | | ALGVLLGDTRKLI | 1.8 | | AFTPLA | 0.6 | 17218 |
| 8586 | | ALGEAYTDKLI | 1.8 | | PFDGGV | 0.4 | 17219 |

| | | | |
|---|---|---|---|
| 18040 | hDV6 | AAERGPDKLI | 15.0 |
| 18043 | | AAVLGDTVKLI | 15.0 |
| 18077 | | AAPTGGYGYTDKLI | 13.0 |
| 18158 | | ASRGLYTDKLI | 11.0 |
| 18099 | | AASVLRWWGIKLI | 10.0 |
| 18249 | | AAAKAFLRRGAPYTD | 9.0 |
| 18670 | | AASGLPSLGVHTDKLI | 2.6 |
| 18567 | | AASVRLWWGSKLI | 1.3 |
| 22129 | | AAAKAFLRRGAPYT | 0.6 |
| 22130 | | AAAKAFLRRGAPSTD | 0.6 |

[0279] In terms of human TCR Vδ3, CRD3s were less diversified as shown in Tables 9 and 10. In mouse number one (M4), there were only 504 unique Vδ3 CDR3s from only 100,000 DNA sequences from NGS-IgBlast analysis (NGS Seq ID NO: 16706-17209) (FIG. 19A-B). In mouse number two (M7), similarly, there were 649 unique Vδ3 CDR3s (NGS Seq ID NO: 17210-17858) (FIG. 21A-B). The Vδ3 CDR3s were highly shared among these two mice. In fact, among the top twenty CDR3s of mouse number one (M4), nine CRD3s matched with that of mouse number two (M7). The Vδ3 CDR3s were also focused as the top one CDR3 from mouse number one (M4) counted for 83% of total CDR3. Similarly, the top two CDR3 from mouse number two (M7) counted for 50% and 34% respectively, reflecting possibly early exposure to a particular antigen(s). As not much information is available from humans, a comparative study can be very limited.

[0280] Human TCR Vδ6 is also highly diversified but to a lesser degree than that of TCR Vδ1. In the number one mouse (M4), there were 4263 unique Vδδ CDR3s from only 100,000 DNA sequences from NGS-IgBlast analysis (NGS Seq ID NO: 17859-22120) (FIG. 22A-K). In mouse number two (M7), similarly, there were 4478 unique Vδδ CDR3s (NGS Seq ID NO:22121-26597) (FIG. 23A-L). The Vδδ CDR3s were longer, some up to 16 amino acids. Many CDR3s of Vδ6 are shared between M4 and M7 as among the top twenty CDR of mouse number one (M4), 14 CRD3 s matched with that from 8yyyy, although no CDR3 shared between the top 20 of both mice. The top five CDR3 of human TCR Vδ6 in mouse number one (M4) has a percentage of 21%, 20%, 15%, 11%, and 7%. The top five CDR3 in mouse number two (M7) have a percentage of 15%, 15%, 13%, 11%, 10%, and 9%, indicating a semi-focused repertoire, yet still keeping a large pool of low abundance CDR3 s. In fact, in M4, 84% of CDR3s appeared only one or two times in the total CDR3s, while in M7, 82%. The observation herein indicates that human Vδ6 has a role in certain home-keeping functions, albeit maintaining its readiness to deal with different internal and external challenges faced by each mouse. The observation herein also indicates that human TCRs can work with mouse-based antigens among them many are shared (e.g, lipid-based and sugar-based), so these human TCR mice can serve as a model close to humans and can be used to identify new therapeutic targets and ultimately meaningful human based TCRs for human or animal treatment.

### Example 6

[0281] Repertoire Analysis of TCRδ1-4, 6 in Mouse Spleen

[0282] In wildtype mouse, γδ T cells reside in spleen as one of major sites (van der Heyde., H. 2006. Infect Immun 75:2717-2725). In the present invention, Human δ TCR CDR3s including Vδ1, Vδ2, Vδ3, Vδ4, and Vδ6 were further studied using next generation sequencing (NGS) approach. The NGS results showed that all the CDR3s were highly diversified. Similar to Example 4, only the first 100,000 sequence reads were subjected to IgBlast analysis. The top ten CDR3s from each δ subclass were listed in Table 11.

TABLE 11
Top Ten CDR3s of TCR delta in Spleen of Human Delta Mice

| SEQ ID No. | Top ten CDR3 | | (%) | Top ten CDR3 | | (%) | SEQ ID No. |
|---|---|---|---|---|---|---|---|
| 26598 | hDV1 | ALGELTYWGIRTDK | 46.0 | hDV2 | ACDSVLGETDKLI | 3.8 | 28542 |
| 26599 | | ALGELVWGIRRVTD | 33.0 | | ACDTLGDTDKLI | 3.1 | 28543 |
| 26600 | | ALGDLTYWGIRTDK | 1.2 | | ACDTSGGLLI | 2 | 28544 |
| 26601 | | ALGDLVWGIRRVTD | 1.1 | | ACGDTKTDKLI | 2 | 28545 |
| 26602 | | ALGKLTYWGIRTDK | 1.1 | | APHKLI | 2 | 28546 |
| 26603 | | ALGELTYWGIRTD | 0.7 | | ACDTGRGPDKLI | 2 | 28547 |
| 26604 | | ALGELTSWGIRTDK | 0.6 | | ACDTSGDKLI | 1.9 | 28548 |
| 26605 | | ALGELTYCGIRTDK | 0.5 | | ACDTEGQTH | 1.9 | 28549 |
| 26606 | | LLGNSSGGYGGSPI | 0.5 | | ACDTGDTTDKLI | 1.9 | 28550 |
| 26607 | | ALGELTYWGISTDK | 0.4 | | ACDTGWGITDKLI | 1.9 | 28551 |
| 32584 | hDV3 | AFTGG | 1.1 | hDV4 | AMERGLGDTDKLI | 0.4 | 33869 |
| 17282 | | AFS | 0.8 | | AMREGDSTDKLI | 0.4 | 33870 |
| 16706 | | AFFLR | 0.7 | | AMREGWGIPDKLI | 0.3 | 33871 |
| 32587 | | AFPGG | 0.7 | | AMREGDGGYTDKLI | 0.3 | 33872 |
| 32588 | | AFLGV | 0.6 | | AMREPGGPDKLI | 0.3 | 33873 |
| 17641 | | AFLRWG | 0.6 | | ASPGYTDKLI | 0.3 | 33874 |
| 32590 | | AFILTP | 0.6 | | AMREVLGDTDKLI | 0.3 | 33875 |
| 32591 | | ASSTG | 0.6 | | AMREGEGYTDKLI | 0.3 | 33876 |
| 32592 | | AFRLG | 0.5 | | AMRENTDKLI | 0.2 | 33877 |
| 16857 | | AFSY | 0.5 | | AMREGLGATINSS | 0.2 | 33878 |
| | | | | hDV6 | AASMSGGYNTDKLI | 0.6 | 38497 |
| | | | | | AARLGDTDKLI | 0.6 | 38498 |
| | | | | | AASLGDTDKLI | 0.6 | 22062 |
| | | | | | AARVSWVDKLI | 0.5 | 38500 |
| | | | | | AATDKLI | 0.5 | 38501 |
| | | | | | AASTGGYTDKLI | 0.5 | 38502 |
| | | | | | AASSGIRNDKLI | 0.4 | 38503 |
| | | | | | AASPVRTGGL | 0.4 | 38504 |
| | | | | | AVGDTWLI | 0.4 | 38505 |
| | | | | | AANWVPDKLI | 0.4 | 38506 |

[0283] For human Vδ1 (NGS Seq ID NO:26598-28541), there is a total of 1944 unique CRD3 sequences (FIG. 9A-E). The top 2 CRD3s count for 46% and 32%, respectively. The CDR3s which appeared only once and two count for 83% of total 1944 CDR3s, indicating relatively focused repertoire which is quite different than the results from Vδ1 from blood.

[0284] For human Vδ2 (NGS Seq ID NO:28542-32583), there is a total of 4043 unique CDR3 sequences (FIG. 11A-K). The top 2 CRD3s count for 3.8% and 3.1%, respectively. The CDR3s which appeared only once and two count for 80% of the total 4043 CDR3s, indicating a relatively un-focused repertoire.

[0285] For human Vδ3 (NGS Seq ID NO:32584-33868), there is a total of 1285 unique CRD3 sequences (FIG. 10A-D). The top 2 CRD3s count for 1.1% and 0.8%, respectively. The CDR3s which appeared only once and two counted for 65% of the total 1285 CDR3s, indicating an un-focused repertoire, in sharp contrast to Vδ3 CDR3s in blood where the top two counted for 83% of all the CDR3s.

[0286] The results from Vδ1 and Vδ3 also demonstrated that different organs may have their own characteristic repertoire which is highly adaptive and flexible.

[0287] For human Vδ4 (NGS Seq ID NO:33869-38496), there is a total of 4628 unique CRD3 sequences (FIG. 13A-L). Both of the top 2 CRD3s count for 0.4% each. The CDR3s which appeared only once and two count for 75% of the total 4628 CDR3s, indicating an un-focused repertoire. The results herein also revealed that the diversification and quantity of Vδ4 are equivalent to Vδ2, which offers new research opportunities, especially to study tissues where access in humans was very limited.

[0288] For human Vδ6 (NGS Seq ID NO:38497-41381), there is a total of 2885 unique CRD3 sequences (FIG. 12A-H). Both of the top 2 CRD3s count for 0.6% each. The CDR3s which appeared only once and two count for 80% of the total 2885 CDR3s, indicating an un-focused repertoire.

[0289] A strong indication of these human TCR γ/δ mice able to produce human or human-like TCR was demonstrated by comparison of the top 12 most abundant TCRδ CDR3s found in 10-wk-old postpartum human fetal cells (Papadopoulou et al. PNAS 2020. 117:18638-18648) to the TCR Vδ2 CDR3 of 4043 unique CDR3 sequences described. The comparison revealed that, among the top 12 human CDR3 s, 4 CDR3s were identical to the sequences listed in (NGS Seq ID 28542-32583). As shown in Table 12, clone ACDTLGDTDKLI (SEQ ID No. 28543) was ranked as number 2 in mouse spleen with an abundance percentage of 3.1%. Another clone, ACDTVGDTDKLI (SEQ ID No. 51036), had N addition used during the formation of CDR3 by VDJ recombination, indicating that the human sequence comprising human Vs, Ds, and Js are fully suitable for mouse VDJ recombination system, which is surprising as mouse and human have a large genetic divergence.

TABLE 12
Identical CDR3 delta Sequences Between Human and Humanized Mouse

| | Most abundant CDR3 | | | Found in | | |
|---|---|---|---|---|---|---|
| SEQ ID No. | delta in human | | N addition | Mouse spleen | Rank | (%) |
| 50831 | hDV2 | ACDILGDTDKLIF* | 0 | + | 513 | 0.007 |
| 50832 | | ACDTVLGDTWDTRQMF | 0 | | | |
| 50833 | | ACDTVLGDSSWDTRQMF | 0 | | | |
| 29367 | | ACDVLGDTDKLI* | 0 | + | 827 | 0.004 |
| 50834 | | ACDILGDTAQLF | 0 | | | |
| 50835 | | ACDTWGYTDKLI | 0 | | | |
| 50836 | | ACDTWGTDKLI | 0 | | | |
| 28543 | | ACDTLGDTDKLI* | 0 | + | 2 | 3.065 |
| 50837 | | ACDILGDTLTAQLF | 0 | | | |
| 50838 | | ACDSTGGYSWDTRQMF | 0 | | | |
| 50839 | | ACDTAGGYSWDTRQMF | 0 | | | |
| 29246 | | ACDTVGDTDKLI* | 1 | + | 706 | 0.006 |

### Example 7

[0290] Human Vδ Functional Test Through E coli. Infection

[0291] Tagawa et al. showed that mouse Vδ1 plays an important role in bacterial clearance. In mouse Vδ1 knockout mice, the clearance of intraperitoneal injected (IP) bacteria E coli. was significantly delayed as compared to wild-type mice (Tagawa., T. 2004 J immuno 173:5156-5164). The highest difference in bacteria clearance was observed on day 3. The bacteria count (CFU/mouse) from peritoneal fluid collected from infected mice in Vδ1 knockout mice was almost 2 logs higher than that of wild-type mice.

[0292] In the human Vδ mice at the present invention (Example 2), mouse Vδ1 (mouse TRDV4) was replaced by human Vδ1-8, leading to a mouse Vδ1 deficient mouse model, yet human Vδ expressed. Mostly following protocols provided in the article of Tagawa et al., 10*8 E. coli (DH5alpha) in 100 ul PBS was IP injected into wild-type control, heterozygous, and homozygous human Vδ mice. Three days later, 5 ml PBS was injected into the peritoneal cavity of these mice, and subsequently, peritoneal fluid containing bacteria was collected and 1 ul of the fluid was plated on an antibiotic blank LB plate. E coli. colonies were counted overnight. As shown in Table 13, there is no statistical significance among these three test groups, indicating human Vδ functionally compensated for the losses of mouse Vδ1. The human δ TCRs specific for the E coli. clearance can be cloned, sequenced, and transferred to a human cell for therapeutic purposes.

TABLE 13
Bacteria Colony Count for Human Vdelta and Wildtype Control Mice

| Group | Mouse ID NO | Geneotype | Bacteria Count |
|---|---|---|---|
| 1 | 613 | WT | 13 |
| | 617 | WT | 3 |
| | 621 | WT | 1 |
| 2 | 614 | Hetrozygous | 56 |
| | 616 | Hetrozygous | 12 |
| | 619 | Hetrozygous | 11 |
| 3 | 615 | Homozygous | 5 |
| | 618 | Homozygous | 2 |
| | 620 | Homozygous | 3 |

No statistical significance was detected between any of groups

### Example 8

[0293] Human TCR γδ Clonal Expansion and Focusing

[0294] In humans, TCR γδ can sense the changes on the cell surface of infected and malignant cells leading to the expansion and focusing of γδ repertoire well studied including Vδ1, Vδ2, and Vδ3 (Hunter., S. 2018 69:654-665). The expansion and particular focusing are, therefore, the hallmark of immune reaction and they can be used as a biomarker for many immune-related testing and development including cancer treatment, vaccine development, skin wound healing, lung and liver diseases, intestinal disease, and brain mal-functioning.

[0295] Humanized mice comprising TCR Vδ (homozygous) and Vγ (heterozygous) were generated through the breeding process detailed in Example 3. Pathogenes were introduced through IP injection and blood was collected through retro-orbital sinus after proper anesthetic procedures. Specifically, blood was collected before and 3 days after injection of 5×10*8 of E. coli (DH5alpha) in 50 ul PBS. PCR and repertoires of Vδ1-4, 6 were analyzed using procedures detailed in Example 6. Positive PCR bands were detected before injection in Vδ1, 2, 3, 4, and 6. However, after injection, only Vδ1 and 4 were positive indicating there was a downregulation of the expression of Vδ2, 3, and 6 below PCR detection level. Vδ1 and 4 before and after injection were subjected to further repertoire analysis and the results were presented in Table 14. The results positively show that there was a clonal focusing in Vδ1 and 4.

[0296] More specifically, for Vδ1, before the injection, clones are relatively even distributed as the top ten most prevalent clones have a percentage average between 2.0%-3.0%. In stark contrast, after E coli. injection, clones were highly focused as a single expanded clone (top clone) counted for 62.4%. The top clone with CDR3 sequence of ALGFYINIGTPYTDKL (SEQ ID No. 50867) ranked only 143 on the list of CDR3 in the blood sample collected before E coli. injection among 10,038 unique V δ 1 CDR3s and has a percentage of 0.053%. After E coli. injection, the mouse blood also had a reduced amount of unique clones with a total of only 3530, which is about ⅓ of that before injection.

[0297] Similarly, for Vδ4, before the injection, clones are relatively even distributed as the top ten most prevalent clones have a percentage average between 3.4%-5.1%. In stark contrast, after E coli. injection, clones were highly focused as three expanded clones (top three clones) counted for 41.0%, 36.4.0%, and 13.5%, respectively. These top three clones with CDR3 sequence of ANIREGGVYDKLI (SEQ ID No. 50877), AMRPSYYKLI (SEQ ID No. 50878), AMREGLPGGYARDKLI (SEQ ID No. 50879) ranked only 78, 75, and 240 on the list of CDR3 in the blood sample collected before E coli. injection among 3284 unique V δ 4 CDR3s and has a percentage of 0.043%, 0.050%, 0.011%, respectively. After E coli. injection, the mouse blood also had a reduced amount of unique clones with a total of only 880, which is about ¼ of that before injection.

[0298] A second pathogen was also tested in Humanized mice comprising V δ (homozygous) and V γ (heterozygous). Blood was collected before and 3 days after injection of 100 ul extract of Staphylococcus aureus (Wood 46 strain, sigma S2014), which is protein A deficient and spa negative. It shares 98% to 99% genome identity with S. aureus and shows a lower surface expression of cell wall-associated protein A. and was formalin-fixed crude cell suspension of essentially non-viable S. aureus (Wood 46 strain) in 0.05 M potassium phosphate buffer, pH 7.5, containing 0.2% sodium azide as described by the manufacture.

[0299] PCR and repertoires of Vδ1-4, 6 were analyzed using procedures detailed in Example 6. Positive PCR bands were detected before injection in Vδ1, 2, 3, 4, and 6. However, after injection except for Vδ3, the rest were positive indicating there was a downregulation of the expression of V δ 3 below the PCR detection level. Vδ1, 2, 4, and 6 before and after injection were subjected to further repertoire analysis and the results were presented in Table 15. The results positively show that there was a clonal focusing in all the V δ upon positive PCR products.

[0300] More specifically, for Vδ1, before staphylococcus injection, clones are relatively even distributed as the top ten most prevalent clones have a percentage average between 2.1%-3.9%. In stark contrast, after staphylococcus injection, clones were highly focused as three expanded clones (top three clones) counted for 19.9%, 19.90%, and 15.6%, respectively. These top three clones with CDR3 sequence of ALGELEGIRHKLI (SEQ ID No. 50905), ALGELLPGGYVDKL (SEQ ID No. 50965), and ALGELFLLGDTDKL (SEQ ID No. 23) ranked only 391, 347, and 646 on the list of CDR3 in the blood sample collected before staphylococcus injection among 10070 unique Vδ4 CDR3s and has a percentage of 0.016%, 0.018%, 0.011%, respectively. After staphylococcus injection, the mouse blood also had a reduced amount of unique clones with a total of only 5695, which is a little more than ½ of that before injection.

[0301] For Vδ2, before staphylococcus injection, some clones are already enriched as the top 4 clones count for 79.7% vs. spleen Vδ2 as shown in Example 6, which is still evenly distributed. The observation of highly enriched Vδ2 CDR3s was also described in human blood (Hunter., S. 2018. Journal of Hepatology 69:654-665). The top 4 CDR3s for Vδ2 in Table 13 are ACDTGGDYTDKLI (SEQ ID No. 29638), ACDTGGGYDTDKLI (SEQ ID No. 50896), ACDKYWGLYTDKLI (SEQ ID No. 50897), and ACDNTGAYTDKLI (SEQ ID No. 50898), which count for 27.9%, 24.8%, 15.2%, and 11.8%. In sharp contrast, after staphylococcus injection, clones were highly focused as a single expanded clone (top clone) counted for 78.9%. The top clone with CDR3 sequence of ACELLGDDDKLI (SEQ ID No. 50966) ranked only 85 on the list of CDR3 in the blood sample collected before staphylococcus injection among 3161 unique Vδ2 CDR3s and has a percentage of 0.06%. After staphylococcus injection, the mouse blood also had a reduced amount of unique clones with a total of only 2460, which is about ¾ of that before injection. Furthermore, the sequence of CDR3s from staphylococcus injection started predominantly with ACE instead of ACD in unstimulated blood, indicating the CDR3 conversion from ACD to ACE or other non-ACD is a clear immune marker that can be used in many immune activation processes.

[0302] For Vδ4, before staphylococcus injection, clones are relatively even distributed as the top ten most prevalent clones have a percentage average between 3.0%-3.7%. In stark contrast, after staphylococcus injection, clones were highly focused as only one clone (top clone) was expanded and counted for 89.0%, yet the second one was merely 0.6%. This top clone has a CDR3 sequence of AMIRERGSYTDKLI (SEQ ID No. 50940) ranked 62 on the list of CDR3 in the blood sample collected before staphylococcus injection among 3198 unique V δ 4 CDR3s and has a percentage of 0.03%. After staphylococcus injection, the mouse blood also had a reduced amount of unique clones with a total of only 466, which is a little more than ⅙ of that before injection, indicating a relatively larger scale reduction of unique TCR clones.

[0303] Lastly, for Vδ6, before staphylococcus injection, clones are relatively even distributed, yet slightly focused clones as the top ten most prevalent clones have a percentage average between 4.1%-8.0%. In sharp contrast, after staphylococcus injection, clones were highly focused as only two clones were expanded and counted for 38.4% and 36.3%, respectively, having a CDR3 sequence of AEGDTDKLI (SEQ ID No. 50950) and AATGSSWDTRQM (SEQ ID No. 50951). They are ranked 284 with a percentage of 0.02% and 219 with a percentage of 0.03% on the list of CDR3 in the blood sample collected before staphylococcus injection among 7552 unique V δ 6 CDR3s, respectively.

[0304] After staphylococcus injection, the mouse blood also had a reduced amount of unique clones with a total of only 3020, which is a little more than ⅖ of that before injection, indicating a relatively larger scale reduction of unique TCR clones.

### Example 9

[0305] Repertoire Analysis of TCRγ 9 and 10 from Humanized TCR γ/δ Mice

[0306] Humanized mice comprising TCR Vδ (homozygous) and Vγ (heterozygous) were generated through the breeding process detailed in Examples 3 and 8. TCRγ 9 repertoire analysis was done first by PCR using primer sets as shown in Tables 16 and 17. Strong positive PCR bands were observed in blood and thymus, but absent in lung, intestine, kidney, and spleen. Similar to the description in Example 5, the positive PCR bands were subjected to next-generation sequencing and results were shown in Table 18 and NGS Seq ID NO: 41382-41899 and 41900-42761 (FIGS. 14A-B, and 15A-C). In the thymus, TCR Vγ9 CDR3s were slightly focused with the top five CDR3 counted for 87.2% of total CDR3s, yet the repertoire has a relatively long tail with a total of 863 unique CDR3s. In sharp contrast, the mature CDR3 in blood had a very focused repertoire. The top CDR3 counted for 91% of total CDR3s and it ranked only 10 in the repertoire from thymus with a percentage of 0.3%. The focusing also brought down the diversification to only 519 unique clones in TCR Vγ9, a reduction to ⅗ of that of the thymus. Surprisely, in the thymus, the second-ranked clone with a sequence of ALWEVQELGKKIKV (SEQ ID No. 41433) (20.9%) has the same sequence in human blood of Vγ79/Vδ2 in many studies (van Diest., E. 2021. J Immunother Cancer 9:e003850). Particularly, in the paper published by Papadopoulou et al (PNAS 2020. 117:18638-18648), ALWEVQELGKKIKV (SEQ ID No. 41433) was the pre-dominant CDR3 (γ 9) in human blood from human Vγγ9/Vδ2 cells, which strongly indicated that the human TCR Vγγ9/Vδ2 mice can produce very similar clones and, in some cases, the same as that from humans.

TABLE 16
Primers for detecting RNA Expression of human Gamma V9-11 in humanized
mouse in C4 region
(PCR round 1)

| Human Vgamma | Primer sequence (5′-3′) | Seq ID NO | New SEQ ID No. |
|---|---|---|---|
| hGV9-11 | TACCTATGGGAGGAAACAGAATCTC | 36 | 50840 |
| | (common anti-sense) | | |
| hGV9 | TGCAGGTCACCTAGAGCAACCTC | 37 | 50841 |
| hGV10 | AAAGTGGAGCAGTTCCAGCTATCC | 38 | 50842 |
| hGV11 | TATCTTGGAAGGCATCCATCCAAGG | 39 | 50843 |

TABLE 17
Primers for detecting RNA Expression of human Gamma V9-11 in humanized
mouse in C4 region
(PCR round 2)

| Human Vgamma | Primer sequence (5′-3′) | Seq ID NO | New SEQ ID No. |
|---|---|---|---|
| hGV9-11 | AATCTTCAGTCACCGTCAGCCAAC | 40 | 50844 |
| | (common anti-sense) | | |
| hGV9 | CGCCTGGAATGTGTGGTGTCTGG | 41 | 50845 |
| hGV10 | CATACCTTGCAAGATATCGAGCAC | 42 | 50846 |
| hGV11 | CATACACTGGTACTGGCAGAAACC | 43 | 50847 |

TABLE 18
Top Ten TCR Gamma 9 CDR3s in Blood and Thymus

| SEQ ID No. | Thymus | | (%) | Blood | (%) | SEQ ID No. |
|---|---|---|---|---|---|---|
| 41424 | hGV9 | ALWEYHYYKKL | 34.0 | ALWEVNYYKKE | 91.0 | 41382 |
| 41433 | | ALWEVQELGKKIKV* | 20.9 | ALWEVTYYKKL | 0.6 | 41383 |
| 41440 | | ALWEVEKKL | 16.1 | ASWEVNYYKKL | 0.5 | 41384 |
| 41441 | | ALWEAPNYYKKL | 14.7 | ALLEVNYYKKL | 0.4 | 41385 |
| 41858 | | ALWEVLELGKKNQG | 1.5 | ALREVNYYKKL | 0.4 | 41386 |
| 41859 | | ALWEVLELGKKKIKV | 0.8 | ALCEVNYYKKL | 0.4 | 41387 |
| 41860 | | ALWEVLELGKKIKV | 0.6 | ALWEVDYYKKL | 0.3 | 41388 |
| 41907 | | ALWEVGQKIKV | 0.5 | ALWEVNYYKAL | 0.3 | 41389 |
| 41382 | | ALWEVNYYKKL | 0.3 | ALWGVNYYKKL | 0.3 | 41390 |
| 41909 | | ALWEVQELGKKSR | 0.3 | ALWEVSYYKKL | 0.3 | 41391 |

*The sequence of ALWEVQELGKKIKV has been reported in blood of many human studies

[0307] Limited access to human tissues largely hindered the study of human Vγ10. There were very few publications that described the sequence and function of human Vγ10. To explore the possibility of establishing a human Vγ10 in mice, tissues from humanized mice comprising of TCR Vδ (homozygous) and Vγ(heterozygous) were collected, PCR, NGS, data processed similar to the description of Vγ9, but utilizing different sets of PCR primers (Table 14 and 15) and NGS ID NO: 42762-45490, 4549149130, and 49131-50786 (FIGS. 16A-G, 17A-E and 18A-J). The data showed that Vγ10 was expressed in all the tissues tested including the lung, thymus, intestine, kidney, and spleen, and the top ten CDR3s of these tissues were listed in Table 19. There are different diversifications of CDR3 in different tissue. For example, in descending order, the thymus has 3641 unique CDR3s, lung has 2730, intestine has 1657, kidney has 1277, and spleen has 689. This order of abundance was comparable with the previous observation in human studies by others that the thymus has most individual clones as the thymus is where in the first place these clones are produced. The lung and intestine are two of the high-ranking tissues where human γδ T cells are expressed.

TABLE 14
Pathogenic focusing of TCR delta in Delta (homo)/gamma (hetero) Mice
(in Blood) (E. coli study)

| | Top ten CDR3 of E coli | | | Top ten CDR3 of E coli | | |
|---|---|---|---|---|---|---|
| SEQ ID No. | Infection at day 0 | | (%) | Infection at day 3 | (%) | SEQ ID No. |
| 50848 | hDV1 | ALGVTGGYPDKLI | 3.0 | AMGFYWGTPYTDKL | 62.4 | 50867 |
| 50849 | | ALAIPDKLI | 2.7 | ALGFYWGTPYTEKL | 3.1 | 50868 |
| 50850 | | ALGVYWGPLDKLI | 2.4 | ALGFYWGTPYTDQL | 3.1 | 50869 |
| 50851 | | ALGEGWGISDKLI | 2.3 | ALGFYWGTPYTDK | 2.8 | 50870 |
| 50852 | | ALGSRPGGYDKLI | 2.2 | ALGFYWGTPYTDK | 1.8 | 50871 |
| 50853 | | ALGELGVHTDKLI | 2.2 | ALGFYWGTPNTDKL | 1.7 | 50872 |
| 50854 | | ALGEGWGAYTDKLI | 2.1 | DLGFYWGTPYTDKL | 3.5 | 50873 |
| 1214 | | ALGGLGDTDKLI | 2.1 | ALGFYWGTPSTDKL | 1.3 | 50874 |
| 50855 | | ALGPSYTDKLI | 2.0 | ALGCYWGTPYTDKL | 1.1 | 50875 |
| 50856 | | ALGELPSSDKLI | 2.0 | LLFTGGPRTPINS | 1.1 | 50876 |
| 50857 | hDV4 | AMREGPHVGMGLI | 5.1 | AMREGGVYDKLI | 41.0 | 50877 |
| 50858 | | AMREGDTGLI | 4.6 | AMRPSYYKLI | 36.4 | 50878 |
| 50859 | | AMREGWGKLI | 4.3 | AMREGLPGGYARDKLI | 13.5 | 50879 |
| 50860 | | AMREGWGYTDKLI | 4.1 | AMREGFSNKLI | 1.0 | 50880 |
| 50861 | | AMRAYWARADKLI | 4.0 | AMREGGVYNKLI | 0.3 | 50881 |
| 50862 | | AMRARTGGCDKLI | 3.7 | AMREGGVYYKLI | 0.2 | 50882 |
| 50863 | | AMRESTGGYATDKLI | 3.6 | AMRPSYYELI | 0.2 | 50883 |
| 50864 | | AMRELGDTFDKLI | 3.5 | ATREGGVYDKLI | 0.2 | 50884 |
| 50865 | | AMREGWGILKLI | 3.5 | AMRGGGVYDKLI | 0.1 | 50885 |
| 50866 | | AMREGDTHTDKLI | 3.4 | AMREGGVYGKLI | 0.1 | 50886 |

TABLE 15
Pathogenic Expansion of TCR delta in Delta (homo)/gamma (hetero) Mice
(in Blood) (Staphylococcus study)

| | Top ten CDR3 of Staph | | | Top ten CDR3 of Staph. | | |
|---|---|---|---|---|---|---|
| SEQ ID No. | Infection at day 0 | | (%) | Infection at day 3 | (%) | SEQ ID No. |
| 50887 | hDV1 | ALGEDTADKLI | 3.9 | ALGELEGIRHKLI | 19.9 | 50905 |
| 50888 | | ALGVPGGYPDKLI | 3.1 | ALGELLPGGYVDKL | 19.7 | 50906 |
| 8851 | | ALGELGGYTDKLI | 2.6 | ALGELFLLGDTDKL | 15.6 | 23 |
| 50889 | | ALGELEGDTDKLI | 2.6 | ALGDLGIRHKLI | 5.32 | 50907 |
| 50890 | | ALGEPGDRSSWDTR | 2.5 | ALGDLLPGGYVDKL | 2.95 | 50908 |
| 50891 | | ALGEPWGPDKLI | 2.5 | ALGDLFLLGDTDKL | 2.87 | 110 |
| 50892 | | ALGDPLWGISYTDK | 2.5 | ALGELLHGGYVDKL | 0.93 | 50909 |
| 50893 | | ALGAWGGILKLI | 2.3 | ALGELFLLGDTDQL | 0.79 | 117 |
| 50894 | | ALGEYWGIQDDKLI | 2.2 | ALGELFLLGDTEKL | 0.77 | 138 |
| 50895 | | ALGELDWGINTDKL | 2.1 | ALGELFLLGDTDK | 0.68 | 250 |
| 29638 | hDV2 | ACDTGGYDTDKLI | 27.9 | ACELLGDDDKLI | 79.0 | 50910 |
| 50896 | | ACDTGGGYDTDKLI | 24.8 | ACELLGDDEKLI | 1.2 | 50911 |
| 50897 | | ACDKYWGLYTDKLI | 15.2 | ACELRGDDDKLI | 1.1 | 50912 |
| 50898 | | ACDNTGAYTDKLI | 11.8 | PVSYWGMTINSS | 0.7 | 50913 |
| 50899 | | ACDTGGGYDTEKLI | 0.5 | ACELLGDDDKLF | 0.7 | 50914 |
| 50900 | | ACDTGGGYDTDQLI | 0.5 | ACELLGDDDNLI | 0.7 | 50915 |
| 50901 | | ACDTGGGDDTDKLI | 0.4 | ARELLGDDDKLI | 0.6 | 50916 |
| 50902 | | ACDTGGDYTEKLI | 0.4 | AGELLGDDDKLI | 0.6 | 50917 |
| 50903 | | ACDKYWGLYTEKLI | 0.4 | ACELLGDDDQLI | 0.6 | 50918 |
| 50904 | | ACRDGGGDTDKLI | 0.4 | ACELLGDDYKLI | 0.6 | 50919 |
| 50920 | hDV4 | AMRDGLI | 3.7 | AMRERGSYTDKLI | 89.0 | 50940 |
| 50921 | | AMKGDTDKLI | 3.5 | AMRERGSYTDELI | 0.6 | 50941 |
| 50922 | | AMSPRWGIRPDKLI | 3.3 | AMRERGSYTDKLV | 0.4 | 50942 |
| 50923 | | AMRVTGGNTDKLI | 3.2 | AMREGGSYTDKLI | 0.4 | 50943 |
| 50924 | | AMREGPPSPINSS | 3.3 | AMRERGSYADKLI | 0.4 | 50944 |
| 50925 | | AMREGCGSHTDKLI | 3.0 | AMSHTGGWAINSS | 0.3 | 50945 |
| 50926 | | AMRLYWGEYTDKLI | 3.0 | ALRERGSYTDKLI | 0.3 | 50946 |
| 50927 | | AMREGLWGIRDKLI | 3.0 | AVRERGSYTDKLI | 0.3 | 50947 |
| 50928 | | AMREGLGDTSDKLI | 3.0 | AMRERGSYTDKLT | 0.3 | 50948 |
| 50929 | | AMREAGVTDKLI | 3.0 | AMRERGPYTDKLI | 0.3 | 50949 |
| 50930 | hDV6 | AASTGGQVP | 8.0 | AEGDTDKLI | 38.4 | 50950 |
| 50931 | | AANHWGPYTDKLI | 7.9 | AALSSWDTRQM | 36.3 | 50951 |
| 50932 | | AASSPGGGYDKLI | 7.8 | QHWGAPGTPDR | 3.09 | 50952 |
| 50933 | | AASREGYGAI | 7.2 | AEGDTEKLI | 1.5 | 50953 |
| 50934 | | AAVGYGNPDKLI | 6.9 | AEGDTDQLI | 1.2 | 50954 |
| 50935 | | AASMGGDKLI | 5.8 | QRPININSS | 0.7 | 50955 |
| 50936 | | AASGGGYTTDKLI | 5.3 | AALGSSWDTRRM | 0.6 | 50956 |
| 50937 | | AASRGDTGTDKLI | 4.8 | STGELLGHPTD | 0.5 | 50957 |
| 50938 | | AASVVGDTDKLI | 4.7 | AEGDTDKLN | 0.5 | 50958 |
| 50939 | | AASMAGWGIYTDKLI | 4.1 | AALSSWDTRQR | 0.4 | 50959 |

TABLE 19
Top Ten TCR Gamma 10 CDR3s in various tissues

| SEQ ID No. | hGV10 | | (%) | | | (%) | SEQ ID No. |
|---|---|---|---|---|---|---|---|
| 42762 | Lung | AAQDYTTGWFKI | 8.2 | Thymus | AAWDTTGWFKI | 7.8 | 42763 |
| 42763 | | AAWDTTGWFKI | 6.8 | | AAWDYTTGWFKI | 3.7 | 42762 |
| 42764 | | AAWDLGTTGWFKI | 5.7 | | AAWGYTTGWFKI | 3.7 | 42805 |
| 42765 | | AAWDEATGWFKI | 4.2 | | AAWGTGWFKI | 2.9 | 43845 |
| 50960 | | AAWKGTGWFKI | 4.1 | | AAWGTTGWFKI | 1.5 | 42797 |
| 42767 | | AAWPGWFI | 4.0 | | AAWAYTTGWFKI | 1.5 | 42795 |
| 42768 | | AAWGPTGWFKI | 4.0 | | AAWDDTTGWFKI | 1.4 | 42887 |
| 42769 | | AAWDRDTTGWFKI | 3.7 | | AAWDWTTGWFKI | 1.2 | 42773 |
| 50961 | | AAFYTTGWFKI | 3.2 | | AAWYTTGWFKI | 1.2 | 42899 |
| 42771 | | AAWDWVYTTGWFKI | 3.2 | | AAWEYTTGWFKI | 1.2 | 42863 |
| 42950 | Intestine | AAWDSHTGWFKI | 17.3 | Kidney | AAWDCSGWFKI | 17.9 | 42938 |
| 42762 | | AAWDYYGWFKI | 10.3 | | AAWADTTGWFKI | 16.1 | 43053 |
| 50962 | | AAWWGWFKI | 6.9 | | AAWCTGWFKI | 15.0 | 43135 |
| 52792 | | AAWDTSGWFKI | 6.2 | | AAWDTTGWFKI | 13.6 | 42763 |
| 43452 | | AAWSPRATGWFKI | 6.2 | | AAWDYTTGWFKI | 11.9 | 42762 |
| 45479 | | AAWDQHTTGWFKI | 6.1 | | AAWDYEETTGWFKI | 8.0 | 43418 |
| 50963 | | AAWDFATGWFKI | 6.0 | | AAWDSTGWFKI | 2.1 | 42792 |
| 43302 | | AAWFTHTTGWFKI | 5.0 | | LRGPIPLVGSR | 0.3 | 43963 |
| 45221 | | AAWDRYGATGWFKI | 4.6 | | AAWCDSGWLKI | 0.3 | 49323 |
| 43650 | | ASTTGWFKI | 3.6 | | AAWADTTGWLKI | 0.2 | 45970 |
| | | | | Spleen | AAWDSTGWFKI | 80.8 | 42792 |
| | | | | | AAWDSAGWFKI | 1.1 | 45051 |
| | | | | | AAWDTTGWFKI | 0.8 | 42763 |
| | | | | | AAWGCSGWFKI | 0.8 | 42938 |
| | | | | | AAWADTTGWFKI | 0.7 | 43053 |
| | | | | | AAWHYTGWFKI | 0.7 | 50964 |
| | | | | | AAWDCTGWFKI | 0.7 | 43135 |
| | | | | | AAWDSTGWLKI | 0.7 | 45831 |
| | | | | | AAWDYTTGWFKI | 0.6 | 42762 |
| | | | | | AAGDSTGWFKI | 0.6 | 43724 |

### Example 10

[0308] Human TCR Vγ9/Vδ2 and Vγ9/Vδ1 Surface Expression by Flow Cytometry Analysis

[0309] The existence of γδ TCR revealed by repertoire studies was further demonstrated by flow cytometry analysis, which utilizes fluorescently labeled antibodies that specifically bind to T cell receptors on the T cell surface in protein form. Blood was collected through the retro-orbital sinus of human double homozygous γδ TCR mice. Tissues were first treated with Red Blood Cell Lysis buffer (0.8 g NH4Cl and 0.11 g NaHCO₃ in 100 ml water-based solution) to remove red blood cells and white blood cells including T cells were collected by centrifugation and diluted to a proper concentration before subject to a flow cytometer (Becton Dickinson LSRFortessa). The antibodies and their suppliers are listed in Table 20. The flow cytometry analysis in Table 21 showed that the spleen was the highest site for γ/δ T cells (about 17%), followed by the thymus (5%) and lung (2.6%), which are well matched with the results from human studies. In humans, the spleen is also the highest site for γδ T cells with an abundance of 12.5%±8.1%, followed by the thymus, 1.4%±0.5% (Inghirami, G., 1990 Am J Pathol 136: 357-367). The results herein indicated that γδ T cells in human γδ TCR mouse was well developed and maintained the correct ratio among other CD3-positive cells. The data herein also revealed that in the spleen most of the γδ T cells were contributed from humanized Vδ1 and Vδ2 with very little from mouse Vδ. Also in spleen, majority of the γ/δ T cells are humanized Vδ1/humanized Vγ9 with an abundance of 61%, yet humanized Vδ2/humanized Vγ9 with an abundance of 7.6% (FIG. 4). The higher proposition of Vδ1 than Vδ2 in all categories was also consistent with the observations from others as tissue residing γδ T cells are generally 61 T cells, yet 62 mostly in blood (Mossow, G., 2021 Front. Immunol., https://doi.org/10.3389/fimmu.2021.741218). In sum, the human γ/δ TCR mice have normal development and maturation in multiple tissues, and subclasses of humanized γ and humanized δ T cells can keep similar ratios as represented in humans.

TABLE 20

| Antibody and Suppliers | | |
|---|---|---|
| Antibody Target | Dye | Supplier |
| Anti-human TCR V61 | FITC | Miltiny |
| Anti-human TCR V82 | FITC | Miltiny |
| Anti-mouse CD3 | Pacific Blue | Biolegend |
| Anti-mouse v/6 TCR | APC-Vio-770 | Miltiny |

TABLE 21
Human Gamma/Delta TCR Flow Study in Lung, Spleen, and
Thymus

| | % | % | % Vδ 1 in | % Vδ 2 in | % Vδ 1 in | % Vδ 2 in |
|---|---|---|---|---|---|---|
| | α/β | γ/δ | total γ/δ | total γ/δ | total γ9 | total γ9 |
| Lung | 97.4 | 2.6 | 66 | 7.8 | 24 | 2.3 |
| Spleen | 83 | 17 | 70 | 30 | 61 | 7.6 |
| Thymus | 95 | 5 | 33 | 2.6 | 38 | 16.5 |

### Example 11

[0310] Cancer Development in Human TCR γδ Mice (B16 Cancer)

[0311] One of the big advantages of developing the human TCR γδ mouse model is this model has fully intact mouse immune systems, which provides researchers with a better model than immune-compromised mouse models (e.g., NSG and SCID) as compromised mice lacking B and T cells, which are the key players in immune therapy. The human TCR model, therefore, is suitable to accommodate syngeneic mouse cancer lines as many studies demonstrated their significance in cancer research. In the art, mouse B16 melanoma cell lines were isolated from B6 mice and proven to grow robustly in pure B6 and Balb/C mice strain, but not well in 129 mouse strain. The human TCR γ/δ mice were on a mixed background of B6 and 129 and mostly through a littermate mating scheme. Half a million B16 cells suspended in 250 ul of PBS were injected via the tail vein and the B16 primarily was proven to accumulate and metastasized in the lungs. Fourteen days later, the lungs were harvested and documented. As shown in Table 22 and FIG. 5, wild-type mice and mice with only one human TCR γ or TCR did not develop cancer at all. A large amount of B16 cancer was found in homozygous γ and homozygous δ mice, except for double homozygous mice. The results suggested that the copy number of TCR γ and/or δ played very important roles in melanoma cancer development.

TABLE 22
Cancer Development in Human TCR gamma/delta Mice (B16 cancer)

| Mouse | | Age | Genotyping | | Cancer |
|---|---|---|---|---|---|
| 1D | Sex | (Month) | Hu Delta | Hu Gamma | Occurrence |
| 472 | M | 2 | wt | wt | — |
| 473 | M | 2 | homo | homo | — |
| 474 | M | 2 | homo | wt | ++ |
| 475 | F | 2 | hetero | homo | +++ |
| 476 | F | 2 | homo | Hetero | — |
| 477 | F | 2 | hetero | wt | — |
| 479 | F | 2 | wt | hetero | — |
| 482 | M | 2 | wt | wt | — |
| 488 | F | 2 | wt | wt | — |

WT-wild type TCR gamma/delta direct from a mouse. Homo-homozygous
Hetero-heterozygous

### Example 12

[0312] Reduction and Elimination of Human Cancer Cells (Daudi) in Human γδ TCR Mice

[0313] It has already been demonstrated in the art that an important aspect of antigen specificity of human γδ TCR cells is their capacity to recognize and kill tumor targets. T cells expressing the Vγ9/Vδ2 heterodimer, the same TCR stimulated by bacterial phosphorylated metabolites, recognize bone marrow-derived tumor cells such as the non-Hodgkin B cell lymphoma line Daudi both in vitro (Fisch, P., et al. Science. 250:1269-1273.) and in vivo in a SCID animal model, an immune-compromised mouse, (Malkovska, V., et al. 1992 Cancer Res. 52:5610-5616.). Studies by Vyborova et al. further showed in vitro that only a fraction of expanded Vγ9/Vδ2 T cells was active against cancer cell lines and the clonal frequency was not associated with functional avidity of Vγ9/Vδ2 T cell receptors Clin Invest. 2020; 130:4637-4651), indicating a functional, yet complex, nature of human cancer killing by TCR based human γ/δ T cells. No human cancer studies have been done on the immune-competent mouse background with human γδ T cell receptors, besides intense effort in the last three decades.

[0314] In the present invention, 6 million in 200 ul PBS of human non-Hodgkin B cell lymphoma line Daudi (ATCC) was injected via tail vein into WT and human TCR γ (hetero)/δ (homo) mice. On day 4, multiple organs were collected including the lung, liver, spleen, intestine, and kidney, and treated with liberase (Roche) according to the manufacturer's suggestions. Cells from these tissues were labeled with PE-anti-human CD22 (Biolegend), which is a well-established marker in Daudi cells with high surface expression (Pop L., et al. 2014 Cancer Res. 74:263-271). Tissues with excessive blood were treated with a red blood cell lysis kit described in previous Examples. The CD22 labeled cells were subject to a flow cytometer (Becton Dickinson LSRFortessa). The results in Table 23 showed that there was a drastic reduction of Daudi cells (represented by CD22) in all the tissues examined from human TCR γ (hetero)/δ (homo) mouse vs. wildtype littermate control. There was a 3.4, 3, and 6.8 times reduction in lung, liver, and spleen, respectively. Particularly, There was total elimination of human Daudi cells in the intestine and kidney of human TCR (hetero)/δ (homo) mice, although very little amount of Daudi cells found wild type mice. (FIGS. 9-11)

TABLE 23
Number of CD22 Positive Human Cancer Cells
(Daudi) (per 500K Counting Events)

| Mouse Genotype | Lung | Liver | Spleen | Intestine | Kidney |
|---|---|---|---|---|---|
| WT | 55 | 27 | 190 | 33 | 0.3 |
| Delta(homo)/ | 16 | 9 | 28 | 0 | 0 |
| gamma (hetero) | | | | | |
| Ratio* | 3.4 | 3.0 | 6.8 | ∞ | ∞ |

*Ratio represents the ratio between wild type and human TCR gamma/delta mouse.
Homo—homozygous.
Hetero—heterozygous

### Example 13

[0315] Further Humanization of TCRγ Mice (ADδing Human Vγ1-8)

[0316] In this example, the humanized Vγ 9-11 mouse ES cell line was further humanized by introducing human Vγ1-8 on the same allele of humanized. Vγ9-11. A non-human animal (such as a mouse) was modified so that the non-human animal contained a nucleic acid sequence comprising human TCRγ, further comprising human TCR Vγ and Jγ. Specifically, an endogenous mouse sequence containing mouse TCR Vγ and Jγ was replaced with a sequence containing human TCR Vγ and Jγ and operably linked to a mouse TCR Cγ 1 region.

[0317] More specifically, the DNA construct comprised of 5′ mouse homology al n (10875 bp, DNA segment NO: 21), 48234 bp of human sequence including human TCR Vγ1-8, DNA segment NO: 22), an aDδitional human sequences with human JP1, JP, JP2, and J2 (15465 bp, DNA segment NO: 23), antibiotic selection cassette (DNA segment NO: 24, which is identical or substantially identical to DNA segment NO: 20), and 3′ mouse homology arm (8625 bp, DNA segment NO: 25). The human sequence ended with 5′ up-stream of the mouse endogenous Cγ 1 region, so human Vγs and Jγs was genetically linked to mouse Cγ1 region. The humanization strategy was summarized in FIG. 6. Junctional nucleic acid sequences inside the targeting vector among mouse, human, and prokaryotic/eukaryotic selection cassette are summarized in Table 24 and also provided in the Sequence Listing (Seq ID NO: 56-61).

TABLE 24
Junctional Nucleic acid sequences for Ygamma
Targeting Vector 2 (vector ID NO: 8)

| SEQ ID NO | Description |
|---|---|
| 56 | S' starting nucleic acid sequence of DNA segment |
| | NO: 21 of the 5'mouse homology arm inside |
| | mouse TCRgamma locus near C1 region |
| 57 | Junctional nucleic acid sequence between 3' end of |
| | mouse S'arm (DNA segment NO: 21) and the starting |
| | of the 5' end of human sequence (DNA |
| | segment NO: 22) |
| 58 | Junctional nucleic acid sequence between 3' end of |
| | human sequence (DNA segment NO: 22) and S' end |
| | of the human J region(DNA segment NO: 23) |
| 59 | Junctional nucleic acid sequence between 3' end of |
| | the human Jregion and 5' end of selection cassette |
| | (DNA segment NO: 24) |
| 60 | 3' ending nucleic acid sequence of DNA segment |
| | NO: 24 ofthe 5'mouse homology arm inside mouse |
| | TCRgamma C1 locus |
| 61 | 3' ending nucleic acid sequence of DNA segment |
| | NO: 25 |

TABLE 25
Primers for detecting RNA Expression of human Gamma V2-8 in humanized
mouse
(PCR round 1)

| Human Vgamma | Primer sequence (5′-3′) | Seq ID NO | New SEQ ID No. |
|---|---|---|---|
| hGV2-8 | CCCTTTCAGGCACTGTAAGCCAGC | 44 | 51020 |
| | (common anti-sense) | | |
| hGV2 | CTTGCTGAAGGAAGTAACGGCTAC | 45 | 51021 |
| hGV3 | CTTACTGTAACAAATACCTTCTAC | 46 | 51022 |
| hGV4 | TCTTGCTGAAGGAAGTACCGGCTAC | 47 | 51023 |
| hGV5 | TGTGACCTTACTGTAATAAATGCC | 48 | 51024 |
| hGV8 | TGATCTTCCTGTAGAAAATGCCGTC | 49 | 51025 |

TABLE 26
Primers for detecting RNA Expression of human Gamma V2-8 in humanized
mouse in C1 region
(PCR round 2)

| Human Vgamma | Primer sequence (5′-3′) | Seq ID NO | New SEQ ID No. |
|---|---|---|---|
| hGV2-8 | CCCCTTCCTGGGAGTCCAGGATAG | 50 | 51026 |
| | (comman anti-sense) | | |
| hGV2 | ACTATGACTCCTACAACTCCAAGG | 51 | 51027 |
| hGV3 | TACTATGACGTCTCCACCGCAAGGG | 52 | 51028 |
| hGV4 | ACTATGACTCCTACACCTCCAGCG | 53 | 51029 |
| hGV5 | ACTATGACGTCTCCAACTCAAAGG | 54 | 51030 |
| hGV8 | AAGTATCATACTTATGCAAGCACAGG | 55 | 51031 |

[0318] The bacteria homology recombination was helped by using bacterial Spec and Kan selection cassettes to finish the vector (Vector ID NO: 8). The linearized targeting vector (Vector ID NO: 8) was electroporated into ES cell line which contained humanized Vγ9-11 as described in Example 1. The targeted clones were selected as described in Example 1 and micro-injected into mouse blastocysts to generate chimera mice. The event of human Vγ1-8 and human Vγ9-11 on the same allele was confirmed by linkage analysis, in which all the progenies were positive for both human Vγ1-8 and human V. 9-11. There was no event that Human Vγ1-8 and human Vγ9-11 were in separate progenies.

[0319] The germline transmission of human Vγ1-11 mice was achieved and mated with humanized Vδ mice to generate humanized γδ TCR mice. The tissues from these humanized mice were analyzed only for their Vγ2-10 TCR expression since human Vγ1, 6, 7, and 11 are pseudogenes. The PCR primers were listed in Tables 25 and 26. Two round of PCR was performed, and the expression patterns were listed in Table 27. Table 27 showed that human Vγ 2, 3, 4, 5, 8, 9, and 10 were expressed in various mouse tissues. Some of the PCR products were Sanger sequenced. FIGS. 7 and 8 also showed that the human gamma TCRs were highly diversified as the DNA sequences passed 230 nt became highly overlapped, indicating multiple TCRs were amplified using the same pair of PCR primers.

TABLE 27
Human Gamma Expression in Different Mouse Tissues

| Human | Tissues of Human TCRgamma Mice | | | | | | | | | | | | | | | | | | | | | |
|---|---|---|---|---|---|---|---|---|---|---|---|---|---|---|---|---|---|---|---|---|---|---|
| Vgamma | 1 | 2 | 3 | 4 | 5 | 6 | 7 | 8 | 9 | 10 | 11 | 12 | 13 | 14 | 15 | 16 | 17 | 18 | 19 | 20 | 21 | 22 |
| AGV2 | | | | | | + | | + | + | | | | | + | | | | | | | + | + |
| hGV3 | | | | | | | | | + | | | | | | | | + | | | | | + |
| hGV4 | | | + | | | + | | + | | + | + | | | | | | | | | | | + |
| hGV5 | + | | | | | | | | | | | | | | | | | | | | | + |
| hGV8 | | | | | | | | | + | | | | | | | | | | | | | |
| hGV9 | | | | | | | | | + | + | | | | | | | + | | | | | + |
| hGV10 | | | + | + | + | + | | + | | + | + | | | | + | + | + | | | + | + | + |

1-Peritoneal fluid, 2-brain (olfactory), 3-ear (middle part), 4-nose, S-tough, 6-lymph
nodes, 7-throat, 8-lung, 9-spleen, 10-bone marrow, 11-Eye (eve ball), 12, 13, 14
(three beginning, middle, end) parts of small intestine, 15-uterus track, 16-kidney,
17-thymus, 18-muscle, 19-heart, 20-liver, 21-skin, 22-blood. Positive sign
represents expression of human gamma CDR3.

SEQUENCES 1-74
SEQ ID NO: 1 (SEQ ID No. 50967)
TAGGCTATCACAGACAGGGAGAATTTACATCCACCCCAACTTTATACTTCTAATTAT
CC
SEQ ID NO: 2 (SEQ ID No. 50968)
CCTGAAATTCCAGCTTGCAGAGCACTTCCTGCCTCCCTGTGAAGCAGCCTGACCTTG
GGATGCTGTCACTGCTCCACACATCAACGCTGGCAGTCCTTGGGGCTCGTAAGTAGT
TTT
SEQ ID NO: 3 (SEQ ID No. 50969)
TCTCCAGAGGATTCAGCTGTACTTCTAACTGCTCAAATGGAAGGTTATCAACATCAG
CTCGTACGTTCGTGGGATTGTGTCCGTGTCGCGAAGTTCCTATACTTTCTAGAGAATA
GGAACTTC
SEQ ID NO: 4 (SEQ ID No. 50970)
GAAGTTCCTATACTTTCTAGAGAATAGGAACTTCGTTGGTACGAACCCGGGTTTGGG
CCCCTTCTCAGTGCCAGTGTCCCCTCAGTGAAAAGAGACCAGCTTGTGTACTGTCAT
GTAGA
SEQ ID NO: 5 (SEQ ID No. 50971)
TGCTTCTACAGTGTCCTATTAATCCCACTGTGCTAGCACTGGGTTTCCATAGTCCATG
T
SEQ ID NO: 6 (SEQ ID No. 50972)
CTGCTTGCCATGCTCAGGAGCTGCAATAAGTTCAGCTCTTCGTGTCGCTTTATGCCTT
C
SEQ ID NO: 7 (SEQ ID No. 50973)
GAGTACCTGTCAAATATAAACTATGCTCAGCAGGTACCAGCGCCTCACTTTTATCCT
TTACGCGCCATTTATCAACTCACACCTATGGGGACAGCTATTATCAGAAAAACAAAA
GGCAACAAGT ATTAGTAGGGATGTG
SEQ ID NO: 8 (SEQ ID No. 50974)
TCAGATATTCTAAGGATCACTGCTATCCAGAGAATCTTAGAGCTTGACCTAAAGCTG
GTACCGTACTCATGGCAACAGCATTACTGACCATTTGAATGTAGAAGACTCATGAAT
TCTCCCTTCCT AGAGAC
SEQ ID NO: 9 (SEQ ID No. 50975)
CTCAGAGTCATATCGCTGCATTCACTACTTTCTCTGTGAGTTTTCTATGGGATTCAGC
ATAGCTAATATATCTTCCAACCTGAGTGTCAGCACATTCAGACTTGATCCAGCCAGA
AGCTACATTTTTC AGAGTCAGAG
SEQ ID NO: 10 (SEQ ID No. 50976)
AGAGAGATGGTAGTCCTGTGGTTGCTTCATCTGTGGTCTGGATCAGAAGATTTAATT
CTAAATAAAAGCTCATATGTCAATCTAATTCTGTGTTGTTAAAGTAAAGATATCAAA
GGAATAGCTCTAC TCCCATGTTTCAG
SEQ ID NO: 11 (SEQ ID No. 50977)
CTTCTCATTGAGGTTTATTCTGATTGATTTCCAGCTTTGCCCAAGGGACCCTGAGTTA
TCTTACCAGTTGGCAACCCAAAAACATCCTATAAAATCTCCAGCAGGCCTTTGTTTC
CTTGCCATCAGC TCCTCTTCGGC
SEQ ID NO: 12 (SEQ ID No. 50978)
CAATTTTGTAAGAGTATTGATGGAAAATCGTTAGGCATCTACATAGCCTTGATTTGG
CTCCTTGGACCTCTGACCAATAAACACAGGAAAAGATGCTCTACATCAGGAGTCAA
CAAAATATGGCC CATGAGCCAAATTC
SEQ ID NO: 13 (SEQ ID No. 50979)
TCTGAACCAGTCAGTAACCTTCCCATGGTAGTAATCATGTGAGACAGGATTCAGCAG
GACTGGCTGAGATTATATCAAAGCTTTCATAGGGGTTCTATAACCACAGAATGTAGT
TAGTTCCCTGC CAAGTAAAACTTA
SEQ ID NO: 14 (SEQ ID No. 50980)
ATCCCTTTGGCTAAGCTAACTAGTATGCGTGCCTCCTTGCAAACTGAAAACAAGTGT
CCTACAGCTTGGACGTACGGTACCAACGAAGTTCCTATTCTCTAGAAAGTATAGGA
ACTTCATTCTACC GGGTAGGGGAGG
SEQ ID NO: 15 (SEQ ID No. 50981)
CGCGGGAAGTTCCTATTCTCTAGAAAGTATAGGAACTTCGCGACACGGACACAATCC
CACGAACGTACGCCTGCACATACCTTCGGCTGAGCTAACGTGTCTGCATGCCTCCTT
ACAGAGCACAA ATCTCCTACAGCT
SEQ ID NO: 16 (SEQ ID No. 50982)
AAACGAAACCAAGGTCTCAAGACTGACAGCCCAAAGTTACTGTCCCAGGGGCTCCC
T
SEQ ID NO: 56 (SEQ ID No. 50983)
CTGCTATTAACTCCTGATTCAGCCTTCTAG
SEQ ID NO: 57 (SEQ ID No. 50984)
AGGCTGGCACACTCTCACTGATAGATGGCTAAGCGATACAGAGAGCCCAGACAACC
ATTTA GAGGTGAGGA ATTAGTAGGGATGTG
SEQ ID NO: 58 (SEQ ID No. 50985)
TAGCCCCAGAATATCCCTCTGTCAAAACGTTCTGCTAGCTTTGTAT
TAACTTTAAATAATTGGCATTATTTAAAGTTAGCAGAAAGAGATAAATGCATAGTTA
GTGCCTGACTCA
SEQ ID NO: 59 (SEQ ID No. 50986)
TCTAGCTAAAGAAAGGGGCAAGAGACAATGAATGCTGTGGTACCGTACAGAAAATG
TCGTA CGGAAGTTCCTATACTATTTGAAGAATAGGAACTTCC AGAGTCAGAG
SEQ ID NO: 60 (SEQ ID No. 50987)
ACGCTGTGATGCGTCTTATGCTGTGTATCGTGTCATGGTACCCAAGGACATCTTGTCT
GAAAC AAACTGTAATCGAGCACTCGACCACGGCTGTCCTCTG
SEQ ID NO: 61 (SEQ ID No. 50988)
ACTGGGTTGCATGCTTATTCAGAGAACTGGCTT
(Vγ9)
SEQ ID NO: 62 (SEQ ID No. 50989)
CVYGAGHLEQPQISSTKTLSKTARLECVVSGITISATSVYWYRERPGEVIQFLVSI
SYDGTVRKESGIPSGKFEVDRIPETSTSTLTIHNVEKQDIATYYCALWEV
(Vγ10)
SEQ ID NO: 63 (SEQ ID No. 50990)
MFIGNSPLLLTVILGLSKVEQFQLSISTEVKKSIDIPCKISSTRFETDVIHWYRQKPNQ A
LEHLIYIVSTKSAARRSMGKTSNKVEARKNSQTLTSILTIKSVEKEDMAVYYCAAWD
(Vγ11)
SEQ ID NO: 64 (SEQ ID No. 50991)
LGQLEQPEISISRPANKSAHISWKASIQGFSSKIIHWYWQKPNKGLEYLLHVFLTISAQ D
CSGGKTKKLEVSKNAHTSTSTLKIKFLEKEDEVVYHCACWIRH
(Vδ1)
SEQ ID NO: 65 (SEQ ID No. 50992)
SSVAQKVTQAQSSVSMPVRKAVTLNCLYETSWWSYYIFWYKQLPSKEMIFLIR
QGSDEQNAKSGRYSVNFKKAAKSVALTISALQLEDSAKYFCALGE
(Vδ2)
SEQ ID NO: 66 (SEQ ID No. 50993)
VMSAIELVPEHQTVPVSIGVPATLRCSMKGEAIGNYYINWYRKTQGNTMTFIY
REKDIYGPGFKDNFQGDIDIAKNLAVLKILAPSERDEGSYYCACDT
(Vδ3)
SEQ ID NO: 67 (SEQ ID No. 50994)
RGTLCDKVTQSSPDQTVASGSEVVLLCTYDTVYSNPDLFWYRIRPDYSFQFVF
YGDNSRSEGADFTQGRFSVKHILTQKAFHLVISPVRTEDSATYYCAF
(Vδ4)
SEQ ID NO: 68 (SEQ ID No. 50995)
PGIAQKITQTQPGMFVQEKEAVTLDCTYDTSDPSYGLFWYKQPSSGEMIFLIY
QGSYDQQNATEGRYSLNFQKARKSANLVISASQLGDSAMYFCAMRE
(Vδ5)
SEQ ID NO: 69 (SEQ ID No. 50996)
VNSQQKNDAQQVKQNSPSLSVQEGRISILNCDYTNSMFDYFLWYKKYPAEGP
TFLISISSIKDKNEDGRFTVFLNKSAKHLSLHIVPSQPGDSAVYFCAAS
(Vδ6)
SEQ ID NO: 70 (SEQ ID No. 50997)
VSGQQKEKSDQQQVKQSPQSLIVQKGGISIINCAYENTAFDYFPWYQQFPGKG
PALLIAIRPDVSEKKEGRFTISFNKSAKQFSSHIMDSQPGDSATYFCAA
(Vδ7)
SEQ ID NO: 71 (SEQ ID No. 50998)
VSSEDKVVQSPLSLVVHEGDTVTLNCSYEVTNFRSLLWYKQEKKAPTFLFMLTSS
GIEKKSGRLSSILDKKELFSILNITATQTGDSAIYLCAVE
(Vδ8)
SEQ ID NO: 72 (SEQ ID No. 50999)
FSMAQTVTQSQPEMSVQEAETVTLSCTYDTSESDYYLFWYKQPPSRQMIL VIR
QEAYKQQNATENRFSVNFQKAAKSFSLKISDSQLGDAAMYFCAYRS
(constant region of a murine 8 TCR chain)
SEQ ID NO: 73 (SEQ ID No. 51000)
XSQPPAKPSVFIMKNGTNVACLVKDFYPKEVTISLRSSKKIVEFDPAIVISPSGKY
SAVKLGQYGDSNSVTCSVQHNSETVHSTDFEPYANSFNNEKLPEPENDTQISE
PCYGPRVTVHT EKVNMMSLTVLGLRLLFAKTIAINFLLTVKLFF
(constant region of a murine YTCR chain)
SEQ ID NO: 74 (SEQ ID No. 51001)
XKRTDSDFSPKPTIFLPSAAETNLHKAGTYLCLLEKFFPEVIRVYWKEKDGEKIL
ESQEGNTIKTNDRYMKFSWLTVTEDSMAKEHSCIVKHENNKRGVDQEILFPP
IGKAFTTINVNPRDSVLRHENVNNATDLEDCMKGRKDMLQLQVTTTYAFYT
YLILFFKSMVHLAFVVFCLFRRAAMSCDDQRS

The application's sequence listing, which the Patent Office published only in electronic form, follows.

SEQUENCE LISTING (51036 sequences)

SEQ ID NO: 1 - protein, 12 aa, synthetic construct
ALGELGSTDKLI

SEQ ID NO: 2 - protein, 13 aa, synthetic construct
ALGELLGDTDKLI

SEQ ID NO: 3 - protein, 11 aa, synthetic construct
ALGEGDTDKLI

SEQ ID NO: 4 - protein, 13 aa, synthetic construct
ALGEGGDTPDKLI

SEQ ID NO: 5 - protein, 12 aa, synthetic construct
ALGEPGTTINSS

SEQ ID NO: 6 - protein, 12 aa, synthetic construct
ALGELWIHDKLI

SEQ ID NO: 7 - protein, 14 aa, synthetic construct
ALGELPYRGIRTDK

SEQ ID NO: 8 - protein, 12 aa, synthetic construct
ALGELLHTDKLI

SEQ ID NO: 9 - protein, 13 aa, synthetic construct
ALGELGDSSWDTR

SEQ ID NO: 10 - protein, 14 aa, synthetic construct
ALGELGDTYPDKLI

SEQ ID NO: 11 - protein, 13 aa, synthetic construct
ALGEVPTDTDKLI

SEQ ID NO: 12 - protein, 12 aa, synthetic construct
ALGAGGYTDKLI

SEQ ID NO: 13 - protein, 13 aa, synthetic construct
ALGELTFLPDKLI

SEQ ID NO: 14 - protein, 14 aa, synthetic construct
ALGALLPTFRGTDK

SEQ ID NO: 15 - protein, 13 aa, synthetic construct
ALGELGDKDDKLI

SEQ ID NO: 16 - protein, 14 aa, synthetic construct
ALGELAWGSYTDKL

SEQ ID NO: 17 - protein, 14 aa, synthetic construct
ALGRAFLRTLYTDK

SEQ ID NO: 18 - protein, 14 aa, synthetic construct
ALGEPTGGWTDKLI

SEQ ID NO: 19 - protein, 14 aa, synthetic construct
ALGELVWGTTDKLI

SEQ ID NO: 20 - protein, 14 aa, synthetic construct
ALGGPSWYWGIPDK

SEQ ID NO: 21 - protein, 14 aa, synthetic construct
ALGELGGGYDDKLI

SEQ ID NO: 22 - protein, 14 aa, synthetic construct
ALGELTGGYADKLI

SEQ ID NO: 23 - protein, 14 aa, synthetic construct
ALGELFLLGDTDKL

SEQ ID NO: 24 - protein, 14 aa, synthetic construct
ALGEIANWGINTDK

SEQ ID NO: 25 - protein, 14 aa, synthetic construct
ALGELALPGIHTDK

SEQ ID NO: 26 - protein, 14 aa, synthetic construct
ALGELGTGGYADKL

SEQ ID NO: 27 - protein, 14 aa, synthetic construct
ALGEHPYWGIYTDK

SEQ ID NO: 28 - protein, 13 aa, synthetic construct
ALGELWGIRSKLI

SEQ ID NO: 29 - protein, 14 aa, synthetic construct
ALGELVSLGYTDKL

SEQ ID NO: 30 - protein, 14 aa, synthetic construct
ALGEPPSYVLGDTD

SEQ ID NO: 31 - protein, 14 aa, synthetic construct
ALGELSPFTGGHKL

SEQ ID NO: 32 - protein, 14 aa, synthetic construct
ALGELEWGIRGTDK

SEQ ID NO: 33 - protein, 14 aa, synthetic construct
ALGEPSYAGGSYTD

SEQ ID NO: 34 - protein, 14 aa, synthetic construct
ALGELREGDKNKLI

SEQ ID NO: 35 - protein, 14 aa, synthetic construct
ALGELGGYARTDKL

SEQ ID NO: 36 - protein, 14 aa, synthetic construct
ALGVRRGIRGTDKL

SEQ ID NO: 37 - protein, 14 aa, synthetic construct
ALGELCLGDTLATA

SEQ ID NO: 38 - protein, 12 aa, synthetic construct
ALGELGDTDKLI

SEQ ID NO: 39 - protein, 14 aa, synthetic construct
ALGEPGLPLLGDTD

SEQ ID NO: 40 - protein, 14 aa, synthetic construct
ALGEPVLGDIYTDK

SEQ ID NO: 41 - protein, 13 aa, synthetic construct
ALGVPPSYVLGEI

SEQ ID NO: 42 - protein, 14 aa, synthetic construct
ALGELVLGDTDKLI

SEQ ID NO: 43 - protein, 14 aa, synthetic construct
ALGELSLRGIHTDK

SEQ ID NO: 44 - protein, 14 aa, synthetic construct
ALGERTGGYLGSWD

SEQ ID NO: 45 - protein, 13 aa, synthetic construct
ALGAGGYAGDKLI

SEQ ID NO: 46 - protein, 13 aa, synthetic construct
ALGEVLLGDSPLI

SEQ ID NO: 47 - protein, 13 aa, synthetic construct
ALGDLLGDTDKLI

SEQ ID NO: 48 - protein, 11 aa, synthetic construct
ALGELSPFTGG

SEQ ID NO: 49 - protein, 12 aa, synthetic construct
ALGDLGSTDKLI

SEQ ID NO: 50 - protein, 14 aa, synthetic construct
ALGDLGGGYDDKLI

SEQ ID NO: 51 - protein, 14 aa, synthetic construct
ALGELCLGETLATA

SEQ ID NO: 52 - protein, 14 aa, synthetic construct
ALGDLEWGIRGTDK

SEQ ID NO: 53 - protein, 12 aa, synthetic construct
ALGELGSTDQLI

SEQ ID NO: 54 - protein, 14 aa, synthetic construct
ALGDLAWGSYTDKL

SEQ ID NO: 55 - protein, 14 aa, synthetic construct
ALGDLVWGTTDKLI

SEQ ID NO: 56 - protein, 13 aa, synthetic construct
ALGDLTFLPDKLI

SEQ ID NO: 57 - protein, 14 aa, synthetic construct
ALGELFILGDTDKL

SEQ ID NO: 58 - protein, 13 aa, synthetic construct
ALGELLGDTDQLI

SEQ ID NO: 59 - protein, 13 aa, synthetic construct
ALGELLGDTNKLI

SEQ ID NO: 60 - protein, 13 aa, synthetic construct
ALGDLGDSSWDTR

SEQ ID NO: 61 - protein, 13 aa, synthetic construct
ALGDLGDKDDKLI

SEQ ID NO: 62 - protein, 13 aa, synthetic construct
ALGDLWGIRSKLI

SEQ ID NO: 63 - protein, 14 aa, synthetic construct
ALGDLPYRGIRTDK

SEQ ID NO: 64 - protein, 14 aa, synthetic construct
ALGDLALPGIHTDK

SEQ ID NO: 65 - protein, 10 aa, synthetic construct
ALGEPSYAGG

SEQ ID NO: 66 - protein, 14 aa, synthetic construct
APGELVSLGYTDKL

SEQ ID NO: 67 - protein, 14 aa, synthetic construct
ALGDLGDTYPDKLI

SEQ ID NO: 68 - protein, 14 aa, synthetic construct
ALGEPPSYVLGTPI

SEQ ID NO: 69 - protein, 14 aa, synthetic construct
ALGELGDTYPEKLI

SEQ ID NO: 70 - protein, 14 aa, synthetic construct
ALGDLTGGYADKLI

SEQ ID NO: 71 - protein, 14 aa, synthetic construct
ALGDLVSLGYTDKL

SEQ ID NO: 72 - protein, 14 aa, synthetic construct
ALGEPTGGWTEKLI

SEQ ID NO: 73 - protein, 14 aa, synthetic construct
ALGGPSWSWGIPDK

SEQ ID NO: 74 - protein, 12 aa, synthetic construct
ALGDLWIHDKLI

SEQ ID NO: 75 - protein, 13 aa, synthetic construct
ALGELLGDTEKLI

SEQ ID NO: 76 - protein, 14 aa, synthetic construct
ALGDLREGDKNKLI

SEQ ID NO: 77 - protein, 13 aa, synthetic construct
ALGVPPSYVLGDI

SEQ ID NO: 78 - protein, 13 aa, synthetic construct
ALGEGGDTPDQLI

SEQ ID NO: 79 - protein, 12 aa, synthetic construct
ALGDLLHTDKLI

SEQ ID NO: 80 - protein, 14 aa, synthetic construct
ALGELGPGGYADKL

SEQ ID NO: 81 - protein, 13 aa, synthetic construct
ALGEGGDTPEKLI

SEQ ID NO: 82 - protein, 12 aa, synthetic construct
ALGELLNTDKLI

SEQ ID NO: 83 - protein, 14 aa, synthetic construct
ALGDLGGYARTDKL

SEQ ID NO: 84 - protein, 13 aa, synthetic construct
ALGELWGIRSQLI

SEQ ID NO: 85 - protein, 11 aa, synthetic construct
ALGEGDTEKLI

SEQ ID NO: 86 - protein, 14 aa, synthetic construct
ALGELVWGTTEKLI

SEQ ID NO: 87 - protein, 14 aa, synthetic construct
ALGELGGGYYDKLI

SEQ ID NO: 88 - protein, 14 aa, synthetic construct
ALGDIANWGINTDK

SEQ ID NO: 89 - protein, 13 aa, synthetic construct
ALGALLPTFRGTD

SEQ ID NO: 90 - protein, 13 aa, synthetic construct
ALGELPYRGIRTD

SEQ ID NO: 91 - protein, 14 aa, synthetic construct
ALGDLCLGDTLATA

SEQ ID NO: 92 - protein, 14 aa, synthetic construct
ALGDLVLGDTDKLI

SEQ ID NO: 93 - protein, 14 aa, synthetic construct
ALGELALPGINTDK

SEQ ID NO: 94 - protein, 14 aa, synthetic construct
ALGELGGGYDYKLI

SEQ ID NO: 95 - protein, 13 aa, synthetic construct
ALGEVWGIRSKLI

SEQ ID NO: 96 - protein, 12 aa, synthetic construct
ALGDLGDTDKLI

SEQ ID NO: 97 - protein, 13 aa, synthetic construct
ALGEPPSYVLGDT

SEQ ID NO: 98 - protein, 13 aa, synthetic construct
ALGEPGLPLLGDT

SEQ ID NO: 99 - protein, 13 aa, synthetic construct
ALGELGDKDDQLI

SEQ ID NO: 100 - protein, 13 aa, synthetic construct
ALGDVPTDTDKLI

SEQ ID NO: 101 - protein, 13 aa, synthetic construct
ALGELTFLPDQLI

SEQ ID NO: 102 - protein, 14 aa, synthetic construct
ALGELVSLGYADKL

SEQ ID NO: 103 - protein, 14 aa, synthetic construct
ALGDLGTGGYADKL

SEQ ID NO: 104 - protein, 14 aa, synthetic construct
ALGELGGGYDEKLI

SEQ ID NO: 105 - protein, 12 aa, synthetic construct
ALGELWIHDQLI

SEQ ID NO: 106 - protein, 13 aa, synthetic construct
ALGELSLRGIHTD

SEQ ID NO: 107 - protein, 12 aa, synthetic construct
ALGELLHTDQLI

SEQ ID NO: 108 - protein, 14 aa, synthetic construct
ALGELTGGYAEKLI

SEQ ID NO: 109 - protein, 11 aa, synthetic construct
ALGDGDTDKLI

SEQ ID NO: 110 - protein, 14 aa, synthetic construct
ALGDLFLLGDTDKL

SEQ ID NO: 111 - protein, 14 aa, synthetic construct
ALGDHPYWGIYTDK

SEQ ID NO: 112 - protein, 14 aa, synthetic construct
ALGELCLRDTLATA

SEQ ID NO: 113 - protein, 13 aa, synthetic construct
ALGELGDRSWDTR

SEQ ID NO: 114 - protein, 14 aa, synthetic construct
LLGSLLPTYWGTPI

SEQ ID NO: 115 - protein, 13 aa, synthetic construct
ALGELTFLPEKLI

SEQ ID NO: 116 - protein, 14 aa, synthetic construct
ALGDLSLRGIHTDK

SEQ ID NO: 117 - protein, 14 aa, synthetic construct
ALGELFLLGDTDQL

SEQ ID NO: 118 - protein, 12 aa, synthetic construct
ALGDPGTTINSS

SEQ ID NO: 119 - protein, 13 aa, synthetic construct
ALGELALPGIHTD

SEQ ID NO: 120 - protein, 13 aa, synthetic construct
ALGEVPTDTEKLI

SEQ ID NO: 121 - protein, 13 aa, synthetic construct
ALGVPPSYVLWEI

SEQ ID NO: 122 - protein, 14 aa, synthetic construct
ALGDPTGGWTDKLI

SEQ ID NO: 123 - protein, 14 aa, synthetic construct
ALGEVGGGYDDKLI

SEQ ID NO: 124 - protein, 13 aa, synthetic construct
ALGEGGIPPINSS

SEQ ID NO: 125 - protein, 13 aa, synthetic construct
ALGEHPYWGIYTD

SEQ ID NO: 126 - protein, 13 aa, synthetic construct
ALGEPPSYVLWDT

SEQ ID NO: 127 - protein, 13 aa, synthetic construct
ALGEVPTDTDQLI

SEQ ID NO: 128 - protein, 12 aa, synthetic construct
ALGEIGSTDKLI

SEQ ID NO: 129 - protein, 14 aa, synthetic construct
ALGELCMGDTLATA

SEQ ID NO: 130 - protein, 13 aa, synthetic construct
LLGNYWGIPINSS

SEQ ID NO: 131 - protein, 13 aa, synthetic construct
ALGELGDKDEKLI

SEQ ID NO: 132 - protein, 12 aa, synthetic construct
ALGELGSTEKLI

SEQ ID NO: 133 - protein, 12 aa, synthetic construct
ALGELGSTDKII

SEQ ID NO: 134 - protein, 13 aa, synthetic construct
LLGKGGIPPINSS

SEQ ID NO: 135 - protein, 11 aa, synthetic construct
LLGKGTPINSS

SEQ ID NO: 136 - protein, 14 aa, synthetic construct
ALGEIAYWGINTDK

SEQ ID NO: 137 - protein, 14 aa, synthetic construct
APGELGDTYPDKLI

SEQ ID NO: 138 - protein, 14 aa, synthetic construct
ALGELFLLGDTEKL

SEQ ID NO: 139 - protein, 13 aa, synthetic construct
ALGEILGDTDKLI

SEQ ID NO: 140 - protein, 14 aa, synthetic construct
ALGELAWGSYTEKL

SEQ ID NO: 141 - protein, 11 aa, synthetic construct
ALGEGDTDKLN

SEQ ID NO: 142 - protein, 14 aa, synthetic construct
ALGDLSPFTGGHKL

SEQ ID NO: 143 - protein, 14 aa, synthetic construct
LLGALPGTGGYPIN

SEQ ID NO: 144 - protein, 13 aa, synthetic construct
ALGRAFLRTLYTD

SEQ ID NO: 145 - protein, 13 aa, synthetic construct
ALGEVHTDTDKLI

SEQ ID NO: 146 - protein, 14 aa, synthetic construct
LLGLSFLRSGAPIN

SEQ ID NO: 147 - protein, 12 aa, synthetic construct
LLGLGDTPINSS

SEQ ID NO: 148 - protein, 14 aa, synthetic construct
LLGNYPTGGYAPIN

SEQ ID NO: 149 - protein, 12 aa, synthetic construct
ALGELGSTDKLN

SEQ ID NO: 150 - protein, 12 aa, synthetic construct
LLGNSSTPINSS

SEQ ID NO: 151 - protein, 13 aa, synthetic construct
ALGEIANWGINTD

SEQ ID NO: 152 - protein, 13 aa, synthetic construct
ALGDLLGDTDQLI

SEQ ID NO: 153 - protein, 13 aa, synthetic construct
ALGDGGDTPDKLI

SEQ ID NO: 154 - protein, 14 aa, synthetic construct
ALGEHPNWGIYTDK

SEQ ID NO: 155 - protein, 12 aa, synthetic construct
ALGAGGYTDQLI

SEQ ID NO: 156 - protein, 14 aa, synthetic construct
ALGELGTGGYSDKL

SEQ ID NO: 157 - protein, 12 aa, synthetic construct
DLGELGSTDKLI

SEQ ID NO: 158 - protein, 14 aa, synthetic construct
ALGEPTGGCTDKLI

SEQ ID NO: 159 - protein, 14 aa, synthetic construct
LLGGPSFVLCTPIN

SEQ ID NO: 160 - protein, 14 aa, synthetic construct
ALGELGDTYTDKLI

SEQ ID NO: 161 - protein, 14 aa, synthetic construct
LLGNTRTGGSTPIN

SEQ ID NO: 162 - protein, 14 aa, synthetic construct
ALGEVEWGIRGTDK

SEQ ID NO: 163 - protein, 14 aa, synthetic construct
ALGELVSLGYTEKL

SEQ ID NO: 164 - protein, 14 aa, synthetic construct
ALGELREGDQNKLI

SEQ ID NO: 165 - protein, 12 aa, synthetic construct
ALGEILHTDKLI

SEQ ID NO: 166 - protein, 13 aa, synthetic construct
ALGELEWGIRGTD

SEQ ID NO: 167 - protein, 14 aa, synthetic construct
ALGELGGYARTDQL

SEQ ID NO: 168 - protein, 13 aa, synthetic construct
LLGNYWGTPINSS

SEQ ID NO: 169 - protein, 14 aa, synthetic construct
ALGELVSLGYTDQL

SEQ ID NO: 170 - protein, 13 aa, synthetic construct
ALGVHPSYVLGEI

SEQ ID NO: 171 - protein, 14 aa, synthetic construct
ALGDPGLPLLGDTD

SEQ ID NO: 172 - protein, 13 aa, synthetic construct
ALGEVPKDTDKLI

SEQ ID NO: 173 - protein, 13 aa, synthetic construct
ALGVPPSYVLGEL

SEQ ID NO: 174 - protein, 12 aa, synthetic construct
LLGNSGYTINSS

SEQ ID NO: 175 - protein, 12 aa, synthetic construct
ALGELGDSSWDT

SEQ ID NO: 176 - protein, 14 aa, synthetic construct
ALGELALPGIHTEK

SEQ ID NO: 177 - protein, 12 aa, synthetic construct
ALGELGDTDQLI

SEQ ID NO: 178 - protein, 13 aa, synthetic construct
LLGKFLRIPINSS

SEQ ID NO: 179 - protein, 14 aa, synthetic construct
ALGEPVLGDLYTDK

SEQ ID NO: 180 - protein, 13 aa, synthetic construct
ALGELGDKDYKLI

SEQ ID NO: 181 - protein, 14 aa, synthetic construct
ALGELGGYARSDKL

SEQ ID NO: 182 - protein, 14 aa, synthetic construct
ALGDPSYAGGSYTD

SEQ ID NO: 183 - protein, 12 aa, synthetic construct
ALGELGSTDNLI

SEQ ID NO: 184 - protein, 13 aa, synthetic construct
DLGELLGDTDKLI

SEQ ID NO: 185 - protein, 13 aa, synthetic construct
ALGEPGLPLLWDT

SEQ ID NO: 186 - protein, 13 aa, synthetic construct
ALGEVGDKDDKLI

SEQ ID NO: 187 - protein, 13 aa, synthetic construct
ALGDLTFLPDQLI

SEQ ID NO: 188 - protein, 14 aa, synthetic construct
ALGELVWGTTDKII

SEQ ID NO: 189 - protein, 12 aa, synthetic construct
ALGELGSTDKHI

SEQ ID NO: 190 - protein, 13 aa, synthetic construct
ALGDLWGIRSQLI

SEQ ID NO: 191 - protein, 13 aa, synthetic construct
ALGELGDKVDKLI

SEQ ID NO: 192 - protein, 14 aa, synthetic construct
ALGEIANWGIKTDK

SEQ ID NO: 193 - protein, 12 aa, synthetic construct
ALGELGSTDTLI

SEQ ID NO: 194 - protein, 14 aa, synthetic construct
ALGEPTGGWTDKII

SEQ ID NO: 195 - protein, 12 aa, synthetic construct
ALGEPGTTINST

SEQ ID NO: 196 - protein, 13 aa, synthetic construct
ALGELLGDTDKII

SEQ ID NO: 197 - protein, 13 aa, synthetic construct
ALGEVPTDTDKII

SEQ ID NO: 198 - protein, 12 aa, synthetic construct
ALGELLHTEKLI

SEQ ID NO: 199 - protein, 14 aa, synthetic construct
ALGELGDTYPDQLI

SEQ ID NO: 200 - protein, 13 aa, synthetic construct
ALGELGDSSWYTR

SEQ ID NO: 201 - protein, 13 aa, synthetic construct
LLGNYGGYAVNSS

SEQ ID NO: 202 - protein, 13 aa, synthetic construct
ALGELAWGSYTDK

SEQ ID NO: 203 - protein, 12 aa, synthetic construct
ALGELWIHDKII

SEQ ID NO: 204 - protein, 14 aa, synthetic construct
LLGNWGILTPINSS

SEQ ID NO: 205 - protein, 14 aa, synthetic construct
ALGELDWGTTDKLI

SEQ ID NO: 206 - protein, 13 aa, synthetic construct
ALGELVSLGYTDK

SEQ ID NO: 207 - protein, 14 aa, synthetic construct
ALGELGDTYPDKII

SEQ ID NO: 208 - protein, 14 aa, synthetic construct
ALGRAFLRTLYTEK

SEQ ID NO: 209 - protein, 14 aa, synthetic construct
ALGELAWGSYTDQL

SEQ ID NO: 210 - protein, 14 aa, synthetic construct
ALGELVLGDTEKLI

SEQ ID NO: 211 - protein, 14 aa, synthetic construct
LLGNPYWGIYTPIN

SEQ ID NO: 212 - protein, 13 aa, synthetic construct
ALGELWGIRRKLI

SEQ ID NO: 213 - protein, 13 aa, synthetic construct
ALGELLGDTDKLN

SEQ ID NO: 214 - protein, 13 aa, synthetic construct
ALGELREGDKNKL

SEQ ID NO: 215 - protein, 13 aa, synthetic construct
ALGEGGDTPDKLN

SEQ ID NO: 216 - protein, 14 aa, synthetic construct
ALGRAFIRTLYTDK

SEQ ID NO: 217 - protein, 13 aa, synthetic construct
ALGELGGGYDDKL

SEQ ID NO: 218 - protein, 13 aa, synthetic construct
ALGELGDTYPDKL

SEQ ID NO: 219 - protein, 14 aa, synthetic construct
ALGDPVLGDIYTDK

SEQ ID NO: 220 - protein, 13 aa, synthetic construct
ALGEVLGDTDKLI

SEQ ID NO: 221 - protein, 14 aa, synthetic construct
ALGELSPFTGGQKL

SEQ ID NO: 222 - protein, 14 aa, synthetic construct
ALGELVWGTTDQLI

SEQ ID NO: 223 - protein, 14 aa, synthetic construct
LLGNSVLGDTRINS

SEQ ID NO: 224 - protein, 14 aa, synthetic construct
ALGELGGGYDDKII

SEQ ID NO: 225 - protein, 14 aa, synthetic construct
ALGELTGGYADKII

SEQ ID NO: 226 - protein, 14 aa, synthetic construct
ALGELAIPGIHTDK

SEQ ID NO: 227 - protein, 13 aa, synthetic construct
ALGAGGYAGDQLI

SEQ ID NO: 228 - protein, 12 aa, synthetic construct
ALGELWIHDNLI

SEQ ID NO: 229 - protein, 14 aa, synthetic construct
ALGEPPTYVLGDTD

SEQ ID NO: 230 - protein, 14 aa, synthetic construct
ALGEPVWGTTDKLI

SEQ ID NO: 231 - protein, 14 aa, synthetic construct
ALGDRTGGYLGSWD

SEQ ID NO: 232 - protein, 12 aa, synthetic construct
ALGELIHTDKLI

SEQ ID NO: 233 - protein, 13 aa, synthetic construct
ALGDLGDKDDQLI

SEQ ID NO: 234 - protein, 12 aa, synthetic construct
ALGELWINDKLI

SEQ ID NO: 235 - protein, 14 aa, synthetic construct
ALGEPTGGWTDQLI

SEQ ID NO: 236 - protein, 13 aa, synthetic construct
ALGELGDKDDKII

SEQ ID NO: 237 - protein, 13 aa, synthetic construct
ALGELLGDTDTLI

SEQ ID NO: 238 - protein, 14 aa, synthetic construct
LLGNLLGDGPINSS

SEQ ID NO: 239 - protein, 11 aa, synthetic construct
ALGEGDTDKLF

SEQ ID NO: 240 - protein, 12 aa, synthetic construct
ALGELGSADKLI

SEQ ID NO: 241 - protein, 13 aa, synthetic construct
ALGELLWDTDKLI

SEQ ID NO: 242 - protein, 14 aa, synthetic construct
ALGEPVLGEIYTDK

SEQ ID NO: 243 - protein, 13 aa, synthetic construct
ALGEPVLGDIYTD

SEQ ID NO: 244 - protein, 13 aa, synthetic construct
ALGGPSWYWGIPD

SEQ ID NO: 245 - protein, 14 aa, synthetic construct
LLGNLPTLGDLTPI

SEQ ID NO: 246 - protein, 14 aa, synthetic construct
ALGELTGGYADQLI

SEQ ID NO: 247 - protein, 14 aa, synthetic construct
ALGVGRGIRGTDKL

SEQ ID NO: 248 - protein, 14 aa, synthetic construct
ALGEHPYWGIYTEK

SEQ ID NO: 249 - protein, 14 aa, synthetic construct
ALGELREGDKKKLI

SEQ ID NO: 250 - protein, 13 aa, synthetic construct
ALGELFLLGDTDK

SEQ ID NO: 251 - protein, 12 aa, synthetic construct
ALGELWIHEKLI

SEQ ID NO: 252 - protein, 13 aa, synthetic construct
ALGELTFLPDKII

SEQ ID NO: 253 - protein, 14 aa, synthetic construct
ALGEIGTGGYADKL

SEQ ID NO: 254 - protein, 13 aa, synthetic construct
DLGEGGDTPDKLI

SEQ ID NO: 255 - protein, 14 aa, synthetic construct
ALGVRRGIRGTDQL

SEQ ID NO: 256 - protein, 14 aa, synthetic construct
LLGNWGDTLAPINS

SEQ ID NO: 257 - protein, 13 aa, synthetic construct
ALGEMGDSSWDTR

SEQ ID NO: 258 - protein, 14 aa, synthetic construct
ALGELVSLGSTDKL

SEQ ID NO: 259 - protein, 13 aa, synthetic construct
LLGNWGIRTINSS

SEQ ID NO: 260 - protein, 13 aa, synthetic construct
DLGELTFLPDKLI

SEQ ID NO: 261 - protein, 14 aa, synthetic construct
ALGEHPYWGISTDK

SEQ ID NO: 262 - protein, 13 aa, synthetic construct
ALGEGGDTPDKII

SEQ ID NO: 263 - protein, 14 aa, synthetic construct
ALGEMGDTYPDKLI

SEQ ID NO: 264 - protein, 14 aa, synthetic construct
ALGEIANWGIYTDK

SEQ ID NO: 265 - protein, 11 aa, synthetic construct
ALGELAFPYWG

SEQ ID NO: 266 - protein, 9 aa, synthetic construct
ALGELALPG

SEQ ID NO: 267 - protein, 14 aa, synthetic construct
ALGEIAKWGINTDK

SEQ ID NO: 268 - protein, 13 aa, synthetic construct
ALGELGDSSCDTR

SEQ ID NO: 269 - protein, 14 aa, synthetic construct
LLGNFSYWGTPINS

SEQ ID NO: 270 - protein, 13 aa, synthetic construct
ALGELLGDTDNLI

SEQ ID NO: 271 - protein, 12 aa, synthetic construct
ALGAGGYTDNLI

SEQ ID NO: 272 - protein, 13 aa, synthetic construct
ALGAGGYAGEKLI

SEQ ID NO: 273 - protein, 14 aa, synthetic construct
ALGERTGGYLCSWD

SEQ ID NO: 274 - protein, 14 aa, synthetic construct
ALGEIANWGINTEK

SEQ ID NO: 275 - protein, 12 aa, synthetic construct
ALGEPGTTRNSS

SEQ ID NO: 276 - protein, 14 aa, synthetic construct
ALGEPELGDIYTDK

SEQ ID NO: 277 - protein, 13 aa, synthetic construct
ALGELLGDTYKLI

SEQ ID NO: 278 - protein, 14 aa, synthetic construct
ALGEIANWGINTDQ

SEQ ID NO: 279 - protein, 14 aa, synthetic construct
ALGGLGTGGYADKL

SEQ ID NO: 280 - protein, 14 aa, synthetic construct
LLGYVGGYGAPINS

SEQ ID NO: 281 - protein, 12 aa, synthetic construct
ALGELWIHDTLI

SEQ ID NO: 282 - protein, 14 aa, synthetic construct
DLGELVSLGYTDKL

SEQ ID NO: 283 - protein, 10 aa, synthetic construct
ALGRAFLRTL

SEQ ID NO: 284 - protein, 12 aa, synthetic construct
ALGAGGYTDTLI

SEQ ID NO: 285 - protein, 13 aa, synthetic construct
ALGGLLGDTDKLI

SEQ ID NO: 286 - protein, 12 aa, synthetic construct
ALGEPGTTIKSS

SEQ ID NO: 287 - protein, 12 aa, synthetic construct
DLGEPGTTINSS

SEQ ID NO: 288 - protein, 14 aa, synthetic construct
ALGELSPVTGGHKL

SEQ ID NO: 289 - protein, 12 aa, synthetic construct
DLGAGGYTDKLI

SEQ ID NO: 290 - protein, 13 aa, synthetic construct
ALGEVGDTPDKLI

SEQ ID NO: 291 - protein, 14 aa, synthetic construct
LLGNRAFLYWGTPI

SEQ ID NO: 292 - protein, 12 aa, synthetic construct
ALGEIWIHDKLI

SEQ ID NO: 293 - protein, 13 aa, synthetic construct
ALGEPPSYVLGTP

SEQ ID NO: 294 - protein, 11 aa, synthetic construct
ALGEGDTVKLI

SEQ ID NO: 295 - protein, 11 aa, synthetic construct
ALGDLSPFTGG

SEQ ID NO: 296 - protein, 14 aa, synthetic construct
ALGEPPSSVLGDTD

SEQ ID NO: 297 - protein, 14 aa, synthetic construct
ALGENPYWGIYTDK

SEQ ID NO: 298 - protein, 14 aa, synthetic construct
ALGELTGGYSDKLI

SEQ ID NO: 299 - protein, 13 aa, synthetic construct
ALGELTGGYADKL

SEQ ID NO: 300 - protein, 14 aa, synthetic construct
ALGELVWGTPDKLI

SEQ ID NO: 301 - protein, 14 aa, synthetic construct
ALGEIALPGIHTDK

SEQ ID NO: 302 - protein, 14 aa, synthetic construct
DLGELVWGTTDKLI

SEQ ID NO: 303 - protein, 12 aa, synthetic construct
APGELGSTDKLI

SEQ ID NO: 304 - protein, 14 aa, synthetic construct
DLGELPYRGIRTDK

SEQ ID NO: 305 - protein, 14 aa, synthetic construct
ALGRAFLRTLYIDK

SEQ ID NO: 306 - protein, 12 aa, synthetic construct
ALGELGSTDKLT

SEQ ID NO: 307 - protein, 13 aa, synthetic construct
LLGFLLPTYWGKF

SEQ ID NO: 308 - protein, 13 aa, synthetic construct
LLGLGDTPAINSS

SEQ ID NO: 309 - protein, 12 aa, synthetic construct
ALGELLHTDKLN

SEQ ID NO: 310 - protein, 14 aa, synthetic construct
ALGELFLMGDTDKL

SEQ ID NO: 311 - protein, 14 aa, synthetic construct
LLGNFAWGIRWRQH

SEQ ID NO: 312 - protein, 14 aa, synthetic construct
ALGELSIRGIHTDK

SEQ ID NO: 313 - protein, 14 aa, synthetic construct
ALGELGDTLAPINS

SEQ ID NO: 314 - protein, 13 aa, synthetic construct
ALGEPTGGWTDKL

SEQ ID NO: 315 - protein, 12 aa, synthetic construct
ALGELGTTDKLI

SEQ ID NO: 316 - protein, 11 aa, synthetic construct
ALGEGDTDQLI

SEQ ID NO: 317 - protein, 14 aa, synthetic construct
ALGELSPCTGGHKL

SEQ ID NO: 318 - protein, 14 aa, synthetic construct
ALGELREGDTDKLI

SEQ ID NO: 319 - protein, 13 aa, synthetic construct
ALGEVPTDTDKLN

SEQ ID NO: 320 - protein, 14 aa, synthetic construct
ALGEVGTGGYADKL

SEQ ID NO: 321 - protein, 14 aa, synthetic construct
ALGVPPSYVLGDTD

SEQ ID NO: 322 - protein, 14 aa, synthetic construct
ALGELTGGYAYKLI

SEQ ID NO: 323 - protein, 13 aa, synthetic construct
ALGELTFIPDKLI

SEQ ID NO: 324 - protein, 14 aa, synthetic construct
ALGELANWGINTDK

SEQ ID NO: 325 - protein, 14 aa, synthetic construct
ALGELCLGDTMATA

SEQ ID NO: 326 - protein, 14 aa, synthetic construct
ALGEHPSYVLGDTD

SEQ ID NO: 327 - protein, 12 aa, synthetic construct
ALGAGGYTDKII

SEQ ID NO: 328 - protein, 11 aa, synthetic construct
DLGEGDTDKLI

SEQ ID NO: 329 - protein, 12 aa, synthetic construct
ALGGLGSTDKLI

SEQ ID NO: 330 - protein, 13 aa, synthetic construct
ALGELGDTPINSS

SEQ ID NO: 331 - protein, 12 aa, synthetic construct
ALGEPGTTIHSS

SEQ ID NO: 332 - protein, 13 aa, synthetic construct
ALGEGGDTPDNLI

SEQ ID NO: 333 - protein, 13 aa, synthetic construct
ALGELGDSSRDTR

SEQ ID NO: 334 - protein, 13 aa, synthetic construct
LLGNWGIAPGTPD

SEQ ID NO: 335 - protein, 14 aa, synthetic construct
DLGEPTGGWTDKLI

SEQ ID NO: 336 - protein, 14 aa, synthetic construct
ALGELCVGDTLATA

SEQ ID NO: 337 - protein, 14 aa, synthetic construct
ALGDLGGGYDEKLI

SEQ ID NO: 338 - protein, 13 aa, synthetic construct
ALGELVWGTTDKL

SEQ ID NO: 339 - protein, 14 aa, synthetic construct
ALGELALPGIHTDQ

SEQ ID NO: 340 - protein, 12 aa, synthetic construct
ALGAGGYTEKLI

SEQ ID NO: 341 - protein, 14 aa, synthetic construct
ALGELGGGYDDQLI

SEQ ID NO: 342 - protein, 14 aa, synthetic construct
ALGELPYRGIGTDK

SEQ ID NO: 343 - protein, 13 aa, synthetic construct
ALGELWGVRSKLI

SEQ ID NO: 344 - protein, 12 aa, synthetic construct
ALGELGDTDKII

SEQ ID NO: 345 - protein, 14 aa, synthetic construct
ALGELGGSARTDKL

SEQ ID NO: 346 - protein, 14 aa, synthetic construct
ALGELFLLGYTDKL

SEQ ID NO: 347 - protein, 12 aa, synthetic construct
ALGELGYTDKLI

SEQ ID NO: 348 - protein, 12 aa, synthetic construct
ALGVPPSYVLGE

SEQ ID NO: 349 - protein, 12 aa, synthetic construct
LLGNWGIPINSS

SEQ ID NO: 350 - protein, 14 aa, synthetic construct
ALGELVMGDTDKLI

SEQ ID NO: 351 - protein, 14 aa, synthetic construct
ALGVRRGIRGADKL

SEQ ID NO: 352 - protein, 13 aa, synthetic construct
ALGDVPTDTDQLI

SEQ ID NO: 353 - protein, 13 aa, synthetic construct
ALGELLGDADKLI

SEQ ID NO: 354 - protein, 12 aa, synthetic construct
ALVELGSTDKLI

SEQ ID NO: 355 - protein, 14 aa, synthetic construct
ALGELERGIRGTDK

SEQ ID NO: 356 - protein, 14 aa, synthetic construct
ALGELGGGCDDKLI

SEQ ID NO: 357 - protein, 12 aa, synthetic construct
ALGELLHTDTLI

SEQ ID NO: 358 - protein, 13 aa, synthetic construct
DLGEVPTDTDKLI

SEQ ID NO: 359 - protein, 14 aa, synthetic construct
ALGEHTGGWTDKLI

SEQ ID NO: 360 - protein, 13 aa, synthetic construct
ALGELGGYARTDK

SEQ ID NO: 361 - protein, 13 aa, synthetic construct
ALGEVPPDTDKLI

SEQ ID NO: 362 - protein, 11 aa, synthetic construct
ALGEIANWGIN

SEQ ID NO: 363 - protein, 14 aa, synthetic construct
DLGELALPGIHTDK

SEQ ID NO: 364 - protein, 13 aa, synthetic construct
GLGELLGDTDKLI

SEQ ID NO: 365 - protein, 13 aa, synthetic construct
ALGELLGETDKLI

SEQ ID NO: 366 - protein, 14 aa, synthetic construct
ALGRAYLRTLYTDK

SEQ ID NO: 367 - protein, 14 aa, synthetic construct
ALGGPSWYCGIPDK

SEQ ID NO: 368 - protein, 13 aa, synthetic construct
ALGVRRGIRGTDK

SEQ ID NO: 369 - protein, 12 aa, synthetic construct
ALGELGDTEKLI

SEQ ID NO: 370 - protein, 14 aa, synthetic construct
DLGELGDTYPDKLI

SEQ ID NO: 371 - protein, 14 aa, synthetic construct
ALGELGDTLATAQL

SEQ ID NO: 372 - protein, 14 aa, synthetic construct
ALGEIANWGRNTDK

SEQ ID NO: 373 - protein, 14 aa, synthetic construct
ALGELSPFTVGHKL

SEQ ID NO: 374 - protein, 12 aa, synthetic construct
ALGAGGYTDKLN

SEQ ID NO: 375 - protein, 14 aa, synthetic construct
DLGELGTGGYADKL

SEQ ID NO: 376 - protein, 12 aa, synthetic construct
ALGELLHTDKHI

SEQ ID NO: 377 - protein, 13 aa, synthetic construct
ALGELTFLPDKLN

SEQ ID NO: 378 - protein, 14 aa, synthetic construct
ALGELREGDKHKLI

SEQ ID NO: 379 - protein, 11 aa, synthetic construct
ALGEGDTDKII

SEQ ID NO: 380 - protein, 14 aa, synthetic construct
ALGELGNGGYADKL

SEQ ID NO: 381 - protein, 14 aa, synthetic construct
DLGALLPTFRGTDK

SEQ ID NO: 382 - protein, 13 aa, synthetic construct
ALGDGGDTPDQLI

SEQ ID NO: 383 - protein, 11 aa, synthetic construct
ALGEGDTDKHI

SEQ ID NO: 384 - protein, 13 aa, synthetic construct
ALGELTFLPYKLI

SEQ ID NO: 385 - protein, 14 aa, synthetic construct
ALGELVGGYDDKLI

SEQ ID NO: 386 - protein, 13 aa, synthetic construct
ALGEVPTDTDNLI

SEQ ID NO: 387 - protein, 14 aa, synthetic construct
ALGELSPLTGGHKL

SEQ ID NO: 388 - protein, 13 aa, synthetic construct
ALGALLGDTDKLI

SEQ ID NO: 389 - protein, 13 aa, synthetic construct
ALGEGGDTPINSS

SEQ ID NO: 390 - protein, 14 aa, synthetic construct
ALGEPSYAGGAYTD

SEQ ID NO: 391 - protein, 14 aa, synthetic construct
ALGEISPFTGGHKL

SEQ ID NO: 392 - protein, 14 aa, synthetic construct
ALGEVREGDKNKLI

SEQ ID NO: 393 - protein, 12 aa, synthetic construct
ALGELGSTDRLI

SEQ ID NO: 394 - protein, 13 aa, synthetic construct
DLGELGDKDDKLI

SEQ ID NO: 395 - protein, 12 aa, synthetic construct
ALGEMGDTDKLI

SEQ ID NO: 396 - protein, 14 aa, synthetic construct
ALGEMTGGYADKLI

SEQ ID NO: 397 - protein, 12 aa, synthetic construct
ALGAFLPYWGLP

SEQ ID NO: 398 - protein, 14 aa, synthetic construct
DLGEPSYAGGSYTD

SEQ ID NO: 399 - protein, 13 aa, synthetic construct
DLGELWGIRSKLI

SEQ ID NO: 400 - protein, 13 aa, synthetic construct
ALGELGGSSWDTR

SEQ ID NO: 401 - protein, 14 aa, synthetic construct
ALGEIPYRGIRTDK

SEQ ID NO: 402 - protein, 14 aa, synthetic construct
ALGELVWGTTDTLI

SEQ ID NO: 403 - protein, 14 aa, synthetic construct
ALGELPYRGIRTDQ

SEQ ID NO: 404 - protein, 14 aa, synthetic construct
LLGNSPPLLGVINS

SEQ ID NO: 405 - protein, 13 aa, synthetic construct
ALGDVLLGDSPLI

SEQ ID NO: 406 - protein, 12 aa, synthetic construct
ALGELLQTDKLI

SEQ ID NO: 407 - protein, 12 aa, synthetic construct
ALGELGDTDNLI

SEQ ID NO: 408 - protein, 14 aa, synthetic construct
ALGELVYLGYTDKL

SEQ ID NO: 409 - protein, 14 aa, synthetic construct
ALGEIANWGLNTDK

SEQ ID NO: 410 - protein, 13 aa, synthetic construct
DLGELGDSSWDTR

SEQ ID NO: 411 - protein, 14 aa, synthetic construct
ALGRASLRTLYTDK

SEQ ID NO: 412 - protein, 13 aa, synthetic construct
ALGELGDKYDKLI

SEQ ID NO: 413 - protein, 14 aa, synthetic construct
ALGEIEWGIRGTDK

SEQ ID NO: 414 - protein, 13 aa, synthetic construct
ALGELLGGTDKLI

SEQ ID NO: 415 - protein, 14 aa, synthetic construct
ALGEVVLGDTDKLI

SEQ ID NO: 416 - protein, 14 aa, synthetic construct
ALGELREGDNNKLI

SEQ ID NO: 417 - protein, 14 aa, synthetic construct
DLGELEWGIRGTDK

SEQ ID NO: 418 - protein, 12 aa, synthetic construct
ALGELGDTDKLN

SEQ ID NO: 419 - protein, 14 aa, synthetic construct
ALGALLPTLRGTDK

SEQ ID NO: 420 - protein, 14 aa, synthetic construct
ALGELGGGYDDNLI

SEQ ID NO: 421 - protein, 14 aa, synthetic construct
ALGRAFLRTLSTDK

SEQ ID NO: 422 - protein, 14 aa, synthetic construct
ALGELGDTYPYKLI

SEQ ID NO: 423 - protein, 14 aa, synthetic construct
ALGELSGGYADKLI

SEQ ID NO: 424 - protein, 13 aa, synthetic construct
ALGELLGDTAKLI

SEQ ID NO: 425 - protein, 14 aa, synthetic construct
ALGELGGGYDDKLV

SEQ ID NO: 426 - protein, 11 aa, synthetic construct
ALGEGDTAKLI

SEQ ID NO: 427 - protein, 12 aa, synthetic construct
ALGEVWIHDKLI

SEQ ID NO: 428 - protein, 12 aa, synthetic construct
ALGELGSTDKPI

SEQ ID NO: 429 - protein, 14 aa, synthetic construct
ALGEIANGGINTDK

SEQ ID NO: 430 - protein, 13 aa, synthetic construct
ALGELTFLPDTLI

SEQ ID NO: 431 - protein, 14 aa, synthetic construct
ALGEHPYWGIYTDQ

SEQ ID NO: 432 - protein, 14 aa, synthetic construct
ALGEPSYDGGSYTD

SEQ ID NO: 433 - protein, 14 aa, synthetic construct
ALGELDWGSYTDKL

SEQ ID NO: 434 - protein, 13 aa, synthetic construct
ALGVLTFLPDKLI

SEQ ID NO: 435 - protein, 13 aa, synthetic construct
ALGEMGDKDDKLI

SEQ ID NO: 436 - protein, 12 aa, synthetic construct
ALGEPGSTDKLI

SEQ ID NO: 437 - protein, 12 aa, synthetic construct
ALGEQGTTINSS

SEQ ID NO: 438 - protein, 14 aa, synthetic construct
ALGELEWGISGTDK

SEQ ID NO: 439 - protein, 12 aa, synthetic construct
ALGELLHTDKII

SEQ ID NO: 440 - protein, 13 aa, synthetic construct
ALGELLGDTDKLF

SEQ ID NO: 441 - protein, 11 aa, synthetic construct
ARGEGDTDKLI

SEQ ID NO: 442 - protein, 14 aa, synthetic construct
ALGALVSLGYTDKL

SEQ ID NO: 443 - protein, 14 aa, synthetic construct
ALGELCLGDTDKLI

SEQ ID NO: 444 - protein, 14 aa, synthetic construct
ALGELEWGIRGTDQ

SEQ ID NO: 445 - protein, 13 aa, synthetic construct
ALGEITFLPDKLI

SEQ ID NO: 446 - protein, 14 aa, synthetic construct
GLGEPSYAGGSYTD

SEQ ID NO: 447 - protein, 14 aa, synthetic construct
ALGELGDTYPDNLI

SEQ ID NO: 448 - protein, 14 aa, synthetic construct
ALGELREGDTNKLI

SEQ ID NO: 449 - protein, 12 aa, synthetic construct
ALGDLGSTDTLI

SEQ ID NO: 450 - protein, 14 aa, synthetic construct
LLGNFPYGGYTPIN

SEQ ID NO: 451 - protein, 12 aa, synthetic construct
ALGEPGTTINTS

SEQ ID NO: 452 - protein, 14 aa, synthetic construct
ALGEVVSLGYTDKL

SEQ ID NO: 453 - protein, 13 aa, synthetic construct
ALGELWGIRSKII

SEQ ID NO: 454 - protein, 13 aa, synthetic construct
ALGELGASSWDTR

SEQ ID NO: 455 - protein, 14 aa, synthetic construct
ALGGPSWYWGIHDK

SEQ ID NO: 456 - protein, 13 aa, synthetic construct
ARGEGGDTPDKLI

SEQ ID NO: 457 - protein, 12 aa, synthetic construct
ALGELWIHDKPI

SEQ ID NO: 458 - protein, 14 aa, synthetic construct
ALGEIANWGIHTDK

SEQ ID NO: 459 - protein, 13 aa, synthetic construct
ALGELWGYAVNSS

SEQ ID NO: 460 - protein, 13 aa, synthetic construct
ALGELGDKDDKPI

SEQ ID NO: 461 - protein, 12 aa, synthetic construct
ALGELWIHDILI

SEQ ID NO: 462 - protein, 14 aa, synthetic construct
ALGEMGGYARTDKL

SEQ ID NO: 463 - protein, 13 aa, synthetic construct
ALGERTGGYLGSW

SEQ ID NO: 464 - protein, 14 aa, synthetic construct
ALGELVWGTTYKLI

SEQ ID NO: 465 - protein, 10 aa, synthetic construct
ALGAFLPYWG

SEQ ID NO: 466 - protein, 14 aa, synthetic construct
ALGRAFLRTLYTDQ

SEQ ID NO: 467 - protein, 14 aa, synthetic construct
ALWALLPTFRGTDK

SEQ ID NO: 468 - protein, 12 aa, synthetic construct
ALGELGSTDILI

SEQ ID NO: 469 - protein, 13 aa, synthetic construct
ALGEGGDTPDTLI

SEQ ID NO: 470 - protein, 14 aa, synthetic construct
ALGRAFLRTLNTDK

SEQ ID NO: 471 - protein, 14 aa, synthetic construct
ALGELALPGIHADK

SEQ ID NO: 472 - protein, 12 aa, synthetic construct
ALGELPHTDKLI

SEQ ID NO: 473 - protein, 13 aa, synthetic construct
ARGELLGDTDKLI

SEQ ID NO: 474 - protein, 8 aa, synthetic construct
ALGELAWG

SEQ ID NO: 475 - protein, 8 aa, synthetic construct
ALGELVWG

SEQ ID NO: 476 - protein, 13 aa, synthetic construct
ALGEGGDTPDKPI

SEQ ID NO: 477 - protein, 14 aa, synthetic construct
ALGRAFLLTLYTDK

SEQ ID NO: 478 - protein, 11 aa, synthetic construct
GLGEGDTDKLI

SEQ ID NO: 479 - protein, 14 aa, synthetic construct
ALGEHPYSGIYTDK

SEQ ID NO: 480 - protein, 13 aa, synthetic construct
ALGEVPTDTYKLI

SEQ ID NO: 481 - protein, 13 aa, synthetic construct
ALGELGDSSWETR

SEQ ID NO: 482 - protein, 14 aa, synthetic construct
ALGELSPFTGGPKL

SEQ ID NO: 483 - protein, 14 aa, synthetic construct
ALGERTGGWTDKLI

SEQ ID NO: 484 - protein, 14 aa, synthetic construct
ALGELSLRGIHTEK

SEQ ID NO: 485 - protein, 14 aa, synthetic construct
ALGEVGGYARTDKL

SEQ ID NO: 486 - protein, 12 aa, synthetic construct
ALGEPGTTIYSS

SEQ ID NO: 487 - protein, 14 aa, synthetic construct
ALGELGTGGSADKL

SEQ ID NO: 488 - protein, 13 aa, synthetic construct
ALWELGDSSWDTR

SEQ ID NO: 489 - protein, 13 aa, synthetic construct
ALGELGDTPDKLI

SEQ ID NO: 490 - protein, 12 aa, synthetic construct
ALGEPLHTDKLI

SEQ ID NO: 491 - protein, 14 aa, synthetic construct
AIGELPYRGIRTDK

SEQ ID NO: 492 - protein, 12 aa, synthetic construct
ALGGLLHTDKLI

SEQ ID NO: 493 - protein, 14 aa, synthetic construct
ALGELCPGDTLATA

SEQ ID NO: 494 - protein, 12 aa, synthetic construct
ALGELWIHDKLN

SEQ ID NO: 495 - protein, 13 aa, synthetic construct
ALGELGDTDDKLI

SEQ ID NO: 496 - protein, 12 aa, synthetic construct
ALGELWIHDKHI

SEQ ID NO: 497 - protein, 12 aa, synthetic construct
DLGELWIHDKLI

SEQ ID NO: 498 - protein, 11 aa, synthetic construct
ALGVPPSYVLG

SEQ ID NO: 499 - protein, 14 aa, synthetic construct
ARGELPYRGIRTDK

SEQ ID NO: 500 - protein, 13 aa, synthetic construct
ALGGLGDSSWDTR

SEQ ID NO: 501 - protein, 14 aa, synthetic construct
ALGDLREGDKHKLI

SEQ ID NO: 502 - protein, 14 aa, synthetic construct
ALGGLVSLGYTDKL

SEQ ID NO: 503 - protein, 12 aa, synthetic construct
ALGAVGYTDKLI

SEQ ID NO: 504 - protein, 14 aa, synthetic construct
ALGDLVWGTTEKLI

SEQ ID NO: 505 - protein, 14 aa, synthetic construct
ALGEPHSYVLGDTD

SEQ ID NO: 506 - protein, 13 aa, synthetic construct
ALGELVLGDTDKL

SEQ ID NO: 507 - protein, 13 aa, synthetic construct
AIGELLGDTDKLI

SEQ ID NO: 508 - protein, 14 aa, synthetic construct
ALGEPVLGDIYTEK

SEQ ID NO: 509 - protein, 14 aa, synthetic construct
ALGALLPTFRGTDQ

SEQ ID NO: 510 - protein, 14 aa, synthetic construct
ALGELGEILRAAQL

SEQ ID NO: 511 - protein, 14 aa, synthetic construct
ALGELGVGYDDKLI

SEQ ID NO: 512 - protein, 13 aa, synthetic construct
ALGDLLGDTNKLI

SEQ ID NO: 513 - protein, 14 aa, synthetic construct
ALGEVVWGTTDKLI

SEQ ID NO: 514 - protein, 14 aa, synthetic construct
ALGEVAWGSYTDKL

SEQ ID NO: 515 - protein, 14 aa, synthetic construct
ALGELVSLGYTHKL

SEQ ID NO: 516 - protein, 11 aa, synthetic construct
ALGEGDTDKPI

SEQ ID NO: 517 - protein, 12 aa, synthetic construct
ALWELGSTDKLI

SEQ ID NO: 518 - protein, 14 aa, synthetic construct
ALGEPGLHLLGDTD

SEQ ID NO: 519 - protein, 14 aa, synthetic construct
ALGDLTGGYAEKLI

SEQ ID NO: 520 - protein, 14 aa, synthetic construct
ALGDLGGYARTDQL

SEQ ID NO: 521 - protein, 13 aa, synthetic construct
ALGELWGIRSTLI

SEQ ID NO: 522 - protein, 14 aa, synthetic construct
ALGELTGGYADNLI

SEQ ID NO: 523 - protein, 14 aa, synthetic construct
ALGDLCLGETLATA

SEQ ID NO: 524 - protein, 14 aa, synthetic construct
ALGELTVGYADKLI

SEQ ID NO: 525 - protein, 12 aa, synthetic construct
ALGEPGTTINSP

SEQ ID NO: 526 - protein, 13 aa, synthetic construct
ALGELTFLHDKLI

SEQ ID NO: 527 - protein, 14 aa, synthetic construct
ALGELEWGTRGTDK

SEQ ID NO: 528 - protein, 14 aa, synthetic construct
DLGGPSWYWGIPDK

SEQ ID NO: 529 - protein, 13 aa, synthetic construct
ALGELLGDTDILI

SEQ ID NO: 530 - protein, 14 aa, synthetic construct
ALGELPNRGIRTDK

SEQ ID NO: 531 - protein, 14 aa, synthetic construct
ALGELALPGIHTYK

SEQ ID NO: 532 - protein, 14 aa, synthetic construct
DLGRAFLRTLYTDK

SEQ ID NO: 533 - protein, 14 aa, synthetic construct
DLGELFLLGDTDKL

SEQ ID NO: 534 - protein, 14 aa, synthetic construct
ALGEICLGDTLATA

SEQ ID NO: 535 - protein, 14 aa, synthetic construct
ALGELLLLGDTDKL

SEQ ID NO: 536 - protein, 14 aa, synthetic construct
DLGEHPYWGIYTDK

SEQ ID NO: 537 - protein, 14 aa, synthetic construct
ALGEPPSYELGDTD

SEQ ID NO: 538 - protein, 13 aa, synthetic construct
ALGDLALPGIHTD

SEQ ID NO: 539 - protein, 14 aa, synthetic construct
ALGELVSLAYTDKL

SEQ ID NO: 540 - protein, 14 aa, synthetic construct
DLGELGGYARTDKL

SEQ ID NO: 541 - protein, 13 aa, synthetic construct
ALGELTLLPDKLI

SEQ ID NO: 542 - protein, 14 aa, synthetic construct
ALGEPTGGWTYKLI

SEQ ID NO: 543 - protein, 13 aa, synthetic construct
ALGELGDTTINSS

SEQ ID NO: 544 - protein, 14 aa, synthetic construct
ALGELVSLRYTDKL

SEQ ID NO: 545 - protein, 14 aa, synthetic construct
ALGELARGSYTDKL

SEQ ID NO: 546 - protein, 14 aa, synthetic construct
ALGALLHTFRGTDK

SEQ ID NO: 547 - protein, 14 aa, synthetic construct
ALGEHSYAGGSYTD

SEQ ID NO: 548 - protein, 13 aa, synthetic construct
ALGELGDKDDKLN

SEQ ID NO: 549 - protein, 14 aa, synthetic construct
DLGELVLGDTDKLI

SEQ ID NO: 550 - protein, 14 aa, synthetic construct
ALGEPTVGWTDKLI

SEQ ID NO: 551 - protein, 14 aa, synthetic construct
ALGEHPYWGVYTDK

SEQ ID NO: 552 - protein, 14 aa, synthetic construct
ALEEPTGGWTDKLI

SEQ ID NO: 553 - protein, 11 aa, synthetic construct
ALGEGDTDKLS

SEQ ID NO: 554 - protein, 14 aa, synthetic construct
AHGELTGGYADKLI

SEQ ID NO: 555 - protein, 13 aa, synthetic construct
APGELLGDTDKLI

SEQ ID NO: 556 - protein, 14 aa, synthetic construct
DLGELSPFTGGHKL

SEQ ID NO: 557 - protein, 14 aa, synthetic construct
ALGELVRGTTDKLI

SEQ ID NO: 558 - protein, 12 aa, synthetic construct
ALGELGPTDKLI

SEQ ID NO: 559 - protein, 14 aa, synthetic construct
ALGALLPTFRGPDK

SEQ ID NO: 560 - protein, 14 aa, synthetic construct
ALGEIVSLGYTDKL

SEQ ID NO: 561 - protein, 12 aa, synthetic construct
ALGELWIHDKLV

SEQ ID NO: 562 - protein, 14 aa, synthetic construct
ALGDLGDTYPEKLI

SEQ ID NO: 563 - protein, 13 aa, synthetic construct
ALGELGVKDDKLI

SEQ ID NO: 564 - protein, 12 aa, synthetic construct
AIGELLHTDKLI

SEQ ID NO: 565 - protein, 13 aa, synthetic construct
ALGEGGDPPDKLI

SEQ ID NO: 566 - protein, 14 aa, synthetic construct
GLGELPYRGIRTDK

SEQ ID NO: 567 - protein, 13 aa, synthetic construct
ALGDLEWGIRGTD

SEQ ID NO: 568 - protein, 13 aa, synthetic construct
ALGELQGDTDKLI

SEQ ID NO: 569 - protein, 12 aa, synthetic construct
ALGEPGATINSS

SEQ ID NO: 570 - protein, 12 aa, synthetic construct
DLGELLHTDKLI

SEQ ID NO: 571 - protein, 14 aa, synthetic construct
ALGELAGGYADKLI

SEQ ID NO: 572 - protein, 14 aa, synthetic construct
AIGGPSWYWGIPDK

SEQ ID NO: 573 - protein, 13 aa, synthetic construct
ALGELGDMDDKLI

SEQ ID NO: 574 - protein, 11 aa, synthetic construct
ALGEGDTDILI

SEQ ID NO: 575 - protein, 14 aa, synthetic construct
ALGELSPFTGGRKL

SEQ ID NO: 576 - protein, 14 aa, synthetic construct
ALGELGDPYPDKLI

SEQ ID NO: 577 - protein, 13 aa, synthetic construct
ALGELCLGDTLAT

SEQ ID NO: 578 - protein, 14 aa, synthetic construct
ALVELGDTYPDKLI

SEQ ID NO: 579 - protein, 14 aa, synthetic construct
ALGELGATYPDKLI

SEQ ID NO: 580 - protein, 12 aa, synthetic construct
APGELLHTDKLI

SEQ ID NO: 581 - protein, 14 aa, synthetic construct
ALGRACLRTLYTDK

SEQ ID NO: 582 - protein, 12 aa, synthetic construct
ALGAGGYADKLI

SEQ ID NO: 583 - protein, 14 aa, synthetic construct
ALGRALLRTLYTDK

SEQ ID NO: 584 - protein, 14 aa, synthetic construct
ALGELFVLGDTDKL

SEQ ID NO: 585 - protein, 14 aa, synthetic construct
ALGELGDAYPDKLI

SEQ ID NO: 586 - protein, 13 aa, synthetic construct
ALGGPSWSWGIPD

SEQ ID NO: 587 - protein, 13 aa, synthetic construct
ALGELGTGGYADK

SEQ ID NO: 588 - protein, 14 aa, synthetic construct
ALGDLEWGISGTDK

SEQ ID NO: 589 - protein, 14 aa, synthetic construct
ALGDVGGGYDDKLI

SEQ ID NO: 590 - protein, 13 aa, synthetic construct
ALGELLGDTHKLI

SEQ ID NO: 591 - protein, 14 aa, synthetic construct
LLGTWGDTLAPINS

SEQ ID NO: 592 - protein, 14 aa, synthetic construct
DLGVRRGIRGTDKL

SEQ ID NO: 593 - protein, 12 aa, synthetic construct
ALGELLHTDKLT

SEQ ID NO: 594 - protein, 13 aa, synthetic construct
ALGEVPTETDKLI

SEQ ID NO: 595 - protein, 13 aa, synthetic construct
ALGELLGDTDKPI

SEQ ID NO: 596 - protein, 11 aa, synthetic construct
ALGEGDTDTLI

SEQ ID NO: 597 - protein, 14 aa, synthetic construct
ALGEIREGDKNKLI

SEQ ID NO: 598 - protein, 13 aa, synthetic construct
ALGELLGDTDELI

SEQ ID NO: 599 - protein, 13 aa, synthetic construct
ARGELWGIRSKLI

SEQ ID NO: 600 - protein, 14 aa, synthetic construct
ALGALPPTFRGTDK

SEQ ID NO: 601 - protein, 12 aa, synthetic construct
ALGELGSTAKLI

SEQ ID NO: 602 - protein, 13 aa, synthetic construct
ALGEGGGTPDKLI

SEQ ID NO: 603 - protein, 14 aa, synthetic construct
ALGEIVLGDTDKLI

SEQ ID NO: 604 - protein, 12 aa, synthetic construct
ALGEVGDTDKLI

SEQ ID NO: 605 - protein, 13 aa, synthetic construct
ALGELGEKDDKLI

SEQ ID NO: 606 - protein, 14 aa, synthetic construct
DLGELAWGSYTDKL

SEQ ID NO: 607 - protein, 13 aa, synthetic construct
ALGELRGIRSKLI

SEQ ID NO: 608 - protein, 13 aa, synthetic construct
ALGEPGDSSWDTR

SEQ ID NO: 609 - protein, 14 aa, synthetic construct
ALGGPSWYWGITDK

SEQ ID NO: 610 - protein, 14 aa, synthetic construct
ALGELALPGTHTDK

SEQ ID NO: 611 - protein, 14 aa, synthetic construct
ALGELAWGSYADKL

SEQ ID NO: 612 - protein, 11 aa, synthetic construct
ALEEGDTDKLI

SEQ ID NO: 613 - protein, 13 aa, synthetic construct
ALWEGGDTPDKLI

SEQ ID NO: 614 - protein, 13 aa, synthetic construct
ALGELTYLPDKLI

SEQ ID NO: 615 - protein, 14 aa, synthetic construct
ALGELALQGIHTDK

SEQ ID NO: 616 - protein, 13 aa, synthetic construct
ALGAVPTDTDKLI

SEQ ID NO: 617 - protein, 14 aa, synthetic construct
ALGEIADWGINTDK

SEQ ID NO: 618 - protein, 12 aa, synthetic construct
GLGAGGYTDKLI

SEQ ID NO: 619 - protein, 14 aa, synthetic construct
APGELVWGTTDKLI

SEQ ID NO: 620 - protein, 11 aa, synthetic construct
ALGEGDTDKLT

SEQ ID NO: 621 - protein, 11 aa, synthetic construct
ALGEGDADKLI

SEQ ID NO: 622 - protein, 13 aa, synthetic construct
LLGTWGIRTINSS

SEQ ID NO: 623 - protein, 14 aa, synthetic construct
ALGELFILGYTDKL

SEQ ID NO: 624 - protein, 13 aa, synthetic construct
ALGELLGDTDRLI

SEQ ID NO: 625 - protein, 13 aa, synthetic construct
ALGELALPGTPDR

SEQ ID NO: 626 - protein, 14 aa, synthetic construct
ALGELACGSYTDKL

SEQ ID NO: 627 - protein, 7 aa, synthetic construct
ALGEVPT

SEQ ID NO: 628 - protein, 12 aa, synthetic construct
ALGELWIHDELI

SEQ ID NO: 629 - protein, 14 aa, synthetic construct
APGDLVSLGYTDKL

SEQ ID NO: 630 - protein, 14 aa, synthetic construct
ALGELSPSTGGHKL

SEQ ID NO: 631 - protein, 14 aa, synthetic construct
ALGELVSLGYTGKL

SEQ ID NO: 632 - protein, 13 aa, synthetic construct
DLGVPPSYVLGEI

SEQ ID NO: 633 - protein, 13 aa, synthetic construct
ALGELGIRTINSS

SEQ ID NO: 634 - protein, 13 aa, synthetic construct
ALGVPPSYVMGEI

SEQ ID NO: 635 - protein, 14 aa, synthetic construct
ALGELAPPGIHTDK

SEQ ID NO: 636 - protein, 14 aa, synthetic construct
ALGELGGYARTHKL

SEQ ID NO: 637 - protein, 14 aa, synthetic construct
ARGEPSYAGGSYTD

SEQ ID NO: 638 - protein, 14 aa, synthetic construct
ALGAIANWGINTDK

SEQ ID NO: 639 - protein, 14 aa, synthetic construct
ALGDPTGGWTEKLI

SEQ ID NO: 640 - protein, 13 aa, synthetic construct
ALGELGDSSWDAR

SEQ ID NO: 641 - protein, 13 aa, synthetic construct
ALGELGDKDDTLI

SEQ ID NO: 642 - protein, 13 aa, synthetic construct
ALGELTFLPAKLI

SEQ ID NO: 643 - protein, 14 aa, synthetic construct
ALWELPYRGIRTDK

SEQ ID NO: 644 - protein, 12 aa, synthetic construct
ALGELWIHDKVI

SEQ ID NO: 645 - protein, 13 aa, synthetic construct
ALWELLGDTDKLI

SEQ ID NO: 646 - protein, 11 aa, synthetic construct
ALGEVDTDKLI

SEQ ID NO: 647 - protein, 14 aa, synthetic construct
VLGEPSYAGGSYTD

SEQ ID NO: 648 - protein, 14 aa, synthetic construct
ALGELTGGYRPINS

SEQ ID NO: 649 - protein, 14 aa, synthetic construct
ALGEIAWGSYTDKL

SEQ ID NO: 650 - protein, 13 aa, synthetic construct
ALGEVPADTDKLI

SEQ ID NO: 651 - protein, 13 aa, synthetic construct
ALGELGHSSWDTR

SEQ ID NO: 652 - protein, 14 aa, synthetic construct
GLGEPTGGWTDKLI

SEQ ID NO: 653 - protein, 14 aa, synthetic construct
ALGEPPSYVLWTPI

SEQ ID NO: 654 - protein, 14 aa, synthetic construct
ALGEHPYRGIYTDK

SEQ ID NO: 655 - protein, 14 aa, synthetic construct
ALGEIGGGYDDKLI

SEQ ID NO: 656 - protein, 13 aa, synthetic construct
ALGEGGYTPDKLI

SEQ ID NO: 657 - protein, 12 aa, synthetic construct
ALGAGAYTDKLI

SEQ ID NO: 658 - protein, 14 aa, synthetic construct
ALGELSPFTWGHKL

SEQ ID NO: 659 - protein, 14 aa, synthetic construct
ALGELDLPGIHTDK

SEQ ID NO: 660 - protein, 12 aa, synthetic construct
ALGEPGTTLNSS

SEQ ID NO: 661 - protein, 14 aa, synthetic construct
ALGELPYRGIHTDK

SEQ ID NO: 662 - protein, 14 aa, synthetic construct
ALGEIANWGISTDK

SEQ ID NO: 663 - protein, 14 aa, synthetic construct
ALGELASLGYTDKL

SEQ ID NO: 664 - protein, 13 aa, synthetic construct
ALGELSFLRVWGL

SEQ ID NO: 665 - protein, 13 aa, synthetic construct
ALGEVPTDTDTLI

SEQ ID NO: 666 - protein, 14 aa, synthetic construct
ALGELVSIGYTDKL

SEQ ID NO: 667 - protein, 14 aa, synthetic construct
ALWELGDTYPDKLI

SEQ ID NO: 668 - protein, 13 aa, synthetic construct
ALGEGGDTPDKLT

SEQ ID NO: 669 - protein, 14 aa, synthetic construct
GLGELVWGTTDKLI

SEQ ID NO: 670 - protein, 14 aa, synthetic construct
ALGDLVLGDTEKLI

SEQ ID NO: 671 - protein, 13 aa, synthetic construct
ALGGLTFLPDKLI

SEQ ID NO: 672 - protein, 12 aa, synthetic construct
AIGELGSTDKLI

SEQ ID NO: 673 - protein, 14 aa, synthetic construct
AVGELPYRGIRTDK

SEQ ID NO: 674 - protein, 14 aa, synthetic construct
ALGALGDTYPDKLI

SEQ ID NO: 675 - protein, 13 aa, synthetic construct
ALVELLGDTDKLI

SEQ ID NO: 676 - protein, 13 aa, synthetic construct
ALGVPHSYVLGEI

SEQ ID NO: 677 - protein, 14 aa, synthetic construct
ALGELGGGYDDTLI

SEQ ID NO: 678 - protein, 14 aa, synthetic construct
ALGEPPSHVLGDTD

SEQ ID NO: 679 - protein, 14 aa, synthetic construct
ALVGPSWYWGIPDK

SEQ ID NO: 680 - protein, 14 aa, synthetic construct
ALGDLVSLGYTDQL

SEQ ID NO: 681 - protein, 13 aa, synthetic construct
ALGELAFPYWGTP

SEQ ID NO: 682 - protein, 14 aa, synthetic construct
ALGELGGYARTDNL

SEQ ID NO: 683 - protein, 14 aa, synthetic construct
APGELGGGYDDKLI

SEQ ID NO: 684 - protein, 14 aa, synthetic construct
ALGGPSWSCGIPDK

SEQ ID NO: 685 - protein, 13 aa, synthetic construct
ALGEIGDSSWDTR

SEQ ID NO: 686 - protein, 14 aa, synthetic construct
ALGDLGPGGYADKL

SEQ ID NO: 687 - protein, 14 aa, synthetic construct
ALGELREGDKNNLI

SEQ ID NO: 688 - protein, 14 aa, synthetic construct
ALGELTGGYADTLI

SEQ ID NO: 689 - protein, 13 aa, synthetic construct
ALGEPPSSVLGDT

SEQ ID NO: 690 - protein, 14 aa, synthetic construct
ALGEPGLPLMGDTD

SEQ ID NO: 691 - protein, 12 aa, synthetic construct
ALGELVSLGYTD

SEQ ID NO: 692 - protein, 12 aa, synthetic construct
ALGELGATDKLI

SEQ ID NO: 693 - protein, 13 aa, synthetic construct
ALWVPPSYVLGEI

SEQ ID NO: 694 - protein, 14 aa, synthetic construct
ALGELREGDKNQLI

SEQ ID NO: 695 - protein, 13 aa, synthetic construct
ALVEVPTDTDKLI

SEQ ID NO: 696 - protein, 13 aa, synthetic construct
ALGELGDQDDKLI

SEQ ID NO: 697 - protein, 14 aa, synthetic construct
GLGVRRGIRGTDKL

SEQ ID NO: 698 - protein, 10 aa, synthetic construct
ALGELGDSSW

SEQ ID NO: 699 - protein, 11 aa, synthetic construct
ALGDGDTEKLI

SEQ ID NO: 700 - protein, 14 aa, synthetic construct
ALWGPSWYWGIPDK

SEQ ID NO: 701 - protein, 12 aa, synthetic construct
ALGEPGTTMNSS

SEQ ID NO: 702 - protein, 12 aa, synthetic construct
ALGELASTDKLI

SEQ ID NO: 703 - protein, 14 aa, synthetic construct
ALGEPSHAGGSYTD

SEQ ID NO: 704 - protein, 14 aa, synthetic construct
ALVEPTGGWTDKLI

SEQ ID NO: 705 - protein, 13 aa, synthetic construct
ALGELGDKDDKLT

SEQ ID NO: 706 - protein, 14 aa, synthetic construct
DLGELGGGYDDKLI

SEQ ID NO: 707 - protein, 14 aa, synthetic construct
ALGEPPYRGIRTDK

SEQ ID NO: 708 - protein, 14 aa, synthetic construct
DLGELCLGDTLATA

SEQ ID NO: 709 - protein, 14 aa, synthetic construct
ALGGPSWYWGIADK

SEQ ID NO: 710 - protein, 12 aa, synthetic construct
ALGEPGTTITSS

SEQ ID NO: 711 - protein, 13 aa, synthetic construct
GLGELWGIRSKLI

SEQ ID NO: 712 - protein, 14 aa, synthetic construct
ALGELREGDINKLI

SEQ ID NO: 713 - protein, 13 aa, synthetic construct
ALGELGDTRINSS

SEQ ID NO: 714 - protein, 14 aa, synthetic construct
ALGGLGGGYDDKLI

SEQ ID NO: 715 - protein, 13 aa, synthetic construct
ALGELGDGPINSS

SEQ ID NO: 716 - protein, 13 aa, synthetic construct
ALGEVPTDTDKHI

SEQ ID NO: 717 - protein, 13 aa, synthetic construct
ALGELGDKDDKLF

SEQ ID NO: 718 - protein, 14 aa, synthetic construct
ALGGLVWGTTDKLI

SEQ ID NO: 719 - protein, 14 aa, synthetic construct
ALGGPSWYWGLPDK

SEQ ID NO: 720 - protein, 13 aa, synthetic construct
ALGEGGDTPDRLI

SEQ ID NO: 721 - protein, 13 aa, synthetic construct
ALGEGGDTPDKLF

SEQ ID NO: 722 - protein, 14 aa, synthetic construct
ALGEPSYAGGSSTD

SEQ ID NO: 723 - protein, 11 aa, synthetic construct
ALGELSPVTGG

SEQ ID NO: 724 - protein, 12 aa, synthetic construct
GLGEPGTTINSS

SEQ ID NO: 725 - protein, 14 aa, synthetic construct
ALGDIANWGIHTDK

SEQ ID NO: 726 - protein, 14 aa, synthetic construct
ALGELTGGYLGSWD

SEQ ID NO: 727 - protein, 13 aa, synthetic construct
ALGEPSYAGGSYT

SEQ ID NO: 728 - protein, 14 aa, synthetic construct
ALGGPTWYWGIPDK

SEQ ID NO: 729 - protein, 14 aa, synthetic construct
DLGEPVLGDIYTDK

SEQ ID NO: 730 - protein, 14 aa, synthetic construct
ALGELAWGSYTAKL

SEQ ID NO: 731 - protein, 13 aa, synthetic construct
ALGELFILGDTDK

SEQ ID NO: 732 - protein, 12 aa, synthetic construct
ALGELLHTDKVI

SEQ ID NO: 733 - protein, 11 aa, synthetic construct
ALGEWDTDKLI

SEQ ID NO: 734 - protein, 12 aa, synthetic construct
ALGVPPSYVLWD

SEQ ID NO: 735 - protein, 12 aa, synthetic construct
ALGELSFLRVWG

SEQ ID NO: 736 - protein, 12 aa, synthetic construct
ALGAGGYTDKPI

SEQ ID NO: 737 - protein, 14 aa, synthetic construct
ALGELCMGETLATA

SEQ ID NO: 738 - protein, 14 aa, synthetic construct
ALGELEWGIRCTDK

SEQ ID NO: 739 - protein, 14 aa, synthetic construct
ALGELPYRGMRTDK

SEQ ID NO: 740 - protein, 14 aa, synthetic construct
ALGEIVWGTTDKLI

SEQ ID NO: 741 - protein, 12 aa, synthetic construct
ALGAGGYTDKLT

SEQ ID NO: 742 - protein, 9 aa, synthetic construct
ALGELSFLR

SEQ ID NO: 743 - protein, 14 aa, synthetic construct
ALGELSLRGIQTDK

SEQ ID NO: 744 - protein, 14 aa, synthetic construct
ALGELGGGYYYKLI

SEQ ID NO: 745 - protein, 14 aa, synthetic construct
ALWEHPYWGIYTDK

SEQ ID NO: 746 - protein, 14 aa, synthetic construct
ALGEPVLGDIYADK

SEQ ID NO: 747 - protein, 14 aa, synthetic construct
ALGELAWGSYSDKL

SEQ ID NO: 748 - protein, 14 aa, synthetic construct
ALGELAGGSYTDKL

SEQ ID NO: 749 - protein, 12 aa, synthetic construct
ALVELWIHDKLI

SEQ ID NO: 750 - protein, 14 aa, synthetic construct
ALVELTGGYADKLI

SEQ ID NO: 751 - protein, 14 aa, synthetic construct
ARGELGTGGYADKL

SEQ ID NO: 752 - protein, 13 aa, synthetic construct
ALGELWGRRSKLI

SEQ ID NO: 753 - protein, 14 aa, synthetic construct
DLGEPPSYVLGDTD

SEQ ID NO: 754 - protein, 14 aa, synthetic construct
ALGEQGDTYPDKLI

SEQ ID NO: 755 - protein, 14 aa, synthetic construct
ALGELVWGTTDRLI

SEQ ID NO: 756 - protein, 13 aa, synthetic construct
ALGEHPYWGIYTG

SEQ ID NO: 757 - protein, 12 aa, synthetic construct
ALGELTFLPDKL

SEQ ID NO: 758 - protein, 14 aa, synthetic construct
ALGEQALPGIHTDK

SEQ ID NO: 759 - protein, 13 aa, synthetic construct
ALGELGNKDDKLI

SEQ ID NO: 760 - protein, 12 aa, synthetic construct
ALGELLHTDRLI

SEQ ID NO: 761 - protein, 14 aa, synthetic construct
ALGRAFLRTLCTDK

SEQ ID NO: 762 - protein, 13 aa, synthetic construct
ALGTGGYAGDKLI

SEQ ID NO: 763 - protein, 14 aa, synthetic construct
ALGEHPYWGICTDK

SEQ ID NO: 764 - protein, 8 aa, synthetic construct
ALGELPYR

SEQ ID NO: 765 - protein, 12 aa, synthetic construct
ALGETGTTINSS

SEQ ID NO: 766 - protein, 14 aa, synthetic construct
ALGELSLRGIHTDE

SEQ ID NO: 767 - protein, 14 aa, synthetic construct
ALWELALPGIHTDK

SEQ ID NO: 768 - protein, 13 aa, synthetic construct
ALGVPPTYVLGEI

SEQ ID NO: 769 - protein, 14 aa, synthetic construct
ALGELGGGYDDILI

SEQ ID NO: 770 - protein, 14 aa, synthetic construct
ALGAFLPYWGTPIN

SEQ ID NO: 771 - protein, 14 aa, synthetic construct
ALRELVSLGYTDKL

SEQ ID NO: 772 - protein, 14 aa, synthetic construct
ALGELVWGTTAKLI

SEQ ID NO: 773 - protein, 14 aa, synthetic construct
ALGEPTGGWTDKLV

SEQ ID NO: 774 - protein, 13 aa, synthetic construct
ALGELGIAPGTPD

SEQ ID NO: 775 - protein, 13 aa, synthetic construct
ALGELLGDTDKHI

SEQ ID NO: 776 - protein, 14 aa, synthetic construct
ALGELHYRGIRTDK

SEQ ID NO: 777 - protein, 13 aa, synthetic construct
ALGELLGDTDKLV

SEQ ID NO: 778 - protein, 13 aa, synthetic construct
ALGVPPSHVLGEI

SEQ ID NO: 779 - protein, 14 aa, synthetic construct
ALGEPTGGWTAKLI

SEQ ID NO: 780 - protein, 13 aa, synthetic construct
ALGRAFLRTLYTG

SEQ ID NO: 781 - protein, 14 aa, synthetic construct
ALGELALPGIDTDK

SEQ ID NO: 782 - protein, 11 aa, synthetic construct
ALGEISPFTGG

SEQ ID NO: 783 - protein, 14 aa, synthetic construct
ALGEPGDTYPDKLI

SEQ ID NO: 784 - protein, 13 aa, synthetic construct
ALGAGGCAGDKLI

SEQ ID NO: 785 - protein, 14 aa, synthetic construct
ALGELVWGATDKLI

SEQ ID NO: 786 - protein, 12 aa, synthetic construct
ALGELCIHDKLI

SEQ ID NO: 787 - protein, 13 aa, synthetic construct
ALGAGGDTPDKLI

SEQ ID NO: 788 - protein, 14 aa, synthetic construct
LLGTYPTGGYAPIN

SEQ ID NO: 789 - protein, 14 aa, synthetic construct
ALGEPTGDGPINSS

SEQ ID NO: 790 - protein, 14 aa, synthetic construct
ALGELGDTYPDTLI

SEQ ID NO: 791 - protein, 13 aa, synthetic construct
ALVELGDSSWDTR

SEQ ID NO: 792 - protein, 14 aa, synthetic construct
ALGELAWGSSTDKL

SEQ ID NO: 793 - protein, 14 aa, synthetic construct
ALGALPYRGIRTDK

SEQ ID NO: 794 - protein, 14 aa, synthetic construct
DLGEIANWGINTDK

SEQ ID NO: 795 - protein, 13 aa, synthetic construct
ALGELGGKDDKLI

SEQ ID NO: 796 - protein, 14 aa, synthetic construct
ALGELFLLGDADKL

SEQ ID NO: 797 - protein, 10 aa, synthetic construct
ALGDPSYAGG

SEQ ID NO: 798 - protein, 14 aa, synthetic construct
ALGELVLGDTYKLI

SEQ ID NO: 799 - protein, 14 aa, synthetic construct
ALGEIAHWGINTDK

SEQ ID NO: 800 - protein, 14 aa, synthetic construct
ALGELVWGTADKLI

SEQ ID NO: 801 - protein, 12 aa, synthetic construct
LLGTSGYTINSS

SEQ ID NO: 802 - protein, 14 aa, synthetic construct
ALGEHPYWGIAPGT

SEQ ID NO: 803 - protein, 14 aa, synthetic construct
ALGELCLGDTLAPI

SEQ ID NO: 804 - protein, 14 aa, synthetic construct
ALGDVEWGIRGTDK

SEQ ID NO: 805 - protein, 11 aa, synthetic construct
ALGELSPCTGG

SEQ ID NO: 806 - protein, 13 aa, synthetic construct
ALGDVGDSSWDTR

SEQ ID NO: 807 - protein, 12 aa, synthetic construct
ALGELSLRGIHT

SEQ ID NO: 808 - protein, 12 aa, synthetic construct
ALGEGGDTDKLI

SEQ ID NO: 809 - protein, 14 aa, synthetic construct
ALGELSPLLGVINS

SEQ ID NO: 810 - protein, 13 aa, synthetic construct
ALGELGDKDGKLI

SEQ ID NO: 811 - protein, 14 aa, synthetic construct
ALGELALTGIHTDK

SEQ ID NO: 812 - protein, 14 aa, synthetic construct
ARGELGGGYDDKLI

SEQ ID NO: 813 - protein, 14 aa, synthetic construct
ALGELTGGYAGKLI

SEQ ID NO: 814 - protein, 14 aa, synthetic construct
ALGEHPSWGIYTDK

SEQ ID NO: 815 - protein, 14 aa, synthetic construct
ALGGPSRYWGIPDK

SEQ ID NO: 816 - protein, 14 aa, synthetic construct
ALGELSPFNGGHKL

SEQ ID NO: 817 - protein, 13 aa, synthetic construct
ALGELGDKGDKLI

SEQ ID NO: 818 - protein, 14 aa, synthetic construct
ALGELVSLGYTDNL

SEQ ID NO: 819 - protein, 14 aa, synthetic construct
ALGEHPYCGIYTDK

SEQ ID NO: 820 - protein, 13 aa, synthetic construct
APGEGGDTPDKLI

SEQ ID NO: 821 - protein, 13 aa, synthetic construct
ALGEIAYWGINTD

SEQ ID NO: 822 - protein, 14 aa, synthetic construct
ALGELSLRGINTDK

SEQ ID NO: 823 - protein, 14 aa, synthetic construct
ALGEHGTGGYADKL

SEQ ID NO: 824 - protein, 12 aa, synthetic construct
ARGELGSTDKLI

SEQ ID NO: 825 - protein, 14 aa, synthetic construct
ALGELVLGTTDKLI

SEQ ID NO: 826 - protein, 12 aa, synthetic construct
AVGELWIHDKLI

SEQ ID NO: 827 - protein, 14 aa, synthetic construct
ALGEIDNWGINTDK

SEQ ID NO: 828 - protein, 13 aa, synthetic construct
ALGEGGDSSWDTR

SEQ ID NO: 829 - protein, 13 aa, synthetic construct
ALGDVGDKDDKLI

SEQ ID NO: 830 - protein, 12 aa, synthetic construct
ALGDLWIHDQLI

SEQ ID NO: 831 - protein, 14 aa, synthetic construct
ALGELVLGDTHKLI

SEQ ID NO: 832 - protein, 13 aa, synthetic construct
ALGELWGIRSNLI

SEQ ID NO: 833 - protein, 14 aa, synthetic construct
APGALLPTFRGTDK

SEQ ID NO: 834 - protein, 14 aa, synthetic construct
ALGEIANRGINTDK

SEQ ID NO: 835 - protein, 14 aa, synthetic construct
ALGELSTFTGGHKL

SEQ ID NO: 836 - protein, 14 aa, synthetic construct
ALGELSLRGIHADK

SEQ ID NO: 837 - protein, 14 aa, synthetic construct
ALGELFLLGDTDIL

SEQ ID NO: 838 - protein, 11 aa, synthetic construct
ALGEGDTDKLV

SEQ ID NO: 839 - protein, 12 aa, synthetic construct
ALGEPGTPINSS

SEQ ID NO: 840 - protein, 14 aa, synthetic construct
ALGELVWGTNDKLI

SEQ ID NO: 841 - protein, 12 aa, synthetic construct
ALGLGDTPINSS

SEQ ID NO: 842 - protein, 13 aa, synthetic construct
ALGELTFLPGKLI

SEQ ID NO: 843 - protein, 14 aa, synthetic construct
ALGELTGAYADKLI

SEQ ID NO: 844 - protein, 12 aa, synthetic construct
ALGVRRGIRGTD

SEQ ID NO: 845 - protein, 13 aa, synthetic construct
APGEVPTDTDKLI

SEQ ID NO: 846 - protein, 14 aa, synthetic construct
DLGELSLRGIHTDK

SEQ ID NO: 847 - protein, 13 aa, synthetic construct
APGELGDSSWDTR

SEQ ID NO: 848 - protein, 13 aa, synthetic construct
ALGKLLGDTDKLI

SEQ ID NO: 849 - protein, 14 aa, synthetic construct
ALGELAWESYTDKL

SEQ ID NO: 850 - protein, 13 aa, synthetic construct
ALGEGGDTPYKLI

SEQ ID NO: 851 - protein, 14 aa, synthetic construct
ALGEIANWGIDTDK

SEQ ID NO: 852 - protein, 13 aa, synthetic construct
ALGELVGDTDKLI

SEQ ID NO: 853 - protein, 14 aa, synthetic construct
ALGGPSWYWGRPDK

SEQ ID NO: 854 - protein, 14 aa, synthetic construct
GLGELGTGGYADKL

SEQ ID NO: 855 - protein, 14 aa, synthetic construct
ALGRAFLRTLYTYK

SEQ ID NO: 856 - protein, 14 aa, synthetic construct
ALGRAFLRTPYTDK

SEQ ID NO: 857 - protein, 14 aa, synthetic construct
ALGEIANCGINTDK

SEQ ID NO: 858 - protein, 14 aa, synthetic construct
ALGVRRGMRGTDKL

SEQ ID NO: 859 - protein, 14 aa, synthetic construct
APGELTGGYADKLI

SEQ ID NO: 860 - protein, 14 aa, synthetic construct
ALGELFLPGDTDKL

SEQ ID NO: 861 - protein, 13 aa, synthetic construct
ALGGVPTDTDKLI

SEQ ID NO: 862 - protein, 14 aa, synthetic construct
GLGELAWGSYTDKL

SEQ ID NO: 863 - protein, 13 aa, synthetic construct
ALGVHPSYVLWEI

SEQ ID NO: 864 - protein, 13 aa, synthetic construct
GLGELGDKDDKLI

SEQ ID NO: 865 - protein, 11 aa, synthetic construct
ALGEGDNDKLI

SEQ ID NO: 866 - protein, 14 aa, synthetic construct
DLGELTGGYADKLI

SEQ ID NO: 867 - protein, 14 aa, synthetic construct
ALGVRRGILGTDKL

SEQ ID NO: 868 - protein, 14 aa, synthetic construct
ALGELVWGTTDKLV

SEQ ID NO: 869 - protein, 14 aa, synthetic construct
ALGELELGDTDKLI

SEQ ID NO: 870 - protein, 13 aa, synthetic construct
ALGELTFLPDKLF

SEQ ID NO: 871 - protein, 14 aa, synthetic construct
ALGELVSLGYSDKL

SEQ ID NO: 872 - protein, 11 aa, synthetic construct
ALGEGGTDKLI

SEQ ID NO: 873 - protein, 14 aa, synthetic construct
ALGELTGGYTDKLI

SEQ ID NO: 874 - protein, 14 aa, synthetic construct
ALGVLPYRGIRTDK

SEQ ID NO: 875 - protein, 12 aa, synthetic construct
GLGELWIHDKLI

SEQ ID NO: 876 - protein, 14 aa, synthetic construct
ALGEHPYWGSYTDK

SEQ ID NO: 877 - protein, 12 aa, synthetic construct
ALGELWIHDRLI

SEQ ID NO: 878 - protein, 14 aa, synthetic construct
ALGELAWGSYTDTL

SEQ ID NO: 879 - protein, 13 aa, synthetic construct
ALGELTFLPDNLI

SEQ ID NO: 880 - protein, 10 aa, synthetic construct
ALGELAWGKF

SEQ ID NO: 881 - protein, 14 aa, synthetic construct
ARGEPPSYVLGDTD

SEQ ID NO: 882 - protein, 14 aa, synthetic construct
ALGELTGGYAAKLI

SEQ ID NO: 883 - protein, 14 aa, synthetic construct
GLGELVSLGYTDKL

SEQ ID NO: 884 - protein, 12 aa, synthetic construct
ALGEPGTTIDSS

SEQ ID NO: 885 - protein, 12 aa, synthetic construct
ALGELSIHDKLI

SEQ ID NO: 886 - protein, 14 aa, synthetic construct
ALGELEWGIMGTDK

SEQ ID NO: 887 - protein, 13 aa, synthetic construct
ALGEGGHTPDKLI

SEQ ID NO: 888 - protein, 13 aa, synthetic construct
ALGEIWGIRSKLI

SEQ ID NO: 889 - protein, 14 aa, synthetic construct
ALGVLRGIRGTDKL

SEQ ID NO: 890 - protein, 13 aa, synthetic construct
ALGELWWIRSKLI

SEQ ID NO: 891 - protein, 12 aa, synthetic construct
ALGEPGTTIISS

SEQ ID NO: 892 - protein, 13 aa, synthetic construct
ALGDVWGIRSKLI

SEQ ID NO: 893 - protein, 11 aa, synthetic construct
ALGEGDTDNSS

SEQ ID NO: 894 - protein, 12 aa, synthetic construct
ALGEILHTDKLN

SEQ ID NO: 895 - protein, 12 aa, synthetic construct
ALGDWGIPDKLI

SEQ ID NO: 896 - protein, 14 aa, synthetic construct
DIGGPSWYWGIPDK

SEQ ID NO: 897 - protein, 11 aa, synthetic construct
ALGEGDTDNLI

SEQ ID NO: 898 - protein, 13 aa, synthetic construct
ALGDLPYRGIRTD

SEQ ID NO: 899 - protein, 14 aa, synthetic construct
GLGELSLRGIHTDK

SEQ ID NO: 900 - protein, 14 aa, synthetic construct
ALGELREGDKYKLI

SEQ ID NO: 901 - protein, 14 aa, synthetic construct
ALGEVGGGYDEKLI

SEQ ID NO: 902 - protein, 13 aa, synthetic construct
ALGELLGDTDKLT

SEQ ID NO: 903 - protein, 14 aa, synthetic construct
ALGEPTGGWTDKPI

SEQ ID NO: 904 - protein, 14 aa, synthetic construct
ALGEPPYYVLGDTD

SEQ ID NO: 905 - protein, 13 aa, synthetic construct
ALVEGGDTPDKLI

SEQ ID NO: 906 - protein, 14 aa, synthetic construct
ALGELGDTYPAKLI

SEQ ID NO: 907 - protein, 14 aa, synthetic construct
ALGELPCRGIRTDK

SEQ ID NO: 908 - protein, 14 aa, synthetic construct
ALGELREGDKINSS

SEQ ID NO: 909 - protein, 11 aa, synthetic construct
ALWEGDTDKLI

SEQ ID NO: 910 - protein, 13 aa, synthetic construct
ALGALGDKDDKLI

SEQ ID NO: 911 - protein, 14 aa, synthetic construct
ALGGLAWGSYTDKL

SEQ ID NO: 912 - protein, 14 aa, synthetic construct
LLGTSVLGDTRINS

SEQ ID NO: 913 - protein, 13 aa, synthetic construct
ALGELLVDTDKLI

SEQ ID NO: 914 - protein, 14 aa, synthetic construct
ALGEVPYRGIRTDK

SEQ ID NO: 915 - protein, 14 aa, synthetic construct
LLGTLLGDGPINSS

SEQ ID NO: 916 - protein, 13 aa, synthetic construct
ALGELPGDTDKLI

SEQ ID NO: 917 - protein, 13 aa, synthetic construct
AIGEGGDTPDKLI

SEQ ID NO: 918 - protein, 13 aa, synthetic construct
ALGALLPTFRGTG

SEQ ID NO: 919 - protein, 14 aa, synthetic construct
ALGEVCLGDTLATA

SEQ ID NO: 920 - protein, 14 aa, synthetic construct
ALGELGDTYPDKPI

SEQ ID NO: 921 - protein, 14 aa, synthetic construct
ALEELGTGGYADKL

SEQ ID NO: 922 - protein, 14 aa, synthetic construct
ALGELGGGYEDKLI

SEQ ID NO: 923 - protein, 14 aa, synthetic construct
ALGERTGGYLGSTT

SEQ ID NO: 924 - protein, 13 aa, synthetic construct
ALWEVPTDTDKLI

SEQ ID NO: 925 - protein, 14 aa, synthetic construct
AIGELAWGSYTDKL

SEQ ID NO: 926 - protein, 13 aa, synthetic construct
LLGSLLPTYWGTP

SEQ ID NO: 927 - protein, 14 aa, synthetic construct
ALGAPLPTFRGTDK

SEQ ID NO: 928 - protein, 13 aa, synthetic construct
ALGEVHKDTDKLI

SEQ ID NO: 929 - protein, 14 aa, synthetic construct
ALGGLPYRGIRTDK

SEQ ID NO: 930 - protein, 12 aa, synthetic construct
ALGDGGYTDKLI

SEQ ID NO: 931 - protein, 13 aa, synthetic construct
ALGEVPTDTDRLI

SEQ ID NO: 932 - protein, 12 aa, synthetic construct
ALGELGSTDKVI

SEQ ID NO: 933 - protein, 12 aa, synthetic construct
ALVELLHTDKLI

SEQ ID NO: 934 - protein, 14 aa, synthetic construct
ALVEIANWGINTDK

SEQ ID NO: 935 - protein, 12 aa, synthetic construct
ALWEPGTTINSS

SEQ ID NO: 936 - protein, 6 aa, synthetic construct
ALGALL

SEQ ID NO: 937 - protein, 13 aa, synthetic construct
ALWELTFLPDKLI

SEQ ID NO: 938 - protein, 14 aa, synthetic construct
ALGEPSYAGGPYTD

SEQ ID NO: 939 - protein, 14 aa, synthetic construct
TLGELTGGYADKLI

SEQ ID NO: 940 - protein, 14 aa, synthetic construct
ALGGLGDTYPDKLI

SEQ ID NO: 941 - protein, 14 aa, synthetic construct
ALWELVSLGYTDKL

SEQ ID NO: 942 - protein, 14 aa, synthetic construct
ALGELGGGYADKLI

SEQ ID NO: 943 - protein, 14 aa, synthetic construct
ALGGLGGYARTDKL

SEQ ID NO: 944 - protein, 13 aa, synthetic construct
ALGELLEDTDKLI

SEQ ID NO: 945 - protein, 14 aa, synthetic construct
ALWEPSYAGGSYTD

SEQ ID NO: 946 - protein, 12 aa, synthetic construct
ALGELGSTDKLF

SEQ ID NO: 947 - protein, 12 aa, synthetic construct
ALGELGSTGKLI

SEQ ID NO: 948 - protein, 12 aa, synthetic construct
ALGELLHTDNLI

SEQ ID NO: 949 - protein, 13 aa, synthetic construct
ALGEVLLGDSPLT

SEQ ID NO: 950 - protein, 12 aa, synthetic construct
ALGELGSTDKLV

SEQ ID NO: 951 - protein, 14 aa, synthetic construct
ALGERPYWGIYTDK

SEQ ID NO: 952 - protein, 12 aa, synthetic construct
ALGELGSTNKLI

SEQ ID NO: 953 - protein, 12 aa, synthetic construct
AHGELWIHDKLI

SEQ ID NO: 954 - protein, 14 aa, synthetic construct
ALGELGGGYAVNSS

SEQ ID NO: 955 - protein, 12 aa, synthetic construct
ALGELGDTDNSS

SEQ ID NO: 956 - protein, 14 aa, synthetic construct
ALGELPYRGYAPIN

SEQ ID NO: 957 - protein, 14 aa, synthetic construct
ALGEPTGGWTDNLI

SEQ ID NO: 958 - protein, 12 aa, synthetic construct
ALVAGGYTDKLI

SEQ ID NO: 959 - protein, 12 aa, synthetic construct
ALGELGNTDKLI

SEQ ID NO: 960 - protein, 14 aa, synthetic construct
ALGGLALPGIHTDK

SEQ ID NO: 961 - protein, 14 aa, synthetic construct
ALGELGHTYPDKLI

SEQ ID NO: 962 - protein, 13 aa, synthetic construct
ALGEVPPDTDQLI

SEQ ID NO: 963 - protein, 14 aa, synthetic construct
ALGGHSWYWGIPDK

SEQ ID NO: 964 - protein, 14 aa, synthetic construct
ALVELAWGSYTDKL

SEQ ID NO: 965 - protein, 12 aa, synthetic construct
ALGAGGDTDKLI

SEQ ID NO: 966 - protein, 14 aa, synthetic construct
AFGEIANWGINTDK

SEQ ID NO: 967 - protein, 14 aa, synthetic construct
ALGEVANWGINTDK

SEQ ID NO: 968 - protein, 14 aa, synthetic construct
LLGNVLGDTWAPGT

SEQ ID NO: 969 - protein, 14 aa, synthetic construct
ALGELGGYARTDTL

SEQ ID NO: 970 - protein, 12 aa, synthetic construct
ALGAGDTPINSS

SEQ ID NO: 971 - protein, 14 aa, synthetic construct
ALGEVGGGYYDKLI

SEQ ID NO: 972 - protein, 12 aa, synthetic construct
ALGDIGSTDKLI

SEQ ID NO: 973 - protein, 13 aa, synthetic construct
ALGELGDSSWATR

SEQ ID NO: 974 - protein, 12 aa, synthetic construct
VLGELWIHDKLI

SEQ ID NO: 975 - protein, 14 aa, synthetic construct
ALGEPTGGWTDILI

SEQ ID NO: 976 - protein, 14 aa, synthetic construct
ALGELGDTYPINSS

SEQ ID NO: 977 - protein, 13 aa, synthetic construct
ALWELGDKDDKLI

SEQ ID NO: 978 - protein, 12 aa, synthetic construct
ALGGPGTTINSS

SEQ ID NO: 979 - protein, 13 aa, synthetic construct
ALGALWGIRSKLI

SEQ ID NO: 980 - protein, 14 aa, synthetic construct
ALGEVALPGIHTDK

SEQ ID NO: 981 - protein, 14 aa, synthetic construct
ALGELGILTPINSS

SEQ ID NO: 982 - protein, 14 aa, synthetic construct
ALGELGHGGYADKL

SEQ ID NO: 983 - protein, 13 aa, synthetic construct
ALGEVPTDTDELI

SEQ ID NO: 984 - protein, 13 aa, synthetic construct
AIGELGDSSWDTR

SEQ ID NO: 985 - protein, 13 aa, synthetic construct
ALGELGDSSWHTR

SEQ ID NO: 986 - protein, 13 aa, synthetic construct
ALGELGDSSWGTR

SEQ ID NO: 987 - protein, 14 aa, synthetic construct
ALGELGGYALTDKL

SEQ ID NO: 988 - protein, 11 aa, synthetic construct
ALVEGDTDKLI

SEQ ID NO: 989 - protein, 14 aa, synthetic construct
ALGELGGVYDDKLI

SEQ ID NO: 990 - protein, 14 aa, synthetic construct
ALGEPVQGDIYTDK

SEQ ID NO: 991 - protein, 9 aa, synthetic construct
ALGELLHTD

SEQ ID NO: 992 - protein, 12 aa, synthetic construct
ALGELLNTDKII

SEQ ID NO: 993 - protein, 12 aa, synthetic construct
ALGELGTTINSS

SEQ ID NO: 994 - protein, 14 aa, synthetic construct
ALGETPSYVLGDTD

SEQ ID NO: 995 - protein, 14 aa, synthetic construct
ALGALLPAFRGTDK

SEQ ID NO: 996 - protein, 11 aa, synthetic construct
ALGEGDTDKLL

SEQ ID NO: 997 - protein, 11 aa, synthetic construct
ALGEGDTETLI

SEQ ID NO: 998 - protein, 13 aa, synthetic construct
ALVAGGYAGDKLI

SEQ ID NO: 999 - protein, 13 aa, synthetic construct
ALVELWGIRSKLI

SEQ ID NO: 1000 - protein, 14 aa, synthetic construct
ALGELSPFTRGHKL

SEQ ID NO: 1001 - protein, 12 aa, synthetic construct
ALGEVPTDTRQM

SEQ ID NO: 1002 - protein, 14 aa, synthetic construct
ALGELFLLGGTDKL

SEQ ID NO: 1003 - protein, 14 aa, synthetic construct
ALGELALPGIQTDK

SEQ ID NO: 1004 - protein, 14 aa, synthetic construct
ALGELVSHGYTDKL

SEQ ID NO: 1005 - protein, 13 aa, synthetic construct
ALGVPPSSVLGDI

SEQ ID NO: 1006 - protein, 12 aa, synthetic construct
ALWAGGYTDKLI

SEQ ID NO: 1007 - protein, 14 aa, synthetic construct
ALGELFLLGVTDKL

SEQ ID NO: 1008 - protein, 14 aa, synthetic construct
ALGETANWGINTDK

SEQ ID NO: 1009 - protein, 14 aa, synthetic construct
ALGEPTGGWTDTLI

SEQ ID NO: 1010 - protein, 12 aa, synthetic construct
APGELWIHDKLI

SEQ ID NO: 1011 - protein, 13 aa, synthetic construct
ALGDLTFLPEKLI

SEQ ID NO: 1012 - protein, 14 aa, synthetic construct
ALGGASWYWGIPDK

SEQ ID NO: 1013 - protein, 14 aa, synthetic construct
ARGGPSWYWGIPDK

SEQ ID NO: 1014 - protein, 13 aa, synthetic construct
ALGELSFLPDKLI

SEQ ID NO: 1015 - protein, 14 aa, synthetic construct
AIGELSPFTGGHKL

SEQ ID NO: 1016 - protein, 13 aa, synthetic construct
ALGEVPTDTNKLI

SEQ ID NO: 1017 - protein, 11 aa, synthetic construct
ALGEGDTDKLY

SEQ ID NO: 1018 - protein, 14 aa, synthetic construct
ALGERTVGYLGSWD

SEQ ID NO: 1019 - protein, 14 aa, synthetic construct
ALGERTGGNSSGST

SEQ ID NO: 1020 - protein, 14 aa, synthetic construct
ALGEPTGGWTDKVI

SEQ ID NO: 1021 - protein, 14 aa, synthetic construct
ALGELRGGDKNKLI

SEQ ID NO: 1022 - protein, 14 aa, synthetic construct
ALGVRRGIRGSDKL

SEQ ID NO: 1023 - protein, 12 aa, synthetic construct
ALGELGFTDKLI

SEQ ID NO: 1024 - protein, 14 aa, synthetic construct
ALGALLPTFRGTDE

SEQ ID NO: 1025 - protein, 13 aa, synthetic construct
ALGEVPTDTDKPI

SEQ ID NO: 1026 - protein, 14 aa, synthetic construct
ALGERTGGYFGSWD

SEQ ID NO: 1027 - protein, 13 aa, synthetic construct
ALGEVPTDTVKLI

SEQ ID NO: 1028 - protein, 14 aa, synthetic construct
DLGELFILGDTDKL

SEQ ID NO: 1029 - protein, 13 aa, synthetic construct
ALGEVPTDTDKLF

SEQ ID NO: 1030 - protein, 14 aa, synthetic construct
ALGELFLLGDTGKL

SEQ ID NO: 1031 - protein, 14 aa, synthetic construct
ALGELFLLGDTAKL

SEQ ID NO: 1032 - protein, 12 aa, synthetic construct
APGEPGTTINSS

SEQ ID NO: 1033 - protein, 14 aa, synthetic construct
ALGDLREGDQNKLI

SEQ ID NO: 1034 - protein, 12 aa, synthetic construct
AIGEPGTTINSS

SEQ ID NO: 1035 - protein, 14 aa, synthetic construct
ALGELFLLGDPDKL

SEQ ID NO: 1036 - protein, 14 aa, synthetic construct
ALGDLREGDKKKLI

SEQ ID NO: 1037 - protein, 12 aa, synthetic construct
ALGEGGDTPDKL

SEQ ID NO: 1038 - protein, 14 aa, synthetic construct
ALGGAFLRTLYTDK

SEQ ID NO: 1039 - protein, 14 aa, synthetic construct
ALGELVSLGYTDRL

SEQ ID NO: 1040 - protein, 13 aa, synthetic construct
ALGAGGYAADKLI

SEQ ID NO: 1041 - protein, 14 aa, synthetic construct
ALGELVSLGYTDTL

SEQ ID NO: 1042 - protein, 14 aa, synthetic construct
AIGELVWGTTDKLI

SEQ ID NO: 1043 - protein, 13 aa, synthetic construct
ALGEGEDTPDKLI

SEQ ID NO: 1044 - protein, 14 aa, synthetic construct
DLGELALPGINTDK

SEQ ID NO: 1045 - protein, 14 aa, synthetic construct
ALWELVWGTTDKLI

SEQ ID NO: 1046 - protein, 14 aa, synthetic construct
ALVEPVLGDIYTDK

SEQ ID NO: 1047 - protein, 13 aa, synthetic construct
ALGEGGDTPHKLI

SEQ ID NO: 1048 - protein, 14 aa, synthetic construct
ALGELGTVGYADKL

SEQ ID NO: 1049 - protein, 12 aa, synthetic construct
DLGELGDTDKLI

SEQ ID NO: 1050 - protein, 12 aa, synthetic construct
ALGELRSTDKLI

SEQ ID NO: 1051 - protein, 13 aa, synthetic construct
ALGEGGATPDKLI

SEQ ID NO: 1052 - protein, 14 aa, synthetic construct
ALGERTGGSLGSWD

SEQ ID NO: 1053 - protein, 13 aa, synthetic construct
ALGDLSLRGIHTD

SEQ ID NO: 1054 - protein, 14 aa, synthetic construct
ALGELFILGDTDNL

SEQ ID NO: 1055 - protein, 13 aa, synthetic construct
ALGEVPTDTAKLI

SEQ ID NO: 1056 - protein, 13 aa, synthetic construct
ALGDLSGIRSKLI

SEQ ID NO: 1057 - protein, 14 aa, synthetic construct
ALGELYLLGDTDKL

SEQ ID NO: 1058 - protein, 13 aa, synthetic construct
LLGTYWGTPINSS

SEQ ID NO: 1059 - protein, 14 aa, synthetic construct
ALGNLLGDGPINSS

SEQ ID NO: 1060 - protein, 14 aa, synthetic construct
ALGDVGGYARTDKL

SEQ ID NO: 1061 - protein, 14 aa, synthetic construct
ALGELSPFTGDHKL

SEQ ID NO: 1062 - protein, 12 aa, synthetic construct
ALGAGGYTDKHI

SEQ ID NO: 1063 - protein, 13 aa, synthetic construct
ALGELWGLRSKLI

SEQ ID NO: 1064 - protein, 14 aa, synthetic construct
ALGELVWGTTDKPI

SEQ ID NO: 1065 - protein, 14 aa, synthetic construct
ALGEPVLGDTDKLI

SEQ ID NO: 1066 - protein, 14 aa, synthetic construct
ALGELPYRGIRSDK

SEQ ID NO: 1067 - protein, 12 aa, synthetic construct
ALGAGGYTDKVI

SEQ ID NO: 1068 - protein, 14 aa, synthetic construct
ALGELGGGYPINSS

SEQ ID NO: 1069 - protein, 14 aa, synthetic construct
ALGELPSRGIRTDK

SEQ ID NO: 1070 - protein, 12 aa, synthetic construct
ALGDLWIHDNLI

SEQ ID NO: 1071 - protein, 14 aa, synthetic construct
LLGSILPTYWGTPI

SEQ ID NO: 1072 - protein, 13 aa, synthetic construct
ALGELWGTRSKLI

SEQ ID NO: 1073 - protein, 14 aa, synthetic construct
ALGEPVLGDMYTDK

SEQ ID NO: 1074 - protein, 14 aa, synthetic construct
ALGELVWGTTDKLF

SEQ ID NO: 1075 - protein, 14 aa, synthetic construct
ALEGPSWYWGIPDK

SEQ ID NO: 1076 - protein, 12 aa, synthetic construct
ALWELLHTDKLI

SEQ ID NO: 1077 - protein, 14 aa, synthetic construct
ALGELCRGDTLATA

SEQ ID NO: 1078 - protein, 14 aa, synthetic construct
ALGELGPGGDADKL

SEQ ID NO: 1079 - protein, 14 aa, synthetic construct
ALGEPVLGDIYTDQ

SEQ ID NO: 1080 - protein, 14 aa, synthetic construct
ALGAHPYWGIYTDK

SEQ ID NO: 1081 - protein, 14 aa, synthetic construct
ALGELAWGSYTDNL

SEQ ID NO: 1082 - protein, 14 aa, synthetic construct
ALGDMGDTYPDKLI

SEQ ID NO: 1083 - protein, 14 aa, synthetic construct
ALGELSPFTAGHKL

SEQ ID NO: 1084 - protein, 14 aa, synthetic construct
ALWELTGGYADKLI

SEQ ID NO: 1085 - protein, 14 aa, synthetic construct
DLGEPGLPLLGDTD

SEQ ID NO: 1086 - protein, 14 aa, synthetic construct
ALGELSLRGYTPIN

SEQ ID NO: 1087 - protein, 14 aa, synthetic construct
ALWELGGGYDDKLI

SEQ ID NO: 1088 - protein, 14 aa, synthetic construct
ALGEPVMGDIYTDK

SEQ ID NO: 1089 - protein, 14 aa, synthetic construct
ALGRAFILTLYTDK

SEQ ID NO: 1090 - protein, 8 aa, synthetic construct
ALGELCLG

SEQ ID NO: 1091 - protein, 14 aa, synthetic construct
ALGELSPCTGGQKL

SEQ ID NO: 1092 - protein, 14 aa, synthetic construct
ALGELSLRGLHTDK

SEQ ID NO: 1093 - protein, 13 aa, synthetic construct
ALGAGGDAGDKLI

SEQ ID NO: 1094 - protein, 13 aa, synthetic construct
ALGELWGIRSKLF

SEQ ID NO: 1095 - protein, 11 aa, synthetic construct
ALGAGDTDKLI

SEQ ID NO: 1096 - protein, 12 aa, synthetic construct
ALGRAFLPDKLI

SEQ ID NO: 1097 - protein, 14 aa, synthetic construct
ALGRAFLRNLYTDK

SEQ ID NO: 1098 - protein, 14 aa, synthetic construct
ARGELAWGSYTDKL

SEQ ID NO: 1099 - protein, 14 aa, synthetic construct
ALGELCLGGTLATA

SEQ ID NO: 1100 - protein, 14 aa, synthetic construct
ALGELAWRSYTDKL

SEQ ID NO: 1101 - protein, 13 aa, synthetic construct
ALGELWGIRSKPI

SEQ ID NO: 1102 - protein, 13 aa, synthetic construct
ALGDPGLPLLGDT

SEQ ID NO: 1103 - protein, 14 aa, synthetic construct
ALGEPVLGDTWAPG

SEQ ID NO: 1104 - protein, 13 aa, synthetic construct
ALGELGHKDDKLI

SEQ ID NO: 1105 - protein, 12 aa, synthetic construct
ALGAFLPYWGYR

SEQ ID NO: 1106 - protein, 14 aa, synthetic construct
ALGAFLPYWGIPIN

SEQ ID NO: 1107 - protein, 14 aa, synthetic construct
ALWELREGDKNKLI

SEQ ID NO: 1108 - protein, 13 aa, synthetic construct
ALGEVWGIRSKII

SEQ ID NO: 1109 - protein, 14 aa, synthetic construct
ALGAILPTFRGTDK

SEQ ID NO: 1110 - protein, 12 aa, synthetic construct
ALGELAWGSYTD

SEQ ID NO: 1111 - protein, 12 aa, synthetic construct
DLGELLNTDKLI

SEQ ID NO: 1112 - protein, 14 aa, synthetic construct
LLGTWGILTPINSS

SEQ ID NO: 1113 - protein, 14 aa, synthetic construct
ALGELEGGIRGTDK

SEQ ID NO: 1114 - protein, 14 aa, synthetic construct
ALGELGGGYDAKLI

SEQ ID NO: 1115 - protein, 13 aa, synthetic construct
ALGNYWGTPINSS

SEQ ID NO: 1116 - protein, 13 aa, synthetic construct
ALGNYWGIPINSS

SEQ ID NO: 1117 - protein, 13 aa, synthetic construct
LLGTYWGIPINSS

SEQ ID NO: 1118 - protein, 12 aa, synthetic construct
ALGELWIRDKLI

SEQ ID NO: 1119 - protein, 14 aa, synthetic construct
ALGELGYTYPDKLI

SEQ ID NO: 1120 - protein, 13 aa, synthetic construct
ALGEVPTGTDKLI

SEQ ID NO: 1121 - protein, 14 aa, synthetic construct
ALGELERGIKINSS

SEQ ID NO: 1122 - protein, 14 aa, synthetic construct
ALGELESLGYTDKL

SEQ ID NO: 1123 - protein, 14 aa, synthetic construct
ALGELPYRGLRTDK

SEQ ID NO: 1124 - protein, 13 aa, synthetic construct
ALGERGDKDDKLI

SEQ ID NO: 1125 - protein, 14 aa, synthetic construct
ALGEPTGGYAGDST

SEQ ID NO: 1126 - protein, 14 aa, synthetic construct
ALGELVVGDTDKLI

SEQ ID NO: 1127 - protein, 13 aa, synthetic construct
ALGELMGDTDKLI

SEQ ID NO: 1128 - protein, 12 aa, synthetic construct
ALGELGSTDNSS

SEQ ID NO: 1129 - protein, 14 aa, synthetic construct
ALGELVTLGYTDKL

SEQ ID NO: 1130 - protein, 14 aa, synthetic construct
ARGELVWGTTDKLI

SEQ ID NO: 1131 - protein, 14 aa, synthetic construct
ALGELEWGIRGADK

SEQ ID NO: 1132 - protein, 12 aa, synthetic construct
ALGEFLHTDKLI

SEQ ID NO: 1133 - protein, 14 aa, synthetic construct
ALGELAWGSFTDKL

SEQ ID NO: 1134 - protein, 14 aa, synthetic construct
ALGELVWGIRGTDK

SEQ ID NO: 1135 - protein, 14 aa, synthetic construct
DLGELREGDKNKLI

SEQ ID NO: 1136 - protein, 14 aa, synthetic construct
ALGELCVRDTLATA

SEQ ID NO: 1137 - protein, 14 aa, synthetic construct
ALGELDGGYDDKLI

SEQ ID NO: 1138 - protein, 14 aa, synthetic construct
ALWEIANWGINTDK

SEQ ID NO: 1139 - protein, 14 aa, synthetic construct
ALGALALPGIHTDK

SEQ ID NO: 1140 - protein, 14 aa, synthetic construct
ALGEPVLGDGPINS

SEQ ID NO: 1141 - protein, 14 aa, synthetic construct
ALGELGGGYDENLI

SEQ ID NO: 1142 - protein, 14 aa, synthetic construct
ALREPGLPLLGDTD

SEQ ID NO: 1143 - protein, 14 aa, synthetic construct
ALGEASYAGGSYTD

SEQ ID NO: 1144 - protein, 14 aa, synthetic construct
ALGDLVSLGYTEKL

SEQ ID NO: 1145 - protein, 14 aa, synthetic construct
LLGNIPTLGDLTPI

SEQ ID NO: 1146 - protein, 14 aa, synthetic construct
ALGELGGGYDDKHI

SEQ ID NO: 1147 - protein, 14 aa, synthetic construct
ALGEPTYAGGSYTD

SEQ ID NO: 1148 - protein, 14 aa, synthetic construct
ALGELGGGYDDKPI

SEQ ID NO: 1149 - protein, 14 aa, synthetic construct
ALGDLVSLGYADKL

SEQ ID NO: 1150 - protein, 14 aa, synthetic construct
ALGDLVSLGSTDKL

SEQ ID NO: 1151 - protein, 14 aa, synthetic construct
ALGELAWGSNTDKL

SEQ ID NO: 1152 - protein, 14 aa, synthetic construct
ALGELAWGSHTDKL

SEQ ID NO: 1153 - protein, 14 aa, synthetic construct
LLGTTRTGGSTPIN

SEQ ID NO: 1154 - protein, 12 aa, synthetic construct
ALGELWIHGKLI

SEQ ID NO: 1155 - protein, 14 aa, synthetic construct
ARGDLGGGYDDKLI

SEQ ID NO: 1156 - protein, 13 aa, synthetic construct
ALGDLLGDTYKLI

SEQ ID NO: 1157 - protein, 13 aa, synthetic construct
ALGELGDRSWYTR

SEQ ID NO: 1158 - protein, 14 aa, synthetic construct
ALGELPYWGIYTDK

SEQ ID NO: 1159 - protein, 14 aa, synthetic construct
TLGEIANWGINTDK

SEQ ID NO: 1160 - protein, 14 aa, synthetic construct
ALGGPSWYRGIPDK

SEQ ID NO: 1161 - protein, 13 aa, synthetic construct
ALGDIANWGINTD

SEQ ID NO: 1162 - protein, 13 aa, synthetic construct
ALGELGDGSWDTR

SEQ ID NO: 1163 - protein, 13 aa, synthetic construct
TLGELGDSSWDTR

SEQ ID NO: 1164 - protein, 14 aa, synthetic construct
TLGELCLGDTLATA

SEQ ID NO: 1165 - protein, 12 aa, synthetic construct
VLGELLHTDKLI

SEQ ID NO: 1166 - protein, 13 aa, synthetic construct
ALGEPLGDTDKLI

SEQ ID NO: 1167 - protein, 12 aa, synthetic construct
ALGEPGPTINSS

SEQ ID NO: 1168 - protein, 14 aa, synthetic construct
ALGDLGGGYYDKLI

SEQ ID NO: 1169 - protein, 13 aa, synthetic construct
ALGEILGDTDKLN

SEQ ID NO: 1170 - protein, 14 aa, synthetic construct
ALGEPGPPLLGDTD

SEQ ID NO: 1171 - protein, 12 aa, synthetic construct
GLGELGSTDKLI

SEQ ID NO: 1172 - protein, 14 aa, synthetic construct
ALGGPSWYWGYPIN

SEQ ID NO: 1173 - protein, 13 aa, synthetic construct
ALGELGDSSWNTR

SEQ ID NO: 1174 - protein, 14 aa, synthetic construct
ALGELLGDTPINSS

SEQ ID NO: 1175 - protein, 14 aa, synthetic construct
ALGEPGLPLLGGTD

SEQ ID NO: 1176 - protein, 14 aa, synthetic construct
ALGEISLRGIHTDK

SEQ ID NO: 1177 - protein, 14 aa, synthetic construct
ALGEHPYWGIYADK

SEQ ID NO: 1178 - protein, 14 aa, synthetic construct
ALGELLGDTRINSS

SEQ ID NO: 1179 - protein, 14 aa, synthetic construct
GLGELGGGYDDKLI

SEQ ID NO: 1180 - protein, 14 aa, synthetic construct
ALGEHPYWGILGLL

SEQ ID NO: 1181 - protein, 14 aa, synthetic construct
ALGELREGDSSWDT

SEQ ID NO: 1182 - protein, 14 aa, synthetic construct
ALGEHPYWGIHTDK

SEQ ID NO: 1183 - protein, 14 aa, synthetic construct
ALGELTGGYADILI

SEQ ID NO: 1184 - protein, 13 aa, synthetic construct
ALGEHPYWGICTD

SEQ ID NO: 1185 - protein, 14 aa, synthetic construct
ALGELGDTYPDILI

SEQ ID NO: 1186 - protein, 14 aa, synthetic construct
ALGELGDTYPDKHI

SEQ ID NO: 1187 - protein, 13 aa, synthetic construct
ALGEPTFLPDKLI

SEQ ID NO: 1188 - protein, 12 aa, synthetic construct
ALGELLHTGKLI

SEQ ID NO: 1189 - protein, 14 aa, synthetic construct
ALGVRRGLRGTDKL

SEQ ID NO: 1190 - protein, 14 aa, synthetic construct
ALGELGDTWAPGTP

SEQ ID NO: 1191 - protein, 12 aa, synthetic construct
ALGEIANWGINT

SEQ ID NO: 1192 - protein, 14 aa, synthetic construct
ALVEHPYWGIYTDK

SEQ ID NO: 1193 - protein, 12 aa, synthetic construct
ALGEILNTDKLI

SEQ ID NO: 1194 - protein, 13 aa, synthetic construct
AHGELGDKDDKLI

SEQ ID NO: 1195 - protein, 13 aa, synthetic construct
ALGEVGDSSWDTR

SEQ ID NO: 1196 - protein, 14 aa, synthetic construct
ALGGPSWYWGIAPG

SEQ ID NO: 1197 - protein, 11 aa, synthetic construct
AHGEGDTDKLI

SEQ ID NO: 1198 - protein, 13 aa, synthetic construct
ALGDLGDSSCDTR

SEQ ID NO: 1199 - protein, 14 aa, synthetic construct
ALGEIANSGINTDK

SEQ ID NO: 1200 - protein, 12 aa, synthetic construct
ALGELGDTDKLV

SEQ ID NO: 1201 - protein, 12 aa, synthetic construct
ALGELLGDTDKL

SEQ ID NO: 1202 - protein, 13 aa, synthetic construct
ALGDLGDKDDNLI

SEQ ID NO: 1203 - protein, 14 aa, synthetic construct
ALGELREGDKIKLI

SEQ ID NO: 1204 - protein, 14 aa, synthetic construct
AHGELVSLGYTDKL

SEQ ID NO: 1205 - protein, 12 aa, synthetic construct
AHGAGGYTDKLI

SEQ ID NO: 1206 - protein, 14 aa, synthetic construct
ALGELGDTCPDKLI

SEQ ID NO: 1207 - protein, 14 aa, synthetic construct
ALGEIANWGIITDK

SEQ ID NO: 1208 - protein, 14 aa, synthetic construct
GLGELSPFTGGHKL

SEQ ID NO: 1209 - protein, 14 aa, synthetic construct
ALGELREGDKNILI

SEQ ID NO: 1210 - protein, 14 aa, synthetic construct
ALGELGDSYPDKLI

SEQ ID NO: 1211 - protein, 14 aa, synthetic construct
ALGGPSWYSGIPDK

SEQ ID NO: 1212 - protein, 13 aa, synthetic construct
ALGELGDKDDKLL

SEQ ID NO: 1213 - protein, 14 aa, synthetic construct
AVGEPSYAGGSYTD

SEQ ID NO: 1214 - protein, 12 aa, synthetic construct
ALGGLGDTDKLI

SEQ ID NO: 1215 - protein, 14 aa, synthetic construct
ALGEPGTGGYADKL

SEQ ID NO: 1216 - protein, 13 aa, synthetic construct
ALGELGDKDDKHI

SEQ ID NO: 1217 - protein, 12 aa, synthetic construct
ALGGLWIHDKLI

SEQ ID NO: 1218 - protein, 14 aa, synthetic construct
ALGEPPSYVMGDTD

SEQ ID NO: 1219 - protein, 14 aa, synthetic construct
ALGGPSWYWGMPDK

SEQ ID NO: 1220 - protein, 13 aa, synthetic construct
ALGELGDKDDELI

SEQ ID NO: 1221 - protein, 13 aa, synthetic construct
ALGGLGDKDDKLI

SEQ ID NO: 1222 - protein, 14 aa, synthetic construct
ALGEPSYAGGSTPI

SEQ ID NO: 1223 - protein, 14 aa, synthetic construct
ALGELVLGDTDQLI

SEQ ID NO: 1224 - protein, 13 aa, synthetic construct
ALGEPPSYVLGEI

SEQ ID NO: 1225 - protein, 13 aa, synthetic construct
ALGELTFLTDKLI

SEQ ID NO: 1226 - protein, 12 aa, synthetic construct
ALGELLHADKLI

SEQ ID NO: 1227 - protein, 12 aa, synthetic construct
ALGEVGSTDKLI

SEQ ID NO: 1228 - protein, 12 aa, synthetic construct
ALGELHHTDKLI

SEQ ID NO: 1229 - protein, 11 aa, synthetic construct
ALGGGDTDKLI

SEQ ID NO: 1230 - protein, 13 aa, synthetic construct
ALGELIFLPDKLI

SEQ ID NO: 1231 - protein, 14 aa, synthetic construct
ALGELALGSYTDKL

SEQ ID NO: 1232 - protein, 14 aa, synthetic construct
AFGELGGYARTDKL

SEQ ID NO: 1233 - protein, 13 aa, synthetic construct
ALGELTFLPDELI

SEQ ID NO: 1234 - protein, 14 aa, synthetic construct
ALGELFPLGDTDKL

SEQ ID NO: 1235 - protein, 14 aa, synthetic construct
APGELREGDKNKLI

SEQ ID NO: 1236 - protein, 13 aa, synthetic construct
ALGELGDSSSDTR

SEQ ID NO: 1237 - protein, 14 aa, synthetic construct
ALGELIEGDKNKLI

SEQ ID NO: 1238 - protein, 12 aa, synthetic construct
ALGALWIHDKLI

SEQ ID NO: 1239 - protein, 14 aa, synthetic construct
AIGELGGGYDDKLI

SEQ ID NO: 1240 - protein, 14 aa, synthetic construct
ALGDLAGGSYTDKL

SEQ ID NO: 1241 - protein, 12 aa, synthetic construct
ALGVLGSTDKLI

SEQ ID NO: 1242 - protein, 13 aa, synthetic construct
ALGELGDRDDKLI

SEQ ID NO: 1243 - protein, 14 aa, synthetic construct
GLGRAFLRTLYTDK

SEQ ID NO: 1244 - protein, 12 aa, synthetic construct
APGAGGYTDKLI

SEQ ID NO: 1245 - protein, 14 aa, synthetic construct
VLGEPTGGWTDKLI

SEQ ID NO: 1246 - protein, 13 aa, synthetic construct
GLGEGGDTPDKLI

SEQ ID NO: 1247 - protein, 14 aa, synthetic construct
ALGGPSWCWGIPDK

SEQ ID NO: 1248 - protein, 14 aa, synthetic construct
ALGGPPWYWGIPDK

SEQ ID NO: 1249 - protein, 13 aa, synthetic construct
ALGVLLGDTDKLI

SEQ ID NO: 1250 - protein, 13 aa, synthetic construct
ALGELGDNSWDTR

SEQ ID NO: 1251 - protein, 14 aa, synthetic construct
ALGEPTGGWADKLI

SEQ ID NO: 1252 - protein, 14 aa, synthetic construct
ALGELREGDKTKLI

SEQ ID NO: 1253 - protein, 14 aa, synthetic construct
ALGDLARGSYTDKL

SEQ ID NO: 1254 - protein, 13 aa, synthetic construct
ALVELTFLPDKLI

SEQ ID NO: 1255 - protein, 14 aa, synthetic construct
ALGELGDNYPDKLI

SEQ ID NO: 1256 - protein, 14 aa, synthetic construct
ALGELGGYARTDEL

SEQ ID NO: 1257 - protein, 14 aa, synthetic construct
VLGELFLLGDTDKL

SEQ ID NO: 1258 - protein, 14 aa, synthetic construct
ALGELGGYARADKL

SEQ ID NO: 1259 - protein, 12 aa, synthetic construct
ALGELLHTDKLF

SEQ ID NO: 1260 - protein, 14 aa, synthetic construct
AFGALLPTFRGTDK

SEQ ID NO: 1261 - protein, 13 aa, synthetic construct
ALGVHPSYVLGDI

SEQ ID NO: 1262 - protein, 12 aa, synthetic construct
ALGEQGTTIKSS

SEQ ID NO: 1263 - protein, 13 aa, synthetic construct
ALGELLGIPINSS

SEQ ID NO: 1264 - protein, 13 aa, synthetic construct
ALGELWGILSKLI

SEQ ID NO: 1265 - protein, 12 aa, synthetic construct
ALGAGGFTDKLI

SEQ ID NO: 1266 - protein, 14 aa, synthetic construct
ALGELVWGTPEKLI

SEQ ID NO: 1267 - protein, 14 aa, synthetic construct
ALGELGGYARTAKL

SEQ ID NO: 1268 - protein, 14 aa, synthetic construct
ALGELGSLGYTDKL

SEQ ID NO: 1269 - protein, 14 aa, synthetic construct
ALGELTGDTPINSS

SEQ ID NO: 1270 - protein, 13 aa, synthetic construct
ALGVLLGDTDQLI

SEQ ID NO: 1271 - protein, 13 aa, synthetic construct
ALGEIANWGIKTD

SEQ ID NO: 1272 - protein, 13 aa, synthetic construct
VLGELGDKDDKLI

SEQ ID NO: 1273 - protein, 14 aa, synthetic construct
DLGERTGGYLGSWD

SEQ ID NO: 1274 - protein, 13 aa, synthetic construct
ALGELTSLPDKLI

SEQ ID NO: 1275 - protein, 13 aa, synthetic construct
ALGELLGDTENLI

SEQ ID NO: 1276 - protein, 12 aa, synthetic construct
ALGELLHTDILI

SEQ ID NO: 1277 - protein, 13 aa, synthetic construct
ALGEVPTYTDKLI

SEQ ID NO: 1278 - protein, 14 aa, synthetic construct
ALGRAFLRTLYSDK

SEQ ID NO: 1279 - protein, 14 aa, synthetic construct
ALGEAVLGDIYTDK

SEQ ID NO: 1280 - protein, 12 aa, synthetic construct
ALGELGSTDELI

SEQ ID NO: 1281 - protein, 8 aa, synthetic construct
ALGEVPYR

SEQ ID NO: 1282 - protein, 13 aa, synthetic construct
ALGEVPYRGIRTD

SEQ ID NO: 1283 - protein, 14 aa, synthetic construct
VLGELAWGSYTDKL

SEQ ID NO: 1284 - protein, 14 aa, synthetic construct
ALGEIANWGIAPGT

SEQ ID NO: 1285 - protein, 13 aa, synthetic construct
ALGEQLGDTDKLI

SEQ ID NO: 1286 - protein, 14 aa, synthetic construct
ALGELAWGSYIDKL

SEQ ID NO: 1287 - protein, 14 aa, synthetic construct
ALEEHPYWGIYTDK

SEQ ID NO: 1288 - protein, 13 aa, synthetic construct
ALGVLTFLPEKLI

SEQ ID NO: 1289 - protein, 13 aa, synthetic construct
ALGELTFPPDKLI

SEQ ID NO: 1290 - protein, 12 aa, synthetic construct
ALGELGSSDKLI

SEQ ID NO: 1291 - protein, 14 aa, synthetic construct
ALGELVWGTPDKII

SEQ ID NO: 1292 - protein, 13 aa, synthetic construct
ALGELWEIRSKLI

SEQ ID NO: 1293 - protein, 14 aa, synthetic construct
ALGELVWGSYTDKL

SEQ ID NO: 1294 - protein, 13 aa, synthetic construct
LLGNWGIRTINST

SEQ ID NO: 1295 - protein, 14 aa, synthetic construct
ALGELAWGSYTYKL

SEQ ID NO: 1296 - protein, 14 aa, synthetic construct
ALGELTPFTGGHKL

SEQ ID NO: 1297 - protein, 14 aa, synthetic construct
ALGELVWGTTDNLI

SEQ ID NO: 1298 - protein, 14 aa, synthetic construct
ALGRAFLRPLYTDK

SEQ ID NO: 1299 - protein, 14 aa, synthetic construct
ALGVLEWGIRGTDK

SEQ ID NO: 1300 - protein, 14 aa, synthetic construct
AFGELGTGGYADKL

SEQ ID NO: 1301 - protein, 13 aa, synthetic construct
AFGELLGDTDKLI

SEQ ID NO: 1302 - protein, 12 aa, synthetic construct
ALGELGIPINSS

SEQ ID NO: 1303 - protein, 13 aa, synthetic construct
AVGELWGIRSKLI

SEQ ID NO: 1304 - protein, 12 aa, synthetic construct
ALGELLHIDKLI

SEQ ID NO: 1305 - protein, 12 aa, synthetic construct
DLGELWIHDKII

SEQ ID NO: 1306 - protein, 14 aa, synthetic construct
ALWELFLLGDTDKL

SEQ ID NO: 1307 - protein, 14 aa, synthetic construct
ALGDVGGGYDDQLI

SEQ ID NO: 1308 - protein, 13 aa, synthetic construct
ALGVLGDKDDKLI

SEQ ID NO: 1309 - protein, 13 aa, synthetic construct
ALRELLGDTDKLI

SEQ ID NO: 1310 - protein, 13 aa, synthetic construct
ALGELCGIRSKLI

SEQ ID NO: 1311 - protein, 12 aa, synthetic construct
ALGEIIHTDKLI

SEQ ID NO: 1312 - protein, 14 aa, synthetic construct
AFGEPTGGWTDKLI

SEQ ID NO: 1313 - protein, 14 aa, synthetic construct
ALGELTGGYPINSS

SEQ ID NO: 1314 - protein, 14 aa, synthetic construct
ALGRAFLRTLHTDK

SEQ ID NO: 1315 - protein, 14 aa, synthetic construct
ALGAFLPYWGIAPG

SEQ ID NO: 1316 - protein, 14 aa, synthetic construct
ALGELAWGTYTDKL

SEQ ID NO: 1317 - protein, 14 aa, synthetic construct
ALGEVGGYARSDKL

SEQ ID NO: 1318 - protein, 12 aa, synthetic construct
ALGELLHTAKLI

SEQ ID NO: 1319 - protein, 14 aa, synthetic construct
ALGELAWGSYTVKL

SEQ ID NO: 1320 - protein, 14 aa, synthetic construct
ALGELTGGYADKLF

SEQ ID NO: 1321 - protein, 12 aa, synthetic construct
ALGELGHTDKLI

SEQ ID NO: 1322 - protein, 14 aa, synthetic construct
ALGELVWRTTDKLI

SEQ ID NO: 1323 - protein, 14 aa, synthetic construct
ALGVLALPGIHTDK

SEQ ID NO: 1324 - protein, 14 aa, synthetic construct
VLGELTGGYADKLI

SEQ ID NO: 1325 - protein, 13 aa, synthetic construct
ALGDVPTDTDKLV

SEQ ID NO: 1326 - protein, 14 aa, synthetic construct
ALGEVGDTYPDKLI

SEQ ID NO: 1327 - protein, 14 aa, synthetic construct
LLGTFAWGIRWRQH

SEQ ID NO: 1328 - protein, 14 aa, synthetic construct
ALGELGGYARTDIL

SEQ ID NO: 1329 - protein, 14 aa, synthetic construct
ALEELVWGTTDKLI

SEQ ID NO: 1330 - protein, 14 aa, synthetic construct
ARGELGPGGYADKL

SEQ ID NO: 1331 - protein, 14 aa, synthetic construct
ALGEIASWGINTDK

SEQ ID NO: 1332 - protein, 14 aa, synthetic construct
ALGEIFLLGDTDKL

SEQ ID NO: 1333 - protein, 14 aa, synthetic construct
ALGELTGGYAPINS

SEQ ID NO: 1334 - protein, 14 aa, synthetic construct
ALGELPPFTGGHKL

SEQ ID NO: 1335 - protein, 14 aa, synthetic construct
ALGELGGYARTNKL

SEQ ID NO: 1336 - protein, 14 aa, synthetic construct
ALGELAWGSYTDRL

SEQ ID NO: 1337 - protein, 12 aa, synthetic construct
VLGELGSTDKLI

SEQ ID NO: 1338 - protein, 9 aa, synthetic construct
ALGELSPFT

SEQ ID NO: 1339 - protein, 14 aa, synthetic construct
ALGELTGGYADKVI

SEQ ID NO: 1340 - protein, 14 aa, synthetic construct
ALGEVGGGYDDKII

SEQ ID NO: 1341 - protein, 14 aa, synthetic construct
ALWELAWGSYTDKL

SEQ ID NO: 1342 - protein, 14 aa, synthetic construct
ALGELPYRGIAPGT

SEQ ID NO: 1343 - protein, 14 aa, synthetic construct
VLGELPYRGIRTDK

SEQ ID NO: 1344 - protein, 12 aa, synthetic construct
ALRELGSTDKLI

SEQ ID NO: 1345 - protein, 14 aa, synthetic construct
ALGELGNGGYSDKL

SEQ ID NO: 1346 - protein, 13 aa, synthetic construct
ALGEILGDTEKLI

SEQ ID NO: 1347 - protein, 14 aa, synthetic construct
ALGELTGGYAVKLI

SEQ ID NO: 1348 - protein, 13 aa, synthetic construct
ALGEIANWGLNTD

SEQ ID NO: 1349 - protein, 14 aa, synthetic construct
ALGELTGGYADNII

SEQ ID NO: 1350 - protein, 14 aa, synthetic construct
ALGRVFLRTLYTDK

SEQ ID NO: 1351 - protein, 13 aa, synthetic construct
DIGELGDSSWDTR

SEQ ID NO: 1352 - protein, 14 aa, synthetic construct
ALGERTGGYPINSS

SEQ ID NO: 1353 - protein, 14 aa, synthetic construct
ALVELSPFTGGHKL

SEQ ID NO: 1354 - protein, 13 aa, synthetic construct
ALGELTFLPDKHI

SEQ ID NO: 1355 - protein, 10 aa, synthetic construct
ALGEGGDTPD

SEQ ID NO: 1356 - protein, 13 aa, synthetic construct
ALGEGGDTPDELI

SEQ ID NO: 1357 - protein, 14 aa, synthetic construct
DLGELDWGSYTDKL

SEQ ID NO: 1358 - protein, 14 aa, synthetic construct
ALGELGTGGYEDKL

SEQ ID NO: 1359 - protein, 14 aa, synthetic construct
AIGELEWGIRGTDK

SEQ ID NO: 1360 - protein, 14 aa, synthetic construct
AIGELFLLGDTDKL

SEQ ID NO: 1361 - protein, 14 aa, synthetic construct
ALGERTRGYLGSWD

SEQ ID NO: 1362 - protein, 14 aa, synthetic construct
ALGELAGGYDDKLI

SEQ ID NO: 1363 - protein, 13 aa, synthetic construct
ALGEGGDTPDKLL

SEQ ID NO: 1364 - protein, 14 aa, synthetic construct
AIGEPTGGWTDKLI

SEQ ID NO: 1365 - protein, 13 aa, synthetic construct
ALGEGGDTPDKLV

SEQ ID NO: 1366 - protein, 14 aa, synthetic construct
ALGELGTGRYADKL

SEQ ID NO: 1367 - protein, 13 aa, synthetic construct
ALGELAFPYWGYR

SEQ ID NO: 1368 - protein, 14 aa, synthetic construct
AIGELALPGIHTDK

SEQ ID NO: 1369 - protein, 13 aa, synthetic construct
ALGELTFLPDKIF

SEQ ID NO: 1370 - protein, 12 aa, synthetic construct
ALGELLTPINSS

SEQ ID NO: 1371 - protein, 14 aa, synthetic construct
ALGERTGGYAGDST

SEQ ID NO: 1372 - protein, 14 aa, synthetic construct
AIGEHPYWGIYTDK

SEQ ID NO: 1373 - protein, 12 aa, synthetic construct
ALGEGGDKNKLI

SEQ ID NO: 1374 - protein, 14 aa, synthetic construct
AIGVRRGIRGTDKL

SEQ ID NO: 1375 - protein, 11 aa, synthetic construct
ALGELAFPSWG

SEQ ID NO: 1376 - protein, 14 aa, synthetic construct
ALGELVLGDTDKSS

SEQ ID NO: 1377 - protein, 13 aa, synthetic construct
ALGELGTGGHKLI

SEQ ID NO: 1378 - protein, 14 aa, synthetic construct
ALGEVCLGETLATA

SEQ ID NO: 1379 - protein, 11 aa, synthetic construct
AIGEGDNDKLI

SEQ ID NO: 1380 - protein, 14 aa, synthetic construct
ALGELGTGGHADKL

SEQ ID NO: 1381 - protein, 14 aa, synthetic construct
ALGELAQPGIHTDK

SEQ ID NO: 1382 - protein, 14 aa, synthetic construct
ALGERTGGQPINSS

SEQ ID NO: 1383 - protein, 13 aa, synthetic construct
DLGELGDSSWYTR

SEQ ID NO: 1384 - protein, 13 aa, synthetic construct
ALGEVPTDTDILI

SEQ ID NO: 1385 - protein, 14 aa, synthetic construct
ALGELVLGDTWAPG

SEQ ID NO: 1386 - protein, 11 aa, synthetic construct
ALGEEDTDKLI

SEQ ID NO: 1387 - protein, 14 aa, synthetic construct
ALGETVLGDIYTDK

SEQ ID NO: 1388 - protein, 14 aa, synthetic construct
AIGELGDTYPDKLI

SEQ ID NO: 1389 - protein, 14 aa, synthetic construct
ALGELVSLGCTDKL

SEQ ID NO: 1390 - protein, 13 aa, synthetic construct
ALGEGGETPDKLI

SEQ ID NO: 1391 - protein, 14 aa, synthetic construct
ALGELALPGDTDKL

SEQ ID NO: 1392 - protein, 14 aa, synthetic construct
AIGELGGYARTDKL

SEQ ID NO: 1393 - protein, 14 aa, synthetic construct
ALVELVWGTTDKLI

SEQ ID NO: 1394 - protein, 14 aa, synthetic construct
AIGELGTGGYADKL

SEQ ID NO: 1395 - protein, 13 aa, synthetic construct
ARGEVPTDTDKLI

SEQ ID NO: 1396 - protein, 13 aa, synthetic construct
ALGELALPGINTD

SEQ ID NO: 1397 - protein, 14 aa, synthetic construct
AIGELREGDKNKLI

SEQ ID NO: 1398 - protein, 14 aa, synthetic construct
ALGSAFLRTLYTDK

SEQ ID NO: 1399 - protein, 13 aa, synthetic construct
ALGEGGIPPRNSS

SEQ ID NO: 1400 - protein, 12 aa, synthetic construct
ALGELALPGIHT

SEQ ID NO: 1401 - protein, 14 aa, synthetic construct
DLGEIAYWGINTDK

SEQ ID NO: 1402 - protein, 14 aa, synthetic construct
ALGELALPGIRTDK

SEQ ID NO: 1403 - protein, 13 aa, synthetic construct
ALGEGGDTSDKLI

SEQ ID NO: 1404 - protein, 14 aa, synthetic construct
ALGELALPGLHTDK

SEQ ID NO: 1405 - protein, 14 aa, synthetic construct
ALGELVLPGIHTDK

SEQ ID NO: 1406 - protein, 14 aa, synthetic construct
AIGELVSLGYTDKL

SEQ ID NO: 1407 - protein, 13 aa, synthetic construct
ALGEGGDTPNKLI

SEQ ID NO: 1408 - protein, 14 aa, synthetic construct
ALVEPGLPLLGDTD

SEQ ID NO: 1409 - protein, 12 aa, synthetic construct
AIGELGDTDKLI

SEQ ID NO: 1410 - protein, 13 aa, synthetic construct
ALGELTFLADKLI

SEQ ID NO: 1411 - protein, 12 aa, synthetic construct
ALVEPGTTINSS

SEQ ID NO: 1412 - protein, 14 aa, synthetic construct
ALGELVLGIRINSS

SEQ ID NO: 1413 - protein, 14 aa, synthetic construct
ALGELVSLGSTDQL

SEQ ID NO: 1414 - protein, 14 aa, synthetic construct
ALGELVLGGTDKLI

SEQ ID NO: 1415 - protein, 14 aa, synthetic construct
ALGEHLYWGIYTDK

SEQ ID NO: 1416 - protein, 14 aa, synthetic construct
ALGELAIPGINTDK

SEQ ID NO: 1417 - protein, 13 aa, synthetic construct
ALGVPPAYVLGEL

SEQ ID NO: 1418 - protein, 14 aa, synthetic construct
ALVEPPSYVLGDTD

SEQ ID NO: 1419 - protein, 11 aa, synthetic construct
ALGEGETDKLI

SEQ ID NO: 1420 - protein, 13 aa, synthetic construct
ALGELAFLPDKLI

SEQ ID NO: 1421 - protein, 12 aa, synthetic construct
ALGTGGYTDKLI

SEQ ID NO: 1422 - protein, 14 aa, synthetic construct
ALGEHTGGCTDKLI

SEQ ID NO: 1423 - protein, 14 aa, synthetic construct
ALGSAFIRTLYTDK

SEQ ID NO: 1424 - protein, 12 aa, synthetic construct
ALGELLHTDKPI

SEQ ID NO: 1425 - protein, 14 aa, synthetic construct
AHGEPTGGWTDKLI

SEQ ID NO: 1426 - protein, 13 aa, synthetic construct
DLGELLGDTEKLI

SEQ ID NO: 1427 - protein, 14 aa, synthetic construct
TLGEPSYAGGSYTD

SEQ ID NO: 1428 - protein, 12 aa, synthetic construct
ALGELLHTDKRI

SEQ ID NO: 1429 - protein, 14 aa, synthetic construct
ALGELAWGIRTDKL

SEQ ID NO: 1430 - protein, 14 aa, synthetic construct
ALGERTGGLTPINS

SEQ ID NO: 1431 - protein, 7 aa, synthetic construct
ALGEGDT

SEQ ID NO: 1432 - protein, 11 aa, synthetic construct
ALGERDTDKLI

SEQ ID NO: 1433 - protein, 14 aa, synthetic construct
ALGELAWGIPDKLI

SEQ ID NO: 1434 - protein, 11 aa, synthetic construct
ALGEGDTDELI

SEQ ID NO: 1435 - protein, 12 aa, synthetic construct
ALGELGSTDKRI

SEQ ID NO: 1436 - protein, 14 aa, synthetic construct
ALGELVGGYDYKLI

SEQ ID NO: 1437 - protein, 14 aa, synthetic construct
TLGVRRGIRGTDKL

SEQ ID NO: 1438 - protein, 14 aa, synthetic construct
ALGERAGGYLGSWD

SEQ ID NO: 1439 - protein, 14 aa, synthetic construct
ALGVGRGIRGTDQL

SEQ ID NO: 1440 - protein, 11 aa, synthetic construct
AVGEGDTDKLI

SEQ ID NO: 1441 - protein, 14 aa, synthetic construct
ALGELVWGDTLAPI

SEQ ID NO: 1442 - protein, 14 aa, synthetic construct
ALGELAWGPYTDKL

SEQ ID NO: 1443 - protein, 12 aa, synthetic construct
ALGELGSTDKLL

SEQ ID NO: 1444 - protein, 13 aa, synthetic construct
AVGEGGDTPDKLI

SEQ ID NO: 1445 - protein, 14 aa, synthetic construct
ALGEIAKWGIKTDK

SEQ ID NO: 1446 - protein, 11 aa, synthetic construct
ALGELGSTDKL

SEQ ID NO: 1447 - protein, 14 aa, synthetic construct
ALGEFGTGGYADKL

SEQ ID NO: 1448 - protein, 13 aa, synthetic construct
ALGELLGDTDKVI

SEQ ID NO: 1449 - protein, 13 aa, synthetic construct
ALGELLGDTDNII

SEQ ID NO: 1450 - protein, 14 aa, synthetic construct
ALAVRRGIRGTDKL

SEQ ID NO: 1451 - protein, 13 aa, synthetic construct
ALGELLGDTDNSS

SEQ ID NO: 1452 - protein, 14 aa, synthetic construct
ALGELTFLRTGGNS

SEQ ID NO: 1453 - protein, 14 aa, synthetic construct
ALGELVWGITDKLI

SEQ ID NO: 1454 - protein, 12 aa, synthetic construct
ALGVGGYTDKLI

SEQ ID NO: 1455 - protein, 12 aa, synthetic construct
ALGELGSTDLLI

SEQ ID NO: 1456 - protein, 13 aa, synthetic construct
ALGELTFLPDRLI

SEQ ID NO: 1457 - protein, 13 aa, synthetic construct
ALWAGGYAGDKLI

SEQ ID NO: 1458 - protein, 14 aa, synthetic construct
ALGELVLGDTAKLI

SEQ ID NO: 1459 - protein, 14 aa, synthetic construct
TLGEHPYWGIYTDK

SEQ ID NO: 1460 - protein, 14 aa, synthetic construct
ALGELVSLGYTRQM

SEQ ID NO: 1461 - protein, 11 aa, synthetic construct
ALGEGDTNKLI

SEQ ID NO: 1462 - protein, 14 aa, synthetic construct
ALVRAFLRTLYTDK

SEQ ID NO: 1463 - protein, 11 aa, synthetic construct
ALGEGDTHKLI

SEQ ID NO: 1464 - protein, 11 aa, synthetic construct
ALGEGDTGKLI

SEQ ID NO: 1465 - protein, 14 aa, synthetic construct
ALGRAFVRTLYTDK

SEQ ID NO: 1466 - protein, 13 aa, synthetic construct
ALGEVLMGDSPLI

SEQ ID NO: 1467 - protein, 14 aa, synthetic construct
AIGALLPTFRGTDK

SEQ ID NO: 1468 - protein, 14 aa, synthetic construct
ALGERRGIRGTDKL

SEQ ID NO: 1469 - protein, 12 aa, synthetic construct
ARGELWIHDKLI

SEQ ID NO: 1470 - protein, 12 aa, synthetic construct
DLGELGSTDKII

SEQ ID NO: 1471 - protein, 12 aa, synthetic construct
ALGELVSTDKLI

SEQ ID NO: 1472 - protein, 14 aa, synthetic construct
ALGEHPYWGIYTPI

SEQ ID NO: 1473 - protein, 12 aa, synthetic construct
ALGELLHTDNSS

SEQ ID NO: 1474 - protein, 14 aa, synthetic construct
ALGELSPFTGGYKL

SEQ ID NO: 1475 - protein, 14 aa, synthetic construct
ALGRAFPRTLYTDK

SEQ ID NO: 1476 - protein, 13 aa, synthetic construct
ALGEVPTDTHKLI

SEQ ID NO: 1477 - protein, 14 aa, synthetic construct
ALGEHPYWGLYTDK

SEQ ID NO: 1478 - protein, 13 aa, synthetic construct
ALGELTFLPDKLL

SEQ ID NO: 1479 - protein, 12 aa, synthetic construct
TLGELGSTDKLI

SEQ ID NO: 1480 - protein, 14 aa, synthetic construct
ALGEHPYWGSTPIN

SEQ ID NO: 1481 - protein, 13 aa, synthetic construct
ALGVPHSYVLWEI

SEQ ID NO: 1482 - protein, 14 aa, synthetic construct
ALGEHPYWGTPINS

SEQ ID NO: 1483 - protein, 14 aa, synthetic construct
ARGELVWGTTEKLI

SEQ ID NO: 1484 - protein, 14 aa, synthetic construct
ALGELVLGDKDKLI

SEQ ID NO: 1485 - protein, 14 aa, synthetic construct
ALVELGTGGYADKL

SEQ ID NO: 1486 - protein, 14 aa, synthetic construct
ALGELVTGGYADKL

SEQ ID NO: 1487 - protein, 13 aa, synthetic construct
AVGDLLGDTDKLI

SEQ ID NO: 1488 - protein, 14 aa, synthetic construct
ALGEHTYWGIYTDK

SEQ ID NO: 1489 - protein, 13 aa, synthetic construct
ALGELWGIRGKLI

SEQ ID NO: 1490 - protein, 13 aa, synthetic construct
ARGELGDKDDKLI

SEQ ID NO: 1491 - protein, 14 aa, synthetic construct
ALGELFLLGDTDRL

SEQ ID NO: 1492 - protein, 13 aa, synthetic construct
ALGKGGIPPINSS

SEQ ID NO: 1493 - protein, 14 aa, synthetic construct
ALGELFLLGETDKL

SEQ ID NO: 1494 - protein, 13 aa, synthetic construct
LLGFLLPTYWGTF

SEQ ID NO: 1495 - protein, 12 aa, synthetic construct
GLGDLWIHDKLI

SEQ ID NO: 1496 - protein, 14 aa, synthetic construct
ALGALSPFTGGHKL

SEQ ID NO: 1497 - protein, 14 aa, synthetic construct
ALGELFLLGDTDTL

SEQ ID NO: 1498 - protein, 14 aa, synthetic construct
ALGEPCLGDTLATA

SEQ ID NO: 1499 - protein, 14 aa, synthetic construct
ALGELFLLGDTDNL

SEQ ID NO: 1500 - protein, 12 aa, synthetic construct
ALGKLGSTDKLI

SEQ ID NO: 1501 - protein, 14 aa, synthetic construct
ALGELGEGDKNKLI

SEQ ID NO: 1502 - protein, 14 aa, synthetic construct
ALGEPALPGIHTDK

SEQ ID NO: 1503 - protein, 12 aa, synthetic construct
ALWELWIHDKLI

SEQ ID NO: 1504 - protein, 14 aa, synthetic construct
ALGVRRGIRGTDNL

SEQ ID NO: 1505 - protein, 13 aa, synthetic construct
ALGELGESSWDTR

SEQ ID NO: 1506 - protein, 14 aa, synthetic construct
ALGALLPTYWGTPI

SEQ ID NO: 1507 - protein, 14 aa, synthetic construct
ALGALLPTYRGTDK

SEQ ID NO: 1508 - protein, 13 aa, synthetic construct
ALGKGGDTPDKLI

SEQ ID NO: 1509 - protein, 13 aa, synthetic construct
ALGDLLGETDKLI

SEQ ID NO: 1510 - protein, 14 aa, synthetic construct
ALGEPFLLGDTDKL

SEQ ID NO: 1511 - protein, 14 aa, synthetic construct
ALGALVLGDTDKLI

SEQ ID NO: 1512 - protein, 14 aa, synthetic construct
ALGAPTGGWTDKLI

SEQ ID NO: 1513 - protein, 14 aa, synthetic construct
ALGEPTGAWTDKLI

SEQ ID NO: 1514 - protein, 14 aa, synthetic construct
ALGELGDTYPDRLI

SEQ ID NO: 1515 - protein, 12 aa, synthetic construct
APGELLHTDQLI

SEQ ID NO: 1516 - protein, 14 aa, synthetic construct
ALGEPTGGCTDKII

SEQ ID NO: 1517 - protein, 14 aa, synthetic construct
ALGELFQLGDTDKL

SEQ ID NO: 1518 - protein, 13 aa, synthetic construct
ALGGVLLGDSPLI

SEQ ID NO: 1519 - protein, 14 aa, synthetic construct
ALGEPGIPLLGDTD

SEQ ID NO: 1520 - protein, 14 aa, synthetic construct
ALGGHPYWGIYTDK

SEQ ID NO: 1521 - protein, 14 aa, synthetic construct
ALGEPGGGYDDKLI

SEQ ID NO: 1522 - protein, 12 aa, synthetic construct
ALGEPGDTDKLI

SEQ ID NO: 1523 - protein, 13 aa, synthetic construct
ALGGGGDTPDKLI

SEQ ID NO: 1524 - protein, 14 aa, synthetic construct
APGELVSLGSTDKL

SEQ ID NO: 1525 - protein, 13 aa, synthetic construct
ALGEPGDKDDKLI

SEQ ID NO: 1526 - protein, 13 aa, synthetic construct
ALGDLLGDTEKLI

SEQ ID NO: 1527 - protein, 14 aa, synthetic construct
ALGELGETYPDKLI

SEQ ID NO: 1528 - protein, 14 aa, synthetic construct
ALGDLREGDKYKLI

SEQ ID NO: 1529 - protein, 13 aa, synthetic construct
ALGVPPYYVLGEI

SEQ ID NO: 1530 - protein, 14 aa, synthetic construct
ALGEPTGGWTENLI

SEQ ID NO: 1531 - protein, 14 aa, synthetic construct
ALGVRRGIRCTDKL

SEQ ID NO: 1532 - protein, 13 aa, synthetic construct
ALGDLTFIPDKLI

SEQ ID NO: 1533 - protein, 14 aa, synthetic construct
ALGELEWGIWGTDK

SEQ ID NO: 1534 - protein, 14 aa, synthetic construct
ALGEPTGGWTDRLI

SEQ ID NO: 1535 - protein, 14 aa, synthetic construct
ALGELPYRGVRTDK

SEQ ID NO: 1536 - protein, 12 aa, synthetic construct
ARGAGGYTDKLI

SEQ ID NO: 1537 - protein, 14 aa, synthetic construct
ALGELEWGIRGTYK

SEQ ID NO: 1538 - protein, 14 aa, synthetic construct
ALGELPYRGSTPIN

SEQ ID NO: 1539 - protein, 14 aa, synthetic construct
ALGALLPTFSGTDK

SEQ ID NO: 1540 - protein, 14 aa, synthetic construct
ALGELYLGDTLATA

SEQ ID NO: 1541 - protein, 14 aa, synthetic construct
ALGEPTGGWTVKLI

SEQ ID NO: 1542 - protein, 14 aa, synthetic construct
ALGDLTGGYADKLF

SEQ ID NO: 1543 - protein, 14 aa, synthetic construct
ALGEPTGGYADKLI

SEQ ID NO: 1544 - protein, 14 aa, synthetic construct
ALGELEWGILTPIN

SEQ ID NO: 1545 - protein, 14 aa, synthetic construct
ALGDLTGGYADQLI

SEQ ID NO: 1546 - protein, 13 aa, synthetic construct
ALGNWGIRTINSS

SEQ ID NO: 1547 - protein, 14 aa, synthetic construct
ALGELEWGRRGTDK

SEQ ID NO: 1548 - protein, 14 aa, synthetic construct
ALGDLSPVTGGHKL

SEQ ID NO: 1549 - protein, 13 aa, synthetic construct
ALGEMGDRSWDTR

SEQ ID NO: 1550 - protein, 13 aa, synthetic construct
GLGAGGYAGDKLI

SEQ ID NO: 1551 - protein, 14 aa, synthetic construct
APGEPVLGDIYTDK

SEQ ID NO: 1552 - protein, 14 aa, synthetic construct
ALGDLREGDQKKLI

SEQ ID NO: 1553 - protein, 14 aa, synthetic construct
ALGALLPTFRSTDK

SEQ ID NO: 1554 - protein, 14 aa, synthetic construct
ALGKLSPFTGGHKL

SEQ ID NO: 1555 - protein, 12 aa, synthetic construct
ALGELRIHDKLI

SEQ ID NO: 1556 - protein, 14 aa, synthetic construct
ALGELRLGDTLATA

SEQ ID NO: 1557 - protein, 13 aa, synthetic construct
ALGELPYVLGGNS

SEQ ID NO: 1558 - protein, 14 aa, synthetic construct
ALGDLSLRGIHTDQ

SEQ ID NO: 1559 - protein, 14 aa, synthetic construct
ALGALLPTFRCTDK

SEQ ID NO: 1560 - protein, 12 aa, synthetic construct
ALGKPGTTINSS

SEQ ID NO: 1561 - protein, 13 aa, synthetic construct
APGVPPSYVLGEI

SEQ ID NO: 1562 - protein, 14 aa, synthetic construct
ALGEMGDTYTDKLI

SEQ ID NO: 1563 - protein, 14 aa, synthetic construct
ALGEMGDTYPEKLI

SEQ ID NO: 1564 - protein, 14 aa, synthetic construct
ALGVRRGIRGPDKL

SEQ ID NO: 1565 - protein, 14 aa, synthetic construct
ALGALLPTFLGTDK

SEQ ID NO: 1566 - protein, 13 aa, synthetic construct
ALGELGAKDDKLI

SEQ ID NO: 1567 - protein, 14 aa, synthetic construct
GLGELEWGIRGTDK

SEQ ID NO: 1568 - protein, 14 aa, synthetic construct
APGELGTGGYADKL

SEQ ID NO: 1569 - protein, 12 aa, synthetic construct
ALGELGDTDELI

SEQ ID NO: 1570 - protein, 14 aa, synthetic construct
ALGELREGDTLATA

SEQ ID NO: 1571 - protein, 14 aa, synthetic construct
ALGDLFLLGYTDKL

SEQ ID NO: 1572 - protein, 14 aa, synthetic construct
APGELALPGIHTDK

SEQ ID NO: 1573 - protein, 14 aa, synthetic construct
ALGEPGVPLLGDTD

SEQ ID NO: 1574 - protein, 14 aa, synthetic construct
ALGELREGDTPDKL

SEQ ID NO: 1575 - protein, 14 aa, synthetic construct
ALGEPPTYVLGTPI

SEQ ID NO: 1576 - protein, 14 aa, synthetic construct
ALGGPSWYWCIPDK

SEQ ID NO: 1577 - protein, 12 aa, synthetic construct
ALGELGDTDHLI

SEQ ID NO: 1578 - protein, 14 aa, synthetic construct
GLGELFLLGDTDKL

SEQ ID NO: 1579 - protein, 14 aa, synthetic construct
APGELCLGDTLATA

SEQ ID NO: 1580 - protein, 13 aa, synthetic construct
ALGDHPYWGIYTD

SEQ ID NO: 1581 - protein, 12 aa, synthetic construct
ALGELGDTDKHI

SEQ ID NO: 1582 - protein, 10 aa, synthetic construct
ALGGPSWYWG

SEQ ID NO: 1583 - protein, 14 aa, synthetic construct
ALGGLVLGDTDKLI

SEQ ID NO: 1584 - protein, 12 aa, synthetic construct
ALGELGDTDKLF

SEQ ID NO: 1585 - protein, 14 aa, synthetic construct
ALGDHPNWGIYTDK

SEQ ID NO: 1586 - protein, 14 aa, synthetic construct
ALGDLFLLGDTDQL

SEQ ID NO: 1587 - protein, 13 aa, synthetic construct
ALGDLFLLGDTDK

SEQ ID NO: 1588 - protein, 14 aa, synthetic construct
APGEHPYWGIYTDK

SEQ ID NO: 1589 - protein, 14 aa, synthetic construct
ALGEPPSYVLRDTD

SEQ ID NO: 1590 - protein, 11 aa, synthetic construct
ALGELGDSPLI

SEQ ID NO: 1591 - protein, 14 aa, synthetic construct
ALGELREGDQIKLI

SEQ ID NO: 1592 - protein, 14 aa, synthetic construct
ALGDLAWGSYADKL

SEQ ID NO: 1593 - protein, 14 aa, synthetic construct
ALGGPPSYVLGTPI

SEQ ID NO: 1594 - protein, 14 aa, synthetic construct
ALGDIVWGTTDKLI

SEQ ID NO: 1595 - protein, 14 aa, synthetic construct
ALGDLAWGSYTDNL

SEQ ID NO: 1596 - protein, 14 aa, synthetic construct
ALGDLAWGSYTEKL

SEQ ID NO: 1597 - protein, 14 aa, synthetic construct
APGDLGDTYPDKLI

SEQ ID NO: 1598 - protein, 14 aa, synthetic construct
ALGEPPGGWTDKLI

SEQ ID NO: 1599 - protein, 14 aa, synthetic construct
ALGVRSGIRGTDKL

SEQ ID NO: 1600 - protein, 13 aa, synthetic construct
ALGDILGDTDKLI

SEQ ID NO: 1601 - protein, 14 aa, synthetic construct
ALGGPGLPLLGDTD

SEQ ID NO: 1602 - protein, 12 aa, synthetic construct
ALGELGDKNKLI

SEQ ID NO: 1603 - protein, 14 aa, synthetic construct
ALWRAFLRTLYTDK

SEQ ID NO: 1604 - protein, 14 aa, synthetic construct
GLGEPVLGDIYTDK

SEQ ID NO: 1605 - protein, 13 aa, synthetic construct
ALGELGDKDDNLI

SEQ ID NO: 1606 - protein, 12 aa, synthetic construct
ALGELGDTDKLT

SEQ ID NO: 1607 - protein, 14 aa, synthetic construct
ALGGLREGDKNKLI

SEQ ID NO: 1608 - protein, 13 aa, synthetic construct
ALGELGDKDDILI

SEQ ID NO: 1609 - protein, 14 aa, synthetic construct
ALGDLGGGYDDNLI

SEQ ID NO: 1610 - protein, 14 aa, synthetic construct
ALGDLGGGYDDQLI

SEQ ID NO: 1611 - protein, 14 aa, synthetic construct
APGELGDTYPEKLI

SEQ ID NO: 1612 - protein, 14 aa, synthetic construct
ALGELGDTYHDKLI

SEQ ID NO: 1613 - protein, 13 aa, synthetic construct
ALGELGDEDDKLI

SEQ ID NO: 1614 - protein, 14 aa, synthetic construct
ALGGLFLLGDTDKL

SEQ ID NO: 1615 - protein, 12 aa, synthetic construct
ALGELGDADKLI

SEQ ID NO: 1616 - protein, 14 aa, synthetic construct
GLGELGGYARTDKL

SEQ ID NO: 1617 - protein, 14 aa, synthetic construct
ALGGPSWYWWIPDK

SEQ ID NO: 1618 - protein, 14 aa, synthetic construct
ILGALPGTGGYPIN

SEQ ID NO: 1619 - protein, 12 aa, synthetic construct
ALGGPSYVLGEI

SEQ ID NO: 1620 - protein, 14 aa, synthetic construct
ALGEPSYAGVSYTD

SEQ ID NO: 1621 - protein, 14 aa, synthetic construct
ALGEPGLPLQGDTD

SEQ ID NO: 1622 - protein, 14 aa, synthetic construct
ALGGPTGGWTDKLI

SEQ ID NO: 1623 - protein, 14 aa, synthetic construct
ALGELREGEKNKLI

SEQ ID NO: 1624 - protein, 14 aa, synthetic construct
ALGVRRGTRGTDKL

SEQ ID NO: 1625 - protein, 14 aa, synthetic construct
ALGEPSYAGGSDTD

SEQ ID NO: 1626 - protein, 12 aa, synthetic construct
ALGELGDTDKPI

SEQ ID NO: 1627 - protein, 14 aa, synthetic construct
ALGELREGDHNKLI

SEQ ID NO: 1628 - protein, 11 aa, synthetic construct
ALGEPGTTINS

SEQ ID NO: 1629 - protein, 12 aa, synthetic construct
ALGEPGTTINPS

SEQ ID NO: 1630 - protein, 12 aa, synthetic construct
ALGDLGDTDQLI

SEQ ID NO: 1631 - protein, 14 aa, synthetic construct
APGELEWGIRGTDK

SEQ ID NO: 1632 - protein, 12 aa, synthetic construct
ALGELGDTDTLI

SEQ ID NO: 1633 - protein, 14 aa, synthetic construct
APGELFLLGDTDKL

SEQ ID NO: 1634 - protein, 14 aa, synthetic construct
ALWEPVLGDIYTDK

SEQ ID NO: 1635 - protein, 13 aa, synthetic construct
APGELGDKDDKLI

SEQ ID NO: 1636 - protein, 14 aa, synthetic construct
ALGELGDTFPDKLI

SEQ ID NO: 1637 - protein, 14 aa, synthetic construct
ALGELGDTHPDKLI

SEQ ID NO: 1638 - protein, 14 aa, synthetic construct
ALWEPTGGWTDKLI

SEQ ID NO: 1639 - protein, 12 aa, synthetic construct
ALGEPGTSINSS

SEQ ID NO: 1640 - protein, 14 aa, synthetic construct
ALGEPSNAGGSYTD

SEQ ID NO: 1641 - protein, 14 aa, synthetic construct
ALGELGDTNPDKLI

SEQ ID NO: 1642 - protein, 12 aa, synthetic construct
ALGEPGTAINSS

SEQ ID NO: 1643 - protein, 12 aa, synthetic construct
ALGELWLHDKLI

SEQ ID NO: 1644 - protein, 14 aa, synthetic construct
ALGKLCLGDTLATA

SEQ ID NO: 1645 - protein, 14 aa, synthetic construct
ALGNYPTGGYAPIN

SEQ ID NO: 1646 - protein, 14 aa, synthetic construct
ALGPSTSGGRYTDK

SEQ ID NO: 1647 - protein, 14 aa, synthetic construct
ALGELCMGDTMATA

SEQ ID NO: 1648 - protein, 12 aa, synthetic construct
ALGAGGYTDKLV

SEQ ID NO: 1649 - protein, 14 aa, synthetic construct
ALGEPVLGDRYTDK

SEQ ID NO: 1650 - protein, 12 aa, synthetic construct
ALGAGGYTDNSS

SEQ ID NO: 1651 - protein, 12 aa, synthetic construct
ALGAGGYTDRLI

SEQ ID NO: 1652 - protein, 14 aa, synthetic construct
ALGELSLRGIHTDQ

SEQ ID NO: 1653 - protein, 7 aa, synthetic construct
ALGELWI

SEQ ID NO: 1654 - protein, 11 aa, synthetic construct
LLGNSPPLLGV

SEQ ID NO: 1655 - protein, 12 aa, synthetic construct
ALGAGVYTDKLI

SEQ ID NO: 1656 - protein, 12 aa, synthetic construct
ALGELWIHDKFI

SEQ ID NO: 1657 - protein, 14 aa, synthetic construct
ALGEPVLGDIHTDK

SEQ ID NO: 1658 - protein, 14 aa, synthetic construct
ALWELSPFTGGHKL

SEQ ID NO: 1659 - protein, 14 aa, synthetic construct
ALGALAWGSYTDKL

SEQ ID NO: 1660 - protein, 14 aa, synthetic construct
ALGEPVLGAIYTDK

SEQ ID NO: 1661 - protein, 13 aa, synthetic construct
ALGVPPSYVQGEI

SEQ ID NO: 1662 - protein, 8 aa, synthetic construct
ALGEPVLG

SEQ ID NO: 1663 - protein, 14 aa, synthetic construct
ALGEPVLEDIYTDK

SEQ ID NO: 1664 - protein, 14 aa, synthetic construct
ALGVPPSYWGTPIN

SEQ ID NO: 1665 - protein, 13 aa, synthetic construct
ALGEVWGIRSQLI

SEQ ID NO: 1666 - protein, 14 aa, synthetic construct
ALGALFPTFRGTDK

SEQ ID NO: 1667 - protein, 13 aa, synthetic construct
ARGDLLGDTDKLI

SEQ ID NO: 1668 - protein, 14 aa, synthetic construct
ALGEPTRGWTDKLI

SEQ ID NO: 1669 - protein, 14 aa, synthetic construct
ALGELGGGYDDKLF

SEQ ID NO: 1670 - protein, 12 aa, synthetic construct
ALGAGGYTDKLF

SEQ ID NO: 1671 - protein, 13 aa, synthetic construct
ALGDMGDKDDQLI

SEQ ID NO: 1672 - protein, 14 aa, synthetic construct
ALGELWGIRTINSS

SEQ ID NO: 1673 - protein, 13 aa, synthetic construct
ALGELWGIRSKLL

SEQ ID NO: 1674 - protein, 12 aa, synthetic construct
ALGELGGTDKLI

SEQ ID NO: 1675 - protein, 13 aa, synthetic construct
ALGAGGYAGDKLN

SEQ ID NO: 1676 - protein, 14 aa, synthetic construct
ALGELCLGDTPINS

SEQ ID NO: 1677 - protein, 13 aa, synthetic construct
ALGAGGYAGDNLI

SEQ ID NO: 1678 - protein, 14 aa, synthetic construct
ARGELFLLGDTDKL

SEQ ID NO: 1679 - protein, 13 aa, synthetic construct
ALGVPPSYVLGEV

SEQ ID NO: 1680 - protein, 10 aa, synthetic construct
ALGELCLGEI

SEQ ID NO: 1681 - protein, 13 aa, synthetic construct
ALGAGGYASDKLI

SEQ ID NO: 1682 - protein, 12 aa, synthetic construct
ALGELWGIRSKL

SEQ ID NO: 1683 - protein, 14 aa, synthetic construct
ARGELCLGDTLATA

SEQ ID NO: 1684 - protein, 13 aa, synthetic construct
ALGELWGIRSKLN

SEQ ID NO: 1685 - protein, 14 aa, synthetic construct
ARGEHPYWGIYTDK

SEQ ID NO: 1686 - protein, 14 aa, synthetic construct
ALGELGGHARTDKL

SEQ ID NO: 1687 - protein, 14 aa, synthetic construct
ARGELALPGIHTDK

SEQ ID NO: 1688 - protein, 12 aa, synthetic construct
ALGAGGYTAKLI

SEQ ID NO: 1689 - protein, 14 aa, synthetic construct
ALGELSLRGIRTDK

SEQ ID NO: 1690 - protein, 14 aa, synthetic construct
ALGEPVLGDTPINS

SEQ ID NO: 1691 - protein, 14 aa, synthetic construct
ALGDNPYWGIYTDK

SEQ ID NO: 1692 - protein, 13 aa, synthetic construct
ALGELWGIRSRLI

SEQ ID NO: 1693 - protein, 14 aa, synthetic construct
ALGDMTGGYADKLI

SEQ ID NO: 1694 - protein, 14 aa, synthetic construct
ALGDMGDTYPEKLI

SEQ ID NO: 1695 - protein, 12 aa, synthetic construct
ALGAGGYTDHLI

SEQ ID NO: 1696 - protein, 14 aa, synthetic construct
ALGELDWGTTEKLI

SEQ ID NO: 1697 - protein, 10 aa, synthetic construct
ALGEGDTRQM

SEQ ID NO: 1698 - protein, 14 aa, synthetic construct
ALGALGGGYDYKLI

SEQ ID NO: 1699 - protein, 12 aa, synthetic construct
ALGELWIHVKLI

SEQ ID NO: 1700 - protein, 12 aa, synthetic construct
ALGELWINDKLN

SEQ ID NO: 1701 - protein, 12 aa, synthetic construct
ALGELWIHYKLI

SEQ ID NO: 1702 - protein, 12 aa, synthetic construct
ALGELWILDKLI

SEQ ID NO: 1703 - protein, 12 aa, synthetic construct
ALGALGSTDKLI

SEQ ID NO: 1704 - protein, 14 aa, synthetic construct
ALGELRVGDKNKLI

SEQ ID NO: 1705 - protein, 12 aa, synthetic construct
ALGELSINDKLI

SEQ ID NO: 1706 - protein, 13 aa, synthetic construct
ALGELSLRGLHTD

SEQ ID NO: 1707 - protein, 13 aa, synthetic construct
ALWELLGDTYKLI

SEQ ID NO: 1708 - protein, 13 aa, synthetic construct
ALGELLGDTDKIN

SEQ ID NO: 1709 - protein, 11 aa, synthetic construct
AVGEGDTDKLF

SEQ ID NO: 1710 - protein, 14 aa, synthetic construct
ALGEIVNWGINTDK

SEQ ID NO: 1711 - protein, 14 aa, synthetic construct
ALGELCLGIRWRQH

SEQ ID NO: 1712 - protein, 12 aa, synthetic construct
ALGELLHTDKLV

SEQ ID NO: 1713 - protein, 14 aa, synthetic construct
ALGELCLGETTINS

SEQ ID NO: 1714 - protein, 12 aa, synthetic construct
ALGELLHTDKNI

SEQ ID NO: 1715 - protein, 14 aa, synthetic construct
ALGELSLRGKHTDK

SEQ ID NO: 1716 - protein, 13 aa, synthetic construct
ALGELTFLPENLI

SEQ ID NO: 1717 - protein, 13 aa, synthetic construct
ALGELTFLPEKLN

SEQ ID NO: 1718 - protein, 14 aa, synthetic construct
ALGELREGDKDKLI

SEQ ID NO: 1719 - protein, 14 aa, synthetic construct
ALGELGGGWTDKLI

SEQ ID NO: 1720 - protein, 10 aa, synthetic construct
ALGELLGDTD

SEQ ID NO: 1721 - protein, 13 aa, synthetic construct
ALGELGDKDDKLV

SEQ ID NO: 1722 - protein, 14 aa, synthetic construct
AVGDLVWGTTDKLI

SEQ ID NO: 1723 - protein, 14 aa, synthetic construct
ALGELSFLRVWGTP

SEQ ID NO: 1724 - protein, 14 aa, synthetic construct
ALGELREGDTPINS

SEQ ID NO: 1725 - protein, 14 aa, synthetic construct
ARGELAWGSYTDQL

SEQ ID NO: 1726 - protein, 13 aa, synthetic construct
ALGELGDKDDNSS

SEQ ID NO: 1727 - protein, 14 aa, synthetic construct
ALGVPTGGWTDKLI

SEQ ID NO: 1728 - protein, 13 aa, synthetic construct
ALGEIREGDKNKL

SEQ ID NO: 1729 - protein, 14 aa, synthetic construct
ALGVRGGIRGTDKL

SEQ ID NO: 1730 - protein, 13 aa, synthetic construct
ALVELGDRSWDTR

SEQ ID NO: 1731 - protein, 12 aa, synthetic construct
ALWELGDTDKLI

SEQ ID NO: 1732 - protein, 13 aa, synthetic construct
ALGELLGDTEKHI

SEQ ID NO: 1733 - protein, 14 aa, synthetic construct
ALGELEWGIAPGTP

SEQ ID NO: 1734 - protein, 12 aa, synthetic construct
ALRELGDTDKLI

SEQ ID NO: 1735 - protein, 13 aa, synthetic construct
ALGELGGIRSKLI

SEQ ID NO: 1736 - protein, 11 aa, synthetic construct
ALGELGDTDKL

SEQ ID NO: 1737 - protein, 12 aa, synthetic construct
ALGELGDTGKLI

SEQ ID NO: 1738 - protein, 11 aa, synthetic construct
ALGELTFLRWG

SEQ ID NO: 1739 - protein, 14 aa, synthetic construct
ALRELEWGIRGTDK

SEQ ID NO: 1740 - protein, 14 aa, synthetic construct
ALGELPYRGIRINS

SEQ ID NO: 1741 - protein, 14 aa, synthetic construct
ALGELGGYDRTDKL

SEQ ID NO: 1742 - protein, 14 aa, synthetic construct
ALGELAWGAYTDKL

SEQ ID NO: 1743 - protein, 14 aa, synthetic construct
ALVELGGGYDDKLI

SEQ ID NO: 1744 - protein, 13 aa, synthetic construct
ALGEITFLPDKII

SEQ ID NO: 1745 - protein, 14 aa, synthetic construct
ARGELTGGYADKLI

SEQ ID NO: 1746 - protein, 13 aa, synthetic construct
ALGEITFLPDKLF

SEQ ID NO: 1747 - protein, 14 aa, synthetic construct
ALGELAWGLTPINS

SEQ ID NO: 1748 - protein, 14 aa, synthetic construct
ALGELLGDSSWDTR

SEQ ID NO: 1749 - protein, 14 aa, synthetic construct
ALGELSLRGIRGTD

SEQ ID NO: 1750 - protein, 12 aa, synthetic construct
ALGELGDTYKLI

SEQ ID NO: 1751 - protein, 13 aa, synthetic construct
ALGELSIRGIHTD

SEQ ID NO: 1752 - protein, 14 aa, synthetic construct
ALGELAWGSYTNKL

SEQ ID NO: 1753 - protein, 13 aa, synthetic construct
ALGELLGATDKLI

SEQ ID NO: 1754 - protein, 12 aa, synthetic construct
ALGELGSTDQLN

SEQ ID NO: 1755 - protein, 13 aa, synthetic construct
AVGALLPTFRGTD

SEQ ID NO: 1756 - protein, 14 aa, synthetic construct
ALGELGGGYDDELI

SEQ ID NO: 1757 - protein, 14 aa, synthetic construct
ALGELREGDTYPDK

SEQ ID NO: 1758 - protein, 14 aa, synthetic construct
ALGELREGDENKLI

SEQ ID NO: 1759 - protein, 12 aa, synthetic construct
ALGELGDGSWDT

SEQ ID NO: 1760 - protein, 14 aa, synthetic construct
ALVELPYRGIRTDK

SEQ ID NO: 1761 - protein, 14 aa, synthetic construct
ALGVRRGIAPGTPD

SEQ ID NO: 1762 - protein, 14 aa, synthetic construct
ALGELCLRDTMATA

SEQ ID NO: 1763 - protein, 14 aa, synthetic construct
ALGVRRGRRGTDKL

SEQ ID NO: 1764 - protein, 14 aa, synthetic construct
ALGELPYPGIRTDK

SEQ ID NO: 1765 - protein, 14 aa, synthetic construct
ALWELVLGDTDKLI

SEQ ID NO: 1766 - protein, 14 aa, synthetic construct
ALGELGGGYYDKII

SEQ ID NO: 1767 - protein, 14 aa, synthetic construct
ALVELREGDKNKLI

SEQ ID NO: 1768 - protein, 14 aa, synthetic construct
ALGVPPSYVLGVIN

SEQ ID NO: 1769 - protein, 14 aa, synthetic construct
ARGELPYRGIRTDQ

SEQ ID NO: 1770 - protein, 12 aa, synthetic construct
ALGELLHTENLI

SEQ ID NO: 1771 - protein, 12 aa, synthetic construct
ALWEPGTTIKSS

SEQ ID NO: 1772 - protein, 14 aa, synthetic construct
ALGELEWGIRDTDK

SEQ ID NO: 1773 - protein, 14 aa, synthetic construct
ALGELLGDIYTDKL

SEQ ID NO: 1774 - protein, 14 aa, synthetic construct
ALGELREGDTTINS

SEQ ID NO: 1775 - protein, 14 aa, synthetic construct
ALGELCLGETMATA

SEQ ID NO: 1776 - protein, 13 aa, synthetic construct
ARGELLGDTEKLI

SEQ ID NO: 1777 - protein, 13 aa, synthetic construct
ALGELLGDSDKLI

SEQ ID NO: 1778 - protein, 14 aa, synthetic construct
ALGELSPFTEGHKL

SEQ ID NO: 1779 - protein, 12 aa, synthetic construct
ALGELGDTNKLI

SEQ ID NO: 1780 - protein, 10 aa, synthetic construct
ALGELSPFTG

SEQ ID NO: 1781 - protein, 14 aa, synthetic construct
ALWEPPSYVLGDTD

SEQ ID NO: 1782 - protein, 14 aa, synthetic construct
ALGVRRGYGAPINS

SEQ ID NO: 1783 - protein, 13 aa, synthetic construct
ALGELTFLPDQII

SEQ ID NO: 1784 - protein, 14 aa, synthetic construct
ARGELVSLGYTDKL

SEQ ID NO: 1785 - protein, 14 aa, synthetic construct
ALGELPYQGIRTDK

SEQ ID NO: 1786 - protein, 13 aa, synthetic construct
ALGELTFLPDKVI

SEQ ID NO: 1787 - protein, 13 aa, synthetic construct
ALGELTFLPDKRI

SEQ ID NO: 1788 - protein, 13 aa, synthetic construct
ALGELTFLPDKPI

SEQ ID NO: 1789 - protein, 13 aa, synthetic construct
ALGELPYRGIRSD

SEQ ID NO: 1790 - protein, 14 aa, synthetic construct
ALGELREGDTSINS

SEQ ID NO: 1791 - protein, 13 aa, synthetic construct
ALGELTFLPDKLV

SEQ ID NO: 1792 - protein, 13 aa, synthetic construct
ALGVPHSYVLGEL

SEQ ID NO: 1793 - protein, 13 aa, synthetic construct
ALGELGDKDAKLI

SEQ ID NO: 1794 - protein, 13 aa, synthetic construct
ALGELLGDTGKLI

SEQ ID NO: 1795 - protein, 14 aa, synthetic construct
APGELAWGSYTDKL

SEQ ID NO: 1796 - protein, 14 aa, synthetic construct
ALGELGGNARTDKL

SEQ ID NO: 1797 - protein, 14 aa, synthetic construct
APGDLGTGGYADKL

SEQ ID NO: 1798 - protein, 14 aa, synthetic construct
ALGEIGGGYYDKII

SEQ ID NO: 1799 - protein, 14 aa, synthetic construct
ALGELTGGYADKLV

SEQ ID NO: 1800 - protein, 14 aa, synthetic construct
ALGELCLGDTLVTA

SEQ ID NO: 1801 - protein, 12 aa, synthetic construct
ALGEIGSTDKII

SEQ ID NO: 1802 - protein, 13 aa, synthetic construct
ALGELGGWTDKLI

SEQ ID NO: 1803 - protein, 13 aa, synthetic construct
ALGELGDSSWAPD

SEQ ID NO: 1804 - protein, 14 aa, synthetic construct
ALGELLGEILRAAQ

SEQ ID NO: 1805 - protein, 14 aa, synthetic construct
ALRELGDTYPDKLI

SEQ ID NO: 1806 - protein, 14 aa, synthetic construct
ALGELLGDTWAPGT

SEQ ID NO: 1807 - protein, 14 aa, synthetic construct
ALWELGGYARTDKL

SEQ ID NO: 1808 - protein, 14 aa, synthetic construct
APGDLVSLGYTDQL

SEQ ID NO: 1809 - protein, 14 aa, synthetic construct
AVGELVLGDTDKLI

SEQ ID NO: 1810 - protein, 14 aa, synthetic construct
ALRELGDTYPEKLI

SEQ ID NO: 1811 - protein, 14 aa, synthetic construct
ALGELGDLTPINSS

SEQ ID NO: 1812 - protein, 14 aa, synthetic construct
ALGELLGDTTINSS

SEQ ID NO: 1813 - protein, 14 aa, synthetic construct
ALGELTGGYADKHI

SEQ ID NO: 1814 - protein, 14 aa, synthetic construct
ALGELREGDRSWDT

SEQ ID NO: 1815 - protein, 12 aa, synthetic construct
ALGELLGDTRQM

SEQ ID NO: 1816 - protein, 14 aa, synthetic construct
ALGEIGTGGYSDKL

SEQ ID NO: 1817 - protein, 14 aa, synthetic construct
ALGVVRGIRGTDKL

SEQ ID NO: 1818 - protein, 14 aa, synthetic construct
APGDLASLGYTDKL

SEQ ID NO: 1819 - protein, 14 aa, synthetic construct
ALGELCLGDTLSTA

SEQ ID NO: 1820 - protein, 14 aa, synthetic construct
ALGELREGDKNTLI

SEQ ID NO: 1821 - protein, 14 aa, synthetic construct
ALGELREGDQKKLI

SEQ ID NO: 1822 - protein, 14 aa, synthetic construct
ALWVRRGIRGTDKL

SEQ ID NO: 1823 - protein, 10 aa, synthetic construct
ALGELREGDN

SEQ ID NO: 1824 - protein, 14 aa, synthetic construct
ALGELSLRGVHTDK

SEQ ID NO: 1825 - protein, 13 aa, synthetic construct
ALGELGDRSCDTR

SEQ ID NO: 1826 - protein, 11 aa, synthetic construct
ALGELREGDNN

SEQ ID NO: 1827 - protein, 14 aa, synthetic construct
ALVELALPGIHTDK

SEQ ID NO: 1828 - protein, 13 aa, synthetic construct
ALGELGDSPWDTR

SEQ ID NO: 1829 - protein, 14 aa, synthetic construct
ALVELAWGSYTEKL

SEQ ID NO: 1830 - protein, 14 aa, synthetic construct
ALGELREGDNNNLI

SEQ ID NO: 1831 - protein, 14 aa, synthetic construct
ALGELGDPYPVKLI

SEQ ID NO: 1832 - protein, 14 aa, synthetic construct
ALGELGDPYPEKLI

SEQ ID NO: 1833 - protein, 14 aa, synthetic construct
ALGELGGTYPDKLI

SEQ ID NO: 1834 - protein, 14 aa, synthetic construct
ALGELSHFTGGHKL

SEQ ID NO: 1835 - protein, 13 aa, synthetic construct
ALGELPYRGLRTD

SEQ ID NO: 1836 - protein, 13 aa, synthetic construct
ALGELLGETDQLI

SEQ ID NO: 1837 - protein, 14 aa, synthetic construct
ALGELSLRRIHTDK

SEQ ID NO: 1838 - protein, 13 aa, synthetic construct
ALGEIGDRSWYTR

SEQ ID NO: 1839 - protein, 14 aa, synthetic construct
ALVELCLGDTLATA

SEQ ID NO: 1840 - protein, 13 aa, synthetic construct
ALGELGDSSDKLI

SEQ ID NO: 1841 - protein, 13 aa, synthetic construct
ALGELGDSSWDPR

SEQ ID NO: 1842 - protein, 14 aa, synthetic construct
ALGELCLGDGPINS

SEQ ID NO: 1843 - protein, 14 aa, synthetic construct
ALGELIWGTTDKLI

SEQ ID NO: 1844 - protein, 13 aa, synthetic construct
ALGELGDSTWDTR

SEQ ID NO: 1845 - protein, 14 aa, synthetic construct
ALGELTGGDADKLI

SEQ ID NO: 1846 - protein, 13 aa, synthetic construct
ALGELLGDTNILI

SEQ ID NO: 1847 - protein, 14 aa, synthetic construct
ALGELESLGSTDKL

SEQ ID NO: 1848 - protein, 13 aa, synthetic construct
ALGELGDKDVKLI

SEQ ID NO: 1849 - protein, 14 aa, synthetic construct
ALGELTGGCADKLI

SEQ ID NO: 1850 - protein, 12 aa, synthetic construct
ALGEILNTDTLI

SEQ ID NO: 1851 - protein, 14 aa, synthetic construct
ALGELPYRGIPADK

SEQ ID NO: 1852 - protein, 14 aa, synthetic construct
ARGELEWGIRGTDK

SEQ ID NO: 1853 - protein, 14 aa, synthetic construct
ALGELREGDTNNLI

SEQ ID NO: 1854 - protein, 14 aa, synthetic construct
ALGELMSLGYTDKL

SEQ ID NO: 1855 - protein, 13 aa, synthetic construct
ALGELGDSSWDSR

SEQ ID NO: 1856 - protein, 14 aa, synthetic construct
ALGELCLGEMLATA

SEQ ID NO: 1857 - protein, 14 aa, synthetic construct
ALWELGTGGYADKL

SEQ ID NO: 1858 - protein, 14 aa, synthetic construct
APGELASLGYTDKL

SEQ ID NO: 1859 - protein, 14 aa, synthetic construct
ALGVLSPFTGGHKL

SEQ ID NO: 1860 - protein, 13 aa, synthetic construct
ALGELLGDTKKLI

SEQ ID NO: 1861 - protein, 14 aa, synthetic construct
ALGELREGDKLKLI

SEQ ID NO: 1862 - protein, 13 aa, synthetic construct
ALGELTFQPDKLI

SEQ ID NO: 1863 - protein, 13 aa, synthetic construct
ALGELGDKDDRLI

SEQ ID NO: 1864 - protein, 12 aa, synthetic construct
ALGELREGDKLI

SEQ ID NO: 1865 - protein, 12 aa, synthetic construct
ALGELLHTDHLI

SEQ ID NO: 1866 - protein, 14 aa, synthetic construct
ALGELCLGDTRINS

SEQ ID NO: 1867 - protein, 14 aa, synthetic construct
ALGELCLGDTRATA

SEQ ID NO: 1868 - protein, 14 aa, synthetic construct
ALGELREGDTLAPI

SEQ ID NO: 1869 - protein, 13 aa, synthetic construct
ARGELGGRRSQLI

SEQ ID NO: 1870 - protein, 10 aa, synthetic construct
ALGELGDKLI

SEQ ID NO: 1871 - protein, 13 aa, synthetic construct
ALGELLGDTNQLI

SEQ ID NO: 1872 - protein, 14 aa, synthetic construct
ALGELGDSSWDTRQ

SEQ ID NO: 1873 - protein, 14 aa, synthetic construct
ALGVRRVIRGTDKL

SEQ ID NO: 1874 - protein, 13 aa, synthetic construct
ALGELSGIRSKLI

SEQ ID NO: 1875 - protein, 14 aa, synthetic construct
ALWRAFIRTLYTDK

SEQ ID NO: 1876 - protein, 13 aa, synthetic construct
ALGELGDSSWTPD

SEQ ID NO: 1877 - protein, 12 aa, synthetic construct
ALGELGSTDKNI

SEQ ID NO: 1878 - protein, 14 aa, synthetic construct
ALGVLREGDINKLI

SEQ ID NO: 1879 - protein, 14 aa, synthetic construct
ALGELTGGSYTEKL

SEQ ID NO: 1880 - protein, 14 aa, synthetic construct
ALGELTGGSYTDKL

SEQ ID NO: 1881 - protein, 13 aa, synthetic construct
ALGELLGDTNKPI

SEQ ID NO: 1882 - protein, 12 aa, synthetic construct
AVGELGSTDKLI

SEQ ID NO: 1883 - protein, 12 aa, synthetic construct
ALVEIGSTDKLI

SEQ ID NO: 1884 - protein, 14 aa, synthetic construct
ALGVLRGIRCTDKL

SEQ ID NO: 1885 - protein, 14 aa, synthetic construct
ALGELREGDTKKLI

SEQ ID NO: 1886 - protein, 14 aa, synthetic construct
ARGELVLGDTDKLI

SEQ ID NO: 1887 - protein, 13 aa, synthetic construct
ALGELGDSSWYPR

SEQ ID NO: 1888 - protein, 14 aa, synthetic construct
ALGELAFLRTLYTD

SEQ ID NO: 1889 - protein, 14 aa, synthetic construct
ALGELGGGYYDELI

SEQ ID NO: 1890 - protein, 14 aa, synthetic construct
APGELGGGYDEKLI

SEQ ID NO: 1891 - protein, 14 aa, synthetic construct
ALGELDTGGYADKL

SEQ ID NO: 1892 - protein, 13 aa, synthetic construct
ALGVPPSYVRGEI

SEQ ID NO: 1893 - protein, 12 aa, synthetic construct
ALGELLNTEKLI

SEQ ID NO: 1894 - protein, 14 aa, synthetic construct
ALVEPSYAGGSYTD

SEQ ID NO: 1895 - protein, 14 aa, synthetic construct
ALGELSLQGIRGTD

SEQ ID NO: 1896 - protein, 13 aa, synthetic construct
ALGELLPTYWGKF

SEQ ID NO: 1897 - protein, 14 aa, synthetic construct
APGEPPSYVLGDTD

SEQ ID NO: 1898 - protein, 12 aa, synthetic construct
ALGELGETDKLI

SEQ ID NO: 1899 - protein, 14 aa, synthetic construct
ALGELSLQGIHTDK

SEQ ID NO: 1900 - protein, 14 aa, synthetic construct
APGEPSYAGGSYTD

SEQ ID NO: 1901 - protein, 14 aa, synthetic construct
ALGELGTGGYTDKL

SEQ ID NO: 1902 - protein, 14 aa, synthetic construct
ALGELDWGIRGTDK

SEQ ID NO: 1903 - protein, 14 aa, synthetic construct
APGEPTGGWTDKLI

SEQ ID NO: 1904 - protein, 14 aa, synthetic construct
ALGELFLLGDGPIN

SEQ ID NO: 1905 - protein, 14 aa, synthetic construct
ALGVRRGIRATDKL

SEQ ID NO: 1906 - protein, 13 aa, synthetic construct
ALWELWGIRSKLI

SEQ ID NO: 1907 - protein, 14 aa, synthetic construct
ARGERTGGYLGSWD

SEQ ID NO: 1908 - protein, 14 aa, synthetic construct
ALGELGTGGYSDNS

SEQ ID NO: 1909 - protein, 13 aa, synthetic construct
ALGELLRDTDKLI

SEQ ID NO: 1910 - protein, 14 aa, synthetic construct
ARGEPVLGDLYTDK

SEQ ID NO: 1911 - protein, 14 aa, synthetic construct
ARGDLVSLGYTDKL

SEQ ID NO: 1912 - protein, 12 aa, synthetic construct
ALGELFLLGDTD

SEQ ID NO: 1913 - protein, 13 aa, synthetic construct
ALGVPPSYALGEI

SEQ ID NO: 1914 - protein, 14 aa, synthetic construct
ALGELSEGDKNKLI

SEQ ID NO: 1915 - protein, 14 aa, synthetic construct
ALGELALPRIHTDK

SEQ ID NO: 1916 - protein, 13 aa, synthetic construct
ALGVPPSSVLGEI

SEQ ID NO: 1917 - protein, 14 aa, synthetic construct
ALGELFLLGDTHKL

SEQ ID NO: 1918 - protein, 11 aa, synthetic construct
ALWELSPFTGG

SEQ ID NO: 1919 - protein, 14 aa, synthetic construct
ALGELSPYTGGHKL

SEQ ID NO: 1920 - protein, 14 aa, synthetic construct
ALGELFLLGDTENL

SEQ ID NO: 1921 - protein, 14 aa, synthetic construct
ALRELVWGTTDKLI

SEQ ID NO: 1922 - protein, 12 aa, synthetic construct
ALGELGSPDKLI

SEQ ID NO: 1923 - protein, 12 aa, synthetic construct
ALGELLNTDQLI

SEQ ID NO: 1924 - protein, 13 aa, synthetic construct
ALGELSPFTGGNS

SEQ ID NO: 1925 - protein, 14 aa, synthetic construct
ALGELSLRGTPYTD

SEQ ID NO: 1926 - protein, 13 aa, synthetic construct
ALGELLWDTDRLI

SEQ ID NO: 1927 - protein, 12 aa, synthetic construct
ALVEPGTTIKSS

SEQ ID NO: 1928 - protein, 7 aa, synthetic construct
ALGELGE

SEQ ID NO: 1929 - protein, 14 aa, synthetic construct
ALGELPFRGIRTDK

SEQ ID NO: 1930 - protein, 12 aa, synthetic construct
ALGELGTTRNSS

SEQ ID NO: 1931 - protein, 13 aa, synthetic construct
ALGVPPSYVMGEL

SEQ ID NO: 1932 - protein, 14 aa, synthetic construct
ALGELALPGTTINS

SEQ ID NO: 1933 - protein, 14 aa, synthetic construct
ALGELGGGYDDHLI

SEQ ID NO: 1934 - protein, 14 aa, synthetic construct
ALGELSPVTGGQKL

SEQ ID NO: 1935 - protein, 9 aa, synthetic construct
ALGELGSTD

SEQ ID NO: 1936 - protein, 14 aa, synthetic construct
ARGEPGLPLLGDTD

SEQ ID NO: 1937 - protein, 12 aa, synthetic construct
ALGELGSTDKIN

SEQ ID NO: 1938 - protein, 12 aa, synthetic construct
ALGELFHTDKLI

SEQ ID NO: 1939 - protein, 14 aa, synthetic construct
ARGDLPYRGIRTDK

SEQ ID NO: 1940 - protein, 14 aa, synthetic construct
ALGELSPITGGHKL

SEQ ID NO: 1941 - protein, 14 aa, synthetic construct
ALGELSLLGDGPIN

SEQ ID NO: 1942 - protein, 14 aa, synthetic construct
ALGELGGDARTDKL

SEQ ID NO: 1943 - protein, 12 aa, synthetic construct
ALGELGSTHKLI

SEQ ID NO: 1944 - protein, 13 aa, synthetic construct
ARGDLGDKDDKLI

SEQ ID NO: 1945 - protein, 14 aa, synthetic construct
ALGELSPFTGGLKL

SEQ ID NO: 1946 - protein, 14 aa, synthetic construct
ALGELGTGGDADKL

SEQ ID NO: 1947 - protein, 9 aa, synthetic construct
ALGELFILG

SEQ ID NO: 1948 - protein, 14 aa, synthetic construct
APGVRRGIRGTDKL

SEQ ID NO: 1949 - protein, 14 aa, synthetic construct
APGERTGGYLGSWD

SEQ ID NO: 1950 - protein, 14 aa, synthetic construct
ALVALLPTFRGTDK

SEQ ID NO: 1951 - protein, 13 aa, synthetic construct
ALGELLWDTDKII

SEQ ID NO: 1952 - protein, 14 aa, synthetic construct
ALGELGTGAYSDKL

SEQ ID NO: 1953 - protein, 12 aa, synthetic construct
ALGELGSTVKLI

SEQ ID NO: 1954 - protein, 14 aa, synthetic construct
ALGELGGDTTINSS

SEQ ID NO: 1955 - protein, 14 aa, synthetic construct
ALGELEWRIRGTDK

SEQ ID NO: 1956 - protein, 14 aa, synthetic construct
ALGELEWGTTDKLI

SEQ ID NO: 1957 - protein, 14 aa, synthetic construct
ALGELGGEYDDKLI

SEQ ID NO: 1958 - protein, 14 aa, synthetic construct
ALGELSLGDTLATA

SEQ ID NO: 1959 - protein, 14 aa, synthetic construct
ALGELSLLGDTDKL

SEQ ID NO: 1960 - protein, 14 aa, synthetic construct
ALGELGGAYDDKLI

SEQ ID NO: 1961 - protein, 14 aa, synthetic construct
ALGELFILGDTDQL

SEQ ID NO: 1962 - protein, 14 aa, synthetic construct
ALGELFILGDTEKL

SEQ ID NO: 1963 - protein, 14 aa, synthetic construct
ALGVRRGIRGTDIL

SEQ ID NO: 1964 - protein, 14 aa, synthetic construct
ALGELAMGSYTDKL

SEQ ID NO: 1965 - protein, 14 aa, synthetic construct
ALGELSLPGIHTDK

SEQ ID NO: 1966 - protein, 12 aa, synthetic construct
ALGELLRTDKLI

SEQ ID NO: 1967 - protein, 9 aa, synthetic construct
ALGELFKLG

SEQ ID NO: 1968 - protein, 14 aa, synthetic construct
ALGELLSLGYTDKL

SEQ ID NO: 1969 - protein, 14 aa, synthetic construct
ALGELGTGGYAVNS

SEQ ID NO: 1970 - protein, 14 aa, synthetic construct
ALGELGEYARTDKL

SEQ ID NO: 1971 - protein, 14 aa, synthetic construct
ALGELGTGGYAVKL

SEQ ID NO: 1972 - protein, 7 aa, synthetic construct
ALGVPPT

SEQ ID NO: 1973 - protein, 13 aa, synthetic construct
ALGVPPSYLLGEI

SEQ ID NO: 1974 - protein, 14 aa, synthetic construct
ALGELGTGGYAAKL

SEQ ID NO: 1975 - protein, 14 aa, synthetic construct
ALGELGTGGWTDKL

SEQ ID NO: 1976 - protein, 10 aa, synthetic construct
APGGYTDKLI

SEQ ID NO: 1977 - protein, 14 aa, synthetic construct
ALGELGTGGQPINS

SEQ ID NO: 1978 - protein, 11 aa, synthetic construct
ALGELGTGGNS

SEQ ID NO: 1979 - protein, 14 aa, synthetic construct
ALGVRRGIRGTAKL

SEQ ID NO: 1980 - protein, 14 aa, synthetic construct
ARGELSLRGIHTDK

SEQ ID NO: 1981 - protein, 14 aa, synthetic construct
ALGELFILGDTVKL

SEQ ID NO: 1982 - protein, 12 aa, synthetic construct
ALGVPPSSVLGE

SEQ ID NO: 1983 - protein, 12 aa, synthetic construct
APGEPGSTDKLI

SEQ ID NO: 1984 - protein, 14 aa, synthetic construct
ALGELFLLGDTTIN

SEQ ID NO: 1985 - protein, 14 aa, synthetic construct
ALGELGGGYGGAIN

SEQ ID NO: 1986 - protein, 13 aa, synthetic construct
ALGELGDTYPEKL

SEQ ID NO: 1987 - protein, 13 aa, synthetic construct
ALGELTFLPDHLI

SEQ ID NO: 1988 - protein, 13 aa, synthetic construct
ALGVPPYYVLWEI

SEQ ID NO: 1989 - protein, 14 aa, synthetic construct
ALGELPYRGIRSKL

SEQ ID NO: 1990 - protein, 12 aa, synthetic construct
ALGELEDTDKLI

SEQ ID NO: 1991 - protein, 12 aa, synthetic construct
ALWEMGDTDKLI

SEQ ID NO: 1992 - protein, 14 aa, synthetic construct
ALGELGDTYPETLI

SEQ ID NO: 1993 - protein, 14 aa, synthetic construct
APGELPYRGIRTDK

SEQ ID NO: 1994 - protein, 14 aa, synthetic construct
ALGELFLVGDTDKL

SEQ ID NO: 1995 - protein, 14 aa, synthetic construct
ALGELREGGKNKLI

SEQ ID NO: 1996 - protein, 12 aa, synthetic construct
ALGELGSTEQLI

SEQ ID NO: 1997 - protein, 11 aa, synthetic construct
APGELSPFTGG

SEQ ID NO: 1998 - protein, 14 aa, synthetic construct
ALGELGGGYGDKLI

SEQ ID NO: 1999 - protein, 14 aa, synthetic construct
APGELSPFTGGHKL

SEQ ID NO: 2000 - protein, 13 aa, synthetic construct
APGELTFLPDKLI

SEQ ID NO: 2001 - protein, 14 aa, synthetic construct
ALGELEWGIRWRQH

SEQ ID NO: 2002 - protein, 14 aa, synthetic construct
ALGELAIQGIHTDK

SEQ ID NO: 2003 - protein, 14 aa, synthetic construct
ALGELAIQGINTDK

SEQ ID NO: 2004 - protein, 14 aa, synthetic construct
ALGELSPFTGDPHR

SEQ ID NO: 2005 - protein, 13 aa, synthetic construct
ALVELTGGYSDKL

SEQ ID NO: 2006 - protein, 12 aa, synthetic construct
ALGELLKTDKLI

SEQ ID NO: 2007 - protein, 14 aa, synthetic construct
ALGELGGGYNDKLI

SEQ ID NO: 2008 - protein, 14 aa, synthetic construct
ALGELEWGIRRTDK

SEQ ID NO: 2009 - protein, 13 aa, synthetic construct
ALGELGNSSWDTR

SEQ ID NO: 2010 - protein, 8 aa, synthetic construct
ALGELAFP

SEQ ID NO: 2011 - protein, 12 aa, synthetic construct
ALGELGSTDYLI

SEQ ID NO: 2012 - protein, 13 aa, synthetic construct
ALVEGGDTPDKII

SEQ ID NO: 2013 - protein, 14 aa, synthetic construct
ALRRAFLRTLYTDK

SEQ ID NO: 2014 - protein, 14 aa, synthetic construct
ALGELGDTYPAQLI

SEQ ID NO: 2015 - protein, 14 aa, synthetic construct
ALGELGDTYPDKFI

SEQ ID NO: 2016 - protein, 13 aa, synthetic construct
ARGELTFLPDTLI

SEQ ID NO: 2017 - protein, 14 aa, synthetic construct
ALGELGDTYPDKLF

SEQ ID NO: 2018 - protein, 14 aa, synthetic construct
ALGELGGGDDDTLI

SEQ ID NO: 2019 - protein, 14 aa, synthetic construct
ALGELGDTYPDKLV

SEQ ID NO: 2020 - protein, 13 aa, synthetic construct
ALRAGGYAGDKLI

SEQ ID NO: 2021 - protein, 13 aa, synthetic construct
ALGELEWGIRGTR

SEQ ID NO: 2022 - protein, 12 aa, synthetic construct
ALGELLHTNKLI

SEQ ID NO: 2023 - protein, 14 aa, synthetic construct
ALGELCMRDTLATA

SEQ ID NO: 2024 - protein, 14 aa, synthetic construct
ALRELPYRGIRTDK

SEQ ID NO: 2025 - protein, 14 aa, synthetic construct
ALGVRRGIWGTDKL

SEQ ID NO: 2026 - protein, 14 aa, synthetic construct
ALGELFWGTTDKLI

SEQ ID NO: 2027 - protein, 11 aa, synthetic construct
ALGELAFPYWW

SEQ ID NO: 2028 - protein, 12 aa, synthetic construct
ALGELLHTYKLI

SEQ ID NO: 2029 - protein, 14 aa, synthetic construct
ALGELGDTYPGKLI

SEQ ID NO: 2030 - protein, 12 aa, synthetic construct
ALGELHNTDKLI

SEQ ID NO: 2031 - protein, 13 aa, synthetic construct
ALGVPPFYVLGEI

SEQ ID NO: 2032 - protein, 13 aa, synthetic construct
ALGELGYSSWDTR

SEQ ID NO: 2033 - protein, 14 aa, synthetic construct
ALGELGGGYDGKLI

SEQ ID NO: 2034 - protein, 14 aa, synthetic construct
ALGELGDTYTDQLI

SEQ ID NO: 2035 - protein, 14 aa, synthetic construct
ALGELPHRGIRTDK

SEQ ID NO: 2036 - protein, 13 aa, synthetic construct
ALGELALPGIHTG

SEQ ID NO: 2037 - protein, 14 aa, synthetic construct
ALGVRRGIRGTVKL

SEQ ID NO: 2038 - protein, 14 aa, synthetic construct
ALGELALPGIKTDK

SEQ ID NO: 2039 - protein, 14 aa, synthetic construct
ALVELVSLGYTDKL

SEQ ID NO: 2040 - protein, 14 aa, synthetic construct
ALGELALPGILGLL

SEQ ID NO: 2041 - protein, 13 aa, synthetic construct
ALGELGYKDDKLI

SEQ ID NO: 2042 - protein, 14 aa, synthetic construct
ALGVRRGIRGTHKL

SEQ ID NO: 2043 - protein, 13 aa, synthetic construct
APGELWGIRSKLI

SEQ ID NO: 2044 - protein, 12 aa, synthetic construct
ALWELWINDKLI

SEQ ID NO: 2045 - protein, 14 aa, synthetic construct
ARGELREGDKHKLI

SEQ ID NO: 2046 - protein, 14 aa, synthetic construct
ALGELGWGSYTDKL

SEQ ID NO: 2047 - protein, 12 aa, synthetic construct
ALGELGSNDKLI

SEQ ID NO: 2048 - protein, 14 aa, synthetic construct
ALGELGDTYTYKLI

SEQ ID NO: 2049 - protein, 14 aa, synthetic construct
ALGVRRGIRGTDTL

SEQ ID NO: 2050 - protein, 14 aa, synthetic construct
ALWELSLRGIHTDK

SEQ ID NO: 2051 - protein, 14 aa, synthetic construct
ALGVRRGIRGTDRL

SEQ ID NO: 2052 - protein, 12 aa, synthetic construct
ALGELLNTDKHI

SEQ ID NO: 2053 - protein, 14 aa, synthetic construct
ALVELVLGDTDKLI

SEQ ID NO: 2054 - protein, 14 aa, synthetic construct
ARGVRRGIRGTDQL

SEQ ID NO: 2055 - protein, 14 aa, synthetic construct
ALGELALPGIHTDE

SEQ ID NO: 2056 - protein, 14 aa, synthetic construct
ALGELCTGGYADKL

SEQ ID NO: 2057 - protein, 14 aa, synthetic construct
APGELVLGDTDKLI

SEQ ID NO: 2058 - protein, 14 aa, synthetic construct
ALGELGDTYPHKLI

SEQ ID NO: 2059 - protein, 14 aa, synthetic construct
ALGELSYAGGSYTD

SEQ ID NO: 2060 - protein, 13 aa, synthetic construct
ALGVPPSYPINSS

SEQ ID NO: 2061 - protein, 12 aa, synthetic construct
ALWEIGSTDKLI

SEQ ID NO: 2062 - protein, 12 aa, synthetic construct
APGELVSLGYTD

SEQ ID NO: 2063 - protein, 11 aa, synthetic construct
ARGEGDTEKLI

SEQ ID NO: 2064 - protein, 14 aa, synthetic construct
ALRALLPTFRGTDK

SEQ ID NO: 2065 - protein, 14 aa, synthetic construct
APGELVSLGYTDNL

SEQ ID NO: 2066 - protein, 14 aa, synthetic construct
ALGELFLLWDTDKL

SEQ ID NO: 2067 - protein, 14 aa, synthetic construct
APGELVSLGYTDQL

SEQ ID NO: 2068 - protein, 14 aa, synthetic construct
APGELVSLGYTEKL

SEQ ID NO: 2069 - protein, 14 aa, synthetic construct
ALGELFLLGYTDQL

SEQ ID NO: 2070 - protein, 14 aa, synthetic construct
ALGELGGGYDVKLI

SEQ ID NO: 2071 - protein, 14 aa, synthetic construct
ALGELGDTYTDKII

SEQ ID NO: 2072 - protein, 14 aa, synthetic construct
ALVVRRGIRGTDKL

SEQ ID NO: 2073 - protein, 14 aa, synthetic construct
ALGELREGVINKLI

SEQ ID NO: 2074 - protein, 13 aa, synthetic construct
ALGELGYTYPDKL

SEQ ID NO: 2075 - protein, 14 aa, synthetic construct
ALGELCQGDTLATA

SEQ ID NO: 2076 - protein, 11 aa, synthetic construct
ALGELFLLGDT

SEQ ID NO: 2077 - protein, 14 aa, synthetic construct
ALGELTGGYADRLI

SEQ ID NO: 2078 - protein, 14 aa, synthetic construct
ALGEPPSYALGDTD

SEQ ID NO: 2079 - protein, 14 aa, synthetic construct
ALGELTGGYAENLI

SEQ ID NO: 2080 - protein, 14 aa, synthetic construct
ALGGPSWYCGIHDK

SEQ ID NO: 2081 - protein, 14 aa, synthetic construct
ALGDLEWGIMGTDK

SEQ ID NO: 2082 - protein, 14 aa, synthetic construct
ALGEPPASVLGDTD

SEQ ID NO: 2083 - protein, 14 aa, synthetic construct
ALGDLERGIRGTDK

SEQ ID NO: 2084 - protein, 13 aa, synthetic construct
ALGEPPAYVLGDT

SEQ ID NO: 2085 - protein, 14 aa, synthetic construct
ALGEPPAYVLGDTD

SEQ ID NO: 2086 - protein, 14 aa, synthetic construct
ALGDLDWGTTEKLI

SEQ ID NO: 2087 - protein, 14 aa, synthetic construct
ALGDLDWGTTDKLI

SEQ ID NO: 2088 - protein, 14 aa, synthetic construct
ALGGPSWNWGIPDK

SEQ ID NO: 2089 - protein, 14 aa, synthetic construct
ALGDLCMGDTLATA

SEQ ID NO: 2090 - protein, 14 aa, synthetic construct
ALGGPSSYWGIPDK

SEQ ID NO: 2091 - protein, 14 aa, synthetic construct
ALGEPPPYVLGDTD

SEQ ID NO: 2092 - protein, 13 aa, synthetic construct
GLGEVLGDTEKLI

SEQ ID NO: 2093 - protein, 14 aa, synthetic construct
ALGDLAWGSNTDKL

SEQ ID NO: 2094 - protein, 14 aa, synthetic construct
ALGEPPSCVLGDTD

SEQ ID NO: 2095 - protein, 13 aa, synthetic construct
GLGEVPTDTDKLI

SEQ ID NO: 2096 - protein, 12 aa, synthetic construct
ALGDLASTDKLI

SEQ ID NO: 2097 - protein, 14 aa, synthetic construct
ALGEPPSNVLGDTD

SEQ ID NO: 2098 - protein, 14 aa, synthetic construct
ALGEPPSSVLGTPI

SEQ ID NO: 2099 - protein, 14 aa, synthetic construct
ALGDLALPGIHTDQ

SEQ ID NO: 2100 - protein, 13 aa, synthetic construct
ALGDLEWGIRGTR

SEQ ID NO: 2101 - protein, 14 aa, synthetic construct
ALGGPSWYCGITDK

SEQ ID NO: 2102 - protein, 14 aa, synthetic construct
GLGEPTGGWTDQLI

SEQ ID NO: 2103 - protein, 13 aa, synthetic construct
ALGDLGDKVDKLI

SEQ ID NO: 2104 - protein, 14 aa, synthetic construct
ALGDLGDTYPDQLI

SEQ ID NO: 2105 - protein, 13 aa, synthetic construct
ALGDLGDTYPDKL

SEQ ID NO: 2106 - protein, 13 aa, synthetic construct
ALGDLGDTPINSS

SEQ ID NO: 2107 - protein, 14 aa, synthetic construct
ALGDLGDTLATAQL

SEQ ID NO: 2108 - protein, 13 aa, synthetic construct
GLGELTFLPDKLI

SEQ ID NO: 2109 - protein, 14 aa, synthetic construct
GLGELTGGYADKLI

SEQ ID NO: 2110 - protein, 12 aa, synthetic construct
ALGDLGDTEKLI

SEQ ID NO: 2111 - protein, 12 aa, synthetic construct
ALGDLGDSSWDT

SEQ ID NO: 2112 - protein, 12 aa, synthetic construct
ALGEPGTTISSS

SEQ ID NO: 2113 - protein, 13 aa, synthetic construct
ALGDLGDKDYKLI

SEQ ID NO: 2114 - protein, 14 aa, synthetic construct
ALGDLFILGDTDKL

SEQ ID NO: 2115 - protein, 12 aa, synthetic construct
ALGEPGTTRHSS

SEQ ID NO: 2116 - protein, 12 aa, synthetic construct
ALGEPGTTRNTS

SEQ ID NO: 2117 - protein, 12 aa, synthetic construct
ALGEPGTTTNSS

SEQ ID NO: 2118 - protein, 12 aa, synthetic construct
ALGGPSWYTDKL

SEQ ID NO: 2119 - protein, 12 aa, synthetic construct
ALGDLGDADKLI

SEQ ID NO: 2120 - protein, 13 aa, synthetic construct
ALGDLGAKDDKLI

SEQ ID NO: 2121 - protein, 14 aa, synthetic construct
GLGEPPSYVLGDTD

SEQ ID NO: 2122 - protein, 13 aa, synthetic construct
ALGEPHSYVLWDT

SEQ ID NO: 2123 - protein, 14 aa, synthetic construct
ALGDLFLLGDTEKL

SEQ ID NO: 2124 - protein, 9 aa, synthetic construct
ALGDLALPG

SEQ ID NO: 2125 - protein, 12 aa, synthetic construct
ALGDIWIHDKLI

SEQ ID NO: 2126 - protein, 14 aa, synthetic construct
ALGEPTGGCTEKLI

SEQ ID NO: 2127 - protein, 13 aa, synthetic construct
ALGGPPSYVLGEI

SEQ ID NO: 2128 - protein, 12 aa, synthetic construct
ALGEPRTTINSS

SEQ ID NO: 2129 - protein, 13 aa, synthetic construct
ALGDGGDTPEKLI

SEQ ID NO: 2130 - protein, 14 aa, synthetic construct
ALGEPSCAGGSYTD

SEQ ID NO: 2131 - protein, 14 aa, synthetic construct
ALGEPSLRGIHTDK

SEQ ID NO: 2132 - protein, 14 aa, synthetic construct
ALGEPSPFTGGHKL

SEQ ID NO: 2133 - protein, 14 aa, synthetic construct
ALGEPSYAAGSYTD

SEQ ID NO: 2134 - protein, 14 aa, synthetic construct
ALGGLGGGYDYKLI

SEQ ID NO: 2135 - protein, 14 aa, synthetic construct
ALGEPSYAGDLTPI

SEQ ID NO: 2136 - protein, 14 aa, synthetic construct
ALGEPSYAGESYTD

SEQ ID NO: 2137 - protein, 14 aa, synthetic construct
ALGEPSYAGGSHTD

SEQ ID NO: 2138 - protein, 13 aa, synthetic construct
ALGAVGYAGDKLI

SEQ ID NO: 2139 - protein, 14 aa, synthetic construct
ALGEPSYAGGWTDK

SEQ ID NO: 2140 - protein, 14 aa, synthetic construct
ALGEPSYAGGYADK

SEQ ID NO: 2141 - protein, 14 aa, synthetic construct
ALGEPSYAVGSYTD

SEQ ID NO: 2142 - protein, 14 aa, synthetic construct
ILGNRAFLYWGTPI

SEQ ID NO: 2143 - protein, 14 aa, synthetic construct
ALGGLCLGDTLATA

SEQ ID NO: 2144 - protein, 12 aa, synthetic construct
ILGNWGIPINSS

SEQ ID NO: 2145 - protein, 13 aa, synthetic construct
ILGNYWGTPINSS

SEQ ID NO: 2146 - protein, 14 aa, synthetic construct
ALGAPSYAGGSYTD

SEQ ID NO: 2147 - protein, 13 aa, synthetic construct
ALGAPPSYVLGEI

SEQ ID NO: 2148 - protein, 14 aa, synthetic construct
ILGSLLPTYWGTPI

SEQ ID NO: 2149 - protein, 14 aa, synthetic construct
ALGDHPYWGIYSDK

SEQ ID NO: 2150 - protein, 14 aa, synthetic construct
ALGDHPYWGIYTDQ

SEQ ID NO: 2151 - protein, 14 aa, synthetic construct
ALGDHPYWGIYTEK

SEQ ID NO: 2152 - protein, 14 aa, synthetic construct
ALGEPPSYVLGGTD

SEQ ID NO: 2153 - protein, 13 aa, synthetic construct
ALGDITFLPDKLI

SEQ ID NO: 2154 - protein, 14 aa, synthetic construct
ALGEPPSYLLGDTD

SEQ ID NO: 2155 - protein, 14 aa, synthetic construct
ALGDIPYRGIRTDK

SEQ ID NO: 2156 - protein, 13 aa, synthetic construct
ALGEPPSYPINSS

SEQ ID NO: 2157 - protein, 12 aa, synthetic construct
ALGDILHTDKLI

SEQ ID NO: 2158 - protein, 14 aa, synthetic construct
ALGDIGTGGYADKL

SEQ ID NO: 2159 - protein, 12 aa, synthetic construct
GLGVPPASVLGV

SEQ ID NO: 2160 - protein, 14 aa, synthetic construct
ALGDIGGGYDDKLI

SEQ ID NO: 2161 - protein, 14 aa, synthetic construct
ALGDIFLLGDTDKL

SEQ ID NO: 2162 - protein, 14 aa, synthetic construct
ALGDIAYWGINTDK

SEQ ID NO: 2163 - protein, 13 aa, synthetic construct
ALGEPPTYVLGDT

SEQ ID NO: 2164 - protein, 14 aa, synthetic construct
ALGDIAWGSYTDKL

SEQ ID NO: 2165 - protein, 13 aa, synthetic construct
ALGEPPSYVLGVT

SEQ ID NO: 2166 - protein, 14 aa, synthetic construct
ALGDIANWGVNTDK

SEQ ID NO: 2167 - protein, 14 aa, synthetic construct
ALGDIANWGINTEK

SEQ ID NO: 2168 - protein, 14 aa, synthetic construct
ALGDIANWGIITDK

SEQ ID NO: 2169 - protein, 13 aa, synthetic construct
ALGGLWGYAVNSS

SEQ ID NO: 2170 - protein, 13 aa, synthetic construct
ALGGLWGIRSKLI

SEQ ID NO: 2171 - protein, 14 aa, synthetic construct
ALGDIALPGIHTDK

SEQ ID NO: 2172 - protein, 14 aa, synthetic construct
ALGEPPSYWGTPIN

SEQ ID NO: 2173 - protein, 13 aa, synthetic construct
GLGELSFLPDKLI

SEQ ID NO: 2174 - protein, 12 aa, synthetic construct
ALGEPGTMINSS

SEQ ID NO: 2175 - protein, 14 aa, synthetic construct
ALGDLGGGYDAKLI

SEQ ID NO: 2176 - protein, 12 aa, synthetic construct
GLGELLHTDTLI

SEQ ID NO: 2177 - protein, 12 aa, synthetic construct
ALGDLTFLPDKL

SEQ ID NO: 2178 - protein, 14 aa, synthetic construct
ALGLSFLRSGAPIN

SEQ ID NO: 2179 - protein, 13 aa, synthetic construct
ALGEMGDKDDQLI

SEQ ID NO: 2180 - protein, 13 aa, synthetic construct
ALGEMGDKDYKLI

SEQ ID NO: 2181 - protein, 13 aa, synthetic construct
ALGEMGDKVDKLI

SEQ ID NO: 2182 - protein, 13 aa, synthetic construct
ALGEMGDSSWYTR

SEQ ID NO: 2183 - protein, 12 aa, synthetic construct
GLGAGGYTDKVI

SEQ ID NO: 2184 - protein, 12 aa, synthetic construct
GLGAGGYTDNLI

SEQ ID NO: 2185 - protein, 14 aa, synthetic construct
ALGDLSPCTGGHKL

SEQ ID NO: 2186 - protein, 14 aa, synthetic construct
ALGKRTGGYLGSWD

SEQ ID NO: 2187 - protein, 12 aa, synthetic construct
ALGKLWIHDKLI

SEQ ID NO: 2188 - protein, 14 aa, synthetic construct
ALGDLSLRGIDTDK

SEQ ID NO: 2189 - protein, 14 aa, synthetic construct
GLGALLPTFRGTDK

SEQ ID NO: 2190 - protein, 13 aa, synthetic construct
ALGDLSFLRVWGL

SEQ ID NO: 2191 - protein, 13 aa, synthetic construct
ALGEMGHSSWDTR

SEQ ID NO: 2192 - protein, 14 aa, synthetic construct
ALGEMTGGYAEKLI

SEQ ID NO: 2193 - protein, 14 aa, synthetic construct
ALGDLREGDSSWDT

SEQ ID NO: 2194 - protein, 14 aa, synthetic construct
ALGDLREGDKNTLI

SEQ ID NO: 2195 - protein, 14 aa, synthetic construct
ALGENPYWGIYTEK

SEQ ID NO: 2196 - protein, 14 aa, synthetic construct
ALGKLGGYARTDKL

SEQ ID NO: 2197 - protein, 14 aa, synthetic construct
ALGDLREGDKIKLI

SEQ ID NO: 2198 - protein, 13 aa, synthetic construct
ALGEMGDKDDKII

SEQ ID NO: 2199 - protein, 14 aa, synthetic construct
ALGNFAWGIRWRQH

SEQ ID NO: 2200 - protein, 13 aa, synthetic construct
ALGDLTFLPHQLI

SEQ ID NO: 2201 - protein, 12 aa, synthetic construct
ALGELWINDQLI

SEQ ID NO: 2202 - protein, 12 aa, synthetic construct
ALGELWIHDKLF

SEQ ID NO: 2203 - protein, 14 aa, synthetic construct
ALGDLVWGTPDKLI

SEQ ID NO: 2204 - protein, 8 aa, synthetic construct
ALGDLVWG

SEQ ID NO: 2205 - protein, 14 aa, synthetic construct
ALGDLVVGDTDKLI

SEQ ID NO: 2206 - protein, 14 aa, synthetic construct
ALGDLVSLRYTDKL

SEQ ID NO: 2207 - protein, 14 aa, synthetic construct
ALGQIANWGINTDK

SEQ ID NO: 2208 - protein, 14 aa, synthetic construct
ALGDLVMGDTDKLI

SEQ ID NO: 2209 - protein, 13 aa, synthetic construct
ALGQGGDTPDKLI

SEQ ID NO: 2210 - protein, 14 aa, synthetic construct
ALGDLVLGDPDKLI

SEQ ID NO: 2211 - protein, 12 aa, synthetic construct
ALGELWIPDKLI

SEQ ID NO: 2212 - protein, 14 aa, synthetic construct
ALGNFSYWGTPINS

SEQ ID NO: 2213 - protein, 12 aa, synthetic construct
ALGELWIYDKLI

SEQ ID NO: 2214 - protein, 12 aa, synthetic construct
ALGELWRHDKLI

SEQ ID NO: 2215 - protein, 14 aa, synthetic construct
ALGDLTGGYAHKLI

SEQ ID NO: 2216 - protein, 14 aa, synthetic construct
ALGNWGILTPINSS

SEQ ID NO: 2217 - protein, 14 aa, synthetic construct
ALGDLTGGYADNLI

SEQ ID NO: 2218 - protein, 14 aa, synthetic construct
ALGDLTGGYADLLI

SEQ ID NO: 2219 - protein, 12 aa, synthetic construct
ALGNSSTPINSS

SEQ ID NO: 2220 - protein, 13 aa, synthetic construct
ALGDLTGGYADKL

SEQ ID NO: 2221 - protein, 14 aa, synthetic construct
ALGDLTGGYAAKLI

SEQ ID NO: 2222 - protein, 14 aa, synthetic construct
ALGDLREGDINKLI

SEQ ID NO: 2223 - protein, 14 aa, synthetic construct
ALGEPAGGWTDKLI

SEQ ID NO: 2224 - protein, 14 aa, synthetic construct
ALGDLPYRGIRTDQ

SEQ ID NO: 2225 - protein, 14 aa, synthetic construct
ALGGRTGGYLGSWD

SEQ ID NO: 2226 - protein, 14 aa, synthetic construct
GLGEIANWGINTDK

SEQ ID NO: 2227 - protein, 14 aa, synthetic construct
ALGEPGGYARTDKL

SEQ ID NO: 2228 - protein, 13 aa, synthetic construct
ALGEPGIPLLGDT

SEQ ID NO: 2229 - protein, 12 aa, synthetic construct
ALGDLGTTDKLI

SEQ ID NO: 2230 - protein, 14 aa, synthetic construct
ALGEPGLPLLEDTD

SEQ ID NO: 2231 - protein, 12 aa, synthetic construct
ALGDLGSTDRLI

SEQ ID NO: 2232 - protein, 12 aa, synthetic construct
ALGDLGSTDQLI

SEQ ID NO: 2233 - protein, 14 aa, synthetic construct
ALGGSSWYWGIPDK

SEQ ID NO: 2234 - protein, 14 aa, synthetic construct
GLGELEWGIRCTDK

SEQ ID NO: 2235 - protein, 12 aa, synthetic construct
ALGDLGSTDKHI

SEQ ID NO: 2236 - protein, 13 aa, synthetic construct
ALGDLLGDTAKLI

SEQ ID NO: 2237 - protein, 12 aa, synthetic construct
ALGDLGSTDHLI

SEQ ID NO: 2238 - protein, 14 aa, synthetic construct
ALGGPSYAGGSYTD

SEQ ID NO: 2239 - protein, 14 aa, synthetic construct
ALGEPGLTLLGDTD

SEQ ID NO: 2240 - protein, 14 aa, synthetic construct
ALGDLGGGYEDKLI

SEQ ID NO: 2241 - protein, 14 aa, synthetic construct
ALGGPSWYWGSYTD

SEQ ID NO: 2242 - protein, 14 aa, synthetic construct
ALGDLGGGYDDTLI

SEQ ID NO: 2243 - protein, 12 aa, synthetic construct
GLGELLHTDKLI

SEQ ID NO: 2244 - protein, 14 aa, synthetic construct
ALGDLGGGYDDKII

SEQ ID NO: 2245 - protein, 14 aa, synthetic construct
ALGDLGGGYDDILI

SEQ ID NO: 2246 - protein, 13 aa, synthetic construct
ALGEPGDSSWYTR

SEQ ID NO: 2247 - protein, 13 aa, synthetic construct
ALGDLLGDTDHLI

SEQ ID NO: 2248 - protein, 14 aa, synthetic construct
ALGDLPYRGIRSKL

SEQ ID NO: 2249 - protein, 12 aa, synthetic construct
ALGDLLHTEKLI

SEQ ID NO: 2250 - protein, 14 aa, synthetic construct
ALGEPALPLLGDTD

SEQ ID NO: 2251 - protein, 13 aa, synthetic construct
GLGDLLGDTDKLI

SEQ ID NO: 2252 - protein, 12 aa, synthetic construct
ALGEPATTINSS

SEQ ID NO: 2253 - protein, 14 aa, synthetic construct
ALGKLAWGSYTDKL

SEQ ID NO: 2254 - protein, 14 aa, synthetic construct
GLGDLVLGDTDKLI

SEQ ID NO: 2255 - protein, 13 aa, synthetic construct
ALGDLLRDTDKLI

SEQ ID NO: 2256 - protein, 14 aa, synthetic construct
ALGDLLPTFRGTDK

SEQ ID NO: 2257 - protein, 12 aa, synthetic construct
GLGDPGTTINSS

SEQ ID NO: 2258 - protein, 14 aa, synthetic construct
ALGEPDMGDIYTDK

SEQ ID NO: 2259 - protein, 11 aa, synthetic construct
ALGKGDTDKLI

SEQ ID NO: 2260 - protein, 14 aa, synthetic construct
GLGEHPYWGIYTDK

SEQ ID NO: 2261 - protein, 11 aa, synthetic construct
ALGDLLHTDKL

SEQ ID NO: 2262 - protein, 12 aa, synthetic construct
ALGDLLHTDKHI

SEQ ID NO: 2263 - protein, 13 aa, synthetic construct
ALGKFLRIPINSS

SEQ ID NO: 2264 - protein, 14 aa, synthetic construct
ALGKAFLRTLYTDK

SEQ ID NO: 2265 - protein, 13 aa, synthetic construct
ALGIPPSYVLGEI

SEQ ID NO: 2266 - protein, 13 aa, synthetic construct
ALGDLLGDTNQLI

SEQ ID NO: 2267 - protein, 11 aa, synthetic construct
GLGEGDTEKLI

SEQ ID NO: 2268 - protein, 13 aa, synthetic construct
ALGDLLGDTDTLI

SEQ ID NO: 2269 - protein, 13 aa, synthetic construct
ALGDLLGDTDQII

SEQ ID NO: 2270 - protein, 14 aa, synthetic construct
ALGEPTGGCTDKLF

SEQ ID NO: 2271 - protein, 14 aa, synthetic construct
ALGALVWGTTDKLI

SEQ ID NO: 2272 - protein, 14 aa, synthetic construct
ALGDLVWGTTENLI

SEQ ID NO: 2273 - protein, 13 aa, synthetic construct
ALGEVPKDTDKII

SEQ ID NO: 2274 - protein, 14 aa, synthetic construct
ALGERTGGYGGAIN

SEQ ID NO: 2275 - protein, 13 aa, synthetic construct
AIGEVPTDTDKLI

SEQ ID NO: 2276 - protein, 14 aa, synthetic construct
ALGERTGGYLGTDK

SEQ ID NO: 2277 - protein, 14 aa, synthetic construct
ALGERTGGYRPINS

SEQ ID NO: 2278 - protein, 14 aa, synthetic construct
AIGEPSYAGGSYTD

SEQ ID NO: 2279 - protein, 13 aa, synthetic construct
ALGERWGIRSKLI

SEQ ID NO: 2280 - protein, 14 aa, synthetic construct
AIGEPPSYVLGDTD

SEQ ID NO: 2281 - protein, 14 aa, synthetic construct
ALGESANWGINTDK

SEQ ID NO: 2282 - protein, 14 aa, synthetic construct
AIGEPGLPLLGDTD

SEQ ID NO: 2283 - protein, 14 aa, synthetic construct
ALGESPSYVLGDTD

SEQ ID NO: 2284 - protein, 12 aa, synthetic construct
AIGELWIHDKLI

SEQ ID NO: 2285 - protein, 13 aa, synthetic construct
ALGEVPTDSDKLI

SEQ ID NO: 2286 - protein, 13 aa, synthetic construct
ALGEVPTDPDKLI

SEQ ID NO: 2287 - protein, 14 aa, synthetic construct
SLGELGGGYYDKLI

SEQ ID NO: 2288 - protein, 13 aa, synthetic construct
AIGELTFLPDKLI

SEQ ID NO: 2289 - protein, 14 aa, synthetic construct
ALGETGLPLLGDTD

SEQ ID NO: 2290 - protein, 14 aa, synthetic construct
SLGELPYRGIRTDK

SEQ ID NO: 2291 - protein, 13 aa, synthetic construct
AIGELLGDTNKLI

SEQ ID NO: 2292 - protein, 14 aa, synthetic construct
ALGETTGGWTDKLI

SEQ ID NO: 2293 - protein, 13 aa, synthetic construct
ALGEVPMDTDKLI

SEQ ID NO: 2294 - protein, 13 aa, synthetic construct
AIGELGDKDDKLI

SEQ ID NO: 2295 - protein, 14 aa, synthetic construct
PLGSLLPTYWGTPI

SEQ ID NO: 2296 - protein, 14 aa, synthetic construct
AIGGPSWCWGIPDK

SEQ ID NO: 2297 - protein, 14 aa, synthetic construct
ALGERTGGYDDKLI

SEQ ID NO: 2298 - protein, 13 aa, synthetic construct
AIWELLGDTDKLI

SEQ ID NO: 2299 - protein, 13 aa, synthetic construct
LLWNWGIAPGTPD

SEQ ID NO: 2300 - protein, 12 aa, synthetic construct
LMGNSSTPINSS

SEQ ID NO: 2301 - protein, 13 aa, synthetic construct
ALGERGDTPDKLI

SEQ ID NO: 2302 - protein, 14 aa, synthetic construct
LSGNWGILTPINSS

SEQ ID NO: 2303 - protein, 14 aa, synthetic construct
ALGERGGGYDEKLI

SEQ ID NO: 2304 - protein, 12 aa, synthetic construct
ALADLGSTDKLI

SEQ ID NO: 2305 - protein, 14 aa, synthetic construct
ALGERPGGYLGSWD

SEQ ID NO: 2306 - protein, 13 aa, synthetic construct
ALGEVPTDTGKLI

SEQ ID NO: 2307 - protein, 14 aa, synthetic construct
PLGELCLGDTLATA

SEQ ID NO: 2308 - protein, 14 aa, synthetic construct
ALGERTGEYLGSWD

SEQ ID NO: 2309 - protein, 14 aa, synthetic construct
ALGERTGGYAVNSS

SEQ ID NO: 2310 - protein, 14 aa, synthetic construct
AIWELAWGSYTDKL

SEQ ID NO: 2311 - protein, 14 aa, synthetic construct
ALGERTGGCLGSWD

SEQ ID NO: 2312 - protein, 13 aa, synthetic construct
ALGEVPTDTDQII

SEQ ID NO: 2313 - protein, 14 aa, synthetic construct
ALGERTGGPHTPIN

SEQ ID NO: 2314 - protein, 14 aa, synthetic construct
ALGERTGGSLCSWD

SEQ ID NO: 2315 - protein, 14 aa, synthetic construct
AIGVRRGIRGTDQL

SEQ ID NO: 2316 - protein, 14 aa, synthetic construct
PLGELVWGTTDKLI

SEQ ID NO: 2317 - protein, 13 aa, synthetic construct
ALGEVPTDTDKLV

SEQ ID NO: 2318 - protein, 14 aa, synthetic construct
ALGERTGGYADKLI

SEQ ID NO: 2319 - protein, 14 aa, synthetic construct
AIGELAWGSYTDQL

SEQ ID NO: 2320 - protein, 13 aa, synthetic construct
ALGEVLTDTDKLI

SEQ ID NO: 2321 - protein, 14 aa, synthetic construct
ALGEPTGGRTDKLI

SEQ ID NO: 2322 - protein, 14 aa, synthetic construct
TLGALLPTFRGTDK

SEQ ID NO: 2323 - protein, 14 aa, synthetic construct
VLGDLAWGSYTDKL

SEQ ID NO: 2324 - protein, 12 aa, synthetic construct
ALGEVIHTDKLI

SEQ ID NO: 2325 - protein, 13 aa, synthetic construct
VLGEGGDTPDKLI

SEQ ID NO: 2326 - protein, 14 aa, synthetic construct
AHGDLREGDKNKLI

SEQ ID NO: 2327 - protein, 13 aa, synthetic construct
ALGEVGDTPDQLI

SEQ ID NO: 2328 - protein, 14 aa, synthetic construct
VLGELALPGIHTDK

SEQ ID NO: 2329 - protein, 12 aa, synthetic construct
AHAEPGTTINST

SEQ ID NO: 2330 - protein, 13 aa, synthetic construct
VLGELTFLPDKLI

SEQ ID NO: 2331 - protein, 14 aa, synthetic construct
AFGVRRGIRGTDKL

SEQ ID NO: 2332 - protein, 14 aa, synthetic construct
AFGGLGTGGYADKL

SEQ ID NO: 2333 - protein, 13 aa, synthetic construct
AFGEVPTDTDKLI

SEQ ID NO: 2334 - protein, 14 aa, synthetic construct
AFGEPVLGDIYTDK

SEQ ID NO: 2335 - protein, 14 aa, synthetic construct
AFGEPSYAGGSYTD

SEQ ID NO: 2336 - protein, 14 aa, synthetic construct
ALGEVGGGYDYKLI

SEQ ID NO: 2337 - protein, 14 aa, synthetic construct
VLGELVWGTTDKLI

SEQ ID NO: 2338 - protein, 12 aa, synthetic construct
VLGEPGTTINSS

SEQ ID NO: 2339 - protein, 14 aa, synthetic construct
AFGELSPFTGGHKL

SEQ ID NO: 2340 - protein, 14 aa, synthetic construct
VLGEPVLGDIYTDK

SEQ ID NO: 2341 - protein, 14 aa, synthetic construct
AFGELGDTYPEKLI

SEQ ID NO: 2342 - protein, 13 aa, synthetic construct
AFGELGDSSWDTR

SEQ ID NO: 2343 - protein, 12 aa, synthetic construct
ALGEVGSTDKLF

SEQ ID NO: 2344 - protein, 14 aa, synthetic construct
AHGELALPGIHTDK

SEQ ID NO: 2345 - protein, 14 aa, synthetic construct
AHGELAWGSYTEKL

SEQ ID NO: 2346 - protein, 13 aa, synthetic construct
VLGAGGYAGDKLI

SEQ ID NO: 2347 - protein, 14 aa, synthetic construct
AHGEPVLGDIYTDK

SEQ ID NO: 2348 - protein, 11 aa, synthetic construct
TLGEGDTDKLI

SEQ ID NO: 2349 - protein, 14 aa, synthetic construct
TLGELGDTYPDKLI

SEQ ID NO: 2350 - protein, 14 aa, synthetic construct
TLGELGGYARTDKL

SEQ ID NO: 2351 - protein, 14 aa, synthetic construct
TLGELGTGGYADKL

SEQ ID NO: 2352 - protein, 13 aa, synthetic construct
TLGELLGDTDKLI

SEQ ID NO: 2353 - protein, 13 aa, synthetic construct
ALGEVEWGIRGTD

SEQ ID NO: 2354 - protein, 14 aa, synthetic construct
ALGEVFLLGDTDKL

SEQ ID NO: 2355 - protein, 13 aa, synthetic construct
TLGELWGIRSKLI

SEQ ID NO: 2356 - protein, 14 aa, synthetic construct
AHGRAFLRTLYTDK

SEQ ID NO: 2357 - protein, 14 aa, synthetic construct
TLGERTGGYLGSWD

SEQ ID NO: 2358 - protein, 12 aa, synthetic construct
AHGELGSTDKLI

SEQ ID NO: 2359 - protein, 13 aa, synthetic construct
TLGEVPTDTDKLI

SEQ ID NO: 2360 - protein, 14 aa, synthetic construct
ALGEVLLGDSPLGH

SEQ ID NO: 2361 - protein, 14 aa, synthetic construct
ALGEVLLGDSLATA

SEQ ID NO: 2362 - protein, 13 aa, synthetic construct
ALGEVGDKDDKII

SEQ ID NO: 2363 - protein, 13 aa, synthetic construct
AHGELTFLPDKLI

SEQ ID NO: 2364 - protein, 14 aa, synthetic construct
AHGELSPFTGGHKL

SEQ ID NO: 2365 - protein, 13 aa, synthetic construct
AHGELLGDTDKLI

SEQ ID NO: 2366 - protein, 12 aa, synthetic construct
ALGEVLHTDKLI

SEQ ID NO: 2367 - protein, 14 aa, synthetic construct
AHGELGTGGYADKL

SEQ ID NO: 2368 - protein, 13 aa, synthetic construct
ALGEVPTGTDKLV

SEQ ID NO: 2369 - protein, 13 aa, synthetic construct
LLGTYGGYAVNSS

SEQ ID NO: 2370 - protein, 13 aa, synthetic construct
ALGEQWGIRSKLI

SEQ ID NO: 2371 - protein, 13 aa, synthetic construct
ALGEVPTHTDKLI

SEQ ID NO: 2372 - protein, 14 aa, synthetic construct
ALGEPTGGYAVNSS

SEQ ID NO: 2373 - protein, 14 aa, synthetic construct
ALGEPTGGYGGAIN

SEQ ID NO: 2374 - protein, 14 aa, synthetic construct
LLGNFAWGRRWRQH

SEQ ID NO: 2375 - protein, 14 aa, synthetic construct
ALGALGGGYDDQLI

SEQ ID NO: 2376 - protein, 14 aa, synthetic construct
ALGEPTGVWTDKLI

SEQ ID NO: 2377 - protein, 14 aa, synthetic construct
ALGALGDTYPYKLI

SEQ ID NO: 2378 - protein, 14 aa, synthetic construct
ALGEPTWGWTDKLI

SEQ ID NO: 2379 - protein, 13 aa, synthetic construct
ALGEVWGIRSNLI

SEQ ID NO: 2380 - protein, 14 aa, synthetic construct
LLGNPCWGIYTPIN

SEQ ID NO: 2381 - protein, 14 aa, synthetic construct
ALGEPVLGDICTDK

SEQ ID NO: 2382 - protein, 13 aa, synthetic construct
ALGEVWGIRRKLI

SEQ ID NO: 2383 - protein, 12 aa, synthetic construct
LLGNSGYTINST

SEQ ID NO: 2384 - protein, 12 aa, synthetic construct
ALGAGVYNDKLI

SEQ ID NO: 2385 - protein, 14 aa, synthetic construct
LLGNSILGDTRINS

SEQ ID NO: 2386 - protein, 12 aa, synthetic construct
ALGAGGYTVKLI

SEQ ID NO: 2387 - protein, 13 aa, synthetic construct
ALGAGGYTPINSS

SEQ ID NO: 2388 - protein, 14 aa, synthetic construct
ALGEPVLGDLTPIN

SEQ ID NO: 2389 - protein, 12 aa, synthetic construct
ALGAGGYTDELI

SEQ ID NO: 2390 - protein, 14 aa, synthetic construct
ALGEPVLGDTRINS

SEQ ID NO: 2391 - protein, 12 aa, synthetic construct
ALGAGGYSDKLI

SEQ ID NO: 2392 - protein, 14 aa, synthetic construct
ALGEPVLGDTYTDK

SEQ ID NO: 2393 - protein, 14 aa, synthetic construct
ALGALHGTGGYPIN

SEQ ID NO: 2394 - protein, 13 aa, synthetic construct
LLGLGDTPAISSS

SEQ ID NO: 2395 - protein, 14 aa, synthetic construct
LLGKWGILTPINSS

SEQ ID NO: 2396 - protein, 14 aa, synthetic construct
ALGALLPTIRGTDK

SEQ ID NO: 2397 - protein, 10 aa, synthetic construct
ALGALVPTFR

SEQ ID NO: 2398 - protein, 11 aa, synthetic construct
LLGEGTPINSS

SEQ ID NO: 2399 - protein, 14 aa, synthetic construct
ALGEPTGGWSDKLI

SEQ ID NO: 2400 - protein, 14 aa, synthetic construct
ALGEPTGGWTATLI

SEQ ID NO: 2401 - protein, 14 aa, synthetic construct
ALGEPTGGWTDELI

SEQ ID NO: 2402 - protein, 14 aa, synthetic construct
ALGALREGDKNKLI

SEQ ID NO: 2403 - protein, 14 aa, synthetic construct
ALGALPGTGGYPIN

SEQ ID NO: 2404 - protein, 13 aa, synthetic construct
ALGALLPTYWGKF

SEQ ID NO: 2405 - protein, 14 aa, synthetic construct
ALGALLPTSRGTDK

SEQ ID NO: 2406 - protein, 14 aa, synthetic construct
ALGALLPTFRGTYK

SEQ ID NO: 2407 - protein, 12 aa, synthetic construct
ALGALLHTDKLI

SEQ ID NO: 2408 - protein, 14 aa, synthetic construct
ALGEPTGGWTDKLF

SEQ ID NO: 2409 - protein, 13 aa, synthetic construct
LLGKFLRIPIHSS

SEQ ID NO: 2410 - protein, 14 aa, synthetic construct
ALGALLPTFRDTDK

SEQ ID NO: 2411 - protein, 13 aa, synthetic construct
LLGKFLRIPISSS

SEQ ID NO: 2412 - protein, 13 aa, synthetic construct
LLGKGGIPPIHSS

SEQ ID NO: 2413 - protein, 13 aa, synthetic construct
LLGKGGMPPINSS

SEQ ID NO: 2414 - protein, 14 aa, synthetic construct
ALGALLPPFRGTDK

SEQ ID NO: 2415 - protein, 14 aa, synthetic construct
ALGALLHTFLGTDK

SEQ ID NO: 2416 - protein, 12 aa, synthetic construct
ALGALLHTEKLI

SEQ ID NO: 2417 - protein, 14 aa, synthetic construct
ALGAGGYLGSWDTR

SEQ ID NO: 2418 - protein, 13 aa, synthetic construct
ALGAGGYAPINSS

SEQ ID NO: 2419 - protein, 13 aa, synthetic construct
ALGAGGYAGEKLF

SEQ ID NO: 2420 - protein, 14 aa, synthetic construct
ALEELGDTYPDKLI

SEQ ID NO: 2421 - protein, 13 aa, synthetic construct
ALGEQGDSSWDTR

SEQ ID NO: 2422 - protein, 13 aa, synthetic construct
LLGSLLPTFWGTP

SEQ ID NO: 2423 - protein, 13 aa, synthetic construct
ALGEVRTDTDKLI

SEQ ID NO: 2424 - protein, 14 aa, synthetic construct
LLGSLLPTYCGTPI

SEQ ID NO: 2425 - protein, 14 aa, synthetic construct
ALEEPTGGWTEKLI

SEQ ID NO: 2426 - protein, 14 aa, synthetic construct
ALGEQGGGYDDKLI

SEQ ID NO: 2427 - protein, 13 aa, synthetic construct
ALEELWGIRSKLI

SEQ ID NO: 2428 - protein, 12 aa, synthetic construct
ALEELGSTDKLI

SEQ ID NO: 2429 - protein, 14 aa, synthetic construct
ALEELGGGSYTDKL

SEQ ID NO: 2430 - protein, 13 aa, synthetic construct
ALEELGDSSWDTR

SEQ ID NO: 2431 - protein, 12 aa, synthetic construct
ALGAFLPSWGLP

SEQ ID NO: 2432 - protein, 13 aa, synthetic construct
LLGTGGIPPINSS

SEQ ID NO: 2433 - protein, 14 aa, synthetic construct
ALEELEWGIRGTDK

SEQ ID NO: 2434 - protein, 14 aa, synthetic construct
ALEEIANWGINTDK

SEQ ID NO: 2435 - protein, 14 aa, synthetic construct
LLGTPYWGIYTPIN

SEQ ID NO: 2436 - protein, 14 aa, synthetic construct
ALGEQPYRGIRTDK

SEQ ID NO: 2437 - protein, 14 aa, synthetic construct
ALGEQREGDKNKLI

SEQ ID NO: 2438 - protein, 14 aa, synthetic construct
ALGEQREGDQNKLI

SEQ ID NO: 2439 - protein, 14 aa, synthetic construct
LLGTSYWGIRINSS

SEQ ID NO: 2440 - protein, 13 aa, synthetic construct
ALGEVPTVTDKLI

SEQ ID NO: 2441 - protein, 13 aa, synthetic construct
LLGNYWGTPTNSS

SEQ ID NO: 2442 - protein, 14 aa, synthetic construct
ALGEQAWGSYTDKL

SEQ ID NO: 2443 - protein, 13 aa, synthetic construct
ALGAGGYAGDKLV

SEQ ID NO: 2444 - protein, 14 aa, synthetic construct
ALGEVTGGYADKLI

SEQ ID NO: 2445 - protein, 13 aa, synthetic construct
ALGAGGYAGDKLT

SEQ ID NO: 2446 - protein, 13 aa, synthetic construct
ALGAGGYAGDKII

SEQ ID NO: 2447 - protein, 13 aa, synthetic construct
ALGAGGYAGDKHI

SEQ ID NO: 2448 - protein, 13 aa, synthetic construct
ALGAGGYAGDILI

SEQ ID NO: 2449 - protein, 14 aa, synthetic construct
ALGEVVMGDTDKLI

SEQ ID NO: 2450 - protein, 12 aa, synthetic construct
LLGNWGIAPGTP

SEQ ID NO: 2451 - protein, 13 aa, synthetic construct
ALGAGGDTPEKLI

SEQ ID NO: 2452 - protein, 12 aa, synthetic construct
ALGAGGCTDKLI

SEQ ID NO: 2453 - protein, 13 aa, synthetic construct
ALGAGGCAGEKLI

SEQ ID NO: 2454 - protein, 12 aa, synthetic construct
ALGAGEYTDKLI

SEQ ID NO: 2455 - protein, 13 aa, synthetic construct
ALGEVTFLPDKII

SEQ ID NO: 2456 - protein, 13 aa, synthetic construct
ALGAGDTPAINSS

SEQ ID NO: 2457 - protein, 13 aa, synthetic construct
ALGEPWGIRSKLI

SEQ ID NO: 2458 - protein, 14 aa, synthetic construct
ALGAFLRTLYTDKL

SEQ ID NO: 2459 - protein, 12 aa, synthetic construct
ALGAFLPYWGVP

SEQ ID NO: 2460 - protein, 13 aa, synthetic construct
ALGEVTFLPDKLI

SEQ ID NO: 2461 - protein, 14 aa, synthetic construct
ALGAFLPYWGIRTD

SEQ ID NO: 2462 - protein, 14 aa, synthetic construct
LLGNYWGIPADKLI

SEQ ID NO: 2463 - protein, 14 aa, synthetic construct
ALGAFLPYWGINTD

SEQ ID NO: 2464 - protein, 13 aa, synthetic construct
LLGNYWGIPIHSS

SEQ ID NO: 2465 - protein, 14 aa, synthetic construct
ALGDLVWGTTDTLI

SEQ ID NO: 2466 - protein, 14 aa, synthetic construct
ALGDLEWGIRGPDK

SEQ ID NO: 2467 - protein, 14 aa, synthetic construct
ALGECTGGYLGSWD

SEQ ID NO: 2468 - protein, 11 aa, synthetic construct
ALGEGDTDKFI

SEQ ID NO: 2469 - protein, 13 aa, synthetic construct
DLGEVHTDTDKLI

SEQ ID NO: 2470 - protein, 13 aa, synthetic construct
ALGRACLRTLYTD

SEQ ID NO: 2471 - protein, 10 aa, synthetic construct
ALGELVSLGY

SEQ ID NO: 2472 - protein, 13 aa, synthetic construct
ALGEGGDTPDNSS

SEQ ID NO: 2473 - protein, 13 aa, synthetic construct
ALGELWGIPINSS

SEQ ID NO: 2474 - protein, 12 aa, synthetic construct
ALGEIANWGINS

SEQ ID NO: 2475 - protein, 14 aa, synthetic construct
ALGELWGILGLLGH

SEQ ID NO: 2476 - protein, 14 aa, synthetic construct
ALGEIANWGINADK

SEQ ID NO: 2477 - protein, 13 aa, synthetic construct
ALGELWGIHSKLI

SEQ ID NO: 2478 - protein, 13 aa, synthetic construct
ALGEGGDTPDNII

SEQ ID NO: 2479 - protein, 14 aa, synthetic construct
ALGEHPYWGTYTDK

SEQ ID NO: 2480 - protein, 13 aa, synthetic construct
ALGEGGDTPDKVI

SEQ ID NO: 2481 - protein, 14 aa, synthetic construct
ALGELWGIAPGTPD

SEQ ID NO: 2482 - protein, 14 aa, synthetic construct
ALGELVLGDIYTDK

SEQ ID NO: 2483 - protein, 11 aa, synthetic construct
ALGVGDTDKLI

SEQ ID NO: 2484 - protein, 14 aa, synthetic construct
ALGDVANWGINTDK

SEQ ID NO: 2485 - protein, 13 aa, synthetic construct
ALGELWDSSWDTR

SEQ ID NO: 2486 - protein, 13 aa, synthetic construct
ALGEGGDTPDKHI

SEQ ID NO: 2487 - protein, 14 aa, synthetic construct
ALGELVLGDADKLI

SEQ ID NO: 2488 - protein, 13 aa, synthetic construct
DIGEGGDTPDKLI

SEQ ID NO: 2489 - protein, 8 aa, synthetic construct
ALGELVLG

SEQ ID NO: 2490 - protein, 14 aa, synthetic construct
ALGELVSLGYPDKL

SEQ ID NO: 2491 - protein, 12 aa, synthetic construct
ALGDVGDTDKLI

SEQ ID NO: 2492 - protein, 14 aa, synthetic construct
ALGDPVLGDLYTDK

SEQ ID NO: 2493 - protein, 13 aa, synthetic construct
ALGDPVLGDLYTD

SEQ ID NO: 2494 - protein, 13 aa, synthetic construct
ALGEGGDTPANLI

SEQ ID NO: 2495 - protein, 13 aa, synthetic construct
ALGEGGDTPEKHI

SEQ ID NO: 2496 - protein, 14 aa, synthetic construct
ALGEGGDTYPDKLI

SEQ ID NO: 2497 - protein, 13 aa, synthetic construct
ALGELWGIRSKLT

SEQ ID NO: 2498 - protein, 13 aa, synthetic construct
ALGEGGDTTINSS

SEQ ID NO: 2499 - protein, 14 aa, synthetic construct
ALGELVLGDTDKLF

SEQ ID NO: 2500 - protein, 14 aa, synthetic construct
ALGDPTGGCTEKLI

SEQ ID NO: 2501 - protein, 13 aa, synthetic construct
ALGELWGIRSKHI

SEQ ID NO: 2502 - protein, 14 aa, synthetic construct
ALGQRTGGYLGSWD

SEQ ID NO: 2503 - protein, 13 aa, synthetic construct
ALGEGGDTRINSS

SEQ ID NO: 2504 - protein, 13 aa, synthetic construct
ALGELWGIRSHLI

SEQ ID NO: 2505 - protein, 14 aa, synthetic construct
ALGEHPYWGIRTIN

SEQ ID NO: 2506 - protein, 14 aa, synthetic construct
ALGEIANWGIPTNS

SEQ ID NO: 2507 - protein, 14 aa, synthetic construct
ALGELVSLGHTDKL

SEQ ID NO: 2508 - protein, 14 aa, synthetic construct
ALGTLLPTFRGTDK

SEQ ID NO: 2509 - protein, 13 aa, synthetic construct
DLGAGGYAGDKLI

SEQ ID NO: 2510 - protein, 14 aa, synthetic construct
ALGELVSLGNTDKL

SEQ ID NO: 2511 - protein, 13 aa, synthetic construct
ALGTYWGTPINSS

SEQ ID NO: 2512 - protein, 13 aa, synthetic construct
DLGEVPTHTDKLI

SEQ ID NO: 2513 - protein, 14 aa, synthetic construct
ALGRAYLLTLYTDK

SEQ ID NO: 2514 - protein, 13 aa, synthetic construct
ALGELWGIRRKII

SEQ ID NO: 2515 - protein, 13 aa, synthetic construct
ALGEGGDTPEKLF

SEQ ID NO: 2516 - protein, 13 aa, synthetic construct
ALGDPVLGDIYTD

SEQ ID NO: 2517 - protein, 14 aa, synthetic construct
ALGELVLGDMDKLI

SEQ ID NO: 2518 - protein, 13 aa, synthetic construct
ALGELWGIRNKLI

SEQ ID NO: 2519 - protein, 13 aa, synthetic construct
DLGEPGLPLLWDT

SEQ ID NO: 2520 - protein, 13 aa, synthetic construct
ALGELVWGTTYKL

SEQ ID NO: 2521 - protein, 14 aa, synthetic construct
ALGELVSLGDTDKL

SEQ ID NO: 2522 - protein, 14 aa, synthetic construct
DLGELGGGYDYKLI

SEQ ID NO: 2523 - protein, 11 aa, synthetic construct
DLGELSPFTGG

SEQ ID NO: 2524 - protein, 14 aa, synthetic construct
ALGEHVLGDIYTDK

SEQ ID NO: 2525 - protein, 12 aa, synthetic construct
ALGRAFLRTLYT

SEQ ID NO: 2526 - protein, 14 aa, synthetic construct
ALGELVWGKTDKLI

SEQ ID NO: 2527 - protein, 13 aa, synthetic construct
ALGEEGDTPDKLI

SEQ ID NO: 2528 - protein, 13 aa, synthetic construct
ALGELVDSSWYTR

SEQ ID NO: 2529 - protein, 11 aa, synthetic construct
ALGEGDTDNLN

SEQ ID NO: 2530 - protein, 13 aa, synthetic construct
ALGEFPTDTDKLI

SEQ ID NO: 2531 - protein, 13 aa, synthetic construct
ALGVHHSYVLGEI

SEQ ID NO: 2532 - protein, 14 aa, synthetic construct
ALGRAFLRTMYTDK

SEQ ID NO: 2533 - protein, 14 aa, synthetic construct
ALGRAFRRTLYTDK

SEQ ID NO: 2534 - protein, 14 aa, synthetic construct
ALGELVWGIAPGTP

SEQ ID NO: 2535 - protein, 11 aa, synthetic construct
ALGEGDTDKVI

SEQ ID NO: 2536 - protein, 11 aa, synthetic construct
ALGEGDIDKLI

SEQ ID NO: 2537 - protein, 14 aa, synthetic construct
ALGRAFLRTQYTDK

SEQ ID NO: 2538 - protein, 11 aa, synthetic construct
ALGEGDTDKLC

SEQ ID NO: 2539 - protein, 10 aa, synthetic construct
ALGEGDTDKL

SEQ ID NO: 2540 - protein, 8 aa, synthetic construct
ALGEGDTD

SEQ ID NO: 2541 - protein, 14 aa, synthetic construct
DLGELGTGGYSDKL

SEQ ID NO: 2542 - protein, 14 aa, synthetic construct
ALGRAFLYWGTPIN

SEQ ID NO: 2543 - protein, 14 aa, synthetic construct
DIGELVWGTTDKLI

SEQ ID NO: 2544 - protein, 12 aa, synthetic construct
DLGELIHTDKLI

SEQ ID NO: 2545 - protein, 9 aa, synthetic construct
ALGEGDTDK

SEQ ID NO: 2546 - protein, 11 aa, synthetic construct
ALGEGDTEKLS

SEQ ID NO: 2547 - protein, 13 aa, synthetic construct
ALGRAFVRTLYTD

SEQ ID NO: 2548 - protein, 13 aa, synthetic construct
ALGEGGDNPEKLI

SEQ ID NO: 2549 - protein, 14 aa, synthetic construct
ALGEAGLPLLGDTD

SEQ ID NO: 2550 - protein, 9 aa, synthetic construct
ALGEIANWG

SEQ ID NO: 2551 - protein, 14 aa, synthetic construct
DIGELALPGIHTDK

SEQ ID NO: 2552 - protein, 14 aa, synthetic construct
ALGELVWGTTHKLI

SEQ ID NO: 2553 - protein, 13 aa, synthetic construct
ALGEGGDIPDKLI

SEQ ID NO: 2554 - protein, 14 aa, synthetic construct
ALGELVWGTTGKLI

SEQ ID NO: 2555 - protein, 14 aa, synthetic construct
DIGELAWGSYTDKL

SEQ ID NO: 2556 - protein, 14 aa, synthetic construct
ALGEHTGGWTDQLI

SEQ ID NO: 2557 - protein, 13 aa, synthetic construct
ALGVHPSYVLGEL

SEQ ID NO: 2558 - protein, 13 aa, synthetic construct
ALGDVLGDTDKLI

SEQ ID NO: 2559 - protein, 13 aa, synthetic construct
ALGDVLGDTDQLI

SEQ ID NO: 2560 - protein, 14 aa, synthetic construct
ALGELVWGTTDKVI

SEQ ID NO: 2561 - protein, 13 aa, synthetic construct
ALGELVWGTTDKI

SEQ ID NO: 2562 - protein, 12 aa, synthetic construct
ALGELVWGTTDK

SEQ ID NO: 2563 - protein, 14 aa, synthetic construct
ALGELVWGTTDILI

SEQ ID NO: 2564 - protein, 12 aa, synthetic construct
ALGELVSLGYTG

SEQ ID NO: 2565 - protein, 11 aa, synthetic construct
ALGEGDTYKLI

SEQ ID NO: 2566 - protein, 14 aa, synthetic construct
ALGDVVWGTTDKLI

SEQ ID NO: 2567 - protein, 14 aa, synthetic construct
DLGELGDTYPYKLI

SEQ ID NO: 2568 - protein, 13 aa, synthetic construct
ALGELLGNTDKLI

SEQ ID NO: 2569 - protein, 14 aa, synthetic construct
ALGRAFLRTLYADK

SEQ ID NO: 2570 - protein, 12 aa, synthetic construct
ALGDVWIHDQLI

SEQ ID NO: 2571 - protein, 13 aa, synthetic construct
ALGELVGDTDQLI

SEQ ID NO: 2572 - protein, 11 aa, synthetic construct
ALGEADTDKLI

SEQ ID NO: 2573 - protein, 12 aa, synthetic construct
ALGDPGTTINST

SEQ ID NO: 2574 - protein, 14 aa, synthetic construct
ALGEIANWGINSDK

SEQ ID NO: 2575 - protein, 13 aa, synthetic construct
ALGEGGIPPIHSS

SEQ ID NO: 2576 - protein, 14 aa, synthetic construct
ALGQLTGGYADKLI

SEQ ID NO: 2577 - protein, 14 aa, synthetic construct
ALGELVLGDTDTLI

SEQ ID NO: 2578 - protein, 14 aa, synthetic construct
ALGVLGDTYPDKLI

SEQ ID NO: 2579 - protein, 14 aa, synthetic construct
ALGVLAWGSYTDKL

SEQ ID NO: 2580 - protein, 14 aa, synthetic construct
ALGVLGGGYDDKLI

SEQ ID NO: 2581 - protein, 14 aa, synthetic construct
ALGELVLGDTPINS

SEQ ID NO: 2582 - protein, 14 aa, synthetic construct
ALGEIANWGTNTDK

SEQ ID NO: 2583 - protein, 12 aa, synthetic construct
ALGDLWIHDELI

SEQ ID NO: 2584 - protein, 13 aa, synthetic construct
ALGDMGDRSWDTR

SEQ ID NO: 2585 - protein, 13 aa, synthetic construct
ALGDLWGIRSTLI

SEQ ID NO: 2586 - protein, 13 aa, synthetic construct
ALGEGGIPPIKSS

SEQ ID NO: 2587 - protein, 14 aa, synthetic construct
ALGELTGGYAHKLI

SEQ ID NO: 2588 - protein, 14 aa, synthetic construct
ALGEIANWGVNTDK

SEQ ID NO: 2589 - protein, 11 aa, synthetic construct
ALGEGVTDKLI

SEQ ID NO: 2590 - protein, 14 aa, synthetic construct
DLGSAFLRTLYTDK

SEQ ID NO: 2591 - protein, 14 aa, synthetic construct
ALGEIANWRINTDK

SEQ ID NO: 2592 - protein, 14 aa, synthetic construct
ALGEIATWGINTDK

SEQ ID NO: 2593 - protein, 14 aa, synthetic construct
ALGEIANWVINTDK

SEQ ID NO: 2594 - protein, 14 aa, synthetic construct
ALGELVLGDTENLI

SEQ ID NO: 2595 - protein, 13 aa, synthetic construct
ALGEIATWGINTD

SEQ ID NO: 2596 - protein, 13 aa, synthetic construct
ALGELWGMRSKLI

SEQ ID NO: 2597 - protein, 12 aa, synthetic construct
ALGEGGYTDKLI

SEQ ID NO: 2598 - protein, 13 aa, synthetic construct
ALGDLWGRRSQLI

SEQ ID NO: 2599 - protein, 13 aa, synthetic construct
ALGEHPSWGIYTD

SEQ ID NO: 2600 - protein, 14 aa, synthetic construct
ALGEIAYWGRNTDK

SEQ ID NO: 2601 - protein, 10 aa, synthetic construct
ALGELVLGEI

SEQ ID NO: 2602 - protein, 13 aa, synthetic construct
ALGELWGYAVKSS

SEQ ID NO: 2603 - protein, 14 aa, synthetic construct
ALGEIANWGLNTEK

SEQ ID NO: 2604 - protein, 14 aa, synthetic construct
ALGELVRGTTEKLI

SEQ ID NO: 2605 - protein, 13 aa, synthetic construct
ALGEHPNWGIYTD

SEQ ID NO: 2606 - protein, 14 aa, synthetic construct
DLGEIAKWGINTDK

SEQ ID NO: 2607 - protein, 14 aa, synthetic construct
ALGDPFLLGDTDKL

SEQ ID NO: 2608 - protein, 14 aa, synthetic construct
DLGRAFLRTLSTDK

SEQ ID NO: 2609 - protein, 14 aa, synthetic construct
ALGEHPYGGIYTDK

SEQ ID NO: 2610 - protein, 13 aa, synthetic construct
ALGEIAWGSYTDK

SEQ ID NO: 2611 - protein, 13 aa, synthetic construct
ALGDLWGIRRKLI

SEQ ID NO: 2612 - protein, 11 aa, synthetic construct
ALGEIANWGKF

SEQ ID NO: 2613 - protein, 14 aa, synthetic construct
AVGVRRGIRGTDKL

SEQ ID NO: 2614 - protein, 12 aa, synthetic construct
ALGELWIHDHLI

SEQ ID NO: 2615 - protein, 14 aa, synthetic construct
ALGEHPYWGFYTDK

SEQ ID NO: 2616 - protein, 14 aa, synthetic construct
ALGELVLGDTDKPI

SEQ ID NO: 2617 - protein, 13 aa, synthetic construct
ALGELTILPDKLI

SEQ ID NO: 2618 - protein, 14 aa, synthetic construct
ALGEVVWGTTDNLI

SEQ ID NO: 2619 - protein, 14 aa, synthetic construct
ALGEVVWGTTDNII

SEQ ID NO: 2620 - protein, 14 aa, synthetic construct
ALGEVVWGTTEKLI

SEQ ID NO: 2621 - protein, 14 aa, synthetic construct
ALREPGLRLLGDTD

SEQ ID NO: 2622 - protein, 14 aa, synthetic construct
ALGEVVWGTTGKLI

SEQ ID NO: 2623 - protein, 13 aa, synthetic construct
ALGEVPTIPINSS

SEQ ID NO: 2624 - protein, 13 aa, synthetic construct
ALGEVVWESDKLI

SEQ ID NO: 2625 - protein, 14 aa, synthetic construct
ALREPVWGTTDKLI

SEQ ID NO: 2626 - protein, 12 aa, synthetic construct
ALGVPGTTLHSS

SEQ ID NO: 2627 - protein, 13 aa, synthetic construct
ALREPPSYVLWDT

SEQ ID NO: 2628 - protein, 14 aa, synthetic construct
ALGEVVWGTTDKVI

SEQ ID NO: 2629 - protein, 12 aa, synthetic construct
ALGVPGTTIHSS

SEQ ID NO: 2630 - protein, 14 aa, synthetic construct
ALGEVVWGPTVNLI

SEQ ID NO: 2631 - protein, 13 aa, synthetic construct
ALGVPLSYVLGEI

SEQ ID NO: 2632 - protein, 14 aa, synthetic construct
ALGEVVYLGYTDKL

SEQ ID NO: 2633 - protein, 14 aa, synthetic construct
ALREPPSYVLGDTD

SEQ ID NO: 2634 - protein, 14 aa, synthetic construct
ALRELAWGSYTDKL

SEQ ID NO: 2635 - protein, 13 aa, synthetic construct
ALGEVPTVTAKVI

SEQ ID NO: 2636 - protein, 14 aa, synthetic construct
ALRELDLWSYTDKL

SEQ ID NO: 2637 - protein, 13 aa, synthetic construct
ALGEVPTYTDKII

SEQ ID NO: 2638 - protein, 12 aa, synthetic construct
ALGVPGTTINSS

SEQ ID NO: 2639 - protein, 7 aa, synthetic construct
ALGSLYE

SEQ ID NO: 2640 - protein, 12 aa, synthetic construct
ALREPGTTINSS

SEQ ID NO: 2641 - protein, 14 aa, synthetic construct
ALGEVPTLGDLTPI

SEQ ID NO: 2642 - protein, 13 aa, synthetic construct
ALGVPLSYVLWEI

SEQ ID NO: 2643 - protein, 14 aa, synthetic construct
ALGEVVWGPTENLI

SEQ ID NO: 2644 - protein, 13 aa, synthetic construct
ALGSLSGIRSKLI

SEQ ID NO: 2645 - protein, 14 aa, synthetic construct
ALGEVVWGATEKLI

SEQ ID NO: 2646 - protein, 14 aa, synthetic construct
ALRELGGGYDEKLI

SEQ ID NO: 2647 - protein, 14 aa, synthetic construct
ALGEVPTGGYAPIN

SEQ ID NO: 2648 - protein, 12 aa, synthetic construct
ALGVGRGIRGTD

SEQ ID NO: 2649 - protein, 13 aa, synthetic construct
ALGEVWDTPDKLI

SEQ ID NO: 2650 - protein, 14 aa, synthetic construct
ALGSLLPTFRGTDK

SEQ ID NO: 2651 - protein, 14 aa, synthetic construct
ALREVPTFRGTDKL

SEQ ID NO: 2652 - protein, 12 aa, synthetic construct
ALGSLLGYTYKL

SEQ ID NO: 2653 - protein, 14 aa, synthetic construct
ALGVGRGIRGTGKL

SEQ ID NO: 2654 - protein, 13 aa, synthetic construct
ALGEVWGIHSKLI

SEQ ID NO: 2655 - protein, 14 aa, synthetic construct
ALGVPFLLGDTDKL

SEQ ID NO: 2656 - protein, 13 aa, synthetic construct
ALGEVPTDTVTLI

SEQ ID NO: 2657 - protein, 14 aa, synthetic construct
ALREIATWGIYTDK

SEQ ID NO: 2658 - protein, 13 aa, synthetic construct
ALREVTTDTDKLI

SEQ ID NO: 2659 - protein, 8 aa, synthetic construct
ALGVGRGL

SEQ ID NO: 2660 - protein, 13 aa, synthetic construct
ALGEVPTDTVILI

SEQ ID NO: 2661 - protein, 14 aa, synthetic construct
ALRGASWYWGIPDK

SEQ ID NO: 2662 - protein, 14 aa, synthetic construct
ALGEVPTDTTINSS

SEQ ID NO: 2663 - protein, 14 aa, synthetic construct
ALREIANWGINTDK

SEQ ID NO: 2664 - protein, 13 aa, synthetic construct
ALGEVWGILSQII

SEQ ID NO: 2665 - protein, 13 aa, synthetic construct
ALGSLLGDTDKLI

SEQ ID NO: 2666 - protein, 14 aa, synthetic construct
ALGEVPTDTRRNSS

SEQ ID NO: 2667 - protein, 13 aa, synthetic construct
ALREITFLPDKLI

SEQ ID NO: 2668 - protein, 13 aa, synthetic construct
ALREVPTDTDKLL

SEQ ID NO: 2669 - protein, 14 aa, synthetic construct
ALRELALGSYTDKL

SEQ ID NO: 2670 - protein, 11 aa, synthetic construct
ALRELAQTGIH

SEQ ID NO: 2671 - protein, 14 aa, synthetic construct
ALRERTGGYLGSWD

SEQ ID NO: 2672 - protein, 13 aa, synthetic construct
ALGEVPTHTDKIN

SEQ ID NO: 2673 - protein, 7 aa, synthetic construct
ALGEVWG

SEQ ID NO: 2674 - protein, 13 aa, synthetic construct
ALGVGRGIRGTDK

SEQ ID NO: 2675 - protein, 10 aa, synthetic construct
ALGEVPTGTD

SEQ ID NO: 2676 - protein, 14 aa, synthetic construct
ALGVGRGIRGSDKL

SEQ ID NO: 2677 - protein, 13 aa, synthetic construct
ALGEVPTETDQLI

SEQ ID NO: 2678 - protein, 14 aa, synthetic construct
ALGSLLPTYWGTPI

SEQ ID NO: 2679 - protein, 14 aa, synthetic construct
ALRELALPGIHTDK

SEQ ID NO: 2680 - protein, 14 aa, synthetic construct
ALREVALPGIHTGN

SEQ ID NO: 2681 - protein, 13 aa, synthetic construct
ALGSLLPTYWGTP

SEQ ID NO: 2682 - protein, 13 aa, synthetic construct
ALGEVPTDTYQLI

SEQ ID NO: 2683 - protein, 13 aa, synthetic construct
ALGEVPTDTYKLN

SEQ ID NO: 2684 - protein, 13 aa, synthetic construct
ALGEVWGIGSKLI

SEQ ID NO: 2685 - protein, 12 aa, synthetic construct
ALGVPPCYVLGE

SEQ ID NO: 2686 - protein, 13 aa, synthetic construct
ALGEVPTDTYKII

SEQ ID NO: 2687 - protein, 13 aa, synthetic construct
ALGEVPTYTLKII

SEQ ID NO: 2688 - protein, 13 aa, synthetic construct
ALGEVVSLGYTDK

SEQ ID NO: 2689 - protein, 13 aa, synthetic construct
ALRELGDKDDKLI

SEQ ID NO: 2690 - protein, 13 aa, synthetic construct
ALGTLWGIRSKLI

SEQ ID NO: 2691 - protein, 10 aa, synthetic construct
ALGEVTFLPD

SEQ ID NO: 2692 - protein, 13 aa, synthetic construct
ALGEVVGDTDSLF

SEQ ID NO: 2693 - protein, 13 aa, synthetic construct
ALGEVSTDTDKLI

SEQ ID NO: 2694 - protein, 14 aa, synthetic construct
ALGEVVLGDPEKLI

SEQ ID NO: 2695 - protein, 13 aa, synthetic construct
ALGEVVLGDSPLI

SEQ ID NO: 2696 - protein, 12 aa, synthetic construct
ALRELLHTDILI

SEQ ID NO: 2697 - protein, 14 aa, synthetic construct
ALGEVSPSTGGHKL

SEQ ID NO: 2698 - protein, 12 aa, synthetic construct
ALGTAGYTDKLI

SEQ ID NO: 2699 - protein, 14 aa, synthetic construct
ALGEVVLGDTQKLI

SEQ ID NO: 2700 - protein, 14 aa, synthetic construct
ALGEVVLGDTTINS

SEQ ID NO: 2701 - protein, 12 aa, synthetic construct
ALRELLHTDKLI

SEQ ID NO: 2702 - protein, 14 aa, synthetic construct
ALGEVVLWTSLKLI

SEQ ID NO: 2703 - protein, 11 aa, synthetic construct
ALGEVSPFTVV

SEQ ID NO: 2704 - protein, 11 aa, synthetic construct
ALGEVSAFTGG

SEQ ID NO: 2705 - protein, 12 aa, synthetic construct
ALRELLPTDKLI

SEQ ID NO: 2706 - protein, 13 aa, synthetic construct
ALGEVRTDTDKLV

SEQ ID NO: 2707 - protein, 11 aa, synthetic construct
ALGVAPSDDLG

SEQ ID NO: 2708 - protein, 11 aa, synthetic construct
ALGTRGPRSTH

SEQ ID NO: 2709 - protein, 14 aa, synthetic construct
ALGTLVWGTTDKLI

SEQ ID NO: 2710 - protein, 12 aa, synthetic construct
ALGEVVTNDKII

SEQ ID NO: 2711 - protein, 12 aa, synthetic construct
ALRELGSTEKLI

SEQ ID NO: 2712 - protein, 13 aa, synthetic construct
ALGTGGYAGDKHI

SEQ ID NO: 2713 - protein, 14 aa, synthetic construct
ALGEVTGGCAENLI

SEQ ID NO: 2714 - protein, 14 aa, synthetic construct
ALGEVTGGYADNLI

SEQ ID NO: 2715 - protein, 13 aa, synthetic construct
ALRELGGGYDEKL

SEQ ID NO: 2716 - protein, 14 aa, synthetic construct
ALGEVTGGYADQLI

SEQ ID NO: 2717 - protein, 14 aa, synthetic construct
ALRELGNGGYADKL

SEQ ID NO: 2718 - protein, 13 aa, synthetic construct
ALGEVTFLPERLI

SEQ ID NO: 2719 - protein, 12 aa, synthetic construct
ALRELGSTDKLN

SEQ ID NO: 2720 - protein, 13 aa, synthetic construct
ALGTGGIPPINSS

SEQ ID NO: 2721 - protein, 13 aa, synthetic construct
ALGEVTFLPDNVI

SEQ ID NO: 2722 - protein, 13 aa, synthetic construct
ALGEVTIQTDKLI

SEQ ID NO: 2723 - protein, 13 aa, synthetic construct
ALGVPHSYVQGEI

SEQ ID NO: 2724 - protein, 12 aa, synthetic construct
ALGTGGYTENLI

SEQ ID NO: 2725 - protein, 13 aa, synthetic construct
ALGEVTTDTDKLI

SEQ ID NO: 2726 - protein, 8 aa, synthetic construct
ALGTKEEN

SEQ ID NO: 2727 - protein, 13 aa, synthetic construct
ALGEVVGDTAILL

SEQ ID NO: 2728 - protein, 10 aa, synthetic construct
ALGEVVGDTD

SEQ ID NO: 2729 - protein, 12 aa, synthetic construct
ALGVPLSYDLGE

SEQ ID NO: 2730 - protein, 14 aa, synthetic construct
ALGTAFIRTLYTDQ

SEQ ID NO: 2731 - protein, 12 aa, synthetic construct
ALGVPHSYVLGE

SEQ ID NO: 2732 - protein, 14 aa, synthetic construct
ALRELGDTYPDQLI

SEQ ID NO: 2733 - protein, 11 aa, synthetic construct
ALGEVVRCPTT

SEQ ID NO: 2734 - protein, 14 aa, synthetic construct
ALGEVVSLGSTDKL

SEQ ID NO: 2735 - protein, 14 aa, synthetic construct
ALGEVREGDKNNLI

SEQ ID NO: 2736 - protein, 13 aa, synthetic construct
ALGVGGDTPDKLI

SEQ ID NO: 2737 - protein, 13 aa, synthetic construct
ALGVGGDTPEKLI

SEQ ID NO: 2738 - protein, 13 aa, synthetic construct
ALGVGGYAGEKLI

SEQ ID NO: 2739 - protein, 14 aa, synthetic construct
ALGEVTGGYADKII

SEQ ID NO: 2740 - protein, 13 aa, synthetic construct
ALGSVVWGTTDTL

SEQ ID NO: 2741 - protein, 14 aa, synthetic construct
ALGSPSWYWGIPDK

SEQ ID NO: 2742 - protein, 13 aa, synthetic construct
ALGEVREGDKNKL

SEQ ID NO: 2743 - protein, 14 aa, synthetic construct
ALGEVREGDHNKLI

SEQ ID NO: 2744 - protein, 12 aa, synthetic construct
ALGVGGYTDTLI

SEQ ID NO: 2745 - protein, 13 aa, synthetic construct
ALGEVPYYVLWDT

SEQ ID NO: 2746 - protein, 14 aa, synthetic construct
ALGEVVSLGYTYKL

SEQ ID NO: 2747 - protein, 13 aa, synthetic construct
ALREPGLPLLGDT

SEQ ID NO: 2748 - protein, 13 aa, synthetic construct
ALGEVPYRGLHTD

SEQ ID NO: 2749 - protein, 14 aa, synthetic construct
ALGVGRGILGTDKL

SEQ ID NO: 2750 - protein, 12 aa, synthetic construct
ALGVPLSYVLGE

SEQ ID NO: 2751 - protein, 13 aa, synthetic construct
ALGVPHSYELWEI

SEQ ID NO: 2752 - protein, 14 aa, synthetic construct
ALRELVWGTIDKLI

SEQ ID NO: 2753 - protein, 13 aa, synthetic construct
ALRELTFLPDQLI

SEQ ID NO: 2754 - protein, 14 aa, synthetic construct
ALGVATGGWTESLI

SEQ ID NO: 2755 - protein, 11 aa, synthetic construct
ALRELSPFTGG

SEQ ID NO: 2756 - protein, 13 aa, synthetic construct
ALGEVRTDTDKII

SEQ ID NO: 2757 - protein, 7 aa, synthetic construct
ALGVGDT

SEQ ID NO: 2758 - protein, 13 aa, synthetic construct
ALRELTFLPDKLI

SEQ ID NO: 2759 - protein, 13 aa, synthetic construct
ALGEVRTDTDILI

SEQ ID NO: 2760 - protein, 9 aa, synthetic construct
ALGEVVMWD

SEQ ID NO: 2761 - protein, 13 aa, synthetic construct
ALRELTFLYWGNF

SEQ ID NO: 2762 - protein, 14 aa, synthetic construct
ALGEVREGDTDKLI

SEQ ID NO: 2763 - protein, 13 aa, synthetic construct
ALGEVRPDTDKLI

SEQ ID NO: 2764 - protein, 14 aa, synthetic construct
ALRELTGGYADKLI

SEQ ID NO: 2765 - protein, 13 aa, synthetic construct
ALGEVRKDTDKLI

SEQ ID NO: 2766 - protein, 14 aa, synthetic construct
ALRELTGGYSDKII

SEQ ID NO: 2767 - protein, 14 aa, synthetic construct
ALGEVREGVKNKLI

SEQ ID NO: 2768 - protein, 14 aa, synthetic construct
ALRELVLGDPEKLI

SEQ ID NO: 2769 - protein, 10 aa, synthetic construct
ALGEVREGEI

SEQ ID NO: 2770 - protein, 14 aa, synthetic construct
ALRGPSWSWGIPDK

SEQ ID NO: 2771 - protein, 12 aa, synthetic construct
ALGQLGDTYPQT

SEQ ID NO: 2772 - protein, 14 aa, synthetic construct
ALRGPSWYWGIPDK

SEQ ID NO: 2773 - protein, 13 aa, synthetic construct
ALGEVLLGDSPMI

SEQ ID NO: 2774 - protein, 14 aa, synthetic construct
ALGEVLLGTPINSS

SEQ ID NO: 2775 - protein, 14 aa, synthetic construct
ALVEIANWGIKTDK

SEQ ID NO: 2776 - protein, 12 aa, synthetic construct
ALGEVLLGFAPD

SEQ ID NO: 2777 - protein, 14 aa, synthetic construct
ALGEVLLGETDKLI

SEQ ID NO: 2778 - protein, 13 aa, synthetic construct
ALGEVLLGESPLI

SEQ ID NO: 2779 - protein, 13 aa, synthetic construct
ALGEVLLGDTPLI

SEQ ID NO: 2780 - protein, 14 aa, synthetic construct
ALGEVLLGDTLATA

SEQ ID NO: 2781 - protein, 12 aa, synthetic construct
ALGVIGSTDKLI

SEQ ID NO: 2782 - protein, 14 aa, synthetic construct
ALGEVLLGDSSWDT

SEQ ID NO: 2783 - protein, 13 aa, synthetic construct
ALGVIPGDTDKII

SEQ ID NO: 2784 - protein, 13 aa, synthetic construct
ALGEVLLGDSPPI

SEQ ID NO: 2785 - protein, 14 aa, synthetic construct
ALGVLRAGDRNNLI

SEQ ID NO: 2786 - protein, 13 aa, synthetic construct
ALGEVPKGTDKLI

SEQ ID NO: 2787 - protein, 14 aa, synthetic construct
ALVEIANWGIYTDK

SEQ ID NO: 2788 - protein, 12 aa, synthetic construct
ALGEVLLGDSPL

SEQ ID NO: 2789 - protein, 13 aa, synthetic construct
ALGVLGDKDDKIV

SEQ ID NO: 2790 - protein, 14 aa, synthetic construct
ALGVLPYRRIRNDK

SEQ ID NO: 2791 - protein, 13 aa, synthetic construct
ALGEVLLGDSHLI

SEQ ID NO: 2792 - protein, 13 aa, synthetic construct
ALGVLGDRSWDTR

SEQ ID NO: 2793 - protein, 14 aa, synthetic construct
ALGEVLLGDNDDKL

SEQ ID NO: 2794 - protein, 14 aa, synthetic construct
ALGEVLLGDKDDKL

SEQ ID NO: 2795 - protein, 12 aa, synthetic construct
ALGEVLLGDGPI

SEQ ID NO: 2796 - protein, 14 aa, synthetic construct
ALGEVLLADSPAIN

SEQ ID NO: 2797 - protein, 12 aa, synthetic construct
ALGEVLHIAKII

SEQ ID NO: 2798 - protein, 14 aa, synthetic construct
ALGVIANWGINTEK

SEQ ID NO: 2799 - protein, 14 aa, synthetic construct
ALVEHTGGWTDKLI

SEQ ID NO: 2800 - protein, 14 aa, synthetic construct
ALGVLREGDKNKLI

SEQ ID NO: 2801 - protein, 14 aa, synthetic construct
ALVEHPYWGIYTEK

SEQ ID NO: 2802 - protein, 13 aa, synthetic construct
ALGEVPKETDKLI

SEQ ID NO: 2803 - protein, 13 aa, synthetic construct
ALGEVPKDTYKLI

SEQ ID NO: 2804 - protein, 13 aa, synthetic construct
ALGVLRGIRRQLI

SEQ ID NO: 2805 - protein, 11 aa, synthetic construct
ALVEGDTHKII

SEQ ID NO: 2806 - protein, 11 aa, synthetic construct
ALVEGDTHKLI

SEQ ID NO: 2807 - protein, 13 aa, synthetic construct
ALGEVPKDTSKLI

SEQ ID NO: 2808 - protein, 13 aa, synthetic construct
ALGEVPKDTDKLN

SEQ ID NO: 2809 - protein, 14 aa, synthetic construct
ALGVLRGIRGTDTL

SEQ ID NO: 2810 - protein, 13 aa, synthetic construct
ALVEGGATPDKLI

SEQ ID NO: 2811 - protein, 13 aa, synthetic construct
ALGEVPKDTDKHI

SEQ ID NO: 2812 - protein, 14 aa, synthetic construct
ALGVHPYWGIYTDK

SEQ ID NO: 2813 - protein, 14 aa, synthetic construct
ALGEVLQGDSPAIN

SEQ ID NO: 2814 - protein, 11 aa, synthetic construct
ALGVHPYWGTF

SEQ ID NO: 2815 - protein, 13 aa, synthetic construct
ALGEVLMWYSTLI

SEQ ID NO: 2816 - protein, 13 aa, synthetic construct
ALVEGGDTPDTLI

SEQ ID NO: 2817 - protein, 12 aa, synthetic construct
ALGEVLMGDGPI

SEQ ID NO: 2818 - protein, 13 aa, synthetic construct
ALGEVLLWDSPLI

SEQ ID NO: 2819 - protein, 14 aa, synthetic construct
ALGEVLLLGDTEKL

SEQ ID NO: 2820 - protein, 12 aa, synthetic construct
ALVEGGIPQINS

SEQ ID NO: 2821 - protein, 14 aa, synthetic construct
ALGVHRGIRGTDKL

SEQ ID NO: 2822 - protein, 14 aa, synthetic construct
ALGVLREGDSSWDT

SEQ ID NO: 2823 - protein, 14 aa, synthetic construct
ALGEVLLGTTINSS

SEQ ID NO: 2824 - protein, 14 aa, synthetic construct
ALGVIANWGINTDK

SEQ ID NO: 2825 - protein, 13 aa, synthetic construct
ALGVLGDSSWDTR

SEQ ID NO: 2826 - protein, 14 aa, synthetic construct
ALGEVLGDTTINSS

SEQ ID NO: 2827 - protein, 13 aa, synthetic construct
ALGEVLGDTHKLI

SEQ ID NO: 2828 - protein, 14 aa, synthetic construct
ALGVLGGIKRPDIL

SEQ ID NO: 2829 - protein, 12 aa, synthetic construct
ALGVLGSTDKLF

SEQ ID NO: 2830 - protein, 12 aa, synthetic construct
ALGVLLHTDKLI

SEQ ID NO: 2831 - protein, 12 aa, synthetic construct
ALVEIINTDKLI

SEQ ID NO: 2832 - protein, 14 aa, synthetic construct
ALVEIPYRAIGTDK

SEQ ID NO: 2833 - protein, 13 aa, synthetic construct
ALGEVGYQDDKLI

SEQ ID NO: 2834 - protein, 11 aa, synthetic construct
ALVEISPFTGG

SEQ ID NO: 2835 - protein, 13 aa, synthetic construct
ALVEITFIPDKLN

SEQ ID NO: 2836 - protein, 13 aa, synthetic construct
ALVEITFLPDKLI

SEQ ID NO: 2837 - protein, 14 aa, synthetic construct
ALGVLGTGGYADKL

SEQ ID NO: 2838 - protein, 13 aa, synthetic construct
ALGVLLGGTNKLI

SEQ ID NO: 2839 - protein, 12 aa, synthetic construct
ALGEVGVGYYDK

SEQ ID NO: 2840 - protein, 12 aa, synthetic construct
ALGVLHYSCGLN

SEQ ID NO: 2841 - protein, 11 aa, synthetic construct
ALGEVGSTPNK

SEQ ID NO: 2842 - protein, 13 aa, synthetic construct
ALVEITLKTHKLI

SEQ ID NO: 2843 - protein, 12 aa, synthetic construct
ALGEVGSTEQLI

SEQ ID NO: 2844 - protein, 12 aa, synthetic construct
ALGEVGSTEKLI

SEQ ID NO: 2845 - protein, 13 aa, synthetic construct
ALVEITLLPYKLI

SEQ ID NO: 2846 - protein, 13 aa, synthetic construct
ALGVLLGATDNLM

SEQ ID NO: 2847 - protein, 14 aa, synthetic construct
ALVEIVLGDTDILI

SEQ ID NO: 2848 - protein, 14 aa, synthetic construct
ALGEVGSTEKIHYG

SEQ ID NO: 2849 - protein, 14 aa, synthetic construct
ALVEIVSLGYTDKL

SEQ ID NO: 2850 - protein, 12 aa, synthetic construct
ALVEIVSTDKLI

SEQ ID NO: 2851 - protein, 12 aa, synthetic construct
ALGEVGSTDRLI

SEQ ID NO: 2852 - protein, 14 aa, synthetic construct
ALGVLGGYARTDKL

SEQ ID NO: 2853 - protein, 11 aa, synthetic construct
ALGEVGYTDKL

SEQ ID NO: 2854 - protein, 13 aa, synthetic construct
ALGEVLGDTEKLF

SEQ ID NO: 2855 - protein, 14 aa, synthetic construct
ALGVLLPTFRGTDK

SEQ ID NO: 2856 - protein, 13 aa, synthetic construct
ALGVLPSYVLGEI

SEQ ID NO: 2857 - protein, 13 aa, synthetic construct
ALGEVLGDTDKLN

SEQ ID NO: 2858 - protein, 12 aa, synthetic construct
ALGVLGDTDKLI

SEQ ID NO: 2859 - protein, 12 aa, synthetic construct
ALGEVLGDTDKL

SEQ ID NO: 2860 - protein, 13 aa, synthetic construct
ALGEVLGDTAKLI

SEQ ID NO: 2861 - protein, 13 aa, synthetic construct
ALGEVLGDPDTLI

SEQ ID NO: 2862 - protein, 14 aa, synthetic construct
ALVEIEWGIRGTDK

SEQ ID NO: 2863 - protein, 13 aa, synthetic construct
ALGEVHTDTYKLI

SEQ ID NO: 2864 - protein, 14 aa, synthetic construct
ALGVLGDTYPEKLI

SEQ ID NO: 2865 - protein, 13 aa, synthetic construct
ALGEVHTDTHKLI

SEQ ID NO: 2866 - protein, 14 aa, synthetic construct
ALVEIFIEGDTDLI

SEQ ID NO: 2867 - protein, 13 aa, synthetic construct
ALGEVHTDTEKLI

SEQ ID NO: 2868 - protein, 12 aa, synthetic construct
ALGVLLSTDNLI

SEQ ID NO: 2869 - protein, 13 aa, synthetic construct
ALGEVHTDTDRLI

SEQ ID NO: 2870 - protein, 14 aa, synthetic construct
ALVEIFILEDTDKL

SEQ ID NO: 2871 - protein, 13 aa, synthetic construct
ALGEVHTDTDNLI

SEQ ID NO: 2872 - protein, 13 aa, synthetic construct
ALGVLGGCARTDK

SEQ ID NO: 2873 - protein, 13 aa, synthetic construct
ALGEVHTDTDKLN

SEQ ID NO: 2874 - protein, 13 aa, synthetic construct
ALGEVHTDTDKII

SEQ ID NO: 2875 - protein, 13 aa, synthetic construct
ALVEIFILGDTDK

SEQ ID NO: 2876 - protein, 14 aa, synthetic construct
ALGEVGYTDPDKLI

SEQ ID NO: 2877 - protein, 14 aa, synthetic construct
ALGVLGGGYYDKLI

SEQ ID NO: 2878 - protein, 13 aa, synthetic construct
ALGVLGGIGSKLI

SEQ ID NO: 2879 - protein, 11 aa, synthetic construct
ALVEGDTDKLL

SEQ ID NO: 2880 - protein, 13 aa, synthetic construct
ALGEVPKYTDQLI

SEQ ID NO: 2881 - protein, 14 aa, synthetic construct
ALGEVPTDTRINSS

SEQ ID NO: 2882 - protein, 13 aa, synthetic construct
ALGEVPTDTDKLT

SEQ ID NO: 2883 - protein, 14 aa, synthetic construct
ALGVLVWGTTDKLI

SEQ ID NO: 2884 - protein, 13 aa, synthetic construct
ALGVPPDYVLGEI

SEQ ID NO: 2885 - protein, 14 aa, synthetic construct
ALGVLVWGTPINSS

SEQ ID NO: 2886 - protein, 13 aa, synthetic construct
ALGEVPTDTDKVM

SEQ ID NO: 2887 - protein, 14 aa, synthetic construct
ALVALLTTFRCTDK

SEQ ID NO: 2888 - protein, 13 aa, synthetic construct
ALVALLTTFRGTD

SEQ ID NO: 2889 - protein, 7 aa, synthetic construct
ALGVHPS

SEQ ID NO: 2890 - protein, 13 aa, synthetic construct
ALGEVPTDTDKVI

SEQ ID NO: 2891 - protein, 13 aa, synthetic construct
ALGEVPTDTDKLY

SEQ ID NO: 2892 - protein, 13 aa, synthetic construct
ALVALSGGYADNL

SEQ ID NO: 2893 - protein, 13 aa, synthetic construct
ALGVHPSHVLGEI

SEQ ID NO: 2894 - protein, 13 aa, synthetic construct
ALGVHPSNVLGEI

SEQ ID NO: 2895 - protein, 14 aa, synthetic construct
ALGEVPLGDTDKLI

SEQ ID NO: 2896 - protein, 14 aa, synthetic construct
ALGVHPSYGGYTPI

SEQ ID NO: 2897 - protein, 12 aa, synthetic construct
ALVAVGYTDKLI

SEQ ID NO: 2898 - protein, 13 aa, synthetic construct
ALGVHPSYLLGEI

SEQ ID NO: 2899 - protein, 12 aa, synthetic construct
ALGVLVSTDKLI

SEQ ID NO: 2900 - protein, 12 aa, synthetic construct
ALVDLADTDQLI

SEQ ID NO: 2901 - protein, 9 aa, synthetic construct
ALVDLALPG

SEQ ID NO: 2902 - protein, 14 aa, synthetic construct
ALGVHPSYVLCTPI

SEQ ID NO: 2903 - protein, 13 aa, synthetic construct
ALGEVPTDTDKLL

SEQ ID NO: 2904 - protein, 14 aa, synthetic construct
ALGVLVLGDTYKLI

SEQ ID NO: 2905 - protein, 14 aa, synthetic construct
ALGVLVLGDTDKLI

SEQ ID NO: 2906 - protein, 14 aa, synthetic construct
ALVDLAWGSNTHKL

SEQ ID NO: 2907 - protein, 13 aa, synthetic construct
ALGVLWGIRSKLI

SEQ ID NO: 2908 - protein, 13 aa, synthetic construct
ALGVHPFYVLGEI

SEQ ID NO: 2909 - protein, 13 aa, synthetic construct
ALGEVPTDTDQLY

SEQ ID NO: 2910 - protein, 14 aa, synthetic construct
ALVALLPTFRCTDK

SEQ ID NO: 2911 - protein, 12 aa, synthetic construct
ALGEVPTDTRAT

SEQ ID NO: 2912 - protein, 13 aa, synthetic construct
ALRVPPSYVLGEI

SEQ ID NO: 2913 - protein, 10 aa, synthetic construct
ALRYQNNTTD

SEQ ID NO: 2914 - protein, 12 aa, synthetic construct
ALSAGGYTDKLN

SEQ ID NO: 2915 - protein, 14 aa, synthetic construct
ALGVGSGIRGTDKL

SEQ ID NO: 2916 - protein, 13 aa, synthetic construct
ALGEVPTDTQKLI

SEQ ID NO: 2917 - protein, 13 aa, synthetic construct
ALGEVPTDTHHLI

SEQ ID NO: 2918 - protein, 6 aa, synthetic construct
ALGVPA

SEQ ID NO: 2919 - protein, 13 aa, synthetic construct
ALGEVPTDTGRLI

SEQ ID NO: 2920 - protein, 14 aa, synthetic construct
ALSELGNGGYADKL

SEQ ID NO: 2921 - protein, 8 aa, synthetic construct
ALGVHHSY

SEQ ID NO: 2922 - protein, 13 aa, synthetic construct
ALGEVPTDTEKLV

SEQ ID NO: 2923 - protein, 14 aa, synthetic construct
ALTLRRGIRGTDKL

SEQ ID NO: 2924 - protein, 13 aa, synthetic construct
ALGEVPTDTEKLF

SEQ ID NO: 2925 - protein, 12 aa, synthetic construct
ALGEVPTDTEKL

SEQ ID NO: 2926 - protein, 10 aa, synthetic construct
ALVAFIPYWG

SEQ ID NO: 2927 - protein, 13 aa, synthetic construct
ALGEVPTDTEKII

SEQ ID NO: 2928 - protein, 13 aa, synthetic construct
ALGEVPTDTEILI

SEQ ID NO: 2929 - protein, 12 aa, synthetic construct
ALGVLWIHDKLI

SEQ ID NO: 2930 - protein, 13 aa, synthetic construct
ALGVLWGIRSTLI

SEQ ID NO: 2931 - protein, 13 aa, synthetic construct
ALVAGGYAGEKLI

SEQ ID NO: 2932 - protein, 13 aa, synthetic construct
ALGVHHTYVLGEI

SEQ ID NO: 2933 - protein, 13 aa, synthetic construct
ALGVHPAYVLGEI

SEQ ID NO: 2934 - protein, 13 aa, synthetic construct
ALVDLGDKDLKLI

SEQ ID NO: 2935 - protein, 12 aa, synthetic construct
ALGEVPTDTDKL

SEQ ID NO: 2936 - protein, 13 aa, synthetic construct
ALGEVPTDTDKIN

SEQ ID NO: 2937 - protein, 13 aa, synthetic construct
ALVDLRGDTDHIF

SEQ ID NO: 2938 - protein, 13 aa, synthetic construct
ALVDLTFLPDQLI

SEQ ID NO: 2939 - protein, 14 aa, synthetic construct
ALGVLRMIRVADKL

SEQ ID NO: 2940 - protein, 13 aa, synthetic construct
ALVDLTFLPSKLI

SEQ ID NO: 2941 - protein, 12 aa, synthetic construct
ALVDLWIQDKRI

SEQ ID NO: 2942 - protein, 13 aa, synthetic construct
ALGEVPTATDNLI

SEQ ID NO: 2943 - protein, 13 aa, synthetic construct
ALGVHPTYVLGKF

SEQ ID NO: 2944 - protein, 13 aa, synthetic construct
ALGEVPTATDKLI

SEQ ID NO: 2945 - protein, 14 aa, synthetic construct
ALGVLRGMRGTDQL

SEQ ID NO: 2946 - protein, 13 aa, synthetic construct
ALGVHPTYVLREI

SEQ ID NO: 2947 - protein, 13 aa, synthetic construct
ALGEVPSETDTLI

SEQ ID NO: 2948 - protein, 13 aa, synthetic construct
ALGEVPQETDKLI

SEQ ID NO: 2949 - protein, 13 aa, synthetic construct
ALVDMGDRDDQLI

SEQ ID NO: 2950 - protein, 14 aa, synthetic construct
ALVDQGLPLLGDTD

SEQ ID NO: 2951 - protein, 13 aa, synthetic construct
ALGEVPQDTDKLI

SEQ ID NO: 2952 - protein, 13 aa, synthetic construct
ALGEVPPYTDKLI

SEQ ID NO: 2953 - protein, 13 aa, synthetic construct
ALGEVPPDTEKLI

SEQ ID NO: 2954 - protein, 13 aa, synthetic construct
ALGEVPPDTDQLV

SEQ ID NO: 2955 - protein, 14 aa, synthetic construct
ALVDVGGGYDDKLI

SEQ ID NO: 2956 - protein, 13 aa, synthetic construct
ALGEVPPDTDKFI

SEQ ID NO: 2957 - protein, 13 aa, synthetic construct
ALGEVPPDTDILI

SEQ ID NO: 2958 - protein, 13 aa, synthetic construct
ALGEVPPDTAQLI

SEQ ID NO: 2959 - protein, 11 aa, synthetic construct
ALVEGDNDKLI

SEQ ID NO: 2960 - protein, 13 aa, synthetic construct
ALGVHPYNVLRTL

SEQ ID NO: 2961 - protein, 13 aa, synthetic construct
ALGEVPTATEKLI

SEQ ID NO: 2962 - protein, 14 aa, synthetic construct
ALVDLREGEKYKLI

SEQ ID NO: 2963 - protein, 13 aa, synthetic construct
ALVDLGDSSWDTR

SEQ ID NO: 2964 - protein, 14 aa, synthetic construct
ALVDLPYRGIRTDK

SEQ ID NO: 2965 - protein, 13 aa, synthetic construct
ALGEVPTDTDKHN

SEQ ID NO: 2966 - protein, 13 aa, synthetic construct
ALGEVPTDTDKHF

SEQ ID NO: 2967 - protein, 13 aa, synthetic construct
ALGEVPTDTDKFI

SEQ ID NO: 2968 - protein, 13 aa, synthetic construct
ALGVHPSYVQGEI

SEQ ID NO: 2969 - protein, 12 aa, synthetic construct
ALVDLGDTDKLI

SEQ ID NO: 2970 - protein, 10 aa, synthetic construct
ALGEVPTDTD

SEQ ID NO: 2971 - protein, 13 aa, synthetic construct
ALGEVPTDTAQLI

SEQ ID NO: 2972 - protein, 14 aa, synthetic construct
ALVDLGGYLGSWDT

SEQ ID NO: 2973 - protein, 13 aa, synthetic construct
ALGVLTFLPDKII

SEQ ID NO: 2974 - protein, 13 aa, synthetic construct
ALGVHPTSVDGEI

SEQ ID NO: 2975 - protein, 13 aa, synthetic construct
ALGEVPTDTAKLN

SEQ ID NO: 2976 - protein, 9 aa, synthetic construct
ALGEVPTDT

SEQ ID NO: 2977 - protein, 13 aa, synthetic construct
ALGVLTFLPDHLI

SEQ ID NO: 2978 - protein, 12 aa, synthetic construct
ALVDLGSTDKLI

SEQ ID NO: 2979 - protein, 13 aa, synthetic construct
ALGVHPTYVLGEI

SEQ ID NO: 2980 - protein, 14 aa, synthetic construct
ALVDLGTGGYADKL

SEQ ID NO: 2981 - protein, 13 aa, synthetic construct
ALGEVPTDPEKLI

SEQ ID NO: 2982 - protein, 6 aa, synthetic construct
ALGVLS

SEQ ID NO: 2983 - protein, 13 aa, synthetic construct
ALVDLLGDTDKPI

SEQ ID NO: 2984 - protein, 13 aa, synthetic construct
ALGEVPTDPATLI

SEQ ID NO: 2985 - protein, 11 aa, synthetic construct
ALVDLLHTDKL

SEQ ID NO: 2986 - protein, 13 aa, synthetic construct
ALGEVPTDPALVI

SEQ ID NO: 2987 - protein, 14 aa, synthetic construct
ALVDLPYRGILGLL

SEQ ID NO: 2988 - protein, 13 aa, synthetic construct
ALGEVWGIRSHLI

SEQ ID NO: 2989 - protein, 10 aa, synthetic construct
ALGRSEEKTT

SEQ ID NO: 2990 - protein, 13 aa, synthetic construct
ALGSLGDSSWDTR

SEQ ID NO: 2991 - protein, 14 aa, synthetic construct
ALGRAFLHTLYTDK

SEQ ID NO: 2992 - protein, 13 aa, synthetic construct
ALGRACLRTMYTD

SEQ ID NO: 2993 - protein, 14 aa, synthetic construct
ALGRACLRTQNTDK

SEQ ID NO: 2994 - protein, 10 aa, synthetic construct
ALGRAFFLTL

SEQ ID NO: 2995 - protein, 14 aa, synthetic construct
ALGKHPYWGIYTDK

SEQ ID NO: 2996 - protein, 11 aa, synthetic construct
ALGKGTPINSS

SEQ ID NO: 2997 - protein, 14 aa, synthetic construct
ALGRAFFRTLYTDK

SEQ ID NO: 2998 - protein, 14 aa, synthetic construct
ALGRAFHRTLYTDK

SEQ ID NO: 2999 - protein, 14 aa, synthetic construct
ALGRAFILTLSTDK

SEQ ID NO: 3000 - protein, 13 aa, synthetic construct
ALGRAFILTLYTD

SEQ ID NO: 3001 - protein, 14 aa, synthetic construct
ALGVRRGIRGTYKL

SEQ ID NO: 3002 - protein, 13 aa, synthetic construct
ALGVRRGIRINSS

SEQ ID NO: 3003 - protein, 14 aa, synthetic construct
ALGRAFILTRTTDQ

SEQ ID NO: 3004 - protein, 13 aa, synthetic construct
ALGVPPSYVLGEF

SEQ ID NO: 3005 - protein, 14 aa, synthetic construct
ALGHLVWGTTEKLI

SEQ ID NO: 3006 - protein, 13 aa, synthetic construct
ALGRAFIRTLNTA

SEQ ID NO: 3007 - protein, 14 aa, synthetic construct
ALGHLGDTYPEKLI

SEQ ID NO: 3008 - protein, 14 aa, synthetic construct
ALGRAFIRTLSTDK

SEQ ID NO: 3009 - protein, 14 aa, synthetic construct
ALGHLEWGIRGTDK

SEQ ID NO: 3010 - protein, 14 aa, synthetic construct
ALGHLAWGSYTDKL

SEQ ID NO: 3011 - protein, 14 aa, synthetic construct
ALGVRRGIRRGDKL

SEQ ID NO: 3012 - protein, 12 aa, synthetic construct
ALGRAFIRTLYT

SEQ ID NO: 3013 - protein, 14 aa, synthetic construct
ALGRAFIRTLYTEK

SEQ ID NO: 3014 - protein, 13 aa, synthetic construct
ALGVRRGIRRNSS

SEQ ID NO: 3015 - protein, 14 aa, synthetic construct
ALGKHTYWGIYTDK

SEQ ID NO: 3016 - protein, 13 aa, synthetic construct
ALGKIANWGINTD

SEQ ID NO: 3017 - protein, 14 aa, synthetic construct
ALGKIVLGDTDKLI

SEQ ID NO: 3018 - protein, 13 aa, synthetic construct
ALGKLLGDTDTLI

SEQ ID NO: 3019 - protein, 14 aa, synthetic construct
ALGKLVQGDKDKLI

SEQ ID NO: 3020 - protein, 13 aa, synthetic construct
ALGKLTFLPDTLI

SEQ ID NO: 3021 - protein, 13 aa, synthetic construct
ALGQVPTDTDKLI

SEQ ID NO: 3022 - protein, 13 aa, synthetic construct
ALGKLTFLPDKLI

SEQ ID NO: 3023 - protein, 14 aa, synthetic construct
ALGKLREWDKNKLI

SEQ ID NO: 3024 - protein, 14 aa, synthetic construct
ALGKLREGDNNILF

SEQ ID NO: 3025 - protein, 14 aa, synthetic construct
ALGKLREGDKNKLI

SEQ ID NO: 3026 - protein, 14 aa, synthetic construct
ALGQVTGGNADKVI

SEQ ID NO: 3027 - protein, 14 aa, synthetic construct
ALGKLPTGGETPIN

SEQ ID NO: 3028 - protein, 12 aa, synthetic construct
ALGKLLHTDKLI

SEQ ID NO: 3029 - protein, 13 aa, synthetic construct
ALGKLLGDTDQLI

SEQ ID NO: 3030 - protein, 14 aa, synthetic construct
ALGKLFLLGDTDKL

SEQ ID NO: 3031 - protein, 14 aa, synthetic construct
ALGKLGNGGYADKL

SEQ ID NO: 3032 - protein, 13 aa, synthetic construct
ALGVPPSYVLGGI

SEQ ID NO: 3033 - protein, 14 aa, synthetic construct
ALGRACIRTQNTDK

SEQ ID NO: 3034 - protein, 14 aa, synthetic construct
ALGKLGGGYDEKLI

SEQ ID NO: 3035 - protein, 10 aa, synthetic construct
ALGRACLRTL

SEQ ID NO: 3036 - protein, 14 aa, synthetic construct
ALGKLGGGYDDKLI

SEQ ID NO: 3037 - protein, 14 aa, synthetic construct
ALGKLGDTYPDKLI

SEQ ID NO: 3038 - protein, 14 aa, synthetic construct
ALGRACLRTLNTDK

SEQ ID NO: 3039 - protein, 14 aa, synthetic construct
ALGKLGDTYPDKII

SEQ ID NO: 3040 - protein, 14 aa, synthetic construct
ALGVPPSYVLGETL

SEQ ID NO: 3041 - protein, 14 aa, synthetic construct
ALGRAFLCTLYTDK

SEQ ID NO: 3042 - protein, 14 aa, synthetic construct
ALGHHVLGDTDKLI

SEQ ID NO: 3043 - protein, 14 aa, synthetic construct
ALGGPSWYWCIHDK

SEQ ID NO: 3044 - protein, 13 aa, synthetic construct
ALGRAFLLPLSTD

SEQ ID NO: 3045 - protein, 14 aa, synthetic construct
ALGGPSWYWVIPDK

SEQ ID NO: 3046 - protein, 14 aa, synthetic construct
ALGGPSWYWGVPDK

SEQ ID NO: 3047 - protein, 14 aa, synthetic construct
ALGRAFLRTLCTDQ

SEQ ID NO: 3048 - protein, 12 aa, synthetic construct
ALGGPSWYWGTP

SEQ ID NO: 3049 - protein, 11 aa, synthetic construct
ALGGPSWYWGT

SEQ ID NO: 3050 - protein, 14 aa, synthetic construct
ALGRAFLRTLFTDK

SEQ ID NO: 3051 - protein, 13 aa, synthetic construct
ALGGPSWYWGRPD

SEQ ID NO: 3052 - protein, 14 aa, synthetic construct
ALGGPSWYWGRAPG

SEQ ID NO: 3053 - protein, 14 aa, synthetic construct
ALGVRRGVRGTDKL

SEQ ID NO: 3054 - protein, 14 aa, synthetic construct
ALGRAFLRTLKTDK

SEQ ID NO: 3055 - protein, 14 aa, synthetic construct
ALGRAFLRTLNTDE

SEQ ID NO: 3056 - protein, 12 aa, synthetic construct
ALGGPSWYWGLP

SEQ ID NO: 3057 - protein, 14 aa, synthetic construct
ALGGPSWYWGLHDK

SEQ ID NO: 3058 - protein, 14 aa, synthetic construct
ALGGPSWYWGKPDK

SEQ ID NO: 3059 - protein, 13 aa, synthetic construct
ALGGPSWYWGITD

SEQ ID NO: 3060 - protein, 14 aa, synthetic construct
ALGGPSWYWGIRTD

SEQ ID NO: 3061 - protein, 14 aa, synthetic construct
ALGRAFLRTLNTEK

SEQ ID NO: 3062 - protein, 14 aa, synthetic construct
ALGRAFLRTLSTDQ

SEQ ID NO: 3063 - protein, 13 aa, synthetic construct
ALGRAFLRTLYAD

SEQ ID NO: 3064 - protein, 14 aa, synthetic construct
ALGRAFLRTLYDDK

SEQ ID NO: 3065 - protein, 14 aa, synthetic construct
ALGRAFLRTLYNDK

SEQ ID NO: 3066 - protein, 14 aa, synthetic construct
ALGRAFLRTLYPIN

SEQ ID NO: 3067 - protein, 12 aa, synthetic construct
ALGGPSWYWEIP

SEQ ID NO: 3068 - protein, 14 aa, synthetic construct
ALGVRRGRRGADKL

SEQ ID NO: 3069 - protein, 14 aa, synthetic construct
ALGGPSWYWVKPDK

SEQ ID NO: 3070 - protein, 14 aa, synthetic construct
ALGGPSYVLGDTDK

SEQ ID NO: 3071 - protein, 14 aa, synthetic construct
ALGVRRGIRTDQLI

SEQ ID NO: 3072 - protein, 12 aa, synthetic construct
ALGGYGGAINSS

SEQ ID NO: 3073 - protein, 13 aa, synthetic construct
ALGGVPTDTDKLN

SEQ ID NO: 3074 - protein, 14 aa, synthetic construct
ALGRAFLLTLSTDK

SEQ ID NO: 3075 - protein, 14 aa, synthetic construct
ALGGTSWYWGIPDK

SEQ ID NO: 3076 - protein, 14 aa, synthetic construct
ALGVPPSYVLGDIP

SEQ ID NO: 3077 - protein, 12 aa, synthetic construct
ALGGTSWAWGLP

SEQ ID NO: 3078 - protein, 14 aa, synthetic construct
ALGVRRGIRTDKLI

SEQ ID NO: 3079 - protein, 11 aa, synthetic construct
ALGGSTPINSS

SEQ ID NO: 3080 - protein, 13 aa, synthetic construct
ALGRAFLLTLYTD

SEQ ID NO: 3081 - protein, 13 aa, synthetic construct
ALGRAFLRSLYTD

SEQ ID NO: 3082 - protein, 14 aa, synthetic construct
ALGVRRGIRVTDKL

SEQ ID NO: 3083 - protein, 14 aa, synthetic construct
ALGGPTCSLVLADK

SEQ ID NO: 3084 - protein, 13 aa, synthetic construct
ALGRAFLRTGGNS

SEQ ID NO: 3085 - protein, 14 aa, synthetic construct
ALGGRRGIRRTDKL

SEQ ID NO: 3086 - protein, 13 aa, synthetic construct
ALGRAFLRTLCTD

SEQ ID NO: 3087 - protein, 14 aa, synthetic construct
ALGGRRGIRGTDKL

SEQ ID NO: 3088 - protein, 14 aa, synthetic construct
ALGVRRGKPGTDKL

SEQ ID NO: 3089 - protein, 14 aa, synthetic construct
ALGGPTWYCGIPDK

SEQ ID NO: 3090 - protein, 14 aa, synthetic construct
ALGGPTWSWGITDQ

SEQ ID NO: 3091 - protein, 13 aa, synthetic construct
ALGGPTWSWGIPD

SEQ ID NO: 3092 - protein, 14 aa, synthetic construct
ALGGPTGGWTDNLI

SEQ ID NO: 3093 - protein, 14 aa, synthetic construct
ALGGPTGGWPDKLI

SEQ ID NO: 3094 - protein, 14 aa, synthetic construct
ALGKLVSLGYTDKL

SEQ ID NO: 3095 - protein, 14 aa, synthetic construct
ALGQVGGYARTDKL

SEQ ID NO: 3096 - protein, 14 aa, synthetic construct
ALGVRRGIRGQPIN

SEQ ID NO: 3097 - protein, 14 aa, synthetic construct
ALGKLVWGTTDKLI

SEQ ID NO: 3098 - protein, 13 aa, synthetic construct
ALGPLLPTFGGTD

SEQ ID NO: 3099 - protein, 13 aa, synthetic construct
ALGVPPTYVLGEL

SEQ ID NO: 3100 - protein, 12 aa, synthetic construct
ALGVPPTYVLWD

SEQ ID NO: 3101 - protein, 14 aa, synthetic construct
ALGPLGGGYYYKLI

SEQ ID NO: 3102 - protein, 13 aa, synthetic construct
ALGVPPTYVMGEI

SEQ ID NO: 3103 - protein, 12 aa, synthetic construct
ALGPGGYTDQLI

SEQ ID NO: 3104 - protein, 12 aa, synthetic construct
ALGPGGYSDKLI

SEQ ID NO: 3105 - protein, 13 aa, synthetic construct
ALGVPPTYVMREI

SEQ ID NO: 3106 - protein, 13 aa, synthetic construct
ALGPGGYAGDKLI

SEQ ID NO: 3107 - protein, 13 aa, synthetic construct
ALGVPPYSVLWEI

SEQ ID NO: 3108 - protein, 12 aa, synthetic construct
ALGQLLHTDKHI

SEQ ID NO: 3109 - protein, 13 aa, synthetic construct
ALGNYWGTPIHSS

SEQ ID NO: 3110 - protein, 13 aa, synthetic construct
ALGVPPYYVLGDI

SEQ ID NO: 3111 - protein, 12 aa, synthetic construct
ALGQLLHTEKLI

SEQ ID NO: 3112 - protein, 13 aa, synthetic construct
ALGNYWGIPIKSS

SEQ ID NO: 3113 - protein, 14 aa, synthetic construct
ALGQLPYRGIRTDK

SEQ ID NO: 3114 - protein, 13 aa, synthetic construct
ALGNYGGYAVNSS

SEQ ID NO: 3115 - protein, 14 aa, synthetic construct
ALGNYGGYARTDKL

SEQ ID NO: 3116 - protein, 13 aa, synthetic construct
ALGVPRSYVLGDI

SEQ ID NO: 3117 - protein, 13 aa, synthetic construct
ALGNYGGYALKSS

SEQ ID NO: 3118 - protein, 14 aa, synthetic construct
ALGVPRSYVLGEIP

SEQ ID NO: 3119 - protein, 14 aa, synthetic construct
ALGVPSSYWGITDK

SEQ ID NO: 3120 - protein, 13 aa, synthetic construct
ALGVPSWSWGITD

SEQ ID NO: 3121 - protein, 14 aa, synthetic construct
ALGPLLPTFRGTDK

SEQ ID NO: 3122 - protein, 14 aa, synthetic construct
ALGPLLTTFRGTDK

SEQ ID NO: 3123 - protein, 13 aa, synthetic construct
ALGQLLGDTEKLI

SEQ ID NO: 3124 - protein, 13 aa, synthetic construct
ALGQKTFLPDKLN

SEQ ID NO: 3125 - protein, 14 aa, synthetic construct
ALGVPPSYVLWEIL

SEQ ID NO: 3126 - protein, 12 aa, synthetic construct
ALGQLGDTDKLI

SEQ ID NO: 3127 - protein, 14 aa, synthetic construct
ALGQLGDTYPVKLI

SEQ ID NO: 3128 - protein, 13 aa, synthetic construct
ALGQLGDSSWDTR

SEQ ID NO: 3129 - protein, 13 aa, synthetic construct
ALGQLENLAYTDK

SEQ ID NO: 3130 - protein, 13 aa, synthetic construct
ALGVPPSYVPGHR

SEQ ID NO: 3131 - protein, 14 aa, synthetic construct
ALGQLARGSYTYKL

SEQ ID NO: 3132 - protein, 14 aa, synthetic construct
ALGQLGGYARTDKL

SEQ ID NO: 3133 - protein, 14 aa, synthetic construct
ALGQLARGSYTDKL

SEQ ID NO: 3134 - protein, 14 aa, synthetic construct
ALGQLALPGINTDK

SEQ ID NO: 3135 - protein, 13 aa, synthetic construct
ALGQISNWGIKTD

SEQ ID NO: 3136 - protein, 14 aa, synthetic construct
ALGVPPTYVLCTPI

SEQ ID NO: 3137 - protein, 13 aa, synthetic construct
ALGQLGYISSDTR

SEQ ID NO: 3138 - protein, 13 aa, synthetic construct
ALGQIESLGYTDK

SEQ ID NO: 3139 - protein, 14 aa, synthetic construct
ALGQIANWGITTDK

SEQ ID NO: 3140 - protein, 13 aa, synthetic construct
ALGVPPTDVLGEI

SEQ ID NO: 3141 - protein, 12 aa, synthetic construct
ALGVPPTSVLGE

SEQ ID NO: 3142 - protein, 13 aa, synthetic construct
ALGQLHYRGIRTD

SEQ ID NO: 3143 - protein, 14 aa, synthetic construct
ALGQHPYWGIYTDK

SEQ ID NO: 3144 - protein, 14 aa, synthetic construct
ALGQHPYWGIPDKL

SEQ ID NO: 3145 - protein, 13 aa, synthetic construct
ALGQGGNTPDKLI

SEQ ID NO: 3146 - protein, 13 aa, synthetic construct
ALGVPPTSVLGEI

SEQ ID NO: 3147 - protein, 14 aa, synthetic construct
ALGVPSWYWGIPDK

SEQ ID NO: 3148 - protein, 13 aa, synthetic construct
ALGNWGVDPGTPD

SEQ ID NO: 3149 - protein, 13 aa, synthetic construct
ALGNWGVAPGTPD

SEQ ID NO: 3150 - protein, 10 aa, synthetic construct
ALGLPSYAGG

SEQ ID NO: 3151 - protein, 14 aa, synthetic construct
ALGVRRGIPADKLI

SEQ ID NO: 3152 - protein, 13 aa, synthetic construct
ALGVPPSYVLGKF

SEQ ID NO: 3153 - protein, 13 aa, synthetic construct
ALGVRRGIPDKLI

SEQ ID NO: 3154 - protein, 14 aa, synthetic construct
ALGQPHSYVLVDTD

SEQ ID NO: 3155 - protein, 14 aa, synthetic construct
ALGQPPSYVLGDTD

SEQ ID NO: 3156 - protein, 13 aa, synthetic construct
ALGVRRGIPINSS

SEQ ID NO: 3157 - protein, 14 aa, synthetic construct
ALGVRRGIRATDNL

SEQ ID NO: 3158 - protein, 13 aa, synthetic construct
ALGLRSGIRGTDK

SEQ ID NO: 3159 - protein, 14 aa, synthetic construct
ALGVRRGIRCTDQL

SEQ ID NO: 3160 - protein, 14 aa, synthetic construct
ALGLRRGIRGTDKL

SEQ ID NO: 3161 - protein, 14 aa, synthetic construct
ALGVRRGIRDTDKL

SEQ ID NO: 3162 - protein, 10 aa, synthetic construct
ALGMAFLRTL

SEQ ID NO: 3163 - protein, 14 aa, synthetic construct
ALGQPPSYVLGTPI

SEQ ID NO: 3164 - protein, 9 aa, synthetic construct
ALGLLIRAT

SEQ ID NO: 3165 - protein, 13 aa, synthetic construct
ALGLLGDKDVKII

SEQ ID NO: 3166 - protein, 13 aa, synthetic construct
ALGLLAWGTYTEK

SEQ ID NO: 3167 - protein, 14 aa, synthetic construct
ALGQPPSYVLRDTD

SEQ ID NO: 3168 - protein, 13 aa, synthetic construct
ALGLHPSYVLWEI

SEQ ID NO: 3169 - protein, 13 aa, synthetic construct
ALGKWGIRTINSS

SEQ ID NO: 3170 - protein, 14 aa, synthetic construct
ALGQPSCAGGSYTD

SEQ ID NO: 3171 - protein, 14 aa, synthetic construct
ALGKPPSYVLGDTD

SEQ ID NO: 3172 - protein, 14 aa, synthetic construct
ALGKLVWGTTYKLI

SEQ ID NO: 3173 - protein, 13 aa, synthetic construct
ALGLVPYRGIRTD

SEQ ID NO: 3174 - protein, 14 aa, synthetic construct
ALGVRRGILGPDKL

SEQ ID NO: 3175 - protein, 14 aa, synthetic construct
ALGVPSYAGGSYTD

SEQ ID NO: 3176 - protein, 13 aa, synthetic construct
ALGQLTFLPDTLI

SEQ ID NO: 3177 - protein, 13 aa, synthetic construct
ALGQLREGDKQKL

SEQ ID NO: 3178 - protein, 14 aa, synthetic construct
ALGQLREGEHKKLI

SEQ ID NO: 3179 - protein, 13 aa, synthetic construct
ALGVPTSYVLWEI

SEQ ID NO: 3180 - protein, 12 aa, synthetic construct
ALGNWGIPINSS

SEQ ID NO: 3181 - protein, 14 aa, synthetic construct
ALGQLSPFTGGNKL

SEQ ID NO: 3182 - protein, 13 aa, synthetic construct
ALGVRPAYILGEI

SEQ ID NO: 3183 - protein, 14 aa, synthetic construct
ALGNVLGDTRAPGT

SEQ ID NO: 3184 - protein, 13 aa, synthetic construct
ALGVRPSYVLGDI

SEQ ID NO: 3185 - protein, 14 aa, synthetic construct
ALGNVLGDKDDKLI

SEQ ID NO: 3186 - protein, 14 aa, synthetic construct
ALGVRRGGSTPINS

SEQ ID NO: 3187 - protein, 14 aa, synthetic construct
ALGNTRTGGSTPRN

SEQ ID NO: 3188 - protein, 14 aa, synthetic construct
ALGMAFLRTLYTDK

SEQ ID NO: 3189 - protein, 14 aa, synthetic construct
ALGVPPSYVLGSTD

SEQ ID NO: 3190 - protein, 13 aa, synthetic construct
ALGQLWGIRRKLI

SEQ ID NO: 3191 - protein, 14 aa, synthetic construct
ALGNRAFLYWGTPI

SEQ ID NO: 3192 - protein, 14 aa, synthetic construct
ALGNLPTLGDLTPI

SEQ ID NO: 3193 - protein, 14 aa, synthetic construct
ALGVRRGILCTHKL

SEQ ID NO: 3194 - protein, 13 aa, synthetic construct
ALGNLPTLGDLTP

SEQ ID NO: 3195 - protein, 12 aa, synthetic construct
ALGQLWIHDKLI

SEQ ID NO: 3196 - protein, 12 aa, synthetic construct
ALGQPGTTINSS

SEQ ID NO: 3197 - protein, 13 aa, synthetic construct
ALGNAKSGRYSVN

SEQ ID NO: 3198 - protein, 14 aa, synthetic construct
ALGMDFVLTLYTYK

SEQ ID NO: 3199 - protein, 13 aa, synthetic construct
ALGRAFLRTLYSD

SEQ ID NO: 3200 - protein, 14 aa, synthetic construct
ALGVPPSYVLGATD

SEQ ID NO: 3201 - protein, 13 aa, synthetic construct
ALGEVWGIRSKVI

SEQ ID NO: 3202 - protein, 13 aa, synthetic construct
ALRDILGDTDKII

SEQ ID NO: 3203 - protein, 14 aa, synthetic construct
ALGGLAWGSYSDKL

SEQ ID NO: 3204 - protein, 14 aa, synthetic construct
ALGGLARGTYTDKL

SEQ ID NO: 3205 - protein, 14 aa, synthetic construct
ALGGLANWGINTDK

SEQ ID NO: 3206 - protein, 12 aa, synthetic construct
ALRAGGYTDKLI

SEQ ID NO: 3207 - protein, 14 aa, synthetic construct
ALGGLALLGIHTDK

SEQ ID NO: 3208 - protein, 14 aa, synthetic construct
ALGRAYLRTLYTQK

SEQ ID NO: 3209 - protein, 12 aa, synthetic construct
ALGGIGSTDKLN

SEQ ID NO: 3210 - protein, 14 aa, synthetic construct
ALGGHSWYWWIPDK

SEQ ID NO: 3211 - protein, 14 aa, synthetic construct
ALGVPPSSVLGDIP

SEQ ID NO: 3212 - protein, 14 aa, synthetic construct
ALGRDFLHTLYTDK

SEQ ID NO: 3213 - protein, 13 aa, synthetic construct
ALGGGGYAGDKLI

SEQ ID NO: 3214 - protein, 13 aa, synthetic construct
ALGGGGIPPINSS

SEQ ID NO: 3215 - protein, 10 aa, synthetic construct
ALGRDFLRTL

SEQ ID NO: 3216 - protein, 12 aa, synthetic construct
ALRALCIHEKLI

SEQ ID NO: 3217 - protein, 11 aa, synthetic construct
ALGGGDTETLF

SEQ ID NO: 3218 - protein, 13 aa, synthetic construct
ALGVPPSNVLGEI

SEQ ID NO: 3219 - protein, 14 aa, synthetic construct
ALRDHPNWGIYTDK

SEQ ID NO: 3220 - protein, 9 aa, synthetic construct
ALGREDVDT

SEQ ID NO: 3221 - protein, 12 aa, synthetic construct
ALGGGDKDDKLI

SEQ ID NO: 3222 - protein, 7 aa, synthetic construct
ALGGERF

SEQ ID NO: 3223 - protein, 14 aa, synthetic construct
ALGGASWSWGIPDK

SEQ ID NO: 3224 - protein, 13 aa, synthetic construct
ALGVPPSKELGDI

SEQ ID NO: 3225 - protein, 6 aa, synthetic construct
ALGRKE

SEQ ID NO: 3226 - protein, 14 aa, synthetic construct
ALGGLAWGSYTDQL

SEQ ID NO: 3227 - protein, 13 aa, synthetic construct
ALGVPPSSVLGEL

SEQ ID NO: 3228 - protein, 14 aa, synthetic construct
ALGGLCLRDTLATA

SEQ ID NO: 3229 - protein, 13 aa, synthetic construct
ALGGLGDWSWEAR

SEQ ID NO: 3230 - protein, 12 aa, synthetic construct
ALGGLGSTDKII

SEQ ID NO: 3231 - protein, 14 aa, synthetic construct
ALGGLGHGGYADKL

SEQ ID NO: 3232 - protein, 8 aa, synthetic construct
ALGGLGGY

SEQ ID NO: 3233 - protein, 14 aa, synthetic construct
ALGGLGGGYYYKLI

SEQ ID NO: 3234 - protein, 13 aa, synthetic construct
ALGYLGDKDDQLI

SEQ ID NO: 3235 - protein, 12 aa, synthetic construct
ALGGLGGGYPTD

SEQ ID NO: 3236 - protein, 13 aa, synthetic construct
ALGRAVLRTLYTD

SEQ ID NO: 3237 - protein, 12 aa, synthetic construct
ALGYLGSSDKLI

SEQ ID NO: 3238 - protein, 14 aa, synthetic construct
ALGGLGGGYDQKLI

SEQ ID NO: 3239 - protein, 14 aa, synthetic construct
ALGYVGGYGAPINS

SEQ ID NO: 3240 - protein, 13 aa, synthetic construct
ALGGLGDSSWNTR

SEQ ID NO: 3241 - protein, 13 aa, synthetic construct
ALGVPPSSVLWEI

SEQ ID NO: 3242 - protein, 12 aa, synthetic construct
ALGYVWIHDILI

SEQ ID NO: 3243 - protein, 14 aa, synthetic construct
ALGRAYLLTLYTYK

SEQ ID NO: 3244 - protein, 13 aa, synthetic construct
ALLELVMGDTDKL

SEQ ID NO: 3245 - protein, 14 aa, synthetic construct
ALGGLGATYPDKLI

SEQ ID NO: 3246 - protein, 14 aa, synthetic construct
ALGGLFLVGGTDKL

SEQ ID NO: 3247 - protein, 13 aa, synthetic construct
ALLEQGLHLLWDT

SEQ ID NO: 3248 - protein, 14 aa, synthetic construct
ALGGLFILGDTDKL

SEQ ID NO: 3249 - protein, 14 aa, synthetic construct
ALGGLCMGDTLATA

SEQ ID NO: 3250 - protein, 13 aa, synthetic construct
ALLEVPTDTEKHI

SEQ ID NO: 3251 - protein, 8 aa, synthetic construct
ALMHQSNS

SEQ ID NO: 3252 - protein, 9 aa, synthetic construct
ALGGASWSW

SEQ ID NO: 3253 - protein, 12 aa, synthetic construct
ALGRLWIHDKLI

SEQ ID NO: 3254 - protein, 14 aa, synthetic construct
ALGVRRRIRGTDKL

SEQ ID NO: 3255 - protein, 14 aa, synthetic construct
ALGRPSFVLCTPIN

SEQ ID NO: 3256 - protein, 11 aa, synthetic construct
ALGEWETDKLI

SEQ ID NO: 3257 - protein, 13 aa, synthetic construct
ALGVPPSDVLGDI

SEQ ID NO: 3258 - protein, 13 aa, synthetic construct
ALGVPPSDELCEI

SEQ ID NO: 3259 - protein, 12 aa, synthetic construct
ALGVPPSCVLWE

SEQ ID NO: 3260 - protein, 11 aa, synthetic construct
ALGEWDTDKHI

SEQ ID NO: 3261 - protein, 14 aa, synthetic construct
ALGEVYTFNLVYGI

SEQ ID NO: 3262 - protein, 12 aa, synthetic construct
ALGEVWRPDTLI

SEQ ID NO: 3263 - protein, 12 aa, synthetic construct
ALGEVWRHDTLI

SEQ ID NO: 3264 - protein, 13 aa, synthetic construct
ALGVPPSCVLGEI

SEQ ID NO: 3265 - protein, 13 aa, synthetic construct
ALGVPPPYVLGEI

SEQ ID NO: 3266 - protein, 12 aa, synthetic construct
ALGEVWRHDKVI

SEQ ID NO: 3267 - protein, 12 aa, synthetic construct
ALGEVWINDKLI

SEQ ID NO: 3268 - protein, 6 aa, synthetic construct
ALGSGY

SEQ ID NO: 3269 - protein, 12 aa, synthetic construct
ALGEVWILDRLI

SEQ ID NO: 3270 - protein, 12 aa, synthetic construct
ALGEVWIHDNLI

SEQ ID NO: 3271 - protein, 13 aa, synthetic construct
ALGEVWGRRSKLI

SEQ ID NO: 3272 - protein, 14 aa, synthetic construct
ALREHPYWGIYTDK

SEQ ID NO: 3273 - protein, 14 aa, synthetic construct
ALGSLGDPYPDKLI

SEQ ID NO: 3274 - protein, 14 aa, synthetic construct
ALREIANGGYEYKL

SEQ ID NO: 3275 - protein, 13 aa, synthetic construct
ALGEVWGMRSKLI

SEQ ID NO: 3276 - protein, 13 aa, synthetic construct
ALGEVWGIRSTLI

SEQ ID NO: 3277 - protein, 14 aa, synthetic construct
ALREIANWGIITDK

SEQ ID NO: 3278 - protein, 14 aa, synthetic construct
ALGVPPGTGGYPIN

SEQ ID NO: 3279 - protein, 12 aa, synthetic construct
ALGSGGYTDKLI

SEQ ID NO: 3280 - protein, 13 aa, synthetic construct
ALGEWVDTPEKLI

SEQ ID NO: 3281 - protein, 13 aa, synthetic construct
ALREGGDTPIHSS

SEQ ID NO: 3282 - protein, 14 aa, synthetic construct
ALGSASLRTLYTDK

SEQ ID NO: 3283 - protein, 14 aa, synthetic construct
ALGGAFLRTLYADK

SEQ ID NO: 3284 - protein, 14 aa, synthetic construct
ALGGAFLLTLYTDK

SEQ ID NO: 3285 - protein, 14 aa, synthetic construct
ALGRPSSYCGITDK

SEQ ID NO: 3286 - protein, 13 aa, synthetic construct
ALRDLGDTDVKLI

SEQ ID NO: 3287 - protein, 14 aa, synthetic construct
ALGQLGDTYPDKLI

SEQ ID NO: 3288 - protein, 14 aa, synthetic construct
ALGRTFLRTLYTDK

SEQ ID NO: 3289 - protein, 14 aa, synthetic construct
ALRDLGDTYPDKLI

SEQ ID NO: 3290 - protein, 10 aa, synthetic construct
ALGSAFIRTL

SEQ ID NO: 3291 - protein, 13 aa, synthetic construct
ALGVPPSHVLWEI

SEQ ID NO: 3292 - protein, 14 aa, synthetic construct
ALGSAFLRTLSTDK

SEQ ID NO: 3293 - protein, 14 aa, synthetic construct
ALGSAYLRTLYTDK

SEQ ID NO: 3294 - protein, 14 aa, synthetic construct
ALGEYPYWGIYTDK

SEQ ID NO: 3295 - protein, 14 aa, synthetic construct
ALRDLVWGTIDKLI

SEQ ID NO: 3296 - protein, 13 aa, synthetic construct
ALGFLLPTYWGKF

SEQ ID NO: 3297 - protein, 13 aa, synthetic construct
ALGVPPSDVLGEI

SEQ ID NO: 3298 - protein, 14 aa, synthetic construct
ALRDPTGGWTDKLI

SEQ ID NO: 3299 - protein, 14 aa, synthetic construct
ALGSDYLGTLYTDK

SEQ ID NO: 3300 - protein, 14 aa, synthetic construct
ALGVPPSDVLGDTD

SEQ ID NO: 3301 - protein, 13 aa, synthetic construct
ALRDVPTDTDQLI

SEQ ID NO: 3302 - protein, 13 aa, synthetic construct
ALGSGGYAADKLI

SEQ ID NO: 3303 - protein, 13 aa, synthetic construct
ALGFILPTYWGKF

SEQ ID NO: 3304 - protein, 11 aa, synthetic construct
ALREGDTDKLI

SEQ ID NO: 3305 - protein, 12 aa, synthetic construct
ALGGLGSTDNLI

SEQ ID NO: 3306 - protein, 12 aa, synthetic construct
ALGGLGTTDKLI

SEQ ID NO: 3307 - protein, 6 aa, synthetic construct
ALGGLL

SEQ ID NO: 3308 - protein, 13 aa, synthetic construct
ALGGLLGDTDKII

SEQ ID NO: 3309 - protein, 13 aa, synthetic construct
ALGVSPSYVLGDI

SEQ ID NO: 3310 - protein, 14 aa, synthetic construct
ALGGPSSYWWIPDK

SEQ ID NO: 3311 - protein, 13 aa, synthetic construct
ALGVSPSYVLGEI

SEQ ID NO: 3312 - protein, 13 aa, synthetic construct
ALGVSPSYVLGEL

SEQ ID NO: 3313 - protein, 14 aa, synthetic construct
ALGGPSSYSWIPDK

SEQ ID NO: 3314 - protein, 14 aa, synthetic construct
ALGGPSSSWGIPDK

SEQ ID NO: 3315 - protein, 12 aa, synthetic construct
ALGVVGDTDKLI

SEQ ID NO: 3316 - protein, 14 aa, synthetic construct
ALGVPPSYRGIRTD

SEQ ID NO: 3317 - protein, 14 aa, synthetic construct
ALGGPSRYCGIPDK

SEQ ID NO: 3318 - protein, 14 aa, synthetic construct
ALGGPSRSWGITDK

SEQ ID NO: 3319 - protein, 14 aa, synthetic construct
ALGVVGDTYPAILI

SEQ ID NO: 3320 - protein, 14 aa, synthetic construct
ALGGPSRSWGIPDK

SEQ ID NO: 3321 - protein, 14 aa, synthetic construct
ALGGPSLYWGIPDK

SEQ ID NO: 3322 - protein, 14 aa, synthetic construct
ALGGPSFVLCTPTN

SEQ ID NO: 3323 - protein, 13 aa, synthetic construct
ALGVVLGDTDHLI

SEQ ID NO: 3324 - protein, 14 aa, synthetic construct
ALGGPSCYWGIPDK

SEQ ID NO: 3325 - protein, 14 aa, synthetic construct
ALGVVLGDTPINSS

SEQ ID NO: 3326 - protein, 12 aa, synthetic construct
ALGRAFRRTLYT

SEQ ID NO: 3327 - protein, 12 aa, synthetic construct
ALGVVLHTDQPI

SEQ ID NO: 3328 - protein, 14 aa, synthetic construct
ALGGPSCDWGIPDK

SEQ ID NO: 3329 - protein, 13 aa, synthetic construct
ALGGPPWYWGIPD

SEQ ID NO: 3330 - protein, 14 aa, synthetic construct
ALGGPPWSWGIPDK

SEQ ID NO: 3331 - protein, 13 aa, synthetic construct
ALGGPPSYVLWEI

SEQ ID NO: 3332 - protein, 12 aa, synthetic construct
ALGGPSWFWGIP

SEQ ID NO: 3333 - protein, 13 aa, synthetic construct
ALGVPPSYVIGEI

SEQ ID NO: 3334 - protein, 14 aa, synthetic construct
ALGGPSWHWARPDK

SEQ ID NO: 3335 - protein, 14 aa, synthetic construct
ALGRAFLRTQNTDK

SEQ ID NO: 3336 - protein, 10 aa, synthetic construct
ALGGPSWYSG

SEQ ID NO: 3337 - protein, 14 aa, synthetic construct
ALGGPSWYRGLPDK

SEQ ID NO: 3338 - protein, 14 aa, synthetic construct
ALGRAFLRTLYTAI

SEQ ID NO: 3339 - protein, 14 aa, synthetic construct
ALGRAFLRTLYTDE

SEQ ID NO: 3340 - protein, 14 aa, synthetic construct
ALGGPSWYCGTTDK

SEQ ID NO: 3341 - protein, 14 aa, synthetic construct
ALGVPPSYVLCTPI

SEQ ID NO: 3342 - protein, 13 aa, synthetic construct
ALGRAFLRTLYTS

SEQ ID NO: 3343 - protein, 14 aa, synthetic construct
ALGRAFLRTMSTDK

SEQ ID NO: 3344 - protein, 12 aa, synthetic construct
ALGVRRVHRSTH

SEQ ID NO: 3345 - protein, 13 aa, synthetic construct
ALGGPSWYCGIPD

SEQ ID NO: 3346 - protein, 14 aa, synthetic construct
ALGGPSWSWGITDK

SEQ ID NO: 3347 - protein, 14 aa, synthetic construct
ALGVRWGVRGTDKL

SEQ ID NO: 3348 - protein, 14 aa, synthetic construct
ALGVRRWIRGTDKL

SEQ ID NO: 3349 - protein, 14 aa, synthetic construct
ALGGPSWSWGIHDK

SEQ ID NO: 3350 - protein, 10 aa, synthetic construct
ALGVPPSYVL

SEQ ID NO: 3351 - protein, 8 aa, synthetic construct
ALGVRSGG

SEQ ID NO: 3352 - protein, 14 aa, synthetic construct
ALGRAFLRTRYTDK

SEQ ID NO: 3353 - protein, 14 aa, synthetic construct
ALGRAFLRWGILHR

SEQ ID NO: 3354 - protein, 12 aa, synthetic construct
ALGVRSGIRGNK

SEQ ID NO: 3355 - protein, 14 aa, synthetic construct
ALGRAFLSTLYTDK

SEQ ID NO: 3356 - protein, 14 aa, synthetic construct
ALGGPSWHWGIPDK

SEQ ID NO: 3357 - protein, 7 aa, synthetic construct
ALGVRTG

SEQ ID NO: 3358 - protein, 13 aa, synthetic construct
ALGVVPTDTDKLI

SEQ ID NO: 3359 - protein, 14 aa, synthetic construct
ALGRAFRRTLYTEK

SEQ ID NO: 3360 - protein, 14 aa, synthetic construct
ALGRAFVRPLSTDK

SEQ ID NO: 3361 - protein, 14 aa, synthetic construct
ALGGLSPFTGGHKL

SEQ ID NO: 3362 - protein, 14 aa, synthetic construct
ALGGLVWGTPDKLI

SEQ ID NO: 3363 - protein, 13 aa, synthetic construct
ALGVPPSYELGEI

SEQ ID NO: 3364 - protein, 14 aa, synthetic construct
ALGGLVSLGYADKL

SEQ ID NO: 3365 - protein, 13 aa, synthetic construct
ALGVPPSYEEWEI

SEQ ID NO: 3366 - protein, 13 aa, synthetic construct
ALGRASLRALCTD

SEQ ID NO: 3367 - protein, 14 aa, synthetic construct
ALGGLVSLGSTDKL

SEQ ID NO: 3368 - protein, 14 aa, synthetic construct
ALGYLALPGIHTDK

SEQ ID NO: 3369 - protein, 14 aa, synthetic construct
ALGGLVLGDTEKLI

SEQ ID NO: 3370 - protein, 14 aa, synthetic construct
ALGGLTGGYADKLI

SEQ ID NO: 3371 - protein, 13 aa, synthetic construct
ALGGLTFLPYKLI

SEQ ID NO: 3372 - protein, 14 aa, synthetic construct
ALGGLSLLGDTDKL

SEQ ID NO: 3373 - protein, 13 aa, synthetic construct
ALGGLWGIGSKLI

SEQ ID NO: 3374 - protein, 13 aa, synthetic construct
ALGGLSFLRVWGL

SEQ ID NO: 3375 - protein, 14 aa, synthetic construct
ALGGLLPTFRGTDK

SEQ ID NO: 3376 - protein, 12 aa, synthetic construct
ALGGLLNTDKLI

SEQ ID NO: 3377 - protein, 9 aa, synthetic construct
ALGVPPSYD

SEQ ID NO: 3378 - protein, 10 aa, synthetic construct
ALGRAVLRTL

SEQ ID NO: 3379 - protein, 14 aa, synthetic construct
ALGGLLLGDTDKLI

SEQ ID NO: 3380 - protein, 9 aa, synthetic construct
ALGYLAVPG

SEQ ID NO: 3381 - protein, 13 aa, synthetic construct
ALGGLLHTFVGTD

SEQ ID NO: 3382 - protein, 12 aa, synthetic construct
ALGGLLHTEKLI

SEQ ID NO: 3383 - protein, 13 aa, synthetic construct
ALGGLLGDTDQLI

SEQ ID NO: 3384 - protein, 14 aa, synthetic construct
ALGRASLLTLYTDK

SEQ ID NO: 3385 - protein, 13 aa, synthetic construct
ALGYGGYSGDKLI

SEQ ID NO: 3386 - protein, 14 aa, synthetic construct
ALGGPPSYVLGDTD

SEQ ID NO: 3387 - protein, 11 aa, synthetic construct
ALGVPPSYFLG

SEQ ID NO: 3388 - protein, 13 aa, synthetic construct
ALGVPPSYLLWEI

SEQ ID NO: 3389 - protein, 10 aa, synthetic construct
ALGRAFVRTL

SEQ ID NO: 3390 - protein, 12 aa, synthetic construct
ALGGPGTPCNSS

SEQ ID NO: 3391 - protein, 12 aa, synthetic construct
ALGGPGTAINSS

SEQ ID NO: 3392 - protein, 13 aa, synthetic construct
ALGVPPSYILGEI

SEQ ID NO: 3393 - protein, 14 aa, synthetic construct
ALGGPAWYWGIPDK

SEQ ID NO: 3394 - protein, 13 aa, synthetic construct
ALGGPAWSWGVTD

SEQ ID NO: 3395 - protein, 13 aa, synthetic construct
ALGGPAWSWGLPD

SEQ ID NO: 3396 - protein, 14 aa, synthetic construct
ALGGPAWSWGIPDK

SEQ ID NO: 3397 - protein, 12 aa, synthetic construct
ALGVVTFVAVLL

SEQ ID NO: 3398 - protein, 14 aa, synthetic construct
ALGRALLRALYTDK

SEQ ID NO: 3399 - protein, 14 aa, synthetic construct
ALGVVVWGTTEKLI

SEQ ID NO: 3400 - protein, 13 aa, synthetic construct
ALGGNCHLGDQHR

SEQ ID NO: 3401 - protein, 10 aa, synthetic construct
ALGRALLRTL

SEQ ID NO: 3402 - protein, 14 aa, synthetic construct
ALGVPPSYELWEIL

SEQ ID NO: 3403 - protein, 13 aa, synthetic construct
ALGGNCHLGDKHR

SEQ ID NO: 3404 - protein, 12 aa, synthetic construct
ALGGLWVHDKLI

SEQ ID NO: 3405 - protein, 14 aa, synthetic construct
ALGRALLRTLYTDE

SEQ ID NO: 3406 - protein, 12 aa, synthetic construct
ALGGLWIHDQLI

SEQ ID NO: 3407 - protein, 13 aa, synthetic construct
ALGVVVWDPAKLI

SEQ ID NO: 3408 - protein, 13 aa, synthetic construct
ALGVPPSYELWEI

SEQ ID NO: 3409 - protein, 13 aa, synthetic construct
ALGGLWGIRSQLI

SEQ ID NO: 3410 - protein, 13 aa, synthetic construct
ALVEKGDSSWDTR

SEQ ID NO: 3411 - protein, 14 aa, synthetic construct
ADAEPGLPLLGDTD

SEQ ID NO: 3412 - protein, 5 aa, synthetic construct
ALVEL

SEQ ID NO: 3413 - protein, 13 aa, synthetic construct
GLGELLWDTDKHI

SEQ ID NO: 3414 - protein, 14 aa, synthetic construct
GLGELVWGTTDRLI

SEQ ID NO: 3415 - protein, 14 aa, synthetic construct
GLGELVWGTTDQLI

SEQ ID NO: 3416 - protein, 13 aa, synthetic construct
GLGELVWGTTDKL

SEQ ID NO: 3417 - protein, 14 aa, synthetic construct
GLGELVWGPTDKLI

SEQ ID NO: 3418 - protein, 14 aa, synthetic construct
GLGELVVGDTDNLI

SEQ ID NO: 3419 - protein, 14 aa, synthetic construct
GLGELVSLGYTHKL

SEQ ID NO: 3420 - protein, 14 aa, synthetic construct
GLGELVSLGYSDKL

SEQ ID NO: 3421 - protein, 14 aa, synthetic construct
GLGELVMGDTAKLI

SEQ ID NO: 3422 - protein, 12 aa, synthetic construct
GLGELVHHDKII

SEQ ID NO: 3423 - protein, 14 aa, synthetic construct
GLGELTGVYADKLI

SEQ ID NO: 3424 - protein, 14 aa, synthetic construct
GLGELTGGYSDQLI

SEQ ID NO: 3425 - protein, 14 aa, synthetic construct
GLGELTGGYADNLI

SEQ ID NO: 3426 - protein, 13 aa, synthetic construct
GLGELTFLPENLI

SEQ ID NO: 3427 - protein, 12 aa, synthetic construct
GLGELTFLPDKL

SEQ ID NO: 3428 - protein, 13 aa, synthetic construct
GLGELTEGYAEKL

SEQ ID NO: 3429 - protein, 11 aa, synthetic construct
GLGELSPVPGG

SEQ ID NO: 3430 - protein, 11 aa, synthetic construct
GLGELSPFSGG

SEQ ID NO: 3431 - protein, 14 aa, synthetic construct
GLGELSPCTGGHKL

SEQ ID NO: 3432 - protein, 13 aa, synthetic construct
GLGELSLRGIHTD

SEQ ID NO: 3433 - protein, 14 aa, synthetic construct
GLGELSLGGLHTDQ

SEQ ID NO: 3434 - protein, 14 aa, synthetic construct
GLGELSIRGIHTDK

SEQ ID NO: 3435 - protein, 14 aa, synthetic construct
GLGELSGGYADQLI

SEQ ID NO: 3436 - protein, 14 aa, synthetic construct
GLGELREGDKNKLI

SEQ ID NO: 3437 - protein, 14 aa, synthetic construct
GLGELPYRGVRTDK

SEQ ID NO: 3438 - protein, 13 aa, synthetic construct
GLGELPYRGIRTD

SEQ ID NO: 3439 - protein, 14 aa, synthetic construct
GLGELVWGTTVKLI

SEQ ID NO: 3440 - protein, 13 aa, synthetic construct
GLGELWGIRRKLI

SEQ ID NO: 3441 - protein, 13 aa, synthetic construct
GLGELWGIRSQLF

SEQ ID NO: 3442 - protein, 13 aa, synthetic construct
GLGEPPSYVLGDT

SEQ ID NO: 3443 - protein, 14 aa, synthetic construct
GLGERTGGYLGSWD

SEQ ID NO: 3444 - protein, 14 aa, synthetic construct
GLGERTGGSLGSWD

SEQ ID NO: 3445 - protein, 14 aa, synthetic construct
GLGERGGGYDYPLI

SEQ ID NO: 3446 - protein, 14 aa, synthetic construct
GLGEPVWGTTDKII

SEQ ID NO: 3447 - protein, 9 aa, synthetic construct
GLGEPVVGV

SEQ ID NO: 3448 - protein, 14 aa, synthetic construct
GLGEPTGGWTVKLI

SEQ ID NO: 3449 - protein, 14 aa, synthetic construct
GLGEPTGGWTEKLI

SEQ ID NO: 3450 - protein, 14 aa, synthetic construct
GLGEPTGGWTDKII

SEQ ID NO: 3451 - protein, 14 aa, synthetic construct
GLGEPSGGWTVNLI

SEQ ID NO: 3452 - protein, 14 aa, synthetic construct
GLGEPSGGWTDKLI

SEQ ID NO: 3453 - protein, 14 aa, synthetic construct
GLGEPPTSVLGDTD

SEQ ID NO: 3454 - protein, 14 aa, synthetic construct
GLGEPPSSVLGDTD

SEQ ID NO: 3455 - protein, 13 aa, synthetic construct
GLGELWGIRSTLI

SEQ ID NO: 3456 - protein, 14 aa, synthetic construct
GLGEPLSYVLGDTD

SEQ ID NO: 3457 - protein, 12 aa, synthetic construct
GLGEPGTTRNSA

SEQ ID NO: 3458 - protein, 12 aa, synthetic construct
GLGEPGTRINSS

SEQ ID NO: 3459 - protein, 12 aa, synthetic construct
GLGEPGTPINSS

SEQ ID NO: 3460 - protein, 12 aa, synthetic construct
GLGEPGSTINSS

SEQ ID NO: 3461 - protein, 12 aa, synthetic construct
GLGEPGPTINSS

SEQ ID NO: 3462 - protein, 14 aa, synthetic construct
GLGEPGLPLLGDTD

SEQ ID NO: 3463 - protein, 13 aa, synthetic construct
GLGEMGVSSWDSR

SEQ ID NO: 3464 - protein, 13 aa, synthetic construct
GLGEMGDSSWDTR

SEQ ID NO: 3465 - protein, 12 aa, synthetic construct
GLGELWIRDKVI

SEQ ID NO: 3466 - protein, 12 aa, synthetic construct
GLGELWIHDKVI

SEQ ID NO: 3467 - protein, 13 aa, synthetic construct
GLGELMGDTDKLI

SEQ ID NO: 3468 - protein, 12 aa, synthetic construct
GLGELLNTDKNI

SEQ ID NO: 3469 - protein, 14 aa, synthetic construct
GLGEHPSSVLGDTD

SEQ ID NO: 3470 - protein, 12 aa, synthetic construct
GLGELLNTDKLI

SEQ ID NO: 3471 - protein, 14 aa, synthetic construct
GLGELFLLGDTDTL

SEQ ID NO: 3472 - protein, 14 aa, synthetic construct
GLGELFLLGDTAKL

SEQ ID NO: 3473 - protein, 14 aa, synthetic construct
GLGELEWGIRGTYK

SEQ ID NO: 3474 - protein, 13 aa, synthetic construct
GLGELEWGIRGTD

SEQ ID NO: 3475 - protein, 14 aa, synthetic construct
GLGELEWGIRGPDK

SEQ ID NO: 3476 - protein, 14 aa, synthetic construct
GLGELDWGTTDKLI

SEQ ID NO: 3477 - protein, 14 aa, synthetic construct
GLGELCVGDTLATA

SEQ ID NO: 3478 - protein, 14 aa, synthetic construct
GLGELCLGDTLATA

SEQ ID NO: 3479 - protein, 14 aa, synthetic construct
GLGELCEGDTMATA

SEQ ID NO: 3480 - protein, 14 aa, synthetic construct
GLGELAWGSYTEKL

SEQ ID NO: 3481 - protein, 14 aa, synthetic construct
GLGELALPGIHTDK

SEQ ID NO: 3482 - protein, 11 aa, synthetic construct
GLGELAFPYWW

SEQ ID NO: 3483 - protein, 12 aa, synthetic construct
GLGEIWIHDKLI

SEQ ID NO: 3484 - protein, 13 aa, synthetic construct
GLGEITFLPEKLI

SEQ ID NO: 3485 - protein, 14 aa, synthetic construct
GLGEIPYRGIRTDK

SEQ ID NO: 3486 - protein, 12 aa, synthetic construct
GLGEILNTDKLI

SEQ ID NO: 3487 - protein, 13 aa, synthetic construct
GLGEILGDTIKLI

SEQ ID NO: 3488 - protein, 13 aa, synthetic construct
GLGEILGDTDKLI

SEQ ID NO: 3489 - protein, 14 aa, synthetic construct
GLGEIGTGGYADKL

SEQ ID NO: 3490 - protein, 12 aa, synthetic construct
GLGEIGSTDKLI

SEQ ID NO: 3491 - protein, 14 aa, synthetic construct
GLGEIAWGSYTDNL

SEQ ID NO: 3492 - protein, 14 aa, synthetic construct
GLGEIANWGLNTDK

SEQ ID NO: 3493 - protein, 14 aa, synthetic construct
GLGEIANWGIITDQ

SEQ ID NO: 3494 - protein, 14 aa, synthetic construct
GLGEHSYAGGSYTD

SEQ ID NO: 3495 - protein, 6 aa, synthetic construct
GLGEHS

SEQ ID NO: 3496 - protein, 14 aa, synthetic construct
GLGELFLLGDTEKL

SEQ ID NO: 3497 - protein, 13 aa, synthetic construct
GLGELGAKDEKLI

SEQ ID NO: 3498 - protein, 13 aa, synthetic construct
GLGELGASSWAPR

SEQ ID NO: 3499 - protein, 12 aa, synthetic construct
GLGELGSTDHLI

SEQ ID NO: 3500 - protein, 12 aa, synthetic construct
GLGELLITVYLI

SEQ ID NO: 3501 - protein, 13 aa, synthetic construct
GLGELLGDTNKLF

SEQ ID NO: 3502 - protein, 13 aa, synthetic construct
GLGELLGDTEKLI

SEQ ID NO: 3503 - protein, 12 aa, synthetic construct
GLGELLDTEKLI

SEQ ID NO: 3504 - protein, 13 aa, synthetic construct
GLGELIEGDKNQL

SEQ ID NO: 3505 - protein, 13 aa, synthetic construct
GLGELGYKDDKLI

SEQ ID NO: 3506 - protein, 12 aa, synthetic construct
GLGELGSTEKLI

SEQ ID NO: 3507 - protein, 12 aa, synthetic construct
GLGELGSTDQLI

SEQ ID NO: 3508 - protein, 12 aa, synthetic construct
GLGELGSTDNLI

SEQ ID NO: 3509 - protein, 12 aa, synthetic construct
GLGELGSTDKPI

SEQ ID NO: 3510 - protein, 12 aa, synthetic construct
GLGELGSTDKII

SEQ ID NO: 3511 - protein, 12 aa, synthetic construct
GLGELGSTDHII

SEQ ID NO: 3512 - protein, 13 aa, synthetic construct
GLGELGDKDDQLI

SEQ ID NO: 3513 - protein, 12 aa, synthetic construct
GLGELGSTDELI

SEQ ID NO: 3514 - protein, 14 aa, synthetic construct
GLGELGGGYYDKLI

SEQ ID NO: 3515 - protein, 14 aa, synthetic construct
GLGELGGGYDDQLI

SEQ ID NO: 3516 - protein, 13 aa, synthetic construct
GLGELGEKDDKLI

SEQ ID NO: 3517 - protein, 14 aa, synthetic construct
GLGELGDTYPYKLI

SEQ ID NO: 3518 - protein, 14 aa, synthetic construct
GLGELGDTYPDKLI

SEQ ID NO: 3519 - protein, 14 aa, synthetic construct
GLGELGDTNPDNVI

SEQ ID NO: 3520 - protein, 12 aa, synthetic construct
GLGELGDTDKLI

SEQ ID NO: 3521 - protein, 13 aa, synthetic construct
GLGELGDSSWDTR

SEQ ID NO: 3522 - protein, 12 aa, synthetic construct
GLGELGDPEKLF

SEQ ID NO: 3523 - protein, 13 aa, synthetic construct
GLGELGDKDEKHF

SEQ ID NO: 3524 - protein, 14 aa, synthetic construct
GLGERVWGRTETLI

SEQ ID NO: 3525 - protein, 12 aa, synthetic construct
GLGESCIHDQLI

SEQ ID NO: 3526 - protein, 12 aa, synthetic construct
GLGESWIHDRLI

SEQ ID NO: 3527 - protein, 14 aa, synthetic construct
GLGETGLPLMGDTD

SEQ ID NO: 3528 - protein, 11 aa, synthetic construct
GVGDLGSTDKL

SEQ ID NO: 3529 - protein, 14 aa, synthetic construct
GVGDLGAGDRYKLF

SEQ ID NO: 3530 - protein, 14 aa, synthetic construct
GVGARGRGFGGAGV

SEQ ID NO: 3531 - protein, 12 aa, synthetic construct
GVGALWIHAKLI

SEQ ID NO: 3532 - protein, 12 aa, synthetic construct
GVGAGGYTDKLI

SEQ ID NO: 3533 - protein, 11 aa, synthetic construct
GVGAGGGGSEE

SEQ ID NO: 3534 - skipped

SEQ ID NO: 3535 - protein, 14 aa, synthetic construct
GSGELGHGGYADKL

SEQ ID NO: 3536 - protein, 8 aa, synthetic construct
GSGAPVMG

SEQ ID NO: 3537 - protein, 13 aa, synthetic construct
GRGVGGIAPLLSA

SEQ ID NO: 3538 - protein, 9 aa, synthetic construct
GRGELLGDT

SEQ ID NO: 3539 - protein, 11 aa, synthetic construct
GRGEGDTDNHI

SEQ ID NO: 3540 - protein, 12 aa, synthetic construct
GRGDVGAAAQLI

SEQ ID NO: 3541 - protein, 13 aa, synthetic construct
GRGDLGDSSWDTR

SEQ ID NO: 3542 - protein, 14 aa, synthetic construct
GRGAVSFVPARVGG

SEQ ID NO: 3543 - protein, 9 aa, synthetic construct
GRGAPRGGW

SEQ ID NO: 3544 - protein, 12 aa, synthetic construct
GRGALWIHVNLI

SEQ ID NO: 3545 - protein, 7 aa, synthetic construct
GRGALGV

SEQ ID NO: 3546 - protein, 11 aa, synthetic construct
GRGALGATDQR

SEQ ID NO: 3547 - protein, 11 aa, synthetic construct
GPGEGDTDKLI

SEQ ID NO: 3548 - protein, 14 aa, synthetic construct
GLWELREGDKNKLI

SEQ ID NO: 3549 - protein, 13 aa, synthetic construct
GLWELLGDTDKLI

SEQ ID NO: 3550 - protein, 14 aa, synthetic construct
GLWELGDTYPDKLI

SEQ ID NO: 3551 - protein, 13 aa, synthetic construct
GLWELGDSSWDTR

SEQ ID NO: 3552 - protein, 12 aa, synthetic construct
GLWEIHHTEKLI

SEQ ID NO: 3553 - protein, 13 aa, synthetic construct
GVGDLPYRGLGTD

SEQ ID NO: 3554 - protein, 14 aa, synthetic construct
GVGDLSGGYAENLI

SEQ ID NO: 3555 - protein, 13 aa, synthetic construct
GVGDLTFQPDKNI

SEQ ID NO: 3556 - protein, 12 aa, synthetic construct
GVGELGDTDKVI

SEQ ID NO: 3557 - protein, 12 aa, synthetic construct
GVGELLHTDKLI

SEQ ID NO: 3558 - protein, 13 aa, synthetic construct
GVGELLGDTDNLI

SEQ ID NO: 3559 - protein, 13 aa, synthetic construct
GVGELLGDTDKLM

SEQ ID NO: 3560 - protein, 13 aa, synthetic construct
GVGELLGDTDKLI

SEQ ID NO: 3561 - protein, 12 aa, synthetic construct
GVGELGYTDKLI

SEQ ID NO: 3562 - protein, 12 aa, synthetic construct
GVGELGYTDKIK

SEQ ID NO: 3563 - protein, 14 aa, synthetic construct
GVGELGGSYPDHSS

SEQ ID NO: 3564 - protein, 14 aa, synthetic construct
GVGELGGGYEDNLI

SEQ ID NO: 3565 - protein, 14 aa, synthetic construct
GVGELGGGYDYNLI

SEQ ID NO: 3566 - protein, 14 aa, synthetic construct
GVGELGGGYDDQLI

SEQ ID NO: 3567 - protein, 12 aa, synthetic construct
GVGELGESELLI

SEQ ID NO: 3568 - protein, 12 aa, synthetic construct
GVGELGCSDTLI

SEQ ID NO: 3569 - protein, 12 aa, synthetic construct
GVGDPGTTLNSS

SEQ ID NO: 3570 - protein, 14 aa, synthetic construct
GVGELCLGDTLATA

SEQ ID NO: 3571 - protein, 14 aa, synthetic construct
GVGEIREGDINNLI

SEQ ID NO: 3572 - protein, 13 aa, synthetic construct
GVGEILGDTDKLI

SEQ ID NO: 3573 - protein, 13 aa, synthetic construct
GVGEIANWGISTD

SEQ ID NO: 3574 - protein, 14 aa, synthetic construct
GVGEHVWGTTSQLI

SEQ ID NO: 3575 - protein, 11 aa, synthetic construct
GVGEGDTDLLF

SEQ ID NO: 3576 - protein, 11 aa, synthetic construct
GVGEGDTDKLI

SEQ ID NO: 3577 - protein, 8 aa, synthetic construct
GVGEAAGG

SEQ ID NO: 3578 - protein, 12 aa, synthetic construct
GVGDVWIEDQLI

SEQ ID NO: 3579 - protein, 13 aa, synthetic construct
GVGDVWGIRSQLI

SEQ ID NO: 3580 - protein, 12 aa, synthetic construct
GVGDVCLGESSW

SEQ ID NO: 3581 - protein, 11 aa, synthetic construct
GLWEGDTDIPI

SEQ ID NO: 3582 - protein, 13 aa, synthetic construct
GLWDLTFLPDKLL

SEQ ID NO: 3583 - protein, 13 aa, synthetic construct
GLWDLLGDTDKLI

SEQ ID NO: 3584 - protein, 13 aa, synthetic construct
GLGEVLLGDSPLI

SEQ ID NO: 3585 - protein, 6 aa, synthetic construct
GLGGGG

SEQ ID NO: 3586 - protein, 11 aa, synthetic construct
GLGGGDTEPLM

SEQ ID NO: 3587 - protein, 11 aa, synthetic construct
GLGEWDTDKLI

SEQ ID NO: 3588 - protein, 12 aa, synthetic construct
GLGEVWIHDTLN

SEQ ID NO: 3589 - protein, 12 aa, synthetic construct
GLGEVWIDDIVI

SEQ ID NO: 3590 - protein, 13 aa, synthetic construct
GLGEVWGLRRNVI

SEQ ID NO: 3591 - protein, 13 aa, synthetic construct
GLGEVRTDTYKLI

SEQ ID NO: 3592 - protein, 13 aa, synthetic construct
GLGEVPTDTDTLI

SEQ ID NO: 3593 - protein, 12 aa, synthetic construct
GLGEVPTDTDKL

SEQ ID NO: 3594 - protein, 13 aa, synthetic construct
GLGEVPTDTDKII

SEQ ID NO: 3595 - protein, 7 aa, synthetic construct
GLGEVPT

SEQ ID NO: 3596 - protein, 13 aa, synthetic construct
GLGEVHTDTYKLI

SEQ ID NO: 3597 - protein, 13 aa, synthetic construct
GLGGLLGDTEKLI

SEQ ID NO: 3598 - protein, 13 aa, synthetic construct
GLGEVHTDTSILI

SEQ ID NO: 3599 - protein, 14 aa, synthetic construct
GLGEVGGGYDDKLI

SEQ ID NO: 3600 - protein, 14 aa, synthetic construct
GLGEVGGGSDDKLI

SEQ ID NO: 3601 - protein, 13 aa, synthetic construct
GLGEVGDTPDKLI

SEQ ID NO: 3602 - protein, 12 aa, synthetic construct
GLGEVGATDKVL

SEQ ID NO: 3603 - protein, 13 aa, synthetic construct
GLGEVGARSWETR

SEQ ID NO: 3604 - protein, 14 aa, synthetic construct
GLGEVFLLGDTDKL

SEQ ID NO: 3605 - protein, 14 aa, synthetic construct
GLGEVEWGIRGTDK

SEQ ID NO: 3606 - protein, 14 aa, synthetic construct
GLGEVCVGDPLATA

SEQ ID NO: 3607 - protein, 14 aa, synthetic construct
GLGEVAWGSSTDKL

SEQ ID NO: 3608 - protein, 13 aa, synthetic construct
GLGEVATDTENVI

SEQ ID NO: 3609 - protein, 13 aa, synthetic construct
GLGGLCLGDTLAT

SEQ ID NO: 3610 - protein, 12 aa, synthetic construct
GLGGLWIHEKLI

SEQ ID NO: 3611 - protein, 14 aa, synthetic construct
GLVGPSWYWGIPDK

SEQ ID NO: 3612 - protein, 13 aa, synthetic construct
GLGVLTFLPDKLI

SEQ ID NO: 3613 - protein, 14 aa, synthetic construct
GLVGLCLGDTLATA

SEQ ID NO: 3614 - protein, 14 aa, synthetic construct
GLVELPYRGLRTDK

SEQ ID NO: 3615 - protein, 12 aa, synthetic construct
GLVELLKTDRLI

SEQ ID NO: 3616 - protein, 13 aa, synthetic construct
GLVELLGDTYKQI

SEQ ID NO: 3617 - protein, 14 aa, synthetic construct
GLVDLIEGDKNKLI

SEQ ID NO: 3618 - protein, 14 aa, synthetic construct
GLVDLGDPYTCTLI

SEQ ID NO: 3619 - protein, 12 aa, synthetic construct
GLVDLASNDKLI

SEQ ID NO: 3620 - protein, 13 aa, synthetic construct
GLGVVGEMEDMLI

SEQ ID NO: 3621 - protein, 13 aa, synthetic construct
GLGVPPSYVQGEI

SEQ ID NO: 3622 - protein, 11 aa, synthetic construct
GLGVPPSYVLG

SEQ ID NO: 3623 - protein, 13 aa, synthetic construct
GLGVLWGRRSKLI

SEQ ID NO: 3624 - protein, 13 aa, synthetic construct
GLGVLLWDTAKLI

SEQ ID NO: 3625 - protein, 12 aa, synthetic construct
GLGGPPCYVLGV

SEQ ID NO: 3626 - protein, 14 aa, synthetic construct
GLGVGRGLRGTDKL

SEQ ID NO: 3627 - protein, 13 aa, synthetic construct
GLGVGRGIRRKLI

SEQ ID NO: 3628 - protein, 14 aa, synthetic construct
GLGVGRGIRGTDKL

SEQ ID NO: 3629 - protein, 14 aa, synthetic construct
GLGVASYGGGSYTD

SEQ ID NO: 3630 - protein, 13 aa, synthetic construct
GLGTGGYAGDKLI

SEQ ID NO: 3631 - protein, 13 aa, synthetic construct
GLGRAFLRTLSTD

SEQ ID NO: 3632 - protein, 14 aa, synthetic construct
GLGLRRGIRGTDKL

SEQ ID NO: 3633 - protein, 11 aa, synthetic construct
GLGGVGEGGCW

SEQ ID NO: 3634 - protein, 14 aa, synthetic construct
GLGGRRGVRGSDKL

SEQ ID NO: 3635 - protein, 14 aa, synthetic construct
GLGGPSWYWGIPDK

SEQ ID NO: 3636 - protein, 14 aa, synthetic construct
GLGGPSWYCGIPDK

SEQ ID NO: 3637 - protein, 14 aa, synthetic construct
GLGEHPYWGIYTEK

SEQ ID NO: 3638 - protein, 13 aa, synthetic construct
GLGEGGDTPDNLI

SEQ ID NO: 3639 - protein, 13 aa, synthetic construct
ALVELADKDDNLF

SEQ ID NO: 3640 - protein, 13 aa, synthetic construct
DLVELLGDTVKLI

SEQ ID NO: 3641 - protein, 14 aa, synthetic construct
DLWELTGGYADKLI

SEQ ID NO: 3642 - protein, 13 aa, synthetic construct
DLWELTFLTDKLI

SEQ ID NO: 3643 - protein, 13 aa, synthetic construct
DLWELSKGYKKKL

SEQ ID NO: 3644 - protein, 12 aa, synthetic construct
DLWELLHTDKLI

SEQ ID NO: 3645 - protein, 13 aa, synthetic construct
DLWELLGDTDKLI

SEQ ID NO: 3646 - protein, 14 aa, synthetic construct
DLWELGPGGYAGKL

SEQ ID NO: 3647 - protein, 13 aa, synthetic construct
DLWELGDSSWDTR

SEQ ID NO: 3648 - protein, 13 aa, synthetic construct
DLWELGDKDDKLN

SEQ ID NO: 3649 - protein, 14 aa, synthetic construct
DLWELALPGIHTDK

SEQ ID NO: 3650 - protein, 14 aa, synthetic construct
DLWEHTGVWTDQLI

SEQ ID NO: 3651 - protein, 13 aa, synthetic construct
DLWEGGDTPDKLI

SEQ ID NO: 3652 - protein, 11 aa, synthetic construct
DLWEGDTDKLI

SEQ ID NO: 3653 - protein, 13 aa, synthetic construct
DLVVPPSYVMGEI

SEQ ID NO: 3654 - protein, 14 aa, synthetic construct
DLVRPFLRTLYTDK

SEQ ID NO: 3655 - protein, 14 aa, synthetic construct
DLVRAFLRTLYTDK

SEQ ID NO: 3656 - protein, 14 aa, synthetic construct
DLVQIANWGIYTDK

SEQ ID NO: 3657 - protein, 11 aa, synthetic construct
DLVKPSNARSS

SEQ ID NO: 3658 - protein, 10 aa, synthetic construct
DLVEQEYTDK

SEQ ID NO: 3659 - protein, 14 aa, synthetic construct
DLVEPVLGDIYTDK

SEQ ID NO: 3660 - protein, 14 aa, synthetic construct
DLVEPPSYVLGDTD

SEQ ID NO: 3661 - protein, 13 aa, synthetic construct
DLVELWDSSWYTR

SEQ ID NO: 3662 - protein, 9 aa, synthetic construct
DLVELSPFT

SEQ ID NO: 3663 - protein, 14 aa, synthetic construct
DLVELPYRGIRTDK

SEQ ID NO: 3664 - protein, 13 aa, synthetic construct
DLVELMGDTDKLI

SEQ ID NO: 3665 - protein, 12 aa, synthetic construct
DLVELLQTDKII

SEQ ID NO: 3666 - protein, 13 aa, synthetic construct
DLWELWGIRSKLN

SEQ ID NO: 3667 - protein, 14 aa, synthetic construct
DLWEPGLPLLWATD

SEQ ID NO: 3668 - protein, 14 aa, synthetic construct
DLWEPTGGWTDKLI

SEQ ID NO: 3669 - protein, 14 aa, synthetic construct
DRGEHPYWGIYTDK

SEQ ID NO: 3670 - protein, 14 aa, synthetic construct
EIGEIANWGINTDK

SEQ ID NO: 3671 - protein, 11 aa, synthetic construct
EIGEGYTDKLI

SEQ ID NO: 3672 - protein, 9 aa, synthetic construct
EHAELRERD

SEQ ID NO: 3673 - protein, 10 aa, synthetic construct
DVVELSHFTG

SEQ ID NO: 3674 - protein, 14 aa, synthetic construct
DVVELEWVRRGTDK

SEQ ID NO: 3675 - protein, 13 aa, synthetic construct
DVGELLGDTDKVI

SEQ ID NO: 3676 - protein, 13 aa, synthetic construct
DRGQGVGYPRSTH

SEQ ID NO: 3677 - protein, 13 aa, synthetic construct
DRGEVPKDTDKLI

SEQ ID NO: 3678 - protein, 12 aa, synthetic construct
DRGELWIHDKLI

SEQ ID NO: 3679 - protein, 12 aa, synthetic construct
DRGELVSNDKLI

SEQ ID NO: 3680 - protein, 13 aa, synthetic construct
DRGELLWDTDKLI

SEQ ID NO: 3681 - protein, 12 aa, synthetic construct
DRGAGGYTDKLI

SEQ ID NO: 3682 - protein, 12 aa, synthetic construct
DLWEPVTTIKST

SEQ ID NO: 3683 - protein, 10 aa, synthetic construct
DQWELAETDK

SEQ ID NO: 3684 - protein, 13 aa, synthetic construct
DPGEVHTDTDKLI

SEQ ID NO: 3685 - protein, 14 aa, synthetic construct
DPGELVSLGYTHKL

SEQ ID NO: 3686 - protein, 14 aa, synthetic construct
DPGELVSLGYTDNL

SEQ ID NO: 3687 - protein, 14 aa, synthetic construct
DPGELVSLGYTDKL

SEQ ID NO: 3688 - protein, 10 aa, synthetic construct
DPGELVSLGY

SEQ ID NO: 3689 - protein, 14 aa, synthetic construct
DPGELSPFTGGHKL

SEQ ID NO: 3690 - protein, 14 aa, synthetic construct
DPGELGDTYPDKLI

SEQ ID NO: 3691 - protein, 14 aa, synthetic construct
DLWGPSWYWGIPDK

SEQ ID NO: 3692 - protein, 14 aa, synthetic construct
DLWEVREGDSSWDT

SEQ ID NO: 3693 - protein, 13 aa, synthetic construct
DLWEVEWGIRVTD

SEQ ID NO: 3694 - protein, 14 aa, synthetic construct
DLVELLLMVDTDKL

SEQ ID NO: 3695 - protein, 12 aa, synthetic construct
DLVELGSTDKLI

SEQ ID NO: 3696 - protein, 13 aa, synthetic construct
GLGEGGDTPDKLF

SEQ ID NO: 3697 - protein, 13 aa, synthetic construct
DLVELGDSSWYTR

SEQ ID NO: 3698 - protein, 13 aa, synthetic construct
DLGQLVGGYDEKL

SEQ ID NO: 3699 - protein, 12 aa, synthetic construct
DLGPGGYTDKLI

SEQ ID NO: 3700 - protein, 14 aa, synthetic construct
DLGNFAWGIRWRQH

SEQ ID NO: 3701 - protein, 14 aa, synthetic construct
DLGLGRGIRGTDKL

SEQ ID NO: 3702 - protein, 10 aa, synthetic construct
DLGKEFVITM

SEQ ID NO: 3703 - protein, 14 aa, synthetic construct
DLGGPTSYWGIPDK

SEQ ID NO: 3704 - protein, 14 aa, synthetic construct
DLGGPSWYWGIHDK

SEQ ID NO: 3705 - protein, 14 aa, synthetic construct
DLGGPSWNWGRPDK

SEQ ID NO: 3706 - protein, 14 aa, synthetic construct
DLGGPSWNWGIPDK

SEQ ID NO: 3707 - protein, 14 aa, synthetic construct
DLGGLTGGYADKLI

SEQ ID NO: 3708 - protein, 12 aa, synthetic construct
DLGGLGSTDKLI

SEQ ID NO: 3709 - protein, 14 aa, synthetic construct
DLGGLELGDTDKLI

SEQ ID NO: 3710 - protein, 14 aa, synthetic construct
DLGEVVGGYDDKLI

SEQ ID NO: 3711 - protein, 13 aa, synthetic construct
DLGEVTKDTDKLI

SEQ ID NO: 3712 - protein, 13 aa, synthetic construct
DLGEVPTYTDKLI

SEQ ID NO: 3713 - protein, 13 aa, synthetic construct
DLGEVPTDTYKLI

SEQ ID NO: 3714 - protein, 13 aa, synthetic construct
DLGEVPTDTEKLI

SEQ ID NO: 3715 - protein, 13 aa, synthetic construct
DLGEVPTDTDKLN

SEQ ID NO: 3716 - protein, 13 aa, synthetic construct
DLGEVPKDTDTLI

SEQ ID NO: 3717 - protein, 13 aa, synthetic construct
DLGEVPKDTDKLI

SEQ ID NO: 3718 - protein, 13 aa, synthetic construct
DLGEVHTDTDKII

SEQ ID NO: 3719 - protein, 13 aa, synthetic construct
DLGEVGIHPIKSS

SEQ ID NO: 3720 - protein, 14 aa, synthetic construct
DLGEVGGYARTYKL

SEQ ID NO: 3721 - protein, 14 aa, synthetic construct
DLGEVGGYARTDKL

SEQ ID NO: 3722 - protein, 14 aa, synthetic construct
DLGEVEWGIRVTDK

SEQ ID NO: 3723 - protein, 14 aa, synthetic construct
DLGQLVSLGYTDKL

SEQ ID NO: 3724 - protein, 12 aa, synthetic construct
DLGQLWIHDKLI

SEQ ID NO: 3725 - protein, 14 aa, synthetic construct
DLGRAFILTLYTDK

SEQ ID NO: 3726 - protein, 13 aa, synthetic construct
DLGVPPSYVLWEI

SEQ ID NO: 3727 - protein, 14 aa, synthetic construct
DLVELFLMGDTDKL

SEQ ID NO: 3728 - protein, 11 aa, synthetic construct
DLVEGDTDKLN

SEQ ID NO: 3729 - protein, 8 aa, synthetic construct
DLTRKPNK

SEQ ID NO: 3730 - protein, 13 aa, synthetic construct
DLREVWGIRSKLI

SEQ ID NO: 3731 - protein, 14 aa, synthetic construct
DLRELVKGDTDKLI

SEQ ID NO: 3732 - protein, 12 aa, synthetic construct
DLRELGYTHKHI

SEQ ID NO: 3733 - protein, 10 aa, synthetic construct
DLLSLNQNSW

SEQ ID NO: 3734 - protein, 13 aa, synthetic construct
DLLELIDVDKNKL

SEQ ID NO: 3735 - protein, 13 aa, synthetic construct
DLGYPHSYVLWDT

SEQ ID NO: 3736 - protein, 14 aa, synthetic construct
DLGVRRVIRGTDKL

SEQ ID NO: 3737 - protein, 13 aa, synthetic construct
DLGVPPTYVLGEI

SEQ ID NO: 3738 - protein, 13 aa, synthetic construct
DLGVPHSYVLGEI

SEQ ID NO: 3739 - protein, 14 aa, synthetic construct
DLGRAFLRSLYTDK

SEQ ID NO: 3740 - protein, 8 aa, synthetic construct
DLGVPHSY

SEQ ID NO: 3741 - protein, 13 aa, synthetic construct
DLGVLLGDTDKLI

SEQ ID NO: 3742 - protein, 13 aa, synthetic construct
DLGVLGDSSWDTR

SEQ ID NO: 3743 - protein, 13 aa, synthetic construct
DLGVHPSYVMGEI

SEQ ID NO: 3744 - protein, 13 aa, synthetic construct
DLGVHPSYVLGEL

SEQ ID NO: 3745 - protein, 14 aa, synthetic construct
DLGVGRGIRGTDKL

SEQ ID NO: 3746 - protein, 13 aa, synthetic construct
DLGVGRGILGTDK

SEQ ID NO: 3747 - protein, 13 aa, synthetic construct
DLGTGGYAGDKLI

SEQ ID NO: 3748 - protein, 14 aa, synthetic construct
DLGRAFVRTLYTDQ

SEQ ID NO: 3749 - protein, 13 aa, synthetic construct
DLGRAFVLTLYTD

SEQ ID NO: 3750 - protein, 13 aa, synthetic construct
DLGRAFLRTLYTD

SEQ ID NO: 3751 - protein, 6 aa, synthetic construct
EIGRAN

SEQ ID NO: 3752 - protein, 13 aa, synthetic construct
EIWELGRVYEDKL

SEQ ID NO: 3753 - protein, 9 aa, synthetic construct
EKDELEDEY

SEQ ID NO: 3754 - protein, 13 aa, synthetic construct
ELCELTFLNDKLI

SEQ ID NO: 3755 - protein, 13 aa, synthetic construct
GLGDLGDSSWDTR

SEQ ID NO: 3756 - protein, 12 aa, synthetic construct
GLGDLFLVGDTD

SEQ ID NO: 3757 - protein, 14 aa, synthetic construct
GLGDLEWGIRGTDK

SEQ ID NO: 3758 - protein, 14 aa, synthetic construct
GLGDLCLRDRLATA

SEQ ID NO: 3759 - protein, 13 aa, synthetic construct
GLGDLCGRRSQLI

SEQ ID NO: 3760 - protein, 14 aa, synthetic construct
GLGDISPFTGGHKL

SEQ ID NO: 3761 - protein, 14 aa, synthetic construct
GLGDIANWGIYTDK

SEQ ID NO: 3762 - protein, 12 aa, synthetic construct
GLGDHLHPVNLS

SEQ ID NO: 3763 - protein, 12 aa, synthetic construct
GLGDGGGEARTD

SEQ ID NO: 3764 - protein, 12 aa, synthetic construct
GLGDGGDKNKLI

SEQ ID NO: 3765 - protein, 11 aa, synthetic construct
GLGDGDTDKLI

SEQ ID NO: 3766 - protein, 7 aa, synthetic construct
GLGDGDT

SEQ ID NO: 3767 - protein, 10 aa, synthetic construct
GLGDASYAGG

SEQ ID NO: 3768 - protein, 13 aa, synthetic construct
GLGAVWGIRSKLI

SEQ ID NO: 3769 - protein, 14 aa, synthetic construct
GLGAVVWGTTDKVI

SEQ ID NO: 3770 - protein, 13 aa, synthetic construct
GLGAVLSDTDTLI

SEQ ID NO: 3771 - protein, 6 aa, synthetic construct
GLGAVA

SEQ ID NO: 3772 - protein, 12 aa, synthetic construct
GLGAPRGCVLGV

SEQ ID NO: 3773 - protein, 12 aa, synthetic construct
GLGALWIDDNLI

SEQ ID NO: 3774 - protein, 14 aa, synthetic construct
GLGALVWGTTDKLI

SEQ ID NO: 3775 - protein, 14 aa, synthetic construct
GLGALVPTFRGPDH

SEQ ID NO: 3776 - protein, 14 aa, synthetic construct
GLGALVLGDTDQLI

SEQ ID NO: 3777 - protein, 10 aa, synthetic construct
GLGALPYRGK

SEQ ID NO: 3778 - protein, 13 aa, synthetic construct
GLGALLPTFSGTD

SEQ ID NO: 3779 - protein, 13 aa, synthetic construct
GLGALLPTFRGTD

SEQ ID NO: 3780 - protein, 14 aa, synthetic construct
GLGDLGDTLATAQL

SEQ ID NO: 3781 - protein, 14 aa, synthetic construct
GLGDLGGGYDDKLI

SEQ ID NO: 3782 - protein, 14 aa, synthetic construct
GLGDLGGYARTDKL

SEQ ID NO: 3783 - protein, 13 aa, synthetic construct
GLGDVLGETDNVI

SEQ ID NO: 3784 - protein, 13 aa, synthetic construct
GLGEGGDTADKVI

SEQ ID NO: 3785 - protein, 13 aa, synthetic construct
GLGEGGDPPDILI

SEQ ID NO: 3786 - protein, 11 aa, synthetic construct
GLGEGDTVKLI

SEQ ID NO: 3787 - protein, 11 aa, synthetic construct
GLGEGDTEKHN

SEQ ID NO: 3788 - protein, 11 aa, synthetic construct
GLGEGDTDKLF

SEQ ID NO: 3789 - protein, 11 aa, synthetic construct
GLGEGDAAKLI

SEQ ID NO: 3790 - protein, 12 aa, synthetic construct
GLGEAGTTRTSS

SEQ ID NO: 3791 - protein, 12 aa, synthetic construct
GLGDVWIHDKLI

SEQ ID NO: 3792 - protein, 14 aa, synthetic construct
GLGDVSVGDKSKLI

SEQ ID NO: 3793 - protein, 9 aa, synthetic construct
GLGDVPGGY

SEQ ID NO: 3794 - protein, 12 aa, synthetic construct
GLGDVLHTDKLI

SEQ ID NO: 3795 - protein, 14 aa, synthetic construct
GLGDVERGIRGTDK

SEQ ID NO: 3796 - protein, 12 aa, synthetic construct
GLGDLGSTDKII

SEQ ID NO: 3797 - protein, 12 aa, synthetic construct
GLGDRELGDIYT

SEQ ID NO: 3798 - protein, 6 aa, synthetic construct
GLGDMG

SEQ ID NO: 3799 - protein, 14 aa, synthetic construct
GLGDLVWGTTDKLI

SEQ ID NO: 3800 - protein, 14 aa, synthetic construct
GLGDLVLGDTDKLL

SEQ ID NO: 3801 - protein, 13 aa, synthetic construct
GLGDLTFLPDKHI

SEQ ID NO: 3802 - protein, 12 aa, synthetic construct
GLGDLSPFSGGQ

SEQ ID NO: 3803 - protein, 14 aa, synthetic construct
GLGDLPYRGIRTDK

SEQ ID NO: 3804 - protein, 14 aa, synthetic construct
GLGDLLWGTTDKII

SEQ ID NO: 3805 - protein, 11 aa, synthetic construct
GLGDLLHTDKH

SEQ ID NO: 3806 - protein, 14 aa, synthetic construct
GLGDLGTGGYADKL

SEQ ID NO: 3807 - protein, 12 aa, synthetic construct
GLGDLGSTEKHI

SEQ ID NO: 3808 - protein, 13 aa, synthetic construct
GLGALLGVTSKLI

SEQ ID NO: 3809 - protein, 13 aa, synthetic construct
GLGALLGDTDTLI

SEQ ID NO: 3810 - protein, 13 aa, synthetic construct
GLGALLGDTDKLI

SEQ ID NO: 3811 - protein, 14 aa, synthetic construct
ERGEPVLGEIYTDK

SEQ ID NO: 3812 - protein, 12 aa, synthetic construct
GGGDLGCTDELL

SEQ ID NO: 3813 - protein, 13 aa, synthetic construct
GGGAVSGIGRLLI

SEQ ID NO: 3814 - protein, 8 aa, synthetic construct
GGGAVAWG

SEQ ID NO: 3815 - protein, 9 aa, synthetic construct
GGGALLGVT

SEQ ID NO: 3816 - protein, 9 aa, synthetic construct
GGGAFLPSW

SEQ ID NO: 3817 - protein, 13 aa, synthetic construct
GEGEAVLGDRYTD

SEQ ID NO: 3818 - protein, 6 aa, synthetic construct
FMMKTD

SEQ ID NO: 3819 - protein, 14 aa, synthetic construct
FLGNSVLGDTRLNS

SEQ ID NO: 3820 - protein, 10 aa, synthetic construct
EVGEVGGTPD

SEQ ID NO: 3821 - protein, 11 aa, synthetic construct
ESGELPKEAYK

SEQ ID NO: 3822 - protein, 14 aa, synthetic construct
ERGEVGVTYPDKVI

SEQ ID NO: 3823 - protein, 14 aa, synthetic construct
ERGALVWGTTDTLI

SEQ ID NO: 3824 - protein, 11 aa, synthetic construct
GGGELGATEKV

SEQ ID NO: 3825 - protein, 14 aa, synthetic construct
ERGALSPFTGGHKL

SEQ ID NO: 3826 - protein, 13 aa, synthetic construct
ELGRAFRRTLYTD

SEQ ID NO: 3827 - protein, 13 aa, synthetic construct
ELGEVPTDTDKLI

SEQ ID NO: 3828 - protein, 14 aa, synthetic construct
ELGEPGLPLLGDTD

SEQ ID NO: 3829 - protein, 14 aa, synthetic construct
ELGELREGDKNKLI

SEQ ID NO: 3830 - protein, 14 aa, synthetic construct
ELGELPYRGIRTDK

SEQ ID NO: 3831 - protein, 12 aa, synthetic construct
ELGELGSTDKLI

SEQ ID NO: 3832 - protein, 13 aa, synthetic construct
ELGELGDSSWDTR

SEQ ID NO: 3833 - protein, 14 aa, synthetic construct
ELGELEGGICGTDK

SEQ ID NO: 3834 - protein, 14 aa, synthetic construct
ELGELCLGDTLATA

SEQ ID NO: 3835 - protein, 13 aa, synthetic construct
ELGALVVGHTVKL

SEQ ID NO: 3836 - protein, 8 aa, synthetic construct
GGGELAWG

SEQ ID NO: 3837 - protein, 12 aa, synthetic construct
GGGEVSRVGGGL

SEQ ID NO: 3838 - protein, 12 aa, synthetic construct
GLGALGSTEKLF

SEQ ID NO: 3839 - protein, 14 aa, synthetic construct
GLAELSPFTGGHKL

SEQ ID NO: 3840 - protein, 12 aa, synthetic construct
GLGALGSTDKLI

SEQ ID NO: 3841 - protein, 14 aa, synthetic construct
GLGALGGGYDDKLL

SEQ ID NO: 3842 - protein, 12 aa, synthetic construct
GLGALGDTDKLI

SEQ ID NO: 3843 - protein, 14 aa, synthetic construct
GLGALAWGSYTDKL

SEQ ID NO: 3844 - protein, 12 aa, synthetic construct
GLGAGGYTDTLI

SEQ ID NO: 3845 - protein, 12 aa, synthetic construct
GLGAGGYTDQLI

SEQ ID NO: 3846 - protein, 12 aa, synthetic construct
GLGAGGYTAKLF

SEQ ID NO: 3847 - protein, 12 aa, synthetic construct
GLGAGGYAGDKL

SEQ ID NO: 3848 - protein, 6 aa, synthetic construct
GLGAGG

SEQ ID NO: 3849 - protein, 12 aa, synthetic construct
GLGAFLPYWGLP

SEQ ID NO: 3850 - protein, 10 aa, synthetic construct
GLGAFLPYWG

SEQ ID NO: 3851 - protein, 13 aa, synthetic construct
GLAEILGDTDKLI

SEQ ID NO: 3852 - protein, 9 aa, synthetic construct
GGGGGVGGA

SEQ ID NO: 3853 - protein, 12 aa, synthetic construct
GLAEIHHTDKLI

SEQ ID NO: 3854 - protein, 12 aa, synthetic construct
GIWELGYTDKLI

SEQ ID NO: 3855 - protein, 13 aa, synthetic construct
GIGYIYLGTTDIL

SEQ ID NO: 3856 - protein, 12 aa, synthetic construct
GIGELWIHDKLI

SEQ ID NO: 3857 - protein, 12 aa, synthetic construct
GICELGSTEKLI

SEQ ID NO: 3858 - protein, 13 aa, synthetic construct
GHGEVPTDTDKLI

SEQ ID NO: 3859 - protein, 12 aa, synthetic construct
GGGVVVRPDERL

SEQ ID NO: 3860 - protein, 9 aa, synthetic construct
GGGVVGWGG

SEQ ID NO: 3861 - protein, 6 aa, synthetic construct
GGGVVA

SEQ ID NO: 3862 - protein, 14 aa, synthetic construct
GGGVRRGLRGTDQL

SEQ ID NO: 3863 - protein, 11 aa, synthetic construct
GGGGPGLPVLG

SEQ ID NO: 3864 - protein, 14 aa, synthetic construct
GVGELPYRGLRTDK

SEQ ID NO: 3865 - protein, 13 aa, synthetic construct
GVGELSFVPGKVI

SEQ ID NO: 3866 - protein, 13 aa, synthetic construct
GVGELVGDTDKLL

SEQ ID NO: 3867 - protein, 14 aa, synthetic construct
PLGELREGDKNKLI

SEQ ID NO: 3868 - protein, 12 aa, synthetic construct
QLGGLIRYIVTS

SEQ ID NO: 3869 - protein, 13 aa, synthetic construct
PVGDGGHTPIKHY

SEQ ID NO: 3870 - protein, 11 aa, synthetic construct
PVCQQVTQTHL

SEQ ID NO: 3871 - protein, 12 aa, synthetic construct
PQEEQSKNDQLI

SEQ ID NO: 3872 - protein, 13 aa, synthetic construct
PQAEQSAKRSKLI

SEQ ID NO: 3873 - protein, 13 aa, synthetic construct
PQAEHAEKDDKLI

SEQ ID NO: 3874 - protein, 13 aa, synthetic construct
PLVAGGYAGDKLI

SEQ ID NO: 3875 - protein, 12 aa, synthetic construct
PLGYLWIHDKHI

SEQ ID NO: 3876 - protein, 14 aa, synthetic construct
PLGVLAWGSYTDNL

SEQ ID NO: 3877 - protein, 13 aa, synthetic construct
PLGTWGIAPGTPD

SEQ ID NO: 3878 - protein, 14 aa, synthetic construct
PLGRAFLRTLYTDK

SEQ ID NO: 3879 - protein, 14 aa, synthetic construct
PLGRAFLRTLTTDK

SEQ ID NO: 3880 - protein, 13 aa, synthetic construct
PLGNWGIAPGTPD

SEQ ID NO: 3881 - protein, 14 aa, synthetic construct
PLGNLPTLGDLTPI

SEQ ID NO: 3882 - protein, 13 aa, synthetic construct
PLGNFDGGVKPYK

SEQ ID NO: 3883 - protein, 8 aa, synthetic construct
PLGLVAGG

SEQ ID NO: 3884 - protein, 13 aa, synthetic construct
PLGEVPTDTEKLI

SEQ ID NO: 3885 - protein, 13 aa, synthetic construct
PLGEVPTDTDKLI

SEQ ID NO: 3886 - protein, 14 aa, synthetic construct
PLGEQGLPLLGDTD

SEQ ID NO: 3887 - protein, 13 aa, synthetic construct
PLGEPPSYVLWDT

SEQ ID NO: 3888 - protein, 14 aa, synthetic construct
PLGEMTGGYLGSWD

SEQ ID NO: 3889 - protein, 12 aa, synthetic construct
PLGELVSTDKLI

SEQ ID NO: 3890 - protein, 13 aa, synthetic construct
PLGELVDSSWDPR

SEQ ID NO: 3891 - protein, 13 aa, synthetic construct
PLGELTGGYADKL

SEQ ID NO: 3892 - protein, 13 aa, synthetic construct
PLGELTFLPDKII

SEQ ID NO: 3893 - protein, 12 aa, synthetic construct
RLGAAFVRTLST

SEQ ID NO: 3894 - protein, 14 aa, synthetic construct
RLGELAWGSFTDKL

SEQ ID NO: 3895 - protein, 12 aa, synthetic construct
RLGELSVILFWG

SEQ ID NO: 3896 - protein, 13 aa, synthetic construct
SLGAGGYTGYKLN

SEQ ID NO: 3897 - protein, 14 aa, synthetic construct
SLGELGGSDRNDKL

SEQ ID NO: 3898 - protein, 12 aa, synthetic construct
SLGELGDTDKLI

SEQ ID NO: 3899 - protein, 13 aa, synthetic construct
SLGELGDSSWDTR

SEQ ID NO: 3900 - protein, 14 aa, synthetic construct
SLGEIVWGTTDKLI

SEQ ID NO: 3901 - protein, 14 aa, synthetic construct
SLGEHSPFTGGHKL

SEQ ID NO: 3902 - protein, 11 aa, synthetic construct
SLGEGDTDKLI

SEQ ID NO: 3903 - protein, 9 aa, synthetic construct
SLGEGDTDK

SEQ ID NO: 3904 - protein, 14 aa, synthetic construct
SLGDLWWIYTPINS

SEQ ID NO: 3905 - protein, 14 aa, synthetic construct
SLGDLSLRGIHTDK

SEQ ID NO: 3906 - protein, 14 aa, synthetic construct
SLGDLAWGSYTDKL

SEQ ID NO: 3907 - protein, 14 aa, synthetic construct
SLGALLPTFRGTDK

SEQ ID NO: 3908 - protein, 12 aa, synthetic construct
SLGAGGYTDKLI

SEQ ID NO: 3909 - protein, 12 aa, synthetic construct
RLGEPGTTINSS

SEQ ID NO: 3910 - protein, 14 aa, synthetic construct
SIWELVYHGYNHKL

SEQ ID NO: 3911 - protein, 14 aa, synthetic construct
SIWELALTGIHTDK

SEQ ID NO: 3912 - protein, 14 aa, synthetic construct
SIGELVLWTNDKLI

SEQ ID NO: 3913 - protein, 11 aa, synthetic construct
SEEHTTQLQTP

SEQ ID NO: 3914 - protein, 4 aa, synthetic construct
SAHL

SEQ ID NO: 3915 - protein, 14 aa, synthetic construct
RNSTRLNSRNTNTT

SEQ ID NO: 3916 - protein, 14 aa, synthetic construct
RMWTSSGGQPINST

SEQ ID NO: 3917 - protein, 12 aa, synthetic construct
RLVEPGTTINSS

SEQ ID NO: 3918 - protein, 13 aa, synthetic construct
RLGLGDTPAIDSS

SEQ ID NO: 3919 - protein, 13 aa, synthetic construct
RLGKSWGRPINSS

SEQ ID NO: 3920 - protein, 13 aa, synthetic construct
RLGEVGAKDDILI

SEQ ID NO: 3921 - protein, 14 aa, synthetic construct
PLGELSPCPGGHKL

SEQ ID NO: 3922 - protein, 14 aa, synthetic construct
PLGELLLLGDTDKL

SEQ ID NO: 3923 - protein, 8 aa, synthetic construct
GVGELVWG

SEQ ID NO: 3924 - protein, 12 aa, synthetic construct
PLGELLHTDKLI

SEQ ID NO: 3925 - protein, 14 aa, synthetic construct
LSGTWGILTPINSS

SEQ ID NO: 3926 - protein, 14 aa, synthetic construct
LSGNSPPLLGVINS

SEQ ID NO: 3927 - protein, 13 aa, synthetic construct
LMGTYWGTPINSS

SEQ ID NO: 3928 - protein, 11 aa, synthetic construct
LMGTGTPINSS

SEQ ID NO: 3929 - protein, 14 aa, synthetic construct
LLWTWGDTLAPINS

SEQ ID NO: 3930 - protein, 11 aa, synthetic construct
LLWTGTPISSS

SEQ ID NO: 3931 - protein, 13 aa, synthetic construct
LLWTCGGYAVKSS

SEQ ID NO: 3932 - protein, 14 aa, synthetic construct
LLWSILPTYWGTPI

SEQ ID NO: 3933 - protein, 13 aa, synthetic construct
LLWNWGIRTINSS

SEQ ID NO: 3934 - protein, 14 aa, synthetic construct
LLWNFAWGIRWRQH

SEQ ID NO: 3935 - protein, 11 aa, synthetic construct
LLWEGTPINSS

SEQ ID NO: 3936 - protein, 13 aa, synthetic construct
LLVNWVISTIKSS

SEQ ID NO: 3937 - protein, 14 aa, synthetic construct
LLGYVGGYCAPINS

SEQ ID NO: 3938 - protein, 14 aa, synthetic construct
LLGYVAGCGAPINS

SEQ ID NO: 3939 - protein, 13 aa, synthetic construct
LLGTYWGTPRNSS

SEQ ID NO: 3940 - protein, 14 aa, synthetic construct
LLGTYPNGGYAPIN

SEQ ID NO: 3941 - protein, 13 aa, synthetic construct
LLGTWGIRTINPS

SEQ ID NO: 3942 - protein, 13 aa, synthetic construct
LLGTWGIRTIKSS

SEQ ID NO: 3943 - protein, 12 aa, synthetic construct
LLGTWGIPINSS

SEQ ID NO: 3944 - protein, 14 aa, synthetic construct
LLGTWGILTPINLS

SEQ ID NO: 3945 - protein, 14 aa, synthetic construct
LLGTWGDTLTPINS

SEQ ID NO: 3946 - protein, 14 aa, synthetic construct
LLGTWGDTLAPLNS

SEQ ID NO: 3947 - protein, 14 aa, synthetic construct
LLGTWGDTLAPIHS

SEQ ID NO: 3948 - protein, 10 aa, synthetic construct
LLGTVLNPAG

SEQ ID NO: 3949 - protein, 13 aa, synthetic construct
LLGTTRTGGSTPI

SEQ ID NO: 3950 - protein, 14 aa, synthetic construct
LVGGPAFVLCKPIN

SEQ ID NO: 3951 - protein, 14 aa, synthetic construct
LVGGPSFVLCPPIN

SEQ ID NO: 3952 - protein, 13 aa, synthetic construct
LVGKGGIPPINSS

SEQ ID NO: 3953 - protein, 13 aa, synthetic construct
PLGALPGTGGYPI

SEQ ID NO: 3954 - protein, 13 aa, synthetic construct
PLGELLGDTDKLN

SEQ ID NO: 3955 - protein, 14 aa, synthetic construct
PLGELGYTYPDKLI

SEQ ID NO: 3956 - protein, 12 aa, synthetic construct
PLGELGSTEKLN

SEQ ID NO: 3957 - protein, 14 aa, synthetic construct
PLGELGGGYYDKLI

SEQ ID NO: 3958 - protein, 13 aa, synthetic construct
PLGELGDTYPDKL

SEQ ID NO: 3959 - protein, 13 aa, synthetic construct
PLGELGDKDEKLI

SEQ ID NO: 3960 - protein, 14 aa, synthetic construct
PLGELFILGDTDKL

SEQ ID NO: 3961 - protein, 8 aa, synthetic construct
PLGELAIP

SEQ ID NO: 3962 - protein, 14 aa, synthetic construct
PLGEISQPGIHTDK

SEQ ID NO: 3963 - protein, 14 aa, synthetic construct
PLGEIFLLGDTDKL

SEQ ID NO: 3964 - protein, 14 aa, synthetic construct
PLGDLTGGYADQLI

SEQ ID NO: 3965 - skipped

SEQ ID NO: 3966 - protein, 11 aa, synthetic construct
LVGKGTPINSS

SEQ ID NO: 3967 - protein, 10 aa, synthetic construct
PIGALIPKFR

SEQ ID NO: 3968 - protein, 14 aa, synthetic construct
NLGERTGGYLCPWD

SEQ ID NO: 3969 - protein, 9 aa, synthetic construct
NIWYKQLPR

SEQ ID NO: 3970 - protein, 5 aa, synthetic construct
MKQVG

SEQ ID NO: 3971 - protein, 14 aa, synthetic construct
LWGTSVGDTTRNSS

SEQ ID NO: 3972 - protein, 11 aa, synthetic construct
LWGTGTPINSS

SEQ ID NO: 3973 - protein, 11 aa, synthetic construct
LWGQVTPINSA

SEQ ID NO: 3974 - protein, 13 aa, synthetic construct
LVGTSWGTPIHSS

SEQ ID NO: 3975 - protein, 12 aa, synthetic construct
LVGNSSTPINSS

SEQ ID NO: 3976 - protein, 14 aa, synthetic construct
LVGNLLGDGPINSS

SEQ ID NO: 3977 - protein, 12 aa, synthetic construct
LVGLSFLRSWAP

SEQ ID NO: 3978 - protein, 14 aa, synthetic construct
SLGELGGYARTDKL

SEQ ID NO: 3979 - protein, 14 aa, synthetic construct
SLGELGGYARTHKL

SEQ ID NO: 3980 - protein, 12 aa, synthetic construct
SLGELGSTDKLI

SEQ ID NO: 3981 - protein, 11 aa, synthetic construct
SLGELSPFTGG

SEQ ID NO: 3982 - protein, 14 aa, synthetic construct
VLGEHPYWGIYTDK

SEQ ID NO: 3983 - protein, 13 aa, synthetic construct
VLGEGRGTPDKLI

SEQ ID NO: 3984 - protein, 11 aa, synthetic construct
VLGEGDTDKLI

SEQ ID NO: 3985 - protein, 14 aa, synthetic construct
VLGDLVWGTTDKLI

SEQ ID NO: 3986 - protein, 11 aa, synthetic construct
VLGDLSPFTGG

SEQ ID NO: 3987 - protein, 14 aa, synthetic construct
VLGDLREGDKIKLI

SEQ ID NO: 3988 - protein, 13 aa, synthetic construct
VLGDLLGDTDKLI

SEQ ID NO: 3989 - protein, 14 aa, synthetic construct
VLGDLEWGIRGTDK

SEQ ID NO: 3990 - protein, 13 aa, synthetic construct
VLGALEWGLTCTD

SEQ ID NO: 3991 - protein, 12 aa, synthetic construct
VLGAGIRRRYTH

SEQ ID NO: 3992 - protein, 12 aa, synthetic construct
VLGAGIRRRSTH

SEQ ID NO: 3993 - protein, 9 aa, synthetic construct
VIGKMQGVT

SEQ ID NO: 3994 - protein, 12 aa, synthetic construct
VIGEVGSTDKII

SEQ ID NO: 3995 - protein, 13 aa, synthetic construct
VIGELEWGIRGTD

SEQ ID NO: 3996 - protein, 7 aa, synthetic construct
VHERNKI

SEQ ID NO: 3997 - protein, 11 aa, synthetic construct
TRLKTSHTNTS

SEQ ID NO: 3998 - protein, 12 aa, synthetic construct
TRDVSDPVPIST

SEQ ID NO: 3999 - protein, 6 aa, synthetic construct
TQDNDY

SEQ ID NO: 4000 - protein, 13 aa, synthetic construct
TPGELWGIRSKLI

SEQ ID NO: 4001 - protein, 11 aa, synthetic construct
TLIKTIHQKTT

SEQ ID NO: 4002 - protein, 13 aa, synthetic construct
TLGVPPSYVLGEI

SEQ ID NO: 4003 - protein, 14 aa, synthetic construct
TLGRAFLRTLYIDK

SEQ ID NO: 4004 - protein, 14 aa, synthetic construct
TLGRAFLRTLSTDK

SEQ ID NO: 4005 - protein, 10 aa, synthetic construct
TLGRAFLRTL

SEQ ID NO: 4006 - protein, 14 aa, synthetic construct
TLGGPSWYWGIPDK

SEQ ID NO: 4007 - protein, 14 aa, synthetic construct
VLGEIANWGRNTDK

SEQ ID NO: 4008 - protein, 13 aa, synthetic construct
VLGELALPGIHTD

SEQ ID NO: 4009 - protein, 14 aa, synthetic construct
VLGELEWGIRGTDK

SEQ ID NO: 4010 - protein, 12 aa, synthetic construct
VLGELWIHDKLN

SEQ ID NO: 4011 - protein, 13 aa, synthetic construct
YLVKLLCDTDKLI

SEQ ID NO: 4012 - protein, 14 aa, synthetic construct
VPGELGGVYDDKLI

SEQ ID NO: 4013 - protein, 12 aa, synthetic construct
VLVEPGTTINSS

SEQ ID NO: 4014 - protein, 10 aa, synthetic construct
VLVAFLPFWW

SEQ ID NO: 4015 - protein, 13 aa, synthetic construct
VLRVPPSYVLGEI

SEQ ID NO: 4016 - protein, 13 aa, synthetic construct
VLGVPPSYVLGEI

SEQ ID NO: 4017 - protein, 14 aa, synthetic construct
VLGTGGRAVLASGE

SEQ ID NO: 4018 - protein, 14 aa, synthetic construct
VLGNWGILTPINSS

SEQ ID NO: 4019 - protein, 12 aa, synthetic construct
VLGNSGYTINST

SEQ ID NO: 4020 - protein, 14 aa, synthetic construct
VLGKPTGGWTDKLI

SEQ ID NO: 4021 - protein, 12 aa, synthetic construct
VLGELWIHDQLI

SEQ ID NO: 4022 - protein, 13 aa, synthetic construct
VLGELWGIRSKLI

SEQ ID NO: 4023 - protein, 14 aa, synthetic construct
VLGELFIMGDTDKL

SEQ ID NO: 4024 - protein, 14 aa, synthetic construct
VLGELVSLGYTDKL

SEQ ID NO: 4025 - protein, 14 aa, synthetic construct
VLGELVLGDTDKLI

SEQ ID NO: 4026 - protein, 11 aa, synthetic construct
VLGELSPFTGG

SEQ ID NO: 4027 - protein, 14 aa, synthetic construct
VLGELSLRGIHTDK

SEQ ID NO: 4028 - protein, 13 aa, synthetic construct
VLGELLGDTEKLI

SEQ ID NO: 4029 - protein, 13 aa, synthetic construct
VLGELLGDTDQLI

SEQ ID NO: 4030 - protein, 13 aa, synthetic construct
VLGELLGDTDKLI

SEQ ID NO: 4031 - protein, 14 aa, synthetic construct
VLGELGGGYAGDST

SEQ ID NO: 4032 - protein, 14 aa, synthetic construct
VLGELGDTYPDKLI

SEQ ID NO: 4033 - protein, 13 aa, synthetic construct
VLGELGDSSWDTR

SEQ ID NO: 4034 - protein, 13 aa, synthetic construct
VLGELGDKDEKLI

SEQ ID NO: 4035 - protein, 14 aa, synthetic construct
TLGEVSLRGIHTDK

SEQ ID NO: 4036 - protein, 14 aa, synthetic construct
TLGEPTGGWTDKLI

SEQ ID NO: 4037 - protein, 14 aa, synthetic construct
TLGEPPSYVLGDTD

SEQ ID NO: 4038 - protein, 14 aa, synthetic construct
SVGHVGDTYADNLI

SEQ ID NO: 4039 - protein, 13 aa, synthetic construct
SWGSPSYVPGHRQ

SEQ ID NO: 4040 - protein, 12 aa, synthetic construct
SWGRSSGYRSTH

SEQ ID NO: 4041 - protein, 10 aa, synthetic construct
SWGRGHRETH

SEQ ID NO: 4042 - protein, 12 aa, synthetic construct
SWGRGGYPRYTH

SEQ ID NO: 4043 - protein, 12 aa, synthetic construct
SWGRGGYPRETH

SEQ ID NO: 4044 - protein, 11 aa, synthetic construct
SWGPRVHRETH

SEQ ID NO: 4045 - protein, 13 aa, synthetic construct
SWGPLPGGYAGDR

SEQ ID NO: 4046 - protein, 9 aa, synthetic construct
SWGPFLRWG

SEQ ID NO: 4047 - protein, 13 aa, synthetic construct
SWGASFLRTGGHR

SEQ ID NO: 4048 - protein, 13 aa, synthetic construct
SWGASFLRTGGHP

SEQ ID NO: 4049 - protein, 13 aa, synthetic construct
SWGASFLRNGGHR

SEQ ID NO: 4050 - protein, 11 aa, synthetic construct
SVGEGDTDKLI

SEQ ID NO: 4051 - protein, 13 aa, synthetic construct
SWGSSFVLCTPIN

SEQ ID NO: 4052 - protein, 13 aa, synthetic construct
SVGDGGIYGYKLI

SEQ ID NO: 4053 - protein, 13 aa, synthetic construct
SSGVRPYYVLGEI

SEQ ID NO: 4054 - protein, 13 aa, synthetic construct
SLWELWWIRSKLI

SEQ ID NO: 4055 - protein, 14 aa, synthetic construct
SLWELGTGGYADKL

SEQ ID NO: 4056 - protein, 14 aa, synthetic construct
SLWDIGGGYDDKPI

SEQ ID NO: 4057 - protein, 13 aa, synthetic construct
SLGQGGDTPDKLI

SEQ ID NO: 4058 - protein, 14 aa, synthetic construct
SLGMAFLRTLYTDK

SEQ ID NO: 4059 - protein, 13 aa, synthetic construct
SLGKGGIPPIKST

SEQ ID NO: 4060 - protein, 14 aa, synthetic construct
SLGETTGGWTDKHI

SEQ ID NO: 4061 - protein, 14 aa, synthetic construct
SLGEMGGYARTDKL

SEQ ID NO: 4062 - protein, 13 aa, synthetic construct
SLGELVSHGYTDK

SEQ ID NO: 4063 - protein, 12 aa, synthetic construct
SWGSPTGGFAPD

SEQ ID NO: 4064 - protein, 13 aa, synthetic construct
SWGTDWGIRRDTH

SEQ ID NO: 4065 - protein, 12 aa, synthetic construct
TLGELWIHDKLN

SEQ ID NO: 4066 - protein, 12 aa, synthetic construct
TLGELGSTDQLI

SEQ ID NO: 4067 - protein, 12 aa, synthetic construct
TLGELWIHDKLI

SEQ ID NO: 4068 - protein, 12 aa, synthetic construct
TLGELWIHDELI

SEQ ID NO: 4069 - protein, 14 aa, synthetic construct
TLGELVWGTTDKII

SEQ ID NO: 4070 - protein, 14 aa, synthetic construct
TLGELVSLGYTDKL

SEQ ID NO: 4071 - protein, 14 aa, synthetic construct
TLGELSPFTGGHKL

SEQ ID NO: 4072 - protein, 14 aa, synthetic construct
TLGELSLRGIHTDK

SEQ ID NO: 4073 - protein, 14 aa, synthetic construct
TLGELPYRGIRTDK

SEQ ID NO: 4074 - protein, 14 aa, synthetic construct
TLGELPYRGIAPGT

SEQ ID NO: 4075 - protein, 12 aa, synthetic construct
TLGELLHTDQLI

SEQ ID NO: 4076 - protein, 12 aa, synthetic construct
TLGELLHTDKLI

SEQ ID NO: 4077 - protein, 13 aa, synthetic construct
TLGELLGDTNKLI

SEQ ID NO: 4078 - protein, 12 aa, synthetic construct
TLGELGDTDNLI

SEQ ID NO: 4079 - protein, 12 aa, synthetic construct
SWGTGGYTEKLI

SEQ ID NO: 4080 - protein, 14 aa, synthetic construct
TLGELAWGSYTDKL

SEQ ID NO: 4081 - protein, 14 aa, synthetic construct
TLGELALPGIHTDK

SEQ ID NO: 4082 - protein, 14 aa, synthetic construct
TLGEICLGDTLATA

SEQ ID NO: 4083 - protein, 13 aa, synthetic construct
TLGEHPYWGIYTD

SEQ ID NO: 4084 - protein, 13 aa, synthetic construct
TLGDLLGDTHKLI

SEQ ID NO: 4085 - protein, 12 aa, synthetic construct
TLGAGGYTDKLI

SEQ ID NO: 4086 - protein, 14 aa, synthetic construct
TIGELVSLGYTDKL

SEQ ID NO: 4087 - protein, 12 aa, synthetic construct
TGGKCPLGDIHR

SEQ ID NO: 4088 - protein, 11 aa, synthetic construct
SWGTRAHRYTH

SEQ ID NO: 4089 - protein, 12 aa, synthetic construct
SWGTPVLGDLHR

SEQ ID NO: 4090 - protein, 14 aa, synthetic construct
SWGTLPGGYDGDST

SEQ ID NO: 4091 - protein, 13 aa, synthetic construct
LLGTSWGIPINSS

SEQ ID NO: 4092 - protein, 14 aa, synthetic construct
LLGTSPPVQGVINS

SEQ ID NO: 4093 - protein, 14 aa, synthetic construct
LLGTSPPLLGVINS

SEQ ID NO: 4094 - protein, 14 aa, synthetic construct
LLGNILGDGPINST

SEQ ID NO: 4095 - protein, 11 aa, synthetic construct
LLGKGTPISSS

SEQ ID NO: 4096 - protein, 13 aa, synthetic construct
LLGKGGRPPINSS

SEQ ID NO: 4097 - protein, 13 aa, synthetic construct
LLGKGGIPPINST

SEQ ID NO: 4098 - protein, 13 aa, synthetic construct
LLGKGGIPPIKST

SEQ ID NO: 4099 - protein, 13 aa, synthetic construct
LLGKGGIHPIKSS

SEQ ID NO: 4100 - protein, 13 aa, synthetic construct
LLGKFLRIPIKSS

SEQ ID NO: 4101 - protein, 12 aa, synthetic construct
LLGHWGDTDKLI

SEQ ID NO: 4102 - protein, 14 aa, synthetic construct
LLGHSFLRSGAPIN

SEQ ID NO: 4103 - protein, 14 aa, synthetic construct
LLGGPSFVPCTPIN

SEQ ID NO: 4104 - protein, 14 aa, synthetic construct
LLGGPSFVLCPPIN

SEQ ID NO: 4105 - protein, 14 aa, synthetic construct
LLGGPSFVLCKPIN

SEQ ID NO: 4106 - protein, 14 aa, synthetic construct
LLGGPSFVLCKPID

SEQ ID NO: 4107 - protein, 14 aa, synthetic construct
LLGGPSFVLCIPIN

SEQ ID NO: 4108 - protein, 9 aa, synthetic construct
LLGGPSFVL

SEQ ID NO: 4109 - protein, 13 aa, synthetic construct
LLGGPSFALCTPI

SEQ ID NO: 4110 - protein, 14 aa, synthetic construct
LLGGLLPTYWGTPI

SEQ ID NO: 4111 - protein, 14 aa, synthetic construct
LLGFLLPTYWGTPI

SEQ ID NO: 4112 - protein, 13 aa, synthetic construct
LLGFLLPTYCGKF

SEQ ID NO: 4113 - protein, 13 aa, synthetic construct
LLGFLLPTHWGKF

SEQ ID NO: 4114 - protein, 13 aa, synthetic construct
LLGFILPTYWGKF

SEQ ID NO: 4115 - protein, 13 aa, synthetic construct
LLGEGGIPPINSS

SEQ ID NO: 4116 - protein, 14 aa, synthetic construct
LLGDLPTLGDLTPI

SEQ ID NO: 4117 - protein, 14 aa, synthetic construct
LLGALPGSGGYPIN

SEQ ID NO: 4118 - protein, 14 aa, synthetic construct
LLGALPGPGGYPIN

SEQ ID NO: 4119 - protein, 14 aa, synthetic construct
LLENWGILTPINSS

SEQ ID NO: 4120 - protein, 14 aa, synthetic construct
LLGKLPTGGSTPRN

SEQ ID NO: 4121 - protein, 14 aa, synthetic construct
LLGKLPTGGYTDKL

SEQ ID NO: 4122 - protein, 13 aa, synthetic construct
LLGKVGIPPINSS

SEQ ID NO: 4123 - protein, 14 aa, synthetic construct
LLGLSFLRSWAPIN

SEQ ID NO: 4124 - protein, 9 aa, synthetic construct
LLGNIHTLT

SEQ ID NO: 4125 - protein, 14 aa, synthetic construct
LLGNFSYWGTPVNS

SEQ ID NO: 4126 - protein, 14 aa, synthetic construct
LLGNFSYWGTPIKS

SEQ ID NO: 4127 - protein, 14 aa, synthetic construct
LLGNFSYWGIRINS

SEQ ID NO: 4128 - protein, 14 aa, synthetic construct
LLGNFPYGRYTPIN

SEQ ID NO: 4129 - protein, 14 aa, synthetic construct
LLGNFPYEGYTPIN

SEQ ID NO: 4130 - protein, 14 aa, synthetic construct
LLGNFAWGYAGDST

SEQ ID NO: 4131 - protein, 13 aa, synthetic construct
LLGNFAWGYAGDR

SEQ ID NO: 4132 - protein, 10 aa, synthetic construct
LLGNFAWGKF

SEQ ID NO: 4133 - protein, 12 aa, synthetic construct
LLGMGDTNINSS

SEQ ID NO: 4134 - protein, 14 aa, synthetic construct
LLGLSLLRSGAPIN

SEQ ID NO: 4135 - protein, 10 aa, synthetic construct
LLGLSFLRSW

SEQ ID NO: 4136 - protein, 10 aa, synthetic construct
LLGKVTPINS

SEQ ID NO: 4137 - protein, 13 aa, synthetic construct
LLGLSFLRSGAPI

SEQ ID NO: 4138 - protein, 14 aa, synthetic construct
LLGLSFLLSGAPIN

SEQ ID NO: 4139 - protein, 14 aa, synthetic construct
LLGLSFIRYWSTIN

SEQ ID NO: 4140 - protein, 12 aa, synthetic construct
LLGLGDTPRNSS

SEQ ID NO: 4141 - protein, 12 aa, synthetic construct
LLGLGDTPINST

SEQ ID NO: 4142 - protein, 11 aa, synthetic construct
LLGLGDTPIKS

SEQ ID NO: 4143 - protein, 12 aa, synthetic construct
LLGLGDTPIISS

SEQ ID NO: 4144 - protein, 12 aa, synthetic construct
LLGLGDTPAINS

SEQ ID NO: 4145 - protein, 13 aa, synthetic construct
LLGLGDTPAIISS

SEQ ID NO: 4146 - protein, 13 aa, synthetic construct
LLGKYGGYAVNSS

SEQ ID NO: 4147 - protein, 13 aa, synthetic construct
LLGKWGIRTINSS

SEQ ID NO: 4148 - protein, 14 aa, synthetic construct
LLENTRTGGSTPIN

SEQ ID NO: 4149 - protein, 11 aa, synthetic construct
LIGALPGNWGK

SEQ ID NO: 4150 - protein, 13 aa, synthetic construct
LFGTYSGTPINSS

SEQ ID NO: 4151 - protein, 13 aa, synthetic construct
GVGGRGDMEAILF

SEQ ID NO: 4152 - protein, 13 aa, synthetic construct
HLGELGHSSCDTR

SEQ ID NO: 4153 - protein, 14 aa, synthetic construct
HHGELHYLGIRTDK

SEQ ID NO: 4154 - protein, 14 aa, synthetic construct
GVVDLGGGYYDNLI

SEQ ID NO: 4155 - protein, 14 aa, synthetic construct
GVGVRVGVYDERLM

SEQ ID NO: 4156 - protein, 14 aa, synthetic construct
GVGVRRGIRGTDKL

SEQ ID NO: 4157 - protein, 10 aa, synthetic construct
GVGVPAWYVV

SEQ ID NO: 4158 - protein, 14 aa, synthetic construct
GVGSRSGGYLGAWD

SEQ ID NO: 4159 - protein, 5 aa, synthetic construct
GVGRG

SEQ ID NO: 4160 - protein, 14 aa, synthetic construct
GVGRACLRSLYTEK

SEQ ID NO: 4161 - protein, 14 aa, synthetic construct
GVGGVVDAGQVVWG

SEQ ID NO: 4162 - protein, 7 aa, synthetic construct
GVGGVLG

SEQ ID NO: 4163 - protein, 6 aa, synthetic construct
GVGGLG

SEQ ID NO: 4164 - protein, 14 aa, synthetic construct
HQAAHQPTFRGTDK

SEQ ID NO: 4165 - protein, 7 aa, synthetic construct
GVGGGRG

SEQ ID NO: 4166 - protein, 4 aa, synthetic construct
GVGG

SEQ ID NO: 4167 - protein, 12 aa, synthetic construct
GVGEVWGIRSKL

SEQ ID NO: 4168 - protein, 13 aa, synthetic construct
GVGEVRTVTGTLI

SEQ ID NO: 4169 - protein, 13 aa, synthetic construct
GVGEVALPGFPTD

SEQ ID NO: 4170 - protein, 14 aa, synthetic construct
GVGEPPSYVLGDTD

SEQ ID NO: 4171 - protein, 11 aa, synthetic construct
GVGEPGLPLLG

SEQ ID NO: 4172 - protein, 12 aa, synthetic construct
GVGELWRHDNLI

SEQ ID NO: 4173 - protein, 12 aa, synthetic construct
GVGELWIHDKLN

SEQ ID NO: 4174 - protein, 13 aa, synthetic construct
GVGELWGIRSKLI

SEQ ID NO: 4175 - protein, 13 aa, synthetic construct
GVGELWGIGSKRI

SEQ ID NO: 4176 - protein, 7 aa, synthetic construct
HLGGQII

SEQ ID NO: 4177 - protein, 14 aa, synthetic construct
HQGELSHGDTLATA

SEQ ID NO: 4178 - protein, 14 aa, synthetic construct
LFGNWGILTPRNSS

SEQ ID NO: 4179 - protein, 13 aa, synthetic construct
ILGNYWGIPINSS

SEQ ID NO: 4180 - protein, 14 aa, synthetic construct
LFGNWGILTPINSS

SEQ ID NO: 4181 - protein, 14 aa, synthetic construct
LFGNVLGDTWAPGT

SEQ ID NO: 4182 - protein, 12 aa, synthetic construct
LFGNSSTPIHSS

SEQ ID NO: 4183 - skipped

SEQ ID NO: 4184 - protein, 10 aa, synthetic construct
IRSEGENDKL

SEQ ID NO: 4185 - protein, 13 aa, synthetic construct
ILWNWGIRTIKSS

SEQ ID NO: 4186 - protein, 14 aa, synthetic construct
ILWNFAWGIRWRQH

SEQ ID NO: 4187 - protein, 14 aa, synthetic construct
ILWLSCIRSAAPIN

SEQ ID NO: 4188 - protein, 13 aa, synthetic construct
ILRTYWGYAVNSS

SEQ ID NO: 4189 - protein, 14 aa, synthetic construct
ILGSILPTYWGTPI

SEQ ID NO: 4190 - protein, 13 aa, synthetic construct
ILGNYWGTPKHSS

SEQ ID NO: 4191 - protein, 14 aa, synthetic construct
ILGNYPTGGYEPIN

SEQ ID NO: 4192 - protein, 11 aa, synthetic construct
ILGKGTPINSS

SEQ ID NO: 4193 - protein, 13 aa, synthetic construct
ILGNWGIRTINSS

SEQ ID NO: 4194 - protein, 14 aa, synthetic construct
ILGNWGILTPINSS

SEQ ID NO: 4195 - protein, 14 aa, synthetic construct
ILGNWGILTPIKSS

SEQ ID NO: 4196 - protein, 14 aa, synthetic construct
ILGNWGDTLAPINS

SEQ ID NO: 4197 - protein, 14 aa, synthetic construct
ILGNVLGDTWGPGT

SEQ ID NO: 4198 - protein, 14 aa, synthetic construct
ILGNVLGDTWAPGS

SEQ ID NO: 4199 - protein, 12 aa, synthetic construct
ILGNSSTPINSS

SEQ ID NO: 4200 - protein, 12 aa, synthetic construct
ILGNSGYTINSS

SEQ ID NO: 4201 - protein, 14 aa, synthetic construct
ILGNRAFLYCGTPI

SEQ ID NO: 4202 - protein, 14 aa, synthetic construct
ILGNFPYGGYTPIN

SEQ ID NO: 4203 - protein, 13 aa, synthetic construct
ILGLGDTPAINSS

SEQ ID NO: 4204 - protein, 14 aa, synthetic construct
LLGNILGDGPINSS

SEQ ID NO: 4205 - protein, 13 aa, synthetic construct
LLGNIPTLGDLTP

SEQ ID NO: 4206 - protein, 11 aa, synthetic construct
LLGTSPPLLGV

SEQ ID NO: 4207 - protein, 14 aa, synthetic construct
LLGNLLGAGPINSS

SEQ ID NO: 4208 - protein, 13 aa, synthetic construct
LLGNYWGTPIKST

SEQ ID NO: 4209 - protein, 13 aa, synthetic construct
LLGNYWGIPIYSS

SEQ ID NO: 4210 - protein, 12 aa, synthetic construct
LLGNYWGIPINS

SEQ ID NO: 4211 - protein, 13 aa, synthetic construct
LLGNYWGIPIKSS

SEQ ID NO: 4212 - protein, 13 aa, synthetic construct
LLGNYWGIPEKLI

SEQ ID NO: 4213 - protein, 13 aa, synthetic construct
LLGNYSGTPINSS

SEQ ID NO: 4214 - protein, 13 aa, synthetic construct
LLGNYSAIPINSS

SEQ ID NO: 4215 - protein, 13 aa, synthetic construct
LLGNYPTGGYTPI

SEQ ID NO: 4216 - protein, 14 aa, synthetic construct
LLGNYPPGGYEPIN

SEQ ID NO: 4217 - protein, 14 aa, synthetic construct
LLGNYPPGGYAPIN

SEQ ID NO: 4218 - protein, 13 aa, synthetic construct
LLGNYGGYAVTSS

SEQ ID NO: 4219 - protein, 13 aa, synthetic construct
LLGNYGGYAVNSP

SEQ ID NO: 4220 - protein, 13 aa, synthetic construct
LLGNYGGYAVKSS

SEQ ID NO: 4221 - protein, 14 aa, synthetic construct
LLGNWVILTPINSS

SEQ ID NO: 4222 - protein, 12 aa, synthetic construct
LLGNWGTPINSS

SEQ ID NO: 4223 - protein, 13 aa, synthetic construct
LLGNWGIRTIYSS

SEQ ID NO: 4224 - protein, 13 aa, synthetic construct
LLGNWGIRTINTS

SEQ ID NO: 4225 - protein, 13 aa, synthetic construct
LLGNWGIRTIKST

SEQ ID NO: 4226 - protein, 12 aa, synthetic construct
LLGNWGIRINSS

SEQ ID NO: 4227 - protein, 14 aa, synthetic construct
LLGNWGILTPQNSS

SEQ ID NO: 4228 - protein, 14 aa, synthetic construct
LLGNWGILTPKNSS

SEQ ID NO: 4229 - protein, 13 aa, synthetic construct
LLGNWGILTPINS

SEQ ID NO: 4230 - protein, 13 aa, synthetic construct
LLGNWGIDPGTPD

SEQ ID NO: 4231 - protein, 12 aa, synthetic construct
LLGNWGIDPGTP

SEQ ID NO: 4232 - protein, 13 aa, synthetic construct
LLGNWGIAPGKPD

SEQ ID NO: 4233 - protein, 12 aa, synthetic construct
LLGPAGFTIKSS

SEQ ID NO: 4234 - protein, 12 aa, synthetic construct
LLGPSVRPGGYR

SEQ ID NO: 4235 - protein, 6 aa, synthetic construct
LLGQEV

SEQ ID NO: 4236 - protein, 14 aa, synthetic construct
LLGTFPYGGYTPIN

SEQ ID NO: 4237 - protein, 12 aa, synthetic construct
LLGTSGYTIISS

SEQ ID NO: 4238 - protein, 12 aa, synthetic construct
LLGTSGYSINSS

SEQ ID NO: 4239 - protein, 12 aa, synthetic construct
LLGTSGPPINSS

SEQ ID NO: 4240 - protein, 13 aa, synthetic construct
LLGTSGGYAVNSS

SEQ ID NO: 4241 - protein, 14 aa, synthetic construct
LLGTSERGSYTDKL

SEQ ID NO: 4242 - protein, 14 aa, synthetic construct
LLGTLPTLGELTPI

SEQ ID NO: 4243 - protein, 14 aa, synthetic construct
LLGTLPTLGDTDKL

SEQ ID NO: 4244 - protein, 11 aa, synthetic construct
LLGTGTPINSS

SEQ ID NO: 4245 - protein, 9 aa, synthetic construct
LLGTGTPDR

SEQ ID NO: 4246 - protein, 13 aa, synthetic construct
LLGTGGITTIITS

SEQ ID NO: 4247 - protein, 14 aa, synthetic construct
LLGTFSYWGTPINS

SEQ ID NO: 4248 - protein, 12 aa, synthetic construct
LLGTFPYGGYTP

SEQ ID NO: 4249 - protein, 14 aa, synthetic construct
LLGSLFPTYWGTPI

SEQ ID NO: 4250 - protein, 13 aa, synthetic construct
LLGTFLRIPINSS

SEQ ID NO: 4251 - protein, 14 aa, synthetic construct
LLGTELGGLTPINS

SEQ ID NO: 4252 - protein, 13 aa, synthetic construct
LLGTCWGTPINSS

SEQ ID NO: 4253 - protein, 14 aa, synthetic construct
LLGTCLGDTPITSS

SEQ ID NO: 4254 - protein, 13 aa, synthetic construct
LLGSWGIRTINSS

SEQ ID NO: 4255 - protein, 14 aa, synthetic construct
LLGSVGGYGAPINS

SEQ ID NO: 4256 - protein, 14 aa, synthetic construct
LLGSLLPTYWGTPD

SEQ ID NO: 4257 - protein, 14 aa, synthetic construct
LLGSLLPTYWGPPI

SEQ ID NO: 4258 - protein, 14 aa, synthetic construct
LLGSLLPTYSGTPI

SEQ ID NO: 4259 - protein, 14 aa, synthetic construct
LLGSLLPTKWGTPI

SEQ ID NO: 4260 - protein, 14 aa, synthetic construct
LLGSLLPPDWGTPI

SEQ ID NO: 4261 - protein, 13 aa, synthetic construct
LLGNWGIAHRTPD

SEQ ID NO: 4262 - protein, 14 aa, synthetic construct
LLGNWGDTLAPIQS

SEQ ID NO: 4263 - protein, 14 aa, synthetic construct
LLGNWGDTLAPIKS

SEQ ID NO: 4264 - protein, 13 aa, synthetic construct
LLGNRGIAPGTPD

SEQ ID NO: 4265 - protein, 14 aa, synthetic construct
LLGNSPYRGSTPIN

SEQ ID NO: 4266 - protein, 14 aa, synthetic construct
LLGNSPPLLWVINS

SEQ ID NO: 4267 - protein, 14 aa, synthetic construct
LLGNSPPLLGVVNS

SEQ ID NO: 4268 - protein, 14 aa, synthetic construct
LLGNSPPLLGVRNS

SEQ ID NO: 4269 - protein, 10 aa, synthetic construct
LLGNSPPLLG

SEQ ID NO: 4270 - protein, 14 aa, synthetic construct
LLGNSILGDTRRNS

SEQ ID NO: 4271 - protein, 14 aa, synthetic construct
LLGNSGILTPKNTS

SEQ ID NO: 4272 - protein, 13 aa, synthetic construct
LLGNSFILTARNS

SEQ ID NO: 4273 - protein, 13 aa, synthetic construct
LLGNRPFLYWGTP

SEQ ID NO: 4274 - protein, 11 aa, synthetic construct
LLGNRGPRYRH

SEQ ID NO: 4275 - protein, 11 aa, synthetic construct
LLGNRGPRSTH

SEQ ID NO: 4276 - protein, 14 aa, synthetic construct
LLGNRALLYWGTPI

SEQ ID NO: 4277 - protein, 12 aa, synthetic construct
LLGNSSTPIHSS

SEQ ID NO: 4278 - protein, 14 aa, synthetic construct
LLGNRAFLYLGTPI

SEQ ID NO: 4279 - protein, 14 aa, synthetic construct
LLGNQSGGQPINSS

SEQ ID NO: 4280 - protein, 14 aa, synthetic construct
LLGNPYWGIYTQIN

SEQ ID NO: 4281 - protein, 14 aa, synthetic construct
LLGNPYWGIYTPID

SEQ ID NO: 4282 - protein, 14 aa, synthetic construct
LLGNNPYRGSKQIN

SEQ ID NO: 4283 - protein, 11 aa, synthetic construct
LLGNLSDRWTH

SEQ ID NO: 4284 - protein, 14 aa, synthetic construct
LLGNLPTLGDTDKL

SEQ ID NO: 4285 - protein, 9 aa, synthetic construct
LLGNLPTLG

SEQ ID NO: 4286 - protein, 13 aa, synthetic construct
LLGNLLGDGPITH

SEQ ID NO: 4287 - protein, 14 aa, synthetic construct
LLGNLLGDGPINTS

SEQ ID NO: 4288 - protein, 14 aa, synthetic construct
LLGNLLGDGPIDSS

SEQ ID NO: 4289 - protein, 14 aa, synthetic construct
LLGNSSGGQPINSS

SEQ ID NO: 4290 - protein, 12 aa, synthetic construct
LLGNSSTPILSS

SEQ ID NO: 4291 - protein, 12 aa, synthetic construct
LLGNWGDTDKLI

SEQ ID NO: 4292 - protein, 14 aa, synthetic construct
LLGNTRTGGSAPIN

SEQ ID NO: 4293 - protein, 13 aa, synthetic construct
LLGNWEIRTINSS

SEQ ID NO: 4294 - protein, 14 aa, synthetic construct
LLGNVQGDTWAPGT

SEQ ID NO: 4295 - protein, 14 aa, synthetic construct
LLGNVLGGTWAPGT

SEQ ID NO: 4296 - protein, 14 aa, synthetic construct
LLGNVLGDTRINSS

SEQ ID NO: 4297 - protein, 14 aa, synthetic construct
LLGNVLGDTRAHGT

SEQ ID NO: 4298 - protein, 14 aa, synthetic construct
LLGNVLGDTGAPIN

SEQ ID NO: 4299 - protein, 14 aa, synthetic construct
LLGNTRTGGYGAPI

SEQ ID NO: 4300 - protein, 14 aa, synthetic construct
LLGNTRTGGSTQIN

SEQ ID NO: 4301 - protein, 14 aa, synthetic construct
LLGNTRTGGSTPIY

SEQ ID NO: 4302 - protein, 13 aa, synthetic construct
LLGNTRTGGSTPI

SEQ ID NO: 4303 - protein, 14 aa, synthetic construct
LLGNTRTGGSKPIN

SEQ ID NO: 4304 - protein, 9 aa, synthetic construct
LLGNTRTGG

SEQ ID NO: 4305 - protein, 12 aa, synthetic construct
LLGNSTTPINSS

SEQ ID NO: 4306 - protein, 14 aa, synthetic construct
LLGNTRPGGSTPIN

SEQ ID NO: 4307 - protein, 14 aa, synthetic construct
LLGNTRNGGSTPIN

SEQ ID NO: 4308 - protein, 12 aa, synthetic construct
LLGNTGYTINSS

SEQ ID NO: 4309 - protein, 14 aa, synthetic construct
LLGNSYWGIRINSS

SEQ ID NO: 4310 - protein, 14 aa, synthetic construct
LLGNSYKPTYSPIN

SEQ ID NO: 4311 - protein, 13 aa, synthetic construct
LLGNSWGIPINSS

SEQ ID NO: 4312 - protein, 14 aa, synthetic construct
LLGNSVPGDTRINS

SEQ ID NO: 4313 - protein, 14 aa, synthetic construct
LLGNSVLGGTRINS

SEQ ID NO: 4314 - protein, 14 aa, synthetic construct
LLGNSVLGDTRINP

SEQ ID NO: 4315 - protein, 14 aa, synthetic construct
LLGNSVLGDPRINS

SEQ ID NO: 4316 - protein, 14 aa, synthetic construct
LLGNSVGDTTINSS

SEQ ID NO: 4317 - protein, 11 aa, synthetic construct
DLGEVDTDKLI

SEQ ID NO: 4318 - protein, 11 aa, synthetic construct
DLGEVATDKLI

SEQ ID NO: 4319 - protein, 12 aa, synthetic construct
DLGETGTTINSS

SEQ ID NO: 4320 - protein, 13 aa, synthetic construct
APGELGDSSWYTR

SEQ ID NO: 4321 - protein, 13 aa, synthetic construct
APGEPPSYVLGDT

SEQ ID NO: 4322 - protein, 12 aa, synthetic construct
ALGEVGSTDNLI

SEQ ID NO: 4323 - protein, 12 aa, synthetic construct
APGEPGNTLNSS

SEQ ID NO: 4324 - protein, 14 aa, synthetic construct
APGEMWDTYPDKHI

SEQ ID NO: 4325 - protein, 11 aa, synthetic construct
APGEMGDSPLI

SEQ ID NO: 4326 - protein, 14 aa, synthetic construct
APGELVWGTTEKLI

SEQ ID NO: 4327 - protein, 14 aa, synthetic construct
APGELVSRGYTEKL

SEQ ID NO: 4328 - protein, 14 aa, synthetic construct
APGELVSLVYTDKL

SEQ ID NO: 4329 - protein, 14 aa, synthetic construct
APGELVSLRYTDKL

SEQ ID NO: 4330 - protein, 14 aa, synthetic construct
APGELVSLGYTHKL

SEQ ID NO: 4331 - protein, 13 aa, synthetic construct
APGELVSLGYTDK

SEQ ID NO: 4332 - protein, 14 aa, synthetic construct
APGELVAHGYTDEL

SEQ ID NO: 4333 - protein, 14 aa, synthetic construct
APGELSLRGIHTDK

SEQ ID NO: 4334 - protein, 14 aa, synthetic construct
APGELLSLGYTDKL

SEQ ID NO: 4335 - protein, 13 aa, synthetic construct
APGELLGDTNKLI

SEQ ID NO: 4336 - protein, 13 aa, synthetic construct
APGELLGDTEKLI

SEQ ID NO: 4337 - protein, 14 aa, synthetic construct
APGELGVTYPYKLI

SEQ ID NO: 4338 - protein, 14 aa, synthetic construct
APGELGTGDTRINS

SEQ ID NO: 4339 - protein, 12 aa, synthetic construct
APGELGSTEKLI

SEQ ID NO: 4340 - protein, 12 aa, synthetic construct
APGELGSTDKLT

SEQ ID NO: 4341 - protein, 12 aa, synthetic construct
APGELGSTDKII

SEQ ID NO: 4342 - protein, 14 aa, synthetic construct
APGELGETYPGKLI

SEQ ID NO: 4343 - protein, 14 aa, synthetic construct
APGELGDTYTYKLI

SEQ ID NO: 4344 - protein, 14 aa, synthetic construct
APGELGDTYPGKLI

SEQ ID NO: 4345 - protein, 13 aa, synthetic construct
APGELGDTYPDKL

SEQ ID NO: 4346 - protein, 10 aa, synthetic construct
APGEPSYAGG

SEQ ID NO: 4347 - protein, 14 aa, synthetic construct
APGEVGGGYDDKLI

SEQ ID NO: 4348 - protein, 13 aa, synthetic construct
APGEVPTDTDKLN

SEQ ID NO: 4349 - protein, 13 aa, synthetic construct
AQGEPTEGWTEKL

SEQ ID NO: 4350 - protein, 8 aa, synthetic construct
ARGALAWG

SEQ ID NO: 4351 - protein, 12 aa, synthetic construct
ARGALALPRINT

SEQ ID NO: 4352 - protein, 14 aa, synthetic construct
ARGALALPGIHTDK

SEQ ID NO: 4353 - protein, 14 aa, synthetic construct
ARGAHPYWGIYTDQ

SEQ ID NO: 4354 - protein, 13 aa, synthetic construct
ARGAGGYAGDTLI

SEQ ID NO: 4355 - protein, 13 aa, synthetic construct
ARGAGGDTPETRI

SEQ ID NO: 4356 - protein, 12 aa, synthetic construct
ARGAGGDTDKLI

SEQ ID NO: 4357 - protein, 11 aa, synthetic construct
ARGAGDTDKLI

SEQ ID NO: 4358 - protein, 12 aa, synthetic construct
ARGAGAYTAKLI

SEQ ID NO: 4359 - protein, 9 aa, synthetic construct
ARACMKQVG

SEQ ID NO: 4360 - protein, 5 aa, synthetic construct
AQVAL

SEQ ID NO: 4361 - protein, 12 aa, synthetic construct
AQGAGGDTDKHI

SEQ ID NO: 4362 - protein, 14 aa, synthetic construct
APGEVVSLGYTDKL

SEQ ID NO: 4363 - protein, 14 aa, synthetic construct
AQAEQAQPRIHTDK

SEQ ID NO: 4364 - protein, 12 aa, synthetic construct
AQAEPDTTINSS

SEQ ID NO: 4365 - protein, 14 aa, synthetic construct
APRELESLGYTDKL

SEQ ID NO: 4366 - protein, 14 aa, synthetic construct
APREIVSLGYTDKL

SEQ ID NO: 4367 - protein, 12 aa, synthetic construct
APGVPPSYVLGE

SEQ ID NO: 4368 - protein, 14 aa, synthetic construct
APGVPPSYVLGDTD

SEQ ID NO: 4369 - protein, 13 aa, synthetic construct
APGTGGIPPINSS

SEQ ID NO: 4370 - protein, 14 aa, synthetic construct
APGRAFLRTLYTDQ

SEQ ID NO: 4371 - protein, 14 aa, synthetic construct
APGRAFLRTLYTDK

SEQ ID NO: 4372 - protein, 14 aa, synthetic construct
APGGPVLGDIYTDK

SEQ ID NO: 4373 - protein, 14 aa, synthetic construct
APGGPSWYWGIPDK

SEQ ID NO: 4374 - protein, 12 aa, synthetic construct
APGELGDTDKLI

SEQ ID NO: 4375 - protein, 13 aa, synthetic construct
APGELGDSSWSTR

SEQ ID NO: 4376 - protein, 10 aa, synthetic construct
ARGEPSYAGG

SEQ ID NO: 4377 - protein, 13 aa, synthetic construct
APGELGDSSWATR

SEQ ID NO: 4378 - protein, 14 aa, synthetic construct
ANGEPPSYELWTPI

SEQ ID NO: 4379 - protein, 14 aa, synthetic construct
ANGALLPTFSVNDK

SEQ ID NO: 4380 - protein, 9 aa, synthetic construct
AMPVLNKLV

SEQ ID NO: 4381 - protein, 13 aa, synthetic construct
AMGRAVRRSLYTD

SEQ ID NO: 4382 - protein, 14 aa, synthetic construct
AMGELGGGYDDKLI

SEQ ID NO: 4383 - protein, 13 aa, synthetic construct
ALWVPPTYVLGEI

SEQ ID NO: 4384 - protein, 13 aa, synthetic construct
ALWVPPSYVMWEI

SEQ ID NO: 4385 - protein, 13 aa, synthetic construct
ALWVPPSYVLGEL

SEQ ID NO: 4386 - protein, 13 aa, synthetic construct
ALWVPPSYLLVEI

SEQ ID NO: 4387 - protein, 13 aa, synthetic construct
ALWVPPSSLLGEI

SEQ ID NO: 4388 - protein, 14 aa, synthetic construct
ALWVLRGIRGTDKL

SEQ ID NO: 4389 - protein, 13 aa, synthetic construct
ALWTGGYAGDQLI

SEQ ID NO: 4390 - protein, 14 aa, synthetic construct
ALWSALLRTLYTDK

SEQ ID NO: 4391 - protein, 14 aa, synthetic construct
ALWRAFLRTLYTYK

SEQ ID NO: 4392 - protein, 13 aa, synthetic construct
ALWGLGDKDDKLI

SEQ ID NO: 4393 - protein, 12 aa, synthetic construct
ALWEVNNTDKVI

SEQ ID NO: 4394 - protein, 13 aa, synthetic construct
ALWEVLLWDSPLI

SEQ ID NO: 4395 - protein, 13 aa, synthetic construct
ALWEVLLGDSPLI

SEQ ID NO: 4396 - protein, 13 aa, synthetic construct
ALWEVHTDTDKLI

SEQ ID NO: 4397 - protein, 12 aa, synthetic construct
ALWEVGSTGKLI

SEQ ID NO: 4398 - protein, 14 aa, synthetic construct
ALWEVEWGIMGTYK

SEQ ID NO: 4399 - protein, 14 aa, synthetic construct
ALWETTGGWTDKLI

SEQ ID NO: 4400 - protein, 14 aa, synthetic construct
ALWETSYAGGSYTD

SEQ ID NO: 4401 - protein, 14 aa, synthetic construct
ALWETPSYVLGDTD

SEQ ID NO: 4402 - protein, 12 aa, synthetic construct
ALWETGTTINSS

SEQ ID NO: 4403 - protein, 13 aa, synthetic construct
ANWELLWDTDKHI

SEQ ID NO: 4404 - protein, 14 aa, synthetic construct
ANWEPGLPLLCDTD

SEQ ID NO: 4405 - protein, 12 aa, synthetic construct
APGAGGYTDQLI

SEQ ID NO: 4406 - protein, 12 aa, synthetic construct
APGDPGTTINSS

SEQ ID NO: 4407 - protein, 14 aa, synthetic construct
APGELCLRDTLATA

SEQ ID NO: 4408 - protein, 14 aa, synthetic construct
APGELANWGINTDQ

SEQ ID NO: 4409 - protein, 14 aa, synthetic construct
APGELANWGINTDK

SEQ ID NO: 4410 - protein, 14 aa, synthetic construct
APGELAFPYWGTPD

SEQ ID NO: 4411 - protein, 14 aa, synthetic construct
APGEIREGDKNKLI

SEQ ID NO: 4412 - protein, 14 aa, synthetic construct
APGEIANWGINTDK

SEQ ID NO: 4413 - protein, 13 aa, synthetic construct
APGEGGDTPDQLI

SEQ ID NO: 4414 - protein, 13 aa, synthetic construct
APGEGGDTPDKLV

SEQ ID NO: 4415 - protein, 11 aa, synthetic construct
APGEGDTEKLI

SEQ ID NO: 4416 - protein, 11 aa, synthetic construct
APGEGDTAKLI

SEQ ID NO: 4417 - protein, 14 aa, synthetic construct
APGEFSPFTGGHKL

SEQ ID NO: 4418 - protein, 13 aa, synthetic construct
APGDLWGIRSKLI

SEQ ID NO: 4419 - protein, 13 aa, synthetic construct
APGALLGDTDKLI

SEQ ID NO: 4420 - protein, 13 aa, synthetic construct
APGDLTFLPDKLI

SEQ ID NO: 4421 - protein, 14 aa, synthetic construct
APGDLSLRGIHTDK

SEQ ID NO: 4422 - protein, 14 aa, synthetic construct
APGDLRVGDQNKLI

SEQ ID NO: 4423 - protein, 14 aa, synthetic construct
APGDLREGDKNKLI

SEQ ID NO: 4424 - protein, 14 aa, synthetic construct
APGDLREGDKDKLI

SEQ ID NO: 4425 - protein, 13 aa, synthetic construct
APGDLLGDTDQLI

SEQ ID NO: 4426 - protein, 12 aa, synthetic construct
APGDLGSTDQLI

SEQ ID NO: 4427 - protein, 12 aa, synthetic construct
APGDLGSTDKLI

SEQ ID NO: 4428 - protein, 14 aa, synthetic construct
APGDLFLLGDTDTL

SEQ ID NO: 4429 - protein, 14 aa, synthetic construct
APGDLAFPDWGTPD

SEQ ID NO: 4430 - protein, 11 aa, synthetic construct
APGDGDTDKLI

SEQ ID NO: 4431 - protein, 14 aa, synthetic construct
ARGALFVLGDTDQL

SEQ ID NO: 4432 - protein, 13 aa, synthetic construct
ARGALGDKDDKLI

SEQ ID NO: 4433 - protein, 14 aa, synthetic construct
ARGALGDTSPAQLI

SEQ ID NO: 4434 - protein, 14 aa, synthetic construct
ARGALGGGYDAKLI

SEQ ID NO: 4435 - protein, 12 aa, synthetic construct
ARGELGSTDQHI

SEQ ID NO: 4436 - protein, 14 aa, synthetic construct
ARGELGGYARTDKL

SEQ ID NO: 4437 - protein, 14 aa, synthetic construct
ARGELGGVYDDTLI

SEQ ID NO: 4438 - protein, 14 aa, synthetic construct
ARGELGGSARTEKL

SEQ ID NO: 4439 - protein, 14 aa, synthetic construct
ARGELGGGYELKLI

SEQ ID NO: 4440 - protein, 14 aa, synthetic construct
ARGELGGGYDEKLI

SEQ ID NO: 4441 - protein, 13 aa, synthetic construct
ARGELGGGYDDKL

SEQ ID NO: 4442 - protein, 14 aa, synthetic construct
ARGELGDTYPEKLI

SEQ ID NO: 4443 - protein, 14 aa, synthetic construct
ARGELGDTYAEKLI

SEQ ID NO: 4444 - protein, 14 aa, synthetic construct
ARGELGDTHPALLF

SEQ ID NO: 4445 - protein, 12 aa, synthetic construct
ARGELGDTDKLI

SEQ ID NO: 4446 - protein, 13 aa, synthetic construct
ARGELGDSSWDTR

SEQ ID NO: 4447 - protein, 13 aa, synthetic construct
ARGELGDKDEKLI

SEQ ID NO: 4448 - protein, 14 aa, synthetic construct
ARGELGAGYDDKLI

SEQ ID NO: 4449 - protein, 11 aa, synthetic construct
ARGELFLLGDT

SEQ ID NO: 4450 - protein, 14 aa, synthetic construct
ARGELFLLGDSDKL

SEQ ID NO: 4451 - protein, 14 aa, synthetic construct
ARGELDWGTTDKLI

SEQ ID NO: 4452 - protein, 13 aa, synthetic construct
ARGELALPWIHTD

SEQ ID NO: 4453 - protein, 13 aa, synthetic construct
ARGELADKDDTLI

SEQ ID NO: 4454 - protein, 14 aa, synthetic construct
ARGEIAYWGLNTDK

SEQ ID NO: 4455 - protein, 14 aa, synthetic construct
ARGEIANWGINTDQ

SEQ ID NO: 4456 - protein, 14 aa, synthetic construct
ARGEIANWGINTDK

SEQ ID NO: 4457 - protein, 13 aa, synthetic construct
ARGEHPYWGIYTD

SEQ ID NO: 4458 - protein, 14 aa, synthetic construct
ARGEHPYWGISTDK

SEQ ID NO: 4459 - protein, 13 aa, synthetic construct
ARGEGGETTINSS

SEQ ID NO: 4460 - protein, 12 aa, synthetic construct
ARGELGSTDQLI

SEQ ID NO: 4461 - protein, 12 aa, synthetic construct
ARGELGSTVHLI

SEQ ID NO: 4462 - protein, 13 aa, synthetic construct
ARGELLGDTDNLI

SEQ ID NO: 4463 - protein, 14 aa, synthetic construct
ARGELTGGYAEKLI

SEQ ID NO: 4464 - protein, 13 aa, synthetic construct
ARGEPPSYVLGDT

SEQ ID NO: 4465 - protein, 13 aa, synthetic construct
ARGEPPSYELGDT

SEQ ID NO: 4466 - protein, 12 aa, synthetic construct
ARGEPGTTINSS

SEQ ID NO: 4467 - protein, 11 aa, synthetic construct
ARGEPGTTIIS

SEQ ID NO: 4468 - protein, 12 aa, synthetic construct
ARGEPGTTIHSS

SEQ ID NO: 4469 - protein, 13 aa, synthetic construct
ARGELWGIRSKLN

SEQ ID NO: 4470 - protein, 14 aa, synthetic construct
ARGELVWGTTHKLI

SEQ ID NO: 4471 - protein, 8 aa, synthetic construct
ARGELVWG

SEQ ID NO: 4472 - protein, 14 aa, synthetic construct
ARGELVLGDTHKLI

SEQ ID NO: 4473 - protein, 14 aa, synthetic construct
ARGELVLGDTEKLI

SEQ ID NO: 4474 - protein, 14 aa, synthetic construct
ARGELVLGDTDKPI

SEQ ID NO: 4475 - protein, 13 aa, synthetic construct
ARGELTFLPDKLI

SEQ ID NO: 4476 - protein, 13 aa, synthetic construct
ARGELLGDTHKLI

SEQ ID NO: 4477 - protein, 14 aa, synthetic construct
ARGELSPFTVGHKL

SEQ ID NO: 4478 - protein, 14 aa, synthetic construct
ARGELSPFTGGHKL

SEQ ID NO: 4479 - protein, 14 aa, synthetic construct
ARGELSLRGKHTDK

SEQ ID NO: 4480 - protein, 11 aa, synthetic construct
ARGELSHVTGG

SEQ ID NO: 4481 - protein, 13 aa, synthetic construct
ARGELSFVRVWGL

SEQ ID NO: 4482 - protein, 13 aa, synthetic construct
ARGELRESSWDTR

SEQ ID NO: 4483 - protein, 14 aa, synthetic construct
ARGELREGDQNKLI

SEQ ID NO: 4484 - protein, 13 aa, synthetic construct
ARGELREGDQNKL

SEQ ID NO: 4485 - protein, 14 aa, synthetic construct
ARGELPYRGLRTDK

SEQ ID NO: 4486 - protein, 13 aa, synthetic construct
ARGELLGVTDKLI

SEQ ID NO: 4487 - protein, 13 aa, synthetic construct
ARGELLGDTNKLI

SEQ ID NO: 4488 - protein, 13 aa, synthetic construct
ARGEGGETPDKLI

SEQ ID NO: 4489 - protein, 13 aa, synthetic construct
ARGEGGDTPEKLI

SEQ ID NO: 4490 - protein, 13 aa, synthetic construct
ARGEGGDTPDQLI

SEQ ID NO: 4491 - protein, 10 aa, synthetic construct
ARGALVWGTP

SEQ ID NO: 4492 - protein, 14 aa, synthetic construct
ARGDLAWGSYTDKL

SEQ ID NO: 4493 - protein, 14 aa, synthetic construct
ARGDLALPGIHTDK

SEQ ID NO: 4494 - protein, 13 aa, synthetic construct
ARGDGGDTPDKLI

SEQ ID NO: 4495 - protein, 13 aa, synthetic construct
ARGDGGDSPDKLI

SEQ ID NO: 4496 - protein, 11 aa, synthetic construct
ARGDGDTEKLI

SEQ ID NO: 4497 - protein, 11 aa, synthetic construct
ARGDGDTDKLI

SEQ ID NO: 4498 - protein, 11 aa, synthetic construct
ARGDGDNDKLN

SEQ ID NO: 4499 - protein, 13 aa, synthetic construct
ARGAVPTDTDKLI

SEQ ID NO: 4500 - protein, 13 aa, synthetic construct
ARGARGDKDDKLI

SEQ ID NO: 4501 - protein, 14 aa, synthetic construct
ARGAPSYAGGSDTD

SEQ ID NO: 4502 - protein, 14 aa, synthetic construct
ARGAPPSYVLGDTD

SEQ ID NO: 4503 - protein, 14 aa, synthetic construct
ARGALVMGDTDNLI

SEQ ID NO: 4504 - protein, 13 aa, synthetic construct
ARGDLGDRDDKPI

SEQ ID NO: 4505 - protein, 13 aa, synthetic construct
ARGALVGDTDTLI

SEQ ID NO: 4506 - protein, 13 aa, synthetic construct
ARGALTFLPEKLI

SEQ ID NO: 4507 - protein, 13 aa, synthetic construct
ARGALTFLPDILI

SEQ ID NO: 4508 - protein, 14 aa, synthetic construct
ARGALSLRGIHPDK

SEQ ID NO: 4509 - protein, 14 aa, synthetic construct
ARGALPYRGIRTDK

SEQ ID NO: 4510 - protein, 14 aa, synthetic construct
ARGALPYRGIGTDQ

SEQ ID NO: 4511 - protein, 12 aa, synthetic construct
ARGALLHTEKLL

SEQ ID NO: 4512 - protein, 13 aa, synthetic construct
ARGALLGVTEKLL

SEQ ID NO: 4513 - protein, 12 aa, synthetic construct
ARGALGSTDKRI

SEQ ID NO: 4514 - protein, 8 aa, synthetic construct
ARGALGSP

SEQ ID NO: 4515 - protein, 13 aa, synthetic construct
ARGALGGRSWAPR

SEQ ID NO: 4516 - protein, 14 aa, synthetic construct
ARGDLCLGDTLATA

SEQ ID NO: 4517 - protein, 13 aa, synthetic construct
ARGDLGDSSWDTR

SEQ ID NO: 4518 - protein, 13 aa, synthetic construct
ARGEGGDTPDKLF

SEQ ID NO: 4519 - protein, 14 aa, synthetic construct
ARGDLVWGTPDQLI

SEQ ID NO: 4520 - protein, 13 aa, synthetic construct
ARGEGGDTPDILI

SEQ ID NO: 4521 - protein, 13 aa, synthetic construct
ARGEGGDTPDHLI

SEQ ID NO: 4522 - protein, 11 aa, synthetic construct
ARGEGDTETLI

SEQ ID NO: 4523 - protein, 11 aa, synthetic construct
ARGEGDTEKLN

SEQ ID NO: 4524 - protein, 13 aa, synthetic construct
ARGEASYAGGSYT

SEQ ID NO: 4525 - protein, 12 aa, synthetic construct
ARGDVSLRGIDP

SEQ ID NO: 4526 - protein, 13 aa, synthetic construct
ARGDVLGDTDHLL

SEQ ID NO: 4527 - protein, 12 aa, synthetic construct
ARGDVGSTDKLI

SEQ ID NO: 4528 - protein, 14 aa, synthetic construct
ARGDVGGGYEDKLI

SEQ ID NO: 4529 - protein, 13 aa, synthetic construct
ARGDPGLPLLGDT

SEQ ID NO: 4530 - protein, 13 aa, synthetic construct
ARGDLWGIRSTLI

SEQ ID NO: 4531 - protein, 14 aa, synthetic construct
ARGDLVWGTADKLI

SEQ ID NO: 4532 - protein, 12 aa, synthetic construct
ARGDLGDTDHLI

SEQ ID NO: 4533 - protein, 14 aa, synthetic construct
ARGDLVSLGYTDQL

SEQ ID NO: 4534 - protein, 14 aa, synthetic construct
ARGDLVSLGSTDKL

SEQ ID NO: 4535 - protein, 14 aa, synthetic construct
ARGDLVLGDTEKLI

SEQ ID NO: 4536 - protein, 13 aa, synthetic construct
ARGDLSFLRVWGL

SEQ ID NO: 4537 - protein, 14 aa, synthetic construct
ARGDLREWDKNKLI

SEQ ID NO: 4538 - protein, 14 aa, synthetic construct
ARGDLREGEKNQLI

SEQ ID NO: 4539 - protein, 11 aa, synthetic construct
ARGDLREGDTT

SEQ ID NO: 4540 - protein, 13 aa, synthetic construct
ARGDLLGETDKLL

SEQ ID NO: 4541 - protein, 14 aa, synthetic construct
ARGDLGNGGYSDKL

SEQ ID NO: 4542 - protein, 14 aa, synthetic construct
ARGDLGGSARPEKL

SEQ ID NO: 4543 - protein, 14 aa, synthetic construct
ARGDLGDTYPDKLI

SEQ ID NO: 4544 - protein, 14 aa, synthetic construct
ALWEPVWGTTDKLI

SEQ ID NO: 4545 - protein, 14 aa, synthetic construct
ALWEPVLGEIYTDK

SEQ ID NO: 4546 - protein, 14 aa, synthetic construct
ALWEPVLGDIYTDQ

SEQ ID NO: 4547 - protein, 12 aa, synthetic construct
ALWAGGYTYKLN

SEQ ID NO: 4548 - protein, 14 aa, synthetic construct
ALVEPSYPVGSYTD

SEQ ID NO: 4549 - protein, 10 aa, synthetic construct
ALVEPSYAGG

SEQ ID NO: 4550 - protein, 11 aa, synthetic construct
ALVEPSPFTGG

SEQ ID NO: 4551 - protein, 14 aa, synthetic construct
ALVEPHSYVMGDTD

SEQ ID NO: 4552 - protein, 13 aa, synthetic construct
ALVEPGLPLMWDT

SEQ ID NO: 4553 - protein, 14 aa, synthetic construct
ALVEPGIPLLGDTD

SEQ ID NO: 4554 - protein, 14 aa, synthetic construct
ALVEPELGDIYTDK

SEQ ID NO: 4555 - protein, 14 aa, synthetic construct
ALVEMGGSARTDKL

SEQ ID NO: 4556 - protein, 14 aa, synthetic construct
ALVEMGDTYPDKLI

SEQ ID NO: 4557 - protein, 12 aa, synthetic construct
ALVEMGDTDNII

SEQ ID NO: 4558 - protein, 13 aa, synthetic construct
ALVEMGDSSWDTR

SEQ ID NO: 4559 - protein, 13 aa, synthetic construct
ALVEMGDNNPDKL

SEQ ID NO: 4560 - protein, 10 aa, synthetic construct
ALVELWIHDK

SEQ ID NO: 4561 - protein, 13 aa, synthetic construct
ALVELWGIGSKLN

SEQ ID NO: 4562 - protein, 13 aa, synthetic construct
ALVELVYVGSTDK

SEQ ID NO: 4563 - protein, 12 aa, synthetic construct
ALVELVSNDKLI

SEQ ID NO: 4564 - protein, 13 aa, synthetic construct
ALVELVSLGYTDK

SEQ ID NO: 4565 - protein, 14 aa, synthetic construct
ALVELVSLGYADKL

SEQ ID NO: 4566 - protein, 14 aa, synthetic construct
ALVELVRGTTDKII

SEQ ID NO: 4567 - protein, 14 aa, synthetic construct
ALVELVLWDTDILI

SEQ ID NO: 4568 - protein, 13 aa, synthetic construct
ALVELTLLPDNLI

SEQ ID NO: 4569 - protein, 14 aa, synthetic construct
ALVELTGGYSDPLI

SEQ ID NO: 4570 - protein, 14 aa, synthetic construct
ALVELTGGYSAKLF

SEQ ID NO: 4571 - protein, 14 aa, synthetic construct
ALVELTGGYADTLI

SEQ ID NO: 4572 - protein, 13 aa, synthetic construct
ALVELTFLPYKLI

SEQ ID NO: 4573 - protein, 12 aa, synthetic construct
ALVEPTGGWTDK

SEQ ID NO: 4574 - protein, 14 aa, synthetic construct
ALVEPVQGDIYTDK

SEQ ID NO: 4575 - protein, 14 aa, synthetic construct
ALVERTGGYAGDST

SEQ ID NO: 4576 - protein, 13 aa, synthetic construct
ALVHLGDSSCDTR

SEQ ID NO: 4577 - protein, 12 aa, synthetic construct
ALWAGGYTDNII

SEQ ID NO: 4578 - protein, 14 aa, synthetic construct
ALVVRRGIRATDKL

SEQ ID NO: 4579 - protein, 12 aa, synthetic construct
ALVVPPYYVLGE

SEQ ID NO: 4580 - protein, 13 aa, synthetic construct
ALVVPPSYVLWEI

SEQ ID NO: 4581 - protein, 13 aa, synthetic construct
ALVVPPSYVLGEL

SEQ ID NO: 4582 - protein, 13 aa, synthetic construct
ALVVPPSYVLGEI

SEQ ID NO: 4583 - protein, 13 aa, synthetic construct
ALVVPPSYEMGEL

SEQ ID NO: 4584 - protein, 14 aa, synthetic construct
ALVVLRGIRGTDKL

SEQ ID NO: 4585 - protein, 13 aa, synthetic construct
ALVQLLGDTDKLI

SEQ ID NO: 4586 - protein, 14 aa, synthetic construct
ALVQLCMGDTLATA

SEQ ID NO: 4587 - protein, 14 aa, synthetic construct
ALVQHPYWGIYTDK

SEQ ID NO: 4588 - protein, 13 aa, synthetic construct
ALVGPSWYWGIPD

SEQ ID NO: 4589 - protein, 14 aa, synthetic construct
ALVERTGGYLGSWD

SEQ ID NO: 4590 - protein, 14 aa, synthetic construct
ALVGPSWYCGIPDK

SEQ ID NO: 4591 - protein, 14 aa, synthetic construct
ALVGLCLGDTLATA

SEQ ID NO: 4592 - protein, 13 aa, synthetic construct
ALVGILGDTDKLI

SEQ ID NO: 4593 - protein, 9 aa, synthetic construct
ALVEVSPFT

SEQ ID NO: 4594 - protein, 13 aa, synthetic construct
ALVEVLLGDSPLI

SEQ ID NO: 4595 - protein, 13 aa, synthetic construct
ALVEVGDTPDKLI

SEQ ID NO: 4596 - protein, 14 aa, synthetic construct
ALVEVECGIRGTYK

SEQ ID NO: 4597 - protein, 14 aa, synthetic construct
ALVEVCLGDTLATA

SEQ ID NO: 4598 - protein, 14 aa, synthetic construct
ALVEVAWGSYTDKL

SEQ ID NO: 4599 - protein, 14 aa, synthetic construct
ALVETPSYVLGDTD

SEQ ID NO: 4600 - protein, 13 aa, synthetic construct
ALVETPSYVLGDT

SEQ ID NO: 4601 - protein, 13 aa, synthetic construct
ALVELTFLPHKLI

SEQ ID NO: 4602 - protein, 13 aa, synthetic construct
ALVELTFLHDILM

SEQ ID NO: 4603 - protein, 11 aa, synthetic construct
ALVELSTFTGG

SEQ ID NO: 4604 - protein, 14 aa, synthetic construct
ALVELFILGDTDKL

SEQ ID NO: 4605 - protein, 13 aa, synthetic construct
ALVELGDTYTDKL

SEQ ID NO: 4606 - protein, 12 aa, synthetic construct
ALVELGDTDKLI

SEQ ID NO: 4607 - protein, 13 aa, synthetic construct
ALVELGDTDDKLI

SEQ ID NO: 4608 - protein, 13 aa, synthetic construct
ALVELGDSPWDTR

SEQ ID NO: 4609 - protein, 13 aa, synthetic construct
ALVELGDKDYKLI

SEQ ID NO: 4610 - protein, 13 aa, synthetic construct
ALVELGDKDDLIF

SEQ ID NO: 4611 - protein, 13 aa, synthetic construct
ALVELGDKDDKLI

SEQ ID NO: 4612 - protein, 14 aa, synthetic construct
ALVELGDHYTDKLI

SEQ ID NO: 4613 - protein, 13 aa, synthetic construct
ALVELGCSSWDTR

SEQ ID NO: 4614 - protein, 13 aa, synthetic construct
ALVELGARSWDTR

SEQ ID NO: 4615 - protein, 14 aa, synthetic construct
ALVELFLLGDTDQL

SEQ ID NO: 4616 - protein, 13 aa, synthetic construct
ALVELFILGDTDK

SEQ ID NO: 4617 - protein, 14 aa, synthetic construct
ALVELGDTYTSKLI

SEQ ID NO: 4618 - protein, 14 aa, synthetic construct
ALVELEWGITGTDK

SEQ ID NO: 4619 - protein, 14 aa, synthetic construct
ALVELEWGIRGTDK

SEQ ID NO: 4620 - protein, 13 aa, synthetic construct
ALVELEWGIRGTD

SEQ ID NO: 4621 - protein, 14 aa, synthetic construct
ALVELECVISGTDK

SEQ ID NO: 4622 - protein, 14 aa, synthetic construct
ALVELECGIRGTDE

SEQ ID NO: 4623 - protein, 14 aa, synthetic construct
ALVELDCGSYTDKL

SEQ ID NO: 4624 - protein, 14 aa, synthetic construct
ALVELCIGDTPATA

SEQ ID NO: 4625 - protein, 14 aa, synthetic construct
ALVELALPGINTDK

SEQ ID NO: 4626 - protein, 14 aa, synthetic construct
ALVELAGGYDVKLI

SEQ ID NO: 4627 - protein, 14 aa, synthetic construct
ALVELAGGYADKLI

SEQ ID NO: 4628 - protein, 14 aa, synthetic construct
ALVELAGDTTRNSS

SEQ ID NO: 4629 - protein, 14 aa, synthetic construct
ALVELGDTYTDKLI

SEQ ID NO: 4630 - protein, 14 aa, synthetic construct
ALVELGGGYDDQLI

SEQ ID NO: 4631 - protein, 14 aa, synthetic construct
ALVELSPFTGGPKL

SEQ ID NO: 4632 - protein, 13 aa, synthetic construct
ALVELLWETDKLI

SEQ ID NO: 4633 - protein, 11 aa, synthetic construct
ALVELSPFTGG

SEQ ID NO: 4634 - protein, 14 aa, synthetic construct
ALVELSPFTCGHKL

SEQ ID NO: 4635 - protein, 12 aa, synthetic construct
ALVELSINDKLI

SEQ ID NO: 4636 - protein, 11 aa, synthetic construct
ALVELSGGYAD

SEQ ID NO: 4637 - protein, 9 aa, synthetic construct
ALVELSFLR

SEQ ID NO: 4638 - protein, 14 aa, synthetic construct
ALVELRVGDKNKLI

SEQ ID NO: 4639 - protein, 14 aa, synthetic construct
ALVELREWDKNKLI

SEQ ID NO: 4640 - protein, 13 aa, synthetic construct
ALVELPYRGIRTD

SEQ ID NO: 4641 - protein, 14 aa, synthetic construct
ALVELPNRGIRTDK

SEQ ID NO: 4642 - protein, 13 aa, synthetic construct
ALVELPGDTDKLI

SEQ ID NO: 4643 - protein, 13 aa, synthetic construct
ALVELMWDTDKLI

SEQ ID NO: 4644 - protein, 13 aa, synthetic construct
ALVELLWDTDKLI

SEQ ID NO: 4645 - protein, 13 aa, synthetic construct
ALVELGGVYDAQL

SEQ ID NO: 4646 - protein, 12 aa, synthetic construct
ALVELLQTDKLI

SEQ ID NO: 4647 - protein, 12 aa, synthetic construct
ALVELLNTDKII

SEQ ID NO: 4648 - protein, 12 aa, synthetic construct
ALVELLHTDNLI

SEQ ID NO: 4649 - protein, 13 aa, synthetic construct
ALVELLGDTDKLN

SEQ ID NO: 4650 - protein, 12 aa, synthetic construct
ALVELGSTDTLI

SEQ ID NO: 4651 - protein, 12 aa, synthetic construct
ALVELGSTDRLI

SEQ ID NO: 4652 - protein, 12 aa, synthetic construct
ALVELGSTDKLF

SEQ ID NO: 4653 - protein, 12 aa, synthetic construct
ALVELGSTDKHN

SEQ ID NO: 4654 - protein, 14 aa, synthetic construct
ALVELGSGGYADKL

SEQ ID NO: 4655 - protein, 12 aa, synthetic construct
ALVELGSADKLI

SEQ ID NO: 4656 - protein, 14 aa, synthetic construct
ALVELGGYARTDKL

SEQ ID NO: 4657 - protein, 12 aa, synthetic construct
ALWAGGYTDQLI

SEQ ID NO: 4658 - protein, 12 aa, synthetic construct
ALWAGVYTDKLI

SEQ ID NO: 4659 - protein, 14 aa, synthetic construct
ALWEPTYAGGSYTD

SEQ ID NO: 4660 - protein, 14 aa, synthetic construct
ALWAILPTFRGTDK

SEQ ID NO: 4661 - protein, 13 aa, synthetic construct
ALWELTSQPDKLI

SEQ ID NO: 4662 - protein, 14 aa, synthetic construct
ALWELTGGYSDKLI

SEQ ID NO: 4663 - protein, 13 aa, synthetic construct
ALWELTFLTDKLI

SEQ ID NO: 4664 - protein, 13 aa, synthetic construct
ALWELTFIPDKLI

SEQ ID NO: 4665 - protein, 14 aa, synthetic construct
ALWELTAGYADKLI

SEQ ID NO: 4666 - protein, 14 aa, synthetic construct
ALWELSTFTGGRKL

SEQ ID NO: 4667 - protein, 14 aa, synthetic construct
ALWELSPFTWGHKL

SEQ ID NO: 4668 - protein, 14 aa, synthetic construct
ALWELSPFTGGHNS

SEQ ID NO: 4669 - protein, 14 aa, synthetic construct
ALWELREGDKHKLI

SEQ ID NO: 4670 - protein, 14 aa, synthetic construct
ALWELPYRGLRTDK

SEQ ID NO: 4671 - protein, 14 aa, synthetic construct
ALWELPYRGIRSDK

SEQ ID NO: 4672 - protein, 14 aa, synthetic construct
ALWELPYRGIRINS

SEQ ID NO: 4673 - protein, 14 aa, synthetic construct
ALWELPYRGILGLL

SEQ ID NO: 4674 - protein, 13 aa, synthetic construct
ALWELMGYTDKLI

SEQ ID NO: 4675 - protein, 12 aa, synthetic construct
ALWELLWDTDKL

SEQ ID NO: 4676 - protein, 14 aa, synthetic construct
ALWELLVLGDTDKL

SEQ ID NO: 4677 - protein, 14 aa, synthetic construct
ALWELLLMGDTDKL

SEQ ID NO: 4678 - protein, 12 aa, synthetic construct
ALWELLHTDKHI

SEQ ID NO: 4679 - protein, 12 aa, synthetic construct
ALWELLHNDKLI

SEQ ID NO: 4680 - protein, 14 aa, synthetic construct
ALWELLGDTYPDKL

SEQ ID NO: 4681 - protein, 13 aa, synthetic construct
ALWELLGDTNKLI

SEQ ID NO: 4682 - protein, 13 aa, synthetic construct
ALWELLGDTEKLI

SEQ ID NO: 4683 - protein, 13 aa, synthetic construct
ALWELLGDTDKII

SEQ ID NO: 4684 - protein, 14 aa, synthetic construct
ALWELHYRGIRTDK

SEQ ID NO: 4685 - protein, 12 aa, synthetic construct
ALWELGYTDKLI

SEQ ID NO: 4686 - protein, 12 aa, synthetic construct
ALWELVHTDKLI

SEQ ID NO: 4687 - protein, 14 aa, synthetic construct
ALWELVSLGNTDKL

SEQ ID NO: 4688 - protein, 14 aa, synthetic construct
ALWELVSLGYTDQL

SEQ ID NO: 4689 - protein, 14 aa, synthetic construct
ALWEMSDPYPDKLI

SEQ ID NO: 4690 - protein, 10 aa, synthetic construct
ALWEPSYAGG

SEQ ID NO: 4691 - protein, 7 aa, synthetic construct
ALWEPSY

SEQ ID NO: 4692 - protein, 14 aa, synthetic construct
ALWEPPYYVLGDTD

SEQ ID NO: 4693 - protein, 14 aa, synthetic construct
ALWEPLMGDIYTDK

SEQ ID NO: 4694 - protein, 12 aa, synthetic construct
ALWEPGTTIYSS

SEQ ID NO: 4695 - protein, 11 aa, synthetic construct
ALWEPGTTINS

SEQ ID NO: 4696 - protein, 14 aa, synthetic construct
ALWEPGLPLLGGTD

SEQ ID NO: 4697 - protein, 14 aa, synthetic construct
ALWEPGLPLLGDTD

SEQ ID NO: 4698 - protein, 14 aa, synthetic construct
ALWENPYWGIYTDK

SEQ ID NO: 4699 - protein, 14 aa, synthetic construct
ALWENPSYVLGDTD

SEQ ID NO: 4700 - protein, 14 aa, synthetic construct
ALWEMTGGYADKLI

SEQ ID NO: 4701 - protein, 14 aa, synthetic construct
ALWEMGDTYPDKLI

SEQ ID NO: 4702 - protein, 14 aa, synthetic construct
ALWELVSLWYTDKL

SEQ ID NO: 4703 - protein, 13 aa, synthetic construct
ALWEMGDQDDKLN

SEQ ID NO: 4704 - protein, 13 aa, synthetic construct
ALWEMGDKDDKLI

SEQ ID NO: 4705 - protein, 13 aa, synthetic construct
ALWEMGAPYPEKL

SEQ ID NO: 4706 - protein, 12 aa, synthetic construct
ALWELWIQDKII

SEQ ID NO: 4707 - protein, 12 aa, synthetic construct
ALWELWIHYKLI

SEQ ID NO: 4708 - protein, 12 aa, synthetic construct
ALWELWIHDKLN

SEQ ID NO: 4709 - protein, 14 aa, synthetic construct
ALWELWGYARTDQL

SEQ ID NO: 4710 - protein, 13 aa, synthetic construct
ALWELWGILSKLI

SEQ ID NO: 4711 - protein, 13 aa, synthetic construct
ALWELWANDCKLI

SEQ ID NO: 4712 - protein, 14 aa, synthetic construct
ALWELVWGTTDKLF

SEQ ID NO: 4713 - protein, 14 aa, synthetic construct
ALWELVVGDTDTLI

SEQ ID NO: 4714 - protein, 14 aa, synthetic construct
ALWELGTGGYSDKL

SEQ ID NO: 4715 - protein, 12 aa, synthetic construct
ALWELGSTDKLN

SEQ ID NO: 4716 - protein, 14 aa, synthetic construct
ALWELGGGYYDKLI

SEQ ID NO: 4717 - protein, 10 aa, synthetic construct
ALWEELGDTD

SEQ ID NO: 4718 - protein, 12 aa, synthetic construct
ALWEILHTDKLI

SEQ ID NO: 4719 - protein, 14 aa, synthetic construct
ALWEIGNGGYADKL

SEQ ID NO: 4720 - protein, 14 aa, synthetic construct
ALWEIDNWGIYTDK

SEQ ID NO: 4721 - protein, 14 aa, synthetic construct
ALWEIANWGIRTDK

SEQ ID NO: 4722 - protein, 14 aa, synthetic construct
ALWEHVMVDIYTDK

SEQ ID NO: 4723 - protein, 14 aa, synthetic construct
ALWEGGNSSGSTTL

SEQ ID NO: 4724 - protein, 13 aa, synthetic construct
ALWEGGGYDDKLI

SEQ ID NO: 4725 - protein, 13 aa, synthetic construct
ALWEGGDTPYKLI

SEQ ID NO: 4726 - protein, 13 aa, synthetic construct
ALWEGGDTPEKLI

SEQ ID NO: 4727 - protein, 11 aa, synthetic construct
ALWEGDTEKLI

SEQ ID NO: 4728 - protein, 11 aa, synthetic construct
ALWEGDTDKII

SEQ ID NO: 4729 - protein, 14 aa, synthetic construct
ALWDLTGGYAEKLI

SEQ ID NO: 4730 - protein, 13 aa, synthetic construct
ALWEIREGDTGHR

SEQ ID NO: 4731 - protein, 14 aa, synthetic construct
ALWDLTGGYADILI

SEQ ID NO: 4732 - protein, 14 aa, synthetic construct
ALWDLGTGGYADKL

SEQ ID NO: 4733 - protein, 12 aa, synthetic construct
ALWDLGSTDKLI

SEQ ID NO: 4734 - protein, 14 aa, synthetic construct
ALWDLEWGIRGTDK

SEQ ID NO: 4735 - protein, 13 aa, synthetic construct
ALWDILGDTYKLI

SEQ ID NO: 4736 - protein, 14 aa, synthetic construct
ALWDHTYCGIYTDK

SEQ ID NO: 4737 - protein, 14 aa, synthetic construct
ALWDHPYWGIYTDK

SEQ ID NO: 4738 - protein, 7 aa, synthetic construct
ALWDGDT

SEQ ID NO: 4739 - protein, 13 aa, synthetic construct
ALWAMGDSYPDQL

SEQ ID NO: 4740 - protein, 14 aa, synthetic construct
ALWALVYLGYTDKL

SEQ ID NO: 4741 - protein, 13 aa, synthetic construct
ALWALLPTFRCTD

SEQ ID NO: 4742 - protein, 12 aa, synthetic construct
ALWEILNTDKLI

SEQ ID NO: 4743 - protein, 14 aa, synthetic construct
ALWEIVSLGYTDKL

SEQ ID NO: 4744 - protein, 14 aa, synthetic construct
ALWELGDTYTYKIN

SEQ ID NO: 4745 - protein, 14 aa, synthetic construct
ALWELFLMGDTDKL

SEQ ID NO: 4746 - protein, 14 aa, synthetic construct
ALWELGDTYTDKLI

SEQ ID NO: 4747 - protein, 14 aa, synthetic construct
ALWELGDTYPDQLI

SEQ ID NO: 4748 - protein, 14 aa, synthetic construct
ALWELGDTYPDILI

SEQ ID NO: 4749 - protein, 12 aa, synthetic construct
ALWELGDTDKLN

SEQ ID NO: 4750 - protein, 13 aa, synthetic construct
ALWELGDSSWDAR

SEQ ID NO: 4751 - protein, 13 aa, synthetic construct
ALWELGDSSSDTR

SEQ ID NO: 4752 - protein, 13 aa, synthetic construct
ALWELGDSSCDTR

SEQ ID NO: 4753 - protein, 13 aa, synthetic construct
ALWELGDRSWDTR

SEQ ID NO: 4754 - protein, 13 aa, synthetic construct
ALWELGDMDDKLI

SEQ ID NO: 4755 - protein, 13 aa, synthetic construct
ALWELGDKDYKLI

SEQ ID NO: 4756 - protein, 13 aa, synthetic construct
ALWELGDEDDKLI

SEQ ID NO: 4757 - protein, 14 aa, synthetic construct
ALWELFLLWDTDKL

SEQ ID NO: 4758 - protein, 14 aa, synthetic construct
ALWEIVWGTTDKLI

SEQ ID NO: 4759 - protein, 14 aa, synthetic construct
ALWELFLLVDTDKL

SEQ ID NO: 4760 - protein, 14 aa, synthetic construct
ALWELFILGDTDKL

SEQ ID NO: 4761 - protein, 14 aa, synthetic construct
ALWELEWGISGTDK

SEQ ID NO: 4762 - protein, 14 aa, synthetic construct
ALWELEWGIRGTDK

SEQ ID NO: 4763 - protein, 14 aa, synthetic construct
ALWELDWGIRGTDK

SEQ ID NO: 4764 - protein, 14 aa, synthetic construct
ALWELCLGETLATA

SEQ ID NO: 4765 - protein, 14 aa, synthetic construct
ALWELCLGDTLATA

SEQ ID NO: 4766 - protein, 14 aa, synthetic construct
ALWELAMGSYTDKL

SEQ ID NO: 4767 - protein, 14 aa, synthetic construct
ALWELALPGINTDK

SEQ ID NO: 4768 - protein, 14 aa, synthetic construct
ALWELALGSYTDQL

SEQ ID NO: 4769 - protein, 12 aa, synthetic construct
ALWEIWIHDKII

SEQ ID NO: 4770 - protein, 14 aa, synthetic construct
ARGEPPSYVLGTPI

SEQ ID NO: 4771 - protein, 14 aa, synthetic construct
ARGEPSYAGGSDTD

SEQ ID NO: 4772 - protein, 14 aa, synthetic construct
DLGETANWGINTDK

SEQ ID NO: 4773 - protein, 13 aa, synthetic construct
DLGEIANWGINTD

SEQ ID NO: 4774 - protein, 13 aa, synthetic construct
DLGELALQGIHTD

SEQ ID NO: 4775 - protein, 13 aa, synthetic construct
DLGELALPYCGTP

SEQ ID NO: 4776 - protein, 14 aa, synthetic construct
DLGELALPGIHTDQ

SEQ ID NO: 4777 - protein, 9 aa, synthetic construct
DLGELALPG

SEQ ID NO: 4778 - protein, 14 aa, synthetic construct
DLGELAIQGIHTDK

SEQ ID NO: 4779 - protein, 11 aa, synthetic construct
DLGELAIPGIK

SEQ ID NO: 4780 - protein, 14 aa, synthetic construct
DLGELADTYPDKLI

SEQ ID NO: 4781 - protein, 13 aa, synthetic construct
DLGELADSSWDTR

SEQ ID NO: 4782 - protein, 12 aa, synthetic construct
DLGEIWIHDKII

SEQ ID NO: 4783 - protein, 13 aa, synthetic construct
DLGEIWGIRSKLI

SEQ ID NO: 4784 - protein, 14 aa, synthetic construct
DLGEIVWGTTDKDI

SEQ ID NO: 4785 - protein, 8 aa, synthetic construct
DLGEIVWG

SEQ ID NO: 4786 - protein, 14 aa, synthetic construct
DLGEIVTLGYTDKL

SEQ ID NO: 4787 - protein, 14 aa, synthetic construct
DLGEIVSLGYTDKL

SEQ ID NO: 4788 - protein, 8 aa, synthetic construct
DLGEIVIA

SEQ ID NO: 4789 - protein, 13 aa, synthetic construct
DLGEITFLPDKLI

SEQ ID NO: 4790 - protein, 13 aa, synthetic construct
DLGEISLRAIHTN

SEQ ID NO: 4791 - protein, 13 aa, synthetic construct
DLGEIPGDTDKII

SEQ ID NO: 4792 - protein, 13 aa, synthetic construct
DLGEILGDTDKHI

SEQ ID NO: 4793 - protein, 14 aa, synthetic construct
DLGEIGTGGYADKL

SEQ ID NO: 4794 - protein, 12 aa, synthetic construct
DLGEIGSTEKLI

SEQ ID NO: 4795 - protein, 12 aa, synthetic construct
DLGEIGSTDKII

SEQ ID NO: 4796 - protein, 13 aa, synthetic construct
DLGEIGDSSWDTR

SEQ ID NO: 4797 - protein, 14 aa, synthetic construct
DLGEIDNWGINTDK

SEQ ID NO: 4798 - protein, 14 aa, synthetic construct
DLGEIANWGKNTDK

SEQ ID NO: 4799 - protein, 14 aa, synthetic construct
DLGELAWGPYTDKL

SEQ ID NO: 4800 - protein, 14 aa, synthetic construct
DLGELAWGSYTDQL

SEQ ID NO: 4801 - protein, 14 aa, synthetic construct
DLGELCLGDGPIKS

SEQ ID NO: 4802 - protein, 14 aa, synthetic construct
DLGELFMLGDTDKL

SEQ ID NO: 4803 - protein, 14 aa, synthetic construct
DLGELGGGYDDKHI

SEQ ID NO: 4804 - protein, 14 aa, synthetic construct
DLGELGDTYPHKLI

SEQ ID NO: 4805 - protein, 12 aa, synthetic construct
DLGELGDTYKLI

SEQ ID NO: 4806 - protein, 13 aa, synthetic construct
DLGELGDSSWDTL

SEQ ID NO: 4807 - protein, 13 aa, synthetic construct
DLGELGDSPWDTR

SEQ ID NO: 4808 - protein, 13 aa, synthetic construct
DLGELGDRSWDTR

SEQ ID NO: 4809 - protein, 8 aa, synthetic construct
DLGELGDN

SEQ ID NO: 4810 - protein, 13 aa, synthetic construct
DLGELGDKYDKLI

SEQ ID NO: 4811 - protein, 14 aa, synthetic construct
DLGELGDKGHRETH

SEQ ID NO: 4812 - protein, 13 aa, synthetic construct
DLGELGDKDYKLI

SEQ ID NO: 4813 - protein, 14 aa, synthetic construct
DLGELGAGGYADKL

SEQ ID NO: 4814 - protein, 14 aa, synthetic construct
DLGELFLLGYTDQL

SEQ ID NO: 4815 - protein, 14 aa, synthetic construct
DLGELCLGDKLATA

SEQ ID NO: 4816 - protein, 13 aa, synthetic construct
DLGELFLLGDTDK

SEQ ID NO: 4817 - protein, 14 aa, synthetic construct
DLGELFLLGDTAKL

SEQ ID NO: 4818 - protein, 14 aa, synthetic construct
DLGELFILGYTDKL

SEQ ID NO: 4819 - protein, 14 aa, synthetic construct
DLGELEWGIWGTDK

SEQ ID NO: 4820 - protein, 14 aa, synthetic construct
DLGELELGIRGTDK

SEQ ID NO: 4821 - protein, 14 aa, synthetic construct
DLGELCMRDTLATA

SEQ ID NO: 4822 - protein, 14 aa, synthetic construct
DLGELCMGDTLATA

SEQ ID NO: 4823 - protein, 14 aa, synthetic construct
DLGELCLVDTMATA

SEQ ID NO: 4824 - protein, 14 aa, synthetic construct
DLGELCLGDTPINS

SEQ ID NO: 4825 - protein, 14 aa, synthetic construct
DLGELCLGDTMATA

SEQ ID NO: 4826 - protein, 14 aa, synthetic construct
DLGELCLGDSLATA

SEQ ID NO: 4827 - protein, 14 aa, synthetic construct
DLGEIANWGINTDQ

SEQ ID NO: 4828 - protein, 11 aa, synthetic construct
DLGEIANWGIN

SEQ ID NO: 4829 - protein, 14 aa, synthetic construct
ARGEPSYAGGSSTD

SEQ ID NO: 4830 - protein, 14 aa, synthetic construct
DLGEHTGGWTDKLI

SEQ ID NO: 4831 - protein, 14 aa, synthetic construct
DLGALPYRGISTDK

SEQ ID NO: 4832 - protein, 14 aa, synthetic construct
DLGALLPTFSGTDK

SEQ ID NO: 4833 - protein, 14 aa, synthetic construct
DLGALLPTFRGTDQ

SEQ ID NO: 4834 - protein, 14 aa, synthetic construct
DLGALLPTFRCTDK

SEQ ID NO: 4835 - protein, 14 aa, synthetic construct
DLGALLPTFLGTDK

SEQ ID NO: 4836 - protein, 11 aa, synthetic construct
DLGALLPSVLW

SEQ ID NO: 4837 - protein, 14 aa, synthetic construct
DLGALGGYARSAKL

SEQ ID NO: 4838 - protein, 14 aa, synthetic construct
DLGALGDTYPAQLI

SEQ ID NO: 4839 - protein, 9 aa, synthetic construct
DLGALALPG

SEQ ID NO: 4840 - protein, 13 aa, synthetic construct
DLGAHTYWGISTD

SEQ ID NO: 4841 - protein, 12 aa, synthetic construct
DLGAGGYTNKLI

SEQ ID NO: 4842 - protein, 12 aa, synthetic construct
DLGAGGYTEKLI

SEQ ID NO: 4843 - protein, 12 aa, synthetic construct
DLGAGGYTDKLN

SEQ ID NO: 4844 - protein, 12 aa, synthetic construct
DLGAGGYTDKII

SEQ ID NO: 4845 - protein, 12 aa, synthetic construct
DLGAGGYNDKLI

SEQ ID NO: 4846 - protein, 11 aa, synthetic construct
DLGAGDTDKLI

SEQ ID NO: 4847 - protein, 12 aa, synthetic construct
DLGAGAYTDKLI

SEQ ID NO: 4848 - protein, 14 aa, synthetic construct
DLCEPSYAGGSYTD

SEQ ID NO: 4849 - protein, 14 aa, synthetic construct
DLCELVLGDTDQLI

SEQ ID NO: 4850 - protein, 14 aa, synthetic construct
DLCELSLKGIHTDK

SEQ ID NO: 4851 - protein, 14 aa, synthetic construct
DLCELLLWDTYKLI

SEQ ID NO: 4852 - protein, 14 aa, synthetic construct
DLCELDLGSYTDKL

SEQ ID NO: 4853 - protein, 14 aa, synthetic construct
DLAELVVVGASDQG

SEQ ID NO: 4854 - protein, 12 aa, synthetic construct
DLAELQGDTDKL

SEQ ID NO: 4855 - protein, 13 aa, synthetic construct
DLAELLGETDKLI

SEQ ID NO: 4856 - protein, 13 aa, synthetic construct
DLGALVYRDDKLI

SEQ ID NO: 4857 - protein, 14 aa, synthetic construct
DLGARTGGYLGSWD

SEQ ID NO: 4858 - protein, 12 aa, synthetic construct
DLGAVGYTDKLI

SEQ ID NO: 4859 - protein, 11 aa, synthetic construct
DLGEGDTEKLI

SEQ ID NO: 4860 - protein, 12 aa, synthetic construct
DLGEHTAGWTYK

SEQ ID NO: 4861 - protein, 14 aa, synthetic construct
DLGEHSYAGRSYTD

SEQ ID NO: 4862 - protein, 14 aa, synthetic construct
DLGEHPYCGIYTDK

SEQ ID NO: 4863 - protein, 14 aa, synthetic construct
DLGEHNCVYPIKSS

SEQ ID NO: 4864 - protein, 13 aa, synthetic construct
DLGEGGDTPEKLN

SEQ ID NO: 4865 - protein, 13 aa, synthetic construct
DLGEGGDTPEKLI

SEQ ID NO: 4866 - protein, 13 aa, synthetic construct
DLGEGGDTPDKPI

SEQ ID NO: 4867 - protein, 13 aa, synthetic construct
DLGEGGDTHDQLI

SEQ ID NO: 4868 - protein, 13 aa, synthetic construct
DLGEGGDPHDKLI

SEQ ID NO: 4869 - protein, 11 aa, synthetic construct
DLGEGETDKLI

SEQ ID NO: 4870 - protein, 13 aa, synthetic construct
DLGEGEDTPDKLI

SEQ ID NO: 4871 - protein, 11 aa, synthetic construct
DLGEGDTDKLY

SEQ ID NO: 4872 - protein, 13 aa, synthetic construct
DLGAVPTDTDKLI

SEQ ID NO: 4873 - protein, 7 aa, synthetic construct
DLGEGDT

SEQ ID NO: 4874 - protein, 11 aa, synthetic construct
DLGEGDNDKLI

SEQ ID NO: 4875 - protein, 13 aa, synthetic construct
DLGEEWGIRRKLN

SEQ ID NO: 4876 - protein, 13 aa, synthetic construct
DLGDPPGVCTDKL

SEQ ID NO: 4877 - protein, 14 aa, synthetic construct
DLGDLVWGTTDKLI

SEQ ID NO: 4878 - protein, 13 aa, synthetic construct
DLGDLVWGTTDKL

SEQ ID NO: 4879 - protein, 14 aa, synthetic construct
DLGDLVSLGYTDKL

SEQ ID NO: 4880 - protein, 12 aa, synthetic construct
DLGDLGSTDKLI

SEQ ID NO: 4881 - protein, 14 aa, synthetic construct
DLGDLGDTYPDKLI

SEQ ID NO: 4882 - protein, 13 aa, synthetic construct
DLGDLGDSSWDTR

SEQ ID NO: 4883 - protein, 14 aa, synthetic construct
DLGDLAWGSYTDQL

SEQ ID NO: 4884 - protein, 13 aa, synthetic construct
DLGELGGGYDNKL

SEQ ID NO: 4885 - protein, 13 aa, synthetic construct
DLGELGGGYDYKL

SEQ ID NO: 4886 - protein, 14 aa, synthetic construct
DLGELGGGYDYTLI

SEQ ID NO: 4887 - protein, 13 aa, synthetic construct
DLGELGNKDDKLI

SEQ ID NO: 4888 - protein, 12 aa, synthetic construct
DLGEPGSTDKLI

SEQ ID NO: 4889 - protein, 14 aa, synthetic construct
DLGEPGLPLLRDTD

SEQ ID NO: 4890 - protein, 14 aa, synthetic construct
DLGEPGLHLLGDTD

SEQ ID NO: 4891 - protein, 13 aa, synthetic construct
DLGEPGLHLLGDT

SEQ ID NO: 4892 - protein, 13 aa, synthetic construct
DLGENPYWGIYTD

SEQ ID NO: 4893 - protein, 14 aa, synthetic construct
DLGEMTGGYADKLI

SEQ ID NO: 4894 - protein, 13 aa, synthetic construct
DLGEMGLPLLWDT

SEQ ID NO: 4895 - protein, 14 aa, synthetic construct
DLGEMGGYARSDKL

SEQ ID NO: 4896 - protein, 14 aa, synthetic construct
DLGEMGDTYPDKLI

SEQ ID NO: 4897 - protein, 12 aa, synthetic construct
DLGEMGDTDKLI

SEQ ID NO: 4898 - protein, 14 aa, synthetic construct
DLGELYIQAIQTDK

SEQ ID NO: 4899 - protein, 13 aa, synthetic construct
DLGELWWICSKLI

SEQ ID NO: 4900 - protein, 12 aa, synthetic construct
DLGELWSTDKII

SEQ ID NO: 4901 - protein, 12 aa, synthetic construct
DLGELWIHYKLI

SEQ ID NO: 4902 - protein, 12 aa, synthetic construct
DLGELWIHGKLI

SEQ ID NO: 4903 - protein, 12 aa, synthetic construct
DLGELWIHDNLI

SEQ ID NO: 4904 - protein, 12 aa, synthetic construct
DLGELWIHDKPI

SEQ ID NO: 4905 - protein, 13 aa, synthetic construct
DLGELWGIRSTLI

SEQ ID NO: 4906 - protein, 13 aa, synthetic construct
DLGELWGIRSKLV

SEQ ID NO: 4907 - protein, 13 aa, synthetic construct
DLGELVWGTTDKL

SEQ ID NO: 4908 - protein, 14 aa, synthetic construct
DLGELVTGGYADKL

SEQ ID NO: 4909 - protein, 12 aa, synthetic construct
DLGELVSTEKLI

SEQ ID NO: 4910 - protein, 12 aa, synthetic construct
DLGELVSTDKII

SEQ ID NO: 4911 - protein, 14 aa, synthetic construct
DLGELVSLGYTDQL

SEQ ID NO: 4912 - protein, 13 aa, synthetic construct
DLGELVSLGYTDK

SEQ ID NO: 4913 - protein, 12 aa, synthetic construct
DLGEPGTTINST

SEQ ID NO: 4914 - protein, 12 aa, synthetic construct
DLGEPGTTMNSS

SEQ ID NO: 4915 - protein, 14 aa, synthetic construct
DLGEPHSYVLGDTD

SEQ ID NO: 4916 - protein, 13 aa, synthetic construct
DLGEPTGVWTSKL

SEQ ID NO: 4917 - protein, 14 aa, synthetic construct
DLGERTGGYLCSWD

SEQ ID NO: 4918 - protein, 14 aa, synthetic construct
DLGERTGGSWAPGT

SEQ ID NO: 4919 - protein, 12 aa, synthetic construct
DLGEQGTTLNSS

SEQ ID NO: 4920 - protein, 12 aa, synthetic construct
DLGEQGTTINSS

SEQ ID NO: 4921 - protein, 12 aa, synthetic construct
DLGEQGSTEKLI

SEQ ID NO: 4922 - protein, 14 aa, synthetic construct
DLGEPVWGTTDKLI

SEQ ID NO: 4923 - protein, 13 aa, synthetic construct
DLGEPVMGDIYTD

SEQ ID NO: 4924 - protein, 14 aa, synthetic construct
DLGEPVLGEIYTDK

SEQ ID NO: 4925 - protein, 14 aa, synthetic construct
DLGEPVLGDTWAPG

SEQ ID NO: 4926 - protein, 14 aa, synthetic construct
DLGEPVLGDIYTEK

SEQ ID NO: 4927 - protein, 13 aa, synthetic construct
DLGEPVLGDIYTD

SEQ ID NO: 4928 - protein, 14 aa, synthetic construct
DLGEPTGVWTDKLI

SEQ ID NO: 4929 - protein, 13 aa, synthetic construct
DLGEPHSYVLWDT

SEQ ID NO: 4930 - protein, 14 aa, synthetic construct
DLGEPTGGWTYKLI

SEQ ID NO: 4931 - protein, 14 aa, synthetic construct
DLGEPTGGWTDKII

SEQ ID NO: 4932 - protein, 12 aa, synthetic construct
DLGEPSYYVLWD

SEQ ID NO: 4933 - protein, 14 aa, synthetic construct
DLGEPSYDGGSYTD

SEQ ID NO: 4934 - protein, 14 aa, synthetic construct
DLGEPSNDGGSYTD

SEQ ID NO: 4935 - protein, 13 aa, synthetic construct
DLGEPPYYVLWDT

SEQ ID NO: 4936 - protein, 13 aa, synthetic construct
DLGEPPTYVVGDT

SEQ ID NO: 4937 - protein, 14 aa, synthetic construct
DLGEPPSYVLWTPI

SEQ ID NO: 4938 - protein, 14 aa, synthetic construct
DLGEPPSYVLGTPI

SEQ ID NO: 4939 - protein, 14 aa, synthetic construct
DLGEPNGVCTDKII

SEQ ID NO: 4940 - protein, 14 aa, synthetic construct
DLGEPHYYVLGDTD

SEQ ID NO: 4941 - protein, 14 aa, synthetic construct
DLGELVSLGYADKL

SEQ ID NO: 4942 - protein, 13 aa, synthetic construct
DLGELVLGDTDKL

SEQ ID NO: 4943 - protein, 14 aa, synthetic construct
DLGELVGYLGSWET

SEQ ID NO: 4944 - protein, 12 aa, synthetic construct
DLGELLGDTDKH

SEQ ID NO: 4945 - protein, 13 aa, synthetic construct
DLGELLVDTDKLI

SEQ ID NO: 4946 - protein, 12 aa, synthetic construct
DLGELLNTATLI

SEQ ID NO: 4947 - protein, 12 aa, synthetic construct
DLGELLHTEKLI

SEQ ID NO: 4948 - protein, 12 aa, synthetic construct
DLGELLHTDTLI

SEQ ID NO: 4949 - protein, 12 aa, synthetic construct
DLGELLHTDQLN

SEQ ID NO: 4950 - protein, 12 aa, synthetic construct
DLGELLHTDKII

SEQ ID NO: 4951 - protein, 13 aa, synthetic construct
DLGELLGTPIKSS

SEQ ID NO: 4952 - protein, 13 aa, synthetic construct
DLGELLGETDKLI

SEQ ID NO: 4953 - protein, 14 aa, synthetic construct
DLGELLGEILRAAQ

SEQ ID NO: 4954 - protein, 13 aa, synthetic construct
DLGELLGDTENLI

SEQ ID NO: 4955 - protein, 13 aa, synthetic construct
DLGELLGDTDKII

SEQ ID NO: 4956 - protein, 13 aa, synthetic construct
DLGELLGDNDKLI

SEQ ID NO: 4957 - protein, 13 aa, synthetic construct
DLGELMVDTDKLI

SEQ ID NO: 4958 - protein, 12 aa, synthetic construct
DLGELINTDKLY

SEQ ID NO: 4959 - protein, 12 aa, synthetic construct
DLGELGYTYKLI

SEQ ID NO: 4960 - protein, 13 aa, synthetic construct
DLGELGWGIRGTG

SEQ ID NO: 4961 - protein, 14 aa, synthetic construct
DLGELGTVGYADKL

SEQ ID NO: 4962 - protein, 12 aa, synthetic construct
DLGELGTTDKLI

SEQ ID NO: 4963 - protein, 12 aa, synthetic construct
DLGELGSTEKII

SEQ ID NO: 4964 - protein, 12 aa, synthetic construct
DLGELGSTDKPI

SEQ ID NO: 4965 - protein, 12 aa, synthetic construct
DLGELGSTDKLN

SEQ ID NO: 4966 - protein, 11 aa, synthetic construct
DLGELGSTDKL

SEQ ID NO: 4967 - protein, 12 aa, synthetic construct
DLGELGSTDKHI

SEQ ID NO: 4968 - protein, 12 aa, synthetic construct
DLGELGSTAKLI

SEQ ID NO: 4969 - protein, 13 aa, synthetic construct
DLGELLWDTYKLI

SEQ ID NO: 4970 - protein, 8 aa, synthetic construct
DLGELPYR

SEQ ID NO: 4971 - protein, 14 aa, synthetic construct
DLGELVGYARSDKL

SEQ ID NO: 4972 - protein, 13 aa, synthetic construct
DLGELTFIPDKII

SEQ ID NO: 4973 - protein, 13 aa, synthetic construct
DLGELVDSSWYTR

SEQ ID NO: 4974 - protein, 13 aa, synthetic construct
DLGELVDKDYKLI

SEQ ID NO: 4975 - protein, 14 aa, synthetic construct
DLGELTGVYAYQLI

SEQ ID NO: 4976 - protein, 14 aa, synthetic construct
DLGELTGGYSDKLI

SEQ ID NO: 4977 - protein, 14 aa, synthetic construct
DLGELTGGYLGSWD

SEQ ID NO: 4978 - protein, 14 aa, synthetic construct
DLGELTGGYAYKLI

SEQ ID NO: 4979 - protein, 14 aa, synthetic construct
DLGELTGGYADQLI

SEQ ID NO: 4980 - protein, 14 aa, synthetic construct
DLGELTGGYADKLV

SEQ ID NO: 4981 - protein, 13 aa, synthetic construct
DLGELTFLPYKLI

SEQ ID NO: 4982 - protein, 13 aa, synthetic construct
DLGELTFLPEKLI

SEQ ID NO: 4983 - protein, 13 aa, synthetic construct
DLGELTFLPDKLN

SEQ ID NO: 4984 - protein, 10 aa, synthetic construct
DLGELSTLTG

SEQ ID NO: 4985 - protein, 13 aa, synthetic construct
DLGELPYRAYSPI

SEQ ID NO: 4986 - protein, 14 aa, synthetic construct
DLGELSPFTRGHKL

SEQ ID NO: 4987 - protein, 13 aa, synthetic construct
DLGELSLRGIQTD

SEQ ID NO: 4988 - protein, 14 aa, synthetic construct
DLGELSLLGIHTDK

SEQ ID NO: 4989 - protein, 13 aa, synthetic construct
DLGELSGISSKLI

SEQ ID NO: 4990 - protein, 13 aa, synthetic construct
DLGELSFLPDKLI

SEQ ID NO: 4991 - protein, 14 aa, synthetic construct
DLGELREGDTDKLI

SEQ ID NO: 4992 - protein, 13 aa, synthetic construct
DLGELREGDNNKL

SEQ ID NO: 4993 - protein, 13 aa, synthetic construct
DLGELREGDKNKL

SEQ ID NO: 4994 - protein, 14 aa, synthetic construct
DLGELREGDKKKLI

SEQ ID NO: 4995 - protein, 14 aa, synthetic construct
DLGELREGDKINSS

SEQ ID NO: 4996 - protein, 13 aa, synthetic construct
DLGELQGDTDKLI

SEQ ID NO: 4997 - protein, 14 aa, synthetic construct
DLAELEWGIRGTDK

SEQ ID NO: 4998 - protein, 10 aa, synthetic construct
DIWEPSYAGG

SEQ ID NO: 4999 - protein, 14 aa, synthetic construct
DIWELGHGGYADKL

SEQ ID NO: 5000 - protein, 14 aa, synthetic construct
AVGELGTGGYADKL

SEQ ID NO: 5001 - protein, 13 aa, synthetic construct
AVGEGGDTPDTLI

SEQ ID NO: 5002 - protein, 13 aa, synthetic construct
AVGEGGDTPDQLI

SEQ ID NO: 5003 - protein, 13 aa, synthetic construct
AVGEGGDTPDKLN

SEQ ID NO: 5004 - protein, 11 aa, synthetic construct
AVGEGDTEKLI

SEQ ID NO: 5005 - protein, 11 aa, synthetic construct
AVGEGDTAILI

SEQ ID NO: 5006 - protein, 11 aa, synthetic construct
AVGEGDNVKII

SEQ ID NO: 5007 - protein, 14 aa, synthetic construct
AVGEAVLGDIYTDK

SEQ ID NO: 5008 - protein, 4 aa, synthetic construct
AVGE

SEQ ID NO: 5009 - protein, 14 aa, synthetic construct
AVGDVSPFSGGHKL

SEQ ID NO: 5010 - protein, 11 aa, synthetic construct
AVGDVGGSAAL

SEQ ID NO: 5011 - protein, 14 aa, synthetic construct
AVGDVGGGYDDQLI

SEQ ID NO: 5012 - protein, 9 aa, synthetic construct
AVGDNPNWG

SEQ ID NO: 5013 - protein, 12 aa, synthetic construct
AVGDLVSLGYAD

SEQ ID NO: 5014 - protein, 14 aa, synthetic construct
AVGDLVLGDTDKLI

SEQ ID NO: 5015 - protein, 14 aa, synthetic construct
AVGDLSPFTGGHKL

SEQ ID NO: 5016 - protein, 13 aa, synthetic construct
AVGDLLGDTDTLI

SEQ ID NO: 5017 - protein, 12 aa, synthetic construct
AVGDLGSTDKLI

SEQ ID NO: 5018 - protein, 14 aa, synthetic construct
AVGDLGGYARTVKL

SEQ ID NO: 5019 - protein, 13 aa, synthetic construct
AVGDLGGSARTDK

SEQ ID NO: 5020 - protein, 12 aa, synthetic construct
AVGDLFMLGFTD

SEQ ID NO: 5021 - protein, 13 aa, synthetic construct
AVGDLERGIRGTD

SEQ ID NO: 5022 - protein, 14 aa, synthetic construct
AVGDLCLGDTLATA

SEQ ID NO: 5023 - protein, 12 aa, synthetic construct
AVGDIANCGLNT

SEQ ID NO: 5024 - protein, 11 aa, synthetic construct
AVGDGDTVKLI

SEQ ID NO: 5025 - protein, 11 aa, synthetic construct
AVGDGDTDKLI

SEQ ID NO: 5026 - protein, 13 aa, synthetic construct
AVGEGGDTPIKSS

SEQ ID NO: 5027 - protein, 14 aa, synthetic construct
AVGEGGGGYDDNLI

SEQ ID NO: 5028 - protein, 13 aa, synthetic construct
AVGEHHSYVLWDT

SEQ ID NO: 5029 - protein, 13 aa, synthetic construct
AVGELAYRGIRTD

SEQ ID NO: 5030 - protein, 12 aa, synthetic construct
AVGELGSTCNII

SEQ ID NO: 5031 - protein, 13 aa, synthetic construct
AVGELGGIGRNLI

SEQ ID NO: 5032 - protein, 14 aa, synthetic construct
AVGELGGGYDENLI

SEQ ID NO: 5033 - protein, 14 aa, synthetic construct
AVGELGGGYDDKLI

SEQ ID NO: 5034 - protein, 12 aa, synthetic construct
AVGELGDTDNLI

SEQ ID NO: 5035 - protein, 12 aa, synthetic construct
AVGELGDTDKHI

SEQ ID NO: 5036 - protein, 13 aa, synthetic construct
AVGELGDSYPDKL

SEQ ID NO: 5037 - protein, 12 aa, synthetic construct
AVGELGCSDKHI

SEQ ID NO: 5038 - protein, 14 aa, synthetic construct
AVGELFLLGDTDNL

SEQ ID NO: 5039 - protein, 14 aa, synthetic construct
AVGELFLLGDTDKL

SEQ ID NO: 5040 - protein, 14 aa, synthetic construct
AVGELCLGDTLATA

SEQ ID NO: 5041 - protein, 13 aa, synthetic construct
AVGELAWGSYTDK

SEQ ID NO: 5042 - protein, 14 aa, synthetic construct
AVGEHPSYELGDTD

SEQ ID NO: 5043 - protein, 13 aa, synthetic construct
AVGELAVGSYTEK

SEQ ID NO: 5044 - protein, 14 aa, synthetic construct
AVGELALPGIHTDK

SEQ ID NO: 5045 - protein, 14 aa, synthetic construct
AVGEIREGDTYKLI

SEQ ID NO: 5046 - protein, 12 aa, synthetic construct
AVGEIGSTDKLI

SEQ ID NO: 5047 - protein, 12 aa, synthetic construct
AVGEIGSTDKII

SEQ ID NO: 5048 - protein, 14 aa, synthetic construct
AVGEIAYWGINTEK

SEQ ID NO: 5049 - protein, 14 aa, synthetic construct
AVGEIAYWGIKTDK

SEQ ID NO: 5050 - protein, 14 aa, synthetic construct
AVGEIAWGSYPDKL

SEQ ID NO: 5051 - protein, 14 aa, synthetic construct
AVGEIANWGRNTDK

SEQ ID NO: 5052 - protein, 14 aa, synthetic construct
AVGEIANGGINTDK

SEQ ID NO: 5053 - protein, 14 aa, synthetic construct
AVGEHSPVPGGHKL

SEQ ID NO: 5054 - protein, 13 aa, synthetic construct
AVGAVPTDTDSLF

SEQ ID NO: 5055 - protein, 13 aa, synthetic construct
AVGARWGIRSILI

SEQ ID NO: 5056 - protein, 13 aa, synthetic construct
AVGALTFVPDQLL

SEQ ID NO: 5057 - protein, 13 aa, synthetic construct
ARGGLPYRGIRTD

SEQ ID NO: 5058 - protein, 14 aa, synthetic construct
ARGRAFLRTLYTDK

SEQ ID NO: 5059 - protein, 5 aa, synthetic construct
ARGRA

SEQ ID NO: 5060 - protein, 14 aa, synthetic construct
ARGPPPAYVLGDTD

SEQ ID NO: 5061 - protein, 14 aa, synthetic construct
ARGNFPYGGYTPIN

SEQ ID NO: 5062 - protein, 8 aa, synthetic construct
ARGGVLDT

SEQ ID NO: 5063 - protein, 8 aa, synthetic construct
ARGGRVWG

SEQ ID NO: 5064 - protein, 14 aa, synthetic construct
ARGGRRGIRGTDQL

SEQ ID NO: 5065 - protein, 12 aa, synthetic construct
ARGGRAWSWGLP

SEQ ID NO: 5066 - protein, 14 aa, synthetic construct
ARGGPSWSWGIPDK

SEQ ID NO: 5067 - protein, 14 aa, synthetic construct
ARGGLVWGTTDKLI

SEQ ID NO: 5068 - protein, 8 aa, synthetic construct
ARGGLVWG

SEQ ID NO: 5069 - protein, 12 aa, synthetic construct
ARGGGAWVWFWG

SEQ ID NO: 5070 - protein, 13 aa, synthetic construct
ARGVLGDKDEKLI

SEQ ID NO: 5071 - protein, 13 aa, synthetic construct
ARGEVWGIRSKLI

SEQ ID NO: 5072 - protein, 13 aa, synthetic construct
ARGEVPTDTEKLI

SEQ ID NO: 5073 - protein, 12 aa, synthetic construct
ARGEVGDSDKLL

SEQ ID NO: 5074 - protein, 13 aa, synthetic construct
ARGERWGIRSKLI

SEQ ID NO: 5075 - protein, 14 aa, synthetic construct
ARGEPVLGDLYTDQ

SEQ ID NO: 5076 - protein, 14 aa, synthetic construct
ARGEPVLGDIYTDK

SEQ ID NO: 5077 - protein, 14 aa, synthetic construct
ARGEPTGGWTEYLF

SEQ ID NO: 5078 - protein, 14 aa, synthetic construct
ARGEPTGGWTDKLI

SEQ ID NO: 5079 - protein, 14 aa, synthetic construct
ARGEPTGGWSDKLI

SEQ ID NO: 5080 - protein, 13 aa, synthetic construct
ARGEPTFLPDKLI

SEQ ID NO: 5081 - protein, 13 aa, synthetic construct
ARGEPTARWTEKL

SEQ ID NO: 5082 - protein, 12 aa, synthetic construct
ARGVAPSNVLGE

SEQ ID NO: 5083 - protein, 14 aa, synthetic construct
ARGVLPYRGIRTDK

SEQ ID NO: 5084 - protein, 13 aa, synthetic construct
AVGALREGDKSKL

SEQ ID NO: 5085 - protein, 14 aa, synthetic construct
ASGELVWGTPDKLI

SEQ ID NO: 5086 - protein, 13 aa, synthetic construct
AVGALLGDTENLI

SEQ ID NO: 5087 - protein, 12 aa, synthetic construct
AVGALGSTDKLI

SEQ ID NO: 5088 - protein, 12 aa, synthetic construct
AVGAGGYTEIVL

SEQ ID NO: 5089 - protein, 12 aa, synthetic construct
AVGAGGYTDKLI

SEQ ID NO: 5090 - protein, 12 aa, synthetic construct
AVGAGGYTDKHI

SEQ ID NO: 5091 - protein, 14 aa, synthetic construct
AVEEIANWGLHTDK

SEQ ID NO: 5092 - protein, 13 aa, synthetic construct
AVAGPSWYWGIPD

SEQ ID NO: 5093 - protein, 13 aa, synthetic construct
ASGHLWGLASKLI

SEQ ID NO: 5094 - protein, 9 aa, synthetic construct
ASGGLALPG

SEQ ID NO: 5095 - protein, 12 aa, synthetic construct
ASGELWIHDKLI

SEQ ID NO: 5096 - protein, 14 aa, synthetic construct
ASGELVWGTTDKLI

SEQ ID NO: 5097 - protein, 13 aa, synthetic construct
ASGELREGDKNQL

SEQ ID NO: 5098 - protein, 14 aa, synthetic construct
ARGVLRGIRGTDQL

SEQ ID NO: 5099 - protein, 13 aa, synthetic construct
ASGELLADTDKLI

SEQ ID NO: 5100 - protein, 14 aa, synthetic construct
ASGELALPGLHTDK

SEQ ID NO: 5101 - protein, 13 aa, synthetic construct
ASGEGGDTPDKLI

SEQ ID NO: 5102 - protein, 13 aa, synthetic construct
ASGEGGDTHDQLI

SEQ ID NO: 5103 - protein, 13 aa, synthetic construct
ASGDVTGGYADKL

SEQ ID NO: 5104 - protein, 14 aa, synthetic construct
ASGAPVLPLLGDTD

SEQ ID NO: 5105 - protein, 12 aa, synthetic construct
ARRELAIPGIHT

SEQ ID NO: 5106 - protein, 12 aa, synthetic construct
ARGVRRGIRGTD

SEQ ID NO: 5107 - protein, 13 aa, synthetic construct
ARGVPPSYVLGEL

SEQ ID NO: 5108 - protein, 13 aa, synthetic construct
ARGVPPSYVLGEI

SEQ ID NO: 5109 - protein, 14 aa, synthetic construct
ARGVPACYVLGVFL

SEQ ID NO: 5110 - protein, 12 aa, synthetic construct
AVGELGSTDKVI

SEQ ID NO: 5111 - protein, 13 aa, synthetic construct
AVGELLGATEKLI

SEQ ID NO: 5112 - protein, 7 aa, synthetic construct
DIWEGGE

SEQ ID NO: 5113 - protein, 13 aa, synthetic construct
AVGELLGDTDKLI

SEQ ID NO: 5114 - protein, 12 aa, synthetic construct
DIGELGDSSWDT

SEQ ID NO: 5115 - protein, 13 aa, synthetic construct
DIGELGDRSWDTR

SEQ ID NO: 5116 - protein, 13 aa, synthetic construct
DIGELGDISWDTR

SEQ ID NO: 5117 - protein, 12 aa, synthetic construct
DIGELDFHYWGT

SEQ ID NO: 5118 - protein, 14 aa, synthetic construct
DIGELCVGDTLATA

SEQ ID NO: 5119 - protein, 14 aa, synthetic construct
DIGELAWWSYTDKL

SEQ ID NO: 5120 - protein, 14 aa, synthetic construct
DIGELALTGINTDK

SEQ ID NO: 5121 - protein, 13 aa, synthetic construct
DIGELALPGIHTD

SEQ ID NO: 5122 - protein, 13 aa, synthetic construct
DIGEIIEGDKNKL

SEQ ID NO: 5123 - protein, 13 aa, synthetic construct
DIGEIESLGSTDN

SEQ ID NO: 5124 - protein, 14 aa, synthetic construct
DIGEHPYWGIYTDK

SEQ ID NO: 5125 - protein, 10 aa, synthetic construct
DIGEGDTDNL

SEQ ID NO: 5126 - protein, 11 aa, synthetic construct
DIGEGDTDKLI

SEQ ID NO: 5127 - protein, 11 aa, synthetic construct
DIGEGDNDKLI

SEQ ID NO: 5128 - protein, 14 aa, synthetic construct
DIGDLSIRGINTDK

SEQ ID NO: 5129 - protein, 13 aa, synthetic construct
DIGDLLGDTDKLI

SEQ ID NO: 5130 - protein, 12 aa, synthetic construct
DIGALTFLPYKL

SEQ ID NO: 5131 - protein, 14 aa, synthetic construct
DIGALLPTFRGTDK

SEQ ID NO: 5132 - protein, 14 aa, synthetic construct
DIGALLHTFRGTDK

SEQ ID NO: 5133 - protein, 14 aa, synthetic construct
DIGALLHTFRGSDK

SEQ ID NO: 5134 - protein, 14 aa, synthetic construct
DIGALHPTFRGTDK

SEQ ID NO: 5135 - protein, 14 aa, synthetic construct
DHGVLFLLGETDKL

SEQ ID NO: 5136 - protein, 13 aa, synthetic construct
DHGEMGDCSMDTR

SEQ ID NO: 5137 - protein, 12 aa, synthetic construct
DHGELCIHDKLN

SEQ ID NO: 5138 - protein, 11 aa, synthetic construct
DHGEGDTDKLS

SEQ ID NO: 5139 - protein, 12 aa, synthetic construct
DIGELGSTDKII

SEQ ID NO: 5140 - protein, 12 aa, synthetic construct
DIGELGSTDKLI

SEQ ID NO: 5141 - protein, 13 aa, synthetic construct
DIGELLGDTDKLI

SEQ ID NO: 5142 - protein, 13 aa, synthetic construct
DIGEPTVGCTDKL

SEQ ID NO: 5143 - protein, 14 aa, synthetic construct
DIVVRMGIRCTDKL

SEQ ID NO: 5144 - protein, 11 aa, synthetic construct
DIVELVSNDKL

SEQ ID NO: 5145 - protein, 14 aa, synthetic construct
DIVEIANWGINTDK

SEQ ID NO: 5146 - protein, 13 aa, synthetic construct
DIRETPYYVLLDT

SEQ ID NO: 5147 - protein, 13 aa, synthetic construct
DIGVPPSYVLWEI

SEQ ID NO: 5148 - protein, 6 aa, synthetic construct
DIGRAY

SEQ ID NO: 5149 - protein, 14 aa, synthetic construct
DIGRAFLRTLYTDK

SEQ ID NO: 5150 - protein, 11 aa, synthetic construct
DIGQLWIHDKL

SEQ ID NO: 5151 - protein, 13 aa, synthetic construct
DIGEVPTDTDKLI

SEQ ID NO: 5152 - protein, 13 aa, synthetic construct
DIGEVLMGDSPLI

SEQ ID NO: 5153 - protein, 13 aa, synthetic construct
DIGEVGDKYDKVF

SEQ ID NO: 5154 - protein, 14 aa, synthetic construct
DIGEPTGGWTDKLI

SEQ ID NO: 5155 - protein, 14 aa, synthetic construct
DIGELLGETWAPGT

SEQ ID NO: 5156 - protein, 14 aa, synthetic construct
DIGEPSYAGGSYTD

SEQ ID NO: 5157 - protein, 12 aa, synthetic construct
DIGEPGNTIKSS

SEQ ID NO: 5158 - protein, 12 aa, synthetic construct
DIGELWYTDKLI

SEQ ID NO: 5159 - protein, 12 aa, synthetic construct
DIGELVYTDKLI

SEQ ID NO: 5160 - protein, 13 aa, synthetic construct
DIGELVWGTTDKL

SEQ ID NO: 5161 - protein, 13 aa, synthetic construct
DIGELTLLPDKLI

SEQ ID NO: 5162 - protein, 14 aa, synthetic construct
DIGELSPFTGCHKL

SEQ ID NO: 5163 - protein, 13 aa, synthetic construct
DIGELREGDKNKL

SEQ ID NO: 5164 - protein, 14 aa, synthetic construct
DIGELPYRVIRTDK

SEQ ID NO: 5165 - protein, 14 aa, synthetic construct
DIGELLSLGNTDKL

SEQ ID NO: 5166 - protein, 12 aa, synthetic construct
DIGELLHTDKLI

SEQ ID NO: 5167 - protein, 13 aa, synthetic construct
DHGDLAETNPDKL

SEQ ID NO: 5168 - protein, 13 aa, synthetic construct
DFGEVLLESVKLF

SEQ ID NO: 5169 - protein, 13 aa, synthetic construct
DFGELWGIRSKLI

SEQ ID NO: 5170 - protein, 14 aa, synthetic construct
AVGELVWGTTEKLI

SEQ ID NO: 5171 - protein, 14 aa, synthetic construct
AVGEPVLGDIYTEK

SEQ ID NO: 5172 - protein, 14 aa, synthetic construct
AVGEPVLGDIYTDK

SEQ ID NO: 5173 - protein, 14 aa, synthetic construct
AVGEPTGGWTDKLI

SEQ ID NO: 5174 - protein, 13 aa, synthetic construct
AVGEPRSYVLGDT

SEQ ID NO: 5175 - protein, 14 aa, synthetic construct
AVGEPPSYVLGDTD

SEQ ID NO: 5176 - protein, 12 aa, synthetic construct
AVGEPGTTINSS

SEQ ID NO: 5177 - protein, 12 aa, synthetic construct
AVGEPGSTLNSS

SEQ ID NO: 5178 - protein, 14 aa, synthetic construct
AVGEMTGGYADKII

SEQ ID NO: 5179 - protein, 12 aa, synthetic construct
AVGELWIHDTLI

SEQ ID NO: 5180 - protein, 12 aa, synthetic construct
AVGELWIHDQLI

SEQ ID NO: 5181 - protein, 13 aa, synthetic construct
AVGELWGRRSQLI

SEQ ID NO: 5182 - protein, 14 aa, synthetic construct
AVGELVWGTTDKLI

SEQ ID NO: 5183 - protein, 12 aa, synthetic construct
AVGERSGGWRAL

SEQ ID NO: 5184 - protein, 14 aa, synthetic construct
AVGELVWGTPDKLI

SEQ ID NO: 5185 - protein, 14 aa, synthetic construct
AVGELVSLGYTDKL

SEQ ID NO: 5186 - protein, 14 aa, synthetic construct
AVGELVLGDTDKPI

SEQ ID NO: 5187 - protein, 13 aa, synthetic construct
AVGELSVRGIHTD

SEQ ID NO: 5188 - protein, 14 aa, synthetic construct
AVGELSLRGIHTDK

SEQ ID NO: 5189 - protein, 12 aa, synthetic construct
AVGELSDMTGAL

SEQ ID NO: 5190 - protein, 14 aa, synthetic construct
AVGELREGDQNKLI

SEQ ID NO: 5191 - protein, 14 aa, synthetic construct
AVGELREGDKNNSS

SEQ ID NO: 5192 - protein, 14 aa, synthetic construct
AVGELREGDKNKLI

SEQ ID NO: 5193 - protein, 13 aa, synthetic construct
AVGELPGDTDKLI

SEQ ID NO: 5194 - protein, 13 aa, synthetic construct
AVGELNFVPYKLI

SEQ ID NO: 5195 - protein, 14 aa, synthetic construct
AVGEQGLQLQGDTD

SEQ ID NO: 5196 - protein, 13 aa, synthetic construct
AVGERSGGYLGSW

SEQ ID NO: 5197 - protein, 13 aa, synthetic construct
AYRNSTRLNSSQP

SEQ ID NO: 5198 - protein, 14 aa, synthetic construct
AVGGPSWYWGIPDK

SEQ ID NO: 5199 - protein, 13 aa, synthetic construct
AVYEGGYHPDNHI

SEQ ID NO: 5200 - protein, 14 aa, synthetic construct
AVWERGDPYPENLN

SEQ ID NO: 5201 - protein, 14 aa, synthetic construct
AVWELESLGYTDKL

SEQ ID NO: 5202 - protein, 14 aa, synthetic construct
AVWELAWGSYTDKL

SEQ ID NO: 5203 - protein, 14 aa, synthetic construct
AVWEIPYRGIRTDK

SEQ ID NO: 5204 - protein, 13 aa, synthetic construct
AVVELWGIRSKLI

SEQ ID NO: 5205 - protein, 9 aa, synthetic construct
AVGVVGGGG

SEQ ID NO: 5206 - protein, 14 aa, synthetic construct
AVGVLSGIRGTDKL

SEQ ID NO: 5207 - protein, 14 aa, synthetic construct
AVGRAFLLTLYTDK

SEQ ID NO: 5208 - protein, 14 aa, synthetic construct
AVGQLVWGTTEKLI

SEQ ID NO: 5209 - protein, 8 aa, synthetic construct
AVGGVGGG

SEQ ID NO: 5210 - protein, 13 aa, synthetic construct
AVGGPPYYVLREI

SEQ ID NO: 5211 - protein, 14 aa, synthetic construct
AVGEVEWGIRGTDK

SEQ ID NO: 5212 - protein, 5 aa, synthetic construct
AVGGG

SEQ ID NO: 5213 - protein, 12 aa, synthetic construct
AVGEVWIHDKLI

SEQ ID NO: 5214 - protein, 13 aa, synthetic construct
AVGEVWGIRSKLI

SEQ ID NO: 5215 - protein, 14 aa, synthetic construct
AVGEVSPVTGGHKL

SEQ ID NO: 5216 - protein, 13 aa, synthetic construct
AVGEVRTDTEKVI

SEQ ID NO: 5217 - protein, 13 aa, synthetic construct
AVGEVPTDTSKLI

SEQ ID NO: 5218 - protein, 13 aa, synthetic construct
AVGEVPTDTENLI

SEQ ID NO: 5219 - protein, 7 aa, synthetic construct
AVGEVPT

SEQ ID NO: 5220 - protein, 14 aa, synthetic construct
AVGEVGGYARTPKL

SEQ ID NO: 5221 - protein, 14 aa, synthetic construct
AVGEVGGGYYDNLI

SEQ ID NO: 5222 - protein, 14 aa, synthetic construct
AVGEVGGGYYDKLI

SEQ ID NO: 5223 - protein, 12 aa, synthetic construct
ALGEVGSTDQLI

SEQ ID NO: 5224 - protein, 14 aa, synthetic construct
ALGELVWGTTYRLI

SEQ ID NO: 5225 - protein, 12 aa, synthetic construct
ALGEVGSTDNLF

SEQ ID NO: 5226 - protein, 14 aa, synthetic construct
ALGDVTRGYASTLI

SEQ ID NO: 5227 - protein, 13 aa, synthetic construct
ALGDVGGLRSKVI

SEQ ID NO: 5228 - protein, 13 aa, synthetic construct
ALGDVGGIRSKVI

SEQ ID NO: 5229 - protein, 14 aa, synthetic construct
ALGDVGGGYYEKLI

SEQ ID NO: 5230 - protein, 14 aa, synthetic construct
ALGDVGGGYYDNLI

SEQ ID NO: 5231 - protein, 14 aa, synthetic construct
ALGDVGGGYVVKLI

SEQ ID NO: 5232 - protein, 14 aa, synthetic construct
ALGDVGGGYDYKLI

SEQ ID NO: 5233 - protein, 14 aa, synthetic construct
ALGDVGGGYDQKLI

SEQ ID NO: 5234 - protein, 14 aa, synthetic construct
ALGDVGGGYDEKLI

SEQ ID NO: 5235 - protein, 14 aa, synthetic construct
ALGDVGGGYDDKII

SEQ ID NO: 5236 - protein, 13 aa, synthetic construct
ALGDVGGGYDDKI

SEQ ID NO: 5237 - protein, 14 aa, synthetic construct
ALGDVGGGYDDKHI

SEQ ID NO: 5238 - protein, 14 aa, synthetic construct
ALGDVGGGYAYNLI

SEQ ID NO: 5239 - protein, 13 aa, synthetic construct
ALGDVGESSWHTR

SEQ ID NO: 5240 - protein, 14 aa, synthetic construct
ALGDVGDTYPEKLI

SEQ ID NO: 5241 - protein, 14 aa, synthetic construct
ALGDVGDTYPDKLI

SEQ ID NO: 5242 - protein, 12 aa, synthetic construct
ALGDVGDTEKLI

SEQ ID NO: 5243 - protein, 12 aa, synthetic construct
ALGDVGDTDKLF

SEQ ID NO: 5244 - protein, 13 aa, synthetic construct
ALGDVGDTDDKLI

SEQ ID NO: 5245 - protein, 14 aa, synthetic construct
ALGDVGDPYPEKLI

SEQ ID NO: 5246 - protein, 13 aa, synthetic construct
ALGDVGDKDYKLI

SEQ ID NO: 5247 - protein, 12 aa, synthetic construct
ALGDVGATDQLI

SEQ ID NO: 5248 - protein, 14 aa, synthetic construct
ALGDVFLLGDSDKL

SEQ ID NO: 5249 - protein, 11 aa, synthetic construct
ALGDVETDKLI

SEQ ID NO: 5250 - protein, 12 aa, synthetic construct
ALGDVGGSARTD

SEQ ID NO: 5251 - protein, 14 aa, synthetic construct
ALGDVGGYARTSKL

SEQ ID NO: 5252 - protein, 14 aa, synthetic construct
ALGDVGSGGYADKL

SEQ ID NO: 5253 - protein, 13 aa, synthetic construct
ALGDVPTDPDNLI

SEQ ID NO: 5254 - protein, 11 aa, synthetic construct
ALGDVSPVAGG

SEQ ID NO: 5255 - protein, 14 aa, synthetic construct
ALGDVSPFSGGHKL

SEQ ID NO: 5256 - protein, 14 aa, synthetic construct
ALGDVREGDKDKLI

SEQ ID NO: 5257 - protein, 8 aa, synthetic construct
ALGDVPYR

SEQ ID NO: 5258 - protein, 12 aa, synthetic construct
ALGDVPTYWGKF

SEQ ID NO: 5259 - protein, 13 aa, synthetic construct
ALGDVPTETDQLI

SEQ ID NO: 5260 - protein, 13 aa, synthetic construct
ALGDVPTDTYKLT

SEQ ID NO: 5261 - protein, 13 aa, synthetic construct
ALGDVPTDTYKLI

SEQ ID NO: 5262 - protein, 13 aa, synthetic construct
ALGDVPTDTVKLI

SEQ ID NO: 5263 - protein, 13 aa, synthetic construct
ALGDVPTDTDQII

SEQ ID NO: 5264 - protein, 13 aa, synthetic construct
ALGDVPPATEKLI

SEQ ID NO: 5265 - protein, 12 aa, synthetic construct
ALGDVGSTDKLI

SEQ ID NO: 5266 - protein, 13 aa, synthetic construct
ALGDVPKDTDKLI

SEQ ID NO: 5267 - protein, 13 aa, synthetic construct
ALGDVPADTDKLI

SEQ ID NO: 5268 - protein, 13 aa, synthetic construct
ALGDVLLGDSPLT

SEQ ID NO: 5269 - protein, 12 aa, synthetic construct
ALGDVLHTDHLI

SEQ ID NO: 5270 - protein, 13 aa, synthetic construct
ALGDVLGDTNKLI

SEQ ID NO: 5271 - protein, 13 aa, synthetic construct
ALGDVLGDTEKLI

SEQ ID NO: 5272 - protein, 13 aa, synthetic construct
ALGDVLGDTDTLM

SEQ ID NO: 5273 - protein, 13 aa, synthetic construct
ALGDVLGDTDNLI

SEQ ID NO: 5274 - protein, 13 aa, synthetic construct
ALGDVLGDTDKLF

SEQ ID NO: 5275 - protein, 12 aa, synthetic construct
ALGDVGYTDKLI

SEQ ID NO: 5276 - protein, 8 aa, synthetic construct
ALGDVAWG

SEQ ID NO: 5277 - protein, 14 aa, synthetic construct
ALGDVARGCYTLKL

SEQ ID NO: 5278 - protein, 14 aa, synthetic construct
ALGDVANWGIKTDK

SEQ ID NO: 5279 - protein, 13 aa, synthetic construct
ALGDPTGGWTDKL

SEQ ID NO: 5280 - protein, 14 aa, synthetic construct
ALGDPVLGDIYSDK

SEQ ID NO: 5281 - protein, 14 aa, synthetic construct
ALGDPVLGDIYNYK

SEQ ID NO: 5282 - protein, 14 aa, synthetic construct
ALGDPVLGDIDTDK

SEQ ID NO: 5283 - protein, 14 aa, synthetic construct
ALGDPVLGDICTDK

SEQ ID NO: 5284 - protein, 13 aa, synthetic construct
ALGDPVLGAIYTD

SEQ ID NO: 5285 - protein, 14 aa, synthetic construct
ALGDPTVGWTDQLI

SEQ ID NO: 5286 - protein, 14 aa, synthetic construct
ALGDPTRGWTDKLI

SEQ ID NO: 5287 - protein, 14 aa, synthetic construct
ALGDPTGGWTENLI

SEQ ID NO: 5288 - protein, 14 aa, synthetic construct
ALGDPTGGWTDQLI

SEQ ID NO: 5289 - protein, 14 aa, synthetic construct
ALGDPTGGWTDKLF

SEQ ID NO: 5290 - protein, 14 aa, synthetic construct
ALGDPTGGWTDKII

SEQ ID NO: 5291 - protein, 14 aa, synthetic construct
ALGDPVLGDLYSDK

SEQ ID NO: 5292 - protein, 14 aa, synthetic construct
ALGDPTGGWTAQLI

SEQ ID NO: 5293 - protein, 14 aa, synthetic construct
ALGDPTGGWTAKLI

SEQ ID NO: 5294 - protein, 14 aa, synthetic construct
ALGDPTGGCTDKLI

SEQ ID NO: 5295 - protein, 14 aa, synthetic construct
ALGDPTGGCTDELI

SEQ ID NO: 5296 - protein, 14 aa, synthetic construct
ALGDPPSYVLGTPI

SEQ ID NO: 5297 - protein, 13 aa, synthetic construct
ALGDPHSYVLWDT

SEQ ID NO: 5298 - protein, 12 aa, synthetic construct
ALGDPGTTIYSS

SEQ ID NO: 5299 - protein, 11 aa, synthetic construct
ALGDPGTTITH

SEQ ID NO: 5300 - protein, 12 aa, synthetic construct
ALGDPGTTINYS

SEQ ID NO: 5301 - protein, 12 aa, synthetic construct
ALGDPGTTINSA

SEQ ID NO: 5302 - protein, 14 aa, synthetic construct
ALGDPVLGDIYTEK

SEQ ID NO: 5303 - protein, 14 aa, synthetic construct
ALGDPVLGDLYTDQ

SEQ ID NO: 5304 - protein, 12 aa, synthetic construct
ALGDVALPGIHT

SEQ ID NO: 5305 - protein, 14 aa, synthetic construct
ALGDRPGGYLGSWD

SEQ ID NO: 5306 - protein, 14 aa, synthetic construct
ALGDTVVGDIYTDK

SEQ ID NO: 5307 - protein, 12 aa, synthetic construct
ALGDTGTTINSS

SEQ ID NO: 5308 - protein, 14 aa, synthetic construct
ALGDRTGGYRPINS

SEQ ID NO: 5309 - protein, 14 aa, synthetic construct
ALGDRTGGYLGPWD

SEQ ID NO: 5310 - protein, 14 aa, synthetic construct
ALGDRTGGYLDSWD

SEQ ID NO: 5311 - protein, 14 aa, synthetic construct
ALGDRTGGYFGSWD

SEQ ID NO: 5312 - protein, 14 aa, synthetic construct
ALGDRTGGWTEKLI

SEQ ID NO: 5313 - protein, 14 aa, synthetic construct
ALGDRTGAYAEKLI

SEQ ID NO: 5314 - protein, 10 aa, synthetic construct
ALGDRSVLPD

SEQ ID NO: 5315 - protein, 14 aa, synthetic construct
ALGDRSGGYLGSWD

SEQ ID NO: 5316 - protein, 9 aa, synthetic construct
ALGDRKRTR

SEQ ID NO: 5317 - protein, 13 aa, synthetic construct
ALGDPVLGEIYTD

SEQ ID NO: 5318 - protein, 11 aa, synthetic construct
ALGDRHSTRLN

SEQ ID NO: 5319 - protein, 14 aa, synthetic construct
ALGDREWGIRGTDK

SEQ ID NO: 5320 - protein, 14 aa, synthetic construct
ALGDQVSLWYTDKL

SEQ ID NO: 5321 - protein, 14 aa, synthetic construct
ALGDQVSLGYTDRL

SEQ ID NO: 5322 - protein, 14 aa, synthetic construct
ALGDQPYWGIYTDK

SEQ ID NO: 5323 - protein, 14 aa, synthetic construct
ALGDQPYSGIYTDK

SEQ ID NO: 5324 - protein, 13 aa, synthetic construct
ALGDQPNSGLYTD

SEQ ID NO: 5325 - protein, 12 aa, synthetic construct
ALGDQGTTFTSS

SEQ ID NO: 5326 - protein, 14 aa, synthetic construct
ALGDPVQGDIYTDK

SEQ ID NO: 5327 - protein, 14 aa, synthetic construct
ALGDPVPGDIYTDK

SEQ ID NO: 5328 - protein, 14 aa, synthetic construct
ALGDVTGGYADKLI

SEQ ID NO: 5329 - protein, 14 aa, synthetic construct
ALGDVVLGDTDKLI

SEQ ID NO: 5330 - protein, 12 aa, synthetic construct
ALGDPGNTINSS

SEQ ID NO: 5331 - protein, 13 aa, synthetic construct
ALGDVVMGDSPLI

SEQ ID NO: 5332 - protein, 11 aa, synthetic construct
ALGEGDTNKLF

SEQ ID NO: 5333 - protein, 11 aa, synthetic construct
ALGEGDTGHRS

SEQ ID NO: 5334 - protein, 11 aa, synthetic construct
ALGEGDTENLS

SEQ ID NO: 5335 - protein, 11 aa, synthetic construct
ALGEGDTEKLT

SEQ ID NO: 5336 - protein, 11 aa, synthetic construct
ALGEGDTEKLN

SEQ ID NO: 5337 - protein, 11 aa, synthetic construct
ALGEGDTEKII

SEQ ID NO: 5338 - protein, 11 aa, synthetic construct
ALGEGDTDRLY

SEQ ID NO: 5339 - protein, 11 aa, synthetic construct
ALGEGDTDRLI

SEQ ID NO: 5340 - protein, 11 aa, synthetic construct
ALGEGDTDQLY

SEQ ID NO: 5341 - protein, 11 aa, synthetic construct
ALGEGDTDQLN

SEQ ID NO: 5342 - protein, 11 aa, synthetic construct
ALGEGDTDNLK

SEQ ID NO: 5343 - protein, 11 aa, synthetic construct
ALGEGDTDNLF

SEQ ID NO: 5344 - protein, 11 aa, synthetic construct
ALGEGDTDLLI

SEQ ID NO: 5345 - protein, 11 aa, synthetic construct
ALGEGDTDKVL

SEQ ID NO: 5346 - protein, 11 aa, synthetic construct
ALGEGDTDKPS

SEQ ID NO: 5347 - protein, 11 aa, synthetic construct
ALGEGDTDKLD

SEQ ID NO: 5348 - protein, 11 aa, synthetic construct
ALGEGDTDKIY

SEQ ID NO: 5349 - protein, 11 aa, synthetic construct
ALGEGDTDKIS

SEQ ID NO: 5350 - protein, 11 aa, synthetic construct
ALGEGDTDKIK

SEQ ID NO: 5351 - protein, 11 aa, synthetic construct
ALGEGDTDKIF

SEQ ID NO: 5352 - protein, 11 aa, synthetic construct
ALGEGDTDKHN

SEQ ID NO: 5353 - protein, 11 aa, synthetic construct
ALGEGDTDHVF

SEQ ID NO: 5354 - protein, 11 aa, synthetic construct
ALGEGDTATLI

SEQ ID NO: 5355 - protein, 11 aa, synthetic construct
ALGEGDTPKLI

SEQ ID NO: 5356 - protein, 11 aa, synthetic construct
ALGEGDTVKLN

SEQ ID NO: 5357 - protein, 11 aa, synthetic construct
ALGEGDTVKLT

SEQ ID NO: 5358 - protein, 13 aa, synthetic construct
ALGEGGDGPINSS

SEQ ID NO: 5359 - protein, 9 aa, synthetic construct
ALGEGGDTP

SEQ ID NO: 5360 - protein, 13 aa, synthetic construct
ALGEGGDTLDKLI

SEQ ID NO: 5361 - protein, 13 aa, synthetic construct
ALGEGGDTHDKLI

SEQ ID NO: 5362 - protein, 12 aa, synthetic construct
ALGEGGDTDKLL

SEQ ID NO: 5363 - protein, 12 aa, synthetic construct
ALGEGGDTADNL

SEQ ID NO: 5364 - protein, 13 aa, synthetic construct
ALGEGGDSPDQLM

SEQ ID NO: 5365 - protein, 13 aa, synthetic construct
ALGEGGDSPDKLI

SEQ ID NO: 5366 - protein, 13 aa, synthetic construct
ALGEGGDPPSKLI

SEQ ID NO: 5367 - protein, 13 aa, synthetic construct
ALGEGGDPPDTHY

SEQ ID NO: 5368 - protein, 13 aa, synthetic construct
ALGEGGDNPDKLI

SEQ ID NO: 5369 - protein, 13 aa, synthetic construct
ALGEGGDAPDKLI

SEQ ID NO: 5370 - protein, 11 aa, synthetic construct
ALGEGETDKHN

SEQ ID NO: 5371 - protein, 13 aa, synthetic construct
ALGEGGDAGDKLI

SEQ ID NO: 5372 - protein, 13 aa, synthetic construct
ALGEGGATPENLI

SEQ ID NO: 5373 - protein, 13 aa, synthetic construct
ALGEGGATPDQLI

SEQ ID NO: 5374 - protein, 13 aa, synthetic construct
ALGEGGATPDLLF

SEQ ID NO: 5375 - protein, 13 aa, synthetic construct
ALGEGGAPPEKLI

SEQ ID NO: 5376 - protein, 13 aa, synthetic construct
ALGEGEWGIRGTD

SEQ ID NO: 5377 - protein, 11 aa, synthetic construct
ALGEGETDRLV

SEQ ID NO: 5378 - protein, 11 aa, synthetic construct
ALGEGETDNLI

SEQ ID NO: 5379 - protein, 11 aa, synthetic construct
ALGEGETDKLN

SEQ ID NO: 5380 - protein, 11 aa, synthetic construct
ALGEGETDKLF

SEQ ID NO: 5381 - protein, 11 aa, synthetic construct
ALGEGDTAQLI

SEQ ID NO: 5382 - protein, 11 aa, synthetic construct
ALGEGDSKKLI

SEQ ID NO: 5383 - protein, 11 aa, synthetic construct
ALGEGDPEKLI

SEQ ID NO: 5384 - protein, 13 aa, synthetic construct
ALGEAGDTPDKLI

SEQ ID NO: 5385 - protein, 14 aa, synthetic construct
ALGEDGTGGYTHKL

SEQ ID NO: 5386 - protein, 12 aa, synthetic construct
ALGEAVTTSNSS

SEQ ID NO: 5387 - protein, 14 aa, synthetic construct
ALGEATGGWTDKLI

SEQ ID NO: 5388 - protein, 10 aa, synthetic construct
ALGEASYAGG

SEQ ID NO: 5389 - protein, 13 aa, synthetic construct
ALGEAPTNTDKLI

SEQ ID NO: 5390 - protein, 13 aa, synthetic construct
ALGEAPTDTDQLI

SEQ ID NO: 5391 - protein, 13 aa, synthetic construct
ALGEAPTDTDKLI

SEQ ID NO: 5392 - protein, 13 aa, synthetic construct
ALGEAPMDTDKLI

SEQ ID NO: 5393 - protein, 14 aa, synthetic construct
ALGEAPGGWTEKLF

SEQ ID NO: 5394 - protein, 13 aa, synthetic construct
ALGEAGETPDKLI

SEQ ID NO: 5395 - protein, 13 aa, synthetic construct
ALGEAGATPDKHI

SEQ ID NO: 5396 - protein, 12 aa, synthetic construct
ALGEDPTYWGKF

SEQ ID NO: 5397 - protein, 11 aa, synthetic construct
ALGEACMKQVG

SEQ ID NO: 5398 - protein, 4 aa, synthetic construct
ALGE

SEQ ID NO: 5399 - protein, 13 aa, synthetic construct
ALGDYWGTPINSS

SEQ ID NO: 5400 - protein, 12 aa, synthetic construct
ALGDVWIHDKLI

SEQ ID NO: 5401 - protein, 13 aa, synthetic construct
ALGDVWGRGSQLI

SEQ ID NO: 5402 - protein, 13 aa, synthetic construct
ALGDVWGIRSNLI

SEQ ID NO: 5403 - protein, 14 aa, synthetic construct
ALGDVVWGTTRNSS

SEQ ID NO: 5404 - protein, 14 aa, synthetic construct
ALGDVVWGTTDTLI

SEQ ID NO: 5405 - protein, 14 aa, synthetic construct
ALGDVVWGTPEKLI

SEQ ID NO: 5406 - protein, 14 aa, synthetic construct
ALGDVVSLGYTDKL

SEQ ID NO: 5407 - protein, 13 aa, synthetic construct
ALGEDPKDTDKLI

SEQ ID NO: 5408 - protein, 13 aa, synthetic construct
ALGEDPYWGLYTD

SEQ ID NO: 5409 - protein, 11 aa, synthetic construct
ALGEGDPDKLI

SEQ ID NO: 5410 - protein, 13 aa, synthetic construct
ALGEFPTDTSKLI

SEQ ID NO: 5411 - protein, 11 aa, synthetic construct
ALGEGDPANLI

SEQ ID NO: 5412 - protein, 11 aa, synthetic construct
ALGEGDPAKLI

SEQ ID NO: 5413 - protein, 11 aa, synthetic construct
ALGEGDNDKII

SEQ ID NO: 5414 - protein, 11 aa, synthetic construct
ALGEGATEKLI

SEQ ID NO: 5415 - protein, 11 aa, synthetic construct
ALGEGATAKLL

SEQ ID NO: 5416 - protein, 11 aa, synthetic construct
ALGEGAPINSS

SEQ ID NO: 5417 - protein, 14 aa, synthetic construct
ALGEGANSSGSTTL

SEQ ID NO: 5418 - protein, 12 aa, synthetic construct
ALGEGAHTPDKL

SEQ ID NO: 5419 - protein, 5 aa, synthetic construct
ALGEG

SEQ ID NO: 5420 - protein, 12 aa, synthetic construct
ALGEFWIHDKLI

SEQ ID NO: 5421 - protein, 13 aa, synthetic construct
ALGEFPTDTDKII

SEQ ID NO: 5422 - protein, 13 aa, synthetic construct
ALGEDRKSSLLNT

SEQ ID NO: 5423 - protein, 13 aa, synthetic construct
ALGEFFLLGDTDK

SEQ ID NO: 5424 - protein, 14 aa, synthetic construct
ALGEFFILGDTDKL

SEQ ID NO: 5425 - protein, 12 aa, synthetic construct
ALGEFATWGLNS

SEQ ID NO: 5426 - protein, 14 aa, synthetic construct
ALGEFANWGINTEK

SEQ ID NO: 5427 - protein, 13 aa, synthetic construct
ALGEFANWGIHTD

SEQ ID NO: 5428 - protein, 13 aa, synthetic construct
ALGEEVDTPDKLI

SEQ ID NO: 5429 - protein, 10 aa, synthetic construct
ALGEEPKETD

SEQ ID NO: 5430 - protein, 8 aa, synthetic construct
ALGEEETT

SEQ ID NO: 5431 - protein, 12 aa, synthetic construct
ALGEDRNSSRRY

SEQ ID NO: 5432 - protein, 12 aa, synthetic construct
ALGEDRKSTLMK

SEQ ID NO: 5433 - protein, 12 aa, synthetic construct
ALGDPGTTIHSS

SEQ ID NO: 5434 - protein, 14 aa, synthetic construct
ALGDPGLALIGDTD

SEQ ID NO: 5435 - protein, 12 aa, synthetic construct
ALGEVGSTDKVI

SEQ ID NO: 5436 - protein, 14 aa, synthetic construct
ALGDLTGGYADKVI

SEQ ID NO: 5437 - protein, 14 aa, synthetic construct
ALGDLSPFTGGYKL

SEQ ID NO: 5438 - protein, 14 aa, synthetic construct
ALGDLSPFTGGQKL

SEQ ID NO: 5439 - protein, 14 aa, synthetic construct
ALGDLSPFTGGPKL

SEQ ID NO: 5440 - protein, 14 aa, synthetic construct
ALGDLSPFTGGLKL

SEQ ID NO: 5441 - protein, 14 aa, synthetic construct
ALGDLSPFTGGHYL

SEQ ID NO: 5442 - protein, 14 aa, synthetic construct
ALGDLSPFTGGHNS

SEQ ID NO: 5443 - protein, 14 aa, synthetic construct
ALGDLSPFTGDPHR

SEQ ID NO: 5444 - protein, 12 aa, synthetic construct
ALGDLSPFPGGH

SEQ ID NO: 5445 - protein, 14 aa, synthetic construct
ALGDLSPDTGGHKL

SEQ ID NO: 5446 - protein, 14 aa, synthetic construct
ALGDLSPCTGVHKL

SEQ ID NO: 5447 - protein, 14 aa, synthetic construct
ALGDLSPCTGGQKL

SEQ ID NO: 5448 - protein, 14 aa, synthetic construct
ALGDLSPCTGGDKL

SEQ ID NO: 5449 - protein, 14 aa, synthetic construct
ALGDLSPCNGGHKL

SEQ ID NO: 5450 - protein, 14 aa, synthetic construct
ALGDLSLRGVHTDK

SEQ ID NO: 5451 - protein, 14 aa, synthetic construct
ALGDLSLRGVDTDK

SEQ ID NO: 5452 - protein, 14 aa, synthetic construct
ALGDLSLRGIPIKS

SEQ ID NO: 5453 - protein, 14 aa, synthetic construct
ALGDLSLRGIKINS

SEQ ID NO: 5454 - protein, 14 aa, synthetic construct
ALGDLSLRGIHTEK

SEQ ID NO: 5455 - protein, 13 aa, synthetic construct
ALGDLSLRGIDTD

SEQ ID NO: 5456 - protein, 13 aa, synthetic construct
ALGDLSGIRRQLV

SEQ ID NO: 5457 - protein, 13 aa, synthetic construct
ALGDLSGIRRKLI

SEQ ID NO: 5458 - protein, 14 aa, synthetic construct
ALGDLSGGYSDKLI

SEQ ID NO: 5459 - protein, 10 aa, synthetic construct
ALGDLSFLRV

SEQ ID NO: 5460 - protein, 14 aa, synthetic construct
ALGDLSPFTVGHKL

SEQ ID NO: 5461 - protein, 14 aa, synthetic construct
ALGDLSPLLWVINS

SEQ ID NO: 5462 - protein, 11 aa, synthetic construct
ALGDLSPVTGG

SEQ ID NO: 5463 - protein, 13 aa, synthetic construct
ALGDLTFLPDQLF

SEQ ID NO: 5464 - protein, 14 aa, synthetic construct
ALGDLTGGWTDKLI

SEQ ID NO: 5465 - protein, 13 aa, synthetic construct
ALGDLTFQPHKLI

SEQ ID NO: 5466 - protein, 13 aa, synthetic construct
ALGDLTFQPDQLI

SEQ ID NO: 5467 - protein, 13 aa, synthetic construct
ALGDLTFQPDKLN

SEQ ID NO: 5468 - protein, 13 aa, synthetic construct
ALGDLTFLTDKLI

SEQ ID NO: 5469 - protein, 11 aa, synthetic construct
ALGDLTFLRWG

SEQ ID NO: 5470 - protein, 14 aa, synthetic construct
ALGDLTFLRSGAPI

SEQ ID NO: 5471 - protein, 13 aa, synthetic construct
ALGDLTFLPYKLI

SEQ ID NO: 5472 - protein, 13 aa, synthetic construct
ALGDLTFLPHKLI

SEQ ID NO: 5473 - protein, 13 aa, synthetic construct
ALGDLTFLPDQLM

SEQ ID NO: 5474 - protein, 13 aa, synthetic construct
ALGDLTFLPDNSS

SEQ ID NO: 5475 - protein, 12 aa, synthetic construct
ALGDLSRQSTLI

SEQ ID NO: 5476 - protein, 13 aa, synthetic construct
ALGDLTFLPDNLI

SEQ ID NO: 5477 - protein, 13 aa, synthetic construct
ALGDLTFLPDKPI

SEQ ID NO: 5478 - protein, 13 aa, synthetic construct
ALGDLTFLPDKLL

SEQ ID NO: 5479 - protein, 13 aa, synthetic construct
ALGDLTFLPDKII

SEQ ID NO: 5480 - protein, 13 aa, synthetic construct
ALGDLTFLPDHLI

SEQ ID NO: 5481 - protein, 13 aa, synthetic construct
ALGDLTFLPDELI

SEQ ID NO: 5482 - protein, 13 aa, synthetic construct
ALGDLTFLPATLI

SEQ ID NO: 5483 - protein, 13 aa, synthetic construct
ALGDLTFLADKLI

SEQ ID NO: 5484 - protein, 13 aa, synthetic construct
ALGDLTCLPDQLI

SEQ ID NO: 5485 - protein, 13 aa, synthetic construct
ALGDLTCLPAQLI

SEQ ID NO: 5486 - protein, 14 aa, synthetic construct
ALGDLSEGDNNILI

SEQ ID NO: 5487 - protein, 14 aa, synthetic construct
ALGDLSEGDIIKLF

SEQ ID NO: 5488 - protein, 12 aa, synthetic construct
ALGDLRQGDKLI

SEQ ID NO: 5489 - protein, 12 aa, synthetic construct
ALGDLLLTDKLI

SEQ ID NO: 5490 - protein, 14 aa, synthetic construct
ALGDLPHRGIRTDK

SEQ ID NO: 5491 - protein, 14 aa, synthetic construct
ALGDLNGGYADKLI

SEQ ID NO: 5492 - protein, 13 aa, synthetic construct
ALGDLMGDTDKII

SEQ ID NO: 5493 - protein, 13 aa, synthetic construct
ALGDLLWETDKLI

SEQ ID NO: 5494 - protein, 13 aa, synthetic construct
ALGDLLWDTDKLI

SEQ ID NO: 5495 - protein, 12 aa, synthetic construct
ALGDLLTTDKLI

SEQ ID NO: 5496 - protein, 12 aa, synthetic construct
ALGDLLRTDKLI

SEQ ID NO: 5497 - protein, 14 aa, synthetic construct
ALGDLLRDTPINSS

SEQ ID NO: 5498 - protein, 12 aa, synthetic construct
ALGDLLNTETLI

SEQ ID NO: 5499 - protein, 12 aa, synthetic construct
ALGDLLNTDKLI

SEQ ID NO: 5500 - protein, 14 aa, synthetic construct
ALGDLLLLGDTDKL

SEQ ID NO: 5501 - protein, 14 aa, synthetic construct
ALGDLPNRGIRTDK

SEQ ID NO: 5502 - protein, 12 aa, synthetic construct
ALGDLLHTDRLI

SEQ ID NO: 5503 - protein, 12 aa, synthetic construct
ALGDLLHTDQLI

SEQ ID NO: 5504 - protein, 12 aa, synthetic construct
ALGDLLHTDKVI

SEQ ID NO: 5505 - protein, 12 aa, synthetic construct
ALGDLLHTDKLV

SEQ ID NO: 5506 - protein, 12 aa, synthetic construct
ALGDLLHSDKLI

SEQ ID NO: 5507 - protein, 12 aa, synthetic construct
ALGDLLHPDKLI

SEQ ID NO: 5508 - protein, 13 aa, synthetic construct
ALGDLLGETDQLI

SEQ ID NO: 5509 - protein, 14 aa, synthetic construct
ALGDLLGEILRAAQ

SEQ ID NO: 5510 - protein, 13 aa, synthetic construct
ALGDLLGDTYKLV

SEQ ID NO: 5511 - protein, 13 aa, synthetic construct
ALGDLLGDTHKLI

SEQ ID NO: 5512 - protein, 14 aa, synthetic construct
ALGDLPNRGIRTDE

SEQ ID NO: 5513 - protein, 14 aa, synthetic construct
ALGDLPSRGIRTDK

SEQ ID NO: 5514 - protein, 14 aa, synthetic construct
ALGDLRGGDKNKLI

SEQ ID NO: 5515 - protein, 14 aa, synthetic construct
ALGDLREGDKTKLI

SEQ ID NO: 5516 - protein, 13 aa, synthetic construct
ALGDLRERDKHKL

SEQ ID NO: 5517 - protein, 14 aa, synthetic construct
ALGDLREGGKNIII

SEQ ID NO: 5518 - protein, 14 aa, synthetic construct
ALGDLREGETNILI

SEQ ID NO: 5519 - protein, 14 aa, synthetic construct
ALGDLREGDTYPDK

SEQ ID NO: 5520 - protein, 14 aa, synthetic construct
ALGDLREGDTTINS

SEQ ID NO: 5521 - protein, 14 aa, synthetic construct
ALGDLREGDTNKLI

SEQ ID NO: 5522 - protein, 14 aa, synthetic construct
ALGDLREGDRSWDT

SEQ ID NO: 5523 - protein, 14 aa, synthetic construct
ALGDLREGDQNQLI

SEQ ID NO: 5524 - protein, 14 aa, synthetic construct
ALGDLREGDQHKLI

SEQ ID NO: 5525 - protein, 14 aa, synthetic construct
ALGDLREGDLTPIN

SEQ ID NO: 5526 - protein, 14 aa, synthetic construct
ALGDLREGDKSKLI

SEQ ID NO: 5527 - protein, 14 aa, synthetic construct
ALGDLPYRGICTDK

SEQ ID NO: 5528 - protein, 14 aa, synthetic construct
ALGDLREGDKQKLI

SEQ ID NO: 5529 - protein, 14 aa, synthetic construct
ALGDLREGDKNQLI

SEQ ID NO: 5530 - protein, 14 aa, synthetic construct
ALGDLREGDKNNSS

SEQ ID NO: 5531 - protein, 12 aa, synthetic construct
ALGDLREGDKNI

SEQ ID NO: 5532 - protein, 14 aa, synthetic construct
ALGDLREGDKLKLI

SEQ ID NO: 5533 - protein, 14 aa, synthetic construct
ALGDLREGDIHKLI

SEQ ID NO: 5534 - protein, 14 aa, synthetic construct
ALGDLREGAQHKLI

SEQ ID NO: 5535 - protein, 14 aa, synthetic construct
ALGDLRDPYPQKLI

SEQ ID NO: 5536 - protein, 14 aa, synthetic construct
ALGDLPYRGIRPDK

SEQ ID NO: 5537 - protein, 14 aa, synthetic construct
ALGDLPYRGIHTDK

SEQ ID NO: 5538 - protein, 14 aa, synthetic construct
ALGDLTGGYADKRI

SEQ ID NO: 5539 - protein, 14 aa, synthetic construct
ALGDLTGGYADNII

SEQ ID NO: 5540 - protein, 13 aa, synthetic construct
ALGDPGDKDDKLI

SEQ ID NO: 5541 - protein, 14 aa, synthetic construct
ALGDLTGGYADNSS

SEQ ID NO: 5542 - protein, 12 aa, synthetic construct
ALGDLWIDDILI

SEQ ID NO: 5543 - protein, 7 aa, synthetic construct
ALGDLWI

SEQ ID NO: 5544 - protein, 13 aa, synthetic construct
ALGDLWGTPINST

SEQ ID NO: 5545 - protein, 13 aa, synthetic construct
ALGDLWGRRSKLI

SEQ ID NO: 5546 - protein, 13 aa, synthetic construct
ALGDLWGNTDKLI

SEQ ID NO: 5547 - protein, 14 aa, synthetic construct
ALGDLWGIRWRQHN

SEQ ID NO: 5548 - protein, 13 aa, synthetic construct
ALGDLWGIRSKVI

SEQ ID NO: 5549 - protein, 13 aa, synthetic construct
ALGDLWGIRSHLI

SEQ ID NO: 5550 - protein, 13 aa, synthetic construct
ALGDLWGIRRQLI

SEQ ID NO: 5551 - protein, 13 aa, synthetic construct
ALGDLWGIRCQLI

SEQ ID NO: 5552 - protein, 12 aa, synthetic construct
ALGDLWGDAVLS

SEQ ID NO: 5553 - protein, 12 aa, synthetic construct
ALGDLWDTDKLI

SEQ ID NO: 5554 - protein, 14 aa, synthetic construct
ALGDLVYLGYTDKL

SEQ ID NO: 5555 - protein, 14 aa, synthetic construct
ALGDLVWGTTYKLI

SEQ ID NO: 5556 - protein, 14 aa, synthetic construct
ALGDLVWGTTQKLI

SEQ ID NO: 5557 - protein, 14 aa, synthetic construct
ALGDLVWGTTNKLI

SEQ ID NO: 5558 - protein, 14 aa, synthetic construct
ALGDLVWGTTDQLI

SEQ ID NO: 5559 - protein, 14 aa, synthetic construct
ALGDLVWGTTDNLI

SEQ ID NO: 5560 - protein, 14 aa, synthetic construct
ALGDLVWGTTDKLF

SEQ ID NO: 5561 - protein, 13 aa, synthetic construct
ALGDLVWGTTDKL

SEQ ID NO: 5562 - protein, 14 aa, synthetic construct
ALGDLVWGTTDKII

SEQ ID NO: 5563 - protein, 14 aa, synthetic construct
ALGDLVWGTTDKHI

SEQ ID NO: 5564 - protein, 14 aa, synthetic construct
ALGDLVWGTTDILI

SEQ ID NO: 5565 - protein, 12 aa, synthetic construct
ALGDLWIHDILI

SEQ ID NO: 5566 - protein, 12 aa, synthetic construct
ALGDLWIHDKLV

SEQ ID NO: 5567 - protein, 12 aa, synthetic construct
ALGDLWIHDKPI

SEQ ID NO: 5568 - protein, 13 aa, synthetic construct
ALGDMGDKDDKLI

SEQ ID NO: 5569 - protein, 14 aa, synthetic construct
ALGDPEWGIRGTDK

SEQ ID NO: 5570 - protein, 14 aa, synthetic construct
ALGDPELGDLYTDK

SEQ ID NO: 5571 - protein, 14 aa, synthetic construct
ALGDPELGDIYTDK

SEQ ID NO: 5572 - protein, 13 aa, synthetic construct
ALGDPAYAGGAYT

SEQ ID NO: 5573 - protein, 14 aa, synthetic construct
ALGDPAWGSYTDKL

SEQ ID NO: 5574 - protein, 14 aa, synthetic construct
ALGDMTGRYADKII

SEQ ID NO: 5575 - protein, 14 aa, synthetic construct
ALGDMGGYARTDKL

SEQ ID NO: 5576 - protein, 12 aa, synthetic construct
ALGDMGDTDKLF

SEQ ID NO: 5577 - protein, 14 aa, synthetic construct
ALGDMGDSYPDKLI

SEQ ID NO: 5578 - protein, 12 aa, synthetic construct
ALGDMGDSDKLI

SEQ ID NO: 5579 - protein, 13 aa, synthetic construct
ALGDMGDKDDKIF

SEQ ID NO: 5580 - protein, 12 aa, synthetic construct
ALGDLWIHDKVI

SEQ ID NO: 5581 - protein, 13 aa, synthetic construct
ALGDMGATYPEKL

SEQ ID NO: 5582 - protein, 12 aa, synthetic construct
ALGDMGATDKLI

SEQ ID NO: 5583 - protein, 14 aa, synthetic construct
ALGDLYLLVDTHKL

SEQ ID NO: 5584 - protein, 12 aa, synthetic construct
ALGDLWRHDKLI

SEQ ID NO: 5585 - protein, 14 aa, synthetic construct
ALGDLWLGDTLATA

SEQ ID NO: 5586 - protein, 12 aa, synthetic construct
ALGDLWINDKLI

SEQ ID NO: 5587 - protein, 12 aa, synthetic construct
ALGDLWIHYKLI

SEQ ID NO: 5588 - protein, 12 aa, synthetic construct
ALGDLWIHEKLI

SEQ ID NO: 5589 - protein, 12 aa, synthetic construct
ALGDLWIHDTLI

SEQ ID NO: 5590 - protein, 12 aa, synthetic construct
ALGDLWIHDRLI

SEQ ID NO: 5591 - protein, 14 aa, synthetic construct
ALGDLVWGTTDELI

SEQ ID NO: 5592 - protein, 14 aa, synthetic construct
ALGDLVWGTPEKLI

SEQ ID NO: 5593 - protein, 14 aa, synthetic construct
ALGDLVWGTNEKLI

SEQ ID NO: 5594 - protein, 13 aa, synthetic construct
ALGDLTVLPDKLI

SEQ ID NO: 5595 - protein, 12 aa, synthetic construct
ALGDLVHTDKLI

SEQ ID NO: 5596 - protein, 14 aa, synthetic construct
ALGDLVGGYDDKLI

SEQ ID NO: 5597 - protein, 13 aa, synthetic construct
ALGDLVGDTDLLI

SEQ ID NO: 5598 - protein, 13 aa, synthetic construct
ALGDLVGDTDKLI

SEQ ID NO: 5599 - protein, 14 aa, synthetic construct
ALGDLVFLGYTDKL

SEQ ID NO: 5600 - protein, 13 aa, synthetic construct
ALGDLVESSWDTR

SEQ ID NO: 5601 - protein, 14 aa, synthetic construct
ALGDLVCHGYTDQL

SEQ ID NO: 5602 - protein, 13 aa, synthetic construct
ALGDLTYRPDQLI

SEQ ID NO: 5603 - protein, 8 aa, synthetic construct
ALGDLTYL

SEQ ID NO: 5604 - protein, 14 aa, synthetic construct
ALGDLTWGYADKLI

SEQ ID NO: 5605 - protein, 13 aa, synthetic construct
ALGDLTSLPDKLI

SEQ ID NO: 5606 - protein, 14 aa, synthetic construct
ALGDLVLGDADKLI

SEQ ID NO: 5607 - protein, 14 aa, synthetic construct
ALGDLTRGYADKLI

SEQ ID NO: 5608 - protein, 13 aa, synthetic construct
ALGDLTILPDQII

SEQ ID NO: 5609 - protein, 14 aa, synthetic construct
ALGDLTGVYADKLI

SEQ ID NO: 5610 - protein, 14 aa, synthetic construct
ALGDLTGGYSYKLI

SEQ ID NO: 5611 - protein, 14 aa, synthetic construct
ALGDLTGGYSDKLI

SEQ ID NO: 5612 - protein, 14 aa, synthetic construct
ALGDLTGGYPINSS

SEQ ID NO: 5613 - protein, 14 aa, synthetic construct
ALGDLTGGYARTDK

SEQ ID NO: 5614 - protein, 14 aa, synthetic construct
ALGDLTGGYAQNLI

SEQ ID NO: 5615 - protein, 14 aa, synthetic construct
ALGDLTGGYAGDST

SEQ ID NO: 5616 - protein, 13 aa, synthetic construct
ALGDLTGGYAEKL

SEQ ID NO: 5617 - protein, 14 aa, synthetic construct
ALGDLVLGATDILI

SEQ ID NO: 5618 - protein, 14 aa, synthetic construct
ALGDLVLGDMDKLI

SEQ ID NO: 5619 - protein, 14 aa, synthetic construct
ALGDLVWGTAEKLI

SEQ ID NO: 5620 - protein, 14 aa, synthetic construct
ALGDLVSLGNTDKL

SEQ ID NO: 5621 - protein, 14 aa, synthetic construct
ALGDLVWGPTDKLL

SEQ ID NO: 5622 - protein, 14 aa, synthetic construct
ALGDLVWGIHRQTH

SEQ ID NO: 5623 - protein, 14 aa, synthetic construct
ALGDLVWGDTLAPI

SEQ ID NO: 5624 - protein, 14 aa, synthetic construct
ALGDLVWGATDKLI

SEQ ID NO: 5625 - protein, 14 aa, synthetic construct
ALGDLVSYWYTEQL

SEQ ID NO: 5626 - protein, 14 aa, synthetic construct
ALGDLVSLRYTEKL

SEQ ID NO: 5627 - protein, 14 aa, synthetic construct
ALGDLVSLGYTDRL

SEQ ID NO: 5628 - protein, 14 aa, synthetic construct
ALGDLVSLGYTDEL

SEQ ID NO: 5629 - protein, 11 aa, synthetic construct
ALGDLVSLGYS

SEQ ID NO: 5630 - protein, 14 aa, synthetic construct
ALGDLVSLGYAEKL

SEQ ID NO: 5631 - protein, 14 aa, synthetic construct
ALGDLVSLAYTDKL

SEQ ID NO: 5632 - protein, 14 aa, synthetic construct
ALGDLVLGDTDNLI

SEQ ID NO: 5633 - protein, 14 aa, synthetic construct
ALGDLVRLGDTETL

SEQ ID NO: 5634 - protein, 11 aa, synthetic construct
ALGDLVRLGDT

SEQ ID NO: 5635 - protein, 14 aa, synthetic construct
ALGDLVLVDTDKLI

SEQ ID NO: 5636 - protein, 14 aa, synthetic construct
ALGDLVLRDTEKLI

SEQ ID NO: 5637 - protein, 14 aa, synthetic construct
ALGDLVLGVTDQLI

SEQ ID NO: 5638 - protein, 10 aa, synthetic construct
ALGDLVLGVT

SEQ ID NO: 5639 - protein, 14 aa, synthetic construct
ALGDLVLGDTYKLI

SEQ ID NO: 5640 - protein, 14 aa, synthetic construct
ALGDLVLGDTVKLI

SEQ ID NO: 5641 - protein, 14 aa, synthetic construct
ALGDLVLGDTHKLI

SEQ ID NO: 5642 - protein, 14 aa, synthetic construct
ALGDLVLGDTENLI

SEQ ID NO: 5643 - protein, 13 aa, synthetic construct
ALGEGGDTPATLI

SEQ ID NO: 5644 - protein, 13 aa, synthetic construct
ALGEGGDTPDHLI

SEQ ID NO: 5645 - protein, 13 aa, synthetic construct
ALGEGGDTPDILF

SEQ ID NO: 5646 - protein, 14 aa, synthetic construct
ALGELAIPGSHTAN

SEQ ID NO: 5647 - protein, 12 aa, synthetic construct
ALGEIWRQHKRF

SEQ ID NO: 5648 - protein, 12 aa, synthetic construct
ALGEIWINDKLI

SEQ ID NO: 5649 - protein, 12 aa, synthetic construct
ALGEIWINDKII

SEQ ID NO: 5650 - protein, 12 aa, synthetic construct
ALGEIWIHDNVI

SEQ ID NO: 5651 - protein, 12 aa, synthetic construct
ALGEIWIHDKVI

SEQ ID NO: 5652 - protein, 12 aa, synthetic construct
ALGEIWIHDKII

SEQ ID NO: 5653 - protein, 12 aa, synthetic construct
ALGEIWIHDKHI

SEQ ID NO: 5654 - protein, 14 aa, synthetic construct
ALGEIVWGTTDKII

SEQ ID NO: 5655 - protein, 14 aa, synthetic construct
ALGEIVWGTTDKHI

SEQ ID NO: 5656 - protein, 14 aa, synthetic construct
ALGEIVVGDTDKLI

SEQ ID NO: 5657 - protein, 14 aa, synthetic construct
ALGEIVSLGYTEKL

SEQ ID NO: 5658 - protein, 13 aa, synthetic construct
ALGEIVSLGYTEK

SEQ ID NO: 5659 - protein, 12 aa, synthetic construct
ALGEIVSLGYTD

SEQ ID NO: 5660 - protein, 14 aa, synthetic construct
ALGEIVSLGQHNSS

SEQ ID NO: 5661 - protein, 14 aa, synthetic construct
ALGEIVRGTTDNII

SEQ ID NO: 5662 - protein, 14 aa, synthetic construct
ALGEIVNWGIKTDK

SEQ ID NO: 5663 - protein, 14 aa, synthetic construct
ALGEIVLGETDKLI

SEQ ID NO: 5664 - protein, 14 aa, synthetic construct
ALGEIVKWGINTDK

SEQ ID NO: 5665 - protein, 13 aa, synthetic construct
ALGEITYLHDKLI

SEQ ID NO: 5666 - protein, 14 aa, synthetic construct
ALGEITNWGINTDK

SEQ ID NO: 5667 - protein, 14 aa, synthetic construct
ALGEITGGYADKLI

SEQ ID NO: 5668 - protein, 13 aa, synthetic construct
ALGEITFQPDKLI

SEQ ID NO: 5669 - protein, 13 aa, synthetic construct
ALGEITFLPEKLI

SEQ ID NO: 5670 - protein, 13 aa, synthetic construct
ALGEIWRRDTLPT

SEQ ID NO: 5671 - protein, 14 aa, synthetic construct
ALGEKANWGINTDK

SEQ ID NO: 5672 - protein, 10 aa, synthetic construct
ALGEKGDTDK

SEQ ID NO: 5673 - protein, 11 aa, synthetic construct
ALGELAFPNWG

SEQ ID NO: 5674 - protein, 13 aa, synthetic construct
ALGELAIPGIHTD

SEQ ID NO: 5675 - protein, 8 aa, synthetic construct
ALGELAIP

SEQ ID NO: 5676 - protein, 12 aa, synthetic construct
ALGELAILREWL

SEQ ID NO: 5677 - protein, 13 aa, synthetic construct
ALGELAHQGIHTD

SEQ ID NO: 5678 - protein, 14 aa, synthetic construct
ALGELAGGYDEKLI

SEQ ID NO: 5679 - protein, 14 aa, synthetic construct
ALGELAGGYDDKII

SEQ ID NO: 5680 - protein, 14 aa, synthetic construct
ALGELAGGSYTEKL

SEQ ID NO: 5681 - protein, 13 aa, synthetic construct
ALGELAGGSYTDK

SEQ ID NO: 5682 - protein, 14 aa, synthetic construct
ALGELAGGSYTDIL

SEQ ID NO: 5683 - protein, 13 aa, synthetic construct
ALGELAFPYWGKF

SEQ ID NO: 5684 - protein, 11 aa, synthetic construct
ALGELAFHYWW

SEQ ID NO: 5685 - protein, 11 aa, synthetic construct
ALGEKGSTDKL

SEQ ID NO: 5686 - protein, 11 aa, synthetic construct
ALGELAFAYWG

SEQ ID NO: 5687 - protein, 13 aa, synthetic construct
ALGELAEVNENII

SEQ ID NO: 5688 - protein, 12 aa, synthetic construct
ALGELADTDKLI

SEQ ID NO: 5689 - protein, 13 aa, synthetic construct
ALGELADSSWDTR

SEQ ID NO: 5690 - protein, 13 aa, synthetic construct
ALGELADKDDKLT

SEQ ID NO: 5691 - protein, 7 aa, synthetic construct
ALGELAD

SEQ ID NO: 5692 - protein, 12 aa, synthetic construct
ALGEKVTTINST

SEQ ID NO: 5693 - protein, 8 aa, synthetic construct
ALGEKSFT

SEQ ID NO: 5694 - protein, 14 aa, synthetic construct
ALGEKPYRGIRTDK

SEQ ID NO: 5695 - protein, 13 aa, synthetic construct
ALGEKGYSSWDTR

SEQ ID NO: 5696 - protein, 12 aa, synthetic construct
ALGEITFLNDKI

SEQ ID NO: 5697 - protein, 14 aa, synthetic construct
ALGEISTFTGGHKL

SEQ ID NO: 5698 - protein, 7 aa, synthetic construct
ALGEIST

SEQ ID NO: 5699 - protein, 14 aa, synthetic construct
ALGEIGTGGISDKL

SEQ ID NO: 5700 - protein, 13 aa, synthetic construct
ALGEILGDTQKLI

SEQ ID NO: 5701 - protein, 13 aa, synthetic construct
ALGEILGDTNKLI

SEQ ID NO: 5702 - protein, 13 aa, synthetic construct
ALGEILGDTGKLI

SEQ ID NO: 5703 - protein, 13 aa, synthetic construct
ALGEILGDTDNII

SEQ ID NO: 5704 - protein, 13 aa, synthetic construct
ALGEILGDTDKII

SEQ ID NO: 5705 - protein, 13 aa, synthetic construct
ALGEILGDTDKFI

SEQ ID NO: 5706 - protein, 12 aa, synthetic construct
ALGEIINTDTLI

SEQ ID NO: 5707 - protein, 12 aa, synthetic construct
ALGEIINTDKLI

SEQ ID NO: 5708 - protein, 13 aa, synthetic construct
ALGEIGYSSWDTR

SEQ ID NO: 5709 - protein, 13 aa, synthetic construct
ALGEIGTGGYADK

SEQ ID NO: 5710 - protein, 12 aa, synthetic construct
ALGEIGSTEKLI

SEQ ID NO: 5711 - protein, 13 aa, synthetic construct
ALGEILGETDKLF

SEQ ID NO: 5712 - protein, 12 aa, synthetic construct
ALGEIGSTDTLI

SEQ ID NO: 5713 - protein, 12 aa, synthetic construct
ALGEIGSTDTLF

SEQ ID NO: 5714 - protein, 12 aa, synthetic construct
ALGEIGSTDQLI

SEQ ID NO: 5715 - protein, 12 aa, synthetic construct
ALGEIGSTDKLF

SEQ ID NO: 5716 - protein, 14 aa, synthetic construct
ALGEIGRAHLFKPV

SEQ ID NO: 5717 - protein, 14 aa, synthetic construct
ALGEIGPGGYADKL

SEQ ID NO: 5718 - protein, 14 aa, synthetic construct
ALGEIGGGYDEKLF

SEQ ID NO: 5719 - protein, 14 aa, synthetic construct
ALGEIGDTYPDKII

SEQ ID NO: 5720 - protein, 13 aa, synthetic construct
ALGEIGDRSWDTR

SEQ ID NO: 5721 - protein, 14 aa, synthetic construct
ALGEIFLPGDTDKL

SEQ ID NO: 5722 - protein, 13 aa, synthetic construct
ALGEILGDTYTLI

SEQ ID NO: 5723 - protein, 13 aa, synthetic construct
ALGEILGETDKLI

SEQ ID NO: 5724 - protein, 14 aa, synthetic construct
ALGEISPFNGGHKL

SEQ ID NO: 5725 - protein, 13 aa, synthetic construct
ALGEIQGDTDKLI

SEQ ID NO: 5726 - protein, 14 aa, synthetic construct
ALGEISPCTGGHKL

SEQ ID NO: 5727 - protein, 13 aa, synthetic construct
ALGEISLRGIDTD

SEQ ID NO: 5728 - protein, 13 aa, synthetic construct
ALGEISFLPDKLI

SEQ ID NO: 5729 - protein, 14 aa, synthetic construct
ALGEIREGDKNNSS

SEQ ID NO: 5730 - protein, 14 aa, synthetic construct
ALGEIREGDKNKLF

SEQ ID NO: 5731 - protein, 14 aa, synthetic construct
ALGEIREGDKNKIN

SEQ ID NO: 5732 - protein, 14 aa, synthetic construct
ALGEIREGDKNKFI

SEQ ID NO: 5733 - protein, 10 aa, synthetic construct
ALGEIREGDK

SEQ ID NO: 5734 - protein, 14 aa, synthetic construct
ALGEIREGDHNKLI

SEQ ID NO: 5735 - protein, 10 aa, synthetic construct
ALGEIRAGDN

SEQ ID NO: 5736 - protein, 8 aa, synthetic construct
ALGEIPYR

SEQ ID NO: 5737 - protein, 12 aa, synthetic construct
ALGEILHSDNLI

SEQ ID NO: 5738 - protein, 14 aa, synthetic construct
ALGEIPTRGIRTDK

SEQ ID NO: 5739 - protein, 13 aa, synthetic construct
ALGEIPTDTDKLI

SEQ ID NO: 5740 - protein, 8 aa, synthetic construct
ALGEIPNS

SEQ ID NO: 5741 - protein, 12 aa, synthetic construct
ALGEIPHTDKLI

SEQ ID NO: 5742 - protein, 13 aa, synthetic construct
ALGEIMVDTDKLI

SEQ ID NO: 5743 - protein, 12 aa, synthetic construct
ALGEILNTDKLN

SEQ ID NO: 5744 - protein, 12 aa, synthetic construct
ALGEILHTHQLI

SEQ ID NO: 5745 - protein, 12 aa, synthetic construct
ALGEILHTHKLI

SEQ ID NO: 5746 - protein, 12 aa, synthetic construct
ALGEILHTDQLI

SEQ ID NO: 5747 - protein, 9 aa, synthetic construct
ALGEILHTD

SEQ ID NO: 5748 - protein, 14 aa, synthetic construct
ALGELAIPGIHTEK

SEQ ID NO: 5749 - protein, 14 aa, synthetic construct
ALGELAKPGIHTDK

SEQ ID NO: 5750 - protein, 13 aa, synthetic construct
ALGEGGDTPDILI

SEQ ID NO: 5751 - protein, 14 aa, synthetic construct
ALGELAKWGINTDK

SEQ ID NO: 5752 - protein, 14 aa, synthetic construct
ALGELAWGSYPDKL

SEQ ID NO: 5753 - protein, 14 aa, synthetic construct
ALGELAWGSTPINS

SEQ ID NO: 5754 - protein, 14 aa, synthetic construct
ALGELAWGSSTDRL

SEQ ID NO: 5755 - protein, 13 aa, synthetic construct
ALGELAWGSSTDK

SEQ ID NO: 5756 - protein, 12 aa, synthetic construct
ALGELAWGSSTD

SEQ ID NO: 5757 - protein, 13 aa, synthetic construct
ALGELAWGSHTDK

SEQ ID NO: 5758 - protein, 13 aa, synthetic construct
ALGELAWGSFTVN

SEQ ID NO: 5759 - protein, 14 aa, synthetic construct
ALGELAWGSFTDEL

SEQ ID NO: 5760 - protein, 14 aa, synthetic construct
ALGELAWGSDTDKL

SEQ ID NO: 5761 - protein, 14 aa, synthetic construct
ALGELAWGSCTDKL

SEQ ID NO: 5762 - protein, 14 aa, synthetic construct
ALGELAWGLRGTDK

SEQ ID NO: 5763 - protein, 14 aa, synthetic construct
ALGELAWGIYTPIN

SEQ ID NO: 5764 - protein, 14 aa, synthetic construct
ALGELAWGIRSKLI

SEQ ID NO: 5765 - protein, 14 aa, synthetic construct
ALGELAWGIPEKLI

SEQ ID NO: 5766 - protein, 14 aa, synthetic construct
ALGELAWGIPANKL

SEQ ID NO: 5767 - protein, 14 aa, synthetic construct
ALGELAWGILTPIN

SEQ ID NO: 5768 - protein, 13 aa, synthetic construct
ALGELAWASYNDK

SEQ ID NO: 5769 - protein, 14 aa, synthetic construct
ALGELAVPGIHTDK

SEQ ID NO: 5770 - protein, 13 aa, synthetic construct
ALGELAVGYDDKL

SEQ ID NO: 5771 - protein, 14 aa, synthetic construct
ALGELATVGYSDKL

SEQ ID NO: 5772 - protein, 12 aa, synthetic construct
ALGELATTDKLI

SEQ ID NO: 5773 - protein, 12 aa, synthetic construct
ALGELASTEKLN

SEQ ID NO: 5774 - protein, 12 aa, synthetic construct
ALGELASTDNLI

SEQ ID NO: 5775 - protein, 14 aa, synthetic construct
ALGELAWGSYTDEL

SEQ ID NO: 5776 - protein, 14 aa, synthetic construct
ALGELAWGSYTDIL

SEQ ID NO: 5777 - protein, 13 aa, synthetic construct
ALGELAWGSYTDR

SEQ ID NO: 5778 - protein, 14 aa, synthetic construct
ALGELAYWGINTDK

SEQ ID NO: 5779 - protein, 14 aa, synthetic construct
ALGELCLGDKNKLI

SEQ ID NO: 5780 - protein, 14 aa, synthetic construct
ALGELCLGDKLSTA

SEQ ID NO: 5781 - protein, 14 aa, synthetic construct
ALGELCLGDKLATA

SEQ ID NO: 5782 - protein, 14 aa, synthetic construct
ALGELCLGDKDDKL

SEQ ID NO: 5783 - protein, 14 aa, synthetic construct
ALGELCLGDALATA

SEQ ID NO: 5784 - protein, 14 aa, synthetic construct
ALGELCLGAALATA

SEQ ID NO: 5785 - protein, 12 aa, synthetic construct
ALGELCIHDQLI

SEQ ID NO: 5786 - protein, 12 aa, synthetic construct
ALGELCIDDKHN

SEQ ID NO: 5787 - protein, 13 aa, synthetic construct
ALGELCGIRSKVI

SEQ ID NO: 5788 - protein, 7 aa, synthetic construct
ALGELCA

SEQ ID NO: 5789 - protein, 10 aa, synthetic construct
ALGELAYRVI

SEQ ID NO: 5790 - protein, 14 aa, synthetic construct
ALGELAWGSYTETL

SEQ ID NO: 5791 - protein, 12 aa, synthetic construct
ALGELAYPKDTN

SEQ ID NO: 5792 - protein, 14 aa, synthetic construct
ALGELAWWSYTDKL

SEQ ID NO: 5793 - protein, 14 aa, synthetic construct
ALGELAWWSSTDKL

SEQ ID NO: 5794 - protein, 14 aa, synthetic construct
ALGELAWGTYTDTL

SEQ ID NO: 5795 - protein, 14 aa, synthetic construct
ALGELAWGTTDKLI

SEQ ID NO: 5796 - protein, 13 aa, synthetic construct
ALGELAWGTTDKL

SEQ ID NO: 5797 - protein, 14 aa, synthetic construct
ALGELAWGTPYTDK

SEQ ID NO: 5798 - protein, 12 aa, synthetic construct
ALGELAWGTLDT

SEQ ID NO: 5799 - protein, 14 aa, synthetic construct
ALGELAWGSYTHKL

SEQ ID NO: 5800 - protein, 14 aa, synthetic construct
ALGELAWGSYTGKL

SEQ ID NO: 5801 - protein, 12 aa, synthetic construct
ALGELASTDKLF

SEQ ID NO: 5802 - protein, 12 aa, synthetic construct
ALGELASTDKII

SEQ ID NO: 5803 - protein, 10 aa, synthetic construct
ALGELASTDK

SEQ ID NO: 5804 - protein, 14 aa, synthetic construct
ALGELALPGIATDK

SEQ ID NO: 5805 - protein, 14 aa, synthetic construct
ALGELALPGITTDK

SEQ ID NO: 5806 - protein, 13 aa, synthetic construct
ALGELALPGITTD

SEQ ID NO: 5807 - protein, 14 aa, synthetic construct
ALGELALPGIRSKL

SEQ ID NO: 5808 - protein, 14 aa, synthetic construct
ALGELALPGIRSHR

SEQ ID NO: 5809 - protein, 14 aa, synthetic construct
ALGELALPGIPTDK

SEQ ID NO: 5810 - protein, 14 aa, synthetic construct
ALGELALPGIPPIN

SEQ ID NO: 5811 - protein, 14 aa, synthetic construct
ALGELALPGINNDK

SEQ ID NO: 5812 - protein, 14 aa, synthetic construct
ALGELALPGILTDK

SEQ ID NO: 5813 - protein, 14 aa, synthetic construct
ALGELALPGIHTAI

SEQ ID NO: 5814 - protein, 14 aa, synthetic construct
ALGELALPGIDTDE

SEQ ID NO: 5815 - protein, 14 aa, synthetic construct
ALGELALPGDGPIN

SEQ ID NO: 5816 - protein, 14 aa, synthetic construct
ALGELALPGSHTDK

SEQ ID NO: 5817 - protein, 14 aa, synthetic construct
ALGELALPEIHTDK

SEQ ID NO: 5818 - protein, 14 aa, synthetic construct
ALGELALPAIHTDK

SEQ ID NO: 5819 - protein, 9 aa, synthetic construct
ALGELALPA

SEQ ID NO: 5820 - protein, 8 aa, synthetic construct
ALGELALP

SEQ ID NO: 5821 - protein, 13 aa, synthetic construct
ALGELALIHDKLI

SEQ ID NO: 5822 - protein, 14 aa, synthetic construct
ALGELALGSYTHKL

SEQ ID NO: 5823 - protein, 14 aa, synthetic construct
ALGELALGSYTDQL

SEQ ID NO: 5824 - protein, 14 aa, synthetic construct
ALGELALGDPDKLI

SEQ ID NO: 5825 - protein, 14 aa, synthetic construct
ALGELALASYTDKL

SEQ ID NO: 5826 - protein, 13 aa, synthetic construct
ALGELALAGINTD

SEQ ID NO: 5827 - protein, 14 aa, synthetic construct
ALGELALPGLHTEK

SEQ ID NO: 5828 - protein, 14 aa, synthetic construct
ALGELALPGSHTEK

SEQ ID NO: 5829 - protein, 14 aa, synthetic construct
ALGELASLGYTHKL

SEQ ID NO: 5830 - protein, 14 aa, synthetic construct
ALGELANWGIKTDK

SEQ ID NO: 5831 - protein, 14 aa, synthetic construct
ALGELASGSYTDKL

SEQ ID NO: 5832 - protein, 13 aa, synthetic construct
ALGELARGSYTDK

SEQ ID NO: 5833 - protein, 14 aa, synthetic construct
ALGELARGSYIYKL

SEQ ID NO: 5834 - protein, 13 aa, synthetic construct
ALGELARGPYTDK

SEQ ID NO: 5835 - protein, 14 aa, synthetic construct
ALGELAQTGINTDK

SEQ ID NO: 5836 - protein, 14 aa, synthetic construct
ALGELAPPGINTDK

SEQ ID NO: 5837 - protein, 14 aa, synthetic construct
ALGELAPPGIHTEK

SEQ ID NO: 5838 - protein, 14 aa, synthetic construct
ALGELANWGIYTDK

SEQ ID NO: 5839 - protein, 14 aa, synthetic construct
ALGELANWGINTDQ

SEQ ID NO: 5840 - protein, 13 aa, synthetic construct
ALGELANWGINTD

SEQ ID NO: 5841 - protein, 13 aa, synthetic construct
ALGELANNDDKII

SEQ ID NO: 5842 - protein, 14 aa, synthetic construct
ALGELALPGVHTDK

SEQ ID NO: 5843 - protein, 14 aa, synthetic construct
ALGELALWSYTDKL

SEQ ID NO: 5844 - protein, 14 aa, synthetic construct
ALGELALTGINTDK

SEQ ID NO: 5845 - protein, 14 aa, synthetic construct
ALGELALTGIHNDK

SEQ ID NO: 5846 - protein, 14 aa, synthetic construct
ALGELALRGIHTDK

SEQ ID NO: 5847 - protein, 14 aa, synthetic construct
ALGELALQGIPTDK

SEQ ID NO: 5848 - protein, 14 aa, synthetic construct
ALGELALQGINTEK

SEQ ID NO: 5849 - protein, 14 aa, synthetic construct
ALGELALQGINTDK

SEQ ID NO: 5850 - protein, 14 aa, synthetic construct
ALGELALQGIHTYK

SEQ ID NO: 5851 - protein, 13 aa, synthetic construct
ALGELALPYWGTP

SEQ ID NO: 5852 - protein, 14 aa, synthetic construct
ALGELALPWIRISS

SEQ ID NO: 5853 - protein, 13 aa, synthetic construct
ALGEIFLLGYTDK

SEQ ID NO: 5854 - protein, 14 aa, synthetic construct
ALGEIFLIGDTEKL

SEQ ID NO: 5855 - protein, 14 aa, synthetic construct
ALGEIFILGDTDKL

SEQ ID NO: 5856 - protein, 14 aa, synthetic construct
ALGEIEWWIIGNDK

SEQ ID NO: 5857 - protein, 14 aa, synthetic construct
ALGEHPTYVLGDTD

SEQ ID NO: 5858 - protein, 14 aa, synthetic construct
ALGEHPTWGIYTDK

SEQ ID NO: 5859 - protein, 14 aa, synthetic construct
ALGEHPSYVLGYTD

SEQ ID NO: 5860 - protein, 13 aa, synthetic construct
ALGEHPSYVLGDK

SEQ ID NO: 5861 - protein, 14 aa, synthetic construct
ALGEHPSWGIYTEK

SEQ ID NO: 5862 - protein, 14 aa, synthetic construct
ALGEHPSWGISTDK

SEQ ID NO: 5863 - protein, 14 aa, synthetic construct
ALGEHPNWGIYTPI

SEQ ID NO: 5864 - protein, 14 aa, synthetic construct
ALGEHPNWGIYTDQ

SEQ ID NO: 5865 - protein, 14 aa, synthetic construct
ALGEHPNWGIYPDK

SEQ ID NO: 5866 - protein, 14 aa, synthetic construct
ALGEHPNWGISTDK

SEQ ID NO: 5867 - protein, 14 aa, synthetic construct
ALGEHPNWAIYTDQ

SEQ ID NO: 5868 - protein, 14 aa, synthetic construct
ALGEHPKWGIYTDK

SEQ ID NO: 5869 - protein, 14 aa, synthetic construct
ALGEHPHWGIYTDK

SEQ ID NO: 5870 - protein, 9 aa, synthetic construct
ALGEHPEWG

SEQ ID NO: 5871 - protein, 13 aa, synthetic construct
ALGEHPDCAKHTH

SEQ ID NO: 5872 - protein, 14 aa, synthetic construct
ALGEHPCWGIYTDK

SEQ ID NO: 5873 - protein, 13 aa, synthetic construct
ALGEHILLGNSDN

SEQ ID NO: 5874 - protein, 8 aa, synthetic construct
ALGEHHTY

SEQ ID NO: 5875 - protein, 13 aa, synthetic construct
ALGEHHNYVMGQT

SEQ ID NO: 5876 - protein, 12 aa, synthetic construct
ALGEHGTTINSS

SEQ ID NO: 5877 - protein, 10 aa, synthetic construct
ALGEHGTTII

SEQ ID NO: 5878 - protein, 14 aa, synthetic construct
ALGEHGPGGYADKL

SEQ ID NO: 5879 - protein, 14 aa, synthetic construct
ALGEHFLLGDTDKL

SEQ ID NO: 5880 - protein, 14 aa, synthetic construct
ALGEHPYAGGSYTD

SEQ ID NO: 5881 - protein, 14 aa, synthetic construct
ALGEHPYGGISTYK

SEQ ID NO: 5882 - protein, 13 aa, synthetic construct
ALGEHPYGGLYTD

SEQ ID NO: 5883 - protein, 13 aa, synthetic construct
ALGEHPYWGIYTP

SEQ ID NO: 5884 - protein, 14 aa, synthetic construct
ALGEHPYWRIYTDK

SEQ ID NO: 5885 - protein, 14 aa, synthetic construct
ALGEHPYWGVYTEK

SEQ ID NO: 5886 - protein, 14 aa, synthetic construct
ALGEHPYWGTTDKL

SEQ ID NO: 5887 - protein, 14 aa, synthetic construct
ALGEHPYWGTPRNS

SEQ ID NO: 5888 - protein, 14 aa, synthetic construct
ALGEHPYWGSYTEK

SEQ ID NO: 5889 - protein, 14 aa, synthetic construct
ALGEHPYWGSSTDK

SEQ ID NO: 5890 - protein, 13 aa, synthetic construct
ALGEHPYWGSETH

SEQ ID NO: 5891 - protein, 14 aa, synthetic construct
ALGEHPYWGNNTDK

SEQ ID NO: 5892 - protein, 14 aa, synthetic construct
ALGEHPYWGLYTYK

SEQ ID NO: 5893 - protein, 14 aa, synthetic construct
ALGEHPYWGLRTIN

SEQ ID NO: 5894 - protein, 14 aa, synthetic construct
ALGEHPYWGIYTDE

SEQ ID NO: 5895 - protein, 14 aa, synthetic construct
ALGEHPYSGLYTDK

SEQ ID NO: 5896 - protein, 12 aa, synthetic construct
ALGEHPYWGIYT

SEQ ID NO: 5897 - protein, 14 aa, synthetic construct
ALGEHPYWGIYSDK

SEQ ID NO: 5898 - protein, 12 aa, synthetic construct
ALGEHPYWGISP

SEQ ID NO: 5899 - protein, 14 aa, synthetic construct
ALGEHPYWGIRTDK

SEQ ID NO: 5900 - protein, 14 aa, synthetic construct
ALGEHPYWGIPDKL

SEQ ID NO: 5901 - protein, 14 aa, synthetic construct
ALGEHPYWGIPADK

SEQ ID NO: 5902 - protein, 14 aa, synthetic construct
ALGEHPYWGINTDK

SEQ ID NO: 5903 - protein, 14 aa, synthetic construct
ALGEHPYWGIKINS

SEQ ID NO: 5904 - protein, 14 aa, synthetic construct
ALGEHPYWEIYTDK

SEQ ID NO: 5905 - protein, 14 aa, synthetic construct
ALGEHPYWAIYTDK

SEQ ID NO: 5906 - protein, 11 aa, synthetic construct
ALGEHCLAQKL

SEQ ID NO: 5907 - protein, 13 aa, synthetic construct
ALGEHAWGSYTDK

SEQ ID NO: 5908 - protein, 14 aa, synthetic construct
ALGEHAGGWTDKII

SEQ ID NO: 5909 - protein, 13 aa, synthetic construct
ALGEGGDTPHKLF

SEQ ID NO: 5910 - protein, 13 aa, synthetic construct
ALGEGGGYPRETH

SEQ ID NO: 5911 - protein, 13 aa, synthetic construct
ALGEGGGTPAKLI

SEQ ID NO: 5912 - protein, 13 aa, synthetic construct
ALGEGGETPDTLI

SEQ ID NO: 5913 - protein, 10 aa, synthetic construct
ALGEGGETPD

SEQ ID NO: 5914 - protein, 14 aa, synthetic construct
ALGEGGDTYTDKLI

SEQ ID NO: 5915 - protein, 14 aa, synthetic construct
ALGEGGDTYPDKVI

SEQ ID NO: 5916 - protein, 13 aa, synthetic construct
ALGEGGDTPYQLI

SEQ ID NO: 5917 - protein, 13 aa, synthetic construct
ALGEGGDTPYNLI

SEQ ID NO: 5918 - protein, 13 aa, synthetic construct
ALGEGGDTPIHSS

SEQ ID NO: 5919 - protein, 13 aa, synthetic construct
ALGEGGDTPIDSS

SEQ ID NO: 5920 - protein, 13 aa, synthetic construct
ALGEGGDTPGKLI

SEQ ID NO: 5921 - protein, 13 aa, synthetic construct
ALGEGGHTPHKII

SEQ ID NO: 5922 - protein, 13 aa, synthetic construct
ALGEGGDTPETLI

SEQ ID NO: 5923 - protein, 13 aa, synthetic construct
ALGEGGDTPENLI

SEQ ID NO: 5924 - protein, 13 aa, synthetic construct
ALGEGGDTPEKVI

SEQ ID NO: 5925 - protein, 13 aa, synthetic construct
ALGEGGDTPEKLN

SEQ ID NO: 5926 - protein, 13 aa, synthetic construct
ALGEGGDTPDTLF

SEQ ID NO: 5927 - protein, 13 aa, synthetic construct
ALGEGGDTPDRHI

SEQ ID NO: 5928 - protein, 13 aa, synthetic construct
ALGEGGDTPDKVN

SEQ ID NO: 5929 - protein, 13 aa, synthetic construct
ALGEGGDTPDKLY

SEQ ID NO: 5930 - protein, 13 aa, synthetic construct
ALGEGGDTPDKIN

SEQ ID NO: 5931 - protein, 13 aa, synthetic construct
ALGEGGDTPDKHN

SEQ ID NO: 5932 - protein, 13 aa, synthetic construct
ALGEGGHNPDKII

SEQ ID NO: 5933 - protein, 10 aa, synthetic construct
ALGEGGIPPI

SEQ ID NO: 5934 - protein, 11 aa, synthetic construct
ALGEGYTDKKI

SEQ ID NO: 5935 - protein, 13 aa, synthetic construct
ALGEGPKDTDKLI

SEQ ID NO: 5936 - protein, 13 aa, synthetic construct
ALGEGVDTPDTLI

SEQ ID NO: 5937 - protein, 11 aa, synthetic construct
ALGEGTPINSS

SEQ ID NO: 5938 - protein, 11 aa, synthetic construct
ALGEGTPIKSS

SEQ ID NO: 5939 - protein, 14 aa, synthetic construct
ALGEGTGGYLGSWD

SEQ ID NO: 5940 - protein, 13 aa, synthetic construct
ALGEGTGGSLGSW

SEQ ID NO: 5941 - protein, 14 aa, synthetic construct
ALGEGTGGDLGSWD

SEQ ID NO: 5942 - protein, 14 aa, synthetic construct
ALGEGSYAGGTYTD

SEQ ID NO: 5943 - protein, 14 aa, synthetic construct
ALGEGRGIHVNVKF

SEQ ID NO: 5944 - protein, 13 aa, synthetic construct
ALGEGRDTPDKLN

SEQ ID NO: 5945 - protein, 13 aa, synthetic construct
ALGEGRDTPDKLI

SEQ ID NO: 5946 - protein, 11 aa, synthetic construct
ALGEGNTDKLI

SEQ ID NO: 5947 - protein, 13 aa, synthetic construct
ALGEGGIPPIISS

SEQ ID NO: 5948 - protein, 13 aa, synthetic construct
ALGEGLGDTEKVI

SEQ ID NO: 5949 - protein, 11 aa, synthetic construct
ALGEGKTDKLI

SEQ ID NO: 5950 - protein, 13 aa, synthetic construct
ALGEGGYTPDKLN

SEQ ID NO: 5951 - protein, 13 aa, synthetic construct
ALGEGGYTPDKHI

SEQ ID NO: 5952 - protein, 12 aa, synthetic construct
ALGEGGYPRSTH

SEQ ID NO: 5953 - protein, 13 aa, synthetic construct
ALGEGGYAGDKLI

SEQ ID NO: 5954 - protein, 13 aa, synthetic construct
ALGEGGVTPDKLI

SEQ ID NO: 5955 - protein, 13 aa, synthetic construct
ALGEGGIPPLNSS

SEQ ID NO: 5956 - protein, 13 aa, synthetic construct
ALGEGGIPPISSS

SEQ ID NO: 5957 - protein, 13 aa, synthetic construct
ALGEGGIPPINST

SEQ ID NO: 5958 - protein, 13 aa, synthetic construct
ALGEHPYWVIYTD

SEQ ID NO: 5959 - protein, 14 aa, synthetic construct
ALGEHPYWWIYTDK

SEQ ID NO: 5960 - protein, 14 aa, synthetic construct
ALGEHPYYVLGDTD

SEQ ID NO: 5961 - protein, 14 aa, synthetic construct
ALGEIANWGSYTDK

SEQ ID NO: 5962 - protein, 14 aa, synthetic construct
ALGEIAWGSNTDKL

SEQ ID NO: 5963 - protein, 8 aa, synthetic construct
ALGEIAWG

SEQ ID NO: 5964 - protein, 14 aa, synthetic construct
ALGEIATWGRNTDK

SEQ ID NO: 5965 - protein, 14 aa, synthetic construct
ALGEIATWGINTDQ

SEQ ID NO: 5966 - protein, 11 aa, synthetic construct
ALGEIATWGIN

SEQ ID NO: 5967 - protein, 12 aa, synthetic construct
ALGEIASLGYTD

SEQ ID NO: 5968 - protein, 14 aa, synthetic construct
ALGEIARASHTDKL

SEQ ID NO: 5969 - protein, 14 aa, synthetic construct
ALGEIANWRINTEK

SEQ ID NO: 5970 - protein, 14 aa, synthetic construct
ALGEIANWGVKTDK

SEQ ID NO: 5971 - protein, 14 aa, synthetic construct
ALGEIANWGTPINS

SEQ ID NO: 5972 - protein, 14 aa, synthetic construct
ALGEIANWGRNTEK

SEQ ID NO: 5973 - protein, 14 aa, synthetic construct
ALGEIAWGSYTDEL

SEQ ID NO: 5974 - protein, 14 aa, synthetic construct
ALGEIANWGRITDK

SEQ ID NO: 5975 - protein, 14 aa, synthetic construct
ALGEIANWGRHSDK

SEQ ID NO: 5976 - protein, 14 aa, synthetic construct
ALGEIANWGLNSDK

SEQ ID NO: 5977 - protein, 11 aa, synthetic construct
ALGEIANWGLN

SEQ ID NO: 5978 - protein, 10 aa, synthetic construct
ALGEIANWGL

SEQ ID NO: 5979 - protein, 14 aa, synthetic construct
ALGEIANWGIYTPI

SEQ ID NO: 5980 - protein, 13 aa, synthetic construct
ALGEIANWGIYTD

SEQ ID NO: 5981 - protein, 14 aa, synthetic construct
ALGEIANWGITTDK

SEQ ID NO: 5982 - protein, 13 aa, synthetic construct
ALGEIANWGITTD

SEQ ID NO: 5983 - protein, 14 aa, synthetic construct
ALGEIANWGIPPIN

SEQ ID NO: 5984 - protein, 14 aa, synthetic construct
ALGEIAWGSSTDKL

SEQ ID NO: 5985 - protein, 14 aa, synthetic construct
ALGEIAWGSYTEKL

SEQ ID NO: 5986 - protein, 14 aa, synthetic construct
ALGEIANWGINTDE

SEQ ID NO: 5987 - protein, 14 aa, synthetic construct
ALGEIDKCGINTDK

SEQ ID NO: 5988 - protein, 14 aa, synthetic construct
ALGEIEWGIRGADK

SEQ ID NO: 5989 - protein, 14 aa, synthetic construct
ALGEIEWGIRCTYK

SEQ ID NO: 5990 - protein, 14 aa, synthetic construct
ALGEIEWGIRCTDK

SEQ ID NO: 5991 - protein, 14 aa, synthetic construct
ALGEIEWGINTDKL

SEQ ID NO: 5992 - protein, 13 aa, synthetic construct
ALGEIENWGINTD

SEQ ID NO: 5993 - protein, 14 aa, synthetic construct
ALGEIDWGSYTYKL

SEQ ID NO: 5994 - protein, 14 aa, synthetic construct
ALGEIDWGSYTDKL

SEQ ID NO: 5995 - protein, 14 aa, synthetic construct
ALGEIDRGSNTDKL

SEQ ID NO: 5996 - protein, 13 aa, synthetic construct
ALGEIDRGIRGTD

SEQ ID NO: 5997 - protein, 10 aa, synthetic construct
ALGEIDNWGL

SEQ ID NO: 5998 - protein, 12 aa, synthetic construct
ALGEICIHDKLI

SEQ ID NO: 5999 - protein, 13 aa, synthetic construct
ALGEIAWGSYTYK

SEQ ID NO: 6000 - protein, 13 aa, synthetic construct
ALGEICGIRSKLI

SEQ ID NO: 6001 - protein, 14 aa, synthetic construct
ALGEICGGYDDKII

SEQ ID NO: 6002 - protein, 8 aa, synthetic construct
ALGEICGG

SEQ ID NO: 6003 - protein, 13 aa, synthetic construct
ALGEIAYWGLNAD

SEQ ID NO: 6004 - protein, 14 aa, synthetic construct
ALGEIAYWGIPINS

SEQ ID NO: 6005 - protein, 14 aa, synthetic construct
ALGEIAYWGINTEK

SEQ ID NO: 6006 - protein, 14 aa, synthetic construct
ALGEIAYWGINTDQ

SEQ ID NO: 6007 - protein, 14 aa, synthetic construct
ALGEIAYWGINIDK

SEQ ID NO: 6008 - protein, 14 aa, synthetic construct
ALGEIAYWGIKTDK

SEQ ID NO: 6009 - protein, 14 aa, synthetic construct
ALGEIAYWGIITDK

SEQ ID NO: 6010 - protein, 14 aa, synthetic construct
ALGEIANWGIPADK

SEQ ID NO: 6011 - protein, 14 aa, synthetic construct
ALGEIANWGILGLL

SEQ ID NO: 6012 - protein, 7 aa, synthetic construct
ALGEHQF

SEQ ID NO: 6013 - protein, 14 aa, synthetic construct
ALGEHTGGWTHKLI

SEQ ID NO: 6014 - protein, 10 aa, synthetic construct
ALGEIAKRPI

SEQ ID NO: 6015 - protein, 14 aa, synthetic construct
ALGEIAKLGINNDK

SEQ ID NO: 6016 - protein, 14 aa, synthetic construct
ALGEIAKLGIKTDK

SEQ ID NO: 6017 - protein, 14 aa, synthetic construct
ALGEIAIPGIHTDK

SEQ ID NO: 6018 - protein, 14 aa, synthetic construct
ALGEIAICGIKTDK

SEQ ID NO: 6019 - protein, 14 aa, synthetic construct
ALGEIAHWGIKTDK

SEQ ID NO: 6020 - protein, 11 aa, synthetic construct
ALGEIAFPYWW

SEQ ID NO: 6021 - protein, 14 aa, synthetic construct
ALGEHVLGDPDKLI

SEQ ID NO: 6022 - protein, 9 aa, synthetic construct
ALGEHTYWG

SEQ ID NO: 6023 - protein, 14 aa, synthetic construct
ALGEHTKRGIYTDK

SEQ ID NO: 6024 - protein, 14 aa, synthetic construct
ALGEHTGGWTEKLI

SEQ ID NO: 6025 - protein, 11 aa, synthetic construct
ALGEIAKWGIN

SEQ ID NO: 6026 - protein, 13 aa, synthetic construct
ALGEHTGGWTDKL

SEQ ID NO: 6027 - protein, 14 aa, synthetic construct
ALGEHSYARGSYTD

SEQ ID NO: 6028 - protein, 10 aa, synthetic construct
ALGEHSYAGG

SEQ ID NO: 6029 - protein, 14 aa, synthetic construct
ALGEHSPFTVGHKL

SEQ ID NO: 6030 - protein, 14 aa, synthetic construct
ALGEHSPFTGGHKL

SEQ ID NO: 6031 - protein, 11 aa, synthetic construct
ALGEHSPFTGG

SEQ ID NO: 6032 - protein, 14 aa, synthetic construct
ALGEHSPFTAGHKL

SEQ ID NO: 6033 - protein, 11 aa, synthetic construct
ALGEHSPCTGG

SEQ ID NO: 6034 - protein, 12 aa, synthetic construct
ALGEHSGRSTET

SEQ ID NO: 6035 - protein, 14 aa, synthetic construct
ALGEHQYWGIYTDK

SEQ ID NO: 6036 - protein, 14 aa, synthetic construct
ALGEIAKSGINNDK

SEQ ID NO: 6037 - protein, 13 aa, synthetic construct
ALGEIAKWGLYTD

SEQ ID NO: 6038 - protein, 13 aa, synthetic construct
ALGEIANWGIKSS

SEQ ID NO: 6039 - protein, 14 aa, synthetic construct
ALGEIANLGINTDK

SEQ ID NO: 6040 - protein, 14 aa, synthetic construct
ALGEIANWGIKPDK

SEQ ID NO: 6041 - protein, 13 aa, synthetic construct
ALGEIANWGIHTD

SEQ ID NO: 6042 - protein, 14 aa, synthetic construct
ALGEIANWGIHDKL

SEQ ID NO: 6043 - protein, 14 aa, synthetic construct
ALGEIANWGIETDK

SEQ ID NO: 6044 - protein, 14 aa, synthetic construct
ALGEIANWGIDTDQ

SEQ ID NO: 6045 - protein, 14 aa, synthetic construct
ALGEIANWGICTDK

SEQ ID NO: 6046 - protein, 14 aa, synthetic construct
ALGEIANWAINTDK

SEQ ID NO: 6047 - protein, 8 aa, synthetic construct
ALGEIANW

SEQ ID NO: 6048 - protein, 14 aa, synthetic construct
ALGEIANSGINPDK

SEQ ID NO: 6049 - protein, 13 aa, synthetic construct
ALGEIANRGLNTD

SEQ ID NO: 6050 - protein, 13 aa, synthetic construct
ALGEIANGGISTD

SEQ ID NO: 6051 - protein, 9 aa, synthetic construct
ALGEIALPG

SEQ ID NO: 6052 - protein, 14 aa, synthetic construct
ALGEIANGGIKSDK

SEQ ID NO: 6053 - protein, 14 aa, synthetic construct
ALGEIANCRINTDK

SEQ ID NO: 6054 - protein, 14 aa, synthetic construct
ALGEIANCGLNTDK

SEQ ID NO: 6055 - protein, 14 aa, synthetic construct
ALGEIANCGIYTDK

SEQ ID NO: 6056 - protein, 14 aa, synthetic construct
ALGEIANCGINTEK

SEQ ID NO: 6057 - protein, 14 aa, synthetic construct
ALGEIANCAINTDK

SEQ ID NO: 6058 - protein, 8 aa, synthetic construct
ALGEIANC

SEQ ID NO: 6059 - protein, 14 aa, synthetic construct
ALGEIALPVIHNDK

SEQ ID NO: 6060 - protein, 14 aa, synthetic construct
ALGEIALPGINTDK

SEQ ID NO: 6061 - protein, 13 aa, synthetic construct
ALGEIALPGINTD

SEQ ID NO: 6062 - protein, 13 aa, synthetic construct
ALGDLLGDTDYLI

SEQ ID NO: 6063 - protein, 13 aa, synthetic construct
ALGDLLGDTDQLF

SEQ ID NO: 6064 - protein, 13 aa, synthetic construct
ALGDLLGDTDNLI

SEQ ID NO: 6065 - protein, 14 aa, synthetic construct
ALERACLRTLYTDK

SEQ ID NO: 6066 - protein, 14 aa, synthetic construct
ALCRAFLRTLYTYK

SEQ ID NO: 6067 - protein, 12 aa, synthetic construct
ALCEVHTDTDKL

SEQ ID NO: 6068 - protein, 14 aa, synthetic construct
ALCESTGGYLGSWD

SEQ ID NO: 6069 - protein, 12 aa, synthetic construct
ALCEPGNTINSS

SEQ ID NO: 6070 - protein, 11 aa, synthetic construct
ALCELSPYTGG

SEQ ID NO: 6071 - protein, 14 aa, synthetic construct
ALCELPYRGIRTDK

SEQ ID NO: 6072 - protein, 14 aa, synthetic construct
ALCELFLLGDTDKL

SEQ ID NO: 6073 - protein, 14 aa, synthetic construct
ALCELALPGIKTDK

SEQ ID NO: 6074 - protein, 14 aa, synthetic construct
ALCEIANGGINTDK

SEQ ID NO: 6075 - protein, 14 aa, synthetic construct
ALCEHVLGDIYTDK

SEQ ID NO: 6076 - protein, 14 aa, synthetic construct
ALCEHPYWGIYTDK

SEQ ID NO: 6077 - protein, 12 aa, synthetic construct
ALCEDWIHDKLI

SEQ ID NO: 6078 - protein, 12 aa, synthetic construct
ALCAGGYTDKLK

SEQ ID NO: 6079 - protein, 12 aa, synthetic construct
ALAYVLADSSTP

SEQ ID NO: 6080 - protein, 14 aa, synthetic construct
ALAQLRGYARTDTL

SEQ ID NO: 6081 - protein, 13 aa, synthetic construct
ALAQITFLPDKLI

SEQ ID NO: 6082 - protein, 13 aa, synthetic construct
ALAQGADTPDKLI

SEQ ID NO: 6083 - protein, 14 aa, synthetic construct
ALALRRWISGTDKL

SEQ ID NO: 6084 - protein, 14 aa, synthetic construct
ALAGPSWYWGIPDK

SEQ ID NO: 6085 - protein, 14 aa, synthetic construct
ALAGPSWCWRIPDK

SEQ ID NO: 6086 - protein, 14 aa, synthetic construct
ALAERTGGYIGSTT

SEQ ID NO: 6087 - protein, 14 aa, synthetic construct
ALAEPVLGDIYTDK

SEQ ID NO: 6088 - protein, 14 aa, synthetic construct
ALAEPTWGWTDKII

SEQ ID NO: 6089 - protein, 13 aa, synthetic construct
ALEALLPTFRGTD

SEQ ID NO: 6090 - protein, 14 aa, synthetic construct
ALEALLPTFRGTDK

SEQ ID NO: 6091 - protein, 13 aa, synthetic construct
ALEDLGDSSWDTR

SEQ ID NO: 6092 - protein, 12 aa, synthetic construct
ALEELLHTDKLI

SEQ ID NO: 6093 - protein, 14 aa, synthetic construct
ALEEPVLGEIYTDK

SEQ ID NO: 6094 - protein, 14 aa, synthetic construct
ALEEPVLEDIYTDK

SEQ ID NO: 6095 - protein, 14 aa, synthetic construct
ALEEPTVGWTDKLI

SEQ ID NO: 6096 - protein, 14 aa, synthetic construct
ALEEPPSYVLGDTD

SEQ ID NO: 6097 - protein, 12 aa, synthetic construct
ALEEPGTTINSS

SEQ ID NO: 6098 - protein, 13 aa, synthetic construct
ALEELWGIRSKLN

SEQ ID NO: 6099 - protein, 14 aa, synthetic construct
ALEELVSLGYTDKL

SEQ ID NO: 6100 - protein, 14 aa, synthetic construct
ALEELTGGYSDKLI

SEQ ID NO: 6101 - protein, 14 aa, synthetic construct
ALEELSPFTGGHKL

SEQ ID NO: 6102 - protein, 14 aa, synthetic construct
ALEELREGDKNKLI

SEQ ID NO: 6103 - protein, 13 aa, synthetic construct
ALEELLGDTDKLI

SEQ ID NO: 6104 - protein, 13 aa, synthetic construct
ALEEGGDTPDKLI

SEQ ID NO: 6105 - protein, 14 aa, synthetic construct
ALEELGGGYDDKLI

SEQ ID NO: 6106 - protein, 13 aa, synthetic construct
ALEELGDSSWGTR

SEQ ID NO: 6107 - protein, 13 aa, synthetic construct
ALEELGDRSWDTR

SEQ ID NO: 6108 - protein, 14 aa, synthetic construct
ALEELFLLGDTETL

SEQ ID NO: 6109 - protein, 14 aa, synthetic construct
ALEELESLGYADKL

SEQ ID NO: 6110 - protein, 14 aa, synthetic construct
ALEELAWGSYTDKL

SEQ ID NO: 6111 - protein, 14 aa, synthetic construct
ALEELALPGIHTDK

SEQ ID NO: 6112 - protein, 14 aa, synthetic construct
ALEEIAWGSYTDKL

SEQ ID NO: 6113 - protein, 14 aa, synthetic construct
ALEEHTGGWTDKLI

SEQ ID NO: 6114 - protein, 11 aa, synthetic construct
ALEEGGTDKLI

SEQ ID NO: 6115 - protein, 14 aa, synthetic construct
ALAEPTGGWTEKLI

SEQ ID NO: 6116 - protein, 8 aa, synthetic construct
ALAEPTGA

SEQ ID NO: 6117 - protein, 10 aa, synthetic construct
ALAEPSYAGG

SEQ ID NO: 6118 - protein, 14 aa, synthetic construct
AIWEMTVGYSYKLI

SEQ ID NO: 6119 - protein, 14 aa, synthetic construct
ALADLALPGIHTDK

SEQ ID NO: 6120 - protein, 13 aa, synthetic construct
ALADILGDTHNII

SEQ ID NO: 6121 - protein, 13 aa, synthetic construct
ALADILGDTDKLI

SEQ ID NO: 6122 - protein, 14 aa, synthetic construct
ALADHTYWALNTDK

SEQ ID NO: 6123 - skipped

SEQ ID NO: 6124 - protein, 14 aa, synthetic construct
AKGELVWGTTDKLI

SEQ ID NO: 6125 - protein, 14 aa, synthetic construct
AIWQLDWGPTDKII

SEQ ID NO: 6126 - protein, 14 aa, synthetic construct
AIWGPSSYWGIPDK

SEQ ID NO: 6127 - protein, 14 aa, synthetic construct
AIWGHSWCWGIHDK

SEQ ID NO: 6128 - protein, 14 aa, synthetic construct
AIWEPGLPLLGDTD

SEQ ID NO: 6129 - protein, 12 aa, synthetic construct
AIWELWDRSCDT

SEQ ID NO: 6130 - protein, 14 aa, synthetic construct
ALADVPYRGIRNDK

SEQ ID NO: 6131 - protein, 14 aa, synthetic construct
AIWELVWGTTDKLI

SEQ ID NO: 6132 - protein, 14 aa, synthetic construct
AIWELTGGYADKLI

SEQ ID NO: 6133 - protein, 13 aa, synthetic construct
AIWELMGDTDKLI

SEQ ID NO: 6134 - protein, 12 aa, synthetic construct
AIWELLLGDKYT

SEQ ID NO: 6135 - protein, 14 aa, synthetic construct
AIWELCLGDTLATA

SEQ ID NO: 6136 - protein, 14 aa, synthetic construct
AIWEIVWGIRGTDK

SEQ ID NO: 6137 - protein, 8 aa, synthetic construct
AIWEISIA

SEQ ID NO: 6138 - protein, 11 aa, synthetic construct
AIWEGETDKLN

SEQ ID NO: 6139 - protein, 11 aa, synthetic construct
AIWEGENDKLI

SEQ ID NO: 6140 - protein, 14 aa, synthetic construct
AIVETTGGWTFKLI

SEQ ID NO: 6141 - protein, 14 aa, synthetic construct
ALADLGGGYDEKLI

SEQ ID NO: 6142 - protein, 11 aa, synthetic construct
ALAEGDTDKLI

SEQ ID NO: 6143 - protein, 13 aa, synthetic construct
ALAEPPTYVLGDT

SEQ ID NO: 6144 - protein, 14 aa, synthetic construct
ALAELPYRGIRNDK

SEQ ID NO: 6145 - protein, 13 aa, synthetic construct
ALAEPPSYVLWDT

SEQ ID NO: 6146 - protein, 14 aa, synthetic construct
ALAENPYWGIYTDK

SEQ ID NO: 6147 - protein, 14 aa, synthetic construct
ALAEMGDTYPDKLI

SEQ ID NO: 6148 - protein, 12 aa, synthetic construct
ALAELWIHDKLI

SEQ ID NO: 6149 - protein, 14 aa, synthetic construct
ALAELVWGTTDKLI

SEQ ID NO: 6150 - protein, 14 aa, synthetic construct
ALAELVSLGYTETL

SEQ ID NO: 6151 - protein, 14 aa, synthetic construct
ALAELVSGTTYKLI

SEQ ID NO: 6152 - protein, 13 aa, synthetic construct
ALAELTFLPDKLI

SEQ ID NO: 6153 - protein, 14 aa, synthetic construct
ALAELSPFTGGHKL

SEQ ID NO: 6154 - protein, 13 aa, synthetic construct
ALAELPYRGIRTD

SEQ ID NO: 6155 - protein, 13 aa, synthetic construct
ALAELLGDTDKLI

SEQ ID NO: 6156 - protein, 14 aa, synthetic construct
ALAEIANWGINTDK

SEQ ID NO: 6157 - protein, 13 aa, synthetic construct
ALAELLGATHQLI

SEQ ID NO: 6158 - protein, 14 aa, synthetic construct
ALAELGTGGYADKL

SEQ ID NO: 6159 - protein, 12 aa, synthetic construct
ALAELGSTDKRI

SEQ ID NO: 6160 - protein, 14 aa, synthetic construct
ALAELGPGGYADKL

SEQ ID NO: 6161 - protein, 14 aa, synthetic construct
ALAELGGGYDDKLI

SEQ ID NO: 6162 - protein, 14 aa, synthetic construct
ALAELGDTYPDKLI

SEQ ID NO: 6163 - protein, 12 aa, synthetic construct
ALAELGDTDKKI

SEQ ID NO: 6164 - protein, 14 aa, synthetic construct
ALAELEWGIRGTDK

SEQ ID NO: 6165 - protein, 14 aa, synthetic construct
ALAELCLGDTLATA

SEQ ID NO: 6166 - protein, 13 aa, synthetic construct
ALAEILGDTDKLI

SEQ ID NO: 6167 - protein, 13 aa, synthetic construct
ALEEVPTDTDKLI

SEQ ID NO: 6168 - protein, 14 aa, synthetic construct
ALERAFLRTLYTDK

SEQ ID NO: 6169 - protein, 13 aa, synthetic construct
ALGALALPGIHTD

SEQ ID NO: 6170 - protein, 13 aa, synthetic construct
ALEVPPSYVLGEI

SEQ ID NO: 6171 - protein, 12 aa, synthetic construct
ALGAGGYTDQLY

SEQ ID NO: 6172 - protein, 12 aa, synthetic construct
ALGAGGYTDNLF

SEQ ID NO: 6173 - protein, 12 aa, synthetic construct
ALGAGGYTDNFI

SEQ ID NO: 6174 - protein, 12 aa, synthetic construct
ALGAGGYTDKRI

SEQ ID NO: 6175 - protein, 12 aa, synthetic construct
ALGAGGYTDKQI

SEQ ID NO: 6176 - protein, 12 aa, synthetic construct
ALGAGGYTDKNI

SEQ ID NO: 6177 - protein, 12 aa, synthetic construct
ALGAGGYTDKHN

SEQ ID NO: 6178 - protein, 10 aa, synthetic construct
ALGAGGYTDK

SEQ ID NO: 6179 - protein, 12 aa, synthetic construct
ALGAGGYTDILI

SEQ ID NO: 6180 - protein, 9 aa, synthetic construct
ALGAGGYTD

SEQ ID NO: 6181 - protein, 13 aa, synthetic construct
ALGAGGYSGDKLI

SEQ ID NO: 6182 - protein, 12 aa, synthetic construct
ALGAGGYSEKLI

SEQ ID NO: 6183 - protein, 13 aa, synthetic construct
ALGAGGYRPINSS

SEQ ID NO: 6184 - protein, 13 aa, synthetic construct
ALGAGGYRPIKSS

SEQ ID NO: 6185 - protein, 12 aa, synthetic construct
ALGAGGYPRETH

SEQ ID NO: 6186 - protein, 12 aa, synthetic construct
ALGAGGYPINSS

SEQ ID NO: 6187 - protein, 12 aa, synthetic construct
ALGAGGYPDKLI

SEQ ID NO: 6188 - protein, 14 aa, synthetic construct
ALGAGGYMGSWDTR

SEQ ID NO: 6189 - protein, 13 aa, synthetic construct
ALGAGGYDGDKLI

SEQ ID NO: 6190 - protein, 12 aa, synthetic construct
ALGAGGYDDKLI

SEQ ID NO: 6191 - protein, 13 aa, synthetic construct
ALGAGGYASDQLI

SEQ ID NO: 6192 - protein, 13 aa, synthetic construct
ALGAGGYAGVKLN

SEQ ID NO: 6193 - protein, 13 aa, synthetic construct
ALGAGGYAGDTLI

SEQ ID NO: 6194 - protein, 12 aa, synthetic construct
ALGAGGYTEILI

SEQ ID NO: 6195 - protein, 12 aa, synthetic construct
ALGAGGYTEKHI

SEQ ID NO: 6196 - protein, 12 aa, synthetic construct
ALGAGGYTENLI

SEQ ID NO: 6197 - protein, 13 aa, synthetic construct
ALGAHPSYVLGEI

SEQ ID NO: 6198 - protein, 14 aa, synthetic construct
ALGALAGGADTENL

SEQ ID NO: 6199 - protein, 14 aa, synthetic construct
ALGAIIPTFTCTDK

SEQ ID NO: 6200 - protein, 9 aa, synthetic construct
ALGAIENWG

SEQ ID NO: 6201 - protein, 14 aa, synthetic construct
ALGAIDNWGINTDK

SEQ ID NO: 6202 - protein, 13 aa, synthetic construct
ALGAIASWGIYTD

SEQ ID NO: 6203 - protein, 14 aa, synthetic construct
ALGAIANWGISTDK

SEQ ID NO: 6204 - protein, 13 aa, synthetic construct
ALGAIANWGINTD

SEQ ID NO: 6205 - protein, 13 aa, synthetic construct
ALGAIAKWGINTD

SEQ ID NO: 6206 - protein, 14 aa, synthetic construct
ALGAIAKWGIKTDK

SEQ ID NO: 6207 - protein, 14 aa, synthetic construct
ALGAHPYWGIYTDQ

SEQ ID NO: 6208 - protein, 12 aa, synthetic construct
ALGAGVYTDKII

SEQ ID NO: 6209 - protein, 12 aa, synthetic construct
ALGAGGYTEQLI

SEQ ID NO: 6210 - protein, 13 aa, synthetic construct
ALGAGVYAGDKLI

SEQ ID NO: 6211 - protein, 12 aa, synthetic construct
ALGAGRYTDKLI

SEQ ID NO: 6212 - protein, 13 aa, synthetic construct
ALGAGRYAGEKLI

SEQ ID NO: 6213 - protein, 13 aa, synthetic construct
ALGAGRYAGDKLI

SEQ ID NO: 6214 - protein, 13 aa, synthetic construct
ALGAGRDAGDQLN

SEQ ID NO: 6215 - protein, 13 aa, synthetic construct
ALGAGGYVPINSS

SEQ ID NO: 6216 - protein, 12 aa, synthetic construct
ALGAGGYTYKLI

SEQ ID NO: 6217 - protein, 12 aa, synthetic construct
ALGAGGYTHKLI

SEQ ID NO: 6218 - protein, 12 aa, synthetic construct
ALGAGGYTHKHI

SEQ ID NO: 6219 - protein, 12 aa, synthetic construct
ALGAGGYTETRI

SEQ ID NO: 6220 - protein, 14 aa, synthetic construct
ALGAGGYAGDSTTL

SEQ ID NO: 6221 - protein, 13 aa, synthetic construct
ALGAGGYAGDQII

SEQ ID NO: 6222 - protein, 13 aa, synthetic construct
ALGAGGYAGDNII

SEQ ID NO: 6223 - protein, 14 aa, synthetic construct
ALGAFLPYSGIYTD

SEQ ID NO: 6224 - protein, 11 aa, synthetic construct
ALGAGDNENLN

SEQ ID NO: 6225 - protein, 14 aa, synthetic construct
ALGAFVPYWGIPDK

SEQ ID NO: 6226 - protein, 12 aa, synthetic construct
ALGAFRPSWGVP

SEQ ID NO: 6227 - protein, 14 aa, synthetic construct
ALGAFLYWGTPINS

SEQ ID NO: 6228 - protein, 10 aa, synthetic construct
ALGAFLTYWG

SEQ ID NO: 6229 - protein, 14 aa, synthetic construct
ALGAFLPYWWIPIN

SEQ ID NO: 6230 - protein, 12 aa, synthetic construct
ALGAFLPYWGTP

SEQ ID NO: 6231 - protein, 14 aa, synthetic construct
ALGAFLPYWGIPDK

SEQ ID NO: 6232 - protein, 13 aa, synthetic construct
ALGAFLPYWGHTG

SEQ ID NO: 6233 - protein, 13 aa, synthetic construct
ALGAFLPYWCIPA

SEQ ID NO: 6234 - protein, 11 aa, synthetic construct
ALGAFLPYRGK

SEQ ID NO: 6235 - protein, 12 aa, synthetic construct
ALGAGDTPINSA

SEQ ID NO: 6236 - protein, 14 aa, synthetic construct
ALGAFLPTFRGTDK

SEQ ID NO: 6237 - protein, 9 aa, synthetic construct
ALGAFLPSW

SEQ ID NO: 6238 - protein, 10 aa, synthetic construct
ALGAFLPNWG

SEQ ID NO: 6239 - protein, 12 aa, synthetic construct
ALGAFLPNRGIS

SEQ ID NO: 6240 - protein, 10 aa, synthetic construct
ALGAFLPCWG

SEQ ID NO: 6241 - protein, 13 aa, synthetic construct
ALGAFIQYWGTPI

SEQ ID NO: 6242 - protein, 10 aa, synthetic construct
ALGAFIPYWG

SEQ ID NO: 6243 - protein, 10 aa, synthetic construct
ALGACLPSWG

SEQ ID NO: 6244 - protein, 12 aa, synthetic construct
ALGAAGYTDKLI

SEQ ID NO: 6245 - protein, 4 aa, synthetic construct
ALGA

SEQ ID NO: 6246 - protein, 12 aa, synthetic construct
ALGAGDTPARNS

SEQ ID NO: 6247 - protein, 6 aa, synthetic construct
ALGAGG

SEQ ID NO: 6248 - protein, 13 aa, synthetic construct
ALGAGGYAGDKLF

SEQ ID NO: 6249 - protein, 13 aa, synthetic construct
ALGAGGLTPIKSS

SEQ ID NO: 6250 - protein, 13 aa, synthetic construct
ALGAGGYAGDELI

SEQ ID NO: 6251 - protein, 13 aa, synthetic construct
ALGAGGYAGAKLI

SEQ ID NO: 6252 - protein, 11 aa, synthetic construct
ALGAGGYADKL

SEQ ID NO: 6253 - protein, 13 aa, synthetic construct
ALGAGGVKEEKLI

SEQ ID NO: 6254 - protein, 13 aa, synthetic construct
ALGAGGSTPINSS

SEQ ID NO: 6255 - protein, 14 aa, synthetic construct
ALGAGGPHTPINSS

SEQ ID NO: 6256 - protein, 12 aa, synthetic construct
ALGAGGNTDKLI

SEQ ID NO: 6257 - protein, 13 aa, synthetic construct
ALGAGGNPAYKLI

SEQ ID NO: 6258 - protein, 12 aa, synthetic construct
ALGAGGNADKLI

SEQ ID NO: 6259 - protein, 13 aa, synthetic construct
ALGAGGNAADKLI

SEQ ID NO: 6260 - protein, 13 aa, synthetic construct
ALGAGGLAPINSS

SEQ ID NO: 6261 - protein, 12 aa, synthetic construct
ALGAGGAAVTRI

SEQ ID NO: 6262 - protein, 12 aa, synthetic construct
ALGAGGHTDKLI

SEQ ID NO: 6263 - protein, 12 aa, synthetic construct
ALGAGGHTDKFI

SEQ ID NO: 6264 - protein, 13 aa, synthetic construct
ALGAGGHAGDKLI

SEQ ID NO: 6265 - protein, 13 aa, synthetic construct
ALGAGGDTPDKIN

SEQ ID NO: 6266 - protein, 12 aa, synthetic construct
ALGAGGDTDTLI

SEQ ID NO: 6267 - protein, 12 aa, synthetic construct
ALGAGGDTDKLV

SEQ ID NO: 6268 - protein, 12 aa, synthetic construct
ALGAGGDTDHLI

SEQ ID NO: 6269 - protein, 13 aa, synthetic construct
ALGAGGDIPDKLI

SEQ ID NO: 6270 - protein, 12 aa, synthetic construct
ALGAGGDADKLI

SEQ ID NO: 6271 - protein, 13 aa, synthetic construct
ALGAGGCAADKHN

SEQ ID NO: 6272 - protein, 13 aa, synthetic construct
AIVELTFLPDKLI

SEQ ID NO: 6273 - protein, 12 aa, synthetic construct
AIVELGDTDKII

SEQ ID NO: 6274 - protein, 14 aa, synthetic construct
AIVDQETYYIGERL

SEQ ID NO: 6275 - protein, 14 aa, synthetic construct
AISEIVYLGYTDKL

SEQ ID NO: 6276 - protein, 12 aa, synthetic construct
AHGEPGSTINSS

SEQ ID NO: 6277 - protein, 14 aa, synthetic construct
AHGENGTGGYADKL

SEQ ID NO: 6278 - protein, 14 aa, synthetic construct
AHGELVWGTTDKLI

SEQ ID NO: 6279 - protein, 14 aa, synthetic construct
AHGELVWGIYTPIN

SEQ ID NO: 6280 - protein, 13 aa, synthetic construct
AHGELVSLGYTDK

SEQ ID NO: 6281 - protein, 14 aa, synthetic construct
AHGELVLGDTDKLI

SEQ ID NO: 6282 - protein, 14 aa, synthetic construct
AHGELTGAYADKLI

SEQ ID NO: 6283 - protein, 13 aa, synthetic construct
AHGELTFLHDKLI

SEQ ID NO: 6284 - protein, 14 aa, synthetic construct
AHGELSPFTGGQKL

SEQ ID NO: 6285 - protein, 14 aa, synthetic construct
AHGELSLRGIHTDK

SEQ ID NO: 6286 - protein, 14 aa, synthetic construct
AHGELPYRGIRTDK

SEQ ID NO: 6287 - protein, 12 aa, synthetic construct
AHGELLHTDQLI

SEQ ID NO: 6288 - protein, 13 aa, synthetic construct
AHGELLGDTHKLI

SEQ ID NO: 6289 - protein, 14 aa, synthetic construct
AHGELGWGYYYKLI

SEQ ID NO: 6290 - protein, 12 aa, synthetic construct
AHGELGSTDQLI

SEQ ID NO: 6291 - protein, 14 aa, synthetic construct
AHGELGGGYDDKLI

SEQ ID NO: 6292 - protein, 13 aa, synthetic construct
AHGELGGGYDDKL

SEQ ID NO: 6293 - protein, 14 aa, synthetic construct
AHGELGDTYPYKLI

SEQ ID NO: 6294 - protein, 12 aa, synthetic construct
AHGELGDTDKLI

SEQ ID NO: 6295 - protein, 13 aa, synthetic construct
AHGELGDKDYKLI

SEQ ID NO: 6296 - protein, 14 aa, synthetic construct
AHGELEWGIRGTDK

SEQ ID NO: 6297 - protein, 14 aa, synthetic construct
AHGELALPGINSDK

SEQ ID NO: 6298 - protein, 14 aa, synthetic construct
AHGELAGGYYDKLI

SEQ ID NO: 6299 - protein, 14 aa, synthetic construct
AHGEPTGGWTDKHI

SEQ ID NO: 6300 - protein, 14 aa, synthetic construct
AHGEPVLGAIYTDK

SEQ ID NO: 6301 - protein, 12 aa, synthetic construct
AHGEQGYTDKHN

SEQ ID NO: 6302 - protein, 14 aa, synthetic construct
AICEIANWGINTDK

SEQ ID NO: 6303 - protein, 14 aa, synthetic construct
AIGALLPTFLGTDK

SEQ ID NO: 6304 - protein, 14 aa, synthetic construct
AIGALLHTFRGTDK

SEQ ID NO: 6305 - protein, 14 aa, synthetic construct
AIGALIPTLRGTDK

SEQ ID NO: 6306 - protein, 13 aa, synthetic construct
AIGALGDKDDKLI

SEQ ID NO: 6307 - protein, 14 aa, synthetic construct
AIGALAWGSYTDKL

SEQ ID NO: 6308 - protein, 13 aa, synthetic construct
AIGAGVYAGDKLI

SEQ ID NO: 6309 - protein, 13 aa, synthetic construct
AIGAGGYAGDKHI

SEQ ID NO: 6310 - protein, 14 aa, synthetic construct
AICEQDLGIRGTDK

SEQ ID NO: 6311 - protein, 14 aa, synthetic construct
AICELVGVYYYKLI

SEQ ID NO: 6312 - protein, 12 aa, synthetic construct
AICELALPGSTT

SEQ ID NO: 6313 - protein, 11 aa, synthetic construct
AIAEADTHKLI

SEQ ID NO: 6314 - protein, 13 aa, synthetic construct
AHGEVLQGDSPLI

SEQ ID NO: 6315 - protein, 14 aa, synthetic construct
AHWRAFLRNLYTDK

SEQ ID NO: 6316 - protein, 13 aa, synthetic construct
AHWEVWYNPYKHI

SEQ ID NO: 6317 - protein, 13 aa, synthetic construct
AHWELGDRSWDTR

SEQ ID NO: 6318 - protein, 14 aa, synthetic construct
AHVELSPFNGGHKL

SEQ ID NO: 6319 - protein, 9 aa, synthetic construct
AHRSEEHNT

SEQ ID NO: 6320 - protein, 13 aa, synthetic construct
AHREIANSGIITD

SEQ ID NO: 6321 - protein, 7 aa, synthetic construct
AHRDITP

SEQ ID NO: 6322 - protein, 13 aa, synthetic construct
AHGVPPSYVLGEI

SEQ ID NO: 6323 - protein, 14 aa, synthetic construct
AHGVLSGIRGTDKL

SEQ ID NO: 6324 - protein, 14 aa, synthetic construct
AHGQLAWGSYTDKL

SEQ ID NO: 6325 - protein, 13 aa, synthetic construct
AHGELAFIPDTLI

SEQ ID NO: 6326 - protein, 12 aa, synthetic construct
AHGEIVYTDKLI

SEQ ID NO: 6327 - protein, 14 aa, synthetic construct
AHGEIVSLGYTDKL

SEQ ID NO: 6328 - protein, 14 aa, synthetic construct
AFGELPYRGIRTDK

SEQ ID NO: 6329 - protein, 14 aa, synthetic construct
AFGVGRGIRGTDKL

SEQ ID NO: 6330 - protein, 13 aa, synthetic construct
AFGEVLLGDSPLI

SEQ ID NO: 6331 - protein, 14 aa, synthetic construct
AFGEPGLPLLGDTD

SEQ ID NO: 6332 - protein, 12 aa, synthetic construct
AFGELWIHYKLI

SEQ ID NO: 6333 - protein, 13 aa, synthetic construct
AFGELWGIRSQLI

SEQ ID NO: 6334 - protein, 13 aa, synthetic construct
AFGELWGIPLNSS

SEQ ID NO: 6335 - protein, 14 aa, synthetic construct
AFGELVSLGYTDKL

SEQ ID NO: 6336 - protein, 14 aa, synthetic construct
AFGELVLGDTDKLI

SEQ ID NO: 6337 - protein, 13 aa, synthetic construct
AFGELTFLPDKLI

SEQ ID NO: 6338 - protein, 10 aa, synthetic construct
AFGELSPVTG

SEQ ID NO: 6339 - protein, 12 aa, synthetic construct
AFGELLHTDKLI

SEQ ID NO: 6340 - protein, 14 aa, synthetic construct
AFWEPTGGWTDQLI

SEQ ID NO: 6341 - protein, 12 aa, synthetic construct
AFGELGSTDTLI

SEQ ID NO: 6342 - protein, 14 aa, synthetic construct
AFGELGDTLAPINS

SEQ ID NO: 6343 - protein, 13 aa, synthetic construct
AFGELGDKVDKLI

SEQ ID NO: 6344 - protein, 14 aa, synthetic construct
AFGELAWGSYTDKL

SEQ ID NO: 6345 - protein, 14 aa, synthetic construct
AFGEIADWGINTDK

SEQ ID NO: 6346 - protein, 14 aa, synthetic construct
AFGDLGGYARTDKL

SEQ ID NO: 6347 - protein, 14 aa, synthetic construct
AFGDLGGSARTEKL

SEQ ID NO: 6348 - protein, 13 aa, synthetic construct
ADGVPPSYVLGEI

SEQ ID NO: 6349 - protein, 13 aa, synthetic construct
ADGELLRDTDKLI

SEQ ID NO: 6350 - protein, 14 aa, synthetic construct
ADGEIAKWGIKTDK

SEQ ID NO: 6351 - protein, 14 aa, synthetic construct
AFWEPSYAGGSYTD

SEQ ID NO: 6352 - protein, 5 aa, synthetic construct
AGGDD

SEQ ID NO: 6353 - protein, 14 aa, synthetic construct
AHGEISPITGGHKL

SEQ ID NO: 6354 - protein, 13 aa, synthetic construct
AHGAGGDTPDKLI

SEQ ID NO: 6355 - protein, 14 aa, synthetic construct
AHGEHPYWGIYTDK

SEQ ID NO: 6356 - protein, 13 aa, synthetic construct
AHGEGGDTPHKLI

SEQ ID NO: 6357 - protein, 13 aa, synthetic construct
AHGEGGDTPDKLI

SEQ ID NO: 6358 - protein, 14 aa, synthetic construct
AHGDLTGGYAEKLI

SEQ ID NO: 6359 - protein, 12 aa, synthetic construct
AHGDLLHTDKLI

SEQ ID NO: 6360 - protein, 12 aa, synthetic construct
AHGDLGSTDKLI

SEQ ID NO: 6361 - protein, 14 aa, synthetic construct
AHGDLAGGYDDKHI

SEQ ID NO: 6362 - protein, 13 aa, synthetic construct
AHGDITFLPDKLI

SEQ ID NO: 6363 - protein, 12 aa, synthetic construct
AHGAGGYTDKLN

SEQ ID NO: 6364 - protein, 13 aa, synthetic construct
AHGAGGYAGDILI

SEQ ID NO: 6365 - protein, 12 aa, synthetic construct
AHAELLQTDTLI

SEQ ID NO: 6366 - protein, 12 aa, synthetic construct
AGGDLAWGSSTD

SEQ ID NO: 6367 - protein, 12 aa, synthetic construct
AGGVVGWAGVGF

SEQ ID NO: 6368 - protein, 13 aa, synthetic construct
AGGRAFLLTLYTD

SEQ ID NO: 6369 - protein, 14 aa, synthetic construct
AGGQLARGYYDKLI

SEQ ID NO: 6370 - protein, 11 aa, synthetic construct
AGGGGDTEIVI

SEQ ID NO: 6371 - protein, 10 aa, synthetic construct
AGGGACWAWG

SEQ ID NO: 6372 - protein, 11 aa, synthetic construct
AGGEPPSYVLG

SEQ ID NO: 6373 - protein, 11 aa, synthetic construct
AGGEPPSGGLG

SEQ ID NO: 6374 - protein, 12 aa, synthetic construct
AGGELWLADIVI

SEQ ID NO: 6375 - protein, 14 aa, synthetic construct
AGGELGTGGYAAKL

SEQ ID NO: 6376 - protein, 13 aa, synthetic construct
AGGEGGETPDQLI

SEQ ID NO: 6377 - protein, 14 aa, synthetic construct
AIGALLPTFRGPDK

SEQ ID NO: 6378 - protein, 13 aa, synthetic construct
AIGAPPSYILGEI

SEQ ID NO: 6379 - protein, 14 aa, synthetic construct
AIGDIVLGDTDKLI

SEQ ID NO: 6380 - protein, 13 aa, synthetic construct
AIGEPPTYVLGDT

SEQ ID NO: 6381 - protein, 14 aa, synthetic construct
AIGEVAWGSYTDKL

SEQ ID NO: 6382 - protein, 14 aa, synthetic construct
AIGEVAVPRIHTDK

SEQ ID NO: 6383 - protein, 14 aa, synthetic construct
AIGETVLGLIYTDK

SEQ ID NO: 6384 - protein, 14 aa, synthetic construct
AIGERTGGYLGSWD

SEQ ID NO: 6385 - protein, 14 aa, synthetic construct
AIGERTAGYLGSWD

SEQ ID NO: 6386 - protein, 14 aa, synthetic construct
AIGERPSYLLGTPI

SEQ ID NO: 6387 - protein, 12 aa, synthetic construct
AIGEQGTTINSS

SEQ ID NO: 6388 - protein, 12 aa, synthetic construct
AIGEQGINLLGE

SEQ ID NO: 6389 - protein, 14 aa, synthetic construct
AIGEPVLGDIYTDK

SEQ ID NO: 6390 - protein, 8 aa, synthetic construct
AIGEPVLG

SEQ ID NO: 6391 - protein, 14 aa, synthetic construct
AIGEPPSYVLRDTD

SEQ ID NO: 6392 - protein, 13 aa, synthetic construct
AIGEVHKDTDKLI

SEQ ID NO: 6393 - protein, 14 aa, synthetic construct
AIGEPPSYVLGTPI

SEQ ID NO: 6394 - protein, 13 aa, synthetic construct
AIGEPPSYVLGTP

SEQ ID NO: 6395 - protein, 14 aa, synthetic construct
AIGEPPSYLLGDTD

SEQ ID NO: 6396 - protein, 12 aa, synthetic construct
AIGEPGPTINSS

SEQ ID NO: 6397 - protein, 12 aa, synthetic construct
AIGEPGNTIYSS

SEQ ID NO: 6398 - protein, 14 aa, synthetic construct
AIGEPGLPLMGDTD

SEQ ID NO: 6399 - protein, 14 aa, synthetic construct
AIGEPGLHLLGDTD

SEQ ID NO: 6400 - protein, 12 aa, synthetic construct
AIGEPATTINTS

SEQ ID NO: 6401 - protein, 13 aa, synthetic construct
AIGENANSGINTD

SEQ ID NO: 6402 - protein, 13 aa, synthetic construct
AIGELWVIRSKLI

SEQ ID NO: 6403 - protein, 14 aa, synthetic construct
AIGEVGTGGYADKL

SEQ ID NO: 6404 - protein, 13 aa, synthetic construct
AIGEVHTDTDKLI

SEQ ID NO: 6405 - protein, 13 aa, synthetic construct
AIGELWGIRSKLI

SEQ ID NO: 6406 - protein, 13 aa, synthetic construct
AIGVHPSYVLWEI

SEQ ID NO: 6407 - protein, 13 aa, synthetic construct
AIREVPKDTDKLI

SEQ ID NO: 6408 - protein, 14 aa, synthetic construct
AIRDVERGIMGTDK

SEQ ID NO: 6409 - protein, 14 aa, synthetic construct
AILQLVWGTTAKLI

SEQ ID NO: 6410 - protein, 13 aa, synthetic construct
AIGVPPYYVLGEI

SEQ ID NO: 6411 - protein, 13 aa, synthetic construct
AIGVPPSYVLWEI

SEQ ID NO: 6412 - protein, 13 aa, synthetic construct
AIGVPPSYVLGEI

SEQ ID NO: 6413 - protein, 11 aa, synthetic construct
AIGVPPSYVLG

SEQ ID NO: 6414 - protein, 11 aa, synthetic construct
AIGVPLHTDQL

SEQ ID NO: 6415 - protein, 13 aa, synthetic construct
AIGVPHSYVLWEI

SEQ ID NO: 6416 - protein, 8 aa, synthetic construct
AIGVHPTY

SEQ ID NO: 6417 - protein, 13 aa, synthetic construct
AIGVHPSYVLGEI

SEQ ID NO: 6418 - protein, 13 aa, synthetic construct
AIGEVPTDTDKLF

SEQ ID NO: 6419 - protein, 14 aa, synthetic construct
AIGRAFILTLYTYK

SEQ ID NO: 6420 - protein, 13 aa, synthetic construct
AIGQVGDTPDKLI

SEQ ID NO: 6421 - protein, 12 aa, synthetic construct
AIGPGGYTDKLI

SEQ ID NO: 6422 - protein, 14 aa, synthetic construct
AIGGPSWYWWIPDK

SEQ ID NO: 6423 - protein, 13 aa, synthetic construct
AIGGLLGDTDKLI

SEQ ID NO: 6424 - protein, 14 aa, synthetic construct
AIGGLGDTYPDKLI

SEQ ID NO: 6425 - protein, 12 aa, synthetic construct
AIGGGGYTVKLI

SEQ ID NO: 6426 - protein, 12 aa, synthetic construct
AIGEVWIHDKLI

SEQ ID NO: 6427 - protein, 13 aa, synthetic construct
AIGEVWGIRSKLI

SEQ ID NO: 6428 - protein, 13 aa, synthetic construct
AIGEVWGIRSKII

SEQ ID NO: 6429 - protein, 12 aa, synthetic construct
AIGELWIHDKAI

SEQ ID NO: 6430 - protein, 14 aa, synthetic construct
AIGELVWVTTDKLI

SEQ ID NO: 6431 - protein, 14 aa, synthetic construct
AIGDLAWGSYTDKL

SEQ ID NO: 6432 - protein, 14 aa, synthetic construct
AIGEIANWGIKTDK

SEQ ID NO: 6433 - protein, 13 aa, synthetic construct
AIGELGDKYEKLI

SEQ ID NO: 6434 - protein, 13 aa, synthetic construct
AIGELGDKDDILI

SEQ ID NO: 6435 - protein, 14 aa, synthetic construct
AIGELFILGDTDKL

SEQ ID NO: 6436 - protein, 14 aa, synthetic construct
AIGELDWGSYTDKL

SEQ ID NO: 6437 - protein, 14 aa, synthetic construct
AIGELCNGVYSNKL

SEQ ID NO: 6438 - protein, 14 aa, synthetic construct
AIGELCMGDTLATA

SEQ ID NO: 6439 - protein, 14 aa, synthetic construct
AIGELAWGSYTDIL

SEQ ID NO: 6440 - protein, 14 aa, synthetic construct
AIGELAWGSYSDKL

SEQ ID NO: 6441 - protein, 14 aa, synthetic construct
AIGELALPGIQNDK

SEQ ID NO: 6442 - protein, 14 aa, synthetic construct
AIGELALPGINTDK

SEQ ID NO: 6443 - protein, 13 aa, synthetic construct
AIGEHTRGCTDKL

SEQ ID NO: 6444 - protein, 12 aa, synthetic construct
AIGELGDTDKII

SEQ ID NO: 6445 - protein, 11 aa, synthetic construct
AIGEGDTVKLI

SEQ ID NO: 6446 - protein, 11 aa, synthetic construct
AIGEGDTDKLN

SEQ ID NO: 6447 - protein, 11 aa, synthetic construct
AIGEGDTDKLI

SEQ ID NO: 6448 - protein, 11 aa, synthetic construct
AIGEGDNDKIN

SEQ ID NO: 6449 - protein, 14 aa, synthetic construct
AIGDVLLGDTDKLI

SEQ ID NO: 6450 - protein, 13 aa, synthetic construct
AIGDVLGDTDKLN

SEQ ID NO: 6451 - protein, 14 aa, synthetic construct
AIGDPTVGWTDKLI

SEQ ID NO: 6452 - protein, 14 aa, synthetic construct
AIGDLVWGPNDDLI

SEQ ID NO: 6453 - protein, 13 aa, synthetic construct
AIGDLGDKDDKLI

SEQ ID NO: 6454 - protein, 14 aa, synthetic construct
AIGDLFLLGDTDKL

SEQ ID NO: 6455 - protein, 13 aa, synthetic construct
AIGELGDSSWYTR

SEQ ID NO: 6456 - protein, 14 aa, synthetic construct
AIGELGDTYPDILI

SEQ ID NO: 6457 - protein, 13 aa, synthetic construct
AIGELVWGYYYKL

SEQ ID NO: 6458 - protein, 13 aa, synthetic construct
AIGELNVLAENLI

SEQ ID NO: 6459 - protein, 14 aa, synthetic construct
AIGELVLGDTDKLI

SEQ ID NO: 6460 - protein, 14 aa, synthetic construct
AIGELVLGDTDILI

SEQ ID NO: 6461 - protein, 14 aa, synthetic construct
AIGELTGGYADKLI

SEQ ID NO: 6462 - protein, 14 aa, synthetic construct
AIGELTGGYADKHI

SEQ ID NO: 6463 - protein, 13 aa, synthetic construct
AIGELTFITDKLI

SEQ ID NO: 6464 - protein, 14 aa, synthetic construct
AIGELSLRGIHTDK

SEQ ID NO: 6465 - protein, 14 aa, synthetic construct
AIGELRRVYAYILM

SEQ ID NO: 6466 - protein, 12 aa, synthetic construct
AIGELRINDKLI

SEQ ID NO: 6467 - protein, 14 aa, synthetic construct
AIGELREGEKNKLI

SEQ ID NO: 6468 - protein, 14 aa, synthetic construct
AIGELREGDKNKIN

SEQ ID NO: 6469 - protein, 13 aa, synthetic construct
AIGELLRDTDKLI

SEQ ID NO: 6470 - protein, 14 aa, synthetic construct
AIGELGDTYTDKLI

SEQ ID NO: 6471 - protein, 12 aa, synthetic construct
AIGELLNTDKLI

SEQ ID NO: 6472 - protein, 14 aa, synthetic construct
AIGELLGDTYTDKL

SEQ ID NO: 6473 - protein, 13 aa, synthetic construct
AIGELLGDTDKII

SEQ ID NO: 6474 - protein, 13 aa, synthetic construct
AIGELLEDTDKLI

SEQ ID NO: 6475 - protein, 12 aa, synthetic construct
AIGELGYTDILI

SEQ ID NO: 6476 - protein, 13 aa, synthetic construct
AIGELGTGGYADK

SEQ ID NO: 6477 - protein, 12 aa, synthetic construct
AIGELGSTEKLI

SEQ ID NO: 6478 - protein, 14 aa, synthetic construct
AIGELGKGGYADKL

SEQ ID NO: 6479 - protein, 13 aa, synthetic construct
AIGELGGGYDDKL

SEQ ID NO: 6480 - protein, 12 aa, synthetic construct
AIGELGGGYDDK

SEQ ID NO: 6481 - protein, 14 aa, synthetic construct
ALGALALPGIHPDK

SEQ ID NO: 6482 - protein, 14 aa, synthetic construct
ALGALALPGIHTEK

SEQ ID NO: 6483 - protein, 13 aa, synthetic construct
ALGDLLGDTDKLN

SEQ ID NO: 6484 - protein, 13 aa, synthetic construct
ALGDLGDRSWHTR

SEQ ID NO: 6485 - protein, 11 aa, synthetic construct
ALGDLFLLGDT

SEQ ID NO: 6486 - protein, 14 aa, synthetic construct
ALGDLFLLGDSDKL

SEQ ID NO: 6487 - protein, 14 aa, synthetic construct
ALGDLFLLGDPDKL

SEQ ID NO: 6488 - protein, 14 aa, synthetic construct
ALGDLEWGVRGTDK

SEQ ID NO: 6489 - protein, 14 aa, synthetic construct
ALGDLEWGTPINSS

SEQ ID NO: 6490 - protein, 14 aa, synthetic construct
ALGDLEWGMRGPDK

SEQ ID NO: 6491 - protein, 13 aa, synthetic construct
ALGDLEWGLRGTD

SEQ ID NO: 6492 - protein, 13 aa, synthetic construct
ALGDLEWGKRGTD

SEQ ID NO: 6493 - protein, 14 aa, synthetic construct
ALGDLEWGIWGTDK

SEQ ID NO: 6494 - protein, 14 aa, synthetic construct
ALGDLEWGIRTDKL

SEQ ID NO: 6495 - protein, 14 aa, synthetic construct
ALGDLEWGIRGTDQ

SEQ ID NO: 6496 - protein, 14 aa, synthetic construct
ALGDLEWGIRGADK

SEQ ID NO: 6497 - protein, 14 aa, synthetic construct
ALGDLEWGIRDTDK

SEQ ID NO: 6498 - protein, 14 aa, synthetic construct
ALGDLEWGIPIKSS

SEQ ID NO: 6499 - protein, 14 aa, synthetic construct
ALGDLEWGILGLLG

SEQ ID NO: 6500 - protein, 12 aa, synthetic construct
ALGDLESTDKLI

SEQ ID NO: 6501 - protein, 14 aa, synthetic construct
ALGDLESLGYTDKL

SEQ ID NO: 6502 - protein, 13 aa, synthetic construct
ALGDLERGIRGTD

SEQ ID NO: 6503 - protein, 14 aa, synthetic construct
ALGDLEIGEQYKLI

SEQ ID NO: 6504 - protein, 13 aa, synthetic construct
ALGDLDWGTTDKL

SEQ ID NO: 6505 - protein, 14 aa, synthetic construct
ALGDLDWGSYTDKL

SEQ ID NO: 6506 - protein, 14 aa, synthetic construct
ALGDLDGGYDDKLI

SEQ ID NO: 6507 - protein, 14 aa, synthetic construct
ALGDLCVGETLATA

SEQ ID NO: 6508 - protein, 14 aa, synthetic construct
ALGDLFLLGDTVKL

SEQ ID NO: 6509 - protein, 14 aa, synthetic construct
ALGDLFLMGDTDKL

SEQ ID NO: 6510 - protein, 14 aa, synthetic construct
ALGDLFLQGDTGKL

SEQ ID NO: 6511 - protein, 13 aa, synthetic construct
ALGDLGDKDENLI

SEQ ID NO: 6512 - protein, 13 aa, synthetic construct
ALGDLGDRDETLI

SEQ ID NO: 6513 - protein, 14 aa, synthetic construct
ALGDLGDPYPDKLI

SEQ ID NO: 6514 - protein, 14 aa, synthetic construct
ALGDLGDPSPENLI

SEQ ID NO: 6515 - protein, 13 aa, synthetic construct
ALGDLGDNNPDKL

SEQ ID NO: 6516 - protein, 13 aa, synthetic construct
ALGDLGDMDDKLI

SEQ ID NO: 6517 - protein, 14 aa, synthetic construct
ALGDLGDKYPDQLI

SEQ ID NO: 6518 - protein, 12 aa, synthetic construct
ALGDLGDKNKLI

SEQ ID NO: 6519 - protein, 13 aa, synthetic construct
ALGDLGDKFDQLI

SEQ ID NO: 6520 - protein, 13 aa, synthetic construct
ALGDLGDKDYTLI

SEQ ID NO: 6521 - protein, 13 aa, synthetic construct
ALGDLGDKDVKLI

SEQ ID NO: 6522 - protein, 13 aa, synthetic construct
ALGDLGDKDEKLI

SEQ ID NO: 6523 - protein, 13 aa, synthetic construct
ALGDLGASSWDTR

SEQ ID NO: 6524 - protein, 13 aa, synthetic construct
ALGDLGDKDDQLF

SEQ ID NO: 6525 - protein, 12 aa, synthetic construct
ALGDLGDKDDKL

SEQ ID NO: 6526 - protein, 13 aa, synthetic construct
ALGDLGDKDDKII

SEQ ID NO: 6527 - protein, 13 aa, synthetic construct
ALGDLGDKDDKHI

SEQ ID NO: 6528 - protein, 13 aa, synthetic construct
ALGDLGDKDDILI

SEQ ID NO: 6529 - protein, 13 aa, synthetic construct
ALGDLGDGSWDTR

SEQ ID NO: 6530 - protein, 14 aa, synthetic construct
ALGDLGATYPDKLI

SEQ ID NO: 6531 - protein, 12 aa, synthetic construct
ALGDLGATDTLI

SEQ ID NO: 6532 - protein, 12 aa, synthetic construct
ALGDLGATDQLI

SEQ ID NO: 6533 - protein, 12 aa, synthetic construct
ALGDLGATDKLS

SEQ ID NO: 6534 - protein, 14 aa, synthetic construct
ALGDLCLRDTLATA

SEQ ID NO: 6535 - protein, 14 aa, synthetic construct
ALGDLCLGDTPINS

SEQ ID NO: 6536 - protein, 13 aa, synthetic construct
ALGDLCLGDTLAT

SEQ ID NO: 6537 - protein, 12 aa, synthetic construct
ALGDIGSTEKEN

SEQ ID NO: 6538 - protein, 13 aa, synthetic construct
ALGDLADSSWDTR

SEQ ID NO: 6539 - protein, 13 aa, synthetic construct
ALGDIWGIRSKLI

SEQ ID NO: 6540 - protein, 14 aa, synthetic construct
ALGDIVSLGYTDKL

SEQ ID NO: 6541 - protein, 14 aa, synthetic construct
ALGDIVLGDTDKLI

SEQ ID NO: 6542 - protein, 14 aa, synthetic construct
ALGDISLRGIHTDK

SEQ ID NO: 6543 - protein, 13 aa, synthetic construct
ALGDIPDRWIRTD

SEQ ID NO: 6544 - protein, 14 aa, synthetic construct
ALGDILLLGDTDKL

SEQ ID NO: 6545 - protein, 12 aa, synthetic construct
ALGDILHTDKLN

SEQ ID NO: 6546 - protein, 13 aa, synthetic construct
ALGDILGDTDQLI

SEQ ID NO: 6547 - protein, 9 aa, synthetic construct
ALGDIGTGG

SEQ ID NO: 6548 - protein, 12 aa, synthetic construct
ALGDIGSTDKLN

SEQ ID NO: 6549 - protein, 8 aa, synthetic construct
ALGDLAFP

SEQ ID NO: 6550 - protein, 12 aa, synthetic construct
ALGDIGSTDKFI

SEQ ID NO: 6551 - protein, 13 aa, synthetic construct
ALGDIGDSSWDTR

SEQ ID NO: 6552 - protein, 13 aa, synthetic construct
ALGDIGDRSLDTR

SEQ ID NO: 6553 - protein, 11 aa, synthetic construct
ALGDIFLLADT

SEQ ID NO: 6554 - protein, 14 aa, synthetic construct
ALGDIFILGDTHKL

SEQ ID NO: 6555 - protein, 14 aa, synthetic construct
ALGDIEWGMRGTDK

SEQ ID NO: 6556 - protein, 14 aa, synthetic construct
ALGDIEWGIRGTDK

SEQ ID NO: 6557 - protein, 10 aa, synthetic construct
ALGDIERDTN

SEQ ID NO: 6558 - protein, 12 aa, synthetic construct
ALGDICIQDKLI

SEQ ID NO: 6559 - protein, 14 aa, synthetic construct
ALGDIAWGSYTDIL

SEQ ID NO: 6560 - protein, 14 aa, synthetic construct
ALGDLAFAYGGTPD

SEQ ID NO: 6561 - protein, 14 aa, synthetic construct
ALGDLAGGSYTDQL

SEQ ID NO: 6562 - protein, 14 aa, synthetic construct
ALGDLCLGDGPINS

SEQ ID NO: 6563 - protein, 10 aa, synthetic construct
ALGDLATTDK

SEQ ID NO: 6564 - protein, 12 aa, synthetic construct
ALGDLCIHEKLI

SEQ ID NO: 6565 - protein, 14 aa, synthetic construct
ALGDLAWGSYTDQL

SEQ ID NO: 6566 - protein, 13 aa, synthetic construct
ALGDLAWGSYTDK

SEQ ID NO: 6567 - protein, 14 aa, synthetic construct
ALGDLAWGSYTAKL

SEQ ID NO: 6568 - protein, 14 aa, synthetic construct
ALGDLAWGSYSDKL

SEQ ID NO: 6569 - protein, 14 aa, synthetic construct
ALGDLAWGSYIDKL

SEQ ID NO: 6570 - protein, 14 aa, synthetic construct
ALGDLAWGPYTDKL

SEQ ID NO: 6571 - protein, 14 aa, synthetic construct
ALGDLAWGIRSKLI

SEQ ID NO: 6572 - protein, 14 aa, synthetic construct
ALGDLAWGAYTDKL

SEQ ID NO: 6573 - protein, 8 aa, synthetic construct
ALGDLAWG

SEQ ID NO: 6574 - protein, 14 aa, synthetic construct
ALGDLATAGYADKL

SEQ ID NO: 6575 - protein, 14 aa, synthetic construct
ALGDLAGGYADKLI

SEQ ID NO: 6576 - protein, 12 aa, synthetic construct
ALGDLASTDQLI

SEQ ID NO: 6577 - protein, 12 aa, synthetic construct
ALGDLASTDKSI

SEQ ID NO: 6578 - protein, 14 aa, synthetic construct
ALGDLASLGYTDKL

SEQ ID NO: 6579 - protein, 14 aa, synthetic construct
ALGDLARGSYTDQL

SEQ ID NO: 6580 - protein, 14 aa, synthetic construct
ALGDLAPPGIHTDK

SEQ ID NO: 6581 - protein, 14 aa, synthetic construct
ALGDLALPGIRTDK

SEQ ID NO: 6582 - protein, 14 aa, synthetic construct
ALGDLALPGILTDK

SEQ ID NO: 6583 - protein, 14 aa, synthetic construct
ALGDLAIPGIHTDK

SEQ ID NO: 6584 - protein, 13 aa, synthetic construct
ALGDLAIPGIHTD

SEQ ID NO: 6585 - protein, 14 aa, synthetic construct
ALGDLAGGYDDKLI

SEQ ID NO: 6586 - protein, 13 aa, synthetic construct
ALGDLGDRSWDTR

SEQ ID NO: 6587 - protein, 13 aa, synthetic construct
ALGDLGDSSWDAR

SEQ ID NO: 6588 - protein, 14 aa, synthetic construct
ALGALANWGLNTDK

SEQ ID NO: 6589 - protein, 13 aa, synthetic construct
ALGDLGDSSWGTR

SEQ ID NO: 6590 - protein, 12 aa, synthetic construct
ALGDLGSTDKVI

SEQ ID NO: 6591 - protein, 12 aa, synthetic construct
ALGDLGSTDKLS

SEQ ID NO: 6592 - protein, 12 aa, synthetic construct
ALGDLGSTDKLF

SEQ ID NO: 6593 - protein, 11 aa, synthetic construct
ALGDLGSTDKL

SEQ ID NO: 6594 - protein, 12 aa, synthetic construct
ALGDLGSTDILI

SEQ ID NO: 6595 - protein, 12 aa, synthetic construct
ALGDLGSTAIVI

SEQ ID NO: 6596 - protein, 14 aa, synthetic construct
ALGDLGSGGYADKL

SEQ ID NO: 6597 - protein, 14 aa, synthetic construct
ALGDLGRYARTDKL

SEQ ID NO: 6598 - protein, 14 aa, synthetic construct
ALGDLGPWGYADKL

SEQ ID NO: 6599 - protein, 12 aa, synthetic construct
ALGDLGPTDKLI

SEQ ID NO: 6600 - protein, 14 aa, synthetic construct
ALGDLGPGVYEDKL

SEQ ID NO: 6601 - protein, 14 aa, synthetic construct
ALGDLGPGGYEDKL

SEQ ID NO: 6602 - protein, 14 aa, synthetic construct
ALGDLGPGGYAHKL

SEQ ID NO: 6603 - protein, 13 aa, synthetic construct
ALGDLGNKDDKLI

SEQ ID NO: 6604 - protein, 7 aa, synthetic construct
ALGDLGL

SEQ ID NO: 6605 - protein, 13 aa, synthetic construct
ALGDLGHSSCDNR

SEQ ID NO: 6606 - protein, 14 aa, synthetic construct
ALGDLGHGGYADKL

SEQ ID NO: 6607 - protein, 14 aa, synthetic construct
ALGDLGGYSRTDKL

SEQ ID NO: 6608 - protein, 14 aa, synthetic construct
ALGDLGGYGAPINS

SEQ ID NO: 6609 - protein, 14 aa, synthetic construct
ALGDLGGYDRTDKL

SEQ ID NO: 6610 - protein, 12 aa, synthetic construct
ALGDLGGYARTD

SEQ ID NO: 6611 - protein, 14 aa, synthetic construct
ALGDLGGYARADKL

SEQ ID NO: 6612 - protein, 14 aa, synthetic construct
ALGDLGGYAPTDKL

SEQ ID NO: 6613 - protein, 12 aa, synthetic construct
ALGDLGSTDNLI

SEQ ID NO: 6614 - protein, 12 aa, synthetic construct
ALGDLGSTDQHI

SEQ ID NO: 6615 - protein, 12 aa, synthetic construct
ALGDLGSTETLI

SEQ ID NO: 6616 - protein, 7 aa, synthetic construct
ALGDLLG

SEQ ID NO: 6617 - protein, 12 aa, synthetic construct
ALGDLLGDTDKL

SEQ ID NO: 6618 - protein, 13 aa, synthetic construct
ALGDLLGDTDKIY

SEQ ID NO: 6619 - protein, 13 aa, synthetic construct
ALGDLLGDTDKII

SEQ ID NO: 6620 - protein, 13 aa, synthetic construct
ALGDLLGDTDKHI

SEQ ID NO: 6621 - protein, 9 aa, synthetic construct
ALGDLLGDT

SEQ ID NO: 6622 - protein, 13 aa, synthetic construct
ALGDLLGDNDKLI

SEQ ID NO: 6623 - protein, 13 aa, synthetic construct
ALGDLLGDADKLI

SEQ ID NO: 6624 - protein, 13 aa, synthetic construct
ALGDLLGATENLL

SEQ ID NO: 6625 - protein, 13 aa, synthetic construct
ALGDLLGATDQLI

SEQ ID NO: 6626 - protein, 13 aa, synthetic construct
ALGDLLGATDQII

SEQ ID NO: 6627 - protein, 12 aa, synthetic construct
ALGDLIHTDTLI

SEQ ID NO: 6628 - protein, 12 aa, synthetic construct
ALGDLGSTHKHI

SEQ ID NO: 6629 - protein, 12 aa, synthetic construct
ALGDLGYTDKLI

SEQ ID NO: 6630 - protein, 14 aa, synthetic construct
ALGDLGWGTTDKLI

SEQ ID NO: 6631 - protein, 14 aa, synthetic construct
ALGDLGVTYPEILI

SEQ ID NO: 6632 - protein, 12 aa, synthetic construct
ALGDLGVTDNLI

SEQ ID NO: 6633 - protein, 13 aa, synthetic construct
ALGDLGVKDDQLI

SEQ ID NO: 6634 - protein, 14 aa, synthetic construct
ALGDLGVAYDDKLI

SEQ ID NO: 6635 - protein, 12 aa, synthetic construct
ALGDLGTTDTLI

SEQ ID NO: 6636 - protein, 14 aa, synthetic construct
ALGDLGTGGYPDKL

SEQ ID NO: 6637 - protein, 14 aa, synthetic construct
ALGDLGTGGYANKL

SEQ ID NO: 6638 - protein, 14 aa, synthetic construct
ALGDLGTGGYAAKL

SEQ ID NO: 6639 - protein, 14 aa, synthetic construct
ALGDLGGTLAPINS

SEQ ID NO: 6640 - protein, 13 aa, synthetic construct
ALGDLGGSSWDPR

SEQ ID NO: 6641 - protein, 14 aa, synthetic construct
ALGDLGGSARTDKL

SEQ ID NO: 6642 - protein, 14 aa, synthetic construct
ALGDLGDTYPAKLI

SEQ ID NO: 6643 - protein, 13 aa, synthetic construct
ALGDLGEKDDKLI

SEQ ID NO: 6644 - protein, 14 aa, synthetic construct
ALGDLGEGDKNKLI

SEQ ID NO: 6645 - protein, 14 aa, synthetic construct
ALGDLGDTYTDKLI

SEQ ID NO: 6646 - protein, 14 aa, synthetic construct
ALGDLGDTYPGKLI

SEQ ID NO: 6647 - protein, 14 aa, synthetic construct
ALGDLGDTYPENLI

SEQ ID NO: 6648 - protein, 14 aa, synthetic construct
ALGDLGDTYPEILI

SEQ ID NO: 6649 - protein, 14 aa, synthetic construct
ALGDLGDTYPDRLI

SEQ ID NO: 6650 - protein, 14 aa, synthetic construct
ALGDLGDTYPDNLI

SEQ ID NO: 6651 - protein, 14 aa, synthetic construct
ALGDLGDTYPDKVI

SEQ ID NO: 6652 - protein, 14 aa, synthetic construct
ALGDLGDTYPDKPI

SEQ ID NO: 6653 - protein, 13 aa, synthetic construct
ALGDLGDTRINSS

SEQ ID NO: 6654 - protein, 13 aa, synthetic construct
ALGDLGETDDQLI

SEQ ID NO: 6655 - protein, 14 aa, synthetic construct
ALGDLGDTLAPINS

SEQ ID NO: 6656 - protein, 13 aa, synthetic construct
ALGDLGDTHRYTH

SEQ ID NO: 6657 - protein, 13 aa, synthetic construct
ALGDLGDTGRETH

SEQ ID NO: 6658 - protein, 12 aa, synthetic construct
ALGDLGDTGKLI

SEQ ID NO: 6659 - protein, 12 aa, synthetic construct
ALGDLGDTENRF

SEQ ID NO: 6660 - protein, 12 aa, synthetic construct
ALGDLGDTDRLI

SEQ ID NO: 6661 - protein, 12 aa, synthetic construct
ALGDLGDTDNLI

SEQ ID NO: 6662 - protein, 12 aa, synthetic construct
ALGDLGDTDKRI

SEQ ID NO: 6663 - protein, 12 aa, synthetic construct
ALGDLGDTDKLV

SEQ ID NO: 6664 - protein, 12 aa, synthetic construct
ALGDLGDTDKFI

SEQ ID NO: 6665 - protein, 13 aa, synthetic construct
ALGDLGETDDHLI

SEQ ID NO: 6666 - protein, 14 aa, synthetic construct
ALGDLGETLATPQL

SEQ ID NO: 6667 - protein, 14 aa, synthetic construct
ALGDLGGRYDDKLI

SEQ ID NO: 6668 - protein, 14 aa, synthetic construct
ALGDLGGGYDNKLI

SEQ ID NO: 6669 - protein, 13 aa, synthetic construct
ALGDLGGRSWDTR

SEQ ID NO: 6670 - protein, 13 aa, synthetic construct
ALGDLGGIRSQLI

SEQ ID NO: 6671 - protein, 13 aa, synthetic construct
ALGDLGGIRSKLI

SEQ ID NO: 6672 - protein, 13 aa, synthetic construct
ALGDLGGIRRQLI

SEQ ID NO: 6673 - protein, 14 aa, synthetic construct
ALGDLGGGYYYKLI

SEQ ID NO: 6674 - protein, 14 aa, synthetic construct
ALGDLGGGYTDKLI

SEQ ID NO: 6675 - protein, 14 aa, synthetic construct
ALGDLGGGYHDKII

SEQ ID NO: 6676 - protein, 14 aa, synthetic construct
ALGDLGGGYDYKLI

SEQ ID NO: 6677 - protein, 14 aa, synthetic construct
ALGDLGGGYDYKLF

SEQ ID NO: 6678 - protein, 14 aa, synthetic construct
ALGDLGGGYDVKLI

SEQ ID NO: 6679 - protein, 13 aa, synthetic construct
ALGDLGGGYDEKL

SEQ ID NO: 6680 - protein, 13 aa, synthetic construct
ALGDLGGGCDDKL

SEQ ID NO: 6681 - protein, 14 aa, synthetic construct
ALGDLGGGYDDKVI

SEQ ID NO: 6682 - protein, 14 aa, synthetic construct
ALGDLGGGYDDKPI

SEQ ID NO: 6683 - protein, 14 aa, synthetic construct
ALGDLGGGYDDKLV

SEQ ID NO: 6684 - protein, 13 aa, synthetic construct
ALGDLGGGYDDKL

SEQ ID NO: 6685 - protein, 14 aa, synthetic construct
ALGDLGGGYDAQLI

SEQ ID NO: 6686 - protein, 14 aa, synthetic construct
ALGDLGGGYADKLI

SEQ ID NO: 6687 - protein, 14 aa, synthetic construct
ALGDLGGGWTDKLI

SEQ ID NO: 6688 - protein, 14 aa, synthetic construct
ALGDLGGGQLINSS

SEQ ID NO: 6689 - protein, 14 aa, synthetic construct
ALGDLGGGDVESLI

SEQ ID NO: 6690 - protein, 14 aa, synthetic construct
ALGDLGGGDDAKLI

SEQ ID NO: 6691 - protein, 14 aa, synthetic construct
ALGDIAWASITDKL

SEQ ID NO: 6692 - protein, 14 aa, synthetic construct
ALGDIATWGRYTDK

SEQ ID NO: 6693 - protein, 14 aa, synthetic construct
ALGDIANWGTNTDK

SEQ ID NO: 6694 - protein, 13 aa, synthetic construct
ALGDIANWGRITD

SEQ ID NO: 6695 - protein, 14 aa, synthetic construct
ALGALSGGYAAKLI

SEQ ID NO: 6696 - protein, 14 aa, synthetic construct
ALGALREGVKNQLI

SEQ ID NO: 6697 - protein, 14 aa, synthetic construct
ALGALREGDTNQLI

SEQ ID NO: 6698 - protein, 14 aa, synthetic construct
ALGALREGDQQKLI

SEQ ID NO: 6699 - protein, 14 aa, synthetic construct
ALGALLTTLRGSDK

SEQ ID NO: 6700 - protein, 14 aa, synthetic construct
ALGALLTTIRCTDK

SEQ ID NO: 6701 - protein, 14 aa, synthetic construct
ALGALLTTFRGTDK

SEQ ID NO: 6702 - protein, 10 aa, synthetic construct
ALGALLPTIR

SEQ ID NO: 6703 - protein, 14 aa, synthetic construct
ALGALLPTFWGTDK

SEQ ID NO: 6704 - protein, 14 aa, synthetic construct
ALGALLPTFRGSDK

SEQ ID NO: 6705 - protein, 14 aa, synthetic construct
ALGALLPTFRGNDK

SEQ ID NO: 6706 - protein, 14 aa, synthetic construct
ALGALLPTFRGIDK

SEQ ID NO: 6707 - protein, 13 aa, synthetic construct
ALGALLPTFRGAD

SEQ ID NO: 6708 - protein, 13 aa, synthetic construct
ALGALLPTFRCTD

SEQ ID NO: 6709 - protein, 14 aa, synthetic construct
ALGALLPTFRATDK

SEQ ID NO: 6710 - protein, 13 aa, synthetic construct
ALGALLPTFRATD

SEQ ID NO: 6711 - protein, 10 aa, synthetic construct
ALGALLPTFR

SEQ ID NO: 6712 - protein, 14 aa, synthetic construct
ALGALLPTFQGTDK

SEQ ID NO: 6713 - protein, 14 aa, synthetic construct
ALGALLPTFPGTDK

SEQ ID NO: 6714 - protein, 14 aa, synthetic construct
ALGALLPTFLCTDK

SEQ ID NO: 6715 - protein, 14 aa, synthetic construct
ALGALLPTFGGTDQ

SEQ ID NO: 6716 - protein, 13 aa, synthetic construct
ALGALLPRLRGTD

SEQ ID NO: 6717 - protein, 13 aa, synthetic construct
ALGALLPPFRGTD

SEQ ID NO: 6718 - protein, 6 aa, synthetic construct
ALGALT

SEQ ID NO: 6719 - protein, 13 aa, synthetic construct
ALGALTFLPAKLI

SEQ ID NO: 6720 - protein, 13 aa, synthetic construct
ALGALTFLPDKLI

SEQ ID NO: 6721 - protein, 13 aa, synthetic construct
ALGALWGIRRKLI

SEQ ID NO: 6722 - protein, 13 aa, synthetic construct
ALGAPHSYVLGEI

SEQ ID NO: 6723 - protein, 12 aa, synthetic construct
ALGAPGTTINSS

SEQ ID NO: 6724 - protein, 12 aa, synthetic construct
ALGAPELGDLYT

SEQ ID NO: 6725 - protein, 14 aa, synthetic construct
ALGANPYWGIYTDK

SEQ ID NO: 6726 - protein, 12 aa, synthetic construct
ALGALWIHETLI

SEQ ID NO: 6727 - protein, 12 aa, synthetic construct
ALGALWIHEKLI

SEQ ID NO: 6728 - protein, 12 aa, synthetic construct
ALGALWIHDQLI

SEQ ID NO: 6729 - protein, 12 aa, synthetic construct
ALGALWIHDKII

SEQ ID NO: 6730 - protein, 13 aa, synthetic construct
ALGALWGRRSRLI

SEQ ID NO: 6731 - protein, 13 aa, synthetic construct
ALGALWGIRSKLL

SEQ ID NO: 6732 - protein, 14 aa, synthetic construct
ALGALVWGTTDQLI

SEQ ID NO: 6733 - protein, 13 aa, synthetic construct
ALGALTFLPDNLS

SEQ ID NO: 6734 - protein, 13 aa, synthetic construct
ALGALVWGTTDKL

SEQ ID NO: 6735 - protein, 14 aa, synthetic construct
ALGALVSLGYTDQL

SEQ ID NO: 6736 - protein, 13 aa, synthetic construct
ALGALVSLGYTDK

SEQ ID NO: 6737 - protein, 13 aa, synthetic construct
ALGALVPTFRGTD

SEQ ID NO: 6738 - protein, 14 aa, synthetic construct
ALGALVLGDTYKLI

SEQ ID NO: 6739 - protein, 14 aa, synthetic construct
ALGALVGVYDYKLI

SEQ ID NO: 6740 - protein, 12 aa, synthetic construct
ALGALVDRELLI

SEQ ID NO: 6741 - protein, 14 aa, synthetic construct
ALGALTGGYADKLI

SEQ ID NO: 6742 - protein, 14 aa, synthetic construct
ALGALTGGSADQLI

SEQ ID NO: 6743 - protein, 13 aa, synthetic construct
ALGALTFLPETLI

SEQ ID NO: 6744 - protein, 14 aa, synthetic construct
ALGALLPMFRGTDK

SEQ ID NO: 6745 - protein, 14 aa, synthetic construct
ALGALLPLLGDTDK

SEQ ID NO: 6746 - protein, 12 aa, synthetic construct
ALGALLNTDKLI

SEQ ID NO: 6747 - protein, 14 aa, synthetic construct
ALGALGDIYTDKRI

SEQ ID NO: 6748 - protein, 14 aa, synthetic construct
ALGALGETYPEKLI

SEQ ID NO: 6749 - protein, 14 aa, synthetic construct
ALGALGELLWDTDK

SEQ ID NO: 6750 - protein, 14 aa, synthetic construct
ALGALGDTYPDTLI

SEQ ID NO: 6751 - protein, 14 aa, synthetic construct
ALGALGDTYPDQLI

SEQ ID NO: 6752 - protein, 14 aa, synthetic construct
ALGALGDTLATAQL

SEQ ID NO: 6753 - protein, 12 aa, synthetic construct
ALGALGDTDKLI

SEQ ID NO: 6754 - protein, 14 aa, synthetic construct
ALGALGDSYPDKLI

SEQ ID NO: 6755 - protein, 13 aa, synthetic construct
ALGALGDSSWETR

SEQ ID NO: 6756 - protein, 13 aa, synthetic construct
ALGALGDSSWDTR

SEQ ID NO: 6757 - protein, 13 aa, synthetic construct
ALGALGDMDDKLI

SEQ ID NO: 6758 - protein, 14 aa, synthetic construct
ALGALFVLGDTEKL

SEQ ID NO: 6759 - protein, 14 aa, synthetic construct
ALGALGGGYDDKLI

SEQ ID NO: 6760 - protein, 14 aa, synthetic construct
ALGALFVLGDTDKL

SEQ ID NO: 6761 - protein, 14 aa, synthetic construct
ALGALFLLGDTDKL

SEQ ID NO: 6762 - protein, 14 aa, synthetic construct
ALGALEWGIRGTDK

SEQ ID NO: 6763 - protein, 13 aa, synthetic construct
ALGALEWGIRGTD

SEQ ID NO: 6764 - protein, 14 aa, synthetic construct
ALGALEWGIHRQTH

SEQ ID NO: 6765 - protein, 14 aa, synthetic construct
ALGALCLGDTLATA

SEQ ID NO: 6766 - protein, 14 aa, synthetic construct
ALGALAWGSYTEKL

SEQ ID NO: 6767 - protein, 14 aa, synthetic construct
ALGALAWGSYTDTL

SEQ ID NO: 6768 - protein, 8 aa, synthetic construct
ALGALAWG

SEQ ID NO: 6769 - protein, 14 aa, synthetic construct
ALGALARGSYTDKL

SEQ ID NO: 6770 - protein, 12 aa, synthetic construct
ALGALGGDARTD

SEQ ID NO: 6771 - protein, 14 aa, synthetic construct
ALGALGGGYEDKLI

SEQ ID NO: 6772 - protein, 12 aa, synthetic construct
ALGALLHTDNIS

SEQ ID NO: 6773 - protein, 14 aa, synthetic construct
ALGALIPTFLGTDK

SEQ ID NO: 6774 - protein, 12 aa, synthetic construct
ALGALLHTASLI

SEQ ID NO: 6775 - protein, 13 aa, synthetic construct
ALGALLGTPINSA

SEQ ID NO: 6776 - protein, 11 aa, synthetic construct
ALGALLGHPTD

SEQ ID NO: 6777 - protein, 13 aa, synthetic construct
ALGALLGETDKLI

SEQ ID NO: 6778 - protein, 13 aa, synthetic construct
ALGALLGDTEKLI

SEQ ID NO: 6779 - protein, 13 aa, synthetic construct
ALGALLGDTDKII

SEQ ID NO: 6780 - protein, 13 aa, synthetic construct
ALGALLGDTAKLI

SEQ ID NO: 6781 - protein, 14 aa, synthetic construct
ALGALLGDPPDKLI

SEQ ID NO: 6782 - protein, 12 aa, synthetic construct
ALGALLAYTDKL

SEQ ID NO: 6783 - protein, 13 aa, synthetic construct
ALGALIPTFRGTD

SEQ ID NO: 6784 - protein, 14 aa, synthetic construct
ALGALHYRGIGTDK

SEQ ID NO: 6785 - protein, 14 aa, synthetic construct
ALGALGGYARTDKL

SEQ ID NO: 6786 - protein, 12 aa, synthetic construct
ALGALGYTDKLN

SEQ ID NO: 6787 - protein, 13 aa, synthetic construct
ALGALGVTYPDKR

SEQ ID NO: 6788 - protein, 14 aa, synthetic construct
ALGALGTVGYADKL

SEQ ID NO: 6789 - protein, 14 aa, synthetic construct
ALGALGTGGYADKL

SEQ ID NO: 6790 - protein, 14 aa, synthetic construct
ALGALGTGGYAAKL

SEQ ID NO: 6791 - protein, 14 aa, synthetic construct
ALGALGTGGSADKL

SEQ ID NO: 6792 - protein, 12 aa, synthetic construct
ALGALGSTQKLI

SEQ ID NO: 6793 - protein, 12 aa, synthetic construct
ALGALGSTEKLI

SEQ ID NO: 6794 - protein, 12 aa, synthetic construct
ALGALGSTEKHI

SEQ ID NO: 6795 - protein, 14 aa, synthetic construct
ALGALGQGAYADKL

SEQ ID NO: 6796 - protein, 12 aa, synthetic construct
ALGAPLHTEKLN

SEQ ID NO: 6797 - protein, 11 aa, synthetic construct
ALGAPPSYVLG

SEQ ID NO: 6798 - protein, 14 aa, synthetic construct
ALGAPTGGGTDPLF

SEQ ID NO: 6799 - protein, 13 aa, synthetic construct
ALGDGGDTPDKII

SEQ ID NO: 6800 - protein, 13 aa, synthetic construct
ALGDHPNWGIYSD

SEQ ID NO: 6801 - protein, 7 aa, synthetic construct
ALGDHCM

SEQ ID NO: 6802 - protein, 11 aa, synthetic construct
ALGDHAGACKL

SEQ ID NO: 6803 - protein, 14 aa, synthetic construct
ALGDGTGGYLGSWD

SEQ ID NO: 6804 - protein, 12 aa, synthetic construct
ALGDGGYTDKLN

SEQ ID NO: 6805 - protein, 13 aa, synthetic construct
ALGDGGYAGDKLI

SEQ ID NO: 6806 - protein, 13 aa, synthetic construct
ALGDGGVTPDKLI

SEQ ID NO: 6807 - protein, 13 aa, synthetic construct
ALGDGGDTPYKLI

SEQ ID NO: 6808 - protein, 13 aa, synthetic construct
ALGDGGDTPDTLI

SEQ ID NO: 6809 - protein, 13 aa, synthetic construct
ALGDGGDTPDPLI

SEQ ID NO: 6810 - protein, 13 aa, synthetic construct
ALGDGGDTPDELI

SEQ ID NO: 6811 - protein, 13 aa, synthetic construct
ALGDHPSYVLGEI

SEQ ID NO: 6812 - protein, 13 aa, synthetic construct
ALGDGGDSPDKLI

SEQ ID NO: 6813 - protein, 11 aa, synthetic construct
ALGDGDTGKLI

SEQ ID NO: 6814 - protein, 11 aa, synthetic construct
ALGDGDTDRLF

SEQ ID NO: 6815 - protein, 11 aa, synthetic construct
ALGDGDTDQLI

SEQ ID NO: 6816 - protein, 11 aa, synthetic construct
ALGDGDTDKLV

SEQ ID NO: 6817 - protein, 11 aa, synthetic construct
ALGDGDTDKIN

SEQ ID NO: 6818 - protein, 11 aa, synthetic construct
ALGDGDTDKHI

SEQ ID NO: 6819 - protein, 11 aa, synthetic construct
ALGDGDTDILI

SEQ ID NO: 6820 - protein, 9 aa, synthetic construct
ALGDGDPAH

SEQ ID NO: 6821 - protein, 11 aa, synthetic construct
ALGDGDNDKLI

SEQ ID NO: 6822 - protein, 14 aa, synthetic construct
ALGDHPNWGSYTDK

SEQ ID NO: 6823 - protein, 14 aa, synthetic construct
ALGDHPYWEIYTDK

SEQ ID NO: 6824 - protein, 12 aa, synthetic construct
ALGDFLHTDKLI

SEQ ID NO: 6825 - protein, 14 aa, synthetic construct
ALGDIAKWGINTDQ

SEQ ID NO: 6826 - protein, 14 aa, synthetic construct
ALGDIANWGLNTDK

SEQ ID NO: 6827 - protein, 13 aa, synthetic construct
ALGDIANWGLNTD

SEQ ID NO: 6828 - protein, 14 aa, synthetic construct
ALGDIANWGIYTDK

SEQ ID NO: 6829 - protein, 14 aa, synthetic construct
ALGDIANWGINTDQ

SEQ ID NO: 6830 - protein, 13 aa, synthetic construct
ALGDIANWGIHTD

SEQ ID NO: 6831 - protein, 14 aa, synthetic construct
ALGDIANWGIHNDK

SEQ ID NO: 6832 - protein, 14 aa, synthetic construct
ALGDIANRGITTDK

SEQ ID NO: 6833 - protein, 14 aa, synthetic construct
ALGDIANGGINTDQ

SEQ ID NO: 6834 - protein, 14 aa, synthetic construct
ALGDIANGGINTDK

SEQ ID NO: 6835 - protein, 13 aa, synthetic construct
ALGDIANGGINTD

SEQ ID NO: 6836 - protein, 14 aa, synthetic construct
ALGDIAHTGINTDK

SEQ ID NO: 6837 - protein, 14 aa, synthetic construct
ALGDHPYWGFYTDK

SEQ ID NO: 6838 - protein, 14 aa, synthetic construct
ALGDIAGGSDTDKL

SEQ ID NO: 6839 - protein, 13 aa, synthetic construct
ALGDHTGGCTDKL

SEQ ID NO: 6840 - protein, 14 aa, synthetic construct
ALGDHSYAGGSYTD

SEQ ID NO: 6841 - protein, 9 aa, synthetic construct
ALGDHSSNS

SEQ ID NO: 6842 - protein, 14 aa, synthetic construct
ALGDHPYWGTYTDK

SEQ ID NO: 6843 - protein, 14 aa, synthetic construct
ALGDHPYWGSYTDK

SEQ ID NO: 6844 - protein, 14 aa, synthetic construct
ALGDHPYWGIYADK

SEQ ID NO: 6845 - protein, 14 aa, synthetic construct
ALGDHPYWGISTDK

SEQ ID NO: 6846 - protein, 13 aa, synthetic construct
ALGDHPYWGISTD

SEQ ID NO: 6847 - protein, 14 aa, synthetic construct
ALGDHPYWGIPADK

SEQ ID NO: 6848 - protein, 11 aa, synthetic construct
ALGDGAPEKLI

SEQ ID NO: 6849 - protein, 12 aa, synthetic construct
ALGDAGTTIISS

SEQ ID NO: 6850 - protein, 14 aa, synthetic construct
ALGAPTGGWTDQLI

SEQ ID NO: 6851 - protein, 14 aa, synthetic construct
ALGARTGGYLGSWD

SEQ ID NO: 6852 - protein, 12 aa, synthetic construct
ALGAVGDTAKLV

SEQ ID NO: 6853 - protein, 13 aa, synthetic construct
ALGAVGDSSWDTR

SEQ ID NO: 6854 - protein, 13 aa, synthetic construct
ALGAVGDKYDKLI

SEQ ID NO: 6855 - protein, 10 aa, synthetic construct
ALGAVFKRGY

SEQ ID NO: 6856 - protein, 12 aa, synthetic construct
ALGAVAYTDKLN

SEQ ID NO: 6857 - protein, 8 aa, synthetic construct
ALGAVAWG

SEQ ID NO: 6858 - protein, 13 aa, synthetic construct
ALGAVARETDILM

SEQ ID NO: 6859 - protein, 14 aa, synthetic construct
ALGASANWGINTDK

SEQ ID NO: 6860 - protein, 12 aa, synthetic construct
ALGARWIHDKNI

SEQ ID NO: 6861 - protein, 13 aa, synthetic construct
ALGARWGIRCKLI

SEQ ID NO: 6862 - protein, 14 aa, synthetic construct
ALGARTGGWTDKPI

SEQ ID NO: 6863 - protein, 14 aa, synthetic construct
ALGAVGGGYDDKLI

SEQ ID NO: 6864 - protein, 14 aa, synthetic construct
ALGARTGGSLGSWD

SEQ ID NO: 6865 - protein, 14 aa, synthetic construct
ALGARTGGSLCSWD

SEQ ID NO: 6866 - protein, 14 aa, synthetic construct
ALGARTGGDLGSWD

SEQ ID NO: 6867 - protein, 14 aa, synthetic construct
ALGARSGGYLGSWD

SEQ ID NO: 6868 - protein, 12 aa, synthetic construct
ALGARGYTDKLI

SEQ ID NO: 6869 - protein, 12 aa, synthetic construct
ALGARGYTDKHI

SEQ ID NO: 6870 - protein, 13 aa, synthetic construct
ALGARGYAGDKLI

SEQ ID NO: 6871 - protein, 13 aa, synthetic construct
ALGAPVLGEISTD

SEQ ID NO: 6872 - protein, 14 aa, synthetic construct
ALGAPVLGDIYTDK

SEQ ID NO: 6873 - protein, 14 aa, synthetic construct
ALGAPTVGWTDQLI

SEQ ID NO: 6874 - protein, 14 aa, synthetic construct
ALGAVGGGYDDILI

SEQ ID NO: 6875 - protein, 12 aa, synthetic construct
ALGAVGYTDKII

SEQ ID NO: 6876 - protein, 9 aa, synthetic construct
ALGDACMSD

SEQ ID NO: 6877 - protein, 12 aa, synthetic construct
ALGAVVYTAYKL

SEQ ID NO: 6878 - protein, 8 aa, synthetic construct
ALGDACMK

SEQ ID NO: 6879 - protein, 8 aa, synthetic construct
ALGDACKK

SEQ ID NO: 6880 - protein, 14 aa, synthetic construct
ALGCPSWYWGIPDK

SEQ ID NO: 6881 - protein, 14 aa, synthetic construct
ALGCPSWYSAIPIN

SEQ ID NO: 6882 - protein, 14 aa, synthetic construct
ALGCPSWSWGLADK

SEQ ID NO: 6883 - protein, 10 aa, synthetic construct
ALGCLYETSW

SEQ ID NO: 6884 - protein, 10 aa, synthetic construct
ALGCLSETSW

SEQ ID NO: 6885 - protein, 12 aa, synthetic construct
ALGCGGYTEILI

SEQ ID NO: 6886 - protein, 12 aa, synthetic construct
ALGAWGYTDKLI

SEQ ID NO: 6887 - protein, 13 aa, synthetic construct
ALGAVWGIRSKLI

SEQ ID NO: 6888 - protein, 13 aa, synthetic construct
ALGAVVYAYNKLL

SEQ ID NO: 6889 - protein, 9 aa, synthetic construct
ALGAVHKDT

SEQ ID NO: 6890 - protein, 12 aa, synthetic construct
ALGAVVNTDKLI

SEQ ID NO: 6891 - protein, 13 aa, synthetic construct
ALGAVSFVPAIVI

SEQ ID NO: 6892 - protein, 13 aa, synthetic construct
ALGAVPTETDKLI

SEQ ID NO: 6893 - protein, 13 aa, synthetic construct
ALGAVPTDTEKLI

SEQ ID NO: 6894 - protein, 13 aa, synthetic construct
ALGAVPTDTDKLL

SEQ ID NO: 6895 - protein, 13 aa, synthetic construct
ALGAVPTDTAKLI

SEQ ID NO: 6896 - protein, 13 aa, synthetic construct
ALGAVPTATDKLI

SEQ ID NO: 6897 - protein, 13 aa, synthetic construct
ALGAVPKDTDKLI

SEQ ID NO: 6898 - protein, 14 aa, synthetic construct
ALGAVLPTFRGTDK

SEQ ID NO: 6899 - protein, 12 aa, synthetic construct
ALGAVLHTDKLI

SEQ ID NO: 6900 - protein, 14 aa, synthetic construct
ALGELCLGDLTPIN

SEQ ID NO: 6901 - protein, 14 aa, synthetic construct
ALGELCLGDPNTLI

SEQ ID NO: 6902 - protein, 13 aa, synthetic construct
ALGELCLGDRLAT

SEQ ID NO: 6903 - protein, 12 aa, synthetic construct
ALGELWIHEKII

SEQ ID NO: 6904 - protein, 13 aa, synthetic construct
ALGELWGLRSKLF

SEQ ID NO: 6905 - protein, 13 aa, synthetic construct
ALGELWGKRSKLI

SEQ ID NO: 6906 - protein, 14 aa, synthetic construct
ALGELWGIRTINPS

SEQ ID NO: 6907 - protein, 14 aa, synthetic construct
ALGELWGIRTDKLI

SEQ ID NO: 6908 - protein, 13 aa, synthetic construct
ALGELWGIRSQLF

SEQ ID NO: 6909 - protein, 13 aa, synthetic construct
ALGELWGIRSQII

SEQ ID NO: 6910 - protein, 13 aa, synthetic construct
ALGELWGIRSKNI

SEQ ID NO: 6911 - protein, 13 aa, synthetic construct
ALGELWGIRSKLV

SEQ ID NO: 6912 - protein, 13 aa, synthetic construct
ALGELWGIRSKLS

SEQ ID NO: 6913 - protein, 13 aa, synthetic construct
ALGELWGIRSKFI

SEQ ID NO: 6914 - protein, 13 aa, synthetic construct
ALGELWGIRSHII

SEQ ID NO: 6915 - protein, 13 aa, synthetic construct
ALGELWGIRSELI

SEQ ID NO: 6916 - protein, 13 aa, synthetic construct
ALGELWGIRRTPI

SEQ ID NO: 6917 - protein, 12 aa, synthetic construct
ALGELWGIRRKL

SEQ ID NO: 6918 - protein, 13 aa, synthetic construct
ALGELWGIRRETH

SEQ ID NO: 6919 - protein, 13 aa, synthetic construct
ALGELWGIRLKLI

SEQ ID NO: 6920 - protein, 13 aa, synthetic construct
ALGELWGIRIQLI

SEQ ID NO: 6921 - protein, 13 aa, synthetic construct
ALGELWGIRIKLI

SEQ ID NO: 6922 - protein, 13 aa, synthetic construct
ALGELWGIRCKLI

SEQ ID NO: 6923 - protein, 13 aa, synthetic construct
ALGELWGIPSKLI

SEQ ID NO: 6924 - protein, 13 aa, synthetic construct
ALGELWGIPDKLI

SEQ ID NO: 6925 - protein, 13 aa, synthetic construct
ALGELWGILRKLI

SEQ ID NO: 6926 - protein, 14 aa, synthetic construct
ALGELWGIHTDKLI

SEQ ID NO: 6927 - protein, 13 aa, synthetic construct
ALGELWGLRSKNI

SEQ ID NO: 6928 - protein, 13 aa, synthetic construct
ALGELWGMRSQLI

SEQ ID NO: 6929 - protein, 13 aa, synthetic construct
ALGELWGRRRKLI

SEQ ID NO: 6930 - protein, 12 aa, synthetic construct
ALGELWIHDKLK

SEQ ID NO: 6931 - protein, 12 aa, synthetic construct
ALGELWIHDTLN

SEQ ID NO: 6932 - protein, 12 aa, synthetic construct
ALGELWIHDQLF

SEQ ID NO: 6933 - protein, 12 aa, synthetic construct
ALGELWIHDQHI

SEQ ID NO: 6934 - protein, 12 aa, synthetic construct
ALGELWIHDNSS

SEQ ID NO: 6935 - protein, 12 aa, synthetic construct
ALGELWIHDNPI

SEQ ID NO: 6936 - protein, 12 aa, synthetic construct
ALGELWIHDNII

SEQ ID NO: 6937 - protein, 12 aa, synthetic construct
ALGELWIHDLLF

SEQ ID NO: 6938 - protein, 12 aa, synthetic construct
ALGELWIHDKRN

SEQ ID NO: 6939 - protein, 12 aa, synthetic construct
ALGELWIHDKQI

SEQ ID NO: 6940 - protein, 12 aa, synthetic construct
ALGELWIHDKNI

SEQ ID NO: 6941 - protein, 11 aa, synthetic construct
ALGELWIHDKL

SEQ ID NO: 6942 - protein, 12 aa, synthetic construct
ALGELWGRRSKL

SEQ ID NO: 6943 - protein, 12 aa, synthetic construct
ALGELWIHDKHN

SEQ ID NO: 6944 - protein, 12 aa, synthetic construct
ALGELWIHDILL

SEQ ID NO: 6945 - protein, 12 aa, synthetic construct
ALGELWIHAQLI

SEQ ID NO: 6946 - protein, 12 aa, synthetic construct
ALGELWIHAKLI

SEQ ID NO: 6947 - protein, 12 aa, synthetic construct
ALGELWIDDKLI

SEQ ID NO: 6948 - protein, 8 aa, synthetic construct
ALGELWIA

SEQ ID NO: 6949 - protein, 14 aa, synthetic construct
ALGELWGYARTDKL

SEQ ID NO: 6950 - protein, 13 aa, synthetic construct
ALGELWGTPINSS

SEQ ID NO: 6951 - protein, 13 aa, synthetic construct
ALGELWGTPINPS

SEQ ID NO: 6952 - protein, 12 aa, synthetic construct
ALGELWGRSSQI

SEQ ID NO: 6953 - protein, 13 aa, synthetic construct
ALGELWGIGSKLI

SEQ ID NO: 6954 - protein, 13 aa, synthetic construct
ALGELWGICSQLI

SEQ ID NO: 6955 - protein, 13 aa, synthetic construct
ALGELWGICSKLI

SEQ ID NO: 6956 - protein, 14 aa, synthetic construct
ALGELVWGSTPINS

SEQ ID NO: 6957 - protein, 14 aa, synthetic construct
ALGELVWGTSVKLI

SEQ ID NO: 6958 - protein, 14 aa, synthetic construct
ALGELVWGTSDKLI

SEQ ID NO: 6959 - protein, 14 aa, synthetic construct
ALGELVWGTPYTDK

SEQ ID NO: 6960 - protein, 14 aa, synthetic construct
ALGELVWGTPISSS

SEQ ID NO: 6961 - protein, 14 aa, synthetic construct
ALGELVWGTPINSS

SEQ ID NO: 6962 - protein, 14 aa, synthetic construct
ALGELVWGTPDTLI

SEQ ID NO: 6963 - protein, 14 aa, synthetic construct
ALGELVWGTPDQLI

SEQ ID NO: 6964 - protein, 14 aa, synthetic construct
ALGELVWGTNEKLI

SEQ ID NO: 6965 - protein, 14 aa, synthetic construct
ALGELVWGTAEKLI

SEQ ID NO: 6966 - protein, 14 aa, synthetic construct
ALGELVWGTADKII

SEQ ID NO: 6967 - protein, 14 aa, synthetic construct
ALGELVWGQPINSS

SEQ ID NO: 6968 - protein, 14 aa, synthetic construct
ALGELVWGTTDELI

SEQ ID NO: 6969 - protein, 14 aa, synthetic construct
ALGELVWGPTDKLI

SEQ ID NO: 6970 - protein, 10 aa, synthetic construct
ALGELVWGKF

SEQ ID NO: 6971 - protein, 14 aa, synthetic construct
ALGELVWGIRWRQH

SEQ ID NO: 6972 - protein, 14 aa, synthetic construct
ALGELVWGIRTINS

SEQ ID NO: 6973 - protein, 14 aa, synthetic construct
ALGELVWGIRSKLI

SEQ ID NO: 6974 - protein, 14 aa, synthetic construct
ALGELVWGIRRGDK

SEQ ID NO: 6975 - protein, 14 aa, synthetic construct
ALGELVWGIRAINS

SEQ ID NO: 6976 - protein, 14 aa, synthetic construct
ALGELVWGIPINSS

SEQ ID NO: 6977 - protein, 14 aa, synthetic construct
ALGELVWGIPDKLI

SEQ ID NO: 6978 - protein, 14 aa, synthetic construct
ALGELVWGIPDKII

SEQ ID NO: 6979 - protein, 13 aa, synthetic construct
ALGELVWGTTAKL

SEQ ID NO: 6980 - protein, 14 aa, synthetic construct
ALGELVWGTTDKFI

SEQ ID NO: 6981 - protein, 11 aa, synthetic construct
ALGELWETSKH

SEQ ID NO: 6982 - protein, 14 aa, synthetic construct
ALGELVYLGYTDQL

SEQ ID NO: 6983 - protein, 12 aa, synthetic construct
ALGELWERSWDT

SEQ ID NO: 6984 - protein, 13 aa, synthetic construct
ALGELWEIRRKLI

SEQ ID NO: 6985 - protein, 14 aa, synthetic construct
ALGELWEGDTNTLF

SEQ ID NO: 6986 - protein, 14 aa, synthetic construct
ALGELWDTYTDKLI

SEQ ID NO: 6987 - protein, 14 aa, synthetic construct
ALGELWDTYPDKLI

SEQ ID NO: 6988 - protein, 14 aa, synthetic construct
ALGELWDNYPSNLI

SEQ ID NO: 6989 - protein, 13 aa, synthetic construct
ALGELWDKDDKLI

SEQ ID NO: 6990 - protein, 12 aa, synthetic construct
ALGELWDIPTKL

SEQ ID NO: 6991 - protein, 13 aa, synthetic construct
ALGELWAIRLHLI

SEQ ID NO: 6992 - protein, 9 aa, synthetic construct
ALGELVYTD

SEQ ID NO: 6993 - protein, 14 aa, synthetic construct
ALGELVYHGYTDKL

SEQ ID NO: 6994 - protein, 14 aa, synthetic construct
ALGELVWGTTDQLK

SEQ ID NO: 6995 - protein, 14 aa, synthetic construct
ALGELVWVTTAQLI

SEQ ID NO: 6996 - protein, 14 aa, synthetic construct
ALGELVWGYAVNSS

SEQ ID NO: 6997 - protein, 14 aa, synthetic construct
ADGDLALPGIHTDK

SEQ ID NO: 6998 - protein, 14 aa, synthetic construct
ALGELVWGTTYQLI

SEQ ID NO: 6999 - protein, 14 aa, synthetic construct
ALGELVWGTTYKLV

SEQ ID NO: 7000 - protein, 14 aa, synthetic construct
ALGELVWGTTYILI

SEQ ID NO: 7001 - protein, 14 aa, synthetic construct
ALGELVWGTTETLI

SEQ ID NO: 7002 - protein, 14 aa, synthetic construct
ALGELVWGTTENLI

SEQ ID NO: 7003 - protein, 14 aa, synthetic construct
ALGELVWGTTEKLF

SEQ ID NO: 7004 - protein, 14 aa, synthetic construct
ALGELVWGTTDTII

SEQ ID NO: 7005 - protein, 12 aa, synthetic construct
ALGELWIHDTVI

SEQ ID NO: 7006 - protein, 12 aa, synthetic construct
ALGELWIHEKRI

SEQ ID NO: 7007 - protein, 14 aa, synthetic construct
ALGEPGLPLLGTPI

SEQ ID NO: 7008 - protein, 12 aa, synthetic construct
ALGELWIHENSS

SEQ ID NO: 7009 - protein, 11 aa, synthetic construct
ALGEPCYDSGS

SEQ ID NO: 7010 - protein, 14 aa, synthetic construct
ALGEPCRGDTLATA

SEQ ID NO: 7011 - protein, 10 aa, synthetic construct
ALGEPAYAGG

SEQ ID NO: 7012 - protein, 13 aa, synthetic construct
ALGEPASYVLGDT

SEQ ID NO: 7013 - protein, 13 aa, synthetic construct
ALGEPALPLLGDT

SEQ ID NO: 7014 - protein, 14 aa, synthetic construct
ALGEPALHLLGDTD

SEQ ID NO: 7015 - protein, 14 aa, synthetic construct
ALGEPAGGWTDQLI

SEQ ID NO: 7016 - protein, 14 aa, synthetic construct
ALGENSYWGIYTDK

SEQ ID NO: 7017 - protein, 14 aa, synthetic construct
ALGENPYWVIYTDK

SEQ ID NO: 7018 - protein, 12 aa, synthetic construct
ALGENPYWGIYT

SEQ ID NO: 7019 - protein, 14 aa, synthetic construct
ALGENPYWGISTDK

SEQ ID NO: 7020 - protein, 14 aa, synthetic construct
ALGENPYWGICTDK

SEQ ID NO: 7021 - protein, 14 aa, synthetic construct
ALGENPYRGIYTEK

SEQ ID NO: 7022 - protein, 14 aa, synthetic construct
ALGENPYCGIYTEK

SEQ ID NO: 7023 - protein, 13 aa, synthetic construct
ALGENPYCGICTD

SEQ ID NO: 7024 - protein, 10 aa, synthetic construct
ALGENPTGGY

SEQ ID NO: 7025 - protein, 14 aa, synthetic construct
ALGENPNWGIYTDK

SEQ ID NO: 7026 - protein, 14 aa, synthetic construct
ALGENGTGGYEDKL

SEQ ID NO: 7027 - protein, 14 aa, synthetic construct
ALGENGNGGYADKL

SEQ ID NO: 7028 - protein, 13 aa, synthetic construct
ALGENANWGINTD

SEQ ID NO: 7029 - protein, 12 aa, synthetic construct
ALGEMVDTDKLI

SEQ ID NO: 7030 - protein, 14 aa, synthetic construct
ALGEMTGGYADTLI

SEQ ID NO: 7031 - protein, 14 aa, synthetic construct
ALGEMTGGNADQLI

SEQ ID NO: 7032 - protein, 14 aa, synthetic construct
ALGEPDGGWTDKLI

SEQ ID NO: 7033 - protein, 14 aa, synthetic construct
ALGEPDLGDIYTDK

SEQ ID NO: 7034 - protein, 14 aa, synthetic construct
ALGEPELADIYTDK

SEQ ID NO: 7035 - protein, 14 aa, synthetic construct
ALGEPGLALLGDTD

SEQ ID NO: 7036 - protein, 13 aa, synthetic construct
ALGEPGLPLLGET

SEQ ID NO: 7037 - protein, 12 aa, synthetic construct
ALGEPGLPLLGE

SEQ ID NO: 7038 - protein, 14 aa, synthetic construct
ALGEPGLPLLGDTR

SEQ ID NO: 7039 - protein, 14 aa, synthetic construct
ALGEPGLPLLGDIN

SEQ ID NO: 7040 - protein, 13 aa, synthetic construct
ALGEPGLPLLGDI

SEQ ID NO: 7041 - protein, 14 aa, synthetic construct
ALGEPGLPLLGATD

SEQ ID NO: 7042 - protein, 14 aa, synthetic construct
ALGEPGLHLMGDTD

SEQ ID NO: 7043 - protein, 14 aa, synthetic construct
ALGEPGLHLMEDTD

SEQ ID NO: 7044 - protein, 13 aa, synthetic construct
ALGEPGLHLLWDT

SEQ ID NO: 7045 - protein, 13 aa, synthetic construct
ALGEPGLHLLGDT

SEQ ID NO: 7046 - protein, 12 aa, synthetic construct
ALGEPGIKINSP

SEQ ID NO: 7047 - protein, 14 aa, synthetic construct
ALGEPELGDICTDK

SEQ ID NO: 7048 - protein, 12 aa, synthetic construct
ALGEPGDHDKLI

SEQ ID NO: 7049 - protein, 12 aa, synthetic construct
ALGEPGATIHSS

SEQ ID NO: 7050 - protein, 14 aa, synthetic construct
ALGEPFYAGGSYTD

SEQ ID NO: 7051 - protein, 14 aa, synthetic construct
ALGEPFLMEDTDKL

SEQ ID NO: 7052 - protein, 14 aa, synthetic construct
ALGEPEWGIRGTDK

SEQ ID NO: 7053 - protein, 14 aa, synthetic construct
ALGEPEQGDTYKLI

SEQ ID NO: 7054 - protein, 11 aa, synthetic construct
ALGEPELVGNS

SEQ ID NO: 7055 - protein, 14 aa, synthetic construct
ALGEPELGDLYTDQ

SEQ ID NO: 7056 - protein, 13 aa, synthetic construct
ALGEPELGDKYTD

SEQ ID NO: 7057 - protein, 14 aa, synthetic construct
ALGEPELGDIYTEK

SEQ ID NO: 7058 - protein, 12 aa, synthetic construct
ALGEMSFLLVWG

SEQ ID NO: 7059 - protein, 13 aa, synthetic construct
ALGEMGGYASTDK

SEQ ID NO: 7060 - protein, 14 aa, synthetic construct
ALGEMGGYARTDQL

SEQ ID NO: 7061 - protein, 14 aa, synthetic construct
ALGELWIRGTDKLI

SEQ ID NO: 7062 - protein, 12 aa, synthetic construct
ALGELWTHDKLI

SEQ ID NO: 7063 - protein, 12 aa, synthetic construct
ALGELWSTEILI

SEQ ID NO: 7064 - protein, 12 aa, synthetic construct
ALGELWSTDTLI

SEQ ID NO: 7065 - protein, 12 aa, synthetic construct
ALGELWSTDKLI

SEQ ID NO: 7066 - protein, 11 aa, synthetic construct
ALGELWSTDKL

SEQ ID NO: 7067 - protein, 12 aa, synthetic construct
ALGELWNNNKLF

SEQ ID NO: 7068 - protein, 12 aa, synthetic construct
ALGELWMHEKLI

SEQ ID NO: 7069 - protein, 12 aa, synthetic construct
ALGELWMHDKLI

SEQ ID NO: 7070 - protein, 12 aa, synthetic construct
ALGELWLHDKII

SEQ ID NO: 7071 - protein, 14 aa, synthetic construct
ALGELWLGDTLATA

SEQ ID NO: 7072 - protein, 12 aa, synthetic construct
ALGELWIQDKLI

SEQ ID NO: 7073 - protein, 13 aa, synthetic construct
ALGELWVIRSKLI

SEQ ID NO: 7074 - protein, 12 aa, synthetic construct
ALGELWIQDKII

SEQ ID NO: 7075 - protein, 12 aa, synthetic construct
ALGELWINYKLI

SEQ ID NO: 7076 - protein, 12 aa, synthetic construct
ALGELWINEKLI

SEQ ID NO: 7077 - protein, 11 aa, synthetic construct
ALGELWINDQL

SEQ ID NO: 7078 - protein, 12 aa, synthetic construct
ALGELWINDKHN

SEQ ID NO: 7079 - protein, 12 aa, synthetic construct
ALGELWILEKLF

SEQ ID NO: 7080 - protein, 12 aa, synthetic construct
ALGELWIHVTVI

SEQ ID NO: 7081 - protein, 11 aa, synthetic construct
ALGELWIHPTD

SEQ ID NO: 7082 - protein, 12 aa, synthetic construct
ALGELWIHNKLI

SEQ ID NO: 7083 - protein, 12 aa, synthetic construct
ALGELWIHGNLI

SEQ ID NO: 7084 - protein, 12 aa, synthetic construct
ALGELWVHDQLI

SEQ ID NO: 7085 - protein, 11 aa, synthetic construct
ALGELYAGTSG

SEQ ID NO: 7086 - protein, 14 aa, synthetic construct
ALGEMGGYARNDKL

SEQ ID NO: 7087 - protein, 13 aa, synthetic construct
ALGEMGDMDHKLI

SEQ ID NO: 7088 - protein, 14 aa, synthetic construct
ALGEMGGIPPINSS

SEQ ID NO: 7089 - protein, 13 aa, synthetic construct
ALGEMGESSWDTR

SEQ ID NO: 7090 - protein, 14 aa, synthetic construct
ALGEMGEILRAAQL

SEQ ID NO: 7091 - protein, 14 aa, synthetic construct
ALGEMGDTYTETLF

SEQ ID NO: 7092 - protein, 14 aa, synthetic construct
ALGEMGDTYPDQLI

SEQ ID NO: 7093 - protein, 14 aa, synthetic construct
ALGEMGDTYPDKII

SEQ ID NO: 7094 - protein, 13 aa, synthetic construct
ALGEMGDTPEKLN

SEQ ID NO: 7095 - protein, 12 aa, synthetic construct
ALGEMGDTDQLI

SEQ ID NO: 7096 - protein, 12 aa, synthetic construct
ALGEMGDTDNLI

SEQ ID NO: 7097 - protein, 13 aa, synthetic construct
ALGEMGDRSWDSR

SEQ ID NO: 7098 - protein, 13 aa, synthetic construct
ALGEMGDKYDKLI

SEQ ID NO: 7099 - protein, 13 aa, synthetic construct
ALGELYILGDTDK

SEQ ID NO: 7100 - protein, 13 aa, synthetic construct
ALGEMGDKDDKLT

SEQ ID NO: 7101 - protein, 13 aa, synthetic construct
ALGEMGDGSWDTR

SEQ ID NO: 7102 - protein, 14 aa, synthetic construct
ALGEMDNWGISTDK

SEQ ID NO: 7103 - protein, 14 aa, synthetic construct
ALGEMANWGINTDK

SEQ ID NO: 7104 - protein, 14 aa, synthetic construct
ALGELYPFTGGHKL

SEQ ID NO: 7105 - protein, 13 aa, synthetic construct
ALGELYLLWDTDK

SEQ ID NO: 7106 - protein, 14 aa, synthetic construct
ALGELYLLGYTDKL

SEQ ID NO: 7107 - protein, 14 aa, synthetic construct
ALGELYLLGDTDQL

SEQ ID NO: 7108 - protein, 14 aa, synthetic construct
ALGELYIMGDTDKL

SEQ ID NO: 7109 - protein, 14 aa, synthetic construct
ALGELYILGDTDKL

SEQ ID NO: 7110 - protein, 14 aa, synthetic construct
ALGELVWGIPAVKL

SEQ ID NO: 7111 - protein, 14 aa, synthetic construct
ALGELVWGILGLLG

SEQ ID NO: 7112 - protein, 14 aa, synthetic construct
ALGELVWETTDNLI

SEQ ID NO: 7113 - protein, 14 aa, synthetic construct
ALGELVVVYDYKLI

SEQ ID NO: 7114 - protein, 14 aa, synthetic construct
ALGELTGGYASKLI

SEQ ID NO: 7115 - protein, 14 aa, synthetic construct
ALGELTGGYAQKLI

SEQ ID NO: 7116 - protein, 14 aa, synthetic construct
ALGELTGGYANKLI

SEQ ID NO: 7117 - protein, 14 aa, synthetic construct
ALGELTGGYAGDKL

SEQ ID NO: 7118 - protein, 14 aa, synthetic construct
ALGELTGGYAETLI

SEQ ID NO: 7119 - protein, 13 aa, synthetic construct
ALGELTGGYAEKL

SEQ ID NO: 7120 - protein, 13 aa, synthetic construct
ALGELTGGYADQL

SEQ ID NO: 7121 - protein, 13 aa, synthetic construct
ALGELTGGYADNL

SEQ ID NO: 7122 - protein, 14 aa, synthetic construct
ALGELTGGYADKVF

SEQ ID NO: 7123 - protein, 14 aa, synthetic construct
ALGELTGGYADKPI

SEQ ID NO: 7124 - protein, 14 aa, synthetic construct
ALGELTGGYADKLL

SEQ ID NO: 7125 - protein, 13 aa, synthetic construct
ALGELTGGYADKI

SEQ ID NO: 7126 - protein, 12 aa, synthetic construct
ALGELTGGYADK

SEQ ID NO: 7127 - protein, 14 aa, synthetic construct
ALGELTGGYAAQLI

SEQ ID NO: 7128 - protein, 9 aa, synthetic construct
ALGELTGGY

SEQ ID NO: 7129 - protein, 14 aa, synthetic construct
ALGELTGGWTDKLI

SEQ ID NO: 7130 - protein, 14 aa, synthetic construct
ALGELTGGSTPINS

SEQ ID NO: 7131 - protein, 14 aa, synthetic construct
ALGELTGGSADKLI

SEQ ID NO: 7132 - protein, 14 aa, synthetic construct
ALGELTGGSADILI

SEQ ID NO: 7133 - protein, 14 aa, synthetic construct
ALGELTGGQPINSS

SEQ ID NO: 7134 - protein, 14 aa, synthetic construct
ALGELTGGHADKLI

SEQ ID NO: 7135 - protein, 14 aa, synthetic construct
ALGELTGGDAEKLI

SEQ ID NO: 7136 - protein, 13 aa, synthetic construct
ALGELTGAYAYKL

SEQ ID NO: 7137 - protein, 14 aa, synthetic construct
ALGELTGGYAVNLI

SEQ ID NO: 7138 - protein, 14 aa, synthetic construct
ALGELTGGYAVNSS

SEQ ID NO: 7139 - protein, 13 aa, synthetic construct
ALGELTGGYDDKL

SEQ ID NO: 7140 - protein, 13 aa, synthetic construct
ALGELTILPDKII

SEQ ID NO: 7141 - protein, 14 aa, synthetic construct
ALGELTRGYAEKLI

SEQ ID NO: 7142 - protein, 14 aa, synthetic construct
ALGELTRGYAAKLI

SEQ ID NO: 7143 - protein, 14 aa, synthetic construct
ALGELTLPGINTDK

SEQ ID NO: 7144 - protein, 14 aa, synthetic construct
ALGELTLPGIHTDK

SEQ ID NO: 7145 - protein, 13 aa, synthetic construct
ALGELTLPGIHTD

SEQ ID NO: 7146 - protein, 13 aa, synthetic construct
ALGELTLLPYKLI

SEQ ID NO: 7147 - protein, 13 aa, synthetic construct
ALGELTLLPDKHN

SEQ ID NO: 7148 - protein, 13 aa, synthetic construct
ALGELTLLPAKLI

SEQ ID NO: 7149 - protein, 12 aa, synthetic construct
ALGELTKLPKNT

SEQ ID NO: 7150 - protein, 12 aa, synthetic construct
ALGELTINDKLI

SEQ ID NO: 7151 - protein, 14 aa, synthetic construct
ALGELTGVYSDQLI

SEQ ID NO: 7152 - protein, 14 aa, synthetic construct
ALGELTGGYDDKLI

SEQ ID NO: 7153 - protein, 14 aa, synthetic construct
ALGELTGVYADQLI

SEQ ID NO: 7154 - protein, 14 aa, synthetic construct
ALGELTGRYFGSWD

SEQ ID NO: 7155 - protein, 14 aa, synthetic construct
ALGELTGGYYYILI

SEQ ID NO: 7156 - protein, 14 aa, synthetic construct
ALGELTGGYTINSS

SEQ ID NO: 7157 - protein, 14 aa, synthetic construct
ALGELTGGYSYKLI

SEQ ID NO: 7158 - protein, 14 aa, synthetic construct
ALGELTGGYSDNLI

SEQ ID NO: 7159 - protein, 13 aa, synthetic construct
ALGELTGGYSDKL

SEQ ID NO: 7160 - protein, 14 aa, synthetic construct
ALGELTGGYSDKHI

SEQ ID NO: 7161 - protein, 14 aa, synthetic construct
ALGELTGGYFGSWD

SEQ ID NO: 7162 - protein, 14 aa, synthetic construct
ALGELTGGYDEKLI

SEQ ID NO: 7163 - protein, 14 aa, synthetic construct
ALGELTGAYADKII

SEQ ID NO: 7164 - protein, 13 aa, synthetic construct
ALGELTFVPDQLI

SEQ ID NO: 7165 - protein, 13 aa, synthetic construct
ALGELTFRPEKLI

SEQ ID NO: 7166 - protein, 14 aa, synthetic construct
ALGELSTVTGGHKL

SEQ ID NO: 7167 - protein, 13 aa, synthetic construct
ALGELTFLAEKLI

SEQ ID NO: 7168 - protein, 13 aa, synthetic construct
ALGELTFLADLLI

SEQ ID NO: 7169 - protein, 13 aa, synthetic construct
ALGELTFITDKLI

SEQ ID NO: 7170 - protein, 13 aa, synthetic construct
ALGELTFIPDQLI

SEQ ID NO: 7171 - protein, 13 aa, synthetic construct
ALGELTFIPDNSS

SEQ ID NO: 7172 - protein, 13 aa, synthetic construct
ALGELTFIPDKLN

SEQ ID NO: 7173 - protein, 13 aa, synthetic construct
ALGELTFIPDKII

SEQ ID NO: 7174 - protein, 14 aa, synthetic construct
ALGELTEGDQHKLI

SEQ ID NO: 7175 - protein, 14 aa, synthetic construct
ALGELTEGDKNKLI

SEQ ID NO: 7176 - protein, 14 aa, synthetic construct
ALGELSYRGIRTDK

SEQ ID NO: 7177 - protein, 12 aa, synthetic construct
ALGELSTSNNLI

SEQ ID NO: 7178 - protein, 13 aa, synthetic construct
ALGELTFLPALLI

SEQ ID NO: 7179 - protein, 14 aa, synthetic construct
ALGELSTGGYADKL

SEQ ID NO: 7180 - protein, 14 aa, synthetic construct
ALGELSTGETLSTP

SEQ ID NO: 7181 - protein, 11 aa, synthetic construct
ALGELSTFTGG

SEQ ID NO: 7182 - protein, 14 aa, synthetic construct
ALGELSTFPVCHKL

SEQ ID NO: 7183 - protein, 13 aa, synthetic construct
ALGELSSVRWGPE

SEQ ID NO: 7184 - protein, 14 aa, synthetic construct
ALGELSSFTGGHKL

SEQ ID NO: 7185 - protein, 12 aa, synthetic construct
ALGELSRRGRHT

SEQ ID NO: 7186 - protein, 13 aa, synthetic construct
ALGELSRIRRKLN

SEQ ID NO: 7187 - protein, 14 aa, synthetic construct
ALGELSRGFSAQQL

SEQ ID NO: 7188 - protein, 14 aa, synthetic construct
ALGELSQRGLHTDK

SEQ ID NO: 7189 - protein, 13 aa, synthetic construct
ALGELTFLPAKII

SEQ ID NO: 7190 - protein, 13 aa, synthetic construct
ALGELTFLPDILI

SEQ ID NO: 7191 - protein, 13 aa, synthetic construct
ALGELTFQPDQLI

SEQ ID NO: 7192 - protein, 13 aa, synthetic construct
ALGELTFLPHKNI

SEQ ID NO: 7193 - protein, 13 aa, synthetic construct
ALGELTFQPDKLF

SEQ ID NO: 7194 - protein, 13 aa, synthetic construct
ALGELTFQPDKII

SEQ ID NO: 7195 - protein, 13 aa, synthetic construct
ALGELTFQPDKHI

SEQ ID NO: 7196 - protein, 13 aa, synthetic construct
ALGELTFLYWGKF

SEQ ID NO: 7197 - protein, 13 aa, synthetic construct
ALGELTFLVDKLI

SEQ ID NO: 7198 - protein, 13 aa, synthetic construct
ALGELTFLSDKLI

SEQ ID NO: 7199 - protein, 14 aa, synthetic construct
ALGELTFLRTGGHS

SEQ ID NO: 7200 - protein, 14 aa, synthetic construct
ALGELTFLRSGAPI

SEQ ID NO: 7201 - protein, 13 aa, synthetic construct
ALGELTFLPYKLL

SEQ ID NO: 7202 - protein, 13 aa, synthetic construct
ALGELTFLPHNLI

SEQ ID NO: 7203 - protein, 13 aa, synthetic construct
ALGELTFLPHKLI

SEQ ID NO: 7204 - protein, 13 aa, synthetic construct
ALGELTFLPDKID

SEQ ID NO: 7205 - protein, 13 aa, synthetic construct
ALGELTFLPHKII

SEQ ID NO: 7206 - protein, 13 aa, synthetic construct
ALGELTFLPEKLF

SEQ ID NO: 7207 - protein, 12 aa, synthetic construct
ALGELTFLPEKL

SEQ ID NO: 7208 - protein, 13 aa, synthetic construct
ALGELTFLPEKII

SEQ ID NO: 7209 - protein, 13 aa, synthetic construct
ALGELTFLPDNLL

SEQ ID NO: 7210 - protein, 13 aa, synthetic construct
ALGELTFLPDKNN

SEQ ID NO: 7211 - protein, 13 aa, synthetic construct
ALGELTFLPDKNI

SEQ ID NO: 7212 - protein, 13 aa, synthetic construct
ALGELTFLPDKLT

SEQ ID NO: 7213 - protein, 13 aa, synthetic construct
ALGELTFLPDKLS

SEQ ID NO: 7214 - protein, 13 aa, synthetic construct
ALGELTFLPDKIN

SEQ ID NO: 7215 - protein, 13 aa, synthetic construct
ALGELTRGYSDKL

SEQ ID NO: 7216 - protein, 12 aa, synthetic construct
ALGELTVDSERL

SEQ ID NO: 7217 - protein, 14 aa, synthetic construct
ALGELTVGYADKII

SEQ ID NO: 7218 - protein, 14 aa, synthetic construct
ALGELVPLGYTDKL

SEQ ID NO: 7219 - protein, 14 aa, synthetic construct
ALGELVSLASTDKL

SEQ ID NO: 7220 - protein, 14 aa, synthetic construct
ALGELVSGTTDKLI

SEQ ID NO: 7221 - protein, 14 aa, synthetic construct
ALGELVSFGYTDKL

SEQ ID NO: 7222 - protein, 14 aa, synthetic construct
ALGELVRGTTYKLI

SEQ ID NO: 7223 - protein, 14 aa, synthetic construct
ALGELVRGTTSQLI

SEQ ID NO: 7224 - protein, 13 aa, synthetic construct
ALGELVRGTTDKL

SEQ ID NO: 7225 - protein, 14 aa, synthetic construct
ALGELVRGTTDKHI

SEQ ID NO: 7226 - protein, 14 aa, synthetic construct
ALGELVRGETYKLI

SEQ ID NO: 7227 - protein, 14 aa, synthetic construct
ALGELVRGDTYKLI

SEQ ID NO: 7228 - protein, 14 aa, synthetic construct
ALGELVQGDTDKLI

SEQ ID NO: 7229 - protein, 14 aa, synthetic construct
ALGELVPGDTDKLI

SEQ ID NO: 7230 - protein, 14 aa, synthetic construct
ALGELVSLAYTDQL

SEQ ID NO: 7231 - protein, 14 aa, synthetic construct
ALGELVNGETKKLI

SEQ ID NO: 7232 - protein, 14 aa, synthetic construct
ALGELVMGDTYKLI

SEQ ID NO: 7233 - protein, 13 aa, synthetic construct
ALGELVMGDTDKL

SEQ ID NO: 7234 - protein, 12 aa, synthetic construct
ALGELVLYDTNN

SEQ ID NO: 7235 - protein, 14 aa, synthetic construct
ALGELVLVDTDKLI

SEQ ID NO: 7236 - protein, 13 aa, synthetic construct
ALGELVLGYTDKL

SEQ ID NO: 7237 - protein, 14 aa, synthetic construct
ALGELVLGTTYQLI

SEQ ID NO: 7238 - protein, 14 aa, synthetic construct
ALGELVLGTTYKLI

SEQ ID NO: 7239 - protein, 13 aa, synthetic construct
ALGELVLGTTDKL

SEQ ID NO: 7240 - protein, 14 aa, synthetic construct
ALGELVLGTTDKII

SEQ ID NO: 7241 - protein, 14 aa, synthetic construct
ALGELVSLAYADKL

SEQ ID NO: 7242 - protein, 14 aa, synthetic construct
ALGELVSLGCTEKL

SEQ ID NO: 7243 - protein, 14 aa, synthetic construct
ALGELVLGGKDKLI

SEQ ID NO: 7244 - protein, 13 aa, synthetic construct
ALGELVSLGYTVH

SEQ ID NO: 7245 - protein, 14 aa, synthetic construct
ALGELVVGDTYKLI

SEQ ID NO: 7246 - protein, 14 aa, synthetic construct
ALGELVVGDTEKLI

SEQ ID NO: 7247 - protein, 14 aa, synthetic construct
ALGELVVGDNHILI

SEQ ID NO: 7248 - protein, 14 aa, synthetic construct
ALGELVTGGNADKL

SEQ ID NO: 7249 - protein, 14 aa, synthetic construct
ALGELVTGAYADKL

SEQ ID NO: 7250 - protein, 12 aa, synthetic construct
ALGELVSTDKLN

SEQ ID NO: 7251 - protein, 12 aa, synthetic construct
ALGELVSTDKHI

SEQ ID NO: 7252 - protein, 13 aa, synthetic construct
ALGELVSLWYTDK

SEQ ID NO: 7253 - protein, 14 aa, synthetic construct
ALGELVSLVLTDRL

SEQ ID NO: 7254 - protein, 14 aa, synthetic construct
ALGELVSLGYTVKL

SEQ ID NO: 7255 - protein, 14 aa, synthetic construct
ALGELVSLGYTETL

SEQ ID NO: 7256 - protein, 14 aa, synthetic construct
ALGELVSLGSTDEL

SEQ ID NO: 7257 - protein, 13 aa, synthetic construct
ALGELVSLGYTEK

SEQ ID NO: 7258 - protein, 14 aa, synthetic construct
ALGELVSLGYTEIL

SEQ ID NO: 7259 - protein, 13 aa, synthetic construct
ALGELVSLGYTAQ

SEQ ID NO: 7260 - protein, 14 aa, synthetic construct
ALGELVSLGYTAKL

SEQ ID NO: 7261 - protein, 14 aa, synthetic construct
ALGELVSLGYNDKL

SEQ ID NO: 7262 - protein, 14 aa, synthetic construct
ALGELVSLGYDDKL

SEQ ID NO: 7263 - protein, 14 aa, synthetic construct
ALGELVSLGYANKL

SEQ ID NO: 7264 - protein, 13 aa, synthetic construct
ALGELVSLGYADK

SEQ ID NO: 7265 - protein, 14 aa, synthetic construct
ALGELVSLGSTVKL

SEQ ID NO: 7266 - protein, 13 aa, synthetic construct
ALGELVSLGSTDK

SEQ ID NO: 7267 - protein, 13 aa, synthetic construct
ALGELVLGQTDKL

SEQ ID NO: 7268 - protein, 14 aa, synthetic construct
ALGELVLGETLATA

SEQ ID NO: 7269 - protein, 14 aa, synthetic construct
ALGELTVGYAPINS

SEQ ID NO: 7270 - protein, 13 aa, synthetic construct
ALGELVCGTTDKL

SEQ ID NO: 7271 - protein, 13 aa, synthetic construct
ALGELVGDTDTLI

SEQ ID NO: 7272 - protein, 14 aa, synthetic construct
ALGELVFLGYTDKL

SEQ ID NO: 7273 - protein, 13 aa, synthetic construct
ALGELVDTYPDKL

SEQ ID NO: 7274 - protein, 12 aa, synthetic construct
ALGELVDTDKLI

SEQ ID NO: 7275 - protein, 13 aa, synthetic construct
ALGELVDSSWDTR

SEQ ID NO: 7276 - protein, 13 aa, synthetic construct
ALGELVDSSCDTR

SEQ ID NO: 7277 - protein, 13 aa, synthetic construct
ALGELVDRSWGTR

SEQ ID NO: 7278 - protein, 13 aa, synthetic construct
ALGELVDKDDKLI

SEQ ID NO: 7279 - protein, 7 aa, synthetic construct
ALGELVD

SEQ ID NO: 7280 - protein, 10 aa, synthetic construct
ALGELVCLGY

SEQ ID NO: 7281 - protein, 6 aa, synthetic construct
ALGELV

SEQ ID NO: 7282 - protein, 13 aa, synthetic construct
ALGELVGGYDDKL

SEQ ID NO: 7283 - protein, 14 aa, synthetic construct
ALGELTYRGIRTDK

SEQ ID NO: 7284 - protein, 13 aa, synthetic construct
ALGELTYLPGKLI

SEQ ID NO: 7285 - protein, 13 aa, synthetic construct
ALGELTYLPEKLI

SEQ ID NO: 7286 - protein, 13 aa, synthetic construct
ALGELTYLPDQLI

SEQ ID NO: 7287 - protein, 13 aa, synthetic construct
ALGELTYLPDKDI

SEQ ID NO: 7288 - protein, 13 aa, synthetic construct
ALGELTYIPDQLI

SEQ ID NO: 7289 - protein, 14 aa, synthetic construct
ALGELTWGSYTDKL

SEQ ID NO: 7290 - protein, 14 aa, synthetic construct
ALGELTVRGIRTDK

SEQ ID NO: 7291 - protein, 13 aa, synthetic construct
ALGELTVLADTLN

SEQ ID NO: 7292 - protein, 14 aa, synthetic construct
ALGELTVGYAYKLI

SEQ ID NO: 7293 - protein, 13 aa, synthetic construct
ALGELVGDTNKLI

SEQ ID NO: 7294 - protein, 14 aa, synthetic construct
ALGELVGGYDYNLI

SEQ ID NO: 7295 - protein, 14 aa, synthetic construct
ALGELVLGDTYKSS

SEQ ID NO: 7296 - protein, 14 aa, synthetic construct
ALGELVLGDRVKLI

SEQ ID NO: 7297 - protein, 14 aa, synthetic construct
ALGELVLGDTVKLI

SEQ ID NO: 7298 - protein, 14 aa, synthetic construct
ALGELVLGDTRINS

SEQ ID NO: 7299 - protein, 14 aa, synthetic construct
ALGELVLGDTQKLI

SEQ ID NO: 7300 - protein, 14 aa, synthetic construct
ALGELVLGDTGKLI

SEQ ID NO: 7301 - protein, 14 aa, synthetic construct
ALGELVLGDTEKLF

SEQ ID NO: 7302 - protein, 14 aa, synthetic construct
ALGELVLGDTDRLI

SEQ ID NO: 7303 - protein, 14 aa, synthetic construct
ALGELVLGDTDNLI

SEQ ID NO: 7304 - protein, 14 aa, synthetic construct
ALGELVLGDTDKLV

SEQ ID NO: 7305 - protein, 14 aa, synthetic construct
ALGELVLGDTDKHI

SEQ ID NO: 7306 - protein, 14 aa, synthetic construct
ALGELVLGDSSWDT

SEQ ID NO: 7307 - protein, 14 aa, synthetic construct
ALGELVLGDQDKLI

SEQ ID NO: 7308 - protein, 14 aa, synthetic construct
ALGELVGLDSTEQL

SEQ ID NO: 7309 - protein, 14 aa, synthetic construct
ALGELVLGDPHKLI

SEQ ID NO: 7310 - protein, 14 aa, synthetic construct
ALGELVLGDPDQLI

SEQ ID NO: 7311 - protein, 14 aa, synthetic construct
ALGELVLGDPDNSS

SEQ ID NO: 7312 - protein, 14 aa, synthetic construct
ALGELVLGDPDKLI

SEQ ID NO: 7313 - protein, 14 aa, synthetic construct
ALGELVLGDLTPIN

SEQ ID NO: 7314 - protein, 14 aa, synthetic construct
ALGELVLGDKYKLI

SEQ ID NO: 7315 - protein, 10 aa, synthetic construct
ALGELVLGDK

SEQ ID NO: 7316 - protein, 14 aa, synthetic construct
ALGELVLGDGPINS

SEQ ID NO: 7317 - protein, 14 aa, synthetic construct
ALGELVLADTDKLI

SEQ ID NO: 7318 - protein, 12 aa, synthetic construct
ALGELVHTDKLI

SEQ ID NO: 7319 - protein, 13 aa, synthetic construct
ALGEPGLPLLGKF

SEQ ID NO: 7320 - protein, 14 aa, synthetic construct
ALGEPGLPLLGVIN

SEQ ID NO: 7321 - protein, 14 aa, synthetic construct
ALGELSPVSGGQKL

SEQ ID NO: 7322 - protein, 14 aa, synthetic construct
ALGERTGGYLDSWD

SEQ ID NO: 7323 - protein, 12 aa, synthetic construct
ALGERGTTINSS

SEQ ID NO: 7324 - protein, 12 aa, synthetic construct
ALGERGSPERGI

SEQ ID NO: 7325 - protein, 14 aa, synthetic construct
ALGERGGYARTDKL

SEQ ID NO: 7326 - protein, 14 aa, synthetic construct
ALGERGGGYDDKLI

SEQ ID NO: 7327 - protein, 14 aa, synthetic construct
ALGERGDTYPDKLI

SEQ ID NO: 7328 - protein, 13 aa, synthetic construct
ALGERGDTPDQLI

SEQ ID NO: 7329 - protein, 13 aa, synthetic construct
ALGERGDTPDKLN

SEQ ID NO: 7330 - protein, 12 aa, synthetic construct
ALGERGDTDKLI

SEQ ID NO: 7331 - protein, 13 aa, synthetic construct
ALGERGDLDDRLI

SEQ ID NO: 7332 - protein, 14 aa, synthetic construct
ALGERERGLRGTDK

SEQ ID NO: 7333 - protein, 14 aa, synthetic construct
ALGEREGGRTVNLI

SEQ ID NO: 7334 - protein, 14 aa, synthetic construct
ALGERDGGQPINSS

SEQ ID NO: 7335 - protein, 14 aa, synthetic construct
ALGERCLRDTLATA

SEQ ID NO: 7336 - protein, 14 aa, synthetic construct
ALGERCLGDTLATA

SEQ ID NO: 7337 - protein, 14 aa, synthetic construct
ALGERAWGSYTEKL

SEQ ID NO: 7338 - protein, 14 aa, synthetic construct
ALGERALQGIKTDK

SEQ ID NO: 7339 - protein, 14 aa, synthetic construct
ALGERALPGIHTDK

SEQ ID NO: 7340 - protein, 10 aa, synthetic construct
ALGEQWTTIN

SEQ ID NO: 7341 - protein, 14 aa, synthetic construct
ALGEQVWGTTDKLI

SEQ ID NO: 7342 - protein, 9 aa, synthetic construct
ALGEQVRGE

SEQ ID NO: 7343 - protein, 11 aa, synthetic construct
ALGEQVDEDYK

SEQ ID NO: 7344 - protein, 13 aa, synthetic construct
ALGEQTFLPDKLI

SEQ ID NO: 7345 - protein, 9 aa, synthetic construct
ALGEQSSYS

SEQ ID NO: 7346 - protein, 14 aa, synthetic construct
ALGERIGGYLGSWD

SEQ ID NO: 7347 - protein, 14 aa, synthetic construct
ALGERLGGYLCSWD

SEQ ID NO: 7348 - protein, 14 aa, synthetic construct
ALGERNGGYLGSWD

SEQ ID NO: 7349 - protein, 13 aa, synthetic construct
ALGERTGGDLGSW

SEQ ID NO: 7350 - protein, 14 aa, synthetic construct
ALGERTGGYARTDK

SEQ ID NO: 7351 - protein, 14 aa, synthetic construct
ALGERTGGWTYNLI

SEQ ID NO: 7352 - protein, 14 aa, synthetic construct
ALGERTGGWTEKLI

SEQ ID NO: 7353 - protein, 13 aa, synthetic construct
ALGERTGGWTDQL

SEQ ID NO: 7354 - protein, 14 aa, synthetic construct
ALGERTGGWTDKII

SEQ ID NO: 7355 - protein, 14 aa, synthetic construct
ALGERTGGSTPINS

SEQ ID NO: 7356 - protein, 14 aa, synthetic construct
ALGERTGGSTDKLI

SEQ ID NO: 7357 - protein, 14 aa, synthetic construct
ALGERTGGSLRSWD

SEQ ID NO: 7358 - protein, 13 aa, synthetic construct
ALGERTGGHRKTH

SEQ ID NO: 7359 - protein, 10 aa, synthetic construct
ALGERTGGHR

SEQ ID NO: 7360 - protein, 14 aa, synthetic construct
ALGERTGGDAGDST

SEQ ID NO: 7361 - protein, 14 aa, synthetic construct
ALGERNGVYLGSWD

SEQ ID NO: 7362 - protein, 14 aa, synthetic construct
ALGERTGDTWAPGT

SEQ ID NO: 7363 - protein, 7 aa, synthetic construct
ALGERTG

SEQ ID NO: 7364 - protein, 13 aa, synthetic construct
ALGERTFLPEKLI

SEQ ID NO: 7365 - protein, 14 aa, synthetic construct
ALGERSYARGSYTD

SEQ ID NO: 7366 - protein, 14 aa, synthetic construct
ALGERSVGSLGSWD

SEQ ID NO: 7367 - protein, 12 aa, synthetic construct
ALGERSHDKLGQ

SEQ ID NO: 7368 - protein, 13 aa, synthetic construct
ALGERPSYVLWDT

SEQ ID NO: 7369 - protein, 14 aa, synthetic construct
ALGERPSYVLGDTD

SEQ ID NO: 7370 - protein, 13 aa, synthetic construct
ALGERPSSVLGDT

SEQ ID NO: 7371 - protein, 11 aa, synthetic construct
ALGERPASVLG

SEQ ID NO: 7372 - protein, 14 aa, synthetic construct
ALGEQSGGYPDILI

SEQ ID NO: 7373 - protein, 13 aa, synthetic construct
ALGEQQGDTDKHI

SEQ ID NO: 7374 - protein, 13 aa, synthetic construct
ALGEQPYWGIYTD

SEQ ID NO: 7375 - protein, 14 aa, synthetic construct
ALGEPVQGDKYTEK

SEQ ID NO: 7376 - protein, 14 aa, synthetic construct
ALGEPVWGTTEKLI

SEQ ID NO: 7377 - protein, 14 aa, synthetic construct
ALGEPVWGTTDTLI

SEQ ID NO: 7378 - protein, 13 aa, synthetic construct
ALGEPVWGTTDKL

SEQ ID NO: 7379 - protein, 13 aa, synthetic construct
ALGEPVVGIYTPI

SEQ ID NO: 7380 - protein, 14 aa, synthetic construct
ALGEPVVGDIYTDK

SEQ ID NO: 7381 - protein, 12 aa, synthetic construct
ALGEPVTRIISS

SEQ ID NO: 7382 - protein, 14 aa, synthetic construct
ALGEPVSLGYTDQL

SEQ ID NO: 7383 - protein, 14 aa, synthetic construct
ALGEPVSGTTDELI

SEQ ID NO: 7384 - protein, 14 aa, synthetic construct
ALGEPVRGDIYADK

SEQ ID NO: 7385 - protein, 10 aa, synthetic construct
ALGEPVQGKF

SEQ ID NO: 7386 - protein, 14 aa, synthetic construct
ALGEPVQGDIYTEK

SEQ ID NO: 7387 - protein, 12 aa, synthetic construct
ALGEPWIHEKLI

SEQ ID NO: 7388 - protein, 14 aa, synthetic construct
ALGEPVMGEIYTDK

SEQ ID NO: 7389 - protein, 13 aa, synthetic construct
ALGEPVMGDTDKL

SEQ ID NO: 7390 - protein, 14 aa, synthetic construct
ALGEPVLWDIYTDK

SEQ ID NO: 7391 - protein, 14 aa, synthetic construct
ALGEPVLVDIYTDK

SEQ ID NO: 7392 - protein, 14 aa, synthetic construct
ALGEPVLRDIYTDK

SEQ ID NO: 7393 - protein, 14 aa, synthetic construct
ALGEPVLPLLGDTD

SEQ ID NO: 7394 - protein, 14 aa, synthetic construct
ALGEPVLGVIYTDK

SEQ ID NO: 7395 - protein, 13 aa, synthetic construct
ALGEPVLGVIYTD

SEQ ID NO: 7396 - protein, 14 aa, synthetic construct
ALGEPVLGTTDKLI

SEQ ID NO: 7397 - protein, 14 aa, synthetic construct
ALGEPVLGIYTPIN

SEQ ID NO: 7398 - protein, 12 aa, synthetic construct
ALGEPWIHDKLI

SEQ ID NO: 7399 - protein, 14 aa, synthetic construct
ALGEQADTYPDKII

SEQ ID NO: 7400 - protein, 6 aa, synthetic construct
ALGEQP

SEQ ID NO: 7401 - protein, 12 aa, synthetic construct
ALGEQGSTDKLI

SEQ ID NO: 7402 - protein, 12 aa, synthetic construct
ALGEQLRAQQKD

SEQ ID NO: 7403 - protein, 14 aa, synthetic construct
ALGEQLLGDIYTDK

SEQ ID NO: 7404 - protein, 13 aa, synthetic construct
ALGEQLGDTDKIN

SEQ ID NO: 7405 - protein, 9 aa, synthetic construct
ALGEQIGRA

SEQ ID NO: 7406 - protein, 11 aa, synthetic construct
ALGEQGTTITH

SEQ ID NO: 7407 - protein, 12 aa, synthetic construct
ALGEQGTTINST

SEQ ID NO: 7408 - protein, 11 aa, synthetic construct
ALGEQGTTINS

SEQ ID NO: 7409 - protein, 12 aa, synthetic construct
ALGEQGTTIKST

SEQ ID NO: 7410 - protein, 12 aa, synthetic construct
ALGEQGTTIHST

SEQ ID NO: 7411 - protein, 12 aa, synthetic construct
ALGEQGSTINSS

SEQ ID NO: 7412 - protein, 12 aa, synthetic construct
ALGEQGSTDKII

SEQ ID NO: 7413 - protein, 10 aa, synthetic construct
ALGEQAQTIN

SEQ ID NO: 7414 - protein, 14 aa, synthetic construct
ALGEQGLTLLGDTD

SEQ ID NO: 7415 - protein, 14 aa, synthetic construct
ALGEQGLPLLGDTD

SEQ ID NO: 7416 - protein, 14 aa, synthetic construct
ALGEQGDTYPEKLI

SEQ ID NO: 7417 - protein, 12 aa, synthetic construct
ALGEQGDTYKQI

SEQ ID NO: 7418 - protein, 13 aa, synthetic construct
ALGEQGDKDDQLI

SEQ ID NO: 7419 - protein, 13 aa, synthetic construct
ALGEQGDKDDKLI

SEQ ID NO: 7420 - protein, 11 aa, synthetic construct
ALGEQGATDIL

SEQ ID NO: 7421 - protein, 14 aa, synthetic construct
ALGEQEWGIRGTDK

SEQ ID NO: 7422 - protein, 14 aa, synthetic construct
ALGEQETGIRCTYK

SEQ ID NO: 7423 - protein, 14 aa, synthetic construct
ALGEQDLPGINTDK

SEQ ID NO: 7424 - protein, 14 aa, synthetic construct
ALGERTGGYGAPIN

SEQ ID NO: 7425 - protein, 14 aa, synthetic construct
ALGERTGGYLGFWD

SEQ ID NO: 7426 - protein, 14 aa, synthetic construct
ALGEPGLPLLGYTD

SEQ ID NO: 7427 - protein, 14 aa, synthetic construct
ALGERTGGYYDKLI

SEQ ID NO: 7428 - protein, 13 aa, synthetic construct
ALGEVGDNPDKLI

SEQ ID NO: 7429 - protein, 13 aa, synthetic construct
ALGEVGDMDDKLI

SEQ ID NO: 7430 - protein, 14 aa, synthetic construct
ALGEVGDKTTKLLF

SEQ ID NO: 7431 - protein, 13 aa, synthetic construct
ALGEVGDKDEKLN

SEQ ID NO: 7432 - protein, 13 aa, synthetic construct
ALGEVGDKDEKLI

SEQ ID NO: 7433 - protein, 13 aa, synthetic construct
ALGEVGDKDDNLI

SEQ ID NO: 7434 - protein, 13 aa, synthetic construct
ALGEVGDKDDKLT

SEQ ID NO: 7435 - protein, 12 aa, synthetic construct
ALGEVGDKDDKL

SEQ ID NO: 7436 - protein, 12 aa, synthetic construct
ALGEVGCADKDK

SEQ ID NO: 7437 - protein, 11 aa, synthetic construct
ALGEVGAYALK

SEQ ID NO: 7438 - protein, 12 aa, synthetic construct
ALGEVGARSWDT

SEQ ID NO: 7439 - protein, 13 aa, synthetic construct
ALGEVGAMDDILI

SEQ ID NO: 7440 - protein, 13 aa, synthetic construct
ALGEVGAKDDKLI

SEQ ID NO: 7441 - protein, 13 aa, synthetic construct
ALGEVGAKDDKLF

SEQ ID NO: 7442 - protein, 14 aa, synthetic construct
ALGEVGAGYDDNKI

SEQ ID NO: 7443 - protein, 10 aa, synthetic construct
ALGEVFLLGY

SEQ ID NO: 7444 - protein, 14 aa, synthetic construct
ALGEVFLLGTPRNS

SEQ ID NO: 7445 - protein, 14 aa, synthetic construct
ALGEVFLLGDTEKL

SEQ ID NO: 7446 - protein, 14 aa, synthetic construct
ALGEVEWVIRGTDK

SEQ ID NO: 7447 - protein, 14 aa, synthetic construct
ALGEVEWGRSGTDK

SEQ ID NO: 7448 - protein, 14 aa, synthetic construct
ALGEVEWGRRGTDK

SEQ ID NO: 7449 - protein, 14 aa, synthetic construct
ALGEVEWGISGTDK

SEQ ID NO: 7450 - protein, 14 aa, synthetic construct
ALGEVEWGIMGTDK

SEQ ID NO: 7451 - protein, 8 aa, synthetic construct
ALGEVGDS

SEQ ID NO: 7452 - protein, 13 aa, synthetic construct
ALGEVGDSSCDTR

SEQ ID NO: 7453 - protein, 13 aa, synthetic construct
ALGEVGDTADQLI

SEQ ID NO: 7454 - protein, 14 aa, synthetic construct
ALGEVGGAYDDNLI

SEQ ID NO: 7455 - protein, 12 aa, synthetic construct
ALGEVGSTDKLL

SEQ ID NO: 7456 - protein, 10 aa, synthetic construct
ALGEVGSTDK

SEQ ID NO: 7457 - protein, 12 aa, synthetic construct
ALGEVGSTANLI

SEQ ID NO: 7458 - protein, 12 aa, synthetic construct
ALGEVGSPEILF

SEQ ID NO: 7459 - protein, 14 aa, synthetic construct
ALGEVGPGGYADKL

SEQ ID NO: 7460 - protein, 14 aa, synthetic construct
ALGEVGNTYPDKLI

SEQ ID NO: 7461 - protein, 13 aa, synthetic construct
ALGEVGGIRSKLF

SEQ ID NO: 7462 - protein, 14 aa, synthetic construct
ALGEVGGGYDVKLI

SEQ ID NO: 7463 - protein, 14 aa, synthetic construct
ALGEVGGGYDDQLI

SEQ ID NO: 7464 - protein, 14 aa, synthetic construct
ALGEVGGGYDDKLF

SEQ ID NO: 7465 - protein, 13 aa, synthetic construct
ALGEVGESSGDTR

SEQ ID NO: 7466 - protein, 12 aa, synthetic construct
ALGEVGDTAQLI

SEQ ID NO: 7467 - protein, 13 aa, synthetic construct
ALGEVGENPHKLI

SEQ ID NO: 7468 - protein, 14 aa, synthetic construct
ALGEVGDTYPDILI

SEQ ID NO: 7469 - protein, 13 aa, synthetic construct
ALGEVGDTPYKLI

SEQ ID NO: 7470 - protein, 13 aa, synthetic construct
ALGEVGDTPEKPI

SEQ ID NO: 7471 - protein, 10 aa, synthetic construct
ALGEVGDTPD

SEQ ID NO: 7472 - protein, 13 aa, synthetic construct
ALGEVGDTHDKLI

SEQ ID NO: 7473 - protein, 12 aa, synthetic construct
ALGEVGDTDNLI

SEQ ID NO: 7474 - protein, 12 aa, synthetic construct
ALGEVGDTDKLN

SEQ ID NO: 7475 - protein, 12 aa, synthetic construct
ALGEVGDTDKII

SEQ ID NO: 7476 - protein, 10 aa, synthetic construct
ALGEVGDTDK

SEQ ID NO: 7477 - protein, 14 aa, synthetic construct
ALGEVEWGIGGTDK

SEQ ID NO: 7478 - protein, 14 aa, synthetic construct
ALGEVELVIRGTDK

SEQ ID NO: 7479 - protein, 11 aa, synthetic construct
ALGEVDTEKLI

SEQ ID NO: 7480 - protein, 12 aa, synthetic construct
ALGESGTTINSS

SEQ ID NO: 7481 - protein, 14 aa, synthetic construct
ALGETGLPLLRDTD

SEQ ID NO: 7482 - protein, 14 aa, synthetic construct
ALGETAYWGINTDK

SEQ ID NO: 7483 - protein, 13 aa, synthetic construct
ALGETANWGINTD

SEQ ID NO: 7484 - protein, 12 aa, synthetic construct
ALGESWIHAKII

SEQ ID NO: 7485 - protein, 14 aa, synthetic construct
ALGESVLGDLYTDK

SEQ ID NO: 7486 - protein, 14 aa, synthetic construct
ALGESTGGWTDKLI

SEQ ID NO: 7487 - protein, 14 aa, synthetic construct
ALGESTGDTCAHGT

SEQ ID NO: 7488 - protein, 12 aa, synthetic construct
ALGESPSYVLWD

SEQ ID NO: 7489 - protein, 14 aa, synthetic construct
ALGESPSYVLGTPI

SEQ ID NO: 7490 - protein, 14 aa, synthetic construct
ALGESPSYELGTPI

SEQ ID NO: 7491 - protein, 14 aa, synthetic construct
ALGESANWGINTVN

SEQ ID NO: 7492 - protein, 14 aa, synthetic construct
ALGETPSYVLGTPI

SEQ ID NO: 7493 - protein, 13 aa, synthetic construct
ALGERWWIRSKLI

SEQ ID NO: 7494 - protein, 12 aa, synthetic construct
ALGERWIHDQLI

SEQ ID NO: 7495 - protein, 13 aa, synthetic construct
ALGERWGRRSKLI

SEQ ID NO: 7496 - protein, 14 aa, synthetic construct
ALGERVWGTTDKLI

SEQ ID NO: 7497 - protein, 14 aa, synthetic construct
ALGERVTLGYSDKL

SEQ ID NO: 7498 - protein, 14 aa, synthetic construct
ALGERVSLGYTDKL

SEQ ID NO: 7499 - protein, 10 aa, synthetic construct
ALGERTVVHR

SEQ ID NO: 7500 - protein, 14 aa, synthetic construct
ALGERTVRYLGSWD

SEQ ID NO: 7501 - protein, 13 aa, synthetic construct
ALGERTVGYLGSW

SEQ ID NO: 7502 - protein, 14 aa, synthetic construct
ALGERTGVDLGSWD

SEQ ID NO: 7503 - protein, 14 aa, synthetic construct
ALGETHSYVLGDTD

SEQ ID NO: 7504 - protein, 11 aa, synthetic construct
ALGETPTTINS

SEQ ID NO: 7505 - protein, 11 aa, synthetic construct
ALGEVDTDKPI

SEQ ID NO: 7506 - protein, 14 aa, synthetic construct
ALGEVAWGLTPIHS

SEQ ID NO: 7507 - protein, 11 aa, synthetic construct
ALGEVDTDKLF

SEQ ID NO: 7508 - protein, 9 aa, synthetic construct
ALGEVDTDK

SEQ ID NO: 7509 - protein, 14 aa, synthetic construct
ALGEVCVGATLATA

SEQ ID NO: 7510 - protein, 14 aa, synthetic construct
ALGEVCMGDTLATA

SEQ ID NO: 7511 - protein, 14 aa, synthetic construct
ALGEVCLGERLATA

SEQ ID NO: 7512 - protein, 14 aa, synthetic construct
ALGEVCLGDTPATA

SEQ ID NO: 7513 - protein, 14 aa, synthetic construct
ALGEVAWGSYTEKL

SEQ ID NO: 7514 - protein, 14 aa, synthetic construct
ALGEVAWGSYTDQL

SEQ ID NO: 7515 - protein, 14 aa, synthetic construct
ALGEVAWGSYSDKL

SEQ ID NO: 7516 - protein, 14 aa, synthetic construct
ALGEVAWGSYNDKL

SEQ ID NO: 7517 - protein, 8 aa, synthetic construct
ALGEVAWG

SEQ ID NO: 7518 - protein, 14 aa, synthetic construct
ALGETSYAGGSYTD

SEQ ID NO: 7519 - protein, 13 aa, synthetic construct
ALGEVATDTYKLI

SEQ ID NO: 7520 - protein, 14 aa, synthetic construct
ALGEVARATENLII

SEQ ID NO: 7521 - protein, 9 aa, synthetic construct
ALGEVAPTT

SEQ ID NO: 7522 - protein, 11 aa, synthetic construct
ALGEVANWGIN

SEQ ID NO: 7523 - protein, 13 aa, synthetic construct
ALGEVANWGILTD

SEQ ID NO: 7524 - protein, 14 aa, synthetic construct
ALGEVANWGIKSDK

SEQ ID NO: 7525 - protein, 11 aa, synthetic construct
ALGEVAFPYWG

SEQ ID NO: 7526 - protein, 12 aa, synthetic construct
ALGEVAFPYCGT

SEQ ID NO: 7527 - protein, 14 aa, synthetic construct
ALGETVVGDIYTDK

SEQ ID NO: 7528 - protein, 6 aa, synthetic construct
ALGETT

SEQ ID NO: 7529 - protein, 14 aa, synthetic construct
ALGEPVLGIHTDKL

SEQ ID NO: 7530 - protein, 14 aa, synthetic construct
ALGEPVLGGIYTEK

SEQ ID NO: 7531 - protein, 13 aa, synthetic construct
ALGEPVLGEIYTD

SEQ ID NO: 7532 - protein, 10 aa, synthetic construct
ALGEPVLGEI

SEQ ID NO: 7533 - protein, 14 aa, synthetic construct
ALGEPPSYVEGDTD

SEQ ID NO: 7534 - protein, 14 aa, synthetic construct
ALGEPPSYIMGDTD

SEQ ID NO: 7535 - protein, 14 aa, synthetic construct
ALGEPPSYILGDTD

SEQ ID NO: 7536 - protein, 13 aa, synthetic construct
ALGEPPSYELWDT

SEQ ID NO: 7537 - protein, 14 aa, synthetic construct
ALGEPPSYELGTPI

SEQ ID NO: 7538 - protein, 14 aa, synthetic construct
ALGEPPSYDLGTPI

SEQ ID NO: 7539 - protein, 11 aa, synthetic construct
ALGEPPSYAGG

SEQ ID NO: 7540 - protein, 12 aa, synthetic construct
ALGEPPSTEKVY

SEQ ID NO: 7541 - protein, 14 aa, synthetic construct
ALGEPPSSVQGTPI

SEQ ID NO: 7542 - protein, 13 aa, synthetic construct
ALGEPPSSVLGTP

SEQ ID NO: 7543 - protein, 14 aa, synthetic construct
ALGEPPSHVLGTPI

SEQ ID NO: 7544 - protein, 13 aa, synthetic construct
ALGEPPSHVLGDT

SEQ ID NO: 7545 - protein, 13 aa, synthetic construct
ALGEPPSFRTGGY

SEQ ID NO: 7546 - protein, 13 aa, synthetic construct
ALGEPPSDVLWDT

SEQ ID NO: 7547 - protein, 14 aa, synthetic construct
ALGEPPSDVLGDTD

SEQ ID NO: 7548 - protein, 13 aa, synthetic construct
ALGEPPSCVLGDT

SEQ ID NO: 7549 - protein, 14 aa, synthetic construct
ALGEPPPYVMGTPI

SEQ ID NO: 7550 - protein, 14 aa, synthetic construct
ALGEPPPYVLGTPI

SEQ ID NO: 7551 - protein, 14 aa, synthetic construct
ALGEPPPNVLGDTD

SEQ ID NO: 7552 - protein, 14 aa, synthetic construct
ALGEPPNYVLATPI

SEQ ID NO: 7553 - protein, 14 aa, synthetic construct
ALGEPPGGWTEKLI

SEQ ID NO: 7554 - protein, 14 aa, synthetic construct
ALGEPPGGWTDQLI

SEQ ID NO: 7555 - protein, 14 aa, synthetic construct
ALGEPPGGWPENLI

SEQ ID NO: 7556 - protein, 11 aa, synthetic construct
ALGEPPSYVLG

SEQ ID NO: 7557 - protein, 14 aa, synthetic construct
ALGEPPSYVLGATD

SEQ ID NO: 7558 - protein, 13 aa, synthetic construct
ALGEPPSYVLGDK

SEQ ID NO: 7559 - protein, 13 aa, synthetic construct
ALGEPPSYVQWDT

SEQ ID NO: 7560 - protein, 14 aa, synthetic construct
ALGEPPYWGIYTDK

SEQ ID NO: 7561 - protein, 14 aa, synthetic construct
ALGEPPYGGSYTDK

SEQ ID NO: 7562 - protein, 13 aa, synthetic construct
ALGEPPYAGGSYT

SEQ ID NO: 7563 - protein, 14 aa, synthetic construct
ALGEPPVGWNDKLI

SEQ ID NO: 7564 - protein, 14 aa, synthetic construct
ALGEPPTYVLWTPI

SEQ ID NO: 7565 - protein, 13 aa, synthetic construct
ALGEPPTYVLWDT

SEQ ID NO: 7566 - protein, 14 aa, synthetic construct
ALGEPPTYVLRDTD

SEQ ID NO: 7567 - protein, 13 aa, synthetic construct
ALGEPPTYLLWDT

SEQ ID NO: 7568 - protein, 14 aa, synthetic construct
ALGEPPTYELGDTD

SEQ ID NO: 7569 - protein, 14 aa, synthetic construct
ALGEPPTYALGDTD

SEQ ID NO: 7570 - protein, 14 aa, synthetic construct
ALGEPPSYVQGDTD

SEQ ID NO: 7571 - protein, 14 aa, synthetic construct
ALGEPPSYVLGDTR

SEQ ID NO: 7572 - protein, 14 aa, synthetic construct
ALGEPPSYVPGDTD

SEQ ID NO: 7573 - protein, 14 aa, synthetic construct
ALGEPPSYVPGATD

SEQ ID NO: 7574 - protein, 13 aa, synthetic construct
ALGEPPSYVMWDT

SEQ ID NO: 7575 - protein, 14 aa, synthetic construct
ALGEPPSYVMGATD

SEQ ID NO: 7576 - protein, 13 aa, synthetic construct
ALGEPPSYVLRDT

SEQ ID NO: 7577 - protein, 14 aa, synthetic construct
ALGEPPSYVLGYTD

SEQ ID NO: 7578 - protein, 14 aa, synthetic construct
ALGEPPSYVLGVIN

SEQ ID NO: 7579 - protein, 14 aa, synthetic construct
ALGEPPSYVLGSTD

SEQ ID NO: 7580 - protein, 14 aa, synthetic construct
ALGEPPSYVLGRPI

SEQ ID NO: 7581 - protein, 14 aa, synthetic construct
ALGEPPSYVLGHTD

SEQ ID NO: 7582 - protein, 14 aa, synthetic construct
ALGEPPGGCTEKLI

SEQ ID NO: 7583 - protein, 13 aa, synthetic construct
ALGEPPFYVLGDT

SEQ ID NO: 7584 - protein, 14 aa, synthetic construct
ALGEPPAYVQGDTD

SEQ ID NO: 7585 - protein, 12 aa, synthetic construct
ALGEPGPTIKSS

SEQ ID NO: 7586 - protein, 12 aa, synthetic construct
ALGEPGSTRYSS

SEQ ID NO: 7587 - protein, 13 aa, synthetic construct
ALGEPGSTLTTSM

SEQ ID NO: 7588 - protein, 12 aa, synthetic construct
ALGEPGSTINSS

SEQ ID NO: 7589 - protein, 12 aa, synthetic construct
ALGEPGSTDKVI

SEQ ID NO: 7590 - protein, 11 aa, synthetic construct
ALGEPGSTDKL

SEQ ID NO: 7591 - protein, 14 aa, synthetic construct
ALGEPGSPILRDTD

SEQ ID NO: 7592 - protein, 12 aa, synthetic construct
ALGEPGRPINSS

SEQ ID NO: 7593 - protein, 14 aa, synthetic construct
ALGEPGRALLGDTD

SEQ ID NO: 7594 - protein, 12 aa, synthetic construct
ALGEPGPTINTS

SEQ ID NO: 7595 - protein, 12 aa, synthetic construct
ALGEPGPTINST

SEQ ID NO: 7596 - protein, 12 aa, synthetic construct
ALGEPGNTINST

SEQ ID NO: 7597 - protein, 11 aa, synthetic construct
ALGEPGTNINS

SEQ ID NO: 7598 - protein, 12 aa, synthetic construct
ALGEPGNTINSS

SEQ ID NO: 7599 - protein, 13 aa, synthetic construct
ALGEPGLTLLGDT

SEQ ID NO: 7600 - protein, 13 aa, synthetic construct
ALGEPGLRLLWDT

SEQ ID NO: 7601 - protein, 14 aa, synthetic construct
ALGEPGLPQLGDTD

SEQ ID NO: 7602 - protein, 14 aa, synthetic construct
ALGEPGLPPLGDTD

SEQ ID NO: 7603 - protein, 14 aa, synthetic construct
ALGEPGLPLVGDTD

SEQ ID NO: 7604 - protein, 14 aa, synthetic construct
ALGEPGLPLPGDTD

SEQ ID NO: 7605 - protein, 13 aa, synthetic construct
ALGEPGLPLMGDT

SEQ ID NO: 7606 - protein, 13 aa, synthetic construct
ALGEPGLPLLWEI

SEQ ID NO: 7607 - protein, 14 aa, synthetic construct
ALGEPGLPLLRDTD

SEQ ID NO: 7608 - protein, 12 aa, synthetic construct
ALGEPGTMINTT

SEQ ID NO: 7609 - protein, 12 aa, synthetic construct
ALGEPGTPIISS

SEQ ID NO: 7610 - protein, 14 aa, synthetic construct
ALGEPNGGWTDKNI

SEQ ID NO: 7611 - protein, 14 aa, synthetic construct
ALGEPHSYLLGDTD

SEQ ID NO: 7612 - protein, 13 aa, synthetic construct
ALGEPNGGWTDKL

SEQ ID NO: 7613 - protein, 14 aa, synthetic construct
ALGEPNGGWADKLI

SEQ ID NO: 7614 - protein, 14 aa, synthetic construct
ALGEPLWGTTDKLI

SEQ ID NO: 7615 - protein, 13 aa, synthetic construct
ALGEPLVGDLYTD

SEQ ID NO: 7616 - protein, 14 aa, synthetic construct
ALGEPLLGDIYTDK

SEQ ID NO: 7617 - protein, 13 aa, synthetic construct
ALGEPLGDTDQLI

SEQ ID NO: 7618 - protein, 14 aa, synthetic construct
ALGEPKWGWSAKLI

SEQ ID NO: 7619 - protein, 14 aa, synthetic construct
ALGEPIGGWTDKLI

SEQ ID NO: 7620 - protein, 14 aa, synthetic construct
ALGEPHSYVMGDTD

SEQ ID NO: 7621 - protein, 13 aa, synthetic construct
ALGEPHSYVLGDT

SEQ ID NO: 7622 - protein, 8 aa, synthetic construct
ALGEPGVH

SEQ ID NO: 7623 - protein, 12 aa, synthetic construct
ALGEPGTPITST

SEQ ID NO: 7624 - protein, 12 aa, synthetic construct
ALGEPGTTVHSS

SEQ ID NO: 7625 - protein, 12 aa, synthetic construct
ALGEPGTTRNSA

SEQ ID NO: 7626 - protein, 12 aa, synthetic construct
ALGEPGTTRDSS

SEQ ID NO: 7627 - protein, 12 aa, synthetic construct
ALGEPGTTMHSS

SEQ ID NO: 7628 - protein, 12 aa, synthetic construct
ALGEPGTTLISS

SEQ ID NO: 7629 - protein, 11 aa, synthetic construct
ALGEPGTTITS

SEQ ID NO: 7630 - protein, 11 aa, synthetic construct
ALGEPGTTITH

SEQ ID NO: 7631 - protein, 12 aa, synthetic construct
ALGEPGTTINLS

SEQ ID NO: 7632 - protein, 12 aa, synthetic construct
ALGEPGTTIKST

SEQ ID NO: 7633 - protein, 12 aa, synthetic construct
ALGEPGTPRTSS

SEQ ID NO: 7634 - protein, 13 aa, synthetic construct
ALGEPPYYLLWDT

SEQ ID NO: 7635 - protein, 14 aa, synthetic construct
ALGEPPYYVLRDTD

SEQ ID NO: 7636 - protein, 13 aa, synthetic construct
ALGEPPYYVLWDT

SEQ ID NO: 7637 - protein, 14 aa, synthetic construct
ALGEPTGGWTSKLI

SEQ ID NO: 7638 - protein, 13 aa, synthetic construct
ALGEPTRGYRYKQ

SEQ ID NO: 7639 - protein, 14 aa, synthetic construct
ALGEPTRGGTDTLI

SEQ ID NO: 7640 - protein, 14 aa, synthetic construct
ALGEPTGVWTYKLI

SEQ ID NO: 7641 - protein, 14 aa, synthetic construct
ALGEPTGVCTDKLI

SEQ ID NO: 7642 - protein, 14 aa, synthetic construct
ALGEPTGGYTPINS

SEQ ID NO: 7643 - protein, 14 aa, synthetic construct
ALGEPTGGYSVNSS

SEQ ID NO: 7644 - protein, 14 aa, synthetic construct
ALGEPTGGYPINSS

SEQ ID NO: 7645 - protein, 14 aa, synthetic construct
ALGEPTGGYAPINS

SEQ ID NO: 7646 - protein, 14 aa, synthetic construct
ALGEPTGGWTYTLI

SEQ ID NO: 7647 - protein, 13 aa, synthetic construct
ALGEPTGGWTVKL

SEQ ID NO: 7648 - protein, 14 aa, synthetic construct
ALGEPTGGWTGKLI

SEQ ID NO: 7649 - protein, 14 aa, synthetic construct
ALGEPTVGWPEKLI

SEQ ID NO: 7650 - protein, 14 aa, synthetic construct
ALGEPTGGWTDNLL

SEQ ID NO: 7651 - protein, 13 aa, synthetic construct
ALGEPTGGWTDKI

SEQ ID NO: 7652 - protein, 14 aa, synthetic construct
ALGEPTGGWTDKHI

SEQ ID NO: 7653 - protein, 12 aa, synthetic construct
ALGEPTGGWTDK

SEQ ID NO: 7654 - protein, 11 aa, synthetic construct
ALGEPTGGWTD

SEQ ID NO: 7655 - protein, 14 aa, synthetic construct
ALGEPTGGWPEKLI

SEQ ID NO: 7656 - protein, 14 aa, synthetic construct
ALGEPTGGWNDKLI

SEQ ID NO: 7657 - protein, 14 aa, synthetic construct
ALGEPTGGWNDKHI

SEQ ID NO: 7658 - protein, 14 aa, synthetic construct
ALGEPTGGWIDKLI

SEQ ID NO: 7659 - protein, 14 aa, synthetic construct
ALGEPTGGSYTDKL

SEQ ID NO: 7660 - protein, 13 aa, synthetic construct
ALGEPTVGCTDKL

SEQ ID NO: 7661 - protein, 14 aa, synthetic construct
ALGEPTVGWTQILI

SEQ ID NO: 7662 - protein, 14 aa, synthetic construct
ALGEPTGGLTDKII

SEQ ID NO: 7663 - protein, 14 aa, synthetic construct
ALGEPVLGDLCTDK

SEQ ID NO: 7664 - protein, 14 aa, synthetic construct
ALGEPVLGDVYTDK

SEQ ID NO: 7665 - protein, 14 aa, synthetic construct
ALGEPVLGDTYPDK

SEQ ID NO: 7666 - protein, 14 aa, synthetic construct
ALGEPVLGDTPDKL

SEQ ID NO: 7667 - protein, 14 aa, synthetic construct
ALGEPVLGDTPAIN

SEQ ID NO: 7668 - protein, 14 aa, synthetic construct
ALGEPVLGDTLATA

SEQ ID NO: 7669 - protein, 13 aa, synthetic construct
ALGEPVLGDSPLI

SEQ ID NO: 7670 - protein, 14 aa, synthetic construct
ALGEPVLGDRYTEK

SEQ ID NO: 7671 - protein, 13 aa, synthetic construct
ALGEPVLGDLYTG

SEQ ID NO: 7672 - protein, 14 aa, synthetic construct
ALGEPVLGDLYTEK

SEQ ID NO: 7673 - protein, 14 aa, synthetic construct
ALGEPVLGDLYTDQ

SEQ ID NO: 7674 - protein, 14 aa, synthetic construct
ALGEPVLGDKDDKL

SEQ ID NO: 7675 - protein, 14 aa, synthetic construct
ALGEPTYAVVSYTD

SEQ ID NO: 7676 - protein, 14 aa, synthetic construct
ALGEPVLGDIYPDK

SEQ ID NO: 7677 - protein, 14 aa, synthetic construct
ALGEPVLGDIYNDK

SEQ ID NO: 7678 - protein, 14 aa, synthetic construct
ALGEPVLGDIYIDK

SEQ ID NO: 7679 - protein, 14 aa, synthetic construct
ALGEPVLGDISPDK

SEQ ID NO: 7680 - protein, 14 aa, synthetic construct
ALGEPVLGDINTDK

SEQ ID NO: 7681 - protein, 13 aa, synthetic construct
ALGEPVLGDINPS

SEQ ID NO: 7682 - protein, 9 aa, synthetic construct
ALGEPVLGD

SEQ ID NO: 7683 - protein, 14 aa, synthetic construct
ALGEPVLGASYTDK

SEQ ID NO: 7684 - protein, 12 aa, synthetic construct
ALGEPVIPLLGE

SEQ ID NO: 7685 - protein, 14 aa, synthetic construct
ALGEPVEGDIYTDK

SEQ ID NO: 7686 - protein, 13 aa, synthetic construct
ALGEPTGGLTDKL

SEQ ID NO: 7687 - protein, 13 aa, synthetic construct
ALGEPTGGHRETH

SEQ ID NO: 7688 - protein, 14 aa, synthetic construct
ALGEPQSYVLGDTD

SEQ ID NO: 7689 - protein, 11 aa, synthetic construct
ALGEPSHAGGS

SEQ ID NO: 7690 - protein, 14 aa, synthetic construct
ALGEPSYAGASYTD

SEQ ID NO: 7691 - protein, 14 aa, synthetic construct
ALGEPSYAAGAYTD

SEQ ID NO: 7692 - protein, 7 aa, synthetic construct
ALGEPSY

SEQ ID NO: 7693 - protein, 14 aa, synthetic construct
ALGEPSSAGGSYTD

SEQ ID NO: 7694 - protein, 14 aa, synthetic construct
ALGEPSNPGGSYTD

SEQ ID NO: 7695 - protein, 14 aa, synthetic construct
ALGEPSNARGSYTD

SEQ ID NO: 7696 - protein, 10 aa, synthetic construct
ALGEPSNAGG

SEQ ID NO: 7697 - protein, 13 aa, synthetic construct
ALGEPSLRGIHTD

SEQ ID NO: 7698 - protein, 13 aa, synthetic construct
ALGEPSLRGIHAD

SEQ ID NO: 7699 - protein, 14 aa, synthetic construct
ALGEPSLPLLGDTD

SEQ ID NO: 7700 - protein, 14 aa, synthetic construct
ALGEPSGGWTEILI

SEQ ID NO: 7701 - protein, 14 aa, synthetic construct
ALGEPSYAGGCYTD

SEQ ID NO: 7702 - protein, 14 aa, synthetic construct
ALGEPSGGWTEILF

SEQ ID NO: 7703 - protein, 14 aa, synthetic construct
ALGEPSGGWTDIVI

SEQ ID NO: 7704 - protein, 14 aa, synthetic construct
ALGEPSGGSTYKLI

SEQ ID NO: 7705 - protein, 14 aa, synthetic construct
ALGEPSGGSTDKLI

SEQ ID NO: 7706 - protein, 14 aa, synthetic construct
ALGEPSFAGGSYTD

SEQ ID NO: 7707 - protein, 10 aa, synthetic construct
ALGEPSFAGG

SEQ ID NO: 7708 - protein, 10 aa, synthetic construct
ALGEPSDAGG

SEQ ID NO: 7709 - protein, 14 aa, synthetic construct
ALGEPRTGGYAYTD

SEQ ID NO: 7710 - protein, 13 aa, synthetic construct
ALGEPRSYVLWDT

SEQ ID NO: 7711 - protein, 14 aa, synthetic construct
ALGEPREGDKSKLI

SEQ ID NO: 7712 - protein, 14 aa, synthetic construct
ALGEPSYAGDSPWD

SEQ ID NO: 7713 - protein, 14 aa, synthetic construct
ALGEPSYAGGDYTD

SEQ ID NO: 7714 - protein, 14 aa, synthetic construct
ALGEPTGGGTDQLI

SEQ ID NO: 7715 - protein, 14 aa, synthetic construct
ALGEPSYVGGSCTD

SEQ ID NO: 7716 - protein, 14 aa, synthetic construct
ALGEPTGGGTDKLI

SEQ ID NO: 7717 - protein, 14 aa, synthetic construct
ALGEPTGGGPDKLI

SEQ ID NO: 7718 - protein, 13 aa, synthetic construct
ALGEPTGGCTDKL

SEQ ID NO: 7719 - protein, 13 aa, synthetic construct
ALGEPTGEWTDKL

SEQ ID NO: 7720 - protein, 14 aa, synthetic construct
ALGEPTGAWTYKLI

SEQ ID NO: 7721 - protein, 14 aa, synthetic construct
ALGEPTGAGPINSS

SEQ ID NO: 7722 - protein, 7 aa, synthetic construct
ALGEPTG

SEQ ID NO: 7723 - protein, 13 aa, synthetic construct
ALGEPTFLPDKLN

SEQ ID NO: 7724 - protein, 14 aa, synthetic construct
ALGEPTEGWTDNLI

SEQ ID NO: 7725 - protein, 14 aa, synthetic construct
ALGEPTAGWTDKLI

SEQ ID NO: 7726 - protein, 14 aa, synthetic construct
ALGEPSYTGGSYTD

SEQ ID NO: 7727 - protein, 14 aa, synthetic construct
ALGEPSYAGGHDDK

SEQ ID NO: 7728 - protein, 14 aa, synthetic construct
ALGEPSYSGGSYTD

SEQ ID NO: 7729 - protein, 14 aa, synthetic construct
ALGEPSYARGSYTD

SEQ ID NO: 7730 - protein, 14 aa, synthetic construct
ALGEPSYAGGYYTD

SEQ ID NO: 7731 - protein, 14 aa, synthetic construct
ALGEPSYAGGYDDK

SEQ ID NO: 7732 - protein, 14 aa, synthetic construct
ALGEPSYAGGYAPI

SEQ ID NO: 7733 - protein, 11 aa, synthetic construct
ALGEPSYAGGY

SEQ ID NO: 7734 - protein, 12 aa, synthetic construct
ALGEPSYAGGSS

SEQ ID NO: 7735 - protein, 14 aa, synthetic construct
ALGEPSYAGGSNTD

SEQ ID NO: 7736 - protein, 14 aa, synthetic construct
ALGEPSYAGGQLIN

SEQ ID NO: 7737 - protein, 12 aa, synthetic construct
ALGEPSYAGGNS

SEQ ID NO: 7738 - protein, 14 aa, synthetic construct
ALGELSPVTGGLKL

SEQ ID NO: 7739 - protein, 14 aa, synthetic construct
ALGELSPRGIHTDK

SEQ ID NO: 7740 - protein, 14 aa, synthetic construct
ALGELCLGDSLATA

SEQ ID NO: 7741 - protein, 14 aa, synthetic construct
ALGELGGGYDDQLF

SEQ ID NO: 7742 - protein, 14 aa, synthetic construct
ALGELGDTYPYQLI

SEQ ID NO: 7743 - protein, 14 aa, synthetic construct
ALGELGDTYPVKLI

SEQ ID NO: 7744 - protein, 14 aa, synthetic construct
ALGELGDTYPEKLF

SEQ ID NO: 7745 - protein, 14 aa, synthetic construct
ALGELGDTYPDKVI

SEQ ID NO: 7746 - protein, 14 aa, synthetic construct
ALGELGDTYPDKNI

SEQ ID NO: 7747 - protein, 12 aa, synthetic construct
ALGELGDTYPDK

SEQ ID NO: 7748 - protein, 14 aa, synthetic construct
ALGELGDTYPDELI

SEQ ID NO: 7749 - protein, 14 aa, synthetic construct
ALGELGDTYLDKLI

SEQ ID NO: 7750 - protein, 12 aa, synthetic construct
ALGELGDTYKHI

SEQ ID NO: 7751 - protein, 14 aa, synthetic construct
ALGELGDTYADKLI

SEQ ID NO: 7752 - protein, 13 aa, synthetic construct
ALGELGDTWAPGT

SEQ ID NO: 7753 - protein, 14 aa, synthetic construct
ALGELGDTWAHGTP

SEQ ID NO: 7754 - protein, 12 aa, synthetic construct
ALGELGDTVKLI

SEQ ID NO: 7755 - protein, 13 aa, synthetic construct
ALGELGDTTLNSS

SEQ ID NO: 7756 - protein, 13 aa, synthetic construct
ALGELGDTRIKTS

SEQ ID NO: 7757 - protein, 13 aa, synthetic construct
ALGELGDTPRNSS

SEQ ID NO: 7758 - protein, 13 aa, synthetic construct
ALGELGDTPRKSS

SEQ ID NO: 7759 - protein, 12 aa, synthetic construct
ALGELGDTPINS

SEQ ID NO: 7760 - protein, 14 aa, synthetic construct
ALGELGDTNPDKHI

SEQ ID NO: 7761 - protein, 12 aa, synthetic construct
ALGELGDTLAPI

SEQ ID NO: 7762 - protein, 13 aa, synthetic construct
ALGELGDTHRETH

SEQ ID NO: 7763 - protein, 12 aa, synthetic construct
ALGELGDTEKLV

SEQ ID NO: 7764 - protein, 14 aa, synthetic construct
ALGELGDTEGRDTH

SEQ ID NO: 7765 - protein, 14 aa, synthetic construct
ALGELGDTYTAKLI

SEQ ID NO: 7766 - protein, 13 aa, synthetic construct
ALGELGDTYTDKL

SEQ ID NO: 7767 - protein, 14 aa, synthetic construct
ALGELGDTYTDTLI

SEQ ID NO: 7768 - protein, 14 aa, synthetic construct
ALGELGGGDAEKLI

SEQ ID NO: 7769 - protein, 14 aa, synthetic construct
ALGELGGGYAPINS

SEQ ID NO: 7770 - protein, 14 aa, synthetic construct
ALGELGGGYAGDST

SEQ ID NO: 7771 - protein, 14 aa, synthetic construct
ALGELGGGSTPINS

SEQ ID NO: 7772 - protein, 14 aa, synthetic construct
ALGELGGGSDEKLI

SEQ ID NO: 7773 - protein, 14 aa, synthetic construct
ALGELGGGHDDKLI

SEQ ID NO: 7774 - protein, 12 aa, synthetic construct
ALGELGGGFAPD

SEQ ID NO: 7775 - protein, 14 aa, synthetic construct
ALGELGGGDYDKLI

SEQ ID NO: 7776 - protein, 14 aa, synthetic construct
ALGELGGGDDYKLI

SEQ ID NO: 7777 - protein, 14 aa, synthetic construct
ALGELGGGDDEKLI

SEQ ID NO: 7778 - protein, 14 aa, synthetic construct
ALGELGGGDDDKLI

SEQ ID NO: 7779 - protein, 14 aa, synthetic construct
ALGELGGGCFREKL

SEQ ID NO: 7780 - protein, 14 aa, synthetic construct
ALGELGEGDKSKLI

SEQ ID NO: 7781 - protein, 14 aa, synthetic construct
ALGELGGGCDEKLI

SEQ ID NO: 7782 - protein, 14 aa, synthetic construct
ALGELGGFARTDKL

SEQ ID NO: 7783 - protein, 14 aa, synthetic construct
ALGELGGEARTVKL

SEQ ID NO: 7784 - protein, 14 aa, synthetic construct
ALGELGGDARTDQL

SEQ ID NO: 7785 - protein, 14 aa, synthetic construct
ALGELGGDARSDKL

SEQ ID NO: 7786 - protein, 7 aa, synthetic construct
ALGELGG

SEQ ID NO: 7787 - protein, 14 aa, synthetic construct
ALGELGETYPEKLI

SEQ ID NO: 7788 - protein, 14 aa, synthetic construct
ALGELGETLATAQL

SEQ ID NO: 7789 - protein, 13 aa, synthetic construct
ALGELGEKDEKLI

SEQ ID NO: 7790 - protein, 13 aa, synthetic construct
ALGELGEKDDKPI

SEQ ID NO: 7791 - protein, 14 aa, synthetic construct
ALGELGDTDPDKLI

SEQ ID NO: 7792 - protein, 12 aa, synthetic construct
ALGELGDTDNII

SEQ ID NO: 7793 - protein, 12 aa, synthetic construct
ALGELGDTDKVI

SEQ ID NO: 7794 - protein, 14 aa, synthetic construct
ALGELGDPYPDKLF

SEQ ID NO: 7795 - protein, 12 aa, synthetic construct
ALGELGDRSLDT

SEQ ID NO: 7796 - protein, 12 aa, synthetic construct
ALGELGDRDNLI

SEQ ID NO: 7797 - protein, 13 aa, synthetic construct
ALGELGDRDEKLI

SEQ ID NO: 7798 - protein, 13 aa, synthetic construct
ALGELGDRDEIII

SEQ ID NO: 7799 - protein, 13 aa, synthetic construct
ALGELGDQDNKLI

SEQ ID NO: 7800 - protein, 13 aa, synthetic construct
ALGELGDQDENLI

SEQ ID NO: 7801 - protein, 14 aa, synthetic construct
ALGELGDPYPYKLI

SEQ ID NO: 7802 - protein, 14 aa, synthetic construct
ALGELGDPYPDTLI

SEQ ID NO: 7803 - protein, 14 aa, synthetic construct
ALGELGDPYPDQLI

SEQ ID NO: 7804 - protein, 14 aa, synthetic construct
ALGELGDPYPDNLI

SEQ ID NO: 7805 - protein, 14 aa, synthetic construct
ALGELGDPYPDELI

SEQ ID NO: 7806 - protein, 12 aa, synthetic construct
ALGELGDRSWDT

SEQ ID NO: 7807 - protein, 14 aa, synthetic construct
ALGELGDPNPDQLI

SEQ ID NO: 7808 - protein, 12 aa, synthetic construct
ALGELGDPEKLI

SEQ ID NO: 7809 - protein, 12 aa, synthetic construct
ALGELGDPDTLI

SEQ ID NO: 7810 - protein, 14 aa, synthetic construct
ALGELGDPDPDKLI

SEQ ID NO: 7811 - protein, 12 aa, synthetic construct
ALGELGDPDKLI

SEQ ID NO: 7812 - protein, 12 aa, synthetic construct
ALGELGDNDKLI

SEQ ID NO: 7813 - protein, 12 aa, synthetic construct
ALGELGDNDKII

SEQ ID NO: 7814 - protein, 13 aa, synthetic construct
ALGELGDNDDKLI

SEQ ID NO: 7815 - protein, 13 aa, synthetic construct
ALGELGDMDDKVI

SEQ ID NO: 7816 - protein, 13 aa, synthetic construct
ALGELGDKYYKLI

SEQ ID NO: 7817 - protein, 10 aa, synthetic construct
ALGELGDRSW

SEQ ID NO: 7818 - protein, 14 aa, synthetic construct
ALGELGDRYPAKLI

SEQ ID NO: 7819 - protein, 12 aa, synthetic construct
ALGELGDTDKLA

SEQ ID NO: 7820 - protein, 14 aa, synthetic construct
ALGELGDSSWYCTT

SEQ ID NO: 7821 - protein, 12 aa, synthetic construct
ALGELGDTDKIN

SEQ ID NO: 7822 - protein, 11 aa, synthetic construct
ALGELGDTDHN

SEQ ID NO: 7823 - protein, 13 aa, synthetic construct
ALGELGDTDEKLI

SEQ ID NO: 7824 - protein, 14 aa, synthetic construct
ALGELGDTCPDKDI

SEQ ID NO: 7825 - protein, 12 aa, synthetic construct
ALGELGDTAKLI

SEQ ID NO: 7826 - protein, 14 aa, synthetic construct
ALGELGDSYTDKII

SEQ ID NO: 7827 - protein, 14 aa, synthetic construct
ALGELGDSYPDLLI

SEQ ID NO: 7828 - protein, 13 aa, synthetic construct
ALGELGDSTWYTR

SEQ ID NO: 7829 - protein, 9 aa, synthetic construct
ALGELGDST

SEQ ID NO: 7830 - protein, 14 aa, synthetic construct
ALGELGDSSWYTRQ

SEQ ID NO: 7831 - protein, 13 aa, synthetic construct
ALGELGDSSWVTR

SEQ ID NO: 7832 - protein, 8 aa, synthetic construct
ALGELGDS

SEQ ID NO: 7833 - protein, 12 aa, synthetic construct
ALGELGDSSWTP

SEQ ID NO: 7834 - protein, 13 aa, synthetic construct
ALGELGDSSWSTR

SEQ ID NO: 7835 - protein, 14 aa, synthetic construct
ALGELGDSSWHNRQ

SEQ ID NO: 7836 - protein, 14 aa, synthetic construct
ALGELGDSSWDTLQ

SEQ ID NO: 7837 - protein, 13 aa, synthetic construct
ALGELGDSSWDIR

SEQ ID NO: 7838 - protein, 14 aa, synthetic construct
ALGELGDSSWAAQL

SEQ ID NO: 7839 - protein, 13 aa, synthetic construct
ALGELGDSSRYTR

SEQ ID NO: 7840 - protein, 9 aa, synthetic construct
ALGELGDSS

SEQ ID NO: 7841 - protein, 13 aa, synthetic construct
ALGELGDSPSDTR

SEQ ID NO: 7842 - protein, 13 aa, synthetic construct
ALGELGDSGRETH

SEQ ID NO: 7843 - protein, 14 aa, synthetic construct
ALGELGGGYDDKYI

SEQ ID NO: 7844 - protein, 14 aa, synthetic construct
ALGELGGGYDEELI

SEQ ID NO: 7845 - protein, 13 aa, synthetic construct
ALGELGSTEKQNY

SEQ ID NO: 7846 - protein, 14 aa, synthetic construct
ALGELGGGYDEKLF

SEQ ID NO: 7847 - protein, 12 aa, synthetic construct
ALGELGSPDNVI

SEQ ID NO: 7848 - protein, 12 aa, synthetic construct
ALGELGSPDILL

SEQ ID NO: 7849 - protein, 12 aa, synthetic construct
ALGELGSNEKLI

SEQ ID NO: 7850 - protein, 14 aa, synthetic construct
ALGELGSLGYTDQL

SEQ ID NO: 7851 - protein, 14 aa, synthetic construct
ALGELGSLGDTEKL

SEQ ID NO: 7852 - protein, 12 aa, synthetic construct
ALGELGSIDKLI

SEQ ID NO: 7853 - protein, 12 aa, synthetic construct
ALGELGSAEKLI

SEQ ID NO: 7854 - protein, 12 aa, synthetic construct
ALGELGSADTLI

SEQ ID NO: 7855 - protein, 12 aa, synthetic construct
ALGELGSADQLI

SEQ ID NO: 7856 - protein, 12 aa, synthetic construct
ALGELGSADKII

SEQ ID NO: 7857 - protein, 12 aa, synthetic construct
ALGELGSADILI

SEQ ID NO: 7858 - protein, 14 aa, synthetic construct
ALGELGRGYDDKLI

SEQ ID NO: 7859 - protein, 12 aa, synthetic construct
ALGELGPTDKII

SEQ ID NO: 7860 - protein, 14 aa, synthetic construct
ALGELGPPLLGDTD

SEQ ID NO: 7861 - protein, 11 aa, synthetic construct
ALGELGPGLNS

SEQ ID NO: 7862 - protein, 14 aa, synthetic construct
ALGELGPGGYSDKL

SEQ ID NO: 7863 - protein, 14 aa, synthetic construct
ALGELGPGGSADKL

SEQ ID NO: 7864 - protein, 8 aa, synthetic construct
ALGELGPG

SEQ ID NO: 7865 - protein, 14 aa, synthetic construct
ALGELGNTYPDKLI

SEQ ID NO: 7866 - protein, 13 aa, synthetic construct
ALGELGNKDDNLF

SEQ ID NO: 7867 - protein, 14 aa, synthetic construct
ALGELGNGGYEDKL

SEQ ID NO: 7868 - protein, 14 aa, synthetic construct
ALGELGLPLLGDTD

SEQ ID NO: 7869 - protein, 14 aa, synthetic construct
ALGELGIVTPINSS

SEQ ID NO: 7870 - protein, 12 aa, synthetic construct
ALGELGSPDRLF

SEQ ID NO: 7871 - protein, 12 aa, synthetic construct
ALGELGSPINSS

SEQ ID NO: 7872 - protein, 12 aa, synthetic construct
ALGELGSSDNLI

SEQ ID NO: 7873 - protein, 12 aa, synthetic construct
ALGELGSTDNHI

SEQ ID NO: 7874 - protein, 12 aa, synthetic construct
ALGELGSTEKHI

SEQ ID NO: 7875 - protein, 12 aa, synthetic construct
ALGELGSTEILI

SEQ ID NO: 7876 - protein, 12 aa, synthetic construct
ALGELGSTEHLI

SEQ ID NO: 7877 - protein, 12 aa, synthetic construct
ALGELGSTDTSS

SEQ ID NO: 7878 - protein, 12 aa, synthetic construct
ALGELGSTDTRI

SEQ ID NO: 7879 - protein, 12 aa, synthetic construct
ALGELGSTDQLV

SEQ ID NO: 7880 - protein, 12 aa, synthetic construct
ALGELGSTDQLT

SEQ ID NO: 7881 - protein, 12 aa, synthetic construct
ALGELGSTDQGF

SEQ ID NO: 7882 - protein, 12 aa, synthetic construct
ALGELGSTDNPI

SEQ ID NO: 7883 - protein, 12 aa, synthetic construct
ALGELGSTDNII

SEQ ID NO: 7884 - protein, 12 aa, synthetic construct
ALGELGSTDKQI

SEQ ID NO: 7885 - protein, 12 aa, synthetic construct
ALGELGSSEILI

SEQ ID NO: 7886 - protein, 12 aa, synthetic construct
ALGELGSTDKLS

SEQ ID NO: 7887 - protein, 12 aa, synthetic construct
ALGELGSTDKLK

SEQ ID NO: 7888 - protein, 12 aa, synthetic construct
ALGELGSTDKHT

SEQ ID NO: 7889 - protein, 12 aa, synthetic construct
ALGELGSTDKHN

SEQ ID NO: 7890 - protein, 12 aa, synthetic construct
ALGELGSTDKFI

SEQ ID NO: 7891 - protein, 10 aa, synthetic construct
ALGELGSTDK

SEQ ID NO: 7892 - protein, 12 aa, synthetic construct
ALGELGSTDHVI

SEQ ID NO: 7893 - protein, 12 aa, synthetic construct
ALGELGSTDHLI

SEQ ID NO: 7894 - protein, 12 aa, synthetic construct
ALGELGSTDDLN

SEQ ID NO: 7895 - protein, 12 aa, synthetic construct
ALGELGSSEKLL

SEQ ID NO: 7896 - protein, 13 aa, synthetic construct
ALGELGIPPINSS

SEQ ID NO: 7897 - protein, 14 aa, synthetic construct
ALGELGIGGYADKL

SEQ ID NO: 7898 - protein, 13 aa, synthetic construct
ALGELGIDPGTPD

SEQ ID NO: 7899 - protein, 14 aa, synthetic construct
ALGELGGGYGETLI

SEQ ID NO: 7900 - protein, 14 aa, synthetic construct
ALGELGGIPPINSS

SEQ ID NO: 7901 - protein, 13 aa, synthetic construct
ALGELGGIGRKLI

SEQ ID NO: 7902 - protein, 14 aa, synthetic construct
ALGELGGIAPGTPD

SEQ ID NO: 7903 - protein, 14 aa, synthetic construct
ALGELGGGYYGKLI

SEQ ID NO: 7904 - protein, 14 aa, synthetic construct
ALGELGGGYYDQLI

SEQ ID NO: 7905 - protein, 13 aa, synthetic construct
ALGELGGGYYDKL

SEQ ID NO: 7906 - protein, 14 aa, synthetic construct
ALGELGGGYYAQLI

SEQ ID NO: 7907 - protein, 14 aa, synthetic construct
ALGELGGGYHVKLI

SEQ ID NO: 7908 - protein, 14 aa, synthetic construct
ALGELGGGYHEKLI

SEQ ID NO: 7909 - protein, 14 aa, synthetic construct
ALGELGGGYHDKLI

SEQ ID NO: 7910 - protein, 14 aa, synthetic construct
ALGELGGGYETKLI

SEQ ID NO: 7911 - protein, 13 aa, synthetic construct
ALGELGGKDDKLF

SEQ ID NO: 7912 - protein, 14 aa, synthetic construct
ALGELGGGYEDNLI

SEQ ID NO: 7913 - protein, 14 aa, synthetic construct
ALGELGGGYEDILI

SEQ ID NO: 7914 - protein, 14 aa, synthetic construct
ALGELGGGYDYTLI

SEQ ID NO: 7915 - protein, 14 aa, synthetic construct
ALGELGGGYDYQLI

SEQ ID NO: 7916 - protein, 13 aa, synthetic construct
ALGELGGGYDYKL

SEQ ID NO: 7917 - protein, 14 aa, synthetic construct
ALGELGGGYDSKLI

SEQ ID NO: 7918 - protein, 14 aa, synthetic construct
ALGELGGGYDNKLI

SEQ ID NO: 7919 - protein, 13 aa, synthetic construct
ALGELGGGYDHKL

SEQ ID NO: 7920 - protein, 14 aa, synthetic construct
ALGELGGGYDEYLI

SEQ ID NO: 7921 - protein, 14 aa, synthetic construct
ALGELGGGYDEQLI

SEQ ID NO: 7922 - protein, 13 aa, synthetic construct
ALGELGGIRRKLI

SEQ ID NO: 7923 - protein, 13 aa, synthetic construct
ALGELGGKDDQLI

SEQ ID NO: 7924 - protein, 14 aa, synthetic construct
ALGELGHTYPEKLI

SEQ ID NO: 7925 - protein, 14 aa, synthetic construct
ALGELGGYARTGKL

SEQ ID NO: 7926 - protein, 9 aa, synthetic construct
ALGELGHTY

SEQ ID NO: 7927 - protein, 12 aa, synthetic construct
ALGELGHTDKHI

SEQ ID NO: 7928 - protein, 13 aa, synthetic construct
ALGELGHSSCDTR

SEQ ID NO: 7929 - protein, 13 aa, synthetic construct
ALGELGHRSCDTR

SEQ ID NO: 7930 - protein, 14 aa, synthetic construct
ALGELGGYSRTDKL

SEQ ID NO: 7931 - protein, 14 aa, synthetic construct
ALGELGGYLGSWDT

SEQ ID NO: 7932 - protein, 14 aa, synthetic construct
ALGELGGYGAPINS

SEQ ID NO: 7933 - protein, 13 aa, synthetic construct
ALGELGGYAVNSS

SEQ ID NO: 7934 - protein, 14 aa, synthetic construct
ALGELGGYASTHKL

SEQ ID NO: 7935 - protein, 14 aa, synthetic construct
ALGELGGYARTVKL

SEQ ID NO: 7936 - protein, 14 aa, synthetic construct
ALGELGGYARTDRL

SEQ ID NO: 7937 - protein, 14 aa, synthetic construct
ALGELGGRYDDQLI

SEQ ID NO: 7938 - protein, 14 aa, synthetic construct
ALGELGGYAHTDKL

SEQ ID NO: 7939 - protein, 8 aa, synthetic construct
ALGELGGY

SEQ ID NO: 7940 - protein, 12 aa, synthetic construct
ALGELGGTKQLI

SEQ ID NO: 7941 - protein, 12 aa, synthetic construct
ALGELGGTDQLI

SEQ ID NO: 7942 - protein, 13 aa, synthetic construct
ALGELGGSSWDPR

SEQ ID NO: 7943 - protein, 14 aa, synthetic construct
ALGELGGSSRTEKL

SEQ ID NO: 7944 - protein, 14 aa, synthetic construct
ALGELGGSARTENS

SEQ ID NO: 7945 - protein, 14 aa, synthetic construct
ALGELGGSARTEKV

SEQ ID NO: 7946 - protein, 14 aa, synthetic construct
ALGELGGSARTEKL

SEQ ID NO: 7947 - protein, 14 aa, synthetic construct
ALGELGGSARTDNL

SEQ ID NO: 7948 - protein, 13 aa, synthetic construct
ALGELGDKYDKLL

SEQ ID NO: 7949 - protein, 13 aa, synthetic construct
ALGELGDKYDKHI

SEQ ID NO: 7950 - protein, 13 aa, synthetic construct
ALGELGDKVEKLI

SEQ ID NO: 7951 - protein, 13 aa, synthetic construct
ALGELGDKVDKLN

SEQ ID NO: 7952 - protein, 14 aa, synthetic construct
ALGELERGISGTDK

SEQ ID NO: 7953 - protein, 14 aa, synthetic construct
ALGELERGIRGTYK

SEQ ID NO: 7954 - protein, 13 aa, synthetic construct
ALGELERGIRGTR

SEQ ID NO: 7955 - protein, 13 aa, synthetic construct
ALGELERGIRGTD

SEQ ID NO: 7956 - protein, 14 aa, synthetic construct
ALGELERAIRGTDK

SEQ ID NO: 7957 - protein, 14 aa, synthetic construct
ALGELELGIRGTDK

SEQ ID NO: 7958 - protein, 13 aa, synthetic construct
ALGELELGIRGTD

SEQ ID NO: 7959 - protein, 14 aa, synthetic construct
ALGELELGIMGTDQ

SEQ ID NO: 7960 - protein, 14 aa, synthetic construct
ALGELELGIMGTDK

SEQ ID NO: 7961 - protein, 14 aa, synthetic construct
ALGELELGDTHKLI

SEQ ID NO: 7962 - protein, 13 aa, synthetic construct
ALGELEIHGFTAH

SEQ ID NO: 7963 - protein, 9 aa, synthetic construct
ALGELEGGI

SEQ ID NO: 7964 - protein, 14 aa, synthetic construct
ALGELEELGVHTDK

SEQ ID NO: 7965 - protein, 14 aa, synthetic construct
ALGELEDTYPDKLI

SEQ ID NO: 7966 - protein, 12 aa, synthetic construct
ALGELEDTEKLI

SEQ ID NO: 7967 - protein, 13 aa, synthetic construct
ALGELEDKDDKLI

SEQ ID NO: 7968 - protein, 14 aa, synthetic construct
ALGELECGTTDKII

SEQ ID NO: 7969 - protein, 14 aa, synthetic construct
ALGELECGISGTDK

SEQ ID NO: 7970 - protein, 14 aa, synthetic construct
ALGELECGIMGTDK

SEQ ID NO: 7971 - protein, 14 aa, synthetic construct
ALGELDYRGIRTDQ

SEQ ID NO: 7972 - protein, 14 aa, synthetic construct
ALGELDWGTTYKLI

SEQ ID NO: 7973 - protein, 13 aa, synthetic construct
ALGELDWGTTDKL

SEQ ID NO: 7974 - protein, 14 aa, synthetic construct
ALGELDWGTTDKII

SEQ ID NO: 7975 - protein, 14 aa, synthetic construct
ALGELESGLSGTDK

SEQ ID NO: 7976 - protein, 14 aa, synthetic construct
ALGELESLGNTDKL

SEQ ID NO: 7977 - protein, 13 aa, synthetic construct
ALGELESLGYTDK

SEQ ID NO: 7978 - protein, 14 aa, synthetic construct
ALGELEWGIRGTDE

SEQ ID NO: 7979 - protein, 14 aa, synthetic construct
ALGELEWGLRGTDK

SEQ ID NO: 7980 - protein, 10 aa, synthetic construct
ALGELEWGKF

SEQ ID NO: 7981 - protein, 14 aa, synthetic construct
ALGELEWGITRTDK

SEQ ID NO: 7982 - protein, 14 aa, synthetic construct
ALGELEWGITGTDK

SEQ ID NO: 7983 - protein, 13 aa, synthetic construct
ALGELEWGISGTD

SEQ ID NO: 7984 - protein, 14 aa, synthetic construct
ALGELEWGIRTINS

SEQ ID NO: 7985 - protein, 14 aa, synthetic construct
ALGELEWGIRSTDK

SEQ ID NO: 7986 - protein, 14 aa, synthetic construct
ALGELEWGIRSKLI

SEQ ID NO: 7987 - protein, 14 aa, synthetic construct
ALGELEWGIRRINS

SEQ ID NO: 7988 - protein, 13 aa, synthetic construct
ALGELEWGIRGTG

SEQ ID NO: 7989 - protein, 13 aa, synthetic construct
ALGELEWGIRGSD

SEQ ID NO: 7990 - protein, 14 aa, synthetic construct
ALGELESLGYTEKL

SEQ ID NO: 7991 - protein, 14 aa, synthetic construct
ALGELEWGIPPINS

SEQ ID NO: 7992 - protein, 13 aa, synthetic construct
ALGELEWGIMGTG

SEQ ID NO: 7993 - protein, 14 aa, synthetic construct
ALGELEWGILGTDK

SEQ ID NO: 7994 - protein, 14 aa, synthetic construct
ALGELEWGIKIKSS

SEQ ID NO: 7995 - protein, 14 aa, synthetic construct
ALGELEWGIKGTDK

SEQ ID NO: 7996 - protein, 14 aa, synthetic construct
ALGELEWGIHTDKL

SEQ ID NO: 7997 - protein, 14 aa, synthetic construct
ALGELEWGIHRQTH

SEQ ID NO: 7998 - protein, 14 aa, synthetic construct
ALGELEWGIGGTDK

SEQ ID NO: 7999 - protein, 14 aa, synthetic construct
ALGELEWAIRCTDQ

SEQ ID NO: 8000 - protein, 14 aa, synthetic construct
ALGELETHGYTDQL

SEQ ID NO: 8001 - protein, 11 aa, synthetic construct
ALGELDWGTTD

SEQ ID NO: 8002 - protein, 13 aa, synthetic construct
ALGELDWGTTAKL

SEQ ID NO: 8003 - protein, 14 aa, synthetic construct
ALGELDWGTPDKLI

SEQ ID NO: 8004 - protein, 14 aa, synthetic construct
ALGELCLGILWRQH

SEQ ID NO: 8005 - protein, 13 aa, synthetic construct
ALGELCMGDTLAT

SEQ ID NO: 8006 - protein, 14 aa, synthetic construct
ALGELCMGATLATA

SEQ ID NO: 8007 - protein, 14 aa, synthetic construct
ALGELCLWETLAPI

SEQ ID NO: 8008 - protein, 14 aa, synthetic construct
ALGELCLRETLATA

SEQ ID NO: 8009 - protein, 13 aa, synthetic construct
ALGELCLRDTMAT

SEQ ID NO: 8010 - protein, 13 aa, synthetic construct
ALGELCLRDTLAT

SEQ ID NO: 8011 - protein, 12 aa, synthetic construct
ALGELCLHDKLI

SEQ ID NO: 8012 - protein, 14 aa, synthetic construct
ALGELCLGYSGDST

SEQ ID NO: 8013 - protein, 14 aa, synthetic construct
ALGELCLGTTLATA

SEQ ID NO: 8014 - protein, 14 aa, synthetic construct
ALGELCLGTPINSS

SEQ ID NO: 8015 - protein, 14 aa, synthetic construct
ALGELCLGETRATA

SEQ ID NO: 8016 - protein, 14 aa, synthetic construct
ALGELCMGYTMATA

SEQ ID NO: 8017 - protein, 14 aa, synthetic construct
ALGELCLGETQATA

SEQ ID NO: 8018 - protein, 14 aa, synthetic construct
ALGELCLGETPINS

SEQ ID NO: 8019 - protein, 13 aa, synthetic construct
ALGELCLGETLAT

SEQ ID NO: 8020 - protein, 14 aa, synthetic construct
ALGELCLGDTYPDK

SEQ ID NO: 8021 - protein, 14 aa, synthetic construct
ALGELCLGDTWAPG

SEQ ID NO: 8022 - protein, 14 aa, synthetic construct
ALGELCLGDTTINS

SEQ ID NO: 8023 - protein, 14 aa, synthetic construct
ALGELCLGDTQATA

SEQ ID NO: 8024 - protein, 13 aa, synthetic construct
ALGELCLGDTLST

SEQ ID NO: 8025 - protein, 14 aa, synthetic construct
ALGELCLGDTEKLI

SEQ ID NO: 8026 - protein, 14 aa, synthetic construct
ALGELCLGDSSWDT

SEQ ID NO: 8027 - protein, 14 aa, synthetic construct
ALGELCMGETMATA

SEQ ID NO: 8028 - protein, 14 aa, synthetic construct
ALGELCMMDTLATA

SEQ ID NO: 8029 - protein, 14 aa, synthetic construct
ALGELDWGSYTEKL

SEQ ID NO: 8030 - protein, 14 aa, synthetic construct
ALGELDNGGYADKL

SEQ ID NO: 8031 - protein, 13 aa, synthetic construct
ALGELDWGSYTDK

SEQ ID NO: 8032 - protein, 14 aa, synthetic construct
ALGELDWGSYTAKL

SEQ ID NO: 8033 - protein, 14 aa, synthetic construct
ALGELDWGQPINSS

SEQ ID NO: 8034 - protein, 14 aa, synthetic construct
ALGELDWGPTDKLI

SEQ ID NO: 8035 - protein, 14 aa, synthetic construct
ALGELDWGLTPINS

SEQ ID NO: 8036 - protein, 14 aa, synthetic construct
ALGELDVGISGTDK

SEQ ID NO: 8037 - protein, 14 aa, synthetic construct
ALGELDSHVYTDKL

SEQ ID NO: 8038 - protein, 9 aa, synthetic construct
ALGELDRNS

SEQ ID NO: 8039 - protein, 13 aa, synthetic construct
ALGELDRGTYNDK

SEQ ID NO: 8040 - protein, 14 aa, synthetic construct
ALGELDRGSYTDKL

SEQ ID NO: 8041 - protein, 14 aa, synthetic construct
ALGELDLPGINTDK

SEQ ID NO: 8042 - protein, 14 aa, synthetic construct
ALGELCNGGYSDKL

SEQ ID NO: 8043 - protein, 14 aa, synthetic construct
ALGELDIPGFHPEE

SEQ ID NO: 8044 - protein, 12 aa, synthetic construct
ALGELCVGRTMH

SEQ ID NO: 8045 - protein, 14 aa, synthetic construct
ALGELCVGETLATA

SEQ ID NO: 8046 - protein, 14 aa, synthetic construct
ALGELCVGDTMATA

SEQ ID NO: 8047 - protein, 14 aa, synthetic construct
ALGELCVGDSSWDT

SEQ ID NO: 8048 - protein, 12 aa, synthetic construct
ALGELCTPINSS

SEQ ID NO: 8049 - protein, 14 aa, synthetic construct
ALGELCRRDTLATA

SEQ ID NO: 8050 - protein, 14 aa, synthetic construct
ALGELCRGETLATA

SEQ ID NO: 8051 - protein, 14 aa, synthetic construct
ALGELCRGDTRATA

SEQ ID NO: 8052 - protein, 14 aa, synthetic construct
ALGELCQGEALATA

SEQ ID NO: 8053 - protein, 14 aa, synthetic construct
ALGELEWGLSGTDK

SEQ ID NO: 8054 - protein, 14 aa, synthetic construct
ALGELEWGMRGTDK

SEQ ID NO: 8055 - protein, 14 aa, synthetic construct
ALGELEWGRRGTDQ

SEQ ID NO: 8056 - protein, 14 aa, synthetic construct
ALGELGATYPEKLI

SEQ ID NO: 8057 - protein, 13 aa, synthetic construct
ALGELGDKADKLI

SEQ ID NO: 8058 - protein, 14 aa, synthetic construct
ALGELGDIYTDKLI

SEQ ID NO: 8059 - protein, 14 aa, synthetic construct
ALGELGDIYPDKLI

SEQ ID NO: 8060 - protein, 13 aa, synthetic construct
ALGELGDISWDTR

SEQ ID NO: 8061 - protein, 12 aa, synthetic construct
ALGELGDHDTLI

SEQ ID NO: 8062 - protein, 13 aa, synthetic construct
ALGELGDCSWDTR

SEQ ID NO: 8063 - protein, 14 aa, synthetic construct
ALGELGDAYPEKLI

SEQ ID NO: 8064 - protein, 12 aa, synthetic construct
ALGELGCTDKLI

SEQ ID NO: 8065 - protein, 14 aa, synthetic construct
ALGELGAYALTHKL

SEQ ID NO: 8066 - protein, 13 aa, synthetic construct
ALGELGATYPEKV

SEQ ID NO: 8067 - protein, 12 aa, synthetic construct
ALGELGATHRHN

SEQ ID NO: 8068 - protein, 13 aa, synthetic construct
ALGELGDKDDEII

SEQ ID NO: 8069 - protein, 14 aa, synthetic construct
ALGELGATDPVKLI

SEQ ID NO: 8070 - protein, 12 aa, synthetic construct
ALGELGATDHLI

SEQ ID NO: 8071 - protein, 13 aa, synthetic construct
ALGELGATDDKLI

SEQ ID NO: 8072 - protein, 13 aa, synthetic construct
ALGELGADTDKLI

SEQ ID NO: 8073 - protein, 14 aa, synthetic construct
ALGELFVMGDTEKL

SEQ ID NO: 8074 - protein, 12 aa, synthetic construct
ALGELFVLGYTS

SEQ ID NO: 8075 - protein, 10 aa, synthetic construct
ALGELFVLGY

SEQ ID NO: 8076 - protein, 14 aa, synthetic construct
ALGELFVLGDPDKL

SEQ ID NO: 8077 - protein, 14 aa, synthetic construct
ALGELFRKADTEKL

SEQ ID NO: 8078 - protein, 13 aa, synthetic construct
ALGELFQLGDTDK

SEQ ID NO: 8079 - protein, 13 aa, synthetic construct
ALGELGDKAEKLI

SEQ ID NO: 8080 - protein, 13 aa, synthetic construct
ALGELGDKDDIVI

SEQ ID NO: 8081 - protein, 11 aa, synthetic construct
ALGELFLVWDT

SEQ ID NO: 8082 - protein, 13 aa, synthetic construct
ALGELGDKDNKII

SEQ ID NO: 8083 - protein, 13 aa, synthetic construct
ALGELGDKVDKHI

SEQ ID NO: 8084 - protein, 13 aa, synthetic construct
ALGELGDKVDILI

SEQ ID NO: 8085 - protein, 12 aa, synthetic construct
ALGELGDKNRLI

SEQ ID NO: 8086 - protein, 13 aa, synthetic construct
ALGELGDKEVKLI

SEQ ID NO: 8087 - protein, 13 aa, synthetic construct
ALGELGDKEDKLI

SEQ ID NO: 8088 - protein, 13 aa, synthetic construct
ALGELGDKDYTLI

SEQ ID NO: 8089 - protein, 13 aa, synthetic construct
ALGELGDKDYKLN

SEQ ID NO: 8090 - protein, 13 aa, synthetic construct
ALGELGDKDYKII

SEQ ID NO: 8091 - protein, 13 aa, synthetic construct
ALGELGDKDYILI

SEQ ID NO: 8092 - protein, 13 aa, synthetic construct
ALGELGDKDVKII

SEQ ID NO: 8093 - protein, 13 aa, synthetic construct
ALGELGDKDGQLI

SEQ ID NO: 8094 - protein, 12 aa, synthetic construct
ALGELGDKDDKL

SEQ ID NO: 8095 - protein, 13 aa, synthetic construct
ALGELGDKDENSS

SEQ ID NO: 8096 - protein, 13 aa, synthetic construct
ALGELGDKDEKHI

SEQ ID NO: 8097 - protein, 13 aa, synthetic construct
ALGELGDKDEILI

SEQ ID NO: 8098 - protein, 13 aa, synthetic construct
ALGELGDKDDTLN

SEQ ID NO: 8099 - protein, 13 aa, synthetic construct
ALGELGDKDDQLY

SEQ ID NO: 8100 - protein, 13 aa, synthetic construct
ALGELGDKDDQHI

SEQ ID NO: 8101 - protein, 13 aa, synthetic construct
ALGELGDKDDNII

SEQ ID NO: 8102 - protein, 11 aa, synthetic construct
ALGELGDKDDN

SEQ ID NO: 8103 - protein, 13 aa, synthetic construct
ALGELGDKDDLLI

SEQ ID NO: 8104 - protein, 13 aa, synthetic construct
ALGELGDKDDKLY

SEQ ID NO: 8105 - protein, 13 aa, synthetic construct
ALGELFPLGDTDK

SEQ ID NO: 8106 - protein, 10 aa, synthetic construct
ALGELFLRTG

SEQ ID NO: 8107 - protein, 13 aa, synthetic construct
ALGELEWGRRGTR

SEQ ID NO: 8108 - protein, 14 aa, synthetic construct
ALGELFIPGDTDKL

SEQ ID NO: 8109 - protein, 14 aa, synthetic construct
ALGELFLLGDNDKL

SEQ ID NO: 8110 - protein, 14 aa, synthetic construct
ALGELFLLGDLTPI

SEQ ID NO: 8111 - protein, 14 aa, synthetic construct
ALGELFLLGDIDKL

SEQ ID NO: 8112 - protein, 14 aa, synthetic construct
ALGELFLLGDHDKL

SEQ ID NO: 8113 - protein, 13 aa, synthetic construct
ALGELFLLGDADK

SEQ ID NO: 8114 - protein, 13 aa, synthetic construct
ALGELFLLGATDK

SEQ ID NO: 8115 - protein, 14 aa, synthetic construct
ALGELFLLEDTDKL

SEQ ID NO: 8116 - protein, 14 aa, synthetic construct
ALGELFLGTTDKLI

SEQ ID NO: 8117 - protein, 14 aa, synthetic construct
ALGELFKLGDTDKL

SEQ ID NO: 8118 - protein, 14 aa, synthetic construct
ALGELFIQGDTDKL

SEQ ID NO: 8119 - protein, 14 aa, synthetic construct
ALGELFIMGDTHKL

SEQ ID NO: 8120 - protein, 13 aa, synthetic construct
ALGELFLLGDSDK

SEQ ID NO: 8121 - protein, 13 aa, synthetic construct
ALGELFIMGDTDK

SEQ ID NO: 8122 - protein, 14 aa, synthetic construct
ALGELFIMCDTYKL

SEQ ID NO: 8123 - protein, 14 aa, synthetic construct
ALGELFILGIKINS

SEQ ID NO: 8124 - protein, 14 aa, synthetic construct
ALGELFILGETDKL

SEQ ID NO: 8125 - protein, 11 aa, synthetic construct
ALGELFILGET

SEQ ID NO: 8126 - protein, 14 aa, synthetic construct
ALGELFILGDTAKL

SEQ ID NO: 8127 - protein, 11 aa, synthetic construct
ALGELFILGDT

SEQ ID NO: 8128 - protein, 14 aa, synthetic construct
ALGELEYLGYTVKL

SEQ ID NO: 8129 - protein, 14 aa, synthetic construct
ALGELEWVIRGTDK

SEQ ID NO: 8130 - protein, 14 aa, synthetic construct
ALGELEWGTTDKII

SEQ ID NO: 8131 - protein, 14 aa, synthetic construct
ALGELFLLGDPIHR

SEQ ID NO: 8132 - protein, 14 aa, synthetic construct
ALGELFLLGDTRQM

SEQ ID NO: 8133 - protein, 11 aa, synthetic construct
ALGELFLRGDT

SEQ ID NO: 8134 - protein, 14 aa, synthetic construct
ALGELFLLVHTDKL

SEQ ID NO: 8135 - protein, 14 aa, synthetic construct
ALGELFLQGDTDKL

SEQ ID NO: 8136 - protein, 14 aa, synthetic construct
ALGELFLPGYTDKL

SEQ ID NO: 8137 - protein, 13 aa, synthetic construct
ALGELFLMGYTDK

SEQ ID NO: 8138 - protein, 14 aa, synthetic construct
ALGELFLMGHTDKL

SEQ ID NO: 8139 - protein, 14 aa, synthetic construct
ALGELFLMGGTDKL

SEQ ID NO: 8140 - protein, 12 aa, synthetic construct
ALGELFLMGDTD

SEQ ID NO: 8141 - protein, 11 aa, synthetic construct
ALGELFLMGDT

SEQ ID NO: 8142 - protein, 14 aa, synthetic construct
ALGELFLMGDPDKL

SEQ ID NO: 8143 - protein, 14 aa, synthetic construct
ALGELFLLWDTDRL

SEQ ID NO: 8144 - protein, 14 aa, synthetic construct
ALGELFLLWDTDQL

SEQ ID NO: 8145 - protein, 14 aa, synthetic construct
ALGELFLLRDTDKL

SEQ ID NO: 8146 - protein, 14 aa, synthetic construct
ALGELFLLGDTYKL

SEQ ID NO: 8147 - protein, 10 aa, synthetic construct
ALGELFLLGY

SEQ ID NO: 8148 - protein, 13 aa, synthetic construct
ALGELFLLGVTDK

SEQ ID NO: 8149 - protein, 14 aa, synthetic construct
ALGELFLLGVISSS

SEQ ID NO: 8150 - protein, 14 aa, synthetic construct
ALGELFLLGVINSS

SEQ ID NO: 8151 - protein, 14 aa, synthetic construct
ALGELFLLGTPISS

SEQ ID NO: 8152 - protein, 14 aa, synthetic construct
ALGELFLLGTPINS

SEQ ID NO: 8153 - protein, 14 aa, synthetic construct
ALGELFLLGIKINS

SEQ ID NO: 8154 - protein, 14 aa, synthetic construct
ALGELFLLGHTDKL

SEQ ID NO: 8155 - protein, 13 aa, synthetic construct
ALGELFLLGHPTD

SEQ ID NO: 8156 - protein, 11 aa, synthetic construct
ALGELFLLGEI

SEQ ID NO: 8157 - protein, 12 aa, synthetic construct
ALGELGSTEKLF

SEQ ID NO: 8158 - protein, 12 aa, synthetic construct
ALGELGSTEKRL

SEQ ID NO: 8159 - protein, 10 aa, synthetic construct
ALGELSPLTL

SEQ ID NO: 8160 - protein, 14 aa, synthetic construct
ALGELREGDTRINS

SEQ ID NO: 8161 - protein, 14 aa, synthetic construct
ALGELREGDIIKLF

SEQ ID NO: 8162 - protein, 14 aa, synthetic construct
ALGELREGDGPINS

SEQ ID NO: 8163 - protein, 14 aa, synthetic construct
ALGELREGDGLINS

SEQ ID NO: 8164 - protein, 14 aa, synthetic construct
ALGELREGDEIKLI

SEQ ID NO: 8165 - protein, 14 aa, synthetic construct
ALGELREGAKNKLI

SEQ ID NO: 8166 - protein, 14 aa, synthetic construct
ALGELREADKNKLI

SEQ ID NO: 8167 - protein, 14 aa, synthetic construct
ALGELRDTYPDKLI

SEQ ID NO: 8168 - protein, 13 aa, synthetic construct
ALGELQWDTDQLI

SEQ ID NO: 8169 - protein, 13 aa, synthetic construct
ALGELQRDTDTLI

SEQ ID NO: 8170 - protein, 13 aa, synthetic construct
ALGELQGDTQKLI

SEQ ID NO: 8171 - protein, 13 aa, synthetic construct
ALGELQGDTDQLI

SEQ ID NO: 8172 - protein, 11 aa, synthetic construct
ALGELQGDTDK

SEQ ID NO: 8173 - protein, 13 aa, synthetic construct
ALGELPYWGISTD

SEQ ID NO: 8174 - protein, 14 aa, synthetic construct
ALGELPYWGIPDKL

SEQ ID NO: 8175 - protein, 9 aa, synthetic construct
ALGELPYRV

SEQ ID NO: 8176 - protein, 14 aa, synthetic construct
ALGELPYRGYAPID

SEQ ID NO: 8177 - protein, 13 aa, synthetic construct
ALGELPYRGVGTD

SEQ ID NO: 8178 - protein, 14 aa, synthetic construct
ALGELPYRGTADKL

SEQ ID NO: 8179 - protein, 13 aa, synthetic construct
ALGELPYRGRRTD

SEQ ID NO: 8180 - protein, 14 aa, synthetic construct
ALGELPYRGLLTDK

SEQ ID NO: 8181 - protein, 14 aa, synthetic construct
ALGELPYRGKRTDK

SEQ ID NO: 8182 - protein, 11 aa, synthetic construct
ALGELPYRGKF

SEQ ID NO: 8183 - protein, 10 aa, synthetic construct
ALGELPYRGK

SEQ ID NO: 8184 - protein, 14 aa, synthetic construct
ALGELREGDIINSS

SEQ ID NO: 8185 - protein, 14 aa, synthetic construct
ALGELREGDKDDKL

SEQ ID NO: 8186 - protein, 13 aa, synthetic construct
ALGELREGDKHKL

SEQ ID NO: 8187 - protein, 12 aa, synthetic construct
ALGELREGDQLI

SEQ ID NO: 8188 - protein, 14 aa, synthetic construct
ALGELREGDTIKLI

SEQ ID NO: 8189 - protein, 14 aa, synthetic construct
ALGELREGDTHKLI

SEQ ID NO: 8190 - protein, 14 aa, synthetic construct
ALGELREGDTAKLI

SEQ ID NO: 8191 - protein, 14 aa, synthetic construct
ALGELREGDSDKLI

SEQ ID NO: 8192 - protein, 14 aa, synthetic construct
ALGELREGDRNKLI

SEQ ID NO: 8193 - protein, 10 aa, synthetic construct
ALGELREGDR

SEQ ID NO: 8194 - protein, 14 aa, synthetic construct
ALGELREGDQYKLI

SEQ ID NO: 8195 - protein, 14 aa, synthetic construct
ALGELREGDQNNLI

SEQ ID NO: 8196 - protein, 14 aa, synthetic construct
ALGELREGDQNLLI

SEQ ID NO: 8197 - protein, 14 aa, synthetic construct
ALGELREGDQMKLI

SEQ ID NO: 8198 - protein, 14 aa, synthetic construct
ALGELREGDQINSS

SEQ ID NO: 8199 - protein, 13 aa, synthetic construct
ALGELREGDKKKL

SEQ ID NO: 8200 - protein, 14 aa, synthetic construct
ALGELREGDQHKLI

SEQ ID NO: 8201 - protein, 14 aa, synthetic construct
ALGELREGDNKKLI

SEQ ID NO: 8202 - protein, 14 aa, synthetic construct
ALGELREGDLTPRN

SEQ ID NO: 8203 - protein, 14 aa, synthetic construct
ALGELREGDLNKLI

SEQ ID NO: 8204 - protein, 13 aa, synthetic construct
ALGELREGDKQKL

SEQ ID NO: 8205 - protein, 14 aa, synthetic construct
ALGELREGDKNNSS

SEQ ID NO: 8206 - protein, 14 aa, synthetic construct
ALGELREGDKNKLV

SEQ ID NO: 8207 - protein, 14 aa, synthetic construct
ALGELREGDKNKLF

SEQ ID NO: 8208 - protein, 14 aa, synthetic construct
ALGELREGDKNKIN

SEQ ID NO: 8209 - protein, 14 aa, synthetic construct
ALGELREGDKNKFI

SEQ ID NO: 8210 - protein, 14 aa, synthetic construct
ALGELPYRGIYTPI

SEQ ID NO: 8211 - protein, 14 aa, synthetic construct
ALGELPYRGIYTDK

SEQ ID NO: 8212 - protein, 14 aa, synthetic construct
ALGELPYRGISTDK

SEQ ID NO: 8213 - protein, 13 aa, synthetic construct
ALGELNFLPDKLI

SEQ ID NO: 8214 - protein, 12 aa, synthetic construct
ALGELPHTDTLI

SEQ ID NO: 8215 - protein, 12 aa, synthetic construct
ALGELPHTDQLI

SEQ ID NO: 8216 - protein, 12 aa, synthetic construct
ALGELPHTDKLN

SEQ ID NO: 8217 - protein, 13 aa, synthetic construct
ALGELPGDTEKLN

SEQ ID NO: 8218 - protein, 13 aa, synthetic construct
ALGELPFRGIRTD

SEQ ID NO: 8219 - protein, 14 aa, synthetic construct
ALGELPFRAIEKDK

SEQ ID NO: 8220 - protein, 14 aa, synthetic construct
ALGELPDRGIRTDK

SEQ ID NO: 8221 - protein, 14 aa, synthetic construct
ALGELPDRGIRPDK

SEQ ID NO: 8222 - protein, 13 aa, synthetic construct
ALGELNVETEKLI

SEQ ID NO: 8223 - protein, 10 aa, synthetic construct
ALGELNNTDK

SEQ ID NO: 8224 - protein, 10 aa, synthetic construct
ALGELNDLGQ

SEQ ID NO: 8225 - protein, 14 aa, synthetic construct
ALGELPNRGITTDK

SEQ ID NO: 8226 - protein, 14 aa, synthetic construct
ALGELMSLGSTDKL

SEQ ID NO: 8227 - protein, 13 aa, synthetic construct
ALGELMGDTYKLI

SEQ ID NO: 8228 - protein, 13 aa, synthetic construct
ALGELMGDTDTLI

SEQ ID NO: 8229 - protein, 13 aa, synthetic construct
ALGELMGDNEKLI

SEQ ID NO: 8230 - protein, 14 aa, synthetic construct
ALGELLYRGIRTDK

SEQ ID NO: 8231 - protein, 13 aa, synthetic construct
ALGELLWITSKII

SEQ ID NO: 8232 - protein, 13 aa, synthetic construct
ALGELLWGTTYKL

SEQ ID NO: 8233 - protein, 14 aa, synthetic construct
ALGELLWGTTDKLI

SEQ ID NO: 8234 - protein, 13 aa, synthetic construct
ALGELLWDTYTII

SEQ ID NO: 8235 - protein, 13 aa, synthetic construct
ALGELLWDTNKLI

SEQ ID NO: 8236 - protein, 14 aa, synthetic construct
ALGELPLRGIHTDK

SEQ ID NO: 8237 - protein, 12 aa, synthetic construct
ALGELPNTDKLI

SEQ ID NO: 8238 - protein, 14 aa, synthetic construct
ALGELPYRGIRTIN

SEQ ID NO: 8239 - protein, 14 aa, synthetic construct
ALGELPYRGICTDK

SEQ ID NO: 8240 - protein, 14 aa, synthetic construct
ALGELPYRGIRTDE

SEQ ID NO: 8241 - protein, 13 aa, synthetic construct
ALGELPYRGIRPD

SEQ ID NO: 8242 - protein, 14 aa, synthetic construct
ALGELPYRGIRNDK

SEQ ID NO: 8243 - protein, 14 aa, synthetic construct
ALGELPYRGIRIDK

SEQ ID NO: 8244 - protein, 14 aa, synthetic construct
ALGELPYRGIRADK

SEQ ID NO: 8245 - protein, 14 aa, synthetic construct
ALGELPYRGIPTDK

SEQ ID NO: 8246 - protein, 14 aa, synthetic construct
ALGELPYRGILTDK

SEQ ID NO: 8247 - protein, 14 aa, synthetic construct
ALGELPYRGILGLL

SEQ ID NO: 8248 - protein, 13 aa, synthetic construct
ALGELPYRGIGTD

SEQ ID NO: 8249 - protein, 14 aa, synthetic construct
ALGELPYRGIGPDK

SEQ ID NO: 8250 - protein, 13 aa, synthetic construct
ALGELPYRGDTHR

SEQ ID NO: 8251 - protein, 14 aa, synthetic construct
ALGELPPCTGGHKL

SEQ ID NO: 8252 - protein, 14 aa, synthetic construct
ALGELPYRAISTDK

SEQ ID NO: 8253 - protein, 14 aa, synthetic construct
ALGELPYRAIRTDK

SEQ ID NO: 8254 - protein, 12 aa, synthetic construct
ALGELPYPINSS

SEQ ID NO: 8255 - protein, 14 aa, synthetic construct
ALGELPYLGIRTDK

SEQ ID NO: 8256 - protein, 11 aa, synthetic construct
ALGELPYCGIT

SEQ ID NO: 8257 - protein, 13 aa, synthetic construct
ALGELPSYPINSS

SEQ ID NO: 8258 - protein, 13 aa, synthetic construct
ALGELPSGTDSIF

SEQ ID NO: 8259 - protein, 13 aa, synthetic construct
ALGELPSGSYTEK

SEQ ID NO: 8260 - protein, 14 aa, synthetic construct
ALGELPSFTGGHKL

SEQ ID NO: 8261 - protein, 14 aa, synthetic construct
ALGELPPFTVGHKL

SEQ ID NO: 8262 - protein, 14 aa, synthetic construct
ALGELREGDTPATA

SEQ ID NO: 8263 - protein, 14 aa, synthetic construct
ALGELREGDTWAPG

SEQ ID NO: 8264 - protein, 12 aa, synthetic construct
ALGELGSTENII

SEQ ID NO: 8265 - protein, 14 aa, synthetic construct
ALGELREGDTYKLI

SEQ ID NO: 8266 - protein, 13 aa, synthetic construct
ALGELSLRGIHTG

SEQ ID NO: 8267 - protein, 14 aa, synthetic construct
ALGELSLRGIGTDK

SEQ ID NO: 8268 - protein, 13 aa, synthetic construct
ALGELSLRGIETD

SEQ ID NO: 8269 - protein, 14 aa, synthetic construct
ALGELSLRGIDTEK

SEQ ID NO: 8270 - protein, 14 aa, synthetic construct
ALGELSLRGIDTDK

SEQ ID NO: 8271 - protein, 13 aa, synthetic construct
ALGELSLRGIDTD

SEQ ID NO: 8272 - protein, 14 aa, synthetic construct
ALGELSLREIHTDK

SEQ ID NO: 8273 - protein, 14 aa, synthetic construct
ALGELSLRAIHTEK

SEQ ID NO: 8274 - protein, 13 aa, synthetic construct
ALGELSLPGINTD

SEQ ID NO: 8275 - protein, 14 aa, synthetic construct
ALGELSLLGYTDKL

SEQ ID NO: 8276 - protein, 14 aa, synthetic construct
ALGELSLLGINTDK

SEQ ID NO: 8277 - protein, 14 aa, synthetic construct
ALGELSLLGIDTDK

SEQ ID NO: 8278 - protein, 14 aa, synthetic construct
ALGELSLGGYTDKL

SEQ ID NO: 8279 - protein, 13 aa, synthetic construct
ALGELSLGETDKL

SEQ ID NO: 8280 - protein, 14 aa, synthetic construct
ALGELSLGDPLATA

SEQ ID NO: 8281 - protein, 14 aa, synthetic construct
ALGELSLFTGGHKL

SEQ ID NO: 8282 - protein, 11 aa, synthetic construct
ALGELSKWGIN

SEQ ID NO: 8283 - protein, 14 aa, synthetic construct
ALGELSIRGIHTDQ

SEQ ID NO: 8284 - protein, 12 aa, synthetic construct
ALGELSIRGIDT

SEQ ID NO: 8285 - protein, 12 aa, synthetic construct
ALGELSIQDKLI

SEQ ID NO: 8286 - protein, 14 aa, synthetic construct
ALGELSILGIHTDK

SEQ ID NO: 8287 - protein, 11 aa, synthetic construct
ALGELSHFTGG

SEQ ID NO: 8288 - protein, 12 aa, synthetic construct
ALGELSHFNRLH

SEQ ID NO: 8289 - protein, 14 aa, synthetic construct
ALGELSLRGILTDK

SEQ ID NO: 8290 - protein, 14 aa, synthetic construct
ALGELSLRGIPINS

SEQ ID NO: 8291 - protein, 14 aa, synthetic construct
ALGELSLRGIRSKL

SEQ ID NO: 8292 - protein, 14 aa, synthetic construct
ALGELSPFTGGNKL

SEQ ID NO: 8293 - protein, 11 aa, synthetic construct
ALGELSPLLGV

SEQ ID NO: 8294 - protein, 14 aa, synthetic construct
ALGELSPITRGHKL

SEQ ID NO: 8295 - protein, 14 aa, synthetic construct
ALGELSPGTGGHKL

SEQ ID NO: 8296 - protein, 14 aa, synthetic construct
ALGELSPFTVCHKL

SEQ ID NO: 8297 - protein, 14 aa, synthetic construct
ALGELSPFTGVINS

SEQ ID NO: 8298 - protein, 11 aa, synthetic construct
ALGELSPFTGV

SEQ ID NO: 8299 - protein, 14 aa, synthetic construct
ALGELSPFTGGYTD

SEQ ID NO: 8300 - protein, 12 aa, synthetic construct
ALGELSPFTGGT

SEQ ID NO: 8301 - protein, 13 aa, synthetic construct
ALGELSPFTGGQT

SEQ ID NO: 8302 - protein, 12 aa, synthetic construct
ALGELSPFTGGQ

SEQ ID NO: 8303 - protein, 14 aa, synthetic construct
ALGELSPFTGGHNS

SEQ ID NO: 8304 - protein, 14 aa, synthetic construct
ALGELSLRGMHTDK

SEQ ID NO: 8305 - protein, 14 aa, synthetic construct
ALGELSPFTGGDKL

SEQ ID NO: 8306 - protein, 14 aa, synthetic construct
ALGELSPFTGDTDK

SEQ ID NO: 8307 - protein, 11 aa, synthetic construct
ALGELSPFSGG

SEQ ID NO: 8308 - protein, 11 aa, synthetic construct
ALGELSPFNGG

SEQ ID NO: 8309 - protein, 14 aa, synthetic construct
ALGELSPFAGGHKL

SEQ ID NO: 8310 - protein, 14 aa, synthetic construct
ALGELSPCTGGPKL

SEQ ID NO: 8311 - protein, 14 aa, synthetic construct
ALGELSLTGIHTDK

SEQ ID NO: 8312 - protein, 12 aa, synthetic construct
ALGELSLRTGGN

SEQ ID NO: 8313 - protein, 14 aa, synthetic construct
ALGELSLRGTPINS

SEQ ID NO: 8314 - protein, 14 aa, synthetic construct
ALGELSLRGTHTDK

SEQ ID NO: 8315 - protein, 11 aa, synthetic construct
ALGELSHCTGG

SEQ ID NO: 8316 - protein, 12 aa, synthetic construct
ALGELSGRLSKH

SEQ ID NO: 8317 - protein, 9 aa, synthetic construct
ALGELSGIT

SEQ ID NO: 8318 - protein, 14 aa, synthetic construct
ALGELREGVKIKLI

SEQ ID NO: 8319 - protein, 14 aa, synthetic construct
ALGELRGGDINKLI

SEQ ID NO: 8320 - protein, 13 aa, synthetic construct
ALGELRGDTDKLI

SEQ ID NO: 8321 - protein, 14 aa, synthetic construct
ALGELREWDKNKLI

SEQ ID NO: 8322 - protein, 13 aa, synthetic construct
ALGELREWDKNKL

SEQ ID NO: 8323 - protein, 14 aa, synthetic construct
ALGELREVDKIKSS

SEQ ID NO: 8324 - protein, 14 aa, synthetic construct
ALGELRERDKNKLI

SEQ ID NO: 8325 - protein, 14 aa, synthetic construct
ALGELREGYSSWDT

SEQ ID NO: 8326 - protein, 14 aa, synthetic construct
ALGELREGYKNKLI

SEQ ID NO: 8327 - protein, 14 aa, synthetic construct
ALGELREGYDDKLI

SEQ ID NO: 8328 - protein, 14 aa, synthetic construct
ALGELREGVKNKLI

SEQ ID NO: 8329 - protein, 14 aa, synthetic construct
ALGELREGHQNKII

SEQ ID NO: 8330 - protein, 14 aa, synthetic construct
ALGELRKGDKNKLI

SEQ ID NO: 8331 - protein, 14 aa, synthetic construct
ALGELREGHKNKLI

SEQ ID NO: 8332 - protein, 14 aa, synthetic construct
ALGELREGGKNKII

SEQ ID NO: 8333 - protein, 13 aa, synthetic construct
ALGELREGETSKL

SEQ ID NO: 8334 - protein, 14 aa, synthetic construct
ALGELREGENYKLI

SEQ ID NO: 8335 - protein, 14 aa, synthetic construct
ALGELREGENNQLI

SEQ ID NO: 8336 - protein, 14 aa, synthetic construct
ALGELREGENNKLI

SEQ ID NO: 8337 - protein, 14 aa, synthetic construct
ALGELREGEKTKLI

SEQ ID NO: 8338 - protein, 13 aa, synthetic construct
ALGELREGEKNKL

SEQ ID NO: 8339 - protein, 10 aa, synthetic construct
ALGELREGEI

SEQ ID NO: 8340 - protein, 14 aa, synthetic construct
ALGELREGDYNKLI

SEQ ID NO: 8341 - protein, 14 aa, synthetic construct
ALGELRGGYDAKLI

SEQ ID NO: 8342 - protein, 14 aa, synthetic construct
ALGELRKGDTWAPG

SEQ ID NO: 8343 - protein, 13 aa, synthetic construct
ALGELSGISSKLI

SEQ ID NO: 8344 - protein, 12 aa, synthetic construct
ALGELSFIRVWG

SEQ ID NO: 8345 - protein, 13 aa, synthetic construct
ALGELSGIRSQLI

SEQ ID NO: 8346 - protein, 13 aa, synthetic construct
ALGELSGIRRKLI

SEQ ID NO: 8347 - protein, 13 aa, synthetic construct
ALGELSGGYSYKL

SEQ ID NO: 8348 - protein, 14 aa, synthetic construct
ALGELSGGYDDKLI

SEQ ID NO: 8349 - protein, 14 aa, synthetic construct
ALGELSGGYAEKLI

SEQ ID NO: 8350 - protein, 14 aa, synthetic construct
ALGELSGGYADQLI

SEQ ID NO: 8351 - protein, 13 aa, synthetic construct
ALGELSFLRVWGV

SEQ ID NO: 8352 - protein, 14 aa, synthetic construct
ALGELSFLRVWGKF

SEQ ID NO: 8353 - protein, 11 aa, synthetic construct
ALGELSFLRSG

SEQ ID NO: 8354 - protein, 14 aa, synthetic construct
ALGELSFLRIPINS

SEQ ID NO: 8355 - protein, 14 aa, synthetic construct
ALGELSEGDQMKLI

SEQ ID NO: 8356 - protein, 12 aa, synthetic construct
ALGELRLADQQH

SEQ ID NO: 8357 - protein, 14 aa, synthetic construct
ALGELSEGDNNKLI

SEQ ID NO: 8358 - protein, 14 aa, synthetic construct
ALGELSEGDKNTLF

SEQ ID NO: 8359 - protein, 14 aa, synthetic construct
ALGELSEGDKKKQL

SEQ ID NO: 8360 - protein, 14 aa, synthetic construct
ALGELSEGDKIKLI

SEQ ID NO: 8361 - protein, 14 aa, synthetic construct
ALGELSAFTGGHKL

SEQ ID NO: 8362 - protein, 11 aa, synthetic construct
ALGELSAFTGG

SEQ ID NO: 8363 - protein, 6 aa, synthetic construct
ALGELS

SEQ ID NO: 8364 - protein, 14 aa, synthetic construct
ALGELRVGDKDDKL

SEQ ID NO: 8365 - protein, 14 aa, synthetic construct
ALGELRTGGYAYKL

SEQ ID NO: 8366 - protein, 12 aa, synthetic construct
ALGELRSTDQLI

SEQ ID NO: 8367 - protein, 13 aa, synthetic construct
ALGELLWDTEKLI

SEQ ID NO: 8368 - protein, 13 aa, synthetic construct
ALGELLWDTDTLI

SEQ ID NO: 8369 - protein, 13 aa, synthetic construct
ALGELLWDTDQLI

SEQ ID NO: 8370 - protein, 12 aa, synthetic construct
ALGELLWDTDKL

SEQ ID NO: 8371 - protein, 12 aa, synthetic construct
ALGELIHTEKLI

SEQ ID NO: 8372 - protein, 12 aa, synthetic construct
ALGELIHTDNFI

SEQ ID NO: 8373 - protein, 12 aa, synthetic construct
ALGELIHTDKVI

SEQ ID NO: 8374 - protein, 12 aa, synthetic construct
ALGELIHTDKLN

SEQ ID NO: 8375 - protein, 12 aa, synthetic construct
ALGELIHTDKHI

SEQ ID NO: 8376 - protein, 10 aa, synthetic construct
ALGELIHTDK

SEQ ID NO: 8377 - protein, 12 aa, synthetic construct
ALGELIHTDEII

SEQ ID NO: 8378 - protein, 14 aa, synthetic construct
ALGELIGGYADKLI

SEQ ID NO: 8379 - protein, 14 aa, synthetic construct
ALGELIEGDNNKLI

SEQ ID NO: 8380 - protein, 14 aa, synthetic construct
ALGELHRKSTRLNS

SEQ ID NO: 8381 - protein, 12 aa, synthetic construct
ALGELHQPANHT

SEQ ID NO: 8382 - protein, 14 aa, synthetic construct
ALGELHMGDSSWDT

SEQ ID NO: 8383 - protein, 12 aa, synthetic construct
ALGELHHTDKLN

SEQ ID NO: 8384 - protein, 14 aa, synthetic construct
ALGELGYTYPDKII

SEQ ID NO: 8385 - protein, 13 aa, synthetic construct
ALGELGYSSTHTR

SEQ ID NO: 8386 - protein, 13 aa, synthetic construct
ALGELGYSSRATR

SEQ ID NO: 8387 - protein, 12 aa, synthetic construct
ALGELGYSDKLI

SEQ ID NO: 8388 - protein, 13 aa, synthetic construct
ALGELGYRSWDTR

SEQ ID NO: 8389 - protein, 13 aa, synthetic construct
ALGELGYKDYKLI

SEQ ID NO: 8390 - protein, 14 aa, synthetic construct
ALGELGWGYDDKLI

SEQ ID NO: 8391 - protein, 13 aa, synthetic construct
ALGELGWGSFTDK

SEQ ID NO: 8392 - protein, 14 aa, synthetic construct
ALGELGWGIYTDKL

SEQ ID NO: 8393 - protein, 14 aa, synthetic construct
ALGELGVTYPEKLI

SEQ ID NO: 8394 - protein, 12 aa, synthetic construct
ALGELIHTHKII

SEQ ID NO: 8395 - protein, 12 aa, synthetic construct
ALGELINTDKLI

SEQ ID NO: 8396 - protein, 12 aa, synthetic construct
ALGELINTDKLN

SEQ ID NO: 8397 - protein, 13 aa, synthetic construct
ALGELLGDIDKLI

SEQ ID NO: 8398 - protein, 13 aa, synthetic construct
ALGELLGDTAKLF

SEQ ID NO: 8399 - protein, 9 aa, synthetic construct
ALGELLGDT

SEQ ID NO: 8400 - protein, 13 aa, synthetic construct
ALGELLGDSDKVI

SEQ ID NO: 8401 - protein, 13 aa, synthetic construct
ALGELLGDPNQLI

SEQ ID NO: 8402 - protein, 13 aa, synthetic construct
ALGELLGDPDKLI

SEQ ID NO: 8403 - protein, 13 aa, synthetic construct
ALGELLGDNDQLI

SEQ ID NO: 8404 - protein, 14 aa, synthetic construct
ALGELLGDLTPINS

SEQ ID NO: 8405 - protein, 14 aa, synthetic construct
ALGELLGDKDEKLI

SEQ ID NO: 8406 - protein, 14 aa, synthetic construct
ALGELLGDKDDKLI

SEQ ID NO: 8407 - protein, 14 aa, synthetic construct
ALGELLGDILRAAQ

SEQ ID NO: 8408 - protein, 14 aa, synthetic construct
ALGELLGDGPINSS

SEQ ID NO: 8409 - protein, 12 aa, synthetic construct
ALGELINTEKHI

SEQ ID NO: 8410 - protein, 14 aa, synthetic construct
ALGELLGDGPIISS

SEQ ID NO: 8411 - protein, 12 aa, synthetic construct
ALGELLGATVKL

SEQ ID NO: 8412 - protein, 13 aa, synthetic construct
ALGELLGATEKLI

SEQ ID NO: 8413 - protein, 13 aa, synthetic construct
ALGELLEYTDKLI

SEQ ID NO: 8414 - protein, 12 aa, synthetic construct
ALGELLDTEINI

SEQ ID NO: 8415 - protein, 12 aa, synthetic construct
ALGELLDTDKLI

SEQ ID NO: 8416 - protein, 13 aa, synthetic construct
ALGELLADTDKII

SEQ ID NO: 8417 - protein, 11 aa, synthetic construct
ALGELKSFTRK

SEQ ID NO: 8418 - protein, 14 aa, synthetic construct
ALGELKEGDKNKLI

SEQ ID NO: 8419 - protein, 10 aa, synthetic construct
ALGELIVDNN

SEQ ID NO: 8420 - protein, 14 aa, synthetic construct
ALGELGVTYPDQLI

SEQ ID NO: 8421 - protein, 14 aa, synthetic construct
ALGELGVTYPDKLI

SEQ ID NO: 8422 - protein, 12 aa, synthetic construct
ALGELGVTDNLI

SEQ ID NO: 8423 - protein, 9 aa, synthetic construct
ALGELGTGG

SEQ ID NO: 8424 - protein, 14 aa, synthetic construct
ALGELGTGGYAPIN

SEQ ID NO: 8425 - protein, 14 aa, synthetic construct
ALGELGTGGYANKL

SEQ ID NO: 8426 - protein, 14 aa, synthetic construct
ALGELGTGGYAHKL

SEQ ID NO: 8427 - protein, 14 aa, synthetic construct
ALGELGTGGYAGKL

SEQ ID NO: 8428 - protein, 14 aa, synthetic construct
ALGELGTGGYADNS

SEQ ID NO: 8429 - protein, 14 aa, synthetic construct
ALGELGTGGSYTDK

SEQ ID NO: 8430 - protein, 14 aa, synthetic construct
ALGELGTGGNADKL

SEQ ID NO: 8431 - protein, 14 aa, synthetic construct
ALGELGTGGLTPIN

SEQ ID NO: 8432 - protein, 11 aa, synthetic construct
ALGELGTGGHS

SEQ ID NO: 8433 - protein, 14 aa, synthetic construct
ALGELGTGGCADKL

SEQ ID NO: 8434 - protein, 14 aa, synthetic construct
ALGELGTGDTRINS

SEQ ID NO: 8435 - protein, 14 aa, synthetic construct
ALGELGTGGYDDKL

SEQ ID NO: 8436 - protein, 14 aa, synthetic construct
ALGELGTGAYADKL

SEQ ID NO: 8437 - protein, 8 aa, synthetic construct
ALGELGTG

SEQ ID NO: 8438 - protein, 14 aa, synthetic construct
ALGELGSTYPDKLI

SEQ ID NO: 8439 - protein, 12 aa, synthetic construct
ALGELGSTVQLI

SEQ ID NO: 8440 - protein, 10 aa, synthetic construct
ALGELGSTQI

SEQ ID NO: 8441 - protein, 12 aa, synthetic construct
ALGELGSTHQLI

SEQ ID NO: 8442 - protein, 12 aa, synthetic construct
ALGELGSTHKII

SEQ ID NO: 8443 - protein, 12 aa, synthetic construct
ALGELGSTHKHN

SEQ ID NO: 8444 - protein, 12 aa, synthetic construct
ALGELGSTETLT

SEQ ID NO: 8445 - protein, 12 aa, synthetic construct
ALGELGSTETGI

SEQ ID NO: 8446 - protein, 14 aa, synthetic construct
ALGELGTGGYAYKL

SEQ ID NO: 8447 - protein, 14 aa, synthetic construct
ALGELGTGGYGAPI

SEQ ID NO: 8448 - protein, 12 aa, synthetic construct
ALGELGVTDKLI

SEQ ID NO: 8449 - protein, 14 aa, synthetic construct
ALGELGTVGYSDKL

SEQ ID NO: 8450 - protein, 13 aa, synthetic construct
ALGELGVSSWATR

SEQ ID NO: 8451 - protein, 13 aa, synthetic construct
ALGELGVMDEKLI

SEQ ID NO: 8452 - protein, 13 aa, synthetic construct
ALGELGVKDDQLI

SEQ ID NO: 8453 - protein, 11 aa, synthetic construct
ALGELGVINSS

SEQ ID NO: 8454 - protein, 13 aa, synthetic construct
ALGELGVIIAPQQ

SEQ ID NO: 8455 - protein, 14 aa, synthetic construct
ALGELGVGYDYKLI

SEQ ID NO: 8456 - protein, 14 aa, synthetic construct
ALGELGVGVILPYA

SEQ ID NO: 8457 - protein, 13 aa, synthetic construct
ALGELGVCSWDTR

SEQ ID NO: 8458 - protein, 13 aa, synthetic construct
ALGELGVAYYDKL

SEQ ID NO: 8459 - protein, 7 aa, synthetic construct
ALGELGV

SEQ ID NO: 8460 - protein, 12 aa, synthetic construct
ALGELGTTIHSS

SEQ ID NO: 8461 - protein, 14 aa, synthetic construct
ALGELGTGGYLGSW

SEQ ID NO: 8462 - protein, 12 aa, synthetic construct
ALGELGTTDKVI

SEQ ID NO: 8463 - protein, 12 aa, synthetic construct
ALGELGTTDKNI

SEQ ID NO: 8464 - protein, 10 aa, synthetic construct
ALGELGTTDK

SEQ ID NO: 8465 - protein, 13 aa, synthetic construct
ALGELGTSSWDTR

SEQ ID NO: 8466 - protein, 12 aa, synthetic construct
ALGELGTPINSS

SEQ ID NO: 8467 - protein, 13 aa, synthetic construct
ALGELGTKDEKLI

SEQ ID NO: 8468 - protein, 13 aa, synthetic construct
ALGELGTKDDKLI

SEQ ID NO: 8469 - protein, 14 aa, synthetic construct
ALGELGTGGYYDKL

SEQ ID NO: 8470 - protein, 14 aa, synthetic construct
ALGELGTGGYSHKL

SEQ ID NO: 8471 - protein, 14 aa, synthetic construct
ALGELGTGGYPINS

SEQ ID NO: 8472 - protein, 13 aa, synthetic construct
ALGELLGDTAQLF

SEQ ID NO: 8473 - protein, 13 aa, synthetic construct
ALGELLGDTDHLI

SEQ ID NO: 8474 - protein, 13 aa, synthetic construct
ALGELLGDTDIII

SEQ ID NO: 8475 - protein, 12 aa, synthetic construct
ALGELLHTETLI

SEQ ID NO: 8476 - protein, 12 aa, synthetic construct
ALGELLNTDKLL

SEQ ID NO: 8477 - protein, 12 aa, synthetic construct
ALGELLNSDKLI

SEQ ID NO: 8478 - protein, 7 aa, synthetic construct
ALGELLN

SEQ ID NO: 8479 - protein, 14 aa, synthetic construct
ALGELLLLGGTDKL

SEQ ID NO: 8480 - protein, 14 aa, synthetic construct
ALGELLLGYTDTLI

SEQ ID NO: 8481 - protein, 14 aa, synthetic construct
ALGELLLGTNDKLI

SEQ ID NO: 8482 - protein, 13 aa, synthetic construct
ALGELLLDTDKLI

SEQ ID NO: 8483 - protein, 14 aa, synthetic construct
ALGELLILGDTDKL

SEQ ID NO: 8484 - protein, 12 aa, synthetic construct
ALGELLIHEKLI

SEQ ID NO: 8485 - protein, 12 aa, synthetic construct
ALGELLHTHKLI

SEQ ID NO: 8486 - protein, 12 aa, synthetic construct
ALGELLHTEQLI

SEQ ID NO: 8487 - protein, 12 aa, synthetic construct
ALGELLNTDKLT

SEQ ID NO: 8488 - protein, 12 aa, synthetic construct
ALGELLHTEKLT

SEQ ID NO: 8489 - protein, 12 aa, synthetic construct
ALGELLHTEKII

SEQ ID NO: 8490 - protein, 12 aa, synthetic construct
ALGELLHTDTLN

SEQ ID NO: 8491 - protein, 12 aa, synthetic construct
ALGELLHTDTLF

SEQ ID NO: 8492 - protein, 12 aa, synthetic construct
ALGELLHTDQLN

SEQ ID NO: 8493 - protein, 12 aa, synthetic construct
ALGELLHTDQLF

SEQ ID NO: 8494 - protein, 12 aa, synthetic construct
ALGELLHTDQII

SEQ ID NO: 8495 - protein, 12 aa, synthetic construct
ALGELLHTDKQI

SEQ ID NO: 8496 - protein, 11 aa, synthetic construct
ALGELLHTDKL

SEQ ID NO: 8497 - protein, 11 aa, synthetic construct
ALGELLHTDKI

SEQ ID NO: 8498 - protein, 12 aa, synthetic construct
ALGELLNTDKLN

SEQ ID NO: 8499 - protein, 12 aa, synthetic construct
ALGELLNTDKLV

SEQ ID NO: 8500 - protein, 12 aa, synthetic construct
ALGELLHTDELI

SEQ ID NO: 8501 - protein, 7 aa, synthetic construct
ALGELLT

SEQ ID NO: 8502 - protein, 9 aa, synthetic construct
ALGELLWDT

SEQ ID NO: 8503 - protein, 13 aa, synthetic construct
ALGELLVYTDKLI

SEQ ID NO: 8504 - protein, 13 aa, synthetic construct
ALGELLVVTDKLI

SEQ ID NO: 8505 - protein, 13 aa, synthetic construct
ALGELLVHNHLHN

SEQ ID NO: 8506 - protein, 13 aa, synthetic construct
ALGELLVDTDNLI

SEQ ID NO: 8507 - protein, 13 aa, synthetic construct
ALGELLVDTDILI

SEQ ID NO: 8508 - protein, 12 aa, synthetic construct
ALGELLTTEKLI

SEQ ID NO: 8509 - protein, 12 aa, synthetic construct
ALGELLTTDKLI

SEQ ID NO: 8510 - protein, 12 aa, synthetic construct
ALGELLTPRNSS

SEQ ID NO: 8511 - protein, 9 aa, synthetic construct
ALGELLTET

SEQ ID NO: 8512 - protein, 13 aa, synthetic construct
ALGELLRDTDQLI

SEQ ID NO: 8513 - protein, 12 aa, synthetic construct
ALGELLNTDKPI

SEQ ID NO: 8514 - protein, 13 aa, synthetic construct
ALGELLRDTDNLI

SEQ ID NO: 8515 - protein, 10 aa, synthetic construct
ALGELLQTDQ

SEQ ID NO: 8516 - protein, 14 aa, synthetic construct
ALGELLPTFRGTDK

SEQ ID NO: 8517 - protein, 12 aa, synthetic construct
ALGELLNTNKLI

SEQ ID NO: 8518 - protein, 12 aa, synthetic construct
ALGELLNTEKHI

SEQ ID NO: 8519 - protein, 12 aa, synthetic construct
ALGELLNTDTHI

SEQ ID NO: 8520 - protein, 12 aa, synthetic construct
ALGELLNTDRLI

SEQ ID NO: 8521 - protein, 12 aa, synthetic construct
ALGELLNTDQHI

SEQ ID NO: 8522 - protein, 12 aa, synthetic construct
ALGELLNTDNSS

SEQ ID NO: 8523 - protein, 12 aa, synthetic construct
ALGELLNTDNLI

SEQ ID NO: 8524 - protein, 12 aa, synthetic construct
ALGELLHTDKCI

SEQ ID NO: 8525 - protein, 12 aa, synthetic construct
ALGELLHTDDLI

SEQ ID NO: 8526 - protein, 13 aa, synthetic construct
ALGELLGDTDILL

SEQ ID NO: 8527 - protein, 13 aa, synthetic construct
ALGELLGDTEKRI

SEQ ID NO: 8528 - protein, 13 aa, synthetic construct
ALGELLGDTVKLI

SEQ ID NO: 8529 - protein, 13 aa, synthetic construct
ALGELLGDTTKLI

SEQ ID NO: 8530 - protein, 13 aa, synthetic construct
ALGELLGDTSKLI

SEQ ID NO: 8531 - protein, 13 aa, synthetic construct
ALGELLGDTNNLI

SEQ ID NO: 8532 - protein, 13 aa, synthetic construct
ALGELLGDTNKLT

SEQ ID NO: 8533 - protein, 13 aa, synthetic construct
ALGELLGDTNKLF

SEQ ID NO: 8534 - protein, 13 aa, synthetic construct
ALGELLGDTNKHI

SEQ ID NO: 8535 - protein, 13 aa, synthetic construct
ALGELLGDTNIII

SEQ ID NO: 8536 - protein, 13 aa, synthetic construct
ALGELLGDTHQII

SEQ ID NO: 8537 - protein, 13 aa, synthetic construct
ALGELLGDTGQLI

SEQ ID NO: 8538 - protein, 13 aa, synthetic construct
ALGELLGDTEKLN

SEQ ID NO: 8539 - protein, 13 aa, synthetic construct
ALGELLGDTYKLL

SEQ ID NO: 8540 - protein, 13 aa, synthetic construct
ALGELLGDTEKLL

SEQ ID NO: 8541 - protein, 12 aa, synthetic construct
ALGELLGDTEKL

SEQ ID NO: 8542 - protein, 13 aa, synthetic construct
ALGELLGDTEKII

SEQ ID NO: 8543 - protein, 13 aa, synthetic construct
ALGELLGDTDTLN

SEQ ID NO: 8544 - protein, 12 aa, synthetic construct
ALGELLGDTDTL

SEQ ID NO: 8545 - protein, 13 aa, synthetic construct
ALGELLGDTDQPI

SEQ ID NO: 8546 - protein, 13 aa, synthetic construct
ALGELLGDTDQII

SEQ ID NO: 8547 - protein, 13 aa, synthetic construct
ALGELLGDTDNIV

SEQ ID NO: 8548 - protein, 13 aa, synthetic construct
ALGELLGDTDKLY

SEQ ID NO: 8549 - protein, 13 aa, synthetic construct
ALGELLGDTDKHT

SEQ ID NO: 8550 - protein, 13 aa, synthetic construct
ALGELLGDTYKLF

SEQ ID NO: 8551 - protein, 13 aa, synthetic construct
ALGELLGDTYRLI

SEQ ID NO: 8552 - protein, 12 aa, synthetic construct
ALGELLHSDTLY

SEQ ID NO: 8553 - protein, 9 aa, synthetic construct
ALGELLGLT

SEQ ID NO: 8554 - protein, 12 aa, synthetic construct
ALGELLHSDKLI

SEQ ID NO: 8555 - protein, 12 aa, synthetic construct
ALGELLHPDTLI

SEQ ID NO: 8556 - protein, 12 aa, synthetic construct
ALGELLHPDKLI

SEQ ID NO: 8557 - protein, 12 aa, synthetic construct
ALGELLHPDKHI

SEQ ID NO: 8558 - protein, 13 aa, synthetic construct
ALGELLGYTYNLI

SEQ ID NO: 8559 - protein, 13 aa, synthetic construct
ALGELLGYTDQLI

SEQ ID NO: 8560 - protein, 12 aa, synthetic construct
ALGELLGYTDKL

SEQ ID NO: 8561 - protein, 13 aa, synthetic construct
ALGELLGVTYKLI

SEQ ID NO: 8562 - protein, 13 aa, synthetic construct
ALGELLGVTDQLI

SEQ ID NO: 8563 - protein, 13 aa, synthetic construct
ALGELLGTPINSS

SEQ ID NO: 8564 - protein, 14 aa, synthetic construct
ALGELLGIRWRQHN

SEQ ID NO: 8565 - protein, 12 aa, synthetic construct
ALGELLGETDKH

SEQ ID NO: 8566 - protein, 13 aa, synthetic construct
ALGELLGIPINPS

SEQ ID NO: 8567 - protein, 13 aa, synthetic construct
ALGELLGGTNKLI

SEQ ID NO: 8568 - protein, 13 aa, synthetic construct
ALGELLGGTDKII

SEQ ID NO: 8569 - protein, 9 aa, synthetic construct
ALGELLGGN

SEQ ID NO: 8570 - protein, 13 aa, synthetic construct
ALGELLGGIDKLI

SEQ ID NO: 8571 - protein, 13 aa, synthetic construct
ALGELLGGDRSTH

SEQ ID NO: 8572 - protein, 14 aa, synthetic construct
ALGELLGETWAPGT

SEQ ID NO: 8573 - protein, 13 aa, synthetic construct
ALGELLGETNKLI

SEQ ID NO: 8574 - protein, 13 aa, synthetic construct
ALGELLGETDKNI

SEQ ID NO: 8575 - protein, 13 aa, synthetic construct
ALGELLGETDKII

SEQ ID NO: 8576 - protein, 10 aa, synthetic construct
YWGRVHRKPQ

SEQ ID NO: 8577 - protein, 13 aa, synthetic construct
ALGELGGYADKLI

SEQ ID NO: 8578 - protein, 12 aa, synthetic construct
ALGELGMTDKLI

SEQ ID NO: 8579 - protein, 11 aa, synthetic construct
ALGGGYSDKLI

SEQ ID NO: 8580 - protein, 9 aa, synthetic construct
ALGGTDKLI

SEQ ID NO: 8581 - protein, 12 aa, synthetic construct
ALGERGITDKLI

SEQ ID NO: 8582 - protein, 8 aa, synthetic construct
ALGEGKLI

SEQ ID NO: 8583 - protein, 13 aa, synthetic construct
ALGELGADTDKLI

SEQ ID NO: 8584 - protein, 12 aa, synthetic construct
ALGELRDTDKLI

SEQ ID NO: 8585 - protein, 13 aa, synthetic construct
ALGVLLGDTRKLI

SEQ ID NO: 8586 - protein, 11 aa, synthetic construct
ALGEAYTDKLI

SEQ ID NO: 8587 - protein, 12 aa, synthetic construct
ALGERGDSDKLI

SEQ ID NO: 8588 - protein, 12 aa, synthetic construct
ALGELGDTDKLI

SEQ ID NO: 8589 - protein, 13 aa, synthetic construct
ALGELGIYTDKLI

SEQ ID NO: 8590 - protein, 12 aa, synthetic construct
ALGELRIFDKLI

SEQ ID NO: 8591 - protein, 14 aa, synthetic construct
ALGETSYGISDKLI

SEQ ID NO: 8592 - protein, 13 aa, synthetic construct
ALGVTGGYTDKLI

SEQ ID NO: 8593 - protein, 14 aa, synthetic construct
ALGEETGGYTDKLI

SEQ ID NO: 8594 - protein, 13 aa, synthetic construct
ALGELGDTGDKLI

SEQ ID NO: 8595 - protein, 14 aa, synthetic construct
ALGEPCTGDTDKLI

SEQ ID NO: 8596 - protein, 14 aa, synthetic construct
ALGELGGYGTDKLI

SEQ ID NO: 8597 - protein, 14 aa, synthetic construct
ALGELPLGVLYTDK

SEQ ID NO: 8598 - protein, 14 aa, synthetic construct
ALGELGASYTDKLI

SEQ ID NO: 8599 - protein, 14 aa, synthetic construct
ALGELLLGDPDKLI

SEQ ID NO: 8600 - protein, 14 aa, synthetic construct
ALGEPGGYNTDKLI

SEQ ID NO: 8601 - protein, 14 aa, synthetic construct
ALGELPYWGRYTDK

SEQ ID NO: 8602 - protein, 11 aa, synthetic construct
ALGDVGDNKLI

SEQ ID NO: 8603 - protein, 14 aa, synthetic construct
ALGASFLGYATDKL

SEQ ID NO: 8604 - protein, 13 aa, synthetic construct
ALGELDWGRRGLI

SEQ ID NO: 8605 - protein, 12 aa, synthetic construct
ALGVWGINDKLI

SEQ ID NO: 8606 - protein, 11 aa, synthetic construct
ALGELYTDKLI

SEQ ID NO: 8607 - protein, 14 aa, synthetic construct
ALGGPYQEDGTDKL

SEQ ID NO: 8608 - protein, 14 aa, synthetic construct
ALGEPYVLGARSKL

SEQ ID NO: 8609 - protein, 14 aa, synthetic construct
ALGELRTGGYEYTD

SEQ ID NO: 8610 - protein, 14 aa, synthetic construct
ALGEPRTGGYAYTD

SEQ ID NO: 8611 - protein, 14 aa, synthetic construct
ALGHLPTWGSYTDK

SEQ ID NO: 8612 - protein, 14 aa, synthetic construct
ALGEPVLGASYTDK

SEQ ID NO: 8613 - protein, 14 aa, synthetic construct
ALGELGDRALTAQL

SEQ ID NO: 8614 - protein, 14 aa, synthetic construct
ALGEPSYWGIHTDK

SEQ ID NO: 8615 - protein, 14 aa, synthetic construct
ALGASYAPVPDKLI

SEQ ID NO: 8616 - protein, 14 aa, synthetic construct
ALGELPLYWGLYTD

SEQ ID NO: 8617 - protein, 10 aa, synthetic construct
ALGELGDKLI

SEQ ID NO: 8618 - protein, 14 aa, synthetic construct
ALGEPSTGGYADKL

SEQ ID NO: 8619 - protein, 11 aa, synthetic construct
ALGELRGLGLI

SEQ ID NO: 8620 - protein, 14 aa, synthetic construct
ALGELRWGPYTDKL

SEQ ID NO: 8621 - protein, 14 aa, synthetic construct
ALGEPPSYVLGDTD

SEQ ID NO: 8622 - protein, 14 aa, synthetic construct
ALGELPTGGFGYTD

SEQ ID NO: 8623 - protein, 14 aa, synthetic construct
ALGRYWGGPLTAQL

SEQ ID NO: 8624 - protein, 13 aa, synthetic construct
ALGEPGGYTDKLI

SEQ ID NO: 8625 - protein, 14 aa, synthetic construct
ALGEPLLLGDTIDK

SEQ ID NO: 8626 - protein, 13 aa, synthetic construct
ALGDLGGYADKLI

SEQ ID NO: 8627 - protein, 12 aa, synthetic construct
ALGNWGIRDKLI

SEQ ID NO: 8628 - protein, 12 aa, synthetic construct
ALGDLGMTDKLI

SEQ ID NO: 8629 - protein, 14 aa, synthetic construct
ALGELYWGILSSWD

SEQ ID NO: 8630 - protein, 12 aa, synthetic construct
ALGVWGINDELI

SEQ ID NO: 8631 - protein, 12 aa, synthetic construct
ALGDLRDTDKLI

SEQ ID NO: 8632 - protein, 12 aa, synthetic construct
ALGDLGDTDKLI

SEQ ID NO: 8633 - protein, 13 aa, synthetic construct
ALGDLGADTDKLI

SEQ ID NO: 8634 - protein, 14 aa, synthetic construct
ALGDLGGYGTDKLI

SEQ ID NO: 8635 - protein, 13 aa, synthetic construct
ALGDLGIYTDKLI

SEQ ID NO: 8636 - protein, 14 aa, synthetic construct
ALGDLGASYTDKLI

SEQ ID NO: 8637 - protein, 13 aa, synthetic construct
ALGDLGDTGDKLI

SEQ ID NO: 8638 - protein, 13 aa, synthetic construct
ALGEVGGYADKLI

SEQ ID NO: 8639 - protein, 12 aa, synthetic construct
ALGDLRIFDKLI

SEQ ID NO: 8640 - protein, 13 aa, synthetic construct
ALGELGGYADQLI

SEQ ID NO: 8641 - protein, 13 aa, synthetic construct
ALGELGGYAEKLI

SEQ ID NO: 8642 - protein, 14 aa, synthetic construct
ALGDETGGYTDKLI

SEQ ID NO: 8643 - protein, 8 aa, synthetic construct
ALGEGTLI

SEQ ID NO: 8644 - protein, 12 aa, synthetic construct
ALGDRGITDKLI

SEQ ID NO: 8645 - protein, 14 aa, synthetic construct
ALGDLGDRALTAQL

SEQ ID NO: 8646 - protein, 11 aa, synthetic construct
ALGDLRGLGLI

SEQ ID NO: 8647 - protein, 14 aa, synthetic construct
ALGEPCPGDTDKLI

SEQ ID NO: 8648 - protein, 14 aa, synthetic construct
LLGNSYWGIQINSS

SEQ ID NO: 8649 - protein, 14 aa, synthetic construct
ALGDLPYWGRYTDK

SEQ ID NO: 8650 - protein, 14 aa, synthetic construct
ALGDLLLGDPDKLI

SEQ ID NO: 8651 - protein, 11 aa, synthetic construct
ALGGDIPINSS

SEQ ID NO: 8652 - protein, 11 aa, synthetic construct
ALGDLYTDKLI

SEQ ID NO: 8653 - protein, 14 aa, synthetic construct
ALGELGASYTEKLI

SEQ ID NO: 8654 - protein, 14 aa, synthetic construct
ALGEPCTGDTEKLI

SEQ ID NO: 8655 - protein, 12 aa, synthetic construct
ALGELGMTDQLI

SEQ ID NO: 8656 - protein, 11 aa, synthetic construct
ALGGGYYDKLI

SEQ ID NO: 8657 - protein, 14 aa, synthetic construct
ALGDLRWGPYTDKL

SEQ ID NO: 8658 - protein, 13 aa, synthetic construct
ALGVILGDTRKLI

SEQ ID NO: 8659 - protein, 13 aa, synthetic construct
ALGDLGGYADQLI

SEQ ID NO: 8660 - protein, 14 aa, synthetic construct
ALGELGGYGTEKLI

SEQ ID NO: 8661 - protein, 14 aa, synthetic construct
ALGEPGGYNTEKLI

SEQ ID NO: 8662 - protein, 13 aa, synthetic construct
ALGDLDWGRRGLI

SEQ ID NO: 8663 - protein, 10 aa, synthetic construct
ALGDLGDKLI

SEQ ID NO: 8664 - protein, 14 aa, synthetic construct
ALGDLRTGGYEYTD

SEQ ID NO: 8665 - protein, 14 aa, synthetic construct
ALGETSYGISEKLI

SEQ ID NO: 8666 - protein, 13 aa, synthetic construct
ALGVTGGYTDQLI

SEQ ID NO: 8667 - protein, 14 aa, synthetic construct
ALGELLLGDPEKLI

SEQ ID NO: 8668 - protein, 14 aa, synthetic construct
ALGASYAPVPEKLI

SEQ ID NO: 8669 - protein, 14 aa, synthetic construct
ALGASFIGYATDKL

SEQ ID NO: 8670 - protein, 13 aa, synthetic construct
ALGELGADTDQLI

SEQ ID NO: 8671 - protein, 13 aa, synthetic construct
ALGVLLGDTRTLI

SEQ ID NO: 8672 - protein, 11 aa, synthetic construct
ALGEAYTEKLI

SEQ ID NO: 8673 - protein, 14 aa, synthetic construct
ALGEETGGYTEKLI

SEQ ID NO: 8674 - protein, 14 aa, synthetic construct
ALGDPGGYNTDKLI

SEQ ID NO: 8675 - protein, 11 aa, synthetic construct
ALGGGYSEKLI

SEQ ID NO: 8676 - protein, 9 aa, synthetic construct
ALGGTEKLI

SEQ ID NO: 8677 - protein, 13 aa, synthetic construct
ALGELGGYADKLV

SEQ ID NO: 8678 - protein, 13 aa, synthetic construct
ALGELPYWGRYTD

SEQ ID NO: 8679 - protein, 12 aa, synthetic construct
ALGTWGIRDKLI

SEQ ID NO: 8680 - protein, 14 aa, synthetic construct
ALGDLPLGVLYTDK

SEQ ID NO: 8681 - protein, 13 aa, synthetic construct
ALGEPPSYVLGDT

SEQ ID NO: 8682 - protein, 14 aa, synthetic construct
LLGHPSSDTRPINS

SEQ ID NO: 8683 - protein, 14 aa, synthetic construct
ALGELPYWGRSTDK

SEQ ID NO: 8684 - protein, 14 aa, synthetic construct
ALGDLPLYWGLYTD

SEQ ID NO: 8685 - protein, 9 aa, synthetic construct
ALGGTDQLI

SEQ ID NO: 8686 - protein, 13 aa, synthetic construct
ALGGLGGYADKLI

SEQ ID NO: 8687 - protein, 14 aa, synthetic construct
ALGRSWGGPLTAQL

SEQ ID NO: 8688 - protein, 13 aa, synthetic construct
ALGEPSYWGIHTD

SEQ ID NO: 8689 - protein, 14 aa, synthetic construct
ALGEPRPGGYAYTD

SEQ ID NO: 8690 - protein, 12 aa, synthetic construct
ALGELGITDKLI

SEQ ID NO: 8691 - protein, 14 aa, synthetic construct
ALGDPVLGASYTDK

SEQ ID NO: 8692 - protein, 11 aa, synthetic construct
LLGRRTPINSS

SEQ ID NO: 8693 - protein, 13 aa, synthetic construct
LLGNWGLTPINSS

SEQ ID NO: 8694 - protein, 14 aa, synthetic construct
ALGEVGGYGTDKLI

SEQ ID NO: 8695 - protein, 11 aa, synthetic construct
ALGDVGDTKLI

SEQ ID NO: 8696 - protein, 14 aa, synthetic construct
ALGETSYGISDKII

SEQ ID NO: 8697 - protein, 14 aa, synthetic construct
ALGHIPTWGSYTDK

SEQ ID NO: 8698 - protein, 12 aa, synthetic construct
ALGERGDSDQLI

SEQ ID NO: 8699 - protein, 14 aa, synthetic construct
ALGDPSTGGYADKL

SEQ ID NO: 8700 - protein, 14 aa, synthetic construct
ALGEETGGYTDKII

SEQ ID NO: 8701 - protein, 14 aa, synthetic construct
ALGELRPGGYEYTD

SEQ ID NO: 8702 - protein, 12 aa, synthetic construct
ALGELGMTEKLI

SEQ ID NO: 8703 - protein, 14 aa, synthetic construct
ALGGPPSYVLGDTD

SEQ ID NO: 8704 - protein, 13 aa, synthetic construct
ALGELGDTGEKLI

SEQ ID NO: 8705 - protein, 9 aa, synthetic construct
LLGGPINSS

SEQ ID NO: 8706 - protein, 12 aa, synthetic construct
ALGEVGMTDKLI

SEQ ID NO: 8707 - protein, 13 aa, synthetic construct
ALGEPVLGASYTD

SEQ ID NO: 8708 - protein, 14 aa, synthetic construct
ALGGPYQEDGTEKL

SEQ ID NO: 8709 - protein, 11 aa, synthetic construct
LLGGDIPINSS

SEQ ID NO: 8710 - protein, 8 aa, synthetic construct
ALGEGNLI

SEQ ID NO: 8711 - protein, 12 aa, synthetic construct
ALGERGITDQLI

SEQ ID NO: 8712 - protein, 13 aa, synthetic construct
ALGELGGYADKII

SEQ ID NO: 8713 - protein, 11 aa, synthetic construct
ALGGGYSDKLN

SEQ ID NO: 8714 - protein, 13 aa, synthetic construct
ALGELGDTGDQLI

SEQ ID NO: 8715 - protein, 14 aa, synthetic construct
ALGDPCTGDTDKLI

SEQ ID NO: 8716 - protein, 13 aa, synthetic construct
ALGELGADTEKLI

SEQ ID NO: 8717 - protein, 13 aa, synthetic construct
ALGELPLGVLYTD

SEQ ID NO: 8718 - protein, 14 aa, synthetic construct
ALGASYEPVPDKLI

SEQ ID NO: 8719 - protein, 14 aa, synthetic construct
ALGGPYKEDGTDKL

SEQ ID NO: 8720 - protein, 12 aa, synthetic construct
ALGDRGDSDKLI

SEQ ID NO: 8721 - protein, 14 aa, synthetic construct
ALGNPVLGIPINSS

SEQ ID NO: 8722 - protein, 13 aa, synthetic construct
ALGVLLGDTRNLI

SEQ ID NO: 8723 - protein, 14 aa, synthetic construct
ALGEPSVLGARSKL

SEQ ID NO: 8724 - protein, 13 aa, synthetic construct
ALGHLPTWGSYTD

SEQ ID NO: 8725 - protein, 14 aa, synthetic construct
ALGEPGGYNTDKII

SEQ ID NO: 8726 - protein, 13 aa, synthetic construct
LLGNWGIPAINSS

SEQ ID NO: 8727 - protein, 14 aa, synthetic construct
ALGEIPLGVLYTDK

SEQ ID NO: 8728 - protein, 12 aa, synthetic construct
ALGELGMTDKII

SEQ ID NO: 8729 - protein, 14 aa, synthetic construct
ALGEPCTGDTDKII

SEQ ID NO: 8730 - protein, 8 aa, synthetic construct
LLERGNSS

SEQ ID NO: 8731 - protein, 13 aa, synthetic construct
ALGEETGGYTDKL

SEQ ID NO: 8732 - protein, 14 aa, synthetic construct
ALGDLPTGGFGYTD

SEQ ID NO: 8733 - protein, 13 aa, synthetic construct
ALGELGGYADNLI

SEQ ID NO: 8734 - protein, 12 aa, synthetic construct
LLGNCGIPINSS

SEQ ID NO: 8735 - protein, 14 aa, synthetic construct
LLGKKLGDTPINSS

SEQ ID NO: 8736 - protein, 14 aa, synthetic construct
ALGELPLGVLSTDK

SEQ ID NO: 8737 - protein, 13 aa, synthetic construct
ALGELGGYADKLN

SEQ ID NO: 8738 - protein, 14 aa, synthetic construct
ALGASFLGYATEKL

SEQ ID NO: 8739 - protein, 13 aa, synthetic construct
ALGDVGGYADKLI

SEQ ID NO: 8740 - protein, 12 aa, synthetic construct
ALGELGMTDNLI

SEQ ID NO: 8741 - protein, 11 aa, synthetic construct
ALGELYTEKLI

SEQ ID NO: 8742 - protein, 11 aa, synthetic construct
ALGDVGENKLI

SEQ ID NO: 8743 - protein, 12 aa, synthetic construct
ALGELRDTDQLI

SEQ ID NO: 8744 - protein, 13 aa, synthetic construct
ALGETSYGISDKL

SEQ ID NO: 8745 - protein, 13 aa, synthetic construct
ALGDLGADTDQLI

SEQ ID NO: 8746 - protein, 14 aa, synthetic construct
ALGELPLSWGLYTD

SEQ ID NO: 8747 - protein, 11 aa, synthetic construct
ALGGGYSDKII

SEQ ID NO: 8748 - protein, 13 aa, synthetic construct
ALGEPGGYNTDKL

SEQ ID NO: 8749 - protein, 11 aa, synthetic construct
ALGEASTDKLI

SEQ ID NO: 8750 - protein, 13 aa, synthetic construct
DLGELGGYADKLI

SEQ ID NO: 8751 - protein, 12 aa, synthetic construct
ALGELGMTDTLI

SEQ ID NO: 8752 - protein, 14 aa, synthetic construct
LLGNLPTGGYTPIN

SEQ ID NO: 8753 - protein, 14 aa, synthetic construct
ALGDLYWGILSSWD

SEQ ID NO: 8754 - protein, 14 aa, synthetic construct
ALGGPYQEDGTDQL

SEQ ID NO: 8755 - protein, 14 aa, synthetic construct
ALGEIRTGGYEYTD

SEQ ID NO: 8756 - protein, 14 aa, synthetic construct
ALGDPRTGGYAYTD

SEQ ID NO: 8757 - protein, 14 aa, synthetic construct
ALGELGASYTDKII

SEQ ID NO: 8758 - protein, 14 aa, synthetic construct
ALGELPPGGFGYTD

SEQ ID NO: 8759 - protein, 11 aa, synthetic construct
ALGDVGDHKLI

SEQ ID NO: 8760 - protein, 14 aa, synthetic construct
ALGEPGGSNTDKLI

SEQ ID NO: 8761 - protein, 12 aa, synthetic construct
ALGELGMTDKLN

SEQ ID NO: 8762 - protein, 12 aa, synthetic construct
ALGEVGDTDKLI

SEQ ID NO: 8763 - protein, 13 aa, synthetic construct
LLGSYWGIRGNSS

SEQ ID NO: 8764 - protein, 11 aa, synthetic construct
ALGELRGLGLF

SEQ ID NO: 8765 - protein, 12 aa, synthetic construct
ALGELGDTDQLI

SEQ ID NO: 8766 - protein, 13 aa, synthetic construct
ALGELGIYTDQLI

SEQ ID NO: 8767 - protein, 11 aa, synthetic construct
ALGEAYTDKLN

SEQ ID NO: 8768 - protein, 13 aa, synthetic construct
ALGVTGGYTEKLI

SEQ ID NO: 8769 - protein, 12 aa, synthetic construct
ALGELRDTEKLI

SEQ ID NO: 8770 - protein, 14 aa, synthetic construct
LLGNFPTGGGTPIN

SEQ ID NO: 8771 - protein, 14 aa, synthetic construct
ALGDPSYWGIHTDK

SEQ ID NO: 8772 - protein, 12 aa, synthetic construct
ALGVWGINDKII

SEQ ID NO: 8773 - protein, 14 aa, synthetic construct
ALGEPVLGASNTDK

SEQ ID NO: 8774 - protein, 11 aa, synthetic construct
LLGTWGIINSS

SEQ ID NO: 8775 - protein, 9 aa, synthetic construct
ALGELPLGV

SEQ ID NO: 8776 - protein, 12 aa, synthetic construct
ALGELGVTDKLI

SEQ ID NO: 8777 - protein, 14 aa, synthetic construct
ALGDTSYGISDKLI

SEQ ID NO: 8778 - protein, 11 aa, synthetic construct
ALGDVGDNKLF

SEQ ID NO: 8779 - protein, 13 aa, synthetic construct
LLGNWGYTPINSS

SEQ ID NO: 8780 - protein, 13 aa, synthetic construct
ALGELGGYGTDKL

SEQ ID NO: 8781 - protein, 14 aa, synthetic construct
ALGEPSYWGVHTDK

SEQ ID NO: 8782 - protein, 13 aa, synthetic construct
ALGELGDTPINSS

SEQ ID NO: 8783 - protein, 12 aa, synthetic construct
ALGERGDSDKLN

SEQ ID NO: 8784 - protein, 14 aa, synthetic construct
ALGETSYGISDQLI

SEQ ID NO: 8785 - protein, 14 aa, synthetic construct
LLGDPTKRTAPINS

SEQ ID NO: 8786 - protein, 14 aa, synthetic construct
LLGNPYWGPRTPIN

SEQ ID NO: 8787 - protein, 11 aa, synthetic construct
ALGDVGANKLI

SEQ ID NO: 8788 - protein, 12 aa, synthetic construct
DLGELGMTDKLI

SEQ ID NO: 8789 - protein, 14 aa, synthetic construct
ALGELGGSGTDKLI

SEQ ID NO: 8790 - protein, 13 aa, synthetic construct
AVGVTGGYTDKLI

SEQ ID NO: 8791 - protein, 14 aa, synthetic construct
ALGEPRTGGYSYTD

SEQ ID NO: 8792 - protein, 13 aa, synthetic construct
ALGEVGDTGDKLI

SEQ ID NO: 8793 - protein, 12 aa, synthetic construct
ALGERGIAINSS

SEQ ID NO: 8794 - protein, 12 aa, synthetic construct
ALGELRIFDKII

SEQ ID NO: 8795 - protein, 13 aa, synthetic construct
ALGEPCTGDTDKL

SEQ ID NO: 8796 - protein, 13 aa, synthetic construct
ALGVVLGDTRKLI

SEQ ID NO: 8797 - protein, 9 aa, synthetic construct
ALGGTDKII

SEQ ID NO: 8798 - protein, 14 aa, synthetic construct
ALGHLPPWGSYTDK

SEQ ID NO: 8799 - protein, 14 aa, synthetic construct
ALGELPYWGRYTEK

SEQ ID NO: 8800 - protein, 14 aa, synthetic construct
ALGASFLGYSTDKL

SEQ ID NO: 8801 - protein, 8 aa, synthetic construct
DLGEGKLI

SEQ ID NO: 8802 - protein, 12 aa, synthetic construct
ALGELRSFDKLI

SEQ ID NO: 8803 - protein, 13 aa, synthetic construct
ALGVSGGYTDKLI

SEQ ID NO: 8804 - protein, 14 aa, synthetic construct
ALGELRWGPYTEKL

SEQ ID NO: 8805 - protein, 12 aa, synthetic construct
ALGELGDTEKLI

SEQ ID NO: 8806 - protein, 13 aa, synthetic construct
ALGALGGYADKLI

SEQ ID NO: 8807 - protein, 12 aa, synthetic construct
ALGERGITDTLI

SEQ ID NO: 8808 - protein, 11 aa, synthetic construct
ALGGGYSDKLF

SEQ ID NO: 8809 - protein, 11 aa, synthetic construct
LLGNFTPINSS

SEQ ID NO: 8810 - protein, 14 aa, synthetic construct
LLGNSVLGDTSTPI

SEQ ID NO: 8811 - protein, 14 aa, synthetic construct
ALGEPRTGGYADKL

SEQ ID NO: 8812 - protein, 13 aa, synthetic construct
ALGDLGIYTDQLI

SEQ ID NO: 8813 - protein, 14 aa, synthetic construct
LLGNLGDTTPINSS

SEQ ID NO: 8814 - protein, 11 aa, synthetic construct
ALGELYTDKLN

SEQ ID NO: 8815 - protein, 9 aa, synthetic construct
ALVGTDKLI

SEQ ID NO: 8816 - protein, 13 aa, synthetic construct
LLGLLGDTPINSS

SEQ ID NO: 8817 - protein, 12 aa, synthetic construct
ALGELGDTDKHI

SEQ ID NO: 8818 - protein, 14 aa, synthetic construct
ALGDPKRDTSTDKL

SEQ ID NO: 8819 - protein, 11 aa, synthetic construct
ALGDVGDKKLI

SEQ ID NO: 8820 - protein, 13 aa, synthetic construct
ALGELGDTGDKII

SEQ ID NO: 8821 - protein, 12 aa, synthetic construct
ALGELRDTDKII

SEQ ID NO: 8822 - protein, 12 aa, synthetic construct
ALGELRIFDQLI

SEQ ID NO: 8823 - protein, 11 aa, synthetic construct
ALGEVRGLGLI

SEQ ID NO: 8824 - protein, 14 aa, synthetic construct
ALGASFLAYATDKL

SEQ ID NO: 8825 - protein, 14 aa, synthetic construct
ALGEPYVLGARRKL

SEQ ID NO: 8826 - protein, 11 aa, synthetic construct
ALGAPYWDKLI

SEQ ID NO: 8827 - protein, 14 aa, synthetic construct
LLGKLPTGSPINSS

SEQ ID NO: 8828 - protein, 14 aa, synthetic construct
ALGASYAPVPDKII

SEQ ID NO: 8829 - protein, 14 aa, synthetic construct
LLGNPVLGIPINSS

SEQ ID NO: 8830 - protein, 14 aa, synthetic construct
ALGELPLGVLYTEK

SEQ ID NO: 8831 - protein, 12 aa, synthetic construct
LLGNFGFSINSS

SEQ ID NO: 8832 - protein, 14 aa, synthetic construct
ALGELGGYGTDKII

SEQ ID NO: 8833 - protein, 13 aa, synthetic construct
ALGELGGYAYKLI

SEQ ID NO: 8834 - protein, 14 aa, synthetic construct
LLGNWGPRTPINSS

SEQ ID NO: 8835 - protein, 14 aa, synthetic construct
ALGEPGGYNTYKLI

SEQ ID NO: 8836 - protein, 13 aa, synthetic construct
ALGEPGGYADKLI

SEQ ID NO: 8837 - protein, 8 aa, synthetic construct
ALGEGKII

SEQ ID NO: 8838 - protein, 12 aa, synthetic construct
ALGELRDTDNLI

SEQ ID NO: 8839 - protein, 13 aa, synthetic construct
ALGGPYQEDGTDK

SEQ ID NO: 8840 - protein, 14 aa, synthetic construct
ALGEHGGYNTDKLI

SEQ ID NO: 8841 - protein, 14 aa, synthetic construct
ALGGPSQEDGTDKL

SEQ ID NO: 8842 - protein, 9 aa, synthetic construct
DLGGTDKLI

SEQ ID NO: 8843 - protein, 14 aa, synthetic construct
ALGEVRWGPYTDKL

SEQ ID NO: 8844 - protein, 14 aa, synthetic construct
ALGELPYWGSYTDK

SEQ ID NO: 8845 - protein, 14 aa, synthetic construct
ALGDPYVLGARSKL

SEQ ID NO: 8846 - protein, 12 aa, synthetic construct
ALGEIGMTDKLI

SEQ ID NO: 8847 - protein, 12 aa, synthetic construct
ALGERGITDKII

SEQ ID NO: 8848 - protein, 12 aa, synthetic construct
ALGERGITEKLI

SEQ ID NO: 8849 - protein, 14 aa, synthetic construct
ALGEPSPGGYADKL

SEQ ID NO: 8850 - protein, 12 aa, synthetic construct
ALGDVGMTDKLI

SEQ ID NO: 8851 - protein, 13 aa, synthetic construct
ALGELGGYTDKLI

SEQ ID NO: 8852 - protein, 13 aa, synthetic construct
ALGEPPSYVLWDT

SEQ ID NO: 8853 - protein, 14 aa, synthetic construct
ALGEPRTGGYASTD

SEQ ID NO: 8854 - protein, 14 aa, synthetic construct
ALGEPSNWGIHTDK

SEQ ID NO: 8855 - protein, 12 aa, synthetic construct
DLGERGITDKLI

SEQ ID NO: 8856 - protein, 13 aa, synthetic construct
ALGELGGCADKLI

SEQ ID NO: 8857 - protein, 14 aa, synthetic construct
ALGEPVLGASYTDE

SEQ ID NO: 8858 - protein, 13 aa, synthetic construct
ALGDPGGYTDKLI

SEQ ID NO: 8859 - protein, 14 aa, synthetic construct
LLGNSPWGSCTPIN

SEQ ID NO: 8860 - protein, 13 aa, synthetic construct
ALGELGIYTEKLI

SEQ ID NO: 8861 - protein, 14 aa, synthetic construct
ALGEETGGYTDQLI

SEQ ID NO: 8862 - protein, 14 aa, synthetic construct
LLGTFLRGGRTPIN

SEQ ID NO: 8863 - protein, 11 aa, synthetic construct
DLGGGYSDKLI

SEQ ID NO: 8864 - protein, 11 aa, synthetic construct
ALGDVGDNKLN

SEQ ID NO: 8865 - protein, 12 aa, synthetic construct
GLGELGMTDKLI

SEQ ID NO: 8866 - protein, 14 aa, synthetic construct
LLGPHMHPSPINSS

SEQ ID NO: 8867 - protein, 12 aa, synthetic construct
ALGDLGMTDQLI

SEQ ID NO: 8868 - protein, 11 aa, synthetic construct
ALGEAYTDKLF

SEQ ID NO: 8869 - protein, 14 aa, synthetic construct
ALGGPYVLGARSKL

SEQ ID NO: 8870 - protein, 12 aa, synthetic construct
ALGELGMADKLI

SEQ ID NO: 8871 - protein, 14 aa, synthetic construct
ALGEPSYGISDKLI

SEQ ID NO: 8872 - protein, 14 aa, synthetic construct
ALGEVGDRALTAQL

SEQ ID NO: 8873 - protein, 12 aa, synthetic construct
ALGELGMSDKLI

SEQ ID NO: 8874 - protein, 13 aa, synthetic construct
ALGEVGIYTDKLI

SEQ ID NO: 8875 - protein, 13 aa, synthetic construct
ALGELGGYAAKLI

SEQ ID NO: 8876 - protein, 14 aa, synthetic construct
ALGHLPTWGSYTEK

SEQ ID NO: 8877 - protein, 12 aa, synthetic construct
ALGERGITDNLI

SEQ ID NO: 8878 - protein, 14 aa, synthetic construct
ALGHLPTWGSSTDK

SEQ ID NO: 8879 - protein, 13 aa, synthetic construct
ALGELGGSADKLI

SEQ ID NO: 8880 - protein, 13 aa, synthetic construct
ALGELLLGDPDKL

SEQ ID NO: 8881 - protein, 12 aa, synthetic construct
ALGERGITDKLN

SEQ ID NO: 8882 - protein, 14 aa, synthetic construct
ALGELPLGVMYTDK

SEQ ID NO: 8883 - protein, 11 aa, synthetic construct
ALGGGSSDKLI

SEQ ID NO: 8884 - protein, 14 aa, synthetic construct
ALGELPVYWGLYTD

SEQ ID NO: 8885 - protein, 13 aa, synthetic construct
ALGEVGADTDKLI

SEQ ID NO: 8886 - protein, 14 aa, synthetic construct
ALGEPSYWGIHTEK

SEQ ID NO: 8887 - protein, 14 aa, synthetic construct
ALGELRWGRTPINS

SEQ ID NO: 8888 - protein, 11 aa, synthetic construct
ALGGGYTDKLI

SEQ ID NO: 8889 - protein, 12 aa, synthetic construct
ALGVWGINDQLI

SEQ ID NO: 8890 - protein, 14 aa, synthetic construct
ALGEPSTGGYSDKL

SEQ ID NO: 8891 - protein, 14 aa, synthetic construct
ALGGPYQEDCTDKL

SEQ ID NO: 8892 - protein, 12 aa, synthetic construct
ALGGLGMTDKLI

SEQ ID NO: 8893 - protein, 11 aa, synthetic construct
ALGGGYSDKPI

SEQ ID NO: 8894 - protein, 14 aa, synthetic construct
ALGELGGYGTDQLI

SEQ ID NO: 8895 - protein, 14 aa, synthetic construct
ALGAAFLGYATDKL

SEQ ID NO: 8896 - protein, 11 aa, synthetic construct
ALGELYTDKLF

SEQ ID NO: 8897 - protein, 12 aa, synthetic construct
ALGEMRDTDKLI

SEQ ID NO: 8898 - protein, 14 aa, synthetic construct
ALGELSTWGIRPDK

SEQ ID NO: 8899 - protein, 11 aa, synthetic construct
ALGELYTDKII

SEQ ID NO: 8900 - protein, 14 aa, synthetic construct
ALGEPCNGDTDKLI

SEQ ID NO: 8901 - protein, 14 aa, synthetic construct
ALGEILLGDPDKLI

SEQ ID NO: 8902 - protein, 14 aa, synthetic construct
ALGASYAPVPDQLI

SEQ ID NO: 8903 - protein, 12 aa, synthetic construct
ALGELGMTDKLT

SEQ ID NO: 8904 - protein, 12 aa, synthetic construct
ALGELGMTDKHI

SEQ ID NO: 8905 - protein, 11 aa, synthetic construct
ALGEPPADKLI

SEQ ID NO: 8906 - protein, 12 aa, synthetic construct
ALGELGMTDKVI

SEQ ID NO: 8907 - protein, 13 aa, synthetic construct
ALGELGGYADTLI

SEQ ID NO: 8908 - protein, 13 aa, synthetic construct
ALGELGGYADRLI

SEQ ID NO: 8909 - protein, 12 aa, synthetic construct
ALGEIRIFDKLI

SEQ ID NO: 8910 - protein, 13 aa, synthetic construct
ALGELGADTDKII

SEQ ID NO: 8911 - protein, 13 aa, synthetic construct
ALGELGASYTDKL

SEQ ID NO: 8912 - protein, 12 aa, synthetic construct
LLGKGGIAINSS

SEQ ID NO: 8913 - protein, 11 aa, synthetic construct
DLGELRGLGLI

SEQ ID NO: 8914 - protein, 14 aa, synthetic construct
ALGEDTGGYTDKLI

SEQ ID NO: 8915 - protein, 10 aa, synthetic construct
ALGELGEKLI

SEQ ID NO: 8916 - protein, 13 aa, synthetic construct
ALGELGGYADKPI

SEQ ID NO: 8917 - protein, 14 aa, synthetic construct
ALGEPGGYNTDQLI

SEQ ID NO: 8918 - protein, 13 aa, synthetic construct
ALGALGIYTDKLI

SEQ ID NO: 8919 - protein, 14 aa, synthetic construct
ALGEPYLLGARSKL

SEQ ID NO: 8920 - protein, 14 aa, synthetic construct
ALGGPYQEDGSDKL

SEQ ID NO: 8921 - protein, 14 aa, synthetic construct
ALGEIPTGGYGKLI

SEQ ID NO: 8922 - protein, 12 aa, synthetic construct
ALGVWGRNDKLI

SEQ ID NO: 8923 - protein, 12 aa, synthetic construct
ALGDVGDTDKLI

SEQ ID NO: 8924 - protein, 10 aa, synthetic construct
ALGEMGDKLI

SEQ ID NO: 8925 - protein, 13 aa, synthetic construct
ALGEMGADTDKLI

SEQ ID NO: 8926 - protein, 13 aa, synthetic construct
ALGDLGDTGDQLI

SEQ ID NO: 8927 - protein, 14 aa, synthetic construct
ALGEETGGYTYKLI

SEQ ID NO: 8928 - protein, 14 aa, synthetic construct
ALGELGASYTDQLI

SEQ ID NO: 8929 - protein, 12 aa, synthetic construct
ALGELGDTDNLI

SEQ ID NO: 8930 - protein, 13 aa, synthetic construct
ALGELGIYTDKII

SEQ ID NO: 8931 - protein, 12 aa, synthetic construct
ALGELGMTDKLV

SEQ ID NO: 8932 - protein, 14 aa, synthetic construct
ALGEPSYWGMHTDK

SEQ ID NO: 8933 - protein, 14 aa, synthetic construct
ALGEPVLGASSTDK

SEQ ID NO: 8934 - protein, 13 aa, synthetic construct
ALGEREALTAQLF

SEQ ID NO: 8935 - protein, 14 aa, synthetic construct
ALGEPYQEDGTDKL

SEQ ID NO: 8936 - protein, 12 aa, synthetic construct
ALGERGIADKLI

SEQ ID NO: 8937 - protein, 14 aa, synthetic construct
ALGELGPGGYDTDK

SEQ ID NO: 8938 - protein, 11 aa, synthetic construct
ALGLRDTDKLI

SEQ ID NO: 8939 - protein, 12 aa, synthetic construct
ALGEVRIFDKLI

SEQ ID NO: 8940 - protein, 14 aa, synthetic construct
DLGELPYWGRYTDK

SEQ ID NO: 8941 - protein, 13 aa, synthetic construct
ALGASYAPVPDKL

SEQ ID NO: 8942 - protein, 13 aa, synthetic construct
GLGVTGGYTDKLI

SEQ ID NO: 8943 - protein, 14 aa, synthetic construct
ALGELPLYCGLYTD

SEQ ID NO: 8944 - protein, 12 aa, synthetic construct
ALGERGDRDKLI

SEQ ID NO: 8945 - protein, 13 aa, synthetic construct
ALGVTGGYTYKLI

SEQ ID NO: 8946 - protein, 14 aa, synthetic construct
ALGDPPSYVLGDTD

SEQ ID NO: 8947 - protein, 14 aa, synthetic construct
ALGETPYGISDKLI

SEQ ID NO: 8948 - protein, 14 aa, synthetic construct
ALGGLGGYGTDKLI

SEQ ID NO: 8949 - protein, 11 aa, synthetic construct
ALGGGIPDKLI

SEQ ID NO: 8950 - protein, 12 aa, synthetic construct
ALGERGDSDKII

SEQ ID NO: 8951 - protein, 14 aa, synthetic construct
ALGHLPTWGSNTDK

SEQ ID NO: 8952 - protein, 12 aa, synthetic construct
GLGELRDTDKLI

SEQ ID NO: 8953 - protein, 11 aa, synthetic construct
ALGGGYPDKLI

SEQ ID NO: 8954 - protein, 14 aa, synthetic construct
ALGASYAPDPDKLI

SEQ ID NO: 8955 - protein, 13 aa, synthetic construct
ALGVTGGSTDKLI

SEQ ID NO: 8956 - protein, 13 aa, synthetic construct
GLGELGIYTDKLI

SEQ ID NO: 8957 - protein, 12 aa, synthetic construct
ALGGRGITDKLI

SEQ ID NO: 8958 - protein, 14 aa, synthetic construct
ALGERPYWGIRDKL

SEQ ID NO: 8959 - protein, 11 aa, synthetic construct
ALGELYNDKLI

SEQ ID NO: 8960 - protein, 14 aa, synthetic construct
ALGEPGGYKTDKLI

SEQ ID NO: 8961 - protein, 14 aa, synthetic construct
ALGEETGGYTNKLI

SEQ ID NO: 8962 - protein, 14 aa, synthetic construct
ALGELPGDMETDKL

SEQ ID NO: 8963 - protein, 13 aa, synthetic construct
ALGELGDTGDKLN

SEQ ID NO: 8964 - protein, 12 aa, synthetic construct
ALGELRISDKLI

SEQ ID NO: 8965 - protein, 11 aa, synthetic construct
ARGGGYSDKLI

SEQ ID NO: 8966 - protein, 14 aa, synthetic construct
ALGDPCPGDTDKLI

SEQ ID NO: 8967 - protein, 14 aa, synthetic construct
ALGELGALYTDKLI

SEQ ID NO: 8968 - protein, 13 aa, synthetic construct
APGVTGGYTDKLI

SEQ ID NO: 8969 - protein, 11 aa, synthetic construct
ALGEAYTDKII

SEQ ID NO: 8970 - protein, 13 aa, synthetic construct
DLGELGIYTDKLI

SEQ ID NO: 8971 - protein, 12 aa, synthetic construct
ALGVWGINEKLI

SEQ ID NO: 8972 - protein, 11 aa, synthetic construct
ARGEAYTDKLI

SEQ ID NO: 8973 - protein, 13 aa, synthetic construct
DLGELGDTGDKLI

SEQ ID NO: 8974 - protein, 14 aa, synthetic construct
ALGHLPTWGSHTDK

SEQ ID NO: 8975 - protein, 13 aa, synthetic construct
ALGASFLGYATDK

SEQ ID NO: 8976 - protein, 13 aa, synthetic construct
ARGELGIYTDKLI

SEQ ID NO: 8977 - protein, 12 aa, synthetic construct
ARGELGMTDKLI

SEQ ID NO: 8978 - protein, 13 aa, synthetic construct
DLGELGADTDKLI

SEQ ID NO: 8979 - protein, 12 aa, synthetic construct
DLGELGDTDKLI

SEQ ID NO: 8980 - protein, 14 aa, synthetic construct
DLGELGDRALTAQL

SEQ ID NO: 8981 - protein, 12 aa, synthetic construct
DLGELRDTDKLI

SEQ ID NO: 8982 - protein, 14 aa, synthetic construct
ALGELGDTGPINSS

SEQ ID NO: 8983 - protein, 13 aa, synthetic construct
ALGELAGYADKLI

SEQ ID NO: 8984 - protein, 13 aa, synthetic construct
ALGGTGGYTDKLI

SEQ ID NO: 8985 - protein, 8 aa, synthetic construct
ALGEGKLT

SEQ ID NO: 8986 - protein, 14 aa, synthetic construct
ALGGPYQEDGADKL

SEQ ID NO: 8987 - protein, 14 aa, synthetic construct
ALGEHGGIQSDKLI

SEQ ID NO: 8988 - protein, 14 aa, synthetic construct
ALGEIPLYWGLYTD

SEQ ID NO: 8989 - protein, 13 aa, synthetic construct
ARGELGGYADKLI

SEQ ID NO: 8990 - protein, 14 aa, synthetic construct
DLGEPGGYNTDKLI

SEQ ID NO: 8991 - protein, 11 aa, synthetic construct
DLGELYTDKLI

SEQ ID NO: 8992 - protein, 12 aa, synthetic construct
ALGELRIFEKLI

SEQ ID NO: 8993 - protein, 11 aa, synthetic construct
GLGEAYTDKLI

SEQ ID NO: 8994 - protein, 14 aa, synthetic construct
ALGEPPSSVLGDTD

SEQ ID NO: 8995 - protein, 14 aa, synthetic construct
ALGEPPTGGFGYTD

SEQ ID NO: 8996 - protein, 14 aa, synthetic construct
ALGEPRTGDTDKLI

SEQ ID NO: 8997 - protein, 14 aa, synthetic construct
ALGEPCTGDTYKLI

SEQ ID NO: 8998 - protein, 13 aa, synthetic construct
ALGEMGDTGDKLI

SEQ ID NO: 8999 - protein, 14 aa, synthetic construct
ALGELYWGILRSWD

SEQ ID NO: 9000 - protein, 13 aa, synthetic construct
ALGELRWGPYTDK

SEQ ID NO: 9001 - protein, 14 aa, synthetic construct
ALGELRTGGSEYTD

SEQ ID NO: 9002 - protein, 12 aa, synthetic construct
ALGELRDTDKLN

SEQ ID NO: 9003 - protein, 13 aa, synthetic construct
ALGELGIYTDKLN

SEQ ID NO: 9004 - protein, 11 aa, synthetic construct
ALGEPYTDKLI

SEQ ID NO: 9005 - protein, 12 aa, synthetic construct
ALWELGMTDKLI

SEQ ID NO: 9006 - protein, 14 aa, synthetic construct
ALGELPMYWGLYTD

SEQ ID NO: 9007 - protein, 13 aa, synthetic construct
ALGELPLYWGLYT

SEQ ID NO: 9008 - protein, 12 aa, synthetic construct
ALGERGDSDTLI

SEQ ID NO: 9009 - protein, 14 aa, synthetic construct
ALGELPLGVLYTDQ

SEQ ID NO: 9010 - protein, 14 aa, synthetic construct
ALGELLLGDQDKLI

SEQ ID NO: 9011 - protein, 13 aa, synthetic construct
ALGELGRYTDKLI

SEQ ID NO: 9012 - protein, 14 aa, synthetic construct
DLGEPRTGGYAYTD

SEQ ID NO: 9013 - protein, 12 aa, synthetic construct
ALGEIGDTDKLI

SEQ ID NO: 9014 - protein, 14 aa, synthetic construct
ALGEPVLGASYTEK

SEQ ID NO: 9015 - protein, 10 aa, synthetic construct
LLGNWGINSS

SEQ ID NO: 9016 - protein, 14 aa, synthetic construct
LLGNSLCTGGCTPI

SEQ ID NO: 9017 - protein, 13 aa, synthetic construct
ALGALGDTGDKLI

SEQ ID NO: 9018 - protein, 13 aa, synthetic construct
AIGELGGYADKLI

SEQ ID NO: 9019 - protein, 12 aa, synthetic construct
ALGALGMTDKLI

SEQ ID NO: 9020 - protein, 13 aa, synthetic construct
ALGEPGGYTDQLI

SEQ ID NO: 9021 - protein, 14 aa, synthetic construct
ALGELLMGDPDKLI

SEQ ID NO: 9022 - protein, 14 aa, synthetic construct
ALGELLLGDPDQLI

SEQ ID NO: 9023 - protein, 14 aa, synthetic construct
APGELPYWGRYTDK

SEQ ID NO: 9024 - protein, 13 aa, synthetic construct
ALGELGDTGDTLI

SEQ ID NO: 9025 - protein, 12 aa, synthetic construct
ARGERGDSDKLI

SEQ ID NO: 9026 - protein, 14 aa, synthetic construct
ALGEPPSYGLGDTD

SEQ ID NO: 9027 - protein, 13 aa, synthetic construct
ALGGLGADTDKLI

SEQ ID NO: 9028 - protein, 11 aa, synthetic construct
ALGDLGDNKLI

SEQ ID NO: 9029 - protein, 11 aa, synthetic construct
ALGEAYTDQLI

SEQ ID NO: 9030 - protein, 13 aa, synthetic construct
ALGGLGDTGDKLI

SEQ ID NO: 9031 - protein, 14 aa, synthetic construct
ALGELGDRALTEQL

SEQ ID NO: 9032 - protein, 13 aa, synthetic construct
ALGRYWGGPLTAQ

SEQ ID NO: 9033 - protein, 13 aa, synthetic construct
ALGELGIYTYKLI

SEQ ID NO: 9034 - protein, 14 aa, synthetic construct
ALGEPCTGDTDQLI

SEQ ID NO: 9035 - protein, 14 aa, synthetic construct
DLGEPVLGASYTDK

SEQ ID NO: 9036 - protein, 11 aa, synthetic construct
ALGDVGDNKII

SEQ ID NO: 9037 - protein, 14 aa, synthetic construct
ALGDPTKRTAPINS

SEQ ID NO: 9038 - protein, 12 aa, synthetic construct
ALGERGASDKLI

SEQ ID NO: 9039 - protein, 8 aa, synthetic construct
AIGEGKLI

SEQ ID NO: 9040 - protein, 12 aa, synthetic construct
ALGARGDSDKLI

SEQ ID NO: 9041 - protein, 14 aa, synthetic construct
ALGEPELGASYTDK

SEQ ID NO: 9042 - protein, 9 aa, synthetic construct
GLGGTDKLI

SEQ ID NO: 9043 - protein, 14 aa, synthetic construct
ALGERTGGFTDKLI

SEQ ID NO: 9044 - protein, 14 aa, synthetic construct
ALGHLHTWGSYTDK

SEQ ID NO: 9045 - protein, 12 aa, synthetic construct
ALGELRIFDKLT

SEQ ID NO: 9046 - protein, 12 aa, synthetic construct
ALGELRIFDNLI

SEQ ID NO: 9047 - protein, 12 aa, synthetic construct
ALGERGGSDKLI

SEQ ID NO: 9048 - protein, 13 aa, synthetic construct
ALGELGGYADKLF

SEQ ID NO: 9049 - protein, 13 aa, synthetic construct
ALGVTGGYTDTLI

SEQ ID NO: 9050 - protein, 11 aa, synthetic construct
APGGGYSDKLI

SEQ ID NO: 9051 - protein, 11 aa, synthetic construct
GLGGGYSDKLI

SEQ ID NO: 9052 - protein, 14 aa, synthetic construct
ALGHLPRGGRTPIN

SEQ ID NO: 9053 - protein, 14 aa, synthetic construct
ALGEETGGYADKLI

SEQ ID NO: 9054 - protein, 14 aa, synthetic construct
GLGASFLGYATDKL

SEQ ID NO: 9055 - protein, 12 aa, synthetic construct
ALGERGITDELI

SEQ ID NO: 9056 - protein, 12 aa, synthetic construct
ALGDLGDTDQLI

SEQ ID NO: 9057 - protein, 8 aa, synthetic construct
ALVEGKLI

SEQ ID NO: 9058 - protein, 14 aa, synthetic construct
LLGNPTYWGPVVNS

SEQ ID NO: 9059 - protein, 13 aa, synthetic construct
ALGEIDWGRRGLI

SEQ ID NO: 9060 - protein, 13 aa, synthetic construct
ALGEIGGYADKLI

SEQ ID NO: 9061 - protein, 14 aa, synthetic construct
GLGELGGYGTDKLI

SEQ ID NO: 9062 - protein, 13 aa, synthetic construct
ALGVLGIYTDKLI

SEQ ID NO: 9063 - protein, 14 aa, synthetic construct
ALGETSYGISYKLI

SEQ ID NO: 9064 - protein, 8 aa, synthetic construct
ALGEGRLI

SEQ ID NO: 9065 - protein, 14 aa, synthetic construct
ALGGPYQEYGTDKL

SEQ ID NO: 9066 - protein, 13 aa, synthetic construct
DLGVTGGYTDKLI

SEQ ID NO: 9067 - protein, 13 aa, synthetic construct
AVGELGGYADKLI

SEQ ID NO: 9068 - protein, 11 aa, synthetic construct
ALVELYTDKLI

SEQ ID NO: 9069 - protein, 14 aa, synthetic construct
ALGELPMGVLYTDK

SEQ ID NO: 9070 - protein, 14 aa, synthetic construct
ALGEPVMGASYTDK

SEQ ID NO: 9071 - protein, 14 aa, synthetic construct
ALGELRWGPYTDQL

SEQ ID NO: 9072 - protein, 13 aa, synthetic construct
ALGVLLGETRKLI

SEQ ID NO: 9073 - protein, 13 aa, synthetic construct
ALGDLGGYADKLV

SEQ ID NO: 9074 - protein, 13 aa, synthetic construct
ALGELGADTDKLN

SEQ ID NO: 9075 - protein, 14 aa, synthetic construct
ALGELGDIALTAQL

SEQ ID NO: 9076 - protein, 13 aa, synthetic construct
ALGELGDAGDKLI

SEQ ID NO: 9077 - protein, 14 aa, synthetic construct
ALGEVRTGGYEYTD

SEQ ID NO: 9078 - protein, 10 aa, synthetic construct
ALGELGAKLI

SEQ ID NO: 9079 - protein, 12 aa, synthetic construct
ALGEGGDSDKLI

SEQ ID NO: 9080 - protein, 13 aa, synthetic construct
ALGVNGGYTDKLI

SEQ ID NO: 9081 - protein, 12 aa, synthetic construct
ALGERGDSDNLI

SEQ ID NO: 9082 - protein, 14 aa, synthetic construct
ALGELRWGPSTDKL

SEQ ID NO: 9083 - protein, 14 aa, synthetic construct
ALGELPLYWGLYTG

SEQ ID NO: 9084 - protein, 14 aa, synthetic construct
ALGEETVGYTDKLI

SEQ ID NO: 9085 - protein, 14 aa, synthetic construct
ALGRYWGDTPINSS

SEQ ID NO: 9086 - protein, 14 aa, synthetic construct
ALGGLPSGGYADKL

SEQ ID NO: 9087 - protein, 13 aa, synthetic construct
ALGEMGIYTDKLI

SEQ ID NO: 9088 - protein, 13 aa, synthetic construct
ALGEPGGSTDKLI

SEQ ID NO: 9089 - protein, 14 aa, synthetic construct
ALGELPLYWGMYTD

SEQ ID NO: 9090 - protein, 12 aa, synthetic construct
ALGERGDSEKLI

SEQ ID NO: 9091 - protein, 14 aa, synthetic construct
DLGHLPTWGSYTDK

SEQ ID NO: 9092 - protein, 12 aa, synthetic construct
ALGELGTTDKLI

SEQ ID NO: 9093 - protein, 14 aa, synthetic construct
ALGELGYWGIRSTD

SEQ ID NO: 9094 - protein, 12 aa, synthetic construct
ALGVWGINDILI

SEQ ID NO: 9095 - protein, 14 aa, synthetic construct
ALGELPLYRGLYTD

SEQ ID NO: 9096 - protein, 12 aa, synthetic construct
ALWERGITDKLI

SEQ ID NO: 9097 - protein, 14 aa, synthetic construct
ALGASYLGYATDKL

SEQ ID NO: 9098 - protein, 14 aa, synthetic construct
ALGEPCTGDTGKLI

SEQ ID NO: 9099 - protein, 13 aa, synthetic construct
ALGELVGYADKLI

SEQ ID NO: 9100 - protein, 11 aa, synthetic construct
ALGDVGETKLI

SEQ ID NO: 9101 - protein, 13 aa, synthetic construct
ALGELEWGRRGLI

SEQ ID NO: 9102 - protein, 11 aa, synthetic construct
DLGEAYTDKLI

SEQ ID NO: 9103 - protein, 11 aa, synthetic construct
DLGDVGDNKLI

SEQ ID NO: 9104 - protein, 14 aa, synthetic construct
ALGELGASYTYKLI

SEQ ID NO: 9105 - protein, 12 aa, synthetic construct
ARGVWGINDKLI

SEQ ID NO: 9106 - protein, 13 aa, synthetic construct
ALGVPGGYTDKLI

SEQ ID NO: 9107 - protein, 13 aa, synthetic construct
ALGVLRGDTRKLI

SEQ ID NO: 9108 - protein, 11 aa, synthetic construct
ALGELCTDKLI

SEQ ID NO: 9109 - protein, 14 aa, synthetic construct
DLGELPLGVLYTDK

SEQ ID NO: 9110 - protein, 8 aa, synthetic construct
ALGEGKLN

SEQ ID NO: 9111 - protein, 14 aa, synthetic construct
ALGEISYGISDKLI

SEQ ID NO: 9112 - protein, 14 aa, synthetic construct
ALGEVPLGVLYTDK

SEQ ID NO: 9113 - protein, 13 aa, synthetic construct
ALGVLLGDTRKLN

SEQ ID NO: 9114 - protein, 14 aa, synthetic construct
ALGEPSYWGLHTDK

SEQ ID NO: 9115 - protein, 13 aa, synthetic construct
GLGELGDTGDKLI

SEQ ID NO: 9116 - protein, 10 aa, synthetic construct
ALGELGDQLI

SEQ ID NO: 9117 - protein, 14 aa, synthetic construct
ALGELGDRALTAHL

SEQ ID NO: 9118 - protein, 14 aa, synthetic construct
ALGEESGGYTDKLI

SEQ ID NO: 9119 - protein, 9 aa, synthetic construct
ALGGADKLI

SEQ ID NO: 9120 - protein, 12 aa, synthetic construct
ALGELGDTDKII

SEQ ID NO: 9121 - protein, 12 aa, synthetic construct
ALGELGDTDKLN

SEQ ID NO: 9122 - protein, 12 aa, synthetic construct
GLGERGITDKLI

SEQ ID NO: 9123 - protein, 13 aa, synthetic construct
ALGVTGGYTDKII

SEQ ID NO: 9124 - protein, 14 aa, synthetic construct
ALGEQSTGGYADKL

SEQ ID NO: 9125 - protein, 13 aa, synthetic construct
ALGVTGGYTDKLN

SEQ ID NO: 9126 - protein, 13 aa, synthetic construct
ALGELGGYADKHI

SEQ ID NO: 9127 - protein, 11 aa, synthetic construct
ALGEAYNDKLI

SEQ ID NO: 9128 - protein, 11 aa, synthetic construct
ALGEAYADKLI

SEQ ID NO: 9129 - protein, 14 aa, synthetic construct
ALGEASYGISDKLI

SEQ ID NO: 9130 - protein, 13 aa, synthetic construct
ALGEPGGYTEKLI

SEQ ID NO: 9131 - protein, 14 aa, synthetic construct
ALGHLPKWGSYTDK

SEQ ID NO: 9132 - protein, 14 aa, synthetic construct
ALGELGGYGTDRLI

SEQ ID NO: 9133 - protein, 11 aa, synthetic construct
ALGELGGLGLI

SEQ ID NO: 9134 - protein, 12 aa, synthetic construct
GLGELGDTDKLI

SEQ ID NO: 9135 - protein, 12 aa, synthetic construct
ALGDLRDTDQLI

SEQ ID NO: 9136 - protein, 14 aa, synthetic construct
ALVGPYQEDGTDKL

SEQ ID NO: 9137 - protein, 14 aa, synthetic construct
ALGELWGIPLRPLI

SEQ ID NO: 9138 - protein, 14 aa, synthetic construct
ALGEMGASYTDKLI

SEQ ID NO: 9139 - protein, 13 aa, synthetic construct
LLGNLGDTPINSS

SEQ ID NO: 9140 - protein, 14 aa, synthetic construct
ALGELRTGGYECTD

SEQ ID NO: 9141 - protein, 14 aa, synthetic construct
ALGPLPTWGSYTDK

SEQ ID NO: 9142 - protein, 14 aa, synthetic construct
LLGNPVLGDTPTPI

SEQ ID NO: 9143 - protein, 11 aa, synthetic construct
ALVGGYSDKLI

SEQ ID NO: 9144 - protein, 9 aa, synthetic construct
ALGGTDKLN

SEQ ID NO: 9145 - protein, 12 aa, synthetic construct
ALGELRGTDKLI

SEQ ID NO: 9146 - protein, 11 aa, synthetic construct
ALGELRGVGLI

SEQ ID NO: 9147 - protein, 14 aa, synthetic construct
ALGELRTGGYESTD

SEQ ID NO: 9148 - protein, 9 aa, synthetic construct
ALGGTDRLI

SEQ ID NO: 9149 - protein, 12 aa, synthetic construct
AIGELGMTDKLI

SEQ ID NO: 9150 - protein, 11 aa, synthetic construct
ALGEAYTDKLV

SEQ ID NO: 9151 - protein, 13 aa, synthetic construct
ALGVTGGYTDNLI

SEQ ID NO: 9152 - protein, 14 aa, synthetic construct
LLGNSSWGIQINSS

SEQ ID NO: 9153 - protein, 14 aa, synthetic construct
ALGEPLLLGDPIDK

SEQ ID NO: 9154 - protein, 14 aa, synthetic construct
ALVASYAPVPDKLI

SEQ ID NO: 9155 - protein, 14 aa, synthetic construct
ALGRYWGGPLTEQL

SEQ ID NO: 9156 - protein, 14 aa, synthetic construct
ALGELGERALTAQL

SEQ ID NO: 9157 - protein, 12 aa, synthetic construct
VLGELGMTDKLI

SEQ ID NO: 9158 - protein, 12 aa, synthetic construct
APGERGITDKLI

SEQ ID NO: 9159 - protein, 12 aa, synthetic construct
ALGELGDTRKLI

SEQ ID NO: 9160 - protein, 13 aa, synthetic construct
ALGEVGGYADNLI

SEQ ID NO: 9161 - protein, 13 aa, synthetic construct
ALGGLDWGRRGLI

SEQ ID NO: 9162 - protein, 13 aa, synthetic construct
DLGELDWGRRGLI

SEQ ID NO: 9163 - protein, 11 aa, synthetic construct
ALGELRGLGLN

SEQ ID NO: 9164 - protein, 12 aa, synthetic construct
GLGERGDSDKLI

SEQ ID NO: 9165 - protein, 9 aa, synthetic construct
ALGHLPTWG

SEQ ID NO: 9166 - protein, 12 aa, synthetic construct
ALGGLGDTDKLI

SEQ ID NO: 9167 - protein, 13 aa, synthetic construct
APGELGGYADKLI

SEQ ID NO: 9168 - protein, 14 aa, synthetic construct
ALGELNWGIHDKLI

SEQ ID NO: 9169 - protein, 14 aa, synthetic construct
ALGALGGYGTDKLI

SEQ ID NO: 9170 - protein, 13 aa, synthetic construct
ALGELGDTGDKPI

SEQ ID NO: 9171 - protein, 12 aa, synthetic construct
ALGELGDTDTLI

SEQ ID NO: 9172 - protein, 11 aa, synthetic construct
ALGELYTDKHI

SEQ ID NO: 9173 - protein, 13 aa, synthetic construct
ALGELGDTADKLI

SEQ ID NO: 9174 - protein, 12 aa, synthetic construct
ALGELGGTDKLI

SEQ ID NO: 9175 - protein, 14 aa, synthetic construct
ALGGPYHEDGTDKL

SEQ ID NO: 9176 - protein, 13 aa, synthetic construct
ALGELGGYADILI

SEQ ID NO: 9177 - protein, 12 aa, synthetic construct
ALGELRILDKLI

SEQ ID NO: 9178 - protein, 14 aa, synthetic construct
DLGELRTGGYEYTD

SEQ ID NO: 9179 - protein, 14 aa, synthetic construct
ALGDVGGYGTDKLI

SEQ ID NO: 9180 - protein, 12 aa, synthetic construct
ALGELGMTDILI

SEQ ID NO: 9181 - protein, 11 aa, synthetic construct
ALGGGYSDQLI

SEQ ID NO: 9182 - protein, 14 aa, synthetic construct
ALGDPLLLGDTIDK

SEQ ID NO: 9183 - protein, 13 aa, synthetic construct
ALGELGIYTDNLI

SEQ ID NO: 9184 - protein, 14 aa, synthetic construct
ALGEPGGYNTDNLI

SEQ ID NO: 9185 - protein, 12 aa, synthetic construct
ALGELGMTDRLI

SEQ ID NO: 9186 - protein, 14 aa, synthetic construct
DLGELPLYWGLYTD

SEQ ID NO: 9187 - protein, 13 aa, synthetic construct
GLGVLLGDTRKLI

SEQ ID NO: 9188 - protein, 12 aa, synthetic construct
ALGVWGINDKLN

SEQ ID NO: 9189 - protein, 14 aa, synthetic construct
ALGELGGYGTYKLI

SEQ ID NO: 9190 - protein, 14 aa, synthetic construct
ALGELGGYGTDTLI

SEQ ID NO: 9191 - protein, 14 aa, synthetic construct
ALGELGGYGTDKPI

SEQ ID NO: 9192 - protein, 14 aa, synthetic construct
DLGELLLGDPDKLI

SEQ ID NO: 9193 - protein, 11 aa, synthetic construct
ALWEAYTDKLI

SEQ ID NO: 9194 - protein, 12 aa, synthetic construct
ALGELGVPDKLI

SEQ ID NO: 9195 - protein, 11 aa, synthetic construct
GLGDVGDNKLI

SEQ ID NO: 9196 - protein, 14 aa, synthetic construct
ALGDPGGYNTEKLI

SEQ ID NO: 9197 - protein, 12 aa, synthetic construct
ALGKWGIRDKLI

SEQ ID NO: 9198 - protein, 12 aa, synthetic construct
ALGELGYTDKLI

SEQ ID NO: 9199 - protein, 12 aa, synthetic construct
ALGEPGMTDKLI

SEQ ID NO: 9200 - protein, 14 aa, synthetic construct
DLGELGGYGTDKLI

SEQ ID NO: 9201 - protein, 12 aa, synthetic construct
ALGELRIFDTLI

SEQ ID NO: 9202 - protein, 13 aa, synthetic construct
ARGELGDTGDKLI

SEQ ID NO: 9203 - protein, 14 aa, synthetic construct
DLGEETGGYTDKLI

SEQ ID NO: 9204 - protein, 13 aa, synthetic construct
ALGDVGGYADQLI

SEQ ID NO: 9205 - protein, 14 aa, synthetic construct
ALGDRPSYVGDTDK

SEQ ID NO: 9206 - protein, 12 aa, synthetic construct
ALGGLRIFDKLI

SEQ ID NO: 9207 - protein, 11 aa, synthetic construct
GLGELYTDKLI

SEQ ID NO: 9208 - protein, 13 aa, synthetic construct
ALGVLLGDTRKPI

SEQ ID NO: 9209 - protein, 13 aa, synthetic construct
ALRELGGYADKLI

SEQ ID NO: 9210 - protein, 14 aa, synthetic construct
LLGNFFLGDTNDKL

SEQ ID NO: 9211 - protein, 12 aa, synthetic construct
ALGERGRTDKLI

SEQ ID NO: 9212 - protein, 11 aa, synthetic construct
ALGGLRGLGLI

SEQ ID NO: 9213 - protein, 8 aa, synthetic construct
ALGEGKHI

SEQ ID NO: 9214 - protein, 14 aa, synthetic construct
ALGELPYWGGYTDK

SEQ ID NO: 9215 - protein, 13 aa, synthetic construct
ALGVLLGDTRKLF

SEQ ID NO: 9216 - protein, 13 aa, synthetic construct
ALGEVDWGRRGLI

SEQ ID NO: 9217 - protein, 14 aa, synthetic construct
ALGELPYRGRYTDK

SEQ ID NO: 9218 - protein, 14 aa, synthetic construct
ALWGPYQEDGTDKL

SEQ ID NO: 9219 - protein, 14 aa, synthetic construct
ALGEPSNGGYADKL

SEQ ID NO: 9220 - protein, 13 aa, synthetic construct
ALGVLLWDTRKLI

SEQ ID NO: 9221 - protein, 14 aa, synthetic construct
ALGELPQGVLYTDK

SEQ ID NO: 9222 - protein, 14 aa, synthetic construct
ALGELEELGVHTDK

SEQ ID NO: 9223 - protein, 14 aa, synthetic construct
ALGEPCTGDADKLI

SEQ ID NO: 9224 - protein, 14 aa, synthetic construct
ALGETSYGISGKLI

SEQ ID NO: 9225 - protein, 12 aa, synthetic construct
ALGERGITDILI

SEQ ID NO: 9226 - protein, 14 aa, synthetic construct
ALGEPSYWGINTDK

SEQ ID NO: 9227 - protein, 13 aa, synthetic construct
ALGGLGIYTDKLI

SEQ ID NO: 9228 - protein, 11 aa, synthetic construct
ALGELYTAKLI

SEQ ID NO: 9229 - protein, 14 aa, synthetic construct
ALGVLLGDTPINSS

SEQ ID NO: 9230 - protein, 14 aa, synthetic construct
ALGEPRNGGYAYTD

SEQ ID NO: 9231 - protein, 12 aa, synthetic construct
DLGERGDSDKLI

SEQ ID NO: 9232 - protein, 13 aa, synthetic construct
ARGVLLGDTRKLI

SEQ ID NO: 9233 - protein, 14 aa, synthetic construct
ALGASYAPVPAKLI

SEQ ID NO: 9234 - protein, 9 aa, synthetic construct
ALGGTDNLI

SEQ ID NO: 9235 - protein, 13 aa, synthetic construct
ALGEHGGYTDKLI

SEQ ID NO: 9236 - protein, 13 aa, synthetic construct
ALGEGGDYTDKLI

SEQ ID NO: 9237 - protein, 13 aa, synthetic construct
ALGELYWGILSSW

SEQ ID NO: 9238 - protein, 12 aa, synthetic construct
ALGVLGMTDKLI

SEQ ID NO: 9239 - protein, 14 aa, synthetic construct
ALGEPVQGASYTDK

SEQ ID NO: 9240 - protein, 14 aa, synthetic construct
ALGEHSYWGIHTDK

SEQ ID NO: 9241 - protein, 14 aa, synthetic construct
ALGDPKRDTPTDKL

SEQ ID NO: 9242 - protein, 14 aa, synthetic construct
GLGELPLGVLYTDK

SEQ ID NO: 9243 - protein, 13 aa, synthetic construct
ALGEVGGYADKLV

SEQ ID NO: 9244 - protein, 11 aa, synthetic construct
AVGGGYSDKLI

SEQ ID NO: 9245 - protein, 11 aa, synthetic construct
ALGGGYSAKLI

SEQ ID NO: 9246 - protein, 12 aa, synthetic construct
ALGERGDSDKHI

SEQ ID NO: 9247 - protein, 12 aa, synthetic construct
ALGARGITDKLI

SEQ ID NO: 9248 - protein, 14 aa, synthetic construct
ALGEPVLGPRTPIN

SEQ ID NO: 9249 - protein, 8 aa, synthetic construct
ALGEGKVI

SEQ ID NO: 9250 - protein, 14 aa, synthetic construct
ALGELGGYGTGKLI

SEQ ID NO: 9251 - protein, 14 aa, synthetic construct
ALGDETGGYTEKLI

SEQ ID NO: 9252 - protein, 11 aa, synthetic construct
ALGEACTDKLI

SEQ ID NO: 9253 - protein, 8 aa, synthetic construct
ALGEGKLV

SEQ ID NO: 9254 - protein, 14 aa, synthetic construct
ALGALGASYTDKLI

SEQ ID NO: 9255 - protein, 13 aa, synthetic construct
ALGELDWGRSGLI

SEQ ID NO: 9256 - protein, 13 aa, synthetic construct
ALGELGISTDKLI

SEQ ID NO: 9257 - protein, 12 aa, synthetic construct
ALGGRGDSDKLI

SEQ ID NO: 9258 - protein, 12 aa, synthetic construct
ALVELGMTDKLI

SEQ ID NO: 9259 - protein, 14 aa, synthetic construct
ALGELGGYSAPGTP

SEQ ID NO: 9260 - protein, 14 aa, synthetic construct
ALGELGDRAFTAQL

SEQ ID NO: 9261 - protein, 13 aa, synthetic construct
ALGELGADADKLI

SEQ ID NO: 9262 - protein, 11 aa, synthetic construct
ALVEAYTDKLI

SEQ ID NO: 9263 - protein, 14 aa, synthetic construct
ALGELGASYTDTLI

SEQ ID NO: 9264 - protein, 13 aa, synthetic construct
ALGVTGGYADKLI

SEQ ID NO: 9265 - protein, 14 aa, synthetic construct
DLGELGASYTDKLI

SEQ ID NO: 9266 - protein, 13 aa, synthetic construct
ALGELGDTGDNLI

SEQ ID NO: 9267 - protein, 14 aa, synthetic construct
ARGEPSYWGIHTDK

SEQ ID NO: 9268 - protein, 14 aa, synthetic construct
ALGHLPTWGSYADK

SEQ ID NO: 9269 - protein, 14 aa, synthetic construct
ALGGPYQEDGTAKL

SEQ ID NO: 9270 - protein, 14 aa, synthetic construct
ALGELGASSTDKLI

SEQ ID NO: 9271 - protein, 12 aa, synthetic construct
ALGERGDSDKLT

SEQ ID NO: 9272 - protein, 14 aa, synthetic construct
ALGDLGASYTEKLI

SEQ ID NO: 9273 - protein, 12 aa, synthetic construct
ARGERGITDKLI

SEQ ID NO: 9274 - protein, 12 aa, synthetic construct
ALGELGDTDKLT

SEQ ID NO: 9275 - protein, 12 aa, synthetic construct
ALGELGDTDILI

SEQ ID NO: 9276 - protein, 14 aa, synthetic construct
ALGEETGGSTDKLI

SEQ ID NO: 9277 - protein, 14 aa, synthetic construct
ALVEETGGYTDKLI

SEQ ID NO: 9278 - protein, 14 aa, synthetic construct
ALGELGDTTPINSS

SEQ ID NO: 9279 - protein, 14 aa, synthetic construct
ALGHLPTWGTYTDK

SEQ ID NO: 9280 - protein, 14 aa, synthetic construct
ALGPSTSGGRYTDK

SEQ ID NO: 9281 - protein, 14 aa, synthetic construct
LLGNFLLGVSDTPI

SEQ ID NO: 9282 - protein, 13 aa, synthetic construct
AIGVTGGYTDKLI

SEQ ID NO: 9283 - protein, 12 aa, synthetic construct
ALGELGGYADKL

SEQ ID NO: 9284 - protein, 14 aa, synthetic construct
ALGEPPTYVLGDTD

SEQ ID NO: 9285 - protein, 13 aa, synthetic construct
ALGELGADTDNLI

SEQ ID NO: 9286 - protein, 14 aa, synthetic construct
DLGASYAPVPDKLI

SEQ ID NO: 9287 - protein, 12 aa, synthetic construct
ALVERGITDKLI

SEQ ID NO: 9288 - protein, 14 aa, synthetic construct
LLGTSYWGIQINSS

SEQ ID NO: 9289 - protein, 13 aa, synthetic construct
LLGTWGLTPINSS

SEQ ID NO: 9290 - protein, 14 aa, synthetic construct
ALVASFLGYATDKL

SEQ ID NO: 9291 - protein, 14 aa, synthetic construct
ALGEPRTGGYEYTD

SEQ ID NO: 9292 - protein, 11 aa, synthetic construct
ALGGGCSDKLI

SEQ ID NO: 9293 - protein, 12 aa, synthetic construct
ARGELRDTDKLI

SEQ ID NO: 9294 - protein, 12 aa, synthetic construct
ARGELRIFDKLI

SEQ ID NO: 9295 - protein, 14 aa, synthetic construct
ALGELRNGGYEYTD

SEQ ID NO: 9296 - protein, 12 aa, synthetic construct
ALGELRDTDKHI

SEQ ID NO: 9297 - protein, 12 aa, synthetic construct
ALGELGMTDKPI

SEQ ID NO: 9298 - protein, 12 aa, synthetic construct
APGELRDTDKLI

SEQ ID NO: 9299 - protein, 14 aa, synthetic construct
ALGELLQGDPDKLI

SEQ ID NO: 9300 - protein, 14 aa, synthetic construct
ALGELPLGVLNTDK

SEQ ID NO: 9301 - protein, 12 aa, synthetic construct
ALGERGDTDKLI

SEQ ID NO: 9302 - protein, 14 aa, synthetic construct
ALGEPGGCNTDKLI

SEQ ID NO: 9303 - protein, 13 aa, synthetic construct
ALGATGGYTDKLI

SEQ ID NO: 9304 - protein, 13 aa, synthetic construct
ALWELGGYADKLI

SEQ ID NO: 9305 - protein, 12 aa, synthetic construct
ALGELGRTDKLI

SEQ ID NO: 9306 - protein, 14 aa, synthetic construct
APGEPSYWGIHTDK

SEQ ID NO: 9307 - protein, 14 aa, synthetic construct
ALGRLPTWGSYTDK

SEQ ID NO: 9308 - protein, 14 aa, synthetic construct
DLGEPCTGDTDKLI

SEQ ID NO: 9309 - protein, 14 aa, synthetic construct
DLGGPYQEDGTDKL

SEQ ID NO: 9310 - protein, 14 aa, synthetic construct
ALGELPLGVLHTDK

SEQ ID NO: 9311 - protein, 7 aa, synthetic construct
ALGRYWG

SEQ ID NO: 9312 - protein, 12 aa, synthetic construct
ALGERGITDKVI

SEQ ID NO: 9313 - protein, 14 aa, synthetic construct
ALGASYAPVTDKLI

SEQ ID NO: 9314 - protein, 12 aa, synthetic construct
ALGELRDTDRLI

SEQ ID NO: 9315 - protein, 12 aa, synthetic construct
ALGERGITDKHI

SEQ ID NO: 9316 - protein, 14 aa, synthetic construct
ALGGPRTGGYAYTD

SEQ ID NO: 9317 - protein, 14 aa, synthetic construct
ALGELPLYWWLYTD

SEQ ID NO: 9318 - protein, 11 aa, synthetic construct
ALGDVGDIKLI

SEQ ID NO: 9319 - protein, 14 aa, synthetic construct
ALGGPVLGASYTDK

SEQ ID NO: 9320 - protein, 12 aa, synthetic construct
APGERGDSDKLI

SEQ ID NO: 9321 - protein, 13 aa, synthetic construct
APGELGIYTDKLI

SEQ ID NO: 9322 - protein, 12 aa, synthetic construct
ALGVWGINDNLI

SEQ ID NO: 9323 - protein, 12 aa, synthetic construct
ALGELGMTGKLI

SEQ ID NO: 9324 - protein, 14 aa, synthetic construct
ALGEPGGHNTDKLI

SEQ ID NO: 9325 - protein, 12 aa, synthetic construct
ALGELGMTDKLF

SEQ ID NO: 9326 - protein, 14 aa, synthetic construct
ALGASFLGYATDRL

SEQ ID NO: 9327 - protein, 14 aa, synthetic construct
DLGEPSYWGIHTDK

SEQ ID NO: 9328 - protein, 13 aa, synthetic construct
APGELDWGRRGLI

SEQ ID NO: 9329 - protein, 13 aa, synthetic construct
ALGELRDTPINSS

SEQ ID NO: 9330 - protein, 13 aa, synthetic construct
ALWELGIYTDKLI

SEQ ID NO: 9331 - protein, 9 aa, synthetic construct
ALGGTDKPI

SEQ ID NO: 9332 - protein, 11 aa, synthetic construct
ALGGGYSDKLV

SEQ ID NO: 9333 - protein, 14 aa, synthetic construct
LLGNRLPTFWGTPI

SEQ ID NO: 9334 - protein, 14 aa, synthetic construct
ALWELPLGVLYTDK

SEQ ID NO: 9335 - protein, 12 aa, synthetic construct
ALGELRDTDKLT

SEQ ID NO: 9336 - protein, 14 aa, synthetic construct
ALGEPCTGDPDKLI

SEQ ID NO: 9337 - protein, 9 aa, synthetic construct
ALGRYWGGP

SEQ ID NO: 9338 - protein, 14 aa, synthetic construct
ALGASYAHVPDKLI

SEQ ID NO: 9339 - protein, 14 aa, synthetic construct
ALGELGASYTDNLI

SEQ ID NO: 9340 - protein, 14 aa, synthetic construct
GLGELRTGGYEYTD

SEQ ID NO: 9341 - protein, 14 aa, synthetic construct
ALGELRTGGFGYTD

SEQ ID NO: 9342 - protein, 14 aa, synthetic construct
ALGEPRTGGHAYTD

SEQ ID NO: 9343 - protein, 14 aa, synthetic construct
ALGDPSVLGARSKL

SEQ ID NO: 9344 - protein, 14 aa, synthetic construct
ALGEPCTGDTDKVI

SEQ ID NO: 9345 - protein, 14 aa, synthetic construct
ALGEETGGYIDKLI

SEQ ID NO: 9346 - protein, 14 aa, synthetic construct
ALGEPGGYGTDKLI

SEQ ID NO: 9347 - protein, 14 aa, synthetic construct
ALGELRTGAVGDSS

SEQ ID NO: 9348 - protein, 12 aa, synthetic construct
ALGGLRDTDKLI

SEQ ID NO: 9349 - protein, 8 aa, synthetic construct
ALGEPRTG

SEQ ID NO: 9350 - protein, 11 aa, synthetic construct
ALGEVYTDKLI

SEQ ID NO: 9351 - protein, 14 aa, synthetic construct
ALGGLPLGVLYTDK

SEQ ID NO: 9352 - protein, 9 aa, synthetic construct
ARGGTDKLI

SEQ ID NO: 9353 - protein, 14 aa, synthetic construct
ALGELGDRALTAQI

SEQ ID NO: 9354 - protein, 8 aa, synthetic construct
ALGEWKLI

SEQ ID NO: 9355 - protein, 7 aa, synthetic construct
ALGEETG

SEQ ID NO: 9356 - protein, 14 aa, synthetic construct
ALGELRTGGYEHTD

SEQ ID NO: 9357 - protein, 14 aa, synthetic construct
ALGELRTGGYENTD

SEQ ID NO: 9358 - protein, 10 aa, synthetic construct
AIGELGDKLI

SEQ ID NO: 9359 - protein, 13 aa, synthetic construct
ALGELGDTDDKLI

SEQ ID NO: 9360 - protein, 14 aa, synthetic construct
ALGEPCTGDTDKHI

SEQ ID NO: 9361 - protein, 14 aa, synthetic construct
ALGEPPYWGRYTDK

SEQ ID NO: 9362 - protein, 12 aa, synthetic construct
ALGEWGDSDKLI

SEQ ID NO: 9363 - protein, 12 aa, synthetic construct
ALGALGDTDKLI

SEQ ID NO: 9364 - protein, 10 aa, synthetic construct
ALGELGDKII

SEQ ID NO: 9365 - protein, 10 aa, synthetic construct
ALGELGDKHI

SEQ ID NO: 9366 - protein, 14 aa, synthetic construct
ALGEPCTGDTAKLI

SEQ ID NO: 9367 - protein, 14 aa, synthetic construct
ALGELRTGGYGYTD

SEQ ID NO: 9368 - protein, 14 aa, synthetic construct
ALGGLLLGDPDKLI

SEQ ID NO: 9369 - protein, 13 aa, synthetic construct
ALGELGDRALTAQ

SEQ ID NO: 9370 - protein, 12 aa, synthetic construct
ALGELRDTDTLI

SEQ ID NO: 9371 - protein, 13 aa, synthetic construct
ALGELGADTAKLI

SEQ ID NO: 9372 - protein, 14 aa, synthetic construct
ALGELGARALTAQL

SEQ ID NO: 9373 - protein, 14 aa, synthetic construct
ALGEVGASYTDKLI

SEQ ID NO: 9374 - protein, 13 aa, synthetic construct
ALGVLLGGTRKLI

SEQ ID NO: 9375 - protein, 13 aa, synthetic construct
ALGVLLGDTRRLI

SEQ ID NO: 9376 - protein, 12 aa, synthetic construct
ALGNWGIRDQLI

SEQ ID NO: 9377 - protein, 14 aa, synthetic construct
ALGELPYWGRNTDK

SEQ ID NO: 9378 - protein, 9 aa, synthetic construct
ALGGPINSS

SEQ ID NO: 9379 - protein, 14 aa, synthetic construct
DLGRYWGGPLTAQL

SEQ ID NO: 9380 - protein, 12 aa, synthetic construct
ALVELRIFDKLI

SEQ ID NO: 9381 - protein, 12 aa, synthetic construct
ALGERGVTDKLI

SEQ ID NO: 9382 - protein, 13 aa, synthetic construct
ALGVLGGYADKLI

SEQ ID NO: 9383 - protein, 13 aa, synthetic construct
GLGELGADTDKLI

SEQ ID NO: 9384 - protein, 12 aa, synthetic construct
ALGELRDTDKPI

SEQ ID NO: 9385 - protein, 14 aa, synthetic construct
ALGELPYSGRYTDK

SEQ ID NO: 9386 - protein, 14 aa, synthetic construct
ALGEGTGGYTDKLI

SEQ ID NO: 9387 - protein, 14 aa, synthetic construct
GLGELGASYTDKLI

SEQ ID NO: 9388 - protein, 13 aa, synthetic construct
ALVELGADTDKLI

SEQ ID NO: 9389 - protein, 13 aa, synthetic construct
ALGVLLGDTRKHI

SEQ ID NO: 9390 - protein, 14 aa, synthetic construct
ALGDLRWGPYTEKL

SEQ ID NO: 9391 - protein, 13 aa, synthetic construct
DLGVLLGDTRKLI

SEQ ID NO: 9392 - protein, 14 aa, synthetic construct
ALGEPSYWGTHTDK

SEQ ID NO: 9393 - protein, 12 aa, synthetic construct
ALGELRATDKLI

SEQ ID NO: 9394 - protein, 14 aa, synthetic construct
ALGEHRTGGYAYTD

SEQ ID NO: 9395 - protein, 13 aa, synthetic construct
ALGEPVGYTDKLI

SEQ ID NO: 9396 - protein, 13 aa, synthetic construct
ALGDLGGYAEKLI

SEQ ID NO: 9397 - protein, 13 aa, synthetic construct
ALGELDRGRRGLI

SEQ ID NO: 9398 - protein, 12 aa, synthetic construct
ALGERGITDKLT

SEQ ID NO: 9399 - protein, 14 aa, synthetic construct
ALGASFLEYATDKL

SEQ ID NO: 9400 - protein, 9 aa, synthetic construct
ALWGTDKLI

SEQ ID NO: 9401 - protein, 14 aa, synthetic construct
ALGHLPTWGSYTDQ

SEQ ID NO: 9402 - protein, 14 aa, synthetic construct
ALGEETGGYTDTLI

SEQ ID NO: 9403 - protein, 14 aa, synthetic construct
LLGTWGPRTPINSS

SEQ ID NO: 9404 - protein, 13 aa, synthetic construct
ALGELGADTDTLI

SEQ ID NO: 9405 - protein, 13 aa, synthetic construct
ALGVTGGCTDKLI

SEQ ID NO: 9406 - protein, 11 aa, synthetic construct
ALWGGYSDKLI

SEQ ID NO: 9407 - protein, 13 aa, synthetic construct
ALGELGADSDKLI

SEQ ID NO: 9408 - protein, 14 aa, synthetic construct
ALGASFPGYATDKL

SEQ ID NO: 9409 - protein, 14 aa, synthetic construct
ALGELPNGGFGYTD

SEQ ID NO: 9410 - protein, 13 aa, synthetic construct
VLGELGDTGDKLI

SEQ ID NO: 9411 - protein, 14 aa, synthetic construct
ALGELPYCGRYTDK

SEQ ID NO: 9412 - protein, 14 aa, synthetic construct
ALGDLPYWGSYTDK

SEQ ID NO: 9413 - protein, 11 aa, synthetic construct
VLGEAYTDKLI

SEQ ID NO: 9414 - protein, 14 aa, synthetic construct
ALGGPCTGDTDKLI

SEQ ID NO: 9415 - protein, 13 aa, synthetic construct
ALGELDWGRRGPI

SEQ ID NO: 9416 - protein, 13 aa, synthetic construct
ALGELDWGRRGLF

SEQ ID NO: 9417 - protein, 13 aa, synthetic construct
ALGELDWGRRELI

SEQ ID NO: 9418 - protein, 12 aa, synthetic construct
ALGEGGITDKLI

SEQ ID NO: 9419 - protein, 8 aa, synthetic construct
ALGELDWG

SEQ ID NO: 9420 - protein, 14 aa, synthetic construct
ALVEPRTGGYAYTD

SEQ ID NO: 9421 - protein, 9 aa, synthetic construct
ALGGTDNSS

SEQ ID NO: 9422 - protein, 13 aa, synthetic construct
ALGDMGDTGDKLI

SEQ ID NO: 9423 - protein, 9 aa, synthetic construct
ALGGTDKLF

SEQ ID NO: 9424 - protein, 13 aa, synthetic construct
ALVVLLGDTRKLI

SEQ ID NO: 9425 - protein, 14 aa, synthetic construct
ALGETSNGISDKLI

SEQ ID NO: 9426 - protein, 12 aa, synthetic construct
ALGVWGINGKLI

SEQ ID NO: 9427 - protein, 10 aa, synthetic construct
ALGGGYAETH

SEQ ID NO: 9428 - protein, 14 aa, synthetic construct
ALGELGGYGADKLI

SEQ ID NO: 9429 - protein, 14 aa, synthetic construct
ALGELRDRALTAQL

SEQ ID NO: 9430 - protein, 11 aa, synthetic construct
ALGGGYADKLI

SEQ ID NO: 9431 - protein, 13 aa, synthetic construct
ARGELDWGRRGLI

SEQ ID NO: 9432 - protein, 9 aa, synthetic construct
ALRGTDKLI

SEQ ID NO: 9433 - protein, 13 aa, synthetic construct
ALGELGGYAHKLI

SEQ ID NO: 9434 - protein, 13 aa, synthetic construct
ALGELGVYTDKLI

SEQ ID NO: 9435 - protein, 12 aa, synthetic construct
ALGVWGISDKLI

SEQ ID NO: 9436 - protein, 14 aa, synthetic construct
ALGDLLLGDPEKLI

SEQ ID NO: 9437 - protein, 12 aa, synthetic construct
ALGELRIYDKLI

SEQ ID NO: 9438 - protein, 11 aa, synthetic construct
ALGELHTDKLI

SEQ ID NO: 9439 - protein, 12 aa, synthetic construct
ALGERGESDKLI

SEQ ID NO: 9440 - protein, 13 aa, synthetic construct
ALEELGGYADKLI

SEQ ID NO: 9441 - protein, 11 aa, synthetic construct
ALGQAYTDKLI

SEQ ID NO: 9442 - protein, 8 aa, synthetic construct
APGEGKLI

SEQ ID NO: 9443 - protein, 14 aa, synthetic construct
ALGETSYGISAKLI

SEQ ID NO: 9444 - protein, 14 aa, synthetic construct
ALGELILGDPDKLI

SEQ ID NO: 9445 - protein, 11 aa, synthetic construct
ALGEAYTAKLI

SEQ ID NO: 9446 - protein, 13 aa, synthetic construct
ALGELGGTGDKLI

SEQ ID NO: 9447 - protein, 13 aa, synthetic construct
ALWELDWGRRGLI

SEQ ID NO: 9448 - protein, 12 aa, synthetic construct
ALGELRIFDILI

SEQ ID NO: 9449 - protein, 14 aa, synthetic construct
LLGNQVLGDTRINS

SEQ ID NO: 9450 - protein, 13 aa, synthetic construct
ALGDVGDTGDKLI

SEQ ID NO: 9451 - protein, 14 aa, synthetic construct
ARGEETGGYTDKLI

SEQ ID NO: 9452 - protein, 11 aa, synthetic construct
ALGDVGGNKLI

SEQ ID NO: 9453 - protein, 13 aa, synthetic construct
ALGELGKYTDKLI

SEQ ID NO: 9454 - protein, 14 aa, synthetic construct
ALGEPGGYDTDKLI

SEQ ID NO: 9455 - protein, 12 aa, synthetic construct
ALGELGMTAKLI

SEQ ID NO: 9456 - protein, 14 aa, synthetic construct
ALGELYWGIPSSWD

SEQ ID NO: 9457 - protein, 12 aa, synthetic construct
GLGVWGINDKLI

SEQ ID NO: 9458 - protein, 13 aa, synthetic construct
ALGELGIYTDRLI

SEQ ID NO: 9459 - protein, 14 aa, synthetic construct
GLGELGDRALTAQL

SEQ ID NO: 9460 - protein, 14 aa, synthetic construct
ALGDVGDTPTPINS

SEQ ID NO: 9461 - protein, 13 aa, synthetic construct
AIGELDWGRRGLI

SEQ ID NO: 9462 - protein, 14 aa, synthetic construct
ALGEPGGYNTDTLI

SEQ ID NO: 9463 - protein, 14 aa, synthetic construct
ALGEPGGNNTDKLI

SEQ ID NO: 9464 - protein, 12 aa, synthetic construct
ALGELGIPINSS

SEQ ID NO: 9465 - protein, 13 aa, synthetic construct
ALGELGIHTDKLI

SEQ ID NO: 9466 - protein, 13 aa, synthetic construct
ALGELGICTDKLI

SEQ ID NO: 9467 - protein, 11 aa, synthetic construct
ARGDVGDNKLI

SEQ ID NO: 9468 - protein, 9 aa, synthetic construct
ALGGTDKHI

SEQ ID NO: 9469 - protein, 11 aa, synthetic construct
ALGELRGLGVI

SEQ ID NO: 9470 - protein, 14 aa, synthetic construct
ALGELRGYGTDKLI

SEQ ID NO: 9471 - protein, 11 aa, synthetic construct
ALGGGYSGKLI

SEQ ID NO: 9472 - protein, 12 aa, synthetic construct
ALGVWGINDKVI

SEQ ID NO: 9473 - protein, 11 aa, synthetic construct
ALGEAYTDELI

SEQ ID NO: 9474 - protein, 14 aa, synthetic construct
APGHLPTWGSYTDK

SEQ ID NO: 9475 - protein, 14 aa, synthetic construct
ALGELLLGGPDKLI

SEQ ID NO: 9476 - protein, 14 aa, synthetic construct
ALGELLVGDPDKLI

SEQ ID NO: 9477 - protein, 12 aa, synthetic construct
DLGVWGINDKLI

SEQ ID NO: 9478 - protein, 13 aa, synthetic construct
ALGELGDTGAKLI

SEQ ID NO: 9479 - protein, 11 aa, synthetic construct
ARGELRGLGLI

SEQ ID NO: 9480 - protein, 9 aa, synthetic construct
ALGGTDKLV

SEQ ID NO: 9481 - protein, 14 aa, synthetic construct
ALGGETGGYTDKLI

SEQ ID NO: 9482 - protein, 12 aa, synthetic construct
APGELRIFDKLI

SEQ ID NO: 9483 - protein, 14 aa, synthetic construct
ALGHLPTGGSYTDK

SEQ ID NO: 9484 - protein, 14 aa, synthetic construct
ALGELLLGVLYTDK

SEQ ID NO: 9485 - protein, 11 aa, synthetic construct
ALGGAYTDKLI

SEQ ID NO: 9486 - protein, 12 aa, synthetic construct
ALGELRMFDKLI

SEQ ID NO: 9487 - protein, 13 aa, synthetic construct
ALGVTGGYTDELI

SEQ ID NO: 9488 - protein, 13 aa, synthetic construct
ALGVTGGYTAKLI

SEQ ID NO: 9489 - protein, 10 aa, synthetic construct
DLGELGDKLI

SEQ ID NO: 9490 - protein, 14 aa, synthetic construct
ALGASYAPVPDRLI

SEQ ID NO: 9491 - protein, 10 aa, synthetic construct
ALGELGDTLI

SEQ ID NO: 9492 - protein, 13 aa, synthetic construct
ALGELGDTGDRLI

SEQ ID NO: 9493 - protein, 13 aa, synthetic construct
ALVVTGGYTDKLI

SEQ ID NO: 9494 - protein, 12 aa, synthetic construct
ALGELRMTDKLI

SEQ ID NO: 9495 - protein, 13 aa, synthetic construct
ALGALGADTDKLI

SEQ ID NO: 9496 - protein, 11 aa, synthetic construct
ALGELRGDKLI

SEQ ID NO: 9497 - protein, 12 aa, synthetic construct
ALGELGDTDKPI

SEQ ID NO: 9498 - protein, 7 aa, synthetic construct
ALGHLPT

SEQ ID NO: 9499 - protein, 14 aa, synthetic construct
ALWASYAPVPDKLI

SEQ ID NO: 9500 - protein, 9 aa, synthetic construct
ALGGTDKLT

SEQ ID NO: 9501 - protein, 13 aa, synthetic construct
ALGELGGHADKLI

SEQ ID NO: 9502 - protein, 14 aa, synthetic construct
ALGEEIGGYTDKLI

SEQ ID NO: 9503 - protein, 11 aa, synthetic construct
ALGEAYTDKPI

SEQ ID NO: 9504 - protein, 14 aa, synthetic construct
ARGELPLGVLYTDK

SEQ ID NO: 9505 - protein, 13 aa, synthetic construct
AIGELGDTGDKLI

SEQ ID NO: 9506 - protein, 14 aa, synthetic construct
ALGASYAPVPYKLI

SEQ ID NO: 9507 - protein, 13 aa, synthetic construct
ALGDVGDTPINSS

SEQ ID NO: 9508 - protein, 13 aa, synthetic construct
ALGVLLGATRKLI

SEQ ID NO: 9509 - protein, 14 aa, synthetic construct
DLGEPSTGGYADKL

SEQ ID NO: 9510 - protein, 14 aa, synthetic construct
DLGEPYVLGARSKL

SEQ ID NO: 9511 - protein, 12 aa, synthetic construct
ALGDLRSFDKLI

SEQ ID NO: 9512 - protein, 14 aa, synthetic construct
ALGDLRWGPYTDQL

SEQ ID NO: 9513 - protein, 11 aa, synthetic construct
ALGDVRGLGLI

SEQ ID NO: 9514 - protein, 14 aa, synthetic construct
ALGEPVLGAPYTDK

SEQ ID NO: 9515 - protein, 13 aa, synthetic construct
ALGEQGGYADKLI

SEQ ID NO: 9516 - protein, 14 aa, synthetic construct
ALGEHCTGDTDKLI

SEQ ID NO: 9517 - protein, 14 aa, synthetic construct
ALGETSYGISDKLV

SEQ ID NO: 9518 - protein, 14 aa, synthetic construct
ALGEPYVMGARSKL

SEQ ID NO: 9519 - protein, 14 aa, synthetic construct
ALGEPVLGASYTDQ

SEQ ID NO: 9520 - protein, 14 aa, synthetic construct
ALGETSYGVSDKLI

SEQ ID NO: 9521 - protein, 14 aa, synthetic construct
ALGDVGASYTDKLI

SEQ ID NO: 9522 - protein, 13 aa, synthetic construct
TLGVTGGYTDKLI

SEQ ID NO: 9523 - protein, 11 aa, synthetic construct
ALGEAYTDKHI

SEQ ID NO: 9524 - protein, 14 aa, synthetic construct
ALGEAGGYNTDKLI

SEQ ID NO: 9525 - protein, 11 aa, synthetic construct
TLGGGYSDKLI

SEQ ID NO: 9526 - protein, 12 aa, synthetic construct
ALEELRDTDKLI

SEQ ID NO: 9527 - protein, 14 aa, synthetic construct
ALGEETGGYTDILI

SEQ ID NO: 9528 - protein, 12 aa, synthetic construct
ALGDMRDTDKLI

SEQ ID NO: 9529 - protein, 14 aa, synthetic construct
ALGETSYGISDNLI

SEQ ID NO: 9530 - protein, 11 aa, synthetic construct
ALGDVGDNNLI

SEQ ID NO: 9531 - protein, 14 aa, synthetic construct
ALGEPYVLEARSKL

SEQ ID NO: 9532 - protein, 14 aa, synthetic construct
ALGETSYGISDRLI

SEQ ID NO: 9533 - protein, 14 aa, synthetic construct
ALGEETRGYTDKLI

SEQ ID NO: 9534 - protein, 11 aa, synthetic construct
ALGEAYTDRLI

SEQ ID NO: 9535 - protein, 14 aa, synthetic construct
ALGEPYVLGGYADK

SEQ ID NO: 9536 - protein, 11 aa, synthetic construct
ALGEAYTDTLI

SEQ ID NO: 9537 - protein, 12 aa, synthetic construct
ALGERGHSDKLI

SEQ ID NO: 9538 - protein, 14 aa, synthetic construct
ALGETSYGISDTLI

SEQ ID NO: 9539 - protein, 13 aa, synthetic construct
ALGVILGDTRNLI

SEQ ID NO: 9540 - protein, 14 aa, synthetic construct
ALGDVGDRALTAQL

SEQ ID NO: 9541 - protein, 12 aa, synthetic construct
ALGERRITDKLI

SEQ ID NO: 9542 - protein, 13 aa, synthetic construct
ALGEETGGYAETH

SEQ ID NO: 9543 - protein, 12 aa, synthetic construct
ALGERGITNKLI

SEQ ID NO: 9544 - protein, 14 aa, synthetic construct
ALGRYWGGPLTARL

SEQ ID NO: 9545 - protein, 8 aa, synthetic construct
ALGERGIT

SEQ ID NO: 9546 - protein, 11 aa, synthetic construct
ALGDVGDSKLI

SEQ ID NO: 9547 - protein, 11 aa, synthetic construct
ALGRGYSDKLI

SEQ ID NO: 9548 - protein, 14 aa, synthetic construct
DLGETSYGISDKLI

SEQ ID NO: 9549 - protein, 14 aa, synthetic construct
ALGETSYGISNKLI

SEQ ID NO: 9550 - protein, 12 aa, synthetic construct
ALGERGMTDKLI

SEQ ID NO: 9551 - protein, 9 aa, synthetic construct
ALEGTDKLI

SEQ ID NO: 9552 - protein, 14 aa, synthetic construct
ALGDLRWGRTPINS

SEQ ID NO: 9553 - protein, 14 aa, synthetic construct
ALGDQYWGPYTDKL

SEQ ID NO: 9554 - protein, 14 aa, synthetic construct
ALGEEPGGYTEKLI

SEQ ID NO: 9555 - protein, 14 aa, synthetic construct
ALGELGGSFDSTTL

SEQ ID NO: 9556 - protein, 12 aa, synthetic construct
AVGVWGINDKLI

SEQ ID NO: 9557 - protein, 14 aa, synthetic construct
ALGELPLYWGQYTD

SEQ ID NO: 9558 - protein, 14 aa, synthetic construct
ALGELPLGVLYSDK

SEQ ID NO: 9559 - protein, 14 aa, synthetic construct
ALGELPLGVLYTDE

SEQ ID NO: 9560 - protein, 14 aa, synthetic construct
ALGEPCTGDPEKLI

SEQ ID NO: 9561 - protein, 14 aa, synthetic construct
ALGELPLHWGLYTD

SEQ ID NO: 9562 - protein, 14 aa, synthetic construct
ALGELPLRVLYTDK

SEQ ID NO: 9563 - protein, 14 aa, synthetic construct
ALGELPLYSGLYTD

SEQ ID NO: 9564 - protein, 14 aa, synthetic construct
ALGELPLYWGLSTD

SEQ ID NO: 9565 - protein, 8 aa, synthetic construct
ALGEPCTG

SEQ ID NO: 9566 - protein, 11 aa, synthetic construct
ALGYVGDNKLI

SEQ ID NO: 9567 - protein, 14 aa, synthetic construct
ALGELPYWGRCTDK

SEQ ID NO: 9568 - protein, 14 aa, synthetic construct
ALGELPSWGRYTDK

SEQ ID NO: 9569 - protein, 12 aa, synthetic construct
ALWERGDSDKLI

SEQ ID NO: 9570 - protein, 9 aa, synthetic construct
ALGELPTGG

SEQ ID NO: 9571 - protein, 14 aa, synthetic construct
ALWEPVLGASYTDK

SEQ ID NO: 9572 - protein, 14 aa, synthetic construct
ALGEPCHGDTDKLI

SEQ ID NO: 9573 - protein, 14 aa, synthetic construct
ALGELPTVGFGYTD

SEQ ID NO: 9574 - protein, 14 aa, synthetic construct
ALWEPCTGDTDKLI

SEQ ID NO: 9575 - protein, 14 aa, synthetic construct
ALWELRTGGYEYTD

SEQ ID NO: 9576 - protein, 14 aa, synthetic construct
ALGELPLGSCTPIN

SEQ ID NO: 9577 - protein, 14 aa, synthetic construct
ALGEPCTGDTDKLF

SEQ ID NO: 9578 - protein, 14 aa, synthetic construct
ALGEPCTGDTDRLI

SEQ ID NO: 9579 - protein, 14 aa, synthetic construct
ALGELPHWGRYTDK

SEQ ID NO: 9580 - protein, 14 aa, synthetic construct
ALGEPGGDNTDKLI

SEQ ID NO: 9581 - protein, 12 aa, synthetic construct
ALGEPGDTDKLI

SEQ ID NO: 9582 - protein, 14 aa, synthetic construct
AIGETSYGISDKLI

SEQ ID NO: 9583 - protein, 13 aa, synthetic construct
ALGELGVTGDKLI

SEQ ID NO: 9584 - protein, 12 aa, synthetic construct
ALGVWGITDKLI

SEQ ID NO: 9585 - protein, 14 aa, synthetic construct
ALGELHTGGFGYTD

SEQ ID NO: 9586 - protein, 14 aa, synthetic construct
ALGELHYWGRYTDK

SEQ ID NO: 9587 - protein, 14 aa, synthetic construct
ALGEPCTGGYAYTD

SEQ ID NO: 9588 - protein, 14 aa, synthetic construct
ALGEPCTGGTDKLI

SEQ ID NO: 9589 - protein, 14 aa, synthetic construct
ALGELLLGDPDKLF

SEQ ID NO: 9590 - protein, 14 aa, synthetic construct
ALGELLLGDPDTLI

SEQ ID NO: 9591 - protein, 12 aa, synthetic construct
AIGERGITDKLI

SEQ ID NO: 9592 - protein, 11 aa, synthetic construct
APGELYTDKLI

SEQ ID NO: 9593 - protein, 14 aa, synthetic construct
ALGELLLGIQINSS

SEQ ID NO: 9594 - protein, 14 aa, synthetic construct
ALGELLLGYTDKLI

SEQ ID NO: 9595 - protein, 14 aa, synthetic construct
ALGELLPGDPDKLI

SEQ ID NO: 9596 - protein, 14 aa, synthetic construct
ALGEPCTGDTDTLI

SEQ ID NO: 9597 - protein, 12 aa, synthetic construct
ALRELGDTDKLI

SEQ ID NO: 9598 - protein, 14 aa, synthetic construct
ALGELPYWGRHTDK

SEQ ID NO: 9599 - protein, 13 aa, synthetic construct
ALGVLLGDARKLI

SEQ ID NO: 9600 - protein, 8 aa, synthetic construct
ALVEGKII

SEQ ID NO: 9601 - protein, 13 aa, synthetic construct
ALGELRIYTDKLI

SEQ ID NO: 9602 - protein, 12 aa, synthetic construct
ALGELRTFDKLI

SEQ ID NO: 9603 - protein, 14 aa, synthetic construct
AIGELLLGDPDKLI

SEQ ID NO: 9604 - protein, 12 aa, synthetic construct
ALVERGDSDKLI

SEQ ID NO: 9605 - protein, 12 aa, synthetic construct
ALGELRVFDKLI

SEQ ID NO: 9606 - protein, 14 aa, synthetic construct
ALGELRWGIPDKLI

SEQ ID NO: 9607 - protein, 14 aa, synthetic construct
ALGELRWGIQINSS

SEQ ID NO: 9608 - protein, 14 aa, synthetic construct
ALGELRWGPNTDKL

SEQ ID NO: 9609 - protein, 14 aa, synthetic construct
ALGELRWGPYTGKL

SEQ ID NO: 9610 - protein, 14 aa, synthetic construct
ALGELPYWGRYADK

SEQ ID NO: 9611 - protein, 14 aa, synthetic construct
ALGELRWGSYTDKL

SEQ ID NO: 9612 - protein, 11 aa, synthetic construct
ALVELYTDKII

SEQ ID NO: 9613 - protein, 12 aa, synthetic construct
ALGELWDTDKLI

SEQ ID NO: 9614 - protein, 13 aa, synthetic construct
AIGELGIYTDKLI

SEQ ID NO: 9615 - protein, 12 aa, synthetic construct
ALGELVMTDKLI

SEQ ID NO: 9616 - protein, 13 aa, synthetic construct
ALVELGIYTDKLI

SEQ ID NO: 9617 - protein, 13 aa, synthetic construct
ALVELGGYADKLI

SEQ ID NO: 9618 - protein, 13 aa, synthetic construct
ALVELGDTGDKLI

SEQ ID NO: 9619 - protein, 14 aa, synthetic construct
ALGELYWGIHTDKL

SEQ ID NO: 9620 - protein, 12 aa, synthetic construct
ALGELRIFYKLI

SEQ ID NO: 9621 - protein, 14 aa, synthetic construct
AIGELPYWGRYTDK

SEQ ID NO: 9622 - protein, 12 aa, synthetic construct
ALGELRIFDKPI

SEQ ID NO: 9623 - protein, 14 aa, synthetic construct
ALGELPYWGRYSDK

SEQ ID NO: 9624 - protein, 12 aa, synthetic construct
ALGELPYWGRYT

SEQ ID NO: 9625 - protein, 14 aa, synthetic construct
ALRELPLYWGLYTD

SEQ ID NO: 9626 - protein, 14 aa, synthetic construct
ALGELRAGGYEYTD

SEQ ID NO: 9627 - protein, 12 aa, synthetic construct
ALGELRDADKLI

SEQ ID NO: 9628 - protein, 12 aa, synthetic construct
ALGELRDTDKVI

SEQ ID NO: 9629 - protein, 13 aa, synthetic construct
ALWELGDTGDKLI

SEQ ID NO: 9630 - protein, 12 aa, synthetic construct
ALWELGDTDKLI

SEQ ID NO: 9631 - protein, 11 aa, synthetic construct
ALRGGYSDKLI

SEQ ID NO: 9632 - protein, 13 aa, synthetic construct
ALWELGADTDKLI

SEQ ID NO: 9633 - protein, 14 aa, synthetic construct
ALRGPYQEDGTDKL

SEQ ID NO: 9634 - protein, 11 aa, synthetic construct
ALGELRGLGPI

SEQ ID NO: 9635 - protein, 14 aa, synthetic construct
ALGELYWGITDKLI

SEQ ID NO: 9636 - protein, 14 aa, synthetic construct
ALGELYWGIQINSS

SEQ ID NO: 9637 - protein, 14 aa, synthetic construct
ALWEETGGYTDKLI

SEQ ID NO: 9638 - protein, 12 aa, synthetic construct
ALGELRIFDKLF

SEQ ID NO: 9639 - protein, 12 aa, synthetic construct
ALGELRIFDKLN

SEQ ID NO: 9640 - protein, 12 aa, synthetic construct
ALGVWGINDKLT

SEQ ID NO: 9641 - protein, 13 aa, synthetic construct
ALGELGMYTDKLI

SEQ ID NO: 9642 - protein, 12 aa, synthetic construct
ALGELGMTDKRI

SEQ ID NO: 9643 - protein, 14 aa, synthetic construct
ALGEPRTGGSAYTD

SEQ ID NO: 9644 - protein, 14 aa, synthetic construct
ALGELGAAYTDKLI

SEQ ID NO: 9645 - protein, 13 aa, synthetic construct
ALGELGADTDELI

SEQ ID NO: 9646 - protein, 13 aa, synthetic construct
ALGELGADTDKLV

SEQ ID NO: 9647 - protein, 13 aa, synthetic construct
ALGELGADTYKLI

SEQ ID NO: 9648 - protein, 13 aa, synthetic construct
ALGELGAETDKLI

SEQ ID NO: 9649 - protein, 13 aa, synthetic construct
ALGELGAGTDKLI

SEQ ID NO: 9650 - protein, 12 aa, synthetic construct
ALGELGARSKLI

SEQ ID NO: 9651 - protein, 13 aa, synthetic construct
ALGVPLGDTRKLI

SEQ ID NO: 9652 - protein, 14 aa, synthetic construct
ALGELGASYTDKPI

SEQ ID NO: 9653 - protein, 11 aa, synthetic construct
AIGGGYSDKLI

SEQ ID NO: 9654 - protein, 12 aa, synthetic construct
ALGELGATDKLI

SEQ ID NO: 9655 - protein, 13 aa, synthetic construct
ALGELGDIPINSS

SEQ ID NO: 9656 - protein, 11 aa, synthetic construct
ARGGGYSEKLI

SEQ ID NO: 9657 - protein, 11 aa, synthetic construct
ALGELGDNKLI

SEQ ID NO: 9658 - protein, 14 aa, synthetic construct
ALGEPPYGIGGLTA

SEQ ID NO: 9659 - protein, 14 aa, synthetic construct
ALGELGDRASTAQL

SEQ ID NO: 9660 - protein, 12 aa, synthetic construct
ALGELGDSDKLI

SEQ ID NO: 9661 - protein, 12 aa, synthetic construct
ALGELGDTDELI

SEQ ID NO: 9662 - protein, 14 aa, synthetic construct
ALGVLPYWGRYTDK

SEQ ID NO: 9663 - protein, 13 aa, synthetic construct
ALGVLPGDTRKLI

SEQ ID NO: 9664 - protein, 13 aa, synthetic construct
ALGELDWGRRGLN

SEQ ID NO: 9665 - protein, 13 aa, synthetic construct
ALGELDWGGRGLI

SEQ ID NO: 9666 - protein, 13 aa, synthetic construct
ALGVLLGDKRKLI

SEQ ID NO: 9667 - protein, 14 aa, synthetic construct
ALGEHVLGASYTDK

SEQ ID NO: 9668 - protein, 13 aa, synthetic construct
ALGVLLGDTDKLI

SEQ ID NO: 9669 - protein, 13 aa, synthetic construct
ALGVLLGDTRELI

SEQ ID NO: 9670 - protein, 12 aa, synthetic construct
TLGELRDTDKLI

SEQ ID NO: 9671 - protein, 14 aa, synthetic construct
ALGEPSYWGIHTDQ

SEQ ID NO: 9672 - protein, 13 aa, synthetic construct
ALGVLLGDTRKII

SEQ ID NO: 9673 - protein, 14 aa, synthetic construct
ALGEPSYWGIHADK

SEQ ID NO: 9674 - protein, 14 aa, synthetic construct
ALGEIPYWGRYTDK

SEQ ID NO: 9675 - protein, 14 aa, synthetic construct
ALGEPSYWGIDTDK

SEQ ID NO: 9676 - protein, 14 aa, synthetic construct
ALGEPSYRGIHTDK

SEQ ID NO: 9677 - protein, 11 aa, synthetic construct
ALGEIYTDKLI

SEQ ID NO: 9678 - protein, 5 aa, synthetic construct
ALGEL

SEQ ID NO: 9679 - protein, 13 aa, synthetic construct
AVGELGDTGDKLI

SEQ ID NO: 9680 - protein, 13 aa, synthetic construct
ALGVLLGDTWKLI

SEQ ID NO: 9681 - protein, 13 aa, synthetic construct
ALGVLLRDTRKLI

SEQ ID NO: 9682 - protein, 13 aa, synthetic construct
ALGELDWDRRGLI

SEQ ID NO: 9683 - protein, 13 aa, synthetic construct
ALGVTGDTPINSS

SEQ ID NO: 9684 - protein, 14 aa, synthetic construct
ALGEPPSYVLGGTD

SEQ ID NO: 9685 - protein, 12 aa, synthetic construct
ALGELGDTDKLV

SEQ ID NO: 9686 - protein, 14 aa, synthetic construct
ALGELGGYEYTDKL

SEQ ID NO: 9687 - protein, 14 aa, synthetic construct
ALGELGGYGTAKLI

SEQ ID NO: 9688 - protein, 14 aa, synthetic construct
ALGELGGYGTDILI

SEQ ID NO: 9689 - protein, 13 aa, synthetic construct
ALGEPGGYTDNSS

SEQ ID NO: 9690 - protein, 14 aa, synthetic construct
ALGELGGYGTDKLV

SEQ ID NO: 9691 - protein, 14 aa, synthetic construct
ALGELGGYNTDKLI

SEQ ID NO: 9692 - protein, 14 aa, synthetic construct
ALGELGGYRTDKLI

SEQ ID NO: 9693 - protein, 13 aa, synthetic construct
ALGELGGYSNKLI

SEQ ID NO: 9694 - protein, 13 aa, synthetic construct
ALGVVLGDTRTLI

SEQ ID NO: 9695 - protein, 14 aa, synthetic construct
ALGEPGGYNTDRLI

SEQ ID NO: 9696 - protein, 10 aa, synthetic construct
SWGTKGIGTH

SEQ ID NO: 9697 - protein, 12 aa, synthetic construct
ALGVWGIDDKLI

SEQ ID NO: 9698 - protein, 9 aa, synthetic construct
ALGELGKLI

SEQ ID NO: 9699 - protein, 14 aa, synthetic construct
ALGEPGGYNTAKLI

SEQ ID NO: 9700 - protein, 12 aa, synthetic construct
ALGELGLTDKLI

SEQ ID NO: 9701 - protein, 13 aa, synthetic construct
ALGELGLTPINSS

SEQ ID NO: 9702 - protein, 12 aa, synthetic construct
ALGVWGINDDLI

SEQ ID NO: 9703 - protein, 13 aa, synthetic construct
SWGTAFLRFGGHR

SEQ ID NO: 9704 - protein, 14 aa, synthetic construct
ALGEPGGYTTDKLI

SEQ ID NO: 9705 - protein, 13 aa, synthetic construct
ALGELGGYANKLI

SEQ ID NO: 9706 - protein, 14 aa, synthetic construct
ALGEPPSYALGDTD

SEQ ID NO: 9707 - protein, 13 aa, synthetic construct
ALGELGGYAGKLI

SEQ ID NO: 9708 - protein, 13 aa, synthetic construct
ALGELGDTGDNSS

SEQ ID NO: 9709 - protein, 7 aa, synthetic construct
ALGEPPP

SEQ ID NO: 9710 - protein, 14 aa, synthetic construct
ALGEPNVLGARSKL

SEQ ID NO: 9711 - protein, 14 aa, synthetic construct
ALGEPLLMGDTIDK

SEQ ID NO: 9712 - protein, 14 aa, synthetic construct
ALGEPLLLGETIDK

SEQ ID NO: 9713 - protein, 13 aa, synthetic construct
ALGELGGDADKLI

SEQ ID NO: 9714 - protein, 14 aa, synthetic construct
ARGELPYWGRYTDK

SEQ ID NO: 9715 - protein, 14 aa, synthetic construct
ARGELPTGGFGYTD

SEQ ID NO: 9716 - protein, 14 aa, synthetic construct
ARGELPLYWGLYTD

SEQ ID NO: 9717 - protein, 10 aa, synthetic construct
ALGELGGKLI

SEQ ID NO: 9718 - protein, 14 aa, synthetic construct
ALGETTYGISDKLI

SEQ ID NO: 9719 - protein, 14 aa, synthetic construct
ALGELGGSGTEKLI

SEQ ID NO: 9720 - protein, 13 aa, synthetic construct
ALGELGGYADELI

SEQ ID NO: 9721 - protein, 12 aa, synthetic construct
ARGELGDTDKLI

SEQ ID NO: 9722 - protein, 10 aa, synthetic construct
ARGELGDKLI

SEQ ID NO: 9723 - protein, 13 aa, synthetic construct
ALGELGGYADQLF

SEQ ID NO: 9724 - protein, 13 aa, synthetic construct
ALGVTVGYTDKLI

SEQ ID NO: 9725 - protein, 14 aa, synthetic construct
ALGNWGPRTPINSS

SEQ ID NO: 9726 - protein, 12 aa, synthetic construct
AVGERGITDKLI

SEQ ID NO: 9727 - protein, 11 aa, synthetic construct
ALGGVGDNKLI

SEQ ID NO: 9728 - protein, 14 aa, synthetic construct
GLGEPCTGDTDKLI

SEQ ID NO: 9729 - protein, 13 aa, synthetic construct
ALGDLGGYADNLI

SEQ ID NO: 9730 - protein, 14 aa, synthetic construct
ALGASFLGYATDNL

SEQ ID NO: 9731 - protein, 12 aa, synthetic construct
ALGASFLGYATD

SEQ ID NO: 9732 - protein, 14 aa, synthetic construct
ALGASFLGYASDKL

SEQ ID NO: 9733 - protein, 14 aa, synthetic construct
ALGDLGGYGTEKLI

SEQ ID NO: 9734 - protein, 14 aa, synthetic construct
ALGHLPTWGSCTDK

SEQ ID NO: 9735 - protein, 14 aa, synthetic construct
ALGAPYAPVPDKLI

SEQ ID NO: 9736 - protein, 14 aa, synthetic construct
GLGETSYGISDKLI

SEQ ID NO: 9737 - protein, 14 aa, synthetic construct
ALGGPYQEDDTDKL

SEQ ID NO: 9738 - protein, 9 aa, synthetic construct
ALGGTDTLI

SEQ ID NO: 9739 - protein, 14 aa, synthetic construct
ALGEVPYWGRYTDK

SEQ ID NO: 9740 - protein, 14 aa, synthetic construct
VLGEPYVLGARSKL

SEQ ID NO: 9741 - protein, 14 aa, synthetic construct
GLGEPPSYVLGDTD

SEQ ID NO: 9742 - protein, 12 aa, synthetic construct
ALGDLGMTEKLI

SEQ ID NO: 9743 - protein, 14 aa, synthetic construct
ALGGLYWGILSSWD

SEQ ID NO: 9744 - protein, 12 aa, synthetic construct
ALGKGGIAINSS

SEQ ID NO: 9745 - protein, 11 aa, synthetic construct
ALGKAYTDKLI

SEQ ID NO: 9746 - protein, 13 aa, synthetic construct
ALGDLGGYAAKLI

SEQ ID NO: 9747 - protein, 13 aa, synthetic construct
ALGILLGDTRKLI

SEQ ID NO: 9748 - protein, 8 aa, synthetic construct
ALGEVKLI

SEQ ID NO: 9749 - protein, 14 aa, synthetic construct
ALGASCLGYATDKL

SEQ ID NO: 9750 - protein, 14 aa, synthetic construct
VLGELGGYGTDKLI

SEQ ID NO: 9751 - protein, 13 aa, synthetic construct
GLGDLGGYADKLI

SEQ ID NO: 9752 - protein, 14 aa, synthetic construct
ALGEVLLGDPDKLI

SEQ ID NO: 9753 - protein, 14 aa, synthetic construct
GLGELLLGDPDKLI

SEQ ID NO: 9754 - protein, 12 aa, synthetic construct
ALGNWGIRDKII

SEQ ID NO: 9755 - protein, 11 aa, synthetic construct
ALGGGYSDILI

SEQ ID NO: 9756 - protein, 14 aa, synthetic construct
ALGASYAPVPDKLV

SEQ ID NO: 9757 - protein, 11 aa, synthetic construct
ALGGGYSDELI

SEQ ID NO: 9758 - protein, 14 aa, synthetic construct
ALGGLGASYTDKLI

SEQ ID NO: 9759 - protein, 13 aa, synthetic construct
ALGHLPPWGSYTD

SEQ ID NO: 9760 - protein, 14 aa, synthetic construct
VLGEPRTGGYAYTD

SEQ ID NO: 9761 - protein, 12 aa, synthetic construct
GLGELRIFDKLI

SEQ ID NO: 9762 - protein, 9 aa, synthetic construct
ALGGIDKLI

SEQ ID NO: 9763 - protein, 14 aa, synthetic construct
LLGNPSYWGIRSIN

SEQ ID NO: 9764 - protein, 13 aa, synthetic construct
ALGEVGGYADKLN

SEQ ID NO: 9765 - protein, 11 aa, synthetic construct
ALGGGYSDRLI

SEQ ID NO: 9766 - protein, 11 aa, synthetic construct
ALGAAYTDKLI

SEQ ID NO: 9767 - protein, 12 aa, synthetic construct
ALGGWGINDKLI

SEQ ID NO: 9768 - protein, 14 aa, synthetic construct
ALGGHYQEDGTDKL

SEQ ID NO: 9769 - protein, 14 aa, synthetic construct
ALGGPYQEHGTDKL

SEQ ID NO: 9770 - protein, 14 aa, synthetic construct
ALGHPPTWGSYTDK

SEQ ID NO: 9771 - protein, 11 aa, synthetic construct
ALGGGNSDKLI

SEQ ID NO: 9772 - protein, 14 aa, synthetic construct
LLGNFTGGYSAPGT

SEQ ID NO: 9773 - protein, 12 aa, synthetic construct
ALGNWGIRGKLI

SEQ ID NO: 9774 - protein, 14 aa, synthetic construct
ALGASYAPVPDKPI

SEQ ID NO: 9775 - protein, 11 aa, synthetic construct
ALGGGYSDKLY

SEQ ID NO: 9776 - protein, 14 aa, synthetic construct
ALGDETGGYTNKLI

SEQ ID NO: 9777 - protein, 13 aa, synthetic construct
ALGHLPTWGSYTG

SEQ ID NO: 9778 - protein, 14 aa, synthetic construct
ALGGPYQEDGTGKL

SEQ ID NO: 9779 - protein, 12 aa, synthetic construct
GLGDLGMTDKLI

SEQ ID NO: 9780 - protein, 14 aa, synthetic construct
ALGAAYAPVPDKLI

SEQ ID NO: 9781 - protein, 8 aa, synthetic construct
ALGGGKLI

SEQ ID NO: 9782 - protein, 14 aa, synthetic construct
ALGGPGGYNTDKLI

SEQ ID NO: 9783 - protein, 13 aa, synthetic construct
ALGDLGASYTDKL

SEQ ID NO: 9784 - protein, 9 aa, synthetic construct
ALGGTGKLI

SEQ ID NO: 9785 - protein, 14 aa, synthetic construct
ALGEPPSYVMGDTD

SEQ ID NO: 9786 - protein, 13 aa, synthetic construct
ALGVTGEYTDKLI

SEQ ID NO: 9787 - protein, 13 aa, synthetic construct
ALGELGDTCDKLI

SEQ ID NO: 9788 - protein, 14 aa, synthetic construct
GLGEPLLLGDTIDK

SEQ ID NO: 9789 - protein, 10 aa, synthetic construct
ALGELGDKLF

SEQ ID NO: 9790 - protein, 13 aa, synthetic construct
ALGELGDSGDKLI

SEQ ID NO: 9791 - protein, 14 aa, synthetic construct
ALGELGDRALTARL

SEQ ID NO: 9792 - protein, 14 aa, synthetic construct
ALGELGASYTDILI

SEQ ID NO: 9793 - protein, 14 aa, synthetic construct
ALGELGASYTDKLF

SEQ ID NO: 9794 - protein, 14 aa, synthetic construct
ALGEPRTGGCAYTD

SEQ ID NO: 9795 - protein, 14 aa, synthetic construct
ALGEPRTGDTPTPI

SEQ ID NO: 9796 - protein, 14 aa, synthetic construct
ALGELGASYTDKVI

SEQ ID NO: 9797 - protein, 12 aa, synthetic construct
ARGTWGIRDKLI

SEQ ID NO: 9798 - protein, 14 aa, synthetic construct
ARGRYWGGPLTAQL

SEQ ID NO: 9799 - protein, 13 aa, synthetic construct
ALGELGATGDKLI

SEQ ID NO: 9800 - protein, 12 aa, synthetic construct
ALGVRGINDELI

SEQ ID NO: 9801 - protein, 12 aa, synthetic construct
ALGVRGINDKLI

SEQ ID NO: 9802 - protein, 12 aa, synthetic construct
ALGVRGITDKLI

SEQ ID NO: 9803 - protein, 12 aa, synthetic construct
ALGEPRIFDKLI

SEQ ID NO: 9804 - protein, 12 aa, synthetic construct
ALGEPRDTDKLI

SEQ ID NO: 9805 - protein, 12 aa, synthetic construct
ALGELGDTDRLI

SEQ ID NO: 9806 - protein, 10 aa, synthetic construct
ALGELGDKLN

SEQ ID NO: 9807 - protein, 10 aa, synthetic construct
ALGELGDKLV

SEQ ID NO: 9808 - protein, 12 aa, synthetic construct
ALGDLGDTDKHI

SEQ ID NO: 9809 - protein, 14 aa, synthetic construct
ALGELGDRALTAKL

SEQ ID NO: 9810 - protein, 14 aa, synthetic construct
GLGEPGGYNTDKLI

SEQ ID NO: 9811 - protein, 12 aa, synthetic construct
ALGELGDTDKVI

SEQ ID NO: 9812 - protein, 11 aa, synthetic construct
ALGDLGANKLI

SEQ ID NO: 9813 - protein, 13 aa, synthetic construct
ALGVTGGHTDKLI

SEQ ID NO: 9814 - protein, 13 aa, synthetic construct
ALGELGDTGDHLI

SEQ ID NO: 9815 - protein, 11 aa, synthetic construct
ALGGGDSDKLI

SEQ ID NO: 9816 - protein, 14 aa, synthetic construct
ALGELGGGTPINSS

SEQ ID NO: 9817 - protein, 14 aa, synthetic construct
ALGEPLLLGDRIDK

SEQ ID NO: 9818 - protein, 13 aa, synthetic construct
ALGVTGGYTDKLF

SEQ ID NO: 9819 - protein, 13 aa, synthetic construct
ALGELGGNADKLI

SEQ ID NO: 9820 - protein, 14 aa, synthetic construct
ALGELGGRALTAQL

SEQ ID NO: 9821 - protein, 13 aa, synthetic construct
ALGVTGGYTDKLT

SEQ ID NO: 9822 - protein, 13 aa, synthetic construct
ALGELGGSADQLI

SEQ ID NO: 9823 - protein, 14 aa, synthetic construct
ALGEPLLGDPDKLI

SEQ ID NO: 9824 - protein, 13 aa, synthetic construct
ARGELGGYAEKLI

SEQ ID NO: 9825 - protein, 13 aa, synthetic construct
ALGVTGGYTDNSS

SEQ ID NO: 9826 - protein, 13 aa, synthetic construct
SWGTSYWGFRIHR

SEQ ID NO: 9827 - protein, 11 aa, synthetic construct
GLGGGYSDKLF

SEQ ID NO: 9828 - protein, 13 aa, synthetic construct
ALGELGGYADKLL

SEQ ID NO: 9829 - protein, 13 aa, synthetic construct
ALGELGGYADKLT

SEQ ID NO: 9830 - protein, 13 aa, synthetic construct
ALGELGGYADKLY

SEQ ID NO: 9831 - protein, 13 aa, synthetic construct
AIGVLLGDTRKLI

SEQ ID NO: 9832 - protein, 14 aa, synthetic construct
ARGELGDRALTAQL

SEQ ID NO: 9833 - protein, 13 aa, synthetic construct
ALGDIGGYADKLI

SEQ ID NO: 9834 - protein, 14 aa, synthetic construct
ALGEPLLLGYTIDK

SEQ ID NO: 9835 - protein, 9 aa, synthetic construct
ALGELGETH

SEQ ID NO: 9836 - protein, 13 aa, synthetic construct
ALGELGETGDKLI

SEQ ID NO: 9837 - protein, 14 aa, synthetic construct
ALGEPPLGVLYTDK

SEQ ID NO: 9838 - protein, 13 aa, synthetic construct
ALGELGDTGDKHI

SEQ ID NO: 9839 - protein, 14 aa, synthetic construct
ALGEPPSDVLGDTD

SEQ ID NO: 9840 - protein, 14 aa, synthetic construct
ALGGAYQEDGTDKL

SEQ ID NO: 9841 - protein, 13 aa, synthetic construct
ALGELGDTGDNII

SEQ ID NO: 9842 - protein, 13 aa, synthetic construct
ALGVTGGSTDQLI

SEQ ID NO: 9843 - protein, 11 aa, synthetic construct
GLGELRGLGLI

SEQ ID NO: 9844 - protein, 9 aa, synthetic construct
ALGEPPPFL

SEQ ID NO: 9845 - protein, 13 aa, synthetic construct
ALGELGDTGNKLI

SEQ ID NO: 9846 - protein, 14 aa, synthetic construct
ARGEPLLLGDTIDK

SEQ ID NO: 9847 - protein, 12 aa, synthetic construct
ALGELGETDKII

SEQ ID NO: 9848 - protein, 14 aa, synthetic construct
ALGVTGGYGTDKLI

SEQ ID NO: 9849 - protein, 13 aa, synthetic construct
ARGEPGGYTDKLI

SEQ ID NO: 9850 - protein, 12 aa, synthetic construct
ALGELGDTNKLI

SEQ ID NO: 9851 - protein, 13 aa, synthetic construct
ALGELGDTRINSS

SEQ ID NO: 9852 - protein, 13 aa, synthetic construct
ALGELGDTSDKLI

SEQ ID NO: 9853 - protein, 12 aa, synthetic construct
ALGELGDTVKLI

SEQ ID NO: 9854 - protein, 14 aa, synthetic construct
ARGELRWGPYTDKL

SEQ ID NO: 9855 - protein, 13 aa, synthetic construct
ALGVTGGYTDILI

SEQ ID NO: 9856 - protein, 14 aa, synthetic construct
TLGELGASYTDKLI

SEQ ID NO: 9857 - protein, 14 aa, synthetic construct
ALGDLRPGGYEYTD

SEQ ID NO: 9858 - protein, 14 aa, synthetic construct
ALGEPRTGGYANTD

SEQ ID NO: 9859 - protein, 8 aa, synthetic construct
ALGKGKLI

SEQ ID NO: 9860 - protein, 14 aa, synthetic construct
ALGEPYALGARSKL

SEQ ID NO: 9861 - protein, 12 aa, synthetic construct
ALGDLGMTDKVI

SEQ ID NO: 9862 - protein, 8 aa, synthetic construct
ALGEGKLF

SEQ ID NO: 9863 - protein, 12 aa, synthetic construct
ALGVLGDTDKLI

SEQ ID NO: 9864 - protein, 11 aa, synthetic construct
LLGTWGRINSS

SEQ ID NO: 9865 - protein, 14 aa, synthetic construct
ALGEPVLGDTPINS

SEQ ID NO: 9866 - protein, 13 aa, synthetic construct
ALGKLDWGRRGLI

SEQ ID NO: 9867 - protein, 12 aa, synthetic construct
ALAERGDSDKLI

SEQ ID NO: 9868 - protein, 14 aa, synthetic construct
ALGEPVLGATYTDK

SEQ ID NO: 9869 - protein, 13 aa, synthetic construct
LLGTWGYTPINSS

SEQ ID NO: 9870 - protein, 6 aa, synthetic construct
ALGEFL

SEQ ID NO: 9871 - protein, 14 aa, synthetic construct
ALGEPVLGASHTDK

SEQ ID NO: 9872 - protein, 8 aa, synthetic construct
ALGEPVLG

SEQ ID NO: 9873 - protein, 14 aa, synthetic construct
ALGEHLLLGDTIDK

SEQ ID NO: 9874 - protein, 14 aa, synthetic construct
LLRNPYWGPRTPIN

SEQ ID NO: 9875 - protein, 13 aa, synthetic construct
ALGVLLGDPRKLI

SEQ ID NO: 9876 - protein, 9 aa, synthetic construct
AVGGTDKLI

SEQ ID NO: 9877 - protein, 14 aa, synthetic construct
ALGEIGGYGTDKLI

SEQ ID NO: 9878 - protein, 13 aa, synthetic construct
GLGELGGYADKLI

SEQ ID NO: 9879 - protein, 13 aa, synthetic construct
ALGEPSYWGLHTD

SEQ ID NO: 9880 - protein, 14 aa, synthetic construct
ALGEPYELGARSKL

SEQ ID NO: 9881 - protein, 12 aa, synthetic construct
ALGEFGMTDKLI

SEQ ID NO: 9882 - protein, 13 aa, synthetic construct
ALGDLGDTPINSS

SEQ ID NO: 9883 - protein, 11 aa, synthetic construct
DLGEAYTDKLN

SEQ ID NO: 9884 - protein, 11 aa, synthetic construct
ALGEAYTDILI

SEQ ID NO: 9885 - protein, 11 aa, synthetic construct
ALGEAYTDNLI

SEQ ID NO: 9886 - protein, 11 aa, synthetic construct
ALGEAYTDNSS

SEQ ID NO: 9887 - protein, 11 aa, synthetic construct
ALGEAYTGKLI

SEQ ID NO: 9888 - protein, 8 aa, synthetic construct
DLGELDWG

SEQ ID NO: 9889 - protein, 12 aa, synthetic construct
ALGEQGDTDKLI

SEQ ID NO: 9890 - protein, 14 aa, synthetic construct
ALGEPYWGILSSWD

SEQ ID NO: 9891 - protein, 14 aa, synthetic construct
ALGEPYVLGVRSKL

SEQ ID NO: 9892 - protein, 14 aa, synthetic construct
ALGEETGGCTDKLI

SEQ ID NO: 9893 - protein, 14 aa, synthetic construct
ALGEPYVLGSRSKL

SEQ ID NO: 9894 - protein, 14 aa, synthetic construct
ALGEETGVYTDKLI

SEQ ID NO: 9895 - protein, 14 aa, synthetic construct
ALGDLGPGGYDTDK

SEQ ID NO: 9896 - protein, 14 aa, synthetic construct
ALGEETGGYTDKHI

SEQ ID NO: 9897 - protein, 13 aa, synthetic construct
ALGEPYVLGDKLI

SEQ ID NO: 9898 - protein, 14 aa, synthetic construct
ALGEPYVLGDGGTD

SEQ ID NO: 9899 - protein, 14 aa, synthetic construct
ALGEETGGYTDKPI

SEQ ID NO: 9900 - protein, 14 aa, synthetic construct
ALGEPYVLGASYTD

SEQ ID NO: 9901 - protein, 14 aa, synthetic construct
ALGEETGGYTETLI

SEQ ID NO: 9902 - protein, 14 aa, synthetic construct
ALGEETGGYTGKLI

SEQ ID NO: 9903 - protein, 14 aa, synthetic construct
DLGASFLGYATDKL

SEQ ID NO: 9904 - protein, 14 aa, synthetic construct
ALGEPSYWGIQTDK

SEQ ID NO: 9905 - protein, 14 aa, synthetic construct
ALGEPSYWGIQINS

SEQ ID NO: 9906 - protein, 14 aa, synthetic construct
AVGEPSYWGIHTDK

SEQ ID NO: 9907 - protein, 14 aa, synthetic construct
ALGEPGTGDTDKLI

SEQ ID NO: 9908 - protein, 13 aa, synthetic construct
AHGVLLGDTRKLI

SEQ ID NO: 9909 - protein, 12 aa, synthetic construct
TLGELGDTDKLI

SEQ ID NO: 9910 - protein, 13 aa, synthetic construct
ALGDLGGSAEKLI

SEQ ID NO: 9911 - protein, 13 aa, synthetic construct
ALGDLGGSADQLI

SEQ ID NO: 9912 - protein, 12 aa, synthetic construct
AVGDLGDTDKLI

SEQ ID NO: 9913 - protein, 13 aa, synthetic construct
ALGELGADTDKFI

SEQ ID NO: 9914 - protein, 13 aa, synthetic construct
ALGELGADTDKHI

SEQ ID NO: 9915 - protein, 12 aa, synthetic construct
ALGVLRIFDKLI

SEQ ID NO: 9916 - protein, 13 aa, synthetic construct
GLGELPYWGRYTD

SEQ ID NO: 9917 - protein, 13 aa, synthetic construct
ALGVLVGDTRKLI

SEQ ID NO: 9918 - protein, 13 aa, synthetic construct
ALGVLLGDTRILI

SEQ ID NO: 9919 - protein, 13 aa, synthetic construct
ALGELGADTDNSS

SEQ ID NO: 9920 - protein, 13 aa, synthetic construct
ALGDLGGFADKLI

SEQ ID NO: 9921 - protein, 13 aa, synthetic construct
ALGELGADTNKLI

SEQ ID NO: 9922 - protein, 14 aa, synthetic construct
ALGVPCTGDTDKLI

SEQ ID NO: 9923 - protein, 14 aa, synthetic construct
ALGVPGGYNTDKLI

SEQ ID NO: 9924 - protein, 14 aa, synthetic construct
ALGELGAPYTDKLI

SEQ ID NO: 9925 - protein, 10 aa, synthetic construct
ALGDLGEKLI

SEQ ID NO: 9926 - protein, 13 aa, synthetic construct
ALGVPGGYTDQLI

SEQ ID NO: 9927 - protein, 13 aa, synthetic construct
ALGEPRTGGYAYT

SEQ ID NO: 9928 - protein, 12 aa, synthetic construct
ALGELEDTDKLI

SEQ ID NO: 9929 - protein, 14 aa, synthetic construct
ALGVLNGGDRYTDK

SEQ ID NO: 9930 - protein, 13 aa, synthetic construct
ALGELDWGRRVLI

SEQ ID NO: 9931 - protein, 12 aa, synthetic construct
ALGDLGGYADKL

SEQ ID NO: 9932 - protein, 14 aa, synthetic construct
TLGELPYWGRYTDK

SEQ ID NO: 9933 - protein, 14 aa, synthetic construct
TLGELPTGGFGYTD

SEQ ID NO: 9934 - protein, 12 aa, synthetic construct
AVGELRDTDKLI

SEQ ID NO: 9935 - protein, 13 aa, synthetic construct
ALGVLLGDTRKVI

SEQ ID NO: 9936 - protein, 14 aa, synthetic construct
ALGEIYWGILSSWD

SEQ ID NO: 9937 - protein, 12 aa, synthetic construct
AVGELGMTDKLI

SEQ ID NO: 9938 - protein, 14 aa, synthetic construct
ALGEPSYCGIHTDK

SEQ ID NO: 9939 - protein, 14 aa, synthetic construct
AVGELGGYGTDKLI

SEQ ID NO: 9940 - protein, 13 aa, synthetic construct
ALGVLLGDTRQLI

SEQ ID NO: 9941 - protein, 12 aa, synthetic construct
AVGELGDTDKLI

SEQ ID NO: 9942 - protein, 14 aa, synthetic construct
ALGEPSTVGYADKL

SEQ ID NO: 9943 - protein, 13 aa, synthetic construct
ALGVLLGIRGNSS

SEQ ID NO: 9944 - protein, 14 aa, synthetic construct
ALGEPSTGGYAETH

SEQ ID NO: 9945 - protein, 13 aa, synthetic construct
ALGELDSGRRGLI

SEQ ID NO: 9946 - protein, 13 aa, synthetic construct
ALGELDWGCRGLI

SEQ ID NO: 9947 - protein, 14 aa, synthetic construct
ALGHLRTWGSYTDK

SEQ ID NO: 9948 - protein, 13 aa, synthetic construct
TLGELGGYADKLI

SEQ ID NO: 9949 - protein, 14 aa, synthetic construct
ALGEPSTGGYAAKL

SEQ ID NO: 9950 - protein, 13 aa, synthetic construct
ALGELDWGRMGLI

SEQ ID NO: 9951 - protein, 13 aa, synthetic construct
ALGELGGYAEKII

SEQ ID NO: 9952 - protein, 14 aa, synthetic construct
ALGELGGYGTDKHI

SEQ ID NO: 9953 - protein, 14 aa, synthetic construct
ARGELGASYTDKLI

SEQ ID NO: 9954 - protein, 14 aa, synthetic construct
ALGGPSTGGYADKL

SEQ ID NO: 9955 - protein, 13 aa, synthetic construct
ALWEPGGYTDKLI

SEQ ID NO: 9956 - protein, 14 aa, synthetic construct
ALREETGGYTDKLI

SEQ ID NO: 9957 - protein, 8 aa, synthetic construct
ALREGKLI

SEQ ID NO: 9958 - protein, 14 aa, synthetic construct
ALGENSYGISDKLI

SEQ ID NO: 9959 - protein, 14 aa, synthetic construct
ALGELPYWGGTPIN

SEQ ID NO: 9960 - protein, 14 aa, synthetic construct
ALGEMRWGPYTDKL

SEQ ID NO: 9961 - protein, 12 aa, synthetic construct
ALWELRIFDKLI

SEQ ID NO: 9962 - protein, 14 aa, synthetic construct
ALGASFLGYATGKL

SEQ ID NO: 9963 - protein, 14 aa, synthetic construct
ALGELPYWGRYTDQ

SEQ ID NO: 9964 - protein, 14 aa, synthetic construct
ALWELPTGGFGYTD

SEQ ID NO: 9965 - protein, 14 aa, synthetic construct
ALWELGGYGTDKLI

SEQ ID NO: 9966 - protein, 12 aa, synthetic construct
ALRERGITDKLI

SEQ ID NO: 9967 - protein, 12 aa, synthetic construct
ALGELRDTDKLF

SEQ ID NO: 9968 - protein, 12 aa, synthetic construct
ALGELRDTDKLV

SEQ ID NO: 9969 - protein, 12 aa, synthetic construct
ALGELRDTDKRI

SEQ ID NO: 9970 - protein, 12 aa, synthetic construct
ALGELRDTDNSS

SEQ ID NO: 9971 - protein, 9 aa, synthetic construct
ALGGPPTWG

SEQ ID NO: 9972 - protein, 13 aa, synthetic construct
ALGELRDTGDKLI

SEQ ID NO: 9973 - protein, 12 aa, synthetic construct
ALGELRDTGKLI

SEQ ID NO: 9974 - protein, 9 aa, synthetic construct
ALGGTDKVI

SEQ ID NO: 9975 - protein, 12 aa, synthetic construct
ALGELRDTNKLI

SEQ ID NO: 9976 - protein, 14 aa, synthetic construct
ALGELPTWGSYTDK

SEQ ID NO: 9977 - protein, 14 aa, synthetic construct
ALGEPALGASYTDK

SEQ ID NO: 9978 - protein, 14 aa, synthetic construct
ALGASFLGYTTDKL

SEQ ID NO: 9979 - protein, 12 aa, synthetic construct
ALWVWGINDKLI

SEQ ID NO: 9980 - protein, 14 aa, synthetic construct
APGEETGGYTDKLI

SEQ ID NO: 9981 - protein, 11 aa, synthetic construct
APGEAYTDKLI

SEQ ID NO: 9982 - protein, 14 aa, synthetic construct
ALGELPLGDLYTDK

SEQ ID NO: 9983 - protein, 14 aa, synthetic construct
ALGELPLGDPDKLI

SEQ ID NO: 9984 - protein, 14 aa, synthetic construct
ALGEPCTGDTDKPI

SEQ ID NO: 9985 - protein, 14 aa, synthetic construct
ALGELPLGVLYADK

SEQ ID NO: 9986 - protein, 14 aa, synthetic construct
ALGEPCTGDTDILI

SEQ ID NO: 9987 - protein, 14 aa, synthetic construct
ALGEPCTGDTDELI

SEQ ID NO: 9988 - protein, 12 aa, synthetic construct
ALGVWGVNDKLI

SEQ ID NO: 9989 - protein, 10 aa, synthetic construct
ALGELPLSWG

SEQ ID NO: 9990 - protein, 14 aa, synthetic construct
ALGELPTGGFGSTD

SEQ ID NO: 9991 - protein, 11 aa, synthetic construct
ALGELPLYSGL

SEQ ID NO: 9992 - protein, 14 aa, synthetic construct
ALGGLPYWGRYTDK

SEQ ID NO: 9993 - protein, 14 aa, synthetic construct
ALGELPLYWGLHTD

SEQ ID NO: 9994 - protein, 14 aa, synthetic construct
AIGEPPSYVLGDTD

SEQ ID NO: 9995 - protein, 14 aa, synthetic construct
ALGASLLGYATDKL

SEQ ID NO: 9996 - protein, 14 aa, synthetic construct
ALGASFVGYATDKL

SEQ ID NO: 9997 - protein, 14 aa, synthetic construct
ALGEPCPGDTEKLI

SEQ ID NO: 9998 - protein, 14 aa, synthetic construct
ALGELPNWGRYTDK

SEQ ID NO: 9999 - protein, 14 aa, synthetic construct
ALGASFLRYATDKL

SEQ ID NO: 10000 - protein, 13 aa, synthetic construct
ALGELYWGRRGLI

SEQ ID NO: 10001 - protein, 14 aa, synthetic construct
ALGASDAPVPDKLI

SEQ ID NO: 10002 - protein, 13 aa, synthetic construct
ALGELGGYAEKLV

SEQ ID NO: 10003 - protein, 14 aa, synthetic construct
ALGELRGLGLSSWD

SEQ ID NO: 10004 - protein, 11 aa, synthetic construct
ALVDVGDNKLI

SEQ ID NO: 10005 - protein, 14 aa, synthetic construct
ALGAPCTGDTDKLI

SEQ ID NO: 10006 - protein, 14 aa, synthetic construct
ALGELRTGGYGTDK

SEQ ID NO: 10007 - protein, 11 aa, synthetic construct
ALGALYTDKLI

SEQ ID NO: 10008 - protein, 14 aa, synthetic construct
ALGGPYQEDGTHKL

SEQ ID NO: 10009 - protein, 14 aa, synthetic construct
ALGGPYQEDSTDKL

SEQ ID NO: 10010 - protein, 14 aa, synthetic construct
ALGELRWEPYTDKL

SEQ ID NO: 10011 - protein, 14 aa, synthetic construct
ALGALYAPVPDKLI

SEQ ID NO: 10012 - protein, 14 aa, synthetic construct
ALVEPYVLGARSKL

SEQ ID NO: 10013 - protein, 14 aa, synthetic construct
ALGELRWGPYTDTL

SEQ ID NO: 10014 - protein, 14 aa, synthetic construct
ALVEPCTGDTDKLI

SEQ ID NO: 10015 - protein, 11 aa, synthetic construct
LLGNHRPINSS

SEQ ID NO: 10016 - protein, 14 aa, synthetic construct
ALGELSTGGYADKL

SEQ ID NO: 10017 - protein, 12 aa, synthetic construct
ALVELRDTDKLI

SEQ ID NO: 10018 - protein, 14 aa, synthetic construct
ALGELSWGPYTDKL

SEQ ID NO: 10019 - protein, 14 aa, synthetic construct
ALGALPLYWGLYTD

SEQ ID NO: 10020 - protein, 14 aa, synthetic construct
ALGGPYQGDGTDKL

SEQ ID NO: 10021 - protein, 14 aa, synthetic construct
ALVELGASYTDKII

SEQ ID NO: 10022 - protein, 14 aa, synthetic construct
ALGELTVLGVPPTD

SEQ ID NO: 10023 - protein, 12 aa, synthetic construct
ALVELGDTDKLI

SEQ ID NO: 10024 - protein, 12 aa, synthetic construct
ALGELVDTDKLI

SEQ ID NO: 10025 - protein, 14 aa, synthetic construct
ALGGPYQEDGTDTL

SEQ ID NO: 10026 - protein, 14 aa, synthetic construct
ALGELRTGGYAYTD

SEQ ID NO: 10027 - protein, 14 aa, synthetic construct
ALGELRTGGHEYTD

SEQ ID NO: 10028 - protein, 12 aa, synthetic construct
ALGELRIFDKVI

SEQ ID NO: 10029 - protein, 14 aa, synthetic construct
ALGGPYHEDGTEKL

SEQ ID NO: 10030 - protein, 14 aa, synthetic construct
LLGDSPTGGGTPIN

SEQ ID NO: 10031 - protein, 14 aa, synthetic construct
ALGELYWGIRDKLI

SEQ ID NO: 10032 - protein, 13 aa, synthetic construct
ALGELRGYADKLI

SEQ ID NO: 10033 - protein, 14 aa, synthetic construct
ALGELYWGIPINSS

SEQ ID NO: 10034 - protein, 12 aa, synthetic construct
ALGELRICDKLI

SEQ ID NO: 10035 - protein, 11 aa, synthetic construct
ALWDVGDNKLI

SEQ ID NO: 10036 - protein, 12 aa, synthetic construct
ALGELRIFDKHI

SEQ ID NO: 10037 - protein, 12 aa, synthetic construct
AIGELRDTDKLI

SEQ ID NO: 10038 - protein, 11 aa, synthetic construct
ALGELYWGILI

SEQ ID NO: 10039 - protein, 14 aa, synthetic construct
ALGGPYQEDGTDIL

SEQ ID NO: 10040 - protein, 14 aa, synthetic construct
ALGELYWGILCSWD

SEQ ID NO: 10041 - protein, 12 aa, synthetic construct
ALGELRIVDKLI

SEQ ID NO: 10042 - protein, 13 aa, synthetic construct
ALGAPVLGASYTD

SEQ ID NO: 10043 - protein, 12 aa, synthetic construct
ALGELRNTDKLI

SEQ ID NO: 10044 - protein, 12 aa, synthetic construct
ALGGPYQEDGTD

SEQ ID NO: 10045 - protein, 13 aa, synthetic construct
SLGELGGYADKLI

SEQ ID NO: 10046 - protein, 11 aa, synthetic construct
ALGELYTDNLI

SEQ ID NO: 10047 - protein, 11 aa, synthetic construct
ALGELYTDKPI

SEQ ID NO: 10048 - protein, 14 aa, synthetic construct
ALGELRSGGYEYTD

SEQ ID NO: 10049 - protein, 13 aa, synthetic construct
APGELGADTDKLI

SEQ ID NO: 10050 - protein, 14 aa, synthetic construct
APGELGDRALTAQL

SEQ ID NO: 10051 - protein, 14 aa, synthetic construct
ALGASYAPVPDLLI

SEQ ID NO: 10052 - protein, 14 aa, synthetic construct
ALGASYAPVPDNII

SEQ ID NO: 10053 - protein, 14 aa, synthetic construct
ALGEPGGYNTETLI

SEQ ID NO: 10054 - protein, 12 aa, synthetic construct
ALGELGITDKII

SEQ ID NO: 10055 - protein, 11 aa, synthetic construct
ARGDLRGLGLI

SEQ ID NO: 10056 - protein, 14 aa, synthetic construct
ALGDEPGGYTDKLI

SEQ ID NO: 10057 - protein, 9 aa, synthetic construct
AIGGTDKLI

SEQ ID NO: 10058 - protein, 13 aa, synthetic construct
ALGELGIYTDKLV

SEQ ID NO: 10059 - protein, 13 aa, synthetic construct
ALGELGIYTDKVI

SEQ ID NO: 10060 - protein, 14 aa, synthetic construct
ALGEPGGYNTDKPI

SEQ ID NO: 10061 - protein, 11 aa, synthetic construct
ALGDEGDNKLI

SEQ ID NO: 10062 - protein, 13 aa, synthetic construct
ALGELGIYTDTLI

SEQ ID NO: 10063 - protein, 14 aa, synthetic construct
ALGEPGGYNTDKLF

SEQ ID NO: 10064 - protein, 13 aa, synthetic construct
ALGELGIYTHKLI

SEQ ID NO: 10065 - protein, 12 aa, synthetic construct
ARGDLGMTDKLI

SEQ ID NO: 10066 - protein, 12 aa, synthetic construct
VLGERGDSDKLI

SEQ ID NO: 10067 - protein, 13 aa, synthetic construct
ARGDLGGYADKLI

SEQ ID NO: 10068 - protein, 14 aa, synthetic construct
ALGEPGGYNSDKLI

SEQ ID NO: 10069 - protein, 12 aa, synthetic construct
ALGVWGIIDKLI

SEQ ID NO: 10070 - protein, 13 aa, synthetic construct
ALGELGLYTDKLI

SEQ ID NO: 10071 - protein, 12 aa, synthetic construct
ALGVWGIKDKLI

SEQ ID NO: 10072 - protein, 12 aa, synthetic construct
ARGDLGDTDKLI

SEQ ID NO: 10073 - protein, 12 aa, synthetic construct
ALGVWGINDDII

SEQ ID NO: 10074 - protein, 14 aa, synthetic construct
ALGEPGGYNTHKLI

SEQ ID NO: 10075 - protein, 11 aa, synthetic construct
ALGGGYSDKHI

SEQ ID NO: 10076 - protein, 13 aa, synthetic construct
SWGTPFVLGAVHR

SEQ ID NO: 10077 - protein, 13 aa, synthetic construct
ALGELGGYGINSS

SEQ ID NO: 10078 - protein, 13 aa, synthetic construct
ALGDIDWGRRGLI

SEQ ID NO: 10079 - protein, 13 aa, synthetic construct
ALGEPGIYTDKLI

SEQ ID NO: 10080 - protein, 13 aa, synthetic construct
ALGELGGYASKLI

SEQ ID NO: 10081 - protein, 13 aa, synthetic construct
ALGEPGGYTYKLI

SEQ ID NO: 10082 - protein, 14 aa, synthetic construct
ALGEPGGYTTEKLI

SEQ ID NO: 10083 - protein, 13 aa, synthetic construct
ALGELGGYDDKLI

SEQ ID NO: 10084 - protein, 14 aa, synthetic construct
ALGELGGYETDKLI

SEQ ID NO: 10085 - protein, 9 aa, synthetic construct
GLGGTDQLI

SEQ ID NO: 10086 - protein, 14 aa, synthetic construct
ALGELGGYGGTPIN

SEQ ID NO: 10087 - protein, 13 aa, synthetic construct
ALGEPGGYTDRLI

SEQ ID NO: 10088 - protein, 14 aa, synthetic construct
ALGEPGGYSAPGTP

SEQ ID NO: 10089 - protein, 14 aa, synthetic construct
ALGELGGYGTDELI

SEQ ID NO: 10090 - protein, 13 aa, synthetic construct
ALGERGADTDKLI

SEQ ID NO: 10091 - protein, 13 aa, synthetic construct
ALGEPGGYTDKPI

SEQ ID NO: 10092 - protein, 12 aa, synthetic construct
ALGDFGFSINSS

SEQ ID NO: 10093 - protein, 14 aa, synthetic construct
ALGELGGYGTDNLI

SEQ ID NO: 10094 - protein, 13 aa, synthetic construct
ALGEPGGYTDKLN

SEQ ID NO: 10095 - protein, 14 aa, synthetic construct
ALGELGGYGTVKLI

SEQ ID NO: 10096 - protein, 13 aa, synthetic construct
ALGEPGGYTDKLF

SEQ ID NO: 10097 - protein, 13 aa, synthetic construct
ALGELGGYSDKLI

SEQ ID NO: 10098 - protein, 11 aa, synthetic construct
ALGGGYSDKLS

SEQ ID NO: 10099 - protein, 12 aa, synthetic construct
ALGELGMTDELI

SEQ ID NO: 10100 - protein, 14 aa, synthetic construct
ALGEPGGYAYTDKL

SEQ ID NO: 10101 - protein, 14 aa, synthetic construct
ALGELLLGDSDKLI

SEQ ID NO: 10102 - protein, 14 aa, synthetic construct
APGGPYQEDGTDKL

SEQ ID NO: 10103 - protein, 13 aa, synthetic construct
ALGELLGDTRKLI

SEQ ID NO: 10104 - protein, 14 aa, synthetic construct
APGETSYGISDKLI

SEQ ID NO: 10105 - protein, 14 aa, synthetic construct
APGEPRTGGYAYTD

SEQ ID NO: 10106 - protein, 14 aa, synthetic construct
ALGELLLGDPDELI

SEQ ID NO: 10107 - protein, 13 aa, synthetic construct
ALGVWGLTPINSS

SEQ ID NO: 10108 - protein, 14 aa, synthetic construct
ALGELLLGDPDRLI

SEQ ID NO: 10109 - protein, 14 aa, synthetic construct
ALGVWGPRTPINSS

SEQ ID NO: 10110 - protein, 14 aa, synthetic construct
ALGELLLGDQEKLI

SEQ ID NO: 10111 - protein, 14 aa, synthetic construct
ALGELLLGDTDKLI

SEQ ID NO: 10112 - protein, 14 aa, synthetic construct
APGRYWGGPLTAQL

SEQ ID NO: 10113 - protein, 14 aa, synthetic construct
ALGELLLGDTSTPI

SEQ ID NO: 10114 - protein, 14 aa, synthetic construct
ALGELLLGGPEKLI

SEQ ID NO: 10115 - protein, 14 aa, synthetic construct
ALGASYAPVPGKLI

SEQ ID NO: 10116 - protein, 14 aa, synthetic construct
ALGELLLLGDTIDK

SEQ ID NO: 10117 - protein, 14 aa, synthetic construct
ALGELLLRDPDKLI

SEQ ID NO: 10118 - protein, 14 aa, synthetic construct
APGELPTGGFGYTD

SEQ ID NO: 10119 - protein, 12 aa, synthetic construct
APGELGMTDKLI

SEQ ID NO: 10120 - protein, 14 aa, synthetic construct
ALGASYAPVPDTLI

SEQ ID NO: 10121 - protein, 14 aa, synthetic construct
APGELGGYGTDKLI

SEQ ID NO: 10122 - protein, 9 aa, synthetic construct
APGGTDKLI

SEQ ID NO: 10123 - protein, 14 aa, synthetic construct
ALGEPCTVDTDKLI

SEQ ID NO: 10124 - protein, 12 aa, synthetic construct
ALGELGMTDHLI

SEQ ID NO: 10125 - protein, 14 aa, synthetic construct
ALGEPGEYNTDKLI

SEQ ID NO: 10126 - protein, 12 aa, synthetic construct
SWGPTGGYAETH

SEQ ID NO: 10127 - protein, 14 aa, synthetic construct
ARGASFLGYATDKL

SEQ ID NO: 10128 - protein, 12 aa, synthetic construct
ALGVWGINDKHI

SEQ ID NO: 10129 - protein, 12 aa, synthetic construct
ALGELGMTNKLI

SEQ ID NO: 10130 - protein, 12 aa, synthetic construct
ALGVWGINDKLV

SEQ ID NO: 10131 - protein, 13 aa, synthetic construct
ALGELGPDTDKLI

SEQ ID NO: 10132 - protein, 12 aa, synthetic construct
ALGVWGINDKPI

SEQ ID NO: 10133 - protein, 14 aa, synthetic construct
ALGEPGGCTPINSS

SEQ ID NO: 10134 - protein, 13 aa, synthetic construct
ALGEPGGCTDKLI

SEQ ID NO: 10135 - protein, 13 aa, synthetic construct
ALGEPGDTPINSS

SEQ ID NO: 10136 - protein, 13 aa, synthetic construct
ALGEPDWGRRGLI

SEQ ID NO: 10137 - protein, 13 aa, synthetic construct
ALGEPGDTGDKLI

SEQ ID NO: 10138 - protein, 14 aa, synthetic construct
ALGEPGDRALTAQL

SEQ ID NO: 10139 - protein, 13 aa, synthetic construct
SWAVLGGSFDSTT

SEQ ID NO: 10140 - protein, 13 aa, synthetic construct
ALGELGTDTDKLI

SEQ ID NO: 10141 - protein, 12 aa, synthetic construct
ALGVWGINDRLI

SEQ ID NO: 10142 - protein, 14 aa, synthetic construct
ALGEPGASYTDKLI

SEQ ID NO: 10143 - protein, 13 aa, synthetic construct
ALGALLGDTRKLI

SEQ ID NO: 10144 - protein, 14 aa, synthetic construct
ARGAAFLGYATDKL

SEQ ID NO: 10145 - protein, 12 aa, synthetic construct
ALGVWGINYKLI

SEQ ID NO: 10146 - protein, 11 aa, synthetic construct
ALGEAYSDKLI

SEQ ID NO: 10147 - protein, 14 aa, synthetic construct
ALGEPPSYDLGDTD

SEQ ID NO: 10148 - protein, 12 aa, synthetic construct
ALGERGDSAKLI

SEQ ID NO: 10149 - protein, 11 aa, synthetic construct
DLGGGYSEKLI

SEQ ID NO: 10150 - protein, 14 aa, synthetic construct
ALGETSYRISDKLI

SEQ ID NO: 10151 - protein, 14 aa, synthetic construct
DLGEPPSYVLGDTD

SEQ ID NO: 10152 - protein, 13 aa, synthetic construct
ALGDPVLGASYTD

SEQ ID NO: 10153 - protein, 14 aa, synthetic construct
DLGELRWGPYTDKL

SEQ ID NO: 10154 - protein, 13 aa, synthetic construct
ALGEVGGYADKHI

SEQ ID NO: 10155 - protein, 13 aa, synthetic construct
VLGELGGYADKLI

SEQ ID NO: 10156 - protein, 13 aa, synthetic construct
ALGEVGGYADKII

SEQ ID NO: 10157 - protein, 12 aa, synthetic construct
TLGVWGINDKLI

SEQ ID NO: 10158 - protein, 14 aa, synthetic construct
DLGELPTGGFGYTD

SEQ ID NO: 10159 - protein, 12 aa, synthetic construct
LLGTFGFSINSS

SEQ ID NO: 10160 - protein, 12 aa, synthetic construct
ALGNGGIRDKLI

SEQ ID NO: 10161 - protein, 12 aa, synthetic construct
ALGDRGITDQLI

SEQ ID NO: 10162 - protein, 12 aa, synthetic construct
ALGERGYSDKLI

SEQ ID NO: 10163 - protein, 12 aa, synthetic construct
ALEELGMTDKLI

SEQ ID NO: 10164 - protein, 14 aa, synthetic construct
GLGDLPLGVLYTDK

SEQ ID NO: 10165 - protein, 14 aa, synthetic construct
ALGETSYGISDKLF

SEQ ID NO: 10166 - protein, 11 aa, synthetic construct
ALGDVGAHKLI

SEQ ID NO: 10167 - protein, 12 aa, synthetic construct
ALEELGDTDKLI

SEQ ID NO: 10168 - protein, 13 aa, synthetic construct
ALGERGDTPINSS

SEQ ID NO: 10169 - protein, 12 aa, synthetic construct
ALGERGDCDKLI

SEQ ID NO: 10170 - protein, 12 aa, synthetic construct
DLGELGMTDKII

SEQ ID NO: 10171 - protein, 14 aa, synthetic construct
ALGERGGYNTDKLI

SEQ ID NO: 10172 - protein, 13 aa, synthetic construct
ALGDPGGYTDQLI

SEQ ID NO: 10173 - protein, 12 aa, synthetic construct
LLGTCGIPINSS

SEQ ID NO: 10174 - protein, 14 aa, synthetic construct
ALGRYWGIPAINSS

SEQ ID NO: 10175 - protein, 14 aa, synthetic construct
ALGETSYGISDKVI

SEQ ID NO: 10176 - protein, 12 aa, synthetic construct
DLGVWGINDELI

SEQ ID NO: 10177 - protein, 14 aa, synthetic construct
DLGELYWGILSSWD

SEQ ID NO: 10178 - protein, 8 aa, synthetic construct
ALGERKLI

SEQ ID NO: 10179 - protein, 14 aa, synthetic construct
ALGETRTGGYAYTD

SEQ ID NO: 10180 - protein, 12 aa, synthetic construct
ALGERGDIDKLI

SEQ ID NO: 10181 - protein, 14 aa, synthetic construct
ALGRYGGGPLTAQL

SEQ ID NO: 10182 - protein, 14 aa, synthetic construct
ALGETFYWGFRIHR

SEQ ID NO: 10183 - protein, 13 aa, synthetic construct
ALEVTGGYTDKLI

SEQ ID NO: 10184 - protein, 12 aa, synthetic construct
ALGERGASDQLI

SEQ ID NO: 10185 - protein, 11 aa, synthetic construct
ALGDVGDNILI

SEQ ID NO: 10186 - protein, 10 aa, synthetic construct
VLGELGDKLI

SEQ ID NO: 10187 - protein, 12 aa, synthetic construct
ALGERGITAKLI

SEQ ID NO: 10188 - protein, 12 aa, synthetic construct
DLGELRIFDKLI

SEQ ID NO: 10189 - protein, 9 aa, synthetic construct
ALGDLPPGG

SEQ ID NO: 10190 - protein, 11 aa, synthetic construct
ALGDVGDNKPI

SEQ ID NO: 10191 - protein, 14 aa, synthetic construct
ALGERGASYTDKLI

SEQ ID NO: 10192 - protein, 11 aa, synthetic construct
ALGDVGDNKLM

SEQ ID NO: 10193 - protein, 14 aa, synthetic construct
ALGRYWGPRTPINS

SEQ ID NO: 10194 - protein, 14 aa, synthetic construct
ALEELGGYGTDKLI

SEQ ID NO: 10195 - protein, 12 aa, synthetic construct
ALGNWGIRDKHI

SEQ ID NO: 10196 - protein, 12 aa, synthetic construct
ALGERGDSDKVI

SEQ ID NO: 10197 - protein, 10 aa, synthetic construct
ALGQLGDKLI

SEQ ID NO: 10198 - protein, 13 aa, synthetic construct
ALGDLPYWGRYTD

SEQ ID NO: 10199 - protein, 12 aa, synthetic construct
ALGERGDSDKLV

SEQ ID NO: 10200 - protein, 12 aa, synthetic construct
ALGDLRDTDKHI

SEQ ID NO: 10201 - protein, 12 aa, synthetic construct
ALGNWGIRDNLI

SEQ ID NO: 10202 - protein, 12 aa, synthetic construct
ALGERGITDKLF

SEQ ID NO: 10203 - protein, 14 aa, synthetic construct
ALGRSWGGPLTAHL

SEQ ID NO: 10204 - protein, 14 aa, synthetic construct
ALGETSYGISDKPI

SEQ ID NO: 10205 - protein, 14 aa, synthetic construct
ALGESSTGGYADKL

SEQ ID NO: 10206 - protein, 11 aa, synthetic construct
ALGDVGIINSS

SEQ ID NO: 10207 - protein, 11 aa, synthetic construct
ALEEAYTDKLI

SEQ ID NO: 10208 - protein, 14 aa, synthetic construct
VLGASFLGYATDKL

SEQ ID NO: 10209 - protein, 14 aa, synthetic construct
ALGDVGGYGTEKLI

SEQ ID NO: 10210 - protein, 14 aa, synthetic construct
ALGDVRWGPYTDKL

SEQ ID NO: 10211 - protein, 14 aa, synthetic construct
ALGRYWGGPMTAQL

SEQ ID NO: 10212 - protein, 14 aa, synthetic construct
ALGDVGDTQLLGHP

SEQ ID NO: 10213 - protein, 14 aa, synthetic construct
ALEELGASYTDKLI

SEQ ID NO: 10214 - protein, 11 aa, synthetic construct
LLGRRTPIDSS

SEQ ID NO: 10215 - protein, 11 aa, synthetic construct
AHGDVGDNKLI

SEQ ID NO: 10216 - protein, 14 aa, synthetic construct
ALGNLPTWGSYTDK

SEQ ID NO: 10217 - protein, 12 aa, synthetic construct
ALGESGDSDKLI

SEQ ID NO: 10218 - protein, 9 aa, synthetic construct
ALGDVGKLI

SEQ ID NO: 10219 - protein, 12 aa, synthetic construct
ALGERGITDKPI

SEQ ID NO: 10220 - protein, 14 aa, synthetic construct
LLGTKLGDTPINSS

SEQ ID NO: 10221 - protein, 11 aa, synthetic construct
ALGEVGDNKLI

SEQ ID NO: 10222 - protein, 14 aa, synthetic construct
ALGETSYGTSDKLI

SEQ ID NO: 10223 - protein, 13 aa, synthetic construct
AHGELGADTDKLI

SEQ ID NO: 10224 - protein, 12 aa, synthetic construct
ALGERGDSDKPI

SEQ ID NO: 10225 - protein, 14 aa, synthetic construct
ALGDVGGSFDSTTL

SEQ ID NO: 10226 - protein, 12 aa, synthetic construct
ALGETSYGINSS

SEQ ID NO: 10227 - protein, 13 aa, synthetic construct
ALGELGGFADKLI

SEQ ID NO: 10228 - protein, 14 aa, synthetic construct
ALGEPLLLGDTSDK

SEQ ID NO: 10229 - protein, 14 aa, synthetic construct
ALGHLPTCGSYTDK

SEQ ID NO: 10230 - protein, 14 aa, synthetic construct
ALGEPLLLGDTTDK

SEQ ID NO: 10231 - protein, 12 aa, synthetic construct
ALGVTGGYTDKL

SEQ ID NO: 10232 - protein, 14 aa, synthetic construct
ALWELRWGPYTDKL

SEQ ID NO: 10233 - protein, 14 aa, synthetic construct
DLGELGGYGTYKLI

SEQ ID NO: 10234 - protein, 14 aa, synthetic construct
ALGRYWGGPLSAQL

SEQ ID NO: 10235 - protein, 14 aa, synthetic construct
ALGELPYWGIRVHR

SEQ ID NO: 10236 - protein, 10 aa, synthetic construct
ALGERGINSS

SEQ ID NO: 10237 - protein, 14 aa, synthetic construct
ARGEPCPGDTDKLI

SEQ ID NO: 10238 - protein, 11 aa, synthetic construct
ALGGDIPRNSS

SEQ ID NO: 10239 - protein, 10 aa, synthetic construct
ALGVTGGYTD

SEQ ID NO: 10240 - protein, 14 aa, synthetic construct
ALGEPLLVGDTIDK

SEQ ID NO: 10241 - protein, 11 aa, synthetic construct
ALGELGDWDSS

SEQ ID NO: 10242 - protein, 14 aa, synthetic construct
ALGELPYWGLTPIN

SEQ ID NO: 10243 - protein, 14 aa, synthetic construct
ALGRYWGGPLTAHL

SEQ ID NO: 10244 - protein, 14 aa, synthetic construct
ARGELRTGGYEYTD

SEQ ID NO: 10245 - protein, 14 aa, synthetic construct
ALGRYWGGPLTAEL

SEQ ID NO: 10246 - protein, 12 aa, synthetic construct
ALGRYWGGPLTA

SEQ ID NO: 10247 - protein, 14 aa, synthetic construct
ALGEPLLLGDTTPI

SEQ ID NO: 10248 - protein, 13 aa, synthetic construct
ALGQLGGYADKLI

SEQ ID NO: 10249 - protein, 13 aa, synthetic construct
ALGQLGIYTDKLI

SEQ ID NO: 10250 - protein, 11 aa, synthetic construct
ALGDVGAHKLF

SEQ ID NO: 10251 - protein, 11 aa, synthetic construct
ALGGEYSDKLI

SEQ ID NO: 10252 - protein, 7 aa, synthetic construct
ALGELGG

SEQ ID NO: 10253 - protein, 14 aa, synthetic construct
ALGETSFGISDKLI

SEQ ID NO: 10254 - protein, 14 aa, synthetic construct
ALGHLPTGGSSTDK

SEQ ID NO: 10255 - protein, 12 aa, synthetic construct
ILGKGGIAINSS

SEQ ID NO: 10256 - protein, 14 aa, synthetic construct
ALGELGGCGTDKLI

SEQ ID NO: 10257 - protein, 14 aa, synthetic construct
ALGELGGCTPINSS

SEQ ID NO: 10258 - protein, 14 aa, synthetic construct
ALGELPYWGIQINS

SEQ ID NO: 10259 - protein, 14 aa, synthetic construct
VLGEPPSYVLGDTD

SEQ ID NO: 10260 - protein, 13 aa, synthetic construct
GLGEVGGYADKLI

SEQ ID NO: 10261 - protein, 14 aa, synthetic construct
ALGELPTGSFGYTD

SEQ ID NO: 10262 - protein, 14 aa, synthetic construct
ALGDPCTGDTEKLI

SEQ ID NO: 10263 - protein, 14 aa, synthetic construct
ALGEPILGASYTDK

SEQ ID NO: 10264 - protein, 13 aa, synthetic construct
ARGELGGDAEKLI

SEQ ID NO: 10265 - protein, 14 aa, synthetic construct
ALWEPPSYVLGDTD

SEQ ID NO: 10266 - protein, 13 aa, synthetic construct
ARGELGDTGEKLI

SEQ ID NO: 10267 - protein, 12 aa, synthetic construct
ALGDIGMTDKLI

SEQ ID NO: 10268 - protein, 14 aa, synthetic construct
ALWEPRTGGYSYTD

SEQ ID NO: 10269 - protein, 13 aa, synthetic construct
ALGVTGGYTGKLI

SEQ ID NO: 10270 - protein, 14 aa, synthetic construct
ALGELPTGVSDTPI

SEQ ID NO: 10271 - protein, 12 aa, synthetic construct
ALGGGSFDSSTL

SEQ ID NO: 10272 - protein, 14 aa, synthetic construct
ALGDIGGYGTDKLI

SEQ ID NO: 10273 - protein, 14 aa, synthetic construct
ALGELPTGSPINSS

SEQ ID NO: 10274 - protein, 13 aa, synthetic construct
ALGVTGGYTHKLI

SEQ ID NO: 10275 - protein, 14 aa, synthetic construct
ALGDIPLYWGLYTD

SEQ ID NO: 10276 - protein, 12 aa, synthetic construct
ARGELGDTDQLI

SEQ ID NO: 10277 - protein, 14 aa, synthetic construct
ALGEPCAGDTDKLI

SEQ ID NO: 10278 - protein, 13 aa, synthetic construct
ALGVTGGYTNKLI

SEQ ID NO: 10279 - protein, 14 aa, synthetic construct
ALGVTGGYTPINSS

SEQ ID NO: 10280 - protein, 14 aa, synthetic construct
ALWEPSYWGIHTDK

SEQ ID NO: 10281 - protein, 11 aa, synthetic construct
ALGERGITDKL

SEQ ID NO: 10282 - protein, 13 aa, synthetic construct
ALGELGGYADNSS

SEQ ID NO: 10283 - protein, 13 aa, synthetic construct
ALGELGGYADNVI

SEQ ID NO: 10284 - protein, 12 aa, synthetic construct
PLGELRDTDKLI

SEQ ID NO: 10285 - protein, 14 aa, synthetic construct
ALGELPTGGYGYTD

SEQ ID NO: 10286 - protein, 14 aa, synthetic construct
ALGELPTGGYGTDK

SEQ ID NO: 10287 - protein, 13 aa, synthetic construct
ALGVTRGYTDKLI

SEQ ID NO: 10288 - protein, 14 aa, synthetic construct
ALWEPGGYNTDKLI

SEQ ID NO: 10289 - protein, 13 aa, synthetic construct
ALGELGGYADHLI

SEQ ID NO: 10290 - protein, 13 aa, synthetic construct
ALGDVGADTDKLI

SEQ ID NO: 10291 - protein, 14 aa, synthetic construct
ALGRYWGGPLAAQL

SEQ ID NO: 10292 - protein, 11 aa, synthetic construct
ALGGGHSDKLI

SEQ ID NO: 10293 - protein, 12 aa, synthetic construct
ALGERGIRGNSS

SEQ ID NO: 10294 - protein, 9 aa, synthetic construct
ILGGPINSS

SEQ ID NO: 10295 - protein, 14 aa, synthetic construct
ALGELPYLGRYTDK

SEQ ID NO: 10296 - protein, 8 aa, synthetic construct
ALGDLDWG

SEQ ID NO: 10297 - protein, 7 aa, synthetic construct
SWRGETH

SEQ ID NO: 10298 - protein, 14 aa, synthetic construct
ALGEPLLLGDAIDK

SEQ ID NO: 10299 - protein, 14 aa, synthetic construct
ALGELPYGGRYTDK

SEQ ID NO: 10300 - protein, 13 aa, synthetic construct
ALGENSYGISDKL

SEQ ID NO: 10301 - protein, 14 aa, synthetic construct
ARGELLLGDPDKLI

SEQ ID NO: 10302 - protein, 13 aa, synthetic construct
ARGELLLGDPDKL

SEQ ID NO: 10303 - protein, 14 aa, synthetic construct
ALGHLPRGGRTPRN

SEQ ID NO: 10304 - protein, 12 aa, synthetic construct
ARGELGMTDQLI

SEQ ID NO: 10305 - protein, 14 aa, synthetic construct
ALGEPLFLGDTIDK

SEQ ID NO: 10306 - protein, 12 aa, synthetic construct
ALGQLGMTDKLI

SEQ ID NO: 10307 - protein, 13 aa, synthetic construct
ALGVTGGYTDKPI

SEQ ID NO: 10308 - protein, 11 aa, synthetic construct
ALWELRGLGLI

SEQ ID NO: 10309 - protein, 13 aa, synthetic construct
ALGVTGGYTDKVI

SEQ ID NO: 10310 - protein, 14 aa, synthetic construct
ALWELYWGILSSWD

SEQ ID NO: 10311 - protein, 11 aa, synthetic construct
ALGGGIPINSS

SEQ ID NO: 10312 - protein, 14 aa, synthetic construct
ARGELGGYGTDKLI

SEQ ID NO: 10313 - protein, 14 aa, synthetic construct
ALGGGIRTLTAQLF

SEQ ID NO: 10314 - protein, 14 aa, synthetic construct
ALGDTSYGISEKLI

SEQ ID NO: 10315 - protein, 13 aa, synthetic construct
ARGELGGYADTLI

SEQ ID NO: 10316 - protein, 10 aa, synthetic construct
GLGDLGDKLI

SEQ ID NO: 10317 - protein, 12 aa, synthetic construct
ALGELGGTNKLI

SEQ ID NO: 10318 - protein, 14 aa, synthetic construct
ALGELPYWGPRTPI

SEQ ID NO: 10319 - protein, 13 aa, synthetic construct
ALGELGDTGYKLI

SEQ ID NO: 10320 - protein, 14 aa, synthetic construct
ALGVTGGYNTDKLI

SEQ ID NO: 10321 - protein, 10 aa, synthetic construct
ALGELGDRLI

SEQ ID NO: 10322 - protein, 14 aa, synthetic construct
ALGASFLGYAADKL

SEQ ID NO: 10323 - protein, 14 aa, synthetic construct
ALGELGDRALKAQI

SEQ ID NO: 10324 - protein, 14 aa, synthetic construct
ALGELGDRALKAQL

SEQ ID NO: 10325 - protein, 11 aa, synthetic construct
ALGELGDRALT

SEQ ID NO: 10326 - protein, 12 aa, synthetic construct
ALGELGDRALTA

SEQ ID NO: 10327 - protein, 13 aa, synthetic construct
ALGERGGYAAKLI

SEQ ID NO: 10328 - protein, 13 aa, synthetic construct
ALGERGGYADKLI

SEQ ID NO: 10329 - protein, 13 aa, synthetic construct
ALGFLLGDTRKLI

SEQ ID NO: 10330 - protein, 14 aa, synthetic construct
LLGNSYWGIQIKSS

SEQ ID NO: 10331 - protein, 14 aa, synthetic construct
ALGELGDRALTTQL

SEQ ID NO: 10332 - protein, 13 aa, synthetic construct
GLGEPGGYTDKLI

SEQ ID NO: 10333 - protein, 12 aa, synthetic construct
ALGELRDTDILI

SEQ ID NO: 10334 - protein, 14 aa, synthetic construct
ALGVSYAPVPDKLI

SEQ ID NO: 10335 - protein, 14 aa, synthetic construct
ALGEPPSYVVGDTD

SEQ ID NO: 10336 - protein, 13 aa, synthetic construct
ALGELGDRAFTAQ

SEQ ID NO: 10337 - protein, 13 aa, synthetic construct
ALGDLGDRALTAQ

SEQ ID NO: 10338 - protein, 12 aa, synthetic construct
ALGELRDTDHLI

SEQ ID NO: 10339 - protein, 14 aa, synthetic construct
ALGELGDSYTDKLI

SEQ ID NO: 10340 - protein, 12 aa, synthetic construct
ALGELRDSDKLI

SEQ ID NO: 10341 - protein, 14 aa, synthetic construct
ALGASFLGYAPDKL

SEQ ID NO: 10342 - protein, 11 aa, synthetic construct
ALGDVGDNELI

SEQ ID NO: 10343 - protein, 14 aa, synthetic construct
ALERYWGGPLTAQL

SEQ ID NO: 10344 - protein, 11 aa, synthetic construct
ALGDVGDMKLI

SEQ ID NO: 10345 - protein, 14 aa, synthetic construct
ALGHLPTWGIRTPI

SEQ ID NO: 10346 - protein, 11 aa, synthetic construct
ALGDLGDNKLN

SEQ ID NO: 10347 - protein, 12 aa, synthetic construct
AIGELGDTDKLI

SEQ ID NO: 10348 - protein, 12 aa, synthetic construct
ALGELGDTDKHN

SEQ ID NO: 10349 - protein, 14 aa, synthetic construct
ALGERGGYGTDKLI

SEQ ID NO: 10350 - protein, 14 aa, synthetic construct
AIGELGASYTDKLI

SEQ ID NO: 10351 - protein, 9 aa, synthetic construct
ALGELGDRA

SEQ ID NO: 10352 - protein, 14 aa, synthetic construct
ALGASFLGYATAKL

SEQ ID NO: 10353 - protein, 12 aa, synthetic construct
ALGDLGDTDTLI

SEQ ID NO: 10354 - protein, 12 aa, synthetic construct
ARGNWGIRDKLI

SEQ ID NO: 10355 - protein, 11 aa, synthetic construct
ALGDVGDNKLY

SEQ ID NO: 10356 - protein, 11 aa, synthetic construct
ALGDVGDNKLV

SEQ ID NO: 10357 - protein, 13 aa, synthetic construct
ALGELGAYADKLI

SEQ ID NO: 10358 - protein, 11 aa, synthetic construct
ALGDVGDNKLT

SEQ ID NO: 10359 - protein, 9 aa, synthetic construct
ARGGTDTLI

SEQ ID NO: 10360 - protein, 11 aa, synthetic construct
ALGDVGDNKLS

SEQ ID NO: 10361 - protein, 14 aa, synthetic construct
ALGEPRHGGYAYTD

SEQ ID NO: 10362 - protein, 12 aa, synthetic construct
ALGDLGDTEKLI

SEQ ID NO: 10363 - protein, 13 aa, synthetic construct
ALGELGDAGEKLI

SEQ ID NO: 10364 - protein, 14 aa, synthetic construct
ALGEPRHGGYADKL

SEQ ID NO: 10365 - protein, 14 aa, synthetic construct
ALGELGDGGTDKLI

SEQ ID NO: 10366 - protein, 14 aa, synthetic construct
ALGETSYGISDELI

SEQ ID NO: 10367 - protein, 14 aa, synthetic construct
ALGHLPTWGSFTDK

SEQ ID NO: 10368 - protein, 13 aa, synthetic construct
ALGVSGGYTDNLI

SEQ ID NO: 10369 - protein, 14 aa, synthetic construct
ALRETSYGISDKLI

SEQ ID NO: 10370 - protein, 12 aa, synthetic construct
ALGELRDTDNII

SEQ ID NO: 10371 - protein, 14 aa, synthetic construct
ALGRYWGGPSTAQL

SEQ ID NO: 10372 - protein, 11 aa, synthetic construct
LLGTFTPINSS

SEQ ID NO: 10373 - protein, 14 aa, synthetic construct
AFGELLLGDPDKLI

SEQ ID NO: 10374 - protein, 11 aa, synthetic construct
ARGGGYYDKLI

SEQ ID NO: 10375 - protein, 10 aa, synthetic construct
ALGELGDKVI

SEQ ID NO: 10376 - protein, 14 aa, synthetic construct
ALGHLPTWGRTPIN

SEQ ID NO: 10377 - protein, 11 aa, synthetic construct
ALGDLGDTDKL

SEQ ID NO: 10378 - protein, 10 aa, synthetic construct
ALGELGDNLI

SEQ ID NO: 10379 - protein, 12 aa, synthetic construct
ALGELGDPDKLI

SEQ ID NO: 10380 - protein, 10 aa, synthetic construct
ALGDVGDNKL

SEQ ID NO: 10381 - protein, 14 aa, synthetic construct
GLGEPCTGDTDNLI

SEQ ID NO: 10382 - protein, 12 aa, synthetic construct
ALGELRDIDKLI

SEQ ID NO: 10383 - protein, 14 aa, synthetic construct
ALGELRASYTDKPI

SEQ ID NO: 10384 - protein, 14 aa, synthetic construct
ALGASFLGYETDKL

SEQ ID NO: 10385 - protein, 11 aa, synthetic construct
ALGELGDTKLI

SEQ ID NO: 10386 - protein, 10 aa, synthetic construct
ALGDLGAKLI

SEQ ID NO: 10387 - protein, 14 aa, synthetic construct
ALWELPYWGRYTDK

SEQ ID NO: 10388 - protein, 13 aa, synthetic construct
ALGELGDTGENLI

SEQ ID NO: 10389 - protein, 14 aa, synthetic construct
ARGEPRTGGYAYTD

SEQ ID NO: 10390 - protein, 11 aa, synthetic construct
ALGGDIPINST

SEQ ID NO: 10391 - protein, 14 aa, synthetic construct
ALGHLPTRGSYTDK

SEQ ID NO: 10392 - protein, 13 aa, synthetic construct
ALGELGDTGHKLI

SEQ ID NO: 10393 - protein, 12 aa, synthetic construct
ALGEVGDTDKLF

SEQ ID NO: 10394 - protein, 12 aa, synthetic construct
ALGVTGGYAETH

SEQ ID NO: 10395 - protein, 14 aa, synthetic construct
DLGEPSYWGINTDK

SEQ ID NO: 10396 - protein, 13 aa, synthetic construct
ALGELGDTGVKLI

SEQ ID NO: 10397 - protein, 10 aa, synthetic construct
ALGELPTGGY

SEQ ID NO: 10398 - protein, 14 aa, synthetic construct
ALGRYWGGPLTAQI

SEQ ID NO: 10399 - protein, 13 aa, synthetic construct
ALGELPYWGRSTD

SEQ ID NO: 10400 - protein, 13 aa, synthetic construct
ALGVTGGSTEKLI

SEQ ID NO: 10401 - protein, 14 aa, synthetic construct
ALGDVGASYTEKLI

SEQ ID NO: 10402 - protein, 14 aa, synthetic construct
ALGNLGDTTPINSS

SEQ ID NO: 10403 - protein, 14 aa, synthetic construct
ALGDLPYGGRYTDK

SEQ ID NO: 10404 - protein, 14 aa, synthetic construct
ALGEPPAYVLGDTD

SEQ ID NO: 10405 - protein, 11 aa, synthetic construct
PLGEAYTDKLI

SEQ ID NO: 10406 - protein, 13 aa, synthetic construct
ALGELGDTPISSS

SEQ ID NO: 10407 - protein, 14 aa, synthetic construct
ALGELGDTQLLGHP

SEQ ID NO: 10408 - protein, 14 aa, synthetic construct
ALGASFLGYATNKL

SEQ ID NO: 10409 - protein, 13 aa, synthetic construct
ALGDLGADTEKLI

SEQ ID NO: 10410 - protein, 14 aa, synthetic construct
ALGELGDTRPINSS

SEQ ID NO: 10411 - protein, 14 aa, synthetic construct
ALGGPHQEDGTDKL

SEQ ID NO: 10412 - protein, 14 aa, synthetic construct
ALGASFLGYATYKL

SEQ ID NO: 10413 - protein, 14 aa, synthetic construct
ARGEPGGYNTDKLI

SEQ ID NO: 10414 - protein, 11 aa, synthetic construct
ALGDVGDDKLI

SEQ ID NO: 10415 - protein, 12 aa, synthetic construct
ALGERGIATNSP

SEQ ID NO: 10416 - protein, 14 aa, synthetic construct
GLGEPRTGGYAYTD

SEQ ID NO: 10417 - protein, 14 aa, synthetic construct
ALWELPLYWGLYTD

SEQ ID NO: 10418 - protein, 13 aa, synthetic construct
GLGEPSYWGIHTD

SEQ ID NO: 10419 - protein, 14 aa, synthetic construct
GLGEPSYWGIHTDK

SEQ ID NO: 10420 - protein, 14 aa, synthetic construct
DLGEPRPGGYAYTD

SEQ ID NO: 10421 - protein, 13 aa, synthetic construct
ALGVTGGDTDKLI

SEQ ID NO: 10422 - protein, 14 aa, synthetic construct
ALGGPLLLGDTIDK

SEQ ID NO: 10423 - protein, 14 aa, synthetic construct
ALRELRTGGYEYTD

SEQ ID NO: 10424 - protein, 13 aa, synthetic construct
GLGEPVLGASYTD

SEQ ID NO: 10425 - protein, 14 aa, synthetic construct
GLGEPVLGASYTDK

SEQ ID NO: 10426 - protein, 12 aa, synthetic construct
ARGERGDSDNLI

SEQ ID NO: 10427 - protein, 14 aa, synthetic construct
GLGEPYVLGARSKL

SEQ ID NO: 10428 - protein, 14 aa, synthetic construct
ALRELPYWGRYTDK

SEQ ID NO: 10429 - protein, 14 aa, synthetic construct
LLGTFPTGGGTPIN

SEQ ID NO: 10430 - protein, 14 aa, synthetic construct
LLGNSGDTGPINSS

SEQ ID NO: 10431 - protein, 14 aa, synthetic construct
ALGASFLGYATDTL

SEQ ID NO: 10432 - protein, 13 aa, synthetic construct
LLGNSLCTGGCTP

SEQ ID NO: 10433 - protein, 14 aa, synthetic construct
ARGEPVLGASSTDK

SEQ ID NO: 10434 - protein, 13 aa, synthetic construct
ALGELPYWGSYTD

SEQ ID NO: 10435 - protein, 11 aa, synthetic construct
ALGELPYWGSY

SEQ ID NO: 10436 - protein, 13 aa, synthetic construct
ALGELGDTGDKLF

SEQ ID NO: 10437 - protein, 14 aa, synthetic construct
ALGEPPPYVLGDTD

SEQ ID NO: 10438 - protein, 12 aa, synthetic construct
ALGQLGDTRKLI

SEQ ID NO: 10439 - protein, 13 aa, synthetic construct
ALGELPYWGRYTG

SEQ ID NO: 10440 - protein, 14 aa, synthetic construct
ALRELLLGDPDKLI

SEQ ID NO: 10441 - protein, 13 aa, synthetic construct
ALGELGDTGDKLT

SEQ ID NO: 10442 - protein, 13 aa, synthetic construct
ALGELGDTGDKLV

SEQ ID NO: 10443 - protein, 14 aa, synthetic construct
GLGDLGGYGTDNLI

SEQ ID NO: 10444 - protein, 12 aa, synthetic construct
AFGVWGINDKLI

SEQ ID NO: 10445 - protein, 13 aa, synthetic construct
ALGELGDTGDQII

SEQ ID NO: 10446 - protein, 14 aa, synthetic construct
ALGELPTGGYAETH

SEQ ID NO: 10447 - protein, 14 aa, synthetic construct
ALWEPYVLGARSKL

SEQ ID NO: 10448 - protein, 14 aa, synthetic construct
ALGELPTGGSGYTD

SEQ ID NO: 10449 - protein, 14 aa, synthetic construct
ALGELPLGVLCTDK

SEQ ID NO: 10450 - protein, 12 aa, synthetic construct
AIGERGDSDKLI

SEQ ID NO: 10451 - protein, 13 aa, synthetic construct
ALGELGSDTDKLN

SEQ ID NO: 10452 - protein, 14 aa, synthetic construct
ALGNSYWGIQINSS

SEQ ID NO: 10453 - protein, 12 aa, synthetic construct
ALGELGTPINSS

SEQ ID NO: 10454 - protein, 12 aa, synthetic construct
ALGDLRDTEKLI

SEQ ID NO: 10455 - protein, 14 aa, synthetic construct
ALGASYAPVPDELI

SEQ ID NO: 10456 - protein, 14 aa, synthetic construct
APGDLGASYTDKLI

SEQ ID NO: 10457 - protein, 13 aa, synthetic construct
ALGELGTYTDKLI

SEQ ID NO: 10458 - protein, 12 aa, synthetic construct
ALGVWGINDTLI

SEQ ID NO: 10459 - protein, 14 aa, synthetic construct
ALGASYAPVPDKHI

SEQ ID NO: 10460 - protein, 12 aa, synthetic construct
ALGELGVTDKHI

SEQ ID NO: 10461 - protein, 13 aa, synthetic construct
ALGGLGGYADQLI

SEQ ID NO: 10462 - protein, 12 aa, synthetic construct
ALGVWGTNDKLI

SEQ ID NO: 10463 - protein, 11 aa, synthetic construct
ALGGGYSYKLI

SEQ ID NO: 10464 - protein, 12 aa, synthetic construct
ALGVWGINENLI

SEQ ID NO: 10465 - protein, 12 aa, synthetic construct
APGDRGITDKLI

SEQ ID NO: 10466 - protein, 14 aa, synthetic construct
LLGSPTYWGPVVNS

SEQ ID NO: 10467 - protein, 14 aa, synthetic construct
ALGESRTGGYAYTD

SEQ ID NO: 10468 - protein, 14 aa, synthetic construct
VLGHLPTWGSYTDK

SEQ ID NO: 10469 - protein, 10 aa, synthetic construct
ALGELGYKLI

SEQ ID NO: 10470 - protein, 14 aa, synthetic construct
ALGELPLGARSKLI

SEQ ID NO: 10471 - protein, 14 aa, synthetic construct
ALGELGYRALTAQL

SEQ ID NO: 10472 - protein, 14 aa, synthetic construct
ALGELPLGALYTDK

SEQ ID NO: 10473 - protein, 14 aa, synthetic construct
ALGEPCTGDTDNLI

SEQ ID NO: 10474 - protein, 14 aa, synthetic construct
ALGDPGGYTTDKLI

SEQ ID NO: 10475 - protein, 14 aa, synthetic construct
ALGASYAPVPDKLF

SEQ ID NO: 10476 - protein, 14 aa, synthetic construct
ALGDPSPGGYADKL

SEQ ID NO: 10477 - protein, 14 aa, synthetic construct
ALGELPLAVLYTDK

SEQ ID NO: 10478 - protein, 10 aa, synthetic construct
ALGGGYTDKL

SEQ ID NO: 10479 - protein, 11 aa, synthetic construct
ALGGGYSVKLI

SEQ ID NO: 10480 - protein, 14 aa, synthetic construct
ALGATFLGYATDKL

SEQ ID NO: 10481 - protein, 14 aa, synthetic construct
DLGETSYVISDKLI

SEQ ID NO: 10482 - protein, 12 aa, synthetic construct
ALGERRDTDKLI

SEQ ID NO: 10483 - protein, 14 aa, synthetic construct
ALGEPGGSTTEKLI

SEQ ID NO: 10484 - protein, 12 aa, synthetic construct
GVGERGITDKLI

SEQ ID NO: 10485 - protein, 13 aa, synthetic construct
ALWVLLGDTRKLI

SEQ ID NO: 10486 - protein, 11 aa, synthetic construct
ALGAVGDNKLI

SEQ ID NO: 10487 - protein, 11 aa, synthetic construct
ALGGGYSDTLI

SEQ ID NO: 10488 - protein, 13 aa, synthetic construct
ALWVTGGYTDKLI

SEQ ID NO: 10489 - protein, 11 aa, synthetic construct
ALGWGYSDKLI

SEQ ID NO: 10490 - protein, 11 aa, synthetic construct
ALGVWGINDKL

SEQ ID NO: 10491 - protein, 14 aa, synthetic construct
ALGEPCTGDSDKLI

SEQ ID NO: 10492 - protein, 14 aa, synthetic construct
ALGESSYWGIHTDK

SEQ ID NO: 10493 - protein, 12 aa, synthetic construct
ALGELGMTETLI

SEQ ID NO: 10494 - protein, 11 aa, synthetic construct
ALGGGYSEKLF

SEQ ID NO: 10495 - protein, 13 aa, synthetic construct
ALGELPLGVLYTG

SEQ ID NO: 10496 - protein, 14 aa, synthetic construct
AIGEPSYWGIHTDK

SEQ ID NO: 10497 - protein, 12 aa, synthetic construct
ALGELGMTVKLI

SEQ ID NO: 10498 - protein, 12 aa, synthetic construct
ALGELGMTYKLI

SEQ ID NO: 10499 - protein, 11 aa, synthetic construct
ALGGGYSEKLN

SEQ ID NO: 10500 - protein, 11 aa, synthetic construct
ALGGGYSETLI

SEQ ID NO: 10501 - protein, 12 aa, synthetic construct
ALGNRGIRDKLI

SEQ ID NO: 10502 - protein, 13 aa, synthetic construct
ALGHIPTWGSYTD

SEQ ID NO: 10503 - protein, 12 aa, synthetic construct
ALGELPLGVLYT

SEQ ID NO: 10504 - protein, 13 aa, synthetic construct
DLGVLLWDTRKLI

SEQ ID NO: 10505 - protein, 8 aa, synthetic construct
VLGEGKLI

SEQ ID NO: 10506 - protein, 12 aa, synthetic construct
ALGELGPPVLGV

SEQ ID NO: 10507 - protein, 14 aa, synthetic construct
ALGELGPRTPINSS

SEQ ID NO: 10508 - protein, 14 aa, synthetic construct
APGASFLGYATDKL

SEQ ID NO: 10509 - protein, 14 aa, synthetic construct
ALGASYAPVPAQLI

SEQ ID NO: 10510 - protein, 13 aa, synthetic construct
VLGELDWGRRGLI

SEQ ID NO: 10511 - protein, 13 aa, synthetic construct
ALGELPLGVLSTD

SEQ ID NO: 10512 - protein, 14 aa, synthetic construct
ALGEPCTGRYAYTD

SEQ ID NO: 10513 - protein, 7 aa, synthetic construct
ALGASYL

SEQ ID NO: 10514 - protein, 12 aa, synthetic construct
DLVERGDSDKLI

SEQ ID NO: 10515 - protein, 13 aa, synthetic construct
APGVLLGDTRKLI

SEQ ID NO: 10516 - protein, 13 aa, synthetic construct
ALGELLLGDPEKL

SEQ ID NO: 10517 - protein, 14 aa, synthetic construct
ALGESFLGYATDKL

SEQ ID NO: 10518 - protein, 12 aa, synthetic construct
ALGNWGILDKLI

SEQ ID NO: 10519 - protein, 14 aa, synthetic construct
APGEPCTGDTEKLI

SEQ ID NO: 10520 - protein, 14 aa, synthetic construct
ALGELLLGDPGKLI

SEQ ID NO: 10521 - protein, 12 aa, synthetic construct
ALGVWGMNDELI

SEQ ID NO: 10522 - protein, 14 aa, synthetic construct
ALGELLLGDPVKLI

SEQ ID NO: 10523 - protein, 14 aa, synthetic construct
ALGELLLGDPYKLI

SEQ ID NO: 10524 - protein, 14 aa, synthetic construct
APGELGGYGTDKPI

SEQ ID NO: 10525 - protein, 10 aa, synthetic construct
ALGNWGINSS

SEQ ID NO: 10526 - protein, 14 aa, synthetic construct
ALGELLTGGYEYTD

SEQ ID NO: 10527 - protein, 14 aa, synthetic construct
ALGELLLGDRALTA

SEQ ID NO: 10528 - protein, 14 aa, synthetic construct
ALGEPCTGDTIDKL

SEQ ID NO: 10529 - protein, 10 aa, synthetic construct
ALGGLGDKLI

SEQ ID NO: 10530 - protein, 14 aa, synthetic construct
ALGELLLGDTPINS

SEQ ID NO: 10531 - protein, 14 aa, synthetic construct
ALGELLLGDTPTPI

SEQ ID NO: 10532 - protein, 13 aa, synthetic construct
APGELRWGRRGLI

SEQ ID NO: 10533 - protein, 14 aa, synthetic construct
APGELRWGPYTDKL

SEQ ID NO: 10534 - protein, 14 aa, synthetic construct
ALGASYAPVPVKLI

SEQ ID NO: 10535 - protein, 11 aa, synthetic construct
ALGDLRGLGLN

SEQ ID NO: 10536 - protein, 14 aa, synthetic construct
ALGEPCTGDTQLLG

SEQ ID NO: 10537 - protein, 14 aa, synthetic construct
ALGELLLGIPINSS

SEQ ID NO: 10538 - protein, 13 aa, synthetic construct
ALGNWGIPAINSS

SEQ ID NO: 10539 - protein, 13 aa, synthetic construct
APGELGWGRRGLI

SEQ ID NO: 10540 - protein, 13 aa, synthetic construct
ALGELLLGPQGTH

SEQ ID NO: 10541 - protein, 11 aa, synthetic construct
APGELRGLGLI

SEQ ID NO: 10542 - protein, 11 aa, synthetic construct
ALGGVYSDKLI

SEQ ID NO: 10543 - protein, 14 aa, synthetic construct
APGELLLGDPDKLV

SEQ ID NO: 10544 - protein, 14 aa, synthetic construct
ALGASYAPVPETLI

SEQ ID NO: 10545 - protein, 14 aa, synthetic construct
ALGASYAPVPDNLI

SEQ ID NO: 10546 - protein, 14 aa, synthetic construct
ALGELLLGDPDNLI

SEQ ID NO: 10547 - protein, 13 aa, synthetic construct
ALGEPCTGDTYKL

SEQ ID NO: 10548 - protein, 11 aa, synthetic construct
ALGERSSYVLG

SEQ ID NO: 10549 - protein, 14 aa, synthetic construct
ALGHHPTWGSYTDK

SEQ ID NO: 10550 - protein, 14 aa, synthetic construct
ALGEPCTGGYTPIN

SEQ ID NO: 10551 - protein, 14 aa, synthetic construct
ALGELHTGGFGSTD

SEQ ID NO: 10552 - protein, 11 aa, synthetic construct
ALGGGYYDKHI

SEQ ID NO: 10553 - protein, 14 aa, synthetic construct
ALGELPIGGFGYTD

SEQ ID NO: 10554 - protein, 14 aa, synthetic construct
ALGDPGPGDTDKLI

SEQ ID NO: 10555 - protein, 11 aa, synthetic construct
ALGGGYYDKII

SEQ ID NO: 10556 - protein, 9 aa, synthetic construct
ALGVWGKLI

SEQ ID NO: 10557 - protein, 11 aa, synthetic construct
ALGGGYYDKLN

SEQ ID NO: 10558 - protein, 14 aa, synthetic construct
ALGELPFYWGLYTD

SEQ ID NO: 10559 - protein, 11 aa, synthetic construct
ALGNVGDNKLI

SEQ ID NO: 10560 - protein, 14 aa, synthetic construct
ALGGYWGGPLTAQL

SEQ ID NO: 10561 - protein, 10 aa, synthetic construct
APGELGDKLI

SEQ ID NO: 10562 - protein, 12 aa, synthetic construct
ALGVWGLNDKLI

SEQ ID NO: 10563 - protein, 13 aa, synthetic construct
APGEPGGYTDKLI

SEQ ID NO: 10564 - protein, 11 aa, synthetic construct
ALGGGYYEKLI

SEQ ID NO: 10565 - protein, 8 aa, synthetic construct
ALGELLLG

SEQ ID NO: 10566 - protein, 6 aa, synthetic construct
ALGELP

SEQ ID NO: 10567 - protein, 14 aa, synthetic construct
APGEPVLGASYTDK

SEQ ID NO: 10568 - protein, 13 aa, synthetic construct
ALGASYEPVPDKL

SEQ ID NO: 10569 - protein, 14 aa, synthetic construct
APGEPSTGGYADKL

SEQ ID NO: 10570 - protein, 13 aa, synthetic construct
ALGERSSYVLGDK

SEQ ID NO: 10571 - protein, 14 aa, synthetic construct
APGEPRPGGYAYTD

SEQ ID NO: 10572 - protein, 12 aa, synthetic construct
APGELGDTDKLI

SEQ ID NO: 10573 - protein, 14 aa, synthetic construct
ALGELLLGDPDILI

SEQ ID NO: 10574 - protein, 12 aa, synthetic construct
ALGDPRDTDKLI

SEQ ID NO: 10575 - protein, 14 aa, synthetic construct
ALGDPGTGDTEKLI

SEQ ID NO: 10576 - protein, 14 aa, synthetic construct
ALGASYEPVPDKII

SEQ ID NO: 10577 - protein, 11 aa, synthetic construct
ALGGGYSDKVI

SEQ ID NO: 10578 - protein, 11 aa, synthetic construct
ALGELGMTDKL

SEQ ID NO: 10579 - protein, 14 aa, synthetic construct
ALGASYAPDPDKII

SEQ ID NO: 10580 - protein, 14 aa, synthetic construct
ALGDETGAYTDKLI

SEQ ID NO: 10581 - protein, 13 aa, synthetic construct
ALGEPGGYTDKLV

SEQ ID NO: 10582 - protein, 14 aa, synthetic construct
AIGHLPTWGSYTDK

SEQ ID NO: 10583 - protein, 14 aa, synthetic construct
ALGELPSYWGLYTD

SEQ ID NO: 10584 - protein, 11 aa, synthetic construct
ARGEAYTEKLI

SEQ ID NO: 10585 - protein, 11 aa, synthetic construct
ALEELYTDKLI

SEQ ID NO: 10586 - protein, 14 aa, synthetic construct
ALGELPSWGRSTDK

SEQ ID NO: 10587 - protein, 14 aa, synthetic construct
ALGELPRGVLYTDK

SEQ ID NO: 10588 - protein, 13 aa, synthetic construct
ALGDETGGYTDKL

SEQ ID NO: 10589 - protein, 12 aa, synthetic construct
ALGERGITGKLI

SEQ ID NO: 10590 - protein, 14 aa, synthetic construct
ALWETSYGISDKLI

SEQ ID NO: 10591 - protein, 9 aa, synthetic construct
ALGGGYSDK

SEQ ID NO: 10592 - protein, 10 aa, synthetic construct
ALGELGGYSS

SEQ ID NO: 10593 - protein, 11 aa, synthetic construct
ARGDVGENKLI

SEQ ID NO: 10594 - protein, 13 aa, synthetic construct
ALGELGGYTEKLI

SEQ ID NO: 10595 - protein, 11 aa, synthetic construct
ARGDVGDNKLN

SEQ ID NO: 10596 - protein, 13 aa, synthetic construct
ALGEPGGYSDKLI

SEQ ID NO: 10597 - protein, 12 aa, synthetic construct
ALGELGHTDKLI

SEQ ID NO: 10598 - protein, 12 aa, synthetic construct
ALGDLRATDKLI

SEQ ID NO: 10599 - protein, 14 aa, synthetic construct
AIGEPGGYNTDKLI

SEQ ID NO: 10600 - protein, 9 aa, synthetic construct
ALGELPPGG

SEQ ID NO: 10601 - protein, 14 aa, synthetic construct
ALGDETGGSTEKLI

SEQ ID NO: 10602 - protein, 12 aa, synthetic construct
ARGDRGDSDKLI

SEQ ID NO: 10603 - protein, 12 aa, synthetic construct
ALGELGIFDKLI

SEQ ID NO: 10604 - protein, 14 aa, synthetic construct
ALGDETGGSTDKLI

SEQ ID NO: 10605 - protein, 14 aa, synthetic construct
ALGELGILSSWDTR

SEQ ID NO: 10606 - protein, 13 aa, synthetic construct
ALGEPGGYNTRQM

SEQ ID NO: 10607 - protein, 13 aa, synthetic construct
ALGELGIPAINSS

SEQ ID NO: 10608 - protein, 14 aa, synthetic construct
ALGEPGGYNTNKLI

SEQ ID NO: 10609 - protein, 13 aa, synthetic construct
ALGVVLGDTRNLI

SEQ ID NO: 10610 - protein, 14 aa, synthetic construct
GLGRYWGGPLTAQL

SEQ ID NO: 10611 - protein, 14 aa, synthetic construct
ALGHLPAWGSYTDK

SEQ ID NO: 10612 - protein, 14 aa, synthetic construct
PLGEPYVLGARSKL

SEQ ID NO: 10613 - protein, 14 aa, synthetic construct
ALGDHGGYNTDKLI

SEQ ID NO: 10614 - protein, 14 aa, synthetic construct
ALGELPTGGLGYTD

SEQ ID NO: 10615 - protein, 14 aa, synthetic construct
ALGELPTGGGTPIN

SEQ ID NO: 10616 - protein, 12 aa, synthetic construct
ALGDIGDTDKLI

SEQ ID NO: 10617 - protein, 14 aa, synthetic construct
ALGDRPSYWGRYTD

SEQ ID NO: 10618 - protein, 13 aa, synthetic construct
ARGELGADTDKLI

SEQ ID NO: 10619 - protein, 10 aa, synthetic construct
ALGEVGDKLI

SEQ ID NO: 10620 - protein, 14 aa, synthetic construct
ALGELPTGGFGDTD

SEQ ID NO: 10621 - protein, 14 aa, synthetic construct
ALGELGGYATDKLI

SEQ ID NO: 10622 - protein, 14 aa, synthetic construct
ALGGPCQEDGTDKL

SEQ ID NO: 10623 - protein, 13 aa, synthetic construct
ALGELGGYAVKLI

SEQ ID NO: 10624 - protein, 14 aa, synthetic construct
ALGEPGGYYTDKLI

SEQ ID NO: 10625 - protein, 13 aa, synthetic construct
DLGEVGGYADKLI

SEQ ID NO: 10626 - protein, 13 aa, synthetic construct
ALGEVGGYADQLI

SEQ ID NO: 10627 - protein, 8 aa, synthetic construct
ARGEGKLI

SEQ ID NO: 10628 - protein, 12 aa, synthetic construct
ALRDLGDTDKLI

SEQ ID NO: 10629 - protein, 11 aa, synthetic construct
VLGDVGDNKLI

SEQ ID NO: 10630 - protein, 12 aa, synthetic construct
ALGDGGITDKLI

SEQ ID NO: 10631 - protein, 12 aa, synthetic construct
ALGERGITDRLI

SEQ ID NO: 10632 - protein, 13 aa, synthetic construct
ALGEPGGYTDTLI

SEQ ID NO: 10633 - protein, 14 aa, synthetic construct
ALGELGGYGSDKLI

SEQ ID NO: 10634 - protein, 9 aa, synthetic construct
GLGGTEKLI

SEQ ID NO: 10635 - protein, 11 aa, synthetic construct
ALGELGGYGTD

SEQ ID NO: 10636 - protein, 12 aa, synthetic construct
ALGDRGLTDKLI

SEQ ID NO: 10637 - protein, 14 aa, synthetic construct
ALGNPSYWGIRSIN

SEQ ID NO: 10638 - protein, 14 aa, synthetic construct
GLGHLPTWGSYTDK

SEQ ID NO: 10639 - protein, 11 aa, synthetic construct
ALGVVGDNKLI

SEQ ID NO: 10640 - protein, 14 aa, synthetic construct
ALGELGGYGTDKLF

SEQ ID NO: 10641 - protein, 12 aa, synthetic construct
ALGDRGITDTLI

SEQ ID NO: 10642 - protein, 11 aa, synthetic construct
ALGGGYSDKIF

SEQ ID NO: 10643 - protein, 13 aa, synthetic construct
AIGEPGGYTDKLI

SEQ ID NO: 10644 - protein, 13 aa, synthetic construct
ALGELPLRVLYTD

SEQ ID NO: 10645 - protein, 11 aa, synthetic construct
ALWGGYYDKLI

SEQ ID NO: 10646 - protein, 11 aa, synthetic construct
ALGDAYTDKLI

SEQ ID NO: 10647 - protein, 13 aa, synthetic construct
ARGDLGGYADQLI

SEQ ID NO: 10648 - protein, 12 aa, synthetic construct
ALGERGRTEKLI

SEQ ID NO: 10649 - protein, 14 aa, synthetic construct
ALWHLPTWGSYTDK

SEQ ID NO: 10650 - protein, 11 aa, synthetic construct
ALGGGYSDKLL

SEQ ID NO: 10651 - protein, 12 aa, synthetic construct
ALGERGTPINSS

SEQ ID NO: 10652 - protein, 14 aa, synthetic construct
ALGEPGGYNNDKLI

SEQ ID NO: 10653 - protein, 12 aa, synthetic construct
ALGQLRIFDKLI

SEQ ID NO: 10654 - protein, 14 aa, synthetic construct
ALGASYALVPDKLI

SEQ ID NO: 10655 - protein, 14 aa, synthetic construct
ALGEPGGYKTEKLI

SEQ ID NO: 10656 - protein, 14 aa, synthetic construct
ALGGLPTGGFGYTD

SEQ ID NO: 10657 - protein, 11 aa, synthetic construct
ALGVWGIINSS

SEQ ID NO: 10658 - protein, 12 aa, synthetic construct
ALWNWGIRDKLI

SEQ ID NO: 10659 - protein, 6 aa, synthetic construct
GLGVWG

SEQ ID NO: 10660 - protein, 12 aa, synthetic construct
ARGDLGDTDQLI

SEQ ID NO: 10661 - protein, 12 aa, synthetic construct
ALGERGTTDKLI

SEQ ID NO: 10662 - protein, 9 aa, synthetic construct
ALGRTDKLI

SEQ ID NO: 10663 - protein, 12 aa, synthetic construct
ALGELGMIDKLI

SEQ ID NO: 10664 - protein, 14 aa, synthetic construct
ALGELPLWVLYTDK

SEQ ID NO: 10665 - protein, 13 aa, synthetic construct
ARGDLGADTDKLI

SEQ ID NO: 10666 - protein, 13 aa, synthetic construct
PLGSYWGIRGNSS

SEQ ID NO: 10667 - protein, 14 aa, synthetic construct
ALGEPCTGDIPINS

SEQ ID NO: 10668 - protein, 13 aa, synthetic construct
LLGSYWGIRGHSS

SEQ ID NO: 10669 - protein, 12 aa, synthetic construct
ALGDLRDTDKLF

SEQ ID NO: 10670 - protein, 14 aa, synthetic construct
ALGEPCTGDNDKLI

SEQ ID NO: 10671 - protein, 12 aa, synthetic construct
DLGTWGIRDKLI

SEQ ID NO: 10672 - protein, 12 aa, synthetic construct
ALGERGYSDKII

SEQ ID NO: 10673 - protein, 12 aa, synthetic construct
ALGVWGINDEII

SEQ ID NO: 10674 - protein, 12 aa, synthetic construct
ALGVWGINDELF

SEQ ID NO: 10675 - protein, 14 aa, synthetic construct
ALGELPLYWGLCTD

SEQ ID NO: 10676 - protein, 12 aa, synthetic construct
ALGVWGIHDKLI

SEQ ID NO: 10677 - protein, 13 aa, synthetic construct
ALGELGIYTVKLI

SEQ ID NO: 10678 - protein, 9 aa, synthetic construct
DLGGTDKLN

SEQ ID NO: 10679 - protein, 12 aa, synthetic construct
ALGELGITDILI

SEQ ID NO: 10680 - protein, 14 aa, synthetic construct
AIGEETGGYTDKLI

SEQ ID NO: 10681 - protein, 14 aa, synthetic construct
ALGETCTGDTDKLI

SEQ ID NO: 10682 - protein, 14 aa, synthetic construct
ALGELPMGVLSTDK

SEQ ID NO: 10683 - protein, 13 aa, synthetic construct
ALGELGIYADKLI

SEQ ID NO: 10684 - protein, 14 aa, synthetic construct
ALGDESGGYTDKLI

SEQ ID NO: 10685 - protein, 13 aa, synthetic construct
ALGELGIYIDKLI

SEQ ID NO: 10686 - protein, 12 aa, synthetic construct
ALGERGKTDKLI

SEQ ID NO: 10687 - protein, 13 aa, synthetic construct
ALGELGIYTDHLI

SEQ ID NO: 10688 - protein, 13 aa, synthetic construct
ALGELGIYTDKHI

SEQ ID NO: 10689 - protein, 6 aa, synthetic construct
ALGVWG

SEQ ID NO: 10690 - protein, 12 aa, synthetic construct
ALGELGIYTDKL

SEQ ID NO: 10691 - protein, 14 aa, synthetic construct
ALGGLRTGGYEYTD

SEQ ID NO: 10692 - protein, 14 aa, synthetic construct
ALGEPGGYNTDKVI

SEQ ID NO: 10693 - protein, 7 aa, synthetic construct
ALGASYA

SEQ ID NO: 10694 - protein, 13 aa, synthetic construct
ALGELGIYTDKLT

SEQ ID NO: 10695 - protein, 12 aa, synthetic construct
ALGERGLTDKLI

SEQ ID NO: 10696 - protein, 13 aa, synthetic construct
ALGEPGGYNTDKV

SEQ ID NO: 10697 - protein, 14 aa, synthetic construct
ALGELPLYWRLYTD

SEQ ID NO: 10698 - protein, 14 aa, synthetic construct
ALWHIPTWGSYTDK

SEQ ID NO: 10699 - protein, 14 aa, synthetic construct
ALGEPCSGDTDKLI

SEQ ID NO: 10700 - protein, 14 aa, synthetic construct
ALGASSAPVPDKLI

SEQ ID NO: 10701 - protein, 14 aa, synthetic construct
ALGASSLGYATDKL

SEQ ID NO: 10702 - protein, 11 aa, synthetic construct
ALGYLGDNKLI

SEQ ID NO: 10703 - protein, 10 aa, synthetic construct
ALGALGDKLI

SEQ ID NO: 10704 - protein, 10 aa, synthetic construct
ALGGGYSDKL

SEQ ID NO: 10705 - protein, 12 aa, synthetic construct
ALGERGRPDKLI

SEQ ID NO: 10706 - protein, 14 aa, synthetic construct
ALGNQVLGDTRINS

SEQ ID NO: 10707 - protein, 14 aa, synthetic construct
ALGASFIGYSTDKL

SEQ ID NO: 10708 - protein, 11 aa, synthetic construct
ARGGGDSDKLI

SEQ ID NO: 10709 - protein, 14 aa, synthetic construct
ALGEPSYWWIHTDK

SEQ ID NO: 10710 - protein, 13 aa, synthetic construct
ALGKLGGYADKLI

SEQ ID NO: 10711 - protein, 11 aa, synthetic construct
ALAGGYSDKLI

SEQ ID NO: 10712 - protein, 10 aa, synthetic construct
ALGVLGDKLI

SEQ ID NO: 10713 - protein, 13 aa, synthetic construct
ALGKLGDTGDKLI

SEQ ID NO: 10714 - protein, 8 aa, synthetic construct
ALGEGKLS

SEQ ID NO: 10715 - protein, 12 aa, synthetic construct
ALGDLGMTDKLL

SEQ ID NO: 10716 - protein, 8 aa, synthetic construct
ALGEGKPI

SEQ ID NO: 10717 - protein, 12 aa, synthetic construct
DIGELGMTDKLI

SEQ ID NO: 10718 - protein, 13 aa, synthetic construct
ALGVLGDTGDKLI

SEQ ID NO: 10719 - protein, 10 aa, synthetic construct
ALGKLGDKLI

SEQ ID NO: 10720 - protein, 8 aa, synthetic construct
ALGEGNII

SEQ ID NO: 10721 - protein, 10 aa, synthetic construct
DIGELGDKLI

SEQ ID NO: 10722 - protein, 14 aa, synthetic construct
ALGELRTGGYQYTD

SEQ ID NO: 10723 - protein, 13 aa, synthetic construct
GLGELDWGRRGLI

SEQ ID NO: 10724 - protein, 8 aa, synthetic construct
DIGEGKLI

SEQ ID NO: 10725 - protein, 13 aa, synthetic construct
ALGKLGADTDKLI

SEQ ID NO: 10726 - protein, 13 aa, synthetic construct
ALGELRTGGYEYT

SEQ ID NO: 10727 - protein, 13 aa, synthetic construct
ALGEVGGYAAKLI

SEQ ID NO: 10728 - protein, 14 aa, synthetic construct
ALGAPFLGYATDKL

SEQ ID NO: 10729 - protein, 11 aa, synthetic construct
ALGEGYSDKLI

SEQ ID NO: 10730 - protein, 12 aa, synthetic construct
ALGDLGMSDKLI

SEQ ID NO: 10731 - protein, 12 aa, synthetic construct
ALGDLGMADKLI

SEQ ID NO: 10732 - protein, 13 aa, synthetic construct
ALGVLLADTRKLI

SEQ ID NO: 10733 - protein, 14 aa, synthetic construct
ALGAPGGYNTDKLI

SEQ ID NO: 10734 - protein, 11 aa, synthetic construct
ALGDVRDNKLI

SEQ ID NO: 10735 - protein, 13 aa, synthetic construct
ALGEPVLGASSTD

SEQ ID NO: 10736 - protein, 14 aa, synthetic construct
ALGEPVLGASNTEK

SEQ ID NO: 10737 - protein, 14 aa, synthetic construct
ALGELRTGGYDKLI

SEQ ID NO: 10738 - protein, 8 aa, synthetic construct
ALGEGKHN

SEQ ID NO: 10739 - protein, 14 aa, synthetic construct
VLGELPLYWGLYTD

SEQ ID NO: 10740 - protein, 14 aa, synthetic construct
ALGDVLLGDPDKLI

SEQ ID NO: 10741 - protein, 13 aa, synthetic construct
ALGVLDWGRRGLI

SEQ ID NO: 10742 - protein, 14 aa, synthetic construct
ALGEETWGYTDKLI

SEQ ID NO: 10743 - protein, 14 aa, synthetic construct
ALVEPVLGASYTDK

SEQ ID NO: 10744 - protein, 11 aa, synthetic construct
ALGGRTPINSS

SEQ ID NO: 10745 - protein, 12 aa, synthetic construct
ALGDLGMTDTLI

SEQ ID NO: 10746 - protein, 12 aa, synthetic construct
ALGDWGIRDKLI

SEQ ID NO: 10747 - protein, 12 aa, synthetic construct
ALGDWGINDKLI

SEQ ID NO: 10748 - protein, 11 aa, synthetic construct
ALGEFLPRGLI

SEQ ID NO: 10749 - protein, 14 aa, synthetic construct
ALGEFLPRGYSAPG

SEQ ID NO: 10750 - protein, 14 aa, synthetic construct
ALGELRWGPHTDKL

SEQ ID NO: 10751 - protein, 14 aa, synthetic construct
ALGEFPLGVLYTDK

SEQ ID NO: 10752 - protein, 14 aa, synthetic construct
TLGEPRTGGYAYTD

SEQ ID NO: 10753 - protein, 14 aa, synthetic construct
ALGEFPYWGRYTDK

SEQ ID NO: 10754 - protein, 11 aa, synthetic construct
ALGEFYTDKLI

SEQ ID NO: 10755 - protein, 14 aa, synthetic construct
ALGALRWGPYTDKL

SEQ ID NO: 10756 - protein, 8 aa, synthetic construct
ALGEGDLI

SEQ ID NO: 10757 - protein, 8 aa, synthetic construct
ALGEGELI

SEQ ID NO: 10758 - protein, 12 aa, synthetic construct
ALGNWRIRDKLI

SEQ ID NO: 10759 - protein, 12 aa, synthetic construct
ALGERGDRDKVI

SEQ ID NO: 10760 - protein, 13 aa, synthetic construct
ALGELRWGIINSS

SEQ ID NO: 10761 - protein, 12 aa, synthetic construct
ALGELRVTDKLI

SEQ ID NO: 10762 - protein, 12 aa, synthetic construct
LLGRGGIAINSS

SEQ ID NO: 10763 - protein, 12 aa, synthetic construct
ALGNWGIREKLI

SEQ ID NO: 10764 - protein, 14 aa, synthetic construct
ALGKLGGYGTDKLI

SEQ ID NO: 10765 - protein, 11 aa, synthetic construct
ALGELYADKLI

SEQ ID NO: 10766 - protein, 12 aa, synthetic construct
ALGDLGMTDNLI

SEQ ID NO: 10767 - protein, 14 aa, synthetic construct
ALVETSYGISDKLI

SEQ ID NO: 10768 - protein, 12 aa, synthetic construct
LLGNCGVPINSS

SEQ ID NO: 10769 - protein, 14 aa, synthetic construct
ALGEPVLGASCTDK

SEQ ID NO: 10770 - protein, 14 aa, synthetic construct
ALGGPYQEDGTDNL

SEQ ID NO: 10771 - protein, 13 aa, synthetic construct
ALGEPSYWGIGTH

SEQ ID NO: 10772 - protein, 14 aa, synthetic construct
ALGEIGGYGTDKII

SEQ ID NO: 10773 - protein, 12 aa, synthetic construct
TLGELRIFDKLI

SEQ ID NO: 10774 - protein, 11 aa, synthetic construct
ALGELYTDKLY

SEQ ID NO: 10775 - protein, 14 aa, synthetic construct
ALGVLLGDTNTDKL

SEQ ID NO: 10776 - protein, 14 aa, synthetic construct
AIGELPLGVLYTDK

SEQ ID NO: 10777 - protein, 14 aa, synthetic construct
ALEEETGGYTDKLI

SEQ ID NO: 10778 - protein, 13 aa, synthetic construct
ALGVLLGDTPKLI

SEQ ID NO: 10779 - protein, 12 aa, synthetic construct
ALGEIGMTDNLI

SEQ ID NO: 10780 - protein, 14 aa, synthetic construct
ALGELRRGPYTDKL

SEQ ID NO: 10781 - protein, 12 aa, synthetic construct
ALGDLRIFDKLN

SEQ ID NO: 10782 - protein, 14 aa, synthetic construct
ALGEPSYWGIRTDK

SEQ ID NO: 10783 - protein, 11 aa, synthetic construct
ALGELYTDNSS

SEQ ID NO: 10784 - protein, 14 aa, synthetic construct
ALGEPSYWGIRGNS

SEQ ID NO: 10785 - protein, 14 aa, synthetic construct
ALGEILLGDTGGHR

SEQ ID NO: 10786 - protein, 14 aa, synthetic construct
ALGEVLLGDPEKLI

SEQ ID NO: 10787 - protein, 14 aa, synthetic construct
ALGEPSYWGINDKL

SEQ ID NO: 10788 - protein, 11 aa, synthetic construct
ALGDLYADKLI

SEQ ID NO: 10789 - protein, 14 aa, synthetic construct
AVGEPPSYVLGDTD

SEQ ID NO: 10790 - protein, 14 aa, synthetic construct
ALGEVLVGDPDKLI

SEQ ID NO: 10791 - protein, 14 aa, synthetic construct
ALGEIPLYWGMYTD

SEQ ID NO: 10792 - protein, 14 aa, synthetic construct
AVGEPCTGDTDKLI

SEQ ID NO: 10793 - protein, 11 aa, synthetic construct
AVGELYTDKLI

SEQ ID NO: 10794 - protein, 14 aa, synthetic construct
ALGEIPNGGYGKLI

SEQ ID NO: 10795 - protein, 14 aa, synthetic construct
AVGELRWGPYTDKL

SEQ ID NO: 10796 - protein, 12 aa, synthetic construct
AHGERGDSDKLI

SEQ ID NO: 10797 - protein, 14 aa, synthetic construct
ALGEIPPGGYGKLI

SEQ ID NO: 10798 - protein, 13 aa, synthetic construct
ALGETSYGISEKL

SEQ ID NO: 10799 - protein, 14 aa, synthetic construct
LLGKLPTGSPRNSS

SEQ ID NO: 10800 - protein, 13 aa, synthetic construct
ALGEIGGYSDKLI

SEQ ID NO: 10801 - protein, 11 aa, synthetic construct
ALGELYTDKLV

SEQ ID NO: 10802 - protein, 14 aa, synthetic construct
ALGKETGGYTDKLI

SEQ ID NO: 10803 - protein, 12 aa, synthetic construct
ALGDLGITDKLI

SEQ ID NO: 10804 - protein, 14 aa, synthetic construct
ALGPLPTWGSYADK

SEQ ID NO: 10805 - protein, 14 aa, synthetic construct
ALGEHLLGDPDKLI

SEQ ID NO: 10806 - protein, 14 aa, synthetic construct
ALGRYWGPRTPRNS

SEQ ID NO: 10807 - protein, 14 aa, synthetic construct
AIGELGGYGTDKLI

SEQ ID NO: 10808 - protein, 14 aa, synthetic construct
ALGEPTYWGIHTDK

SEQ ID NO: 10809 - protein, 14 aa, synthetic construct
ALGELRTGEYGYTD

SEQ ID NO: 10810 - protein, 14 aa, synthetic construct
ALGEHRTGGYEYTD

SEQ ID NO: 10811 - protein, 12 aa, synthetic construct
ALGERGDSDILI

SEQ ID NO: 10812 - protein, 13 aa, synthetic construct
LLGTLGDTPINSS

SEQ ID NO: 10813 - protein, 13 aa, synthetic construct
ALGVLLGDPDKLI

SEQ ID NO: 10814 - protein, 11 aa, synthetic construct
VLGELYTDKLI

SEQ ID NO: 10815 - protein, 9 aa, synthetic construct
ALGEPSYWR

SEQ ID NO: 10816 - protein, 14 aa, synthetic construct
ALGEPSYWGYTPIN

SEQ ID NO: 10817 - protein, 9 aa, synthetic construct
AVGGTEKLI

SEQ ID NO: 10818 - protein, 13 aa, synthetic construct
ALGDLGIYTDKLF

SEQ ID NO: 10819 - protein, 14 aa, synthetic construct
TLGELRTGGYEYTD

SEQ ID NO: 10820 - protein, 14 aa, synthetic construct
GLGDPPSYVLGDTD

SEQ ID NO: 10821 - protein, 14 aa, synthetic construct
ALGVLLGDRALTAQ

SEQ ID NO: 10822 - protein, 8 aa, synthetic construct
ALGEVKVI

SEQ ID NO: 10823 - protein, 14 aa, synthetic construct
ALGEPSYWGSCTPI

SEQ ID NO: 10824 - protein, 14 aa, synthetic construct
ALGEHYVLGARSKL

SEQ ID NO: 10825 - protein, 13 aa, synthetic construct
ALGAPGGYTDKLI

SEQ ID NO: 10826 - protein, 13 aa, synthetic construct
ALGDLGIYTDKHI

SEQ ID NO: 10827 - protein, 14 aa, synthetic construct
ALGETSYGISSKLI

SEQ ID NO: 10828 - protein, 14 aa, synthetic construct
ALGELRTEGYEYTD

SEQ ID NO: 10829 - protein, 14 aa, synthetic construct
TLGGPYQEDGTDKL

SEQ ID NO: 10830 - protein, 13 aa, synthetic construct
ALGEIGGYADKII

SEQ ID NO: 10831 - protein, 12 aa, synthetic construct
ALGEVGMTAKLI

SEQ ID NO: 10832 - protein, 14 aa, synthetic construct
ALVEPSYWGIHTDK

SEQ ID NO: 10833 - protein, 14 aa, synthetic construct
ALGEPYTGDTDKLI

SEQ ID NO: 10834 - protein, 14 aa, synthetic construct
LLGTSLCTGGCTPI

SEQ ID NO: 10835 - protein, 12 aa, synthetic construct
ALGDLRSVDQLI

SEQ ID NO: 10836 - protein, 11 aa, synthetic construct
ALGEAYTNKLI

SEQ ID NO: 10837 - protein, 14 aa, synthetic construct
ALGDLRTGGYESTD

SEQ ID NO: 10838 - protein, 14 aa, synthetic construct
ALVELPLGVLYTDK

SEQ ID NO: 10839 - protein, 12 aa, synthetic construct
DLGELGDTDKHI

SEQ ID NO: 10840 - protein, 12 aa, synthetic construct
ALGEQRDTDKLI

SEQ ID NO: 10841 - protein, 12 aa, synthetic construct
DLGELGDSDKLI

SEQ ID NO: 10842 - protein, 11 aa, synthetic construct
ALGDLHTDKLI

SEQ ID NO: 10843 - protein, 12 aa, synthetic construct
ALGTWGIRDKII

SEQ ID NO: 10844 - protein, 13 aa, synthetic construct
ALGEVGGYGTDKL

SEQ ID NO: 10845 - protein, 14 aa, synthetic construct
TLGETSYGISDKLI

SEQ ID NO: 10846 - protein, 12 aa, synthetic construct
ALGDLGYTDKLI

SEQ ID NO: 10847 - protein, 12 aa, synthetic construct
ALGTWGIRDNLI

SEQ ID NO: 10848 - protein, 13 aa, synthetic construct
DLGELGADTDKLN

SEQ ID NO: 10849 - protein, 13 aa, synthetic construct
ALVELDWGRRGLI

SEQ ID NO: 10850 - protein, 14 aa, synthetic construct
ALGELSTWGITDKL

SEQ ID NO: 10851 - protein, 12 aa, synthetic construct
ALGDLGVTDKLI

SEQ ID NO: 10852 - protein, 13 aa, synthetic construct
ALGTWGYTPINSS

SEQ ID NO: 10853 - protein, 14 aa, synthetic construct
DLGEILLGDPDKLI

SEQ ID NO: 10854 - protein, 14 aa, synthetic construct
LLGTLPTGGYTPIN

SEQ ID NO: 10855 - protein, 13 aa, synthetic construct
ALGVAGGYTDKLI

SEQ ID NO: 10856 - protein, 11 aa, synthetic construct
ALVELRGLGLI

SEQ ID NO: 10857 - protein, 14 aa, synthetic construct
ALGEPYVVGARSKL

SEQ ID NO: 10858 - protein, 12 aa, synthetic construct
ALGNWGTPINSS

SEQ ID NO: 10859 - protein, 14 aa, synthetic construct
ALGEEPGGYTDKLI

SEQ ID NO: 10860 - protein, 14 aa, synthetic construct
ALGEPYVRGARSKL

SEQ ID NO: 10861 - protein, 14 aa, synthetic construct
ALGKPSTGGYADKL

SEQ ID NO: 10862 - protein, 12 aa, synthetic construct
ALGERADSDKLI

SEQ ID NO: 10863 - protein, 14 aa, synthetic construct
ALGTSFLGYATDKL

SEQ ID NO: 10864 - protein, 12 aa, synthetic construct
ALGALGMTEKLI

SEQ ID NO: 10865 - protein, 14 aa, synthetic construct
ALGETSYWGIHTDK

SEQ ID NO: 10866 - protein, 13 aa, synthetic construct
ALGEVGGYADTLI

SEQ ID NO: 10867 - protein, 13 aa, synthetic construct
ALGEVGGYAEKLI

SEQ ID NO: 10868 - protein, 13 aa, synthetic construct
ALGELVGYADKII

SEQ ID NO: 10869 - protein, 10 aa, synthetic construct
ALVELGDKLI

SEQ ID NO: 10870 - protein, 12 aa, synthetic construct
ALGNWGLRDKLI

SEQ ID NO: 10871 - protein, 14 aa, synthetic construct
LLGTPSYWGIRSIN

SEQ ID NO: 10872 - protein, 13 aa, synthetic construct
GLGDVGGYADKLI

SEQ ID NO: 10873 - protein, 13 aa, synthetic construct
DLGELGGYADKLV

SEQ ID NO: 10874 - protein, 12 aa, synthetic construct
ALGKRGITDKLI

SEQ ID NO: 10875 - protein, 13 aa, synthetic construct
ALGNWGLYTDKLI

SEQ ID NO: 10876 - protein, 14 aa, synthetic construct
ALGDLLLGDPDNLI

SEQ ID NO: 10877 - protein, 14 aa, synthetic construct
ALVELGASYTDKLI

SEQ ID NO: 10878 - protein, 14 aa, synthetic construct
ALGGPYQVDGTDKL

SEQ ID NO: 10879 - protein, 13 aa, synthetic construct
ALGELVADTDKLI

SEQ ID NO: 10880 - protein, 14 aa, synthetic construct
ALGGPYQKDGTDKL

SEQ ID NO: 10881 - protein, 13 aa, synthetic construct
ALVELGGYADQLI

SEQ ID NO: 10882 - protein, 11 aa, synthetic construct
ALGELTPINSS

SEQ ID NO: 10883 - protein, 12 aa, synthetic construct
ALGDLRMFDKLI

SEQ ID NO: 10884 - protein, 11 aa, synthetic construct
ALGEAYTDKLS

SEQ ID NO: 10885 - protein, 11 aa, synthetic construct
ALGEAYTDKLT

SEQ ID NO: 10886 - protein, 13 aa, synthetic construct
ALGEVGGYAVKLI

SEQ ID NO: 10887 - protein, 11 aa, synthetic construct
ALGEAYTDKLY

SEQ ID NO: 10888 - protein, 13 aa, synthetic construct
ALGDLLLGDPDKL

SEQ ID NO: 10889 - protein, 11 aa, synthetic construct
ALGEAYTDKVI

SEQ ID NO: 10890 - protein, 11 aa, synthetic construct
ALGEASTEKLI

SEQ ID NO: 10891 - protein, 12 aa, synthetic construct
ALGKRGDSDKLI

SEQ ID NO: 10892 - protein, 14 aa, synthetic construct
ALVELGGYGTDKLI

SEQ ID NO: 10893 - protein, 14 aa, synthetic construct
ALGEPYVQGARSKL

SEQ ID NO: 10894 - protein, 14 aa, synthetic construct
ALGEPYVPGARSKL

SEQ ID NO: 10895 - protein, 12 aa, synthetic construct
ALGVCGINDKLI

SEQ ID NO: 10896 - protein, 14 aa, synthetic construct
ALGGPYWGRYTDKL

SEQ ID NO: 10897 - protein, 14 aa, synthetic construct
ALGEPYVLGDNKLI

SEQ ID NO: 10898 - protein, 14 aa, synthetic construct
ALGDLPGDMETDKL

SEQ ID NO: 10899 - protein, 12 aa, synthetic construct
ALGERGDGDKLI

SEQ ID NO: 10900 - protein, 14 aa, synthetic construct
ALGGPYQEEGTDKL

SEQ ID NO: 10901 - protein, 12 aa, synthetic construct
ALGNWGVRDKLI

SEQ ID NO: 10902 - protein, 14 aa, synthetic construct
ALGEETGGYTDNLI

SEQ ID NO: 10903 - protein, 14 aa, synthetic construct
ALGEPYVLGARSNS

SEQ ID NO: 10904 - protein, 14 aa, synthetic construct
ALGELWGYGTDKLI

SEQ ID NO: 10905 - protein, 14 aa, synthetic construct
ALVEPGGYNTDKLI

SEQ ID NO: 10906 - protein, 14 aa, synthetic construct
ALGDLRWGPSTDKL

SEQ ID NO: 10907 - protein, 12 aa, synthetic construct
ALGELWIFDKLI

SEQ ID NO: 10908 - protein, 12 aa, synthetic construct
ALGERGDPDKLI

SEQ ID NO: 10909 - protein, 14 aa, synthetic construct
ALGERGDRALTAQL

SEQ ID NO: 10910 - protein, 14 aa, synthetic construct
VLGELLLGDPDKLI

SEQ ID NO: 10911 - protein, 13 aa, synthetic construct
ALVEPGGYTDKLI

SEQ ID NO: 10912 - protein, 14 aa, synthetic construct
DLGASFIGYATDKL

SEQ ID NO: 10913 - protein, 14 aa, synthetic construct
ALGEETGGYTPINS

SEQ ID NO: 10914 - protein, 14 aa, synthetic construct
ALGEETGGYTVKLI

SEQ ID NO: 10915 - protein, 14 aa, synthetic construct
ALAGPYQEDGTDKL

SEQ ID NO: 10916 - protein, 14 aa, synthetic construct
ALGEPYVLGAHSKL

SEQ ID NO: 10917 - protein, 14 aa, synthetic construct
ALGELRWGPYTDIL

SEQ ID NO: 10918 - protein, 14 aa, synthetic construct
ALGELRWGPYTDEL

SEQ ID NO: 10919 - protein, 14 aa, synthetic construct
ALGEPYVLGACSKL

SEQ ID NO: 10920 - protein, 12 aa, synthetic construct
ALGELRWGPYTD

SEQ ID NO: 10921 - protein, 13 aa, synthetic construct
ELGVTGGYTDKLI

SEQ ID NO: 10922 - protein, 14 aa, synthetic construct
ALGGPYQEDVTDKL

SEQ ID NO: 10923 - protein, 14 aa, synthetic construct
ALGALRTGGYEYTD

SEQ ID NO: 10924 - protein, 13 aa, synthetic construct
ALGELWGYADKLI

SEQ ID NO: 10925 - protein, 11 aa, synthetic construct
ALGALRGLGLI

SEQ ID NO: 10926 - protein, 14 aa, synthetic construct
ALGEPYVLGDRSKL

SEQ ID NO: 10927 - protein, 14 aa, synthetic construct
ALGEETGGHTDKLI

SEQ ID NO: 10928 - protein, 14 aa, synthetic construct
ALGEVGGYGTEKLI

SEQ ID NO: 10929 - protein, 10 aa, synthetic construct
LLGTWGINSS

SEQ ID NO: 10930 - protein, 12 aa, synthetic construct
DLGEGGITDKLI

SEQ ID NO: 10931 - protein, 14 aa, synthetic construct
ALGEVGGYGTVKLI

SEQ ID NO: 10932 - protein, 14 aa, synthetic construct
ALGEETEGYTDKLI

SEQ ID NO: 10933 - protein, 13 aa, synthetic construct
ALGEETGAVGDSS

SEQ ID NO: 10934 - protein, 14 aa, synthetic construct
ALGEETGAYTDKLI

SEQ ID NO: 10935 - protein, 14 aa, synthetic construct
DLGEETGGYADKLI

SEQ ID NO: 10936 - protein, 14 aa, synthetic construct
ALGEETGDTPINSS

SEQ ID NO: 10937 - protein, 13 aa, synthetic construct
DLGELGSDTDKLI

SEQ ID NO: 10938 - protein, 14 aa, synthetic construct
ALGEPYVLGVLYTD

SEQ ID NO: 10939 - protein, 14 aa, synthetic construct
ALGEETGGCTPINS

SEQ ID NO: 10940 - protein, 14 aa, synthetic construct
GLGEETGGYTDKLI

SEQ ID NO: 10941 - protein, 11 aa, synthetic construct
ALGEETGGYTD

SEQ ID NO: 10942 - protein, 11 aa, synthetic construct
ALGELSGLGLI

SEQ ID NO: 10943 - protein, 14 aa, synthetic construct
ALGKLRTGGYEYTD

SEQ ID NO: 10944 - protein, 14 aa, synthetic construct
ALGEPYVLGPVVNS

SEQ ID NO: 10945 - protein, 14 aa, synthetic construct
ALVELYWGILRSWD

SEQ ID NO: 10946 - protein, 14 aa, synthetic construct
ALGEPYVLGIPINS

SEQ ID NO: 10947 - protein, 14 aa, synthetic construct
ALGEPYVLGGSFDS

SEQ ID NO: 10948 - protein, 11 aa, synthetic construct
ALGSAYTDKLI

SEQ ID NO: 10949 - protein, 8 aa, synthetic construct
ALGVGKLI

SEQ ID NO: 10950 - protein, 14 aa, synthetic construct
ALGEETGGYNDKLI

SEQ ID NO: 10951 - protein, 11 aa, synthetic construct
LLGNFTPRNSS

SEQ ID NO: 10952 - protein, 13 aa, synthetic construct
DLGDLDWGRRGLI

SEQ ID NO: 10953 - protein, 14 aa, synthetic construct
ALGEPYVLGDTPIN

SEQ ID NO: 10954 - protein, 14 aa, synthetic construct
ALGEIPTGGFGYTD

SEQ ID NO: 10955 - protein, 14 aa, synthetic construct
ALGDPKRDTSTDQL

SEQ ID NO: 10956 - protein, 11 aa, synthetic construct
AVGEAYTDKLI

SEQ ID NO: 10957 - protein, 14 aa, synthetic construct
ALGEPRTGGYATDK

SEQ ID NO: 10958 - protein, 13 aa, synthetic construct
ALGELGADIDKLI

SEQ ID NO: 10959 - protein, 14 aa, synthetic construct
ALGAPYVLGARSKL

SEQ ID NO: 10960 - protein, 11 aa, synthetic construct
ALGDVGGHKLI

SEQ ID NO: 10961 - protein, 13 aa, synthetic construct
ALGEPSTGGYADK

SEQ ID NO: 10962 - protein, 14 aa, synthetic construct
AVGEETGGYTDKLI

SEQ ID NO: 10963 - protein, 14 aa, synthetic construct
ALGEPRTGVYAYTD

SEQ ID NO: 10964 - protein, 13 aa, synthetic construct
ALGELGADTGKLI

SEQ ID NO: 10965 - protein, 11 aa, synthetic construct
ALGELRGLGII

SEQ ID NO: 10966 - protein, 14 aa, synthetic construct
ALGELYWGMLSSWD

SEQ ID NO: 10967 - protein, 14 aa, synthetic construct
ALGDLPMYWGLYTD

SEQ ID NO: 10968 - protein, 14 aa, synthetic construct
ALGEPRTGGYVYTD

SEQ ID NO: 10969 - protein, 12 aa, synthetic construct
ALGEVRDTDKLI

SEQ ID NO: 10970 - protein, 14 aa, synthetic construct
ALGELGASYADKLI

SEQ ID NO: 10971 - protein, 12 aa, synthetic construct
ALGNWGIRDKLT

SEQ ID NO: 10972 - protein, 12 aa, synthetic construct
ALGNWGIRDKLF

SEQ ID NO: 10973 - protein, 14 aa, synthetic construct
ALGDLGGSGTDKLI

SEQ ID NO: 10974 - protein, 7 aa, synthetic construct
ALGELGA

SEQ ID NO: 10975 - protein, 12 aa, synthetic construct
ALGDVGDTRKLI

SEQ ID NO: 10976 - protein, 12 aa, synthetic construct
ALGELRIFAKLI

SEQ ID NO: 10977 - protein, 14 aa, synthetic construct
ALGEPRTGGYACTD

SEQ ID NO: 10978 - protein, 14 aa, synthetic construct
ALGEPSTGGYAHKL

SEQ ID NO: 10979 - protein, 14 aa, synthetic construct
ALGELCWGILSSWD

SEQ ID NO: 10980 - protein, 11 aa, synthetic construct
ALGDVGDNRLI

SEQ ID NO: 10981 - protein, 14 aa, synthetic construct
ALWELGASYTDKLI

SEQ ID NO: 10982 - protein, 12 aa, synthetic construct
VLGVWGINDKLI

SEQ ID NO: 10983 - protein, 12 aa, synthetic construct
ALAELAMTDKLI

SEQ ID NO: 10984 - protein, 12 aa, synthetic construct
ALGELRHTDKLI

SEQ ID NO: 10985 - protein, 12 aa, synthetic construct
ALGNWGIRDKPI

SEQ ID NO: 10986 - protein, 13 aa, synthetic construct
ALGELGADTDILI

SEQ ID NO: 10987 - protein, 13 aa, synthetic construct
ALGDLGGYADKLT

SEQ ID NO: 10988 - protein, 14 aa, synthetic construct
AHGDVGDTTPINSS

SEQ ID NO: 10989 - protein, 13 aa, synthetic construct
ALGDLGGSADKLI

SEQ ID NO: 10990 - protein, 14 aa, synthetic construct
ALGELYWGPRTPIN

SEQ ID NO: 10991 - protein, 14 aa, synthetic construct
ALGGPSYWGIHTDK

SEQ ID NO: 10992 - protein, 13 aa, synthetic construct
ALGDVGGSADQLI

SEQ ID NO: 10993 - protein, 9 aa, synthetic construct
ALGGTDELI

SEQ ID NO: 10994 - protein, 13 aa, synthetic construct
ALGDLGGSADNLI

SEQ ID NO: 10995 - protein, 11 aa, synthetic construct
ALGELRGLGLT

SEQ ID NO: 10996 - protein, 14 aa, synthetic construct
GLGDLRPGGYEYTD

SEQ ID NO: 10997 - protein, 14 aa, synthetic construct
ALGEPRTGGDAYTD

SEQ ID NO: 10998 - protein, 14 aa, synthetic construct
ALGDLPNGGFGYTD

SEQ ID NO: 10999 - protein, 13 aa, synthetic construct
ALGELGADTVKLI

SEQ ID NO: 11000 - protein, 12 aa, synthetic construct
ALGELGAPINSS

SEQ ID NO: 11001 - protein, 11 aa, synthetic construct
AVGDVGDNKLI

SEQ ID NO: 11002 - protein, 12 aa, synthetic construct
AHGVWGINDKLI

SEQ ID NO: 11003 - protein, 11 aa, synthetic construct
ALGDVGEKKLI

SEQ ID NO: 11004 - protein, 14 aa, synthetic construct
VLGELPYWGRYTDK

SEQ ID NO: 11005 - protein, 12 aa, synthetic construct
ALGELRIFDKLS

SEQ ID NO: 11006 - protein, 14 aa, synthetic construct
ALGELDWGYADKLI

SEQ ID NO: 11007 - protein, 11 aa, synthetic construct
ALWDVGDNKLF

SEQ ID NO: 11008 - protein, 14 aa, synthetic construct
ALGGPYKEDCTDKL

SEQ ID NO: 11009 - protein, 14 aa, synthetic construct
ALGELYWGISDKLI

SEQ ID NO: 11010 - protein, 13 aa, synthetic construct
ALGELDWSRRGLI

SEQ ID NO: 11011 - protein, 13 aa, synthetic construct
ALGDLGGDADKLI

SEQ ID NO: 11012 - protein, 12 aa, synthetic construct
VLGELRIFDKLI

SEQ ID NO: 11013 - protein, 14 aa, synthetic construct
ALGHLPTYWGPVVN

SEQ ID NO: 11014 - protein, 14 aa, synthetic construct
ALGGPYPEDGTDKL

SEQ ID NO: 11015 - protein, 13 aa, synthetic construct
ALGELEADTDKLI

SEQ ID NO: 11016 - protein, 11 aa, synthetic construct
ALGDVGETILI

SEQ ID NO: 11017 - protein, 11 aa, synthetic construct
ALGELRGLGRI

SEQ ID NO: 11018 - protein, 14 aa, synthetic construct
LLGISTGGPTPINS

SEQ ID NO: 11019 - protein, 14 aa, synthetic construct
ALGELGASCTDKLI

SEQ ID NO: 11020 - protein, 12 aa, synthetic construct
ALGELRIFDNSS

SEQ ID NO: 11021 - protein, 11 aa, synthetic construct
ALGELRGLGLV

SEQ ID NO: 11022 - protein, 12 aa, synthetic construct
ALGDLGDTRKLI

SEQ ID NO: 11023 - protein, 14 aa, synthetic construct
ALGEPSTGGSADKL

SEQ ID NO: 11024 - protein, 14 aa, synthetic construct
ALGGPYQEDATDKL

SEQ ID NO: 11025 - protein, 12 aa, synthetic construct
LLGTGGYGINSS

SEQ ID NO: 11026 - protein, 11 aa, synthetic construct
ALGDMGDNKLI

SEQ ID NO: 11027 - protein, 14 aa, synthetic construct
ALGDLGDTTPINSS

SEQ ID NO: 11028 - protein, 14 aa, synthetic construct
ALGGPYQEAGTDKL

SEQ ID NO: 11029 - protein, 14 aa, synthetic construct
ALGNFPTGRGTPIN

SEQ ID NO: 11030 - protein, 12 aa, synthetic construct
GLGDLRIFDKLI

SEQ ID NO: 11031 - protein, 14 aa, synthetic construct
ALGDLGGSGTEKLI

SEQ ID NO: 11032 - protein, 12 aa, synthetic construct
ALGELRIFDNII

SEQ ID NO: 11033 - protein, 12 aa, synthetic construct
ALGNWGIRDKLN

SEQ ID NO: 11034 - protein, 14 aa, synthetic construct
ALGEPSTGGCADKL

SEQ ID NO: 11035 - protein, 14 aa, synthetic construct
ALGASCAPVPDKLI

SEQ ID NO: 11036 - protein, 14 aa, synthetic construct
ALRHLPTWGSYTDK

SEQ ID NO: 11037 - protein, 9 aa, synthetic construct
ALGGSDKLI

SEQ ID NO: 11038 - protein, 13 aa, synthetic construct
ALGDVGGTPINSS

SEQ ID NO: 11039 - protein, 11 aa, synthetic construct
LLGGDIPIISS

SEQ ID NO: 11040 - protein, 13 aa, synthetic construct
AFGELDWGRRGLI

SEQ ID NO: 11041 - protein, 13 aa, synthetic construct
ALGHLPTWGSSTD

SEQ ID NO: 11042 - protein, 13 aa, synthetic construct
ARGVLLGDTRNLI

SEQ ID NO: 11043 - protein, 12 aa, synthetic construct
ALGETSYGISDK

SEQ ID NO: 11044 - protein, 14 aa, synthetic construct
ALGEVPLYWGLYTD

SEQ ID NO: 11045 - protein, 12 aa, synthetic construct
AHGELGMTDKLI

SEQ ID NO: 11046 - protein, 12 aa, synthetic construct
AVGELGMTDQLI

SEQ ID NO: 11047 - protein, 14 aa, synthetic construct
ALGRYWGLTPINSS

SEQ ID NO: 11048 - protein, 14 aa, synthetic construct
ALGELGASYTETLI

SEQ ID NO: 11049 - protein, 12 aa, synthetic construct
ALGELRGYAETH

SEQ ID NO: 11050 - protein, 14 aa, synthetic construct
ALGDLGGYGTDELI

SEQ ID NO: 11051 - protein, 13 aa, synthetic construct
ALGVQLGDTRKLI

SEQ ID NO: 11052 - protein, 13 aa, synthetic construct
ALGDMGADTDKLI

SEQ ID NO: 11053 - protein, 14 aa, synthetic construct
ALGHLPTWGSYTYK

SEQ ID NO: 11054 - protein, 13 aa, synthetic construct
AVGELGIYTDKLI

SEQ ID NO: 11055 - protein, 13 aa, synthetic construct
ALGELGADTEKII

SEQ ID NO: 11056 - protein, 13 aa, synthetic construct
ALGELGADTDKLF

SEQ ID NO: 11057 - protein, 14 aa, synthetic construct
ALGEPRTAGYAYTD

SEQ ID NO: 11058 - protein, 11 aa, synthetic construct
LLGGGYSDKLI

SEQ ID NO: 11059 - protein, 14 aa, synthetic construct
ALGELGASYTNKLI

SEQ ID NO: 11060 - protein, 10 aa, synthetic construct
ALGDLYTDKL

SEQ ID NO: 11061 - protein, 11 aa, synthetic construct
ALGDVGDNKVI

SEQ ID NO: 11062 - protein, 11 aa, synthetic construct
AFGEAYTDKLI

SEQ ID NO: 11063 - protein, 13 aa, synthetic construct
ALWEIGGYADKLI

SEQ ID NO: 11064 - protein, 14 aa, synthetic construct
GLGELYWGILSSWD

SEQ ID NO: 11065 - protein, 13 aa, synthetic construct
ALGVRGGYTDKLI

SEQ ID NO: 11066 - protein, 11 aa, synthetic construct
ALGEIRGLGLI

SEQ ID NO: 11067 - protein, 12 aa, synthetic construct
ALGELRMTDRLI

SEQ ID NO: 11068 - protein, 11 aa, synthetic construct
ALGVLYTDKLI

SEQ ID NO: 11069 - protein, 14 aa, synthetic construct
ALGEPSYSGIHTDK

SEQ ID NO: 11070 - protein, 14 aa, synthetic construct
LSGNFFLGDTNDKL

SEQ ID NO: 11071 - protein, 13 aa, synthetic construct
ALGELGADTDRLI

SEQ ID NO: 11072 - protein, 14 aa, synthetic construct
ALGGPYQEDGPDKL

SEQ ID NO: 11073 - protein, 12 aa, synthetic construct
ALGVRGDSDKLI

SEQ ID NO: 11074 - protein, 14 aa, synthetic construct
AVGELPLGVLYTDK

SEQ ID NO: 11075 - protein, 14 aa, synthetic construct
ALGEIRNGGYEYTD

SEQ ID NO: 11076 - protein, 14 aa, synthetic construct
ALGAETGGYTDKLI

SEQ ID NO: 11077 - protein, 14 aa, synthetic construct
ALGETSYGISDILI

SEQ ID NO: 11078 - protein, 13 aa, synthetic construct
ALGVLLGDTRKLT

SEQ ID NO: 11079 - protein, 14 aa, synthetic construct
LLGKKLGDTPRNSS

SEQ ID NO: 11080 - protein, 14 aa, synthetic construct
TLGELPLGVLYTDK

SEQ ID NO: 11081 - protein, 13 aa, synthetic construct
ALGDVGGYADNLI

SEQ ID NO: 11082 - protein, 14 aa, synthetic construct
ALGDLGGYGSDKLI

SEQ ID NO: 11083 - protein, 12 aa, synthetic construct
ALGELAMTDKLI

SEQ ID NO: 11084 - protein, 13 aa, synthetic construct
ALGELGADTDKLM

SEQ ID NO: 11085 - protein, 12 aa, synthetic construct
TLGELGMTDKLI

SEQ ID NO: 11086 - protein, 10 aa, synthetic construct
AVGELGDKLI

SEQ ID NO: 11087 - protein, 13 aa, synthetic construct
TLGELGIYTDKLI

SEQ ID NO: 11088 - protein, 14 aa, synthetic construct
ALGEVPTGGYGYTD

SEQ ID NO: 11089 - protein, 14 aa, synthetic construct
ALGHLPTWGSYSDK

SEQ ID NO: 11090 - protein, 14 aa, synthetic construct
AVGELGASYTDKLI

SEQ ID NO: 11091 - protein, 12 aa, synthetic construct
ALGERGESDQLI

SEQ ID NO: 11092 - protein, 14 aa, synthetic construct
ALVASFIGYATDKL

SEQ ID NO: 11093 - protein, 9 aa, synthetic construct
ALGEPSVLG

SEQ ID NO: 11094 - protein, 13 aa, synthetic construct
DLGEPGGYTDKLI

SEQ ID NO: 11095 - protein, 13 aa, synthetic construct
DLGELVGYADKLI

SEQ ID NO: 11096 - protein, 13 aa, synthetic construct
ALGELGADTDKLL

SEQ ID NO: 11097 - protein, 14 aa, synthetic construct
AIGELPLYWGLYTD

SEQ ID NO: 11098 - protein, 9 aa, synthetic construct
ALGGTDILF

SEQ ID NO: 11099 - protein, 14 aa, synthetic construct
VLGELPTGGFGYTD

SEQ ID NO: 11100 - protein, 11 aa, synthetic construct
ALGRYWGINSS

SEQ ID NO: 11101 - protein, 14 aa, synthetic construct
ALGGSYQEDGTDKL

SEQ ID NO: 11102 - protein, 13 aa, synthetic construct
ALAELGGYADKLI

SEQ ID NO: 11103 - protein, 13 aa, synthetic construct
AFGELGGYADKLI

SEQ ID NO: 11104 - protein, 14 aa, synthetic construct
ALGELGASYTDRLI

SEQ ID NO: 11105 - protein, 13 aa, synthetic construct
ALGELGADTDKLT

SEQ ID NO: 11106 - protein, 14 aa, synthetic construct
ALGHPSSDTRPINS

SEQ ID NO: 11107 - protein, 14 aa, synthetic construct
ALGVPYQEDGTDKL

SEQ ID NO: 11108 - protein, 14 aa, synthetic construct
ALWELGDRALTAQL

SEQ ID NO: 11109 - protein, 13 aa, synthetic construct
ARGVTGGYTDKLI

SEQ ID NO: 11110 - protein, 14 aa, synthetic construct
ALGETSYGISDKHI

SEQ ID NO: 11111 - protein, 12 aa, synthetic construct
AVGELGDTDTLI

SEQ ID NO: 11112 - protein, 14 aa, synthetic construct
VLGHLPTWGSYTYK

SEQ ID NO: 11113 - protein, 14 aa, synthetic construct
ALGGTYQEDGTDKL

SEQ ID NO: 11114 - protein, 12 aa, synthetic construct
ALGGRGITEKLI

SEQ ID NO: 11115 - protein, 12 aa, synthetic construct
ALVEIGMTDKLI

SEQ ID NO: 11116 - protein, 14 aa, synthetic construct
YHVEHSIWGIHTDK

SEQ ID NO: 11117 - protein, 12 aa, synthetic construct
ALRHLPTWGSNT

SEQ ID NO: 11118 - protein, 9 aa, synthetic construct
ALRELYTEN

SEQ ID NO: 11119 - protein, 14 aa, synthetic construct
ALVEIPTGGFGYTD

SEQ ID NO: 11120 - protein, 13 aa, synthetic construct
ALGQLDWGRRALI

SEQ ID NO: 11121 - protein, 12 aa, synthetic construct
ALGVWGVNDELI

SEQ ID NO: 11122 - protein, 14 aa, synthetic construct
ALVEHGGYNTDKLI

SEQ ID NO: 11123 - protein, 13 aa, synthetic construct
VLGELGGYADHLI

SEQ ID NO: 11124 - protein, 14 aa, synthetic construct
ALVEIPLYCGLYTD

SEQ ID NO: 11125 - protein, 10 aa, synthetic construct
SLVELGDKLI

SEQ ID NO: 11126 - protein, 11 aa, synthetic construct
ALGGVGDHKLI

SEQ ID NO: 11127 - protein, 14 aa, synthetic construct
ALRHLPTWGSNTEK

SEQ ID NO: 11128 - protein, 13 aa, synthetic construct
ALREPCTGDTDKL

SEQ ID NO: 11129 - protein, 14 aa, synthetic construct
ALREPCTGDTDKLI

SEQ ID NO: 11130 - protein, 11 aa, synthetic construct
ALGVWGTPINS

SEQ ID NO: 11131 - protein, 13 aa, synthetic construct
ALREPELGAAYTD

SEQ ID NO: 11132 - protein, 14 aa, synthetic construct
ALGGTSYGISDKLI

SEQ ID NO: 11133 - protein, 13 aa, synthetic construct
ALVEHGGSNTDQL

SEQ ID NO: 11134 - protein, 8 aa, synthetic construct
ALGQLYTD

SEQ ID NO: 11135 - protein, 7 aa, synthetic construct
SLGHLPT

SEQ ID NO: 11136 - protein, 8 aa, synthetic construct
ALVEIRDN

SEQ ID NO: 11137 - protein, 13 aa, synthetic construct
ALGGVGGYADKLI

SEQ ID NO: 11138 - protein, 9 aa, synthetic construct
ALGGTDRLF

SEQ ID NO: 11139 - protein, 13 aa, synthetic construct
ALVELGADTDKII

SEQ ID NO: 11140 - protein, 13 aa, synthetic construct
ALGQPPSYGLGDT

SEQ ID NO: 11141 - protein, 13 aa, synthetic construct
ALVELGADTDKVI

SEQ ID NO: 11142 - protein, 13 aa, synthetic construct
ALGVWGRYTDKLI

SEQ ID NO: 11143 - protein, 14 aa, synthetic construct
ALGGPYVLGSRSKL

SEQ ID NO: 11144 - protein, 11 aa, synthetic construct
ALRGGYYDKLI

SEQ ID NO: 11145 - protein, 11 aa, synthetic construct
ALRGGYSDKLS

SEQ ID NO: 11146 - protein, 11 aa, synthetic construct
ALVELGADTEK

SEQ ID NO: 11147 - protein, 13 aa, synthetic construct
ALGVWGRTPLNSS

SEQ ID NO: 11148 - protein, 9 aa, synthetic construct
ALGGTDKNI

SEQ ID NO: 11149 - protein, 13 aa, synthetic construct
ALGVWGRTPINSS

SEQ ID NO: 11150 - protein, 13 aa, synthetic construct
ALVELGADTYKLI

SEQ ID NO: 11151 - protein, 14 aa, synthetic construct
VLGRYWGGPLTAQL

SEQ ID NO: 11152 - protein, 10 aa, synthetic construct
ALRETSYVLG

SEQ ID NO: 11153 - protein, 14 aa, synthetic construct
ALGNWGSCTPINSS

SEQ ID NO: 11154 - protein, 11 aa, synthetic construct
ALGNWGITDKL

SEQ ID NO: 11155 - protein, 14 aa, synthetic construct
ALGPSYAPVPDKII

SEQ ID NO: 11156 - protein, 9 aa, synthetic construct
ALGGTDLLI

SEQ ID NO: 11157 - protein, 12 aa, synthetic construct
ALGNWGIQINSS

SEQ ID NO: 11158 - protein, 14 aa, synthetic construct
ALGQPPSYVLGDTD

SEQ ID NO: 11159 - protein, 13 aa, synthetic construct
ALRFILGDTRKTI

SEQ ID NO: 11160 - protein, 9 aa, synthetic construct
ALGGTDNRI

SEQ ID NO: 11161 - protein, 9 aa, synthetic construct
ALGGTDNLN

SEQ ID NO: 11162 - protein, 14 aa, synthetic construct
ALVELGASYTDTLI

SEQ ID NO: 11163 - protein, 12 aa, synthetic construct
ALVELGDNDKLI

SEQ ID NO: 11164 - protein, 12 aa, synthetic construct
ALGVWGRQDKLI

SEQ ID NO: 11165 - protein, 9 aa, synthetic construct
ALGGVPSWG

SEQ ID NO: 11166 - protein, 12 aa, synthetic construct
ALGVWGRNDTLI

SEQ ID NO: 11167 - protein, 12 aa, synthetic construct
ALGVWGRNDQLI

SEQ ID NO: 11168 - protein, 11 aa, synthetic construct
ALGNWGIRDKL

SEQ ID NO: 11169 - protein, 14 aa, synthetic construct
ALRGPYQEDCTDKL

SEQ ID NO: 11170 - protein, 13 aa, synthetic construct
ALREPGGYTDKLI

SEQ ID NO: 11171 - protein, 12 aa, synthetic construct
ALGNWGIRDILI

SEQ ID NO: 11172 - protein, 13 aa, synthetic construct
SLVEPVLAALSKH

SEQ ID NO: 11173 - protein, 14 aa, synthetic construct
ALREPVLGASYTEK

SEQ ID NO: 11174 - protein, 12 aa, synthetic construct
ALGNWGIRVKLI

SEQ ID NO: 11175 - protein, 14 aa, synthetic construct
ALREPYVLGARSKL

SEQ ID NO: 11176 - protein, 8 aa, synthetic construct
ALGQGKLI

SEQ ID NO: 11177 - protein, 11 aa, synthetic construct
ALGQLYTDKLI

SEQ ID NO: 11178 - protein, 12 aa, synthetic construct
ALGVWGSIDKLI

SEQ ID NO: 11179 - protein, 14 aa, synthetic construct
ALGQNRTGGYEYTD

SEQ ID NO: 11180 - protein, 12 aa, synthetic construct
ALVEIRIIDKLI

SEQ ID NO: 11181 - protein, 14 aa, synthetic construct
ALRGTAFLRFGGHR

SEQ ID NO: 11182 - protein, 12 aa, synthetic construct
ALVEIRILDKLI

SEQ ID NO: 11183 - protein, 14 aa, synthetic construct
ALGQEPGGYTDKLI

SEQ ID NO: 11184 - protein, 12 aa, synthetic construct
ALRERGDSDKLI

SEQ ID NO: 11185 - protein, 14 aa, synthetic construct
ALGQPALGASNTDK

SEQ ID NO: 11186 - protein, 14 aa, synthetic construct
ALGPSYAPVPDKLI

SEQ ID NO: 11187 - protein, 7 aa, synthetic construct
SLVVPYK

SEQ ID NO: 11188 - protein, 14 aa, synthetic construct
ALRGPYQEDGTEKL

SEQ ID NO: 11189 - protein, 14 aa, synthetic construct
ALGQLRTGGSEYTD

SEQ ID NO: 11190 - protein, 12 aa, synthetic construct
ALRERGITDTLI

SEQ ID NO: 11191 - protein, 14 aa, synthetic construct
ALVELCWGILSSWD

SEQ ID NO: 11192 - protein, 14 aa, synthetic construct
ALGGPYWGIQINSS

SEQ ID NO: 11193 - protein, 14 aa, synthetic construct
SLGTTILGYANNKL

SEQ ID NO: 11194 - protein, 14 aa, synthetic construct
ALGGTDKLSSWDTR

SEQ ID NO: 11195 - protein, 12 aa, synthetic construct
ALGGVGDTDKLI

SEQ ID NO: 11196 - protein, 14 aa, synthetic construct
ALGQPGGSNTDKLI

SEQ ID NO: 11197 - protein, 14 aa, synthetic construct
ALVELDWGRSGPIN

SEQ ID NO: 11198 - protein, 14 aa, synthetic construct
ALGVWGSCTPINSS

SEQ ID NO: 11199 - protein, 13 aa, synthetic construct
ALGPSYAPVPDKL

SEQ ID NO: 11200 - protein, 12 aa, synthetic construct
ALVELEMTDKLN

SEQ ID NO: 11201 - protein, 13 aa, synthetic construct
ALGGVGDTGDKLI

SEQ ID NO: 11202 - protein, 14 aa, synthetic construct
ALVEHCPGDTDKLI

SEQ ID NO: 11203 - protein, 14 aa, synthetic construct
ALRVLLGDTPINSS

SEQ ID NO: 11204 - protein, 10 aa, synthetic construct
ALGGTPFVLG

SEQ ID NO: 11205 - protein, 13 aa, synthetic construct
SLGVILGYTRKLI

SEQ ID NO: 11206 - protein, 10 aa, synthetic construct
VVGEPCPGDT

SEQ ID NO: 11207 - protein, 14 aa, synthetic construct
ALRASFLGYATDIL

SEQ ID NO: 11208 - protein, 13 aa, synthetic construct
ALSEPPSYVLWDT

SEQ ID NO: 11209 - protein, 14 aa, synthetic construct
ALSEPSTGGYADKL

SEQ ID NO: 11210 - protein, 14 aa, synthetic construct
SLGEPGGYNTDKLI

SEQ ID NO: 11211 - protein, 13 aa, synthetic construct
ALGGTGGDTDKLI

SEQ ID NO: 11212 - protein, 14 aa, synthetic construct
SLGEPPSYVLGDTD

SEQ ID NO: 11213 - protein, 14 aa, synthetic construct
ALGPLPTWRSYTDK

SEQ ID NO: 11214 - protein, 14 aa, synthetic construct
ALGPLPTWGSYTEK

SEQ ID NO: 11215 - protein, 13 aa, synthetic construct
ALRELDWGRRRLI

SEQ ID NO: 11216 - protein, 14 aa, synthetic construct
ALSEPSYWGIHTDK

SEQ ID NO: 11217 - protein, 14 aa, synthetic construct
SLGETSYGISDKLI

SEQ ID NO: 11218 - protein, 14 aa, synthetic construct
ALSHLPKWWSYTDK

SEQ ID NO: 11219 - protein, 14 aa, synthetic construct
ALVAPYAPVPDKLI

SEQ ID NO: 11220 - protein, 13 aa, synthetic construct
ALRDLGGYADKLI

SEQ ID NO: 11221 - protein, 14 aa, synthetic construct
ALGQLPPWGSYTDK

SEQ ID NO: 11222 - protein, 14 aa, synthetic construct
VVGKFRPGGGRPIN

SEQ ID NO: 11223 - protein, 14 aa, synthetic construct
ALVDPGGYNSDKLI

SEQ ID NO: 11224 - protein, 10 aa, synthetic construct
ALRELGDKLI

SEQ ID NO: 11225 - protein, 14 aa, synthetic construct
ALSEENTAYTQKLI

SEQ ID NO: 11226 - protein, 10 aa, synthetic construct
ALGGTGGYTD

SEQ ID NO: 11227 - protein, 5 aa, synthetic construct
WNKCC

SEQ ID NO: 11228 - protein, 11 aa, synthetic construct
ALLEAYTDKLN

SEQ ID NO: 11229 - protein, 12 aa, synthetic construct
ALLELGMTDKLI

SEQ ID NO: 11230 - protein, 11 aa, synthetic construct
ALVDVGDKKLI

SEQ ID NO: 11231 - protein, 12 aa, synthetic construct
ALRVWGINDKLI

SEQ ID NO: 11232 - protein, 14 aa, synthetic construct
ALLEPRTGGYAYTD

SEQ ID NO: 11233 - protein, 12 aa, synthetic construct
ALLERGITDKNI

SEQ ID NO: 11234 - protein, 8 aa, synthetic construct
ALLEVKLI

SEQ ID NO: 11235 - protein, 12 aa, synthetic construct
ALPIFPISNNFF

SEQ ID NO: 11236 - protein, 9 aa, synthetic construct
ALVDVATGG

SEQ ID NO: 11237 - protein, 9 aa, synthetic construct
ALGGTEKLN

SEQ ID NO: 11238 - protein, 13 aa, synthetic construct
ALGGTGGDTEKLI

SEQ ID NO: 11239 - protein, 9 aa, synthetic construct
ALGPLHTWG

SEQ ID NO: 11240 - protein, 14 aa, synthetic construct
ALVDSYAPVPDKLI

SEQ ID NO: 11241 - protein, 12 aa, synthetic construct
ALRDLGITDKLI

SEQ ID NO: 11242 - protein, 13 aa, synthetic construct
ALRELAADTHKNI

SEQ ID NO: 11243 - protein, 9 aa, synthetic construct
ALGVYHKIL

SEQ ID NO: 11244 - protein, 13 aa, synthetic construct
ALGGTGGDTAKLI

SEQ ID NO: 11245 - protein, 13 aa, synthetic construct
ALVASYAPVPDKL

SEQ ID NO: 11246 - protein, 13 aa, synthetic construct
ALGQLGIYTDKLY

SEQ ID NO: 11247 - protein, 14 aa, synthetic construct
ALREHGGYNTDKLI

SEQ ID NO: 11248 - protein, 12 aa, synthetic construct
ALGNWGIRDKVI

SEQ ID NO: 11249 - protein, 14 aa, synthetic construct
ALVDLGASYTDQVI

SEQ ID NO: 11250 - protein, 13 aa, synthetic construct
ALVDLGADTDKLI

SEQ ID NO: 11251 - protein, 12 aa, synthetic construct
ALGQLGMTEKLI

SEQ ID NO: 11252 - protein, 12 aa, synthetic construct
ALGQLGMTDQLI

SEQ ID NO: 11253 - protein, 10 aa, synthetic construct
ALVDLRDKLI

SEQ ID NO: 11254 - protein, 14 aa, synthetic construct
ALVASYEPVPDKLI

SEQ ID NO: 11255 - protein, 12 aa, synthetic construct
VRGALEHTDKLF

SEQ ID NO: 11256 - protein, 14 aa, synthetic construct
ALGGRYQEDGTAKL

SEQ ID NO: 11257 - protein, 12 aa, synthetic construct
ALGGTGDTDKLI

SEQ ID NO: 11258 - protein, 14 aa, synthetic construct
ALREETGGYTDKHI

SEQ ID NO: 11259 - protein, 13 aa, synthetic construct
VLGELGADTEKLI

SEQ ID NO: 11260 - protein, 14 aa, synthetic construct
ALVDETGGYTEKLI

SEQ ID NO: 11261 - protein, 12 aa, synthetic construct
ALVDLGDTGDKL

SEQ ID NO: 11262 - protein, 13 aa, synthetic construct
ALVDLGGYSDQLI

SEQ ID NO: 11263 - protein, 9 aa, synthetic construct
ALGGTENLI

SEQ ID NO: 11264 - protein, 13 aa, synthetic construct
ALVASFVGYATDK

SEQ ID NO: 11265 - protein, 12 aa, synthetic construct
ALRDLGMTDKLI

SEQ ID NO: 11266 - protein, 11 aa, synthetic construct
ALREAYTDKLI

SEQ ID NO: 11267 - protein, 14 aa, synthetic construct
ALGQLPLYWRLYTD

SEQ ID NO: 11268 - protein, 14 aa, synthetic construct
ALREIPTGGYGKLI

SEQ ID NO: 11269 - protein, 12 aa, synthetic construct
ALREEGDTSEKL

SEQ ID NO: 11270 - protein, 14 aa, synthetic construct
ALVDLPLYWGLYTD

SEQ ID NO: 11271 - protein, 12 aa, synthetic construct
ALGQLGMTEKPI

SEQ ID NO: 11272 - protein, 13 aa, synthetic construct
VQVELAGYADKLI

SEQ ID NO: 11273 - protein, 9 aa, synthetic construct
ALGGTEKLT

SEQ ID NO: 11274 - protein, 14 aa, synthetic construct
ALREETGGYPENLI

SEQ ID NO: 11275 - protein, 13 aa, synthetic construct
ALREIGGYADKLI

SEQ ID NO: 11276 - protein, 9 aa, synthetic construct
ALGGSDKII

SEQ ID NO: 11277 - protein, 12 aa, synthetic construct
ALGNWGIRDLLI

SEQ ID NO: 11278 - protein, 14 aa, synthetic construct
ALVASFNGYETDKL

SEQ ID NO: 11279 - protein, 14 aa, synthetic construct
ALVDLPLRVLNTDK

SEQ ID NO: 11280 - protein, 9 aa, synthetic construct
ALGGSDKVI

SEQ ID NO: 11281 - protein, 13 aa, synthetic construct
ALLASYEPVPDKL

SEQ ID NO: 11282 - protein, 13 aa, synthetic construct
SLGVTGGYTDKLI

SEQ ID NO: 11283 - protein, 12 aa, synthetic construct
ALGQLRHTDKLI

SEQ ID NO: 11284 - protein, 9 aa, synthetic construct
ALGWTDKLI

SEQ ID NO: 11285 - protein, 12 aa, synthetic construct
ALGNWGIRAKLI

SEQ ID NO: 11286 - protein, 13 aa, synthetic construct
ALRELGIYTHKLI

SEQ ID NO: 11287 - protein, 13 aa, synthetic construct
ALRELGIYTDKLI

SEQ ID NO: 11288 - protein, 14 aa, synthetic construct
ALREETGGYTEKLI

SEQ ID NO: 11289 - protein, 13 aa, synthetic construct
ALGNWGYTPINSS

SEQ ID NO: 11290 - protein, 14 aa, synthetic construct
ALVEETRGYTDKLI

SEQ ID NO: 11291 - protein, 14 aa, synthetic construct
ALGWYWGGPLTAQL

SEQ ID NO: 11292 - protein, 14 aa, synthetic construct
ALGGRYPEGGTDTL

SEQ ID NO: 11293 - protein, 9 aa, synthetic construct
ALGGTAKLI

SEQ ID NO: 11294 - protein, 12 aa, synthetic construct
VLGNWGIRDKLI

SEQ ID NO: 11295 - protein, 14 aa, synthetic construct
ALGYILTWGSYTDK

SEQ ID NO: 11296 - protein, 9 aa, synthetic construct
ALGPLQTWG

SEQ ID NO: 11297 - protein, 7 aa, synthetic construct
ALGQLGG

SEQ ID NO: 11298 - protein, 12 aa, synthetic construct
ALGQLRDTDQLI

SEQ ID NO: 11299 - protein, 12 aa, synthetic construct
ALGNWRTPINSS

SEQ ID NO: 11300 - protein, 6 aa, synthetic construct
ALVEFL

SEQ ID NO: 11301 - protein, 11 aa, synthetic construct
ALGWGYYVKLI

SEQ ID NO: 11302 - protein, 14 aa, synthetic construct
ALRRYWGGPLTAQL

SEQ ID NO: 11303 - protein, 14 aa, synthetic construct
ALRELPGDMENDKL

SEQ ID NO: 11304 - protein, 14 aa, synthetic construct
ALRELRWGPYTDKL

SEQ ID NO: 11305 - protein, 13 aa, synthetic construct
VLGVLLGDTRKLI

SEQ ID NO: 11306 - protein, 14 aa, synthetic construct
ALGPSFLGYATEKL

SEQ ID NO: 11307 - protein, 14 aa, synthetic construct
ALGGRSEDDGTDNF

SEQ ID NO: 11308 - protein, 14 aa, synthetic construct
ALRELRTAGYEYTD

SEQ ID NO: 11309 - protein, 12 aa, synthetic construct
ALRELRIFDKLI

SEQ ID NO: 11310 - protein, 12 aa, synthetic construct
VLGNLGGPLNSS

SEQ ID NO: 11311 - protein, 11 aa, synthetic construct
ALRELRGLGLI

SEQ ID NO: 11312 - protein, 14 aa, synthetic construct
ALRELPTGGFGYTD

SEQ ID NO: 11313 - protein, 8 aa, synthetic construct
ALVEGTLI

SEQ ID NO: 11314 - protein, 11 aa, synthetic construct
ALGWGYTDKHI

SEQ ID NO: 11315 - protein, 8 aa, synthetic construct
ALVEGKVI

SEQ ID NO: 11316 - protein, 9 aa, synthetic construct
ALGGTNKLI

SEQ ID NO: 11317 - protein, 8 aa, synthetic construct
ALVEGKNN

SEQ ID NO: 11318 - protein, 11 aa, synthetic construct
ALGWGYTDKLI

SEQ ID NO: 11319 - protein, 14 aa, synthetic construct
SLGRYWGGPLTAQL

SEQ ID NO: 11320 - protein, 12 aa, synthetic construct
ALGNWVIRDKLI

SEQ ID NO: 11321 - protein, 14 aa, synthetic construct
ALGNYRGIWRPINS

SEQ ID NO: 11322 - protein, 14 aa, synthetic construct
ALGYLPTWGSYTDK

SEQ ID NO: 11323 - protein, 13 aa, synthetic construct
ALGGTGGYTYKLI

SEQ ID NO: 11324 - protein, 14 aa, synthetic construct
ALVDVTGGYTDKLI

SEQ ID NO: 11325 - protein, 13 aa, synthetic construct
ALGGTGGYTEKLI

SEQ ID NO: 11326 - protein, 13 aa, synthetic construct
ALVDVGIYTDKLI

SEQ ID NO: 11327 - protein, 14 aa, synthetic construct
ALVDVGDRALTAQL

SEQ ID NO: 11328 - protein, 14 aa, synthetic construct
VLGNLPTGGYTPIN

SEQ ID NO: 11329 - skipped

SEQ ID NO: 11330 - protein, 12 aa, synthetic construct
ALGNWGIRDTLI

SEQ ID NO: 11331 - protein, 14 aa, synthetic construct
ALGQLPTWGSYTDK

SEQ ID NO: 11332 - protein, 14 aa, synthetic construct
ALGQLPTRGSYTDK

SEQ ID NO: 11333 - protein, 12 aa, synthetic construct
ALGNWGIRDNSS

SEQ ID NO: 11334 - protein, 7 aa, synthetic construct
ALGPAYL

SEQ ID NO: 11335 - protein, 13 aa, synthetic construct
ALRVTGGYTDKLI

SEQ ID NO: 11336 - protein, 13 aa, synthetic construct
ALRELGGIAINSS

SEQ ID NO: 11337 - protein, 14 aa, synthetic construct
ALGPHMHPSPINSS

SEQ ID NO: 11338 - protein, 14 aa, synthetic construct
ALGGRYLVDGTDQL

SEQ ID NO: 11339 - protein, 11 aa, synthetic construct
ALGGTKGIGTH

SEQ ID NO: 11340 - protein, 12 aa, synthetic construct
ALGQLRDTDKLI

SEQ ID NO: 11341 - protein, 14 aa, synthetic construct
VLGELGDRALTAQL

SEQ ID NO: 11342 - protein, 14 aa, synthetic construct
ALGGSFLGYATDKL

SEQ ID NO: 11343 - protein, 9 aa, synthetic construct
ALGGTLKLI

SEQ ID NO: 11344 - protein, 14 aa, synthetic construct
ALGQLPYWGRYTDK

SEQ ID NO: 11345 - protein, 11 aa, synthetic construct
SLGVGYSDKLI

SEQ ID NO: 11346 - protein, 12 aa, synthetic construct
ALGYLGRRDINT

SEQ ID NO: 11347 - protein, 14 aa, synthetic construct
ALRELGGYGTDKLI

SEQ ID NO: 11348 - protein, 11 aa, synthetic construct
ALVEAYTDKII

SEQ ID NO: 11349 - protein, 14 aa, synthetic construct
SLGEPCTVDTDKLI

SEQ ID NO: 11350 - protein, 9 aa, synthetic construct
ALGGSENLI

SEQ ID NO: 11351 - protein, 8 aa, synthetic construct
ALVEAKRI

SEQ ID NO: 11352 - protein, 12 aa, synthetic construct
ALVDWGINDKLI

SEQ ID NO: 11353 - protein, 11 aa, synthetic construct
ALVDVVYNKLI

SEQ ID NO: 11354 - protein, 14 aa, synthetic construct
ALGQLPTWGSYTEK

SEQ ID NO: 11355 - protein, 14 aa, synthetic construct
ALGYLLLGDQDKLI

SEQ ID NO: 11356 - protein, 13 aa, synthetic construct
ALRVTGGYSDILI

SEQ ID NO: 11357 - protein, 13 aa, synthetic construct
ALREVGGYADKLI

SEQ ID NO: 11358 - protein, 10 aa, synthetic construct
ALGVVGDKII

SEQ ID NO: 11359 - protein, 12 aa, synthetic construct
ALGVWGRNDILI

SEQ ID NO: 11360 - protein, 12 aa, synthetic construct
ALGHLRDTDKLI

SEQ ID NO: 11361 - protein, 12 aa, synthetic construct
ALGHLWDTDKLI

SEQ ID NO: 11362 - protein, 13 aa, synthetic construct
ALGVLLGNTRKLI

SEQ ID NO: 11363 - protein, 14 aa, synthetic construct
ALGVLLGVLYTDKL

SEQ ID NO: 11364 - protein, 14 aa, synthetic construct
TLGELGGYGTDKLI

SEQ ID NO: 11365 - protein, 13 aa, synthetic construct
ALGVLLGVTRKLI

SEQ ID NO: 11366 - protein, 13 aa, synthetic construct
ALGVLLGYTRKLI

SEQ ID NO: 11367 - protein, 14 aa, synthetic construct
ALGHLSTWGSYTDK

SEQ ID NO: 11368 - protein, 14 aa, synthetic construct
ALGRYWGIRTINSS

SEQ ID NO: 11369 - protein, 13 aa, synthetic construct
ALGLTGGYTDKLI

SEQ ID NO: 11370 - protein, 14 aa, synthetic construct
ALGRYWGIRSINSS

SEQ ID NO: 11371 - protein, 13 aa, synthetic construct
ALGVLLVDTLKLI

SEQ ID NO: 11372 - protein, 13 aa, synthetic construct
ALGVLLVDTRKLI

SEQ ID NO: 11373 - protein, 9 aa, synthetic construct
ALGHLRTWG

SEQ ID NO: 11374 - protein, 13 aa, synthetic construct
ALGVLLVGTRKLI

SEQ ID NO: 11375 - protein, 14 aa, synthetic construct
ALGHLQRGGRTPIN

SEQ ID NO: 11376 - protein, 14 aa, synthetic construct
ALGVLLGGRTPINS

SEQ ID NO: 11377 - protein, 14 aa, synthetic construct
ALGVLLWVLYTDQL

SEQ ID NO: 11378 - protein, 13 aa, synthetic construct
ALGVLMGDTRKLI

SEQ ID NO: 11379 - protein, 13 aa, synthetic construct
ALGVLMGDTRTLI

SEQ ID NO: 11380 - protein, 14 aa, synthetic construct
ALGVLPFWGRYTEK

SEQ ID NO: 11381 - protein, 13 aa, synthetic construct
ALGVLPGDTRKHI

SEQ ID NO: 11382 - protein, 9 aa, synthetic construct
ALGVLPLGV

SEQ ID NO: 11383 - protein, 14 aa, synthetic construct
ALGVLPLGVLYTDK

SEQ ID NO: 11384 - protein, 13 aa, synthetic construct
ALGLVGAYASKLI

SEQ ID NO: 11385 - protein, 14 aa, synthetic construct
ALGHLPTWRSYTDK

SEQ ID NO: 11386 - protein, 14 aa, synthetic construct
ALGVLPLYWGLYTD

SEQ ID NO: 11387 - protein, 14 aa, synthetic construct
ALGHLPTWGTYTYK

SEQ ID NO: 11388 - protein, 13 aa, synthetic construct
ALGVLQGDTRNLI

SEQ ID NO: 11389 - protein, 12 aa, synthetic construct
ALGVLRDSDKLI

SEQ ID NO: 11390 - protein, 12 aa, synthetic construct
ALGVLRDTDKLI

SEQ ID NO: 11391 - protein, 12 aa, synthetic construct
ALGHMGILDKLI

SEQ ID NO: 11392 - protein, 13 aa, synthetic construct
ALGVLLGETRTLI

SEQ ID NO: 11393 - protein, 14 aa, synthetic construct
ALGQPRHGGYAYTD

SEQ ID NO: 11394 - protein, 11 aa, synthetic construct
ALGHVGDNKHI

SEQ ID NO: 11395 - protein, 14 aa, synthetic construct
ALGVLLGDTPRNSS

SEQ ID NO: 11396 - protein, 14 aa, synthetic construct
ALGVLLGDTPTPIN

SEQ ID NO: 11397 - protein, 14 aa, synthetic construct
ALVELGDRALTAQI

SEQ ID NO: 11398 - protein, 13 aa, synthetic construct
ALGVLLGDTQKLI

SEQ ID NO: 11399 - protein, 9 aa, synthetic construct
ALGHVPTWG

SEQ ID NO: 11400 - protein, 13 aa, synthetic construct
ALGVLLGDTRHLI

SEQ ID NO: 11401 - protein, 11 aa, synthetic construct
ALGLLDTDKII

SEQ ID NO: 11402 - protein, 14 aa, synthetic construct
ALGRYWGMGAPINS

SEQ ID NO: 11403 - protein, 14 aa, synthetic construct
ALGVLLGDTRINSS

SEQ ID NO: 11404 - protein, 12 aa, synthetic construct
ALGHVGIIDKLI

SEQ ID NO: 11405 - protein, 11 aa, synthetic construct
ALGHVGENKLI

SEQ ID NO: 11406 - protein, 11 aa, synthetic construct
ALGHVGDNKLI

SEQ ID NO: 11407 - protein, 11 aa, synthetic construct
ALGHVGDNKII

SEQ ID NO: 11408 - protein, 13 aa, synthetic construct
TLGKLGIYTDKII

SEQ ID NO: 11409 - protein, 12 aa, synthetic construct
ALGHRGRTDQLI

SEQ ID NO: 11410 - protein, 14 aa, synthetic construct
ALGHPGGSKTEKLI

SEQ ID NO: 11411 - protein, 14 aa, synthetic construct
ALGRYWGLYTDKLI

SEQ ID NO: 11412 - protein, 13 aa, synthetic construct
ALGLLGDTPINSS

SEQ ID NO: 11413 - protein, 13 aa, synthetic construct
ALGVLLGDTRKLM

SEQ ID NO: 11414 - protein, 12 aa, synthetic construct
ALGHRGDSDNLI

SEQ ID NO: 11415 - protein, 14 aa, synthetic construct
ALGHQPTWGSYTDK

SEQ ID NO: 11416 - protein, 14 aa, synthetic construct
ALGHPVLGASSTDK

SEQ ID NO: 11417 - protein, 14 aa, synthetic construct
TLGELPLYWGLYTD

SEQ ID NO: 11418 - protein, 13 aa, synthetic construct
ALGVLLGDTRNLF

SEQ ID NO: 11419 - protein, 13 aa, synthetic construct
ALGLLLGDTRQLI

SEQ ID NO: 11420 - protein, 13 aa, synthetic construct
ALGVLLGDTRNVF

SEQ ID NO: 11421 - protein, 14 aa, synthetic construct
VLGELHTGGFGYTD

SEQ ID NO: 11422 - protein, 14 aa, synthetic construct
ALGRYWGIRTPINS

SEQ ID NO: 11423 - protein, 13 aa, synthetic construct
ALGVLLGDTRTLF

SEQ ID NO: 11424 - protein, 13 aa, synthetic construct
ALGVLLGDTSKLI

SEQ ID NO: 11425 - protein, 14 aa, synthetic construct
ALGHLPTWGTHTDK

SEQ ID NO: 11426 - protein, 11 aa, synthetic construct
ALGVLRGLGHI

SEQ ID NO: 11427 - protein, 11 aa, synthetic construct
ALGVLRGLGLI

SEQ ID NO: 11428 - protein, 14 aa, synthetic construct
ALGVRCTGDTDILI

SEQ ID NO: 11429 - protein, 14 aa, synthetic construct
ALGVPSYWGIHTDK

SEQ ID NO: 11430 - protein, 12 aa, synthetic construct
VLGELGMTDNSS

SEQ ID NO: 11431 - protein, 14 aa, synthetic construct
ALGVPTYWGPEVNS

SEQ ID NO: 11432 - protein, 14 aa, synthetic construct
VLGELRTGGYEYTD

SEQ ID NO: 11433 - protein, 14 aa, synthetic construct
VLGELRWGPYTDKL

SEQ ID NO: 11434 - protein, 14 aa, synthetic construct
ALGRYWGGPVTAHL

SEQ ID NO: 11435 - protein, 12 aa, synthetic construct
ALGHLPTWGSYT

SEQ ID NO: 11436 - protein, 13 aa, synthetic construct
TLGELGADTDKLI

SEQ ID NO: 11437 - protein, 14 aa, synthetic construct
ALGVPYKEDVTDKL

SEQ ID NO: 11438 - protein, 14 aa, synthetic construct
ALGHLPTWGSYPIN

SEQ ID NO: 11439 - protein, 11 aa, synthetic construct
VLGELYNDKLI

SEQ ID NO: 11440 - protein, 12 aa, synthetic construct
ALGVQDAYDVNL

SEQ ID NO: 11441 - protein, 13 aa, synthetic construct
ALGVQVRDTRKKI

SEQ ID NO: 11442 - protein, 13 aa, synthetic construct
TLGELDWCRRGLI

SEQ ID NO: 11443 - protein, 10 aa, synthetic construct
ALGNFTPINS

SEQ ID NO: 11444 - protein, 12 aa, synthetic construct
ALGNCGIPINSS

SEQ ID NO: 11445 - protein, 13 aa, synthetic construct
ALGVRGGYTHKLI

SEQ ID NO: 11446 - protein, 13 aa, synthetic construct
ALGHLPTWGSNTD

SEQ ID NO: 11447 - protein, 12 aa, synthetic construct
ALGVRGITDQLI

SEQ ID NO: 11448 - protein, 14 aa, synthetic construct
VLGEPGGYNTDKLI

SEQ ID NO: 11449 - protein, 12 aa, synthetic construct
ALGVRGRTDTVI

SEQ ID NO: 11450 - protein, 13 aa, synthetic construct
ALGVRLGDTRKLI

SEQ ID NO: 11451 - protein, 13 aa, synthetic construct
ALGVSGGYADKLI

SEQ ID NO: 11452 - protein, 12 aa, synthetic construct
ALGHLPTWGSDT

SEQ ID NO: 11453 - protein, 13 aa, synthetic construct
ALGVSGGYTDILI

SEQ ID NO: 11454 - protein, 13 aa, synthetic construct
ALGVSGGYTDKIN

SEQ ID NO: 11455 - protein, 11 aa, synthetic construct
ALGNFTPINSS

SEQ ID NO: 11456 - protein, 14 aa, synthetic construct
TLGEETVGYTDKLI

SEQ ID NO: 11457 - protein, 13 aa, synthetic construct
ALGVSGGYTDNII

SEQ ID NO: 11458 - protein, 14 aa, synthetic construct
ALGHLPTWGRRGLI

SEQ ID NO: 11459 - protein, 14 aa, synthetic construct
ALGRYWGGPVTAQL

SEQ ID NO: 11460 - protein, 14 aa, synthetic construct
ALGVPSVLGARSKL

SEQ ID NO: 11461 - protein, 9 aa, synthetic construct
ALGVPSVLG

SEQ ID NO: 11462 - protein, 14 aa, synthetic construct
ALGVPRTGGGPPIN

SEQ ID NO: 11463 - protein, 12 aa, synthetic construct
ALGNFGFSINSS

SEQ ID NO: 11464 - protein, 11 aa, synthetic construct
ALGVLRGVGLL

SEQ ID NO: 11465 - protein, 14 aa, synthetic construct
ALGNFLVGVSDTPI

SEQ ID NO: 11466 - protein, 13 aa, synthetic construct
ALGVLVGDPRTLI

SEQ ID NO: 11467 - protein, 13 aa, synthetic construct
ALGVLVGDTRKII

SEQ ID NO: 11468 - protein, 13 aa, synthetic construct
ALGRYWGINDKLI

SEQ ID NO: 11469 - protein, 13 aa, synthetic construct
ALGVLVWDTRKLI

SEQ ID NO: 11470 - protein, 13 aa, synthetic construct
ALGVLVWETGKLI

SEQ ID NO: 11471 - protein, 13 aa, synthetic construct
ALGRYWGINDELI

SEQ ID NO: 11472 - protein, 14 aa, synthetic construct
ALGRYWGIHTDKLI

SEQ ID NO: 11473 - protein, 13 aa, synthetic construct
ALGVMGADTDKLI

SEQ ID NO: 11474 - protein, 14 aa, synthetic construct
ALGNFPTGRGPPIN

SEQ ID NO: 11475 - protein, 13 aa, synthetic construct
ALGVNGGYADKLI

SEQ ID NO: 11476 - protein, 13 aa, synthetic construct
ALGVNGGYTDKLN

SEQ ID NO: 11477 - protein, 12 aa, synthetic construct
ALGVNGGYTYKL

SEQ ID NO: 11478 - protein, 14 aa, synthetic construct
ALGRYWGGTPINSS

SEQ ID NO: 11479 - protein, 12 aa, synthetic construct
VLGELRIFVKLI

SEQ ID NO: 11480 - protein, 13 aa, synthetic construct
ALGVPGGSPDNLI

SEQ ID NO: 11481 - protein, 13 aa, synthetic construct
ALGVPGGSTDRLY

SEQ ID NO: 11482 - protein, 14 aa, synthetic construct
ALGHLPTWGSYTDE

SEQ ID NO: 11483 - protein, 13 aa, synthetic construct
ALGVPGGYTDKLV

SEQ ID NO: 11484 - protein, 14 aa, synthetic construct
ALGRYWGGSFDSTT

SEQ ID NO: 11485 - protein, 9 aa, synthetic construct
ALGVPINSS

SEQ ID NO: 11486 - protein, 14 aa, synthetic construct
TLGELGDRALTAQL

SEQ ID NO: 11487 - protein, 14 aa, synthetic construct
ALGRYWGGRLTAQL

SEQ ID NO: 11488 - protein, 10 aa, synthetic construct
TLGELGDKLI

SEQ ID NO: 11489 - protein, 14 aa, synthetic construct
ALGRYWGGRLTAHL

SEQ ID NO: 11490 - protein, 14 aa, synthetic construct
ALGVPLLLGDTIDK

SEQ ID NO: 11491 - protein, 14 aa, synthetic construct
ALGVPPSYVLGDTD

SEQ ID NO: 11492 - protein, 14 aa, synthetic construct
ALGHVPTWGSYTDK

SEQ ID NO: 11493 - protein, 14 aa, synthetic construct
ALGVLLGDTNDKLI

SEQ ID NO: 11494 - protein, 13 aa, synthetic construct
ALGVLLGDTLKLI

SEQ ID NO: 11495 - protein, 12 aa, synthetic construct
ALGKLRDTDKLI

SEQ ID NO: 11496 - protein, 11 aa, synthetic construct
ALGVAYTDKLI

SEQ ID NO: 11497 - protein, 14 aa, synthetic construct
ALGKPPSHVLGDTD

SEQ ID NO: 11498 - protein, 12 aa, synthetic construct
ALGVCVIKDKLI

SEQ ID NO: 11499 - protein, 14 aa, synthetic construct
ALGKPGGYNTDKLI

SEQ ID NO: 11500 - protein, 13 aa, synthetic construct
ALGSLGGYADKLI

SEQ ID NO: 11501 - protein, 10 aa, synthetic construct
ALGSLGDKLY

SEQ ID NO: 11502 - protein, 14 aa, synthetic construct
ALGKPGGYNSDKLI

SEQ ID NO: 11503 - protein, 14 aa, synthetic construct
ALGVERGGYPDILI

SEQ ID NO: 11504 - protein, 11 aa, synthetic construct
ALGKMGLINSS

SEQ ID NO: 11505 - protein, 12 aa, synthetic construct
ALGVGGINDKHI

SEQ ID NO: 11506 - protein, 12 aa, synthetic construct
ALGKLRIFDQLI

SEQ ID NO: 11507 - protein, 11 aa, synthetic construct
ALGKLRGLGLI

SEQ ID NO: 11508 - protein, 12 aa, synthetic construct
ALGVGGINDKLI

SEQ ID NO: 11509 - protein, 11 aa, synthetic construct
ALGVGNSDKLI

SEQ ID NO: 11510 - protein, 8 aa, synthetic construct
ALGVGQLF

SEQ ID NO: 11511 - protein, 14 aa, synthetic construct
ALGRYWWVPFTAQL

SEQ ID NO: 11512 - protein, 11 aa, synthetic construct
ALGVGSNSKLI

SEQ ID NO: 11513 - protein, 13 aa, synthetic construct
ALGVHGGYTDKLI

SEQ ID NO: 11514 - protein, 14 aa, synthetic construct
VLGELPLGVLYTEK

SEQ ID NO: 11515 - protein, 14 aa, synthetic construct
ALGKLPYWGRYTDK

SEQ ID NO: 11516 - protein, 12 aa, synthetic construct
ALGLAEENTTEH

SEQ ID NO: 11517 - protein, 14 aa, synthetic construct
ALGVHRTGGYADKL

SEQ ID NO: 11518 - protein, 12 aa, synthetic construct
TLGERGITDKLI

SEQ ID NO: 11519 - protein, 14 aa, synthetic construct
ALGKLPTGSPINSS

SEQ ID NO: 11520 - protein, 12 aa, synthetic construct
TLGERGITDILI

SEQ ID NO: 11521 - protein, 14 aa, synthetic construct
ALGVHYKEDGTDKL

SEQ ID NO: 11522 - protein, 14 aa, synthetic construct
ALGKLPLGVLYTDK

SEQ ID NO: 11523 - protein, 13 aa, synthetic construct
ALGVIGGYTDKLI

SEQ ID NO: 11524 - protein, 8 aa, synthetic construct
ALGVIGLY

SEQ ID NO: 11525 - protein, 13 aa, synthetic construct
ALGVILGATRNLI

SEQ ID NO: 11526 - protein, 13 aa, synthetic construct
ALGVAGGYTDKVI

SEQ ID NO: 11527 - protein, 12 aa, synthetic construct
ALGTWGLRDKLI

SEQ ID NO: 11528 - protein, 14 aa, synthetic construct
ALGSLLLGDPDKLI

SEQ ID NO: 11529 - protein, 11 aa, synthetic construct
ALGTWGITDKL

SEQ ID NO: 11530 - protein, 7 aa, synthetic construct
ALGSSYA

SEQ ID NO: 11531 - protein, 14 aa, synthetic construct
ALGSSYAPDPDKLI

SEQ ID NO: 11532 - protein, 14 aa, synthetic construct
ALGSSYAPVPDKLI

SEQ ID NO: 11533 - protein, 14 aa, synthetic construct
ALGKTSYGISDKLI

SEQ ID NO: 11534 - protein, 12 aa, synthetic construct
ALGSWGIRDKLI

SEQ ID NO: 11535 - protein, 14 aa, synthetic construct
ALGSSFAPVPEKLI

SEQ ID NO: 11536 - protein, 14 aa, synthetic construct
ALGTFLRGGRTPIN

SEQ ID NO: 11537 - protein, 12 aa, synthetic construct
ALGTGGIRDKLI

SEQ ID NO: 11538 - protein, 11 aa, synthetic construct
TLGGDIPINSS

SEQ ID NO: 11539 - protein, 12 aa, synthetic construct
ALGTGGIREKLI

SEQ ID NO: 11540 - protein, 14 aa, synthetic construct
ALGTHGRYNTDKLI

SEQ ID NO: 11541 - protein, 13 aa, synthetic construct
ALGTIPPWGPYTD

SEQ ID NO: 11542 - protein, 13 aa, synthetic construct
ALGTLGVYADKLI

SEQ ID NO: 11543 - protein, 12 aa, synthetic construct
ALGTRGIRDKLI

SEQ ID NO: 11544 - protein, 10 aa, synthetic construct
ALGSLYKTHS

SEQ ID NO: 11545 - protein, 14 aa, synthetic construct
ALGTSFIGYATDKL

SEQ ID NO: 11546 - protein, 14 aa, synthetic construct
ALGKPYVLGARSKL

SEQ ID NO: 11547 - protein, 14 aa, synthetic construct
ALGKPVLGASYTDK

SEQ ID NO: 11548 - protein, 14 aa, synthetic construct
ALGTSYAPVPDKLI

SEQ ID NO: 11549 - protein, 12 aa, synthetic construct
ALGSLRDTDKLI

SEQ ID NO: 11550 - protein, 11 aa, synthetic construct
ALGTWGIINSS

SEQ ID NO: 11551 - protein, 10 aa, synthetic construct
ALGTWGINSS

SEQ ID NO: 11552 - protein, 14 aa, synthetic construct
ALGKPSYWGIHTDK

SEQ ID NO: 11553 - protein, 12 aa, synthetic construct
ALGTWGIRDKDI

SEQ ID NO: 11554 - protein, 12 aa, synthetic construct
ALGTWGIRDKHI

SEQ ID NO: 11555 - protein, 12 aa, synthetic construct
ALGTWGIRDKIN

SEQ ID NO: 11556 - protein, 12 aa, synthetic construct
ALGTWGIRDKLN

SEQ ID NO: 11557 - protein, 12 aa, synthetic construct
ALGTWGIREKLI

SEQ ID NO: 11558 - protein, 14 aa, synthetic construct
VLGELPLGVLYTDK

SEQ ID NO: 11559 - protein, 14 aa, synthetic construct
ALGVILGDIPINSS

SEQ ID NO: 11560 - protein, 14 aa, synthetic construct
ALGVILGDRALTAQ

SEQ ID NO: 11561 - protein, 14 aa, synthetic construct
ALGVLLGDTIDKLI

SEQ ID NO: 11562 - protein, 14 aa, synthetic construct
ALGVLLGADTDKLI

SEQ ID NO: 11563 - protein, 12 aa, synthetic construct
ALGVLGINDTLI

SEQ ID NO: 11564 - protein, 14 aa, synthetic construct
ALGKLGASYTEKLI

SEQ ID NO: 11565 - protein, 14 aa, synthetic construct
ALGRYWGVVHRETH

SEQ ID NO: 11566 - protein, 14 aa, synthetic construct
ALGRYWGVPLTAQL

SEQ ID NO: 11567 - protein, 13 aa, synthetic construct
ALGVLGLYTDQLI

SEQ ID NO: 11568 - protein, 14 aa, synthetic construct
TLGEPRPGGYAYTD

SEQ ID NO: 11569 - protein, 14 aa, synthetic construct
TLGEPPSYVLGDTD

SEQ ID NO: 11570 - protein, 14 aa, synthetic construct
TLGEPLLLGDTIDK

SEQ ID NO: 11571 - protein, 12 aa, synthetic construct
ALGVLGMTDTLI

SEQ ID NO: 11572 - protein, 13 aa, synthetic construct
TLGEPGGYTDKLI

SEQ ID NO: 11573 - protein, 13 aa, synthetic construct
ALGVLLADTRKLN

SEQ ID NO: 11574 - protein, 12 aa, synthetic construct
TLGEMRDTDKLI

SEQ ID NO: 11575 - protein, 13 aa, synthetic construct
ALGRYWGTPINSS

SEQ ID NO: 11576 - protein, 7 aa, synthetic construct
ALGVLLG

SEQ ID NO: 11577 - protein, 13 aa, synthetic construct
ALGVLLGATRKII

SEQ ID NO: 11578 - protein, 12 aa, synthetic construct
ALGKLGMTDKLI

SEQ ID NO: 11579 - protein, 11 aa, synthetic construct
ALGKEYTDKLI

SEQ ID NO: 11580 - protein, 13 aa, synthetic construct
ALGRYWGPVVNSS

SEQ ID NO: 11581 - protein, 13 aa, synthetic construct
ALGVLLGATRKLS

SEQ ID NO: 11582 - protein, 12 aa, synthetic construct
ALGIWGRNDKLI

SEQ ID NO: 11583 - protein, 13 aa, synthetic construct
ALGVLLGATRNLI

SEQ ID NO: 11584 - protein, 13 aa, synthetic construct
ALGITGGYTDKLI

SEQ ID NO: 11585 - protein, 13 aa, synthetic construct
ALGVLLGDKRKII

SEQ ID NO: 11586 - protein, 13 aa, synthetic construct
ALGITGGYADKLI

SEQ ID NO: 11587 - protein, 13 aa, synthetic construct
ALGVLLGDPRKLV

SEQ ID NO: 11588 - protein, 13 aa, synthetic construct
ALGVLLGDRRKLI

SEQ ID NO: 11589 - protein, 13 aa, synthetic construct
ALGIILCDTSCVF

SEQ ID NO: 11590 - protein, 13 aa, synthetic construct
ALGVLLGDSDKLI

SEQ ID NO: 11591 - protein, 13 aa, synthetic construct
ALGVLLGDSRKLI

SEQ ID NO: 11592 - protein, 14 aa, synthetic construct
ALGVLLGDTGDKLI

SEQ ID NO: 11593 - protein, 14 aa, synthetic construct
ALGVLGGYGTDKLI

SEQ ID NO: 11594 - protein, 13 aa, synthetic construct
ALGVLGGYADKII

SEQ ID NO: 11595 - protein, 13 aa, synthetic construct
ALGVLGGSADNLI

SEQ ID NO: 11596 - protein, 13 aa, synthetic construct
ALGVLGDTRINSS

SEQ ID NO: 11597 - protein, 13 aa, synthetic construct
ALGVILGDSDKLI

SEQ ID NO: 11598 - protein, 13 aa, synthetic construct
ALGVILGDTLKLI

SEQ ID NO: 11599 - protein, 10 aa, synthetic construct
ALGLEAENSS

SEQ ID NO: 11600 - protein, 13 aa, synthetic construct
ALGVILGDTRKLF

SEQ ID NO: 11601 - protein, 13 aa, synthetic construct
TLGERGDTRINSS

SEQ ID NO: 11602 - protein, 12 aa, synthetic construct
TLGERGDSDKLI

SEQ ID NO: 11603 - protein, 13 aa, synthetic construct
ALGVILGDTRKLN

SEQ ID NO: 11604 - protein, 14 aa, synthetic construct
TLGEPVLGASYTDK

SEQ ID NO: 11605 - protein, 13 aa, synthetic construct
ALGVILGDTRTLI

SEQ ID NO: 11606 - protein, 13 aa, synthetic construct
ALGVILGDTWKLI

SEQ ID NO: 11607 - protein, 14 aa, synthetic construct
ALGVILGVSDTPIN

SEQ ID NO: 11608 - protein, 13 aa, synthetic construct
ALGVILVDTLKLI

SEQ ID NO: 11609 - protein, 13 aa, synthetic construct
ALGVILVDTRKLI

SEQ ID NO: 11610 - protein, 13 aa, synthetic construct
ALGVILWDTRKLI

SEQ ID NO: 11611 - protein, 13 aa, synthetic construct
ALGKLGIYTEKLI

SEQ ID NO: 11612 - protein, 13 aa, synthetic construct
ALGKLGIYTDQLI

SEQ ID NO: 11613 - protein, 12 aa, synthetic construct
ALGRYWWGPLTA

SEQ ID NO: 11614 - protein, 14 aa, synthetic construct
ALGVIPLGVLYTDK

SEQ ID NO: 11615 - protein, 10 aa, synthetic construct
ALGVIRGSNQ

SEQ ID NO: 11616 - protein, 13 aa, synthetic construct
ALGVIVVDTLNLI

SEQ ID NO: 11617 - protein, 13 aa, synthetic construct
ALGVKVGYKHKII

SEQ ID NO: 11618 - protein, 5 aa, synthetic construct
ALGVL

SEQ ID NO: 11619 - protein, 14 aa, synthetic construct
ALGRYWVGPLTAQL

SEQ ID NO: 11620 - protein, 13 aa, synthetic construct
ALGVLDWGRSGLI

SEQ ID NO: 11621 - protein, 13 aa, synthetic construct
ALGVLGADTDKLI

SEQ ID NO: 11622 - protein, 14 aa, synthetic construct
ALGVLGASYTDKLI

SEQ ID NO: 11623 - protein, 14 aa, synthetic construct
ALGVLGDRALTAQL

SEQ ID NO: 11624 - protein, 14 aa, synthetic construct
ALGRYWGYTPINSS

SEQ ID NO: 11625 - protein, 13 aa, synthetic construct
ALGVLGDTPINSS

SEQ ID NO: 11626 - protein, 14 aa, synthetic construct
ALGHLPTWGPYTEK

SEQ ID NO: 11627 - protein, 13 aa, synthetic construct
ALGVSGGYTEKLI

SEQ ID NO: 11628 - protein, 13 aa, synthetic construct
ALGVSGGYTEKLV

SEQ ID NO: 11629 - protein, 12 aa, synthetic construct
ALGVWGINDELN

SEQ ID NO: 11630 - protein, 12 aa, synthetic construct
ALGVWGIIDELI

SEQ ID NO: 11631 - protein, 14 aa, synthetic construct
ALGNQVLGDTRLNS

SEQ ID NO: 11632 - protein, 12 aa, synthetic construct
ALGVWGIIDKVI

SEQ ID NO: 11633 - protein, 13 aa, synthetic construct
ALGHLGISTDQLI

SEQ ID NO: 11634 - protein, 12 aa, synthetic construct
SWGTGDIHRETH

SEQ ID NO: 11635 - protein, 12 aa, synthetic construct
ALGVWGIKDELS

SEQ ID NO: 11636 - protein, 8 aa, synthetic construct
ALGVWGIN

SEQ ID NO: 11637 - protein, 14 aa, synthetic construct
ALGRTCGGPLKPQI

SEQ ID NO: 11638 - protein, 11 aa, synthetic construct
VLGGDITINSS

SEQ ID NO: 11639 - protein, 12 aa, synthetic construct
ALGVWGINDEHI

SEQ ID NO: 11640 - protein, 11 aa, synthetic construct
VLGGGYSDKLI

SEQ ID NO: 11641 - protein, 14 aa, synthetic construct
ALGRSWWGPLTAQI

SEQ ID NO: 11642 - protein, 12 aa, synthetic construct
ALGHLGIRDKLI

SEQ ID NO: 11643 - protein, 14 aa, synthetic construct
ALGHLGGSFYRTTL

SEQ ID NO: 11644 - protein, 12 aa, synthetic construct
ALGVWGINDEVI

SEQ ID NO: 11645 - protein, 12 aa, synthetic construct
ALGVWGINDKNI

SEQ ID NO: 11646 - protein, 13 aa, synthetic construct
ALGHLGADTDKLI

SEQ ID NO: 11647 - protein, 9 aa, synthetic construct
ALGHLDWGR

SEQ ID NO: 11648 - protein, 14 aa, synthetic construct
ALGRSWGPRTPINS

SEQ ID NO: 11649 - protein, 12 aa, synthetic construct
ALGVWGINDIVI

SEQ ID NO: 11650 - protein, 10 aa, synthetic construct
SWGPKGIGTH

SEQ ID NO: 11651 - protein, 6 aa, synthetic construct
SWGKRR

SEQ ID NO: 11652 - protein, 12 aa, synthetic construct
ALGVWGINDKLF

SEQ ID NO: 11653 - protein, 9 aa, synthetic construct
ALGHLAKWG

SEQ ID NO: 11654 - protein, 14 aa, synthetic construct
ALGHIRTWGTYTDK

SEQ ID NO: 11655 - protein, 12 aa, synthetic construct
ALGHIRDSDKLN

SEQ ID NO: 11656 - protein, 11 aa, synthetic construct
VLGGGYYDKLI

SEQ ID NO: 11657 - protein, 14 aa, synthetic construct
ALGRSWGIRSINSS

SEQ ID NO: 11658 - protein, 12 aa, synthetic construct
ALGVWGINDKLL

SEQ ID NO: 11659 - protein, 14 aa, synthetic construct
VLGGPYQEDGTDKL

SEQ ID NO: 11660 - protein, 12 aa, synthetic construct
ALGVWGIIAKLI

SEQ ID NO: 11661 - protein, 12 aa, synthetic construct
VLGERGDSDNLI

SEQ ID NO: 11662 - protein, 13 aa, synthetic construct
ALGVWGIHTDKLI

SEQ ID NO: 11663 - protein, 10 aa, synthetic construct
ALGRTQQHTT

SEQ ID NO: 11664 - protein, 13 aa, synthetic construct
ALGVVLGDSRQLI

SEQ ID NO: 11665 - protein, 14 aa, synthetic construct
ALGVVLGDTPINSS

SEQ ID NO: 11666 - protein, 13 aa, synthetic construct
SWGTPNWGIRLHR

SEQ ID NO: 11667 - protein, 13 aa, synthetic construct
ALGVVLGDTRKLF

SEQ ID NO: 11668 - protein, 13 aa, synthetic construct
ALGNPVLGDTPTP

SEQ ID NO: 11669 - protein, 14 aa, synthetic construct
ALGRYWAGPLKAQL

SEQ ID NO: 11670 - protein, 14 aa, synthetic construct
ALGRYSWGPLTAQL

SEQ ID NO: 11671 - protein, 14 aa, synthetic construct
ALGVVLLGDPDKLI

SEQ ID NO: 11672 - protein, 14 aa, synthetic construct
ALGRYSGGPLTAQL

SEQ ID NO: 11673 - protein, 13 aa, synthetic construct
ALGVVLWDTRTLI

SEQ ID NO: 11674 - protein, 14 aa, synthetic construct
ALGNPVLGDTPTPI

SEQ ID NO: 11675 - protein, 14 aa, synthetic construct
ALGVVRGDTPQKLI

SEQ ID NO: 11676 - protein, 7 aa, synthetic construct
ALGVVVA

SEQ ID NO: 11677 - protein, 11 aa, synthetic construct
ALGVVYTDILI

SEQ ID NO: 11678 - protein, 13 aa, synthetic construct
SWGTLYWGYRSTH

SEQ ID NO: 11679 - protein, 12 aa, synthetic construct
ALGVWAINDKLI

SEQ ID NO: 11680 - protein, 14 aa, synthetic construct
ALGVWGGPLTAQLF

SEQ ID NO: 11681 - protein, 12 aa, synthetic construct
ALGRYEENTYEL

SEQ ID NO: 11682 - protein, 14 aa, synthetic construct
ALGHLHTSGSYTDK

SEQ ID NO: 11683 - protein, 14 aa, synthetic construct
ALGRYCGGPLTAQL

SEQ ID NO: 11684 - protein, 12 aa, synthetic construct
ALGRWGIRHKLI

SEQ ID NO: 11685 - protein, 14 aa, synthetic construct
ALGNPVLGILSSWD

SEQ ID NO: 11686 - protein, 12 aa, synthetic construct
ALGVWGIDDEII

SEQ ID NO: 11687 - protein, 12 aa, synthetic construct
ALGVWGIDDELI

SEQ ID NO: 11688 - protein, 12 aa, synthetic construct
ALGHLGMSDKLI

SEQ ID NO: 11689 - protein, 11 aa, synthetic construct
ALGRWGIINSS

SEQ ID NO: 11690 - protein, 13 aa, synthetic construct
SWGTLLGDTQLLG

SEQ ID NO: 11691 - protein, 12 aa, synthetic construct
ALGVWGIDDQLI

SEQ ID NO: 11692 - protein, 12 aa, synthetic construct
ALGVWGIHDELI

SEQ ID NO: 11693 - protein, 12 aa, synthetic construct
ALGNSGIRDKLI

SEQ ID NO: 11694 - protein, 14 aa, synthetic construct
ALGRSWGGPVTAQL

SEQ ID NO: 11695 - protein, 13 aa, synthetic construct
ALGVVLGATRTLI

SEQ ID NO: 11696 - protein, 13 aa, synthetic construct
ALGNWGDTPINSS

SEQ ID NO: 11697 - protein, 13 aa, synthetic construct
ALGHHGGYTDKLI

SEQ ID NO: 11698 - protein, 14 aa, synthetic construct
VLGHLPRGGRTPIN

SEQ ID NO: 11699 - protein, 12 aa, synthetic construct
ALGVWGKNDELI

SEQ ID NO: 11700 - protein, 8 aa, synthetic construct
ALGRSEEH

SEQ ID NO: 11701 - protein, 14 aa, synthetic construct
ALGRNWGGPLTAQL

SEQ ID NO: 11702 - protein, 12 aa, synthetic construct
ALGGYEYTDKLI

SEQ ID NO: 11703 - protein, 12 aa, synthetic construct
ALGVWGLNDELI

SEQ ID NO: 11704 - protein, 14 aa, synthetic construct
ALGGWGSCTPINSS

SEQ ID NO: 11705 - protein, 12 aa, synthetic construct
ALGVWGLNDKLV

SEQ ID NO: 11706 - protein, 14 aa, synthetic construct
ALGRNSVGPLTAQL

SEQ ID NO: 11707 - protein, 12 aa, synthetic construct
ALGVWGLNGIDL

SEQ ID NO: 11708 - protein, 13 aa, synthetic construct
ALGVWGLYTDKLI

SEQ ID NO: 11709 - protein, 12 aa, synthetic construct
SLWELRDTDKLI

SEQ ID NO: 11710 - protein, 12 aa, synthetic construct
ALGGWGINEELI

SEQ ID NO: 11711 - protein, 11 aa, synthetic construct
ALGRGYSVKLI

SEQ ID NO: 11712 - protein, 12 aa, synthetic construct
ALGVWGINDKRI

SEQ ID NO: 11713 - protein, 12 aa, synthetic construct
ALGVWGMNDELF

SEQ ID NO: 11714 - protein, 12 aa, synthetic construct
ALGGWGINDELI

SEQ ID NO: 11715 - protein, 12 aa, synthetic construct
ALGVWGMTDKLI

SEQ ID NO: 11716 - protein, 13 aa, synthetic construct
ALGREEEKTSENL

SEQ ID NO: 11717 - protein, 14 aa, synthetic construct
ALGRCSGGPLTAQL

SEQ ID NO: 11718 - protein, 12 aa, synthetic construct
ALGQVGDSEKLN

SEQ ID NO: 11719 - protein, 14 aa, synthetic construct
ALGQTSYGISDKLI

SEQ ID NO: 11720 - protein, 12 aa, synthetic construct
ALGVWGPVVNSS

SEQ ID NO: 11721 - protein, 14 aa, synthetic construct
ALGQPYVLGARSKL

SEQ ID NO: 11722 - protein, 11 aa, synthetic construct
ALGGVYYDKII

SEQ ID NO: 11723 - protein, 12 aa, synthetic construct
ALGVWGRNDHLI

SEQ ID NO: 11724 - protein, 14 aa, synthetic construct
ALGQPTNWGIHTDK

SEQ ID NO: 11725 - protein, 14 aa, synthetic construct
ALGQPSYWGLHTDK

SEQ ID NO: 11726 - protein, 11 aa, synthetic construct
ALGGVYSDKHI

SEQ ID NO: 11727 - protein, 12 aa, synthetic construct
ALGVWGIYDQLI

SEQ ID NO: 11728 - protein, 11 aa, synthetic construct
ALGRSEEPTSD

SEQ ID NO: 11729 - protein, 12 aa, synthetic construct
ALGVWGIYDNLI

SEQ ID NO: 11730 - protein, 14 aa, synthetic construct
VLGHLPKWGSYTDK

SEQ ID NO: 11731 - protein, 14 aa, synthetic construct
ALGHIPTWGSNTDK

SEQ ID NO: 11732 - protein, 12 aa, synthetic construct
ALGVWGINDKTI

SEQ ID NO: 11733 - protein, 14 aa, synthetic construct
ALGHIPTWGPYTDK

SEQ ID NO: 11734 - protein, 12 aa, synthetic construct
ALGVWGINDLLI

SEQ ID NO: 11735 - protein, 12 aa, synthetic construct
ALGVWGINDNII

SEQ ID NO: 11736 - protein, 14 aa, synthetic construct
ALGHIPTGGSYTEK

SEQ ID NO: 11737 - protein, 14 aa, synthetic construct
ALGHIPTGGSYTDK

SEQ ID NO: 11738 - protein, 14 aa, synthetic construct
ALGRSWGGPLAAQL

SEQ ID NO: 11739 - protein, 12 aa, synthetic construct
ALGVWGINDNSS

SEQ ID NO: 11740 - protein, 8 aa, synthetic construct
ALGNSPWG

SEQ ID NO: 11741 - protein, 14 aa, synthetic construct
ALGRSSGGPLTAQL

SEQ ID NO: 11742 - protein, 14 aa, synthetic construct
ALGHIPTCGSYNDK

SEQ ID NO: 11743 - protein, 9 aa, synthetic construct
ALGHIPQWG

SEQ ID NO: 11744 - protein, 12 aa, synthetic construct
ALGVWGINEELI

SEQ ID NO: 11745 - protein, 12 aa, synthetic construct
ALGVWGINEKHI

SEQ ID NO: 11746 - protein, 7 aa, synthetic construct
STRLKSR

SEQ ID NO: 11747 - protein, 12 aa, synthetic construct
ALGVWGINEKVI

SEQ ID NO: 11748 - protein, 14 aa, synthetic construct
ALGHIPPWGSYTDK

SEQ ID NO: 11749 - protein, 12 aa, synthetic construct
ALGVWGINGKRI

SEQ ID NO: 11750 - protein, 14 aa, synthetic construct
ALGHIPPWGPYTDK

SEQ ID NO: 11751 - protein, 12 aa, synthetic construct
ALGVWGINHKLI

SEQ ID NO: 11752 - protein, 7 aa, synthetic construct
ALGHIHT

SEQ ID NO: 11753 - protein, 12 aa, synthetic construct
ALGVWGINVKLI

SEQ ID NO: 11754 - protein, 14 aa, synthetic construct
ALGRSRGGPLTAQL

SEQ ID NO: 11755 - protein, 12 aa, synthetic construct
ALGHICSTDKHI

SEQ ID NO: 11756 - protein, 13 aa, synthetic construct
ALGVWGIPAINSS

SEQ ID NO: 11757 - protein, 12 aa, synthetic construct
ALGVWGIRDKLI

SEQ ID NO: 11758 - protein, 12 aa, synthetic construct
ALGVWGIRRETH

SEQ ID NO: 11759 - protein, 14 aa, synthetic construct
ALGRSGGGPVTAQL

SEQ ID NO: 11760 - protein, 9 aa, synthetic construct
ALGHLHTWG

SEQ ID NO: 11761 - protein, 14 aa, synthetic construct
ALGVVGGYGTDKLI

SEQ ID NO: 11762 - protein, 14 aa, synthetic construct
ALGHLPTWGLYTDK

SEQ ID NO: 11763 - protein, 14 aa, synthetic construct
ALGVTGGYGGAPIN

SEQ ID NO: 11764 - protein, 8 aa, synthetic construct
TLLNSRHR

SEQ ID NO: 11765 - protein, 13 aa, synthetic construct
ALGVTGGSTDKIN

SEQ ID NO: 11766 - protein, 14 aa, synthetic construct
ALGNIPTWGSYTDK

SEQ ID NO: 11767 - protein, 14 aa, synthetic construct
TLGASFLGYATDKL

SEQ ID NO: 11768 - protein, 13 aa, synthetic construct
ALGVTGGSTDKPI

SEQ ID NO: 11769 - protein, 13 aa, synthetic construct
ALGVTGGSTDKVI

SEQ ID NO: 11770 - protein, 14 aa, synthetic construct
ALGHLPTWASYTDK

SEQ ID NO: 11771 - protein, 11 aa, synthetic construct
TLVGGYSDKLI

SEQ ID NO: 11772 - protein, 14 aa, synthetic construct
ALGHLPTSGSYTDK

SEQ ID NO: 11773 - protein, 13 aa, synthetic construct
ALGVTGGSTDNLI

SEQ ID NO: 11774 - protein, 13 aa, synthetic construct
ALGVTGGSTENLI

SEQ ID NO: 11775 - protein, 13 aa, synthetic construct
ALGVTGGSTYKLN

SEQ ID NO: 11776 - protein, 4 aa, synthetic construct
TSEH

SEQ ID NO: 11777 - protein, 14 aa, synthetic construct
ALGVTGGYAYTDKL

SEQ ID NO: 11778 - protein, 14 aa, synthetic construct
ALGHLPTGSPINSS

SEQ ID NO: 11779 - protein, 13 aa, synthetic construct
ALGVTGGYTDKHV

SEQ ID NO: 11780 - protein, 14 aa, synthetic construct
ALGRYWGGPLTALL

SEQ ID NO: 11781 - protein, 14 aa, synthetic construct
ALGRYWGGPLTAKL

SEQ ID NO: 11782 - protein, 13 aa, synthetic construct
ALGVTGGYNDQLI

SEQ ID NO: 11783 - protein, 13 aa, synthetic construct
TLGALGGYADKLI

SEQ ID NO: 11784 - protein, 14 aa, synthetic construct
ALGHLPTGGYTPIN

SEQ ID NO: 11785 - protein, 11 aa, synthetic construct
ALGHLPTGGWY

SEQ ID NO: 11786 - protein, 14 aa, synthetic construct
ALGVTGGYSAPGTP

SEQ ID NO: 11787 - protein, 13 aa, synthetic construct
ALGHLPTGGSYTS

SEQ ID NO: 11788 - protein, 14 aa, synthetic construct
ALGHLPTGGSYTEK

SEQ ID NO: 11789 - protein, 12 aa, synthetic construct
ALGNLGIRDKLF

SEQ ID NO: 11790 - protein, 11 aa, synthetic construct
ALGVTGGYTDK

SEQ ID NO: 11791 - protein, 13 aa, synthetic construct
ALGVTGGYTDKHN

SEQ ID NO: 11792 - protein, 13 aa, synthetic construct
ALGHLPTGGSYTD

SEQ ID NO: 11793 - protein, 14 aa, synthetic construct
ALGHLPTGGSYSDK

SEQ ID NO: 11794 - protein, 13 aa, synthetic construct
ALGVTGGSPINSS

SEQ ID NO: 11795 - protein, 13 aa, synthetic construct
ALGVTGGSPDTLI

SEQ ID NO: 11796 - protein, 7 aa, synthetic construct
ALGNHLP

SEQ ID NO: 11797 - protein, 14 aa, synthetic construct
ALGVTGGSAYTEKL

SEQ ID NO: 11798 - protein, 12 aa, synthetic construct
ALGVSGINDKLN

SEQ ID NO: 11799 - protein, 13 aa, synthetic construct
ALGVSVGYTDKLI

SEQ ID NO: 11800 - protein, 11 aa, synthetic construct
ALGVSVKNNKL

SEQ ID NO: 11801 - protein, 10 aa, synthetic construct
TLGEDERKKL

SEQ ID NO: 11802 - protein, 13 aa, synthetic construct
ALGVTAGYTDKII

SEQ ID NO: 11803 - protein, 13 aa, synthetic construct
ALGVTAGYTDNLI

SEQ ID NO: 11804 - protein, 14 aa, synthetic construct
TLGDVGGYGTDKLI

SEQ ID NO: 11805 - protein, 12 aa, synthetic construct
ALGVTAHTIYVN

SEQ ID NO: 11806 - protein, 14 aa, synthetic construct
ALGHLPTWGLTPIN

SEQ ID NO: 11807 - protein, 9 aa, synthetic construct
ALGVTDKII

SEQ ID NO: 11808 - protein, 9 aa, synthetic construct
ALGVTDKLN

SEQ ID NO: 11809 - protein, 13 aa, synthetic construct
ALGVTEGYTDKLI

SEQ ID NO: 11810 - protein, 14 aa, synthetic construct
ALGHLPTWGIRLHR

SEQ ID NO: 11811 - protein, 14 aa, synthetic construct
ALGHLPTWGIQINS

SEQ ID NO: 11812 - protein, 11 aa, synthetic construct
TLGDVGDNKLI

SEQ ID NO: 11813 - protein, 12 aa, synthetic construct
TLGDLRDTDKLI

SEQ ID NO: 11814 - protein, 14 aa, synthetic construct
ALGHLPTWGIPAIN

SEQ ID NO: 11815 - protein, 14 aa, synthetic construct
ALGHLPTWGILSSW

SEQ ID NO: 11816 - protein, 13 aa, synthetic construct
ALGVTGGDPDTLI

SEQ ID NO: 11817 - protein, 14 aa, synthetic construct
ALGHLPTWGIINSS

SEQ ID NO: 11818 - protein, 14 aa, synthetic construct
ALGHLPTWGFRIHR

SEQ ID NO: 11819 - protein, 13 aa, synthetic construct
ALGVTGGDTDQLI

SEQ ID NO: 11820 - protein, 13 aa, synthetic construct
ALGVTGGDTEKLI

SEQ ID NO: 11821 - protein, 12 aa, synthetic construct
ALGNWGIWDKLI

SEQ ID NO: 11822 - protein, 14 aa, synthetic construct
ALGRYWGGPLTPIN

SEQ ID NO: 11823 - protein, 13 aa, synthetic construct
ALGVTGGHTDQLI

SEQ ID NO: 11824 - protein, 14 aa, synthetic construct
ALGVTGGPTPIKTS

SEQ ID NO: 11825 - protein, 13 aa, synthetic construct
TLGDIDWGRRGLF

SEQ ID NO: 11826 - protein, 14 aa, synthetic construct
ALGVTGGRTPINSS

SEQ ID NO: 11827 - protein, 11 aa, synthetic construct
ALGRYWGGPLT

SEQ ID NO: 11828 - protein, 14 aa, synthetic construct
ALGHLPTGGSHTDK

SEQ ID NO: 11829 - protein, 13 aa, synthetic construct
ALGVVGGYADKLL

SEQ ID NO: 11830 - protein, 13 aa, synthetic construct
ALGNLPTWGSYTD

SEQ ID NO: 11831 - protein, 11 aa, synthetic construct
VLGAAYTDKLI

SEQ ID NO: 11832 - protein, 14 aa, synthetic construct
ALGVTSSDTRPLNS

SEQ ID NO: 11833 - protein, 14 aa, synthetic construct
ALGRYWGFRIHRET

SEQ ID NO: 11834 - protein, 7 aa, synthetic construct
ALGVTSY

SEQ ID NO: 11835 - protein, 14 aa, synthetic construct
ALGVTSYGISDKLI

SEQ ID NO: 11836 - protein, 14 aa, synthetic construct
VLGEPSYWGIHTDK

SEQ ID NO: 11837 - protein, 14 aa, synthetic construct
ALGNLPTWGSITDK

SEQ ID NO: 11838 - protein, 14 aa, synthetic construct
ALGVVDSSKHIYFI

SEQ ID NO: 11839 - protein, 14 aa, synthetic construct
ALGHLPPWGSFTDK

SEQ ID NO: 11840 - protein, 12 aa, synthetic construct
ALGRYWGEWDSS

SEQ ID NO: 11841 - protein, 13 aa, synthetic construct
ALGVVGADTDKLI

SEQ ID NO: 11842 - protein, 14 aa, synthetic construct
ALGHLPPWGSCTDK

SEQ ID NO: 11843 - protein, 11 aa, synthetic construct
ALGVVGDHKLI

SEQ ID NO: 11844 - protein, 14 aa, synthetic construct
ALGRYWGDTQINSS

SEQ ID NO: 11845 - protein, 14 aa, synthetic construct
ALGHLPPWGPYTDK

SEQ ID NO: 11846 - protein, 13 aa, synthetic construct
ALGVTGGYTDKIN

SEQ ID NO: 11847 - protein, 14 aa, synthetic construct
ALGHLPLGVLYTDK

SEQ ID NO: 11848 - protein, 14 aa, synthetic construct
VLGEPVLGASYTDK

SEQ ID NO: 11849 - protein, 14 aa, synthetic construct
ALGHLPKWGSNTDK

SEQ ID NO: 11850 - protein, 14 aa, synthetic construct
ALGHLPKWASYTDK

SEQ ID NO: 11851 - protein, 12 aa, synthetic construct
ALGVVGECDKLL

SEQ ID NO: 11852 - protein, 14 aa, synthetic construct
VLGEEPGGYTDKLI

SEQ ID NO: 11853 - protein, 14 aa, synthetic construct
ALGVVGGCGTDQLI

SEQ ID NO: 11854 - protein, 14 aa, synthetic construct
ALGHLLTWGSYTDK

SEQ ID NO: 11855 - protein, 13 aa, synthetic construct
SWGTPYWGIRVHR

SEQ ID NO: 11856 - protein, 14 aa, synthetic construct
ALGRYWGDTPINLS

SEQ ID NO: 11857 - protein, 14 aa, synthetic construct
ALGRYWGDTGPINS

SEQ ID NO: 11858 - protein, 13 aa, synthetic construct
ALGRYWGDTDKLI

SEQ ID NO: 11859 - protein, 13 aa, synthetic construct
ALGVVGGDTRKVI

SEQ ID NO: 11860 - protein, 13 aa, synthetic construct
ALGVVGGYADKLI

SEQ ID NO: 11861 - protein, 8 aa, synthetic construct
ALGVTSAY

SEQ ID NO: 11862 - protein, 13 aa, synthetic construct
ALGVTGRDTEKLI

SEQ ID NO: 11863 - protein, 11 aa, synthetic construct
SWGTRGHRQTH

SEQ ID NO: 11864 - protein, 13 aa, synthetic construct
VIGVSGGYTDKLI

SEQ ID NO: 11865 - protein, 14 aa, synthetic construct
ALGHLPTGGSDTDK

SEQ ID NO: 11866 - protein, 14 aa, synthetic construct
ALGHLPTCGTYTDK

SEQ ID NO: 11867 - protein, 12 aa, synthetic construct
TKTKTDSYTDKL

SEQ ID NO: 11868 - protein, 14 aa, synthetic construct
ALGRYWGGPLRAQL

SEQ ID NO: 11869 - protein, 13 aa, synthetic construct
ALGHLPSWGSYTD

SEQ ID NO: 11870 - protein, 9 aa, synthetic construct
ALGHLPRWG

SEQ ID NO: 11871 - protein, 12 aa, synthetic construct
ALGNLGIRDKLI

SEQ ID NO: 11872 - protein, 13 aa, synthetic construct
ALGVTGGYTDKLL

SEQ ID NO: 11873 - protein, 14 aa, synthetic construct
ALGRYWGGPLKAQL

SEQ ID NO: 11874 - protein, 14 aa, synthetic construct
ALGRYWGGPFTAQL

SEQ ID NO: 11875 - protein, 13 aa, synthetic construct
ALGVTGGYTDKLV

SEQ ID NO: 11876 - protein, 13 aa, synthetic construct
ALGVTGGYTDKLY

SEQ ID NO: 11877 - protein, 12 aa, synthetic construct
ALGNLGIRDKVI

SEQ ID NO: 11878 - protein, 13 aa, synthetic construct
ALGVTGGYTDNII

SEQ ID NO: 11879 - protein, 13 aa, synthetic construct
ALGHLPRAGRTPI

SEQ ID NO: 11880 - protein, 13 aa, synthetic construct
ALGVTGGYTDQII

SEQ ID NO: 11881 - protein, 13 aa, synthetic construct
ALGRYWGGPDKVI

SEQ ID NO: 11882 - protein, 13 aa, synthetic construct
VLGELGIYTDKLI

SEQ ID NO: 11883 - protein, 13 aa, synthetic construct
ALGVTGGYTDRLI

SEQ ID NO: 11884 - protein, 13 aa, synthetic construct
ALGRYWGGPDKLI

SEQ ID NO: 11885 - protein, 14 aa, synthetic construct
ALGHLPQWGSYTDK

SEQ ID NO: 11886 - protein, 11 aa, synthetic construct
SWGTSDFRSTH

SEQ ID NO: 11887 - protein, 13 aa, synthetic construct
ALGVTGGYTEQLI

SEQ ID NO: 11888 - protein, 12 aa, synthetic construct
ALGVTGGYTERL

SEQ ID NO: 11889 - protein, 13 aa, synthetic construct
ALGHLPQWGSYTD

SEQ ID NO: 11890 - protein, 14 aa, synthetic construct
ALGNLPPGGYTPIN

SEQ ID NO: 11891 - protein, 14 aa, synthetic construct
ALGNLPTGGYTPIN

SEQ ID NO: 11892 - protein, 13 aa, synthetic construct
ALGVTGGYTGQLI

SEQ ID NO: 11893 - protein, 14 aa, synthetic construct
ALGHLPPWGTYTEK

SEQ ID NO: 11894 - protein, 13 aa, synthetic construct
LLGNPVLGDTPTP

SEQ ID NO: 11895 - protein, 11 aa, synthetic construct
ARGAAYTDKLI

SEQ ID NO: 11896 - protein, 14 aa, synthetic construct
ALVELGDRALTAQL

SEQ ID NO: 11897 - protein, 14 aa, synthetic construct
DLWELPLYWGLYTD

SEQ ID NO: 11898 - protein, 12 aa, synthetic construct
DPGERGITDKLI

SEQ ID NO: 11899 - protein, 14 aa, synthetic construct
LLGRKLGDTPINSS

SEQ ID NO: 11900 - protein, 13 aa, synthetic construct
DPGELVGYADKIN

SEQ ID NO: 11901 - protein, 10 aa, synthetic construct
DLWKLGMTDK

SEQ ID NO: 11902 - protein, 9 aa, synthetic construct
DLWGTVKLI

SEQ ID NO: 11903 - protein, 14 aa, synthetic construct
DLWETSYGISDKLI

SEQ ID NO: 11904 - protein, 14 aa, synthetic construct
DLWEPSYWGINTDK

SEQ ID NO: 11905 - protein, 14 aa, synthetic construct
DLWEPSYWGIHTDK

SEQ ID NO: 11906 - protein, 14 aa, synthetic construct
DLWEPSNGGYADKL

SEQ ID NO: 11907 - protein, 12 aa, synthetic construct
DLWELRIFDKLI

SEQ ID NO: 11908 - protein, 14 aa, synthetic construct
DLWELLMGDPDKIN

SEQ ID NO: 11909 - protein, 9 aa, synthetic construct
DLGQNIVIR

SEQ ID NO: 11910 - protein, 14 aa, synthetic construct
DLWELLLGDPDKLI

SEQ ID NO: 11911 - protein, 13 aa, synthetic construct
DLWELGIYTDKLI

SEQ ID NO: 11912 - protein, 12 aa, synthetic construct
DLWELGITDKLI

SEQ ID NO: 11913 - protein, 13 aa, synthetic construct
DLWELGDTGDKLI

SEQ ID NO: 11914 - protein, 13 aa, synthetic construct
DLWELGADTDKLN

SEQ ID NO: 11915 - protein, 13 aa, synthetic construct
DLWEGGGYNTDNL

SEQ ID NO: 11916 - protein, 11 aa, synthetic construct
DLWEAYTDKLI

SEQ ID NO: 11917 - protein, 11 aa, synthetic construct
DLWDAYTNKHI

SEQ ID NO: 11918 - protein, 14 aa, synthetic construct
DLWASYAPDPDKLI

SEQ ID NO: 11919 - protein, 14 aa, synthetic construct
DLVVEHGVYTDKLI

SEQ ID NO: 11920 - protein, 13 aa, synthetic construct
DPGNLPTGGSSTD

SEQ ID NO: 11921 - protein, 14 aa, synthetic construct
DRAEPVLGASNTDK

SEQ ID NO: 11922 - protein, 12 aa, synthetic construct
DRGARGDSDKLI

SEQ ID NO: 11923 - protein, 10 aa, synthetic construct
DRGELGDKII

SEQ ID NO: 11924 - protein, 9 aa, synthetic construct
EIGGGYYDK

SEQ ID NO: 11925 - protein, 12 aa, synthetic construct
EIGEPVVGASNT

SEQ ID NO: 11926 - protein, 10 aa, synthetic construct
EIGELGDKLI

SEQ ID NO: 11927 - protein, 14 aa, synthetic construct
EIGAVGASHTNKLI

SEQ ID NO: 11928 - protein, 13 aa, synthetic construct
EIGALGGYADKLI

SEQ ID NO: 11929 - protein, 12 aa, synthetic construct
EHEELGINDKLN

SEQ ID NO: 11930 - protein, 8 aa, synthetic construct
DVREGKLI

SEQ ID NO: 11931 - protein, 14 aa, synthetic construct
DVGELVSSYTDELI

SEQ ID NO: 11932 - protein, 12 aa, synthetic construct
DVGELGMTVKII

SEQ ID NO: 11933 - protein, 12 aa, synthetic construct
DVGELGMTDKHI

SEQ ID NO: 11934 - protein, 14 aa, synthetic construct
DVGELGGYGTDKLI

SEQ ID NO: 11935 - protein, 12 aa, synthetic construct
DVGELGADTDKL

SEQ ID NO: 11936 - protein, 12 aa, synthetic construct
DVGDLRDTYKLI

SEQ ID NO: 11937 - protein, 11 aa, synthetic construct
DSGDVGDNKHI

SEQ ID NO: 11938 - protein, 14 aa, synthetic construct
DSGAPCNGDTENLI

SEQ ID NO: 11939 - protein, 12 aa, synthetic construct
DRKRTRLKSTHR

SEQ ID NO: 11940 - protein, 11 aa, synthetic construct
DRGGGYSDKLI

SEQ ID NO: 11941 - protein, 12 aa, synthetic construct
DRGERGITDKII

SEQ ID NO: 11942 - protein, 12 aa, synthetic construct
DRGERGDSDKLI

SEQ ID NO: 11943 - protein, 14 aa, synthetic construct
DRGEPPSYVLGDTD

SEQ ID NO: 11944 - protein, 10 aa, synthetic construct
DRGELGEKLI

SEQ ID NO: 11945 - protein, 9 aa, synthetic construct
DLVGTDKLI

SEQ ID NO: 11946 - protein, 14 aa, synthetic construct
DLVGPYKEDGTDKL

SEQ ID NO: 11947 - protein, 12 aa, synthetic construct
DLVGAYQEDCSD

SEQ ID NO: 11948 - protein, 12 aa, synthetic construct
LLGSFGFSINSS

SEQ ID NO: 11949 - protein, 12 aa, synthetic construct
DLGVWGINDKII

SEQ ID NO: 11950 - protein, 13 aa, synthetic construct
DLGVTVGYTDKLS

SEQ ID NO: 11951 - protein, 13 aa, synthetic construct
DLGVTGGYTEKLI

SEQ ID NO: 11952 - protein, 13 aa, synthetic construct
DLGVTGGYTDTLI

SEQ ID NO: 11953 - protein, 12 aa, synthetic construct
DLGVTGGYTDKI

SEQ ID NO: 11954 - protein, 7 aa, synthetic construct
LLGSSWG

SEQ ID NO: 11955 - protein, 13 aa, synthetic construct
DLGVTGGSTDKLI

SEQ ID NO: 11956 - protein, 13 aa, synthetic construct
DLGVNGGYTDKLI

SEQ ID NO: 11957 - protein, 13 aa, synthetic construct
DLGVLMGDTGKLI

SEQ ID NO: 11958 - protein, 13 aa, synthetic construct
DLGVLLGDTRKLN

SEQ ID NO: 11959 - protein, 13 aa, synthetic construct
DLGVLLGDTRELI

SEQ ID NO: 11960 - protein, 13 aa, synthetic construct
DLGVLLGDTDKLI

SEQ ID NO: 11961 - protein, 14 aa, synthetic construct
DLGVLGGYGTDKLI

SEQ ID NO: 11962 - protein, 13 aa, synthetic construct
LLGSYWGIHGHSS

SEQ ID NO: 11963 - protein, 13 aa, synthetic construct
DLGVILGETRKLI

SEQ ID NO: 11964 - protein, 14 aa, synthetic construct
DLGTSYIGYPTDKL

SEQ ID NO: 11965 - protein, 11 aa, synthetic construct
DLGSLYNDKLI

SEQ ID NO: 11966 - protein, 14 aa, synthetic construct
DLGRYWVIPAINSS

SEQ ID NO: 11967 - protein, 13 aa, synthetic construct
DLGRYWGVPLTAQ

SEQ ID NO: 11968 - protein, 14 aa, synthetic construct
DLGRYWGGPLTEQL

SEQ ID NO: 11969 - protein, 14 aa, synthetic construct
DLGQTTYGISDNLI

SEQ ID NO: 11970 - protein, 11 aa, synthetic construct
DLGVWGINDKL

SEQ ID NO: 11971 - protein, 12 aa, synthetic construct
DLGVWGINDKPI

SEQ ID NO: 11972 - protein, 14 aa, synthetic construct
DLVETSNGISDKLI

SEQ ID NO: 11973 - protein, 13 aa, synthetic construct
DLMELVADNDKLI

SEQ ID NO: 11974 - protein, 11 aa, synthetic construct
LLGRRTPIKSS

SEQ ID NO: 11975 - protein, 12 aa, synthetic construct
DLVERGITDKLI

SEQ ID NO: 11976 - protein, 11 aa, synthetic construct
DLVERGASVKL

SEQ ID NO: 11977 - protein, 14 aa, synthetic construct
DLVEPHLLGYTNYK

SEQ ID NO: 11978 - protein, 14 aa, synthetic construct
DLVEMGYRALTAQI

SEQ ID NO: 11979 - protein, 11 aa, synthetic construct
DLVELYTDKIK

SEQ ID NO: 11980 - protein, 14 aa, synthetic construct
DLVELPYWGRYTDK

SEQ ID NO: 11981 - protein, 12 aa, synthetic construct
DLVELLDNDKII

SEQ ID NO: 11982 - protein, 12 aa, synthetic construct
DLVELGMTDKLI

SEQ ID NO: 11983 - protein, 12 aa, synthetic construct
DLVELGITDKLI

SEQ ID NO: 11984 - protein, 13 aa, synthetic construct
DLVELGGYGSSKL

SEQ ID NO: 11985 - protein, 13 aa, synthetic construct
DLVELGGYADKLI

SEQ ID NO: 11986 - protein, 14 aa, synthetic construct
DLVEHYLLGSRSKL

SEQ ID NO: 11987 - protein, 8 aa, synthetic construct
DLVEGKLN

SEQ ID NO: 11988 - protein, 8 aa, synthetic construct
DLVEGKLI

SEQ ID NO: 11989 - protein, 11 aa, synthetic construct
LLGRRTPRNSA

SEQ ID NO: 11990 - protein, 14 aa, synthetic construct
DLVEAGGYGTAKLF

SEQ ID NO: 11991 - protein, 11 aa, synthetic construct
DLVDVGDNKLI

SEQ ID NO: 11992 - protein, 14 aa, synthetic construct
DLVASYAPVPYKLI

SEQ ID NO: 11993 - protein, 14 aa, synthetic construct
DLREETGGYTDKLI

SEQ ID NO: 11994 - protein, 14 aa, synthetic construct
DLRDLRTGGYEYTD

SEQ ID NO: 11995 - protein, 13 aa, synthetic construct
EIGLMGIYTDKLI

SEQ ID NO: 11996 - protein, 6 aa, synthetic construct
EIGRAN

SEQ ID NO: 11997 - protein, 8 aa, synthetic construct
LLGRGNSS

SEQ ID NO: 11998 - protein, 13 aa, synthetic construct
GLGAVGDTGDTLF

SEQ ID NO: 11999 - protein, 14 aa, synthetic construct
GLGASYAPVPDQLI

SEQ ID NO: 12000 - protein, 14 aa, synthetic construct
GLGASFLGYSTDKL

SEQ ID NO: 12001 - protein, 14 aa, synthetic construct
GLGASFLGYATEKL

SEQ ID NO: 12002 - protein, 14 aa, synthetic construct
GLGASFLGYATDQL

SEQ ID NO: 12003 - protein, 13 aa, synthetic construct
LLGNWTGAVGDSS

SEQ ID NO: 12004 - protein, 14 aa, synthetic construct
GLGASFIGYSTDKL

SEQ ID NO: 12005 - protein, 14 aa, synthetic construct
GLGASEAPVTDNHI

SEQ ID NO: 12006 - protein, 14 aa, synthetic construct
GLGASCLGYATDKL

SEQ ID NO: 12007 - protein, 14 aa, synthetic construct
GLGAPYVVGATPIN

SEQ ID NO: 12008 - protein, 13 aa, synthetic construct
GLGAPVLGASSTD

SEQ ID NO: 12009 - protein, 11 aa, synthetic construct
GLGAPSYGGSP

SEQ ID NO: 12010 - protein, 13 aa, synthetic construct
GLGALGGYAAKLI

SEQ ID NO: 12011 - protein, 10 aa, synthetic construct
LLGPACMNKL

SEQ ID NO: 12012 - protein, 10 aa, synthetic construct
GLGALGDKLT

SEQ ID NO: 12013 - protein, 14 aa, synthetic construct
GLGALGAAYTETLI

SEQ ID NO: 12014 - protein, 12 aa, synthetic construct
GLGAGGGSGHRF

SEQ ID NO: 12015 - protein, 7 aa, synthetic construct
GLGAAGG

SEQ ID NO: 12016 - protein, 9 aa, synthetic construct
GLGAAFIGD

SEQ ID NO: 12017 - protein, 4 aa, synthetic construct
GLGA

SEQ ID NO: 12018 - protein, 8 aa, synthetic construct
GLCEPSSG

SEQ ID NO: 12019 - protein, 13 aa, synthetic construct
GLAVNGGYTYKLN

SEQ ID NO: 12020 - protein, 11 aa, synthetic construct
GLGAVGDNKVI

SEQ ID NO: 12021 - protein, 10 aa, synthetic construct
GLGAVRYGGR

SEQ ID NO: 12022 - protein, 14 aa, synthetic construct
GIGHLPTWGSYTDK

SEQ ID NO: 12023 - protein, 11 aa, synthetic construct
GLGDEGDNKLI

SEQ ID NO: 12024 - protein, 12 aa, synthetic construct
GLGDLRATDKLI

SEQ ID NO: 12025 - protein, 14 aa, synthetic construct
GLGDLPMYWRLYTD

SEQ ID NO: 12026 - protein, 9 aa, synthetic construct
GLGDLPLGV

SEQ ID NO: 12027 - protein, 14 aa, synthetic construct
GLGDLLRGDPEKLI

SEQ ID NO: 12028 - protein, 14 aa, synthetic construct
GLGDLLLGDPDKLI

SEQ ID NO: 12029 - protein, 12 aa, synthetic construct
GLGDLGMTDKLL

SEQ ID NO: 12030 - protein, 12 aa, synthetic construct
GLGDLGMTDILI

SEQ ID NO: 12031 - protein, 13 aa, synthetic construct
GLGDLGIYTDKLI

SEQ ID NO: 12032 - protein, 14 aa, synthetic construct
GLGDLGGYGTHKLI

SEQ ID NO: 12033 - protein, 13 aa, synthetic construct
GLGDLGGYAVQLI

SEQ ID NO: 12034 - protein, 10 aa, synthetic construct
GLGDLGGKLI

SEQ ID NO: 12035 - protein, 12 aa, synthetic construct
GLGDLGETDQLI

SEQ ID NO: 12036 - protein, 13 aa, synthetic construct
GLGDLGDTGDQLI

SEQ ID NO: 12037 - protein, 12 aa, synthetic construct
GLGDLGDTEKLI

SEQ ID NO: 12038 - protein, 14 aa, synthetic construct
GLGDLGAAYTANLI

SEQ ID NO: 12039 - protein, 13 aa, synthetic construct
GLGDLGAASSDKL

SEQ ID NO: 12040 - protein, 13 aa, synthetic construct
GLGDLDWGRRGLI

SEQ ID NO: 12041 - protein, 13 aa, synthetic construct
GLGDIGAYAHKLN

SEQ ID NO: 12042 - protein, 13 aa, synthetic construct
LLGNWGYTPINST

SEQ ID NO: 12043 - protein, 13 aa, synthetic construct
GLGDIDWGRRGLI

SEQ ID NO: 12044 - protein, 12 aa, synthetic construct
GLGDGGAAVVGV

SEQ ID NO: 12045 - protein, 7 aa, synthetic construct
GIRYLNR

SEQ ID NO: 12046 - protein, 13 aa, synthetic construct
GIGGPYKEDGTDK

SEQ ID NO: 12047 - protein, 13 aa, synthetic construct
EIGVTGGYADKLI

SEQ ID NO: 12048 - protein, 14 aa, synthetic construct
ELVDQSTGGYAHKL

SEQ ID NO: 12049 - protein, 11 aa, synthetic construct
ELGGWGLNDKL

SEQ ID NO: 12050 - protein, 9 aa, synthetic construct
ELGGTEKLI

SEQ ID NO: 12051 - protein, 9 aa, synthetic construct
ELGGSDKII

SEQ ID NO: 12052 - protein, 14 aa, synthetic construct
ELGETSYGVSDKLI

SEQ ID NO: 12053 - protein, 14 aa, synthetic construct
ELGELRTGGYESTD

SEQ ID NO: 12054 - protein, 12 aa, synthetic construct
ELGELGMTDKII

SEQ ID NO: 12055 - protein, 13 aa, synthetic construct
ELGELGIYTDKVI

SEQ ID NO: 12056 - protein, 13 aa, synthetic construct
ELGELGGYAEKVI

SEQ ID NO: 12057 - protein, 13 aa, synthetic construct
ELGELGDTPINSS

SEQ ID NO: 12058 - protein, 13 aa, synthetic construct
ELGELGDTGDKLI

SEQ ID NO: 12059 - protein, 14 aa, synthetic construct
ELGELGASYTDKLI

SEQ ID NO: 12060 - protein, 14 aa, synthetic construct
ELGELGASSTDKLI

SEQ ID NO: 12061 - protein, 8 aa, synthetic construct
ELGELDWG

SEQ ID NO: 12062 - protein, 11 aa, synthetic construct
ELGEAYTQKLS

SEQ ID NO: 12063 - protein, 10 aa, synthetic construct
ELGEAYTDKL

SEQ ID NO: 12064 - protein, 9 aa, synthetic construct
ELGDVGEKK

SEQ ID NO: 12065 - protein, 14 aa, synthetic construct
ELGDLLLGDPDKLF

SEQ ID NO: 12066 - protein, 13 aa, synthetic construct
ELGDLGGYADKLI

SEQ ID NO: 12067 - protein, 14 aa, synthetic construct
ELGASYAPVPDKLI

SEQ ID NO: 12068 - protein, 14 aa, synthetic construct
ELGASFLGYATDKL

SEQ ID NO: 12069 - protein, 13 aa, synthetic construct
ELGAPHSYVLWDT

SEQ ID NO: 12070 - protein, 13 aa, synthetic construct
ELGVLLGDTRKLI

SEQ ID NO: 12071 - protein, 11 aa, synthetic construct
EQPSEVQSRSS

SEQ ID NO: 12072 - protein, 14 aa, synthetic construct
GIGELPLYWGLYTD

SEQ ID NO: 12073 - protein, 10 aa, synthetic construct
EQTSEIKSTI

SEQ ID NO: 12074 - protein, 14 aa, synthetic construct
GIGAAYAPFHDKLI

SEQ ID NO: 12075 - protein, 13 aa, synthetic construct
GHGVLGVYAYKLI

SEQ ID NO: 12076 - protein, 14 aa, synthetic construct
LLGPFLRGGRPPIN

SEQ ID NO: 12077 - protein, 7 aa, synthetic construct
GGGVGVV

SEQ ID NO: 12078 - protein, 14 aa, synthetic construct
GGGVAGPGVRVRLF

SEQ ID NO: 12079 - protein, 12 aa, synthetic construct
GGGGVRVGVFRV

SEQ ID NO: 12080 - protein, 14 aa, synthetic construct
GGGGVGGVRCWGLG

SEQ ID NO: 12081 - protein, 14 aa, synthetic construct
GGGGPRPGGYAYTD

SEQ ID NO: 12082 - protein, 10 aa, synthetic construct
GGGGPGQRSG

SEQ ID NO: 12083 - protein, 10 aa, synthetic construct
GGGGLRIFDT

SEQ ID NO: 12084 - protein, 10 aa, synthetic construct
GGGGGGGGAG

SEQ ID NO: 12085 - protein, 13 aa, synthetic construct
GGGAVGWGPLTAH

SEQ ID NO: 12086 - protein, 14 aa, synthetic construct
GGGALGWSGGGIGG

SEQ ID NO: 12087 - skipped

SEQ ID NO: 12088 - protein, 14 aa, synthetic construct
FLGDPTNRTAPINS

SEQ ID NO: 12089 - protein, 6 aa, synthetic construct
FFGKIT

SEQ ID NO: 12090 - protein, 7 aa, synthetic construct
ETSCWSE

SEQ ID NO: 12091 - protein, 12 aa, synthetic construct
ERGVWGINDKLI

SEQ ID NO: 12092 - protein, 12 aa, synthetic construct
ERGELGDTDKLI

SEQ ID NO: 12093 - protein, 14 aa, synthetic construct
LLGPPSSDTRPRNS

SEQ ID NO: 12094 - protein, 11 aa, synthetic construct
EQTSELKSPIR

SEQ ID NO: 12095 - protein, 13 aa, synthetic construct
DLGQPGGYNTDKL

SEQ ID NO: 12096 - protein, 13 aa, synthetic construct
DLGNWGLTPINSS

SEQ ID NO: 12097 - protein, 13 aa, synthetic construct
LLGNWGYKPRNSS

SEQ ID NO: 12098 - protein, 13 aa, synthetic construct
DLGELGGYGTDKL

SEQ ID NO: 12099 - protein, 10 aa, synthetic construct
DLGELGYKLF

SEQ ID NO: 12100 - protein, 14 aa, synthetic construct
DLGELGTGGYADKL

SEQ ID NO: 12101 - protein, 14 aa, synthetic construct
DLGELGSSYTDKLI

SEQ ID NO: 12102 - protein, 12 aa, synthetic construct
DLGELGMTDKLN

SEQ ID NO: 12103 - protein, 14 aa, synthetic construct
LLGTLPTGSPRHSS

SEQ ID NO: 12104 - protein, 12 aa, synthetic construct
DLGELGMTDILI

SEQ ID NO: 12105 - protein, 12 aa, synthetic construct
DLGELGMSDKLI

SEQ ID NO: 12106 - protein, 9 aa, synthetic construct
DLGELGMNS

SEQ ID NO: 12107 - protein, 13 aa, synthetic construct
DLGELGIYTEKLI

SEQ ID NO: 12108 - protein, 14 aa, synthetic construct
DLGELGGYGTDNLI

SEQ ID NO: 12109 - protein, 14 aa, synthetic construct
DLGELGGYGTDKII

SEQ ID NO: 12110 - protein, 14 aa, synthetic construct
DLGNLPTGGYTPIN

SEQ ID NO: 12111 - protein, 13 aa, synthetic construct
DLGELGGYAEKLI

SEQ ID NO: 12112 - protein, 13 aa, synthetic construct
DLGELGGYADKVI

SEQ ID NO: 12113 - protein, 14 aa, synthetic construct
LLGTPTYWGPVVNS

SEQ ID NO: 12114 - protein, 14 aa, synthetic construct
LLGTQVLGDTRINS

SEQ ID NO: 12115 - protein, 13 aa, synthetic construct
DLGELGGYADKII

SEQ ID NO: 12116 - protein, 14 aa, synthetic construct
LLGTQVMGDKRSNS

SEQ ID NO: 12117 - protein, 14 aa, synthetic construct
LLGTRLPTFWGTPI

SEQ ID NO: 12118 - protein, 12 aa, synthetic construct
DLGELGETDKII

SEQ ID NO: 12119 - protein, 10 aa, synthetic construct
DLGELGEKLI

SEQ ID NO: 12120 - protein, 13 aa, synthetic construct
LLGTSGDTPINSS

SEQ ID NO: 12121 - protein, 14 aa, synthetic construct
DLGELHLGVLYTDK

SEQ ID NO: 12122 - protein, 9 aa, synthetic construct
DLGELHTRG

SEQ ID NO: 12123 - protein, 12 aa, synthetic construct
DLGELLDTDKLI

SEQ ID NO: 12124 - protein, 13 aa, synthetic construct
DLGELLLGDPDKL

SEQ ID NO: 12125 - protein, 14 aa, synthetic construct
DLGELRTGGSEYTD

SEQ ID NO: 12126 - protein, 12 aa, synthetic construct
DLGELRNFDKLI

SEQ ID NO: 12127 - protein, 12 aa, synthetic construct
DLGELRIFDKIN

SEQ ID NO: 12128 - protein, 12 aa, synthetic construct
DLGELRIFDKII

SEQ ID NO: 12129 - protein, 12 aa, synthetic construct
DLGELRDTDKHI

SEQ ID NO: 12130 - protein, 14 aa, synthetic construct
DLGELPYWGSYTDK

SEQ ID NO: 12131 - protein, 13 aa, synthetic construct
DLGELPYWGRSTD

SEQ ID NO: 12132 - protein, 14 aa, synthetic construct
DLGELPYRGRYTDK

SEQ ID NO: 12133 - protein, 14 aa, synthetic construct
DLGELPNGGFGYTD

SEQ ID NO: 12134 - protein, 14 aa, synthetic construct
DLGELPMGVLYTDK

SEQ ID NO: 12135 - protein, 14 aa, synthetic construct
DLGELPLYWGLHTD

SEQ ID NO: 12136 - protein, 14 aa, synthetic construct
DLGELPLYWGDSDK

SEQ ID NO: 12137 - protein, 9 aa, synthetic construct
DLGELPLLV

SEQ ID NO: 12138 - protein, 13 aa, synthetic construct
DLGELPLGVLYTD

SEQ ID NO: 12139 - protein, 14 aa, synthetic construct
DLGELPLGVLSTDK

SEQ ID NO: 12140 - protein, 14 aa, synthetic construct
DLGELPLGDPDKLI

SEQ ID NO: 12141 - protein, 11 aa, synthetic construct
DLGELNNDKLI

SEQ ID NO: 12142 - protein, 14 aa, synthetic construct
DLGELLLGYTDKII

SEQ ID NO: 12143 - protein, 14 aa, synthetic construct
DLGELLLGDPYKLI

SEQ ID NO: 12144 - protein, 13 aa, synthetic construct
DLGELLLGDPYKL

SEQ ID NO: 12145 - protein, 14 aa, synthetic construct
DLGELLLGDPEKLI

SEQ ID NO: 12146 - protein, 13 aa, synthetic construct
DLGELGDVTYKLI

SEQ ID NO: 12147 - protein, 13 aa, synthetic construct
DLGELGDTPINSS

SEQ ID NO: 12148 - protein, 13 aa, synthetic construct
DLGELGDTGYKLI

SEQ ID NO: 12149 - protein, 14 aa, synthetic construct
DLGEGPGGYTDKLI

SEQ ID NO: 12150 - protein, 8 aa, synthetic construct
DLGEGNII

SEQ ID NO: 12151 - protein, 14 aa, synthetic construct
DLGEGKLYIVKVNP

SEQ ID NO: 12152 - protein, 8 aa, synthetic construct
DLGEGKII

SEQ ID NO: 12153 - protein, 14 aa, synthetic construct
DLGEETGGHTDKLI

SEQ ID NO: 12154 - protein, 14 aa, synthetic construct
DLGEETEGYTDKLI

SEQ ID NO: 12155 - protein, 11 aa, synthetic construct
DLGEAYSDKLI

SEQ ID NO: 12156 - protein, 11 aa, synthetic construct
DLGEAYNDKLI

SEQ ID NO: 12157 - protein, 12 aa, synthetic construct
DLGDRGYSDKIK

SEQ ID NO: 12158 - protein, 12 aa, synthetic construct
DLGDRGLTDKLI

SEQ ID NO: 12159 - protein, 14 aa, synthetic construct
DLGDQPSYVLGDTD

SEQ ID NO: 12160 - protein, 12 aa, synthetic construct
DLGDLTIFEKLI

SEQ ID NO: 12161 - protein, 12 aa, synthetic construct
DLGDLRIFDKLI

SEQ ID NO: 12162 - protein, 11 aa, synthetic construct
DLGDLLGYNTN

SEQ ID NO: 12163 - protein, 10 aa, synthetic construct
DLGDLGDKLI

SEQ ID NO: 12164 - protein, 13 aa, synthetic construct
DLGDLGADTDKLI

SEQ ID NO: 12165 - protein, 12 aa, synthetic construct
DLGDIGMTDKLI

SEQ ID NO: 12166 - protein, 11 aa, synthetic construct
DLGDAGDNKLI

SEQ ID NO: 12167 - protein, 14 aa, synthetic construct
DLGASYLGYATDKL

SEQ ID NO: 12168 - protein, 14 aa, synthetic construct
DLGASYEPVPDKLI

SEQ ID NO: 12169 - protein, 13 aa, synthetic construct
LLGTWGIPAINSS

SEQ ID NO: 12170 - protein, 13 aa, synthetic construct
LLGTWGIPAINST

SEQ ID NO: 12171 - protein, 8 aa, synthetic construct
DLGEGNLI

SEQ ID NO: 12172 - protein, 14 aa, synthetic construct
DLGEHGGYNTYQLI

SEQ ID NO: 12173 - protein, 13 aa, synthetic construct
DLGELGDTGENLL

SEQ ID NO: 12174 - protein, 14 aa, synthetic construct
DLGEHLLLGDTIDK

SEQ ID NO: 12175 - protein, 14 aa, synthetic construct
LLGTSPWGSCTLIN

SEQ ID NO: 12176 - protein, 12 aa, synthetic construct
DLGELGDTDKLN

SEQ ID NO: 12177 - protein, 14 aa, synthetic construct
LLGTSVLGDTSTPI

SEQ ID NO: 12178 - protein, 12 aa, synthetic construct
DLGELGDTDKII

SEQ ID NO: 12179 - protein, 12 aa, synthetic construct
DLGELGDTDILI

SEQ ID NO: 12180 - protein, 8 aa, synthetic construct
DLGELGDT

SEQ ID NO: 12181 - protein, 13 aa, synthetic construct
DLGELGDNGNKLI

SEQ ID NO: 12182 - protein, 14 aa, synthetic construct
DLGELGATYTDNLI

SEQ ID NO: 12183 - protein, 14 aa, synthetic construct
DLGELGASYTYKLI

SEQ ID NO: 12184 - protein, 12 aa, synthetic construct
DLGELGARSKHI

SEQ ID NO: 12185 - protein, 14 aa, synthetic construct
LLGTSYWGIQINST

SEQ ID NO: 12186 - protein, 14 aa, synthetic construct
LLGTSYWGIQRNSS

SEQ ID NO: 12187 - protein, 14 aa, synthetic construct
DLGELDWGIPAINS

SEQ ID NO: 12188 - protein, 11 aa, synthetic construct
DLGEIYTDKLI

SEQ ID NO: 12189 - protein, 14 aa, synthetic construct
DLGEISYGISDKLI

SEQ ID NO: 12190 - protein, 14 aa, synthetic construct
DLGEIPLGFLYTDK

SEQ ID NO: 12191 - protein, 12 aa, synthetic construct
DLGEIGMTYKLI

SEQ ID NO: 12192 - protein, 12 aa, synthetic construct
DLGEIGMTDKLI

SEQ ID NO: 12193 - protein, 13 aa, synthetic construct
DLGEIGGYADKLI

SEQ ID NO: 12194 - protein, 13 aa, synthetic construct
DLGEIDWGRRGLI

SEQ ID NO: 12195 - protein, 13 aa, synthetic construct
DLGEHSYWGIHTD

SEQ ID NO: 12196 - protein, 12 aa, synthetic construct
DLGELRYTDKHI

SEQ ID NO: 12197 - protein, 12 aa, synthetic construct
DLGELRYTDKLI

SEQ ID NO: 12198 - protein, 12 aa, synthetic construct
DLGELVDTDKLI

SEQ ID NO: 12199 - protein, 11 aa, synthetic construct
DLGEVRGLGLI

SEQ ID NO: 12200 - protein, 14 aa, synthetic construct
DLGEVGGYGTDKLI

SEQ ID NO: 12201 - protein, 12 aa, synthetic construct
DLGEVGDTDKLI

SEQ ID NO: 12202 - protein, 13 aa, synthetic construct
DLGEVGAYPDKIF

SEQ ID NO: 12203 - protein, 14 aa, synthetic construct
DLGETYLLGARSKL

SEQ ID NO: 12204 - protein, 14 aa, synthetic construct
DLGETSYGISYKLI

SEQ ID NO: 12205 - protein, 14 aa, synthetic construct
DLGETSYGISYKII

SEQ ID NO: 12206 - protein, 14 aa, synthetic construct
DLGETSYGISDNLI

SEQ ID NO: 12207 - protein, 13 aa, synthetic construct
DLGETSYGISDKL

SEQ ID NO: 12208 - protein, 14 aa, synthetic construct
DLGETSYGISDKII

SEQ ID NO: 12209 - protein, 14 aa, synthetic construct
DLGETSYGISDKHI

SEQ ID NO: 12210 - protein, 14 aa, synthetic construct
DLGETPYGISDKLI

SEQ ID NO: 12211 - protein, 12 aa, synthetic construct
DLGESGDSDKLI

SEQ ID NO: 12212 - protein, 12 aa, synthetic construct
DLGERRITDKLI

SEQ ID NO: 12213 - protein, 12 aa, synthetic construct
DLGERGYSDKLN

SEQ ID NO: 12214 - protein, 11 aa, synthetic construct
DLGERGVNVDK

SEQ ID NO: 12215 - protein, 14 aa, synthetic construct
LLGTFLLGDTNDKL

SEQ ID NO: 12216 - protein, 12 aa, synthetic construct
DLGERGITDKNI

SEQ ID NO: 12217 - protein, 12 aa, synthetic construct
DLGERGITDKII

SEQ ID NO: 12218 - protein, 12 aa, synthetic construct
DLGERGIAINST

SEQ ID NO: 12219 - protein, 12 aa, synthetic construct
DLGERGDSDNLI

SEQ ID NO: 12220 - protein, 12 aa, synthetic construct
DLGERGDSDKII

SEQ ID NO: 12221 - protein, 12 aa, synthetic construct
DLGEVGMTDKLI

SEQ ID NO: 12222 - protein, 13 aa, synthetic construct
DLGEVVGYGTNKL

SEQ ID NO: 12223 - protein, 14 aa, synthetic construct
DLGEQSTGGYADKL

SEQ ID NO: 12224 - protein, 11 aa, synthetic construct
DLGEVYTETLI

SEQ ID NO: 12225 - protein, 14 aa, synthetic construct
DLGNFPTGGGTPIN

SEQ ID NO: 12226 - protein, 13 aa, synthetic construct
LLGSYWGIRGYSS

SEQ ID NO: 12227 - protein, 9 aa, synthetic construct
DLGHLPTWG

SEQ ID NO: 12228 - protein, 7 aa, synthetic construct
DLGHLPT

SEQ ID NO: 12229 - protein, 14 aa, synthetic construct
DLGHIRTWGSYTDK

SEQ ID NO: 12230 - protein, 9 aa, synthetic construct
DLGGTDQLI

SEQ ID NO: 12231 - protein, 9 aa, synthetic construct
DLGGTDKII

SEQ ID NO: 12232 - protein, 9 aa, synthetic construct
DLGGTDKFI

SEQ ID NO: 12233 - protein, 13 aa, synthetic construct
DLGGPYQEDGTDK

SEQ ID NO: 12234 - protein, 12 aa, synthetic construct
DLGGPYQEDGTD

SEQ ID NO: 12235 - protein, 14 aa, synthetic construct
DLGGPYQEDCTDKL

SEQ ID NO: 12236 - protein, 14 aa, synthetic construct
DLGGPYQEDATDKL

SEQ ID NO: 12237 - protein, 14 aa, synthetic construct
DLGGPYKEDGTHKL

SEQ ID NO: 12238 - protein, 13 aa, synthetic construct
DLGGPHSYVLWDT

SEQ ID NO: 12239 - protein, 13 aa, synthetic construct
DLGGLGGYADKLI

SEQ ID NO: 12240 - protein, 12 aa, synthetic construct
DLGGLGDTDKLI

SEQ ID NO: 12241 - protein, 11 aa, synthetic construct
DLGGIRGLGLI

SEQ ID NO: 12242 - protein, 11 aa, synthetic construct
DLGGGYTDKLI

SEQ ID NO: 12243 - protein, 11 aa, synthetic construct
DLGGGYSDKHI

SEQ ID NO: 12244 - protein, 5 aa, synthetic construct
DLGGG

SEQ ID NO: 12245 - protein, 11 aa, synthetic construct
DLGGDIPINSS

SEQ ID NO: 12246 - protein, 12 aa, synthetic construct
DLGERADSDKLI

SEQ ID NO: 12247 - protein, 13 aa, synthetic construct
DLGEQHPIIRRTP

SEQ ID NO: 12248 - protein, 12 aa, synthetic construct
LLGTHASLKQAG

SEQ ID NO: 12249 - protein, 14 aa, synthetic construct
DLGEPGGYNTYKLI

SEQ ID NO: 12250 - protein, 14 aa, synthetic construct
DLGEPCTVDTDKII

SEQ ID NO: 12251 - protein, 14 aa, synthetic construct
DLGEPCTGDTYKQT

SEQ ID NO: 12252 - protein, 14 aa, synthetic construct
DLGEPCTGDTYKII

SEQ ID NO: 12253 - protein, 13 aa, synthetic construct
DLGEPCTGDTDKL

SEQ ID NO: 12254 - protein, 14 aa, synthetic construct
DLGEPCTGDTDKII

SEQ ID NO: 12255 - protein, 14 aa, synthetic construct
DLGEPCTGDNDKLI

SEQ ID NO: 12256 - protein, 14 aa, synthetic construct
DLGEPCNGDTPINS

SEQ ID NO: 12257 - protein, 14 aa, synthetic construct
DLGEPALGASYTDK

SEQ ID NO: 12258 - protein, 12 aa, synthetic construct
LLGTGGIAINSS

SEQ ID NO: 12259 - protein, 13 aa, synthetic construct
DLGEMRWGPYTDK

SEQ ID NO: 12260 - protein, 13 aa, synthetic construct
DLGEMGDTGDKLI

SEQ ID NO: 12261 - protein, 10 aa, synthetic construct
DLGEMGDKLI

SEQ ID NO: 12262 - protein, 13 aa, synthetic construct
DLGEMGADTDKLI

SEQ ID NO: 12263 - protein, 11 aa, synthetic construct
DLGELYTEKLI

SEQ ID NO: 12264 - protein, 11 aa, synthetic construct
DLGELYTDNLI

SEQ ID NO: 12265 - protein, 11 aa, synthetic construct
DLGELYNDKLI

SEQ ID NO: 12266 - protein, 12 aa, synthetic construct
DLGELWDTDKLI

SEQ ID NO: 12267 - protein, 12 aa, synthetic construct
DLGELVMTDKLI

SEQ ID NO: 12268 - protein, 14 aa, synthetic construct
DLGELVLGASYTDK

SEQ ID NO: 12269 - protein, 13 aa, synthetic construct
DLGELVGYAEKLI

SEQ ID NO: 12270 - protein, 12 aa, synthetic construct
DLGELVETDKLI

SEQ ID NO: 12271 - protein, 14 aa, synthetic construct
DLGEPGAYNTDKLI

SEQ ID NO: 12272 - protein, 14 aa, synthetic construct
DLGEPLLLGDTIDK

SEQ ID NO: 12273 - protein, 12 aa, synthetic construct
DLGEQGYTHKLN

SEQ ID NO: 12274 - protein, 14 aa, synthetic construct
DLGEPLLLGYTIDK

SEQ ID NO: 12275 - protein, 14 aa, synthetic construct
DLGEPYVMGARSKL

SEQ ID NO: 12276 - protein, 14 aa, synthetic construct
LLGTFLRGGRKPIN

SEQ ID NO: 12277 - protein, 14 aa, synthetic construct
DLGEPYTGDTDKII

SEQ ID NO: 12278 - protein, 14 aa, synthetic construct
DLGEPVMGASYTDK

SEQ ID NO: 12279 - protein, 14 aa, synthetic construct
DLGEPVLGASYTYK

SEQ ID NO: 12280 - protein, 13 aa, synthetic construct
DLGEPVLGASYTD

SEQ ID NO: 12281 - protein, 14 aa, synthetic construct
DLGEPVLGASNTDK

SEQ ID NO: 12282 - protein, 14 aa, synthetic construct
DLGEPSTVGYADKL

SEQ ID NO: 12283 - protein, 12 aa, synthetic construct
DLGEPSTGGYTD

SEQ ID NO: 12284 - protein, 14 aa, synthetic construct
DLGEPSTGGYPDKL

SEQ ID NO: 12285 - protein, 14 aa, synthetic construct
DLGEPSTGDTDKLI

SEQ ID NO: 12286 - protein, 14 aa, synthetic construct
LLGTFLRGGRPPIN

SEQ ID NO: 12287 - protein, 14 aa, synthetic construct
DLGEPSNGGYSHKL

SEQ ID NO: 12288 - protein, 14 aa, synthetic construct
DLGEPRTLGYAYTD

SEQ ID NO: 12289 - protein, 14 aa, synthetic construct
DLGEPRTGGYADKL

SEQ ID NO: 12290 - protein, 14 aa, synthetic construct
DLGEPRNGGYAYTD

SEQ ID NO: 12291 - protein, 13 aa, synthetic construct
DLGEPPSYVLWDT

SEQ ID NO: 12292 - protein, 13 aa, synthetic construct
DLGEPPSYVLGDT

SEQ ID NO: 12293 - protein, 14 aa, synthetic construct
DLGEPPSNVLGDTD

SEQ ID NO: 12294 - protein, 14 aa, synthetic construct
LLGTFTGGYNTDKL

SEQ ID NO: 12295 - protein, 14 aa, synthetic construct
DLGEPLTGGYAYTD

SEQ ID NO: 12296 - protein, 12 aa, synthetic construct
GLGDLRDTDKLI

SEQ ID NO: 12297 - protein, 12 aa, synthetic construct
GLGDLRDTDSLI

SEQ ID NO: 12298 - protein, 14 aa, synthetic construct
DLGASYAPVPDKPI

SEQ ID NO: 12299 - protein, 14 aa, synthetic construct
GVGDVGDTSTPINS

SEQ ID NO: 12300 - protein, 13 aa, synthetic construct
GVGELGASYTDKL

SEQ ID NO: 12301 - protein, 8 aa, synthetic construct
GVGELDWG

SEQ ID NO: 12302 - protein, 12 aa, synthetic construct
GVGEIRIFDIVI

SEQ ID NO: 12303 - protein, 11 aa, synthetic construct
GVGEGYTDQVI

SEQ ID NO: 12304 - protein, 8 aa, synthetic construct
LLGNSPWG

SEQ ID NO: 12305 - protein, 14 aa, synthetic construct
GVGEDTGGYTDKLI

SEQ ID NO: 12306 - protein, 12 aa, synthetic construct
GVGEASVLGARS

SEQ ID NO: 12307 - protein, 7 aa, synthetic construct
GVGEAGG

SEQ ID NO: 12308 - protein, 9 aa, synthetic construct
GVGDVTGGY

SEQ ID NO: 12309 - protein, 13 aa, synthetic construct
GVGDVGGSADQLI

SEQ ID NO: 12310 - protein, 11 aa, synthetic construct
GVGDVGDNKLI

SEQ ID NO: 12311 - protein, 12 aa, synthetic construct
GLGTWGIRATGI

SEQ ID NO: 12312 - protein, 12 aa, synthetic construct
GVGDRGVTDKLI

SEQ ID NO: 12313 - protein, 14 aa, synthetic construct
LLGNSPWGSCTPID

SEQ ID NO: 12314 - protein, 12 aa, synthetic construct
GVGDRGLTDKLI

SEQ ID NO: 12315 - protein, 14 aa, synthetic construct
GVGDLPYWGRYTDK

SEQ ID NO: 12316 - protein, 10 aa, synthetic construct
GVGDLGDTGT

SEQ ID NO: 12317 - protein, 10 aa, synthetic construct
GVGDGGDAEE

SEQ ID NO: 12318 - protein, 12 aa, synthetic construct
GVGAVGRTETLL

SEQ ID NO: 12319 - protein, 14 aa, synthetic construct
GVGAPVLLGDTIDK

SEQ ID NO: 12320 - protein, 12 aa, synthetic construct
GVGALRIFEYLM

SEQ ID NO: 12321 - protein, 14 aa, synthetic construct
GVGAIPTAGFGILI

SEQ ID NO: 12322 - protein, 14 aa, synthetic construct
LLGNSPTGGGTPIN

SEQ ID NO: 12323 - protein, 14 aa, synthetic construct
GVGELGASYTDKLI

SEQ ID NO: 12324 - protein, 13 aa, synthetic construct
GVGELGDTGDKLI

SEQ ID NO: 12325 - protein, 13 aa, synthetic construct
GVGELGDTGDNLI

SEQ ID NO: 12326 - protein, 13 aa, synthetic construct
GVGGLVGARCSLI

SEQ ID NO: 12327 - protein, 6 aa, synthetic construct
GVGGLV

SEQ ID NO: 12328 - protein, 6 aa, synthetic construct
GVGGLG

SEQ ID NO: 12329 - protein, 11 aa, synthetic construct
GVGGGYSDKLM

SEQ ID NO: 12330 - protein, 11 aa, synthetic construct
GVGGGYSDKLI

SEQ ID NO: 12331 - protein, 13 aa, synthetic construct
GVGEVGGYADKLI

SEQ ID NO: 12332 - protein, 13 aa, synthetic construct
GVGEVGGVSVKLM

SEQ ID NO: 12333 - protein, 12 aa, synthetic construct
GVGERGLTDKLI

SEQ ID NO: 12334 - protein, 13 aa, synthetic construct
GVGEPSYWGIHTD

SEQ ID NO: 12335 - protein, 12 aa, synthetic construct
GVGEMGVSDILI

SEQ ID NO: 12336 - protein, 12 aa, synthetic construct
GVGEMGDIDKLI

SEQ ID NO: 12337 - protein, 11 aa, synthetic construct
GVGELYTDKLI

SEQ ID NO: 12338 - protein, 14 aa, synthetic construct
GVGELPYWGRYTDK

SEQ ID NO: 12339 - protein, 12 aa, synthetic construct
GVGELPYWGRYT

SEQ ID NO: 12340 - protein, 14 aa, synthetic construct
GVGELPLGVLYTDK

SEQ ID NO: 12341 - protein, 13 aa, synthetic construct
GVGELGVTGDKLF

SEQ ID NO: 12342 - protein, 13 aa, synthetic construct
GVGELGPPVEWDT

SEQ ID NO: 12343 - protein, 13 aa, synthetic construct
GVGELGISTDKLI

SEQ ID NO: 12344 - protein, 14 aa, synthetic construct
LLGNSLCTGGYTPI

SEQ ID NO: 12345 - protein, 14 aa, synthetic construct
LLGNSNWGIQINSS

SEQ ID NO: 12346 - protein, 13 aa, synthetic construct
GVGELGGYADKLI

SEQ ID NO: 12347 - protein, 8 aa, synthetic construct
GRGVVVGV

SEQ ID NO: 12348 - protein, 9 aa, synthetic construct
GRGGTDKLI

SEQ ID NO: 12349 - protein, 14 aa, synthetic construct
GRGEVGASCPDHLI

SEQ ID NO: 12350 - protein, 12 aa, synthetic construct
GLVEIRIFDKLI

SEQ ID NO: 12351 - protein, 11 aa, synthetic construct
GLGYLGDNKII

SEQ ID NO: 12352 - protein, 12 aa, synthetic construct
GLGVWGLNEKLI

SEQ ID NO: 12353 - protein, 12 aa, synthetic construct
GLGVWGLNDKLI

SEQ ID NO: 12354 - protein, 12 aa, synthetic construct
GLGVWGINEKGI

SEQ ID NO: 12355 - protein, 11 aa, synthetic construct
GLGVWGINDKL

SEQ ID NO: 12356 - protein, 12 aa, synthetic construct
GLGVWGINDKII

SEQ ID NO: 12357 - protein, 12 aa, synthetic construct
GLGVWGINDKHV

SEQ ID NO: 12358 - protein, 12 aa, synthetic construct
GLGVWGINDDVI

SEQ ID NO: 12359 - protein, 12 aa, synthetic construct
GLGVWGIHDKVI

SEQ ID NO: 12360 - protein, 14 aa, synthetic construct
GLGVVPNGGFGYTD

SEQ ID NO: 12361 - protein, 13 aa, synthetic construct
GLGVVLGDTRTLI

SEQ ID NO: 12362 - protein, 13 aa, synthetic construct
GLGVVLGATRKLI

SEQ ID NO: 12363 - protein, 13 aa, synthetic construct
GLGVTVGYTDQLI

SEQ ID NO: 12364 - protein, 13 aa, synthetic construct
GLGVTGGYTDKNI

SEQ ID NO: 12365 - protein, 13 aa, synthetic construct
GLGVTGGSTDKLI

SEQ ID NO: 12366 - protein, 13 aa, synthetic construct
GLGVTGGSSDKLI

SEQ ID NO: 12367 - protein, 14 aa, synthetic construct
GLGVPCTGDTDQLI

SEQ ID NO: 12368 - protein, 13 aa, synthetic construct
GLGVLVGETRKLI

SEQ ID NO: 12369 - protein, 13 aa, synthetic construct
GLGVLMGVTRTLI

SEQ ID NO: 12370 - protein, 14 aa, synthetic construct
GLGVLGGRALTAQI

SEQ ID NO: 12371 - protein, 13 aa, synthetic construct
GLGVGGDPGETLI

SEQ ID NO: 12372 - protein, 12 aa, synthetic construct
GLGYRGDSDKLI

SEQ ID NO: 12373 - protein, 12 aa, synthetic construct
GLVELGMTDKLI

SEQ ID NO: 12374 - protein, 14 aa, synthetic construct
GRGELLQGEPDQLI

SEQ ID NO: 12375 - protein, 12 aa, synthetic construct
GLVELRYTDKVI

SEQ ID NO: 12376 - protein, 12 aa, synthetic construct
GRGELGMTDHLI

SEQ ID NO: 12377 - protein, 14 aa, synthetic construct
GRGELGASSTGLLI

SEQ ID NO: 12378 - protein, 10 aa, synthetic construct
GRGDVGEMKV

SEQ ID NO: 12379 - protein, 14 aa, synthetic construct
GRGASCLGYATVKL

SEQ ID NO: 12380 - protein, 12 aa, synthetic construct
GRGARGLNDKLI

SEQ ID NO: 12381 - protein, 12 aa, synthetic construct
GRGARGDCVYVI

SEQ ID NO: 12382 - protein, 9 aa, synthetic construct
GRGAPRPGG

SEQ ID NO: 12383 - protein, 13 aa, synthetic construct
GRGALGKYTDKVI

SEQ ID NO: 12384 - protein, 6 aa, synthetic construct
GRGALG

SEQ ID NO: 12385 - protein, 14 aa, synthetic construct
GPGASYAPVPDQLI

SEQ ID NO: 12386 - protein, 14 aa, synthetic construct
GMGHLPPWGSYTDK

SEQ ID NO: 12387 - protein, 10 aa, synthetic construct
GLWELRIFDK

SEQ ID NO: 12388 - protein, 13 aa, synthetic construct
GLWELGIYTDKLI

SEQ ID NO: 12389 - protein, 14 aa, synthetic construct
GLWELGDSYTDHLF

SEQ ID NO: 12390 - protein, 11 aa, synthetic construct
GLWEAYTDKLI

SEQ ID NO: 12391 - protein, 13 aa, synthetic construct
GLWAPVLGASSTD

SEQ ID NO: 12392 - protein, 13 aa, synthetic construct
GLVVTGGYTDKLI

SEQ ID NO: 12393 - protein, 14 aa, synthetic construct
GLVRYWGGPLTAQL

SEQ ID NO: 12394 - protein, 11 aa, synthetic construct
GLVGGYSDKII

SEQ ID NO: 12395 - protein, 12 aa, synthetic construct
GLVEVGMTDKLI

SEQ ID NO: 12396 - protein, 13 aa, synthetic construct
GLVEMGADTYKLI

SEQ ID NO: 12397 - protein, 10 aa, synthetic construct
GVGGVAGGVV

SEQ ID NO: 12398 - protein, 13 aa, synthetic construct
GVGNWGLPARHSS

SEQ ID NO: 12399 - protein, 13 aa, synthetic construct
GVGRSWGGPWTAQ

SEQ ID NO: 12400 - protein, 14 aa, synthetic construct
LLGNPVPGIPINSS

SEQ ID NO: 12401 - protein, 13 aa, synthetic construct
LLGKWGLTPINSS

SEQ ID NO: 12402 - protein, 14 aa, synthetic construct
LLGKTLGDTPIYSS

SEQ ID NO: 12403 - protein, 14 aa, synthetic construct
LLGKPPTGSPINSS

SEQ ID NO: 12404 - protein, 14 aa, synthetic construct
LLGNPVRGDPPTPI

SEQ ID NO: 12405 - protein, 14 aa, synthetic construct
LLGKLPKGSPINSS

SEQ ID NO: 12406 - protein, 14 aa, synthetic construct
LLGKLHTASPIKSS

SEQ ID NO: 12407 - protein, 14 aa, synthetic construct
LLGKKMGDTPINSS

SEQ ID NO: 12408 - protein, 14 aa, synthetic construct
LLGNPYGGPRPPSN

SEQ ID NO: 12409 - protein, 14 aa, synthetic construct
LLGKKLGDTPIHSS

SEQ ID NO: 12410 - protein, 14 aa, synthetic construct
LLGKKLGDKQINSS

SEQ ID NO: 12411 - protein, 14 aa, synthetic construct
LLGKKLGDIPINSS

SEQ ID NO: 12412 - protein, 14 aa, synthetic construct
LLGKKLGASYTDKL

SEQ ID NO: 12413 - protein, 7 aa, synthetic construct
LLGKKLG

SEQ ID NO: 12414 - protein, 13 aa, synthetic construct
LLGNPYWGPRTPI

SEQ ID NO: 12415 - protein, 14 aa, synthetic construct
LLGNPYWGPRTPRN

SEQ ID NO: 12416 - protein, 14 aa, synthetic construct
LLGHPVLGIPINSS

SEQ ID NO: 12417 - protein, 14 aa, synthetic construct
LLGHPSSDTRPITS

SEQ ID NO: 12418 - protein, 14 aa, synthetic construct
LLGNQELGDTRINS

SEQ ID NO: 12419 - protein, 11 aa, synthetic construct
LLGGYIPINSS

SEQ ID NO: 12420 - protein, 14 aa, synthetic construct
LLGGTGGYEYTDKL

SEQ ID NO: 12421 - protein, 9 aa, synthetic construct
LLGGPINSP

SEQ ID NO: 12422 - protein, 13 aa, synthetic construct
LLGLLGDTLINSS

SEQ ID NO: 12423 - protein, 13 aa, synthetic construct
LLGLVGDTPINSS

SEQ ID NO: 12424 - protein, 11 aa, synthetic construct
LLGGDTIDKLI

SEQ ID NO: 12425 - protein, 14 aa, synthetic construct
LLGMKLGDTPINSS

SEQ ID NO: 12426 - protein, 14 aa, synthetic construct
LLGNPVLGDTPPPI

SEQ ID NO: 12427 - protein, 14 aa, synthetic construct
LLGNPTYWGPLVNS

SEQ ID NO: 12428 - protein, 14 aa, synthetic construct
LLGNPPYWGPVVNS

SEQ ID NO: 12429 - protein, 14 aa, synthetic construct
LLGNPILGIPINSS

SEQ ID NO: 12430 - protein, 14 aa, synthetic construct
LLGNPELADTPTPI

SEQ ID NO: 12431 - protein, 14 aa, synthetic construct
LLGNLPPGGYTPIN

SEQ ID NO: 12432 - protein, 13 aa, synthetic construct
LLGNPVLGIPINS

SEQ ID NO: 12433 - protein, 13 aa, synthetic construct
LLGNLGDTPINST

SEQ ID NO: 12434 - protein, 13 aa, synthetic construct
LLGNLGDTPIDSS

SEQ ID NO: 12435 - protein, 13 aa, synthetic construct
LLGNKGDTPRNSS

SEQ ID NO: 12436 - protein, 11 aa, synthetic construct
LLGNFTPRNSA

SEQ ID NO: 12437 - protein, 14 aa, synthetic construct
LLGNPVLGIPINST

SEQ ID NO: 12438 - protein, 11 aa, synthetic construct
LLGNFTPIKST

SEQ ID NO: 12439 - protein, 14 aa, synthetic construct
LLGNFPTVGGTPIN

SEQ ID NO: 12440 - protein, 14 aa, synthetic construct
LLGNFPPGGGTPIN

SEQ ID NO: 12441 - protein, 14 aa, synthetic construct
LLGNPVLGIPRNSS

SEQ ID NO: 12442 - protein, 14 aa, synthetic construct
LLGNFFLGGTNDKL

SEQ ID NO: 12443 - protein, 13 aa, synthetic construct
LLGNCGYTPINSS

SEQ ID NO: 12444 - protein, 12 aa, synthetic construct
LLGNCGTPINSS

SEQ ID NO: 12445 - protein, 12 aa, synthetic construct
LLGNCGIPITSS

SEQ ID NO: 12446 - protein, 14 aa, synthetic construct
LLGNATFWGTVENS

SEQ ID NO: 12447 - protein, 14 aa, synthetic construct
LLGGPGGGPLTAQL

SEQ ID NO: 12448 - protein, 11 aa, synthetic construct
LLGGDIQINSS

SEQ ID NO: 12449 - protein, 12 aa, synthetic construct
GVGTWGIGDELI

SEQ ID NO: 12450 - protein, 14 aa, synthetic construct
ILGTSYSGIQINSS

SEQ ID NO: 12451 - protein, 12 aa, synthetic construct
ILGTGGYGINSS

SEQ ID NO: 12452 - protein, 14 aa, synthetic construct
ILGTFFLGDTNDKL

SEQ ID NO: 12453 - protein, 13 aa, synthetic construct
ILGSYWGIRGNSS

SEQ ID NO: 12454 - protein, 13 aa, synthetic construct
ILGNWGIPAINSS

SEQ ID NO: 12455 - protein, 13 aa, synthetic construct
ILGNSYWGIKINS

SEQ ID NO: 12456 - protein, 14 aa, synthetic construct
ILGNPSYWGIRSIN

SEQ ID NO: 12457 - protein, 14 aa, synthetic construct
ILGNLPTGGYKPIN

SEQ ID NO: 12458 - protein, 14 aa, synthetic construct
ILGNLGDTTPINSS

SEQ ID NO: 12459 - protein, 14 aa, synthetic construct
ILGNFPTGGGTPIN

SEQ ID NO: 12460 - protein, 10 aa, synthetic construct
IKEVVGHIIL

SEQ ID NO: 12461 - protein, 9 aa, synthetic construct
HLGGTDKLI

SEQ ID NO: 12462 - protein, 12 aa, synthetic construct
HLGERGKTEKLI

SEQ ID NO: 12463 - protein, 13 aa, synthetic construct
HLGELHTGGFGYT

SEQ ID NO: 12464 - protein, 13 aa, synthetic construct
GVVELGDPGDKRI

SEQ ID NO: 12465 - protein, 9 aa, synthetic construct
GVVEIPVGV

SEQ ID NO: 12466 - protein, 12 aa, synthetic construct
GVGVWGINDQLI

SEQ ID NO: 12467 - protein, 13 aa, synthetic construct
GVGVTGGYTQKLI

SEQ ID NO: 12468 - protein, 13 aa, synthetic construct
GVGVTGGYTDKLI

SEQ ID NO: 12469 - protein, 12 aa, synthetic construct
GVGVRGGCVQLI

SEQ ID NO: 12470 - protein, 13 aa, synthetic construct
GVGVLLGDPRKLI

SEQ ID NO: 12471 - protein, 14 aa, synthetic construct
GVGVGGAAWPVSGF

SEQ ID NO: 12472 - protein, 14 aa, synthetic construct
ILGTKLGDTPINSS

SEQ ID NO: 12473 - protein, 9 aa, synthetic construct
ILGVPINSS

SEQ ID NO: 12474 - protein, 11 aa, synthetic construct
LLGGDIPINTS

SEQ ID NO: 12475 - protein, 6 aa, synthetic construct
IVGVIT

SEQ ID NO: 12476 - protein, 11 aa, synthetic construct
LLGGDIPINST

SEQ ID NO: 12477 - protein, 14 aa, synthetic construct
LLGNQVLGDTRRNS

SEQ ID NO: 12478 - protein, 14 aa, synthetic construct
LLGDVLGVSDTPIN

SEQ ID NO: 12479 - protein, 14 aa, synthetic construct
LLGDRLPTFWGTPI

SEQ ID NO: 12480 - protein, 14 aa, synthetic construct
LLGDPTKRTPPIKS

SEQ ID NO: 12481 - protein, 14 aa, synthetic construct
LLGDPTKRTAQINS

SEQ ID NO: 12482 - protein, 14 aa, synthetic construct
LLGDPTKRTAPLNS

SEQ ID NO: 12483 - protein, 14 aa, synthetic construct
LLGNRLPTFCGTPI

SEQ ID NO: 12484 - protein, 13 aa, synthetic construct
LLGDLGDTPVNSS

SEQ ID NO: 12485 - protein, 14 aa, synthetic construct
LLGDFPTGGGTPIN

SEQ ID NO: 12486 - protein, 8 aa, synthetic construct
LLERGTSS

SEQ ID NO: 12487 - protein, 8 aa, synthetic construct
LLERENSS

SEQ ID NO: 12488 - protein, 13 aa, synthetic construct
LLERDTDFDSTTL

SEQ ID NO: 12489 - protein, 14 aa, synthetic construct
LLENQVLGDTRRNS

SEQ ID NO: 12490 - protein, 9 aa, synthetic construct
LFVGPIKSS

SEQ ID NO: 12491 - protein, 14 aa, synthetic construct
LFGTFIRGGLTPIN

SEQ ID NO: 12492 - protein, 14 aa, synthetic construct
LLGNRLPTFCVTPI

SEQ ID NO: 12493 - protein, 14 aa, synthetic construct
LFGNPYWGPRTPIN

SEQ ID NO: 12494 - protein, 14 aa, synthetic construct
LFGDPTKRTAPINS

SEQ ID NO: 12495 - protein, 8 aa, synthetic construct
KQAEGKLT

SEQ ID NO: 12496 - protein, 13 aa, synthetic construct
LLGNRLPTFWGTP

SEQ ID NO: 12497 - protein, 12 aa, synthetic construct
GLGTWGIRDNLI

SEQ ID NO: 12498 - protein, 7 aa, synthetic construct
GLGSVGG

SEQ ID NO: 12499 - protein, 11 aa, synthetic construct
GLGDLRGLGLM

SEQ ID NO: 12500 - protein, 14 aa, synthetic construct
GLGELGERALTAQL

SEQ ID NO: 12501 - protein, 13 aa, synthetic construct
GLGELGISTEKLI

SEQ ID NO: 12502 - protein, 13 aa, synthetic construct
GLGELGGYALQLI

SEQ ID NO: 12503 - protein, 13 aa, synthetic construct
GLGELGGYAEKLI

SEQ ID NO: 12504 - protein, 13 aa, synthetic construct
GLGELGGYADKLV

SEQ ID NO: 12505 - protein, 13 aa, synthetic construct
GLGELGGYADKLF

SEQ ID NO: 12506 - protein, 12 aa, synthetic construct
GLGELGGYADKL

SEQ ID NO: 12507 - protein, 13 aa, synthetic construct
GLGELGGYADKHI

SEQ ID NO: 12508 - protein, 13 aa, synthetic construct
GLGELGGYAAKLI

SEQ ID NO: 12509 - protein, 13 aa, synthetic construct
LLGNWGIPARNSS

SEQ ID NO: 12510 - protein, 14 aa, synthetic construct
GLGELGGRALTAQL

SEQ ID NO: 12511 - protein, 13 aa, synthetic construct
LLGNWGLRPINSS

SEQ ID NO: 12512 - protein, 14 aa, synthetic construct
GLGRYWGVPVTAQL

SEQ ID NO: 12513 - protein, 13 aa, synthetic construct
GLGELGDTGANLI

SEQ ID NO: 12514 - protein, 12 aa, synthetic construct
GLGELGDTDKLS

SEQ ID NO: 12515 - protein, 12 aa, synthetic construct
GLGELGDRALTA

SEQ ID NO: 12516 - protein, 10 aa, synthetic construct
GLGELGDKVI

SEQ ID NO: 12517 - protein, 10 aa, synthetic construct
GLGELGDKLI

SEQ ID NO: 12518 - protein, 13 aa, synthetic construct
GLGELGATGDKLI

SEQ ID NO: 12519 - protein, 14 aa, synthetic construct
GLGELGASYTEKLI

SEQ ID NO: 12520 - protein, 13 aa, synthetic construct
GLGELGADTEKLI

SEQ ID NO: 12521 - protein, 13 aa, synthetic construct
GLGELGADTDKLN

SEQ ID NO: 12522 - protein, 13 aa, synthetic construct
LLGNWGLTAINSS

SEQ ID NO: 12523 - protein, 13 aa, synthetic construct
LLGNWGIPAINST

SEQ ID NO: 12524 - protein, 13 aa, synthetic construct
GLGELGIYTDKLN

SEQ ID NO: 12525 - protein, 13 aa, synthetic construct
GLGELGIYTDQLI

SEQ ID NO: 12526 - protein, 13 aa, synthetic construct
GLGELGIYTEKLI

SEQ ID NO: 12527 - protein, 14 aa, synthetic construct
GLGELPSWGRYTDK

SEQ ID NO: 12528 - protein, 14 aa, synthetic construct
GLGELPPGGFGYTD

SEQ ID NO: 12529 - protein, 14 aa, synthetic construct
GLGELPLYWGLYTD

SEQ ID NO: 12530 - protein, 9 aa, synthetic construct
GLGELPLGV

SEQ ID NO: 12531 - protein, 14 aa, synthetic construct
GLGELLLGDPENLI

SEQ ID NO: 12532 - protein, 14 aa, synthetic construct
LLGNWGIELCQHNS

SEQ ID NO: 12533 - protein, 12 aa, synthetic construct
GLGELGYTAKYS

SEQ ID NO: 12534 - protein, 12 aa, synthetic construct
GLGELGWTVRGI

SEQ ID NO: 12535 - protein, 13 aa, synthetic construct
GLGELGVTGVKLI

SEQ ID NO: 12536 - protein, 14 aa, synthetic construct
GLGELGRYGTDKLI

SEQ ID NO: 12537 - protein, 13 aa, synthetic construct
GLGELGPDTDKLI

SEQ ID NO: 12538 - protein, 12 aa, synthetic construct
GLGELGMTVKLI

SEQ ID NO: 12539 - protein, 12 aa, synthetic construct
GLGELGMTVKLF

SEQ ID NO: 12540 - protein, 12 aa, synthetic construct
GLGELGMTEKLI

SEQ ID NO: 12541 - protein, 12 aa, synthetic construct
GLGELGMTDTLI

SEQ ID NO: 12542 - protein, 12 aa, synthetic construct
GLGELGMTDQLI

SEQ ID NO: 12543 - protein, 13 aa, synthetic construct
LLGNWGIPAIHSS

SEQ ID NO: 12544 - protein, 12 aa, synthetic construct
GLGELGMTDKII

SEQ ID NO: 12545 - protein, 12 aa, synthetic construct
GLGELGMTDKHV

SEQ ID NO: 12546 - protein, 12 aa, synthetic construct
GLGELGMSDKLI

SEQ ID NO: 12547 - protein, 13 aa, synthetic construct
GLGELGLYTDKLI

SEQ ID NO: 12548 - protein, 14 aa, synthetic construct
GLGELATGGFGYTD

SEQ ID NO: 12549 - protein, 14 aa, synthetic construct
GLGEIIMGDPDKLI

SEQ ID NO: 12550 - protein, 13 aa, synthetic construct
GLGEIIMGDPDKL

SEQ ID NO: 12551 - protein, 13 aa, synthetic construct
GLGEAGGYTYKLI

SEQ ID NO: 12552 - protein, 14 aa, synthetic construct
LLGNWGPRTPRNSS

SEQ ID NO: 12553 - protein, 13 aa, synthetic construct
GLGDVGISTVKII

SEQ ID NO: 12554 - protein, 13 aa, synthetic construct
GLGDVGGYADHLI

SEQ ID NO: 12555 - protein, 11 aa, synthetic construct
GLGDVGEKILI

SEQ ID NO: 12556 - protein, 13 aa, synthetic construct
GLGDVGDTGDQLI

SEQ ID NO: 12557 - protein, 13 aa, synthetic construct
GLGDVGDTGDKLI

SEQ ID NO: 12558 - protein, 11 aa, synthetic construct
GLGDVGDSKLI

SEQ ID NO: 12559 - protein, 11 aa, synthetic construct
GLGDVGDNTLI

SEQ ID NO: 12560 - protein, 11 aa, synthetic construct
GLGDVGDNKLF

SEQ ID NO: 12561 - protein, 11 aa, synthetic construct
GLGDVGDNILI

SEQ ID NO: 12562 - protein, 11 aa, synthetic construct
GLGDVGDIKVI

SEQ ID NO: 12563 - protein, 13 aa, synthetic construct
GLGDTGGYTDHHN

SEQ ID NO: 12564 - protein, 11 aa, synthetic construct
GLGDRRGGPYT

SEQ ID NO: 12565 - protein, 7 aa, synthetic construct
GLGDRGE

SEQ ID NO: 12566 - protein, 14 aa, synthetic construct
GLGDPVLGAPYTDK

SEQ ID NO: 12567 - protein, 13 aa, synthetic construct
GLGDPSYWRIHTD

SEQ ID NO: 12568 - protein, 14 aa, synthetic construct
GLGDPGGSNTDKLI

SEQ ID NO: 12569 - protein, 10 aa, synthetic construct
GLGDMGDKLN

SEQ ID NO: 12570 - protein, 14 aa, synthetic construct
GLGDLYWGILSSWD

SEQ ID NO: 12571 - protein, 13 aa, synthetic construct
LLGNWGSTQINSS

SEQ ID NO: 12572 - protein, 14 aa, synthetic construct
GLGDLRWGPYTDIL

SEQ ID NO: 12573 - protein, 14 aa, synthetic construct
GLGEAGGYNTDKLI

SEQ ID NO: 12574 - protein, 11 aa, synthetic construct
GLGEASTDKLF

SEQ ID NO: 12575 - protein, 13 aa, synthetic construct
GLGEIGGYADKLI

SEQ ID NO: 12576 - protein, 14 aa, synthetic construct
GLGEASYGISDKLI

SEQ ID NO: 12577 - protein, 13 aa, synthetic construct
LLGNWGLTPIKSS

SEQ ID NO: 12578 - protein, 12 aa, synthetic construct
GLGEIGDTDKLI

SEQ ID NO: 12579 - protein, 14 aa, synthetic construct
GLGEHGGYNTDKLI

SEQ ID NO: 12580 - protein, 14 aa, synthetic construct
GLGEHGGYNTAKLI

SEQ ID NO: 12581 - protein, 14 aa, synthetic construct
GLGEHCTGDTDKLI

SEQ ID NO: 12582 - protein, 8 aa, synthetic construct
GLGEGNLI

SEQ ID NO: 12583 - protein, 8 aa, synthetic construct
GLGEGKLI

SEQ ID NO: 12584 - protein, 8 aa, synthetic construct
GLGEGKLC

SEQ ID NO: 12585 - protein, 12 aa, synthetic construct
GLGEGGRSDTLI

SEQ ID NO: 12586 - protein, 12 aa, synthetic construct
GLGEGGIADTFI

SEQ ID NO: 12587 - protein, 12 aa, synthetic construct
GLGEGGFTGKRI

SEQ ID NO: 12588 - protein, 14 aa, synthetic construct
GLGEETGGYTYKLI

SEQ ID NO: 12589 - protein, 14 aa, synthetic construct
GLGEETGGYTDNLI

SEQ ID NO: 12590 - protein, 14 aa, synthetic construct
GLGEERGGSTDQLI

SEQ ID NO: 12591 - protein, 14 aa, synthetic construct
GLGEDSGGDTALLI

SEQ ID NO: 12592 - protein, 11 aa, synthetic construct
GLGEAYTEKLS

SEQ ID NO: 12593 - protein, 11 aa, synthetic construct
GLGEAYTEKLI

SEQ ID NO: 12594 - protein, 11 aa, synthetic construct
GLGEAYTEKLF

SEQ ID NO: 12595 - protein, 11 aa, synthetic construct
GLGEAYTDTLI

SEQ ID NO: 12596 - protein, 11 aa, synthetic construct
GLGEAYTDKLF

SEQ ID NO: 12597 - protein, 11 aa, synthetic construct
GLGEAYAAKLN

SEQ ID NO: 12598 - protein, 14 aa, synthetic construct
GLGELPTGGFGYTD

SEQ ID NO: 12599 - protein, 14 aa, synthetic construct
GLGELPVYWGLYTD

SEQ ID NO: 12600 - protein, 14 aa, synthetic construct
GLGELPYGGRYTDQ

SEQ ID NO: 12601 - protein, 14 aa, synthetic construct
GLGGAYQEDGTAYL

SEQ ID NO: 12602 - protein, 14 aa, synthetic construct
GLGEVRWGPYTDKL

SEQ ID NO: 12603 - protein, 12 aa, synthetic construct
GLGEVRIFDNII

SEQ ID NO: 12604 - protein, 12 aa, synthetic construct
GLGEVRDTDTLI

SEQ ID NO: 12605 - protein, 14 aa, synthetic construct
GLGEVPYWGRYTDK

SEQ ID NO: 12606 - protein, 14 aa, synthetic construct
GLGEVPLGVLHTDK

SEQ ID NO: 12607 - protein, 13 aa, synthetic construct
GLGEVGGYGTYKL

SEQ ID NO: 12608 - protein, 13 aa, synthetic construct
GLGEVGDTGDKLI

SEQ ID NO: 12609 - protein, 12 aa, synthetic construct
GLGEVGDTDKLI

SEQ ID NO: 12610 - protein, 11 aa, synthetic construct
GLGEVGDNKLI

SEQ ID NO: 12611 - protein, 14 aa, synthetic construct
GLGEVGASYTDQLI

SEQ ID NO: 12612 - protein, 13 aa, synthetic construct
GLGEVGADTDQLI

SEQ ID NO: 12613 - protein, 13 aa, synthetic construct
GLGEVGADTDKFI

SEQ ID NO: 12614 - protein, 13 aa, synthetic construct
GLGEVEELGVHTD

SEQ ID NO: 12615 - protein, 14 aa, synthetic construct
GLGETSYGTSDKLI

SEQ ID NO: 12616 - protein, 13 aa, synthetic construct
GLGETSYGISEKV

SEQ ID NO: 12617 - protein, 14 aa, synthetic construct
GLGETSYGISDTLI

SEQ ID NO: 12618 - protein, 13 aa, synthetic construct
LLGNSVLGDTSTP

SEQ ID NO: 12619 - protein, 14 aa, synthetic construct
GLGERTGGFTDKLI

SEQ ID NO: 12620 - protein, 13 aa, synthetic construct
GLGERRTGGYASP

SEQ ID NO: 12621 - protein, 12 aa, synthetic construct
GLGERGYSDKII

SEQ ID NO: 12622 - protein, 14 aa, synthetic construct
LLGNSYCGIQINSS

SEQ ID NO: 12623 - protein, 12 aa, synthetic construct
GLGEWGDSDKLI

SEQ ID NO: 12624 - protein, 11 aa, synthetic construct
GLGGGDSDNLI

SEQ ID NO: 12625 - protein, 12 aa, synthetic construct
GLGERGITEKLI

SEQ ID NO: 12626 - protein, 11 aa, synthetic construct
GLGGGHSAKLI

SEQ ID NO: 12627 - protein, 14 aa, synthetic construct
GLGRSWGGPLTAQL

SEQ ID NO: 12628 - protein, 14 aa, synthetic construct
GLGPLRPWGSYTDK

SEQ ID NO: 12629 - protein, 14 aa, synthetic construct
GLGNKGDTTPINSS

SEQ ID NO: 12630 - protein, 13 aa, synthetic construct
GLGIPVGETVVVI

SEQ ID NO: 12631 - protein, 9 aa, synthetic construct
GLGHVPRLG

SEQ ID NO: 12632 - protein, 13 aa, synthetic construct
GLGHLPTWGSYTD

SEQ ID NO: 12633 - protein, 14 aa, synthetic construct
GLGHLPTWGSFTDK

SEQ ID NO: 12634 - protein, 9 aa, synthetic construct
GLGGTDKLF

SEQ ID NO: 12635 - protein, 9 aa, synthetic construct
GLGGTDKIF

SEQ ID NO: 12636 - protein, 9 aa, synthetic construct
GLGGRDQLI

SEQ ID NO: 12637 - protein, 14 aa, synthetic construct
GLGGPYQEDGTDKL

SEQ ID NO: 12638 - protein, 14 aa, synthetic construct
GLGGPYQEDCTDKL

SEQ ID NO: 12639 - protein, 14 aa, synthetic construct
GLGGPVLGASYTDK

SEQ ID NO: 12640 - protein, 14 aa, synthetic construct
GLGGPSQEDGTDNL

SEQ ID NO: 12641 - protein, 7 aa, synthetic construct
GLGGPPR

SEQ ID NO: 12642 - protein, 9 aa, synthetic construct
GLGGPDKLI

SEQ ID NO: 12643 - protein, 13 aa, synthetic construct
GLGGLGGYADKLI

SEQ ID NO: 12644 - protein, 13 aa, synthetic construct
GLGGLGADTDKLI

SEQ ID NO: 12645 - protein, 11 aa, synthetic construct
GLGGGYSGKLY

SEQ ID NO: 12646 - protein, 11 aa, synthetic construct
GLGGGYSDKPI

SEQ ID NO: 12647 - protein, 11 aa, synthetic construct
GLGGGYSDELI

SEQ ID NO: 12648 - protein, 12 aa, synthetic construct
GLGERGMTDKLI

SEQ ID NO: 12649 - protein, 12 aa, synthetic construct
GLGERGITDQLI

SEQ ID NO: 12650 - protein, 14 aa, synthetic construct
GLGELPYWGRYTDK

SEQ ID NO: 12651 - protein, 14 aa, synthetic construct
GLGEPCRGDTDKLI

SEQ ID NO: 12652 - protein, 14 aa, synthetic construct
GLGEPCPGDTDNLI

SEQ ID NO: 12653 - protein, 10 aa, synthetic construct
GLGEPCPGDT

SEQ ID NO: 12654 - protein, 14 aa, synthetic construct
GLGEMGASYTDKLI

SEQ ID NO: 12655 - protein, 14 aa, synthetic construct
GLGEMGASNTDKLI

SEQ ID NO: 12656 - protein, 13 aa, synthetic construct
GLGEMGADTDKLI

SEQ ID NO: 12657 - protein, 13 aa, synthetic construct
GLGELYTEKINFG

SEQ ID NO: 12658 - protein, 14 aa, synthetic construct
LLGNTVLGIPINSS

SEQ ID NO: 12659 - protein, 11 aa, synthetic construct
GLGELYTDKLY

SEQ ID NO: 12660 - protein, 13 aa, synthetic construct
GLGELRVGELYTD

SEQ ID NO: 12661 - protein, 14 aa, synthetic construct
GLGELRTGGYGTDK

SEQ ID NO: 12662 - protein, 12 aa, synthetic construct
LLGNWDIHRSTH

SEQ ID NO: 12663 - protein, 14 aa, synthetic construct
GLGELRTGGYECTD

SEQ ID NO: 12664 - protein, 14 aa, synthetic construct
GLGELRTGAYEYTD

SEQ ID NO: 12665 - protein, 11 aa, synthetic construct
GLGELRGLGLF

SEQ ID NO: 12666 - protein, 14 aa, synthetic construct
GLGELRGGPYCDKL

SEQ ID NO: 12667 - protein, 12 aa, synthetic construct
GLGELRDTHKLI

SEQ ID NO: 12668 - protein, 12 aa, synthetic construct
GLGELRDTDKVI

SEQ ID NO: 12669 - protein, 12 aa, synthetic construct
GLGELRDTDKVF

SEQ ID NO: 12670 - protein, 14 aa, synthetic construct
LLGNWGDTGPINSS

SEQ ID NO: 12671 - protein, 12 aa, synthetic construct
GLGELRDTDKFI

SEQ ID NO: 12672 - protein, 14 aa, synthetic construct
GLGELPYWGSSTDK

SEQ ID NO: 12673 - protein, 14 aa, synthetic construct
GLGEPCPGHTDILI

SEQ ID NO: 12674 - protein, 14 aa, synthetic construct
GLGEPCTGDTAQLI

SEQ ID NO: 12675 - protein, 12 aa, synthetic construct
GLGERGITDILI

SEQ ID NO: 12676 - protein, 13 aa, synthetic construct
LLGNSYWGIQINS

SEQ ID NO: 12677 - protein, 12 aa, synthetic construct
GLGERGGGGRGR

SEQ ID NO: 12678 - protein, 12 aa, synthetic construct
GLGERGESDNLI

SEQ ID NO: 12679 - protein, 12 aa, synthetic construct
GLGERGDSDQLI

SEQ ID NO: 12680 - protein, 12 aa, synthetic construct
GLGERGDSDKLF

SEQ ID NO: 12681 - protein, 12 aa, synthetic construct
GLGERGDSDKHI

SEQ ID NO: 12682 - protein, 12 aa, synthetic construct
GLGERGDRDKLI

SEQ ID NO: 12683 - protein, 12 aa, synthetic construct
GLGERGASDKLI

SEQ ID NO: 12684 - protein, 14 aa, synthetic construct
GLGEPSYWGLHTDK

SEQ ID NO: 12685 - protein, 14 aa, synthetic construct
GLGEPRSYVLGDTD

SEQ ID NO: 12686 - protein, 14 aa, synthetic construct
GLGEPRNGGYAYTD

SEQ ID NO: 12687 - protein, 14 aa, synthetic construct
GLGEPPYGIGGLTA

SEQ ID NO: 12688 - protein, 14 aa, synthetic construct
LLGNSYWGIKINST

SEQ ID NO: 12689 - protein, 14 aa, synthetic construct
GLGEPPSYALGDTD

SEQ ID NO: 12690 - protein, 9 aa, synthetic construct
GLGEPPPLL

SEQ ID NO: 12691 - protein, 14 aa, synthetic construct
GLGEPPAYVLGDTD

SEQ ID NO: 12692 - protein, 14 aa, synthetic construct
GLGEPGRYNADKLI

SEQ ID NO: 12693 - protein, 14 aa, synthetic construct
GLGEPGGYSAPGTP

SEQ ID NO: 12694 - protein, 14 aa, synthetic construct
GLGEPGGYNSDKLI

SEQ ID NO: 12695 - protein, 14 aa, synthetic construct
GLGEPGGSNTDKVI

SEQ ID NO: 12696 - protein, 14 aa, synthetic construct
GLGEPCTGDTEKLI

SEQ ID NO: 12697 - protein, 14 aa, synthetic construct
GLGEPCTGDTDQLI

SEQ ID NO: 12698 - protein, 14 aa, synthetic construct
DLGASYAPVPEKII

SEQ ID NO: 12699 - protein, 13 aa, synthetic construct
DLGASYAPVPDKL

SEQ ID NO: 12700 - protein, 14 aa, synthetic construct
ALVELGDRALTTQL

SEQ ID NO: 12701 - protein, 13 aa, synthetic construct
AQGELGASYTEKL

SEQ ID NO: 12702 - protein, 6 aa, synthetic construct
ARGAFL

SEQ ID NO: 12703 - protein, 14 aa, synthetic construct
ARGAETGGYTDQLI

SEQ ID NO: 12704 - protein, 11 aa, synthetic construct
ARGAAYTEKLI

SEQ ID NO: 12705 - protein, 11 aa, synthetic construct
ARGAAYTEILF

SEQ ID NO: 12706 - protein, 11 aa, synthetic construct
ARGAAYSDKHI

SEQ ID NO: 12707 - protein, 13 aa, synthetic construct
ARGAANAPVPDKL

SEQ ID NO: 12708 - protein, 12 aa, synthetic construct
AREELGMTDKLI

SEQ ID NO: 12709 - protein, 9 aa, synthetic construct
ARADLPPGG

SEQ ID NO: 12710 - protein, 12 aa, synthetic construct
ARADETGGYTDK

SEQ ID NO: 12711 - protein, 12 aa, synthetic construct
AQGVWAINDELI

SEQ ID NO: 12712 - protein, 12 aa, synthetic construct
APVDRGDSDKLI

SEQ ID NO: 12713 - protein, 14 aa, synthetic construct
ALWVILGDTNTDKL

SEQ ID NO: 12714 - protein, 12 aa, synthetic construct
APGVWGINDKII

SEQ ID NO: 12715 - protein, 13 aa, synthetic construct
APGVTGGYTENLI

SEQ ID NO: 12716 - protein, 13 aa, synthetic construct
APGVTGGYTDQLI

SEQ ID NO: 12717 - protein, 12 aa, synthetic construct
PVGDIRIFDKLI

SEQ ID NO: 12718 - protein, 14 aa, synthetic construct
APGRYWGLYTDKLI

SEQ ID NO: 12719 - protein, 14 aa, synthetic construct
APGRYGGGPLTAQL

SEQ ID NO: 12720 - protein, 12 aa, synthetic construct
APGNWGIRDKLI

SEQ ID NO: 12721 - protein, 14 aa, synthetic construct
APGHLPTWGSNTDK

SEQ ID NO: 12722 - protein, 13 aa, synthetic construct
APGGTGGYTDKLI

SEQ ID NO: 12723 - protein, 14 aa, synthetic construct
APGETTYGISDKLI

SEQ ID NO: 12724 - protein, 13 aa, synthetic construct
ARGALGADTEKLI

SEQ ID NO: 12725 - protein, 14 aa, synthetic construct
ARGALGASYSEHLI

SEQ ID NO: 12726 - protein, 14 aa, synthetic construct
PRGEETGGYTDKLI

SEQ ID NO: 12727 - protein, 10 aa, synthetic construct
ARGALGDKLI

SEQ ID NO: 12728 - protein, 11 aa, synthetic construct
ARGALYTEKLI

SEQ ID NO: 12729 - protein, 12 aa, synthetic construct
ARGALRKFDQLI

SEQ ID NO: 12730 - protein, 10 aa, synthetic construct
ARGALRDTGN

SEQ ID NO: 12731 - protein, 6 aa, synthetic construct
PRGAVG

SEQ ID NO: 12732 - protein, 14 aa, synthetic construct
ARGALPYWGRYTDK

SEQ ID NO: 12733 - protein, 14 aa, synthetic construct
ARGALPLGVLNTDK

SEQ ID NO: 12734 - protein, 7 aa, synthetic construct
ARGALLP

SEQ ID NO: 12735 - protein, 13 aa, synthetic construct
ARGALGYTGDKLL

SEQ ID NO: 12736 - protein, 14 aa, synthetic construct
ARGALGSSYTDQLI

SEQ ID NO: 12737 - protein, 8 aa, synthetic construct
ARGALGRA

SEQ ID NO: 12738 - protein, 13 aa, synthetic construct
ARGALGNNSDKLI

SEQ ID NO: 12739 - protein, 12 aa, synthetic construct
ARGALGMTDQLI

SEQ ID NO: 12740 - protein, 12 aa, synthetic construct
ARGALGMTDKLI

SEQ ID NO: 12741 - protein, 12 aa, synthetic construct
ARGALGMSDKVL

SEQ ID NO: 12742 - protein, 13 aa, synthetic construct
ARGALGGSAEKLI

SEQ ID NO: 12743 - protein, 13 aa, synthetic construct
ARGALGDTGETLI

SEQ ID NO: 12744 - protein, 13 aa, synthetic construct
ARGALGDTGEKLI

SEQ ID NO: 12745 - protein, 13 aa, synthetic construct
ARGALGDTGDKLI

SEQ ID NO: 12746 - protein, 12 aa, synthetic construct
ARGALGDTDKLI

SEQ ID NO: 12747 - protein, 8 aa, synthetic construct
ARGALGDT

SEQ ID NO: 12748 - protein, 14 aa, synthetic construct
ARGALGDRALTAQL

SEQ ID NO: 12749 - protein, 14 aa, synthetic construct
APGETSYGISDKPI

SEQ ID NO: 12750 - protein, 12 aa, synthetic construct
APGERGMTDKLI

SEQ ID NO: 12751 - protein, 14 aa, synthetic construct
APGEPPSYVLGDTD

SEQ ID NO: 12752 - protein, 13 aa, synthetic construct
QVGGHIILFGTIN

SEQ ID NO: 12753 - protein, 8 aa, synthetic construct
APGEGKLS

SEQ ID NO: 12754 - protein, 11 aa, synthetic construct
APGEAYTDKLN

SEQ ID NO: 12755 - protein, 11 aa, synthetic construct
APGDVGDNKLI

SEQ ID NO: 12756 - protein, 14 aa, synthetic construct
APGDPCTGDTEKLI

SEQ ID NO: 12757 - protein, 11 aa, synthetic construct
APGDLRGLGLI

SEQ ID NO: 12758 - protein, 12 aa, synthetic construct
APGDLRDTDKLI

SEQ ID NO: 12759 - protein, 12 aa, synthetic construct
APGDLGDTDKLI

SEQ ID NO: 12760 - protein, 14 aa, synthetic construct
APGDLGDRALTAQL

SEQ ID NO: 12761 - protein, 10 aa, synthetic construct
APGDLGDKLI

SEQ ID NO: 12762 - protein, 13 aa, synthetic construct
APGDLDWGRRGLI

SEQ ID NO: 12763 - protein, 13 aa, synthetic construct
APGASYAPVPDQL

SEQ ID NO: 12764 - skipped

SEQ ID NO: 12765 - protein, 5 aa, synthetic construct
REHDR

SEQ ID NO: 12766 - protein, 9 aa, synthetic construct
RIGGTDKLI

SEQ ID NO: 12767 - protein, 14 aa, synthetic construct
RLGAPGGYNTYKLI

SEQ ID NO: 12768 - protein, 11 aa, synthetic construct
ANGERGITDKL

SEQ ID NO: 12769 - protein, 12 aa, synthetic construct
ALWVWGISDKLI

SEQ ID NO: 12770 - protein, 14 aa, synthetic construct
RLGARGAGLCQHNS

SEQ ID NO: 12771 - protein, 12 aa, synthetic construct
ALWVWGINDELI

SEQ ID NO: 12772 - protein, 12 aa, synthetic construct
ALWVWGINDEII

SEQ ID NO: 12773 - protein, 13 aa, synthetic construct
ALWVLLGDTRKII

SEQ ID NO: 12774 - protein, 14 aa, synthetic construct
APGELCWGILSSWD

SEQ ID NO: 12775 - protein, 13 aa, synthetic construct
APGELGADTDNLI

SEQ ID NO: 12776 - protein, 14 aa, synthetic construct
APGEPLLLGDTIDK

SEQ ID NO: 12777 - protein, 14 aa, synthetic construct
APGELGASYTDKLI

SEQ ID NO: 12778 - protein, 13 aa, synthetic construct
APGEPGGYTEKLI

SEQ ID NO: 12779 - protein, 14 aa, synthetic construct
QLAEPSTGDTEKLI

SEQ ID NO: 12780 - protein, 8 aa, synthetic construct
QLGGHIIF

SEQ ID NO: 12781 - protein, 12 aa, synthetic construct
APGEPGDTDKLI

SEQ ID NO: 12782 - protein, 14 aa, synthetic construct
APGEPCTGDTYKLI

SEQ ID NO: 12783 - protein, 14 aa, synthetic construct
APGEPCTGDTDKLI

SEQ ID NO: 12784 - protein, 13 aa, synthetic construct
APGELVLGDDKLI

SEQ ID NO: 12785 - skipped

SEQ ID NO: 12786 - protein, 14 aa, synthetic construct
APGELRTGGYGTDK

SEQ ID NO: 12787 - protein, 14 aa, synthetic construct
APGELRTGGYEYTD

SEQ ID NO: 12788 - protein, 12 aa, synthetic construct
APGELRDTDQLI

SEQ ID NO: 12789 - protein, 13 aa, synthetic construct
APGELPYWGRYTD

SEQ ID NO: 12790 - protein, 14 aa, synthetic construct
APGELPYWGRSTDK

SEQ ID NO: 12791 - protein, 14 aa, synthetic construct
APGELPLYWGLYTD

SEQ ID NO: 12792 - protein, 14 aa, synthetic construct
APGELPLGVLYTDK

SEQ ID NO: 12793 - protein, 14 aa, synthetic construct
APGELLLGDPDKLI

SEQ ID NO: 12794 - protein, 12 aa, synthetic construct
APGELGITDKLI

SEQ ID NO: 12795 - protein, 13 aa, synthetic construct
APGELGGYADNLI

SEQ ID NO: 12796 - protein, 13 aa, synthetic construct
APGELGGSADKLI

SEQ ID NO: 12797 - protein, 10 aa, synthetic construct
APGELGEKLI

SEQ ID NO: 12798 - protein, 13 aa, synthetic construct
APGELGDTGDKLI

SEQ ID NO: 12799 - protein, 8 aa, synthetic construct
ARGAPASW

SEQ ID NO: 12800 - protein, 14 aa, synthetic construct
ARGAPCTGDTDKLI

SEQ ID NO: 12801 - protein, 14 aa, synthetic construct
ARGAPPSYVLGDTD

SEQ ID NO: 12802 - protein, 11 aa, synthetic construct
ARGDRGDSDKL

SEQ ID NO: 12803 - protein, 10 aa, synthetic construct
ARGDPGGYTD

SEQ ID NO: 12804 - protein, 13 aa, synthetic construct
ARGDPCPGETEKV

SEQ ID NO: 12805 - protein, 14 aa, synthetic construct
ARGDPCPGDTDKLI

SEQ ID NO: 12806 - protein, 13 aa, synthetic construct
ARGDLYWGILSSW

SEQ ID NO: 12807 - protein, 11 aa, synthetic construct
ARGDLYTDKLI

SEQ ID NO: 12808 - protein, 14 aa, synthetic construct
ARGDLYGGILSSWD

SEQ ID NO: 12809 - protein, 14 aa, synthetic construct
ARGDLRWGPYTDKL

SEQ ID NO: 12810 - protein, 14 aa, synthetic construct
ARGDLRWGPYTDIL

SEQ ID NO: 12811 - protein, 14 aa, synthetic construct
ARGDLRTGGYEYTD

SEQ ID NO: 12812 - protein, 12 aa, synthetic construct
ARGDLRSFDKLI

SEQ ID NO: 12813 - protein, 7 aa, synthetic construct
PLGHLPT

SEQ ID NO: 12814 - protein, 12 aa, synthetic construct
ARGDLRIFEKLI

SEQ ID NO: 12815 - protein, 11 aa, synthetic construct
ARGDLRGLGLL

SEQ ID NO: 12816 - protein, 12 aa, synthetic construct
ARGDLRDTDKLI

SEQ ID NO: 12817 - protein, 14 aa, synthetic construct
ARGDLPYWGRYPDK

SEQ ID NO: 12818 - protein, 10 aa, synthetic construct
ARGDLPSGGR

SEQ ID NO: 12819 - protein, 14 aa, synthetic construct
ARGDLPLYWGLYTD

SEQ ID NO: 12820 - protein, 13 aa, synthetic construct
PLGHLPTWGSYTD

SEQ ID NO: 12821 - protein, 12 aa, synthetic construct
ARGDLPLGVLYT

SEQ ID NO: 12822 - protein, 12 aa, synthetic construct
PLGHWGILEKLI

SEQ ID NO: 12823 - protein, 14 aa, synthetic construct
ARGDLLLGDPDQLI

SEQ ID NO: 12824 - protein, 14 aa, synthetic construct
ARGDPRPGGYAYTD

SEQ ID NO: 12825 - protein, 12 aa, synthetic construct
ARGDRGHSDKLI

SEQ ID NO: 12826 - protein, 13 aa, synthetic construct
ARGDLGVYTDKLI

SEQ ID NO: 12827 - protein, 13 aa, synthetic construct
ARGDVGADTDQLI

SEQ ID NO: 12828 - protein, 14 aa, synthetic construct
ARGEETGGYTPINS

SEQ ID NO: 12829 - protein, 14 aa, synthetic construct
ARGEETGGYTNKLI

SEQ ID NO: 12830 - protein, 14 aa, synthetic construct
ARGEETGGYTEKLI

SEQ ID NO: 12831 - protein, 14 aa, synthetic construct
ALGGPYREDGTDKL

SEQ ID NO: 12832 - protein, 12 aa, synthetic construct
PLGEMRDTDKLI

SEQ ID NO: 12833 - protein, 14 aa, synthetic construct
PLGEPCTGDTVKLI

SEQ ID NO: 12834 - protein, 14 aa, synthetic construct
PLGEPVLGATYTDK

SEQ ID NO: 12835 - protein, 14 aa, synthetic construct
ARGEETGGSTEILI

SEQ ID NO: 12836 - protein, 11 aa, synthetic construct
ARGEAYTEKLT

SEQ ID NO: 12837 - protein, 12 aa, synthetic construct
PLGERGITDKLI

SEQ ID NO: 12838 - protein, 11 aa, synthetic construct
ARGEAYTAQLI

SEQ ID NO: 12839 - protein, 11 aa, synthetic construct
ARGEASTDKLI

SEQ ID NO: 12840 - protein, 11 aa, synthetic construct
ARGEADTEKHI

SEQ ID NO: 12841 - protein, 11 aa, synthetic construct
ARGEADTDKLV

SEQ ID NO: 12842 - protein, 13 aa, synthetic construct
ARGDVGGYADKLI

SEQ ID NO: 12843 - protein, 11 aa, synthetic construct
PLGGGYADKHN

SEQ ID NO: 12844 - protein, 11 aa, synthetic construct
ARGDVGEKKLI

SEQ ID NO: 12845 - protein, 11 aa, synthetic construct
ARGDVGDTKLI

SEQ ID NO: 12846 - protein, 11 aa, synthetic construct
ARGDVGDKKLS

SEQ ID NO: 12847 - protein, 11 aa, synthetic construct
ARGDVGANKLI

SEQ ID NO: 12848 - protein, 11 aa, synthetic construct
ARGDVGAKKLI

SEQ ID NO: 12849 - protein, 14 aa, synthetic construct
PLGNLGDTTPINSS

SEQ ID NO: 12850 - protein, 12 aa, synthetic construct
ARGDLGVTDKLI

SEQ ID NO: 12851 - protein, 14 aa, synthetic construct
ARGAPVLGASYTDK

SEQ ID NO: 12852 - protein, 14 aa, synthetic construct
ARGDFLPRGSPIIS

SEQ ID NO: 12853 - protein, 13 aa, synthetic construct
ARGDEGGYADRLI

SEQ ID NO: 12854 - protein, 12 aa, synthetic construct
ARGAWGINDKLI

SEQ ID NO: 12855 - protein, 14 aa, synthetic construct
ARGAVLLGDPDKLI

SEQ ID NO: 12856 - protein, 14 aa, synthetic construct
ARGASYLAYATDKL

SEQ ID NO: 12857 - protein, 14 aa, synthetic construct
PLGTLGDTTPINSS

SEQ ID NO: 12858 - protein, 14 aa, synthetic construct
ARGASYEPVPDQLI

SEQ ID NO: 12859 - protein, 14 aa, synthetic construct
ARGASNAPVPDKLI

SEQ ID NO: 12860 - protein, 12 aa, synthetic construct
PLGVLGMTDKLI

SEQ ID NO: 12861 - protein, 13 aa, synthetic construct
PLRVTRAYTEKLN

SEQ ID NO: 12862 - protein, 11 aa, synthetic construct
PLVDVGDNKLI

SEQ ID NO: 12863 - protein, 12 aa, synthetic construct
PLVELRDTDKLN

SEQ ID NO: 12864 - protein, 9 aa, synthetic construct
PLWASNIGY

SEQ ID NO: 12865 - protein, 9 aa, synthetic construct
ARGASFLGD

SEQ ID NO: 12866 - protein, 9 aa, synthetic construct
PLWGTDKLK

SEQ ID NO: 12867 - protein, 7 aa, synthetic construct
ARGASDG

SEQ ID NO: 12868 - protein, 13 aa, synthetic construct
PMGNWGLTPINSS

SEQ ID NO: 12869 - protein, 14 aa, synthetic construct
ARGASCLGYATDKL

SEQ ID NO: 12870 - protein, 12 aa, synthetic construct
PQAEHDKYTDKL

SEQ ID NO: 12871 - protein, 13 aa, synthetic construct
PQAELDWGRRGLF

SEQ ID NO: 12872 - protein, 12 aa, synthetic construct
ARGARGDSDKLI

SEQ ID NO: 12873 - protein, 14 aa, synthetic construct
ARGAPYVLGARSKL

SEQ ID NO: 12874 - protein, 14 aa, synthetic construct
ARGDETGGYTDKLI

SEQ ID NO: 12875 - protein, 12 aa, synthetic construct
ARGDGPTVLGAT

SEQ ID NO: 12876 - protein, 14 aa, synthetic construct
PLGNPTYWGPVVNS

SEQ ID NO: 12877 - protein, 14 aa, synthetic construct
ARGDLGASYTAKLI

SEQ ID NO: 12878 - protein, 7 aa, synthetic construct
ARGDLGR

SEQ ID NO: 12879 - protein, 12 aa, synthetic construct
ARGDLGMTEQLI

SEQ ID NO: 12880 - protein, 12 aa, synthetic construct
ARGDLGMTEKLI

SEQ ID NO: 12881 - protein, 12 aa, synthetic construct
ARGDLGMTDKRI

SEQ ID NO: 12882 - protein, 12 aa, synthetic construct
ARGDLGLTEKRI

SEQ ID NO: 12883 - protein, 13 aa, synthetic construct
ARGDLGIYTDKLI

SEQ ID NO: 12884 - protein, 13 aa, synthetic construct
ARGDLGGYGTEKL

SEQ ID NO: 12885 - protein, 13 aa, synthetic construct
ARGDLGGYADTLI

SEQ ID NO: 12886 - protein, 13 aa, synthetic construct
ARGDLGGYADELI

SEQ ID NO: 12887 - protein, 13 aa, synthetic construct
ARGDLGGSADKLI

SEQ ID NO: 12888 - protein, 13 aa, synthetic construct
ARGDLGGSADIVL

SEQ ID NO: 12889 - protein, 13 aa, synthetic construct
ARGDLGGDADKLI

SEQ ID NO: 12890 - protein, 13 aa, synthetic construct
ARGDLGETGDQLI

SEQ ID NO: 12891 - protein, 14 aa, synthetic construct
ARGDLGERALTAQL

SEQ ID NO: 12892 - protein, 10 aa, synthetic construct
ARGDLGEQLI

SEQ ID NO: 12893 - protein, 12 aa, synthetic construct
ARGDLGEPDQLI

SEQ ID NO: 12894 - protein, 13 aa, synthetic construct
ARGDLGDTGEKLI

SEQ ID NO: 12895 - protein, 13 aa, synthetic construct
ARGDLGDTGDQLI

SEQ ID NO: 12896 - protein, 13 aa, synthetic construct
ARGDLGDTGDKLI

SEQ ID NO: 12897 - protein, 14 aa, synthetic construct
PLGRYWGGPLTAQL

SEQ ID NO: 12898 - protein, 10 aa, synthetic construct
ARGDLGDKLI

SEQ ID NO: 12899 - protein, 13 aa, synthetic construct
ALWVLGADTDKII

SEQ ID NO: 12900 - protein, 14 aa, synthetic construct
ALWSTYYGISYKLI

SEQ ID NO: 12901 - protein, 8 aa, synthetic construct
ARGEGTLI

SEQ ID NO: 12902 - protein, 13 aa, synthetic construct
ALVQQDWGRRGLI

SEQ ID NO: 12903 - protein, 12 aa, synthetic construct
ALVVWGINEKLI

SEQ ID NO: 12904 - protein, 12 aa, synthetic construct
ALVVWGINDKII

SEQ ID NO: 12905 - protein, 10 aa, synthetic construct
ALVVWGINDK

SEQ ID NO: 12906 - protein, 12 aa, synthetic construct
ALVVWGINDELI

SEQ ID NO: 12907 - protein, 14 aa, synthetic construct
ALVVPYQEDGTDKL

SEQ ID NO: 12908 - protein, 13 aa, synthetic construct
ALVVNGGYTHKLI

SEQ ID NO: 12909 - protein, 14 aa, synthetic construct
ALVVILSDTCKIKF

SEQ ID NO: 12910 - protein, 13 aa, synthetic construct
ALVVILGDTRKLI

SEQ ID NO: 12911 - protein, 7 aa, synthetic construct
ALVVDRD

SEQ ID NO: 12912 - protein, 13 aa, synthetic construct
ALVRYWGIRGNSS

SEQ ID NO: 12913 - protein, 14 aa, synthetic construct
ALVNLPTWGSYTDK

SEQ ID NO: 12914 - protein, 14 aa, synthetic construct
RLGDPTKSTAPIKS

SEQ ID NO: 12915 - protein, 14 aa, synthetic construct
ALVHLPTWGSYTDK

SEQ ID NO: 12916 - protein, 13 aa, synthetic construct
ALVHLPPWGSYTD

SEQ ID NO: 12917 - protein, 14 aa, synthetic construct
ALVHLHTWGSYTDK

SEQ ID NO: 12918 - protein, 14 aa, synthetic construct
ALVHIPTWGSYTDK

SEQ ID NO: 12919 - protein, 9 aa, synthetic construct
ALVGTEKLI

SEQ ID NO: 12920 - protein, 9 aa, synthetic construct
ALVGTDTLI

SEQ ID NO: 12921 - protein, 9 aa, synthetic construct
ALVGTDKVI

SEQ ID NO: 12922 - protein, 14 aa, synthetic construct
SLGELGGYGTDKLI

SEQ ID NO: 12923 - protein, 8 aa, synthetic construct
ALVGTDKL

SEQ ID NO: 12924 - protein, 9 aa, synthetic construct
ALVGTDKII

SEQ ID NO: 12925 - protein, 12 aa, synthetic construct
ALVVWVINDKLI

SEQ ID NO: 12926 - protein, 12 aa, synthetic construct
ALVVWWINYKLI

SEQ ID NO: 12927 - protein, 9 aa, synthetic construct
ALVWTDKLI

SEQ ID NO: 12928 - protein, 8 aa, synthetic construct
ALWANDKL

SEQ ID NO: 12929 - protein, 13 aa, synthetic construct
ALWEIELGRGVLI

SEQ ID NO: 12930 - protein, 14 aa, synthetic construct
ALWEETGGYTNKLI

SEQ ID NO: 12931 - protein, 13 aa, synthetic construct
ALWEETGGYTDKL

SEQ ID NO: 12932 - protein, 14 aa, synthetic construct
ALWEETGGYTDKII

SEQ ID NO: 12933 - protein, 10 aa, synthetic construct
ALWDVPLWVL

SEQ ID NO: 12934 - protein, 11 aa, synthetic construct
ALWDVGDHKLI

SEQ ID NO: 12935 - protein, 13 aa, synthetic construct
SLGELELARFGLI

SEQ ID NO: 12936 - protein, 7 aa, synthetic construct
ALWDSSK

SEQ ID NO: 12937 - protein, 13 aa, synthetic construct
ALWDPGGYTDKLI

SEQ ID NO: 12938 - protein, 14 aa, synthetic construct
SLGELGASYTDKLI

SEQ ID NO: 12939 - protein, 14 aa, synthetic construct
ALWDPGGYKTDKLI

SEQ ID NO: 12940 - protein, 14 aa, synthetic construct
ALWDPCTGDTDKLI

SEQ ID NO: 12941 - protein, 12 aa, synthetic construct
ALWDLRLFVKLI

SEQ ID NO: 12942 - protein, 12 aa, synthetic construct
ALWDLGMTDKLI

SEQ ID NO: 12943 - protein, 13 aa, synthetic construct
ALWDLGIYTDKLI

SEQ ID NO: 12944 - protein, 14 aa, synthetic construct
ALWDLGASYTDKLI

SEQ ID NO: 12945 - protein, 14 aa, synthetic construct
ALWDETGGYTDKLI

SEQ ID NO: 12946 - protein, 14 aa, synthetic construct
ALWASYSPVPDKLI

SEQ ID NO: 12947 - protein, 14 aa, synthetic construct
ALWASYEPVPDKLI

SEQ ID NO: 12948 - protein, 7 aa, synthetic construct
ALWASYE

SEQ ID NO: 12949 - protein, 13 aa, synthetic construct
ALWASYAPVPEKV

SEQ ID NO: 12950 - protein, 12 aa, synthetic construct
ALVGRGDSDKII

SEQ ID NO: 12951 - protein, 13 aa, synthetic construct
ALVGQDWGRRGLI

SEQ ID NO: 12952 - protein, 14 aa, synthetic construct
ALVGPYQEYGTDKL

SEQ ID NO: 12953 - protein, 14 aa, synthetic construct
ALVEPCTGDTDKII

SEQ ID NO: 12954 - protein, 9 aa, synthetic construct
ALVEMGVTK

SEQ ID NO: 12955 - protein, 14 aa, synthetic construct
ALVEMGDRAMTAQL

SEQ ID NO: 12956 - protein, 14 aa, synthetic construct
ALVEMGDRALTAQL

SEQ ID NO: 12957 - protein, 9 aa, synthetic construct
ALVELVPPD

SEQ ID NO: 12958 - protein, 14 aa, synthetic construct
ALVELRWGPYTDKL

SEQ ID NO: 12959 - protein, 14 aa, synthetic construct
ALVELRTGGYEYTD

SEQ ID NO: 12960 - protein, 12 aa, synthetic construct
ALVELRILDKLI

SEQ ID NO: 12961 - protein, 12 aa, synthetic construct
ALVELRIFDKVI

SEQ ID NO: 12962 - protein, 14 aa, synthetic construct
ALVELPTGGFGYTD

SEQ ID NO: 12963 - protein, 14 aa, synthetic construct
ALVELPQGVLYTDK

SEQ ID NO: 12964 - protein, 14 aa, synthetic construct
ALVELPMGVLYTDK

SEQ ID NO: 12965 - protein, 14 aa, synthetic construct
ALVELPLYWWLYTD

SEQ ID NO: 12966 - protein, 11 aa, synthetic construct
ALVELPLYWWL

SEQ ID NO: 12967 - protein, 14 aa, synthetic construct
ALVELLMGDPDKLI

SEQ ID NO: 12968 - protein, 14 aa, synthetic construct
ALVELLLGDTDKLI

SEQ ID NO: 12969 - protein, 13 aa, synthetic construct
ALVELGIYTDQLI

SEQ ID NO: 12970 - protein, 12 aa, synthetic construct
ALVELGIADKLI

SEQ ID NO: 12971 - protein, 14 aa, synthetic construct
ALVELGGYGADKLI

SEQ ID NO: 12972 - protein, 13 aa, synthetic construct
ALVELGGYAYKLI

SEQ ID NO: 12973 - protein, 12 aa, synthetic construct
ALVELGDTDKLT

SEQ ID NO: 12974 - protein, 12 aa, synthetic construct
ALVELGDTDKII

SEQ ID NO: 12975 - protein, 14 aa, synthetic construct
ALVEMRWGPYTDKL

SEQ ID NO: 12976 - protein, 13 aa, synthetic construct
ALVEPCTGDTDKL

SEQ ID NO: 12977 - protein, 13 aa, synthetic construct
ALVGPYQEECTDK

SEQ ID NO: 12978 - protein, 14 aa, synthetic construct
ALVEPGCVNTDKVI

SEQ ID NO: 12979 - protein, 12 aa, synthetic construct
SLGELGMTDKLI

SEQ ID NO: 12980 - protein, 14 aa, synthetic construct
ALVGPYNEDGTDKL

SEQ ID NO: 12981 - protein, 14 aa, synthetic construct
ALVGPYKEDGTDKL

SEQ ID NO: 12982 - protein, 11 aa, synthetic construct
ALVGGYSDKLN

SEQ ID NO: 12983 - protein, 11 aa, synthetic construct
ALVGGYSDKII

SEQ ID NO: 12984 - protein, 11 aa, synthetic construct
ALVGDIPINSS

SEQ ID NO: 12985 - protein, 13 aa, synthetic construct
ALVEVGGYADKLI

SEQ ID NO: 12986 - protein, 14 aa, synthetic construct
ALVEVGGDGSDKLI

SEQ ID NO: 12987 - protein, 13 aa, synthetic construct
ALVEVGDTGDKLI

SEQ ID NO: 12988 - protein, 13 aa, synthetic construct
ALVEVDWGRRGLI

SEQ ID NO: 12989 - protein, 13 aa, synthetic construct
ALVERVGYADKLI

SEQ ID NO: 12990 - protein, 12 aa, synthetic construct
ALVERGITDTLI

SEQ ID NO: 12991 - protein, 12 aa, synthetic construct
ALVERGDRDKII

SEQ ID NO: 12992 - protein, 14 aa, synthetic construct
ALVEPSYWGINTDK

SEQ ID NO: 12993 - protein, 14 aa, synthetic construct
ALVEPSLYNTDKLI

SEQ ID NO: 12994 - protein, 14 aa, synthetic construct
ALVEPHVLGARSKL

SEQ ID NO: 12995 - protein, 13 aa, synthetic construct
ALVEPGGYTDNNI

SEQ ID NO: 12996 - protein, 14 aa, synthetic construct
SLGELPLYWGLYTD

SEQ ID NO: 12997 - protein, 14 aa, synthetic construct
SLGELPQGVLYTDK

SEQ ID NO: 12998 - protein, 14 aa, synthetic construct
ALVEPGGYNTYKLV

SEQ ID NO: 12999 - protein, 14 aa, synthetic construct
SLGELYWGILSSWD

SEQ ID NO: 13000 - protein, 11 aa, synthetic construct
ALWEIPLYLGL

SEQ ID NO: 13001 - protein, 14 aa, synthetic construct
ALWEIPMGVLYTDK

SEQ ID NO: 13002 - protein, 12 aa, synthetic construct
ALWEIRDTDKLI

SEQ ID NO: 13003 - protein, 14 aa, synthetic construct
ALWERGGYGTEKLI

SEQ ID NO: 13004 - protein, 14 aa, synthetic construct
ALWEPYVLGASYTD

SEQ ID NO: 13005 - protein, 11 aa, synthetic construct
ALWEPYTDKLI

SEQ ID NO: 13006 - protein, 14 aa, synthetic construct
ALWEPVLGASSTDQ

SEQ ID NO: 13007 - protein, 14 aa, synthetic construct
ALWEPVLGASNTDK

SEQ ID NO: 13008 - protein, 12 aa, synthetic construct
RLGERGRSDILI

SEQ ID NO: 13009 - protein, 11 aa, synthetic construct
ALWEPSYWGIN

SEQ ID NO: 13010 - protein, 14 aa, synthetic construct
ALWEPSYWGIKTDK

SEQ ID NO: 13011 - protein, 14 aa, synthetic construct
ALWEPSTGGYADKL

SEQ ID NO: 13012 - protein, 14 aa, synthetic construct
ALWEPSTGGSADKL

SEQ ID NO: 13013 - protein, 14 aa, synthetic construct
ALWEPCNGDTDKLI

SEQ ID NO: 13014 - protein, 14 aa, synthetic construct
ALWEMRWGPYTDKL

SEQ ID NO: 13015 - protein, 13 aa, synthetic construct
ALWELYWVRSGLI

SEQ ID NO: 13016 - protein, 11 aa, synthetic construct
ALWELYTDKLI

SEQ ID NO: 13017 - protein, 14 aa, synthetic construct
RLGNFPPGGGPPIN

SEQ ID NO: 13018 - protein, 13 aa, synthetic construct
ALWELWGYADKII

SEQ ID NO: 13019 - protein, 14 aa, synthetic construct
ALWELWDRALTAQL

SEQ ID NO: 13020 - protein, 14 aa, synthetic construct
ALWELVGYGTYKLI

SEQ ID NO: 13021 - protein, 11 aa, synthetic construct
ALWELSGLGLI

SEQ ID NO: 13022 - protein, 14 aa, synthetic construct
ALWELRWGTYTDKL

SEQ ID NO: 13023 - protein, 14 aa, synthetic construct
ALWELRNGGYEYTD

SEQ ID NO: 13024 - protein, 12 aa, synthetic construct
ALWELRILDKLI

SEQ ID NO: 13025 - protein, 12 aa, synthetic construct
ALWERGDSDKII

SEQ ID NO: 13026 - protein, 13 aa, synthetic construct
ALWERGIPAINSS

SEQ ID NO: 13027 - protein, 11 aa, synthetic construct
ALWELRGMGLI

SEQ ID NO: 13028 - protein, 12 aa, synthetic construct
ALWERGYSDKII

SEQ ID NO: 13029 - protein, 14 aa, synthetic construct
ALWRYWGGPLTAQL

SEQ ID NO: 13030 - protein, 11 aa, synthetic construct
RLGEAYTDKLI

SEQ ID NO: 13031 - protein, 11 aa, synthetic construct
ALWQPNTAKLI

SEQ ID NO: 13032 - protein, 14 aa, synthetic construct
ALWNRHTWGSYTDK

SEQ ID NO: 13033 - protein, 14 aa, synthetic construct
ALWNPVLGIPINSS

SEQ ID NO: 13034 - protein, 14 aa, synthetic construct
ALWHLPTRGSYTDK

SEQ ID NO: 13035 - protein, 14 aa, synthetic construct
RLGELRTGGYEYTD

SEQ ID NO: 13036 - protein, 14 aa, synthetic construct
ALWHLPTGGSYTEK

SEQ ID NO: 13037 - protein, 14 aa, synthetic construct
ALWHLHTWGSYTDK

SEQ ID NO: 13038 - protein, 9 aa, synthetic construct
ALWGTDQLI

SEQ ID NO: 13039 - protein, 9 aa, synthetic construct
ALWGTDKII

SEQ ID NO: 13040 - protein, 14 aa, synthetic construct
ALWGPYQEDGTAKL

SEQ ID NO: 13041 - protein, 13 aa, synthetic construct
ALWGLDWGRRGLI

SEQ ID NO: 13042 - protein, 11 aa, synthetic construct
ALWGGSSDKLI

SEQ ID NO: 13043 - protein, 11 aa, synthetic construct
ALWEVYTDKLI

SEQ ID NO: 13044 - protein, 13 aa, synthetic construct
ALWEVGGYAEKLF

SEQ ID NO: 13045 - protein, 14 aa, synthetic construct
ALWEVGASYTEKRI

SEQ ID NO: 13046 - protein, 14 aa, synthetic construct
ALWETVLGASYTDK

SEQ ID NO: 13047 - protein, 14 aa, synthetic construct
ALWETSNGISDILI

SEQ ID NO: 13048 - protein, 12 aa, synthetic construct
ALWERVITEKLI

SEQ ID NO: 13049 - protein, 9 aa, synthetic construct
ALWERSSYL

SEQ ID NO: 13050 - protein, 13 aa, synthetic construct
ALWELRGYADKLI

SEQ ID NO: 13051 - protein, 11 aa, synthetic construct
ALWELRGLALI

SEQ ID NO: 13052 - protein, 14 aa, synthetic construct
ALWEITYWGRYTDK

SEQ ID NO: 13053 - protein, 11 aa, synthetic construct
RVGTFTPRTSS

SEQ ID NO: 13054 - protein, 5 aa, synthetic construct
RYEEH

SEQ ID NO: 13055 - protein, 10 aa, synthetic construct
SENQTSEQQT

SEQ ID NO: 13056 - protein, 13 aa, synthetic construct
SLGDDRGGRPRQA

SEQ ID NO: 13057 - protein, 13 aa, synthetic construct
ALWELGGSADQLI

SEQ ID NO: 13058 - protein, 10 aa, synthetic construct
SLGDLGDKLI

SEQ ID NO: 13059 - protein, 12 aa, synthetic construct
SLGDLGMTDKLI

SEQ ID NO: 13060 - protein, 12 aa, synthetic construct
ALWELGDTEKLI

SEQ ID NO: 13061 - protein, 14 aa, synthetic construct
ALWELGDRALTEQL

SEQ ID NO: 13062 - protein, 10 aa, synthetic construct
ALWELGDKLI

SEQ ID NO: 13063 - protein, 14 aa, synthetic construct
ALWELGDIAFTAQL

SEQ ID NO: 13064 - protein, 13 aa, synthetic construct
ALWELGDAGDKII

SEQ ID NO: 13065 - protein, 13 aa, synthetic construct
ALWELGADTVKLI

SEQ ID NO: 13066 - protein, 13 aa, synthetic construct
ALWELGADTEKLI

SEQ ID NO: 13067 - protein, 13 aa, synthetic construct
ALWELGADTDQLI

SEQ ID NO: 13068 - protein, 13 aa, synthetic construct
ALWELEWGRMGII

SEQ ID NO: 13069 - protein, 13 aa, synthetic construct
SLGDLPLGVLYTD

SEQ ID NO: 13070 - protein, 11 aa, synthetic construct
SLGEAYTVKLI

SEQ ID NO: 13071 - protein, 13 aa, synthetic construct
ALWELDWGRRALI

SEQ ID NO: 13072 - protein, 13 aa, synthetic construct
ALWELDSGRMGLI

SEQ ID NO: 13073 - protein, 12 aa, synthetic construct
ALWELAMTDKVI

SEQ ID NO: 13074 - protein, 14 aa, synthetic construct
ALWEKGDSYTDKII

SEQ ID NO: 13075 - protein, 13 aa, synthetic construct
ALWELGGYAEKLI

SEQ ID NO: 13076 - protein, 13 aa, synthetic construct
ALWELGHTGDKLK

SEQ ID NO: 13077 - protein, 12 aa, synthetic construct
ALWELRDTDKLI

SEQ ID NO: 13078 - protein, 14 aa, synthetic construct
ALWELGILSSWDTR

SEQ ID NO: 13079 - protein, 14 aa, synthetic construct
RLGNFPTGGGPPIN

SEQ ID NO: 13080 - protein, 12 aa, synthetic construct
ALWELQDTDKLI

SEQ ID NO: 13081 - protein, 11 aa, synthetic construct
RLGNFTPINTS

SEQ ID NO: 13082 - protein, 13 aa, synthetic construct
RLGNPVLGDTPTP

SEQ ID NO: 13083 - protein, 13 aa, synthetic construct
RLGNWGLTPINSS

SEQ ID NO: 13084 - protein, 14 aa, synthetic construct
ALWELPLYWVLYTD

SEQ ID NO: 13085 - protein, 13 aa, synthetic construct
RLGNWGYTPINSS

SEQ ID NO: 13086 - protein, 11 aa, synthetic construct
ALWELPLYLGL

SEQ ID NO: 13087 - protein, 9 aa, synthetic construct
ALWELPLGV

SEQ ID NO: 13088 - protein, 14 aa, synthetic construct
ALWELPFYWWRYTD

SEQ ID NO: 13089 - protein, 14 aa, synthetic construct
ALWELLLGDPDKLI

SEQ ID NO: 13090 - protein, 14 aa, synthetic construct
ALWELGVYGTDKLI

SEQ ID NO: 13091 - protein, 13 aa, synthetic construct
ALWELGVTGDKLI

SEQ ID NO: 13092 - protein, 14 aa, synthetic construct
ALWELGPGGYDTDK

SEQ ID NO: 13093 - protein, 12 aa, synthetic construct
ALWELGMTDKLN

SEQ ID NO: 13094 - protein, 13 aa, synthetic construct
RLGTWGLTPINSS

SEQ ID NO: 13095 - protein, 12 aa, synthetic construct
ALWELGMTDKHI

SEQ ID NO: 13096 - protein, 13 aa, synthetic construct
ALWELGLTPINSS

SEQ ID NO: 13097 - protein, 13 aa, synthetic construct
ALWELGLTPIISS

SEQ ID NO: 13098 - protein, 13 aa, synthetic construct
ALWELGIYTDQLI

SEQ ID NO: 13099 - protein, 12 aa, synthetic construct
ALWELGITDKLI

SEQ ID NO: 13100 - protein, 14 aa, synthetic construct
ARGEETGGYTYKLI

SEQ ID NO: 13101 - protein, 14 aa, synthetic construct
ARGEISYGISDKLI

SEQ ID NO: 13102 - protein, 14 aa, synthetic construct
DLGASYAPVPAKLI

SEQ ID NO: 13103 - protein, 13 aa, synthetic construct
LLWSYWGIRGNSS

SEQ ID NO: 13104 - protein, 14 aa, synthetic construct
AVGELRTGGYEYTD

SEQ ID NO: 13105 - protein, 12 aa, synthetic construct
AVGELRSFDQLI

SEQ ID NO: 13106 - protein, 12 aa, synthetic construct
AVGELRIFDKLI

SEQ ID NO: 13107 - protein, 12 aa, synthetic construct
LLWNGGYPINSS

SEQ ID NO: 13108 - protein, 13 aa, synthetic construct
AVGELRGYADKLI

SEQ ID NO: 13109 - protein, 12 aa, synthetic construct
AVGELRDTDKVI

SEQ ID NO: 13110 - protein, 14 aa, synthetic construct
AVGELPYWGRYTDK

SEQ ID NO: 13111 - protein, 14 aa, synthetic construct
LLWPHMHPSPINSS

SEQ ID NO: 13112 - protein, 13 aa, synthetic construct
AVGELPYVAMYTV

SEQ ID NO: 13113 - protein, 13 aa, synthetic construct
AVGELPLGVRSTD

SEQ ID NO: 13114 - protein, 9 aa, synthetic construct
AVGELPLGV

SEQ ID NO: 13115 - protein, 13 aa, synthetic construct
AVGDLDWGRRGLI

SEQ ID NO: 13116 - protein, 14 aa, synthetic construct
AVGELLLGDPDKLI

SEQ ID NO: 13117 - protein, 13 aa, synthetic construct
AVGELLLGDHDKL

SEQ ID NO: 13118 - protein, 12 aa, synthetic construct
AVGELGVTDRLI

SEQ ID NO: 13119 - protein, 12 aa, synthetic construct
AVGELGMTDHLI

SEQ ID NO: 13120 - protein, 12 aa, synthetic construct
AVGELGIYTDQL

SEQ ID NO: 13121 - protein, 13 aa, synthetic construct
AVGELGGYADNLI

SEQ ID NO: 13122 - protein, 13 aa, synthetic construct
AVGELGGYADKLN

SEQ ID NO: 13123 - protein, 14 aa, synthetic construct
AVGELGGSGSENLI

SEQ ID NO: 13124 - protein, 12 aa, synthetic construct
AVGELGDTVKLI

SEQ ID NO: 13125 - protein, 14 aa, synthetic construct
AVGELGDRALTAQL

SEQ ID NO: 13126 - protein, 14 aa, synthetic construct
AVGEPGGYNTAQLI

SEQ ID NO: 13127 - protein, 14 aa, synthetic construct
LLWKPTYWGPVVNS

SEQ ID NO: 13128 - protein, 14 aa, synthetic construct
AVGEPPCYDLGDTD

SEQ ID NO: 13129 - protein, 11 aa, synthetic construct
AVGEPPPVLRR

SEQ ID NO: 13130 - protein, 12 aa, synthetic construct
AVGEVRDTDKLI

SEQ ID NO: 13131 - protein, 12 aa, synthetic construct
AVGEVGMSDKRV

SEQ ID NO: 13132 - protein, 13 aa, synthetic construct
AVGEVGISTHKLI

SEQ ID NO: 13133 - protein, 14 aa, synthetic construct
AVGETSYGISDKLI

SEQ ID NO: 13134 - protein, 14 aa, synthetic construct
AVGETSYGISDKHI

SEQ ID NO: 13135 - protein, 14 aa, synthetic construct
AVGETRTGGYSYTD

SEQ ID NO: 13136 - protein, 14 aa, synthetic construct
LLRNSYWGIQINSS

SEQ ID NO: 13137 - protein, 14 aa, synthetic construct
AVGESSYGSSETLF

SEQ ID NO: 13138 - protein, 13 aa, synthetic construct
AVGERYWGILCSW

SEQ ID NO: 13139 - protein, 12 aa, synthetic construct
AVGERGSPDNFN

SEQ ID NO: 13140 - protein, 12 aa, synthetic construct
AVGERGITDILI

SEQ ID NO: 13141 - protein, 11 aa, synthetic construct
LLWGGYSDKLI

SEQ ID NO: 13142 - protein, 13 aa, synthetic construct
AVGERGGYAENLI

SEQ ID NO: 13143 - protein, 13 aa, synthetic construct
AVGERGGDADKLI

SEQ ID NO: 13144 - protein, 7 aa, synthetic construct
AVGERGG

SEQ ID NO: 13145 - protein, 12 aa, synthetic construct
AVGERGDSDKNI

SEQ ID NO: 13146 - protein, 12 aa, synthetic construct
AVGERGDSDKLN

SEQ ID NO: 13147 - protein, 13 aa, synthetic construct
AVGEQGGYADKLI

SEQ ID NO: 13148 - protein, 9 aa, synthetic construct
LLWGPINSS

SEQ ID NO: 13149 - protein, 14 aa, synthetic construct
AVGEPSVLGARSKL

SEQ ID NO: 13150 - protein, 14 aa, synthetic construct
AVGEPPSSVLGDTD

SEQ ID NO: 13151 - protein, 13 aa, synthetic construct
AVGELGDRALTAQ

SEQ ID NO: 13152 - protein, 10 aa, synthetic construct
AVGELGDKPI

SEQ ID NO: 13153 - protein, 13 aa, synthetic construct
AVGELGDFPIYSS

SEQ ID NO: 13154 - protein, 12 aa, synthetic construct
AVGDWGDSDKVI

SEQ ID NO: 13155 - protein, 12 aa, synthetic construct
AVGDVGMTDKLI

SEQ ID NO: 13156 - protein, 12 aa, synthetic construct
AVGDVGDTDKVI

SEQ ID NO: 13157 - protein, 13 aa, synthetic construct
AVGDVGADSDLLF

SEQ ID NO: 13158 - protein, 14 aa, synthetic construct
AVGDTCTGDTDKII

SEQ ID NO: 13159 - protein, 12 aa, synthetic construct
AVGDRGSTDNLI

SEQ ID NO: 13160 - protein, 12 aa, synthetic construct
AVGDRGITDTLI

SEQ ID NO: 13161 - protein, 14 aa, synthetic construct
AVGDPRPGGYAYTD

SEQ ID NO: 13162 - protein, 13 aa, synthetic construct
AVGDPCTGDTDKV

SEQ ID NO: 13163 - protein, 14 aa, synthetic construct
AVGDPCSGDTDKLI

SEQ ID NO: 13164 - protein, 14 aa, synthetic construct
AVGDPCPGDTDKLI

SEQ ID NO: 13165 - protein, 14 aa, synthetic construct
AVGDLRTGGYEYTD

SEQ ID NO: 13166 - protein, 12 aa, synthetic construct
AVGDLRMFDKVI

SEQ ID NO: 13167 - protein, 12 aa, synthetic construct
AVGDLRIYDKLI

SEQ ID NO: 13168 - protein, 11 aa, synthetic construct
AVGDLRGLGVI

SEQ ID NO: 13169 - protein, 12 aa, synthetic construct
AVGDLRDNYKLI

SEQ ID NO: 13170 - protein, 12 aa, synthetic construct
AVGDLGMTDKLI

SEQ ID NO: 13171 - protein, 13 aa, synthetic construct
AVGDLGIYTDKLI

SEQ ID NO: 13172 - protein, 13 aa, synthetic construct
AVGDLGGYADNVI

SEQ ID NO: 13173 - protein, 13 aa, synthetic construct
AVGDLGGYADKLI

SEQ ID NO: 13174 - protein, 14 aa, synthetic construct
LMGKGSPTGGYDIN

SEQ ID NO: 13175 - protein, 13 aa, synthetic construct
AVGDLGATGDQLI

SEQ ID NO: 13176 - protein, 14 aa, synthetic construct
AVGDVRTGGYEYTD

SEQ ID NO: 13177 - protein, 8 aa, synthetic construct
LMERGNAS

SEQ ID NO: 13178 - protein, 14 aa, synthetic construct
AVGELGASYTDKVI

SEQ ID NO: 13179 - protein, 11 aa, synthetic construct
AVGEAGGPITD

SEQ ID NO: 13180 - protein, 13 aa, synthetic construct
AVGELGADTYKLI

SEQ ID NO: 13181 - protein, 13 aa, synthetic construct
AVGELGADTVKLI

SEQ ID NO: 13182 - protein, 13 aa, synthetic construct
AVGELGADTDKLI

SEQ ID NO: 13183 - protein, 13 aa, synthetic construct
AVGELDWGRRGLI

SEQ ID NO: 13184 - protein, 13 aa, synthetic construct
AVGELDWGRRGLF

SEQ ID NO: 13185 - protein, 14 aa, synthetic construct
AVGELDWGLVHRYT

SEQ ID NO: 13186 - protein, 14 aa, synthetic construct
AVGEIRTGGYEYTD

SEQ ID NO: 13187 - protein, 14 aa, synthetic construct
AVGEIPYWGATPIN

SEQ ID NO: 13188 - protein, 13 aa, synthetic construct
AVGEIPWDMETDK

SEQ ID NO: 13189 - protein, 13 aa, synthetic construct
AVGEIGRDADKLI

SEQ ID NO: 13190 - protein, 13 aa, synthetic construct
AVGEIGGYADKLI

SEQ ID NO: 13191 - protein, 8 aa, synthetic construct
AVGEGTLS

SEQ ID NO: 13192 - protein, 8 aa, synthetic construct
AVGEGTLN

SEQ ID NO: 13193 - protein, 8 aa, synthetic construct
AVGEGTLI

SEQ ID NO: 13194 - protein, 8 aa, synthetic construct
AVGEGKVI

SEQ ID NO: 13195 - protein, 8 aa, synthetic construct
AVGEGKLI

SEQ ID NO: 13196 - protein, 8 aa, synthetic construct
AVGEGKII

SEQ ID NO: 13197 - protein, 11 aa, synthetic construct
AVGEAYTVKLI

SEQ ID NO: 13198 - protein, 14 aa, synthetic construct
AVGEASVLGARSKL

SEQ ID NO: 13199 - protein, 11 aa, synthetic construct
AVGEASTEKLI

SEQ ID NO: 13200 - protein, 14 aa, synthetic construct
AVGEALLVGDSIDK

SEQ ID NO: 13201 - protein, 11 aa, synthetic construct
AVGGGNSDKLI

SEQ ID NO: 13202 - protein, 11 aa, synthetic construct
AVGGGYADKLI

SEQ ID NO: 13203 - protein, 11 aa, synthetic construct
AVGGGYCDTLL

SEQ ID NO: 13204 - protein, 14 aa, synthetic construct
DIVKIPLYWGMYTD

SEQ ID NO: 13205 - protein, 13 aa, synthetic construct
DIVEIGGYSDKLN

SEQ ID NO: 13206 - protein, 12 aa, synthetic construct
DIGVWGLFDLII

SEQ ID NO: 13207 - protein, 12 aa, synthetic construct
DIGVWGINDKLI

SEQ ID NO: 13208 - protein, 12 aa, synthetic construct
DIGVWGINDKIN

SEQ ID NO: 13209 - protein, 12 aa, synthetic construct
DIGVWGINDELI

SEQ ID NO: 13210 - protein, 13 aa, synthetic construct
DIGVTGGYTDKLI

SEQ ID NO: 13211 - protein, 14 aa, synthetic construct
DIGVPSYWWIHTDK

SEQ ID NO: 13212 - protein, 12 aa, synthetic construct
DIGNWGIRDKPI

SEQ ID NO: 13213 - protein, 12 aa, synthetic construct
DIGNWGILDKLI

SEQ ID NO: 13214 - protein, 9 aa, synthetic construct
DIGGTDKLI

SEQ ID NO: 13215 - protein, 14 aa, synthetic construct
DIGEPYVLGARSKL

SEQ ID NO: 13216 - protein, 14 aa, synthetic construct
DIGEPYLLGARSKL

SEQ ID NO: 13217 - protein, 14 aa, synthetic construct
DIGEPVLGASYTDK

SEQ ID NO: 13218 - protein, 14 aa, synthetic construct
DIGEPELGASYTDK

SEQ ID NO: 13219 - protein, 14 aa, synthetic construct
DIGEPCTGDTDKLI

SEQ ID NO: 13220 - protein, 14 aa, synthetic construct
DIGEPCNGDTDKLI

SEQ ID NO: 13221 - protein, 11 aa, synthetic construct
DIGELYTDKLI

SEQ ID NO: 13222 - protein, 14 aa, synthetic construct
DIGELRWGPYTDKL

SEQ ID NO: 13223 - protein, 14 aa, synthetic construct
LLGTWGPRTPRTSS

SEQ ID NO: 13224 - protein, 14 aa, synthetic construct
DIGELLLVDQVKLI

SEQ ID NO: 13225 - protein, 13 aa, synthetic construct
DIGELGGYADKLI

SEQ ID NO: 13226 - protein, 14 aa, synthetic construct
DIVELTYWGRYTDK

SEQ ID NO: 13227 - protein, 13 aa, synthetic construct
DIVVTVGYTDKLI

SEQ ID NO: 13228 - protein, 13 aa, synthetic construct
DIGELGDTGDKLI

SEQ ID NO: 13229 - protein, 11 aa, synthetic construct
DIWALYTDKNN

SEQ ID NO: 13230 - protein, 13 aa, synthetic construct
LLGTWGLTPLNAS

SEQ ID NO: 13231 - protein, 14 aa, synthetic construct
DLGASYAHVPDKLI

SEQ ID NO: 13232 - protein, 14 aa, synthetic construct
DLGASVMGASYTDK

SEQ ID NO: 13233 - protein, 14 aa, synthetic construct
DLGASSLVYATDKL

SEQ ID NO: 13234 - protein, 14 aa, synthetic construct
LLGTWGPRTPRNSS

SEQ ID NO: 13235 - protein, 12 aa, synthetic construct
DLGARGITDKLI

SEQ ID NO: 13236 - protein, 11 aa, synthetic construct
DLGAPYWDKLI

SEQ ID NO: 13237 - protein, 12 aa, synthetic construct
DLGALRYTDNII

SEQ ID NO: 13238 - protein, 14 aa, synthetic construct
DLGALRWGPYTEKL

SEQ ID NO: 13239 - protein, 12 aa, synthetic construct
DLGALRIFDKLI

SEQ ID NO: 13240 - protein, 10 aa, synthetic construct
DLGALGDKLI

SEQ ID NO: 13241 - protein, 14 aa, synthetic construct
DLGAETGDTPRNSS

SEQ ID NO: 13242 - protein, 12 aa, synthetic construct
DLFEIGGYADKI

SEQ ID NO: 13243 - protein, 14 aa, synthetic construct
DLCGPYQEDGTDKL

SEQ ID NO: 13244 - protein, 12 aa, synthetic construct
DLCELLDNDKII

SEQ ID NO: 13245 - protein, 13 aa, synthetic construct
DLCELGADTDKLI

SEQ ID NO: 13246 - protein, 12 aa, synthetic construct
DLAVTGGYTDKP

SEQ ID NO: 13247 - protein, 12 aa, synthetic construct
DLAELGDTDKLI

SEQ ID NO: 13248 - protein, 11 aa, synthetic construct
DIWGGYSDKLI

SEQ ID NO: 13249 - protein, 12 aa, synthetic construct
DIWELRIFDKLI

SEQ ID NO: 13250 - protein, 14 aa, synthetic construct
DIWELPYWGRYTDK

SEQ ID NO: 13251 - protein, 13 aa, synthetic construct
LLGTWGYTPIKSS

SEQ ID NO: 13252 - protein, 14 aa, synthetic construct
DIGELGDRALTAQL

SEQ ID NO: 13253 - protein, 14 aa, synthetic construct
LLRNSSWGIQINAS

SEQ ID NO: 13254 - protein, 13 aa, synthetic construct
AVVEVGGYAYKLI

SEQ ID NO: 13255 - protein, 13 aa, synthetic construct
AVVELGIYTAKLI

SEQ ID NO: 13256 - protein, 14 aa, synthetic construct
AVVELGGYGTDKLI

SEQ ID NO: 13257 - protein, 13 aa, synthetic construct
AVRVLLGDTRKLI

SEQ ID NO: 13258 - protein, 12 aa, synthetic construct
AVGVWGINDDMI

SEQ ID NO: 13259 - protein, 6 aa, synthetic construct
AVGVWG

SEQ ID NO: 13260 - protein, 13 aa, synthetic construct
AVGVVGDRGVYVF

SEQ ID NO: 13261 - protein, 13 aa, synthetic construct
AVGVTLGDTRHIF

SEQ ID NO: 13262 - protein, 13 aa, synthetic construct
AVGVTGGYTEKLI

SEQ ID NO: 13263 - protein, 12 aa, synthetic construct
AVGVSGINDKLI

SEQ ID NO: 13264 - protein, 13 aa, synthetic construct
AVGVLLGDTRTLI

SEQ ID NO: 13265 - protein, 13 aa, synthetic construct
AVGVLLGDTRQLI

SEQ ID NO: 13266 - protein, 13 aa, synthetic construct
AVGVLLGDTRKLI

SEQ ID NO: 13267 - protein, 13 aa, synthetic construct
AVGRSWGGPLTAE

SEQ ID NO: 13268 - protein, 12 aa, synthetic construct
AVGNWGIRDILI

SEQ ID NO: 13269 - protein, 9 aa, synthetic construct
AVGGTVKLI

SEQ ID NO: 13270 - protein, 9 aa, synthetic construct
AVGGTDQLI

SEQ ID NO: 13271 - protein, 14 aa, synthetic construct
AVGGPYQEDGTDKL

SEQ ID NO: 13272 - protein, 14 aa, synthetic construct
AVGGPVVGASSTDK

SEQ ID NO: 13273 - protein, 11 aa, synthetic construct
AVGGGYYDKLI

SEQ ID NO: 13274 - protein, 11 aa, synthetic construct
AVGGGYSDQLI

SEQ ID NO: 13275 - protein, 11 aa, synthetic construct
AVGGGYSAKLN

SEQ ID NO: 13276 - protein, 14 aa, synthetic construct
AVVETSYGISDKLI

SEQ ID NO: 13277 - protein, 14 aa, synthetic construct
LLGYSYWGIQINSS

SEQ ID NO: 13278 - protein, 13 aa, synthetic construct
DIGELDWGRRGLI

SEQ ID NO: 13279 - protein, 13 aa, synthetic construct
AVVVILWDTRTLI

SEQ ID NO: 13280 - protein, 13 aa, synthetic construct
DIGELDWGRMGLI

SEQ ID NO: 13281 - protein, 13 aa, synthetic construct
DIGEIGGYAEKLI

SEQ ID NO: 13282 - protein, 8 aa, synthetic construct
DIGEGNLK

SEQ ID NO: 13283 - protein, 14 aa, synthetic construct
DIGEENEGYTDKII

SEQ ID NO: 13284 - protein, 13 aa, synthetic construct
DIGDVGDTPINSS

SEQ ID NO: 13285 - protein, 11 aa, synthetic construct
DIGDVGDNKLI

SEQ ID NO: 13286 - protein, 12 aa, synthetic construct
DIGCWGINDKLI

SEQ ID NO: 13287 - protein, 10 aa, synthetic construct
DIGARGITDK

SEQ ID NO: 13288 - protein, 9 aa, synthetic construct
DIGAPDQLN

SEQ ID NO: 13289 - protein, 14 aa, synthetic construct
DIGALGHRALRAQL

SEQ ID NO: 13290 - protein, 9 aa, synthetic construct
DICERSYYV

SEQ ID NO: 13291 - protein, 13 aa, synthetic construct
DHWETSYGISEKL

SEQ ID NO: 13292 - protein, 13 aa, synthetic construct
DHVEQGDRALTEQ

SEQ ID NO: 13293 - protein, 12 aa, synthetic construct
DHGELRITDKLI

SEQ ID NO: 13294 - protein, 13 aa, synthetic construct
DHGDMGIYTYKII

SEQ ID NO: 13295 - protein, 11 aa, synthetic construct
DHAEIADTGDK

SEQ ID NO: 13296 - protein, 9 aa, synthetic construct
CNWGNHKIK

SEQ ID NO: 13297 - protein, 6 aa, synthetic construct
CMKQVG

SEQ ID NO: 13298 - protein, 12 aa, synthetic construct
AVWVLLWVKRKL

SEQ ID NO: 13299 - protein, 13 aa, synthetic construct
AVWELGIYTDKLI

SEQ ID NO: 13300 - protein, 13 aa, synthetic construct
AVWDVPVGDLKQD

SEQ ID NO: 13301 - protein, 14 aa, synthetic construct
LSGKLPTGSPINSS

SEQ ID NO: 13302 - protein, 14 aa, synthetic construct
AVGDIRPGGYEYTD

SEQ ID NO: 13303 - protein, 13 aa, synthetic construct
PLGEMGDTGDKLI

SEQ ID NO: 13304 - protein, 11 aa, synthetic construct
ARGELYTDNLI

SEQ ID NO: 13305 - protein, 14 aa, synthetic construct
ARGEPPSYVLGDTD

SEQ ID NO: 13306 - protein, 14 aa, synthetic construct
ARGEPPPSVVGDTD

SEQ ID NO: 13307 - protein, 14 aa, synthetic construct
ARGEPLFLGDTIDK

SEQ ID NO: 13308 - protein, 14 aa, synthetic construct
ARGEPGGYSAPGTP

SEQ ID NO: 13309 - protein, 14 aa, synthetic construct
ARGEPGGYNTEKLI

SEQ ID NO: 13310 - protein, 14 aa, synthetic construct
ARGEPGGSNTDKLI

SEQ ID NO: 13311 - protein, 14 aa, synthetic construct
ARGEPGGDNTAQLI

SEQ ID NO: 13312 - protein, 14 aa, synthetic construct
ARGEPCTGDTEKLI

SEQ ID NO: 13313 - protein, 14 aa, synthetic construct
ARGEPCTGDTDKLI

SEQ ID NO: 13314 - protein, 14 aa, synthetic construct
ARGEPCPGDTANLI

SEQ ID NO: 13315 - protein, 14 aa, synthetic construct
ARGELRWGPYTEKL

SEQ ID NO: 13316 - protein, 10 aa, synthetic construct
AVGAVGGPML

SEQ ID NO: 13317 - protein, 14 aa, synthetic construct
PLGEETGGYTEKLI

SEQ ID NO: 13318 - protein, 12 aa, synthetic construct
ARGELRVCDILF

SEQ ID NO: 13319 - protein, 14 aa, synthetic construct
ARGELRTGGFGYTD

SEQ ID NO: 13320 - protein, 12 aa, synthetic construct
ARGELRIFEKLI

SEQ ID NO: 13321 - protein, 12 aa, synthetic construct
ARGELRIFEKHL

SEQ ID NO: 13322 - protein, 12 aa, synthetic construct
ARGELRDTEKLI

SEQ ID NO: 13323 - protein, 12 aa, synthetic construct
ARGELRDTDKHI

SEQ ID NO: 13324 - protein, 12 aa, synthetic construct
PLGEKGGYGTDK

SEQ ID NO: 13325 - protein, 12 aa, synthetic construct
ARGELRDPDKLI

SEQ ID NO: 13326 - protein, 12 aa, synthetic construct
ARGELRDAETLI

SEQ ID NO: 13327 - protein, 11 aa, synthetic construct
PLGDVGDNKLN

SEQ ID NO: 13328 - protein, 14 aa, synthetic construct
ARGEPPSYVVGDTD

SEQ ID NO: 13329 - protein, 14 aa, synthetic construct
ARGEPRPGGYAYTD

SEQ ID NO: 13330 - protein, 13 aa, synthetic construct
ARGEPRTGGYADT

SEQ ID NO: 13331 - protein, 12 aa, synthetic construct
ARGERGDTDQLI

SEQ ID NO: 13332 - protein, 8 aa, synthetic construct
ARGERGDT

SEQ ID NO: 13333 - protein, 10 aa, synthetic construct
MKQVVGHIIY

SEQ ID NO: 13334 - protein, 12 aa, synthetic construct
ARGERGDSDKRI

SEQ ID NO: 13335 - protein, 12 aa, synthetic construct
ARGERGDSDHLI

SEQ ID NO: 13336 - protein, 12 aa, synthetic construct
ARGERGDSAKLI

SEQ ID NO: 13337 - protein, 14 aa, synthetic construct
ARGEPVLGASYTDQ

SEQ ID NO: 13338 - protein, 14 aa, synthetic construct
ARGEPVLGASYTDK

SEQ ID NO: 13339 - protein, 13 aa, synthetic construct
ARGEPVLGASYTD

SEQ ID NO: 13340 - protein, 8 aa, synthetic construct
MVSALVSS

SEQ ID NO: 13341 - protein, 14 aa, synthetic construct
ARGEPVGYNNEKLI

SEQ ID NO: 13342 - protein, 12 aa, synthetic construct
PGGERGISDKLI

SEQ ID NO: 13343 - protein, 14 aa, synthetic construct
ARGEPTYWGIHTDK

SEQ ID NO: 13344 - protein, 14 aa, synthetic construct
ARGEPSYWGRHTDQ

SEQ ID NO: 13345 - protein, 11 aa, synthetic construct
PIRDVGHNKLI

SEQ ID NO: 13346 - protein, 12 aa, synthetic construct
PIVEIGMTDKLI

SEQ ID NO: 13347 - protein, 13 aa, synthetic construct
ARGEPSYWGIHTD

SEQ ID NO: 13348 - protein, 14 aa, synthetic construct
ARGEPSYWGIHADK

SEQ ID NO: 13349 - protein, 14 aa, synthetic construct
ARGEPSYGISDKLI

SEQ ID NO: 13350 - protein, 14 aa, synthetic construct
PLGDARSGGYAYTD

SEQ ID NO: 13351 - protein, 14 aa, synthetic construct
ARGEPSTGGYADKL

SEQ ID NO: 13352 - protein, 14 aa, synthetic construct
ARGELPYWGSSTDK

SEQ ID NO: 13353 - protein, 14 aa, synthetic construct
ARGELPYWGRSTDK

SEQ ID NO: 13354 - protein, 14 aa, synthetic construct
ARGELPVYWGLYTD

SEQ ID NO: 13355 - protein, 13 aa, synthetic construct
PLGELGISTDKLI

SEQ ID NO: 13356 - protein, 13 aa, synthetic construct
ARGELGDTGDKLL

SEQ ID NO: 13357 - protein, 14 aa, synthetic construct
PLGELPLYCGLYTD

SEQ ID NO: 13358 - protein, 14 aa, synthetic construct
PLGELPLYWGLYTD

SEQ ID NO: 13359 - protein, 14 aa, synthetic construct
PLGELPLYWGMYTD

SEQ ID NO: 13360 - protein, 12 aa, synthetic construct
ARGELGDTDKII

SEQ ID NO: 13361 - protein, 12 aa, synthetic construct
ARGELGDSALTA

SEQ ID NO: 13362 - protein, 14 aa, synthetic construct
PLGELRWGPYTDKL

SEQ ID NO: 13363 - protein, 11 aa, synthetic construct
PLGELYTDKLI

SEQ ID NO: 13364 - protein, 13 aa, synthetic construct
ARGELGAVTDKLI

SEQ ID NO: 13365 - protein, 13 aa, synthetic construct
ARGELGATGEHLI

SEQ ID NO: 13366 - protein, 14 aa, synthetic construct
ARGELGASYTEKLI

SEQ ID NO: 13367 - protein, 10 aa, synthetic construct
PLGEMGDKLI

SEQ ID NO: 13368 - protein, 13 aa, synthetic construct
ARGELGASYTDKL

SEQ ID NO: 13369 - protein, 14 aa, synthetic construct
ARGELGASYTAQLI

SEQ ID NO: 13370 - protein, 13 aa, synthetic construct
ARGELGADTEKLI

SEQ ID NO: 13371 - protein, 13 aa, synthetic construct
ARGELGADTDQLI

SEQ ID NO: 13372 - protein, 13 aa, synthetic construct
ARGELGADTDKHI

SEQ ID NO: 13373 - protein, 10 aa, synthetic construct
ARGELEDKLI

SEQ ID NO: 13374 - protein, 14 aa, synthetic construct
ARGELDWGRYTDKL

SEQ ID NO: 13375 - protein, 13 aa, synthetic construct
ARGELDSGRRGLI

SEQ ID NO: 13376 - protein, 14 aa, synthetic construct
ARGELADRALTAQL

SEQ ID NO: 13377 - protein, 13 aa, synthetic construct
ARGELGDTGEKPI

SEQ ID NO: 13378 - protein, 10 aa, synthetic construct
ARGELGEKLI

SEQ ID NO: 13379 - protein, 14 aa, synthetic construct
ARGELPLGVLYTDQ

SEQ ID NO: 13380 - protein, 13 aa, synthetic construct
ARGELGGSAEKLI

SEQ ID NO: 13381 - protein, 13 aa, synthetic construct
ARGELPLGVLYTD

SEQ ID NO: 13382 - protein, 14 aa, synthetic construct
ARGELPLGFLYTDK

SEQ ID NO: 13383 - protein, 14 aa, synthetic construct
ARGELPLGAQRETH

SEQ ID NO: 13384 - protein, 12 aa, synthetic construct
ARGELPLAVLYT

SEQ ID NO: 13385 - protein, 14 aa, synthetic construct
ARGELLLGDTQLLG

SEQ ID NO: 13386 - protein, 14 aa, synthetic construct
ARGELLLGDPEKLI

SEQ ID NO: 13387 - protein, 14 aa, synthetic construct
ARGELLLGDPDQLI

SEQ ID NO: 13388 - protein, 13 aa, synthetic construct
PLGELDWGRRGLI

SEQ ID NO: 13389 - protein, 13 aa, synthetic construct
ARGELGVYADTLI

SEQ ID NO: 13390 - protein, 13 aa, synthetic construct
PLGELGADTDKLI

SEQ ID NO: 13391 - protein, 13 aa, synthetic construct
ARGELGLTPINSS

SEQ ID NO: 13392 - protein, 13 aa, synthetic construct
ARGELGIYTDTLI

SEQ ID NO: 13393 - protein, 13 aa, synthetic construct
ARGELGIYTDQLI

SEQ ID NO: 13394 - protein, 14 aa, synthetic construct
PLGELGASYTDKLI

SEQ ID NO: 13395 - protein, 13 aa, synthetic construct
PLGELGDTGDKLI

SEQ ID NO: 13396 - protein, 14 aa, synthetic construct
ARGELGGYGTDTLV

SEQ ID NO: 13397 - protein, 13 aa, synthetic construct
ARGELGGYADQLI

SEQ ID NO: 13398 - protein, 13 aa, synthetic construct
PLGELGGYADRLI

SEQ ID NO: 13399 - protein, 13 aa, synthetic construct
ARGELGGYADKVI

SEQ ID NO: 13400 - protein, 13 aa, synthetic construct
PLGELGGYGTEKL

SEQ ID NO: 13401 - protein, 14 aa, synthetic construct
ARGELGGSFDRPTL

SEQ ID NO: 13402 - protein, 5 aa, synthetic construct
MKQVG

SEQ ID NO: 13403 - protein, 12 aa, synthetic construct
ARGERGIPEKLI

SEQ ID NO: 13404 - protein, 12 aa, synthetic construct
ARGERGITAKHI

SEQ ID NO: 13405 - protein, 13 aa, synthetic construct
ASGELGGYSDKLI

SEQ ID NO: 13406 - protein, 13 aa, synthetic construct
ASGDLGGYADKLI

SEQ ID NO: 13407 - protein, 14 aa, synthetic construct
ASGDLAGYGTDKLI

SEQ ID NO: 13408 - protein, 12 aa, synthetic construct
ARVDLGMTETLI

SEQ ID NO: 13409 - protein, 12 aa, synthetic construct
ARRELGDTDKLI

SEQ ID NO: 13410 - protein, 12 aa, synthetic construct
ARGVWGVNDQLI

SEQ ID NO: 13411 - protein, 12 aa, synthetic construct
ARGVWGRNDDLI

SEQ ID NO: 13412 - protein, 12 aa, synthetic construct
ARGVWGLTDLLI

SEQ ID NO: 13413 - protein, 12 aa, synthetic construct
ARGVWGITDKLI

SEQ ID NO: 13414 - protein, 12 aa, synthetic construct
ARGVWGINDNLI

SEQ ID NO: 13415 - protein, 12 aa, synthetic construct
ARGVWGINDKLN

SEQ ID NO: 13416 - protein, 7 aa, synthetic construct
LVGKKLG

SEQ ID NO: 13417 - protein, 14 aa, synthetic construct
LVGPHMHPSPINSS

SEQ ID NO: 13418 - protein, 13 aa, synthetic construct
ARGVVGGSADLLI

SEQ ID NO: 13419 - protein, 14 aa, synthetic construct
ARGVVGGGYTDQLV

SEQ ID NO: 13420 - protein, 13 aa, synthetic construct
ARGVTGGYTEKLI

SEQ ID NO: 13421 - protein, 11 aa, synthetic construct
LVGRRTPINSS

SEQ ID NO: 13422 - protein, 13 aa, synthetic construct
ARGVTGGYTDKLN

SEQ ID NO: 13423 - protein, 13 aa, synthetic construct
ARGVPGGYTDQLI

SEQ ID NO: 13424 - protein, 13 aa, synthetic construct
ARGVPGGYTDNVI

SEQ ID NO: 13425 - protein, 8 aa, synthetic construct
LVGTPAWG

SEQ ID NO: 13426 - protein, 13 aa, synthetic construct
ARGVPGGYTDKLN

SEQ ID NO: 13427 - protein, 13 aa, synthetic construct
ASGELGADTDKLI

SEQ ID NO: 13428 - protein, 14 aa, synthetic construct
ASGELPLCWGLYTD

SEQ ID NO: 13429 - protein, 13 aa, synthetic construct
ARGVPGGSTDKLI

SEQ ID NO: 13430 - protein, 14 aa, synthetic construct
ASGELPLGVLYTDK

SEQ ID NO: 13431 - protein, 14 aa, synthetic construct
AVGASLLGYASDKL

SEQ ID NO: 13432 - protein, 14 aa, synthetic construct
AVGASFLGYSTDKL

SEQ ID NO: 13433 - protein, 14 aa, synthetic construct
AVGASFLGYATDKL

SEQ ID NO: 13434 - protein, 14 aa, synthetic construct
AVGASFHAYATDKL

SEQ ID NO: 13435 - protein, 12 aa, synthetic construct
AVGARWDSDKSI

SEQ ID NO: 13436 - protein, 14 aa, synthetic construct
LSGNFPTGGGTPIN

SEQ ID NO: 13437 - protein, 9 aa, synthetic construct
AVGALRLGV

SEQ ID NO: 13438 - protein, 14 aa, synthetic construct
AVGALPYWGRYTDK

SEQ ID NO: 13439 - protein, 13 aa, synthetic construct
AVGALGVYADQLI

SEQ ID NO: 13440 - protein, 10 aa, synthetic construct
AVGALGDQLI

SEQ ID NO: 13441 - protein, 10 aa, synthetic construct
AVGALGDKLI

SEQ ID NO: 13442 - protein, 14 aa, synthetic construct
LVGDVLGVSDKPIN

SEQ ID NO: 13443 - protein, 13 aa, synthetic construct
AVEGLGADTDKLL

SEQ ID NO: 13444 - protein, 11 aa, synthetic construct
AVAGGYSDQVI

SEQ ID NO: 13445 - protein, 14 aa, synthetic construct
AVAETSYGISDKLI

SEQ ID NO: 13446 - protein, 13 aa, synthetic construct
ASWELGIYTDKLN

SEQ ID NO: 13447 - protein, 7 aa, synthetic construct
ASVRFWG

SEQ ID NO: 13448 - protein, 14 aa, synthetic construct
ASGPSYEPVPDKLI

SEQ ID NO: 13449 - protein, 11 aa, synthetic construct
ASGGGYSEKLF

SEQ ID NO: 13450 - protein, 12 aa, synthetic construct
ASGERGDSDKLI

SEQ ID NO: 13451 - protein, 11 aa, synthetic construct
ASGELYTDKII

SEQ ID NO: 13452 - protein, 13 aa, synthetic construct
ARGVPGGYTDKLI

SEQ ID NO: 13453 - protein, 12 aa, synthetic construct
ARGVGGMTDKLI

SEQ ID NO: 13454 - protein, 14 aa, synthetic construct
LWGTSVLGDTSTPI

SEQ ID NO: 13455 - protein, 11 aa, synthetic construct
ARGGDIPINSS

SEQ ID NO: 13456 - protein, 13 aa, synthetic construct
LWGNWGYTPINSS

SEQ ID NO: 13457 - protein, 12 aa, synthetic construct
ARGEVRILDKLI

SEQ ID NO: 13458 - protein, 14 aa, synthetic construct
ARGEVRGYGTDKLI

SEQ ID NO: 13459 - protein, 12 aa, synthetic construct
ARGEVRDTDKLI

SEQ ID NO: 13460 - protein, 12 aa, synthetic construct
ARGEVGMTVNLI

SEQ ID NO: 13461 - protein, 13 aa, synthetic construct
ARGEVGIYTDKLI

SEQ ID NO: 13462 - protein, 13 aa, synthetic construct
ARGEVGGYADKLI

SEQ ID NO: 13463 - protein, 13 aa, synthetic construct
ARGEVGGYADKLF

SEQ ID NO: 13464 - protein, 13 aa, synthetic construct
ARGEVGDTGEKLM

SEQ ID NO: 13465 - protein, 11 aa, synthetic construct
ARGEVGDKKLI

SEQ ID NO: 13466 - protein, 14 aa, synthetic construct
ARGEVGASYTDKLI

SEQ ID NO: 13467 - protein, 14 aa, synthetic construct
ARGETTYGISDKLI

SEQ ID NO: 13468 - protein, 14 aa, synthetic construct
ARGETSYGSSDQLI

SEQ ID NO: 13469 - protein, 14 aa, synthetic construct
ARGETSYGISDKLI

SEQ ID NO: 13470 - protein, 11 aa, synthetic construct
LWGRRTPINSS

SEQ ID NO: 13471 - protein, 14 aa, synthetic construct
ARGESSYGISDKLI

SEQ ID NO: 13472 - protein, 7 aa, synthetic construct
ARGERPP

SEQ ID NO: 13473 - protein, 12 aa, synthetic construct
ARGERGRTDKLI

SEQ ID NO: 13474 - protein, 14 aa, synthetic construct
LWGTPYWGPRTPIN

SEQ ID NO: 13475 - protein, 12 aa, synthetic construct
ARGERGMTDKLI

SEQ ID NO: 13476 - protein, 12 aa, synthetic construct
ARGERGITDKII

SEQ ID NO: 13477 - protein, 14 aa, synthetic construct
ARGEVRWGPYTDQL

SEQ ID NO: 13478 - protein, 11 aa, synthetic construct
ARGGGCSDKLI

SEQ ID NO: 13479 - protein, 12 aa, synthetic construct
ARGTWGIRDHLI

SEQ ID NO: 13480 - protein, 11 aa, synthetic construct
ARGGGDSATLI

SEQ ID NO: 13481 - protein, 13 aa, synthetic construct
ARGRDWGGPLTAQ

SEQ ID NO: 13482 - protein, 14 aa, synthetic construct
ARGRDGGGPLTEQL

SEQ ID NO: 13483 - protein, 11 aa, synthetic construct
ARGQAYNEKLI

SEQ ID NO: 13484 - protein, 12 aa, synthetic construct
ARGGVGDTDEVI

SEQ ID NO: 13485 - protein, 14 aa, synthetic construct
ARGGTSYGMTDKLI

SEQ ID NO: 13486 - protein, 9 aa, synthetic construct
ARGGTEKHI

SEQ ID NO: 13487 - protein, 9 aa, synthetic construct
ARGGTDKLT

SEQ ID NO: 13488 - protein, 9 aa, synthetic construct
ARGGTDKHI

SEQ ID NO: 13489 - protein, 14 aa, synthetic construct
ARGGSFLAYATDKL

SEQ ID NO: 13490 - protein, 14 aa, synthetic construct
ARGGPYQEDGTDKL

SEQ ID NO: 13491 - protein, 14 aa, synthetic construct
ARGGPYKEDVNDKL

SEQ ID NO: 13492 - protein, 14 aa, synthetic construct
ARGGPHSYVMGDTD

SEQ ID NO: 13493 - protein, 14 aa, synthetic construct
ARGGLPYWGRYTDK

SEQ ID NO: 13494 - protein, 12 aa, synthetic construct
ARGGLGINEELI

SEQ ID NO: 13495 - protein, 13 aa, synthetic construct
ARGGLGGYADKLI

SEQ ID NO: 13496 - protein, 14 aa, synthetic construct
LVGTWGPRTPINSS

SEQ ID NO: 13497 - protein, 13 aa, synthetic construct
ARGGLGADTDKLI

SEQ ID NO: 13498 - protein, 11 aa, synthetic construct
ARGGGYYEKLI

SEQ ID NO: 13499 - protein, 11 aa, synthetic construct
ARGGGYSEKLF

SEQ ID NO: 13500 - protein, 13 aa, synthetic construct
LWGLLGGSPLHSS

SEQ ID NO: 13501 - protein, 8 aa, synthetic construct
ARGGGTHI

SEQ ID NO: 13502 - protein, 14 aa, synthetic construct
ARGEETGGYTDNLI

SEQ ID NO: 13503 - protein, 12 aa, synthetic construct
ADGDLRDTDKLI

SEQ ID NO: 13504 - protein, 14 aa, synthetic construct
ALGGPYQVYATDKL

SEQ ID NO: 13505 - protein, 14 aa, synthetic construct
ALGDSYAPVPEKLI

SEQ ID NO: 13506 - protein, 14 aa, synthetic construct
ALGDTSYGISVKLI

SEQ ID NO: 13507 - protein, 14 aa, synthetic construct
ALGDTSYGISDNLI

SEQ ID NO: 13508 - protein, 14 aa, synthetic construct
ALGDTSYGISDKII

SEQ ID NO: 13509 - protein, 13 aa, synthetic construct
ALGDTSYGISAKL

SEQ ID NO: 13510 - protein, 14 aa, synthetic construct
ALGDTSSGISDKLI

SEQ ID NO: 13511 - protein, 11 aa, synthetic construct
ALGDTLLIADT

SEQ ID NO: 13512 - protein, 14 aa, synthetic construct
ALGDTGGYNTEKLI

SEQ ID NO: 13513 - protein, 14 aa, synthetic construct
ALGDTCPGDTDKLI

SEQ ID NO: 13514 - protein, 13 aa, synthetic construct
ALGDTCGYTYKLI

SEQ ID NO: 13515 - protein, 14 aa, synthetic construct
ALGDSYEPVPDKLI

SEQ ID NO: 13516 - protein, 14 aa, synthetic construct
ALGDSSYGISDKLL

SEQ ID NO: 13517 - protein, 14 aa, synthetic construct
ALGDLLLGIQINSS

SEQ ID NO: 13518 - protein, 10 aa, synthetic construct
ALGDSLTRLY

SEQ ID NO: 13519 - protein, 14 aa, synthetic construct
ALGDSCPGDTDKLI

SEQ ID NO: 13520 - protein, 13 aa, synthetic construct
ALGDRVNLALTPE

SEQ ID NO: 13521 - protein, 14 aa, synthetic construct
ALGDRSSYVLGDKL

SEQ ID NO: 13522 - protein, 14 aa, synthetic construct
ALGDRRWGPYTDQL

SEQ ID NO: 13523 - protein, 12 aa, synthetic construct
ALGDRLPTFWGT

SEQ ID NO: 13524 - protein, 12 aa, synthetic construct
ALGDRGYREKLI

SEQ ID NO: 13525 - protein, 12 aa, synthetic construct
ALGDRGVRDKLI

SEQ ID NO: 13526 - protein, 12 aa, synthetic construct
ALGDRGTTDKLI

SEQ ID NO: 13527 - protein, 12 aa, synthetic construct
ALGDRGRTVKLI

SEQ ID NO: 13528 - protein, 11 aa, synthetic construct
ALGDVADNKLI

SEQ ID NO: 13529 - protein, 13 aa, synthetic construct
ALGDVAGYADKHI

SEQ ID NO: 13530 - protein, 13 aa, synthetic construct
ALGDVAGYADKLF

SEQ ID NO: 13531 - protein, 11 aa, synthetic construct
ALGDVEDNKLI

SEQ ID NO: 13532 - protein, 11 aa, synthetic construct
ALGDVGDHNLF

SEQ ID NO: 13533 - protein, 11 aa, synthetic construct
ALGDVGDHKLF

SEQ ID NO: 13534 - protein, 11 aa, synthetic construct
ALGDVGDHKIY

SEQ ID NO: 13535 - protein, 11 aa, synthetic construct
ALGDVGDHKII

SEQ ID NO: 13536 - protein, 14 aa, synthetic construct
ALGDVGDGGTDKLI

SEQ ID NO: 13537 - protein, 11 aa, synthetic construct
ALGDVGCNILI

SEQ ID NO: 13538 - protein, 11 aa, synthetic construct
ALGDVGATKLI

SEQ ID NO: 13539 - protein, 12 aa, synthetic construct
ALGDVGATDKLI

SEQ ID NO: 13540 - protein, 14 aa, synthetic construct
ALGDVGASYTENLI

SEQ ID NO: 13541 - protein, 11 aa, synthetic construct
ALGDVGASKLI

SEQ ID NO: 13542 - protein, 11 aa, synthetic construct
ALGDVGAQKLI

SEQ ID NO: 13543 - protein, 11 aa, synthetic construct
ALGDVGANRLI

SEQ ID NO: 13544 - protein, 11 aa, synthetic construct
ALGDVGANQLI

SEQ ID NO: 13545 - protein, 11 aa, synthetic construct
ALGDVGANNLI

SEQ ID NO: 13546 - protein, 11 aa, synthetic construct
ALGDVGANKHI

SEQ ID NO: 13547 - protein, 11 aa, synthetic construct
ALGDVGALKLI

SEQ ID NO: 13548 - protein, 11 aa, synthetic construct
ALGDVGAKKLI

SEQ ID NO: 13549 - protein, 13 aa, synthetic construct
ALGDVGAETDKLF

SEQ ID NO: 13550 - protein, 13 aa, synthetic construct
ALGDVGADTDNLF

SEQ ID NO: 13551 - protein, 10 aa, synthetic construct
ALGDVGADAD

SEQ ID NO: 13552 - protein, 14 aa, synthetic construct
ALGDVGAAYTDKLI

SEQ ID NO: 13553 - protein, 12 aa, synthetic construct
ALGDRGRPDKLI

SEQ ID NO: 13554 - protein, 12 aa, synthetic construct
ALGDRGRAARLL

SEQ ID NO: 13555 - protein, 12 aa, synthetic construct
ALGDRGMTDKLI

SEQ ID NO: 13556 - protein, 12 aa, synthetic construct
ALGDRGDGDKLI

SEQ ID NO: 13557 - protein, 13 aa, synthetic construct
ALGDRGADTDKLI

SEQ ID NO: 13558 - protein, 13 aa, synthetic construct
ALGDREALTAQLF

SEQ ID NO: 13559 - protein, 14 aa, synthetic construct
ALGDRCTGDTDILI

SEQ ID NO: 13560 - protein, 11 aa, synthetic construct
ALGDRAKTAKL

SEQ ID NO: 13561 - protein, 14 aa, synthetic construct
ALGDQSTGGYADKL

SEQ ID NO: 13562 - protein, 11 aa, synthetic construct
ALGDQGPPELG

SEQ ID NO: 13563 - protein, 14 aa, synthetic construct
ALGDPYVLGVVYTD

SEQ ID NO: 13564 - protein, 14 aa, synthetic construct
ALGDPYVLGIPINS

SEQ ID NO: 13565 - protein, 14 aa, synthetic construct
ALGDPYKEDGTDKL

SEQ ID NO: 13566 - protein, 14 aa, synthetic construct
ALGDPVVGASSTDK

SEQ ID NO: 13567 - protein, 12 aa, synthetic construct
ALGDPVLGATYT

SEQ ID NO: 13568 - protein, 14 aa, synthetic construct
ALGDPVLGASYTDQ

SEQ ID NO: 13569 - protein, 14 aa, synthetic construct
ALGDPVLGASSTDK

SEQ ID NO: 13570 - protein, 14 aa, synthetic construct
ALGDPVLGASNTDK

SEQ ID NO: 13571 - protein, 14 aa, synthetic construct
ALGDPVLGASCTDK

SEQ ID NO: 13572 - protein, 8 aa, synthetic construct
ALGDPVLG

SEQ ID NO: 13573 - protein, 14 aa, synthetic construct
ALGDPTKRAAPINS

SEQ ID NO: 13574 - protein, 9 aa, synthetic construct
ALGDPTKRA

SEQ ID NO: 13575 - protein, 14 aa, synthetic construct
ALGDPSYWGTHTDK

SEQ ID NO: 13576 - protein, 14 aa, synthetic construct
ALGDPSYWGIRTIN

SEQ ID NO: 13577 - protein, 14 aa, synthetic construct
ALGDPSYWGINHKL

SEQ ID NO: 13578 - protein, 12 aa, synthetic construct
ALGDRGASDKHI

SEQ ID NO: 13579 - protein, 12 aa, synthetic construct
ALGDRGDSDILI

SEQ ID NO: 13580 - protein, 12 aa, synthetic construct
ALGDRGMTDHLI

SEQ ID NO: 13581 - protein, 12 aa, synthetic construct
ALGDRGDSDKVI

SEQ ID NO: 13582 - protein, 12 aa, synthetic construct
ALGDRGITEKLI

SEQ ID NO: 13583 - protein, 12 aa, synthetic construct
ALGDRGITDNLI

SEQ ID NO: 13584 - protein, 12 aa, synthetic construct
ALGDRGITDKVI

SEQ ID NO: 13585 - protein, 12 aa, synthetic construct
ALGDRGITDKHN

SEQ ID NO: 13586 - protein, 12 aa, synthetic construct
ALGDRGITDKHI

SEQ ID NO: 13587 - protein, 12 aa, synthetic construct
ALGDRGITDILI

SEQ ID NO: 13588 - protein, 12 aa, synthetic construct
ALGDRGITDELI

SEQ ID NO: 13589 - protein, 8 aa, synthetic construct
ALGDRGIT

SEQ ID NO: 13590 - protein, 12 aa, synthetic construct
ALGDRGIRDKLI

SEQ ID NO: 13591 - protein, 12 aa, synthetic construct
ALGDRGIADKLI

SEQ ID NO: 13592 - protein, 12 aa, synthetic construct
ALGDRGHSDKLI

SEQ ID NO: 13593 - protein, 13 aa, synthetic construct
ALGDRGGYTDKLF

SEQ ID NO: 13594 - protein, 14 aa, synthetic construct
ALGDRGGYGTETLI

SEQ ID NO: 13595 - protein, 13 aa, synthetic construct
ALGDRGGYADKLI

SEQ ID NO: 13596 - protein, 13 aa, synthetic construct
ALGDRGGSADKLI

SEQ ID NO: 13597 - protein, 14 aa, synthetic construct
ALGDRGGRQFDKLI

SEQ ID NO: 13598 - protein, 12 aa, synthetic construct
ALGDRGESAKLI

SEQ ID NO: 13599 - protein, 13 aa, synthetic construct
ALGDRGDTGDTLI

SEQ ID NO: 13600 - protein, 12 aa, synthetic construct
ALGDRGDTDTLI

SEQ ID NO: 13601 - protein, 12 aa, synthetic construct
ALGDRGDSEKLI

SEQ ID NO: 13602 - protein, 12 aa, synthetic construct
ALGDRGDSDQLI

SEQ ID NO: 13603 - protein, 11 aa, synthetic construct
ALGDVGDHQLI

SEQ ID NO: 13604 - protein, 13 aa, synthetic construct
ALGDVGDIPINST

SEQ ID NO: 13605 - protein, 11 aa, synthetic construct
ALGDVGDKKII

SEQ ID NO: 13606 - protein, 11 aa, synthetic construct
ALGEAHTDKLI

SEQ ID NO: 13607 - protein, 13 aa, synthetic construct
ALGEAGGDTTAKL

SEQ ID NO: 13608 - protein, 14 aa, synthetic construct
ALGEAGGDNTDKLI

SEQ ID NO: 13609 - protein, 11 aa, synthetic construct
ALGEAFTDKLI

SEQ ID NO: 13610 - protein, 14 aa, synthetic construct
ALGEACTGETDKLI

SEQ ID NO: 13611 - protein, 14 aa, synthetic construct
ALGEACTGDTDKVI

SEQ ID NO: 13612 - protein, 14 aa, synthetic construct
ALGEACTGDTDKLI

SEQ ID NO: 13613 - protein, 8 aa, synthetic construct
ALGDWGHN

SEQ ID NO: 13614 - protein, 11 aa, synthetic construct
ALGDVYTDKLI

SEQ ID NO: 13615 - protein, 14 aa, synthetic construct
ALGDVVGYGTYKLI

SEQ ID NO: 13616 - protein, 14 aa, synthetic construct
ALGDVRWGPYTAKL

SEQ ID NO: 13617 - protein, 14 aa, synthetic construct
ALGDVRWGPHTEKL

SEQ ID NO: 13618 - protein, 14 aa, synthetic construct
ALGDVRWGLYTDKL

SEQ ID NO: 13619 - protein, 14 aa, synthetic construct
ALGDVRTGGYEYTD

SEQ ID NO: 13620 - protein, 12 aa, synthetic construct
ALGDVRIFDKLI

SEQ ID NO: 13621 - protein, 11 aa, synthetic construct
ALGDVRGLGLF

SEQ ID NO: 13622 - protein, 14 aa, synthetic construct
ALGDVLLGDPEKLI

SEQ ID NO: 13623 - protein, 9 aa, synthetic construct
ALGDVKVWI

SEQ ID NO: 13624 - protein, 12 aa, synthetic construct
ALGDVGRTDLLI

SEQ ID NO: 13625 - protein, 11 aa, synthetic construct
ALGDVGNNKLI

SEQ ID NO: 13626 - protein, 12 aa, synthetic construct
ALGDVGMTDQLF

SEQ ID NO: 13627 - protein, 13 aa, synthetic construct
ALGDVGIYTDQLI

SEQ ID NO: 13628 - protein, 10 aa, synthetic construct
ALGEAGGYNS

SEQ ID NO: 13629 - protein, 11 aa, synthetic construct
ALGEAHTDKLV

SEQ ID NO: 13630 - protein, 13 aa, synthetic construct
ALGDVGIYTDILI

SEQ ID NO: 13631 - protein, 14 aa, synthetic construct
ALGEALLLGDTIDK

SEQ ID NO: 13632 - protein, 10 aa, synthetic construct
ALGEAYTDKL

SEQ ID NO: 13633 - protein, 11 aa, synthetic construct
ALGEAYTDKIF

SEQ ID NO: 13634 - protein, 8 aa, synthetic construct
ALGEAYTD

SEQ ID NO: 13635 - protein, 11 aa, synthetic construct
ALGEAYPEKLI

SEQ ID NO: 13636 - protein, 11 aa, synthetic construct
ALGEAYNDKLF

SEQ ID NO: 13637 - protein, 11 aa, synthetic construct
ALGEAYNDKHI

SEQ ID NO: 13638 - protein, 11 aa, synthetic construct
ALGEAYIDKLI

SEQ ID NO: 13639 - protein, 11 aa, synthetic construct
ALGEAYADKLF

SEQ ID NO: 13640 - protein, 14 aa, synthetic construct
ALGEATGGYTDKLI

SEQ ID NO: 13641 - protein, 14 aa, synthetic construct
ALGEASYWGIHTDK

SEQ ID NO: 13642 - protein, 14 aa, synthetic construct
ALGEASYGIADKLI

SEQ ID NO: 13643 - protein, 14 aa, synthetic construct
ALGEASTGGYADKL

SEQ ID NO: 13644 - protein, 11 aa, synthetic construct
ALGEASTDKVI

SEQ ID NO: 13645 - protein, 11 aa, synthetic construct
ALGEASTDKRI

SEQ ID NO: 13646 - protein, 11 aa, synthetic construct
ALGEASTDKLN

SEQ ID NO: 13647 - protein, 13 aa, synthetic construct
ALGEASTAQLLWG

SEQ ID NO: 13648 - protein, 11 aa, synthetic construct
ALGEASTAKLI

SEQ ID NO: 13649 - protein, 14 aa, synthetic construct
ALGEARGGGYRTDK

SEQ ID NO: 13650 - protein, 11 aa, synthetic construct
ALGEANTQKII

SEQ ID NO: 13651 - protein, 11 aa, synthetic construct
ALGEANTHILI

SEQ ID NO: 13652 - protein, 9 aa, synthetic construct
ALGEALVLG

SEQ ID NO: 13653 - protein, 13 aa, synthetic construct
ALGDVGIYTDKLI

SEQ ID NO: 13654 - protein, 12 aa, synthetic construct
ALGDVGIPINSS

SEQ ID NO: 13655 - protein, 10 aa, synthetic construct
ALGDVGDKLI

SEQ ID NO: 13656 - protein, 11 aa, synthetic construct
ALGDVGDTKLN

SEQ ID NO: 13657 - protein, 13 aa, synthetic construct
ALGDVGDTIDKII

SEQ ID NO: 13658 - protein, 13 aa, synthetic construct
ALGDVGDTGDKLY

SEQ ID NO: 13659 - protein, 12 aa, synthetic construct
ALGDVGDTEKLI

SEQ ID NO: 13660 - protein, 12 aa, synthetic construct
ALGDVGDTDKRI

SEQ ID NO: 13661 - protein, 12 aa, synthetic construct
ALGDVGDTAQQI

SEQ ID NO: 13662 - protein, 9 aa, synthetic construct
ALGDVGDSS

SEQ ID NO: 13663 - protein, 11 aa, synthetic construct
ALGDVGDSKLF

SEQ ID NO: 13664 - protein, 12 aa, synthetic construct
ALGDVGDPNKLI

SEQ ID NO: 13665 - protein, 12 aa, synthetic construct
ALGDVGDPDKLI

SEQ ID NO: 13666 - protein, 11 aa, synthetic construct
ALGDVGDNTVF

SEQ ID NO: 13667 - protein, 11 aa, synthetic construct
ALGDVGDNTLI

SEQ ID NO: 13668 - protein, 11 aa, synthetic construct
ALGDVGDNQLI

SEQ ID NO: 13669 - protein, 11 aa, synthetic construct
ALGDVGDNNSS

SEQ ID NO: 13670 - protein, 13 aa, synthetic construct
ALGDVGDNNLNYG

SEQ ID NO: 13671 - protein, 11 aa, synthetic construct
ALGDVGDNKLL

SEQ ID NO: 13672 - protein, 11 aa, synthetic construct
ALGDVGDNKLK

SEQ ID NO: 13673 - protein, 11 aa, synthetic construct
ALGDVGDNKIN

SEQ ID NO: 13674 - protein, 11 aa, synthetic construct
ALGDVGDNKIK

SEQ ID NO: 13675 - protein, 11 aa, synthetic construct
ALGDVGDNKHI

SEQ ID NO: 13676 - protein, 11 aa, synthetic construct
ALGDVGDLKLI

SEQ ID NO: 13677 - protein, 10 aa, synthetic construct
ALGDVGDKVI

SEQ ID NO: 13678 - protein, 11 aa, synthetic construct
ALGDVGDTKLL

SEQ ID NO: 13679 - protein, 14 aa, synthetic construct
ALGDVGDTNTDKLI

SEQ ID NO: 13680 - protein, 12 aa, synthetic construct
ALGDVGINDKLI

SEQ ID NO: 13681 - protein, 13 aa, synthetic construct
ALGDVGDTPLNSS

SEQ ID NO: 13682 - protein, 14 aa, synthetic construct
ALGDVGGYSAPGTP

SEQ ID NO: 13683 - protein, 13 aa, synthetic construct
ALGDVGGYGTDKL

SEQ ID NO: 13684 - protein, 14 aa, synthetic construct
ALGDVGGYGTAKLI

SEQ ID NO: 13685 - protein, 14 aa, synthetic construct
ALGDVGGYGSEKLI

SEQ ID NO: 13686 - protein, 14 aa, synthetic construct
ALGDVGGYGSDKLI

SEQ ID NO: 13687 - protein, 13 aa, synthetic construct
ALGDVGGYDDKLI

SEQ ID NO: 13688 - protein, 13 aa, synthetic construct
ALGDVGGYAEKLI

SEQ ID NO: 13689 - protein, 13 aa, synthetic construct
ALGDVGGYADQVI

SEQ ID NO: 13690 - protein, 13 aa, synthetic construct
ALGDVGGYADQLL

SEQ ID NO: 13691 - protein, 13 aa, synthetic construct
ALGDVGGYADKLL

SEQ ID NO: 13692 - protein, 12 aa, synthetic construct
ALGDVGGYADKL

SEQ ID NO: 13693 - protein, 13 aa, synthetic construct
ALGDVGGYADKII

SEQ ID NO: 13694 - protein, 14 aa, synthetic construct
ALGDVGGSGTETLI

SEQ ID NO: 13695 - protein, 13 aa, synthetic construct
ALGDVGGSADNLI

SEQ ID NO: 13696 - protein, 13 aa, synthetic construct
ALGDVGGSADKLI

SEQ ID NO: 13697 - protein, 14 aa, synthetic construct
ALGDVGGHGTDKLI

SEQ ID NO: 13698 - protein, 13 aa, synthetic construct
ALGDVGGDADKLI

SEQ ID NO: 13699 - protein, 11 aa, synthetic construct
ALGDVGEYKLI

SEQ ID NO: 13700 - protein, 11 aa, synthetic construct
ALGDVGDWDSS

SEQ ID NO: 13701 - protein, 14 aa, synthetic construct
ALGDVGDTSTPINS

SEQ ID NO: 13702 - protein, 13 aa, synthetic construct
ALGDVGDTRRETH

SEQ ID NO: 13703 - protein, 13 aa, synthetic construct
ALGDPSYWGIHTD

SEQ ID NO: 13704 - protein, 14 aa, synthetic construct
ALGDPSYGGIHTDK

SEQ ID NO: 13705 - protein, 14 aa, synthetic construct
ALGDPSVRGARRKL

SEQ ID NO: 13706 - protein, 12 aa, synthetic construct
ALGDLRIFDKLF

SEQ ID NO: 13707 - protein, 12 aa, synthetic construct
ALGDLRIFDKHL

SEQ ID NO: 13708 - protein, 12 aa, synthetic construct
ALGDLRIFDKHI

SEQ ID NO: 13709 - protein, 12 aa, synthetic construct
ALGDLRICDTLI

SEQ ID NO: 13710 - protein, 12 aa, synthetic construct
ALGDLRICDHLI

SEQ ID NO: 13711 - protein, 14 aa, synthetic construct
ALGDLRHGGYEYTD

SEQ ID NO: 13712 - protein, 14 aa, synthetic construct
ALGDLRGYGTDKLI

SEQ ID NO: 13713 - protein, 11 aa, synthetic construct
ALGDLRGVGLS

SEQ ID NO: 13714 - protein, 12 aa, synthetic construct
ALGDLRGTETLI

SEQ ID NO: 13715 - protein, 11 aa, synthetic construct
ALGDLRGLGVF

SEQ ID NO: 13716 - protein, 11 aa, synthetic construct
ALGDLRGLGRI

SEQ ID NO: 13717 - protein, 11 aa, synthetic construct
ALGDLRGLGLT

SEQ ID NO: 13718 - protein, 11 aa, synthetic construct
ALGDLRGLGLS

SEQ ID NO: 13719 - protein, 11 aa, synthetic construct
ALGDLRGLGLF

SEQ ID NO: 13720 - protein, 13 aa, synthetic construct
ALGDLRGGPYTDK

SEQ ID NO: 13721 - protein, 12 aa, synthetic construct
ALGDLRDTNKLI

SEQ ID NO: 13722 - protein, 12 aa, synthetic construct
ALGDLRDTDTLI

SEQ ID NO: 13723 - protein, 12 aa, synthetic construct
ALGDLRDTDQLF

SEQ ID NO: 13724 - protein, 12 aa, synthetic construct
ALGDLRDTDNLF

SEQ ID NO: 13725 - protein, 12 aa, synthetic construct
ALGDLRDTDKVI

SEQ ID NO: 13726 - protein, 12 aa, synthetic construct
ALGDLRDTDKPI

SEQ ID NO: 13727 - protein, 12 aa, synthetic construct
ALGDLRDTDHLI

SEQ ID NO: 13728 - protein, 12 aa, synthetic construct
ALGDLRIFDKII

SEQ ID NO: 13729 - protein, 12 aa, synthetic construct
ALGDLRIFDKLT

SEQ ID NO: 13730 - protein, 14 aa, synthetic construct
ALGDLRDRALTAQL

SEQ ID NO: 13731 - protein, 12 aa, synthetic construct
ALGDLRIFDKPI

SEQ ID NO: 13732 - protein, 14 aa, synthetic construct
ALGDLRWGPYTAKL

SEQ ID NO: 13733 - protein, 14 aa, synthetic construct
ALGDLRWGPYPDKL

SEQ ID NO: 13734 - protein, 14 aa, synthetic construct
ALGDLRWGPYADKL

SEQ ID NO: 13735 - protein, 14 aa, synthetic construct
ALGDLRWGPRTPIN

SEQ ID NO: 13736 - protein, 14 aa, synthetic construct
ALGDLRWGPFTDKL

SEQ ID NO: 13737 - protein, 14 aa, synthetic construct
ALGDLRWGIPDKLI

SEQ ID NO: 13738 - protein, 14 aa, synthetic construct
ALGDLRTGGYQYTD

SEQ ID NO: 13739 - protein, 13 aa, synthetic construct
ALGDLRTGGYEYT

SEQ ID NO: 13740 - protein, 14 aa, synthetic construct
ALGDLRSGGYEYTD

SEQ ID NO: 13741 - protein, 12 aa, synthetic construct
ALGDLRSFAKLI

SEQ ID NO: 13742 - protein, 11 aa, synthetic construct
ALGDLRRLGLF

SEQ ID NO: 13743 - protein, 14 aa, synthetic construct
ALGDLRRGPYTDKL

SEQ ID NO: 13744 - protein, 12 aa, synthetic construct
ALGDLRQTDNHI

SEQ ID NO: 13745 - protein, 12 aa, synthetic construct
ALGDLRNTDKLI

SEQ ID NO: 13746 - protein, 12 aa, synthetic construct
ALGDLRMLDKLI

SEQ ID NO: 13747 - protein, 12 aa, synthetic construct
ALGDLRLFDKLI

SEQ ID NO: 13748 - protein, 12 aa, synthetic construct
ALGDLRIFVQLI

SEQ ID NO: 13749 - protein, 12 aa, synthetic construct
ALGDLRIFEKLI

SEQ ID NO: 13750 - protein, 12 aa, synthetic construct
ALGDLRIFDTLI

SEQ ID NO: 13751 - protein, 12 aa, synthetic construct
ALGDLRIFDQLI

SEQ ID NO: 13752 - protein, 12 aa, synthetic construct
ALGDLRIFDKVI

SEQ ID NO: 13753 - protein, 12 aa, synthetic construct
ALGDLRDSDKLI

SEQ ID NO: 13754 - protein, 14 aa, synthetic construct
ALGDLRDRALKAQL

SEQ ID NO: 13755 - protein, 13 aa, synthetic construct
ALGDLRWGPYTDK

SEQ ID NO: 13756 - protein, 14 aa, synthetic construct
ALGDLPPGGVGDTD

SEQ ID NO: 13757 - protein, 14 aa, synthetic construct
ALGDLPNWGRYTEK

SEQ ID NO: 13758 - protein, 11 aa, synthetic construct
ALGDLPMYWWL

SEQ ID NO: 13759 - protein, 14 aa, synthetic construct
ALGDLPMGVLYTDK

SEQ ID NO: 13760 - protein, 14 aa, synthetic construct
ALGDLPLYWGRYTD

SEQ ID NO: 13761 - protein, 14 aa, synthetic construct
ALGDLPLYWGLFTD

SEQ ID NO: 13762 - protein, 14 aa, synthetic construct
ALGDLPLYWGCTPI

SEQ ID NO: 13763 - protein, 14 aa, synthetic construct
ALGDLPLSCGLYTD

SEQ ID NO: 13764 - protein, 14 aa, synthetic construct
ALGDLPLGVMYTDK

SEQ ID NO: 13765 - protein, 14 aa, synthetic construct
ALGDLPLGVLYTDQ

SEQ ID NO: 13766 - protein, 14 aa, synthetic construct
ALGDLPLGVLYTDE

SEQ ID NO: 13767 - protein, 13 aa, synthetic construct
ALGDLPLGVLYTD

SEQ ID NO: 13768 - protein, 14 aa, synthetic construct
ALGDLPLGVLSTDK

SEQ ID NO: 13769 - protein, 13 aa, synthetic construct
ALGDLPLGVLSTD

SEQ ID NO: 13770 - protein, 14 aa, synthetic construct
ALGDLPLGVLHTDK

SEQ ID NO: 13771 - protein, 9 aa, synthetic construct
ALGDLPLGV

SEQ ID NO: 13772 - protein, 14 aa, synthetic construct
ALGDLPLGGPVTAQ

SEQ ID NO: 13773 - protein, 10 aa, synthetic construct
ALGDLPLCWG

SEQ ID NO: 13774 - protein, 14 aa, synthetic construct
ALGDLPKGGFAYTD

SEQ ID NO: 13775 - protein, 9 aa, synthetic construct
ALGDLPGSW

SEQ ID NO: 13776 - protein, 14 aa, synthetic construct
ALGDLLRGDTDKLI

SEQ ID NO: 13777 - protein, 14 aa, synthetic construct
ALGDLLMGVLNTDK

SEQ ID NO: 13778 - protein, 14 aa, synthetic construct
ALGDLPPGGFGDTD

SEQ ID NO: 13779 - protein, 14 aa, synthetic construct
ALGDLPSWGRYTDK

SEQ ID NO: 13780 - protein, 12 aa, synthetic construct
ALGDLRDPDKLI

SEQ ID NO: 13781 - protein, 9 aa, synthetic construct
ALGDLPTGG

SEQ ID NO: 13782 - protein, 12 aa, synthetic construct
ALGDLRDADKLI

SEQ ID NO: 13783 - protein, 11 aa, synthetic construct
ALGDLRADTMK

SEQ ID NO: 13784 - protein, 14 aa, synthetic construct
ALGDLPYWVRYTDK

SEQ ID NO: 13785 - protein, 14 aa, synthetic construct
ALGDLPYWGRYTEK

SEQ ID NO: 13786 - protein, 14 aa, synthetic construct
ALGDLPYWGRYTDQ

SEQ ID NO: 13787 - protein, 14 aa, synthetic construct
ALGDLPYWGRYADK

SEQ ID NO: 13788 - protein, 14 aa, synthetic construct
ALGDLPYWGRSTDK

SEQ ID NO: 13789 - protein, 14 aa, synthetic construct
ALGDLPYWGGPPIN

SEQ ID NO: 13790 - protein, 12 aa, synthetic construct
ALGDLPYTLRLI

SEQ ID NO: 13791 - protein, 14 aa, synthetic construct
ALGDLPYSGSYTDK

SEQ ID NO: 13792 - protein, 14 aa, synthetic construct
ALGDLPYSGRYTDK

SEQ ID NO: 13793 - protein, 14 aa, synthetic construct
ALGDLPYRGRYTDK

SEQ ID NO: 13794 - protein, 14 aa, synthetic construct
ALGDLPYRGRSTDK

SEQ ID NO: 13795 - protein, 14 aa, synthetic construct
ALGDLPYCGRYTEK

SEQ ID NO: 13796 - protein, 14 aa, synthetic construct
ALGDLPTWGTYTDK

SEQ ID NO: 13797 - protein, 14 aa, synthetic construct
ALGDLPTWGSSTDK

SEQ ID NO: 13798 - protein, 14 aa, synthetic construct
ALGDLPTWGFGYTD

SEQ ID NO: 13799 - protein, 14 aa, synthetic construct
ALGDLPTSGRNTDK

SEQ ID NO: 13800 - protein, 14 aa, synthetic construct
ALGDLPTGGYAETH

SEQ ID NO: 13801 - protein, 12 aa, synthetic construct
ALGDLPTGGVGY

SEQ ID NO: 13802 - protein, 14 aa, synthetic construct
ALGDLPTGGGTPIN

SEQ ID NO: 13803 - protein, 14 aa, synthetic construct
ALGDLRWGPYTDEL

SEQ ID NO: 13804 - protein, 14 aa, synthetic construct
ALGDLRWGPYTDNL

SEQ ID NO: 13805 - protein, 14 aa, synthetic construct
ALGDPSVLGARRKL

SEQ ID NO: 13806 - protein, 14 aa, synthetic construct
ALGDPGPGETDKLI

SEQ ID NO: 13807 - protein, 14 aa, synthetic construct
ALGDPGGYTTEKLI

SEQ ID NO: 13808 - protein, 14 aa, synthetic construct
ALGDPGGYTTDQLI

SEQ ID NO: 13809 - protein, 13 aa, synthetic construct
ALGDPGGYTAILM

SEQ ID NO: 13810 - protein, 14 aa, synthetic construct
ALGDPGGYNTYKLI

SEQ ID NO: 13811 - protein, 14 aa, synthetic construct
ALGDPGGYNTEKLL

SEQ ID NO: 13812 - protein, 14 aa, synthetic construct
ALGDPGGYNTDQLI

SEQ ID NO: 13813 - protein, 14 aa, synthetic construct
ALGDPGGYNTDNLI

SEQ ID NO: 13814 - protein, 14 aa, synthetic construct
ALGDPGGYNTDKLL

SEQ ID NO: 13815 - protein, 13 aa, synthetic construct
ALGDPGGYNTDKL

SEQ ID NO: 13816 - protein, 14 aa, synthetic construct
ALGDPGGYNTAKLI

SEQ ID NO: 13817 - protein, 14 aa, synthetic construct
ALGDPGGYKTDKLI

SEQ ID NO: 13818 - protein, 8 aa, synthetic construct
ALGDPGGY

SEQ ID NO: 13819 - protein, 13 aa, synthetic construct
ALGDPGGSTEKLI

SEQ ID NO: 13820 - protein, 13 aa, synthetic construct
ALGDPGGSTDKLI

SEQ ID NO: 13821 - protein, 14 aa, synthetic construct
ALGDPGGSNTEKLI

SEQ ID NO: 13822 - protein, 14 aa, synthetic construct
ALGDPGGSNTDKLI

SEQ ID NO: 13823 - protein, 14 aa, synthetic construct
ALGDPGGHNTDKLI

SEQ ID NO: 13824 - protein, 14 aa, synthetic construct
ALGDPGDTTPINSS

SEQ ID NO: 13825 - protein, 13 aa, synthetic construct
ALGDPGDTPINSS

SEQ ID NO: 13826 - protein, 13 aa, synthetic construct
ALGDPGDTGDQLI

SEQ ID NO: 13827 - protein, 14 aa, synthetic construct
ALGDPCTGGCSPIN

SEQ ID NO: 13828 - protein, 14 aa, synthetic construct
ALGDPGPGDTEKLI

SEQ ID NO: 13829 - protein, 14 aa, synthetic construct
ALGDPGTGGYADKL

SEQ ID NO: 13830 - protein, 14 aa, synthetic construct
ALGDPCTGDTENLI

SEQ ID NO: 13831 - protein, 14 aa, synthetic construct
ALGDPKMDTSNDKL

SEQ ID NO: 13832 - protein, 14 aa, synthetic construct
ALGDPSSDTRPINS

SEQ ID NO: 13833 - protein, 14 aa, synthetic construct
ALGDPSRGGDADKL

SEQ ID NO: 13834 - protein, 14 aa, synthetic construct
ALGDPSIGGYADKL

SEQ ID NO: 13835 - protein, 14 aa, synthetic construct
ALGDPSAGGYADKL

SEQ ID NO: 13836 - protein, 14 aa, synthetic construct
ALGDPRTGGYASTD

SEQ ID NO: 13837 - protein, 14 aa, synthetic construct
ALGDPRTGGYADKL

SEQ ID NO: 13838 - protein, 14 aa, synthetic construct
ALGDPRPGGYAYTD

SEQ ID NO: 13839 - protein, 14 aa, synthetic construct
ALGDPRNGGYAYTD

SEQ ID NO: 13840 - protein, 11 aa, synthetic construct
ALGDPRGLGLI

SEQ ID NO: 13841 - protein, 14 aa, synthetic construct
ALGDPPYYVLGDTD

SEQ ID NO: 13842 - protein, 14 aa, synthetic construct
ALGDPPSYVLGYTD

SEQ ID NO: 13843 - protein, 12 aa, synthetic construct
ALGDPPSYVLGE

SEQ ID NO: 13844 - protein, 14 aa, synthetic construct
ALGDPPSYGLGDTD

SEQ ID NO: 13845 - protein, 14 aa, synthetic construct
ALGDPPSSVLGDTD

SEQ ID NO: 13846 - protein, 14 aa, synthetic construct
ALGDPNRDTSTDKL

SEQ ID NO: 13847 - protein, 14 aa, synthetic construct
ALGDPMRDTSTDNL

SEQ ID NO: 13848 - protein, 14 aa, synthetic construct
ALGDPLLLGDPIDK

SEQ ID NO: 13849 - protein, 14 aa, synthetic construct
ALGDPKRETSTDQL

SEQ ID NO: 13850 - protein, 14 aa, synthetic construct
ALGDPKRETSTDKL

SEQ ID NO: 13851 - protein, 14 aa, synthetic construct
ALGDPKRDTTPINS

SEQ ID NO: 13852 - protein, 13 aa, synthetic construct
ALGDPKRDTSTDK

SEQ ID NO: 13853 - protein, 14 aa, synthetic construct
ALGDPCTGDTRKLI

SEQ ID NO: 13854 - protein, 14 aa, synthetic construct
ALGDPCTGDTDQLI

SEQ ID NO: 13855 - protein, 14 aa, synthetic construct
ALGDLRWGPYTHKL

SEQ ID NO: 13856 - protein, 13 aa, synthetic construct
ALGDMGIYTDKLI

SEQ ID NO: 13857 - protein, 10 aa, synthetic construct
ALGDMGDKLI

SEQ ID NO: 13858 - protein, 10 aa, synthetic construct
ALGDMGDKII

SEQ ID NO: 13859 - protein, 14 aa, synthetic construct
ALGDMGASYTDKLI

SEQ ID NO: 13860 - protein, 14 aa, synthetic construct
ALGDLYWGIQINSS

SEQ ID NO: 13861 - protein, 13 aa, synthetic construct
ALGDLYWGILRSW

SEQ ID NO: 13862 - protein, 11 aa, synthetic construct
ALGDLYWGILI

SEQ ID NO: 13863 - protein, 14 aa, synthetic construct
ALGDLYWGIAINSS

SEQ ID NO: 13864 - protein, 11 aa, synthetic construct
ALGDLYTENLS

SEQ ID NO: 13865 - protein, 11 aa, synthetic construct
ALGDLYTEKLI

SEQ ID NO: 13866 - protein, 11 aa, synthetic construct
ALGDLYTDKLN

SEQ ID NO: 13867 - protein, 11 aa, synthetic construct
ALGDLYTDKLF

SEQ ID NO: 13868 - protein, 11 aa, synthetic construct
ALGDLYTDKHI

SEQ ID NO: 13869 - protein, 11 aa, synthetic construct
ALGDLYNDKLI

SEQ ID NO: 13870 - protein, 11 aa, synthetic construct
ALGDLWDNKII

SEQ ID NO: 13871 - protein, 13 aa, synthetic construct
ALGDLVLGDDKLI

SEQ ID NO: 13872 - protein, 12 aa, synthetic construct
ALGDLVDDKRNL

SEQ ID NO: 13873 - protein, 14 aa, synthetic construct
ALGDLTVLGVPPTD

SEQ ID NO: 13874 - protein, 14 aa, synthetic construct
ALGDLSWGPVVNSS

SEQ ID NO: 13875 - protein, 14 aa, synthetic construct
ALGDLSWGILSSWD

SEQ ID NO: 13876 - protein, 11 aa, synthetic construct
ALGDLSTDKLI

SEQ ID NO: 13877 - protein, 13 aa, synthetic construct
ALGDLSKGPYTDK

SEQ ID NO: 13878 - protein, 13 aa, synthetic construct
ALGDMGIYTDELI

SEQ ID NO: 13879 - protein, 13 aa, synthetic construct
ALGDMGIYTDKLN

SEQ ID NO: 13880 - protein, 14 aa, synthetic construct
ALGDPCTGDTDNLI

SEQ ID NO: 13881 - protein, 13 aa, synthetic construct
ALGDMGIYTDQHI

SEQ ID NO: 13882 - protein, 14 aa, synthetic construct
ALGDPCTGDTDKNI

SEQ ID NO: 13883 - protein, 13 aa, synthetic construct
ALGDPCTGDTDKL

SEQ ID NO: 13884 - protein, 14 aa, synthetic construct
ALGDPCTGDTDILI

SEQ ID NO: 13885 - protein, 14 aa, synthetic construct
ALGDPCTGDTAKLI

SEQ ID NO: 13886 - protein, 14 aa, synthetic construct
ALGDPCTGDSDKLI

SEQ ID NO: 13887 - protein, 14 aa, synthetic construct
ALGDPCTGDHDKLI

SEQ ID NO: 13888 - protein, 14 aa, synthetic construct
ALGDPCTADTDKLI

SEQ ID NO: 13889 - protein, 14 aa, synthetic construct
ALGDPCPGDTEKLI

SEQ ID NO: 13890 - protein, 14 aa, synthetic construct
ALGDPCPGDTDKVI

SEQ ID NO: 13891 - protein, 14 aa, synthetic construct
ALGDPANWGLHTDK

SEQ ID NO: 13892 - protein, 14 aa, synthetic construct
ALGDNSYGNSDKLI

SEQ ID NO: 13893 - protein, 13 aa, synthetic construct
ALGDNGGYAGNLI

SEQ ID NO: 13894 - protein, 7 aa, synthetic construct
ALGDNGE

SEQ ID NO: 13895 - protein, 13 aa, synthetic construct
ALGDMWADTDKLI

SEQ ID NO: 13896 - protein, 12 aa, synthetic construct
ALGDMRYNDKLI

SEQ ID NO: 13897 - protein, 12 aa, synthetic construct
ALGDMRNTDKLN

SEQ ID NO: 13898 - protein, 14 aa, synthetic construct
ALGDMRCGPYTDKL

SEQ ID NO: 13899 - protein, 14 aa, synthetic construct
ALGDMGVTGPINSS

SEQ ID NO: 13900 - protein, 13 aa, synthetic construct
ALGDMGRYTHKLI

SEQ ID NO: 13901 - protein, 13 aa, synthetic construct
ALGDMGIYTHKLI

SEQ ID NO: 13902 - protein, 13 aa, synthetic construct
ALGDMGIYTDQLI

SEQ ID NO: 13903 - protein, 11 aa, synthetic construct
ALGEAYTDKLK

SEQ ID NO: 13904 - protein, 11 aa, synthetic construct
ALGEAYTDKLM

SEQ ID NO: 13905 - protein, 11 aa, synthetic construct
ALGEAYTDQLS

SEQ ID NO: 13906 - protein, 13 aa, synthetic construct
ALGELEWGRMGLN

SEQ ID NO: 13907 - protein, 13 aa, synthetic construct
ALGELEGYADKLI

SEQ ID NO: 13908 - protein, 14 aa, synthetic construct
ALGELEGLGVHTDK

SEQ ID NO: 13909 - protein, 14 aa, synthetic construct
ALGELEELGVHTEK

SEQ ID NO: 13910 - protein, 14 aa, synthetic construct
ALGELEDLGVHTDQ

SEQ ID NO: 13911 - protein, 14 aa, synthetic construct
ALGELEDLGVHTDK

SEQ ID NO: 13912 - protein, 13 aa, synthetic construct
ALGELDWVRRGLI

SEQ ID NO: 13913 - protein, 14 aa, synthetic construct
ALGELDWGRYTDKL

SEQ ID NO: 13914 - protein, 14 aa, synthetic construct
ALGELDWGRTPINS

SEQ ID NO: 13915 - protein, 13 aa, synthetic construct
ALGELDWGRSRLI

SEQ ID NO: 13916 - protein, 13 aa, synthetic construct
ALGELDWGRSGLN

SEQ ID NO: 13917 - protein, 13 aa, synthetic construct
ALGELDWGRRRLI

SEQ ID NO: 13918 - protein, 13 aa, synthetic construct
ALGELDWGRRGVI

SEQ ID NO: 13919 - protein, 13 aa, synthetic construct
ALGELDWGRRGRI

SEQ ID NO: 13920 - protein, 13 aa, synthetic construct
ALGELDWGRRGLV

SEQ ID NO: 13921 - protein, 13 aa, synthetic construct
ALGELDWGRRGII

SEQ ID NO: 13922 - protein, 13 aa, synthetic construct
ALGELDWGRRGHI

SEQ ID NO: 13923 - protein, 13 aa, synthetic construct
ALGELDWGRGGLI

SEQ ID NO: 13924 - protein, 13 aa, synthetic construct
ALGELDWGPRGLI

SEQ ID NO: 13925 - protein, 14 aa, synthetic construct
ALGELDWGLVHRET

SEQ ID NO: 13926 - protein, 13 aa, synthetic construct
ALGELDWGLSGLF

SEQ ID NO: 13927 - protein, 13 aa, synthetic construct
ALGELDWGLRGLI

SEQ ID NO: 13928 - protein, 12 aa, synthetic construct
ALGELEMTDKLI

SEQ ID NO: 13929 - protein, 14 aa, synthetic construct
ALGELEWGRYTDKL

SEQ ID NO: 13930 - protein, 13 aa, synthetic construct
ALGELDWGHRGLI

SEQ ID NO: 13931 - protein, 14 aa, synthetic construct
ALGELGAAYTEKLI

SEQ ID NO: 13932 - protein, 13 aa, synthetic construct
ALGELGANTEKLI

SEQ ID NO: 13933 - protein, 14 aa, synthetic construct
ALGELGAMYTDKII

SEQ ID NO: 13934 - protein, 14 aa, synthetic construct
ALGELGALYTDKII

SEQ ID NO: 13935 - protein, 13 aa, synthetic construct
ALGELGAETDKII

SEQ ID NO: 13936 - protein, 13 aa, synthetic construct
ALGELGADTSKLN

SEQ ID NO: 13937 - protein, 13 aa, synthetic construct
ALGELGADTEKLT

SEQ ID NO: 13938 - protein, 13 aa, synthetic construct
ALGELGADTEKLN

SEQ ID NO: 13939 - protein, 13 aa, synthetic construct
ALGELGADTEKLF

SEQ ID NO: 13940 - protein, 13 aa, synthetic construct
ALGELGADTDTLS

SEQ ID NO: 13941 - protein, 13 aa, synthetic construct
ALGELGADTDQIN

SEQ ID NO: 13942 - protein, 13 aa, synthetic construct
ALGELGADTDNII

SEQ ID NO: 13943 - protein, 13 aa, synthetic construct
ALGELGADTDNIF

SEQ ID NO: 13944 - protein, 13 aa, synthetic construct
ALGELGADTDKRI

SEQ ID NO: 13945 - protein, 13 aa, synthetic construct
ALGELGADTDKPI

SEQ ID NO: 13946 - protein, 13 aa, synthetic construct
ALGELGADTDKLY

SEQ ID NO: 13947 - protein, 12 aa, synthetic construct
ALGELGADTDKL

SEQ ID NO: 13948 - protein, 13 aa, synthetic construct
ALGELGADTDHLI

SEQ ID NO: 13949 - protein, 10 aa, synthetic construct
ALGELGADTD

SEQ ID NO: 13950 - protein, 9 aa, synthetic construct
ALGELGADT

SEQ ID NO: 13951 - protein, 13 aa, synthetic construct
ALGELGADSDTLN

SEQ ID NO: 13952 - protein, 13 aa, synthetic construct
ALGELGADADKLL

SEQ ID NO: 13953 - protein, 14 aa, synthetic construct
ALGELDWGIRGNSS

SEQ ID NO: 13954 - protein, 13 aa, synthetic construct
ALGELDWARRGLI

SEQ ID NO: 13955 - protein, 14 aa, synthetic construct
ALGELGAPYTEKLI

SEQ ID NO: 13956 - protein, 13 aa, synthetic construct
ALGELAGYADKII

SEQ ID NO: 13957 - protein, 14 aa, synthetic construct
ALGELAGSGTEKII

SEQ ID NO: 13958 - protein, 13 aa, synthetic construct
ALGELAGDAVKIN

SEQ ID NO: 13959 - protein, 13 aa, synthetic construct
ALGELADTGDKLI

SEQ ID NO: 13960 - protein, 12 aa, synthetic construct
ALGELADTDKLI

SEQ ID NO: 13961 - protein, 11 aa, synthetic construct
ALGELADDTDK

SEQ ID NO: 13962 - protein, 14 aa, synthetic construct
ALGELAASYTAQLI

SEQ ID NO: 13963 - protein, 13 aa, synthetic construct
ALGEKYWGRRGLI

SEQ ID NO: 13964 - protein, 14 aa, synthetic construct
ALGEKTGGYTDKLI

SEQ ID NO: 13965 - protein, 13 aa, synthetic construct
ALGEIYWGRRGLI

SEQ ID NO: 13966 - protein, 11 aa, synthetic construct
ALGEIYTHKHI

SEQ ID NO: 13967 - protein, 14 aa, synthetic construct
ALGEISYGISDQLI

SEQ ID NO: 13968 - protein, 14 aa, synthetic construct
ALGEISWGPYTDKL

SEQ ID NO: 13969 - protein, 14 aa, synthetic construct
ALGEISPFTGGHKL

SEQ ID NO: 13970 - protein, 14 aa, synthetic construct
ALGEIRNGGFGYTD

SEQ ID NO: 13971 - protein, 9 aa, synthetic construct
ALGEIRNGG

SEQ ID NO: 13972 - protein, 12 aa, synthetic construct
ALGEIRIFDNLI

SEQ ID NO: 13973 - protein, 12 aa, synthetic construct
ALGEIRIFDKII

SEQ ID NO: 13974 - protein, 13 aa, synthetic construct
ALGEIRGYADKLI

SEQ ID NO: 13975 - protein, 14 aa, synthetic construct
ALGEIPYWGRYTDE

SEQ ID NO: 13976 - protein, 12 aa, synthetic construct
ALGEIPYWGRYT

SEQ ID NO: 13977 - protein, 8 aa, synthetic construct
ALGEIPTG

SEQ ID NO: 13978 - protein, 14 aa, synthetic construct
ALGELAGSVTESSN

SEQ ID NO: 13979 - protein, 13 aa, synthetic construct
ALGELAGYADKLN

SEQ ID NO: 13980 - protein, 8 aa, synthetic construct
ALGELDRG

SEQ ID NO: 13981 - protein, 13 aa, synthetic construct
ALGELAGYAEKLI

SEQ ID NO: 13982 - protein, 13 aa, synthetic construct
ALGELDLGRRGLI

SEQ ID NO: 13983 - protein, 13 aa, synthetic construct
ALGELDLGRMGLI

SEQ ID NO: 13984 - protein, 13 aa, synthetic construct
ALGELDLCGNVIF

SEQ ID NO: 13985 - protein, 13 aa, synthetic construct
ALGELDGGRRGLV

SEQ ID NO: 13986 - protein, 13 aa, synthetic construct
ALGELDCGRRGLI

SEQ ID NO: 13987 - protein, 14 aa, synthetic construct
ALGELCWGIPSSWD

SEQ ID NO: 13988 - protein, 14 aa, synthetic construct
ALGELCTGGYEYTD

SEQ ID NO: 13989 - protein, 11 aa, synthetic construct
ALGELATYALA

SEQ ID NO: 13990 - protein, 14 aa, synthetic construct
ALGELATWGLRPDK

SEQ ID NO: 13991 - protein, 12 aa, synthetic construct
ALGELATRGFGY

SEQ ID NO: 13992 - protein, 10 aa, synthetic construct
ALGELASYGT

SEQ ID NO: 13993 - protein, 12 aa, synthetic construct
ALGELAMTQNII

SEQ ID NO: 13994 - protein, 12 aa, synthetic construct
ALGELAMTDKSI

SEQ ID NO: 13995 - protein, 14 aa, synthetic construct
ALGELALYWGRYTD

SEQ ID NO: 13996 - protein, 14 aa, synthetic construct
ALGELALYWGLYTD

SEQ ID NO: 13997 - protein, 13 aa, synthetic construct
ALGELAIYTDKQI

SEQ ID NO: 13998 - protein, 13 aa, synthetic construct
ALGELAIYTDKLI

SEQ ID NO: 13999 - protein, 11 aa, synthetic construct
ALGELAIYNYK

SEQ ID NO: 14000 - protein, 12 aa, synthetic construct
ALGELAIAYKII

SEQ ID NO: 14001 - protein, 14 aa, synthetic construct
ALGELAGYGTYKLI

SEQ ID NO: 14002 - protein, 14 aa, synthetic construct
ALGELAGYGTDKLI

SEQ ID NO: 14003 - protein, 14 aa, synthetic construct
ALGELGAPYTDRLI

SEQ ID NO: 14004 - protein, 14 aa, synthetic construct
ALGELGARAMTAQL

SEQ ID NO: 14005 - protein, 9 aa, synthetic construct
ALGEIPNWG

SEQ ID NO: 14006 - protein, 13 aa, synthetic construct
ALGELGDTADKII

SEQ ID NO: 14007 - protein, 8 aa, synthetic construct
ALGELGDT

SEQ ID NO: 14008 - protein, 14 aa, synthetic construct
ALGELGDSYTYKLI

SEQ ID NO: 14009 - protein, 13 aa, synthetic construct
ALGELGDSGDTLI

SEQ ID NO: 14010 - protein, 14 aa, synthetic construct
ALGELGDRVLTAQL

SEQ ID NO: 14011 - protein, 14 aa, synthetic construct
ALGELGDRDLIEQL

SEQ ID NO: 14012 - protein, 14 aa, synthetic construct
ALGELGDRAVTAQL

SEQ ID NO: 14013 - protein, 14 aa, synthetic construct
ALGELGDRAMTAQL

SEQ ID NO: 14014 - protein, 14 aa, synthetic construct
ALGELGDRALTALL

SEQ ID NO: 14015 - protein, 14 aa, synthetic construct
ALGELGDRALRAHL

SEQ ID NO: 14016 - protein, 14 aa, synthetic construct
ALGELGDRALIAQL

SEQ ID NO: 14017 - protein, 14 aa, synthetic construct
ALGELGDRALAAQL

SEQ ID NO: 14018 - protein, 14 aa, synthetic construct
ALGELGDRAFTPQL

SEQ ID NO: 14019 - protein, 10 aa, synthetic construct
ALGELGDQLN

SEQ ID NO: 14020 - protein, 13 aa, synthetic construct
ALGELGDPGDKLI

SEQ ID NO: 14021 - protein, 12 aa, synthetic construct
ALGELGDPDNLI

SEQ ID NO: 14022 - protein, 13 aa, synthetic construct
ALGELGDNGDKLI

SEQ ID NO: 14023 - protein, 10 aa, synthetic construct
ALGELGDKPI

SEQ ID NO: 14024 - protein, 10 aa, synthetic construct
ALGELGDKNI

SEQ ID NO: 14025 - protein, 10 aa, synthetic construct
ALGELGDKLT

SEQ ID NO: 14026 - protein, 13 aa, synthetic construct
ALGELGDKKKNKL

SEQ ID NO: 14027 - protein, 10 aa, synthetic construct
ALGELGDILI

SEQ ID NO: 14028 - protein, 13 aa, synthetic construct
ALGELGDTADELI

SEQ ID NO: 14029 - protein, 13 aa, synthetic construct
ALGELGDTAEKLI

SEQ ID NO: 14030 - protein, 12 aa, synthetic construct
ALGELGDIDKLI

SEQ ID NO: 14031 - protein, 12 aa, synthetic construct
ALGELGDTAQLI

SEQ ID NO: 14032 - protein, 13 aa, synthetic construct
ALGELGDTGDIPI

SEQ ID NO: 14033 - protein, 13 aa, synthetic construct
ALGELGDTGDILI

SEQ ID NO: 14034 - protein, 13 aa, synthetic construct
ALGELGDTGDHSS

SEQ ID NO: 14035 - protein, 13 aa, synthetic construct
ALGELGDTGDELI

SEQ ID NO: 14036 - protein, 13 aa, synthetic construct
ALGELGDTGAKHI

SEQ ID NO: 14037 - protein, 12 aa, synthetic construct
ALGELGDTETLI

SEQ ID NO: 14038 - protein, 12 aa, synthetic construct
ALGELGDTEQLI

SEQ ID NO: 14039 - protein, 12 aa, synthetic construct
ALGELGDTENLI

SEQ ID NO: 14040 - protein, 12 aa, synthetic construct
ALGELGDTEIVI

SEQ ID NO: 14041 - protein, 12 aa, synthetic construct
ALGELGDTDRVI

SEQ ID NO: 14042 - protein, 12 aa, synthetic construct
ALGELGDTDQLT

SEQ ID NO: 14043 - protein, 12 aa, synthetic construct
ALGELGDTDQII

SEQ ID NO: 14044 - protein, 12 aa, synthetic construct
ALGELGDTDNSS

SEQ ID NO: 14045 - protein, 12 aa, synthetic construct
ALGELGDTDNII

SEQ ID NO: 14046 - protein, 12 aa, synthetic construct
ALGELGDTDKNI

SEQ ID NO: 14047 - protein, 12 aa, synthetic construct
ALGELGDTDKLS

SEQ ID NO: 14048 - protein, 12 aa, synthetic construct
ALGELGDTDKLF

SEQ ID NO: 14049 - protein, 11 aa, synthetic construct
ALGELGDTDKL

SEQ ID NO: 14050 - protein, 12 aa, synthetic construct
ALGELGDTDKIT

SEQ ID NO: 14051 - protein, 12 aa, synthetic construct
ALGELGDTDKDI

SEQ ID NO: 14052 - protein, 9 aa, synthetic construct
ALGELGDTD

SEQ ID NO: 14053 - protein, 10 aa, synthetic construct
ALGELGDILF

SEQ ID NO: 14054 - protein, 11 aa, synthetic construct
ALGELGDIALT

SEQ ID NO: 14055 - protein, 14 aa, synthetic construct
ALGELGASHTDKLI

SEQ ID NO: 14056 - protein, 14 aa, synthetic construct
ALGELGASYTDTLF

SEQ ID NO: 14057 - protein, 13 aa, synthetic construct
ALGELGASYTDQL

SEQ ID NO: 14058 - protein, 14 aa, synthetic construct
ALGELGASYTDKVF

SEQ ID NO: 14059 - protein, 14 aa, synthetic construct
ALGELGASYTDKLV

SEQ ID NO: 14060 - protein, 14 aa, synthetic construct
ALGELGASYTDKHI

SEQ ID NO: 14061 - protein, 13 aa, synthetic construct
ALGELGASYTDKH

SEQ ID NO: 14062 - protein, 14 aa, synthetic construct
ALGELGASYTDELI

SEQ ID NO: 14063 - protein, 14 aa, synthetic construct
ALGELGASYTATLI

SEQ ID NO: 14064 - protein, 14 aa, synthetic construct
ALGELGASYTAQLI

SEQ ID NO: 14065 - protein, 14 aa, synthetic construct
ALGELGASYTAKLI

SEQ ID NO: 14066 - protein, 14 aa, synthetic construct
ALGELGASYSDKLI

SEQ ID NO: 14067 - protein, 14 aa, synthetic construct
ALGELGASYPEKLI

SEQ ID NO: 14068 - protein, 14 aa, synthetic construct
ALGELGASYNDKLI

SEQ ID NO: 14069 - protein, 14 aa, synthetic construct
ALGELGASYIEKLI

SEQ ID NO: 14070 - protein, 14 aa, synthetic construct
ALGELGASYAEKLI

SEQ ID NO: 14071 - protein, 14 aa, synthetic construct
ALGELGASSTDTII

SEQ ID NO: 14072 - protein, 14 aa, synthetic construct
ALGELGASSTDQLI

SEQ ID NO: 14073 - protein, 14 aa, synthetic construct
ALGELGASSTDNII

SEQ ID NO: 14074 - protein, 14 aa, synthetic construct
ALGELGASSTAKLI

SEQ ID NO: 14075 - protein, 14 aa, synthetic construct
ALGELGASNTEQLI

SEQ ID NO: 14076 - protein, 14 aa, synthetic construct
ALGELGASNTEKII

SEQ ID NO: 14077 - protein, 14 aa, synthetic construct
ALGELGASNTDKLI

SEQ ID NO: 14078 - protein, 13 aa, synthetic construct
ALGELGASYTDQV

SEQ ID NO: 14079 - protein, 14 aa, synthetic construct
ALGELGASYTEKII

SEQ ID NO: 14080 - protein, 13 aa, synthetic construct
ALGELGDDTDKLI

SEQ ID NO: 14081 - protein, 14 aa, synthetic construct
ALGELGASYTEKLF

SEQ ID NO: 14082 - protein, 12 aa, synthetic construct
ALGELGDADKLI

SEQ ID NO: 14083 - protein, 12 aa, synthetic construct
ALGELGCPAKLI

SEQ ID NO: 14084 - protein, 13 aa, synthetic construct
ALGELGAYTDKLI

SEQ ID NO: 14085 - protein, 13 aa, synthetic construct
ALGELGAYSDKLI

SEQ ID NO: 14086 - protein, 14 aa, synthetic construct
ALGELGAYGTDKLI

SEQ ID NO: 14087 - protein, 13 aa, synthetic construct
ALGELGAYDHKII

SEQ ID NO: 14088 - protein, 13 aa, synthetic construct
ALGELGAVTYKLI

SEQ ID NO: 14089 - protein, 13 aa, synthetic construct
ALGELGAVTDKLI

SEQ ID NO: 14090 - protein, 13 aa, synthetic construct
ALGELGATYTDKL

SEQ ID NO: 14091 - protein, 13 aa, synthetic construct
ALGELGATGEKLI

SEQ ID NO: 14092 - protein, 12 aa, synthetic construct
ALGELGATDQLI

SEQ ID NO: 14093 - protein, 13 aa, synthetic construct
ALGELGASYTYKL

SEQ ID NO: 14094 - protein, 12 aa, synthetic construct
ALGELGASYTYK

SEQ ID NO: 14095 - protein, 14 aa, synthetic construct
ALGELGASYTVKLF

SEQ ID NO: 14096 - protein, 14 aa, synthetic construct
ALGELGASYTPKLI

SEQ ID NO: 14097 - protein, 14 aa, synthetic construct
ALGELGASYTHQLI

SEQ ID NO: 14098 - protein, 14 aa, synthetic construct
ALGELGASYTHKLI

SEQ ID NO: 14099 - protein, 13 aa, synthetic construct
ALGELGASYTHKL

SEQ ID NO: 14100 - protein, 14 aa, synthetic construct
ALGELGASYTGKLI

SEQ ID NO: 14101 - protein, 13 aa, synthetic construct
ALGELGASYTGKL

SEQ ID NO: 14102 - protein, 14 aa, synthetic construct
ALGELGASYTEQLI

SEQ ID NO: 14103 - protein, 13 aa, synthetic construct
ALGEIPQAVLYTD

SEQ ID NO: 14104 - protein, 14 aa, synthetic construct
ALGEIPNGGYGQLI

SEQ ID NO: 14105 - protein, 11 aa, synthetic construct
ALGEAYTEKLF

SEQ ID NO: 14106 - protein, 14 aa, synthetic construct
ALGEETGGYTYTDK

SEQ ID NO: 14107 - protein, 14 aa, synthetic construct
ALGEETGGYTKKLI

SEQ ID NO: 14108 - protein, 14 aa, synthetic construct
ALGEETGGYTEKII

SEQ ID NO: 14109 - protein, 14 aa, synthetic construct
ALGEETGGYTEILI

SEQ ID NO: 14110 - protein, 14 aa, synthetic construct
ALGEETGGYTDRLI

SEQ ID NO: 14111 - protein, 14 aa, synthetic construct
ALGEETGGYTDNSS

SEQ ID NO: 14112 - protein, 14 aa, synthetic construct
ALGEETGGYTDNII

SEQ ID NO: 14113 - protein, 14 aa, synthetic construct
ALGEETGGYTDKVI

SEQ ID NO: 14114 - protein, 14 aa, synthetic construct
ALGEETGGYTDKLV

SEQ ID NO: 14115 - protein, 14 aa, synthetic construct
ALGEETGGYTDKLL

SEQ ID NO: 14116 - protein, 14 aa, synthetic construct
ALGEETGGYTDKFI

SEQ ID NO: 14117 - protein, 12 aa, synthetic construct
ALGEETGGYTDK

SEQ ID NO: 14118 - protein, 14 aa, synthetic construct
ALGEETGGYTDILL

SEQ ID NO: 14119 - protein, 14 aa, synthetic construct
ALGEETGGYTATLI

SEQ ID NO: 14120 - protein, 14 aa, synthetic construct
ALGEETGGYTAKLI

SEQ ID NO: 14121 - protein, 14 aa, synthetic construct
ALGEETGGYNTDKL

SEQ ID NO: 14122 - protein, 14 aa, synthetic construct
ALGEETGGYIEKLI

SEQ ID NO: 14123 - protein, 14 aa, synthetic construct
ALGEETGGYEYTDK

SEQ ID NO: 14124 - protein, 13 aa, synthetic construct
ALGEETGGYEETH

SEQ ID NO: 14125 - protein, 14 aa, synthetic construct
ALGEETGGYAYTDK

SEQ ID NO: 14126 - protein, 14 aa, synthetic construct
ALGEETGGYATDKL

SEQ ID NO: 14127 - protein, 14 aa, synthetic construct
ALGEETGGYAEKLI

SEQ ID NO: 14128 - protein, 14 aa, synthetic construct
ALGEETGGYTPIKS

SEQ ID NO: 14129 - protein, 14 aa, synthetic construct
ALGEETGIYTDKLI

SEQ ID NO: 14130 - protein, 14 aa, synthetic construct
ALGEETGGSTEKLI

SEQ ID NO: 14131 - protein, 14 aa, synthetic construct
ALGEETGRYTDTLI

SEQ ID NO: 14132 - protein, 12 aa, synthetic construct
ALGEGGDSDILI

SEQ ID NO: 14133 - protein, 12 aa, synthetic construct
ALGEGGDSAKSI

SEQ ID NO: 14134 - protein, 12 aa, synthetic construct
ALGEGGDGDTLI

SEQ ID NO: 14135 - protein, 12 aa, synthetic construct
ALGEGADTDKLI

SEQ ID NO: 14136 - protein, 14 aa, synthetic construct
ALGEFPTGGFGYTD

SEQ ID NO: 14137 - protein, 7 aa, synthetic construct
ALGEFLT

SEQ ID NO: 14138 - protein, 14 aa, synthetic construct
ALGEFLPTWGSYTD

SEQ ID NO: 14139 - protein, 14 aa, synthetic construct
ALGEFLPRGYTDKL

SEQ ID NO: 14140 - protein, 11 aa, synthetic construct
ALGEEYTEKLI

SEQ ID NO: 14141 - protein, 11 aa, synthetic construct
ALGEEYTAKLI

SEQ ID NO: 14142 - protein, 7 aa, synthetic construct
ALGEEYK

SEQ ID NO: 14143 - protein, 14 aa, synthetic construct
ALGEETWGSTYNII

SEQ ID NO: 14144 - protein, 14 aa, synthetic construct
ALGEETVGYSEKLI

SEQ ID NO: 14145 - protein, 13 aa, synthetic construct
ALGEETVGYADKL

SEQ ID NO: 14146 - protein, 11 aa, synthetic construct
ALGEETTDQLF

SEQ ID NO: 14147 - protein, 14 aa, synthetic construct
ALGEETRAYTQKLI

SEQ ID NO: 14148 - protein, 7 aa, synthetic construct
ALGEETQ

SEQ ID NO: 14149 - protein, 9 aa, synthetic construct
ALGEETPGY

SEQ ID NO: 14150 - protein, 14 aa, synthetic construct
ALGEETLAYTDKLI

SEQ ID NO: 14151 - protein, 7 aa, synthetic construct
ALGEETH

SEQ ID NO: 14152 - protein, 14 aa, synthetic construct
ALGEETGVYTDKLF

SEQ ID NO: 14153 - protein, 13 aa, synthetic construct
ALGEETGGYADKL

SEQ ID NO: 14154 - protein, 14 aa, synthetic construct
ALGEETGGSTDKII

SEQ ID NO: 14155 - protein, 12 aa, synthetic construct
ALGEGGIPENLF

SEQ ID NO: 14156 - protein, 12 aa, synthetic construct
ALGEEGDTDKLI

SEQ ID NO: 14157 - protein, 14 aa, synthetic construct
ALGEEAGGYTEKLI

SEQ ID NO: 14158 - protein, 14 aa, synthetic construct
ALGEDTLGYTAQLI

SEQ ID NO: 14159 - protein, 14 aa, synthetic construct
ALGEDTGGYTDTLI

SEQ ID NO: 14160 - protein, 14 aa, synthetic construct
ALGEDTGGYTDKRI

SEQ ID NO: 14161 - protein, 13 aa, synthetic construct
ALGEDTGGYTDKL

SEQ ID NO: 14162 - protein, 14 aa, synthetic construct
ALGEDTGGYTDKII

SEQ ID NO: 14163 - protein, 14 aa, synthetic construct
ALGEDTGGYTAKLI

SEQ ID NO: 14164 - protein, 9 aa, synthetic construct
ALGEDTGGY

SEQ ID NO: 14165 - protein, 14 aa, synthetic construct
ALGEDTGGSTEKLI

SEQ ID NO: 14166 - protein, 14 aa, synthetic construct
ALGEDTGGSTDKLI

SEQ ID NO: 14167 - protein, 14 aa, synthetic construct
ALGEDPGAYTEKLV

SEQ ID NO: 14168 - protein, 12 aa, synthetic construct
ALGEDGMTDKLI

SEQ ID NO: 14169 - protein, 10 aa, synthetic construct
ALGEDGITDK

SEQ ID NO: 14170 - protein, 13 aa, synthetic construct
ALGEDGGYTDQLI

SEQ ID NO: 14171 - protein, 14 aa, synthetic construct
ALGECLPRGYERSK

SEQ ID NO: 14172 - protein, 14 aa, synthetic construct
ALGEAYVLGARSKL

SEQ ID NO: 14173 - protein, 10 aa, synthetic construct
ALGEAYTYKL

SEQ ID NO: 14174 - protein, 11 aa, synthetic construct
ALGEAYTVKLI

SEQ ID NO: 14175 - protein, 11 aa, synthetic construct
ALGEAYTHKLI

SEQ ID NO: 14176 - protein, 11 aa, synthetic construct
ALGEAYTENLI

SEQ ID NO: 14177 - protein, 11 aa, synthetic construct
ALGEAYTEKVI

SEQ ID NO: 14178 - protein, 12 aa, synthetic construct
ALGEEGDTDHIY

SEQ ID NO: 14179 - protein, 13 aa, synthetic construct
ALGEEGGYADKLI

SEQ ID NO: 14180 - protein, 14 aa, synthetic construct
ALGEETGGSTAKLI

SEQ ID NO: 14181 - protein, 13 aa, synthetic construct
ALGEEGGYAYKLI

SEQ ID NO: 14182 - protein, 13 aa, synthetic construct
ALGEETGGSIDKL

SEQ ID NO: 14183 - protein, 14 aa, synthetic construct
ALGEETGGDTDKII

SEQ ID NO: 14184 - protein, 14 aa, synthetic construct
ALGEETGGCTPIHS

SEQ ID NO: 14185 - protein, 8 aa, synthetic construct
ALGEETGG

SEQ ID NO: 14186 - protein, 13 aa, synthetic construct
ALGEETGDTDKLI

SEQ ID NO: 14187 - protein, 14 aa, synthetic construct
ALGEETAGYTDKII

SEQ ID NO: 14188 - protein, 14 aa, synthetic construct
ALGEETAGYNDKVI

SEQ ID NO: 14189 - protein, 14 aa, synthetic construct
ALGEESRGYTDKLI

SEQ ID NO: 14190 - protein, 11 aa, synthetic construct
ALGEESNEKLI

SEQ ID NO: 14191 - protein, 14 aa, synthetic construct
ALGEESGGYTYKLI

SEQ ID NO: 14192 - protein, 14 aa, synthetic construct
ALGEESGGYTDILI

SEQ ID NO: 14193 - protein, 14 aa, synthetic construct
ALGEEPGVYTDKLI

SEQ ID NO: 14194 - protein, 14 aa, synthetic construct
ALGEEPGGYTEKVI

SEQ ID NO: 14195 - protein, 14 aa, synthetic construct
ALGEEPGGYTDKLV

SEQ ID NO: 14196 - protein, 13 aa, synthetic construct
ALGEEPGGYTDKL

SEQ ID NO: 14197 - protein, 14 aa, synthetic construct
ALGEEPGGSTDKLI

SEQ ID NO: 14198 - protein, 14 aa, synthetic construct
ALGEENGVNNDKLI

SEQ ID NO: 14199 - protein, 14 aa, synthetic construct
ALGEENGGYTDKII

SEQ ID NO: 14200 - protein, 14 aa, synthetic construct
ALGEELGGYTEKLF

SEQ ID NO: 14201 - protein, 8 aa, synthetic construct
ALGEEKLI

SEQ ID NO: 14202 - protein, 14 aa, synthetic construct
ALGEEGGYGTDKLI

SEQ ID NO: 14203 - protein, 12 aa, synthetic construct
ALGEGGIAINSS

SEQ ID NO: 14204 - protein, 12 aa, synthetic construct
ALGEGGITDELI

SEQ ID NO: 14205 - protein, 14 aa, synthetic construct
ALGEIPMYCGLYTD

SEQ ID NO: 14206 - protein, 12 aa, synthetic construct
ALGEIGMSDKVI

SEQ ID NO: 14207 - protein, 13 aa, synthetic construct
ALGEIGGYADQLI

SEQ ID NO: 14208 - protein, 13 aa, synthetic construct
ALGEIGGYADKIF

SEQ ID NO: 14209 - protein, 14 aa, synthetic construct
ALGEIGDTRQINST

SEQ ID NO: 14210 - protein, 12 aa, synthetic construct
ALGEIGDTDKHI

SEQ ID NO: 14211 - protein, 13 aa, synthetic construct
ALGEIEWGRRGLI

SEQ ID NO: 14212 - protein, 13 aa, synthetic construct
ALGEIDWARRGLI

SEQ ID NO: 14213 - protein, 8 aa, synthetic construct
ALGEHYLL

SEQ ID NO: 14214 - protein, 13 aa, synthetic construct
ALGEHYDREPLRK

SEQ ID NO: 14215 - protein, 8 aa, synthetic construct
ALGEHWPG

SEQ ID NO: 14216 - protein, 11 aa, synthetic construct
ALGEHVQASSY

SEQ ID NO: 14217 - protein, 13 aa, synthetic construct
ALGEHVMGASNTN

SEQ ID NO: 14218 - protein, 14 aa, synthetic construct
ALGEHVLGASYPDK

SEQ ID NO: 14219 - protein, 14 aa, synthetic construct
ALGEHVLGASKTDK

SEQ ID NO: 14220 - protein, 13 aa, synthetic construct
ALGEHVHTNSRAQ

SEQ ID NO: 14221 - protein, 14 aa, synthetic construct
ALGEHVGYNTHKLI

SEQ ID NO: 14222 - protein, 14 aa, synthetic construct
ALGEHSYWVIHTDK

SEQ ID NO: 14223 - protein, 13 aa, synthetic construct
ALGEHSYWGIHTD

SEQ ID NO: 14224 - protein, 14 aa, synthetic construct
ALGEHSYWAINTDK

SEQ ID NO: 14225 - protein, 13 aa, synthetic construct
ALGEHSQEDGTDK

SEQ ID NO: 14226 - protein, 14 aa, synthetic construct
ALGEHRTGGYSYTD

SEQ ID NO: 14227 - protein, 14 aa, synthetic construct
ALGEHRTCANHYTD

SEQ ID NO: 14228 - protein, 13 aa, synthetic construct
ALGEIGGYAEKLI

SEQ ID NO: 14229 - protein, 12 aa, synthetic construct
ALGEIGMSDNLI

SEQ ID NO: 14230 - protein, 6 aa, synthetic construct
ALGEHR

SEQ ID NO: 14231 - protein, 12 aa, synthetic construct
ALGEIGMTDIVI

SEQ ID NO: 14232 - protein, 14 aa, synthetic construct
ALGEIPMGVLYTDK

SEQ ID NO: 14233 - protein, 14 aa, synthetic construct
ALGEIPLYWRLYTD

SEQ ID NO: 14234 - protein, 13 aa, synthetic construct
ALGEIPLYWGLYT

SEQ ID NO: 14235 - protein, 14 aa, synthetic construct
ALGEIPLYCGLYTD

SEQ ID NO: 14236 - protein, 14 aa, synthetic construct
ALGEIPLSWGLYTD

SEQ ID NO: 14237 - protein, 10 aa, synthetic construct
ALGEIPLSWG

SEQ ID NO: 14238 - protein, 14 aa, synthetic construct
ALGEIPLGVMYTDK

SEQ ID NO: 14239 - protein, 9 aa, synthetic construct
ALGEIPLGV

SEQ ID NO: 14240 - protein, 6 aa, synthetic construct
ALGEIP

SEQ ID NO: 14241 - protein, 11 aa, synthetic construct
ALGEINNDKDN

SEQ ID NO: 14242 - protein, 14 aa, synthetic construct
ALGEILLWDQLKII

SEQ ID NO: 14243 - protein, 14 aa, synthetic construct
ALGEILLGYTDKLI

SEQ ID NO: 14244 - protein, 14 aa, synthetic construct
ALGEILLGDTDKLI

SEQ ID NO: 14245 - protein, 14 aa, synthetic construct
ALGEILLGDPDTLI

SEQ ID NO: 14246 - protein, 13 aa, synthetic construct
ALGEIIIVDKEKL

SEQ ID NO: 14247 - protein, 13 aa, synthetic construct
ALGEIGTDTYKLI

SEQ ID NO: 14248 - protein, 8 aa, synthetic construct
ALGEIGRA

SEQ ID NO: 14249 - protein, 12 aa, synthetic construct
ALGEIGMTDNII

SEQ ID NO: 14250 - protein, 12 aa, synthetic construct
ALGEIGMTDKLN

SEQ ID NO: 14251 - protein, 12 aa, synthetic construct
ALGEIGMTDKII

SEQ ID NO: 14252 - protein, 12 aa, synthetic construct
ALGEIGMTDKHI

SEQ ID NO: 14253 - protein, 14 aa, synthetic construct
ALGEHRNGGYESTD

SEQ ID NO: 14254 - protein, 14 aa, synthetic construct
ALGEHPTGGFGYTD

SEQ ID NO: 14255 - protein, 12 aa, synthetic construct
ALGEGGITDKLF

SEQ ID NO: 14256 - protein, 8 aa, synthetic construct
ALGEGTLF

SEQ ID NO: 14257 - protein, 12 aa, synthetic construct
ALGEGRDTDNLI

SEQ ID NO: 14258 - protein, 6 aa, synthetic construct
ALGEGR

SEQ ID NO: 14259 - protein, 8 aa, synthetic construct
ALGEGQRI

SEQ ID NO: 14260 - protein, 13 aa, synthetic construct
ALGEGQDSGDKLI

SEQ ID NO: 14261 - protein, 14 aa, synthetic construct
ALGEGPTVLGDTDK

SEQ ID NO: 14262 - protein, 14 aa, synthetic construct
ALGEGPGGYTDKLI

SEQ ID NO: 14263 - protein, 8 aa, synthetic construct
ALGEGNVI

SEQ ID NO: 14264 - protein, 8 aa, synthetic construct
ALGEGNLN

SEQ ID NO: 14265 - protein, 8 aa, synthetic construct
ALGEGKSI

SEQ ID NO: 14266 - protein, 8 aa, synthetic construct
ALGEGKRL

SEQ ID NO: 14267 - protein, 8 aa, synthetic construct
ALGEGKLL

SEQ ID NO: 14268 - protein, 8 aa, synthetic construct
ALGEGKLC

SEQ ID NO: 14269 - protein, 8 aa, synthetic construct
ALGEGKIM

SEQ ID NO: 14270 - protein, 6 aa, synthetic construct
ALGEGK

SEQ ID NO: 14271 - protein, 8 aa, synthetic construct
ALGEGILL

SEQ ID NO: 14272 - protein, 12 aa, synthetic construct
ALGEGGVSDKLI

SEQ ID NO: 14273 - protein, 12 aa, synthetic construct
ALGEGGMTDTII

SEQ ID NO: 14274 - protein, 12 aa, synthetic construct
ALGEGGLTDNLI

SEQ ID NO: 14275 - protein, 12 aa, synthetic construct
ALGEGGITDNLL

SEQ ID NO: 14276 - protein, 12 aa, synthetic construct
ALGEGGITDNLI

SEQ ID NO: 14277 - protein, 12 aa, synthetic construct
ALGEGGITDKLN

SEQ ID NO: 14278 - protein, 11 aa, synthetic construct
ALGEGRGLGLI

SEQ ID NO: 14279 - protein, 8 aa, synthetic construct
ALGEGTLN

SEQ ID NO: 14280 - protein, 14 aa, synthetic construct
ALGEHHSYVLGDTD

SEQ ID NO: 14281 - protein, 11 aa, synthetic construct
ALGEGTPINSS

SEQ ID NO: 14282 - protein, 13 aa, synthetic construct
ALGEHGRYTHKII

SEQ ID NO: 14283 - protein, 12 aa, synthetic construct
ALGEHGPADKLI

SEQ ID NO: 14284 - protein, 7 aa, synthetic construct
ALGEHGK

SEQ ID NO: 14285 - protein, 12 aa, synthetic construct
ALGEHGINETDI

SEQ ID NO: 14286 - protein, 13 aa, synthetic construct
ALGEHGGYSDKLI

SEQ ID NO: 14287 - protein, 14 aa, synthetic construct
ALGEHGGYNTDQLI

SEQ ID NO: 14288 - protein, 13 aa, synthetic construct
ALGEHGGYNTDKL

SEQ ID NO: 14289 - protein, 13 aa, synthetic construct
ALGEHGGYNTDKI

SEQ ID NO: 14290 - protein, 14 aa, synthetic construct
ALGEHGGYNNKNLI

SEQ ID NO: 14291 - protein, 14 aa, synthetic construct
ALGEHGGYNNDKLI

SEQ ID NO: 14292 - protein, 14 aa, synthetic construct
ALGEHGGYKTEKLI

SEQ ID NO: 14293 - protein, 14 aa, synthetic construct
ALGEHGGVQSDKLI

SEQ ID NO: 14294 - protein, 14 aa, synthetic construct
ALGEHGGIKSDKLI

SEQ ID NO: 14295 - protein, 14 aa, synthetic construct
ALGEHGGIHSDKLI

SEQ ID NO: 14296 - protein, 13 aa, synthetic construct
ALGEHGGCTTDKL

SEQ ID NO: 14297 - protein, 14 aa, synthetic construct
ALGEHAGYKTDKLI

SEQ ID NO: 14298 - protein, 11 aa, synthetic construct
ALGEGYTDKLI

SEQ ID NO: 14299 - protein, 12 aa, synthetic construct
ALGEGWITYKLI

SEQ ID NO: 14300 - protein, 8 aa, synthetic construct
ALGEGTVI

SEQ ID NO: 14301 - protein, 8 aa, synthetic construct
ALGEGTRI

SEQ ID NO: 14302 - protein, 11 aa, synthetic construct
ALGEGTPITSS

SEQ ID NO: 14303 - protein, 14 aa, synthetic construct
ALGDLLLGVPDKLI

SEQ ID NO: 14304 - protein, 13 aa, synthetic construct
ALGDLLLGIQINS

SEQ ID NO: 14305 - protein, 14 aa, synthetic construct
ALGGPYQGDGTDQL

SEQ ID NO: 14306 - protein, 12 aa, synthetic construct
ALASRGITEKLI

SEQ ID NO: 14307 - protein, 10 aa, synthetic construct
ALCEQTPFKL

SEQ ID NO: 14308 - protein, 13 aa, synthetic construct
ALCELLLGDTDKL

SEQ ID NO: 14309 - protein, 13 aa, synthetic construct
ALCELGGYGTDKL

SEQ ID NO: 14310 - protein, 13 aa, synthetic construct
ALCELGADTDKLI

SEQ ID NO: 14311 - protein, 14 aa, synthetic construct
ALCEETGVYTDKLI

SEQ ID NO: 14312 - protein, 12 aa, synthetic construct
ALCDVGARSKLI

SEQ ID NO: 14313 - protein, 14 aa, synthetic construct
ALCAAFIVYATDKL

SEQ ID NO: 14314 - protein, 12 aa, synthetic construct
ALAVWGINDKLI

SEQ ID NO: 14315 - protein, 13 aa, synthetic construct
ALAVTGGYTDKLI

SEQ ID NO: 14316 - protein, 12 aa, synthetic construct
ALAVMGINDKLI

SEQ ID NO: 14317 - protein, 13 aa, synthetic construct
ALASLGDRALTAQ

SEQ ID NO: 14318 - protein, 13 aa, synthetic construct
ALGDLLLGDTDKL

SEQ ID NO: 14319 - protein, 14 aa, synthetic construct
ALAHLRRGPYTENL

SEQ ID NO: 14320 - protein, 14 aa, synthetic construct
ALAHLPRWGSYTEK

SEQ ID NO: 14321 - protein, 13 aa, synthetic construct
ALAHLAGYPYKLI

SEQ ID NO: 14322 - protein, 9 aa, synthetic construct
ALAGTDKLI

SEQ ID NO: 14323 - protein, 8 aa, synthetic construct
ALAEVKLI

SEQ ID NO: 14324 - protein, 13 aa, synthetic construct
ALAETSYVISDKL

SEQ ID NO: 14325 - protein, 14 aa, synthetic construct
ALAETSYGISDKLI

SEQ ID NO: 14326 - protein, 13 aa, synthetic construct
ALAEQAGYADKLI

SEQ ID NO: 14327 - protein, 14 aa, synthetic construct
ALAEPYVLGPRSKL

SEQ ID NO: 14328 - protein, 14 aa, synthetic construct
ALAEPYVLGARSKL

SEQ ID NO: 14329 - protein, 14 aa, synthetic construct
ALCETSYGISDKLI

SEQ ID NO: 14330 - protein, 14 aa, synthetic construct
ALCHLHTGGSYTDK

SEQ ID NO: 14331 - protein, 14 aa, synthetic construct
ALCRYWGGPLTAQI

SEQ ID NO: 14332 - protein, 13 aa, synthetic construct
ALCVIGTEEFSNQ

SEQ ID NO: 14333 - protein, 12 aa, synthetic construct
ALEERGITDKLI

SEQ ID NO: 14334 - protein, 12 aa, synthetic construct
ALEERGDIDKLI

SEQ ID NO: 14335 - protein, 14 aa, synthetic construct
ALEEPVLGASYTDK

SEQ ID NO: 14336 - protein, 14 aa, synthetic construct
ALEEPRTGGYAYTD

SEQ ID NO: 14337 - protein, 14 aa, synthetic construct
ALEEPPSYVLGDTD

SEQ ID NO: 14338 - protein, 14 aa, synthetic construct
ALEEPCTGDTDKLI

SEQ ID NO: 14339 - protein, 12 aa, synthetic construct
ALEELRIFDKLI

SEQ ID NO: 14340 - protein, 12 aa, synthetic construct
ALEELRIFDKHI

SEQ ID NO: 14341 - protein, 14 aa, synthetic construct
ALEELPTGSPINSS

SEQ ID NO: 14342 - protein, 14 aa, synthetic construct
ALEELPLGVLYTDK

SEQ ID NO: 14343 - protein, 13 aa, synthetic construct
ALEELPLGVLYTD

SEQ ID NO: 14344 - protein, 14 aa, synthetic construct
ALEELLLGDPDKLI

SEQ ID NO: 14345 - protein, 12 aa, synthetic construct
ALEELGITEKLI

SEQ ID NO: 14346 - protein, 11 aa, synthetic construct
ALEELGITDKL

SEQ ID NO: 14347 - protein, 14 aa, synthetic construct
ALEELGDRALTAQL

SEQ ID NO: 14348 - protein, 13 aa, synthetic construct
ALEELGASYTDKL

SEQ ID NO: 14349 - protein, 14 aa, synthetic construct
ALEEETGGYTEKLI

SEQ ID NO: 14350 - protein, 13 aa, synthetic construct
ALEDLGGYTVKLI

SEQ ID NO: 14351 - protein, 14 aa, synthetic construct
ALEDLGDRALTAQL

SEQ ID NO: 14352 - protein, 14 aa, synthetic construct
ALEDLGASYTDKLI

SEQ ID NO: 14353 - protein, 6 aa, synthetic construct
ALEACF

SEQ ID NO: 14354 - protein, 14 aa, synthetic construct
ALAEPVLGASYTDK

SEQ ID NO: 14355 - protein, 14 aa, synthetic construct
ALAEPSYWGIHTDK

SEQ ID NO: 14356 - protein, 14 aa, synthetic construct
ALAEPSTGGYSDKL

SEQ ID NO: 14357 - protein, 13 aa, synthetic construct
AIWEPVGDNTDKL

SEQ ID NO: 14358 - protein, 12 aa, synthetic construct
AIWELRIFDKII

SEQ ID NO: 14359 - protein, 12 aa, synthetic construct
AIWELRDTDKLI

SEQ ID NO: 14360 - protein, 12 aa, synthetic construct
AIWELLNFYKHI

SEQ ID NO: 14361 - protein, 12 aa, synthetic construct
AIWELGMTDNLI

SEQ ID NO: 14362 - protein, 13 aa, synthetic construct
AIWELGIYTDKLI

SEQ ID NO: 14363 - protein, 13 aa, synthetic construct
AIWELGADTDKHI

SEQ ID NO: 14364 - protein, 13 aa, synthetic construct
AIWELDLGRSGLI

SEQ ID NO: 14365 - protein, 12 aa, synthetic construct
AIWARGITDKII

SEQ ID NO: 14366 - protein, 12 aa, synthetic construct
AIVVWGINDKHI

SEQ ID NO: 14367 - protein, 14 aa, synthetic construct
AISELVGYWTDKLI

SEQ ID NO: 14368 - protein, 13 aa, synthetic construct
AIRELGDTGDKLI

SEQ ID NO: 14369 - protein, 7 aa, synthetic construct
AIPEINK

SEQ ID NO: 14370 - protein, 12 aa, synthetic construct
AIGVWGINVKLI

SEQ ID NO: 14371 - protein, 12 aa, synthetic construct
AIGVWGINDKLI

SEQ ID NO: 14372 - protein, 13 aa, synthetic construct
AIGVTAGYTDKII

SEQ ID NO: 14373 - protein, 13 aa, synthetic construct
AIGVLMVDTRKLI

SEQ ID NO: 14374 - protein, 14 aa, synthetic construct
AIGRYWGGPLTAQL

SEQ ID NO: 14375 - protein, 14 aa, synthetic construct
AIGRNWGGTLTAQL

SEQ ID NO: 14376 - protein, 12 aa, synthetic construct
AIGQGGKHEKLN

SEQ ID NO: 14377 - protein, 12 aa, synthetic construct
AIGNWGIRDNLI

SEQ ID NO: 14378 - protein, 12 aa, synthetic construct
AIGNWGIRDKLI

SEQ ID NO: 14379 - protein, 13 aa, synthetic construct
AIWEMDWGRRGLI

SEQ ID NO: 14380 - protein, 12 aa, synthetic construct
AIWERGINDKLI

SEQ ID NO: 14381 - protein, 14 aa, synthetic construct
ALAEPGGYNTDKLI

SEQ ID NO: 14382 - protein, 11 aa, synthetic construct
AIWGGYYVKLI

SEQ ID NO: 14383 - protein, 14 aa, synthetic construct
ALAEPCTGDTDKLI

SEQ ID NO: 14384 - protein, 14 aa, synthetic construct
ALAEPCTGDTDKII

SEQ ID NO: 14385 - protein, 12 aa, synthetic construct
ALAELRIYDKLN

SEQ ID NO: 14386 - protein, 13 aa, synthetic construct
ALAELGRYAHKLI

SEQ ID NO: 14387 - protein, 13 aa, synthetic construct
ALAELGGYADKHI

SEQ ID NO: 14388 - protein, 13 aa, synthetic construct
ALAELGDTGDKLI

SEQ ID NO: 14389 - protein, 14 aa, synthetic construct
ALAELGDRALTAQL

SEQ ID NO: 14390 - protein, 10 aa, synthetic construct
ALAELGDKLI

SEQ ID NO: 14391 - protein, 14 aa, synthetic construct
ALAELGASYTDKLI

SEQ ID NO: 14392 - protein, 13 aa, synthetic construct
ALAELGADTYKLI

SEQ ID NO: 14393 - protein, 13 aa, synthetic construct
ALAELAGYGTDKL

SEQ ID NO: 14394 - protein, 10 aa, synthetic construct
ALAELADTLI

SEQ ID NO: 14395 - protein, 12 aa, synthetic construct
ALAEHGMTDKHN

SEQ ID NO: 14396 - protein, 11 aa, synthetic construct
ALAEAYTDKLI

SEQ ID NO: 14397 - protein, 11 aa, synthetic construct
ALAEASTAKLI

SEQ ID NO: 14398 - protein, 12 aa, synthetic construct
ALADLRDTDKLI

SEQ ID NO: 14399 - protein, 13 aa, synthetic construct
ALADLGVSGDKLN

SEQ ID NO: 14400 - protein, 14 aa, synthetic construct
ALADLGGSGTDKII

SEQ ID NO: 14401 - protein, 14 aa, synthetic construct
ALAASYAPVPEKII

SEQ ID NO: 14402 - protein, 12 aa, synthetic construct
AIWVWGINDKIN

SEQ ID NO: 14403 - protein, 13 aa, synthetic construct
AIWVLMGDTRKLI

SEQ ID NO: 14404 - protein, 12 aa, synthetic construct
ALEERGMTDQLI

SEQ ID NO: 14405 - protein, 14 aa, synthetic construct
ALEETSYGISEKLI

SEQ ID NO: 14406 - protein, 11 aa, synthetic construct
ALEGGYSDKLI

SEQ ID NO: 14407 - protein, 14 aa, synthetic construct
ALGALPTGGFGDTD

SEQ ID NO: 14408 - protein, 14 aa, synthetic construct
ALGALPLHWGRYTD

SEQ ID NO: 14409 - protein, 14 aa, synthetic construct
ALGALPLGVLYTDK

SEQ ID NO: 14410 - protein, 13 aa, synthetic construct
ALGALPLGVLDTD

SEQ ID NO: 14411 - protein, 14 aa, synthetic construct
ALGALLTGGYEYTD

SEQ ID NO: 14412 - protein, 14 aa, synthetic construct
ALGALLLGDPDKLI

SEQ ID NO: 14413 - protein, 13 aa, synthetic construct
ALGALLGDTRTLI

SEQ ID NO: 14414 - protein, 14 aa, synthetic construct
ALGALLGDTPINSS

SEQ ID NO: 14415 - protein, 14 aa, synthetic construct
ALGALHTGGFGYTD

SEQ ID NO: 14416 - protein, 14 aa, synthetic construct
ALGALHTGGFGSTD

SEQ ID NO: 14417 - protein, 14 aa, synthetic construct
ALGALGVYATYKLI

SEQ ID NO: 14418 - protein, 12 aa, synthetic construct
ALGALGMTETRI

SEQ ID NO: 14419 - protein, 12 aa, synthetic construct
ALGALGMTDKLN

SEQ ID NO: 14420 - protein, 12 aa, synthetic construct
ALGALGMTANLS

SEQ ID NO: 14421 - protein, 12 aa, synthetic construct
ALGALGMSDNRI

SEQ ID NO: 14422 - protein, 13 aa, synthetic construct
ALGALGIYTVTLL

SEQ ID NO: 14423 - protein, 13 aa, synthetic construct
ALGALGIYTDQLI

SEQ ID NO: 14424 - protein, 13 aa, synthetic construct
ALGALGIYTDNLI

SEQ ID NO: 14425 - protein, 13 aa, synthetic construct
ALGALGIYTDKLL

SEQ ID NO: 14426 - protein, 13 aa, synthetic construct
ALGALGIYTATLI

SEQ ID NO: 14427 - protein, 13 aa, synthetic construct
ALGALGIYTAKLL

SEQ ID NO: 14428 - protein, 13 aa, synthetic construct
ALGALGIDTGKLI

SEQ ID NO: 14429 - protein, 14 aa, synthetic construct
ALGALPQGDLYTDK

SEQ ID NO: 14430 - protein, 14 aa, synthetic construct
ALGALPYWGRSTDK

SEQ ID NO: 14431 - protein, 13 aa, synthetic construct
ALGALGGYGTDKL

SEQ ID NO: 14432 - protein, 14 aa, synthetic construct
ALGALPYWGRYTDK

SEQ ID NO: 14433 - protein, 14 aa, synthetic construct
ALGAPCTGDTAQLI

SEQ ID NO: 14434 - protein, 14 aa, synthetic construct
ALGAPCNGDTDKLI

SEQ ID NO: 14435 - protein, 14 aa, synthetic construct
ALGALYWGILSSWD

SEQ ID NO: 14436 - protein, 11 aa, synthetic construct
ALGALYTETLN

SEQ ID NO: 14437 - protein, 11 aa, synthetic construct
ALGALYTEKLI

SEQ ID NO: 14438 - protein, 11 aa, synthetic construct
ALGALYTDKII

SEQ ID NO: 14439 - protein, 11 aa, synthetic construct
ALGALYRDTDI

SEQ ID NO: 14440 - protein, 11 aa, synthetic construct
ALGALSPDKLI

SEQ ID NO: 14441 - protein, 14 aa, synthetic construct
ALGALRWGPYPEKL

SEQ ID NO: 14442 - protein, 14 aa, synthetic construct
ALGALRWGPSTDKL

SEQ ID NO: 14443 - protein, 12 aa, synthetic construct
ALGALRMTDKLI

SEQ ID NO: 14444 - protein, 12 aa, synthetic construct
ALGALRMFEIVI

SEQ ID NO: 14445 - protein, 12 aa, synthetic construct
ALGALRIFDTLI

SEQ ID NO: 14446 - protein, 12 aa, synthetic construct
ALGALRIFDKLI

SEQ ID NO: 14447 - protein, 12 aa, synthetic construct
ALGALRFFDKLI

SEQ ID NO: 14448 - protein, 12 aa, synthetic construct
ALGALRDTEKRI

SEQ ID NO: 14449 - protein, 12 aa, synthetic construct
ALGALRDTEKLI

SEQ ID NO: 14450 - protein, 12 aa, synthetic construct
ALGALRDTEKHI

SEQ ID NO: 14451 - protein, 12 aa, synthetic construct
ALGALRDTDTRI

SEQ ID NO: 14452 - protein, 12 aa, synthetic construct
ALGALRDTDNII

SEQ ID NO: 14453 - protein, 12 aa, synthetic construct
ALGALRDTDKLI

SEQ ID NO: 14454 - protein, 13 aa, synthetic construct
ALGALGICTDKLI

SEQ ID NO: 14455 - protein, 13 aa, synthetic construct
ALGALGGYADTLI

SEQ ID NO: 14456 - protein, 13 aa, synthetic construct
ALEGPYQEDGTDK

SEQ ID NO: 14457 - protein, 13 aa, synthetic construct
ALGAETGGYTEQL

SEQ ID NO: 14458 - protein, 14 aa, synthetic construct
ALGAETGGSSDKLI

SEQ ID NO: 14459 - protein, 14 aa, synthetic construct
ALGADTGGYTEKLI

SEQ ID NO: 14460 - protein, 14 aa, synthetic construct
ALGADFLGYPTDKL

SEQ ID NO: 14461 - protein, 14 aa, synthetic construct
ALGADFLGYATDKL

SEQ ID NO: 14462 - protein, 13 aa, synthetic construct
ALGADDAPVPDNL

SEQ ID NO: 14463 - protein, 11 aa, synthetic construct
ALGAAYTEKLI

SEQ ID NO: 14464 - protein, 14 aa, synthetic construct
ALGAAYQEDGTDKL

SEQ ID NO: 14465 - protein, 14 aa, synthetic construct
ALGAAYLGYATDKL

SEQ ID NO: 14466 - protein, 14 aa, synthetic construct
ALGAAYAPVPEKLI

SEQ ID NO: 14467 - protein, 13 aa, synthetic construct
ALGAAYAPVPDNL

SEQ ID NO: 14468 - protein, 14 aa, synthetic construct
ALGAAYAPGPAKLI

SEQ ID NO: 14469 - protein, 11 aa, synthetic construct
ALGAASTDTLI

SEQ ID NO: 14470 - protein, 14 aa, synthetic construct
ALGAAFVGYATDKL

SEQ ID NO: 14471 - protein, 14 aa, synthetic construct
ALGAAFLGYATEKL

SEQ ID NO: 14472 - protein, 12 aa, synthetic construct
ALFERGITDKLI

SEQ ID NO: 14473 - protein, 12 aa, synthetic construct
ALEVWGRNDELI

SEQ ID NO: 14474 - protein, 12 aa, synthetic construct
ALEVWGINDELI

SEQ ID NO: 14475 - protein, 12 aa, synthetic construct
ALEVLLGDTRKL

SEQ ID NO: 14476 - protein, 13 aa, synthetic construct
ALEQLGIYTSKLI

SEQ ID NO: 14477 - protein, 14 aa, synthetic construct
ALEPSTSGGRYTDK

SEQ ID NO: 14478 - protein, 9 aa, synthetic construct
ALEGTDKLV

SEQ ID NO: 14479 - protein, 13 aa, synthetic construct
ALGAETGGYTDKL

SEQ ID NO: 14480 - protein, 14 aa, synthetic construct
ALGAETGGYTEQLI

SEQ ID NO: 14481 - protein, 13 aa, synthetic construct
ALGALGGYADKLN

SEQ ID NO: 14482 - protein, 13 aa, synthetic construct
ALGAGCYESDIIV

SEQ ID NO: 14483 - protein, 14 aa, synthetic construct
ALGALGGNGTDQLI

SEQ ID NO: 14484 - protein, 13 aa, synthetic construct
ALGALGDTPITSS

SEQ ID NO: 14485 - protein, 13 aa, synthetic construct
ALGALGDTGDTLI

SEQ ID NO: 14486 - protein, 12 aa, synthetic construct
ALGALGDTDKHI

SEQ ID NO: 14487 - protein, 14 aa, synthetic construct
ALGALGDRALTAQL

SEQ ID NO: 14488 - protein, 14 aa, synthetic construct
ALGALGDRALTAEL

SEQ ID NO: 14489 - protein, 13 aa, synthetic construct
ALGALGDPGAKLI

SEQ ID NO: 14490 - protein, 12 aa, synthetic construct
ALGALGDPDKLI

SEQ ID NO: 14491 - protein, 10 aa, synthetic construct
ALGALGDKLF

SEQ ID NO: 14492 - protein, 14 aa, synthetic construct
ALGALGASSTDKLI

SEQ ID NO: 14493 - protein, 14 aa, synthetic construct
ALGALGARALTAQL

SEQ ID NO: 14494 - protein, 13 aa, synthetic construct
ALGALGADTDTLF

SEQ ID NO: 14495 - protein, 13 aa, synthetic construct
ALGALGADTDQLH

SEQ ID NO: 14496 - protein, 13 aa, synthetic construct
ALGALDWGRRGLI

SEQ ID NO: 14497 - protein, 14 aa, synthetic construct
ALGALDLFWGRYTD

SEQ ID NO: 14498 - protein, 13 aa, synthetic construct
ALGALAGYADKLI

SEQ ID NO: 14499 - protein, 10 aa, synthetic construct
ALGAIEADND

SEQ ID NO: 14500 - protein, 14 aa, synthetic construct
ALGAHYVLGARSKL

SEQ ID NO: 14501 - protein, 8 aa, synthetic construct
ALGAGKLI

SEQ ID NO: 14502 - protein, 12 aa, synthetic construct
ALGAGGRTDHNI

SEQ ID NO: 14503 - protein, 14 aa, synthetic construct
ALGAGGIQYTEKLI

SEQ ID NO: 14504 - protein, 9 aa, synthetic construct
AIGNLHTWG

SEQ ID NO: 14505 - protein, 12 aa, synthetic construct
AIGNLGIRDKLI

SEQ ID NO: 14506 - protein, 8 aa, synthetic construct
AIGLGKLI

SEQ ID NO: 14507 - protein, 14 aa, synthetic construct
AHGELRWGPYTDKL

SEQ ID NO: 14508 - protein, 12 aa, synthetic construct
AHGELRIFDKLI

SEQ ID NO: 14509 - protein, 12 aa, synthetic construct
AHGELRANDKLI

SEQ ID NO: 14510 - protein, 14 aa, synthetic construct
AHGELPYWGRYTDK

SEQ ID NO: 14511 - protein, 14 aa, synthetic construct
AHGELPLYWGLYTD

SEQ ID NO: 14512 - protein, 14 aa, synthetic construct
AHGELLLGDPDKLI

SEQ ID NO: 14513 - protein, 12 aa, synthetic construct
AHGELGMTDKLN

SEQ ID NO: 14514 - protein, 12 aa, synthetic construct
AHGELGMTDKHI

SEQ ID NO: 14515 - protein, 13 aa, synthetic construct
AHGELGIYTEKLI

SEQ ID NO: 14516 - protein, 13 aa, synthetic construct
AHGELGIYTDKLI

SEQ ID NO: 14517 - protein, 14 aa, synthetic construct
AHGELGGYGTEKLI

SEQ ID NO: 14518 - protein, 13 aa, synthetic construct
AHGELGGYADKLI

SEQ ID NO: 14519 - protein, 13 aa, synthetic construct
AHGELGDTGDKLN

SEQ ID NO: 14520 - protein, 14 aa, synthetic construct
AHGELGDRALTAQL

SEQ ID NO: 14521 - protein, 10 aa, synthetic construct
AHGELGDKLI

SEQ ID NO: 14522 - protein, 13 aa, synthetic construct
AHGELGDAGDKLI

SEQ ID NO: 14523 - protein, 13 aa, synthetic construct
AHGELEWGRRGLI

SEQ ID NO: 14524 - protein, 12 aa, synthetic construct
AHGELAMTDKLI

SEQ ID NO: 14525 - protein, 8 aa, synthetic construct
AHGEGKLI

SEQ ID NO: 14526 - protein, 8 aa, synthetic construct
AHGEGKII

SEQ ID NO: 14527 - protein, 14 aa, synthetic construct
AHGEETGGYTDKLI

SEQ ID NO: 14528 - protein, 10 aa, synthetic construct
AHGDRTSTRL

SEQ ID NO: 14529 - protein, 14 aa, synthetic construct
AHGELRTGGYDNTD

SEQ ID NO: 14530 - protein, 11 aa, synthetic construct
AHGELYTDKLI

SEQ ID NO: 14531 - protein, 14 aa, synthetic construct
AHGASYHAYATDKL

SEQ ID NO: 14532 - protein, 11 aa, synthetic construct
AHGELYTDKLY

SEQ ID NO: 14533 - protein, 14 aa, synthetic construct
AHVDPCTGDTEKLI

SEQ ID NO: 14534 - protein, 8 aa, synthetic construct
AHREGKLI

SEQ ID NO: 14535 - protein, 13 aa, synthetic construct
AHLEHGGYTDKLI

SEQ ID NO: 14536 - protein, 9 aa, synthetic construct
AHGVTDKLI

SEQ ID NO: 14537 - protein, 13 aa, synthetic construct
AHGVLGAATDHLI

SEQ ID NO: 14538 - protein, 12 aa, synthetic construct
AHGQLRDNNKHI

SEQ ID NO: 14539 - protein, 11 aa, synthetic construct
AHGQAYTDKII

SEQ ID NO: 14540 - protein, 12 aa, synthetic construct
AHGNWGIRDKLI

SEQ ID NO: 14541 - protein, 14 aa, synthetic construct
AHGETSYGNSDKLI

SEQ ID NO: 14542 - protein, 14 aa, synthetic construct
AHGETSYGISDKLI

SEQ ID NO: 14543 - protein, 12 aa, synthetic construct
AHGERGIAGKLI

SEQ ID NO: 14544 - protein, 14 aa, synthetic construct
AHGERGAAYTEKLI

SEQ ID NO: 14545 - protein, 14 aa, synthetic construct
AHGEPYVLGARSKL

SEQ ID NO: 14546 - protein, 13 aa, synthetic construct
AHGEPYVHGARSK

SEQ ID NO: 14547 - protein, 14 aa, synthetic construct
AHGEPSYWGIHTDK

SEQ ID NO: 14548 - protein, 14 aa, synthetic construct
AHGEPSTGGYADKL

SEQ ID NO: 14549 - protein, 14 aa, synthetic construct
AHGEPRTGGYAYTD

SEQ ID NO: 14550 - protein, 11 aa, synthetic construct
AHGEPPADELI

SEQ ID NO: 14551 - protein, 14 aa, synthetic construct
AHGEPLLLGDTIDK

SEQ ID NO: 14552 - protein, 14 aa, synthetic construct
AHGENSYGISDKLI

SEQ ID NO: 14553 - protein, 13 aa, synthetic construct
AHGEMGADTDKLI

SEQ ID NO: 14554 - protein, 14 aa, synthetic construct
AHGDPRTGGSAYTD

SEQ ID NO: 14555 - protein, 14 aa, synthetic construct
AHGASSLGYATDKL

SEQ ID NO: 14556 - protein, 13 aa, synthetic construct
AHVELGDTGDKLI

SEQ ID NO: 14557 - protein, 14 aa, synthetic construct
AFGEPSYWGVHTDK

SEQ ID NO: 14558 - protein, 14 aa, synthetic construct
AFGEPSTGGYADKL

SEQ ID NO: 14559 - protein, 14 aa, synthetic construct
AFGEPRTGGYACTD

SEQ ID NO: 14560 - protein, 14 aa, synthetic construct
AFGEPILGASYTDK

SEQ ID NO: 14561 - protein, 14 aa, synthetic construct
AFGEPGGYNTDKLI

SEQ ID NO: 14562 - protein, 14 aa, synthetic construct
AFGEPCTGDTDKLI

SEQ ID NO: 14563 - protein, 11 aa, synthetic construct
AFGELYTDKLI

SEQ ID NO: 14564 - protein, 12 aa, synthetic construct
AFGELRIFDKVI

SEQ ID NO: 14565 - protein, 12 aa, synthetic construct
AFGELRDTEKLI

SEQ ID NO: 14566 - protein, 12 aa, synthetic construct
AFGELRDTDKLI

SEQ ID NO: 14567 - protein, 14 aa, synthetic construct
AFGELPYWGRYTDK

SEQ ID NO: 14568 - protein, 14 aa, synthetic construct
AFGELPTGGFGYTD

SEQ ID NO: 14569 - protein, 12 aa, synthetic construct
AFGELGMTDKLI

SEQ ID NO: 14570 - protein, 12 aa, synthetic construct
AFGDLRIFDKLI

SEQ ID NO: 14571 - protein, 12 aa, synthetic construct
AFGDLGMTDKLI

SEQ ID NO: 14572 - protein, 14 aa, synthetic construct
AFGASYETVPDKLI

SEQ ID NO: 14573 - protein, 14 aa, synthetic construct
AFGASYAPVPHKLI

SEQ ID NO: 14574 - protein, 14 aa, synthetic construct
AFGASFLGYSTDKL

SEQ ID NO: 14575 - protein, 14 aa, synthetic construct
AFGASFLGYATDKL

SEQ ID NO: 14576 - protein, 13 aa, synthetic construct
ADGGRDTEKLLIG

SEQ ID NO: 14577 - protein, 14 aa, synthetic construct
ADGELGGYGTDKLI

SEQ ID NO: 14578 - protein, 13 aa, synthetic construct
ADGELDRGRRGLN

SEQ ID NO: 14579 - protein, 14 aa, synthetic construct
AFGEPSYWGIHTDK

SEQ ID NO: 14580 - protein, 12 aa, synthetic construct
AFGERGDSDKLI

SEQ ID NO: 14581 - protein, 12 aa, synthetic construct
AHGASFLGYATD

SEQ ID NO: 14582 - protein, 12 aa, synthetic construct
AFGERGITDKLI

SEQ ID NO: 14583 - protein, 13 aa, synthetic construct
AHGALGGYADKLI

SEQ ID NO: 14584 - protein, 13 aa, synthetic construct
AHEELDWGRRGLI

SEQ ID NO: 14585 - protein, 14 aa, synthetic construct
AHAETSYGISDKLI

SEQ ID NO: 14586 - protein, 14 aa, synthetic construct
AHAEPYVLGARSKL

SEQ ID NO: 14587 - protein, 13 aa, synthetic construct
AGGVTGGYTDKLI

SEQ ID NO: 14588 - protein, 9 aa, synthetic construct
AGGVRACGL

SEQ ID NO: 14589 - protein, 12 aa, synthetic construct
AGGGETGGSSAQ

SEQ ID NO: 14590 - protein, 12 aa, synthetic construct
AGGERGDSEKLI

SEQ ID NO: 14591 - protein, 7 aa, synthetic construct
AGGELGR

SEQ ID NO: 14592 - protein, 13 aa, synthetic construct
AGGELGGYADKLI

SEQ ID NO: 14593 - protein, 10 aa, synthetic construct
AGGEIPTGGY

SEQ ID NO: 14594 - protein, 11 aa, synthetic construct
AGGEAYTEDLS

SEQ ID NO: 14595 - protein, 13 aa, synthetic construct
AGGEAGGYTTDHL

SEQ ID NO: 14596 - protein, 13 aa, synthetic construct
AGGDLGGYADNLI

SEQ ID NO: 14597 - protein, 12 aa, synthetic construct
AGGASYIGYATD

SEQ ID NO: 14598 - protein, 13 aa, synthetic construct
AGGAPPAYVLGDT

SEQ ID NO: 14599 - protein, 12 aa, synthetic construct
AGGALGGEADKR

SEQ ID NO: 14600 - protein, 14 aa, synthetic construct
AFVELPLYWGLYTD

SEQ ID NO: 14601 - protein, 13 aa, synthetic construct
AFGVLLGDTRKLI

SEQ ID NO: 14602 - protein, 9 aa, synthetic construct
AFGGTDKLI

SEQ ID NO: 14603 - protein, 9 aa, synthetic construct
AFGGTDKLF

SEQ ID NO: 14604 - protein, 13 aa, synthetic construct
AHVELDWGRRGLI

SEQ ID NO: 14605 - protein, 13 aa, synthetic construct
AHVEPTTAGYADK

SEQ ID NO: 14606 - protein, 12 aa, synthetic construct
AIGKWGLRDNLF

SEQ ID NO: 14607 - protein, 14 aa, synthetic construct
AIGERSYGISDKLI

SEQ ID NO: 14608 - protein, 12 aa, synthetic construct
AIGERGDSDNLI

SEQ ID NO: 14609 - protein, 11 aa, synthetic construct
AIGERGDSDKL

SEQ ID NO: 14610 - protein, 14 aa, synthetic construct
AIGEPYVMWARSKL

SEQ ID NO: 14611 - protein, 14 aa, synthetic construct
AIGEPYVLGARSKL

SEQ ID NO: 14612 - protein, 13 aa, synthetic construct
AIGEPVLGASYTD

SEQ ID NO: 14613 - protein, 14 aa, synthetic construct
AIGEPRTGGYAYTD

SEQ ID NO: 14614 - protein, 14 aa, synthetic construct
AIGEPRNGGYSYTD

SEQ ID NO: 14615 - protein, 13 aa, synthetic construct
AIGEPPSYVLWDT

SEQ ID NO: 14616 - protein, 14 aa, synthetic construct
AIGEPLTGDTDKLI

SEQ ID NO: 14617 - protein, 14 aa, synthetic construct
AIGEPCTGDTDKLI

SEQ ID NO: 14618 - protein, 14 aa, synthetic construct
AIGEPCNGDTDKLI

SEQ ID NO: 14619 - protein, 13 aa, synthetic construct
AIGEMGADTDKII

SEQ ID NO: 14620 - protein, 11 aa, synthetic construct
AIGELYTEKLI

SEQ ID NO: 14621 - protein, 11 aa, synthetic construct
AIGELYTDKLI

SEQ ID NO: 14622 - protein, 11 aa, synthetic construct
AIGELYTDKHI

SEQ ID NO: 14623 - protein, 13 aa, synthetic construct
AIGELVGYADKLI

SEQ ID NO: 14624 - protein, 13 aa, synthetic construct
AIGELVADTDKLI

SEQ ID NO: 14625 - protein, 9 aa, synthetic construct
AIGELSYYV

SEQ ID NO: 14626 - protein, 14 aa, synthetic construct
AIGELRWGPYTDKL

SEQ ID NO: 14627 - protein, 14 aa, synthetic construct
AIGELRTGGYYYTD

SEQ ID NO: 14628 - protein, 14 aa, synthetic construct
AIGELRTGGYEYTD

SEQ ID NO: 14629 - protein, 12 aa, synthetic construct
AIGERGITDKII

SEQ ID NO: 14630 - protein, 14 aa, synthetic construct
AIGERVGYNTDILI

SEQ ID NO: 14631 - protein, 12 aa, synthetic construct
AIGELRIFENLI

SEQ ID NO: 14632 - protein, 12 aa, synthetic construct
AIGESVDIDKLI

SEQ ID NO: 14633 - protein, 13 aa, synthetic construct
AIGHLPTWGSYTD

SEQ ID NO: 14634 - protein, 9 aa, synthetic construct
AIGHLHTWG

SEQ ID NO: 14635 - protein, 9 aa, synthetic construct
AIGGTEKLI

SEQ ID NO: 14636 - protein, 9 aa, synthetic construct
AIGGTDKLN

SEQ ID NO: 14637 - protein, 9 aa, synthetic construct
AIGGSDKLN

SEQ ID NO: 14638 - protein, 14 aa, synthetic construct
AIGGPYQEDGTDKL

SEQ ID NO: 14639 - protein, 13 aa, synthetic construct
AIGGPYQEDGTDK

SEQ ID NO: 14640 - protein, 11 aa, synthetic construct
AIGGGYYDKLI

SEQ ID NO: 14641 - protein, 11 aa, synthetic construct
AIGGGYSENLI

SEQ ID NO: 14642 - protein, 11 aa, synthetic construct
AIGGGYSEKLI

SEQ ID NO: 14643 - protein, 11 aa, synthetic construct
AIGGGYSDNLI

SEQ ID NO: 14644 - protein, 11 aa, synthetic construct
AIGGGYSDKLN

SEQ ID NO: 14645 - protein, 11 aa, synthetic construct
AIGGGYADKLI

SEQ ID NO: 14646 - protein, 11 aa, synthetic construct
AIGGGNYDKLN

SEQ ID NO: 14647 - protein, 11 aa, synthetic construct
AIGEVRGLGLI

SEQ ID NO: 14648 - protein, 12 aa, synthetic construct
AIGEVGMTDKLI

SEQ ID NO: 14649 - protein, 14 aa, synthetic construct
AIGEVGGYGTDKLI

SEQ ID NO: 14650 - protein, 14 aa, synthetic construct
AIGETSYWISDKLI

SEQ ID NO: 14651 - protein, 14 aa, synthetic construct
AIGETSYGIYDKLI

SEQ ID NO: 14652 - protein, 14 aa, synthetic construct
AIGETSYGISYKLI

SEQ ID NO: 14653 - protein, 13 aa, synthetic construct
AIGETSYGISDKL

SEQ ID NO: 14654 - protein, 13 aa, synthetic construct
AIGELRRCGYQII

SEQ ID NO: 14655 - protein, 12 aa, synthetic construct
AIGELRIFDKLI

SEQ ID NO: 14656 - protein, 14 aa, synthetic construct
AHVRYWGGPLTAQL

SEQ ID NO: 14657 - protein, 13 aa, synthetic construct
AIGELGADTDKLN

SEQ ID NO: 14658 - protein, 12 aa, synthetic construct
AIGEIRIFDKLI

SEQ ID NO: 14659 - protein, 12 aa, synthetic construct
AIGEIGMTDKII

SEQ ID NO: 14660 - protein, 14 aa, synthetic construct
AIGEHYYWIYDILI

SEQ ID NO: 14661 - protein, 14 aa, synthetic construct
AIGEHSYWGIHTDK

SEQ ID NO: 14662 - protein, 14 aa, synthetic construct
AIGEHRTGDTPTPI

SEQ ID NO: 14663 - protein, 14 aa, synthetic construct
AIGEHCTGDTDKLI

SEQ ID NO: 14664 - protein, 8 aa, synthetic construct
AIGEGKII

SEQ ID NO: 14665 - protein, 11 aa, synthetic construct
AIGEAYTDKLI

SEQ ID NO: 14666 - protein, 11 aa, synthetic construct
AIGDVGDNKLI

SEQ ID NO: 14667 - protein, 12 aa, synthetic construct
AIGDRGITDKLN

SEQ ID NO: 14668 - protein, 11 aa, synthetic construct
AIGDRGEKKII

SEQ ID NO: 14669 - protein, 14 aa, synthetic construct
AIGDLPLYWGLYTD

SEQ ID NO: 14670 - protein, 13 aa, synthetic construct
AIGDLGADTDQLI

SEQ ID NO: 14671 - protein, 14 aa, synthetic construct
AIGASYEPVPDKLI

SEQ ID NO: 14672 - protein, 14 aa, synthetic construct
AIGASYAPVPDKLI

SEQ ID NO: 14673 - protein, 14 aa, synthetic construct
AIGASFLGYSAPGT

SEQ ID NO: 14674 - protein, 14 aa, synthetic construct
AIGASFLGYATDKL

SEQ ID NO: 14675 - protein, 14 aa, synthetic construct
AIGAPGGYNTDRLI

SEQ ID NO: 14676 - protein, 14 aa, synthetic construct
AIGAAFLGYATDKL

SEQ ID NO: 14677 - protein, 14 aa, synthetic construct
AICEPVLGASCTDK

SEQ ID NO: 14678 - protein, 11 aa, synthetic construct
AHWDVGDHKLI

SEQ ID NO: 14679 - protein, 14 aa, synthetic construct
AIGELADRAMTAQL

SEQ ID NO: 14680 - protein, 13 aa, synthetic construct
AIGELGAETEKLF

SEQ ID NO: 14681 - protein, 11 aa, synthetic construct
AIGELRGLGLI

SEQ ID NO: 14682 - protein, 14 aa, synthetic construct
AIGELGASYTAKLI

SEQ ID NO: 14683 - protein, 12 aa, synthetic construct
AIGELRDTDKII

SEQ ID NO: 14684 - protein, 14 aa, synthetic construct
AIGELPYWGRYTDQ

SEQ ID NO: 14685 - protein, 14 aa, synthetic construct
AIGELPLGVLYTEK

SEQ ID NO: 14686 - protein, 13 aa, synthetic construct
AIGELLLGDPYKL

SEQ ID NO: 14687 - protein, 14 aa, synthetic construct
AIGELIVGDPDKLI

SEQ ID NO: 14688 - protein, 13 aa, synthetic construct
AIGELILGDPDKL

SEQ ID NO: 14689 - protein, 14 aa, synthetic construct
AIGELHTGGFGYTD

SEQ ID NO: 14690 - protein, 12 aa, synthetic construct
AIGELGMTYKLI

SEQ ID NO: 14691 - protein, 14 aa, synthetic construct
AIGELGGYGTEKLI

SEQ ID NO: 14692 - protein, 13 aa, synthetic construct
AIGELGGYGTDKH

SEQ ID NO: 14693 - protein, 14 aa, synthetic construct
AIGELGGYGPDKLI

SEQ ID NO: 14694 - protein, 13 aa, synthetic construct
AIGELGGYAYKLI

SEQ ID NO: 14695 - protein, 13 aa, synthetic construct
AIGELGGYAGKLI

SEQ ID NO: 14696 - protein, 13 aa, synthetic construct
AIGELGGHADKLI

SEQ ID NO: 14697 - protein, 12 aa, synthetic construct
AIGELGDTEKLI

SEQ ID NO: 14698 - protein, 12 aa, synthetic construct
AIGELGDTAKII

SEQ ID NO: 14699 - protein, 13 aa, synthetic construct
AIGELGDTADKLI

SEQ ID NO: 14700 - protein, 14 aa, synthetic construct
AIGELGDSYTHKLI

SEQ ID NO: 14701 - protein, 12 aa, synthetic construct
AIGELGDPEKII

SEQ ID NO: 14702 - protein, 13 aa, synthetic construct
AIGELGDNVDKLN

SEQ ID NO: 14703 - protein, 10 aa, synthetic construct
AIGELGDILI

SEQ ID NO: 14704 - protein, 14 aa, synthetic construct
ALGAPFTGDTDKLI

SEQ ID NO: 14705 - protein, 14 aa, synthetic construct
ALGAPGGSNTDQLI

SEQ ID NO: 14706 - protein, 13 aa, synthetic construct
ALGAPGGYADKHI

SEQ ID NO: 14707 - protein, 12 aa, synthetic construct
ALGDLGDSDKLI

SEQ ID NO: 14708 - protein, 14 aa, synthetic construct
ALGDLGDRDITAQI

SEQ ID NO: 14709 - protein, 14 aa, synthetic construct
ALGDLGDRALTEQL

SEQ ID NO: 14710 - protein, 14 aa, synthetic construct
ALGDLGDRALTARL

SEQ ID NO: 14711 - protein, 14 aa, synthetic construct
ALGDLGDRALTAQI

SEQ ID NO: 14712 - protein, 14 aa, synthetic construct
ALGDLGDRALAAQL

SEQ ID NO: 14713 - protein, 14 aa, synthetic construct
ALGDLGDRAFPAQL

SEQ ID NO: 14714 - protein, 10 aa, synthetic construct
ALGDLGDQLI

SEQ ID NO: 14715 - protein, 13 aa, synthetic construct
ALGDLGDQDDKLI

SEQ ID NO: 14716 - protein, 11 aa, synthetic construct
ALGDLGDNELI

SEQ ID NO: 14717 - protein, 13 aa, synthetic construct
ALGDLGDKDDKLI

SEQ ID NO: 14718 - protein, 13 aa, synthetic construct
ALGDLGDIPINSS

SEQ ID NO: 14719 - protein, 13 aa, synthetic construct
ALGDLGDIGDKLI

SEQ ID NO: 14720 - protein, 12 aa, synthetic construct
ALGDLGDADKLI

SEQ ID NO: 14721 - protein, 13 aa, synthetic construct
ALGDLGATGVKLI

SEQ ID NO: 14722 - protein, 13 aa, synthetic construct
ALGDLGATGDRLI

SEQ ID NO: 14723 - protein, 13 aa, synthetic construct
ALGDLGASYTEKL

SEQ ID NO: 14724 - protein, 14 aa, synthetic construct
ALGDLGASYTDQLI

SEQ ID NO: 14725 - protein, 14 aa, synthetic construct
ALGDLGASYTDNLI

SEQ ID NO: 14726 - protein, 14 aa, synthetic construct
ALGDLGASYTDKPI

SEQ ID NO: 14727 - protein, 14 aa, synthetic construct
ALGDLGASYTDKLV

SEQ ID NO: 14728 - protein, 14 aa, synthetic construct
ALGDLGASYTDKII

SEQ ID NO: 14729 - protein, 14 aa, synthetic construct
ALGDLGDRDLTAQL

SEQ ID NO: 14730 - protein, 13 aa, synthetic construct
ALGDLGDTADNLI

SEQ ID NO: 14731 - protein, 14 aa, synthetic construct
ALGDLGASSTEKLI

SEQ ID NO: 14732 - protein, 12 aa, synthetic construct
ALGDLGDTATLI

SEQ ID NO: 14733 - protein, 13 aa, synthetic construct
ALGDLGDTPRNST

SEQ ID NO: 14734 - protein, 13 aa, synthetic construct
ALGDLGDTNDKLI

SEQ ID NO: 14735 - protein, 11 aa, synthetic construct
ALGDLGDTKLI

SEQ ID NO: 14736 - protein, 13 aa, synthetic construct
ALGDLGDTIDTLI

SEQ ID NO: 14737 - protein, 13 aa, synthetic construct
ALGDLGDTGEKLI

SEQ ID NO: 14738 - protein, 13 aa, synthetic construct
ALGDLGDTGDTLI

SEQ ID NO: 14739 - protein, 13 aa, synthetic construct
ALGDLGDTGDQIN

SEQ ID NO: 14740 - protein, 13 aa, synthetic construct
ALGDLGDTGDNSS

SEQ ID NO: 14741 - protein, 13 aa, synthetic construct
ALGDLGDTGDKLT

SEQ ID NO: 14742 - protein, 13 aa, synthetic construct
ALGDLGDTGDKLL

SEQ ID NO: 14743 - protein, 13 aa, synthetic construct
ALGDLGDTGDKLF

SEQ ID NO: 14744 - protein, 12 aa, synthetic construct
ALGDLGDTGDKL

SEQ ID NO: 14745 - protein, 13 aa, synthetic construct
ALGDLGDTGDKHN

SEQ ID NO: 14746 - protein, 13 aa, synthetic construct
ALGDLGDTGAKLI

SEQ ID NO: 14747 - protein, 12 aa, synthetic construct
ALGDLGDTGAKL

SEQ ID NO: 14748 - protein, 12 aa, synthetic construct
ALGDLGDTEKLY

SEQ ID NO: 14749 - protein, 12 aa, synthetic construct
ALGDLGDTDQHI

SEQ ID NO: 14750 - protein, 12 aa, synthetic construct
ALGDLGDTDNLI

SEQ ID NO: 14751 - protein, 12 aa, synthetic construct
ALGDLGDTDKVI

SEQ ID NO: 14752 - protein, 12 aa, synthetic construct
ALGDLGDTDKLV

SEQ ID NO: 14753 - protein, 12 aa, synthetic construct
ALGDLGDTDKLT

SEQ ID NO: 14754 - protein, 14 aa, synthetic construct
ALGDLGASYSDKVI

SEQ ID NO: 14755 - protein, 14 aa, synthetic construct
ALGDLGASCTDKLI

SEQ ID NO: 14756 - protein, 12 aa, synthetic construct
ALGDLGETDKLI

SEQ ID NO: 14757 - protein, 13 aa, synthetic construct
ALGDLDWGRRVLI

SEQ ID NO: 14758 - protein, 13 aa, synthetic construct
ALGDLDWGRRGLT

SEQ ID NO: 14759 - protein, 14 aa, synthetic construct
ALGDLDWGIRGNSS

SEQ ID NO: 14760 - protein, 13 aa, synthetic construct
ALGDLDWDRRGLI

SEQ ID NO: 14761 - protein, 5 aa, synthetic construct
ALGDL

SEQ ID NO: 14762 - protein, 12 aa, synthetic construct
ALGDKAMTDKLI

SEQ ID NO: 14763 - protein, 14 aa, synthetic construct
ALGDIYWGILSSWD

SEQ ID NO: 14764 - protein, 14 aa, synthetic construct
ALGDIRWGIPGKLI

SEQ ID NO: 14765 - protein, 14 aa, synthetic construct
ALGDIRTGGYEYTD

SEQ ID NO: 14766 - protein, 14 aa, synthetic construct
ALGDIPYWGRNTDK

SEQ ID NO: 14767 - protein, 14 aa, synthetic construct
ALGDIPYWGGYTDK

SEQ ID NO: 14768 - protein, 14 aa, synthetic construct
ALGDIPTGGYGKLI

SEQ ID NO: 14769 - protein, 14 aa, synthetic construct
ALGDILLGDPEKLI

SEQ ID NO: 14770 - protein, 14 aa, synthetic construct
ALGDILLGDHDTLI

SEQ ID NO: 14771 - protein, 8 aa, synthetic construct
ALGDIGLT

SEQ ID NO: 14772 - protein, 14 aa, synthetic construct
ALGDIGGYGTDKVI

SEQ ID NO: 14773 - protein, 13 aa, synthetic construct
ALGDIGGYADQII

SEQ ID NO: 14774 - protein, 13 aa, synthetic construct
ALGDIGGYAAKLI

SEQ ID NO: 14775 - protein, 12 aa, synthetic construct
ALGDIGDTDKVI

SEQ ID NO: 14776 - protein, 12 aa, synthetic construct
ALGDIGDTDKHI

SEQ ID NO: 14777 - protein, 14 aa, synthetic construct
ALGDHSYWGIHTDK

SEQ ID NO: 14778 - protein, 14 aa, synthetic construct
ALGDHRTGGYAYTD

SEQ ID NO: 14779 - protein, 13 aa, synthetic construct
ALGDLDWGRRGPI

SEQ ID NO: 14780 - protein, 13 aa, synthetic construct
ALGDLDWGRSGLI

SEQ ID NO: 14781 - protein, 13 aa, synthetic construct
ALGDLGARYTDRL

SEQ ID NO: 14782 - protein, 13 aa, synthetic construct
ALGDLDWGRSVLI

SEQ ID NO: 14783 - protein, 12 aa, synthetic construct
ALGDLGARSKLI

SEQ ID NO: 14784 - protein, 14 aa, synthetic construct
ALGDLGARALTAHL

SEQ ID NO: 14785 - protein, 13 aa, synthetic construct
ALGDLGAETDKLI

SEQ ID NO: 14786 - protein, 13 aa, synthetic construct
ALGDLGADTYKLI

SEQ ID NO: 14787 - protein, 13 aa, synthetic construct
ALGDLGADTVQII

SEQ ID NO: 14788 - protein, 13 aa, synthetic construct
ALGDLGADTENLI

SEQ ID NO: 14789 - protein, 13 aa, synthetic construct
ALGDLGADTDTLI

SEQ ID NO: 14790 - protein, 13 aa, synthetic construct
ALGDLGADTDQLL

SEQ ID NO: 14791 - protein, 13 aa, synthetic construct
ALGDLGADTDNLI

SEQ ID NO: 14792 - protein, 13 aa, synthetic construct
ALGDLGADTDKYI

SEQ ID NO: 14793 - protein, 13 aa, synthetic construct
ALGDLGADTDKLS

SEQ ID NO: 14794 - protein, 13 aa, synthetic construct
ALGDLGADTDKLN

SEQ ID NO: 14795 - protein, 13 aa, synthetic construct
ALGDLGADTDKLF

SEQ ID NO: 14796 - protein, 12 aa, synthetic construct
ALGDLGADTDKL

SEQ ID NO: 14797 - protein, 13 aa, synthetic construct
ALGDLGADTDILI

SEQ ID NO: 14798 - protein, 13 aa, synthetic construct
ALGDLGADTDHLI

SEQ ID NO: 14799 - protein, 13 aa, synthetic construct
ALGDLGADADKLI

SEQ ID NO: 14800 - protein, 13 aa, synthetic construct
ALGDLEWGRRGLI

SEQ ID NO: 14801 - protein, 14 aa, synthetic construct
ALGDLEWGIRGNSS

SEQ ID NO: 14802 - protein, 14 aa, synthetic construct
ALGDLEGYGTDKLI

SEQ ID NO: 14803 - protein, 13 aa, synthetic construct
ALGDLEADTDKLI

SEQ ID NO: 14804 - protein, 14 aa, synthetic construct
ALGDLGERALTAQL

SEQ ID NO: 14805 - protein, 13 aa, synthetic construct
ALGDLGGAADEIL

SEQ ID NO: 14806 - protein, 14 aa, synthetic construct
ALGDHGGIQSDKLI

SEQ ID NO: 14807 - protein, 14 aa, synthetic construct
ALGDLGPGGSDTDK

SEQ ID NO: 14808 - protein, 12 aa, synthetic construct
ALGDLGMTVKLI

SEQ ID NO: 14809 - protein, 12 aa, synthetic construct
ALGDLGMTNKLI

SEQ ID NO: 14810 - protein, 12 aa, synthetic construct
ALGDLGMTGKLI

SEQ ID NO: 14811 - protein, 12 aa, synthetic construct
ALGDLGMTETLI

SEQ ID NO: 14812 - protein, 12 aa, synthetic construct
ALGDLGMTEELI

SEQ ID NO: 14813 - protein, 12 aa, synthetic construct
ALGDLGMTDRLI

SEQ ID NO: 14814 - protein, 12 aa, synthetic construct
ALGDLGMTDNLV

SEQ ID NO: 14815 - protein, 12 aa, synthetic construct
ALGDLGMTDKPI

SEQ ID NO: 14816 - protein, 12 aa, synthetic construct
ALGDLGMTDKLV

SEQ ID NO: 14817 - protein, 12 aa, synthetic construct
ALGDLGMTDKLN

SEQ ID NO: 14818 - protein, 12 aa, synthetic construct
ALGDLGMTDKHI

SEQ ID NO: 14819 - protein, 12 aa, synthetic construct
ALGDLGMTDILI

SEQ ID NO: 14820 - protein, 12 aa, synthetic construct
ALGDLGMTDHLS

SEQ ID NO: 14821 - protein, 12 aa, synthetic construct
ALGDLGMTDHLI

SEQ ID NO: 14822 - protein, 12 aa, synthetic construct
ALGDLGMTDELI

SEQ ID NO: 14823 - protein, 12 aa, synthetic construct
ALGDLGMTAKLI

SEQ ID NO: 14824 - protein, 12 aa, synthetic construct
ALGDLGMSDKVI

SEQ ID NO: 14825 - protein, 13 aa, synthetic construct
ALGDLGLSTDKLI

SEQ ID NO: 14826 - protein, 7 aa, synthetic construct
ALGDLGK

SEQ ID NO: 14827 - protein, 13 aa, synthetic construct
ALGDLGIYTTKLI

SEQ ID NO: 14828 - protein, 10 aa, synthetic construct
ALGDLGIYTR

SEQ ID NO: 14829 - protein, 13 aa, synthetic construct
ALGDLGPDTDKLI

SEQ ID NO: 14830 - protein, 13 aa, synthetic construct
ALGDLGPPVLGVT

SEQ ID NO: 14831 - protein, 13 aa, synthetic construct
ALGDLGIYTEKLI

SEQ ID NO: 14832 - protein, 13 aa, synthetic construct
ALGDLGRDTDNRI

SEQ ID NO: 14833 - protein, 14 aa, synthetic construct
ALGDLLLGDSDKLI

SEQ ID NO: 14834 - protein, 14 aa, synthetic construct
ALGDLLLGDPEQLI

SEQ ID NO: 14835 - protein, 14 aa, synthetic construct
ALGDLLLGDPDTLI

SEQ ID NO: 14836 - protein, 14 aa, synthetic construct
ALGDLLLGDPDQLI

SEQ ID NO: 14837 - protein, 14 aa, synthetic construct
ALGDLLLGDPDQLF

SEQ ID NO: 14838 - protein, 14 aa, synthetic construct
ALGDLLLGDLYTDK

SEQ ID NO: 14839 - protein, 13 aa, synthetic construct
ALGDLLGDTRKLI

SEQ ID NO: 14840 - protein, 12 aa, synthetic construct
ALGDLLGDTRKL

SEQ ID NO: 14841 - protein, 13 aa, synthetic construct
ALGDLLGATRKLI

SEQ ID NO: 14842 - protein, 14 aa, synthetic construct
ALGDLGYWGIGSTD

SEQ ID NO: 14843 - protein, 10 aa, synthetic construct
ALGDLGVTLI

SEQ ID NO: 14844 - protein, 14 aa, synthetic construct
ALGDLGVSYSDKLI

SEQ ID NO: 14845 - protein, 12 aa, synthetic construct
ALGDLGVPDKLI

SEQ ID NO: 14846 - protein, 11 aa, synthetic construct
ALGDLGVNKIF

SEQ ID NO: 14847 - protein, 10 aa, synthetic construct
ALGDLGVKLN

SEQ ID NO: 14848 - protein, 10 aa, synthetic construct
ALGDLGVKLI

SEQ ID NO: 14849 - protein, 12 aa, synthetic construct
ALGDLGTTDKLI

SEQ ID NO: 14850 - protein, 13 aa, synthetic construct
ALGDLGTDTDQLI

SEQ ID NO: 14851 - protein, 12 aa, synthetic construct
ALGDLGSTDKLI

SEQ ID NO: 14852 - protein, 13 aa, synthetic construct
ALGDLGRYTDQLI

SEQ ID NO: 14853 - protein, 12 aa, synthetic construct
ALGDLGRTDQLI

SEQ ID NO: 14854 - protein, 13 aa, synthetic construct
ALGDLGIYTHKLI

SEQ ID NO: 14855 - protein, 13 aa, synthetic construct
ALGDLGIYTDTLL

SEQ ID NO: 14856 - protein, 13 aa, synthetic construct
ALGDLGGCADQLF

SEQ ID NO: 14857 - protein, 13 aa, synthetic construct
ALGDLGGYAVNLI

SEQ ID NO: 14858 - protein, 13 aa, synthetic construct
ALGDLGGYAHKLI

SEQ ID NO: 14859 - protein, 12 aa, synthetic construct
ALGDLGGYAETH

SEQ ID NO: 14860 - protein, 13 aa, synthetic construct
ALGDLGGYADTLI

SEQ ID NO: 14861 - protein, 13 aa, synthetic construct
ALGDLGGYADQVI

SEQ ID NO: 14862 - protein, 13 aa, synthetic construct
ALGDLGGYADNII

SEQ ID NO: 14863 - protein, 13 aa, synthetic construct
ALGDLGGYADKLN

SEQ ID NO: 14864 - protein, 13 aa, synthetic construct
ALGDLGGYADKII

SEQ ID NO: 14865 - protein, 13 aa, synthetic construct
ALGDLGGYADKHI

SEQ ID NO: 14866 - protein, 13 aa, synthetic construct
ALGDLGGYADHLI

SEQ ID NO: 14867 - protein, 13 aa, synthetic construct
ALGDLGGYADELI

SEQ ID NO: 14868 - protein, 12 aa, synthetic construct
ALGDLGGTDKLI

SEQ ID NO: 14869 - protein, 14 aa, synthetic construct
ALGDLGGSVPDKLI

SEQ ID NO: 14870 - protein, 14 aa, synthetic construct
ALGDLGGSGTENLI

SEQ ID NO: 14871 - protein, 13 aa, synthetic construct
ALGDLGGSGTDKL

SEQ ID NO: 14872 - protein, 13 aa, synthetic construct
ALGDLGGSAHKLI

SEQ ID NO: 14873 - protein, 13 aa, synthetic construct
ALGDLGGSAEQLI

SEQ ID NO: 14874 - protein, 13 aa, synthetic construct
ALGDLGGSAAKLI

SEQ ID NO: 14875 - protein, 13 aa, synthetic construct
ALGDLGGSAAHLI

SEQ ID NO: 14876 - protein, 14 aa, synthetic construct
ALGDLGGHGTDKLI

SEQ ID NO: 14877 - protein, 13 aa, synthetic construct
ALGDLGGEGTDKL

SEQ ID NO: 14878 - protein, 14 aa, synthetic construct
ALGDLGGDGTEKLI

SEQ ID NO: 14879 - protein, 14 aa, synthetic construct
ALGDLGGYAVGDSS

SEQ ID NO: 14880 - protein, 13 aa, synthetic construct
ALGDLGGYAYTAQ

SEQ ID NO: 14881 - protein, 13 aa, synthetic construct
ALGDLGIYTDNLI

SEQ ID NO: 14882 - protein, 14 aa, synthetic construct
ALGDLGGYGTDILV

SEQ ID NO: 14883 - protein, 13 aa, synthetic construct
ALGDLGIYTDKLT

SEQ ID NO: 14884 - protein, 13 aa, synthetic construct
ALGDLGIYTDKLN

SEQ ID NO: 14885 - protein, 13 aa, synthetic construct
ALGDLGIYTDKII

SEQ ID NO: 14886 - protein, 13 aa, synthetic construct
ALGDLGIYTDELI

SEQ ID NO: 14887 - protein, 12 aa, synthetic construct
ALGDLGITDNLI

SEQ ID NO: 14888 - protein, 8 aa, synthetic construct
ALGDLGIT

SEQ ID NO: 14889 - protein, 13 aa, synthetic construct
ALGDLGISTDKLI

SEQ ID NO: 14890 - protein, 13 aa, synthetic construct
ALGDLGIHTDKLI

SEQ ID NO: 14891 - protein, 13 aa, synthetic construct
ALGDLGIFTDKLI

SEQ ID NO: 14892 - protein, 13 aa, synthetic construct
ALGDLGICTDKLI

SEQ ID NO: 14893 - protein, 10 aa, synthetic construct
ALGDLGHQLI

SEQ ID NO: 14894 - protein, 14 aa, synthetic construct
ALGDLGGYWTDKLI

SEQ ID NO: 14895 - protein, 13 aa, synthetic construct
ALGDLGGYSYKLI

SEQ ID NO: 14896 - protein, 13 aa, synthetic construct
ALGDLGGYSDKLI

SEQ ID NO: 14897 - protein, 14 aa, synthetic construct
ALGDLGGYNTDKLI

SEQ ID NO: 14898 - protein, 14 aa, synthetic construct
ALGDLGGYGTVKLL

SEQ ID NO: 14899 - protein, 14 aa, synthetic construct
ALGDLGGYGTVKLI

SEQ ID NO: 14900 - protein, 14 aa, synthetic construct
ALGDLGGYGTDQLF

SEQ ID NO: 14901 - protein, 13 aa, synthetic construct
ALGDLGGYGTDKL

SEQ ID NO: 14902 - protein, 14 aa, synthetic construct
ALGDLGGYGTDKII

SEQ ID NO: 14903 - protein, 14 aa, synthetic construct
ALGDLGGYGTDKHI

SEQ ID NO: 14904 - protein, 14 aa, synthetic construct
ALGDHPLGVLYTDK

SEQ ID NO: 14905 - protein, 14 aa, synthetic construct
ALGDHGGCNTDQLI

SEQ ID NO: 14906 - protein, 13 aa, synthetic construct
ALGAPGGYNTDIL

SEQ ID NO: 14907 - protein, 14 aa, synthetic construct
ALGASFLGYTTHKL

SEQ ID NO: 14908 - protein, 13 aa, synthetic construct
ALGASFLGYSTDK

SEQ ID NO: 14909 - protein, 13 aa, synthetic construct
ALGASFLGYSETH

SEQ ID NO: 14910 - protein, 14 aa, synthetic construct
ALGASFLGYSADKL

SEQ ID NO: 14911 - protein, 14 aa, synthetic construct
ALGASFLGYPTDKL

SEQ ID NO: 14912 - protein, 14 aa, synthetic construct
ALGASFLGYNTDKL

SEQ ID NO: 14913 - protein, 14 aa, synthetic construct
ALGASFLGYGGTPI

SEQ ID NO: 14914 - protein, 14 aa, synthetic construct
ALGASFLGYETEKL

SEQ ID NO: 14915 - protein, 14 aa, synthetic construct
ALGASFLGYATVKL

SEQ ID NO: 14916 - protein, 14 aa, synthetic construct
ALGASFLGYATHKL

SEQ ID NO: 14917 - protein, 14 aa, synthetic construct
ALGASFLGYATEKV

SEQ ID NO: 14918 - protein, 14 aa, synthetic construct
ALGASFLGYATDIL

SEQ ID NO: 14919 - protein, 14 aa, synthetic construct
ALGASFLGYAIDKL

SEQ ID NO: 14920 - protein, 13 aa, synthetic construct
ALGASFLGYAETH

SEQ ID NO: 14921 - protein, 14 aa, synthetic construct
ALGASFLGSSTDQL

SEQ ID NO: 14922 - protein, 14 aa, synthetic construct
ALGASFLGSATEKL

SEQ ID NO: 14923 - protein, 14 aa, synthetic construct
ALGASFLGHATDKL

SEQ ID NO: 14924 - protein, 14 aa, synthetic construct
ALGASFLGDTNDKL

SEQ ID NO: 14925 - protein, 14 aa, synthetic construct
ALGASFLGDGGTPI

SEQ ID NO: 14926 - protein, 13 aa, synthetic construct
ALGASFLAYANDK

SEQ ID NO: 14927 - protein, 13 aa, synthetic construct
ALGASFIGYTSDK

SEQ ID NO: 14928 - protein, 14 aa, synthetic construct
ALGASFIGYATHKL

SEQ ID NO: 14929 - protein, 14 aa, synthetic construct
ALGASFLGYSTHKL

SEQ ID NO: 14930 - protein, 14 aa, synthetic construct
ALGASFLGYVTDKL

SEQ ID NO: 14931 - protein, 14 aa, synthetic construct
ALGASFHGYTTDKL

SEQ ID NO: 14932 - protein, 14 aa, synthetic construct
ALGASFLVYATDKL

SEQ ID NO: 14933 - protein, 14 aa, synthetic construct
ALGASYAPIPDKLI

SEQ ID NO: 14934 - protein, 14 aa, synthetic construct
ALGASYAPGPDKLI

SEQ ID NO: 14935 - protein, 10 aa, synthetic construct
ALGASYAPDR

SEQ ID NO: 14936 - protein, 14 aa, synthetic construct
ALGASYAPDPEKLI

SEQ ID NO: 14937 - protein, 13 aa, synthetic construct
ALGASYAPDPDKL

SEQ ID NO: 14938 - protein, 14 aa, synthetic construct
ALGASYAPDHDKLI

SEQ ID NO: 14939 - protein, 9 aa, synthetic construct
ALGASYAPD

SEQ ID NO: 14940 - protein, 14 aa, synthetic construct
ALGASYAHVPEKLI

SEQ ID NO: 14941 - protein, 14 aa, synthetic construct
ALGASSIGYATDKL

SEQ ID NO: 14942 - protein, 14 aa, synthetic construct
ALGASNAPVPDNLI

SEQ ID NO: 14943 - protein, 14 aa, synthetic construct
ALGASLLGYATEKL

SEQ ID NO: 14944 - protein, 14 aa, synthetic construct
ALGASHAPVPDKLI

SEQ ID NO: 14945 - protein, 14 aa, synthetic construct
ALGASFVGYSTDKL

SEQ ID NO: 14946 - protein, 12 aa, synthetic construct
ALGASFVGYATD

SEQ ID NO: 14947 - protein, 14 aa, synthetic construct
ALGASFTGYATDKL

SEQ ID NO: 14948 - protein, 14 aa, synthetic construct
ALGASFSGYATAKL

SEQ ID NO: 14949 - protein, 14 aa, synthetic construct
ALGASFRGYATDKL

SEQ ID NO: 14950 - protein, 14 aa, synthetic construct
ALGASFPGYADKLI

SEQ ID NO: 14951 - protein, 14 aa, synthetic construct
ALGASFNGYATHKL

SEQ ID NO: 14952 - protein, 14 aa, synthetic construct
ALGASFNGYATDKL

SEQ ID NO: 14953 - protein, 7 aa, synthetic construct
ALGASFN

SEQ ID NO: 14954 - protein, 14 aa, synthetic construct
ALGASFIAYATDKL

SEQ ID NO: 14955 - protein, 14 aa, synthetic construct
ALGASFHGYATDKL

SEQ ID NO: 14956 - protein, 14 aa, synthetic construct
ALGASYAPVHDKLI

SEQ ID NO: 14957 - protein, 12 aa, synthetic construct
ALGARGDSDKII

SEQ ID NO: 14958 - protein, 12 aa, synthetic construct
ALGARGDRENLI

SEQ ID NO: 14959 - protein, 12 aa, synthetic construct
ALGARGDRDILI

SEQ ID NO: 14960 - protein, 12 aa, synthetic construct
ALGAREDRDKLI

SEQ ID NO: 14961 - protein, 11 aa, synthetic construct
ALGAPYWDKLT

SEQ ID NO: 14962 - protein, 11 aa, synthetic construct
ALGAPYWAKLI

SEQ ID NO: 14963 - protein, 14 aa, synthetic construct
ALGAPYVLGARRKL

SEQ ID NO: 14964 - protein, 14 aa, synthetic construct
ALGAPYQEDGTDKL

SEQ ID NO: 14965 - protein, 14 aa, synthetic construct
ALGAPYAPVPEKLI

SEQ ID NO: 14966 - protein, 14 aa, synthetic construct
ALGAPYAPVPATLI

SEQ ID NO: 14967 - protein, 14 aa, synthetic construct
ALGAPVLGASSTDK

SEQ ID NO: 14968 - protein, 14 aa, synthetic construct
ALGAPSYWGIHTDK

SEQ ID NO: 14969 - protein, 14 aa, synthetic construct
ALGAPSYGISDTLI

SEQ ID NO: 14970 - protein, 14 aa, synthetic construct
ALGAPSYGISDKLI

SEQ ID NO: 14971 - protein, 11 aa, synthetic construct
ALGAPSWDKLI

SEQ ID NO: 14972 - protein, 14 aa, synthetic construct
ALGAPLLLGDTIDK

SEQ ID NO: 14973 - protein, 14 aa, synthetic construct
ALGAPGGYTTDKLI

SEQ ID NO: 14974 - protein, 13 aa, synthetic construct
ALGAPGGYTEKLI

SEQ ID NO: 14975 - protein, 13 aa, synthetic construct
ALGAPGGYTDQLI

SEQ ID NO: 14976 - protein, 13 aa, synthetic construct
ALGAPGGYSDKLI

SEQ ID NO: 14977 - protein, 14 aa, synthetic construct
ALGAPGGYNTEKLI

SEQ ID NO: 14978 - protein, 14 aa, synthetic construct
ALGAPGGYNTDTLI

SEQ ID NO: 14979 - protein, 12 aa, synthetic construct
ALGARGDSANLI

SEQ ID NO: 14980 - protein, 12 aa, synthetic construct
ALGARGDSDKLN

SEQ ID NO: 14981 - protein, 14 aa, synthetic construct
ALGASFDGYETHKL

SEQ ID NO: 14982 - protein, 12 aa, synthetic construct
ALGARGDSDKRI

SEQ ID NO: 14983 - protein, 14 aa, synthetic construct
ALGASFDGYATDKL

SEQ ID NO: 14984 - protein, 14 aa, synthetic construct
ALGASDAPVPEKLI

SEQ ID NO: 14985 - protein, 14 aa, synthetic construct
ALGASDAPVPDKVI

SEQ ID NO: 14986 - protein, 14 aa, synthetic construct
ALGASDAPVPDKLF

SEQ ID NO: 14987 - protein, 13 aa, synthetic construct
ALGASDAPVPDKL

SEQ ID NO: 14988 - protein, 8 aa, synthetic construct
ALGASCSG

SEQ ID NO: 14989 - protein, 14 aa, synthetic construct
ALGASCLGYATDQL

SEQ ID NO: 14990 - protein, 13 aa, synthetic construct
ALGASCLGYASDK

SEQ ID NO: 14991 - protein, 14 aa, synthetic construct
ALGASCLEYAPDKL

SEQ ID NO: 14992 - protein, 13 aa, synthetic construct
ALGASCLAYATDK

SEQ ID NO: 14993 - protein, 14 aa, synthetic construct
ALGASAAPVPEILF

SEQ ID NO: 14994 - protein, 11 aa, synthetic construct
ALGARYTDKLI

SEQ ID NO: 14995 - protein, 14 aa, synthetic construct
ALGARSVVGARSKL

SEQ ID NO: 14996 - protein, 12 aa, synthetic construct
ALGARRITEQLN

SEQ ID NO: 14997 - protein, 12 aa, synthetic construct
ALGARGLTDKLI

SEQ ID NO: 14998 - protein, 12 aa, synthetic construct
ALGARGITEKLI

SEQ ID NO: 14999 - protein, 12 aa, synthetic construct
ALGARGITDQLI

SEQ ID NO: 15000 - protein, 13 aa, synthetic construct
ALGARGGYTDKLI

SEQ ID NO: 15001 - protein, 13 aa, synthetic construct
ALGARGDTGDKLS

SEQ ID NO: 15002 - protein, 12 aa, synthetic construct
ALGARGDTDTLI

SEQ ID NO: 15003 - protein, 12 aa, synthetic construct
ALGARGDSETLI

SEQ ID NO: 15004 - protein, 14 aa, synthetic construct
ALGASYAPVADKLI

SEQ ID NO: 15005 - protein, 13 aa, synthetic construct
ALGASYAPVHDKV

SEQ ID NO: 15006 - protein, 11 aa, synthetic construct
ALGDGGTDKLI

SEQ ID NO: 15007 - protein, 11 aa, synthetic construct
ALGDEASNKLI

SEQ ID NO: 15008 - protein, 11 aa, synthetic construct
ALGDCLYETSW

SEQ ID NO: 15009 - protein, 8 aa, synthetic construct
ALGDASVQ

SEQ ID NO: 15010 - protein, 7 aa, synthetic construct
ALGDAGM

SEQ ID NO: 15011 - protein, 14 aa, synthetic construct
ALGDAGGYNTDKLI

SEQ ID NO: 15012 - protein, 14 aa, synthetic construct
ALGAYFIGYSTDKL

SEQ ID NO: 15013 - protein, 12 aa, synthetic construct
ALGAWGINDKLI

SEQ ID NO: 15014 - protein, 8 aa, synthetic construct
ALGAVYWG

SEQ ID NO: 15015 - protein, 11 aa, synthetic construct
ALGAVYSEKLI

SEQ ID NO: 15016 - protein, 12 aa, synthetic construct
ALGAVRATDKRI

SEQ ID NO: 15017 - protein, 6 aa, synthetic construct
ALGAVN

SEQ ID NO: 15018 - protein, 11 aa, synthetic construct
ALGAVGVLKLM

SEQ ID NO: 15019 - protein, 13 aa, synthetic construct
ALGAVGLYSYTLM

SEQ ID NO: 15020 - protein, 13 aa, synthetic construct
ALGAVGGYADTLI

SEQ ID NO: 15021 - protein, 14 aa, synthetic construct
ALGAVGGSGTDTLI

SEQ ID NO: 15022 - protein, 14 aa, synthetic construct
ALGAVGERDVTAQL

SEQ ID NO: 15023 - protein, 13 aa, synthetic construct
ALGAVGDTGEKVI

SEQ ID NO: 15024 - protein, 13 aa, synthetic construct
ALGAVGDTGDRLI

SEQ ID NO: 15025 - protein, 9 aa, synthetic construct
ALGAVGDSS

SEQ ID NO: 15026 - protein, 9 aa, synthetic construct
ALGAVGDIN

SEQ ID NO: 15027 - protein, 11 aa, synthetic construct
ALGAVGAHQVF

SEQ ID NO: 15028 - protein, 13 aa, synthetic construct
ALGAVGADTHKLI

SEQ ID NO: 15029 - protein, 14 aa, synthetic construct
ALGDDTGGYTDKLI

SEQ ID NO: 15030 - protein, 13 aa, synthetic construct
ALGDEDWGRRGLI

SEQ ID NO: 15031 - protein, 13 aa, synthetic construct
ALGAVGADTDKLI

SEQ ID NO: 15032 - protein, 13 aa, synthetic construct
ALGDEGGYADKLI

SEQ ID NO: 15033 - protein, 12 aa, synthetic construct
ALGDGGITDQLI

SEQ ID NO: 15034 - protein, 11 aa, synthetic construct
ALGDGGETKLN

SEQ ID NO: 15035 - protein, 13 aa, synthetic construct
ALGDGGDTGDKLI

SEQ ID NO: 15036 - protein, 11 aa, synthetic construct
ALGDGGDNKLI

SEQ ID NO: 15037 - protein, 11 aa, synthetic construct
ALGDGGDHKLI

SEQ ID NO: 15038 - protein, 6 aa, synthetic construct
ALGDFL

SEQ ID NO: 15039 - protein, 13 aa, synthetic construct
ALGDFGGYAHHII

SEQ ID NO: 15040 - protein, 14 aa, synthetic construct
ALGDETRGYTEKLI

SEQ ID NO: 15041 - protein, 14 aa, synthetic construct
ALGDETGVYTYKLI

SEQ ID NO: 15042 - protein, 14 aa, synthetic construct
ALGDETGVYTAQLI

SEQ ID NO: 15043 - protein, 14 aa, synthetic construct
ALGDETGGYTVKLI

SEQ ID NO: 15044 - protein, 14 aa, synthetic construct
ALGDETGGYTETLI

SEQ ID NO: 15045 - protein, 14 aa, synthetic construct
ALGDETGGYTDTLI

SEQ ID NO: 15046 - protein, 14 aa, synthetic construct
ALGDETGGYTDRLI

SEQ ID NO: 15047 - protein, 14 aa, synthetic construct
ALGDETGGYTDNRI

SEQ ID NO: 15048 - protein, 14 aa, synthetic construct
ALGDETGGYTDKII

SEQ ID NO: 15049 - protein, 14 aa, synthetic construct
ALGDETGGYADKLI

SEQ ID NO: 15050 - protein, 11 aa, synthetic construct
ALGDETGGCTP

SEQ ID NO: 15051 - protein, 14 aa, synthetic construct
ALGDETGGCTDKLI

SEQ ID NO: 15052 - protein, 14 aa, synthetic construct
ALGDETGDTPLNSS

SEQ ID NO: 15053 - protein, 14 aa, synthetic construct
ALGDEGGYGTAKLI

SEQ ID NO: 15054 - protein, 13 aa, synthetic construct
ALGAVGADTDTLI

SEQ ID NO: 15055 - protein, 10 aa, synthetic construct
ALGAVDYVRL

SEQ ID NO: 15056 - protein, 14 aa, synthetic construct
ALGASYAPVLDKLI

SEQ ID NO: 15057 - protein, 14 aa, synthetic construct
ALGASYETVPDKLI

SEQ ID NO: 15058 - protein, 14 aa, synthetic construct
ALGASYEPVPYKLI

SEQ ID NO: 15059 - protein, 14 aa, synthetic construct
ALGASYEPVPEKLI

SEQ ID NO: 15060 - protein, 14 aa, synthetic construct
ALGASYEPFPDKLI

SEQ ID NO: 15061 - protein, 14 aa, synthetic construct
ALGASYASVPDKLI

SEQ ID NO: 15062 - protein, 14 aa, synthetic construct
ALGASYAPVTDKII

SEQ ID NO: 15063 - protein, 14 aa, synthetic construct
ALGASYAPVRDKLI

SEQ ID NO: 15064 - protein, 14 aa, synthetic construct
ALGASYAPVPVKLF

SEQ ID NO: 15065 - protein, 14 aa, synthetic construct
ALGASYAPVPQKLI

SEQ ID NO: 15066 - protein, 14 aa, synthetic construct
ALGASYAPVPGQLI

SEQ ID NO: 15067 - protein, 13 aa, synthetic construct
ALGASYAPVPEKV

SEQ ID NO: 15068 - protein, 14 aa, synthetic construct
ALGASYAPVPEKLF

SEQ ID NO: 15069 - protein, 14 aa, synthetic construct
ALGASYAPVPEHLI

SEQ ID NO: 15070 - protein, 14 aa, synthetic construct
ALGASYAPVPDTLT

SEQ ID NO: 15071 - protein, 13 aa, synthetic construct
ALGASYAPVPDTH

SEQ ID NO: 15072 - protein, 12 aa, synthetic construct
ALGASYAPVPDQ

SEQ ID NO: 15073 - protein, 14 aa, synthetic construct
ALGASYAPVPDLII

SEQ ID NO: 15074 - protein, 14 aa, synthetic construct
ALGASYAPVPDKVI

SEQ ID NO: 15075 - protein, 14 aa, synthetic construct
ALGASYAPVPDKVF

SEQ ID NO: 15076 - protein, 13 aa, synthetic construct
ALGASYAPVPDKI

SEQ ID NO: 15077 - protein, 14 aa, synthetic construct
ALGASYAPVPDDLI

SEQ ID NO: 15078 - protein, 14 aa, synthetic construct
ALGASYAPVPATLI

SEQ ID NO: 15079 - protein, 14 aa, synthetic construct
ALGASYEPVTDQLI

SEQ ID NO: 15080 - protein, 14 aa, synthetic construct
ALGASYGPVPDKLI

SEQ ID NO: 15081 - protein, 14 aa, synthetic construct
ALGATYLGYVTDKL

SEQ ID NO: 15082 - protein, 14 aa, synthetic construct
ALGASYGPVPDTLI

SEQ ID NO: 15083 - protein, 14 aa, synthetic construct
ALGATYAPVPDKLI

SEQ ID NO: 15084 - protein, 14 aa, synthetic construct
ALGATVVGASYTDK

SEQ ID NO: 15085 - protein, 14 aa, synthetic construct
ALGATVLGYATDKL

SEQ ID NO: 15086 - protein, 14 aa, synthetic construct
ALGATSYGISDKLI

SEQ ID NO: 15087 - protein, 6 aa, synthetic construct
ALGATS

SEQ ID NO: 15088 - protein, 13 aa, synthetic construct
ALGATGGYTDKLN

SEQ ID NO: 15089 - protein, 11 aa, synthetic construct
ALGATFLVYAT

SEQ ID NO: 15090 - protein, 14 aa, synthetic construct
ALGATFIGYATDKL

SEQ ID NO: 15091 - protein, 7 aa, synthetic construct
ALGATFI

SEQ ID NO: 15092 - protein, 10 aa, synthetic construct
ALGATEKLNS

SEQ ID NO: 15093 - protein, 14 aa, synthetic construct
ALGASYVPVPEKLI

SEQ ID NO: 15094 - protein, 14 aa, synthetic construct
ALGASYVPVPDKLI

SEQ ID NO: 15095 - protein, 11 aa, synthetic construct
ALGASYTDKLI

SEQ ID NO: 15096 - protein, 14 aa, synthetic construct
ALGASYSPVPEKLI

SEQ ID NO: 15097 - protein, 14 aa, synthetic construct
ALGASYQPVPDKLI

SEQ ID NO: 15098 - protein, 14 aa, synthetic construct
ALGASYQEDGTDKL

SEQ ID NO: 15099 - protein, 14 aa, synthetic construct
ALGASYPPVPDKLI

SEQ ID NO: 15100 - protein, 14 aa, synthetic construct
ALGASYLGYATHKL

SEQ ID NO: 15101 - protein, 14 aa, synthetic construct
ALGASYIGYETDKL

SEQ ID NO: 15102 - protein, 13 aa, synthetic construct
ALGASYIGYETDK

SEQ ID NO: 15103 - protein, 14 aa, synthetic construct
ALGASYIGYATDKL

SEQ ID NO: 15104 - protein, 13 aa, synthetic construct
ALGELGDTGDKLD

SEQ ID NO: 15105 - protein, 13 aa, synthetic construct
ALGELGDTGDKLL

SEQ ID NO: 15106 - protein, 13 aa, synthetic construct
ALGELGDTGDKLM

SEQ ID NO: 15107 - protein, 14 aa, synthetic construct
ALGEPVLGASYADK

SEQ ID NO: 15108 - protein, 14 aa, synthetic construct
ALGEPVLGDTPTPI

SEQ ID NO: 15109 - protein, 14 aa, synthetic construct
ALGEPVLGDTNDKL

SEQ ID NO: 15110 - protein, 14 aa, synthetic construct
ALGEPVLGDTIDKL

SEQ ID NO: 15111 - protein, 14 aa, synthetic construct
ALGEPVLGDTGPIN

SEQ ID NO: 15112 - protein, 14 aa, synthetic construct
ALGEPVLGDTEKLI

SEQ ID NO: 15113 - protein, 14 aa, synthetic construct
ALGEPVLGDTDKLI

SEQ ID NO: 15114 - protein, 14 aa, synthetic construct
ALGEPVLGDRALTA

SEQ ID NO: 15115 - protein, 14 aa, synthetic construct
ALGEPVLGDGGTDK

SEQ ID NO: 15116 - protein, 14 aa, synthetic construct
ADGDPSYLGIHTDK

SEQ ID NO: 15117 - protein, 12 aa, synthetic construct
ALGEPVLGASYT

SEQ ID NO: 15118 - protein, 14 aa, synthetic construct
ALGEPVLGASSTYK

SEQ ID NO: 15119 - protein, 13 aa, synthetic construct
ALGELGDTGDKVI

SEQ ID NO: 15120 - protein, 14 aa, synthetic construct
ALGEPVLGASSTDE

SEQ ID NO: 15121 - protein, 13 aa, synthetic construct
ALGEPVLGASCTD

SEQ ID NO: 15122 - protein, 14 aa, synthetic construct
ALGEPVLGARSKLI

SEQ ID NO: 15123 - protein, 14 aa, synthetic construct
ALGEPVLGALYTDK

SEQ ID NO: 15124 - protein, 14 aa, synthetic construct
ALGEPVLGAAYTDK

SEQ ID NO: 15125 - protein, 14 aa, synthetic construct
ALGEPVLEATYTDK

SEQ ID NO: 15126 - protein, 14 aa, synthetic construct
ALGEPVGYNTDKLI

SEQ ID NO: 15127 - protein, 13 aa, synthetic construct
ALGEPTYWGIHTD

SEQ ID NO: 15128 - protein, 14 aa, synthetic construct
ALGEPTYSGITDKL

SEQ ID NO: 15129 - protein, 14 aa, synthetic construct
ALGEPTYRGLHTDK

SEQ ID NO: 15130 - protein, 14 aa, synthetic construct
ALGEPVLGDTRKLI

SEQ ID NO: 15131 - protein, 14 aa, synthetic construct
ALGEPVLGDTSTPI

SEQ ID NO: 15132 - protein, 14 aa, synthetic construct
ALGEPVLGDTTPIN

SEQ ID NO: 15133 - protein, 14 aa, synthetic construct
ALGEPVLGGSFDST

SEQ ID NO: 15134 - protein, 14 aa, synthetic construct
ALGEPYVLEARRKL

SEQ ID NO: 15135 - protein, 12 aa, synthetic construct
ALGEPYVLASTT

SEQ ID NO: 15136 - protein, 11 aa, synthetic construct
ALGEPYTYKLN

SEQ ID NO: 15137 - protein, 11 aa, synthetic construct
ALGEPYTDKLV

SEQ ID NO: 15138 - protein, 14 aa, synthetic construct
ALGEPYREDGTDKL

SEQ ID NO: 15139 - protein, 14 aa, synthetic construct
ALGEPYQEDCTDKL

SEQ ID NO: 15140 - protein, 14 aa, synthetic construct
ALGEPYLQGSRSKL

SEQ ID NO: 15141 - protein, 14 aa, synthetic construct
ALGEPYLLGSRSKL

SEQ ID NO: 15142 - protein, 14 aa, synthetic construct
ALGEPYLLGARSTH

SEQ ID NO: 15143 - protein, 14 aa, synthetic construct
ALGEPYILGARSKL

SEQ ID NO: 15144 - protein, 14 aa, synthetic construct
ALGEPYFLGARSKL

SEQ ID NO: 15145 - protein, 9 aa, synthetic construct
ALGEPYELG

SEQ ID NO: 15146 - protein, 14 aa, synthetic construct
ALGEPWTGDTETLI

SEQ ID NO: 15147 - protein, 12 aa, synthetic construct
ALGEPWTADTDK

SEQ ID NO: 15148 - protein, 11 aa, synthetic construct
ALGEPWDIDKL

SEQ ID NO: 15149 - protein, 14 aa, synthetic construct
ALGEPVVGASYTDK

SEQ ID NO: 15150 - protein, 14 aa, synthetic construct
ALGEPVQGASNTDK

SEQ ID NO: 15151 - protein, 14 aa, synthetic construct
ALGEPVMGASYTDE

SEQ ID NO: 15152 - protein, 14 aa, synthetic construct
ALGEPVLWASYTDK

SEQ ID NO: 15153 - protein, 14 aa, synthetic construct
ALGEPVLLGDTLDK

SEQ ID NO: 15154 - protein, 14 aa, synthetic construct
ALGEPVLGIPINSS

SEQ ID NO: 15155 - protein, 12 aa, synthetic construct
ALGEPTYGGIHT

SEQ ID NO: 15156 - protein, 14 aa, synthetic construct
ALGEPSYWWIHSDK

SEQ ID NO: 15157 - protein, 14 aa, synthetic construct
ALGEPSYWRVHTDK

SEQ ID NO: 15158 - protein, 14 aa, synthetic construct
ALGEPSYGISYKLI

SEQ ID NO: 15159 - protein, 14 aa, synthetic construct
ALGEPSYGISDQLI

SEQ ID NO: 15160 - protein, 14 aa, synthetic construct
ALGEPSYGGIHTDK

SEQ ID NO: 15161 - protein, 13 aa, synthetic construct
ALGEPSYGGIHTD

SEQ ID NO: 15162 - protein, 12 aa, synthetic construct
ALGEPSYCGIHT

SEQ ID NO: 15163 - protein, 14 aa, synthetic construct
ALGEPSYAGIHTDK

SEQ ID NO: 15164 - protein, 14 aa, synthetic construct
ALGEPSVVGARSKL

SEQ ID NO: 15165 - protein, 8 aa, synthetic construct
ALGEPSVV

SEQ ID NO: 15166 - protein, 14 aa, synthetic construct
ALGEPSVRGARSKL

SEQ ID NO: 15167 - protein, 13 aa, synthetic construct
ALGEPSVLRARRN

SEQ ID NO: 15168 - protein, 14 aa, synthetic construct
ALGEPSVLGDGGTD

SEQ ID NO: 15169 - protein, 14 aa, synthetic construct
ALGEPSVLGARRKL

SEQ ID NO: 15170 - protein, 13 aa, synthetic construct
ALGEPSVLGARRK

SEQ ID NO: 15171 - protein, 14 aa, synthetic construct
ALGEPSTWGYADKL

SEQ ID NO: 15172 - protein, 14 aa, synthetic construct
ALGEPSTRGYADKL

SEQ ID NO: 15173 - protein, 14 aa, synthetic construct
ALGEPSTGRYADKL

SEQ ID NO: 15174 - protein, 12 aa, synthetic construct
ALGEPSTGINSS

SEQ ID NO: 15175 - protein, 14 aa, synthetic construct
ALGEPSTGGYTPIN

SEQ ID NO: 15176 - protein, 14 aa, synthetic construct
ALGEPSTGGYSETH

SEQ ID NO: 15177 - protein, 14 aa, synthetic construct
ALGEPSTGGYGDKL

SEQ ID NO: 15178 - protein, 14 aa, synthetic construct
ALGEPSTGGYAVKL

SEQ ID NO: 15179 - protein, 14 aa, synthetic construct
ALGEPSTGGYADQL

SEQ ID NO: 15180 - protein, 14 aa, synthetic construct
ALGEPSYGISEQLI

SEQ ID NO: 15181 - protein, 8 aa, synthetic construct
ALGEPSYS

SEQ ID NO: 15182 - protein, 13 aa, synthetic construct
ALGEPSYWGVHTD

SEQ ID NO: 15183 - protein, 14 aa, synthetic construct
ALGEPSYWGIHIDK

SEQ ID NO: 15184 - protein, 14 aa, synthetic construct
ALGEPSYWGRYTDK

SEQ ID NO: 15185 - protein, 13 aa, synthetic construct
ALGEPSYWGRYTD

SEQ ID NO: 15186 - protein, 14 aa, synthetic construct
ALGEPSYWGRSTDK

SEQ ID NO: 15187 - protein, 14 aa, synthetic construct
ALGEPSYWGRQTDK

SEQ ID NO: 15188 - protein, 14 aa, synthetic construct
ALGEPSYWGRHTDK

SEQ ID NO: 15189 - protein, 14 aa, synthetic construct
ALGEPSYWGRETDK

SEQ ID NO: 15190 - protein, 13 aa, synthetic construct
ALGEPSYWGPRTP

SEQ ID NO: 15191 - protein, 13 aa, synthetic construct
ALGEPSYWGMHTD

SEQ ID NO: 15192 - protein, 14 aa, synthetic construct
ALGEPSYWGLYTDK

SEQ ID NO: 15193 - protein, 14 aa, synthetic construct
ALGEPSYWGLTPIN

SEQ ID NO: 15194 - protein, 12 aa, synthetic construct
ALGEPSYWGKHT

SEQ ID NO: 15195 - protein, 14 aa, synthetic construct
ALGEPSYWGITYKL

SEQ ID NO: 15196 - protein, 14 aa, synthetic construct
ALGEPSYWGITDKL

SEQ ID NO: 15197 - protein, 14 aa, synthetic construct
ALGEPSYWGIRVHR

SEQ ID NO: 15198 - protein, 14 aa, synthetic construct
ALGEPSYWGIRPPI

SEQ ID NO: 15199 - protein, 13 aa, synthetic construct
ALGEPSYWGINTD

SEQ ID NO: 15200 - protein, 14 aa, synthetic construct
ALGEPSYWGILTDK

SEQ ID NO: 15201 - protein, 14 aa, synthetic construct
ALGEPSYWGILGNS

SEQ ID NO: 15202 - protein, 14 aa, synthetic construct
ALGEPSYWGIKPDK

SEQ ID NO: 15203 - protein, 12 aa, synthetic construct
ALGEPSYWGIHT

SEQ ID NO: 15204 - protein, 14 aa, synthetic construct
ALGEPSYWGIHSDK

SEQ ID NO: 15205 - protein, 13 aa, synthetic construct
ALGEPYVLEAYTD

SEQ ID NO: 15206 - protein, 14 aa, synthetic construct
ALGEPYVLGADTDK

SEQ ID NO: 15207 - protein, 14 aa, synthetic construct
ALGEPYVLGADTEK

SEQ ID NO: 15208 - protein, 14 aa, synthetic construct
ALGERGDTPTPINS

SEQ ID NO: 15209 - protein, 12 aa, synthetic construct
ALGERGDSNKLI

SEQ ID NO: 15210 - protein, 12 aa, synthetic construct
ALGERGDSENIL

SEQ ID NO: 15211 - protein, 12 aa, synthetic construct
ALGERGDSEKNI

SEQ ID NO: 15212 - protein, 12 aa, synthetic construct
ALGERGDSEKLN

SEQ ID NO: 15213 - protein, 12 aa, synthetic construct
ALGERGDSDQLN

SEQ ID NO: 15214 - protein, 12 aa, synthetic construct
ALGERGDSDNIN

SEQ ID NO: 15215 - protein, 12 aa, synthetic construct
ALGERGDSDLLI

SEQ ID NO: 15216 - protein, 12 aa, synthetic construct
ALGERGDSDKNI

SEQ ID NO: 15217 - protein, 12 aa, synthetic construct
ALGERGDSDKLR

SEQ ID NO: 15218 - protein, 12 aa, synthetic construct
ALGERGDSDKLK

SEQ ID NO: 15219 - protein, 12 aa, synthetic construct
ALGERGDSDKLD

SEQ ID NO: 15220 - protein, 12 aa, synthetic construct
ALGERGDSDKIT

SEQ ID NO: 15221 - protein, 12 aa, synthetic construct
ALGERGDSDHLI

SEQ ID NO: 15222 - protein, 12 aa, synthetic construct
ALGERGDSDHII

SEQ ID NO: 15223 - protein, 12 aa, synthetic construct
ALGERGDSDELI

SEQ ID NO: 15224 - protein, 12 aa, synthetic construct
ALGERGDSDDLI

SEQ ID NO: 15225 - protein, 12 aa, synthetic construct
ALGERGDSAQLI

SEQ ID NO: 15226 - protein, 12 aa, synthetic construct
ALGERGDREKLI

SEQ ID NO: 15227 - protein, 12 aa, synthetic construct
ALGERGDRDQLI

SEQ ID NO: 15228 - protein, 12 aa, synthetic construct
ALGERGDRDNII

SEQ ID NO: 15229 - protein, 12 aa, synthetic construct
ALGERGDRDKLS

SEQ ID NO: 15230 - protein, 13 aa, synthetic construct
ALGERGDTGDKLI

SEQ ID NO: 15231 - protein, 14 aa, synthetic construct
ALGERGDTQLLGRP

SEQ ID NO: 15232 - protein, 12 aa, synthetic construct
ALGERGASGTLI

SEQ ID NO: 15233 - protein, 12 aa, synthetic construct
ALGERGESAKLI

SEQ ID NO: 15234 - protein, 12 aa, synthetic construct
ALGERGISEKLF

SEQ ID NO: 15235 - protein, 12 aa, synthetic construct
ALGERGISDKLI

SEQ ID NO: 15236 - protein, 13 aa, synthetic construct
ALGERGIRTINSS

SEQ ID NO: 15237 - protein, 14 aa, synthetic construct
ALGERGIRPPINSS

SEQ ID NO: 15238 - protein, 11 aa, synthetic construct
ALGERGIQINS

SEQ ID NO: 15239 - protein, 12 aa, synthetic construct
ALGERGIPDTLI

SEQ ID NO: 15240 - protein, 12 aa, synthetic construct
ALGERGIPDKLI

SEQ ID NO: 15241 - protein, 12 aa, synthetic construct
ALGERGIPDHLI

SEQ ID NO: 15242 - protein, 13 aa, synthetic construct
ALGERGIPAINSS

SEQ ID NO: 15243 - protein, 12 aa, synthetic construct
ALGERGINDKLN

SEQ ID NO: 15244 - protein, 12 aa, synthetic construct
ALGERGINDKLI

SEQ ID NO: 15245 - protein, 14 aa, synthetic construct
ALGERGILSSWDTR

SEQ ID NO: 15246 - protein, 12 aa, synthetic construct
ALGERGIIDKLI

SEQ ID NO: 15247 - protein, 9 aa, synthetic construct
ALGERGIHR

SEQ ID NO: 15248 - protein, 12 aa, synthetic construct
ALGERGIAGCRI

SEQ ID NO: 15249 - protein, 12 aa, synthetic construct
ALGERGIADILI

SEQ ID NO: 15250 - protein, 14 aa, synthetic construct
ALGERGGYNTEKLF

SEQ ID NO: 15251 - protein, 13 aa, synthetic construct
ALGERGGDADKLI

SEQ ID NO: 15252 - protein, 12 aa, synthetic construct
ALGERGESDTVI

SEQ ID NO: 15253 - protein, 12 aa, synthetic construct
ALGERGESDNLI

SEQ ID NO: 15254 - protein, 12 aa, synthetic construct
ALGERGESDKLN

SEQ ID NO: 15255 - protein, 14 aa, synthetic construct
ALGERGASYTYKLI

SEQ ID NO: 15256 - protein, 12 aa, synthetic construct
ALGERGASDTLI

SEQ ID NO: 15257 - protein, 14 aa, synthetic construct
ALGEPYVLGARGKL

SEQ ID NO: 15258 - protein, 11 aa, synthetic construct
ALGEQLQGGNQ

SEQ ID NO: 15259 - protein, 12 aa, synthetic construct
ALGEQGITDKLI

SEQ ID NO: 15260 - protein, 13 aa, synthetic construct
ALGEQGGYTDKLI

SEQ ID NO: 15261 - protein, 14 aa, synthetic construct
ALGEQGGYHTEKLI

SEQ ID NO: 15262 - protein, 13 aa, synthetic construct
ALGEQGGYAYKLI

SEQ ID NO: 15263 - protein, 13 aa, synthetic construct
ALGEQGDTGDKLI

SEQ ID NO: 15264 - protein, 14 aa, synthetic construct
ALGEQGASYTYKLI

SEQ ID NO: 15265 - protein, 13 aa, synthetic construct
ALGEQAGYADTLI

SEQ ID NO: 15266 - protein, 14 aa, synthetic construct
ALGEPYVVGARRKL

SEQ ID NO: 15267 - protein, 13 aa, synthetic construct
ALGEPYVMGDKLI

SEQ ID NO: 15268 - protein, 14 aa, synthetic construct
ALGEPYVLRARSKL

SEQ ID NO: 15269 - protein, 14 aa, synthetic construct
ALGEPYVLGSQINS

SEQ ID NO: 15270 - protein, 14 aa, synthetic construct
ALGEPYVLGSPINS

SEQ ID NO: 15271 - protein, 12 aa, synthetic construct
ALGEPYVLGGHR

SEQ ID NO: 15272 - protein, 13 aa, synthetic construct
ALGEPYVLGEVHR

SEQ ID NO: 15273 - protein, 14 aa, synthetic construct
ALGEPYVLGDTQLL

SEQ ID NO: 15274 - protein, 13 aa, synthetic construct
ALGEPYVLGDRRK

SEQ ID NO: 15275 - protein, 14 aa, synthetic construct
ALGEPYVLGDRIKL

SEQ ID NO: 15276 - protein, 14 aa, synthetic construct
ALGEPYVLGDPDKL

SEQ ID NO: 15277 - protein, 14 aa, synthetic construct
ALGEPYVLGASSKL

SEQ ID NO: 15278 - protein, 13 aa, synthetic construct
ALGEPYVLGARRK

SEQ ID NO: 15279 - protein, 14 aa, synthetic construct
ALGEPYVLGARIKL

SEQ ID NO: 15280 - protein, 13 aa, synthetic construct
ALGEQGIYTDKLI

SEQ ID NO: 15281 - protein, 14 aa, synthetic construct
ALGEQPSYVFGDTD

SEQ ID NO: 15282 - protein, 12 aa, synthetic construct
ALGERGASDNLI

SEQ ID NO: 15283 - protein, 14 aa, synthetic construct
ALGEQPSYVLGDTD

SEQ ID NO: 15284 - protein, 12 aa, synthetic construct
ALGERGASDKHI

SEQ ID NO: 15285 - protein, 12 aa, synthetic construct
ALGERGAPINSS

SEQ ID NO: 15286 - protein, 13 aa, synthetic construct
ALGERGADTDQLN

SEQ ID NO: 15287 - protein, 14 aa, synthetic construct
ALGERFYYCGLTPI

SEQ ID NO: 15288 - protein, 8 aa, synthetic construct
ALGERFLR

SEQ ID NO: 15289 - protein, 12 aa, synthetic construct
ALGEREITDQLI

SEQ ID NO: 15290 - protein, 12 aa, synthetic construct
ALGEREITDKLI

SEQ ID NO: 15291 - protein, 12 aa, synthetic construct
ALGEREDSEKLI

SEQ ID NO: 15292 - protein, 12 aa, synthetic construct
ALGEREDSDKLI

SEQ ID NO: 15293 - protein, 13 aa, synthetic construct
ALGEREALTAQHF

SEQ ID NO: 15294 - protein, 11 aa, synthetic construct
ALGEREALTAQ

SEQ ID NO: 15295 - protein, 14 aa, synthetic construct
ALGERCTGDTDKLI

SEQ ID NO: 15296 - protein, 14 aa, synthetic construct
ALGERCTGDNDQLI

SEQ ID NO: 15297 - protein, 10 aa, synthetic construct
ALGERAKNEY

SEQ ID NO: 15298 - protein, 12 aa, synthetic construct
ALGERAHSDQHI

SEQ ID NO: 15299 - protein, 12 aa, synthetic construct
ALGERADTDKLI

SEQ ID NO: 15300 - protein, 14 aa, synthetic construct
ALGEQWQLAFTAQL

SEQ ID NO: 15301 - protein, 14 aa, synthetic construct
ALGEQTSWGLDTEK

SEQ ID NO: 15302 - protein, 14 aa, synthetic construct
ALGEQSTGGYSDKL

SEQ ID NO: 15303 - protein, 12 aa, synthetic construct
ALGEQRNLDKHI

SEQ ID NO: 15304 - protein, 14 aa, synthetic construct
ALGEQPSYVLGYTD

SEQ ID NO: 15305 - protein, 14 aa, synthetic construct
ALGEPSTGGSNTDK

SEQ ID NO: 15306 - protein, 14 aa, synthetic construct
ALGEPSTGGSAVKL

SEQ ID NO: 15307 - protein, 13 aa, synthetic construct
ALGEPSTGGLGLI

SEQ ID NO: 15308 - protein, 14 aa, synthetic construct
ALGEPLLLGARSKL

SEQ ID NO: 15309 - protein, 14 aa, synthetic construct
ALGEPLLLEDTIDK

SEQ ID NO: 15310 - protein, 14 aa, synthetic construct
ALGEPLLLADTIDK

SEQ ID NO: 15311 - protein, 14 aa, synthetic construct
ALGEPLLGASYTDK

SEQ ID NO: 15312 - protein, 8 aa, synthetic construct
ALGEPLLG

SEQ ID NO: 15313 - protein, 14 aa, synthetic construct
ALGEPLFRGETIDK

SEQ ID NO: 15314 - protein, 14 aa, synthetic construct
ALGEPLFLGDTLDK

SEQ ID NO: 15315 - protein, 14 aa, synthetic construct
ALGEPKRDTSTDKL

SEQ ID NO: 15316 - protein, 13 aa, synthetic construct
ALGEPITGAYADK

SEQ ID NO: 15317 - protein, 8 aa, synthetic construct
ALGEPITE

SEQ ID NO: 15318 - protein, 14 aa, synthetic construct
ALGEPILGATYTDK

SEQ ID NO: 15319 - protein, 14 aa, synthetic construct
ALGEPILGASYSDK

SEQ ID NO: 15320 - protein, 14 aa, synthetic construct
ALGEPHVLGARSKL

SEQ ID NO: 15321 - protein, 14 aa, synthetic construct
ALGEPHSYGLGDTD

SEQ ID NO: 15322 - protein, 14 aa, synthetic construct
ALGEPHPFLRRRGT

SEQ ID NO: 15323 - protein, 14 aa, synthetic construct
ALGEPHLLGDTIDK

SEQ ID NO: 15324 - protein, 14 aa, synthetic construct
ALGEPHLGVLYTDK

SEQ ID NO: 15325 - protein, 14 aa, synthetic construct
ALGEPGVYNTDQLI

SEQ ID NO: 15326 - protein, 14 aa, synthetic construct
ALGEPGVYNTDKLI

SEQ ID NO: 15327 - protein, 14 aa, synthetic construct
ALGEPGVTTPINSS

SEQ ID NO: 15328 - protein, 12 aa, synthetic construct
ALGEPGTTINSS

SEQ ID NO: 15329 - protein, 14 aa, synthetic construct
ALGEPGTGGYAYTD

SEQ ID NO: 15330 - protein, 14 aa, synthetic construct
ALGEPLLLGADTDK

SEQ ID NO: 15331 - protein, 14 aa, synthetic construct
ALGEPLLLGAWDSS

SEQ ID NO: 15332 - protein, 13 aa, synthetic construct
ALGEPGTGDTEKL

SEQ ID NO: 15333 - protein, 14 aa, synthetic construct
ALGEPLLLGDLIDK

SEQ ID NO: 15334 - protein, 12 aa, synthetic construct
ALGEPPPFLRRR

SEQ ID NO: 15335 - protein, 14 aa, synthetic construct
ALGEPPPFLRFGGH

SEQ ID NO: 15336 - protein, 14 aa, synthetic construct
ALGEPPLYWGLYTD

SEQ ID NO: 15337 - protein, 14 aa, synthetic construct
ALGEPPLGVPYTDK

SEQ ID NO: 15338 - protein, 14 aa, synthetic construct
ALGEPPLGVMYTDK

SEQ ID NO: 15339 - protein, 9 aa, synthetic construct
ALGEPPLGV

SEQ ID NO: 15340 - protein, 9 aa, synthetic construct
ALGEPPHFL

SEQ ID NO: 15341 - protein, 14 aa, synthetic construct
ALGEPPAGGLGATD

SEQ ID NO: 15342 - protein, 11 aa, synthetic construct
ALGEPPADELI

SEQ ID NO: 15343 - protein, 10 aa, synthetic construct
ALGEPNILGA

SEQ ID NO: 15344 - protein, 14 aa, synthetic construct
ALGEPLTGGYAYTD

SEQ ID NO: 15345 - protein, 10 aa, synthetic construct
ALGEPLLVGV

SEQ ID NO: 15346 - protein, 12 aa, synthetic construct
ALGEPLLRRETH

SEQ ID NO: 15347 - protein, 14 aa, synthetic construct
ALGEPLLRGDTIDK

SEQ ID NO: 15348 - protein, 10 aa, synthetic construct
ALGEPLLMVV

SEQ ID NO: 15349 - protein, 14 aa, synthetic construct
ALGEPLLLVETIDK

SEQ ID NO: 15350 - protein, 14 aa, synthetic construct
ALGEPLLLGVLYTD

SEQ ID NO: 15351 - protein, 14 aa, synthetic construct
ALGEPLLLGHTIDK

SEQ ID NO: 15352 - protein, 14 aa, synthetic construct
ALGEPLLLGDWDSS

SEQ ID NO: 15353 - protein, 14 aa, synthetic construct
ALGEPLLLGDTNDK

SEQ ID NO: 15354 - protein, 14 aa, synthetic construct
ALGEPLLLGDPRIN

SEQ ID NO: 15355 - protein, 14 aa, synthetic construct
ALGEPGTGGYADKL

SEQ ID NO: 15356 - protein, 14 aa, synthetic construct
ALGEPGTGDTDKVI

SEQ ID NO: 15357 - protein, 14 aa, synthetic construct
ALGEPPPFLRRRGT

SEQ ID NO: 15358 - protein, 13 aa, synthetic construct
ALGEPGGYNTEKI

SEQ ID NO: 15359 - protein, 14 aa, synthetic construct
ALGEPGGYNTDNSS

SEQ ID NO: 15360 - protein, 14 aa, synthetic construct
ALGEPGGYNTDNII

SEQ ID NO: 15361 - protein, 14 aa, synthetic construct
ALGEPGGYNTDNFI

SEQ ID NO: 15362 - protein, 14 aa, synthetic construct
ALGEPGGYNTDKLV

SEQ ID NO: 15363 - protein, 14 aa, synthetic construct
ALGEPGGYNTDKLL

SEQ ID NO: 15364 - protein, 14 aa, synthetic construct
ALGEPGGYNTDKIF

SEQ ID NO: 15365 - protein, 13 aa, synthetic construct
ALGEPGGYNTDKI

SEQ ID NO: 15366 - protein, 14 aa, synthetic construct
ALGEPGGYNTDKHI

SEQ ID NO: 15367 - protein, 12 aa, synthetic construct
ALGEPGGYNTDK

SEQ ID NO: 15368 - protein, 14 aa, synthetic construct
ALGEPGGYNTAQLI

SEQ ID NO: 15369 - protein, 14 aa, synthetic construct
ALGEPGGYNSDQLI

SEQ ID NO: 15370 - protein, 14 aa, synthetic construct
ALGEPGGYNSDILI

SEQ ID NO: 15371 - protein, 14 aa, synthetic construct
ALGEPGGYNADKLI

SEQ ID NO: 15372 - protein, 14 aa, synthetic construct
ALGEPGGYNAAKLI

SEQ ID NO: 15373 - protein, 14 aa, synthetic construct
ALGEPGGYKTDKLV

SEQ ID NO: 15374 - protein, 14 aa, synthetic construct
ALGEPGGYKNDKII

SEQ ID NO: 15375 - protein, 14 aa, synthetic construct
ALGEPGGYITDSLI

SEQ ID NO: 15376 - protein, 14 aa, synthetic construct
ALGEPGGYITDKLI

SEQ ID NO: 15377 - protein, 13 aa, synthetic construct
ALGEPGGYIDNII

SEQ ID NO: 15378 - protein, 13 aa, synthetic construct
ALGEPGGYGTDKL

SEQ ID NO: 15379 - protein, 13 aa, synthetic construct
ALGEPGGYGINSS

SEQ ID NO: 15380 - protein, 14 aa, synthetic construct
ALGEPGGYNTEILI

SEQ ID NO: 15381 - protein, 14 aa, synthetic construct
ALGEPGGYNTEKII

SEQ ID NO: 15382 - protein, 14 aa, synthetic construct
ALGEPGRYNTDKLI

SEQ ID NO: 15383 - protein, 14 aa, synthetic construct
ALGEPGGYNTENLI

SEQ ID NO: 15384 - protein, 14 aa, synthetic construct
ALGEPGPGGYADKL

SEQ ID NO: 15385 - protein, 13 aa, synthetic construct
ALGEPGPAETDKL

SEQ ID NO: 15386 - protein, 13 aa, synthetic construct
ALGEPGIYTDRLI

SEQ ID NO: 15387 - protein, 14 aa, synthetic construct
ALGEPGGYYTVKLI

SEQ ID NO: 15388 - protein, 13 aa, synthetic construct
ALGEPGGYTYNLI

SEQ ID NO: 15389 - protein, 13 aa, synthetic construct
ALGEPGGYTVKLI

SEQ ID NO: 15390 - protein, 13 aa, synthetic construct
ALGEPGGYTDNLI

SEQ ID NO: 15391 - protein, 13 aa, synthetic construct
ALGEPGGYTDKLT

SEQ ID NO: 15392 - protein, 13 aa, synthetic construct
ALGEPGGYTDKLL

SEQ ID NO: 15393 - protein, 12 aa, synthetic construct
ALGEPGGYTDKL

SEQ ID NO: 15394 - protein, 13 aa, synthetic construct
ALGEPGGYTDKII

SEQ ID NO: 15395 - protein, 13 aa, synthetic construct
ALGEPGGYTDKHI

SEQ ID NO: 15396 - protein, 13 aa, synthetic construct
ALGEPGGYTDELI

SEQ ID NO: 15397 - protein, 13 aa, synthetic construct
ALGEPGGYTAKLI

SEQ ID NO: 15398 - protein, 14 aa, synthetic construct
ALGEPGGYSTDKLI

SEQ ID NO: 15399 - protein, 14 aa, synthetic construct
ALGEPGGYNTYNLI

SEQ ID NO: 15400 - protein, 13 aa, synthetic construct
ALGEPGGYNTYKL

SEQ ID NO: 15401 - protein, 14 aa, synthetic construct
ALGEPGGYNTSKLL

SEQ ID NO: 15402 - protein, 14 aa, synthetic construct
ALGEPGGYNTLQLI

SEQ ID NO: 15403 - protein, 14 aa, synthetic construct
ALGEPGGYNTHQLI

SEQ ID NO: 15404 - protein, 14 aa, synthetic construct
ALGEPGGYNTGKLI

SEQ ID NO: 15405 - protein, 14 aa, synthetic construct
ALGEPPPFLRRRGL

SEQ ID NO: 15406 - protein, 14 aa, synthetic construct
ALGEPPPFVRRRGT

SEQ ID NO: 15407 - protein, 14 aa, synthetic construct
ALGEPSTGGCAYTD

SEQ ID NO: 15408 - protein, 12 aa, synthetic construct
ALGEPSCWGIHT

SEQ ID NO: 15409 - protein, 14 aa, synthetic construct
ALGEPRWGPSTDKL

SEQ ID NO: 15410 - protein, 14 aa, synthetic construct
ALGEPRTWGYAYTD

SEQ ID NO: 15411 - protein, 14 aa, synthetic construct
ALGEPRTVGYSYTD

SEQ ID NO: 15412 - protein, 14 aa, synthetic construct
ALGEPRTVGYAYTD

SEQ ID NO: 15413 - protein, 14 aa, synthetic construct
ALGEPRTRGSAYTD

SEQ ID NO: 15414 - protein, 14 aa, synthetic construct
ALGEPRTGGYTYTD

SEQ ID NO: 15415 - protein, 14 aa, synthetic construct
ALGEPRTGGYTPIN

SEQ ID NO: 15416 - protein, 14 aa, synthetic construct
ALGEPRTGGYTDKL

SEQ ID NO: 15417 - protein, 14 aa, synthetic construct
ALGEPRTGGYSSTD

SEQ ID NO: 15418 - protein, 14 aa, synthetic construct
ALGEPRTGGYSDKL

SEQ ID NO: 15419 - protein, 14 aa, synthetic construct
ALGEPRTGGYPYTD

SEQ ID NO: 15420 - protein, 14 aa, synthetic construct
ALGEPRTGGYGTDK

SEQ ID NO: 15421 - protein, 14 aa, synthetic construct
ALGEPRTGGYGGTP

SEQ ID NO: 15422 - protein, 14 aa, synthetic construct
ALGEPRTGGYAHTD

SEQ ID NO: 15423 - protein, 14 aa, synthetic construct
ALGEPRTGGYAFTD

SEQ ID NO: 15424 - protein, 14 aa, synthetic construct
ALGEPRTGGYAETH

SEQ ID NO: 15425 - protein, 14 aa, synthetic construct
ALGEPRTGGYADTD

SEQ ID NO: 15426 - protein, 13 aa, synthetic construct
ALGEPRTGGYADK

SEQ ID NO: 15427 - protein, 14 aa, synthetic construct
ALGEPRTGGSSYTD

SEQ ID NO: 15428 - protein, 14 aa, synthetic construct
ALGEPRTGGRTPIN

SEQ ID NO: 15429 - protein, 14 aa, synthetic construct
ALGEPRTGGNAYTD

SEQ ID NO: 15430 - protein, 12 aa, synthetic construct
ALGEPRYTDKLI

SEQ ID NO: 15431 - protein, 14 aa, synthetic construct
ALGEPSDWGIHTDK

SEQ ID NO: 15432 - protein, 14 aa, synthetic construct
ALGEPRTGAVGDSS

SEQ ID NO: 15433 - protein, 14 aa, synthetic construct
ALGEPSERAPRRQL

SEQ ID NO: 15434 - protein, 14 aa, synthetic construct
ALGEPSTGDTRRNS

SEQ ID NO: 15435 - protein, 14 aa, synthetic construct
ALGEPSTGDTRINS

SEQ ID NO: 15436 - protein, 14 aa, synthetic construct
ALGEPSTGDTEKLI

SEQ ID NO: 15437 - protein, 14 aa, synthetic construct
ALGEPSTGDTDKLI

SEQ ID NO: 15438 - protein, 14 aa, synthetic construct
ALGEPSTGDTDKII

SEQ ID NO: 15439 - protein, 14 aa, synthetic construct
ALGEPSTGASADKL

SEQ ID NO: 15440 - protein, 11 aa, synthetic construct
ALGEPSTDKLI

SEQ ID NO: 15441 - protein, 14 aa, synthetic construct
ALGEPSTAGYADKL

SEQ ID NO: 15442 - protein, 14 aa, synthetic construct
ALGEPSSWGLHTDK

SEQ ID NO: 15443 - protein, 13 aa, synthetic construct
ALGEPSSWGIHTD

SEQ ID NO: 15444 - protein, 14 aa, synthetic construct
ALGEPSSGGIHTEK

SEQ ID NO: 15445 - protein, 14 aa, synthetic construct
ALGEPSSDTRPINS

SEQ ID NO: 15446 - protein, 14 aa, synthetic construct
ALGEPSQGGYADKL

SEQ ID NO: 15447 - protein, 14 aa, synthetic construct
ALGEPSNWGIHTEK

SEQ ID NO: 15448 - protein, 12 aa, synthetic construct
ALGEPSNWGIHT

SEQ ID NO: 15449 - protein, 14 aa, synthetic construct
ALGEPSNVGYADKL

SEQ ID NO: 15450 - protein, 14 aa, synthetic construct
ALGEPSNGGNADKL

SEQ ID NO: 15451 - protein, 14 aa, synthetic construct
ALGEPSLGVLYTDK

SEQ ID NO: 15452 - protein, 14 aa, synthetic construct
ALGEPSICGIHTDK

SEQ ID NO: 15453 - protein, 14 aa, synthetic construct
ALGEPSHWGIHTDK

SEQ ID NO: 15454 - protein, 14 aa, synthetic construct
ALGEPSHGGYADKL

SEQ ID NO: 15455 - protein, 11 aa, synthetic construct
ALGEPRTGAYS

SEQ ID NO: 15456 - protein, 14 aa, synthetic construct
ALGEPRTAGYANTD

SEQ ID NO: 15457 - protein, 13 aa, synthetic construct
ALGEPPPFVRSSG

SEQ ID NO: 15458 - protein, 14 aa, synthetic construct
ALGEPPSYVSGDTD

SEQ ID NO: 15459 - protein, 14 aa, synthetic construct
ALGEPPSYVLVDTD

SEQ ID NO: 15460 - protein, 14 aa, synthetic construct
ALGEPPSYVLRDTD

SEQ ID NO: 15461 - protein, 14 aa, synthetic construct
ALGEPPSYVLGYTD

SEQ ID NO: 15462 - protein, 14 aa, synthetic construct
ALGEPPSYVLGTPI

SEQ ID NO: 15463 - protein, 13 aa, synthetic construct
ALGEPPSYVLGTP

SEQ ID NO: 15464 - protein, 14 aa, synthetic construct
ALGEPPSYVLGDTR

SEQ ID NO: 15465 - protein, 14 aa, synthetic construct
ALGEPPSYVLEDTD

SEQ ID NO: 15466 - protein, 14 aa, synthetic construct
ALGEPPSYILGDTD

SEQ ID NO: 15467 - protein, 14 aa, synthetic construct
ALGEPPSYGVGDTD

SEQ ID NO: 15468 - protein, 13 aa, synthetic construct
ALGEPPSYGLGDT

SEQ ID NO: 15469 - protein, 13 aa, synthetic construct
ALGEPPSYDMWDT

SEQ ID NO: 15470 - protein, 13 aa, synthetic construct
ALGEPPSYALGDT

SEQ ID NO: 15471 - protein, 14 aa, synthetic construct
ALGEPPSSVVGDTD

SEQ ID NO: 15472 - protein, 13 aa, synthetic construct
ALGEPPSSVLWDT

SEQ ID NO: 15473 - protein, 13 aa, synthetic construct
ALGEPPSSVLGDT

SEQ ID NO: 15474 - protein, 11 aa, synthetic construct
ALGEPPSSVLG

SEQ ID NO: 15475 - protein, 14 aa, synthetic construct
ALGEPPSNVLGDTD

SEQ ID NO: 15476 - protein, 14 aa, synthetic construct
ALGEPPSHVLGDTD

SEQ ID NO: 15477 - protein, 14 aa, synthetic construct
ALGEPPSFVLGDTD

SEQ ID NO: 15478 - protein, 9 aa, synthetic construct
ALGEPPPLL

SEQ ID NO: 15479 - protein, 9 aa, synthetic construct
ALGEPPPGG

SEQ ID NO: 15480 - protein, 13 aa, synthetic construct
ALGEPPSYVMWDT

SEQ ID NO: 15481 - protein, 13 aa, synthetic construct
ALGEPPSYVVWDT

SEQ ID NO: 15482 - protein, 14 aa, synthetic construct
ALGEPRTAGCTPIN

SEQ ID NO: 15483 - protein, 14 aa, synthetic construct
ALGEPPTYDMGDTD

SEQ ID NO: 15484 - protein, 9 aa, synthetic construct
ALGEPRPRG

SEQ ID NO: 15485 - protein, 14 aa, synthetic construct
ALGEPRPGGYASTD

SEQ ID NO: 15486 - protein, 14 aa, synthetic construct
ALGEPRPGGYADTD

SEQ ID NO: 15487 - protein, 14 aa, synthetic construct
ALGEPRPGDTPTPI

SEQ ID NO: 15488 - protein, 14 aa, synthetic construct
ALGEPRNGGYSYTD

SEQ ID NO: 15489 - protein, 14 aa, synthetic construct
ALGEPRNGGYADKL

SEQ ID NO: 15490 - protein, 14 aa, synthetic construct
ALGEPRNGGHAYTD

SEQ ID NO: 15491 - protein, 14 aa, synthetic construct
ALGEPRNGAYAYTD

SEQ ID NO: 15492 - protein, 14 aa, synthetic construct
ALGEPRLLGDTIDK

SEQ ID NO: 15493 - protein, 13 aa, synthetic construct
ALGEPRGYTDKLI

SEQ ID NO: 15494 - protein, 14 aa, synthetic construct
ALGEPRGYNTDKLI

SEQ ID NO: 15495 - protein, 11 aa, synthetic construct
ALGEPRGLGLI

SEQ ID NO: 15496 - protein, 12 aa, synthetic construct
ALGEPRDPDTLI

SEQ ID NO: 15497 - protein, 14 aa, synthetic construct
ALGEPRAGGYAYTD

SEQ ID NO: 15498 - protein, 14 aa, synthetic construct
ALGEPPYWGRNTDK

SEQ ID NO: 15499 - protein, 14 aa, synthetic construct
ALGEPPYWGIHTDK

SEQ ID NO: 15500 - protein, 11 aa, synthetic construct
ALGEPPYGIGG

SEQ ID NO: 15501 - protein, 13 aa, synthetic construct
ALGEPPTYVLGDT

SEQ ID NO: 15502 - protein, 14 aa, synthetic construct
ALGEPPTYVIGDTD

SEQ ID NO: 15503 - protein, 14 aa, synthetic construct
ALGEPPTYGLGDTD

SEQ ID NO: 15504 - protein, 13 aa, synthetic construct
ALGEPPTYGLGDT

SEQ ID NO: 15505 - protein, 12 aa, synthetic construct
ALGERGITAKSY

SEQ ID NO: 15506 - protein, 12 aa, synthetic construct
ALGERGITDIFI

SEQ ID NO: 15507 - protein, 12 aa, synthetic construct
ALGERGITDKDI

SEQ ID NO: 15508 - protein, 11 aa, synthetic construct
ALGGGCSDKLF

SEQ ID NO: 15509 - protein, 14 aa, synthetic construct
ALGGETGGYTEKLI

SEQ ID NO: 15510 - protein, 11 aa, synthetic construct
ALGGDYSDKLN

SEQ ID NO: 15511 - protein, 11 aa, synthetic construct
ALGGDLPINSS

SEQ ID NO: 15512 - protein, 11 aa, synthetic construct
ALGGDIPVNSS

SEQ ID NO: 15513 - protein, 11 aa, synthetic construct
ALGGDIPMNSS

SEQ ID NO: 15514 - protein, 11 aa, synthetic construct
ALGGDIPKNSS

SEQ ID NO: 15515 - protein, 10 aa, synthetic construct
ALGGDIPITQ

SEQ ID NO: 15516 - protein, 11 aa, synthetic construct
ALGGDIPINTS

SEQ ID NO: 15517 - protein, 11 aa, synthetic construct
ALGGDIPINSA

SEQ ID NO: 15518 - protein, 11 aa, synthetic construct
ALGGDILINSS

SEQ ID NO: 15519 - protein, 14 aa, synthetic construct
ALGGAYQEDGTDNL

SEQ ID NO: 15520 - protein, 14 aa, synthetic construct
ALGGAYQEDATDTL

SEQ ID NO: 15521 - protein, 13 aa, synthetic construct
ALGGAYKEDGTDK

SEQ ID NO: 15522 - protein, 14 aa, synthetic construct
ALGGASHEDGTDKL

SEQ ID NO: 15523 - protein, 14 aa, synthetic construct
ALGGAGGYNTDKLI

SEQ ID NO: 15524 - protein, 13 aa, synthetic construct
ALGFTGGYTDKLI

SEQ ID NO: 15525 - protein, 13 aa, synthetic construct
ALGFTGGYTDKII

SEQ ID NO: 15526 - protein, 13 aa, synthetic construct
ALGFLLGDTRNHI

SEQ ID NO: 15527 - protein, 13 aa, synthetic construct
ALGFLLGDTRKLN

SEQ ID NO: 15528 - protein, 13 aa, synthetic construct
ALGFLLGDTQKVI

SEQ ID NO: 15529 - protein, 13 aa, synthetic construct
ALGFILGDTRKLI

SEQ ID NO: 15530 - protein, 11 aa, synthetic construct
ALGGEYSDKII

SEQ ID NO: 15531 - protein, 11 aa, synthetic construct
ALGGGDADKLI

SEQ ID NO: 15532 - protein, 12 aa, synthetic construct
ALGEWGDSDQLI

SEQ ID NO: 15533 - protein, 11 aa, synthetic construct
ALGGGDSDQLF

SEQ ID NO: 15534 - protein, 13 aa, synthetic construct
ALGGGYSAPGTPD

SEQ ID NO: 15535 - protein, 11 aa, synthetic construct
ALGGGYSAKHI

SEQ ID NO: 15536 - protein, 11 aa, synthetic construct
ALGGGYPDKVI

SEQ ID NO: 15537 - protein, 11 aa, synthetic construct
ALGGGYNDKLI

SEQ ID NO: 15538 - protein, 11 aa, synthetic construct
ALGGGYCDKLF

SEQ ID NO: 15539 - protein, 10 aa, synthetic construct
ALGGGYADTH

SEQ ID NO: 15540 - protein, 11 aa, synthetic construct
ALGGGYADKHN

SEQ ID NO: 15541 - protein, 11 aa, synthetic construct
ALGGGSSDQLF

SEQ ID NO: 15542 - protein, 11 aa, synthetic construct
ALGGGSSDKVI

SEQ ID NO: 15543 - protein, 11 aa, synthetic construct
ALGGGSPRNSS

SEQ ID NO: 15544 - protein, 11 aa, synthetic construct
ALGGGSPINSS

SEQ ID NO: 15545 - protein, 6 aa, synthetic construct
ALGGGS

SEQ ID NO: 15546 - protein, 11 aa, synthetic construct
ALGGGNYDKLI

SEQ ID NO: 15547 - protein, 8 aa, synthetic construct
ALGGGKLN

SEQ ID NO: 15548 - protein, 11 aa, synthetic construct
ALGGGIPEKLI

SEQ ID NO: 15549 - protein, 12 aa, synthetic construct
ALGGGIHTDKLI

SEQ ID NO: 15550 - protein, 11 aa, synthetic construct
ALGGGIFRKTH

SEQ ID NO: 15551 - protein, 11 aa, synthetic construct
ALGGGIAINSS

SEQ ID NO: 15552 - protein, 11 aa, synthetic construct
ALGGGGSDKLI

SEQ ID NO: 15553 - protein, 14 aa, synthetic construct
ALGGGGGPLTAQLF

SEQ ID NO: 15554 - protein, 11 aa, synthetic construct
ALGGGESDKLI

SEQ ID NO: 15555 - protein, 8 aa, synthetic construct
ALGEWKLL

SEQ ID NO: 15556 - protein, 12 aa, synthetic construct
ALGEWGASDKLI

SEQ ID NO: 15557 - protein, 11 aa, synthetic construct
ALGGGYSDHLF

SEQ ID NO: 15558 - protein, 12 aa, synthetic construct
ALGEVRATDKLI

SEQ ID NO: 15559 - protein, 12 aa, synthetic construct
ALGEVRAERDSH

SEQ ID NO: 15560 - protein, 13 aa, synthetic construct
ALGEVPYWGRYTD

SEQ ID NO: 15561 - protein, 13 aa, synthetic construct
ALGEVPYWGGYTD

SEQ ID NO: 15562 - protein, 14 aa, synthetic construct
ALGEVPYCGRYTDK

SEQ ID NO: 15563 - protein, 14 aa, synthetic construct
ALGEVPTRGFGYTD

SEQ ID NO: 15564 - protein, 14 aa, synthetic construct
ALGEVPRGVLSTDK

SEQ ID NO: 15565 - protein, 14 aa, synthetic construct
ALGEVPMGVLYTDK

SEQ ID NO: 15566 - protein, 11 aa, synthetic construct
ALGEVPLSWGL

SEQ ID NO: 15567 - protein, 14 aa, synthetic construct
ALGEVPLHWGLYTD

SEQ ID NO: 15568 - protein, 13 aa, synthetic construct
ALGEVPLGVLYTD

SEQ ID NO: 15569 - protein, 14 aa, synthetic construct
ALGEVPLGVLSTDK

SEQ ID NO: 15570 - protein, 14 aa, synthetic construct
ALGEVPFYCGLYTD

SEQ ID NO: 15571 - protein, 13 aa, synthetic construct
ALGEVPCWGRYTD

SEQ ID NO: 15572 - protein, 13 aa, synthetic construct
ALGEVNLNFAKLI

SEQ ID NO: 15573 - protein, 14 aa, synthetic construct
ALGEVLQGDPDQLI

SEQ ID NO: 15574 - protein, 14 aa, synthetic construct
ALGEVLLGDTDQLI

SEQ ID NO: 15575 - protein, 14 aa, synthetic construct
ALGEVLLGDPDTLI

SEQ ID NO: 15576 - protein, 14 aa, synthetic construct
ALGEVLLGDPDNLI

SEQ ID NO: 15577 - protein, 13 aa, synthetic construct
ALGEVLLGDPDKL

SEQ ID NO: 15578 - protein, 12 aa, synthetic construct
ALGEVGYTDKLI

SEQ ID NO: 15579 - protein, 11 aa, synthetic construct
ALGEVGVSKLI

SEQ ID NO: 15580 - protein, 14 aa, synthetic construct
ALGEVRAGGYEYTD

SEQ ID NO: 15581 - protein, 12 aa, synthetic construct
ALGEVRDPDKLI

SEQ ID NO: 15582 - protein, 6 aa, synthetic construct
ALGEWG

SEQ ID NO: 15583 - protein, 12 aa, synthetic construct
ALGEVRDPDKVI

SEQ ID NO: 15584 - protein, 11 aa, synthetic construct
ALGEVYTEKLF

SEQ ID NO: 15585 - protein, 14 aa, synthetic construct
ALGEVYLGILSSWD

SEQ ID NO: 15586 - protein, 14 aa, synthetic construct
ALGEVWGYGTYKLI

SEQ ID NO: 15587 - protein, 12 aa, synthetic construct
ALGEVWDTDKLI

SEQ ID NO: 15588 - protein, 14 aa, synthetic construct
ALGEVTLGYQSTDK

SEQ ID NO: 15589 - protein, 14 aa, synthetic construct
ALGEVTGGYTDKLI

SEQ ID NO: 15590 - protein, 12 aa, synthetic construct
ALGEVSGGHINK

SEQ ID NO: 15591 - protein, 8 aa, synthetic construct
ALGEVSEE

SEQ ID NO: 15592 - protein, 10 aa, synthetic construct
ALGEVRWSWG

SEQ ID NO: 15593 - protein, 14 aa, synthetic construct
ALGEVRWGRTPINS

SEQ ID NO: 15594 - protein, 12 aa, synthetic construct
ALGEVRWGPYTD

SEQ ID NO: 15595 - protein, 14 aa, synthetic construct
ALGEVRTGGYESTD

SEQ ID NO: 15596 - protein, 14 aa, synthetic construct
ALGEVRPGGYEYTD

SEQ ID NO: 15597 - protein, 12 aa, synthetic construct
ALGEVRIFDTLI

SEQ ID NO: 15598 - protein, 12 aa, synthetic construct
ALGEVRIFDILI

SEQ ID NO: 15599 - protein, 11 aa, synthetic construct
ALGEVRGLGHI

SEQ ID NO: 15600 - protein, 12 aa, synthetic construct
ALGEVRESDQLI

SEQ ID NO: 15601 - protein, 12 aa, synthetic construct
ALGEVRDTEKVI

SEQ ID NO: 15602 - protein, 12 aa, synthetic construct
ALGEVRDTDNLI

SEQ ID NO: 15603 - protein, 12 aa, synthetic construct
ALGEVRDTDHLI

SEQ ID NO: 15604 - protein, 8 aa, synthetic construct
ALGEVRDT

SEQ ID NO: 15605 - protein, 11 aa, synthetic construct
ALGGGYSDDLI

SEQ ID NO: 15606 - protein, 11 aa, synthetic construct
ALGGGYSDKDI

SEQ ID NO: 15607 - protein, 12 aa, synthetic construct
ALGEVGTPINSS

SEQ ID NO: 15608 - protein, 14 aa, synthetic construct
ALGGPYHEDGTDIL

SEQ ID NO: 15609 - protein, 14 aa, synthetic construct
ALGGPYEEALTAQL

SEQ ID NO: 15610 - protein, 14 aa, synthetic construct
ALGGPSQEDGTDTL

SEQ ID NO: 15611 - protein, 14 aa, synthetic construct
ALGGPSQEDGTDQL

SEQ ID NO: 15612 - protein, 13 aa, synthetic construct
ALGGPSQEDGTDK

SEQ ID NO: 15613 - protein, 14 aa, synthetic construct
ALGGPSQEDATDKL

SEQ ID NO: 15614 - protein, 14 aa, synthetic construct
ALGGPSPEDGTDKL

SEQ ID NO: 15615 - protein, 6 aa, synthetic construct
ALGGPS

SEQ ID NO: 15616 - protein, 14 aa, synthetic construct
ALGGPPTWGYTPIN

SEQ ID NO: 15617 - protein, 14 aa, synthetic construct
ALGGPPTWGIQINS

SEQ ID NO: 15618 - protein, 13 aa, synthetic construct
ALGGPPSYVLGDT

SEQ ID NO: 15619 - protein, 14 aa, synthetic construct
ALGGPPSSVLGDTD

SEQ ID NO: 15620 - protein, 14 aa, synthetic construct
ALGGPPSNVLGDTD

SEQ ID NO: 15621 - protein, 13 aa, synthetic construct
ALGGPPAYGLGDT

SEQ ID NO: 15622 - protein, 14 aa, synthetic construct
ALGGPNQEDGTDKL

SEQ ID NO: 15623 - protein, 11 aa, synthetic construct
ALGGPKGIGTH

SEQ ID NO: 15624 - protein, 12 aa, synthetic construct
ALGGPGMTDKLI

SEQ ID NO: 15625 - protein, 9 aa, synthetic construct
ALGGPDKLI

SEQ ID NO: 15626 - protein, 9 aa, synthetic construct
ALGGPDILI

SEQ ID NO: 15627 - protein, 14 aa, synthetic construct
ALGGPCTGDTEKLI

SEQ ID NO: 15628 - protein, 14 aa, synthetic construct
ALGGPCTGDTDNLI

SEQ ID NO: 15629 - protein, 7 aa, synthetic construct
ALGGNSS

SEQ ID NO: 15630 - protein, 13 aa, synthetic construct
ALGGPYGISDKLI

SEQ ID NO: 15631 - protein, 14 aa, synthetic construct
ALGGPYKEDGTAKL

SEQ ID NO: 15632 - protein, 11 aa, synthetic construct
ALGGLYTGKLI

SEQ ID NO: 15633 - protein, 14 aa, synthetic construct
ALGGPYKEDSTDKL

SEQ ID NO: 15634 - protein, 14 aa, synthetic construct
ALGGPYQEYVTDKL

SEQ ID NO: 15635 - protein, 14 aa, synthetic construct
ALGGPYQEYSTDKL

SEQ ID NO: 15636 - protein, 12 aa, synthetic construct
ALGGPYQEHTST

SEQ ID NO: 15637 - protein, 9 aa, synthetic construct
ALGGPYQEH

SEQ ID NO: 15638 - protein, 14 aa, synthetic construct
ALGGPYQEGGTDKL

SEQ ID NO: 15639 - protein, 10 aa, synthetic construct
ALGGPYQEEG

SEQ ID NO: 15640 - protein, 14 aa, synthetic construct
ALGGPYQEDSTDTL

SEQ ID NO: 15641 - protein, 12 aa, synthetic construct
ALGGPYQEDGTG

SEQ ID NO: 15642 - protein, 14 aa, synthetic construct
ALGGPYQEDGTDRL

SEQ ID NO: 15643 - protein, 14 aa, synthetic construct
ALGGPYQEDGSEKL

SEQ ID NO: 15644 - protein, 13 aa, synthetic construct
ALGGPYQEDGNDK

SEQ ID NO: 15645 - protein, 14 aa, synthetic construct
ALGGPYQEDATEKL

SEQ ID NO: 15646 - protein, 14 aa, synthetic construct
ALGGPYQEDATDQL

SEQ ID NO: 15647 - protein, 14 aa, synthetic construct
ALGGPYQEAGTAKL

SEQ ID NO: 15648 - protein, 13 aa, synthetic construct
ALGGPYQEAGSDK

SEQ ID NO: 15649 - protein, 14 aa, synthetic construct
ALGGPYQADGTDKL

SEQ ID NO: 15650 - protein, 14 aa, synthetic construct
ALGGPYPEDGSDKL

SEQ ID NO: 15651 - protein, 9 aa, synthetic construct
ALGGPYPEA

SEQ ID NO: 15652 - protein, 14 aa, synthetic construct
ALGGPYNEDGTDKL

SEQ ID NO: 15653 - protein, 14 aa, synthetic construct
ALGGPYKQHGTDKL

SEQ ID NO: 15654 - protein, 14 aa, synthetic construct
ALGGPYKEEGTDKL

SEQ ID NO: 15655 - protein, 9 aa, synthetic construct
ALGGNDKLI

SEQ ID NO: 15656 - protein, 11 aa, synthetic construct
ALGGLYTDKLI

SEQ ID NO: 15657 - protein, 11 aa, synthetic construct
ALGGGYSDKIN

SEQ ID NO: 15658 - protein, 11 aa, synthetic construct
ALGGGYYDKLF

SEQ ID NO: 15659 - protein, 11 aa, synthetic construct
ALGGGYTDKII

SEQ ID NO: 15660 - protein, 11 aa, synthetic construct
ALGGGYTDKHI

SEQ ID NO: 15661 - protein, 8 aa, synthetic construct
ALGGGYTD

SEQ ID NO: 15662 - protein, 11 aa, synthetic construct
ALGGGYSYKLN

SEQ ID NO: 15663 - protein, 8 aa, synthetic construct
ALGGGYSY

SEQ ID NO: 15664 - protein, 11 aa, synthetic construct
ALGGGYSVKPI

SEQ ID NO: 15665 - protein, 14 aa, synthetic construct
ALGGGYSSDTRPIN

SEQ ID NO: 15666 - protein, 11 aa, synthetic construct
ALGGGYSNKLI

SEQ ID NO: 15667 - protein, 11 aa, synthetic construct
ALGGGYSHKLI

SEQ ID NO: 15668 - protein, 11 aa, synthetic construct
ALGGGYSGNLS

SEQ ID NO: 15669 - protein, 11 aa, synthetic construct
ALGGGYSGKLL

SEQ ID NO: 15670 - protein, 11 aa, synthetic construct
ALGGGYSEKLK

SEQ ID NO: 15671 - protein, 11 aa, synthetic construct
ALGGGYSEKHI

SEQ ID NO: 15672 - protein, 11 aa, synthetic construct
ALGGGYSDYII

SEQ ID NO: 15673 - protein, 11 aa, synthetic construct
ALGGGYSDTLS

SEQ ID NO: 15674 - protein, 11 aa, synthetic construct
ALGGGYSDNSS

SEQ ID NO: 15675 - protein, 11 aa, synthetic construct
ALGGGYSDNLI

SEQ ID NO: 15676 - protein, 11 aa, synthetic construct
ALGGGYSDKRI

SEQ ID NO: 15677 - protein, 11 aa, synthetic construct
ALGGGYSDKPK

SEQ ID NO: 15678 - protein, 11 aa, synthetic construct
ALGGGYSDKLM

SEQ ID NO: 15679 - protein, 13 aa, synthetic construct
ALGGGYSDKIRYG

SEQ ID NO: 15680 - protein, 11 aa, synthetic construct
ALGGGYYAKLI

SEQ ID NO: 15681 - protein, 11 aa, synthetic construct
ALGGGYYDKPI

SEQ ID NO: 15682 - protein, 14 aa, synthetic construct
ALGGLYQEDGTDKL

SEQ ID NO: 15683 - protein, 11 aa, synthetic construct
ALGGGYYEKII

SEQ ID NO: 15684 - protein, 13 aa, synthetic construct
ALGGLVGYADKLI

SEQ ID NO: 15685 - protein, 11 aa, synthetic construct
ALGGLSGLGLI

SEQ ID NO: 15686 - protein, 14 aa, synthetic construct
ALGGLRWGRTPINS

SEQ ID NO: 15687 - protein, 12 aa, synthetic construct
ALGGLRHTDKLI

SEQ ID NO: 15688 - protein, 14 aa, synthetic construct
ALGGLPSGGYGGDK

SEQ ID NO: 15689 - protein, 12 aa, synthetic construct
ALGGLGLTDKLI

SEQ ID NO: 15690 - protein, 13 aa, synthetic construct
ALGGLGGYTDKLI

SEQ ID NO: 15691 - protein, 13 aa, synthetic construct
ALGGLGGYAYKLI

SEQ ID NO: 15692 - protein, 13 aa, synthetic construct
ALGGLGGYAPKLI

SEQ ID NO: 15693 - protein, 13 aa, synthetic construct
ALGGLGGYADKII

SEQ ID NO: 15694 - protein, 13 aa, synthetic construct
ALGGLGGYADHLI

SEQ ID NO: 15695 - protein, 13 aa, synthetic construct
ALGGLGGYAAKLI

SEQ ID NO: 15696 - protein, 12 aa, synthetic construct
ALGGLGDPDTLI

SEQ ID NO: 15697 - protein, 13 aa, synthetic construct
ALGGLGAETDKLI

SEQ ID NO: 15698 - protein, 12 aa, synthetic construct
ALGGKRDSDKLI

SEQ ID NO: 15699 - protein, 14 aa, synthetic construct
ALGGISYGISDKLI

SEQ ID NO: 15700 - protein, 10 aa, synthetic construct
ALGGIRRETH

SEQ ID NO: 15701 - protein, 14 aa, synthetic construct
ALGGHYQEEGTDKL

SEQ ID NO: 15702 - protein, 14 aa, synthetic construct
ALGGHYQEDGTYKL

SEQ ID NO: 15703 - protein, 14 aa, synthetic construct
ALGGHFLRDLRETH

SEQ ID NO: 15704 - protein, 11 aa, synthetic construct
ALGGGYYYKLI

SEQ ID NO: 15705 - protein, 10 aa, synthetic construct
ALGEVGVQLS

SEQ ID NO: 15706 - protein, 13 aa, synthetic construct
ALGEVGRYTEKLI

SEQ ID NO: 15707 - protein, 12 aa, synthetic construct
ALGERGITDKLL

SEQ ID NO: 15708 - protein, 11 aa, synthetic construct
ALGETSTDKLI

SEQ ID NO: 15709 - protein, 14 aa, synthetic construct
ALGETSSDTRPINS

SEQ ID NO: 15710 - protein, 14 aa, synthetic construct
ALGETSNGISYKLF

SEQ ID NO: 15711 - protein, 11 aa, synthetic construct
ALGETSNCGIN

SEQ ID NO: 15712 - protein, 14 aa, synthetic construct
ALGETSNAISDKLI

SEQ ID NO: 15713 - protein, 14 aa, synthetic construct
ALGETSHGISDKII

SEQ ID NO: 15714 - protein, 9 aa, synthetic construct
ALGETRSGG

SEQ ID NO: 15715 - protein, 14 aa, synthetic construct
ALGETPYGISDQLI

SEQ ID NO: 15716 - protein, 14 aa, synthetic construct
ALGETPYGISDKII

SEQ ID NO: 15717 - protein, 14 aa, synthetic construct
ALGETPSSVLGDTD

SEQ ID NO: 15718 - protein, 11 aa, synthetic construct
ALGETMNERNK

SEQ ID NO: 15719 - protein, 6 aa, synthetic construct
ALGETH

SEQ ID NO: 15720 - protein, 14 aa, synthetic construct
ALGETGGYGTDKSI

SEQ ID NO: 15721 - protein, 8 aa, synthetic construct
ALGETELG

SEQ ID NO: 15722 - protein, 9 aa, synthetic construct
ALGETDKLI

SEQ ID NO: 15723 - protein, 14 aa, synthetic construct
ALGETCTGDTDKII

SEQ ID NO: 15724 - protein, 14 aa, synthetic construct
ALGETAGYNTDKLI

SEQ ID NO: 15725 - protein, 14 aa, synthetic construct
ALGESYVLGARSKL

SEQ ID NO: 15726 - protein, 11 aa, synthetic construct
ALGESYTDKLI

SEQ ID NO: 15727 - protein, 9 aa, synthetic construct
ALGESYTDK

SEQ ID NO: 15728 - protein, 14 aa, synthetic construct
ALGESVLGASYTDK

SEQ ID NO: 15729 - protein, 14 aa, synthetic construct
ALGESSYGISEKLI

SEQ ID NO: 15730 - protein, 14 aa, synthetic construct
ALGETSSGISEKLI

SEQ ID NO: 15731 - protein, 14 aa, synthetic construct
ALGETSTGGYADKL

SEQ ID NO: 15732 - protein, 11 aa, synthetic construct
ALGESSTDKLI

SEQ ID NO: 15733 - protein, 14 aa, synthetic construct
ALGETSVRGARRKL

SEQ ID NO: 15734 - protein, 14 aa, synthetic construct
ALGETSYVISDKLI

SEQ ID NO: 15735 - protein, 14 aa, synthetic construct
ALGETSYGVSEKII

SEQ ID NO: 15736 - protein, 14 aa, synthetic construct
ALGETSYGSSEKLI

SEQ ID NO: 15737 - protein, 14 aa, synthetic construct
ALGETSYGSSDKII

SEQ ID NO: 15738 - protein, 14 aa, synthetic construct
ALGETSYGNSDKLI

SEQ ID NO: 15739 - protein, 14 aa, synthetic construct
ALGETSYGMSDKLI

SEQ ID NO: 15740 - protein, 13 aa, synthetic construct
ALGETSYGIYDTI

SEQ ID NO: 15741 - protein, 14 aa, synthetic construct
ALGETSYGIYDKLI

SEQ ID NO: 15742 - protein, 13 aa, synthetic construct
ALGETSYGISYKL

SEQ ID NO: 15743 - protein, 14 aa, synthetic construct
ALGETSYGISYILI

SEQ ID NO: 15744 - protein, 14 aa, synthetic construct
ALGETSYGISVKLI

SEQ ID NO: 15745 - protein, 14 aa, synthetic construct
ALGETSYGISVKII

SEQ ID NO: 15746 - protein, 14 aa, synthetic construct
ALGETSYGISHKLI

SEQ ID NO: 15747 - protein, 14 aa, synthetic construct
ALGETSYGISEKIN

SEQ ID NO: 15748 - protein, 14 aa, synthetic construct
ALGETSYGISDTLN

SEQ ID NO: 15749 - protein, 14 aa, synthetic construct
ALGETSYGISDNSS

SEQ ID NO: 15750 - protein, 14 aa, synthetic construct
ALGETSYGISDKNI

SEQ ID NO: 15751 - protein, 13 aa, synthetic construct
ALGETSYGISDKI

SEQ ID NO: 15752 - protein, 14 aa, synthetic construct
ALGETSYGISDKGI

SEQ ID NO: 15753 - protein, 14 aa, synthetic construct
ALGETSYGGIHTDK

SEQ ID NO: 15754 - protein, 14 aa, synthetic construct
ALGETSYEISDKLI

SEQ ID NO: 15755 - protein, 14 aa, synthetic construct
ALGESSYGISDKLI

SEQ ID NO: 15756 - protein, 14 aa, synthetic construct
ALGESRWGKSYKII

SEQ ID NO: 15757 - protein, 14 aa, synthetic construct
ALGETSYWWRHTDK

SEQ ID NO: 15758 - protein, 12 aa, synthetic construct
ALGERRDSDNHI

SEQ ID NO: 15759 - protein, 14 aa, synthetic construct
ALGERPCWGIRDKL

SEQ ID NO: 15760 - protein, 12 aa, synthetic construct
ALGERGYSDTLI

SEQ ID NO: 15761 - protein, 12 aa, synthetic construct
ALGERGVTEKKI

SEQ ID NO: 15762 - protein, 12 aa, synthetic construct
ALGERGVTDKII

SEQ ID NO: 15763 - protein, 14 aa, synthetic construct
ALGERGVSDTPINS

SEQ ID NO: 15764 - protein, 12 aa, synthetic construct
ALGERGRTDNLI

SEQ ID NO: 15765 - protein, 12 aa, synthetic construct
ALGERGNSDKLI

SEQ ID NO: 15766 - protein, 12 aa, synthetic construct
ALGERGMTDKII

SEQ ID NO: 15767 - protein, 12 aa, synthetic construct
ALGERGMTDKHM

SEQ ID NO: 15768 - protein, 12 aa, synthetic construct
ALGERGLTDQLI

SEQ ID NO: 15769 - protein, 12 aa, synthetic construct
ALGERGKTDQLI

SEQ ID NO: 15770 - protein, 12 aa, synthetic construct
ALGERGITYKLI

SEQ ID NO: 15771 - protein, 12 aa, synthetic construct
ALGERGITVKVI

SEQ ID NO: 15772 - protein, 12 aa, synthetic construct
ALGERGITVKLI

SEQ ID NO: 15773 - protein, 12 aa, synthetic construct
ALGERGITGKLL

SEQ ID NO: 15774 - protein, 12 aa, synthetic construct
ALGERGITETLI

SEQ ID NO: 15775 - protein, 12 aa, synthetic construct
ALGERGITEQLI

SEQ ID NO: 15776 - protein, 12 aa, synthetic construct
ALGERGITEKLS

SEQ ID NO: 15777 - protein, 12 aa, synthetic construct
ALGERGITDTII

SEQ ID NO: 15778 - protein, 12 aa, synthetic construct
ALGERGITDKNI

SEQ ID NO: 15779 - protein, 12 aa, synthetic construct
ALGERGITDKLV

SEQ ID NO: 15780 - protein, 14 aa, synthetic construct
ALGERPPYVLGDTD

SEQ ID NO: 15781 - protein, 11 aa, synthetic construct
ALGERRGVGLI

SEQ ID NO: 15782 - protein, 12 aa, synthetic construct
ALGESRIDDKLN

SEQ ID NO: 15783 - protein, 12 aa, synthetic construct
ALGERRIFDKLI

SEQ ID NO: 15784 - protein, 12 aa, synthetic construct
ALGESGIAINSS

SEQ ID NO: 15785 - protein, 11 aa, synthetic construct
ALGESGHTYKL

SEQ ID NO: 15786 - protein, 14 aa, synthetic construct
ALGESCTGDTDKLI

SEQ ID NO: 15787 - protein, 14 aa, synthetic construct
ALGESCNGYTDKLI

SEQ ID NO: 15788 - protein, 11 aa, synthetic construct
ALGERYSDKLI

SEQ ID NO: 15789 - protein, 12 aa, synthetic construct
ALGERVITDKLN

SEQ ID NO: 15790 - protein, 12 aa, synthetic construct
ALGERVITDKLI

SEQ ID NO: 15791 - protein, 13 aa, synthetic construct
ALGERVDTRINSS

SEQ ID NO: 15792 - protein, 12 aa, synthetic construct
ALGERVDSDKLI

SEQ ID NO: 15793 - protein, 12 aa, synthetic construct
ALGERVDSDKII

SEQ ID NO: 15794 - protein, 14 aa, synthetic construct
ALGERTGGVTDKLI

SEQ ID NO: 15795 - protein, 14 aa, synthetic construct
ALGERTGGFTEKLI

SEQ ID NO: 15796 - protein, 14 aa, synthetic construct
ALGERTGDLPIKSS

SEQ ID NO: 15797 - protein, 14 aa, synthetic construct
ALGERSYGSSDELI

SEQ ID NO: 15798 - protein, 12 aa, synthetic construct
ALGERSSYVLGV

SEQ ID NO: 15799 - protein, 10 aa, synthetic construct
ALGERSSYVL

SEQ ID NO: 15800 - protein, 13 aa, synthetic construct
ALGERSSSVLGAG

SEQ ID NO: 15801 - protein, 10 aa, synthetic construct
ALGERSSKEM

SEQ ID NO: 15802 - protein, 9 aa, synthetic construct
ALGERSAHQ

SEQ ID NO: 15803 - protein, 14 aa, synthetic construct
ALGERRWGPYTEKL

SEQ ID NO: 15804 - protein, 14 aa, synthetic construct
ALGERRWGPYTDKL

SEQ ID NO: 15805 - protein, 14 aa, synthetic construct
ALGETSYWISDKLI

SEQ ID NO: 15806 - protein, 13 aa, synthetic construct
ALGETTYGISDKI

SEQ ID NO: 15807 - protein, 13 aa, synthetic construct
ALGEVGRYTDQII

SEQ ID NO: 15808 - protein, 14 aa, synthetic construct
ALGEVGGYGTDRLI

SEQ ID NO: 15809 - protein, 14 aa, synthetic construct
ALGEVGGYGTDKII

SEQ ID NO: 15810 - protein, 14 aa, synthetic construct
ALGEVGGYGTDELI

SEQ ID NO: 15811 - protein, 14 aa, synthetic construct
ALGEVGGYGSDKLI

SEQ ID NO: 15812 - protein, 14 aa, synthetic construct
ALGEVGGYAYTDKL

SEQ ID NO: 15813 - protein, 13 aa, synthetic construct
ALGEVGGYAHKLI

SEQ ID NO: 15814 - protein, 13 aa, synthetic construct
ALGEVGGYAETLI

SEQ ID NO: 15815 - protein, 13 aa, synthetic construct
ALGEVGGYADRLI

SEQ ID NO: 15816 - protein, 13 aa, synthetic construct
ALGEVGGYADKLL

SEQ ID NO: 15817 - protein, 12 aa, synthetic construct
ALGEVGGYADKL

SEQ ID NO: 15818 - protein, 13 aa, synthetic construct
ALGEVGGTGDKLI

SEQ ID NO: 15819 - protein, 14 aa, synthetic construct
ALGEVGGSGTDKLI

SEQ ID NO: 15820 - protein, 14 aa, synthetic construct
ALGEVGGSGTDKII

SEQ ID NO: 15821 - protein, 13 aa, synthetic construct
ALGEVGGSADKLM

SEQ ID NO: 15822 - protein, 13 aa, synthetic construct
ALGEVGGDAAKLF

SEQ ID NO: 15823 - protein, 13 aa, synthetic construct
ALGEVGGCADKLL

SEQ ID NO: 15824 - protein, 13 aa, synthetic construct
ALGEVGGCADKLI

SEQ ID NO: 15825 - protein, 13 aa, synthetic construct
ALGEVGETGDKLL

SEQ ID NO: 15826 - protein, 14 aa, synthetic construct
ALGEVGERALTAQL

SEQ ID NO: 15827 - protein, 13 aa, synthetic construct
ALGEVGDTGDQLI

SEQ ID NO: 15828 - protein, 13 aa, synthetic construct
ALGEVGDTGDKLL

SEQ ID NO: 15829 - protein, 13 aa, synthetic construct
ALGEVGDTGDKII

SEQ ID NO: 15830 - protein, 14 aa, synthetic construct
ALGEVGGYGTDKVI

SEQ ID NO: 15831 - protein, 13 aa, synthetic construct
ALGEVGGYTDKLI

SEQ ID NO: 15832 - protein, 12 aa, synthetic construct
ALGEVGDTENLI

SEQ ID NO: 15833 - protein, 13 aa, synthetic construct
ALGEVGGYTDTLV

SEQ ID NO: 15834 - protein, 12 aa, synthetic construct
ALGEVGRTEKLI

SEQ ID NO: 15835 - protein, 12 aa, synthetic construct
ALGEVGRTDKLI

SEQ ID NO: 15836 - protein, 12 aa, synthetic construct
ALGEVGNKENII

SEQ ID NO: 15837 - protein, 12 aa, synthetic construct
ALGEVGMTYKLI

SEQ ID NO: 15838 - protein, 12 aa, synthetic construct
ALGEVGMTGKLI

SEQ ID NO: 15839 - protein, 12 aa, synthetic construct
ALGEVGMTEKLI

SEQ ID NO: 15840 - protein, 12 aa, synthetic construct
ALGEVGMTEKLF

SEQ ID NO: 15841 - protein, 12 aa, synthetic construct
ALGEVGMTDNII

SEQ ID NO: 15842 - protein, 12 aa, synthetic construct
ALGEVGMTDKLN

SEQ ID NO: 15843 - protein, 12 aa, synthetic construct
ALGEVGMTDKII

SEQ ID NO: 15844 - protein, 12 aa, synthetic construct
ALGEVGMTDILI

SEQ ID NO: 15845 - protein, 9 aa, synthetic construct
ALGEVGMTD

SEQ ID NO: 15846 - protein, 12 aa, synthetic construct
ALGEVGMADKLI

SEQ ID NO: 15847 - protein, 13 aa, synthetic construct
ALGEVGIYTEKLI

SEQ ID NO: 15848 - protein, 13 aa, synthetic construct
ALGEVGIYTEKII

SEQ ID NO: 15849 - protein, 13 aa, synthetic construct
ALGEVGIYTDQII

SEQ ID NO: 15850 - protein, 13 aa, synthetic construct
ALGEVGIYTDKLF

SEQ ID NO: 15851 - protein, 13 aa, synthetic construct
ALGEVGIYTDKII

SEQ ID NO: 15852 - protein, 13 aa, synthetic construct
ALGEVGIPAINSS

SEQ ID NO: 15853 - protein, 13 aa, synthetic construct
ALGEVGINTDKLN

SEQ ID NO: 15854 - protein, 13 aa, synthetic construct
ALGEVGHTGDKLI

SEQ ID NO: 15855 - protein, 13 aa, synthetic construct
ALGEVGDTGAKLI

SEQ ID NO: 15856 - protein, 12 aa, synthetic construct
ALGEVGDTEKLI

SEQ ID NO: 15857 - protein, 14 aa, synthetic construct
ALGETTYGISEKII

SEQ ID NO: 15858 - protein, 11 aa, synthetic construct
ALGEVGANKLI

SEQ ID NO: 15859 - protein, 12 aa, synthetic construct
ALGEVGADTEKV

SEQ ID NO: 15860 - protein, 13 aa, synthetic construct
ALGEVGADTDKHI

SEQ ID NO: 15861 - protein, 9 aa, synthetic construct
ALGEVGADT

SEQ ID NO: 15862 - protein, 13 aa, synthetic construct
ALGEVGADSDKLI

SEQ ID NO: 15863 - protein, 14 aa, synthetic construct
ALGEVGAAYTDTLI

SEQ ID NO: 15864 - protein, 6 aa, synthetic construct
ALGEVG

SEQ ID NO: 15865 - protein, 13 aa, synthetic construct
ALGEVEWGRRGLI

SEQ ID NO: 15866 - protein, 14 aa, synthetic construct
ALGEVEGYGTDKLI

SEQ ID NO: 15867 - protein, 13 aa, synthetic construct
ALGEVDWGRRGLF

SEQ ID NO: 15868 - protein, 13 aa, synthetic construct
ALGEVDWGGRGLI

SEQ ID NO: 15869 - protein, 13 aa, synthetic construct
ALGEVDSARRVLI

SEQ ID NO: 15870 - protein, 13 aa, synthetic construct
ALGEVDRGRSGLI

SEQ ID NO: 15871 - protein, 14 aa, synthetic construct
ALGEVDQIALTAKL

SEQ ID NO: 15872 - protein, 12 aa, synthetic construct
ALGEVAYSDKLI

SEQ ID NO: 15873 - protein, 14 aa, synthetic construct
ALGETYVLGARSKL

SEQ ID NO: 15874 - protein, 11 aa, synthetic construct
ALGETYTDKLI

SEQ ID NO: 15875 - protein, 14 aa, synthetic construct
ALGETVMGASYTDK

SEQ ID NO: 15876 - protein, 14 aa, synthetic construct
ALGETVLGASYTDK

SEQ ID NO: 15877 - protein, 13 aa, synthetic construct
ALGETVLGASYTD

SEQ ID NO: 15878 - protein, 14 aa, synthetic construct
ALGETTYGVSDKLI

SEQ ID NO: 15879 - protein, 14 aa, synthetic construct
ALGETTYGISEKLI

SEQ ID NO: 15880 - protein, 10 aa, synthetic construct
ALGEVGAKLI

SEQ ID NO: 15881 - protein, 14 aa, synthetic construct
ALGEVGARALAAQL

SEQ ID NO: 15882 - protein, 12 aa, synthetic construct
ALGEVGDTDRLI

SEQ ID NO: 15883 - protein, 14 aa, synthetic construct
ALGEVGARALTAQL

SEQ ID NO: 15884 - protein, 12 aa, synthetic construct
ALGEVGDTDKHI

SEQ ID NO: 15885 - protein, 12 aa, synthetic construct
ALGEVGDTDHLI

SEQ ID NO: 15886 - protein, 13 aa, synthetic construct
ALGEVGDTADKLI

SEQ ID NO: 15887 - protein, 14 aa, synthetic construct
ALGEVGDRAVTAQL

SEQ ID NO: 15888 - protein, 14 aa, synthetic construct
ALGEVGDRALTAEL

SEQ ID NO: 15889 - protein, 10 aa, synthetic construct
ALGEVGDQLI

SEQ ID NO: 15890 - protein, 10 aa, synthetic construct
ALGEVGDKVI

SEQ ID NO: 15891 - protein, 9 aa, synthetic construct
ALGEVGDKL

SEQ ID NO: 15892 - protein, 13 aa, synthetic construct
ALGEVGDDTDKLI

SEQ ID NO: 15893 - protein, 14 aa, synthetic construct
ALGEVGAYGTVKLI

SEQ ID NO: 15894 - protein, 13 aa, synthetic construct
ALGEVGAVTETLF

SEQ ID NO: 15895 - protein, 13 aa, synthetic construct
ALGEVGATGDQLF

SEQ ID NO: 15896 - protein, 13 aa, synthetic construct
ALGEVGATGDKRI

SEQ ID NO: 15897 - protein, 14 aa, synthetic construct
ALGEVGASYTGKLI

SEQ ID NO: 15898 - protein, 13 aa, synthetic construct
ALGEVGASYTEKL

SEQ ID NO: 15899 - protein, 14 aa, synthetic construct
ALGEVGASYTEKII

SEQ ID NO: 15900 - protein, 13 aa, synthetic construct
ALGEVGASYTDKL

SEQ ID NO: 15901 - protein, 14 aa, synthetic construct
ALGEVGASYPEILI

SEQ ID NO: 15902 - protein, 14 aa, synthetic construct
ALGEVGASSTDKLI

SEQ ID NO: 15903 - protein, 14 aa, synthetic construct
ALGEVGASFTEKLI

SEQ ID NO: 15904 - protein, 14 aa, synthetic construct
ALGEVGASCSDKLI

SEQ ID NO: 15905 - protein, 14 aa, synthetic construct
ALGEPGGYATEKLI

SEQ ID NO: 15906 - protein, 14 aa, synthetic construct
ALGEPGGYATDKLI

SEQ ID NO: 15907 - protein, 13 aa, synthetic construct
ALGEPGGYADKLT

SEQ ID NO: 15908 - protein, 14 aa, synthetic construct
ALGELLLGIYTDKL

SEQ ID NO: 15909 - protein, 12 aa, synthetic construct
ALGELLLGDVHR

SEQ ID NO: 15910 - protein, 14 aa, synthetic construct
ALGELLLGDTRKLI

SEQ ID NO: 15911 - protein, 14 aa, synthetic construct
ALGELLLGDTRINS

SEQ ID NO: 15912 - protein, 13 aa, synthetic construct
ALGELLLGDQDKL

SEQ ID NO: 15913 - protein, 14 aa, synthetic construct
ALGELLLGDPNKLI

SEQ ID NO: 15914 - protein, 14 aa, synthetic construct
ALGELLLGDPGQLI

SEQ ID NO: 15915 - protein, 14 aa, synthetic construct
ALGELLLGDPETLI

SEQ ID NO: 15916 - protein, 14 aa, synthetic construct
ALGELLLGDPEKLF

SEQ ID NO: 15917 - protein, 14 aa, synthetic construct
ALGELLLGDPDKPI

SEQ ID NO: 15918 - protein, 14 aa, synthetic construct
ALGELLLGDPDKLV

SEQ ID NO: 15919 - protein, 14 aa, synthetic construct
ALGELLLGDPDKII

SEQ ID NO: 15920 - protein, 14 aa, synthetic construct
ALGELLLGDPDKHI

SEQ ID NO: 15921 - protein, 14 aa, synthetic construct
ALGELLLGDPAKLI

SEQ ID NO: 15922 - protein, 14 aa, synthetic construct
ALGELLLGDLRETH

SEQ ID NO: 15923 - protein, 14 aa, synthetic construct
ALGELLLGDLDKLI

SEQ ID NO: 15924 - protein, 14 aa, synthetic construct
ALGELLLGDADKLI

SEQ ID NO: 15925 - protein, 14 aa, synthetic construct
ALGELLLGASYTDK

SEQ ID NO: 15926 - protein, 14 aa, synthetic construct
ALGELLLGARSKLI

SEQ ID NO: 15927 - protein, 14 aa, synthetic construct
ALGELLLGAPDKLI

SEQ ID NO: 15928 - protein, 14 aa, synthetic construct
ALGELLLEDPDKLI

SEQ ID NO: 15929 - protein, 14 aa, synthetic construct
ALGELLLAGPDKLI

SEQ ID NO: 15930 - protein, 14 aa, synthetic construct
ALGELLLGGYTEKL

SEQ ID NO: 15931 - protein, 13 aa, synthetic construct
ALGELLLGVLYTD

SEQ ID NO: 15932 - protein, 8 aa, synthetic construct
ALGELLGK

SEQ ID NO: 15933 - protein, 14 aa, synthetic construct
ALGELLLGVPDKLI

SEQ ID NO: 15934 - protein, 14 aa, synthetic construct
ALGELNWGIHHKLI

SEQ ID NO: 15935 - protein, 14 aa, synthetic construct
ALGELNWGIHEKLI

SEQ ID NO: 15936 - protein, 14 aa, synthetic construct
ALGELNWGIHDNLI

SEQ ID NO: 15937 - protein, 11 aa, synthetic construct
ALGELNTAKLI

SEQ ID NO: 15938 - protein, 11 aa, synthetic construct
ALGELMGLALI

SEQ ID NO: 15939 - protein, 14 aa, synthetic construct
ALGELLVGDTDKLI

SEQ ID NO: 15940 - protein, 14 aa, synthetic construct
ALGELLVGDPDTLI

SEQ ID NO: 15941 - protein, 13 aa, synthetic construct
ALGELLVGDPDKL

SEQ ID NO: 15942 - protein, 12 aa, synthetic construct
ALGELLSVDQLI

SEQ ID NO: 15943 - protein, 14 aa, synthetic construct
ALGELLQGVNDKNI

SEQ ID NO: 15944 - protein, 11 aa, synthetic construct
ALGELLQGDKL

SEQ ID NO: 15945 - protein, 12 aa, synthetic construct
ALGELLMTDKLI

SEQ ID NO: 15946 - protein, 14 aa, synthetic construct
ALGELLMGDQDKLI

SEQ ID NO: 15947 - protein, 14 aa, synthetic construct
ALGELLMGDPYKLI

SEQ ID NO: 15948 - protein, 14 aa, synthetic construct
ALGELLMGDPDKLF

SEQ ID NO: 15949 - protein, 14 aa, synthetic construct
ALGELLMADPDKLI

SEQ ID NO: 15950 - protein, 14 aa, synthetic construct
ALGELLLYWGLYTD

SEQ ID NO: 15951 - protein, 14 aa, synthetic construct
ALGELLLWDPDKLI

SEQ ID NO: 15952 - protein, 14 aa, synthetic construct
ALGELLLVDPDKLI

SEQ ID NO: 15953 - protein, 14 aa, synthetic construct
ALGELLLLGGSFDS

SEQ ID NO: 15954 - protein, 14 aa, synthetic construct
ALGELLLGVSDTPI

SEQ ID NO: 15955 - protein, 12 aa, synthetic construct
ALGELLIFDKLI

SEQ ID NO: 15956 - protein, 13 aa, synthetic construct
ALGELLGFEPYNS

SEQ ID NO: 15957 - protein, 14 aa, synthetic construct
ALGELPCTGGCTPI

SEQ ID NO: 15958 - protein, 14 aa, synthetic construct
ALGELGVYGTDKLI

SEQ ID NO: 15959 - protein, 13 aa, synthetic construct
ALGELGVYADQLI

SEQ ID NO: 15960 - protein, 13 aa, synthetic construct
ALGELGVYADKLI

SEQ ID NO: 15961 - protein, 12 aa, synthetic construct
ALGELGVTYKLN

SEQ ID NO: 15962 - protein, 12 aa, synthetic construct
ALGELGVTGDKL

SEQ ID NO: 15963 - protein, 13 aa, synthetic construct
ALGELGVTGDKIV

SEQ ID NO: 15964 - protein, 12 aa, synthetic construct
ALGELGVSDKLI

SEQ ID NO: 15965 - protein, 14 aa, synthetic construct
ALGELGVRALTAQL

SEQ ID NO: 15966 - protein, 14 aa, synthetic construct
ALGELGTSYTDNSS

SEQ ID NO: 15967 - protein, 14 aa, synthetic construct
ALGELGTSYTDKLI

SEQ ID NO: 15968 - protein, 13 aa, synthetic construct
ALGELGRYTDQLI

SEQ ID NO: 15969 - protein, 13 aa, synthetic construct
ALGELGRYTDKHI

SEQ ID NO: 15970 - protein, 13 aa, synthetic construct
ALGELGRYTDILI

SEQ ID NO: 15971 - protein, 14 aa, synthetic construct
ALGELGRYGTDKLI

SEQ ID NO: 15972 - protein, 13 aa, synthetic construct
ALGELGRYADKLI

SEQ ID NO: 15973 - protein, 12 aa, synthetic construct
ALGELGRTDKLN

SEQ ID NO: 15974 - protein, 11 aa, synthetic construct
ALGELGRTDKL

SEQ ID NO: 15975 - protein, 13 aa, synthetic construct
ALGELGRSTDQLS

SEQ ID NO: 15976 - protein, 10 aa, synthetic construct
ALGELGQTLI

SEQ ID NO: 15977 - protein, 8 aa, synthetic construct
ALGELGQH

SEQ ID NO: 15978 - protein, 14 aa, synthetic construct
ALGELGPSYTDKLI

SEQ ID NO: 15979 - protein, 14 aa, synthetic construct
ALGELGPRTPLNSS

SEQ ID NO: 15980 - protein, 13 aa, synthetic construct
ALGELGVYGTDKL

SEQ ID NO: 15981 - protein, 13 aa, synthetic construct
ALGELGVYSDKLI

SEQ ID NO: 15982 - protein, 14 aa, synthetic construct
ALGELLCTGGCTPI

SEQ ID NO: 15983 - protein, 14 aa, synthetic construct
ALGELGWGPYTDKL

SEQ ID NO: 15984 - protein, 14 aa, synthetic construct
ALGELKWGPYTDKL

SEQ ID NO: 15985 - protein, 11 aa, synthetic construct
ALGELKGLGLI

SEQ ID NO: 15986 - protein, 14 aa, synthetic construct
ALGELIQGDPDKLI

SEQ ID NO: 15987 - protein, 14 aa, synthetic construct
ALGELILGIQINSS

SEQ ID NO: 15988 - protein, 6 aa, synthetic construct
ALGELI

SEQ ID NO: 15989 - protein, 14 aa, synthetic construct
ALGELHYWRSYTDK

SEQ ID NO: 15990 - protein, 14 aa, synthetic construct
ALGELHVLGDTNTD

SEQ ID NO: 15991 - protein, 14 aa, synthetic construct
ALGELHTGGYEYTD

SEQ ID NO: 15992 - protein, 14 aa, synthetic construct
ALGELHTGGFGDTD

SEQ ID NO: 15993 - protein, 14 aa, synthetic construct
ALGELHLYWWLYTD

SEQ ID NO: 15994 - protein, 14 aa, synthetic construct
ALGELHLGVLYTDK

SEQ ID NO: 15995 - protein, 14 aa, synthetic construct
ALGELGYTTPINSS

SEQ ID NO: 15996 - protein, 13 aa, synthetic construct
ALGELGYTSDKLI

SEQ ID NO: 15997 - protein, 13 aa, synthetic construct
ALGELGYTPINSS

SEQ ID NO: 15998 - protein, 14 aa, synthetic construct
ALGELGYTGPINSS

SEQ ID NO: 15999 - protein, 12 aa, synthetic construct
ALGELGYTGKLI

SEQ ID NO: 16000 - protein, 13 aa, synthetic construct
ALGELGYTGDKNI

SEQ ID NO: 16001 - protein, 13 aa, synthetic construct
ALGELGYTGDKLI

SEQ ID NO: 16002 - protein, 12 aa, synthetic construct
ALGELGYTDKLL

SEQ ID NO: 16003 - protein, 14 aa, synthetic construct
ALGELGYRAMTAQL

SEQ ID NO: 16004 - protein, 13 aa, synthetic construct
ALGELGYRALTAQ

SEQ ID NO: 16005 - protein, 13 aa, synthetic construct
ALGELNWGRRGLI

SEQ ID NO: 16006 - protein, 14 aa, synthetic construct
ALGELPCWGRYTDK

SEQ ID NO: 16007 - protein, 14 aa, synthetic construct
ALGELGPPVLGDIP

SEQ ID NO: 16008 - protein, 14 aa, synthetic construct
ALGELPTGGYTDKL

SEQ ID NO: 16009 - protein, 14 aa, synthetic construct
ALGELPTGGFVYTD

SEQ ID NO: 16010 - protein, 14 aa, synthetic construct
ALGELPTGGFGFTD

SEQ ID NO: 16011 - protein, 14 aa, synthetic construct
ALGELPTGGFGCTD

SEQ ID NO: 16012 - protein, 14 aa, synthetic construct
ALGELPTGGFEYTD

SEQ ID NO: 16013 - protein, 14 aa, synthetic construct
ALGELPTGGFAYTD

SEQ ID NO: 16014 - protein, 14 aa, synthetic construct
ALGELPTGGCGYTD

SEQ ID NO: 16015 - protein, 14 aa, synthetic construct
ALGELPTGDFGYTD

SEQ ID NO: 16016 - protein, 12 aa, synthetic construct
ALGELPTGCIGY

SEQ ID NO: 16017 - protein, 14 aa, synthetic construct
ALGELPTGAVGDSS

SEQ ID NO: 16018 - protein, 14 aa, synthetic construct
ALGELPTEGFGYTD

SEQ ID NO: 16019 - protein, 14 aa, synthetic construct
ALGELPTAGFGYTD

SEQ ID NO: 16020 - protein, 13 aa, synthetic construct
ALGELPSWGRYTD

SEQ ID NO: 16021 - protein, 9 aa, synthetic construct
ALGELPSGG

SEQ ID NO: 16022 - protein, 14 aa, synthetic construct
ALGELPRGVLSTDK

SEQ ID NO: 16023 - protein, 14 aa, synthetic construct
ALGELPRGSCTPIN

SEQ ID NO: 16024 - protein, 14 aa, synthetic construct
ALGELPRGGFGYTD

SEQ ID NO: 16025 - protein, 14 aa, synthetic construct
ALGELPQKVLNTYK

SEQ ID NO: 16026 - protein, 13 aa, synthetic construct
ALGELPQGVVYTD

SEQ ID NO: 16027 - protein, 14 aa, synthetic construct
ALGELPQGVLYTEK

SEQ ID NO: 16028 - protein, 13 aa, synthetic construct
ALGELPQGVLYTD

SEQ ID NO: 16029 - protein, 14 aa, synthetic construct
ALGELPPGVLYTDK

SEQ ID NO: 16030 - protein, 14 aa, synthetic construct
ALGELPTGGYADKL

SEQ ID NO: 16031 - protein, 14 aa, synthetic construct
ALGELPTGGYTPIN

SEQ ID NO: 16032 - protein, 14 aa, synthetic construct
ALGELPMYWGLSTD

SEQ ID NO: 16033 - protein, 14 aa, synthetic construct
ALGELPTRGRKPIN

SEQ ID NO: 16034 - protein, 14 aa, synthetic construct
ALGELPYWGKYTDK

SEQ ID NO: 16035 - protein, 14 aa, synthetic construct
ALGELPYWGIRTPI

SEQ ID NO: 16036 - protein, 14 aa, synthetic construct
ALGELPYWGIRTIN

SEQ ID NO: 16037 - protein, 11 aa, synthetic construct
ALGELPYWGIN

SEQ ID NO: 16038 - protein, 14 aa, synthetic construct
ALGELPYWGILSSW

SEQ ID NO: 16039 - protein, 14 aa, synthetic construct
ALGELPYWGGSTDK

SEQ ID NO: 16040 - protein, 9 aa, synthetic construct
ALGELPYWG

SEQ ID NO: 16041 - protein, 13 aa, synthetic construct
ALGELPYSRTTTD

SEQ ID NO: 16042 - protein, 14 aa, synthetic construct
ALGELPYGISDKLI

SEQ ID NO: 16043 - protein, 14 aa, synthetic construct
ALGELPYCVRYTDK

SEQ ID NO: 16044 - protein, 14 aa, synthetic construct
ALGELPWGSCTPIN

SEQ ID NO: 16045 - protein, 12 aa, synthetic construct
ALGELPVYWGLY

SEQ ID NO: 16046 - protein, 14 aa, synthetic construct
ALGELPVYWGLHTD

SEQ ID NO: 16047 - protein, 14 aa, synthetic construct
ALGELPVYWGIQHR

SEQ ID NO: 16048 - protein, 14 aa, synthetic construct
ALGELPVSWGLYTD

SEQ ID NO: 16049 - protein, 14 aa, synthetic construct
ALGELPVSWGLHTD

SEQ ID NO: 16050 - protein, 14 aa, synthetic construct
ALGELPVSWGCTPI

SEQ ID NO: 16051 - protein, 10 aa, synthetic construct
ALGELPVSWG

SEQ ID NO: 16052 - protein, 14 aa, synthetic construct
ALGELPVSSRLSTD

SEQ ID NO: 16053 - protein, 14 aa, synthetic construct
ALGELPTWGPYTDK

SEQ ID NO: 16054 - protein, 14 aa, synthetic construct
ALGELPTRGRPPIN

SEQ ID NO: 16055 - protein, 13 aa, synthetic construct
ALGELPNWGRSTD

SEQ ID NO: 16056 - protein, 14 aa, synthetic construct
ALGELPMRVLNTDK

SEQ ID NO: 16057 - protein, 14 aa, synthetic construct
ALGELPFVLGAVHR

SEQ ID NO: 16058 - protein, 14 aa, synthetic construct
ALGELPLGVPSTDK

SEQ ID NO: 16059 - protein, 14 aa, synthetic construct
ALGELPLGVMSTDK

SEQ ID NO: 16060 - protein, 14 aa, synthetic construct
ALGELPLGVLSTDQ

SEQ ID NO: 16061 - protein, 14 aa, synthetic construct
ALGELPLGVLKTDK

SEQ ID NO: 16062 - protein, 14 aa, synthetic construct
ALGELPLGVDTDKL

SEQ ID NO: 16063 - protein, 14 aa, synthetic construct
ALGELPLGGSFDST

SEQ ID NO: 16064 - protein, 14 aa, synthetic construct
ALGELPLGFLYTDK

SEQ ID NO: 16065 - protein, 14 aa, synthetic construct
ALGELPLGDTRKLI

SEQ ID NO: 16066 - protein, 14 aa, synthetic construct
ALGELPLGDTPTPI

SEQ ID NO: 16067 - protein, 14 aa, synthetic construct
ALGELPLGDTPINS

SEQ ID NO: 16068 - protein, 14 aa, synthetic construct
ALGELPLGDRALTA

SEQ ID NO: 16069 - protein, 14 aa, synthetic construct
ALGELPLGDPEKLI

SEQ ID NO: 16070 - protein, 13 aa, synthetic construct
ALGELPLGDNKLI

SEQ ID NO: 16071 - protein, 14 aa, synthetic construct
ALGELPLGASYTDK

SEQ ID NO: 16072 - protein, 13 aa, synthetic construct
ALGELPLGASYTD

SEQ ID NO: 16073 - protein, 8 aa, synthetic construct
ALGELPLG

SEQ ID NO: 16074 - protein, 14 aa, synthetic construct
ALGELPLFWGLYTD

SEQ ID NO: 16075 - protein, 14 aa, synthetic construct
ALGELPLCWGLYTD

SEQ ID NO: 16076 - protein, 13 aa, synthetic construct
ALGELPKGGLGNT

SEQ ID NO: 16077 - protein, 14 aa, synthetic construct
ALGELPKGGFGYTD

SEQ ID NO: 16078 - protein, 14 aa, synthetic construct
ALGELPHWGRYTEK

SEQ ID NO: 16079 - protein, 14 aa, synthetic construct
ALGELPHGGFGYTD

SEQ ID NO: 16080 - protein, 13 aa, synthetic construct
ALGELPLGVMYTD

SEQ ID NO: 16081 - protein, 14 aa, synthetic construct
ALGELPLGVPYTDK

SEQ ID NO: 16082 - protein, 13 aa, synthetic construct
ALGELPMRDLYNY

SEQ ID NO: 16083 - protein, 14 aa, synthetic construct
ALGELPLGVQYTDK

SEQ ID NO: 16084 - protein, 14 aa, synthetic construct
ALGELPMHWGLYTD

SEQ ID NO: 16085 - protein, 13 aa, synthetic construct
ALGELPMGVLYTD

SEQ ID NO: 16086 - protein, 14 aa, synthetic construct
ALGELPMCWGLYTD

SEQ ID NO: 16087 - protein, 14 aa, synthetic construct
ALGELPLYWWLSTD

SEQ ID NO: 16088 - protein, 14 aa, synthetic construct
ALGELPLYWGVYTD

SEQ ID NO: 16089 - protein, 14 aa, synthetic construct
ALGELPLYWGTPIN

SEQ ID NO: 16090 - protein, 14 aa, synthetic construct
ALGELPLYWGRYTD

SEQ ID NO: 16091 - protein, 14 aa, synthetic construct
ALGELPLYWGPYTD

SEQ ID NO: 16092 - protein, 14 aa, synthetic construct
ALGELPLYWGIQIN

SEQ ID NO: 16093 - protein, 14 aa, synthetic construct
ALGELPLYWGINDK

SEQ ID NO: 16094 - protein, 10 aa, synthetic construct
ALGELPLYWG

SEQ ID NO: 16095 - protein, 9 aa, synthetic construct
ALGELPLYR

SEQ ID NO: 16096 - protein, 14 aa, synthetic construct
ALGELPLYLGLYTD

SEQ ID NO: 16097 - protein, 14 aa, synthetic construct
ALGELPLYCVLYTD

SEQ ID NO: 16098 - protein, 14 aa, synthetic construct
ALGELPLVVLYTDK

SEQ ID NO: 16099 - protein, 14 aa, synthetic construct
ALGELPLRVMYTDK

SEQ ID NO: 16100 - protein, 13 aa, synthetic construct
ALGELPLRVEYTD

SEQ ID NO: 16101 - protein, 9 aa, synthetic construct
ALGELPLLV

SEQ ID NO: 16102 - protein, 14 aa, synthetic construct
ALGELPLGVVYTDK

SEQ ID NO: 16103 - protein, 13 aa, synthetic construct
ALGELPLGVSDTP

SEQ ID NO: 16104 - protein, 14 aa, synthetic construct
ALGELPLGVRSKLI

SEQ ID NO: 16105 - protein, 13 aa, synthetic construct
ALGELGPPVLVVT

SEQ ID NO: 16106 - protein, 13 aa, synthetic construct
ALGELGPGGYDTD

SEQ ID NO: 16107 - protein, 14 aa, synthetic construct
ALGELPYWGPVVNS

SEQ ID NO: 16108 - protein, 13 aa, synthetic construct
ALGELGGYADKIN

SEQ ID NO: 16109 - protein, 13 aa, synthetic construct
ALGELGGYADKHV

SEQ ID NO: 16110 - protein, 13 aa, synthetic construct
ALGELGGYADKHN

SEQ ID NO: 16111 - protein, 11 aa, synthetic construct
ALGELGGYADK

SEQ ID NO: 16112 - protein, 13 aa, synthetic construct
ALGELGGYAAQLI

SEQ ID NO: 16113 - protein, 13 aa, synthetic construct
ALGELGGYAAKLL

SEQ ID NO: 16114 - protein, 13 aa, synthetic construct
ALGELGGTPVNIN

SEQ ID NO: 16115 - protein, 14 aa, synthetic construct
ALGELGGSVTDKLI

SEQ ID NO: 16116 - protein, 14 aa, synthetic construct
ALGELGGSGTENLI

SEQ ID NO: 16117 - protein, 14 aa, synthetic construct
ALGELGGSGTDQLI

SEQ ID NO: 16118 - protein, 14 aa, synthetic construct
ALGELGGSGTDKVI

SEQ ID NO: 16119 - protein, 14 aa, synthetic construct
ALGELGGSGTDKII

SEQ ID NO: 16120 - protein, 13 aa, synthetic construct
ALGELGGSFDSTT

SEQ ID NO: 16121 - protein, 14 aa, synthetic construct
ALGELGGSFDSSTL

SEQ ID NO: 16122 - protein, 12 aa, synthetic construct
ALGELGGSDDKI

SEQ ID NO: 16123 - protein, 13 aa, synthetic construct
ALGELGGSAHKII

SEQ ID NO: 16124 - protein, 13 aa, synthetic construct
ALGELGGSAEKLI

SEQ ID NO: 16125 - protein, 13 aa, synthetic construct
ALGELGGSADNHI

SEQ ID NO: 16126 - protein, 13 aa, synthetic construct
ALGELGGSADKII

SEQ ID NO: 16127 - protein, 14 aa, synthetic construct
ALGELGGRTPINSS

SEQ ID NO: 16128 - protein, 12 aa, synthetic construct
ALGELGGNGEKQ

SEQ ID NO: 16129 - protein, 13 aa, synthetic construct
ALGELGGNAYKLI

SEQ ID NO: 16130 - protein, 12 aa, synthetic construct
ALGELGGYADKI

SEQ ID NO: 16131 - protein, 13 aa, synthetic construct
ALGELGGYADKIV

SEQ ID NO: 16132 - protein, 13 aa, synthetic construct
ALGELGGIPINSS

SEQ ID NO: 16133 - protein, 13 aa, synthetic construct
ALGELGGYADKLD

SEQ ID NO: 16134 - protein, 13 aa, synthetic construct
ALGELGGYAVNLI

SEQ ID NO: 16135 - protein, 14 aa, synthetic construct
ALGELGGYAVGDSS

SEQ ID NO: 16136 - protein, 13 aa, synthetic construct
ALGELGGYASNLI

SEQ ID NO: 16137 - protein, 13 aa, synthetic construct
ALGELGGYAPHLI

SEQ ID NO: 16138 - protein, 13 aa, synthetic construct
ALGELGGYAHKLY

SEQ ID NO: 16139 - protein, 13 aa, synthetic construct
ALGELGGYAHKLN

SEQ ID NO: 16140 - protein, 13 aa, synthetic construct
ALGELGGYAETHI

SEQ ID NO: 16141 - protein, 12 aa, synthetic construct
ALGELGGYAETH

SEQ ID NO: 16142 - protein, 13 aa, synthetic construct
ALGELGGYAEQLI

SEQ ID NO: 16143 - protein, 13 aa, synthetic construct
ALGELGGYAENLI

SEQ ID NO: 16144 - protein, 13 aa, synthetic construct
ALGELGGYAEKLN

SEQ ID NO: 16145 - protein, 12 aa, synthetic construct
ALGELGGYAEKL

SEQ ID NO: 16146 - protein, 13 aa, synthetic construct
ALGELGGYAEILI

SEQ ID NO: 16147 - protein, 13 aa, synthetic construct
ALGELGGYADTLM

SEQ ID NO: 16148 - protein, 13 aa, synthetic construct
ALGELGGYADNPI

SEQ ID NO: 16149 - protein, 13 aa, synthetic construct
ALGELGGYADNLT

SEQ ID NO: 16150 - protein, 13 aa, synthetic construct
ALGELGGYADNLF

SEQ ID NO: 16151 - protein, 13 aa, synthetic construct
ALGELGGYADLII

SEQ ID NO: 16152 - protein, 13 aa, synthetic construct
ALGELGGYADKVI

SEQ ID NO: 16153 - protein, 13 aa, synthetic construct
ALGELGGYADKPL

SEQ ID NO: 16154 - protein, 13 aa, synthetic construct
ALGELGGYADKLS

SEQ ID NO: 16155 - protein, 13 aa, synthetic construct
ALGELGGNADKLV

SEQ ID NO: 16156 - protein, 13 aa, synthetic construct
ALGELGGINTHKH

SEQ ID NO: 16157 - protein, 14 aa, synthetic construct
ALGELGGYAYTDKL

SEQ ID NO: 16158 - protein, 14 aa, synthetic construct
ALGELGDTYNHKLI

SEQ ID NO: 16159 - protein, 12 aa, synthetic construct
ALGELGDTVQLI

SEQ ID NO: 16160 - protein, 12 aa, synthetic construct
ALGELGDTVDKL

SEQ ID NO: 16161 - protein, 14 aa, synthetic construct
ALGELGDTTTDKLI

SEQ ID NO: 16162 - protein, 14 aa, synthetic construct
ALGELGDTTPRNSS

SEQ ID NO: 16163 - protein, 14 aa, synthetic construct
ALGELGDTTPIKSS

SEQ ID NO: 16164 - protein, 14 aa, synthetic construct
ALGELGDTSTPINS

SEQ ID NO: 16165 - protein, 13 aa, synthetic construct
ALGELGDTSEKLI

SEQ ID NO: 16166 - protein, 13 aa, synthetic construct
ALGELGDTPIKSS

SEQ ID NO: 16167 - protein, 13 aa, synthetic construct
ALGELGDTNDNLI

SEQ ID NO: 16168 - protein, 13 aa, synthetic construct
ALGELGDTNDKLI

SEQ ID NO: 16169 - protein, 13 aa, synthetic construct
ALGELGDTIDKLI

SEQ ID NO: 16170 - protein, 13 aa, synthetic construct
ALGELGDTGSKLI

SEQ ID NO: 16171 - protein, 14 aa, synthetic construct
ALGELGDTGPITSS

SEQ ID NO: 16172 - protein, 13 aa, synthetic construct
ALGELGDTGNKLN

SEQ ID NO: 16173 - protein, 13 aa, synthetic construct
ALGELGDTGETLI

SEQ ID NO: 16174 - protein, 13 aa, synthetic construct
ALGELGDTGETLF

SEQ ID NO: 16175 - protein, 12 aa, synthetic construct
ALGELGDTGETH

SEQ ID NO: 16176 - protein, 13 aa, synthetic construct
ALGELGDTGEKLN

SEQ ID NO: 16177 - protein, 13 aa, synthetic construct
ALGELGDTGEKII

SEQ ID NO: 16178 - protein, 13 aa, synthetic construct
ALGELGDTGDQYI

SEQ ID NO: 16179 - protein, 13 aa, synthetic construct
ALGELGDTGDQVI

SEQ ID NO: 16180 - protein, 12 aa, synthetic construct
ALGELGDTYKLI

SEQ ID NO: 16181 - protein, 12 aa, synthetic construct
ALGELGDTYQLI

SEQ ID NO: 16182 - protein, 14 aa, synthetic construct
ALGELGGHGTDKLI

SEQ ID NO: 16183 - protein, 14 aa, synthetic construct
ALGELGERAVTAQL

SEQ ID NO: 16184 - protein, 14 aa, synthetic construct
ALGELGGGRTPINS

SEQ ID NO: 16185 - protein, 14 aa, synthetic construct
ALGELGGGPPRNSS

SEQ ID NO: 16186 - protein, 13 aa, synthetic construct
ALGELGGGAEKLI

SEQ ID NO: 16187 - protein, 14 aa, synthetic construct
ALGELGGFGTDKLI

SEQ ID NO: 16188 - protein, 13 aa, synthetic construct
ALGELGGDTDQLI

SEQ ID NO: 16189 - protein, 14 aa, synthetic construct
ALGELGGDGTDKRI

SEQ ID NO: 16190 - protein, 13 aa, synthetic construct
ALGELGGDADNLI

SEQ ID NO: 16191 - protein, 13 aa, synthetic construct
ALGELGGDADKLN

SEQ ID NO: 16192 - protein, 13 aa, synthetic construct
ALGELGGDAAKRI

SEQ ID NO: 16193 - protein, 13 aa, synthetic construct
ALGELGGDAAHLI

SEQ ID NO: 16194 - protein, 13 aa, synthetic construct
ALGELGGCADQLI

SEQ ID NO: 16195 - protein, 14 aa, synthetic construct
ALGELGGAGPENLI

SEQ ID NO: 16196 - protein, 13 aa, synthetic construct
ALGELGFSTDKLI

SEQ ID NO: 16197 - protein, 13 aa, synthetic construct
ALGELGEYADKLI

SEQ ID NO: 16198 - protein, 13 aa, synthetic construct
ALGELGEVTDKLI

SEQ ID NO: 16199 - protein, 13 aa, synthetic construct
ALGELGETGEKLI

SEQ ID NO: 16200 - protein, 12 aa, synthetic construct
ALGELGETDQLI

SEQ ID NO: 16201 - protein, 12 aa, synthetic construct
ALGELGETDKVI

SEQ ID NO: 16202 - protein, 12 aa, synthetic construct
ALGELGETDKLI

SEQ ID NO: 16203 - protein, 13 aa, synthetic construct
ALGELGETADKLI

SEQ ID NO: 16204 - protein, 14 aa, synthetic construct
ALGELGERAVTAQV

SEQ ID NO: 16205 - protein, 12 aa, synthetic construct
ALGELGGYAYKL

SEQ ID NO: 16206 - protein, 13 aa, synthetic construct
ALGELGGYDDKII

SEQ ID NO: 16207 - protein, 12 aa, synthetic construct
ALGELGPDTHKL

SEQ ID NO: 16208 - protein, 12 aa, synthetic construct
ALGELGMADQLI

SEQ ID NO: 16209 - protein, 11 aa, synthetic construct
ALGELGLTHKH

SEQ ID NO: 16210 - protein, 12 aa, synthetic construct
ALGELGLTDQLY

SEQ ID NO: 16211 - protein, 12 aa, synthetic construct
ALGELGLTDNLI

SEQ ID NO: 16212 - protein, 13 aa, synthetic construct
ALGELGLSTDKLI

SEQ ID NO: 16213 - protein, 12 aa, synthetic construct
ALGELGLSDQLI

SEQ ID NO: 16214 - protein, 13 aa, synthetic construct
ALGELGLNEKKLF

SEQ ID NO: 16215 - protein, 12 aa, synthetic construct
ALGELGLAENFN

SEQ ID NO: 16216 - protein, 13 aa, synthetic construct
ALGELGKYTVKLV

SEQ ID NO: 16217 - protein, 13 aa, synthetic construct
ALGELGKYTDQLI

SEQ ID NO: 16218 - protein, 12 aa, synthetic construct
ALGELGKTDKLN

SEQ ID NO: 16219 - protein, 10 aa, synthetic construct
ALGELGKTDK

SEQ ID NO: 16220 - protein, 13 aa, synthetic construct
ALGELGKSTDKII

SEQ ID NO: 16221 - protein, 13 aa, synthetic construct
ALGELGKNTDKLI

SEQ ID NO: 16222 - protein, 7 aa, synthetic construct
ALGELGK

SEQ ID NO: 16223 - protein, 13 aa, synthetic construct
ALGELGIYTYKHI

SEQ ID NO: 16224 - protein, 12 aa, synthetic construct
ALGELGIYTRQM

SEQ ID NO: 16225 - protein, 13 aa, synthetic construct
ALGELGIYTQKLI

SEQ ID NO: 16226 - protein, 13 aa, synthetic construct
ALGELGIYTHKNI

SEQ ID NO: 16227 - protein, 13 aa, synthetic construct
ALGELGIYTGKLI

SEQ ID NO: 16228 - protein, 13 aa, synthetic construct
ALGELGIYTETLI

SEQ ID NO: 16229 - protein, 13 aa, synthetic construct
ALGELGIYTERLI

SEQ ID NO: 16230 - protein, 13 aa, synthetic construct
ALGELGLYTENLI

SEQ ID NO: 16231 - protein, 12 aa, synthetic construct
ALGELGMNDKLI

SEQ ID NO: 16232 - protein, 13 aa, synthetic construct
ALGELGIYTEKII

SEQ ID NO: 16233 - protein, 12 aa, synthetic construct
ALGELGMSDKHI

SEQ ID NO: 16234 - protein, 13 aa, synthetic construct
ALGELGPDTDQLI

SEQ ID NO: 16235 - protein, 13 aa, synthetic construct
ALGELGPDTDQII

SEQ ID NO: 16236 - protein, 13 aa, synthetic construct
ALGELGPDPDKLI

SEQ ID NO: 16237 - protein, 13 aa, synthetic construct
ALGELGNTGDKLI

SEQ ID NO: 16238 - protein, 13 aa, synthetic construct
ALGELGNTGDKII

SEQ ID NO: 16239 - protein, 12 aa, synthetic construct
ALGELGMTYKHI

SEQ ID NO: 16240 - protein, 13 aa, synthetic construct
ALGELGMTETLTD

SEQ ID NO: 16241 - protein, 11 aa, synthetic construct
ALGELGMTDRL

SEQ ID NO: 16242 - protein, 12 aa, synthetic construct
ALGELGMTDNLT

SEQ ID NO: 16243 - protein, 12 aa, synthetic construct
ALGELGMTDNII

SEQ ID NO: 16244 - protein, 12 aa, synthetic construct
ALGELGMTDKNI

SEQ ID NO: 16245 - protein, 12 aa, synthetic construct
ALGELGMTDKIF

SEQ ID NO: 16246 - protein, 12 aa, synthetic construct
ALGELGMTDKHN

SEQ ID NO: 16247 - protein, 12 aa, synthetic construct
ALGELGMTDKFV

SEQ ID NO: 16248 - protein, 12 aa, synthetic construct
ALGELGMTDKFF

SEQ ID NO: 16249 - protein, 12 aa, synthetic construct
ALGELGMTDELV

SEQ ID NO: 16250 - protein, 12 aa, synthetic construct
ALGELGMSVKLI

SEQ ID NO: 16251 - protein, 12 aa, synthetic construct
ALGELGMSDQLI

SEQ ID NO: 16252 - protein, 12 aa, synthetic construct
ALGELGMSDKRI

SEQ ID NO: 16253 - protein, 12 aa, synthetic construct
ALGELGMSDKLT

SEQ ID NO: 16254 - protein, 12 aa, synthetic construct
ALGELGMSDKHV

SEQ ID NO: 16255 - protein, 13 aa, synthetic construct
ALGELGIYTENLI

SEQ ID NO: 16256 - protein, 13 aa, synthetic construct
ALGELGIYTDTLL

SEQ ID NO: 16257 - protein, 14 aa, synthetic construct
ALGELGGYGADKII

SEQ ID NO: 16258 - protein, 12 aa, synthetic construct
ALGELGHTGDKL

SEQ ID NO: 16259 - protein, 14 aa, synthetic construct
ALGELGHTALTEQL

SEQ ID NO: 16260 - protein, 9 aa, synthetic construct
ALGELGHRA

SEQ ID NO: 16261 - protein, 13 aa, synthetic construct
ALGELGGYVDKLI

SEQ ID NO: 16262 - protein, 14 aa, synthetic construct
ALGELGGYTPINSS

SEQ ID NO: 16263 - protein, 13 aa, synthetic construct
ALGELGGYTDQLI

SEQ ID NO: 16264 - protein, 13 aa, synthetic construct
ALGELGGYSYKLI

SEQ ID NO: 16265 - protein, 13 aa, synthetic construct
ALGELGGYSDKLN

SEQ ID NO: 16266 - protein, 12 aa, synthetic construct
ALGELGGYRYTH

SEQ ID NO: 16267 - protein, 14 aa, synthetic construct
ALGELGGYNTEKLI

SEQ ID NO: 16268 - protein, 14 aa, synthetic construct
ALGELGGYGTYKLL

SEQ ID NO: 16269 - protein, 14 aa, synthetic construct
ALGELGGYGTVTLI

SEQ ID NO: 16270 - protein, 14 aa, synthetic construct
ALGELGGYGTQKLI

SEQ ID NO: 16271 - protein, 14 aa, synthetic construct
ALGELGGYGTHKLI

SEQ ID NO: 16272 - protein, 14 aa, synthetic construct
ALGELGGYGTETLI

SEQ ID NO: 16273 - protein, 14 aa, synthetic construct
ALGELGGYGTEKLF

SEQ ID NO: 16274 - protein, 14 aa, synthetic construct
ALGELGGYGTDKVI

SEQ ID NO: 16275 - protein, 13 aa, synthetic construct
ALGELGGYGTDKI

SEQ ID NO: 16276 - protein, 14 aa, synthetic construct
ALGELGGYGPEKLI

SEQ ID NO: 16277 - protein, 14 aa, synthetic construct
ALGELGGYGPDKLI

SEQ ID NO: 16278 - protein, 14 aa, synthetic construct
ALGELGGYGIDKLI

SEQ ID NO: 16279 - protein, 14 aa, synthetic construct
ALGELGGYGAEKLI

SEQ ID NO: 16280 - protein, 11 aa, synthetic construct
ALGELGHTDKL

SEQ ID NO: 16281 - protein, 12 aa, synthetic construct
ALGELGIADKLI

SEQ ID NO: 16282 - protein, 13 aa, synthetic construct
ALGELGIYTDKPI

SEQ ID NO: 16283 - protein, 12 aa, synthetic construct
ALGELGIAINSS

SEQ ID NO: 16284 - protein, 13 aa, synthetic construct
ALGELGIYTDKLF

SEQ ID NO: 16285 - protein, 13 aa, synthetic construct
ALGELGIYTDKHN

SEQ ID NO: 16286 - protein, 13 aa, synthetic construct
ALGELGIYTAKLI

SEQ ID NO: 16287 - protein, 13 aa, synthetic construct
ALGELGIYTAILI

SEQ ID NO: 16288 - protein, 13 aa, synthetic construct
ALGELGIYSDNSS

SEQ ID NO: 16289 - protein, 13 aa, synthetic construct
ALGELGIYSDKLI

SEQ ID NO: 16290 - protein, 13 aa, synthetic construct
ALGELGIYAHKLI

SEQ ID NO: 16291 - protein, 12 aa, synthetic construct
ALGELGITVKLF

SEQ ID NO: 16292 - protein, 12 aa, synthetic construct
ALGELGITDKIN

SEQ ID NO: 16293 - protein, 12 aa, synthetic construct
ALGELGITDKHN

SEQ ID NO: 16294 - protein, 13 aa, synthetic construct
ALGELGISTGKLI

SEQ ID NO: 16295 - protein, 13 aa, synthetic construct
ALGELGISTEKLI

SEQ ID NO: 16296 - protein, 13 aa, synthetic construct
ALGELGISTDQLI

SEQ ID NO: 16297 - protein, 13 aa, synthetic construct
ALGELGISTDKVI

SEQ ID NO: 16298 - protein, 12 aa, synthetic construct
ALGELGISDKLI

SEQ ID NO: 16299 - protein, 13 aa, synthetic construct
ALGELGIRSINSS

SEQ ID NO: 16300 - protein, 12 aa, synthetic construct
ALGELGIQINSS

SEQ ID NO: 16301 - protein, 11 aa, synthetic construct
ALGELGINNDQ

SEQ ID NO: 16302 - protein, 12 aa, synthetic construct
ALGELGIHRSTH

SEQ ID NO: 16303 - protein, 12 aa, synthetic construct
ALGELGIFDQLI

SEQ ID NO: 16304 - protein, 13 aa, synthetic construct
ALGELGICTDKLT

SEQ ID NO: 16305 - protein, 14 aa, synthetic construct
ALGELPYWGMGAPI

SEQ ID NO: 16306 - protein, 13 aa, synthetic construct
ALGELPYWGRCTD

SEQ ID NO: 16307 - protein, 13 aa, synthetic construct
ALGEPGGYADKIF

SEQ ID NO: 16308 - protein, 10 aa, synthetic construct
ALGEMGEKLL

SEQ ID NO: 16309 - protein, 13 aa, synthetic construct
ALGEMGDTPINSS

SEQ ID NO: 16310 - protein, 13 aa, synthetic construct
ALGEMGDTGDKII

SEQ ID NO: 16311 - protein, 14 aa, synthetic construct
ALGEMGDTALTAQI

SEQ ID NO: 16312 - protein, 12 aa, synthetic construct
ALGEMGDSDKVI

SEQ ID NO: 16313 - protein, 12 aa, synthetic construct
ALGEMGDSDKLI

SEQ ID NO: 16314 - protein, 14 aa, synthetic construct
ALGEMGDRDLTAQL

SEQ ID NO: 16315 - protein, 14 aa, synthetic construct
ALGEMGDRAMTAQL

SEQ ID NO: 16316 - protein, 14 aa, synthetic construct
ALGEMGDRALTAQL

SEQ ID NO: 16317 - protein, 13 aa, synthetic construct
ALGEMGAVTEKLI

SEQ ID NO: 16318 - protein, 14 aa, synthetic construct
ALGEMGASYTYKLI

SEQ ID NO: 16319 - protein, 14 aa, synthetic construct
ALGEMGASYTDKII

SEQ ID NO: 16320 - protein, 13 aa, synthetic construct
ALGEMGADTKKII

SEQ ID NO: 16321 - protein, 13 aa, synthetic construct
ALGEMGADTEKLI

SEQ ID NO: 16322 - protein, 14 aa, synthetic construct
ALGELYWGSYTDKL

SEQ ID NO: 16323 - protein, 14 aa, synthetic construct
ALGELYWGSCTPIN

SEQ ID NO: 16324 - protein, 14 aa, synthetic construct
ALGELYWGPYTDKL

SEQ ID NO: 16325 - protein, 14 aa, synthetic construct
ALGELYWGMTPINS

SEQ ID NO: 16326 - protein, 14 aa, synthetic construct
ALGELYWGMGAPIN

SEQ ID NO: 16327 - protein, 14 aa, synthetic construct
ALGELYWGLYTDKL

SEQ ID NO: 16328 - protein, 14 aa, synthetic construct
ALGELYWGLLSSWD

SEQ ID NO: 16329 - protein, 14 aa, synthetic construct
ALGELYWGITDKII

SEQ ID NO: 16330 - protein, 14 aa, synthetic construct
ALGEMGDTRPINSS

SEQ ID NO: 16331 - protein, 10 aa, synthetic construct
ALGEMGESYK

SEQ ID NO: 16332 - protein, 14 aa, synthetic construct
ALGELYWGIPCSWD

SEQ ID NO: 16333 - protein, 10 aa, synthetic construct
ALGEMGGKLI

SEQ ID NO: 16334 - protein, 12 aa, synthetic construct
ALGENYCGRSGL

SEQ ID NO: 16335 - protein, 14 aa, synthetic construct
ALGENSYGISEKII

SEQ ID NO: 16336 - protein, 14 aa, synthetic construct
ALGENSYGISDKII

SEQ ID NO: 16337 - protein, 12 aa, synthetic construct
ALGENGMTDKHI

SEQ ID NO: 16338 - protein, 12 aa, synthetic construct
ALGEMVDTDYKL

SEQ ID NO: 16339 - protein, 12 aa, synthetic construct
ALGEMRYTDKLN

SEQ ID NO: 16340 - protein, 14 aa, synthetic construct
ALGEMRWGLYTDKL

SEQ ID NO: 16341 - protein, 12 aa, synthetic construct
ALGEMRETDQHH

SEQ ID NO: 16342 - protein, 12 aa, synthetic construct
ALGEMRDTDRLI

SEQ ID NO: 16343 - protein, 12 aa, synthetic construct
ALGEMRDTDKNI

SEQ ID NO: 16344 - protein, 12 aa, synthetic construct
ALGEMRDTDKLN

SEQ ID NO: 16345 - protein, 12 aa, synthetic construct
ALGEMRDTDKII

SEQ ID NO: 16346 - protein, 13 aa, synthetic construct
ALGEMRAETYQLI

SEQ ID NO: 16347 - protein, 13 aa, synthetic construct
ALGEMGSTGDKLI

SEQ ID NO: 16348 - protein, 13 aa, synthetic construct
ALGEMGIYTHKLI

SEQ ID NO: 16349 - protein, 13 aa, synthetic construct
ALGEMGIYTDKII

SEQ ID NO: 16350 - protein, 13 aa, synthetic construct
ALGEMGIPAIHSS

SEQ ID NO: 16351 - protein, 13 aa, synthetic construct
ALGEMGIHTDKLI

SEQ ID NO: 16352 - protein, 13 aa, synthetic construct
ALGEMGIDTDKLI

SEQ ID NO: 16353 - protein, 13 aa, synthetic construct
ALGEMGGYADKLI

SEQ ID NO: 16354 - protein, 12 aa, synthetic construct
ALGEMGGSDKLI

SEQ ID NO: 16355 - protein, 14 aa, synthetic construct
ALGELYWGISDKII

SEQ ID NO: 16356 - protein, 14 aa, synthetic construct
ALGELYWGIPAINS

SEQ ID NO: 16357 - protein, 13 aa, synthetic construct
ALGEPAGYTDKLI

SEQ ID NO: 16358 - protein, 11 aa, synthetic construct
ALGELYTDKLS

SEQ ID NO: 16359 - protein, 11 aa, synthetic construct
ALGELYTDILI

SEQ ID NO: 16360 - protein, 11 aa, synthetic construct
ALGELYTDELI

SEQ ID NO: 16361 - protein, 8 aa, synthetic construct
ALGELYTD

SEQ ID NO: 16362 - protein, 11 aa, synthetic construct
ALGELYTAILI

SEQ ID NO: 16363 - protein, 7 aa, synthetic construct
ALGELYT

SEQ ID NO: 16364 - protein, 13 aa, synthetic construct
ALGELYSYLLGQM

SEQ ID NO: 16365 - protein, 11 aa, synthetic construct
ALGELYSDNLI

SEQ ID NO: 16366 - protein, 11 aa, synthetic construct
ALGELYSDKLI

SEQ ID NO: 16367 - protein, 14 aa, synthetic construct
ALGELYQEDGTDKL

SEQ ID NO: 16368 - protein, 11 aa, synthetic construct
ALGELYNDKRF

SEQ ID NO: 16369 - protein, 13 aa, synthetic construct
ALGELYLGRRGLI

SEQ ID NO: 16370 - protein, 11 aa, synthetic construct
ALGELYADKPI

SEQ ID NO: 16371 - protein, 13 aa, synthetic construct
ALGELWWGPYTQK

SEQ ID NO: 16372 - protein, 14 aa, synthetic construct
ALGELWWGPYTDKL

SEQ ID NO: 16373 - protein, 10 aa, synthetic construct
ALGELWRREQ

SEQ ID NO: 16374 - protein, 12 aa, synthetic construct
ALGELWMTDKLI

SEQ ID NO: 16375 - protein, 12 aa, synthetic construct
ALGELWMTDKII

SEQ ID NO: 16376 - protein, 13 aa, synthetic construct
ALGELWLYTDKLN

SEQ ID NO: 16377 - protein, 9 aa, synthetic construct
ALGELWLTG

SEQ ID NO: 16378 - protein, 13 aa, synthetic construct
ALGELWIYTDKLI

SEQ ID NO: 16379 - protein, 13 aa, synthetic construct
ALGELWGYAYKLI

SEQ ID NO: 16380 - protein, 11 aa, synthetic construct
ALGELYTDKFI

SEQ ID NO: 16381 - protein, 11 aa, synthetic construct
ALGELYTDKLT

SEQ ID NO: 16382 - protein, 14 aa, synthetic construct
ALGELYWGINTDKL

SEQ ID NO: 16383 - protein, 11 aa, synthetic construct
ALGELYTDNDI

SEQ ID NO: 16384 - protein, 14 aa, synthetic construct
ALGELYWGILRTWD

SEQ ID NO: 16385 - protein, 13 aa, synthetic construct
ALGELYWGILRSW

SEQ ID NO: 16386 - protein, 14 aa, synthetic construct
ALGELYWGILGSWD

SEQ ID NO: 16387 - protein, 14 aa, synthetic construct
ALGELYWGILDKLI

SEQ ID NO: 16388 - protein, 13 aa, synthetic construct
ALGELYWGILCSW

SEQ ID NO: 16389 - protein, 14 aa, synthetic construct
ALGELYWGIISSWD

SEQ ID NO: 16390 - protein, 13 aa, synthetic construct
ALGELYWGIHSSW

SEQ ID NO: 16391 - protein, 14 aa, synthetic construct
ALGELYWGIHRSPH

SEQ ID NO: 16392 - protein, 12 aa, synthetic construct
ALGELYWGIGTH

SEQ ID NO: 16393 - protein, 14 aa, synthetic construct
ALGELYWGGPLTAQ

SEQ ID NO: 16394 - protein, 11 aa, synthetic construct
ALGELYTYKLF

SEQ ID NO: 16395 - protein, 11 aa, synthetic construct
ALGELYTINSS

SEQ ID NO: 16396 - protein, 11 aa, synthetic construct
ALGELYTHKLI

SEQ ID NO: 16397 - protein, 11 aa, synthetic construct
ALGELYTGKVI

SEQ ID NO: 16398 - protein, 11 aa, synthetic construct
ALGELYTGKLI

SEQ ID NO: 16399 - protein, 11 aa, synthetic construct
ALGELYTEKLK

SEQ ID NO: 16400 - protein, 11 aa, synthetic construct
ALGELYTEKHI

SEQ ID NO: 16401 - protein, 10 aa, synthetic construct
ALGELYTEKE

SEQ ID NO: 16402 - protein, 11 aa, synthetic construct
ALGELYTDTSS

SEQ ID NO: 16403 - protein, 11 aa, synthetic construct
ALGELYTDTLI

SEQ ID NO: 16404 - protein, 11 aa, synthetic construct
ALGELYTDRLI

SEQ ID NO: 16405 - protein, 14 aa, synthetic construct
ALGEPAGYNTDKLI

SEQ ID NO: 16406 - protein, 12 aa, synthetic construct
ALGEPAITDKLI

SEQ ID NO: 16407 - protein, 12 aa, synthetic construct
ALGELWGTDKLI

SEQ ID NO: 16408 - protein, 13 aa, synthetic construct
ALGEPGADTDKLI

SEQ ID NO: 16409 - protein, 14 aa, synthetic construct
ALGEPFVLGARSKL

SEQ ID NO: 16410 - protein, 14 aa, synthetic construct
ALGEPFTRDNDKII

SEQ ID NO: 16411 - protein, 14 aa, synthetic construct
ALGEPESGASYTDK

SEQ ID NO: 16412 - protein, 14 aa, synthetic construct
ALGEPEQGASYTDK

SEQ ID NO: 16413 - protein, 14 aa, synthetic construct
ALGEPEMGASYTDK

SEQ ID NO: 16414 - protein, 14 aa, synthetic construct
ALGEPELGDTPINS

SEQ ID NO: 16415 - protein, 14 aa, synthetic construct
ALGEPELGASYTDE

SEQ ID NO: 16416 - protein, 14 aa, synthetic construct
ALGEPELGASYADK

SEQ ID NO: 16417 - protein, 13 aa, synthetic construct
ALGEPELGASSTD

SEQ ID NO: 16418 - protein, 14 aa, synthetic construct
ALGEPELGASNTEK

SEQ ID NO: 16419 - protein, 14 aa, synthetic construct
ALGEPELGASNTDK

SEQ ID NO: 16420 - protein, 14 aa, synthetic construct
ALGEPELAASYTDK

SEQ ID NO: 16421 - protein, 13 aa, synthetic construct
ALGEPCTRDTYKL

SEQ ID NO: 16422 - protein, 14 aa, synthetic construct
ALGEPCTGYTDKLI

SEQ ID NO: 16423 - protein, 14 aa, synthetic construct
ALGEPCTGNTDKLI

SEQ ID NO: 16424 - protein, 14 aa, synthetic construct
ALGEPCTGGYTDKL

SEQ ID NO: 16425 - protein, 14 aa, synthetic construct
ALGEPCTGGYSAPG

SEQ ID NO: 16426 - protein, 14 aa, synthetic construct
ALGEPCTGGYADKL

SEQ ID NO: 16427 - protein, 14 aa, synthetic construct
ALGEPCTGGSTDKL

SEQ ID NO: 16428 - protein, 14 aa, synthetic construct
ALGEPCTGGFGYTD

SEQ ID NO: 16429 - protein, 14 aa, synthetic construct
ALGEPCTGGCTPIN

SEQ ID NO: 16430 - protein, 14 aa, synthetic construct
ALGEPFYWGIHTDK

SEQ ID NO: 16431 - protein, 14 aa, synthetic construct
ALGEPGAYNTDKLI

SEQ ID NO: 16432 - protein, 14 aa, synthetic construct
ALGEPCTGETDQLI

SEQ ID NO: 16433 - protein, 10 aa, synthetic construct
ALGEPGDKLI

SEQ ID NO: 16434 - protein, 13 aa, synthetic construct
ALGEPGGYADELI

SEQ ID NO: 16435 - protein, 13 aa, synthetic construct
ALGEPGGSTEKLI

SEQ ID NO: 16436 - protein, 13 aa, synthetic construct
ALGEPGGSTDKLF

SEQ ID NO: 16437 - protein, 14 aa, synthetic construct
ALGEPGGSNTEKLI

SEQ ID NO: 16438 - protein, 14 aa, synthetic construct
ALGEPGGSNTEKII

SEQ ID NO: 16439 - protein, 14 aa, synthetic construct
ALGEPGGSNTDNLI

SEQ ID NO: 16440 - protein, 14 aa, synthetic construct
ALGEPGGSKTDKLI

SEQ ID NO: 16441 - protein, 10 aa, synthetic construct
ALGEPGGNSS

SEQ ID NO: 16442 - protein, 13 aa, synthetic construct
ALGEPGGHADKLI

SEQ ID NO: 16443 - protein, 14 aa, synthetic construct
ALGEPGGFNTDKLI

SEQ ID NO: 16444 - protein, 14 aa, synthetic construct
ALGEPGGDNTEKLI

SEQ ID NO: 16445 - protein, 14 aa, synthetic construct
ALGEPGGDNTEILI

SEQ ID NO: 16446 - protein, 14 aa, synthetic construct
ALGEPGGDNTDTLI

SEQ ID NO: 16447 - protein, 13 aa, synthetic construct
ALGEPGGDDRSPH

SEQ ID NO: 16448 - protein, 14 aa, synthetic construct
ALGEPGGDATEKLI

SEQ ID NO: 16449 - protein, 7 aa, synthetic construct
ALGEPGG

SEQ ID NO: 16450 - protein, 13 aa, synthetic construct
ALGEPGEYTDKLI

SEQ ID NO: 16451 - protein, 12 aa, synthetic construct
ALGEPGERALTA

SEQ ID NO: 16452 - protein, 14 aa, synthetic construct
ALGEPGDTTPINSS

SEQ ID NO: 16453 - protein, 13 aa, synthetic construct
ALGEPGDTIDKLI

SEQ ID NO: 16454 - protein, 14 aa, synthetic construct
ALGEPGDPTPINSS

SEQ ID NO: 16455 - protein, 11 aa, synthetic construct
ALGEPCTGETH

SEQ ID NO: 16456 - protein, 13 aa, synthetic construct
ALGEPCTGDWDSS

SEQ ID NO: 16457 - protein, 14 aa, synthetic construct
ALGEPCAGDTDTVI

SEQ ID NO: 16458 - protein, 14 aa, synthetic construct
ALGEPCTGDIHRET

SEQ ID NO: 16459 - protein, 14 aa, synthetic construct
ALGEPCTGDADKLF

SEQ ID NO: 16460 - protein, 14 aa, synthetic construct
ALGEPCTGDADKII

SEQ ID NO: 16461 - protein, 14 aa, synthetic construct
ALGEPCTGATDKLI

SEQ ID NO: 16462 - protein, 13 aa, synthetic construct
ALGEPCSGDPEKV

SEQ ID NO: 16463 - protein, 13 aa, synthetic construct
ALGEPCRGDTVKL

SEQ ID NO: 16464 - protein, 13 aa, synthetic construct
ALGEPCPGDTGPI

SEQ ID NO: 16465 - protein, 14 aa, synthetic construct
ALGEPCPGDTENLI

SEQ ID NO: 16466 - protein, 14 aa, synthetic construct
ALGEPCPGDSDKLI

SEQ ID NO: 16467 - protein, 14 aa, synthetic construct
ALGEPCPGDRRDKL

SEQ ID NO: 16468 - protein, 14 aa, synthetic construct
ALGEPCPGDPDKLI

SEQ ID NO: 16469 - protein, 14 aa, synthetic construct
ALGEPCPGDADKII

SEQ ID NO: 16470 - protein, 14 aa, synthetic construct
ALGEPCPGATEKLI

SEQ ID NO: 16471 - protein, 14 aa, synthetic construct
ALGEPCNGDTYKLI

SEQ ID NO: 16472 - protein, 13 aa, synthetic construct
ALGEPCNGDTYKL

SEQ ID NO: 16473 - protein, 14 aa, synthetic construct
ALGEPCNGDTQILG

SEQ ID NO: 16474 - protein, 14 aa, synthetic construct
ALGEPCNGDTEKLI

SEQ ID NO: 16475 - protein, 13 aa, synthetic construct
ALGEPCNGDTDKI

SEQ ID NO: 16476 - protein, 14 aa, synthetic construct
ALGEPCNGDTDELI

SEQ ID NO: 16477 - protein, 14 aa, synthetic construct
ALGEPCNGDNDKLI

SEQ ID NO: 16478 - protein, 14 aa, synthetic construct
ALGEPCNGATYKLI

SEQ ID NO: 16479 - protein, 14 aa, synthetic construct
ALGEPCHGGTDKLI

SEQ ID NO: 16480 - protein, 14 aa, synthetic construct
ALGEPCTGDAEKLI

SEQ ID NO: 16481 - protein, 12 aa, synthetic construct
ALGEPCTGDKLI

SEQ ID NO: 16482 - protein, 14 aa, synthetic construct
ALGEPCTGDTYKIN

SEQ ID NO: 16483 - protein, 14 aa, synthetic construct
ALGEPCTGDPDKIV

SEQ ID NO: 16484 - protein, 14 aa, synthetic construct
ALGEPCTGDTYKII

SEQ ID NO: 16485 - protein, 14 aa, synthetic construct
ALGEPCTGDTVKLI

SEQ ID NO: 16486 - protein, 13 aa, synthetic construct
ALGEPCTGDTVKL

SEQ ID NO: 16487 - protein, 14 aa, synthetic construct
ALGEPCTGDTRINS

SEQ ID NO: 16488 - protein, 14 aa, synthetic construct
ALGEPCTGDTQKLI

SEQ ID NO: 16489 - protein, 14 aa, synthetic construct
ALGEPCTGDTPTPI

SEQ ID NO: 16490 - protein, 14 aa, synthetic construct
ALGEPCTGDTPKLI

SEQ ID NO: 16491 - protein, 14 aa, synthetic construct
ALGEPCTGDTPISS

SEQ ID NO: 16492 - protein, 14 aa, synthetic construct
ALGEPCTGDTPINS

SEQ ID NO: 16493 - protein, 14 aa, synthetic construct
ALGEPCTGDTNKLI

SEQ ID NO: 16494 - protein, 14 aa, synthetic construct
ALGEPCTGDTHKLI

SEQ ID NO: 16495 - protein, 14 aa, synthetic construct
ALGEPCTGDTGPIN

SEQ ID NO: 16496 - protein, 14 aa, synthetic construct
ALGEPCTGDTEQLI

SEQ ID NO: 16497 - protein, 13 aa, synthetic construct
ALGEPCTGDTDTL

SEQ ID NO: 16498 - protein, 14 aa, synthetic construct
ALGEPCTGDTDKVF

SEQ ID NO: 16499 - protein, 14 aa, synthetic construct
ALGEPCTGDTDKLV

SEQ ID NO: 16500 - protein, 13 aa, synthetic construct
ALGEPCTGDTDKI

SEQ ID NO: 16501 - protein, 14 aa, synthetic construct
ALGEPCTGDTDKFI

SEQ ID NO: 16502 - protein, 14 aa, synthetic construct
ALGEPCTGDTDDLI

SEQ ID NO: 16503 - protein, 10 aa, synthetic construct
ALGEPCTGDT

SEQ ID NO: 16504 - protein, 14 aa, synthetic construct
ALGEPCTGDPENLI

SEQ ID NO: 16505 - protein, 13 aa, synthetic construct
ALGELWGYADNLT

SEQ ID NO: 16506 - protein, 12 aa, synthetic construct
ALGELWGIINSS

SEQ ID NO: 16507 - protein, 13 aa, synthetic construct
ALGELPYWGRNTD

SEQ ID NO: 16508 - protein, 12 aa, synthetic construct
ALGELRITDKLI

SEQ ID NO: 16509 - protein, 12 aa, synthetic construct
ALGELRISDKLF

SEQ ID NO: 16510 - protein, 12 aa, synthetic construct
ALGELRISDKII

SEQ ID NO: 16511 - protein, 12 aa, synthetic construct
ALGELRIPINSS

SEQ ID NO: 16512 - protein, 12 aa, synthetic construct
ALGELRIFNKLN

SEQ ID NO: 16513 - protein, 12 aa, synthetic construct
ALGELRIFNKLI

SEQ ID NO: 16514 - protein, 12 aa, synthetic construct
ALGELRIFGKLI

SEQ ID NO: 16515 - protein, 12 aa, synthetic construct
ALGELRIFEKRI

SEQ ID NO: 16516 - protein, 12 aa, synthetic construct
ALGELRIFDTLF

SEQ ID NO: 16517 - protein, 12 aa, synthetic construct
ALGELRIFDKRI

SEQ ID NO: 16518 - protein, 12 aa, synthetic construct
ALGELRIFDKLV

SEQ ID NO: 16519 - protein, 12 aa, synthetic construct
ALGELRIFDKIV

SEQ ID NO: 16520 - protein, 12 aa, synthetic construct
ALGELRIFDKIN

SEQ ID NO: 16521 - protein, 12 aa, synthetic construct
ALGELRIFDKFI

SEQ ID NO: 16522 - protein, 12 aa, synthetic construct
ALGELRIFDELI

SEQ ID NO: 16523 - protein, 12 aa, synthetic construct
ALGELRICDQLI

SEQ ID NO: 16524 - protein, 11 aa, synthetic construct
ALGELRHTENN

SEQ ID NO: 16525 - protein, 13 aa, synthetic construct
ALGELRGYSDKPI

SEQ ID NO: 16526 - protein, 14 aa, synthetic construct
ALGELRGYNTDKLI

SEQ ID NO: 16527 - protein, 14 aa, synthetic construct
ALGELRGYGTEKLI

SEQ ID NO: 16528 - protein, 11 aa, synthetic construct
ALGELRGVGLS

SEQ ID NO: 16529 - protein, 11 aa, synthetic construct
ALGELRGVGLF

SEQ ID NO: 16530 - protein, 12 aa, synthetic construct
ALGELRISINSS

SEQ ID NO: 16531 - protein, 12 aa, synthetic construct
ALGELRIYDKLN

SEQ ID NO: 16532 - protein, 11 aa, synthetic construct
ALGELRGMGLI

SEQ ID NO: 16533 - protein, 12 aa, synthetic construct
ALGELRKNDKLI

SEQ ID NO: 16534 - protein, 12 aa, synthetic construct
ALGELRSFEKLI

SEQ ID NO: 16535 - protein, 12 aa, synthetic construct
ALGELRSFDTLI

SEQ ID NO: 16536 - protein, 12 aa, synthetic construct
ALGELRSFDQLI

SEQ ID NO: 16537 - protein, 12 aa, synthetic construct
ALGELRSFDILI

SEQ ID NO: 16538 - protein, 14 aa, synthetic construct
ALGELRRGPNTDNL

SEQ ID NO: 16539 - protein, 9 aa, synthetic construct
ALGELRRGA

SEQ ID NO: 16540 - protein, 12 aa, synthetic construct
ALGELRRFDKII

SEQ ID NO: 16541 - protein, 14 aa, synthetic construct
ALGELRQGGYEYTD

SEQ ID NO: 16542 - protein, 14 aa, synthetic construct
ALGELRPGGYSAPG

SEQ ID NO: 16543 - protein, 14 aa, synthetic construct
ALGELRPGGYEHTD

SEQ ID NO: 16544 - protein, 12 aa, synthetic construct
ALGELRNYDKLI

SEQ ID NO: 16545 - protein, 14 aa, synthetic construct
ALGELRNVGYEYTD

SEQ ID NO: 16546 - protein, 12 aa, synthetic construct
ALGELRNFDKLN

SEQ ID NO: 16547 - protein, 12 aa, synthetic construct
ALGELRNFDKLI

SEQ ID NO: 16548 - protein, 12 aa, synthetic construct
ALGELRMTDTLI

SEQ ID NO: 16549 - protein, 12 aa, synthetic construct
ALGELRMLDKLI

SEQ ID NO: 16550 - protein, 12 aa, synthetic construct
ALGELRMCYHLI

SEQ ID NO: 16551 - protein, 13 aa, synthetic construct
ALGELRLSLRLYS

SEQ ID NO: 16552 - protein, 14 aa, synthetic construct
ALGELRLGPYTDKL

SEQ ID NO: 16553 - protein, 12 aa, synthetic construct
ALGELRLFDKLI

SEQ ID NO: 16554 - protein, 7 aa, synthetic construct
ALGELRL

SEQ ID NO: 16555 - protein, 12 aa, synthetic construct
ALGELRGNDKLN

SEQ ID NO: 16556 - protein, 11 aa, synthetic construct
ALGELRGLVLI

SEQ ID NO: 16557 - protein, 14 aa, synthetic construct
ALGELRTGDTDKLI

SEQ ID NO: 16558 - protein, 12 aa, synthetic construct
ALGELRDTDELV

SEQ ID NO: 16559 - protein, 12 aa, synthetic construct
ALGELRDTAKLI

SEQ ID NO: 16560 - protein, 12 aa, synthetic construct
ALGELRDPDTLI

SEQ ID NO: 16561 - protein, 12 aa, synthetic construct
ALGELRDPDQLI

SEQ ID NO: 16562 - protein, 12 aa, synthetic construct
ALGELRDPDILI

SEQ ID NO: 16563 - protein, 13 aa, synthetic construct
ALGELRDKPINSS

SEQ ID NO: 16564 - protein, 10 aa, synthetic construct
ALGELRDKLI

SEQ ID NO: 16565 - protein, 11 aa, synthetic construct
ALGELRALGLI

SEQ ID NO: 16566 - protein, 10 aa, synthetic construct
ALGELRAKLI

SEQ ID NO: 16567 - protein, 14 aa, synthetic construct
ALGELQLGDPDKLI

SEQ ID NO: 16568 - protein, 12 aa, synthetic construct
ALGELQIFDKLI

SEQ ID NO: 16569 - protein, 9 aa, synthetic construct
ALGELQETH

SEQ ID NO: 16570 - protein, 12 aa, synthetic construct
ALGELQDTDKPI

SEQ ID NO: 16571 - protein, 14 aa, synthetic construct
ALGELPYWRTAPIN

SEQ ID NO: 16572 - protein, 14 aa, synthetic construct
ALGELPYWRRYTDK

SEQ ID NO: 16573 - protein, 14 aa, synthetic construct
ALGELPYWGWYTDK

SEQ ID NO: 16574 - protein, 13 aa, synthetic construct
ALGELPYWGWYTD

SEQ ID NO: 16575 - protein, 14 aa, synthetic construct
ALGELPYWGVQINS

SEQ ID NO: 16576 - protein, 14 aa, synthetic construct
ALGELPYWGSSTDK

SEQ ID NO: 16577 - protein, 14 aa, synthetic construct
ALGELPYWGSNTDK

SEQ ID NO: 16578 - protein, 14 aa, synthetic construct
ALGELPYWGRYIDK

SEQ ID NO: 16579 - protein, 14 aa, synthetic construct
ALGELPYWGRSTDQ

SEQ ID NO: 16580 - protein, 12 aa, synthetic construct
ALGELRDTDELI

SEQ ID NO: 16581 - protein, 12 aa, synthetic construct
ALGELRDTDHII

SEQ ID NO: 16582 - protein, 11 aa, synthetic construct
ALGELRGLRLI

SEQ ID NO: 16583 - protein, 11 aa, synthetic construct
ALGELRDTDKL

SEQ ID NO: 16584 - protein, 9 aa, synthetic construct
ALGELRGLI

SEQ ID NO: 16585 - protein, 11 aa, synthetic construct
ALGELRGLGVF

SEQ ID NO: 16586 - protein, 11 aa, synthetic construct
ALGELRGLGRF

SEQ ID NO: 16587 - protein, 11 aa, synthetic construct
ALGELRGLGPN

SEQ ID NO: 16588 - protein, 11 aa, synthetic construct
ALGELRGLGHI

SEQ ID NO: 16589 - protein, 14 aa, synthetic construct
ALGELRGLGARSKL

SEQ ID NO: 16590 - protein, 11 aa, synthetic construct
ALGELRGLELI

SEQ ID NO: 16591 - protein, 11 aa, synthetic construct
ALGELRGLALI

SEQ ID NO: 16592 - protein, 14 aa, synthetic construct
ALGELRGIALIIVA

SEQ ID NO: 16593 - protein, 12 aa, synthetic construct
ALGELRFFDKLI

SEQ ID NO: 16594 - protein, 12 aa, synthetic construct
ALGELRETDQLI

SEQ ID NO: 16595 - protein, 12 aa, synthetic construct
ALGELRETDKLI

SEQ ID NO: 16596 - protein, 11 aa, synthetic construct
ALGELRELGLI

SEQ ID NO: 16597 - protein, 12 aa, synthetic construct
ALGELRDWWRYT

SEQ ID NO: 16598 - protein, 12 aa, synthetic construct
ALGELRDTRKLI

SEQ ID NO: 16599 - protein, 13 aa, synthetic construct
ALGELRDTNDKLI

SEQ ID NO: 16600 - protein, 12 aa, synthetic construct
ALGELRDTGQLI

SEQ ID NO: 16601 - protein, 13 aa, synthetic construct
ALGELRDTGEKLI

SEQ ID NO: 16602 - protein, 12 aa, synthetic construct
ALGELRDTEILI

SEQ ID NO: 16603 - protein, 12 aa, synthetic construct
ALGELRDTDQLF

SEQ ID NO: 16604 - protein, 12 aa, synthetic construct
ALGELRDTDKQI

SEQ ID NO: 16605 - protein, 12 aa, synthetic construct
ALGELRTFDKII

SEQ ID NO: 16606 - protein, 14 aa, synthetic construct
ALGELRTGDTSTPI

SEQ ID NO: 16607 - protein, 14 aa, synthetic construct
ALGELWERDLTEQL

SEQ ID NO: 16608 - protein, 13 aa, synthetic construct
ALGELVASYTDKL

SEQ ID NO: 16609 - protein, 14 aa, synthetic construct
ALGELTWGIHEKLI

SEQ ID NO: 16610 - protein, 14 aa, synthetic construct
ALGELTWGHKTRKL

SEQ ID NO: 16611 - protein, 14 aa, synthetic construct
ALGELTLYWGLYTD

SEQ ID NO: 16612 - protein, 14 aa, synthetic construct
ALGELTLGVLYTDK

SEQ ID NO: 16613 - protein, 7 aa, synthetic construct
ALGELTG

SEQ ID NO: 16614 - protein, 8 aa, synthetic construct
ALGELTFW

SEQ ID NO: 16615 - protein, 13 aa, synthetic construct
ALGELTFIPDKLI

SEQ ID NO: 16616 - protein, 10 aa, synthetic construct
ALGELTDKLI

SEQ ID NO: 16617 - protein, 14 aa, synthetic construct
ALGELSYWGRYTDK

SEQ ID NO: 16618 - protein, 13 aa, synthetic construct
ALGELSYTGDKLI

SEQ ID NO: 16619 - protein, 14 aa, synthetic construct
ALGELSYGISDKLI

SEQ ID NO: 16620 - protein, 14 aa, synthetic construct
ALGELSWGYSAPGT

SEQ ID NO: 16621 - protein, 14 aa, synthetic construct
ALGELSWGRTPINS

SEQ ID NO: 16622 - protein, 14 aa, synthetic construct
ALGELSWGIPAINS

SEQ ID NO: 16623 - protein, 14 aa, synthetic construct
ALGELSWGILSSWD

SEQ ID NO: 16624 - protein, 13 aa, synthetic construct
ALGELSWGGPLTA

SEQ ID NO: 16625 - protein, 14 aa, synthetic construct
ALGELSTWGIGPDK

SEQ ID NO: 16626 - protein, 14 aa, synthetic construct
ALGELSTGGYKYTD

SEQ ID NO: 16627 - protein, 14 aa, synthetic construct
ALGELSTGGYEYTD

SEQ ID NO: 16628 - protein, 11 aa, synthetic construct
ALGELSTEKLI

SEQ ID NO: 16629 - protein, 11 aa, synthetic construct
ALGELSTDKLI

SEQ ID NO: 16630 - protein, 13 aa, synthetic construct
ALGELVADTYKLI

SEQ ID NO: 16631 - protein, 14 aa, synthetic construct
ALGELVDRDLTAQL

SEQ ID NO: 16632 - protein, 13 aa, synthetic construct
ALGELSNGENYKL

SEQ ID NO: 16633 - protein, 12 aa, synthetic construct
ALGELVDTDKHV

SEQ ID NO: 16634 - protein, 13 aa, synthetic construct
ALGELWDTGDKLI

SEQ ID NO: 16635 - protein, 13 aa, synthetic construct
ALGELWDTGAKLI

SEQ ID NO: 16636 - protein, 12 aa, synthetic construct
ALGELWDTDKII

SEQ ID NO: 16637 - protein, 14 aa, synthetic construct
ALGELWDRALTAQL

SEQ ID NO: 16638 - protein, 14 aa, synthetic construct
ALGELWASYTDNLI

SEQ ID NO: 16639 - protein, 14 aa, synthetic construct
ALGELWASYTDKHI

SEQ ID NO: 16640 - protein, 13 aa, synthetic construct
ALGELWADTDKLI

SEQ ID NO: 16641 - protein, 12 aa, synthetic construct
ALGELVYTEKLI

SEQ ID NO: 16642 - protein, 7 aa, synthetic construct
ALGELVV

SEQ ID NO: 16643 - protein, 14 aa, synthetic construct
ALGELVSLGYTDKL

SEQ ID NO: 16644 - protein, 12 aa, synthetic construct
ALGELVMTDQLI

SEQ ID NO: 16645 - protein, 12 aa, synthetic construct
ALGELVLTDKLI

SEQ ID NO: 16646 - protein, 13 aa, synthetic construct
ALGELVLGDEKLI

SEQ ID NO: 16647 - protein, 13 aa, synthetic construct
ALGELVLGDDKLI

SEQ ID NO: 16648 - protein, 13 aa, synthetic construct
ALGELVLADDKLI

SEQ ID NO: 16649 - protein, 14 aa, synthetic construct
ALGELVGYVTDKLI

SEQ ID NO: 16650 - protein, 13 aa, synthetic construct
ALGELVGYSDKII

SEQ ID NO: 16651 - protein, 14 aa, synthetic construct
ALGELVGYGTDTII

SEQ ID NO: 16652 - protein, 14 aa, synthetic construct
ALGELVGYGTDKLI

SEQ ID NO: 16653 - protein, 13 aa, synthetic construct
ALGELVGYADELI

SEQ ID NO: 16654 - protein, 12 aa, synthetic construct
ALGELVDTDKLT

SEQ ID NO: 16655 - protein, 14 aa, synthetic construct
ALGELSNWGIHTDK

SEQ ID NO: 16656 - protein, 14 aa, synthetic construct
ALGELSLGPYTDKL

SEQ ID NO: 16657 - protein, 14 aa, synthetic construct
ALGELRTGGCTPIN

SEQ ID NO: 16658 - protein, 12 aa, synthetic construct
ALGELRVFDKHI

SEQ ID NO: 16659 - protein, 14 aa, synthetic construct
ALGELRTVGSEYTD

SEQ ID NO: 16660 - protein, 14 aa, synthetic construct
ALGELRTRGFGYTD

SEQ ID NO: 16661 - protein, 14 aa, synthetic construct
ALGELRTGVYEYTD

SEQ ID NO: 16662 - protein, 14 aa, synthetic construct
ALGELRTGRYEYTD

SEQ ID NO: 16663 - protein, 14 aa, synthetic construct
ALGELRTGGYYYTD

SEQ ID NO: 16664 - protein, 14 aa, synthetic construct
ALGELRTGGYWYTD

SEQ ID NO: 16665 - protein, 14 aa, synthetic construct
ALGELRTGGYVYTD

SEQ ID NO: 16666 - protein, 14 aa, synthetic construct
ALGELRTGGYTPIN

SEQ ID NO: 16667 - protein, 14 aa, synthetic construct
ALGELRTGGYTINS

SEQ ID NO: 16668 - protein, 14 aa, synthetic construct
ALGELRTGGYTDKL

SEQ ID NO: 16669 - protein, 14 aa, synthetic construct
ALGELRTGGYSAPG

SEQ ID NO: 16670 - protein, 13 aa, synthetic construct
ALGELRTGGYRYT

SEQ ID NO: 16671 - protein, 14 aa, synthetic construct
ALGELRTGGYNTDK

SEQ ID NO: 16672 - protein, 14 aa, synthetic construct
ALGELRTGGYGINS

SEQ ID NO: 16673 - protein, 14 aa, synthetic construct
ALGELRTGGYETTD

SEQ ID NO: 16674 - protein, 14 aa, synthetic construct
ALGELRTGGYEFTD

SEQ ID NO: 16675 - protein, 14 aa, synthetic construct
ALGELRTGGYDYTD

SEQ ID NO: 16676 - protein, 14 aa, synthetic construct
ALGELRTGGYADKL

SEQ ID NO: 16677 - protein, 14 aa, synthetic construct
ALGELRTGGSECTD

SEQ ID NO: 16678 - protein, 14 aa, synthetic construct
ALGELRTGGFGSTD

SEQ ID NO: 16679 - protein, 14 aa, synthetic construct
ALGELRTGGFEYTD

SEQ ID NO: 16680 - protein, 14 aa, synthetic construct
ALGELRTVGYEYTD

SEQ ID NO: 16681 - protein, 14 aa, synthetic construct
ALGELRWGIRGNSS

SEQ ID NO: 16682 - protein, 11 aa, synthetic construct
ALGELSLAKLV

SEQ ID NO: 16683 - protein, 14 aa, synthetic construct
ALGELRWGLYTDKL

SEQ ID NO: 16684 - protein, 14 aa, synthetic construct
ALGELSKWGIRPDK

SEQ ID NO: 16685 - protein, 11 aa, synthetic construct
ALGELSGLGLN

SEQ ID NO: 16686 - protein, 12 aa, synthetic construct
ALGELRYTDKLI

SEQ ID NO: 16687 - protein, 12 aa, synthetic construct
ALGELRYTDKII

SEQ ID NO: 16688 - protein, 14 aa, synthetic construct
ALGELRWGTPINSS

SEQ ID NO: 16689 - protein, 14 aa, synthetic construct
ALGELRWGRYTDKL

SEQ ID NO: 16690 - protein, 14 aa, synthetic construct
ALGELRWGRTPLNS

SEQ ID NO: 16691 - protein, 14 aa, synthetic construct
ALGELRWGPYTNKL

SEQ ID NO: 16692 - protein, 14 aa, synthetic construct
ALGELRWGPYTHKL

SEQ ID NO: 16693 - protein, 13 aa, synthetic construct
ALGELRWGPYTET

SEQ ID NO: 16694 - protein, 14 aa, synthetic construct
ALGELRWGPYTENL

SEQ ID NO: 16695 - protein, 13 aa, synthetic construct
ALGELRWGPYTEK

SEQ ID NO: 16696 - protein, 14 aa, synthetic construct
ALGELRWGPYTDRL

SEQ ID NO: 16697 - protein, 14 aa, synthetic construct
ALGELRWGPYTDNL

SEQ ID NO: 16698 - protein, 14 aa, synthetic construct
ALGELRWGPYTAKL

SEQ ID NO: 16699 - protein, 14 aa, synthetic construct
ALGELRWGPYSDKL

SEQ ID NO: 16700 - protein, 14 aa, synthetic construct
ALGELRWGPYIDKL

SEQ ID NO: 16701 - protein, 14 aa, synthetic construct
ALGELRWGPSTEKL

SEQ ID NO: 16702 - protein, 13 aa, synthetic construct
ALGELRWGPSTDK

SEQ ID NO: 16703 - protein, 14 aa, synthetic construct
ALGELRWGPNTEKL

SEQ ID NO: 16704 - protein, 14 aa, synthetic construct
ALGELRWGPNTDTL

SEQ ID NO: 16705 - protein, 12 aa, synthetic construct
YLGELGITDKLI

SEQ ID NO: 16706 - protein, 5 aa, synthetic construct
AFFLR

SEQ ID NO: 16707 - protein, 7 aa, synthetic construct
ALERETH

SEQ ID NO: 16708 - protein, 7 aa, synthetic construct
ALERSTH

SEQ ID NO: 16709 - protein, 6 aa, synthetic construct
AFFLLG

SEQ ID NO: 16710 - protein, 5 aa, synthetic construct
ACFLR

SEQ ID NO: 16711 - protein, 4 aa, synthetic construct
AFGD

SEQ ID NO: 16712 - protein, 6 aa, synthetic construct
ASQSWY

SEQ ID NO: 16713 - protein, 5 aa, synthetic construct
ALFLR

SEQ ID NO: 16714 - protein, 6 aa, synthetic construct
AFGDTD

SEQ ID NO: 16715 - protein, 5 aa, synthetic construct
AFGGT

SEQ ID NO: 16716 - protein, 5 aa, synthetic construct
ASFLR

SEQ ID NO: 16717 - protein, 6 aa, synthetic construct
AFFLRG

SEQ ID NO: 16718 - protein, 5 aa, synthetic construct
AYFLR

SEQ ID NO: 16719 - protein, 5 aa, synthetic construct
AFGVT

SEQ ID NO: 16720 - protein, 5 aa, synthetic construct
AFLLR

SEQ ID NO: 16721 - protein, 5 aa, synthetic construct
AFVLR

SEQ ID NO: 16722 - protein, 4 aa, synthetic construct
AFYL

SEQ ID NO: 16723 - protein, 7 aa, synthetic construct
ALERLTH

SEQ ID NO: 16724 - protein, 5 aa, synthetic construct
DFFLR

SEQ ID NO: 16725 - protein, 5 aa, synthetic construct
AFGDR

SEQ ID NO: 16726 - protein, 7 aa, synthetic construct
AFERSTH

SEQ ID NO: 16727 - protein, 7 aa, synthetic construct
AFGDKLI

SEQ ID NO: 16728 - protein, 7 aa, synthetic construct
ALERQTH

SEQ ID NO: 16729 - protein, 7 aa, synthetic construct
AVERETH

SEQ ID NO: 16730 - skipped

SEQ ID NO: 16731 - protein, 4 aa, synthetic construct
AFFL

SEQ ID NO: 16732 - protein, 7 aa, synthetic construct
ASGSNWG

SEQ ID NO: 16733 - protein, 5 aa, synthetic construct
VFFLR

SEQ ID NO: 16734 - protein, 6 aa, synthetic construct
AFFLPG

SEQ ID NO: 16735 - protein, 7 aa, synthetic construct
ALERETL

SEQ ID NO: 16736 - protein, 5 aa, synthetic construct
AFEDT

SEQ ID NO: 16737 - protein, 5 aa, synthetic construct
PFFLR

SEQ ID NO: 16738 - protein, 7 aa, synthetic construct
ALERATH

SEQ ID NO: 16739 - skipped

SEQ ID NO: 16740 - protein, 5 aa, synthetic construct
GFFLR

SEQ ID NO: 16741 - protein, 7 aa, synthetic construct
LRAINSS

SEQ ID NO: 16742 - protein, 4 aa, synthetic construct
AFVD

SEQ ID NO: 16743 - protein, 7 aa, synthetic construct
AFERETH

SEQ ID NO: 16744 - protein, 4 aa, synthetic construct
PFSY

SEQ ID NO: 16745 - protein, 4 aa, synthetic construct
AFGE

SEQ ID NO: 16746 - protein, 6 aa, synthetic construct
AFFILG

SEQ ID NO: 16747 - protein, 6 aa, synthetic construct
AFFLRE

SEQ ID NO: 16748 - protein, 4 aa, synthetic construct
ACGE

SEQ ID NO: 16749 - protein, 5 aa, synthetic construct
TFFLR

SEQ ID NO: 16750 - protein, 5 aa, synthetic construct
AIFLR

SEQ ID NO: 16751 - protein, 5 aa, synthetic construct
AFILR

SEQ ID NO: 16752 - protein, 6 aa, synthetic construct
ALERET

SEQ ID NO: 16753 - protein, 4 aa, synthetic construct
AFGA

SEQ ID NO: 16754 - protein, 7 aa, synthetic construct
AFRWGGT

SEQ ID NO: 16755 - protein, 7 aa, synthetic construct
AVERSTH

SEQ ID NO: 16756 - protein, 4 aa, synthetic construct
ALWG

SEQ ID NO: 16757 - protein, 4 aa, synthetic construct
AGGE

SEQ ID NO: 16758 - protein, 4 aa, synthetic construct
ACGA

SEQ ID NO: 16759 - protein, 6 aa, synthetic construct
AFFVLG

SEQ ID NO: 16760 - protein, 7 aa, synthetic construct
ALERSTL

SEQ ID NO: 16761 - protein, 4 aa, synthetic construct
AGGA

SEQ ID NO: 16762 - protein, 7 aa, synthetic construct
AFFLLGL

SEQ ID NO: 16763 - protein, 6 aa, synthetic construct
AFFIRG

SEQ ID NO: 16764 - protein, 6 aa, synthetic construct
ALERDT

SEQ ID NO: 16765 - skipped

SEQ ID NO: 16766 - protein, 7 aa, synthetic construct
ALERVTH

SEQ ID NO: 16767 - protein, 5 aa, synthetic construct
AVGVT

SEQ ID NO: 16768 - protein, 4 aa, synthetic construct
AFYI

SEQ ID NO: 16769 - protein, 7 aa, synthetic construct
ALERKTH

SEQ ID NO: 16770 - protein, 4 aa, synthetic construct
AFFV

SEQ ID NO: 16771 - protein, 6 aa, synthetic construct
AFLLLG

SEQ ID NO: 16772 - protein, 4 aa, synthetic construct
AVGD

SEQ ID NO: 16773 - protein, 7 aa, synthetic construct
PYSDKLI

SEQ ID NO: 16774 - skipped

SEQ ID NO: 16775 - protein, 5 aa, synthetic construct
ACVLR

SEQ ID NO: 16776 - protein, 6 aa, synthetic construct
AFFVRG

SEQ ID NO: 16777 - protein, 4 aa, synthetic construct
GGGG

SEQ ID NO: 16778 - protein, 7 aa, synthetic construct
ALVRSTH

SEQ ID NO: 16779 - protein, 4 aa, synthetic construct
AFGV

SEQ ID NO: 16780 - protein, 7 aa, synthetic construct
ALERLTL

SEQ ID NO: 16781 - protein, 4 aa, synthetic construct
ACGG

SEQ ID NO: 16782 - skipped

SEQ ID NO: 16783 - protein, 7 aa, synthetic construct
ALVRETH

SEQ ID NO: 16784 - protein, 6 aa, synthetic construct
LRAINS

SEQ ID NO: 16785 - protein, 4 aa, synthetic construct
AVGA

SEQ ID NO: 16786 - protein, 6 aa, synthetic construct
ALFLLG

SEQ ID NO: 16787 - protein, 6 aa, synthetic construct
ASHSWY

SEQ ID NO: 16788 - protein, 7 aa, synthetic construct
PKSDKLI

SEQ ID NO: 16789 - protein, 6 aa, synthetic construct
AFGETP

SEQ ID NO: 16790 - protein, 6 aa, synthetic construct
AFYLLG

SEQ ID NO: 16791 - protein, 5 aa, synthetic construct
GFGDR

SEQ ID NO: 16792 - protein, 5 aa, synthetic construct
SFFLR

SEQ ID NO: 16793 - protein, 7 aa, synthetic construct
AGERETH

SEQ ID NO: 16794 - protein, 6 aa, synthetic construct
ALERYS

SEQ ID NO: 16795 - protein, 5 aa, synthetic construct
ACGVT

SEQ ID NO: 16796 - protein, 4 aa, synthetic construct
ACGD

SEQ ID NO: 16797 - protein, 7 aa, synthetic construct
AFERATH

SEQ ID NO: 16798 - protein, 4 aa, synthetic construct
AFGN

SEQ ID NO: 16799 - protein, 7 aa, synthetic construct
ALGRETH

SEQ ID NO: 16800 - protein, 6 aa, synthetic construct
ALERYT

SEQ ID NO: 16801 - protein, 4 aa, synthetic construct
AYGD

SEQ ID NO: 16802 - protein, 4 aa, synthetic construct
ALYL

SEQ ID NO: 16803 - protein, 6 aa, synthetic construct
ACFLLG

SEQ ID NO: 16804 - protein, 4 aa, synthetic construct
LFPT

SEQ ID NO: 16805 - protein, 4 aa, synthetic construct
AFAD

SEQ ID NO: 16806 - protein, 6 aa, synthetic construct
ACFLRG

SEQ ID NO: 16807 - protein, 7 aa, synthetic construct
AFFLRGL

SEQ ID NO: 16808 - protein, 4 aa, synthetic construct
AGGG

SEQ ID NO: 16809 - protein, 7 aa, synthetic construct
PFSYGGY

SEQ ID NO: 16810 - protein, 7 aa, synthetic construct
AVERATH

SEQ ID NO: 16811 - protein, 7 aa, synthetic construct
AVERSTL

SEQ ID NO: 16812 - protein, 7 aa, synthetic construct
ALEGSTH

SEQ ID NO: 16813 - protein, 6 aa, synthetic construct
ALERST

SEQ ID NO: 16814 - protein, 4 aa, synthetic construct
AFGG

SEQ ID NO: 16815 - protein, 7 aa, synthetic construct
DLERSTH

SEQ ID NO: 16816 - protein, 5 aa, synthetic construct
AFGEA

SEQ ID NO: 16817 - protein, 6 aa, synthetic construct
AFERYS

SEQ ID NO: 16818 - protein, 6 aa, synthetic construct
AFGDKL

SEQ ID NO: 16819 - protein, 4 aa, synthetic construct
AVGG

SEQ ID NO: 16820 - protein, 6 aa, synthetic construct
AFFVPG

SEQ ID NO: 16821 - skipped

SEQ ID NO: 16822 - protein, 6 aa, synthetic construct
ALERYN

SEQ ID NO: 16823 - protein, 7 aa, synthetic construct
GLERSTH

SEQ ID NO: 16824 - protein, 6 aa, synthetic construct
AFFLGG

SEQ ID NO: 16825 - protein, 4 aa, synthetic construct
GVGE

SEQ ID NO: 16826 - skipped

SEQ ID NO: 16827 - protein, 5 aa, synthetic construct
AFYQL

SEQ ID NO: 16828 - protein, 4 aa, synthetic construct
AFWD

SEQ ID NO: 16829 - protein, 6 aa, synthetic construct
DFFLLG

SEQ ID NO: 16830 - protein, 5 aa, synthetic construct
ALVLR

SEQ ID NO: 16831 - protein, 5 aa, synthetic construct
ALGGT

SEQ ID NO: 16832 - protein, 6 aa, synthetic construct
DTDKLI

SEQ ID NO: 16833 - protein, 7 aa, synthetic construct
ALVRLTH

SEQ ID NO: 16834 - protein, 5 aa, synthetic construct
DLFLR

SEQ ID NO: 16835 - protein, 5 aa, synthetic construct
GCFLR

SEQ ID NO: 16836-16837 - skipped (2 entries)

SEQ ID NO: 16838 - protein, 4 aa, synthetic construct
DFYL

SEQ ID NO: 16839 - protein, 6 aa, synthetic construct
ALFLPG

SEQ ID NO: 16840 - protein, 6 aa, synthetic construct
AFGGKL

SEQ ID NO: 16841 - protein, 7 aa, synthetic construct
AFGRETH

SEQ ID NO: 16842 - skipped

SEQ ID NO: 16843 - protein, 6 aa, synthetic construct
AFFLQR

SEQ ID NO: 16844 - protein, 5 aa, synthetic construct
AFFIP

SEQ ID NO: 16845 - protein, 7 aa, synthetic construct
ALERTLI

SEQ ID NO: 16846 - protein, 7 aa, synthetic construct
AFFLRWL

SEQ ID NO: 16847 - protein, 6 aa, synthetic construct
ACGDTD

SEQ ID NO: 16848 - protein, 7 aa, synthetic construct
AVERETL

SEQ ID NO: 16849 - protein, 6 aa, synthetic construct
AVERET

SEQ ID NO: 16850 - protein, 5 aa, synthetic construct
ACDTG

SEQ ID NO: 16851 - protein, 4 aa, synthetic construct
ACGV

SEQ ID NO: 16852 - protein, 7 aa, synthetic construct
AFERLTH

SEQ ID NO: 16853 - protein, 5 aa, synthetic construct
AFGDS

SEQ ID NO: 16854 - protein, 6 aa, synthetic construct
AFERET

SEQ ID NO: 16855 - protein, 6 aa, synthetic construct
ALERKT

SEQ ID NO: 16856 - protein, 7 aa, synthetic construct
ALGRSTH

SEQ ID NO: 16857 - protein, 4 aa, synthetic construct
AFSY

SEQ ID NO: 16858 - protein, 7 aa, synthetic construct
ASERSTH

SEQ ID NO: 16859 - protein, 5 aa, synthetic construct
AWGVT

SEQ ID NO: 16860 - protein, 7 aa, synthetic construct
ASGPNWG

SEQ ID NO: 16861 - protein, 6 aa, synthetic construct
ASGDTD

SEQ ID NO: 16862 - protein, 4 aa, synthetic construct
AFRD

SEQ ID NO: 16863 - protein, 7 aa, synthetic construct
ALEQSTH

SEQ ID NO: 16864 - protein, 7 aa, synthetic construct
AFARSTH

SEQ ID NO: 16865 - protein, 6 aa, synthetic construct
TFFLLG

SEQ ID NO: 16866 - protein, 5 aa, synthetic construct
EFFLR

SEQ ID NO: 16867 - protein, 4 aa, synthetic construct
GCVV

SEQ ID NO: 16868 - protein, 7 aa, synthetic construct
EFVRSTL

SEQ ID NO: 16869 - protein, 4 aa, synthetic construct
GCGA

SEQ ID NO: 16870 - protein, 4 aa, synthetic construct
EFGD

SEQ ID NO: 16871 - protein, 5 aa, synthetic construct
GCAGV

SEQ ID NO: 16872 - protein, 5 aa, synthetic construct
TRRSD

SEQ ID NO: 16873 - protein, 6 aa, synthetic construct
VFFLLG

SEQ ID NO: 16874 - protein, 7 aa, synthetic construct
GFERSTL

SEQ ID NO: 16875 - protein, 7 aa, synthetic construct
GFERETH

SEQ ID NO: 16876 - protein, 7 aa, synthetic construct
GFAGFSA

SEQ ID NO: 16877 - protein, 5 aa, synthetic construct
GCVLR

SEQ ID NO: 16878 - skipped

SEQ ID NO: 16879 - protein, 6 aa, synthetic construct
GCFVRG

SEQ ID NO: 16880-16881 - skipped (2 entries)

SEQ ID NO: 16882 - protein, 6 aa, synthetic construct
GCFVGG

SEQ ID NO: 16883 - protein, 6 aa, synthetic construct
PRGLTG

SEQ ID NO: 16884 - protein, 4 aa, synthetic construct
DYGD

SEQ ID NO: 16885 - protein, 6 aa, synthetic construct
AVVGGW

SEQ ID NO: 16886 - protein, 7 aa, synthetic construct
AYEGSTL

SEQ ID NO: 16887 - protein, 4 aa, synthetic construct
AWGG

SEQ ID NO: 16888 - protein, 5 aa, synthetic construct
VLFLR

SEQ ID NO: 16889 - protein, 5 aa, synthetic construct
AWFLR

SEQ ID NO: 16890-16891 - skipped (2 entries)

SEQ ID NO: 16892 - protein, 6 aa, synthetic construct
VRAINS

SEQ ID NO: 16893 - protein, 6 aa, synthetic construct
AVVRGG

SEQ ID NO: 16894 - protein, 4 aa, synthetic construct
AVVD

SEQ ID NO: 16895 - protein, 6 aa, synthetic construct
DTDTLI

SEQ ID NO: 16896 - protein, 6 aa, synthetic construct
AVRDTR

SEQ ID NO: 16897 - protein, 4 aa, synthetic construct
AVGV

SEQ ID NO: 16898 - protein, 5 aa, synthetic construct
AVGGT

SEQ ID NO: 16899 - protein, 5 aa, synthetic construct
VRSSN

SEQ ID NO: 16900 - protein, 7 aa, synthetic construct
VSGSNWG

SEQ ID NO: 16901 - protein, 4 aa, synthetic construct
AVGE

SEQ ID NO: 16902 - protein, 6 aa, synthetic construct
AVGDTD

SEQ ID NO: 16903 - protein, 5 aa, synthetic construct
AVGDR

SEQ ID NO: 16904 - protein, 6 aa, synthetic construct
AYFLPG

SEQ ID NO: 16905 - protein, 7 aa, synthetic construct
VLERETH

SEQ ID NO: 16906 - protein, 4 aa, synthetic construct
AYGA

SEQ ID NO: 16907 - protein, 4 aa, synthetic construct
VFGA

SEQ ID NO: 16908 - protein, 4 aa, synthetic construct
DLWG

SEQ ID NO: 16909 - protein, 7 aa, synthetic construct
DLERLTH

SEQ ID NO: 16910 - protein, 6 aa, synthetic construct
DLERLT

SEQ ID NO: 16911 - protein, 4 aa, synthetic construct
DFYI

SEQ ID NO: 16912 - protein, 6 aa, synthetic construct
DFRWGG

SEQ ID NO: 16913 - protein, 5 aa, synthetic construct
DFLLR

SEQ ID NO: 16914 - protein, 6 aa, synthetic construct
DFGDTR

SEQ ID NO: 16915 - protein, 6 aa, synthetic construct
DFGDTD

SEQ ID NO: 16916 - protein, 4 aa, synthetic construct
DFGD

SEQ ID NO: 16917 - protein, 6 aa, synthetic construct
DFFIRE

SEQ ID NO: 16918 - protein, 6 aa, synthetic construct
DCLLPG

SEQ ID NO: 16919 - protein, 4 aa, synthetic construct
DCGA

SEQ ID NO: 16920 - protein, 4 aa, synthetic construct
AYWD

SEQ ID NO: 16921 - protein, 5 aa, synthetic construct
AYVET

SEQ ID NO: 16922 - protein, 4 aa, synthetic construct
AYLV

SEQ ID NO: 16923 - protein, 5 aa, synthetic construct
AYILR

SEQ ID NO: 16924 - protein, 6 aa, synthetic construct
AYGDTD

SEQ ID NO: 16925 - protein, 6 aa, synthetic construct
DFFILG

SEQ ID NO: 16926 - protein, 5 aa, synthetic construct
GFGVT

SEQ ID NO: 16927 - skipped

SEQ ID NO: 16928 - protein, 4 aa, synthetic construct
PDTD

SEQ ID NO: 16929 - protein, 4 aa, synthetic construct
PFGD

SEQ ID NO: 16930 - protein, 5 aa, synthetic construct
RLNST

SEQ ID NO: 16931 - skipped

SEQ ID NO: 16932 - protein, 6 aa, synthetic construct
PFFVLG

SEQ ID NO: 16933 - protein, 4 aa, synthetic construct
RNST

SEQ ID NO: 16934 - protein, 6 aa, synthetic construct
PFFLPG

SEQ ID NO: 16935 - protein, 6 aa, synthetic construct
PFFIRR

SEQ ID NO: 16936 - protein, 7 aa, synthetic construct
PFERETH

SEQ ID NO: 16937 - protein, 5 aa, synthetic construct
PESDK

SEQ ID NO: 16938 - protein, 6 aa, synthetic construct
PCSYGG

SEQ ID NO: 16939 - protein, 4 aa, synthetic construct
RCAD

SEQ ID NO: 16940 - protein, 4 aa, synthetic construct
PCSY

SEQ ID NO: 16941 - protein, 6 aa, synthetic construct
PCFLRG

SEQ ID NO: 16942-16945 - skipped (4 entries)

SEQ ID NO: 16946 - protein, 4 aa, synthetic construct
SFGD

SEQ ID NO: 16947 - protein, 4 aa, synthetic construct
LRAI

SEQ ID NO: 16948 - skipped

SEQ ID NO: 16949 - protein, 4 aa, synthetic construct
RLGR

SEQ ID NO: 16950 - skipped

SEQ ID NO: 16951 - protein, 6 aa, synthetic construct
LCGYPG

SEQ ID NO: 16952 - protein, 7 aa, synthetic construct
PLGIPIN

SEQ ID NO: 16953 - protein, 7 aa, synthetic construct
PRAINSS

SEQ ID NO: 16954 - protein, 7 aa, synthetic construct
PSSDKLI

SEQ ID NO: 16955 - protein, 4 aa, synthetic construct
PVGL

SEQ ID NO: 16956 - protein, 7 aa, synthetic construct
PVSDKLI

SEQ ID NO: 16957 - protein, 7 aa, synthetic construct
PQSDKLI

SEQ ID NO: 16958 - protein, 6 aa, synthetic construct
PPIPGT

SEQ ID NO: 16959 - protein, 6 aa, synthetic construct
PYFLPG

SEQ ID NO: 16960 - protein, 6 aa, synthetic construct
PLYTKT

SEQ ID NO: 16961 - protein, 5 aa, synthetic construct
PLYLR

SEQ ID NO: 16962 - protein, 5 aa, synthetic construct
PYFLR

SEQ ID NO: 16963 - protein, 6 aa, synthetic construct
PFSYRG

SEQ ID NO: 16964 - protein, 7 aa, synthetic construct
PLERSTH

SEQ ID NO: 16965 - protein, 7 aa, synthetic construct
PLDRSTH

SEQ ID NO: 16966 - skipped

SEQ ID NO: 16967 - protein, 6 aa, synthetic construct
PFYLLG

SEQ ID NO: 16968 - protein, 4 aa, synthetic construct
PFYL

SEQ ID NO: 16969 - protein, 7 aa, synthetic construct
PYSDILI

SEQ ID NO: 16970 - protein, 4 aa, synthetic construct
PFYK

SEQ ID NO: 16971 - protein, 4 aa, synthetic construct
PFYI

SEQ ID NO: 16972 - protein, 6 aa, synthetic construct
PFSYWG

SEQ ID NO: 16973 - protein, 6 aa, synthetic construct
LKSRHR

SEQ ID NO: 16974 - skipped

SEQ ID NO: 16975 - protein, 6 aa, synthetic construct
TPINSS

SEQ ID NO: 16976 - protein, 7 aa, synthetic construct
GFGGRGV

SEQ ID NO: 16977 - protein, 4 aa, synthetic construct
GIVV

SEQ ID NO: 16978 - protein, 4 aa, synthetic construct
GIAH

SEQ ID NO: 16979 - protein, 4 aa, synthetic construct
GGGE

SEQ ID NO: 16980 - skipped

SEQ ID NO: 16981 - protein, 6 aa, synthetic construct
GFVRYT

SEQ ID NO: 16982 - protein, 5 aa, synthetic construct
GFVLR

SEQ ID NO: 16983 - protein, 6 aa, synthetic construct
GFLVRG

SEQ ID NO: 16984 - protein, 4 aa, synthetic construct
GFGV

SEQ ID NO: 16985 - protein, 5 aa, synthetic construct
GFGGT

SEQ ID NO: 16986 - protein, 6 aa, synthetic construct
GFFVRG

SEQ ID NO: 16987 - protein, 6 aa, synthetic construct
GLERYT

SEQ ID NO: 16988 - protein, 6 aa, synthetic construct
SYFLLG

SEQ ID NO: 16989 - skipped

SEQ ID NO: 16990 - protein, 4 aa, synthetic construct
GFFV

SEQ ID NO: 16991 - protein, 7 aa, synthetic construct
TFRWGGT

SEQ ID NO: 16992 - protein, 5 aa, synthetic construct
TFVLR

SEQ ID NO: 16993 - protein, 6 aa, synthetic construct
GFFLRG

SEQ ID NO: 16994 - protein, 7 aa, synthetic construct
TLERSTH

SEQ ID NO: 16995 - protein, 6 aa, synthetic construct
GFFLGG

SEQ ID NO: 16996 - protein, 5 aa, synthetic construct
GFFIP

SEQ ID NO: 16997 - skipped

SEQ ID NO: 16998 - protein, 5 aa, synthetic construct
GLGGT

SEQ ID NO: 16999 - protein, 6 aa, synthetic construct
HYSLPG

SEQ ID NO: 17000 - protein, 6 aa, synthetic construct
AVGDKL

SEQ ID NO: 17001 - skipped

SEQ ID NO: 17002 - protein, 5 aa, synthetic construct
HLFKL

SEQ ID NO: 17003 - protein, 5 aa, synthetic construct
HFFLR

SEQ ID NO: 17004 - skipped

SEQ ID NO: 17005 - protein, 7 aa, synthetic construct
GVVRETH

SEQ ID NO: 17006 - skipped

SEQ ID NO: 17007 - protein, 5 aa, synthetic construct
GVGVT

SEQ ID NO: 17008 - protein, 5 aa, synthetic construct
SFGDR

SEQ ID NO: 17009 - protein, 5 aa, synthetic construct
GVGGT

SEQ ID NO: 17010 - protein, 4 aa, synthetic construct
GVGG

SEQ ID NO: 17011 - protein, 7 aa, synthetic construct
GLVRLTH

SEQ ID NO: 17012 - protein, 5 aa, synthetic construct
GVGDR

SEQ ID NO: 17013 - protein, 5 aa, synthetic construct
SFILR

SEQ ID NO: 17014 - protein, 5 aa, synthetic construct
SVGVT

SEQ ID NO: 17015 - protein, 7 aa, synthetic construct
GVERSTH

SEQ ID NO: 17016 - protein, 7 aa, synthetic construct
GVERETH

SEQ ID NO: 17017 - skipped

SEQ ID NO: 17018 - protein, 6 aa, synthetic construct
GSQSWY

SEQ ID NO: 17019 - skipped

SEQ ID NO: 17020 - protein, 6 aa, synthetic construct
GQHPEE

SEQ ID NO: 17021 - protein, 7 aa, synthetic construct
GVGGLAV

SEQ ID NO: 17022 - protein, 7 aa, synthetic construct
ALSDKLI

SEQ ID NO: 17023 - protein, 5 aa, synthetic construct
AVFLR

SEQ ID NO: 17024 - protein, 7 aa, synthetic construct
AFLWGGT

SEQ ID NO: 17025 - protein, 5 aa, synthetic construct
AFSYR

SEQ ID NO: 17026 - protein, 7 aa, synthetic construct
AFSYGGY

SEQ ID NO: 17027 - protein, 7 aa, synthetic construct
AFSRSTH

SEQ ID NO: 17028 - protein, 6 aa, synthetic construct
AFSLRG

SEQ ID NO: 17029 - protein, 7 aa, synthetic construct
AFRWGVT

SEQ ID NO: 17030 - protein, 6 aa, synthetic construct
AFRWGV

SEQ ID NO: 17031 - protein, 7 aa, synthetic construct
AFRWGGY

SEQ ID NO: 17032 - protein, 4 aa, synthetic construct
AFRE

SEQ ID NO: 17033 - protein, 6 aa, synthetic construct
AFRDTR

SEQ ID NO: 17034 - protein, 6 aa, synthetic construct
AFLVPG

SEQ ID NO: 17035 - protein, 6 aa, synthetic construct
AFGATD

SEQ ID NO: 17036 - protein, 6 aa, synthetic construct
AFLVLG

SEQ ID NO: 17037 - protein, 6 aa, synthetic construct
AFLLGG

SEQ ID NO: 17038 - protein, 4 aa, synthetic construct
AFLD

SEQ ID NO: 17039 - protein, 6 aa, synthetic construct
AFIQRR

SEQ ID NO: 17040 - protein, 7 aa, synthetic construct
AFGEKLI

SEQ ID NO: 17041 - protein, 6 aa, synthetic construct
AFGDTL

SEQ ID NO: 17042 - protein, 7 aa, synthetic construct
AFGDQLI

SEQ ID NO: 17043 - protein, 5 aa, synthetic construct
AFGDN

SEQ ID NO: 17044 - protein, 7 aa, synthetic construct
AFGDKHI

SEQ ID NO: 17045 - skipped

SEQ ID NO: 17046 - protein, 4 aa, synthetic construct
AFVA

SEQ ID NO: 17047 - protein, 5 aa, synthetic construct
AFVDT

SEQ ID NO: 17048 - protein, 5 aa, synthetic construct
AFVET

SEQ ID NO: 17049 - protein, 7 aa, synthetic construct
AGERSTL

SEQ ID NO: 17050 - protein, 7 aa, synthetic construct
AGERAGL

SEQ ID NO: 17051 - protein, 7 aa, synthetic construct
AGAGGSH

SEQ ID NO: 17052 - protein, 6 aa, synthetic construct
AFYLRR

SEQ ID NO: 17053 - protein, 4 aa, synthetic construct
AFYK

SEQ ID NO: 17054 - protein, 4 aa, synthetic construct
AFVV

SEQ ID NO: 17055 - protein, 7 aa, synthetic construct
AFVRVTH

SEQ ID NO: 17056 - protein, 7 aa, synthetic construct
AFVRSTL

SEQ ID NO: 17057 - protein, 6 aa, synthetic construct
AFVRRG

SEQ ID NO: 17058 - protein, 7 aa, synthetic construct
AFVRETH

SEQ ID NO: 17059 - protein, 6 aa, synthetic construct
AFVREA

SEQ ID NO: 17060 - protein, 7 aa, synthetic construct
AFVPLTH

SEQ ID NO: 17061 - protein, 5 aa, synthetic construct
AFVNT

SEQ ID NO: 17062 - protein, 6 aa, synthetic construct
AFVLRR

SEQ ID NO: 17063 - protein, 7 aa, synthetic construct
AFVLRGL

SEQ ID NO: 17064 - protein, 6 aa, synthetic construct
AFVLPG

SEQ ID NO: 17065 - protein, 5 aa, synthetic construct
AFVLI

SEQ ID NO: 17066 - protein, 5 aa, synthetic construct
AFVLG

SEQ ID NO: 17067 - protein, 6 aa, synthetic construct
AFVLET

SEQ ID NO: 17068 - protein, 7 aa, synthetic construct
AFGDILI

SEQ ID NO: 17069 - protein, 5 aa, synthetic construct
AFGAT

SEQ ID NO: 17070 - protein, 7 aa, synthetic construct
AGGEKLI

SEQ ID NO: 17071 - protein, 4 aa, synthetic construct
ACGN

SEQ ID NO: 17072 - protein, 5 aa, synthetic construct
AFAAS

SEQ ID NO: 17073-17074 - skipped (2 entries)

SEQ ID NO: 17075 - protein, 5 aa, synthetic construct
ACVLG

SEQ ID NO: 17076 - protein, 6 aa, synthetic construct
ACVIGR

SEQ ID NO: 17077 - protein, 4 aa, synthetic construct
ACVD

SEQ ID NO: 17078 - protein, 6 aa, synthetic construct
ACLLRG

SEQ ID NO: 17079 - protein, 5 aa, synthetic construct
ACLLR

SEQ ID NO: 17080 - protein, 6 aa, synthetic construct
ACLLLG

SEQ ID NO: 17081 - skipped

SEQ ID NO: 17082 - protein, 7 aa, synthetic construct
AFGAKLV

SEQ ID NO: 17083 - protein, 6 aa, synthetic construct
ACFVRG

SEQ ID NO: 17084 - protein, 7 aa, synthetic construct
ACFVGGL

SEQ ID NO: 17085 - protein, 7 aa, synthetic construct
ACFLGGL

SEQ ID NO: 17086 - protein, 4 aa, synthetic construct
ACFL

SEQ ID NO: 17087 - protein, 6 aa, synthetic construct
ACFILG

SEQ ID NO: 17088 - skipped

SEQ ID NO: 17089 - protein, 7 aa, synthetic construct
ACERSTH

SEQ ID NO: 17090 - protein, 4 aa, synthetic construct
ACCL

SEQ ID NO: 17091 - protein, 7 aa, synthetic construct
ACARSTH

SEQ ID NO: 17092 - protein, 5 aa, synthetic construct
AFADK

SEQ ID NO: 17093 - protein, 6 aa, synthetic construct
AFARIA

SEQ ID NO: 17094 - protein, 4 aa, synthetic construct
AFED

SEQ ID NO: 17095 - protein, 5 aa, synthetic construct
AFEDN

SEQ ID NO: 17096 - skipped

SEQ ID NO: 17097 - protein, 7 aa, synthetic construct
AFFVLGL

SEQ ID NO: 17098 - protein, 6 aa, synthetic construct
AFFVLE

SEQ ID NO: 17099 - protein, 5 aa, synthetic construct
AFFRQ

SEQ ID NO: 17100 - protein, 6 aa, synthetic construct
AFFQRG

SEQ ID NO: 17101 - protein, 7 aa, synthetic construct
AFFLLGV

SEQ ID NO: 17102 - protein, 6 aa, synthetic construct
AFFLGR

SEQ ID NO: 17103 - protein, 5 aa, synthetic construct
AFFLG

SEQ ID NO: 17104 - protein, 6 aa, synthetic construct
AFFIRE

SEQ ID NO: 17105 - protein, 5 aa, synthetic construct
AFFIL

SEQ ID NO: 17106 - protein, 6 aa, synthetic construct
AFFERG

SEQ ID NO: 17107 - protein, 7 aa, synthetic construct
AFERSTL

SEQ ID NO: 17108 - protein, 6 aa, synthetic construct
AFERST

SEQ ID NO: 17109 - protein, 7 aa, synthetic construct
AFERQTH

SEQ ID NO: 17110 - protein, 7 aa, synthetic construct
AFERETL

SEQ ID NO: 17111 - protein, 7 aa, synthetic construct
AFERDTL

SEQ ID NO: 17112 - protein, 5 aa, synthetic construct
AFEGY

SEQ ID NO: 17113 - protein, 7 aa, synthetic construct
AFEGSTH

SEQ ID NO: 17114 - protein, 6 aa, synthetic construct
AFEGST

SEQ ID NO: 17115 - protein, 5 aa, synthetic construct
AGGEA

SEQ ID NO: 17116 - protein, 5 aa, synthetic construct
AGGGT

SEQ ID NO: 17117 - protein, 6 aa, synthetic construct
AVERYS

SEQ ID NO: 17118 - protein, 6 aa, synthetic construct
ALVQTT

SEQ ID NO: 17119 - protein, 7 aa, synthetic construct
ALYRNST

SEQ ID NO: 17120 - protein, 6 aa, synthetic construct
ALYLAA

SEQ ID NO: 17121 - protein, 4 aa, synthetic construct
ALWI

SEQ ID NO: 17122 - protein, 5 aa, synthetic construct
ALWDS

SEQ ID NO: 17123 - skipped

SEQ ID NO: 17124 - protein, 6 aa, synthetic construct
ALVVNT

SEQ ID NO: 17125 - protein, 4 aa, synthetic construct
ALVV

SEQ ID NO: 17126 - protein, 7 aa, synthetic construct
ALVRSTL

SEQ ID NO: 17127 - protein, 7 aa, synthetic construct
ALVRDTL

SEQ ID NO: 17128 - protein, 7 aa, synthetic construct
ALVLRGR

SEQ ID NO: 17129 - protein, 4 aa, synthetic construct
ALGV

SEQ ID NO: 17130 - protein, 5 aa, synthetic construct
ALVGY

SEQ ID NO: 17131 - protein, 6 aa, synthetic construct
ALVGVC

SEQ ID NO: 17132 - protein, 5 aa, synthetic construct
ALVEY

SEQ ID NO: 17133 - protein, 4 aa, synthetic construct
ALVD

SEQ ID NO: 17134 - protein, 7 aa, synthetic construct
ALTRETH

SEQ ID NO: 17135 - protein, 4 aa, synthetic construct
ALRV

SEQ ID NO: 17136 - protein, 5 aa, synthetic construct
ALLLR

SEQ ID NO: 17137 - protein, 7 aa, synthetic construct
ALKRSTH

SEQ ID NO: 17138 - protein, 7 aa, synthetic construct
ALKRETH

SEQ ID NO: 17139 - protein, 5 aa, synthetic construct
ANEDT

SEQ ID NO: 17140 - protein, 6 aa, synthetic construct
APQSWY

SEQ ID NO: 17141 - protein, 4 aa, synthetic construct
ARWG

SEQ ID NO: 17142 - protein, 7 aa, synthetic construct
ASERETH

SEQ ID NO: 17143 - protein, 7 aa, synthetic construct
AVERVTH

SEQ ID NO: 17144 - protein, 6 aa, synthetic construct
AVERDT

SEQ ID NO: 17145 - protein, 6 aa, synthetic construct
AVEGGR

SEQ ID NO: 17146 - protein, 7 aa, synthetic construct
AVARLTH

SEQ ID NO: 17147 - protein, 6 aa, synthetic construct
AVARAA

SEQ ID NO: 17148 - protein, 6 aa, synthetic construct
ATFLLG

SEQ ID NO: 17149 - skipped

SEQ ID NO: 17150 - protein, 5 aa, synthetic construct
ASVLR

SEQ ID NO: 17151 - protein, 6 aa, synthetic construct
ASQTWY

SEQ ID NO: 17152 - protein, 6 aa, synthetic construct
ASQSWF

SEQ ID NO: 17153 - protein, 6 aa, synthetic construct
ASPSWY

SEQ ID NO: 17154 - protein, 5 aa, synthetic construct
ASGVT

SEQ ID NO: 17155 - protein, 5 aa, synthetic construct
ASGSI

SEQ ID NO: 17156 - protein, 7 aa, synthetic construct
ASGSHWG

SEQ ID NO: 17157 - protein, 4 aa, synthetic construct
ASGG

SEQ ID NO: 17158 - protein, 5 aa, synthetic construct
ASGDN

SEQ ID NO: 17159 - protein, 4 aa, synthetic construct
ASGD

SEQ ID NO: 17160 - protein, 7 aa, synthetic construct
ASGANWG

SEQ ID NO: 17161 - protein, 6 aa, synthetic construct
ASFLLG

SEQ ID NO: 17162 - protein, 5 aa, synthetic construct
ALGVT

SEQ ID NO: 17163 - protein, 7 aa, synthetic construct
ALGRLTH

SEQ ID NO: 17164 - protein, 6 aa, synthetic construct
AGGRGA

SEQ ID NO: 17165 - protein, 6 aa, synthetic construct
AIVDKL

SEQ ID NO: 17166 - protein, 7 aa, synthetic construct
ALEGVSH

SEQ ID NO: 17167 - protein, 6 aa, synthetic construct
ALEGST

SEQ ID NO: 17168 - protein, 6 aa, synthetic construct
ALEGGS

SEQ ID NO: 17169 - protein, 7 aa, synthetic construct
ALEDKRL

SEQ ID NO: 17170 - protein, 7 aa, synthetic construct
ALDRSTH

SEQ ID NO: 17171 - protein, 7 aa, synthetic construct
ALDRETH

SEQ ID NO: 17172 - protein, 6 aa, synthetic construct
ALARVT

SEQ ID NO: 17173 - protein, 7 aa, synthetic construct
ALARETH

SEQ ID NO: 17174 - protein, 5 aa, synthetic construct
AIVLR

SEQ ID NO: 17175 - skipped

SEQ ID NO: 17176 - protein, 7 aa, synthetic construct
ALGRATH

SEQ ID NO: 17177 - protein, 6 aa, synthetic construct
AIFLPG

SEQ ID NO: 17178 - protein, 6 aa, synthetic construct
AIFILG

SEQ ID NO: 17179 - protein, 7 aa, synthetic construct
AIERSTL

SEQ ID NO: 17180 - protein, 7 aa, synthetic construct
AIERSTH

SEQ ID NO: 17181 - protein, 5 aa, synthetic construct
AGVGG

SEQ ID NO: 17182 - protein, 5 aa, synthetic construct
AGVAT

SEQ ID NO: 17183 - protein, 5 aa, synthetic construct
AGLLL

SEQ ID NO: 17184 - protein, 4 aa, synthetic construct
AGGV

SEQ ID NO: 17185 - protein, 6 aa, synthetic construct
AGGRGW

SEQ ID NO: 17186 - protein, 6 aa, synthetic construct
ALEGYT

SEQ ID NO: 17187 - protein, 7 aa, synthetic construct
ALELSTL

SEQ ID NO: 17188 - protein, 7 aa, synthetic construct
ALERDTL

SEQ ID NO: 17189 - protein, 5 aa, synthetic construct
ALERF

SEQ ID NO: 17190 - protein, 4 aa, synthetic construct
ALGL

SEQ ID NO: 17191 - protein, 7 aa, synthetic construct
ALGIPIN

SEQ ID NO: 17192 - protein, 4 aa, synthetic construct
ALGI

SEQ ID NO: 17193 - protein, 6 aa, synthetic construct
ALGGNR

SEQ ID NO: 17194 - protein, 4 aa, synthetic construct
ALGG

SEQ ID NO: 17195 - protein, 4 aa, synthetic construct
ALGD

SEQ ID NO: 17196 - protein, 4 aa, synthetic construct
ALGA

SEQ ID NO: 17197 - protein, 7 aa, synthetic construct
ALFVLGL

SEQ ID NO: 17198 - protein, 6 aa, synthetic construct
ALFLYW

SEQ ID NO: 17199 - protein, 5 aa, synthetic construct
ALFLP

SEQ ID NO: 17200 - protein, 7 aa, synthetic construct
ALFLLGL

SEQ ID NO: 17201 - protein, 6 aa, synthetic construct
ALFLIG

SEQ ID NO: 17202 - protein, 4 aa, synthetic construct
ALFL

SEQ ID NO: 17203 - protein, 6 aa, synthetic construct
ALERYY

SEQ ID NO: 17204 - protein, 7 aa, synthetic construct
ALERYTG

SEQ ID NO: 17205 - protein, 5 aa, synthetic construct
ALERY

SEQ ID NO: 17206 - protein, 7 aa, synthetic construct
ALERQTL

SEQ ID NO: 17207 - protein, 6 aa, synthetic construct
ALERQT

SEQ ID NO: 17208 - protein, 6 aa, synthetic construct
ALERLT

SEQ ID NO: 17209 - skipped

SEQ ID NO: 17210 - protein, 4 aa, synthetic construct
ALWG

SEQ ID NO: 17211 - protein, 7 aa, synthetic construct
AFRWGGT

SEQ ID NO: 17212 - protein, 5 aa, synthetic construct
AFLLL

SEQ ID NO: 17213 - protein, 6 aa, synthetic construct
AFSLWG

SEQ ID NO: 17214 - skipped

SEQ ID NO: 17215 - protein, 4 aa, synthetic construct
PSGG

SEQ ID NO: 17216 - protein, 7 aa, synthetic construct
AFLWGGT

SEQ ID NO: 17217 - protein, 6 aa, synthetic construct
AFRWGV

SEQ ID NO: 17218 - protein, 6 aa, synthetic construct
AFTPLA

SEQ ID NO: 17219 - protein, 6 aa, synthetic construct
PFDGGV

SEQ ID NO: 17220 - protein, 4 aa, synthetic construct
DLWG

SEQ ID NO: 17221 - protein, 7 aa, synthetic construct
AFRWGGY

SEQ ID NO: 17222 - protein, 7 aa, synthetic construct
AFRGGGT

SEQ ID NO: 17223 - protein, 4 aa, synthetic construct
AFWG

SEQ ID NO: 17224 - protein, 6 aa, synthetic construct
AFLLLG

SEQ ID NO: 17225 - protein, 4 aa, synthetic construct
AFLL

SEQ ID NO: 17226 - protein, 7 aa, synthetic construct
ACRWGGT

SEQ ID NO: 17227 - protein, 7 aa, synthetic construct
ALRWGGT

SEQ ID NO: 17228 - protein, 6 aa, synthetic construct
AFSRWG

SEQ ID NO: 17229 - protein, 7 aa, synthetic construct
AFLLLGV

SEQ ID NO: 17230 - protein, 5 aa, synthetic construct
AFRWG

SEQ ID NO: 17231 - protein, 7 aa, synthetic construct
DFRWGGT

SEQ ID NO: 17232 - skipped

SEQ ID NO: 17233 - protein, 5 aa, synthetic construct
AFFYL

SEQ ID NO: 17234 - protein, 4 aa, synthetic construct
APWG

SEQ ID NO: 17235 - protein, 7 aa, synthetic construct
AVRWGGT

SEQ ID NO: 17236 - protein, 4 aa, synthetic construct
AFLW

SEQ ID NO: 17237 - protein, 6 aa, synthetic construct
AFRCGG

SEQ ID NO: 17238 - protein, 6 aa, synthetic construct
AFFLLR

SEQ ID NO: 17239 - protein, 6 aa, synthetic construct
ASQSWY

SEQ ID NO: 17240 - protein, 7 aa, synthetic construct
ASRWGGT

SEQ ID NO: 17241 - protein, 4 aa, synthetic construct
ARWG

SEQ ID NO: 17242 - protein, 7 aa, synthetic construct
ALWGRTP

SEQ ID NO: 17243 - protein, 7 aa, synthetic construct
AFRWWGT

SEQ ID NO: 17244 - protein, 6 aa, synthetic construct
AFRWGG

SEQ ID NO: 17245 - protein, 4 aa, synthetic construct
AIWG

SEQ ID NO: 17246 - protein, 4 aa, synthetic construct
AVWG

SEQ ID NO: 17247 - protein, 6 aa, synthetic construct
AFLFLR

SEQ ID NO: 17248 - protein, 7 aa, synthetic construct
AFRRGGT

SEQ ID NO: 17249 - protein, 4 aa, synthetic construct
TLWG

SEQ ID NO: 17250 - protein, 4 aa, synthetic construct
VLWG

SEQ ID NO: 17251 - protein, 6 aa, synthetic construct
AFFFLR

SEQ ID NO: 17252 - protein, 4 aa, synthetic construct
AFFS

SEQ ID NO: 17253 - protein, 5 aa, synthetic construct
ALLLL

SEQ ID NO: 17254 - protein, 4 aa, synthetic construct
AFFF

SEQ ID NO: 17255 - protein, 6 aa, synthetic construct
AFFVLR

SEQ ID NO: 17256 - protein, 5 aa, synthetic construct
AFFLR

SEQ ID NO: 17257 - protein, 4 aa, synthetic construct
GLWG

SEQ ID NO: 17258 - protein, 7 aa, synthetic construct
PFRWGGT

SEQ ID NO: 17259 - protein, 6 aa, synthetic construct
ACTPLA

SEQ ID NO: 17260 - protein, 5 aa, synthetic construct
AFFFQ

SEQ ID NO: 17261 - skipped

SEQ ID NO: 17262 - protein, 5 aa, synthetic construct
AFTPI

SEQ ID NO: 17263 - protein, 5 aa, synthetic construct
ACLLL

SEQ ID NO: 17264 - skipped

SEQ ID NO: 17265 - protein, 6 aa, synthetic construct
AFTPMA

SEQ ID NO: 17266 - protein, 7 aa, synthetic construct
AYRWGGT

SEQ ID NO: 17267 - protein, 4 aa, synthetic construct
PFFS

SEQ ID NO: 17268 - protein, 7 aa, synthetic construct
AFQWGGT

SEQ ID NO: 17269 - protein, 7 aa, synthetic construct
VFRWGGT

SEQ ID NO: 17270 - protein, 6 aa, synthetic construct
AFLILG

SEQ ID NO: 17271 - protein, 7 aa, synthetic construct
AFRWRGT

SEQ ID NO: 17272 - protein, 7 aa, synthetic construct
AFRWGVT

SEQ ID NO: 17273 - protein, 6 aa, synthetic construct
ACSLWG

SEQ ID NO: 17274 - protein, 6 aa, synthetic construct
AFFFLW

SEQ ID NO: 17275 - protein, 4 aa, synthetic construct
PLWG

SEQ ID NO: 17276 - protein, 6 aa, synthetic construct
AFSVWG

SEQ ID NO: 17277 - protein, 5 aa, synthetic construct
AFLLM

SEQ ID NO: 17278 - protein, 5 aa, synthetic construct
AFSLW

SEQ ID NO: 17279 - protein, 6 aa, synthetic construct
ALSLWG

SEQ ID NO: 17280 - skipped

SEQ ID NO: 17281 - protein, 4 aa, synthetic construct
AFTP

SEQ ID NO: 17282 - skipped

SEQ ID NO: 17283 - protein, 6 aa, synthetic construct
AFLLLE

SEQ ID NO: 17284 - protein, 6 aa, synthetic construct
AFLVLG

SEQ ID NO: 17285 - protein, 6 aa, synthetic construct
AVSLWG

SEQ ID NO: 17286 - protein, 6 aa, synthetic construct
AVTPLA

SEQ ID NO: 17287 - protein, 7 aa, synthetic construct
AFRSGGT

SEQ ID NO: 17288 - protein, 5 aa, synthetic construct
AFYYL

SEQ ID NO: 17289-17290 - skipped (2 entries)

SEQ ID NO: 17291 - protein, 5 aa, synthetic construct
AFLWG

SEQ ID NO: 17292 - protein, 7 aa, synthetic construct
AIRWGGT

SEQ ID NO: 17293 - protein, 6 aa, synthetic construct
AFSLWR

SEQ ID NO: 17294 - protein, 7 aa, synthetic construct
AVRGGGT

SEQ ID NO: 17295 - protein, 4 aa, synthetic construct
ASGG

SEQ ID NO: 17296 - skipped

SEQ ID NO: 17297 - protein, 7 aa, synthetic construct
AFFFILG

SEQ ID NO: 17298 - protein, 4 aa, synthetic construct
AFLI

SEQ ID NO: 17299 - protein, 7 aa, synthetic construct
PLGEYTD

SEQ ID NO: 17300 - protein, 5 aa, synthetic construct
AVLLL

SEQ ID NO: 17301 - protein, 6 aa, synthetic construct
PFFSWG

SEQ ID NO: 17302 - protein, 6 aa, synthetic construct
AFTRIA

SEQ ID NO: 17303 - protein, 4 aa, synthetic construct
ATWG

SEQ ID NO: 17304 - protein, 6 aa, synthetic construct
AFFILR

SEQ ID NO: 17305 - protein, 6 aa, synthetic construct
LSMGGY

SEQ ID NO: 17306 - protein, 7 aa, synthetic construct
ACRGGGT

SEQ ID NO: 17307 - protein, 6 aa, synthetic construct
AFLWGV

SEQ ID NO: 17308 - protein, 7 aa, synthetic construct
AFTPIAG

SEQ ID NO: 17309 - protein, 4 aa, synthetic construct
DIWG

SEQ ID NO: 17310 - protein, 4 aa, synthetic construct
ALLW

SEQ ID NO: 17311 - protein, 5 aa, synthetic construct
DFLLL

SEQ ID NO: 17312 - protein, 6 aa, synthetic construct
DFRCGG

SEQ ID NO: 17313 - protein, 4 aa, synthetic construct
LSSP

SEQ ID NO: 17314 - protein, 4 aa, synthetic construct
AFCF

SEQ ID NO: 17315 - protein, 7 aa, synthetic construct
AFLLMGV

SEQ ID NO: 17316 - protein, 7 aa, synthetic construct
AFLLVGV

SEQ ID NO: 17317 - protein, 6 aa, synthetic construct
AFSLWW

SEQ ID NO: 17318 - protein, 6 aa, synthetic construct
PFEGGV

SEQ ID NO: 17319 - protein, 6 aa, synthetic construct
AFSGWG

SEQ ID NO: 17320 - protein, 4 aa, synthetic construct
ALLG

SEQ ID NO: 17321 - protein, 6 aa, synthetic construct
AFDGGV

SEQ ID NO: 17322 - protein, 4 aa, synthetic construct
SLWG

SEQ ID NO: 17323 - protein, 6 aa, synthetic construct
AFTPIV

SEQ ID NO: 17324 - protein, 6 aa, synthetic construct
AFRWGY

SEQ ID NO: 17325 - protein, 6 aa, synthetic construct
ASSLWG

SEQ ID NO: 17326 - protein, 6 aa, synthetic construct
AFTPIA

SEQ ID NO: 17327 - protein, 4 aa, synthetic construct
AFLV

SEQ ID NO: 17328 - protein, 6 aa, synthetic construct
AFTLIA

SEQ ID NO: 17329 - protein, 7 aa, synthetic construct
AFRCGGT

SEQ ID NO: 17330 - skipped

SEQ ID NO: 17331 - protein, 7 aa, synthetic construct
AFRLGGT

SEQ ID NO: 17332 - protein, 6 aa, synthetic construct
AFRGGV

SEQ ID NO: 17333 - protein, 7 aa, synthetic construct
AFRGGGY

SEQ ID NO: 17334 - protein, 5 aa, synthetic construct
AFLWW

SEQ ID NO: 17335 - protein, 7 aa, synthetic construct
AFLVLGV

SEQ ID NO: 17336 - protein, 5 aa, synthetic construct
AFRWW

SEQ ID NO: 17337 - protein, 5 aa, synthetic construct
AFYFQ

SEQ ID NO: 17338 - skipped

SEQ ID NO: 17339 - protein, 6 aa, synthetic construct
AISLWG

SEQ ID NO: 17340 - protein, 7 aa, synthetic construct
DLRWGGT

SEQ ID NO: 17341 - protein, 4 aa, synthetic construct
ACLL

SEQ ID NO: 17342 - protein, 7 aa, synthetic construct
ACLLLGV

SEQ ID NO: 17343 - protein, 7 aa, synthetic construct
TFRWGGT

SEQ ID NO: 17344 - protein, 5 aa, synthetic construct
ASLLL

SEQ ID NO: 17345 - protein, 7 aa, synthetic construct
ALRWWGT

SEQ ID NO: 17346 - protein, 6 aa, synthetic construct
DFSLWG

SEQ ID NO: 17347 - protein, 6 aa, synthetic construct
AFLCGG

SEQ ID NO: 17348 - protein, 4 aa, synthetic construct
ALLL

SEQ ID NO: 17349 - protein, 5 aa, synthetic construct
AFFYI

SEQ ID NO: 17350 - protein, 7 aa, synthetic construct
AFLLRGV

SEQ ID NO: 17351 - protein, 7 aa, synthetic construct
AFLWGGY

SEQ ID NO: 17352 - protein, 4 aa, synthetic construct
GRWG

SEQ ID NO: 17353 - skipped

SEQ ID NO: 17354 - protein, 7 aa, synthetic construct
AFLLRGD

SEQ ID NO: 17355 - skipped

SEQ ID NO: 17356 - protein, 6 aa, synthetic construct
ALTPLA

SEQ ID NO: 17357 - protein, 7 aa, synthetic construct
ALRGGGT

SEQ ID NO: 17358 - protein, 6 aa, synthetic construct
ALSRWG

SEQ ID NO: 17359 - protein, 6 aa, synthetic construct
ALLLLG

SEQ ID NO: 17360 - protein, 7 aa, synthetic construct
DFRWWGT

SEQ ID NO: 17361 - protein, 7 aa, synthetic construct
DFRRGGT

SEQ ID NO: 17362 - protein, 6 aa, synthetic construct
ALCGGT

SEQ ID NO: 17363 - protein, 6 aa, synthetic construct
PFDGGY

SEQ ID NO: 17364 - protein, 5 aa, synthetic construct
AYFYL

SEQ ID NO: 17365 - protein, 7 aa, synthetic construct
PFDGGGT

SEQ ID NO: 17366 - protein, 7 aa, synthetic construct
ALLLLGV

SEQ ID NO: 17367 - protein, 7 aa, synthetic construct
ALGGRTP

SEQ ID NO: 17368 - protein, 6 aa, synthetic construct
AFSSWG

SEQ ID NO: 17369 - skipped

SEQ ID NO: 17370 - protein, 6 aa, synthetic construct
ACFVLR

SEQ ID NO: 17371 - protein, 5 aa, synthetic construct
ALWGV

SEQ ID NO: 17372 - protein, 4 aa, synthetic construct
DVWG

SEQ ID NO: 17373 - protein, 6 aa, synthetic construct
ALLFLR

SEQ ID NO: 17374 - protein, 7 aa, synthetic construct
GFRWGGT

SEQ ID NO: 17375 - protein, 6 aa, synthetic construct
AFLVLV

SEQ ID NO: 17376 - skipped

SEQ ID NO: 17377 - protein, 5 aa, synthetic construct
ALWGR

SEQ ID NO: 17378 - protein, 6 aa, synthetic construct
AFRWWG

SEQ ID NO: 17379 - protein, 7 aa, synthetic construct
AFPWGGT

SEQ ID NO: 17380 - protein, 7 aa, synthetic construct
SFRWGGT

SEQ ID NO: 17381 - protein, 7 aa, synthetic construct
AFLILGV

SEQ ID NO: 17382 - skipped

SEQ ID NO: 17383 - protein, 7 aa, synthetic construct
ASLWGGT

SEQ ID NO: 17384 - protein, 6 aa, synthetic construct
ASRWGV

SEQ ID NO: 17385 - protein, 4 aa, synthetic construct
ATWS

SEQ ID NO: 17386 - protein, 6 aa, synthetic construct
AFTPIP

SEQ ID NO: 17387 - protein, 4 aa, synthetic construct
ASWG

SEQ ID NO: 17388 - protein, 6 aa, synthetic construct
ATWPSP

SEQ ID NO: 17389 - protein, 6 aa, synthetic construct
AYTPLA

SEQ ID NO: 17390 - skipped

SEQ ID NO: 17391 - protein, 4 aa, synthetic construct
GVWG

SEQ ID NO: 17392 - protein, 6 aa, synthetic construct
ALGDNR

SEQ ID NO: 17393 - protein, 7 aa, synthetic construct
AVWGRTP

SEQ ID NO: 17394 - protein, 7 aa, synthetic construct
AVLVLGV

SEQ ID NO: 17395 - protein, 6 aa, synthetic construct
AVSRWG

SEQ ID NO: 17396 - protein, 6 aa, synthetic construct
ASHSWY

SEQ ID NO: 17397 - protein, 4 aa, synthetic construct
AFTR

SEQ ID NO: 17398 - protein, 5 aa, synthetic construct
AFTPL

SEQ ID NO: 17399 - protein, 4 aa, synthetic construct
ALLI

SEQ ID NO: 17400 - protein, 7 aa, synthetic construct
AGRWGGT

SEQ ID NO: 17401 - protein, 7 aa, synthetic construct
ALGWGGT

SEQ ID NO: 17402 - protein, 5 aa, synthetic construct
GFLLL

SEQ ID NO: 17403 - protein, 6 aa, synthetic construct
GFTPLA

SEQ ID NO: 17404 - protein, 6 aa, synthetic construct
AFYVLR

SEQ ID NO: 17405 - protein, 6 aa, synthetic construct
AFYILR

SEQ ID NO: 17406 - protein, 6 aa, synthetic construct
HFDGGV

SEQ ID NO: 17407-17408 - skipped (2 entries)

SEQ ID NO: 17409 - protein, 7 aa, synthetic construct
DFTPIAG

SEQ ID NO: 17410 - protein, 5 aa, synthetic construct
DFFYI

SEQ ID NO: 17411 - protein, 6 aa, synthetic construct
AFTRMA

SEQ ID NO: 17412 - protein, 7 aa, synthetic construct
DFLWGGT

SEQ ID NO: 17413-17414 - skipped (2 entries)

SEQ ID NO: 17415 - protein, 7 aa, synthetic construct
ALSGRTP

SEQ ID NO: 17416 - protein, 6 aa, synthetic construct
ALSGSK

SEQ ID NO: 17417 - protein, 4 aa, synthetic construct
DFLL

SEQ ID NO: 17418 - protein, 6 aa, synthetic construct
ALWGGT

SEQ ID NO: 17419 - protein, 5 aa, synthetic construct
ALWGL

SEQ ID NO: 17420 - protein, 6 aa, synthetic construct
AFSPWG

SEQ ID NO: 17421 - protein, 5 aa, synthetic construct
AFSLR

SEQ ID NO: 17422 - protein, 6 aa, synthetic construct
AFLGLG

SEQ ID NO: 17423 - protein, 6 aa, synthetic construct
ACRWGG

SEQ ID NO: 17424 - protein, 6 aa, synthetic construct
ACSRWG

SEQ ID NO: 17425 - protein, 6 aa, synthetic construct
PFFCWG

SEQ ID NO: 17426 - protein, 6 aa, synthetic construct
AFLRLG

SEQ ID NO: 17427 - skipped

SEQ ID NO: 17428 - protein, 6 aa, synthetic construct
AFRGGG

SEQ ID NO: 17429 - protein, 7 aa, synthetic construct
PSGGYTD

SEQ ID NO: 17430 - protein, 6 aa, synthetic construct
AFGDTD

SEQ ID NO: 17431 - protein, 7 aa, synthetic construct
AFFYLLG

SEQ ID NO: 17432 - protein, 5 aa, synthetic construct
PSSSY

SEQ ID NO: 17433 - protein, 5 aa, synthetic construct
PSSTY

SEQ ID NO: 17434 - protein, 6 aa, synthetic construct
PVDGGV

SEQ ID NO: 17435 - protein, 7 aa, synthetic construct
AFFLLLG

SEQ ID NO: 17436 - skipped

SEQ ID NO: 17437 - protein, 6 aa, synthetic construct
PWGIPD

SEQ ID NO: 17438 - protein, 6 aa, synthetic construct
AFFFWG

SEQ ID NO: 17439 - protein, 6 aa, synthetic construct
PFPSGG

SEQ ID NO: 17440 - protein, 4 aa, synthetic construct
RSGG

SEQ ID NO: 17441 - protein, 7 aa, synthetic construct
AFFFLRV

SEQ ID NO: 17442 - protein, 7 aa, synthetic construct
AFFFLLG

SEQ ID NO: 17443 - protein, 6 aa, synthetic construct
PFDWGV

SEQ ID NO: 17444 - protein, 5 aa, synthetic construct
AFLWR

SEQ ID NO: 17445 - protein, 5 aa, synthetic construct
LFPLG

SEQ ID NO: 17446 - protein, 5 aa, synthetic construct
ACRWG

SEQ ID NO: 17447 - protein, 6 aa, synthetic construct
AFHLLG

SEQ ID NO: 17448 - protein, 4 aa, synthetic construct
PIWG

SEQ ID NO: 17449 - protein, 5 aa, synthetic construct
AFRWR

SEQ ID NO: 17450 - protein, 5 aa, synthetic construct
VFLLL

SEQ ID NO: 17451 - protein, 5 aa, synthetic construct
ACFYL

SEQ ID NO: 17452 - protein, 7 aa, synthetic construct
ACLWGGT

SEQ ID NO: 17453 - protein, 4 aa, synthetic construct
HLWG

SEQ ID NO: 17454 - protein, 4 aa, synthetic construct
AFLF

SEQ ID NO: 17455 - skipped

SEQ ID NO: 17456 - protein, 6 aa, synthetic construct
RANEIT

SEQ ID NO: 17457 - skipped

SEQ ID NO: 17458 - protein, 6 aa, synthetic construct
PYDGGV

SEQ ID NO: 17459 - protein, 5 aa, synthetic construct
DFRWW

SEQ ID NO: 17460 - protein, 6 aa, synthetic construct
PLRGRK

SEQ ID NO: 17461 - skipped

SEQ ID NO: 17462 - protein, 4 aa, synthetic construct
PLLG

SEQ ID NO: 17463 - protein, 5 aa, synthetic construct
RHTSD

SEQ ID NO: 17464 - protein, 5 aa, synthetic construct
DFFYL

SEQ ID NO: 17465 - protein, 6 aa, synthetic construct
DFYLLR

SEQ ID NO: 17466 - protein, 6 aa, synthetic construct
DFLLLG

SEQ ID NO: 17467 - protein, 4 aa, synthetic construct
PTSP

SEQ ID NO: 17468 - protein, 7 aa, synthetic construct
PLRSGGY

SEQ ID NO: 17469 - protein, 7 aa, synthetic construct
DFLLLGV

SEQ ID NO: 17470 - protein, 6 aa, synthetic construct
DFRWGV

SEQ ID NO: 17471 - protein, 6 aa, synthetic construct
DFLLTG

SEQ ID NO: 17472 - protein, 4 aa, synthetic construct
PSWG

SEQ ID NO: 17473 - protein, 6 aa, synthetic construct
DFLVLR

SEQ ID NO: 17474 - protein, 5 aa, synthetic construct
DFYLL

SEQ ID NO: 17475 - protein, 5 aa, synthetic construct
DFPWR

SEQ ID NO: 17476 - protein, 7 aa, synthetic construct
PNRGRTP

SEQ ID NO: 17477 - protein, 6 aa, synthetic construct
PPNPGT

SEQ ID NO: 17478 - protein, 5 aa, synthetic construct
DFFFQ

SEQ ID NO: 17479 - protein, 6 aa, synthetic construct
DFSHWW

SEQ ID NO: 17480 - protein, 4 aa, synthetic construct
PRGG

SEQ ID NO: 17481 - skipped

SEQ ID NO: 17482 - protein, 7 aa, synthetic construct
HFRWGGT

SEQ ID NO: 17483 - skipped

SEQ ID NO: 17484 - protein, 4 aa, synthetic construct
RLKT

SEQ ID NO: 17485 - protein, 6 aa, synthetic construct
AYLHNS

SEQ ID NO: 17486 - protein, 6 aa, synthetic construct
SSYDLF

SEQ ID NO: 17487 - protein, 6 aa, synthetic construct
AYIIIR

SEQ ID NO: 17488 - skipped

SEQ ID NO: 17489 - protein, 5 aa, synthetic construct
TFLLL

SEQ ID NO: 17490 - protein, 4 aa, synthetic construct
AYFS

SEQ ID NO: 17491 - protein, 6 aa, synthetic construct
AYFFLW

SEQ ID NO: 17492 - protein, 6 aa, synthetic construct
TFRWLG

SEQ ID NO: 17493 - protein, 7 aa, synthetic construct
AVWRITP

SEQ ID NO: 17494 - protein, 7 aa, synthetic construct
TFTPIAG

SEQ ID NO: 17495 - protein, 6 aa, synthetic construct
AVWGGT

SEQ ID NO: 17496 - protein, 7 aa, synthetic construct
AVVVLGV

SEQ ID NO: 17497 - protein, 6 aa, synthetic construct
TIRSSY

SEQ ID NO: 17498 - protein, 6 aa, synthetic construct
AVTRIP

SEQ ID NO: 17499 - protein, 5 aa, synthetic construct
TPDTQ

SEQ ID NO: 17500 - skipped

SEQ ID NO: 17501 - protein, 6 aa, synthetic construct
AVSLWW

SEQ ID NO: 17502 - skipped

SEQ ID NO: 17503 - protein, 7 aa, synthetic construct
AVSGRTP

SEQ ID NO: 17504 - protein, 4 aa, synthetic construct
SSGN

SEQ ID NO: 17505 - protein, 4 aa, synthetic construct
SSGG

SEQ ID NO: 17506 - protein, 5 aa, synthetic construct
AYLLL

SEQ ID NO: 17507 - protein, 5 aa, synthetic construct
SARLI

SEQ ID NO: 17508 - skipped

SEQ ID NO: 17509 - protein, 5 aa, synthetic construct
AYYYL

SEQ ID NO: 17510 - protein, 5 aa, synthetic construct
AYYFQ

SEQ ID NO: 17511 - protein, 6 aa, synthetic construct
AYTPRA

SEQ ID NO: 17512 - skipped

SEQ ID NO: 17513 - protein, 6 aa, synthetic construct
PLKSSK

SEQ ID NO: 17514 - protein, 5 aa, synthetic construct
AYRWR

SEQ ID NO: 17515 - protein, 4 aa, synthetic construct
RSSP

SEQ ID NO: 17516 - protein, 7 aa, synthetic construct
AYRWGVT

SEQ ID NO: 17517 - protein, 7 aa, synthetic construct
AYLWGGT

SEQ ID NO: 17518 - protein, 6 aa, synthetic construct
SFLFLR

SEQ ID NO: 17519 - protein, 7 aa, synthetic construct
SFRFGGT

SEQ ID NO: 17520 - protein, 6 aa, synthetic construct
AYRWGG

SEQ ID NO: 17521 - protein, 6 aa, synthetic construct
SFSLWG

SEQ ID NO: 17522 - protein, 7 aa, synthetic construct
AYRCGGT

SEQ ID NO: 17523 - protein, 6 aa, synthetic construct
SFSVWG

SEQ ID NO: 17524 - protein, 7 aa, synthetic construct
AYPWGGT

SEQ ID NO: 17525 - protein, 6 aa, synthetic construct
AYLWLG

SEQ ID NO: 17526 - protein, 7 aa, synthetic construct
AYTDKAG

SEQ ID NO: 17527 - protein, 7 aa, synthetic construct
PLCGRTP

SEQ ID NO: 17528 - protein, 7 aa, synthetic construct
PLGEFTD

SEQ ID NO: 17529 - protein, 4 aa, synthetic construct
GIGH

SEQ ID NO: 17530 - protein, 5 aa, synthetic construct
GRAHG

SEQ ID NO: 17531 - skipped

SEQ ID NO: 17532 - protein, 5 aa, synthetic construct
PFFSW

SEQ ID NO: 17533 - protein, 4 aa, synthetic construct
GLLV

SEQ ID NO: 17534 - protein, 4 aa, synthetic construct
GLLL

SEQ ID NO: 17535 - skipped

SEQ ID NO: 17536 - protein, 4 aa, synthetic construct
PFFW

SEQ ID NO: 17537 - protein, 4 aa, synthetic construct
PFGG

SEQ ID NO: 17538 - protein, 6 aa, synthetic construct
GISRWG

SEQ ID NO: 17539 - protein, 4 aa, synthetic construct
GGWG

SEQ ID NO: 17540 - protein, 5 aa, synthetic construct
GFRWG

SEQ ID NO: 17541 - protein, 6 aa, synthetic construct
GGGGLG

SEQ ID NO: 17542 - protein, 5 aa, synthetic construct
PFLLL

SEQ ID NO: 17543 - protein, 4 aa, synthetic construct
GFWF

SEQ ID NO: 17544 - skipped

SEQ ID NO: 17545 - protein, 6 aa, synthetic construct
PFLVLG

SEQ ID NO: 17546 - protein, 4 aa, synthetic construct
PFLW

SEQ ID NO: 17547 - protein, 5 aa, synthetic construct
GFTRI

SEQ ID NO: 17548 - protein, 5 aa, synthetic construct
GFTPV

SEQ ID NO: 17549 - protein, 6 aa, synthetic construct
PFNGGV

SEQ ID NO: 17550 - protein, 5 aa, synthetic construct
PFFFQ

SEQ ID NO: 17551-17552 - skipped (2 entries)

SEQ ID NO: 17553 - protein, 6 aa, synthetic construct
PFAGGV

SEQ ID NO: 17554 - protein, 5 aa, synthetic construct
AVRWR

SEQ ID NO: 17555 - protein, 6 aa, synthetic construct
HLSGIT

SEQ ID NO: 17556 - protein, 7 aa, synthetic construct
GYRGGGT

SEQ ID NO: 17557 - protein, 7 aa, synthetic construct
HLWGRTP

SEQ ID NO: 17558-17559 - skipped (2 entries)

SEQ ID NO: 17560 - protein, 5 aa, synthetic construct
GVTGL

SEQ ID NO: 17561 - protein, 4 aa, synthetic construct
IGLA

SEQ ID NO: 17562 - protein, 5 aa, synthetic construct
KLLNS

SEQ ID NO: 17563 - skipped

SEQ ID NO: 17564 - protein, 7 aa, synthetic construct
GVRRLGV

SEQ ID NO: 17565 - protein, 6 aa, synthetic construct
LGGYTD

SEQ ID NO: 17566 - protein, 5 aa, synthetic construct
LHSPI

SEQ ID NO: 17567 - protein, 7 aa, synthetic construct
LSSPGGY

SEQ ID NO: 17568 - skipped

SEQ ID NO: 17569 - protein, 4 aa, synthetic construct
GVFC

SEQ ID NO: 17570 - protein, 4 aa, synthetic construct
PAGG

SEQ ID NO: 17571 - skipped

SEQ ID NO: 17572 - protein, 6 aa, synthetic construct
GVCWLG

SEQ ID NO: 17573 - protein, 4 aa, synthetic construct
PFRA

SEQ ID NO: 17574 - protein, 6 aa, synthetic construct
PFRCGG

SEQ ID NO: 17575 - protein, 6 aa, synthetic construct
PLDGGV

SEQ ID NO: 17576 - protein, 4 aa, synthetic construct
DRWG

SEQ ID NO: 17577 - skipped

SEQ ID NO: 17578 - protein, 6 aa, synthetic construct
PFSLRR

SEQ ID NO: 17579 - skipped

SEQ ID NO: 17580 - protein, 5 aa, synthetic construct
PFSLW

SEQ ID NO: 17581 - skipped

SEQ ID NO: 17582 - protein, 7 aa, synthetic construct
DYYLVGR

SEQ ID NO: 17583 - protein, 7 aa, synthetic construct
DYRWGGT

SEQ ID NO: 17584 - protein, 6 aa, synthetic construct
PFSLWG

SEQ ID NO: 17585 - protein, 4 aa, synthetic construct
DSGG

SEQ ID NO: 17586 - protein, 6 aa, synthetic construct
PFSRWG

SEQ ID NO: 17587 - protein, 7 aa, synthetic construct
GFRGVGV

SEQ ID NO: 17588 - protein, 6 aa, synthetic construct
PFTPIA

SEQ ID NO: 17589 - protein, 4 aa, synthetic construct
PFYG

SEQ ID NO: 17590 - protein, 7 aa, synthetic construct
PHRGRKP

SEQ ID NO: 17591 - protein, 4 aa, synthetic construct
DLSG

SEQ ID NO: 17592 - protein, 4 aa, synthetic construct
PHWG

SEQ ID NO: 17593 - protein, 6 aa, synthetic construct
PIDGGV

SEQ ID NO: 17594 - protein, 4 aa, synthetic construct
HGAL

SEQ ID NO: 17595 - protein, 6 aa, synthetic construct
DLLILG

SEQ ID NO: 17596 - protein, 7 aa, synthetic construct
DLCGRTP

SEQ ID NO: 17597 - protein, 6 aa, synthetic construct
EFLILG

SEQ ID NO: 17598 - protein, 6 aa, synthetic construct
PFSGWG

SEQ ID NO: 17599 - protein, 5 aa, synthetic construct
EFLLL

SEQ ID NO: 17600 - protein, 7 aa, synthetic construct
PFRWWGT

SEQ ID NO: 17601 - protein, 7 aa, synthetic construct
GFRGGGT

SEQ ID NO: 17602 - protein, 6 aa, synthetic construct
GFRGGG

SEQ ID NO: 17603 - protein, 6 aa, synthetic construct
GFLVLG

SEQ ID NO: 17604 - protein, 6 aa, synthetic construct
GFLRLG

SEQ ID NO: 17605 - protein, 6 aa, synthetic construct
GFLLLE

SEQ ID NO: 17606 - protein, 7 aa, synthetic construct
PFRCGGT

SEQ ID NO: 17607 - protein, 7 aa, synthetic construct
GFLFLRV

SEQ ID NO: 17608 - protein, 6 aa, synthetic construct
GFLFLR

SEQ ID NO: 17609 - protein, 4 aa, synthetic construct
GFFW

SEQ ID NO: 17610 - protein, 6 aa, synthetic construct
PFRCWG

SEQ ID NO: 17611 - protein, 4 aa, synthetic construct
GFCF

SEQ ID NO: 17612 - protein, 6 aa, synthetic construct
GCLVLG

SEQ ID NO: 17613 - protein, 7 aa, synthetic construct
PFRGGGT

SEQ ID NO: 17614 - protein, 7 aa, synthetic construct
PFRSGGT

SEQ ID NO: 17615 - skipped

SEQ ID NO: 17616 - protein, 4 aa, synthetic construct
ELWG

SEQ ID NO: 17617 - protein, 6 aa, synthetic construct
EHTSET

SEQ ID NO: 17618 - protein, 7 aa, synthetic construct
PFRWRGT

SEQ ID NO: 17619 - protein, 7 aa, synthetic construct
EFRWGGT

SEQ ID NO: 17620 - skipped

SEQ ID NO: 17621 - protein, 5 aa, synthetic construct
ALLYK

SEQ ID NO: 17622 - protein, 6 aa, synthetic construct
AVRWGV

SEQ ID NO: 17623 - protein, 6 aa, synthetic construct
AFLVLR

SEQ ID NO: 17624 - protein, 5 aa, synthetic construct
AFPPI

SEQ ID NO: 17625 - protein, 6 aa, synthetic construct
AFPLWW

SEQ ID NO: 17626 - protein, 6 aa, synthetic construct
AFPLWG

SEQ ID NO: 17627 - protein, 5 aa, synthetic construct
AFPGR

SEQ ID NO: 17628 - protein, 5 aa, synthetic construct
AFNLL

SEQ ID NO: 17629 - protein, 4 aa, synthetic construct
AFNL

SEQ ID NO: 17630 - protein, 7 aa, synthetic construct
AFMLRGV

SEQ ID NO: 17631 - protein, 5 aa, synthetic construct
AFLYL

SEQ ID NO: 17632 - protein, 6 aa, synthetic construct
AFLWLG

SEQ ID NO: 17633 - protein, 7 aa, synthetic construct
AFLWGGV

SEQ ID NO: 17634 - protein, 7 aa, synthetic construct
AFLVVGV

SEQ ID NO: 17635 - protein, 6 aa, synthetic construct
AFLVVG

SEQ ID NO: 17636 - protein, 5 aa, synthetic construct
AFLVL

SEQ ID NO: 17637 - protein, 5 aa, synthetic construct
AFQVE

SEQ ID NO: 17638 - protein, 6 aa, synthetic construct
AFLSWG

SEQ ID NO: 17639 - protein, 6 aa, synthetic construct
AFLSLG

SEQ ID NO: 17640 - protein, 7 aa, synthetic construct
AFLSGGT

SEQ ID NO: 17641 - protein, 6 aa, synthetic construct
AFLRWG

SEQ ID NO: 17642 - protein, 7 aa, synthetic construct
AFLPLGV

SEQ ID NO: 17643 - protein, 7 aa, synthetic construct
AFLMLGV

SEQ ID NO: 17644 - protein, 6 aa, synthetic construct
AFLMLG

SEQ ID NO: 17645 - protein, 7 aa, synthetic construct
AFLLQWL

SEQ ID NO: 17646 - protein, 7 aa, synthetic construct
AFLLMGL

SEQ ID NO: 17647 - protein, 6 aa, synthetic construct
AFLLMG

SEQ ID NO: 17648 - protein, 7 aa, synthetic construct
AFLLGGV

SEQ ID NO: 17649 - protein, 7 aa, synthetic construct
AFLLGGT

SEQ ID NO: 17650 - protein, 7 aa, synthetic construct
AFPWWGT

SEQ ID NO: 17651 - protein, 7 aa, synthetic construct
AFRCGGY

SEQ ID NO: 17652 - protein, 7 aa, synthetic construct
AFTLMGL

SEQ ID NO: 17653 - protein, 6 aa, synthetic construct
AFSFLR

SEQ ID NO: 17654 - protein, 6 aa, synthetic construct
AFSPLA

SEQ ID NO: 17655 - protein, 5 aa, synthetic construct
AFSPI

SEQ ID NO: 17656 - protein, 7 aa, synthetic construct
AFSLWWL

SEQ ID NO: 17657 - protein, 7 aa, synthetic construct
AFSLLLG

SEQ ID NO: 17658 - protein, 7 aa, synthetic construct
AFSLLGL

SEQ ID NO: 17659 - protein, 5 aa, synthetic construct
AFSLL

SEQ ID NO: 17660 - protein, 4 aa, synthetic construct
AFSL

SEQ ID NO: 17661 - protein, 4 aa, synthetic construct
AFSI

SEQ ID NO: 17662 - protein, 6 aa, synthetic construct
AFSHWG

SEQ ID NO: 17663 - protein, 5 aa, synthetic construct
AFSGS

SEQ ID NO: 17664 - protein, 6 aa, synthetic construct
AFSFWG

SEQ ID NO: 17665 - protein, 5 aa, synthetic construct
AFSFQ

SEQ ID NO: 17666 - protein, 6 aa, synthetic construct
AFSCWG

SEQ ID NO: 17667 - protein, 6 aa, synthetic construct
AFREGV

SEQ ID NO: 17668 - protein, 7 aa, synthetic construct
AFRWRVT

SEQ ID NO: 17669 - protein, 6 aa, synthetic construct
AFRWGL

SEQ ID NO: 17670 - protein, 7 aa, synthetic construct
AFRWGGH

SEQ ID NO: 17671 - protein, 7 aa, synthetic construct
AFRRWGT

SEQ ID NO: 17672 - protein, 6 aa, synthetic construct
AFRPLA

SEQ ID NO: 17673 - protein, 7 aa, synthetic construct
AFRLWGT

SEQ ID NO: 17674 - protein, 7 aa, synthetic construct
AFRLRGV

SEQ ID NO: 17675 - protein, 6 aa, synthetic construct
AFRLLG

SEQ ID NO: 17676 - protein, 7 aa, synthetic construct
AFRGWGT

SEQ ID NO: 17677 - protein, 7 aa, synthetic construct
AFRGRGT

SEQ ID NO: 17678 - protein, 7 aa, synthetic construct
AFRGGVT

SEQ ID NO: 17679 - protein, 7 aa, synthetic construct
AFRGGEP

SEQ ID NO: 17680 - protein, 7 aa, synthetic construct
AFLIMGV

SEQ ID NO: 17681 - protein, 6 aa, synthetic construct
AFLILV

SEQ ID NO: 17682 - protein, 5 aa, synthetic construct
AFLIL

SEQ ID NO: 17683 - protein, 7 aa, synthetic construct
ACTPIAG

SEQ ID NO: 17684 - protein, 6 aa, synthetic construct
AFELLG

SEQ ID NO: 17685 - protein, 5 aa, synthetic construct
AFCYL

SEQ ID NO: 17686 - protein, 6 aa, synthetic construct
AFCVLR

SEQ ID NO: 17687 - protein, 7 aa, synthetic construct
ADRTRTR

SEQ ID NO: 17688 - protein, 7 aa, synthetic construct
ADLLLGV

SEQ ID NO: 17689 - protein, 5 aa, synthetic construct
ADLLL

SEQ ID NO: 17690 - protein, 6 aa, synthetic construct
ACYVLR

SEQ ID NO: 17691 - protein, 4 aa, synthetic construct
ACWF

SEQ ID NO: 17692 - protein, 5 aa, synthetic construct
ACTRR

SEQ ID NO: 17693 - protein, 6 aa, synthetic construct
ACTRMA

SEQ ID NO: 17694 - protein, 5 aa, synthetic construct
ACTRL

SEQ ID NO: 17695 - protein, 5 aa, synthetic construct
ACTRI

SEQ ID NO: 17696 - protein, 5 aa, synthetic construct
ACTPI

SEQ ID NO: 17697 - protein, 6 aa, synthetic construct
AFLHLG

SEQ ID NO: 17698 - protein, 7 aa, synthetic construct
ACRWWGT

SEQ ID NO: 17699 - protein, 7 aa, synthetic construct
ACRVGGV

SEQ ID NO: 17700 - protein, 5 aa, synthetic construct
ACRGR

SEQ ID NO: 17701 - protein, 4 aa, synthetic construct
ACRG

SEQ ID NO: 17702 - protein, 6 aa, synthetic construct
ACLVLG

SEQ ID NO: 17703 - protein, 4 aa, synthetic construct
ACLV

SEQ ID NO: 17704 - protein, 7 aa, synthetic construct
ACLLVGV

SEQ ID NO: 17705 - protein, 6 aa, synthetic construct
ACLLLG

SEQ ID NO: 17706 - protein, 6 aa, synthetic construct
ACLGLG

SEQ ID NO: 17707 - protein, 4 aa, synthetic construct
ACFS

SEQ ID NO: 17708 - protein, 6 aa, synthetic construct
ACFFLW

SEQ ID NO: 17709 - protein, 4 aa, synthetic construct
ACFF

SEQ ID NO: 17710 - protein, 4 aa, synthetic construct
AFFC

SEQ ID NO: 17711 - protein, 6 aa, synthetic construct
AFFFIR

SEQ ID NO: 17712 - protein, 5 aa, synthetic construct
AFFFK

SEQ ID NO: 17713 - protein, 6 aa, synthetic construct
AFFFLG

SEQ ID NO: 17714 - protein, 6 aa, synthetic construct
AFLGWG

SEQ ID NO: 17715 - protein, 7 aa, synthetic construct
AFLGGGT

SEQ ID NO: 17716 - protein, 6 aa, synthetic construct
AFLGGG

SEQ ID NO: 17717 - protein, 6 aa, synthetic construct
AFLELG

SEQ ID NO: 17718 - protein, 6 aa, synthetic construct
AFLCGV

SEQ ID NO: 17719 - protein, 7 aa, synthetic construct
AFLCGGT

SEQ ID NO: 17720 - skipped

SEQ ID NO: 17721 - protein, 5 aa, synthetic construct
AFKPI

SEQ ID NO: 17722 - protein, 5 aa, synthetic construct
AFILL

SEQ ID NO: 17723 - protein, 5 aa, synthetic construct
AFIIM

SEQ ID NO: 17724 - protein, 4 aa, synthetic construct
AFIH

SEQ ID NO: 17725 - protein, 6 aa, synthetic construct
AFGWGG

SEQ ID NO: 17726 - protein, 5 aa, synthetic construct
AFGWG

SEQ ID NO: 17727 - protein, 5 aa, synthetic construct
AFGGT

SEQ ID NO: 17728 - protein, 6 aa, synthetic construct
AFFSYI

SEQ ID NO: 17729 - protein, 5 aa, synthetic construct
AFFSW

SEQ ID NO: 17730 - protein, 6 aa, synthetic construct
AFFRWG

SEQ ID NO: 17731 - protein, 6 aa, synthetic construct
AFFLWG

SEQ ID NO: 17732 - protein, 6 aa, synthetic construct
AFFLRR

SEQ ID NO: 17733 - protein, 6 aa, synthetic construct
AFFLLG

SEQ ID NO: 17734 - protein, 5 aa, synthetic construct
AFFLL

SEQ ID NO: 17735 - protein, 6 aa, synthetic construct
AFFILG

SEQ ID NO: 17736 - protein, 7 aa, synthetic construct
AFFFVLG

SEQ ID NO: 17737 - protein, 7 aa, synthetic construct
AFFFLWG

SEQ ID NO: 17738 - protein, 7 aa, synthetic construct
AFFFLLW

SEQ ID NO: 17739 - protein, 6 aa, synthetic construct
AFSTPG

SEQ ID NO: 17740 - protein, 6 aa, synthetic construct
AFTLPP

SEQ ID NO: 17741 - protein, 5 aa, synthetic construct
AVRWG

SEQ ID NO: 17742 - protein, 6 aa, synthetic construct
ALRWGG

SEQ ID NO: 17743 - protein, 7 aa, synthetic construct
ALWGRTA

SEQ ID NO: 17744 - protein, 6 aa, synthetic construct
ALWGRR

SEQ ID NO: 17745 - protein, 6 aa, synthetic construct
ALWGRK

SEQ ID NO: 17746 - protein, 4 aa, synthetic construct
ALTR

SEQ ID NO: 17747 - protein, 6 aa, synthetic construct
ALTPIP

SEQ ID NO: 17748 - protein, 6 aa, synthetic construct
ALSSWG

SEQ ID NO: 17749 - protein, 7 aa, synthetic construct
ALSRRTP

SEQ ID NO: 17750 - protein, 5 aa, synthetic construct
ALSGS

SEQ ID NO: 17751 - protein, 4 aa, synthetic construct
ALSG

SEQ ID NO: 17752 - protein, 7 aa, synthetic construct
ALRWRVT

SEQ ID NO: 17753 - protein, 7 aa, synthetic construct
ALRWGVT

SEQ ID NO: 17754 - protein, 6 aa, synthetic construct
ALRWGV

SEQ ID NO: 17755 - protein, 7 aa, synthetic construct
ALRSGGT

SEQ ID NO: 17756 - protein, 6 aa, synthetic construct
APQSWY

SEQ ID NO: 17757 - protein, 7 aa, synthetic construct
ALRLWGT

SEQ ID NO: 17758 - protein, 6 aa, synthetic construct
ALRGSK

SEQ ID NO: 17759 - protein, 7 aa, synthetic construct
ALRGRTP

SEQ ID NO: 17760 - protein, 7 aa, synthetic construct
ALRCGGT

SEQ ID NO: 17761 - protein, 6 aa, synthetic construct
ALRCGG

SEQ ID NO: 17762 - protein, 7 aa, synthetic construct
ALPWGGT

SEQ ID NO: 17763 - protein, 7 aa, synthetic construct
ALLWGGT

SEQ ID NO: 17764 - protein, 5 aa, synthetic construct
ALLLI

SEQ ID NO: 17765 - protein, 6 aa, synthetic construct
ALLIMG

SEQ ID NO: 17766 - protein, 7 aa, synthetic construct
ALLILGV

SEQ ID NO: 17767 - protein, 5 aa, synthetic construct
ALLGV

SEQ ID NO: 17768 - protein, 6 aa, synthetic construct
ALLGLG

SEQ ID NO: 17769 - protein, 7 aa, synthetic construct
ALWGWTP

SEQ ID NO: 17770 - protein, 7 aa, synthetic construct
APRWGGT

SEQ ID NO: 17771 - protein, 6 aa, synthetic construct
AFTLWG

SEQ ID NO: 17772 - protein, 6 aa, synthetic construct
ATSLWG

SEQ ID NO: 17773 - protein, 5 aa, synthetic construct
AVRRI

SEQ ID NO: 17774 - protein, 7 aa, synthetic construct
AVRGRGT

SEQ ID NO: 17775 - protein, 5 aa, synthetic construct
AVRGR

SEQ ID NO: 17776 - protein, 7 aa, synthetic construct
AVLWGGT

SEQ ID NO: 17777 - protein, 6 aa, synthetic construct
AVLLLG

SEQ ID NO: 17778 - protein, 7 aa, synthetic construct
AVLGGGT

SEQ ID NO: 17779 - protein, 5 aa, synthetic construct
AVIYL

SEQ ID NO: 17780 - skipped

SEQ ID NO: 17781 - protein, 5 aa, synthetic construct
AVGWG

SEQ ID NO: 17782 - protein, 4 aa, synthetic construct
AVFF

SEQ ID NO: 17783 - protein, 4 aa, synthetic construct
AVCF

SEQ ID NO: 17784 - protein, 7 aa, synthetic construct
ATWPSPW

SEQ ID NO: 17785 - protein, 6 aa, synthetic construct
ASTPLA

SEQ ID NO: 17786 - skipped

SEQ ID NO: 17787 - protein, 5 aa, synthetic construct
ASSLW

SEQ ID NO: 17788 - protein, 5 aa, synthetic construct
ASRWG

SEQ ID NO: 17789 - protein, 6 aa, synthetic construct
ASRGGV

SEQ ID NO: 17790 - protein, 5 aa, synthetic construct
ASQYW

SEQ ID NO: 17791 - protein, 5 aa, synthetic construct
ASQSY

SEQ ID NO: 17792 - protein, 4 aa, synthetic construct
ASQS

SEQ ID NO: 17793 - protein, 6 aa, synthetic construct
ASLLLG

SEQ ID NO: 17794 - protein, 4 aa, synthetic construct
ASLL

SEQ ID NO: 17795 - protein, 4 aa, synthetic construct
ASHS

SEQ ID NO: 17796 - skipped

SEQ ID NO: 17797 - protein, 6 aa, synthetic construct
AQWGLS

SEQ ID NO: 17798 - protein, 4 aa, synthetic construct
AQWG

SEQ ID NO: 17799 - protein, 5 aa, synthetic construct
ALGGT

SEQ ID NO: 17800 - protein, 5 aa, synthetic construct
ALGGS

SEQ ID NO: 17801 - protein, 5 aa, synthetic construct
ALGGR

SEQ ID NO: 17802 - protein, 7 aa, synthetic construct
AFVLVGV

SEQ ID NO: 17803 - protein, 4 aa, synthetic construct
AFYY

SEQ ID NO: 17804 - protein, 6 aa, synthetic construct
AFYLWG

SEQ ID NO: 17805 - protein, 5 aa, synthetic construct
AFYLL

SEQ ID NO: 17806 - protein, 7 aa, synthetic construct
AFYFLRV

SEQ ID NO: 17807 - protein, 6 aa, synthetic construct
AFYFLR

SEQ ID NO: 17808 - protein, 7 aa, synthetic construct
AFYFLLG

SEQ ID NO: 17809 - protein, 6 aa, synthetic construct
AFYFKL

SEQ ID NO: 17810 - protein, 4 aa, synthetic construct
AFYF

SEQ ID NO: 17811 - protein, 4 aa, synthetic construct
AFYC

SEQ ID NO: 17812 - protein, 7 aa, synthetic construct
AFWILPG

SEQ ID NO: 17813 - protein, 6 aa, synthetic construct
AFWGGT

SEQ ID NO: 17814 - protein, 7 aa, synthetic construct
AFVVLGV

SEQ ID NO: 17815 - protein, 7 aa, synthetic construct
AFVLLGV

SEQ ID NO: 17816 - protein, 6 aa, synthetic construct
ALGDTP

SEQ ID NO: 17817 - protein, 7 aa, synthetic construct
AFTWGGT

SEQ ID NO: 17818 - protein, 6 aa, synthetic construct
AFTTLA

SEQ ID NO: 17819 - protein, 7 aa, synthetic construct
AFTRWGL

SEQ ID NO: 17820 - protein, 6 aa, synthetic construct
AFTRWG

SEQ ID NO: 17821 - protein, 6 aa, synthetic construct
AFTRVD

SEQ ID NO: 17822 - protein, 6 aa, synthetic construct
AFTRTA

SEQ ID NO: 17823 - protein, 5 aa, synthetic construct
AFTRL

SEQ ID NO: 17824 - protein, 5 aa, synthetic construct
AFTQL

SEQ ID NO: 17825 - protein, 6 aa, synthetic construct
AFTPNA

SEQ ID NO: 17826 - protein, 6 aa, synthetic construct
AFTPLS

SEQ ID NO: 17827 - protein, 7 aa, synthetic construct
AFTPLPG

SEQ ID NO: 17828 - protein, 7 aa, synthetic construct
AFTPINS

SEQ ID NO: 17829 - protein, 5 aa, synthetic construct
AFYYI

SEQ ID NO: 17830 - protein, 5 aa, synthetic construct
AFYYK

SEQ ID NO: 17831 - protein, 5 aa, synthetic construct
AFYYQ

SEQ ID NO: 17832-17833 - skipped (2 entries)

SEQ ID NO: 17834 - protein, 4 aa, synthetic construct
ALFF

SEQ ID NO: 17835 - protein, 4 aa, synthetic construct
ALFC

SEQ ID NO: 17836 - protein, 7 aa, synthetic construct
ALERSTH

SEQ ID NO: 17837 - protein, 5 aa, synthetic construct
ALEDT

SEQ ID NO: 17838 - protein, 5 aa, synthetic construct
ALCGI

SEQ ID NO: 17839 - protein, 5 aa, synthetic construct
ALCGA

SEQ ID NO: 17840 - skipped

SEQ ID NO: 17841 - protein, 7 aa, synthetic construct
AIWVRTP

SEQ ID NO: 17842 - protein, 7 aa, synthetic construct
AITPIAG

SEQ ID NO: 17843 - protein, 4 aa, synthetic construct
AISG

SEQ ID NO: 17844 - protein, 6 aa, synthetic construct
AIRGGG

SEQ ID NO: 17845 - protein, 6 aa, synthetic construct
AILLLG

SEQ ID NO: 17846 - protein, 5 aa, synthetic construct
AIFYL

SEQ ID NO: 17847 - protein, 4 aa, synthetic construct
AHWG

SEQ ID NO: 17848 - protein, 4 aa, synthetic construct
AHWE

SEQ ID NO: 17849 - protein, 4 aa, synthetic construct
AHSG

SEQ ID NO: 17850 - protein, 4 aa, synthetic construct
AGWG

SEQ ID NO: 17851 - protein, 6 aa, synthetic construct
AGTPLA

SEQ ID NO: 17852 - protein, 6 aa, synthetic construct
AGSLWG

SEQ ID NO: 17853 - protein, 6 aa, synthetic construct
AGRGGG

SEQ ID NO: 17854 - protein, 4 aa, synthetic construct
AGRG

SEQ ID NO: 17855 - protein, 5 aa, synthetic construct
AGLLL

SEQ ID NO: 17856 - protein, 6 aa, synthetic construct
AGFVLR

SEQ ID NO: 17857 - skipped

SEQ ID NO: 17858 - protein, 6 aa, synthetic construct
YFSLFW

SEQ ID NO: 17859 - protein, 11 aa, synthetic construct
AASRGDTDKLI

SEQ ID NO: 17860 - protein, 11 aa, synthetic construct
AASPGGSDKLI

SEQ ID NO: 17861 - protein, 10 aa, synthetic construct
AASTYTDKLI

SEQ ID NO: 17862 - protein, 15 aa, synthetic construct
AARGGGYGYWGLHTD

SEQ ID NO: 17863 - protein, 16 aa, synthetic construct
AASMRWGIRSWDTRQM

SEQ ID NO: 17864 - protein, 11 aa, synthetic construct
AASPGGSDKPI

SEQ ID NO: 17865 - protein, 11 aa, synthetic construct
AASRGDTEKLI

SEQ ID NO: 17866 - protein, 11 aa, synthetic construct
AASPGGSEKLI

SEQ ID NO: 17867 - protein, 14 aa, synthetic construct
AARGGGYGYWGLHT

SEQ ID NO: 17868 - protein, 15 aa, synthetic construct
AARGGGYGSWGLHTD

SEQ ID NO: 17869 - protein, 16 aa, synthetic construct
AARGGATATGDSTPIN

SEQ ID NO: 17870 - protein, 15 aa, synthetic construct
AARGGGLRLLGTPHR

SEQ ID NO: 17871 - protein, 10 aa, synthetic construct
AARTYTDKLI

SEQ ID NO: 17872 - protein, 11 aa, synthetic construct
AARGGGYGYWG

SEQ ID NO: 17873 - protein, 11 aa, synthetic construct
EASPGGSDKLI

SEQ ID NO: 17874 - protein, 11 aa, synthetic construct
AASRGDTDQLI

SEQ ID NO: 17875 - protein, 11 aa, synthetic construct
AARRGDTDKLI

SEQ ID NO: 17876 - protein, 11 aa, synthetic construct
AASPGGSDQLI

SEQ ID NO: 17877 - protein, 11 aa, synthetic construct
AARPGGSDKLI

SEQ ID NO: 17878 - protein, 11 aa, synthetic construct
AASPGGSAKLI

SEQ ID NO: 17879 - protein, 10 aa, synthetic construct
AASTYTDKII

SEQ ID NO: 17880 - protein, 11 aa, synthetic construct
AASRGDTDNLI

SEQ ID NO: 17881 - protein, 11 aa, synthetic construct
QQAEGTPINSS

SEQ ID NO: 17882 - protein, 11 aa, synthetic construct
AASRGDTAKLI

SEQ ID NO: 17883 - protein, 11 aa, synthetic construct
AASRGDTDKLN

SEQ ID NO: 17884 - protein, 10 aa, synthetic construct
AASTYTEKLI

SEQ ID NO: 17885 - protein, 15 aa, synthetic construct
AARGGGSGYWGLHTD

SEQ ID NO: 17886 - protein, 11 aa, synthetic construct
EASRGDTDKLI

SEQ ID NO: 17887 - protein, 10 aa, synthetic construct
AASTYTDKLN

SEQ ID NO: 17888 - protein, 10 aa, synthetic construct
AASTYTDQLI

SEQ ID NO: 17889 - protein, 10 aa, synthetic construct
EASTYTDKLI

SEQ ID NO: 17890 - protein, 11 aa, synthetic construct
AASPGGSDKLN

SEQ ID NO: 17891 - protein, 16 aa, synthetic construct
AASRRWGIRSWDTRQM

SEQ ID NO: 17892 - protein, 11 aa, synthetic construct
QQALGDPINSS

SEQ ID NO: 17893 - protein, 15 aa, synthetic construct
EARGGGYGYWGLHTD

SEQ ID NO: 17894 - protein, 15 aa, synthetic construct
AASMRWGIRSWDTRQ

SEQ ID NO: 17895 - protein, 10 aa, synthetic construct
QQVLIPINSS

SEQ ID NO: 17896 - protein, 10 aa, synthetic construct
AASTNTDKLI

SEQ ID NO: 17897 - protein, 16 aa, synthetic construct
AASMGWGIRSWDTRQM

SEQ ID NO: 17898 - protein, 15 aa, synthetic construct
AARGGGYGYWGLNTD

SEQ ID NO: 17899 - protein, 10 aa, synthetic construct
AASTYTDNLI

SEQ ID NO: 17900 - protein, 14 aa, synthetic construct
AASMRWGIRSWDTR

SEQ ID NO: 17901 - protein, 11 aa, synthetic construct
AASRGDTDKHI

SEQ ID NO: 17902 - protein, 16 aa, synthetic construct
QQEGGATATGDSTPIN

SEQ ID NO: 17903 - protein, 11 aa, synthetic construct
AASPGGSDKHI

SEQ ID NO: 17904 - protein, 11 aa, synthetic construct
AASPGGSDKLF

SEQ ID NO: 17905 - protein, 11 aa, synthetic construct
AASPGGSDNLI

SEQ ID NO: 17906 - protein, 10 aa, synthetic construct
AARGGGYGSW

SEQ ID NO: 17907 - protein, 11 aa, synthetic construct
AASHGGSDKLI

SEQ ID NO: 17908 - protein, 11 aa, synthetic construct
AASRGDADKLI

SEQ ID NO: 17909 - protein, 11 aa, synthetic construct
AASRGDTDKLF

SEQ ID NO: 17910 - protein, 10 aa, synthetic construct
AASPYTDKLI

SEQ ID NO: 17911 - protein, 16 aa, synthetic construct
EASMRWGIRSWDTRQM

SEQ ID NO: 17912 - protein, 11 aa, synthetic construct
AASRGDPDKLI

SEQ ID NO: 17913 - protein, 10 aa, synthetic construct
AASTYTDKHI

SEQ ID NO: 17914 - protein, 16 aa, synthetic construct
AARMRWGIRSWDTRQM

SEQ ID NO: 17915 - protein, 10 aa, synthetic construct
AASTYPDKLI

SEQ ID NO: 17916 - protein, 10 aa, synthetic construct
AASTYTDRLI

SEQ ID NO: 17917 - protein, 11 aa, synthetic construct
AARPGGSEKLI

SEQ ID NO: 17918 - protein, 10 aa, synthetic construct
AASTYTDKLF

SEQ ID NO: 17919 - protein, 15 aa, synthetic construct
AARGGGYGYWGLPTD

SEQ ID NO: 17920 - protein, 16 aa, synthetic construct
AASMRWGIRSWGLHTD

SEQ ID NO: 17921 - protein, 11 aa, synthetic construct
AASPGGSDTLI

SEQ ID NO: 17922 - protein, 11 aa, synthetic construct
AASRGDTDKPI

SEQ ID NO: 17923 - protein, 16 aa, synthetic construct
AASMRWGIRSWDTDKL

SEQ ID NO: 17924 - protein, 16 aa, synthetic construct
AASMRWGRRSWDTRQM

SEQ ID NO: 17925 - protein, 15 aa, synthetic construct
AARGGGYGYRGLHTD

SEQ ID NO: 17926 - protein, 11 aa, synthetic construct
AASGGDTDKLI

SEQ ID NO: 17927 - protein, 16 aa, synthetic construct
AASLRWGIRSWDTRQM

SEQ ID NO: 17928 - protein, 11 aa, synthetic construct
AASPGGADKLI

SEQ ID NO: 17929 - protein, 14 aa, synthetic construct
AASPGGYAPGTPDR

SEQ ID NO: 17930 - protein, 11 aa, synthetic construct
AARRGDTEKLI

SEQ ID NO: 17931 - protein, 11 aa, synthetic construct
AASPRGSDKLI

SEQ ID NO: 17932 - protein, 11 aa, synthetic construct
AASPGGSEKPI

SEQ ID NO: 17933 - protein, 11 aa, synthetic construct
AASPGGPDKLI

SEQ ID NO: 17934 - protein, 11 aa, synthetic construct
AASRGDTDKLT

SEQ ID NO: 17935 - protein, 11 aa, synthetic construct
AAGRGDTDKLI

SEQ ID NO: 17936 - protein, 11 aa, synthetic construct
AASRGGTDKLI

SEQ ID NO: 17937 - protein, 11 aa, synthetic construct
AASRGDTDKLV

SEQ ID NO: 17938 - protein, 11 aa, synthetic construct
AASRGATDKLI

SEQ ID NO: 17939 - protein, 10 aa, synthetic construct
AASTYTDTLI

SEQ ID NO: 17940 - protein, 11 aa, synthetic construct
AASPGGSGKLI

SEQ ID NO: 17941 - protein, 11 aa, synthetic construct
AASPGGSDKLT

SEQ ID NO: 17942 - protein, 11 aa, synthetic construct
AASRGDTDRLI

SEQ ID NO: 17943 - protein, 11 aa, synthetic construct
AASRGDTDTLI

SEQ ID NO: 17944 - protein, 15 aa, synthetic construct
AASGGGYGYWGLHTD

SEQ ID NO: 17945 - protein, 11 aa, synthetic construct
AASPGGSDELI

SEQ ID NO: 17946 - protein, 10 aa, synthetic construct
AVLGDTDKLI

SEQ ID NO: 17947 - protein, 11 aa, synthetic construct
AASPGGSDKLV

SEQ ID NO: 17948 - protein, 15 aa, synthetic construct
AARGGGYGYGGLHTD

SEQ ID NO: 17949 - protein, 15 aa, synthetic construct
AAGGGGYGYWGLHTD

SEQ ID NO: 17950 - protein, 10 aa, synthetic construct
AASTYTDKPI

SEQ ID NO: 17951 - protein, 16 aa, synthetic construct
AASMRWGISSWDTRQM

SEQ ID NO: 17952 - protein, 11 aa, synthetic construct
AASPGGSDRLI

SEQ ID NO: 17953 - protein, 11 aa, synthetic construct
AASRGDTVKLI

SEQ ID NO: 17954 - protein, 11 aa, synthetic construct
AASPGDPINSS

SEQ ID NO: 17955 - protein, 10 aa, synthetic construct
AASTYTAKLI

SEQ ID NO: 17956 - protein, 11 aa, synthetic construct
AASRGDTDKRI

SEQ ID NO: 17957 - protein, 16 aa, synthetic construct
AASMRWGIRSWETRQM

SEQ ID NO: 17958 - protein, 10 aa, synthetic construct
AAGTYTDKLI

SEQ ID NO: 17959 - protein, 10 aa, synthetic construct
AASTSTDKLI

SEQ ID NO: 17960 - protein, 11 aa, synthetic construct
AASRGDTGKLI

SEQ ID NO: 17961 - protein, 11 aa, synthetic construct
AASPGGSDKRI

SEQ ID NO: 17962 - protein, 11 aa, synthetic construct
AASRGETDKLI

SEQ ID NO: 17963 - protein, 16 aa, synthetic construct
AASMRWGIRSWDTRPM

SEQ ID NO: 17964 - protein, 15 aa, synthetic construct
AARGGGYGYWGLRTD

SEQ ID NO: 17965 - protein, 16 aa, synthetic construct
AASMRWGVRSWDTRQM

SEQ ID NO: 17966 - protein, 11 aa, synthetic construct
AASPGGSDKII

SEQ ID NO: 17967 - protein, 11 aa, synthetic construct
AASRGDTDNSS

SEQ ID NO: 17968 - protein, 10 aa, synthetic construct
AASTYTDKLT

SEQ ID NO: 17969 - protein, 12 aa, synthetic construct
AASMRWGIRSWD

SEQ ID NO: 17970 - protein, 16 aa, synthetic construct
AASMRWGIRSWDTRRM

SEQ ID NO: 17971 - protein, 11 aa, synthetic construct
AAGPGGSDKLI

SEQ ID NO: 17972 - protein, 11 aa, synthetic construct
AASRGDTDELI

SEQ ID NO: 17973 - protein, 11 aa, synthetic construct
AASPGGSVKLI

SEQ ID NO: 17974 - protein, 15 aa, synthetic construct
AARGGGYGYWGLDTD

SEQ ID NO: 17975 - protein, 11 aa, synthetic construct
AAIPGGSDKLI

SEQ ID NO: 17976 - protein, 11 aa, synthetic construct
AASRGDTDKII

SEQ ID NO: 17977 - protein, 15 aa, synthetic construct
AARGGGYGYWGVHTD

SEQ ID NO: 17978 - protein, 16 aa, synthetic construct
AASMRWGMRSWDTRQM

SEQ ID NO: 17979 - protein, 16 aa, synthetic construct
AASMRWGIRSWATRQM

SEQ ID NO: 17980 - protein, 10 aa, synthetic construct
AASTYTDKLS

SEQ ID NO: 17981 - protein, 10 aa, synthetic construct
AASRGDTRQM

SEQ ID NO: 17982 - protein, 10 aa, synthetic construct
AASTYTYKLI

SEQ ID NO: 17983 - protein, 10 aa, synthetic construct
AASTYNDKLI

SEQ ID NO: 17984 - protein, 11 aa, synthetic construct
AVSPGGSDKLI

SEQ ID NO: 17985 - protein, 15 aa, synthetic construct
AARGGGYGDWGLHTD

SEQ ID NO: 17986 - protein, 10 aa, synthetic construct
AASAYTDKLI

SEQ ID NO: 17987 - protein, 15 aa, synthetic construct
AARGGGYGYWGLHAD

SEQ ID NO: 17988 - protein, 11 aa, synthetic construct
AESPGGSDKLI

SEQ ID NO: 17989 - protein, 16 aa, synthetic construct
AASMRGGIRSWDTRQM

SEQ ID NO: 17990 - protein, 15 aa, synthetic construct
AARGGGYGCWGLHTD

SEQ ID NO: 17991 - protein, 11 aa, synthetic construct
AASRGGSDKLI

SEQ ID NO: 17992 - protein, 11 aa, synthetic construct
AASRGDTDKVI

SEQ ID NO: 17993 - protein, 10 aa, synthetic construct
AASTYADKLI

SEQ ID NO: 17994 - protein, 14 aa, synthetic construct
AARGGGYAPGTPDR

SEQ ID NO: 17995 - protein, 11 aa, synthetic construct
AASRGDTETLI

SEQ ID NO: 17996 - protein, 10 aa, synthetic construct
AARTYTDQLI

SEQ ID NO: 17997 - protein, 15 aa, synthetic construct
AARGGGCGYWGLHTD

SEQ ID NO: 17998 - protein, 11 aa, synthetic construct
AASPGGSETLI

SEQ ID NO: 17999 - protein, 11 aa, synthetic construct
AASPGGSDKVI

SEQ ID NO: 18000 - protein, 16 aa, synthetic construct
AASMSWGIRSWDTRQM

SEQ ID NO: 18001 - protein, 10 aa, synthetic construct
AASTCTDKLI

SEQ ID NO: 18002 - protein, 15 aa, synthetic construct
AARGGGYGYWGPHTD

SEQ ID NO: 18003 - protein, 10 aa, synthetic construct
AASTYTDKRI

SEQ ID NO: 18004 - protein, 16 aa, synthetic construct
AASMRWGIRSWDARQM

SEQ ID NO: 18005 - protein, 16 aa, synthetic construct
AASMRWGIRSWGTRQM

SEQ ID NO: 18006 - protein, 11 aa, synthetic construct
AARGGDTDKLI

SEQ ID NO: 18007 - protein, 16 aa, synthetic construct
AASMRWGIRSRDTRQM

SEQ ID NO: 18008 - protein, 11 aa, synthetic construct
AARRGDTDQLI

SEQ ID NO: 18009 - protein, 15 aa, synthetic construct
AARGGGYGYWGLHTG

SEQ ID NO: 18010 - protein, 11 aa, synthetic construct
AASRRDTDKLI

SEQ ID NO: 18011 - protein, 14 aa, synthetic construct
AARGGGSGYWGLHT

SEQ ID NO: 18012 - protein, 15 aa, synthetic construct
AARRGGYGYWGLHTD

SEQ ID NO: 18013 - protein, 16 aa, synthetic construct
AASVRWGIRSWDTRQM

SEQ ID NO: 18014 - protein, 15 aa, synthetic construct
AARGGGYGYWDTRQM

SEQ ID NO: 18015 - protein, 11 aa, synthetic construct
VASRGDTDKLI

SEQ ID NO: 18016 - protein, 16 aa, synthetic construct
AASMRWGIRSCDTRQM

SEQ ID NO: 18017 - protein, 10 aa, synthetic construct
AASTYTDKLV

SEQ ID NO: 18018 - protein, 10 aa, synthetic construct
AASTHTDKLI

SEQ ID NO: 18019 - protein, 13 aa, synthetic construct
AASMRWGIRSWDT

SEQ ID NO: 18020 - protein, 11 aa, synthetic construct
AASPGRSDKLI

SEQ ID NO: 18021 - protein, 10 aa, synthetic construct
AASTYSDKLI

SEQ ID NO: 18022 - protein, 10 aa, synthetic construct
AASTYTDELI

SEQ ID NO: 18023 - protein, 15 aa, synthetic construct
AASMRWGYAPGTPDR

SEQ ID NO: 18024 - protein, 11 aa, synthetic construct
TASPGGSDKLI

SEQ ID NO: 18025 - protein, 11 aa, synthetic construct
AASRGDPINSS

SEQ ID NO: 18026 - protein, 10 aa, synthetic construct
VASTYTDKLI

SEQ ID NO: 18027 - protein, 11 aa, synthetic construct
VASPGGSDKLI

SEQ ID NO: 18028 - protein, 11 aa, synthetic construct
AASRVDTDKLI

SEQ ID NO: 18029 - protein, 11 aa, synthetic construct
AASPGGSDILI

SEQ ID NO: 18030 - protein, 10 aa, synthetic construct
AASTYTDNSS

SEQ ID NO: 18031 - protein, 10 aa, synthetic construct
AARTYTEKLI

SEQ ID NO: 18032 - protein, 10 aa, synthetic construct
AESTYTDKLI

SEQ ID NO: 18033 - protein, 7 aa, synthetic construct
AASRGDT

SEQ ID NO: 18034 - protein, 10 aa, synthetic construct
AASTYTGKLI

SEQ ID NO: 18035 - protein, 15 aa, synthetic construct
AARGGGYGHWGLHTD

SEQ ID NO: 18036 - protein, 15 aa, synthetic construct
AARGGGYGSGGLHTD

SEQ ID NO: 18037 - protein, 16 aa, synthetic construct
AASMRWGIRSWDPRQM

SEQ ID NO: 18038 - protein, 15 aa, synthetic construct
AARGGATATGDSTPI

SEQ ID NO: 18039 - protein, 11 aa, synthetic construct
AARPGGSDQLI

SEQ ID NO: 18040 - protein, 10 aa, synthetic construct
AAERGPDKLI

SEQ ID NO: 18041 - protein, 10 aa, synthetic construct
ATSTYTDKLI

SEQ ID NO: 18042 - protein, 10 aa, synthetic construct
AAITYTDKLI

SEQ ID NO: 18043 - protein, 11 aa, synthetic construct
AAVLGDTVKLI

SEQ ID NO: 18044 - protein, 15 aa, synthetic construct
AAIGGGYGYWGLHTD

SEQ ID NO: 18045 - protein, 16 aa, synthetic construct
AAGMRWGIRSWDTRQM

SEQ ID NO: 18046 - protein, 16 aa, synthetic construct
AASMRWGIRSWDSRQM

SEQ ID NO: 18047 - protein, 11 aa, synthetic construct
AARGGGSGYWG

SEQ ID NO: 18048 - protein, 16 aa, synthetic construct
AARGGGYGYWDSTPIN

SEQ ID NO: 18049 - protein, 11 aa, synthetic construct
AASPGGSDNSS

SEQ ID NO: 18050 - protein, 11 aa, synthetic construct
AASRGDSDKLI

SEQ ID NO: 18051 - protein, 11 aa, synthetic construct
AASRGDTHKLI

SEQ ID NO: 18052 - protein, 11 aa, synthetic construct
AASTGDTDKLI

SEQ ID NO: 18053 - protein, 11 aa, synthetic construct
AARPGGSDKPI

SEQ ID NO: 18054 - protein, 14 aa, synthetic construct
EARGGGYGYWGLHT

SEQ ID NO: 18055 - protein, 11 aa, synthetic construct
TASRGDTDKLI

SEQ ID NO: 18056 - protein, 15 aa, synthetic construct
AASMCLLGDGPDKLI

SEQ ID NO: 18057 - protein, 16 aa, synthetic construct
AARGGAPATGDSTPIN

SEQ ID NO: 18058 - protein, 11 aa, synthetic construct
AASMRWGIRSW

SEQ ID NO: 18059 - protein, 11 aa, synthetic construct
AASRGNTDKLI

SEQ ID NO: 18060 - protein, 10 aa, synthetic construct
AVSTYTDKLI

SEQ ID NO: 18061 - protein, 11 aa, synthetic construct
AESRGDTDKLI

SEQ ID NO: 18062 - protein, 10 aa, synthetic construct
AASPGGSDKL

SEQ ID NO: 18063 - protein, 6 aa, synthetic construct
AASPGG

SEQ ID NO: 18064 - protein, 10 aa, synthetic construct
AASSYTDKLI

SEQ ID NO: 18065 - protein, 11 aa, synthetic construct
ATSPGGSDKLI

SEQ ID NO: 18066 - protein, 11 aa, synthetic construct
AASPGGSDQPI

SEQ ID NO: 18067 - protein, 11 aa, synthetic construct
AASPGESDKLI

SEQ ID NO: 18068 - protein, 16 aa, synthetic construct
AASPGGGYGYWGLHTD

SEQ ID NO: 18069 - protein, 15 aa, synthetic construct
AARGGGYGSWGLPTD

SEQ ID NO: 18070 - protein, 11 aa, synthetic construct
AASRGHTDKLI

SEQ ID NO: 18071 - protein, 16 aa, synthetic construct
AASMRWGIRPWDTRQM

SEQ ID NO: 18072 - protein, 11 aa, synthetic construct
AASRGDTDKLS

SEQ ID NO: 18073 - protein, 11 aa, synthetic construct
EASPGGSDKPI

SEQ ID NO: 18074 - protein, 11 aa, synthetic construct
AASIGDTDKLI

SEQ ID NO: 18075 - protein, 15 aa, synthetic construct
AARGGGYGYWGHPTD

SEQ ID NO: 18076 - protein, 11 aa, synthetic construct
AANPGGSDKLI

SEQ ID NO: 18077 - protein, 14 aa, synthetic construct
AAPTGGYGYTDKLI

SEQ ID NO: 18078 - protein, 15 aa, synthetic construct
AARGGSYGYWGLHTD

SEQ ID NO: 18079 - protein, 15 aa, synthetic construct
AASRRWGIRSWDTRQ

SEQ ID NO: 18080 - protein, 11 aa, synthetic construct
AVSRGDTDKLI

SEQ ID NO: 18081 - protein, 11 aa, synthetic construct
AASPGGSENLI

SEQ ID NO: 18082 - protein, 11 aa, synthetic construct
AASRGVTDKLI

SEQ ID NO: 18083 - protein, 11 aa, synthetic construct
AASPGASDKLI

SEQ ID NO: 18084 - protein, 9 aa, synthetic construct
AASTYTDKL

SEQ ID NO: 18085 - protein, 16 aa, synthetic construct
AARRRWGIRSWDTRQM

SEQ ID NO: 18086 - protein, 10 aa, synthetic construct
AASTYTDKLY

SEQ ID NO: 18087 - protein, 11 aa, synthetic construct
SASPGGSDKLI

SEQ ID NO: 18088 - protein, 11 aa, synthetic construct
AASPGGSEKRI

SEQ ID NO: 18089 - protein, 16 aa, synthetic construct
AASIRWGIRSWDTRQM

SEQ ID NO: 18090 - protein, 15 aa, synthetic construct
TARGGGYGYWGLHTD

SEQ ID NO: 18091 - protein, 15 aa, synthetic construct
AARGGGYAYWGLHTD

SEQ ID NO: 18092 - protein, 11 aa, synthetic construct
AASPGGSYKLI

SEQ ID NO: 18093 - protein, 16 aa, synthetic construct
AASMRWGIRSWYTRQM

SEQ ID NO: 18094 - protein, 11 aa, synthetic construct
AASRGDTDHLI

SEQ ID NO: 18095 - protein, 11 aa, synthetic construct
AARGGGLRLLG

SEQ ID NO: 18096 - protein, 11 aa, synthetic construct
AASRGDTDILI

SEQ ID NO: 18097 - protein, 15 aa, synthetic construct
AARGGGYSYWGLHTD

SEQ ID NO: 18098 - protein, 16 aa, synthetic construct
AASTRWGIRSWDTRQM

SEQ ID NO: 18099 - protein, 13 aa, synthetic construct
AASVLRWWGIKLI

SEQ ID NO: 18100 - protein, 10 aa, synthetic construct
AASTDTDKLI

SEQ ID NO: 18101 - protein, 11 aa, synthetic construct
AASPGGSEKLN

SEQ ID NO: 18102 - protein, 11 aa, synthetic construct
AAIRGDTDKLI

SEQ ID NO: 18103 - protein, 10 aa, synthetic construct
AASRGDTDKL

SEQ ID NO: 18104 - protein, 11 aa, synthetic construct
AASPGGSAKRI

SEQ ID NO: 18105 - protein, 11 aa, synthetic construct
AARGGDPINSS

SEQ ID NO: 18106 - protein, 11 aa, synthetic construct
ATSRGDTDKLI

SEQ ID NO: 18107 - protein, 11 aa, synthetic construct
AASPEGSDKLI

SEQ ID NO: 18108 - protein, 11 aa, synthetic construct
AASSGGSDKLI

SEQ ID NO: 18109 - protein, 11 aa, synthetic construct
AARGGTPINSS

SEQ ID NO: 18110 - protein, 10 aa, synthetic construct
AACTYTDKLI

SEQ ID NO: 18111 - protein, 11 aa, synthetic construct
AASRGDTENLI

SEQ ID NO: 18112 - protein, 15 aa, synthetic construct
AARGGGYGNWGLHTD

SEQ ID NO: 18113 - protein, 15 aa, synthetic construct
AARGGGYGYWRLHTD

SEQ ID NO: 18114 - protein, 11 aa, synthetic construct
AANRGDTDKLI

SEQ ID NO: 18115 - protein, 15 aa, synthetic construct
AARGGGYGYWGLLTD

SEQ ID NO: 18116 - protein, 11 aa, synthetic construct
AASPVGSDKLI

SEQ ID NO: 18117 - protein, 15 aa, synthetic construct
AARGGGYGYWGLHTN

SEQ ID NO: 18118 - protein, 15 aa, synthetic construct
AARGGGATATGDSTP

SEQ ID NO: 18119 - protein, 10 aa, synthetic construct
AASNYTDKLI

SEQ ID NO: 18120 - protein, 15 aa, synthetic construct
AASRGGLRLLGTPHR

SEQ ID NO: 18121 - protein, 15 aa, synthetic construct
AARGGGYGYWGLQTD

SEQ ID NO: 18122 - protein, 15 aa, synthetic construct
AARGGGYGYSGLHTD

SEQ ID NO: 18123 - protein, 10 aa, synthetic construct
EASTYTDKII

SEQ ID NO: 18124 - protein, 11 aa, synthetic construct
AASRGATEKLI

SEQ ID NO: 18125 - protein, 15 aa, synthetic construct
AERGGGYGYWGLHTD

SEQ ID NO: 18126 - protein, 11 aa, synthetic construct
AASPGGSDKLS

SEQ ID NO: 18127 - protein, 15 aa, synthetic construct
AARGGGYGYWGLHSD

SEQ ID NO: 18128 - protein, 10 aa, synthetic construct
TASTYTDKLI

SEQ ID NO: 18129 - protein, 16 aa, synthetic construct
AASMRRGIRSWDTRQM

SEQ ID NO: 18130 - protein, 15 aa, synthetic construct
AARGRGYGYWGLHTD

SEQ ID NO: 18131 - protein, 11 aa, synthetic construct
AASRGDTNKLI

SEQ ID NO: 18132 - protein, 11 aa, synthetic construct
EASPGGSEKLI

SEQ ID NO: 18133 - protein, 11 aa, synthetic construct
AASSGDTDKLI

SEQ ID NO: 18134 - protein, 11 aa, synthetic construct
AASRGDIDKLI

SEQ ID NO: 18135 - protein, 16 aa, synthetic construct
AASMRWGIRSWDTLQM

SEQ ID NO: 18136 - protein, 10 aa, synthetic construct
AASTYTDILI

SEQ ID NO: 18137 - protein, 10 aa, synthetic construct
SASTYTDKLI

SEQ ID NO: 18138 - protein, 16 aa, synthetic construct
AASMRWGIRSWDTRHM

SEQ ID NO: 18139 - protein, 8 aa, synthetic construct
AASRGDTD

SEQ ID NO: 18140 - protein, 11 aa, synthetic construct
AASRGDTEKRI

SEQ ID NO: 18141 - protein, 10 aa, synthetic construct
AASTYTDKLL

SEQ ID NO: 18142 - protein, 16 aa, synthetic construct
AASMRWGTRSWDTRQM

SEQ ID NO: 18143 - protein, 11 aa, synthetic construct
AASTGGSDKLI

SEQ ID NO: 18144 - protein, 11 aa, synthetic construct
AASRADTDKLI

SEQ ID NO: 18145 - protein, 10 aa, synthetic construct
AASTYTVKLI

SEQ ID NO: 18146 - protein, 11 aa, synthetic construct
AASPGGSDKPN

SEQ ID NO: 18147 - protein, 11 aa, synthetic construct
DASRGDTDKLI

SEQ ID NO: 18148 - protein, 10 aa, synthetic construct
AASTYTDHLI

SEQ ID NO: 18149 - protein, 16 aa, synthetic construct
AESMRWGIRSWDTRQM

SEQ ID NO: 18150 - protein, 15 aa, synthetic construct
AARGGGYGYWGHHTD

SEQ ID NO: 18151 - protein, 16 aa, synthetic construct
ATSMRWGIRSWDTRQM

SEQ ID NO: 18152 - protein, 11 aa, synthetic construct
AASRGDTEKHI

SEQ ID NO: 18153 - protein, 15 aa, synthetic construct
AARGGGSGDWGLHTD

SEQ ID NO: 18154 - protein, 11 aa, synthetic construct
AASLGGSDKLI

SEQ ID NO: 18155 - protein, 16 aa, synthetic construct
AASMRWGIRSWDTPQM

SEQ ID NO: 18156 - protein, 16 aa, synthetic construct
VASMRWGIRSWDTRQM

SEQ ID NO: 18157 - protein, 15 aa, synthetic construct
AARGGGYGYWGLYTD

SEQ ID NO: 18158 - protein, 11 aa, synthetic construct
ASRGLYTDKLI

SEQ ID NO: 18159 - protein, 14 aa, synthetic construct
SKRGGLRLLGTPHR

SEQ ID NO: 18160 - protein, 11 aa, synthetic construct
AARGGGYGDWG

SEQ ID NO: 18161 - protein, 11 aa, synthetic construct
AASRGDTAQLI

SEQ ID NO: 18162 - protein, 11 aa, synthetic construct
AASRGDTAKRI

SEQ ID NO: 18163 - protein, 11 aa, synthetic construct
AASKGDTDKLI

SEQ ID NO: 18164 - protein, 11 aa, synthetic construct
AASRGYTDKLI

SEQ ID NO: 18165 - protein, 15 aa, synthetic construct
AARGGDYGYWGLHTD

SEQ ID NO: 18166 - protein, 11 aa, synthetic construct
AASPGGFDKLI

SEQ ID NO: 18167 - protein, 11 aa, synthetic construct
EARGGGYGYWG

SEQ ID NO: 18168 - protein, 13 aa, synthetic construct
AASPGDSTPINSS

SEQ ID NO: 18169 - protein, 15 aa, synthetic construct
AARGEGYGYWGLHTD

SEQ ID NO: 18170 - protein, 11 aa, synthetic construct
AARGGGSDKLI

SEQ ID NO: 18171 - protein, 10 aa, synthetic construct
AASTYTNKLI

SEQ ID NO: 18172 - protein, 11 aa, synthetic construct
AASRGDTDKLL

SEQ ID NO: 18173 - protein, 15 aa, synthetic construct
ATRGGGYGYWGLHTD

SEQ ID NO: 18174 - protein, 15 aa, synthetic construct
VARGGGYGYWGLHTD

SEQ ID NO: 18175 - protein, 11 aa, synthetic construct
EASRGDTEKLI

SEQ ID NO: 18176 - protein, 11 aa, synthetic construct
AASRGDTEKLF

SEQ ID NO: 18177 - protein, 11 aa, synthetic construct
AACPGGSDKLI

SEQ ID NO: 18178 - protein, 11 aa, synthetic construct
EASHGGSDKLI

SEQ ID NO: 18179 - protein, 16 aa, synthetic construct
AASMRWGIRSWDTQQM

SEQ ID NO: 18180 - protein, 11 aa, synthetic construct
AASPGGSEKLF

SEQ ID NO: 18181 - protein, 11 aa, synthetic construct
AASRGDTDKLY

SEQ ID NO: 18182 - protein, 11 aa, synthetic construct
QQALGDPINPS

SEQ ID NO: 18183 - protein, 11 aa, synthetic construct
AARRGDTDNLI

SEQ ID NO: 18184 - protein, 15 aa, synthetic construct
AARGGGYGYWGIHTD

SEQ ID NO: 18185 - protein, 11 aa, synthetic construct
AARRGDTDKLN

SEQ ID NO: 18186 - protein, 10 aa, synthetic construct
AANTYTDKLI

SEQ ID NO: 18187 - protein, 11 aa, synthetic construct
AASRGDTDKHN

SEQ ID NO: 18188 - protein, 12 aa, synthetic construct
AASMRWGATATG

SEQ ID NO: 18189 - protein, 11 aa, synthetic construct
AARRGATDKLI

SEQ ID NO: 18190 - protein, 11 aa, synthetic construct
AASPGGSNKLI

SEQ ID NO: 18191 - protein, 11 aa, synthetic construct
AASPGGSAQLI

SEQ ID NO: 18192 - protein, 15 aa, synthetic construct
AAREGGYGYWGLHTD

SEQ ID NO: 18193 - protein, 15 aa, synthetic construct
AARGGGYGSWGLNTD

SEQ ID NO: 18194 - protein, 11 aa, synthetic construct
AASREDTDKLI

SEQ ID NO: 18195 - protein, 16 aa, synthetic construct
AASMRWGIRSWDTRLM

SEQ ID NO: 18196 - protein, 10 aa, synthetic construct
AARTYTDKHI

SEQ ID NO: 18197 - protein, 11 aa, synthetic construct
SASRGDTDKLI

SEQ ID NO: 18198 - protein, 11 aa, synthetic construct
AASRGDTYKLI

SEQ ID NO: 18199 - protein, 11 aa, synthetic construct
AATPGGSDKLI

SEQ ID NO: 18200 - protein, 16 aa, synthetic construct
AVSMRWGIRSWDTRQM

SEQ ID NO: 18201 - protein, 15 aa, synthetic construct
AVRGGGYGYWGLHTD

SEQ ID NO: 18202 - protein, 10 aa, synthetic construct
EASTYTDKLN

SEQ ID NO: 18203 - protein, 11 aa, synthetic construct
ASSPGGSDKLI

SEQ ID NO: 18204 - protein, 16 aa, synthetic construct
AASRRWGIRSWATRQM

SEQ ID NO: 18205 - protein, 10 aa, synthetic construct
AASPYTEKLI

SEQ ID NO: 18206 - protein, 16 aa, synthetic construct
AASMRWGLRSWDTRQM

SEQ ID NO: 18207 - protein, 11 aa, synthetic construct
QQAEGTPRNSS

SEQ ID NO: 18208 - protein, 16 aa, synthetic construct
EARGGATATGDSTPIN

SEQ ID NO: 18209 - protein, 11 aa, synthetic construct
AASRGDTDKFI

SEQ ID NO: 18210 - protein, 11 aa, synthetic construct
EARRGDTDKLI

SEQ ID NO: 18211 - protein, 10 aa, synthetic construct
AASTYTDKVI

SEQ ID NO: 18212 - protein, 10 aa, synthetic construct
AASTYTHKLI

SEQ ID NO: 18213 - protein, 11 aa, synthetic construct
AASRGDTEKLN

SEQ ID NO: 18214 - protein, 10 aa, synthetic construct
AASTNTDKLN

SEQ ID NO: 18215 - protein, 11 aa, synthetic construct
AARRGDTETLI

SEQ ID NO: 18216 - protein, 15 aa, synthetic construct
AARGGGYGSGGLPTD

SEQ ID NO: 18217 - protein, 11 aa, synthetic construct
AASPGGSHKLI

SEQ ID NO: 18218 - protein, 11 aa, synthetic construct
AASAGGSDKLI

SEQ ID NO: 18219 - protein, 16 aa, synthetic construct
AASMRWGIHSWDTRQM

SEQ ID NO: 18220 - protein, 10 aa, synthetic construct
AALTYTDKLI

SEQ ID NO: 18221 - protein, 15 aa, synthetic construct
EARGGGLRLLGTPHR

SEQ ID NO: 18222 - protein, 11 aa, synthetic construct
AALPGGSDKLI

SEQ ID NO: 18223 - protein, 11 aa, synthetic construct
EASPGGSDKLN

SEQ ID NO: 18224 - protein, 11 aa, synthetic construct
EASPGGSAKLI

SEQ ID NO: 18225 - protein, 15 aa, synthetic construct
AASRGGATATGDSTP

SEQ ID NO: 18226 - protein, 16 aa, synthetic construct
AASMWWGIRSWDTRQM

SEQ ID NO: 18227 - protein, 11 aa, synthetic construct
AASPGGSDHLI

SEQ ID NO: 18228 - protein, 11 aa, synthetic construct
AASPGGSDKLL

SEQ ID NO: 18229 - protein, 11 aa, synthetic construct
AASRGDTEKVI

SEQ ID NO: 18230 - protein, 10 aa, synthetic construct
AARTNTDKLI

SEQ ID NO: 18231 - protein, 16 aa, synthetic construct
AASMRWGIRFWDTRQM

SEQ ID NO: 18232 - protein, 15 aa, synthetic construct
AARGGGHGYWGLHTD

SEQ ID NO: 18233 - protein, 11 aa, synthetic construct
AASRGETDQLI

SEQ ID NO: 18234 - protein, 10 aa, synthetic construct
AASTYTDKNI

SEQ ID NO: 18235 - protein, 15 aa, synthetic construct
AALGGGYGYWGLHTD

SEQ ID NO: 18236 - protein, 11 aa, synthetic construct
AASPGGSAKPI

SEQ ID NO: 18237 - protein, 11 aa, synthetic construct
AASPGVSDKLI

SEQ ID NO: 18238 - protein, 16 aa, synthetic construct
AARGGATATGDSTPRN

SEQ ID NO: 18239 - protein, 10 aa, synthetic construct
AARGGATATG

SEQ ID NO: 18240 - protein, 16 aa, synthetic construct
AARGGATAPGDSTPIN

SEQ ID NO: 18241 - protein, 10 aa, synthetic construct
AARTYTAKLI

SEQ ID NO: 18242 - protein, 11 aa, synthetic construct
AASRGDPEKLI

SEQ ID NO: 18243 - protein, 15 aa, synthetic construct
AARGGGYGSWGVHTD

SEQ ID NO: 18244 - protein, 11 aa, synthetic construct
AASPGGADKPI

SEQ ID NO: 18245 - protein, 10 aa, synthetic construct
AASTFTDKLI

SEQ ID NO: 18246 - protein, 10 aa, synthetic construct
AARGGGSGSW

SEQ ID NO: 18247 - protein, 15 aa, synthetic construct
AARMRWGIRSWDTRQ

SEQ ID NO: 18248 - protein, 11 aa, synthetic construct
AASPGGSDKFI

SEQ ID NO: 18249 - protein, 15 aa, synthetic construct
AAAKAFLRRGAPYTD

SEQ ID NO: 18250 - protein, 11 aa, synthetic construct
AASPGGSEKHI

SEQ ID NO: 18251 - protein, 11 aa, synthetic construct
AASPGGAEKLI

SEQ ID NO: 18252 - protein, 10 aa, synthetic construct
AASPYTDKII

SEQ ID NO: 18253 - protein, 10 aa, synthetic construct
AARTYTDKLN

SEQ ID NO: 18254 - protein, 15 aa, synthetic construct
SARGGGYGYWGLHTD

SEQ ID NO: 18255 - protein, 11 aa, synthetic construct
APSRGDTDKLI

SEQ ID NO: 18256 - protein, 15 aa, synthetic construct
AARGGGSGSWGLHTD

SEQ ID NO: 18257 - protein, 10 aa, synthetic construct
AASIYTDKLI

SEQ ID NO: 18258 - protein, 14 aa, synthetic construct
SKHEVGDTLLGHPT

SEQ ID NO: 18259 - protein, 11 aa, synthetic construct
AARPCYTDKLI

SEQ ID NO: 18260 - protein, 10 aa, synthetic construct
AASTYTETLI

SEQ ID NO: 18261 - protein, 11 aa, synthetic construct
AASRGDTDQHI

SEQ ID NO: 18262 - protein, 11 aa, synthetic construct
AASPGGSAKLN

SEQ ID NO: 18263 - protein, 15 aa, synthetic construct
AARGGGYGYWGLTTD

SEQ ID NO: 18264 - protein, 15 aa, synthetic construct
AARRRWGIRSWDTRQ

SEQ ID NO: 18265 - protein, 11 aa, synthetic construct
AASRGDTEQLI

SEQ ID NO: 18266 - protein, 11 aa, synthetic construct
AASRGDPDNLI

SEQ ID NO: 18267 - protein, 10 aa, synthetic construct
AASPYTDQLI

SEQ ID NO: 18268 - protein, 11 aa, synthetic construct
AASRGGTEKLI

SEQ ID NO: 18269 - protein, 15 aa, synthetic construct
AARVGGYGYWGLHTD

SEQ ID NO: 18270 - protein, 10 aa, synthetic construct
AASTSTEKLI

SEQ ID NO: 18271 - protein, 10 aa, synthetic construct
AARGDTDKLI

SEQ ID NO: 18272 - protein, 10 aa, synthetic construct
PASTYTDKLI

SEQ ID NO: 18273 - protein, 14 aa, synthetic construct
AASMCTGGHTDKLI

SEQ ID NO: 18274 - protein, 15 aa, synthetic construct
AARGGGYGYGGLPTD

SEQ ID NO: 18275 - protein, 10 aa, synthetic construct
EASTYTYKLI

SEQ ID NO: 18276 - protein, 15 aa, synthetic construct
AARGGGYGYWALHTD

SEQ ID NO: 18277 - protein, 11 aa, synthetic construct
AARGGGYGCWG

SEQ ID NO: 18278 - protein, 15 aa, synthetic construct
AATGGGYGYWGLHTD

SEQ ID NO: 18279 - protein, 10 aa, synthetic construct
AARTYTDNLI

SEQ ID NO: 18280 - protein, 11 aa, synthetic construct
AARRGDTDTLI

SEQ ID NO: 18281 - protein, 15 aa, synthetic construct
AARGGGYDYWGLHTD

SEQ ID NO: 18282 - protein, 15 aa, synthetic construct
AARGGGYGYWGLHPD

SEQ ID NO: 18283 - protein, 14 aa, synthetic construct
AASRRWGIRSWDTR

SEQ ID NO: 18284 - protein, 16 aa, synthetic construct
AASMRWGIRSSDTRQM

SEQ ID NO: 18285 - protein, 15 aa, synthetic construct
AASGGGYGSWGLHTD

SEQ ID NO: 18286 - protein, 11 aa, synthetic construct
AASPAGSDKLI

SEQ ID NO: 18287 - protein, 11 aa, synthetic construct
AARRGATEKLI

SEQ ID NO: 18288 - protein, 11 aa, synthetic construct
AARGGGSGDWG

SEQ ID NO: 18289 - protein, 11 aa, synthetic construct
AASPGGSDNTS

SEQ ID NO: 18290 - protein, 10 aa, synthetic construct
AASPYTDKRI

SEQ ID NO: 18291 - protein, 11 aa, synthetic construct
AASPGGSDKLY

SEQ ID NO: 18292 - protein, 11 aa, synthetic construct
AARPGGSDTLI

SEQ ID NO: 18293 - protein, 10 aa, synthetic construct
AASTYIDKLI

SEQ ID NO: 18294 - protein, 15 aa, synthetic construct
AARGGGSGYGGLHTD

SEQ ID NO: 18295 - protein, 10 aa, synthetic construct
AASTNTDKHI

SEQ ID NO: 18296 - protein, 14 aa, synthetic construct
AARGGGYGDWGLHT

SEQ ID NO: 18297 - protein, 11 aa, synthetic construct
EASRGDTDKII

SEQ ID NO: 18298 - protein, 5 aa, synthetic construct
AASPG

SEQ ID NO: 18299 - protein, 11 aa, synthetic construct
DASPGGSDKLI

SEQ ID NO: 18300 - protein, 15 aa, synthetic construct
AARGGGYGYWGFHTD

SEQ ID NO: 18301 - protein, 14 aa, synthetic construct
AARGGGYGYWGLNT

SEQ ID NO: 18302 - protein, 10 aa, synthetic construct
AASTNTEKLI

SEQ ID NO: 18303 - protein, 11 aa, synthetic construct
AARRGDPDKLI

SEQ ID NO: 18304 - protein, 15 aa, synthetic construct
EARGGGYGYWGLNTD

SEQ ID NO: 18305 - protein, 10 aa, synthetic construct
AASTIPINSS

SEQ ID NO: 18306 - protein, 10 aa, synthetic construct
AASTYPDKII

SEQ ID NO: 18307 - protein, 15 aa, synthetic construct
AARGGGSGYWGLPTD

SEQ ID NO: 18308 - protein, 11 aa, synthetic construct
AASPGGSGQLI

SEQ ID NO: 18309 - protein, 16 aa, synthetic construct
AARLRWGIRSWDTRQM

SEQ ID NO: 18310 - protein, 10 aa, synthetic construct
EASNYTDKLI

SEQ ID NO: 18311 - protein, 11 aa, synthetic construct
AASPGGSEKVI

SEQ ID NO: 18312 - protein, 10 aa, synthetic construct
AARTSTDKLI

SEQ ID NO: 18313 - protein, 11 aa, synthetic construct
AARPGGSDKLF

SEQ ID NO: 18314 - protein, 10 aa, synthetic construct
AASTYTDKIN

SEQ ID NO: 18315 - protein, 11 aa, synthetic construct
QQALGDPRNSS

SEQ ID NO: 18316 - protein, 11 aa, synthetic construct
AASRGDTGQLI

SEQ ID NO: 18317 - protein, 11 aa, synthetic construct
AASRGDPDTLI

SEQ ID NO: 18318 - protein, 15 aa, synthetic construct
AAKGGGYGYWGLHTD

SEQ ID NO: 18319 - protein, 10 aa, synthetic construct
AASTYTDKSI

SEQ ID NO: 18320 - protein, 11 aa, synthetic construct
AASRGDPRNSS

SEQ ID NO: 18321 - protein, 14 aa, synthetic construct
AASGGGYGYWGLHT

SEQ ID NO: 18322 - protein, 10 aa, synthetic construct
AARTSTEKRI

SEQ ID NO: 18323 - protein, 11 aa, synthetic construct
AASRGESDKLI

SEQ ID NO: 18324 - protein, 10 aa, synthetic construct
AASTYTEKRI

SEQ ID NO: 18325 - protein, 11 aa, synthetic construct
AASRGGSEKLI

SEQ ID NO: 18326 - protein, 11 aa, synthetic construct
AAGPGGSDKPI

SEQ ID NO: 18327 - protein, 10 aa, synthetic construct
QHVLIPINSS

SEQ ID NO: 18328 - protein, 10 aa, synthetic construct
AASTYTDNII

SEQ ID NO: 18329 - protein, 11 aa, synthetic construct
AASGGDTEKLI

SEQ ID NO: 18330 - protein, 8 aa, synthetic construct
AASTYTDK

SEQ ID NO: 18331 - protein, 15 aa, synthetic construct
QQEGGATATGDSTPI

SEQ ID NO: 18332 - protein, 11 aa, synthetic construct
AAIPGGSDQLI

SEQ ID NO: 18333 - protein, 16 aa, synthetic construct
AASMRWGIGSWDTRQM

SEQ ID NO: 18334 - protein, 11 aa, synthetic construct
AASRGDTEKLT

SEQ ID NO: 18335 - protein, 11 aa, synthetic construct
AAIGGGYGYWG

SEQ ID NO: 18336 - protein, 11 aa, synthetic construct
AASRGDTDKLK

SEQ ID NO: 18337 - protein, 15 aa, synthetic construct
AASLRWGIRSWDTRQ

SEQ ID NO: 18338 - protein, 10 aa, synthetic construct
AASTYTEKLN

SEQ ID NO: 18339 - protein, 10 aa, synthetic construct
AARTYTDKII

SEQ ID NO: 18340 - protein, 10 aa, synthetic construct
QQVLIPIKSS

SEQ ID NO: 18341 - protein, 10 aa, synthetic construct
AASTYTDKFI

SEQ ID NO: 18342 - protein, 15 aa, synthetic construct
AARGGGYGDWGLPTD

SEQ ID NO: 18343 - protein, 11 aa, synthetic construct
EASRGDTDKHI

SEQ ID NO: 18344 - protein, 16 aa, synthetic construct
AASLRWGRRSWDTRQM

SEQ ID NO: 18345 - protein, 15 aa, synthetic construct
EASMRWGIRSWDTRQ

SEQ ID NO: 18346 - protein, 16 aa, synthetic construct
PASMRWGIRSWDTRQM

SEQ ID NO: 18347 - protein, 15 aa, synthetic construct
AASMRWGIRSWTPDR

SEQ ID NO: 18348 - protein, 11 aa, synthetic construct
GASRGDTDKLI

SEQ ID NO: 18349 - protein, 11 aa, synthetic construct
AASRGDAEKLI

SEQ ID NO: 18350 - protein, 10 aa, synthetic construct
AASTSTDQLI

SEQ ID NO: 18351 - protein, 10 aa, synthetic construct
AAGGGGYGSW

SEQ ID NO: 18352 - protein, 16 aa, synthetic construct
AASMRWGIRTWDTRQM

SEQ ID NO: 18353 - protein, 16 aa, synthetic construct
AASMRCGIRSWDTRQM

SEQ ID NO: 18354 - protein, 14 aa, synthetic construct
AARGGGYGYGGLHT

SEQ ID NO: 18355 - protein, 11 aa, synthetic construct
AARPGGSEKPI

SEQ ID NO: 18356 - protein, 11 aa, synthetic construct
AASRGDPDQLI

SEQ ID NO: 18357 - protein, 14 aa, synthetic construct
AASLRWGIRSWDTR

SEQ ID NO: 18358 - protein, 11 aa, synthetic construct
AASPGDTDKLI

SEQ ID NO: 18359 - protein, 16 aa, synthetic construct
AASMRWGIRSWNTRQM

SEQ ID NO: 18360 - protein, 16 aa, synthetic construct
AASMRWGIRSWVTRQM

SEQ ID NO: 18361 - protein, 16 aa, synthetic construct
AASMGRGIRSWDTRQM

SEQ ID NO: 18362 - protein, 11 aa, synthetic construct
AASRGDTDQLN

SEQ ID NO: 18363 - protein, 11 aa, synthetic construct
AASPGGSYKPI

SEQ ID NO: 18364 - protein, 11 aa, synthetic construct
AASIGDTDKLN

SEQ ID NO: 18365 - protein, 10 aa, synthetic construct
AASTYTEKII

SEQ ID NO: 18366 - protein, 11 aa, synthetic construct
EASPGGSDKLF

SEQ ID NO: 18367 - protein, 11 aa, synthetic construct
EASPGGSDKII

SEQ ID NO: 18368 - protein, 11 aa, synthetic construct
AASPGGSANLI

SEQ ID NO: 18369 - protein, 11 aa, synthetic construct
AASTGGTDKLI

SEQ ID NO: 18370 - protein, 16 aa, synthetic construct
AASMRWGICSWDTRQM

SEQ ID NO: 18371 - protein, 10 aa, synthetic construct
QQVLIPRNSS

SEQ ID NO: 18372 - protein, 13 aa, synthetic construct
AASMRWGIPINSS

SEQ ID NO: 18373 - protein, 15 aa, synthetic construct
EARGGGYGSWGLHTD

SEQ ID NO: 18374 - protein, 16 aa, synthetic construct
AASMRWGIPSWDTRQM

SEQ ID NO: 18375 - protein, 9 aa, synthetic construct
AASRGDTDK

SEQ ID NO: 18376 - protein, 11 aa, synthetic construct
AASRGDTDNII

SEQ ID NO: 18377 - protein, 16 aa, synthetic construct
QHEGGATATGDSTPIN

SEQ ID NO: 18378 - protein, 14 aa, synthetic construct
AARGGGYGYWGVHT

SEQ ID NO: 18379 - protein, 10 aa, synthetic construct
EASPYTDKLI

SEQ ID NO: 18380 - protein, 11 aa, synthetic construct
AASPGGTDKLI

SEQ ID NO: 18381 - protein, 11 aa, synthetic construct
AASRGDTDDLI

SEQ ID NO: 18382 - protein, 11 aa, synthetic construct
QQALGEPINSS

SEQ ID NO: 18383 - protein, 15 aa, synthetic construct
AALGGGYGYWGLNTD

SEQ ID NO: 18384 - protein, 11 aa, synthetic construct
AAGRGDTEKLI

SEQ ID NO: 18385 - protein, 15 aa, synthetic construct
AASGGGSGYWGLHTD

SEQ ID NO: 18386 - protein, 11 aa, synthetic construct
AASPGGSDKPL

SEQ ID NO: 18387 - protein, 11 aa, synthetic construct
AASPGGYDKLI

SEQ ID NO: 18388 - protein, 11 aa, synthetic construct
AASRGDTAKII

SEQ ID NO: 18389 - protein, 16 aa, synthetic construct
AASKRWGIRSWDTRQM

SEQ ID NO: 18390 - protein, 11 aa, synthetic construct
AASRGDTAKLN

SEQ ID NO: 18391 - protein, 10 aa, synthetic construct
AARPYTDKLI

SEQ ID NO: 18392 - protein, 10 aa, synthetic construct
AASTYPEKLI

SEQ ID NO: 18393 - protein, 11 aa, synthetic construct
AACRGDTDKLI

SEQ ID NO: 18394 - protein, 11 aa, synthetic construct
AARRVDTDKLI

SEQ ID NO: 18395 - protein, 10 aa, synthetic construct
EASTYTDTLI

SEQ ID NO: 18396 - protein, 16 aa, synthetic construct
AASMRWWIRSWDTRQM

SEQ ID NO: 18397 - protein, 16 aa, synthetic construct
AASMRWGRRSWDPRQM

SEQ ID NO: 18398 - protein, 10 aa, synthetic construct
AARTYSDKLI

SEQ ID NO: 18399 - protein, 10 aa, synthetic construct
AARTYTDKLF

SEQ ID NO: 18400 - protein, 11 aa, synthetic construct
AASPGGSDNPI

SEQ ID NO: 18401 - protein, 11 aa, synthetic construct
AASRRDTEKLI

SEQ ID NO: 18402 - protein, 10 aa, synthetic construct
AASTYTDKIF

SEQ ID NO: 18403 - protein, 10 aa, synthetic construct
AASTYPDKLS

SEQ ID NO: 18404 - protein, 10 aa, synthetic construct
AASTYTYKLN

SEQ ID NO: 18405 - protein, 10 aa, synthetic construct
AASTYTDQII

SEQ ID NO: 18406 - protein, 15 aa, synthetic construct
AARGGGLRLLGTQHR

SEQ ID NO: 18407 - protein, 11 aa, synthetic construct
AASPGGCDKLI

SEQ ID NO: 18408 - protein, 11 aa, synthetic construct
AARPGGSAKLI

SEQ ID NO: 18409 - protein, 11 aa, synthetic construct
QQALGDPISSS

SEQ ID NO: 18410 - protein, 11 aa, synthetic construct
AARPGGSDNLI

SEQ ID NO: 18411 - protein, 11 aa, synthetic construct
AASPGGSEQLI

SEQ ID NO: 18412 - protein, 11 aa, synthetic construct
QQALGDPLNSS

SEQ ID NO: 18413 - protein, 11 aa, synthetic construct
AASMGDPINSS

SEQ ID NO: 18414 - protein, 15 aa, synthetic construct
AARGGGLRLLRTPHR

SEQ ID NO: 18415 - protein, 11 aa, synthetic construct
AARRGDTDKPI

SEQ ID NO: 18416 - protein, 16 aa, synthetic construct
AASMRWGIRSGDTRQM

SEQ ID NO: 18417 - protein, 11 aa, synthetic construct
AARRGDTDKII

SEQ ID NO: 18418 - protein, 11 aa, synthetic construct
AARRGDTDKHI

SEQ ID NO: 18419 - protein, 7 aa, synthetic construct
AASMRGH

SEQ ID NO: 18420 - protein, 11 aa, synthetic construct
AASPGGSDIPI

SEQ ID NO: 18421 - protein, 16 aa, synthetic construct
AASMGWGIRSWATRQM

SEQ ID NO: 18422 - protein, 11 aa, synthetic construct
AASGGGSGYWG

SEQ ID NO: 18423 - protein, 14 aa, synthetic construct
AARGGGYGYWGLDT

SEQ ID NO: 18424 - protein, 11 aa, synthetic construct
AATRGDTDKLI

SEQ ID NO: 18425 - protein, 10 aa, synthetic construct
AARGGGYGYW

SEQ ID NO: 18426 - protein, 15 aa, synthetic construct
AARGGGLRLLGAPHR

SEQ ID NO: 18427 - protein, 11 aa, synthetic construct
AASPGGSDKPV

SEQ ID NO: 18428 - protein, 16 aa, synthetic construct
AASRRWGLRSWDTRQM

SEQ ID NO: 18429 - protein, 16 aa, synthetic construct
AARRRWGLRSWDTRQM

SEQ ID NO: 18430 - protein, 11 aa, synthetic construct
AASRGDTQKLI

SEQ ID NO: 18431 - protein, 15 aa, synthetic construct
AARGGGSGYRGLHTD

SEQ ID NO: 18432 - protein, 11 aa, synthetic construct
AASTGDTEKLI

SEQ ID NO: 18433 - protein, 11 aa, synthetic construct
AASRGDTAKLF

SEQ ID NO: 18434 - protein, 10 aa, synthetic construct
AASTYTENLI

SEQ ID NO: 18435 - protein, 11 aa, synthetic construct
AANRGDTEKLI

SEQ ID NO: 18436 - protein, 11 aa, synthetic construct
AASRGDTAKLS

SEQ ID NO: 18437 - protein, 16 aa, synthetic construct
AANMRWGIRSWDTRQM

SEQ ID NO: 18438 - protein, 15 aa, synthetic construct
AASGGGLRLLGTPHR

SEQ ID NO: 18439 - protein, 16 aa, synthetic construct
AASRGGGYGYWGLHTD

SEQ ID NO: 18440 - protein, 15 aa, synthetic construct
AASMRWGIRSWATRQ

SEQ ID NO: 18441 - protein, 15 aa, synthetic construct
AASRGGGYAPGTPDR

SEQ ID NO: 18442 - protein, 14 aa, synthetic construct
AARGGGYGYWGPHT

SEQ ID NO: 18443 - protein, 10 aa, synthetic construct
AASTYTDQRI

SEQ ID NO: 18444 - protein, 10 aa, synthetic construct
AASTYNDKII

SEQ ID NO: 18445 - protein, 10 aa, synthetic construct
AASTYSAKLI

SEQ ID NO: 18446 - protein, 11 aa, synthetic construct
AARRGDTDELI

SEQ ID NO: 18447 - protein, 10 aa, synthetic construct
AASPYTDKLS

SEQ ID NO: 18448 - protein, 16 aa, synthetic construct
AASMRWGVRSWDTDKL

SEQ ID NO: 18449 - protein, 11 aa, synthetic construct
AARGGGSGAWG

SEQ ID NO: 18450 - protein, 8 aa, synthetic construct
AARGGGSG

SEQ ID NO: 18451 - protein, 11 aa, synthetic construct
AAIPGGSDKHI

SEQ ID NO: 18452 - protein, 10 aa, synthetic construct
AASTYTEILI

SEQ ID NO: 18453 - protein, 7 aa, synthetic construct
AASMRWL

SEQ ID NO: 18454 - protein, 11 aa, synthetic construct
AASRGDTDKRS

SEQ ID NO: 18455 - protein, 11 aa, synthetic construct
AARGGGSDKHI

SEQ ID NO: 18456 - protein, 11 aa, synthetic construct
EARGGGLRLLG

SEQ ID NO: 18457 - protein, 11 aa, synthetic construct
AAIHGGSDKLI

SEQ ID NO: 18458 - protein, 16 aa, synthetic construct
AASMRWRIRSWDTRQM

SEQ ID NO: 18459 - protein, 10 aa, synthetic construct
AASSYPDKLI

SEQ ID NO: 18460 - protein, 16 aa, synthetic construct
AASRRWGIRSWDSRQM

SEQ ID NO: 18461 - protein, 11 aa, synthetic construct
AASRGDTDKLM

SEQ ID NO: 18462 - protein, 16 aa, synthetic construct
AASRRWGIRSWDTRPM

SEQ ID NO: 18463 - protein, 10 aa, synthetic construct
AASPYTDNLI

SEQ ID NO: 18464 - protein, 11 aa, synthetic construct
SARRGDTDKLI

SEQ ID NO: 18465 - protein, 15 aa, synthetic construct
AARGGGPRLLGTPHR

SEQ ID NO: 18466 - protein, 10 aa, synthetic construct
AASTNPDKLI

SEQ ID NO: 18467 - protein, 10 aa, synthetic construct
AARGGSDKLI

SEQ ID NO: 18468 - protein, 11 aa, synthetic construct
AASPGGSGKPI

SEQ ID NO: 18469 - protein, 15 aa, synthetic construct
AASPGGLRLLGTPHR

SEQ ID NO: 18470 - protein, 11 aa, synthetic construct
AASRGEPDKLI

SEQ ID NO: 18471 - protein, 11 aa, synthetic construct
APSPGGSDKPI

SEQ ID NO: 18472 - protein, 10 aa, synthetic construct
AASTYTEQLI

SEQ ID NO: 18473 - protein, 12 aa, synthetic construct
AASMRWGIRETH

SEQ ID NO: 18474 - protein, 10 aa, synthetic construct
AASTYTATLI

SEQ ID NO: 18475 - protein, 11 aa, synthetic construct
AASHGGSDKII

SEQ ID NO: 18476 - protein, 15 aa, synthetic construct
AARGGGYGYWVLHTD

SEQ ID NO: 18477 - protein, 11 aa, synthetic construct
AASPGGSETRI

SEQ ID NO: 18478 - protein, 10 aa, synthetic construct
AASTYTAQLI

SEQ ID NO: 18479 - protein, 11 aa, synthetic construct
AARRGDPEKLI

SEQ ID NO: 18480 - protein, 16 aa, synthetic construct
SASMRWGIRSWDTRQM

SEQ ID NO: 18481 - protein, 11 aa, synthetic construct
AASHGGSDKLN

SEQ ID NO: 18482 - protein, 15 aa, synthetic construct
AASRRWGIRSWATRQ

SEQ ID NO: 18483 - protein, 11 aa, synthetic construct
AASHGGSDKPI

SEQ ID NO: 18484 - protein, 15 aa, synthetic construct
ASRGGGYGYWGLHTD

SEQ ID NO: 18485 - protein, 11 aa, synthetic construct
AASRGDTHKLN

SEQ ID NO: 18486 - protein, 11 aa, synthetic construct
AASPGGPDKPI

SEQ ID NO: 18487 - protein, 11 aa, synthetic construct
AASPGGSAELI

SEQ ID NO: 18488 - protein, 10 aa, synthetic construct
AASTNTDQLI

SEQ ID NO: 18489 - protein, 11 aa, synthetic construct
AASPGGSEKPN

SEQ ID NO: 18490 - protein, 16 aa, synthetic construct
EASMRWGISSWDTRQM

SEQ ID NO: 18491 - protein, 10 aa, synthetic construct
AARTYTDKRI

SEQ ID NO: 18492 - protein, 16 aa, synthetic construct
AASMRWGMRSWGLHTD

SEQ ID NO: 18493 - protein, 15 aa, synthetic construct
AASMRWGIRSWYTRQ

SEQ ID NO: 18494 - protein, 14 aa, synthetic construct
AARGGGYGHWGLHT

SEQ ID NO: 18495 - protein, 10 aa, synthetic construct
EASTNTDKLI

SEQ ID NO: 18496 - protein, 11 aa, synthetic construct
AASPWGSDKLI

SEQ ID NO: 18497 - protein, 11 aa, synthetic construct
AASPGDPINPS

SEQ ID NO: 18498 - protein, 10 aa, synthetic construct
AASTYTDIII

SEQ ID NO: 18499 - protein, 10 aa, synthetic construct
AASTYHDKLI

SEQ ID NO: 18500 - protein, 10 aa, synthetic construct
AASPYPDKLI

SEQ ID NO: 18501 - protein, 11 aa, synthetic construct
QHALGDPINSS

SEQ ID NO: 18502 - protein, 11 aa, synthetic construct
AASPGGSDNLN

SEQ ID NO: 18503 - protein, 11 aa, synthetic construct
AARPGGSETLI

SEQ ID NO: 18504 - protein, 14 aa, synthetic construct
AASMRWGIRSWETR

SEQ ID NO: 18505 - protein, 11 aa, synthetic construct
AASPGGSDKLK

SEQ ID NO: 18506 - protein, 10 aa, synthetic construct
ASSTYTDKLI

SEQ ID NO: 18507 - protein, 10 aa, synthetic construct
AARTYTDKLS

SEQ ID NO: 18508 - protein, 10 aa, synthetic construct
AASTDTDKRI

SEQ ID NO: 18509 - protein, 15 aa, synthetic construct
AARGGAYGYWGLHTD

SEQ ID NO: 18510 - protein, 11 aa, synthetic construct
EARPGGSDKLI

SEQ ID NO: 18511 - protein, 10 aa, synthetic construct
AARGGGDGSW

SEQ ID NO: 18512 - protein, 10 aa, synthetic construct
AARTYTDTLI

SEQ ID NO: 18513 - protein, 6 aa, synthetic construct
AARPGG

SEQ ID NO: 18514 - protein, 10 aa, synthetic construct
AVLGDTDQLI

SEQ ID NO: 18515 - protein, 10 aa, synthetic construct
AARTYTEQLI

SEQ ID NO: 18516 - protein, 10 aa, synthetic construct
AASTDTEKRI

SEQ ID NO: 18517 - protein, 16 aa, synthetic construct
AASMRWGKRSWDTRQM

SEQ ID NO: 18518 - protein, 11 aa, synthetic construct
AASPGGSDQLF

SEQ ID NO: 18519 - protein, 10 aa, synthetic construct
AARTYTGKLI

SEQ ID NO: 18520 - protein, 11 aa, synthetic construct
AASRVDTEKLI

SEQ ID NO: 18521 - protein, 11 aa, synthetic construct
TARGGGYGYWG

SEQ ID NO: 18522 - protein, 11 aa, synthetic construct
EASRRDTDKLI

SEQ ID NO: 18523 - protein, 10 aa, synthetic construct
AASTYTVKII

SEQ ID NO: 18524 - protein, 15 aa, synthetic construct
AASMGWGIRSWDTRQ

SEQ ID NO: 18525 - protein, 7 aa, synthetic construct
AARGGDT

SEQ ID NO: 18526 - protein, 11 aa, synthetic construct
AASRGTPINSS

SEQ ID NO: 18527 - protein, 16 aa, synthetic construct
AATMRWGIRSWDTRQM

SEQ ID NO: 18528 - protein, 16 aa, synthetic construct
AASMRGGIRSWDPRQM

SEQ ID NO: 18529 - protein, 15 aa, synthetic construct
AARAGGYGYWGLHTD

SEQ ID NO: 18530 - protein, 11 aa, synthetic construct
QHAEGTPINSS

SEQ ID NO: 18531 - protein, 15 aa, synthetic construct
AASVCLLGDGPDKLI

SEQ ID NO: 18532 - protein, 11 aa, synthetic construct
EASRGDTDKLF

SEQ ID NO: 18533 - protein, 11 aa, synthetic construct
AAGPGGSEKLI

SEQ ID NO: 18534 - protein, 10 aa, synthetic construct
AARTDTDKLI

SEQ ID NO: 18535 - protein, 15 aa, synthetic construct
AARGGGYGSWGLRTD

SEQ ID NO: 18536 - protein, 15 aa, synthetic construct
AARGGGYGYCGLHTD

SEQ ID NO: 18537 - protein, 11 aa, synthetic construct
AARPGGCEKLI

SEQ ID NO: 18538 - protein, 16 aa, synthetic construct
DASMRWGIRSWDTRQM

SEQ ID NO: 18539 - protein, 11 aa, synthetic construct
AATPGGSEKLI

SEQ ID NO: 18540 - protein, 10 aa, synthetic construct
AARTYTDKLM

SEQ ID NO: 18541 - protein, 11 aa, synthetic construct
AASPGGSEKLV

SEQ ID NO: 18542 - protein, 11 aa, synthetic construct
AESPGGSDKPI

SEQ ID NO: 18543 - protein, 10 aa, synthetic construct
AASTYPDNLI

SEQ ID NO: 18544 - protein, 11 aa, synthetic construct
AASRGDTAHLI

SEQ ID NO: 18545 - protein, 16 aa, synthetic construct
AASMRWGRRSWDTRPM

SEQ ID NO: 18546 - protein, 11 aa, synthetic construct
PASRGDTDKLI

SEQ ID NO: 18547 - protein, 11 aa, synthetic construct
EASRGDTDKRI

SEQ ID NO: 18548 - protein, 11 aa, synthetic construct
AASPGGSDKIF

SEQ ID NO: 18549 - protein, 11 aa, synthetic construct
EASRGDTDNLI

SEQ ID NO: 18550 - protein, 16 aa, synthetic construct
AASMRGGIRSWATRQM

SEQ ID NO: 18551 - protein, 11 aa, synthetic construct
EASRGDTDKVI

SEQ ID NO: 18552 - protein, 11 aa, synthetic construct
EASRGDTDKLN

SEQ ID NO: 18553 - protein, 11 aa, synthetic construct
AASTGGSDKPI

SEQ ID NO: 18554 - protein, 11 aa, synthetic construct
AARPGGSDKLT

SEQ ID NO: 18555 - protein, 11 aa, synthetic construct
AASPGGSDKRS

SEQ ID NO: 18556 - protein, 10 aa, synthetic construct
AATTYTDKLI

SEQ ID NO: 18557 - protein, 11 aa, synthetic construct
AARPGGSVKLI

SEQ ID NO: 18558 - protein, 11 aa, synthetic construct
AARPGGSDKLV

SEQ ID NO: 18559 - protein, 11 aa, synthetic construct
EARRVDTDKLI

SEQ ID NO: 18560 - protein, 11 aa, synthetic construct
AASTGGSEKLI

SEQ ID NO: 18561 - protein, 11 aa, synthetic construct
AASTGDTDKLN

SEQ ID NO: 18562 - protein, 11 aa, synthetic construct
AARPGGSDKLN

SEQ ID NO: 18563 - protein, 16 aa, synthetic construct
AASMGWGIRSWETRQM

SEQ ID NO: 18564 - protein, 16 aa, synthetic construct
AASLSWGIRSWDTRQM

SEQ ID NO: 18565 - protein, 15 aa, synthetic construct
AASMRGGIRSWDTRQ

SEQ ID NO: 18566 - protein, 11 aa, synthetic construct
AASPGGSDKNI

SEQ ID NO: 18567 - protein, 13 aa, synthetic construct
AASVLRWWGSKLI

SEQ ID NO: 18568 - protein, 10 aa, synthetic construct
AASTYTEKLF

SEQ ID NO: 18569 - protein, 15 aa, synthetic construct
EARGGGYGYWGLRTD

SEQ ID NO: 18570 - protein, 11 aa, synthetic construct
AARPGGSDRLI

SEQ ID NO: 18571 - protein, 11 aa, synthetic construct
AASPGGSDKHN

SEQ ID NO: 18572 - protein, 9 aa, synthetic construct
AASPGGSDK

SEQ ID NO: 18573 - protein, 16 aa, synthetic construct
AASLRWGISSWDTRQM

SEQ ID NO: 18574 - protein, 11 aa, synthetic construct
AATRGDTEKLI

SEQ ID NO: 18575 - protein, 11 aa, synthetic construct
AASPGGSDILF

SEQ ID NO: 18576 - protein, 15 aa, synthetic construct
AASLRWGIRSWATRQ

SEQ ID NO: 18577 - protein, 11 aa, synthetic construct
AASPGGSDKRL

SEQ ID NO: 18578 - protein, 11 aa, synthetic construct
AARPGGSDKVI

SEQ ID NO: 18579 - protein, 16 aa, synthetic construct
AASMRGGRRSWDTRQM

SEQ ID NO: 18580 - protein, 15 aa, synthetic construct
AASMRGGYAPGTPDR

SEQ ID NO: 18581 - protein, 11 aa, synthetic construct
AASTGDTAKLI

SEQ ID NO: 18582 - protein, 11 aa, synthetic construct
AASTGESDKLI

SEQ ID NO: 18583 - protein, 12 aa, synthetic construct
AASLRWGIRSWD

SEQ ID NO: 18584 - protein, 16 aa, synthetic construct
AASMKWGIRSWDTRQM

SEQ ID NO: 18585 - protein, 10 aa, synthetic construct
AARPYTDKRI

SEQ ID NO: 18586 - protein, 11 aa, synthetic construct
AASPGGSDKLM

SEQ ID NO: 18587 - protein, 11 aa, synthetic construct
AARPGGSEQLI

SEQ ID NO: 18588 - protein, 16 aa, synthetic construct
AASMRGGRRSWDTRPM

SEQ ID NO: 18589 - protein, 11 aa, synthetic construct
AASPGGSDKPS

SEQ ID NO: 18590 - protein, 10 aa, synthetic construct
AASTYTSKLI

SEQ ID NO: 18591 - protein, 15 aa, synthetic construct
EARGGGYGYWGLLTD

SEQ ID NO: 18592 - protein, 11 aa, synthetic construct
AARPGGSEKVI

SEQ ID NO: 18593 - protein, 8 aa, synthetic construct
AASMRGHR

SEQ ID NO: 18594 - protein, 10 aa, synthetic construct
AASTYTEKLV

SEQ ID NO: 18595 - protein, 16 aa, synthetic construct
AASLRWGIRSWDSRQM

SEQ ID NO: 18596 - protein, 16 aa, synthetic construct
AASMRGGIRSWDTDKL

SEQ ID NO: 18597 - protein, 15 aa, synthetic construct
EARGGGYGYSGLHTD

SEQ ID NO: 18598 - protein, 15 aa, synthetic construct
EARGGGYGYRGLHTD

SEQ ID NO: 18599 - protein, 13 aa, synthetic construct
AASLRWGIRSWDT

SEQ ID NO: 18600 - protein, 15 aa, synthetic construct
AASMCLLGDGPEKLI

SEQ ID NO: 18601 - protein, 16 aa, synthetic construct
AASMGWGIRSWDTRPM

SEQ ID NO: 18602 - protein, 16 aa, synthetic construct
AASMGWGISSWDTRQM

SEQ ID NO: 18603 - protein, 11 aa, synthetic construct
AASMRGHRETH

SEQ ID NO: 18604 - protein, 11 aa, synthetic construct
AARPGGSENLI

SEQ ID NO: 18605 - protein, 10 aa, synthetic construct
AARTSTEKLI

SEQ ID NO: 18606 - protein, 10 aa, synthetic construct
AARPYTEKLI

SEQ ID NO: 18607 - protein, 15 aa, synthetic construct
EARGGGYAYWGLHTD

SEQ ID NO: 18608 - protein, 10 aa, synthetic construct
AVLGDTDKPI

SEQ ID NO: 18609 - protein, 10 aa, synthetic construct
AARTYTENLI

SEQ ID NO: 18610 - protein, 16 aa, synthetic construct
AVRGGATATGDSTPIN

SEQ ID NO: 18611 - protein, 10 aa, synthetic construct
AARTYTETLS

SEQ ID NO: 18612 - protein, 15 aa, synthetic construct
AVRGGGLRLLGTPHR

SEQ ID NO: 18613 - protein, 11 aa, synthetic construct
AASPGASDKHI

SEQ ID NO: 18614 - protein, 14 aa, synthetic construct
AVRGGGYGYWGLHT

SEQ ID NO: 18615 - protein, 10 aa, synthetic construct
AARTYTVKLI

SEQ ID NO: 18616 - protein, 16 aa, synthetic construct
AASMRWGISSWDTRHM

SEQ ID NO: 18617 - protein, 16 aa, synthetic construct
AASMRWGISSCDTRQM

SEQ ID NO: 18618 - protein, 10 aa, synthetic construct
AESTYTDKII

SEQ ID NO: 18619 - protein, 11 aa, synthetic construct
AVSPGGSDKLN

SEQ ID NO: 18620 - protein, 11 aa, synthetic construct
AVSPGGSDKLT

SEQ ID NO: 18621 - protein, 11 aa, synthetic construct
AASPGASEKLI

SEQ ID NO: 18622 - protein, 11 aa, synthetic construct
AARRGHTDKLI

SEQ ID NO: 18623 - protein, 15 aa, synthetic construct
AARWGGYGYWGLHTD

SEQ ID NO: 18624 - protein, 14 aa, synthetic construct
AARRGGYGYWGLHT

SEQ ID NO: 18625 - protein, 15 aa, synthetic construct
AARRGGYGSWGLHTD

SEQ ID NO: 18626 - protein, 16 aa, synthetic construct
AASMRWGIRSWTTRQM

SEQ ID NO: 18627 - protein, 11 aa, synthetic construct
AARRGGTEKLI

SEQ ID NO: 18628 - protein, 10 aa, synthetic construct
AASPGDPITH

SEQ ID NO: 18629 - protein, 11 aa, synthetic construct
AESRGDTDKII

SEQ ID NO: 18630 - protein, 11 aa, synthetic construct
AESRGDTDKHI

SEQ ID NO: 18631 - protein, 10 aa, synthetic construct
AASTYAAKLI

SEQ ID NO: 18632 - protein, 16 aa, synthetic construct
AASMRWGIRSWETRPM

SEQ ID NO: 18633 - protein, 11 aa, synthetic construct
AASPGESEKLI

SEQ ID NO: 18634 - protein, 11 aa, synthetic construct
DARGGGYGYWG

SEQ ID NO: 18635 - protein, 15 aa, synthetic construct
AGRGGGYGYWGLHTD

SEQ ID NO: 18636 - protein, 10 aa, synthetic construct
AASTYTDKIY

SEQ ID NO: 18637 - protein, 16 aa, synthetic construct
AASMRWGMRSWDIRQM

SEQ ID NO: 18638 - protein, 10 aa, synthetic construct
AARTYTAKLN

SEQ ID NO: 18639 - protein, 10 aa, synthetic construct
AASTYSEKLI

SEQ ID NO: 18640 - protein, 10 aa, synthetic construct
AARTSTDILI

SEQ ID NO: 18641 - protein, 10 aa, synthetic construct
AARTYPDKLI

SEQ ID NO: 18642 - protein, 10 aa, synthetic construct
AASTYSDTLI

SEQ ID NO: 18643 - protein, 10 aa, synthetic construct
AASTYTAKRI

SEQ ID NO: 18644 - protein, 16 aa, synthetic construct
AASMSWGIRSCDTRQM

SEQ ID NO: 18645 - protein, 10 aa, synthetic construct
AARTNTDKHI

SEQ ID NO: 18646 - protein, 16 aa, synthetic construct
AASMSWGIRSSDTRQM

SEQ ID NO: 18647 - protein, 11 aa, synthetic construct
APSPGGSDKLI

SEQ ID NO: 18648 - protein, 16 aa, synthetic construct
AASMSWGIRSWATRQM

SEQ ID NO: 18649 - protein, 16 aa, synthetic construct
AASMRWGRRSWETRQM

SEQ ID NO: 18650 - protein, 15 aa, synthetic construct
AASMSWGIRSWDTRQ

SEQ ID NO: 18651 - protein, 10 aa, synthetic construct
AASTYRDKLI

SEQ ID NO: 18652 - protein, 10 aa, synthetic construct
AASTYTDKHN

SEQ ID NO: 18653 - protein, 10 aa, synthetic construct
AARTYTDELI

SEQ ID NO: 18654 - protein, 15 aa, synthetic construct
AASMRWGRRSWDTRQ

SEQ ID NO: 18655 - protein, 10 aa, synthetic construct
AARTYTDHLI

SEQ ID NO: 18656 - protein, 11 aa, synthetic construct
APRRGDTDKLI

SEQ ID NO: 18657 - protein, 10 aa, synthetic construct
AASTYPDKPI

SEQ ID NO: 18658 - protein, 10 aa, synthetic construct
AASNYTDKII

SEQ ID NO: 18659 - protein, 15 aa, synthetic construct
ATRGGGLRLLGTPHR

SEQ ID NO: 18660 - protein, 14 aa, synthetic construct
ATRGGGYAPGTPDR

SEQ ID NO: 18661 - protein, 10 aa, synthetic construct
AARTYTDKLV

SEQ ID NO: 18662 - protein, 11 aa, synthetic construct
ATSPGGSEKLI

SEQ ID NO: 18663 - protein, 11 aa, synthetic construct
ATSRGDTEKLI

SEQ ID NO: 18664 - protein, 10 aa, synthetic construct
AASTYNDNLI

SEQ ID NO: 18665 - protein, 11 aa, synthetic construct
DARPGGSDKLI

SEQ ID NO: 18666 - protein, 11 aa, synthetic construct
DARRGDTDKLI

SEQ ID NO: 18667 - protein, 10 aa, synthetic construct
AASTYTDKTI

SEQ ID NO: 18668 - protein, 11 aa, synthetic construct
AARRGDSEKRI

SEQ ID NO: 18669 - protein, 11 aa, synthetic construct
AARRGDTDKVI

SEQ ID NO: 18670 - protein, 16 aa, synthetic construct
AASGLPSLGVHTDKLI

SEQ ID NO: 18671 - protein, 11 aa, synthetic construct
AARRGDTDKLF

SEQ ID NO: 18672 - protein, 16 aa, synthetic construct
AASMRWGIRSCDTRPM

SEQ ID NO: 18673 - protein, 11 aa, synthetic construct
AASHGGSAKLI

SEQ ID NO: 18674 - protein, 11 aa, synthetic construct
AASPGGFEKLI

SEQ ID NO: 18675 - protein, 10 aa, synthetic construct
AASTYTDRII

SEQ ID NO: 18676 - protein, 13 aa, synthetic construct
AASPGGLHTDKLI

SEQ ID NO: 18677 - protein, 11 aa, synthetic construct
AARRGDTAKLI

SEQ ID NO: 18678 - protein, 11 aa, synthetic construct
AASPGGPAKLI

SEQ ID NO: 18679 - protein, 16 aa, synthetic construct
AASMRWGIRAWDTRQM

SEQ ID NO: 18680 - protein, 10 aa, synthetic construct
AASTNTDKII

SEQ ID NO: 18681 - protein, 10 aa, synthetic construct
AASTYTDRLT

SEQ ID NO: 18682 - protein, 11 aa, synthetic construct
AERPGGSDKLI

SEQ ID NO: 18683 - protein, 15 aa, synthetic construct
EAGGGGYGYWGLHTD

SEQ ID NO: 18684 - protein, 11 aa, synthetic construct
AASHGGSEKLN

SEQ ID NO: 18685 - protein, 10 aa, synthetic construct
EAITYTDKLI

SEQ ID NO: 18686 - protein, 11 aa, synthetic construct
AASPGGSAKIN

SEQ ID NO: 18687 - protein, 15 aa, synthetic construct
AASMRWGDTLLGHPT

SEQ ID NO: 18688 - protein, 10 aa, synthetic construct
AASTYTDTLS

SEQ ID NO: 18689 - protein, 11 aa, synthetic construct
ADSPGGSDKLI

SEQ ID NO: 18690 - protein, 15 aa, synthetic construct
AASMRWDTLLGHPTD

SEQ ID NO: 18691 - protein, 10 aa, synthetic construct
AASTHTDQLI

SEQ ID NO: 18692 - protein, 10 aa, synthetic construct
AASTYTEKHI

SEQ ID NO: 18693 - protein, 14 aa, synthetic construct
AASPGGSAPGTPDR

SEQ ID NO: 18694 - protein, 11 aa, synthetic construct
AASPGGSAQRI

SEQ ID NO: 18695 - protein, 10 aa, synthetic construct
AASTYTDQLF

SEQ ID NO: 18696 - protein, 14 aa, synthetic construct
AASMRWGIRSSDTR

SEQ ID NO: 18697 - protein, 10 aa, synthetic construct
AASTSTEKRI

SEQ ID NO: 18698 - protein, 10 aa, synthetic construct
AASTYTDNLN

SEQ ID NO: 18699 - protein, 16 aa, synthetic construct
AASMRWGIRSWEPRQM

SEQ ID NO: 18700 - protein, 10 aa, synthetic construct
AASTYTDKVF

SEQ ID NO: 18701 - protein, 11 aa, synthetic construct
AASCGDTDKLI

SEQ ID NO: 18702 - protein, 10 aa, synthetic construct
AASTYTDNHI

SEQ ID NO: 18703 - protein, 11 aa, synthetic construct
AASPGGADKLS

SEQ ID NO: 18704 - protein, 11 aa, synthetic construct
AARRGDTYKLI

SEQ ID NO: 18705 - protein, 11 aa, synthetic construct
AASPGGADKVI

SEQ ID NO: 18706 - protein, 11 aa, synthetic construct
AARRGDTVNLI

SEQ ID NO: 18707 - protein, 11 aa, synthetic construct
AARRGDTVKLI

SEQ ID NO: 18708 - protein, 11 aa, synthetic construct
AASPGGADNLI

SEQ ID NO: 18709 - protein, 10 aa, synthetic construct
AASTYTDNIY

SEQ ID NO: 18710 - protein, 11 aa, synthetic construct
AARRGDTGKLI

SEQ ID NO: 18711 - protein, 10 aa, synthetic construct
AESNYTDKLI

SEQ ID NO: 18712 - protein, 10 aa, synthetic construct
AASTYTDQHI

SEQ ID NO: 18713 - protein, 11 aa, synthetic construct
AASPGGADTLI

SEQ ID NO: 18714 - protein, 11 aa, synthetic construct
AARRGDTEQLI

SEQ ID NO: 18715 - protein, 16 aa, synthetic construct
AASMRWGIRSWDIRQM

SEQ ID NO: 18716 - protein, 11 aa, synthetic construct
DASPGGSEKLI

SEQ ID NO: 18717 - protein, 16 aa, synthetic construct
AASMRWGIRSWDHRQM

SEQ ID NO: 18718 - protein, 16 aa, synthetic construct
AESMRWGISSWDTRQM

SEQ ID NO: 18719 - protein, 11 aa, synthetic construct
AARRGDTEKLN

SEQ ID NO: 18720 - protein, 10 aa, synthetic construct
AASTYTDNSI

SEQ ID NO: 18721 - protein, 11 aa, synthetic construct
DASRGDTEKLI

SEQ ID NO: 18722 - protein, 11 aa, synthetic construct
AARRGDTEKHI

SEQ ID NO: 18723 - protein, 15 aa, synthetic construct
AASPGGATATGDSTP

SEQ ID NO: 18724 - protein, 14 aa, synthetic construct
AASMRWGIRSWATR

SEQ ID NO: 18725 - protein, 12 aa, synthetic construct
AASMRWGIRSTH

SEQ ID NO: 18726 - protein, 11 aa, synthetic construct
AASPRGSDKHI

SEQ ID NO: 18727 - protein, 11 aa, synthetic construct
AARPGGSDKII

SEQ ID NO: 18728 - protein, 11 aa, synthetic construct
AASRGGTDKHI

SEQ ID NO: 18729 - protein, 11 aa, synthetic construct
AASRGDTDKIN

SEQ ID NO: 18730 - protein, 15 aa, synthetic construct
AARGGGYGYWDSTPI

SEQ ID NO: 18731 - protein, 11 aa, synthetic construct
AAIPGGSEKLI

SEQ ID NO: 18732 - protein, 16 aa, synthetic construct
QREGGATATGDSIPIN

SEQ ID NO: 18733 - protein, 15 aa, synthetic construct
AARGGGNGNWGLHTD

SEQ ID NO: 18734 - protein, 11 aa, synthetic construct
EASRGDTAKLI

SEQ ID NO: 18735 - protein, 11 aa, synthetic construct
AASRGDTDKIF

SEQ ID NO: 18736 - protein, 11 aa, synthetic construct
AASRGDPINTS

SEQ ID NO: 18737 - protein, 10 aa, synthetic construct
QQVLIPIHSS

SEQ ID NO: 18738 - protein, 10 aa, synthetic construct
AASPYTGQLI

SEQ ID NO: 18739 - protein, 14 aa, synthetic construct
AARGGGYGYRGLHT

SEQ ID NO: 18740 - protein, 11 aa, synthetic construct
AARGGGNGYWG

SEQ ID NO: 18741 - protein, 15 aa, synthetic construct
AARGGGYGYRGLHAD

SEQ ID NO: 18742 - protein, 11 aa, synthetic construct
AASRGDTDKHV

SEQ ID NO: 18743 - protein, 11 aa, synthetic construct
AASRGETDRLI

SEQ ID NO: 18744 - protein, 11 aa, synthetic construct
EASPRGSEKLI

SEQ ID NO: 18745 - protein, 9 aa, synthetic construct
AARGGGYGY

SEQ ID NO: 18746 - protein, 11 aa, synthetic construct
AASRGDTDKGI

SEQ ID NO: 18747 - protein, 15 aa, synthetic construct
QQEGGGYGYWGLHTD

SEQ ID NO: 18748 - protein, 10 aa, synthetic construct
AARGGGYGWW

SEQ ID NO: 18749 - protein, 11 aa, synthetic construct
AASPGGSDKSI

SEQ ID NO: 18750 - protein, 10 aa, synthetic construct
AASPYTDTLI

SEQ ID NO: 18751 - protein, 14 aa, synthetic construct
AARGGGYGSWGVHT

SEQ ID NO: 18752 - protein, 16 aa, synthetic construct
QQEGGATATGDTTPIN

SEQ ID NO: 18753 - protein, 15 aa, synthetic construct
AARGGGYGSWGLTTD

SEQ ID NO: 18754 - protein, 13 aa, synthetic construct
AASRRWGIRSWDT

SEQ ID NO: 18755 - protein, 16 aa, synthetic construct
QQEGGATATGDSTPTN

SEQ ID NO: 18756 - protein, 16 aa, synthetic construct
QQEGGATATGDSTPRN

SEQ ID NO: 18757 - protein, 16 aa, synthetic construct
AASRRWGIRSWDTRHM

SEQ ID NO: 18758 - protein, 15 aa, synthetic construct
AARGGGYGSWGFHTD

SEQ ID NO: 18759 - protein, 11 aa, synthetic construct
AASRGGTDKLT

SEQ ID NO: 18760 - protein, 11 aa, synthetic construct
AASRGGTDNLI

SEQ ID NO: 18761 - protein, 15 aa, synthetic construct
AARGGGYGYWELHTD

SEQ ID NO: 18762 - protein, 11 aa, synthetic construct
AASSGDTDNLI

SEQ ID NO: 18763 - protein, 15 aa, synthetic construct
AARGGGYGYWVLNTD

SEQ ID NO: 18764 - protein, 14 aa, synthetic construct
AASRRWGIRSWATR

SEQ ID NO: 18765 - protein, 11 aa, synthetic construct
EASPVGSDKLI

SEQ ID NO: 18766 - protein, 15 aa, synthetic construct
AARGGGLRLRGTPHR

SEQ ID NO: 18767 - protein, 15 aa, synthetic construct
AARGGGYGYWGTRQM

SEQ ID NO: 18768 - protein, 15 aa, synthetic construct
AARGGGYGYWGRHTD

SEQ ID NO: 18769 - protein, 10 aa, synthetic construct
EASTYPDKLI

SEQ ID NO: 18770 - protein, 15 aa, synthetic construct
AARGGGYGYWGPPTD

SEQ ID NO: 18771 - protein, 15 aa, synthetic construct
AARGGGLRLVGTPHR

SEQ ID NO: 18772 - protein, 16 aa, synthetic construct
AARGGGYGYWGLTPIN

SEQ ID NO: 18773 - protein, 10 aa, synthetic construct
EASPYTDTLI

SEQ ID NO: 18774 - protein, 14 aa, synthetic construct
AARGGGYGYWGLQT

SEQ ID NO: 18775 - protein, 11 aa, synthetic construct
AARGGGLRRLG

SEQ ID NO: 18776 - protein, 11 aa, synthetic construct
AASRGDTDKSI

SEQ ID NO: 18777 - protein, 11 aa, synthetic construct
AASRGDTDKRN

SEQ ID NO: 18778 - protein, 15 aa, synthetic construct
AARGGGLRRLGTPHR

SEQ ID NO: 18779 - protein, 15 aa, synthetic construct
AARGGGYGYWGLNAD

SEQ ID NO: 18780 - protein, 11 aa, synthetic construct
AASRGETDKLN

SEQ ID NO: 18781 - protein, 15 aa, synthetic construct
AARGGGYGYWGLKTD

SEQ ID NO: 18782 - protein, 15 aa, synthetic construct
AAIGGGYGYWGLNTD

SEQ ID NO: 18783 - protein, 11 aa, synthetic construct
AASRGDTDKLD

SEQ ID NO: 18784 - protein, 15 aa, synthetic construct
AARGGGYGYWGIQTD

SEQ ID NO: 18785 - protein, 16 aa, synthetic construct
RQEGGATATGDSTPIN

SEQ ID NO: 18786 - protein, 11 aa, synthetic construct
AASQGGSDKLI

SEQ ID NO: 18787 - protein, 11 aa, synthetic construct
AASRGETDNLI

SEQ ID NO: 18788 - protein, 16 aa, synthetic construct
AAIMRWGIRSWDTRQM

SEQ ID NO: 18789 - protein, 10 aa, synthetic construct
GASTYTDKLI

SEQ ID NO: 18790 - protein, 11 aa, synthetic construct
AASSGDTDQLI

SEQ ID NO: 18791 - protein, 12 aa, synthetic construct
AARGGGYGYWGH

SEQ ID NO: 18792 - protein, 10 aa, synthetic construct
AAITYTDKHI

SEQ ID NO: 18793 - protein, 11 aa, synthetic construct
AASPGVSDKLN

SEQ ID NO: 18794 - protein, 10 aa, synthetic construct
EASTYTYKII

SEQ ID NO: 18795 - protein, 11 aa, synthetic construct
AALRGDTDKLI

SEQ ID NO: 18796 - protein, 10 aa, synthetic construct
EASTYTDQLI

SEQ ID NO: 18797 - protein, 14 aa, synthetic construct
AARGGGSGSGGLHT

SEQ ID NO: 18798 - protein, 10 aa, synthetic construct
EASTYTDNLI

SEQ ID NO: 18799 - protein, 15 aa, synthetic construct
AARGGGSGSWGLPTD

SEQ ID NO: 18800 - protein, 11 aa, synthetic construct
AASRGDSDQLI

SEQ ID NO: 18801 - protein, 4 aa, synthetic construct
AARG

SEQ ID NO: 18802 - protein, 11 aa, synthetic construct
AASPVGSDKPI

SEQ ID NO: 18803 - protein, 10 aa, synthetic construct
QQAEGTPITH

SEQ ID NO: 18804 - protein, 16 aa, synthetic construct
AASRSWGIRSWDTRQM

SEQ ID NO: 18805 - protein, 11 aa, synthetic construct
QQAEGTPINST

SEQ ID NO: 18806 - protein, 15 aa, synthetic construct
AASRRWGLRSWDTRQ

SEQ ID NO: 18807 - protein, 14 aa, synthetic construct
AARGGGYAYWGLHT

SEQ ID NO: 18808 - protein, 11 aa, synthetic construct
QQAEGPPINSS

SEQ ID NO: 18809 - protein, 11 aa, synthetic construct
AARGGGYAYWG

SEQ ID NO: 18810 - protein, 11 aa, synthetic construct
AASRGDTAKLL

SEQ ID NO: 18811 - protein, 11 aa, synthetic construct
QLAEGTPINSS

SEQ ID NO: 18812 - protein, 10 aa, synthetic construct
EASTYTDKLS

SEQ ID NO: 18813 - protein, 10 aa, synthetic construct
EASTYTDKLF

SEQ ID NO: 18814 - protein, 11 aa, synthetic construct
AASPVGSYKII

SEQ ID NO: 18815 - protein, 11 aa, synthetic construct
AASRGDSEKLI

SEQ ID NO: 18816 - protein, 10 aa, synthetic construct
AARGGGYAPG

SEQ ID NO: 18817 - protein, 7 aa, synthetic construct
AARGGGY

SEQ ID NO: 18818 - protein, 15 aa, synthetic construct
AARGGGSGYWGLRTD

SEQ ID NO: 18819 - protein, 11 aa, synthetic construct
AASRGGSDKRI

SEQ ID NO: 18820 - protein, 10 aa, synthetic construct
EASTYTDKHI

SEQ ID NO: 18821 - protein, 11 aa, synthetic construct
AASRGGSDKPI

SEQ ID NO: 18822 - protein, 10 aa, synthetic construct
EASTYTDILI

SEQ ID NO: 18823 - protein, 10 aa, synthetic construct
EASTYNDKLI

SEQ ID NO: 18824 - protein, 11 aa, synthetic construct
AASRGDTAELI

SEQ ID NO: 18825 - protein, 11 aa, synthetic construct
AASRGDTAQLF

SEQ ID NO: 18826 - protein, 11 aa, synthetic construct
AASRGDTAQRI

SEQ ID NO: 18827 - protein, 9 aa, synthetic construct
AARGGGSGD

SEQ ID NO: 18828 - protein, 15 aa, synthetic construct
AARGGGYGDGGLHTD

SEQ ID NO: 18829 - protein, 16 aa, synthetic construct
AASRRWGIRSWDTRRM

SEQ ID NO: 18830 - protein, 11 aa, synthetic construct
EASRGDTDTLI

SEQ ID NO: 18831 - protein, 15 aa, synthetic construct
AARGGGYGSGGLNTD

SEQ ID NO: 18832 - protein, 14 aa, synthetic construct
AARGGGYGSGGLHT

SEQ ID NO: 18833 - protein, 10 aa, synthetic construct
QQEGGATATG

SEQ ID NO: 18834 - protein, 16 aa, synthetic construct
AASRWWGIRSWDTRQM

SEQ ID NO: 18835 - protein, 11 aa, synthetic construct
AASRGDTDHLN

SEQ ID NO: 18836 - protein, 16 aa, synthetic construct
QQEGGATAPGDSTPIN

SEQ ID NO: 18837 - protein, 11 aa, synthetic construct
LQAEGTPINSS

SEQ ID NO: 18838 - protein, 11 aa, synthetic construct
AASPRGADKLI

SEQ ID NO: 18839 - protein, 11 aa, synthetic construct
EASRGDTHKLI

SEQ ID NO: 18840 - protein, 11 aa, synthetic construct
AASRGDTDHLF

SEQ ID NO: 18841 - protein, 11 aa, synthetic construct
AASRGDTDHHI

SEQ ID NO: 18842 - protein, 16 aa, synthetic construct
QQEGGAPATGDSTPIN

SEQ ID NO: 18843 - protein, 16 aa, synthetic construct
QQEGGAAATGDSTPIN

SEQ ID NO: 18844 - protein, 15 aa, synthetic construct
AARGGAPATGDSTPI

SEQ ID NO: 18845 - protein, 11 aa, synthetic construct
AASPRGSDKII

SEQ ID NO: 18846 - protein, 11 aa, synthetic construct
EASRGETDKLI

SEQ ID NO: 18847 - protein, 14 aa, synthetic construct
AARGGGSGDWGLHT

SEQ ID NO: 18848 - protein, 11 aa, synthetic construct
AASRWDTDKLI

SEQ ID NO: 18849 - protein, 11 aa, synthetic construct
AASPRGSDKPI

SEQ ID NO: 18850 - protein, 15 aa, synthetic construct
AARGGGYGFWGLHTD

SEQ ID NO: 18851 - protein, 11 aa, synthetic construct
AASPRGSDQLI

SEQ ID NO: 18852 - protein, 15 aa, synthetic construct
AARGGGYGDWVLHTD

SEQ ID NO: 18853 - protein, 15 aa, synthetic construct
AARGGGSGDWGLPTD

SEQ ID NO: 18854 - protein, 11 aa, synthetic construct
AASPRGSEKLI

SEQ ID NO: 18855 - protein, 11 aa, synthetic construct
AASRGDTATLI

SEQ ID NO: 18856 - protein, 10 aa, synthetic construct
AASPYTDKLF

SEQ ID NO: 18857 - protein, 15 aa, synthetic construct
PARGGGYGYWGLHTD

SEQ ID NO: 18858 - protein, 15 aa, synthetic construct
AARGGGYGYWVLPTD

SEQ ID NO: 18859 - protein, 10 aa, synthetic construct
EASPYTDKLN

SEQ ID NO: 18860 - protein, 10 aa, synthetic construct
AASSYTDKLL

SEQ ID NO: 18861 - protein, 15 aa, synthetic construct
GARGGGYGYWGLHTD

SEQ ID NO: 18862 - protein, 11 aa, synthetic construct
AASPGGSEKLS

SEQ ID NO: 18863 - protein, 11 aa, synthetic construct
AASRGDTEKLS

SEQ ID NO: 18864 - protein, 16 aa, synthetic construct
EASMRWGIRSWYTRQM

SEQ ID NO: 18865 - protein, 16 aa, synthetic construct
AARMRWGIRSWDTRLM

SEQ ID NO: 18866 - protein, 11 aa, synthetic construct
AASRGDTEKII

SEQ ID NO: 18867 - protein, 11 aa, synthetic construct
AASRGTTDKLI

SEQ ID NO: 18868 - protein, 16 aa, synthetic construct
AARMRWGIRSWDTRKM

SEQ ID NO: 18869 - protein, 11 aa, synthetic construct
AASRGDTEKFI

SEQ ID NO: 18870 - protein, 16 aa, synthetic construct
AARMRWGIRSWATRQM

SEQ ID NO: 18871 - protein, 11 aa, synthetic construct
AARGGDTDQLI

SEQ ID NO: 18872 - protein, 7 aa, synthetic construct
AARGGGE

SEQ ID NO: 18873 - protein, 11 aa, synthetic construct
AASRGDTEELI

SEQ ID NO: 18874 - protein, 14 aa, synthetic construct
SKYEVGDTLLGHPT

SEQ ID NO: 18875 - protein, 11 aa, synthetic construct
AARGGDTDNSS

SEQ ID NO: 18876 - protein, 11 aa, synthetic construct
AASRGDTTKLI

SEQ ID NO: 18877 - protein, 11 aa, synthetic construct
AASPGGSERLF

SEQ ID NO: 18878 - protein, 10 aa, synthetic construct
AASSYTDNLF

SEQ ID NO: 18879 - protein, 11 aa, synthetic construct
AASPGGSETPI

SEQ ID NO: 18880 - protein, 15 aa, synthetic construct
AAGGGGYGYRGLHTD

SEQ ID NO: 18881 - protein, 11 aa, synthetic construct
EASPRGSDKLI

SEQ ID NO: 18882 - protein, 10 aa, synthetic construct
SKQRGHRETH

SEQ ID NO: 18883 - protein, 10 aa, synthetic construct
AASSYTDKLF

SEQ ID NO: 18884 - protein, 10 aa, synthetic construct
AASTYTVQLI

SEQ ID NO: 18885 - protein, 10 aa, synthetic construct
AASSYTDKII

SEQ ID NO: 18886 - protein, 15 aa, synthetic construct
AAGGGGYGYWGLHTN

SEQ ID NO: 18887 - protein, 11 aa, synthetic construct
AARHGGSDKLI

SEQ ID NO: 18888 - protein, 15 aa, synthetic construct
AAGGGGYGYWGLPTD

SEQ ID NO: 18889 - protein, 15 aa, synthetic construct
AAGGGGYGYWGVHTD

SEQ ID NO: 18890 - protein, 11 aa, synthetic construct
EASPGGSDILI

SEQ ID NO: 18891 - protein, 16 aa, synthetic construct
AARMRWGIRSWGLHTD

SEQ ID NO: 18892 - protein, 11 aa, synthetic construct
AASRGDTEKLV

SEQ ID NO: 18893 - protein, 11 aa, synthetic construct
AASRGDTDTLF

SEQ ID NO: 18894 - protein, 11 aa, synthetic construct
AASRGDTEKPI

SEQ ID NO: 18895 - protein, 11 aa, synthetic construct
EARTWGSDKLI

SEQ ID NO: 18896 - protein, 11 aa, synthetic construct
AARGGGATAPG

SEQ ID NO: 18897 - protein, 11 aa, synthetic construct
AASRGDTEYLI

SEQ ID NO: 18898 - protein, 11 aa, synthetic construct
AASPGGSDKVS

SEQ ID NO: 18899 - protein, 6 aa, synthetic construct
AARGGG

SEQ ID NO: 18900 - protein, 14 aa, synthetic construct
VARGGGYGYWGLHT

SEQ ID NO: 18901 - protein, 11 aa, synthetic construct
AASPGGSDNLF

SEQ ID NO: 18902 - protein, 11 aa, synthetic construct
AASPGGSDNLL

SEQ ID NO: 18903 - protein, 11 aa, synthetic construct
AASPGGSDNLV

SEQ ID NO: 18904 - protein, 11 aa, synthetic construct
AASRGDTERLI

SEQ ID NO: 18905 - protein, 11 aa, synthetic construct
AARPGGADKLI

SEQ ID NO: 18906 - protein, 11 aa, synthetic construct
AASPGGSDNVI

SEQ ID NO: 18907 - protein, 11 aa, synthetic construct
AASPGGSDPLI

SEQ ID NO: 18908 - protein, 11 aa, synthetic construct
EASIGDTDKLI

SEQ ID NO: 18909 - protein, 4 aa, synthetic construct
GAGG

SEQ ID NO: 18910 - protein, 11 aa, synthetic construct
AASPGGSDQLN

SEQ ID NO: 18911 - protein, 14 aa, synthetic construct
AARGGGCGYWGLHT

SEQ ID NO: 18912 - protein, 11 aa, synthetic construct
AASRGDTEKRS

SEQ ID NO: 18913 - protein, 11 aa, synthetic construct
TASPGGSEKLI

SEQ ID NO: 18914 - protein, 16 aa, synthetic construct
EASLRWGIRSWDTRQM

SEQ ID NO: 18915 - protein, 11 aa, synthetic construct
TASPGGSDKPI

SEQ ID NO: 18916 - protein, 14 aa, synthetic construct
AASTCTGGHTDKLI

SEQ ID NO: 18917 - protein, 11 aa, synthetic construct
AASRGDADKLT

SEQ ID NO: 18918 - protein, 11 aa, synthetic construct
AASPGGSEILI

SEQ ID NO: 18919 - protein, 16 aa, synthetic construct
EASMRGGIRSWDTRQM

SEQ ID NO: 18920 - protein, 10 aa, synthetic construct
AASTCTDQLI

SEQ ID NO: 18921 - protein, 11 aa, synthetic construct
AASPGGSEKDI

SEQ ID NO: 18922 - protein, 16 aa, synthetic construct
TASMRWGIRSWDTRQM

SEQ ID NO: 18923 - protein, 16 aa, synthetic construct
AARMRWGRRSWETRQM

SEQ ID NO: 18924 - protein, 15 aa, synthetic construct
AARGGGFGYWGLHTD

SEQ ID NO: 18925 - protein, 6 aa, synthetic construct
AARAGG

SEQ ID NO: 18926 - protein, 14 aa, synthetic construct
AARGWGYGYWGLHT

SEQ ID NO: 18927 - protein, 11 aa, synthetic construct
AASPGGSVQLI

SEQ ID NO: 18928 - protein, 15 aa, synthetic construct
AARGGATPTGDSTPI

SEQ ID NO: 18929 - protein, 14 aa, synthetic construct
AARGGATLLGHPTD

SEQ ID NO: 18930 - protein, 11 aa, synthetic construct
EASPGGSEKPI

SEQ ID NO: 18931 - protein, 11 aa, synthetic construct
AASREDTDQLI

SEQ ID NO: 18932 - protein, 11 aa, synthetic construct
EESPGGSDKLI

SEQ ID NO: 18933 - protein, 15 aa, synthetic construct
AASSPSYVGGDRPLI

SEQ ID NO: 18934 - protein, 11 aa, synthetic construct
AARGWGYGYWG

SEQ ID NO: 18935 - protein, 11 aa, synthetic construct
SASRGDTEKLI

SEQ ID NO: 18936 - protein, 11 aa, synthetic construct
AASRGDTDQLF

SEQ ID NO: 18937 - protein, 11 aa, synthetic construct
AASRGDPDKLN

SEQ ID NO: 18938 - protein, 14 aa, synthetic construct
AARGGSYGYWGLHT

SEQ ID NO: 18939 - protein, 11 aa, synthetic construct
AAGRGDTDKLN

SEQ ID NO: 18940 - protein, 11 aa, synthetic construct
EASPGGSDQLI

SEQ ID NO: 18941 - protein, 15 aa, synthetic construct
AARGGGLRLLGPPHR

SEQ ID NO: 18942 - protein, 11 aa, synthetic construct
EASPGGSQKLI

SEQ ID NO: 18943 - protein, 11 aa, synthetic construct
AASSGGSEKLI

SEQ ID NO: 18944 - protein, 15 aa, synthetic construct
AARGGGLRLLGTRHR

SEQ ID NO: 18945 - protein, 11 aa, synthetic construct
AAGRGDTDRLI

SEQ ID NO: 18946 - protein, 11 aa, synthetic construct
AASRADTEKLI

SEQ ID NO: 18947 - protein, 11 aa, synthetic construct
AARGGMGPINS

SEQ ID NO: 18948 - protein, 11 aa, synthetic construct
SASPGGSEKLI

SEQ ID NO: 18949 - protein, 14 aa, synthetic construct
EASPGGYAPGTPDR

SEQ ID NO: 18950 - protein, 11 aa, synthetic construct
EASPGGYDKLI

SEQ ID NO: 18951 - protein, 14 aa, synthetic construct
AARGGGYSYWGLHT

SEQ ID NO: 18952 - protein, 11 aa, synthetic construct
AASRGDTDQLY

SEQ ID NO: 18953 - protein, 11 aa, synthetic construct
AASPGGSVKPI

SEQ ID NO: 18954 - protein, 11 aa, synthetic construct
AASRGDTVQLI

SEQ ID NO: 18955 - protein, 11 aa, synthetic construct
AAGPGGSDKLF

SEQ ID NO: 18956 - protein, 11 aa, synthetic construct
AASPGGSNKPI

SEQ ID NO: 18957 - protein, 11 aa, synthetic construct
AASRGDPAQLI

SEQ ID NO: 18958 - protein, 11 aa, synthetic construct
AASRGDTVKLV

SEQ ID NO: 18959 - protein, 11 aa, synthetic construct
AASRGDNDKLI

SEQ ID NO: 18960 - protein, 16 aa, synthetic construct
AARGGGGYGYWGLHTD

SEQ ID NO: 18961 - protein, 10 aa, synthetic construct
EESTYTDKLI

SEQ ID NO: 18962 - protein, 16 aa, synthetic construct
AASRRGGIRSWDTRQM

SEQ ID NO: 18963 - protein, 14 aa, synthetic construct
AARGRGYGYWGLHT

SEQ ID NO: 18964 - protein, 15 aa, synthetic construct
AARGVGYGYWGLHTD

SEQ ID NO: 18965 - protein, 14 aa, synthetic construct
AARGVGYGYWGLHT

SEQ ID NO: 18966 - protein, 11 aa, synthetic construct
AARGGDPKNSS

SEQ ID NO: 18967 - protein, 10 aa, synthetic construct
AASPGGSTPI

SEQ ID NO: 18968 - protein, 10 aa, synthetic construct
AASTYTDKLD

SEQ ID NO: 18969 - protein, 11 aa, synthetic construct
AASRGGSDYLI

SEQ ID NO: 18970 - protein, 11 aa, synthetic construct
AASRGHTDKHI

SEQ ID NO: 18971 - protein, 11 aa, synthetic construct
AASRGHTDELI

SEQ ID NO: 18972 - protein, 15 aa, synthetic construct
AASRGGYGYWGLHTD

SEQ ID NO: 18973 - protein, 11 aa, synthetic construct
AASRGGSDSLL

SEQ ID NO: 18974 - protein, 10 aa, synthetic construct
AASTYTDKQI

SEQ ID NO: 18975 - protein, 11 aa, synthetic construct
AASRGVTPKLI

SEQ ID NO: 18976 - protein, 10 aa, synthetic construct
AASTYTDKRF

SEQ ID NO: 18977 - protein, 11 aa, synthetic construct
AASRGVTAKLI

SEQ ID NO: 18978 - protein, 11 aa, synthetic construct
AASRGSTDKLI

SEQ ID NO: 18979 - protein, 11 aa, synthetic construct
AASRGGSDNVR

SEQ ID NO: 18980 - protein, 11 aa, synthetic construct
AASRGGSDNLI

SEQ ID NO: 18981 - protein, 10 aa, synthetic construct
AASTYTDKPT

SEQ ID NO: 18982 - protein, 11 aa, synthetic construct
AASRGGSDKVI

SEQ ID NO: 18983 - protein, 11 aa, synthetic construct
AASRGVTDKHI

SEQ ID NO: 18984 - protein, 11 aa, synthetic construct
AASRGGSEILI

SEQ ID NO: 18985 - protein, 11 aa, synthetic construct
AASRGGTAKVI

SEQ ID NO: 18986 - protein, 11 aa, synthetic construct
AASRGPTAKLI

SEQ ID NO: 18987 - protein, 11 aa, synthetic construct
AASRGVSDTLI

SEQ ID NO: 18988 - protein, 12 aa, synthetic construct
AASTYTDKNNFV

SEQ ID NO: 18989 - protein, 10 aa, synthetic construct
AASTYTDKLR

SEQ ID NO: 18990 - protein, 11 aa, synthetic construct
AASRGHTEKLI

SEQ ID NO: 18991 - protein, 11 aa, synthetic construct
AASRGGTGKLI

SEQ ID NO: 18992 - protein, 11 aa, synthetic construct
AASRGGSYKHF

SEQ ID NO: 18993 - protein, 14 aa, synthetic construct
AASRGGYAPGTPDR

SEQ ID NO: 18994 - protein, 14 aa, synthetic construct
AASRGGSYNVLCGN

SEQ ID NO: 18995 - protein, 11 aa, synthetic construct
AASRGGSVKLI

SEQ ID NO: 18996 - protein, 11 aa, synthetic construct
AASRGVSDKLI

SEQ ID NO: 18997 - protein, 11 aa, synthetic construct
AASRGGTAKRI

SEQ ID NO: 18998 - protein, 11 aa, synthetic construct
AASRGHTDKRI

SEQ ID NO: 18999 - protein, 11 aa, synthetic construct
AASRGHTHKLI

SEQ ID NO: 19000 - protein, 11 aa, synthetic construct
AASRGGTDKLF

SEQ ID NO: 19001 - protein, 11 aa, synthetic construct
AASRGSTETLI

SEQ ID NO: 19002 - protein, 11 aa, synthetic construct
AASRGHTDKNN

SEQ ID NO: 19003 - protein, 11 aa, synthetic construct
AASRGNTEKLI

SEQ ID NO: 19004 - protein, 11 aa, synthetic construct
AASRGGSGKLI

SEQ ID NO: 19005 - protein, 11 aa, synthetic construct
AASRGGSEKLF

SEQ ID NO: 19006 - protein, 15 aa, synthetic construct
AASRGGYGSWGLHTD

SEQ ID NO: 19007 - protein, 11 aa, synthetic construct
AASRGHTDKLN

SEQ ID NO: 19008 - protein, 10 aa, synthetic construct
AASTYTDKRN

SEQ ID NO: 19009 - protein, 10 aa, synthetic construct
AASTYTDKLK

SEQ ID NO: 19010 - protein, 10 aa, synthetic construct
AASTYTDKNN

SEQ ID NO: 19011 - protein, 11 aa, synthetic construct
AASRGHSEQLI

SEQ ID NO: 19012 - protein, 10 aa, synthetic construct
AASTYTDRLF

SEQ ID NO: 19013 - protein, 10 aa, synthetic construct
AASTYTDNLC

SEQ ID NO: 19014 - protein, 10 aa, synthetic construct
AASTYTGKII

SEQ ID NO: 19015 - protein, 11 aa, synthetic construct
AASRGDTVKRL

SEQ ID NO: 19016 - protein, 11 aa, synthetic construct
AASRGDTVNLI

SEQ ID NO: 19017 - protein, 11 aa, synthetic construct
AASRGDTVTLI

SEQ ID NO: 19018 - protein, 10 aa, synthetic construct
AASTYTEQLS

SEQ ID NO: 19019 - protein, 11 aa, synthetic construct
AASRGDTYILI

SEQ ID NO: 19020 - protein, 11 aa, synthetic construct
AASRGDTYKII

SEQ ID NO: 19021 - protein, 11 aa, synthetic construct
AASRGDTYKNI

SEQ ID NO: 19022 - protein, 11 aa, synthetic construct
AASRGDTYKVI

SEQ ID NO: 19023 - protein, 10 aa, synthetic construct
AASTYTENRI

SEQ ID NO: 19024 - protein, 10 aa, synthetic construct
AASTYTENNI

SEQ ID NO: 19025 - protein, 15 aa, synthetic construct
AASRGDYGYWGLHTD

SEQ ID NO: 19026 - protein, 10 aa, synthetic construct
AASTYTENHI

SEQ ID NO: 19027 - protein, 6 aa, synthetic construct
AASRGE

SEQ ID NO: 19028 - protein, 11 aa, synthetic construct
AASRGEADKLI

SEQ ID NO: 19029 - protein, 11 aa, synthetic construct
AASRGEAEKLI

SEQ ID NO: 19030 - protein, 10 aa, synthetic construct
AASTYTEKRF

SEQ ID NO: 19031 - protein, 10 aa, synthetic construct
AASTYTEKQI

SEQ ID NO: 19032 - protein, 15 aa, synthetic construct
AASRGEGKQRRRAHR

SEQ ID NO: 19033 - protein, 10 aa, synthetic construct
AASTYTEKLY

SEQ ID NO: 19034 - protein, 11 aa, synthetic construct
AASRGEPAKRI

SEQ ID NO: 19035 - protein, 11 aa, synthetic construct
AASRGEPDKLS

SEQ ID NO: 19036 - protein, 11 aa, synthetic construct
AASRGEPDQLI

SEQ ID NO: 19037 - protein, 11 aa, synthetic construct
AASRGEPISSA

SEQ ID NO: 19038 - protein, 11 aa, synthetic construct
AASRGESDKLN

SEQ ID NO: 19039 - protein, 15 aa, synthetic construct
AASRGESVKHFYGQG

SEQ ID NO: 19040 - protein, 10 aa, synthetic construct
AASTYTETLS

SEQ ID NO: 19041 - protein, 11 aa, synthetic construct
AASRGDTVKPI

SEQ ID NO: 19042 - protein, 11 aa, synthetic construct
AASRGETATLF

SEQ ID NO: 19043 - protein, 11 aa, synthetic construct
AASRGDTVKLN

SEQ ID NO: 19044 - protein, 10 aa, synthetic construct
AASTYTVQHI

SEQ ID NO: 19045 - protein, 11 aa, synthetic construct
AASRGDTNQLI

SEQ ID NO: 19046 - protein, 10 aa, synthetic construct
AASRGDTPDR

SEQ ID NO: 19047 - protein, 11 aa, synthetic construct
AASRGDTQKHI

SEQ ID NO: 19048 - protein, 9 aa, synthetic construct
AASTYTVKR

SEQ ID NO: 19049 - protein, 10 aa, synthetic construct
AASTYTVKLS

SEQ ID NO: 19050 - protein, 11 aa, synthetic construct
AASRGDTQRLM

SEQ ID NO: 19051 - protein, 11 aa, synthetic construct
AASRGDTRKLI

SEQ ID NO: 19052 - protein, 10 aa, synthetic construct
AASTYTVKLF

SEQ ID NO: 19053 - protein, 10 aa, synthetic construct
AASRGDTRQI

SEQ ID NO: 19054 - protein, 10 aa, synthetic construct
AASRGDTRRM

SEQ ID NO: 19055 - protein, 11 aa, synthetic construct
AASRGDTSHLI

SEQ ID NO: 19056 - protein, 10 aa, synthetic construct
AASTYTSNLI

SEQ ID NO: 19057 - protein, 11 aa, synthetic construct
AASRGDTSKII

SEQ ID NO: 19058 - protein, 11 aa, synthetic construct
AASRGDTSKLN

SEQ ID NO: 19059 - protein, 10 aa, synthetic construct
AASTYTPKNI

SEQ ID NO: 19060 - protein, 10 aa, synthetic construct
AASTYTNKLN

SEQ ID NO: 19061 - protein, 11 aa, synthetic construct
AASRGDTSKRI

SEQ ID NO: 19062 - protein, 10 aa, synthetic construct
AASTYTNKII

SEQ ID NO: 19063 - protein, 10 aa, synthetic construct
AASTYTKKLI

SEQ ID NO: 19064 - protein, 11 aa, synthetic construct
AASRGDTVKLM

SEQ ID NO: 19065 - protein, 10 aa, synthetic construct
AASTYTGRLI

SEQ ID NO: 19066 - protein, 9 aa, synthetic construct
AASTYTGQL

SEQ ID NO: 19067 - protein, 10 aa, synthetic construct
AASTYTGNRS

SEQ ID NO: 19068 - protein, 10 aa, synthetic construct
AASTYTGKLK

SEQ ID NO: 19069 - protein, 10 aa, synthetic construct
AASTYTEKLT

SEQ ID NO: 19070 - protein, 11 aa, synthetic construct
AASRGETDHLY

SEQ ID NO: 19071 - protein, 10 aa, synthetic construct
AASTYTDNLF

SEQ ID NO: 19072 - protein, 11 aa, synthetic construct
AASRGGAETVS

SEQ ID NO: 19073 - protein, 11 aa, synthetic construct
AASRGGAPAPG

SEQ ID NO: 19074 - protein, 10 aa, synthetic construct
AASTYTDQHN

SEQ ID NO: 19075 - protein, 11 aa, synthetic construct
AASRGGATAPG

SEQ ID NO: 19076 - protein, 15 aa, synthetic construct
AASRGGATAPGDSTP

SEQ ID NO: 19077 - protein, 11 aa, synthetic construct
AASRGGATATG

SEQ ID NO: 19078 - protein, 11 aa, synthetic construct
AASRGGAVHLF

SEQ ID NO: 19079 - protein, 15 aa, synthetic construct
AASRGGDTLLGHPTD

SEQ ID NO: 19080 - protein, 10 aa, synthetic construct
AASTYTDNVF

SEQ ID NO: 19081 - protein, 15 aa, synthetic construct
AASRGGGYAHGTPDR

SEQ ID NO: 19082 - protein, 11 aa, synthetic construct
AASRGGGYGSW

SEQ ID NO: 19083 - protein, 11 aa, synthetic construct
AASRGGLRLLG

SEQ ID NO: 19084 - protein, 15 aa, synthetic construct
AASRGGLRLPGTPHR

SEQ ID NO: 19085 - protein, 15 aa, synthetic construct
AASRGGLRVVGAPHR

SEQ ID NO: 19086 - protein, 10 aa, synthetic construct
AASRGGRETR

SEQ ID NO: 19087 - protein, 11 aa, synthetic construct
AASRGGSAHRS

SEQ ID NO: 19088 - protein, 11 aa, synthetic construct
AASRGGSAKLI

SEQ ID NO: 19089 - protein, 11 aa, synthetic construct
AASRGGSAKRI

SEQ ID NO: 19090 - protein, 10 aa, synthetic construct
AASTYTDNRI

SEQ ID NO: 19091 - protein, 10 aa, synthetic construct
AASTYTDNPI

SEQ ID NO: 19092 - protein, 11 aa, synthetic construct
AASRGGSANLS

SEQ ID NO: 19093 - protein, 10 aa, synthetic construct
AASTYTDNLS

SEQ ID NO: 19094 - protein, 11 aa, synthetic construct
AASRGGSDHLF

SEQ ID NO: 19095 - protein, 13 aa, synthetic construct
AASRGGSDKGSYG

SEQ ID NO: 19096 - protein, 11 aa, synthetic construct
AASRGGSDKLF

SEQ ID NO: 19097 - protein, 11 aa, synthetic construct
AASRGGSDKLN

SEQ ID NO: 19098 - protein, 15 aa, synthetic construct
AASRGGAMATGDSTP

SEQ ID NO: 19099 - protein, 6 aa, synthetic construct
AASRGG

SEQ ID NO: 19100 - protein, 11 aa, synthetic construct
AASRGETDKRI

SEQ ID NO: 19101 - protein, 11 aa, synthetic construct
AASRGETGNLL

SEQ ID NO: 19102 - protein, 10 aa, synthetic construct
AASTYTEILT

SEQ ID NO: 19103 - protein, 10 aa, synthetic construct
AASTYTEHLL

SEQ ID NO: 19104 - protein, 10 aa, synthetic construct
AASTYTDYLI

SEQ ID NO: 19105 - protein, 10 aa, synthetic construct
AASTYTDTVI

SEQ ID NO: 19106 - protein, 11 aa, synthetic construct
AASRGETDNLN

SEQ ID NO: 19107 - protein, 10 aa, synthetic construct
AASTYTDTRI

SEQ ID NO: 19108 - protein, 11 aa, synthetic construct
AASRGETDNRL

SEQ ID NO: 19109 - protein, 11 aa, synthetic construct
AASRGETDQSI

SEQ ID NO: 19110 - protein, 10 aa, synthetic construct
AASTYTDTLF

SEQ ID NO: 19111 - protein, 10 aa, synthetic construct
AASTYTDRVL

SEQ ID NO: 19112 - protein, 10 aa, synthetic construct
AASTYTDRRI

SEQ ID NO: 19113 - protein, 10 aa, synthetic construct
AASTYTDRPI

SEQ ID NO: 19114 - protein, 11 aa, synthetic construct
AASRGETDRLM

SEQ ID NO: 19115 - protein, 11 aa, synthetic construct
AASRGETDTLI

SEQ ID NO: 19116 - protein, 11 aa, synthetic construct
AASRGVTSKLI

SEQ ID NO: 19117 - protein, 11 aa, synthetic construct
AASRGETEELF

SEQ ID NO: 19118 - protein, 10 aa, synthetic construct
AASTYTDRHI

SEQ ID NO: 19119 - protein, 11 aa, synthetic construct
AASRGETEKLF

SEQ ID NO: 19120 - protein, 11 aa, synthetic construct
AASRGETEKLI

SEQ ID NO: 19121 - protein, 10 aa, synthetic construct
AASTYTDQVI

SEQ ID NO: 19122 - protein, 10 aa, synthetic construct
AASTYTDQLY

SEQ ID NO: 19123 - protein, 10 aa, synthetic construct
AASTYTDQLV

SEQ ID NO: 19124 - protein, 10 aa, synthetic construct
AASTYTDQLN

SEQ ID NO: 19125 - protein, 11 aa, synthetic construct
AASRGETENLI

SEQ ID NO: 19126 - protein, 10 aa, synthetic construct
AASTYTDQLL

SEQ ID NO: 19127 - protein, 10 aa, synthetic construct
AASTYTDKLC

SEQ ID NO: 19128 - protein, 10 aa, synthetic construct
AASTYSEQLI

SEQ ID NO: 19129 - protein, 11 aa, synthetic construct
AASRGYTDKII

SEQ ID NO: 19130 - protein, 10 aa, synthetic construct
AASTYTDKKI

SEQ ID NO: 19131 - protein, 11 aa, synthetic construct
AASSGDTDTLI

SEQ ID NO: 19132 - protein, 11 aa, synthetic construct
AASTPHTHKNI

SEQ ID NO: 19133 - protein, 9 aa, synthetic construct
AASTNTYTN

SEQ ID NO: 19134 - protein, 11 aa, synthetic construct
AASSGDTEKLI

SEQ ID NO: 19135 - protein, 10 aa, synthetic construct
AASTNTYQLI

SEQ ID NO: 19136 - protein, 11 aa, synthetic construct
AASSGDTEKVI

SEQ ID NO: 19137 - protein, 11 aa, synthetic construct
AASSGDTENLI

SEQ ID NO: 19138 - protein, 10 aa, synthetic construct
AASTNTEKII

SEQ ID NO: 19139 - protein, 11 aa, synthetic construct
AASSGDTGKLN

SEQ ID NO: 19140 - protein, 10 aa, synthetic construct
AASSGDTRQR

SEQ ID NO: 19141 - protein, 10 aa, synthetic construct
AASTNTDTLI

SEQ ID NO: 19142 - protein, 11 aa, synthetic construct
AASSGDTVKLI

SEQ ID NO: 19143 - protein, 10 aa, synthetic construct
AASTNTDKLL

SEQ ID NO: 19144 - protein, 11 aa, synthetic construct
AASSGETDRLF

SEQ ID NO: 19145 - protein, 11 aa, synthetic construct
AASSGETDYHI

SEQ ID NO: 19146 - protein, 10 aa, synthetic construct
AASTNTDKDI

SEQ ID NO: 19147 - protein, 11 aa, synthetic construct
AASSGGSDKLN

SEQ ID NO: 19148 - protein, 8 aa, synthetic construct
AASTNTDK

SEQ ID NO: 19149 - protein, 10 aa, synthetic construct
AASTNTDILI

SEQ ID NO: 19150 - protein, 10 aa, synthetic construct
AASTNTDIHI

SEQ ID NO: 19151 - protein, 11 aa, synthetic construct
AASSGGSDKLT

SEQ ID NO: 19152 - protein, 10 aa, synthetic construct
AASTNTAKLI

SEQ ID NO: 19153 - protein, 10 aa, synthetic construct
AASTNSDTII

SEQ ID NO: 19154 - protein, 10 aa, synthetic construct
AASTNPETLS

SEQ ID NO: 19155 - protein, 10 aa, synthetic construct
AASTNPDKLS

SEQ ID NO: 19156 - protein, 10 aa, synthetic construct
AASTNNENSS

SEQ ID NO: 19157 - protein, 10 aa, synthetic construct
AASTNNDKLI

SEQ ID NO: 19158 - protein, 10 aa, synthetic construct
AASTNNDKII

SEQ ID NO: 19159 - protein, 15 aa, synthetic construct
AASSGGSGELVGGGG

SEQ ID NO: 19160 - protein, 11 aa, synthetic construct
AASTPPTHKHI

SEQ ID NO: 19161 - protein, 11 aa, synthetic construct
AASTRGSDKHI

SEQ ID NO: 19162 - protein, 11 aa, synthetic construct
AASSGDTDTLF

SEQ ID NO: 19163 - protein, 10 aa, synthetic construct
AASTSPEKRI

SEQ ID NO: 19164 - protein, 8 aa, synthetic construct
AASRWWWL

SEQ ID NO: 19165 - protein, 11 aa, synthetic construct
AASRWYTDKII

SEQ ID NO: 19166 - protein, 10 aa, synthetic construct
AASRYPYANC

SEQ ID NO: 19167 - protein, 10 aa, synthetic construct
AASRYTDQRN

SEQ ID NO: 19168 - protein, 10 aa, synthetic construct
AASTSTDKLF

SEQ ID NO: 19169 - protein, 10 aa, synthetic construct
AASRYTPKLL

SEQ ID NO: 19170 - protein, 11 aa, synthetic construct
AASSGDPDKLI

SEQ ID NO: 19171 - protein, 7 aa, synthetic construct
AASSGDT

SEQ ID NO: 19172 - protein, 11 aa, synthetic construct
AASSGDTAKLI

SEQ ID NO: 19173 - protein, 10 aa, synthetic construct
AASTSTDKHI

SEQ ID NO: 19174 - protein, 10 aa, synthetic construct
AASTSTDHLI

SEQ ID NO: 19175 - protein, 11 aa, synthetic construct
AASSGDTANRI

SEQ ID NO: 19176 - protein, 9 aa, synthetic construct
AASTSTAKH

SEQ ID NO: 19177 - protein, 10 aa, synthetic construct
AASTSPDTLM

SEQ ID NO: 19178 - protein, 11 aa, synthetic construct
AASTRGSDKLI

SEQ ID NO: 19179 - protein, 11 aa, synthetic construct
AASSGDTDKGF

SEQ ID NO: 19180 - protein, 11 aa, synthetic construct
AASSGDTDKII

SEQ ID NO: 19181 - protein, 10 aa, synthetic construct
AASTSPDKLI

SEQ ID NO: 19182 - protein, 10 aa, synthetic construct
AASTSPAKLI

SEQ ID NO: 19183 - protein, 11 aa, synthetic construct
AASSGDTDKVI

SEQ ID NO: 19184 - protein, 11 aa, synthetic construct
AASSGDTDKVS

SEQ ID NO: 19185 - protein, 10 aa, synthetic construct
AASTRWGLLF

SEQ ID NO: 19186 - protein, 16 aa, synthetic construct
AASTRWGIRSWDTPQM

SEQ ID NO: 19187 - protein, 16 aa, synthetic construct
AASTRWGIRSSDTRQM

SEQ ID NO: 19188 - protein, 16 aa, synthetic construct
AASTRWGIHSWDTRQM

SEQ ID NO: 19189 - protein, 16 aa, synthetic construct
AASTRRGIRSTHTRHM

SEQ ID NO: 19190 - protein, 11 aa, synthetic construct
AASSGDTDNSS

SEQ ID NO: 19191 - protein, 11 aa, synthetic construct
AASTRHTDKLI

SEQ ID NO: 19192 - protein, 10 aa, synthetic construct
AASTLTEKLI

SEQ ID NO: 19193 - protein, 11 aa, synthetic construct
AASSGVTDNLV

SEQ ID NO: 19194 - protein, 15 aa, synthetic construct
AASTLRADHILFEQA

SEQ ID NO: 19195 - protein, 10 aa, synthetic construct
AASTDTDIRI

SEQ ID NO: 19196 - protein, 13 aa, synthetic construct
AASSYVGTGDTLI

SEQ ID NO: 19197 - protein, 11 aa, synthetic construct
AASTAANEKLI

SEQ ID NO: 19198 - protein, 8 aa, synthetic construct
AASTASEQ

SEQ ID NO: 19199 - protein, 11 aa, synthetic construct
AASTGDTDQLI

SEQ ID NO: 19200 - protein, 11 aa, synthetic construct
AASTGDTDQHI

SEQ ID NO: 19201 - protein, 11 aa, synthetic construct
AASTGDTDNLN

SEQ ID NO: 19202 - protein, 10 aa, synthetic construct
AASTCADQLI

SEQ ID NO: 19203 - protein, 11 aa, synthetic construct
AASTGDTDKLM

SEQ ID NO: 19204 - protein, 15 aa, synthetic construct
AASTCLLGDGPAKLI

SEQ ID NO: 19205 - protein, 15 aa, synthetic construct
AASTCLLGDGPDKLI

SEQ ID NO: 19206 - protein, 10 aa, synthetic construct
AASTCTDKII

SEQ ID NO: 19207 - protein, 10 aa, synthetic construct
AASTCTEILI

SEQ ID NO: 19208 - protein, 10 aa, synthetic construct
AASTDSYKIM

SEQ ID NO: 19209 - protein, 10 aa, synthetic construct
AASTDTDKDF

SEQ ID NO: 19210 - protein, 10 aa, synthetic construct
AASSYTENLI

SEQ ID NO: 19211 - protein, 10 aa, synthetic construct
AASTDTDKII

SEQ ID NO: 19212 - protein, 10 aa, synthetic construct
AASTDTDNLI

SEQ ID NO: 19213 - protein, 10 aa, synthetic construct
AASTDTEKLI

SEQ ID NO: 19214 - protein, 10 aa, synthetic construct
AASTDTEQLL

SEQ ID NO: 19215 - protein, 10 aa, synthetic construct
AASTFSDNLI

SEQ ID NO: 19216 - protein, 10 aa, synthetic construct
AASTFTDKLF

SEQ ID NO: 19217 - protein, 10 aa, synthetic construct
AASTFTDNLI

SEQ ID NO: 19218 - protein, 10 aa, synthetic construct
AASTFTDRLI

SEQ ID NO: 19219 - protein, 10 aa, synthetic construct
AASTFTDTLI

SEQ ID NO: 19220 - protein, 14 aa, synthetic construct
AASTFTDTVRFGQG

SEQ ID NO: 19221 - protein, 11 aa, synthetic construct
AASTGASDKLI

SEQ ID NO: 19222 - protein, 11 aa, synthetic construct
AASTGATDKLI

SEQ ID NO: 19223 - protein, 11 aa, synthetic construct
AASTGDSDKLI

SEQ ID NO: 19224 - protein, 10 aa, synthetic construct
AASSYTETLF

SEQ ID NO: 19225 - protein, 10 aa, synthetic construct
AASSYTDRLS

SEQ ID NO: 19226 - protein, 11 aa, synthetic construct
AASTLDTDKLF

SEQ ID NO: 19227 - protein, 10 aa, synthetic construct
AASSYRAHLF

SEQ ID NO: 19228 - protein, 10 aa, synthetic construct
AASTKTDKLI

SEQ ID NO: 19229 - protein, 9 aa, synthetic construct
AASSRSRKS

SEQ ID NO: 19230 - protein, 10 aa, synthetic construct
AASTKTAKLI

SEQ ID NO: 19231 - protein, 15 aa, synthetic construct
AASSRWGIRSWYTRQ

SEQ ID NO: 19232 - protein, 10 aa, synthetic construct
AASSSTDNSN

SEQ ID NO: 19233 - protein, 10 aa, synthetic construct
AASTIPIHSS

SEQ ID NO: 19234 - protein, 10 aa, synthetic construct
AASTHTGTLI

SEQ ID NO: 19235 - protein, 10 aa, synthetic construct
AASTHTEKLI

SEQ ID NO: 19236 - protein, 10 aa, synthetic construct
AASSVTDQVN

SEQ ID NO: 19237 - protein, 10 aa, synthetic construct
AASSYNDKLI

SEQ ID NO: 19238 - protein, 10 aa, synthetic construct
AASSYPDKLF

SEQ ID NO: 19239 - protein, 10 aa, synthetic construct
AASSYPDKRI

SEQ ID NO: 19240 - protein, 10 aa, synthetic construct
AASTHTDKII

SEQ ID NO: 19241 - protein, 8 aa, synthetic construct
AASSYSDN

SEQ ID NO: 19242 - protein, 10 aa, synthetic construct
AASSYTDRLI

SEQ ID NO: 19243 - protein, 10 aa, synthetic construct
AASTHTAKLI

SEQ ID NO: 19244 - protein, 11 aa, synthetic construct
AASTGHTHTLI

SEQ ID NO: 19245 - protein, 10 aa, synthetic construct
AASSYSDNLI

SEQ ID NO: 19246 - protein, 11 aa, synthetic construct
AASTGGYDKLI

SEQ ID NO: 19247 - protein, 11 aa, synthetic construct
AASTGGSDKTI

SEQ ID NO: 19248 - protein, 10 aa, synthetic construct
AASSYSNKLI

SEQ ID NO: 19249 - protein, 10 aa, synthetic construct
AASSYTDKIF

SEQ ID NO: 19250 - protein, 11 aa, synthetic construct
AASTGGSDKII

SEQ ID NO: 19251 - protein, 11 aa, synthetic construct
AASTGGSDKHI

SEQ ID NO: 19252 - protein, 11 aa, synthetic construct
AASTGGADKHI

SEQ ID NO: 19253 - protein, 11 aa, synthetic construct
AASTGETDKLI

SEQ ID NO: 19254 - protein, 10 aa, synthetic construct
AASSYTDNLI

SEQ ID NO: 19255 - protein, 10 aa, synthetic construct
AASSYTDQLI

SEQ ID NO: 19256 - protein, 16 aa, synthetic construct
AASRWWWIRSRDTREM

SEQ ID NO: 19257 - protein, 10 aa, synthetic construct
AASTSTEQQL

SEQ ID NO: 19258 - protein, 10 aa, synthetic construct
AASTSTGRLI

SEQ ID NO: 19259 - protein, 14 aa, synthetic construct
AASRRWGIRSWDSR

SEQ ID NO: 19260 - protein, 16 aa, synthetic construct
AASRRWGIRFWDTRQM

SEQ ID NO: 19261 - protein, 16 aa, synthetic construct
AASRRWGIRSCDTRQM

SEQ ID NO: 19262 - protein, 10 aa, synthetic construct
AASTYTDDLI

SEQ ID NO: 19263 - protein, 7 aa, synthetic construct
AASTYTD

SEQ ID NO: 19264 - protein, 16 aa, synthetic construct
AASRRWGIRSSDTRQM

SEQ ID NO: 19265 - protein, 16 aa, synthetic construct
AASRRWGIRSWAPRPM

SEQ ID NO: 19266 - protein, 16 aa, synthetic construct
AASRRWGIRSWATRPM

SEQ ID NO: 19267 - protein, 16 aa, synthetic construct
AASRRWGIRSWDARQM

SEQ ID NO: 19268 - protein, 10 aa, synthetic construct
AASTYTAKPI

SEQ ID NO: 19269 - protein, 10 aa, synthetic construct
AASTYTAKLV

SEQ ID NO: 19270 - protein, 16 aa, synthetic construct
AASRRWGIRSWDPRPM

SEQ ID NO: 19271 - protein, 10 aa, synthetic construct
AASTYTAKLN

SEQ ID NO: 19272 - protein, 10 aa, synthetic construct
AASTYTAKLM

SEQ ID NO: 19273 - protein, 10 aa, synthetic construct
AASTYTAKLF

SEQ ID NO: 19274 - protein, 16 aa, synthetic construct
AASRRWGIRAWDTRQM

SEQ ID NO: 19275 - protein, 10 aa, synthetic construct
AASTYTAKHI

SEQ ID NO: 19276 - protein, 10 aa, synthetic construct
AASTYSGKSF

SEQ ID NO: 19277 - protein, 10 aa, synthetic construct
AASTYSEKHI

SEQ ID NO: 19278 - protein, 10 aa, synthetic construct
AASTYSEILI

SEQ ID NO: 19279 - protein, 16 aa, synthetic construct
AASRRWGIRSWETRQM

SEQ ID NO: 19280 - protein, 10 aa, synthetic construct
AASTYSDQLN

SEQ ID NO: 19281 - protein, 10 aa, synthetic construct
AASTYSDNLI

SEQ ID NO: 19282 - protein, 10 aa, synthetic construct
AASTYSDKRF

SEQ ID NO: 19283 - protein, 10 aa, synthetic construct
AASTYSDKLF

SEQ ID NO: 19284 - protein, 13 aa, synthetic construct
AASTYSARVCFGN

SEQ ID NO: 19285 - protein, 16 aa, synthetic construct
AASRRWGIRSWGLHTD

SEQ ID NO: 19286 - protein, 16 aa, synthetic construct
AASRRWGIRSWGTRQM

SEQ ID NO: 19287 - protein, 16 aa, synthetic construct
AASRRWGIRSWTTRQM

SEQ ID NO: 19288 - protein, 15 aa, synthetic construct
AASRRWGIRAWEPRQ

SEQ ID NO: 19289 - protein, 15 aa, synthetic construct
AASRRWGIRAWDTRQ

SEQ ID NO: 19290 - protein, 10 aa, synthetic construct
AASTYPVKLI

SEQ ID NO: 19291 - protein, 11 aa, synthetic construct
AASRRDTETLI

SEQ ID NO: 19292 - protein, 11 aa, synthetic construct
AASRGYTEKHI

SEQ ID NO: 19293 - protein, 11 aa, synthetic construct
AASRGYTEKLI

SEQ ID NO: 19294 - protein, 11 aa, synthetic construct
AASRGYTEKLN

SEQ ID NO: 19295 - protein, 11 aa, synthetic construct
AASRGYTENLI

SEQ ID NO: 19296 - protein, 5 aa, synthetic construct
AASRR

SEQ ID NO: 19297 - protein, 15 aa, synthetic construct
AASRRAGKPASDPRQ

SEQ ID NO: 19298 - protein, 10 aa, synthetic construct
AASTYTDKIH

SEQ ID NO: 19299 - protein, 10 aa, synthetic construct
AASRRCAINS

SEQ ID NO: 19300 - protein, 15 aa, synthetic construct
AASRRCGIRSWDTRQ

SEQ ID NO: 19301 - protein, 10 aa, synthetic construct
AASTYTDKHV

SEQ ID NO: 19302 - protein, 16 aa, synthetic construct
AASRRCGVRCWDTRQM

SEQ ID NO: 19303 - protein, 11 aa, synthetic construct
AASRRDTDKII

SEQ ID NO: 19304 - protein, 11 aa, synthetic construct
AASRRDTDKVI

SEQ ID NO: 19305 - protein, 11 aa, synthetic construct
AASRRDTNKIN

SEQ ID NO: 19306 - protein, 15 aa, synthetic construct
AASRRWGIGYWDTRQ

SEQ ID NO: 19307 - protein, 16 aa, synthetic construct
AASRRGGIRSWDTRPM

SEQ ID NO: 19308 - protein, 10 aa, synthetic construct
AASTYTDILF

SEQ ID NO: 19309 - protein, 10 aa, synthetic construct
AASTYTDIGI

SEQ ID NO: 19310 - protein, 16 aa, synthetic construct
AASRRGGKPTWEPRPM

SEQ ID NO: 19311 - protein, 10 aa, synthetic construct
AASTYTDHLD

SEQ ID NO: 19312 - protein, 11 aa, synthetic construct
AASRRHTDKII

SEQ ID NO: 19313 - protein, 16 aa, synthetic construct
AASRRRGIRSWDTRQM

SEQ ID NO: 19314 - protein, 16 aa, synthetic construct
AASRRRGRRSWDTRQM

SEQ ID NO: 19315 - protein, 10 aa, synthetic construct
AASRRSWKQA

SEQ ID NO: 19316 - protein, 10 aa, synthetic construct
AASRRTGIRI

SEQ ID NO: 19317 - protein, 11 aa, synthetic construct
AASRRVTDKLI

SEQ ID NO: 19318 - protein, 7 aa, synthetic construct
AASRRWC

SEQ ID NO: 19319 - protein, 16 aa, synthetic construct
AASRRWGIGSWDTRQM

SEQ ID NO: 19320 - protein, 16 aa, synthetic construct
AASRRWGLRGWDTRPM

SEQ ID NO: 19321 - protein, 10 aa, synthetic construct
AASTYPSQII

SEQ ID NO: 19322 - protein, 11 aa, synthetic construct
AASTWETNQLI

SEQ ID NO: 19323 - protein, 11 aa, synthetic construct
AASRVYTDKLI

SEQ ID NO: 19324 - protein, 16 aa, synthetic construct
AASRSWGKRSWDTRPM

SEQ ID NO: 19325 - protein, 16 aa, synthetic construct
AASRSWGLRSWDTRQM

SEQ ID NO: 19326 - protein, 11 aa, synthetic construct
AASRVDPDNIN

SEQ ID NO: 19327 - protein, 11 aa, synthetic construct
AASRVDSEKLI

SEQ ID NO: 19328 - protein, 11 aa, synthetic construct
AASRVDTAKLI

SEQ ID NO: 19329 - protein, 10 aa, synthetic construct
AASTYNDELI

SEQ ID NO: 19330 - protein, 11 aa, synthetic construct
AASRVDTDKII

SEQ ID NO: 19331 - protein, 11 aa, synthetic construct
AASRVDTDKLN

SEQ ID NO: 19332 - protein, 11 aa, synthetic construct
AASRVDTDNLS

SEQ ID NO: 19333 - protein, 10 aa, synthetic construct
AASTYKHKLN

SEQ ID NO: 19334 - protein, 11 aa, synthetic construct
AASRVDTYKLI

SEQ ID NO: 19335 - protein, 11 aa, synthetic construct
AASRVVSSILS

SEQ ID NO: 19336 - protein, 10 aa, synthetic construct
AASTYKDKLI

SEQ ID NO: 19337 - protein, 5 aa, synthetic construct
AASRW

SEQ ID NO: 19338 - protein, 10 aa, synthetic construct
AASTYNDKIN

SEQ ID NO: 19339 - protein, 11 aa, synthetic construct
AASRWDTDKHI

SEQ ID NO: 19340 - protein, 11 aa, synthetic construct
AASRWDTDYPI

SEQ ID NO: 19341 - protein, 11 aa, synthetic construct
AASRWDTEKLI

SEQ ID NO: 19342 - protein, 12 aa, synthetic construct
AASTYIDKDNFV

SEQ ID NO: 19343 - protein, 11 aa, synthetic construct
AASRWGSDKLI

SEQ ID NO: 19344 - protein, 11 aa, synthetic construct
AASRWGSVKLI

SEQ ID NO: 19345 - protein, 6 aa, synthetic construct
AASRWL

SEQ ID NO: 19346 - protein, 10 aa, synthetic construct
AASTYDDKLI

SEQ ID NO: 19347 - protein, 10 aa, synthetic construct
AASTYADKLV

SEQ ID NO: 19348 - protein, 11 aa, synthetic construct
AASRWSTDKSI

SEQ ID NO: 19349 - protein, 11 aa, synthetic construct
AASRWSTHKLI

SEQ ID NO: 19350 - protein, 10 aa, synthetic construct
AASTYADKLF

SEQ ID NO: 19351 - protein, 16 aa, synthetic construct
AASRWWGIRSWETRQM

SEQ ID NO: 19352 - protein, 14 aa, synthetic construct
AASRSWGIRTWDTR

SEQ ID NO: 19353 - protein, 10 aa, synthetic construct
AASTYNDKLF

SEQ ID NO: 19354 - protein, 10 aa, synthetic construct
AASTYPETLS

SEQ ID NO: 19355 - protein, 16 aa, synthetic construct
AASRRWGTRTWDTRQM

SEQ ID NO: 19356 - protein, 10 aa, synthetic construct
AASTYPDTLI

SEQ ID NO: 19357 - protein, 11 aa, synthetic construct
AASRRWGMRSW

SEQ ID NO: 19358 - protein, 16 aa, synthetic construct
AASRRWGRRSWDSRQM

SEQ ID NO: 19359 - protein, 10 aa, synthetic construct
AASTYPDNHI

SEQ ID NO: 19360 - protein, 10 aa, synthetic construct
AASTYPDKRS

SEQ ID NO: 19361 - protein, 14 aa, synthetic construct
AASRRWGRRSWDTR

SEQ ID NO: 19362 - protein, 10 aa, synthetic construct
AASTYPDKLF

SEQ ID NO: 19363 - protein, 10 aa, synthetic construct
AASTYPDKIN

SEQ ID NO: 19364 - protein, 10 aa, synthetic construct
AASTYPDKHI

SEQ ID NO: 19365 - protein, 14 aa, synthetic construct
AASTYPDIRIVGQG

SEQ ID NO: 19366 - protein, 10 aa, synthetic construct
AASTYPDILS

SEQ ID NO: 19367 - protein, 16 aa, synthetic construct
AASRRWGRRSWDTRQM

SEQ ID NO: 19368 - protein, 14 aa, synthetic construct
AASRRWGSRAGDTR

SEQ ID NO: 19369 - protein, 10 aa, synthetic construct
AASTYPDHLI

SEQ ID NO: 19370 - protein, 16 aa, synthetic construct
AASRSWGIRSWATRQM

SEQ ID NO: 19371 - protein, 15 aa, synthetic construct
AASRRWGYAPGTPDR

SEQ ID NO: 19372 - protein, 10 aa, synthetic construct
AASTYPAKLI

SEQ ID NO: 19373 - protein, 12 aa, synthetic construct
AASRRWNTLLGH

SEQ ID NO: 19374 - protein, 10 aa, synthetic construct
AASTYPAKLF

SEQ ID NO: 19375 - protein, 16 aa, synthetic construct
AASRRWRIRSWDTRQM

SEQ ID NO: 19376 - protein, 10 aa, synthetic construct
AASTYNVKLI

SEQ ID NO: 19377 - protein, 11 aa, synthetic construct
AASRRYTDKLN

SEQ ID NO: 19378 - protein, 10 aa, synthetic construct
AASTYNHKHN

SEQ ID NO: 19379 - protein, 16 aa, synthetic construct
AASRSWGERSSDTRQM

SEQ ID NO: 19380 - protein, 10 aa, synthetic construct
AASTYNEKLI

SEQ ID NO: 19381 - protein, 14 aa, synthetic construct
AASRSWGIGSWESR

SEQ ID NO: 19382 - protein, 10 aa, synthetic construct
AASTYNDKPI

SEQ ID NO: 19383 - protein, 10 aa, synthetic construct
AASTYNDKLL

SEQ ID NO: 19384 - protein, 10 aa, synthetic construct
AASSYTDKIS

SEQ ID NO: 19385 - protein, 16 aa, synthetic construct
APRGLPSRGVHTDKLI

SEQ ID NO: 19386 - protein, 9 aa, synthetic construct
AASTYTYIL

SEQ ID NO: 19387 - protein, 16 aa, synthetic construct
EASKRWGIRSWDTRQM

SEQ ID NO: 19388 - protein, 10 aa, synthetic construct
EASTDTDKLI

SEQ ID NO: 19389 - protein, 11 aa, synthetic construct
EASTGDTDKLN

SEQ ID NO: 19390 - protein, 10 aa, synthetic construct
EASTIPINSS

SEQ ID NO: 19391 - protein, 10 aa, synthetic construct
EASTITVKVI

SEQ ID NO: 19392 - protein, 10 aa, synthetic construct
EASTNTDKII

SEQ ID NO: 19393 - protein, 10 aa, synthetic construct
EASTNTDQII

SEQ ID NO: 19394 - protein, 10 aa, synthetic construct
EASTNTYKII

SEQ ID NO: 19395 - protein, 10 aa, synthetic construct
EASTNTYKLN

SEQ ID NO: 19396 - protein, 11 aa, synthetic construct
EASTRYTAKLI

SEQ ID NO: 19397 - protein, 11 aa, synthetic construct
EASTVDTDKLI

SEQ ID NO: 19398 - protein, 10 aa, synthetic construct
EASTYSDKLF

SEQ ID NO: 19399 - protein, 10 aa, synthetic construct
EASTYTDKDS

SEQ ID NO: 19400 - protein, 12 aa, synthetic construct
EASTYTDKHNFV

SEQ ID NO: 19401 - protein, 10 aa, synthetic construct
EASTYTDKIN

SEQ ID NO: 19402 - protein, 15 aa, synthetic construct
EASTYTDKLLGHPTD

SEQ ID NO: 19403 - protein, 10 aa, synthetic construct
EASTYTDKLT

SEQ ID NO: 19404 - protein, 10 aa, synthetic construct
EASTYTDKNI

SEQ ID NO: 19405 - protein, 10 aa, synthetic construct
EASTYTDKRI

SEQ ID NO: 19406 - protein, 10 aa, synthetic construct
EASTYTDNHI

SEQ ID NO: 19407 - protein, 10 aa, synthetic construct
EASTYTDNLS

SEQ ID NO: 19408 - protein, 10 aa, synthetic construct
EASTYTDNSS

SEQ ID NO: 19409 - protein, 10 aa, synthetic construct
EASTYTDRLI

SEQ ID NO: 19410 - protein, 10 aa, synthetic construct
EASTYTEKLI

SEQ ID NO: 19411 - protein, 10 aa, synthetic construct
EASTYTEKLM

SEQ ID NO: 19412 - protein, 10 aa, synthetic construct
EASTYTEQRL

SEQ ID NO: 19413 - protein, 11 aa, synthetic construct
EASTYTHKHKF

SEQ ID NO: 19414 - protein, 10 aa, synthetic construct
EASTYTHKLN

SEQ ID NO: 19415 - protein, 10 aa, synthetic construct
EASTDTDKII

SEQ ID NO: 19416 - protein, 14 aa, synthetic construct
EASTCTGGHTDKLI

SEQ ID NO: 19417 - protein, 11 aa, synthetic construct
EASTADTDKLI

SEQ ID NO: 19418 - protein, 11 aa, synthetic construct
EASRGYTDKLI

SEQ ID NO: 19419 - protein, 11 aa, synthetic construct
EASRGDTSNLI

SEQ ID NO: 19420 - protein, 11 aa, synthetic construct
EASRGDTYKLI

SEQ ID NO: 19421 - protein, 11 aa, synthetic construct
EASRGDTYKLV

SEQ ID NO: 19422 - protein, 8 aa, synthetic construct
EASRGETG

SEQ ID NO: 19423 - protein, 11 aa, synthetic construct
EASRGGSDKLF

SEQ ID NO: 19424 - protein, 11 aa, synthetic construct
EASRGGSDKLI

SEQ ID NO: 19425 - protein, 11 aa, synthetic construct
EASRGGSDKLN

SEQ ID NO: 19426 - protein, 11 aa, synthetic construct
EASRGGTDKLT

SEQ ID NO: 19427 - protein, 11 aa, synthetic construct
EASRGHTDHRL

SEQ ID NO: 19428 - protein, 11 aa, synthetic construct
EASRGHTDKII

SEQ ID NO: 19429 - protein, 11 aa, synthetic construct
EASRGHTDKLS

SEQ ID NO: 19430 - protein, 11 aa, synthetic construct
EASRGNTNKLI

SEQ ID NO: 19431 - protein, 11 aa, synthetic construct
EASRRDTDKLN

SEQ ID NO: 19432 - protein, 10 aa, synthetic construct
EASSYTDKLS

SEQ ID NO: 19433 - protein, 16 aa, synthetic construct
EASRRWGIRSWDPRQM

SEQ ID NO: 19434 - protein, 16 aa, synthetic construct
EASRRWGIRSWDTRQM

SEQ ID NO: 19435 - protein, 11 aa, synthetic construct
EASRSDTDKLI

SEQ ID NO: 19436 - protein, 11 aa, synthetic construct
EASRVDTAILI

SEQ ID NO: 19437 - protein, 11 aa, synthetic construct
EASRVDTDKLI

SEQ ID NO: 19438 - protein, 11 aa, synthetic construct
EASRVDTDTLI

SEQ ID NO: 19439 - protein, 10 aa, synthetic construct
EASRYPDKLI

SEQ ID NO: 19440 - protein, 10 aa, synthetic construct
EASRYSDKLR

SEQ ID NO: 19441 - protein, 16 aa, synthetic construct
EASSRWGIRSWDTRQM

SEQ ID NO: 19442 - protein, 16 aa, synthetic construct
EASSTWGIRTWDTRHM

SEQ ID NO: 19443 - protein, 10 aa, synthetic construct
EASSYPDKLI

SEQ ID NO: 19444 - protein, 10 aa, synthetic construct
EASSYTDKLF

SEQ ID NO: 19445 - protein, 10 aa, synthetic construct
EASTYTYILI

SEQ ID NO: 19446 - protein, 10 aa, synthetic construct
EASTYTYKLS

SEQ ID NO: 19447 - protein, 7 aa, synthetic construct
EASVGGW

SEQ ID NO: 19448 - protein, 10 aa, synthetic construct
EGSSYTDKLI

SEQ ID NO: 19449 - protein, 11 aa, synthetic construct
EESRGDTAKII

SEQ ID NO: 19450 - protein, 11 aa, synthetic construct
EESRGDTAKLI

SEQ ID NO: 19451 - protein, 11 aa, synthetic construct
EESRGDTDKLI

SEQ ID NO: 19452 - protein, 11 aa, synthetic construct
EESRGDTDKLN

SEQ ID NO: 19453 - protein, 11 aa, synthetic construct
EESRGDTDKLS

SEQ ID NO: 19454 - protein, 11 aa, synthetic construct
EESRGDTVKHI

SEQ ID NO: 19455 - protein, 11 aa, synthetic construct
EESTGDTDKLI

SEQ ID NO: 19456 - protein, 10 aa, synthetic construct
EESTYTVKLI

SEQ ID NO: 19457 - protein, 10 aa, synthetic construct
EESTYTYKLK

SEQ ID NO: 19458 - protein, 11 aa, synthetic construct
EETPGGSEKLF

SEQ ID NO: 19459 - protein, 15 aa, synthetic construct
EETTNTNKKNFGKEK

SEQ ID NO: 19460 - protein, 10 aa, synthetic construct
EGGWAGGRGR

SEQ ID NO: 19461 - protein, 14 aa, synthetic construct
EPRGWGYANWGLHT

SEQ ID NO: 19462 - protein, 11 aa, synthetic construct
EESPGGSVKLI

SEQ ID NO: 19463 - protein, 15 aa, synthetic construct
EPRGWGYGYWGLHTD

SEQ ID NO: 19464 - protein, 11 aa, synthetic construct
EPRSGEPDHIN

SEQ ID NO: 19465 - protein, 15 aa, synthetic construct
EPRVEGSGYWGLHTD

SEQ ID NO: 19466 - protein, 11 aa, synthetic construct
EQAEGTPINSS

SEQ ID NO: 19467 - protein, 11 aa, synthetic construct
EQALGDPINPS

SEQ ID NO: 19468 - protein, 11 aa, synthetic construct
EQSRGDTQKHI

SEQ ID NO: 19469 - protein, 10 aa, synthetic construct
EQVLIPINSS

SEQ ID NO: 19470 - protein, 11 aa, synthetic construct
ESIISKVPTIP

SEQ ID NO: 19471 - protein, 11 aa, synthetic construct
ESSHRGSDKLI

SEQ ID NO: 19472 - protein, 11 aa, synthetic construct
ESSPGGSDKLI

SEQ ID NO: 19473 - protein, 11 aa, synthetic construct
ESSPGGSDKLN

SEQ ID NO: 19474 - protein, 11 aa, synthetic construct
ESSPVGSDKLI

SEQ ID NO: 19475 - protein, 11 aa, synthetic construct
EESPGRSAKRI

SEQ ID NO: 19476 - protein, 11 aa, synthetic construct
EESPGGSDKLK

SEQ ID NO: 19477 - protein, 12 aa, synthetic construct
EASVGGYGYWGH

SEQ ID NO: 19478 - protein, 10 aa, synthetic construct
EENTNKNKNN

SEQ ID NO: 19479 - protein, 11 aa, synthetic construct
EATPGASHKNF

SEQ ID NO: 19480 - protein, 11 aa, synthetic construct
EATPGGSDKHI

SEQ ID NO: 19481 - protein, 15 aa, synthetic construct
EATPPPSNKNIYGKN

SEQ ID NO: 19482 - protein, 11 aa, synthetic construct
EATPVGSEKRN

SEQ ID NO: 19483 - protein, 11 aa, synthetic construct
EAVLGDTVKLI

SEQ ID NO: 19484 - protein, 11 aa, synthetic construct
EDSRGDTDKLI

SEQ ID NO: 19485 - protein, 10 aa, synthetic construct
EEGTYTDKLI

SEQ ID NO: 19486 - protein, 11 aa, synthetic construct
EEIGGGYGYWG

SEQ ID NO: 19487 - protein, 10 aa, synthetic construct
EEITYTDKLI

SEQ ID NO: 19488 - protein, 11 aa, synthetic construct
EEIVGKPIKTT

SEQ ID NO: 19489 - protein, 15 aa, synthetic construct
EEKGVGYGNRGHHTD

SEQ ID NO: 19490 - skipped

SEQ ID NO: 19491 - protein, 11 aa, synthetic construct
EERGGGSGYWG

SEQ ID NO: 19492 - protein, 11 aa, synthetic construct
EESPGGSDKHF

SEQ ID NO: 19493 - protein, 14 aa, synthetic construct
EERGGGYGYWGLHT

SEQ ID NO: 19494 - protein, 15 aa, synthetic construct
EERGGGYGYWGLHTD

SEQ ID NO: 19495 - protein, 10 aa, synthetic construct
EERPETDKSF

SEQ ID NO: 19496 - protein, 11 aa, synthetic construct
EESHGGSDKII

SEQ ID NO: 19497 - protein, 11 aa, synthetic construct
EESHGGSDKLI

SEQ ID NO: 19498 - protein, 11 aa, synthetic construct
EESIGDTDKLI

SEQ ID NO: 19499 - protein, 16 aa, synthetic construct
EESMRWGIRSCDTRQM

SEQ ID NO: 19500 - protein, 16 aa, synthetic construct
EESMRWGIRSWDTRQM

SEQ ID NO: 19501 - protein, 16 aa, synthetic construct
EESMRWLIRSWYNLQM

SEQ ID NO: 19502 - protein, 16 aa, synthetic construct
EESMRWWISSCEPRQM

SEQ ID NO: 19503 - protein, 16 aa, synthetic construct
EESMSWGIRSWDTRQM

SEQ ID NO: 19504 - protein, 10 aa, synthetic construct
EESNYNHKLI

SEQ ID NO: 19505 - protein, 11 aa, synthetic construct
EASRGDTSKRI

SEQ ID NO: 19506 - protein, 11 aa, synthetic construct
EASRGDTSKLT

SEQ ID NO: 19507 - protein, 10 aa, synthetic construct
EASRGDTRQM

SEQ ID NO: 19508 - protein, 11 aa, synthetic construct
EASPGGADKLI

SEQ ID NO: 19509 - protein, 16 aa, synthetic construct
EASMSWWIRSWYTRQM

SEQ ID NO: 19510 - protein, 14 aa, synthetic construct
EASMWGGIRSWDPR

SEQ ID NO: 19511 - protein, 11 aa, synthetic construct
EASNGGSDKLI

SEQ ID NO: 19512 - protein, 10 aa, synthetic construct
EASNYNDKLF

SEQ ID NO: 19513 - protein, 10 aa, synthetic construct
EASNYTDQLI

SEQ ID NO: 19514 - protein, 10 aa, synthetic construct
EASNYTYKLI

SEQ ID NO: 19515 - protein, 11 aa, synthetic construct
EASPAGSDKHI

SEQ ID NO: 19516 - protein, 11 aa, synthetic construct
EASPEGSDKLI

SEQ ID NO: 19517 - protein, 11 aa, synthetic construct
EASPGAAEKPN

SEQ ID NO: 19518 - protein, 11 aa, synthetic construct
EASPGASDKII

SEQ ID NO: 19519 - protein, 11 aa, synthetic construct
EASPGDPINSS

SEQ ID NO: 19520 - protein, 11 aa, synthetic construct
EASPGDSDKTY

SEQ ID NO: 19521 - protein, 16 aa, synthetic construct
EASPGGGYGYWGLHTD

SEQ ID NO: 19522 - protein, 16 aa, synthetic construct
EASMSRGRRSWDTRQM

SEQ ID NO: 19523 - protein, 11 aa, synthetic construct
EASPGGPDKLI

SEQ ID NO: 19524 - protein, 11 aa, synthetic construct
EASPGGSAKPI

SEQ ID NO: 19525 - protein, 11 aa, synthetic construct
EASPGGSAQLI

SEQ ID NO: 19526 - protein, 11 aa, synthetic construct
EASPGGSATLF

SEQ ID NO: 19527 - protein, 11 aa, synthetic construct
EASPGGSDELI

SEQ ID NO: 19528 - protein, 11 aa, synthetic construct
EASPGGSDKHI

SEQ ID NO: 19529 - protein, 11 aa, synthetic construct
EASPGGSDKHN

SEQ ID NO: 19530 - protein, 11 aa, synthetic construct
EASPGGSDKLT

SEQ ID NO: 19531 - protein, 11 aa, synthetic construct
EASPGGSDKLY

SEQ ID NO: 19532 - protein, 11 aa, synthetic construct
EASPGGSDKPK

SEQ ID NO: 19533 - protein, 11 aa, synthetic construct
EASPGGSDKPN

SEQ ID NO: 19534 - protein, 11 aa, synthetic construct
EASPGGSDKRI

SEQ ID NO: 19535 - protein, 16 aa, synthetic construct
EASMSWGIRSSDTLQM

SEQ ID NO: 19536 - protein, 16 aa, synthetic construct
EASMRWWIRSWDTRQM

SEQ ID NO: 19537 - protein, 11 aa, synthetic construct
EASPGGSDKSI

SEQ ID NO: 19538 - protein, 16 aa, synthetic construct
EASMRWGIRSCDTRQM

SEQ ID NO: 19539 - protein, 11 aa, synthetic construct
EASLGDTDKSI

SEQ ID NO: 19540 - protein, 11 aa, synthetic construct
EASLGDTDQLF

SEQ ID NO: 19541 - protein, 11 aa, synthetic construct
EASLGGSDKLI

SEQ ID NO: 19542 - protein, 16 aa, synthetic construct
EASLRSGLRSWDTRQM

SEQ ID NO: 19543 - protein, 16 aa, synthetic construct
EASLRWGRRSWDPPQM

SEQ ID NO: 19544 - protein, 11 aa, synthetic construct
EASMGDPINSS

SEQ ID NO: 19545 - protein, 16 aa, synthetic construct
EASMGWGIRSCDSRQM

SEQ ID NO: 19546 - protein, 16 aa, synthetic construct
EASMGWGIRSWDTRQM

SEQ ID NO: 19547 - protein, 14 aa, synthetic construct
EASMRRRKPSWDTP

SEQ ID NO: 19548 - protein, 16 aa, synthetic construct
EASMRVGIRSWDTRPM

SEQ ID NO: 19549 - protein, 16 aa, synthetic construct
EASMRWGIPSWDTLQM

SEQ ID NO: 19550 - protein, 16 aa, synthetic construct
EASMRWGIRPWDTRQM

SEQ ID NO: 19551 - protein, 16 aa, synthetic construct
EASMRWGIRSRGTRQM

SEQ ID NO: 19552 - protein, 16 aa, synthetic construct
EASMRWVIRSWDTRQM

SEQ ID NO: 19553 - protein, 16 aa, synthetic construct
EASMRWGIRSRHTRQM

SEQ ID NO: 19554 - protein, 16 aa, synthetic construct
EASMRWGIRSSDTLQM

SEQ ID NO: 19555 - protein, 16 aa, synthetic construct
EASMRWGIRSWDTLQM

SEQ ID NO: 19556 - protein, 16 aa, synthetic construct
EASMRWGIRSWDTRHM

SEQ ID NO: 19557 - protein, 16 aa, synthetic construct
EASMRWGIRSWDTRPM

SEQ ID NO: 19558 - protein, 16 aa, synthetic construct
EASMRWGIRSWESRQM

SEQ ID NO: 19559 - protein, 15 aa, synthetic construct
EASMRWGIRSWYTRQ

SEQ ID NO: 19560 - protein, 16 aa, synthetic construct
EASMRWGLRSWDTRQM

SEQ ID NO: 19561 - protein, 16 aa, synthetic construct
EASMRWGMRSWDTRQM

SEQ ID NO: 19562 - protein, 16 aa, synthetic construct
EASMRWGRRSWDTRHM

SEQ ID NO: 19563 - protein, 16 aa, synthetic construct
EASMRWGRRSWDTRQM

SEQ ID NO: 19564 - protein, 15 aa, synthetic construct
EASMRWGYAPGTPYR

SEQ ID NO: 19565 - protein, 11 aa, synthetic construct
EASPGGSDKRS

SEQ ID NO: 19566 - protein, 11 aa, synthetic construct
EASPGGSDKVI

SEQ ID NO: 19567 - protein, 11 aa, synthetic construct
EASRGDTGKII

SEQ ID NO: 19568 - protein, 11 aa, synthetic construct
EASRGDTDKLL

SEQ ID NO: 19569 - protein, 11 aa, synthetic construct
EASRGATSKHI

SEQ ID NO: 19570 - protein, 11 aa, synthetic construct
EASRGDADKLI

SEQ ID NO: 19571 - protein, 11 aa, synthetic construct
EASRGDPINSS

SEQ ID NO: 19572 - protein, 11 aa, synthetic construct
EASRGDSANHI

SEQ ID NO: 19573 - protein, 11 aa, synthetic construct
EASRGDSDILI

SEQ ID NO: 19574 - protein, 11 aa, synthetic construct
EASRGDSHKLI

SEQ ID NO: 19575 - protein, 11 aa, synthetic construct
EASRGDTAILI

SEQ ID NO: 19576 - protein, 11 aa, synthetic construct
EASRGDTAQII

SEQ ID NO: 19577 - protein, 11 aa, synthetic construct
EASRGDTDDIN

SEQ ID NO: 19578 - protein, 11 aa, synthetic construct
EASRGDTDILI

SEQ ID NO: 19579 - protein, 11 aa, synthetic construct
EASRGDTDKIT

SEQ ID NO: 19580 - protein, 11 aa, synthetic construct
EASRGDTDKLK

SEQ ID NO: 19581 - protein, 11 aa, synthetic construct
EASRGDTDKLS

SEQ ID NO: 19582 - protein, 11 aa, synthetic construct
EASRGATDNLI

SEQ ID NO: 19583 - protein, 11 aa, synthetic construct
EASRGDTDKLT

SEQ ID NO: 19584 - protein, 11 aa, synthetic construct
EASRGDTDKLY

SEQ ID NO: 19585 - protein, 11 aa, synthetic construct
EASRGDTDKPI

SEQ ID NO: 19586 - protein, 11 aa, synthetic construct
EASRGDTDKRS

SEQ ID NO: 19587 - protein, 11 aa, synthetic construct
EASRGDTDRLF

SEQ ID NO: 19588 - protein, 11 aa, synthetic construct
EASRGDTDSLY

SEQ ID NO: 19589 - protein, 11 aa, synthetic construct
EASRGDTDTHI

SEQ ID NO: 19590 - protein, 11 aa, synthetic construct
EASRGDTDTLF

SEQ ID NO: 19591 - protein, 11 aa, synthetic construct
EASRGDTDTLN

SEQ ID NO: 19592 - protein, 11 aa, synthetic construct
EASRGDTEKHN

SEQ ID NO: 19593 - protein, 11 aa, synthetic construct
EASRGDTEKLS

SEQ ID NO: 19594 - protein, 11 aa, synthetic construct
EASRGDTEKVI

SEQ ID NO: 19595 - protein, 11 aa, synthetic construct
EASRGATEKLI

SEQ ID NO: 19596 - protein, 11 aa, synthetic construct
EASRGATDKLI

SEQ ID NO: 19597 - protein, 11 aa, synthetic construct
EASPGGSDNLI

SEQ ID NO: 19598 - protein, 11 aa, synthetic construct
EASPGGSVKLI

SEQ ID NO: 19599 - protein, 11 aa, synthetic construct
EASPGGSDNPI

SEQ ID NO: 19600 - protein, 11 aa, synthetic construct
EASPGGSDQII

SEQ ID NO: 19601 - protein, 11 aa, synthetic construct
EASPGGSDQLF

SEQ ID NO: 19602 - protein, 11 aa, synthetic construct
EASPGGSDQLY

SEQ ID NO: 19603 - protein, 11 aa, synthetic construct
EASPGGSDRLI

SEQ ID NO: 19604 - protein, 11 aa, synthetic construct
EASPGGSEKLF

SEQ ID NO: 19605 - protein, 11 aa, synthetic construct
EASPGGSEKLY

SEQ ID NO: 19606 - protein, 11 aa, synthetic construct
EASPGGSEKTN

SEQ ID NO: 19607 - protein, 11 aa, synthetic construct
EASPGGSETLI

SEQ ID NO: 19608 - protein, 11 aa, synthetic construct
EASPGGSGKLI

SEQ ID NO: 19609 - protein, 11 aa, synthetic construct
EASPGGSHKLI

SEQ ID NO: 19610 - protein, 11 aa, synthetic construct
EASPGGSLKLI

SEQ ID NO: 19611 - protein, 11 aa, synthetic construct
EASPGGSVKPI

SEQ ID NO: 19612 - protein, 11 aa, synthetic construct
EASREDTDKLI

SEQ ID NO: 19613 - protein, 11 aa, synthetic construct
EASPGGSYKLI

SEQ ID NO: 19614 - protein, 11 aa, synthetic construct
EASPGGSYKQI

SEQ ID NO: 19615 - protein, 11 aa, synthetic construct
EASPGVSDKLI

SEQ ID NO: 19616 - protein, 10 aa, synthetic construct
EASPRGSDKL

SEQ ID NO: 19617 - protein, 11 aa, synthetic construct
EASPRGSDNLI

SEQ ID NO: 19618 - protein, 11 aa, synthetic construct
EASPRGSDNLK

SEQ ID NO: 19619 - protein, 10 aa, synthetic construct
EASPYTDKII

SEQ ID NO: 19620 - protein, 10 aa, synthetic construct
EASPYTYKLI

SEQ ID NO: 19621 - protein, 11 aa, synthetic construct
EASQGRSDKLN

SEQ ID NO: 19622 - protein, 16 aa, synthetic construct
EASQWGCLKRIDRKVN

SEQ ID NO: 19623 - protein, 11 aa, synthetic construct
EASRADTDKII

SEQ ID NO: 19624 - protein, 11 aa, synthetic construct
EASRADTDKLI

SEQ ID NO: 19625 - protein, 11 aa, synthetic construct
ESSRGDTYKGI

SEQ ID NO: 19626 - protein, 11 aa, synthetic construct
ESSRGHTDKLI

SEQ ID NO: 19627 - protein, 11 aa, synthetic construct
ESSRVDTDKQN

SEQ ID NO: 19628 - protein, 16 aa, synthetic construct
SASMRWGIRSSDTDKL

SEQ ID NO: 19629 - protein, 6 aa, synthetic construct
SARMRR

SEQ ID NO: 19630 - protein, 16 aa, synthetic construct
SARMRWGIRSWYTRQM

SEQ ID NO: 19631 - protein, 11 aa, synthetic construct
SARPGGSEKLI

SEQ ID NO: 19632 - protein, 11 aa, synthetic construct
SARRVGSEKLI

SEQ ID NO: 19633 - protein, 10 aa, synthetic construct
SARTYTDKLI

SEQ ID NO: 19634 - protein, 11 aa, synthetic construct
SASAAGSEALI

SEQ ID NO: 19635 - protein, 11 aa, synthetic construct
SASAGGSDKLI

SEQ ID NO: 19636 - protein, 16 aa, synthetic construct
SASGGATATGDSTPIN

SEQ ID NO: 19637 - protein, 11 aa, synthetic construct
SASGGDTDKLI

SEQ ID NO: 19638 - protein, 11 aa, synthetic construct
SASHQGSDKLI

SEQ ID NO: 19639 - protein, 11 aa, synthetic construct
SASIWDTDKNI

SEQ ID NO: 19640 - protein, 15 aa, synthetic construct
SASMRWGILSCDTRQ

SEQ ID NO: 19641 - protein, 16 aa, synthetic construct
SASMRWGIRSWDTREM

SEQ ID NO: 19642 - protein, 15 aa, synthetic construct
SARGGGYGYWGPHTD

SEQ ID NO: 19643 - protein, 16 aa, synthetic construct
SASMRWGIRSWYTRQM

SEQ ID NO: 19644 - protein, 16 aa, synthetic construct
SASMRWGISSWDTRQM

SEQ ID NO: 19645 - protein, 16 aa, synthetic construct
SASMSWGIRSWDSREM

SEQ ID NO: 19646 - protein, 11 aa, synthetic construct
SASPAGSDKLN

SEQ ID NO: 19647 - protein, 11 aa, synthetic construct
SASPGGSDKPI

SEQ ID NO: 19648 - protein, 11 aa, synthetic construct
SASPGGSDKVI

SEQ ID NO: 19649 - protein, 11 aa, synthetic construct
SASPGGSDNLI

SEQ ID NO: 19650 - protein, 11 aa, synthetic construct
SASPGGSHKLI

SEQ ID NO: 19651 - protein, 11 aa, synthetic construct
SASPGVSDKLI

SEQ ID NO: 19652 - protein, 11 aa, synthetic construct
SASPVGSDKPI

SEQ ID NO: 19653 - protein, 11 aa, synthetic construct
SASRGATDKLI

SEQ ID NO: 19654 - protein, 11 aa, synthetic construct
SASRGDADKLI

SEQ ID NO: 19655 - protein, 15 aa, synthetic construct
SARGGGYGYWVLHTD

SEQ ID NO: 19656 - protein, 14 aa, synthetic construct
SARGGGYGYWGLNT

SEQ ID NO: 19657 - protein, 11 aa, synthetic construct
SASRGDTAKLI

SEQ ID NO: 19658 - protein, 9 aa, synthetic construct
QQVLLPINS

SEQ ID NO: 19659 - protein, 11 aa, synthetic construct
QQEGGATGTGE

SEQ ID NO: 19660 - protein, 11 aa, synthetic construct
QQEGGDPINSS

SEQ ID NO: 19661 - protein, 14 aa, synthetic construct
QQEGGDTLLGHPTD

SEQ ID NO: 19662 - protein, 16 aa, synthetic construct
QQEGGGTGSGDSTPIN

SEQ ID NO: 19663 - protein, 13 aa, synthetic construct
QQEGGLRPNHLFS

SEQ ID NO: 19664 - protein, 16 aa, synthetic construct
QQEGGTTATGESTPIN

SEQ ID NO: 19665 - protein, 15 aa, synthetic construct
QQHGGETATGDSTPI

SEQ ID NO: 19666 - protein, 10 aa, synthetic construct
QQLLIPINSS

SEQ ID NO: 19667 - protein, 10 aa, synthetic construct
QQVIIPIKSS

SEQ ID NO: 19668 - protein, 10 aa, synthetic construct
QQVLIPINSA

SEQ ID NO: 19669 - protein, 10 aa, synthetic construct
QQVLIPLNSS

SEQ ID NO: 19670 - protein, 10 aa, synthetic construct
QQVLIQIMSS

SEQ ID NO: 19671 - protein, 10 aa, synthetic construct
QQVPIPINSS

SEQ ID NO: 19672 - protein, 15 aa, synthetic construct
SARGGGYGSGGLHTD

SEQ ID NO: 19673 - protein, 10 aa, synthetic construct
QRVLIPINSS

SEQ ID NO: 19674 - protein, 6 aa, synthetic construct
RAHDSN

SEQ ID NO: 19675 - protein, 11 aa, synthetic construct
RKSTRLTSSHR

SEQ ID NO: 19676 - protein, 11 aa, synthetic construct
RQALGDPINSS

SEQ ID NO: 19677 - protein, 11 aa, synthetic construct
SAIPGGSDKLI

SEQ ID NO: 19678 - protein, 11 aa, synthetic construct
SAIRGDTDKLI

SEQ ID NO: 19679 - protein, 10 aa, synthetic construct
SALGGGYGSW

SEQ ID NO: 19680 - protein, 9 aa, synthetic construct
SALQRVSYK

SEQ ID NO: 19681 - protein, 11 aa, synthetic construct
SALRGDTEKLI

SEQ ID NO: 19682 - protein, 10 aa, synthetic construct
SALTYTDQLI

SEQ ID NO: 19683 - protein, 16 aa, synthetic construct
SARGGATATGDSTPIN

SEQ ID NO: 19684 - protein, 9 aa, synthetic construct
SARGGGYGN

SEQ ID NO: 19685 - protein, 11 aa, synthetic construct
SASRGDSPTRL

SEQ ID NO: 19686 - protein, 11 aa, synthetic construct
SASRGDTDNLI

SEQ ID NO: 19687 - protein, 16 aa, synthetic construct
QQEGGATATGDATPIN

SEQ ID NO: 19688 - protein, 15 aa, synthetic construct
VARGGGSGYWGLHTD

SEQ ID NO: 19689 - protein, 15 aa, synthetic construct
TARGGGYGYGGLHTD

SEQ ID NO: 19690 - protein, 14 aa, synthetic construct
TARGGGYGYWGLHT

SEQ ID NO: 19691 - protein, 11 aa, synthetic construct
TARRGDTDKLI

SEQ ID NO: 19692 - protein, 11 aa, synthetic construct
TASHGGSDKHI

SEQ ID NO: 19693 - protein, 16 aa, synthetic construct
TASMRWGIRSWDTRRM

SEQ ID NO: 19694 - protein, 11 aa, synthetic construct
TASPGGSDQLI

SEQ ID NO: 19695 - protein, 11 aa, synthetic construct
TASRGDTEKLI

SEQ ID NO: 19696 - protein, 11 aa, synthetic construct
TASTGDTDKLI

SEQ ID NO: 19697 - protein, 10 aa, synthetic construct
TASTYTDKII

SEQ ID NO: 19698 - protein, 11 aa, synthetic construct
TESPGGSHKLI

SEQ ID NO: 19699 - protein, 10 aa, synthetic construct
TESTYTDKLI

SEQ ID NO: 19700 - protein, 15 aa, synthetic construct
VARGGGLRLLGTPHR

SEQ ID NO: 19701 - protein, 15 aa, synthetic construct
VARGGGYGSWGLHTD

SEQ ID NO: 19702 - protein, 15 aa, synthetic construct
TARGGGSGYWGLRTD

SEQ ID NO: 19703 - protein, 15 aa, synthetic construct
VARGGGYGYWDTRQM

SEQ ID NO: 19704 - protein, 15 aa, synthetic construct
VARGGGYGYWGLHAD

SEQ ID NO: 19705 - protein, 10 aa, synthetic construct
VARGGGYVSW

SEQ ID NO: 19706 - protein, 11 aa, synthetic construct
VASPGGSAKLI

SEQ ID NO: 19707 - protein, 11 aa, synthetic construct
VASPGGSDKPI

SEQ ID NO: 19708 - protein, 11 aa, synthetic construct
VASPGGSGKLI

SEQ ID NO: 19709 - protein, 10 aa, synthetic construct
VASPYTDKLI

SEQ ID NO: 19710 - protein, 11 aa, synthetic construct
VASRGDTDELI

SEQ ID NO: 19711 - protein, 10 aa, synthetic construct
VASTYTDQLI

SEQ ID NO: 19712 - protein, 10 aa, synthetic construct
VASTYTYKII

SEQ ID NO: 19713 - protein, 10 aa, synthetic construct
VESTYTDKLI

SEQ ID NO: 19714 - protein, 11 aa, synthetic construct
VSGRRGGGGGW

SEQ ID NO: 19715 - protein, 15 aa, synthetic construct
TARGGGYGSWGLHTD

SEQ ID NO: 19716 - protein, 15 aa, synthetic construct
TARGGGSGYWGLHTD

SEQ ID NO: 19717 - protein, 11 aa, synthetic construct
SASRGDTEKLN

SEQ ID NO: 19718 - protein, 10 aa, synthetic construct
SASTYTYKLN

SEQ ID NO: 19719 - protein, 11 aa, synthetic construct
SASRGDTEKRI

SEQ ID NO: 19720 - protein, 11 aa, synthetic construct
SASRGDTVKLI

SEQ ID NO: 19721 - protein, 11 aa, synthetic construct
SASRGDTVKRI

SEQ ID NO: 19722 - protein, 11 aa, synthetic construct
SASRGETDKHN

SEQ ID NO: 19723 - protein, 11 aa, synthetic construct
SASRGETDKLI

SEQ ID NO: 19724 - protein, 11 aa, synthetic construct
SASRRDNDKLI

SEQ ID NO: 19725 - protein, 16 aa, synthetic construct
SASRRWGFRSCDTRPM

SEQ ID NO: 19726 - protein, 10 aa, synthetic construct
SASTDSDKLI

SEQ ID NO: 19727 - protein, 10 aa, synthetic construct
SASTNTDKLI

SEQ ID NO: 19728 - protein, 10 aa, synthetic construct
SASTYTDKII

SEQ ID NO: 19729 - protein, 10 aa, synthetic construct
SASTYTDKLL

SEQ ID NO: 19730 - protein, 10 aa, synthetic construct
SASTYTYKLI

SEQ ID NO: 19731 - protein, 16 aa, synthetic construct
SDSGGATATGDSTPIN

SEQ ID NO: 19732 - protein, 14 aa, synthetic construct
STWGGRRLLGTPHR

SEQ ID NO: 19733 - protein, 11 aa, synthetic construct
SEIPGGSDKLI

SEQ ID NO: 19734 - protein, 10 aa, synthetic construct
SERRGGYGKS

SEQ ID NO: 19735 - protein, 14 aa, synthetic construct
SKHEVGDTHLGHPT

SEQ ID NO: 19736 - protein, 14 aa, synthetic construct
SKHEVGDTLLGPPT

SEQ ID NO: 19737 - protein, 9 aa, synthetic construct
SKRGGYGSW

SEQ ID NO: 19738 - protein, 14 aa, synthetic construct
SKRGRLRLLGTPHR

SEQ ID NO: 19739 - protein, 11 aa, synthetic construct
SPSIADTDKLI

SEQ ID NO: 19740 - protein, 11 aa, synthetic construct
SPSTGDTDKLI

SEQ ID NO: 19741 - protein, 10 aa, synthetic construct
SQQRGHRYTH

SEQ ID NO: 19742 - protein, 7 aa, synthetic construct
SSITNEQ

SEQ ID NO: 19743 - protein, 11 aa, synthetic construct
SSSRGDTEKHI

SEQ ID NO: 19744 - protein, 14 aa, synthetic construct
STHEVGDTLLGHPT

SEQ ID NO: 19745 - protein, 16 aa, synthetic construct
QQEGGATATGDSTPMN

SEQ ID NO: 19746 - protein, 16 aa, synthetic construct
QQEGGATATGASTPIN

SEQ ID NO: 19747 - protein, 10 aa, synthetic construct
ESSTYTDKII

SEQ ID NO: 19748 - protein, 8 aa, synthetic construct
HTSELHSP

SEQ ID NO: 19749 - protein, 10 aa, synthetic construct
GASRYPDKLM

SEQ ID NO: 19750 - protein, 11 aa, synthetic construct
GASSGDPEKHQ

SEQ ID NO: 19751 - protein, 10 aa, synthetic construct
GASSYSDQLF

SEQ ID NO: 19752 - protein, 10 aa, synthetic construct
GASTYNDKLI

SEQ ID NO: 19753 - protein, 10 aa, synthetic construct
GASTYPDKLI

SEQ ID NO: 19754 - protein, 11 aa, synthetic construct
GESPGASDKLI

SEQ ID NO: 19755 - protein, 15 aa, synthetic construct
GGRGGGSGWGGVGSG

SEQ ID NO: 19756 - protein, 11 aa, synthetic construct
HQALGDPINSS

SEQ ID NO: 19757 - protein, 11 aa, synthetic construct
HQALGDPNNSS

SEQ ID NO: 19758 - protein, 11 aa, synthetic construct
HQAQGDPIKSS

SEQ ID NO: 19759 - protein, 8 aa, synthetic construct
HQTRSGGK

SEQ ID NO: 19760 - protein, 10 aa, synthetic construct
HQVHIPINSS

SEQ ID NO: 19761 - protein, 11 aa, synthetic construct
KKKKNKNKKLI

SEQ ID NO: 19762 - protein, 11 aa, synthetic construct
GASRGGSEKVF

SEQ ID NO: 19763 - protein, 11 aa, synthetic construct
KQALGDPINSS

SEQ ID NO: 19764 - protein, 15 aa, synthetic construct
KQQAGGGYAPGTPGR

SEQ ID NO: 19765 - protein, 10 aa, synthetic construct
KQVLIPLNSS

SEQ ID NO: 19766 - protein, 16 aa, synthetic construct
LQEGGATATGDSTPIN

SEQ ID NO: 19767 - protein, 13 aa, synthetic construct
NHLFSSWKMEQML

SEQ ID NO: 19768 - protein, 4 aa, synthetic construct
NQMR

SEQ ID NO: 19769 - protein, 11 aa, synthetic construct
PAIIGDTYKLN

SEQ ID NO: 19770 - protein, 11 aa, synthetic construct
PAIPGGSKMLF

SEQ ID NO: 19771 - protein, 11 aa, synthetic construct
PARPGGSEKLI

SEQ ID NO: 19772 - protein, 11 aa, synthetic construct
PARRGDTAKLI

SEQ ID NO: 19773 - protein, 15 aa, synthetic construct
PASMRWGIRSWDTRQ

SEQ ID NO: 19774 - protein, 11 aa, synthetic construct
PASPGGSAKLI

SEQ ID NO: 19775 - protein, 16 aa, synthetic construct
GASRRWGIRSWDTRQM

SEQ ID NO: 19776 - protein, 11 aa, synthetic construct
GASRGDTDQVI

SEQ ID NO: 19777 - protein, 11 aa, synthetic construct
PASPGGSDKLI

SEQ ID NO: 19778 - protein, 16 aa, synthetic construct
GARRRWGIRSWDSRQM

SEQ ID NO: 19779 - protein, 10 aa, synthetic construct
EVLGDTDKLI

SEQ ID NO: 19780 - protein, 10 aa, synthetic construct
EVSLGDPINS

SEQ ID NO: 19781 - skipped

SEQ ID NO: 19782 - protein, 15 aa, synthetic construct
GAGGGGSGCGGVRWE

SEQ ID NO: 19783 - protein, 10 aa, synthetic construct
GARAETAPVF

SEQ ID NO: 19784 - protein, 8 aa, synthetic construct
GARGGGSG

SEQ ID NO: 19785 - protein, 15 aa, synthetic construct
GARGGGYGYSGLHSD

SEQ ID NO: 19786 - protein, 6 aa, synthetic construct
GARPGG

SEQ ID NO: 19787 - protein, 10 aa, synthetic construct
GARRGAGERL

SEQ ID NO: 19788 - protein, 11 aa, synthetic construct
GARRGDTDSLI

SEQ ID NO: 19789 - protein, 11 aa, synthetic construct
GARRGDTEKDI

SEQ ID NO: 19790 - protein, 13 aa, synthetic construct
GARRRGGVGSWDT

SEQ ID NO: 19791 - protein, 12 aa, synthetic construct
GARSDSDHGVCC

SEQ ID NO: 19792 - protein, 11 aa, synthetic construct
GASRGDTDQLI

SEQ ID NO: 19793 - protein, 11 aa, synthetic construct
GARSGDSAEVI

SEQ ID NO: 19794 - protein, 10 aa, synthetic construct
GARTYSDQDI

SEQ ID NO: 19795 - protein, 16 aa, synthetic construct
GASMRWGIRSWDTRQM

SEQ ID NO: 19796 - protein, 14 aa, synthetic construct
GASPGGAGLVVGGA

SEQ ID NO: 19797 - protein, 11 aa, synthetic construct
GASPGGSAKLI

SEQ ID NO: 19798 - protein, 11 aa, synthetic construct
GASPGGSDKLI

SEQ ID NO: 19799 - protein, 11 aa, synthetic construct
GASPGGSDKPI

SEQ ID NO: 19800 - protein, 11 aa, synthetic construct
GASPGGSDTLI

SEQ ID NO: 19801 - protein, 11 aa, synthetic construct
GASPGGSEKLI

SEQ ID NO: 19802 - protein, 11 aa, synthetic construct
GASPGGSFQVI

SEQ ID NO: 19803 - protein, 11 aa, synthetic construct
GASRGDPEKLV

SEQ ID NO: 19804 - protein, 11 aa, synthetic construct
GASRGDTAELI

SEQ ID NO: 19805 - protein, 11 aa, synthetic construct
PASPGGSDKIN

SEQ ID NO: 19806 - protein, 11 aa, synthetic construct
PASPGGSDNLI

SEQ ID NO: 19807 - protein, 11 aa, synthetic construct
QQEGGATATGA

SEQ ID NO: 19808 - protein, 11 aa, synthetic construct
QQALGDPINSP

SEQ ID NO: 19809 - protein, 11 aa, synthetic construct
QQAEGTPINSP

SEQ ID NO: 19810 - protein, 11 aa, synthetic construct
QQAEGTPINTS

SEQ ID NO: 19811 - protein, 11 aa, synthetic construct
QQAEGTPITSS

SEQ ID NO: 19812 - protein, 11 aa, synthetic construct
QQAEGTPKNSS

SEQ ID NO: 19813 - protein, 11 aa, synthetic construct
QQAEGTPLNSS

SEQ ID NO: 19814 - protein, 11 aa, synthetic construct
QQAEGTPMISS

SEQ ID NO: 19815 - protein, 15 aa, synthetic construct
QQAGGGGYAPGTPDR

SEQ ID NO: 19816 - protein, 15 aa, synthetic construct
QQAGGGYGYWGLHTD

SEQ ID NO: 19817 - protein, 11 aa, synthetic construct
QQAGGTPINSS

SEQ ID NO: 19818 - protein, 15 aa, synthetic construct
QQAGGVGYAPGTPDR

SEQ ID NO: 19819 - protein, 10 aa, synthetic construct
QQAKWTPKNS

SEQ ID NO: 19820 - protein, 9 aa, synthetic construct
QQALGDPIN

SEQ ID NO: 19821 - protein, 11 aa, synthetic construct
QQALGDPINST

SEQ ID NO: 19822 - protein, 11 aa, synthetic construct
QQAEGTPINAS

SEQ ID NO: 19823 - protein, 11 aa, synthetic construct
QQALGDPINTS

SEQ ID NO: 19824 - protein, 11 aa, synthetic construct
QQALGDPRSSS

SEQ ID NO: 19825 - protein, 11 aa, synthetic construct
QQALGDTDKLI

SEQ ID NO: 19826 - protein, 11 aa, synthetic construct
QQALGEPRNSS

SEQ ID NO: 19827 - protein, 10 aa, synthetic construct
QQALIPINSS

SEQ ID NO: 19828 - protein, 11 aa, synthetic construct
QQDEGTPINSS

SEQ ID NO: 19829 - protein, 11 aa, synthetic construct
QQDEGTPLSSS

SEQ ID NO: 19830 - protein, 9 aa, synthetic construct
QQDVGTPAT

SEQ ID NO: 19831 - protein, 15 aa, synthetic construct
QQEGGATAKGSSSPI

SEQ ID NO: 19832 - protein, 16 aa, synthetic construct
QQEGGATALGDSTPIN

SEQ ID NO: 19833 - protein, 16 aa, synthetic construct
QQEGGATAPGDSTPRN

SEQ ID NO: 19834 - protein, 16 aa, synthetic construct
QQEGGATASGDSTPIN

SEQ ID NO: 19835 - protein, 10 aa, synthetic construct
QQAEGTPINS

SEQ ID NO: 19836 - protein, 11 aa, synthetic construct
QQAEGTPIKSS

SEQ ID NO: 19837 - protein, 11 aa, synthetic construct
PASRGDTAKLI

SEQ ID NO: 19838 - protein, 11 aa, synthetic construct
QHALGDPINPS

SEQ ID NO: 19839 - protein, 11 aa, synthetic construct
PASRGGSEKLI

SEQ ID NO: 19840 - protein, 10 aa, synthetic construct
PASTYPAKLI

SEQ ID NO: 19841 - protein, 10 aa, synthetic construct
PPSTYNDKLI

SEQ ID NO: 19842 - protein, 11 aa, synthetic construct
PQAEGTPSTSS

SEQ ID NO: 19843 - protein, 12 aa, synthetic construct
PQDGGATATGDT

SEQ ID NO: 19844 - protein, 8 aa, synthetic construct
PRMNSGHR

SEQ ID NO: 19845 - protein, 10 aa, synthetic construct
QAKTNTHKHN

SEQ ID NO: 19846 - protein, 16 aa, synthetic construct
QASIRWGIRSSDTRQM

SEQ ID NO: 19847 - protein, 16 aa, synthetic construct
QASQRRGIRSWDTRQM

SEQ ID NO: 19848 - protein, 10 aa, synthetic construct
QEGLIPINSS

SEQ ID NO: 19849 - protein, 11 aa, synthetic construct
QHAEGTPINST

SEQ ID NO: 19850 - protein, 11 aa, synthetic construct
QHAEGTPRNSS

SEQ ID NO: 19851 - protein, 11 aa, synthetic construct
QHALGDPINSP

SEQ ID NO: 19852 - protein, 11 aa, synthetic construct
QQAEGTPIHSS

SEQ ID NO: 19853 - protein, 16 aa, synthetic construct
QHDGGATATGDSTPIN

SEQ ID NO: 19854 - protein, 16 aa, synthetic construct
QHEGGAPATGDSPPIN

SEQ ID NO: 19855 - protein, 16 aa, synthetic construct
QHEGGATDTGDSTPIN

SEQ ID NO: 19856 - protein, 16 aa, synthetic construct
QHEGGDTATGDSTPIN

SEQ ID NO: 19857 - protein, 14 aa, synthetic construct
QHEGGLRLLGTPDR

SEQ ID NO: 19858 - protein, 10 aa, synthetic construct
QHVLIPRNSS

SEQ ID NO: 19859 - protein, 11 aa, synthetic construct
QKAEGTPINSS

SEQ ID NO: 19860 - protein, 16 aa, synthetic construct
QPEGGATATGDSTPIN

SEQ ID NO: 19861 - protein, 10 aa, synthetic construct
QPTTNNEKIN

SEQ ID NO: 19862 - skipped

SEQ ID NO: 19863 - protein, 11 aa, synthetic construct
QQAEETPINSS

SEQ ID NO: 19864 - protein, 9 aa, synthetic construct
QQAEGTPDR

SEQ ID NO: 19865 - protein, 11 aa, synthetic construct
EASLGDTDKII

SEQ ID NO: 19866 - protein, 11 aa, synthetic construct
EASKGHTAKLN

SEQ ID NO: 19867 - protein, 10 aa, synthetic construct
AASTYTYKHI

SEQ ID NO: 19868 - protein, 11 aa, synthetic construct
EASKGDTDKLI

SEQ ID NO: 19869 - protein, 11 aa, synthetic construct
AESRGDTDKLF

SEQ ID NO: 19870 - protein, 11 aa, synthetic construct
AESRGDTDKLN

SEQ ID NO: 19871 - protein, 11 aa, synthetic construct
AESRGDTDQLF

SEQ ID NO: 19872 - protein, 11 aa, synthetic construct
AESRGDTVQLF

SEQ ID NO: 19873 - protein, 11 aa, synthetic construct
AESRGDTYNLF

SEQ ID NO: 19874 - protein, 11 aa, synthetic construct
AESRGETDKLI

SEQ ID NO: 19875 - protein, 11 aa, synthetic construct
AESRGGSDKAI

SEQ ID NO: 19876 - protein, 11 aa, synthetic construct
AESRGGSDKLI

SEQ ID NO: 19877 - protein, 11 aa, synthetic construct
AESRVDTDKLI

SEQ ID NO: 19878 - protein, 11 aa, synthetic construct
AESRVDTEKLI

SEQ ID NO: 19879 - protein, 8 aa, synthetic construct
AESSFRDN

SEQ ID NO: 19880 - protein, 11 aa, synthetic construct
AESSGEPDILI

SEQ ID NO: 19881 - protein, 10 aa, synthetic construct
AESSYTDKLT

SEQ ID NO: 19882 - protein, 10 aa, synthetic construct
AESTFTDKII

SEQ ID NO: 19883 - protein, 11 aa, synthetic construct
AESTGASGKLI

SEQ ID NO: 19884 - protein, 10 aa, synthetic construct
AESTYTDHLI

SEQ ID NO: 19885 - protein, 10 aa, synthetic construct
AESTYTDKHI

SEQ ID NO: 19886 - protein, 10 aa, synthetic construct
AESTYTDKIY

SEQ ID NO: 19887 - protein, 10 aa, synthetic construct
AESTYTDKLN

SEQ ID NO: 19888 - protein, 10 aa, synthetic construct
AESTYTGKLI

SEQ ID NO: 19889 - protein, 10 aa, synthetic construct
AESTYTNKIN

SEQ ID NO: 19890 - protein, 10 aa, synthetic construct
AESTYTYKLI

SEQ ID NO: 19891 - protein, 16 aa, synthetic construct
AETMRGGIPSSDTRQM

SEQ ID NO: 19892 - protein, 11 aa, synthetic construct
AETQGRSDKLI

SEQ ID NO: 19893 - skipped

SEQ ID NO: 19894 - protein, 15 aa, synthetic construct
AGCGGGYGYWGLDTD

SEQ ID NO: 19895 - protein, 16 aa, synthetic construct
AGCLRWGRRSSDTRPM

SEQ ID NO: 19896 - protein, 11 aa, synthetic construct
AESRGDTDKIN

SEQ ID NO: 19897 - protein, 11 aa, synthetic construct
AESRGDTAKLI

SEQ ID NO: 19898 - protein, 11 aa, synthetic construct
AESRGDTAHLI

SEQ ID NO: 19899 - protein, 11 aa, synthetic construct
AESPGGSEKLI

SEQ ID NO: 19900 - protein, 11 aa, synthetic construct
AESPCGSDNII

SEQ ID NO: 19901 - protein, 11 aa, synthetic construct
AESPGDPRNSS

SEQ ID NO: 19902 - protein, 11 aa, synthetic construct
AESPGGSDKHI

SEQ ID NO: 19903 - protein, 11 aa, synthetic construct
AESPGGSDKHN

SEQ ID NO: 19904 - protein, 11 aa, synthetic construct
AESPGGSDKII

SEQ ID NO: 19905 - protein, 11 aa, synthetic construct
AESPGGSDKIL

SEQ ID NO: 19906 - protein, 11 aa, synthetic construct
AESPGGSDKLF

SEQ ID NO: 19907 - protein, 11 aa, synthetic construct
AESPGGSDKLL

SEQ ID NO: 19908 - protein, 11 aa, synthetic construct
AESPGGSDKLN

SEQ ID NO: 19909 - protein, 11 aa, synthetic construct
AESPGGSDNLI

SEQ ID NO: 19910 - protein, 11 aa, synthetic construct
AESPGGSDQLF

SEQ ID NO: 19911 - protein, 11 aa, synthetic construct
AESPGGSDQLI

SEQ ID NO: 19912 - protein, 12 aa, synthetic construct
AESPGGSYKCSY

SEQ ID NO: 19913 - protein, 11 aa, synthetic construct
AESRGDADKLI

SEQ ID NO: 19914 - protein, 11 aa, synthetic construct
AESPGGSYKHI

SEQ ID NO: 19915 - protein, 11 aa, synthetic construct
AESPGGSYKLI

SEQ ID NO: 19916 - protein, 11 aa, synthetic construct
AESPGGTDKLI

SEQ ID NO: 19917 - protein, 11 aa, synthetic construct
AESPGGYDKII

SEQ ID NO: 19918 - protein, 11 aa, synthetic construct
AESPGVSDKII

SEQ ID NO: 19919 - protein, 11 aa, synthetic construct
AESPGVSDKLI

SEQ ID NO: 19920 - protein, 11 aa, synthetic construct
AESPLGYYKNI

SEQ ID NO: 19921 - protein, 11 aa, synthetic construct
AESPRVSDNLI

SEQ ID NO: 19922 - protein, 11 aa, synthetic construct
AESPVASDKHI

SEQ ID NO: 19923 - protein, 11 aa, synthetic construct
AESPWGSHNLI

SEQ ID NO: 19924 - protein, 10 aa, synthetic construct
AESPYTDKII

SEQ ID NO: 19925 - protein, 11 aa, synthetic construct
AESRAHTDKLI

SEQ ID NO: 19926 - protein, 11 aa, synthetic construct
AGCRGDTEKVI

SEQ ID NO: 19927 - skipped

SEQ ID NO: 19928 - protein, 11 aa, synthetic construct
AGGGGGSGDWG

SEQ ID NO: 19929 - protein, 10 aa, synthetic construct
APSTYTDQLI

SEQ ID NO: 19930 - protein, 11 aa, synthetic construct
APSPGGAENLI

SEQ ID NO: 19931 - protein, 11 aa, synthetic construct
APSPGGSAKRI

SEQ ID NO: 19932 - protein, 11 aa, synthetic construct
APSPGGSVKLI

SEQ ID NO: 19933 - protein, 11 aa, synthetic construct
APSRADTDKLI

SEQ ID NO: 19934 - protein, 11 aa, synthetic construct
APSRGETHKLI

SEQ ID NO: 19935 - protein, 11 aa, synthetic construct
APSRGHTDKHI

SEQ ID NO: 19936 - protein, 10 aa, synthetic construct
APSTETDQLI

SEQ ID NO: 19937 - protein, 11 aa, synthetic construct
APSTGETVHLI

SEQ ID NO: 19938 - protein, 10 aa, synthetic construct
APSTNTDKLI

SEQ ID NO: 19939 - protein, 10 aa, synthetic construct
APSTYTDKHI

SEQ ID NO: 19940 - protein, 10 aa, synthetic construct
APSTYTDKLI

SEQ ID NO: 19941 - protein, 10 aa, synthetic construct
APSTYTDKNN

SEQ ID NO: 19942 - protein, 11 aa, synthetic construct
APTPGGSEKLN

SEQ ID NO: 19943 - protein, 16 aa, synthetic construct
APSMRWGISSWDTRQM

SEQ ID NO: 19944 - protein, 15 aa, synthetic construct
APTRAGNRYRGLHTD

SEQ ID NO: 19945 - protein, 5 aa, synthetic construct
AQPRG

SEQ ID NO: 19946 - protein, 11 aa, synthetic construct
AQSRGDPENHI

SEQ ID NO: 19947 - protein, 11 aa, synthetic construct
AQSRGDTQKLI

SEQ ID NO: 19948 - protein, 10 aa, synthetic construct
AQSTCNDKLI

SEQ ID NO: 19949 - protein, 11 aa, synthetic construct
AQSTGASYKLI

SEQ ID NO: 19950 - protein, 10 aa, synthetic construct
AQSTYTDKII

SEQ ID NO: 19951 - protein, 15 aa, synthetic construct
AQTGGGYGYWGLHTD

SEQ ID NO: 19952 - protein, 11 aa, synthetic construct
AQTIGDTKKKI

SEQ ID NO: 19953 - protein, 11 aa, synthetic construct
AQTPGGSDKII

SEQ ID NO: 19954 - protein, 16 aa, synthetic construct
ARSSRWGIRSWDTRQM

SEQ ID NO: 19955 - protein, 15 aa, synthetic construct
ASIMRWWILYWYTRQ

SEQ ID NO: 19956 - protein, 11 aa, synthetic construct
APSPGGADKLI

SEQ ID NO: 19957 - protein, 16 aa, synthetic construct
APSMRWGIRSWDTRQM

SEQ ID NO: 19958 - protein, 6 aa, synthetic construct
AGRAGG

SEQ ID NO: 19959 - protein, 10 aa, synthetic construct
AGSRYRDKLC

SEQ ID NO: 19960 - protein, 11 aa, synthetic construct
AGRGGGLRRLG

SEQ ID NO: 19961 - protein, 9 aa, synthetic construct
AGRGGGSGC

SEQ ID NO: 19962 - protein, 15 aa, synthetic construct
AGRGGGYAYWGLLTD

SEQ ID NO: 19963 - protein, 15 aa, synthetic construct
AGRGGGYGSWGLDTD

SEQ ID NO: 19964 - protein, 11 aa, synthetic construct
AGRPGGSDELI

SEQ ID NO: 19965 - protein, 10 aa, synthetic construct
AGRTDTDKRV

SEQ ID NO: 19966 - protein, 11 aa, synthetic construct
AGRVGGGRGWG

SEQ ID NO: 19967 - protein, 10 aa, synthetic construct
AGSGGATGLR

SEQ ID NO: 19968 - protein, 9 aa, synthetic construct
AGSGGGAGG

SEQ ID NO: 19969 - protein, 16 aa, synthetic construct
AGSMRWGIRSWDTRQM

SEQ ID NO: 19970 - protein, 16 aa, synthetic construct
AGSMRWGIRSWGTRQM

SEQ ID NO: 19971 - protein, 11 aa, synthetic construct
AGSPGGSDKLI

SEQ ID NO: 19972 - protein, 10 aa, synthetic construct
AGSSYTDKLI

SEQ ID NO: 19973 - protein, 10 aa, synthetic construct
APRSSTDKRL

SEQ ID NO: 19974 - protein, 10 aa, synthetic construct
ALLGDTDKLI

SEQ ID NO: 19975 - protein, 11 aa, synthetic construct
APIRGDTDKLI

SEQ ID NO: 19976 - protein, 11 aa, synthetic construct
APLGGGYGDWG

SEQ ID NO: 19977 - protein, 8 aa, synthetic construct
APMSWGNR

SEQ ID NO: 19978 - protein, 15 aa, synthetic construct
APRGGGSGYWGLHTD

SEQ ID NO: 19979 - protein, 15 aa, synthetic construct
APRGGGYGCWGLHTD

SEQ ID NO: 19980 - protein, 14 aa, synthetic construct
APRGGGYGYWGLHT

SEQ ID NO: 19981 - protein, 11 aa, synthetic construct
AASRGDTHNLI

SEQ ID NO: 19982 - protein, 11 aa, synthetic construct
APRPGGSDKLI

SEQ ID NO: 19983 - protein, 11 aa, synthetic construct
APRPGRSDKLS

SEQ ID NO: 19984 - protein, 11 aa, synthetic construct
APRPRGYEKLI

SEQ ID NO: 19985 - protein, 11 aa, synthetic construct
APRRLGSEKLI

SEQ ID NO: 19986 - protein, 11 aa, synthetic construct
AESPAGSDKDF

SEQ ID NO: 19987 - protein, 10 aa, synthetic construct
AESNYNDKII

SEQ ID NO: 19988 - protein, 16 aa, synthetic construct
AESMSWGIRSSDTRQM

SEQ ID NO: 19989 - protein, 11 aa, synthetic construct
AATRGDTGKLI

SEQ ID NO: 19990 - protein, 11 aa, synthetic construct
AATPGGSDKDI

SEQ ID NO: 19991 - protein, 11 aa, synthetic construct
AATPGGSDKIN

SEQ ID NO: 19992 - protein, 11 aa, synthetic construct
AATPGGSDKVI

SEQ ID NO: 19993 - protein, 11 aa, synthetic construct
AATPGGSDNLI

SEQ ID NO: 19994 - protein, 11 aa, synthetic construct
AATPRASDKPI

SEQ ID NO: 19995 - protein, 11 aa, synthetic construct
AATPRGSDKHN

SEQ ID NO: 19996 - protein, 11 aa, synthetic construct
AATPRGTDKHI

SEQ ID NO: 19997 - protein, 11 aa, synthetic construct
AATRGDTAKLI

SEQ ID NO: 19998 - protein, 11 aa, synthetic construct
AATRGDTDKLN

SEQ ID NO: 19999 - protein, 11 aa, synthetic construct
AATRGDTDNHI

SEQ ID NO: 20000 - protein, 11 aa, synthetic construct
AATRGDTEKII

SEQ ID NO: 20001 - protein, 11 aa, synthetic construct
AATRGDTEKNI

SEQ ID NO: 20002 - protein, 11 aa, synthetic construct
AATRGDTHKLI

SEQ ID NO: 20003 - protein, 11 aa, synthetic construct
AATPGGSAKVI

SEQ ID NO: 20004 - protein, 11 aa, synthetic construct
AATRGHTDKLI

SEQ ID NO: 20005 - protein, 14 aa, synthetic construct
AATRRANAYSGLHT

SEQ ID NO: 20006 - protein, 11 aa, synthetic construct
AATRRHTHKHI

SEQ ID NO: 20007 - protein, 11 aa, synthetic construct
AATRVDTHKLN

SEQ ID NO: 20008 - protein, 10 aa, synthetic construct
AATSYTGKHI

SEQ ID NO: 20009 - protein, 11 aa, synthetic construct
AATTAHTDKLL

SEQ ID NO: 20010 - protein, 10 aa, synthetic construct
AATTQTDKHI

SEQ ID NO: 20011 - protein, 10 aa, synthetic construct
AATTYTDKLC

SEQ ID NO: 20012 - protein, 10 aa, synthetic construct
AATTYTDKLN

SEQ ID NO: 20013 - protein, 15 aa, synthetic construct
AAVGGGLRLVGTPHR

SEQ ID NO: 20014 - protein, 11 aa, synthetic construct
AAVGGGYGYWG

SEQ ID NO: 20015 - protein, 15 aa, synthetic construct
AAVGGGYGYWGLHTD

SEQ ID NO: 20016 - protein, 11 aa, synthetic construct
AATPGGSDILI

SEQ ID NO: 20017 - protein, 11 aa, synthetic construct
AATPGGSAKLN

SEQ ID NO: 20018 - protein, 11 aa, synthetic construct
AAVLGDTVKLN

SEQ ID NO: 20019 - protein, 15 aa, synthetic construct
AASVRWGIRSWATRQ

SEQ ID NO: 20020 - protein, 10 aa, synthetic construct
AASTYTYKII

SEQ ID NO: 20021 - protein, 10 aa, synthetic construct
AASTYTYKLF

SEQ ID NO: 20022 - protein, 10 aa, synthetic construct
AASTYTYQHI

SEQ ID NO: 20023 - protein, 10 aa, synthetic construct
AASTYTYQLN

SEQ ID NO: 20024 - protein, 9 aa, synthetic construct
AASTYTYYN

SEQ ID NO: 20025 - protein, 15 aa, synthetic construct
AASVGWGRRSWDTRQ

SEQ ID NO: 20026 - protein, 16 aa, synthetic construct
AASVLLGDTGTPIKSS

SEQ ID NO: 20027 - protein, 13 aa, synthetic construct
AASVLRWWGIKII

SEQ ID NO: 20028 - protein, 13 aa, synthetic construct
AASVLRWWGIKLN

SEQ ID NO: 20029 - protein, 13 aa, synthetic construct
AASVLRWWGLKLI

SEQ ID NO: 20030 - protein, 16 aa, synthetic construct
AASVRGGIRSWYPRQM

SEQ ID NO: 20031 - protein, 15 aa, synthetic construct
AASVRGGVSAWDSRQ

SEQ ID NO: 20032 - protein, 16 aa, synthetic construct
AASVRWGIRSWDTLQM

SEQ ID NO: 20033 - protein, 11 aa, synthetic construct
AATPGASHKLI

SEQ ID NO: 20034 - protein, 7 aa, synthetic construct
AATDKLI

SEQ ID NO: 20035 - protein, 12 aa, synthetic construct
AATGGATATADS

SEQ ID NO: 20036 - protein, 16 aa, synthetic construct
AATGGATPTGDSTPIN

SEQ ID NO: 20037 - protein, 15 aa, synthetic construct
AATGGGYGDWGLHTD

SEQ ID NO: 20038 - protein, 15 aa, synthetic construct
AATGGGYGSWGLHTD

SEQ ID NO: 20039 - protein, 11 aa, synthetic construct
AATGGGYGYWG

SEQ ID NO: 20040 - protein, 14 aa, synthetic construct
AATGGGYGYWGLNT

SEQ ID NO: 20041 - protein, 15 aa, synthetic construct
AATGGGYGYWGLNTD

SEQ ID NO: 20042 - protein, 15 aa, synthetic construct
AATGGGYGYWVLHTD

SEQ ID NO: 20043 - protein, 11 aa, synthetic construct
AATHGGSAKNI

SEQ ID NO: 20044 - protein, 16 aa, synthetic construct
AATLRGGIRTWDTRQM

SEQ ID NO: 20045 - protein, 16 aa, synthetic construct
AATMRWGTRSSDTRQM

SEQ ID NO: 20046 - protein, 14 aa, synthetic construct
AAVLGDTGTPINSS

SEQ ID NO: 20047 - protein, 11 aa, synthetic construct
AAVLGDTVKLS

SEQ ID NO: 20048 - protein, 16 aa, synthetic construct
AESMRWGRRSWDRRQM

SEQ ID NO: 20049 - protein, 15 aa, synthetic construct
AERVGGSGSWGLHTD

SEQ ID NO: 20050 - protein, 15 aa, synthetic construct
AERGGGYGYRGLHTD

SEQ ID NO: 20051 - protein, 10 aa, synthetic construct
AERGGGYGYW

SEQ ID NO: 20052 - protein, 15 aa, synthetic construct
AERGGGYGYWDTRQM

SEQ ID NO: 20053 - protein, 11 aa, synthetic construct
AERGGGYGYWG

SEQ ID NO: 20054 - protein, 15 aa, synthetic construct
AERGGGYGYWGLDTD

SEQ ID NO: 20055 - protein, 15 aa, synthetic construct
AERGGGYGYWGPHTD

SEQ ID NO: 20056 - protein, 10 aa, synthetic construct
AERKSRRINS

SEQ ID NO: 20057 - protein, 16 aa, synthetic construct
AERMRWGIRSWDTRQM

SEQ ID NO: 20058 - protein, 16 aa, synthetic construct
AERMRWGRRSWDTRQM

SEQ ID NO: 20059 - protein, 14 aa, synthetic construct
AERMRWVISSWDTR

SEQ ID NO: 20060 - protein, 11 aa, synthetic construct
AERRGDTAKLI

SEQ ID NO: 20061 - protein, 11 aa, synthetic construct
AERTGDTDKLI

SEQ ID NO: 20062 - protein, 15 aa, synthetic construct
AERVGGYAYWGLHTD

SEQ ID NO: 20063 - protein, 14 aa, synthetic construct
AERGGGYGSCVLNT

SEQ ID NO: 20064 - protein, 15 aa, synthetic construct
AERVGGYGYWALHTD

SEQ ID NO: 20065 - protein, 15 aa, synthetic construct
AERWGGYGYWGLHTD

SEQ ID NO: 20066 - protein, 11 aa, synthetic construct
AESHGETDKPM

SEQ ID NO: 20067 - protein, 11 aa, synthetic construct
AESHGGSAKLI

SEQ ID NO: 20068 - protein, 11 aa, synthetic construct
AESHGGSDKLI

SEQ ID NO: 20069 - protein, 11 aa, synthetic construct
AESHVGSDKLI

SEQ ID NO: 20070 - protein, 11 aa, synthetic construct
AESIGDTDKLI

SEQ ID NO: 20071 - protein, 16 aa, synthetic construct
AESMMWGILSCYTRQM

SEQ ID NO: 20072 - protein, 16 aa, synthetic construct
AESMRWGIRPWDTRPM

SEQ ID NO: 20073 - protein, 13 aa, synthetic construct
AESMRWGIRSWDT

SEQ ID NO: 20074 - protein, 16 aa, synthetic construct
AESMRWGIRSWDTRLM

SEQ ID NO: 20075 - protein, 16 aa, synthetic construct
AESMRWGITSCDTRHM

SEQ ID NO: 20076 - protein, 12 aa, synthetic construct
AERGGGYGTGGH

SEQ ID NO: 20077 - protein, 15 aa, synthetic construct
AERGGGYGDWGLHTD

SEQ ID NO: 20078 - protein, 8 aa, synthetic construct
AAVTYTDN

SEQ ID NO: 20079 - protein, 16 aa, synthetic construct
AEIMRWWIRSCDTRQM

SEQ ID NO: 20080 - protein, 15 aa, synthetic construct
AAVWGGYGYWGLQTD

SEQ ID NO: 20081 - protein, 11 aa, synthetic construct
AAWPGGSENLI

SEQ ID NO: 20082 - protein, 16 aa, synthetic construct
ADNMGWGIRSWDTRQM

SEQ ID NO: 20083 - protein, 8 aa, synthetic construct
ADRPPVSD

SEQ ID NO: 20084 - protein, 11 aa, synthetic construct
ADRVARTGYWG

SEQ ID NO: 20085 - protein, 11 aa, synthetic construct
ADSPGGSDNLI

SEQ ID NO: 20086 - protein, 10 aa, synthetic construct
ADSTYTDKLI

SEQ ID NO: 20087 - protein, 11 aa, synthetic construct
AEAEGTPINSS

SEQ ID NO: 20088 - protein, 15 aa, synthetic construct
AEGGGGYGYWGLHTN

SEQ ID NO: 20089 - protein, 10 aa, synthetic construct
AEGTYTDKLI

SEQ ID NO: 20090 - protein, 15 aa, synthetic construct
AEIGGGYGYWGLDTD

SEQ ID NO: 20091 - protein, 16 aa, synthetic construct
AEIIRWGIRSSHTRQM

SEQ ID NO: 20092 - protein, 5 aa, synthetic construct
AEIPG

SEQ ID NO: 20093 - protein, 15 aa, synthetic construct
AERGGGYGDWGLHPD

SEQ ID NO: 20094 - protein, 11 aa, synthetic construct
AEIPGGSDKII

SEQ ID NO: 20095 - protein, 11 aa, synthetic construct
AEIPGGSDKLI

SEQ ID NO: 20096 - protein, 10 aa, synthetic construct
AEISYTDKLI

SEQ ID NO: 20097 - protein, 10 aa, synthetic construct
AEITYTDKLI

SEQ ID NO: 20098 - skipped

SEQ ID NO: 20099 - protein, 16 aa, synthetic construct
AELRRRGIRSWHTRPM

SEQ ID NO: 20100 - protein, 11 aa, synthetic construct
AENRGVTDQLI

SEQ ID NO: 20101 - protein, 14 aa, synthetic construct
AERAGGYGSGGLNT

SEQ ID NO: 20102 - protein, 14 aa, synthetic construct
AERAGGYGYWGLHT

SEQ ID NO: 20103 - protein, 14 aa, synthetic construct
AERGGGSGYWGLHT

SEQ ID NO: 20104 - protein, 15 aa, synthetic construct
AERGGGSGYWGLPTD

SEQ ID NO: 20105 - protein, 12 aa, synthetic construct
AERGGGYAYWGH

SEQ ID NO: 20106 - protein, 10 aa, synthetic construct
ASRGGGYGSW

SEQ ID NO: 20107 - protein, 15 aa, synthetic construct
ASRGGGYGYWGLQTD

SEQ ID NO: 20108 - protein, 11 aa, synthetic construct
ASRGLYADKLI

SEQ ID NO: 20109 - protein, 15 aa, synthetic construct
EARGGGYGSWDTRQM

SEQ ID NO: 20110 - protein, 11 aa, synthetic construct
EARGGGSDKLN

SEQ ID NO: 20111 - protein, 11 aa, synthetic construct
EARGGGSGDWG

SEQ ID NO: 20112 - protein, 15 aa, synthetic construct
EARGGGSGYWGLDTD

SEQ ID NO: 20113 - protein, 15 aa, synthetic construct
EARGGGSGYWGLHTD

SEQ ID NO: 20114 - protein, 15 aa, synthetic construct
EARGGGYDYWGLHTD

SEQ ID NO: 20115 - protein, 15 aa, synthetic construct
EARGGGYGCSGLHTD

SEQ ID NO: 20116 - protein, 15 aa, synthetic construct
EARGGGYGCWGLHTD

SEQ ID NO: 20117 - protein, 14 aa, synthetic construct
EARGGGYGDWGLHN

SEQ ID NO: 20118 - protein, 15 aa, synthetic construct
EARGGGYGNWGLHTD

SEQ ID NO: 20119 - protein, 15 aa, synthetic construct
EARGGGYGSGGLHTD

SEQ ID NO: 20120 - protein, 15 aa, synthetic construct
EARGGGYGSGGLNTD

SEQ ID NO: 20121 - protein, 10 aa, synthetic construct
EARGGGYGSW

SEQ ID NO: 20122 - protein, 14 aa, synthetic construct
EARGGGYGSWGLHT

SEQ ID NO: 20123 - protein, 13 aa, synthetic construct
EARGGGEGYGGPH

SEQ ID NO: 20124 - protein, 15 aa, synthetic construct
EARGGGYGYCGLHTD

SEQ ID NO: 20125 - protein, 15 aa, synthetic construct
EARGGGYGYGGLHTD

SEQ ID NO: 20126 - protein, 16 aa, synthetic construct
EARGGGYGYWDSTPIN

SEQ ID NO: 20127 - protein, 15 aa, synthetic construct
EARGGGYGYWGHHTD

SEQ ID NO: 20128 - protein, 15 aa, synthetic construct
EARGGGYGYWGIHTD

SEQ ID NO: 20129 - protein, 15 aa, synthetic construct
EARGGGYGYWGLDTD

SEQ ID NO: 20130 - protein, 14 aa, synthetic construct
EARGGGYGYWGLLT

SEQ ID NO: 20131 - protein, 14 aa, synthetic construct
EARGGGYGYWGLNT

SEQ ID NO: 20132 - protein, 15 aa, synthetic construct
EARGGGYGYWGLPTD

SEQ ID NO: 20133 - protein, 15 aa, synthetic construct
EARGGGYGYWGLQTD

SEQ ID NO: 20134 - protein, 14 aa, synthetic construct
EARGGGYGYWGVHT

SEQ ID NO: 20135 - protein, 15 aa, synthetic construct
EARGGGYGYWGVHTD

SEQ ID NO: 20136 - protein, 15 aa, synthetic construct
EARGGGLRLLRTPHR

SEQ ID NO: 20137 - protein, 15 aa, synthetic construct
EARGGGAPATGDSTP

SEQ ID NO: 20138 - protein, 15 aa, synthetic construct
EARGGGYGYWVLHTD

SEQ ID NO: 20139 - protein, 10 aa, synthetic construct
EAITYTDNLI

SEQ ID NO: 20140 - protein, 15 aa, synthetic construct
EAGGGGSGYWGLHTD

SEQ ID NO: 20141 - protein, 16 aa, synthetic construct
EAGMSWGISSWDTLQM

SEQ ID NO: 20142 - protein, 11 aa, synthetic construct
EAGPGGSDKLI

SEQ ID NO: 20143 - protein, 11 aa, synthetic construct
EAGRGDTDKLI

SEQ ID NO: 20144 - protein, 11 aa, synthetic construct
EAGRGDTDKLN

SEQ ID NO: 20145 - protein, 15 aa, synthetic construct
EAIGGGYGYSGLHTD

SEQ ID NO: 20146 - protein, 11 aa, synthetic construct
EAIGGGYGYWG

SEQ ID NO: 20147 - protein, 15 aa, synthetic construct
EAIGGGYGYWGLHTD

SEQ ID NO: 20148 - protein, 11 aa, synthetic construct
EAIPGGSDKLI

SEQ ID NO: 20149 - protein, 11 aa, synthetic construct
EAIPGGSDKLN

SEQ ID NO: 20150 - protein, 10 aa, synthetic construct
EAITYNDKLN

SEQ ID NO: 20151 - protein, 10 aa, synthetic construct
EAITYTDKQI

SEQ ID NO: 20152 - protein, 15 aa, synthetic construct
EALGGGYGYWGHHTD

SEQ ID NO: 20153 - protein, 15 aa, synthetic construct
EARGGAYGYWGLHTD

SEQ ID NO: 20154 - protein, 10 aa, synthetic construct
EALNYTEKLI

SEQ ID NO: 20155 - protein, 11 aa, synthetic construct
EALPGGSDKLI

SEQ ID NO: 20156 - protein, 11 aa, synthetic construct
EARAGATDKGY

SEQ ID NO: 20157 - protein, 15 aa, synthetic construct
EARAGGYGKRVIQTD

SEQ ID NO: 20158 - protein, 15 aa, synthetic construct
EARARGYGYWGLNTD

SEQ ID NO: 20159 - protein, 11 aa, synthetic construct
EARGEDTDNLI

SEQ ID NO: 20160 - protein, 14 aa, synthetic construct
EARGEGYGYWGLHT

SEQ ID NO: 20161 - protein, 10 aa, synthetic construct
EARGGADRSW

SEQ ID NO: 20162 - protein, 11 aa, synthetic construct
EARGGATETHI

SEQ ID NO: 20163 - protein, 14 aa, synthetic construct
EARGGATSTGDSTQ

SEQ ID NO: 20164 - protein, 16 aa, synthetic construct
EARGGATVTGDSTPIN

SEQ ID NO: 20165 - protein, 14 aa, synthetic construct
EARGGAYGYWGLHT

SEQ ID NO: 20166 - protein, 14 aa, synthetic construct
EARGGGYGYWVLHT

SEQ ID NO: 20167 - protein, 15 aa, synthetic construct
EARGGGYGYWVLPTD

SEQ ID NO: 20168 - protein, 11 aa, synthetic construct
EACRGETDNLI

SEQ ID NO: 20169 - protein, 11 aa, synthetic construct
EASHGGSAKLI

SEQ ID NO: 20170 - protein, 10 aa, synthetic construct
EARTYTYKLI

SEQ ID NO: 20171 - protein, 15 aa, synthetic construct
EARVGGYGNWGLHTD

SEQ ID NO: 20172 - protein, 15 aa, synthetic construct
EARVGGYGYWGLDTD

SEQ ID NO: 20173 - protein, 15 aa, synthetic construct
EARVGGYGYWGLHTD

SEQ ID NO: 20174 - protein, 11 aa, synthetic construct
EASAGGSDKLI

SEQ ID NO: 20175 - protein, 11 aa, synthetic construct
EASAGGSDQLI

SEQ ID NO: 20176 - protein, 11 aa, synthetic construct
EASGGATDNLI

SEQ ID NO: 20177 - protein, 11 aa, synthetic construct
EASGGDTAKVL

SEQ ID NO: 20178 - protein, 11 aa, synthetic construct
EASGGDTDKFS

SEQ ID NO: 20179 - protein, 15 aa, synthetic construct
EASGGGYGYWGLDTD

SEQ ID NO: 20180 - protein, 6 aa, synthetic construct
EASGWG

SEQ ID NO: 20181 - protein, 11 aa, synthetic construct
EASHGASAKLI

SEQ ID NO: 20182 - protein, 11 aa, synthetic construct
EASHGGSDKHI

SEQ ID NO: 20183 - protein, 10 aa, synthetic construct
EARTYTDNNI

SEQ ID NO: 20184 - protein, 11 aa, synthetic construct
EASHGGSDKLK

SEQ ID NO: 20185 - protein, 11 aa, synthetic construct
EASHGGSSKII

SEQ ID NO: 20186 - protein, 11 aa, synthetic construct
EASHVGSDKLI

SEQ ID NO: 20187 - protein, 10 aa, synthetic construct
EASHYTYKLI

SEQ ID NO: 20188 - protein, 11 aa, synthetic construct
EASIGDTAKPI

SEQ ID NO: 20189 - protein, 11 aa, synthetic construct
EASIGDTEKLI

SEQ ID NO: 20190 - protein, 11 aa, synthetic construct
EASIGDTRKLI

SEQ ID NO: 20191 - protein, 11 aa, synthetic construct
EASIGDTYKLI

SEQ ID NO: 20192 - protein, 16 aa, synthetic construct
EASIGWGIRSWDTRQM

SEQ ID NO: 20193 - protein, 16 aa, synthetic construct
EASIRRGIRTRDTHQM

SEQ ID NO: 20194 - protein, 16 aa, synthetic construct
EASIRWGIRSWDTRQM

SEQ ID NO: 20195 - protein, 10 aa, synthetic construct
EASIYTDKLI

SEQ ID NO: 20196 - protein, 10 aa, synthetic construct
EARTYTYKII

SEQ ID NO: 20197 - protein, 10 aa, synthetic construct
EARTYSDNLI

SEQ ID NO: 20198 - protein, 11 aa, synthetic construct
EARGGTPINSS

SEQ ID NO: 20199 - protein, 11 aa, synthetic construct
EARPAASDKLI

SEQ ID NO: 20200 - protein, 15 aa, synthetic construct
EARGGVYGYWGLHTD

SEQ ID NO: 20201 - protein, 14 aa, synthetic construct
EARGRGYAPGTPDR

SEQ ID NO: 20202 - protein, 15 aa, synthetic construct
EARGRGYGYWGLHTD

SEQ ID NO: 20203 - protein, 11 aa, synthetic construct
EARGVGYGYWG

SEQ ID NO: 20204 - protein, 11 aa, synthetic construct
EARHGGSDKII

SEQ ID NO: 20205 - protein, 11 aa, synthetic construct
EARHGGSDKSI

SEQ ID NO: 20206 - protein, 11 aa, synthetic construct
EARHVASDKLI

SEQ ID NO: 20207 - protein, 7 aa, synthetic construct
EARIGDT

SEQ ID NO: 20208 - protein, 16 aa, synthetic construct
EARKRRGIRSCDTLHM

SEQ ID NO: 20209 - protein, 7 aa, synthetic construct
EARLGDT

SEQ ID NO: 20210 - protein, 16 aa, synthetic construct
EARMRWGIRSWDTRQM

SEQ ID NO: 20211 - protein, 16 aa, synthetic construct
EARMRWGKRSWDTRHM

SEQ ID NO: 20212 - protein, 11 aa, synthetic construct
EARPGGSDKII

SEQ ID NO: 20213 - protein, 10 aa, synthetic construct
EARTSTDNRI

SEQ ID NO: 20214 - protein, 11 aa, synthetic construct
EARPGGSDKLN

SEQ ID NO: 20215 - protein, 11 aa, synthetic construct
EARPGGSETLI

SEQ ID NO: 20216 - protein, 11 aa, synthetic construct
EARPGGSHKLI

SEQ ID NO: 20217 - protein, 11 aa, synthetic construct
EARRGDTDKLF

SEQ ID NO: 20218 - protein, 11 aa, synthetic construct
EARRGDTDKLN

SEQ ID NO: 20219 - protein, 11 aa, synthetic construct
EARRGDTDTLI

SEQ ID NO: 20220 - protein, 11 aa, synthetic construct
EARRGDTYKVI

SEQ ID NO: 20221 - protein, 11 aa, synthetic construct
EARRGETENLY

SEQ ID NO: 20222 - protein, 16 aa, synthetic construct
EARRRWGIRSWDTRQM

SEQ ID NO: 20223 - protein, 10 aa, synthetic construct
EARRYDKYKL

SEQ ID NO: 20224 - protein, 11 aa, synthetic construct
EARTGETYKLI

SEQ ID NO: 20225 - protein, 10 aa, synthetic construct
EARTNNYKLI

SEQ ID NO: 20226 - protein, 10 aa, synthetic construct
EAERGPDKLI

SEQ ID NO: 20227 - protein, 11 aa, synthetic construct
EACRGDTDKQI

SEQ ID NO: 20228 - protein, 11 aa, synthetic construct
ASRGLYTAKLI

SEQ ID NO: 20229 - protein, 10 aa, synthetic construct
AVLGDTYKLI

SEQ ID NO: 20230 - protein, 11 aa, synthetic construct
ATSPGGSDKPI

SEQ ID NO: 20231 - protein, 9 aa, synthetic construct
ATSRGDTDK

SEQ ID NO: 20232 - protein, 11 aa, synthetic construct
ATSRGDTDKLF

SEQ ID NO: 20233 - protein, 11 aa, synthetic construct
ATSRGDTDKLN

SEQ ID NO: 20234 - protein, 10 aa, synthetic construct
ATSTYTDKLN

SEQ ID NO: 20235 - protein, 4 aa, synthetic construct
AVLG

SEQ ID NO: 20236 - protein, 10 aa, synthetic construct
AVLGDPANLI

SEQ ID NO: 20237 - protein, 10 aa, synthetic construct
AVLGDPDKVI

SEQ ID NO: 20238 - protein, 10 aa, synthetic construct
AVLGDPEQLI

SEQ ID NO: 20239 - protein, 7 aa, synthetic construct
AVLGDTD

SEQ ID NO: 20240 - protein, 10 aa, synthetic construct
AVLGDTDKHI

SEQ ID NO: 20241 - protein, 10 aa, synthetic construct
AVLGDTDKLF

SEQ ID NO: 20242 - protein, 10 aa, synthetic construct
AVLGHTDKLI

SEQ ID NO: 20243 - protein, 10 aa, synthetic construct
ATRGGGYGSW

SEQ ID NO: 20244 - protein, 11 aa, synthetic construct
AVRGGGLRLLG

SEQ ID NO: 20245 - protein, 15 aa, synthetic construct
AVRGGGYGYGGLHTD

SEQ ID NO: 20246 - protein, 15 aa, synthetic construct
AVRGGGYGYRGLHTD

SEQ ID NO: 20247 - protein, 16 aa, synthetic construct
AVSMRWGIRSWATRQM

SEQ ID NO: 20248 - protein, 16 aa, synthetic construct
AVSMRWGIRSWETRQM

SEQ ID NO: 20249 - protein, 16 aa, synthetic construct
AVSMRWGIRSWGLHTD

SEQ ID NO: 20250 - protein, 11 aa, synthetic construct
AVSRGDTDKLN

SEQ ID NO: 20251 - protein, 16 aa, synthetic construct
AVSRRWGIRSWDTRQM

SEQ ID NO: 20252 - protein, 10 aa, synthetic construct
AVSTYPDKLI

SEQ ID NO: 20253 - protein, 10 aa, synthetic construct
AVSTYTDKLC

SEQ ID NO: 20254 - protein, 10 aa, synthetic construct
AVSTYTVKLI

SEQ ID NO: 20255 - protein, 14 aa, synthetic construct
CKHEVGDTLLGHPT

SEQ ID NO: 20256 - protein, 11 aa, synthetic construct
ATSPGGCDKVI

SEQ ID NO: 20257 - protein, 14 aa, synthetic construct
ATRGGGYARGTPDR

SEQ ID NO: 20258 - protein, 15 aa, synthetic construct
DAGGGGYGSWGLDTD

SEQ ID NO: 20259 - protein, 11 aa, synthetic construct
ASSPGGSENLF

SEQ ID NO: 20260 - protein, 11 aa, synthetic construct
ASRGLYTDKLN

SEQ ID NO: 20261 - protein, 11 aa, synthetic construct
ASRGLYTDKPI

SEQ ID NO: 20262 - protein, 11 aa, synthetic construct
ASRGLYTDTLI

SEQ ID NO: 20263 - protein, 11 aa, synthetic construct
ASRGVYCGGLV

SEQ ID NO: 20264 - protein, 11 aa, synthetic construct
ASRPGACDKLI

SEQ ID NO: 20265 - protein, 11 aa, synthetic construct
ASRPGGSDKLI

SEQ ID NO: 20266 - protein, 11 aa, synthetic construct
ASRPGGSHKLI

SEQ ID NO: 20267 - protein, 11 aa, synthetic construct
ASRPRGSEKLI

SEQ ID NO: 20268 - protein, 11 aa, synthetic construct
ASRRGETDKLI

SEQ ID NO: 20269 - protein, 10 aa, synthetic construct
ASRTFTVKLI

SEQ ID NO: 20270 - protein, 11 aa, synthetic construct
ASSMRWGIRSW

SEQ ID NO: 20271 - protein, 11 aa, synthetic construct
ASSPGGSEKLI

SEQ ID NO: 20272 - protein, 11 aa, synthetic construct
ASSPRGSDKHI

SEQ ID NO: 20273 - protein, 10 aa, synthetic construct
ATGRKTDKGI

SEQ ID NO: 20274 - protein, 11 aa, synthetic construct
ASSPVGSDKPI

SEQ ID NO: 20275 - protein, 11 aa, synthetic construct
ASSRGDRDKLI

SEQ ID NO: 20276 - protein, 11 aa, synthetic construct
ASSRGDTDKLF

SEQ ID NO: 20277 - protein, 11 aa, synthetic construct
ASSRGDTDKLI

SEQ ID NO: 20278 - protein, 11 aa, synthetic construct
ASSRGDTDKRI

SEQ ID NO: 20279 - protein, 11 aa, synthetic construct
ASSRGDTENLN

SEQ ID NO: 20280 - protein, 11 aa, synthetic construct
ASSRGDTQKLI

SEQ ID NO: 20281 - protein, 11 aa, synthetic construct
ASSRGDTVKLI

SEQ ID NO: 20282 - protein, 11 aa, synthetic construct
ASSRVDTDKLI

SEQ ID NO: 20283 - protein, 10 aa, synthetic construct
ASSTYTDKHI

SEQ ID NO: 20284 - protein, 10 aa, synthetic construct
ASSTYTDKII

SEQ ID NO: 20285 - protein, 10 aa, synthetic construct
ASSTYTDKLF

SEQ ID NO: 20286 - protein, 11 aa, synthetic construct
DAARGGTQKHK

SEQ ID NO: 20287 - protein, 11 aa, synthetic construct
DAGGGGYGYWG

SEQ ID NO: 20288 - protein, 16 aa, synthetic construct
EACLMWGIRSWDTRQM

SEQ ID NO: 20289 - protein, 10 aa, synthetic construct
DASTYSDKLF

SEQ ID NO: 20290 - protein, 11 aa, synthetic construct
DASRGATDKLN

SEQ ID NO: 20291 - protein, 11 aa, synthetic construct
DASRGATDNLI

SEQ ID NO: 20292 - protein, 11 aa, synthetic construct
DASRGDTAKLI

SEQ ID NO: 20293 - protein, 11 aa, synthetic construct
DASRGDTDNLI

SEQ ID NO: 20294 - protein, 11 aa, synthetic construct
DASRGETDKLI

SEQ ID NO: 20295 - protein, 11 aa, synthetic construct
DASRGGSEKGF

SEQ ID NO: 20296 - protein, 11 aa, synthetic construct
DASRGGSHKLY

SEQ ID NO: 20297 - protein, 11 aa, synthetic construct
DASRGHTDKLI

SEQ ID NO: 20298 - protein, 10 aa, synthetic construct
DASRNTDRLI

SEQ ID NO: 20299 - protein, 7 aa, synthetic construct
DASRRDT

SEQ ID NO: 20300 - protein, 16 aa, synthetic construct
DASRRWGIRSWDTRQM

SEQ ID NO: 20301 - protein, 11 aa, synthetic construct
DASRVETAKLF

SEQ ID NO: 20302 - protein, 10 aa, synthetic construct
DASTYTDKLC

SEQ ID NO: 20303 - protein, 10 aa, synthetic construct
DASPYTEKLF

SEQ ID NO: 20304 - protein, 10 aa, synthetic construct
DASTYTDKLI

SEQ ID NO: 20305 - protein, 10 aa, synthetic construct
DASTYTDQII

SEQ ID NO: 20306 - protein, 10 aa, synthetic construct
DASTYTDQLI

SEQ ID NO: 20307 - protein, 10 aa, synthetic construct
DASTYTDRVI

SEQ ID NO: 20308 - protein, 10 aa, synthetic construct
DASTYTDTLI

SEQ ID NO: 20309 - protein, 10 aa, synthetic construct
DASTYTEKLI

SEQ ID NO: 20310 - protein, 15 aa, synthetic construct
DATGGGYGSWGLHTD

SEQ ID NO: 20311 - protein, 16 aa, synthetic construct
DESMRWGVRTWDTRQM

SEQ ID NO: 20312 - protein, 11 aa, synthetic construct
DESPGGSDKPI

SEQ ID NO: 20313 - protein, 11 aa, synthetic construct
DETRGDTDKLI

SEQ ID NO: 20314 - protein, 13 aa, synthetic construct
DETRGHTKKENFG

SEQ ID NO: 20315 - protein, 11 aa, synthetic construct
DSSRGDTDKLI

SEQ ID NO: 20316 - protein, 11 aa, synthetic construct
DASRGATDKLI

SEQ ID NO: 20317 - protein, 11 aa, synthetic construct
DASPGGSENLI

SEQ ID NO: 20318 - protein, 11 aa, synthetic construct
DAGPGGSVKLI

SEQ ID NO: 20319 - protein, 10 aa, synthetic construct
DARTYTENLF

SEQ ID NO: 20320 - protein, 11 aa, synthetic construct
DAGRGATGKRV

SEQ ID NO: 20321 - protein, 11 aa, synthetic construct
DAGRGDTDKLI

SEQ ID NO: 20322 - protein, 15 aa, synthetic construct
DARGGASGSWGLHTD

SEQ ID NO: 20323 - protein, 14 aa, synthetic construct
DARGGGSGYWGLHT

SEQ ID NO: 20324 - protein, 15 aa, synthetic construct
DARGGGYASWGLHTD

SEQ ID NO: 20325 - protein, 15 aa, synthetic construct
DARGGGYGSWGLHTD

SEQ ID NO: 20326 - protein, 11 aa, synthetic construct
DARHGGSDKPI

SEQ ID NO: 20327 - protein, 14 aa, synthetic construct
DARLGGGRRSWDTR

SEQ ID NO: 20328 - protein, 11 aa, synthetic construct
DARPGGSEKLI

SEQ ID NO: 20329 - protein, 15 aa, synthetic construct
DARRGGTGYMVLHTD

SEQ ID NO: 20330 - protein, 10 aa, synthetic construct
DARTFTDKLI

SEQ ID NO: 20331 - protein, 10 aa, synthetic construct
DARTYTENII

SEQ ID NO: 20332 - protein, 11 aa, synthetic construct
DARVGGSGYWG

SEQ ID NO: 20333 - protein, 11 aa, synthetic construct
DASPGGSDKVI

SEQ ID NO: 20334 - protein, 11 aa, synthetic construct
DASGGETDKVM

SEQ ID NO: 20335 - protein, 11 aa, synthetic construct
DASHGGSAKII

SEQ ID NO: 20336 - protein, 11 aa, synthetic construct
DASLGDTETRL

SEQ ID NO: 20337 - protein, 16 aa, synthetic construct
DASLWGGIGSCETRQM

SEQ ID NO: 20338 - protein, 16 aa, synthetic construct
DASMRCGIRSSDTRQM

SEQ ID NO: 20339 - protein, 15 aa, synthetic construct
DASMRWGIRSWYTRQ

SEQ ID NO: 20340 - protein, 15 aa, synthetic construct
DASMRWGIRYWATRQ

SEQ ID NO: 20341 - protein, 16 aa, synthetic construct
DASMRWWIRSWDTRQM

SEQ ID NO: 20342 - protein, 11 aa, synthetic construct
DASPGGSAKHI

SEQ ID NO: 20343 - protein, 11 aa, synthetic construct
DASPGGSDKLN

SEQ ID NO: 20344 - protein, 11 aa, synthetic construct
DASPGGSDKPI

SEQ ID NO: 20345 - protein, 11 aa, synthetic construct
DASPGGSDKPN

SEQ ID NO: 20346 - protein, 11 aa, synthetic construct
AASRGDTHTLN

SEQ ID NO: 20347 - protein, 11 aa, synthetic construct
AAAEGKPINSS

SEQ ID NO: 20348 - protein, 11 aa, synthetic construct
AASRGDTHKRI

SEQ ID NO: 20349 - protein, 16 aa, synthetic construct
AARMSWVISAWGTRQM

SEQ ID NO: 20350 - protein, 16 aa, synthetic construct
AARMRWGLRSCDTRQM

SEQ ID NO: 20351 - protein, 15 aa, synthetic construct
AARMRWGRRAWDTRQ

SEQ ID NO: 20352 - protein, 14 aa, synthetic construct
AARMRWGRRSWDPR

SEQ ID NO: 20353 - protein, 16 aa, synthetic construct
AARMRWGRRSWDPRQM

SEQ ID NO: 20354 - protein, 16 aa, synthetic construct
AARMRWGRRSWDTRQM

SEQ ID NO: 20355 - protein, 16 aa, synthetic construct
AARMRWGTRSWDTRQM

SEQ ID NO: 20356 - protein, 16 aa, synthetic construct
AARMRWGVRSWDTRRM

SEQ ID NO: 20357 - protein, 13 aa, synthetic construct
AARMRWGYGPGTP

SEQ ID NO: 20358 - protein, 9 aa, synthetic construct
AARMRWWIT

SEQ ID NO: 20359 - protein, 16 aa, synthetic construct
AARMSWGGRACDTRQM

SEQ ID NO: 20360 - protein, 16 aa, synthetic construct
AARMSWGIRSWDTRQM

SEQ ID NO: 20361 - protein, 16 aa, synthetic construct
AARMTWGIRSWDTRQM

SEQ ID NO: 20362 - protein, 16 aa, synthetic construct
AARMRWGISSWDTRHM

SEQ ID NO: 20363 - protein, 13 aa, synthetic construct
AARMWWGIRSWDT

SEQ ID NO: 20364 - protein, 11 aa, synthetic construct
AARNDDTHKII

SEQ ID NO: 20365 - protein, 10 aa, synthetic construct
AARNNTEKLI

SEQ ID NO: 20366 - protein, 10 aa, synthetic construct
AARNNTHKLI

SEQ ID NO: 20367 - protein, 9 aa, synthetic construct
AARNVHTYK

SEQ ID NO: 20368 - protein, 10 aa, synthetic construct
AARNYTDKLN

SEQ ID NO: 20369 - protein, 10 aa, synthetic construct
AARNYTYQQI

SEQ ID NO: 20370 - protein, 11 aa, synthetic construct
AARPAGSEKLF

SEQ ID NO: 20371 - protein, 11 aa, synthetic construct
AARPAGSNKLN

SEQ ID NO: 20372 - protein, 10 aa, synthetic construct
AARPATEKHI

SEQ ID NO: 20373 - protein, 11 aa, synthetic construct
AARPCYTEKLI

SEQ ID NO: 20374 - protein, 16 aa, synthetic construct
AARMRWGISSWYTRQM

SEQ ID NO: 20375 - protein, 16 aa, synthetic construct
AARMRWGIRSWSTRQM

SEQ ID NO: 20376 - protein, 16 aa, synthetic construct
AARLRWGRRSWDARQM

SEQ ID NO: 20377 - protein, 12 aa, synthetic construct
AARMRWGIRETH

SEQ ID NO: 20378 - protein, 16 aa, synthetic construct
AARLWWGIRAWDTRPM

SEQ ID NO: 20379 - protein, 15 aa, synthetic construct
AARMGRGIRSWDTRQ

SEQ ID NO: 20380 - protein, 16 aa, synthetic construct
AARMGWGIRSWDTRPM

SEQ ID NO: 20381 - protein, 15 aa, synthetic construct
AARMGWGIRSWDTRQ

SEQ ID NO: 20382 - protein, 16 aa, synthetic construct
AARMGWGIRSWDTRQM

SEQ ID NO: 20383 - protein, 6 aa, synthetic construct
AARMRC

SEQ ID NO: 20384 - protein, 11 aa, synthetic construct
AARMRGHREPH

SEQ ID NO: 20385 - protein, 16 aa, synthetic construct
AARMRWGFGCWDTRQM

SEQ ID NO: 20386 - protein, 14 aa, synthetic construct
AARMRWGIGSWDSR

SEQ ID NO: 20387 - protein, 16 aa, synthetic construct
AARMRWGIGSWETRQM

SEQ ID NO: 20388 - protein, 16 aa, synthetic construct
AARMRWGIRAWSTRQM

SEQ ID NO: 20389 - protein, 16 aa, synthetic construct
AARMRWGIRPWDTRQM

SEQ ID NO: 20390 - protein, 16 aa, synthetic construct
AARMRWGIRSWGVHTD

SEQ ID NO: 20391 - protein, 16 aa, synthetic construct
AARMRWGIRSRDTRHM

SEQ ID NO: 20392 - protein, 15 aa, synthetic construct
AARMRWGIRSRDTRQ

SEQ ID NO: 20393 - protein, 16 aa, synthetic construct
AARMRWGIRSSDTRPM

SEQ ID NO: 20394 - protein, 16 aa, synthetic construct
AARMRWGIRSSDTRQM

SEQ ID NO: 20395 - protein, 16 aa, synthetic construct
AARMRWGIRSWATRPM

SEQ ID NO: 20396 - protein, 15 aa, synthetic construct
AARMRWGIRSWATRQ

SEQ ID NO: 20397 - protein, 16 aa, synthetic construct
AARMRWGIRSWDNRQM

SEQ ID NO: 20398 - protein, 16 aa, synthetic construct
AARMRWGIRSWDTRHM

SEQ ID NO: 20399 - protein, 16 aa, synthetic construct
AARMRWGIRSWDTRPM

SEQ ID NO: 20400 - protein, 16 aa, synthetic construct
AARMRWGIRSWESRQM

SEQ ID NO: 20401 - protein, 16 aa, synthetic construct
AARMRWGIRSWETRQM

SEQ ID NO: 20402 - protein, 10 aa, synthetic construct
AARPDTDQLI

SEQ ID NO: 20403 - protein, 16 aa, synthetic construct
AARPETLHLLLPTATT

SEQ ID NO: 20404 - protein, 10 aa, synthetic construct
AARPFRSDLL

SEQ ID NO: 20405 - protein, 11 aa, synthetic construct
AARPGGSDQPI

SEQ ID NO: 20406 - protein, 11 aa, synthetic construct
AARPGGSDHLN

SEQ ID NO: 20407 - protein, 11 aa, synthetic construct
AARPGGSDKLS

SEQ ID NO: 20408 - protein, 11 aa, synthetic construct
AARPGGSDKRI

SEQ ID NO: 20409 - protein, 11 aa, synthetic construct
AARPGGSDNLF

SEQ ID NO: 20410 - protein, 11 aa, synthetic construct
AARPGGSDNLK

SEQ ID NO: 20411 - protein, 11 aa, synthetic construct
AARPGGSDNPI

SEQ ID NO: 20412 - protein, 11 aa, synthetic construct
AARPGGSDNSS

SEQ ID NO: 20413 - protein, 11 aa, synthetic construct
AARPGGSDPLI

SEQ ID NO: 20414 - protein, 11 aa, synthetic construct
AARPGGSDQLN

SEQ ID NO: 20415 - protein, 11 aa, synthetic construct
AARPGGSDQLS

SEQ ID NO: 20416 - protein, 11 aa, synthetic construct
AARPGGSDQLT

SEQ ID NO: 20417 - protein, 11 aa, synthetic construct
AARPGGSDRRS

SEQ ID NO: 20418 - protein, 5 aa, synthetic construct
AARPG

SEQ ID NO: 20419 - protein, 11 aa, synthetic construct
AARPGGSDTHI

SEQ ID NO: 20420 - protein, 11 aa, synthetic construct
AARPGGSDTPI

SEQ ID NO: 20421 - protein, 11 aa, synthetic construct
AARPGGSDTRI

SEQ ID NO: 20422 - protein, 11 aa, synthetic construct
AARPGGSDYLV

SEQ ID NO: 20423 - protein, 11 aa, synthetic construct
AARPGGSEDLI

SEQ ID NO: 20424 - protein, 11 aa, synthetic construct
AARPGGSEKHI

SEQ ID NO: 20425 - protein, 11 aa, synthetic construct
AARPGGSEKLM

SEQ ID NO: 20426 - protein, 11 aa, synthetic construct
AARPGGSESLI

SEQ ID NO: 20427 - protein, 11 aa, synthetic construct
AARPGGSGKLI

SEQ ID NO: 20428 - protein, 11 aa, synthetic construct
AARPGGSGLVI

SEQ ID NO: 20429 - protein, 11 aa, synthetic construct
AARPGGSGQLI

SEQ ID NO: 20430 - protein, 11 aa, synthetic construct
AARPGGSDELI

SEQ ID NO: 20431 - protein, 11 aa, synthetic construct
AARPGGSDDLI

SEQ ID NO: 20432 - protein, 11 aa, synthetic construct
AARPGGSATLI

SEQ ID NO: 20433 - protein, 11 aa, synthetic construct
AARPGGSAQLM

SEQ ID NO: 20434 - protein, 11 aa, synthetic construct
AARPGASEKLI

SEQ ID NO: 20435 - protein, 11 aa, synthetic construct
AARPGDPINSS

SEQ ID NO: 20436 - protein, 11 aa, synthetic construct
AARPGDTANLI

SEQ ID NO: 20437 - protein, 11 aa, synthetic construct
AARPGGAAHLI

SEQ ID NO: 20438 - protein, 11 aa, synthetic construct
AARPGGAANLI

SEQ ID NO: 20439 - protein, 11 aa, synthetic construct
AARPGGADALI

SEQ ID NO: 20440 - protein, 11 aa, synthetic construct
AARPGGADKLS

SEQ ID NO: 20441 - protein, 11 aa, synthetic construct
AARPGGAEKLI

SEQ ID NO: 20442 - protein, 11 aa, synthetic construct
AARPGGAENLI

SEQ ID NO: 20443 - protein, 10 aa, synthetic construct
AARPGGARAP

SEQ ID NO: 20444 - protein, 11 aa, synthetic construct
AARPGGCAKIN

SEQ ID NO: 20445 - protein, 11 aa, synthetic construct
AARPGGCDKLI

SEQ ID NO: 20446 - protein, 11 aa, synthetic construct
AARPGGCGEVF

SEQ ID NO: 20447 - protein, 11 aa, synthetic construct
AARPGGFEKLI

SEQ ID NO: 20448 - protein, 10 aa, synthetic construct
AARPGGGEEV

SEQ ID NO: 20449 - protein, 15 aa, synthetic construct
AARPGGGIRSWDTRQ

SEQ ID NO: 20450 - protein, 11 aa, synthetic construct
AARPGGSAHLI

SEQ ID NO: 20451 - protein, 11 aa, synthetic construct
AARPGGSAKHR

SEQ ID NO: 20452 - protein, 13 aa, synthetic construct
AARPGGSAKPILG

SEQ ID NO: 20453 - protein, 11 aa, synthetic construct
AARPGGSAKRI

SEQ ID NO: 20454 - protein, 14 aa, synthetic construct
AARPGGSAPGTPDR

SEQ ID NO: 20455 - protein, 11 aa, synthetic construct
AARPGGSAQHI

SEQ ID NO: 20456 - protein, 11 aa, synthetic construct
AARPGGSAQLI

SEQ ID NO: 20457 - protein, 15 aa, synthetic construct
AARLRWGRSSWDTRE

SEQ ID NO: 20458 - protein, 12 aa, synthetic construct
AARLRWGMRCWE

SEQ ID NO: 20459 - protein, 11 aa, synthetic construct
AARPGGSHKLI

SEQ ID NO: 20460 - protein, 14 aa, synthetic construct
AARGGGYGYWGDHT

SEQ ID NO: 20461 - protein, 15 aa, synthetic construct
AARGGGYGYCGLKTD

SEQ ID NO: 20462 - protein, 15 aa, synthetic construct
AARGGGYGYCVRDTV

SEQ ID NO: 20463 - protein, 15 aa, synthetic construct
AARGGGYGYGGLHAD

SEQ ID NO: 20464 - protein, 15 aa, synthetic construct
AARGGGYGYGGLNTD

SEQ ID NO: 20465 - protein, 14 aa, synthetic construct
AARGGGYGYRGLNT

SEQ ID NO: 20466 - protein, 15 aa, synthetic construct
AARGGGYGYRGLQTD

SEQ ID NO: 20467 - protein, 14 aa, synthetic construct
AARGGGYGYRRLHT

SEQ ID NO: 20468 - protein, 14 aa, synthetic construct
AARGGGYGYSGLHT

SEQ ID NO: 20469 - protein, 15 aa, synthetic construct
AARGGGYGYSGLPTD

SEQ ID NO: 20470 - protein, 15 aa, synthetic construct
AARGGGYGYWDLHTD

SEQ ID NO: 20471 - protein, 15 aa, synthetic construct
AARGGGYGYWDTRQV

SEQ ID NO: 20472 - protein, 15 aa, synthetic construct
AARGGGYGYWGDHTD

SEQ ID NO: 20473 - protein, 15 aa, synthetic construct
AARGGGYGYAGLHTD

SEQ ID NO: 20474 - protein, 15 aa, synthetic construct
AARGGGYGYWGHDTD

SEQ ID NO: 20475 - protein, 13 aa, synthetic construct
AARGGGYGYWGHP

SEQ ID NO: 20476 - protein, 15 aa, synthetic construct
AARGGGYGYWGINTD

SEQ ID NO: 20477 - protein, 15 aa, synthetic construct
AARGGGYGYWGLATD

SEQ ID NO: 20478 - protein, 14 aa, synthetic construct
AARGGGYGYWGLLT

SEQ ID NO: 20479 - protein, 15 aa, synthetic construct
AARGGGYGYWGLNTA

SEQ ID NO: 20480 - protein, 15 aa, synthetic construct
AARGGGYGYWGLPTG

SEQ ID NO: 20481 - protein, 15 aa, synthetic construct
AARGGGYGYWGLQPD

SEQ ID NO: 20482 - protein, 15 aa, synthetic construct
AARGGGYGYWGLSTD

SEQ ID NO: 20483 - protein, 13 aa, synthetic construct
AARGGGYGYWGLT

SEQ ID NO: 20484 - protein, 15 aa, synthetic construct
AARGGGYGYWGLTPI

SEQ ID NO: 20485 - protein, 12 aa, synthetic construct
AARGGGYGYCGL

SEQ ID NO: 20486 - protein, 14 aa, synthetic construct
AARGGGYGWWGVDT

SEQ ID NO: 20487 - protein, 16 aa, synthetic construct
AARLRWGIRSWDTPQM

SEQ ID NO: 20488 - protein, 14 aa, synthetic construct
AARGGGYGSGGLST

SEQ ID NO: 20489 - protein, 15 aa, synthetic construct
AARGGGYGHWGLPTD

SEQ ID NO: 20490 - protein, 15 aa, synthetic construct
AARGGGYGHWGVDTD

SEQ ID NO: 20491 - protein, 12 aa, synthetic construct
AARGGGYGKVGH

SEQ ID NO: 20492 - protein, 9 aa, synthetic construct
AARGGGYGN

SEQ ID NO: 20493 - protein, 12 aa, synthetic construct
AARGGGYGNRGH

SEQ ID NO: 20494 - protein, 15 aa, synthetic construct
AARGGGYGNRGRPTD

SEQ ID NO: 20495 - protein, 15 aa, synthetic construct
AARGGGYGNVGIPTD

SEQ ID NO: 20496 - protein, 11 aa, synthetic construct
AARGGGYGNWG

SEQ ID NO: 20497 - protein, 15 aa, synthetic construct
AARGGGYGPWGLPTD

SEQ ID NO: 20498 - protein, 15 aa, synthetic construct
AARGGGYGSCGLHTD

SEQ ID NO: 20499 - protein, 15 aa, synthetic construct
AARGGGYGSGGLPPD

SEQ ID NO: 20500 - protein, 15 aa, synthetic construct
AARGGGYGSRGHHTD

SEQ ID NO: 20501 - protein, 15 aa, synthetic construct
AARGGGYGVWGRPPD

SEQ ID NO: 20502 - protein, 14 aa, synthetic construct
AARGGGYGSRGLHT

SEQ ID NO: 20503 - protein, 15 aa, synthetic construct
AARGGGYGSSGLLTD

SEQ ID NO: 20504 - protein, 15 aa, synthetic construct
AARGGGYGSWGGHTD

SEQ ID NO: 20505 - protein, 15 aa, synthetic construct
AARGGGYGSWGINTD

SEQ ID NO: 20506 - protein, 15 aa, synthetic construct
AARGGGYGSWGLATD

SEQ ID NO: 20507 - protein, 15 aa, synthetic construct
AARGGGYGSWGLDTD

SEQ ID NO: 20508 - protein, 15 aa, synthetic construct
AARGGGYGSWGLLTD

SEQ ID NO: 20509 - protein, 13 aa, synthetic construct
AARGGGYGSWGLT

SEQ ID NO: 20510 - protein, 15 aa, synthetic construct
AARGGGYGSWGPHTD

SEQ ID NO: 20511 - protein, 15 aa, synthetic construct
AARGGGYGSWVLHTD

SEQ ID NO: 20512 - protein, 11 aa, synthetic construct
AARGGGYGVWG

SEQ ID NO: 20513 - protein, 16 aa, synthetic construct
AARGGGYGYWGPTPRN

SEQ ID NO: 20514 - protein, 14 aa, synthetic construct
AARGGGYGYWGRHT

SEQ ID NO: 20515 - protein, 15 aa, synthetic construct
AARGGGYGYWGVDTD

SEQ ID NO: 20516 - protein, 5 aa, synthetic construct
AARGW

SEQ ID NO: 20517 - protein, 15 aa, synthetic construct
AARGRGYGYWRLHTD

SEQ ID NO: 20518 - protein, 15 aa, synthetic construct
AARGRGYSYWGLHTD

SEQ ID NO: 20519 - protein, 12 aa, synthetic construct
AARGTGGSDKLI

SEQ ID NO: 20520 - protein, 16 aa, synthetic construct
AARGTGGYAGRTDKLI

SEQ ID NO: 20521 - protein, 16 aa, synthetic construct
AARGTGGYAVISDKLI

SEQ ID NO: 20522 - protein, 16 aa, synthetic construct
AARGTGGYAVRTDKLI

SEQ ID NO: 20523 - protein, 16 aa, synthetic construct
AARGVATATGDSTPIN

SEQ ID NO: 20524 - protein, 11 aa, synthetic construct
AARGVGLRLLG

SEQ ID NO: 20525 - protein, 15 aa, synthetic construct
AARGVGLRLLGTPHR

SEQ ID NO: 20526 - protein, 15 aa, synthetic construct
AARGVGYAYWGLHTD

SEQ ID NO: 20527 - protein, 12 aa, synthetic construct
AARGVGYGYCGL

SEQ ID NO: 20528 - protein, 14 aa, synthetic construct
AARGWASAYWGLDT

SEQ ID NO: 20529 - protein, 15 aa, synthetic construct
AARGGGYGYWRLDTD

SEQ ID NO: 20530 - protein, 7 aa, synthetic construct
AARGWCY

SEQ ID NO: 20531 - protein, 15 aa, synthetic construct
AARGWGSGYWGLHTD

SEQ ID NO: 20532 - protein, 11 aa, synthetic construct
AARGWGYAYWG

SEQ ID NO: 20533 - protein, 15 aa, synthetic construct
AARGWGYGYWGLHTD

SEQ ID NO: 20534 - protein, 11 aa, synthetic construct
AARGWYTEKLI

SEQ ID NO: 20535 - protein, 11 aa, synthetic construct
AARHGGSDKIN

SEQ ID NO: 20536 - protein, 11 aa, synthetic construct
AARIGDTKKHI

SEQ ID NO: 20537 - protein, 15 aa, synthetic construct
AARIMSGKRSWGIDT

SEQ ID NO: 20538 - protein, 16 aa, synthetic construct
AARIRWGISSWDTRQM

SEQ ID NO: 20539 - protein, 10 aa, synthetic construct
AARIYTYKII

SEQ ID NO: 20540 - protein, 16 aa, synthetic construct
AARKRWGIRSWDTRQM

SEQ ID NO: 20541 - protein, 14 aa, synthetic construct
AARGRGYGYWGLQT

SEQ ID NO: 20542 - protein, 11 aa, synthetic construct
AARGRGYGYWG

SEQ ID NO: 20543 - protein, 15 aa, synthetic construct
AARGRGYGCWGLHTD

SEQ ID NO: 20544 - protein, 14 aa, synthetic construct
AARGRGSGYWGLHT

SEQ ID NO: 20545 - protein, 14 aa, synthetic construct
AARGGGYGYWVTRK

SEQ ID NO: 20546 - protein, 15 aa, synthetic construct
AARGGGYGYWVVHTD

SEQ ID NO: 20547 - protein, 15 aa, synthetic construct
AARGGGYRYRGLHTD

SEQ ID NO: 20548 - protein, 15 aa, synthetic construct
AARGGGYRYWGLHTD

SEQ ID NO: 20549 - protein, 15 aa, synthetic construct
AARGGGYSYGGLHTD

SEQ ID NO: 20550 - protein, 11 aa, synthetic construct
AARGGGYVYWG

SEQ ID NO: 20551 - protein, 15 aa, synthetic construct
AARGGGYVYWGLNTD

SEQ ID NO: 20552 - protein, 10 aa, synthetic construct
AARGGIRETL

SEQ ID NO: 20553 - protein, 16 aa, synthetic construct
AARGGIRSWGLHTDKL

SEQ ID NO: 20554 - protein, 16 aa, synthetic construct
AARGGLRLLGTPHRST

SEQ ID NO: 20555 - protein, 8 aa, synthetic construct
AARGGPNT

SEQ ID NO: 20556 - protein, 11 aa, synthetic construct
AARGGPPINSS

SEQ ID NO: 20557 - protein, 15 aa, synthetic construct
AARGGRYGYWGLHTD

SEQ ID NO: 20558 - protein, 15 aa, synthetic construct
AARGGSSGYWGLHTD

SEQ ID NO: 20559 - protein, 15 aa, synthetic construct
AARGGSYGYWGLPTD

SEQ ID NO: 20560 - protein, 8 aa, synthetic construct
AARGGTPI

SEQ ID NO: 20561 - protein, 11 aa, synthetic construct
AARGGTPINPS

SEQ ID NO: 20562 - protein, 11 aa, synthetic construct
AARGGTPRNSS

SEQ ID NO: 20563 - protein, 11 aa, synthetic construct
AARGGTPTNSS

SEQ ID NO: 20564 - protein, 16 aa, synthetic construct
AARGGWGIRSWDTRQM

SEQ ID NO: 20565 - protein, 11 aa, synthetic construct
AARGLYTDKLI

SEQ ID NO: 20566 - protein, 11 aa, synthetic construct
AARGLYTDNII

SEQ ID NO: 20567 - protein, 11 aa, synthetic construct
AARGRDNGYWG

SEQ ID NO: 20568 - protein, 11 aa, synthetic construct
AARPGGSHHLN

SEQ ID NO: 20569 - protein, 11 aa, synthetic construct
AARPGGSHNLI

SEQ ID NO: 20570 - protein, 10 aa, synthetic construct
AARTHTDKHI

SEQ ID NO: 20571 - protein, 15 aa, synthetic construct
AARRGGSGNWGLQTD

SEQ ID NO: 20572 - protein, 11 aa, synthetic construct
AARRGGADTLI

SEQ ID NO: 20573 - protein, 15 aa, synthetic construct
AARRGGATATGDSTP

SEQ ID NO: 20574 - protein, 15 aa, synthetic construct
AARRGGLRLLGSPHR

SEQ ID NO: 20575 - protein, 15 aa, synthetic construct
AARRGGLRQLGTPHR

SEQ ID NO: 20576 - protein, 14 aa, synthetic construct
AARRGGSANCSVQN

SEQ ID NO: 20577 - protein, 11 aa, synthetic construct
AARRGGSANLV

SEQ ID NO: 20578 - protein, 11 aa, synthetic construct
AARRGGSAQLN

SEQ ID NO: 20579 - protein, 11 aa, synthetic construct
AARRGGSDNSS

SEQ ID NO: 20580 - protein, 15 aa, synthetic construct
AARRGGSDQAIDRQG

SEQ ID NO: 20581 - protein, 11 aa, synthetic construct
AARRGGSGDWG

SEQ ID NO: 20582 - protein, 11 aa, synthetic construct
AARRGGSGKSF

SEQ ID NO: 20583 - protein, 11 aa, synthetic construct
AARRGGSVCLI

SEQ ID NO: 20584 - protein, 11 aa, synthetic construct
AARRGETVQLI

SEQ ID NO: 20585 - protein, 11 aa, synthetic construct
AARRGGTAKLI

SEQ ID NO: 20586 - protein, 11 aa, synthetic construct
AARRGGTDKLI

SEQ ID NO: 20587 - protein, 11 aa, synthetic construct
AARRGGTDQLI

SEQ ID NO: 20588 - protein, 11 aa, synthetic construct
AARRGQTHKLI

SEQ ID NO: 20589 - protein, 10 aa, synthetic construct
AARRGSTDKL

SEQ ID NO: 20590 - protein, 15 aa, synthetic construct
AARRGVRGKLCGGAG

SEQ ID NO: 20591 - protein, 11 aa, synthetic construct
AARRGVTDTLI

SEQ ID NO: 20592 - protein, 11 aa, synthetic construct
AARRGYSDKLI

SEQ ID NO: 20593 - protein, 11 aa, synthetic construct
AARRGYTDKLI

SEQ ID NO: 20594 - protein, 11 aa, synthetic construct
AARRGYTENLN

SEQ ID NO: 20595 - protein, 11 aa, synthetic construct
AARRQDPLELI

SEQ ID NO: 20596 - protein, 11 aa, synthetic construct
AARRGGADKLI

SEQ ID NO: 20597 - protein, 13 aa, synthetic construct
AARRGETGDRMWG

SEQ ID NO: 20598 - protein, 11 aa, synthetic construct
AARRGDTEKSI

SEQ ID NO: 20599 - protein, 11 aa, synthetic construct
AARRGDTKKLI

SEQ ID NO: 20600 - protein, 11 aa, synthetic construct
AARRGDTENRN

SEQ ID NO: 20601 - protein, 11 aa, synthetic construct
AARRGDTEPLI

SEQ ID NO: 20602 - protein, 11 aa, synthetic construct
AARRGDTERLI

SEQ ID NO: 20603 - protein, 11 aa, synthetic construct
AARRGDTESLL

SEQ ID NO: 20604 - protein, 11 aa, synthetic construct
AARRGDTETLF

SEQ ID NO: 20605 - protein, 11 aa, synthetic construct
AARRGDTETRI

SEQ ID NO: 20606 - protein, 11 aa, synthetic construct
AARRGDTETVI

SEQ ID NO: 20607 - protein, 11 aa, synthetic construct
AARRGDTEYVI

SEQ ID NO: 20608 - protein, 15 aa, synthetic construct
AARRGDTGLVCVGLG

SEQ ID NO: 20609 - protein, 11 aa, synthetic construct
AARRGDTGNLI

SEQ ID NO: 20610 - protein, 11 aa, synthetic construct
AARRGDTHNLI

SEQ ID NO: 20611 - protein, 10 aa, synthetic construct
AARRGDTRQM

SEQ ID NO: 20612 - protein, 11 aa, synthetic construct
AARRGETDTLI

SEQ ID NO: 20613 - protein, 11 aa, synthetic construct
AARRGDTVQLI

SEQ ID NO: 20614 - protein, 11 aa, synthetic construct
AARRGDTVRLI

SEQ ID NO: 20615 - protein, 7 aa, synthetic construct
AARRGEP

SEQ ID NO: 20616 - protein, 9 aa, synthetic construct
AARRGEPDK

SEQ ID NO: 20617 - protein, 11 aa, synthetic construct
AARRGEPDKPI

SEQ ID NO: 20618 - protein, 11 aa, synthetic construct
AARRGEREPLI

SEQ ID NO: 20619 - protein, 11 aa, synthetic construct
AARRGETAKLI

SEQ ID NO: 20620 - protein, 11 aa, synthetic construct
AARRGETAQLI

SEQ ID NO: 20621 - protein, 11 aa, synthetic construct
AARRGETDKLI

SEQ ID NO: 20622 - protein, 11 aa, synthetic construct
AARRGETDNLF

SEQ ID NO: 20623 - protein, 11 aa, synthetic construct
AARRGETDQLI

SEQ ID NO: 20624 - protein, 11 aa, synthetic construct
AARRRDTVKHN

SEQ ID NO: 20625 - protein, 15 aa, synthetic construct
AARRRGGGRSWDPRQ

SEQ ID NO: 20626 - protein, 11 aa, synthetic construct
AARRRPRDKVI

SEQ ID NO: 20627 - protein, 4 aa, synthetic construct
AART

SEQ ID NO: 20628 - protein, 10 aa, synthetic construct
AARSFTAYVI

SEQ ID NO: 20629 - protein, 10 aa, synthetic construct
AARSFTGKVL

SEQ ID NO: 20630 - protein, 11 aa, synthetic construct
AARSGDTDKLI

SEQ ID NO: 20631 - protein, 11 aa, synthetic construct
AARSGEPETVI

SEQ ID NO: 20632 - protein, 11 aa, synthetic construct
AARSGGSDKLI

SEQ ID NO: 20633 - protein, 13 aa, synthetic construct
AARSGVSGKILLA

SEQ ID NO: 20634 - protein, 10 aa, synthetic construct
AARSNTGILN

SEQ ID NO: 20635 - protein, 16 aa, synthetic construct
AARSRWGLRSWASRQM

SEQ ID NO: 20636 - protein, 5 aa, synthetic construct
AARSY

SEQ ID NO: 20637 - protein, 10 aa, synthetic construct
AARSYTDQLF

SEQ ID NO: 20638 - protein, 10 aa, synthetic construct
AARSYTDQLI

SEQ ID NO: 20639 - protein, 10 aa, synthetic construct
AARTATEKRI

SEQ ID NO: 20640 - protein, 14 aa, synthetic construct
AARRRWGIRAWATR

SEQ ID NO: 20641 - protein, 10 aa, synthetic construct
AARTCTDIVI

SEQ ID NO: 20642 - protein, 11 aa, synthetic construct
AARTDADQLLL

SEQ ID NO: 20643 - protein, 15 aa, synthetic construct
AARTDAPKNIIGPAP

SEQ ID NO: 20644 - protein, 10 aa, synthetic construct
AARTDTDHRH

SEQ ID NO: 20645 - protein, 10 aa, synthetic construct
AARTDTDKII

SEQ ID NO: 20646 - protein, 10 aa, synthetic construct
AARTDTDNSI

SEQ ID NO: 20647 - protein, 10 aa, synthetic construct
AARTDTEKRI

SEQ ID NO: 20648 - protein, 11 aa, synthetic construct
AARTEANQKII

SEQ ID NO: 20649 - protein, 10 aa, synthetic construct
AARTFTAKLI

SEQ ID NO: 20650 - protein, 11 aa, synthetic construct
AARTGDTDKLI

SEQ ID NO: 20651 - protein, 11 aa, synthetic construct
AARTGETDLLI

SEQ ID NO: 20652 - protein, 10 aa, synthetic construct
AARSFSGELF

SEQ ID NO: 20653 - protein, 10 aa, synthetic construct
AARSDTVLLL

SEQ ID NO: 20654 - protein, 10 aa, synthetic construct
AARRYSDKLI

SEQ ID NO: 20655 - protein, 10 aa, synthetic construct
AARRYPDKIE

SEQ ID NO: 20656 - protein, 14 aa, synthetic construct
AARRRWGIRAWDAR

SEQ ID NO: 20657 - protein, 14 aa, synthetic construct
AARRRWGIRAWDTR

SEQ ID NO: 20658 - protein, 15 aa, synthetic construct
AARRRWGIRAWDTRQ

SEQ ID NO: 20659 - protein, 16 aa, synthetic construct
AARRRWGIRSWASRPM

SEQ ID NO: 20660 - protein, 15 aa, synthetic construct
AARRRWGIRSWATRQ

SEQ ID NO: 20661 - protein, 12 aa, synthetic construct
AARRRWGIRSWD

SEQ ID NO: 20662 - protein, 16 aa, synthetic construct
AARRRWGIRSWDARQM

SEQ ID NO: 20663 - protein, 13 aa, synthetic construct
AARRRWGIRSWDT

SEQ ID NO: 20664 - protein, 16 aa, synthetic construct
AARRRWGIRSWETRQM

SEQ ID NO: 20665 - protein, 15 aa, synthetic construct
AARRRWGLRSWDSRQ

SEQ ID NO: 20666 - protein, 15 aa, synthetic construct
AARRRWGLRSWDTRQ

SEQ ID NO: 20667 - protein, 16 aa, synthetic construct
AARRRWGRRSWDTRQM

SEQ ID NO: 20668 - protein, 16 aa, synthetic construct
AARRSWGIRSWETRQM

SEQ ID NO: 20669 - protein, 11 aa, synthetic construct
AARRVDSDKII

SEQ ID NO: 20670 - protein, 7 aa, synthetic construct
AARRVDT

SEQ ID NO: 20671 - protein, 11 aa, synthetic construct
AARRVDTDKII

SEQ ID NO: 20672 - protein, 11 aa, synthetic construct
AARRVDTDKLN

SEQ ID NO: 20673 - protein, 10 aa, synthetic construct
AARRVTETRC

SEQ ID NO: 20674 - protein, 11 aa, synthetic construct
AARRWDTHKLI

SEQ ID NO: 20675 - protein, 11 aa, synthetic construct
AARRWEPDKLI

SEQ ID NO: 20676 - protein, 7 aa, synthetic construct
AARRWWG

SEQ ID NO: 20677 - protein, 16 aa, synthetic construct
AARRWWGIRSWDTRQM

SEQ ID NO: 20678 - protein, 14 aa, synthetic construct
AARRYHKNKIILEE

SEQ ID NO: 20679 - protein, 11 aa, synthetic construct
AARRGDTENLI

SEQ ID NO: 20680 - protein, 11 aa, synthetic construct
AARRGDTEKRI

SEQ ID NO: 20681 - protein, 11 aa, synthetic construct
AARPGGSVHLF

SEQ ID NO: 20682 - protein, 11 aa, synthetic construct
AARRADPDNLI

SEQ ID NO: 20683 - protein, 10 aa, synthetic construct
AARPYHEKLI

SEQ ID NO: 20684 - protein, 10 aa, synthetic construct
AARPYPEENI

SEQ ID NO: 20685 - protein, 10 aa, synthetic construct
AARPYPEKRI

SEQ ID NO: 20686 - protein, 10 aa, synthetic construct
AARPYPETLS

SEQ ID NO: 20687 - protein, 11 aa, synthetic construct
AARPYSEQKLI

SEQ ID NO: 20688 - protein, 10 aa, synthetic construct
AARPYTAQLI

SEQ ID NO: 20689 - protein, 10 aa, synthetic construct
AARPYTAQVI

SEQ ID NO: 20690 - protein, 10 aa, synthetic construct
AARPYTEKLS

SEQ ID NO: 20691 - protein, 10 aa, synthetic construct
AARPYTEKRI

SEQ ID NO: 20692 - protein, 10 aa, synthetic construct
AARPYTVHRF

SEQ ID NO: 20693 - protein, 11 aa, synthetic construct
AARRAATDKLI

SEQ ID NO: 20694 - protein, 10 aa, synthetic construct
AARRADTDKL

SEQ ID NO: 20695 - protein, 10 aa, synthetic construct
AARPWRADLI

SEQ ID NO: 20696 - protein, 11 aa, synthetic construct
AARRADTEKLI

SEQ ID NO: 20697 - protein, 11 aa, synthetic construct
AARRAHTDKIF

SEQ ID NO: 20698 - protein, 15 aa, synthetic construct
AARRCSGKRSWDTRQ

SEQ ID NO: 20699 - protein, 11 aa, synthetic construct
AARRGAPGHHL

SEQ ID NO: 20700 - protein, 11 aa, synthetic construct
AARRGASAELF

SEQ ID NO: 20701 - protein, 14 aa, synthetic construct
AARRGASANRVIGT

SEQ ID NO: 20702 - protein, 10 aa, synthetic construct
AARRGASGVG

SEQ ID NO: 20703 - protein, 11 aa, synthetic construct
AARRGATAKLI

SEQ ID NO: 20704 - protein, 11 aa, synthetic construct
AARRGATAKRI

SEQ ID NO: 20705 - protein, 11 aa, synthetic construct
AARRGATANGS

SEQ ID NO: 20706 - protein, 14 aa, synthetic construct
AARRGATAPLILGH

SEQ ID NO: 20707 - protein, 10 aa, synthetic construct
AARPYAEKII

SEQ ID NO: 20708 - protein, 10 aa, synthetic construct
AARPWPENNS

SEQ ID NO: 20709 - protein, 11 aa, synthetic construct
AARRGDTEKQI

SEQ ID NO: 20710 - protein, 11 aa, synthetic construct
AARPRGCGYLI

SEQ ID NO: 20711 - protein, 11 aa, synthetic construct
AARPGGSVKLS

SEQ ID NO: 20712 - protein, 11 aa, synthetic construct
AARPGGSVKPI

SEQ ID NO: 20713 - protein, 11 aa, synthetic construct
AARPGGSVLLI

SEQ ID NO: 20714 - protein, 11 aa, synthetic construct
AARPGGSVQLF

SEQ ID NO: 20715 - protein, 11 aa, synthetic construct
AARPGGSVQLI

SEQ ID NO: 20716 - protein, 7 aa, synthetic construct
AARPGGW

SEQ ID NO: 20717 - protein, 11 aa, synthetic construct
AARPGGWDNLF

SEQ ID NO: 20718 - protein, 11 aa, synthetic construct
AARPGRSEKLF

SEQ ID NO: 20719 - protein, 11 aa, synthetic construct
AARPGSDHKLI

SEQ ID NO: 20720 - protein, 10 aa, synthetic construct
AARPGTEERW

SEQ ID NO: 20721 - protein, 11 aa, synthetic construct
AARPGVSDKLI

SEQ ID NO: 20722 - protein, 11 aa, synthetic construct
AARPRGSANLS

SEQ ID NO: 20723 - protein, 11 aa, synthetic construct
AARPVGSDKPI

SEQ ID NO: 20724 - protein, 11 aa, synthetic construct
AARPRGSDKLI

SEQ ID NO: 20725 - protein, 11 aa, synthetic construct
AARPRGSEKLI

SEQ ID NO: 20726 - protein, 11 aa, synthetic construct
AARPRGSEKPI

SEQ ID NO: 20727 - protein, 11 aa, synthetic construct
AARPRGSEQLI

SEQ ID NO: 20728 - protein, 11 aa, synthetic construct
AARPRGSETLF

SEQ ID NO: 20729 - protein, 11 aa, synthetic construct
AARPRGSETLI

SEQ ID NO: 20730 - protein, 11 aa, synthetic construct
AARPRSYEKLI

SEQ ID NO: 20731 - protein, 14 aa, synthetic construct
AARPSHPKHTSVQL

SEQ ID NO: 20732 - protein, 10 aa, synthetic construct
AARPSTEKLI

SEQ ID NO: 20733 - protein, 15 aa, synthetic construct
AARPSTQKNKSVQST

SEQ ID NO: 20734 - protein, 11 aa, synthetic construct
AARPVGSDKLI

SEQ ID NO: 20735 - protein, 11 aa, synthetic construct
AARRGATAQLF

SEQ ID NO: 20736 - protein, 11 aa, synthetic construct
AARRGATAQLI

SEQ ID NO: 20737 - protein, 11 aa, synthetic construct
AARRGATDKLL

SEQ ID NO: 20738 - protein, 11 aa, synthetic construct
AARRGDTDKRS

SEQ ID NO: 20739 - protein, 11 aa, synthetic construct
AARRGDTAKLF

SEQ ID NO: 20740 - protein, 11 aa, synthetic construct
AARRGDTAKLN

SEQ ID NO: 20741 - protein, 11 aa, synthetic construct
AARRGDTANLI

SEQ ID NO: 20742 - protein, 15 aa, synthetic construct
AARRGDTANRSLGHG

SEQ ID NO: 20743 - protein, 11 aa, synthetic construct
AARRGDTAQLI

SEQ ID NO: 20744 - protein, 11 aa, synthetic construct
AARRGDTAQLN

SEQ ID NO: 20745 - protein, 11 aa, synthetic construct
AARRGDTARLI

SEQ ID NO: 20746 - protein, 8 aa, synthetic construct
AARRGDTD

SEQ ID NO: 20747 - protein, 11 aa, synthetic construct
AARRGDTDHLI

SEQ ID NO: 20748 - protein, 11 aa, synthetic construct
AARRGDTDKLV

SEQ ID NO: 20749 - protein, 11 aa, synthetic construct
AARRGDTDKRI

SEQ ID NO: 20750 - protein, 11 aa, synthetic construct
AARRGDTDNLN

SEQ ID NO: 20751 - protein, 11 aa, synthetic construct
AARRGATDKVI

SEQ ID NO: 20752 - protein, 11 aa, synthetic construct
AARRGDTDNSS

SEQ ID NO: 20753 - protein, 11 aa, synthetic construct
AARRGDTDQLD

SEQ ID NO: 20754 - protein, 11 aa, synthetic construct
AARRGDTDQLF

SEQ ID NO: 20755 - protein, 11 aa, synthetic construct
AARRGDTDRLI

SEQ ID NO: 20756 - protein, 11 aa, synthetic construct
AARRGDTDTHI

SEQ ID NO: 20757 - protein, 11 aa, synthetic construct
AARRGDTEDLI

SEQ ID NO: 20758 - protein, 11 aa, synthetic construct
AARRGDTEELI

SEQ ID NO: 20759 - protein, 11 aa, synthetic construct
AARRGDTEKHY

SEQ ID NO: 20760 - protein, 11 aa, synthetic construct
AARRGDTEKLF

SEQ ID NO: 20761 - protein, 11 aa, synthetic construct
AARRGDTEKLK

SEQ ID NO: 20762 - protein, 11 aa, synthetic construct
AARRGDTEKLV

SEQ ID NO: 20763 - protein, 11 aa, synthetic construct
AARRGDTAHLS

SEQ ID NO: 20764 - protein, 7 aa, synthetic construct
AARRGDT

SEQ ID NO: 20765 - protein, 11 aa, synthetic construct
AARRGDSERLI

SEQ ID NO: 20766 - protein, 11 aa, synthetic construct
AARRGDSDRLI

SEQ ID NO: 20767 - protein, 11 aa, synthetic construct
AARRGATDNII

SEQ ID NO: 20768 - protein, 11 aa, synthetic construct
AARRGATDNLI

SEQ ID NO: 20769 - protein, 11 aa, synthetic construct
AARRGATDSVI

SEQ ID NO: 20770 - protein, 11 aa, synthetic construct
AARRGATDTLN

SEQ ID NO: 20771 - protein, 11 aa, synthetic construct
AARRGATEKLN

SEQ ID NO: 20772 - protein, 11 aa, synthetic construct
AARRGATEQLI

SEQ ID NO: 20773 - protein, 11 aa, synthetic construct
AARRGATETLF

SEQ ID NO: 20774 - protein, 11 aa, synthetic construct
AARRGATGELI

SEQ ID NO: 20775 - protein, 11 aa, synthetic construct
AARRGATHKLI

SEQ ID NO: 20776 - protein, 11 aa, synthetic construct
AARRGATVKGI

SEQ ID NO: 20777 - protein, 11 aa, synthetic construct
AARRGDAEKVI

SEQ ID NO: 20778 - protein, 11 aa, synthetic construct
AARRGDNKKIL

SEQ ID NO: 20779 - protein, 14 aa, synthetic construct
AARRGDPAHLRVGH

SEQ ID NO: 20780 - protein, 11 aa, synthetic construct
AARRGDPDKRR

SEQ ID NO: 20781 - protein, 11 aa, synthetic construct
AARRGDPDNLI

SEQ ID NO: 20782 - protein, 11 aa, synthetic construct
AARRGDPENLI

SEQ ID NO: 20783 - protein, 11 aa, synthetic construct
AARRGDPERLI

SEQ ID NO: 20784 - protein, 11 aa, synthetic construct
AARRGDPETLI

SEQ ID NO: 20785 - protein, 10 aa, synthetic construct
AARRGDPGAL

SEQ ID NO: 20786 - protein, 11 aa, synthetic construct
AARRGDPINSS

SEQ ID NO: 20787 - protein, 11 aa, synthetic construct
AARRGDPLDSS

SEQ ID NO: 20788 - protein, 11 aa, synthetic construct
AARRGDSDKLI

SEQ ID NO: 20789 - protein, 11 aa, synthetic construct
AARRGDSDKSI

SEQ ID NO: 20790 - protein, 14 aa, synthetic construct
AARGGGYGHWGLNT

SEQ ID NO: 20791 - protein, 15 aa, synthetic construct
AARGGGYGHWGLHTG

SEQ ID NO: 20792 - protein, 15 aa, synthetic construct
AARGGGYGHWGLDTD

SEQ ID NO: 20793 - protein, 11 aa, synthetic construct
AAITADTDKLI

SEQ ID NO: 20794 - protein, 11 aa, synthetic construct
AAIRGDTDKVI

SEQ ID NO: 20795 - protein, 11 aa, synthetic construct
AAIRGDTEKLI

SEQ ID NO: 20796 - protein, 11 aa, synthetic construct
AAIRGETDKLI

SEQ ID NO: 20797 - protein, 7 aa, synthetic construct
AAIRGHQ

SEQ ID NO: 20798 - protein, 11 aa, synthetic construct
AAIRGYTDKLF

SEQ ID NO: 20799 - protein, 11 aa, synthetic construct
AAIRGYTDKLI

SEQ ID NO: 20800 - protein, 11 aa, synthetic construct
AAIRRDTDKHI

SEQ ID NO: 20801 - protein, 16 aa, synthetic construct
AAIRRWGIRSWDTRQM

SEQ ID NO: 20802 - protein, 15 aa, synthetic construct
AAIRTEEHTTVLPSP

SEQ ID NO: 20803 - protein, 11 aa, synthetic construct
AAIRVATYRLI

SEQ ID NO: 20804 - protein, 10 aa, synthetic construct
AAISYTDKLS

SEQ ID NO: 20805 - protein, 10 aa, synthetic construct
AAITSTVKLI

SEQ ID NO: 20806 - protein, 11 aa, synthetic construct
AAIRGDAEKLI

SEQ ID NO: 20807 - protein, 10 aa, synthetic construct
AAITYTAKLI

SEQ ID NO: 20808 - protein, 10 aa, synthetic construct
AAITYTAKLN

SEQ ID NO: 20809 - protein, 10 aa, synthetic construct
AAITYTDKHN

SEQ ID NO: 20810 - protein, 10 aa, synthetic construct
AAITYTYILI

SEQ ID NO: 20811 - protein, 10 aa, synthetic construct
AAITYTYKLI

SEQ ID NO: 20812 - protein, 15 aa, synthetic construct
AAIWGGYGYWGLHTD

SEQ ID NO: 20813 - protein, 15 aa, synthetic construct
AAKGGGCGYWGLHTD

SEQ ID NO: 20814 - protein, 4 aa, synthetic construct
AALG

SEQ ID NO: 20815 - protein, 11 aa, synthetic construct
AALGGAYAYWG

SEQ ID NO: 20816 - protein, 16 aa, synthetic construct
AALGGGGDGDWGLHTD

SEQ ID NO: 20817 - protein, 11 aa, synthetic construct
AALGGGLRLLG

SEQ ID NO: 20818 - protein, 11 aa, synthetic construct
AAIRGDTDKLK

SEQ ID NO: 20819 - protein, 11 aa, synthetic construct
AAIPWGSDKII

SEQ ID NO: 20820 - protein, 15 aa, synthetic construct
AAIGGGSGYWVLQTD

SEQ ID NO: 20821 - protein, 10 aa, synthetic construct
AAILIPINSS

SEQ ID NO: 20822 - protein, 15 aa, synthetic construct
AAIGGGYGNRALNTD

SEQ ID NO: 20823 - protein, 15 aa, synthetic construct
AAIGGGYGSWGIHTD

SEQ ID NO: 20824 - protein, 15 aa, synthetic construct
AAIGGGYGYGGLHTD

SEQ ID NO: 20825 - protein, 15 aa, synthetic construct
AAIGGGYGYWALHTD

SEQ ID NO: 20826 - protein, 15 aa, synthetic construct
AAIGGGYGYWGDHTD

SEQ ID NO: 20827 - protein, 15 aa, synthetic construct
AAIGGGYGYWGHHTD

SEQ ID NO: 20828 - protein, 15 aa, synthetic construct
AAIGGGYGYWGLHTG

SEQ ID NO: 20829 - protein, 15 aa, synthetic construct
AAIGGGYGYWGLQTD

SEQ ID NO: 20830 - protein, 15 aa, synthetic construct
AAIGGGYGYWVLHTD

SEQ ID NO: 20831 - protein, 15 aa, synthetic construct
AAIGRGYGYWGLHTD

SEQ ID NO: 20832 - protein, 16 aa, synthetic construct
AAIKSWGIRSWDTLQM

SEQ ID NO: 20833 - protein, 8 aa, synthetic construct
AAIMGGSG

SEQ ID NO: 20834 - protein, 11 aa, synthetic construct
AAIPRGSDNII

SEQ ID NO: 20835 - protein, 16 aa, synthetic construct
AAIMGWGIRSWDTRQM

SEQ ID NO: 20836 - protein, 11 aa, synthetic construct
AAIMRGHRENH

SEQ ID NO: 20837 - protein, 15 aa, synthetic construct
AAIMRWGIRSSDTRQ

SEQ ID NO: 20838 - protein, 11 aa, synthetic construct
AAIPAGSDKLI

SEQ ID NO: 20839 - protein, 11 aa, synthetic construct
AAIPGGSDKPI

SEQ ID NO: 20840 - protein, 11 aa, synthetic construct
AAIPGGSVKLI

SEQ ID NO: 20841 - protein, 11 aa, synthetic construct
AAIPGGTDKLN

SEQ ID NO: 20842 - protein, 12 aa, synthetic construct
AAIPGGYAPGTP

SEQ ID NO: 20843 - protein, 11 aa, synthetic construct
AAIPRASDHLN

SEQ ID NO: 20844 - protein, 11 aa, synthetic construct
AAIPRGCDKLI

SEQ ID NO: 20845 - protein, 11 aa, synthetic construct
AAIPRGSDKLN

SEQ ID NO: 20846 - protein, 15 aa, synthetic construct
AALGGGLRLLGTPHR

SEQ ID NO: 20847 - protein, 15 aa, synthetic construct
AALGGGLRQLGTPHR

SEQ ID NO: 20848 - protein, 15 aa, synthetic construct
AALGGGPRLLGTPHR

SEQ ID NO: 20849 - protein, 11 aa, synthetic construct
AANRGATDKLI

SEQ ID NO: 20850 - protein, 10 aa, synthetic construct
AALTYTEKHI

SEQ ID NO: 20851 - protein, 10 aa, synthetic construct
AALTYTEKVV

SEQ ID NO: 20852 - protein, 15 aa, synthetic construct
AALWGGYGDWGLTTD

SEQ ID NO: 20853 - protein, 11 aa, synthetic construct
AAMRGGSDKLI

SEQ ID NO: 20854 - protein, 10 aa, synthetic construct
AAMTYTDKLI

SEQ ID NO: 20855 - skipped

SEQ ID NO: 20856 - protein, 11 aa, synthetic construct
AANPGGSAKLI

SEQ ID NO: 20857 - protein, 11 aa, synthetic construct
AANPGGSDRLI

SEQ ID NO: 20858 - protein, 11 aa, synthetic construct
AANPGGSYKLI

SEQ ID NO: 20859 - protein, 11 aa, synthetic construct
AANPPGSHKLI

SEQ ID NO: 20860 - protein, 11 aa, synthetic construct
AANPRDTHKHI

SEQ ID NO: 20861 - protein, 11 aa, synthetic construct
AANRGDTDKPI

SEQ ID NO: 20862 - protein, 10 aa, synthetic construct
AALGGGSGSW

SEQ ID NO: 20863 - protein, 10 aa, synthetic construct
AANSYNDNLI

SEQ ID NO: 20864 - protein, 10 aa, synthetic construct
AANTNTDKLI

SEQ ID NO: 20865 - protein, 10 aa, synthetic construct
AANTYTDKII

SEQ ID NO: 20866 - protein, 10 aa, synthetic construct
AANTYTDKLV

SEQ ID NO: 20867 - protein, 14 aa, synthetic construct
AAPGGGSGSSGLHT

SEQ ID NO: 20868 - protein, 11 aa, synthetic construct
AAPGGGYGYWG

SEQ ID NO: 20869 - protein, 15 aa, synthetic construct
AAPGGGYGYWGHHTD

SEQ ID NO: 20870 - protein, 15 aa, synthetic construct
AAPGGGYGYWGLHTD

SEQ ID NO: 20871 - protein, 11 aa, synthetic construct
AAPPGGSEKHI

SEQ ID NO: 20872 - protein, 11 aa, synthetic construct
AAPPWGSEKLI

SEQ ID NO: 20873 - protein, 11 aa, synthetic construct
AAPRGATDKLY

SEQ ID NO: 20874 - protein, 10 aa, synthetic construct
AALTYTEHLI

SEQ ID NO: 20875 - protein, 10 aa, synthetic construct
AALTYTDQLM

SEQ ID NO: 20876 - protein, 10 aa, synthetic construct
AALTSTVKLI

SEQ ID NO: 20877 - protein, 10 aa, synthetic construct
AALTNTDKLN

SEQ ID NO: 20878 - protein, 15 aa, synthetic construct
AALGGGSGSWGLHTD

SEQ ID NO: 20879 - protein, 15 aa, synthetic construct
AALGGGSGYWGLHTD

SEQ ID NO: 20880 - protein, 15 aa, synthetic construct
AALGGGSGYWGVHTD

SEQ ID NO: 20881 - protein, 11 aa, synthetic construct
AALGGGYGDWG

SEQ ID NO: 20882 - protein, 15 aa, synthetic construct
AALGGGYGEWGLPTD

SEQ ID NO: 20883 - protein, 15 aa, synthetic construct
AALGGGYGSWGLHTD

SEQ ID NO: 20884 - protein, 15 aa, synthetic construct
AALGGGYGYWGLPTD

SEQ ID NO: 20885 - protein, 15 aa, synthetic construct
AALGGGYGYWGLQTD

SEQ ID NO: 20886 - protein, 15 aa, synthetic construct
AALGGGYGYWGVHTD

SEQ ID NO: 20887 - protein, 15 aa, synthetic construct
AALMRGGRRSWDTRQ

SEQ ID NO: 20888 - protein, 16 aa, synthetic construct
AALMRWGIRSWDTRQM

SEQ ID NO: 20889 - protein, 11 aa, synthetic construct
AALPGGSDKLF

SEQ ID NO: 20890 - protein, 11 aa, synthetic construct
AALPGGSVKLI

SEQ ID NO: 20891 - protein, 11 aa, synthetic construct
AALPRGTYKLI

SEQ ID NO: 20892 - protein, 11 aa, synthetic construct
AALQGGSDKLI

SEQ ID NO: 20893 - protein, 11 aa, synthetic construct
AALRGDTDELI

SEQ ID NO: 20894 - protein, 11 aa, synthetic construct
AALRGDTEKLI

SEQ ID NO: 20895 - protein, 11 aa, synthetic construct
AALRGHTDKLI

SEQ ID NO: 20896 - protein, 10 aa, synthetic construct
AALSYTDKVM

SEQ ID NO: 20897 - protein, 10 aa, synthetic construct
AALTFRDKLL

SEQ ID NO: 20898 - protein, 11 aa, synthetic construct
AALTGDTETLL

SEQ ID NO: 20899 - protein, 6 aa, synthetic construct
AALTNT

SEQ ID NO: 20900 - protein, 10 aa, synthetic construct
AALTNTDKHI

SEQ ID NO: 20901 - protein, 15 aa, synthetic construct
AAIGGGYAYWGLHTD

SEQ ID NO: 20902 - protein, 15 aa, synthetic construct
AAIGGGSGYWGLHTD

SEQ ID NO: 20903 - protein, 11 aa, synthetic construct
AARGGGYGHWG

SEQ ID NO: 20904 - protein, 4 aa, synthetic construct
AAGG

SEQ ID NO: 20905 - protein, 11 aa, synthetic construct
AAELGHTVKLI

SEQ ID NO: 20906 - protein, 11 aa, synthetic construct
AAEPGGSEYRI

SEQ ID NO: 20907 - protein, 10 aa, synthetic construct
AAERGPATLS

SEQ ID NO: 20908 - protein, 10 aa, synthetic construct
AAERGPDKHL

SEQ ID NO: 20909 - protein, 10 aa, synthetic construct
AAERGPDKLT

SEQ ID NO: 20910 - protein, 10 aa, synthetic construct
AAERGPDQLI

SEQ ID NO: 20911 - protein, 10 aa, synthetic construct
AAERGPDTLI

SEQ ID NO: 20912 - protein, 10 aa, synthetic construct
AAERGPEKLI

SEQ ID NO: 20913 - protein, 10 aa, synthetic construct
AAERGPYHLM

SEQ ID NO: 20914 - protein, 12 aa, synthetic construct
AAERKSTRQNSS

SEQ ID NO: 20915 - protein, 11 aa, synthetic construct
AAFPGGSDKPI

SEQ ID NO: 20916 - protein, 13 aa, synthetic construct
AAGGGAAAIGRGG

SEQ ID NO: 20917 - protein, 10 aa, synthetic construct
AAEGGHDKLI

SEQ ID NO: 20918 - protein, 16 aa, synthetic construct
AAGGGATATGDSTPIN

SEQ ID NO: 20919 - protein, 6 aa, synthetic construct
AAGGGG

SEQ ID NO: 20920 - protein, 15 aa, synthetic construct
AAGGGGLRRLGTPHR

SEQ ID NO: 20921 - protein, 14 aa, synthetic construct
AAGGGGSGSGGLHT

SEQ ID NO: 20922 - protein, 15 aa, synthetic construct
AAGGGGSGSWGLHTD

SEQ ID NO: 20923 - protein, 11 aa, synthetic construct
AAGGGGSGVGG

SEQ ID NO: 20924 - protein, 15 aa, synthetic construct
AAGGGGSGYWGLHTD

SEQ ID NO: 20925 - protein, 7 aa, synthetic construct
AAGGGGW

SEQ ID NO: 20926 - protein, 14 aa, synthetic construct
AAGGGGWGVGGGGE

SEQ ID NO: 20927 - protein, 14 aa, synthetic construct
AAGGGGYAPGTPDR

SEQ ID NO: 20928 - protein, 15 aa, synthetic construct
AAGGGGYGNAGLNTD

SEQ ID NO: 20929 - protein, 10 aa, synthetic construct
AAEKGPEKLI

SEQ ID NO: 20930 - protein, 10 aa, synthetic construct
AADRGREKHL

SEQ ID NO: 20931 - protein, 15 aa, synthetic construct
AAIGGGSGYWGLDTD

SEQ ID NO: 20932 - protein, 6 aa, synthetic construct
AACPGG

SEQ ID NO: 20933 - protein, 16 aa, synthetic construct
AAAKAFLRRGPPTPIN

SEQ ID NO: 20934 - protein, 15 aa, synthetic construct
AAAKAFLRRGYGYTD

SEQ ID NO: 20935 - protein, 15 aa, synthetic construct
AAAKAFLRWGAPYTD

SEQ ID NO: 20936 - protein, 15 aa, synthetic construct
AAAKGFRRRGAPSTD

SEQ ID NO: 20937 - protein, 11 aa, synthetic construct
AAALGDPINSS

SEQ ID NO: 20938 - protein, 15 aa, synthetic construct
AAAQAFLRRGAPYTD

SEQ ID NO: 20939 - protein, 14 aa, synthetic construct
AACGVGYGYWGLLT

SEQ ID NO: 20940 - protein, 11 aa, synthetic construct
AACHGGSYKLI

SEQ ID NO: 20941 - protein, 16 aa, synthetic construct
AACMRWGIRSWDTRQM

SEQ ID NO: 20942 - protein, 7 aa, synthetic construct
AACMWWG

SEQ ID NO: 20943 - protein, 11 aa, synthetic construct
AACPGASHKLI

SEQ ID NO: 20944 - protein, 11 aa, synthetic construct
AACPGGSAKLS

SEQ ID NO: 20945 - protein, 10 aa, synthetic construct
AADRGPDKLI

SEQ ID NO: 20946 - protein, 11 aa, synthetic construct
AACPGGSDKLN

SEQ ID NO: 20947 - protein, 11 aa, synthetic construct
AACPGGSEKLI

SEQ ID NO: 20948 - protein, 11 aa, synthetic construct
AACPGGSENLI

SEQ ID NO: 20949 - protein, 11 aa, synthetic construct
AACPGGSHKLM

SEQ ID NO: 20950 - protein, 14 aa, synthetic construct
AACPGGYAPGTPDR

SEQ ID NO: 20951 - protein, 11 aa, synthetic construct
AACPGRSDKPI

SEQ ID NO: 20952 - protein, 11 aa, synthetic construct
AACRGDTAKCI

SEQ ID NO: 20953 - protein, 11 aa, synthetic construct
AACRGDTDKLN

SEQ ID NO: 20954 - protein, 11 aa, synthetic construct
AACRGDTDTLI

SEQ ID NO: 20955 - protein, 10 aa, synthetic construct
AACTYTDKLK

SEQ ID NO: 20956 - protein, 10 aa, synthetic construct
AACTYTDTVF

SEQ ID NO: 20957 - protein, 15 aa, synthetic construct
AAGGGGYGPWGLHTG

SEQ ID NO: 20958 - protein, 11 aa, synthetic construct
AAGGGGYGYWG

SEQ ID NO: 20959 - protein, 14 aa, synthetic construct
AAGGGGYGYWGLHT

SEQ ID NO: 20960 - protein, 10 aa, synthetic construct
AAGTYTAQLI

SEQ ID NO: 20961 - protein, 11 aa, synthetic construct
AAGRGDTDNLI

SEQ ID NO: 20962 - protein, 11 aa, synthetic construct
AAGRGDTDQLI

SEQ ID NO: 20963 - protein, 11 aa, synthetic construct
AAGRGDTHKLI

SEQ ID NO: 20964 - protein, 11 aa, synthetic construct
AAGRGDTHQLI

SEQ ID NO: 20965 - protein, 11 aa, synthetic construct
AAGRGETDKLI

SEQ ID NO: 20966 - protein, 8 aa, synthetic construct
AAGRGGRA

SEQ ID NO: 20967 - protein, 10 aa, synthetic construct
AAGRRGGRGW

SEQ ID NO: 20968 - protein, 11 aa, synthetic construct
AAGSGDTAQDI

SEQ ID NO: 20969 - protein, 11 aa, synthetic construct
AAGSGDTERLF

SEQ ID NO: 20970 - protein, 8 aa, synthetic construct
AAGSGGSG

SEQ ID NO: 20971 - protein, 10 aa, synthetic construct
AAGSYTATLM

SEQ ID NO: 20972 - protein, 10 aa, synthetic construct
AAGTYTDELI

SEQ ID NO: 20973 - protein, 8 aa, synthetic construct
AAGGRWGL

SEQ ID NO: 20974 - protein, 8 aa, synthetic construct
AAGTYTDK

SEQ ID NO: 20975 - protein, 10 aa, synthetic construct
AAGTYTDKII

SEQ ID NO: 20976 - protein, 10 aa, synthetic construct
AAGTYTDKLF

SEQ ID NO: 20977 - protein, 10 aa, synthetic construct
AAGTYTDKLS

SEQ ID NO: 20978 - protein, 10 aa, synthetic construct
AAGTYTDNLF

SEQ ID NO: 20979 - protein, 10 aa, synthetic construct
AAGTYTDQLF

SEQ ID NO: 20980 - protein, 7 aa, synthetic construct
AAGVWWG

SEQ ID NO: 20981 - protein, 12 aa, synthetic construct
AAHTGGYGYTDK

SEQ ID NO: 20982 - protein, 11 aa, synthetic construct
AAIDGGSVILI

SEQ ID NO: 20983 - protein, 15 aa, synthetic construct
AAIGGGLRLLGTPHR

SEQ ID NO: 20984 - protein, 15 aa, synthetic construct
AAIGGGNGYWGVHTD

SEQ ID NO: 20985 - protein, 11 aa, synthetic construct
AAGRGDTDKLV

SEQ ID NO: 20986 - protein, 11 aa, synthetic construct
AAGRGDTDKLF

SEQ ID NO: 20987 - protein, 11 aa, synthetic construct
AAGRGDTAKLF

SEQ ID NO: 20988 - protein, 7 aa, synthetic construct
AAGRGDT

SEQ ID NO: 20989 - protein, 11 aa, synthetic construct
AAGLGGSDQLI

SEQ ID NO: 20990 - protein, 16 aa, synthetic construct
AAGLRGGIRSWDTRQM

SEQ ID NO: 20991 - protein, 16 aa, synthetic construct
AAGMRWGIRSWDTLPM

SEQ ID NO: 20992 - protein, 14 aa, synthetic construct
AAGMRWGIRSWDTR

SEQ ID NO: 20993 - protein, 16 aa, synthetic construct
AAGMRWGIRSWETRQM

SEQ ID NO: 20994 - protein, 16 aa, synthetic construct
AAGMRWGISSWDTRQM

SEQ ID NO: 20995 - protein, 16 aa, synthetic construct
AAGMRWGRRSWETRQM

SEQ ID NO: 20996 - protein, 11 aa, synthetic construct
AAGPGDPINST

SEQ ID NO: 20997 - protein, 15 aa, synthetic construct
AAGPGGAVPGFVGGG

SEQ ID NO: 20998 - protein, 14 aa, synthetic construct
AAGPGGSARGLFGE

SEQ ID NO: 20999 - protein, 10 aa, synthetic construct
AAGPGGSDKV

SEQ ID NO: 21000 - protein, 11 aa, synthetic construct
AAGPGGSEKPI

SEQ ID NO: 21001 - protein, 11 aa, synthetic construct
AAGPGGSENLF

SEQ ID NO: 21002 - protein, 11 aa, synthetic construct
AAGPGGSEQLI

SEQ ID NO: 21003 - protein, 11 aa, synthetic construct
AAGPGGSGELI

SEQ ID NO: 21004 - protein, 11 aa, synthetic construct
AAGPGGSVKLI

SEQ ID NO: 21005 - protein, 11 aa, synthetic construct
AAGPGGSVKVI

SEQ ID NO: 21006 - protein, 11 aa, synthetic construct
AAGPGRSEKLI

SEQ ID NO: 21007 - protein, 10 aa, synthetic construct
AAGPYTEKLI

SEQ ID NO: 21008 - protein, 4 aa, synthetic construct
AAGR

SEQ ID NO: 21009 - protein, 6 aa, synthetic construct
AAGRFQ

SEQ ID NO: 21010 - protein, 11 aa, synthetic construct
AAGRGATDKLI

SEQ ID NO: 21011 - protein, 11 aa, synthetic construct
AAGRGATGNLI

SEQ ID NO: 21012 - protein, 11 aa, synthetic construct
AAPRGDTDKLF

SEQ ID NO: 21013 - protein, 11 aa, synthetic construct
AAPRGDTDKLI

SEQ ID NO: 21014 - protein, 14 aa, synthetic construct
AAPTGGSGYTDQLI

SEQ ID NO: 21015 - protein, 15 aa, synthetic construct
AARGGGSGDCGLHTD

SEQ ID NO: 21016 - protein, 11 aa, synthetic construct
AARGGGQGLLG

SEQ ID NO: 21017 - protein, 15 aa, synthetic construct
AARGGGQRLRGTPHR

SEQ ID NO: 21018 - protein, 11 aa, synthetic construct
AARGGGRGLLG

SEQ ID NO: 21019 - protein, 15 aa, synthetic construct
AARGGGRLQLLSAHR

SEQ ID NO: 21020 - protein, 15 aa, synthetic construct
AARGGGSAHWGLHTD

SEQ ID NO: 21021 - protein, 14 aa, synthetic construct
AARGGGSAPGTPDR

SEQ ID NO: 21022 - protein, 10 aa, synthetic construct
AARGGGSASW

SEQ ID NO: 21023 - protein, 14 aa, synthetic construct
AARGGGSAYWGHPT

SEQ ID NO: 21024 - protein, 15 aa, synthetic construct
AARGGGSCYWGLHTD

SEQ ID NO: 21025 - protein, 11 aa, synthetic construct
AARGGGSDNLI

SEQ ID NO: 21026 - protein, 15 aa, synthetic construct
AARGGGSGCWGLHTD

SEQ ID NO: 21027 - protein, 15 aa, synthetic construct
AARGGGSGDGALHTD

SEQ ID NO: 21028 - protein, 15 aa, synthetic construct
AARGGGNGYWGLHTD

SEQ ID NO: 21029 - protein, 15 aa, synthetic construct
AARGGGSGDGGLHTD

SEQ ID NO: 21030 - protein, 15 aa, synthetic construct
AARGGGSGDGGLPTD

SEQ ID NO: 21031 - protein, 15 aa, synthetic construct
AARGGGSGDWGLPPD

SEQ ID NO: 21032 - protein, 15 aa, synthetic construct
AARGGGSGFWGLNPD

SEQ ID NO: 21033 - protein, 9 aa, synthetic construct
AARGGGSGG

SEQ ID NO: 21034 - protein, 14 aa, synthetic construct
AARGGGSGHWGLHT

SEQ ID NO: 21035 - protein, 15 aa, synthetic construct
AARGGGSGHWGLHTD

SEQ ID NO: 21036 - protein, 15 aa, synthetic construct
AARGGGSGPCGRHTD

SEQ ID NO: 21037 - protein, 15 aa, synthetic construct
AARGGGSGSGGLPTG

SEQ ID NO: 21038 - protein, 15 aa, synthetic construct
AARGGGSGSWVLPTD

SEQ ID NO: 21039 - protein, 11 aa, synthetic construct
AARGGGSGTVF

SEQ ID NO: 21040 - protein, 13 aa, synthetic construct
AARGGGNGYWGQH

SEQ ID NO: 21041 - protein, 15 aa, synthetic construct
AARGGGNGYGGHQTD

SEQ ID NO: 21042 - protein, 14 aa, synthetic construct
AAPTGGYGYTDELI

SEQ ID NO: 21043 - protein, 15 aa, synthetic construct
AARGGGLRLLGPQHR

SEQ ID NO: 21044 - protein, 14 aa, synthetic construct
AARGGGHGYWGLHT

SEQ ID NO: 21045 - protein, 13 aa, synthetic construct
AARGGGHGYWGLQ

SEQ ID NO: 21046 - protein, 15 aa, synthetic construct
AARGGGIRLLGNQHR

SEQ ID NO: 21047 - protein, 15 aa, synthetic construct
AARGGGIRLLGRPHR

SEQ ID NO: 21048 - protein, 15 aa, synthetic construct
AARGGGIRQLGTPHR

SEQ ID NO: 21049 - protein, 15 aa, synthetic construct
AARGGGIRSWDTRQK

SEQ ID NO: 21050 - protein, 15 aa, synthetic construct
AARGGGIRSWDTRQM

SEQ ID NO: 21051 - protein, 15 aa, synthetic construct
AARGGGLRIGGTPHR

SEQ ID NO: 21052 - protein, 15 aa, synthetic construct
AARGGGLRLGGTPHG

SEQ ID NO: 21053 - protein, 15 aa, synthetic construct
AARGGGLRLLGHPTD

SEQ ID NO: 21054 - protein, 15 aa, synthetic construct
AARGGGLRLLGHPTE

SEQ ID NO: 21055 - protein, 14 aa, synthetic construct
AARGGGLRLLGTAH

SEQ ID NO: 21056 - protein, 15 aa, synthetic construct
AARGGGLRVRGPPHR

SEQ ID NO: 21057 - protein, 15 aa, synthetic construct
AARGGGLRLLRTPDR

SEQ ID NO: 21058 - protein, 15 aa, synthetic construct
AARGGGLRLLWTPHR

SEQ ID NO: 21059 - protein, 15 aa, synthetic construct
AARGGGLRLMGRPHR

SEQ ID NO: 21060 - protein, 15 aa, synthetic construct
AARGGGLRLMGTPHR

SEQ ID NO: 21061 - protein, 15 aa, synthetic construct
AARGGGLRLRGPPHR

SEQ ID NO: 21062 - protein, 10 aa, synthetic construct
AARGGGLRQL

SEQ ID NO: 21063 - protein, 15 aa, synthetic construct
AARGGGLRQLGTPHR

SEQ ID NO: 21064 - protein, 15 aa, synthetic construct
AARGGGLRRRGTPHR

SEQ ID NO: 21065 - protein, 15 aa, synthetic construct
AARGGGLRRVGTPHR

SEQ ID NO: 21066 - protein, 11 aa, synthetic construct
AARGGGLRVLG

SEQ ID NO: 21067 - protein, 15 aa, synthetic construct
AARGGGLRVLGTPHR

SEQ ID NO: 21068 - protein, 15 aa, synthetic construct
AARGGGSGYGGLRTD

SEQ ID NO: 21069 - protein, 14 aa, synthetic construct
AARGGGSGYGGPHT

SEQ ID NO: 21070 - protein, 15 aa, synthetic construct
AARGGGSGYRGLDTD

SEQ ID NO: 21071 - protein, 15 aa, synthetic construct
AARGGGYGCWVLHTD

SEQ ID NO: 21072 - protein, 11 aa, synthetic construct
AARGGGYCYWG

SEQ ID NO: 21073 - protein, 15 aa, synthetic construct
AARGGGYCYWGLHTD

SEQ ID NO: 21074 - protein, 15 aa, synthetic construct
AARGGGYCYWGLQTD

SEQ ID NO: 21075 - protein, 15 aa, synthetic construct
AARGGGYGAGGLHTD

SEQ ID NO: 21076 - protein, 11 aa, synthetic construct
AARGGGYGAWG

SEQ ID NO: 21077 - protein, 15 aa, synthetic construct
AARGGGYGCGGLHTD

SEQ ID NO: 21078 - protein, 14 aa, synthetic construct
AARGGGYGCWGFHT

SEQ ID NO: 21079 - protein, 15 aa, synthetic construct
AARGGGYGCWGFHTD

SEQ ID NO: 21080 - protein, 14 aa, synthetic construct
AARGGGYGCWGLHT

SEQ ID NO: 21081 - protein, 15 aa, synthetic construct
AARGGGYGCWGLLTD

SEQ ID NO: 21082 - protein, 13 aa, synthetic construct
AARGGGYGCWGLT

SEQ ID NO: 21083 - protein, 15 aa, synthetic construct
AARGGGYGDGGLHTV

SEQ ID NO: 21084 - protein, 12 aa, synthetic construct
AARGGGSGYSGH

SEQ ID NO: 21085 - protein, 11 aa, synthetic construct
AARGGGYGDLG

SEQ ID NO: 21086 - protein, 12 aa, synthetic construct
AARGGGYGDRGH

SEQ ID NO: 21087 - protein, 15 aa, synthetic construct
AARGGGYGDSGLHTD

SEQ ID NO: 21088 - protein, 15 aa, synthetic construct
AARGGGYGDWGLRTD

SEQ ID NO: 21089 - protein, 15 aa, synthetic construct
AARGGGYGDWGVHTD

SEQ ID NO: 21090 - protein, 15 aa, synthetic construct
AARGGGYGEWGLHSD

SEQ ID NO: 21091 - protein, 14 aa, synthetic construct
AARGGGYGFWGLHT

SEQ ID NO: 21092 - protein, 14 aa, synthetic construct
AARGGGYGFWGVDT

SEQ ID NO: 21093 - protein, 15 aa, synthetic construct
AARGGGYGGGGVPSG

SEQ ID NO: 21094 - protein, 15 aa, synthetic construct
AARGGGYGHGGLHTD

SEQ ID NO: 21095 - protein, 15 aa, synthetic construct
AARGGGYGHLGLHTD

SEQ ID NO: 21096 - protein, 14 aa, synthetic construct
AARGGGYCYSGLHT

SEQ ID NO: 21097 - protein, 15 aa, synthetic construct
AARGGGYCFWGLPTD

SEQ ID NO: 21098 - protein, 11 aa, synthetic construct
AARGGGYCFWG

SEQ ID NO: 21099 - protein, 15 aa, synthetic construct
AARGGGYAYWGIHTD

SEQ ID NO: 21100 - protein, 15 aa, synthetic construct
AARGGGSGYSGLQTD

SEQ ID NO: 21101 - protein, 15 aa, synthetic construct
AARGGGSGYWATRQM

SEQ ID NO: 21102 - protein, 15 aa, synthetic construct
AARGGGSGYWGLDTD

SEQ ID NO: 21103 - protein, 15 aa, synthetic construct
AARGGGSGYWGLHSD

SEQ ID NO: 21104 - protein, 15 aa, synthetic construct
AARGGGSGYWGLLTD

SEQ ID NO: 21105 - protein, 14 aa, synthetic construct
AARGGGSGYWGLQT

SEQ ID NO: 21106 - protein, 15 aa, synthetic construct
AARGGGSGYWGRQTD

SEQ ID NO: 21107 - protein, 14 aa, synthetic construct
AARGGGSGYWGVHT

SEQ ID NO: 21108 - protein, 15 aa, synthetic construct
AARGGGSGYWGVHTD

SEQ ID NO: 21109 - protein, 15 aa, synthetic construct
AARGGGSGYWRLHTD

SEQ ID NO: 21110 - protein, 11 aa, synthetic construct
AARGGGSNKHI

SEQ ID NO: 21111 - protein, 11 aa, synthetic construct
AARGGGTDKLI

SEQ ID NO: 21112 - protein, 15 aa, synthetic construct
AARGGGTGYWGLHTD

SEQ ID NO: 21113 - protein, 12 aa, synthetic construct
AARGGGVGYWGH

SEQ ID NO: 21114 - protein, 15 aa, synthetic construct
AARGGGVPLQGTPHR

SEQ ID NO: 21115 - protein, 11 aa, synthetic construct
AARGGGVRLLG

SEQ ID NO: 21116 - protein, 14 aa, synthetic construct
AARGGGYAPRTPDR

SEQ ID NO: 21117 - protein, 10 aa, synthetic construct
AARGGGYASW

SEQ ID NO: 21118 - protein, 15 aa, synthetic construct
AARGGGYASWGLHTD

SEQ ID NO: 21119 - protein, 15 aa, synthetic construct
AARGGGYASWGVHTD

SEQ ID NO: 21120 - protein, 16 aa, synthetic construct
AARGGGYATGDSTPIN

SEQ ID NO: 21121 - protein, 14 aa, synthetic construct
AARGGGYATGTPDT

SEQ ID NO: 21122 - protein, 10 aa, synthetic construct
AARGGGYAYW

SEQ ID NO: 21123 - protein, 11 aa, synthetic construct
AARGGGHGYWG

SEQ ID NO: 21124 - protein, 15 aa, synthetic construct
AARGGGHGSWGPHTD

SEQ ID NO: 21125 - protein, 15 aa, synthetic construct
AARGGGHGSWGLNTD

SEQ ID NO: 21126 - protein, 16 aa, synthetic construct
AARGGATATGDSAPIN

SEQ ID NO: 21127 - protein, 16 aa, synthetic construct
AARGGAPATGDSTPRN

SEQ ID NO: 21128 - protein, 11 aa, synthetic construct
AARGGAPEELI

SEQ ID NO: 21129 - protein, 16 aa, synthetic construct
AARGGAPPPGDSTPIN

SEQ ID NO: 21130 - protein, 10 aa, synthetic construct
AARGGARATG

SEQ ID NO: 21131 - protein, 15 aa, synthetic construct
AARGGARRTGDSSPI

SEQ ID NO: 21132 - protein, 15 aa, synthetic construct
AARGGATAHGDSTPI

SEQ ID NO: 21133 - protein, 10 aa, synthetic construct
AARGGATAPG

SEQ ID NO: 21134 - protein, 16 aa, synthetic construct
AARGGATAPGDSTPRN

SEQ ID NO: 21135 - protein, 16 aa, synthetic construct
AARGGATASGDSTPIN

SEQ ID NO: 21136 - protein, 11 aa, synthetic construct
AARGGATATGA

SEQ ID NO: 21137 - protein, 16 aa, synthetic construct
AARGGATATGASTPIN

SEQ ID NO: 21138 - protein, 15 aa, synthetic construct
AARGGATATGDSIPI

SEQ ID NO: 21139 - protein, 16 aa, synthetic construct
AARGGATATGESTPIN

SEQ ID NO: 21140 - protein, 16 aa, synthetic construct
AARGGATATGDSIPIN

SEQ ID NO: 21141 - protein, 16 aa, synthetic construct
AARGGATATGDSPPIN

SEQ ID NO: 21142 - protein, 14 aa, synthetic construct
AARGGATATGDSSP

SEQ ID NO: 21143 - protein, 16 aa, synthetic construct
AARGGATATGDSSPIN

SEQ ID NO: 21144 - protein, 16 aa, synthetic construct
AARGGATATGDSTAIN

SEQ ID NO: 21145 - protein, 16 aa, synthetic construct
AARGGATATGDSTLIN

SEQ ID NO: 21146 - protein, 14 aa, synthetic construct
AARGGATATGDSTP

SEQ ID NO: 21147 - protein, 16 aa, synthetic construct
AARGGATATGDSTPKN

SEQ ID NO: 21148 - protein, 16 aa, synthetic construct
AARGGATATGDSTPTN

SEQ ID NO: 21149 - protein, 15 aa, synthetic construct
AARGGATATGDSTPV

SEQ ID NO: 21150 - protein, 16 aa, synthetic construct
AARGGATATGDTTPIN

SEQ ID NO: 21151 - protein, 15 aa, synthetic construct
AARGGAPATGDSTPL

SEQ ID NO: 21152 - protein, 16 aa, synthetic construct
AARGGAPATGDSTLIN

SEQ ID NO: 21153 - protein, 16 aa, synthetic construct
AARGGAPAPGDSTPRN

SEQ ID NO: 21154 - protein, 15 aa, synthetic construct
AARGGANGKWVIQTD

SEQ ID NO: 21155 - protein, 14 aa, synthetic construct
AAPTGGYGYTDILI

SEQ ID NO: 21156 - protein, 14 aa, synthetic construct
AAPTGGYGYTDLLI

SEQ ID NO: 21157 - protein, 14 aa, synthetic construct
AAPTGGYGYTDQLI

SEQ ID NO: 21158 - protein, 10 aa, synthetic construct
AAPTYTAQLL

SEQ ID NO: 21159 - protein, 15 aa, synthetic construct
AAQGGGYGYWGLHTD

SEQ ID NO: 21160 - protein, 15 aa, synthetic construct
AARAGGLRLLGTPHR

SEQ ID NO: 21161 - protein, 11 aa, synthetic construct
AARAGGSDKLI

SEQ ID NO: 21162 - protein, 11 aa, synthetic construct
AARAGGSDPLI

SEQ ID NO: 21163 - protein, 15 aa, synthetic construct
AARAGGYCYWGLHTD

SEQ ID NO: 21164 - protein, 10 aa, synthetic construct
AARAGGYEKV

SEQ ID NO: 21165 - protein, 10 aa, synthetic construct
AARAGGYGSW

SEQ ID NO: 21166 - protein, 15 aa, synthetic construct
AARAGGYGSWGLHTD

SEQ ID NO: 21167 - protein, 10 aa, synthetic construct
AARAGGYGTC

SEQ ID NO: 21168 - protein, 14 aa, synthetic construct
AARAGGYGYWGIHT

SEQ ID NO: 21169 - protein, 15 aa, synthetic construct
AARAGGYGYWGLYTD

SEQ ID NO: 21170 - protein, 10 aa, synthetic construct
AARAYTEKPI

SEQ ID NO: 21171 - protein, 10 aa, synthetic construct
AARCASELRM

SEQ ID NO: 21172 - protein, 12 aa, synthetic construct
AARELGWGGMIL

SEQ ID NO: 21173 - protein, 15 aa, synthetic construct
AARGAGYGYWGHHTD

SEQ ID NO: 21174 - protein, 15 aa, synthetic construct
AARGAGYGYWGLDTD

SEQ ID NO: 21175 - protein, 15 aa, synthetic construct
AARGAGYGYWGLHTD

SEQ ID NO: 21176 - protein, 10 aa, synthetic construct
AARGDADKLI

SEQ ID NO: 21177 - protein, 10 aa, synthetic construct
AARGDTEKLN

SEQ ID NO: 21178 - protein, 11 aa, synthetic construct
AARGGATATGE

SEQ ID NO: 21179 - protein, 16 aa, synthetic construct
AARGGATATGGSTPIN

SEQ ID NO: 21180 - protein, 15 aa, synthetic construct
AARGGGHGSWGLHTD

SEQ ID NO: 21181 - protein, 15 aa, synthetic construct
AARGGGDGDWGLPTD

SEQ ID NO: 21182 - protein, 15 aa, synthetic construct
AARGGGAPATGDSTP

SEQ ID NO: 21183 - protein, 15 aa, synthetic construct
AARGGGAPDTGEAPP

SEQ ID NO: 21184 - protein, 15 aa, synthetic construct
AARGGGATAPGDSTP

SEQ ID NO: 21185 - protein, 11 aa, synthetic construct
AARGGGATATG

SEQ ID NO: 21186 - protein, 15 aa, synthetic construct
AARGGGATATGYSTP

SEQ ID NO: 21187 - protein, 15 aa, synthetic construct
AARGGGATRRGASPP

SEQ ID NO: 21188 - protein, 11 aa, synthetic construct
AARGGGCGAWG

SEQ ID NO: 21189 - protein, 15 aa, synthetic construct
AARGGGCGSGGLPTD

SEQ ID NO: 21190 - protein, 11 aa, synthetic construct
AARGGGCGYWG

SEQ ID NO: 21191 - protein, 15 aa, synthetic construct
AARGGGCGYWGLDTD

SEQ ID NO: 21192 - protein, 15 aa, synthetic construct
AARGGGCGYWGLHTG

SEQ ID NO: 21193 - protein, 10 aa, synthetic construct
AARGGGDGSG

SEQ ID NO: 21194 - protein, 15 aa, synthetic construct
AARGGATATGHSTPI

SEQ ID NO: 21195 - protein, 15 aa, synthetic construct
AARGGGDGSGGDTTD

SEQ ID NO: 21196 - protein, 16 aa, synthetic construct
AARGGGDGWGGIASAS

SEQ ID NO: 21197 - protein, 14 aa, synthetic construct
AARGGGDGYGGRHT

SEQ ID NO: 21198 - protein, 11 aa, synthetic construct
AARGGGDGYWG

SEQ ID NO: 21199 - protein, 15 aa, synthetic construct
AARGGGDGYWGLHTD

SEQ ID NO: 21200 - protein, 15 aa, synthetic construct
AARGGGDTLLGHPTD

SEQ ID NO: 21201 - protein, 11 aa, synthetic construct
AARGGGFGVWG

SEQ ID NO: 21202 - protein, 11 aa, synthetic construct
AARGGGFGYWG

SEQ ID NO: 21203 - protein, 15 aa, synthetic construct
AARGGGGGYWGLDTD

SEQ ID NO: 21204 - protein, 11 aa, synthetic construct
AARGGGGYGSW

SEQ ID NO: 21205 - protein, 10 aa, synthetic construct
AARGGGHASW

SEQ ID NO: 21206 - protein, 15 aa, synthetic construct
AARGGGAPAPGDSTP

SEQ ID NO: 21207 - protein, 15 aa, synthetic construct
AARGGGAGSWGRHTD

SEQ ID NO: 21208 - protein, 11 aa, synthetic construct
AARGGETGQLL

SEQ ID NO: 21209 - protein, 11 aa, synthetic construct
AARGGEPRNSS

SEQ ID NO: 21210 - protein, 16 aa, synthetic construct
AARGGATATVDSTPIN

SEQ ID NO: 21211 - protein, 9 aa, synthetic construct
AARGGATES

SEQ ID NO: 21212 - protein, 16 aa, synthetic construct
AARGGATESGDSTPKN

SEQ ID NO: 21213 - protein, 16 aa, synthetic construct
AARGGATGTGDSTPIN

SEQ ID NO: 21214 - protein, 16 aa, synthetic construct
AARGGATGTGDTTPIN

SEQ ID NO: 21215 - protein, 16 aa, synthetic construct
AARGGATPTGDSTPIN

SEQ ID NO: 21216 - protein, 16 aa, synthetic construct
AARGGATRTGDSTPIN

SEQ ID NO: 21217 - protein, 16 aa, synthetic construct
AARGGATVTGDSTPIN

SEQ ID NO: 21218 - protein, 13 aa, synthetic construct
AARGGAYAYWGLT

SEQ ID NO: 21219 - protein, 15 aa, synthetic construct
AARGGAYGCWGLHTD

SEQ ID NO: 21220 - protein, 13 aa, synthetic construct
AARGGAYGSWVIR

SEQ ID NO: 21221 - protein, 15 aa, synthetic construct
AARGGCYGYWGLHTD

SEQ ID NO: 21222 - protein, 11 aa, synthetic construct
AARGGDSGKVI

SEQ ID NO: 21223 - protein, 15 aa, synthetic construct
AARGGDSGYWGLHTD

SEQ ID NO: 21224 - protein, 13 aa, synthetic construct
AARGGDSTPINSS

SEQ ID NO: 21225 - protein, 11 aa, synthetic construct
AARGGDTAKRV

SEQ ID NO: 21226 - protein, 11 aa, synthetic construct
AARGGDTDTLI

SEQ ID NO: 21227 - protein, 11 aa, synthetic construct
AARGGDTEKLI

SEQ ID NO: 21228 - protein, 11 aa, synthetic construct
AARGGDTENVI

SEQ ID NO: 21229 - protein, 8 aa, synthetic construct
AARGGDTG

SEQ ID NO: 21230 - protein, 15 aa, synthetic construct
AARGGDYAKWVFATD

SEQ ID NO: 21231 - protein, 7 aa, synthetic construct
AARGGEA

SEQ ID NO: 21232 - protein, 11 aa, synthetic construct
AARGGEPINSS

SEQ ID NO: 21233 - protein, 11 aa, synthetic construct
AARTGGSHKLI

SEQ ID NO: 21234 - protein, 10 aa, synthetic construct
AARTHTDKLI

SEQ ID NO: 21235 - protein, 11 aa, synthetic construct
AASRGDTGNLI

SEQ ID NO: 21236 - protein, 11 aa, synthetic construct
AASPGGSENLM

SEQ ID NO: 21237 - protein, 11 aa, synthetic construct
AASPGGSEKHF

SEQ ID NO: 21238 - protein, 11 aa, synthetic construct
AASPGGSEKII

SEQ ID NO: 21239 - protein, 10 aa, synthetic construct
AASPGGSEKL

SEQ ID NO: 21240 - protein, 11 aa, synthetic construct
AASPGGSEKLL

SEQ ID NO: 21241 - protein, 11 aa, synthetic construct
AASPGGSEKLY

SEQ ID NO: 21242 - protein, 10 aa, synthetic construct
AASPGGSEKP

SEQ ID NO: 21243 - protein, 10 aa, synthetic construct
AASPGGSEKR

SEQ ID NO: 21244 - protein, 11 aa, synthetic construct
AASPGGSEKRN

SEQ ID NO: 21245 - protein, 11 aa, synthetic construct
AASPGGSEKVF

SEQ ID NO: 21246 - protein, 11 aa, synthetic construct
AASPGGSENDI

SEQ ID NO: 21247 - protein, 11 aa, synthetic construct
AASPGGSENLF

SEQ ID NO: 21248 - protein, 11 aa, synthetic construct
AASPGGSEQPL

SEQ ID NO: 21249 - protein, 11 aa, synthetic construct
AASPGGSEIRI

SEQ ID NO: 21250 - protein, 11 aa, synthetic construct
AASPGGSERLI

SEQ ID NO: 21251 - protein, 11 aa, synthetic construct
AASPGGSETRF

SEQ ID NO: 21252 - protein, 11 aa, synthetic construct
AASPGGSETVF

SEQ ID NO: 21253 - protein, 11 aa, synthetic construct
AASPGGSGHLI

SEQ ID NO: 21254 - protein, 11 aa, synthetic construct
AASPGGSGHPI

SEQ ID NO: 21255 - protein, 11 aa, synthetic construct
AASPGGSGKLF

SEQ ID NO: 21256 - protein, 14 aa, synthetic construct
AASPGGSGKPLCGN

SEQ ID NO: 21257 - protein, 11 aa, synthetic construct
AASPGGSGKVI

SEQ ID NO: 21258 - protein, 11 aa, synthetic construct
AASPGGSGTLI

SEQ ID NO: 21259 - protein, 15 aa, synthetic construct
AASPGGSGYWGLHTD

SEQ ID NO: 21260 - protein, 11 aa, synthetic construct
AASPGGSHKPI

SEQ ID NO: 21261 - protein, 11 aa, synthetic construct
AASPGGSEKGI

SEQ ID NO: 21262 - protein, 11 aa, synthetic construct
AASPGGSEHLI

SEQ ID NO: 21263 - protein, 11 aa, synthetic construct
AASPGGSDKHV

SEQ ID NO: 21264 - protein, 11 aa, synthetic construct
AASPGGSDNII

SEQ ID NO: 21265 - protein, 11 aa, synthetic construct
AASPGGSDKIN

SEQ ID NO: 21266 - protein, 11 aa, synthetic construct
AASPGGSDKLD

SEQ ID NO: 21267 - protein, 11 aa, synthetic construct
AASPGGSDKRF

SEQ ID NO: 21268 - protein, 11 aa, synthetic construct
AASPGGSDKRM

SEQ ID NO: 21269 - protein, 11 aa, synthetic construct
AASPGGSDKVF

SEQ ID NO: 21270 - protein, 11 aa, synthetic construct
AASPGGSDKVM

SEQ ID NO: 21271 - protein, 11 aa, synthetic construct
AASPGGSDKVN

SEQ ID NO: 21272 - protein, 11 aa, synthetic construct
AASPGGSDLLF

SEQ ID NO: 21273 - protein, 11 aa, synthetic construct
AASPGGSDLLI

SEQ ID NO: 21274 - protein, 11 aa, synthetic construct
AASPGGSDNDI

SEQ ID NO: 21275 - protein, 11 aa, synthetic construct
AASPGGSDNHI

SEQ ID NO: 21276 - protein, 11 aa, synthetic construct
AASPGGSDNLM

SEQ ID NO: 21277 - protein, 11 aa, synthetic construct
AASPGGSEDIF

SEQ ID NO: 21278 - protein, 11 aa, synthetic construct
AASPGGSDNRI

SEQ ID NO: 21279 - protein, 11 aa, synthetic construct
AASPGGSDQHI

SEQ ID NO: 21280 - protein, 11 aa, synthetic construct
AASPGGSDQHN

SEQ ID NO: 21281 - protein, 11 aa, synthetic construct
AASPGGSDQLV

SEQ ID NO: 21282 - protein, 11 aa, synthetic construct
AASPGGSDQVI

SEQ ID NO: 21283 - protein, 11 aa, synthetic construct
AASPGGSDRPI

SEQ ID NO: 21284 - protein, 11 aa, synthetic construct
AASPGGSDSLI

SEQ ID NO: 21285 - protein, 11 aa, synthetic construct
AASPGGSDTHI

SEQ ID NO: 21286 - protein, 11 aa, synthetic construct
AASPGGSDTPI

SEQ ID NO: 21287 - protein, 11 aa, synthetic construct
AASPGGSDTVI

SEQ ID NO: 21288 - protein, 11 aa, synthetic construct
AASPGGSEALI

SEQ ID NO: 21289 - protein, 11 aa, synthetic construct
AASPGGSLKLI

SEQ ID NO: 21290 - protein, 11 aa, synthetic construct
AASPGGSPKLI

SEQ ID NO: 21291 - protein, 11 aa, synthetic construct
AASPGGSPKLN

SEQ ID NO: 21292 - protein, 15 aa, synthetic construct
AASPGVSDQLLCGQG

SEQ ID NO: 21293 - protein, 11 aa, synthetic construct
AASPGRSDELI

SEQ ID NO: 21294 - protein, 11 aa, synthetic construct
AASPGRSDKII

SEQ ID NO: 21295 - protein, 11 aa, synthetic construct
AASPGRSDKPI

SEQ ID NO: 21296 - protein, 11 aa, synthetic construct
AASPGRSDKVI

SEQ ID NO: 21297 - protein, 11 aa, synthetic construct
AASPGRSEILI

SEQ ID NO: 21298 - protein, 11 aa, synthetic construct
AASPGRSEKLI

SEQ ID NO: 21299 - protein, 11 aa, synthetic construct
AASPGTPINSS

SEQ ID NO: 21300 - protein, 9 aa, synthetic construct
AASPGTSDR

SEQ ID NO: 21301 - protein, 11 aa, synthetic construct
AASPGVAYKLI

SEQ ID NO: 21302 - protein, 8 aa, synthetic construct
AASPGVGL

SEQ ID NO: 21303 - protein, 11 aa, synthetic construct
AASPGVSDKIN

SEQ ID NO: 21304 - protein, 11 aa, synthetic construct
AASPGVSEKLF

SEQ ID NO: 21305 - protein, 11 aa, synthetic construct
AASPGGSSKPI

SEQ ID NO: 21306 - protein, 10 aa, synthetic construct
AASPIPINSS

SEQ ID NO: 21307 - protein, 11 aa, synthetic construct
AASPLGSDKLI

SEQ ID NO: 21308 - protein, 11 aa, synthetic construct
AASPPRSDKLI

SEQ ID NO: 21309 - protein, 11 aa, synthetic construct
AASPRGADNLI

SEQ ID NO: 21310 - protein, 11 aa, synthetic construct
AASPRGSAKLI

SEQ ID NO: 21311 - protein, 11 aa, synthetic construct
AASPRGSANLI

SEQ ID NO: 21312 - protein, 11 aa, synthetic construct
AASPRGSANTS

SEQ ID NO: 21313 - protein, 11 aa, synthetic construct
AASPRGSDKIK

SEQ ID NO: 21314 - protein, 11 aa, synthetic construct
AASPRGSDKLN

SEQ ID NO: 21315 - protein, 11 aa, synthetic construct
AASPRGSDQII

SEQ ID NO: 21316 - protein, 11 aa, synthetic construct
AASPRGSEELI

SEQ ID NO: 21317 - protein, 16 aa, synthetic construct
AASPGPGKRMVGRGTG

SEQ ID NO: 21318 - protein, 11 aa, synthetic construct
AASPGNPINSS

SEQ ID NO: 21319 - protein, 11 aa, synthetic construct
AASPGGYEKLI

SEQ ID NO: 21320 - protein, 14 aa, synthetic construct
AASPGGYAPGTPDK

SEQ ID NO: 21321 - protein, 11 aa, synthetic construct
AASPGGSSQLI

SEQ ID NO: 21322 - protein, 11 aa, synthetic construct
AASPGGSVELI

SEQ ID NO: 21323 - protein, 11 aa, synthetic construct
AASPGGSVKII

SEQ ID NO: 21324 - protein, 11 aa, synthetic construct
AASPGGSVKLF

SEQ ID NO: 21325 - protein, 11 aa, synthetic construct
AASPGGSVKLL

SEQ ID NO: 21326 - protein, 11 aa, synthetic construct
AASPGGSVKLM

SEQ ID NO: 21327 - protein, 11 aa, synthetic construct
AASPGGSVNLI

SEQ ID NO: 21328 - protein, 11 aa, synthetic construct
AASPGGSVTLI

SEQ ID NO: 21329 - protein, 11 aa, synthetic construct
AASPGGSYKDI

SEQ ID NO: 21330 - protein, 10 aa, synthetic construct
AASPGGSYKL

SEQ ID NO: 21331 - protein, 11 aa, synthetic construct
AASPGGSYKLN

SEQ ID NO: 21332 - protein, 11 aa, synthetic construct
AASPGGSYKNI

SEQ ID NO: 21333 - protein, 11 aa, synthetic construct
AASPGGTDILI

SEQ ID NO: 21334 - protein, 11 aa, synthetic construct
AASPGGTDKLF

SEQ ID NO: 21335 - protein, 11 aa, synthetic construct
AASPGGTDKRI

SEQ ID NO: 21336 - protein, 11 aa, synthetic construct
AASPGGTDQLI

SEQ ID NO: 21337 - protein, 11 aa, synthetic construct
AASPGGTEKRI

SEQ ID NO: 21338 - protein, 8 aa, synthetic construct
AASPGGTP

SEQ ID NO: 21339 - protein, 12 aa, synthetic construct
AASPGGTPINSS

SEQ ID NO: 21340 - protein, 11 aa, synthetic construct
AASPGGVDKLI

SEQ ID NO: 21341 - protein, 14 aa, synthetic construct
AASPGGYAHGTPDR

SEQ ID NO: 21342 - protein, 14 aa, synthetic construct
AASPGGYAPGPPDR

SEQ ID NO: 21343 - protein, 11 aa, synthetic construct
AASPGGYAPGT

SEQ ID NO: 21344 - protein, 11 aa, synthetic construct
AASPGGSDKIM

SEQ ID NO: 21345 - protein, 11 aa, synthetic construct
AASPGGSDKHT

SEQ ID NO: 21346 - protein, 11 aa, synthetic construct
AASPRGSEKPI

SEQ ID NO: 21347 - protein, 11 aa, synthetic construct
AASPGGADHLI

SEQ ID NO: 21348 - protein, 11 aa, synthetic construct
AASPGDPRNSS

SEQ ID NO: 21349 - protein, 11 aa, synthetic construct
AASPGDSDKLI

SEQ ID NO: 21350 - protein, 13 aa, synthetic construct
AASPGDSTPINST

SEQ ID NO: 21351 - protein, 11 aa, synthetic construct
AASPGDTDKLF

SEQ ID NO: 21352 - protein, 11 aa, synthetic construct
AASPGESDKPI

SEQ ID NO: 21353 - protein, 11 aa, synthetic construct
AASPGESYKRI

SEQ ID NO: 21354 - protein, 11 aa, synthetic construct
AASPGETDKHI

SEQ ID NO: 21355 - protein, 11 aa, synthetic construct
AASPGETEKHI

SEQ ID NO: 21356 - protein, 7 aa, synthetic construct
AASPGGA

SEQ ID NO: 21357 - protein, 11 aa, synthetic construct
AASPGGAAKLI

SEQ ID NO: 21358 - protein, 14 aa, synthetic construct
AASPGGAANRSLGH

SEQ ID NO: 21359 - protein, 11 aa, synthetic construct
AASPGGADKLF

SEQ ID NO: 21360 - protein, 11 aa, synthetic construct
AASPGATDKLI

SEQ ID NO: 21361 - protein, 13 aa, synthetic construct
AASPGGADLPSYG

SEQ ID NO: 21362 - protein, 11 aa, synthetic construct
AASPGGADNII

SEQ ID NO: 21363 - protein, 11 aa, synthetic construct
AASPGGADNRI

SEQ ID NO: 21364 - protein, 11 aa, synthetic construct
AASPGGADQLI

SEQ ID NO: 21365 - protein, 11 aa, synthetic construct
AASPGGADTLF

SEQ ID NO: 21366 - protein, 11 aa, synthetic construct
AASPGGADTPI

SEQ ID NO: 21367 - protein, 11 aa, synthetic construct
AASPGGAEKHI

SEQ ID NO: 21368 - protein, 11 aa, synthetic construct
AASPGGAEKLN

SEQ ID NO: 21369 - protein, 11 aa, synthetic construct
AASPGGAEKPI

SEQ ID NO: 21370 - protein, 11 aa, synthetic construct
AASPGGAEKRI

SEQ ID NO: 21371 - protein, 11 aa, synthetic construct
AASPGGAENRI

SEQ ID NO: 21372 - protein, 11 aa, synthetic construct
AASPGDPRHSS

SEQ ID NO: 21373 - protein, 11 aa, synthetic construct
AASPGASDKPI

SEQ ID NO: 21374 - protein, 11 aa, synthetic construct
AASPGGSDKDI

SEQ ID NO: 21375 - protein, 11 aa, synthetic construct
AASPAGSAKLI

SEQ ID NO: 21376 - protein, 10 aa, synthetic construct
AASNNTDKLI

SEQ ID NO: 21377 - protein, 10 aa, synthetic construct
AASNYHAKII

SEQ ID NO: 21378 - protein, 10 aa, synthetic construct
AASNYNDKHI

SEQ ID NO: 21379 - protein, 10 aa, synthetic construct
AASNYNDKLI

SEQ ID NO: 21380 - protein, 10 aa, synthetic construct
AASNYNYKLV

SEQ ID NO: 21381 - protein, 10 aa, synthetic construct
AASNYNYKNI

SEQ ID NO: 21382 - protein, 10 aa, synthetic construct
AASNYPYKII

SEQ ID NO: 21383 - protein, 10 aa, synthetic construct
AASNYSGKLS

SEQ ID NO: 21384 - protein, 10 aa, synthetic construct
AASNYTAKLI

SEQ ID NO: 21385 - protein, 10 aa, synthetic construct
AASNYTDKLF

SEQ ID NO: 21386 - protein, 10 aa, synthetic construct
AASNYTYKII

SEQ ID NO: 21387 - protein, 11 aa, synthetic construct
AASPAGSDKLN

SEQ ID NO: 21388 - protein, 11 aa, synthetic construct
AASPGASDKIL

SEQ ID NO: 21389 - protein, 11 aa, synthetic construct
AASPAGSDKQI

SEQ ID NO: 21390 - protein, 11 aa, synthetic construct
AASPAGSDNLI

SEQ ID NO: 21391 - protein, 11 aa, synthetic construct
AASPAGSEKPI

SEQ ID NO: 21392 - protein, 10 aa, synthetic construct
AASPDPDKLI

SEQ ID NO: 21393 - protein, 10 aa, synthetic construct
AASPDTDHRI

SEQ ID NO: 21394 - protein, 10 aa, synthetic construct
AASPDTEKRI

SEQ ID NO: 21395 - protein, 10 aa, synthetic construct
AASPDTEQLI

SEQ ID NO: 21396 - protein, 10 aa, synthetic construct
AASPDTETRI

SEQ ID NO: 21397 - protein, 11 aa, synthetic construct
AASPEGSDKLF

SEQ ID NO: 21398 - protein, 11 aa, synthetic construct
AASPEGSDRLI

SEQ ID NO: 21399 - protein, 11 aa, synthetic construct
AASPGASAKLI

SEQ ID NO: 21400 - protein, 11 aa, synthetic construct
AASPGGAEQLI

SEQ ID NO: 21401 - protein, 11 aa, synthetic construct
AASPGGAERLI

SEQ ID NO: 21402 - protein, 11 aa, synthetic construct
AASPGGAETLI

SEQ ID NO: 21403 - protein, 11 aa, synthetic construct
AASPGGSARGI

SEQ ID NO: 21404 - protein, 11 aa, synthetic construct
AASPGGSAKLR

SEQ ID NO: 21405 - protein, 11 aa, synthetic construct
AASPGGSAKLS

SEQ ID NO: 21406 - protein, 11 aa, synthetic construct
AASPGGSAKNI

SEQ ID NO: 21407 - protein, 11 aa, synthetic construct
AASPGGSAKPN

SEQ ID NO: 21408 - protein, 11 aa, synthetic construct
AASPGGSAKPS

SEQ ID NO: 21409 - protein, 11 aa, synthetic construct
AASPGGSAKRN

SEQ ID NO: 21410 - protein, 11 aa, synthetic construct
AASPGGSANII

SEQ ID NO: 21411 - protein, 11 aa, synthetic construct
AASPGGSANLR

SEQ ID NO: 21412 - protein, 11 aa, synthetic construct
AASPGGSANVN

SEQ ID NO: 21413 - protein, 11 aa, synthetic construct
AASPGGSAPIN

SEQ ID NO: 21414 - protein, 11 aa, synthetic construct
AASPGGSAQLL

SEQ ID NO: 21415 - protein, 11 aa, synthetic construct
AASPGGSARLI

SEQ ID NO: 21416 - protein, 11 aa, synthetic construct
AASPGGAGQLI

SEQ ID NO: 21417 - protein, 11 aa, synthetic construct
AASPGGSATLF

SEQ ID NO: 21418 - protein, 11 aa, synthetic construct
AASPGGSATLI

SEQ ID NO: 21419 - protein, 8 aa, synthetic construct
AASPGGSD

SEQ ID NO: 21420 - protein, 11 aa, synthetic construct
AASPGGSDDLI

SEQ ID NO: 21421 - protein, 11 aa, synthetic construct
AASPGGSDELL

SEQ ID NO: 21422 - protein, 11 aa, synthetic construct
AASPGGSDEPF

SEQ ID NO: 21423 - protein, 11 aa, synthetic construct
AASPGGSDEPI

SEQ ID NO: 21424 - protein, 11 aa, synthetic construct
AASPGGSDHII

SEQ ID NO: 21425 - protein, 11 aa, synthetic construct
AASPGGSDHPI

SEQ ID NO: 21426 - protein, 11 aa, synthetic construct
AASPGGSDIHI

SEQ ID NO: 21427 - protein, 11 aa, synthetic construct
AASPGGSDILN

SEQ ID NO: 21428 - protein, 11 aa, synthetic construct
AASPGGSAKLF

SEQ ID NO: 21429 - protein, 11 aa, synthetic construct
AASPGGSAKII

SEQ ID NO: 21430 - protein, 11 aa, synthetic construct
AASPGGSAKHI

SEQ ID NO: 21431 - protein, 11 aa, synthetic construct
AASPGGSAKGF

SEQ ID NO: 21432 - protein, 11 aa, synthetic construct
AASPGGAQTLI

SEQ ID NO: 21433 - protein, 15 aa, synthetic construct
AASPGGATAPGDSTP

SEQ ID NO: 21434 - protein, 11 aa, synthetic construct
AASPGGCAKLV

SEQ ID NO: 21435 - protein, 11 aa, synthetic construct
AASPGGCDKLM

SEQ ID NO: 21436 - protein, 11 aa, synthetic construct
AASPGGCDNLI

SEQ ID NO: 21437 - protein, 11 aa, synthetic construct
AASPGGCDQLI

SEQ ID NO: 21438 - protein, 11 aa, synthetic construct
AASPGGCGEGL

SEQ ID NO: 21439 - protein, 11 aa, synthetic construct
AASPGGCGHLF

SEQ ID NO: 21440 - protein, 16 aa, synthetic construct
AASPGGGIRSWDTRQM

SEQ ID NO: 21441 - protein, 11 aa, synthetic construct
AASPGGGYGSW

SEQ ID NO: 21442 - protein, 16 aa, synthetic construct
AASPGGGYGYWGVHTD

SEQ ID NO: 21443 - protein, 11 aa, synthetic construct
AASPGGPAKPI

SEQ ID NO: 21444 - protein, 11 aa, synthetic construct
AASPGGPAKRI

SEQ ID NO: 21445 - protein, 11 aa, synthetic construct
AASPGGPDELI

SEQ ID NO: 21446 - protein, 11 aa, synthetic construct
AASPGGPDKLN

SEQ ID NO: 21447 - protein, 11 aa, synthetic construct
AASPGGPDKRI

SEQ ID NO: 21448 - protein, 11 aa, synthetic construct
AASPGGPGKLI

SEQ ID NO: 21449 - protein, 11 aa, synthetic construct
AASPGGSAEGI

SEQ ID NO: 21450 - protein, 9 aa, synthetic construct
AASPGGSAH

SEQ ID NO: 21451 - protein, 11 aa, synthetic construct
AASPGGSAHLF

SEQ ID NO: 21452 - protein, 11 aa, synthetic construct
AASPGGSAHLI

SEQ ID NO: 21453 - protein, 11 aa, synthetic construct
AASPGGSAHRI

SEQ ID NO: 21454 - protein, 11 aa, synthetic construct
AASPGGSAIPI

SEQ ID NO: 21455 - protein, 11 aa, synthetic construct
AASPRGSEKHI

SEQ ID NO: 21456 - protein, 11 aa, synthetic construct
AASPRGSENSS

SEQ ID NO: 21457 - protein, 10 aa, synthetic construct
AARTLASDNL

SEQ ID NO: 21458 - protein, 11 aa, synthetic construct
AASRGDTANFI

SEQ ID NO: 21459 - protein, 11 aa, synthetic construct
AASRGDTAKIF

SEQ ID NO: 21460 - protein, 11 aa, synthetic construct
AASRGDTAKIR

SEQ ID NO: 21461 - protein, 11 aa, synthetic construct
AASRGDTAKNI

SEQ ID NO: 21462 - protein, 11 aa, synthetic construct
AASRGDTAKPI

SEQ ID NO: 21463 - protein, 11 aa, synthetic construct
AASRGDTAKRF

SEQ ID NO: 21464 - protein, 15 aa, synthetic construct
AASRGDTAKRICGQG

SEQ ID NO: 21465 - protein, 14 aa, synthetic construct
AASRGDTAKRIYGN

SEQ ID NO: 21466 - protein, 11 aa, synthetic construct
AASRGDTAKRL

SEQ ID NO: 21467 - protein, 11 aa, synthetic construct
AASRGDTAKRN

SEQ ID NO: 21468 - protein, 11 aa, synthetic construct
AASRGDTAKRR

SEQ ID NO: 21469 - protein, 11 aa, synthetic construct
AASRGDTAKRS

SEQ ID NO: 21470 - protein, 11 aa, synthetic construct
AASRGDTANLI

SEQ ID NO: 21471 - protein, 11 aa, synthetic construct
AASRGDTAKGI

SEQ ID NO: 21472 - protein, 11 aa, synthetic construct
AASRGDTANLN

SEQ ID NO: 21473 - protein, 11 aa, synthetic construct
AASRGDTAQFI

SEQ ID NO: 21474 - protein, 11 aa, synthetic construct
AASRGDTAQHI

SEQ ID NO: 21475 - protein, 11 aa, synthetic construct
AASRGDTAQRS

SEQ ID NO: 21476 - protein, 11 aa, synthetic construct
AASRGDTARLI

SEQ ID NO: 21477 - protein, 11 aa, synthetic construct
AASRGDTATRI

SEQ ID NO: 21478 - protein, 11 aa, synthetic construct
AASRGDTDDII

SEQ ID NO: 21479 - protein, 11 aa, synthetic construct
AASRGDTDELT

SEQ ID NO: 21480 - protein, 11 aa, synthetic construct
AASRGDTDEPI

SEQ ID NO: 21481 - protein, 11 aa, synthetic construct
AASRGDTDHLV

SEQ ID NO: 21482 - protein, 11 aa, synthetic construct
AASRGDTDILL

SEQ ID NO: 21483 - protein, 11 aa, synthetic construct
AASRGDTAKHI

SEQ ID NO: 21484 - protein, 11 aa, synthetic construct
AASRGDTAKCI

SEQ ID NO: 21485 - protein, 8 aa, synthetic construct
AASRGDPI

SEQ ID NO: 21486 - protein, 11 aa, synthetic construct
AASRGDSDQHI

SEQ ID NO: 21487 - protein, 10 aa, synthetic construct
AASRGDPINS

SEQ ID NO: 21488 - protein, 11 aa, synthetic construct
AASRGDPNKLI

SEQ ID NO: 21489 - protein, 11 aa, synthetic construct
AASRGDPQKLI

SEQ ID NO: 21490 - protein, 11 aa, synthetic construct
AASRGDPVNLI

SEQ ID NO: 21491 - protein, 11 aa, synthetic construct
AASRGDSAKVW

SEQ ID NO: 21492 - protein, 11 aa, synthetic construct
AASRGDSDGLI

SEQ ID NO: 21493 - protein, 11 aa, synthetic construct
AASRGDSDHLI

SEQ ID NO: 21494 - protein, 11 aa, synthetic construct
AASRGDSDKPI

SEQ ID NO: 21495 - protein, 11 aa, synthetic construct
AASRGDSDKRI

SEQ ID NO: 21496 - protein, 11 aa, synthetic construct
AASRGDSDNLI

SEQ ID NO: 21497 - protein, 11 aa, synthetic construct
AASRGDSDNVI

SEQ ID NO: 21498 - protein, 11 aa, synthetic construct
AASRGDSDRLI

SEQ ID NO: 21499 - protein, 11 aa, synthetic construct
AASRGDTAILI

SEQ ID NO: 21500 - protein, 11 aa, synthetic construct
AASRGDSDTLI

SEQ ID NO: 21501 - protein, 11 aa, synthetic construct
AASRGDSEKDI

SEQ ID NO: 21502 - protein, 11 aa, synthetic construct
AASRGDSEKHI

SEQ ID NO: 21503 - protein, 11 aa, synthetic construct
AASRGDSEKLF

SEQ ID NO: 21504 - protein, 11 aa, synthetic construct
AASRGDSEKVI

SEQ ID NO: 21505 - protein, 11 aa, synthetic construct
AASRGDSETVM

SEQ ID NO: 21506 - protein, 11 aa, synthetic construct
AASRGDSVKLI

SEQ ID NO: 21507 - protein, 11 aa, synthetic construct
AASRGDTAELL

SEQ ID NO: 21508 - protein, 11 aa, synthetic construct
AASRGDTAERI

SEQ ID NO: 21509 - protein, 11 aa, synthetic construct
AASRGDTAHHI

SEQ ID NO: 21510 - protein, 11 aa, synthetic construct
AASRGDTAIII

SEQ ID NO: 21511 - protein, 11 aa, synthetic construct
AASRGDTDIVI

SEQ ID NO: 21512 - protein, 11 aa, synthetic construct
AASRGDTDKDI

SEQ ID NO: 21513 - protein, 11 aa, synthetic construct
AASRGDTDKDN

SEQ ID NO: 21514 - protein, 11 aa, synthetic construct
AASRGDTDYLI

SEQ ID NO: 21515 - protein, 11 aa, synthetic construct
AASRGDTDQLT

SEQ ID NO: 21516 - protein, 11 aa, synthetic construct
AASRGDTDQLV

SEQ ID NO: 21517 - protein, 11 aa, synthetic construct
AASRGDTDQPI

SEQ ID NO: 21518 - protein, 11 aa, synthetic construct
AASRGDTDQVI

SEQ ID NO: 21519 - protein, 11 aa, synthetic construct
AASRGDTDRLF

SEQ ID NO: 21520 - protein, 11 aa, synthetic construct
AASRGDTDRLN

SEQ ID NO: 21521 - protein, 11 aa, synthetic construct
AASRGDTDRLV

SEQ ID NO: 21522 - protein, 11 aa, synthetic construct
AASRGDTDSLI

SEQ ID NO: 21523 - protein, 11 aa, synthetic construct
AASRGDTDTHF

SEQ ID NO: 21524 - protein, 11 aa, synthetic construct
AASRGDTDTLV

SEQ ID NO: 21525 - protein, 11 aa, synthetic construct
AASRGDTDTVI

SEQ ID NO: 21526 - protein, 11 aa, synthetic construct
AASRGDTEKDN

SEQ ID NO: 21527 - protein, 11 aa, synthetic construct
AASRGDTDKHF

SEQ ID NO: 21528 - protein, 11 aa, synthetic construct
AASRGDTEKHN

SEQ ID NO: 21529 - protein, 11 aa, synthetic construct
AASRGDTEKLY

SEQ ID NO: 21530 - protein, 11 aa, synthetic construct
AASRGDTEKRF

SEQ ID NO: 21531 - protein, 11 aa, synthetic construct
AASRGDTENLF

SEQ ID NO: 21532 - protein, 11 aa, synthetic construct
AASRGDTENLN

SEQ ID NO: 21533 - protein, 11 aa, synthetic construct
AASRGDTENLR

SEQ ID NO: 21534 - protein, 11 aa, synthetic construct
AASRGDTENSS

SEQ ID NO: 21535 - protein, 11 aa, synthetic construct
AASRGDTEQRI

SEQ ID NO: 21536 - protein, 11 aa, synthetic construct
AASRGDTERVI

SEQ ID NO: 21537 - protein, 11 aa, synthetic construct
AASRGDTETLL

SEQ ID NO: 21538 - protein, 11 aa, synthetic construct
AASRGDTGKRI

SEQ ID NO: 21539 - protein, 11 aa, synthetic construct
AASRGDTDQLS

SEQ ID NO: 21540 - protein, 11 aa, synthetic construct
AASRGDTDQLM

SEQ ID NO: 21541 - protein, 11 aa, synthetic construct
AASRGDTDQLL

SEQ ID NO: 21542 - protein, 11 aa, synthetic construct
AASRGDTDQLK

SEQ ID NO: 21543 - protein, 11 aa, synthetic construct
AASRGDTDKHY

SEQ ID NO: 21544 - protein, 11 aa, synthetic construct
AASRGDTDKID

SEQ ID NO: 21545 - protein, 11 aa, synthetic construct
AASRGDTDKIL

SEQ ID NO: 21546 - protein, 11 aa, synthetic construct
AASRGDTDKIT

SEQ ID NO: 21547 - protein, 11 aa, synthetic construct
AASRGDTDKLC

SEQ ID NO: 21548 - protein, 11 aa, synthetic construct
AASRGDTDKNI

SEQ ID NO: 21549 - protein, 11 aa, synthetic construct
AASRGDTDKPT

SEQ ID NO: 21550 - protein, 11 aa, synthetic construct
AASRGDTDKPV

SEQ ID NO: 21551 - protein, 11 aa, synthetic construct
AASRGDTDKQI

SEQ ID NO: 21552 - protein, 11 aa, synthetic construct
AASRGDTDKRL

SEQ ID NO: 21553 - protein, 11 aa, synthetic construct
AASRGDTDKSN

SEQ ID NO: 21554 - protein, 11 aa, synthetic construct
AASRGDTDKYI

SEQ ID NO: 21555 - protein, 11 aa, synthetic construct
AASRGDTDLLI

SEQ ID NO: 21556 - protein, 11 aa, synthetic construct
AASRGDTDNHI

SEQ ID NO: 21557 - protein, 11 aa, synthetic construct
AASRGDTDNLN

SEQ ID NO: 21558 - protein, 11 aa, synthetic construct
AASRGDTDNPI

SEQ ID NO: 21559 - protein, 11 aa, synthetic construct
AASRGDTDNRL

SEQ ID NO: 21560 - protein, 11 aa, synthetic construct
AASRGDTDNRN

SEQ ID NO: 21561 - protein, 11 aa, synthetic construct
AASRGDTDNVI

SEQ ID NO: 21562 - protein, 11 aa, synthetic construct
AASRGDTDPLF

SEQ ID NO: 21563 - protein, 11 aa, synthetic construct
AASRGDTDPLI

SEQ ID NO: 21564 - protein, 11 aa, synthetic construct
AASRGDTDQDI

SEQ ID NO: 21565 - protein, 11 aa, synthetic construct
AASRGDTDQFI

SEQ ID NO: 21566 - protein, 11 aa, synthetic construct
AASRGDPINPS

SEQ ID NO: 21567 - protein, 11 aa, synthetic construct
AASRGDPHKLI

SEQ ID NO: 21568 - protein, 11 aa, synthetic construct
AASPRGSQKLI

SEQ ID NO: 21569 - protein, 10 aa, synthetic construct
AASPYTVKRI

SEQ ID NO: 21570 - protein, 10 aa, synthetic construct
AASPYTDKIN

SEQ ID NO: 21571 - protein, 9 aa, synthetic construct
AASPYTDKL

SEQ ID NO: 21572 - protein, 10 aa, synthetic construct
AASPYTDKLM

SEQ ID NO: 21573 - protein, 10 aa, synthetic construct
AASPYTDKLN

SEQ ID NO: 21574 - protein, 10 aa, synthetic construct
AASPYTDKLY

SEQ ID NO: 21575 - protein, 10 aa, synthetic construct
AASPYTDKRS

SEQ ID NO: 21576 - protein, 10 aa, synthetic construct
AASPYTDKVV

SEQ ID NO: 21577 - protein, 10 aa, synthetic construct
AASPYTDQRI

SEQ ID NO: 21578 - protein, 10 aa, synthetic construct
AASPYTDRLI

SEQ ID NO: 21579 - protein, 10 aa, synthetic construct
AASPYTDTLF

SEQ ID NO: 21580 - protein, 10 aa, synthetic construct
AASPYTEKLS

SEQ ID NO: 21581 - protein, 10 aa, synthetic construct
AASPYTYKLI

SEQ ID NO: 21582 - protein, 10 aa, synthetic construct
AASPYTAILI

SEQ ID NO: 21583 - protein, 11 aa, synthetic construct
AASQGGSDKVI

SEQ ID NO: 21584 - protein, 11 aa, synthetic construct
AASQGGSGKLI

SEQ ID NO: 21585 - protein, 14 aa, synthetic construct
AASQGGSVKPIYGN

SEQ ID NO: 21586 - protein, 16 aa, synthetic construct
AASQIRRAHVSTPDTD

SEQ ID NO: 21587 - protein, 11 aa, synthetic construct
AASRADTAKRI

SEQ ID NO: 21588 - protein, 11 aa, synthetic construct
AASRADTDKLF

SEQ ID NO: 21589 - protein, 11 aa, synthetic construct
AASRADTDTLI

SEQ ID NO: 21590 - protein, 15 aa, synthetic construct
AASRADTSKHIYGQG

SEQ ID NO: 21591 - protein, 11 aa, synthetic construct
AASRAHTDKLI

SEQ ID NO: 21592 - protein, 11 aa, synthetic construct
AASRAQTDKLI

SEQ ID NO: 21593 - protein, 10 aa, synthetic construct
AASRDRGRLW

SEQ ID NO: 21594 - protein, 8 aa, synthetic construct
AASPYTDK

SEQ ID NO: 21595 - protein, 10 aa, synthetic construct
AASPYRDTLS

SEQ ID NO: 21596 - protein, 11 aa, synthetic construct
AASRGDPETLI

SEQ ID NO: 21597 - protein, 11 aa, synthetic construct
AASPVGSDNII

SEQ ID NO: 21598 - protein, 11 aa, synthetic construct
AASPRGTDKLN

SEQ ID NO: 21599 - protein, 14 aa, synthetic construct
AASPRGYAPGTPDR

SEQ ID NO: 21600 - protein, 13 aa, synthetic construct
AASPSAAKRICGA

SEQ ID NO: 21601 - protein, 10 aa, synthetic construct
AASPSTETRM

SEQ ID NO: 21602 - protein, 10 aa, synthetic construct
AASPSTGKLI

SEQ ID NO: 21603 - protein, 11 aa, synthetic construct
AASPVDPINPS

SEQ ID NO: 21604 - protein, 11 aa, synthetic construct
AASPVGADQLS

SEQ ID NO: 21605 - protein, 11 aa, synthetic construct
AASPVGSDKHI

SEQ ID NO: 21606 - protein, 11 aa, synthetic construct
AASPVGSDKII

SEQ ID NO: 21607 - protein, 11 aa, synthetic construct
AASPVGSDKLN

SEQ ID NO: 21608 - protein, 11 aa, synthetic construct
AASPVGSDKVI

SEQ ID NO: 21609 - protein, 11 aa, synthetic construct
AASPVGSEKLI

SEQ ID NO: 21610 - protein, 10 aa, synthetic construct
AASPYRDHLI

SEQ ID NO: 21611 - protein, 11 aa, synthetic construct
AASPVGSEKLK

SEQ ID NO: 21612 - protein, 11 aa, synthetic construct
AASPVGSVTLI

SEQ ID NO: 21613 - protein, 11 aa, synthetic construct
AASPVGSYKLI

SEQ ID NO: 21614 - protein, 11 aa, synthetic construct
AASPWGADKLI

SEQ ID NO: 21615 - protein, 11 aa, synthetic construct
AASPWGSDKPI

SEQ ID NO: 21616 - protein, 11 aa, synthetic construct
AASPWGSEKRI

SEQ ID NO: 21617 - protein, 11 aa, synthetic construct
AASPWRSDKLI

SEQ ID NO: 21618 - protein, 10 aa, synthetic construct
AASPYPDELI

SEQ ID NO: 21619 - protein, 10 aa, synthetic construct
AASPYPDKLS

SEQ ID NO: 21620 - protein, 10 aa, synthetic construct
AASPYPDKVS

SEQ ID NO: 21621 - protein, 10 aa, synthetic construct
AASPYPEKLI

SEQ ID NO: 21622 - protein, 10 aa, synthetic construct
AASRDTEQLI

SEQ ID NO: 21623 - protein, 11 aa, synthetic construct
AASREDTDKLN

SEQ ID NO: 21624 - protein, 11 aa, synthetic construct
AASREDTEKLI

SEQ ID NO: 21625 - protein, 11 aa, synthetic construct
AASRGDPDEVI

SEQ ID NO: 21626 - protein, 11 aa, synthetic construct
AASRGATVKVI

SEQ ID NO: 21627 - protein, 11 aa, synthetic construct
AASRGATVNLI

SEQ ID NO: 21628 - protein, 11 aa, synthetic construct
AASRGDAAKSK

SEQ ID NO: 21629 - protein, 11 aa, synthetic construct
AASRGDADKHI

SEQ ID NO: 21630 - protein, 11 aa, synthetic construct
AASRGDADKLN

SEQ ID NO: 21631 - protein, 11 aa, synthetic construct
AASRGDADKRI

SEQ ID NO: 21632 - protein, 11 aa, synthetic construct
AASRGDADNLI

SEQ ID NO: 21633 - protein, 11 aa, synthetic construct
AASRGDAETLI

SEQ ID NO: 21634 - protein, 11 aa, synthetic construct
AASRGDIDKRI

SEQ ID NO: 21635 - protein, 11 aa, synthetic construct
AASRGDIYKLI

SEQ ID NO: 21636 - protein, 11 aa, synthetic construct
AASRGDPAKLI

SEQ ID NO: 21637 - protein, 11 aa, synthetic construct
AASRGDPDKDI

SEQ ID NO: 21638 - protein, 10 aa, synthetic construct
AASRFTETLW

SEQ ID NO: 21639 - protein, 11 aa, synthetic construct
AASRGDPDKHI

SEQ ID NO: 21640 - protein, 11 aa, synthetic construct
AASRGDPDKLF

SEQ ID NO: 21641 - protein, 11 aa, synthetic construct
AASRGDPDKLK

SEQ ID NO: 21642 - protein, 11 aa, synthetic construct
AASRGDPDKRL

SEQ ID NO: 21643 - protein, 11 aa, synthetic construct
AASRGDPDKVI

SEQ ID NO: 21644 - protein, 11 aa, synthetic construct
AASRGDPDNVI

SEQ ID NO: 21645 - protein, 11 aa, synthetic construct
AASRGDPEHLI

SEQ ID NO: 21646 - protein, 11 aa, synthetic construct
AASRGDPEKRI

SEQ ID NO: 21647 - protein, 11 aa, synthetic construct
AASRGDPENLI

SEQ ID NO: 21648 - protein, 11 aa, synthetic construct
AASRGDPENLS

SEQ ID NO: 21649 - protein, 11 aa, synthetic construct
AASRGDPESLI

SEQ ID NO: 21650 - protein, 11 aa, synthetic construct
AASRGATVKLI

SEQ ID NO: 21651 - protein, 11 aa, synthetic construct
AASRGATVKLF

SEQ ID NO: 21652 - protein, 10 aa, synthetic construct
AASRGATRQM

SEQ ID NO: 21653 - protein, 11 aa, synthetic construct
AASRGATPILI

SEQ ID NO: 21654 - protein, 10 aa, synthetic construct
AASRGAADNL

SEQ ID NO: 21655 - protein, 11 aa, synthetic construct
AASRGAPINSS

SEQ ID NO: 21656 - protein, 10 aa, synthetic construct
AASRGASDKL

SEQ ID NO: 21657 - protein, 11 aa, synthetic construct
AASRGASDKLI

SEQ ID NO: 21658 - protein, 11 aa, synthetic construct
AASRGATAKLI

SEQ ID NO: 21659 - protein, 10 aa, synthetic construct
AASRGATAKR

SEQ ID NO: 21660 - protein, 11 aa, synthetic construct
AASRGATAKRI

SEQ ID NO: 21661 - protein, 11 aa, synthetic construct
AASRGATANRI

SEQ ID NO: 21662 - protein, 16 aa, synthetic construct
AASRGATATGDSTPIN

SEQ ID NO: 21663 - protein, 11 aa, synthetic construct
AASRGATDKDI

SEQ ID NO: 21664 - protein, 11 aa, synthetic construct
AASRGATDKHI

SEQ ID NO: 21665 - protein, 11 aa, synthetic construct
AASRGATDKLF

SEQ ID NO: 21666 - protein, 11 aa, synthetic construct
AASRGATDKLN

SEQ ID NO: 21667 - protein, 11 aa, synthetic construct
AASRGATDKLT

SEQ ID NO: 21668 - protein, 11 aa, synthetic construct
AASRGATDKPI

SEQ ID NO: 21669 - protein, 11 aa, synthetic construct
AASRGATDKRI

SEQ ID NO: 21670 - protein, 11 aa, synthetic construct
AASRGATDQGI

SEQ ID NO: 21671 - protein, 11 aa, synthetic construct
AASRGATDQLF

SEQ ID NO: 21672 - protein, 11 aa, synthetic construct
AASRGATEKRI

SEQ ID NO: 21673 - protein, 11 aa, synthetic construct
AASRGATEKVI

SEQ ID NO: 21674 - protein, 11 aa, synthetic construct
AASRGATEQLI

SEQ ID NO: 21675 - protein, 11 aa, synthetic construct
AASRGATGDRI

SEQ ID NO: 21676 - protein, 11 aa, synthetic construct
AASRGATGHLI

SEQ ID NO: 21677 - protein, 12 aa, synthetic construct
AASNGGSLICSY

SEQ ID NO: 21678 - protein, 16 aa, synthetic construct
AASMWWGIRSWETRQM

SEQ ID NO: 21679 - protein, 16 aa, synthetic construct
AASMWWGIRSWESRQM

SEQ ID NO: 21680 - protein, 11 aa, synthetic construct
AASGGETAKLF

SEQ ID NO: 21681 - protein, 11 aa, synthetic construct
AASGGDTAKRI

SEQ ID NO: 21682 - protein, 11 aa, synthetic construct
AASGGDTAKRV

SEQ ID NO: 21683 - protein, 11 aa, synthetic construct
AASGGDTDKRI

SEQ ID NO: 21684 - protein, 11 aa, synthetic construct
AASGGDTDKVI

SEQ ID NO: 21685 - protein, 11 aa, synthetic construct
AASGGDTDNLI

SEQ ID NO: 21686 - protein, 11 aa, synthetic construct
AASGGDTDRLI

SEQ ID NO: 21687 - protein, 11 aa, synthetic construct
AASGGDTDTLI

SEQ ID NO: 21688 - protein, 11 aa, synthetic construct
AASGGDTEKVF

SEQ ID NO: 21689 - protein, 15 aa, synthetic construct
AASGGDTENGRLLKD

SEQ ID NO: 21690 - protein, 7 aa, synthetic construct
AASGGES

SEQ ID NO: 21691 - protein, 15 aa, synthetic construct
AASGGETAKGHSTPI

SEQ ID NO: 21692 - protein, 11 aa, synthetic construct
AASGGETDKLI

SEQ ID NO: 21693 - protein, 11 aa, synthetic construct
AASGGDTAELI

SEQ ID NO: 21694 - protein, 10 aa, synthetic construct
AASGGGDGSW

SEQ ID NO: 21695 - protein, 15 aa, synthetic construct
AASGGGLGLLGTPHR

SEQ ID NO: 21696 - protein, 15 aa, synthetic construct
AASGGGLRVLGPPHR

SEQ ID NO: 21697 - protein, 11 aa, synthetic construct
AASGGGSDKLI

SEQ ID NO: 21698 - protein, 15 aa, synthetic construct
AASGGGSGYWGVHTD

SEQ ID NO: 21699 - protein, 14 aa, synthetic construct
AASGGGSSYWGLHT

SEQ ID NO: 21700 - protein, 11 aa, synthetic construct
AASGGGYAYWG

SEQ ID NO: 21701 - protein, 15 aa, synthetic construct
AASGGGYGDWGVHTD

SEQ ID NO: 21702 - protein, 14 aa, synthetic construct
AASGGGYGIGGLHN

SEQ ID NO: 21703 - protein, 15 aa, synthetic construct
AASGGGYGSGGLATD

SEQ ID NO: 21704 - protein, 10 aa, synthetic construct
AASGGGYGSW

SEQ ID NO: 21705 - protein, 11 aa, synthetic construct
AASGGDTAKLI

SEQ ID NO: 21706 - protein, 11 aa, synthetic construct
AASGGDSDKLI

SEQ ID NO: 21707 - protein, 11 aa, synthetic construct
AASAGGSDNLF

SEQ ID NO: 21708 - protein, 10 aa, synthetic construct
AASAYTDKPI

SEQ ID NO: 21709 - protein, 11 aa, synthetic construct
AASAGGSEKLI

SEQ ID NO: 21710 - protein, 11 aa, synthetic construct
AASAGGSENRF

SEQ ID NO: 21711 - protein, 11 aa, synthetic construct
AASAGGSGQLI

SEQ ID NO: 21712 - protein, 14 aa, synthetic construct
AASAGGYAPGTPDR

SEQ ID NO: 21713 - protein, 15 aa, synthetic construct
AASAGGYGYWALHTD

SEQ ID NO: 21714 - protein, 15 aa, synthetic construct
AASAGGYGYWGLHTD

SEQ ID NO: 21715 - protein, 11 aa, synthetic construct
AASAGRAGNLI

SEQ ID NO: 21716 - protein, 11 aa, synthetic construct
AASASGYAYWG

SEQ ID NO: 21717 - protein, 10 aa, synthetic construct
AASAYADKLI

SEQ ID NO: 21718 - protein, 10 aa, synthetic construct
AASAYPDKLS

SEQ ID NO: 21719 - protein, 10 aa, synthetic construct
AASAYTDKII

SEQ ID NO: 21720 - protein, 10 aa, synthetic construct
AASAYTDNLI

SEQ ID NO: 21721 - protein, 11 aa, synthetic construct
AASGGDPDQHI

SEQ ID NO: 21722 - protein, 10 aa, synthetic construct
AASCYSDKLF

SEQ ID NO: 21723 - protein, 11 aa, synthetic construct
AASDGGSDTLI

SEQ ID NO: 21724 - protein, 11 aa, synthetic construct
AASDGGSVQLF

SEQ ID NO: 21725 - protein, 11 aa, synthetic construct
AASEGDTDKLI

SEQ ID NO: 21726 - protein, 11 aa, synthetic construct
AASGADPVKLV

SEQ ID NO: 21727 - protein, 5 aa, synthetic construct
AASGG

SEQ ID NO: 21728 - protein, 16 aa, synthetic construct
AASGGAPATGDSTPIN

SEQ ID NO: 21729 - protein, 16 aa, synthetic construct
AASGGATATGDSTPIN

SEQ ID NO: 21730 - protein, 16 aa, synthetic construct
AASGGATATGHSTPLN

SEQ ID NO: 21731 - protein, 11 aa, synthetic construct
AASGGATGTGA

SEQ ID NO: 21732 - protein, 11 aa, synthetic construct
AASGGDPAKGE

SEQ ID NO: 21733 - protein, 15 aa, synthetic construct
AASGGGYGSWGVHTD

SEQ ID NO: 21734 - protein, 9 aa, synthetic construct
AASGGGYGY

SEQ ID NO: 21735 - protein, 11 aa, synthetic construct
AASGGGYGYWG

SEQ ID NO: 21736 - protein, 11 aa, synthetic construct
AASIEDTDKHN

SEQ ID NO: 21737 - protein, 11 aa, synthetic construct
AASHGRSDHLI

SEQ ID NO: 21738 - protein, 11 aa, synthetic construct
AASHGVSDKII

SEQ ID NO: 21739 - protein, 11 aa, synthetic construct
AASHGVSDKVI

SEQ ID NO: 21740 - protein, 6 aa, synthetic construct
AASHRC

SEQ ID NO: 21741 - protein, 11 aa, synthetic construct
AASHRGSDKLI

SEQ ID NO: 21742 - protein, 11 aa, synthetic construct
AASHRGSHKLI

SEQ ID NO: 21743 - protein, 11 aa, synthetic construct
AASHRGSYKII

SEQ ID NO: 21744 - protein, 11 aa, synthetic construct
AASHRRSHKLI

SEQ ID NO: 21745 - protein, 13 aa, synthetic construct
AASHWGLHTDKLI

SEQ ID NO: 21746 - protein, 11 aa, synthetic construct
AASIADTDKLI

SEQ ID NO: 21747 - protein, 14 aa, synthetic construct
AASICTGGHTDNLI

SEQ ID NO: 21748 - protein, 13 aa, synthetic construct
AASIERTTKLLNS

SEQ ID NO: 21749 - protein, 15 aa, synthetic construct
AASGGGYGYWGHHTD

SEQ ID NO: 21750 - protein, 11 aa, synthetic construct
AASIGDNHKLI

SEQ ID NO: 21751 - protein, 11 aa, synthetic construct
AASIGDPEKLI

SEQ ID NO: 21752 - protein, 10 aa, synthetic construct
AASIGDSHKH

SEQ ID NO: 21753 - protein, 11 aa, synthetic construct
AASIGDTAKLI

SEQ ID NO: 21754 - protein, 11 aa, synthetic construct
AASIGDTDKII

SEQ ID NO: 21755 - protein, 11 aa, synthetic construct
AASIGDTDKLL

SEQ ID NO: 21756 - protein, 9 aa, synthetic construct
AASIRDSYK

SEQ ID NO: 21757 - protein, 10 aa, synthetic construct
AASIRSSEQH

SEQ ID NO: 21758 - protein, 16 aa, synthetic construct
AASIRWGIRSCDTPQM

SEQ ID NO: 21759 - protein, 12 aa, synthetic construct
AASIRWGIRSWD

SEQ ID NO: 21760 - protein, 16 aa, synthetic construct
AASIRWGIRSWDTPQM

SEQ ID NO: 21761 - protein, 11 aa, synthetic construct
AASHGGYDKLI

SEQ ID NO: 21762 - protein, 14 aa, synthetic construct
AASHGGYAPGTPDR

SEQ ID NO: 21763 - protein, 11 aa, synthetic construct
AASHGGSYKLI

SEQ ID NO: 21764 - protein, 10 aa, synthetic construct
AASHGGSKTS

SEQ ID NO: 21765 - protein, 15 aa, synthetic construct
AASGGGYGYWGIHTD

SEQ ID NO: 21766 - protein, 14 aa, synthetic construct
AASGGGYGYWGLLT

SEQ ID NO: 21767 - protein, 15 aa, synthetic construct
AASGGGYGYWGLPTD

SEQ ID NO: 21768 - protein, 15 aa, synthetic construct
AASGGGYGYWGVHTD

SEQ ID NO: 21769 - protein, 15 aa, synthetic construct
AASGGGYSYWGLHTD

SEQ ID NO: 21770 - protein, 11 aa, synthetic construct
AASGGRSEDLI

SEQ ID NO: 21771 - protein, 11 aa, synthetic construct
AASGRGSGSWG

SEQ ID NO: 21772 - protein, 11 aa, synthetic construct
AASHAGSGKLI

SEQ ID NO: 21773 - protein, 11 aa, synthetic construct
AASHCGSDKHI

SEQ ID NO: 21774 - protein, 12 aa, synthetic construct
AASHGGGYGYWG

SEQ ID NO: 21775 - protein, 16 aa, synthetic construct
AASHGGGYGYWGLHTD

SEQ ID NO: 21776 - protein, 11 aa, synthetic construct
AASHGGSAKIY

SEQ ID NO: 21777 - protein, 11 aa, synthetic construct
AASHGGSAKLN

SEQ ID NO: 21778 - protein, 11 aa, synthetic construct
AASHGGSANLI

SEQ ID NO: 21779 - protein, 11 aa, synthetic construct
AASHGGSANRI

SEQ ID NO: 21780 - protein, 11 aa, synthetic construct
AASHGGSDKHI

SEQ ID NO: 21781 - protein, 11 aa, synthetic construct
AASHGGSDKHN

SEQ ID NO: 21782 - protein, 11 aa, synthetic construct
AASHGGSDKLF

SEQ ID NO: 21783 - protein, 11 aa, synthetic construct
AASHGGSDKLL

SEQ ID NO: 21784 - protein, 11 aa, synthetic construct
AASHGGSDKLV

SEQ ID NO: 21785 - protein, 11 aa, synthetic construct
AASHGGSDKPN

SEQ ID NO: 21786 - protein, 11 aa, synthetic construct
AASHGGSDNPS

SEQ ID NO: 21787 - protein, 11 aa, synthetic construct
AASHGGSHKLI

SEQ ID NO: 21788 - protein, 11 aa, synthetic construct
AASAGGSDQLI

SEQ ID NO: 21789 - protein, 11 aa, synthetic construct
AASAGGSDKLM

SEQ ID NO: 21790 - protein, 16 aa, synthetic construct
AASMWWGIRSWDTRPM

SEQ ID NO: 21791 - protein, 10 aa, synthetic construct
AARTYSDQLI

SEQ ID NO: 21792 - protein, 10 aa, synthetic construct
AARTYADKLI

SEQ ID NO: 21793 - protein, 16 aa, synthetic construct
AARTYHTNKIICEHKL

SEQ ID NO: 21794 - protein, 10 aa, synthetic construct
AARTYNDKHI

SEQ ID NO: 21795 - protein, 7 aa, synthetic construct
AARTYNQ

SEQ ID NO: 21796 - protein, 15 aa, synthetic construct
AARTYNSNHIIVTLS

SEQ ID NO: 21797 - protein, 7 aa, synthetic construct
AARTYPD

SEQ ID NO: 21798 - protein, 10 aa, synthetic construct
AARTYPDKRS

SEQ ID NO: 21799 - protein, 10 aa, synthetic construct
AARTYPEKIL

SEQ ID NO: 21800 - protein, 10 aa, synthetic construct
AARTYSAKRI

SEQ ID NO: 21801 - protein, 10 aa, synthetic construct
AARTYSDKLY

SEQ ID NO: 21802 - protein, 10 aa, synthetic construct
AARTYSDKVI

SEQ ID NO: 21803 - protein, 10 aa, synthetic construct
AARTYSEKLV

SEQ ID NO: 21804 - protein, 10 aa, synthetic construct
AARTTCEKLI

SEQ ID NO: 21805 - protein, 10 aa, synthetic construct
AARTYTAKHI

SEQ ID NO: 21806 - protein, 10 aa, synthetic construct
AARTYTAKLL

SEQ ID NO: 21807 - protein, 10 aa, synthetic construct
AARTYTDDLL

SEQ ID NO: 21808 - protein, 10 aa, synthetic construct
AARTYTDEVI

SEQ ID NO: 21809 - protein, 10 aa, synthetic construct
AARTYTDKHK

SEQ ID NO: 21810 - protein, 10 aa, synthetic construct
AARTYTDKLK

SEQ ID NO: 21811 - protein, 10 aa, synthetic construct
AARTYTDKLL

SEQ ID NO: 21812 - protein, 10 aa, synthetic construct
AARTYTDKLY

SEQ ID NO: 21813 - protein, 10 aa, synthetic construct
AARTYTDKPI

SEQ ID NO: 21814 - protein, 10 aa, synthetic construct
AARTYTDKRN

SEQ ID NO: 21815 - protein, 10 aa, synthetic construct
AARTYTDKVI

SEQ ID NO: 21816 - protein, 11 aa, synthetic construct
AARTVASEKIF

SEQ ID NO: 21817 - protein, 10 aa, synthetic construct
AARTSTYKLM

SEQ ID NO: 21818 - protein, 11 aa, synthetic construct
AASAGGSDILI

SEQ ID NO: 21819 - protein, 16 aa, synthetic construct
AARTRWGIRSCDTRQM

SEQ ID NO: 21820 - protein, 11 aa, synthetic construct
AARTLRYKKII

SEQ ID NO: 21821 - protein, 10 aa, synthetic construct
AARTNKDKNI

SEQ ID NO: 21822 - protein, 10 aa, synthetic construct
AARTNPYQLI

SEQ ID NO: 21823 - protein, 10 aa, synthetic construct
AARTNTAKLI

SEQ ID NO: 21824 - protein, 10 aa, synthetic construct
AARTNTDKLF

SEQ ID NO: 21825 - protein, 10 aa, synthetic construct
AARTNTDKLN

SEQ ID NO: 21826 - protein, 10 aa, synthetic construct
AARTNTDNLI

SEQ ID NO: 21827 - protein, 10 aa, synthetic construct
AARTNTDQLI

SEQ ID NO: 21828 - protein, 10 aa, synthetic construct
AARTNTEQLI

SEQ ID NO: 21829 - protein, 10 aa, synthetic construct
AARTNTHKLN

SEQ ID NO: 21830 - protein, 10 aa, synthetic construct
AARTNTYKHN

SEQ ID NO: 21831 - protein, 10 aa, synthetic construct
AARTSPDQRL

SEQ ID NO: 21832 - protein, 10 aa, synthetic construct
AARTSTKQLI

SEQ ID NO: 21833 - protein, 10 aa, synthetic construct
AARTSSDKLI

SEQ ID NO: 21834 - protein, 10 aa, synthetic construct
AARTSSDKVF

SEQ ID NO: 21835 - protein, 8 aa, synthetic construct
AARTSSYV

SEQ ID NO: 21836 - protein, 10 aa, synthetic construct
AARTSTAKLI

SEQ ID NO: 21837 - protein, 10 aa, synthetic construct
AARTSTAQLI

SEQ ID NO: 21838 - protein, 10 aa, synthetic construct
AARTSTDKLF

SEQ ID NO: 21839 - protein, 10 aa, synthetic construct
AARTSTEQHI

SEQ ID NO: 21840 - protein, 10 aa, synthetic construct
AARTSTEQLI

SEQ ID NO: 21841 - protein, 10 aa, synthetic construct
AARTSTEQRI

SEQ ID NO: 21842 - protein, 10 aa, synthetic construct
AARTSTETLI

SEQ ID NO: 21843 - protein, 10 aa, synthetic construct
AARTSTGELI

SEQ ID NO: 21844 - protein, 10 aa, synthetic construct
AARTYTDNHN

SEQ ID NO: 21845 - protein, 10 aa, synthetic construct
AARTYTDNNI

SEQ ID NO: 21846 - protein, 10 aa, synthetic construct
AARTYTDNRF

SEQ ID NO: 21847 - skipped

SEQ ID NO: 21848 - protein, 13 aa, synthetic construct
AARVLRWWGIKLI

SEQ ID NO: 21849 - protein, 9 aa, synthetic construct
AARVRGGGG

SEQ ID NO: 21850 - protein, 10 aa, synthetic construct
AARVRGGVGW

SEQ ID NO: 21851 - protein, 7 aa, synthetic construct
AARVRGR

SEQ ID NO: 21852 - protein, 16 aa, synthetic construct
AARVRWGIRSWDTRQM

SEQ ID NO: 21853 - protein, 15 aa, synthetic construct
AARWGGNGYWALNTD

SEQ ID NO: 21854 - protein, 11 aa, synthetic construct
AARWGGQRLLG

SEQ ID NO: 21855 - protein, 15 aa, synthetic construct
AARWGGSGYWGLHTD

SEQ ID NO: 21856 - protein, 15 aa, synthetic construct
AARWGGYGSWGLHTD

SEQ ID NO: 21857 - protein, 15 aa, synthetic construct
AARWGGYGYLGLNTD

SEQ ID NO: 21858 - protein, 15 aa, synthetic construct
AARWRWGLGSWATRQ

SEQ ID NO: 21859 - protein, 13 aa, synthetic construct
AASAASEQNIVRQ

SEQ ID NO: 21860 - protein, 10 aa, synthetic construct
AARTYTDNSS

SEQ ID NO: 21861 - protein, 11 aa, synthetic construct
AASAGASDKLI

SEQ ID NO: 21862 - protein, 11 aa, synthetic construct
AASAGASVNLI

SEQ ID NO: 21863 - protein, 11 aa, synthetic construct
AASAGDTDELF

SEQ ID NO: 21864 - protein, 6 aa, synthetic construct
AASAGG

SEQ ID NO: 21865 - protein, 11 aa, synthetic construct
AASAGGADHLI

SEQ ID NO: 21866 - protein, 11 aa, synthetic construct
AASAGGAGNRL

SEQ ID NO: 21867 - protein, 15 aa, synthetic construct
AASAGGATATGDSTP

SEQ ID NO: 21868 - protein, 11 aa, synthetic construct
AASAGGSAKLF

SEQ ID NO: 21869 - protein, 11 aa, synthetic construct
AASAGGSAKVC

SEQ ID NO: 21870 - protein, 11 aa, synthetic construct
AASAGGSDDLI

SEQ ID NO: 21871 - protein, 11 aa, synthetic construct
AASAGGSDELI

SEQ ID NO: 21872 - protein, 15 aa, synthetic construct
AARVGGYGYWVINTD

SEQ ID NO: 21873 - protein, 16 aa, synthetic construct
AARVGGYGYWGLTPIN

SEQ ID NO: 21874 - protein, 15 aa, synthetic construct
AARVGGYGYRGLHTD

SEQ ID NO: 21875 - protein, 15 aa, synthetic construct
AARVGGYCYWGLHTD

SEQ ID NO: 21876 - protein, 10 aa, synthetic construct
AARTYTDQHI

SEQ ID NO: 21877 - protein, 10 aa, synthetic construct
AARTYTDQLF

SEQ ID NO: 21878 - protein, 10 aa, synthetic construct
AARTYTDQLL

SEQ ID NO: 21879 - protein, 10 aa, synthetic construct
AARTYTDQQI

SEQ ID NO: 21880 - protein, 10 aa, synthetic construct
AARTYTDQRF

SEQ ID NO: 21881 - protein, 10 aa, synthetic construct
AARTYTDQRI

SEQ ID NO: 21882 - protein, 10 aa, synthetic construct
AARTYTDRLI

SEQ ID NO: 21883 - protein, 10 aa, synthetic construct
AARTYTDRLL

SEQ ID NO: 21884 - protein, 10 aa, synthetic construct
AARTYTDTLS

SEQ ID NO: 21885 - protein, 10 aa, synthetic construct
AARTYTEHLL

SEQ ID NO: 21886 - protein, 10 aa, synthetic construct
AARTYTEHRI

SEQ ID NO: 21887 - protein, 10 aa, synthetic construct
AARTYTEILI

SEQ ID NO: 21888 - protein, 10 aa, synthetic construct
AARTYTEKHI

SEQ ID NO: 21889 - protein, 10 aa, synthetic construct
AARTYTEKRY

SEQ ID NO: 21890 - protein, 10 aa, synthetic construct
AARTYTENLN

SEQ ID NO: 21891 - protein, 10 aa, synthetic construct
AARTYTENLS

SEQ ID NO: 21892 - protein, 10 aa, synthetic construct
AARTYTEQLN

SEQ ID NO: 21893 - protein, 10 aa, synthetic construct
AARTYTEQLT

SEQ ID NO: 21894 - protein, 10 aa, synthetic construct
AARTYTERLI

SEQ ID NO: 21895 - protein, 10 aa, synthetic construct
AARTYTHKLN

SEQ ID NO: 21896 - protein, 10 aa, synthetic construct
AARTYTVQLI

SEQ ID NO: 21897 - protein, 10 aa, synthetic construct
AARTYTYKLI

SEQ ID NO: 21898 - protein, 15 aa, synthetic construct
AARVGGLPLLGTPHR

SEQ ID NO: 21899 - protein, 15 aa, synthetic construct
AASIRWGIRSWDTRQ

SEQ ID NO: 21900 - protein, 16 aa, synthetic construct
AASIRWGIRSWGTRQM

SEQ ID NO: 21901 - protein, 14 aa, synthetic construct
AASIRWGIRTWDPR

SEQ ID NO: 21902 - protein, 16 aa, synthetic construct
AASMRWGIRSWHTRQM

SEQ ID NO: 21903 - protein, 16 aa, synthetic construct
AASMRWGIRSWDRRQM

SEQ ID NO: 21904 - protein, 16 aa, synthetic construct
AASMRWGIRSWDSRPM

SEQ ID NO: 21905 - protein, 15 aa, synthetic construct
AASMRWGIRSWDSRQ

SEQ ID NO: 21906 - protein, 15 aa, synthetic construct
AASMRWGIRSWDTDR

SEQ ID NO: 21907 - protein, 16 aa, synthetic construct
AASMRWGIRSWDTGQM

SEQ ID NO: 21908 - protein, 16 aa, synthetic construct
AASMRWGIRSWDTREM

SEQ ID NO: 21909 - protein, 16 aa, synthetic construct
AASMRWGIRSWDTRKM

SEQ ID NO: 21910 - protein, 16 aa, synthetic construct
AASMRWGIRSWESRPM

SEQ ID NO: 21911 - protein, 13 aa, synthetic construct
AASMRWGIRSWET

SEQ ID NO: 21912 - protein, 16 aa, synthetic construct
AASMRWGIRSWGLNTD

SEQ ID NO: 21913 - protein, 15 aa, synthetic construct
AASMRWGIRSWHTRQ

SEQ ID NO: 21914 - protein, 14 aa, synthetic construct
AASMRWGIRSWNTR

SEQ ID NO: 21915 - protein, 14 aa, synthetic construct
AASMRWGIRSWDPR

SEQ ID NO: 21916 - protein, 16 aa, synthetic construct
AASMRWGIRSWSTRQM

SEQ ID NO: 21917 - protein, 16 aa, synthetic construct
AASMRWGIRSWYTDKL

SEQ ID NO: 21918 - protein, 16 aa, synthetic construct
AASMRWGIRTWDTDKL

SEQ ID NO: 21919 - protein, 16 aa, synthetic construct
AASMRWGIRTWDTRPM

SEQ ID NO: 21920 - protein, 15 aa, synthetic construct
AASMRWGIRTWDTRQ

SEQ ID NO: 21921 - protein, 16 aa, synthetic construct
AASMRWGISPWDTRQM

SEQ ID NO: 21922 - protein, 11 aa, synthetic construct
AASMRWGISSS

SEQ ID NO: 21923 - protein, 16 aa, synthetic construct
AASMRWGISSSDTLQM

SEQ ID NO: 21924 - protein, 16 aa, synthetic construct
AASMRWGISSWATRQM

SEQ ID NO: 21925 - protein, 14 aa, synthetic construct
AASMRWGISSWDTR

SEQ ID NO: 21926 - protein, 15 aa, synthetic construct
AASMRWGISSWDTRQ

SEQ ID NO: 21927 - protein, 16 aa, synthetic construct
AASMRWGIRSWDPRHM

SEQ ID NO: 21928 - protein, 16 aa, synthetic construct
AASMRWGIRSWDPPQM

SEQ ID NO: 21929 - protein, 16 aa, synthetic construct
AASIRWGISSWDSRLM

SEQ ID NO: 21930 - protein, 16 aa, synthetic construct
AASMRWGIRSCDNLQM

SEQ ID NO: 21931 - protein, 16 aa, synthetic construct
AASMRWGIGSWDTRRM

SEQ ID NO: 21932 - protein, 16 aa, synthetic construct
AASMRWGILSWDTRQM

SEQ ID NO: 21933 - protein, 13 aa, synthetic construct
AASMRWGIPIDSS

SEQ ID NO: 21934 - protein, 13 aa, synthetic construct
AASMRWGIPRNSS

SEQ ID NO: 21935 - protein, 15 aa, synthetic construct
AASMRWGIPSWDTRQ

SEQ ID NO: 21936 - protein, 16 aa, synthetic construct
AASMRWGIRAWDTDKL

SEQ ID NO: 21937 - protein, 15 aa, synthetic construct
AASMRWGIRAWDTRQ

SEQ ID NO: 21938 - protein, 16 aa, synthetic construct
AASMRWGIRCWATRQM

SEQ ID NO: 21939 - protein, 16 aa, synthetic construct
AASMRWGIRCWDTRQM

SEQ ID NO: 21940 - protein, 15 aa, synthetic construct
AASMRWGIRPWDTRQ

SEQ ID NO: 21941 - protein, 16 aa, synthetic construct
AASMRWGIRSCDALQM

SEQ ID NO: 21942 - protein, 16 aa, synthetic construct
AASMRWGIRSCDNRQM

SEQ ID NO: 21943 - protein, 16 aa, synthetic construct
AASMRWGIRSWDPDKL

SEQ ID NO: 21944 - protein, 14 aa, synthetic construct
AASMRWGIRSCDTR

SEQ ID NO: 21945 - protein, 16 aa, synthetic construct
AASMRWGIRSLDTRQM

SEQ ID NO: 21946 - protein, 14 aa, synthetic construct
AASMRWGIRSRDTR

SEQ ID NO: 21947 - protein, 15 aa, synthetic construct
AASMRWGIRSRDTRQ

SEQ ID NO: 21948 - protein, 11 aa, synthetic construct
AASMRWGIRSS

SEQ ID NO: 21949 - protein, 16 aa, synthetic construct
AASMRWGIRSSDTRPM

SEQ ID NO: 21950 - protein, 16 aa, synthetic construct
AASMRWGIRSWAPRQM

SEQ ID NO: 21951 - protein, 16 aa, synthetic construct
AASMRWGIRSWATRPM

SEQ ID NO: 21952 - protein, 16 aa, synthetic construct
AASMRWGIRSWDARRM

SEQ ID NO: 21953 - protein, 16 aa, synthetic construct
AASMRWGIRSWDDRQM

SEQ ID NO: 21954 - protein, 14 aa, synthetic construct
AASMRWGIRSWDNR

SEQ ID NO: 21955 - protein, 16 aa, synthetic construct
AASMRWGISSWETDKL

SEQ ID NO: 21956 - protein, 16 aa, synthetic construct
AASMRWGISSWETRQM

SEQ ID NO: 21957 - protein, 15 aa, synthetic construct
AASMRWGISSWTPDR

SEQ ID NO: 21958 - protein, 16 aa, synthetic construct
AASMSLGIRSWDTRQM

SEQ ID NO: 21959 - protein, 16 aa, synthetic construct
AASMRWGVRSWDTRPM

SEQ ID NO: 21960 - protein, 11 aa, synthetic construct
AASMRWGYAPG

SEQ ID NO: 21961 - protein, 15 aa, synthetic construct
AASMRWGYAPGTLDR

SEQ ID NO: 21962 - protein, 13 aa, synthetic construct
AASMRWGYAPGTP

SEQ ID NO: 21963 - protein, 16 aa, synthetic construct
AASMRWGYAPGTPINS

SEQ ID NO: 21964 - protein, 16 aa, synthetic construct
AASMRWGYGYWGLLTD

SEQ ID NO: 21965 - protein, 16 aa, synthetic construct
AASMRWWIRSCDTRQM

SEQ ID NO: 21966 - protein, 16 aa, synthetic construct
AASMRWWIRSRDTRQM

SEQ ID NO: 21967 - protein, 15 aa, synthetic construct
AASMRWWIRSWDTRQ

SEQ ID NO: 21968 - protein, 16 aa, synthetic construct
AASMSGGIRSCDTRQM

SEQ ID NO: 21969 - protein, 16 aa, synthetic construct
AASMSGGIRSWDTRQM

SEQ ID NO: 21970 - protein, 16 aa, synthetic construct
AASMSRGIRSWDTRQM

SEQ ID NO: 21971 - protein, 12 aa, synthetic construct
AASMRWGITETH

SEQ ID NO: 21972 - protein, 16 aa, synthetic construct
AASMSRGIRSWYTRQM

SEQ ID NO: 21973 - protein, 16 aa, synthetic construct
AASMSVGIRSWATRQM

SEQ ID NO: 21974 - protein, 16 aa, synthetic construct
AASMSWGILSSDTRHM

SEQ ID NO: 21975 - protein, 12 aa, synthetic construct
AASMSWGIRLLG

SEQ ID NO: 21976 - protein, 16 aa, synthetic construct
AASMSWGIRSCDTLQM

SEQ ID NO: 21977 - protein, 15 aa, synthetic construct
AASMSWGIRSRDTRQ

SEQ ID NO: 21978 - protein, 16 aa, synthetic construct
AASMSWGIRSWETRHM

SEQ ID NO: 21979 - protein, 14 aa, synthetic construct
AASMSWGIRSWHTR

SEQ ID NO: 21980 - protein, 15 aa, synthetic construct
AASMSWGYAPGTPDR

SEQ ID NO: 21981 - protein, 13 aa, synthetic construct
AASMWWGIRSWDT

SEQ ID NO: 21982 - protein, 16 aa, synthetic construct
AASMWWGIRSWDTDKL

SEQ ID NO: 21983 - protein, 16 aa, synthetic construct
AASMRWGVRAWATRQM

SEQ ID NO: 21984 - protein, 13 aa, synthetic construct
AASMRWGTPRNSS

SEQ ID NO: 21985 - protein, 13 aa, synthetic construct
AASMRWGTPINSS

SEQ ID NO: 21986 - protein, 16 aa, synthetic construct
AASMRWGRRSWVTRQM

SEQ ID NO: 21987 - protein, 16 aa, synthetic construct
AASMRWGLLSCDTRQM

SEQ ID NO: 21988 - protein, 11 aa, synthetic construct
AASMRWGLLSW

SEQ ID NO: 21989 - protein, 11 aa, synthetic construct
AASMRWGLRSW

SEQ ID NO: 21990 - protein, 16 aa, synthetic construct
AASMRWGLRSWDSRQM

SEQ ID NO: 21991 - protein, 16 aa, synthetic construct
AASMRWGLRSWDTDKL

SEQ ID NO: 21992 - protein, 16 aa, synthetic construct
AASMRWGLRSWDTRPM

SEQ ID NO: 21993 - protein, 15 aa, synthetic construct
AASMRWGLRSWDTRQ

SEQ ID NO: 21994 - protein, 16 aa, synthetic construct
AASMRWGMRSWATRQM

SEQ ID NO: 21995 - protein, 16 aa, synthetic construct
AASMRWGMRSWDPRQM

SEQ ID NO: 21996 - protein, 16 aa, synthetic construct
AASMRWGMRSWDTRPM

SEQ ID NO: 21997 - protein, 15 aa, synthetic construct
AASMRWGMRSWDTRQ

SEQ ID NO: 21998 - protein, 16 aa, synthetic construct
AASMRWGNRSWSTRQM

SEQ ID NO: 21999 - protein, 16 aa, synthetic construct
AASMRWGRCSWDTRRM

SEQ ID NO: 22000 - protein, 10 aa, synthetic construct
AASMRWGRGS

SEQ ID NO: 22001 - protein, 12 aa, synthetic construct
AASMRWGRRLLG

SEQ ID NO: 22002 - protein, 16 aa, synthetic construct
AASMRWGRRSGDPRQM

SEQ ID NO: 22003 - protein, 16 aa, synthetic construct
AASMRWGRRSSDTRQM

SEQ ID NO: 22004 - protein, 11 aa, synthetic construct
AASMRWGRRSW

SEQ ID NO: 22005 - protein, 12 aa, synthetic construct
AASMRWGRRSWD

SEQ ID NO: 22006 - protein, 16 aa, synthetic construct
AASMRWGRRSWDPRLM

SEQ ID NO: 22007 - protein, 15 aa, synthetic construct
AASMRWGRRSWDPRQ

SEQ ID NO: 22008 - protein, 16 aa, synthetic construct
AASMRWGRRSWEPRQM

SEQ ID NO: 22009 - protein, 16 aa, synthetic construct
AASMRWGRRSWGTRQM

SEQ ID NO: 22010 - protein, 13 aa, synthetic construct
AASMRWGGYGYWG

SEQ ID NO: 22011 - protein, 13 aa, synthetic construct
AASMRWGATATGA

SEQ ID NO: 22012 - protein, 12 aa, synthetic construct
AASMRWGAAATG

SEQ ID NO: 22013 - protein, 16 aa, synthetic construct
AASLRWGIRSWYTRQM

SEQ ID NO: 22014 - protein, 15 aa, synthetic construct
AASLRGGRRSWDPRQ

SEQ ID NO: 22015 - protein, 16 aa, synthetic construct
AASLRGGRRSWDSRQM

SEQ ID NO: 22016 - protein, 15 aa, synthetic construct
AASLRGGRRSWDTRQ

SEQ ID NO: 22017 - protein, 16 aa, synthetic construct
AASLRGGRRSWDTRQM

SEQ ID NO: 22018 - protein, 16 aa, synthetic construct
AASLRWGIGSWDTRHM

SEQ ID NO: 22019 - protein, 16 aa, synthetic construct
AASLRWGIRSGDTRQM

SEQ ID NO: 22020 - protein, 16 aa, synthetic construct
AASLRWGIRSRDTRQM

SEQ ID NO: 22021 - protein, 16 aa, synthetic construct
AASLRWGIRSSDTRQM

SEQ ID NO: 22022 - protein, 16 aa, synthetic construct
AASLRWGIRSWDHRQM

SEQ ID NO: 22023 - protein, 16 aa, synthetic construct
AASLRWGIRSWDTDKL

SEQ ID NO: 22024 - protein, 16 aa, synthetic construct
AASLRWGIRSWDTRRM

SEQ ID NO: 22025 - protein, 13 aa, synthetic construct
AASLRWGISSWDT

SEQ ID NO: 22026 - protein, 15 aa, synthetic construct
AASMCLLGDGPNKLI

SEQ ID NO: 22027 - protein, 15 aa, synthetic construct
AASLRWGLRSWDTRQ

SEQ ID NO: 22028 - protein, 16 aa, synthetic construct
AASLRWGMRSWDTRQM

SEQ ID NO: 22029 - protein, 15 aa, synthetic construct
AASLRWGRRSWDTRQ

SEQ ID NO: 22030 - protein, 16 aa, synthetic construct
AASLSWGIRSWATRQM

SEQ ID NO: 22031 - protein, 16 aa, synthetic construct
AASLSWGIRSWDTRPM

SEQ ID NO: 22032 - protein, 14 aa, synthetic construct
AASLWGGIRSWDTR

SEQ ID NO: 22033 - protein, 16 aa, synthetic construct
AASLWGGRRSWDPRQM

SEQ ID NO: 22034 - protein, 15 aa, synthetic construct
AASLWGGRRSWESRQ

SEQ ID NO: 22035 - protein, 16 aa, synthetic construct
AASLWWWIRSWDSRQM

SEQ ID NO: 22036 - protein, 10 aa, synthetic construct
AASLYTDKLI

SEQ ID NO: 22037 - protein, 15 aa, synthetic construct
AASMCLLGDGPDKLF

SEQ ID NO: 22038 - protein, 16 aa, synthetic construct
AASLRGGIRSWDTRQM

SEQ ID NO: 22039 - protein, 15 aa, synthetic construct
AASLRGGIRSWDTRQ

SEQ ID NO: 22040 - protein, 16 aa, synthetic construct
AASLRGGIRSWATRPM

SEQ ID NO: 22041 - protein, 12 aa, synthetic construct
AASLRGGIRLLG

SEQ ID NO: 22042 - protein, 16 aa, synthetic construct
AASIRWGISSWDTRHM

SEQ ID NO: 22043 - protein, 16 aa, synthetic construct
AASISWGISSWDTRQM

SEQ ID NO: 22044 - protein, 11 aa, synthetic construct
AASIVHTDKHI

SEQ ID NO: 22045 - protein, 11 aa, synthetic construct
AASIWATLTHI

SEQ ID NO: 22046 - protein, 14 aa, synthetic construct
AASIWWGIRSADTR

SEQ ID NO: 22047 - protein, 16 aa, synthetic construct
AASIWWGKRSWDPRQM

SEQ ID NO: 22048 - protein, 16 aa, synthetic construct
AASKGWGIRSWDTRQM

SEQ ID NO: 22049 - protein, 16 aa, synthetic construct
AASKGWGISSWDTRQM

SEQ ID NO: 22050 - protein, 15 aa, synthetic construct
AASKRSWIRYLDTRQ

SEQ ID NO: 22051 - protein, 16 aa, synthetic construct
AASKRWGIPTWDTRHM

SEQ ID NO: 22052 - protein, 16 aa, synthetic construct
AASKRWGIRSWDTRHM

SEQ ID NO: 22053 - protein, 16 aa, synthetic construct
AASKRWGIRTWDTRQM

SEQ ID NO: 22054 - protein, 16 aa, synthetic construct
AASKRWGRRSWDTRQM

SEQ ID NO: 22055 - protein, 16 aa, synthetic construct
AASKRWGTRSWDTRQM

SEQ ID NO: 22056 - protein, 15 aa, synthetic construct
AASKRWWIRSWDTRQ

SEQ ID NO: 22057 - protein, 16 aa, synthetic construct
AASKRWWIRSWDTRQM

SEQ ID NO: 22058 - protein, 14 aa, synthetic construct
AASKTRLKPSWDTR

SEQ ID NO: 22059 - protein, 11 aa, synthetic construct
AASLADTENLI

SEQ ID NO: 22060 - protein, 16 aa, synthetic construct
AASLGCGISSWYTRQM

SEQ ID NO: 22061 - protein, 11 aa, synthetic construct
AASLGDPINSS

SEQ ID NO: 22062 - protein, 11 aa, synthetic construct
AASLGDTDKLI

SEQ ID NO: 22063 - protein, 11 aa, synthetic construct
AASLGGSDQLI

SEQ ID NO: 22064 - protein, 16 aa, synthetic construct
AASLGWGIRAWATRQM

SEQ ID NO: 22065 - protein, 15 aa, synthetic construct
AASMCLLGDGPDNLI

SEQ ID NO: 22066 - protein, 15 aa, synthetic construct
AASMCLLGEGPDKLI

SEQ ID NO: 22067 - protein, 16 aa, synthetic construct
AASMRWEIRSWDTRQM

SEQ ID NO: 22068 - protein, 13 aa, synthetic construct
AASMRGGRRSWDT

SEQ ID NO: 22069 - protein, 15 aa, synthetic construct
AASMRGGIGSWERRQ

SEQ ID NO: 22070 - protein, 16 aa, synthetic construct
AASMRGGIRSGDTRQM

SEQ ID NO: 22071 - protein, 16 aa, synthetic construct
AASMRGGIRSWDSRQM

SEQ ID NO: 22072 - protein, 14 aa, synthetic construct
AASMRGGIRSWDTR

SEQ ID NO: 22073 - protein, 15 aa, synthetic construct
AASMRGGIRSWEPRQ

SEQ ID NO: 22074 - protein, 16 aa, synthetic construct
AASMRGGIRSWETRQM

SEQ ID NO: 22075 - protein, 16 aa, synthetic construct
AASMRGGIRTWDPRQM

SEQ ID NO: 22076 - protein, 16 aa, synthetic construct
AASMRGGISSWDTRQM

SEQ ID NO: 22077 - protein, 16 aa, synthetic construct
AASMRGGISSWETRQM

SEQ ID NO: 22078 - protein, 16 aa, synthetic construct
AASMRGGKRSWATRPM

SEQ ID NO: 22079 - protein, 12 aa, synthetic construct
AASMRGGLGSWY

SEQ ID NO: 22080 - protein, 16 aa, synthetic construct
AASMRGGRRSWGLHTD

SEQ ID NO: 22081 - protein, 15 aa, synthetic construct
AASMCRLGVGPEKLF

SEQ ID NO: 22082 - protein, 11 aa, synthetic construct
AASMRGHRESH

SEQ ID NO: 22083 - protein, 11 aa, synthetic construct
AASMRGHRKTH

SEQ ID NO: 22084 - protein, 11 aa, synthetic construct
AASMRGHRSTH

SEQ ID NO: 22085 - protein, 16 aa, synthetic construct
AASMRRGIGSCDTRQM

SEQ ID NO: 22086 - protein, 16 aa, synthetic construct
AASMRRGIRSLDTRQM

SEQ ID NO: 22087 - protein, 16 aa, synthetic construct
AASMRRGIRSWDSRQM

SEQ ID NO: 22088 - protein, 16 aa, synthetic construct
AASMRRGKRSRETRHM

SEQ ID NO: 22089 - protein, 16 aa, synthetic construct
AASMRSGIRSWETRQM

SEQ ID NO: 22090 - protein, 10 aa, synthetic construct
AASMRSSIPT

SEQ ID NO: 22091 - protein, 11 aa, synthetic construct
AASMRWEIRSW

SEQ ID NO: 22092 - protein, 16 aa, synthetic construct
AASMRWEIRSWATRQM

SEQ ID NO: 22093 - protein, 15 aa, synthetic construct
AASMRGGDAPGTPDR

SEQ ID NO: 22094 - protein, 16 aa, synthetic construct
AASMRCGIRSWDTLQM

SEQ ID NO: 22095 - protein, 16 aa, synthetic construct
AASMRCGIPSWYTRQM

SEQ ID NO: 22096 - protein, 10 aa, synthetic construct
AASMNSEKLN

SEQ ID NO: 22097 - protein, 10 aa, synthetic construct
AASMCTDKLI

SEQ ID NO: 22098 - protein, 11 aa, synthetic construct
AASMCTGGHTD

SEQ ID NO: 22099 - protein, 15 aa, synthetic construct
AASMCVLGDGPDKLI

SEQ ID NO: 22100 - protein, 16 aa, synthetic construct
AASMGCGIRSWDTRQM

SEQ ID NO: 22101 - protein, 11 aa, synthetic construct
AASMGEPRNSS

SEQ ID NO: 22102 - protein, 16 aa, synthetic construct
AASMGGGIRSWVTRPM

SEQ ID NO: 22103 - protein, 11 aa, synthetic construct
AASMGGHREPH

SEQ ID NO: 22104 - protein, 8 aa, synthetic construct
AASMGLLG

SEQ ID NO: 22105 - protein, 11 aa, synthetic construct
AASMGWGIRSW

SEQ ID NO: 22106 - protein, 14 aa, synthetic construct
AASMGWGIRSWDSR

SEQ ID NO: 22107 - protein, 16 aa, synthetic construct
AASMGWGIRSWDSRQM

SEQ ID NO: 22108 - protein, 16 aa, synthetic construct
AASMGWGIRSWDTDKL

SEQ ID NO: 22109 - protein, 16 aa, synthetic construct
AASMGWGIRSWDTRHM

SEQ ID NO: 22110 - protein, 16 aa, synthetic construct
AASMGWGIRSWETGQM

SEQ ID NO: 22111 - protein, 16 aa, synthetic construct
AASMGWGIRSWGLHTD

SEQ ID NO: 22112 - protein, 16 aa, synthetic construct
AASMGWGIRSWGPRQM

SEQ ID NO: 22113 - protein, 16 aa, synthetic construct
AASMGWGKRSWATRQM

SEQ ID NO: 22114 - protein, 16 aa, synthetic construct
AASMGWGKRSWDTRQM

SEQ ID NO: 22115 - protein, 16 aa, synthetic construct
AASMGWGRRSWDPRQM

SEQ ID NO: 22116 - protein, 16 aa, synthetic construct
AASMGWGTRSWDTRQM

SEQ ID NO: 22117 - protein, 15 aa, synthetic construct
AASMKWGIRSWEPRQ

SEQ ID NO: 22118 - protein, 16 aa, synthetic construct
AASMKWGIRSWGTRQM

SEQ ID NO: 22119 - protein, 16 aa, synthetic construct
AASMMWGCRSWDTRQM

SEQ ID NO: 22120 - protein, 11 aa, synthetic construct
YASPGGSDKLI

SEQ ID NO: 22121 - protein, 10 aa, synthetic construct
AAERGPDKLI

SEQ ID NO: 22122 - protein, 11 aa, synthetic construct
AAVLGDTVKLI

SEQ ID NO: 22123 - protein, 14 aa, synthetic construct
AAPTGGYGYTDKLI

SEQ ID NO: 22124 - protein, 11 aa, synthetic construct
ASRGLYTDKLI

SEQ ID NO: 22125 - protein, 13 aa, synthetic construct
AASVLRWWGIKLI

SEQ ID NO: 22126 - protein, 15 aa, synthetic construct
AAAKAFLRRGAPYTD

SEQ ID NO: 22127 - protein, 16 aa, synthetic construct
AASGLPSLGVHTDKLI

SEQ ID NO: 22128 - protein, 13 aa, synthetic construct
AASVLRWWGSKLI

SEQ ID NO: 22129 - protein, 14 aa, synthetic construct
AAAKAFLRRGAPYT

SEQ ID NO: 22130 - protein, 15 aa, synthetic construct
AAAKAFLRRGAPSTD

SEQ ID NO: 22131 - protein, 11 aa, synthetic construct
ASRGLYTEKLI

SEQ ID NO: 22132 - protein, 11 aa, synthetic construct
AAVLGDTGKLI

SEQ ID NO: 22133 - protein, 10 aa, synthetic construct
AAERGPDQLI

SEQ ID NO: 22134 - protein, 14 aa, synthetic construct
AAPTGGYGYTDQLI

SEQ ID NO: 22135 - protein, 10 aa, synthetic construct
AAERGPEKLI

SEQ ID NO: 22136 - protein, 14 aa, synthetic construct
AAPTGGYGYTDNLI

SEQ ID NO: 22137 - protein, 11 aa, synthetic construct
AAVLGDPVKLI

SEQ ID NO: 22138 - protein, 14 aa, synthetic construct
AAPTGGYGYTEKLI

SEQ ID NO: 22139 - protein, 13 aa, synthetic construct
AASVLRWWGLKLI

SEQ ID NO: 22140 - protein, 14 aa, synthetic construct
AAPTGGYGYTDTLI

SEQ ID NO: 22141 - protein, 14 aa, synthetic construct
AAPTGGYGSTDKLI

SEQ ID NO: 22142 - protein, 14 aa, synthetic construct
AAPPGGYGYTDKLI

SEQ ID NO: 22143 - protein, 11 aa, synthetic construct
EAVLGDTVKLI

SEQ ID NO: 22144 - protein, 14 aa, synthetic construct
EAPTGGYGYTDKLI

SEQ ID NO: 22145 - protein, 10 aa, synthetic construct
EAERGPDKLI

SEQ ID NO: 22146 - protein, 10 aa, synthetic construct
AAERGPDNLI

SEQ ID NO: 22147 - protein, 13 aa, synthetic construct
AARVLRWWGIKLI

SEQ ID NO: 22148 - protein, 10 aa, synthetic construct
QQKEGPINSS

SEQ ID NO: 22149 - protein, 15 aa, synthetic construct
AAATAFLRRGAPYTD

SEQ ID NO: 22150 - protein, 14 aa, synthetic construct
AAVLGDTGTPINSS

SEQ ID NO: 22151 - protein, 11 aa, synthetic construct
AAVLGDTVQLI

SEQ ID NO: 22152 - protein, 14 aa, synthetic construct
QPLLGDTGTPINSS

SEQ ID NO: 22153 - protein, 16 aa, synthetic construct
AASGLPSLGVHTEKLI

SEQ ID NO: 22154 - protein, 10 aa, synthetic construct
AAERGPDKII

SEQ ID NO: 22155 - protein, 16 aa, synthetic construct
QRRRPSYVGGPPTPIN

SEQ ID NO: 22156 - protein, 10 aa, synthetic construct
AAERGPDKLN

SEQ ID NO: 22157 - protein, 11 aa, synthetic construct
QQYWGIRLNSS

SEQ ID NO: 22158 - protein, 15 aa, synthetic construct
AAAKACLRRGAPYTD

SEQ ID NO: 22159 - protein, 10 aa, synthetic construct
AAERGPDTLI

SEQ ID NO: 22160 - protein, 13 aa, synthetic construct
EASVLRWWGIKLI

SEQ ID NO: 22161 - protein, 15 aa, synthetic construct
EAAKAFLRRGAPYTD

SEQ ID NO: 22162 - protein, 11 aa, synthetic construct
ASRGLYTAKLI

SEQ ID NO: 22163 - protein, 10 aa, synthetic construct
AVLGDTDKLI

SEQ ID NO: 22164 - protein, 13 aa, synthetic construct
QQASYVGGGLNSS

SEQ ID NO: 22165 - protein, 10 aa, synthetic construct
AADRGPDKLI

SEQ ID NO: 22166 - protein, 11 aa, synthetic construct
ASRGLSTDKLI

SEQ ID NO: 22167 - protein, 11 aa, synthetic construct
ASRGLYTDQLI

SEQ ID NO: 22168 - protein, 11 aa, synthetic construct
AAVLGDTVNLI

SEQ ID NO: 22169 - protein, 10 aa, synthetic construct
AAGRGPDKLI

SEQ ID NO: 22170 - protein, 16 aa, synthetic construct
AAAKAFLRRGPPTPIN

SEQ ID NO: 22171 - protein, 14 aa, synthetic construct
AAPTGGYGYTDKHI

SEQ ID NO: 22172 - protein, 11 aa, synthetic construct
HPGGCTPINSS

SEQ ID NO: 22173 - protein, 10 aa, synthetic construct
AAERGPDKLF

SEQ ID NO: 22174 - protein, 14 aa, synthetic construct
AAPTGGYGYTDKLN

SEQ ID NO: 22175 - protein, 11 aa, synthetic construct
AAVLGDTVKLN

SEQ ID NO: 22176 - protein, 13 aa, synthetic construct
AASVLRWWGINLI

SEQ ID NO: 22177 - protein, 11 aa, synthetic construct
ESRGLYTDKLI

SEQ ID NO: 22178 - protein, 11 aa, synthetic construct
AAVLGDTVKLF

SEQ ID NO: 22179 - protein, 10 aa, synthetic construct
AAERGPAKLI

SEQ ID NO: 22180 - protein, 13 aa, synthetic construct
AASVLRWWGIKLF

SEQ ID NO: 22181 - protein, 16 aa, synthetic construct
AASGLPSLGVHTDQLI

SEQ ID NO: 22182 - protein, 10 aa, synthetic construct
AAERGPDKHI

SEQ ID NO: 22183 - protein, 13 aa, synthetic construct
AASVLRWWGIKLN

SEQ ID NO: 22184 - protein, 14 aa, synthetic construct
AAPTGGYGYTAKLI

SEQ ID NO: 22185 - protein, 15 aa, synthetic construct
AAAQAFLRRGAPYTD

SEQ ID NO: 22186 - protein, 13 aa, synthetic construct
AASVLRGWGIKLI

SEQ ID NO: 22187 - protein, 15 aa, synthetic construct
AASGLPSLGVHTDKL

SEQ ID NO: 22188 - protein, 14 aa, synthetic construct
AAPTGGYGYTDKII

SEQ ID NO: 22189 - protein, 11 aa, synthetic construct
ASRGLYTDKLN

SEQ ID NO: 22190 - protein, 11 aa, synthetic construct
ASRGLYTDNLI

SEQ ID NO: 22191 - protein, 11 aa, synthetic construct
AAVRGDTVKLI

SEQ ID NO: 22192 - protein, 10 aa, synthetic construct
AAEGGPDKLI

SEQ ID NO: 22193 - protein, 16 aa, synthetic construct
AAAKAFLRRGAPTPIN

SEQ ID NO: 22194 - protein, 14 aa, synthetic construct
AAPTGGYGYTDKPI

SEQ ID NO: 22195 - protein, 14 aa, synthetic construct
AAPTGGSGYTDKLI

SEQ ID NO: 22196 - protein, 14 aa, synthetic construct
AAPTGGHGYTDKLI

SEQ ID NO: 22197 - protein, 13 aa, synthetic construct
AASVLRWWGMKLI

SEQ ID NO: 22198 - protein, 11 aa, synthetic construct
AAVLGDTVRLI

SEQ ID NO: 22199 - protein, 11 aa, synthetic construct
AAVLGDTVILI

SEQ ID NO: 22200 - protein, 11 aa, synthetic construct
ASRGLYADKLI

SEQ ID NO: 22201 - protein, 14 aa, synthetic construct
AAPTGGYGYTDKRI

SEQ ID NO: 22202 - protein, 15 aa, synthetic construct
AAAKAFLRRGAPNTD

SEQ ID NO: 22203 - protein, 13 aa, synthetic construct
AASDLRWWGIKLI

SEQ ID NO: 22204 - protein, 11 aa, synthetic construct
ASRGLYTDKLF

SEQ ID NO: 22205 - protein, 13 aa, synthetic construct
AASVLRWWGIILI

SEQ ID NO: 22206 - protein, 14 aa, synthetic construct
AAPTGGYGYADKLI

SEQ ID NO: 22207 - protein, 11 aa, synthetic construct
AAVLGDTVKLV

SEQ ID NO: 22208 - protein, 11 aa, synthetic construct
AAELGDTVKLI

SEQ ID NO: 22209 - protein, 6 aa, synthetic construct
AASVLR

SEQ ID NO: 22210 - protein, 14 aa, synthetic construct
AAPTGGYGSTEKLI

SEQ ID NO: 22211 - protein, 11 aa, synthetic construct
AAVLGDTVKPI

SEQ ID NO: 22212 - protein, 11 aa, synthetic construct
AARGLYTDKLI

SEQ ID NO: 22213 - protein, 14 aa, synthetic construct
AAPTGGYGYTDKLT

SEQ ID NO: 22214 - protein, 15 aa, synthetic construct
AAATAFLRRGAPSTD

SEQ ID NO: 22215 - protein, 14 aa, synthetic construct
AAPTGGYGYTDKLF

SEQ ID NO: 22216 - protein, 13 aa, synthetic construct
AASVLRWWGIQLI

SEQ ID NO: 22217 - protein, 11 aa, synthetic construct
ASRGLYSDKLI

SEQ ID NO: 22218 - protein, 11 aa, synthetic construct
ASRGLYTDKHI

SEQ ID NO: 22219 - protein, 13 aa, synthetic construct
AASVLRWWGSQLI

SEQ ID NO: 22220 - protein, 10 aa, synthetic construct
AAERVPDKLI

SEQ ID NO: 22221 - protein, 11 aa, synthetic construct
AAVLGDTAKLI

SEQ ID NO: 22222 - protein, 11 aa, synthetic construct
ASRGLYTDKPI

SEQ ID NO: 22223 - protein, 14 aa, synthetic construct
AAPTGGYRYTDKLI

SEQ ID NO: 22224 - protein, 11 aa, synthetic construct
AAVPGDTVKLI

SEQ ID NO: 22225 - protein, 11 aa, synthetic construct
AAVLGGTVKLI

SEQ ID NO: 22226 - protein, 11 aa, synthetic construct
AASRGDTDKLI

SEQ ID NO: 22227 - protein, 15 aa, synthetic construct
AAAKAFLRRGAPDTD

SEQ ID NO: 22228 - protein, 16 aa, synthetic construct
QQAAFLHWGSTPINSS

SEQ ID NO: 22229 - protein, 11 aa, synthetic construct
AAVLGDTVKII

SEQ ID NO: 22230 - protein, 13 aa, synthetic construct
AASVLRWWGVKLI

SEQ ID NO: 22231 - protein, 13 aa, synthetic construct
AASVLRWWGIKLS

SEQ ID NO: 22232 - protein, 15 aa, synthetic construct
AAAKAFLRRGIRVHR

SEQ ID NO: 22233 - protein, 11 aa, synthetic construct
AAVLGDTVELI

SEQ ID NO: 22234 - protein, 11 aa, synthetic construct
APRGLYTDKLI

SEQ ID NO: 22235 - protein, 13 aa, synthetic construct
AAGVLRWWGIKLI

SEQ ID NO: 22236 - protein, 16 aa, synthetic construct
AASGLPSLGVHTAKLI

SEQ ID NO: 22237 - protein, 13 aa, synthetic construct
AASVLRWWGSNLI

SEQ ID NO: 22238 - protein, 11 aa, synthetic construct
ASRGLYTDRLI

SEQ ID NO: 22239 - protein, 11 aa, synthetic construct
AAVLGVTVKLI

SEQ ID NO: 22240 - protein, 11 aa, synthetic construct
AAVLGIRLNSS

SEQ ID NO: 22241 - protein, 11 aa, synthetic construct
ASRGLYTDELI

SEQ ID NO: 22242 - protein, 14 aa, synthetic construct
AAHTGGYGYTDKLI

SEQ ID NO: 22243 - protein, 15 aa, synthetic construct
AAAKAFLRRGAPYAD

SEQ ID NO: 22244 - protein, 13 aa, synthetic construct
AASVLRWRGIKLI

SEQ ID NO: 22245 - protein, 15 aa, synthetic construct
AAAKAFIRRGAPYTD

SEQ ID NO: 22246 - protein, 11 aa, synthetic construct
AAVMGDTVKLI

SEQ ID NO: 22247 - protein, 15 aa, synthetic construct
AAARAFLRRGAPYTD

SEQ ID NO: 22248 - protein, 10 aa, synthetic construct
AAERGPDKRI

SEQ ID NO: 22249 - protein, 13 aa, synthetic construct
AARVLRWWGLKLI

SEQ ID NO: 22250 - protein, 14 aa, synthetic construct
AAPTGGYGHTDKLI

SEQ ID NO: 22251 - protein, 15 aa, synthetic construct
AAAKAFLRRGGIKLI

SEQ ID NO: 22252 - protein, 10 aa, synthetic construct
AAERGPDKPI

SEQ ID NO: 22253 - protein, 10 aa, synthetic construct
AAERGPVKLI

SEQ ID NO: 22254 - protein, 11 aa, synthetic construct
AAVLGDTVKHI

SEQ ID NO: 22255 - protein, 15 aa, synthetic construct
AAAKASLRRGAPYTD

SEQ ID NO: 22256 - protein, 14 aa, synthetic construct
AVPTGGYGYTDKLI

SEQ ID NO: 22257 - protein, 15 aa, synthetic construct
AAAKAFLRKGAPYTD

SEQ ID NO: 22258 - protein, 14 aa, synthetic construct
AAAKACLRRGAPYT

SEQ ID NO: 22259 - protein, 14 aa, synthetic construct
AAPTGGYGYTDILI

SEQ ID NO: 22260 - protein, 11 aa, synthetic construct
ASRGLYTDTLI

SEQ ID NO: 22261 - protein, 13 aa, synthetic construct
AASVLRWWGIKII

SEQ ID NO: 22262 - protein, 14 aa, synthetic construct
AAPTGGYGYTDKVI

SEQ ID NO: 22263 - protein, 14 aa, synthetic construct
AAPTRGYGYTDKLI

SEQ ID NO: 22264 - protein, 10 aa, synthetic construct
AAERGPDKLT

SEQ ID NO: 22265 - protein, 11 aa, synthetic construct
AAVLGDTVKLT

SEQ ID NO: 22266 - protein, 13 aa, synthetic construct
AASVLRRWGIKLI

SEQ ID NO: 22267 - protein, 14 aa, synthetic construct
AAPTGGCGYTDKLI

SEQ ID NO: 22268 - protein, 10 aa, synthetic construct
AAEIGPDKLI

SEQ ID NO: 22269 - protein, 13 aa, synthetic construct
AASVLRWWGIKPI

SEQ ID NO: 22270 - protein, 10 aa, synthetic construct
ASRGIRLNSS

SEQ ID NO: 22271 - protein, 14 aa, synthetic construct
AAPTGGYGYTVKLI

SEQ ID NO: 22272 - protein, 10 aa, synthetic construct
AEERGPDKLI

SEQ ID NO: 22273 - protein, 10 aa, synthetic construct
AAERGPDKLS

SEQ ID NO: 22274 - protein, 10 aa, synthetic construct
AAERGPGKLI

SEQ ID NO: 22275 - protein, 11 aa, synthetic construct
AEVLGDTVKLI

SEQ ID NO: 22276 - protein, 10 aa, synthetic construct
AAERGPDRLI

SEQ ID NO: 22277 - protein, 14 aa, synthetic construct
AAAQAFLRRGAPYT

SEQ ID NO: 22278 - protein, 10 aa, synthetic construct
AAPTGGLNSS

SEQ ID NO: 22279 - protein, 15 aa, synthetic construct
AAAKAFLRRGAPCTD

SEQ ID NO: 22280 - protein, 11 aa, synthetic construct
ASRGWYTDKLI

SEQ ID NO: 22281 - protein, 13 aa, synthetic construct
AASALRWWGIKLI

SEQ ID NO: 22282 - protein, 10 aa, synthetic construct
AAERGPDKLV

SEQ ID NO: 22283 - protein, 11 aa, synthetic construct
AAVLGDAVKLI

SEQ ID NO: 22284 - protein, 14 aa, synthetic construct
AAPTGDTGTPINSS

SEQ ID NO: 22285 - protein, 15 aa, synthetic construct
AAAKAFLRRGAPYSD

SEQ ID NO: 22286 - protein, 16 aa, synthetic construct
AASGLPSLGVHTDNLI

SEQ ID NO: 22287 - protein, 13 aa, synthetic construct
AAPTGGCTPINSS

SEQ ID NO: 22288 - protein, 10 aa, synthetic construct
AAESGPDKLI

SEQ ID NO: 22289 - protein, 14 aa, synthetic construct
AAPTGGYGYTDRLI

SEQ ID NO: 22290 - protein, 14 aa, synthetic construct
AAPSGGYGYTDKLI

SEQ ID NO: 22291 - protein, 15 aa, synthetic construct
AAAEAFLRRGAPYTD

SEQ ID NO: 22292 - protein, 14 aa, synthetic construct
AAPTGGYGYTDELI

SEQ ID NO: 22293 - protein, 14 aa, synthetic construct
AAPTGGYGYTDNSS

SEQ ID NO: 22294 - protein, 14 aa, synthetic construct
AAPTGGYGYTDKLV

SEQ ID NO: 22295 - protein, 15 aa, synthetic construct
AAAKALLRRGAPYTD

SEQ ID NO: 22296 - protein, 11 aa, synthetic construct
ASRGLCTDKLI

SEQ ID NO: 22297 - protein, 14 aa, synthetic construct
AAPAGGYGYTDKLI

SEQ ID NO: 22298 - protein, 13 aa, synthetic construct
AASVLRWWGIKVI

SEQ ID NO: 22299 - protein, 13 aa, synthetic construct
EASVLRWWGSKLI

SEQ ID NO: 22300 - protein, 10 aa, synthetic construct
AAERGPDELI

SEQ ID NO: 22301 - protein, 11 aa, synthetic construct
VAVLGDTVKLI

SEQ ID NO: 22302 - protein, 10 aa, synthetic construct
VAERGPDKLI

SEQ ID NO: 22303 - protein, 16 aa, synthetic construct
EASGLPSLGVHTDKLI

SEQ ID NO: 22304 - protein, 15 aa, synthetic construct
AAAKAFLRRGGPLHR

SEQ ID NO: 22305 - protein, 10 aa, synthetic construct
AADRGPEKLI

SEQ ID NO: 22306 - protein, 11 aa, synthetic construct
AAVLGETVKLI

SEQ ID NO: 22307 - protein, 15 aa, synthetic construct
AAAKAVLRRGAPYTD

SEQ ID NO: 22308 - protein, 13 aa, synthetic construct
AASVLRWWGIRLI

SEQ ID NO: 22309 - protein, 11 aa, synthetic construct
ASRGLYTDKLT

SEQ ID NO: 22310 - protein, 15 aa, synthetic construct
AAAKAYLRRGAPYTD

SEQ ID NO: 22311 - protein, 11 aa, synthetic construct
ASRGLYTDKII

SEQ ID NO: 22312 - protein, 11 aa, synthetic construct
AAVQGDTVKLI

SEQ ID NO: 22313 - protein, 11 aa, synthetic construct
AAVLGDTVKVI

SEQ ID NO: 22314 - protein, 14 aa, synthetic construct
AAPTGGYGYSDKLI

SEQ ID NO: 22315 - protein, 10 aa, synthetic construct
AASTYTDKLI

SEQ ID NO: 22316 - protein, 11 aa, synthetic construct
ASRGLHTDKLI

SEQ ID NO: 22317 - protein, 16 aa, synthetic construct
AASGPPSLGVHTDKLI

SEQ ID NO: 22318 - protein, 11 aa, synthetic construct
ASRGLYTDKLV

SEQ ID NO: 22319 - protein, 15 aa, synthetic construct
AAAKAFPRRGAPYTD

SEQ ID NO: 22320 - protein, 13 aa, synthetic construct
AASVLRWWGIKLT

SEQ ID NO: 22321 - protein, 13 aa, synthetic construct
VASVLRWWGIKLI

SEQ ID NO: 22322 - protein, 11 aa, synthetic construct
ASRGLSTEKLI

SEQ ID NO: 22323 - protein, 9 aa, synthetic construct
AAERGPDKL

SEQ ID NO: 22324 - protein, 15 aa, synthetic construct
AAAKACLRRGAPSTD

SEQ ID NO: 22325 - protein, 11 aa, synthetic construct
ASRGLYTVKLI

SEQ ID NO: 22326 - protein, 14 aa, synthetic construct
AAPTGGYGYTGKLI

SEQ ID NO: 22327 - protein, 13 aa, synthetic construct
AAPTGGYGYTDKL

SEQ ID NO: 22328 - protein, 13 aa, synthetic construct
AASVLRWWGIKLV

SEQ ID NO: 22329 - protein, 10 aa, synthetic construct
AAERGPDNSS

SEQ ID NO: 22330 - protein, 5 aa, synthetic construct
AAPTG

SEQ ID NO: 22331 - protein, 15 aa, synthetic construct
AAAKAFLRWWGIKLI

SEQ ID NO: 22332 - protein, 14 aa, synthetic construct
AAPPGGYGYTEKLI

SEQ ID NO: 22333 - protein, 15 aa, synthetic construct
AASVLRWWGIRLNSS

SEQ ID NO: 22334 - protein, 15 aa, synthetic construct
AAERGPSYVGGPPTP

SEQ ID NO: 22335 - protein, 11 aa, synthetic construct
AASPGGSDKLI

SEQ ID NO: 22336 - protein, 16 aa, synthetic construct
AASGLPSLGVHTDTLI

SEQ ID NO: 22337 - protein, 14 aa, synthetic construct
AAAKAFLRRGAPDT

SEQ ID NO: 22338 - protein, 16 aa, synthetic construct
AARGLPSLGVHTDKLI

SEQ ID NO: 22339 - protein, 16 aa, synthetic construct
AASGLPSLGVHADKLI

SEQ ID NO: 22340 - protein, 11 aa, synthetic construct
AAVLGDTVTLI

SEQ ID NO: 22341 - protein, 11 aa, synthetic construct
ASRGSYTDKLI

SEQ ID NO: 22342 - protein, 11 aa, synthetic construct
ASGGLYTDKLI

SEQ ID NO: 22343 - protein, 14 aa, synthetic construct
AAPPGGYGSTDKLI

SEQ ID NO: 22344 - protein, 15 aa, synthetic construct
AASMCLLGDGPDKLI

SEQ ID NO: 22345 - protein, 14 aa, synthetic construct
AALTGGYGYTDKLI

SEQ ID NO: 22346 - protein, 10 aa, synthetic construct
AAERGPDKLL

SEQ ID NO: 22347 - protein, 10 aa, synthetic construct
AAVRGPDKLI

SEQ ID NO: 22348 - protein, 14 aa, synthetic construct
AAPTGGYGYTDHLI

SEQ ID NO: 22349 - protein, 12 aa, synthetic construct
AAVLGVHTDKLI

SEQ ID NO: 22350 - protein, 5 aa, synthetic construct
AAVLG

SEQ ID NO: 22351 - protein, 11 aa, synthetic construct
AAALGDTVKLI

SEQ ID NO: 22352 - protein, 16 aa, synthetic construct
AASGLPPLGVHTDKLI

SEQ ID NO: 22353 - protein, 13 aa, synthetic construct
AASVLRWGGIKLI

SEQ ID NO: 22354 - protein, 14 aa, synthetic construct
AAPTGGYGYTETLI

SEQ ID NO: 22355 - protein, 11 aa, synthetic construct
AAVLGDTDKLI

SEQ ID NO: 22356 - protein, 14 aa, synthetic construct
AAPTGGYGDTDKLI

SEQ ID NO: 22357 - protein, 10 aa, synthetic construct
AVERGPDKLI

SEQ ID NO: 22358 - protein, 11 aa, synthetic construct
ASRGLYTDKRI

SEQ ID NO: 22359 - protein, 13 aa, synthetic construct
AASVLRWWGTKLI

SEQ ID NO: 22360 - protein, 10 aa, synthetic construct
AAERGPNKLI

SEQ ID NO: 22361 - protein, 15 aa, synthetic construct
AAAKAFLRGGAPYTD

SEQ ID NO: 22362 - protein, 15 aa, synthetic construct
AAAKAFLRRRAPYTD

SEQ ID NO: 22363 - protein, 11 aa, synthetic construct
AAVLWDTVKLI

SEQ ID NO: 22364 - protein, 13 aa, synthetic construct
AESVLRWWGIKLI

SEQ ID NO: 22365 - protein, 13 aa, synthetic construct
AASVLRWWGRKLI

SEQ ID NO: 22366 - protein, 13 aa, synthetic construct
AASVLRWWGSKLF

SEQ ID NO: 22367 - protein, 11 aa, synthetic construct
ASRGLYTDNSS

SEQ ID NO: 22368 - protein, 14 aa, synthetic construct
AAPNGGYGYTDKLI

SEQ ID NO: 22369 - protein, 11 aa, synthetic construct
AAVLGDTIKLI

SEQ ID NO: 22370 - protein, 16 aa, synthetic construct
AAAKAFLRRGDTVKLI

SEQ ID NO: 22371 - protein, 11 aa, synthetic construct
AAVLGETGKLI

SEQ ID NO: 22372 - protein, 14 aa, synthetic construct
AAPTGGSGYTDQLI

SEQ ID NO: 22373 - protein, 11 aa, synthetic construct
TSRGLYTDKLI

SEQ ID NO: 22374 - protein, 13 aa, synthetic construct
AASVLRWWGLNSS

SEQ ID NO: 22375 - protein, 11 aa, synthetic construct
AAVLGDTVNSS

SEQ ID NO: 22376 - protein, 14 aa, synthetic construct
VAPTGGYGYTDKLI

SEQ ID NO: 22377 - protein, 11 aa, synthetic construct
AAVLGDTVKRI

SEQ ID NO: 22378 - protein, 15 aa, synthetic construct
AARGGGYGYWGLHTD

SEQ ID NO: 22379 - protein, 16 aa, synthetic construct
AAAKAFLRRGLYTDKL

SEQ ID NO: 22380 - protein, 14 aa, synthetic construct
AARTGGYGYTDKLI

SEQ ID NO: 22381 - protein, 14 aa, synthetic construct
AAPTGGYGYTNKLI

SEQ ID NO: 22382 - protein, 10 aa, synthetic construct
AAERGLDKLI

SEQ ID NO: 22383 - protein, 11 aa, synthetic construct
AAERGIRLNSS

SEQ ID NO: 22384 - protein, 10 aa, synthetic construct
AASGLPSLGV

SEQ ID NO: 22385 - protein, 14 aa, synthetic construct
AAPTGGYGYPDKLI

SEQ ID NO: 22386 - protein, 10 aa, synthetic construct
AAERGPEQLI

SEQ ID NO: 22387 - protein, 13 aa, synthetic construct
AASVLRGWGSKLI

SEQ ID NO: 22388 - protein, 10 aa, synthetic construct
AAERGPYKLI

SEQ ID NO: 22389 - protein, 15 aa, synthetic construct
AAAKAFLLRGAPYTD

SEQ ID NO: 22390 - protein, 14 aa, synthetic construct
AAPTGGYGYTEKRI

SEQ ID NO: 22391 - protein, 10 aa, synthetic construct
ASRGLYTDKL

SEQ ID NO: 22392 - protein, 11 aa, synthetic construct
AAVLEDTVKLI

SEQ ID NO: 22393 - protein, 13 aa, synthetic construct
AASVVRWWGIKLI

SEQ ID NO: 22394 - protein, 11 aa, synthetic construct
AAVLGDTLKLI

SEQ ID NO: 22395 - protein, 13 aa, synthetic construct
AASVLLWWGIKLI

SEQ ID NO: 22396 - protein, 9 aa, synthetic construct
AASGPINSS

SEQ ID NO: 22397 - protein, 13 aa, synthetic construct
AASVQRWWGIKLI

SEQ ID NO: 22398 - protein, 14 aa, synthetic construct
TAPTGGYGYTDKLI

SEQ ID NO: 22399 - protein, 11 aa, synthetic construct
AAVLGDRVKLI

SEQ ID NO: 22400 - protein, 10 aa, synthetic construct
AAERGPDILI

SEQ ID NO: 22401 - protein, 14 aa, synthetic construct
AAPTGGYGCTDKLI

SEQ ID NO: 22402 - protein, 11 aa, synthetic construct
ASRGLYTGKLI

SEQ ID NO: 22403 - protein, 13 aa, synthetic construct
AASVLRWWGSKLS

SEQ ID NO: 22404 - protein, 10 aa, synthetic construct
AAERGPINSS

SEQ ID NO: 22405 - protein, 13 aa, synthetic construct
AASVLRWWGINSS

SEQ ID NO: 22406 - protein, 14 aa, synthetic construct
ADPTGGYGYTDKLI

SEQ ID NO: 22407 - protein, 11 aa, synthetic construct
AAVLGDPVQLI

SEQ ID NO: 22408 - protein, 10 aa, synthetic construct
AAETGPDKLI

SEQ ID NO: 22409 - protein, 13 aa, synthetic construct
AASVLRWCGIKLI

SEQ ID NO: 22410 - protein, 7 aa, synthetic construct
ASRGLYT

SEQ ID NO: 22411 - protein, 15 aa, synthetic construct
TAAKAFLRRGAPYTD

SEQ ID NO: 22412 - protein, 13 aa, synthetic construct
AASVLRWWGIELI

SEQ ID NO: 22413 - protein, 11 aa, synthetic construct
AAPTGGYGYTD

SEQ ID NO: 22414 - protein, 14 aa, synthetic construct
AAPTGGYGYTHKLI

SEQ ID NO: 22415 - protein, 16 aa, synthetic construct
AASGLPSLGVHTDKPI

SEQ ID NO: 22416 - protein, 16 aa, synthetic construct
AASGLPSLGDTGTPIN

SEQ ID NO: 22417 - protein, 13 aa, synthetic construct
AASVLRWWGIKHI

SEQ ID NO: 22418 - protein, 11 aa, synthetic construct
ASRGVYTDKLI

SEQ ID NO: 22419 - protein, 10 aa, synthetic construct
AAERGPDKLY

SEQ ID NO: 22420 - protein, 14 aa, synthetic construct
AAPPGGYGYTDNLI

SEQ ID NO: 22421 - protein, 16 aa, synthetic construct
AASGLPSRGVHTDKLI

SEQ ID NO: 22422 - protein, 11 aa, synthetic construct
AAVLGDTGKRI

SEQ ID NO: 22423 - protein, 10 aa, synthetic construct
AAERGRDKLI

SEQ ID NO: 22424 - protein, 14 aa, synthetic construct
ATPTGGYGYTDKLI

SEQ ID NO: 22425 - protein, 13 aa, synthetic construct
AASVLRCWGIKLI

SEQ ID NO: 22426 - protein, 13 aa, synthetic construct
AASVLRWWGITLI

SEQ ID NO: 22427 - protein, 10 aa, synthetic construct
EAERGPDKII

SEQ ID NO: 22428 - protein, 14 aa, synthetic construct
AAPTGGPPTPINSS

SEQ ID NO: 22429 - protein, 15 aa, synthetic construct
AAAKAFVRRGAPYTD

SEQ ID NO: 22430 - protein, 16 aa, synthetic construct
AASMRWGIRSWDTRQM

SEQ ID NO: 22431 - protein, 10 aa, synthetic construct
AAERGPEKRI

SEQ ID NO: 22432 - protein, 14 aa, synthetic construct
EAAKAFLRRGAPYT

SEQ ID NO: 22433 - protein, 8 aa, synthetic construct
AAAKAVLR

SEQ ID NO: 22434 - protein, 16 aa, synthetic construct
AASGLPSLGAHTDKLI

SEQ ID NO: 22435 - protein, 15 aa, synthetic construct
AAAKAFLRRGGLNSS

SEQ ID NO: 22436 - protein, 16 aa, synthetic construct
AASVLLGDTGTPINSS

SEQ ID NO: 22437 - protein, 15 aa, synthetic construct
AAAKAFLRRGAPHTD

SEQ ID NO: 22438 - protein, 14 aa, synthetic construct
AAPTVGYGYTDKLI

SEQ ID NO: 22439 - protein, 13 aa, synthetic construct
AVSVLRWWGIKLI

SEQ ID NO: 22440 - protein, 10 aa, synthetic construct
SAERGPDKLI

SEQ ID NO: 22441 - protein, 10 aa, synthetic construct
AAERGPDHLI

SEQ ID NO: 22442 - protein, 11 aa, synthetic construct
AAVLGATVKLI

SEQ ID NO: 22443 - protein, 11 aa, synthetic construct
AAVLGDTFKLI

SEQ ID NO: 22444 - protein, 11 aa, synthetic construct
AAVLGDPGKLI

SEQ ID NO: 22445 - protein, 14 aa, synthetic construct
AAPTGGYGSTDKRI

SEQ ID NO: 22446 - protein, 10 aa, synthetic construct
AAERGSDKLI

SEQ ID NO: 22447 - protein, 11 aa, synthetic construct
ASRGLYTAKRI

SEQ ID NO: 22448 - protein, 16 aa, synthetic construct
AAAKAFLHWGSTPINS

SEQ ID NO: 22449 - protein, 14 aa, synthetic construct
AAPTGGYGYTDKSI

SEQ ID NO: 22450 - protein, 10 aa, synthetic construct
AAKRGPDKLI

SEQ ID NO: 22451 - protein, 15 aa, synthetic construct
AAATACLRRGAPYTD

SEQ ID NO: 22452 - protein, 11 aa, synthetic construct
VSRGLYTDKLI

SEQ ID NO: 22453 - protein, 11 aa, synthetic construct
AVVLGDTVKLI

SEQ ID NO: 22454 - protein, 14 aa, synthetic construct
AAPTGGYGSTDTLI

SEQ ID NO: 22455 - protein, 13 aa, synthetic construct
AASVPRWWGIKLI

SEQ ID NO: 22456 - protein, 13 aa, synthetic construct
AASVRRWWGIKLI

SEQ ID NO: 22457 - protein, 14 aa, synthetic construct
EAPPGGYGYTDKLI

SEQ ID NO: 22458 - protein, 13 aa, synthetic construct
QQASYVGGGVNSS

SEQ ID NO: 22459 - protein, 10 aa, synthetic construct
AADRGPDQLI

SEQ ID NO: 22460 - protein, 15 aa, synthetic construct
AAAKAFRRRGAPYTD

SEQ ID NO: 22461 - protein, 10 aa, synthetic construct
AAERGPENLI

SEQ ID NO: 22462 - protein, 14 aa, synthetic construct
AAPTGGYEYTDKLI

SEQ ID NO: 22463 - protein, 13 aa, synthetic construct
AASVLRWWGSTLI

SEQ ID NO: 22464 - protein, 15 aa, synthetic construct
AAANAFLRRGAPYTD

SEQ ID NO: 22465 - protein, 13 aa, synthetic construct
AASVLRWWGFKLI

SEQ ID NO: 22466 - protein, 15 aa, synthetic construct
QRRRPSYVGGPPTPI

SEQ ID NO: 22467 - protein, 10 aa, synthetic construct
AAERGHDKLI

SEQ ID NO: 22468 - protein, 11 aa, synthetic construct
ASRGLYTETLI

SEQ ID NO: 22469 - protein, 15 aa, synthetic construct
AAAKAFLRRGVPYTD

SEQ ID NO: 22470 - protein, 15 aa, synthetic construct
AAAKAFLRRGAPYPD

SEQ ID NO: 22471 - protein, 11 aa, synthetic construct
EAELGDTVKLI

SEQ ID NO: 22472 - protein, 10 aa, synthetic construct
AAERGPETLI

SEQ ID NO: 22473 - protein, 11 aa, synthetic construct
SAVLGDTVKLI

SEQ ID NO: 22474 - protein, 10 aa, synthetic construct
AAARGPDKLI

SEQ ID NO: 22475 - protein, 14 aa, synthetic construct
AAPTGGYGYTENLI

SEQ ID NO: 22476 - protein, 11 aa, synthetic construct
ASRGLYTYKLI

SEQ ID NO: 22477 - protein, 16 aa, synthetic construct
AASVLRRGAPYTDKLI

SEQ ID NO: 22478 - protein, 10 aa, synthetic construct
AAERGPDNLF

SEQ ID NO: 22479 - protein, 15 aa, synthetic construct
AAAKPFLRRGAPYTD

SEQ ID NO: 22480 - protein, 8 aa, synthetic construct
ASRGIKLI

SEQ ID NO: 22481 - protein, 14 aa, synthetic construct
AAPTGGYWYTDKLI

SEQ ID NO: 22482 - protein, 11 aa, synthetic construct
ASWGLYTDKLI

SEQ ID NO: 22483 - protein, 11 aa, synthetic construct
ASRGVYTEKLI

SEQ ID NO: 22484 - protein, 11 aa, synthetic construct
AFRGLYTDKLI

SEQ ID NO: 22485 - protein, 16 aa, synthetic construct
AASGLPSLGVHTDKHI

SEQ ID NO: 22486 - protein, 11 aa, synthetic construct
ASRGLYIDKLI

SEQ ID NO: 22487 - protein, 14 aa, synthetic construct
AAPTGGYGYIDKLI

SEQ ID NO: 22488 - protein, 11 aa, synthetic construct
AAVLGDMVKLI

SEQ ID NO: 22489 - protein, 14 aa, synthetic construct
AAPTGGYGYTDNII

SEQ ID NO: 22490 - protein, 13 aa, synthetic construct
AARVLRWWGSKLI

SEQ ID NO: 22491 - protein, 14 aa, synthetic construct
AAPTEGYGYTDKLI

SEQ ID NO: 22492 - protein, 15 aa, synthetic construct
AAAKAFLRRGAPYTG

SEQ ID NO: 22493 - protein, 11 aa, synthetic construct
ASSGLYTDKLI

SEQ ID NO: 22494 - protein, 11 aa, synthetic construct
ATRGLYTDKLI

SEQ ID NO: 22495 - protein, 14 aa, synthetic construct
AAPTGRYGYTDKLI

SEQ ID NO: 22496 - protein, 15 aa, synthetic construct
AAAKAFLRREAPYTD

SEQ ID NO: 22497 - protein, 14 aa, synthetic construct
AAPTGGYGYTDKLL

SEQ ID NO: 22498 - protein, 11 aa, synthetic construct
EAVLGDTGKLI

SEQ ID NO: 22499 - protein, 10 aa, synthetic construct
AAERGADKLI

SEQ ID NO: 22500 - protein, 11 aa, synthetic construct
ASRRLYTDKLI

SEQ ID NO: 22501 - protein, 11 aa, synthetic construct
TAVLGDTVKLI

SEQ ID NO: 22502 - protein, 13 aa, synthetic construct
AASDLRWWGSKLI

SEQ ID NO: 22503 - protein, 11 aa, synthetic construct
AAVLGDSVKLI

SEQ ID NO: 22504 - protein, 11 aa, synthetic construct
ASRGLYTEKLN

SEQ ID NO: 22505 - protein, 13 aa, synthetic construct
AARVLRWWGIKLS

SEQ ID NO: 22506 - protein, 13 aa, synthetic construct
AASVLRWWGSKLN

SEQ ID NO: 22507 - protein, 13 aa, synthetic construct
AASVLRWWGSILI

SEQ ID NO: 22508 - protein, 16 aa, synthetic construct
AASGLPSLGVRTDKLI

SEQ ID NO: 22509 - protein, 15 aa, synthetic construct
AEAKAFLRRGAPYTD

SEQ ID NO: 22510 - protein, 14 aa, synthetic construct
AAATAFLRRGAPYT

SEQ ID NO: 22511 - protein, 16 aa, synthetic construct
AASGLPSLRVHTDKLI

SEQ ID NO: 22512 - protein, 16 aa, synthetic construct
AASGLPSQGVHTDKLI

SEQ ID NO: 22513 - protein, 11 aa, synthetic construct
ASRELYTDKLI

SEQ ID NO: 22514 - protein, 14 aa, synthetic construct
AAPTGGYGYTAQLI

SEQ ID NO: 22515 - protein, 9 aa, synthetic construct
AASGLPSLG

SEQ ID NO: 22516 - protein, 14 aa, synthetic construct
AAAKAFLRRGAPNT

SEQ ID NO: 22517 - protein, 11 aa, synthetic construct
ASRGLYTDKLL

SEQ ID NO: 22518 - protein, 11 aa, synthetic construct
AAVLRDTVKLI

SEQ ID NO: 22519 - protein, 13 aa, synthetic construct
AASFLRWWGIKLI

SEQ ID NO: 22520 - protein, 13 aa, synthetic construct
AASVLRGWGLKLI

SEQ ID NO: 22521 - protein, 13 aa, synthetic construct
TASVLRWWGIKLI

SEQ ID NO: 22522 - protein, 10 aa, synthetic construct
AAEREPDKLI

SEQ ID NO: 22523 - protein, 16 aa, synthetic construct
AASGLPSLGVHTDELI

SEQ ID NO: 22524 - protein, 10 aa, synthetic construct
AAERGPDKVI

SEQ ID NO: 22525 - protein, 13 aa, synthetic construct
AASVLRWWGIKLY

SEQ ID NO: 22526 - protein, 15 aa, synthetic construct
AAAKDFLRRGAPYTD

SEQ ID NO: 22527 - protein, 11 aa, synthetic construct
ASRGWSTDKLI

SEQ ID NO: 22528 - protein, 11 aa, synthetic construct
AAVLGNTVKLI

SEQ ID NO: 22529 - protein, 16 aa, synthetic construct
AAAKAFLRRGSTPINS

SEQ ID NO: 22530 - protein, 16 aa, synthetic construct
AASGLPSLGVNTDKLI

SEQ ID NO: 22531 - protein, 10 aa, synthetic construct
AAERGPAQLI

SEQ ID NO: 22532 - protein, 11 aa, synthetic construct
ASRGLYPDKLI

SEQ ID NO: 22533 - protein, 16 aa, synthetic construct
AASGLPSLGVHTENLI

SEQ ID NO: 22534 - protein, 14 aa, synthetic construct
AAPHGGYGYTDKLI

SEQ ID NO: 22535 - protein, 8 aa, synthetic construct
AAERGPDK

SEQ ID NO: 22536 - protein, 15 aa, synthetic construct
SAAKAFLRRGAPYTD

SEQ ID NO: 22537 - protein, 14 aa, synthetic construct
AALLGDTGTPINSS

SEQ ID NO: 22538 - protein, 13 aa, synthetic construct
AARVLRWWGIKLF

SEQ ID NO: 22539 - protein, 11 aa, synthetic construct
AAVLGDKVKLI

SEQ ID NO: 22540 - protein, 15 aa, synthetic construct
AAAKAFLHRGAPYTD

SEQ ID NO: 22541 - protein, 11 aa, synthetic construct
ATVLGDTVKLI

SEQ ID NO: 22542 - protein, 15 aa, synthetic construct
AATKAFLRRGAPYTD

SEQ ID NO: 22543 - protein, 10 aa, synthetic construct
TAERGPDKLI

SEQ ID NO: 22544 - protein, 11 aa, synthetic construct
ASMGLYTDKLI

SEQ ID NO: 22545 - protein, 15 aa, synthetic construct
AAAKAFLRRGAPLHR

SEQ ID NO: 22546 - protein, 11 aa, synthetic construct
AAVLGDTGQLI

SEQ ID NO: 22547 - protein, 14 aa, synthetic construct
AAPTGGDGYTDKLI

SEQ ID NO: 22548 - protein, 11 aa, synthetic construct
AAVLGDTVKLS

SEQ ID NO: 22549 - protein, 11 aa, synthetic construct
ASRGWYTDQLI

SEQ ID NO: 22550 - protein, 13 aa, synthetic construct
AASILRWWGIKLI

SEQ ID NO: 22551 - protein, 16 aa, synthetic construct
AESGLPSLGVHTDKLI

SEQ ID NO: 22552 - protein, 10 aa, synthetic construct
AAQRGPDKLI

SEQ ID NO: 22553 - protein, 16 aa, synthetic construct
AASGLPSLGVHTDILI

SEQ ID NO: 22554 - protein, 11 aa, synthetic construct
AAVVGDTVKLI

SEQ ID NO: 22555 - protein, 16 aa, synthetic construct
AASGLPSLGVHTDNSS

SEQ ID NO: 22556 - protein, 14 aa, synthetic construct
AASTGGYGYTDKLI

SEQ ID NO: 22557 - protein, 11 aa, synthetic construct
PSRGLYTDKLI

SEQ ID NO: 22558 - protein, 10 aa, synthetic construct
AAERGPDNRI

SEQ ID NO: 22559 - protein, 16 aa, synthetic construct
AASGLPSLGVHTDKII

SEQ ID NO: 22560 - protein, 11 aa, synthetic construct
ASRGLYTDKLS

SEQ ID NO: 22561 - protein, 14 aa, synthetic construct
AAPTGGYGYTDKLS

SEQ ID NO: 22562 - protein, 11 aa, synthetic construct
ASRGLYTENLI

SEQ ID NO: 22563 - protein, 11 aa, synthetic construct
ASRGLYTDKVI

SEQ ID NO: 22564 - protein, 13 aa, synthetic construct
AASVLRWWGLNLI

SEQ ID NO: 22565 - protein, 10 aa, synthetic construct
AAERRPDKLI

SEQ ID NO: 22566 - protein, 11 aa, synthetic construct
ASRGLDTDKLI

SEQ ID NO: 22567 - protein, 12 aa, synthetic construct
ASRGAPYTDKLI

SEQ ID NO: 22568 - protein, 16 aa, synthetic construct
AASGLPALGVHTDKLI

SEQ ID NO: 22569 - protein, 11 aa, synthetic construct
ASRGCTPINSS

SEQ ID NO: 22570 - protein, 15 aa, synthetic construct
AAEKAFLRRGAPYTD

SEQ ID NO: 22571 - protein, 16 aa, synthetic construct
AASGLPSLGVHSDKLI

SEQ ID NO: 22572 - protein, 15 aa, synthetic construct
AASGLPSLGDTVKLI

SEQ ID NO: 22573 - protein, 16 aa, synthetic construct
AASGLPSLGSTPINSS

SEQ ID NO: 22574 - protein, 13 aa, synthetic construct
AASVLRWWGINLS

SEQ ID NO: 22575 - protein, 15 aa, synthetic construct
AAAKAFLRRGPPTPI

SEQ ID NO: 22576 - protein, 13 aa, synthetic construct
AASVLRWWRIKLI

SEQ ID NO: 22577 - protein, 14 aa, synthetic construct
EAPTVGYGYTDKLI

SEQ ID NO: 22578 - protein, 11 aa, synthetic construct
AAVLGDTGKVI

SEQ ID NO: 22579 - protein, 15 aa, synthetic construct
AAAKAFQRRGAPYTD

SEQ ID NO: 22580 - protein, 14 aa, synthetic construct
AAPTGGYGSTDNLI

SEQ ID NO: 22581 - protein, 11 aa, synthetic construct
ASRGSTPINSS

SEQ ID NO: 22582 - protein, 10 aa, synthetic construct
EAERGPDTLI

SEQ ID NO: 22583 - protein, 16 aa, synthetic construct
AASVLRWWGSTPINSS

SEQ ID NO: 22584 - protein, 14 aa, synthetic construct
SAPTGGYGYTDKLI

SEQ ID NO: 22585 - protein, 13 aa, synthetic construct
AASVLRWWGLKLS

SEQ ID NO: 22586 - protein, 11 aa, synthetic construct
AAVLGDTGNLI

SEQ ID NO: 22587 - protein, 16 aa, synthetic construct
AASGLPSLGVPTDKLI

SEQ ID NO: 22588 - protein, 14 aa, synthetic construct
EAPNGGYGYTDKLI

SEQ ID NO: 22589 - protein, 16 aa, synthetic construct
AAAKAFLRRGPPPPIN

SEQ ID NO: 22590 - protein, 16 aa, synthetic construct
AAAKAFLRRGIRLNSS

SEQ ID NO: 22591 - protein, 16 aa, synthetic construct
AAGGLPSLGVHTDKLI

SEQ ID NO: 22592 - protein, 16 aa, synthetic construct
AAAKAFLRRGATPINS

SEQ ID NO: 22593 - protein, 15 aa, synthetic construct
AAAKAFLRRGAPSTG

SEQ ID NO: 22594 - protein, 10 aa, synthetic construct
EAEIGPDKLI

SEQ ID NO: 22595 - protein, 15 aa, synthetic construct
AAAKAFLRRGASYTD

SEQ ID NO: 22596 - protein, 10 aa, synthetic construct
AAERGPEKHI

SEQ ID NO: 22597 - protein, 14 aa, synthetic construct
DAPTGGYGYTDKLI

SEQ ID NO: 22598 - protein, 10 aa, synthetic construct
AAERGPDNII

SEQ ID NO: 22599 - protein, 13 aa, synthetic construct
AASVIRWWGIKLI

SEQ ID NO: 22600 - protein, 11 aa, synthetic construct
ASRGLYTDILI

SEQ ID NO: 22601 - protein, 13 aa, synthetic construct
DASVLRWWGIKLI

SEQ ID NO: 22602 - protein, 13 aa, synthetic construct
AASVLCWWGIKLI

SEQ ID NO: 22603 - protein, 13 aa, synthetic construct
AASVLRWWEIKLI

SEQ ID NO: 22604 - protein, 15 aa, synthetic construct
AAAKVFLRRGAPYTD

SEQ ID NO: 22605 - protein, 14 aa, synthetic construct
AAPPGGYGYTAKLI

SEQ ID NO: 22606 - protein, 14 aa, synthetic construct
AAPTGGAPYTDKLI

SEQ ID NO: 22607 - protein, 13 aa, synthetic construct
AANVLRWWGIKLI

SEQ ID NO: 22608 - protein, 10 aa, synthetic construct
EAERGPEKLI

SEQ ID NO: 22609 - protein, 14 aa, synthetic construct
AAPTGGFGYTDKLI

SEQ ID NO: 22610 - protein, 15 aa, synthetic construct
AAPKAFLRRGAPYTD

SEQ ID NO: 22611 - protein, 10 aa, synthetic construct
EAERVPDKLI

SEQ ID NO: 22612 - protein, 15 aa, synthetic construct
ASAKAFLRRGAPYTD

SEQ ID NO: 22613 - protein, 13 aa, synthetic construct
AAIVLRWWGIKLI

SEQ ID NO: 22614 - protein, 10 aa, synthetic construct
DAERGPDKLI

SEQ ID NO: 22615 - protein, 11 aa, synthetic construct
ASKGLYTDKLI

SEQ ID NO: 22616 - protein, 14 aa, synthetic construct
AAPPGGYGSTDKRI

SEQ ID NO: 22617 - protein, 11 aa, synthetic construct
AALLGDTVKLI

SEQ ID NO: 22618 - protein, 14 aa, synthetic construct
AAPPGGYGSTEKLI

SEQ ID NO: 22619 - protein, 10 aa, synthetic construct
EAERGPDKLN

SEQ ID NO: 22620 - protein, 14 aa, synthetic construct
AAPPGGYGYTDTLI

SEQ ID NO: 22621 - protein, 10 aa, synthetic construct
AAEGGPDQLI

SEQ ID NO: 22622 - protein, 11 aa, synthetic construct
AAERGDTVKLI

SEQ ID NO: 22623 - protein, 13 aa, synthetic construct
ASSVLRWWGIKLI

SEQ ID NO: 22624 - protein, 10 aa, synthetic construct
AAERGPETLS

SEQ ID NO: 22625 - protein, 10 aa, synthetic construct
AAERGPATLI

SEQ ID NO: 22626 - protein, 11 aa, synthetic construct
ASRGLYTAQLI

SEQ ID NO: 22627 - protein, 10 aa, synthetic construct
AAERAPDKLI

SEQ ID NO: 22628 - protein, 14 aa, synthetic construct
AAPTGGYGYTDQLN

SEQ ID NO: 22629 - protein, 14 aa, synthetic construct
AAPTGGYGYTDNLF

SEQ ID NO: 22630 - protein, 10 aa, synthetic construct
AAERGPDQHI

SEQ ID NO: 22631 - protein, 11 aa, synthetic construct
ASRGLYTDKLM

SEQ ID NO: 22632 - protein, 14 aa, synthetic construct
AAPTGGYGYTDKVF

SEQ ID NO: 22633 - protein, 10 aa, synthetic construct
AAERGPDQRI

SEQ ID NO: 22634 - protein, 14 aa, synthetic construct
AAPTGGYGYTDKHN

SEQ ID NO: 22635 - protein, 14 aa, synthetic construct
AAPTGGYGYNDKLI

SEQ ID NO: 22636 - protein, 14 aa, synthetic construct
AAPTGGSGDTDKLI

SEQ ID NO: 22637 - protein, 11 aa, synthetic construct
ASRGLNTDKLI

SEQ ID NO: 22638 - protein, 11 aa, synthetic construct
AAELGDTVKLN

SEQ ID NO: 22639 - protein, 14 aa, synthetic construct
AAPTGGYGTPINSS

SEQ ID NO: 22640 - protein, 14 aa, synthetic construct
AAPTGGYGSTEKRI

SEQ ID NO: 22641 - protein, 14 aa, synthetic construct
AAPTGGYGFTDKLI

SEQ ID NO: 22642 - protein, 14 aa, synthetic construct
EAPTGGYGSTDKLI

SEQ ID NO: 22643 - protein, 14 aa, synthetic construct
AAPTGGYAYTDKLI

SEQ ID NO: 22644 - protein, 10 aa, synthetic construct
AAEKGPDKLI

SEQ ID NO: 22645 - protein, 15 aa, synthetic construct
AAGKAFLRRGAPYTD

SEQ ID NO: 22646 - protein, 11 aa, synthetic construct
AAGLGDTVKLI

SEQ ID NO: 22647 - protein, 13 aa, synthetic construct
AARVLRWWGLKLS

SEQ ID NO: 22648 - protein, 11 aa, synthetic construct
ASRGWYTEKLI

SEQ ID NO: 22649 - protein, 13 aa, synthetic construct
AATVLRWWGIKLI

SEQ ID NO: 22650 - protein, 16 aa, synthetic construct
AASGLPSLGVHTDKVI

SEQ ID NO: 22651 - protein, 16 aa, synthetic construct
AASGLHSLGVHTDKLI

SEQ ID NO: 22652 - protein, 10 aa, synthetic construct
QQTEGPINSS

SEQ ID NO: 22653 - protein, 16 aa, synthetic construct
AASGLPSLGVTPINSS

SEQ ID NO: 22654 - protein, 15 aa, synthetic construct
AAAKAFLRRGAPFTD

SEQ ID NO: 22655 - protein, 13 aa, synthetic construct
AASVLRWWGLKLN

SEQ ID NO: 22656 - protein, 10 aa, synthetic construct
AAVRGPEKLI

SEQ ID NO: 22657 - protein, 11 aa, synthetic construct
AASPGGSDKPI

SEQ ID NO: 22658 - protein, 11 aa, synthetic construct
AAVRGDPVKLI

SEQ ID NO: 22659 - protein, 11 aa, synthetic construct
SSRGLYTDKLI

SEQ ID NO: 22660 - protein, 15 aa, synthetic construct
AAATACLRRGAPSTD

SEQ ID NO: 22661 - protein, 15 aa, synthetic construct
AAAKAFLRRGATYTD

SEQ ID NO: 22662 - protein, 15 aa, synthetic construct
AAAKASLRRGAPSTD

SEQ ID NO: 22663 - protein, 16 aa, synthetic construct
AAAKAFLLGDTGTPIN

SEQ ID NO: 22664 - protein, 16 aa, synthetic construct
AASGLPSLGVHTEQLI

SEQ ID NO: 22665 - protein, 16 aa, synthetic construct
AAAQAFLRRGPPTPIN

SEQ ID NO: 22666 - protein, 11 aa, synthetic construct
AAVLGYTVKLI

SEQ ID NO: 22667 - protein, 15 aa, synthetic construct
AAAKAFLRRGPPYTD

SEQ ID NO: 22668 - protein, 15 aa, synthetic construct
AAAKAFVRRGAPSTD

SEQ ID NO: 22669 - protein, 15 aa, synthetic construct
AAAQAFLRRGAPSTD

SEQ ID NO: 22670 - protein, 13 aa, synthetic construct
AASVLRWGGSKLI

SEQ ID NO: 22671 - protein, 15 aa, synthetic construct
AAAKAFLRRGGPYTD

SEQ ID NO: 22672 - protein, 11 aa, synthetic construct
AAVLGETGKRI

SEQ ID NO: 22673 - protein, 11 aa, synthetic construct
AAVLGDPVTLI

SEQ ID NO: 22674 - protein, 11 aa, synthetic construct
QPLLGDTVKLI

SEQ ID NO: 22675 - protein, 14 aa, synthetic construct
AAPTGGYGYTEKPI

SEQ ID NO: 22676 - protein, 14 aa, synthetic construct
AAPTGGYGSTDKHI

SEQ ID NO: 22677 - protein, 11 aa, synthetic construct
ADVLGDTVKLI

SEQ ID NO: 22678 - protein, 13 aa, synthetic construct
AASVLRWWGSKVI

SEQ ID NO: 22679 - protein, 16 aa, synthetic construct
AASGLPSRGVHTDQLI

SEQ ID NO: 22680 - protein, 11 aa, synthetic construct
HPGGCTPRNSS

SEQ ID NO: 22681 - protein, 13 aa, synthetic construct
AASGLRWWGIKLI

SEQ ID NO: 22682 - protein, 7 aa, synthetic construct
AAERGPD

SEQ ID NO: 22683 - protein, 11 aa, synthetic construct
ASRGMYTDKLI

SEQ ID NO: 22684 - protein, 10 aa, synthetic construct
APERGPDKLI

SEQ ID NO: 22685 - protein, 14 aa, synthetic construct
AAPTGGYGYTETRI

SEQ ID NO: 22686 - protein, 14 aa, synthetic construct
EAPTGGSGYTDKLI

SEQ ID NO: 22687 - protein, 14 aa, synthetic construct
AAPTGGSGYTEKLI

SEQ ID NO: 22688 - protein, 16 aa, synthetic construct
AAAKAFLRRGPPTPRN

SEQ ID NO: 22689 - protein, 11 aa, synthetic construct
ASRGVYTETLI

SEQ ID NO: 22690 - protein, 11 aa, synthetic construct
ASRGVYTDTLI

SEQ ID NO: 22691 - protein, 14 aa, synthetic construct
AAPTGGYGDTDQLI

SEQ ID NO: 22692 - protein, 14 aa, synthetic construct
AAPTGGYGYTVNLI

SEQ ID NO: 22693 - protein, 16 aa, synthetic construct
AASGLPSLGVHTVKLI

SEQ ID NO: 22694 - protein, 13 aa, synthetic construct
AASVLRWWGSRLI

SEQ ID NO: 22695 - protein, 11 aa, synthetic construct
ASRGLYTAKLL

SEQ ID NO: 22696 - protein, 16 aa, synthetic construct
AASGLPSLGVLTDKLI

SEQ ID NO: 22697 - protein, 14 aa, synthetic construct
AAPTGGYGHTDQLI

SEQ ID NO: 22698 - protein, 14 aa, synthetic construct
AAPTGGYGSPDKLI

SEQ ID NO: 22699 - protein, 11 aa, synthetic construct
ASRGLYTHKLI

SEQ ID NO: 22700 - protein, 16 aa, synthetic construct
AASGLPSLGVQTDKLI

SEQ ID NO: 22701 - protein, 15 aa, synthetic construct
AAAKAFLRSGAPYTD

SEQ ID NO: 22702 - protein, 16 aa, synthetic construct
AASGLPSPGVHTDKLI

SEQ ID NO: 22703 - protein, 15 aa, synthetic construct
AAAKAFLRRWAPYTD

SEQ ID NO: 22704 - protein, 14 aa, synthetic construct
AAATACLRRGAPYT

SEQ ID NO: 22705 - protein, 10 aa, synthetic construct
AAERGPDKFI

SEQ ID NO: 22706 - protein, 14 aa, synthetic construct
AAPTGGYGYTDKIN

SEQ ID NO: 22707 - protein, 11 aa, synthetic construct
AAVLGHTVKLI

SEQ ID NO: 22708 - protein, 10 aa, synthetic construct
QQKEGPRNSS

SEQ ID NO: 22709 - protein, 14 aa, synthetic construct
AAPTGGYGYTATLI

SEQ ID NO: 22710 - protein, 15 aa, synthetic construct
AAAKAYLRRGAPSTD

SEQ ID NO: 22711 - protein, 10 aa, synthetic construct
AAERGPHKLI

SEQ ID NO: 22712 - protein, 14 aa, synthetic construct
AAPTGGYGYTDNRI

SEQ ID NO: 22713 - protein, 11 aa, synthetic construct
AAVLGVTGKLI

SEQ ID NO: 22714 - protein, 9 aa, synthetic construct
AASVLRWWG

SEQ ID NO: 22715 - protein, 10 aa, synthetic construct
AAERGPDKHN

SEQ ID NO: 22716 - protein, 10 aa, synthetic construct
AAERGPEKLN

SEQ ID NO: 22717 - protein, 13 aa, synthetic construct
AASVLRRWGSKLI

SEQ ID NO: 22718 - protein, 10 aa, synthetic construct
AAERGPEKLL

SEQ ID NO: 22719 - protein, 11 aa, synthetic construct
AAVLVDTVKLI

SEQ ID NO: 22720 - protein, 10 aa, synthetic construct
AAERGPEKLF

SEQ ID NO: 22721 - protein, 14 aa, synthetic construct
AAPTGGYGYTDKLY

SEQ ID NO: 22722 - protein, 13 aa, synthetic construct
AASVLRWLGIKLI

SEQ ID NO: 22723 - protein, 10 aa, synthetic construct
AAERGPDLLI

SEQ ID NO: 22724 - protein, 13 aa, synthetic construct
AAERGPPTPINSS

SEQ ID NO: 22725 - protein, 15 aa, synthetic construct
AAAKAVLRRGAPSTD

SEQ ID NO: 22726 - protein, 14 aa, synthetic construct
AAPTGGYGYTDQLF

SEQ ID NO: 22727 - protein, 10 aa, synthetic construct
AAERGREKLI

SEQ ID NO: 22728 - protein, 14 aa, synthetic construct
AAPTGGYGYTDTII

SEQ ID NO: 22729 - protein, 10 aa, synthetic construct
AAERGPDKIN

SEQ ID NO: 22730 - protein, 11 aa, synthetic construct
ASRGLYTEKRI

SEQ ID NO: 22731 - protein, 14 aa, synthetic construct
AAPTGGSGYTDNLI

SEQ ID NO: 22732 - protein, 13 aa, synthetic construct
AAVLGGCTPINSS

SEQ ID NO: 22733 - protein, 11 aa, synthetic construct
AAVRGDTVQLI

SEQ ID NO: 22734 - protein, 11 aa, synthetic construct
ASRGLYTEKLF

SEQ ID NO: 22735 - protein, 13 aa, synthetic construct
AASVLRWWGLKLF

SEQ ID NO: 22736 - protein, 13 aa, synthetic construct
EASDLRWWGIKLI

SEQ ID NO: 22737 - protein, 11 aa, synthetic construct
ASRGLYTDKFI

SEQ ID NO: 22738 - protein, 13 aa, synthetic construct
AASVLGWWGIKLI

SEQ ID NO: 22739 - protein, 11 aa, synthetic construct
AAVLGGTGKLI

SEQ ID NO: 22740 - protein, 13 aa, synthetic construct
EASVLRWWGINLI

SEQ ID NO: 22741 - protein, 10 aa, synthetic construct
AAERGPDKSI

SEQ ID NO: 22742 - protein, 15 aa, synthetic construct
AASGLPSLGVHTEKL

SEQ ID NO: 22743 - protein, 15 aa, synthetic construct
AAAKAFLRRVAPYTD

SEQ ID NO: 22744 - protein, 13 aa, synthetic construct
AASVLRWWWIKLI

SEQ ID NO: 22745 - protein, 13 aa, synthetic construct
AARVLRWGGLKLI

SEQ ID NO: 22746 - protein, 14 aa, synthetic construct
AAQTGGYGYTDKLI

SEQ ID NO: 22747 - protein, 13 aa, synthetic construct
AAGVLRWWGSKLI

SEQ ID NO: 22748 - protein, 15 aa, synthetic construct
AAAKAFLRRGALYTD

SEQ ID NO: 22749 - protein, 15 aa, synthetic construct
ATAKAFLRRGAPYTD

SEQ ID NO: 22750 - protein, 16 aa, synthetic construct
VASGLPSLGVHTDKLI

SEQ ID NO: 22751 - protein, 10 aa, synthetic construct
ATERGPDKLI

SEQ ID NO: 22752 - protein, 11 aa, synthetic construct
ASRGLFTDKLI

SEQ ID NO: 22753 - protein, 13 aa, synthetic construct
AARDLRWWGIKLI

SEQ ID NO: 22754 - protein, 15 aa, synthetic construct
AAAKAFLRRAAPYTD

SEQ ID NO: 22755 - protein, 11 aa, synthetic construct
EEVLGDTVKLI

SEQ ID NO: 22756 - protein, 15 aa, synthetic construct
AAAKAFLRKGAPSTD

SEQ ID NO: 22757 - protein, 13 aa, synthetic construct
ATSVLRWWGIKLI

SEQ ID NO: 22758 - protein, 15 aa, synthetic construct
AAAKAFLRRGAPSAD

SEQ ID NO: 22759 - protein, 16 aa, synthetic construct
AASGLPSLGDHTDKLI

SEQ ID NO: 22760 - protein, 10 aa, synthetic construct
ASERGPDKLI

SEQ ID NO: 22761 - protein, 15 aa, synthetic construct
AAVKAFLRRGAPYTD

SEQ ID NO: 22762 - protein, 14 aa, synthetic construct
AAPTGGSGYTDKRI

SEQ ID NO: 22763 - protein, 11 aa, synthetic construct
AAVLGDTGKLN

SEQ ID NO: 22764 - protein, 14 aa, synthetic construct
AARTGGYGYTDQLI

SEQ ID NO: 22765 - protein, 10 aa, synthetic construct
EAEGGPDKLI

SEQ ID NO: 22766 - protein, 15 aa, synthetic construct
AAAKAFLLRGAPSTD

SEQ ID NO: 22767 - protein, 13 aa, synthetic construct
AAVLGAPYTDKLI

SEQ ID NO: 22768 - protein, 10 aa, synthetic construct
EEERGPDKLI

SEQ ID NO: 22769 - protein, 11 aa, synthetic construct
AAVLGDTGKLF

SEQ ID NO: 22770 - protein, 13 aa, synthetic construct
AASVVRWWGSKLI

SEQ ID NO: 22771 - protein, 11 aa, synthetic construct
ESRGLYTDKII

SEQ ID NO: 22772 - protein, 15 aa, synthetic construct
AAAKAFLRRGDPYTD

SEQ ID NO: 22773 - protein, 11 aa, synthetic construct
ASRGWYTDTLI

SEQ ID NO: 22774 - protein, 11 aa, synthetic construct
AAVLGDPVNLI

SEQ ID NO: 22775 - protein, 15 aa, synthetic construct
AASGLPSLGVHTDQL

SEQ ID NO: 22776 - protein, 11 aa, synthetic construct
EAVLGDTVNLI

SEQ ID NO: 22777 - protein, 10 aa, synthetic construct
AADRGPAKLI

SEQ ID NO: 22778 - protein, 13 aa, synthetic construct
AARVLRWWGRKLI

SEQ ID NO: 22779 - protein, 11 aa, synthetic construct
AAVLGDTVKIN

SEQ ID NO: 22780 - protein, 16 aa, synthetic construct
AANGLPSLGVHTDKLI

SEQ ID NO: 22781 - protein, 11 aa, synthetic construct
ASRGLSTDNLI

SEQ ID NO: 22782 - protein, 10 aa, synthetic construct
AAGRGPEKLI

SEQ ID NO: 22783 - protein, 13 aa, synthetic construct
VASVLRWWGSKLI

SEQ ID NO: 22784 - protein, 14 aa, synthetic construct
AASGLPSLGVHTDK

SEQ ID NO: 22785 - protein, 13 aa, synthetic construct
SASVLRWWGIKLI

SEQ ID NO: 22786 - protein, 13 aa, synthetic construct
AARVLRWWGIKVI

SEQ ID NO: 22787 - protein, 16 aa, synthetic construct
AAAKACLRRGAPTPIN

SEQ ID NO: 22788 - protein, 14 aa, synthetic construct
AAPIGGYGYTDKLI

SEQ ID NO: 22789 - protein, 11 aa, synthetic construct
AAGLGDTGKLI

SEQ ID NO: 22790 - protein, 14 aa, synthetic construct
AAPPGGYGYTDKLF

SEQ ID NO: 22791 - protein, 15 aa, synthetic construct
VAAKAFLRRGAPYTD

SEQ ID NO: 22792 - protein, 10 aa, synthetic construct
AAERGPEKLS

SEQ ID NO: 22793 - protein, 15 aa, synthetic construct
AAAEAFLRRGAPSTD

SEQ ID NO: 22794 - protein, 14 aa, synthetic construct
AAAKAVLRRGAPYT

SEQ ID NO: 22795 - protein, 14 aa, synthetic construct
AAPPGGYGYTDKRI

SEQ ID NO: 22796 - protein, 11 aa, synthetic construct
AAVLGDTGELI

SEQ ID NO: 22797 - protein, 14 aa, synthetic construct
AAPPGGYGYTDQLI

SEQ ID NO: 22798 - protein, 11 aa, synthetic construct
QQYWGIRFNSS

SEQ ID NO: 22799 - protein, 15 aa, synthetic construct
EAAKAFLRRGAPSTD

SEQ ID NO: 22800 - protein, 11 aa, synthetic construct
AAVLGDTGKII

SEQ ID NO: 22801 - protein, 10 aa, synthetic construct
AAERGPEKII

SEQ ID NO: 22802 - protein, 15 aa, synthetic construct
AAAKAFLGRGAPYTD

SEQ ID NO: 22803 - protein, 11 aa, synthetic construct
AAVLGDPLKLI

SEQ ID NO: 22804 - protein, 11 aa, synthetic construct
AAVLGDMVKLT

SEQ ID NO: 22805 - protein, 15 aa, synthetic construct
AAAKTFLRRGAPYTD

SEQ ID NO: 22806 - protein, 14 aa, synthetic construct
AAPTGGYGYTDKLK

SEQ ID NO: 22807 - protein, 14 aa, synthetic construct
AAPPGGYGSTDNLI

SEQ ID NO: 22808 - protein, 13 aa, synthetic construct
AASVLRWWGCKLI

SEQ ID NO: 22809 - protein, 15 aa, synthetic construct
AAAMAFLRRGAPYTD

SEQ ID NO: 22810 - protein, 11 aa, synthetic construct
VAVLGDTGKLI

SEQ ID NO: 22811 - protein, 16 aa, synthetic construct
AAIGLPSLGVHTDKLI

SEQ ID NO: 22812 - protein, 11 aa, synthetic construct
DAVLGDTVKLI

SEQ ID NO: 22813 - protein, 10 aa, synthetic construct
AAERGPENRI

SEQ ID NO: 22814 - protein, 13 aa, synthetic construct
AASVLRWWESKLI

SEQ ID NO: 22815 - protein, 11 aa, synthetic construct
AAVLGDPVKHI

SEQ ID NO: 22816 - protein, 10 aa, synthetic construct
AAERGPEQRI

SEQ ID NO: 22817 - protein, 12 aa, synthetic construct
AAPTGGYGYTDK

SEQ ID NO: 22818 - protein, 13 aa, synthetic construct
AASVLRWWGIKLK

SEQ ID NO: 22819 - protein, 15 aa, synthetic construct
EAAKAFIRRGAPYTD

SEQ ID NO: 22820 - protein, 11 aa, synthetic construct
AAVLGLRLNSS

SEQ ID NO: 22821 - protein, 10 aa, synthetic construct
AAERGPGQLI

SEQ ID NO: 22822 - protein, 14 aa, synthetic construct
AAPTGGYGYTDDLI

SEQ ID NO: 22823 - protein, 13 aa, synthetic construct
AASVLRWWGINII

SEQ ID NO: 22824 - protein, 14 aa, synthetic construct
AAPPGGYGSTEKRI

SEQ ID NO: 22825 - protein, 15 aa, synthetic construct
AAAKAILRRGAPYTD

SEQ ID NO: 22826 - protein, 13 aa, synthetic construct
AASVLRWWGLILI

SEQ ID NO: 22827 - protein, 15 aa, synthetic construct
AAAKAFLRRGAPTTD

SEQ ID NO: 22828 - protein, 10 aa, synthetic construct
AAERWPDKLI

SEQ ID NO: 22829 - protein, 14 aa, synthetic construct
AAPTGGYGSTDKPI

SEQ ID NO: 22830 - protein, 13 aa, synthetic construct
AASVLRWWGSKLV

SEQ ID NO: 22831 - protein, 13 aa, synthetic construct
AASVLRWWGSKPI

SEQ ID NO: 22832 - protein, 13 aa, synthetic construct
AAAKAFLRRGAPD

SEQ ID NO: 22833 - protein, 12 aa, synthetic construct
ASRGPPTPINSS

SEQ ID NO: 22834 - protein, 11 aa, synthetic construct
AAVLGDTGNSS

SEQ ID NO: 22835 - protein, 10 aa, synthetic construct
EAESGPDKLI

SEQ ID NO: 22836 - protein, 11 aa, synthetic construct
AAVLGDTGRLI

SEQ ID NO: 22837 - protein, 11 aa, synthetic construct
ASRGSYTAKLI

SEQ ID NO: 22838 - protein, 10 aa, synthetic construct
AAESGPEKLI

SEQ ID NO: 22839 - protein, 14 aa, synthetic construct
EAPTGGYGYTDNLI

SEQ ID NO: 22840 - protein, 11 aa, synthetic construct
AAVLGDTVHLI

SEQ ID NO: 22841 - protein, 13 aa, synthetic construct
AASVLRWRGLKLI

SEQ ID NO: 22842 - protein, 14 aa, synthetic construct
AAPTGGHGYTDQLI

SEQ ID NO: 22843 - protein, 14 aa, synthetic construct
AAPTGGYGDTEKLI

SEQ ID NO: 22844 - protein, 15 aa, synthetic construct
AAAKAFLRRGTPYTD

SEQ ID NO: 22845 - protein, 14 aa, synthetic construct
SAPTGGYGYTDKII

SEQ ID NO: 22846 - protein, 11 aa, synthetic construct
AAVLGDTVKLK

SEQ ID NO: 22847 - protein, 11 aa, synthetic construct
ASRGWSTEKLI

SEQ ID NO: 22848 - protein, 14 aa, synthetic construct
EAPPGGYGSTDKLI

SEQ ID NO: 22849 - protein, 14 aa, synthetic construct
AAPTGGSGYTDKLL

SEQ ID NO: 22850 - protein, 13 aa, synthetic construct
AASVLRWWGSKLT

SEQ ID NO: 22851 - protein, 16 aa, synthetic construct
AATGLPSLGVHTDKLI

SEQ ID NO: 22852 - protein, 14 aa, synthetic construct
AAVLGGPPTPINSS

SEQ ID NO: 22853 - protein, 14 aa, synthetic construct
AAPTGGYGYADQLI

SEQ ID NO: 22854 - protein, 14 aa, synthetic construct
AAPRGGYGYTDKLI

SEQ ID NO: 22855 - protein, 10 aa, synthetic construct
AVLGDTEKLI

SEQ ID NO: 22856 - protein, 14 aa, synthetic construct
AAPSGGYGSTDKLI

SEQ ID NO: 22857 - protein, 10 aa, synthetic construct
EAERGPDKHI

SEQ ID NO: 22858 - protein, 15 aa, synthetic construct
AAAKAFLPRGAPYTD

SEQ ID NO: 22859 - protein, 16 aa, synthetic construct
AASVLRWWGLYTDKLI

SEQ ID NO: 22860 - protein, 8 aa, synthetic construct
AAAKAFLR

SEQ ID NO: 22861 - protein, 15 aa, synthetic construct
AVAKAFLRRGAPYTD

SEQ ID NO: 22862 - protein, 11 aa, synthetic construct
AAVLGETVKRI

SEQ ID NO: 22863 - protein, 13 aa, synthetic construct
AASVLRWWGMILI

SEQ ID NO: 22864 - protein, 16 aa, synthetic construct
AAAKAFLRGGPPTPIN

SEQ ID NO: 22865 - protein, 15 aa, synthetic construct
AAAKAFLRWWGSKLI

SEQ ID NO: 22866 - protein, 16 aa, synthetic construct
QRRRPSYVGGPPPPIN

SEQ ID NO: 22867 - protein, 14 aa, synthetic construct
AAHTGGYGYTDKLN

SEQ ID NO: 22868 - protein, 11 aa, synthetic construct
AAVLGDTGKLT

SEQ ID NO: 22869 - protein, 10 aa, synthetic construct
AAERGTDKLI

SEQ ID NO: 22870 - protein, 10 aa, synthetic construct
EAERGPDNLI

SEQ ID NO: 22871 - protein, 14 aa, synthetic construct
AAPTGGYGSTETLI

SEQ ID NO: 22872 - protein, 13 aa, synthetic construct
AASVLRWWGRNLI

SEQ ID NO: 22873 - protein, 15 aa, synthetic construct
AAAKAFRRRGAPSTD

SEQ ID NO: 22874 - protein, 13 aa, synthetic construct
AASVLRWWGSKHI

SEQ ID NO: 22875 - protein, 14 aa, synthetic construct
EAPTGGYGYTDTLI

SEQ ID NO: 22876 - protein, 14 aa, synthetic construct
AAPTGGYGYTDKLM

SEQ ID NO: 22877 - protein, 13 aa, synthetic construct
AARVLRWWGSKLS

SEQ ID NO: 22878 - protein, 11 aa, synthetic construct
ASRGLYTDKLY

SEQ ID NO: 22879 - protein, 10 aa, synthetic construct
AADRGPEQLI

SEQ ID NO: 22880 - protein, 11 aa, synthetic construct
ACRGLYTDKLI

SEQ ID NO: 22881 - protein, 10 aa, synthetic construct
AARGLPSLGV

SEQ ID NO: 22882 - protein, 13 aa, synthetic construct
EASVLRWWGSKVI

SEQ ID NO: 22883 - protein, 16 aa, synthetic construct
AASGRPSLGVHTDKLI

SEQ ID NO: 22884 - protein, 15 aa, synthetic construct
AARGLPSLGVHTDKL

SEQ ID NO: 22885 - protein, 14 aa, synthetic construct
EDPTGGYGYTDKLI

SEQ ID NO: 22886 - skipped

SEQ ID NO: 22887 - protein, 15 aa, synthetic construct
AAATAFLLRGAPSTD

SEQ ID NO: 22888 - protein, 16 aa, synthetic construct
AASGLPSLGVHTDRLI

SEQ ID NO: 22889 - protein, 13 aa, synthetic construct
AASVLLWWGSKLI

SEQ ID NO: 22890 - protein, 11 aa, synthetic construct
ASRGFYTDKLI

SEQ ID NO: 22891 - protein, 15 aa, synthetic construct
AASMCLLGDGPEKLI

SEQ ID NO: 22892 - protein, 16 aa, synthetic construct
AASGFPSLGVHTDKLI

SEQ ID NO: 22893 - protein, 9 aa, synthetic construct
ASRGLYTDK

SEQ ID NO: 22894 - protein, 10 aa, synthetic construct
AAERGPDKNI

SEQ ID NO: 22895 - protein, 14 aa, synthetic construct
AAPTGGYGYTDQRI

SEQ ID NO: 22896 - protein, 11 aa, synthetic construct
ASGGCTPINSS

SEQ ID NO: 22897 - protein, 13 aa, synthetic construct
AASVLGWWGSKLI

SEQ ID NO: 22898 - protein, 14 aa, synthetic construct
AAPTGGYGYTDTVI

SEQ ID NO: 22899 - protein, 11 aa, synthetic construct
AAELGDTGKLI

SEQ ID NO: 22900 - protein, 13 aa, synthetic construct
EASVQRWWGIKLI

SEQ ID NO: 22901 - protein, 16 aa, synthetic construct
AASGLPSRGVHTEKLI

SEQ ID NO: 22902 - protein, 11 aa, synthetic construct
EAVLGDTVKLN

SEQ ID NO: 22903 - protein, 14 aa, synthetic construct
AAPTRGYGYTDQLI

SEQ ID NO: 22904 - protein, 11 aa, synthetic construct
ASRGLYAEKLI

SEQ ID NO: 22905 - protein, 16 aa, synthetic construct
AASGLPSLGVHTGKLI

SEQ ID NO: 22906 - protein, 13 aa, synthetic construct
AACVLRWWGIKLI

SEQ ID NO: 22907 - protein, 11 aa, synthetic construct
ASRGLYSEKLI

SEQ ID NO: 22908 - protein, 5 aa, synthetic construct
AADRG

SEQ ID NO: 22909 - protein, 11 aa, synthetic construct
ASRGLSTDQLI

SEQ ID NO: 22910 - protein, 16 aa, synthetic construct
AASGLPSLGVHTAQLI

SEQ ID NO: 22911 - protein, 16 aa, synthetic construct
AASGLPSLGVHTNKLI

SEQ ID NO: 22912 - protein, 10 aa, synthetic construct
AEERGPDKHI

SEQ ID NO: 22913 - protein, 11 aa, synthetic construct
ASRGLSTDKLF

SEQ ID NO: 22914 - protein, 11 aa, synthetic construct
ASRGLSTAKLI

SEQ ID NO: 22915 - protein, 11 aa, synthetic construct
ASRGLSSDKLI

SEQ ID NO: 22916 - protein, 14 aa, synthetic construct
AAATGGYGYTDNLI

SEQ ID NO: 22917 - protein, 10 aa, synthetic construct
AADRGPDKHI

SEQ ID NO: 22918 - protein, 10 aa, synthetic construct
AAERGPATLS

SEQ ID NO: 22919 - protein, 13 aa, synthetic construct
EESVLRWWGSKLI

SEQ ID NO: 22920 - protein, 16 aa, synthetic construct
AARGLPSLGVHTDTLI

SEQ ID NO: 22921 - protein, 15 aa, synthetic construct
AAAQAVLRRGAPYTD

SEQ ID NO: 22922 - protein, 10 aa, synthetic construct
AAERGPDTLF

SEQ ID NO: 22923 - protein, 11 aa, synthetic construct
AAVMGDTGKLI

SEQ ID NO: 22924 - protein, 14 aa, synthetic construct
QPLLGDTGTPINLS

SEQ ID NO: 22925 - protein, 10 aa, synthetic construct
AAERGPDQLN

SEQ ID NO: 22926 - protein, 10 aa, synthetic construct
AAERGPDQLV

SEQ ID NO: 22927 - protein, 15 aa, synthetic construct
AAARAFLRRGAPSTD

SEQ ID NO: 22928 - protein, 14 aa, synthetic construct
AAAQACLRRGAPYT

SEQ ID NO: 22929 - protein, 13 aa, synthetic construct
EASVLRWWGIKIN

SEQ ID NO: 22930 - protein, 14 aa, synthetic construct
AAPTGGYGYTDNLN

SEQ ID NO: 22931 - protein, 11 aa, synthetic construct
AAVQGDTGKLI

SEQ ID NO: 22932 - protein, 10 aa, synthetic construct
AAERGPDNLS

SEQ ID NO: 22933 - protein, 10 aa, synthetic construct
AAERGPDTLS

SEQ ID NO: 22934 - protein, 11 aa, synthetic construct
ASWGLYTEKLI

SEQ ID NO: 22935 - protein, 14 aa, synthetic construct
AAPTGGCGYADKLI

SEQ ID NO: 22936 - protein, 13 aa, synthetic construct
AAPTGGCTPRNSS

SEQ ID NO: 22937 - protein, 11 aa, synthetic construct
ASRGLSTAQLI

SEQ ID NO: 22938 - protein, 13 aa, synthetic construct
AAPTGGCTPINST

SEQ ID NO: 22939 - protein, 11 aa, synthetic construct
AAVLGDRVKRF

SEQ ID NO: 22940 - protein, 15 aa, synthetic construct
AATKAFLRRGAPSTD

SEQ ID NO: 22941 - protein, 11 aa, synthetic construct
AAVLGDPVKVI

SEQ ID NO: 22942 - protein, 14 aa, synthetic construct
AAPTGGCGYTDTLI

SEQ ID NO: 22943 - protein, 14 aa, synthetic construct
AAVLGDTGPPINSS

SEQ ID NO: 22944 - protein, 13 aa, synthetic construct
AARVLRWWRIKLI

SEQ ID NO: 22945 - protein, 14 aa, synthetic construct
AAQTGGYGYTDKRI

SEQ ID NO: 22946 - protein, 16 aa, synthetic construct
AASGLPSLGVDTDKLI

SEQ ID NO: 22947 - protein, 14 aa, synthetic construct
AAPTGAYGYTDKLI

SEQ ID NO: 22948 - protein, 15 aa, synthetic construct
AARGGGYGSWGLHTD

SEQ ID NO: 22949 - protein, 14 aa, synthetic construct
AAPKGGYGYTDKLN

SEQ ID NO: 22950 - protein, 16 aa, synthetic construct
AASGLPSLGVHPDKLI

SEQ ID NO: 22951 - protein, 13 aa, synthetic construct
AESDLRWWGIKLI

SEQ ID NO: 22952 - protein, 11 aa, synthetic construct
ASRGLLTDKLI

SEQ ID NO: 22953 - protein, 11 aa, synthetic construct
AAPTGDTVKLI

SEQ ID NO: 22954 - protein, 15 aa, synthetic construct
APAKAFLRRGAPYTD

SEQ ID NO: 22955 - protein, 15 aa, synthetic construct
ATAKAFLRRGAPSTD

SEQ ID NO: 22956 - protein, 16 aa, synthetic construct
AASALPSLGVHTDKLI

SEQ ID NO: 22957 - protein, 11 aa, synthetic construct
DSRGLYTDKLI

SEQ ID NO: 22958 - protein, 15 aa, synthetic construct
DAAKAFLRRGAPYTD

SEQ ID NO: 22959 - protein, 11 aa, synthetic construct
ASRGLSTDKHI

SEQ ID NO: 22960 - protein, 14 aa, synthetic construct
AAPKGGYGYTDKLI

SEQ ID NO: 22961 - protein, 11 aa, synthetic construct
ASRGWYTDKRI

SEQ ID NO: 22962 - protein, 14 aa, synthetic construct
AAPTRGSGYTDKLI

SEQ ID NO: 22963 - protein, 11 aa, synthetic construct
ASRGLYNDKLI

SEQ ID NO: 22964 - protein, 14 aa, synthetic construct
AAPTGGSGYTAQLI

SEQ ID NO: 22965 - protein, 14 aa, synthetic construct
AAPTRGYGYTDKII

SEQ ID NO: 22966 - protein, 16 aa, synthetic construct
AASGLPSLGVHTDNII

SEQ ID NO: 22967 - protein, 14 aa, synthetic construct
AAPTGGSGSTDKLI

SEQ ID NO: 22968 - protein, 10 aa, synthetic construct
AAVLGDTVKL

SEQ ID NO: 22969 - protein, 11 aa, synthetic construct
AAVLGDRGKLI

SEQ ID NO: 22970 - protein, 11 aa, synthetic construct
ASRVLYTDKLI

SEQ ID NO: 22971 - protein, 13 aa, synthetic construct
AARVLRWWGSILI

SEQ ID NO: 22972 - protein, 14 aa, synthetic construct
AAPTGGPPTPITSS

SEQ ID NO: 22973 - protein, 11 aa, synthetic construct
AAVLGDTVKFI

SEQ ID NO: 22974 - protein, 11 aa, synthetic construct
AAPTGGPINSS

SEQ ID NO: 22975 - protein, 13 aa, synthetic construct
AARVLRWWGRNLI

SEQ ID NO: 22976 - protein, 11 aa, synthetic construct
AAVLGDTVILF

SEQ ID NO: 22977 - protein, 14 aa, synthetic construct
AAPTGGHGYTVKLI

SEQ ID NO: 22978 - protein, 11 aa, synthetic construct
ASRGLSTVKLI

SEQ ID NO: 22979 - protein, 11 aa, synthetic construct
ASRGLSTEKLF

SEQ ID NO: 22980 - protein, 14 aa, synthetic construct
AAPTGGHGYTDKLN

SEQ ID NO: 22981 - protein, 14 aa, synthetic construct
APPTGGYGYTDKHI

SEQ ID NO: 22982 - protein, 11 aa, synthetic construct
AAVLGDTGNLF

SEQ ID NO: 22983 - protein, 14 aa, synthetic construct
AAVLGDTGTPIKSS

SEQ ID NO: 22984 - protein, 15 aa, synthetic construct
AASGLPSLGVHTAKL

SEQ ID NO: 22985 - protein, 16 aa, synthetic construct
AASGLPSLGGHTDKLI

SEQ ID NO: 22986 - protein, 16 aa, synthetic construct
AASGLPSLGGHTEKLI

SEQ ID NO: 22987 - protein, 13 aa, synthetic construct
AVSVLRWWGSKLI

SEQ ID NO: 22988 - protein, 11 aa, synthetic construct
ASRALYTDKLI

SEQ ID NO: 22989 - protein, 16 aa, synthetic construct
AVSGLPSLGVHTDKLI

SEQ ID NO: 22990 - protein, 13 aa, synthetic construct
AASDLRWCGIKLI

SEQ ID NO: 22991 - protein, 11 aa, synthetic construct
AEVLGDTVKII

SEQ ID NO: 22992 - protein, 13 aa, synthetic construct
AVSVLRWWGLKLI

SEQ ID NO: 22993 - protein, 14 aa, synthetic construct
AARTGGYGSTENLI

SEQ ID NO: 22994 - protein, 15 aa, synthetic construct
AGAKAFLRRGAPYTD

SEQ ID NO: 22995 - protein, 10 aa, synthetic construct
AAVLGARETH

SEQ ID NO: 22996 - protein, 11 aa, synthetic construct
AAVLGDTGILI

SEQ ID NO: 22997 - protein, 11 aa, synthetic construct
AEVLWDTVKLN

SEQ ID NO: 22998 - protein, 14 aa, synthetic construct
AAPPGGYGYTDRLI

SEQ ID NO: 22999 - protein, 11 aa, synthetic construct
AEVLGDTVKLN

SEQ ID NO: 23000 - protein, 14 aa, synthetic construct
AARTGGYGYTAKLI

SEQ ID NO: 23001 - protein, 14 aa, synthetic construct
AAPTAGYGYTDKLI

SEQ ID NO: 23002 - protein, 13 aa, synthetic construct
AASDLRWWGSQLI

SEQ ID NO: 23003 - protein, 11 aa, synthetic construct
AAVLGATGNLI

SEQ ID NO: 23004 - protein, 6 aa, synthetic construct
AARVLR

SEQ ID NO: 23005 - protein, 13 aa, synthetic construct
AASDLRWWGIKLV

SEQ ID NO: 23006 - protein, 13 aa, synthetic construct
AASDLRWWGIKLN

SEQ ID NO: 23007 - protein, 14 aa, synthetic construct
AAPPGGYGYTDILI

SEQ ID NO: 23008 - protein, 14 aa, synthetic construct
AAPPGGYGYTATLI

SEQ ID NO: 23009 - protein, 11 aa, synthetic construct
APVLGDTVKLI

SEQ ID NO: 23010 - protein, 13 aa, synthetic construct
AARVLRWRGIKLI

SEQ ID NO: 23011 - protein, 11 aa, synthetic construct
AYRGLYTDKLI

SEQ ID NO: 23012 - protein, 13 aa, synthetic construct
AARVLRWWGFKLI

SEQ ID NO: 23013 - protein, 11 aa, synthetic construct
AAVLGDTAKLV

SEQ ID NO: 23014 - protein, 14 aa, synthetic construct
AAPPVGYGYTDKLI

SEQ ID NO: 23015 - protein, 16 aa, synthetic construct
AASGLLSLGVHTDKLI

SEQ ID NO: 23016 - protein, 10 aa, synthetic construct
AVLGGTDKLI

SEQ ID NO: 23017 - protein, 10 aa, synthetic construct
AASGLPALGV

SEQ ID NO: 23018 - protein, 14 aa, synthetic construct
DAAKAFLRRGAPYT

SEQ ID NO: 23019 - protein, 16 aa, synthetic construct
AASGLPSLGFHTDKLI

SEQ ID NO: 23020 - protein, 13 aa, synthetic construct
AARVLRWWGLKLF

SEQ ID NO: 23021 - protein, 16 aa, synthetic construct
ATSGLPSLGVHTDKLI

SEQ ID NO: 23022 - protein, 13 aa, synthetic construct
ATSVLPWWGIKLI

SEQ ID NO: 23023 - protein, 11 aa, synthetic construct
AAVLGDTGKLS

SEQ ID NO: 23024 - protein, 13 aa, synthetic construct
AAPPGGCTPINSS

SEQ ID NO: 23025 - protein, 15 aa, synthetic construct
AASGLPSLGDTVKLN

SEQ ID NO: 23026 - protein, 14 aa, synthetic construct
AAPPGGHGYTDKLI

SEQ ID NO: 23027 - protein, 14 aa, synthetic construct
AAPPGGSGSTEKLI

SEQ ID NO: 23028 - protein, 16 aa, synthetic construct
AARGLPSLGVHSDKLI

SEQ ID NO: 23029 - protein, 16 aa, synthetic construct
AASGLPSLGDTGPPIN

SEQ ID NO: 23030 - protein, 13 aa, synthetic construct
AASALRWWGSKLI

SEQ ID NO: 23031 - protein, 14 aa, synthetic construct
AAPPGGSGYTDKLI

SEQ ID NO: 23032 - protein, 14 aa, synthetic construct
AVAKAFLRRGAPYT

SEQ ID NO: 23033 - protein, 11 aa, synthetic construct
AAVLGDRVQLI

SEQ ID NO: 23034 - protein, 11 aa, synthetic construct
AAVLGDPVKPI

SEQ ID NO: 23035 - protein, 16 aa, synthetic construct
AASGLPSLGAPYTDKL

SEQ ID NO: 23036 - protein, 16 aa, synthetic construct
AARGLPSLGVHTDNLI

SEQ ID NO: 23037 - protein, 14 aa, synthetic construct
AAPPGGYGSTDKHI

SEQ ID NO: 23038 - protein, 11 aa, synthetic construct
AAVLGDPVKLF

SEQ ID NO: 23039 - protein, 13 aa, synthetic construct
AARVLRWWGINLI

SEQ ID NO: 23040 - protein, 14 aa, synthetic construct
AAPSGGYGYSDKLI

SEQ ID NO: 23041 - protein, 13 aa, synthetic construct
AESVIRWWGIKLI

SEQ ID NO: 23042 - protein, 11 aa, synthetic construct
AARGLYTDKLF

SEQ ID NO: 23043 - protein, 11 aa, synthetic construct
ASRGWYTDKLN

SEQ ID NO: 23044 - protein, 11 aa, synthetic construct
AAVLGYTDKLI

SEQ ID NO: 23045 - protein, 11 aa, synthetic construct
AAVLGDTVKNI

SEQ ID NO: 23046 - protein, 13 aa, synthetic construct
AASVLRWWGIQLS

SEQ ID NO: 23047 - protein, 11 aa, synthetic construct
AAVRGDPVNLI

SEQ ID NO: 23048 - protein, 14 aa, synthetic construct
AAPTGGYGYTAPLI

SEQ ID NO: 23049 - protein, 13 aa, synthetic construct
AASVLHWWGIKLI

SEQ ID NO: 23050 - protein, 14 aa, synthetic construct
AAPTGGYGYTDQHI

SEQ ID NO: 23051 - protein, 16 aa, synthetic construct
AASVLRWWGIRVHRST

SEQ ID NO: 23052 - protein, 14 aa, synthetic construct
AAPTGGYGYTAILI

SEQ ID NO: 23053 - protein, 11 aa, synthetic construct
AAVRGDTAKLI

SEQ ID NO: 23054 - protein, 13 aa, synthetic construct
AASVLGWWGINLI

SEQ ID NO: 23055 - protein, 13 aa, synthetic construct
AASVLRWWGIYLI

SEQ ID NO: 23056 - protein, 11 aa, synthetic construct
AAVRGDTGKLI

SEQ ID NO: 23057 - protein, 14 aa, synthetic construct
AAPTGGYGYSDQLI

SEQ ID NO: 23058 - protein, 11 aa, synthetic construct
ASRGLYTDQPI

SEQ ID NO: 23059 - protein, 11 aa, synthetic construct
ASRGLYTDQRI

SEQ ID NO: 23060 - protein, 14 aa, synthetic construct
AAPTGGYGYTDQVI

SEQ ID NO: 23061 - protein, 11 aa, synthetic construct
ASRGLYTDSSS

SEQ ID NO: 23062 - protein, 11 aa, synthetic construct
ASRGLYTEELI

SEQ ID NO: 23063 - protein, 5 aa, synthetic construct
AASVL

SEQ ID NO: 23064 - protein, 11 aa, synthetic construct
AAVRGDTVNLI

SEQ ID NO: 23065 - protein, 16 aa, synthetic construct
AASSLPSLGVHTDKLI

SEQ ID NO: 23066 - protein, 13 aa, synthetic construct
AASVLRWWGLTLI

SEQ ID NO: 23067 - protein, 14 aa, synthetic construct
AAPTGGYGYPDNRI

SEQ ID NO: 23068 - protein, 14 aa, synthetic construct
AAPTGGYGYPDKRI

SEQ ID NO: 23069 - protein, 11 aa, synthetic construct
ASRGLYTDILT

SEQ ID NO: 23070 - protein, 11 aa, synthetic construct
ASRGLYTEKLV

SEQ ID NO: 23071 - protein, 14 aa, synthetic construct
AASMCTGGHTDKLI

SEQ ID NO: 23072 - protein, 11 aa, synthetic construct
AAVVGDTGKLI

SEQ ID NO: 23073 - protein, 14 aa, synthetic construct
AAPTGGYGYTDRVI

SEQ ID NO: 23074 - protein, 13 aa, synthetic construct
AASVLRWWGMKLS

SEQ ID NO: 23075 - protein, 13 aa, synthetic construct
AASVLRWWGMKPI

SEQ ID NO: 23076 - protein, 11 aa, synthetic construct
ASRGLYTDKIN

SEQ ID NO: 23077 - protein, 14 aa, synthetic construct
AAPTGGYGYTATLF

SEQ ID NO: 23078 - protein, 11 aa, synthetic construct
AAVLGDTVKSI

SEQ ID NO: 23079 - protein, 14 aa, synthetic construct
AAPTGGYGYTDNVI

SEQ ID NO: 23080 - protein, 9 aa, synthetic construct
AAVLGVVHR

SEQ ID NO: 23081 - protein, 10 aa, synthetic construct
AAVLGVTVKL

SEQ ID NO: 23082 - protein, 13 aa, synthetic construct
AASVLRWCGSKLI

SEQ ID NO: 23083 - protein, 13 aa, synthetic construct
AASVLRGWGSQLI

SEQ ID NO: 23084 - protein, 13 aa, synthetic construct
AASVLRGWGSNLS

SEQ ID NO: 23085 - protein, 13 aa, synthetic construct
AASVLRWWGCTLI

SEQ ID NO: 23086 - protein, 13 aa, synthetic construct
AASVLRGWGSKLN

SEQ ID NO: 23087 - protein, 13 aa, synthetic construct
AASVLRWWGFQLI

SEQ ID NO: 23088 - protein, 13 aa, synthetic construct
AASVLRGWGRKLS

SEQ ID NO: 23089 - protein, 13 aa, synthetic construct
AASVLRGWGLKLS

SEQ ID NO: 23090 - protein, 13 aa, synthetic construct
AASVLRWWGIILF

SEQ ID NO: 23091 - protein, 13 aa, synthetic construct
AASVLRGWGIKLN

SEQ ID NO: 23092 - protein, 13 aa, synthetic construct
AASVLRWWGIILN

SEQ ID NO: 23093 - protein, 14 aa, synthetic construct
AAPTGGYGYTDKHF

SEQ ID NO: 23094 - protein, 13 aa, synthetic construct
AASVLRWWGIIVI

SEQ ID NO: 23095 - protein, 14 aa, synthetic construct
AAPTGGYGYTDKGI

SEQ ID NO: 23096 - protein, 13 aa, synthetic construct
AASVLRGWGIKLF

SEQ ID NO: 23097 - protein, 14 aa, synthetic construct
AAPTGGYGYTDKFI

SEQ ID NO: 23098 - protein, 13 aa, synthetic construct
AASVLRWWGIKHN

SEQ ID NO: 23099 - protein, 12 aa, synthetic construct
AASVLRWWGIKL

SEQ ID NO: 23100 - protein, 14 aa, synthetic construct
AAPTGGYGYTDKDI

SEQ ID NO: 23101 - protein, 11 aa, synthetic construct
AAVMWDTVKLI

SEQ ID NO: 23102 - protein, 13 aa, synthetic construct
AASVLRWWGIKLD

SEQ ID NO: 23103 - protein, 13 aa, synthetic construct
AASVLRWWGIKLL

SEQ ID NO: 23104 - protein, 13 aa, synthetic construct
AASVLRWWGIKRI

SEQ ID NO: 23105 - protein, 13 aa, synthetic construct
AASVLRWWGILLI

SEQ ID NO: 23106 - protein, 16 aa, synthetic construct
AASVLPSLGVHTDKLI

SEQ ID NO: 23107 - protein, 13 aa, synthetic construct
AASVLLWWGIKLN

SEQ ID NO: 23108 - protein, 13 aa, synthetic construct
AASVLLWLGIKLI

SEQ ID NO: 23109 - protein, 11 aa, synthetic construct
ASRGLYTDHLI

SEQ ID NO: 23110 - protein, 15 aa, synthetic construct
AASMCLLGDGPDTLI

SEQ ID NO: 23111 - protein, 13 aa, synthetic construct
AASVLRWWGMNLI

SEQ ID NO: 23112 - protein, 14 aa, synthetic construct
AAPTGGYGYADKPI

SEQ ID NO: 23113 - protein, 16 aa, synthetic construct
AASGLPSLGVPTEQLI

SEQ ID NO: 23114 - protein, 13 aa, synthetic construct
AASVLRWWGSQLS

SEQ ID NO: 23115 - protein, 10 aa, synthetic construct
AEEIGPDKLI

SEQ ID NO: 23116 - protein, 11 aa, synthetic construct
ASRGLYSEYLI

SEQ ID NO: 23117 - protein, 11 aa, synthetic construct
AAPTGGYGETH

SEQ ID NO: 23118 - protein, 14 aa, synthetic construct
AAPTGGYGDTETLI

SEQ ID NO: 23119 - protein, 11 aa, synthetic construct
AAVLGDTVQLF

SEQ ID NO: 23120 - protein, 14 aa, synthetic construct
AAPTGGYGYTVKLT

SEQ ID NO: 23121 - protein, 11 aa, synthetic construct
ASRGVYTDKLS

SEQ ID NO: 23122 - protein, 14 aa, synthetic construct
AAPTGGYGDTDKRI

SEQ ID NO: 23123 - protein, 11 aa, synthetic construct
ASRGVYTDKRI

SEQ ID NO: 23124 - protein, 14 aa, synthetic construct
AAPTGGYGYTVTLI

SEQ ID NO: 23125 - protein, 14 aa, synthetic construct
AAPTGGYGYTYKLI

SEQ ID NO: 23126 - protein, 13 aa, synthetic construct
AASVLRWWGVNSS

SEQ ID NO: 23127 - protein, 11 aa, synthetic construct
AAVLGDTVNLN

SEQ ID NO: 23128 - protein, 16 aa, synthetic construct
AASGLPSLGVHTHKLI

SEQ ID NO: 23129 - protein, 12 aa, synthetic construct
AAVLGVVHRETH

SEQ ID NO: 23130 - protein, 11 aa, synthetic construct
ASRGWSTDQLI

SEQ ID NO: 23131 - protein, 11 aa, synthetic construct
ASRGLYSDQLI

SEQ ID NO: 23132 - protein, 11 aa, synthetic construct
AAVLGDTVKVS

SEQ ID NO: 23133 - protein, 10 aa, synthetic construct
AAPTGGVNSS

SEQ ID NO: 23134 - protein, 14 aa, synthetic construct
AAPTGGYVYTDKLI

SEQ ID NO: 23135 - protein, 11 aa, synthetic construct
ASRGWYADKLI

SEQ ID NO: 23136 - protein, 10 aa, synthetic construct
AEERGPDKII

SEQ ID NO: 23137 - protein, 11 aa, synthetic construct
AAVLGDTVKVF

SEQ ID NO: 23138 - protein, 15 aa, synthetic construct
AASGLPSLGVHTDTL

SEQ ID NO: 23139 - protein, 14 aa, synthetic construct
AAPTGGSGYTDKVI

SEQ ID NO: 23140 - protein, 14 aa, synthetic construct
AAPTGVYGYTDKLI

SEQ ID NO: 23141 - protein, 10 aa, synthetic construct
AEERGPDTLI

SEQ ID NO: 23142 - protein, 16 aa, synthetic construct
AASGLPSLGVQPDKLI

SEQ ID NO: 23143 - protein, 14 aa, synthetic construct
AAPTGGYGSTAKLI

SEQ ID NO: 23144 - protein, 11 aa, synthetic construct
AAPTGGYGSTD

SEQ ID NO: 23145 - protein, 14 aa, synthetic construct
AAPTGGYGSTDNRI

SEQ ID NO: 23146 - protein, 13 aa, synthetic construct
AASVLRWWGMQLI

SEQ ID NO: 23147 - protein, 15 aa, synthetic construct
AASMCLLGDEPDKLI

SEQ ID NO: 23148 - protein, 11 aa, synthetic construct
AAVVGETVKLI

SEQ ID NO: 23149 - protein, 13 aa, synthetic construct
AASVLRWWGNKLI

SEQ ID NO: 23150 - protein, 11 aa, synthetic construct
ASRGLYTNKLI

SEQ ID NO: 23151 - protein, 14 aa, synthetic construct
AAPTGGYGSTENLI

SEQ ID NO: 23152 - protein, 13 aa, synthetic construct
AASVLRWWGRKLS

SEQ ID NO: 23153 - protein, 14 aa, synthetic construct
AAPTGGYGYTDTRI

SEQ ID NO: 23154 - protein, 14 aa, synthetic construct
AAPTGGYGSTDTRI

SEQ ID NO: 23155 - protein, 13 aa, synthetic construct
AASVLRWWGRNLS

SEQ ID NO: 23156 - protein, 13 aa, synthetic construct
AASVLRWWGSKLL

SEQ ID NO: 23157 - protein, 14 aa, synthetic construct
ASRGLYVGGGLNSS

SEQ ID NO: 23158 - protein, 14 aa, synthetic construct
AAPTGGYGYTEKHI

SEQ ID NO: 23159 - protein, 14 aa, synthetic construct
AAPTGGYGYTEKII

SEQ ID NO: 23160 - protein, 11 aa, synthetic construct
ASRGLYTAKII

SEQ ID NO: 23161 - protein, 14 aa, synthetic construct
AAPTGGYGSTDKSI

SEQ ID NO: 23162 - protein, 16 aa, synthetic construct
AASGLPTLGVHTEKLI

SEQ ID NO: 23163 - protein, 14 aa, synthetic construct
AAPTGGYGYTEKLN

SEQ ID NO: 23164 - protein, 16 aa, synthetic construct
AASGLPTLGVHTDKLI

SEQ ID NO: 23165 - protein, 16 aa, synthetic construct
AASGLPSVGVHTDKLI

SEQ ID NO: 23166 - protein, 11 aa, synthetic construct
ASRGLYTAKVI

SEQ ID NO: 23167 - protein, 14 aa, synthetic construct
AAPTGGYGSTDKLF

SEQ ID NO: 23168 - protein, 14 aa, synthetic construct
AAPTGGYGSTDKII

SEQ ID NO: 23169 - protein, 11 aa, synthetic construct
ASRGMYTYKLI

SEQ ID NO: 23170 - protein, 16 aa, synthetic construct
AASGLPSRGVHTDNLI

SEQ ID NO: 23171 - protein, 16 aa, synthetic construct
AASGLPSRGGHTEKLI

SEQ ID NO: 23172 - protein, 14 aa, synthetic construct
AAPTGGYGYTGQLI

SEQ ID NO: 23173 - protein, 14 aa, synthetic construct
AAPTGGYGYTHKLN

SEQ ID NO: 23174 - protein, 11 aa, synthetic construct
AAVLGDTVNII

SEQ ID NO: 23175 - protein, 11 aa, synthetic construct
AAVLGDRVKLF

SEQ ID NO: 23176 - protein, 10 aa, synthetic construct
QLKEGPINSS

SEQ ID NO: 23177 - protein, 10 aa, synthetic construct
AAERAPDKLN

SEQ ID NO: 23178 - protein, 14 aa, synthetic construct
QRRRPSYVGGPPTP

SEQ ID NO: 23179 - protein, 11 aa, synthetic construct
EAVLVDTVKLI

SEQ ID NO: 23180 - protein, 10 aa, synthetic construct
AAARGPEKLI

SEQ ID NO: 23181 - protein, 13 aa, synthetic construct
GASVLRWGGIKLI

SEQ ID NO: 23182 - protein, 10 aa, synthetic construct
EAGRGPDKLI

SEQ ID NO: 23183 - protein, 13 aa, synthetic construct
AACVLRWWGSKLI

SEQ ID NO: 23184 - protein, 15 aa, synthetic construct
AAAKALLRRGAPSTD

SEQ ID NO: 23185 - protein, 11 aa, synthetic construct
AAELVDTVKLI

SEQ ID NO: 23186 - protein, 16 aa, synthetic construct
AAAKALLRRGAPTPIN

SEQ ID NO: 23187 - protein, 16 aa, synthetic construct
QRRRPAYVGGPPTPIN

SEQ ID NO: 23188 - protein, 11 aa, synthetic construct
AAGLGETGKRI

SEQ ID NO: 23189 - protein, 11 aa, synthetic construct
QQSWGIRLNSS

SEQ ID NO: 23190 - protein, 11 aa, synthetic construct
EALLGDTVKLI

SEQ ID NO: 23191 - protein, 10 aa, synthetic construct
AAETGPDKLN

SEQ ID NO: 23192 - protein, 10 aa, synthetic construct
QQNEGPINSS

SEQ ID NO: 23193 - protein, 10 aa, synthetic construct
QQKEGPITSS

SEQ ID NO: 23194 - protein, 7 aa, synthetic construct
AAAKAYL

SEQ ID NO: 23195 - protein, 14 aa, synthetic construct
AAAKAYLRRGAPYT

SEQ ID NO: 23196 - protein, 11 aa, synthetic construct
EAVLGDTVKII

SEQ ID NO: 23197 - protein, 11 aa, synthetic construct
HPGGCPPINSS

SEQ ID NO: 23198 - protein, 15 aa, synthetic construct
AAATAVLRRGAPYTD

SEQ ID NO: 23199 - protein, 15 aa, synthetic construct
AAAKGFLRRGAPYTD

SEQ ID NO: 23200 - protein, 8 aa, synthetic construct
AAATAVLR

SEQ ID NO: 23201 - protein, 10 aa, synthetic construct
AAETGPEKLI

SEQ ID NO: 23202 - protein, 15 aa, synthetic construct
AAAKPFLRRGAPSTD

SEQ ID NO: 23203 - protein, 14 aa, synthetic construct
AAAKPFLRRGAPYT

SEQ ID NO: 23204 - protein, 14 aa, synthetic construct
AAAKAFVRRGAPYT

SEQ ID NO: 23205 - protein, 16 aa, synthetic construct
QRRRPSYVGGPPTPRN

SEQ ID NO: 23206 - protein, 15 aa, synthetic construct
QRRRPSYVWGPPTPI

SEQ ID NO: 23207 - protein, 11 aa, synthetic construct
AAELGHTVKLI

SEQ ID NO: 23208 - protein, 15 aa, synthetic construct
EEAKAFLRRGAPYTD

SEQ ID NO: 23209 - protein, 14 aa, synthetic construct
AAAKAFLRRGGPYT

SEQ ID NO: 23210 - protein, 15 aa, synthetic construct
AAAKAFLRRGGSKLI

SEQ ID NO: 23211 - protein, 13 aa, synthetic construct
SASVLRWWGIKLN

SEQ ID NO: 23212 - protein, 16 aa, synthetic construct
SASGLPSLGVHTDKLI

SEQ ID NO: 23213 - protein, 14 aa, synthetic construct
AAAKAFLRRGPPTP

SEQ ID NO: 23214 - protein, 14 aa, synthetic construct
AAHTGGYGYTDQLI

SEQ ID NO: 23215 - protein, 10 aa, synthetic construct
EAERGPDKRI

SEQ ID NO: 23216 - protein, 16 aa, synthetic construct
AAAKAFLRRGSPTPIN

SEQ ID NO: 23217 - protein, 15 aa, synthetic construct
AAEKSFLRRGAPYTD

SEQ ID NO: 23218 - protein, 15 aa, synthetic construct
AAAKAFLRRGSPYTD

SEQ ID NO: 23219 - protein, 10 aa, synthetic construct
AADRGPDNLI

SEQ ID NO: 23220 - protein, 15 aa, synthetic construct
AAAKAFLRRGYGYTD

SEQ ID NO: 23221 - protein, 14 aa, synthetic construct
AAAKAFLRRRAPYT

SEQ ID NO: 23222 - protein, 10 aa, synthetic construct
SAERGPDQLI

SEQ ID NO: 23223 - protein, 15 aa, synthetic construct
AAAKAFLRTGAPYTD

SEQ ID NO: 23224 - protein, 10 aa, synthetic construct
AADRGPDHLI

SEQ ID NO: 23225 - protein, 10 aa, synthetic construct
EAERGPYKLN

SEQ ID NO: 23226 - protein, 15 aa, synthetic construct
AAAKAFLRWGAPYTD

SEQ ID NO: 23227 - protein, 11 aa, synthetic construct
AAELGDTVKHI

SEQ ID NO: 23228 - protein, 10 aa, synthetic construct
GAERGPDKLI

SEQ ID NO: 23229 - protein, 11 aa, synthetic construct
AAELGDTVNLI

SEQ ID NO: 23230 - protein, 11 aa, synthetic construct
EAVMGDTVKLI

SEQ ID NO: 23231 - protein, 14 aa, synthetic construct
AAAKAFRRRGAPYT

SEQ ID NO: 23232 - protein, 14 aa, synthetic construct
QTLLGDTGTPINSS

SEQ ID NO: 23233 - protein, 10 aa, synthetic construct
AAETGPDQLI

SEQ ID NO: 23234 - protein, 10 aa, synthetic construct
AAETGPDKII

SEQ ID NO: 23235 - protein, 11 aa, synthetic construct
SSRGLYTEKLI

SEQ ID NO: 23236 - protein, 10 aa, synthetic construct
AAERGPDQLF

SEQ ID NO: 23237 - protein, 14 aa, synthetic construct
QPLLGDTGTPINTS

SEQ ID NO: 23238 - protein, 10 aa, synthetic construct
AAERGPDKLC

SEQ ID NO: 23239 - protein, 14 aa, synthetic construct
LPLLGDTGTPINSS

SEQ ID NO: 23240 - protein, 10 aa, synthetic construct
AAERGPDKPL

SEQ ID NO: 23241 - protein, 14 aa, synthetic construct
QPLLGDTGTPIHSS

SEQ ID NO: 23242 - protein, 14 aa, synthetic construct
EAPTRGYGYTDKLI

SEQ ID NO: 23243 - protein, 10 aa, synthetic construct
AAERGPDKRS

SEQ ID NO: 23244 - protein, 10 aa, synthetic construct
AAERGPDKVF

SEQ ID NO: 23245 - protein, 13 aa, synthetic construct
EASVLRWWGIKLV

SEQ ID NO: 23246 - protein, 10 aa, synthetic construct
AAERGPDNLL

SEQ ID NO: 23247 - protein, 10 aa, synthetic construct
AAERGPDNLN

SEQ ID NO: 23248 - protein, 13 aa, synthetic construct
EASVLRWCGIKLI

SEQ ID NO: 23249 - protein, 10 aa, synthetic construct
AAERGPDQLL

SEQ ID NO: 23250 - protein, 14 aa, synthetic construct
EAPTGDTGTPINSS

SEQ ID NO: 23251 - protein, 10 aa, synthetic construct
AAERGPDQLT

SEQ ID NO: 23252 - protein, 16 aa, synthetic construct
AAASGLPSLGVHTDKL

SEQ ID NO: 23253 - protein, 15 aa, synthetic construct
AAARAFLCRGAPYTD

SEQ ID NO: 23254 - protein, 16 aa, synthetic construct
AAARAFLRRGAPTPIN

SEQ ID NO: 23255 - protein, 10 aa, synthetic construct
AAERGPEHLI

SEQ ID NO: 23256 - protein, 16 aa, synthetic construct
AAARAFLRRGPPTPIN

SEQ ID NO: 23257 - protein, 10 aa, synthetic construct
AAERGPEKLV

SEQ ID NO: 23258 - protein, 10 aa, synthetic construct
AAERGPEKRL

SEQ ID NO: 23259 - protein, 10 aa, synthetic construct
AAERGPVILI

SEQ ID NO: 23260 - protein, 10 aa, synthetic construct
AAERGPEKVI

SEQ ID NO: 23261 - protein, 15 aa, synthetic construct
EASMCLLGDGPDKLI

SEQ ID NO: 23262 - protein, 11 aa, synthetic construct
PAVLGDTVKLI

SEQ ID NO: 23263 - protein, 13 aa, synthetic construct
EASVLRWWGMKLI

SEQ ID NO: 23264 - protein, 14 aa, synthetic construct
QPLLGDTGTPITSS

SEQ ID NO: 23265 - protein, 10 aa, synthetic construct
AAERVPDKII

SEQ ID NO: 23266 - protein, 10 aa, synthetic construct
AAERGPDKIF

SEQ ID NO: 23267 - protein, 10 aa, synthetic construct
AAERGHDKII

SEQ ID NO: 23268 - protein, 10 aa, synthetic construct
AAERGHDKLN

SEQ ID NO: 23269 - protein, 15 aa, synthetic construct
AAETAFLRRGAPSTD

SEQ ID NO: 23270 - protein, 15 aa, synthetic construct
AAATAFVRRGAPYTD

SEQ ID NO: 23271 - protein, 11 aa, synthetic construct
EAVLGDTFKLI

SEQ ID NO: 23272 - protein, 11 aa, synthetic construct
HPGGLYTDKLI

SEQ ID NO: 23273 - protein, 16 aa, synthetic construct
QQAAFLHWGSTPRNSS

SEQ ID NO: 23274 - protein, 11 aa, synthetic construct
AAALGDTGKLI

SEQ ID NO: 23275 - protein, 10 aa, synthetic construct
AAERGPAKHI

SEQ ID NO: 23276 - protein, 15 aa, synthetic construct
AAANACLRRGAPYTD

SEQ ID NO: 23277 - protein, 10 aa, synthetic construct
AAERGPAKLF

SEQ ID NO: 23278 - protein, 11 aa, synthetic construct
EAVLGDPVKLI

SEQ ID NO: 23279 - protein, 10 aa, synthetic construct
AAERGPAKLY

SEQ ID NO: 23280 - protein, 10 aa, synthetic construct
AAERGPAQLL

SEQ ID NO: 23281 - protein, 14 aa, synthetic construct
QPLQGDTGTPINSS

SEQ ID NO: 23282 - protein, 14 aa, synthetic construct
QPLMGDTGTPINSS

SEQ ID NO: 23283 - protein, 14 aa, synthetic construct
EAPTGGYGYTDILI

SEQ ID NO: 23284 - protein, 10 aa, synthetic construct
AAERGPDDLI

SEQ ID NO: 23285 - protein, 14 aa, synthetic construct
HPLLGDTGTPINSS

SEQ ID NO: 23286 - protein, 15 aa, synthetic construct
AAAQACLRRGAPYTD

SEQ ID NO: 23287 - protein, 14 aa, synthetic construct
EAPTGGYGYTDKLN

SEQ ID NO: 23288 - protein, 10 aa, synthetic construct
AAERWPDTLI

SEQ ID NO: 23289 - protein, 10 aa, synthetic construct
AAERGPDHRI

SEQ ID NO: 23290 - protein, 14 aa, synthetic construct
QPLLGDTGTPRNSS

SEQ ID NO: 23291 - protein, 15 aa, synthetic construct
AAAQAFLRRGAPDTD

SEQ ID NO: 23292 - protein, 15 aa, synthetic construct
AAAKAFLRRGGFNSS

SEQ ID NO: 23293 - protein, 10 aa, synthetic construct
AAELGPDKLI

SEQ ID NO: 23294 - protein, 16 aa, synthetic construct
EASGLPSLGVHTDQLI

SEQ ID NO: 23295 - protein, 15 aa, synthetic construct
AAAKAFERRGAPYTD

SEQ ID NO: 23296 - protein, 16 aa, synthetic construct
AAAKAFLRRGAPTPRN

SEQ ID NO: 23297 - protein, 15 aa, synthetic construct
AAAKACLRRGAPNTD

SEQ ID NO: 23298 - protein, 15 aa, synthetic construct
EAAKAFLRRGDPYTD

SEQ ID NO: 23299 - protein, 11 aa, synthetic construct
ESRGLYTDKLN

SEQ ID NO: 23300 - protein, 15 aa, synthetic construct
EAAQAFLRRGAPYTD

SEQ ID NO: 23301 - protein, 16 aa, synthetic construct
AAAKACLRRGPPTPIN

SEQ ID NO: 23302 - protein, 11 aa, synthetic construct
ESRGLYTDKHI

SEQ ID NO: 23303 - protein, 15 aa, synthetic construct
EAAKAFLRRGIRVHR

SEQ ID NO: 23304 - protein, 14 aa, synthetic construct
AAAKAFLRGGAPYT

SEQ ID NO: 23305 - protein, 15 aa, synthetic construct
AAAKAFLRRGAPSSD

SEQ ID NO: 23306 - protein, 15 aa, synthetic construct
AAAKACVRRGAPYTD

SEQ ID NO: 23307 - protein, 15 aa, synthetic construct
TAAKAFLRRGAPSTD

SEQ ID NO: 23308 - protein, 5 aa, synthetic construct
AAEGG

SEQ ID NO: 23309 - protein, 10 aa, synthetic construct
AAEIGPDKLN

SEQ ID NO: 23310 - protein, 16 aa, synthetic construct
AAAKAFLRRGAPPPIN

SEQ ID NO: 23311 - protein, 11 aa, synthetic construct
ESRGLSTDKLI

SEQ ID NO: 23312 - protein, 14 aa, synthetic construct
AAAKAFLRRGAPHT

SEQ ID NO: 23313 - protein, 10 aa, synthetic construct
TTERGPDKLI

SEQ ID NO: 23314 - protein, 15 aa, synthetic construct
AAAKAFLRRGAHYTD

SEQ ID NO: 23315 - protein, 15 aa, synthetic construct
AAAKAFLRRGAAYTD

SEQ ID NO: 23316 - protein, 15 aa, synthetic construct
AAAKAFLRMGAPYTD

SEQ ID NO: 23317 - protein, 10 aa, synthetic construct
AAEIGHDKLI

SEQ ID NO: 23318 - protein, 11 aa, synthetic construct
TAVLGDTVKLS

SEQ ID NO: 23319 - protein, 15 aa, synthetic construct
EAAKAVLRRGAPYTD

SEQ ID NO: 23320 - protein, 14 aa, synthetic construct
AAAKACLRRGAPDT

SEQ ID NO: 23321 - protein, 15 aa, synthetic construct
AAAKAFLRGGAPSTD

SEQ ID NO: 23322 - protein, 10 aa, synthetic construct
EAEKGPDKLI

SEQ ID NO: 23323 - protein, 15 aa, synthetic construct
EAAKAFLRRGAPNTD

SEQ ID NO: 23324 - protein, 11 aa, synthetic construct
VSRGLYTEKLI

SEQ ID NO: 23325 - protein, 16 aa, synthetic construct
AAAKAFLRRGAPYTDK

SEQ ID NO: 23326 - protein, 11 aa, synthetic construct
YPGGCTPINSS

SEQ ID NO: 23327 - protein, 16 aa, synthetic construct
AAAEAFLRRGPPTPIN

SEQ ID NO: 23328 - protein, 14 aa, synthetic construct
APPSGGYGYTDKLI

SEQ ID NO: 23329 - protein, 11 aa, synthetic construct
ACRGLYSDKLW

SEQ ID NO: 23330 - protein, 11 aa, synthetic construct
HPGGRTPINSS

SEQ ID NO: 23331 - protein, 11 aa, synthetic construct
ACRGLYTDSLI

SEQ ID NO: 23332 - protein, 14 aa, synthetic construct
ADAKAFLRSGAPNT

SEQ ID NO: 23333 - protein, 10 aa, synthetic construct
AGVGETEKLI

SEQ ID NO: 23334 - protein, 12 aa, synthetic construct
HPGGPPTPINSS

SEQ ID NO: 23335 - protein, 13 aa, synthetic construct
AGVGGAESRCVGG

SEQ ID NO: 23336 - protein, 15 aa, synthetic construct
ADAYETTAFENFQCY

SEQ ID NO: 23337 - protein, 10 aa, synthetic construct
ADEIGPLKLF

SEQ ID NO: 23338 - protein, 14 aa, synthetic construct
AGTSGGSGYTDKLI

SEQ ID NO: 23339 - protein, 10 aa, synthetic construct
ADERGPDKLI

SEQ ID NO: 23340 - protein, 13 aa, synthetic construct
AGSVLRWCGINLV

SEQ ID NO: 23341 - protein, 14 aa, synthetic construct
ESPTGGYAYTDKLN

SEQ ID NO: 23342 - protein, 11 aa, synthetic construct
AGVLGDTVKLI

SEQ ID NO: 23343 - protein, 11 aa, synthetic construct
AGVLGDRGKLI

SEQ ID NO: 23344 - protein, 11 aa, synthetic construct
AAVRGDTVKLN

SEQ ID NO: 23345 - protein, 11 aa, synthetic construct
ALRGLYTDKLI

SEQ ID NO: 23346 - protein, 11 aa, synthetic construct
HQGGCTPINSS

SEQ ID NO: 23347 - protein, 6 aa, synthetic construct
AAVVGV

SEQ ID NO: 23348 - protein, 6 aa, synthetic construct
AGVVGV

SEQ ID NO: 23349 - protein, 11 aa, synthetic construct
AAVVGVTGMLI

SEQ ID NO: 23350 - skipped

SEQ ID NO: 23351 - protein, 11 aa, synthetic construct
AAVVGVTVKLI

SEQ ID NO: 23352 - protein, 11 aa, synthetic construct
AGVVGETGIVI

SEQ ID NO: 23353 - protein, 12 aa, synthetic construct
EQSSNRGGGLKS

SEQ ID NO: 23354 - protein, 11 aa, synthetic construct
AAVRGDTVKLT

SEQ ID NO: 23355 - protein, 11 aa, synthetic construct
AGVMGDTVKRI

SEQ ID NO: 23356 - protein, 9 aa, synthetic construct
ACRGLDSDK

SEQ ID NO: 23357 - protein, 11 aa, synthetic construct
ACRGLGWGGGF

SEQ ID NO: 23358 - protein, 11 aa, synthetic construct
ACRGLYAEQLI

SEQ ID NO: 23359 - protein, 11 aa, synthetic construct
PAVLGDTDKLI

SEQ ID NO: 23360 - protein, 14 aa, synthetic construct
ESPTGGYGYTDKLI

SEQ ID NO: 23361 - protein, 10 aa, synthetic construct
ADERGPVKLI

SEQ ID NO: 23362 - protein, 11 aa, synthetic construct
AAVVGLTGELI

SEQ ID NO: 23363 - protein, 4 aa, synthetic construct
AGGR

SEQ ID NO: 23364 - protein, 10 aa, synthetic construct
AGERGPDTLF

SEQ ID NO: 23365 - protein, 11 aa, synthetic construct
HPGGCTPLNAS

SEQ ID NO: 23366 - protein, 11 aa, synthetic construct
AAVRGDTGQLI

SEQ ID NO: 23367 - protein, 14 aa, synthetic construct
ADPTGGYGYTDQHI

SEQ ID NO: 23368 - protein, 14 aa, synthetic construct
ADPTGGYGYTDQLI

SEQ ID NO: 23369 - protein, 14 aa, synthetic construct
ADPTGGYGYTGQLI

SEQ ID NO: 23370 - protein, 11 aa, synthetic construct
HPGGCTPITSS

SEQ ID NO: 23371 - protein, 13 aa, synthetic construct
ADPTGGYGYTHKL

SEQ ID NO: 23372 - protein, 15 aa, synthetic construct
AGATASILRGAPTTD

SEQ ID NO: 23373 - protein, 15 aa, synthetic construct
AGAQAVVRRGGADTD

SEQ ID NO: 23374 - protein, 14 aa, synthetic construct
ADPTVAYGYTDKLI

SEQ ID NO: 23375 - protein, 14 aa, synthetic construct
ADPTVGYGYTDKLI

SEQ ID NO: 23376 - protein, 14 aa, synthetic construct
ADPTVGYGYTDNLI

SEQ ID NO: 23377 - protein, 14 aa, synthetic construct
PPPSGRYGYTDKII

SEQ ID NO: 23378 - protein, 10 aa, synthetic construct
ADQRGPDKQI

SEQ ID NO: 23379 - protein, 4 aa, synthetic construct
AGGG

SEQ ID NO: 23380 - protein, 14 aa, synthetic construct
ADPTGGYGYTDKLN

SEQ ID NO: 23381 - protein, 14 aa, synthetic construct
ADHNGGYGYTDKLI

SEQ ID NO: 23382 - protein, 14 aa, synthetic construct
AGPSGGYGYTDKLI

SEQ ID NO: 23383 - protein, 13 aa, synthetic construct
AGSDLRWWGMKLI

SEQ ID NO: 23384 - protein, 14 aa, synthetic construct
ADHTGGYGYSDKLI

SEQ ID NO: 23385 - protein, 14 aa, synthetic construct
ADHTWGYGYTAKLF

SEQ ID NO: 23386 - protein, 11 aa, synthetic construct
PHLLGGPPTPI

SEQ ID NO: 23387 - protein, 8 aa, synthetic construct
ADIGSSND

SEQ ID NO: 23388 - protein, 14 aa, synthetic construct
ESPTRGYGYTDKLI

SEQ ID NO: 23389 - protein, 15 aa, synthetic construct
ADLKSTHLNYSHPSE

SEQ ID NO: 23390 - protein, 11 aa, synthetic construct
AAVRGDTVILI

SEQ ID NO: 23391 - protein, 14 aa, synthetic construct
ADPNGGSGYTDKLI

SEQ ID NO: 23392 - protein, 14 aa, synthetic construct
ADPPGGYGYTDKLI

SEQ ID NO: 23393 - protein, 13 aa, synthetic construct
AGRVLRWWGSKLM

SEQ ID NO: 23394 - protein, 11 aa, synthetic construct
AAVRGDTVHLI

SEQ ID NO: 23395 - protein, 14 aa, synthetic construct
AGRSGGYGYTDKLI

SEQ ID NO: 23396 - protein, 14 aa, synthetic construct
ADPRGGYGYTAKLS

SEQ ID NO: 23397 - protein, 15 aa, synthetic construct
AGRELRWWGSQHSVG

SEQ ID NO: 23398 - protein, 11 aa, synthetic construct
AAVVGLTLKHF

SEQ ID NO: 23399 - protein, 11 aa, synthetic construct
HQYWGIRLNSS

SEQ ID NO: 23400 - protein, 11 aa, synthetic construct
AAVVGHTLKLI

SEQ ID NO: 23401 - protein, 10 aa, synthetic construct
APERGPGKLI

SEQ ID NO: 23402 - protein, 11 aa, synthetic construct
AAVRGQTGNLS

SEQ ID NO: 23403 - protein, 11 aa, synthetic construct
AAVRGVTVSLM

SEQ ID NO: 23404 - protein, 11 aa, synthetic construct
AAVRRDTVKLI

SEQ ID NO: 23405 - protein, 15 aa, synthetic construct
PAAKAFLRRGIRVHR

SEQ ID NO: 23406 - protein, 10 aa, synthetic construct
AAVSGPANLI

SEQ ID NO: 23407 - protein, 16 aa, synthetic construct
PASRLPTLGVHTEKLI

SEQ ID NO: 23408 - protein, 15 aa, synthetic construct
PAAKAFLRRGAPYTD

SEQ ID NO: 23409 - protein, 10 aa, synthetic construct
AAVRGEPGTH

SEQ ID NO: 23410 - protein, 11 aa, synthetic construct
AAVVGDPGQLI

SEQ ID NO: 23411 - protein, 15 aa, synthetic construct
ESAKAFIRRGAPYTD

SEQ ID NO: 23412 - protein, 11 aa, synthetic construct
AAVVGDPVHLF

SEQ ID NO: 23413 - protein, 11 aa, synthetic construct
AAVVGDPVKLI

SEQ ID NO: 23414 - protein, 10 aa, synthetic construct
APERGPDKLN

SEQ ID NO: 23415 - protein, 11 aa, synthetic construct
APPTGGDGDTD

SEQ ID NO: 23416 - protein, 10 aa, synthetic construct
AAVRGPNKLI

SEQ ID NO: 23417 - protein, 10 aa, synthetic construct
APERGPVQLI

SEQ ID NO: 23418 - protein, 11 aa, synthetic construct
AAVVGDPVNLF

SEQ ID NO: 23419 - protein, 15 aa, synthetic construct
PAPKAYLRRVAPNTD

SEQ ID NO: 23420 - protein, 13 aa, synthetic construct
APNVKRWWGIKLN

SEQ ID NO: 23421 - protein, 11 aa, synthetic construct
AAVRGESVIHI

SEQ ID NO: 23422 - protein, 11 aa, synthetic construct
AAVRGETGQLI

SEQ ID NO: 23423 - protein, 11 aa, synthetic construct
AAVRGIRLNSS

SEQ ID NO: 23424 - protein, 10 aa, synthetic construct
AAVRGPAHRI

SEQ ID NO: 23425 - protein, 13 aa, synthetic construct
PAPTGGYGYTDQL

SEQ ID NO: 23426 - protein, 10 aa, synthetic construct
AAVRGPDNLI

SEQ ID NO: 23427 - protein, 10 aa, synthetic construct
PAERGPDKLI

SEQ ID NO: 23428 - protein, 9 aa, synthetic construct
AAVRGPEDR

SEQ ID NO: 23429 - protein, 15 aa, synthetic construct
ESAKAFLRRGAPYTD

SEQ ID NO: 23430 - protein, 10 aa, synthetic construct
PAETVHDKLI

SEQ ID NO: 23431 - protein, 15 aa, synthetic construct
ESAKAYLRRGAPNTD

SEQ ID NO: 23432 - protein, 10 aa, synthetic construct
APERRPDKLI

SEQ ID NO: 23433 - protein, 10 aa, synthetic construct
AAVRGPETLI

SEQ ID NO: 23434 - protein, 16 aa, synthetic construct
LRRRPSYVGGPPPPIN

SEQ ID NO: 23435 - protein, 11 aa, synthetic construct
ESGGLYTEKRK

SEQ ID NO: 23436 - protein, 11 aa, synthetic construct
AAVRGDTVKPI

SEQ ID NO: 23437 - protein, 11 aa, synthetic construct
AAVVGERGDGI

SEQ ID NO: 23438 - protein, 11 aa, synthetic construct
AAVVGDTVKPI

SEQ ID NO: 23439 - protein, 11 aa, synthetic construct
AAVRGDTVNLF

SEQ ID NO: 23440 - protein, 13 aa, synthetic construct
IPHGGTPFTEQKH

SEQ ID NO: 23441 - protein, 14 aa, synthetic construct
APAKAFLRRGAPYT

SEQ ID NO: 23442 - protein, 15 aa, synthetic construct
APAKAFLRRGAPSTD

SEQ ID NO: 23443 - protein, 11 aa, synthetic construct
AAVVGDTVRLI

SEQ ID NO: 23444 - protein, 11 aa, synthetic construct
AAVVGERGKLI

SEQ ID NO: 23445 - protein, 14 aa, synthetic construct
ESPNGGYGYTDKLI

SEQ ID NO: 23446 - protein, 8 aa, synthetic construct
HTSELASP

SEQ ID NO: 23447 - protein, 15 aa, synthetic construct
APAKAFLRRGAPNTD

SEQ ID NO: 23448 - protein, 12 aa, synthetic construct
AAVVGGVRRSTL

SEQ ID NO: 23449 - protein, 11 aa, synthetic construct
AAVRGDTVKVI

SEQ ID NO: 23450 - protein, 11 aa, synthetic construct
AAVVGHTFKLN

SEQ ID NO: 23451 - protein, 14 aa, synthetic construct
PAPTAVYAYTDKLI

SEQ ID NO: 23452 - protein, 11 aa, synthetic construct
AAVVGDTVKLY

SEQ ID NO: 23453 - protein, 10 aa, synthetic construct
IQGGVHRETH

SEQ ID NO: 23454 - protein, 15 aa, synthetic construct
APEKAFLRRGAPSTD

SEQ ID NO: 23455 - protein, 11 aa, synthetic construct
AAVVGDTGKLN

SEQ ID NO: 23456 - protein, 14 aa, synthetic construct
LPLLGDTGTPRNTS

SEQ ID NO: 23457 - protein, 11 aa, synthetic construct
AAVVGDTFKLM

SEQ ID NO: 23458 - protein, 11 aa, synthetic construct
AAVVGDTGIVS

SEQ ID NO: 23459 - protein, 15 aa, synthetic construct
APAKSFQRRSAPKTD

SEQ ID NO: 23460 - protein, 14 aa, synthetic construct
LPLLGDTGTPLNSS

SEQ ID NO: 23461 - protein, 11 aa, synthetic construct
ESIRGYTVKLI

SEQ ID NO: 23462 - protein, 13 aa, synthetic construct
PASVLRWWGIKLI

SEQ ID NO: 23463 - protein, 15 aa, synthetic construct
APAKAFLRTGAPSPD

SEQ ID NO: 23464 - protein, 11 aa, synthetic construct
KQYWGIRLNSS

SEQ ID NO: 23465 - protein, 11 aa, synthetic construct
AAVVGDTGLLI

SEQ ID NO: 23466 - protein, 14 aa, synthetic construct
KPLRGDTGTPINSS

SEQ ID NO: 23467 - skipped

SEQ ID NO: 23468 - protein, 15 aa, synthetic construct
APAKAFQRRGAPSTD

SEQ ID NO: 23469 - protein, 11 aa, synthetic construct
AAVVGDTVKLF

SEQ ID NO: 23470 - protein, 11 aa, synthetic construct
AAVVGDTVKVI

SEQ ID NO: 23471 - protein, 11 aa, synthetic construct
ESRGMYTDKLT

SEQ ID NO: 23472 - protein, 10 aa, synthetic construct
HPGGCTPITH

SEQ ID NO: 23473 - protein, 11 aa, synthetic construct
ADVLGDPVKVI

SEQ ID NO: 23474 - protein, 10 aa, synthetic construct
AEGRGPDKLI

SEQ ID NO: 23475 - protein, 7 aa, synthetic construct
AEICILT

SEQ ID NO: 23476 - protein, 11 aa, synthetic construct
AEVLGATVKLF

SEQ ID NO: 23477 - protein, 13 aa, synthetic construct
AEIVLRFWGIKLI

SEQ ID NO: 23478 - protein, 8 aa, synthetic construct
AEKRVPDK

SEQ ID NO: 23479 - protein, 13 aa, synthetic construct
EVRVIRWWGIKLI

SEQ ID NO: 23480 - protein, 11 aa, synthetic construct
AELGGAHVRPP

SEQ ID NO: 23481 - protein, 11 aa, synthetic construct
AEVIWDTVKLI

SEQ ID NO: 23482 - protein, 11 aa, synthetic construct
EVPTGGYGYTD

SEQ ID NO: 23483 - protein, 10 aa, synthetic construct
EVLGHPEKII

SEQ ID NO: 23484 - protein, 11 aa, synthetic construct
AELLCDTVKLI

SEQ ID NO: 23485 - protein, 13 aa, synthetic construct
AETVLLWWGIKLN

SEQ ID NO: 23486 - protein, 11 aa, synthetic construct
AELLRDTVKIK

SEQ ID NO: 23487 - protein, 13 aa, synthetic construct
AEPKAVIRRGGTY

SEQ ID NO: 23488 - protein, 14 aa, synthetic construct
AERNSPIGNTDKVF

SEQ ID NO: 23489 - protein, 11 aa, synthetic construct
ESRGLYTDQLI

SEQ ID NO: 23490 - protein, 16 aa, synthetic construct
AETGLPSLGVHTDKLI

SEQ ID NO: 23491 - protein, 10 aa, synthetic construct
AEGRGPDKIN

SEQ ID NO: 23492 - protein, 11 aa, synthetic construct
AEVLGDKVKLI

SEQ ID NO: 23493 - protein, 11 aa, synthetic construct
EYRGLYTDKHI

SEQ ID NO: 23494 - protein, 8 aa, synthetic construct
GAAKALLR

SEQ ID NO: 23495 - protein, 10 aa, synthetic construct
AEESGPHKDI

SEQ ID NO: 23496 - protein, 10 aa, synthetic construct
GAERGPDKLF

SEQ ID NO: 23497 - protein, 10 aa, synthetic construct
GAEGGPDTLY

SEQ ID NO: 23498 - protein, 9 aa, synthetic construct
GAARGGVGG

SEQ ID NO: 23499 - protein, 15 aa, synthetic construct
GAARGFLRRGAPDTD

SEQ ID NO: 23500 - protein, 15 aa, synthetic construct
GAARAYVRRGPRTPI

SEQ ID NO: 23501 - protein, 15 aa, synthetic construct
GAAQGFLRRGAPYTD

SEQ ID NO: 23502 - protein, 15 aa, synthetic construct
GAAKAFLGWGAPYTD

SEQ ID NO: 23503 - protein, 11 aa, synthetic construct
AEVLGDTGKLI

SEQ ID NO: 23504 - protein, 10 aa, synthetic construct
AEETGPDKLI

SEQ ID NO: 23505 - protein, 14 aa, synthetic construct
GAAEAFLRRGAPYT

SEQ ID NO: 23506 - protein, 6 aa, synthetic construct
GAAAGG

SEQ ID NO: 23507 - protein, 11 aa, synthetic construct
EYRGLYTHKLI

SEQ ID NO: 23508 - protein, 10 aa, synthetic construct
AEETGPDKLN

SEQ ID NO: 23509 - protein, 11 aa, synthetic construct
AEVLGDTVILI

SEQ ID NO: 23510 - protein, 10 aa, synthetic construct
AEETGPVKLM

SEQ ID NO: 23511 - protein, 13 aa, synthetic construct
AESVLRWWGSQLI

SEQ ID NO: 23512 - protein, 6 aa, synthetic construct
AERNST

SEQ ID NO: 23513 - protein, 10 aa, synthetic construct
EVLGDTDKLI

SEQ ID NO: 23514 - protein, 11 aa, synthetic construct
ESRGWYTDKLI

SEQ ID NO: 23515 - protein, 16 aa, synthetic construct
AESGLPSRGGHTDQLI

SEQ ID NO: 23516 - protein, 13 aa, synthetic construct
AESLLRWWGIKLI

SEQ ID NO: 23517 - protein, 13 aa, synthetic construct
ESSVLRWCGIKLI

SEQ ID NO: 23518 - protein, 10 aa, synthetic construct
AESNNNDKLI

SEQ ID NO: 23519 - protein, 11 aa, synthetic construct
ESSGLYTEKLI

SEQ ID NO: 23520 - protein, 15 aa, synthetic construct
AESSLPTLGVNTDKL

SEQ ID NO: 23521 - protein, 11 aa, synthetic construct
ESSGLYTDKLI

SEQ ID NO: 23522 - protein, 11 aa, synthetic construct
ESRGWYTDHLM

SEQ ID NO: 23523 - protein, 16 aa, synthetic construct
AESGLPSRGDKGKPIN

SEQ ID NO: 23524 - protein, 11 aa, synthetic construct
ESRGSYTDKLN

SEQ ID NO: 23525 - protein, 13 aa, synthetic construct
AESVLRGWGFKLI

SEQ ID NO: 23526 - protein, 13 aa, synthetic construct
AESVLRLWGIILI

SEQ ID NO: 23527 - protein, 13 aa, synthetic construct
AESVLRWCGIKLI

SEQ ID NO: 23528 - protein, 13 aa, synthetic construct
AESVLRWCGIKLL

SEQ ID NO: 23529 - protein, 13 aa, synthetic construct
AESVLRWRGIKLI

SEQ ID NO: 23530 - protein, 13 aa, synthetic construct
AESVLRWRGSKLI

SEQ ID NO: 23531 - protein, 9 aa, synthetic construct
ESTGKYTDK

SEQ ID NO: 23532 - protein, 11 aa, synthetic construct
ESRGMYTAKHI

SEQ ID NO: 23533 - protein, 13 aa, synthetic construct
AESFLRWWGIKLI

SEQ ID NO: 23534 - protein, 11 aa, synthetic construct
ESWGLYTDKLI

SEQ ID NO: 23535 - protein, 16 aa, synthetic construct
AESGLPSLGFHTDKLI

SEQ ID NO: 23536 - protein, 16 aa, synthetic construct
AESGLPSLGFHTDNLI

SEQ ID NO: 23537 - protein, 15 aa, synthetic construct
AESGLPSLGFNTDQL

SEQ ID NO: 23538 - protein, 16 aa, synthetic construct
AESVLRWWGPPTPINS

SEQ ID NO: 23539 - protein, 11 aa, synthetic construct
ESRGLYTDTLI

SEQ ID NO: 23540 - protein, 15 aa, synthetic construct
ETAKAFIRRGAPYTD

SEQ ID NO: 23541 - protein, 16 aa, synthetic construct
AESGLPSLGVHPDQLI

SEQ ID NO: 23542 - protein, 13 aa, synthetic construct
AESVLRWWGINLI

SEQ ID NO: 23543 - protein, 11 aa, synthetic construct
ESRGLYTHKRI

SEQ ID NO: 23544 - protein, 15 aa, synthetic construct
AESGLPSLGVHTDKL

SEQ ID NO: 23545 - protein, 11 aa, synthetic construct
ESWGLYTAKLI

SEQ ID NO: 23546 - protein, 11 aa, synthetic construct
ESVMGDTVKLI

SEQ ID NO: 23547 - protein, 11 aa, synthetic construct
ESVLRDRFKLI

SEQ ID NO: 23548 - protein, 11 aa, synthetic construct
ESVLGDTVKLI

SEQ ID NO: 23549 - protein, 13 aa, synthetic construct
AESVLRWWGIKLV

SEQ ID NO: 23550 - protein, 11 aa, synthetic construct
ESTGLYTDKLI

SEQ ID NO: 23551 - protein, 11 aa, synthetic construct
ESRGLYTDKGI

SEQ ID NO: 23552 - protein, 10 aa, synthetic construct
AEERWPDKLI

SEQ ID NO: 23553 - protein, 10 aa, synthetic construct
GAESGPDKRI

SEQ ID NO: 23554 - protein, 13 aa, synthetic construct
GRVLGDRGKLIVG

SEQ ID NO: 23555 - protein, 11 aa, synthetic construct
AEVQGDTVKLI

SEQ ID NO: 23556 - protein, 15 aa, synthetic construct
AEAKDVLRRGAPSTD

SEQ ID NO: 23557 - protein, 10 aa, synthetic construct
GSTGGYGETH

SEQ ID NO: 23558 - protein, 15 aa, synthetic construct
AEAKDYLLRGAPNTD

SEQ ID NO: 23559 - protein, 11 aa, synthetic construct
GSRGGCAEGGV

SEQ ID NO: 23560 - protein, 8 aa, synthetic construct
AEAKSFLR

SEQ ID NO: 23561 - protein, 11 aa, synthetic construct
ESRGLDTDKLF

SEQ ID NO: 23562 - protein, 15 aa, synthetic construct
AEAKSFLRRGAPYTD

SEQ ID NO: 23563 - protein, 15 aa, synthetic construct
AEAKAYLRRGAPYTD

SEQ ID NO: 23564 - protein, 11 aa, synthetic construct
GGPGGGAGGGR

SEQ ID NO: 23565 - protein, 11 aa, synthetic construct
AEAVVRSGIIN

SEQ ID NO: 23566 - protein, 6 aa, synthetic construct
GGLNSS

SEQ ID NO: 23567 - protein, 6 aa, synthetic construct
GGGGGR

SEQ ID NO: 23568 - protein, 14 aa, synthetic construct
AEEKANLRRGDPYT

SEQ ID NO: 23569 - protein, 10 aa, synthetic construct
GGECGREILI

SEQ ID NO: 23570 - protein, 15 aa, synthetic construct
AEEKAYLRRGAPSTD

SEQ ID NO: 23571 - protein, 5 aa, synthetic construct
HDCYQ

SEQ ID NO: 23572 - protein, 11 aa, synthetic construct
AEVSRDTVKLI

SEQ ID NO: 23573 - protein, 15 aa, synthetic construct
AEEKAYLRRVPPKTD

SEQ ID NO: 23574 - protein, 13 aa, synthetic construct
AGAKAFLRRGAPD

SEQ ID NO: 23575 - protein, 11 aa, synthetic construct
HPGGCTPISSS

SEQ ID NO: 23576 - protein, 14 aa, synthetic construct
AGAKAFVRRGAPYT

SEQ ID NO: 23577 - protein, 11 aa, synthetic construct
ESRAMYSDTLI

SEQ ID NO: 23578 - protein, 11 aa, synthetic construct
ESRARTRDNLT

SEQ ID NO: 23579 - protein, 16 aa, synthetic construct
AGAKAFLRRGAPTPIN

SEQ ID NO: 23580 - protein, 13 aa, synthetic construct
AESVLRWWGFKLI

SEQ ID NO: 23581 - protein, 10 aa, synthetic construct
HPGGCTPINS

SEQ ID NO: 23582 - protein, 11 aa, synthetic construct
ADVLGDTVKLK

SEQ ID NO: 23583 - protein, 15 aa, synthetic construct
AEAKAFLRRWAPYTD

SEQ ID NO: 23584 - protein, 11 aa, synthetic construct
ADVLGETVKLI

SEQ ID NO: 23585 - protein, 11 aa, synthetic construct
ESRGFYTDKLI

SEQ ID NO: 23586 - protein, 11 aa, synthetic construct
HPGGCPPIKSS

SEQ ID NO: 23587 - protein, 14 aa, synthetic construct
AEAKAFLRRGAPYT

SEQ ID NO: 23588 - protein, 11 aa, synthetic construct
HPGGCAPINSS

SEQ ID NO: 23589 - skipped

SEQ ID NO: 23590 - protein, 15 aa, synthetic construct
AEAKAFLRRRAPYTD

SEQ ID NO: 23591 - protein, 11 aa, synthetic construct
ESRGLHTDKLI

SEQ ID NO: 23592 - skipped

SEQ ID NO: 23593 - protein, 9 aa, synthetic construct
ESRGLYTDK

SEQ ID NO: 23594 - protein, 11 aa, synthetic construct
AEVLGDTVKLY

SEQ ID NO: 23595 - protein, 13 aa, synthetic construct
GASGLRGWGLKLI

SEQ ID NO: 23596 - protein, 14 aa, synthetic construct
GASGLPSLGVHTDK

SEQ ID NO: 23597 - protein, 14 aa, synthetic construct
GAPTGGYWYSAKLL

SEQ ID NO: 23598 - protein, 11 aa, synthetic construct
ESRGLYADKLI

SEQ ID NO: 23599 - protein, 11 aa, synthetic construct
AEVLGDTVKRI

SEQ ID NO: 23600 - protein, 11 aa, synthetic construct
ESRGLYTAKLN

SEQ ID NO: 23601 - protein, 14 aa, synthetic construct
GAPTGGYGYTDKLI

SEQ ID NO: 23602 - protein, 10 aa, synthetic construct
AEERGPHKHN

SEQ ID NO: 23603 - protein, 13 aa, synthetic construct
GASGLRGWGRELS

SEQ ID NO: 23604 - protein, 14 aa, synthetic construct
GAPPVGYCDADEVF

SEQ ID NO: 23605 - protein, 14 aa, synthetic construct
GAPPGGYGYTDKVI

SEQ ID NO: 23606 - protein, 5 aa, synthetic construct
GAGGG

SEQ ID NO: 23607 - protein, 11 aa, synthetic construct
ESRGLYTAKLS

SEQ ID NO: 23608 - protein, 14 aa, synthetic construct
GAETVGYGYTHNRI

SEQ ID NO: 23609 - protein, 11 aa, synthetic construct
AEVLGDTVKLK

SEQ ID NO: 23610 - protein, 10 aa, synthetic construct
AEERGRDKPI

SEQ ID NO: 23611 - protein, 10 aa, synthetic construct
AEERGPDKLN

SEQ ID NO: 23612 - protein, 11 aa, synthetic construct
AEVLGDTVKSI

SEQ ID NO: 23613 - protein, 10 aa, synthetic construct
AEEKGETVKL

SEQ ID NO: 23614 - protein, 11 aa, synthetic construct
ESRGLSTDKCI

SEQ ID NO: 23615 - protein, 11 aa, synthetic construct
AEELGDTVKLI

SEQ ID NO: 23616 - protein, 10 aa, synthetic construct
AEELGPSKLI

SEQ ID NO: 23617 - protein, 11 aa, synthetic construct
GAVRGARVKVI

SEQ ID NO: 23618 - protein, 11 aa, synthetic construct
AEEMWDTVKLI

SEQ ID NO: 23619 - protein, 11 aa, synthetic construct
GAVLGDTGKLN

SEQ ID NO: 23620 - protein, 11 aa, synthetic construct
GAVLGDTGKLI

SEQ ID NO: 23621 - protein, 11 aa, synthetic construct
AEVLWDTVKLI

SEQ ID NO: 23622 - protein, 11 aa, synthetic construct
GAVLGDRVKLF

SEQ ID NO: 23623 - protein, 11 aa, synthetic construct
AEVLGDTVQLI

SEQ ID NO: 23624 - protein, 11 aa, synthetic construct
AEVLGDTVTLI

SEQ ID NO: 23625 - protein, 11 aa, synthetic construct
GAVLGDRGIVI

SEQ ID NO: 23626 - protein, 10 aa, synthetic construct
AEERGPDKIF

SEQ ID NO: 23627 - protein, 7 aa, synthetic construct
GASVLWW

SEQ ID NO: 23628 - protein, 13 aa, synthetic construct
GASVLRWWGRKLS

SEQ ID NO: 23629 - protein, 13 aa, synthetic construct
GASVLRWWGCKLI

SEQ ID NO: 23630 - protein, 13 aa, synthetic construct
GASVLRWGGGKLS

SEQ ID NO: 23631 - protein, 11 aa, synthetic construct
ADVLGDPVNLI

SEQ ID NO: 23632 - protein, 15 aa, synthetic construct
EAAKAFLRRGAPCTD

SEQ ID NO: 23633 - protein, 11 aa, synthetic construct
PPVLGDTVKLI

SEQ ID NO: 23634 - protein, 13 aa, synthetic construct
SASVLRWWGIKII

SEQ ID NO: 23635 - protein, 13 aa, synthetic construct
SASVLRWRGSKLI

SEQ ID NO: 23636 - protein, 16 aa, synthetic construct
SASGLPSHWYHTEKLI

SEQ ID NO: 23637 - protein, 11 aa, synthetic construct
AAVLGDTVKSS

SEQ ID NO: 23638 - protein, 13 aa, synthetic construct
SAQSGGYGYTDQL

SEQ ID NO: 23639 - protein, 14 aa, synthetic construct
SAPTRGYGYTDKLI

SEQ ID NO: 23640 - protein, 11 aa, synthetic construct
AAVLGDTVLLI

SEQ ID NO: 23641 - protein, 11 aa, synthetic construct
AAVLGDTVLVI

SEQ ID NO: 23642 - protein, 14 aa, synthetic construct
SAPTGGYGYTYKLI

SEQ ID NO: 23643 - protein, 11 aa, synthetic construct
AAVLGDTVNLF

SEQ ID NO: 23644 - protein, 14 aa, synthetic construct
SAPTGGYGYNDKLI

SEQ ID NO: 23645 - protein, 11 aa, synthetic construct
AAVLGDTVNLL

SEQ ID NO: 23646 - protein, 11 aa, synthetic construct
AAVLGDTVNLS

SEQ ID NO: 23647 - protein, 11 aa, synthetic construct
AAVLGDTVNRI

SEQ ID NO: 23648 - protein, 14 aa, synthetic construct
SAPTGGYGSTDKLI

SEQ ID NO: 23649 - protein, 14 aa, synthetic construct
SAPTGGSGDPDQLI

SEQ ID NO: 23650 - protein, 14 aa, synthetic construct
SAPPGGYGYTDNII

SEQ ID NO: 23651 - protein, 11 aa, synthetic construct
AAVLGDTVNVF

SEQ ID NO: 23652 - protein, 11 aa, synthetic construct
AAVLGDTVNVI

SEQ ID NO: 23653 - protein, 11 aa, synthetic construct
AAVLGDTVQDI

SEQ ID NO: 23654 - protein, 11 aa, synthetic construct
AAVLGDTVKRF

SEQ ID NO: 23655 - protein, 13 aa, synthetic construct
SASVLRWWGIKLF

SEQ ID NO: 23656 - protein, 13 aa, synthetic construct
SAIVLRWWGIKII

SEQ ID NO: 23657 - protein, 11 aa, synthetic construct
AAVLGDTVKLY

SEQ ID NO: 23658 - protein, 11 aa, synthetic construct
AAVLGDTVILN

SEQ ID NO: 23659 - protein, 11 aa, synthetic construct
AAVLGDTVILS

SEQ ID NO: 23660 - protein, 11 aa, synthetic construct
AAVLGDTVIRF

SEQ ID NO: 23661 - protein, 11 aa, synthetic construct
AAVLGDTVIRN

SEQ ID NO: 23662 - protein, 11 aa, synthetic construct
AAVLGDTVIVI

SEQ ID NO: 23663 - protein, 11 aa, synthetic construct
AAVLGDTVKDI

SEQ ID NO: 23664 - protein, 14 aa, synthetic construct
SSPTGGYGYTEKLI

SEQ ID NO: 23665 - protein, 5 aa, synthetic construct
SSARA

SEQ ID NO: 23666 - protein, 9 aa, synthetic construct
SRKRARSTH

SEQ ID NO: 23667 - protein, 11 aa, synthetic construct
AAVLGDTVKHN

SEQ ID NO: 23668 - protein, 11 aa, synthetic construct
AAVLGDTVKIF

SEQ ID NO: 23669 - protein, 13 aa, synthetic construct
SESVLRWWGIKHI

SEQ ID NO: 23670 - protein, 13 aa, synthetic construct
SDHTRGYGYTDKL

SEQ ID NO: 23671 - protein, 11 aa, synthetic construct
SAVMGDTVKLI

SEQ ID NO: 23672 - protein, 11 aa, synthetic construct
SAVLGYTVKLI

SEQ ID NO: 23673 - protein, 11 aa, synthetic construct
SAVLGDTVQLI

SEQ ID NO: 23674 - protein, 11 aa, synthetic construct
AAVLGDTVKLL

SEQ ID NO: 23675 - protein, 11 aa, synthetic construct
SAVLGDTVNLI

SEQ ID NO: 23676 - protein, 13 aa, synthetic construct
SASVLRWWGSKLI

SEQ ID NO: 23677 - protein, 11 aa, synthetic construct
AAVLGDTVQII

SEQ ID NO: 23678 - protein, 9 aa, synthetic construct
SAERGPVTL

SEQ ID NO: 23679 - protein, 16 aa, synthetic construct
QRRRPSYVGGCTPINS

SEQ ID NO: 23680 - protein, 11 aa, synthetic construct
AAVLGDTVVLI

SEQ ID NO: 23681 - protein, 11 aa, synthetic construct
AAVLGEHVNLF

SEQ ID NO: 23682 - protein, 11 aa, synthetic construct
AAVLGEPFVVI

SEQ ID NO: 23683 - protein, 10 aa, synthetic construct
QYWGTPLNSS

SEQ ID NO: 23684 - protein, 10 aa, synthetic construct
QYWGTPINSS

SEQ ID NO: 23685 - protein, 11 aa, synthetic construct
AAVLGEPVKRI

SEQ ID NO: 23686 - protein, 11 aa, synthetic construct
AAVLGERGILI

SEQ ID NO: 23687 - protein, 11 aa, synthetic construct
AAVLGERVIVI

SEQ ID NO: 23688 - protein, 15 aa, synthetic construct
AAVLGETGEGIVGLG

SEQ ID NO: 23689 - protein, 16 aa, synthetic construct
QRRRRSYVGGPPTPIN

SEQ ID NO: 23690 - protein, 11 aa, synthetic construct
AAVLGETGKLN

SEQ ID NO: 23691 - protein, 14 aa, synthetic construct
QRRRPSYVGGPPPP

SEQ ID NO: 23692 - protein, 16 aa, synthetic construct
QRRRPSYVGGPPAPIN

SEQ ID NO: 23693 - protein, 11 aa, synthetic construct
AAVLGETGKRN

SEQ ID NO: 23694 - protein, 11 aa, synthetic construct
AAVLGETGKRS

SEQ ID NO: 23695 - protein, 16 aa, synthetic construct
QRRRPSYVGGIRLYSS

SEQ ID NO: 23696 - protein, 11 aa, synthetic construct
AAVLGETGKSI

SEQ ID NO: 23697 - protein, 11 aa, synthetic construct
AAVLGETGQLM

SEQ ID NO: 23698 - protein, 11 aa, synthetic construct
AAVLGETGQRI

SEQ ID NO: 23699 - protein, 15 aa, synthetic construct
QRRRPSYVGGGLNSS

SEQ ID NO: 23700 - protein, 11 aa, synthetic construct
AAVLGDTVYLI

SEQ ID NO: 23701 - skipped

SEQ ID NO: 23702 - protein, 10 aa, synthetic construct
SAERGPEKPI

SEQ ID NO: 23703 - protein, 11 aa, synthetic construct
AAVLGDTVSLI

SEQ ID NO: 23704 - protein, 10 aa, synthetic construct
SAERGPDKII

SEQ ID NO: 23705 - protein, 11 aa, synthetic construct
AAVLGDTVQLK

SEQ ID NO: 23706 - protein, 11 aa, synthetic construct
AAVLGDTVQLN

SEQ ID NO: 23707 - protein, 10 aa, synthetic construct
SAERGHDKLI

SEQ ID NO: 23708 - protein, 11 aa, synthetic construct
AAVLGDTVQNI

SEQ ID NO: 23709 - protein, 10 aa, synthetic construct
SAERCPDKLI

SEQ ID NO: 23710 - protein, 8 aa, synthetic construct
SAENSSQL

SEQ ID NO: 23711 - protein, 15 aa, synthetic construct
SAARAFLRRGAPYTD

SEQ ID NO: 23712 - protein, 15 aa, synthetic construct
SAAQAFLRRGAPYTD

SEQ ID NO: 23713 - protein, 8 aa, synthetic construct
SAAKSFLR

SEQ ID NO: 23714 - protein, 14 aa, synthetic construct
SAAKAFLRRGAPYT

SEQ ID NO: 23715 - protein, 15 aa, synthetic construct
SAAKAFLRRGAPSTD

SEQ ID NO: 23716 - protein, 14 aa, synthetic construct
SAAKAFIRRRAPYT

SEQ ID NO: 23717 - protein, 11 aa, synthetic construct
AAVLGDTVQRI

SEQ ID NO: 23718 - protein, 16 aa, synthetic construct
RRRRPSYVGGPPTPIN

SEQ ID NO: 23719 - protein, 11 aa, synthetic construct
AAVLGDTVQVI

SEQ ID NO: 23720 - protein, 11 aa, synthetic construct
RPGGCTPINSS

SEQ ID NO: 23721 - protein, 13 aa, synthetic construct
RATDIRCWGSKLI

SEQ ID NO: 23722 - protein, 11 aa, synthetic construct
AAVLGDTVRLN

SEQ ID NO: 23723 - protein, 11 aa, synthetic construct
SSRALCSDKLI

SEQ ID NO: 23724 - protein, 11 aa, synthetic construct
SSRGLSTDKHI

SEQ ID NO: 23725 - protein, 11 aa, synthetic construct
SSRGLYNDKLV

SEQ ID NO: 23726 - protein, 14 aa, synthetic construct
VAPTGGYGYTDTLI

SEQ ID NO: 23727 - protein, 11 aa, synthetic construct
AAVLGDTDKLN

SEQ ID NO: 23728 - protein, 13 aa, synthetic construct
VAIVLRWWGIKLI

SEQ ID NO: 23729 - protein, 11 aa, synthetic construct
AAVLGDTFKHI

SEQ ID NO: 23730 - protein, 10 aa, synthetic construct
VAERGPDQII

SEQ ID NO: 23731 - protein, 11 aa, synthetic construct
AAVLGDTFKII

SEQ ID NO: 23732 - protein, 10 aa, synthetic construct
VAERGPDKLV

SEQ ID NO: 23733 - protein, 10 aa, synthetic construct
VAERGPDKLF

SEQ ID NO: 23734 - protein, 11 aa, synthetic construct
AAVLGDTFKLN

SEQ ID NO: 23735 - protein, 11 aa, synthetic construct
AAVLGDTFKLS

SEQ ID NO: 23736 - protein, 11 aa, synthetic construct
VAERGIRLNSS

SEQ ID NO: 23737 - protein, 11 aa, synthetic construct
AAVLGDTGHLI

SEQ ID NO: 23738 - protein, 11 aa, synthetic construct
AAVLGDTGIII

SEQ ID NO: 23739 - protein, 11 aa, synthetic construct
TSRGLYTDILF

SEQ ID NO: 23740 - protein, 11 aa, synthetic construct
AAVLGDTGIRI

SEQ ID NO: 23741 - protein, 11 aa, synthetic construct
AAVLGDTGKGI

SEQ ID NO: 23742 - protein, 11 aa, synthetic construct
AAVLGDTGKHS

SEQ ID NO: 23743 - protein, 11 aa, synthetic construct
TSRGLYAEKLI

SEQ ID NO: 23744 - protein, 11 aa, synthetic construct
TSRGLYADKLI

SEQ ID NO: 23745 - protein, 14 aa, synthetic construct
TQRFTTFQVTKHKL

SEQ ID NO: 23746 - protein, 14 aa, synthetic construct
VAPAGGYGYTDKLI

SEQ ID NO: 23747 - protein, 11 aa, synthetic construct
AAVLGDTCKLI

SEQ ID NO: 23748 - protein, 11 aa, synthetic construct
AAVLGDTVELF

SEQ ID NO: 23749 - protein, 11 aa, synthetic construct
AAVLGDTAQLI

SEQ ID NO: 23750 - protein, 11 aa, synthetic construct
VSWGLYTDNLI

SEQ ID NO: 23751 - protein, 11 aa, synthetic construct
VSRGLYTDKHI

SEQ ID NO: 23752 - protein, 11 aa, synthetic construct
AAVLGDRVNLI

SEQ ID NO: 23753 - protein, 11 aa, synthetic construct
VAVMGDTVKVI

SEQ ID NO: 23754 - protein, 11 aa, synthetic construct
VAVLGDTVQLI

SEQ ID NO: 23755 - protein, 13 aa, synthetic construct
VASVLRWWGSQLI

SEQ ID NO: 23756 - protein, 11 aa, synthetic construct
AAVLGDRVYLI

SEQ ID NO: 23757 - protein, 11 aa, synthetic construct
AAVLGDSVILI

SEQ ID NO: 23758 - protein, 11 aa, synthetic construct
AAVLGDSVKLF

SEQ ID NO: 23759 - protein, 13 aa, synthetic construct
VASVLRWWGSQLF

SEQ ID NO: 23760 - protein, 13 aa, synthetic construct
VASVLRWWGINLI

SEQ ID NO: 23761 - protein, 13 aa, synthetic construct
VASVLRWWGIKVI

SEQ ID NO: 23762 - protein, 11 aa, synthetic construct
AAVLGDSVKVI

SEQ ID NO: 23763 - protein, 11 aa, synthetic construct
AAVLGDSVQLI

SEQ ID NO: 23764 - protein, 11 aa, synthetic construct
AAVLGDSVYLI

SEQ ID NO: 23765 - protein, 11 aa, synthetic construct
AAVLGDTAKLF

SEQ ID NO: 23766 - protein, 10 aa, synthetic construct
VASGLPSLGV

SEQ ID NO: 23767 - protein, 11 aa, synthetic construct
AAVLGDTAQHM

SEQ ID NO: 23768 - protein, 13 aa, synthetic construct
VARVLRWWGIKLI

SEQ ID NO: 23769 - protein, 14 aa, synthetic construct
TDHYLVFGETDELI

SEQ ID NO: 23770 - protein, 13 aa, synthetic construct
TASVLRWWGSKLI

SEQ ID NO: 23771 - protein, 13 aa, synthetic construct
TASVLRWWGIILI

SEQ ID NO: 23772 - protein, 13 aa, synthetic construct
TASDLRWWGITLI

SEQ ID NO: 23773 - protein, 14 aa, synthetic construct
AAVLGDTGTPINLS

SEQ ID NO: 23774 - protein, 11 aa, synthetic construct
SSVLGDTFKLI

SEQ ID NO: 23775 - protein, 10 aa, synthetic construct
SSTGGYGETH

SEQ ID NO: 23776 - protein, 14 aa, synthetic construct
AAVLGDTGTPINST

SEQ ID NO: 23777 - protein, 14 aa, synthetic construct
AAVLGDTGTPITSS

SEQ ID NO: 23778 - protein, 14 aa, synthetic construct
AAVLGDTGTPIYSS

SEQ ID NO: 23779 - protein, 14 aa, synthetic construct
AAVLGDTGTPRNSS

SEQ ID NO: 23780 - protein, 14 aa, synthetic construct
AAVLGDTGTPTNSS

SEQ ID NO: 23781 - protein, 11 aa, synthetic construct
AAVLGDTGVLI

SEQ ID NO: 23782 - protein, 11 aa, synthetic construct
AAVLGDTGYLI

SEQ ID NO: 23783 - protein, 11 aa, synthetic construct
AAVLGDTIKII

SEQ ID NO: 23784 - protein, 11 aa, synthetic construct
AAVLGDTLILI

SEQ ID NO: 23785 - protein, 5 aa, synthetic construct
SSRLG

SEQ ID NO: 23786 - protein, 11 aa, synthetic construct
AAVLGDTLKVI

SEQ ID NO: 23787 - protein, 11 aa, synthetic construct
AAVLGDTLNSS

SEQ ID NO: 23788 - protein, 11 aa, synthetic construct
AAVLGDTPKLI

SEQ ID NO: 23789 - protein, 11 aa, synthetic construct
AAVLGDTSKLI

SEQ ID NO: 23790 - protein, 11 aa, synthetic construct
AAVLGDTVDII

SEQ ID NO: 23791 - protein, 11 aa, synthetic construct
AAVLGDTVDRI

SEQ ID NO: 23792 - protein, 14 aa, synthetic construct
AAVLGDTGTPIKTS

SEQ ID NO: 23793 - protein, 14 aa, synthetic construct
AAVLGDTGTPIISS

SEQ ID NO: 23794 - protein, 11 aa, synthetic construct
AAVLGDTGTLI

SEQ ID NO: 23795 - protein, 10 aa, synthetic construct
TAERGPETLS

SEQ ID NO: 23796 - protein, 14 aa, synthetic construct
TAPTGGYGYTDKLN

SEQ ID NO: 23797 - protein, 11 aa, synthetic construct
AAVLGDTGKLV

SEQ ID NO: 23798 - protein, 11 aa, synthetic construct
AAVLGDTGKPI

SEQ ID NO: 23799 - protein, 14 aa, synthetic construct
AAVLGDTGKPINSS

SEQ ID NO: 23800 - protein, 14 aa, synthetic construct
TAPTGDTGTPINSS

SEQ ID NO: 23801 - protein, 11 aa, synthetic construct
AAVLGDTGKRS

SEQ ID NO: 23802 - protein, 11 aa, synthetic construct
AAVLGDTGKVF

SEQ ID NO: 23803 - protein, 15 aa, synthetic construct
TAGKAFLRRGAPYTD

SEQ ID NO: 23804 - protein, 14 aa, synthetic construct
TAAKAVLRRGAPYT

SEQ ID NO: 23805 - protein, 14 aa, synthetic construct
AAVLGDTGRPRNSS

SEQ ID NO: 23806 - protein, 11 aa, synthetic construct
AAVLGDTGNRI

SEQ ID NO: 23807 - protein, 15 aa, synthetic construct
TAAKAVLRRGAPSTD

SEQ ID NO: 23808 - protein, 14 aa, synthetic construct
TAAKAFLRRGAPYT

SEQ ID NO: 23809 - protein, 11 aa, synthetic construct
AAVLGDTGQIL

SEQ ID NO: 23810 - protein, 11 aa, synthetic construct
AAVLGDTGQLN

SEQ ID NO: 23811 - protein, 11 aa, synthetic construct
AAVLGDTGQRI

SEQ ID NO: 23812 - protein, 11 aa, synthetic construct
AAVLGDTGQVI

SEQ ID NO: 23813 - skipped

SEQ ID NO: 23814 - protein, 15 aa, synthetic construct
QRRRPSYVGGGFNSS

SEQ ID NO: 23815 - protein, 15 aa, synthetic construct
QRRRPSYEGGPPTPI

SEQ ID NO: 23816 - protein, 11 aa, synthetic construct
PPVYEQSRGCL

SEQ ID NO: 23817 - protein, 11 aa, synthetic construct
AAVLWDTLKHI

SEQ ID NO: 23818 - protein, 14 aa, synthetic construct
QPLLGDTGTPINST

SEQ ID NO: 23819 - protein, 11 aa, synthetic construct
AAVLWGTVKLI

SEQ ID NO: 23820 - protein, 11 aa, synthetic construct
AAVMGDPVKVI

SEQ ID NO: 23821 - protein, 14 aa, synthetic construct
QPLLGDTGTPIKSS

SEQ ID NO: 23822 - protein, 11 aa, synthetic construct
AAVMGDTFKLI

SEQ ID NO: 23823 - protein, 14 aa, synthetic construct
QPLLGDTGTPIKAS

SEQ ID NO: 23824 - protein, 14 aa, synthetic construct
QPLLGDTGTPIISS

SEQ ID NO: 23825 - protein, 14 aa, synthetic construct
AAVMGDTGKPINSS

SEQ ID NO: 23826 - protein, 14 aa, synthetic construct
QPLLGDTGPPINSS

SEQ ID NO: 23827 - protein, 14 aa, synthetic construct
AAVMGDTGTPIHSS

SEQ ID NO: 23828 - protein, 11 aa, synthetic construct
AAVMGDTLQII

SEQ ID NO: 23829 - protein, 14 aa, synthetic construct
QPLLGDTGPPIHSS

SEQ ID NO: 23830 - protein, 11 aa, synthetic construct
AAVMGDTVELF

SEQ ID NO: 23831 - protein, 11 aa, synthetic construct
AAVMGDTVKII

SEQ ID NO: 23832 - protein, 14 aa, synthetic construct
QPLLGDTCTTINST

SEQ ID NO: 23833 - protein, 11 aa, synthetic construct
AAVMGDTVKVI

SEQ ID NO: 23834 - protein, 14 aa, synthetic construct
QPLLGDPGTPIDSS

SEQ ID NO: 23835 - protein, 14 aa, synthetic construct
QPLLGDAGTPINSS

SEQ ID NO: 23836 - protein, 11 aa, synthetic construct
AAVMGDTVKVL

SEQ ID NO: 23837 - protein, 11 aa, synthetic construct
AAVLWDTVKII

SEQ ID NO: 23838 - protein, 11 aa, synthetic construct
AAVLWDTGKLI

SEQ ID NO: 23839 - protein, 11 aa, synthetic construct
AAVMGHPVKLI

SEQ ID NO: 23840 - protein, 11 aa, synthetic construct
AAVLWDPVILI

SEQ ID NO: 23841 - protein, 11 aa, synthetic construct
AAVLRDRVKLI

SEQ ID NO: 23842 - protein, 11 aa, synthetic construct
AAVLRDTDKHN

SEQ ID NO: 23843 - protein, 11 aa, synthetic construct
AAVLRDTVKHI

SEQ ID NO: 23844 - protein, 11 aa, synthetic construct
AAVLRDTVKHN

SEQ ID NO: 23845 - protein, 11 aa, synthetic construct
AAVLRDTVKII

SEQ ID NO: 23846 - protein, 14 aa, synthetic construct
QPLLGDTGTTINSS

SEQ ID NO: 23847 - protein, 14 aa, synthetic construct
QPLLGDTGTRINSS

SEQ ID NO: 23848 - protein, 11 aa, synthetic construct
AAVLRDTVKLN

SEQ ID NO: 23849 - protein, 11 aa, synthetic construct
AAVLSDTVKLI

SEQ ID NO: 23850 - protein, 11 aa, synthetic construct
AAVLVDTCKLI

SEQ ID NO: 23851 - protein, 11 aa, synthetic construct
AAVLVDTIKLI

SEQ ID NO: 23852 - protein, 11 aa, synthetic construct
AAVLVDTVIHI

SEQ ID NO: 23853 - protein, 11 aa, synthetic construct
AAVLVDTVILI

SEQ ID NO: 23854 - protein, 14 aa, synthetic construct
QPLLGDTGTPMNSS

SEQ ID NO: 23855 - protein, 11 aa, synthetic construct
AAVLVDTVKLN

SEQ ID NO: 23856 - protein, 14 aa, synthetic construct
QPLLGDTGTPLNSS

SEQ ID NO: 23857 - protein, 15 aa, synthetic construct
AAVLVGRVDIKVLIG

SEQ ID NO: 23858 - protein, 11 aa, synthetic construct
AAVLVHTVNLI

SEQ ID NO: 23859 - protein, 16 aa, synthetic construct
AAVLVPGRVICVQRKP

SEQ ID NO: 23860 - protein, 11 aa, synthetic construct
AAVMGGTVKLI

SEQ ID NO: 23861 - protein, 11 aa, synthetic construct
AAVMGIRLNSS

SEQ ID NO: 23862 - protein, 16 aa, synthetic construct
QRRRPSYEGGPPPPIN

SEQ ID NO: 23863 - protein, 11 aa, synthetic construct
AAVQGETVKLN

SEQ ID NO: 23864 - protein, 11 aa, synthetic construct
AAVQRDTLKLI

SEQ ID NO: 23865 - protein, 4 aa, synthetic construct
AAVR

SEQ ID NO: 23866 - protein, 13 aa, synthetic construct
QHASYVGGGFNSS

SEQ ID NO: 23867 - protein, 11 aa, synthetic construct
AAVRADTVTLI

SEQ ID NO: 23868 - protein, 11 aa, synthetic construct
AAVRGAPGKLI

SEQ ID NO: 23869 - protein, 11 aa, synthetic construct
AAVRGARVKLI

SEQ ID NO: 23870 - protein, 16 aa, synthetic construct
QHAAFLHWGSTPINSS

SEQ ID NO: 23871 - protein, 11 aa, synthetic construct
AAVRGATGNHI

SEQ ID NO: 23872 - protein, 11 aa, synthetic construct
AAVRGATVQLI

SEQ ID NO: 23873 - protein, 14 aa, synthetic construct
QAPTGGYGYTDKLI

SEQ ID NO: 23874 - protein, 11 aa, synthetic construct
AAVRGDPVKVI

SEQ ID NO: 23875 - protein, 11 aa, synthetic construct
AAVRGDPVNLF

SEQ ID NO: 23876 - protein, 14 aa, synthetic construct
QALLGDTGTPINSS

SEQ ID NO: 23877 - protein, 11 aa, synthetic construct
PSRGLYTDTLI

SEQ ID NO: 23878 - protein, 11 aa, synthetic construct
AAVRGDPVNSS

SEQ ID NO: 23879 - protein, 16 aa, synthetic construct
PRRRPSYVGGPPTPIN

SEQ ID NO: 23880 - protein, 11 aa, synthetic construct
AAVRGDRVKLI

SEQ ID NO: 23881 - protein, 11 aa, synthetic construct
AAVRGDRVNLI

SEQ ID NO: 23882 - protein, 10 aa, synthetic construct
PQNEGPINAS

SEQ ID NO: 23883 - protein, 13 aa, synthetic construct
QHASYVGGGVSSS

SEQ ID NO: 23884 - protein, 11 aa, synthetic construct
AAVQGDTVNLF

SEQ ID NO: 23885 - protein, 11 aa, synthetic construct
AAVMGVTVNLI

SEQ ID NO: 23886 - protein, 11 aa, synthetic construct
AAVQGDTLKLI

SEQ ID NO: 23887 - protein, 11 aa, synthetic construct
AAVMGYTVNHI

SEQ ID NO: 23888 - protein, 14 aa, synthetic construct
QPLLGATGTPINSS

SEQ ID NO: 23889 - protein, 10 aa, synthetic construct
QPKEGPINSS

SEQ ID NO: 23890 - protein, 13 aa, synthetic construct
EQPDDRWGGIKLN

SEQ ID NO: 23891 - protein, 11 aa, synthetic construct
AAVMRDTLKLI

SEQ ID NO: 23892 - protein, 10 aa, synthetic construct
QKKEGPINSS

SEQ ID NO: 23893 - protein, 11 aa, synthetic construct
AAVPGDAGKLI

SEQ ID NO: 23894 - protein, 11 aa, synthetic construct
AAVPGDRVKLI

SEQ ID NO: 23895 - protein, 13 aa, synthetic construct
AAVPGDTGKRILG

SEQ ID NO: 23896 - protein, 14 aa, synthetic construct
QHLLGVTGTPIKSS

SEQ ID NO: 23897 - protein, 11 aa, synthetic construct
AAVPGDTVKLV

SEQ ID NO: 23898 - protein, 11 aa, synthetic construct
AAVPGDTVKPI

SEQ ID NO: 23899 - protein, 11 aa, synthetic construct
AAVPGDTVRLI

SEQ ID NO: 23900 - protein, 11 aa, synthetic construct
AAVQGDPVHLI

SEQ ID NO: 23901 - protein, 14 aa, synthetic construct
QHLLGDTGTPINSS

SEQ ID NO: 23902 - protein, 11 aa, synthetic construct
AAVQGDPVKLI

SEQ ID NO: 23903 - protein, 10 aa, synthetic construct
QHKEGAMNST

SEQ ID NO: 23904 - protein, 11 aa, synthetic construct
AAVQGDQVKLI

SEQ ID NO: 23905 - protein, 10 aa, synthetic construct
QHILGDTGHP

SEQ ID NO: 23906 - protein, 11 aa, synthetic construct
AAVLRDPVKLI

SEQ ID NO: 23907 - protein, 14 aa, synthetic construct
QPLLGHTGTPINSS

SEQ ID NO: 23908 - protein, 11 aa, synthetic construct
AAVLRDPFKLI

SEQ ID NO: 23909 - protein, 11 aa, synthetic construct
AAVLGHTFKII

SEQ ID NO: 23910 - protein, 10 aa, synthetic construct
QQQEGPINSS

SEQ ID NO: 23911 - protein, 11 aa, synthetic construct
AAVLGHTVKLN

SEQ ID NO: 23912 - protein, 11 aa, synthetic construct
AAVLGIRFNSS

SEQ ID NO: 23913 - protein, 10 aa, synthetic construct
QQKERPINSS

SEQ ID NO: 23914 - protein, 10 aa, synthetic construct
QQKEGPLNSS

SEQ ID NO: 23915 - protein, 10 aa, synthetic construct
QQKEGPINST

SEQ ID NO: 23916 - protein, 11 aa, synthetic construct
AAVLGIRLNST

SEQ ID NO: 23917 - protein, 7 aa, synthetic construct
AAVLGKT

SEQ ID NO: 23918 - protein, 10 aa, synthetic construct
QQKEGPINSP

SEQ ID NO: 23919 - protein, 10 aa, synthetic construct
QQKEGPIKSS

SEQ ID NO: 23920 - protein, 11 aa, synthetic construct
AAVLGLTVKLI

SEQ ID NO: 23921 - protein, 10 aa, synthetic construct
QQKEGPIHSS

SEQ ID NO: 23922 - protein, 10 aa, synthetic construct
QQKEGPIDSS

SEQ ID NO: 23923 - protein, 7 aa, synthetic construct
AAVLGQT

SEQ ID NO: 23924 - protein, 9 aa, synthetic construct
QQKDVPINS

SEQ ID NO: 23925 - protein, 11 aa, synthetic construct
AAVLGQTVKLI

SEQ ID NO: 23926 - protein, 11 aa, synthetic construct
QQHWGIRLNSS

SEQ ID NO: 23927 - protein, 11 aa, synthetic construct
AAVLGQTVKQI

SEQ ID NO: 23928 - protein, 13 aa, synthetic construct
QQESYDGGGLNLS

SEQ ID NO: 23929 - protein, 11 aa, synthetic construct
AAVLGHTLKHI

SEQ ID NO: 23930 - protein, 11 aa, synthetic construct
AAVLGGWGRLF

SEQ ID NO: 23931 - protein, 11 aa, synthetic construct
AAVLRATVELI

SEQ ID NO: 23932 - protein, 11 aa, synthetic construct
AAVLGGTVNLI

SEQ ID NO: 23933 - protein, 16 aa, synthetic construct
QRRRPSSVGGPPTPIN

SEQ ID NO: 23934 - protein, 13 aa, synthetic construct
AAVLGETVKRILG

SEQ ID NO: 23935 - protein, 11 aa, synthetic construct
AAVLGETVNSS

SEQ ID NO: 23936 - protein, 11 aa, synthetic construct
AAVLGETVSLI

SEQ ID NO: 23937 - protein, 14 aa, synthetic construct
QRRRPAYVGGPPTP

SEQ ID NO: 23938 - protein, 11 aa, synthetic construct
QQYWGVRLNSS

SEQ ID NO: 23939 - protein, 11 aa, synthetic construct
QQYWGIRVNSS

SEQ ID NO: 23940 - protein, 11 aa, synthetic construct
QQYWGIRSNSS

SEQ ID NO: 23941 - protein, 11 aa, synthetic construct
AAVLGGPVKLI

SEQ ID NO: 23942 - protein, 11 aa, synthetic construct
QQYWGIRLNTS

SEQ ID NO: 23943 - protein, 11 aa, synthetic construct
AAVLGGRGEGF

SEQ ID NO: 23944 - protein, 10 aa, synthetic construct
QQYWGIRLNS

SEQ ID NO: 23945 - protein, 11 aa, synthetic construct
AAVLGGTAQLI

SEQ ID NO: 23946 - protein, 11 aa, synthetic construct
QQYWGIRLKSS

SEQ ID NO: 23947 - protein, 11 aa, synthetic construct
QQYWGIRLDSS

SEQ ID NO: 23948 - protein, 11 aa, synthetic construct
QQYWAIRLNTS

SEQ ID NO: 23949 - protein, 14 aa, synthetic construct
AAVLGGTGTPINSS

SEQ ID NO: 23950 - protein, 11 aa, synthetic construct
QQYGGIRLTSS

SEQ ID NO: 23951 - protein, 10 aa, synthetic construct
QQTEGPITSS

SEQ ID NO: 23952 - protein, 10 aa, synthetic construct
QQEEGPINSS

SEQ ID NO: 23953 - protein, 16 aa, synthetic construct
QQEAILHGGCRATHSS

SEQ ID NO: 23954 - protein, 13 aa, synthetic construct
QQASYVGGRLNSS

SEQ ID NO: 23955 - protein, 11 aa, synthetic construct
AAVLGTTVKLI

SEQ ID NO: 23956 - protein, 16 aa, synthetic construct
QQAAFLHWGSTPIKSS

SEQ ID NO: 23957 - protein, 16 aa, synthetic construct
QQAAFLHWGSTPIHSS

SEQ ID NO: 23958 - protein, 11 aa, synthetic construct
AAVLGVTVELI

SEQ ID NO: 23959 - protein, 16 aa, synthetic construct
QQAAFLHWGSTPIDSS

SEQ ID NO: 23960 - protein, 11 aa, synthetic construct
AAVLGVTVILI

SEQ ID NO: 23961 - protein, 11 aa, synthetic construct
AAVLGVTVIVI

SEQ ID NO: 23962 - protein, 16 aa, synthetic construct
QQAAFLHRGSTPINSS

SEQ ID NO: 23963 - protein, 14 aa, synthetic construct
QPVLGDTGTPINSS

SEQ ID NO: 23964 - protein, 11 aa, synthetic construct
AAVLGVTVKHI

SEQ ID NO: 23965 - protein, 12 aa, synthetic construct
QPRRFVQGTATP

SEQ ID NO: 23966 - protein, 15 aa, synthetic construct
QPPMPYYGGDTKSKT

SEQ ID NO: 23967 - protein, 12 aa, synthetic construct
QPLSGDTGTPIN

SEQ ID NO: 23968 - protein, 11 aa, synthetic construct
AAVLGVTVKLS

SEQ ID NO: 23969 - protein, 11 aa, synthetic construct
AAVLGVTVNLI

SEQ ID NO: 23970 - protein, 14 aa, synthetic construct
QPLRRATGTPINTS

SEQ ID NO: 23971 - protein, 14 aa, synthetic construct
QPLRGETGTPLNSS

SEQ ID NO: 23972 - protein, 14 aa, synthetic construct
QPLRGDPGTPINSS

SEQ ID NO: 23973 - protein, 14 aa, synthetic construct
QPLLGNTGTPINSS

SEQ ID NO: 23974 - protein, 11 aa, synthetic construct
AAVLGYTVKLN

SEQ ID NO: 23975 - protein, 11 aa, synthetic construct
AAVLGVTVDLI

SEQ ID NO: 23976 - protein, 16 aa, synthetic construct
QQAAFLHWGSTPRISS

SEQ ID NO: 23977 - protein, 11 aa, synthetic construct
AAVLGVPVKVI

SEQ ID NO: 23978 - protein, 13 aa, synthetic construct
QQASSVGGGVNSS

SEQ ID NO: 23979 - protein, 13 aa, synthetic construct
QQASYVGGGINTS

SEQ ID NO: 23980 - protein, 16 aa, synthetic construct
QQASYVGGAPYTDKLI

SEQ ID NO: 23981 - protein, 13 aa, synthetic construct
QQASYVGGALNSS

SEQ ID NO: 23982 - protein, 13 aa, synthetic construct
QQASYVDGGVNSS

SEQ ID NO: 23983 - protein, 6 aa, synthetic construct
AAVLGV

SEQ ID NO: 23984 - protein, 13 aa, synthetic construct
QQASYLGGGLNSS

SEQ ID NO: 23985 - protein, 13 aa, synthetic construct
QQASYGGGGLNSS

SEQ ID NO: 23986 - protein, 12 aa, synthetic construct
AAVLGVHTDQLI

SEQ ID NO: 23987 - protein, 12 aa, synthetic construct
AAVLGVHTDTLI

SEQ ID NO: 23988 - protein, 11 aa, synthetic construct
AAVLGVPVKVF

SEQ ID NO: 23989 - protein, 13 aa, synthetic construct
QQASSVGGGLYSS

SEQ ID NO: 23990 - protein, 12 aa, synthetic construct
AAVLGVHTEKLI

SEQ ID NO: 23991 - protein, 12 aa, synthetic construct
AAVLGVHTHKLI

SEQ ID NO: 23992 - protein, 12 aa, synthetic construct
AAVLGVNTDKLI

SEQ ID NO: 23993 - protein, 10 aa, synthetic construct
QQASSVGGGL

SEQ ID NO: 23994 - protein, 11 aa, synthetic construct
AAVLGVPVKLI

SEQ ID NO: 23995 - protein, 11 aa, synthetic construct
QQALGDPINSS

SEQ ID NO: 23996 - protein, 16 aa, synthetic construct
QQAAFRHWGSTPRNSS

SEQ ID NO: 23997 - protein, 14 aa, synthetic construct
APPTGGYGNTDKLI

SEQ ID NO: 23998 - protein, 11 aa, synthetic construct
APVLGDTVKPI

SEQ ID NO: 23999 - protein, 14 aa, synthetic construct
APPTGGYGYTDKLI

SEQ ID NO: 24000 - protein, 11 aa, synthetic construct
ASRGWYTLKLI

SEQ ID NO: 24001 - protein, 15 aa, synthetic construct
EAPKAYLRRGAPYTD

SEQ ID NO: 24002 - protein, 15 aa, synthetic construct
EAPKAFLRRGAPYTD

SEQ ID NO: 24003 - protein, 14 aa, synthetic construct
EAPHGGYGYTDKLI

SEQ ID NO: 24004 - protein, 10 aa, synthetic construct
EAPDDVWCGG

SEQ ID NO: 24005 - protein, 14 aa, synthetic construct
EANPLPKQRDNTEK

SEQ ID NO: 24006 - protein, 11 aa, synthetic construct
EALLGDTLKRI

SEQ ID NO: 24007 - protein, 11 aa, synthetic construct
AAVLGDRVILI

SEQ ID NO: 24008 - protein, 11 aa, synthetic construct
ASRGWYTEKLS

SEQ ID NO: 24009 - protein, 11 aa, synthetic construct
ASRGWYTEKVS

SEQ ID NO: 24010 - protein, 15 aa, synthetic construct
EAIVVRRCGLNMSYG

SEQ ID NO: 24011 - protein, 11 aa, synthetic construct
ASRGWYTDKHI

SEQ ID NO: 24012 - protein, 11 aa, synthetic construct
ASRQKKTNKHN

SEQ ID NO: 24013 - protein, 11 aa, synthetic construct
ASRRFYSDKHI

SEQ ID NO: 24014 - protein, 11 aa, synthetic construct
ASRRLNTDKLI

SEQ ID NO: 24015 - protein, 13 aa, synthetic construct
EAIVLRWWGIKLI

SEQ ID NO: 24016 - protein, 11 aa, synthetic construct
ASRRMYTHKHI

SEQ ID NO: 24017 - protein, 11 aa, synthetic construct
ASRSCTPINSS

SEQ ID NO: 24018 - protein, 11 aa, synthetic construct
ASRVLYTDELI

SEQ ID NO: 24019 - protein, 11 aa, synthetic construct
ASRVLYTDKII

SEQ ID NO: 24020 - protein, 14 aa, synthetic construct
EAHTGGYGYTDKNI

SEQ ID NO: 24021 - protein, 14 aa, synthetic construct
EAPNGGCGYTDKLI

SEQ ID NO: 24022 - protein, 11 aa, synthetic construct
ASRGWYTDKDI

SEQ ID NO: 24023 - protein, 6 aa, synthetic construct
ASRGWC

SEQ ID NO: 24024 - protein, 13 aa, synthetic construct
ASRGWWTETVICG

SEQ ID NO: 24025 - protein, 11 aa, synthetic construct
ASRGWDTANRS

SEQ ID NO: 24026 - protein, 11 aa, synthetic construct
ASRGWSTDKHI

SEQ ID NO: 24027 - protein, 14 aa, synthetic construct
EAPTAGYGYTHKII

SEQ ID NO: 24028 - protein, 14 aa, synthetic construct
EAPTAGYGYTDKLI

SEQ ID NO: 24029 - protein, 14 aa, synthetic construct
EAPPGGYWYTDKLI

SEQ ID NO: 24030 - protein, 11 aa, synthetic construct
ASRGWSTDTLI

SEQ ID NO: 24031 - protein, 14 aa, synthetic construct
EAPPGGYGYTDKLN

SEQ ID NO: 24032 - protein, 11 aa, synthetic construct
ASRGWSTEQLI

SEQ ID NO: 24033 - protein, 14 aa, synthetic construct
EAPPGGYGYTDILI

SEQ ID NO: 24034 - protein, 14 aa, synthetic construct
EAPPGGSGYTDKLI

SEQ ID NO: 24035 - protein, 14 aa, synthetic construct
EAPNGGYGCTDKLI

SEQ ID NO: 24036 - protein, 14 aa, synthetic construct
EAPNWGYGYTDKLI

SEQ ID NO: 24037 - protein, 11 aa, synthetic construct
ASRGWYNDTLI

SEQ ID NO: 24038 - protein, 14 aa, synthetic construct
EAPNGGYGYTERLI

SEQ ID NO: 24039 - protein, 11 aa, synthetic construct
ASRGWYPESLT

SEQ ID NO: 24040 - protein, 11 aa, synthetic construct
ASRGWYSDKLI

SEQ ID NO: 24041 - protein, 14 aa, synthetic construct
EAPNGGYGYTDKLN

SEQ ID NO: 24042 - protein, 11 aa, synthetic construct
ASRGWYTAELI

SEQ ID NO: 24043 - protein, 14 aa, synthetic construct
EAPNGGYGYTDKLL

SEQ ID NO: 24044 - protein, 11 aa, synthetic construct
ASRGWYTAQLI

SEQ ID NO: 24045 - protein, 11 aa, synthetic construct
ASRVLYTDKLS

SEQ ID NO: 24046 - protein, 11 aa, synthetic construct
ASRVLYTDTLI

SEQ ID NO: 24047 - protein, 11 aa, synthetic construct
ASRWLYTDKII

SEQ ID NO: 24048 - protein, 11 aa, synthetic construct
ASTGLYTYKLN

SEQ ID NO: 24049 - protein, 10 aa, synthetic construct
EAETGPDKII

SEQ ID NO: 24050 - protein, 13 aa, synthetic construct
ASSVLRWWGSKLI

SEQ ID NO: 24051 - protein, 11 aa, synthetic construct
EAESRNRGELI

SEQ ID NO: 24052 - protein, 13 aa, synthetic construct
ASSVLRWWGVKLF

SEQ ID NO: 24053 - protein, 13 aa, synthetic construct
ASSVQRWWGIKLI

SEQ ID NO: 24054 - protein, 13 aa, synthetic construct
ASSVQRWWGSKLI

SEQ ID NO: 24055 - protein, 11 aa, synthetic construct
ASTGLFSEKLN

SEQ ID NO: 24056 - protein, 11 aa, synthetic construct
ASTGLNTDKLI

SEQ ID NO: 24057 - protein, 11 aa, synthetic construct
ASTGLYTDKLN

SEQ ID NO: 24058 - protein, 10 aa, synthetic construct
EAESGPDQRI

SEQ ID NO: 24059 - protein, 11 aa, synthetic construct
ASRWLYTDKLI

SEQ ID NO: 24060 - protein, 9 aa, synthetic construct
ASTPLGYDK

SEQ ID NO: 24061 - protein, 11 aa, synthetic construct
ASVGLYTDKLI

SEQ ID NO: 24062 - protein, 11 aa, synthetic construct
ASVLEDTVKLI

SEQ ID NO: 24063 - protein, 11 aa, synthetic construct
ASVLGATVNLI

SEQ ID NO: 24064 - protein, 14 aa, synthetic construct
ASVLGDTGTPINSS

SEQ ID NO: 24065 - protein, 10 aa, synthetic construct
EAERVPYKLI

SEQ ID NO: 24066 - protein, 11 aa, synthetic construct
ASVLGDTVKLI

SEQ ID NO: 24067 - protein, 10 aa, synthetic construct
EAERVPDKII

SEQ ID NO: 24068 - protein, 10 aa, synthetic construct
EAERVPDKIF

SEQ ID NO: 24069 - protein, 15 aa, synthetic construct
ASSVLQSLRIKILYG

SEQ ID NO: 24070 - protein, 6 aa, synthetic construct
ASSVLP

SEQ ID NO: 24071 - protein, 13 aa, synthetic construct
ASSVLGRLGIKVI

SEQ ID NO: 24072 - protein, 11 aa, synthetic construct
ASSVLDSCISN

SEQ ID NO: 24073 - protein, 14 aa, synthetic construct
EAHTGGYGYTDKLN

SEQ ID NO: 24074 - protein, 14 aa, synthetic construct
EAHTGGYGYTDKLI

SEQ ID NO: 24075 - protein, 13 aa, synthetic construct
EAGVLRWWGSNLI

SEQ ID NO: 24076 - protein, 11 aa, synthetic construct
ASSGFSRAELN

SEQ ID NO: 24077 - protein, 11 aa, synthetic construct
ASSGFSSEKLN

SEQ ID NO: 24078 - protein, 13 aa, synthetic construct
ASSGLESLRVLRG

SEQ ID NO: 24079 - protein, 11 aa, synthetic construct
ASSGLETDKLI

SEQ ID NO: 24080 - protein, 15 aa, synthetic construct
ASSGLPTERVHTGKL

SEQ ID NO: 24081 - protein, 13 aa, synthetic construct
EAGVLRWWGIKLI

SEQ ID NO: 24082 - protein, 15 aa, synthetic construct
ASSGLTTVGLNSGKL

SEQ ID NO: 24083 - protein, 15 aa, synthetic construct
EAGQAFVRRGAPYTD

SEQ ID NO: 24084 - protein, 11 aa, synthetic construct
ASSGLYTEKLI

SEQ ID NO: 24085 - protein, 11 aa, synthetic construct
EAGLGDTVKRI

SEQ ID NO: 24086 - protein, 11 aa, synthetic construct
ASSGLYTLKLI

SEQ ID NO: 24087 - protein, 13 aa, synthetic construct
ASSGVGWGGIIVV

SEQ ID NO: 24088 - protein, 10 aa, synthetic construct
EAETGPDQLI

SEQ ID NO: 24089 - protein, 10 aa, synthetic construct
EAETGPDKLI

SEQ ID NO: 24090 - protein, 11 aa, synthetic construct
ASSRLYTEKLI

SEQ ID NO: 24091 - protein, 11 aa, synthetic construct
ASSVIMRCGIK

SEQ ID NO: 24092 - protein, 11 aa, synthetic construct
ASRGWDTANRI

SEQ ID NO: 24093 - protein, 11 aa, synthetic construct
ASRGVYTVKLS

SEQ ID NO: 24094 - protein, 13 aa, synthetic construct
APPTGGYGYTDQL

SEQ ID NO: 24095 - protein, 14 aa, synthetic construct
EAPTGGYGYTDNPI

SEQ ID NO: 24096 - protein, 11 aa, synthetic construct
ASRGLYTVQLI

SEQ ID NO: 24097 - protein, 11 aa, synthetic construct
ASRGLYTVRLI

SEQ ID NO: 24098 - protein, 14 aa, synthetic construct
EAPTGGYGYTHKDI

SEQ ID NO: 24099 - protein, 11 aa, synthetic construct
ASRGLYTYKHI

SEQ ID NO: 24100 - protein, 11 aa, synthetic construct
ASRGLYTYKLF

SEQ ID NO: 24101 - protein, 14 aa, synthetic construct
EAPTGGYGYTEKLI

SEQ ID NO: 24102 - protein, 12 aa, synthetic construct
EAPTGGYGYTEK

SEQ ID NO: 24103 - protein, 14 aa, synthetic construct
EAPTGGYGYTDRLF

SEQ ID NO: 24104 - protein, 14 aa, synthetic construct
EAPTGGYGYTDQLI

SEQ ID NO: 24105 - protein, 14 aa, synthetic construct
EAPTGGYGYTDNLF

SEQ ID NO: 24106 - protein, 11 aa, synthetic construct
ASRGLYTVQLF

SEQ ID NO: 24107 - protein, 14 aa, synthetic construct
EAPTGGYGYTDKVI

SEQ ID NO: 24108 - protein, 11 aa, synthetic construct
ASRGMNTDKHN

SEQ ID NO: 24109 - protein, 11 aa, synthetic construct
ASRGMYTDKHN

SEQ ID NO: 24110 - protein, 14 aa, synthetic construct
EAPTGGYGYTDKPI

SEQ ID NO: 24111 - protein, 11 aa, synthetic construct
ASRGMYTDKLT

SEQ ID NO: 24112 - protein, 14 aa, synthetic construct
EAPTGGYGYTDKLV

SEQ ID NO: 24113 - protein, 14 aa, synthetic construct
EAPTGGYGYTDKLT

SEQ ID NO: 24114 - protein, 14 aa, synthetic construct
EAPTGGYGYTDKLF

SEQ ID NO: 24115 - protein, 14 aa, synthetic construct
EAPTGGYGYTDKIN

SEQ ID NO: 24116 - protein, 14 aa, synthetic construct
EAPTGGYGYTHKLI

SEQ ID NO: 24117 - protein, 14 aa, synthetic construct
EAPTGGYGYTYKII

SEQ ID NO: 24118 - protein, 11 aa, synthetic construct
ASRGVYTHQLI

SEQ ID NO: 24119 - protein, 14 aa, synthetic construct
EAPTRGFGYTDKLI

SEQ ID NO: 24120 - protein, 11 aa, synthetic construct
ASRGLYTGKLF

SEQ ID NO: 24121 - protein, 14 aa, synthetic construct
EAPTVGYGYTYTII

SEQ ID NO: 24122 - protein, 13 aa, synthetic construct
EAPTVGCTPIKST

SEQ ID NO: 24123 - protein, 11 aa, synthetic construct
ASRGLYTGKLM

SEQ ID NO: 24124 - protein, 11 aa, synthetic construct
ASRGLYTGNLI

SEQ ID NO: 24125 - protein, 11 aa, synthetic construct
ASRGLYTGQLI

SEQ ID NO: 24126 - protein, 12 aa, synthetic construct
EAPTRGYGSTDK

SEQ ID NO: 24127 - protein, 11 aa, synthetic construct
ASRGLYTHKLN

SEQ ID NO: 24128 - protein, 11 aa, synthetic construct
ASRGLYTHQLI

SEQ ID NO: 24129 - protein, 14 aa, synthetic construct
EAPTGVYGYTEKLI

SEQ ID NO: 24130 - protein, 14 aa, synthetic construct
EAPTGGYRYTDKLN

SEQ ID NO: 24131 - protein, 11 aa, synthetic construct
ASRGLYTNRLI

SEQ ID NO: 24132 - protein, 8 aa, synthetic construct
ASRGLYTS

SEQ ID NO: 24133 - protein, 11 aa, synthetic construct
ASRGLYTSKLN

SEQ ID NO: 24134 - protein, 11 aa, synthetic construct
ASRGLYTVHLI

SEQ ID NO: 24135 - protein, 11 aa, synthetic construct
ASRGLYTVHLV

SEQ ID NO: 24136 - protein, 11 aa, synthetic construct
ASRGLYTVILF

SEQ ID NO: 24137 - protein, 14 aa, synthetic construct
EAPTGGYWYTDKLI

SEQ ID NO: 24138 - protein, 11 aa, synthetic construct
ASRGLYTVKLF

SEQ ID NO: 24139 - protein, 14 aa, synthetic construct
EAPTGGYVYTDKLN

SEQ ID NO: 24140 - protein, 11 aa, synthetic construct
ASRGRSTDKHI

SEQ ID NO: 24141 - protein, 11 aa, synthetic construct
ASRGRYTDKLI

SEQ ID NO: 24142 - protein, 11 aa, synthetic construct
ASRGSNTDKLI

SEQ ID NO: 24143 - protein, 14 aa, synthetic construct
EAPTGGSGYTDQLI

SEQ ID NO: 24144 - protein, 11 aa, synthetic construct
ASRGVYAEKLI

SEQ ID NO: 24145 - protein, 14 aa, synthetic construct
EAPTGGYGSTEKNI

SEQ ID NO: 24146 - protein, 14 aa, synthetic construct
EAPTGGYGKTDKLI

SEQ ID NO: 24147 - protein, 11 aa, synthetic construct
ASRGVYTAKLS

SEQ ID NO: 24148 - protein, 11 aa, synthetic construct
ASRGVYTAKRI

SEQ ID NO: 24149 - protein, 14 aa, synthetic construct
EAPTGGYGHTDKLI

SEQ ID NO: 24150 - protein, 11 aa, synthetic construct
ASRGVYTDKHI

SEQ ID NO: 24151 - protein, 14 aa, synthetic construct
EAPTGGYAYSDILF

SEQ ID NO: 24152 - protein, 11 aa, synthetic construct
ASRGVYTDKHN

SEQ ID NO: 24153 - protein, 14 aa, synthetic construct
EAPTGGSGETDQLI

SEQ ID NO: 24154 - protein, 11 aa, synthetic construct
ASRGSSTAHLS

SEQ ID NO: 24155 - protein, 11 aa, synthetic construct
ASRGVYTDKRC

SEQ ID NO: 24156 - protein, 14 aa, synthetic construct
EAPTGGFGYTDKLI

SEQ ID NO: 24157 - protein, 14 aa, synthetic construct
EAPTGAYGSTDNSI

SEQ ID NO: 24158 - protein, 11 aa, synthetic construct
ASRGVYTDKVI

SEQ ID NO: 24159 - protein, 11 aa, synthetic construct
ASRGVYTDNSS

SEQ ID NO: 24160 - protein, 11 aa, synthetic construct
ASRGVYTDQLI

SEQ ID NO: 24161 - protein, 11 aa, synthetic construct
ASRGVYTDQLN

SEQ ID NO: 24162 - protein, 11 aa, synthetic construct
ASRGVYTEKRI

SEQ ID NO: 24163 - protein, 14 aa, synthetic construct
EAPTGAYGSPDKLI

SEQ ID NO: 24164 - protein, 11 aa, synthetic construct
ASRGVSTEKRI

SEQ ID NO: 24165 - protein, 14 aa, synthetic construct
EAPTGGYGYPDTLI

SEQ ID NO: 24166 - protein, 14 aa, synthetic construct
EAPTGGYGYSAKLI

SEQ ID NO: 24167 - protein, 11 aa, synthetic construct
ASRGVSTEKLI

SEQ ID NO: 24168 - protein, 11 aa, synthetic construct
ASRGSSTDKLI

SEQ ID NO: 24169 - protein, 14 aa, synthetic construct
EAPTGGYGYTDKFI

SEQ ID NO: 24170 - protein, 14 aa, synthetic construct
EAPTGGYGYTDELI

SEQ ID NO: 24171 - protein, 14 aa, synthetic construct
EAPTGGYGYTAKLI

SEQ ID NO: 24172 - protein, 11 aa, synthetic construct
ASRGSYTDKQI

SEQ ID NO: 24173 - protein, 14 aa, synthetic construct
EAPTGGYGYTAKII

SEQ ID NO: 24174 - protein, 11 aa, synthetic construct
ASRGSYTDQLV

SEQ ID NO: 24175 - protein, 11 aa, synthetic construct
ASRGSYTEKLI

SEQ ID NO: 24176 - protein, 11 aa, synthetic construct
ASRGSYTGKLI

SEQ ID NO: 24177 - protein, 11 aa, synthetic construct
ASRGTYTDKLN

SEQ ID NO: 24178 - protein, 11 aa, synthetic construct
ASRGVCSVRGI

SEQ ID NO: 24179 - protein, 11 aa, synthetic construct
ASRGVDCDTLI

SEQ ID NO: 24180 - protein, 11 aa, synthetic construct
ASRGVDTDKLL

SEQ ID NO: 24181 - protein, 11 aa, synthetic construct
ASRGVDTETLI

SEQ ID NO: 24182 - protein, 11 aa, synthetic construct
ASRGVDTHKLM

SEQ ID NO: 24183 - protein, 14 aa, synthetic construct
EAPTGGYGYSDKLI

SEQ ID NO: 24184 - protein, 11 aa, synthetic construct
ASRGVETEKLI

SEQ ID NO: 24185 - protein, 11 aa, synthetic construct
ASRGVSTATLI

SEQ ID NO: 24186 - protein, 11 aa, synthetic construct
ASRGVSTDEHI

SEQ ID NO: 24187 - protein, 11 aa, synthetic construct
ASVLVETVKLI

SEQ ID NO: 24188 - protein, 11 aa, synthetic construct
ASVRGDSVKVN

SEQ ID NO: 24189 - protein, 10 aa, synthetic construct
EAERVHDKLN

SEQ ID NO: 24190 - protein, 13 aa, synthetic construct
DAPTGGCTPINSS

SEQ ID NO: 24191 - protein, 10 aa, synthetic construct
DAERGPDNII

SEQ ID NO: 24192 - protein, 14 aa, synthetic construct
EAAKAYLRRGAPYT

SEQ ID NO: 24193 - protein, 10 aa, synthetic construct
DAERGPETII

SEQ ID NO: 24194 - protein, 10 aa, synthetic construct
DAERWPDQII

SEQ ID NO: 24195 - protein, 10 aa, synthetic construct
DAERWPDQLS

SEQ ID NO: 24196 - protein, 10 aa, synthetic construct
DAESGPDTLI

SEQ ID NO: 24197 - protein, 14 aa, synthetic construct
DAPPGGYGYTDKLT

SEQ ID NO: 24198 - protein, 14 aa, synthetic construct
DAPPGGYGYTDSSS

SEQ ID NO: 24199 - protein, 14 aa, synthetic construct
DAPSGGFGYTDYLF

SEQ ID NO: 24200 - protein, 14 aa, synthetic construct
DAPTGGYGDTAKLI

SEQ ID NO: 24201 - protein, 14 aa, synthetic construct
EAAKAYVGGGLNSS

SEQ ID NO: 24202 - protein, 14 aa, synthetic construct
DAPTGGYGSTDKLI

SEQ ID NO: 24203 - protein, 14 aa, synthetic construct
DAPTGGYGYTDNLI

SEQ ID NO: 24204 - protein, 14 aa, synthetic construct
DAPTGGYGYTDQLI

SEQ ID NO: 24205 - protein, 14 aa, synthetic construct
DAPTGGYGYTEKLI

SEQ ID NO: 24206 - protein, 14 aa, synthetic construct
DAPTVGYGYTDKLI

SEQ ID NO: 24207 - protein, 15 aa, synthetic construct
EAAKAILRRGAPYTD

SEQ ID NO: 24208 - protein, 16 aa, synthetic construct
DASGLPSLGVNTDKLI

SEQ ID NO: 24209 - protein, 13 aa, synthetic construct
DASVLGWRGSKDF

SEQ ID NO: 24210 - protein, 14 aa, synthetic construct
EAAKAGLRRGAPDT

SEQ ID NO: 24211 - protein, 15 aa, synthetic construct
EAAKAYRRRGAPYTD

SEQ ID NO: 24212 - protein, 15 aa, synthetic construct
EAAKDFLRRGAHYTD

SEQ ID NO: 24213 - protein, 11 aa, synthetic construct
ASVVGDPVKLS

SEQ ID NO: 24214 - protein, 12 aa, synthetic construct
CPKCGLRVNPKL

SEQ ID NO: 24215 - protein, 11 aa, synthetic construct
AVVRGDTVKLL

SEQ ID NO: 24216 - protein, 15 aa, synthetic construct
EAANSFLRRGAPCTD

SEQ ID NO: 24217 - protein, 16 aa, synthetic construct
AYIGRANVCNKVNDQN

SEQ ID NO: 24218 - protein, 15 aa, synthetic construct
EAANDFLRRGAPYTD

SEQ ID NO: 24219 - protein, 14 aa, synthetic construct
AYPNGGYGYTDKLI

SEQ ID NO: 24220 - protein, 11 aa, synthetic construct
AYRGLYTDKII

SEQ ID NO: 24221 - protein, 15 aa, synthetic construct
EAANAFLRRGAPYTD

SEQ ID NO: 24222 - protein, 11 aa, synthetic construct
AYRGLYTDNLI

SEQ ID NO: 24223 - protein, 8 aa, synthetic construct
AYRGLYTR

SEQ ID NO: 24224 - protein, 12 aa, synthetic construct
DAAEHRWCGWRL

SEQ ID NO: 24225 - protein, 15 aa, synthetic construct
EAAKPFLRRGAPYTD

SEQ ID NO: 24226 - protein, 13 aa, synthetic construct
DAAKACLRRGAPD

SEQ ID NO: 24227 - protein, 13 aa, synthetic construct
DAAKAFIPRGAPD

SEQ ID NO: 24228 - protein, 15 aa, synthetic construct
EAAKTNQRSGAPYTD

SEQ ID NO: 24229 - protein, 14 aa, synthetic construct
EAAKSFLRRGAPYT

SEQ ID NO: 24230 - protein, 15 aa, synthetic construct
DAAKAFLRRGAPSTD

SEQ ID NO: 24231 - protein, 15 aa, synthetic construct
EAAKSFLLRGAPYTD

SEQ ID NO: 24232 - protein, 13 aa, synthetic construct
EAAKSFIRRGSPY

SEQ ID NO: 24233 - protein, 13 aa, synthetic construct
DACVVRGWGITLI

SEQ ID NO: 24234 - protein, 10 aa, synthetic construct
DADRGPGTLF

SEQ ID NO: 24235 - protein, 13 aa, synthetic construct
DASVLRWWGSKLI

SEQ ID NO: 24236 - protein, 15 aa, synthetic construct
EAAKAFLRWGAPYTD

SEQ ID NO: 24237 - protein, 13 aa, synthetic construct
DASVRRWWGIKLF

SEQ ID NO: 24238 - protein, 16 aa, synthetic construct
EAAKAFLRRGAPTPIN

SEQ ID NO: 24239 - protein, 7 aa, synthetic construct
DSPNRFR

SEQ ID NO: 24240 - protein, 14 aa, synthetic construct
DSPTGGYGYTDKLI

SEQ ID NO: 24241 - protein, 11 aa, synthetic construct
DSRGLDTETDI

SEQ ID NO: 24242 - protein, 11 aa, synthetic construct
DSRGLSSEKLI

SEQ ID NO: 24243 - protein, 11 aa, synthetic construct
DSRGLYTDKLK

SEQ ID NO: 24244 - protein, 15 aa, synthetic construct
EAAKAFLRRGASYTD

SEQ ID NO: 24245 - protein, 15 aa, synthetic construct
EAAKAFLRRGAPYSD

SEQ ID NO: 24246 - protein, 11 aa, synthetic construct
DSRGLYTDKVN

SEQ ID NO: 24247 - protein, 11 aa, synthetic construct
DSRGWYTDKLI

SEQ ID NO: 24248 - protein, 11 aa, synthetic construct
DSSSLSSDTLI

SEQ ID NO: 24249 - protein, 13 aa, synthetic construct
DASVVRWWGSKLI

SEQ ID NO: 24250 - protein, 14 aa, synthetic construct
EAAKACLRRGAPYT

SEQ ID NO: 24251 - protein, 15 aa, synthetic construct
EAAKACLRRGAPYTD

SEQ ID NO: 24252 - protein, 14 aa, synthetic construct
EAAKACLRRGGPYT

SEQ ID NO: 24253 - protein, 14 aa, synthetic construct
EAAKAFLRRGAPSP

SEQ ID NO: 24254 - protein, 15 aa, synthetic construct
EAAKADLRRGAPYTD

SEQ ID NO: 24255 - protein, 14 aa, synthetic construct
EAAKAFIRRGAPNN

SEQ ID NO: 24256 - protein, 13 aa, synthetic construct
EAAKAFLRRGAPD

SEQ ID NO: 24257 - protein, 15 aa, synthetic construct
EAAKAFIRRRAPYTD

SEQ ID NO: 24258 - protein, 15 aa, synthetic construct
EAAKAFLGRGAPYTD

SEQ ID NO: 24259 - protein, 11 aa, synthetic construct
DSMGWYTGIQL

SEQ ID NO: 24260 - protein, 15 aa, synthetic construct
DSAKAFLRRGAPYTD

SEQ ID NO: 24261 - protein, 12 aa, synthetic construct
DRKSTRLKSDHR

SEQ ID NO: 24262 - protein, 7 aa, synthetic construct
DGRSGGY

SEQ ID NO: 24263 - protein, 13 aa, synthetic construct
DASVVRWWGSQLF

SEQ ID NO: 24264 - protein, 5 aa, synthetic construct
DATNT

SEQ ID NO: 24265 - protein, 15 aa, synthetic construct
EAAKAFLRSGPPYTD

SEQ ID NO: 24266 - protein, 11 aa, synthetic construct
DAVLGDRVKLI

SEQ ID NO: 24267 - protein, 11 aa, synthetic construct
DAVLGDTAKLI

SEQ ID NO: 24268 - protein, 15 aa, synthetic construct
EAAKAFLRRRAPYTD

SEQ ID NO: 24269 - protein, 11 aa, synthetic construct
DAVLGDTGEDI

SEQ ID NO: 24270 - protein, 11 aa, synthetic construct
DAVLGDTGKLI

SEQ ID NO: 24271 - protein, 11 aa, synthetic construct
DAVLGDTGKLN

SEQ ID NO: 24272 - protein, 16 aa, synthetic construct
EAAKAFLRRGSTPINS

SEQ ID NO: 24273 - protein, 11 aa, synthetic construct
DAVLGDTVKLN

SEQ ID NO: 24274 - protein, 11 aa, synthetic construct
DAVLGDTVKVI

SEQ ID NO: 24275 - protein, 11 aa, synthetic construct
DAVLGETGKHI

SEQ ID NO: 24276 - protein, 11 aa, synthetic construct
DAVLGETVKLI

SEQ ID NO: 24277 - protein, 11 aa, synthetic construct
DAVLGETVTLI

SEQ ID NO: 24278 - protein, 11 aa, synthetic construct
DAVMGDTVNLI

SEQ ID NO: 24279 - protein, 10 aa, synthetic construct
DEENGPEKLI

SEQ ID NO: 24280 - protein, 10 aa, synthetic construct
DEERGPAKLI

SEQ ID NO: 24281 - protein, 16 aa, synthetic construct
DESGVHSLLFHTDKLI

SEQ ID NO: 24282 - protein, 11 aa, synthetic construct
AVVLWDTVKLI

SEQ ID NO: 24283 - protein, 11 aa, synthetic construct
AVVLGDTVQLI

SEQ ID NO: 24284 - protein, 15 aa, synthetic construct
EAAQAFLRRGAPYTG

SEQ ID NO: 24285 - protein, 11 aa, synthetic construct
ATRGLYTENVI

SEQ ID NO: 24286 - protein, 10 aa, synthetic construct
EAERGPDRLI

SEQ ID NO: 24287 - protein, 10 aa, synthetic construct
EAERGPDQLI

SEQ ID NO: 24288 - protein, 14 aa, synthetic construct
ATPTGGYGYTEKLI

SEQ ID NO: 24289 - protein, 14 aa, synthetic construct
ATPTGGYRYTDKLI

SEQ ID NO: 24290 - protein, 10 aa, synthetic construct
EAERGPDNSI

SEQ ID NO: 24291 - protein, 4 aa, synthetic construct
ATQT

SEQ ID NO: 24292 - protein, 10 aa, synthetic construct
EAERGPDKSI

SEQ ID NO: 24293 - protein, 11 aa, synthetic construct
ATRGLYTEKHI

SEQ ID NO: 24294 - protein, 11 aa, synthetic construct
ATRGLYTEKLI

SEQ ID NO: 24295 - protein, 10 aa, synthetic construct
EAERGPDKLV

SEQ ID NO: 24296 - protein, 10 aa, synthetic construct
AVGRGPDKLI

SEQ ID NO: 24297 - protein, 13 aa, synthetic construct
ATSVLRWGGIKLI

SEQ ID NO: 24298 - protein, 10 aa, synthetic construct
EAERGPDKLF

SEQ ID NO: 24299 - protein, 13 aa, synthetic construct
ATSVLRWWGSNLI

SEQ ID NO: 24300 - protein, 13 aa, synthetic construct
ATTVLRWWGSKLI

SEQ ID NO: 24301 - protein, 10 aa, synthetic construct
EAERGPDKKI

SEQ ID NO: 24302 - protein, 10 aa, synthetic construct
EAERGPDKIY

SEQ ID NO: 24303 - protein, 10 aa, synthetic construct
EAERGPDKIN

SEQ ID NO: 24304 - protein, 10 aa, synthetic construct
EAERGPDKIF

SEQ ID NO: 24305 - protein, 10 aa, synthetic construct
EAERGPAKLI

SEQ ID NO: 24306 - protein, 10 aa, synthetic construct
EAERGPDTLM

SEQ ID NO: 24307 - protein, 14 aa, synthetic construct
ATPPGGYGYTAKLI

SEQ ID NO: 24308 - protein, 10 aa, synthetic construct
EAERGPDTVI

SEQ ID NO: 24309 - protein, 10 aa, synthetic construct
EAERGPEKLY

SEQ ID NO: 24310 - protein, 11 aa, synthetic construct
ASVVGETVILI

SEQ ID NO: 24311 - protein, 11 aa, synthetic construct
ASWGLFTDQLI

SEQ ID NO: 24312 - protein, 10 aa, synthetic construct
EAERTPDKLN

SEQ ID NO: 24313 - protein, 10 aa, synthetic construct
EAERRPDKII

SEQ ID NO: 24314 - protein, 10 aa, synthetic construct
EAERGSDKLI

SEQ ID NO: 24315 - protein, 11 aa, synthetic construct
ASWGLYADKLI

SEQ ID NO: 24316 - protein, 11 aa, synthetic construct
ASWGLYSDKLI

SEQ ID NO: 24317 - protein, 11 aa, synthetic construct
ASWGLYTDKHI

SEQ ID NO: 24318 - protein, 11 aa, synthetic construct
ASWGLYTDKII

SEQ ID NO: 24319 - protein, 10 aa, synthetic construct
EAERGPYKLI

SEQ ID NO: 24320 - protein, 11 aa, synthetic construct
ASWGLYTEKHN

SEQ ID NO: 24321 - protein, 10 aa, synthetic construct
EAERGPVKLI

SEQ ID NO: 24322 - protein, 10 aa, synthetic construct
EAERGPKKLI

SEQ ID NO: 24323 - protein, 11 aa, synthetic construct
ASWGLYTEKLS

SEQ ID NO: 24324 - protein, 11 aa, synthetic construct
ASWGWYADNVF

SEQ ID NO: 24325 - protein, 15 aa, synthetic construct
ATAKAFLRRGAPDTD

SEQ ID NO: 24326 - protein, 15 aa, synthetic construct
ATAKAFLRRGAPHTD

SEQ ID NO: 24327 - protein, 10 aa, synthetic construct
EAERGPGKLN

SEQ ID NO: 24328 - protein, 10 aa, synthetic construct
EAERGPEQLI

SEQ ID NO: 24329 - protein, 10 aa, synthetic construct
AVERGPEKLI

SEQ ID NO: 24330 - protein, 10 aa, synthetic construct
AVLGDPDNLI

SEQ ID NO: 24331 - protein, 14 aa, synthetic construct
EAAQAFVRRGAPYT

SEQ ID NO: 24332 - protein, 10 aa, synthetic construct
EAEGGPDNII

SEQ ID NO: 24333 - protein, 11 aa, synthetic construct
EAELGDTGKLL

SEQ ID NO: 24334 - protein, 10 aa, synthetic construct
AVRGDTDKLS

SEQ ID NO: 24335 - protein, 10 aa, synthetic construct
AVRGDTEKLI

SEQ ID NO: 24336 - protein, 11 aa, synthetic construct
AVRGLYTDQLI

SEQ ID NO: 24337 - protein, 11 aa, synthetic construct
EAELGATVKLI

SEQ ID NO: 24338 - protein, 11 aa, synthetic construct
EAELEHTLKHI

SEQ ID NO: 24339 - protein, 13 aa, synthetic construct
AVSVLRWWGIQLI

SEQ ID NO: 24340 - protein, 15 aa, synthetic construct
EAEKAFLRRGAPYTD

SEQ ID NO: 24341 - protein, 10 aa, synthetic construct
EAEIGPDILI

SEQ ID NO: 24342 - protein, 13 aa, synthetic construct
EACVLRWWGSTVI

SEQ ID NO: 24343 - protein, 10 aa, synthetic construct
AVLGDTAKLI

SEQ ID NO: 24344 - protein, 14 aa, synthetic construct
EAATSCLRRGAPYT

SEQ ID NO: 24345 - protein, 10 aa, synthetic construct
AVVGDTDKLI

SEQ ID NO: 24346 - protein, 14 aa, synthetic construct
EAATGGYGYTDKLI

SEQ ID NO: 24347 - protein, 11 aa, synthetic construct
AVVLGDPVKLF

SEQ ID NO: 24348 - protein, 11 aa, synthetic construct
AVVLGDTGKLI

SEQ ID NO: 24349 - protein, 15 aa, synthetic construct
EAATAFLRRGAPYTD

SEQ ID NO: 24350 - protein, 11 aa, synthetic construct
AVVLGDTVELI

SEQ ID NO: 24351 - protein, 11 aa, synthetic construct
AVVLGDTVKLF

SEQ ID NO: 24352 - protein, 15 aa, synthetic construct
EAATAFLRRGAPSTD

SEQ ID NO: 24353 - protein, 11 aa, synthetic construct
EAELGDTVILI

SEQ ID NO: 24354 - protein, 14 aa, synthetic construct
AVPTGGYGYTDKLF

SEQ ID NO: 24355 - protein, 11 aa, synthetic construct
AVPTGGYGYTD

SEQ ID NO: 24356 - protein, 14 aa, synthetic construct
AVPTGGSGYTDQLI

SEQ ID NO: 24357 - protein, 10 aa, synthetic construct
AVLGDTATLI

SEQ ID NO: 24358 - protein, 10 aa, synthetic construct
EAERGHDNLN

SEQ ID NO: 24359 - protein, 10 aa, synthetic construct
AVLGDTDKII

SEQ ID NO: 24360 - protein, 10 aa, synthetic construct
EAEREPDKIN

SEQ ID NO: 24361 - protein, 10 aa, synthetic construct
AVLGDTDKLV

SEQ ID NO: 24362 - protein, 10 aa, synthetic construct
AVLGDTDKPI

SEQ ID NO: 24363 - protein, 10 aa, synthetic construct
AVLGDTDKRI

SEQ ID NO: 24364 - protein, 10 aa, synthetic construct
AVLGDTDNLI

SEQ ID NO: 24365 - protein, 10 aa, synthetic construct
AVLGDTDQLI

SEQ ID NO: 24366 - protein, 10 aa, synthetic construct
AVLGDTDQLL

SEQ ID NO: 24367 - protein, 10 aa, synthetic construct
AVLGDTDRLI

SEQ ID NO: 24368 - protein, 10 aa, synthetic construct
AVLGDTDTLI

SEQ ID NO: 24369 - protein, 13 aa, synthetic construct
EAEMRHKNKKIYE

SEQ ID NO: 24370 - protein, 10 aa, synthetic construct
AVLGDTENLI

SEQ ID NO: 24371 - protein, 9 aa, synthetic construct
AVLGDTVKL

SEQ ID NO: 24372 - protein, 10 aa, synthetic construct
EAELGPDKLI

SEQ ID NO: 24373 - protein, 11 aa, synthetic construct
EAELGDTVKRN

SEQ ID NO: 24374 - protein, 11 aa, synthetic construct
AVLGVHTDKLI

SEQ ID NO: 24375 - protein, 10 aa, synthetic construct
AVMGDTDKLI

SEQ ID NO: 24376 - protein, 11 aa, synthetic construct
ASRGLYTEYHI

SEQ ID NO: 24377 - protein, 14 aa, synthetic construct
EAPTVGYWYTDKLI

SEQ ID NO: 24378 - protein, 13 aa, synthetic construct
EAPVLRWWGIKLI

SEQ ID NO: 24379 - protein, 11 aa, synthetic construct
ASRGLCTEKLI

SEQ ID NO: 24380 - protein, 14 aa, synthetic construct
EDPTGGYWYTDNLI

SEQ ID NO: 24381 - protein, 13 aa, synthetic construct
EDPTGGYGYTYKL

SEQ ID NO: 24382 - protein, 14 aa, synthetic construct
EDPTGGHGYTDKVI

SEQ ID NO: 24383 - protein, 14 aa, synthetic construct
EDPTAGYGYTDKLI

SEQ ID NO: 24384 - protein, 8 aa, synthetic construct
ASRGINLI

SEQ ID NO: 24385 - protein, 10 aa, synthetic construct
EDERGPDRLY

SEQ ID NO: 24386 - protein, 11 aa, synthetic construct
ECRGLYSERRI

SEQ ID NO: 24387 - protein, 12 aa, synthetic construct
ASRGIRVHRETH

SEQ ID NO: 24388 - protein, 11 aa, synthetic construct
EAVVGESVKLI

SEQ ID NO: 24389 - protein, 11 aa, synthetic construct
ASRGLDTAKLF

SEQ ID NO: 24390 - protein, 14 aa, synthetic construct
EDPTVGYCYTDKLI

SEQ ID NO: 24391 - protein, 11 aa, synthetic construct
ASRGLDTAKLS

SEQ ID NO: 24392 - protein, 11 aa, synthetic construct
ASRGLDTAQLS

SEQ ID NO: 24393 - protein, 11 aa, synthetic construct
EAVVGDTVKRF

SEQ ID NO: 24394 - protein, 11 aa, synthetic construct
ASRGLDTDKLL

SEQ ID NO: 24395 - protein, 11 aa, synthetic construct
EAVVGDTGKLI

SEQ ID NO: 24396 - protein, 11 aa, synthetic construct
ASRGLDTDKLS

SEQ ID NO: 24397 - protein, 11 aa, synthetic construct
EAVRGDTVKLI

SEQ ID NO: 24398 - protein, 11 aa, synthetic construct
ASRGLDTDKRS

SEQ ID NO: 24399 - protein, 11 aa, synthetic construct
ASRGLDTDKVM

SEQ ID NO: 24400 - protein, 8 aa, synthetic construct
ASRGIKLF

SEQ ID NO: 24401 - protein, 11 aa, synthetic construct
ASRGGYTVNLF

SEQ ID NO: 24402 - protein, 11 aa, synthetic construct
ASRGLYADKLN

SEQ ID NO: 24403 - protein, 11 aa, synthetic construct
ASRGFYSDNLI

SEQ ID NO: 24404 - protein, 11 aa, synthetic construct
ASRALYTQKLF

SEQ ID NO: 24405 - protein, 8 aa, synthetic construct
ASRAWYTG

SEQ ID NO: 24406 - protein, 10 aa, synthetic construct
EEEIGPDKLI

SEQ ID NO: 24407 - protein, 11 aa, synthetic construct
ASRELYTEKLI

SEQ ID NO: 24408 - protein, 12 aa, synthetic construct
ASRGAPTPINSS

SEQ ID NO: 24409 - protein, 15 aa, synthetic construct
EEAKAYILRGARYTD

SEQ ID NO: 24410 - protein, 15 aa, synthetic construct
EEAKAFLRRWAHYTD

SEQ ID NO: 24411 - protein, 11 aa, synthetic construct
EDVLGDTFKIK

SEQ ID NO: 24412 - protein, 11 aa, synthetic construct
ASRGFHTDKLI

SEQ ID NO: 24413 - protein, 11 aa, synthetic construct
EDVLGDSVKGI

SEQ ID NO: 24414 - protein, 11 aa, synthetic construct
ASRGGYTETRL

SEQ ID NO: 24415 - protein, 11 aa, synthetic construct
ASRGFYTDKLN

SEQ ID NO: 24416 - protein, 13 aa, synthetic construct
ASRGGCGYTDKLI

SEQ ID NO: 24417 - protein, 12 aa, synthetic construct
ASRGGCTPINSS

SEQ ID NO: 24418 - protein, 12 aa, synthetic construct
ASRGGCTPLNSS

SEQ ID NO: 24419 - protein, 11 aa, synthetic construct
ASRGGDPETLI

SEQ ID NO: 24420 - protein, 10 aa, synthetic construct
ASRGGGTVGL

SEQ ID NO: 24421 - protein, 6 aa, synthetic construct
ASRGGM

SEQ ID NO: 24422 - protein, 11 aa, synthetic construct
ASRGGYAETLI

SEQ ID NO: 24423 - protein, 11 aa, synthetic construct
ASRGGYTDTLI

SEQ ID NO: 24424 - protein, 11 aa, synthetic construct
ASRGLDTDQLI

SEQ ID NO: 24425 - protein, 11 aa, synthetic construct
ASRGLDTEKLI

SEQ ID NO: 24426 - protein, 11 aa, synthetic construct
ASRGLDTEQLI

SEQ ID NO: 24427 - protein, 11 aa, synthetic construct
ASRGLSTEKHI

SEQ ID NO: 24428 - protein, 11 aa, synthetic construct
ASRGLSTDILI

SEQ ID NO: 24429 - protein, 9 aa, synthetic construct
ASRGLSTDK

SEQ ID NO: 24430 - protein, 11 aa, synthetic construct
EAVLGYTDKHI

SEQ ID NO: 24431 - protein, 11 aa, synthetic construct
ASRGLSTDKLN

SEQ ID NO: 24432 - protein, 11 aa, synthetic construct
ASRGLSTDKVI

SEQ ID NO: 24433 - protein, 11 aa, synthetic construct
EAVLGVTVKLI

SEQ ID NO: 24434 - protein, 11 aa, synthetic construct
EAVLGVTFKLF

SEQ ID NO: 24435 - protein, 11 aa, synthetic construct
ASRGLSTDQLF

SEQ ID NO: 24436 - protein, 11 aa, synthetic construct
EAVLGVRVILI

SEQ ID NO: 24437 - protein, 12 aa, synthetic construct
EAVLGVHTHKHI

SEQ ID NO: 24438 - protein, 11 aa, synthetic construct
ASRGLDTYKLS

SEQ ID NO: 24439 - protein, 11 aa, synthetic construct
ASRGLSTEKVI

SEQ ID NO: 24440 - protein, 11 aa, synthetic construct
ASRGLSTENLF

SEQ ID NO: 24441 - protein, 11 aa, synthetic construct
ASRGLSTENLI

SEQ ID NO: 24442 - protein, 11 aa, synthetic construct
ASRGLSTETLV

SEQ ID NO: 24443 - protein, 11 aa, synthetic construct
ASRGLSTHNLF

SEQ ID NO: 24444 - protein, 11 aa, synthetic construct
ASRGLSTVHLI

SEQ ID NO: 24445 - protein, 11 aa, synthetic construct
EAVLGETVKII

SEQ ID NO: 24446 - protein, 11 aa, synthetic construct
ASRGLSTYKLI

SEQ ID NO: 24447 - protein, 11 aa, synthetic construct
ASRGLYADKLF

SEQ ID NO: 24448 - protein, 8 aa, synthetic construct
ASRGLSTD

SEQ ID NO: 24449 - protein, 11 aa, synthetic construct
EAVLWDTVKHI

SEQ ID NO: 24450 - protein, 11 aa, synthetic construct
ASRGLSTANLR

SEQ ID NO: 24451 - protein, 11 aa, synthetic construct
ASRGLSTAKLN

SEQ ID NO: 24452 - protein, 11 aa, synthetic construct
ASRGLFPEKLI

SEQ ID NO: 24453 - protein, 11 aa, synthetic construct
ASRGLFSDKRM

SEQ ID NO: 24454 - protein, 11 aa, synthetic construct
ASRGLFSDTLI

SEQ ID NO: 24455 - protein, 11 aa, synthetic construct
ASRGLFTDELI

SEQ ID NO: 24456 - protein, 11 aa, synthetic construct
ASRGLFTDKDI

SEQ ID NO: 24457 - protein, 11 aa, synthetic construct
EAVRGDTVKII

SEQ ID NO: 24458 - protein, 11 aa, synthetic construct
ASRGLFTDKVI

SEQ ID NO: 24459 - protein, 11 aa, synthetic construct
ASRGLFTDQLI

SEQ ID NO: 24460 - protein, 10 aa, synthetic construct
EAVRGADKII

SEQ ID NO: 24461 - protein, 11 aa, synthetic construct
ASRGLHTDQLI

SEQ ID NO: 24462 - protein, 11 aa, synthetic construct
ASRGLHTEKLI

SEQ ID NO: 24463 - protein, 11 aa, synthetic construct
EAVQGDTVKLI

SEQ ID NO: 24464 - protein, 11 aa, synthetic construct
ASRGLNNDKLN

SEQ ID NO: 24465 - protein, 11 aa, synthetic construct
EAVPGDTGKLI

SEQ ID NO: 24466 - protein, 11 aa, synthetic construct
ASRGLNTDKLN

SEQ ID NO: 24467 - protein, 11 aa, synthetic construct
ASRGLNTDNLI

SEQ ID NO: 24468 - protein, 11 aa, synthetic construct
ASRGLSPEKLI

SEQ ID NO: 24469 - protein, 11 aa, synthetic construct
EAVMGDTVKII

SEQ ID NO: 24470 - protein, 11 aa, synthetic construct
ASRGLSSDKVF

SEQ ID NO: 24471 - protein, 11 aa, synthetic construct
ASRALYTDKLN

SEQ ID NO: 24472 - protein, 11 aa, synthetic construct
EEEIVDKVKLI

SEQ ID NO: 24473 - protein, 11 aa, synthetic construct
ASRALYTAKLI

SEQ ID NO: 24474 - protein, 15 aa, synthetic construct
AQAKAFLLRGAPYTD

SEQ ID NO: 24475 - protein, 11 aa, synthetic construct
APVLGDTGKLI

SEQ ID NO: 24476 - protein, 11 aa, synthetic construct
APVLGDTVKHI

SEQ ID NO: 24477 - protein, 11 aa, synthetic construct
EFRGLYTDKII

SEQ ID NO: 24478 - protein, 11 aa, synthetic construct
EEVMGDTVKLI

SEQ ID NO: 24479 - protein, 11 aa, synthetic construct
EEVLGDTRKLI

SEQ ID NO: 24480 - protein, 11 aa, synthetic construct
APVLGDTVKLS

SEQ ID NO: 24481 - protein, 13 aa, synthetic construct
EETVLRWWGIKLI

SEQ ID NO: 24482 - protein, 11 aa, synthetic construct
APVLGDTVKLY

SEQ ID NO: 24483 - protein, 15 aa, synthetic construct
EAAKAFLRKGAPYTD

SEQ ID NO: 24484 - protein, 10 aa, synthetic construct
AQERGPDKLI

SEQ ID NO: 24485 - protein, 10 aa, synthetic construct
ASERGNPQHL

SEQ ID NO: 24486 - protein, 13 aa, synthetic construct
AQSVLRGWGIKLI

SEQ ID NO: 24487 - protein, 11 aa, synthetic construct
AQVLGDTVKHI

SEQ ID NO: 24488 - protein, 13 aa, synthetic construct
ARAEEHTSDLPSP

SEQ ID NO: 24489 - protein, 15 aa, synthetic construct
ASAKACLRRGAPDTD

SEQ ID NO: 24490 - protein, 15 aa, synthetic construct
ASAKAFLRGGAPYTD

SEQ ID NO: 24491 - protein, 13 aa, synthetic construct
EESVLRWWGIKLI

SEQ ID NO: 24492 - protein, 15 aa, synthetic construct
ASAKAILRRGPPYTD

SEQ ID NO: 24493 - protein, 16 aa, synthetic construct
ASAKDFLRRGPPTPIN

SEQ ID NO: 24494 - protein, 13 aa, synthetic construct
EESVLRWCGIKLN

SEQ ID NO: 24495 - protein, 11 aa, synthetic construct
APVLGDTGELI

SEQ ID NO: 24496 - protein, 13 aa, synthetic construct
APTVLRWWGFKLI

SEQ ID NO: 24497 - protein, 13 aa, synthetic construct
APSVLRWWGFQLF

SEQ ID NO: 24498 - protein, 13 aa, synthetic construct
APSVLRWCGIKLI

SEQ ID NO: 24499 - protein, 14 aa, synthetic construct
APPTGGYGYTDTHI

SEQ ID NO: 24500 - protein, 10 aa, synthetic construct
APQRGPDKRI

SEQ ID NO: 24501 - protein, 7 aa, synthetic construct
APQTVGN

SEQ ID NO: 24502 - protein, 13 aa, synthetic construct
EQNNIRWWGMKLF

SEQ ID NO: 24503 - protein, 15 aa, synthetic construct
EQKKGPKKKKFEKET

SEQ ID NO: 24504 - protein, 10 aa, synthetic construct
EPQKGPDKKI

SEQ ID NO: 24505 - protein, 14 aa, synthetic construct
EPPTGVSGYTAKHI

SEQ ID NO: 24506 - protein, 11 aa, synthetic construct
APRGLYTDKLT

SEQ ID NO: 24507 - protein, 11 aa, synthetic construct
APRGLYTEKLI

SEQ ID NO: 24508 - protein, 11 aa, synthetic construct
APRGVYTDKLI

SEQ ID NO: 24509 - protein, 14 aa, synthetic construct
EPHTGGYGYTDKRI

SEQ ID NO: 24510 - protein, 8 aa, synthetic construct
APSGLDTD

SEQ ID NO: 24511 - protein, 10 aa, synthetic construct
EPERGPEKIN

SEQ ID NO: 24512 - skipped

SEQ ID NO: 24513 - protein, 16 aa, synthetic construct
APSGLPSLGVHTDKLI

SEQ ID NO: 24514 - protein, 13 aa, synthetic construct
APSVIRWWWIKLI

SEQ ID NO: 24515 - protein, 10 aa, synthetic construct
EHTAELQSPI

SEQ ID NO: 24516 - protein, 12 aa, synthetic construct
EHGVWLRSMVPT

SEQ ID NO: 24517 - protein, 13 aa, synthetic construct
APSVLPWWRIKLI

SEQ ID NO: 24518 - protein, 15 aa, synthetic construct
ASAQDFIRTGAPYTD

SEQ ID NO: 24519 - protein, 13 aa, synthetic construct
EESVLRWCGIKLI

SEQ ID NO: 24520 - protein, 11 aa, synthetic construct
ASRALSTDKLI

SEQ ID NO: 24521 - protein, 11 aa, synthetic construct
ASMGLYTVQVI

SEQ ID NO: 24522 - protein, 10 aa, synthetic construct
ASLWWSNENL

SEQ ID NO: 24523 - protein, 11 aa, synthetic construct
ASMGKYTDKHI

SEQ ID NO: 24524 - protein, 10 aa, synthetic construct
ASMGLCTDKL

SEQ ID NO: 24525 - protein, 11 aa, synthetic construct
ASMGLFTVKLI

SEQ ID NO: 24526 - protein, 11 aa, synthetic construct
ASMGLNTDKLN

SEQ ID NO: 24527 - protein, 11 aa, synthetic construct
ASMGLNTNKII

SEQ ID NO: 24528 - protein, 11 aa, synthetic construct
ASMGLSTAKLI

SEQ ID NO: 24529 - protein, 11 aa, synthetic construct
ASMGLYTDKHI

SEQ ID NO: 24530 - protein, 11 aa, synthetic construct
EEELGDTVKII

SEQ ID NO: 24531 - protein, 11 aa, synthetic construct
ASPGLSTDNLI

SEQ ID NO: 24532 - protein, 10 aa, synthetic construct
ASERGPDKNI

SEQ ID NO: 24533 - protein, 14 aa, synthetic construct
ASPPGGYGYTAKLI

SEQ ID NO: 24534 - protein, 14 aa, synthetic construct
ASPPGGYGYTEKLI

SEQ ID NO: 24535 - protein, 6 aa, synthetic construct
ASPRCY

SEQ ID NO: 24536 - protein, 14 aa, synthetic construct
ASPTGGSGYHDKVK

SEQ ID NO: 24537 - protein, 14 aa, synthetic construct
ASPTGGYGNTDKLI

SEQ ID NO: 24538 - protein, 14 aa, synthetic construct
ASPTGGYGSTDKLI

SEQ ID NO: 24539 - protein, 14 aa, synthetic construct
ASPTGGYGYTDKLI

SEQ ID NO: 24540 - protein, 10 aa, synthetic construct
ASQRGPDKNI

SEQ ID NO: 24541 - protein, 10 aa, synthetic construct
ASRAFYTDIL

SEQ ID NO: 24542 - protein, 11 aa, synthetic construct
ASLLWDTDKLI

SEQ ID NO: 24543 - protein, 11 aa, synthetic construct
ASLGLYTVKLI

SEQ ID NO: 24544 - protein, 11 aa, synthetic construct
ASLGLYTDKLI

SEQ ID NO: 24545 - protein, 11 aa, synthetic construct
ASLGLYTDKHI

SEQ ID NO: 24546 - protein, 10 aa, synthetic construct
ASERGPDNLI

SEQ ID NO: 24547 - protein, 10 aa, synthetic construct
ASERGPDQLI

SEQ ID NO: 24548 - protein, 10 aa, synthetic construct
ASERGPVKDI

SEQ ID NO: 24549 - protein, 10 aa, synthetic construct
EESGLRSLGV

SEQ ID NO: 24550 - protein, 10 aa, synthetic construct
ASERVPDNLI

SEQ ID NO: 24551 - protein, 10 aa, synthetic construct
ASETGPEKLI

SEQ ID NO: 24552 - protein, 11 aa, synthetic construct
ASGGCRPINSS

SEQ ID NO: 24553 - protein, 13 aa, synthetic construct
EESDLRWWGIKLI

SEQ ID NO: 24554 - protein, 10 aa, synthetic construct
EEESGPENLY

SEQ ID NO: 24555 - protein, 11 aa, synthetic construct
ASGGLFTSQLI

SEQ ID NO: 24556 - protein, 11 aa, synthetic construct
ASGGLHTDKLI

SEQ ID NO: 24557 - protein, 11 aa, synthetic construct
ASGGLYTAQLI

SEQ ID NO: 24558 - protein, 11 aa, synthetic construct
ASGGLYTDDLI

SEQ ID NO: 24559 - protein, 10 aa, synthetic construct
EEERGPYKHI

SEQ ID NO: 24560 - protein, 11 aa, synthetic construct
ASGGLYTDKLV

SEQ ID NO: 24561 - protein, 11 aa, synthetic construct
ASGGWSTDDLS

SEQ ID NO: 24562 - protein, 11 aa, synthetic construct
ASGLGDTVKLI

SEQ ID NO: 24563 - protein, 10 aa, synthetic construct
EEERGPDKHI

SEQ ID NO: 24564 - protein, 4 aa, synthetic construct
ASLG

SEQ ID NO: 24565 - protein, 11 aa, synthetic construct
EAVLGETVKHI

SEQ ID NO: 24566 - protein, 11 aa, synthetic construct
EAVLGETGKLI

SEQ ID NO: 24567 - protein, 11 aa, synthetic construct
ASRGLYTEQLI

SEQ ID NO: 24568 - protein, 13 aa, synthetic construct
EASGLPSLWVHTD

SEQ ID NO: 24569 - protein, 14 aa, synthetic construct
EASTGGYGYTDKII

SEQ ID NO: 24570 - protein, 11 aa, synthetic construct
EASRGDTDKLI

SEQ ID NO: 24571 - protein, 11 aa, synthetic construct
EASPGGSDKLI

SEQ ID NO: 24572 - protein, 14 aa, synthetic construct
EASNAFLRRGSTYT

SEQ ID NO: 24573 - protein, 15 aa, synthetic construct
EASMRWGRGSWDPRQ

SEQ ID NO: 24574 - protein, 15 aa, synthetic construct
EASMCLRGEGPDKLI

SEQ ID NO: 24575 - protein, 15 aa, synthetic construct
EASGPPSLGDRVKLI

SEQ ID NO: 24576 - protein, 15 aa, synthetic construct
EASGLPSQGVHSDKL

SEQ ID NO: 24577 - protein, 16 aa, synthetic construct
EASGLPSLWVHTDKLI

SEQ ID NO: 24578 - protein, 16 aa, synthetic construct
EASGLPSLGVQTDNII

SEQ ID NO: 24579 - protein, 13 aa, synthetic construct
EASVLLWWGIKLI

SEQ ID NO: 24580 - protein, 15 aa, synthetic construct
EASGLPSLGVLTAKL

SEQ ID NO: 24581 - protein, 16 aa, synthetic construct
EASGLPSLGVHTYKLI

SEQ ID NO: 24582 - protein, 15 aa, synthetic construct
EASGLPSLGVHTENL

SEQ ID NO: 24583 - protein, 16 aa, synthetic construct
EASGLPSLGVHTEKLI

SEQ ID NO: 24584 - protein, 16 aa, synthetic construct
EASGLPSLGVHTDNLI

SEQ ID NO: 24585 - protein, 16 aa, synthetic construct
EASGLPSLGVHTDKPI

SEQ ID NO: 24586 - protein, 15 aa, synthetic construct
EASGLPSLGVHTDKL

SEQ ID NO: 24587 - protein, 16 aa, synthetic construct
EASGLPSLGVHTDKII

SEQ ID NO: 24588 - protein, 11 aa, synthetic construct
ASRGLYTDKRF

SEQ ID NO: 24589 - protein, 13 aa, synthetic construct
EASVIRWWGIQLI

SEQ ID NO: 24590 - protein, 13 aa, synthetic construct
EASVLLWWGLKLI

SEQ ID NO: 24591 - protein, 11 aa, synthetic construct
ASRGLYADNRC

SEQ ID NO: 24592 - protein, 11 aa, synthetic construct
ASRGLYTDKLH

SEQ ID NO: 24593 - protein, 13 aa, synthetic construct
EASVLRWWGIKPI

SEQ ID NO: 24594 - protein, 13 aa, synthetic construct
EASVLRWWGIKLY

SEQ ID NO: 24595 - protein, 13 aa, synthetic construct
EASVLRWWGIKLT

SEQ ID NO: 24596 - protein, 11 aa, synthetic construct
ASRGLYTDKIS

SEQ ID NO: 24597 - protein, 13 aa, synthetic construct
EASVLRWWGIKLN

SEQ ID NO: 24598 - protein, 13 aa, synthetic construct
EASVLRWWGIILI

SEQ ID NO: 24599 - protein, 13 aa, synthetic construct
EASVLRWSGIKLI

SEQ ID NO: 24600 - protein, 13 aa, synthetic construct
EASVLRWLGIKLI

SEQ ID NO: 24601 - protein, 13 aa, synthetic construct
EASVLRWCGSKLI

SEQ ID NO: 24602 - protein, 11 aa, synthetic construct
ASRGLYTDKLK

SEQ ID NO: 24603 - protein, 13 aa, synthetic construct
EASVLLWWGSKII

SEQ ID NO: 24604 - protein, 13 aa, synthetic construct
EASVLRWCGIKLF

SEQ ID NO: 24605 - protein, 16 aa, synthetic construct
EASVLRRGSPYTDKLI

SEQ ID NO: 24606 - protein, 13 aa, synthetic construct
EASVLRRCGIKLI

SEQ ID NO: 24607 - protein, 13 aa, synthetic construct
EASVLRLWWSKLI

SEQ ID NO: 24608 - protein, 11 aa, synthetic construct
ASRGLYTDKLR

SEQ ID NO: 24609 - protein, 13 aa, synthetic construct
EASVLRCWGIKLI

SEQ ID NO: 24610 - protein, 13 aa, synthetic construct
EASVLRCRGSKLI

SEQ ID NO: 24611 - protein, 13 aa, synthetic construct
EASVLPWRGIKLI

SEQ ID NO: 24612 - protein, 13 aa, synthetic construct
EASVLLWWVSKLI

SEQ ID NO: 24613 - protein, 16 aa, synthetic construct
EASGLPSLGVHTAKLI

SEQ ID NO: 24614 - protein, 10 aa, synthetic construct
EASGLPSLGV

SEQ ID NO: 24615 - protein, 11 aa, synthetic construct
ASRGLYTDKRL

SEQ ID NO: 24616 - protein, 14 aa, synthetic construct
EARTGGYRYTDKVF

SEQ ID NO: 24617 - protein, 11 aa, synthetic construct
ASRGLYTDTHI

SEQ ID NO: 24618 - protein, 13 aa, synthetic construct
EASDLLWWGIKLI

SEQ ID NO: 24619 - protein, 11 aa, synthetic construct
ASRGLYTDTLN

SEQ ID NO: 24620 - protein, 11 aa, synthetic construct
ASRGLYTEEHI

SEQ ID NO: 24621 - protein, 16 aa, synthetic construct
EASALPSLGVHTDKLI

SEQ ID NO: 24622 - protein, 11 aa, synthetic construct
ASRGLYTEILI

SEQ ID NO: 24623 - protein, 13 aa, synthetic construct
EARVQRWWGIKVN

SEQ ID NO: 24624 - protein, 13 aa, synthetic construct
EARVLRWWGSKLI

SEQ ID NO: 24625 - protein, 13 aa, synthetic construct
EARVLRWWGIKLI

SEQ ID NO: 24626 - protein, 11 aa, synthetic construct
ASRGLYTEKLS

SEQ ID NO: 24627 - protein, 16 aa, synthetic construct
EASGLPSLGGHTENLI

SEQ ID NO: 24628 - protein, 14 aa, synthetic construct
EARTGGYGYTDNII

SEQ ID NO: 24629 - protein, 14 aa, synthetic construct
EARPGGYGYTDKLI

SEQ ID NO: 24630 - protein, 11 aa, synthetic construct
EARGTGGLNSS

SEQ ID NO: 24631 - protein, 16 aa, synthetic construct
EARGLPSLGVLSDKLI

SEQ ID NO: 24632 - protein, 16 aa, synthetic construct
EARGLPSLGVHADKLI

SEQ ID NO: 24633 - protein, 11 aa, synthetic construct
ASRGLYTEKVI

SEQ ID NO: 24634 - protein, 15 aa, synthetic construct
EARGHPSLGVHTDKL

SEQ ID NO: 24635 - protein, 13 aa, synthetic construct
EARDLRWWAIKII

SEQ ID NO: 24636 - protein, 11 aa, synthetic construct
ASRGLYTENLS

SEQ ID NO: 24637 - protein, 11 aa, synthetic construct
ASRGLYTDTFI

SEQ ID NO: 24638 - protein, 13 aa, synthetic construct
EASDLRWCGIKLI

SEQ ID NO: 24639 - protein, 13 aa, synthetic construct
EASDLRWWGIKLF

SEQ ID NO: 24640 - protein, 13 aa, synthetic construct
EASDLRWWWIKLI

SEQ ID NO: 24641 - protein, 11 aa, synthetic construct
ASRGLYTDKVF

SEQ ID NO: 24642 - protein, 16 aa, synthetic construct
EASGLPSLGGDTDKLI

SEQ ID NO: 24643 - protein, 11 aa, synthetic construct
ASRGLYTDKVM

SEQ ID NO: 24644 - protein, 11 aa, synthetic construct
ASRGLYTDKYI

SEQ ID NO: 24645 - protein, 16 aa, synthetic construct
EASGLPSGGGHTEKLI

SEQ ID NO: 24646 - protein, 11 aa, synthetic construct
ASRGLYTDNHI

SEQ ID NO: 24647 - protein, 11 aa, synthetic construct
ASRGLYTDNLF

SEQ ID NO: 24648 - protein, 16 aa, synthetic construct
EASGLPPLGFHTDKLI

SEQ ID NO: 24649 - protein, 11 aa, synthetic construct
ASRGLYTDNLM

SEQ ID NO: 24650 - protein, 11 aa, synthetic construct
ASRGLYTDNPI

SEQ ID NO: 24651 - protein, 16 aa, synthetic construct
EASGLHSMGVHTDKHI

SEQ ID NO: 24652 - protein, 11 aa, synthetic construct
ASRGLYTDQHI

SEQ ID NO: 24653 - protein, 16 aa, synthetic construct
EASGLHSLGVQPDKII

SEQ ID NO: 24654 - protein, 13 aa, synthetic construct
EASELRWCGIKLI

SEQ ID NO: 24655 - protein, 11 aa, synthetic construct
ASRGLYTDQLN

SEQ ID NO: 24656 - protein, 11 aa, synthetic construct
ASRGLYTDQLT

SEQ ID NO: 24657 - protein, 13 aa, synthetic construct
EASDQRWWGIKLN

SEQ ID NO: 24658 - protein, 13 aa, synthetic construct
EASDQRWWGIILI

SEQ ID NO: 24659 - protein, 10 aa, synthetic construct
ASRGLYTDRL

SEQ ID NO: 24660 - protein, 11 aa, synthetic construct
ASRGLYTDKIF

SEQ ID NO: 24661 - protein, 13 aa, synthetic construct
EASVLRWWGIKVI

SEQ ID NO: 24662 - protein, 11 aa, synthetic construct
ASRGLYTDKHT

SEQ ID NO: 24663 - protein, 13 aa, synthetic construct
EAVLGDTGTRILG

SEQ ID NO: 24664 - protein, 11 aa, synthetic construct
EAVLGDTVKHI

SEQ ID NO: 24665 - protein, 10 aa, synthetic construct
ASRGLYSDKL

SEQ ID NO: 24666 - protein, 11 aa, synthetic construct
ASRGLYSDKLF

SEQ ID NO: 24667 - protein, 11 aa, synthetic construct
EAVLGDTVKGI

SEQ ID NO: 24668 - protein, 11 aa, synthetic construct
EAVLGDTVILI

SEQ ID NO: 24669 - protein, 11 aa, synthetic construct
ASRGLYSDKRI

SEQ ID NO: 24670 - protein, 11 aa, synthetic construct
ASRGLYSDKSI

SEQ ID NO: 24671 - protein, 11 aa, synthetic construct
EAVLGDTVILF

SEQ ID NO: 24672 - protein, 11 aa, synthetic construct
ASRGLYSDTLI

SEQ ID NO: 24673 - protein, 11 aa, synthetic construct
ASRGLYSEKHI

SEQ ID NO: 24674 - protein, 11 aa, synthetic construct
EAVLGDTDKLI

SEQ ID NO: 24675 - protein, 14 aa, synthetic construct
EAVLGDTGTPINST

SEQ ID NO: 24676 - protein, 11 aa, synthetic construct
ASRGLYSENLF

SEQ ID NO: 24677 - protein, 11 aa, synthetic construct
EAVLGDTGKLN

SEQ ID NO: 24678 - protein, 11 aa, synthetic construct
ASRGLYSENLI

SEQ ID NO: 24679 - protein, 11 aa, synthetic construct
EAVLGDTFKNI

SEQ ID NO: 24680 - protein, 11 aa, synthetic construct
ASRGLYSETLI

SEQ ID NO: 24681 - protein, 11 aa, synthetic construct
EAVLGDTDKLN

SEQ ID NO: 24682 - protein, 11 aa, synthetic construct
ASRGLYSNKLI

SEQ ID NO: 24683 - protein, 10 aa, synthetic construct
ASRGLYSVKL

SEQ ID NO: 24684 - protein, 11 aa, synthetic construct
ASRGLYSDKII

SEQ ID NO: 24685 - protein, 11 aa, synthetic construct
ASRGLYSDKFI

SEQ ID NO: 24686 - protein, 11 aa, synthetic construct
ASRGLYSDILI

SEQ ID NO: 24687 - protein, 15 aa, synthetic construct
ASRGLYPGHLIVGQG

SEQ ID NO: 24688 - protein, 11 aa, synthetic construct
ASRGLYADRLI

SEQ ID NO: 24689 - protein, 11 aa, synthetic construct
EAVLGEPVRLI

SEQ ID NO: 24690 - protein, 11 aa, synthetic construct
EAVLGEPGKVS

SEQ ID NO: 24691 - protein, 11 aa, synthetic construct
EAVLGDTVRLI

SEQ ID NO: 24692 - protein, 11 aa, synthetic construct
ASRGLYAGKLI

SEQ ID NO: 24693 - protein, 11 aa, synthetic construct
EAVLGDTVKVI

SEQ ID NO: 24694 - protein, 11 aa, synthetic construct
EAVLGDTVKRK

SEQ ID NO: 24695 - protein, 11 aa, synthetic construct
ASRGLYNEKLI

SEQ ID NO: 24696 - protein, 11 aa, synthetic construct
EAVLGDTVKLT

SEQ ID NO: 24697 - protein, 8 aa, synthetic construct
ASRGLYPD

SEQ ID NO: 24698 - protein, 11 aa, synthetic construct
ASRGLYPDKGN

SEQ ID NO: 24699 - protein, 11 aa, synthetic construct
EAVLGDTVKLS

SEQ ID NO: 24700 - protein, 11 aa, synthetic construct
ASRGLYPDKLM

SEQ ID NO: 24701 - protein, 11 aa, synthetic construct
ASRGLYPDNLS

SEQ ID NO: 24702 - protein, 11 aa, synthetic construct
ASRGLYPEKHN

SEQ ID NO: 24703 - protein, 11 aa, synthetic construct
ASRGLYPEKLF

SEQ ID NO: 24704 - protein, 11 aa, synthetic construct
EAVLGDTVKLF

SEQ ID NO: 24705 - protein, 11 aa, synthetic construct
ASRGLYPEKVN

SEQ ID NO: 24706 - protein, 11 aa, synthetic construct
ASRGLYPENLI

SEQ ID NO: 24707 - protein, 11 aa, synthetic construct
ASRGLYSVNLI

SEQ ID NO: 24708 - protein, 11 aa, synthetic construct
EAVLGDTAKLI

SEQ ID NO: 24709 - protein, 13 aa, synthetic construct
EASVLRWWGILLI

SEQ ID NO: 24710 - protein, 13 aa, synthetic construct
EASVLRWWGNKLI

SEQ ID NO: 24711 - protein, 11 aa, synthetic construct
ASRGLYTDDHI

SEQ ID NO: 24712 - protein, 11 aa, synthetic construct
ASRGLYTDDII

SEQ ID NO: 24713 - protein, 13 aa, synthetic construct
EASVLRWWGVKIN

SEQ ID NO: 24714 - protein, 11 aa, synthetic construct
ASRGLYTDDLI

SEQ ID NO: 24715 - protein, 11 aa, synthetic construct
ASRGLYTDEII

SEQ ID NO: 24716 - protein, 13 aa, synthetic construct
EASVLRWWGSNII

SEQ ID NO: 24717 - protein, 11 aa, synthetic construct
ASRGLYTDELN

SEQ ID NO: 24718 - protein, 11 aa, synthetic construct
ASRGLYTDHHI

SEQ ID NO: 24719 - protein, 15 aa, synthetic construct
EASVLRWWGRKLVLG

SEQ ID NO: 24720 - protein, 11 aa, synthetic construct
ASRGLYTDIII

SEQ ID NO: 24721 - protein, 11 aa, synthetic construct
ASRGLYTAHLS

SEQ ID NO: 24722 - protein, 13 aa, synthetic construct
EASVLRWWGLNSS

SEQ ID NO: 24723 - protein, 13 aa, synthetic construct
EASVLRWWGLKLN

SEQ ID NO: 24724 - protein, 11 aa, synthetic construct
ASRGLYTDILV

SEQ ID NO: 24725 - protein, 13 aa, synthetic construct
EASVLRWWGLILI

SEQ ID NO: 24726 - protein, 13 aa, synthetic construct
EASVLRWWGIQLI

SEQ ID NO: 24727 - protein, 11 aa, synthetic construct
ASRGLYTDKDI

SEQ ID NO: 24728 - protein, 13 aa, synthetic construct
EASVLRWWGINVI

SEQ ID NO: 24729 - protein, 13 aa, synthetic construct
EASVLRWWGINSS

SEQ ID NO: 24730 - protein, 11 aa, synthetic construct
ASRGLYTDKHN

SEQ ID NO: 24731 - protein, 11 aa, synthetic construct
ASRGLYTARLI

SEQ ID NO: 24732 - protein, 13 aa, synthetic construct
EASVPRWWGIKII

SEQ ID NO: 24733 - protein, 13 aa, synthetic construct
EASVPRWWGIKLI

SEQ ID NO: 24734 - protein, 11 aa, synthetic construct
ASRGLYTAQLL

SEQ ID NO: 24735 - protein, 11 aa, synthetic construct
ASRGLYTAKHI

SEQ ID NO: 24736 - protein, 11 aa, synthetic construct
ASRGLYTAKLF

SEQ ID NO: 24737 - protein, 11 aa, synthetic construct
EAVLGDRVKLI

SEQ ID NO: 24738 - protein, 10 aa, synthetic construct
EAVLGDKVKL

SEQ ID NO: 24739 - protein, 11 aa, synthetic construct
EAVLGDKVIII

SEQ ID NO: 24740 - protein, 11 aa, synthetic construct
EAVLGATVKLI

SEQ ID NO: 24741 - protein, 11 aa, synthetic construct
ASRGLYTAKLN

SEQ ID NO: 24742 - protein, 11 aa, synthetic construct
ASRGLYTAKLS

SEQ ID NO: 24743 - protein, 11 aa, synthetic construct
EAVEGDTVKLI

SEQ ID NO: 24744 - protein, 11 aa, synthetic construct
ASRGLYTAKRN

SEQ ID NO: 24745 - protein, 11 aa, synthetic construct
ASRGLYTAKRS

SEQ ID NO: 24746 - protein, 13 aa, synthetic construct
EATVLRWWGIKLI

SEQ ID NO: 24747 - protein, 11 aa, synthetic construct
ASRGLYTANLI

SEQ ID NO: 24748 - protein, 15 aa, synthetic construct
ASRGLYTAQLFVGHG

SEQ ID NO: 24749 - protein, 16 aa, synthetic construct
EATGLPSLGVHTDKLI

SEQ ID NO: 24750 - protein, 13 aa, synthetic construct
EASVVRWWGITLI

SEQ ID NO: 24751 - protein, 13 aa, synthetic construct
EASVVRWWGIKLI

SEQ ID NO: 24752 - protein, 13 aa, synthetic construct
EASVQRWGGININ

SEQ ID NO: 24753 - protein, 5 aa, synthetic construct
EASVQ

SEQ ID NO: 24754 - skipped

SEQ ID NO: 24755 - protein, 13 aa, synthetic construct
AASVLREWGRKLS

SEQ ID NO: 24756 - protein, 11 aa, synthetic construct
AAVLGDRLKVF

SEQ ID NO: 24757 - protein, 5 aa, synthetic construct
AAETG

SEQ ID NO: 24758 - protein, 10 aa, synthetic construct
AAETGPDKRI

SEQ ID NO: 24759 - protein, 7 aa, synthetic construct
AAETGPE

SEQ ID NO: 24760 - protein, 10 aa, synthetic construct
AAETGRDNLY

SEQ ID NO: 24761 - protein, 10 aa, synthetic construct
AAETGRERLM

SEQ ID NO: 24762 - protein, 10 aa, synthetic construct
AAETGTDKII

SEQ ID NO: 24763 - protein, 10 aa, synthetic construct
AAETGTDKNI

SEQ ID NO: 24764 - protein, 10 aa, synthetic construct
AAETVPDKLI

SEQ ID NO: 24765 - protein, 11 aa, synthetic construct
AAEVGDPVQVI

SEQ ID NO: 24766 - protein, 11 aa, synthetic construct
AAEVGDTVKLK

SEQ ID NO: 24767 - protein, 13 aa, synthetic construct
AAGDLRWWGIKLI

SEQ ID NO: 24768 - protein, 13 aa, synthetic construct
AAGEDFQLTGSTY

SEQ ID NO: 24769 - protein, 11 aa, synthetic construct
AAGGGAAEKLI

SEQ ID NO: 24770 - protein, 14 aa, synthetic construct
AAGGGGAGGGFGGP

SEQ ID NO: 24771 - protein, 13 aa, synthetic construct
AAGGLGWWGRRLI

SEQ ID NO: 24772 - protein, 16 aa, synthetic construct
AAGGLPSLEVHTDKLI

SEQ ID NO: 24773 - protein, 16 aa, synthetic construct
AAGGLPSLGGHTDNLI

SEQ ID NO: 24774 - protein, 15 aa, synthetic construct
AAGGLPSLGVHTDKL

SEQ ID NO: 24775 - protein, 11 aa, synthetic construct
AAGGLYTDKLI

SEQ ID NO: 24776 - protein, 10 aa, synthetic construct
AAGGVRGGGL

SEQ ID NO: 24777 - protein, 10 aa, synthetic construct
AAGGWWAGKL

SEQ ID NO: 24778 - protein, 15 aa, synthetic construct
AAGKACLRRGAPYTD

SEQ ID NO: 24779 - protein, 8 aa, synthetic construct
AAGKAVLR

SEQ ID NO: 24780 - protein, 11 aa, synthetic construct
AAGLGDPGKLS

SEQ ID NO: 24781 - protein, 11 aa, synthetic construct
AAGLGDTGKLS

SEQ ID NO: 24782 - protein, 11 aa, synthetic construct
AAGLGETGKLS

SEQ ID NO: 24783 - protein, 10 aa, synthetic construct
AAETGPANLI

SEQ ID NO: 24784 - protein, 10 aa, synthetic construct
AAETAVERSW

SEQ ID NO: 24785 - protein, 11 aa, synthetic construct
AAGPGDTGKLI

SEQ ID NO: 24786 - protein, 10 aa, synthetic construct
AAETAPDKLN

SEQ ID NO: 24787 - protein, 10 aa, synthetic construct
AAERWPDKHI

SEQ ID NO: 24788 - protein, 10 aa, synthetic construct
AAERWPDKLF

SEQ ID NO: 24789 - protein, 10 aa, synthetic construct
AAERWPDKLN

SEQ ID NO: 24790 - protein, 14 aa, synthetic construct
AAERWPDQLNILIV

SEQ ID NO: 24791 - protein, 10 aa, synthetic construct
AAERWPHKHI

SEQ ID NO: 24792 - protein, 10 aa, synthetic construct
AAESGPDKII

SEQ ID NO: 24793 - protein, 10 aa, synthetic construct
AAESGPDKLF

SEQ ID NO: 24794 - protein, 10 aa, synthetic construct
AAESGPDKLM

SEQ ID NO: 24795 - protein, 10 aa, synthetic construct
AAESGPDKPI

SEQ ID NO: 24796 - protein, 10 aa, synthetic construct
AAESGPDKSI

SEQ ID NO: 24797 - protein, 10 aa, synthetic construct
AAESGPDQLF

SEQ ID NO: 24798 - protein, 10 aa, synthetic construct
AAESGPEDLI

SEQ ID NO: 24799 - protein, 10 aa, synthetic construct
AAESGPEKVI

SEQ ID NO: 24800 - protein, 10 aa, synthetic construct
AAESGPETLC

SEQ ID NO: 24801 - protein, 10 aa, synthetic construct
AAESGPQKLI

SEQ ID NO: 24802 - protein, 10 aa, synthetic construct
AAESGPVKLI

SEQ ID NO: 24803 - protein, 10 aa, synthetic construct
AAESGPVKLS

SEQ ID NO: 24804 - protein, 10 aa, synthetic construct
AAESGPVKRF

SEQ ID NO: 24805 - protein, 10 aa, synthetic construct
AAESGPVKRI

SEQ ID NO: 24806 - protein, 9 aa, synthetic construct
AAESGPVQL

SEQ ID NO: 24807 - protein, 10 aa, synthetic construct
AAESGRDKIN

SEQ ID NO: 24808 - protein, 9 aa, synthetic construct
AAESGRDKL

SEQ ID NO: 24809 - protein, 10 aa, synthetic construct
AAESGRDKLI

SEQ ID NO: 24810 - protein, 10 aa, synthetic construct
AAESVHDKII

SEQ ID NO: 24811 - protein, 10 aa, synthetic construct
AAESVPDKLI

SEQ ID NO: 24812 - protein, 13 aa, synthetic construct
AAGLGGTGRGIVG

SEQ ID NO: 24813 - protein, 10 aa, synthetic construct
AAGREPDKLI

SEQ ID NO: 24814 - protein, 10 aa, synthetic construct
AAERGPDHII

SEQ ID NO: 24815 - protein, 14 aa, synthetic construct
AAHTGGYGSTEKRF

SEQ ID NO: 24816 - protein, 14 aa, synthetic construct
AAHTGGYGYNYIII

SEQ ID NO: 24817 - protein, 14 aa, synthetic construct
AAHTGGYGYSDQLI

SEQ ID NO: 24818 - protein, 10 aa, synthetic construct
AAHTGGYGYT

SEQ ID NO: 24819 - protein, 11 aa, synthetic construct
AAHTGGYGYTD

SEQ ID NO: 24820 - protein, 14 aa, synthetic construct
AAHTGGYGYTDKGI

SEQ ID NO: 24821 - protein, 14 aa, synthetic construct
AAHTGGYGYTDKHI

SEQ ID NO: 24822 - protein, 14 aa, synthetic construct
AAHTGGYGYTDKII

SEQ ID NO: 24823 - protein, 13 aa, synthetic construct
AAHTGGYGYTDKL

SEQ ID NO: 24824 - protein, 14 aa, synthetic construct
AAHTGGYGYTDKLV

SEQ ID NO: 24825 - protein, 14 aa, synthetic construct
AAHTGGYGYTDKRI

SEQ ID NO: 24826 - protein, 14 aa, synthetic construct
AAHTGGYGYTDNLI

SEQ ID NO: 24827 - protein, 14 aa, synthetic construct
AAHTGGYGYTDQSI

SEQ ID NO: 24828 - protein, 14 aa, synthetic construct
AAHTGGYGYTDTDI

SEQ ID NO: 24829 - protein, 14 aa, synthetic construct
AAHTGGYGYTDTLL

SEQ ID NO: 24830 - protein, 14 aa, synthetic construct
AAHTGGYGYTEKLS

SEQ ID NO: 24831 - protein, 14 aa, synthetic construct
AAHTGGYGYTNKLI

SEQ ID NO: 24832 - protein, 11 aa, synthetic construct
AAHTGRYGYTD

SEQ ID NO: 24833 - protein, 14 aa, synthetic construct
AAHTGWYGYTDKLI

SEQ ID NO: 24834 - protein, 13 aa, synthetic construct
AAHTRGYGFTHKL

SEQ ID NO: 24835 - protein, 14 aa, synthetic construct
AAHTWGYGYTDNLI

SEQ ID NO: 24836 - protein, 16 aa, synthetic construct
AAIALPTLGVHTDKLI

SEQ ID NO: 24837 - protein, 13 aa, synthetic construct
AAIDLHWWGIKLR

SEQ ID NO: 24838 - protein, 13 aa, synthetic construct
AAIFISWWVINLI

SEQ ID NO: 24839 - protein, 15 aa, synthetic construct
AAIGLPSLGVHTDIL

SEQ ID NO: 24840 - protein, 14 aa, synthetic construct
AAIGLPSLGVHTDK

SEQ ID NO: 24841 - protein, 14 aa, synthetic construct
AAHTGGYGYNDKLI

SEQ ID NO: 24842 - protein, 14 aa, synthetic construct
AAHTGGYGFTDTLI

SEQ ID NO: 24843 - protein, 11 aa, synthetic construct
AAGRGDTGKRI

SEQ ID NO: 24844 - protein, 14 aa, synthetic construct
AAHTGGYAYTDKLI

SEQ ID NO: 24845 - protein, 13 aa, synthetic construct
AAGRGGWVCLGWG

SEQ ID NO: 24846 - protein, 10 aa, synthetic construct
AAGRGPDELI

SEQ ID NO: 24847 - protein, 10 aa, synthetic construct
AAGRGPDKII

SEQ ID NO: 24848 - protein, 10 aa, synthetic construct
AAGRGPDKRN

SEQ ID NO: 24849 - protein, 10 aa, synthetic construct
AAGRGPDNRI

SEQ ID NO: 24850 - protein, 10 aa, synthetic construct
AAGRGPEKLF

SEQ ID NO: 24851 - protein, 10 aa, synthetic construct
AAGRGRDKLV

SEQ ID NO: 24852 - protein, 10 aa, synthetic construct
AAGRRPEKLI

SEQ ID NO: 24853 - protein, 10 aa, synthetic construct
AAGRVPDKLI

SEQ ID NO: 24854 - protein, 14 aa, synthetic construct
AAGTDCIRRGAPYT

SEQ ID NO: 24855 - protein, 11 aa, synthetic construct
AAGVGDTVKLF

SEQ ID NO: 24856 - protein, 13 aa, synthetic construct
AAGVLRGWGRGLI

SEQ ID NO: 24857 - protein, 13 aa, synthetic construct
AAGVLRGWGVKVI

SEQ ID NO: 24858 - protein, 11 aa, synthetic construct
AAGVLRWGGVT

SEQ ID NO: 24859 - protein, 13 aa, synthetic construct
AAGVLRWWGIILM

SEQ ID NO: 24860 - protein, 13 aa, synthetic construct
AAGVLRWWGIKLF

SEQ ID NO: 24861 - protein, 13 aa, synthetic construct
AAGVLRWWGLKLF

SEQ ID NO: 24862 - protein, 13 aa, synthetic construct
AAGVVGWWGLIVL

SEQ ID NO: 24863 - protein, 13 aa, synthetic construct
AAGVVRGWGLKLI

SEQ ID NO: 24864 - protein, 15 aa, synthetic construct
AAGYARGRGGAPCSA

SEQ ID NO: 24865 - protein, 14 aa, synthetic construct
AAHAGGYGYTDKRI

SEQ ID NO: 24866 - protein, 14 aa, synthetic construct
AAHNGGYGYTDKLI

SEQ ID NO: 24867 - protein, 14 aa, synthetic construct
AAHTAGYGYTDKLI

SEQ ID NO: 24868 - protein, 14 aa, synthetic construct
AAHTEGYGYTDKLI

SEQ ID NO: 24869 - protein, 14 aa, synthetic construct
AAHTGAYGSTENII

SEQ ID NO: 24870 - protein, 10 aa, synthetic construct
AAERWPDELI

SEQ ID NO: 24871 - protein, 10 aa, synthetic construct
AAERWHEKKI

SEQ ID NO: 24872 - protein, 10 aa, synthetic construct
AAERWHEKII

SEQ ID NO: 24873 - protein, 9 aa, synthetic construct
AAERGPDNS

SEQ ID NO: 24874 - protein, 10 aa, synthetic construct
AAERGPDPLI

SEQ ID NO: 24875 - protein, 10 aa, synthetic construct
AAERGPDQFI

SEQ ID NO: 24876 - protein, 10 aa, synthetic construct
AAERGPDQIF

SEQ ID NO: 24877 - protein, 9 aa, synthetic construct
AAERGPDQL

SEQ ID NO: 24878 - protein, 10 aa, synthetic construct
AAERGPDQLS

SEQ ID NO: 24879 - protein, 10 aa, synthetic construct
AAERGPDQRL

SEQ ID NO: 24880 - protein, 10 aa, synthetic construct
AAERGPDQRM

SEQ ID NO: 24881 - protein, 10 aa, synthetic construct
AAERGPDQRS

SEQ ID NO: 24882 - protein, 10 aa, synthetic construct
AAERGPDQSI

SEQ ID NO: 24883 - protein, 10 aa, synthetic construct
AAERGPDRRI

SEQ ID NO: 24884 - protein, 10 aa, synthetic construct
AAERGPDTHI

SEQ ID NO: 24885 - protein, 10 aa, synthetic construct
AAERGPDTLV

SEQ ID NO: 24886 - protein, 14 aa, synthetic construct
AAERGPDTVCVGHG

SEQ ID NO: 24887 - protein, 10 aa, synthetic construct
AAERGPEHLL

SEQ ID NO: 24888 - protein, 10 aa, synthetic construct
AAERGPEKIN

SEQ ID NO: 24889 - protein, 10 aa, synthetic construct
AAERGPEKLT

SEQ ID NO: 24890 - protein, 11 aa, synthetic construct
AAERGPEKRSG

SEQ ID NO: 24891 - protein, 10 aa, synthetic construct
AAERGPENII

SEQ ID NO: 24892 - protein, 10 aa, synthetic construct
AAERGPENLN

SEQ ID NO: 24893 - protein, 10 aa, synthetic construct
AAERGPEPLI

SEQ ID NO: 24894 - protein, 15 aa, synthetic construct
AAERGPEQGCVGSGH

SEQ ID NO: 24895 - protein, 10 aa, synthetic construct
AAERGPEQLF

SEQ ID NO: 24896 - protein, 10 aa, synthetic construct
AAERGPEQLN

SEQ ID NO: 24897 - protein, 10 aa, synthetic construct
AAERGPEQRL

SEQ ID NO: 24898 - protein, 10 aa, synthetic construct
AAERGPETRC

SEQ ID NO: 24899 - protein, 10 aa, synthetic construct
AAERGPDNSY

SEQ ID NO: 24900 - protein, 10 aa, synthetic construct
AAERGPDNRS

SEQ ID NO: 24901 - protein, 10 aa, synthetic construct
AAERVTDKHI

SEQ ID NO: 24902 - protein, 10 aa, synthetic construct
AAERGPDNPS

SEQ ID NO: 24903 - protein, 10 aa, synthetic construct
AAERGPDHLH

SEQ ID NO: 24904 - protein, 10 aa, synthetic construct
AAERGPDHLL

SEQ ID NO: 24905 - protein, 10 aa, synthetic construct
AAERGPDHLN

SEQ ID NO: 24906 - protein, 10 aa, synthetic construct
AAERGPDHRF

SEQ ID NO: 24907 - protein, 10 aa, synthetic construct
AAERGPDHRT

SEQ ID NO: 24908 - protein, 10 aa, synthetic construct
AAERGPDHSH

SEQ ID NO: 24909 - protein, 10 aa, synthetic construct
AAERGPDHSI

SEQ ID NO: 24910 - protein, 10 aa, synthetic construct
AAERGPDKDI

SEQ ID NO: 24911 - protein, 10 aa, synthetic construct
AAERGPDKIL

SEQ ID NO: 24912 - protein, 10 aa, synthetic construct
AAERGPDKIT

SEQ ID NO: 24913 - protein, 10 aa, synthetic construct
AAERGPDKIV

SEQ ID NO: 24914 - protein, 9 aa, synthetic construct
AAERGPDKK

SEQ ID NO: 24915 - protein, 10 aa, synthetic construct
AAERGPDKLM

SEQ ID NO: 24916 - protein, 10 aa, synthetic construct
AAERGPDKNF

SEQ ID NO: 24917 - protein, 10 aa, synthetic construct
AAERGPDKNN

SEQ ID NO: 24918 - protein, 13 aa, synthetic construct
AAERGPDKNNYGN

SEQ ID NO: 24919 - protein, 10 aa, synthetic construct
AAERGPDKRF

SEQ ID NO: 24920 - protein, 10 aa, synthetic construct
AAERGPDKRL

SEQ ID NO: 24921 - protein, 10 aa, synthetic construct
AAERGPDKRN

SEQ ID NO: 24922 - protein, 10 aa, synthetic construct
AAERGPDKSL

SEQ ID NO: 24923 - protein, 10 aa, synthetic construct
AAERGPDKVS

SEQ ID NO: 24924 - protein, 10 aa, synthetic construct
AAERGPDMLI

SEQ ID NO: 24925 - protein, 10 aa, synthetic construct
AAERGPDNHI

SEQ ID NO: 24926 - protein, 10 aa, synthetic construct
AAERGPDNLK

SEQ ID NO: 24927 - protein, 15 aa, synthetic construct
AAERGPDNNILGRGT

SEQ ID NO: 24928 - protein, 10 aa, synthetic construct
AAERGPETRI

SEQ ID NO: 24929 - protein, 10 aa, synthetic construct
AAERGPEVRI

SEQ ID NO: 24930 - protein, 10 aa, synthetic construct
AAERGPFTHN

SEQ ID NO: 24931 - protein, 10 aa, synthetic construct
AAERGPGKII

SEQ ID NO: 24932 - protein, 10 aa, synthetic construct
AAERGPYKLM

SEQ ID NO: 24933 - protein, 8 aa, synthetic construct
AAERGQDH

SEQ ID NO: 24934 - protein, 10 aa, synthetic construct
AAERGQEKLI

SEQ ID NO: 24935 - protein, 10 aa, synthetic construct
AAERGQHKII

SEQ ID NO: 24936 - protein, 10 aa, synthetic construct
AAERGRATLI

SEQ ID NO: 24937 - protein, 10 aa, synthetic construct
AAERGRDKLV

SEQ ID NO: 24938 - protein, 10 aa, synthetic construct
AAERGRDKLY

SEQ ID NO: 24939 - protein, 10 aa, synthetic construct
AAERGRDQLI

SEQ ID NO: 24940 - protein, 10 aa, synthetic construct
AAERGRDRVI

SEQ ID NO: 24941 - protein, 10 aa, synthetic construct
AAERGREILI

SEQ ID NO: 24942 - protein, 10 aa, synthetic construct
AAERGREKRI

SEQ ID NO: 24943 - protein, 10 aa, synthetic construct
AAERGRGTLI

SEQ ID NO: 24944 - protein, 10 aa, synthetic construct
AAERGRYKLI

SEQ ID NO: 24945 - protein, 10 aa, synthetic construct
AAERGTDKIN

SEQ ID NO: 24946 - protein, 10 aa, synthetic construct
AAERPPQKHN

SEQ ID NO: 24947 - protein, 10 aa, synthetic construct
AAERRPDKHN

SEQ ID NO: 24948 - protein, 10 aa, synthetic construct
AAERRPDKLN

SEQ ID NO: 24949 - protein, 10 aa, synthetic construct
AAERRPDNLI

SEQ ID NO: 24950 - protein, 10 aa, synthetic construct
AAERRPDRLI

SEQ ID NO: 24951 - protein, 10 aa, synthetic construct
AAERVHDKLN

SEQ ID NO: 24952 - protein, 16 aa, synthetic construct
AAERVPCYVGMIMRPM

SEQ ID NO: 24953 - protein, 10 aa, synthetic construct
AAERVPDELI

SEQ ID NO: 24954 - protein, 10 aa, synthetic construct
AAERVPDKIN

SEQ ID NO: 24955 - protein, 10 aa, synthetic construct
AAERVPDTLI

SEQ ID NO: 24956 - protein, 10 aa, synthetic construct
AAERVPEKLN

SEQ ID NO: 24957 - protein, 10 aa, synthetic construct
AAERGPYKII

SEQ ID NO: 24958 - protein, 10 aa, synthetic construct
AAERGPYKHN

SEQ ID NO: 24959 - protein, 10 aa, synthetic construct
AAERGPYKHI

SEQ ID NO: 24960 - protein, 11 aa, synthetic construct
AAERGPSFTGG

SEQ ID NO: 24961 - protein, 10 aa, synthetic construct
AAERGPGKLN

SEQ ID NO: 24962 - protein, 10 aa, synthetic construct
AAERGPGKSI

SEQ ID NO: 24963 - protein, 10 aa, synthetic construct
AAERGPGPLI

SEQ ID NO: 24964 - protein, 10 aa, synthetic construct
AAERGPGTLI

SEQ ID NO: 24965 - protein, 10 aa, synthetic construct
AAERGPHKHI

SEQ ID NO: 24966 - protein, 10 aa, synthetic construct
AAERGPHKLN

SEQ ID NO: 24967 - protein, 10 aa, synthetic construct
AAERGPHKNI

SEQ ID NO: 24968 - protein, 9 aa, synthetic construct
AAERGPITH

SEQ ID NO: 24969 - protein, 10 aa, synthetic construct
AAERGPLKHI

SEQ ID NO: 24970 - protein, 10 aa, synthetic construct
AAERGPNKHI

SEQ ID NO: 24971 - protein, 10 aa, synthetic construct
AAERGPNNLI

SEQ ID NO: 24972 - protein, 15 aa, synthetic construct
AAERGPSYVGGPPPP

SEQ ID NO: 24973 - protein, 10 aa, synthetic construct
AAERGPVTLS

SEQ ID NO: 24974 - protein, 10 aa, synthetic construct
AAERGPTKLI

SEQ ID NO: 24975 - protein, 10 aa, synthetic construct
AAERGPVKHI

SEQ ID NO: 24976 - protein, 10 aa, synthetic construct
AAERGPVKII

SEQ ID NO: 24977 - protein, 10 aa, synthetic construct
AAERGPVKLN

SEQ ID NO: 24978 - protein, 10 aa, synthetic construct
AAERGPVKLS

SEQ ID NO: 24979 - protein, 10 aa, synthetic construct
AAERGPVKRL

SEQ ID NO: 24980 - protein, 10 aa, synthetic construct
AAERGPVNII

SEQ ID NO: 24981 - protein, 10 aa, synthetic construct
AAERGPVNLF

SEQ ID NO: 24982 - protein, 10 aa, synthetic construct
AAERGPVNLI

SEQ ID NO: 24983 - protein, 10 aa, synthetic construct
AAERGPVQLI

SEQ ID NO: 24984 - protein, 10 aa, synthetic construct
AAERGPVTLI

SEQ ID NO: 24985 - protein, 16 aa, synthetic construct
AAIGLPSLGVHTDKII

SEQ ID NO: 24986 - protein, 11 aa, synthetic construct
AAILGDTVKLI

SEQ ID NO: 24987 - protein, 11 aa, synthetic construct
AAILLDTLTLN

SEQ ID NO: 24988 - protein, 14 aa, synthetic construct
AAPRGGYGSTDTRI

SEQ ID NO: 24989 - protein, 14 aa, synthetic construct
AAPRGGYGYTDNLI

SEQ ID NO: 24990 - protein, 14 aa, synthetic construct
AAPRGGYGYTDQLI

SEQ ID NO: 24991 - protein, 14 aa, synthetic construct
AAPRGGYGYTDQLN

SEQ ID NO: 24992 - protein, 14 aa, synthetic construct
AAPRGRDSLNDLLI

SEQ ID NO: 24993 - protein, 14 aa, synthetic construct
AAPRVRYGYTDQLL

SEQ ID NO: 24994 - protein, 14 aa, synthetic construct
AAPSGDTGTPIKSS

SEQ ID NO: 24995 - protein, 14 aa, synthetic construct
AAPSGGDGYTDPLI

SEQ ID NO: 24996 - protein, 14 aa, synthetic construct
AAPSGGSGYPDHLS

SEQ ID NO: 24997 - protein, 14 aa, synthetic construct
AAPSGGSGYTDILI

SEQ ID NO: 24998 - protein, 13 aa, synthetic construct
AAPSGGSGYTDTL

SEQ ID NO: 24999 - protein, 14 aa, synthetic construct
AAPSGGYAYTDKLN

SEQ ID NO: 25000 - protein, 14 aa, synthetic construct
AAPSGGYGSSDKVI

SEQ ID NO: 25001 - protein, 14 aa, synthetic construct
AAPSGGYGSTDIVI

SEQ ID NO: 25002 - protein, 14 aa, synthetic construct
AAPSGGYGSTDKVF

SEQ ID NO: 25003 - protein, 14 aa, synthetic construct
AAPSGGYGSTDPLI

SEQ ID NO: 25004 - protein, 14 aa, synthetic construct
AAPSGGYGSTEKLI

SEQ ID NO: 25005 - protein, 14 aa, synthetic construct
AAPSGGYGYPENRI

SEQ ID NO: 25006 - protein, 14 aa, synthetic construct
AAPSGGYGYPETLI

SEQ ID NO: 25007 - protein, 14 aa, synthetic construct
AAPSGGYGYTAKLI

SEQ ID NO: 25008 - protein, 13 aa, synthetic construct
AAPSGGYGYTDKL

SEQ ID NO: 25009 - protein, 14 aa, synthetic construct
AAPSGGYGYTDKLL

SEQ ID NO: 25010 - protein, 14 aa, synthetic construct
AAPSGGYGYTDNLI

SEQ ID NO: 25011 - protein, 14 aa, synthetic construct
AAPSGGYGYTDQLI

SEQ ID NO: 25012 - protein, 14 aa, synthetic construct
AAPSGGYGYTDRLI

SEQ ID NO: 25013 - protein, 14 aa, synthetic construct
AAPSGGYWYSDILI

SEQ ID NO: 25014 - protein, 14 aa, synthetic construct
AAPRGGYGYTAKLI

SEQ ID NO: 25015 - protein, 14 aa, synthetic construct
AAPRGGYGSTDKII

SEQ ID NO: 25016 - protein, 14 aa, synthetic construct
AAPPGGYGYPDQLI

SEQ ID NO: 25017 - protein, 14 aa, synthetic construct
AAPRGGYGHTDTLI

SEQ ID NO: 25018 - protein, 14 aa, synthetic construct
AAPPGGYGYSAKLI

SEQ ID NO: 25019 - protein, 14 aa, synthetic construct
AAPPGGYGYSDKLI

SEQ ID NO: 25020 - protein, 10 aa, synthetic construct
AAPPGGYGYT

SEQ ID NO: 25021 - protein, 14 aa, synthetic construct
AAPPGGYGYTAILI

SEQ ID NO: 25022 - protein, 14 aa, synthetic construct
AAPPGGYGYTANLI

SEQ ID NO: 25023 - protein, 11 aa, synthetic construct
AAPPGGYGYTD

SEQ ID NO: 25024 - protein, 12 aa, synthetic construct
AAPPGGYGYTDK

SEQ ID NO: 25025 - protein, 14 aa, synthetic construct
AAPPGGYGYTDKHI

SEQ ID NO: 25026 - protein, 14 aa, synthetic construct
AAPPGGYGYTDKLN

SEQ ID NO: 25027 - protein, 14 aa, synthetic construct
AAPPGGYGYTDKLT

SEQ ID NO: 25028 - protein, 14 aa, synthetic construct
AAPPGGYGYTDKPI

SEQ ID NO: 25029 - protein, 14 aa, synthetic construct
AAPPGGYGYTDKVI

SEQ ID NO: 25030 - protein, 14 aa, synthetic construct
AAPPGGYGYTDLLI

SEQ ID NO: 25031 - protein, 14 aa, synthetic construct
AAPPGGYGYTDNRI

SEQ ID NO: 25032 - protein, 14 aa, synthetic construct
AAPPGGYGYTDQLN

SEQ ID NO: 25033 - protein, 14 aa, synthetic construct
AAPPGGYGYTEKLN

SEQ ID NO: 25034 - protein, 14 aa, synthetic construct
AAPPGGYGYTEKRS

SEQ ID NO: 25035 - protein, 14 aa, synthetic construct
AAPPGGYGYTETHI

SEQ ID NO: 25036 - protein, 14 aa, synthetic construct
AAPPGGYGYTETRI

SEQ ID NO: 25037 - protein, 14 aa, synthetic construct
AAPPGGYGYTHKLI

SEQ ID NO: 25038 - protein, 14 aa, synthetic construct
AAPPGGYGYTVILI

SEQ ID NO: 25039 - protein, 14 aa, synthetic construct
AAPPGGYRYTDKVI

SEQ ID NO: 25040 - protein, 14 aa, synthetic construct
AAPPRGSGYTDKLI

SEQ ID NO: 25041 - protein, 14 aa, synthetic construct
AAPRGGCGYSDNLI

SEQ ID NO: 25042 - protein, 9 aa, synthetic construct
AAPRGGSGY

SEQ ID NO: 25043 - protein, 14 aa, synthetic construct
AAPSGRYGYTDKII

SEQ ID NO: 25044 - protein, 14 aa, synthetic construct
AAPSRGYGYTDKLI

SEQ ID NO: 25045 - protein, 14 aa, synthetic construct
AAPSRRYGYTDKLF

SEQ ID NO: 25046 - protein, 14 aa, synthetic construct
AAPTAGDGYTATDI

SEQ ID NO: 25047 - protein, 14 aa, synthetic construct
AAPTGGDAYTDKLI

SEQ ID NO: 25048 - protein, 14 aa, synthetic construct
AAPTGGDAYTDTLI

SEQ ID NO: 25049 - protein, 14 aa, synthetic construct
AAPTGGDGSSDKLM

SEQ ID NO: 25050 - protein, 14 aa, synthetic construct
AAPTGGDGSTDKRI

SEQ ID NO: 25051 - protein, 11 aa, synthetic construct
AAPTGGDGYPH

SEQ ID NO: 25052 - protein, 14 aa, synthetic construct
AAPTGGDGYTDKRI

SEQ ID NO: 25053 - protein, 14 aa, synthetic construct
AAPTGGDGYTDNGI

SEQ ID NO: 25054 - protein, 14 aa, synthetic construct
AAPTGGDGYTDNRI

SEQ ID NO: 25055 - protein, 14 aa, synthetic construct
AAPTGGDGYTDPLI

SEQ ID NO: 25056 - protein, 14 aa, synthetic construct
AAPTGGDGYTDTII

SEQ ID NO: 25057 - protein, 14 aa, synthetic construct
AAPTGGDGYTDTRI

SEQ ID NO: 25058 - protein, 14 aa, synthetic construct
AAPTGGFGYTDKII

SEQ ID NO: 25059 - protein, 11 aa, synthetic construct
AAPTGGGFNSS

SEQ ID NO: 25060 - protein, 14 aa, synthetic construct
AAPTGGGGYTDTLI

SEQ ID NO: 25061 - protein, 11 aa, synthetic construct
AAPTGGGLNSS

SEQ ID NO: 25062 - protein, 15 aa, synthetic construct
AAPTGGGPPTPINSS

SEQ ID NO: 25063 - protein, 14 aa, synthetic construct
AAPTGGHGSPDKLF

SEQ ID NO: 25064 - protein, 14 aa, synthetic construct
AAPTGGHGSTDKLV

SEQ ID NO: 25065 - protein, 14 aa, synthetic construct
AAPTGGHGYTAKLI

SEQ ID NO: 25066 - protein, 14 aa, synthetic construct
AAPTGGHGYTATLI

SEQ ID NO: 25067 - protein, 14 aa, synthetic construct
AAPTGGHGYTDKLV

SEQ ID NO: 25068 - protein, 14 aa, synthetic construct
AAPTGGHGYTDNLI

SEQ ID NO: 25069 - protein, 14 aa, synthetic construct
AAPTGGHGYTDTLI

SEQ ID NO: 25070 - protein, 10 aa, synthetic construct
AAPTGGLKSS

SEQ ID NO: 25071 - protein, 9 aa, synthetic construct
AAPTGGLNS

SEQ ID NO: 25072 - protein, 13 aa, synthetic construct
AAPTGGCTPITSS

SEQ ID NO: 25073 - protein, 13 aa, synthetic construct
AAPTGGCKPINSS

SEQ ID NO: 25074 - protein, 14 aa, synthetic construct
AAPTGGCGYTEKLI

SEQ ID NO: 25075 - protein, 8 aa, synthetic construct
AAPTGCTE

SEQ ID NO: 25076 - protein, 14 aa, synthetic construct
AAPTAGDGYTDKRI

SEQ ID NO: 25077 - protein, 14 aa, synthetic construct
AAPTAGYANTDKLI

SEQ ID NO: 25078 - protein, 15 aa, synthetic construct
AAPTAGYGTPETRNY

SEQ ID NO: 25079 - protein, 13 aa, synthetic construct
AAPTAGYGYTDKL

SEQ ID NO: 25080 - protein, 14 aa, synthetic construct
AAPTEGYGSTDKLI

SEQ ID NO: 25081 - protein, 14 aa, synthetic construct
AAPTEGYGYTAKLI

SEQ ID NO: 25082 - protein, 14 aa, synthetic construct
AAPTEGYGYTDTVI

SEQ ID NO: 25083 - protein, 14 aa, synthetic construct
AAPTGASGYTEKLI

SEQ ID NO: 25084 - protein, 14 aa, synthetic construct
AAPTGAYGYTDNLI

SEQ ID NO: 25085 - protein, 14 aa, synthetic construct
AAPTGAYGYTDQLF

SEQ ID NO: 25086 - protein, 11 aa, synthetic construct
AAPTGAYTYNY

SEQ ID NO: 25087 - protein, 14 aa, synthetic construct
AAPTGDPGTPITSS

SEQ ID NO: 25088 - protein, 14 aa, synthetic construct
AAPTGGCGYTDQLI

SEQ ID NO: 25089 - protein, 14 aa, synthetic construct
AAPTGDTGKPINSS

SEQ ID NO: 25090 - protein, 14 aa, synthetic construct
AAPTGDTGTPIHSS

SEQ ID NO: 25091 - protein, 13 aa, synthetic construct
AAPTGDTGTPINS

SEQ ID NO: 25092 - protein, 14 aa, synthetic construct
AAPTGDTGTPRNSS

SEQ ID NO: 25093 - protein, 14 aa, synthetic construct
AAPTGDYGYTEKVI

SEQ ID NO: 25094 - protein, 14 aa, synthetic construct
AAPTGEYGYTDILI

SEQ ID NO: 25095 - protein, 6 aa, synthetic construct
AAPTGG

SEQ ID NO: 25096 - protein, 14 aa, synthetic construct
AAPTGGAGYTDKLI

SEQ ID NO: 25097 - protein, 14 aa, synthetic construct
AAPTGGAGYTDTLI

SEQ ID NO: 25098 - protein, 14 aa, synthetic construct
AAPTGGCGYTDKRI

SEQ ID NO: 25099 - protein, 14 aa, synthetic construct
AAPTGGCGYTDNLI

SEQ ID NO: 25100 - protein, 14 aa, synthetic construct
AAPPGGYGYSAKLF

SEQ ID NO: 25101 - protein, 11 aa, synthetic construct
AAPPGGYGYPD

SEQ ID NO: 25102 - protein, 11 aa, synthetic construct
AAILLETVKII

SEQ ID NO: 25103 - protein, 13 aa, synthetic construct
AALVLRWWGIKLI

SEQ ID NO: 25104 - protein, 11 aa, synthetic construct
AALVRHRGHLI

SEQ ID NO: 25105 - protein, 13 aa, synthetic construct
AAMVLRWWGFELI

SEQ ID NO: 25106 - protein, 13 aa, synthetic construct
AANALRWWGIKLI

SEQ ID NO: 25107 - protein, 13 aa, synthetic construct
AANVLRWWGSQLS

SEQ ID NO: 25108 - protein, 6 aa, synthetic construct
AAPAGG

SEQ ID NO: 25109 - protein, 14 aa, synthetic construct
AAPAGGSGDTGPLI

SEQ ID NO: 25110 - protein, 8 aa, synthetic construct
AAPAGGWG

SEQ ID NO: 25111 - protein, 14 aa, synthetic construct
AAPAGGYGCTEKRF

SEQ ID NO: 25112 - protein, 14 aa, synthetic construct
AAPAGGYGDTDKLI

SEQ ID NO: 25113 - protein, 14 aa, synthetic construct
AAPAGGYGYADKLI

SEQ ID NO: 25114 - protein, 14 aa, synthetic construct
AAPAGGYGYTDKLF

SEQ ID NO: 25115 - protein, 14 aa, synthetic construct
AAPAGGYGYTDKRF

SEQ ID NO: 25116 - protein, 14 aa, synthetic construct
AAPAGGYGYTDKVI

SEQ ID NO: 25117 - protein, 14 aa, synthetic construct
AAPAGGYGYTDTLI

SEQ ID NO: 25118 - protein, 14 aa, synthetic construct
AAPARRSVGCETLN

SEQ ID NO: 25119 - protein, 14 aa, synthetic construct
AAPDVGYGYTDKLI

SEQ ID NO: 25120 - protein, 11 aa, synthetic construct
AAPGGGDGYTD

SEQ ID NO: 25121 - protein, 15 aa, synthetic construct
AAPGLPSVWVHTDKL

SEQ ID NO: 25122 - protein, 13 aa, synthetic construct
AAPGLRCWGLKVN

SEQ ID NO: 25123 - protein, 14 aa, synthetic construct
AAPHGGYGYTVKLI

SEQ ID NO: 25124 - protein, 14 aa, synthetic construct
AAPIGGYGYTDNLI

SEQ ID NO: 25125 - protein, 15 aa, synthetic construct
AAPKAFIRRGAPYTD

SEQ ID NO: 25126 - protein, 15 aa, synthetic construct
AAPKAFLRRGAHYTD

SEQ ID NO: 25127 - protein, 15 aa, synthetic construct
AAPKAFLRRGAPSTD

SEQ ID NO: 25128 - protein, 12 aa, synthetic construct
AAPKGGIGSAET

SEQ ID NO: 25129 - protein, 13 aa, synthetic construct
AALVLRWWGIKVI

SEQ ID NO: 25130 - protein, 16 aa, synthetic construct
AALVLPSLGVHTDKLI

SEQ ID NO: 25131 - protein, 14 aa, synthetic construct
AAPPGGYGSTETLI

SEQ ID NO: 25132 - protein, 11 aa, synthetic construct
AALVGETVKLI

SEQ ID NO: 25133 - protein, 10 aa, synthetic construct
AAILVRGWLI

SEQ ID NO: 25134 - protein, 13 aa, synthetic construct
AAIVIRWWGIKLI

SEQ ID NO: 25135 - protein, 6 aa, synthetic construct
AAIVLG

SEQ ID NO: 25136 - protein, 15 aa, synthetic construct
AAIVLLRCVMKLVLG

SEQ ID NO: 25137 - protein, 13 aa, synthetic construct
AAIVLPWRGINLN

SEQ ID NO: 25138 - protein, 6 aa, synthetic construct
AAIVLR

SEQ ID NO: 25139 - protein, 13 aa, synthetic construct
AAIVLRRGGLKLI

SEQ ID NO: 25140 - protein, 13 aa, synthetic construct
AAIVLRWRGIIVI

SEQ ID NO: 25141 - protein, 13 aa, synthetic construct
AAIVLRWRGIKHI

SEQ ID NO: 25142 - protein, 13 aa, synthetic construct
AAIVLRWWGFKLI

SEQ ID NO: 25143 - protein, 13 aa, synthetic construct
AAIVLRWWGIKLF

SEQ ID NO: 25144 - protein, 13 aa, synthetic construct
AAIVLRWWGIYSS

SEQ ID NO: 25145 - protein, 13 aa, synthetic construct
AAIVQRWWGIKLI

SEQ ID NO: 25146 - protein, 10 aa, synthetic construct
AAKIGPDKII

SEQ ID NO: 25147 - protein, 13 aa, synthetic construct
AALDISWWGIKLS

SEQ ID NO: 25148 - protein, 13 aa, synthetic construct
AALDLRWWGIKVR

SEQ ID NO: 25149 - protein, 16 aa, synthetic construct
AALGRRSLGVHSDKLI

SEQ ID NO: 25150 - protein, 11 aa, synthetic construct
AALLCIRLNSS

SEQ ID NO: 25151 - protein, 11 aa, synthetic construct
AALLGDTGKLI

SEQ ID NO: 25152 - protein, 11 aa, synthetic construct
AALLGDTVKII

SEQ ID NO: 25153 - protein, 11 aa, synthetic construct
AALLGDTVKVI

SEQ ID NO: 25154 - protein, 11 aa, synthetic construct
AALLGVTGKHY

SEQ ID NO: 25155 - protein, 14 aa, synthetic construct
AALQGDTGTPKNTS

SEQ ID NO: 25156 - protein, 11 aa, synthetic construct
AALQGDTVKLI

SEQ ID NO: 25157 - protein, 14 aa, synthetic construct
AALTGGYGYTDNLI

SEQ ID NO: 25158 - protein, 14 aa, synthetic construct
AAPKGGYGSTDKLI

SEQ ID NO: 25159 - protein, 13 aa, synthetic construct
AAPKRRYWSREII

SEQ ID NO: 25160 - protein, 13 aa, synthetic construct
AAPLGETGKHQKL

SEQ ID NO: 25161 - protein, 15 aa, synthetic construct
AAPNAFLRRGPPYTD

SEQ ID NO: 25162 - protein, 12 aa, synthetic construct
AAPPGGSGYTAH

SEQ ID NO: 25163 - protein, 14 aa, synthetic construct
AAPPGGSGYTAKLI

SEQ ID NO: 25164 - protein, 12 aa, synthetic construct
AAPPGGTGDTEK

SEQ ID NO: 25165 - protein, 14 aa, synthetic construct
AAPPGGYGATDQRI

SEQ ID NO: 25166 - protein, 14 aa, synthetic construct
AAPPGGYGCSDTLI

SEQ ID NO: 25167 - protein, 11 aa, synthetic construct
AAPPGGYGDTD

SEQ ID NO: 25168 - protein, 14 aa, synthetic construct
AAPPGGYGDTDKRI

SEQ ID NO: 25169 - protein, 14 aa, synthetic construct
AAPPGGYGDTDNLI

SEQ ID NO: 25170 - protein, 14 aa, synthetic construct
AAPPGGYGDTDQLI

SEQ ID NO: 25171 - protein, 11 aa, synthetic construct
AAPPGGYGSPD

SEQ ID NO: 25172 - protein, 14 aa, synthetic construct
AAPPGGYGSPDNLI

SEQ ID NO: 25173 - protein, 14 aa, synthetic construct
AAPPGGYGSPDNRI

SEQ ID NO: 25174 - protein, 14 aa, synthetic construct
AAPPGGYGSPEKLI

SEQ ID NO: 25175 - protein, 14 aa, synthetic construct
AAPPGGYGSPEKRI

SEQ ID NO: 25176 - protein, 13 aa, synthetic construct
AAPPGGYGSTAKL

SEQ ID NO: 25177 - protein, 14 aa, synthetic construct
AAPPGGYGSTAKLI

SEQ ID NO: 25178 - protein, 14 aa, synthetic construct
AAPPGGYGSTDILM

SEQ ID NO: 25179 - protein, 14 aa, synthetic construct
AAPPGGYGSTDKII

SEQ ID NO: 25180 - protein, 14 aa, synthetic construct
AAPPGGYGSTDKLN

SEQ ID NO: 25181 - protein, 14 aa, synthetic construct
AAPPGGYGSTDNPI

SEQ ID NO: 25182 - protein, 14 aa, synthetic construct
AAPPGGYGSTDQLI

SEQ ID NO: 25183 - protein, 14 aa, synthetic construct
AAPPGGYGSTDQRI

SEQ ID NO: 25184 - protein, 14 aa, synthetic construct
AAPPGGYGSTDRLI

SEQ ID NO: 25185 - protein, 14 aa, synthetic construct
AAPPGGYGSTDRRI

SEQ ID NO: 25186 - protein, 14 aa, synthetic construct
AAPPGGYGSTENLI

SEQ ID NO: 25187 - protein, 14 aa, synthetic construct
AAPPGGSGYPEKRI

SEQ ID NO: 25188 - protein, 14 aa, synthetic construct
AAPPGGSGSTETLI

SEQ ID NO: 25189 - protein, 14 aa, synthetic construct
AAPPGGSGSPDTLI

SEQ ID NO: 25190 - protein, 14 aa, synthetic construct
AAPNVGYGYNDKII

SEQ ID NO: 25191 - protein, 6 aa, synthetic construct
AAPNGG

SEQ ID NO: 25192 - protein, 14 aa, synthetic construct
AAPNGGSGYTDKLI

SEQ ID NO: 25193 - protein, 14 aa, synthetic construct
AAPNGGYGDTDTLI

SEQ ID NO: 25194 - protein, 14 aa, synthetic construct
AAPNGGYGSTDKLI

SEQ ID NO: 25195 - protein, 14 aa, synthetic construct
AAPNGGYGYTDKHI

SEQ ID NO: 25196 - protein, 14 aa, synthetic construct
AAPNGGYGYTDKLF

SEQ ID NO: 25197 - protein, 14 aa, synthetic construct
AAPNGGYGYTDKVI

SEQ ID NO: 25198 - protein, 14 aa, synthetic construct
AAPNGGYRSTDKRI

SEQ ID NO: 25199 - protein, 14 aa, synthetic construct
AAPNGVYGYSDKLI

SEQ ID NO: 25200 - protein, 14 aa, synthetic construct
AAPNGVYGYTDTLI

SEQ ID NO: 25201 - protein, 15 aa, synthetic construct
AAPNRVIRRGDHNRD

SEQ ID NO: 25202 - protein, 14 aa, synthetic construct
AAPNVGYGYTDKLI

SEQ ID NO: 25203 - protein, 14 aa, synthetic construct
AAPPGGSGDTDKLI

SEQ ID NO: 25204 - protein, 14 aa, synthetic construct
AAPNVGYWYTDKLI

SEQ ID NO: 25205 - protein, 5 aa, synthetic construct
AAPPG

SEQ ID NO: 25206 - protein, 11 aa, synthetic construct
AAPPGASGYPD

SEQ ID NO: 25207 - protein, 14 aa, synthetic construct
AAPPGAYGSPDKRS

SEQ ID NO: 25208 - protein, 14 aa, synthetic construct
AAPPGAYGYTDKLF

SEQ ID NO: 25209 - protein, 14 aa, synthetic construct
AAPPGGAPYTDKLI

SEQ ID NO: 25210 - protein, 14 aa, synthetic construct
AAPPGGCGSTEKLI

SEQ ID NO: 25211 - protein, 14 aa, synthetic construct
AAPPGGDGSSDTLI

SEQ ID NO: 25212 - protein, 14 aa, synthetic construct
AAPPGGDGYTDKLI

SEQ ID NO: 25213 - protein, 14 aa, synthetic construct
AAPPGGPPTPINSS

SEQ ID NO: 25214 - protein, 10 aa, synthetic construct
AAPPGGSGDT

SEQ ID NO: 25215 - protein, 10 aa, synthetic construct
AAERGPDHLF

SEQ ID NO: 25216 - protein, 10 aa, synthetic construct
AAERGPDHHI

SEQ ID NO: 25217 - protein, 11 aa, synthetic construct
AAVLGDRGKLV

SEQ ID NO: 25218 - protein, 15 aa, synthetic construct
AAAKAVLRRGGPSTG

SEQ ID NO: 25219 - protein, 15 aa, synthetic construct
AAAKAVLRRRAPYTD

SEQ ID NO: 25220 - protein, 15 aa, synthetic construct
AAAKAVQRRGAPYTD

SEQ ID NO: 25221 - protein, 15 aa, synthetic construct
AAAKAVRRRGAPSTD

SEQ ID NO: 25222 - protein, 12 aa, synthetic construct
AAAKAVVRSAAT

SEQ ID NO: 25223 - protein, 15 aa, synthetic construct
AAAKAYIRRAAPYTD

SEQ ID NO: 25224 - protein, 15 aa, synthetic construct
AAAKAYLRRGALYTD

SEQ ID NO: 25225 - protein, 15 aa, synthetic construct
AAAKAYLRRGAPNTD

SEQ ID NO: 25226 - protein, 15 aa, synthetic construct
AAAKAYLRRGATYTD

SEQ ID NO: 25227 - protein, 15 aa, synthetic construct
AAAKAYLRRGYGYTD

SEQ ID NO: 25228 - protein, 15 aa, synthetic construct
AAAKAYRRRGAPYTD

SEQ ID NO: 25229 - protein, 14 aa, synthetic construct
AAAKDFIRRGAPYT

SEQ ID NO: 25230 - protein, 15 aa, synthetic construct
AAAKDFLPSRAPYTD

SEQ ID NO: 25231 - protein, 14 aa, synthetic construct
AAAKDFLRRGAPYT

SEQ ID NO: 25232 - protein, 15 aa, synthetic construct
AAAKGFLRRGAPHSY

SEQ ID NO: 25233 - protein, 15 aa, synthetic construct
AAAKGFLRRGAPSTD

SEQ ID NO: 25234 - protein, 14 aa, synthetic construct
AAAKGSQRLWSANS

SEQ ID NO: 25235 - protein, 15 aa, synthetic construct
AAAKGVIRRGAPYTD

SEQ ID NO: 25236 - protein, 6 aa, synthetic construct
AAAKHN

SEQ ID NO: 25237 - protein, 15 aa, synthetic construct
AAAKPFIRRGAPYTD

SEQ ID NO: 25238 - protein, 14 aa, synthetic construct
AAAKPFLRRGAPDT

SEQ ID NO: 25239 - protein, 15 aa, synthetic construct
AAAKPFLRRGVPYTD

SEQ ID NO: 25240 - protein, 15 aa, synthetic construct
AAAKPFRRRGDPYTD

SEQ ID NO: 25241 - protein, 15 aa, synthetic construct
AAAKPILRRGAPYTD

SEQ ID NO: 25242 - protein, 12 aa, synthetic construct
AAAKPLLRWGDP

SEQ ID NO: 25243 - protein, 7 aa, synthetic construct
AAAKPYL

SEQ ID NO: 25244 - protein, 16 aa, synthetic construct
AAAKAVLRRGPPTPIN

SEQ ID NO: 25245 - protein, 15 aa, synthetic construct
AAAKAVLRRGAPNTD

SEQ ID NO: 25246 - protein, 15 aa, synthetic construct
AAAKSFLRRGAPYTD

SEQ ID NO: 25247 - protein, 14 aa, synthetic construct
AAAKAVLRRGAPNT

SEQ ID NO: 25248 - protein, 15 aa, synthetic construct
AAAKAFVRRGATYTD

SEQ ID NO: 25249 - protein, 16 aa, synthetic construct
AAAKAFVRRGDTVKLI

SEQ ID NO: 25250 - protein, 15 aa, synthetic construct
AAAKAFVRRGGSKVI

SEQ ID NO: 25251 - protein, 15 aa, synthetic construct
AAAKAFVRRGYGHTD

SEQ ID NO: 25252 - protein, 13 aa, synthetic construct
AAAKAGRRRGAPD

SEQ ID NO: 25253 - protein, 15 aa, synthetic construct
AAAKAIIRMGSPYTD

SEQ ID NO: 25254 - protein, 8 aa, synthetic construct
AAAKAILR

SEQ ID NO: 25255 - protein, 15 aa, synthetic construct
AAAKAILRRGAPSTD

SEQ ID NO: 25256 - protein, 15 aa, synthetic construct
AAAKAILRRGGPLHR

SEQ ID NO: 25257 - protein, 10 aa, synthetic construct
AAAKAKPSVF

SEQ ID NO: 25258 - protein, 15 aa, synthetic construct
AAAKALLLRGAPYTD

SEQ ID NO: 25259 - protein, 8 aa, synthetic construct
AAAKALLR

SEQ ID NO: 25260 - protein, 16 aa, synthetic construct
AAAKALLRRGHPTPIN

SEQ ID NO: 25261 - protein, 8 aa, synthetic construct
AAAKANQQ

SEQ ID NO: 25262 - protein, 15 aa, synthetic construct
AAAKANQRILSPNTY

SEQ ID NO: 25263 - protein, 9 aa, synthetic construct
AAAKARQTH

SEQ ID NO: 25264 - protein, 9 aa, synthetic construct
AAAKARSTH

SEQ ID NO: 25265 - protein, 15 aa, synthetic construct
AAAKASLRGGPPPPI

SEQ ID NO: 25266 - protein, 16 aa, synthetic construct
AAAKASLRGGPPTPIN

SEQ ID NO: 25267 - protein, 16 aa, synthetic construct
AAAKASLRRGAPTPIN

SEQ ID NO: 25268 - protein, 14 aa, synthetic construct
AAAKASLRRGAPYT

SEQ ID NO: 25269 - protein, 15 aa, synthetic construct
AAAKASYVGGGLNSS

SEQ ID NO: 25270 - protein, 14 aa, synthetic construct
AAAKAVLRRAAPNT

SEQ ID NO: 25271 - protein, 15 aa, synthetic construct
AAAKAVLRRGAPCTD

SEQ ID NO: 25272 - protein, 14 aa, synthetic construct
AAAKAVLRRGAPDT

SEQ ID NO: 25273 - protein, 15 aa, synthetic construct
AAAKSFLRRGAPNTD

SEQ ID NO: 25274 - protein, 9 aa, synthetic construct
AAAKSFRRR

SEQ ID NO: 25275 - protein, 10 aa, synthetic construct
AAERGPDELL

SEQ ID NO: 25276 - protein, 15 aa, synthetic construct
AAAQAFLRRGGSKLI

SEQ ID NO: 25277 - protein, 16 aa, synthetic construct
AAAQAFLRRRPPTPIN

SEQ ID NO: 25278 - protein, 15 aa, synthetic construct
AAAQAFPRRGAPYTD

SEQ ID NO: 25279 - protein, 14 aa, synthetic construct
AAAQAFRRRGAPNT

SEQ ID NO: 25280 - protein, 15 aa, synthetic construct
AAAQAFRRRGAPYTD

SEQ ID NO: 25281 - protein, 14 aa, synthetic construct
AAAQAFVRRGAPYT

SEQ ID NO: 25282 - protein, 15 aa, synthetic construct
AAAQAFVRRGGPSTD

SEQ ID NO: 25283 - protein, 13 aa, synthetic construct
AAAQAGVRRGAPD

SEQ ID NO: 25284 - protein, 15 aa, synthetic construct
AAAQALLRRGAPYTD

SEQ ID NO: 25285 - protein, 15 aa, synthetic construct
AAAQASLRRGAPYTD

SEQ ID NO: 25286 - protein, 14 aa, synthetic construct
AAAQAVLRRGAPDT

SEQ ID NO: 25287 - protein, 14 aa, synthetic construct
AAAQAVLRRGAPYT

SEQ ID NO: 25288 - protein, 15 aa, synthetic construct
AAAQAVLRRGAPYTG

SEQ ID NO: 25289 - protein, 15 aa, synthetic construct
AAAQAVQRRGAPYTD

SEQ ID NO: 25290 - protein, 14 aa, synthetic construct
AAAQGFLRRGAPYT

SEQ ID NO: 25291 - protein, 14 aa, synthetic construct
AAAQGVLRRGARDT

SEQ ID NO: 25292 - protein, 15 aa, synthetic construct
AAAQPFLRRGAPYTD

SEQ ID NO: 25293 - protein, 4 aa, synthetic construct
AAAR

SEQ ID NO: 25294 - protein, 15 aa, synthetic construct
AAARACVRKGAPYTD

SEQ ID NO: 25295 - protein, 15 aa, synthetic construct
AAARAFLRRGGIKLI

SEQ ID NO: 25296 - protein, 16 aa, synthetic construct
AAARAFLRRGPPTPRN

SEQ ID NO: 25297 - protein, 8 aa, synthetic construct
AAARGGSG

SEQ ID NO: 25298 - protein, 10 aa, synthetic construct
AAARGPAKLI

SEQ ID NO: 25299 - protein, 10 aa, synthetic construct
AAARGPDKII

SEQ ID NO: 25300 - protein, 10 aa, synthetic construct
AAARGPDKLF

SEQ ID NO: 25301 - protein, 10 aa, synthetic construct
AAARGPDKLS

SEQ ID NO: 25302 - protein, 16 aa, synthetic construct
AAAQAFLRRGPPPPIN

SEQ ID NO: 25303 - protein, 15 aa, synthetic construct
AAAQAFLRRGGPYTD

SEQ ID NO: 25304 - protein, 15 aa, synthetic construct
AAAKTFLRRGAPSTD

SEQ ID NO: 25305 - protein, 15 aa, synthetic construct
AAAQAFLRRGGPDTD

SEQ ID NO: 25306 - protein, 14 aa, synthetic construct
AAAKTFLRRGAPYT

SEQ ID NO: 25307 - protein, 15 aa, synthetic construct
AAAKVFLRRGAPSTD

SEQ ID NO: 25308 - protein, 15 aa, synthetic construct
AAAKVLIRRRAPYTD

SEQ ID NO: 25309 - protein, 11 aa, synthetic construct
AAALGDTAKLI

SEQ ID NO: 25310 - protein, 11 aa, synthetic construct
AAALGDTVKLT

SEQ ID NO: 25311 - protein, 15 aa, synthetic construct
AAAMAFLSRGAPSTD

SEQ ID NO: 25312 - protein, 15 aa, synthetic construct
AAAMSFLRRGAPYTD

SEQ ID NO: 25313 - protein, 8 aa, synthetic construct
AAANAFLR

SEQ ID NO: 25314 - protein, 14 aa, synthetic construct
AAANAFLRRGAPDT

SEQ ID NO: 25315 - protein, 15 aa, synthetic construct
AAANAFLRRGAPNTD

SEQ ID NO: 25316 - protein, 14 aa, synthetic construct
AAANAFLRRGAPYT

SEQ ID NO: 25317 - protein, 14 aa, synthetic construct
AAANALLRRGATYT

SEQ ID NO: 25318 - protein, 14 aa, synthetic construct
AAANAPEPLWSPNS

SEQ ID NO: 25319 - protein, 13 aa, synthetic construct
AAANAVDGNGEPD

SEQ ID NO: 25320 - protein, 11 aa, synthetic construct
AAANGVYGYTD

SEQ ID NO: 25321 - protein, 15 aa, synthetic construct
AAAPAFLRRGGPATP

SEQ ID NO: 25322 - protein, 6 aa, synthetic construct
AAAPGG

SEQ ID NO: 25323 - protein, 14 aa, synthetic construct
AAAPGGSGYTDELI

SEQ ID NO: 25324 - protein, 14 aa, synthetic construct
AAAPGGYGYTAKLI

SEQ ID NO: 25325 - protein, 14 aa, synthetic construct
AAAQACLRRGAPDT

SEQ ID NO: 25326 - protein, 15 aa, synthetic construct
AAAQACLRRGGPSTD

SEQ ID NO: 25327 - protein, 15 aa, synthetic construct
AAAQAFLLRGAPYTD

SEQ ID NO: 25328 - protein, 15 aa, synthetic construct
AAAQAFLRGGAPYSD

SEQ ID NO: 25329 - protein, 15 aa, synthetic construct
AAAQAFLRRGAPYSD

SEQ ID NO: 25330 - protein, 15 aa, synthetic construct
AAAQAFLRRGGIKLI

SEQ ID NO: 25331 - protein, 15 aa, synthetic construct
AAAKAFVRRGASHTD

SEQ ID NO: 25332 - protein, 15 aa, synthetic construct
AAAKAFVRRGAPYAD

SEQ ID NO: 25333 - protein, 15 aa, synthetic construct
AAAKAFVLRGAPYTD

SEQ ID NO: 25334 - protein, 15 aa, synthetic construct
AAAKAFLCRGAPYTD

SEQ ID NO: 25335 - protein, 15 aa, synthetic construct
AAAKAFLGRGAPSTD

SEQ ID NO: 25336 - protein, 16 aa, synthetic construct
AAAKAFLGRGSTPINS

SEQ ID NO: 25337 - protein, 15 aa, synthetic construct
AAAKAFLGRGYGYTD

SEQ ID NO: 25338 - protein, 16 aa, synthetic construct
AAAKAFLHRGSTPRNS

SEQ ID NO: 25339 - protein, 16 aa, synthetic construct
AAAKAFLLGDTGPPIN

SEQ ID NO: 25340 - protein, 16 aa, synthetic construct
AAAKAFLLGDTGTPRN

SEQ ID NO: 25341 - protein, 15 aa, synthetic construct
AAAKAFLLRGAPNTD

SEQ ID NO: 25342 - protein, 15 aa, synthetic construct
AAAKAFLLRGATSTD

SEQ ID NO: 25343 - protein, 16 aa, synthetic construct
AAAKAFLLRGPPTPIN

SEQ ID NO: 25344 - protein, 15 aa, synthetic construct
AAAKAFLLWWGIKLI

SEQ ID NO: 25345 - protein, 14 aa, synthetic construct
AAAKAFLPRGAPYT

SEQ ID NO: 25346 - protein, 15 aa, synthetic construct
AAAKAFLRKGAPYSD

SEQ ID NO: 25347 - protein, 14 aa, synthetic construct
AAAKAFLRKGAPYT

SEQ ID NO: 25348 - protein, 15 aa, synthetic construct
AAAKAFLRKGGPLHR

SEQ ID NO: 25349 - protein, 14 aa, synthetic construct
AAAKAFLRKWAPYT

SEQ ID NO: 25350 - protein, 15 aa, synthetic construct
AAAKAFLRLGAPYTD

SEQ ID NO: 25351 - protein, 15 aa, synthetic construct
AAAKAFLRRGAASTD

SEQ ID NO: 25352 - protein, 15 aa, synthetic construct
AAAKAFLRRGALDTD

SEQ ID NO: 25353 - protein, 15 aa, synthetic construct
AAAKAFLRRGALSTD

SEQ ID NO: 25354 - protein, 14 aa, synthetic construct
AAAKAFLRRGALYT

SEQ ID NO: 25355 - protein, 15 aa, synthetic construct
AAAKAFLRRGAPATD

SEQ ID NO: 25356 - protein, 16 aa, synthetic construct
AAAKAFLRRGAPKPIN

SEQ ID NO: 25357 - protein, 15 aa, synthetic construct
AAAKAFLRRGAPRHR

SEQ ID NO: 25358 - protein, 15 aa, synthetic construct
AAAKAFLRRGAPSPD

SEQ ID NO: 25359 - protein, 14 aa, synthetic construct
AAAKAFLRRGAPST

SEQ ID NO: 25360 - protein, 15 aa, synthetic construct
AAAKAFLGRGAADTD

SEQ ID NO: 25361 - protein, 15 aa, synthetic construct
AAAKAFKRRGAPYTD

SEQ ID NO: 25362 - protein, 11 aa, synthetic construct
AAAKAFVGRGL

SEQ ID NO: 25363 - protein, 15 aa, synthetic construct
AAAKAFIRWGAPYTD

SEQ ID NO: 25364 - protein, 15 aa, synthetic construct
AAADAVLRRGAPYTD

SEQ ID NO: 25365 - protein, 14 aa, synthetic construct
AAAEACLRRGAPYT

SEQ ID NO: 25366 - protein, 14 aa, synthetic construct
AAAEAFLRRGAPYT

SEQ ID NO: 25367 - protein, 14 aa, synthetic construct
AAAEAGRRRGGPDT

SEQ ID NO: 25368 - protein, 15 aa, synthetic construct
AAAEGIRRRQAEAAA

SEQ ID NO: 25369 - protein, 15 aa, synthetic construct
AAAGLNADLLLVGLA

SEQ ID NO: 25370 - protein, 15 aa, synthetic construct
AAAIPFIRRGEPYTD

SEQ ID NO: 25371 - protein, 15 aa, synthetic construct
AAAKACKRRGAPYTD

SEQ ID NO: 25372 - protein, 15 aa, synthetic construct
AAAKACLRRGAASTD

SEQ ID NO: 25373 - protein, 15 aa, synthetic construct
AAAKACLRRGAHYTD

SEQ ID NO: 25374 - protein, 15 aa, synthetic construct
AAAKACLRRGAPFTD

SEQ ID NO: 25375 - protein, 15 aa, synthetic construct
AAAKACLRRGAPSSD

SEQ ID NO: 25376 - protein, 15 aa, synthetic construct
AAAKACLRRGGPRHR

SEQ ID NO: 25377 - protein, 15 aa, synthetic construct
AAAKACLRRGGPYTD

SEQ ID NO: 25378 - protein, 15 aa, synthetic construct
AAAKACLRWGAPYTD

SEQ ID NO: 25379 - protein, 15 aa, synthetic construct
AAAKACQRRGAPNTD

SEQ ID NO: 25380 - protein, 15 aa, synthetic construct
AAAKACRRRGAPSPD

SEQ ID NO: 25381 - protein, 14 aa, synthetic construct
AAAKACRRRGAPYT

SEQ ID NO: 25382 - protein, 15 aa, synthetic construct
AAAKACRRRGAPYTD

SEQ ID NO: 25383 - protein, 15 aa, synthetic construct
AAAKACVRRGAPSSD

SEQ ID NO: 25384 - protein, 8 aa, synthetic construct
AAAKAFGG

SEQ ID NO: 25385 - protein, 15 aa, synthetic construct
AAAKAFIRRGAPSTD

SEQ ID NO: 25386 - protein, 15 aa, synthetic construct
AAAKAFIRRGARSTD

SEQ ID NO: 25387 - protein, 15 aa, synthetic construct
AAAKAFIRRGDTYTD

SEQ ID NO: 25388 - protein, 15 aa, synthetic construct
AAAKAFIRSGAPYTD

SEQ ID NO: 25389 - protein, 14 aa, synthetic construct
AAAKAFLRRGAPTP

SEQ ID NO: 25390 - protein, 13 aa, synthetic construct
AAAKAFLRRGAPY

SEQ ID NO: 25391 - protein, 15 aa, synthetic construct
AAAKAFLRRGARETH

SEQ ID NO: 25392 - protein, 15 aa, synthetic construct
AAAKAFLRRGARSTH

SEQ ID NO: 25393 - protein, 15 aa, synthetic construct
AAAKAFLRRGTRVHR

SEQ ID NO: 25394 - protein, 16 aa, synthetic construct
AAAKAFLRRGVHTDKL

SEQ ID NO: 25395 - protein, 15 aa, synthetic construct
AAAKAFLRRRAPSTD

SEQ ID NO: 25396 - protein, 16 aa, synthetic construct
AAAKAFLRRRAPTPRN

SEQ ID NO: 25397 - protein, 16 aa, synthetic construct
AAAKAFLRRRPPTPIN

SEQ ID NO: 25398 - protein, 14 aa, synthetic construct
AAAKAFLRRWAHDT

SEQ ID NO: 25399 - protein, 15 aa, synthetic construct
AAAKAFLRRWGIKLI

SEQ ID NO: 25400 - protein, 15 aa, synthetic construct
AAAKAFLRSVSPYTD

SEQ ID NO: 25401 - protein, 15 aa, synthetic construct
AAAKAFLRWGAPCTD

SEQ ID NO: 25402 - protein, 15 aa, synthetic construct
AAAKAFLRWGAPSTD

SEQ ID NO: 25403 - protein, 14 aa, synthetic construct
AAAKAFLRWWGIKL

SEQ ID NO: 25404 - protein, 14 aa, synthetic construct
AAAKAFLRWWGSKL

SEQ ID NO: 25405 - protein, 15 aa, synthetic construct
AAAKAFLRWWGVKLI

SEQ ID NO: 25406 - protein, 15 aa, synthetic construct
AAAKAFLSRGAPNTD

SEQ ID NO: 25407 - protein, 15 aa, synthetic construct
AAAKAFLSRGAPYTD

SEQ ID NO: 25408 - protein, 15 aa, synthetic construct
AAAKAFLSRGDPYTD

SEQ ID NO: 25409 - protein, 15 aa, synthetic construct
AAAKAFMRRGAPYTD

SEQ ID NO: 25410 - protein, 15 aa, synthetic construct
AAAKAFPRWGAPYTD

SEQ ID NO: 25411 - protein, 7 aa, synthetic construct
AAAKAFQ

SEQ ID NO: 25412 - protein, 15 aa, synthetic construct
AAAKAFQLRGAPYTD

SEQ ID NO: 25413 - protein, 15 aa, synthetic construct
AAAKAFQRRAAPYTD

SEQ ID NO: 25414 - protein, 15 aa, synthetic construct
AAAKAFRRRGAPATD

SEQ ID NO: 25415 - protein, 15 aa, synthetic construct
AAAKAFRRRGAPDTD

SEQ ID NO: 25416 - protein, 15 aa, synthetic construct
AAAKAFRRRGAPYAD

SEQ ID NO: 25417 - protein, 15 aa, synthetic construct
AAAKAFRRRGIRVHR

SEQ ID NO: 25418 - protein, 16 aa, synthetic construct
AAAKAFLRRGSTPRNS

SEQ ID NO: 25419 - protein, 16 aa, synthetic construct
AAAKAFLRRGSPPINS

SEQ ID NO: 25420 - protein, 15 aa, synthetic construct
AAAKAFLRRGSGYTD

SEQ ID NO: 25421 - protein, 15 aa, synthetic construct
AAAKAFLRRGGPPTP

SEQ ID NO: 25422 - protein, 15 aa, synthetic construct
AAAKAFLRRGARYTD

SEQ ID NO: 25423 - protein, 15 aa, synthetic construct
AAAKAFLRRGASHTD

SEQ ID NO: 25424 - protein, 15 aa, synthetic construct
AAAKAFLRRGAVQLI

SEQ ID NO: 25425 - protein, 12 aa, synthetic construct
AAAKAFLRRGDP

SEQ ID NO: 25426 - protein, 15 aa, synthetic construct
AAAKAFLRRGDPSTD

SEQ ID NO: 25427 - protein, 16 aa, synthetic construct
AAAKAFLRRGDTAKLI

SEQ ID NO: 25428 - protein, 15 aa, synthetic construct
AAAKAFLRRGDTVKL

SEQ ID NO: 25429 - protein, 15 aa, synthetic construct
AAAKAFLRRGGIILI

SEQ ID NO: 25430 - protein, 14 aa, synthetic construct
AAAKAFLRRGGIKL

SEQ ID NO: 25431 - protein, 15 aa, synthetic construct
AAAKAFLRRGGINLI

SEQ ID NO: 25432 - protein, 15 aa, synthetic construct
AAAKAFLRRGGLKSS

SEQ ID NO: 25433 - protein, 15 aa, synthetic construct
AAAKAFLRRGGPSTD

SEQ ID NO: 25434 - protein, 15 aa, synthetic construct
AAAKAFLRRGSGSTD

SEQ ID NO: 25435 - protein, 15 aa, synthetic construct
AAAKAFLRRGGSQLI

SEQ ID NO: 25436 - protein, 15 aa, synthetic construct
AAAKAFLRRGGVNSS

SEQ ID NO: 25437 - protein, 15 aa, synthetic construct
AAAKAFLRRGIQVHR

SEQ ID NO: 25438 - protein, 16 aa, synthetic construct
AAAKAFLRRGIRFNSS

SEQ ID NO: 25439 - protein, 16 aa, synthetic construct
AAAKAFLRRGIRLSSS

SEQ ID NO: 25440 - protein, 16 aa, synthetic construct
AAAKAFLRRGLPTPIN

SEQ ID NO: 25441 - protein, 16 aa, synthetic construct
AAAKAFLRRGPPAPIN

SEQ ID NO: 25442 - protein, 16 aa, synthetic construct
AAAKAFLRRGPPSPIN

SEQ ID NO: 25443 - protein, 15 aa, synthetic construct
AAAKAFLRRGPPSTD

SEQ ID NO: 25444 - protein, 16 aa, synthetic construct
AAAKAFLRRGPPTPKN

SEQ ID NO: 25445 - protein, 16 aa, synthetic construct
AAAKAFLRRGRPTPIN

SEQ ID NO: 25446 - protein, 10 aa, synthetic construct
AAARGPDKRI

SEQ ID NO: 25447 - protein, 10 aa, synthetic construct
AAARGPDQLW

SEQ ID NO: 25448 - protein, 10 aa, synthetic construct
AAARGPDTLI

SEQ ID NO: 25449 - protein, 10 aa, synthetic construct
AAEGGPEKLI

SEQ ID NO: 25450 - protein, 10 aa, synthetic construct
AAEGGPGKLL

SEQ ID NO: 25451 - protein, 10 aa, synthetic construct
AAEGGPINSS

SEQ ID NO: 25452 - protein, 10 aa, synthetic construct
AAEGGPVKLI

SEQ ID NO: 25453 - protein, 10 aa, synthetic construct
AAEGGPVNLI

SEQ ID NO: 25454 - protein, 10 aa, synthetic construct
AAEGGPVQRI

SEQ ID NO: 25455 - protein, 10 aa, synthetic construct
AAEGGRDLLM

SEQ ID NO: 25456 - protein, 10 aa, synthetic construct
AAEGGREKLS

SEQ ID NO: 25457 - protein, 10 aa, synthetic construct
AAEIAPDKLI

SEQ ID NO: 25458 - protein, 10 aa, synthetic construct
AAEIGHDKHI

SEQ ID NO: 25459 - protein, 10 aa, synthetic construct
AAEIGPDKII

SEQ ID NO: 25460 - protein, 10 aa, synthetic construct
AAEIGPDKLF

SEQ ID NO: 25461 - protein, 10 aa, synthetic construct
AAEIGPDKVC

SEQ ID NO: 25462 - protein, 10 aa, synthetic construct
AAEIGPDKVI

SEQ ID NO: 25463 - protein, 10 aa, synthetic construct
AAEIGPEKLI

SEQ ID NO: 25464 - protein, 10 aa, synthetic construct
AAEIGPHKII

SEQ ID NO: 25465 - protein, 10 aa, synthetic construct
AAEIGPVKVI

SEQ ID NO: 25466 - protein, 11 aa, synthetic construct
AAEIGQTLKLI

SEQ ID NO: 25467 - protein, 10 aa, synthetic construct
AAEIRPDKLI

SEQ ID NO: 25468 - protein, 10 aa, synthetic construct
AAEIVPDKVI

SEQ ID NO: 25469 - protein, 15 aa, synthetic construct
AAEKACLRRGAPYTD

SEQ ID NO: 25470 - protein, 15 aa, synthetic construct
AAEKAFLLRVDPYTD

SEQ ID NO: 25471 - protein, 15 aa, synthetic construct
AAEKAFLRRGAPDTD

SEQ ID NO: 25472 - protein, 15 aa, synthetic construct
AAEKAFLRRGAPNTD

SEQ ID NO: 25473 - protein, 15 aa, synthetic construct
AAEKAFLRRGSPYTD

SEQ ID NO: 25474 - protein, 11 aa, synthetic construct
AAEKGETLKLN

SEQ ID NO: 25475 - protein, 10 aa, synthetic construct
AAEGGPENLI

SEQ ID NO: 25476 - protein, 12 aa, synthetic construct
AAEGGPEHLLLG

SEQ ID NO: 25477 - protein, 10 aa, synthetic construct
AADRGRDTLR

SEQ ID NO: 25478 - protein, 10 aa, synthetic construct
AAEGGPDQRI

SEQ ID NO: 25479 - protein, 10 aa, synthetic construct
AADRGRELLI

SEQ ID NO: 25480 - protein, 10 aa, synthetic construct
AADRGSDKLI

SEQ ID NO: 25481 - protein, 10 aa, synthetic construct
AADRRPDNLI

SEQ ID NO: 25482 - protein, 10 aa, synthetic construct
AADRWPDKLM

SEQ ID NO: 25483 - protein, 10 aa, synthetic construct
AADSGAVPII

SEQ ID NO: 25484 - protein, 10 aa, synthetic construct
AADSGPAKLT

SEQ ID NO: 25485 - protein, 10 aa, synthetic construct
AADSGPALLI

SEQ ID NO: 25486 - protein, 10 aa, synthetic construct
AADSGPDQII

SEQ ID NO: 25487 - protein, 10 aa, synthetic construct
AADSGPDQVI

SEQ ID NO: 25488 - protein, 10 aa, synthetic construct
AADSGRDKLI

SEQ ID NO: 25489 - protein, 10 aa, synthetic construct
AADSRPDKLI

SEQ ID NO: 25490 - protein, 14 aa, synthetic construct
AADTGAYGYYDQLI

SEQ ID NO: 25491 - protein, 10 aa, synthetic construct
AADTGPEHLT

SEQ ID NO: 25492 - protein, 10 aa, synthetic construct
AAECGHENRI

SEQ ID NO: 25493 - protein, 10 aa, synthetic construct
AAECGPDNLI

SEQ ID NO: 25494 - protein, 10 aa, synthetic construct
AAECGPEKLN

SEQ ID NO: 25495 - protein, 10 aa, synthetic construct
AAEGGPAKLF

SEQ ID NO: 25496 - protein, 10 aa, synthetic construct
AAEGGPAKLI

SEQ ID NO: 25497 - protein, 10 aa, synthetic construct
AAEGGPANLI

SEQ ID NO: 25498 - protein, 10 aa, synthetic construct
AAEGGPDKGI

SEQ ID NO: 25499 - protein, 10 aa, synthetic construct
AAEGGPDKII

SEQ ID NO: 25500 - protein, 10 aa, synthetic construct
AAEGGPDKLT

SEQ ID NO: 25501 - protein, 10 aa, synthetic construct
AAEGGPDKLV

SEQ ID NO: 25502 - protein, 10 aa, synthetic construct
AAEGGPDNLI

SEQ ID NO: 25503 - protein, 10 aa, synthetic construct
AAEGGPDQII

SEQ ID NO: 25504 - protein, 15 aa, synthetic construct
AAEKGHEQSSSPTSK

SEQ ID NO: 25505 - protein, 6 aa, synthetic construct
AAEKGN

SEQ ID NO: 25506 - protein, 15 aa, synthetic construct
AAEKSFLRRWAPYTD

SEQ ID NO: 25507 - protein, 11 aa, synthetic construct
AAELAETRKLN

SEQ ID NO: 25508 - protein, 10 aa, synthetic construct
AAERAPVKLI

SEQ ID NO: 25509 - protein, 9 aa, synthetic construct
AAERARGPH

SEQ ID NO: 25510 - protein, 10 aa, synthetic construct
AAERATDKLN

SEQ ID NO: 25511 - protein, 14 aa, synthetic construct
AAERATEQLLIAKA

SEQ ID NO: 25512 - protein, 10 aa, synthetic construct
AAEREPDKHI

SEQ ID NO: 25513 - protein, 10 aa, synthetic construct
AAEREPDTPS

SEQ ID NO: 25514 - protein, 10 aa, synthetic construct
AAERGADKLN

SEQ ID NO: 25515 - protein, 10 aa, synthetic construct
AAERGAETLF

SEQ ID NO: 25516 - protein, 11 aa, synthetic construct
AAERGDRGIDR

SEQ ID NO: 25517 - protein, 11 aa, synthetic construct
AAERGDTGKLI

SEQ ID NO: 25518 - protein, 14 aa, synthetic construct
AAERGDTGTPINSS

SEQ ID NO: 25519 - protein, 14 aa, synthetic construct
AAERGGGGRIVGGG

SEQ ID NO: 25520 - protein, 10 aa, synthetic construct
AAERGHDKRI

SEQ ID NO: 25521 - protein, 10 aa, synthetic construct
AAERGHDNLI

SEQ ID NO: 25522 - protein, 10 aa, synthetic construct
AAERGHDNSY

SEQ ID NO: 25523 - protein, 10 aa, synthetic construct
AAERGHEKLI

SEQ ID NO: 25524 - protein, 10 aa, synthetic construct
AAERGHETLI

SEQ ID NO: 25525 - protein, 10 aa, synthetic construct
AAERGPAHLI

SEQ ID NO: 25526 - protein, 9 aa, synthetic construct
AAERGPAKL

SEQ ID NO: 25527 - protein, 10 aa, synthetic construct
AAERGPAKLS

SEQ ID NO: 25528 - protein, 10 aa, synthetic construct
AAERGPAKLV

SEQ ID NO: 25529 - protein, 10 aa, synthetic construct
AAERGPANLI

SEQ ID NO: 25530 - protein, 10 aa, synthetic construct
AAERGPAQLF

SEQ ID NO: 25531 - protein, 10 aa, synthetic construct
AAERGPATLM

SEQ ID NO: 25532 - protein, 10 aa, synthetic construct
AAERGPDELF

SEQ ID NO: 25533 - protein, 10 aa, synthetic construct
AAERAPEQRL

SEQ ID NO: 25534 - protein, 10 aa, synthetic construct
AAERAPDTLF

SEQ ID NO: 25535 - protein, 10 aa, synthetic construct
AAERAPDQLI

SEQ ID NO: 25536 - protein, 11 aa, synthetic construct
AAELGLTGIRI

SEQ ID NO: 25537 - protein, 11 aa, synthetic construct
AAELGDAVKLI

SEQ ID NO: 25538 - protein, 11 aa, synthetic construct
AAELGDRVKLN

SEQ ID NO: 25539 - protein, 11 aa, synthetic construct
AAELGDTAKLN

SEQ ID NO: 25540 - protein, 11 aa, synthetic construct
AAELGDTGNRI

SEQ ID NO: 25541 - protein, 11 aa, synthetic construct
AAELGDTVIVI

SEQ ID NO: 25542 - protein, 11 aa, synthetic construct
AAELGDTVKHY

SEQ ID NO: 25543 - protein, 11 aa, synthetic construct
AAELGDTVKII

SEQ ID NO: 25544 - protein, 11 aa, synthetic construct
AAELGDTVKLF

SEQ ID NO: 25545 - protein, 11 aa, synthetic construct
AAELGDTVQLI

SEQ ID NO: 25546 - protein, 11 aa, synthetic construct
AAELGETGKLI

SEQ ID NO: 25547 - protein, 11 aa, synthetic construct
AAELGHTVKHI

SEQ ID NO: 25548 - protein, 10 aa, synthetic construct
AAELGPDKII

SEQ ID NO: 25549 - protein, 10 aa, synthetic construct
AAERAHDKSI

SEQ ID NO: 25550 - protein, 10 aa, synthetic construct
AAELGPETLI

SEQ ID NO: 25551 - protein, 10 aa, synthetic construct
AAELGQKNII

SEQ ID NO: 25552 - protein, 9 aa, synthetic construct
AAELGQPQQ

SEQ ID NO: 25553 - protein, 11 aa, synthetic construct
AAELVDKVNHI

SEQ ID NO: 25554 - protein, 11 aa, synthetic construct
AAELWHTVKHN

SEQ ID NO: 25555 - protein, 11 aa, synthetic construct
AAEMGDTVKII

SEQ ID NO: 25556 - protein, 10 aa, synthetic construct
AAEMGQQILI

SEQ ID NO: 25557 - protein, 14 aa, synthetic construct
AAENGGYGYTDHLF

SEQ ID NO: 25558 - protein, 11 aa, synthetic construct
AAENGHEPLRA

SEQ ID NO: 25559 - protein, 13 aa, synthetic construct
AAEQAYIRRVYTS

SEQ ID NO: 25560 - protein, 10 aa, synthetic construct
AAERAHDKLS

SEQ ID NO: 25561 - protein, 12 aa, synthetic construct
AADRGREENNYE

SEQ ID NO: 25562 - protein, 10 aa, synthetic construct
AADRGRDKLI

SEQ ID NO: 25563 - protein, 10 aa, synthetic construct
AAARGPEKII

SEQ ID NO: 25564 - protein, 16 aa, synthetic construct
AAATAFLRRGDTVKLI

SEQ ID NO: 25565 - protein, 16 aa, synthetic construct
AAATAFLRRGPPTPIN

SEQ ID NO: 25566 - protein, 15 aa, synthetic construct
AAATAFRRRGAPYTD

SEQ ID NO: 25567 - protein, 16 aa, synthetic construct
AAATAFRRRGPPTPIN

SEQ ID NO: 25568 - protein, 15 aa, synthetic construct
AAATALLRRGAPYTD

SEQ ID NO: 25569 - protein, 15 aa, synthetic construct
AAATAQRRGGAPEHR

SEQ ID NO: 25570 - protein, 15 aa, synthetic construct
AAATASLRRGAPSTD

SEQ ID NO: 25571 - protein, 15 aa, synthetic construct
AAATASLRRGAPYTD

SEQ ID NO: 25572 - protein, 14 aa, synthetic construct
AAATAVLRRGAPYT

SEQ ID NO: 25573 - protein, 15 aa, synthetic construct
AAATAYLRRGAPSTD

SEQ ID NO: 25574 - protein, 15 aa, synthetic construct
AAATAYLRRGAPYTD

SEQ ID NO: 25575 - protein, 15 aa, synthetic construct
AAATDFLRRGAPYTD

SEQ ID NO: 25576 - protein, 14 aa, synthetic construct
AAATGGSGYTDKLI

SEQ ID NO: 25577 - protein, 14 aa, synthetic construct
AAATGGYGYPDKLF

SEQ ID NO: 25578 - protein, 14 aa, synthetic construct
AAATGGYGYPDKLI

SEQ ID NO: 25579 - protein, 14 aa, synthetic construct
AAATGGYGYTAKLI

SEQ ID NO: 25580 - protein, 14 aa, synthetic construct
AAATGGYGYTDNLN

SEQ ID NO: 25581 - protein, 14 aa, synthetic construct
AAATGGYGYTDTLI

SEQ ID NO: 25582 - protein, 14 aa, synthetic construct
AAATGRDGDSDAHL

SEQ ID NO: 25583 - protein, 13 aa, synthetic construct
AAATGRSGYPNQL

SEQ ID NO: 25584 - protein, 14 aa, synthetic construct
AAATPYLRRRAPYT

SEQ ID NO: 25585 - protein, 10 aa, synthetic construct
AAATRARETH

SEQ ID NO: 25586 - protein, 15 aa, synthetic construct
AAATVFLRRGAPYTD

SEQ ID NO: 25587 - protein, 15 aa, synthetic construct
AAAWAFLRRGAPCTD

SEQ ID NO: 25588 - protein, 16 aa, synthetic construct
AACGLPSLGVHTDKLI

SEQ ID NO: 25589 - protein, 13 aa, synthetic construct
AACVLRRWGCKLF

SEQ ID NO: 25590 - protein, 15 aa, synthetic construct
AAATAFLRRGGPLHR

SEQ ID NO: 25591 - protein, 12 aa, synthetic construct
AAATAFLRRGDP

SEQ ID NO: 25592 - protein, 10 aa, synthetic construct
AADRGPVQEI

SEQ ID NO: 25593 - protein, 15 aa, synthetic construct
AAATAFLRRGAPYTG

SEQ ID NO: 25594 - protein, 10 aa, synthetic construct
AAARGPEKRI

SEQ ID NO: 25595 - protein, 10 aa, synthetic construct
AAARGPENLI

SEQ ID NO: 25596 - protein, 10 aa, synthetic construct
AAARGPENNN

SEQ ID NO: 25597 - protein, 10 aa, synthetic construct
AAARGPETLF

SEQ ID NO: 25598 - protein, 10 aa, synthetic construct
AAARGPVKLY

SEQ ID NO: 25599 - protein, 16 aa, synthetic construct
AAASAFRGGGAPWTET

SEQ ID NO: 25600 - protein, 14 aa, synthetic construct
AAASGEYGKTNYQK

SEQ ID NO: 25601 - protein, 14 aa, synthetic construct
AAASGGYGYTAELM

SEQ ID NO: 25602 - protein, 14 aa, synthetic construct
AAASGGYGYTAQLI

SEQ ID NO: 25603 - protein, 16 aa, synthetic construct
AAASGLPSLGVHTDQL

SEQ ID NO: 25604 - protein, 10 aa, synthetic construct
AAASGPDNLS

SEQ ID NO: 25605 - protein, 13 aa, synthetic construct
AAASYGGGGLNSS

SEQ ID NO: 25606 - protein, 13 aa, synthetic construct
AAASYVGGGLNSS

SEQ ID NO: 25607 - protein, 4 aa, synthetic construct
AAAT

SEQ ID NO: 25608 - protein, 14 aa, synthetic construct
AAATACLRRGAPDT

SEQ ID NO: 25609 - protein, 16 aa, synthetic construct
AAATACLRRGAPTPIN

SEQ ID NO: 25610 - protein, 15 aa, synthetic construct
AAATACLRRGAPYTG

SEQ ID NO: 25611 - protein, 15 aa, synthetic construct
AAATACLRRGGSKLI

SEQ ID NO: 25612 - protein, 16 aa, synthetic construct
AAATACLRRGPPTPIN

SEQ ID NO: 25613 - protein, 15 aa, synthetic construct
AAATAFLLRGAPYTD

SEQ ID NO: 25614 - protein, 8 aa, synthetic construct
AAATAFLR

SEQ ID NO: 25615 - protein, 15 aa, synthetic construct
AAATAFLRGGAPYTD

SEQ ID NO: 25616 - protein, 13 aa, synthetic construct
AAATAFLRRGAPD

SEQ ID NO: 25617 - protein, 15 aa, synthetic construct
AAATAFLRRGAPHTD

SEQ ID NO: 25618 - protein, 14 aa, synthetic construct
AAATAFLRRGAPNT

SEQ ID NO: 25619 - protein, 13 aa, synthetic construct
AACVLRWGGSKLI

SEQ ID NO: 25620 - protein, 13 aa, synthetic construct
AACVLRWWGIILI

SEQ ID NO: 25621 - protein, 13 aa, synthetic construct
AACVLRWWGLKPS

SEQ ID NO: 25622 - protein, 13 aa, synthetic construct
AACVLRWWGSKLL

SEQ ID NO: 25623 - protein, 10 aa, synthetic construct
AADRGPDKVF

SEQ ID NO: 25624 - protein, 10 aa, synthetic construct
AADRGPDNLL

SEQ ID NO: 25625 - protein, 10 aa, synthetic construct
AADRGPDQLF

SEQ ID NO: 25626 - protein, 10 aa, synthetic construct
AADRGPDQLL

SEQ ID NO: 25627 - protein, 10 aa, synthetic construct
AADRGPDQLN

SEQ ID NO: 25628 - protein, 10 aa, synthetic construct
AADRGPDQRV

SEQ ID NO: 25629 - protein, 10 aa, synthetic construct
AADRGPDTLI

SEQ ID NO: 25630 - protein, 10 aa, synthetic construct
AADRGPEELI

SEQ ID NO: 25631 - protein, 10 aa, synthetic construct
AADRGPEHLI

SEQ ID NO: 25632 - protein, 10 aa, synthetic construct
AADRGPEHRL

SEQ ID NO: 25633 - protein, 10 aa, synthetic construct
AADRGPEKLN

SEQ ID NO: 25634 - protein, 10 aa, synthetic construct
AADRGPEKLT

SEQ ID NO: 25635 - protein, 10 aa, synthetic construct
AADRGPELLI

SEQ ID NO: 25636 - protein, 10 aa, synthetic construct
AADRGPENLI

SEQ ID NO: 25637 - protein, 10 aa, synthetic construct
AADRGPEPLI

SEQ ID NO: 25638 - protein, 10 aa, synthetic construct
AADRGPEQRL

SEQ ID NO: 25639 - protein, 10 aa, synthetic construct
AADRGPGKLI

SEQ ID NO: 25640 - protein, 10 aa, synthetic construct
AADRGPGKRI

SEQ ID NO: 25641 - protein, 10 aa, synthetic construct
AADRGPGQLI

SEQ ID NO: 25642 - protein, 10 aa, synthetic construct
AADRGPGRLI

SEQ ID NO: 25643 - protein, 10 aa, synthetic construct
AADRGPHKLN

SEQ ID NO: 25644 - protein, 10 aa, synthetic construct
AADRGPNKLI

SEQ ID NO: 25645 - protein, 10 aa, synthetic construct
AADRGPSQLI

SEQ ID NO: 25646 - protein, 10 aa, synthetic construct
AADRGPVHLY

SEQ ID NO: 25647 - protein, 10 aa, synthetic construct
AADRGPVKLI

SEQ ID NO: 25648 - protein, 10 aa, synthetic construct
AADRGPDKLY

SEQ ID NO: 25649 - protein, 10 aa, synthetic construct
AADRGPDKLL

SEQ ID NO: 25650 - protein, 10 aa, synthetic construct
AADRGPDILI

SEQ ID NO: 25651 - protein, 8 aa, synthetic construct
AADMGVPG

SEQ ID NO: 25652 - protein, 13 aa, synthetic construct
AACVVRWWGIQLI

SEQ ID NO: 25653 - protein, 10 aa, synthetic construct
AADCVHDKHI

SEQ ID NO: 25654 - protein, 10 aa, synthetic construct
AADGGPDKLI

SEQ ID NO: 25655 - protein, 10 aa, synthetic construct
AADGGPEKLI

SEQ ID NO: 25656 - protein, 10 aa, synthetic construct
AADGGPEPRS

SEQ ID NO: 25657 - protein, 10 aa, synthetic construct
AADGWTTNHI

SEQ ID NO: 25658 - protein, 12 aa, synthetic construct
AADKAERVKLGV

SEQ ID NO: 25659 - protein, 7 aa, synthetic construct
AADKANL

SEQ ID NO: 25660 - protein, 11 aa, synthetic construct
AADLGDTCKLF

SEQ ID NO: 25661 - protein, 11 aa, synthetic construct
AADLGDTVKLN

SEQ ID NO: 25662 - protein, 11 aa, synthetic construct
AADMGDTVKLI

SEQ ID NO: 25663 - protein, 10 aa, synthetic construct
AADRAPDKLI

SEQ ID NO: 25664 - protein, 10 aa, synthetic construct
AADRGPAYLL

SEQ ID NO: 25665 - protein, 10 aa, synthetic construct
AADRAPDTLI

SEQ ID NO: 25666 - protein, 10 aa, synthetic construct
AADRGADKLF

SEQ ID NO: 25667 - protein, 10 aa, synthetic construct
AADRGAVQRL

SEQ ID NO: 25668 - protein, 11 aa, synthetic construct
AADRGDTVNVI

SEQ ID NO: 25669 - protein, 10 aa, synthetic construct
AADRGLDKLI

SEQ ID NO: 25670 - protein, 10 aa, synthetic construct
AADRGPAHLL

SEQ ID NO: 25671 - protein, 10 aa, synthetic construct
AADRGPAKLF

SEQ ID NO: 25672 - protein, 10 aa, synthetic construct
AADRGPAKLN

SEQ ID NO: 25673 - protein, 10 aa, synthetic construct
AADRGPAKLT

SEQ ID NO: 25674 - protein, 10 aa, synthetic construct
AADRGPAPLI

SEQ ID NO: 25675 - protein, 10 aa, synthetic construct
AADRGPAQLV

SEQ ID NO: 25676 - protein, 10 aa, synthetic construct
AAPTGGLTSS

SEQ ID NO: 25677 - protein, 14 aa, synthetic construct
AAPTGGNGYTDKHI

SEQ ID NO: 25678 - protein, 14 aa, synthetic construct
AAPTGGNGYTDKLI

SEQ ID NO: 25679 - protein, 16 aa, synthetic construct
AASMSWGIRSRDTRQM

SEQ ID NO: 25680 - protein, 11 aa, synthetic construct
AASPGGSDKHI

SEQ ID NO: 25681 - protein, 11 aa, synthetic construct
AASPGGSDKLT

SEQ ID NO: 25682 - protein, 11 aa, synthetic construct
AASPGGSDNLI

SEQ ID NO: 25683 - protein, 11 aa, synthetic construct
AASPGGSDQLI

SEQ ID NO: 25684 - protein, 11 aa, synthetic construct
AASPGGTVKLI

SEQ ID NO: 25685 - protein, 11 aa, synthetic construct
AASRGDADKLI

SEQ ID NO: 25686 - protein, 11 aa, synthetic construct
AASRGDTDKLN

SEQ ID NO: 25687 - protein, 11 aa, synthetic construct
AASRGDTDNLI

SEQ ID NO: 25688 - protein, 11 aa, synthetic construct
AASRGDTDQLI

SEQ ID NO: 25689 - protein, 11 aa, synthetic construct
AASRGDTDTLI

SEQ ID NO: 25690 - protein, 15 aa, synthetic construct
AASSLPSLGGHTDQL

SEQ ID NO: 25691 - protein, 16 aa, synthetic construct
AASSLPSLGVHTEKLI

SEQ ID NO: 25692 - protein, 10 aa, synthetic construct
AASSYTDKLF

SEQ ID NO: 25693 - protein, 14 aa, synthetic construct
AASSYVGTGGINSS

SEQ ID NO: 25694 - protein, 13 aa, synthetic construct
AASSYVGTGGSTH

SEQ ID NO: 25695 - protein, 10 aa, synthetic construct
AASTYTDKLN

SEQ ID NO: 25696 - protein, 10 aa, synthetic construct
AASTYTDTLI

SEQ ID NO: 25697 - protein, 13 aa, synthetic construct
AASVERWWGIYIS

SEQ ID NO: 25698 - protein, 13 aa, synthetic construct
AASVHRWWGIKLI

SEQ ID NO: 25699 - protein, 13 aa, synthetic construct
AASVILWCGIKLI

SEQ ID NO: 25700 - protein, 12 aa, synthetic construct
AASVIRWWGIKL

SEQ ID NO: 25701 - protein, 11 aa, synthetic construct
AASVISRGALI

SEQ ID NO: 25702 - protein, 13 aa, synthetic construct
AASVLCWGGITVF

SEQ ID NO: 25703 - protein, 13 aa, synthetic construct
AASVLCWWGSKLI

SEQ ID NO: 25704 - protein, 6 aa, synthetic construct
AASVLG

SEQ ID NO: 25705 - protein, 11 aa, synthetic construct
AASPGGSAKLI

SEQ ID NO: 25706 - protein, 15 aa, synthetic construct
AASMRWGIRSWDTRP

SEQ ID NO: 25707 - protein, 13 aa, synthetic construct
AASVLGWWGIILI

SEQ ID NO: 25708 - protein, 15 aa, synthetic construct
AASMCRLGDGPDKLI

SEQ ID NO: 25709 - protein, 13 aa, synthetic construct
AASGLRWWGSKLI

SEQ ID NO: 25710 - protein, 10 aa, synthetic construct
AASGLRWWGV

SEQ ID NO: 25711 - protein, 16 aa, synthetic construct
AASGLSSLGVHTAKLI

SEQ ID NO: 25712 - protein, 15 aa, synthetic construct
AASGLTTDRVNTDKL

SEQ ID NO: 25713 - protein, 16 aa, synthetic construct
AASGPPALGVHTDKLI

SEQ ID NO: 25714 - protein, 9 aa, synthetic construct
AASGPPSLG

SEQ ID NO: 25715 - protein, 16 aa, synthetic construct
AASGPPSLGDTGTPIN

SEQ ID NO: 25716 - protein, 16 aa, synthetic construct
AASGPPSLGVHTDNLI

SEQ ID NO: 25717 - protein, 16 aa, synthetic construct
AASGPPSLGVHTDQLI

SEQ ID NO: 25718 - protein, 9 aa, synthetic construct
AASGPRNSS

SEQ ID NO: 25719 - protein, 16 aa, synthetic construct
AASGRPSLGVHTDTLI

SEQ ID NO: 25720 - protein, 16 aa, synthetic construct
AASGRPSLGVHTETLI

SEQ ID NO: 25721 - protein, 8 aa, synthetic construct
AASGVPSR

SEQ ID NO: 25722 - protein, 15 aa, synthetic construct
AASGVQSLGVDTDKL

SEQ ID NO: 25723 - protein, 13 aa, synthetic construct
AASILRWGGIKLI

SEQ ID NO: 25724 - protein, 13 aa, synthetic construct
AASILRWWGIKII

SEQ ID NO: 25725 - protein, 15 aa, synthetic construct
AASLCLLGDGPDKLI

SEQ ID NO: 25726 - protein, 15 aa, synthetic construct
AASLCLLGEGRDQLI

SEQ ID NO: 25727 - protein, 13 aa, synthetic construct
AASLDRWSGSQLF

SEQ ID NO: 25728 - protein, 13 aa, synthetic construct
AASLLRCCGSKLI

SEQ ID NO: 25729 - protein, 11 aa, synthetic construct
AASLVESYSLI

SEQ ID NO: 25730 - protein, 15 aa, synthetic construct
AASMCLLGDGPDQLI

SEQ ID NO: 25731 - protein, 15 aa, synthetic construct
AASMCLLGDGPYKLI

SEQ ID NO: 25732 - protein, 16 aa, synthetic construct
AASMCLLGDTGTPINS

SEQ ID NO: 25733 - protein, 15 aa, synthetic construct
AASMCLRGDGPDKLI

SEQ ID NO: 25734 - protein, 13 aa, synthetic construct
AASVLGGWGSKLS

SEQ ID NO: 25735 - protein, 13 aa, synthetic construct
AASVLGWWGIKLF

SEQ ID NO: 25736 - protein, 14 aa, synthetic construct
AAPTGGNGYTDKLR

SEQ ID NO: 25737 - protein, 12 aa, synthetic construct
AASVLRGWGGGR

SEQ ID NO: 25738 - protein, 13 aa, synthetic construct
AASVLRGWGIILI

SEQ ID NO: 25739 - protein, 13 aa, synthetic construct
AASVLRGWGIKHN

SEQ ID NO: 25740 - protein, 13 aa, synthetic construct
AASVLRGWGIKLS

SEQ ID NO: 25741 - protein, 13 aa, synthetic construct
AASVLRGWGIKRI

SEQ ID NO: 25742 - protein, 13 aa, synthetic construct
AASVLRGWGINLI

SEQ ID NO: 25743 - protein, 13 aa, synthetic construct
AASVLRGWGIQLI

SEQ ID NO: 25744 - protein, 13 aa, synthetic construct
AASVLRGWGITLI

SEQ ID NO: 25745 - protein, 13 aa, synthetic construct
AASVLRGWGLILS

SEQ ID NO: 25746 - protein, 13 aa, synthetic construct
AASVLRGWGLNLS

SEQ ID NO: 25747 - protein, 13 aa, synthetic construct
AASVLRGWGMKLI

SEQ ID NO: 25748 - protein, 13 aa, synthetic construct
AASVLRGWGMNLI

SEQ ID NO: 25749 - protein, 13 aa, synthetic construct
AASVLRGWGMNLN

SEQ ID NO: 25750 - protein, 13 aa, synthetic construct
AASVLRGWGRNLN

SEQ ID NO: 25751 - protein, 13 aa, synthetic construct
AASVLRGWGRQLI

SEQ ID NO: 25752 - protein, 13 aa, synthetic construct
AASVLRGWGSKLS

SEQ ID NO: 25753 - protein, 13 aa, synthetic construct
AASVLRGWGSNLI

SEQ ID NO: 25754 - protein, 13 aa, synthetic construct
AASVLRGWGSQLF

SEQ ID NO: 25755 - protein, 13 aa, synthetic construct
AASVLRGWGTKLI

SEQ ID NO: 25756 - protein, 13 aa, synthetic construct
AASVLRLWGIKLI

SEQ ID NO: 25757 - protein, 16 aa, synthetic construct
AASVLRRGAAYTEILI

SEQ ID NO: 25758 - protein, 15 aa, synthetic construct
AASVLRRGAPYTDKL

SEQ ID NO: 25759 - protein, 16 aa, synthetic construct
AASVLRRGAPYTDTLI

SEQ ID NO: 25760 - protein, 16 aa, synthetic construct
AASVLRRGAPYTVQLI

SEQ ID NO: 25761 - protein, 13 aa, synthetic construct
AASVLRRWGGELV

SEQ ID NO: 25762 - protein, 13 aa, synthetic construct
AASVLRRWGIKLS

SEQ ID NO: 25763 - protein, 13 aa, synthetic construct
AASVLRGWGGILF

SEQ ID NO: 25764 - protein, 13 aa, synthetic construct
AASVLRGGGSNLI

SEQ ID NO: 25765 - protein, 13 aa, synthetic construct
AASVLGWWGMILI

SEQ ID NO: 25766 - protein, 13 aa, synthetic construct
AASVLRGGGSKLI

SEQ ID NO: 25767 - protein, 13 aa, synthetic construct
AASVLHRWGINII

SEQ ID NO: 25768 - protein, 15 aa, synthetic construct
AASVLHWGSTPINST

SEQ ID NO: 25769 - protein, 13 aa, synthetic construct
AASVLLCWGIKLI

SEQ ID NO: 25770 - protein, 16 aa, synthetic construct
AASVLLGDTGKPIKSS

SEQ ID NO: 25771 - protein, 13 aa, synthetic construct
AASVLLGWGIKLI

SEQ ID NO: 25772 - protein, 13 aa, synthetic construct
AASVLLGWGIQLI

SEQ ID NO: 25773 - protein, 12 aa, synthetic construct
AASVLLRWGIKL

SEQ ID NO: 25774 - protein, 13 aa, synthetic construct
AASVLLRWGIKLS

SEQ ID NO: 25775 - protein, 13 aa, synthetic construct
AASVLLVWGLILI

SEQ ID NO: 25776 - protein, 13 aa, synthetic construct
AASVLLWWGFKFC

SEQ ID NO: 25777 - protein, 13 aa, synthetic construct
AASVLLWWGIILI

SEQ ID NO: 25778 - protein, 13 aa, synthetic construct
AASVLLWWGIKLC

SEQ ID NO: 25779 - protein, 13 aa, synthetic construct
AASVLLWWGINLI

SEQ ID NO: 25780 - protein, 13 aa, synthetic construct
AASVLLWWGMKLI

SEQ ID NO: 25781 - protein, 9 aa, synthetic construct
AASVLPSLG

SEQ ID NO: 25782 - protein, 16 aa, synthetic construct
AASVLPSLGVHTGKLI

SEQ ID NO: 25783 - protein, 13 aa, synthetic construct
AASVLPSRGIKLN

SEQ ID NO: 25784 - protein, 13 aa, synthetic construct
AASVLPWWGSKLI

SEQ ID NO: 25785 - protein, 13 aa, synthetic construct
AASVLQWWGIKLI

SEQ ID NO: 25786 - protein, 13 aa, synthetic construct
AASVLQWWGSKLI

SEQ ID NO: 25787 - protein, 13 aa, synthetic construct
AASVLRCRGIKLF

SEQ ID NO: 25788 - protein, 13 aa, synthetic construct
AASVLRCWGIKVI

SEQ ID NO: 25789 - protein, 13 aa, synthetic construct
AASVLRCWGSKLI

SEQ ID NO: 25790 - protein, 14 aa, synthetic construct
AAAAGAYSYTDLVI

SEQ ID NO: 25791 - protein, 13 aa, synthetic construct
AASVLRGGGLNSS

SEQ ID NO: 25792 - protein, 13 aa, synthetic construct
AASGLRWWGITLI

SEQ ID NO: 25793 - protein, 13 aa, synthetic construct
AASGLRWWGIRLI

SEQ ID NO: 25794 - protein, 13 aa, synthetic construct
AASGLRWWGIKLS

SEQ ID NO: 25795 - protein, 15 aa, synthetic construct
AASGLPELGVHTAKL

SEQ ID NO: 25796 - protein, 16 aa, synthetic construct
AASGLPPLGVHTDELI

SEQ ID NO: 25797 - protein, 15 aa, synthetic construct
AASGLPSLGAHTEKL

SEQ ID NO: 25798 - protein, 15 aa, synthetic construct
AASGLPSLGDHTDKL

SEQ ID NO: 25799 - protein, 16 aa, synthetic construct
AASGLPSLGDKGTPIN

SEQ ID NO: 25800 - protein, 16 aa, synthetic construct
AASGLPSLGDPTEKLI

SEQ ID NO: 25801 - protein, 15 aa, synthetic construct
AASGLPSLGDTGTPI

SEQ ID NO: 25802 - protein, 13 aa, synthetic construct
AASGLPSLGGDTD

SEQ ID NO: 25803 - protein, 16 aa, synthetic construct
AASGLPSLGGHTAKLI

SEQ ID NO: 25804 - protein, 16 aa, synthetic construct
AASGLPSLGGHTDQLI

SEQ ID NO: 25805 - protein, 16 aa, synthetic construct
AASGLPSLGGHTENLI

SEQ ID NO: 25806 - protein, 16 aa, synthetic construct
AASGLPSLGGPLHRST

SEQ ID NO: 25807 - protein, 16 aa, synthetic construct
AASGLPSLGGRTGKLI

SEQ ID NO: 25808 - protein, 16 aa, synthetic construct
AASGLPSLGGSTENLL

SEQ ID NO: 25809 - protein, 15 aa, synthetic construct
AASGLPSLGLHTDKL

SEQ ID NO: 25810 - protein, 16 aa, synthetic construct
AASGLPSLGLYTDKLI

SEQ ID NO: 25811 - protein, 16 aa, synthetic construct
AASGLPSLGPPTPINS

SEQ ID NO: 25812 - protein, 16 aa, synthetic construct
AASGLPSLGSTPIHSS

SEQ ID NO: 25813 - protein, 15 aa, synthetic construct
AASGLPSLGSTPINS

SEQ ID NO: 25814 - protein, 16 aa, synthetic construct
AASGLPSLGSTPLNSS

SEQ ID NO: 25815 - protein, 16 aa, synthetic construct
AASGLPSLGVDTERRI

SEQ ID NO: 25816 - protein, 16 aa, synthetic construct
AASGLPSLGVHADQLI

SEQ ID NO: 25817 - protein, 16 aa, synthetic construct
AASGLPSLGVHIDKLI

SEQ ID NO: 25818 - protein, 15 aa, synthetic construct
AASGLPSLGVHNDKL

SEQ ID NO: 25819 - protein, 16 aa, synthetic construct
AASGLPSLGVHPAKLI

SEQ ID NO: 25820 - protein, 16 aa, synthetic construct
AASGLPSLGVHPDKHI

SEQ ID NO: 25821 - protein, 16 aa, synthetic construct
AASGLPLLGVHTDKLI

SEQ ID NO: 25822 - protein, 16 aa, synthetic construct
AASGLPALGVYPEKLI

SEQ ID NO: 25823 - protein, 13 aa, synthetic construct
AASGLRWWGIKLF

SEQ ID NO: 25824 - protein, 15 aa, synthetic construct
AASGLPALGVNTDTL

SEQ ID NO: 25825 - protein, 13 aa, synthetic construct
AASDLRWWGIKLL

SEQ ID NO: 25826 - protein, 13 aa, synthetic construct
AASDLRWWGIKLS

SEQ ID NO: 25827 - protein, 13 aa, synthetic construct
AASDLRWWGLKLI

SEQ ID NO: 25828 - protein, 13 aa, synthetic construct
AASDLRWWGMKVI

SEQ ID NO: 25829 - protein, 13 aa, synthetic construct
AASDLRWWGSKLN

SEQ ID NO: 25830 - protein, 13 aa, synthetic construct
AASDLRWWGVKLI

SEQ ID NO: 25831 - protein, 13 aa, synthetic construct
AASDRRWWGIKLI

SEQ ID NO: 25832 - protein, 13 aa, synthetic construct
AASDVRWWGMKLI

SEQ ID NO: 25833 - protein, 13 aa, synthetic construct
AASELRWCGSQLF

SEQ ID NO: 25834 - protein, 13 aa, synthetic construct
AASFLRWWGIKVI

SEQ ID NO: 25835 - protein, 13 aa, synthetic construct
AASFLRWWGINLI

SEQ ID NO: 25836 - protein, 12 aa, synthetic construct
AASFVGGWGSIL

SEQ ID NO: 25837 - protein, 16 aa, synthetic construct
AASGFPALGVHTDKLI

SEQ ID NO: 25838 - protein, 16 aa, synthetic construct
AASGIPSLGVHTEKLI

SEQ ID NO: 25839 - protein, 15 aa, synthetic construct
AASGIQSQGVNTDKL

SEQ ID NO: 25840 - protein, 16 aa, synthetic construct
AASGLASLGVHTDKLI

SEQ ID NO: 25841 - protein, 16 aa, synthetic construct
AASGLHSLGVHTEKLI

SEQ ID NO: 25842 - protein, 16 aa, synthetic construct
AASGLHSLGVTTDKLI

SEQ ID NO: 25843 - protein, 13 aa, synthetic construct
AASGLHSMGVHTD

SEQ ID NO: 25844 - protein, 15 aa, synthetic construct
AASGLPALGDHTDKV

SEQ ID NO: 25845 - protein, 16 aa, synthetic construct
AASGLPALGTTPRNSS

SEQ ID NO: 25846 - protein, 15 aa, synthetic construct
AASGLPALGVHTAKL

SEQ ID NO: 25847 - protein, 16 aa, synthetic construct
AASGLPALGVHTDQLI

SEQ ID NO: 25848 - protein, 16 aa, synthetic construct
AASGLPALGVHTDQRI

SEQ ID NO: 25849 - protein, 16 aa, synthetic construct
AASGLPALGVLTDKLI

SEQ ID NO: 25850 - protein, 16 aa, synthetic construct
AASGLPSLGVHSEKLI

SEQ ID NO: 25851 - protein, 12 aa, synthetic construct
AASGLPSLGVHT

SEQ ID NO: 25852 - protein, 13 aa, synthetic construct
AASGLPSLGVHTD

SEQ ID NO: 25853 - protein, 16 aa, synthetic construct
AASGLPSLGVHTDKRI

SEQ ID NO: 25854 - protein, 8 aa, synthetic construct
AASGLPSR

SEQ ID NO: 25855 - protein, 15 aa, synthetic construct
AASGLPSRGGHTENL

SEQ ID NO: 25856 - protein, 16 aa, synthetic construct
AASGLPSRGGHTQKLI

SEQ ID NO: 25857 - protein, 16 aa, synthetic construct
AASGLPSRGVHTDTLI

SEQ ID NO: 25858 - protein, 16 aa, synthetic construct
AASGLPSRGVHTENLI

SEQ ID NO: 25859 - protein, 16 aa, synthetic construct
AASGLPSRGVHTQKLI

SEQ ID NO: 25860 - protein, 16 aa, synthetic construct
AASGLPSRGVPTDKLI

SEQ ID NO: 25861 - protein, 16 aa, synthetic construct
AASGLPSRGVPTEKLI

SEQ ID NO: 25862 - protein, 12 aa, synthetic construct
AASGLPSRGVQT

SEQ ID NO: 25863 - protein, 16 aa, synthetic construct
AASGLPSVGVHTDQLI

SEQ ID NO: 25864 - protein, 16 aa, synthetic construct
AASGLPTEGFHTEKLI

SEQ ID NO: 25865 - protein, 14 aa, synthetic construct
AASGLPTLGVHTDK

SEQ ID NO: 25866 - protein, 16 aa, synthetic construct
AASGLPTLGVHTDQLI

SEQ ID NO: 25867 - protein, 16 aa, synthetic construct
AASGLPTLGVHTDTLI

SEQ ID NO: 25868 - protein, 16 aa, synthetic construct
AASGLPTLGVHTEKHI

SEQ ID NO: 25869 - protein, 16 aa, synthetic construct
AASGLPTLGVNTEKLI

SEQ ID NO: 25870 - protein, 13 aa, synthetic construct
AASGLRGWGINLC

SEQ ID NO: 25871 - protein, 13 aa, synthetic construct
AASGLRGWGLKLS

SEQ ID NO: 25872 - protein, 16 aa, synthetic construct
AASGLRSLGVHTDKLI

SEQ ID NO: 25873 - protein, 16 aa, synthetic construct
AASGLRSLGVHTDQLI

SEQ ID NO: 25874 - protein, 16 aa, synthetic construct
AASGLRSLGVHTEKLI

SEQ ID NO: 25875 - protein, 16 aa, synthetic construct
AASGLRSLGVHTETLI

SEQ ID NO: 25876 - protein, 16 aa, synthetic construct
AASGLRSRGVHTDKLI

SEQ ID NO: 25877 - protein, 15 aa, synthetic construct
AASGLRSVGVHTVKL

SEQ ID NO: 25878 - protein, 15 aa, synthetic construct
AASGLRWWGCNVSWG

SEQ ID NO: 25879 - protein, 16 aa, synthetic construct
AASGLPSQGVHTEKLI

SEQ ID NO: 25880 - protein, 16 aa, synthetic construct
AASGLPSQGGHTEKLI

SEQ ID NO: 25881 - protein, 13 aa, synthetic construct
AASGLPSMGVHRD

SEQ ID NO: 25882 - protein, 16 aa, synthetic construct
AASGLPSLGVNNEKLI

SEQ ID NO: 25883 - protein, 16 aa, synthetic construct
AASGLPSLGVHTDLLI

SEQ ID NO: 25884 - protein, 15 aa, synthetic construct
AASGLPSLGVHTDNL

SEQ ID NO: 25885 - protein, 16 aa, synthetic construct
AASGLPSLGVHTDQRI

SEQ ID NO: 25886 - protein, 16 aa, synthetic construct
AASGLPSLGVHTDTHI

SEQ ID NO: 25887 - protein, 16 aa, synthetic construct
AASGLPSLGVHTDTPI

SEQ ID NO: 25888 - protein, 16 aa, synthetic construct
AASGLPSLGVHTEKHI

SEQ ID NO: 25889 - protein, 16 aa, synthetic construct
AASGLPSLGVHTEKPI

SEQ ID NO: 25890 - protein, 16 aa, synthetic construct
AASGLPSLGVHTGTLI

SEQ ID NO: 25891 - protein, 15 aa, synthetic construct
AASGLPSLGVHTYKL

SEQ ID NO: 25892 - protein, 16 aa, synthetic construct
AASGLPSLGVISEILF

SEQ ID NO: 25893 - protein, 16 aa, synthetic construct
AASGLPSLGVLTDTLI

SEQ ID NO: 25894 - protein, 14 aa, synthetic construct
AASGLPSLGVNTDK

SEQ ID NO: 25895 - protein, 16 aa, synthetic construct
AASGLPSLWVHTDKLI

SEQ ID NO: 25896 - protein, 16 aa, synthetic construct
AASGLPSLGVNTEKLI

SEQ ID NO: 25897 - protein, 15 aa, synthetic construct
AASGLPSLGVPTDKL

SEQ ID NO: 25898 - protein, 16 aa, synthetic construct
AASGLPSLGVPTDNLI

SEQ ID NO: 25899 - protein, 16 aa, synthetic construct
AASGLPSLGVPTEKLI

SEQ ID NO: 25900 - protein, 16 aa, synthetic construct
AASGLPSLGVPYTHKL

SEQ ID NO: 25901 - protein, 15 aa, synthetic construct
AASGLPSLGVQTDKL

SEQ ID NO: 25902 - protein, 16 aa, synthetic construct
AASGLPSLGVRTAKLI

SEQ ID NO: 25903 - protein, 16 aa, synthetic construct
AASGLPSLGVRTDQLI

SEQ ID NO: 25904 - protein, 16 aa, synthetic construct
AASGLPSLGVYTDKLI

SEQ ID NO: 25905 - protein, 16 aa, synthetic construct
AASGLPSLRVHTDQLI

SEQ ID NO: 25906 - protein, 16 aa, synthetic construct
AASGLPSLVVHTDKLI

SEQ ID NO: 25907 - protein, 13 aa, synthetic construct
AASVLRRWGLKLI

SEQ ID NO: 25908 - protein, 13 aa, synthetic construct
AASVLRRWGMELI

SEQ ID NO: 25909 - protein, 13 aa, synthetic construct
AASVLRSLGIKHI

SEQ ID NO: 25910 - protein, 13 aa, synthetic construct
AASVRRWGGLNLI

SEQ ID NO: 25911 - protein, 13 aa, synthetic construct
AASVRRWWGIKLT

SEQ ID NO: 25912 - protein, 13 aa, synthetic construct
AASVRRWWGIKVI

SEQ ID NO: 25913 - protein, 13 aa, synthetic construct
AASVRRWWGILLI

SEQ ID NO: 25914 - protein, 13 aa, synthetic construct
AASVRRWWGLKLI

SEQ ID NO: 25915 - protein, 10 aa, synthetic construct
AASVRRWWGR

SEQ ID NO: 25916 - protein, 13 aa, synthetic construct
AASVRRWWGRKLI

SEQ ID NO: 25917 - protein, 13 aa, synthetic construct
AASVRRWWGSKLI

SEQ ID NO: 25918 - protein, 13 aa, synthetic construct
AASVVGGWGIKLI

SEQ ID NO: 25919 - protein, 13 aa, synthetic construct
AASVVGGWGSKLF

SEQ ID NO: 25920 - protein, 13 aa, synthetic construct
AASVVLGWGIKHI

SEQ ID NO: 25921 - protein, 13 aa, synthetic construct
AASVVRGWGMKLC

SEQ ID NO: 25922 - protein, 13 aa, synthetic construct
AASVVRGWGMQLF

SEQ ID NO: 25923 - protein, 15 aa, synthetic construct
AASVVRRWGIKLFYG

SEQ ID NO: 25924 - protein, 13 aa, synthetic construct
AASVVRWCGMKLI

SEQ ID NO: 25925 - protein, 13 aa, synthetic construct
AASVVRWGGSKVM

SEQ ID NO: 25926 - protein, 13 aa, synthetic construct
AASVVRWRGSKLI

SEQ ID NO: 25927 - protein, 13 aa, synthetic construct
AASVVRWWGCTLI

SEQ ID NO: 25928 - protein, 13 aa, synthetic construct
AASVVRWWGFSVI

SEQ ID NO: 25929 - protein, 13 aa, synthetic construct
AASVVRWWGIILI

SEQ ID NO: 25930 - protein, 13 aa, synthetic construct
AASVVRWWGIKII

SEQ ID NO: 25931 - protein, 13 aa, synthetic construct
AASVVRWWGIKLL

SEQ ID NO: 25932 - protein, 13 aa, synthetic construct
AASVVRWWGIKRR

SEQ ID NO: 25933 - protein, 13 aa, synthetic construct
AASVVRWWGINLF

SEQ ID NO: 25934 - protein, 13 aa, synthetic construct
AASVVRWWGINLI

SEQ ID NO: 25935 - protein, 13 aa, synthetic construct
AASVVRWWGLNSS

SEQ ID NO: 25936 - protein, 13 aa, synthetic construct
AASVRRWWGIKLS

SEQ ID NO: 25937 - protein, 13 aa, synthetic construct
AASVRRGWGMKLL

SEQ ID NO: 25938 - protein, 13 aa, synthetic construct
AASVLRWWVSKLI

SEQ ID NO: 25939 - protein, 13 aa, synthetic construct
AASVRRGWGIKLK

SEQ ID NO: 25940 - protein, 13 aa, synthetic construct
AASVLRWWWINLS

SEQ ID NO: 25941 - protein, 13 aa, synthetic construct
AASVLRWWWLKLI

SEQ ID NO: 25942 - protein, 13 aa, synthetic construct
AASVLRWWWSKLI

SEQ ID NO: 25943 - protein, 13 aa, synthetic construct
AASVLSWWGIKLI

SEQ ID NO: 25944 - protein, 16 aa, synthetic construct
AASVPPSLGVHTDKLI

SEQ ID NO: 25945 - protein, 9 aa, synthetic construct
AASVPRWWG

SEQ ID NO: 25946 - protein, 13 aa, synthetic construct
AASVPRWWGIKLS

SEQ ID NO: 25947 - protein, 13 aa, synthetic construct
AASVPRWWGRQLS

SEQ ID NO: 25948 - protein, 13 aa, synthetic construct
AASVPRWWGSKLI

SEQ ID NO: 25949 - protein, 13 aa, synthetic construct
AASVPRWWGSQLN

SEQ ID NO: 25950 - protein, 13 aa, synthetic construct
AASVQLCWGIKQI

SEQ ID NO: 25951 - protein, 13 aa, synthetic construct
AASVQLWWGINLI

SEQ ID NO: 25952 - protein, 13 aa, synthetic construct
AASVQRGWGIKLI

SEQ ID NO: 25953 - protein, 13 aa, synthetic construct
AASVQRGWGIQLI

SEQ ID NO: 25954 - protein, 13 aa, synthetic construct
AASVQRGWGLKVI

SEQ ID NO: 25955 - protein, 13 aa, synthetic construct
AASVQRWRGIKIC

SEQ ID NO: 25956 - protein, 15 aa, synthetic construct
AASVQRWWAIKPNYG

SEQ ID NO: 25957 - protein, 13 aa, synthetic construct
AASVQRWWGIILI

SEQ ID NO: 25958 - protein, 14 aa, synthetic construct
AASVQRWWGIKDKF

SEQ ID NO: 25959 - protein, 13 aa, synthetic construct
AASVQRWWGLKLI

SEQ ID NO: 25960 - protein, 13 aa, synthetic construct
AASVQRWWGSKII

SEQ ID NO: 25961 - protein, 13 aa, synthetic construct
AASVQRWWGVKLI

SEQ ID NO: 25962 - protein, 13 aa, synthetic construct
AASVQSRSGIKLI

SEQ ID NO: 25963 - protein, 13 aa, synthetic construct
AASVRGGWGLKLI

SEQ ID NO: 25964 - protein, 15 aa, synthetic construct
AASVRPSLGVHTDKL

SEQ ID NO: 25965 - protein, 13 aa, synthetic construct
AASVVRWWGRKQI

SEQ ID NO: 25966 - protein, 11 aa, synthetic construct
AASVVRWWGRL

SEQ ID NO: 25967 - protein, 13 aa, synthetic construct
AASVVRWWGSDLI

SEQ ID NO: 25968 - protein, 13 aa, synthetic construct
AASVVRWWGSKVS

SEQ ID NO: 25969 - protein, 11 aa, synthetic construct
AAVLGATGTVI

SEQ ID NO: 25970 - protein, 11 aa, synthetic construct
AAVLGATSKLI

SEQ ID NO: 25971 - protein, 11 aa, synthetic construct
AAVLGATVILF

SEQ ID NO: 25972 - protein, 11 aa, synthetic construct
AAVLGATVLLI

SEQ ID NO: 25973 - protein, 6 aa, synthetic construct
AAVLGC

SEQ ID NO: 25974 - protein, 11 aa, synthetic construct
AAVLGDKFNIV

SEQ ID NO: 25975 - protein, 11 aa, synthetic construct
AAVLGDKVKLN

SEQ ID NO: 25976 - protein, 11 aa, synthetic construct
AAVLGDLVKLI

SEQ ID NO: 25977 - protein, 11 aa, synthetic construct
AAVLGDPGKRI

SEQ ID NO: 25978 - protein, 11 aa, synthetic construct
AAVLGDPGQLI

SEQ ID NO: 25979 - protein, 11 aa, synthetic construct
AAVLGDPLNLI

SEQ ID NO: 25980 - protein, 11 aa, synthetic construct
AAVLGDPVELI

SEQ ID NO: 25981 - protein, 11 aa, synthetic construct
AAVLGDPVEVI

SEQ ID NO: 25982 - protein, 11 aa, synthetic construct
AAVLGDPVHLN

SEQ ID NO: 25983 - protein, 11 aa, synthetic construct
AAVLGDPVHVI

SEQ ID NO: 25984 - protein, 11 aa, synthetic construct
AAVLGDPVILI

SEQ ID NO: 25985 - protein, 11 aa, synthetic construct
AAVLGDPVILR

SEQ ID NO: 25986 - protein, 11 aa, synthetic construct
AAVLGDPVKII

SEQ ID NO: 25987 - protein, 11 aa, synthetic construct
AAVLGDPVKLM

SEQ ID NO: 25988 - protein, 11 aa, synthetic construct
AAVLGDPVKLS

SEQ ID NO: 25989 - protein, 11 aa, synthetic construct
AAVLGDPVKLV

SEQ ID NO: 25990 - protein, 11 aa, synthetic construct
AAVLGDPVKRI

SEQ ID NO: 25991 - protein, 11 aa, synthetic construct
AAVLGDPVNRI

SEQ ID NO: 25992 - protein, 11 aa, synthetic construct
AAVLGDPVTVI

SEQ ID NO: 25993 - protein, 11 aa, synthetic construct
AAVLGDRGEVI

SEQ ID NO: 25994 - protein, 11 aa, synthetic construct
AAVLGATGQIL

SEQ ID NO: 25995 - protein, 11 aa, synthetic construct
AAVLGATGKLI

SEQ ID NO: 25996 - protein, 11 aa, synthetic construct
AAVLGATGILK

SEQ ID NO: 25997 - protein, 13 aa, synthetic construct
AATVLRWWGSKLI

SEQ ID NO: 25998 - protein, 13 aa, synthetic construct
AASVVRWWGVNLI

SEQ ID NO: 25999 - protein, 14 aa, synthetic construct
AASYQLWWGIKLNS

SEQ ID NO: 26000 - protein, 13 aa, synthetic construct
AATDLLCWGIKLI

SEQ ID NO: 26001 - protein, 13 aa, synthetic construct
AATEGGWSRCALN

SEQ ID NO: 26002 - protein, 15 aa, synthetic construct
AATELRCCGCRDYYG

SEQ ID NO: 26003 - protein, 16 aa, synthetic construct
AATGLPSLGVHTDKII

SEQ ID NO: 26004 - protein, 9 aa, synthetic construct
AATGLPSQG

SEQ ID NO: 26005 - protein, 14 aa, synthetic construct
AATNGGYVYTDKLI

SEQ ID NO: 26006 - protein, 14 aa, synthetic construct
AATTGGYGYNDKLI

SEQ ID NO: 26007 - protein, 14 aa, synthetic construct
AATTGGYGYTDKLI

SEQ ID NO: 26008 - protein, 13 aa, synthetic construct
AATVLRWWGIKPI

SEQ ID NO: 26009 - skipped

SEQ ID NO: 26010 - protein, 11 aa, synthetic construct
AAVLGATGELI

SEQ ID NO: 26011 - protein, 11 aa, synthetic construct
AAVEEHTVKLI

SEQ ID NO: 26012 - protein, 11 aa, synthetic construct
AAVEGDTGQRI

SEQ ID NO: 26013 - protein, 6 aa, synthetic construct
AAVGGA

SEQ ID NO: 26014 - protein, 10 aa, synthetic construct
AAVGGPAIGF

SEQ ID NO: 26015 - protein, 15 aa, synthetic construct
AAVKAFLRRGAPSTD

SEQ ID NO: 26016 - protein, 11 aa, synthetic construct
AAVLADTDKLI

SEQ ID NO: 26017 - protein, 11 aa, synthetic construct
AAVLEYTVKLI

SEQ ID NO: 26018 - protein, 11 aa, synthetic construct
AAVLGAPVKLI

SEQ ID NO: 26019 - protein, 13 aa, synthetic construct
AAVLGAPYTEKHI

SEQ ID NO: 26020 - protein, 10 aa, synthetic construct
AAVLGARSAH

SEQ ID NO: 26021 - protein, 10 aa, synthetic construct
AAVLGARSTH

SEQ ID NO: 26022 - protein, 13 aa, synthetic construct
AASVLRWWWIKHI

SEQ ID NO: 26023 - protein, 13 aa, synthetic construct
AASVLRWWVIKLI

SEQ ID NO: 26024 - protein, 7 aa, synthetic construct
AASVLRW

SEQ ID NO: 26025 - protein, 13 aa, synthetic construct
AASVLRWWGFILI

SEQ ID NO: 26026 - protein, 13 aa, synthetic construct
AASVLRWWGGKLI

SEQ ID NO: 26027 - protein, 13 aa, synthetic construct
AASVLRWWGIHLS

SEQ ID NO: 26028 - protein, 13 aa, synthetic construct
AASVLRWWGIIHI

SEQ ID NO: 26029 - protein, 13 aa, synthetic construct
AASVLRWWGIILS

SEQ ID NO: 26030 - protein, 15 aa, synthetic construct
AASVLRWWGIKDNYG

SEQ ID NO: 26031 - protein, 13 aa, synthetic construct
AASVLRWWGIKFI

SEQ ID NO: 26032 - protein, 13 aa, synthetic construct
AASVLRWWGIKFV

SEQ ID NO: 26033 - protein, 15 aa, synthetic construct
AASVLRWWGIKHIYG

SEQ ID NO: 26034 - protein, 13 aa, synthetic construct
AASVLRWWGIKIF

SEQ ID NO: 26035 - protein, 13 aa, synthetic construct
AASVLRWWGIKIS

SEQ ID NO: 26036 - protein, 13 aa, synthetic construct
AASVLRWWGIKIV

SEQ ID NO: 26037 - protein, 13 aa, synthetic construct
AASVLRWWGIKLM

SEQ ID NO: 26038 - protein, 13 aa, synthetic construct
AASVLRWWGIKNI

SEQ ID NO: 26039 - protein, 13 aa, synthetic construct
AASVLRWWGIKQI

SEQ ID NO: 26040 - protein, 13 aa, synthetic construct
AASVLRWWGIKVF

SEQ ID NO: 26041 - protein, 13 aa, synthetic construct
AASVLRWWGIKVN

SEQ ID NO: 26042 - protein, 13 aa, synthetic construct
AASVLRWWGIKVY

SEQ ID NO: 26043 - protein, 13 aa, synthetic construct
AASVLRWWGILLF

SEQ ID NO: 26044 - protein, 11 aa, synthetic construct
AASVLRWWGIN

SEQ ID NO: 26045 - protein, 13 aa, synthetic construct
AASVLRWWGINLF

SEQ ID NO: 26046 - protein, 13 aa, synthetic construct
AASVLRWWGIQHI

SEQ ID NO: 26047 - protein, 13 aa, synthetic construct
AASVLRWWGIQLL

SEQ ID NO: 26048 - protein, 13 aa, synthetic construct
AASVLRWWGIQLV

SEQ ID NO: 26049 - protein, 13 aa, synthetic construct
AASVLRWWGIQPI

SEQ ID NO: 26050 - protein, 15 aa, synthetic construct
AASVLRWWGIRFNSS

SEQ ID NO: 26051 - protein, 14 aa, synthetic construct
AASVLRWWGGHVLL

SEQ ID NO: 26052 - protein, 13 aa, synthetic construct
AASVLRWWGCNVF

SEQ ID NO: 26053 - protein, 13 aa, synthetic construct
AASVLRWWSIILI

SEQ ID NO: 26054 - protein, 13 aa, synthetic construct
AASVLRWWGCHLI

SEQ ID NO: 26055 - protein, 13 aa, synthetic construct
AASVLRWCGFTLI

SEQ ID NO: 26056 - protein, 13 aa, synthetic construct
AASVLRWCGIKII

SEQ ID NO: 26057 - protein, 13 aa, synthetic construct
AASVLRWCGIKLF

SEQ ID NO: 26058 - protein, 13 aa, synthetic construct
AASVLRWCGIKLN

SEQ ID NO: 26059 - protein, 12 aa, synthetic construct
AASVLRWGGCKL

SEQ ID NO: 26060 - protein, 13 aa, synthetic construct
AASVLRWGGIKII

SEQ ID NO: 26061 - protein, 13 aa, synthetic construct
AASVLRWGGIKLN

SEQ ID NO: 26062 - protein, 13 aa, synthetic construct
AASVLRWGGIKLS

SEQ ID NO: 26063 - protein, 11 aa, synthetic construct
AASVLRWGGLI

SEQ ID NO: 26064 - protein, 13 aa, synthetic construct
AASVLRWGGLNSS

SEQ ID NO: 26065 - protein, 13 aa, synthetic construct
AASVLRWGGMKLI

SEQ ID NO: 26066 - protein, 13 aa, synthetic construct
AASVLRWGGRKLI

SEQ ID NO: 26067 - protein, 13 aa, synthetic construct
AASVLRWGGSKLF

SEQ ID NO: 26068 - protein, 13 aa, synthetic construct
AASVLRWLGIKVI

SEQ ID NO: 26069 - protein, 13 aa, synthetic construct
AASVLRWLGLKLI

SEQ ID NO: 26070 - protein, 13 aa, synthetic construct
AASVLRWLGSKLI

SEQ ID NO: 26071 - protein, 13 aa, synthetic construct
AASVLRWRGIKLN

SEQ ID NO: 26072 - protein, 13 aa, synthetic construct
AASVLRWRGIKLS

SEQ ID NO: 26073 - protein, 13 aa, synthetic construct
AASVLRWRGVKLI

SEQ ID NO: 26074 - protein, 13 aa, synthetic construct
AASVLRWSRIKLI

SEQ ID NO: 26075 - protein, 13 aa, synthetic construct
AASVLRWWAKKVI

SEQ ID NO: 26076 - protein, 16 aa, synthetic construct
AASVLRWWAPYTDKLI

SEQ ID NO: 26077 - protein, 16 aa, synthetic construct
AASVLRWWDTGTPINS

SEQ ID NO: 26078 - protein, 13 aa, synthetic construct
AASVLRWWEIKIN

SEQ ID NO: 26079 - protein, 13 aa, synthetic construct
AASVLRWWEINLI

SEQ ID NO: 26080 - protein, 15 aa, synthetic construct
AASVLRWWGIRLKSS

SEQ ID NO: 26081 - protein, 13 aa, synthetic construct
AASVLRWWGIRLN

SEQ ID NO: 26082 - protein, 14 aa, synthetic construct
AASVLRWWGIRLNS

SEQ ID NO: 26083 - protein, 15 aa, synthetic construct
AASVLRWWGIRLSSS

SEQ ID NO: 26084 - protein, 13 aa, synthetic construct
AASVLRWWGRVLV

SEQ ID NO: 26085 - protein, 13 aa, synthetic construct
AASVLRWWGSALM

SEQ ID NO: 26086 - protein, 13 aa, synthetic construct
AASVLRWWGSHLI

SEQ ID NO: 26087 - protein, 13 aa, synthetic construct
AASVLRWWGSILF

SEQ ID NO: 26088 - protein, 13 aa, synthetic construct
AASVLRWWGSKFI

SEQ ID NO: 26089 - protein, 13 aa, synthetic construct
AASVLRWWGSKII

SEQ ID NO: 26090 - protein, 13 aa, synthetic construct
AASVLRWWGSNLF

SEQ ID NO: 26091 - protein, 13 aa, synthetic construct
AASVLRWWGSNVF

SEQ ID NO: 26092 - protein, 13 aa, synthetic construct
AASVLRWWGSQLL

SEQ ID NO: 26093 - protein, 15 aa, synthetic construct
AASVLRWWGSQLLWG

SEQ ID NO: 26094 - protein, 16 aa, synthetic construct
AASVLRWWGSSPINSS

SEQ ID NO: 26095 - protein, 16 aa, synthetic construct
AASVLRWWGSTPISSS

SEQ ID NO: 26096 - protein, 16 aa, synthetic construct
AASVLRWWGSTPRNSS

SEQ ID NO: 26097 - protein, 10 aa, synthetic construct
AASVLRWWGV

SEQ ID NO: 26098 - protein, 13 aa, synthetic construct
AASVLRWWGVKLF

SEQ ID NO: 26099 - protein, 13 aa, synthetic construct
AASVLRWWGVKLS

SEQ ID NO: 26100 - protein, 13 aa, synthetic construct
AASVLRWWGVTLI

SEQ ID NO: 26101 - protein, 13 aa, synthetic construct
AASVLRWWGWELI

SEQ ID NO: 26102 - protein, 16 aa, synthetic construct
AASVLRWWGYGYTEKL

SEQ ID NO: 26103 - protein, 9 aa, synthetic construct
AASVLRWWL

SEQ ID NO: 26104 - protein, 14 aa, synthetic construct
AASVLRWWLSLQAG

SEQ ID NO: 26105 - protein, 13 aa, synthetic construct
AASVLRWWRIKLS

SEQ ID NO: 26106 - protein, 13 aa, synthetic construct
AASVLRWWRSKLI

SEQ ID NO: 26107 - protein, 13 aa, synthetic construct
AASVLRWWRVKLI

SEQ ID NO: 26108 - protein, 13 aa, synthetic construct
AASVLRWWRVQLI

SEQ ID NO: 26109 - protein, 13 aa, synthetic construct
AASVLRWWGRTLI

SEQ ID NO: 26110 - protein, 13 aa, synthetic construct
AASVLRWWGRSEK

SEQ ID NO: 26111 - protein, 13 aa, synthetic construct
AASVLRWWGRQLS

SEQ ID NO: 26112 - protein, 13 aa, synthetic construct
AASVLRWWGMILL

SEQ ID NO: 26113 - protein, 16 aa, synthetic construct
AASVLRWWGIRVHRET

SEQ ID NO: 26114 - protein, 13 aa, synthetic construct
AASVLRWWGITLL

SEQ ID NO: 26115 - protein, 16 aa, synthetic construct
AASVLRWWGITRICGT

SEQ ID NO: 26116 - protein, 13 aa, synthetic construct
AASVLRWWGIYLN

SEQ ID NO: 26117 - protein, 13 aa, synthetic construct
AASVLRWWGLILM

SEQ ID NO: 26118 - protein, 13 aa, synthetic construct
AASVLRWWGLKHS

SEQ ID NO: 26119 - protein, 13 aa, synthetic construct
AASVLRWWGLKVI

SEQ ID NO: 26120 - protein, 13 aa, synthetic construct
AASVLRWWGLKVN

SEQ ID NO: 26121 - protein, 13 aa, synthetic construct
AASVLRWWGLKVY

SEQ ID NO: 26122 - protein, 13 aa, synthetic construct
AASVLRWWGLNLS

SEQ ID NO: 26123 - protein, 16 aa, synthetic construct
AASVLRWWGLYTEKLI

SEQ ID NO: 26124 - protein, 13 aa, synthetic construct
AASVLRWWGMKHI

SEQ ID NO: 26125 - protein, 13 aa, synthetic construct
AASVLRWWGRQLI

SEQ ID NO: 26126 - protein, 12 aa, synthetic construct
AASVLRWWGMKL

SEQ ID NO: 26127 - protein, 13 aa, synthetic construct
AASVLRWWGMKLF

SEQ ID NO: 26128 - protein, 13 aa, synthetic construct
AASVLRWWGMKLL

SEQ ID NO: 26129 - protein, 13 aa, synthetic construct
AASVLRWWGMKLN

SEQ ID NO: 26130 - protein, 13 aa, synthetic construct
AASVLRWWGMPLF

SEQ ID NO: 26131 - protein, 13 aa, synthetic construct
AASVLRWWGPKLI

SEQ ID NO: 26132 - protein, 14 aa, synthetic construct
AASVLRWWGPPTPI

SEQ ID NO: 26133 - protein, 16 aa, synthetic construct
AASVLRWWGPPTPINS

SEQ ID NO: 26134 - protein, 13 aa, synthetic construct
AASVLRWWGRILI

SEQ ID NO: 26135 - protein, 12 aa, synthetic construct
AASVLRWWGRKL

SEQ ID NO: 26136 - protein, 13 aa, synthetic construct
AASVLRWWGRKLF

SEQ ID NO: 26137 - protein, 13 aa, synthetic construct
AASDLRWWGIKLF

SEQ ID NO: 26138 - protein, 12 aa, synthetic construct
AASDLRWWGIKL

SEQ ID NO: 26139 - protein, 13 aa, synthetic construct
AASDLRWWGIKII

SEQ ID NO: 26140 - protein, 14 aa, synthetic construct
AAPTGGYGYTAHLI

SEQ ID NO: 26141 - protein, 14 aa, synthetic construct
AAPTGGYGYTAIHI

SEQ ID NO: 26142 - protein, 14 aa, synthetic construct
AAPTGGYGYTAKHI

SEQ ID NO: 26143 - protein, 14 aa, synthetic construct
AAPTGGYGYTAKLF

SEQ ID NO: 26144 - protein, 14 aa, synthetic construct
AAPTGGYGYTAKLL

SEQ ID NO: 26145 - protein, 14 aa, synthetic construct
AAPTGGYGYTAKLN

SEQ ID NO: 26146 - protein, 14 aa, synthetic construct
AAPTGGYGYTAKPI

SEQ ID NO: 26147 - protein, 14 aa, synthetic construct
AAPTGGYGYTAKRI

SEQ ID NO: 26148 - protein, 14 aa, synthetic construct
AAPTGGYGYTAQLF

SEQ ID NO: 26149 - protein, 14 aa, synthetic construct
AAPTGGYGYTAQPL

SEQ ID NO: 26150 - protein, 14 aa, synthetic construct
AAPTGGYGYTATDI

SEQ ID NO: 26151 - protein, 14 aa, synthetic construct
AAPTGGYGYTDEVF

SEQ ID NO: 26152 - protein, 14 aa, synthetic construct
AAPTGGYGYTDHLL

SEQ ID NO: 26153 - protein, 14 aa, synthetic construct
AAPTGGYGYTDHVI

SEQ ID NO: 26154 - protein, 14 aa, synthetic construct
AAPTGGYGYTDKIY

SEQ ID NO: 26155 - protein, 14 aa, synthetic construct
AAPTGGYGYTDKNI

SEQ ID NO: 26156 - protein, 14 aa, synthetic construct
AAPTGGYGYTDKPN

SEQ ID NO: 26157 - protein, 14 aa, synthetic construct
AAPTGGYGYTDKPS

SEQ ID NO: 26158 - protein, 14 aa, synthetic construct
AAPTGGYGYTDKVL

SEQ ID NO: 26159 - protein, 14 aa, synthetic construct
AAPTGGYGYTDKVV

SEQ ID NO: 26160 - protein, 14 aa, synthetic construct
AAPTGGYGYTDLHI

SEQ ID NO: 26161 - protein, 14 aa, synthetic construct
AAPTGGYGYTDLLF

SEQ ID NO: 26162 - protein, 14 aa, synthetic construct
AAPTGGYGYTDLLI

SEQ ID NO: 26163 - protein, 13 aa, synthetic construct
AAPTGGYGYTDNL

SEQ ID NO: 26164 - protein, 14 aa, synthetic construct
AAPTGGYGYTDNLS

SEQ ID NO: 26165 - protein, 14 aa, synthetic construct
AAPTGGYGYTDNSI

SEQ ID NO: 26166 - protein, 14 aa, synthetic construct
AAPTGGYGYTAHRI

SEQ ID NO: 26167 - protein, 14 aa, synthetic construct
AAPTGGYGYSVSLI

SEQ ID NO: 26168 - protein, 14 aa, synthetic construct
AAPTGGYGYADNLI

SEQ ID NO: 26169 - protein, 14 aa, synthetic construct
AAPTGGYGYSEKLI

SEQ ID NO: 26170 - protein, 14 aa, synthetic construct
AAPTGGYGYAEKLI

SEQ ID NO: 26171 - protein, 14 aa, synthetic construct
AAPTGGYGYAGKLI

SEQ ID NO: 26172 - protein, 14 aa, synthetic construct
AAPTGGYGYIDTLI

SEQ ID NO: 26173 - protein, 14 aa, synthetic construct
AAPTGGYGYNDKHI

SEQ ID NO: 26174 - protein, 13 aa, synthetic construct
AAPTGGYGYNDKL

SEQ ID NO: 26175 - protein, 14 aa, synthetic construct
AAPTGGYGYPATLI

SEQ ID NO: 26176 - protein, 14 aa, synthetic construct
AAPTGGYGYPDNLI

SEQ ID NO: 26177 - protein, 14 aa, synthetic construct
AAPTGGYGYPDNRS

SEQ ID NO: 26178 - protein, 14 aa, synthetic construct
AAPTGGYGYPDQLI

SEQ ID NO: 26179 - protein, 14 aa, synthetic construct
AAPTGGYGYPEKLI

SEQ ID NO: 26180 - protein, 14 aa, synthetic construct
AAPTGGYGYPENLF

SEQ ID NO: 26181 - protein, 14 aa, synthetic construct
AAPTGGYGYPETRI

SEQ ID NO: 26182 - protein, 14 aa, synthetic construct
AAPTGGYGYPVKLI

SEQ ID NO: 26183 - protein, 14 aa, synthetic construct
AAPTGGYGYPVKRI

SEQ ID NO: 26184 - protein, 14 aa, synthetic construct
AAPTGGYGYSAILI

SEQ ID NO: 26185 - protein, 14 aa, synthetic construct
AAPTGGYGYSDHLI

SEQ ID NO: 26186 - protein, 14 aa, synthetic construct
AAPTGGYGYSDILI

SEQ ID NO: 26187 - protein, 14 aa, synthetic construct
AAPTGGYGYSDKGI

SEQ ID NO: 26188 - protein, 14 aa, synthetic construct
AAPTGGYGYSDKLL

SEQ ID NO: 26189 - protein, 14 aa, synthetic construct
AAPTGGYGYSDKLS

SEQ ID NO: 26190 - protein, 14 aa, synthetic construct
AAPTGGYGYSDLLI

SEQ ID NO: 26191 - protein, 14 aa, synthetic construct
AAPTGGYGYSDNLI

SEQ ID NO: 26192 - protein, 14 aa, synthetic construct
AAPTGGYGYSDNLS

SEQ ID NO: 26193 - protein, 14 aa, synthetic construct
AAPTGGYGYSDQHI

SEQ ID NO: 26194 - protein, 14 aa, synthetic construct
AAPTGGYGYSDTLI

SEQ ID NO: 26195 - protein, 14 aa, synthetic construct
AAPTGGYGYTDPLI

SEQ ID NO: 26196 - protein, 14 aa, synthetic construct
AAPTGGYGYTDQDI

SEQ ID NO: 26197 - protein, 14 aa, synthetic construct
AAPTGGYGYTDQHN

SEQ ID NO: 26198 - protein, 14 aa, synthetic construct
AAPTGGYGYTDQLL

SEQ ID NO: 26199 - protein, 14 aa, synthetic construct
AAPTGGYGYTEYLI

SEQ ID NO: 26200 - protein, 14 aa, synthetic construct
AAPTGGYGYTHKHI

SEQ ID NO: 26201 - protein, 14 aa, synthetic construct
AAPTGGYGYTHKLV

SEQ ID NO: 26202 - protein, 14 aa, synthetic construct
AAPTGGYGYTHKRI

SEQ ID NO: 26203 - protein, 14 aa, synthetic construct
AAPTGGYGYTHNLI

SEQ ID NO: 26204 - protein, 14 aa, synthetic construct
AAPTGGYGYTNKII

SEQ ID NO: 26205 - protein, 14 aa, synthetic construct
AAPTGGYGYTNKLN

SEQ ID NO: 26206 - protein, 14 aa, synthetic construct
AAPTGGYGYTNQLI

SEQ ID NO: 26207 - protein, 14 aa, synthetic construct
AAPTGGYGYTPKLI

SEQ ID NO: 26208 - protein, 14 aa, synthetic construct
AAPTGGYGYTVHLL

SEQ ID NO: 26209 - protein, 14 aa, synthetic construct
AAPTGGYGYTVKLF

SEQ ID NO: 26210 - protein, 14 aa, synthetic construct
AAPTGGYGYTVKLN

SEQ ID NO: 26211 - protein, 14 aa, synthetic construct
AAPTGGYGYTYKII

SEQ ID NO: 26212 - protein, 14 aa, synthetic construct
AAPTGGYRSTDKLI

SEQ ID NO: 26213 - protein, 14 aa, synthetic construct
AAPTGGYRSTDNRI

SEQ ID NO: 26214 - protein, 14 aa, synthetic construct
AAPTGGYRYAHKLI

SEQ ID NO: 26215 - protein, 14 aa, synthetic construct
AAPTGGYRYTDKLS

SEQ ID NO: 26216 - protein, 14 aa, synthetic construct
AAPTGGYRYTDNLI

SEQ ID NO: 26217 - protein, 14 aa, synthetic construct
AAPTGGYRYTEKLI

SEQ ID NO: 26218 - protein, 14 aa, synthetic construct
AAPTGGYRYTEKLN

SEQ ID NO: 26219 - protein, 14 aa, synthetic construct
AAPTGGYRYTEKSI

SEQ ID NO: 26220 - protein, 14 aa, synthetic construct
AAPTGGYWYADKLI

SEQ ID NO: 26221 - protein, 13 aa, synthetic construct
AAPTGGYWYTDKL

SEQ ID NO: 26222 - protein, 14 aa, synthetic construct
AAPTGGYWYTDQLI

SEQ ID NO: 26223 - protein, 14 aa, synthetic construct
AAPTGGYWYTEKLI

SEQ ID NO: 26224 - protein, 14 aa, synthetic construct
AAPTGGYGYTETHI

SEQ ID NO: 26225 - protein, 14 aa, synthetic construct
AAPTGGYGYTEQLN

SEQ ID NO: 26226 - protein, 14 aa, synthetic construct
AAPTGGYGYTEQHI

SEQ ID NO: 26227 - protein, 14 aa, synthetic construct
AAPTGGYGYTDTLF

SEQ ID NO: 26228 - protein, 14 aa, synthetic construct
AAPTGGYGYTDQLS

SEQ ID NO: 26229 - protein, 14 aa, synthetic construct
AAPTGGYGYTDQLY

SEQ ID NO: 26230 - protein, 14 aa, synthetic construct
AAPTGGYGYTDQPI

SEQ ID NO: 26231 - protein, 14 aa, synthetic construct
AAPTGGYGYTDQRS

SEQ ID NO: 26232 - protein, 14 aa, synthetic construct
AAPTGGYGYTDQVN

SEQ ID NO: 26233 - protein, 14 aa, synthetic construct
AAPTGGYGYTDRHN

SEQ ID NO: 26234 - protein, 13 aa, synthetic construct
AAPTGGYGYTDRL

SEQ ID NO: 26235 - protein, 14 aa, synthetic construct
AAPTGGYGYTDRLF

SEQ ID NO: 26236 - protein, 14 aa, synthetic construct
AAPTGGYGYTDTHI

SEQ ID NO: 26237 - protein, 14 aa, synthetic construct
AAPTGGYGYTDTHL

SEQ ID NO: 26238 - protein, 13 aa, synthetic construct
AAPTGGYGYTDTL

SEQ ID NO: 26239 - protein, 14 aa, synthetic construct
AAPTGGYGYTDTLK

SEQ ID NO: 26240 - protein, 14 aa, synthetic construct
AAPTGGYGYTENVI

SEQ ID NO: 26241 - protein, 14 aa, synthetic construct
AAPTGGYGYTDTLS

SEQ ID NO: 26242 - protein, 14 aa, synthetic construct
AAPTGGYGYTDTPI

SEQ ID NO: 26243 - protein, 14 aa, synthetic construct
AAPTGGYGYTDTTS

SEQ ID NO: 26244 - protein, 14 aa, synthetic construct
AAPTGGYGYTDVLI

SEQ ID NO: 26245 - protein, 14 aa, synthetic construct
AAPTGGYGYTEKFI

SEQ ID NO: 26246 - protein, 13 aa, synthetic construct
AAPTGGYGYTEKL

SEQ ID NO: 26247 - protein, 14 aa, synthetic construct
AAPTGGYGYTEKLF

SEQ ID NO: 26248 - protein, 14 aa, synthetic construct
AAPTGGYGYTEKVI

SEQ ID NO: 26249 - protein, 14 aa, synthetic construct
AAPTGGYGYTENII

SEQ ID NO: 26250 - protein, 13 aa, synthetic construct
AAPTGGYGYTENL

SEQ ID NO: 26251 - protein, 14 aa, synthetic construct
AAPTGGYGYTENRI

SEQ ID NO: 26252 - protein, 14 aa, synthetic construct
AAPTGGYGYADTLI

SEQ ID NO: 26253 - protein, 14 aa, synthetic construct
AAPTGGYGYADKVI

SEQ ID NO: 26254 - protein, 14 aa, synthetic construct
AAPTGRYGFHDKLI

SEQ ID NO: 26255 - protein, 14 aa, synthetic construct
AAPTGGSGYTDNLS

SEQ ID NO: 26256 - protein, 14 aa, synthetic construct
AAPTGGSGYTDTLI

SEQ ID NO: 26257 - protein, 14 aa, synthetic construct
AAPTGGSGYTPQHI

SEQ ID NO: 26258 - protein, 14 aa, synthetic construct
AAPTGGTGTPINSS

SEQ ID NO: 26259 - protein, 14 aa, synthetic construct
AAPTGGYAPGTPDR

SEQ ID NO: 26260 - protein, 14 aa, synthetic construct
AAPTGGYASTDKLI

SEQ ID NO: 26261 - protein, 14 aa, synthetic construct
AAPTGGYASTDTLN

SEQ ID NO: 26262 - protein, 14 aa, synthetic construct
AAPTGGYAYTDQHI

SEQ ID NO: 26263 - protein, 11 aa, synthetic construct
AAPTGGYEYTD

SEQ ID NO: 26264 - protein, 14 aa, synthetic construct
AAPTGGYEYTDKLN

SEQ ID NO: 26265 - protein, 14 aa, synthetic construct
AAPTGGYGATDKRS

SEQ ID NO: 26266 - protein, 14 aa, synthetic construct
AAPTGGYGCTAKLI

SEQ ID NO: 26267 - protein, 14 aa, synthetic construct
AAPTGGYGCTDKHI

SEQ ID NO: 26268 - protein, 13 aa, synthetic construct
AAPTGGYGCTDKL

SEQ ID NO: 26269 - protein, 14 aa, synthetic construct
AAPTGGYGCTDKRI

SEQ ID NO: 26270 - protein, 14 aa, synthetic construct
AAPTGGYGCTDNLI

SEQ ID NO: 26271 - protein, 14 aa, synthetic construct
AAPTGGYGCTDQLI

SEQ ID NO: 26272 - protein, 14 aa, synthetic construct
AAPTGGYGCTDRLI

SEQ ID NO: 26273 - protein, 14 aa, synthetic construct
AAPTGGYGCTEKLI

SEQ ID NO: 26274 - protein, 14 aa, synthetic construct
AAPTGGYGDPDNLI

SEQ ID NO: 26275 - protein, 10 aa, synthetic construct
AAPTGGYGDT

SEQ ID NO: 26276 - protein, 14 aa, synthetic construct
AAPTGGYGDTDHLI

SEQ ID NO: 26277 - protein, 14 aa, synthetic construct
AAPTGGYGDTDKHI

SEQ ID NO: 26278 - protein, 14 aa, synthetic construct
AAPTGGYGDTDKPS

SEQ ID NO: 26279 - protein, 14 aa, synthetic construct
AAPTGGYGDTDKVI

SEQ ID NO: 26280 - protein, 14 aa, synthetic construct
AAPTGGYGDTDNLI

SEQ ID NO: 26281 - protein, 14 aa, synthetic construct
AAPTGGSGYTDNRI

SEQ ID NO: 26282 - protein, 14 aa, synthetic construct
AAPTGGSGYTDLLI

SEQ ID NO: 26283 - protein, 14 aa, synthetic construct
AAPTGGYGYADKRI

SEQ ID NO: 26284 - protein, 14 aa, synthetic construct
AAPTGGSGYTDKRN

SEQ ID NO: 26285 - protein, 14 aa, synthetic construct
AAPTGGNGYTEKLI

SEQ ID NO: 26286 - protein, 14 aa, synthetic construct
AAPTGGPPTPRNSS

SEQ ID NO: 26287 - protein, 12 aa, synthetic construct
AAPTGGRHRSPH

SEQ ID NO: 26288 - protein, 14 aa, synthetic construct
AAPTGGRRVHRYTQ

SEQ ID NO: 26289 - protein, 14 aa, synthetic construct
AAPTGGSGATDHLI

SEQ ID NO: 26290 - protein, 14 aa, synthetic construct
AAPTGGSGCTDTLI

SEQ ID NO: 26291 - protein, 14 aa, synthetic construct
AAPTGGSGDSDQLL

SEQ ID NO: 26292 - protein, 10 aa, synthetic construct
AAPTGGSGDT

SEQ ID NO: 26293 - protein, 14 aa, synthetic construct
AAPTGGSGDTDKGI

SEQ ID NO: 26294 - protein, 14 aa, synthetic construct
AAPTGGSGDTDKRI

SEQ ID NO: 26295 - protein, 14 aa, synthetic construct
AAPTGGSGDTDKRN

SEQ ID NO: 26296 - protein, 14 aa, synthetic construct
AAPTGGSGETDERI

SEQ ID NO: 26297 - protein, 11 aa, synthetic construct
AAPTGGSGETH

SEQ ID NO: 26298 - protein, 14 aa, synthetic construct
AAPTGGSGSPEKLI

SEQ ID NO: 26299 - protein, 14 aa, synthetic construct
AAPTGGSGSTDKRI

SEQ ID NO: 26300 - protein, 14 aa, synthetic construct
AAPTGGSGSTDTLI

SEQ ID NO: 26301 - protein, 15 aa, synthetic construct
AAPTGGSGSTPINSS

SEQ ID NO: 26302 - protein, 14 aa, synthetic construct
AAPTGGSGYPEKLI

SEQ ID NO: 26303 - protein, 14 aa, synthetic construct
AAPTGGSGYTAKLI

SEQ ID NO: 26304 - protein, 11 aa, synthetic construct
AAPTGGSGYTD

SEQ ID NO: 26305 - protein, 12 aa, synthetic construct
AAPTGGSGYTDK

SEQ ID NO: 26306 - protein, 14 aa, synthetic construct
AAPTGGSGYTDKGI

SEQ ID NO: 26307 - protein, 14 aa, synthetic construct
AAPTGGSGYTDKLN

SEQ ID NO: 26308 - protein, 14 aa, synthetic construct
AAPTGGSGYTDKLR

SEQ ID NO: 26309 - protein, 14 aa, synthetic construct
AAPTGGSGYTDKPI

SEQ ID NO: 26310 - protein, 14 aa, synthetic construct
AAPTGGYGDTDQLS

SEQ ID NO: 26311 - protein, 14 aa, synthetic construct
AAPTGGYGDTDTRC

SEQ ID NO: 26312 - protein, 14 aa, synthetic construct
AAPTGGYGDTEKRI

SEQ ID NO: 26313 - protein, 14 aa, synthetic construct
AAPTGGYGDTVKVI

SEQ ID NO: 26314 - protein, 14 aa, synthetic construct
AAPTGGYGSTDKLN

SEQ ID NO: 26315 - protein, 14 aa, synthetic construct
AAPTGGYGSTDKLR

SEQ ID NO: 26316 - protein, 14 aa, synthetic construct
AAPTGGYGSTDKLS

SEQ ID NO: 26317 - protein, 14 aa, synthetic construct
AAPTGGYGSTDQLI

SEQ ID NO: 26318 - protein, 14 aa, synthetic construct
AAPTGGYGSTDQRI

SEQ ID NO: 26319 - protein, 14 aa, synthetic construct
AAPTGGYGSTDRLF

SEQ ID NO: 26320 - protein, 14 aa, synthetic construct
AAPTGGYGSTDTFI

SEQ ID NO: 26321 - protein, 14 aa, synthetic construct
AAPTGGYGSTEILI

SEQ ID NO: 26322 - protein, 14 aa, synthetic construct
AAPTGGYGSTEKII

SEQ ID NO: 26323 - protein, 14 aa, synthetic construct
AAPTGGYGSTEKLN

SEQ ID NO: 26324 - protein, 14 aa, synthetic construct
AAPTGGYGSTEKRF

SEQ ID NO: 26325 - protein, 14 aa, synthetic construct
AAPTGGYGSTEQLI

SEQ ID NO: 26326 - protein, 14 aa, synthetic construct
AAPTGGYGSTETRI

SEQ ID NO: 26327 - protein, 14 aa, synthetic construct
AAPTGGYGSTHKLI

SEQ ID NO: 26328 - protein, 14 aa, synthetic construct
AAPTGGYGSTHKLK

SEQ ID NO: 26329 - protein, 14 aa, synthetic construct
AAPTGGYGSTHKLN

SEQ ID NO: 26330 - protein, 15 aa, synthetic construct
AAPTGGYGSTPINSS

SEQ ID NO: 26331 - protein, 14 aa, synthetic construct
AAPTGGYGSTVKLI

SEQ ID NO: 26332 - protein, 14 aa, synthetic construct
AAPTGGYGSTVTVF

SEQ ID NO: 26333 - protein, 14 aa, synthetic construct
AAPTGGYGTTDKLI

SEQ ID NO: 26334 - protein, 9 aa, synthetic construct
AAPTGGYGY

SEQ ID NO: 26335 - protein, 14 aa, synthetic construct
AAPTGGYGYADILF

SEQ ID NO: 26336 - protein, 14 aa, synthetic construct
AAPTGGYGYADILI

SEQ ID NO: 26337 - protein, 14 aa, synthetic construct
AAPTGGYGYADKLF

SEQ ID NO: 26338 - protein, 14 aa, synthetic construct
AAPTGGYGYADKLN

SEQ ID NO: 26339 - protein, 14 aa, synthetic construct
AAPTGGYGSTDKLM

SEQ ID NO: 26340 - protein, 14 aa, synthetic construct
AAPTGGYGSTDKIF

SEQ ID NO: 26341 - protein, 14 aa, synthetic construct
AAPTGGYGSTDKHN

SEQ ID NO: 26342 - protein, 14 aa, synthetic construct
AAPTGGYGSPGTRI

SEQ ID NO: 26343 - protein, 11 aa, synthetic construct
AAPTGGYGENH

SEQ ID NO: 26344 - protein, 14 aa, synthetic construct
AAPTGGYGFTDNLI

SEQ ID NO: 26345 - protein, 14 aa, synthetic construct
AAPTGGYGHTDKLF

SEQ ID NO: 26346 - protein, 14 aa, synthetic construct
AAPTGGYGHTEKLI

SEQ ID NO: 26347 - protein, 14 aa, synthetic construct
AAPTGGYGKTEKRI

SEQ ID NO: 26348 - protein, 14 aa, synthetic construct
AAPTGGYGNTDKHI

SEQ ID NO: 26349 - protein, 14 aa, synthetic construct
AAPTGGYGNTDKLI

SEQ ID NO: 26350 - protein, 14 aa, synthetic construct
AAPTGGYGSPDKSI

SEQ ID NO: 26351 - protein, 14 aa, synthetic construct
AAPTGGYGSPDQLI

SEQ ID NO: 26352 - protein, 14 aa, synthetic construct
AAPTGGYGSPEKRI

SEQ ID NO: 26353 - protein, 14 aa, synthetic construct
AAPTGGYGSPETLI

SEQ ID NO: 26354 - protein, 14 aa, synthetic construct
AAPTGGYGSSDKLF

SEQ ID NO: 26355 - protein, 14 aa, synthetic construct
AAPTGGYGSTDKDF

SEQ ID NO: 26356 - protein, 14 aa, synthetic construct
AAPTGGYGSSDKLI

SEQ ID NO: 26357 - protein, 14 aa, synthetic construct
AAPTGGYGSSDNRI

SEQ ID NO: 26358 - protein, 14 aa, synthetic construct
AAPTGGYGSSDQLI

SEQ ID NO: 26359 - protein, 14 aa, synthetic construct
AAPTGGYGSTAQLI

SEQ ID NO: 26360 - protein, 14 aa, synthetic construct
AAPTGGYGSTDELI

SEQ ID NO: 26361 - protein, 14 aa, synthetic construct
AAPTGGYGSTDHLI

SEQ ID NO: 26362 - protein, 14 aa, synthetic construct
AAPTGGYGSTDHRI

SEQ ID NO: 26363 - protein, 14 aa, synthetic construct
AAPTGGYGSTDHVI

SEQ ID NO: 26364 - protein, 14 aa, synthetic construct
AAPTGGYGSTDILI

SEQ ID NO: 26365 - protein, 14 aa, synthetic construct
AAPTGGYGSTDIVI

SEQ ID NO: 26366 - protein, 12 aa, synthetic construct
AAPTGGYGSTDK

SEQ ID NO: 26367 - protein, 14 aa, synthetic construct
AAPTGRFGSTANLI

SEQ ID NO: 26368 - protein, 12 aa, synthetic construct
AAPTGRYGNTDK

SEQ ID NO: 26369 - protein, 13 aa, synthetic construct
AASDLRWRGSKLL

SEQ ID NO: 26370 - protein, 14 aa, synthetic construct
AARTGGYGYTDKLM

SEQ ID NO: 26371 - protein, 14 aa, synthetic construct
AARTGGYGYTDTLI

SEQ ID NO: 26372 - protein, 10 aa, synthetic construct
AARTYTDNLI

SEQ ID NO: 26373 - protein, 13 aa, synthetic construct
AARVIRWCGIKLI

SEQ ID NO: 26374 - protein, 13 aa, synthetic construct
AARVLARCWIEIF

SEQ ID NO: 26375 - protein, 10 aa, synthetic construct
AARVLGSWDT

SEQ ID NO: 26376 - protein, 15 aa, synthetic construct
AARVLHWGSTPIISS

SEQ ID NO: 26377 - protein, 15 aa, synthetic construct
AARVLHWWWLIVFYG

SEQ ID NO: 26378 - protein, 13 aa, synthetic construct
AARVLRGWGFIVI

SEQ ID NO: 26379 - protein, 13 aa, synthetic construct
AARVLRGWGIKLI

SEQ ID NO: 26380 - protein, 13 aa, synthetic construct
AARVLRGWGLTLS

SEQ ID NO: 26381 - protein, 12 aa, synthetic construct
AARVLRGWGMKV

SEQ ID NO: 26382 - protein, 13 aa, synthetic construct
AARVLRGWGRQLI

SEQ ID NO: 26383 - protein, 13 aa, synthetic construct
AARVLRGWGRQLN

SEQ ID NO: 26384 - protein, 13 aa, synthetic construct
AARVLRGWGSQLL

SEQ ID NO: 26385 - protein, 13 aa, synthetic construct
AARVLRGWGVKLI

SEQ ID NO: 26386 - protein, 13 aa, synthetic construct
AARVLRLWGIKLI

SEQ ID NO: 26387 - protein, 13 aa, synthetic construct
AARVLRRWGIKLI

SEQ ID NO: 26388 - protein, 13 aa, synthetic construct
AARVLRWCGIKLI

SEQ ID NO: 26389 - protein, 13 aa, synthetic construct
AARVLRWGGINLI

SEQ ID NO: 26390 - protein, 13 aa, synthetic construct
AARVLRWGGLKVI

SEQ ID NO: 26391 - protein, 13 aa, synthetic construct
AARVLRWGGSKLS

SEQ ID NO: 26392 - protein, 13 aa, synthetic construct
AARVLRWWGFKVI

SEQ ID NO: 26393 - protein, 13 aa, synthetic construct
AARVLRWWGFNSS

SEQ ID NO: 26394 - protein, 15 aa, synthetic construct
AARVLRWWGGKVFWG

SEQ ID NO: 26395 - protein, 13 aa, synthetic construct
AARVLRWWGIIVF

SEQ ID NO: 26396 - protein, 14 aa, synthetic construct
AARTGGYGYTDKVI

SEQ ID NO: 26397 - protein, 14 aa, synthetic construct
AARTGGYGYTDKII

SEQ ID NO: 26398 - protein, 13 aa, synthetic construct
AARLPRWWGSKRN

SEQ ID NO: 26399 - protein, 14 aa, synthetic construct
AARTGGYGYTDKHF

SEQ ID NO: 26400 - protein, 16 aa, synthetic construct
AARMRWGIRSWDTRQM

SEQ ID NO: 26401 - protein, 14 aa, synthetic construct
AARPGGFGDTDKLI

SEQ ID NO: 26402 - protein, 11 aa, synthetic construct
AARPGGSDKLF

SEQ ID NO: 26403 - protein, 11 aa, synthetic construct
AARPGGSDKLI

SEQ ID NO: 26404 - protein, 14 aa, synthetic construct
AARPGGYGYTDKHI

SEQ ID NO: 26405 - protein, 14 aa, synthetic construct
AARPGGYGYTEKVI

SEQ ID NO: 26406 - protein, 14 aa, synthetic construct
AARRGGSGSSVKLL

SEQ ID NO: 26407 - protein, 13 aa, synthetic construct
AARRLGYGSKDLI

SEQ ID NO: 26408 - protein, 16 aa, synthetic construct
AARRPSYVGGPPTPIN

SEQ ID NO: 26409 - protein, 16 aa, synthetic construct
AARRRWVLSSWDTRQM

SEQ ID NO: 26410 - protein, 14 aa, synthetic construct
AARSEEPTAELPSP

SEQ ID NO: 26411 - protein, 6 aa, synthetic construct
AARSGG

SEQ ID NO: 26412 - protein, 14 aa, synthetic construct
AARSGGDGSTETRI

SEQ ID NO: 26413 - protein, 14 aa, synthetic construct
AARSGGSGYTDKLT

SEQ ID NO: 26414 - protein, 10 aa, synthetic construct
AARSGGYGYT

SEQ ID NO: 26415 - protein, 14 aa, synthetic construct
AARSGGYGYTDKLI

SEQ ID NO: 26416 - protein, 16 aa, synthetic construct
AARSLHSLGVHTGILI

SEQ ID NO: 26417 - protein, 14 aa, synthetic construct
AARTGGAGSTGPLI

SEQ ID NO: 26418 - protein, 14 aa, synthetic construct
AARTGGSGYTDQHI

SEQ ID NO: 26419 - protein, 14 aa, synthetic construct
AARTGGYEYTEKRI

SEQ ID NO: 26420 - protein, 14 aa, synthetic construct
AARTGGYGDTDNVI

SEQ ID NO: 26421 - protein, 14 aa, synthetic construct
AARTGGYGSPLKLI

SEQ ID NO: 26422 - protein, 14 aa, synthetic construct
AARTGGYGYAVKLI

SEQ ID NO: 26423 - protein, 12 aa, synthetic construct
AARTGGYGYTAH

SEQ ID NO: 26424 - protein, 14 aa, synthetic construct
AARTGGYGYTAKLF

SEQ ID NO: 26425 - protein, 13 aa, synthetic construct
AARVLRWWGIKHI

SEQ ID NO: 26426 - protein, 13 aa, synthetic construct
AARVLRWWGIKIF

SEQ ID NO: 26427 - protein, 13 aa, synthetic construct
AARVLRWWGIKIN

SEQ ID NO: 26428 - protein, 13 aa, synthetic construct
AARVLRWWGIKLM

SEQ ID NO: 26429 - protein, 13 aa, synthetic construct
AARVRRWWGSKLI

SEQ ID NO: 26430 - protein, 15 aa, synthetic construct
AARVVLRCSIIILYG

SEQ ID NO: 26431 - protein, 13 aa, synthetic construct
AARVVRWGGIILS

SEQ ID NO: 26432 - protein, 12 aa, synthetic construct
AARVVRWWGLKL

SEQ ID NO: 26433 - protein, 13 aa, synthetic construct
AARVVRWWGLNLR

SEQ ID NO: 26434 - protein, 13 aa, synthetic construct
AARVVRWWGSKLI

SEQ ID NO: 26435 - protein, 16 aa, synthetic construct
AASAFLRRGAPYTEKL

SEQ ID NO: 26436 - protein, 16 aa, synthetic construct
AASALPSLGVHTAKLI

SEQ ID NO: 26437 - protein, 16 aa, synthetic construct
AASALPSLGVHTEKLI

SEQ ID NO: 26438 - protein, 15 aa, synthetic construct
AASALPSRGNQTEKL

SEQ ID NO: 26439 - protein, 13 aa, synthetic construct
AASALRGWGIKLI

SEQ ID NO: 26440 - protein, 13 aa, synthetic construct
AASALRWWGLKLI

SEQ ID NO: 26441 - protein, 13 aa, synthetic construct
AASALRWWGTKLI

SEQ ID NO: 26442 - protein, 13 aa, synthetic construct
AASALRWWRIKLI

SEQ ID NO: 26443 - protein, 13 aa, synthetic construct
AASALRWWRSKLI

SEQ ID NO: 26444 - protein, 13 aa, synthetic construct
AASAQRWWGIKLI

SEQ ID NO: 26445 - protein, 15 aa, synthetic construct
AASCLPSVGVQTDTL

SEQ ID NO: 26446 - protein, 12 aa, synthetic construct
AASDLHSTRNKL

SEQ ID NO: 26447 - protein, 13 aa, synthetic construct
AASDLLWWGIKLI

SEQ ID NO: 26448 - protein, 16 aa, synthetic construct
AASDLPSLGVHTDKLI

SEQ ID NO: 26449 - protein, 13 aa, synthetic construct
AASDLRGWGLKLI

SEQ ID NO: 26450 - protein, 13 aa, synthetic construct
AASDLRGWGSKLN

SEQ ID NO: 26451 - protein, 13 aa, synthetic construct
AASDLRWCGLKLI

SEQ ID NO: 26452 - protein, 13 aa, synthetic construct
AASDLRWCGMKLI

SEQ ID NO: 26453 - protein, 13 aa, synthetic construct
AASDLRWGGLKVI

SEQ ID NO: 26454 - protein, 13 aa, synthetic construct
AARVRRWWGRKLI

SEQ ID NO: 26455 - protein, 13 aa, synthetic construct
AARVRRWWGILLI

SEQ ID NO: 26456 - protein, 13 aa, synthetic construct
AARVRRWWGIKLI

SEQ ID NO: 26457 - protein, 13 aa, synthetic construct
AARVLRWWGMKLI

SEQ ID NO: 26458 - protein, 13 aa, synthetic construct
AARVLRWWGIKLN

SEQ ID NO: 26459 - protein, 13 aa, synthetic construct
AARVLRWWGILVI

SEQ ID NO: 26460 - protein, 13 aa, synthetic construct
AARVLRWWGIRLI

SEQ ID NO: 26461 - protein, 13 aa, synthetic construct
AARVLRWWGITLI

SEQ ID NO: 26462 - protein, 13 aa, synthetic construct
AARVLRWWGLELI

SEQ ID NO: 26463 - protein, 11 aa, synthetic construct
AARVLRWWGLI

SEQ ID NO: 26464 - protein, 13 aa, synthetic construct
AARVLRWWGLKVS

SEQ ID NO: 26465 - protein, 11 aa, synthetic construct
AARVLRWWGLN

SEQ ID NO: 26466 - protein, 13 aa, synthetic construct
AARVLRWWGLNLS

SEQ ID NO: 26467 - protein, 13 aa, synthetic construct
AARVLRWWGLNSS

SEQ ID NO: 26468 - protein, 13 aa, synthetic construct
AARVLRWWGLQLI

SEQ ID NO: 26469 - protein, 13 aa, synthetic construct
AARVLRWWGRIVF

SEQ ID NO: 26470 - protein, 13 aa, synthetic construct
AARVRRGWGRKLS

SEQ ID NO: 26471 - protein, 13 aa, synthetic construct
AARVLRWWGRKLS

SEQ ID NO: 26472 - protein, 13 aa, synthetic construct
AARVLRWWGRQLI

SEQ ID NO: 26473 - protein, 13 aa, synthetic construct
AARVLRWWGSKLF

SEQ ID NO: 26474 - protein, 13 aa, synthetic construct
AARVLRWWGSKPL

SEQ ID NO: 26475 - protein, 13 aa, synthetic construct
AARVLRWWGSKVI

SEQ ID NO: 26476 - protein, 13 aa, synthetic construct
AARVLRWWGSPLI

SEQ ID NO: 26477 - protein, 13 aa, synthetic construct
AARVLRWWGSRLI

SEQ ID NO: 26478 - protein, 13 aa, synthetic construct
AARVLRWWGSTLS

SEQ ID NO: 26479 - protein, 13 aa, synthetic construct
AARVLRWWGVKLI

SEQ ID NO: 26480 - protein, 13 aa, synthetic construct
AARVLRWWGVNSS

SEQ ID NO: 26481 - protein, 12 aa, synthetic construct
AARVRRGGGRKL

SEQ ID NO: 26482 - protein, 15 aa, synthetic construct
AARMCLLGDGPEKLI

SEQ ID NO: 26483 - protein, 13 aa, synthetic construct
AARLLRWWGSKLI

SEQ ID NO: 26484 - protein, 14 aa, synthetic construct
AAPTGRYGYTDKPI

SEQ ID NO: 26485 - protein, 14 aa, synthetic construct
AAQPGGYGYTDNLI

SEQ ID NO: 26486 - protein, 12 aa, synthetic construct
AAQRGGYADTEK

SEQ ID NO: 26487 - protein, 10 aa, synthetic construct
AAQRGPANVF

SEQ ID NO: 26488 - protein, 10 aa, synthetic construct
AAQRGPDKLN

SEQ ID NO: 26489 - protein, 10 aa, synthetic construct
AAQRGPDKNI

SEQ ID NO: 26490 - protein, 10 aa, synthetic construct
AAQRGPDKRI

SEQ ID NO: 26491 - protein, 10 aa, synthetic construct
AAQRGPDTLS

SEQ ID NO: 26492 - protein, 10 aa, synthetic construct
AAQRGPEKLI

SEQ ID NO: 26493 - protein, 10 aa, synthetic construct
AAQRGPENLI

SEQ ID NO: 26494 - protein, 10 aa, synthetic construct
AAQRGPYNNI

SEQ ID NO: 26495 - protein, 7 aa, synthetic construct
AAQRVPS

SEQ ID NO: 26496 - protein, 10 aa, synthetic construct
AAQSGPDKLN

SEQ ID NO: 26497 - protein, 14 aa, synthetic construct
AAQTACYRSPAHSN

SEQ ID NO: 26498 - protein, 13 aa, synthetic construct
AAQTGGSGETDQL

SEQ ID NO: 26499 - protein, 12 aa, synthetic construct
AAQTGGSGYHDK

SEQ ID NO: 26500 - protein, 14 aa, synthetic construct
AAQTGGSGYTDKLI

SEQ ID NO: 26501 - protein, 13 aa, synthetic construct
AAQTGGTGYHDKL

SEQ ID NO: 26502 - protein, 14 aa, synthetic construct
AAQTGGYGDTDKLI

SEQ ID NO: 26503 - protein, 11 aa, synthetic construct
AAQTGGYGYPD

SEQ ID NO: 26504 - protein, 14 aa, synthetic construct
AAQTGGYGYTDILI

SEQ ID NO: 26505 - protein, 14 aa, synthetic construct
AAQTGGYGYTEKLN

SEQ ID NO: 26506 - protein, 14 aa, synthetic construct
AAQTGGYGYTEKVI

SEQ ID NO: 26507 - protein, 14 aa, synthetic construct
AAQTGPDHYNDEQL

SEQ ID NO: 26508 - protein, 10 aa, synthetic construct
AAQTRPDKHI

SEQ ID NO: 26509 - protein, 10 aa, synthetic construct
AAQVRPDRLM

SEQ ID NO: 26510 - protein, 16 aa, synthetic construct
AARAGGSGCRARLSWG

SEQ ID NO: 26511 - protein, 16 aa, synthetic construct
AAQQTHTHKHIYAKQT

SEQ ID NO: 26512 - protein, 10 aa, synthetic construct
AAQLGPDKLI

SEQ ID NO: 26513 - protein, 13 aa, synthetic construct
AARLLRWWGIKLI

SEQ ID NO: 26514 - protein, 10 aa, synthetic construct
AAQKGPDKLI

SEQ ID NO: 26515 - protein, 14 aa, synthetic construct
AAPTLGYGYTDKLI

SEQ ID NO: 26516 - protein, 14 aa, synthetic construct
AAPTLGYGYTDQLN

SEQ ID NO: 26517 - protein, 12 aa, synthetic construct
AAPTPRYRNTDK

SEQ ID NO: 26518 - protein, 14 aa, synthetic construct
AAPTRAYGYTEKPT

SEQ ID NO: 26519 - protein, 14 aa, synthetic construct
AAPTRGNGYTDKLI

SEQ ID NO: 26520 - protein, 14 aa, synthetic construct
AAPTRGSGDSDNLI

SEQ ID NO: 26521 - protein, 11 aa, synthetic construct
AAPTRGSGDTD

SEQ ID NO: 26522 - protein, 14 aa, synthetic construct
AAPTRGYGYTAHLI

SEQ ID NO: 26523 - protein, 13 aa, synthetic construct
AAPTRGYGYTDKH

SEQ ID NO: 26524 - protein, 14 aa, synthetic construct
AAPTRGYGYTDKHI

SEQ ID NO: 26525 - protein, 13 aa, synthetic construct
AAPTRGYGYTDKL

SEQ ID NO: 26526 - protein, 14 aa, synthetic construct
AAPTRRSWATDHLI

SEQ ID NO: 26527 - protein, 13 aa, synthetic construct
AAPTVGYAYTDKL

SEQ ID NO: 26528 - protein, 14 aa, synthetic construct
AAPTVGYGSTDKLI

SEQ ID NO: 26529 - protein, 14 aa, synthetic construct
AAPTVGYGYTEKLI

SEQ ID NO: 26530 - protein, 14 aa, synthetic construct
AAPTVGYRYTDKLY

SEQ ID NO: 26531 - protein, 14 aa, synthetic construct
AAPTWASGYTDTLI

SEQ ID NO: 26532 - protein, 14 aa, synthetic construct
AAPTWGYGYSDKLI

SEQ ID NO: 26533 - protein, 14 aa, synthetic construct
AAPTWGYGYTDKLI

SEQ ID NO: 26534 - protein, 14 aa, synthetic construct
AAPTWGYGYTDPII

SEQ ID NO: 26535 - protein, 12 aa, synthetic construct
AAPTWGYGYTEK

SEQ ID NO: 26536 - protein, 13 aa, synthetic construct
AAPVLRWWGIKLI

SEQ ID NO: 26537 - protein, 13 aa, synthetic construct
AAPVVGSWWRDQL

SEQ ID NO: 26538 - protein, 13 aa, synthetic construct
AAQIVRCILMIVN

SEQ ID NO: 26539 - protein, 14 aa, synthetic construct
AAQKGGSGDTHKLI

SEQ ID NO: 26540 - protein, 13 aa, synthetic construct
AARAGRGWGRNLI

SEQ ID NO: 26541 - protein, 13 aa, synthetic construct
AARCLRGWGLKVI

SEQ ID NO: 26542 - protein, 13 aa, synthetic construct
AARDHRWWGLKVF

SEQ ID NO: 26543 - protein, 13 aa, synthetic construct
AARDLRWWGVKVF

SEQ ID NO: 26544 - protein, 13 aa, synthetic construct
AARGLRWGGIKLI

SEQ ID NO: 26545 - protein, 13 aa, synthetic construct
AARGLRWWGIKLS

SEQ ID NO: 26546 - protein, 13 aa, synthetic construct
AARGLRWWGSKLS

SEQ ID NO: 26547 - protein, 11 aa, synthetic construct
AARGLSTDRLF

SEQ ID NO: 26548 - protein, 11 aa, synthetic construct
AARGLYPINSS

SEQ ID NO: 26549 - protein, 11 aa, synthetic construct
AARGLYSDNLI

SEQ ID NO: 26550 - protein, 11 aa, synthetic construct
AARGLYTAKLI

SEQ ID NO: 26551 - protein, 11 aa, synthetic construct
AARGLYTAKRI

SEQ ID NO: 26552 - protein, 11 aa, synthetic construct
AARGLYTANHI

SEQ ID NO: 26553 - protein, 11 aa, synthetic construct
AARGLYTDKII

SEQ ID NO: 26554 - protein, 11 aa, synthetic construct
AARGLYTDKPI

SEQ ID NO: 26555 - protein, 11 aa, synthetic construct
AARGLYTDNLI

SEQ ID NO: 26556 - protein, 11 aa, synthetic construct
AARGLYTDQLI

SEQ ID NO: 26557 - protein, 11 aa, synthetic construct
AARGLYTEKLI

SEQ ID NO: 26558 - protein, 11 aa, synthetic construct
AARGLYTYKLI

SEQ ID NO: 26559 - protein, 16 aa, synthetic construct
AARGPGGYAVRPDKLI

SEQ ID NO: 26560 - protein, 10 aa, synthetic construct
AARGRPSLGV

SEQ ID NO: 26561 - protein, 16 aa, synthetic construct
AARGRPSLGVHTAQLI

SEQ ID NO: 26562 - protein, 16 aa, synthetic construct
AARGRPSLGVHTDKLI

SEQ ID NO: 26563 - protein, 13 aa, synthetic construct
AARGRRWWGSTLI

SEQ ID NO: 26564 - protein, 11 aa, synthetic construct
AARGTGGLNSS

SEQ ID NO: 26565 - protein, 16 aa, synthetic construct
AARGTGGYAVRTDKLI

SEQ ID NO: 26566 - protein, 11 aa, synthetic construct
AARGWYTDQLI

SEQ ID NO: 26567 - protein, 13 aa, synthetic construct
AARILGWWGMNNI

SEQ ID NO: 26568 - protein, 13 aa, synthetic construct
AARILRWWGSKLI

SEQ ID NO: 26569 - protein, 13 aa, synthetic construct
AARGLRWGGGILI

SEQ ID NO: 26570 - protein, 16 aa, synthetic construct
AARGLRSVGVHTERVI

SEQ ID NO: 26571 - protein, 13 aa, synthetic construct
AARGLRGWGSKRF

SEQ ID NO: 26572 - protein, 13 aa, synthetic construct
AARGLASLWIETD

SEQ ID NO: 26573 - protein, 13 aa, synthetic construct
AARELRLWWRKLI

SEQ ID NO: 26574 - protein, 13 aa, synthetic construct
AARELRSGGRQLI

SEQ ID NO: 26575 - protein, 13 aa, synthetic construct
AARELRWGGCKLI

SEQ ID NO: 26576 - protein, 11 aa, synthetic construct
AARELYTDKLI

SEQ ID NO: 26577 - protein, 8 aa, synthetic construct
AARERGFW

SEQ ID NO: 26578 - protein, 13 aa, synthetic construct
AAREVRWWWRNII

SEQ ID NO: 26579 - protein, 9 aa, synthetic construct
AARFRRWWG

SEQ ID NO: 26580 - protein, 14 aa, synthetic construct
AARGGDSVNRVLQT

SEQ ID NO: 26581 - protein, 15 aa, synthetic construct
AARGGGSGYWGLHTD

SEQ ID NO: 26582 - protein, 15 aa, synthetic construct
AARGGGYGFWGLHTD

SEQ ID NO: 26583 - protein, 15 aa, synthetic construct
AARGGGYGSWGLPTD

SEQ ID NO: 26584 - protein, 11 aa, synthetic construct
AARGLCSEDLI

SEQ ID NO: 26585 - protein, 13 aa, synthetic construct
AARGLRGWGIKLS

SEQ ID NO: 26586 - protein, 15 aa, synthetic construct
AARGLDSLGVETQKL

SEQ ID NO: 26587 - protein, 16 aa, synthetic construct
AARGLPALGVHTDQLI

SEQ ID NO: 26588 - protein, 16 aa, synthetic construct
AARGLPALGVHTEKLI

SEQ ID NO: 26589 - protein, 16 aa, synthetic construct
AARGLPALGVLTDKLI

SEQ ID NO: 26590 - protein, 16 aa, synthetic construct
AARGLPAVGVHTDALI

SEQ ID NO: 26591 - protein, 16 aa, synthetic construct
AARGLPSLGDTGTPIN

SEQ ID NO: 26592 - protein, 16 aa, synthetic construct
AARGLPSLGGHTENLI

SEQ ID NO: 26593 - protein, 16 aa, synthetic construct
AARGLPSLGVHADKLI

SEQ ID NO: 26594 - protein, 16 aa, synthetic construct
AARGLPSLGVHTDILI

SEQ ID NO: 26595 - protein, 16 aa, synthetic construct
AARGLPSLGVHTDRLI

SEQ ID NO: 26596 - protein, 16 aa, synthetic construct
AARGLPSLRVHTDKLI

SEQ ID NO: 26597 - protein, 16 aa, synthetic construct
YSSGLPPRGVHTDKLI

SEQ ID NO: 26598 - protein, 14 aa, synthetic construct
ALGELTYWGIRTDK

SEQ ID NO: 26599 - protein, 14 aa, synthetic construct
ALGELVWGIRRVTD

SEQ ID NO: 26600 - protein, 14 aa, synthetic construct
ALGDLTYWGIRTDK

SEQ ID NO: 26601 - protein, 14 aa, synthetic construct
ALGDLVWGIRRVTD

SEQ ID NO: 26602 - protein, 14 aa, synthetic construct
ALGKLTYWGIRTDK

SEQ ID NO: 26603 - protein, 13 aa, synthetic construct
ALGELTYWGIRTD

SEQ ID NO: 26604 - protein, 14 aa, synthetic construct
ALGELTSWGIRTDK

SEQ ID NO: 26605 - protein, 14 aa, synthetic construct
ALGELTYCGIRTDK

SEQ ID NO: 26606 - protein, 14 aa, synthetic construct
LLGNSSGGYGGSPI

SEQ ID NO: 26607 - protein, 14 aa, synthetic construct
ALGELTYWGISTDK

SEQ ID NO: 26608 - protein, 14 aa, synthetic construct
ALGELTYWGIMTDK

SEQ ID NO: 26609 - protein, 14 aa, synthetic construct
DLGELTYWGIRTDK

SEQ ID NO: 26610 - protein, 14 aa, synthetic construct
ALGELVWGLRRVTD

SEQ ID NO: 26611 - protein, 14 aa, synthetic construct
VLGELTYWGIRTDK

SEQ ID NO: 26612 - protein, 14 aa, synthetic construct
ALGELVCGIRRVTD

SEQ ID NO: 26613 - protein, 14 aa, synthetic construct
ALGELTYWGRRTDK

SEQ ID NO: 26614 - protein, 14 aa, synthetic construct
ALVELTYWGIRTDK

SEQ ID NO: 26615 - protein, 14 aa, synthetic construct
ALGELVWGILRVTD

SEQ ID NO: 26616 - protein, 14 aa, synthetic construct
ALGELTYWGLRTDK

SEQ ID NO: 26617 - protein, 14 aa, synthetic construct
ALGELTYWGVRTDK

SEQ ID NO: 26618 - protein, 14 aa, synthetic construct
DLGELVWGIRRVTD

SEQ ID NO: 26619 - protein, 14 aa, synthetic construct
ALGELSYWGIRTDK

SEQ ID NO: 26620 - protein, 14 aa, synthetic construct
ALGELFWGIRRVTD

SEQ ID NO: 26621 - protein, 14 aa, synthetic construct
ALGELAYWGIRTDK

SEQ ID NO: 26622 - protein, 14 aa, synthetic construct
ALGELTYRGIRTDK

SEQ ID NO: 26623 - protein, 14 aa, synthetic construct
ALGELVWGIRTDKL

SEQ ID NO: 26624 - protein, 14 aa, synthetic construct
ALGELTYWGIGTDK

SEQ ID NO: 26625 - protein, 14 aa, synthetic construct
ALVELVWGIRRVTD

SEQ ID NO: 26626 - protein, 14 aa, synthetic construct
ALGEPTYWGIRTDK

SEQ ID NO: 26627 - protein, 14 aa, synthetic construct
ALGELTYSGIRTDK

SEQ ID NO: 26628 - protein, 14 aa, synthetic construct
ALGELVWGIRSVTD

SEQ ID NO: 26629 - protein, 14 aa, synthetic construct
APGELTYWGIRTDK

SEQ ID NO: 26630 - protein, 14 aa, synthetic construct
ALGGLTYWGIRTDK

SEQ ID NO: 26631 - protein, 14 aa, synthetic construct
ALGELVWGIRRATD

SEQ ID NO: 26632 - protein, 14 aa, synthetic construct
ALGELVWGVRRVTD

SEQ ID NO: 26633 - protein, 14 aa, synthetic construct
ALWELTYWGIRTDK

SEQ ID NO: 26634 - protein, 14 aa, synthetic construct
ALGELTYWGIRADK

SEQ ID NO: 26635 - protein, 14 aa, synthetic construct
ALGEITYWGIRTDK

SEQ ID NO: 26636 - protein, 14 aa, synthetic construct
ALGELTYWGMRTDK

SEQ ID NO: 26637 - protein, 14 aa, synthetic construct
ALGELAWGIRRVTD

SEQ ID NO: 26638 - protein, 14 aa, synthetic construct
ALGELDWGIRRVTD

SEQ ID NO: 26639 - protein, 14 aa, synthetic construct
ALGELVWGYGGSPI

SEQ ID NO: 26640 - protein, 14 aa, synthetic construct
ALGELTYGGIRTDK

SEQ ID NO: 26641 - protein, 14 aa, synthetic construct
ALGELVRGIRRVTD

SEQ ID NO: 26642 - protein, 14 aa, synthetic construct
ALGELTYWGIRSDK

SEQ ID NO: 26643 - protein, 14 aa, synthetic construct
ALWELVWGIRRVTD

SEQ ID NO: 26644 - protein, 14 aa, synthetic construct
ALGGLVWGIRRVTD

SEQ ID NO: 26645 - protein, 14 aa, synthetic construct
ALGELVWGRRRVTD

SEQ ID NO: 26646 - protein, 14 aa, synthetic construct
ALGELTHWGIRTDK

SEQ ID NO: 26647 - protein, 14 aa, synthetic construct
ALGELTYWGIWTDK

SEQ ID NO: 26648 - protein, 14 aa, synthetic construct
ALGNSSGGYGGSPI

SEQ ID NO: 26649 - protein, 14 aa, synthetic construct
ALGEPVWGIRRVTD

SEQ ID NO: 26650 - protein, 14 aa, synthetic construct
ARGELVWGIRRVTD

SEQ ID NO: 26651 - protein, 14 aa, synthetic construct
APGELVWGIRRVTD

SEQ ID NO: 26652 - protein, 14 aa, synthetic construct
ALGELTYWRIRTDK

SEQ ID NO: 26653 - protein, 14 aa, synthetic construct
ALGELTYWGTRTDK

SEQ ID NO: 26654 - protein, 14 aa, synthetic construct
ALGEHTYWGIRTDK

SEQ ID NO: 26655 - protein, 14 aa, synthetic construct
ALGELTCWGIRTDK

SEQ ID NO: 26656 - protein, 14 aa, synthetic construct
ALGDLFLLGDNKLI

SEQ ID NO: 26657 - protein, 14 aa, synthetic construct
ALGELVWGIRGVTD

SEQ ID NO: 26658 - protein, 14 aa, synthetic construct
TLGELTYWGIRTDK

SEQ ID NO: 26659 - protein, 14 aa, synthetic construct
ALGELTYWWIRTDK

SEQ ID NO: 26660 - protein, 14 aa, synthetic construct
ALGEIVWGIRRVTD

SEQ ID NO: 26661 - protein, 14 aa, synthetic construct
ALGELVWGMRRVTD

SEQ ID NO: 26662 - protein, 14 aa, synthetic construct
SLGELTYWGIRTDK

SEQ ID NO: 26663 - protein, 14 aa, synthetic construct
AIGELTYWGIRTDK

SEQ ID NO: 26664 - protein, 13 aa, synthetic construct
SWGTRLGDTEGHR

SEQ ID NO: 26665 - protein, 14 aa, synthetic construct
ALGEPLRGGYAPDK

SEQ ID NO: 26666 - protein, 14 aa, synthetic construct
ALGEFTYWGIRTDK

SEQ ID NO: 26667 - protein, 14 aa, synthetic construct
ALGELVWWIRRVTD

SEQ ID NO: 26668 - protein, 14 aa, synthetic construct
ALGELVGGIRRVTD

SEQ ID NO: 26669 - protein, 14 aa, synthetic construct
ALGELVWGIRWVTD

SEQ ID NO: 26670 - protein, 11 aa, synthetic construct
ALGELGTDKLI

SEQ ID NO: 26671 - protein, 14 aa, synthetic construct
ALRELVWGIRRVTD

SEQ ID NO: 26672 - protein, 14 aa, synthetic construct
ALGELVSGIRRVTD

SEQ ID NO: 26673 - protein, 14 aa, synthetic construct
ALGALVWGIRRVTD

SEQ ID NO: 26674 - protein, 14 aa, synthetic construct
ALGELVWVIRRVTD

SEQ ID NO: 26675 - protein, 14 aa, synthetic construct
ALGELVWGIQRVTD

SEQ ID NO: 26676 - protein, 14 aa, synthetic construct
VLGELVWGIRRVTD

SEQ ID NO: 26677 - protein, 14 aa, synthetic construct
AHGELVWGIRRVTD

SEQ ID NO: 26678 - protein, 14 aa, synthetic construct
ALGELTYWVIRTDK

SEQ ID NO: 26679 - protein, 14 aa, synthetic construct
ALGEVVWGIRRVTD

SEQ ID NO: 26680 - protein, 14 aa, synthetic construct
TLGELVWGIRRVTD

SEQ ID NO: 26681 - protein, 14 aa, synthetic construct
ALGELTGGYATDKL

SEQ ID NO: 26682 - protein, 14 aa, synthetic construct
ALGDLTYWGRRTDK

SEQ ID NO: 26683 - protein, 14 aa, synthetic construct
ALGELTNWGIRTDK

SEQ ID NO: 26684 - protein, 14 aa, synthetic construct
ALGELVWGIWRVTD

SEQ ID NO: 26685 - protein, 14 aa, synthetic construct
ALRELTYWGIRTDK

SEQ ID NO: 26686 - protein, 14 aa, synthetic construct
ALGVLVWGIRRVTD

SEQ ID NO: 26687 - protein, 14 aa, synthetic construct
ALGVLTYWGIRTDK

SEQ ID NO: 26688 - protein, 14 aa, synthetic construct
ALGELVWGIRKVTD

SEQ ID NO: 26689 - protein, 14 aa, synthetic construct
ALGELVWRIRRVTD

SEQ ID NO: 26690 - protein, 14 aa, synthetic construct
ALEELTYWGIRTDK

SEQ ID NO: 26691 - protein, 14 aa, synthetic construct
ARGELTYWGIRTDK

SEQ ID NO: 26692 - protein, 14 aa, synthetic construct
GLGELVWGIRRVTD

SEQ ID NO: 26693 - protein, 14 aa, synthetic construct
ALGELVWGIRMVTD

SEQ ID NO: 26694 - protein, 14 aa, synthetic construct
ALGDLTSWGIRTDK

SEQ ID NO: 26695 - protein, 14 aa, synthetic construct
ALGELTYWAIRTDK

SEQ ID NO: 26696 - protein, 14 aa, synthetic construct
SLGELVWGIRRVTD

SEQ ID NO: 26697 - protein, 13 aa, synthetic construct
ALGELTYCGIRTD

SEQ ID NO: 26698 - protein, 13 aa, synthetic construct
ALGDLTYWGIRTD

SEQ ID NO: 26699 - protein, 14 aa, synthetic construct
ALGELNYWGIRTDK

SEQ ID NO: 26700 - protein, 14 aa, synthetic construct
ALGELVWGIRRFTD

SEQ ID NO: 26701 - protein, 14 aa, synthetic construct
ALGELIYWGIRTDK

SEQ ID NO: 26702 - protein, 14 aa, synthetic construct
ALGELVWGIRRDTD

SEQ ID NO: 26703 - protein, 14 aa, synthetic construct
DLGELTYWGIMTDK

SEQ ID NO: 26704 - protein, 14 aa, synthetic construct
ALGELVWGTRRVTD

SEQ ID NO: 26705 - protein, 9 aa, synthetic construct
ALGELVWGL

SEQ ID NO: 26706 - protein, 14 aa, synthetic construct
ALGELVWGIGRVTD

SEQ ID NO: 26707 - protein, 13 aa, synthetic construct
ALGELTYWGRRTD

SEQ ID NO: 26708 - protein, 14 aa, synthetic construct
ALGEVTYWGIRTDK

SEQ ID NO: 26709 - protein, 14 aa, synthetic construct
AIGELVWGIRRVTD

SEQ ID NO: 26710 - protein, 14 aa, synthetic construct
ALGELGWGIRRVTD

SEQ ID NO: 26711 - protein, 14 aa, synthetic construct
ALGEHVWGIRRVTD

SEQ ID NO: 26712 - protein, 14 aa, synthetic construct
ALGDLVWGLRRVTD

SEQ ID NO: 26713 - protein, 14 aa, synthetic construct
ALGELTSWGRRTDK

SEQ ID NO: 26714 - protein, 14 aa, synthetic construct
AFGELTYWGIRTDK

SEQ ID NO: 26715 - protein, 14 aa, synthetic construct
ALGELIWGIRRVTD

SEQ ID NO: 26716 - protein, 14 aa, synthetic construct
LLGTSSGGYGGSPI

SEQ ID NO: 26717 - protein, 14 aa, synthetic construct
ALGKLTSWGIRTDK

SEQ ID NO: 26718 - protein, 14 aa, synthetic construct
ALGERVWGIRRVTD

SEQ ID NO: 26719 - protein, 14 aa, synthetic construct
AFGELVWGIRRVTD

SEQ ID NO: 26720 - protein, 14 aa, synthetic construct
ALEELVWGIRRVTD

SEQ ID NO: 26721 - protein, 14 aa, synthetic construct
ALGELTYLGIRTDK

SEQ ID NO: 26722 - protein, 14 aa, synthetic construct
ALGQLTYWGIRTDK

SEQ ID NO: 26723 - protein, 14 aa, synthetic construct
ALGELTYWGIRIDK

SEQ ID NO: 26724 - protein, 14 aa, synthetic construct
GLGELTYWGIRTDK

SEQ ID NO: 26725 - protein, 14 aa, synthetic construct
AHGELTYWGIRTDK

SEQ ID NO: 26726 - protein, 14 aa, synthetic construct
ALGELTYCGISTDK

SEQ ID NO: 26727 - protein, 14 aa, synthetic construct
ALGELVWGDTEGHR

SEQ ID NO: 26728 - protein, 14 aa, synthetic construct
ALGTLTYWGIRTDK

SEQ ID NO: 26729 - protein, 14 aa, synthetic construct
AVGELVWGIRRVTD

SEQ ID NO: 26730 - protein, 14 aa, synthetic construct
ALGELVWGIRRGTD

SEQ ID NO: 26731 - protein, 8 aa, synthetic construct
ALGELTSW

SEQ ID NO: 26732 - protein, 13 aa, synthetic construct
ALGELGDSSWDTR

SEQ ID NO: 26733 - protein, 14 aa, synthetic construct
ARGDLTYWGIRTDK

SEQ ID NO: 26734 - protein, 14 aa, synthetic construct
ALGKLTYCGIRTDK

SEQ ID NO: 26735 - protein, 14 aa, synthetic construct
DLGELVCGIRRVTD

SEQ ID NO: 26736 - protein, 14 aa, synthetic construct
ALGELTYCGIMTDK

SEQ ID NO: 26737 - protein, 14 aa, synthetic construct
ALGELTYWEIRTDK

SEQ ID NO: 26738 - protein, 14 aa, synthetic construct
ALGELVWGIRRITD

SEQ ID NO: 26739 - protein, 14 aa, synthetic construct
ALVELVWGILRVTD

SEQ ID NO: 26740 - protein, 14 aa, synthetic construct
ALGELTDWGIRTDK

SEQ ID NO: 26741 - protein, 14 aa, synthetic construct
ARGDLVWGIRRVTD

SEQ ID NO: 26742 - protein, 9 aa, synthetic construct
ALGELTSWG

SEQ ID NO: 26743 - protein, 14 aa, synthetic construct
ALGEFVWGIRRVTD

SEQ ID NO: 26744 - protein, 13 aa, synthetic construct
ALGELSYWGIRTD

SEQ ID NO: 26745 - protein, 13 aa, synthetic construct
ALGKLTYWGIRTD

SEQ ID NO: 26746 - protein, 14 aa, synthetic construct
ALGELTYWGKRTDK

SEQ ID NO: 26747 - protein, 14 aa, synthetic construct
ALGDLPTCTGDGDT

SEQ ID NO: 26748 - protein, 14 aa, synthetic construct
ALGELVWGIRRLTD

SEQ ID NO: 26749 - protein, 14 aa, synthetic construct
ALGELTYWGISNDK

SEQ ID NO: 26750 - protein, 14 aa, synthetic construct
ALGERTYWGIRTDK

SEQ ID NO: 26751 - protein, 14 aa, synthetic construct
ALGELTYWWIMTDK

SEQ ID NO: 26752 - protein, 14 aa, synthetic construct
ALGKLVWGIRRVTD

SEQ ID NO: 26753 - protein, 14 aa, synthetic construct
ALVELTYCGIRTDK

SEQ ID NO: 26754 - protein, 14 aa, synthetic construct
DLGELTYWGRRTDK

SEQ ID NO: 26755 - protein, 13 aa, synthetic construct
ALGEPLGDTDKLI

SEQ ID NO: 26756 - protein, 14 aa, synthetic construct
DLWELVWGIRRVTD

SEQ ID NO: 26757 - protein, 14 aa, synthetic construct
PLGELVWGIRRVTD

SEQ ID NO: 26758 - protein, 14 aa, synthetic construct
ALGELTYWGIRPDK

SEQ ID NO: 26759 - protein, 14 aa, synthetic construct
DLVELTYWGIRTDK

SEQ ID NO: 26760 - protein, 14 aa, synthetic construct
ALGEDWGIGTDKLI

SEQ ID NO: 26761 - protein, 14 aa, synthetic construct
ALGALTYWGIRTDK

SEQ ID NO: 26762 - protein, 14 aa, synthetic construct
ALGDATGGYEGDKL

SEQ ID NO: 26763 - protein, 14 aa, synthetic construct
ALGELTYWGITTDK

SEQ ID NO: 26764 - protein, 14 aa, synthetic construct
DLGELTYSGIRTDK

SEQ ID NO: 26765 - protein, 14 aa, synthetic construct
ALWELVCGIRRVTD

SEQ ID NO: 26766 - protein, 14 aa, synthetic construct
ALGEPYWGTTDKLI

SEQ ID NO: 26767 - protein, 14 aa, synthetic construct
ALWELTYWGISTDK

SEQ ID NO: 26768 - protein, 14 aa, synthetic construct
ALGELVLGIRRVTD

SEQ ID NO: 26769 - protein, 14 aa, synthetic construct
ALGELTYWGIKTDK

SEQ ID NO: 26770 - protein, 8 aa, synthetic construct
ALGELVWG

SEQ ID NO: 26771 - protein, 14 aa, synthetic construct
ALGELPYWGIRTDK

SEQ ID NO: 26772 - protein, 13 aa, synthetic construct
ALGELTYWGIMTD

SEQ ID NO: 26773 - protein, 13 aa, synthetic construct
ALGELTSWGIRTD

SEQ ID NO: 26774 - protein, 14 aa, synthetic construct
DLGELTYCGIRTDK

SEQ ID NO: 26775 - protein, 12 aa, synthetic construct
ALGELGGYDKLI

SEQ ID NO: 26776 - protein, 14 aa, synthetic construct
ALGERGWGINTDKL

SEQ ID NO: 26777 - protein, 14 aa, synthetic construct
ALGELVCVIRRVTD

SEQ ID NO: 26778 - protein, 13 aa, synthetic construct
ALGELGGYTDKLI

SEQ ID NO: 26779 - protein, 14 aa, synthetic construct
ALGDLDWGIRRVTD

SEQ ID NO: 26780 - protein, 14 aa, synthetic construct
ALGETGGYGSSWDT

SEQ ID NO: 26781 - protein, 14 aa, synthetic construct
ALGELFCGIRRVTD

SEQ ID NO: 26782 - protein, 14 aa, synthetic construct
ALGEITYCGIRTDK

SEQ ID NO: 26783 - protein, 14 aa, synthetic construct
SLGELFWGIRRVTD

SEQ ID NO: 26784 - protein, 14 aa, synthetic construct
ALGDLTYRGIRTDK

SEQ ID NO: 26785 - protein, 14 aa, synthetic construct
ALGKLTYRGIRTDK

SEQ ID NO: 26786 - protein, 14 aa, synthetic construct
ALGDLVWGRRRVTD

SEQ ID NO: 26787 - protein, 14 aa, synthetic construct
ALGDLVWGIRRATD

SEQ ID NO: 26788 - protein, 14 aa, synthetic construct
ALVELTYWGISTDK

SEQ ID NO: 26789 - protein, 14 aa, synthetic construct
ALGDITYWGIRTDK

SEQ ID NO: 26790 - protein, 14 aa, synthetic construct
ALGELTYRGIMTDK

SEQ ID NO: 26791 - protein, 12 aa, synthetic construct
ALRYWGIPDKLI

SEQ ID NO: 26792 - protein, 14 aa, synthetic construct
ALGEPTGGYTDKLI

SEQ ID NO: 26793 - protein, 14 aa, synthetic construct
ALGEIVWGILRVTD

SEQ ID NO: 26794 - protein, 14 aa, synthetic construct
ALGVLPYVLGDSLI

SEQ ID NO: 26795 - protein, 14 aa, synthetic construct
ALGDPPSYWGSDKL

SEQ ID NO: 26796 - protein, 14 aa, synthetic construct
DLGELTYWGISTDK

SEQ ID NO: 26797 - protein, 14 aa, synthetic construct
AIGELTYCGIRTDK

SEQ ID NO: 26798 - protein, 9 aa, synthetic construct
ALGDLVWGL

SEQ ID NO: 26799 - protein, 9 aa, synthetic construct
ALGELVWWI

SEQ ID NO: 26800 - protein, 14 aa, synthetic construct
DLGELTYWWIRTDK

SEQ ID NO: 26801 - protein, 13 aa, synthetic construct
ALGDLTYWGRRTD

SEQ ID NO: 26802 - protein, 14 aa, synthetic construct
ALGELTSWGLRTDK

SEQ ID NO: 26803 - protein, 14 aa, synthetic construct
ALWELTYWGIMTDK

SEQ ID NO: 26804 - protein, 14 aa, synthetic construct
ALGDLVCGIRRVTD

SEQ ID NO: 26805 - protein, 14 aa, synthetic construct
ALGELTYRGLRTDK

SEQ ID NO: 26806 - protein, 14 aa, synthetic construct
ALGELTYRGISTDK

SEQ ID NO: 26807 - protein, 14 aa, synthetic construct
ALGDLVWGVRRVTD

SEQ ID NO: 26808 - protein, 14 aa, synthetic construct
ALGELTYCGIGTDK

SEQ ID NO: 26809 - protein, 13 aa, synthetic construct
ALGGLTYWGIRTD

SEQ ID NO: 26810 - protein, 14 aa, synthetic construct
ALGELTYCGLRTDK

SEQ ID NO: 26811 - protein, 14 aa, synthetic construct
ALGELVWGIRRSPI

SEQ ID NO: 26812 - protein, 14 aa, synthetic construct
ALGVYWGIQGDKLI

SEQ ID NO: 26813 - protein, 14 aa, synthetic construct
ALGELLPSWGFYTD

SEQ ID NO: 26814 - protein, 14 aa, synthetic construct
DLWELTYWGIRTDK

SEQ ID NO: 26815 - protein, 11 aa, synthetic construct
ALGEPLSLPWG

SEQ ID NO: 26816 - protein, 14 aa, synthetic construct
ALWELTYCGIRTDK

SEQ ID NO: 26817 - protein, 14 aa, synthetic construct
DLGEIVWGIRRVTD

SEQ ID NO: 26818 - protein, 14 aa, synthetic construct
ALGEPTGGYGDKLI

SEQ ID NO: 26819 - protein, 14 aa, synthetic construct
ALGELGDPNTDKLI

SEQ ID NO: 26820 - protein, 13 aa, synthetic construct
ALGELVLGALKLI

SEQ ID NO: 26821 - protein, 14 aa, synthetic construct
ALGESFLGGIHDKL

SEQ ID NO: 26822 - protein, 14 aa, synthetic construct
ALGDLEGLGDTDKL

SEQ ID NO: 26823 - protein, 14 aa, synthetic construct
DLGELVWGIRRFTD

SEQ ID NO: 26824 - protein, 14 aa, synthetic construct
ALGDLAWGIRRVTD

SEQ ID NO: 26825 - protein, 14 aa, synthetic construct
ALGELAGGYPRPLI

SEQ ID NO: 26826 - protein, 14 aa, synthetic construct
ALGELTYWGILTDK

SEQ ID NO: 26827 - protein, 14 aa, synthetic construct
PLGELTYWGIRTDK

SEQ ID NO: 26828 - protein, 14 aa, synthetic construct
ALGELSYWGISTDK

SEQ ID NO: 26829 - protein, 14 aa, synthetic construct
ALGQLVWGIRRVTD

SEQ ID NO: 26830 - protein, 14 aa, synthetic construct
ALGELVCGILRVTD

SEQ ID NO: 26831 - protein, 14 aa, synthetic construct
ALGASLGDTHPDKL

SEQ ID NO: 26832 - protein, 13 aa, synthetic construct
ARGELTYWGIRTD

SEQ ID NO: 26833 - protein, 14 aa, synthetic construct
ALGELTARYGVPDK

SEQ ID NO: 26834 - protein, 14 aa, synthetic construct
DLVELVWGIRRVTD

SEQ ID NO: 26835 - protein, 13 aa, synthetic construct
ALGELTYWGLRTD

SEQ ID NO: 26836 - protein, 14 aa, synthetic construct
ALGELGDMATDKLI

SEQ ID NO: 26837 - protein, 14 aa, synthetic construct
ALGELTYWGLRSDK

SEQ ID NO: 26838 - protein, 13 aa, synthetic construct
GLGELTYWGIRTD

SEQ ID NO: 26839 - protein, 14 aa, synthetic construct
DLGELTYRGIRTDK

SEQ ID NO: 26840 - protein, 14 aa, synthetic construct
ALGDLIWGIRRVTD

SEQ ID NO: 26841 - protein, 14 aa, synthetic construct
ALWDLVWGIRRVTD

SEQ ID NO: 26842 - protein, 14 aa, synthetic construct
ALGELSLYWGIDKL

SEQ ID NO: 26843 - protein, 14 aa, synthetic construct
SLWELTYWGIRTDK

SEQ ID NO: 26844 - protein, 13 aa, synthetic construct
LLGNSSGGYGGSP

SEQ ID NO: 26845 - protein, 14 aa, synthetic construct
ASGELTYWGIRTDK

SEQ ID NO: 26846 - protein, 14 aa, synthetic construct
DLGELSYWGIRTDK

SEQ ID NO: 26847 - protein, 8 aa, synthetic construct
ALGELGWG

SEQ ID NO: 26848 - protein, 14 aa, synthetic construct
DLGELNYWGIRTDK

SEQ ID NO: 26849 - protein, 14 aa, synthetic construct
ALGELVWGISRVTD

SEQ ID NO: 26850 - protein, 14 aa, synthetic construct
DLGELFWGIRRVTD

SEQ ID NO: 26851 - protein, 12 aa, synthetic construct
ALGELGDTDKLI

SEQ ID NO: 26852 - protein, 14 aa, synthetic construct
DLGEITYWGIRTDK

SEQ ID NO: 26853 - protein, 14 aa, synthetic construct
DRGELVWGIRRVTD

SEQ ID NO: 26854 - protein, 9 aa, synthetic construct
ALGELVWGV

SEQ ID NO: 26855 - protein, 14 aa, synthetic construct
DLWELTYWGIMTDK

SEQ ID NO: 26856 - protein, 13 aa, synthetic construct
ALVELTYWGIRTD

SEQ ID NO: 26857 - protein, 14 aa, synthetic construct
ALGEHVLGDTDKLI

SEQ ID NO: 26858 - protein, 14 aa, synthetic construct
ALGELFWWIRRVTD

SEQ ID NO: 26859 - protein, 14 aa, synthetic construct
ALGELVWGKRRVTD

SEQ ID NO: 26860 - protein, 14 aa, synthetic construct
ALGELVWWIRMVTD

SEQ ID NO: 26861 - protein, 14 aa, synthetic construct
ALGEITYWGISTDK

SEQ ID NO: 26862 - protein, 14 aa, synthetic construct
ALGDLFWGIRRVTD

SEQ ID NO: 26863 - protein, 14 aa, synthetic construct
DLGKLTYWGIRTDK

SEQ ID NO: 26864 - protein, 13 aa, synthetic construct
ALGEPYGYTDKLI

SEQ ID NO: 26865 - protein, 14 aa, synthetic construct
ALGKLTYWRIRTDK

SEQ ID NO: 26866 - protein, 14 aa, synthetic construct
ALGELTYWGIGPIN

SEQ ID NO: 26867 - protein, 14 aa, synthetic construct
AIWELVWGIRRVTD

SEQ ID NO: 26868 - protein, 14 aa, synthetic construct
SLGELVCGIRRVTD

SEQ ID NO: 26869 - protein, 14 aa, synthetic construct
SLGELTYWWIRTDK

SEQ ID NO: 26870 - protein, 14 aa, synthetic construct
SLGELTYWGISTDK

SEQ ID NO: 26871 - protein, 13 aa, synthetic construct
SLGELTYWGIRTD

SEQ ID NO: 26872 - protein, 14 aa, synthetic construct
SLGELTYWGIMTDK

SEQ ID NO: 26873 - protein, 14 aa, synthetic construct
ALGELEWGGYPYTD

SEQ ID NO: 26874 - protein, 7 aa, synthetic construct
ALGELVW

SEQ ID NO: 26875 - protein, 14 aa, synthetic construct
ARGELSYWGIRTDK

SEQ ID NO: 26876 - protein, 13 aa, synthetic construct
ALGELTYWGIRAD

SEQ ID NO: 26877 - protein, 9 aa, synthetic construct
ALGELTCWG

SEQ ID NO: 26878 - protein, 10 aa, synthetic construct
ALGERGYELI

SEQ ID NO: 26879 - protein, 13 aa, synthetic construct
ALGNSSGGYGGSP

SEQ ID NO: 26880 - protein, 14 aa, synthetic construct
ALGDLVWGIRTDKL

SEQ ID NO: 26881 - protein, 14 aa, synthetic construct
ALGPLLGDTRADKL

SEQ ID NO: 26882 - protein, 9 aa, synthetic construct
ALGELTYWG

SEQ ID NO: 26883 - protein, 14 aa, synthetic construct
ALGKLTYWGISTDK

SEQ ID NO: 26884 - protein, 13 aa, synthetic construct
ALGEVTYWGIRTD

SEQ ID NO: 26885 - protein, 14 aa, synthetic construct
ALGELTSWGISTDK

SEQ ID NO: 26886 - protein, 14 aa, synthetic construct
ALVELFWGIRRVTD

SEQ ID NO: 26887 - protein, 14 aa, synthetic construct
ALGELDSYVRYADK

SEQ ID NO: 26888 - protein, 14 aa, synthetic construct
VLGELTYWGRRTDK

SEQ ID NO: 26889 - protein, 14 aa, synthetic construct
DLGELTYWWIMTDK

SEQ ID NO: 26890 - protein, 12 aa, synthetic construct
ALGGLGAPDKLI

SEQ ID NO: 26891 - protein, 14 aa, synthetic construct
ALGELDCGIRRVTD

SEQ ID NO: 26892 - protein, 14 aa, synthetic construct
ALGKLTNWGIRTDK

SEQ ID NO: 26893 - protein, 13 aa, synthetic construct
ALGELTYSGIRTD

SEQ ID NO: 26894 - protein, 13 aa, synthetic construct
ALGELAYWGIRTD

SEQ ID NO: 26895 - protein, 13 aa, synthetic construct
SWGPRLGDTEGHR

SEQ ID NO: 26896 - protein, 14 aa, synthetic construct
ALGELCWGTQYTDK

SEQ ID NO: 26897 - protein, 14 aa, synthetic construct
ALGEWGGDTPTDKL

SEQ ID NO: 26898 - protein, 14 aa, synthetic construct
AIGELTYWGISTDK

SEQ ID NO: 26899 - protein, 14 aa, synthetic construct
ALGELTYSGRRTDK

SEQ ID NO: 26900 - protein, 14 aa, synthetic construct
ALGELTSGGIRTDK

SEQ ID NO: 26901 - protein, 14 aa, synthetic construct
AIGELVWGIRSVTD

SEQ ID NO: 26902 - protein, 14 aa, synthetic construct
DLGELVWGIRMVTD

SEQ ID NO: 26903 - protein, 14 aa, synthetic construct
ALGELEYWGPYTDK

SEQ ID NO: 26904 - protein, 13 aa, synthetic construct
ALGELSYWGLRTD

SEQ ID NO: 26905 - protein, 14 aa, synthetic construct
ALGDLTYWGVRTDK

SEQ ID NO: 26906 - protein, 14 aa, synthetic construct
ALGELRSGGYADKL

SEQ ID NO: 26907 - protein, 14 aa, synthetic construct
ALGDFTYWGIRTDK

SEQ ID NO: 26908 - protein, 14 aa, synthetic construct
LLGNSPTGGSGPIN

SEQ ID NO: 26909 - protein, 14 aa, synthetic construct
ALVKLTYWGIRTDK

SEQ ID NO: 26910 - protein, 14 aa, synthetic construct
DLGELVWWIRRVTD

SEQ ID NO: 26911 - protein, 14 aa, synthetic construct
AVGELTYWGIRTDK

SEQ ID NO: 26912 - protein, 14 aa, synthetic construct
ALGEPGGSYTDKLI

SEQ ID NO: 26913 - protein, 14 aa, synthetic construct
ALGDLTYWWIRTDK

SEQ ID NO: 26914 - protein, 13 aa, synthetic construct
ALGELTYWGIWTD

SEQ ID NO: 26915 - protein, 14 aa, synthetic construct
ALGELTYWGRGTDK

SEQ ID NO: 26916 - protein, 14 aa, synthetic construct
ALGELTYWGSRTDK

SEQ ID NO: 26917 - protein, 10 aa, synthetic construct
ALGENTDKLI

SEQ ID NO: 26918 - protein, 12 aa, synthetic construct
ALGELNAYVYWG

SEQ ID NO: 26919 - protein, 14 aa, synthetic construct
ALVELTYCGISTDK

SEQ ID NO: 26920 - protein, 14 aa, synthetic construct
ALGELYWGIRRVTD

SEQ ID NO: 26921 - protein, 14 aa, synthetic construct
ALGELLWGIRRVTD

SEQ ID NO: 26922 - protein, 14 aa, synthetic construct
ALGELRTGGYPSSW

SEQ ID NO: 26923 - protein, 14 aa, synthetic construct
ALGELRGGVSYTDK

SEQ ID NO: 26924 - protein, 14 aa, synthetic construct
LWGNSSGGYGGSPI

SEQ ID NO: 26925 - protein, 14 aa, synthetic construct
ASGELVWGIRRVTD

SEQ ID NO: 26926 - protein, 14 aa, synthetic construct
ALGDLSYWGIRTDK

SEQ ID NO: 26927 - protein, 14 aa, synthetic construct
ALGRSYGGGYADKL

SEQ ID NO: 26928 - protein, 14 aa, synthetic construct
ALGEPPTWGINKLI

SEQ ID NO: 26929 - protein, 9 aa, synthetic construct
ALGVGGKLI

SEQ ID NO: 26930 - protein, 14 aa, synthetic construct
ALGEPRTGGPPYTD

SEQ ID NO: 26931 - protein, 14 aa, synthetic construct
ARGELVWGIRSVTD

SEQ ID NO: 26932 - protein, 12 aa, synthetic construct
ALGDGLPPDKLI

SEQ ID NO: 26933 - protein, 14 aa, synthetic construct
ALGELVWEIRRVTD

SEQ ID NO: 26934 - protein, 13 aa, synthetic construct
ALGELTYWGIRSD

SEQ ID NO: 26935 - protein, 9 aa, synthetic construct
ALGDLTSWG

SEQ ID NO: 26936 - protein, 14 aa, synthetic construct
ALGELVLGIRMVTD

SEQ ID NO: 26937 - protein, 8 aa, synthetic construct
ALGELFWG

SEQ ID NO: 26938 - protein, 14 aa, synthetic construct
DLGELTYWGLRTDK

SEQ ID NO: 26939 - protein, 14 aa, synthetic construct
ALGELVPTWGYADK

SEQ ID NO: 26940 - protein, 14 aa, synthetic construct
ALGELFWGIRRDTD

SEQ ID NO: 26941 - protein, 14 aa, synthetic construct
ALVELTYRGIRTDK

SEQ ID NO: 26942 - protein, 14 aa, synthetic construct
ALVELTYWGIMTDK

SEQ ID NO: 26943 - protein, 14 aa, synthetic construct
ALVELNYWGIRTDK

SEQ ID NO: 26944 - protein, 14 aa, synthetic construct
DLGELTCWGIRTDK

SEQ ID NO: 26945 - protein, 14 aa, synthetic construct
ALVELTYSGIRTDK

SEQ ID NO: 26946 - protein, 14 aa, synthetic construct
ALGELFLLGDVLTA

SEQ ID NO: 26947 - protein, 13 aa, synthetic construct
DLGELTYWGIRTD

SEQ ID NO: 26948 - protein, 14 aa, synthetic construct
DLGELTYWGIGTDK

SEQ ID NO: 26949 - protein, 14 aa, synthetic construct
ALVELTYWGIRADK

SEQ ID NO: 26950 - protein, 14 aa, synthetic construct
ACGELTYWGIRTDK

SEQ ID NO: 26951 - protein, 14 aa, synthetic construct
ALGELRLQGIQYTD

SEQ ID NO: 26952 - protein, 14 aa, synthetic construct
ALGELVCGIRRFTD

SEQ ID NO: 26953 - protein, 14 aa, synthetic construct
ALGELTYWGIMNDK

SEQ ID NO: 26954 - protein, 13 aa, synthetic construct
ARGDLTYWGRRTD

SEQ ID NO: 26955 - protein, 14 aa, synthetic construct
ALGELTGGYPYTDK

SEQ ID NO: 26956 - protein, 9 aa, synthetic construct
ARGDLVWGV

SEQ ID NO: 26957 - protein, 14 aa, synthetic construct
ALGELTFWGIRTDK

SEQ ID NO: 26958 - protein, 14 aa, synthetic construct
ALGELTFWGIGTDK

SEQ ID NO: 26959 - protein, 10 aa, synthetic construct
ALGELTDKLI

SEQ ID NO: 26960 - protein, 14 aa, synthetic construct
ALWELDWGIRRVTD

SEQ ID NO: 26961 - protein, 14 aa, synthetic construct
ALWELNYWGIRTDK

SEQ ID NO: 26962 - protein, 6 aa, synthetic construct
ALGELT

SEQ ID NO: 26963 - protein, 14 aa, synthetic construct
ARGELTYWGIWTDK

SEQ ID NO: 26964 - protein, 14 aa, synthetic construct
ALGELSYWGVRTDK

SEQ ID NO: 26965 - protein, 14 aa, synthetic construct
ALGELTYWGIRNDK

SEQ ID NO: 26966 - protein, 14 aa, synthetic construct
ALGELSYWGIWTDK

SEQ ID NO: 26967 - protein, 14 aa, synthetic construct
ALGELSYWGIRSDK

SEQ ID NO: 26968 - protein, 13 aa, synthetic construct
ALGELTNWGIRTD

SEQ ID NO: 26969 - protein, 14 aa, synthetic construct
ALWELTNWGIRTDK

SEQ ID NO: 26970 - protein, 8 aa, synthetic construct
ALGELFWW

SEQ ID NO: 26971 - protein, 14 aa, synthetic construct
ALGELTYCGIRSDK

SEQ ID NO: 26972 - protein, 14 aa, synthetic construct
ALWELVWGIRSVTD

SEQ ID NO: 26973 - protein, 14 aa, synthetic construct
ALWELVWVIRRVTD

SEQ ID NO: 26974 - protein, 13 aa, synthetic construct
ALGELTYGGIRTD

SEQ ID NO: 26975 - protein, 14 aa, synthetic construct
ALGELTYCVIRTDK

SEQ ID NO: 26976 - protein, 14 aa, synthetic construct
ALGELTYCGRRTDK

SEQ ID NO: 26977 - protein, 14 aa, synthetic construct
ALWEVTYWGIRTDK

SEQ ID NO: 26978 - protein, 14 aa, synthetic construct
APGELDWGDTPINS

SEQ ID NO: 26979 - protein, 14 aa, synthetic construct
ALWELTSWGIRTDK

SEQ ID NO: 26980 - protein, 13 aa, synthetic construct
APGELTYWGIRTD

SEQ ID NO: 26981 - protein, 14 aa, synthetic construct
ALGELTSWGIWTDK

SEQ ID NO: 26982 - protein, 14 aa, synthetic construct
APGELVWGIRSVTD

SEQ ID NO: 26983 - protein, 14 aa, synthetic construct
ALGELTSWAIRTDK

SEQ ID NO: 26984 - protein, 14 aa, synthetic construct
ALGELTYSGISTDK

SEQ ID NO: 26985 - protein, 14 aa, synthetic construct
APGKLTYWGIRTDK

SEQ ID NO: 26986 - protein, 14 aa, synthetic construct
ALGELSYWGIMTDK

SEQ ID NO: 26987 - protein, 14 aa, synthetic construct
ALGELSYVLGEYTD

SEQ ID NO: 26988 - protein, 14 aa, synthetic construct
ALGELTYWGIRTIN

SEQ ID NO: 26989 - protein, 14 aa, synthetic construct
ALGELGGGYADKLI

SEQ ID NO: 26990 - protein, 14 aa, synthetic construct
DLCELTYWGIRTDK

SEQ ID NO: 26991 - protein, 14 aa, synthetic construct
ALVELVWGIRRFTD

SEQ ID NO: 26992 - protein, 14 aa, synthetic construct
DLGDLVWGIRRVTD

SEQ ID NO: 26993 - protein, 14 aa, synthetic construct
ALGELTYWWIRTYK

SEQ ID NO: 26994 - protein, 14 aa, synthetic construct
DLGEITYWGIMTDK

SEQ ID NO: 26995 - protein, 14 aa, synthetic construct
DLGELDWGIRRVTD

SEQ ID NO: 26996 - protein, 14 aa, synthetic construct
ALVELTYWGLRTDK

SEQ ID NO: 26997 - protein, 14 aa, synthetic construct
ALWEITYWGIRTDK

SEQ ID NO: 26998 - protein, 6 aa, synthetic construct
ALGELV

SEQ ID NO: 26999 - protein, 14 aa, synthetic construct
ALGELGFSGGTDKL

SEQ ID NO: 27000 - protein, 13 aa, synthetic construct
ALGELGDTPDKLI

SEQ ID NO: 27001 - protein, 14 aa, synthetic construct
DLGELGWGIRRVTD

SEQ ID NO: 27002 - protein, 14 aa, synthetic construct
ALGELVCGIRKVTD

SEQ ID NO: 27003 - protein, 14 aa, synthetic construct
ALVELTYWGISNDK

SEQ ID NO: 27004 - protein, 14 aa, synthetic construct
ALVELVWGIRSVTD

SEQ ID NO: 27005 - protein, 14 aa, synthetic construct
ALGELTYWGVWTDK

SEQ ID NO: 27006 - protein, 9 aa, synthetic construct
ALVELVWGL

SEQ ID NO: 27007 - protein, 14 aa, synthetic construct
ALGELTYWGVRSDK

SEQ ID NO: 27008 - protein, 14 aa, synthetic construct
DIGELTYWGIRTDK

SEQ ID NO: 27009 - protein, 14 aa, synthetic construct
DIGEITYWGIRTDK

SEQ ID NO: 27010 - protein, 14 aa, synthetic construct
ALGELLYWGIRGLI

SEQ ID NO: 27011 - protein, 14 aa, synthetic construct
ALVEPTYWGIRTDK

SEQ ID NO: 27012 - protein, 14 aa, synthetic construct
ALGELNYCGIRTDK

SEQ ID NO: 27013 - protein, 14 aa, synthetic construct
AVGELVWGTRRVTD

SEQ ID NO: 27014 - protein, 14 aa, synthetic construct
AVGELVWGIRSVTD

SEQ ID NO: 27015 - protein, 13 aa, synthetic construct
ALGELTYWGMRTD

SEQ ID NO: 27016 - protein, 14 aa, synthetic construct
AVGELVCGIRRVTD

SEQ ID NO: 27017 - protein, 8 aa, synthetic construct
ALGELPLR

SEQ ID NO: 27018 - protein, 14 aa, synthetic construct
ARVELVWGIRRVTD

SEQ ID NO: 27019 - protein, 14 aa, synthetic construct
ARGQLTYWGIRTDK

SEQ ID NO: 27020 - protein, 14 aa, synthetic construct
ALGELTYWGISADK

SEQ ID NO: 27021 - protein, 14 aa, synthetic construct
ALGELDWGILRVTD

SEQ ID NO: 27022 - protein, 14 aa, synthetic construct
DLVELTYWGIMTDK

SEQ ID NO: 27023 - protein, 14 aa, synthetic construct
ALGDLTYGGIRTDK

SEQ ID NO: 27024 - protein, 14 aa, synthetic construct
LLGSSSGGYGGSPI

SEQ ID NO: 27025 - protein, 14 aa, synthetic construct
ALGDLTYSGIRTDK

SEQ ID NO: 27026 - protein, 14 aa, synthetic construct
LLGNSPTVGSGPIN

SEQ ID NO: 27027 - protein, 14 aa, synthetic construct
LLGNSSGGYGGPPI

SEQ ID NO: 27028 - protein, 14 aa, synthetic construct
ALGDLTYCGIRTDK

SEQ ID NO: 27029 - protein, 14 aa, synthetic construct
ALGDLTSWGLRTDK

SEQ ID NO: 27030 - protein, 13 aa, synthetic construct
ALGVLGGYTDKLI

SEQ ID NO: 27031 - protein, 14 aa, synthetic construct
ALGEPPGGATDKLI

SEQ ID NO: 27032 - protein, 14 aa, synthetic construct
LLGYSSGGYGGSPI

SEQ ID NO: 27033 - protein, 14 aa, synthetic construct
ALGDLTYWGIGTDK

SEQ ID NO: 27034 - protein, 14 aa, synthetic construct
LLLPSWGIRAPINS

SEQ ID NO: 27035 - protein, 14 aa, synthetic construct
ALGEPRFFPGTDTD

SEQ ID NO: 27036 - protein, 14 aa, synthetic construct
ALGDLGWGIRRVTD

SEQ ID NO: 27037 - protein, 14 aa, synthetic construct
ALGEPSSLLGDTDK

SEQ ID NO: 27038 - protein, 14 aa, synthetic construct
ALGEPTCWGIRTDK

SEQ ID NO: 27039 - protein, 13 aa, synthetic construct
ALGDLGAYTDKLI

SEQ ID NO: 27040 - protein, 14 aa, synthetic construct
ALGVFPRKYTDKLI

SEQ ID NO: 27041 - protein, 14 aa, synthetic construct
LLGNSPTGGQGPIN

SEQ ID NO: 27042 - protein, 14 aa, synthetic construct
ALGDLTYWGIMTDK

SEQ ID NO: 27043 - protein, 12 aa, synthetic construct
ALGDPTFLPAWG

SEQ ID NO: 27044 - protein, 14 aa, synthetic construct
ALGELYWGIRGDKL

SEQ ID NO: 27045 - protein, 14 aa, synthetic construct
ALGDPFLTGGYADK

SEQ ID NO: 27046 - protein, 14 aa, synthetic construct
ALGDPFLRGIRVTD

SEQ ID NO: 27047 - protein, 14 aa, synthetic construct
ALGDLYWGIRGDKL

SEQ ID NO: 27048 - protein, 14 aa, synthetic construct
ALGYLTYWGIRTDK

SEQ ID NO: 27049 - protein, 14 aa, synthetic construct
ALGELWGIRLTDKL

SEQ ID NO: 27050 - protein, 14 aa, synthetic construct
ALGDLVWGIWRVTD

SEQ ID NO: 27051 - protein, 14 aa, synthetic construct
ALGVYGWGDTDKLI

SEQ ID NO: 27052 - protein, 14 aa, synthetic construct
ALGDLVWGIRRFTD

SEQ ID NO: 27053 - protein, 14 aa, synthetic construct
ALGDLTYWGISTDK

SEQ ID NO: 27054 - protein, 9 aa, synthetic construct
ALGEPDKLI

SEQ ID NO: 27055 - protein, 14 aa, synthetic construct
ALGEPFLYWGILTD

SEQ ID NO: 27056 - protein, 14 aa, synthetic construct
ALGDLVGGLRRVTD

SEQ ID NO: 27057 - protein, 14 aa, synthetic construct
ALGDLTYWRIRTDK

SEQ ID NO: 27058 - protein, 14 aa, synthetic construct
LFGNSSGGYGGSPI

SEQ ID NO: 27059 - protein, 14 aa, synthetic construct
LLGNSAGGYGGSPI

SEQ ID NO: 27060 - protein, 14 aa, synthetic construct
LLGNSPGGYGGSPI

SEQ ID NO: 27061 - protein, 14 aa, synthetic construct
LVGNSSGGYGGSPI

SEQ ID NO: 27062 - protein, 14 aa, synthetic construct
ALGDLFLLGDHKLI

SEQ ID NO: 27063 - protein, 14 aa, synthetic construct
PLGELTYSGIRTDK

SEQ ID NO: 27064 - protein, 13 aa, synthetic construct
ALGGGDKYTDKLI

SEQ ID NO: 27065 - protein, 14 aa, synthetic construct
SLVELVWGIRRVTD

SEQ ID NO: 27066 - protein, 6 aa, synthetic construct
ALGEVV

SEQ ID NO: 27067 - protein, 14 aa, synthetic construct
AIGELTYRGIRTDK

SEQ ID NO: 27068 - protein, 14 aa, synthetic construct
ALGEYSYVGIRPDK

SEQ ID NO: 27069 - protein, 14 aa, synthetic construct
ALGGAFHYWGNTDK

SEQ ID NO: 27070 - protein, 14 aa, synthetic construct
ALGGFVLGDDTDKL

SEQ ID NO: 27071 - protein, 13 aa, synthetic construct
TLGELTYWGIRTD

SEQ ID NO: 27072 - protein, 14 aa, synthetic construct
TLGELVWGILRVTD

SEQ ID NO: 27073 - protein, 14 aa, synthetic construct
PLGELVWAIRRVTD

SEQ ID NO: 27074 - protein, 14 aa, synthetic construct
AIGEITYWGIRTDK

SEQ ID NO: 27075 - protein, 14 aa, synthetic construct
AIGEITYWGIMTDK

SEQ ID NO: 27076 - protein, 14 aa, synthetic construct
ALGGLFWGIRRVTD

SEQ ID NO: 27077 - protein, 14 aa, synthetic construct
AICELTYWGIRTDK

SEQ ID NO: 27078 - protein, 14 aa, synthetic construct
ALGGLHMGDTPDKL

SEQ ID NO: 27079 - protein, 14 aa, synthetic construct
ALGKLAYWGIRTDK

SEQ ID NO: 27080 - protein, 14 aa, synthetic construct
VLGKLTYWGIRTDK

SEQ ID NO: 27081 - protein, 14 aa, synthetic construct
ALGKLTYWGIMTDK

SEQ ID NO: 27082 - protein, 14 aa, synthetic construct
ALGKLTYWGIRSDK

SEQ ID NO: 27083 - protein, 14 aa, synthetic construct
ALGEVTYWGRRTDK

SEQ ID NO: 27084 - protein, 14 aa, synthetic construct
AIVELTYCGIRTDK

SEQ ID NO: 27085 - protein, 13 aa, synthetic construct
ALGEPTYWGIRTD

SEQ ID NO: 27086 - protein, 13 aa, synthetic construct
ALGAYWGTYDKLI

SEQ ID NO: 27087 - protein, 14 aa, synthetic construct
ALGNLTYWGIRTDK

SEQ ID NO: 27088 - protein, 12 aa, synthetic construct
ALFSEGYTDKLI

SEQ ID NO: 27089 - protein, 14 aa, synthetic construct
ALEGLTYWGIRTDK

SEQ ID NO: 27090 - protein, 14 aa, synthetic construct
ALGERTRGANTDKL

SEQ ID NO: 27091 - protein, 14 aa, synthetic construct
ALGLPLLGEKYTDK

SEQ ID NO: 27092 - protein, 14 aa, synthetic construct
ALEDLVWGIRRVTD

SEQ ID NO: 27093 - protein, 14 aa, synthetic construct
ALCELVWGIRSVTD

SEQ ID NO: 27094 - protein, 14 aa, synthetic construct
ALCELVWGIRRVTD

SEQ ID NO: 27095 - protein, 14 aa, synthetic construct
SLGELTSWGIRTDK

SEQ ID NO: 27096 - protein, 14 aa, synthetic construct
ALGKVTYWGIRTDK

SEQ ID NO: 27097 - protein, 14 aa, synthetic construct
SLGELTYSGIRTDK

SEQ ID NO: 27098 - protein, 14 aa, synthetic construct
ALGKPTYWGIRTDK

SEQ ID NO: 27099 - protein, 14 aa, synthetic construct
ALGETRTGGYENKL

SEQ ID NO: 27100 - protein, 13 aa, synthetic construct
ALGDPLGGIRKLI

SEQ ID NO: 27101 - protein, 14 aa, synthetic construct
ALGELTYGGLRTDK

SEQ ID NO: 27102 - protein, 14 aa, synthetic construct
ALGELVWGIRGSPI

SEQ ID NO: 27103 - protein, 14 aa, synthetic construct
GLGELTYWGIRSDK

SEQ ID NO: 27104 - protein, 14 aa, synthetic construct
ALGELAYWGLRTDK

SEQ ID NO: 27105 - protein, 14 aa, synthetic construct
ALGDVTYWGIRTDK

SEQ ID NO: 27106 - protein, 14 aa, synthetic construct
ALGELAYVGIPDKL

SEQ ID NO: 27107 - protein, 14 aa, synthetic construct
ALGDVVWGIRRVTD

SEQ ID NO: 27108 - protein, 14 aa, synthetic construct
ALGELVWGTRRATD

SEQ ID NO: 27109 - protein, 14 aa, synthetic construct
DLGELVSGIRRVTD

SEQ ID NO: 27110 - protein, 14 aa, synthetic construct
GHGELTYWGIRTDK

SEQ ID NO: 27111 - protein, 14 aa, synthetic construct
ALGELASWGIRTDK

SEQ ID NO: 27112 - protein, 14 aa, synthetic construct
ALGEDVGGYTDKLI

SEQ ID NO: 27113 - protein, 14 aa, synthetic construct
DLGELVWGILRVTD

SEQ ID NO: 27114 - protein, 14 aa, synthetic construct
ALGELVWGLRRGTD

SEQ ID NO: 27115 - protein, 14 aa, synthetic construct
ALGELVWGLLRVTD

SEQ ID NO: 27116 - protein, 14 aa, synthetic construct
ALGELVWAIRRVTD

SEQ ID NO: 27117 - protein, 14 aa, synthetic construct
ALGELALRGIRVDK

SEQ ID NO: 27118 - protein, 14 aa, synthetic construct
ALGEGLGGHTDKLI

SEQ ID NO: 27119 - protein, 14 aa, synthetic construct
ALGELALGLTDKLI

SEQ ID NO: 27120 - protein, 12 aa, synthetic construct
ALGEKRGPDKLI

SEQ ID NO: 27121 - protein, 13 aa, synthetic construct
ALGELVWGIRRDT

SEQ ID NO: 27122 - protein, 14 aa, synthetic construct
ALGEIVLGIRRVTD

SEQ ID NO: 27123 - protein, 14 aa, synthetic construct
ALGEIVCGIRSVTD

SEQ ID NO: 27124 - protein, 14 aa, synthetic construct
ALGEIVCGIRRVTD

SEQ ID NO: 27125 - protein, 14 aa, synthetic construct
DLVELFWGIRRVTD

SEQ ID NO: 27126 - protein, 14 aa, synthetic construct
DLGGLTYWGIRTDK

SEQ ID NO: 27127 - protein, 9 aa, synthetic construct
DLGELTYWR

SEQ ID NO: 27128 - protein, 10 aa, synthetic construct
ALGDWGDKLI

SEQ ID NO: 27129 - protein, 14 aa, synthetic construct
GLGELTYWGVRTDK

SEQ ID NO: 27130 - protein, 14 aa, synthetic construct
GLGELTYWGIWTDK

SEQ ID NO: 27131 - protein, 14 aa, synthetic construct
ALVELTNCAIRTDK

SEQ ID NO: 27132 - protein, 14 aa, synthetic construct
ALWELFWGIRRVTD

SEQ ID NO: 27133 - protein, 14 aa, synthetic construct
ALGKLVWWIRTDKL

SEQ ID NO: 27134 - protein, 9 aa, synthetic construct
ALGGVASWG

SEQ ID NO: 27135 - protein, 14 aa, synthetic construct
ALGKLVRGIRRVTD

SEQ ID NO: 27136 - protein, 14 aa, synthetic construct
ALGKLTYWWIRTDK

SEQ ID NO: 27137 - protein, 14 aa, synthetic construct
ALGKLTYWGMRTDK

SEQ ID NO: 27138 - protein, 14 aa, synthetic construct
ALWELFWGISRVTD

SEQ ID NO: 27139 - protein, 14 aa, synthetic construct
ALGKLTYWGKRTDK

SEQ ID NO: 27140 - protein, 14 aa, synthetic construct
ALWELTYWWIRTDK

SEQ ID NO: 27141 - protein, 14 aa, synthetic construct
ALVELTYCGIMTDK

SEQ ID NO: 27142 - protein, 8 aa, synthetic construct
ALWELGWG

SEQ ID NO: 27143 - protein, 14 aa, synthetic construct
ALWELVWGIRRATD

SEQ ID NO: 27144 - protein, 14 aa, synthetic construct
ALGGVLGVLYTDKL

SEQ ID NO: 27145 - protein, 14 aa, synthetic construct
ALWELVWGILRVTD

SEQ ID NO: 27146 - protein, 14 aa, synthetic construct
ALGGVVWGIRRVTD

SEQ ID NO: 27147 - protein, 8 aa, synthetic construct
ALVELFWG

SEQ ID NO: 27148 - protein, 13 aa, synthetic construct
ALVELSYCGISTD

SEQ ID NO: 27149 - protein, 14 aa, synthetic construct
ALWELSYWGIMSDK

SEQ ID NO: 27150 - protein, 14 aa, synthetic construct
ALWELSYWGMRTDK

SEQ ID NO: 27151 - protein, 13 aa, synthetic construct
ALWELGDSSWDTR

SEQ ID NO: 27152 - protein, 13 aa, synthetic construct
ALVELTYCGIRTD

SEQ ID NO: 27153 - protein, 12 aa, synthetic construct
ALWELVSGISRV

SEQ ID NO: 27154 - protein, 14 aa, synthetic construct
ALGKSSGGYGGSPI

SEQ ID NO: 27155 - protein, 14 aa, synthetic construct
ALVDLVWGIRRVTD

SEQ ID NO: 27156 - protein, 14 aa, synthetic construct
ALWELVWGIRTDKL

SEQ ID NO: 27157 - protein, 14 aa, synthetic construct
ALGNLTYWGIRSDK

SEQ ID NO: 27158 - protein, 13 aa, synthetic construct
ALVELTYRGIRTD

SEQ ID NO: 27159 - protein, 14 aa, synthetic construct
ALGNLTYSGIRTDK

SEQ ID NO: 27160 - protein, 14 aa, synthetic construct
ALVEHTNWGIRTDK

SEQ ID NO: 27161 - protein, 14 aa, synthetic construct
ALVELTYCVIRTDK

SEQ ID NO: 27162 - protein, 14 aa, synthetic construct
ALWELFCGIRRVTD

SEQ ID NO: 27163 - protein, 14 aa, synthetic construct
ALGGPSYVAGGYTD

SEQ ID NO: 27164 - protein, 14 aa, synthetic construct
ALGGPYWGIRVDKL

SEQ ID NO: 27165 - protein, 14 aa, synthetic construct
ALGGRTYWGIRTDK

SEQ ID NO: 27166 - protein, 14 aa, synthetic construct
ALVEHTYWGIRTDK

SEQ ID NO: 27167 - protein, 14 aa, synthetic construct
ALGLLTYWGIRTDK

SEQ ID NO: 27168 - protein, 14 aa, synthetic construct
ALGLLTYCGIRTDK

SEQ ID NO: 27169 - protein, 13 aa, synthetic construct
ALGKYWGIRDKLI

SEQ ID NO: 27170 - protein, 9 aa, synthetic construct
ALGGVACWG

SEQ ID NO: 27171 - protein, 14 aa, synthetic construct
ALGKVTYWGRRTDK

SEQ ID NO: 27172 - protein, 14 aa, synthetic construct
ALWELFWGIRRDTD

SEQ ID NO: 27173 - protein, 14 aa, synthetic construct
ALVEHTYWWIRTDK

SEQ ID NO: 27174 - protein, 11 aa, synthetic construct
ALGGYGADKLI

SEQ ID NO: 27175 - protein, 13 aa, synthetic construct
ALGKLTYWGIMTD

SEQ ID NO: 27176 - protein, 14 aa, synthetic construct
ALGKITYWAIRTDK

SEQ ID NO: 27177 - protein, 14 aa, synthetic construct
ALGKLTYWGIKTDK

SEQ ID NO: 27178 - protein, 14 aa, synthetic construct
ALVELAYWGIRTDK

SEQ ID NO: 27179 - protein, 14 aa, synthetic construct
ALWELTYGGIRTDK

SEQ ID NO: 27180 - protein, 14 aa, synthetic construct
ALGKLTSRGIRTDK

SEQ ID NO: 27181 - protein, 14 aa, synthetic construct
ALGKLTNRGIMTDK

SEQ ID NO: 27182 - protein, 14 aa, synthetic construct
ALWELTYLGIRKDK

SEQ ID NO: 27183 - protein, 14 aa, synthetic construct
ALGKLTHWGIRTDK

SEQ ID NO: 27184 - protein, 13 aa, synthetic construct
ALWELTYWGIMTD

SEQ ID NO: 27185 - protein, 14 aa, synthetic construct
ALVELCCGIRRDTD

SEQ ID NO: 27186 - protein, 13 aa, synthetic construct
ALWELTYWGIRTD

SEQ ID NO: 27187 - protein, 7 aa, synthetic construct
ALVELKF

SEQ ID NO: 27188 - protein, 14 aa, synthetic construct
ALGKLSYWGIRTDK

SEQ ID NO: 27189 - protein, 7 aa, synthetic construct
ALVELFW

SEQ ID NO: 27190 - protein, 14 aa, synthetic construct
ALGKLSYSGISTDK

SEQ ID NO: 27191 - protein, 14 aa, synthetic construct
ALGKLNYWGISTDK

SEQ ID NO: 27192 - protein, 14 aa, synthetic construct
ALWELTYWGRRTDK

SEQ ID NO: 27193 - protein, 13 aa, synthetic construct
ALGKLLGDTDKLI

SEQ ID NO: 27194 - protein, 14 aa, synthetic construct
ALWELTYWVIRTDK

SEQ ID NO: 27195 - protein, 14 aa, synthetic construct
ALGKITYCGIMTDK

SEQ ID NO: 27196 - protein, 14 aa, synthetic construct
ALGKITYWGIRTDK

SEQ ID NO: 27197 - protein, 14 aa, synthetic construct
ALWELTYCGISTDK

SEQ ID NO: 27198 - protein, 14 aa, synthetic construct
ALVEIVWGIRRVTD

SEQ ID NO: 27199 - protein, 14 aa, synthetic construct
ALGKINYWGLRTDK

SEQ ID NO: 27200 - protein, 14 aa, synthetic construct
ALGKLTYCGRRTDK

SEQ ID NO: 27201 - protein, 14 aa, synthetic construct
ALGKLTYWGIAPGT

SEQ ID NO: 27202 - protein, 14 aa, synthetic construct
ALWELTYCGIMTDK

SEQ ID NO: 27203 - protein, 14 aa, synthetic construct
ALGKLTYSGIRTDK

SEQ ID NO: 27204 - protein, 10 aa, synthetic construct
ALGGYWGSLI

SEQ ID NO: 27205 - protein, 14 aa, synthetic construct
ALWELVCVIRWVTD

SEQ ID NO: 27206 - protein, 14 aa, synthetic construct
ALGKLTYGGIRTDK

SEQ ID NO: 27207 - protein, 14 aa, synthetic construct
ALGHLTYWGIRTDK

SEQ ID NO: 27208 - protein, 14 aa, synthetic construct
ALVEHVSGIRRVTD

SEQ ID NO: 27209 - protein, 14 aa, synthetic construct
ALGKLTYCGISTDK

SEQ ID NO: 27210 - protein, 14 aa, synthetic construct
ALGKFTYWGIRTDK

SEQ ID NO: 27211 - protein, 9 aa, synthetic construct
ALGHTDKLI

SEQ ID NO: 27212 - protein, 6 aa, synthetic construct
ALGNSS

SEQ ID NO: 27213 - protein, 14 aa, synthetic construct
ALGKLTSWGISTDK

SEQ ID NO: 27214 - protein, 14 aa, synthetic construct
ALWELVCGIRMVTD

SEQ ID NO: 27215 - protein, 14 aa, synthetic construct
ALVEHVWGIRRVTD

SEQ ID NO: 27216 - protein, 13 aa, synthetic construct
ALGKLTSWGIRTD

SEQ ID NO: 27217 - protein, 14 aa, synthetic construct
ALWELVCGILRVTD

SEQ ID NO: 27218 - protein, 14 aa, synthetic construct
ALVEIVGGIRRVTD

SEQ ID NO: 27219 - protein, 14 aa, synthetic construct
ALGNLTYWGRRTDK

SEQ ID NO: 27220 - protein, 14 aa, synthetic construct
ALRDLTYSGIRTDK

SEQ ID NO: 27221 - protein, 13 aa, synthetic construct
ALGNSSVGYGGSP

SEQ ID NO: 27222 - protein, 14 aa, synthetic construct
ALVEPGGSYTDKLI

SEQ ID NO: 27223 - protein, 13 aa, synthetic construct
ALVELTYWGRRTD

SEQ ID NO: 27224 - protein, 14 aa, synthetic construct
ALRELSYWGRWTDK

SEQ ID NO: 27225 - protein, 9 aa, synthetic construct
ALGVVTSWG

SEQ ID NO: 27226 - protein, 14 aa, synthetic construct
ALVELVWGYGGSPI

SEQ ID NO: 27227 - protein, 14 aa, synthetic construct
ALGVSFLPYTDKLI

SEQ ID NO: 27228 - protein, 14 aa, synthetic construct
ALGVPVLGDKRTDK

SEQ ID NO: 27229 - protein, 14 aa, synthetic construct
ALVELVWWIRRFTD

SEQ ID NO: 27230 - protein, 14 aa, synthetic construct
ALGVLVWWIRRVTD

SEQ ID NO: 27231 - protein, 14 aa, synthetic construct
ALGVLTYWGLRTDK

SEQ ID NO: 27232 - protein, 14 aa, synthetic construct
ALVELVWWIRRVTD

SEQ ID NO: 27233 - protein, 14 aa, synthetic construct
ALVEPKTGGYTDKL

SEQ ID NO: 27234 - protein, 14 aa, synthetic construct
ALVELVWGLRSVTD

SEQ ID NO: 27235 - protein, 14 aa, synthetic construct
ALRELTYSRIRTDK

SEQ ID NO: 27236 - protein, 14 aa, synthetic construct
ALRELTYWGIGTDK

SEQ ID NO: 27237 - protein, 14 aa, synthetic construct
ALVELTYWGKRTDK

SEQ ID NO: 27238 - protein, 14 aa, synthetic construct
ALVETTYWGIRTDK

SEQ ID NO: 27239 - protein, 13 aa, synthetic construct
ALVEVTYCGIRTD

SEQ ID NO: 27240 - protein, 14 aa, synthetic construct
ALGVLTYRGIRTDK

SEQ ID NO: 27241 - protein, 14 aa, synthetic construct
ALVGLTYWGLRSDK

SEQ ID NO: 27242 - protein, 14 aa, synthetic construct
ALGVLTYGGISTDK

SEQ ID NO: 27243 - protein, 14 aa, synthetic construct
ALVELTYWGIWTDK

SEQ ID NO: 27244 - protein, 14 aa, synthetic construct
ALGVLTYCGISTDK

SEQ ID NO: 27245 - protein, 14 aa, synthetic construct
ALVELVWGVRRVTD

SEQ ID NO: 27246 - protein, 14 aa, synthetic construct
ALGYATGGYEGDKL

SEQ ID NO: 27247 - protein, 14 aa, synthetic construct
ALGVLTSWGRRTDK

SEQ ID NO: 27248 - protein, 14 aa, synthetic construct
ALVELVSGIRMVTD

SEQ ID NO: 27249 - protein, 14 aa, synthetic construct
ALRDLFLLGDNKLI

SEQ ID NO: 27250 - protein, 13 aa, synthetic construct
ALPLGDTYTDKLI

SEQ ID NO: 27251 - protein, 14 aa, synthetic construct
ALVELVCWIRRVTD

SEQ ID NO: 27252 - protein, 14 aa, synthetic construct
ALVELVFVILRVTD

SEQ ID NO: 27253 - protein, 14 aa, synthetic construct
ALVELVLGIRRVTD

SEQ ID NO: 27254 - protein, 14 aa, synthetic construct
ALVELVCVIRRVTD

SEQ ID NO: 27255 - protein, 14 aa, synthetic construct
ALVELVLGRRRVTD

SEQ ID NO: 27256 - protein, 14 aa, synthetic construct
ALVELVRGIRRVTD

SEQ ID NO: 27257 - protein, 14 aa, synthetic construct
ALRELLCGIRRVTD

SEQ ID NO: 27258 - protein, 14 aa, synthetic construct
ALVELVRWIRRVTD

SEQ ID NO: 27259 - protein, 14 aa, synthetic construct
ALVELVCGIRRVTD

SEQ ID NO: 27260 - protein, 14 aa, synthetic construct
ALGYLGWGISRVTD

SEQ ID NO: 27261 - protein, 10 aa, synthetic construct
ALLELVLGIL

SEQ ID NO: 27262 - protein, 13 aa, synthetic construct
ALGYWGPNTDQLI

SEQ ID NO: 27263 - protein, 13 aa, synthetic construct
ALGYWGPNTDKLI

SEQ ID NO: 27264 - protein, 14 aa, synthetic construct
ALGYLVWWIRRVTD

SEQ ID NO: 27265 - protein, 14 aa, synthetic construct
ALGYLVWGIRRVTD

SEQ ID NO: 27266 - protein, 14 aa, synthetic construct
ALGYLTYCGIRTDK

SEQ ID NO: 27267 - protein, 14 aa, synthetic construct
ALVELVWGIRWATD

SEQ ID NO: 27268 - protein, 9 aa, synthetic construct
ALRELNFLR

SEQ ID NO: 27269 - protein, 14 aa, synthetic construct
ALVELVWGIWRVTD

SEQ ID NO: 27270 - protein, 14 aa, synthetic construct
ALVELTYWRISTDK

SEQ ID NO: 27271 - protein, 14 aa, synthetic construct
ALGVLTYCGIRTDK

SEQ ID NO: 27272 - protein, 14 aa, synthetic construct
ALVKLAYWGIRTDK

SEQ ID NO: 27273 - protein, 14 aa, synthetic construct
ALGPYWGILEGDTD

SEQ ID NO: 27274 - protein, 14 aa, synthetic construct
ALWEITYWGISTDK

SEQ ID NO: 27275 - protein, 14 aa, synthetic construct
ALWEITYCGIRTDK

SEQ ID NO: 27276 - protein, 12 aa, synthetic construct
ALTGGSTPINSS

SEQ ID NO: 27277 - protein, 14 aa, synthetic construct
ALTSFLGDTSTDKL

SEQ ID NO: 27278 - protein, 14 aa, synthetic construct
ALVDITYWGIRTDK

SEQ ID NO: 27279 - protein, 12 aa, synthetic construct
ALVDLTYSGRRT

SEQ ID NO: 27280 - protein, 13 aa, synthetic construct
ALVELTYWGIRAD

SEQ ID NO: 27281 - protein, 14 aa, synthetic construct
ALVDLTYWGIRTDK

SEQ ID NO: 27282 - protein, 14 aa, synthetic construct
ALGTVLSPYTEKLI

SEQ ID NO: 27283 - protein, 14 aa, synthetic construct
ALGTSSGGYGWSPI

SEQ ID NO: 27284 - protein, 14 aa, synthetic construct
ALGTSSGGYGGSPI

SEQ ID NO: 27285 - protein, 14 aa, synthetic construct
ALGTLVWGIRRVTD

SEQ ID NO: 27286 - protein, 14 aa, synthetic construct
ALWEDWGIGTDKLI

SEQ ID NO: 27287 - protein, 14 aa, synthetic construct
ALWELVWGLRRVTD

SEQ ID NO: 27288 - protein, 14 aa, synthetic construct
ALGSLVCGLRRVTD

SEQ ID NO: 27289 - protein, 14 aa, synthetic construct
ALVELTYSGISTDK

SEQ ID NO: 27290 - protein, 14 aa, synthetic construct
ALGRLTYWGIRTDK

SEQ ID NO: 27291 - protein, 14 aa, synthetic construct
ALGQLVWVIRRVTD

SEQ ID NO: 27292 - protein, 14 aa, synthetic construct
ALREHTNWRIRTDK

SEQ ID NO: 27293 - protein, 14 aa, synthetic construct
ALGQLTYCGIMTDK

SEQ ID NO: 27294 - protein, 14 aa, synthetic construct
ALWEIVWGIRRVTD

SEQ ID NO: 27295 - protein, 14 aa, synthetic construct
ALGQLDWGIRRVTD

SEQ ID NO: 27296 - protein, 14 aa, synthetic construct
ALGQLAYWGIRTDK

SEQ ID NO: 27297 - protein, 14 aa, synthetic construct
ALSELTYWGIRTDK

SEQ ID NO: 27298 - protein, 8 aa, synthetic construct
ALGVGVWG

SEQ ID NO: 27299 - protein, 13 aa, synthetic construct
ALGVLTCWGIRTD

SEQ ID NO: 27300 - protein, 14 aa, synthetic construct
ALRELTYWGTRTDK

SEQ ID NO: 27301 - protein, 13 aa, synthetic construct
ALVKLTYWGIRTD

SEQ ID NO: 27302 - protein, 13 aa, synthetic construct
ALVELTYWGIWTD

SEQ ID NO: 27303 - protein, 14 aa, synthetic construct
ALVSLVWGIRRVTD

SEQ ID NO: 27304 - protein, 14 aa, synthetic construct
ALRELTYWGISTDK

SEQ ID NO: 27305 - protein, 14 aa, synthetic construct
ALRELTYWGRRTDK

SEQ ID NO: 27306 - protein, 14 aa, synthetic construct
ALGVLPTVGDIDKL

SEQ ID NO: 27307 - protein, 8 aa, synthetic construct
ALVTDKLI

SEQ ID NO: 27308 - protein, 13 aa, synthetic construct
ALVVLTYWGIRTD

SEQ ID NO: 27309 - protein, 14 aa, synthetic construct
ALVELFWWIRRVTD

SEQ ID NO: 27310 - protein, 14 aa, synthetic construct
ALGVLPTIGRYTDK

SEQ ID NO: 27311 - protein, 14 aa, synthetic construct
ALRELVSGRRRVTD

SEQ ID NO: 27312 - protein, 14 aa, synthetic construct
ALRGLTYWGLRSDK

SEQ ID NO: 27313 - protein, 14 aa, synthetic construct
ALGVLLGGMYTDKL

SEQ ID NO: 27314 - protein, 14 aa, synthetic construct
ALVVLVWGIRRVTD

SEQ ID NO: 27315 - protein, 12 aa, synthetic construct
ALGVLGGYTDKL

SEQ ID NO: 27316 - protein, 14 aa, synthetic construct
ALVVLVWGIRSFTD

SEQ ID NO: 27317 - protein, 14 aa, synthetic construct
ALRELVYWGIRTDK

SEQ ID NO: 27318 - protein, 13 aa, synthetic construct
ALGVLGGYAGSDK

SEQ ID NO: 27319 - protein, 14 aa, synthetic construct
ALWDITYWWIRTYK

SEQ ID NO: 27320 - protein, 13 aa, synthetic construct
ALGVLGAVTAQLF

SEQ ID NO: 27321 - protein, 13 aa, synthetic construct
ALREQGGSTDQLI

SEQ ID NO: 27322 - protein, 14 aa, synthetic construct
ALWDLTYSGIRTDK

SEQ ID NO: 27323 - protein, 14 aa, synthetic construct
ALVELGDTCRHRYT

SEQ ID NO: 27324 - protein, 14 aa, synthetic construct
AVGELGWGRRRVTD

SEQ ID NO: 27325 - protein, 13 aa, synthetic construct
ALWELVWGMINSS

SEQ ID NO: 27326 - protein, 14 aa, synthetic construct
PLGELVWAIRTVTD

SEQ ID NO: 27327 - protein, 14 aa, synthetic construct
LLGNSPTGGEGPIN

SEQ ID NO: 27328 - protein, 13 aa, synthetic construct
LLGNSPTGGEGPI

SEQ ID NO: 27329 - protein, 14 aa, synthetic construct
LLGNCAGGPSTPIN

SEQ ID NO: 27330 - protein, 14 aa, synthetic construct
LLGKSSGGYGGSPI

SEQ ID NO: 27331 - protein, 14 aa, synthetic construct
LLGHSSGGYGGSPI

SEQ ID NO: 27332 - protein, 14 aa, synthetic construct
LLGDRKSTRMNTSH

SEQ ID NO: 27333 - protein, 6 aa, synthetic construct
IEYADR

SEQ ID NO: 27334 - skipped

SEQ ID NO: 27335 - protein, 9 aa, synthetic construct
HTSELQSPL

SEQ ID NO: 27336 - protein, 14 aa, synthetic construct
HLGEITYWGIRTDK

SEQ ID NO: 27337 - protein, 14 aa, synthetic construct
HLGDIVWGIRRVTD

SEQ ID NO: 27338 - skipped

SEQ ID NO: 27339 - protein, 9 aa, synthetic construct
GVGNDTTWG

SEQ ID NO: 27340 - protein, 11 aa, synthetic construct
GVGGVAWGGGW

SEQ ID NO: 27341 - protein, 9 aa, synthetic construct
GVGGLVWGV

SEQ ID NO: 27342 - protein, 14 aa, synthetic construct
GVGGLASWGGGAGA

SEQ ID NO: 27343 - protein, 11 aa, synthetic construct
GVGEVVWGVGR

SEQ ID NO: 27344 - protein, 9 aa, synthetic construct
GVGEVSSWG

SEQ ID NO: 27345 - protein, 13 aa, synthetic construct
GVGELSYWGIGTD

SEQ ID NO: 27346 - protein, 11 aa, synthetic construct
GVGELACGGVG

SEQ ID NO: 27347 - protein, 9 aa, synthetic construct
GVGDLSYWG

SEQ ID NO: 27348 - protein, 14 aa, synthetic construct
GVGAVSWWGGGSAG

SEQ ID NO: 27349 - protein, 7 aa, synthetic construct
GRGGSTD

SEQ ID NO: 27350 - protein, 14 aa, synthetic construct
LLGNSSGEYGGSPI

SEQ ID NO: 27351 - protein, 14 aa, synthetic construct
LLGNSSGGSGGSPI

SEQ ID NO: 27352 - protein, 9 aa, synthetic construct
LLGNSSGGY

SEQ ID NO: 27353 - protein, 14 aa, synthetic construct
LMGNSSGGYGGSPI

SEQ ID NO: 27354 - protein, 14 aa, synthetic construct
PLGELTYSGVRTDK

SEQ ID NO: 27355 - protein, 11 aa, synthetic construct
PLGELGTDKLI

SEQ ID NO: 27356 - protein, 14 aa, synthetic construct
PLGDLTYWGIRTDK

SEQ ID NO: 27357 - protein, 14 aa, synthetic construct
PLGDITYCVIRTDK

SEQ ID NO: 27358 - protein, 14 aa, synthetic construct
PLGDIDWGKRRVTD

SEQ ID NO: 27359 - protein, 14 aa, synthetic construct
LWGTSSGGYVGSPI

SEQ ID NO: 27360 - protein, 8 aa, synthetic construct
LVGNYPTG

SEQ ID NO: 27361 - protein, 7 aa, synthetic construct
LVGNSPT

SEQ ID NO: 27362 - protein, 11 aa, synthetic construct
LVGNSPPGGEG

SEQ ID NO: 27363 - protein, 14 aa, synthetic construct
LVANSSGGYGGSPI

SEQ ID NO: 27364 - protein, 14 aa, synthetic construct
LLWNSSWGYGVSPI

SEQ ID NO: 27365 - protein, 14 aa, synthetic construct
LLGNSSGGYGPINS

SEQ ID NO: 27366 - protein, 14 aa, synthetic construct
LLWNSSVGYGGSPI

SEQ ID NO: 27367 - protein, 14 aa, synthetic construct
LLWNSSGGYGGSPI

SEQ ID NO: 27368 - protein, 14 aa, synthetic construct
LLGTSSYWGIINSS

SEQ ID NO: 27369 - protein, 13 aa, synthetic construct
LLGTSSGGYVGSP

SEQ ID NO: 27370 - protein, 14 aa, synthetic construct
LLGTSSGGSGGSPI

SEQ ID NO: 27371 - protein, 14 aa, synthetic construct
LLGNSTGGYGGSPI

SEQ ID NO: 27372 - protein, 9 aa, synthetic construct
LLGNSSSGW

SEQ ID NO: 27373 - protein, 13 aa, synthetic construct
LLGNSSGVYGVSP

SEQ ID NO: 27374 - protein, 14 aa, synthetic construct
LLGNSSGGYGWSPI

SEQ ID NO: 27375 - protein, 14 aa, synthetic construct
LLGNSSGGYGVSPI

SEQ ID NO: 27376 - protein, 14 aa, synthetic construct
GRGELTYWGIRTDK

SEQ ID NO: 27377 - protein, 14 aa, synthetic construct
GRGELSYWVIWTDK

SEQ ID NO: 27378 - protein, 14 aa, synthetic construct
GLWELSYWGVRTDK

SEQ ID NO: 27379 - protein, 13 aa, synthetic construct
DVGELTYCGILSD

SEQ ID NO: 27380 - protein, 14 aa, synthetic construct
GGGWVGGWGGWGGE

SEQ ID NO: 27381 - protein, 14 aa, synthetic construct
GGGGVSGGGGRGGR

SEQ ID NO: 27382 - protein, 6 aa, synthetic construct
GGGGGW

SEQ ID NO: 27383 - protein, 14 aa, synthetic construct
GGGGGGGGGGGGGG

SEQ ID NO: 27384 - protein, 13 aa, synthetic construct
GGGEITYGGLRTD

SEQ ID NO: 27385 - protein, 10 aa, synthetic construct
GGGALVGGLR

SEQ ID NO: 27386 - protein, 8 aa, synthetic construct
GFGELFWW

SEQ ID NO: 27387 - protein, 14 aa, synthetic construct
ELGELTYWGIRTDK

SEQ ID NO: 27388 - protein, 14 aa, synthetic construct
DVGEVSLWGIMSDK

SEQ ID NO: 27389 - protein, 13 aa, synthetic construct
DVGELVWVMGWVT

SEQ ID NO: 27390 - protein, 5 aa, synthetic construct
DVGEL

SEQ ID NO: 27391 - protein, 8 aa, synthetic construct
GLGALGWG

SEQ ID NO: 27392 - protein, 14 aa, synthetic construct
DVGEIVWGIRRVTD

SEQ ID NO: 27393 - protein, 9 aa, synthetic construct
DVCEIAGGY

SEQ ID NO: 27394 - protein, 14 aa, synthetic construct
DRGELTYWGIRTDK

SEQ ID NO: 27395 - protein, 14 aa, synthetic construct
DRGELTSWGIRTDK

SEQ ID NO: 27396 - protein, 14 aa, synthetic construct
DRGDLVWGIRRVTD

SEQ ID NO: 27397 - protein, 14 aa, synthetic construct
DPGQLTYWGIRTDK

SEQ ID NO: 27398 - protein, 14 aa, synthetic construct
DPGELTYCGIRTDK

SEQ ID NO: 27399 - protein, 14 aa, synthetic construct
DNGEKNYWGIMNDK

SEQ ID NO: 27400 - protein, 14 aa, synthetic construct
DLWEPTYWGIRTDK

SEQ ID NO: 27401 - protein, 14 aa, synthetic construct
DLWELVWVIRMVTD

SEQ ID NO: 27402 - protein, 14 aa, synthetic construct
GHGQLTYWGIRTDK

SEQ ID NO: 27403 - protein, 14 aa, synthetic construct
GLGDLVWGIRRVTD

SEQ ID NO: 27404 - protein, 13 aa, synthetic construct
GLVELTFWGIRTD

SEQ ID NO: 27405 - protein, 14 aa, synthetic construct
GLGELVWVIRRVTD

SEQ ID NO: 27406 - protein, 11 aa, synthetic construct
GLGVVWYWGRR

SEQ ID NO: 27407 - protein, 14 aa, synthetic construct
GLGVLVWGIRRVTD

SEQ ID NO: 27408 - protein, 13 aa, synthetic construct
GLGQLTYWGIRTD

SEQ ID NO: 27409 - protein, 9 aa, synthetic construct
GLGNSSGGY

SEQ ID NO: 27410 - protein, 14 aa, synthetic construct
GLGKLVWGIRRVTD

SEQ ID NO: 27411 - protein, 9 aa, synthetic construct
GLGGVSSWG

SEQ ID NO: 27412 - protein, 6 aa, synthetic construct
GLGGVL

SEQ ID NO: 27413 - protein, 14 aa, synthetic construct
GLGGAYNYWGKTDK

SEQ ID NO: 27414 - protein, 6 aa, synthetic construct
GLGEVV

SEQ ID NO: 27415 - protein, 8 aa, synthetic construct
GLGEVTNS

SEQ ID NO: 27416 - protein, 14 aa, synthetic construct
GLGELVWGILRVTD

SEQ ID NO: 27417 - protein, 13 aa, synthetic construct
GLGDPYWGIDKLT

SEQ ID NO: 27418 - protein, 14 aa, synthetic construct
GLGELVWGIGRVTD

SEQ ID NO: 27419 - protein, 11 aa, synthetic construct
GLGELTYWGRR

SEQ ID NO: 27420 - protein, 14 aa, synthetic construct
GLGELTYWGISTDK

SEQ ID NO: 27421 - protein, 14 aa, synthetic construct
GLGELTYWGIMTDK

SEQ ID NO: 27422 - protein, 13 aa, synthetic construct
GLGELTYRGIRTD

SEQ ID NO: 27423 - protein, 13 aa, synthetic construct
GLGELTYCGLRTE

SEQ ID NO: 27424 - protein, 14 aa, synthetic construct
GLGELTSWGIRTDK

SEQ ID NO: 27425 - protein, 11 aa, synthetic construct
GLGELTSWGGR

SEQ ID NO: 27426 - protein, 14 aa, synthetic construct
GLGELLYWGLRTDK

SEQ ID NO: 27427 - protein, 11 aa, synthetic construct
GLGDVVWGIRR

SEQ ID NO: 27428 - protein, 14 aa, synthetic construct
PLGELTYWGLRTDK

SEQ ID NO: 27429 - protein, 14 aa, synthetic construct
PLGELVWGIRSVTD

SEQ ID NO: 27430 - protein, 14 aa, synthetic construct
ALWELVWGRRRVTD

SEQ ID NO: 27431 - protein, 14 aa, synthetic construct
PLGEVTYSGIRTDK

SEQ ID NO: 27432 - protein, 13 aa, synthetic construct
VLGDLTYWGIRTD

SEQ ID NO: 27433 - protein, 14 aa, synthetic construct
VFGNSSGGYGGSPI

SEQ ID NO: 27434 - protein, 8 aa, synthetic construct
TSLNCRHR

SEQ ID NO: 27435 - protein, 13 aa, synthetic construct
TSGDITYWGLRTD

SEQ ID NO: 27436 - protein, 14 aa, synthetic construct
TLGKLTYWGIRTDK

SEQ ID NO: 27437 - protein, 14 aa, synthetic construct
TLGELTYWGRRTDK

SEQ ID NO: 27438 - protein, 14 aa, synthetic construct
TLGELTYWGIMTDK

SEQ ID NO: 27439 - protein, 14 aa, synthetic construct
TLGELEWGIRRVTD

SEQ ID NO: 27440 - protein, 8 aa, synthetic construct
TLGEHDSG

SEQ ID NO: 27441 - protein, 14 aa, synthetic construct
TLGDLTYWGIRTDK

SEQ ID NO: 27442 - protein, 14 aa, synthetic construct
TLGDLTYCGIRTDK

SEQ ID NO: 27443 - protein, 13 aa, synthetic construct
SWGTRPGDTEGHR

SEQ ID NO: 27444 - protein, 13 aa, synthetic construct
SWGTRLGETEGHR

SEQ ID NO: 27445 - protein, 13 aa, synthetic construct
SWGARLGDTEGHR

SEQ ID NO: 27446 - protein, 5 aa, synthetic construct
SVGVS

SEQ ID NO: 27447 - protein, 14 aa, synthetic construct
SVGELTYWGIGTDK

SEQ ID NO: 27448 - protein, 8 aa, synthetic construct
SVGELEWW

SEQ ID NO: 27449 - protein, 14 aa, synthetic construct
SPGELTYWGIRTDK

SEQ ID NO: 27450 - protein, 14 aa, synthetic construct
SLWELTYWGISTDK

SEQ ID NO: 27451 - protein, 14 aa, synthetic construct
SLWELTYLGIRTDK

SEQ ID NO: 27452 - protein, 14 aa, synthetic construct
SLWELTYCGIRTDK

SEQ ID NO: 27453 - protein, 14 aa, synthetic construct
SLWELFCVIRRVTD

SEQ ID NO: 27454 - protein, 14 aa, synthetic construct
SLWEIYYWGISTDK

SEQ ID NO: 27455 - protein, 14 aa, synthetic construct
VLGDLTYWGIRTDK

SEQ ID NO: 27456 - protein, 14 aa, synthetic construct
VLGELFWGIRRVTD

SEQ ID NO: 27457 - protein, 14 aa, synthetic construct
VLGELTSCGIRTDK

SEQ ID NO: 27458 - protein, 14 aa, synthetic construct
VLGELTYWWIRTDK

SEQ ID NO: 27459 - protein, 14 aa, synthetic construct
YLWELVSWIRMVTD

SEQ ID NO: 27460 - protein, 14 aa, synthetic construct
YLGELVWWIRRVTD

SEQ ID NO: 27461 - protein, 14 aa, synthetic construct
YLGELVWGIRRVTD

SEQ ID NO: 27462 - protein, 14 aa, synthetic construct
YHGDHTYWGIRTDK

SEQ ID NO: 27463 - protein, 11 aa, synthetic construct
VVGGVGGGGGR

SEQ ID NO: 27464 - protein, 14 aa, synthetic construct
VLWELTYWGIRTDK

SEQ ID NO: 27465 - protein, 14 aa, synthetic construct
VLVELTYCGIRTDK

SEQ ID NO: 27466 - protein, 14 aa, synthetic construct
VLGGLTYWRIRTDK

SEQ ID NO: 27467 - protein, 14 aa, synthetic construct
VLGEPTYWGIRTDK

SEQ ID NO: 27468 - protein, 14 aa, synthetic construct
VLGELVWGIRMVTD

SEQ ID NO: 27469 - protein, 14 aa, synthetic construct
VLGELTYWVIMTDK

SEQ ID NO: 27470 - protein, 14 aa, synthetic construct
VLGELTSWGIRTDK

SEQ ID NO: 27471 - protein, 14 aa, synthetic construct
VLGELTYWGMRTDK

SEQ ID NO: 27472 - protein, 13 aa, synthetic construct
VLGELTYWGITTD

SEQ ID NO: 27473 - protein, 13 aa, synthetic construct
VLGELTYWGIRTD

SEQ ID NO: 27474 - protein, 14 aa, synthetic construct
VLGELTYWGIRADK

SEQ ID NO: 27475 - protein, 14 aa, synthetic construct
VLGELTYWGIMTDK

SEQ ID NO: 27476 - protein, 14 aa, synthetic construct
VLGELTYWGILTDK

SEQ ID NO: 27477 - protein, 14 aa, synthetic construct
VLGELTYWAIRTDK

SEQ ID NO: 27478 - protein, 13 aa, synthetic construct
VLGELTYRGIRTD

SEQ ID NO: 27479 - protein, 14 aa, synthetic construct
VLGELTYCGIRTDK

SEQ ID NO: 27480 - protein, 14 aa, synthetic construct
VLGELTYCGIGTDK

SEQ ID NO: 27481 - protein, 14 aa, synthetic construct
SLVELVWGIRSLTD

SEQ ID NO: 27482 - protein, 14 aa, synthetic construct
SLVELTYWGISTDK

SEQ ID NO: 27483 - protein, 14 aa, synthetic construct
SLVELTYWGIRTDK

SEQ ID NO: 27484 - protein, 14 aa, synthetic construct
SIGELNYWGISTDK

SEQ ID NO: 27485 - protein, 12 aa, synthetic construct
SLGELNWGLMRL

SEQ ID NO: 27486 - protein, 13 aa, synthetic construct
SLGELKDTTDKLI

SEQ ID NO: 27487 - protein, 14 aa, synthetic construct
SLGELFCGIRRVTD

SEQ ID NO: 27488 - protein, 14 aa, synthetic construct
SLGELDWGIRRVTD

SEQ ID NO: 27489 - protein, 14 aa, synthetic construct
SLGEIVCGIRRVTD

SEQ ID NO: 27490 - protein, 14 aa, synthetic construct
SLGDVTYWGIRTDK

SEQ ID NO: 27491 - protein, 14 aa, synthetic construct
SLGDVFWGIRMVTD

SEQ ID NO: 27492 - protein, 14 aa, synthetic construct
SLGDDTNCWIRTDK

SEQ ID NO: 27493 - protein, 14 aa, synthetic construct
SLEELVWGIRRVTD

SEQ ID NO: 27494 - protein, 14 aa, synthetic construct
SLCELFCVIRSVTD

SEQ ID NO: 27495 - protein, 14 aa, synthetic construct
SIGELNYGGVTTDK

SEQ ID NO: 27496 - protein, 14 aa, synthetic construct
SLGELSYWGISSDK

SEQ ID NO: 27497 - protein, 6 aa, synthetic construct
SICELT

SEQ ID NO: 27498 - protein, 9 aa, synthetic construct
SDWAQLGGK

SEQ ID NO: 27499 - protein, 13 aa, synthetic construct
SCGTRLGDTEGHR

SEQ ID NO: 27500 - protein, 12 aa, synthetic construct
RVGHKPTWGKRP

SEQ ID NO: 27501 - protein, 14 aa, synthetic construct
RLGELGDPHTVKLI

SEQ ID NO: 27502 - protein, 14 aa, synthetic construct
QMGNSPKWGKRTIN

SEQ ID NO: 27503 - protein, 9 aa, synthetic construct
PRGDLTSGG

SEQ ID NO: 27504 - protein, 14 aa, synthetic construct
PLGNSSGGYGGSPI

SEQ ID NO: 27505 - protein, 12 aa, synthetic construct
PLGHLTNRPRRT

SEQ ID NO: 27506 - protein, 9 aa, synthetic construct
PLGEVVWGL

SEQ ID NO: 27507 - protein, 14 aa, synthetic construct
SLGELSYWGIRTDK

SEQ ID NO: 27508 - protein, 6 aa, synthetic construct
SLGELT

SEQ ID NO: 27509 - protein, 14 aa, synthetic construct
SLVELTDCGIRTDK

SEQ ID NO: 27510 - protein, 14 aa, synthetic construct
SLGELVWGRRRVTD

SEQ ID NO: 27511 - protein, 14 aa, synthetic construct
SLVELLWGIRRVTD

SEQ ID NO: 27512 - protein, 7 aa, synthetic construct
SLSELTY

SEQ ID NO: 27513 - protein, 13 aa, synthetic construct
SLGTRLRDTEGHR

SEQ ID NO: 27514 - protein, 14 aa, synthetic construct
SLGQLTNLGVRTDK

SEQ ID NO: 27515 - protein, 14 aa, synthetic construct
SLGKLTYWGISTDK

SEQ ID NO: 27516 - protein, 14 aa, synthetic construct
SLGGLTYWGIRTDK

SEQ ID NO: 27517 - protein, 14 aa, synthetic construct
SLGEVVWVIRMVTD

SEQ ID NO: 27518 - protein, 14 aa, synthetic construct
SLGEPHPTGGLDKL

SEQ ID NO: 27519 - protein, 10 aa, synthetic construct
SLGENTDKLI

SEQ ID NO: 27520 - protein, 14 aa, synthetic construct
SLGELVWVIRRVTD

SEQ ID NO: 27521 - protein, 14 aa, synthetic construct
SLGELVWGIRWVTD

SEQ ID NO: 27522 - protein, 14 aa, synthetic construct
SLGELTKSGIRTDK

SEQ ID NO: 27523 - protein, 14 aa, synthetic construct
SLGELVWGIRSVTD

SEQ ID NO: 27524 - protein, 14 aa, synthetic construct
SLGELVWGIGRVTD

SEQ ID NO: 27525 - protein, 14 aa, synthetic construct
SLGELVSGIRRVTD

SEQ ID NO: 27526 - protein, 13 aa, synthetic construct
SLGELTYLWIMTD

SEQ ID NO: 27527 - protein, 14 aa, synthetic construct
SLGELTYCVITTDK

SEQ ID NO: 27528 - protein, 14 aa, synthetic construct
SLGELTYCGIRTDK

SEQ ID NO: 27529 - protein, 14 aa, synthetic construct
SLGELTSWGIGTDK

SEQ ID NO: 27530 - protein, 14 aa, synthetic construct
SLGELTSSGLRTDK

SEQ ID NO: 27531 - protein, 7 aa, synthetic construct
SLGELTS

SEQ ID NO: 27532 - protein, 14 aa, synthetic construct
SLGELTNWAIRTDK

SEQ ID NO: 27533 - protein, 14 aa, synthetic construct
DLWELVWGIRTDKL

SEQ ID NO: 27534 - protein, 14 aa, synthetic construct
DLWELVWGIRRFTD

SEQ ID NO: 27535 - protein, 14 aa, synthetic construct
DLWELTYWVIMTDK

SEQ ID NO: 27536 - protein, 14 aa, synthetic construct
DLWELFWGIRRVTD

SEQ ID NO: 27537 - protein, 14 aa, synthetic construct
ASGEITYRGIRTDK

SEQ ID NO: 27538 - protein, 14 aa, synthetic construct
ARVDLTYWGIRTDK

SEQ ID NO: 27539 - protein, 9 aa, synthetic construct
ARGVLVWGL

SEQ ID NO: 27540 - protein, 8 aa, synthetic construct
ARGVGGWG

SEQ ID NO: 27541 - protein, 14 aa, synthetic construct
ARGKLTYWGIRTDK

SEQ ID NO: 27542 - protein, 10 aa, synthetic construct
ARGGVGWGVG

SEQ ID NO: 27543 - protein, 11 aa, synthetic construct
ARGGSGADKLI

SEQ ID NO: 27544 - protein, 11 aa, synthetic construct
ARGGRTEGGGR

SEQ ID NO: 27545 - protein, 9 aa, synthetic construct
ARGGLVWGV

SEQ ID NO: 27546 - protein, 14 aa, synthetic construct
ARGGLVWGIRRVTD

SEQ ID NO: 27547 - protein, 8 aa, synthetic construct
ARGGLVWG

SEQ ID NO: 27548 - protein, 14 aa, synthetic construct
ARGGLTYWGIRTDK

SEQ ID NO: 27549 - protein, 9 aa, synthetic construct
ARGGLTFWG

SEQ ID NO: 27550 - protein, 13 aa, synthetic construct
ARGGLTAWGVGTD

SEQ ID NO: 27551 - protein, 8 aa, synthetic construct
ARGELVWR

SEQ ID NO: 27552 - protein, 14 aa, synthetic construct
ARGELVWGRRRVTD

SEQ ID NO: 27553 - protein, 14 aa, synthetic construct
ARGELVWGILRVTD

SEQ ID NO: 27554 - protein, 8 aa, synthetic construct
ARGELVWG

SEQ ID NO: 27555 - protein, 14 aa, synthetic construct
ARGELTYWGRRTDK

SEQ ID NO: 27556 - protein, 13 aa, synthetic construct
ARGELTYWGRGTD

SEQ ID NO: 27557 - protein, 14 aa, synthetic construct
ARGELTYWGLRTDK

SEQ ID NO: 27558 - protein, 14 aa, synthetic construct
ARGELTYWGLRSDK

SEQ ID NO: 27559 - protein, 14 aa, synthetic construct
ARGELTYSGLRTDK

SEQ ID NO: 27560 - protein, 14 aa, synthetic construct
ASWELVGGLRRVTD

SEQ ID NO: 27561 - protein, 8 aa, synthetic construct
AVGDLGWG

SEQ ID NO: 27562 - protein, 8 aa, synthetic construct
AVGDLVWG

SEQ ID NO: 27563 - protein, 6 aa, synthetic construct
AVGGGW

SEQ ID NO: 27564 - protein, 14 aa, synthetic construct
DICKLNYCGIRTDK

SEQ ID NO: 27565 - protein, 14 aa, synthetic construct
DHGELTYSGIMTDK

SEQ ID NO: 27566 - protein, 8 aa, synthetic construct
DGGVVGYG

SEQ ID NO: 27567 - protein, 13 aa, synthetic construct
CVGELFCGIGWVR

SEQ ID NO: 27568 - protein, 14 aa, synthetic construct
CLGELTYWGISTDK

SEQ ID NO: 27569 - protein, 13 aa, synthetic construct
AWGTRLGDTEGHR

SEQ ID NO: 27570 - protein, 14 aa, synthetic construct
AVGVLTYGGIRTDK

SEQ ID NO: 27571 - protein, 11 aa, synthetic construct
AVGGLVWGRGR

SEQ ID NO: 27572 - protein, 14 aa, synthetic construct
AVGGLVWGIRRVTD

SEQ ID NO: 27573 - protein, 9 aa, synthetic construct
AVGGLTSWG

SEQ ID NO: 27574 - protein, 14 aa, synthetic construct
AVGELVWVIRRVTD

SEQ ID NO: 27575 - protein, 14 aa, synthetic construct
AVGDLVWGIRRVTD

SEQ ID NO: 27576 - protein, 14 aa, synthetic construct
AVGELVWGIGRVTD

SEQ ID NO: 27577 - protein, 14 aa, synthetic construct
AVGELTYWGVRSDK

SEQ ID NO: 27578 - protein, 13 aa, synthetic construct
AVGELTYWGIRTD

SEQ ID NO: 27579 - protein, 14 aa, synthetic construct
AVGELTYWGIMTDK

SEQ ID NO: 27580 - protein, 14 aa, synthetic construct
AVGELTYCGIWTDK

SEQ ID NO: 27581 - protein, 14 aa, synthetic construct
AVGELSYWGVRTDK

SEQ ID NO: 27582 - protein, 13 aa, synthetic construct
AVGELSYWGCRTD

SEQ ID NO: 27583 - protein, 14 aa, synthetic construct
ALGGPLRGGYAPDK

SEQ ID NO: 27584 - protein, 14 aa, synthetic construct
AVGELAYWGIRTDK

SEQ ID NO: 27585 - protein, 8 aa, synthetic construct
AVGEGVGG

SEQ ID NO: 27586 - protein, 14 aa, synthetic construct
ARGELTYSGIRTDK

SEQ ID NO: 27587 - protein, 14 aa, synthetic construct
ARGELTYGGIWTDK

SEQ ID NO: 27588 - protein, 14 aa, synthetic construct
ARGELTHWGIRTDK

SEQ ID NO: 27589 - protein, 14 aa, synthetic construct
AMGKLTSCGIRTDK

SEQ ID NO: 27590 - protein, 14 aa, synthetic construct
APGELTYWGIRADK

SEQ ID NO: 27591 - protein, 14 aa, synthetic construct
APGELTYWGIMTDK

SEQ ID NO: 27592 - protein, 14 aa, synthetic construct
APGELTYCGIRTDK

SEQ ID NO: 27593 - protein, 14 aa, synthetic construct
APGELTSWGIRTDK

SEQ ID NO: 27594 - protein, 14 aa, synthetic construct
APGELEWAGYPYTD

SEQ ID NO: 27595 - protein, 14 aa, synthetic construct
APGDLVWGIRRVTD

SEQ ID NO: 27596 - protein, 14 aa, synthetic construct
APGDLEWGGYPYTD

SEQ ID NO: 27597 - protein, 14 aa, synthetic construct
ANGEITYWLIRTYK

SEQ ID NO: 27598 - protein, 14 aa, synthetic construct
ANGEHTYWGIRTDK

SEQ ID NO: 27599 - protein, 14 aa, synthetic construct
AMREGPYWGIRFTD

SEQ ID NO: 27600 - protein, 14 aa, synthetic construct
AMGELTYCGIRTDK

SEQ ID NO: 27601 - protein, 14 aa, synthetic construct
APGELTYWGRRTDK

SEQ ID NO: 27602 - protein, 14 aa, synthetic construct
AMGELNFGGIRTDK

SEQ ID NO: 27603 - protein, 14 aa, synthetic construct
ALWVLVWGIRRVTD

SEQ ID NO: 27604 - protein, 14 aa, synthetic construct
ALWKLTYWGISTDK

SEQ ID NO: 27605 - protein, 14 aa, synthetic construct
ALWKLTYWGIRTDK

SEQ ID NO: 27606 - protein, 14 aa, synthetic construct
ALWKLTYWGIMTDK

SEQ ID NO: 27607 - protein, 14 aa, synthetic construct
ALWKITYWGIRTDK

SEQ ID NO: 27608 - protein, 14 aa, synthetic construct
ALWEVVWGIRRVTD

SEQ ID NO: 27609 - protein, 14 aa, synthetic construct
ALWELYCGIRRVTD

SEQ ID NO: 27610 - protein, 14 aa, synthetic construct
ALWELVWWIRSVTD

SEQ ID NO: 27611 - protein, 9 aa, synthetic construct
ALWELVWVV

SEQ ID NO: 27612 - protein, 14 aa, synthetic construct
APGELTYWGISTDK

SEQ ID NO: 27613 - protein, 14 aa, synthetic construct
APGELVWGIRRATD

SEQ ID NO: 27614 - protein, 9 aa, synthetic construct
ARGELTFWG

SEQ ID NO: 27615 - protein, 8 aa, synthetic construct
ARGDLTSW

SEQ ID NO: 27616 - protein, 11 aa, synthetic construct
ARGELSDGGRR

SEQ ID NO: 27617 - protein, 11 aa, synthetic construct
ARGELGTDQLI

SEQ ID NO: 27618 - protein, 11 aa, synthetic construct
ARGELGTDKLI

SEQ ID NO: 27619 - protein, 14 aa, synthetic construct
ARGEIVWGIRRVTD

SEQ ID NO: 27620 - protein, 7 aa, synthetic construct
ARGDRAS

SEQ ID NO: 27621 - protein, 14 aa, synthetic construct
ARGDLVWGLRRVTD

SEQ ID NO: 27622 - protein, 14 aa, synthetic construct
ARGDLTYWGVRTDK

SEQ ID NO: 27623 - protein, 13 aa, synthetic construct
ARGDLTYWGIRTD

SEQ ID NO: 27624 - protein, 14 aa, synthetic construct
ARGDLTYWGIMTDK

SEQ ID NO: 27625 - protein, 14 aa, synthetic construct
ARGDLTYRGIRTDK

SEQ ID NO: 27626 - protein, 9 aa, synthetic construct
ARGDLTCWG

SEQ ID NO: 27627 - protein, 14 aa, synthetic construct
APGELVWGVRRVTD

SEQ ID NO: 27628 - protein, 14 aa, synthetic construct
ARGDLGGGLRRVTD

SEQ ID NO: 27629 - protein, 8 aa, synthetic construct
ARGDLFRR

SEQ ID NO: 27630 - protein, 9 aa, synthetic construct
ARGARVWGL

SEQ ID NO: 27631 - protein, 14 aa, synthetic construct
ARGARVWGIRRVTD

SEQ ID NO: 27632 - protein, 14 aa, synthetic construct
ARGALVWGIRRVTD

SEQ ID NO: 27633 - protein, 14 aa, synthetic construct
AQGELGSGIRRVTD

SEQ ID NO: 27634 - protein, 13 aa, synthetic construct
AQGEHIWGRRKDT

SEQ ID NO: 27635 - skipped

SEQ ID NO: 27636 - protein, 8 aa, synthetic construct
APGGLVWG

SEQ ID NO: 27637 - protein, 14 aa, synthetic construct
APGELVWGYGGSPI

SEQ ID NO: 27638 - protein, 14 aa, synthetic construct
DIGEITYCGISNDK

SEQ ID NO: 27639 - protein, 14 aa, synthetic construct
DIGEIVWGIRRVTD

SEQ ID NO: 27640 - protein, 14 aa, synthetic construct
DIGELTYCGIRTDK

SEQ ID NO: 27641 - protein, 13 aa, synthetic construct
DLGELTYWGRMTD

SEQ ID NO: 27642 - protein, 14 aa, synthetic construct
DLGELVRGIRRVTD

SEQ ID NO: 27643 - protein, 14 aa, synthetic construct
DLGELVLGIRRVTD

SEQ ID NO: 27644 - protein, 14 aa, synthetic construct
DLGELVCWIRRVTD

SEQ ID NO: 27645 - protein, 14 aa, synthetic construct
DLGELVCVIRRVTD

SEQ ID NO: 27646 - protein, 9 aa, synthetic construct
DLGELVCGI

SEQ ID NO: 27647 - protein, 14 aa, synthetic construct
DLGELTYWWIGTDK

SEQ ID NO: 27648 - protein, 14 aa, synthetic construct
DLGELTYWRILTDK

SEQ ID NO: 27649 - protein, 14 aa, synthetic construct
DLGELTYWGVRTDK

SEQ ID NO: 27650 - protein, 14 aa, synthetic construct
DLGELTYWGSRTDK

SEQ ID NO: 27651 - protein, 14 aa, synthetic construct
DLGELTYWGRMTDK

SEQ ID NO: 27652 - protein, 14 aa, synthetic construct
DLGELTYWGRLTDK

SEQ ID NO: 27653 - protein, 14 aa, synthetic construct
DLGELVWAIRRVTD

SEQ ID NO: 27654 - protein, 14 aa, synthetic construct
DLGELTYWGIWTDK

SEQ ID NO: 27655 - protein, 14 aa, synthetic construct
DLGELTYWGITTDK

SEQ ID NO: 27656 - protein, 13 aa, synthetic construct
DLGELTYWGIMTD

SEQ ID NO: 27657 - protein, 14 aa, synthetic construct
DLGELTYWGIMSDK

SEQ ID NO: 27658 - protein, 14 aa, synthetic construct
DLGELTYWGIMNDK

SEQ ID NO: 27659 - protein, 13 aa, synthetic construct
DLGELTYWGICTD

SEQ ID NO: 27660 - protein, 14 aa, synthetic construct
DLGELTYTGIRTDK

SEQ ID NO: 27661 - protein, 14 aa, synthetic construct
DLGELTYSWIMTDK

SEQ ID NO: 27662 - protein, 14 aa, synthetic construct
DLGELTYSGILTDK

SEQ ID NO: 27663 - protein, 14 aa, synthetic construct
DLGELTYNWGIRTD

SEQ ID NO: 27664 - protein, 7 aa, synthetic construct
DLGELVW

SEQ ID NO: 27665 - protein, 14 aa, synthetic construct
DLGELVWGIRGVTD

SEQ ID NO: 27666 - protein, 14 aa, synthetic construct
DLGELTYCGIWTDK

SEQ ID NO: 27667 - protein, 14 aa, synthetic construct
DLVELTYSGISTDK

SEQ ID NO: 27668 - protein, 14 aa, synthetic construct
DLWELDWGIRRVTD

SEQ ID NO: 27669 - protein, 14 aa, synthetic construct
DLWEIVLWIRRVTD

SEQ ID NO: 27670 - protein, 14 aa, synthetic construct
DLWEITYWGISNDK

SEQ ID NO: 27671 - protein, 14 aa, synthetic construct
DLWEITSWGIRTDK

SEQ ID NO: 27672 - protein, 14 aa, synthetic construct
DLWEINYLGIRTDK

SEQ ID NO: 27673 - protein, 14 aa, synthetic construct
DLWEHTYWGIMTDK

SEQ ID NO: 27674 - protein, 14 aa, synthetic construct
DLWEHDWGIRRVTD

SEQ ID NO: 27675 - protein, 14 aa, synthetic construct
DLVELVWWILRVTD

SEQ ID NO: 27676 - protein, 14 aa, synthetic construct
DLVELVWGISMVTD

SEQ ID NO: 27677 - protein, 8 aa, synthetic construct
DLVELVWG

SEQ ID NO: 27678 - protein, 14 aa, synthetic construct
DLVELTYCGIRTDK

SEQ ID NO: 27679 - protein, 14 aa, synthetic construct
DLGELVWGIRSVTD

SEQ ID NO: 27680 - protein, 12 aa, synthetic construct
DLRELTYSGRRT

SEQ ID NO: 27681 - protein, 13 aa, synthetic construct
DLRELTYSGIRTD

SEQ ID NO: 27682 - protein, 14 aa, synthetic construct
DLGKITYWGIRTDK

SEQ ID NO: 27683 - protein, 14 aa, synthetic construct
DLGEVVWVIRRVTD

SEQ ID NO: 27684 - protein, 14 aa, synthetic construct
DLGEVTSWGIRTDK

SEQ ID NO: 27685 - protein, 14 aa, synthetic construct
DLGERTYSGIRTDK

SEQ ID NO: 27686 - protein, 14 aa, synthetic construct
DLGELYWGIRRVTD

SEQ ID NO: 27687 - protein, 9 aa, synthetic construct
DLGELVYAI

SEQ ID NO: 27688 - protein, 14 aa, synthetic construct
DLGELVWVIRRVTD

SEQ ID NO: 27689 - protein, 12 aa, synthetic construct
DLGELVWGISRV

SEQ ID NO: 27690 - protein, 14 aa, synthetic construct
DLGELTYLGMRTDK

SEQ ID NO: 27691 - protein, 13 aa, synthetic construct
DLGELTYCGIRTD

SEQ ID NO: 27692 - protein, 6 aa, synthetic construct
DIGELV

SEQ ID NO: 27693 - protein, 14 aa, synthetic construct
DLEELTYSGISTDK

SEQ ID NO: 27694 - protein, 14 aa, synthetic construct
DLGEINYGGIRADK

SEQ ID NO: 27695 - protein, 14 aa, synthetic construct
DLGEHTYWWIRTDK

SEQ ID NO: 27696 - protein, 14 aa, synthetic construct
DLGEHTYWGIRTDK

SEQ ID NO: 27697 - protein, 14 aa, synthetic construct
DLGEHAYWGIRTDK

SEQ ID NO: 27698 - protein, 14 aa, synthetic construct
DLGEFTYWGIRTDK

SEQ ID NO: 27699 - protein, 14 aa, synthetic construct
DLGDLTYWGIRTDK

SEQ ID NO: 27700 - protein, 14 aa, synthetic construct
DLGDLTYWGIGTDK

SEQ ID NO: 27701 - protein, 14 aa, synthetic construct
DLGDLGVGDTDKLI

SEQ ID NO: 27702 - protein, 14 aa, synthetic construct
DLGDKVRGIRRVTD

SEQ ID NO: 27703 - protein, 14 aa, synthetic construct
DLGDIVWGIRRVTD

SEQ ID NO: 27704 - protein, 14 aa, synthetic construct
DLCEPLRGGNAHDK

SEQ ID NO: 27705 - protein, 14 aa, synthetic construct
DLGEITYWGISTDK

SEQ ID NO: 27706 - protein, 12 aa, synthetic construct
DLCELVSGISMV

SEQ ID NO: 27707 - protein, 14 aa, synthetic construct
DLCELTYWGIITDK

SEQ ID NO: 27708 - protein, 14 aa, synthetic construct
DLCELTYRGIRTDK

SEQ ID NO: 27709 - protein, 14 aa, synthetic construct
DLCELFCGIRRVTD

SEQ ID NO: 27710 - protein, 14 aa, synthetic construct
DIWELVLGIRRVTD

SEQ ID NO: 27711 - protein, 14 aa, synthetic construct
DIWELTYWGIRTDK

SEQ ID NO: 27712 - protein, 14 aa, synthetic construct
DIVELTYCGIKTDK

SEQ ID NO: 27713 - protein, 14 aa, synthetic construct
DIVEILWGIRRVTD

SEQ ID NO: 27714 - protein, 14 aa, synthetic construct
DIGELVWVIRRVTD

SEQ ID NO: 27715 - protein, 14 aa, synthetic construct
DIGELVWGIRRVTD

SEQ ID NO: 27716 - protein, 14 aa, synthetic construct
DLGEINYWWISTDK

SEQ ID NO: 27717 - protein, 14 aa, synthetic construct
DLGEITYWGRRTDK

SEQ ID NO: 27718 - protein, 14 aa, synthetic construct
DLGELTYCGIMTDK

SEQ ID NO: 27719 - protein, 14 aa, synthetic construct
DLGELSFIRGDTDK

SEQ ID NO: 27720 - protein, 14 aa, synthetic construct
DLGELTYCAISTDK

SEQ ID NO: 27721 - protein, 14 aa, synthetic construct
DLGELTNWGIMTDK

SEQ ID NO: 27722 - protein, 14 aa, synthetic construct
DLGELTNSGIRTDK

SEQ ID NO: 27723 - protein, 14 aa, synthetic construct
DLGELTKSGIRTDK

SEQ ID NO: 27724 - protein, 14 aa, synthetic construct
DLGELTHWGIRTDK

SEQ ID NO: 27725 - protein, 6 aa, synthetic construct
DLGELT

SEQ ID NO: 27726 - protein, 14 aa, synthetic construct
DLGELSYWGRRTDK

SEQ ID NO: 27727 - protein, 14 aa, synthetic construct
DLGELSYWGISTDK

SEQ ID NO: 27728 - protein, 14 aa, synthetic construct
DLGELSYRGISTDK

SEQ ID NO: 27729 - protein, 14 aa, synthetic construct
DLGELSNWGIRTDK

SEQ ID NO: 27730 - protein, 14 aa, synthetic construct
DLGELPYWGRRTDK

SEQ ID NO: 27731 - protein, 14 aa, synthetic construct
DLGEITYWGSRTDK

SEQ ID NO: 27732 - protein, 14 aa, synthetic construct
DLGELNYWLIRTDK

SEQ ID NO: 27733 - protein, 14 aa, synthetic construct
DLGELNYTGIRTDK

SEQ ID NO: 27734 - protein, 14 aa, synthetic construct
DLGELLCWIRRFTD

SEQ ID NO: 27735 - protein, 14 aa, synthetic construct
DLGELIYWGIRTDK

SEQ ID NO: 27736 - protein, 14 aa, synthetic construct
DLGELFWWIRRVTD

SEQ ID NO: 27737 - protein, 14 aa, synthetic construct
DLGELFLQGDVLTA

SEQ ID NO: 27738 - protein, 14 aa, synthetic construct
DLGELFCGIRRVTD

SEQ ID NO: 27739 - protein, 9 aa, synthetic construct
DLGELFCGI

SEQ ID NO: 27740 - protein, 14 aa, synthetic construct
DLGELDWGITRVTD

SEQ ID NO: 27741 - protein, 14 aa, synthetic construct
DLGELAWGIRRVTD

SEQ ID NO: 27742 - protein, 12 aa, synthetic construct
ALGGPSRGPTLI

SEQ ID NO: 27743 - protein, 14 aa, synthetic construct
ALGELVWRLRSVTD

SEQ ID NO: 27744 - protein, 14 aa, synthetic construct
ALGGPLGAPYTEKL

SEQ ID NO: 27745 - protein, 14 aa, synthetic construct
ALGEITYCGISNDK

SEQ ID NO: 27746 - protein, 14 aa, synthetic construct
ALGEITSWGRRTDK

SEQ ID NO: 27747 - protein, 14 aa, synthetic construct
ALGEITSWGIRTDK

SEQ ID NO: 27748 - protein, 9 aa, synthetic construct
ALGEITCWG

SEQ ID NO: 27749 - protein, 14 aa, synthetic construct
ALGEISYWGIRTDK

SEQ ID NO: 27750 - protein, 14 aa, synthetic construct
ALGEISYCGIRTDK

SEQ ID NO: 27751 - protein, 14 aa, synthetic construct
ALGEINYWGIRTDK

SEQ ID NO: 27752 - protein, 14 aa, synthetic construct
ALGEINYWGIMTDK

SEQ ID NO: 27753 - protein, 14 aa, synthetic construct
ALGEINYCGIRTDK

SEQ ID NO: 27754 - protein, 14 aa, synthetic construct
ALGEIFWGIRRVTD

SEQ ID NO: 27755 - protein, 14 aa, synthetic construct
ALGEHYWGISDKLI

SEQ ID NO: 27756 - protein, 14 aa, synthetic construct
ALGEHVWGIRMFTD

SEQ ID NO: 27757 - protein, 14 aa, synthetic construct
ALGEHVWGILRVTD

SEQ ID NO: 27758 - protein, 14 aa, synthetic construct
ALGEHVSGILSVTD

SEQ ID NO: 27759 - protein, 14 aa, synthetic construct
ALGEHVRGIRRVTD

SEQ ID NO: 27760 - protein, 9 aa, synthetic construct
ALGEHVLVI

SEQ ID NO: 27761 - protein, 14 aa, synthetic construct
ALGEHTYWRIRTDK

SEQ ID NO: 27762 - protein, 14 aa, synthetic construct
ALGEHTYWGKRTDK

SEQ ID NO: 27763 - protein, 14 aa, synthetic construct
ALGEHTYWGIRSDK

SEQ ID NO: 27764 - protein, 14 aa, synthetic construct
ALGEHTYWAIRTDK

SEQ ID NO: 27765 - protein, 14 aa, synthetic construct
ALGEHTYSGRRTDK

SEQ ID NO: 27766 - protein, 14 aa, synthetic construct
ALGEHTSWGIRTDK

SEQ ID NO: 27767 - protein, 14 aa, synthetic construct
ALGEITYCGIMTDK

SEQ ID NO: 27768 - protein, 14 aa, synthetic construct
ALGEITYFGIRTDK

SEQ ID NO: 27769 - protein, 14 aa, synthetic construct
ALGEHSGTYTDKLI

SEQ ID NO: 27770 - protein, 14 aa, synthetic construct
ALGEITYWGIGTDK

SEQ ID NO: 27771 - protein, 8 aa, synthetic construct
ALGELASW

SEQ ID NO: 27772 - protein, 14 aa, synthetic construct
ALGELARGILPLTA

SEQ ID NO: 27773 - protein, 9 aa, synthetic construct
ALGELAGGL

SEQ ID NO: 27774 - protein, 9 aa, synthetic construct
ALGELACWG

SEQ ID NO: 27775 - protein, 14 aa, synthetic construct
ALGELACVIRRVTD

SEQ ID NO: 27776 - protein, 14 aa, synthetic construct
ALGEIVWRIRRVTD

SEQ ID NO: 27777 - protein, 14 aa, synthetic construct
ALGEIVWGRRRVTD

SEQ ID NO: 27778 - protein, 12 aa, synthetic construct
ALGEIVWGIRMV

SEQ ID NO: 27779 - protein, 14 aa, synthetic construct
ALGEIVSGIRRDTD

SEQ ID NO: 27780 - protein, 14 aa, synthetic construct
ALGEIVGGIRRVTD

SEQ ID NO: 27781 - protein, 14 aa, synthetic construct
ALGEIVCVIRRVTD

SEQ ID NO: 27782 - protein, 14 aa, synthetic construct
ALGEIVCGILSVTD

SEQ ID NO: 27783 - protein, 14 aa, synthetic construct
ALGEIVCGILRVTD

SEQ ID NO: 27784 - protein, 14 aa, synthetic construct
ALGEITYWVIRTDK

SEQ ID NO: 27785 - protein, 14 aa, synthetic construct
ALGEITYWGRMTDK

SEQ ID NO: 27786 - protein, 14 aa, synthetic construct
ALGEITYWGMRTDK

SEQ ID NO: 27787 - protein, 14 aa, synthetic construct
ALGEITYWGISSDK

SEQ ID NO: 27788 - protein, 14 aa, synthetic construct
ALGEITYWGISNDK

SEQ ID NO: 27789 - protein, 13 aa, synthetic construct
ALGEITYWGIRTD

SEQ ID NO: 27790 - protein, 14 aa, synthetic construct
ALGEITYWGINTDK

SEQ ID NO: 27791 - protein, 14 aa, synthetic construct
ALGEITYWGIMTDK

SEQ ID NO: 27792 - protein, 14 aa, synthetic construct
ALGEHTNWGIRTDK

SEQ ID NO: 27793 - protein, 14 aa, synthetic construct
ALGEHLGGYAADKL

SEQ ID NO: 27794 - protein, 12 aa, synthetic construct
ALGELASWGRRT

SEQ ID NO: 27795 - protein, 13 aa, synthetic construct
ALGDTYCGIDKLI

SEQ ID NO: 27796 - protein, 14 aa, synthetic construct
ALGDSYLGKYTDKL

SEQ ID NO: 27797 - protein, 14 aa, synthetic construct
ALGDSTGGYEGDKL

SEQ ID NO: 27798 - protein, 14 aa, synthetic construct
ALGDSSGGYGGSPI

SEQ ID NO: 27799 - protein, 14 aa, synthetic construct
ALGDRVWGIRRVTD

SEQ ID NO: 27800 - protein, 14 aa, synthetic construct
ALGDRTYWGRRTDK

SEQ ID NO: 27801 - protein, 14 aa, synthetic construct
ALGDRTYWGIRTDK

SEQ ID NO: 27802 - protein, 14 aa, synthetic construct
ALGDRGWGINTDKL

SEQ ID NO: 27803 - protein, 13 aa, synthetic construct
ALGDPYWGIDKLT

SEQ ID NO: 27804 - protein, 13 aa, synthetic construct
ALGDPYWGIDKLI

SEQ ID NO: 27805 - protein, 14 aa, synthetic construct
ALGDPYWGAALTAQ

SEQ ID NO: 27806 - protein, 14 aa, synthetic construct
ALGDPVWGIRRVTD

SEQ ID NO: 27807 - protein, 14 aa, synthetic construct
ALGDPTYWGIRTDK

SEQ ID NO: 27808 - protein, 13 aa, synthetic construct
ALGDPRGGLRHLI

SEQ ID NO: 27809 - protein, 10 aa, synthetic construct
ALGDPPSYWG

SEQ ID NO: 27810 - protein, 14 aa, synthetic construct
ALGDPLSYWGIRTD

SEQ ID NO: 27811 - protein, 12 aa, synthetic construct
ALGDPGDTDKLI

SEQ ID NO: 27812 - protein, 14 aa, synthetic construct
ALGDLYLRSTGYTD

SEQ ID NO: 27813 - protein, 14 aa, synthetic construct
ALGDLVWVIRMVTD

SEQ ID NO: 27814 - protein, 9 aa, synthetic construct
ALGDLVWGV

SEQ ID NO: 27815 - protein, 14 aa, synthetic construct
ALGDLVWGSRRVTD

SEQ ID NO: 27816 - protein, 14 aa, synthetic construct
ALGDLVWGRRRGTD

SEQ ID NO: 27817 - protein, 9 aa, synthetic construct
ALGDTDKLI

SEQ ID NO: 27818 - protein, 14 aa, synthetic construct
ALGDVSYWGIRTDK

SEQ ID NO: 27819 - protein, 14 aa, synthetic construct
ALGEHFWGIRSLTD

SEQ ID NO: 27820 - protein, 8 aa, synthetic construct
ALGDVTGW

SEQ ID NO: 27821 - protein, 14 aa, synthetic construct
ALGEHFRTGGPTDK

SEQ ID NO: 27822 - protein, 14 aa, synthetic construct
ALGEGTGGTRHTDK

SEQ ID NO: 27823 - protein, 13 aa, synthetic construct
ALGEGRYEAEKLI

SEQ ID NO: 27824 - protein, 13 aa, synthetic construct
ALGEGRYEADKLI

SEQ ID NO: 27825 - protein, 12 aa, synthetic construct
ALGEGPGGSKLI

SEQ ID NO: 27826 - protein, 11 aa, synthetic construct
ALGEGGTDKLI

SEQ ID NO: 27827 - protein, 14 aa, synthetic construct
ALGEFTYCGIRTDK

SEQ ID NO: 27828 - protein, 14 aa, synthetic construct
ALGEFLRGYADKLI

SEQ ID NO: 27829 - protein, 14 aa, synthetic construct
ALGEFFCGIRRVTD

SEQ ID NO: 27830 - protein, 9 aa, synthetic construct
ALGEEDKLI

SEQ ID NO: 27831 - protein, 13 aa, synthetic construct
ALGEEAPYTDNPI

SEQ ID NO: 27832 - protein, 9 aa, synthetic construct
ALGEEAKLI

SEQ ID NO: 27833 - protein, 14 aa, synthetic construct
ALGEDLWGIRLVTD

SEQ ID NO: 27834 - protein, 10 aa, synthetic construct
ALGEDLLPWG

SEQ ID NO: 27835 - protein, 13 aa, synthetic construct
ALGDYWGIRGKLI

SEQ ID NO: 27836 - protein, 10 aa, synthetic construct
ALGDWWDKLI

SEQ ID NO: 27837 - protein, 14 aa, synthetic construct
ALGDWGGDTPTDKL

SEQ ID NO: 27838 - protein, 14 aa, synthetic construct
ALGDVVWGLRRVTD

SEQ ID NO: 27839 - protein, 14 aa, synthetic construct
ALGDVVGGRRRVTD

SEQ ID NO: 27840 - protein, 9 aa, synthetic construct
ALGDVVCGI

SEQ ID NO: 27841 - protein, 14 aa, synthetic construct
ALGDVTYWGIMTDK

SEQ ID NO: 27842 - protein, 9 aa, synthetic construct
ALGELASWG

SEQ ID NO: 27843 - protein, 14 aa, synthetic construct
ALGELAVLGDTDKL

SEQ ID NO: 27844 - protein, 13 aa, synthetic construct
ALGDLVWGMRNSS

SEQ ID NO: 27845 - protein, 14 aa, synthetic construct
ALGELGWGIRWVTD

SEQ ID NO: 27846 - protein, 14 aa, synthetic construct
ALGELGLPGDLYTD

SEQ ID NO: 27847 - protein, 14 aa, synthetic construct
ALGELGGYAGTDKL

SEQ ID NO: 27848 - protein, 14 aa, synthetic construct
ALGELGGSYTDQLI

SEQ ID NO: 27849 - protein, 14 aa, synthetic construct
ALGELGGSYTDKLI

SEQ ID NO: 27850 - protein, 14 aa, synthetic construct
ALGELGGGYAGHTD

SEQ ID NO: 27851 - protein, 11 aa, synthetic construct
ALGELGGGELI

SEQ ID NO: 27852 - protein, 13 aa, synthetic construct
ALGELGGDFWKLI

SEQ ID NO: 27853 - protein, 14 aa, synthetic construct
ALGELGGANTDKLI

SEQ ID NO: 27854 - protein, 14 aa, synthetic construct
ALGELGGALTDKLI

SEQ ID NO: 27855 - protein, 13 aa, synthetic construct
ALGELGEYTDKLI

SEQ ID NO: 27856 - protein, 13 aa, synthetic construct
ALGELGDTIDKLI

SEQ ID NO: 27857 - protein, 13 aa, synthetic construct
ALGELGDTHDKLI

SEQ ID NO: 27858 - protein, 13 aa, synthetic construct
ALGELGDSSWATR

SEQ ID NO: 27859 - protein, 13 aa, synthetic construct
ALGELGDRSWDTR

SEQ ID NO: 27860 - protein, 14 aa, synthetic construct
ALGELGDKGRTDKL

SEQ ID NO: 27861 - protein, 9 aa, synthetic construct
ALGELGCGS

SEQ ID NO: 27862 - protein, 14 aa, synthetic construct
ALGELGCGIRSVTD

SEQ ID NO: 27863 - protein, 14 aa, synthetic construct
ALGELFWVIRRVTD

SEQ ID NO: 27864 - protein, 14 aa, synthetic construct
ALGELFWRIRRVTD

SEQ ID NO: 27865 - protein, 14 aa, synthetic construct
ALGELFWGYGGSPI

SEQ ID NO: 27866 - protein, 14 aa, synthetic construct
ALGELFWGVRRVTD

SEQ ID NO: 27867 - protein, 11 aa, synthetic construct
ALGELGTDNSS

SEQ ID NO: 27868 - protein, 14 aa, synthetic construct
ALGELGWGMRRVTD

SEQ ID NO: 27869 - protein, 14 aa, synthetic construct
ALGELFWGRRRVTD

SEQ ID NO: 27870 - protein, 10 aa, synthetic construct
ALGELGWGRG

SEQ ID NO: 27871 - protein, 14 aa, synthetic construct
ALGELLGVYTDKLI

SEQ ID NO: 27872 - protein, 13 aa, synthetic construct
ALGELLGVTDKLI

SEQ ID NO: 27873 - protein, 14 aa, synthetic construct
ALGELLGDTPINSS

SEQ ID NO: 27874 - protein, 14 aa, synthetic construct
ALGELLGDTDTDTL

SEQ ID NO: 27875 - protein, 14 aa, synthetic construct
ALGELLGDTDTDKL

SEQ ID NO: 27876 - protein, 13 aa, synthetic construct
ALGELLGDTDKLI

SEQ ID NO: 27877 - protein, 14 aa, synthetic construct
ALGELLCGIRRVTD

SEQ ID NO: 27878 - protein, 14 aa, synthetic construct
ALGELIWGIRSVTD

SEQ ID NO: 27879 - protein, 14 aa, synthetic construct
ALGELISWGIRTDK

SEQ ID NO: 27880 - protein, 14 aa, synthetic construct
ALGELISGIRRVTD

SEQ ID NO: 27881 - protein, 8 aa, synthetic construct
ALGELIFW

SEQ ID NO: 27882 - protein, 14 aa, synthetic construct
ALGELICGIRRVTD

SEQ ID NO: 27883 - protein, 14 aa, synthetic construct
ALGELHWGIRRVTD

SEQ ID NO: 27884 - protein, 14 aa, synthetic construct
ALGELHPSGGYADK

SEQ ID NO: 27885 - protein, 12 aa, synthetic construct
ALGELGYTDKLI

SEQ ID NO: 27886 - protein, 11 aa, synthetic construct
ALGELGYGIRR

SEQ ID NO: 27887 - protein, 13 aa, synthetic construct
ALGELGWWRRRYK

SEQ ID NO: 27888 - protein, 8 aa, synthetic construct
ALGELGWW

SEQ ID NO: 27889 - protein, 13 aa, synthetic construct
ALGELGWGTEKLI

SEQ ID NO: 27890 - protein, 13 aa, synthetic construct
ALGELGWGTDKLI

SEQ ID NO: 27891 - protein, 14 aa, synthetic construct
ALGELGWGRRRVTD

SEQ ID NO: 27892 - protein, 14 aa, synthetic construct
ALGELFWGRWRVTD

SEQ ID NO: 27893 - protein, 14 aa, synthetic construct
ALGELFWGRRGVTD

SEQ ID NO: 27894 - protein, 14 aa, synthetic construct
ALGELAWEIRRVTD

SEQ ID NO: 27895 - protein, 13 aa, synthetic construct
ALGELDYGISRDT

SEQ ID NO: 27896 - protein, 14 aa, synthetic construct
ALGELDWVIRSVTD

SEQ ID NO: 27897 - protein, 14 aa, synthetic construct
ALGELDWGLLRVTD

SEQ ID NO: 27898 - protein, 14 aa, synthetic construct
ALGELDWGIRTDKL

SEQ ID NO: 27899 - protein, 14 aa, synthetic construct
ALGELDWGIRRDTD

SEQ ID NO: 27900 - protein, 14 aa, synthetic construct
ALGELDWGILRLTD

SEQ ID NO: 27901 - protein, 13 aa, synthetic construct
ALGELDWGILRDT

SEQ ID NO: 27902 - protein, 8 aa, synthetic construct
ALGELDWG

SEQ ID NO: 27903 - protein, 14 aa, synthetic construct
ALGELDWEIPRVTD

SEQ ID NO: 27904 - protein, 14 aa, synthetic construct
ALGELDWAIRRVTD

SEQ ID NO: 27905 - protein, 14 aa, synthetic construct
ALGELDSGIRRVTD

SEQ ID NO: 27906 - protein, 14 aa, synthetic construct
ALGELDPLGDTTDK

SEQ ID NO: 27907 - protein, 14 aa, synthetic construct
ALGELDCWRRRITD

SEQ ID NO: 27908 - protein, 11 aa, synthetic construct
ALGELDCWILR

SEQ ID NO: 27909 - protein, 13 aa, synthetic construct
ALGELDCGMSRDT

SEQ ID NO: 27910 - protein, 13 aa, synthetic construct
ALGELDCGIRRDT

SEQ ID NO: 27911 - protein, 14 aa, synthetic construct
ALGELCWWISMFTD

SEQ ID NO: 27912 - protein, 14 aa, synthetic construct
ALGELCWGIRRVTD

SEQ ID NO: 27913 - protein, 14 aa, synthetic construct
ALGELCGGLTDKLI

SEQ ID NO: 27914 - protein, 14 aa, synthetic construct
ALGELAYWWIRTDK

SEQ ID NO: 27915 - protein, 14 aa, synthetic construct
ALGELAYWGIMTDK

SEQ ID NO: 27916 - protein, 13 aa, synthetic construct
ALGELAWGILPLT

SEQ ID NO: 27917 - protein, 13 aa, synthetic construct
ALGELDWWLLRDT

SEQ ID NO: 27918 - protein, 13 aa, synthetic construct
ALGELDYWILRDT

SEQ ID NO: 27919 - protein, 14 aa, synthetic construct
ALGELFWGISRVTD

SEQ ID NO: 27920 - protein, 14 aa, synthetic construct
ALGELDYWIRSNTN

SEQ ID NO: 27921 - protein, 14 aa, synthetic construct
ALGELFWGIRTDKL

SEQ ID NO: 27922 - protein, 14 aa, synthetic construct
ALGELFWGIRSVTD

SEQ ID NO: 27923 - protein, 14 aa, synthetic construct
ALGELFWGIRRFTD

SEQ ID NO: 27924 - protein, 14 aa, synthetic construct
ALGELFWGIRMVTD

SEQ ID NO: 27925 - protein, 14 aa, synthetic construct
ALGELFWGILRITD

SEQ ID NO: 27926 - protein, 14 aa, synthetic construct
ALGELFWCIRKVTD

SEQ ID NO: 27927 - protein, 7 aa, synthetic construct
ALGELFW

SEQ ID NO: 27928 - protein, 14 aa, synthetic construct
ALGELFSGIRRVTD

SEQ ID NO: 27929 - protein, 14 aa, synthetic construct
ALGELFLLGDNKLI

SEQ ID NO: 27930 - protein, 13 aa, synthetic construct
ALGELFLGIRRVT

SEQ ID NO: 27931 - protein, 14 aa, synthetic construct
ALGELFLGIRMVTD

SEQ ID NO: 27932 - protein, 14 aa, synthetic construct
ALGELFGGIRRVTD

SEQ ID NO: 27933 - protein, 11 aa, synthetic construct
ALGELFCWMRR

SEQ ID NO: 27934 - protein, 14 aa, synthetic construct
ALGELFCGRRRVTD

SEQ ID NO: 27935 - protein, 9 aa, synthetic construct
ALGELFCGL

SEQ ID NO: 27936 - protein, 14 aa, synthetic construct
ALGELFCGIRSVTD

SEQ ID NO: 27937 - protein, 11 aa, synthetic construct
ALGELFCGIRR

SEQ ID NO: 27938 - protein, 12 aa, synthetic construct
ALGELEYTDKLV

SEQ ID NO: 27939 - protein, 14 aa, synthetic construct
ALGELEWGIRRVTD

SEQ ID NO: 27940 - protein, 14 aa, synthetic construct
ALGELEPGYTDKLI

SEQ ID NO: 27941 - protein, 8 aa, synthetic construct
ALGELEEV

SEQ ID NO: 27942 - protein, 14 aa, synthetic construct
ALGDLVWGMRRVTD

SEQ ID NO: 27943 - protein, 14 aa, synthetic construct
ALGDLVWGLLRVTD

SEQ ID NO: 27944 - protein, 14 aa, synthetic construct
ALGGPLGAPYTDKL

SEQ ID NO: 27945 - protein, 14 aa, synthetic construct
AIWEITYCGIRTDK

SEQ ID NO: 27946 - protein, 14 aa, synthetic construct
AIVELVWGIRRFTD

SEQ ID NO: 27947 - protein, 14 aa, synthetic construct
AIVELTYLGIRTDK

SEQ ID NO: 27948 - protein, 12 aa, synthetic construct
AIVEHTNWGITT

SEQ ID NO: 27949 - protein, 14 aa, synthetic construct
AIGVLNYWGIRTDK

SEQ ID NO: 27950 - protein, 14 aa, synthetic construct
AIGSLDWGIRRVTD

SEQ ID NO: 27951 - protein, 14 aa, synthetic construct
AIGEVVWGIRRVTD

SEQ ID NO: 27952 - protein, 14 aa, synthetic construct
AIGEQTYWGIRTDK

SEQ ID NO: 27953 - protein, 9 aa, synthetic construct
AIGELVWWI

SEQ ID NO: 27954 - protein, 14 aa, synthetic construct
AIGELVWVIRRVTD

SEQ ID NO: 27955 - protein, 14 aa, synthetic construct
AIGELVWGILRFTD

SEQ ID NO: 27956 - protein, 14 aa, synthetic construct
AIGELVWGICRVTD

SEQ ID NO: 27957 - protein, 14 aa, synthetic construct
AIGELVSGILSATD

SEQ ID NO: 27958 - protein, 14 aa, synthetic construct
AIGELVSAIRSDTD

SEQ ID NO: 27959 - protein, 14 aa, synthetic construct
AIGELVCGIRRFTD

SEQ ID NO: 27960 - protein, 14 aa, synthetic construct
AIGELTYWGVRTDK

SEQ ID NO: 27961 - protein, 14 aa, synthetic construct
AIGELTYWGIMTDK

SEQ ID NO: 27962 - protein, 8 aa, synthetic construct
AIGELTYW

SEQ ID NO: 27963 - protein, 14 aa, synthetic construct
AIGELTYRGISTDK

SEQ ID NO: 27964 - protein, 13 aa, synthetic construct
AIGELTYRGIMTD

SEQ ID NO: 27965 - protein, 14 aa, synthetic construct
AIGELTYGGIRTDK

SEQ ID NO: 27966 - protein, 14 aa, synthetic construct
AIGELTYCGMRTDK

SEQ ID NO: 27967 - protein, 14 aa, synthetic construct
AIVELVWVILRVTD

SEQ ID NO: 27968 - protein, 14 aa, synthetic construct
AIWELFCGIRRVTD

SEQ ID NO: 27969 - protein, 14 aa, synthetic construct
AIGELTYCGIMTDK

SEQ ID NO: 27970 - protein, 14 aa, synthetic construct
AIWELFSGIRSVTD

SEQ ID NO: 27971 - protein, 14 aa, synthetic construct
ALCELVCGILSVTD

SEQ ID NO: 27972 - protein, 14 aa, synthetic construct
ALCELTYWVMRTDK

SEQ ID NO: 27973 - protein, 14 aa, synthetic construct
ALCELTYWGITTDK

SEQ ID NO: 27974 - protein, 14 aa, synthetic construct
ALCELTYWGIRTDK

SEQ ID NO: 27975 - protein, 9 aa, synthetic construct
ALCELTYSG

SEQ ID NO: 27976 - protein, 14 aa, synthetic construct
ALCELSYWVIRTDK

SEQ ID NO: 27977 - protein, 14 aa, synthetic construct
ALCEIVWGIRRVTD

SEQ ID NO: 27978 - protein, 14 aa, synthetic construct
ALCEIVSGVRSVTD

SEQ ID NO: 27979 - protein, 12 aa, synthetic construct
ALCEHVLGIRMV

SEQ ID NO: 27980 - protein, 14 aa, synthetic construct
ALALLGVPYTDKLI

SEQ ID NO: 27981 - protein, 14 aa, synthetic construct
ALAKLTYWGIRTDK

SEQ ID NO: 27982 - protein, 14 aa, synthetic construct
ALAELVWGIRRVTD

SEQ ID NO: 27983 - protein, 14 aa, synthetic construct
ALAELTYWGIRTDK

SEQ ID NO: 27984 - protein, 14 aa, synthetic construct
ALAELTSRGIRTDK

SEQ ID NO: 27985 - protein, 14 aa, synthetic construct
ALAELDWGIRRVTD

SEQ ID NO: 27986 - protein, 14 aa, synthetic construct
ALAEIVCGIRRVTD

SEQ ID NO: 27987 - protein, 9 aa, synthetic construct
ALADLDWGK

SEQ ID NO: 27988 - protein, 7 aa, synthetic construct
ALADKLI

SEQ ID NO: 27989 - protein, 9 aa, synthetic construct
AIWEMTYSG

SEQ ID NO: 27990 - protein, 14 aa, synthetic construct
AIWELTYWGIRTDK

SEQ ID NO: 27991 - protein, 14 aa, synthetic construct
AIWELNYCGISNDK

SEQ ID NO: 27992 - protein, 13 aa, synthetic construct
AIGELTYCGIRTD

SEQ ID NO: 27993 - protein, 14 aa, synthetic construct
AIGELSYWGIRTDK

SEQ ID NO: 27994 - protein, 14 aa, synthetic construct
ALCELVWGKRRVTD

SEQ ID NO: 27995 - protein, 14 aa, synthetic construct
AHGQLTCWGIRTDK

SEQ ID NO: 27996 - protein, 14 aa, synthetic construct
AHGGHLWGIRRVTD

SEQ ID NO: 27997 - protein, 14 aa, synthetic construct
AHGELVWGLRRVTD

SEQ ID NO: 27998 - protein, 14 aa, synthetic construct
AHGELVWGIRWVTD

SEQ ID NO: 27999 - protein, 14 aa, synthetic construct
AHGELVWGIRSVTD

SEQ ID NO: 28000 - protein, 14 aa, synthetic construct
AHGELTYSGIRTDK

SEQ ID NO: 28001 - protein, 14 aa, synthetic construct
AHGELTSWGIRTDK

SEQ ID NO: 28002 - protein, 14 aa, synthetic construct
AHGELTCWGIRTDK

SEQ ID NO: 28003 - protein, 8 aa, synthetic construct
AHGELNYW

SEQ ID NO: 28004 - protein, 14 aa, synthetic construct
AHGELFWGIRRVTD

SEQ ID NO: 28005 - protein, 14 aa, synthetic construct
AHGELDWGIRRVTD

SEQ ID NO: 28006 - protein, 12 aa, synthetic construct
AHGEHTYRRIRT

SEQ ID NO: 28007 - protein, 14 aa, synthetic construct
AHGDLVWGIRRVTD

SEQ ID NO: 28008 - protein, 8 aa, synthetic construct
AGGVLAWW

SEQ ID NO: 28009 - protein, 13 aa, synthetic construct
AGGRLLGVTEVHR

SEQ ID NO: 28010 - protein, 9 aa, synthetic construct
AGGGRACWG

SEQ ID NO: 28011 - protein, 9 aa, synthetic construct
AGGGLVWGV

SEQ ID NO: 28012 - protein, 8 aa, synthetic construct
AGGGLVWG

SEQ ID NO: 28013 - protein, 11 aa, synthetic construct
AGGGLASWGGR

SEQ ID NO: 28014 - protein, 14 aa, synthetic construct
AGGEVVWGIRRVTD

SEQ ID NO: 28015 - protein, 14 aa, synthetic construct
AFGEVVWGRRRVTD

SEQ ID NO: 28016 - protein, 14 aa, synthetic construct
AFGELTYWGIGTDK

SEQ ID NO: 28017 - protein, 6 aa, synthetic construct
AHGKIN

SEQ ID NO: 28018 - protein, 14 aa, synthetic construct
AHGQLTYWGIRTDK

SEQ ID NO: 28019 - protein, 14 aa, synthetic construct
AIGELPSGGIRTDK

SEQ ID NO: 28020 - protein, 14 aa, synthetic construct
AHVELTYWGIMNDK

SEQ ID NO: 28021 - protein, 14 aa, synthetic construct
AIGELNYWWISKDK

SEQ ID NO: 28022 - protein, 9 aa, synthetic construct
AIGELNYWR

SEQ ID NO: 28023 - protein, 14 aa, synthetic construct
AIGELNYWAISTDK

SEQ ID NO: 28024 - protein, 14 aa, synthetic construct
AIGELIWGIRRVTD

SEQ ID NO: 28025 - protein, 14 aa, synthetic construct
AIGELDWGIRRVTD

SEQ ID NO: 28026 - protein, 14 aa, synthetic construct
AIGEIVWGIRSVTD

SEQ ID NO: 28027 - protein, 14 aa, synthetic construct
AIGEIVWGIRRVTD

SEQ ID NO: 28028 - protein, 14 aa, synthetic construct
AIGEIVWGIRRFTD

SEQ ID NO: 28029 - protein, 14 aa, synthetic construct
AIGEIVWGILRVTD

SEQ ID NO: 28030 - protein, 14 aa, synthetic construct
AIGEIVSGILRLTD

SEQ ID NO: 28031 - protein, 14 aa, synthetic construct
AIGEIVCGIRRVTD

SEQ ID NO: 28032 - protein, 9 aa, synthetic construct
AIGEILLVI

SEQ ID NO: 28033 - protein, 14 aa, synthetic construct
AIGEHNYWGIRTDK

SEQ ID NO: 28034 - protein, 14 aa, synthetic construct
AIGDLTYWGIRTDK

SEQ ID NO: 28035 - protein, 14 aa, synthetic construct
AIGDLSYWGIGTDK

SEQ ID NO: 28036 - protein, 14 aa, synthetic construct
AIEELTYWGIRTDK

SEQ ID NO: 28037 - protein, 14 aa, synthetic construct
AICELVCGIRRVTD

SEQ ID NO: 28038 - protein, 14 aa, synthetic construct
AICELTYSGISTDK

SEQ ID NO: 28039 - protein, 14 aa, synthetic construct
AIAQLTYRGIRTDK

SEQ ID NO: 28040 - protein, 14 aa, synthetic construct
AIAELNYWGIRTDK

SEQ ID NO: 28041 - protein, 14 aa, synthetic construct
AHVELTYWGISTDK

SEQ ID NO: 28042 - protein, 14 aa, synthetic construct
ALCELVCGIRMVTD

SEQ ID NO: 28043 - protein, 14 aa, synthetic construct
ALEEIVWGIRRVTD

SEQ ID NO: 28044 - protein, 14 aa, synthetic construct
ALGDLVWGKRRVTD

SEQ ID NO: 28045 - protein, 14 aa, synthetic construct
ALGDLTYWGITTDK

SEQ ID NO: 28046 - protein, 14 aa, synthetic construct
ALGDLTYWGIRPDK

SEQ ID NO: 28047 - protein, 14 aa, synthetic construct
ALGDLTYWGIRADK

SEQ ID NO: 28048 - protein, 13 aa, synthetic construct
ALGDLTYWGIGTD

SEQ ID NO: 28049 - protein, 14 aa, synthetic construct
ALGDLTYSGLRTDK

SEQ ID NO: 28050 - protein, 9 aa, synthetic construct
ALGDLTYSG

SEQ ID NO: 28051 - protein, 13 aa, synthetic construct
ALGDLTYRRIRTE

SEQ ID NO: 28052 - protein, 14 aa, synthetic construct
ALGDLTYCRIRTDK

SEQ ID NO: 28053 - protein, 14 aa, synthetic construct
ALGDLTYCGRGTDK

SEQ ID NO: 28054 - protein, 11 aa, synthetic construct
ALGDLTYCGIT

SEQ ID NO: 28055 - protein, 13 aa, synthetic construct
ALGDLTYCGISTE

SEQ ID NO: 28056 - protein, 14 aa, synthetic construct
ALGDLTYCGIMTDK

SEQ ID NO: 28057 - protein, 14 aa, synthetic construct
ALGDLTSWGISPDK

SEQ ID NO: 28058 - protein, 8 aa, synthetic construct
ALGDLTSW

SEQ ID NO: 28059 - protein, 14 aa, synthetic construct
ALGDLTSGGIRTDK

SEQ ID NO: 28060 - protein, 14 aa, synthetic construct
ALGDLTNSGIRTDK

SEQ ID NO: 28061 - protein, 13 aa, synthetic construct
ALGDLTNSGIRTD

SEQ ID NO: 28062 - protein, 14 aa, synthetic construct
ALGDLTGGYTDKLI

SEQ ID NO: 28063 - protein, 14 aa, synthetic construct
ALGDLTGGYATDKL

SEQ ID NO: 28064 - protein, 14 aa, synthetic construct
ALGDLTDWGIRTDK

SEQ ID NO: 28065 - protein, 13 aa, synthetic construct
ALGDLTDWGIRTD

SEQ ID NO: 28066 - protein, 9 aa, synthetic construct
ALGDLTCWG

SEQ ID NO: 28067 - protein, 13 aa, synthetic construct
ALGDLTYWGITTD

SEQ ID NO: 28068 - protein, 14 aa, synthetic construct
ALGDLTYWGIWTDK

SEQ ID NO: 28069 - protein, 14 aa, synthetic construct
ALGDLSLLGDNKLI

SEQ ID NO: 28070 - protein, 13 aa, synthetic construct
ALGDLTYWGLRTD

SEQ ID NO: 28071 - protein, 14 aa, synthetic construct
ALGDLVWGIRWVTD

SEQ ID NO: 28072 - protein, 14 aa, synthetic construct
ALGDLVWGIRSVTD

SEQ ID NO: 28073 - protein, 14 aa, synthetic construct
ALGDLVWGIRSDTD

SEQ ID NO: 28074 - protein, 14 aa, synthetic construct
ALGDLVWGIRRITD

SEQ ID NO: 28075 - protein, 14 aa, synthetic construct
ALGDLVWGIRRGTD

SEQ ID NO: 28076 - protein, 14 aa, synthetic construct
ALGDLVWGIRKVTD

SEQ ID NO: 28077 - protein, 14 aa, synthetic construct
ALGDLVWGIRGVTD

SEQ ID NO: 28078 - protein, 14 aa, synthetic construct
ALGDLVWGILRITD

SEQ ID NO: 28079 - protein, 14 aa, synthetic construct
ALGDLVWGIGRVTD

SEQ ID NO: 28080 - protein, 14 aa, synthetic construct
ALGDLVWGDGGSPI

SEQ ID NO: 28081 - protein, 14 aa, synthetic construct
ALGDLVWEIRRVTD

SEQ ID NO: 28082 - protein, 14 aa, synthetic construct
ALGDLVWAIRRVTD

SEQ ID NO: 28083 - protein, 14 aa, synthetic construct
ALGDLVVLGDNKLI

SEQ ID NO: 28084 - protein, 14 aa, synthetic construct
ALGDLVSGLRRVTD

SEQ ID NO: 28085 - protein, 14 aa, synthetic construct
ALGDLVSGIRRVTD

SEQ ID NO: 28086 - protein, 14 aa, synthetic construct
ALGDLVRGIRRATD

SEQ ID NO: 28087 - protein, 14 aa, synthetic construct
ALGDLVGGIRRVTD

SEQ ID NO: 28088 - protein, 14 aa, synthetic construct
ALGDLTYWWIMTDK

SEQ ID NO: 28089 - protein, 14 aa, synthetic construct
ALGDLTYWGRGTDK

SEQ ID NO: 28090 - protein, 14 aa, synthetic construct
ALGDLTYWGLWTDK

SEQ ID NO: 28091 - protein, 14 aa, synthetic construct
ALGDLTYWGLRTDK

SEQ ID NO: 28092 - protein, 13 aa, synthetic construct
ALGDLSSHTGKLI

SEQ ID NO: 28093 - protein, 9 aa, synthetic construct
ALGDLSCWG

SEQ ID NO: 28094 - protein, 14 aa, synthetic construct
ALEELNYWGIRTDK

SEQ ID NO: 28095 - protein, 10 aa, synthetic construct
ALGDAPSYWG

SEQ ID NO: 28096 - protein, 13 aa, synthetic construct
ALGCGGLYTDKLI

SEQ ID NO: 28097 - protein, 13 aa, synthetic construct
ALGAYWGADRPLI

SEQ ID NO: 28098 - protein, 9 aa, synthetic construct
ALGARVGGV

SEQ ID NO: 28099 - protein, 14 aa, synthetic construct
ALGARLLPSYTDKL

SEQ ID NO: 28100 - protein, 14 aa, synthetic construct
ALGALVWGRRRVTD

SEQ ID NO: 28101 - protein, 14 aa, synthetic construct
ALGALVWGLRRVTD

SEQ ID NO: 28102 - protein, 14 aa, synthetic construct
ALGALVWGILRVTD

SEQ ID NO: 28103 - protein, 11 aa, synthetic construct
ALGALVSGRGR

SEQ ID NO: 28104 - protein, 9 aa, synthetic construct
ALGALVGGR

SEQ ID NO: 28105 - protein, 14 aa, synthetic construct
ALGALVGGLRRVTD

SEQ ID NO: 28106 - protein, 14 aa, synthetic construct
ALGALVGGIRRVTD

SEQ ID NO: 28107 - protein, 14 aa, synthetic construct
ALGALTSWGIRTDK

SEQ ID NO: 28108 - protein, 14 aa, synthetic construct
ALGALTNWGIRTDK

SEQ ID NO: 28109 - protein, 13 aa, synthetic construct
ALGALTKYADKLI

SEQ ID NO: 28110 - protein, 14 aa, synthetic construct
ALGALTHWGIRTDK

SEQ ID NO: 28111 - protein, 6 aa, synthetic construct
ALGALT

SEQ ID NO: 28112 - protein, 14 aa, synthetic construct
ALGALDWGRRRVTD

SEQ ID NO: 28113 - protein, 8 aa, synthetic construct
ALGAAPPT

SEQ ID NO: 28114 - protein, 14 aa, synthetic construct
ALEKLTYWGIRTDK

SEQ ID NO: 28115 - protein, 13 aa, synthetic construct
ALEKLTYWGIRTD

SEQ ID NO: 28116 - protein, 14 aa, synthetic construct
ALEELTYCGIRTDK

SEQ ID NO: 28117 - protein, 14 aa, synthetic construct
ALGDAKGGYAPINS

SEQ ID NO: 28118 - protein, 14 aa, synthetic construct
ALGDFVWGIRRVTD

SEQ ID NO: 28119 - protein, 9 aa, synthetic construct
ALGDLPSWG

SEQ ID NO: 28120 - protein, 14 aa, synthetic construct
ALGDGSYRGTRYTD

SEQ ID NO: 28121 - protein, 14 aa, synthetic construct
ALGDLIYWGIRTDK

SEQ ID NO: 28122 - protein, 8 aa, synthetic construct
ALGDLGWG

SEQ ID NO: 28123 - protein, 11 aa, synthetic construct
ALGDLGTDKLI

SEQ ID NO: 28124 - protein, 13 aa, synthetic construct
ALGDLGDTPDKLI

SEQ ID NO: 28125 - protein, 14 aa, synthetic construct
ALGDLGDMATDKLI

SEQ ID NO: 28126 - protein, 13 aa, synthetic construct
ALGDLGANTDKLN

SEQ ID NO: 28127 - protein, 13 aa, synthetic construct
ALGDLGAHTDKLI

SEQ ID NO: 28128 - protein, 14 aa, synthetic construct
ALGDLFLLGENKLI

SEQ ID NO: 28129 - protein, 14 aa, synthetic construct
ALGDLFILVENKLI

SEQ ID NO: 28130 - protein, 14 aa, synthetic construct
ALGDLDSGIRRVTD

SEQ ID NO: 28131 - protein, 14 aa, synthetic construct
ALGDLCWGIRRVTD

SEQ ID NO: 28132 - protein, 14 aa, synthetic construct
ALGDLAYWGIRTDK

SEQ ID NO: 28133 - protein, 14 aa, synthetic construct
ALGDLAYWGIMTDK

SEQ ID NO: 28134 - protein, 14 aa, synthetic construct
ALGDIVWGIRRVTD

SEQ ID NO: 28135 - protein, 14 aa, synthetic construct
ALGDITNWGIRTDK

SEQ ID NO: 28136 - protein, 14 aa, synthetic construct
ALGDINNWGISTDK

SEQ ID NO: 28137 - protein, 14 aa, synthetic construct
ALGDIFLLGDNKLI

SEQ ID NO: 28138 - protein, 14 aa, synthetic construct
ALGDHVWWIRMVTD

SEQ ID NO: 28139 - protein, 14 aa, synthetic construct
ALGDHVLGDTDKLI

SEQ ID NO: 28140 - protein, 14 aa, synthetic construct
ALGDHVCGIRSVTD

SEQ ID NO: 28141 - protein, 14 aa, synthetic construct
ALGDHTYWGIRTDK

SEQ ID NO: 28142 - protein, 14 aa, synthetic construct
ALGELLLWIRVVTD

SEQ ID NO: 28143 - protein, 14 aa, synthetic construct
ALGELLSSYVGLGV

SEQ ID NO: 28144 - protein, 14 aa, synthetic construct
ALGELLVLGDTLDK

SEQ ID NO: 28145 - protein, 14 aa, synthetic construct
ALGELVWGVRGVGG

SEQ ID NO: 28146 - protein, 14 aa, synthetic construct
ALGELVWGRLRVTD

SEQ ID NO: 28147 - protein, 14 aa, synthetic construct
ALGELVWGPRRVTD

SEQ ID NO: 28148 - protein, 14 aa, synthetic construct
ALGELVWGMRSVTD

SEQ ID NO: 28149 - protein, 14 aa, synthetic construct
ALGELVWGLRRATD

SEQ ID NO: 28150 - protein, 14 aa, synthetic construct
ALGELVWGLGWVTD

SEQ ID NO: 28151 - protein, 14 aa, synthetic construct
ALGELVWGIVRVTD

SEQ ID NO: 28152 - protein, 14 aa, synthetic construct
ALGELVWGITRVTD

SEQ ID NO: 28153 - protein, 12 aa, synthetic construct
ALGELVWGISRV

SEQ ID NO: 28154 - protein, 14 aa, synthetic construct
ALGELVWGIRWATD

SEQ ID NO: 28155 - protein, 14 aa, synthetic construct
ALGELVWGIRTVKL

SEQ ID NO: 28156 - protein, 14 aa, synthetic construct
ALGELVWGIRTDTL

SEQ ID NO: 28157 - protein, 14 aa, synthetic construct
ALGELVWGIRSDTD

SEQ ID NO: 28158 - protein, 14 aa, synthetic construct
ALGELVWGIRRSTD

SEQ ID NO: 28159 - protein, 14 aa, synthetic construct
ALGELVWGIRQVTD

SEQ ID NO: 28160 - protein, 14 aa, synthetic construct
ALGELVWGIRMDTD

SEQ ID NO: 28161 - protein, 14 aa, synthetic construct
ALGELVWGIRCVTD

SEQ ID NO: 28162 - protein, 14 aa, synthetic construct
ALGELVWGIPRVTD

SEQ ID NO: 28163 - protein, 14 aa, synthetic construct
ALGELVWGILRGTD

SEQ ID NO: 28164 - protein, 14 aa, synthetic construct
ALGELVWGIAPGTP

SEQ ID NO: 28165 - protein, 11 aa, synthetic construct
ALGELVTDKLI

SEQ ID NO: 28166 - protein, 9 aa, synthetic construct
ALGELVSRI

SEQ ID NO: 28167 - protein, 14 aa, synthetic construct
ALGELVWGRRRGTD

SEQ ID NO: 28168 - protein, 14 aa, synthetic construct
ALGELVWGVRRATD

SEQ ID NO: 28169 - protein, 14 aa, synthetic construct
ALGELVSGLRRVTD

SEQ ID NO: 28170 - protein, 13 aa, synthetic construct
ALGELVWGYGGSP

SEQ ID NO: 28171 - protein, 13 aa, synthetic construct
ALGELYWWILRDT

SEQ ID NO: 28172 - protein, 8 aa, synthetic construct
ALGELYWW

SEQ ID NO: 28173 - protein, 14 aa, synthetic construct
ALGELYWGIRTDKL

SEQ ID NO: 28174 - protein, 14 aa, synthetic construct
ALGELYWGIRMFTD

SEQ ID NO: 28175 - protein, 14 aa, synthetic construct
ALGELYTGGYTDKL

SEQ ID NO: 28176 - protein, 14 aa, synthetic construct
ALGELYLRSTGYTD

SEQ ID NO: 28177 - protein, 11 aa, synthetic construct
ALGELYCWIRR

SEQ ID NO: 28178 - protein, 14 aa, synthetic construct
ALGELWVILTDKLI

SEQ ID NO: 28179 - protein, 14 aa, synthetic construct
ALGELVYWGIRTDK

SEQ ID NO: 28180 - protein, 12 aa, synthetic construct
ALGELVYTDKLI

SEQ ID NO: 28181 - protein, 14 aa, synthetic construct
ALGELVWWVSRVTD

SEQ ID NO: 28182 - protein, 14 aa, synthetic construct
ALGELVWWIRWVTD

SEQ ID NO: 28183 - protein, 14 aa, synthetic construct
ALGELVWWIRTDKL

SEQ ID NO: 28184 - protein, 14 aa, synthetic construct
ALGELVWWIRRDTD

SEQ ID NO: 28185 - protein, 14 aa, synthetic construct
ALGELVWWIRRATD

SEQ ID NO: 28186 - protein, 14 aa, synthetic construct
ALGELVWVLRRVTD

SEQ ID NO: 28187 - protein, 14 aa, synthetic construct
ALGELVWVIRSVTD

SEQ ID NO: 28188 - protein, 14 aa, synthetic construct
ALGELVWVIRRFTD

SEQ ID NO: 28189 - protein, 14 aa, synthetic construct
ALGELVWVIMTDKL

SEQ ID NO: 28190 - protein, 14 aa, synthetic construct
AFGELQWGGADKLI

SEQ ID NO: 28191 - protein, 14 aa, synthetic construct
ALGELVWRIRWVTD

SEQ ID NO: 28192 - protein, 14 aa, synthetic construct
ALGELVSGRRRVTD

SEQ ID NO: 28193 - protein, 14 aa, synthetic construct
ALGELVSGIRTDKL

SEQ ID NO: 28194 - protein, 14 aa, synthetic construct
ALGENVLGIRMVTD

SEQ ID NO: 28195 - protein, 14 aa, synthetic construct
ALGELVCGIRRATD

SEQ ID NO: 28196 - protein, 14 aa, synthetic construct
ALGELVCAIRRVTD

SEQ ID NO: 28197 - protein, 14 aa, synthetic construct
ALGELVAPHRGSTD

SEQ ID NO: 28198 - protein, 14 aa, synthetic construct
ALGELTYYGIRTDK

SEQ ID NO: 28199 - protein, 9 aa, synthetic construct
ALGELTYYG

SEQ ID NO: 28200 - protein, 12 aa, synthetic construct
ALGELTYWWRRT

SEQ ID NO: 28201 - protein, 14 aa, synthetic construct
ALGELTYWWRMTDK

SEQ ID NO: 28202 - protein, 10 aa, synthetic construct
ALGELTYWWL

SEQ ID NO: 28203 - protein, 14 aa, synthetic construct
ALGELTYWWIRYYK

SEQ ID NO: 28204 - protein, 13 aa, synthetic construct
ALGELTYWWIRTD

SEQ ID NO: 28205 - protein, 14 aa, synthetic construct
ALGELTYWWIRSDK

SEQ ID NO: 28206 - protein, 14 aa, synthetic construct
ALGELTYWWIMTYK

SEQ ID NO: 28207 - protein, 9 aa, synthetic construct
ALGELTYWW

SEQ ID NO: 28208 - protein, 14 aa, synthetic construct
ALGELTYWVISTDK

SEQ ID NO: 28209 - protein, 14 aa, synthetic construct
ALGELTYWVIRSYK

SEQ ID NO: 28210 - protein, 14 aa, synthetic construct
ALGELTYWVIRNDK

SEQ ID NO: 28211 - protein, 14 aa, synthetic construct
ALGELTYWVIMTDK

SEQ ID NO: 28212 - protein, 14 aa, synthetic construct
ALGELTYWRVRTDK

SEQ ID NO: 28213 - protein, 14 aa, synthetic construct
ALGELTYWRISTDK

SEQ ID NO: 28214 - protein, 13 aa, synthetic construct
ALGELTYWRIRTD

SEQ ID NO: 28215 - protein, 9 aa, synthetic construct
ALGELTYWR

SEQ ID NO: 28216 - protein, 14 aa, synthetic construct
ALGELTYWGVSTDK

SEQ ID NO: 28217 - protein, 14 aa, synthetic construct
ALGELVCGILSVTD

SEQ ID NO: 28218 - protein, 14 aa, synthetic construct
ALGELVCGIRSVTD

SEQ ID NO: 28219 - protein, 14 aa, synthetic construct
ALGELVSGIRSVTD

SEQ ID NO: 28220 - protein, 14 aa, synthetic construct
ALGELVCGIRTDKL

SEQ ID NO: 28221 - protein, 14 aa, synthetic construct
ALGELVSGIRMFTD

SEQ ID NO: 28222 - protein, 14 aa, synthetic construct
ALGELVSGILRDTD

SEQ ID NO: 28223 - protein, 9 aa, synthetic construct
ALGELVRVI

SEQ ID NO: 28224 - protein, 14 aa, synthetic construct
ALGELVRGVRRVTD

SEQ ID NO: 28225 - protein, 14 aa, synthetic construct
ALGELVRGLRRVTD

SEQ ID NO: 28226 - protein, 14 aa, synthetic construct
ALGELVLVDTDKLI

SEQ ID NO: 28227 - protein, 14 aa, synthetic construct
ALGELVGGYGGSPI

SEQ ID NO: 28228 - protein, 14 aa, synthetic construct
ALGELVGGIRSVTD

SEQ ID NO: 28229 - protein, 12 aa, synthetic construct
ALGELVCWISMV

SEQ ID NO: 28230 - protein, 14 aa, synthetic construct
ALGELVCWIRRVTD

SEQ ID NO: 28231 - protein, 9 aa, synthetic construct
ALGELVCVL

SEQ ID NO: 28232 - protein, 14 aa, synthetic construct
ALGELVCVIRRDTD

SEQ ID NO: 28233 - protein, 12 aa, synthetic construct
ALGELVCLIRRL

SEQ ID NO: 28234 - protein, 14 aa, synthetic construct
ALGELVCGYGGSPI

SEQ ID NO: 28235 - protein, 9 aa, synthetic construct
ALGELVCGV

SEQ ID NO: 28236 - protein, 14 aa, synthetic construct
ALGELVCGRRRVTD

SEQ ID NO: 28237 - protein, 14 aa, synthetic construct
ALGELVCGLRRVTD

SEQ ID NO: 28238 - protein, 9 aa, synthetic construct
ALGELVCGL

SEQ ID NO: 28239 - protein, 14 aa, synthetic construct
ALGELVCGKRTDTD

SEQ ID NO: 28240 - protein, 14 aa, synthetic construct
ALGELVCGKRRVTD

SEQ ID NO: 28241 - protein, 14 aa, synthetic construct
ALGELVCGIWRVTD

SEQ ID NO: 28242 - protein, 12 aa, synthetic construct
ALGELYYWGLRN

SEQ ID NO: 28243 - protein, 14 aa, synthetic construct
ALGEPFLRGGYSDK

SEQ ID NO: 28244 - protein, 14 aa, synthetic construct
ALGELLVLWDTLDK

SEQ ID NO: 28245 - protein, 13 aa, synthetic construct
ALGGGDNYTDKLI

SEQ ID NO: 28246 - protein, 14 aa, synthetic construct
ALGGFLLGDDTEKL

SEQ ID NO: 28247 - protein, 14 aa, synthetic construct
ALGGDFHYWGNTDK

SEQ ID NO: 28248 - protein, 14 aa, synthetic construct
ALGFSFIPYTDKLI

SEQ ID NO: 28249 - protein, 12 aa, synthetic construct
ALGFQRLGDKLI

SEQ ID NO: 28250 - protein, 10 aa, synthetic construct
ALGEYTDKLI

SEQ ID NO: 28251 - protein, 14 aa, synthetic construct
ALGEWGGGTPTDKL

SEQ ID NO: 28252 - protein, 13 aa, synthetic construct
ALGEVVWWIRRDT

SEQ ID NO: 28253 - protein, 14 aa, synthetic construct
ALGEVVWGIRTDKL

SEQ ID NO: 28254 - protein, 14 aa, synthetic construct
ALGEVVWGIRCVTD

SEQ ID NO: 28255 - protein, 8 aa, synthetic construct
ALGEVVWG

SEQ ID NO: 28256 - protein, 14 aa, synthetic construct
ALGEVVCGIQSVTD

SEQ ID NO: 28257 - protein, 14 aa, synthetic construct
ALGEVTYWWIRTDK

SEQ ID NO: 28258 - protein, 13 aa, synthetic construct
ALGEVTYWGVRTD

SEQ ID NO: 28259 - protein, 13 aa, synthetic construct
ALGEVTYWGLRTD

SEQ ID NO: 28260 - protein, 14 aa, synthetic construct
ALGEVTYWGIWTDK

SEQ ID NO: 28261 - protein, 13 aa, synthetic construct
ALGEVTYCGIWTD

SEQ ID NO: 28262 - protein, 9 aa, synthetic construct
ALGEVTSWG

SEQ ID NO: 28263 - protein, 14 aa, synthetic construct
ALGEVLGAPYTDKL

SEQ ID NO: 28264 - protein, 6 aa, synthetic construct
ALGEVF

SEQ ID NO: 28265 - protein, 14 aa, synthetic construct
ALGEVAYFGIPDKL

SEQ ID NO: 28266 - protein, 9 aa, synthetic construct
ALGEVAAGG

SEQ ID NO: 28267 - protein, 14 aa, synthetic construct
ALGGFVWGIRRVTD

SEQ ID NO: 28268 - protein, 14 aa, synthetic construct
ALGGHTYWGIRTDK

SEQ ID NO: 28269 - protein, 14 aa, synthetic construct
ALGETGGYGRSWDT

SEQ ID NO: 28270 - protein, 12 aa, synthetic construct
ALGGLAYWGIRA

SEQ ID NO: 28271 - protein, 14 aa, synthetic construct
ALGGLWGVPYTDKL

SEQ ID NO: 28272 - protein, 14 aa, synthetic construct
ALGGLVWWIRRVTD

SEQ ID NO: 28273 - protein, 14 aa, synthetic construct
ALGGLVWGVRSVTD

SEQ ID NO: 28274 - protein, 14 aa, synthetic construct
ALGGLVWGRRRVTD

SEQ ID NO: 28275 - protein, 14 aa, synthetic construct
ALGGLVWGMRRVTD

SEQ ID NO: 28276 - protein, 14 aa, synthetic construct
ALGGLVWGLRRVTD

SEQ ID NO: 28277 - protein, 9 aa, synthetic construct
ALGGLVWGL

SEQ ID NO: 28278 - protein, 14 aa, synthetic construct
ALGGLVWGIGRVTD

SEQ ID NO: 28279 - protein, 8 aa, synthetic construct
ALGGLVWG

SEQ ID NO: 28280 - protein, 10 aa, synthetic construct
ALGGLVGGRR

SEQ ID NO: 28281 - protein, 14 aa, synthetic construct
ALGGLVGGLRRVTD

SEQ ID NO: 28282 - protein, 14 aa, synthetic construct
ALGGLTYWGMRTDK

SEQ ID NO: 28283 - protein, 14 aa, synthetic construct
ALGGLTYWGLRTDK

SEQ ID NO: 28284 - protein, 14 aa, synthetic construct
ALGGLTYCGIRTDK

SEQ ID NO: 28285 - protein, 14 aa, synthetic construct
ALGGLTSWGIRTDK

SEQ ID NO: 28286 - protein, 14 aa, synthetic construct
ALGGLTCWGIRTDK

SEQ ID NO: 28287 - protein, 8 aa, synthetic construct
ALGGLSWW

SEQ ID NO: 28288 - protein, 14 aa, synthetic construct
ALGGLPGGDTDKLI

SEQ ID NO: 28289 - protein, 14 aa, synthetic construct
ALGGLHMGGYTDKL

SEQ ID NO: 28290 - protein, 11 aa, synthetic construct
ALGGLGGGELI

SEQ ID NO: 28291 - protein, 14 aa, synthetic construct
ALGGLFCGIRRVTD

SEQ ID NO: 28292 - protein, 13 aa, synthetic construct
ALGETGGYTDKLI

SEQ ID NO: 28293 - protein, 14 aa, synthetic construct
ALGETGGYGGSPIN

SEQ ID NO: 28294 - protein, 12 aa, synthetic construct
ALGEPGDADKLI

SEQ ID NO: 28295 - protein, 14 aa, synthetic construct
ALGEPTYWGIMTDK

SEQ ID NO: 28296 - protein, 14 aa, synthetic construct
ALGEPTSWGIRTDK

SEQ ID NO: 28297 - protein, 14 aa, synthetic construct
ALGEPTGGYTDQLI

SEQ ID NO: 28298 - protein, 14 aa, synthetic construct
ALGEPTGGYRYTDK

SEQ ID NO: 28299 - protein, 12 aa, synthetic construct
ALGEPTGGYRYT

SEQ ID NO: 28300 - protein, 14 aa, synthetic construct
ALGEPTGGYRYPDK

SEQ ID NO: 28301 - protein, 13 aa, synthetic construct
ALGEPTGGYGDKL

SEQ ID NO: 28302 - protein, 14 aa, synthetic construct
ALGEPRSFPGTDTD

SEQ ID NO: 28303 - protein, 14 aa, synthetic construct
ALGEPPTWGINNLI

SEQ ID NO: 28304 - protein, 13 aa, synthetic construct
ALGEPPTWGINKL

SEQ ID NO: 28305 - protein, 14 aa, synthetic construct
ALGEPPSWGIPPDK

SEQ ID NO: 28306 - protein, 14 aa, synthetic construct
ALGEPLPTGGLDKL

SEQ ID NO: 28307 - protein, 10 aa, synthetic construct
ALGEPLLPWG

SEQ ID NO: 28308 - protein, 14 aa, synthetic construct
ALGEPLLGGYAPDK

SEQ ID NO: 28309 - protein, 14 aa, synthetic construct
ALGEPLLGEWYTDK

SEQ ID NO: 28310 - protein, 14 aa, synthetic construct
ALGEPLGDTAINSS

SEQ ID NO: 28311 - protein, 13 aa, synthetic construct
ALGEPLAGPDKLI

SEQ ID NO: 28312 - protein, 13 aa, synthetic construct
ALGEPGYEGDKLI

SEQ ID NO: 28313 - protein, 13 aa, synthetic construct
ALGEPGGYTDKLI

SEQ ID NO: 28314 - protein, 14 aa, synthetic construct
ALGEPGGSYTEKLI

SEQ ID NO: 28315 - protein, 12 aa, synthetic construct
ALGEPGDTDKLM

SEQ ID NO: 28316 - protein, 12 aa, synthetic construct
ALGEPGDTDKLI

SEQ ID NO: 28317 - protein, 14 aa, synthetic construct
ALGEPTYSGIRTDK

SEQ ID NO: 28318 - protein, 13 aa, synthetic construct
ALGEPTYWGRRTD

SEQ ID NO: 28319 - protein, 14 aa, synthetic construct
ALGESYLGKYTDKL

SEQ ID NO: 28320 - protein, 14 aa, synthetic construct
ALGEPVLGDTPRDT

SEQ ID NO: 28321 - protein, 14 aa, synthetic construct
ALGESYLGKHTDKL

SEQ ID NO: 28322 - protein, 14 aa, synthetic construct
ALGESGDWGIRDTD

SEQ ID NO: 28323 - protein, 14 aa, synthetic construct
ALGERYWGTYDQLI

SEQ ID NO: 28324 - protein, 14 aa, synthetic construct
ALGERYWGTYDKLI

SEQ ID NO: 28325 - protein, 11 aa, synthetic construct
ALGERWRDKLI

SEQ ID NO: 28326 - protein, 14 aa, synthetic construct
ALGERTSWGIRTDK

SEQ ID NO: 28327 - protein, 11 aa, synthetic construct
ALGERSPPRLI

SEQ ID NO: 28328 - protein, 14 aa, synthetic construct
ALGERPYRGIRDKL

SEQ ID NO: 28329 - protein, 14 aa, synthetic construct
ALGERLGGYAADKL

SEQ ID NO: 28330 - protein, 14 aa, synthetic construct
ALGERGYVWDTRQM

SEQ ID NO: 28331 - protein, 14 aa, synthetic construct
ALGERGWGINTDTL

SEQ ID NO: 28332 - protein, 13 aa, synthetic construct
ALGERGGYVDKLI

SEQ ID NO: 28333 - protein, 13 aa, synthetic construct
ALGERGGYIYQLI

SEQ ID NO: 28334 - protein, 14 aa, synthetic construct
ALGERGGIRGTDKL

SEQ ID NO: 28335 - protein, 11 aa, synthetic construct
ALGERGFDKLI

SEQ ID NO: 28336 - protein, 13 aa, synthetic construct
ALGEQYWGDDKLI

SEQ ID NO: 28337 - protein, 14 aa, synthetic construct
ALGEQTGGPPYTDK

SEQ ID NO: 28338 - protein, 14 aa, synthetic construct
ALGEPYWGTSDKLI

SEQ ID NO: 28339 - protein, 14 aa, synthetic construct
ALGEPWGTYTDKLI

SEQ ID NO: 28340 - protein, 14 aa, synthetic construct
ALGEPVWGIRMFTD

SEQ ID NO: 28341 - protein, 14 aa, synthetic construct
ALGEPVLGDTPWDT

SEQ ID NO: 28342 - protein, 13 aa, synthetic construct
ALGELTYWGVRTD

SEQ ID NO: 28343 - protein, 14 aa, synthetic construct
ALGELTYWGVGTDK

SEQ ID NO: 28344 - protein, 14 aa, synthetic construct
ALGELTYWGTSTDK

SEQ ID NO: 28345 - protein, 13 aa, synthetic construct
ALGELTDCGMGTD

SEQ ID NO: 28346 - protein, 14 aa, synthetic construct
ALGELTCWGVRADK

SEQ ID NO: 28347 - protein, 14 aa, synthetic construct
ALGELTCWGIRIDK

SEQ ID NO: 28348 - protein, 14 aa, synthetic construct
ALGELTCWGIRADK

SEQ ID NO: 28349 - protein, 14 aa, synthetic construct
ALGELTCWGIGTDK

SEQ ID NO: 28350 - protein, 14 aa, synthetic construct
ALGELTCCGIRTDK

SEQ ID NO: 28351 - protein, 14 aa, synthetic construct
ALGELTARHAVPDK

SEQ ID NO: 28352 - protein, 13 aa, synthetic construct
ALGELSYWGVSTG

SEQ ID NO: 28353 - protein, 13 aa, synthetic construct
ALGELSYWGVGTD

SEQ ID NO: 28354 - protein, 14 aa, synthetic construct
ALGELSYWGRRTDK

SEQ ID NO: 28355 - protein, 13 aa, synthetic construct
ALGELSYWGRRTD

SEQ ID NO: 28356 - protein, 14 aa, synthetic construct
ALGELSYWGRRSDK

SEQ ID NO: 28357 - protein, 13 aa, synthetic construct
ALGELSYWGIWTD

SEQ ID NO: 28358 - protein, 13 aa, synthetic construct
ALGELSYWGIRSD

SEQ ID NO: 28359 - protein, 14 aa, synthetic construct
ALGELSYWGIRADK

SEQ ID NO: 28360 - protein, 14 aa, synthetic construct
ALGELSYWGIGTDK

SEQ ID NO: 28361 - protein, 9 aa, synthetic construct
ALGELSYWG

SEQ ID NO: 28362 - protein, 13 aa, synthetic construct
ALGELSYSTDQLI

SEQ ID NO: 28363 - protein, 13 aa, synthetic construct
ALGELSYSTDKLI

SEQ ID NO: 28364 - protein, 14 aa, synthetic construct
ALGELSYPGVMYTD

SEQ ID NO: 28365 - protein, 14 aa, synthetic construct
ALGELSYCGVSTDK

SEQ ID NO: 28366 - protein, 14 aa, synthetic construct
ALGELSYCGIWTDK

SEQ ID NO: 28367 - protein, 13 aa, synthetic construct
ALGELTCWGVRTD

SEQ ID NO: 28368 - protein, 14 aa, synthetic construct
ALGELTDGGIRTDK

SEQ ID NO: 28369 - protein, 14 aa, synthetic construct
ALGELSWGIRRVTD

SEQ ID NO: 28370 - protein, 13 aa, synthetic construct
ALGELTDWGIRTD

SEQ ID NO: 28371 - protein, 14 aa, synthetic construct
ALGELTSLGIRTDK

SEQ ID NO: 28372 - protein, 14 aa, synthetic construct
ALGELTSGGVRTDK

SEQ ID NO: 28373 - protein, 11 aa, synthetic construct
ALGELTSGGLR

SEQ ID NO: 28374 - protein, 14 aa, synthetic construct
ALGELTSCGIRTDK

SEQ ID NO: 28375 - protein, 10 aa, synthetic construct
ALGELTSCGI

SEQ ID NO: 28376 - protein, 7 aa, synthetic construct
ALGELTS

SEQ ID NO: 28377 - protein, 14 aa, synthetic construct
ALGELTNWGVRTDK

SEQ ID NO: 28378 - protein, 14 aa, synthetic construct
ALGELTNWGIMTDK

SEQ ID NO: 28379 - protein, 14 aa, synthetic construct
ALGELTNSGIRTDK

SEQ ID NO: 28380 - protein, 14 aa, synthetic construct
ALGELTNRGIRTDK

SEQ ID NO: 28381 - protein, 14 aa, synthetic construct
ALGELTNRAIRTDK

SEQ ID NO: 28382 - protein, 14 aa, synthetic construct
ALGELTNCGVRTDK

SEQ ID NO: 28383 - protein, 14 aa, synthetic construct
ALGELTNCAIRTDK

SEQ ID NO: 28384 - protein, 14 aa, synthetic construct
ALGELTKWGIINDK

SEQ ID NO: 28385 - protein, 14 aa, synthetic construct
ALGELTHWGIRIDK

SEQ ID NO: 28386 - protein, 14 aa, synthetic construct
ALGELTHCGIRTDK

SEQ ID NO: 28387 - protein, 14 aa, synthetic construct
ALGELTGGYSDKLI

SEQ ID NO: 28388 - protein, 14 aa, synthetic construct
ALGELTGGYATDTL

SEQ ID NO: 28389 - protein, 14 aa, synthetic construct
ALGELTGGYAPDKL

SEQ ID NO: 28390 - protein, 14 aa, synthetic construct
ALGELTGGDATDKL

SEQ ID NO: 28391 - protein, 13 aa, synthetic construct
ALGELTDWGVRTD

SEQ ID NO: 28392 - protein, 7 aa, synthetic construct
ALGELSY

SEQ ID NO: 28393 - protein, 14 aa, synthetic construct
ALGELSTGGYTDKL

SEQ ID NO: 28394 - protein, 13 aa, synthetic construct
ALGELTYWGTRTD

SEQ ID NO: 28395 - protein, 12 aa, synthetic construct
ALGELPGGYALI

SEQ ID NO: 28396 - protein, 14 aa, synthetic construct
ALGELNYWGISTDK

SEQ ID NO: 28397 - protein, 8 aa, synthetic construct
ALGELNYW

SEQ ID NO: 28398 - protein, 14 aa, synthetic construct
ALGELNYLGISTDK

SEQ ID NO: 28399 - protein, 14 aa, synthetic construct
ALGELNYGGLRTDK

SEQ ID NO: 28400 - protein, 14 aa, synthetic construct
ALGELNYGGIRTDK

SEQ ID NO: 28401 - protein, 14 aa, synthetic construct
ALGELNSWGIRTDK

SEQ ID NO: 28402 - protein, 8 aa, synthetic construct
ALGELNSW

SEQ ID NO: 28403 - protein, 14 aa, synthetic construct
ALGELNSSGIRTDK

SEQ ID NO: 28404 - protein, 13 aa, synthetic construct
ALGELNSGIRRDT

SEQ ID NO: 28405 - protein, 11 aa, synthetic construct
ALGELNSGIRR

SEQ ID NO: 28406 - protein, 13 aa, synthetic construct
ALGELNRWIRRDT

SEQ ID NO: 28407 - protein, 14 aa, synthetic construct
ALGELNNWVISTDK

SEQ ID NO: 28408 - protein, 11 aa, synthetic construct
ALGELNNWRSM

SEQ ID NO: 28409 - protein, 14 aa, synthetic construct
ALGELNNCGIRTDK

SEQ ID NO: 28410 - protein, 9 aa, synthetic construct
ALGELNFLR

SEQ ID NO: 28411 - protein, 12 aa, synthetic construct
ALGELNCWIMRN

SEQ ID NO: 28412 - protein, 13 aa, synthetic construct
ALGELNAWGMRTD

SEQ ID NO: 28413 - protein, 14 aa, synthetic construct
ALGELLYWGANTDK

SEQ ID NO: 28414 - protein, 14 aa, synthetic construct
ALGELLWWIRRVTD

SEQ ID NO: 28415 - protein, 14 aa, synthetic construct
ALGELLWGLRRVTD

SEQ ID NO: 28416 - protein, 14 aa, synthetic construct
ALGELLWGILRVTD

SEQ ID NO: 28417 - protein, 14 aa, synthetic construct
ALGELNYWGVRTDK

SEQ ID NO: 28418 - protein, 14 aa, synthetic construct
ALGELPLLLGDIHR

SEQ ID NO: 28419 - protein, 14 aa, synthetic construct
ALGELSSWWIRTYK

SEQ ID NO: 28420 - protein, 14 aa, synthetic construct
ALGELPLYWGRYTD

SEQ ID NO: 28421 - protein, 13 aa, synthetic construct
ALGELSSWGIRTD

SEQ ID NO: 28422 - protein, 9 aa, synthetic construct
ALGELSSWG

SEQ ID NO: 28423 - protein, 13 aa, synthetic construct
ALGELSSHTGKLI

SEQ ID NO: 28424 - protein, 14 aa, synthetic construct
ALGELSGGYRADKL

SEQ ID NO: 28425 - protein, 14 aa, synthetic construct
ALGELSGGSTDKLI

SEQ ID NO: 28426 - protein, 14 aa, synthetic construct
ALGELSFLRGDTDK

SEQ ID NO: 28427 - protein, 13 aa, synthetic construct
ALGELSFLRGDTD

SEQ ID NO: 28428 - protein, 14 aa, synthetic construct
ALGELSDWGIRTDK

SEQ ID NO: 28429 - protein, 14 aa, synthetic construct
ALGELSCWGISTDK

SEQ ID NO: 28430 - protein, 14 aa, synthetic construct
ALGELSCWGIRTDK

SEQ ID NO: 28431 - protein, 9 aa, synthetic construct
ALGELSCWG

SEQ ID NO: 28432 - protein, 14 aa, synthetic construct
ALGELRWGTQYTDK

SEQ ID NO: 28433 - protein, 14 aa, synthetic construct
ALGELRPGGYADKL

SEQ ID NO: 28434 - protein, 14 aa, synthetic construct
ALGELRNWGIRDTD

SEQ ID NO: 28435 - protein, 14 aa, synthetic construct
ALGELRLGVPYTDK

SEQ ID NO: 28436 - protein, 14 aa, synthetic construct
ALGELRGTGGDKLI

SEQ ID NO: 28437 - protein, 14 aa, synthetic construct
ALGELRGISTDKLI

SEQ ID NO: 28438 - protein, 14 aa, synthetic construct
ALGELRGGYTDKLI

SEQ ID NO: 28439 - protein, 14 aa, synthetic construct
ALGELPYWGVRTDK

SEQ ID NO: 28440 - protein, 14 aa, synthetic construct
ALGELPYWGIRGLI

SEQ ID NO: 28441 - protein, 14 aa, synthetic construct
ALGELPTGIRRNTD

SEQ ID NO: 28442 - protein, 14 aa, synthetic construct
ALGELTSRGIRTDK

SEQ ID NO: 28443 - protein, 14 aa, synthetic construct
ALGELTSSEIRTDK

SEQ ID NO: 28444 - protein, 10 aa, synthetic construct
ALGELTSSGI

SEQ ID NO: 28445 - protein, 14 aa, synthetic construct
ALGELTYWGIRFTD

SEQ ID NO: 28446 - protein, 14 aa, synthetic construct
ALGELTYWGIMSDK

SEQ ID NO: 28447 - protein, 13 aa, synthetic construct
ALGELTYWGIKTD

SEQ ID NO: 28448 - protein, 13 aa, synthetic construct
ALGELTYWGIGTD

SEQ ID NO: 28449 - protein, 14 aa, synthetic construct
ALGELTYWGIGIDK

SEQ ID NO: 28450 - protein, 13 aa, synthetic construct
ALGELTYWDTRQM

SEQ ID NO: 28451 - protein, 14 aa, synthetic construct
ALGELTYWAKMTDK

SEQ ID NO: 28452 - protein, 14 aa, synthetic construct
ALGELTYWAIMTDK

SEQ ID NO: 28453 - protein, 14 aa, synthetic construct
ALGELTYTGISKDK

SEQ ID NO: 28454 - protein, 14 aa, synthetic construct
ALGELTYSWIRTDK

SEQ ID NO: 28455 - protein, 14 aa, synthetic construct
ALGELTYSWIMTDK

SEQ ID NO: 28456 - protein, 14 aa, synthetic construct
ALGELTYSGTRTDK

SEQ ID NO: 28457 - protein, 14 aa, synthetic construct
ALGELTYSGITTDK

SEQ ID NO: 28458 - protein, 14 aa, synthetic construct
ALGELTYSGISTDQ

SEQ ID NO: 28459 - protein, 14 aa, synthetic construct
ALGELTYSGIMTDK

SEQ ID NO: 28460 - protein, 14 aa, synthetic construct
ALGELTYSGIGTDK

SEQ ID NO: 28461 - protein, 10 aa, synthetic construct
ALGELTYSGI

SEQ ID NO: 28462 - protein, 9 aa, synthetic construct
ALGELTYSG

SEQ ID NO: 28463 - protein, 14 aa, synthetic construct
ALGELTYRRIRTDK

SEQ ID NO: 28464 - protein, 14 aa, synthetic construct
ALGELTYRGRRTDK

SEQ ID NO: 28465 - protein, 12 aa, synthetic construct
ALGELTYRGRRT

SEQ ID NO: 28466 - protein, 14 aa, synthetic construct
ALGELTYRGMRTDK

SEQ ID NO: 28467 - protein, 14 aa, synthetic construct
ALGELTYWGIPQTH

SEQ ID NO: 28468 - protein, 14 aa, synthetic construct
ALGELTYWGIRPIN

SEQ ID NO: 28469 - protein, 14 aa, synthetic construct
ALGELTSSGIRTDK

SEQ ID NO: 28470 - protein, 14 aa, synthetic construct
ALGELTYWGIRVDK

SEQ ID NO: 28471 - protein, 14 aa, synthetic construct
ALGELTYWGTMTDK

SEQ ID NO: 28472 - protein, 14 aa, synthetic construct
ALGELTYWGSGPIN

SEQ ID NO: 28473 - protein, 14 aa, synthetic construct
ALGELTYWGRWTDK

SEQ ID NO: 28474 - protein, 14 aa, synthetic construct
ALGELTYWGRSTDK

SEQ ID NO: 28475 - protein, 14 aa, synthetic construct
ALGELTYWGRRSDK

SEQ ID NO: 28476 - protein, 14 aa, synthetic construct
ALGELTYWGRMTDK

SEQ ID NO: 28477 - protein, 14 aa, synthetic construct
ALGELTYWGRLTDK

SEQ ID NO: 28478 - protein, 14 aa, synthetic construct
ALGELTYWGRGSDK

SEQ ID NO: 28479 - protein, 14 aa, synthetic construct
ALGELTYWGMNTDK

SEQ ID NO: 28480 - protein, 14 aa, synthetic construct
ALGELTYWGMGTDK

SEQ ID NO: 28481 - protein, 14 aa, synthetic construct
ALGELTYWGLSTDK

SEQ ID NO: 28482 - protein, 14 aa, synthetic construct
ALGELTYWGLSSDK

SEQ ID NO: 28483 - protein, 14 aa, synthetic construct
ALGELTYWGLGTDK

SEQ ID NO: 28484 - protein, 14 aa, synthetic construct
ALGELTYWGKTTDK

SEQ ID NO: 28485 - protein, 14 aa, synthetic construct
ALGELTYWGIWSDK

SEQ ID NO: 28486 - protein, 14 aa, synthetic construct
ALGELTYWGIWPDK

SEQ ID NO: 28487 - protein, 13 aa, synthetic construct
ALGELTYWGISTD

SEQ ID NO: 28488 - protein, 14 aa, synthetic construct
ALGELTYWGISSDK

SEQ ID NO: 28489 - protein, 14 aa, synthetic construct
ALGELTYWGISPDK

SEQ ID NO: 28490 - protein, 14 aa, synthetic construct
ALGELTYWGISKDK

SEQ ID NO: 28491 - protein, 11 aa, synthetic construct
ALGELTYWGIS

SEQ ID NO: 28492 - protein, 13 aa, synthetic construct
ALGELTYRGIRTG

SEQ ID NO: 28493 - protein, 13 aa, synthetic construct
ALGELTYRGIRTD

SEQ ID NO: 28494 - protein, 14 aa, synthetic construct
ALGELTYREIRTDK

SEQ ID NO: 28495 - protein, 14 aa, synthetic construct
ALGELTYRCIRTDK

SEQ ID NO: 28496 - protein, 10 aa, synthetic construct
ALGELTYCGI

SEQ ID NO: 28497 - protein, 14 aa, synthetic construct
ALGELTYCAISTDK

SEQ ID NO: 28498 - protein, 10 aa, synthetic construct
ALGELTWWGV

SEQ ID NO: 28499 - protein, 14 aa, synthetic construct
ALGELTWGIRRVTD

SEQ ID NO: 28500 - protein, 14 aa, synthetic construct
ALGELTVGYATDKL

SEQ ID NO: 28501 - protein, 14 aa, synthetic construct
ALGELTTWGIKTDK

SEQ ID NO: 28502 - protein, 13 aa, synthetic construct
ALGELTTGGSVPT

SEQ ID NO: 28503 - protein, 14 aa, synthetic construct
ALGELTSWWISTDK

SEQ ID NO: 28504 - protein, 14 aa, synthetic construct
ALGELTSWWIRTDK

SEQ ID NO: 28505 - protein, 14 aa, synthetic construct
ALGELTSWVIRTDK

SEQ ID NO: 28506 - protein, 14 aa, synthetic construct
ALGELTSWRIRTDK

SEQ ID NO: 28507 - protein, 14 aa, synthetic construct
ALGELTSWGVRTDK

SEQ ID NO: 28508 - protein, 13 aa, synthetic construct
ALGELTSWGRRTD

SEQ ID NO: 28509 - protein, 14 aa, synthetic construct
ALGELTSWGRRPDK

SEQ ID NO: 28510 - protein, 14 aa, synthetic construct
ALGELTSWGRMTDK

SEQ ID NO: 28511 - protein, 14 aa, synthetic construct
ALGELTSWGMRTDK

SEQ ID NO: 28512 - protein, 14 aa, synthetic construct
ALGELTSWGKRTDK

SEQ ID NO: 28513 - protein, 14 aa, synthetic construct
ALGELTSWGISNDK

SEQ ID NO: 28514 - protein, 14 aa, synthetic construct
ALGELTSWGISHDK

SEQ ID NO: 28515 - protein, 14 aa, synthetic construct
ALGELTSWGIRSDK

SEQ ID NO: 28516 - protein, 14 aa, synthetic construct
ALGELTSWGIRPDK

SEQ ID NO: 28517 - protein, 13 aa, synthetic construct
ALGELTYCGIMTD

SEQ ID NO: 28518 - protein, 14 aa, synthetic construct
ALGELTYCGIRTYK

SEQ ID NO: 28519 - protein, 14 aa, synthetic construct
ALGELTYCGISKDK

SEQ ID NO: 28520 - protein, 14 aa, synthetic construct
ALGELTYGGRRTDK

SEQ ID NO: 28521 - protein, 14 aa, synthetic construct
ALGELTYRAIRTDK

SEQ ID NO: 28522 - protein, 14 aa, synthetic construct
ALGELTYNWGLRTD

SEQ ID NO: 28523 - protein, 14 aa, synthetic construct
ALGELTYNWGIRTD

SEQ ID NO: 28524 - protein, 14 aa, synthetic construct
ALGELTYLWIRTDK

SEQ ID NO: 28525 - protein, 14 aa, synthetic construct
ALGELTYLGIMTDK

SEQ ID NO: 28526 - protein, 14 aa, synthetic construct
ALGELTYKAIRTDK

SEQ ID NO: 28527 - protein, 14 aa, synthetic construct
ALGELTYGRIRTDK

SEQ ID NO: 28528 - protein, 11 aa, synthetic construct
ALGELTYGLRR

SEQ ID NO: 28529 - protein, 14 aa, synthetic construct
ALGELTYGGVRTDK

SEQ ID NO: 28530 - protein, 11 aa, synthetic construct
ALGELTYGGLR

SEQ ID NO: 28531 - protein, 14 aa, synthetic construct
ALGELTYCGISNDK

SEQ ID NO: 28532 - protein, 13 aa, synthetic construct
ALGELTYGGIWTD

SEQ ID NO: 28533 - protein, 14 aa, synthetic construct
ALGELTYGGISTDK

SEQ ID NO: 28534 - protein, 14 aa, synthetic construct
ALGELTYCWITTDK

SEQ ID NO: 28535 - protein, 14 aa, synthetic construct
ALGELTYCWIRTDK

SEQ ID NO: 28536 - protein, 14 aa, synthetic construct
ALGELTYCRIRTDK

SEQ ID NO: 28537 - protein, 12 aa, synthetic construct
ALGELTYCGRRT

SEQ ID NO: 28538 - protein, 14 aa, synthetic construct
ALGELTYCGRMTDK

SEQ ID NO: 28539 - protein, 14 aa, synthetic construct
ALGELTYCGMRTDK

SEQ ID NO: 28540 - protein, 11 aa, synthetic construct
ALGELTYCGIT

SEQ ID NO: 28541 - protein, 8 aa, synthetic construct
YQGEIYRG

SEQ ID NO: 28542 - protein, 13 aa, synthetic construct
ACDSVLGETDKLI

SEQ ID NO: 28543 - protein, 12 aa, synthetic construct
ACDTLGDTDKLI

SEQ ID NO: 28544 - protein, 10 aa, synthetic construct
ACDTSGGLLI

SEQ ID NO: 28545 - protein, 11 aa, synthetic construct
ACGDTKTDKLI

SEQ ID NO: 28546 - protein, 6 aa, synthetic construct
APHKLI

SEQ ID NO: 28547 - protein, 12 aa, synthetic construct
ACDTGRGPDKLI

SEQ ID NO: 28548 - protein, 10 aa, synthetic construct
ACDTSGDKLI

SEQ ID NO: 28549 - protein, 9 aa, synthetic construct
ACDTEGQTH

SEQ ID NO: 28550 - protein, 12 aa, synthetic construct
ACDTGDTTDKLI

SEQ ID NO: 28551 - protein, 13 aa, synthetic construct
ACDTGWGITDKLI

SEQ ID NO: 28552 - protein, 13 aa, synthetic construct
ACDKLGVYTDKLI

SEQ ID NO: 28553 - protein, 12 aa, synthetic construct
ACDTEGDTDKLI

SEQ ID NO: 28554 - protein, 12 aa, synthetic construct
ACDIGGNTDKLI

SEQ ID NO: 28555 - protein, 12 aa, synthetic construct
ACDRGDYTDKLI

SEQ ID NO: 28556 - protein, 12 aa, synthetic construct
AWEPGDNPDKLI

SEQ ID NO: 28557 - protein, 13 aa, synthetic construct
ACDPYWGPTDKLI

SEQ ID NO: 28558 - protein, 12 aa, synthetic construct
ACDIGGYADKLI

SEQ ID NO: 28559 - protein, 12 aa, synthetic construct
ACDTRGYADKLI

SEQ ID NO: 28560 - protein, 12 aa, synthetic construct
ACDTGDRTDKLI

SEQ ID NO: 28561 - protein, 10 aa, synthetic construct
ACERRADKLI

SEQ ID NO: 28562 - protein, 14 aa, synthetic construct
ACDTRWGAGDDKLI

SEQ ID NO: 28563 - protein, 12 aa, synthetic construct
ACDTGGGSVKLI

SEQ ID NO: 28564 - protein, 13 aa, synthetic construct
ACDHWGIDTDKLI

SEQ ID NO: 28565 - protein, 12 aa, synthetic construct
ACDLGDTGDKLI

SEQ ID NO: 28566 - protein, 13 aa, synthetic construct
ACDTGDRHTDKLI

SEQ ID NO: 28567 - protein, 14 aa, synthetic construct
ACDYWGIPYTDKLI

SEQ ID NO: 28568 - protein, 14 aa, synthetic construct
ACDSNWGDTGDKLI

SEQ ID NO: 28569 - protein, 13 aa, synthetic construct
ACDTGDTYTDKLI

SEQ ID NO: 28570 - protein, 10 aa, synthetic construct
ACDTWGPKLI

SEQ ID NO: 28571 - protein, 14 aa, synthetic construct
ACDLGDTPDTDKLI

SEQ ID NO: 28572 - protein, 12 aa, synthetic construct
ACDLLGDTDKLI

SEQ ID NO: 28573 - protein, 15 aa, synthetic construct
ACDTGEGLGAVDKLI

SEQ ID NO: 28574 - protein, 14 aa, synthetic construct
ACDMYWGPNTDKLI

SEQ ID NO: 28575 - protein, 15 aa, synthetic construct
ACDTVLGDTATDKLI

SEQ ID NO: 28576 - protein, 15 aa, synthetic construct
ACDCCTGGYRGDKLI

SEQ ID NO: 28577 - protein, 11 aa, synthetic construct
AWAVWGPYKLI

SEQ ID NO: 28578 - protein, 13 aa, synthetic construct
ACDTGEGVTDKLI

SEQ ID NO: 28579 - protein, 14 aa, synthetic construct
ACDTGGYPYTDKLI

SEQ ID NO: 28580 - protein, 17 aa, synthetic construct
ACDTLFWGIRQTDDKLI

SEQ ID NO: 28581 - protein, 13 aa, synthetic construct
ACDTGDTPNDKLI

SEQ ID NO: 28582 - protein, 16 aa, synthetic construct
ACDTAVGDTRRTDKLI

SEQ ID NO: 28583 - protein, 13 aa, synthetic construct
ACDTVRGNTDKLI

SEQ ID NO: 28584 - protein, 13 aa, synthetic construct
ACRTGGPYTDKLI

SEQ ID NO: 28585 - protein, 15 aa, synthetic construct
ACDTGWGTPYTDKLI

SEQ ID NO: 28586 - protein, 11 aa, synthetic construct
ACEVEDTDKLI

SEQ ID NO: 28587 - protein, 14 aa, synthetic construct
ACDTPLGGITDKLI

SEQ ID NO: 28588 - protein, 13 aa, synthetic construct
ACDNTGGYHDKLI

SEQ ID NO: 28589 - protein, 15 aa, synthetic construct
ACDTGSGGPYTDKLI

SEQ ID NO: 28590 - protein, 12 aa, synthetic construct
ACDTGGYPDKLI

SEQ ID NO: 28591 - protein, 13 aa, synthetic construct
ACDKGYGYTDKLI

SEQ ID NO: 28592 - protein, 15 aa, synthetic construct
ACDTLLGDTATDKLI

SEQ ID NO: 28593 - protein, 13 aa, synthetic construct
ACDILGDTYDKLI

SEQ ID NO: 28594 - protein, 15 aa, synthetic construct
ACDTYWGIRNTDKLI

SEQ ID NO: 28595 - protein, 12 aa, synthetic construct
ACDTGWGIDKLI

SEQ ID NO: 28596 - protein, 13 aa, synthetic construct
ACDRTGGYTDKLI

SEQ ID NO: 28597 - protein, 13 aa, synthetic construct
ACDTRDRGTDKLI

SEQ ID NO: 28598 - protein, 11 aa, synthetic construct
AWVLGDLDKLI

SEQ ID NO: 28599 - protein, 15 aa, synthetic construct
ACDTVGISSWDTRQM

SEQ ID NO: 28600 - protein, 14 aa, synthetic construct
ACDCTGGPYTDKLI

SEQ ID NO: 28601 - protein, 15 aa, synthetic construct
ACDTGIRDSWDTRQM

SEQ ID NO: 28602 - protein, 10 aa, synthetic construct
ACDTCGPKLI

SEQ ID NO: 28603 - protein, 15 aa, synthetic construct
ACDTGWGTPYTDNLI

SEQ ID NO: 28604 - protein, 13 aa, synthetic construct
ACDTRDRGTDKPI

SEQ ID NO: 28605 - protein, 11 aa, synthetic construct
ARGDTKTDKLI

SEQ ID NO: 28606 - protein, 13 aa, synthetic construct
ACDRTGGTPINSS

SEQ ID NO: 28607 - protein, 13 aa, synthetic construct
ACDSVLGDTDKLI

SEQ ID NO: 28608 - protein, 13 aa, synthetic construct
ACDTGGYKDDKLI

SEQ ID NO: 28609 - protein, 12 aa, synthetic construct
ACDTLGDTEKLI

SEQ ID NO: 28610 - protein, 12 aa, synthetic construct
VCDIGGNTDKLI

SEQ ID NO: 28611 - protein, 11 aa, synthetic construct
PGYWGTSINSS

SEQ ID NO: 28612 - protein, 6 aa, synthetic construct
APQKLI

SEQ ID NO: 28613 - protein, 12 aa, synthetic construct
ACDRGDTGDKLI

SEQ ID NO: 28614 - protein, 12 aa, synthetic construct
ACDTGRGPEKLI

SEQ ID NO: 28615 - protein, 13 aa, synthetic construct
ACDTVRGTTDKLI

SEQ ID NO: 28616 - protein, 13 aa, synthetic construct
ACDPYWGPTDRLI

SEQ ID NO: 28617 - protein, 12 aa, synthetic construct
AWDPGDNPDKLI

SEQ ID NO: 28618 - protein, 13 aa, synthetic construct
ACDTGWGTTDKLI

SEQ ID NO: 28619 - protein, 11 aa, synthetic construct
ASGDTKTDKLI

SEQ ID NO: 28620 - protein, 12 aa, synthetic construct
ACDSGGYADKLI

SEQ ID NO: 28621 - protein, 15 aa, synthetic construct
ACDCCTGDTGGINSS

SEQ ID NO: 28622 - protein, 12 aa, synthetic construct
ACDTLGDADKLI

SEQ ID NO: 28623 - protein, 14 aa, synthetic construct
ACDSNWGDTGEKLI

SEQ ID NO: 28624 - protein, 13 aa, synthetic construct
ACDTVLGETDKLI

SEQ ID NO: 28625 - protein, 11 aa, synthetic construct
PGPSGGPINSS

SEQ ID NO: 28626 - protein, 11 aa, synthetic construct
AWAVWGPSKLI

SEQ ID NO: 28627 - protein, 10 aa, synthetic construct
PVTPLGDYSS

SEQ ID NO: 28628 - protein, 13 aa, synthetic construct
ACDSVLGETEKLI

SEQ ID NO: 28629 - protein, 6 aa, synthetic construct
APINSS

SEQ ID NO: 28630 - protein, 12 aa, synthetic construct
PVTPVGDRSNSS

SEQ ID NO: 28631 - protein, 11 aa, synthetic construct
AWILGDLDKLI

SEQ ID NO: 28632 - protein, 13 aa, synthetic construct
ASRTGGPYTDKLI

SEQ ID NO: 28633 - protein, 13 aa, synthetic construct
ACDSVLGETDQLI

SEQ ID NO: 28634 - protein, 12 aa, synthetic construct
ACDALGDTDKLI

SEQ ID NO: 28635 - protein, 13 aa, synthetic construct
ACDTGDRHTDRLI

SEQ ID NO: 28636 - protein, 12 aa, synthetic construct
ACDSGGGSVKLI

SEQ ID NO: 28637 - protein, 12 aa, synthetic construct
ACDTRGYADKLT

SEQ ID NO: 28638 - protein, 13 aa, synthetic construct
ACDKLGVYTEKLI

SEQ ID NO: 28639 - protein, 13 aa, synthetic construct
ACVTRDRGTDKLI

SEQ ID NO: 28640 - protein, 13 aa, synthetic construct
ACDSVLGGTDKLI

SEQ ID NO: 28641 - protein, 13 aa, synthetic construct
ACGSVLGETDKLI

SEQ ID NO: 28642 - protein, 13 aa, synthetic construct
ACDTGDRHTEKLI

SEQ ID NO: 28643 - protein, 12 aa, synthetic construct
ACDRGDYTEKLI

SEQ ID NO: 28644 - protein, 12 aa, synthetic construct
ACDTLGDTDKPI

SEQ ID NO: 28645 - protein, 15 aa, synthetic construct
ACDAGSGGPYTDKLI

SEQ ID NO: 28646 - protein, 13 aa, synthetic construct
ACDPYWGPTEKLI

SEQ ID NO: 28647 - protein, 10 aa, synthetic construct
ACDTSGEKLI

SEQ ID NO: 28648 - protein, 12 aa, synthetic construct
ACDTGVGSVKLI

SEQ ID NO: 28649 - protein, 10 aa, synthetic construct
ACERRAEKLI

SEQ ID NO: 28650 - protein, 12 aa, synthetic construct
ACDTLGIPINSS

SEQ ID NO: 28651 - protein, 12 aa, synthetic construct
ASDTEGDTDKLI

SEQ ID NO: 28652 - protein, 16 aa, synthetic construct
ACDTAVGDTRRTDQLI

SEQ ID NO: 28653 - protein, 14 aa, synthetic construct
ACGTRWGAGDDKLI

SEQ ID NO: 28654 - protein, 12 aa, synthetic construct
AWEPGDNPEKLI

SEQ ID NO: 28655 - protein, 5 aa, synthetic construct
AWSTH

SEQ ID NO: 28656 - protein, 13 aa, synthetic construct
PVDLLGNHTDKLI

SEQ ID NO: 28657 - protein, 12 aa, synthetic construct
PVTLGDTPINSS

SEQ ID NO: 28658 - protein, 12 aa, synthetic construct
ACDLGDTGEKLI

SEQ ID NO: 28659 - protein, 12 aa, synthetic construct
ACDTGGYADKLI

SEQ ID NO: 28660 - protein, 12 aa, synthetic construct
ACDTGGYPEKLI

SEQ ID NO: 28661 - protein, 14 aa, synthetic construct
ACAMYWGPNTDKLI

SEQ ID NO: 28662 - protein, 13 aa, synthetic construct
ACVSVLGETDKLI

SEQ ID NO: 28663 - protein, 12 aa, synthetic construct
ACDAGRGPDKLI

SEQ ID NO: 28664 - protein, 12 aa, synthetic construct
AWEPGDNPDELI

SEQ ID NO: 28665 - protein, 14 aa, synthetic construct
PVTTGGFLTPINSS

SEQ ID NO: 28666 - protein, 12 aa, synthetic construct
ACDTGDRTEKLI

SEQ ID NO: 28667 - protein, 12 aa, synthetic construct
ACDIGGNTDTLI

SEQ ID NO: 28668 - protein, 15 aa, synthetic construct
ACDTGIRDSWDTRRM

SEQ ID NO: 28669 - protein, 13 aa, synthetic construct
ACDTGDTPNEKLI

SEQ ID NO: 28670 - protein, 13 aa, synthetic construct
ARDTGWGITDKLI

SEQ ID NO: 28671 - protein, 12 aa, synthetic construct
PVTLGIRPINSS

SEQ ID NO: 28672 - protein, 14 aa, synthetic construct
ACDMYWGPNTVKLI

SEQ ID NO: 28673 - protein, 12 aa, synthetic construct
DCDTEGDTDKLI

SEQ ID NO: 28674 - protein, 12 aa, synthetic construct
ACDIGGYADKPI

SEQ ID NO: 28675 - protein, 13 aa, synthetic construct
ACDKQGVYTDKLI

SEQ ID NO: 28676 - protein, 12 aa, synthetic construct
ARDIGGNTDKLI

SEQ ID NO: 28677 - protein, 12 aa, synthetic construct
DCDIGGNTDKLI

SEQ ID NO: 28678 - protein, 13 aa, synthetic construct
ACDAGDTPNDKLI

SEQ ID NO: 28679 - protein, 12 aa, synthetic construct
PGNRGIIPINSS

SEQ ID NO: 28680 - protein, 13 aa, synthetic construct
ACDSVLGEADKLI

SEQ ID NO: 28681 - protein, 12 aa, synthetic construct
ACDTRGYAEKLI

SEQ ID NO: 28682 - protein, 15 aa, synthetic construct
ACDTGRGTPYTDKLI

SEQ ID NO: 28683 - protein, 12 aa, synthetic construct
ACDTEGDTEKLI

SEQ ID NO: 28684 - protein, 12 aa, synthetic construct
ACDIGGYAEKLI

SEQ ID NO: 28685 - protein, 9 aa, synthetic construct
DCDTEGQTH

SEQ ID NO: 28686 - protein, 12 aa, synthetic construct
ACGIGGYADKLI

SEQ ID NO: 28687 - protein, 12 aa, synthetic construct
PVTLGETPINSS

SEQ ID NO: 28688 - protein, 14 aa, synthetic construct
ACDARWGAGDDKLI

SEQ ID NO: 28689 - protein, 13 aa, synthetic construct
ACDSVLGETDKPI

SEQ ID NO: 28690 - protein, 14 aa, synthetic construct
ACDTRWGAGDDKLT

SEQ ID NO: 28691 - protein, 13 aa, synthetic construct
ARDSVLGETDKLI

SEQ ID NO: 28692 - protein, 12 aa, synthetic construct
ACDTLGDTGKLI

SEQ ID NO: 28693 - protein, 13 aa, synthetic construct
ACDPYWGPTDQLI

SEQ ID NO: 28694 - protein, 6 aa, synthetic construct
PPINSS

SEQ ID NO: 28695 - protein, 5 aa, synthetic construct
PGKLI

SEQ ID NO: 28696 - protein, 14 aa, synthetic construct
ACDTGGYPYTEKLI

SEQ ID NO: 28697 - protein, 11 aa, synthetic construct
PVGIRRPINSS

SEQ ID NO: 28698 - protein, 13 aa, synthetic construct
ASDSVLGETDKLI

SEQ ID NO: 28699 - protein, 15 aa, synthetic construct
ACDTGEGLGGVDKLI

SEQ ID NO: 28700 - protein, 11 aa, synthetic construct
ACGDTKTDNSS

SEQ ID NO: 28701 - protein, 14 aa, synthetic construct
ACDLGDTPDTDQLI

SEQ ID NO: 28702 - protein, 12 aa, synthetic construct
ACDIGGHTDKLI

SEQ ID NO: 28703 - protein, 12 aa, synthetic construct
PVTPRGTPINSS

SEQ ID NO: 28704 - protein, 12 aa, synthetic construct
ACDLLGDTDRLI

SEQ ID NO: 28705 - protein, 12 aa, synthetic construct
AWEPGDNHDKLI

SEQ ID NO: 28706 - protein, 15 aa, synthetic construct
ACDCCTGGYRGEKLI

SEQ ID NO: 28707 - protein, 14 aa, synthetic construct
ACDSNWRDTGDKLI

SEQ ID NO: 28708 - protein, 15 aa, synthetic construct
ACDCCTGGYRGINSS

SEQ ID NO: 28709 - protein, 14 aa, synthetic construct
ACDTYWGPNTDKLI

SEQ ID NO: 28710 - protein, 10 aa, synthetic construct
ACERRADKLT

SEQ ID NO: 28711 - protein, 12 aa, synthetic construct
ACDIGGTTDKLI

SEQ ID NO: 28712 - protein, 12 aa, synthetic construct
ACDTLWDTDKLI

SEQ ID NO: 28713 - protein, 11 aa, synthetic construct
ACGGTKTDKLI

SEQ ID NO: 28714 - protein, 13 aa, synthetic construct
ACDKLGVYTDKLT

SEQ ID NO: 28715 - protein, 10 aa, synthetic construct
PVTLRGINSS

SEQ ID NO: 28716 - protein, 12 aa, synthetic construct
ACDTGGGSVRLI

SEQ ID NO: 28717 - protein, 13 aa, synthetic construct
ACDTYWGPTDKLI

SEQ ID NO: 28718 - protein, 11 aa, synthetic construct
AWAVWGPDKLI

SEQ ID NO: 28719 - protein, 12 aa, synthetic construct
PVTRGDTPINSS

SEQ ID NO: 28720 - protein, 10 aa, synthetic construct
ACDTPGGLLI

SEQ ID NO: 28721 - protein, 12 aa, synthetic construct
ACDIGGNTEKLI

SEQ ID NO: 28722 - protein, 15 aa, synthetic construct
ACDAVLGDTATDKLI

SEQ ID NO: 28723 - protein, 12 aa, synthetic construct
ACGTGDRTDKLI

SEQ ID NO: 28724 - protein, 12 aa, synthetic construct
ACDTEGDTDKPI

SEQ ID NO: 28725 - protein, 12 aa, synthetic construct
PVTVGTTPINSS

SEQ ID NO: 28726 - protein, 13 aa, synthetic construct
ACDSVQGETDKLI

SEQ ID NO: 28727 - protein, 12 aa, synthetic construct
ACDSLGDTDKLI

SEQ ID NO: 28728 - protein, 13 aa, synthetic construct
ACDTGGRHTDKLI

SEQ ID NO: 28729 - protein, 12 aa, synthetic construct
ACDIGGYSDKLI

SEQ ID NO: 28730 - protein, 14 aa, synthetic construct
ACDTRGGAGDDKLI

SEQ ID NO: 28731 - protein, 13 aa, synthetic construct
DCDKLGVYTDKLI

SEQ ID NO: 28732 - protein, 12 aa, synthetic construct
ACDTLGGTDKLI

SEQ ID NO: 28733 - protein, 13 aa, synthetic construct
ACGPTGEPHRETH

SEQ ID NO: 28734 - protein, 11 aa, synthetic construct
ACGDTKTDKPI

SEQ ID NO: 28735 - protein, 13 aa, synthetic construct
ACDSVLGETDKLV

SEQ ID NO: 28736 - protein, 17 aa, synthetic construct
ACDTLFWGIRRTDDKLI

SEQ ID NO: 28737 - protein, 13 aa, synthetic construct
ACDTGWGRTDKLI

SEQ ID NO: 28738 - protein, 13 aa, synthetic construct
ACDTVRGNTEKLI

SEQ ID NO: 28739 - protein, 12 aa, synthetic construct
ARDTGRGPDKLI

SEQ ID NO: 28740 - protein, 12 aa, synthetic construct
ACDTLGDTDRLI

SEQ ID NO: 28741 - protein, 12 aa, synthetic construct
ACVTGRGPDKLI

SEQ ID NO: 28742 - protein, 12 aa, synthetic construct
ACDLLGDTEKLI

SEQ ID NO: 28743 - protein, 13 aa, synthetic construct
DCDSVLGETDKLI

SEQ ID NO: 28744 - protein, 13 aa, synthetic construct
ACDTGDGHTDKLI

SEQ ID NO: 28745 - protein, 15 aa, synthetic construct
ACDTVGISSWNTRQM

SEQ ID NO: 28746 - protein, 12 aa, synthetic construct
AGDTGDTTDKLI

SEQ ID NO: 28747 - protein, 13 aa, synthetic construct
ACDPYWGPPINSS

SEQ ID NO: 28748 - protein, 13 aa, synthetic construct
ACDEGYGYTDKLI

SEQ ID NO: 28749 - protein, 12 aa, synthetic construct
ACDLGGTGDKLI

SEQ ID NO: 28750 - protein, 13 aa, synthetic construct
ACDKLGVYTDKLV

SEQ ID NO: 28751 - protein, 13 aa, synthetic construct
ARDTGDTYTDKLI

SEQ ID NO: 28752 - protein, 10 aa, synthetic construct
ACDTSGDYSS

SEQ ID NO: 28753 - protein, 15 aa, synthetic construct
ACDTVLGDTATEKLI

SEQ ID NO: 28754 - protein, 9 aa, synthetic construct
ACDNEGQTH

SEQ ID NO: 28755 - protein, 14 aa, synthetic construct
DCDTRWGAGDDKLI

SEQ ID NO: 28756 - protein, 12 aa, synthetic construct
ACDLLGDTDQLI

SEQ ID NO: 28757 - protein, 14 aa, synthetic construct
ACDMYWGPSTDKLI

SEQ ID NO: 28758 - protein, 12 aa, synthetic construct
ACDIGGNTDQLI

SEQ ID NO: 28759 - protein, 13 aa, synthetic construct
PVTPFGGTPINSS

SEQ ID NO: 28760 - protein, 12 aa, synthetic construct
ACGTLGDTDKLI

SEQ ID NO: 28761 - protein, 10 aa, synthetic construct
ACDTTGDKLI

SEQ ID NO: 28762 - protein, 14 aa, synthetic construct
ACDMYWGPNTDTLI

SEQ ID NO: 28763 - protein, 12 aa, synthetic construct
ACDTGRGPDQLI

SEQ ID NO: 28764 - protein, 12 aa, synthetic construct
ACDLLGGTDKLI

SEQ ID NO: 28765 - protein, 11 aa, synthetic construct
DCGDTKTDKLI

SEQ ID NO: 28766 - protein, 13 aa, synthetic construct
ACDTGWGITDRLI

SEQ ID NO: 28767 - protein, 15 aa, synthetic construct
ACDAGWGTPYTDKLI

SEQ ID NO: 28768 - protein, 13 aa, synthetic construct
PVTLTGGPPINSS

SEQ ID NO: 28769 - protein, 12 aa, synthetic construct
DCDTLGDTDKLI

SEQ ID NO: 28770 - protein, 12 aa, synthetic construct
ACDIGGNTGKLI

SEQ ID NO: 28771 - protein, 12 aa, synthetic construct
ACDTRGYADKPI

SEQ ID NO: 28772 - protein, 13 aa, synthetic construct
ACDPYWGPTDKLT

SEQ ID NO: 28773 - protein, 10 aa, synthetic construct
ACDRRADKLI

SEQ ID NO: 28774 - protein, 12 aa, synthetic construct
ACDTRRYADKLI

SEQ ID NO: 28775 - protein, 10 aa, synthetic construct
ACGRRADKLI

SEQ ID NO: 28776 - protein, 12 aa, synthetic construct
ACDSGDTTDKLI

SEQ ID NO: 28777 - protein, 12 aa, synthetic construct
ACDSGGNTDKLI

SEQ ID NO: 28778 - protein, 14 aa, synthetic construct
ACDTRWGAGDDQLI

SEQ ID NO: 28779 - protein, 14 aa, synthetic construct
ACDTRWGQGTINSS

SEQ ID NO: 28780 - protein, 12 aa, synthetic construct
ACGTGGGSVKLI

SEQ ID NO: 28781 - protein, 12 aa, synthetic construct
DCDTGGGSVKLI

SEQ ID NO: 28782 - protein, 12 aa, synthetic construct
DCDTGRGPDKLI

SEQ ID NO: 28783 - protein, 10 aa, synthetic construct
ACDTSGAKLI

SEQ ID NO: 28784 - protein, 12 aa, synthetic construct
AWEPGGNPDKLI

SEQ ID NO: 28785 - protein, 13 aa, synthetic construct
DCDTGWGITDKLI

SEQ ID NO: 28786 - protein, 15 aa, synthetic construct
ACGTGWGTPYTDKLI

SEQ ID NO: 28787 - protein, 10 aa, synthetic construct
ACDTWGPTLI

SEQ ID NO: 28788 - protein, 14 aa, synthetic construct
ARDYWGIPYTDKLI

SEQ ID NO: 28789 - protein, 12 aa, synthetic construct
ACDIGGYADKLV

SEQ ID NO: 28790 - protein, 12 aa, synthetic construct
ACDTEGDADKLI

SEQ ID NO: 28791 - protein, 12 aa, synthetic construct
ARDTGDTTDKLI

SEQ ID NO: 28792 - protein, 13 aa, synthetic construct
ACDHWGIDTEKLI

SEQ ID NO: 28793 - protein, 12 aa, synthetic construct
ARDLLGDTDKLI

SEQ ID NO: 28794 - protein, 14 aa, synthetic construct
ARDTPLGGITDKLI

SEQ ID NO: 28795 - protein, 17 aa, synthetic construct
ACDTLLWGIRQTDDKLI

SEQ ID NO: 28796 - protein, 13 aa, synthetic construct
ACDTGDRHTDQLI

SEQ ID NO: 28797 - protein, 13 aa, synthetic construct
ACDHWGIDTDKLV

SEQ ID NO: 28798 - protein, 13 aa, synthetic construct
ACDSVPGETDKLI

SEQ ID NO: 28799 - protein, 12 aa, synthetic construct
PVTRWGTPINSS

SEQ ID NO: 28800 - protein, 13 aa, synthetic construct
ACDSVMGETDKLI

SEQ ID NO: 28801 - protein, 14 aa, synthetic construct
ARDTRWGAGDDKLI

SEQ ID NO: 28802 - protein, 12 aa, synthetic construct
ARDIGGYADKLI

SEQ ID NO: 28803 - protein, 12 aa, synthetic construct
ACDTGDMTDKLI

SEQ ID NO: 28804 - protein, 12 aa, synthetic construct
ACDTGDRTDNSS

SEQ ID NO: 28805 - protein, 15 aa, synthetic construct
ASDCCTGGYRGDKLI

SEQ ID NO: 28806 - protein, 13 aa, synthetic construct
ACDTGDKPPINSS

SEQ ID NO: 28807 - protein, 13 aa, synthetic construct
ACRTGGPYTEKLI

SEQ ID NO: 28808 - protein, 13 aa, synthetic construct
ACRTGGPYTDKLV

SEQ ID NO: 28809 - protein, 13 aa, synthetic construct
ACDSVLGETDNLI

SEQ ID NO: 28810 - protein, 9 aa, synthetic construct
ACDTEGQAH

SEQ ID NO: 28811 - protein, 12 aa, synthetic construct
ACDLGDTGDKPI

SEQ ID NO: 28812 - protein, 13 aa, synthetic construct
ACDTDRGNTDKLI

SEQ ID NO: 28813 - protein, 13 aa, synthetic construct
ACDELGVYTDKLI

SEQ ID NO: 28814 - protein, 14 aa, synthetic construct
ACDTRWGAGDDELI

SEQ ID NO: 28815 - protein, 13 aa, synthetic construct
ACDPYCGPTDKLI

SEQ ID NO: 28816 - protein, 13 aa, synthetic construct
ACDTGWGVTDKLI

SEQ ID NO: 28817 - protein, 12 aa, synthetic construct
ACDTEGDTDKLV

SEQ ID NO: 28818 - protein, 11 aa, synthetic construct
AGGDTKTDKLI

SEQ ID NO: 28819 - protein, 13 aa, synthetic construct
PAILGDKPPINSS

SEQ ID NO: 28820 - protein, 13 aa, synthetic construct
PAVLGDRTPINSS

SEQ ID NO: 28821 - protein, 15 aa, synthetic construct
VCDTGSGGPYTDKLI

SEQ ID NO: 28822 - protein, 14 aa, synthetic construct
ACDTGGYPYTDKLV

SEQ ID NO: 28823 - protein, 12 aa, synthetic construct
ACDRGDHTDKLI

SEQ ID NO: 28824 - protein, 14 aa, synthetic construct
ASDTRWGAGDDKLI

SEQ ID NO: 28825 - protein, 12 aa, synthetic construct
VCDTGDRTDKLI

SEQ ID NO: 28826 - protein, 12 aa, synthetic construct
DCDLGDTGDKLI

SEQ ID NO: 28827 - protein, 13 aa, synthetic construct
ACGPTGEPHRSTH

SEQ ID NO: 28828 - protein, 13 aa, synthetic construct
AYDSVLGETDKLI

SEQ ID NO: 28829 - protein, 12 aa, synthetic construct
ACDTRGYADNLI

SEQ ID NO: 28830 - protein, 12 aa, synthetic construct
ACDTRGYADRLI

SEQ ID NO: 28831 - protein, 15 aa, synthetic construct
ACDTGWGTPYTEKLI

SEQ ID NO: 28832 - protein, 9 aa, synthetic construct
ACDTEGQTR

SEQ ID NO: 28833 - protein, 12 aa, synthetic construct
ACDIVGYADKLI

SEQ ID NO: 28834 - protein, 13 aa, synthetic construct
ACDSVLGETDKLT

SEQ ID NO: 28835 - protein, 12 aa, synthetic construct
ACDTLGDTDNLI

SEQ ID NO: 28836 - protein, 13 aa, synthetic construct
ACDKLGAYTDKLI

SEQ ID NO: 28837 - protein, 6 aa, synthetic construct
VPHKLI

SEQ ID NO: 28838 - protein, 13 aa, synthetic construct
ACDTGDTYTDNLI

SEQ ID NO: 28839 - protein, 14 aa, synthetic construct
ACDLGDTPDTDELI

SEQ ID NO: 28840 - protein, 10 aa, synthetic construct
ARDTWGPKLI

SEQ ID NO: 28841 - protein, 13 aa, synthetic construct
ACDTGWGITDQLI

SEQ ID NO: 28842 - protein, 12 aa, synthetic construct
ACDLLGDADKLI

SEQ ID NO: 28843 - protein, 15 aa, synthetic construct
ACDCCTGGYRGDKLT

SEQ ID NO: 28844 - protein, 10 aa, synthetic construct
ACERRAAKLI

SEQ ID NO: 28845 - protein, 11 aa, synthetic construct
ACGDTETDKLI

SEQ ID NO: 28846 - protein, 12 aa, synthetic construct
ACDTGDTTDKPI

SEQ ID NO: 28847 - protein, 10 aa, synthetic construct
ACDTSWDKLI

SEQ ID NO: 28848 - protein, 14 aa, synthetic construct
ACDMYWGPNADKLI

SEQ ID NO: 28849 - protein, 13 aa, synthetic construct
ARRTGGPYTDKLI

SEQ ID NO: 28850 - protein, 10 aa, synthetic construct
DCDTSGDKLI

SEQ ID NO: 28851 - protein, 10 aa, synthetic construct
ACDTSGDNLI

SEQ ID NO: 28852 - protein, 12 aa, synthetic construct
ACDTGDRTDELI

SEQ ID NO: 28853 - protein, 10 aa, synthetic construct
ACDTSGDELI

SEQ ID NO: 28854 - protein, 11 aa, synthetic construct
ACGDTNTDKLI

SEQ ID NO: 28855 - protein, 10 aa, synthetic construct
ACERRADKPI

SEQ ID NO: 28856 - protein, 12 aa, synthetic construct
ACDTGRGPDKHI

SEQ ID NO: 28857 - protein, 12 aa, synthetic construct
ARDTRGYADKLI

SEQ ID NO: 28858 - protein, 13 aa, synthetic construct
ACDKLGVCTDKLI

SEQ ID NO: 28859 - protein, 13 aa, synthetic construct
ACDTGDRHTDKPI

SEQ ID NO: 28860 - protein, 10 aa, synthetic construct
PVNGGPINSS

SEQ ID NO: 28861 - protein, 13 aa, synthetic construct
DCDTGDTYTDKLI

SEQ ID NO: 28862 - protein, 12 aa, synthetic construct
ARDTLGDTDKLI

SEQ ID NO: 28863 - protein, 12 aa, synthetic construct
ACDTLGDTDKLV

SEQ ID NO: 28864 - protein, 13 aa, synthetic construct
DCDTGEGVTDKLI

SEQ ID NO: 28865 - protein, 14 aa, synthetic construct
PVTQTGGIRAINSS

SEQ ID NO: 28866 - protein, 17 aa, synthetic construct
ACDTLFWGIRQSDDKLI

SEQ ID NO: 28867 - protein, 14 aa, synthetic construct
PVTWGIRRTPINSS

SEQ ID NO: 28868 - protein, 9 aa, synthetic construct
ACGTEGQTH

SEQ ID NO: 28869 - protein, 12 aa, synthetic construct
ACGTGRGPDKLI

SEQ ID NO: 28870 - protein, 11 aa, synthetic construct
ACGVEDTDKLI

SEQ ID NO: 28871 - protein, 6 aa, synthetic construct
APPKLI

SEQ ID NO: 28872 - protein, 15 aa, synthetic construct
PVTLYWGIRPPINSS

SEQ ID NO: 28873 - protein, 13 aa, synthetic construct
ARDPYWGPTDKLI

SEQ ID NO: 28874 - protein, 12 aa, synthetic construct
ACDTGGGSDKLI

SEQ ID NO: 28875 - protein, 9 aa, synthetic construct
ACDAEGQTH

SEQ ID NO: 28876 - protein, 14 aa, synthetic construct
ACDSNRGDTGDKLI

SEQ ID NO: 28877 - protein, 10 aa, synthetic construct
ACDASGDKLI

SEQ ID NO: 28878 - protein, 12 aa, synthetic construct
ACDAGDRTDKLI

SEQ ID NO: 28879 - protein, 12 aa, synthetic construct
ACGTGDTTDKLI

SEQ ID NO: 28880 - protein, 13 aa, synthetic construct
ACGTGDTYTDKLI

SEQ ID NO: 28881 - protein, 14 aa, synthetic construct
ARDMYWGPNTDKLI

SEQ ID NO: 28882 - protein, 10 aa, synthetic construct
PVTPGGPNSS

SEQ ID NO: 28883 - protein, 13 aa, synthetic construct
ACDTGDTYTGKLI

SEQ ID NO: 28884 - protein, 12 aa, synthetic construct
ACGTEGDTDKLI

SEQ ID NO: 28885 - protein, 9 aa, synthetic construct
ACDTGGQTH

SEQ ID NO: 28886 - protein, 13 aa, synthetic construct
ACDSGEGVTDKLI

SEQ ID NO: 28887 - protein, 15 aa, synthetic construct
PVTVVLGDTGGINSS

SEQ ID NO: 28888 - protein, 12 aa, synthetic construct
ACDTGGGSVELI

SEQ ID NO: 28889 - protein, 6 aa, synthetic construct
APHKII

SEQ ID NO: 28890 - protein, 14 aa, synthetic construct
ACDYWGTPYTDKLI

SEQ ID NO: 28891 - protein, 15 aa, synthetic construct
ACDAGWGTPYTDNLI

SEQ ID NO: 28892 - protein, 17 aa, synthetic construct
ACGTLFWGIRQTDDKLI

SEQ ID NO: 28893 - protein, 15 aa, synthetic construct
ACDTGEGLGAVDELI

SEQ ID NO: 28894 - protein, 6 aa, synthetic construct
APHTLI

SEQ ID NO: 28895 - protein, 15 aa, synthetic construct
ACDTGEGLGAVDKPI

SEQ ID NO: 28896 - protein, 15 aa, synthetic construct
ACDTGEGLGAVEKLI

SEQ ID NO: 28897 - protein, 14 aa, synthetic construct
ACDMYWGPNTEKLI

SEQ ID NO: 28898 - protein, 6 aa, synthetic construct
APHQLI

SEQ ID NO: 28899 - protein, 15 aa, synthetic construct
ACDTGEGLGAVDNLI

SEQ ID NO: 28900 - protein, 12 aa, synthetic construct
ASDLLGDTDKLI

SEQ ID NO: 28901 - protein, 14 aa, synthetic construct
ACDSYWGDTGDKLI

SEQ ID NO: 28902 - protein, 12 aa, synthetic construct
ACDTLGDPDKLI

SEQ ID NO: 28903 - protein, 13 aa, synthetic construct
ACDSVLWETDKLI

SEQ ID NO: 28904 - protein, 11 aa, synthetic construct
ACGDTKTEKLI

SEQ ID NO: 28905 - protein, 10 aa, synthetic construct
ACDTSGDTLI

SEQ ID NO: 28906 - protein, 12 aa, synthetic construct
ACDTGRGPDNSS

SEQ ID NO: 28907 - protein, 12 aa, synthetic construct
AWEPGDNPDKLT

SEQ ID NO: 28908 - protein, 12 aa, synthetic construct
ACDTGRGPDNLI

SEQ ID NO: 28909 - protein, 13 aa, synthetic construct
ACDTGGQATDKLI

SEQ ID NO: 28910 - protein, 12 aa, synthetic construct
AWEPGDNPDKPI

SEQ ID NO: 28911 - protein, 14 aa, synthetic construct
ACDSWGIPYTDKLI

SEQ ID NO: 28912 - protein, 12 aa, synthetic construct
ACDTLGDTDELI

SEQ ID NO: 28913 - protein, 12 aa, synthetic construct
ACDTGDTTDKII

SEQ ID NO: 28914 - protein, 10 aa, synthetic construct
ACDTSGDKLV

SEQ ID NO: 28915 - protein, 12 aa, synthetic construct
ACDTGDRSDKLI

SEQ ID NO: 28916 - protein, 13 aa, synthetic construct
ACRTGGPHTDKLI

SEQ ID NO: 28917 - protein, 15 aa, synthetic construct
ACDTGWGPRTPINSS

SEQ ID NO: 28918 - protein, 10 aa, synthetic construct
ACDTSGDKPI

SEQ ID NO: 28919 - protein, 11 aa, synthetic construct
ACGDTKSDKLI

SEQ ID NO: 28920 - protein, 12 aa, synthetic construct
ACDTGRGPDRLI

SEQ ID NO: 28921 - protein, 13 aa, synthetic construct
ACDTGWGITGKLI

SEQ ID NO: 28922 - protein, 12 aa, synthetic construct
ACDTGRGPYKLI

SEQ ID NO: 28923 - protein, 13 aa, synthetic construct
ACDSVLGETDRLI

SEQ ID NO: 28924 - protein, 15 aa, synthetic construct
ACDTVGISSRDTRQM

SEQ ID NO: 28925 - protein, 13 aa, synthetic construct
ACRTGGPYTDRLI

SEQ ID NO: 28926 - protein, 12 aa, synthetic construct
ACDLGETGDKLI

SEQ ID NO: 28927 - protein, 11 aa, synthetic construct
ACEVEDTDKPI

SEQ ID NO: 28928 - protein, 15 aa, synthetic construct
ACDTVLGDAATDKLI

SEQ ID NO: 28929 - protein, 15 aa, synthetic construct
ACVTVLGDTATDKLI

SEQ ID NO: 28930 - protein, 13 aa, synthetic construct
ACDTGDTYTDKLV

SEQ ID NO: 28931 - protein, 13 aa, synthetic construct
ACDTGDTYTDKPI

SEQ ID NO: 28932 - protein, 11 aa, synthetic construct
ACEVDDTDKLI

SEQ ID NO: 28933 - protein, 15 aa, synthetic construct
ACDTVLGDTATDKHI

SEQ ID NO: 28934 - protein, 14 aa, synthetic construct
ACDTPLGGITDKLV

SEQ ID NO: 28935 - protein, 14 aa, synthetic construct
ACDLGDTPDADKLI

SEQ ID NO: 28936 - protein, 15 aa, synthetic construct
ACDTGSGGPYTEKLI

SEQ ID NO: 28937 - protein, 14 aa, synthetic construct
ACEYWGIPYTDKLI

SEQ ID NO: 28938 - protein, 12 aa, synthetic construct
ACDTGDTTEKLI

SEQ ID NO: 28939 - protein, 15 aa, synthetic construct
ACDTGEGLGAVAKLI

SEQ ID NO: 28940 - protein, 15 aa, synthetic construct
ACGTVLGDTATDKLI

SEQ ID NO: 28941 - protein, 10 aa, synthetic construct
ACGTSGDKLI

SEQ ID NO: 28942 - protein, 11 aa, synthetic construct
ACGDTKTDELI

SEQ ID NO: 28943 - protein, 13 aa, synthetic construct
ACDSVLRETDKLI

SEQ ID NO: 28944 - protein, 12 aa, synthetic construct
AWEPGDDPDKLI

SEQ ID NO: 28945 - protein, 11 aa, synthetic construct
ACGDTKTAKLI

SEQ ID NO: 28946 - protein, 13 aa, synthetic construct
ACDTGDRLTDKLI

SEQ ID NO: 28947 - protein, 14 aa, synthetic construct
ACDMGDTPDTDKLI

SEQ ID NO: 28948 - protein, 12 aa, synthetic construct
ACDTGDTTDQLI

SEQ ID NO: 28949 - protein, 14 aa, synthetic construct
ACDTPLGGITEKLI

SEQ ID NO: 28950 - protein, 14 aa, synthetic construct
ACDTPLGGITDRLI

SEQ ID NO: 28951 - protein, 12 aa, synthetic construct
ACDMGDTGDKLI

SEQ ID NO: 28952 - protein, 10 aa, synthetic construct
ACDTSWGLLI

SEQ ID NO: 28953 - protein, 13 aa, synthetic construct
ACDSVLGETGKLI

SEQ ID NO: 28954 - protein, 6 aa, synthetic construct
DPHKLI

SEQ ID NO: 28955 - protein, 11 aa, synthetic construct
ACGDTRTDKLI

SEQ ID NO: 28956 - protein, 12 aa, synthetic construct
ACDTEGAPINSS

SEQ ID NO: 28957 - protein, 12 aa, synthetic construct
DCDTGGYPDKLI

SEQ ID NO: 28958 - protein, 14 aa, synthetic construct
ACDRGDTPDTDKLI

SEQ ID NO: 28959 - protein, 16 aa, synthetic construct
ARDTAVGDTRRTDKLI

SEQ ID NO: 28960 - protein, 10 aa, synthetic construct
ACDTCGPTLI

SEQ ID NO: 28961 - protein, 12 aa, synthetic construct
AWETGDNPDKLI

SEQ ID NO: 28962 - protein, 10 aa, synthetic construct
ASDTWGPKLI

SEQ ID NO: 28963 - protein, 15 aa, synthetic construct
ACDTGWGTPYTDTLI

SEQ ID NO: 28964 - protein, 12 aa, synthetic construct
ACDRGDYADKLI

SEQ ID NO: 28965 - protein, 9 aa, synthetic construct
ACDTEGQTQ

SEQ ID NO: 28966 - protein, 13 aa, synthetic construct
AYDTGEGVTDKLI

SEQ ID NO: 28967 - protein, 12 aa, synthetic construct
ACVTGDRTDKLI

SEQ ID NO: 28968 - protein, 12 aa, synthetic construct
ACDTGGDRSNSS

SEQ ID NO: 28969 - protein, 12 aa, synthetic construct
ACDTRGYSDKLI

SEQ ID NO: 28970 - protein, 9 aa, synthetic construct
ACDTEGRTH

SEQ ID NO: 28971 - protein, 13 aa, synthetic construct
ACDSVLGETDKLN

SEQ ID NO: 28972 - protein, 13 aa, synthetic construct
ACGPTGEPHRQTH

SEQ ID NO: 28973 - protein, 12 aa, synthetic construct
ACDTRGYADQLI

SEQ ID NO: 28974 - protein, 13 aa, synthetic construct
ACGTGDRHTDKLI

SEQ ID NO: 28975 - protein, 12 aa, synthetic construct
ACDTRRGPDKLI

SEQ ID NO: 28976 - protein, 12 aa, synthetic construct
ACDTRGSADKLI

SEQ ID NO: 28977 - protein, 16 aa, synthetic construct
ACDSAVGDTRRTDKLI

SEQ ID NO: 28978 - protein, 13 aa, synthetic construct
ACDTGWWITDKLI

SEQ ID NO: 28979 - protein, 14 aa, synthetic construct
ACDTGGYPHTDKLI

SEQ ID NO: 28980 - protein, 13 aa, synthetic construct
ACDTLGVYTDKLI

SEQ ID NO: 28981 - protein, 12 aa, synthetic construct
ACDTEGDTDKLT

SEQ ID NO: 28982 - protein, 14 aa, synthetic construct
ACDTGGYPYADKLI

SEQ ID NO: 28983 - protein, 12 aa, synthetic construct
ACDTEGDTDQLI

SEQ ID NO: 28984 - protein, 12 aa, synthetic construct
ACDTEGGTDKLI

SEQ ID NO: 28985 - protein, 15 aa, synthetic construct
ACDTLLGDAATDKLI

SEQ ID NO: 28986 - protein, 12 aa, synthetic construct
AWGPGDNPDKLI

SEQ ID NO: 28987 - protein, 14 aa, synthetic construct
ACDTGGYPYTDQLI

SEQ ID NO: 28988 - protein, 12 aa, synthetic construct
ACDRGYYTDKLI

SEQ ID NO: 28989 - protein, 17 aa, synthetic construct
ACDTLFWGIRQTDDKII

SEQ ID NO: 28990 - protein, 12 aa, synthetic construct
AYDTEGDTDKLI

SEQ ID NO: 28991 - protein, 13 aa, synthetic construct
ACDTRDRDTDKLI

SEQ ID NO: 28992 - protein, 12 aa, synthetic construct
DCDLLGDTDKLI

SEQ ID NO: 28993 - protein, 16 aa, synthetic construct
ACDTAAGDTRRTDKLI

SEQ ID NO: 28994 - protein, 13 aa, synthetic construct
ACDNTVGYHDKLI

SEQ ID NO: 28995 - protein, 12 aa, synthetic construct
ACDTGDPTDKLI

SEQ ID NO: 28996 - protein, 14 aa, synthetic construct
ACDTRWGAGDDRLI

SEQ ID NO: 28997 - protein, 14 aa, synthetic construct
ACDTRWGAGDDTLI

SEQ ID NO: 28998 - protein, 15 aa, synthetic construct
ACDPGSGGPYTDKLI

SEQ ID NO: 28999 - protein, 14 aa, synthetic construct
ACDTRWGAGDEKLI

SEQ ID NO: 29000 - protein, 14 aa, synthetic construct
ACDSNWGDTGDELI

SEQ ID NO: 29001 - protein, 6 aa, synthetic construct
APHKPI

SEQ ID NO: 29002 - protein, 12 aa, synthetic construct
AWEPGENPDKLI

SEQ ID NO: 29003 - protein, 6 aa, synthetic construct
APHELI

SEQ ID NO: 29004 - protein, 13 aa, synthetic construct
ACDTGDRHTDKLV

SEQ ID NO: 29005 - protein, 11 aa, synthetic construct
AWAVWGPYQLI

SEQ ID NO: 29006 - protein, 13 aa, synthetic construct
ACDNTGGYHDRLI

SEQ ID NO: 29007 - protein, 13 aa, synthetic construct
ACDNTGGYHDKLN

SEQ ID NO: 29008 - protein, 12 aa, synthetic construct
AWEPGDNPGKLI

SEQ ID NO: 29009 - protein, 14 aa, synthetic construct
ACGMYWGPNTDKLI

SEQ ID NO: 29010 - protein, 12 aa, synthetic construct
AGDIGGNTDKLI

SEQ ID NO: 29011 - protein, 10 aa, synthetic construct
ASDTSGGLLI

SEQ ID NO: 29012 - protein, 13 aa, synthetic construct
ACDPYWGPTDELI

SEQ ID NO: 29013 - protein, 13 aa, synthetic construct
ACDTGILTPINSS

SEQ ID NO: 29014 - protein, 11 aa, synthetic construct
AWAVCGPYKLI

SEQ ID NO: 29015 - protein, 11 aa, synthetic construct
AWAVRGPYKLI

SEQ ID NO: 29016 - protein, 13 aa, synthetic construct
ACDTGGEATDKLI

SEQ ID NO: 29017 - protein, 13 aa, synthetic construct
ACDPYWGPTDKHI

SEQ ID NO: 29018 - protein, 12 aa, synthetic construct
ACDTEWDTDKLI

SEQ ID NO: 29019 - protein, 13 aa, synthetic construct
ACRPGGPYTDKLI

SEQ ID NO: 29020 - protein, 14 aa, synthetic construct
ACDSNCGDTGDKLI

SEQ ID NO: 29021 - protein, 13 aa, synthetic construct
ACDTGDGVTDKLI

SEQ ID NO: 29022 - protein, 12 aa, synthetic construct
ARDTGGGSVKLI

SEQ ID NO: 29023 - protein, 13 aa, synthetic construct
ACDPYRGPTDKLI

SEQ ID NO: 29024 - protein, 6 aa, synthetic construct
APHKLT

SEQ ID NO: 29025 - protein, 13 aa, synthetic construct
DCDPYWGPTDKLI

SEQ ID NO: 29026 - protein, 13 aa, synthetic construct
ACDSLLGETDKLI

SEQ ID NO: 29027 - protein, 14 aa, synthetic construct
ACDTRRGAGDDKLI

SEQ ID NO: 29028 - protein, 12 aa, synthetic construct
ACDTPGDTDKLI

SEQ ID NO: 29029 - protein, 12 aa, synthetic construct
ACEIGGYADKLI

SEQ ID NO: 29030 - protein, 13 aa, synthetic construct
LWTYWGTTPINSS

SEQ ID NO: 29031 - protein, 14 aa, synthetic construct
ACDYCGIPYTDKLI

SEQ ID NO: 29032 - protein, 10 aa, synthetic construct
ACERRADQLI

SEQ ID NO: 29033 - protein, 13 aa, synthetic construct
VCDSVLGETDKLI

SEQ ID NO: 29034 - protein, 13 aa, synthetic construct
ACDHWGIDADKLI

SEQ ID NO: 29035 - protein, 15 aa, synthetic construct
PVTPGRVWGPSINSS

SEQ ID NO: 29036 - protein, 13 aa, synthetic construct
ACDILGDTYDRLI

SEQ ID NO: 29037 - protein, 14 aa, synthetic construct
ACDYWGIHYTDKLI

SEQ ID NO: 29038 - protein, 17 aa, synthetic construct
PVTLCSGGYVKRTINSS

SEQ ID NO: 29039 - protein, 12 aa, synthetic construct
ACDIGGYADELI

SEQ ID NO: 29040 - protein, 13 aa, synthetic construct
PVTRDTGTPINSS

SEQ ID NO: 29041 - protein, 14 aa, synthetic construct
ACDYWGIPYTAKLI

SEQ ID NO: 29042 - protein, 14 aa, synthetic construct
ACDYWGIPYTDKLV

SEQ ID NO: 29043 - protein, 16 aa, synthetic construct
ACDAAVGDTRRTDKLI

SEQ ID NO: 29044 - protein, 12 aa, synthetic construct
ACAIGGYADKLI

SEQ ID NO: 29045 - protein, 13 aa, synthetic construct
ACDTVRGTPINSS

SEQ ID NO: 29046 - protein, 13 aa, synthetic construct
ACDTVRGNTDQLI

SEQ ID NO: 29047 - protein, 12 aa, synthetic construct
ACDVGGNTDKLI

SEQ ID NO: 29048 - protein, 13 aa, synthetic construct
PVTRGIRRTINSS

SEQ ID NO: 29049 - protein, 13 aa, synthetic construct
ACDDTGGYHDKLI

SEQ ID NO: 29050 - protein, 13 aa, synthetic construct
TCDPYWGPTDKLI

SEQ ID NO: 29051 - protein, 14 aa, synthetic construct
PVTLGDTHTPINSS

SEQ ID NO: 29052 - protein, 12 aa, synthetic construct
ACDIGDTPINSS

SEQ ID NO: 29053 - protein, 12 aa, synthetic construct
ACDILGDTDKLI

SEQ ID NO: 29054 - protein, 17 aa, synthetic construct
ACDALFWGIRQTDDKLI

SEQ ID NO: 29055 - protein, 13 aa, synthetic construct
ACDKLGVYTGKLI

SEQ ID NO: 29056 - protein, 12 aa, synthetic construct
ACATGGGSVKLI

SEQ ID NO: 29057 - protein, 13 aa, synthetic construct
ACDAGEGVTDKLI

SEQ ID NO: 29058 - protein, 13 aa, synthetic construct
TCDSVLGETDKLI

SEQ ID NO: 29059 - protein, 12 aa, synthetic construct
ACDIGGNTDKLT

SEQ ID NO: 29060 - protein, 13 aa, synthetic construct
ACDKGYGYTEKLI

SEQ ID NO: 29061 - protein, 14 aa, synthetic construct
ACDYWGVPYTDKLI

SEQ ID NO: 29062 - protein, 13 aa, synthetic construct
ACDHWGIYTDKLI

SEQ ID NO: 29063 - protein, 13 aa, synthetic construct
ACDHCGIDTDKLI

SEQ ID NO: 29064 - protein, 12 aa, synthetic construct
ACDIGGNTDELI

SEQ ID NO: 29065 - protein, 10 aa, synthetic construct
ACDTWGPKPI

SEQ ID NO: 29066 - protein, 13 aa, synthetic construct
ACDKLGVYTDKLN

SEQ ID NO: 29067 - protein, 14 aa, synthetic construct
ACDSNWGDMGDKLI

SEQ ID NO: 29068 - protein, 13 aa, synthetic construct
ACDPGWGITDKLI

SEQ ID NO: 29069 - protein, 15 aa, synthetic construct
ACGTGIRDSWDTRQM

SEQ ID NO: 29070 - protein, 15 aa, synthetic construct
ACDPGEGLGAVDKLI

SEQ ID NO: 29071 - protein, 12 aa, synthetic construct
ACETGRGPDKLI

SEQ ID NO: 29072 - protein, 12 aa, synthetic construct
ACDKLGDTDKLI

SEQ ID NO: 29073 - protein, 13 aa, synthetic construct
ACDTVRGSTDKLI

SEQ ID NO: 29074 - protein, 17 aa, synthetic construct
ACDTLFWGIRQTDDQLI

SEQ ID NO: 29075 - protein, 17 aa, synthetic construct
ACDTLFWGIRQTDEKLI

SEQ ID NO: 29076 - protein, 15 aa, synthetic construct
ACDTGEGLGAVDRLI

SEQ ID NO: 29077 - protein, 14 aa, synthetic construct
DCDSNWGDTGDKLI

SEQ ID NO: 29078 - protein, 12 aa, synthetic construct
DCDRGDYTDKLI

SEQ ID NO: 29079 - protein, 10 aa, synthetic construct
ARDTSGGLLI

SEQ ID NO: 29080 - protein, 12 aa, synthetic construct
PVTLGIAPINSS

SEQ ID NO: 29081 - protein, 12 aa, synthetic construct
ACDIGGYADKLS

SEQ ID NO: 29082 - protein, 12 aa, synthetic construct
ACDIGGYADKII

SEQ ID NO: 29083 - protein, 13 aa, synthetic construct
ACDPVLGETDKLI

SEQ ID NO: 29084 - protein, 12 aa, synthetic construct
ACDTLGDTDQLI

SEQ ID NO: 29085 - protein, 13 aa, synthetic construct
TCDTGDTPNDKLI

SEQ ID NO: 29086 - protein, 10 aa, synthetic construct
ACDTWGPRLI

SEQ ID NO: 29087 - protein, 12 aa, synthetic construct
ACDVGDTGDKLI

SEQ ID NO: 29088 - protein, 12 aa, synthetic construct
ASDTGRGPDKLI

SEQ ID NO: 29089 - protein, 13 aa, synthetic construct
ASDTGWGITDKLI

SEQ ID NO: 29090 - protein, 14 aa, synthetic construct
ACDPNWGDTGDKLI

SEQ ID NO: 29091 - protein, 14 aa, synthetic construct
TCDTGWGTPYTDKL

SEQ ID NO: 29092 - protein, 17 aa, synthetic construct
ACDTLFWGIRQTGDKLI

SEQ ID NO: 29093 - protein, 12 aa, synthetic construct
ACDIGGSTDKLI

SEQ ID NO: 29094 - protein, 11 aa, synthetic construct
AWAVWGPYKLV

SEQ ID NO: 29095 - protein, 15 aa, synthetic construct
ARDTGIRDSWDTRQM

SEQ ID NO: 29096 - protein, 17 aa, synthetic construct
ACDTLFWGIRQTDDKRI

SEQ ID NO: 29097 - protein, 13 aa, synthetic construct
ACDTVRGNTDKVI

SEQ ID NO: 29098 - protein, 14 aa, synthetic construct
ACDSNWGDTGDTLI

SEQ ID NO: 29099 - protein, 12 aa, synthetic construct
ACDTGGDTDKLI

SEQ ID NO: 29100 - protein, 10 aa, synthetic construct
ASDTSGDKLI

SEQ ID NO: 29101 - protein, 14 aa, synthetic construct
ACDFTGGPYTDKLI

SEQ ID NO: 29102 - protein, 14 aa, synthetic construct
ACDYWGITYTDKLI

SEQ ID NO: 29103 - protein, 12 aa, synthetic construct
ARDLGDTGDKLI

SEQ ID NO: 29104 - protein, 12 aa, synthetic construct
ACDIGGNTDKPI

SEQ ID NO: 29105 - protein, 13 aa, synthetic construct
ACDKLGVSTDKLI

SEQ ID NO: 29106 - protein, 14 aa, synthetic construct
ACDTPRGGITDKLI

SEQ ID NO: 29107 - protein, 13 aa, synthetic construct
ARDKGYGYTDKLI

SEQ ID NO: 29108 - protein, 14 aa, synthetic construct
ACDAPLGGITDKLI

SEQ ID NO: 29109 - protein, 13 aa, synthetic construct
ACDKLGVYADKLI

SEQ ID NO: 29110 - protein, 14 aa, synthetic construct
ACDSNWGIRAINSS

SEQ ID NO: 29111 - protein, 13 aa, synthetic construct
ACDNLGVYTDKLI

SEQ ID NO: 29112 - protein, 13 aa, synthetic construct
ACDKLGVYTDELI

SEQ ID NO: 29113 - protein, 14 aa, synthetic construct
ACGTPLGGITDKLI

SEQ ID NO: 29114 - protein, 12 aa, synthetic construct
ACDTGGGSVNLI

SEQ ID NO: 29115 - protein, 12 aa, synthetic construct
AWEPGDNPDKLS

SEQ ID NO: 29116 - protein, 14 aa, synthetic construct
ACDSNWGDTGDRLI

SEQ ID NO: 29117 - protein, 10 aa, synthetic construct
ACDASGGLLI

SEQ ID NO: 29118 - protein, 12 aa, synthetic construct
ARDRGDYTDKLI

SEQ ID NO: 29119 - protein, 13 aa, synthetic construct
ACDTGEGVTEKLI

SEQ ID NO: 29120 - protein, 15 aa, synthetic construct
ASDTGWGTPYTDKLI

SEQ ID NO: 29121 - protein, 14 aa, synthetic construct
ACDTRWGAGGDKLI

SEQ ID NO: 29122 - protein, 13 aa, synthetic construct
ACGKLGVYTDKLI

SEQ ID NO: 29123 - protein, 12 aa, synthetic construct
DCDTGDRTDKLI

SEQ ID NO: 29124 - protein, 13 aa, synthetic construct
ACDTGEGVTDNLI

SEQ ID NO: 29125 - protein, 13 aa, synthetic construct
ACGKGYGYTDKLI

SEQ ID NO: 29126 - protein, 13 aa, synthetic construct
ACGTGWGITDKLI

SEQ ID NO: 29127 - protein, 13 aa, synthetic construct
ACDTGEGVTDTLI

SEQ ID NO: 29128 - protein, 12 aa, synthetic construct
ARDTGDRTDKLI

SEQ ID NO: 29129 - protein, 13 aa, synthetic construct
ACDNTGGYHDNLI

SEQ ID NO: 29130 - protein, 9 aa, synthetic construct
ARDTEGQTH

SEQ ID NO: 29131 - protein, 12 aa, synthetic construct
ACDTGETTDKLI

SEQ ID NO: 29132 - protein, 13 aa, synthetic construct
ACDTVRGNTDRLI

SEQ ID NO: 29133 - protein, 12 aa, synthetic construct
ACDTLGDTVKLI

SEQ ID NO: 29134 - protein, 12 aa, synthetic construct
ACGIGGNTDKLI

SEQ ID NO: 29135 - protein, 14 aa, synthetic construct
ACDSNWGDTGDNLI

SEQ ID NO: 29136 - protein, 13 aa, synthetic construct
ACDTGEWVTDKLI

SEQ ID NO: 29137 - protein, 10 aa, synthetic construct
TCDTSGGLLI

SEQ ID NO: 29138 - protein, 13 aa, synthetic construct
ACGTGEGVTDKLI

SEQ ID NO: 29139 - protein, 5 aa, synthetic construct
LVNSS

SEQ ID NO: 29140 - protein, 12 aa, synthetic construct
ACDIGGYADNLI

SEQ ID NO: 29141 - protein, 12 aa, synthetic construct
ACDSGDRTDKLI

SEQ ID NO: 29142 - protein, 12 aa, synthetic construct
ASDLGDTGDKLI

SEQ ID NO: 29143 - protein, 12 aa, synthetic construct
ACDTRGYADKLV

SEQ ID NO: 29144 - protein, 9 aa, synthetic construct
ACETEGQTH

SEQ ID NO: 29145 - protein, 13 aa, synthetic construct
ACDILGDTYEKLI

SEQ ID NO: 29146 - protein, 12 aa, synthetic construct
ACDTGDTADKLI

SEQ ID NO: 29147 - protein, 12 aa, synthetic construct
ACDRGTTPINSS

SEQ ID NO: 29148 - protein, 10 aa, synthetic construct
ACDTWGPKLT

SEQ ID NO: 29149 - protein, 12 aa, synthetic construct
ACDRGGYTDKLI

SEQ ID NO: 29150 - protein, 12 aa, synthetic construct
ACDSEGDTDKLI

SEQ ID NO: 29151 - protein, 12 aa, synthetic construct
ACDTRGYADNSS

SEQ ID NO: 29152 - protein, 12 aa, synthetic construct
ASDIGGNTDKLI

SEQ ID NO: 29153 - protein, 13 aa, synthetic construct
ACDTGDTNTDKLI

SEQ ID NO: 29154 - protein, 13 aa, synthetic construct
ASDHWGIDTDKLI

SEQ ID NO: 29155 - protein, 12 aa, synthetic construct
ACDTGDTPINSS

SEQ ID NO: 29156 - protein, 12 aa, synthetic construct
ACDRGDYTDQLI

SEQ ID NO: 29157 - protein, 13 aa, synthetic construct
ACDILGVYTDKLI

SEQ ID NO: 29158 - protein, 12 aa, synthetic construct
ACDRGDYTDKLV

SEQ ID NO: 29159 - protein, 13 aa, synthetic construct
ACDTGDTPNDELI

SEQ ID NO: 29160 - protein, 15 aa, synthetic construct
ACDCCTRGYRGDKLI

SEQ ID NO: 29161 - protein, 9 aa, synthetic construct
ASDTEGQTH

SEQ ID NO: 29162 - protein, 13 aa, synthetic construct
ACDRPGGTPINSS

SEQ ID NO: 29163 - protein, 13 aa, synthetic construct
ACRTGGPYIDKLI

SEQ ID NO: 29164 - protein, 15 aa, synthetic construct
PVIPTGGYGTPINSS

SEQ ID NO: 29165 - protein, 15 aa, synthetic construct
ACDCSTGGYRGDKLI

SEQ ID NO: 29166 - protein, 13 aa, synthetic construct
ACRTGGPCTDKLI

SEQ ID NO: 29167 - protein, 15 aa, synthetic construct
ACDCRTGGYRGDKLI

SEQ ID NO: 29168 - protein, 12 aa, synthetic construct
ACDTGDRTDILI

SEQ ID NO: 29169 - protein, 12 aa, synthetic construct
ACDTGDRTDKII

SEQ ID NO: 29170 - protein, 12 aa, synthetic construct
ASDRGDYTDKLI

SEQ ID NO: 29171 - protein, 13 aa, synthetic construct
ASDPYWGPTDKLI

SEQ ID NO: 29172 - protein, 11 aa, synthetic construct
AWVLGDPDKLI

SEQ ID NO: 29173 - protein, 12 aa, synthetic construct
ACDTRGHADKLI

SEQ ID NO: 29174 - protein, 12 aa, synthetic construct
ACDTRGYADKII

SEQ ID NO: 29175 - protein, 10 aa, synthetic construct
ACDTRGPKLI

SEQ ID NO: 29176 - protein, 14 aa, synthetic construct
ACGSNWGDTGDKLI

SEQ ID NO: 29177 - protein, 13 aa, synthetic construct
ACDRWGIDTDKLI

SEQ ID NO: 29178 - protein, 13 aa, synthetic construct
ACDRTGGSTDKLI

SEQ ID NO: 29179 - protein, 12 aa, synthetic construct
ACETEGDTDKLI

SEQ ID NO: 29180 - protein, 12 aa, synthetic construct
ACGRGDYTDKLI

SEQ ID NO: 29181 - protein, 5 aa, synthetic construct
AWYTH

SEQ ID NO: 29182 - protein, 15 aa, synthetic construct
ACDYCTGGYRGDKLI

SEQ ID NO: 29183 - protein, 13 aa, synthetic construct
ACDTGDRHTDKLT

SEQ ID NO: 29184 - protein, 13 aa, synthetic construct
ACDTGDTPNDRLI

SEQ ID NO: 29185 - protein, 12 aa, synthetic construct
ACDIGGYADNSS

SEQ ID NO: 29186 - protein, 12 aa, synthetic construct
ACDRGDYTDELI

SEQ ID NO: 29187 - protein, 12 aa, synthetic construct
ACDTWDRTDKLI

SEQ ID NO: 29188 - protein, 12 aa, synthetic construct
ACDIGGYAGKLI

SEQ ID NO: 29189 - protein, 15 aa, synthetic construct
ASDTGEGLGAVDKLI

SEQ ID NO: 29190 - protein, 14 aa, synthetic construct
DCDLGDTPDTDKLI

SEQ ID NO: 29191 - protein, 10 aa, synthetic construct
ACERRADRLI

SEQ ID NO: 29192 - protein, 11 aa, synthetic construct
AREVEDTDKLI

SEQ ID NO: 29193 - protein, 10 aa, synthetic construct
ACERRADTLI

SEQ ID NO: 29194 - protein, 14 aa, synthetic construct
ACDYWGIPYTDELI

SEQ ID NO: 29195 - protein, 12 aa, synthetic construct
AWEQGDNPDKLI

SEQ ID NO: 29196 - protein, 14 aa, synthetic construct
ACDSHWGDTGDKLI

SEQ ID NO: 29197 - protein, 15 aa, synthetic construct
ACDKGWGTPYTDKLI

SEQ ID NO: 29198 - protein, 12 aa, synthetic construct
ACDTLVDTDKLI

SEQ ID NO: 29199 - protein, 13 aa, synthetic construct
ACDTGDNYTDKLI

SEQ ID NO: 29200 - protein, 13 aa, synthetic construct
ACDKLGVYTDNLI

SEQ ID NO: 29201 - protein, 14 aa, synthetic construct
ACDTRSGAGDDKLI

SEQ ID NO: 29202 - protein, 15 aa, synthetic construct
ARDTYWGIRNTDKLI

SEQ ID NO: 29203 - protein, 13 aa, synthetic construct
ACDTRDRGTDELI

SEQ ID NO: 29204 - protein, 13 aa, synthetic construct
ACRTGGPYTDTLI

SEQ ID NO: 29205 - protein, 15 aa, synthetic construct
ACDTGEGLGAADKLI

SEQ ID NO: 29206 - protein, 12 aa, synthetic construct
ACDIGGYANKLI

SEQ ID NO: 29207 - protein, 13 aa, synthetic construct
ACDQGYGYTDKLI

SEQ ID NO: 29208 - protein, 13 aa, synthetic construct
ACDTGDRHTDELI

SEQ ID NO: 29209 - protein, 14 aa, synthetic construct
ACDYWGILYTDKLI

SEQ ID NO: 29210 - protein, 12 aa, synthetic construct
ACETGDRTDKLI

SEQ ID NO: 29211 - protein, 13 aa, synthetic construct
ACDSGDTYTDKLI

SEQ ID NO: 29212 - protein, 13 aa, synthetic construct
ACDTGDTQNDKLI

SEQ ID NO: 29213 - protein, 12 aa, synthetic construct
ACDVGGYADKLI

SEQ ID NO: 29214 - protein, 17 aa, synthetic construct
ACDTLFWGYVKRTINSS

SEQ ID NO: 29215 - protein, 12 aa, synthetic construct
ACDRGDSTDKLI

SEQ ID NO: 29216 - protein, 15 aa, synthetic construct
TCDCCTGGYRGDKLI

SEQ ID NO: 29217 - protein, 13 aa, synthetic construct
DCDHWGIDTDKLI

SEQ ID NO: 29218 - protein, 12 aa, synthetic construct
ACDTGDTTDKLF

SEQ ID NO: 29219 - protein, 12 aa, synthetic construct
ACDIGGYDDKLI

SEQ ID NO: 29220 - protein, 12 aa, synthetic construct
ACDIGGYPDKLI

SEQ ID NO: 29221 - protein, 13 aa, synthetic construct
ASDTGDTPNDKLI

SEQ ID NO: 29222 - protein, 15 aa, synthetic construct
ACDRCTGGYRGDKLI

SEQ ID NO: 29223 - protein, 14 aa, synthetic construct
ACDTRGYPYTDKLI

SEQ ID NO: 29224 - protein, 13 aa, synthetic construct
ACDTWDTPNDKLI

SEQ ID NO: 29225 - protein, 12 aa, synthetic construct
ACDTRGYTDKLI

SEQ ID NO: 29226 - protein, 12 aa, synthetic construct
ACDTGDTTDKLV

SEQ ID NO: 29227 - protein, 13 aa, synthetic construct
ACDTRDRGTEKLI

SEQ ID NO: 29228 - protein, 13 aa, synthetic construct
ACDAGWGITDKLI

SEQ ID NO: 29229 - protein, 11 aa, synthetic construct
ARAVWGPYKLI

SEQ ID NO: 29230 - protein, 14 aa, synthetic construct
ACDSPLGGITDKLI

SEQ ID NO: 29231 - protein, 9 aa, synthetic construct
ACDTDGQTH

SEQ ID NO: 29232 - protein, 12 aa, synthetic construct
ACATGDTTDKLI

SEQ ID NO: 29233 - protein, 13 aa, synthetic construct
PVTPYWGKPINSS

SEQ ID NO: 29234 - protein, 15 aa, synthetic construct
ACDTGWGTPYTDKLF

SEQ ID NO: 29235 - protein, 12 aa, synthetic construct
ACATEGDTDKLI

SEQ ID NO: 29236 - protein, 14 aa, synthetic construct
PVTQGYATPGTPDR

SEQ ID NO: 29237 - protein, 12 aa, synthetic construct
ACDLLGDTYKLI

SEQ ID NO: 29238 - protein, 15 aa, synthetic construct
ACDTVEGLGAVDKLI

SEQ ID NO: 29239 - protein, 14 aa, synthetic construct
ACELGDTPDTDKLI

SEQ ID NO: 29240 - protein, 12 aa, synthetic construct
ACDLLGDTDNSS

SEQ ID NO: 29241 - protein, 12 aa, synthetic construct
ACDLLGDTDNLI

SEQ ID NO: 29242 - protein, 15 aa, synthetic construct
ACVTGWGTPYTDKLI

SEQ ID NO: 29243 - protein, 12 aa, synthetic construct
ACDLLGDTDELI

SEQ ID NO: 29244 - protein, 16 aa, synthetic construct
ACDTAVGIRAGPINSS

SEQ ID NO: 29245 - protein, 15 aa, synthetic construct
ACDTLLGDTATEKLI

SEQ ID NO: 29246 - protein, 12 aa, synthetic construct
ACDTVGDTDKLI

SEQ ID NO: 29247 - protein, 13 aa, synthetic construct
ACDSVLGKPINSS

SEQ ID NO: 29248 - protein, 10 aa, synthetic construct
ACDTGRGPDK

SEQ ID NO: 29249 - protein, 12 aa, synthetic construct
ACDTDGDTDKLI

SEQ ID NO: 29250 - protein, 12 aa, synthetic construct
ACDLQGDTDKLI

SEQ ID NO: 29251 - protein, 15 aa, synthetic construct
ACDTVLRDTATDKLI

SEQ ID NO: 29252 - protein, 12 aa, synthetic construct
AGDTRGYADKLI

SEQ ID NO: 29253 - protein, 12 aa, synthetic construct
ACDMRGYADKLI

SEQ ID NO: 29254 - protein, 14 aa, synthetic construct
ACDMNWGPNTDKLI

SEQ ID NO: 29255 - protein, 13 aa, synthetic construct
ACDSVLGEIDKLI

SEQ ID NO: 29256 - protein, 14 aa, synthetic construct
ACDMHWGPNTDKLI

SEQ ID NO: 29257 - protein, 11 aa, synthetic construct
ACGDTKADKLI

SEQ ID NO: 29258 - protein, 12 aa, synthetic construct
ACDTEGDPDKLI

SEQ ID NO: 29259 - protein, 12 aa, synthetic construct
ACDMGGYADKLI

SEQ ID NO: 29260 - protein, 12 aa, synthetic construct
ACDMGGNTDKLI

SEQ ID NO: 29261 - protein, 13 aa, synthetic construct
ACDSVLGEPDKLI

SEQ ID NO: 29262 - protein, 13 aa, synthetic construct
ACDSVLGEPINSS

SEQ ID NO: 29263 - protein, 15 aa, synthetic construct
ACDTSWGIRNTDKLI

SEQ ID NO: 29264 - protein, 13 aa, synthetic construct
ACDSVLGESDKLI

SEQ ID NO: 29265 - protein, 15 aa, synthetic construct
ACDTVLGDTTTNKLI

SEQ ID NO: 29266 - protein, 13 aa, synthetic construct
ACDSVLGETDELI

SEQ ID NO: 29267 - protein, 14 aa, synthetic construct
ACGYWGIPYTDKLI

SEQ ID NO: 29268 - protein, 14 aa, synthetic construct
ACDLYWGPNTDKLI

SEQ ID NO: 29269 - protein, 15 aa, synthetic construct
ACNTVLGDTATDKLI

SEQ ID NO: 29270 - protein, 14 aa, synthetic construct
ACDSVLGVSPINSS

SEQ ID NO: 29271 - protein, 15 aa, synthetic construct
VCDTVLGDTATDKLI

SEQ ID NO: 29272 - protein, 12 aa, synthetic construct
ACDTGRGPDKLS

SEQ ID NO: 29273 - protein, 13 aa, synthetic construct
ACAPYWGPTDKLI

SEQ ID NO: 29274 - protein, 13 aa, synthetic construct
ACDTGWGITDKLS

SEQ ID NO: 29275 - protein, 13 aa, synthetic construct
ACDHWGRDTDKLI

SEQ ID NO: 29276 - protein, 14 aa, synthetic construct
ACDLGDTPDTEKLI

SEQ ID NO: 29277 - protein, 14 aa, synthetic construct
ACDLGDTPDTDTLI

SEQ ID NO: 29278 - protein, 15 aa, synthetic construct
ACDTGSGGPYTDELI

SEQ ID NO: 29279 - protein, 11 aa, synthetic construct
ACEVEATDKLI

SEQ ID NO: 29280 - protein, 11 aa, synthetic construct
ACELEDTDKLI

SEQ ID NO: 29281 - protein, 15 aa, synthetic construct
ACDTGSGGPYTDKLT

SEQ ID NO: 29282 - protein, 12 aa, synthetic construct
ACDLGDTGDELI

SEQ ID NO: 29283 - protein, 11 aa, synthetic construct
AWAVWGPYELI

SEQ ID NO: 29284 - protein, 13 aa, synthetic construct
ACDTARGNTDKLI

SEQ ID NO: 29285 - protein, 12 aa, synthetic construct
PVTWGIRAINSS

SEQ ID NO: 29286 - protein, 15 aa, synthetic construct
ACDTGSWGPYTDKLI

SEQ ID NO: 29287 - protein, 12 aa, synthetic construct
ACDTGWGIEKLI

SEQ ID NO: 29288 - protein, 12 aa, synthetic construct
ACDLGDTGGKLI

SEQ ID NO: 29289 - protein, 14 aa, synthetic construct
ACDTAGYPYTDKLI

SEQ ID NO: 29290 - protein, 17 aa, synthetic construct
ACDTLSWGIRQTDDKLI

SEQ ID NO: 29291 - protein, 10 aa, synthetic construct
ACKRRADKLI

SEQ ID NO: 29292 - protein, 13 aa, synthetic construct
ACDTGWGITDKLT

SEQ ID NO: 29293 - protein, 13 aa, synthetic construct
ACDTGWGITDKLV

SEQ ID NO: 29294 - protein, 9 aa, synthetic construct
ACDTVGQTH

SEQ ID NO: 29295 - protein, 12 aa, synthetic construct
ACDTGRGPDKLV

SEQ ID NO: 29296 - protein, 13 aa, synthetic construct
ACDTGWGMTDKLI

SEQ ID NO: 29297 - protein, 14 aa, synthetic construct
ACDLGIRRTPINSS

SEQ ID NO: 29298 - protein, 12 aa, synthetic construct
DWEPGDNPDKLI

SEQ ID NO: 29299 - protein, 10 aa, synthetic construct
ACETSGGLLI

SEQ ID NO: 29300 - protein, 13 aa, synthetic construct
ACDTGWGITNKLI

SEQ ID NO: 29301 - protein, 14 aa, synthetic construct
PVTRHWGVSPINSS

SEQ ID NO: 29302 - protein, 12 aa, synthetic construct
ACDTVGYPDKLI

SEQ ID NO: 29303 - protein, 14 aa, synthetic construct
ACESNWGDTGDKLI

SEQ ID NO: 29304 - protein, 12 aa, synthetic construct
ACDLGGNTDKLI

SEQ ID NO: 29305 - protein, 13 aa, synthetic construct
ACDTGWGITEKLI

SEQ ID NO: 29306 - protein, 14 aa, synthetic construct
ACDTVGYPYTDKLI

SEQ ID NO: 29307 - protein, 12 aa, synthetic construct
PVTYWGTPINSS

SEQ ID NO: 29308 - protein, 10 aa, synthetic construct
ACDTWWPKLI

SEQ ID NO: 29309 - protein, 13 aa, synthetic construct
ACDSVRGETDKLI

SEQ ID NO: 29310 - protein, 11 aa, synthetic construct
ACEVEDTDKLV

SEQ ID NO: 29311 - protein, 15 aa, synthetic construct
ACDTYWGIRNTDRLI

SEQ ID NO: 29312 - protein, 14 aa, synthetic construct
ACDTTLGGITDKLI

SEQ ID NO: 29313 - protein, 14 aa, synthetic construct
ACDTPLGGITDKPI

SEQ ID NO: 29314 - protein, 17 aa, synthetic construct
ACDTLCWGIRQTDDKLI

SEQ ID NO: 29315 - protein, 12 aa, synthetic construct
ACETRGYADKLI

SEQ ID NO: 29316 - protein, 12 aa, synthetic construct
ACVLGDTGDKLI

SEQ ID NO: 29317 - protein, 15 aa, synthetic construct
ACDTVMGDTATDKLI

SEQ ID NO: 29318 - protein, 11 aa, synthetic construct
ACGDTKTDNLI

SEQ ID NO: 29319 - protein, 14 aa, synthetic construct
ACDMYWGPNTDNLI

SEQ ID NO: 29320 - protein, 10 aa, synthetic construct
DCDTSGGLLI

SEQ ID NO: 29321 - protein, 12 aa, synthetic construct
ACDSRGYADKLI

SEQ ID NO: 29322 - protein, 14 aa, synthetic construct
ACDTPLGGLTDKLI

SEQ ID NO: 29323 - protein, 14 aa, synthetic construct
ACDMYWGTNTDKLI

SEQ ID NO: 29324 - protein, 15 aa, synthetic construct
ACDTVRGDTATDKLI

SEQ ID NO: 29325 - protein, 10 aa, synthetic construct
ACDTSGGLFI

SEQ ID NO: 29326 - protein, 14 aa, synthetic construct
ACDMYWGPNTDELI

SEQ ID NO: 29327 - protein, 13 aa, synthetic construct
ACDAGDTYTDKLI

SEQ ID NO: 29328 - protein, 12 aa, synthetic construct
ACDAEGDTDKLI

SEQ ID NO: 29329 - protein, 14 aa, synthetic construct
SCDMYWGPNTDKLI

SEQ ID NO: 29330 - protein, 12 aa, synthetic construct
ACDTEGDTDRLI

SEQ ID NO: 29331 - protein, 15 aa, synthetic construct
DCDTVLGDTATDKLI

SEQ ID NO: 29332 - protein, 14 aa, synthetic construct
ACDMYWGPNTDKLF

SEQ ID NO: 29333 - protein, 13 aa, synthetic construct
ACDTGGSATDKLI

SEQ ID NO: 29334 - protein, 11 aa, synthetic construct
ACGDTKTDKLV

SEQ ID NO: 29335 - protein, 14 aa, synthetic construct
ACDSSWGDTGDKLI

SEQ ID NO: 29336 - protein, 10 aa, synthetic construct
DCDTWGPKLI

SEQ ID NO: 29337 - protein, 15 aa, synthetic construct
ACDTYWGIRTTDKLI

SEQ ID NO: 29338 - protein, 12 aa, synthetic construct
ACDAGDTTDKLI

SEQ ID NO: 29339 - protein, 13 aa, synthetic construct
ACDKLWVYTDKLI

SEQ ID NO: 29340 - protein, 6 aa, synthetic construct
APHKLN

SEQ ID NO: 29341 - protein, 14 aa, synthetic construct
ACDMYWGPNTDRLI

SEQ ID NO: 29342 - protein, 14 aa, synthetic construct
ACDMYWGPNTDQLI

SEQ ID NO: 29343 - protein, 13 aa, synthetic construct
ACDHRGIDTDKLI

SEQ ID NO: 29344 - protein, 14 aa, synthetic construct
ACDTPLGGITDTLI

SEQ ID NO: 29345 - protein, 12 aa, synthetic construct
ACDTGGYPDKLT

SEQ ID NO: 29346 - protein, 10 aa, synthetic construct
ACGTWGPKLI

SEQ ID NO: 29347 - protein, 13 aa, synthetic construct
PVTPGRGLPINSS

SEQ ID NO: 29348 - protein, 11 aa, synthetic construct
DCGATKTDKLI

SEQ ID NO: 29349 - protein, 13 aa, synthetic construct
VCDKGYGYTDKLI

SEQ ID NO: 29350 - protein, 13 aa, synthetic construct
ACDTGYRHTDKLI

SEQ ID NO: 29351 - protein, 16 aa, synthetic construct
PVTPRWGIRAGPINSS

SEQ ID NO: 29352 - protein, 12 aa, synthetic construct
AWEPGDNPDKII

SEQ ID NO: 29353 - protein, 7 aa, synthetic construct
ACDTSGG

SEQ ID NO: 29354 - protein, 14 aa, synthetic construct
ACDMYRGPNTDKLI

SEQ ID NO: 29355 - protein, 13 aa, synthetic construct
ACDSVLGDTEKLI

SEQ ID NO: 29356 - protein, 15 aa, synthetic construct
ACDSVLGDTATDKLI

SEQ ID NO: 29357 - protein, 11 aa, synthetic construct
DCEVEDTDKLI

SEQ ID NO: 29358 - protein, 10 aa, synthetic construct
ACATWGPKLI

SEQ ID NO: 29359 - protein, 10 aa, synthetic construct
ACDTSGPKLI

SEQ ID NO: 29360 - protein, 13 aa, synthetic construct
ACDKLGVYTDQLI

SEQ ID NO: 29361 - protein, 11 aa, synthetic construct
AWDVWGPYKLI

SEQ ID NO: 29362 - protein, 13 aa, synthetic construct
ACERTGGYTDKLI

SEQ ID NO: 29363 - protein, 11 aa, synthetic construct
AWAVWGPYKLT

SEQ ID NO: 29364 - protein, 13 aa, synthetic construct
SCDSVLGETDKLI

SEQ ID NO: 29365 - protein, 13 aa, synthetic construct
ACNKLGVYTDKLI

SEQ ID NO: 29366 - protein, 13 aa, synthetic construct
ACRTGGLYTDKLI

SEQ ID NO: 29367 - protein, 12 aa, synthetic construct
ACDVLGDTDKLI

SEQ ID NO: 29368 - protein, 15 aa, synthetic construct
ACDTALGDTATDKLI

SEQ ID NO: 29369 - protein, 15 aa, synthetic construct
ACDTAIRDSWDTRQM

SEQ ID NO: 29370 - protein, 15 aa, synthetic construct
AWAVWDTRLLGHPTD

SEQ ID NO: 29371 - protein, 16 aa, synthetic construct
ACDTAVGDTRRTDKLV

SEQ ID NO: 29372 - protein, 12 aa, synthetic construct
ACDTLGDTYKPI

SEQ ID NO: 29373 - protein, 13 aa, synthetic construct
ACDVLGDTYDKLI

SEQ ID NO: 29374 - protein, 16 aa, synthetic construct
ACDTALGDTRRTDKLI

SEQ ID NO: 29375 - protein, 13 aa, synthetic construct
SCDTGDRHTDKLI

SEQ ID NO: 29376 - protein, 11 aa, synthetic construct
AWAVWGPCKLI

SEQ ID NO: 29377 - protein, 13 aa, synthetic construct
ACDTGDRHTDNLI

SEQ ID NO: 29378 - protein, 14 aa, synthetic construct
ASDYWGIPYTDKLI

SEQ ID NO: 29379 - protein, 16 aa, synthetic construct
ASDTAVGDTRRTDKLI

SEQ ID NO: 29380 - protein, 10 aa, synthetic construct
ACERRADNLI

SEQ ID NO: 29381 - protein, 15 aa, synthetic construct
ACDTAVGDPTPINSS

SEQ ID NO: 29382 - protein, 9 aa, synthetic construct
SCDTEGQTH

SEQ ID NO: 29383 - protein, 10 aa, synthetic construct
ACERRAYKLI

SEQ ID NO: 29384 - protein, 15 aa, synthetic construct
ACDTYCGIRNTDKLI

SEQ ID NO: 29385 - protein, 9 aa, synthetic construct
ACDTEGHTH

SEQ ID NO: 29386 - protein, 16 aa, synthetic construct
ACDTAVGDMRRTDKLI

SEQ ID NO: 29387 - protein, 14 aa, synthetic construct
ACHYWGIPYTDKLI

SEQ ID NO: 29388 - protein, 13 aa, synthetic construct
ACDTGDRQTDKLI

SEQ ID NO: 29389 - protein, 13 aa, synthetic construct
ASDTGDRHTDKLI

SEQ ID NO: 29390 - protein, 14 aa, synthetic construct
ACDVYWGPNTDKLI

SEQ ID NO: 29391 - protein, 15 aa, synthetic construct
ACDTYWGVRNTDKLI

SEQ ID NO: 29392 - protein, 13 aa, synthetic construct
ASDTVRGNTDKLI

SEQ ID NO: 29393 - protein, 13 aa, synthetic construct
ACRAGGPYTDKLI

SEQ ID NO: 29394 - protein, 12 aa, synthetic construct
AWAVWGPTDKLI

SEQ ID NO: 29395 - protein, 12 aa, synthetic construct
ACDTERDTDKLI

SEQ ID NO: 29396 - protein, 12 aa, synthetic construct
ACDHGDYTDKLI

SEQ ID NO: 29397 - protein, 11 aa, synthetic construct
ACDCTGGPNSS

SEQ ID NO: 29398 - protein, 16 aa, synthetic construct
ACDTAVGDTRRADKLI

SEQ ID NO: 29399 - protein, 15 aa, synthetic construct
ACDTLMGDTATDKLI

SEQ ID NO: 29400 - protein, 13 aa, synthetic construct
ACDTGDRHTDKLL

SEQ ID NO: 29401 - protein, 11 aa, synthetic construct
AWAVGGPYKLI

SEQ ID NO: 29402 - protein, 15 aa, synthetic construct
ACDTYWGIRNTDKHI

SEQ ID NO: 29403 - protein, 14 aa, synthetic construct
ASDTPLGGITDKLI

SEQ ID NO: 29404 - protein, 12 aa, synthetic construct
ACNTGGGSVKLI

SEQ ID NO: 29405 - protein, 12 aa, synthetic construct
ACNTLGDTDKLI

SEQ ID NO: 29406 - protein, 13 aa, synthetic construct
ACRNGGPYTDKLI

SEQ ID NO: 29407 - protein, 17 aa, synthetic construct
ASDTLFWGIRQTDDKLI

SEQ ID NO: 29408 - protein, 10 aa, synthetic construct
ACERRTDKLI

SEQ ID NO: 29409 - protein, 10 aa, synthetic construct
ACDTCVPKLI

SEQ ID NO: 29410 - protein, 11 aa, synthetic construct
AWAARGPYKLI

SEQ ID NO: 29411 - protein, 12 aa, synthetic construct
ACDTLGHTDKLI

SEQ ID NO: 29412 - protein, 13 aa, synthetic construct
ACDHWGIDSDKLI

SEQ ID NO: 29413 - protein, 14 aa, synthetic construct
ACDCTGGPYTDTLI

SEQ ID NO: 29414 - protein, 9 aa, synthetic construct
ACDTEAQTH

SEQ ID NO: 29415 - protein, 13 aa, synthetic construct
ACDHWGIDPDKLI

SEQ ID NO: 29416 - protein, 11 aa, synthetic construct
ACDVEATDKLI

SEQ ID NO: 29417 - protein, 13 aa, synthetic construct
ACDTGCGITDKLI

SEQ ID NO: 29418 - protein, 15 aa, synthetic construct
ACDTYWGIRNTDQLI

SEQ ID NO: 29419 - protein, 13 aa, synthetic construct
ACDTGDMPNDKLV

SEQ ID NO: 29420 - protein, 12 aa, synthetic construct
ACDTLGDTDTLI

SEQ ID NO: 29421 - protein, 12 aa, synthetic construct
SCDTGRGPDKLI

SEQ ID NO: 29422 - protein, 14 aa, synthetic construct
ACDCTGGPYTEKLI

SEQ ID NO: 29423 - protein, 15 aa, synthetic construct
ACDTYWGIRNTDTLI

SEQ ID NO: 29424 - protein, 15 aa, synthetic construct
ASDTGSGGPYTDKLI

SEQ ID NO: 29425 - protein, 14 aa, synthetic construct
ACDTEGDRTPINSS

SEQ ID NO: 29426 - protein, 12 aa, synthetic construct
ACDTGDHTDKLI

SEQ ID NO: 29427 - protein, 13 aa, synthetic construct
SCDTGWGITDKLI

SEQ ID NO: 29428 - protein, 12 aa, synthetic construct
ACDTLGVTDKLI

SEQ ID NO: 29429 - protein, 12 aa, synthetic construct
ASDTGWGIDKLI

SEQ ID NO: 29430 - protein, 12 aa, synthetic construct
ACDTEGDTDILI

SEQ ID NO: 29431 - protein, 14 aa, synthetic construct
ASDTGGYPYTDKLI

SEQ ID NO: 29432 - protein, 15 aa, synthetic construct
ACDTYWGIRNTDKLV

SEQ ID NO: 29433 - protein, 16 aa, synthetic construct
ACDTAVGDTRRTDTLI

SEQ ID NO: 29434 - protein, 12 aa, synthetic construct
ASDTGGGSVKLI

SEQ ID NO: 29435 - protein, 10 aa, synthetic construct
SCDTWGPKLI

SEQ ID NO: 29436 - protein, 6 aa, synthetic construct
ASHKLI

SEQ ID NO: 29437 - protein, 13 aa, synthetic construct
ACDTLGDTYDKLI

SEQ ID NO: 29438 - protein, 14 aa, synthetic construct
ACRTGGFLTPINSS

SEQ ID NO: 29439 - protein, 15 aa, synthetic construct
ACDTYWWIRNTDKLI

SEQ ID NO: 29440 - protein, 11 aa, synthetic construct
AWAVLGPYKLI

SEQ ID NO: 29441 - protein, 13 aa, synthetic construct
ACDHLGIDTDKLI

SEQ ID NO: 29442 - protein, 12 aa, synthetic construct
ACDTGDCTDKLI

SEQ ID NO: 29443 - protein, 13 aa, synthetic construct
ACDHWGIDTDKLT

SEQ ID NO: 29444 - protein, 16 aa, synthetic construct
ACDTAVGDTRWTDKLI

SEQ ID NO: 29445 - protein, 15 aa, synthetic construct
ACDTLLGDTATETLI

SEQ ID NO: 29446 - protein, 12 aa, synthetic construct
ASDTGDTTDKLI

SEQ ID NO: 29447 - protein, 16 aa, synthetic construct
ACDTAVGETRRTDKLI

SEQ ID NO: 29448 - protein, 10 aa, synthetic construct
ACDTLGPKLI

SEQ ID NO: 29449 - protein, 15 aa, synthetic construct
ACDTLLGDTATDKPI

SEQ ID NO: 29450 - protein, 13 aa, synthetic construct
ASDTGDTYTDKLI

SEQ ID NO: 29451 - protein, 13 aa, synthetic construct
ACNSVLGETDKLI

SEQ ID NO: 29452 - protein, 13 aa, synthetic construct
ACNSVLGETDRLI

SEQ ID NO: 29453 - protein, 12 aa, synthetic construct
ACDTAWGIDKLI

SEQ ID NO: 29454 - protein, 15 aa, synthetic construct
ACDTLLGDTATDKLN

SEQ ID NO: 29455 - protein, 13 aa, synthetic construct
ASDTRDRGTDKLI

SEQ ID NO: 29456 - protein, 15 aa, synthetic construct
ACDTYWGIRNTNKLI

SEQ ID NO: 29457 - protein, 14 aa, synthetic construct
SCDTRWGAGDDKLI

SEQ ID NO: 29458 - protein, 12 aa, synthetic construct
ACDTLGDTNKLI

SEQ ID NO: 29459 - protein, 10 aa, synthetic construct
ACERSADKLI

SEQ ID NO: 29460 - protein, 12 aa, synthetic construct
ACDTEGDTDNSS

SEQ ID NO: 29461 - protein, 13 aa, synthetic construct
ACDTGDPYTDKLI

SEQ ID NO: 29462 - protein, 14 aa, synthetic construct
ASDSNWGDTGDKLI

SEQ ID NO: 29463 - protein, 15 aa, synthetic construct
ACDTVLGDTATDNLI

SEQ ID NO: 29464 - protein, 12 aa, synthetic construct
ACDTLGDTDKII

SEQ ID NO: 29465 - protein, 14 aa, synthetic construct
ACDTGGYPYTDKPI

SEQ ID NO: 29466 - protein, 6 aa, synthetic construct
AHHKLI

SEQ ID NO: 29467 - protein, 12 aa, synthetic construct
ACDTGGYPGKLI

SEQ ID NO: 29468 - protein, 14 aa, synthetic construct
VCDMYWGPNTDKLI

SEQ ID NO: 29469 - protein, 13 aa, synthetic construct
ACDTGWRITDKLI

SEQ ID NO: 29470 - protein, 14 aa, synthetic construct
ACDTGGYPSTDKLI

SEQ ID NO: 29471 - protein, 14 aa, synthetic construct
ACDYWWIPYTDKLI

SEQ ID NO: 29472 - protein, 10 aa, synthetic construct
ACDTGWGTTH

SEQ ID NO: 29473 - protein, 14 aa, synthetic construct
ACATRWGAGDDKLI

SEQ ID NO: 29474 - protein, 11 aa, synthetic construct
AGEVEDTDKLI

SEQ ID NO: 29475 - protein, 14 aa, synthetic construct
ACDTGGYPYTDKLF

SEQ ID NO: 29476 - protein, 14 aa, synthetic construct
ACDTGGYPYTDKLT

SEQ ID NO: 29477 - protein, 10 aa, synthetic construct
AGDTSGGLLI

SEQ ID NO: 29478 - protein, 5 aa, synthetic construct
APQTH

SEQ ID NO: 29479 - protein, 13 aa, synthetic construct
ACVSVLGETDNSS

SEQ ID NO: 29480 - protein, 17 aa, synthetic construct
AGDTLFWGIRQTDDKLI

SEQ ID NO: 29481 - protein, 10 aa, synthetic construct
ACVTCGPKLI

SEQ ID NO: 29482 - protein, 12 aa, synthetic construct
AGDTGWGIDKLI

SEQ ID NO: 29483 - protein, 14 aa, synthetic construct
ACDTGGYTYTDKLI

SEQ ID NO: 29484 - protein, 14 aa, synthetic construct
AGDTGGYPYTDKLI

SEQ ID NO: 29485 - protein, 15 aa, synthetic construct
ACDTGWGTPYTDQLI

SEQ ID NO: 29486 - protein, 12 aa, synthetic construct
VCDTGRGPDKLI

SEQ ID NO: 29487 - protein, 13 aa, synthetic construct
AGDTGDTPNDKLI

SEQ ID NO: 29488 - protein, 13 aa, synthetic construct
ACATGDTPNDKLI

SEQ ID NO: 29489 - protein, 15 aa, synthetic construct
ACDTGWGTPYTDKLV

SEQ ID NO: 29490 - protein, 12 aa, synthetic construct
ACDTGGYPDQLI

SEQ ID NO: 29491 - protein, 12 aa, synthetic construct
ACDTGYRTDKLI

SEQ ID NO: 29492 - protein, 13 aa, synthetic construct
ACDTGYTPNDKLI

SEQ ID NO: 29493 - protein, 12 aa, synthetic construct
ACDTGYTTDKLI

SEQ ID NO: 29494 - protein, 13 aa, synthetic construct
ACDTGGGVTDKLI

SEQ ID NO: 29495 - protein, 17 aa, synthetic construct
ACDTLFWGIHQTDDKLI

SEQ ID NO: 29496 - protein, 13 aa, synthetic construct
ACDTGGKATDKLI

SEQ ID NO: 29497 - protein, 12 aa, synthetic construct
ACDTGGNTDKLI

SEQ ID NO: 29498 - protein, 6 aa, synthetic construct
APHRLI

SEQ ID NO: 29499 - protein, 10 aa, synthetic construct
ACDTGGPKLI

SEQ ID NO: 29500 - protein, 17 aa, synthetic construct
ACDTLFGGIRQTDDKLI

SEQ ID NO: 29501 - protein, 13 aa, synthetic construct
VCDKLGVYTDKLI

SEQ ID NO: 29502 - protein, 12 aa, synthetic construct
ACDAGGGSVKLI

SEQ ID NO: 29503 - protein, 6 aa, synthetic construct
APHKLV

SEQ ID NO: 29504 - protein, 12 aa, synthetic construct
VCDLGDTGDKLI

SEQ ID NO: 29505 - protein, 14 aa, synthetic construct
VCDLGDTPDTDKLI

SEQ ID NO: 29506 - protein, 12 aa, synthetic construct
ACDTGGTTDKLI

SEQ ID NO: 29507 - protein, 13 aa, synthetic construct
ACDTGGTYTDKLI

SEQ ID NO: 29508 - protein, 9 aa, synthetic construct
ACDAEGRTH

SEQ ID NO: 29509 - protein, 13 aa, synthetic construct
ACDTGGYATDKLI

SEQ ID NO: 29510 - protein, 14 aa, synthetic construct
ACDTGGYGTPINSS

SEQ ID NO: 29511 - protein, 12 aa, synthetic construct
ACDTGGYHDKLI

SEQ ID NO: 29512 - protein, 10 aa, synthetic construct
ACDACGPKLI

SEQ ID NO: 29513 - protein, 15 aa, synthetic construct
ACDTILGDTATDKLI

SEQ ID NO: 29514 - protein, 12 aa, synthetic construct
ACDTGGYLDKLI

SEQ ID NO: 29515 - protein, 14 aa, synthetic construct
ACDTGGYLYTDKLI

SEQ ID NO: 29516 - protein, 14 aa, synthetic construct
ACVLGDTPDTDKLI

SEQ ID NO: 29517 - protein, 9 aa, synthetic construct
ACATEGQTH

SEQ ID NO: 29518 - protein, 11 aa, synthetic construct
ACEEEDTDKLI

SEQ ID NO: 29519 - protein, 15 aa, synthetic construct
ACDTGWGTPYTDKFI

SEQ ID NO: 29520 - protein, 12 aa, synthetic construct
ACDTGRGPGKLI

SEQ ID NO: 29521 - protein, 12 aa, synthetic construct
AFDTGRGPDKLI

SEQ ID NO: 29522 - protein, 11 aa, synthetic construct
VCGDTKTDKLI

SEQ ID NO: 29523 - protein, 13 aa, synthetic construct
ACDTGWGITDKPI

SEQ ID NO: 29524 - protein, 12 aa, synthetic construct
ACDTGRGTDKLI

SEQ ID NO: 29525 - protein, 6 aa, synthetic construct
AAHKLI

SEQ ID NO: 29526 - protein, 15 aa, synthetic construct
ACDTGSGDPTPINSS

SEQ ID NO: 29527 - protein, 15 aa, synthetic construct
ACVTYWGIRNTDKLI

SEQ ID NO: 29528 - protein, 13 aa, synthetic construct
ACDTGWGITDELI

SEQ ID NO: 29529 - protein, 15 aa, synthetic construct
ACDTGSGGPYTDILI

SEQ ID NO: 29530 - protein, 15 aa, synthetic construct
ACDTGSGGPYTDKLF

SEQ ID NO: 29531 - protein, 13 aa, synthetic construct
ACDTGWGITAKLI

SEQ ID NO: 29532 - protein, 13 aa, synthetic construct
AFDPYWGPTDKLI

SEQ ID NO: 29533 - protein, 13 aa, synthetic construct
ACDTGWGISDKLI

SEQ ID NO: 29534 - protein, 15 aa, synthetic construct
ACDTGSGGPYTDNSS

SEQ ID NO: 29535 - protein, 15 aa, synthetic construct
ACDTGWGIRNTDKLI

SEQ ID NO: 29536 - protein, 13 aa, synthetic construct
ACDTGWGIPINSS

SEQ ID NO: 29537 - protein, 15 aa, synthetic construct
AFDCCTGGYRGDKLI

SEQ ID NO: 29538 - protein, 13 aa, synthetic construct
ACDTGWGIIDKLI

SEQ ID NO: 29539 - protein, 7 aa, synthetic construct
ACDTGWG

SEQ ID NO: 29540 - protein, 15 aa, synthetic construct
ACDTGWGAPYTDNLI

SEQ ID NO: 29541 - protein, 12 aa, synthetic construct
ACDTGWGIDKLT

SEQ ID NO: 29542 - protein, 13 aa, synthetic construct
ACDTGWGIADKLI

SEQ ID NO: 29543 - protein, 12 aa, synthetic construct
ACDTGWGIDKLN

SEQ ID NO: 29544 - protein, 13 aa, synthetic construct
ACDTGWGITDTLI

SEQ ID NO: 29545 - protein, 13 aa, synthetic construct
ACAKGYGYTDKLI

SEQ ID NO: 29546 - protein, 13 aa, synthetic construct
AGDSVLGETDKLI

SEQ ID NO: 29547 - protein, 14 aa, synthetic construct
ACALGDTPDTDKLI

SEQ ID NO: 29548 - protein, 15 aa, synthetic construct
ACDTGIRDSWYTRQM

SEQ ID NO: 29549 - protein, 15 aa, synthetic construct
ACDTGWGTPYTDELI

SEQ ID NO: 29550 - protein, 15 aa, synthetic construct
ACDTGWGTPYADKLI

SEQ ID NO: 29551 - protein, 15 aa, synthetic construct
ACDTGLGDTATDKLI

SEQ ID NO: 29552 - protein, 12 aa, synthetic construct
ACDTGLGPDKLI

SEQ ID NO: 29553 - protein, 13 aa, synthetic construct
ACDTGNRHTDKLI

SEQ ID NO: 29554 - protein, 14 aa, synthetic construct
AGDLGDTPDTDKLI

SEQ ID NO: 29555 - protein, 13 aa, synthetic construct
AGDILGDTYDKLI

SEQ ID NO: 29556 - protein, 12 aa, synthetic construct
ACDTGWGSVKLI

SEQ ID NO: 29557 - protein, 12 aa, synthetic construct
VCDTRGYADKLI

SEQ ID NO: 29558 - protein, 15 aa, synthetic construct
ACDTGRGAPYTDKLI

SEQ ID NO: 29559 - protein, 15 aa, synthetic construct
ACDTGRGGPYTDKLI

SEQ ID NO: 29560 - protein, 12 aa, synthetic construct
ACVTLGDTDKLI

SEQ ID NO: 29561 - protein, 12 aa, synthetic construct
ACDTGRGIDKLI

SEQ ID NO: 29562 - protein, 10 aa, synthetic construct
ACEGRADKLI

SEQ ID NO: 29563 - protein, 10 aa, synthetic construct
VCDTSGGLLI

SEQ ID NO: 29564 - protein, 13 aa, synthetic construct
ACDTGWGPSINSS

SEQ ID NO: 29565 - protein, 13 aa, synthetic construct
ACEHWGIDTDKLI

SEQ ID NO: 29566 - protein, 15 aa, synthetic construct
ACDTGWGPRTPRNSS

SEQ ID NO: 29567 - protein, 13 aa, synthetic construct
ACDTGWGLTDKLI

SEQ ID NO: 29568 - protein, 15 aa, synthetic construct
VCDTYWGIRNTDKLI

SEQ ID NO: 29569 - protein, 13 aa, synthetic construct
ACDTGWGITYKLI

SEQ ID NO: 29570 - protein, 12 aa, synthetic construct
ACVTRGYADKLI

SEQ ID NO: 29571 - protein, 11 aa, synthetic construct
ACVDTKTDKLI

SEQ ID NO: 29572 - protein, 14 aa, synthetic construct
ACDYWGSPYTDKLI

SEQ ID NO: 29573 - protein, 12 aa, synthetic construct
ACDTLGDTDILI

SEQ ID NO: 29574 - protein, 13 aa, synthetic construct
ACRTGGPYTDNSS

SEQ ID NO: 29575 - protein, 10 aa, synthetic construct
ACERRADELI

SEQ ID NO: 29576 - protein, 12 aa, synthetic construct
ACDTGDTTDKLT

SEQ ID NO: 29577 - protein, 15 aa, synthetic construct
ACDCCTGGYRGDNLI

SEQ ID NO: 29578 - protein, 12 aa, synthetic construct
ACDTGDTTDNSS

SEQ ID NO: 29579 - protein, 15 aa, synthetic construct
ACDCCTGGYRGDKLV

SEQ ID NO: 29580 - protein, 12 aa, synthetic construct
ACDTGDTTDTLI

SEQ ID NO: 29581 - protein, 13 aa, synthetic construct
ACRTGGPYTDKPI

SEQ ID NO: 29582 - protein, 13 aa, synthetic construct
ACDTGDTTNDKLI

SEQ ID NO: 29583 - protein, 13 aa, synthetic construct
ACDTGDTYSDKLI

SEQ ID NO: 29584 - protein, 13 aa, synthetic construct
ACDTLFWGPYKLI

SEQ ID NO: 29585 - protein, 13 aa, synthetic construct
ACDTGDTYTDELI

SEQ ID NO: 29586 - protein, 15 aa, synthetic construct
ACDCCTGGYRGDELI

SEQ ID NO: 29587 - protein, 12 aa, synthetic construct
ACDTGGGSVKLV

SEQ ID NO: 29588 - protein, 13 aa, synthetic construct
TCDRTGGTPINSS

SEQ ID NO: 29589 - protein, 13 aa, synthetic construct
ACDTGDTYTDQLI

SEQ ID NO: 29590 - protein, 13 aa, synthetic construct
ACDTGDTYTDRLI

SEQ ID NO: 29591 - protein, 13 aa, synthetic construct
ACDTGDTYTEKLI

SEQ ID NO: 29592 - protein, 13 aa, synthetic construct
ACDTGDTYTVKLI

SEQ ID NO: 29593 - protein, 12 aa, synthetic construct
AREPGDNPDKLI

SEQ ID NO: 29594 - protein, 13 aa, synthetic construct
ACDTGEGATDKLI

SEQ ID NO: 29595 - protein, 13 aa, synthetic construct
ACDTGEGGTDKLI

SEQ ID NO: 29596 - protein, 13 aa, synthetic construct
ARDTVRGNTDKLI

SEQ ID NO: 29597 - protein, 15 aa, synthetic construct
ARDTVGISSWDTRQM

SEQ ID NO: 29598 - protein, 12 aa, synthetic construct
TCDTEGDTDKLI

SEQ ID NO: 29599 - protein, 13 aa, synthetic construct
TCDKLGVYTDKLI

SEQ ID NO: 29600 - protein, 11 aa, synthetic construct
ACDTLFWGTTH

SEQ ID NO: 29601 - protein, 17 aa, synthetic construct
ACDTLFWGVRQTDDKLI

SEQ ID NO: 29602 - protein, 12 aa, synthetic construct
ACDTGDTSDKLI

SEQ ID NO: 29603 - protein, 12 aa, synthetic construct
ACDTGDRTDKLN

SEQ ID NO: 29604 - protein, 12 aa, synthetic construct
ACDTGDRTDKLT

SEQ ID NO: 29605 - protein, 12 aa, synthetic construct
ACDTGDRTDKLV

SEQ ID NO: 29606 - protein, 12 aa, synthetic construct
ACDTGDRTDKPI

SEQ ID NO: 29607 - protein, 13 aa, synthetic construct
ACRTGGPNTDKLI

SEQ ID NO: 29608 - protein, 6 aa, synthetic construct
SPHKLI

SEQ ID NO: 29609 - protein, 14 aa, synthetic construct
ACDYWGFLTPINSS

SEQ ID NO: 29610 - protein, 15 aa, synthetic construct
ACDCFTGGYRGDKLI

SEQ ID NO: 29611 - protein, 12 aa, synthetic construct
ACDTGDRTGKLI

SEQ ID NO: 29612 - protein, 13 aa, synthetic construct
ASDKLGVYTDKLI

SEQ ID NO: 29613 - protein, 13 aa, synthetic construct
ACDTGDSQTDKLI

SEQ ID NO: 29614 - protein, 13 aa, synthetic construct
ACRTGGPYTDELI

SEQ ID NO: 29615 - protein, 12 aa, synthetic construct
ASDIGGYADKLI

SEQ ID NO: 29616 - protein, 14 aa, synthetic construct
ACDTGDTHTPINSS

SEQ ID NO: 29617 - protein, 12 aa, synthetic construct
ACDTGDTNDKLI

SEQ ID NO: 29618 - protein, 13 aa, synthetic construct
ACDTGDTPNDKLN

SEQ ID NO: 29619 - protein, 13 aa, synthetic construct
ACDTGDTPNDKLT

SEQ ID NO: 29620 - protein, 13 aa, synthetic construct
ACDTGDTPNDKLV

SEQ ID NO: 29621 - protein, 13 aa, synthetic construct
ACDTGDTPNDKPI

SEQ ID NO: 29622 - protein, 13 aa, synthetic construct
ACDTGDTPNDNLI

SEQ ID NO: 29623 - protein, 13 aa, synthetic construct
ACDTGDTPNGKLI

SEQ ID NO: 29624 - protein, 13 aa, synthetic construct
ACDTGDTPTDKLI

SEQ ID NO: 29625 - protein, 16 aa, synthetic construct
TCDAAVGDTRRTDKLI

SEQ ID NO: 29626 - protein, 16 aa, synthetic construct
ACDCCTGGYGTPINSS

SEQ ID NO: 29627 - protein, 15 aa, synthetic construct
ACDCCTGGYGHRQTH

SEQ ID NO: 29628 - protein, 15 aa, synthetic construct
ACDTGEGLGAVDKHI

SEQ ID NO: 29629 - protein, 13 aa, synthetic construct
ACDTGEGVTYKLI

SEQ ID NO: 29630 - protein, 13 aa, synthetic construct
ARDTGDRHTDKLI

SEQ ID NO: 29631 - protein, 12 aa, synthetic construct
ARDTEGDTDKLI

SEQ ID NO: 29632 - protein, 13 aa, synthetic construct
ACRTRGPYTDKLI

SEQ ID NO: 29633 - protein, 10 aa, synthetic construct
ACDAWGPKLI

SEQ ID NO: 29634 - protein, 14 aa, synthetic construct
ARDSNWGDTGDKLI

SEQ ID NO: 29635 - protein, 13 aa, synthetic construct
ARDRTGGYTDKLI

SEQ ID NO: 29636 - protein, 12 aa, synthetic construct
ACDTGGDPDKLI

SEQ ID NO: 29637 - protein, 13 aa, synthetic construct
ARDNTGGYHDKLI

SEQ ID NO: 29638 - protein, 13 aa, synthetic construct
ACDTGGDYTDKLI

SEQ ID NO: 29639 - protein, 15 aa, synthetic construct
TCDTVLGDTATDKLI

SEQ ID NO: 29640 - protein, 17 aa, synthetic construct
ACDTLFWGIRQTDAKLI

SEQ ID NO: 29641 - protein, 13 aa, synthetic construct
ARDKLGVYTDKLI

SEQ ID NO: 29642 - protein, 13 aa, synthetic construct
ARDKLGVHTDKLI

SEQ ID NO: 29643 - protein, 13 aa, synthetic construct
ACDTGGGITDKLI

SEQ ID NO: 29644 - protein, 12 aa, synthetic construct
ACDTGGGPDKLI

SEQ ID NO: 29645 - protein, 17 aa, synthetic construct
ACDTLFWGIRQADDKLI

SEQ ID NO: 29646 - protein, 15 aa, synthetic construct
ACVAGSGGPYTDKLI

SEQ ID NO: 29647 - protein, 15 aa, synthetic construct
ARDCCTGGYRGDKLI

SEQ ID NO: 29648 - protein, 15 aa, synthetic construct
ACDALLGDTATDKLI

SEQ ID NO: 29649 - protein, 6 aa, synthetic construct
APYKLI

SEQ ID NO: 29650 - protein, 12 aa, synthetic construct
ACDTGGGSVKII

SEQ ID NO: 29651 - protein, 12 aa, synthetic construct
ACDTGGGSVKLF

SEQ ID NO: 29652 - protein, 6 aa, synthetic construct
APRKLI

SEQ ID NO: 29653 - protein, 13 aa, synthetic construct
ARDTGDTPNDKLI

SEQ ID NO: 29654 - protein, 14 aa, synthetic construct
ACDYWGIPYTEKLI

SEQ ID NO: 29655 - protein, 15 aa, synthetic construct
ACDTGEGLGAVDKII

SEQ ID NO: 29656 - protein, 13 aa, synthetic construct
ACDTGEGVTNKLI

SEQ ID NO: 29657 - protein, 13 aa, synthetic construct
ACRTGGPYTGKLI

SEQ ID NO: 29658 - protein, 15 aa, synthetic construct
ACDTGEGLGAVDKLT

SEQ ID NO: 29659 - protein, 15 aa, synthetic construct
ACDTGEGLGAVDKLV

SEQ ID NO: 29660 - protein, 13 aa, synthetic construct
TCDTGDTYTDKLI

SEQ ID NO: 29661 - protein, 15 aa, synthetic construct
ACDTGEGLGAVDNSS

SEQ ID NO: 29662 - protein, 10 aa, synthetic construct
ARDTSGDKLI

SEQ ID NO: 29663 - protein, 14 aa, synthetic construct
ACDYWGIPYTDKLN

SEQ ID NO: 29664 - protein, 12 aa, synthetic construct
ARDTRGYADKLT

SEQ ID NO: 29665 - protein, 14 aa, synthetic construct
ACDYWGIPYTDKPI

SEQ ID NO: 29666 - protein, 15 aa, synthetic construct
ACDTGEGLRAVDKLI

SEQ ID NO: 29667 - protein, 17 aa, synthetic construct
ACDTLFWGIRQTDYKLI

SEQ ID NO: 29668 - protein, 15 aa, synthetic construct
ACDCCNGGYRGDKLI

SEQ ID NO: 29669 - protein, 17 aa, synthetic construct
ACDTLFWGIRQTDDRLI

SEQ ID NO: 29670 - protein, 15 aa, synthetic construct
ACDTGEGVGAVDKLI

SEQ ID NO: 29671 - protein, 13 aa, synthetic construct
ACRTGGQYTDKLI

SEQ ID NO: 29672 - protein, 15 aa, synthetic construct
ACDCCIGGYRGDKLI

SEQ ID NO: 29673 - protein, 14 aa, synthetic construct
ACDYWGIPYTDTLI

SEQ ID NO: 29674 - protein, 14 aa, synthetic construct
ARDTGGYPYTDKLI

SEQ ID NO: 29675 - protein, 12 aa, synthetic construct
TCDTLGDTDKLI

SEQ ID NO: 29676 - protein, 13 aa, synthetic construct
ACDAYWGPTDKLI

SEQ ID NO: 29677 - protein, 13 aa, synthetic construct
ACDTGEGVTDKLV

SEQ ID NO: 29678 - protein, 17 aa, synthetic construct
ACDTLFWGIRQTDDKPI

SEQ ID NO: 29679 - protein, 15 aa, synthetic construct
ACDAYWGIRNTDKLI

SEQ ID NO: 29680 - protein, 15 aa, synthetic construct
ACDCCTGGYQGDKLI

SEQ ID NO: 29681 - protein, 12 aa, synthetic construct
ACDTGWGIDKHI

SEQ ID NO: 29682 - protein, 13 aa, synthetic construct
ACDHWGIDTNKPI

SEQ ID NO: 29683 - protein, 14 aa, synthetic construct
ACDTRWGAGEDKLI

SEQ ID NO: 29684 - protein, 15 aa, synthetic construct
DCDTGEGLGAVDKLI

SEQ ID NO: 29685 - protein, 13 aa, synthetic construct
ACDKLGETPINSS

SEQ ID NO: 29686 - protein, 13 aa, synthetic construct
ACDNTGRYHDKLI

SEQ ID NO: 29687 - protein, 11 aa, synthetic construct
ACGIRRPINSS

SEQ ID NO: 29688 - protein, 12 aa, synthetic construct
DCDTGDTTDKLI

SEQ ID NO: 29689 - protein, 13 aa, synthetic construct
ACDNWGIDTDKLI

SEQ ID NO: 29690 - protein, 13 aa, synthetic construct
DCDTGDTPNDKLI

SEQ ID NO: 29691 - protein, 16 aa, synthetic construct
ACDPAVGDTRRTDKLI

SEQ ID NO: 29692 - protein, 14 aa, synthetic construct
ACDTRWGAGVDKLI

SEQ ID NO: 29693 - protein, 13 aa, synthetic construct
ACDPDWGPTDKLI

SEQ ID NO: 29694 - protein, 14 aa, synthetic construct
ACDTRWGAGDVKLI

SEQ ID NO: 29695 - protein, 13 aa, synthetic construct
ACDNTGGYHVKLI

SEQ ID NO: 29696 - protein, 14 aa, synthetic construct
ACDTRWGAGDGKLI

SEQ ID NO: 29697 - protein, 12 aa, synthetic construct
ACGLLGDTEKLI

SEQ ID NO: 29698 - protein, 12 aa, synthetic construct
ACDPGDTTDKLI

SEQ ID NO: 29699 - protein, 10 aa, synthetic construct
DCDTCGPKLI

SEQ ID NO: 29700 - protein, 13 aa, synthetic construct
ACDPHWGPTDKLI

SEQ ID NO: 29701 - protein, 12 aa, synthetic construct
ACDPLGDTDKLI

SEQ ID NO: 29702 - protein, 13 aa, synthetic construct
ACDPNWGPTDKLI

SEQ ID NO: 29703 - protein, 16 aa, synthetic construct
ACDTAGGDTRRTDKLI

SEQ ID NO: 29704 - protein, 14 aa, synthetic construct
ACDTRWGAGDDKLV

SEQ ID NO: 29705 - protein, 13 aa, synthetic construct
ACDKGYVYTDKLI

SEQ ID NO: 29706 - protein, 13 aa, synthetic construct
ACDNTGGYNDKLI

SEQ ID NO: 29707 - protein, 13 aa, synthetic construct
ACDNTGGYHGKLI

SEQ ID NO: 29708 - protein, 13 aa, synthetic construct
ACDKGYGYTNKLI

SEQ ID NO: 29709 - protein, 10 aa, synthetic construct
ACGDTPINSS

SEQ ID NO: 29710 - protein, 12 aa, synthetic construct
ACDNGGGSVKLI

SEQ ID NO: 29711 - protein, 12 aa, synthetic construct
ACDNGGNTDKLI

SEQ ID NO: 29712 - protein, 12 aa, synthetic construct
ACDNGRGPDKLI

SEQ ID NO: 29713 - protein, 13 aa, synthetic construct
ACDKLGVYTDKLF

SEQ ID NO: 29714 - protein, 11 aa, synthetic construct
ACGDTKTDTLI

SEQ ID NO: 29715 - protein, 13 aa, synthetic construct
ACDTVRGNPDKLI

SEQ ID NO: 29716 - protein, 13 aa, synthetic construct
ACDTVRGNPDKVI

SEQ ID NO: 29717 - protein, 10 aa, synthetic construct
ACDTSGANLI

SEQ ID NO: 29718 - protein, 14 aa, synthetic construct
ACDNRWGAGDDKLI

SEQ ID NO: 29719 - protein, 12 aa, synthetic construct
ACETLGDTDKLI

SEQ ID NO: 29720 - protein, 17 aa, synthetic construct
ACETLFWGIRQTDDKLI

SEQ ID NO: 29721 - protein, 13 aa, synthetic construct
ACDNTGGYHEKLI

SEQ ID NO: 29722 - protein, 11 aa, synthetic construct
ACGDTTTDKLI

SEQ ID NO: 29723 - protein, 13 aa, synthetic construct
ACDKLGVNTDKLI

SEQ ID NO: 29724 - protein, 13 aa, synthetic construct
ACDNTGGHHDKLI

SEQ ID NO: 29725 - protein, 13 aa, synthetic construct
ACDTVRGNTDKLV

SEQ ID NO: 29726 - protein, 13 aa, synthetic construct
ACDNTGGSHDKLI

SEQ ID NO: 29727 - protein, 14 aa, synthetic construct
ACDTRWGVGDDKLI

SEQ ID NO: 29728 - protein, 13 aa, synthetic construct
ACDNTGGYHDILI

SEQ ID NO: 29729 - protein, 13 aa, synthetic construct
ACDTVRGNTDNLI

SEQ ID NO: 29730 - protein, 13 aa, synthetic construct
ACDNTGGYHDKLV

SEQ ID NO: 29731 - protein, 13 aa, synthetic construct
ACDNTGGYHDQLI

SEQ ID NO: 29732 - protein, 13 aa, synthetic construct
DCDRTGGYTDKLI

SEQ ID NO: 29733 - protein, 13 aa, synthetic construct
ACDKGYGYTGKLI

SEQ ID NO: 29734 - protein, 10 aa, synthetic construct
ACDTSGDQLI

SEQ ID NO: 29735 - protein, 12 aa, synthetic construct
AYDTLGDTDKLI

SEQ ID NO: 29736 - protein, 12 aa, synthetic construct
ACDIVGNTDKLI

SEQ ID NO: 29737 - protein, 12 aa, synthetic construct
ACDTRGYAGKLI

SEQ ID NO: 29738 - protein, 11 aa, synthetic construct
PGNRGIIPINS

SEQ ID NO: 29739 - protein, 14 aa, synthetic construct
AYDYWGIPYTDKLI

SEQ ID NO: 29740 - protein, 12 aa, synthetic construct
ACDRGDYNDKLI

SEQ ID NO: 29741 - protein, 13 aa, synthetic construct
ACDILWDTYDKLI

SEQ ID NO: 29742 - protein, 12 aa, synthetic construct
ACDRGDYTDILI

SEQ ID NO: 29743 - protein, 12 aa, synthetic construct
ACDRGDYTDKHI

SEQ ID NO: 29744 - protein, 12 aa, synthetic construct
ACDTRGYADTLI

SEQ ID NO: 29745 - protein, 12 aa, synthetic construct
ACDRGDYTDKLF

SEQ ID NO: 29746 - protein, 12 aa, synthetic construct
ACDRGDYTDKLS

SEQ ID NO: 29747 - protein, 10 aa, synthetic construct
PCDTWGPKLI

SEQ ID NO: 29748 - protein, 12 aa, synthetic construct
AYDTGRGPDKLI

SEQ ID NO: 29749 - protein, 12 aa, synthetic construct
AYDTGGYPDKLI

SEQ ID NO: 29750 - protein, 12 aa, synthetic construct
ACDTWGDTDKLI

SEQ ID NO: 29751 - protein, 15 aa, synthetic construct
ACETGAGLGAVDKLI

SEQ ID NO: 29752 - protein, 12 aa, synthetic construct
ACDRGGYAEKLI

SEQ ID NO: 29753 - protein, 12 aa, synthetic construct
ACDRGVYTDKLI

SEQ ID NO: 29754 - protein, 13 aa, synthetic construct
AYDPYWGPTDKLI

SEQ ID NO: 29755 - protein, 13 aa, synthetic construct
ACDRLGVYTDKLI

SEQ ID NO: 29756 - protein, 10 aa, synthetic construct
ACDTWGPELI

SEQ ID NO: 29757 - protein, 12 aa, synthetic construct
ACDTRGYADKLN

SEQ ID NO: 29758 - protein, 12 aa, synthetic construct
ACDTRGYAYKLI

SEQ ID NO: 29759 - protein, 12 aa, synthetic construct
ACDRGDCTDKLI

SEQ ID NO: 29760 - protein, 13 aa, synthetic construct
DCDNTGGYHDKLI

SEQ ID NO: 29761 - protein, 13 aa, synthetic construct
PCDPYWGPTDKLI

SEQ ID NO: 29762 - protein, 10 aa, synthetic construct
DCDNSGGLLI

SEQ ID NO: 29763 - protein, 13 aa, synthetic construct
ACDTRVRGTDKLI

SEQ ID NO: 29764 - protein, 13 aa, synthetic construct
ACDPYWEPTDKLI

SEQ ID NO: 29765 - protein, 13 aa, synthetic construct
ACDKGYGYTDKPI

SEQ ID NO: 29766 - protein, 15 aa, synthetic construct
ACDTRSGGPYTDKLI

SEQ ID NO: 29767 - protein, 14 aa, synthetic construct
DCDMYWGPNTDKLI

SEQ ID NO: 29768 - protein, 13 aa, synthetic construct
ACDKGYGSTDKLI

SEQ ID NO: 29769 - protein, 13 aa, synthetic construct
ACDKGYGCTDKLI

SEQ ID NO: 29770 - protein, 13 aa, synthetic construct
ACDPYWGPTDKLN

SEQ ID NO: 29771 - protein, 13 aa, synthetic construct
ACDPYWGPTDKLV

SEQ ID NO: 29772 - protein, 13 aa, synthetic construct
ACDPYWGPTGKLI

SEQ ID NO: 29773 - protein, 12 aa, synthetic construct
ACDTRGYDDKLI

SEQ ID NO: 29774 - protein, 13 aa, synthetic construct
ACDPYWGRTDKLI

SEQ ID NO: 29775 - protein, 13 aa, synthetic construct
ACDPYWGTPINSS

SEQ ID NO: 29776 - protein, 13 aa, synthetic construct
ACDTWDRHTDKLI

SEQ ID NO: 29777 - protein, 12 aa, synthetic construct
ACDQGDTGDKLI

SEQ ID NO: 29778 - protein, 12 aa, synthetic construct
PCDTRGYADKLI

SEQ ID NO: 29779 - protein, 13 aa, synthetic construct
DCDKLGVYTDKHI

SEQ ID NO: 29780 - protein, 13 aa, synthetic construct
ACGPTGEPHRYTH

SEQ ID NO: 29781 - protein, 13 aa, synthetic construct
ACDQLGVYTDKLI

SEQ ID NO: 29782 - protein, 13 aa, synthetic construct
DCDILGDTYDKLI

SEQ ID NO: 29783 - protein, 12 aa, synthetic construct
ACDTRGYPDKLI

SEQ ID NO: 29784 - protein, 13 aa, synthetic construct
ACDKLGVYTDKPI

SEQ ID NO: 29785 - protein, 10 aa, synthetic construct
ACDTSGDRLI

SEQ ID NO: 29786 - protein, 13 aa, synthetic construct
ACDILGDTPINSS

SEQ ID NO: 29787 - protein, 12 aa, synthetic construct
ACDLGDNPDKLI

SEQ ID NO: 29788 - protein, 11 aa, synthetic construct
ACEVEDTDTLI

SEQ ID NO: 29789 - protein, 11 aa, synthetic construct
ACEVEDTEKLI

SEQ ID NO: 29790 - protein, 12 aa, synthetic construct
ACDLGIRAINSS

SEQ ID NO: 29791 - protein, 11 aa, synthetic construct
ACEVEGTDKLI

SEQ ID NO: 29792 - protein, 14 aa, synthetic construct
ACDLGDPPDTDKLI

SEQ ID NO: 29793 - protein, 15 aa, synthetic construct
ACDTVGISSWDTRQI

SEQ ID NO: 29794 - protein, 14 aa, synthetic construct
ACDLGYTPDTDKLI

SEQ ID NO: 29795 - protein, 12 aa, synthetic construct
ACDLLADTDKLI

SEQ ID NO: 29796 - protein, 14 aa, synthetic construct
ACDTVGISSWDTDR

SEQ ID NO: 29797 - protein, 12 aa, synthetic construct
ACDLGDPGDKLI

SEQ ID NO: 29798 - protein, 12 aa, synthetic construct
ACDLLGDNDKLI

SEQ ID NO: 29799 - protein, 14 aa, synthetic construct
ACDLGDPPDTYKLI

SEQ ID NO: 29800 - protein, 12 aa, synthetic construct
ACDLLGDPDKLI

SEQ ID NO: 29801 - protein, 12 aa, synthetic construct
ACDLLGDTAKLI

SEQ ID NO: 29802 - protein, 14 aa, synthetic construct
ACDLLGDTATDKLI

SEQ ID NO: 29803 - protein, 12 aa, synthetic construct
ACDLLGDTDKII

SEQ ID NO: 29804 - protein, 15 aa, synthetic construct
ACDTVLGDTDTDKLI

SEQ ID NO: 29805 - protein, 12 aa, synthetic construct
ACDLLGDTDKLS

SEQ ID NO: 29806 - protein, 12 aa, synthetic construct
GCDTLGDTDKLI

SEQ ID NO: 29807 - protein, 12 aa, synthetic construct
ACDLLGDTDKPI

SEQ ID NO: 29808 - protein, 15 aa, synthetic construct
ACDTVLGDTGGINSS

SEQ ID NO: 29809 - protein, 14 aa, synthetic construct
ACDLGDAPDTDKLI

SEQ ID NO: 29810 - protein, 15 aa, synthetic construct
ACDTVGTSSWDTRQM

SEQ ID NO: 29811 - protein, 13 aa, synthetic construct
GCDTGWGITDKLI

SEQ ID NO: 29812 - protein, 12 aa, synthetic construct
ACDLLGDTVKLI

SEQ ID NO: 29813 - protein, 14 aa, synthetic construct
ACDLGDTPDTDKLV

SEQ ID NO: 29814 - protein, 12 aa, synthetic construct
ACDLGDTGDRLI

SEQ ID NO: 29815 - protein, 15 aa, synthetic construct
ACDTVLGDTATDKLV

SEQ ID NO: 29816 - protein, 15 aa, synthetic construct
ACDTVLGDTATDKLT

SEQ ID NO: 29817 - protein, 12 aa, synthetic construct
ACDLGDTGDKLT

SEQ ID NO: 29818 - protein, 15 aa, synthetic construct
ACETVLGDTATDKLI

SEQ ID NO: 29819 - protein, 15 aa, synthetic construct
GCDTGEGLGAVDKLI

SEQ ID NO: 29820 - protein, 12 aa, synthetic construct
GCDTGGGSVKLI

SEQ ID NO: 29821 - protein, 15 aa, synthetic construct
ACDTVLGDTATDILI

SEQ ID NO: 29822 - protein, 14 aa, synthetic construct
ACDLGDTPDTDKLN

SEQ ID NO: 29823 - protein, 14 aa, synthetic construct
ACDLGDTPDTDKLT

SEQ ID NO: 29824 - protein, 14 aa, synthetic construct
ACDLGDTPDTDKPI

SEQ ID NO: 29825 - protein, 12 aa, synthetic construct
ACDLGDYTDKLI

SEQ ID NO: 29826 - protein, 11 aa, synthetic construct
ACEVEDTDELI

SEQ ID NO: 29827 - protein, 12 aa, synthetic construct
ACDLGDTCDKLI

SEQ ID NO: 29828 - protein, 14 aa, synthetic construct
ACDLGDTPDTGKLI

SEQ ID NO: 29829 - protein, 14 aa, synthetic construct
ACDLGDTPDTVKLI

SEQ ID NO: 29830 - protein, 15 aa, synthetic construct
ACDTVLGDTAADKLI

SEQ ID NO: 29831 - protein, 14 aa, synthetic construct
ACDLGDTPGTDKLI

SEQ ID NO: 29832 - protein, 14 aa, synthetic construct
ACDLGDTADTDKLI

SEQ ID NO: 29833 - protein, 11 aa, synthetic construct
ACEVEDTDNSS

SEQ ID NO: 29834 - protein, 12 aa, synthetic construct
ACDLGDTSINSS

SEQ ID NO: 29835 - protein, 11 aa, synthetic construct
ACEVEDTDRLI

SEQ ID NO: 29836 - protein, 14 aa, synthetic construct
ACDLGATPDTDKLI

SEQ ID NO: 29837 - protein, 12 aa, synthetic construct
ACDLLGETDKLI

SEQ ID NO: 29838 - protein, 12 aa, synthetic construct
ACDTSGDTDKLI

SEQ ID NO: 29839 - protein, 13 aa, synthetic construct
DCDTVRGNTDKLI

SEQ ID NO: 29840 - protein, 14 aa, synthetic construct
ACDMYWGLTPINSS

SEQ ID NO: 29841 - protein, 14 aa, synthetic construct
ACDMYWGPDTDKLI

SEQ ID NO: 29842 - protein, 10 aa, synthetic construct
ACDTSGINSS

SEQ ID NO: 29843 - protein, 14 aa, synthetic construct
ACDMYWGPITDKLI

SEQ ID NO: 29844 - protein, 14 aa, synthetic construct
ACDMYWGPKTDKLI

SEQ ID NO: 29845 - protein, 14 aa, synthetic construct
ACDMYWGPNPDKLI

SEQ ID NO: 29846 - protein, 14 aa, synthetic construct
DCDYWGIPYTDKLI

SEQ ID NO: 29847 - protein, 14 aa, synthetic construct
ACDMYWGPNTDKII

SEQ ID NO: 29848 - protein, 10 aa, synthetic construct
ACDTSGGLLN

SEQ ID NO: 29849 - protein, 14 aa, synthetic construct
ACDMYWGPNTDKLT

SEQ ID NO: 29850 - protein, 14 aa, synthetic construct
ACDMYWGPNTGKLI

SEQ ID NO: 29851 - protein, 10 aa, synthetic construct
ACDTSGNKLI

SEQ ID NO: 29852 - protein, 9 aa, synthetic construct
ACDTSGGLL

SEQ ID NO: 29853 - protein, 15 aa, synthetic construct
ACDTVQGDTATDKLI

SEQ ID NO: 29854 - protein, 10 aa, synthetic construct
ACDTSGGLHI

SEQ ID NO: 29855 - protein, 14 aa, synthetic construct
ACDMYWGSNTDKLI

SEQ ID NO: 29856 - protein, 16 aa, synthetic construct
ACDTSGGISSWDTRQM

SEQ ID NO: 29857 - protein, 14 aa, synthetic construct
ACDMYWRPNTDKLI

SEQ ID NO: 29858 - protein, 13 aa, synthetic construct
ACDNCGIDTDKLI

SEQ ID NO: 29859 - protein, 13 aa, synthetic construct
ACDKLGVYTDTLI

SEQ ID NO: 29860 - protein, 13 aa, synthetic construct
ACDKLGVYTDRLI

SEQ ID NO: 29861 - protein, 13 aa, synthetic construct
ACDNGDTYTDKLI

SEQ ID NO: 29862 - protein, 15 aa, synthetic construct
ACDMYWGIPYTDKLI

SEQ ID NO: 29863 - protein, 14 aa, synthetic construct
ACDMYGGPNTDKLI

SEQ ID NO: 29864 - protein, 12 aa, synthetic construct
ACDTVDTTDKLI

SEQ ID NO: 29865 - protein, 11 aa, synthetic construct
ACGDMKTDKLI

SEQ ID NO: 29866 - protein, 12 aa, synthetic construct
ACDLGATGDKLI

SEQ ID NO: 29867 - protein, 13 aa, synthetic construct
ACDLLGNHTDKLI

SEQ ID NO: 29868 - protein, 15 aa, synthetic construct
ACDTVCISSWDTRQM

SEQ ID NO: 29869 - protein, 12 aa, synthetic construct
ACDLLGYTDKLI

SEQ ID NO: 29870 - protein, 12 aa, synthetic construct
ACDLLWDTDKLI

SEQ ID NO: 29871 - protein, 12 aa, synthetic construct
ACDLMGDTDKLI

SEQ ID NO: 29872 - protein, 15 aa, synthetic construct
ACDTVLGDTGTDKLI

SEQ ID NO: 29873 - protein, 11 aa, synthetic construct
ACGDAKTDKLI

SEQ ID NO: 29874 - protein, 13 aa, synthetic construct
ACDTTGGYHDKLI

SEQ ID NO: 29875 - protein, 10 aa, synthetic construct
ACDTTGGLLI

SEQ ID NO: 29876 - protein, 14 aa, synthetic construct
ACDLWDTPDTDKLI

SEQ ID NO: 29877 - protein, 10 aa, synthetic construct
ACDTSGRLLI

SEQ ID NO: 29878 - protein, 10 aa, synthetic construct
GCDTWGPKLI

SEQ ID NO: 29879 - protein, 11 aa, synthetic construct
ACGDRKTDKLI

SEQ ID NO: 29880 - protein, 10 aa, synthetic construct
ACETSGDKLI

SEQ ID NO: 29881 - protein, 15 aa, synthetic construct
ACDTVLGETATDKLI

SEQ ID NO: 29882 - protein, 13 aa, synthetic construct
ACDMGDTPNDKLI

SEQ ID NO: 29883 - protein, 15 aa, synthetic construct
ACDTVLGIRPPINSS

SEQ ID NO: 29884 - protein, 12 aa, synthetic construct
DCYKRGYADKLI

SEQ ID NO: 29885 - protein, 11 aa, synthetic construct
ACGDTKNDKLI

SEQ ID NO: 29886 - protein, 12 aa, synthetic construct
ACDTSGYADKLI

SEQ ID NO: 29887 - protein, 15 aa, synthetic construct
ACDTVLVDTATDKLI

SEQ ID NO: 29888 - protein, 10 aa, synthetic construct
ACDTWGPKHI

SEQ ID NO: 29889 - protein, 14 aa, synthetic construct
ACDTRWGAGDDKPI

SEQ ID NO: 29890 - protein, 12 aa, synthetic construct
ACDTRGYADKLF

SEQ ID NO: 29891 - protein, 13 aa, synthetic construct
ACDHWVIDTDKLI

SEQ ID NO: 29892 - protein, 13 aa, synthetic construct
ACDTRDRGTDEPI

SEQ ID NO: 29893 - protein, 14 aa, synthetic construct
ACDTPLGGIADKLI

SEQ ID NO: 29894 - protein, 13 aa, synthetic construct
ACDSVMVETDKLI

SEQ ID NO: 29895 - protein, 12 aa, synthetic construct
ACGTRGYADKLI

SEQ ID NO: 29896 - protein, 10 aa, synthetic construct
ACDTWGTKLI

SEQ ID NO: 29897 - protein, 14 aa, synthetic construct
ACDSKWGDTGDKLI

SEQ ID NO: 29898 - protein, 13 aa, synthetic construct
ACDTRDKGTDKPI

SEQ ID NO: 29899 - protein, 12 aa, synthetic construct
ACDIGGYTDKLI

SEQ ID NO: 29900 - protein, 10 aa, synthetic construct
ACDTWGSKLI

SEQ ID NO: 29901 - protein, 13 aa, synthetic construct
ACESVLGETDKLI

SEQ ID NO: 29902 - protein, 13 aa, synthetic construct
ACDSNWGKPINSS

SEQ ID NO: 29903 - protein, 12 aa, synthetic construct
ACDIGGYADKHI

SEQ ID NO: 29904 - protein, 12 aa, synthetic construct
ACGTGGYPDKLI

SEQ ID NO: 29905 - protein, 12 aa, synthetic construct
ACDIGGNTDKLS

SEQ ID NO: 29906 - protein, 12 aa, synthetic construct
ACDIGGNTDKII

SEQ ID NO: 29907 - protein, 13 aa, synthetic construct
ACGTGDTPNDKLI

SEQ ID NO: 29908 - protein, 15 aa, synthetic construct
ACDSGSGGPYTDKLI

SEQ ID NO: 29909 - protein, 13 aa, synthetic construct
ACDHWRIDTDKLI

SEQ ID NO: 29910 - protein, 12 aa, synthetic construct
ACDSGRGPDKLI

SEQ ID NO: 29911 - protein, 12 aa, synthetic construct
ACDLGDTGDNLI

SEQ ID NO: 29912 - protein, 13 aa, synthetic construct
ACDIGEGVTDKLI

SEQ ID NO: 29913 - protein, 10 aa, synthetic construct
ACDTWGPNSS

SEQ ID NO: 29914 - protein, 5 aa, synthetic construct
AWETH

SEQ ID NO: 29915 - protein, 12 aa, synthetic construct
ACDIGENTDKLI

SEQ ID NO: 29916 - protein, 13 aa, synthetic construct
PVTPGRGLPISSS

SEQ ID NO: 29917 - protein, 12 aa, synthetic construct
ACDIGGNTDRLI

SEQ ID NO: 29918 - protein, 13 aa, synthetic construct
ACDHWGMDTDKLI

SEQ ID NO: 29919 - protein, 11 aa, synthetic construct
AWGDTKTDKLI

SEQ ID NO: 29920 - protein, 12 aa, synthetic construct
ACDTMGDTDKLI

SEQ ID NO: 29921 - protein, 14 aa, synthetic construct
ACDIGGYGTPINSS

SEQ ID NO: 29922 - protein, 13 aa, synthetic construct
ACDTRDRGTEKPI

SEQ ID NO: 29923 - protein, 11 aa, synthetic construct
AWEPGETDKLI

SEQ ID NO: 29924 - protein, 13 aa, synthetic construct
ACDHYWGPTDKLI

SEQ ID NO: 29925 - protein, 14 aa, synthetic construct
PVTLWVSAPGTPDR

SEQ ID NO: 29926 - protein, 12 aa, synthetic construct
ACDIAGNTDKLI

SEQ ID NO: 29927 - protein, 12 aa, synthetic construct
ACDTQGDTDKLI

SEQ ID NO: 29928 - protein, 12 aa, synthetic construct
ACDIGGNTDNLI

SEQ ID NO: 29929 - protein, 14 aa, synthetic construct
ACDSNWGDTGDKPI

SEQ ID NO: 29930 - protein, 13 aa, synthetic construct
ACDSVLGETVKLI

SEQ ID NO: 29931 - protein, 14 aa, synthetic construct
ACDSNWGDTGDKLV

SEQ ID NO: 29932 - protein, 12 aa, synthetic construct
ACDIGGNTVKLI

SEQ ID NO: 29933 - protein, 14 aa, synthetic construct
ACDSNWGDTGGKLI

SEQ ID NO: 29934 - protein, 13 aa, synthetic construct
ACDSVLGETYKLI

SEQ ID NO: 29935 - protein, 12 aa, synthetic construct
AWEPGDNPDQLI

SEQ ID NO: 29936 - protein, 13 aa, synthetic construct
ACHHWGIDTDKLI

SEQ ID NO: 29937 - protein, 15 aa, synthetic construct
ACDSVLGETGGINSS

SEQ ID NO: 29938 - protein, 14 aa, synthetic construct
ACDTPLGCITDKLI

SEQ ID NO: 29939 - protein, 14 aa, synthetic construct
ACDSNWGDTGDKLM

SEQ ID NO: 29940 - protein, 14 aa, synthetic construct
ACDTWWGAGDDKLI

SEQ ID NO: 29941 - protein, 12 aa, synthetic construct
PVTRAGGSINSS

SEQ ID NO: 29942 - protein, 12 aa, synthetic construct
AWDTGDTTDKLI

SEQ ID NO: 29943 - protein, 12 aa, synthetic construct
AWEPGDNPDNSS

SEQ ID NO: 29944 - protein, 12 aa, synthetic construct
AWEPGDSPDKLI

SEQ ID NO: 29945 - protein, 17 aa, synthetic construct
ACDTPFWGIRQTDDNSS

SEQ ID NO: 29946 - protein, 14 aa, synthetic construct
ACDSNWGDTGDKFI

SEQ ID NO: 29947 - protein, 12 aa, synthetic construct
AWEPGDTPDKLI

SEQ ID NO: 29948 - protein, 12 aa, synthetic construct
ACDIGGSADKLI

SEQ ID NO: 29949 - protein, 17 aa, synthetic construct
ACDTPFWGIRQTDDKLI

SEQ ID NO: 29950 - protein, 13 aa, synthetic construct
AWDTGDTPNDKLI

SEQ ID NO: 29951 - protein, 13 aa, synthetic construct
ACDSVLGVTDKLI

SEQ ID NO: 29952 - protein, 13 aa, synthetic construct
AWEPGDTYTDKLI

SEQ ID NO: 29953 - protein, 7 aa, synthetic construct
ACDSNWG

SEQ ID NO: 29954 - protein, 12 aa, synthetic construct
AWEPGDYPDKLI

SEQ ID NO: 29955 - protein, 14 aa, synthetic construct
ACDSNWGGTGDKLI

SEQ ID NO: 29956 - protein, 14 aa, synthetic construct
ACGTGGYPYTDKLI

SEQ ID NO: 29957 - protein, 13 aa, synthetic construct
AWDKLGVYTDKLI

SEQ ID NO: 29958 - protein, 13 aa, synthetic construct
ACDSVLGETNKLI

SEQ ID NO: 29959 - protein, 13 aa, synthetic construct
ACHTGGPYTDKLI

SEQ ID NO: 29960 - protein, 11 aa, synthetic construct
AWVLGDTDKLI

SEQ ID NO: 29961 - protein, 10 aa, synthetic construct
ACDILGAQTH

SEQ ID NO: 29962 - protein, 13 aa, synthetic construct
ACDSVLGETDKHI

SEQ ID NO: 29963 - protein, 13 aa, synthetic construct
ACDSALGETDKLI

SEQ ID NO: 29964 - protein, 11 aa, synthetic construct
AWSVWGPYKLI

SEQ ID NO: 29965 - protein, 13 aa, synthetic construct
ACDTREGVTDKLI

SEQ ID NO: 29966 - protein, 13 aa, synthetic construct
ACDILGDNYDKLI

SEQ ID NO: 29967 - protein, 13 aa, synthetic construct
ACGSRDRGTDKPI

SEQ ID NO: 29968 - protein, 15 aa, synthetic construct
ACGTVGISSWDTRQM

SEQ ID NO: 29969 - protein, 13 aa, synthetic construct
ACDRTGGYTDTLI

SEQ ID NO: 29970 - protein, 14 aa, synthetic construct
ACDILGDTGGINSS

SEQ ID NO: 29971 - protein, 10 aa, synthetic construct
ACDTWGPKLV

SEQ ID NO: 29972 - protein, 13 aa, synthetic construct
ACDTRDTYTDKLI

SEQ ID NO: 29973 - protein, 12 aa, synthetic construct
ACDIGGKTDKLI

SEQ ID NO: 29974 - protein, 13 aa, synthetic construct
ACGRTGGTPINSS

SEQ ID NO: 29975 - protein, 11 aa, synthetic construct
ACGVTKTDKLI

SEQ ID NO: 29976 - protein, 12 aa, synthetic construct
ACDTRGDTDKLI

SEQ ID NO: 29977 - protein, 12 aa, synthetic construct
AWEPEDNPDKLI

SEQ ID NO: 29978 - protein, 13 aa, synthetic construct
ACDRTVGYTDKLI

SEQ ID NO: 29979 - protein, 12 aa, synthetic construct
PVTPWGIPINSS

SEQ ID NO: 29980 - protein, 9 aa, synthetic construct
PVTPKVKLI

SEQ ID NO: 29981 - protein, 12 aa, synthetic construct
ACDTRGFADKLI

SEQ ID NO: 29982 - protein, 10 aa, synthetic construct
ACDIGGINSS

SEQ ID NO: 29983 - protein, 12 aa, synthetic construct
ACDIGEYADKLI

SEQ ID NO: 29984 - protein, 13 aa, synthetic construct
ACDRTGRYTDKLI

SEQ ID NO: 29985 - protein, 14 aa, synthetic construct
ACDTLWGAGDDKLI

SEQ ID NO: 29986 - protein, 13 aa, synthetic construct
ACDSELGETDKLI

SEQ ID NO: 29987 - protein, 14 aa, synthetic construct
PVTCTGGLTPINSS

SEQ ID NO: 29988 - protein, 11 aa, synthetic construct
PVRWRTPINSS

SEQ ID NO: 29989 - protein, 12 aa, synthetic construct
ACHTGDTTDKLI

SEQ ID NO: 29990 - protein, 13 aa, synthetic construct
ACDRTGEYTDKLI

SEQ ID NO: 29991 - protein, 12 aa, synthetic construct
ACHTGGGSVKLI

SEQ ID NO: 29992 - protein, 13 aa, synthetic construct
ACDSVLGETDKII

SEQ ID NO: 29993 - protein, 10 aa, synthetic construct
ACGTCGPKLI

SEQ ID NO: 29994 - protein, 12 aa, synthetic construct
ACHTEGDTDKLI

SEQ ID NO: 29995 - protein, 11 aa, synthetic construct
AWAVWGPYRLI

SEQ ID NO: 29996 - protein, 12 aa, synthetic construct
ACDTRGYADKHI

SEQ ID NO: 29997 - protein, 15 aa, synthetic construct
ACDTLVGDTATDKLI

SEQ ID NO: 29998 - protein, 11 aa, synthetic construct
PVGIRRPIKSS

SEQ ID NO: 29999 - protein, 13 aa, synthetic construct
ACDTRGRGTDKLI

SEQ ID NO: 30000 - protein, 13 aa, synthetic construct
ACDRTGGYTDKLN

SEQ ID NO: 30001 - protein, 10 aa, synthetic construct
ACDSSGGLLI

SEQ ID NO: 30002 - protein, 10 aa, synthetic construct
ACDTWRPKLI

SEQ ID NO: 30003 - protein, 12 aa, synthetic construct
ACDIGGCADKLI

SEQ ID NO: 30004 - protein, 13 aa, synthetic construct
ACDRTGGYTDKPI

SEQ ID NO: 30005 - protein, 12 aa, synthetic construct
ACVSGDTTDKLI

SEQ ID NO: 30006 - protein, 12 aa, synthetic construct
ACVTGGGSVKLI

SEQ ID NO: 30007 - protein, 12 aa, synthetic construct
ACVRGDTGDKLI

SEQ ID NO: 30008 - protein, 15 aa, synthetic construct
ACGAGSGGPYTDKLI

SEQ ID NO: 30009 - protein, 12 aa, synthetic construct
ACVTGDTTDKLI

SEQ ID NO: 30010 - protein, 12 aa, synthetic construct
ACVTGDTTDKLT

SEQ ID NO: 30011 - protein, 12 aa, synthetic construct
ACEPGHNPQKLN

SEQ ID NO: 30012 - protein, 11 aa, synthetic construct
ACGAARAVKLI

SEQ ID NO: 30013 - protein, 10 aa, synthetic construct
ACVRRADKPI

SEQ ID NO: 30014 - protein, 13 aa, synthetic construct
ACPTGVPYTDKLI

SEQ ID NO: 30015 - protein, 14 aa, synthetic construct
ACHFWGIPYTDKLI

SEQ ID NO: 30016 - protein, 13 aa, synthetic construct
ACVTGDTPNDKLI

SEQ ID NO: 30017 - protein, 13 aa, synthetic construct
ACVPNGETQRKTN

SEQ ID NO: 30018 - protein, 10 aa, synthetic construct
ACELRDDKLI

SEQ ID NO: 30019 - protein, 12 aa, synthetic construct
ACELLGDTDKHI

SEQ ID NO: 30020 - protein, 12 aa, synthetic construct
ACNTGRGSVKLI

SEQ ID NO: 30021 - protein, 10 aa, synthetic construct
ACELRADKII

SEQ ID NO: 30022 - protein, 14 aa, synthetic construct
ACEMYWGPNTDKLI

SEQ ID NO: 30023 - protein, 11 aa, synthetic construct
ACGDPKTDTLI

SEQ ID NO: 30024 - protein, 11 aa, synthetic construct
ACGDPKTDKLI

SEQ ID NO: 30025 - protein, 14 aa, synthetic construct
ACNTRWGAGDDKLI

SEQ ID NO: 30026 - protein, 10 aa, synthetic construct
ACELRADKLI

SEQ ID NO: 30027 - protein, 10 aa, synthetic construct
ACENSGGLLI

SEQ ID NO: 30028 - protein, 16 aa, synthetic construct
ACVTAVGDTRRTDKLI

SEQ ID NO: 30029 - protein, 13 aa, synthetic construct
ACHAGDTPNDKLI

SEQ ID NO: 30030 - protein, 12 aa, synthetic construct
ACVTEGDTDKII

SEQ ID NO: 30031 - protein, 12 aa, synthetic construct
ACNTRGYADKLI

SEQ ID NO: 30032 - protein, 13 aa, synthetic construct
ACVSVLGETDILI

SEQ ID NO: 30033 - protein, 13 aa, synthetic construct
ACENTGGYHDKLI

SEQ ID NO: 30034 - protein, 11 aa, synthetic construct
ACGDKKTDKLI

SEQ ID NO: 30035 - protein, 11 aa, synthetic construct
ACGDTKPDKLI

SEQ ID NO: 30036 - protein, 10 aa, synthetic construct
ACNTSGDKLI

SEQ ID NO: 30037 - protein, 14 aa, synthetic construct
ACETRWGAVEDKLI

SEQ ID NO: 30038 - protein, 14 aa, synthetic construct
ACVSNWGDTGDKLI

SEQ ID NO: 30039 - protein, 12 aa, synthetic construct
ACVTEGDTDKLI

SEQ ID NO: 30040 - protein, 13 aa, synthetic construct
ACESVLGDTDKLI

SEQ ID NO: 30041 - protein, 10 aa, synthetic construct
ACNTSGGLLI

SEQ ID NO: 30042 - protein, 14 aa, synthetic construct
ACGYWGIPYTEKLI

SEQ ID NO: 30043 - protein, 13 aa, synthetic construct
ACENTVGYHDKLI

SEQ ID NO: 30044 - protein, 11 aa, synthetic construct
ACGYTKTDKLI

SEQ ID NO: 30045 - protein, 15 aa, synthetic construct
ACGCFTGGYRGDKLI

SEQ ID NO: 30046 - protein, 11 aa, synthetic construct
ACGDTKNYKLI

SEQ ID NO: 30047 - protein, 15 aa, synthetic construct
ACGCCTGGYRGDKLI

SEQ ID NO: 30048 - protein, 13 aa, synthetic construct
ACRTGGPYPDKLI

SEQ ID NO: 30049 - protein, 11 aa, synthetic construct
ACEVGDTDKLI

SEQ ID NO: 30050 - protein, 12 aa, synthetic construct
ACVTGGYPDKLI

SEQ ID NO: 30051 - protein, 14 aa, synthetic construct
ACVTGGYPYTDKLI

SEQ ID NO: 30052 - protein, 16 aa, synthetic construct
ACYIAVGDTRRTDKLI

SEQ ID NO: 30053 - protein, 13 aa, synthetic construct
ACYCVLGETDKLI

SEQ ID NO: 30054 - protein, 15 aa, synthetic construct
ACYCCTGGYRGYKLI

SEQ ID NO: 30055 - protein, 13 aa, synthetic construct
ACEKYCRTNKENL

SEQ ID NO: 30056 - protein, 11 aa, synthetic construct
ACWVTKTDKLI

SEQ ID NO: 30057 - protein, 14 aa, synthetic construct
ACESNWRDTGDKLI

SEQ ID NO: 30058 - protein, 10 aa, synthetic construct
ACETTGGLLI

SEQ ID NO: 30059 - protein, 11 aa, synthetic construct
ACEVDETDDLI

SEQ ID NO: 30060 - protein, 15 aa, synthetic construct
ACHTVLGDTATDKPI

SEQ ID NO: 30061 - protein, 10 aa, synthetic construct
ACHTWGPKLI

SEQ ID NO: 30062 - protein, 13 aa, synthetic construct
ACHYCGIDTDKLI

SEQ ID NO: 30063 - protein, 14 aa, synthetic construct
ACVYWGIHYTDKLI

SEQ ID NO: 30064 - protein, 11 aa, synthetic construct
ACELEYTDNLL

SEQ ID NO: 30065 - protein, 13 aa, synthetic construct
ACHSVLGETDKLI

SEQ ID NO: 30066 - protein, 11 aa, synthetic construct
ACEVEDTDKHI

SEQ ID NO: 30067 - protein, 10 aa, synthetic construct
ACETSVGLLI

SEQ ID NO: 30068 - protein, 10 aa, synthetic construct
ACHSSGGLLI

SEQ ID NO: 30069 - protein, 15 aa, synthetic construct
ACETYWGIRNTDKLI

SEQ ID NO: 30070 - protein, 12 aa, synthetic construct
ACYIGDTTDKLI

SEQ ID NO: 30071 - protein, 15 aa, synthetic construct
ACETYWGILNTDKLI

SEQ ID NO: 30072 - protein, 13 aa, synthetic construct
ACYNGDTYTDKLI

SEQ ID NO: 30073 - protein, 15 aa, synthetic construct
ACETVRGDTATDKLI

SEQ ID NO: 30074 - protein, 10 aa, synthetic construct
ACYNWGPKLI

SEQ ID NO: 30075 - protein, 15 aa, synthetic construct
ACETVLGDTATEKLV

SEQ ID NO: 30076 - protein, 10 aa, synthetic construct
ACYNSGGLLI

SEQ ID NO: 30077 - protein, 14 aa, synthetic construct
ACYNGGYPYTDKLI

SEQ ID NO: 30078 - protein, 10 aa, synthetic construct
ACHTSGGLLI

SEQ ID NO: 30079 - protein, 15 aa, synthetic construct
ACYNGEGMGAVDKLI

SEQ ID NO: 30080 - protein, 12 aa, synthetic construct
ACYNGDRTDKLI

SEQ ID NO: 30081 - protein, 13 aa, synthetic construct
ACYILWVYTDKLI

SEQ ID NO: 30082 - protein, 10 aa, synthetic construct
ACETWGPKLI

SEQ ID NO: 30083 - protein, 13 aa, synthetic construct
ACEKMGVYTDKLI

SEQ ID NO: 30084 - protein, 14 aa, synthetic construct
ACYMYCVPNTDKLI

SEQ ID NO: 30085 - protein, 13 aa, synthetic construct
ACYKLGVYTEKII

SEQ ID NO: 30086 - protein, 10 aa, synthetic construct
ACHTSGDKLI

SEQ ID NO: 30087 - protein, 13 aa, synthetic construct
ACYKGWVIKDKLI

SEQ ID NO: 30088 - protein, 15 aa, synthetic construct
ACHTVLGDTATDKLI

SEQ ID NO: 30089 - protein, 10 aa, synthetic construct
ACETSVDKLI

SEQ ID NO: 30090 - protein, 10 aa, synthetic construct
ACVTWGPKLI

SEQ ID NO: 30091 - protein, 12 aa, synthetic construct
ACELGATGDKLI

SEQ ID NO: 30092 - protein, 13 aa, synthetic construct
ACEYVLGETDKII

SEQ ID NO: 30093 - protein, 11 aa, synthetic construct
ACEVKDTDKLI

SEQ ID NO: 30094 - protein, 11 aa, synthetic construct
ACEVQDTDKLI

SEQ ID NO: 30095 - protein, 12 aa, synthetic construct
ACVTLGIPINSS

SEQ ID NO: 30096 - protein, 11 aa, synthetic construct
ACEWEDTDKLI

SEQ ID NO: 30097 - protein, 12 aa, synthetic construct
ACEYRGSNDLIL

SEQ ID NO: 30098 - protein, 13 aa, synthetic construct
ACHKLGVYTDKLI

SEQ ID NO: 30099 - protein, 13 aa, synthetic construct
ACHILGVYTDKLI

SEQ ID NO: 30100 - protein, 13 aa, synthetic construct
ACNNTGGYHDKLI

SEQ ID NO: 30101 - protein, 14 aa, synthetic construct
ACHKYWGPNTDKLI

SEQ ID NO: 30102 - protein, 17 aa, synthetic construct
ACVTLFWGIRQTDDKLI

SEQ ID NO: 30103 - protein, 13 aa, synthetic construct
ACHILGDTYDKLI

SEQ ID NO: 30104 - protein, 12 aa, synthetic construct
ACVTGWGSDKLI

SEQ ID NO: 30105 - protein, 12 aa, synthetic construct
ACVTGWGIDKLI

SEQ ID NO: 30106 - protein, 13 aa, synthetic construct
ACNRTGGYTDKLI

SEQ ID NO: 30107 - protein, 14 aa, synthetic construct
ACEYWGIPYTGQLI

SEQ ID NO: 30108 - protein, 15 aa, synthetic construct
ACVTGLGDTATDDLI

SEQ ID NO: 30109 - protein, 8 aa, synthetic construct
ACPYRGIN

SEQ ID NO: 30110 - protein, 14 aa, synthetic construct
ACNMYWGPNTDKLI

SEQ ID NO: 30111 - protein, 11 aa, synthetic construct
ACEVEDTDNLI

SEQ ID NO: 30112 - protein, 14 aa, synthetic construct
ACESHWGDTGDKLI

SEQ ID NO: 30113 - protein, 13 aa, synthetic construct
ACHRGDTPNDKLI

SEQ ID NO: 30114 - protein, 14 aa, synthetic construct
ACELGATPDTDKLI

SEQ ID NO: 30115 - protein, 16 aa, synthetic construct
ACKTHLIKSKTRESGT

SEQ ID NO: 30116 - protein, 10 aa, synthetic construct
ACVTSGGLLI

SEQ ID NO: 30117 - protein, 10 aa, synthetic construct
ACVTSGDKLI

SEQ ID NO: 30118 - protein, 13 aa, synthetic construct
ACLTGGPYTDKLI

SEQ ID NO: 30119 - protein, 13 aa, synthetic construct
ACLTGGQYTDKLI

SEQ ID NO: 30120 - protein, 12 aa, synthetic construct
ACHQLGDTDKLI

SEQ ID NO: 30121 - protein, 12 aa, synthetic construct
ACHNGRGPDKLI

SEQ ID NO: 30122 - protein, 12 aa, synthetic construct
ACELGDTGDKPI

SEQ ID NO: 30123 - protein, 11 aa, synthetic construct
ACEVEDTVKLI

SEQ ID NO: 30124 - protein, 13 aa, synthetic construct
ACHPYWGPTDKLI

SEQ ID NO: 30125 - protein, 10 aa, synthetic construct
ACESRADKLI

SEQ ID NO: 30126 - protein, 12 aa, synthetic construct
ACELGDTGEKLI

SEQ ID NO: 30127 - protein, 12 aa, synthetic construct
ACNLGDTGDKLI

SEQ ID NO: 30128 - protein, 11 aa, synthetic construct
ACEVEYTDKLI

SEQ ID NO: 30129 - protein, 13 aa, synthetic construct
ACVNTGGYHDKLI

SEQ ID NO: 30130 - protein, 11 aa, synthetic construct
ACETNGETQKL

SEQ ID NO: 30131 - protein, 12 aa, synthetic construct
ACETRVYADKLI

SEQ ID NO: 30132 - protein, 13 aa, synthetic construct
ACGPTGEPHRKTH

SEQ ID NO: 30133 - protein, 17 aa, synthetic construct
ACETAVGDTRLLGHPTD

SEQ ID NO: 30134 - protein, 11 aa, synthetic construct
ACGNTKTDKLI

SEQ ID NO: 30135 - protein, 13 aa, synthetic construct
ACGPNRDPHRETQ

SEQ ID NO: 30136 - protein, 13 aa, synthetic construct
ACGPPGDPHRYTH

SEQ ID NO: 30137 - protein, 13 aa, synthetic construct
ACERGGGITDKLM

SEQ ID NO: 30138 - protein, 13 aa, synthetic construct
ACGPTGDHTDKLI

SEQ ID NO: 30139 - protein, 13 aa, synthetic construct
ACGPTGDPHRSTH

SEQ ID NO: 30140 - protein, 13 aa, synthetic construct
ACETGGSATDKLI

SEQ ID NO: 30141 - protein, 13 aa, synthetic construct
ACGPTGEHTDKLI

SEQ ID NO: 30142 - protein, 13 aa, synthetic construct
ACETGEVVTNKLN

SEQ ID NO: 30143 - protein, 13 aa, synthetic construct
ACRTGDRTPINSS

SEQ ID NO: 30144 - protein, 13 aa, synthetic construct
ACRTGGAYTDKLI

SEQ ID NO: 30145 - protein, 13 aa, synthetic construct
ACGPTGEPDRYTD

SEQ ID NO: 30146 - protein, 13 aa, synthetic construct
ACGPTGEPHREPH

SEQ ID NO: 30147 - protein, 16 aa, synthetic construct
ACETAVGDTRRTDKLI

SEQ ID NO: 30148 - protein, 12 aa, synthetic construct
ACGTEGDTEKLI

SEQ ID NO: 30149 - protein, 10 aa, synthetic construct
ACERIADKLI

SEQ ID NO: 30150 - protein, 12 aa, synthetic construct
ACGTGDRTDQLI

SEQ ID NO: 30151 - protein, 12 aa, synthetic construct
ACERGDYTGKLI

SEQ ID NO: 30152 - protein, 13 aa, synthetic construct
ACRPGGPYTEKLI

SEQ ID NO: 30153 - protein, 12 aa, synthetic construct
ACETGWGIDKLI

SEQ ID NO: 30154 - protein, 15 aa, synthetic construct
ACGTGWEAPYTDKLI

SEQ ID NO: 30155 - protein, 12 aa, synthetic construct
ACGTGVGSVKLI

SEQ ID NO: 30156 - protein, 10 aa, synthetic construct
ACERRAENLL

SEQ ID NO: 30157 - protein, 13 aa, synthetic construct
ACRTGGSYTDKLI

SEQ ID NO: 30158 - protein, 14 aa, synthetic construct
ACGLGDTPDTDKLI

SEQ ID NO: 30159 - protein, 14 aa, synthetic construct
ACGTGGYPNTEKLI

SEQ ID NO: 30160 - protein, 12 aa, synthetic construct
ACGLLGDTDKLI

SEQ ID NO: 30161 - protein, 12 aa, synthetic construct
ACGMGVRGVIVV

SEQ ID NO: 30162 - protein, 12 aa, synthetic construct
ACETGGYPDKII

SEQ ID NO: 30163 - protein, 12 aa, synthetic construct
ACETGPGPDKLI

SEQ ID NO: 30164 - protein, 13 aa, synthetic construct
ACRTGGPYVDKLI

SEQ ID NO: 30165 - protein, 15 aa, synthetic construct
ACETGLGTPYTDKLI

SEQ ID NO: 30166 - protein, 12 aa, synthetic construct
ACETGLGPDKLI

SEQ ID NO: 30167 - protein, 14 aa, synthetic construct
ACGMYWGPNADKLI

SEQ ID NO: 30168 - protein, 13 aa, synthetic construct
ACRTGGPYTVKLI

SEQ ID NO: 30169 - protein, 12 aa, synthetic construct
ACERGDYTDKLI

SEQ ID NO: 30170 - protein, 15 aa, synthetic construct
ACETGEGVGAVDILI

SEQ ID NO: 30171 - protein, 13 aa, synthetic construct
ACRTGGPYTDQLI

SEQ ID NO: 30172 - protein, 14 aa, synthetic construct
ACETRSGAGDDKLI

SEQ ID NO: 30173 - protein, 12 aa, synthetic construct
ACETGEGSVKLI

SEQ ID NO: 30174 - protein, 10 aa, synthetic construct
ACERRADKHI

SEQ ID NO: 30175 - protein, 13 aa, synthetic construct
ACGPYWGTNDKII

SEQ ID NO: 30176 - protein, 13 aa, synthetic construct
ACRTGGPYTDKII

SEQ ID NO: 30177 - protein, 10 aa, synthetic construct
ACERRADKLV

SEQ ID NO: 30178 - protein, 10 aa, synthetic construct
ACGRRAEKLI

SEQ ID NO: 30179 - protein, 10 aa, synthetic construct
ACERRADKLN

SEQ ID NO: 30180 - protein, 13 aa, synthetic construct
ACETGDGGRDNPV

SEQ ID NO: 30181 - protein, 10 aa, synthetic construct
ACERRADKLL

SEQ ID NO: 30182 - protein, 10 aa, synthetic construct
ACERRADKHN

SEQ ID NO: 30183 - protein, 13 aa, synthetic construct
ACRTGGPYTDKHI

SEQ ID NO: 30184 - protein, 13 aa, synthetic construct
ACETGDAYTDQVV

SEQ ID NO: 30185 - protein, 12 aa, synthetic construct
ACETGATTDKLI

SEQ ID NO: 30186 - protein, 9 aa, synthetic construct
ACETEVQTH

SEQ ID NO: 30187 - protein, 13 aa, synthetic construct
ACRTGGPHTEKLI

SEQ ID NO: 30188 - protein, 14 aa, synthetic construct
ACGRGDTPDTDKLI

SEQ ID NO: 30189 - protein, 13 aa, synthetic construct
ACRTGGPYTAKLI

SEQ ID NO: 30190 - protein, 10 aa, synthetic construct
ACERRADKLF

SEQ ID NO: 30191 - protein, 11 aa, synthetic construct
ACGPTKTDKLI

SEQ ID NO: 30192 - protein, 10 aa, synthetic construct
ACGRSADKLI

SEQ ID NO: 30193 - protein, 13 aa, synthetic construct
ACRTGGPYTDKLT

SEQ ID NO: 30194 - protein, 16 aa, synthetic construct
ACGTAVGDTRRTDKLI

SEQ ID NO: 30195 - protein, 13 aa, synthetic construct
ACETGDTYTDELI

SEQ ID NO: 30196 - protein, 12 aa, synthetic construct
ACETGDTTDKVI

SEQ ID NO: 30197 - protein, 10 aa, synthetic construct
ACERMADKLI

SEQ ID NO: 30198 - protein, 12 aa, synthetic construct
ACETGDTTDKLI

SEQ ID NO: 30199 - protein, 12 aa, synthetic construct
ACETGDTSDKLI

SEQ ID NO: 30200 - protein, 13 aa, synthetic construct
ACETGDTPNGKLI

SEQ ID NO: 30201 - protein, 16 aa, synthetic construct
ACGTAVGDTRRTETLI

SEQ ID NO: 30202 - protein, 13 aa, synthetic construct
ACGSVPGETDKLI

SEQ ID NO: 30203 - protein, 13 aa, synthetic construct
ACGPTGNHTDKLI

SEQ ID NO: 30204 - protein, 10 aa, synthetic construct
ACERMADKPI

SEQ ID NO: 30205 - protein, 10 aa, synthetic construct
ACGPTGGLLI

SEQ ID NO: 30206 - protein, 13 aa, synthetic construct
ACRTGGPYTDKLY

SEQ ID NO: 30207 - protein, 13 aa, synthetic construct
ACGPTGGNTDKLI

SEQ ID NO: 30208 - protein, 9 aa, synthetic construct
ACETEDQTH

SEQ ID NO: 30209 - protein, 14 aa, synthetic construct
ACGSNWGDTGETLI

SEQ ID NO: 30210 - protein, 13 aa, synthetic construct
ACETGDTPHDKLI

SEQ ID NO: 30211 - protein, 12 aa, synthetic construct
ACETGWGSDKLI

SEQ ID NO: 30212 - protein, 13 aa, synthetic construct
ACRTGGTYTDKLI

SEQ ID NO: 30213 - protein, 15 aa, synthetic construct
ACETGWGTPYTDKLI

SEQ ID NO: 30214 - protein, 13 aa, synthetic construct
ACGILGDTYDKLI

SEQ ID NO: 30215 - protein, 12 aa, synthetic construct
ACVIGGYADKLI

SEQ ID NO: 30216 - protein, 14 aa, synthetic construct
ACETPRGGITDKLI

SEQ ID NO: 30217 - protein, 13 aa, synthetic construct
ACGTTGEEHTKTQ

SEQ ID NO: 30218 - protein, 14 aa, synthetic construct
ACPYWGIRRPINSS

SEQ ID NO: 30219 - protein, 12 aa, synthetic construct
ACVIGGNTGKLI

SEQ ID NO: 30220 - protein, 10 aa, synthetic construct
ACERRGDKLI

SEQ ID NO: 30221 - protein, 10 aa, synthetic construct
ACERRDDKLI

SEQ ID NO: 30222 - protein, 14 aa, synthetic construct
ACGTRWGEGDENLI

SEQ ID NO: 30223 - protein, 12 aa, synthetic construct
ACETMGDTEKLI

SEQ ID NO: 30224 - protein, 12 aa, synthetic construct
ACPYWGITDKLI

SEQ ID NO: 30225 - protein, 10 aa, synthetic construct
ACEPRADKLI

SEQ ID NO: 30226 - protein, 12 aa, synthetic construct
ACVIGGNTDKLI

SEQ ID NO: 30227 - protein, 8 aa, synthetic construct
ACPYWGTP

SEQ ID NO: 30228 - protein, 13 aa, synthetic construct
ACVHWGMDTGKLM

SEQ ID NO: 30229 - protein, 12 aa, synthetic construct
ACEPRDNPDKLI

SEQ ID NO: 30230 - protein, 11 aa, synthetic construct
ACGDTKTDQIS

SEQ ID NO: 30231 - protein, 11 aa, synthetic construct
ACVDTKTYKLI

SEQ ID NO: 30232 - protein, 12 aa, synthetic construct
ACVIGGYSDKHI

SEQ ID NO: 30233 - protein, 12 aa, synthetic construct
ACPYWGIPRSTH

SEQ ID NO: 30234 - protein, 12 aa, synthetic construct
ACETRAYADKLI

SEQ ID NO: 30235 - protein, 10 aa, synthetic construct
ACGDTKTDKL

SEQ ID NO: 30236 - protein, 15 aa, synthetic construct
ACGTYWGIRNTDKLI

SEQ ID NO: 30237 - protein, 8 aa, synthetic construct
ACPYWGIP

SEQ ID NO: 30238 - protein, 14 aa, synthetic construct
ACVMYWGPNTDKLI

SEQ ID NO: 30239 - protein, 12 aa, synthetic construct
ACVLLGDTDKLI

SEQ ID NO: 30240 - protein, 13 aa, synthetic construct
ACGTVRGNTDKLI

SEQ ID NO: 30241 - protein, 11 aa, synthetic construct
ACGDTKTDKHI

SEQ ID NO: 30242 - protein, 10 aa, synthetic construct
ACERRSDKLI

SEQ ID NO: 30243 - protein, 11 aa, synthetic construct
ACGDTKTDKLL

SEQ ID NO: 30244 - protein, 13 aa, synthetic construct
ACETRDTYTDKLI

SEQ ID NO: 30245 - protein, 11 aa, synthetic construct
ACGDTKTDKLN

SEQ ID NO: 30246 - protein, 11 aa, synthetic construct
ACGDTKTDKLS

SEQ ID NO: 30247 - protein, 11 aa, synthetic construct
ACGDTKTDKLT

SEQ ID NO: 30248 - protein, 12 aa, synthetic construct
ACETREYADKLI

SEQ ID NO: 30249 - protein, 13 aa, synthetic construct
ACESVLVETDKLM

SEQ ID NO: 30250 - protein, 11 aa, synthetic construct
ACVLGDLDKLI

SEQ ID NO: 30251 - protein, 19 aa, synthetic construct
ACPYWGIPRGKGTTPIHSS

SEQ ID NO: 30252 - protein, 11 aa, synthetic construct
ACVDRKTDKLI

SEQ ID NO: 30253 - protein, 11 aa, synthetic construct
ACQLEDTDKLI

SEQ ID NO: 30254 - protein, 15 aa, synthetic construct
ACVCCTGGYRGDKLI

SEQ ID NO: 30255 - protein, 12 aa, synthetic construct
ACERGDYADKLI

SEQ ID NO: 30256 - protein, 12 aa, synthetic construct
ACGTGWGSVKLI

SEQ ID NO: 30257 - protein, 12 aa, synthetic construct
ACETLADTDKLI

SEQ ID NO: 30258 - protein, 12 aa, synthetic construct
ACTWGIRAINSS

SEQ ID NO: 30259 - protein, 13 aa, synthetic construct
ACRTVRPYTDKLI

SEQ ID NO: 30260 - protein, 11 aa, synthetic construct
ACGHTKTDKLI

SEQ ID NO: 30261 - protein, 13 aa, synthetic construct
ACRTVGPYADKLI

SEQ ID NO: 30262 - protein, 12 aa, synthetic construct
ACGIGGDTDKLI

SEQ ID NO: 30263 - protein, 12 aa, synthetic construct
ACERGDYTDKII

SEQ ID NO: 30264 - protein, 13 aa, synthetic construct
ACESVQGETDKLI

SEQ ID NO: 30265 - protein, 11 aa, synthetic construct
ACRDTKTDKLI

SEQ ID NO: 30266 - protein, 11 aa, synthetic construct
ACRDTKTDKPI

SEQ ID NO: 30267 - protein, 10 aa, synthetic construct
ACETAGGLLI

SEQ ID NO: 30268 - protein, 13 aa, synthetic construct
ACRTGVPYTDKLI

SEQ ID NO: 30269 - protein, 5 aa, synthetic construct
ACETH

SEQ ID NO: 30270 - protein, 12 aa, synthetic construct
ACGTGWGIDKLI

SEQ ID NO: 30271 - protein, 13 aa, synthetic construct
ACRNGGPYTDTLI

SEQ ID NO: 30272 - protein, 10 aa, synthetic construct
ACERGADQLI

SEQ ID NO: 30273 - protein, 10 aa, synthetic construct
ACERRAGKLI

SEQ ID NO: 30274 - protein, 15 aa, synthetic construct
ACGTLLGDTATDKLI

SEQ ID NO: 30275 - protein, 13 aa, synthetic construct
ACRAGGPYSDKLM

SEQ ID NO: 30276 - protein, 12 aa, synthetic construct
ACETMGDTDKLI

SEQ ID NO: 30277 - protein, 10 aa, synthetic construct
ACERRANKLI

SEQ ID NO: 30278 - protein, 15 aa, synthetic construct
ACETLRGDTATDKLI

SEQ ID NO: 30279 - protein, 10 aa, synthetic construct
ACVAWGPKLV

SEQ ID NO: 30280 - protein, 11 aa, synthetic construct
ACGDTKTGKLI

SEQ ID NO: 30281 - protein, 11 aa, synthetic construct
ACGDTMNDKLI

SEQ ID NO: 30282 - protein, 11 aa, synthetic construct
ACQVEDTDKLI

SEQ ID NO: 30283 - protein, 10 aa, synthetic construct
ACEPSGPKLI

SEQ ID NO: 30284 - protein, 10 aa, synthetic construct
ACERGADKLI

SEQ ID NO: 30285 - protein, 13 aa, synthetic construct
ACEPYCGPTDKLI

SEQ ID NO: 30286 - protein, 11 aa, synthetic construct
ACGDTMTDKII

SEQ ID NO: 30287 - protein, 10 aa, synthetic construct
ACEQRADKLI

SEQ ID NO: 30288 - skipped

SEQ ID NO: 30289 - protein, 17 aa, synthetic construct
ACGTLFWGYVKRTINSS

SEQ ID NO: 30290 - protein, 11 aa, synthetic construct
ACGDTMTDKLI

SEQ ID NO: 30291 - protein, 11 aa, synthetic construct
ACGDTQTDKLI

SEQ ID NO: 30292 - protein, 12 aa, synthetic construct
ACHRGATTDKLI

SEQ ID NO: 30293 - protein, 10 aa, synthetic construct
ASDTSGGLII

SEQ ID NO: 30294 - protein, 13 aa, synthetic construct
ACYQYWGPTDKLI

SEQ ID NO: 30295 - protein, 13 aa, synthetic construct
DSDKMGVYTDKLI

SEQ ID NO: 30296 - protein, 12 aa, synthetic construct
DMDTLGDTDKLI

SEQ ID NO: 30297 - protein, 6 aa, synthetic construct
DPKRLI

SEQ ID NO: 30298 - protein, 6 aa, synthetic construct
DPNTLI

SEQ ID NO: 30299 - protein, 6 aa, synthetic construct
DPQKLI

SEQ ID NO: 30300 - protein, 10 aa, synthetic construct
DRDTCGPKLI

SEQ ID NO: 30301 - protein, 15 aa, synthetic construct
DRDTGEGLWAVDKLI

SEQ ID NO: 30302 - protein, 12 aa, synthetic construct
DRDTGRGPDKLI

SEQ ID NO: 30303 - protein, 14 aa, synthetic construct
DRDYWGIPYTDKLI

SEQ ID NO: 30304 - protein, 15 aa, synthetic construct
DSDKGWGTPYTDNLI

SEQ ID NO: 30305 - protein, 12 aa, synthetic construct
DSDMGETGDKLI

SEQ ID NO: 30306 - protein, 12 aa, synthetic construct
DFYHGDYTDKLI

SEQ ID NO: 30307 - protein, 9 aa, synthetic construct
DSDNEGQTH

SEQ ID NO: 30308 - protein, 12 aa, synthetic construct
DSDNGRGPDKLI

SEQ ID NO: 30309 - protein, 12 aa, synthetic construct
DSDTGRGTDKLI

SEQ ID NO: 30310 - protein, 12 aa, synthetic construct
DSDTLGDTDKII

SEQ ID NO: 30311 - protein, 10 aa, synthetic construct
DSDTWGPKLI

SEQ ID NO: 30312 - protein, 14 aa, synthetic construct
DSDYFRIPNKKKNK

SEQ ID NO: 30313 - protein, 12 aa, synthetic construct
DSHILWETDKHI

SEQ ID NO: 30314 - protein, 13 aa, synthetic construct
DSYCVLGETDKLI

SEQ ID NO: 30315 - protein, 9 aa, synthetic construct
DTDTRCGTP

SEQ ID NO: 30316 - protein, 6 aa, synthetic construct
DHHRLI

SEQ ID NO: 30317 - protein, 13 aa, synthetic construct
DFDSVLVETDKLI

SEQ ID NO: 30318 - protein, 11 aa, synthetic construct
DWAGWGPYKLI

SEQ ID NO: 30319 - protein, 13 aa, synthetic construct
DCVPNGEPHRKTQ

SEQ ID NO: 30320 - protein, 10 aa, synthetic construct
DCERRDDKLI

SEQ ID NO: 30321 - protein, 13 aa, synthetic construct
DCESVMGETDKLI

SEQ ID NO: 30322 - protein, 11 aa, synthetic construct
DCGDTKTEKLN

SEQ ID NO: 30323 - protein, 14 aa, synthetic construct
DCGIRWGAGDDQLI

SEQ ID NO: 30324 - protein, 13 aa, synthetic construct
DCHHCGIDTDQLI

SEQ ID NO: 30325 - protein, 17 aa, synthetic construct
DCHTLFWGIRQTDDKLI

SEQ ID NO: 30326 - protein, 12 aa, synthetic construct
DCHTRGYADKLI

SEQ ID NO: 30327 - protein, 12 aa, synthetic construct
DCNTGGYADKLI

SEQ ID NO: 30328 - protein, 13 aa, synthetic construct
DCRTGGPYTDKLI

SEQ ID NO: 30329 - protein, 13 aa, synthetic construct
DCYCVLGETDKLI

SEQ ID NO: 30330 - protein, 13 aa, synthetic construct
DCYTVRGNTDKLI

SEQ ID NO: 30331 - protein, 12 aa, synthetic construct
DCYNGDRTDKLI

SEQ ID NO: 30332 - protein, 14 aa, synthetic construct
DCYNGGYPYTDKLI

SEQ ID NO: 30333 - protein, 14 aa, synthetic construct
DCYNWGYPYTDKLI

SEQ ID NO: 30334 - protein, 13 aa, synthetic construct
DCYRLGVYTDKLI

SEQ ID NO: 30335 - protein, 10 aa, synthetic construct
DCYSSGDKLI

SEQ ID NO: 30336 - protein, 13 aa, synthetic construct
DCYTLGVYTDKLI

SEQ ID NO: 30337 - protein, 12 aa, synthetic construct
DCYTRGYDDKII

SEQ ID NO: 30338 - protein, 10 aa, synthetic construct
DCYTSGGLLI

SEQ ID NO: 30339 - protein, 15 aa, synthetic construct
DCYTVLGDTATEQLI

SEQ ID NO: 30340 - protein, 13 aa, synthetic construct
DTGWGTPYTDKLI

SEQ ID NO: 30341 - protein, 12 aa, synthetic construct
DWDTRGYAENLL

SEQ ID NO: 30342 - protein, 11 aa, synthetic construct
GCGDTKTDKLF

SEQ ID NO: 30343 - protein, 12 aa, synthetic construct
GCDTGGYPDKLI

SEQ ID NO: 30344 - protein, 12 aa, synthetic construct
GCDSGGNTDKLI

SEQ ID NO: 30345 - protein, 14 aa, synthetic construct
GCDSKWGDTGDKLI

SEQ ID NO: 30346 - protein, 10 aa, synthetic construct
GCDSSGGLLI

SEQ ID NO: 30347 - protein, 14 aa, synthetic construct
GCDSWGIPYTDKLI

SEQ ID NO: 30348 - protein, 10 aa, synthetic construct
GCDSWGPKLI

SEQ ID NO: 30349 - protein, 16 aa, synthetic construct
GCDTAVGDTRRTDKLI

SEQ ID NO: 30350 - protein, 16 aa, synthetic construct
GCDTAVGDTSRTDKLI

SEQ ID NO: 30351 - protein, 12 aa, synthetic construct
GCDTGDRTDKLI

SEQ ID NO: 30352 - protein, 13 aa, synthetic construct
GCDTGDTPNDKLI

SEQ ID NO: 30353 - protein, 12 aa, synthetic construct
GCDTGGYPYKLL

SEQ ID NO: 30354 - protein, 14 aa, synthetic construct
GCDNRWGAGDDKLI

SEQ ID NO: 30355 - protein, 12 aa, synthetic construct
GCDTGWGIDKLI

SEQ ID NO: 30356 - protein, 16 aa, synthetic construct
GCDTLFWGIRPPINSS

SEQ ID NO: 30357 - protein, 17 aa, synthetic construct
GCDTLFWGIRQTDDKLI

SEQ ID NO: 30358 - protein, 12 aa, synthetic construct
GCDTRGYADKLI

SEQ ID NO: 30359 - protein, 10 aa, synthetic construct
GCDTSGDKLI

SEQ ID NO: 30360 - protein, 13 aa, synthetic construct
GCDYVLGETDKLI

SEQ ID NO: 30361 - protein, 14 aa, synthetic construct
GCDYWGITYTDKLI

SEQ ID NO: 30362 - protein, 13 aa, synthetic construct
GCEPYWGRTDKLI

SEQ ID NO: 30363 - protein, 10 aa, synthetic construct
GCERRADKPI

SEQ ID NO: 30364 - protein, 15 aa, synthetic construct
GCDNVGISSWDTRQM

SEQ ID NO: 30365 - protein, 12 aa, synthetic construct
GCDLGDYTDKLI

SEQ ID NO: 30366 - protein, 12 aa, synthetic construct
DWEKGDNKDKLI

SEQ ID NO: 30367 - protein, 13 aa, synthetic construct
ECDTGCGITDKLI

SEQ ID NO: 30368 - protein, 12 aa, synthetic construct
DWEQGDNHDKII

SEQ ID NO: 30369 - protein, 11 aa, synthetic construct
DWVLGDLDKLI

SEQ ID NO: 30370 - protein, 11 aa, synthetic construct
DWVQGDLDKLI

SEQ ID NO: 30371 - protein, 11 aa, synthetic construct
DWVRGDLDKLI

SEQ ID NO: 30372 - protein, 14 aa, synthetic construct
DYDMYWGPNTDKLI

SEQ ID NO: 30373 - protein, 12 aa, synthetic construct
ECDILGDTDKLI

SEQ ID NO: 30374 - protein, 12 aa, synthetic construct
ECDLLGDTDKLI

SEQ ID NO: 30375 - protein, 13 aa, synthetic construct
ECDSGDTPKDKLM

SEQ ID NO: 30376 - protein, 16 aa, synthetic construct
ECDTAVGDTRRTDKLI

SEQ ID NO: 30377 - protein, 13 aa, synthetic construct
ECDTGWGITEKII

SEQ ID NO: 30378 - protein, 12 aa, synthetic construct
GCDLGDTGDKLI

SEQ ID NO: 30379 - protein, 13 aa, synthetic construct
ECYTGDTYADKLI

SEQ ID NO: 30380 - protein, 11 aa, synthetic construct
EGGDTKTDKLN

SEQ ID NO: 30381 - protein, 8 aa, synthetic construct
GCDAAVGA

SEQ ID NO: 30382 - protein, 13 aa, synthetic construct
GCDFVLGETDKLI

SEQ ID NO: 30383 - protein, 12 aa, synthetic construct
GCDIGGYADKLI

SEQ ID NO: 30384 - protein, 14 aa, synthetic construct
GCDIRWGAGDDKLI

SEQ ID NO: 30385 - protein, 15 aa, synthetic construct
GCDKGWGTPYTDKLI

SEQ ID NO: 30386 - protein, 12 aa, synthetic construct
GCDKRGYADKLI

SEQ ID NO: 30387 - protein, 14 aa, synthetic construct
GCDKYWGPNTDQLI

SEQ ID NO: 30388 - protein, 10 aa, synthetic construct
DCERRADKLI

SEQ ID NO: 30389 - protein, 10 aa, synthetic construct
DCEPRADKLI

SEQ ID NO: 30390 - protein, 14 aa, synthetic construct
DCELGDTTDTDKLI

SEQ ID NO: 30391 - protein, 16 aa, synthetic construct
DCDTEVGETRRTDKLI

SEQ ID NO: 30392 - protein, 12 aa, synthetic construct
DCDSGDYTDKLI

SEQ ID NO: 30393 - protein, 12 aa, synthetic construct
DCDSGRGPDKLI

SEQ ID NO: 30394 - protein, 14 aa, synthetic construct
DCDSIWRDTGDKLI

SEQ ID NO: 30395 - protein, 14 aa, synthetic construct
DCDSNWGDTGDKHI

SEQ ID NO: 30396 - protein, 13 aa, synthetic construct
DCDSVLGDTDKLI

SEQ ID NO: 30397 - protein, 13 aa, synthetic construct
DCDSVLGETDNLI

SEQ ID NO: 30398 - protein, 13 aa, synthetic construct
DCDSVLGETEKLI

SEQ ID NO: 30399 - protein, 16 aa, synthetic construct
DCDTAVVDTRRTDKLI

SEQ ID NO: 30400 - protein, 15 aa, synthetic construct
DCDTELGDTATDKLI

SEQ ID NO: 30401 - protein, 9 aa, synthetic construct
DCDTEVQYH

SEQ ID NO: 30402 - protein, 13 aa, synthetic construct
DCDSELGETDKLI

SEQ ID NO: 30403 - protein, 13 aa, synthetic construct
DCDTFRGNTDKLI

SEQ ID NO: 30404 - protein, 12 aa, synthetic construct
DCDTGDHTDKLI

SEQ ID NO: 30405 - protein, 13 aa, synthetic construct
DCDTGDKYNDKVI

SEQ ID NO: 30406 - protein, 12 aa, synthetic construct
DCDTGDLNDKLI

SEQ ID NO: 30407 - protein, 12 aa, synthetic construct
DCDTGDLTDKLI

SEQ ID NO: 30408 - protein, 13 aa, synthetic construct
DCDTGDRNTDKLI

SEQ ID NO: 30409 - protein, 12 aa, synthetic construct
DCDTGDTTDKII

SEQ ID NO: 30410 - protein, 13 aa, synthetic construct
DCDTGDTYTEKLI

SEQ ID NO: 30411 - protein, 15 aa, synthetic construct
DCDTGECLGAVDKLI

SEQ ID NO: 30412 - protein, 13 aa, synthetic construct
DCDSGDRHTDKLI

SEQ ID NO: 30413 - protein, 12 aa, synthetic construct
DCDRRGYADKLI

SEQ ID NO: 30414 - protein, 11 aa, synthetic construct
DCELDDTDKLI

SEQ ID NO: 30415 - protein, 14 aa, synthetic construct
DCDMYWRPNTDKLI

SEQ ID NO: 30416 - protein, 13 aa, synthetic construct
DCDKGYGYTDNLI

SEQ ID NO: 30417 - protein, 12 aa, synthetic construct
DCDKLGDTDKLI

SEQ ID NO: 30418 - protein, 12 aa, synthetic construct
DCDKRGYSDKLI

SEQ ID NO: 30419 - protein, 12 aa, synthetic construct
DCDLCDTGDKLK

SEQ ID NO: 30420 - protein, 12 aa, synthetic construct
DCDLGDTGDKII

SEQ ID NO: 30421 - protein, 14 aa, synthetic construct
DCDLGDTTDTDKLI

SEQ ID NO: 30422 - protein, 12 aa, synthetic construct
DCDLVDTGDKLI

SEQ ID NO: 30423 - protein, 14 aa, synthetic construct
DCDMYCGHNTDKII

SEQ ID NO: 30424 - protein, 14 aa, synthetic construct
DCDMYWGPNTDNLI

SEQ ID NO: 30425 - protein, 12 aa, synthetic construct
DCDNEGDTDKLI

SEQ ID NO: 30426 - protein, 13 aa, synthetic construct
DCDRLGDTYDKLI

SEQ ID NO: 30427 - protein, 12 aa, synthetic construct
DCDNGDRTDKLI

SEQ ID NO: 30428 - protein, 12 aa, synthetic construct
DCDNGDTTDKLI

SEQ ID NO: 30429 - protein, 15 aa, synthetic construct
DCDNGSGGPYTDKLI

SEQ ID NO: 30430 - protein, 12 aa, synthetic construct
DCDNGYKTDKLI

SEQ ID NO: 30431 - protein, 13 aa, synthetic construct
DCDNTGGYHYKLI

SEQ ID NO: 30432 - protein, 10 aa, synthetic construct
DCDNWGPKLI

SEQ ID NO: 30433 - protein, 13 aa, synthetic construct
DCDQWGIDTDKLI

SEQ ID NO: 30434 - protein, 12 aa, synthetic construct
DCDRGDYTDKII

SEQ ID NO: 30435 - protein, 12 aa, synthetic construct
DCDRLGDTDKLI

SEQ ID NO: 30436 - protein, 15 aa, synthetic construct
DCDTGEGLGAVDKII

SEQ ID NO: 30437 - protein, 13 aa, synthetic construct
DCDTGEGVTDRLI

SEQ ID NO: 30438 - protein, 13 aa, synthetic construct
DCDTGEGVTEQLF

SEQ ID NO: 30439 - protein, 10 aa, synthetic construct
DCDTSGVLII

SEQ ID NO: 30440 - protein, 12 aa, synthetic construct
DCDTMGDTDKLN

SEQ ID NO: 30441 - protein, 14 aa, synthetic construct
DCDTPLGGITDKLI

SEQ ID NO: 30442 - protein, 13 aa, synthetic construct
DCDTRDRCTDKLI

SEQ ID NO: 30443 - protein, 13 aa, synthetic construct
DCDTRDRGTDKPI

SEQ ID NO: 30444 - protein, 12 aa, synthetic construct
DCDTRGYADKII

SEQ ID NO: 30445 - protein, 12 aa, synthetic construct
DCDTRGYDDKLI

SEQ ID NO: 30446 - protein, 14 aa, synthetic construct
DCDTRWGAGDDELI

SEQ ID NO: 30447 - protein, 10 aa, synthetic construct
DCDTSGGLIM

SEQ ID NO: 30448 - protein, 10 aa, synthetic construct
DCDTSGINSS

SEQ ID NO: 30449 - protein, 12 aa, synthetic construct
DCDTSGYAEKLI

SEQ ID NO: 30450 - protein, 13 aa, synthetic construct
DCDTGETYTDKLI

SEQ ID NO: 30451 - protein, 14 aa, synthetic construct
DCDTSWGAGEDKLI

SEQ ID NO: 30452 - protein, 10 aa, synthetic construct
DCDTTRDKLI

SEQ ID NO: 30453 - protein, 15 aa, synthetic construct
DCDTVLWDTATDKLI

SEQ ID NO: 30454 - protein, 13 aa, synthetic construct
DCDTVRGNTDKII

SEQ ID NO: 30455 - protein, 15 aa, synthetic construct
DCDTYWGIRNTDKLI

SEQ ID NO: 30456 - protein, 14 aa, synthetic construct
DCDVGDTPDTDKVI

SEQ ID NO: 30457 - protein, 12 aa, synthetic construct
DCDVLGDTDKLI

SEQ ID NO: 30458 - protein, 13 aa, synthetic construct
DCDYVLGETDKLI

SEQ ID NO: 30459 - protein, 20 aa, synthetic construct
DCEKKSWNTTHKHICPKITP

SEQ ID NO: 30460 - protein, 8 aa, synthetic construct
DCDTLSHN

SEQ ID NO: 30461 - protein, 15 aa, synthetic construct
DCDTLLGVTATDKLI

SEQ ID NO: 30462 - protein, 15 aa, synthetic construct
DCDTLLGDTATDKLI

SEQ ID NO: 30463 - protein, 12 aa, synthetic construct
DCDTLGPQIKSS

SEQ ID NO: 30464 - protein, 12 aa, synthetic construct
DCDTGGGSVEII

SEQ ID NO: 30465 - protein, 12 aa, synthetic construct
DCDTGGGTVKLI

SEQ ID NO: 30466 - protein, 14 aa, synthetic construct
DCDTGGYPYTDKLI

SEQ ID NO: 30467 - protein, 14 aa, synthetic construct
DCDTGGYTYTDKLI

SEQ ID NO: 30468 - protein, 15 aa, synthetic construct
DCDTGIRYSWDTRQM

SEQ ID NO: 30469 - protein, 12 aa, synthetic construct
DCDTGRGPDELI

SEQ ID NO: 30470 - protein, 15 aa, synthetic construct
DCDTGRGTPYTDKLI

SEQ ID NO: 30471 - protein, 15 aa, synthetic construct
DCDTGRVDTATEQLI

SEQ ID NO: 30472 - protein, 15 aa, synthetic construct
DCDTGSGGHYTDKLI

SEQ ID NO: 30473 - protein, 15 aa, synthetic construct
DCDTGSGGPYTDKLI

SEQ ID NO: 30474 - protein, 12 aa, synthetic construct
DCDTGWGIDKLI

SEQ ID NO: 30475 - protein, 12 aa, synthetic construct
DCDTGWGIEKLI

SEQ ID NO: 30476 - protein, 15 aa, synthetic construct
DCDTGWGPSTPINSS

SEQ ID NO: 30477 - protein, 12 aa, synthetic construct
DCDTKSYADKLI

SEQ ID NO: 30478 - protein, 17 aa, synthetic construct
DCDTLFRGIRQTDDKLI

SEQ ID NO: 30479 - protein, 17 aa, synthetic construct
DCDTLFWGIRQTDDKLI

SEQ ID NO: 30480 - protein, 17 aa, synthetic construct
DCDTLFWGISQTDDKLN

SEQ ID NO: 30481 - protein, 12 aa, synthetic construct
DCDTLGDNDKLI

SEQ ID NO: 30482 - protein, 12 aa, synthetic construct
DCDTLGDTGKLI

SEQ ID NO: 30483 - protein, 11 aa, synthetic construct
GCGATKTDKLI

SEQ ID NO: 30484 - protein, 11 aa, synthetic construct
GCGDTKTDKLI

SEQ ID NO: 30485 - protein, 15 aa, synthetic construct
DCDKGWGTPYTDKLI

SEQ ID NO: 30486 - protein, 11 aa, synthetic construct
SRGDTKTDKLI

SEQ ID NO: 30487 - protein, 12 aa, synthetic construct
SCETGGGAVQLI

SEQ ID NO: 30488 - protein, 12 aa, synthetic construct
SCETLGATDKLI

SEQ ID NO: 30489 - protein, 15 aa, synthetic construct
SCETYWGIRNTATLI

SEQ ID NO: 30490 - protein, 10 aa, synthetic construct
SCGDTTDKLI

SEQ ID NO: 30491 - protein, 13 aa, synthetic construct
SCYNGEGVTDKLI

SEQ ID NO: 30492 - protein, 13 aa, synthetic construct
SCYPYWGHTDKLI

SEQ ID NO: 30493 - protein, 16 aa, synthetic construct
SFDTAVGDTRRTDKLI

SEQ ID NO: 30494 - protein, 16 aa, synthetic construct
SGDTAVGDTRRTDKLI

SEQ ID NO: 30495 - protein, 10 aa, synthetic construct
SIDTWGHKLK

SEQ ID NO: 30496 - protein, 12 aa, synthetic construct
SSDTEGDTDKLI

SEQ ID NO: 30497 - protein, 10 aa, synthetic construct
SCEMSDDKLI

SEQ ID NO: 30498 - protein, 15 aa, synthetic construct
SSDTRWGTPNTDKLI

SEQ ID NO: 30499 - protein, 19 aa, synthetic construct
SVVQTWGYQHKHKVGKGTP

SEQ ID NO: 30500 - protein, 11 aa, synthetic construct
SWAVWGPDKLI

SEQ ID NO: 30501 - protein, 12 aa, synthetic construct
SWEPGDNPDKLI

SEQ ID NO: 30502 - protein, 12 aa, synthetic construct
TCDIGGYADKLI

SEQ ID NO: 30503 - protein, 12 aa, synthetic construct
TCDLGDTGDKLI

SEQ ID NO: 30504 - protein, 12 aa, synthetic construct
TCDLLGDTDKII

SEQ ID NO: 30505 - protein, 17 aa, synthetic construct
TCDNLFCGIRQKDDKLI

SEQ ID NO: 30506 - protein, 12 aa, synthetic construct
TCDRGDYTDKLI

SEQ ID NO: 30507 - protein, 10 aa, synthetic construct
SCERRADKLI

SEQ ID NO: 30508 - protein, 15 aa, synthetic construct
SCDTYWGIRNTDKLI

SEQ ID NO: 30509 - protein, 14 aa, synthetic construct
TCDSNWGDTGDKLI

SEQ ID NO: 30510 - protein, 12 aa, synthetic construct
SCDTGDRTDKLI

SEQ ID NO: 30511 - protein, 12 aa, synthetic construct
SCDLLGDNDKLI

SEQ ID NO: 30512 - protein, 15 aa, synthetic construct
SCDPVLGDTATDKLI

SEQ ID NO: 30513 - protein, 13 aa, synthetic construct
SCDPYWGPTDKLI

SEQ ID NO: 30514 - protein, 12 aa, synthetic construct
SCDQLEDTDKLI

SEQ ID NO: 30515 - protein, 12 aa, synthetic construct
SCDRGDYTDKLI

SEQ ID NO: 30516 - protein, 14 aa, synthetic construct
SCDRTGGLTPINSS

SEQ ID NO: 30517 - protein, 14 aa, synthetic construct
SCDSNMGDKVDKLI

SEQ ID NO: 30518 - protein, 14 aa, synthetic construct
SCDSNWGDTGDRLI

SEQ ID NO: 30519 - protein, 12 aa, synthetic construct
SCDTEGDTDELI

SEQ ID NO: 30520 - protein, 13 aa, synthetic construct
SCDTGDTPNDKLI

SEQ ID NO: 30521 - protein, 13 aa, synthetic construct
SCDTWEGVTDKLI

SEQ ID NO: 30522 - protein, 12 aa, synthetic construct
SCDTGDTTDKLI

SEQ ID NO: 30523 - protein, 13 aa, synthetic construct
SCDTGDTYTDKLI

SEQ ID NO: 30524 - protein, 15 aa, synthetic construct
SCDTGEGLGAVDKLI

SEQ ID NO: 30525 - protein, 15 aa, synthetic construct
SCDTGWGTPNTDKLI

SEQ ID NO: 30526 - protein, 12 aa, synthetic construct
SCDTLGDTDKLI

SEQ ID NO: 30527 - protein, 12 aa, synthetic construct
SCDTLGDTDKLN

SEQ ID NO: 30528 - protein, 13 aa, synthetic construct
SCDTRDRGTDKPI

SEQ ID NO: 30529 - protein, 12 aa, synthetic construct
SCDTRGYADKLI

SEQ ID NO: 30530 - protein, 15 aa, synthetic construct
SCDTVGISSWYTRQR

SEQ ID NO: 30531 - protein, 13 aa, synthetic construct
TCDRTGCTQINSS

SEQ ID NO: 30532 - protein, 14 aa, synthetic construct
TCDSNWGDTGVKLI

SEQ ID NO: 30533 - protein, 11 aa, synthetic construct
GCGGTKTDKLI

SEQ ID NO: 30534 - protein, 14 aa, synthetic construct
VCDTRWGAGDDKLI

SEQ ID NO: 30535 - protein, 16 aa, synthetic construct
VCDTAVGDTRRTAKLI

SEQ ID NO: 30536 - protein, 16 aa, synthetic construct
VCDTAVGDTRRTDKLI

SEQ ID NO: 30537 - protein, 9 aa, synthetic construct
VCDTEGQTH

SEQ ID NO: 30538 - protein, 12 aa, synthetic construct
VCDTGDTTDKLI

SEQ ID NO: 30539 - protein, 13 aa, synthetic construct
VCDTGDTYTDKLI

SEQ ID NO: 30540 - protein, 12 aa, synthetic construct
VCDTGERTDKLI

SEQ ID NO: 30541 - protein, 12 aa, synthetic construct
VCDTGGYPDKLI

SEQ ID NO: 30542 - protein, 12 aa, synthetic construct
VCDTLGDTDQLI

SEQ ID NO: 30543 - protein, 14 aa, synthetic construct
VCDTPLGGITDKLI

SEQ ID NO: 30544 - protein, 15 aa, synthetic construct
VCDTVGISSWDTRQM

SEQ ID NO: 30545 - protein, 12 aa, synthetic construct
VCDPGDRTDKLI

SEQ ID NO: 30546 - protein, 15 aa, synthetic construct
VCDTVSGGPYTDKLI

SEQ ID NO: 30547 - protein, 14 aa, synthetic construct
VCDYWGIPYTDKLI

SEQ ID NO: 30548 - protein, 10 aa, synthetic construct
VCEPRADKPI

SEQ ID NO: 30549 - protein, 11 aa, synthetic construct
VCEVEDTDKLI

SEQ ID NO: 30550 - protein, 11 aa, synthetic construct
VCGDTKTDQLI

SEQ ID NO: 30551 - protein, 12 aa, synthetic construct
VCYKLGDTDKLI

SEQ ID NO: 30552 - protein, 13 aa, synthetic construct
VCYKLGVYTDKLI

SEQ ID NO: 30553 - protein, 13 aa, synthetic construct
VCYPWGIDTDKLI

SEQ ID NO: 30554 - protein, 12 aa, synthetic construct
VYDSGGGSVKLI

SEQ ID NO: 30555 - protein, 13 aa, synthetic construct
VCDRTGGYTEKLI

SEQ ID NO: 30556 - protein, 12 aa, synthetic construct
VCDMRGYADKLI

SEQ ID NO: 30557 - protein, 9 aa, synthetic construct
TCDTEGQTH

SEQ ID NO: 30558 - protein, 14 aa, synthetic construct
TCDTRLGAGDDKLI

SEQ ID NO: 30559 - protein, 13 aa, synthetic construct
TCDTGDRHTDQLI

SEQ ID NO: 30560 - protein, 13 aa, synthetic construct
TCDTGEGVTDKLI

SEQ ID NO: 30561 - protein, 12 aa, synthetic construct
TCDTGGGSVKLI

SEQ ID NO: 30562 - protein, 12 aa, synthetic construct
TCDTGRGPDKLN

SEQ ID NO: 30563 - protein, 15 aa, synthetic construct
TCDTGSGGSYTDKLI

SEQ ID NO: 30564 - protein, 12 aa, synthetic construct
TCDTGWGIDKLI

SEQ ID NO: 30565 - protein, 17 aa, synthetic construct
TCDTLFWGIRQTDYKLI

SEQ ID NO: 30566 - protein, 13 aa, synthetic construct
TCDTRDRGTDKLI

SEQ ID NO: 30567 - protein, 12 aa, synthetic construct
TCDTRGYAEKLI

SEQ ID NO: 30568 - protein, 10 aa, synthetic construct
TCDTSGPKLI

SEQ ID NO: 30569 - protein, 12 aa, synthetic construct
VCDLLGDTDKLI

SEQ ID NO: 30570 - protein, 11 aa, synthetic construct
TCEVEDTDKLI

SEQ ID NO: 30571 - protein, 13 aa, synthetic construct
TVTPGILTPINSS

SEQ ID NO: 30572 - protein, 14 aa, synthetic construct
TVTWGIRRTPINSS

SEQ ID NO: 30573 - protein, 11 aa, synthetic construct
TWAVWGPSKLI

SEQ ID NO: 30574 - protein, 11 aa, synthetic construct
TWAVWGPYKLI

SEQ ID NO: 30575 - protein, 11 aa, synthetic construct
TWVLGDLDKLI

SEQ ID NO: 30576 - protein, 15 aa, synthetic construct
VCDCCTGGYRGDKLI

SEQ ID NO: 30577 - protein, 12 aa, synthetic construct
VCDIERNTDKLI

SEQ ID NO: 30578 - protein, 12 aa, synthetic construct
VCDLLGDTDELI

SEQ ID NO: 30579 - protein, 14 aa, synthetic construct
SCDLGDTPDTNKLI

SEQ ID NO: 30580 - protein, 14 aa, synthetic construct
SCDLGDTPDTDKLI

SEQ ID NO: 30581 - protein, 13 aa, synthetic construct
SCDKLGVYTDKLI

SEQ ID NO: 30582 - protein, 11 aa, synthetic construct
GWAVWGPYKLI

SEQ ID NO: 30583 - protein, 17 aa, synthetic construct
GGHTLFWGIRQTDDKLI

SEQ ID NO: 30584 - protein, 6 aa, synthetic construct
GPHKLI

SEQ ID NO: 30585 - protein, 6 aa, synthetic construct
GPHTLI

SEQ ID NO: 30586 - protein, 6 aa, synthetic construct
GPTTLI

SEQ ID NO: 30587 - protein, 14 aa, synthetic construct
GSDRGDTPDTDKLI

SEQ ID NO: 30588 - protein, 12 aa, synthetic construct
GSDRGDYTDKLI

SEQ ID NO: 30589 - protein, 12 aa, synthetic construct
GSDTGDRTDKLI

SEQ ID NO: 30590 - protein, 16 aa, synthetic construct
GSGTVGATAGVICGGG

SEQ ID NO: 30591 - protein, 11 aa, synthetic construct
GWAVCGPYKLI

SEQ ID NO: 30592 - protein, 11 aa, synthetic construct
GWVLGDLDKLI

SEQ ID NO: 30593 - protein, 12 aa, synthetic construct
GGDTGGGSVKLI

SEQ ID NO: 30594 - protein, 14 aa, synthetic construct
HCDYWGIHYTYKLI

SEQ ID NO: 30595 - protein, 10 aa, synthetic construct
HCEPWGPKLI

SEQ ID NO: 30596 - protein, 13 aa, synthetic construct
HVDQMGNQTDKLI

SEQ ID NO: 30597 - protein, 12 aa, synthetic construct
HWNRGIIPINSS

SEQ ID NO: 30598 - skipped

SEQ ID NO: 30599 - protein, 13 aa, synthetic construct
PCDHWGIDTDKLI

SEQ ID NO: 30600 - protein, 12 aa, synthetic construct
PCDIGGNNDKLI

SEQ ID NO: 30601 - protein, 12 aa, synthetic construct
PCDIGGYDEKLI

SEQ ID NO: 30602 - protein, 12 aa, synthetic construct
PCDLGDTGDQLI

SEQ ID NO: 30603 - protein, 6 aa, synthetic construct
GGGAGG

SEQ ID NO: 30604 - protein, 12 aa, synthetic construct
GGDTGDRTDKLI

SEQ ID NO: 30605 - protein, 13 aa, synthetic construct
SCDILGDTYDKLI

SEQ ID NO: 30606 - protein, 16 aa, synthetic construct
GCYNAVGDTRRTDKLI

SEQ ID NO: 30607 - protein, 10 aa, synthetic construct
GCHISGGLLI

SEQ ID NO: 30608 - protein, 13 aa, synthetic construct
GCHKGDTPNDKLI

SEQ ID NO: 30609 - protein, 12 aa, synthetic construct
GCHSGGYADKLI

SEQ ID NO: 30610 - protein, 13 aa, synthetic construct
GCHTLGVYTDKLI

SEQ ID NO: 30611 - protein, 11 aa, synthetic construct
GCKVEDTDKLI

SEQ ID NO: 30612 - protein, 13 aa, synthetic construct
GCRNGGPYTEKLI

SEQ ID NO: 30613 - protein, 13 aa, synthetic construct
GCRSGGPYTDQLI

SEQ ID NO: 30614 - protein, 13 aa, synthetic construct
GCVHWGIDTDKLI

SEQ ID NO: 30615 - protein, 13 aa, synthetic construct
GCYKLGVYTDKLI

SEQ ID NO: 30616 - protein, 13 aa, synthetic construct
GCYNGDRHTDKLI

SEQ ID NO: 30617 - protein, 9 aa, synthetic construct
GGDTEGQTH

SEQ ID NO: 30618 - protein, 12 aa, synthetic construct
GCYNGDRTDKLI

SEQ ID NO: 30619 - protein, 12 aa, synthetic construct
GCYNGGNTDKLI

SEQ ID NO: 30620 - protein, 15 aa, synthetic construct
GCYNGSGGPYTDKLI

SEQ ID NO: 30621 - protein, 12 aa, synthetic construct
GCYNLGDTDKLI

SEQ ID NO: 30622 - protein, 12 aa, synthetic construct
GCYTGDRTDKLI

SEQ ID NO: 30623 - protein, 12 aa, synthetic construct
GCYTGGGSVKLI

SEQ ID NO: 30624 - protein, 14 aa, synthetic construct
GCYTGGYPYTDKLI

SEQ ID NO: 30625 - protein, 13 aa, synthetic construct
GFDPWGIDTDKLI

SEQ ID NO: 30626 - protein, 16 aa, synthetic construct
GGDTAVGDTRRTDKLI

SEQ ID NO: 30627 - protein, 14 aa, synthetic construct
PCDSNWGDPGDKLI

SEQ ID NO: 30628 - protein, 16 aa, synthetic construct
PCDTAVGDTRRTDKLI

SEQ ID NO: 30629 - protein, 12 aa, synthetic construct
PCDTGWGIDKLI

SEQ ID NO: 30630 - protein, 13 aa, synthetic construct
PVTRGTGAPINPS

SEQ ID NO: 30631 - protein, 12 aa, synthetic construct
PVTPDGGPINSP

SEQ ID NO: 30632 - protein, 12 aa, synthetic construct
PVTPDGGPINSS

SEQ ID NO: 30633 - protein, 13 aa, synthetic construct
PVTPFGGPPISSS

SEQ ID NO: 30634 - protein, 13 aa, synthetic construct
PVTPGIDTPINSS

SEQ ID NO: 30635 - protein, 13 aa, synthetic construct
PVTPGILTPINSS

SEQ ID NO: 30636 - protein, 15 aa, synthetic construct
PVTPGVGDPTPINSS

SEQ ID NO: 30637 - protein, 16 aa, synthetic construct
PVTPRWGTRAGPINSS

SEQ ID NO: 30638 - protein, 13 aa, synthetic construct
PVTPYCGKPINSS

SEQ ID NO: 30639 - protein, 13 aa, synthetic construct
PVTPYWGKQINSS

SEQ ID NO: 30640 - protein, 12 aa, synthetic construct
PVTRRGTPINSS

SEQ ID NO: 30641 - protein, 13 aa, synthetic construct
PCDTGWGITDKLI

SEQ ID NO: 30642 - protein, 12 aa, synthetic construct
PVTRWVTPIKSS

SEQ ID NO: 30643 - protein, 15 aa, synthetic construct
PVTTGRVWGPSINSS

SEQ ID NO: 30644 - protein, 14 aa, synthetic construct
PVTWGIRRTPRNSS

SEQ ID NO: 30645 - protein, 13 aa, synthetic construct
PVTYWGIPTINSS

SEQ ID NO: 30646 - protein, 12 aa, synthetic construct
PVTYWGIPTITH

SEQ ID NO: 30647 - protein, 11 aa, synthetic construct
PWAVWGPYKLI

SEQ ID NO: 30648 - protein, 11 aa, synthetic construct
RINTIHLSKTQ

SEQ ID NO: 30649 - protein, 12 aa, synthetic construct
SCDHGGYPDKLI

SEQ ID NO: 30650 - protein, 12 aa, synthetic construct
SCDIGGNTDKLI

SEQ ID NO: 30651 - protein, 17 aa, synthetic construct
PVTLYSGGYAKRTINSS

SEQ ID NO: 30652 - protein, 17 aa, synthetic construct
PVTLCSGGSVKRTINSS

SEQ ID NO: 30653 - protein, 13 aa, synthetic construct
PVTILGDTTINSS

SEQ ID NO: 30654 - protein, 10 aa, synthetic construct
PVTGGPINSS

SEQ ID NO: 30655 - protein, 13 aa, synthetic construct
PCDTRDRGTDKPI

SEQ ID NO: 30656 - protein, 13 aa, synthetic construct
PCDTVRGNTDKLI

SEQ ID NO: 30657 - protein, 13 aa, synthetic construct
PCGPTGDPHRETH

SEQ ID NO: 30658 - protein, 12 aa, synthetic construct
PGNRGRIPINSS

SEQ ID NO: 30659 - protein, 11 aa, synthetic construct
PGSWGTSINSS

SEQ ID NO: 30660 - protein, 5 aa, synthetic construct
PHKLT

SEQ ID NO: 30661 - protein, 14 aa, synthetic construct
PLTWGIRRTPINTS

SEQ ID NO: 30662 - protein, 6 aa, synthetic construct
PPHKLI

SEQ ID NO: 30663 - protein, 6 aa, synthetic construct
PPIHSS

SEQ ID NO: 30664 - protein, 16 aa, synthetic construct
PSDTAVGDTRRTDKLT

SEQ ID NO: 30665 - protein, 13 aa, synthetic construct
PVDLIGKQTDKLN

SEQ ID NO: 30666 - protein, 13 aa, synthetic construct
PVDLLGNHTDKPI

SEQ ID NO: 30667 - protein, 13 aa, synthetic construct
PVDLLGNHTDRLI

SEQ ID NO: 30668 - protein, 13 aa, synthetic construct
PVDLLGTHTDKLI

SEQ ID NO: 30669 - protein, 14 aa, synthetic construct
PVIVLGARTPINSS

SEQ ID NO: 30670 - protein, 12 aa, synthetic construct
PVKLGETPINSS

SEQ ID NO: 30671 - protein, 10 aa, synthetic construct
PVNGVTINSS

SEQ ID NO: 30672 - protein, 14 aa, synthetic construct
PVTCTGGLTPRNSS

SEQ ID NO: 30673 - protein, 12 aa, synthetic construct
PVTGGIRAINSS

SEQ ID NO: 30674 - protein, 13 aa, synthetic construct
DCDKGYGYTDKLI

SEQ ID NO: 30675 - protein, 12 aa, synthetic construct
DCDIGGYSDKLI

SEQ ID NO: 30676 - protein, 15 aa, synthetic construct
ACYSGSGGPYTDKLI

SEQ ID NO: 30677 - protein, 12 aa, synthetic construct
ARDTGDTTDKLT

SEQ ID NO: 30678 - protein, 14 aa, synthetic construct
ARDISWGPNTDKLI

SEQ ID NO: 30679 - protein, 13 aa, synthetic construct
ARDNGYGYTDKLI

SEQ ID NO: 30680 - protein, 13 aa, synthetic construct
ARDRLGVYTDKRI

SEQ ID NO: 30681 - protein, 13 aa, synthetic construct
ARDRTGGSTVKLI

SEQ ID NO: 30682 - protein, 12 aa, synthetic construct
ARDSGGAADNLI

SEQ ID NO: 30683 - protein, 13 aa, synthetic construct
ARDSVLGETNKLI

SEQ ID NO: 30684 - protein, 16 aa, synthetic construct
ARDTAVGDTRRTDQLI

SEQ ID NO: 30685 - protein, 16 aa, synthetic construct
ARDTAVGDTRRTDTHI

SEQ ID NO: 30686 - protein, 16 aa, synthetic construct
ARDTAVGGTRRTEKLI

SEQ ID NO: 30687 - protein, 15 aa, synthetic construct
ARDTGEGLGAVDKHI

SEQ ID NO: 30688 - protein, 12 aa, synthetic construct
ARDIGGDTDKLI

SEQ ID NO: 30689 - protein, 15 aa, synthetic construct
ARDTGEGLGAVDKLI

SEQ ID NO: 30690 - protein, 15 aa, synthetic construct
ARDTGEGLGDTDKLI

SEQ ID NO: 30691 - protein, 13 aa, synthetic construct
ARDTGWGITDKLV

SEQ ID NO: 30692 - protein, 15 aa, synthetic construct
ARDTGWGTPYTDKLI

SEQ ID NO: 30693 - protein, 15 aa, synthetic construct
ARDTGWGTPYTDNLI

SEQ ID NO: 30694 - protein, 17 aa, synthetic construct
ARDTLFWGIRQTDDKLI

SEQ ID NO: 30695 - protein, 17 aa, synthetic construct
ARDTLFWGIRQTGDKLI

SEQ ID NO: 30696 - protein, 15 aa, synthetic construct
ARDTLLGDTATDKLI

SEQ ID NO: 30697 - protein, 15 aa, synthetic construct
ARDTLLGDTATEKLI

SEQ ID NO: 30698 - protein, 13 aa, synthetic construct
ARDILGDTYDKLI

SEQ ID NO: 30699 - protein, 13 aa, synthetic construct
ARDHWGIDTDKLI

SEQ ID NO: 30700 - protein, 13 aa, synthetic construct
ARDTRDRHTDKLI

SEQ ID NO: 30701 - protein, 6 aa, synthetic construct
APHKRL

SEQ ID NO: 30702 - protein, 12 aa, synthetic construct
ALETGDNPDKLI

SEQ ID NO: 30703 - protein, 6 aa, synthetic construct
ALHKLI

SEQ ID NO: 30704 - protein, 12 aa, synthetic construct
AMDTGDTTDKII

SEQ ID NO: 30705 - protein, 11 aa, synthetic construct
ANGDTKTDKLI

SEQ ID NO: 30706 - protein, 6 aa, synthetic construct
APDILI

SEQ ID NO: 30707 - protein, 6 aa, synthetic construct
APDKLI

SEQ ID NO: 30708 - protein, 6 aa, synthetic construct
APHKHI

SEQ ID NO: 30709 - protein, 6 aa, synthetic construct
APHKLL

SEQ ID NO: 30710 - protein, 6 aa, synthetic construct
APHKRI

SEQ ID NO: 30711 - protein, 6 aa, synthetic construct
APHKVI

SEQ ID NO: 30712 - protein, 11 aa, synthetic construct
ARADTKTDKLI

SEQ ID NO: 30713 - protein, 6 aa, synthetic construct
APHQLF

SEQ ID NO: 30714 - protein, 6 aa, synthetic construct
APHRII

SEQ ID NO: 30715 - protein, 6 aa, synthetic construct
APLKLI

SEQ ID NO: 30716 - protein, 6 aa, synthetic construct
APNKLI

SEQ ID NO: 30717 - protein, 8 aa, synthetic construct
APQGRVTG

SEQ ID NO: 30718 - protein, 6 aa, synthetic construct
APQKLN

SEQ ID NO: 30719 - protein, 6 aa, synthetic construct
APQKLT

SEQ ID NO: 30720 - protein, 6 aa, synthetic construct
APQKVI

SEQ ID NO: 30721 - protein, 6 aa, synthetic construct
APQTLI

SEQ ID NO: 30722 - protein, 14 aa, synthetic construct
ARDTPLGGITDKLL

SEQ ID NO: 30723 - protein, 10 aa, synthetic construct
ARDTSGGLLF

SEQ ID NO: 30724 - protein, 12 aa, synthetic construct
ASDTLGDTDKLI

SEQ ID NO: 30725 - protein, 13 aa, synthetic construct
ASDTGEGVTDKLN

SEQ ID NO: 30726 - protein, 12 aa, synthetic construct
ASDRPHTGHLLI

SEQ ID NO: 30727 - protein, 14 aa, synthetic construct
ASDRYWGPNTDHLI

SEQ ID NO: 30728 - protein, 15 aa, synthetic construct
ASDSGWGTPYTDKLI

SEQ ID NO: 30729 - protein, 14 aa, synthetic construct
ASDSNRGDTGDKLI

SEQ ID NO: 30730 - protein, 13 aa, synthetic construct
ASDTGDRHTDQLI

SEQ ID NO: 30731 - protein, 13 aa, synthetic construct
ASDTGDRNTYKLT

SEQ ID NO: 30732 - protein, 12 aa, synthetic construct
ASDTGDRTDKLI

SEQ ID NO: 30733 - protein, 15 aa, synthetic construct
ASDTGEGLVAVDKLI

SEQ ID NO: 30734 - protein, 13 aa, synthetic construct
ASDTGEGVTDKLI

SEQ ID NO: 30735 - protein, 15 aa, synthetic construct
ASDTGESLGAVDKLI

SEQ ID NO: 30736 - protein, 13 aa, synthetic construct
ASDPDWGPTDKLI

SEQ ID NO: 30737 - protein, 15 aa, synthetic construct
ASDTGGGAPYTDKHI

SEQ ID NO: 30738 - protein, 14 aa, synthetic construct
ASDTGGYPYTNKLI

SEQ ID NO: 30739 - protein, 12 aa, synthetic construct
ASDTGGYTDKLI

SEQ ID NO: 30740 - protein, 12 aa, synthetic construct
ASDTGRGPDKIV

SEQ ID NO: 30741 - protein, 13 aa, synthetic construct
ASDTGWGITEKLI

SEQ ID NO: 30742 - protein, 15 aa, synthetic construct
ASDTGWGTPNTDKLI

SEQ ID NO: 30743 - protein, 15 aa, synthetic construct
ASDTGWGTPYTDNLI

SEQ ID NO: 30744 - protein, 12 aa, synthetic construct
ASDTKGDTDKLN

SEQ ID NO: 30745 - protein, 12 aa, synthetic construct
ASDTLGDAYKLI

SEQ ID NO: 30746 - protein, 13 aa, synthetic construct
ASDRGWGITDKLI

SEQ ID NO: 30747 - protein, 14 aa, synthetic construct
ASDMYWGPNTEKLI

SEQ ID NO: 30748 - protein, 16 aa, synthetic construct
ARDTSVGDTRRTDKLI

SEQ ID NO: 30749 - protein, 11 aa, synthetic construct
ARVDTKTDKLI

SEQ ID NO: 30750 - protein, 15 aa, synthetic construct
ARDTVLGDTATDKLI

SEQ ID NO: 30751 - protein, 11 aa, synthetic construct
ARDVWGHYKLI

SEQ ID NO: 30752 - protein, 10 aa, synthetic construct
ARERRADKLI

SEQ ID NO: 30753 - protein, 14 aa, synthetic construct
AREYWGIPYTDKLF

SEQ ID NO: 30754 - protein, 11 aa, synthetic construct
ARGDAKTDKLN

SEQ ID NO: 30755 - protein, 10 aa, synthetic construct
ARGDTGDKLI

SEQ ID NO: 30756 - protein, 11 aa, synthetic construct
ARGDTTTDKLI

SEQ ID NO: 30757 - protein, 11 aa, synthetic construct
ARGHTNTDKLI

SEQ ID NO: 30758 - protein, 11 aa, synthetic construct
ARPIWGPYKLI

SEQ ID NO: 30759 - protein, 11 aa, synthetic construct
ARVLGDLDKLI

SEQ ID NO: 30760 - protein, 14 aa, synthetic construct
ASDMYWGPNTDKLI

SEQ ID NO: 30761 - protein, 14 aa, synthetic construct
ASARGHTQDTETLI

SEQ ID NO: 30762 - protein, 11 aa, synthetic construct
ASAVWGPSKLI

SEQ ID NO: 30763 - protein, 15 aa, synthetic construct
ASDCCTGGYRGDNLI

SEQ ID NO: 30764 - protein, 15 aa, synthetic construct
ASDCCTGGYRGEKLI

SEQ ID NO: 30765 - protein, 14 aa, synthetic construct
ASDCTGGPYTDKLI

SEQ ID NO: 30766 - protein, 13 aa, synthetic construct
ASDKGDTPKEKLI

SEQ ID NO: 30767 - protein, 14 aa, synthetic construct
ASDLGDTPDTDKLI

SEQ ID NO: 30768 - protein, 12 aa, synthetic construct
ASDLLGDTDQLI

SEQ ID NO: 30769 - protein, 12 aa, synthetic construct
ASDLRDTGDKLI

SEQ ID NO: 30770 - protein, 10 aa, synthetic construct
ALERRADKLI

SEQ ID NO: 30771 - protein, 12 aa, synthetic construct
ALEPGDNPDKLI

SEQ ID NO: 30772 - protein, 13 aa, synthetic construct
ALDPYWGPTDKLI

SEQ ID NO: 30773 - protein, 12 aa, synthetic construct
AFDTGWGIEKLI

SEQ ID NO: 30774 - protein, 13 aa, synthetic construct
AFDSVLGETDKLI

SEQ ID NO: 30775 - protein, 12 aa, synthetic construct
AFDTEGDTDKLI

SEQ ID NO: 30776 - protein, 13 aa, synthetic construct
AFDTGDRNTEKLK

SEQ ID NO: 30777 - protein, 12 aa, synthetic construct
AFDTGDRTDKLI

SEQ ID NO: 30778 - protein, 13 aa, synthetic construct
AFDTGDTPNDKLI

SEQ ID NO: 30779 - protein, 13 aa, synthetic construct
AFDTGDTYTDKLI

SEQ ID NO: 30780 - protein, 10 aa, synthetic construct
AFDTGGPKLI

SEQ ID NO: 30781 - protein, 12 aa, synthetic construct
AFDTGGYGRYTH

SEQ ID NO: 30782 - protein, 12 aa, synthetic construct
AFDTGGYPDKLI

SEQ ID NO: 30783 - protein, 15 aa, synthetic construct
AFDTLLGDTATDKLI

SEQ ID NO: 30784 - protein, 13 aa, synthetic construct
AFDRGWGITEKLI

SEQ ID NO: 30785 - protein, 14 aa, synthetic construct
AFDTRGGAGDEKGI

SEQ ID NO: 30786 - protein, 15 aa, synthetic construct
AFDTVGISSWNTRQM

SEQ ID NO: 30787 - protein, 13 aa, synthetic construct
AFDTVRGNTDKLI

SEQ ID NO: 30788 - protein, 10 aa, synthetic construct
AFDTWGPKLI

SEQ ID NO: 30789 - protein, 11 aa, synthetic construct
AFGDTKTDKLI

SEQ ID NO: 30790 - protein, 13 aa, synthetic construct
AFGPTGEPHRQTH

SEQ ID NO: 30791 - protein, 13 aa, synthetic construct
AFHKGYGYTDKLI

SEQ ID NO: 30792 - protein, 12 aa, synthetic construct
AFHLLADTDKLI

SEQ ID NO: 30793 - protein, 13 aa, synthetic construct
AFHSVLGETDKLI

SEQ ID NO: 30794 - protein, 14 aa, synthetic construct
AFDSTGGPYTDKLI

SEQ ID NO: 30795 - protein, 12 aa, synthetic construct
AFDRGDYTDKLI

SEQ ID NO: 30796 - protein, 12 aa, synthetic construct
AIYLLGDTDKLI

SEQ ID NO: 30797 - protein, 13 aa, synthetic construct
ACYTVRGNTDKLI

SEQ ID NO: 30798 - protein, 13 aa, synthetic construct
ACYSILGETDKLI

SEQ ID NO: 30799 - protein, 14 aa, synthetic construct
ACYSNWGDTGDKLI

SEQ ID NO: 30800 - protein, 13 aa, synthetic construct
ACYSVLWETDKLI

SEQ ID NO: 30801 - protein, 13 aa, synthetic construct
ACYSVMGENDKLI

SEQ ID NO: 30802 - protein, 13 aa, synthetic construct
ACYTGDRHTDKPI

SEQ ID NO: 30803 - protein, 13 aa, synthetic construct
ACYTGWVITDKLI

SEQ ID NO: 30804 - protein, 10 aa, synthetic construct
ACYTSGDKLI

SEQ ID NO: 30805 - protein, 10 aa, synthetic construct
ACYTSGDKLN

SEQ ID NO: 30806 - protein, 10 aa, synthetic construct
ACYTSGGLLI

SEQ ID NO: 30807 - protein, 13 aa, synthetic construct
ACYYVLGETDKLI

SEQ ID NO: 30808 - protein, 13 aa, synthetic construct
AFDKVYVYTDKLI

SEQ ID NO: 30809 - protein, 12 aa, synthetic construct
ADDTEGDTDKLI

SEQ ID NO: 30810 - protein, 14 aa, synthetic construct
ADDYWGIPYTDKLI

SEQ ID NO: 30811 - protein, 13 aa, synthetic construct
AFDHWGIDTDKLI

SEQ ID NO: 30812 - protein, 13 aa, synthetic construct
AFDHWGIDTDNLI

SEQ ID NO: 30813 - protein, 13 aa, synthetic construct
AFDIGGAGDDKLI

SEQ ID NO: 30814 - protein, 12 aa, synthetic construct
AFDIGGNTGKLI

SEQ ID NO: 30815 - protein, 12 aa, synthetic construct
AFDIGGYADKLI

SEQ ID NO: 30816 - protein, 13 aa, synthetic construct
AFDKGWGITDKLI

SEQ ID NO: 30817 - protein, 13 aa, synthetic construct
AFDKLGVYTDKLI

SEQ ID NO: 30818 - protein, 13 aa, synthetic construct
AFYNTGGYHDKLI

SEQ ID NO: 30819 - protein, 12 aa, synthetic construct
AFYQLGDTDKLI

SEQ ID NO: 30820 - protein, 12 aa, synthetic construct
AFYTGRGPDKLI

SEQ ID NO: 30821 - protein, 13 aa, synthetic construct
AGDTVRGNTEKLI

SEQ ID NO: 30822 - protein, 13 aa, synthetic construct
AGDTGDTYTDKLI

SEQ ID NO: 30823 - protein, 13 aa, synthetic construct
AGDTGEGVTDKLI

SEQ ID NO: 30824 - protein, 12 aa, synthetic construct
AGDTGRGPDKLI

SEQ ID NO: 30825 - protein, 15 aa, synthetic construct
AGDTGRGTPYTDKLI

SEQ ID NO: 30826 - protein, 15 aa, synthetic construct
AGDTGSGGPYTDKLI

SEQ ID NO: 30827 - protein, 13 aa, synthetic construct
AGDTGWGLTEKLI

SEQ ID NO: 30828 - protein, 15 aa, synthetic construct
AGDTGWGPPNTEKHF

SEQ ID NO: 30829 - protein, 13 aa, synthetic construct
AGDTRDRGTDTPI

SEQ ID NO: 30830 - protein, 10 aa, synthetic construct
AGDTSGDKLI

SEQ ID NO: 30831 - protein, 13 aa, synthetic construct
AGDTVRGNTEPRI

SEQ ID NO: 30832 - protein, 14 aa, synthetic construct
AFYTRWGAGDDKLI

SEQ ID NO: 30833 - protein, 14 aa, synthetic construct
AGDYWGIPYTDKLI

SEQ ID NO: 30834 - protein, 11 aa, synthetic construct
AGEVEDTGKLI

SEQ ID NO: 30835 - protein, 11 aa, synthetic construct
AGGDTKTDTLI

SEQ ID NO: 30836 - protein, 12 aa, synthetic construct
AGGIGGYADKLI

SEQ ID NO: 30837 - protein, 12 aa, synthetic construct
AGHRRGYADKLI

SEQ ID NO: 30838 - protein, 13 aa, synthetic construct
AGRAGAPDTDKLI

SEQ ID NO: 30839 - protein, 13 aa, synthetic construct
AGRTGGPYTDKLI

SEQ ID NO: 30840 - protein, 8 aa, synthetic construct
AHPWRVTG

SEQ ID NO: 30841 - protein, 13 aa, synthetic construct
AISSGGPYTDKLI

SEQ ID NO: 30842 - protein, 12 aa, synthetic construct
AGDTGDTTEKLI

SEQ ID NO: 30843 - protein, 12 aa, synthetic construct
AGDTGDRTDKLI

SEQ ID NO: 30844 - protein, 13 aa, synthetic construct
AGDTGDRHTDTLI

SEQ ID NO: 30845 - protein, 13 aa, synthetic construct
AGDTGDRHTDKLI

SEQ ID NO: 30846 - protein, 13 aa, synthetic construct
AFYYVLGETDKLI

SEQ ID NO: 30847 - protein, 13 aa, synthetic construct
AGATGWGINAQHM

SEQ ID NO: 30848 - protein, 9 aa, synthetic construct
AGDAEGRTH

SEQ ID NO: 30849 - protein, 12 aa, synthetic construct
AGDIGGYADKLI

SEQ ID NO: 30850 - protein, 13 aa, synthetic construct
AGDKLGVYTDKLI

SEQ ID NO: 30851 - protein, 12 aa, synthetic construct
AGDLGDTGDQLV

SEQ ID NO: 30852 - protein, 14 aa, synthetic construct
AGDLGDTPDTDQII

SEQ ID NO: 30853 - protein, 14 aa, synthetic construct
AGDLGDTPDTDQLI

SEQ ID NO: 30854 - protein, 12 aa, synthetic construct
AGDLLGDTDKLI

SEQ ID NO: 30855 - protein, 14 aa, synthetic construct
AGDMYWGPNTDKLI

SEQ ID NO: 30856 - protein, 10 aa, synthetic construct
AGDNTGGLLI

SEQ ID NO: 30857 - protein, 13 aa, synthetic construct
AGDNTGGYHEKLI

SEQ ID NO: 30858 - protein, 17 aa, synthetic construct
AGDPLFWGIRQTDDQLI

SEQ ID NO: 30859 - protein, 12 aa, synthetic construct
AGDPLGDTDTLI

SEQ ID NO: 30860 - protein, 12 aa, synthetic construct
AGDRGDYTDKLI

SEQ ID NO: 30861 - protein, 12 aa, synthetic construct
AGDTAHTTEKLI

SEQ ID NO: 30862 - protein, 16 aa, synthetic construct
AGDTAVGDTRRTDKLT

SEQ ID NO: 30863 - protein, 10 aa, synthetic construct
AGDTCGPKLI

SEQ ID NO: 30864 - protein, 9 aa, synthetic construct
AGDTEGQNH

SEQ ID NO: 30865 - protein, 12 aa, synthetic construct
ASDTLGDTDKHI

SEQ ID NO: 30866 - protein, 15 aa, synthetic construct
ASDTLLGDTATDKLI

SEQ ID NO: 30867 - protein, 12 aa, synthetic construct
DCDIGGYDDKLI

SEQ ID NO: 30868 - protein, 12 aa, synthetic construct
AWEPGYNPDKLI

SEQ ID NO: 30869 - protein, 11 aa, synthetic construct
AWEPGDTPNDK

SEQ ID NO: 30870 - protein, 15 aa, synthetic construct
AWEPGDTRLLGHPTD

SEQ ID NO: 30871 - protein, 12 aa, synthetic construct
AWEPGEHPDQLL

SEQ ID NO: 30872 - protein, 12 aa, synthetic construct
AWEPGENPEKLR

SEQ ID NO: 30873 - protein, 12 aa, synthetic construct
AWEPGGHPDKLI

SEQ ID NO: 30874 - protein, 12 aa, synthetic construct
AWEPGGITDKLI

SEQ ID NO: 30875 - protein, 12 aa, synthetic construct
AWEPGIIPINSS

SEQ ID NO: 30876 - protein, 13 aa, synthetic construct
AWEPGILTPINSS

SEQ ID NO: 30877 - protein, 12 aa, synthetic construct
AWEPGVNPDKLI

SEQ ID NO: 30878 - protein, 12 aa, synthetic construct
AWEPLDNPHKLI

SEQ ID NO: 30879 - protein, 14 aa, synthetic construct
AWEPGDTPDTDKLI

SEQ ID NO: 30880 - protein, 6 aa, synthetic construct
AWEPRD

SEQ ID NO: 30881 - protein, 12 aa, synthetic construct
AWEPRVNPDKLI

SEQ ID NO: 30882 - protein, 12 aa, synthetic construct
AWERGDNPDKLI

SEQ ID NO: 30883 - protein, 12 aa, synthetic construct
AWESGDNPDKLI

SEQ ID NO: 30884 - protein, 14 aa, synthetic construct
AWESNSGDTGDKLI

SEQ ID NO: 30885 - protein, 12 aa, synthetic construct
AWETGDNQDKLI

SEQ ID NO: 30886 - protein, 11 aa, synthetic construct
AWGDTKTDQLI

SEQ ID NO: 30887 - protein, 11 aa, synthetic construct
AWGETKTEKLI

SEQ ID NO: 30888 - protein, 11 aa, synthetic construct
AWGGTKTDKLI

SEQ ID NO: 30889 - protein, 12 aa, synthetic construct
AWEPGDTPINSS

SEQ ID NO: 30890 - protein, 12 aa, synthetic construct
AWEPGDTNDKLI

SEQ ID NO: 30891 - protein, 12 aa, synthetic construct
AWGPGDNHDKLI

SEQ ID NO: 30892 - protein, 12 aa, synthetic construct
AWEPGDNPDILI

SEQ ID NO: 30893 - protein, 12 aa, synthetic construct
AWEAVDNPDKLI

SEQ ID NO: 30894 - protein, 12 aa, synthetic construct
AWELGDNPDKLI

SEQ ID NO: 30895 - protein, 13 aa, synthetic construct
AWEPARMDTEQID

SEQ ID NO: 30896 - protein, 12 aa, synthetic construct
AWEPGANPDKLI

SEQ ID NO: 30897 - protein, 12 aa, synthetic construct
AWEPGDKPDKLI

SEQ ID NO: 30898 - protein, 13 aa, synthetic construct
AWEPGDKPPINSS

SEQ ID NO: 30899 - protein, 12 aa, synthetic construct
AWEPGDNLDKLI

SEQ ID NO: 30900 - protein, 12 aa, synthetic construct
AWEPGDNPAKLI

SEQ ID NO: 30901 - protein, 12 aa, synthetic construct
AWEPGDNPANLI

SEQ ID NO: 30902 - protein, 12 aa, synthetic construct
AWEPGDNPDKLN

SEQ ID NO: 30903 - protein, 11 aa, synthetic construct
AWEPGDTDKLI

SEQ ID NO: 30904 - protein, 12 aa, synthetic construct
AWEPGDNPDKLV

SEQ ID NO: 30905 - protein, 12 aa, synthetic construct
AWEPGDNPDKRI

SEQ ID NO: 30906 - protein, 12 aa, synthetic construct
AWEPGDNPDNLI

SEQ ID NO: 30907 - protein, 12 aa, synthetic construct
AWEPGDNPDPLI

SEQ ID NO: 30908 - protein, 12 aa, synthetic construct
AWEPGDNPDQLT

SEQ ID NO: 30909 - protein, 12 aa, synthetic construct
AWEPGDNPDTLI

SEQ ID NO: 30910 - protein, 12 aa, synthetic construct
AWEPGDNPEKRI

SEQ ID NO: 30911 - protein, 12 aa, synthetic construct
AWEPGDNSDKLI

SEQ ID NO: 30912 - protein, 12 aa, synthetic construct
AWEPGDNTDKLI

SEQ ID NO: 30913 - protein, 10 aa, synthetic construct
AWGGVVGGGG

SEQ ID NO: 30914 - protein, 12 aa, synthetic construct
AWGPGDNPDQLI

SEQ ID NO: 30915 - protein, 12 aa, synthetic construct
ASDTQGDTDKLN

SEQ ID NO: 30916 - protein, 13 aa, synthetic construct
AYDTGGYKDDKLI

SEQ ID NO: 30917 - protein, 15 aa, synthetic construct
AYDCCTGGYRGDKLI

SEQ ID NO: 30918 - protein, 14 aa, synthetic construct
AYDKYWGPNTDKLI

SEQ ID NO: 30919 - protein, 12 aa, synthetic construct
AYDLGDTGDKLI

SEQ ID NO: 30920 - protein, 14 aa, synthetic construct
AYDMYWGPNTDKLI

SEQ ID NO: 30921 - protein, 13 aa, synthetic construct
AYDNTGGYHDKLI

SEQ ID NO: 30922 - protein, 12 aa, synthetic construct
AYDRGDYTDKLI

SEQ ID NO: 30923 - protein, 13 aa, synthetic construct
AYDSVLGDTDKLI

SEQ ID NO: 30924 - protein, 13 aa, synthetic construct
AYDTGDTYTDKLI

SEQ ID NO: 30925 - protein, 15 aa, synthetic construct
AYDTGEGLGAVDKLI

SEQ ID NO: 30926 - protein, 13 aa, synthetic construct
AYDTGWGITDKLI

SEQ ID NO: 30927 - protein, 11 aa, synthetic construct
AWYWGTSINSS

SEQ ID NO: 30928 - protein, 15 aa, synthetic construct
AYDTLLGDTATDKLI

SEQ ID NO: 30929 - protein, 10 aa, synthetic construct
AYDTSGGLLI

SEQ ID NO: 30930 - protein, 15 aa, synthetic construct
AYDTVLGDTATDKLI

SEQ ID NO: 30931 - protein, 11 aa, synthetic construct
AYGDTKTDKLI

SEQ ID NO: 30932 - protein, 15 aa, synthetic construct
DCDCCTGGYRGEKLI

SEQ ID NO: 30933 - protein, 14 aa, synthetic construct
DCDCTWGPYTDKLI

SEQ ID NO: 30934 - protein, 13 aa, synthetic construct
DCDHWGIDTDTLI

SEQ ID NO: 30935 - protein, 12 aa, synthetic construct
DCDIGGYADKII

SEQ ID NO: 30936 - protein, 12 aa, synthetic construct
DCDIGGYADKLI

SEQ ID NO: 30937 - protein, 14 aa, synthetic construct
AYDANWGDTGDKLI

SEQ ID NO: 30938 - protein, 14 aa, synthetic construct
AWYMYWGPKTDKLI

SEQ ID NO: 30939 - protein, 11 aa, synthetic construct
AWGVWGPYKLI

SEQ ID NO: 30940 - protein, 11 aa, synthetic construct
AWVLGDLDQLI

SEQ ID NO: 30941 - protein, 12 aa, synthetic construct
AWKAGDNPDKLI

SEQ ID NO: 30942 - protein, 5 aa, synthetic construct
AWLTH

SEQ ID NO: 30943 - protein, 12 aa, synthetic construct
AWQPGDNPDNSS

SEQ ID NO: 30944 - protein, 5 aa, synthetic construct
AWQTH

SEQ ID NO: 30945 - protein, 13 aa, synthetic construct
AWRTLGHYTDKLI

SEQ ID NO: 30946 - protein, 11 aa, synthetic construct
AWVLGALDKLI

SEQ ID NO: 30947 - protein, 11 aa, synthetic construct
AWVLGDHDKLI

SEQ ID NO: 30948 - protein, 12 aa, synthetic construct
AWVLGDHTDKLI

SEQ ID NO: 30949 - protein, 11 aa, synthetic construct
AWVLGDLDKLV

SEQ ID NO: 30950 - protein, 13 aa, synthetic construct
AWVLGDTGGINSS

SEQ ID NO: 30951 - protein, 11 aa, synthetic construct
AWVVWGPYKLI

SEQ ID NO: 30952 - protein, 12 aa, synthetic construct
AWVLGDTTINSS

SEQ ID NO: 30953 - protein, 11 aa, synthetic construct
AWVLGELDNLI

SEQ ID NO: 30954 - protein, 11 aa, synthetic construct
AWVLGGLDKLI

SEQ ID NO: 30955 - protein, 11 aa, synthetic construct
AWVLGGLDRLS

SEQ ID NO: 30956 - protein, 11 aa, synthetic construct
AWVLGTSINSS

SEQ ID NO: 30957 - protein, 11 aa, synthetic construct
AWVLWDLDKLI

SEQ ID NO: 30958 - protein, 11 aa, synthetic construct
AWVRGDLDKLI

SEQ ID NO: 30959 - protein, 11 aa, synthetic construct
AWVVGDLDKLI

SEQ ID NO: 30960 - protein, 11 aa, synthetic construct
AWVVGDLGKLS

SEQ ID NO: 30961 - protein, 12 aa, synthetic construct
AWEAGDNPDKLI

SEQ ID NO: 30962 - protein, 13 aa, synthetic construct
AWDTSWGITDKLI

SEQ ID NO: 30963 - protein, 15 aa, synthetic construct
AWDTSWGIRNTAKLI

SEQ ID NO: 30964 - protein, 14 aa, synthetic construct
AWALGVTPDTDKLI

SEQ ID NO: 30965 - protein, 13 aa, synthetic construct
AVTPYWGKPINSS

SEQ ID NO: 30966 - protein, 12 aa, synthetic construct
AVTVGTTPINSS

SEQ ID NO: 30967 - protein, 11 aa, synthetic construct
AWADGGPYKLN

SEQ ID NO: 30968 - protein, 11 aa, synthetic construct
AWADSAPSNII

SEQ ID NO: 30969 - protein, 11 aa, synthetic construct
AWADWGPYKLI

SEQ ID NO: 30970 - protein, 11 aa, synthetic construct
AWAFWGPYKLI

SEQ ID NO: 30971 - protein, 11 aa, synthetic construct
AWAGWGPCELI

SEQ ID NO: 30972 - protein, 11 aa, synthetic construct
AWAGWGPSKLI

SEQ ID NO: 30973 - protein, 11 aa, synthetic construct
AWAGWWPYKLI

SEQ ID NO: 30974 - protein, 11 aa, synthetic construct
AWALLGPYKLI

SEQ ID NO: 30975 - protein, 12 aa, synthetic construct
AVTLGETPINSS

SEQ ID NO: 30976 - protein, 12 aa, synthetic construct
AWAPGDNPDKLI

SEQ ID NO: 30977 - protein, 10 aa, synthetic construct
AWATSGGLLI

SEQ ID NO: 30978 - protein, 11 aa, synthetic construct
AWAVARPYKLI

SEQ ID NO: 30979 - protein, 11 aa, synthetic construct
AWAVCGPDKLI

SEQ ID NO: 30980 - protein, 11 aa, synthetic construct
AWAVLRPYKLI

SEQ ID NO: 30981 - protein, 11 aa, synthetic construct
AWAVSGPYKLI

SEQ ID NO: 30982 - protein, 11 aa, synthetic construct
AWAVWGAYKLS

SEQ ID NO: 30983 - protein, 11 aa, synthetic construct
AWAVWGPDTLI

SEQ ID NO: 30984 - protein, 11 aa, synthetic construct
AWAVWGPEKLI

SEQ ID NO: 30985 - protein, 10 aa, synthetic construct
AVTPGGPNSS

SEQ ID NO: 30986 - protein, 6 aa, synthetic construct
ATQKLI

SEQ ID NO: 30987 - protein, 12 aa, synthetic construct
AWDTSGGSVKLI

SEQ ID NO: 30988 - protein, 10 aa, synthetic construct
ASERSADKLI

SEQ ID NO: 30989 - protein, 12 aa, synthetic construct
ASDTRGYADKLI

SEQ ID NO: 30990 - protein, 13 aa, synthetic construct
ASDTSDRGTDQLI

SEQ ID NO: 30991 - protein, 13 aa, synthetic construct
ACEKLGVYTDKLI

SEQ ID NO: 30992 - protein, 13 aa, synthetic construct
ASDTVLGNTDKLI

SEQ ID NO: 30993 - protein, 15 aa, synthetic construct
ASDTVWGTTKTDKLF

SEQ ID NO: 30994 - protein, 15 aa, synthetic construct
ASDTWEGLGAVEKLI

SEQ ID NO: 30995 - protein, 15 aa, synthetic construct
ASDTYWGIRNTDKLI

SEQ ID NO: 30996 - protein, 12 aa, synthetic construct
ASEPGDNHDKLI

SEQ ID NO: 30997 - protein, 12 aa, synthetic construct
ASEPGDNPDKLI

SEQ ID NO: 30998 - protein, 15 aa, synthetic construct
ASETRRGGPYTHKLI

SEQ ID NO: 30999 - protein, 12 aa, synthetic construct
ATDTLGDTEKLK

SEQ ID NO: 31000 - protein, 11 aa, synthetic construct
ASEVEDTDRLI

SEQ ID NO: 31001 - protein, 11 aa, synthetic construct
ASGDTNTDKLI

SEQ ID NO: 31002 - protein, 13 aa, synthetic construct
ASYSGDRHTDKLI

SEQ ID NO: 31003 - protein, 15 aa, synthetic construct
ASYTGWGTPYTDNLI

SEQ ID NO: 31004 - protein, 13 aa, synthetic construct
ATDSVLGETDKLI

SEQ ID NO: 31005 - protein, 13 aa, synthetic construct
ATDTGDRHTDKLI

SEQ ID NO: 31006 - protein, 12 aa, synthetic construct
ATDTGDRTDKLI

SEQ ID NO: 31007 - protein, 12 aa, synthetic construct
ATDTGGGSVKLI

SEQ ID NO: 31008 - protein, 12 aa, synthetic construct
ATDTLGDTDKLI

SEQ ID NO: 31009 - protein, 11 aa, synthetic construct
AWAVWGPERLI

SEQ ID NO: 31010 - protein, 11 aa, synthetic construct
AWAVWGPHKLI

SEQ ID NO: 31011 - protein, 11 aa, synthetic construct
AWAVWGPINSS

SEQ ID NO: 31012 - protein, 12 aa, synthetic construct
AWDTGARTDKLI

SEQ ID NO: 31013 - protein, 12 aa, synthetic construct
AWDPGDNPDNLI

SEQ ID NO: 31014 - protein, 12 aa, synthetic construct
AWDPGGGSVKLI

SEQ ID NO: 31015 - protein, 12 aa, synthetic construct
AWDPRGDADALS

SEQ ID NO: 31016 - protein, 12 aa, synthetic construct
AWDQGDKTEKLI

SEQ ID NO: 31017 - protein, 14 aa, synthetic construct
AWDRGDTPETQIVI

SEQ ID NO: 31018 - protein, 13 aa, synthetic construct
AWDRPGGYTDKLI

SEQ ID NO: 31019 - protein, 14 aa, synthetic construct
AWDSHWGDTGDKLI

SEQ ID NO: 31020 - protein, 14 aa, synthetic construct
AWDSNWGDTGDKLI

SEQ ID NO: 31021 - protein, 13 aa, synthetic construct
AWDSVLGETDKLI

SEQ ID NO: 31022 - protein, 13 aa, synthetic construct
AWDTGDRHTDKLI

SEQ ID NO: 31023 - protein, 11 aa, synthetic construct
AWAVWGPSELI

SEQ ID NO: 31024 - protein, 15 aa, synthetic construct
AWDTGEGLGAVDKLI

SEQ ID NO: 31025 - protein, 12 aa, synthetic construct
AWDTGGGSVKLI

SEQ ID NO: 31026 - protein, 13 aa, synthetic construct
AWDTGWGITDKLI

SEQ ID NO: 31027 - protein, 5 aa, synthetic construct
AWDTH

SEQ ID NO: 31028 - protein, 17 aa, synthetic construct
AWDTLCWGRCQTDDRLI

SEQ ID NO: 31029 - protein, 12 aa, synthetic construct
AWDTLGDTDKLI

SEQ ID NO: 31030 - protein, 13 aa, synthetic construct
AWDTRDTPNDKLI

SEQ ID NO: 31031 - protein, 15 aa, synthetic construct
AWDTRSGGPYTDKLI

SEQ ID NO: 31032 - protein, 10 aa, synthetic construct
AWDTSGAQNI

SEQ ID NO: 31033 - protein, 12 aa, synthetic construct
AWDPGDNPDELI

SEQ ID NO: 31034 - protein, 13 aa, synthetic construct
AWDPDWGPTDKLI

SEQ ID NO: 31035 - protein, 14 aa, synthetic construct
AWDMYWGPNTDKLI

SEQ ID NO: 31036 - protein, 12 aa, synthetic construct
AWDLVGDTDKLI

SEQ ID NO: 31037 - protein, 11 aa, synthetic construct
AWAVWGPSKPI

SEQ ID NO: 31038 - protein, 11 aa, synthetic construct
AWAVWGPSQLI

SEQ ID NO: 31039 - protein, 11 aa, synthetic construct
AWAVWGPYKII

SEQ ID NO: 31040 - protein, 11 aa, synthetic construct
AWAVWGPYKLF

SEQ ID NO: 31041 - protein, 11 aa, synthetic construct
AWAVWGPYKLL

SEQ ID NO: 31042 - protein, 11 aa, synthetic construct
AWAVWGPYKLN

SEQ ID NO: 31043 - protein, 11 aa, synthetic construct
AWAVWGPYKPI

SEQ ID NO: 31044 - protein, 11 aa, synthetic construct
AWAVWGPYQVS

SEQ ID NO: 31045 - protein, 11 aa, synthetic construct
AWAVWGRYKLI

SEQ ID NO: 31046 - protein, 11 aa, synthetic construct
AWAVWVPYKLI

SEQ ID NO: 31047 - protein, 11 aa, synthetic construct
AWAVWWPYKLI

SEQ ID NO: 31048 - protein, 15 aa, synthetic construct
AWDCCTGGYRGDKLI

SEQ ID NO: 31049 - protein, 14 aa, synthetic construct
AWDCPGGPYTDKLI

SEQ ID NO: 31050 - protein, 15 aa, synthetic construct
AWDCRTGGYRGDKLI

SEQ ID NO: 31051 - protein, 13 aa, synthetic construct
AWDHWGIDTDKLI

SEQ ID NO: 31052 - protein, 13 aa, synthetic construct
AWDHWGIDTEKRI

SEQ ID NO: 31053 - protein, 12 aa, synthetic construct
AWDIGGNTDKLI

SEQ ID NO: 31054 - protein, 14 aa, synthetic construct
AWDLGDTPDTDKLI

SEQ ID NO: 31055 - protein, 14 aa, synthetic construct
AWDLGDTPDTDRLI

SEQ ID NO: 31056 - protein, 8 aa, synthetic construct
ACEKLGYT

SEQ ID NO: 31057 - protein, 11 aa, synthetic construct
AAAVWGPYKLI

SEQ ID NO: 31058 - protein, 13 aa, synthetic construct
ACEKLGAYTDKLI

SEQ ID NO: 31059 - protein, 13 aa, synthetic construct
ACDPYWVPTDKLI

SEQ ID NO: 31060 - protein, 13 aa, synthetic construct
ACDPYWGPPDKLI

SEQ ID NO: 31061 - protein, 13 aa, synthetic construct
ACDPYWGPPDKVI

SEQ ID NO: 31062 - protein, 13 aa, synthetic construct
ACDPYWGPSDKLI

SEQ ID NO: 31063 - protein, 13 aa, synthetic construct
ACDPYWGPTDILI

SEQ ID NO: 31064 - protein, 13 aa, synthetic construct
ACDPYWGPTDKRI

SEQ ID NO: 31065 - protein, 13 aa, synthetic construct
ACDPYWGPTEKLN

SEQ ID NO: 31066 - protein, 13 aa, synthetic construct
ACDPYWGPTYKLI

SEQ ID NO: 31067 - protein, 13 aa, synthetic construct
ACDPYWGTTDKLN

SEQ ID NO: 31068 - protein, 13 aa, synthetic construct
ACDPYWRPTDKLI

SEQ ID NO: 31069 - protein, 13 aa, synthetic construct
ACDPYWVTTDKLI

SEQ ID NO: 31070 - protein, 13 aa, synthetic construct
ACDPYWGKPINSS

SEQ ID NO: 31071 - protein, 13 aa, synthetic construct
ACDPYWWPTDKLI

SEQ ID NO: 31072 - protein, 14 aa, synthetic construct
ACDQGDTPDTDKLI

SEQ ID NO: 31073 - protein, 12 aa, synthetic construct
ACDQGETRDNNT

SEQ ID NO: 31074 - protein, 13 aa, synthetic construct
ACDQGYGYTDKPI

SEQ ID NO: 31075 - protein, 12 aa, synthetic construct
ACDQLCDTDKII

SEQ ID NO: 31076 - protein, 12 aa, synthetic construct
ACDQLGDPDKLI

SEQ ID NO: 31077 - protein, 14 aa, synthetic construct
ACDQPLGGITDKLI

SEQ ID NO: 31078 - protein, 13 aa, synthetic construct
ACDQWGIDTDNLI

SEQ ID NO: 31079 - protein, 12 aa, synthetic construct
ACDRADNNEKLI

SEQ ID NO: 31080 - protein, 13 aa, synthetic construct
ACDPYWGPAEKLI

SEQ ID NO: 31081 - protein, 15 aa, synthetic construct
ACDPYWGIRNTDKLI

SEQ ID NO: 31082 - protein, 12 aa, synthetic construct
ACDRGAYAAKLI

SEQ ID NO: 31083 - protein, 12 aa, synthetic construct
ACDPSGYADKLI

SEQ ID NO: 31084 - protein, 15 aa, synthetic construct
ACDPGWGTPYTEKLI

SEQ ID NO: 31085 - protein, 13 aa, synthetic construct
ACDPHWGPTDKLS

SEQ ID NO: 31086 - protein, 9 aa, synthetic construct
ACDPKVKLI

SEQ ID NO: 31087 - protein, 14 aa, synthetic construct
ACDPNWGDTGDQLI

SEQ ID NO: 31088 - protein, 14 aa, synthetic construct
ACDPPLGGITDKLI

SEQ ID NO: 31089 - protein, 14 aa, synthetic construct
ACDPRWGAGDDKLI

SEQ ID NO: 31090 - protein, 10 aa, synthetic construct
ACDPSGDQRL

SEQ ID NO: 31091 - protein, 10 aa, synthetic construct
ACDPSGGLLI

SEQ ID NO: 31092 - protein, 10 aa, synthetic construct
ACDPSGGNRI

SEQ ID NO: 31093 - protein, 12 aa, synthetic construct
ACDPVGDTDKLI

SEQ ID NO: 31094 - protein, 13 aa, synthetic construct
ACDPYWATTDKLI

SEQ ID NO: 31095 - protein, 15 aa, synthetic construct
ACDPVGISSRDTRQM

SEQ ID NO: 31096 - protein, 15 aa, synthetic construct
ACDPVGISSWDTRQM

SEQ ID NO: 31097 - protein, 15 aa, synthetic construct
ACDPVLGDTATDKLI

SEQ ID NO: 31098 - protein, 15 aa, synthetic construct
ACDPVLGDTATDQLI

SEQ ID NO: 31099 - protein, 15 aa, synthetic construct
ACDPVQGDTATDNLI

SEQ ID NO: 31100 - protein, 13 aa, synthetic construct
ACDPVRGNTDHLI

SEQ ID NO: 31101 - protein, 13 aa, synthetic construct
ACDPVRGNTDKLI

SEQ ID NO: 31102 - protein, 10 aa, synthetic construct
ACDPWGPKLI

SEQ ID NO: 31103 - protein, 13 aa, synthetic construct
ACDPYGGPTDKLI

SEQ ID NO: 31104 - protein, 13 aa, synthetic construct
ACDRAGGYTDKLI

SEQ ID NO: 31105 - protein, 12 aa, synthetic construct
ACDRGAYTDKLI

SEQ ID NO: 31106 - protein, 14 aa, synthetic construct
ACDRYRGPNTDKLV

SEQ ID NO: 31107 - protein, 13 aa, synthetic construct
ACDRTGGYPDKLI

SEQ ID NO: 31108 - protein, 13 aa, synthetic construct
ACDRPGGYTDKLI

SEQ ID NO: 31109 - protein, 12 aa, synthetic construct
ACDRRDYTDKLI

SEQ ID NO: 31110 - protein, 10 aa, synthetic construct
ACDRRGDKLI

SEQ ID NO: 31111 - protein, 12 aa, synthetic construct
ACDRRGYADKVI

SEQ ID NO: 31112 - protein, 13 aa, synthetic construct
ACDRSGGYTDILI

SEQ ID NO: 31113 - protein, 13 aa, synthetic construct
ACDRSGGYTDKLI

SEQ ID NO: 31114 - protein, 13 aa, synthetic construct
ACDRTGGCTDRLI

SEQ ID NO: 31115 - protein, 15 aa, synthetic construct
ACDRTGGFLTPINSS

SEQ ID NO: 31116 - protein, 13 aa, synthetic construct
ACDRTGGYADKLI

SEQ ID NO: 31117 - protein, 13 aa, synthetic construct
ACDRTGGYTDKII

SEQ ID NO: 31118 - protein, 12 aa, synthetic construct
ACDRLWDSDKLI

SEQ ID NO: 31119 - protein, 13 aa, synthetic construct
ACDRTGGYTEKLI

SEQ ID NO: 31120 - protein, 13 aa, synthetic construct
ACDRTGGYTYKLI

SEQ ID NO: 31121 - protein, 13 aa, synthetic construct
ACDRTGRTPINSS

SEQ ID NO: 31122 - protein, 13 aa, synthetic construct
ACDRTRGYTDKLI

SEQ ID NO: 31123 - protein, 13 aa, synthetic construct
ACDRTWGYTDKLI

SEQ ID NO: 31124 - protein, 12 aa, synthetic construct
ACDRVDYTDKHI

SEQ ID NO: 31125 - protein, 12 aa, synthetic construct
ACDRVDYTDKLI

SEQ ID NO: 31126 - protein, 12 aa, synthetic construct
ACDRVHYTDKLI

SEQ ID NO: 31127 - protein, 12 aa, synthetic construct
ACDRVQYTDKLI

SEQ ID NO: 31128 - protein, 12 aa, synthetic construct
ACDRMGYADKLI

SEQ ID NO: 31129 - protein, 13 aa, synthetic construct
ACDRLGDTYDKLI

SEQ ID NO: 31130 - protein, 10 aa, synthetic construct
ACDRGDDKLI

SEQ ID NO: 31131 - protein, 12 aa, synthetic construct
ACDRGDYTDKLL

SEQ ID NO: 31132 - protein, 12 aa, synthetic construct
ACDRGDDTDKLI

SEQ ID NO: 31133 - protein, 12 aa, synthetic construct
ACDRGDFTDKLI

SEQ ID NO: 31134 - protein, 10 aa, synthetic construct
ACDRGDPNSS

SEQ ID NO: 31135 - protein, 14 aa, synthetic construct
ACDRGDTPDTAKLI

SEQ ID NO: 31136 - protein, 14 aa, synthetic construct
ACDRGDTPDTDKLV

SEQ ID NO: 31137 - protein, 14 aa, synthetic construct
ACDRGDTPDTEKLI

SEQ ID NO: 31138 - protein, 12 aa, synthetic construct
ACDRGDYSDKLI

SEQ ID NO: 31139 - protein, 12 aa, synthetic construct
ACDRGDYTDIII

SEQ ID NO: 31140 - protein, 12 aa, synthetic construct
ACDRGDYTDKHN

SEQ ID NO: 31141 - protein, 12 aa, synthetic construct
ACDRGDYTDNLI

SEQ ID NO: 31142 - protein, 12 aa, synthetic construct
ACDRLGDTDKLI

SEQ ID NO: 31143 - protein, 12 aa, synthetic construct
ACDRGDYTDRLI

SEQ ID NO: 31144 - protein, 12 aa, synthetic construct
ACDRGDYTEKLN

SEQ ID NO: 31145 - protein, 9 aa, synthetic construct
ACDRGDYTG

SEQ ID NO: 31146 - protein, 12 aa, synthetic construct
ACDRGDYTYKLI

SEQ ID NO: 31147 - protein, 12 aa, synthetic construct
ACDRGEYTDKLI

SEQ ID NO: 31148 - protein, 12 aa, synthetic construct
ACDRGGHTEKRI

SEQ ID NO: 31149 - protein, 12 aa, synthetic construct
ACDRGHYTDKLI

SEQ ID NO: 31150 - protein, 13 aa, synthetic construct
ACDRGWGITDKLI

SEQ ID NO: 31151 - protein, 13 aa, synthetic construct
ACDRGYGYTDKLI

SEQ ID NO: 31152 - protein, 15 aa, synthetic construct
ACDPGWGTPYTDNLI

SEQ ID NO: 31153 - protein, 13 aa, synthetic construct
ACDPGWGITEKLI

SEQ ID NO: 31154 - protein, 12 aa, synthetic construct
ACDPGWGIDKLI

SEQ ID NO: 31155 - protein, 12 aa, synthetic construct
ACDNFGDTDKLI

SEQ ID NO: 31156 - protein, 14 aa, synthetic construct
ACDMYWGTNKDKLI

SEQ ID NO: 31157 - protein, 14 aa, synthetic construct
ACDMYWGTTPINSS

SEQ ID NO: 31158 - protein, 14 aa, synthetic construct
ACDMYWVPNTDKII

SEQ ID NO: 31159 - protein, 14 aa, synthetic construct
ACDMYWWPNIDKLI

SEQ ID NO: 31160 - protein, 14 aa, synthetic construct
ACDMYWWPNTDKLI

SEQ ID NO: 31161 - protein, 13 aa, synthetic construct
ACDNAGGYHDKLI

SEQ ID NO: 31162 - protein, 16 aa, synthetic construct
ACDNAVGDTRRTDKLI

SEQ ID NO: 31163 - protein, 10 aa, synthetic construct
ACDNCGPKLI

SEQ ID NO: 31164 - protein, 12 aa, synthetic construct
ACDNEWDSDKVM

SEQ ID NO: 31165 - protein, 13 aa, synthetic construct
ACDNGDRHTDKLI

SEQ ID NO: 31166 - protein, 14 aa, synthetic construct
ACDMYWGPTTDKLI

SEQ ID NO: 31167 - protein, 13 aa, synthetic construct
ACDNGDTYADKLI

SEQ ID NO: 31168 - protein, 13 aa, synthetic construct
ACDNGEGVNDKLI

SEQ ID NO: 31169 - protein, 11 aa, synthetic construct
ACDNGESKKLI

SEQ ID NO: 31170 - protein, 10 aa, synthetic construct
ACDNGEYAEE

SEQ ID NO: 31171 - protein, 12 aa, synthetic construct
ACDNGGGSVKII

SEQ ID NO: 31172 - protein, 12 aa, synthetic construct
ACDNGVGSVKLI

SEQ ID NO: 31173 - protein, 13 aa, synthetic construct
ACDNGYRYTDKLI

SEQ ID NO: 31174 - protein, 17 aa, synthetic construct
ACDNLFCGIRQTDDKLI

SEQ ID NO: 31175 - protein, 17 aa, synthetic construct
ACDNLFWGIRQTDDKLI

SEQ ID NO: 31176 - protein, 14 aa, synthetic construct
ACDMYWGRNTDKLI

SEQ ID NO: 31177 - protein, 15 aa, synthetic construct
ACDMYWGPRTPINSS

SEQ ID NO: 31178 - protein, 14 aa, synthetic construct
ACDPGGYPYTDNLI

SEQ ID NO: 31179 - protein, 14 aa, synthetic construct
ACDMYWGPNSDKLI

SEQ ID NO: 31180 - protein, 14 aa, synthetic construct
ACDMYCVPNTDKLI

SEQ ID NO: 31181 - protein, 14 aa, synthetic construct
ACDMYSGPNTDKLI

SEQ ID NO: 31182 - protein, 14 aa, synthetic construct
ACDMYWGANTDKII

SEQ ID NO: 31183 - protein, 14 aa, synthetic construct
ACDMYWGANTDKLI

SEQ ID NO: 31184 - protein, 14 aa, synthetic construct
ACDMYWGHYTEKVI

SEQ ID NO: 31185 - protein, 13 aa, synthetic construct
ACDMYWGKPINSS

SEQ ID NO: 31186 - protein, 14 aa, synthetic construct
ACDMYWGPHTDKHI

SEQ ID NO: 31187 - protein, 14 aa, synthetic construct
ACDMYWGPHTDKLI

SEQ ID NO: 31188 - protein, 14 aa, synthetic construct
ACDMYWGPNIDKLI

SEQ ID NO: 31189 - protein, 14 aa, synthetic construct
ACDMYWGPNSDNLI

SEQ ID NO: 31190 - protein, 14 aa, synthetic construct
ACDMYWGPNTYKLI

SEQ ID NO: 31191 - protein, 14 aa, synthetic construct
ACDMYWGPNTAKLI

SEQ ID NO: 31192 - protein, 14 aa, synthetic construct
ACDMYWGPNTAQLI

SEQ ID NO: 31193 - protein, 14 aa, synthetic construct
ACDMYWGPNTDKHI

SEQ ID NO: 31194 - protein, 13 aa, synthetic construct
ACDMYWGPNTDKL

SEQ ID NO: 31195 - protein, 14 aa, synthetic construct
ACDMYWGPNTDKLL

SEQ ID NO: 31196 - protein, 14 aa, synthetic construct
ACDMYWGPNTDKLN

SEQ ID NO: 31197 - protein, 14 aa, synthetic construct
ACDMYWGPNTDKPI

SEQ ID NO: 31198 - protein, 14 aa, synthetic construct
ACDMYWGPNTDKVI

SEQ ID NO: 31199 - protein, 14 aa, synthetic construct
ACDMYWGPNTNKLI

SEQ ID NO: 31200 - protein, 17 aa, synthetic construct
ACDNLFWGIRQTDDKRI

SEQ ID NO: 31201 - protein, 12 aa, synthetic construct
ACDNLGDTDKLI

SEQ ID NO: 31202 - protein, 13 aa, synthetic construct
ACDNNGGYHDKII

SEQ ID NO: 31203 - protein, 13 aa, synthetic construct
ACDPDWGPTAKLI

SEQ ID NO: 31204 - protein, 13 aa, synthetic construct
ACDNTRGYHDKLI

SEQ ID NO: 31205 - protein, 12 aa, synthetic construct
ACDNVDTTDKLI

SEQ ID NO: 31206 - protein, 15 aa, synthetic construct
ACDNVGISSWDTRQM

SEQ ID NO: 31207 - protein, 15 aa, synthetic construct
ACDNVLGDTATDKLI

SEQ ID NO: 31208 - protein, 14 aa, synthetic construct
ACDNWGIPYTDKLI

SEQ ID NO: 31209 - protein, 10 aa, synthetic construct
ACDNWGPKLI

SEQ ID NO: 31210 - protein, 14 aa, synthetic construct
ACDPALGGITDKLI

SEQ ID NO: 31211 - protein, 13 aa, synthetic construct
ACDPCWGPTDKLI

SEQ ID NO: 31212 - protein, 12 aa, synthetic construct
ACDPDGDTDKLI

SEQ ID NO: 31213 - protein, 12 aa, synthetic construct
ACDPEGDTDKLI

SEQ ID NO: 31214 - protein, 13 aa, synthetic construct
ACDNNGGYHDKLI

SEQ ID NO: 31215 - protein, 9 aa, synthetic construct
ACDPEGQTH

SEQ ID NO: 31216 - protein, 13 aa, synthetic construct
ACDPGDRHTDKLI

SEQ ID NO: 31217 - protein, 12 aa, synthetic construct
ACDPGDRTDKLI

SEQ ID NO: 31218 - protein, 12 aa, synthetic construct
ACDPGDRTDRLI

SEQ ID NO: 31219 - protein, 12 aa, synthetic construct
ACDPGDTGDKLI

SEQ ID NO: 31220 - protein, 13 aa, synthetic construct
ACDPGDTPNDKLI

SEQ ID NO: 31221 - protein, 13 aa, synthetic construct
ACDPGGSATEKLI

SEQ ID NO: 31222 - protein, 13 aa, synthetic construct
ACDPGGTPNDKLI

SEQ ID NO: 31223 - protein, 12 aa, synthetic construct
ACDPGGYPDKLI

SEQ ID NO: 31224 - protein, 13 aa, synthetic construct
ACDNTGGYQDQLI

SEQ ID NO: 31225 - protein, 13 aa, synthetic construct
ACDNTGGYQDKLI

SEQ ID NO: 31226 - protein, 13 aa, synthetic construct
ACDNTGGYKDKII

SEQ ID NO: 31227 - protein, 13 aa, synthetic construct
ACDNTGGYHNKLI

SEQ ID NO: 31228 - protein, 13 aa, synthetic construct
ACDNNGVYHDKLI

SEQ ID NO: 31229 - protein, 13 aa, synthetic construct
ACDNPGGYHDKLI

SEQ ID NO: 31230 - protein, 13 aa, synthetic construct
ACDNPGGYNDKLI

SEQ ID NO: 31231 - protein, 13 aa, synthetic construct
ACDNRCVYTDKLI

SEQ ID NO: 31232 - protein, 12 aa, synthetic construct
ACDNRGSAKKII

SEQ ID NO: 31233 - protein, 13 aa, synthetic construct
ACDNSGIDTDKLT

SEQ ID NO: 31234 - protein, 13 aa, synthetic construct
ACDNSGLENENII

SEQ ID NO: 31235 - protein, 14 aa, synthetic construct
ACDNSWGPNTDKLI

SEQ ID NO: 31236 - protein, 13 aa, synthetic construct
ACDNTEGYHDKLI

SEQ ID NO: 31237 - protein, 10 aa, synthetic construct
ACDNTGDKLI

SEQ ID NO: 31238 - protein, 13 aa, synthetic construct
ACDNTGDTTINSS

SEQ ID NO: 31239 - protein, 13 aa, synthetic construct
ACDNTGGCHDKLI

SEQ ID NO: 31240 - protein, 13 aa, synthetic construct
ACDNTGGFHDKLI

SEQ ID NO: 31241 - protein, 10 aa, synthetic construct
ACDNTGGLLI

SEQ ID NO: 31242 - protein, 13 aa, synthetic construct
ACDNTGGYDDKLI

SEQ ID NO: 31243 - protein, 13 aa, synthetic construct
ACDNTGGYHAKLI

SEQ ID NO: 31244 - protein, 13 aa, synthetic construct
ACDNTGGYHDKLT

SEQ ID NO: 31245 - protein, 13 aa, synthetic construct
ACDNTGGYHDNSS

SEQ ID NO: 31246 - protein, 13 aa, synthetic construct
ACDNTGGYHENSS

SEQ ID NO: 31247 - protein, 12 aa, synthetic construct
ACDRWDYTDKLI

SEQ ID NO: 31248 - protein, 13 aa, synthetic construct
ACDRYWGPSDKLM

SEQ ID NO: 31249 - protein, 14 aa, synthetic construct
ACDMYCGPNTDKLN

SEQ ID NO: 31250 - protein, 10 aa, synthetic construct
ACDTAGDKLI

SEQ ID NO: 31251 - protein, 12 aa, synthetic construct
ACDTACGIDKLI

SEQ ID NO: 31252 - protein, 13 aa, synthetic construct
ACDTADRHTDKLI

SEQ ID NO: 31253 - protein, 13 aa, synthetic construct
ACDTADTNTDKLI

SEQ ID NO: 31254 - protein, 12 aa, synthetic construct
ACDTADTTHKLI

SEQ ID NO: 31255 - protein, 13 aa, synthetic construct
ACDTADTYTDKLI

SEQ ID NO: 31256 - protein, 16 aa, synthetic construct
ACDTAEGDTRRTHRLI

SEQ ID NO: 31257 - protein, 15 aa, synthetic construct
ACDTAEGLGADEKLI

SEQ ID NO: 31258 - protein, 15 aa, synthetic construct
ACDTAEGLGAVDQLI

SEQ ID NO: 31259 - protein, 13 aa, synthetic construct
ACDTAEGVTDKLI

SEQ ID NO: 31260 - protein, 16 aa, synthetic construct
ACDTAGGDTRRTDQLI

SEQ ID NO: 31261 - protein, 13 aa, synthetic construct
ACDSYWGKPINSS

SEQ ID NO: 31262 - protein, 16 aa, synthetic construct
ACDTAGGDTRRTDQLM

SEQ ID NO: 31263 - protein, 16 aa, synthetic construct
ACDTAGGDTRWTDQLI

SEQ ID NO: 31264 - protein, 10 aa, synthetic construct
ACDTAGGLLI

SEQ ID NO: 31265 - protein, 9 aa, synthetic construct
ACDTAGQTH

SEQ ID NO: 31266 - protein, 15 aa, synthetic construct
ACDTAIRDYRDTRQM

SEQ ID NO: 31267 - protein, 16 aa, synthetic construct
ACDTALGYTIRTDKLI

SEQ ID NO: 31268 - protein, 15 aa, synthetic construct
ACDTARGTPYTDKLI

SEQ ID NO: 31269 - protein, 12 aa, synthetic construct
ACDTARRPDKLI

SEQ ID NO: 31270 - protein, 13 aa, synthetic construct
ACDTASGITEKLI

SEQ ID NO: 31271 - protein, 20 aa, synthetic construct
ACDTAARNANNIIVQETTLD

SEQ ID NO: 31272 - protein, 15 aa, synthetic construct
ACDSYWGIRNTDKLI

SEQ ID NO: 31273 - protein, 16 aa, synthetic construct
ACDTAVGDKLRTDKLI

SEQ ID NO: 31274 - protein, 14 aa, synthetic construct
ACDSVLGGTPINSS

SEQ ID NO: 31275 - protein, 13 aa, synthetic construct
ACDSVLGETDKLL

SEQ ID NO: 31276 - protein, 13 aa, synthetic construct
ACDSVLGETDKLS

SEQ ID NO: 31277 - protein, 13 aa, synthetic construct
ACDSVLGETDNSS

SEQ ID NO: 31278 - protein, 13 aa, synthetic construct
ACDSVLGETDQLL

SEQ ID NO: 31279 - protein, 13 aa, synthetic construct
ACDSVLGETDTLI

SEQ ID NO: 31280 - protein, 13 aa, synthetic construct
ACDSVLGETEKLT

SEQ ID NO: 31281 - protein, 15 aa, synthetic construct
ACDSVLGETGWINSS

SEQ ID NO: 31282 - protein, 13 aa, synthetic construct
ACDSVLGETYTLI

SEQ ID NO: 31283 - protein, 13 aa, synthetic construct
ACDSVLGGTDKLF

SEQ ID NO: 31284 - protein, 13 aa, synthetic construct
ACDSVLGKTDKLI

SEQ ID NO: 31285 - protein, 10 aa, synthetic construct
ACDSWGPKLI

SEQ ID NO: 31286 - protein, 14 aa, synthetic construct
ACDSVLGNHTDKLI

SEQ ID NO: 31287 - protein, 13 aa, synthetic construct
ACDSVLGQADQLL

SEQ ID NO: 31288 - protein, 15 aa, synthetic construct
ACDSVLGYTATDKLI

SEQ ID NO: 31289 - protein, 13 aa, synthetic construct
ACDSVLVETDKLI

SEQ ID NO: 31290 - protein, 13 aa, synthetic construct
ACDSVLWETVKLI

SEQ ID NO: 31291 - protein, 13 aa, synthetic construct
ACDSVMGDTEKLI

SEQ ID NO: 31292 - protein, 13 aa, synthetic construct
ACDSVMGVTDKLI

SEQ ID NO: 31293 - protein, 13 aa, synthetic construct
ACDSVRGTPINSS

SEQ ID NO: 31294 - protein, 13 aa, synthetic construct
ACDSVVGETDKLI

SEQ ID NO: 31295 - protein, 16 aa, synthetic construct
ACDTAVGDARRTDKLI

SEQ ID NO: 31296 - protein, 16 aa, synthetic construct
ACDTAVGDRRRTDKLI

SEQ ID NO: 31297 - protein, 13 aa, synthetic construct
ACDRYWGPTDKLI

SEQ ID NO: 31298 - protein, 12 aa, synthetic construct
ACDTEGAPRNSS

SEQ ID NO: 31299 - protein, 10 aa, synthetic construct
ACDTCGPKLF

SEQ ID NO: 31300 - protein, 10 aa, synthetic construct
ACDTCGPKLN

SEQ ID NO: 31301 - protein, 10 aa, synthetic construct
ACDTCGPKLV

SEQ ID NO: 31302 - protein, 10 aa, synthetic construct
ACDTCGPNLI

SEQ ID NO: 31303 - protein, 8 aa, synthetic construct
ACDTDKLI

SEQ ID NO: 31304 - protein, 13 aa, synthetic construct
ACDTDLGNNEKHI

SEQ ID NO: 31305 - protein, 9 aa, synthetic construct
ACDTECQTH

SEQ ID NO: 31306 - protein, 13 aa, synthetic construct
ACDTEDTPNDKLI

SEQ ID NO: 31307 - protein, 12 aa, synthetic construct
ACDTEEDTDKLI

SEQ ID NO: 31308 - protein, 12 aa, synthetic construct
ACDTEGATDKLI

SEQ ID NO: 31309 - protein, 16 aa, synthetic construct
ACDTAVGYTSRTDKLI

SEQ ID NO: 31310 - protein, 12 aa, synthetic construct
ACDTEGDTDELI

SEQ ID NO: 31311 - protein, 12 aa, synthetic construct
ACDTEGDTDKFI

SEQ ID NO: 31312 - protein, 12 aa, synthetic construct
ACDTEGDTDKHI

SEQ ID NO: 31313 - protein, 12 aa, synthetic construct
ACDTEGDTDKII

SEQ ID NO: 31314 - protein, 12 aa, synthetic construct
ACDTEGDTDKLS

SEQ ID NO: 31315 - protein, 12 aa, synthetic construct
ACDTEGDTDTLI

SEQ ID NO: 31316 - protein, 12 aa, synthetic construct
ACDTEGDTEKLN

SEQ ID NO: 31317 - protein, 12 aa, synthetic construct
ACDTEGDTGKLI

SEQ ID NO: 31318 - protein, 12 aa, synthetic construct
ACDTEGDTHKLI

SEQ ID NO: 31319 - protein, 13 aa, synthetic construct
ACDTCDRDTQRQI

SEQ ID NO: 31320 - protein, 16 aa, synthetic construct
ACDTAVGVTRRTDKLI

SEQ ID NO: 31321 - protein, 16 aa, synthetic construct
ACDTAVGDTCRTDKLI

SEQ ID NO: 31322 - protein, 16 aa, synthetic construct
ACDTAVGDTRRTDKLT

SEQ ID NO: 31323 - protein, 14 aa, synthetic construct
ACDTAVGDTGDKLI

SEQ ID NO: 31324 - protein, 15 aa, synthetic construct
ACDTAVGDTGGINSS

SEQ ID NO: 31325 - protein, 16 aa, synthetic construct
ACDTAVGDTGRTDKLI

SEQ ID NO: 31326 - protein, 16 aa, synthetic construct
ACDTAVGDTRQTDKLI

SEQ ID NO: 31327 - protein, 16 aa, synthetic construct
ACDTAVGDTRRTAKLI

SEQ ID NO: 31328 - protein, 16 aa, synthetic construct
ACDTAVGDTRRTDELI

SEQ ID NO: 31329 - protein, 16 aa, synthetic construct
ACDTAVGDTRRTDILI

SEQ ID NO: 31330 - protein, 16 aa, synthetic construct
ACDTAVGDTRRTDKII

SEQ ID NO: 31331 - protein, 16 aa, synthetic construct
ACDTAVGDTRRTDKLL

SEQ ID NO: 31332 - protein, 16 aa, synthetic construct
ACDTAVGDTRRTDNLI

SEQ ID NO: 31333 - protein, 16 aa, synthetic construct
ACDTAVGVRAGPRNSS

SEQ ID NO: 31334 - protein, 16 aa, synthetic construct
ACDTAVGDTRRTDQRI

SEQ ID NO: 31335 - protein, 16 aa, synthetic construct
ACDTAVGDTRRTDRLI

SEQ ID NO: 31336 - protein, 16 aa, synthetic construct
ACDTAVGDTRRTDTLV

SEQ ID NO: 31337 - protein, 16 aa, synthetic construct
ACDTAVGDTRRTEKLI

SEQ ID NO: 31338 - protein, 16 aa, synthetic construct
ACDTAVGDTRRTEKLR

SEQ ID NO: 31339 - protein, 16 aa, synthetic construct
ACDTAVGDTRWTDQLI

SEQ ID NO: 31340 - protein, 16 aa, synthetic construct
ACDTAVGDTSRTDKLI

SEQ ID NO: 31341 - protein, 16 aa, synthetic construct
ACDTAVGGTRRTDKLI

SEQ ID NO: 31342 - protein, 13 aa, synthetic construct
ACDTAVGTPINSS

SEQ ID NO: 31343 - protein, 13 aa, synthetic construct
ACDSVLGETDILI

SEQ ID NO: 31344 - protein, 13 aa, synthetic construct
ACDSVLGETDHLI

SEQ ID NO: 31345 - protein, 13 aa, synthetic construct
ACDSVLGETAKLI

SEQ ID NO: 31346 - protein, 12 aa, synthetic construct
ACDSLGDTDNLI

SEQ ID NO: 31347 - protein, 13 aa, synthetic construct
ACDSGWGITDKLI

SEQ ID NO: 31348 - protein, 15 aa, synthetic construct
ACDSGWGTPYTDKLI

SEQ ID NO: 31349 - protein, 14 aa, synthetic construct
ACDSHWGDTGDNLI

SEQ ID NO: 31350 - protein, 13 aa, synthetic construct
ACDSILGETDKLI

SEQ ID NO: 31351 - protein, 14 aa, synthetic construct
ACDSIWGDTGDKLI

SEQ ID NO: 31352 - protein, 14 aa, synthetic construct
ACDSKWGDTGDKLT

SEQ ID NO: 31353 - protein, 14 aa, synthetic construct
ACDSKWRDTGDKLI

SEQ ID NO: 31354 - protein, 17 aa, synthetic construct
ACDSLFWGIRQTDDKLI

SEQ ID NO: 31355 - protein, 17 aa, synthetic construct
ACDSLFWGIRQTEDKLI

SEQ ID NO: 31356 - protein, 15 aa, synthetic construct
ACDSLLGDTATDKLI

SEQ ID NO: 31357 - protein, 15 aa, synthetic construct
ACDSGTGGYRGDKLI

SEQ ID NO: 31358 - protein, 13 aa, synthetic construct
ACDSLQGETDKLI

SEQ ID NO: 31359 - protein, 6 aa, synthetic construct
ACDSLV

SEQ ID NO: 31360 - protein, 14 aa, synthetic construct
ACDSNCGDTGDKII

SEQ ID NO: 31361 - protein, 14 aa, synthetic construct
ACDSNGGDTGDKLI

SEQ ID NO: 31362 - protein, 14 aa, synthetic construct
ACDSNLGIRAINSS

SEQ ID NO: 31363 - protein, 14 aa, synthetic construct
ACDSNRGDNADKLI

SEQ ID NO: 31364 - protein, 14 aa, synthetic construct
ACDSNWGASGDKLI

SEQ ID NO: 31365 - protein, 14 aa, synthetic construct
ACDSNWGDAGDKLI

SEQ ID NO: 31366 - protein, 14 aa, synthetic construct
ACDSNWGDPGDKLI

SEQ ID NO: 31367 - protein, 13 aa, synthetic construct
ACDSGVGETDKLI

SEQ ID NO: 31368 - protein, 12 aa, synthetic construct
ACDSGRGPGRLI

SEQ ID NO: 31369 - protein, 13 aa, synthetic construct
ACDSVLGENYKLI

SEQ ID NO: 31370 - protein, 15 aa, synthetic construct
ACDSGEGLGAVDKLI

SEQ ID NO: 31371 - protein, 15 aa, synthetic construct
ACDSAEGLGAVGNLF

SEQ ID NO: 31372 - protein, 9 aa, synthetic construct
ACDSAGQTH

SEQ ID NO: 31373 - protein, 15 aa, synthetic construct
ACDSAIRDSWDTRQM

SEQ ID NO: 31374 - protein, 15 aa, synthetic construct
ACDSCTGGYRGDKLI

SEQ ID NO: 31375 - protein, 14 aa, synthetic construct
ACDSDWGDTGDKLI

SEQ ID NO: 31376 - protein, 9 aa, synthetic construct
ACDSEGQTH

SEQ ID NO: 31377 - protein, 16 aa, synthetic construct
ACDSELGDTRRTDKLI

SEQ ID NO: 31378 - protein, 13 aa, synthetic construct
ACDSELGETDKII

SEQ ID NO: 31379 - protein, 13 aa, synthetic construct
ACDSGDTPNDKLI

SEQ ID NO: 31380 - protein, 14 aa, synthetic construct
ACDSGGIPYTDKLI

SEQ ID NO: 31381 - protein, 15 aa, synthetic construct
ACDSGRGGPYTDKLI

SEQ ID NO: 31382 - protein, 12 aa, synthetic construct
ACDSGGNTDTLI

SEQ ID NO: 31383 - protein, 12 aa, synthetic construct
ACDSGGYAAKLS

SEQ ID NO: 31384 - protein, 12 aa, synthetic construct
ACDSGGYADELI

SEQ ID NO: 31385 - protein, 12 aa, synthetic construct
ACDSGGYADKLL

SEQ ID NO: 31386 - protein, 12 aa, synthetic construct
ACDSGGYADNLI

SEQ ID NO: 31387 - protein, 12 aa, synthetic construct
ACDSGGYAEKLI

SEQ ID NO: 31388 - protein, 14 aa, synthetic construct
ACDSGGYPYTDKLI

SEQ ID NO: 31389 - protein, 13 aa, synthetic construct
ACDSGLGETDKLI

SEQ ID NO: 31390 - protein, 10 aa, synthetic construct
ACDSGQTICF

SEQ ID NO: 31391 - protein, 14 aa, synthetic construct
ACDSNWGDTCVKLI

SEQ ID NO: 31392 - protein, 14 aa, synthetic construct
ACDSNWGDTDDKLI

SEQ ID NO: 31393 - protein, 14 aa, synthetic construct
ACDSNWGDTGDILI

SEQ ID NO: 31394 - protein, 15 aa, synthetic construct
ACDSVGICSWDTRQM

SEQ ID NO: 31395 - protein, 17 aa, synthetic construct
ACDSRFWGIRQTDDKLI

SEQ ID NO: 31396 - protein, 14 aa, synthetic construct
ACDSRWGAGDDKLI

SEQ ID NO: 31397 - protein, 14 aa, synthetic construct
ACDSSCGDTGDKLI

SEQ ID NO: 31398 - protein, 13 aa, synthetic construct
ACDSSDRGTDKLI

SEQ ID NO: 31399 - protein, 10 aa, synthetic construct
ACDSSGDKLI

SEQ ID NO: 31400 - protein, 12 aa, synthetic construct
ACDSSGYADKLI

SEQ ID NO: 31401 - protein, 14 aa, synthetic construct
ACDSTGGTDKHQIS

SEQ ID NO: 31402 - protein, 14 aa, synthetic construct
ACDSTRGDTGNKLI

SEQ ID NO: 31403 - protein, 14 aa, synthetic construct
ACDSTWGDTGDKLI

SEQ ID NO: 31404 - protein, 15 aa, synthetic construct
ACDSVGISSWDTRQM

SEQ ID NO: 31405 - protein, 14 aa, synthetic construct
ACDSNWGDTGDKHT

SEQ ID NO: 31406 - protein, 14 aa, synthetic construct
ACDSVGYPYTDKLI

SEQ ID NO: 31407 - protein, 13 aa, synthetic construct
ACDSVLGAPDKLI

SEQ ID NO: 31408 - protein, 13 aa, synthetic construct
ACDSVLGDPEKLI

SEQ ID NO: 31409 - protein, 15 aa, synthetic construct
ACDSVLGDRTPINPS

SEQ ID NO: 31410 - protein, 13 aa, synthetic construct
ACDSVLGDTDRLI

SEQ ID NO: 31411 - protein, 14 aa, synthetic construct
ACDSVLGDTPINSS

SEQ ID NO: 31412 - protein, 8 aa, synthetic construct
ACDSVLGE

SEQ ID NO: 31413 - protein, 13 aa, synthetic construct
ACDSVLGEAGDLV

SEQ ID NO: 31414 - protein, 13 aa, synthetic construct
ACDSVLGENDKLI

SEQ ID NO: 31415 - protein, 15 aa, synthetic construct
ACDSREGLGAVDKLI

SEQ ID NO: 31416 - protein, 13 aa, synthetic construct
ACDSRDRGTDKLI

SEQ ID NO: 31417 - protein, 14 aa, synthetic construct
ACDSPMGGITDQLF

SEQ ID NO: 31418 - protein, 17 aa, synthetic construct
ACDSPFWGIRQTDDKLI

SEQ ID NO: 31419 - protein, 14 aa, synthetic construct
ACDSNWGDTGDKII

SEQ ID NO: 31420 - protein, 13 aa, synthetic construct
ACDSNWGDTGDKL

SEQ ID NO: 31421 - protein, 14 aa, synthetic construct
ACDSNWGDTGDKLN

SEQ ID NO: 31422 - protein, 14 aa, synthetic construct
ACDSNWGDTGDKLT

SEQ ID NO: 31423 - protein, 14 aa, synthetic construct
ACDSNWGDTGDNLT

SEQ ID NO: 31424 - protein, 14 aa, synthetic construct
ACDSNWGDTGDQLI

SEQ ID NO: 31425 - protein, 14 aa, synthetic construct
ACDSNWGDTGDTPI

SEQ ID NO: 31426 - protein, 14 aa, synthetic construct
ACDSNWGDTGVKLI

SEQ ID NO: 31427 - protein, 14 aa, synthetic construct
ACDSNWGDTPINSS

SEQ ID NO: 31428 - protein, 14 aa, synthetic construct
ACDSNWGDTRDKLI

SEQ ID NO: 31429 - protein, 16 aa, synthetic construct
ACDSNWGDTRRTDKLI

SEQ ID NO: 31430 - protein, 14 aa, synthetic construct
ACDSNWGDTVDKLI

SEQ ID NO: 31431 - protein, 14 aa, synthetic construct
ACDSNWGIQAINSS

SEQ ID NO: 31432 - protein, 14 aa, synthetic construct
ACDSNWGIRAISSS

SEQ ID NO: 31433 - protein, 14 aa, synthetic construct
ACDSNWGIRAVNSS

SEQ ID NO: 31434 - protein, 14 aa, synthetic construct
ACDSNWGYTGDKLI

SEQ ID NO: 31435 - protein, 14 aa, synthetic construct
ACDSNWRDTGDKLV

SEQ ID NO: 31436 - protein, 14 aa, synthetic construct
ACDSNWVDTGDKII

SEQ ID NO: 31437 - protein, 14 aa, synthetic construct
ACDSNWWDTGDKLI

SEQ ID NO: 31438 - protein, 14 aa, synthetic construct
ACDMYCGPNTDKLT

SEQ ID NO: 31439 - protein, 14 aa, synthetic construct
ACDMYCGPNTDKLI

SEQ ID NO: 31440 - protein, 13 aa, synthetic construct
ACEKGYGYTDKLI

SEQ ID NO: 31441 - protein, 13 aa, synthetic construct
ACDHSGIDTEKLI

SEQ ID NO: 31442 - protein, 15 aa, synthetic construct
ACDGGEGVGAVEKLF

SEQ ID NO: 31443 - protein, 13 aa, synthetic construct
ACDHCGIDTEKLI

SEQ ID NO: 31444 - protein, 13 aa, synthetic construct
ACDHCGIYTDKLI

SEQ ID NO: 31445 - protein, 13 aa, synthetic construct
ACDHCWIDTDKLI

SEQ ID NO: 31446 - protein, 13 aa, synthetic construct
ACDHGGIDTDKLI

SEQ ID NO: 31447 - protein, 13 aa, synthetic construct
ACDHGGIDTDTLI

SEQ ID NO: 31448 - protein, 17 aa, synthetic construct
ACDHLFWGIRQTDDKLI

SEQ ID NO: 31449 - protein, 13 aa, synthetic construct
ACDHNWGPTDKLI

SEQ ID NO: 31450 - protein, 13 aa, synthetic construct
ACDHSGIDTDKLI

SEQ ID NO: 31451 - protein, 13 aa, synthetic construct
ACDHSGIRPINSS

SEQ ID NO: 31452 - protein, 15 aa, synthetic construct
ACDGCTGGYRGDKLI

SEQ ID NO: 31453 - protein, 13 aa, synthetic construct
ACDHTGGYHDKLI

SEQ ID NO: 31454 - protein, 13 aa, synthetic construct
ACDHWAIDTDKLI

SEQ ID NO: 31455 - protein, 13 aa, synthetic construct
ACDHWGIDTDKFI

SEQ ID NO: 31456 - protein, 13 aa, synthetic construct
ACDHWGIDTDKHI

SEQ ID NO: 31457 - protein, 13 aa, synthetic construct
ACDHWGIDTDKII

SEQ ID NO: 31458 - protein, 12 aa, synthetic construct
ACDHWGIDTDKL

SEQ ID NO: 31459 - protein, 13 aa, synthetic construct
ACDHWGIDTDKPI

SEQ ID NO: 31460 - protein, 13 aa, synthetic construct
ACDHWGIDTDNLI

SEQ ID NO: 31461 - protein, 13 aa, synthetic construct
ACDHWGIDTDNSS

SEQ ID NO: 31462 - protein, 12 aa, synthetic construct
ACDGGDYTDKLI

SEQ ID NO: 31463 - protein, 16 aa, synthetic construct
ACDGAVGDTRRTDKLI

SEQ ID NO: 31464 - protein, 13 aa, synthetic construct
ACDHWGIDTDRLI

SEQ ID NO: 31465 - protein, 14 aa, synthetic construct
ACDCTGGPYTDNSS

SEQ ID NO: 31466 - protein, 14 aa, synthetic construct
ACDCTGARTPINSS

SEQ ID NO: 31467 - protein, 14 aa, synthetic construct
ACDCTGCPYTDNSS

SEQ ID NO: 31468 - protein, 14 aa, synthetic construct
ACDCTGGLTPINSS

SEQ ID NO: 31469 - protein, 14 aa, synthetic construct
ACDCTGGLYTDKVI

SEQ ID NO: 31470 - protein, 14 aa, synthetic construct
ACDCTGGPSTDKLI

SEQ ID NO: 31471 - protein, 14 aa, synthetic construct
ACDCTGGPYADKLI

SEQ ID NO: 31472 - protein, 14 aa, synthetic construct
ACDCTGGPYIDRLI

SEQ ID NO: 31473 - protein, 14 aa, synthetic construct
ACDCTGGPYTDKHI

SEQ ID NO: 31474 - protein, 13 aa, synthetic construct
ACDCTGGPYTDKL

SEQ ID NO: 31475 - protein, 14 aa, synthetic construct
ACDCTGGPYTDQLI

SEQ ID NO: 31476 - protein, 14 aa, synthetic construct
ACDFTGGPYTEKLI

SEQ ID NO: 31477 - protein, 14 aa, synthetic construct
ACDCTGGPYTDRLI

SEQ ID NO: 31478 - protein, 14 aa, synthetic construct
ACDCTGGTYTDKLI

SEQ ID NO: 31479 - protein, 14 aa, synthetic construct
ACDCTGVPYTDKLI

SEQ ID NO: 31480 - protein, 14 aa, synthetic construct
ACDCTGVQYTDKLI

SEQ ID NO: 31481 - protein, 14 aa, synthetic construct
ACDCTVGPYTDKLI

SEQ ID NO: 31482 - protein, 14 aa, synthetic construct
ACDCTWGPYTDKLI

SEQ ID NO: 31483 - protein, 13 aa, synthetic construct
ACDCVLGETDKLI

SEQ ID NO: 31484 - protein, 13 aa, synthetic construct
ACDDWGIDTDKLI

SEQ ID NO: 31485 - protein, 12 aa, synthetic construct
ACDFGGNTDKLI

SEQ ID NO: 31486 - protein, 13 aa, synthetic construct
ACDHWGIDTDQLI

SEQ ID NO: 31487 - protein, 13 aa, synthetic construct
ACDHWGIDTDTLI

SEQ ID NO: 31488 - protein, 12 aa, synthetic construct
ACDIGGYADQLI

SEQ ID NO: 31489 - protein, 12 aa, synthetic construct
ACDIGGNTDKVI

SEQ ID NO: 31490 - protein, 12 aa, synthetic construct
ACDIGGHTDNLI

SEQ ID NO: 31491 - protein, 12 aa, synthetic construct
ACDIGGKNDKLI

SEQ ID NO: 31492 - protein, 12 aa, synthetic construct
ACDIGGNNYKLI

SEQ ID NO: 31493 - protein, 12 aa, synthetic construct
ACDIGGNTAKLI

SEQ ID NO: 31494 - protein, 12 aa, synthetic construct
ACDIGGNTDGLI

SEQ ID NO: 31495 - protein, 12 aa, synthetic construct
ACDIGGNTDKHI

SEQ ID NO: 31496 - protein, 12 aa, synthetic construct
ACDIGGNTDKLF

SEQ ID NO: 31497 - protein, 12 aa, synthetic construct
ACDIGGNTDKLL

SEQ ID NO: 31498 - protein, 12 aa, synthetic construct
ACDIGGNTDKLV

SEQ ID NO: 31499 - protein, 12 aa, synthetic construct
ACDIGGNTHQLI

SEQ ID NO: 31500 - protein, 12 aa, synthetic construct
ACDIGGDAEKLI

SEQ ID NO: 31501 - protein, 12 aa, synthetic construct
ACDIGGNTNKLI

SEQ ID NO: 31502 - protein, 12 aa, synthetic construct
ACDIGGNTYKLI

SEQ ID NO: 31503 - protein, 13 aa, synthetic construct
ACDIGGSTHRETH

SEQ ID NO: 31504 - protein, 12 aa, synthetic construct
ACDIGGYAAKLI

SEQ ID NO: 31505 - protein, 12 aa, synthetic construct
ACDIGGYADILI

SEQ ID NO: 31506 - protein, 12 aa, synthetic construct
ACDIGGYADKLL

SEQ ID NO: 31507 - protein, 12 aa, synthetic construct
ACDIGGYADKLN

SEQ ID NO: 31508 - protein, 12 aa, synthetic construct
ACDIGGYADKLT

SEQ ID NO: 31509 - protein, 12 aa, synthetic construct
ACDIGGYADKRI

SEQ ID NO: 31510 - protein, 12 aa, synthetic construct
ACDIGGHTDKLT

SEQ ID NO: 31511 - protein, 12 aa, synthetic construct
ACDIGGDADKLI

SEQ ID NO: 31512 - protein, 13 aa, synthetic construct
ACDHWGIDTEKLS

SEQ ID NO: 31513 - protein, 12 aa, synthetic construct
ACDIAGYADKLI

SEQ ID NO: 31514 - protein, 13 aa, synthetic construct
ACDHWGIDTGKLI

SEQ ID NO: 31515 - protein, 13 aa, synthetic construct
ACDHWGIDTYKII

SEQ ID NO: 31516 - protein, 14 aa, synthetic construct
ACDHWGIRNTDKLI

SEQ ID NO: 31517 - protein, 14 aa, synthetic construct
ACDHWGIRRTINSS

SEQ ID NO: 31518 - protein, 13 aa, synthetic construct
ACDHWGKDTEKLI

SEQ ID NO: 31519 - protein, 13 aa, synthetic construct
ACDHWGVDTDKLI

SEQ ID NO: 31520 - protein, 13 aa, synthetic construct
ACDHWVIATDKLF

SEQ ID NO: 31521 - protein, 13 aa, synthetic construct
ACDHWWIDTDKLI

SEQ ID NO: 31522 - protein, 13 aa, synthetic construct
ACDHYCGPTDKLI

SEQ ID NO: 31523 - protein, 16 aa, synthetic construct
ACDIAVGDTRRTDKLI

SEQ ID NO: 31524 - protein, 12 aa, synthetic construct
ACDIGETPVNSS

SEQ ID NO: 31525 - protein, 12 aa, synthetic construct
ACDIEGNTDKLI

SEQ ID NO: 31526 - protein, 9 aa, synthetic construct
ACDIEGQTH

SEQ ID NO: 31527 - protein, 21 aa, synthetic construct
ACDIEIGRDNVRNQLSSLQRV

SEQ ID NO: 31528 - protein, 12 aa, synthetic construct
ACDIGANTDKLI

SEQ ID NO: 31529 - protein, 13 aa, synthetic construct
ACDIGDRHTDKLI

SEQ ID NO: 31530 - protein, 12 aa, synthetic construct
ACDIGDTGDKLI

SEQ ID NO: 31531 - protein, 12 aa, synthetic construct
ACDIGDTPVNSS

SEQ ID NO: 31532 - protein, 13 aa, synthetic construct
ACDIGDTYTDKLI

SEQ ID NO: 31533 - protein, 12 aa, synthetic construct
ACDIGETPINSS

SEQ ID NO: 31534 - protein, 14 aa, synthetic construct
ACDCTGAPYTDKLI

SEQ ID NO: 31535 - protein, 14 aa, synthetic construct
ACDCTAGPYTDKLI

SEQ ID NO: 31536 - protein, 15 aa, synthetic construct
ACDCSTGGYPGDKLI

SEQ ID NO: 31537 - protein, 14 aa, synthetic construct
ACAYWGIPYTDKLI

SEQ ID NO: 31538 - protein, 15 aa, synthetic construct
ACATGLGDTATDTLI

SEQ ID NO: 31539 - protein, 12 aa, synthetic construct
ACATGRGPDKLI

SEQ ID NO: 31540 - protein, 12 aa, synthetic construct
ACATGWGIDKLI

SEQ ID NO: 31541 - protein, 13 aa, synthetic construct
ACATGWGITDKLI

SEQ ID NO: 31542 - protein, 12 aa, synthetic construct
ACATLGDTEKLI

SEQ ID NO: 31543 - protein, 15 aa, synthetic construct
ACATLLGDTATDKLI

SEQ ID NO: 31544 - protein, 10 aa, synthetic construct
ACATSGDKLI

SEQ ID NO: 31545 - protein, 10 aa, synthetic construct
ACATSGGLLI

SEQ ID NO: 31546 - protein, 13 aa, synthetic construct
ACATTGGYHEKLI

SEQ ID NO: 31547 - protein, 16 aa, synthetic construct
ACDAAVGDTRRTDELI

SEQ ID NO: 31548 - protein, 12 aa, synthetic construct
ACATGGYPDKLI

SEQ ID NO: 31549 - protein, 9 aa, synthetic construct
ACDADGQTH

SEQ ID NO: 31550 - protein, 12 aa, synthetic construct
ACDAFGDTDKLI

SEQ ID NO: 31551 - protein, 13 aa, synthetic construct
ACDAGDTPNEKLI

SEQ ID NO: 31552 - protein, 12 aa, synthetic construct
ACDAGGGSVKLL

SEQ ID NO: 31553 - protein, 12 aa, synthetic construct
ACDAGGYPDKLI

SEQ ID NO: 31554 - protein, 14 aa, synthetic construct
ACDAGGYPYTDKLI

SEQ ID NO: 31555 - protein, 15 aa, synthetic construct
ACDAGRGGPYTDKLI

SEQ ID NO: 31556 - protein, 12 aa, synthetic construct
ACDAGWGIDKLI

SEQ ID NO: 31557 - protein, 11 aa, synthetic construct
ACDAGWGTRQM

SEQ ID NO: 31558 - protein, 15 aa, synthetic construct
ACATGIRDSWDTRQM

SEQ ID NO: 31559 - protein, 15 aa, synthetic construct
ACATGEGLGAVEKLI

SEQ ID NO: 31560 - protein, 15 aa, synthetic construct
ACDCSNGVYRGAKII

SEQ ID NO: 31561 - protein, 14 aa, synthetic construct
ACAMYWGLTPINSS

SEQ ID NO: 31562 - protein, 12 aa, synthetic construct
AADTGRGPDKLI

SEQ ID NO: 31563 - protein, 17 aa, synthetic construct
AADTLFWGRRQTDDKLI

SEQ ID NO: 31564 - protein, 12 aa, synthetic construct
AADTLGDTDKLI

SEQ ID NO: 31565 - protein, 10 aa, synthetic construct
AADTSGGLLI

SEQ ID NO: 31566 - protein, 13 aa, synthetic construct
AADTVRGNTDKLI

SEQ ID NO: 31567 - protein, 13 aa, synthetic construct
ACAAGDPYAEKLI

SEQ ID NO: 31568 - protein, 15 aa, synthetic construct
ACACCTGGYRGDKLI

SEQ ID NO: 31569 - protein, 12 aa, synthetic construct
ACAIGGNTDKLI

SEQ ID NO: 31570 - protein, 12 aa, synthetic construct
ACALLGDTDKLI

SEQ ID NO: 31571 - protein, 13 aa, synthetic construct
ACANTGGYHDKLI

SEQ ID NO: 31572 - protein, 15 aa, synthetic construct
ACATGEGLGAVDKLI

SEQ ID NO: 31573 - protein, 13 aa, synthetic construct
ACAPFWGPTDKLI

SEQ ID NO: 31574 - protein, 10 aa, synthetic construct
ACARRADKLI

SEQ ID NO: 31575 - protein, 13 aa, synthetic construct
ACARTGGYTDTLI

SEQ ID NO: 31576 - protein, 12 aa, synthetic construct
ACASGGYAAKLS

SEQ ID NO: 31577 - protein, 14 aa, synthetic construct
ACASNWGDTGDKLI

SEQ ID NO: 31578 - protein, 13 aa, synthetic construct
ACASVLGETDKLI

SEQ ID NO: 31579 - protein, 13 aa, synthetic construct
ACATAEGVTDKLI

SEQ ID NO: 31580 - protein, 12 aa, synthetic construct
ACATCAGSVKLI

SEQ ID NO: 31581 - protein, 10 aa, synthetic construct
ACATCGGLLI

SEQ ID NO: 31582 - protein, 15 aa, synthetic construct
ACDALLGDTATGKLI

SEQ ID NO: 31583 - protein, 15 aa, synthetic construct
ACDALLGDTDTDKLI

SEQ ID NO: 31584 - protein, 14 aa, synthetic construct
ACDANWGDTGDKLI

SEQ ID NO: 31585 - protein, 15 aa, synthetic construct
ACDCCTGGYRGGKLI

SEQ ID NO: 31586 - protein, 15 aa, synthetic construct
ACDCCTGGYRGATLI

SEQ ID NO: 31587 - protein, 15 aa, synthetic construct
ACDCCTGGYRGDILI

SEQ ID NO: 31588 - protein, 15 aa, synthetic construct
ACDCCTGGYRGDKLN

SEQ ID NO: 31589 - protein, 15 aa, synthetic construct
ACDCCTGGYRGDKLS

SEQ ID NO: 31590 - protein, 15 aa, synthetic construct
ACDCCTGGYRGDKPI

SEQ ID NO: 31591 - protein, 15 aa, synthetic construct
ACDCCTGGYRGDKVI

SEQ ID NO: 31592 - protein, 15 aa, synthetic construct
ACDCCTGGYRGDRLI

SEQ ID NO: 31593 - protein, 15 aa, synthetic construct
ACDCCTGGYRGDTLI

SEQ ID NO: 31594 - protein, 15 aa, synthetic construct
ACDCCTGGYRGENSS

SEQ ID NO: 31595 - protein, 15 aa, synthetic construct
ACDCCTGGYRGHKLI

SEQ ID NO: 31596 - protein, 13 aa, synthetic construct
ACDARDRGTDKLI

SEQ ID NO: 31597 - protein, 15 aa, synthetic construct
ACDCCTGGYRGNKLI

SEQ ID NO: 31598 - protein, 15 aa, synthetic construct
ACDCCTGGYRGYKLI

SEQ ID NO: 31599 - protein, 15 aa, synthetic construct
ACDCCTVGYLGDKLI

SEQ ID NO: 31600 - protein, 15 aa, synthetic construct
ACDCCTVGYRGDKLI

SEQ ID NO: 31601 - protein, 15 aa, synthetic construct
ACDCGEGLGAVDKLI

SEQ ID NO: 31602 - protein, 17 aa, synthetic construct
ACDCGTKKPASGQTICF

SEQ ID NO: 31603 - protein, 14 aa, synthetic construct
ACDCNRGPYTDKLI

SEQ ID NO: 31604 - protein, 14 aa, synthetic construct
ACDCPGGPYTDKLI

SEQ ID NO: 31605 - protein, 15 aa, synthetic construct
ACDCRTGGYRGAKLN

SEQ ID NO: 31606 - protein, 15 aa, synthetic construct
ACDCCTGGYRGANLI

SEQ ID NO: 31607 - protein, 15 aa, synthetic construct
ACDCCTGGYRGAKLI

SEQ ID NO: 31608 - protein, 16 aa, synthetic construct
ACDCCTGGYPYTDKLI

SEQ ID NO: 31609 - protein, 15 aa, synthetic construct
ACDCCTGGYLGDKLI

SEQ ID NO: 31610 - protein, 13 aa, synthetic construct
ACDARDRGTDKPI

SEQ ID NO: 31611 - protein, 12 aa, synthetic construct
ACDARGYADKLI

SEQ ID NO: 31612 - protein, 12 aa, synthetic construct
ACDARRGPDKLI

SEQ ID NO: 31613 - protein, 10 aa, synthetic construct
ACDASRDKLI

SEQ ID NO: 31614 - protein, 15 aa, synthetic construct
ACDAVLGDTATDKPI

SEQ ID NO: 31615 - protein, 13 aa, synthetic construct
ACDAVRGNTDKLI

SEQ ID NO: 31616 - protein, 10 aa, synthetic construct
ACDAWGPTLI

SEQ ID NO: 31617 - protein, 14 aa, synthetic construct
ACDCAGGPYTDKLI

SEQ ID NO: 31618 - protein, 15 aa, synthetic construct
ACDCCAGGYRGDKLI

SEQ ID NO: 31619 - protein, 15 aa, synthetic construct
ACDCCSGGYRGDKLI

SEQ ID NO: 31620 - protein, 15 aa, synthetic construct
ACDCCTGDTGGRNSS

SEQ ID NO: 31621 - protein, 15 aa, synthetic construct
ACDCCTGGCRGDELV

SEQ ID NO: 31622 - protein, 15 aa, synthetic construct
ACDCCTGGCRGDKLI

SEQ ID NO: 31623 - protein, 15 aa, synthetic construct
ACDCCTGGDRGDKLI

SEQ ID NO: 31624 - protein, 15 aa, synthetic construct
ACDCCTGGHRGDKLI

SEQ ID NO: 31625 - protein, 14 aa, synthetic construct
ACDCCTGGPPINSS

SEQ ID NO: 31626 - protein, 15 aa, synthetic construct
ACDCCTGGSRGDKLI

SEQ ID NO: 31627 - protein, 17 aa, synthetic construct
ACDCCTGGYETPGRPDR

SEQ ID NO: 31628 - protein, 15 aa, synthetic construct
ACDCCTGGYGGDKLI

SEQ ID NO: 31629 - protein, 12 aa, synthetic construct
ACDIGGYADNII

SEQ ID NO: 31630 - protein, 12 aa, synthetic construct
ACDIGGYADRLI

SEQ ID NO: 31631 - protein, 14 aa, synthetic construct
ACDMYCGHNTDKLI

SEQ ID NO: 31632 - protein, 14 aa, synthetic construct
ACDLGDTPETDKLI

SEQ ID NO: 31633 - protein, 14 aa, synthetic construct
ACDLGDTPDNDKLI

SEQ ID NO: 31634 - protein, 14 aa, synthetic construct
ACDLGDTPDTAKLI

SEQ ID NO: 31635 - protein, 14 aa, synthetic construct
ACDLGDTPDTDHLI

SEQ ID NO: 31636 - protein, 14 aa, synthetic construct
ACDLGDTPDTDKII

SEQ ID NO: 31637 - protein, 14 aa, synthetic construct
ACDLGDTPDTDKLF

SEQ ID NO: 31638 - protein, 14 aa, synthetic construct
ACDLGDTPDTDKLL

SEQ ID NO: 31639 - protein, 14 aa, synthetic construct
ACDLGDTPDTDNLI

SEQ ID NO: 31640 - protein, 14 aa, synthetic construct
ACDLGDTPDTDNSS

SEQ ID NO: 31641 - protein, 14 aa, synthetic construct
ACDLGDTPDTYKLI

SEQ ID NO: 31642 - protein, 14 aa, synthetic construct
ACDLGDTPTPINSS

SEQ ID NO: 31643 - protein, 12 aa, synthetic construct
ACDLGDTGYKLI

SEQ ID NO: 31644 - protein, 14 aa, synthetic construct
ACDLGDTQDTDKHI

SEQ ID NO: 31645 - protein, 14 aa, synthetic construct
ACDLGDTQDTDKLN

SEQ ID NO: 31646 - protein, 14 aa, synthetic construct
ACDLGDTQDTEKLI

SEQ ID NO: 31647 - protein, 14 aa, synthetic construct
ACDLGDTRDTDKVI

SEQ ID NO: 31648 - protein, 12 aa, synthetic construct
ACDLGDTSDKLI

SEQ ID NO: 31649 - protein, 14 aa, synthetic construct
ACDLGDTTDTDKLI

SEQ ID NO: 31650 - protein, 13 aa, synthetic construct
ACDLGDTYTDKLI

SEQ ID NO: 31651 - protein, 12 aa, synthetic construct
ACDLGGTGDELI

SEQ ID NO: 31652 - protein, 12 aa, synthetic construct
ACDLGGTGGKLI

SEQ ID NO: 31653 - protein, 14 aa, synthetic construct
ACDLGDTPATDKLL

SEQ ID NO: 31654 - protein, 12 aa, synthetic construct
ACDLGDTGERLI

SEQ ID NO: 31655 - protein, 14 aa, synthetic construct
ACDLGGTPDTDKPI

SEQ ID NO: 31656 - protein, 12 aa, synthetic construct
ACDLGDRGDKLI

SEQ ID NO: 31657 - protein, 13 aa, synthetic construct
ACDKSLGINDKLI

SEQ ID NO: 31658 - protein, 13 aa, synthetic construct
ACDKTGGYHDKLI

SEQ ID NO: 31659 - protein, 13 aa, synthetic construct
ACDKTGGYHDNLI

SEQ ID NO: 31660 - protein, 21 aa, synthetic construct
ACDKVVYEKEKIILRKRRLNN

SEQ ID NO: 31661 - protein, 14 aa, synthetic construct
ACDLEDTPDTDILI

SEQ ID NO: 31662 - protein, 12 aa, synthetic construct
ACDLGDKGDKLI

SEQ ID NO: 31663 - protein, 14 aa, synthetic construct
ACDLGDKPDTDKLI

SEQ ID NO: 31664 - protein, 14 aa, synthetic construct
ACDLGDMPDTDKLI

SEQ ID NO: 31665 - protein, 14 aa, synthetic construct
ACDLGDPPDTEKLI

SEQ ID NO: 31666 - protein, 13 aa, synthetic construct
ACDLGDSLHRSTH

SEQ ID NO: 31667 - protein, 12 aa, synthetic construct
ACDLGDTGENLI

SEQ ID NO: 31668 - protein, 13 aa, synthetic construct
ACDLGDTATDKLI

SEQ ID NO: 31669 - protein, 12 aa, synthetic construct
ACDLGDTGAKLI

SEQ ID NO: 31670 - protein, 12 aa, synthetic construct
ACDLGDTGDHLI

SEQ ID NO: 31671 - protein, 12 aa, synthetic construct
ACDLGDTGDKII

SEQ ID NO: 31672 - protein, 11 aa, synthetic construct
ACDLGDTGDKL

SEQ ID NO: 31673 - protein, 12 aa, synthetic construct
ACDLGDTGDKLF

SEQ ID NO: 31674 - protein, 12 aa, synthetic construct
ACDLGDTGDKLV

SEQ ID NO: 31675 - protein, 12 aa, synthetic construct
ACDLGDTGDMLI

SEQ ID NO: 31676 - protein, 12 aa, synthetic construct
ACDLGDTGDQLI

SEQ ID NO: 31677 - protein, 14 aa, synthetic construct
ACDLGGTPDTDKLI

SEQ ID NO: 31678 - protein, 14 aa, synthetic construct
ACDLGGTPDTGKLI

SEQ ID NO: 31679 - protein, 12 aa, synthetic construct
ACDIGGYADTLI

SEQ ID NO: 31680 - protein, 14 aa, synthetic construct
ACDMCWGPNTVKLI

SEQ ID NO: 31681 - protein, 12 aa, synthetic construct
ACDLQVDTDKLI

SEQ ID NO: 31682 - protein, 12 aa, synthetic construct
ACDLRDTGDKLI

SEQ ID NO: 31683 - protein, 12 aa, synthetic construct
ACDLRGAPDKVI

SEQ ID NO: 31684 - protein, 13 aa, synthetic construct
ACDLTGGYTDKPI

SEQ ID NO: 31685 - protein, 14 aa, synthetic construct
ACDLVDTPDTDKLI

SEQ ID NO: 31686 - protein, 12 aa, synthetic construct
ACDLVHTGDKLI

SEQ ID NO: 31687 - protein, 12 aa, synthetic construct
ACDLWDTGDKLI

SEQ ID NO: 31688 - protein, 7 aa, synthetic construct
ACDLYWG

SEQ ID NO: 31689 - protein, 14 aa, synthetic construct
ACDMCWGPNTDKLI

SEQ ID NO: 31690 - protein, 14 aa, synthetic construct
ACDMDWGPNTDKLI

SEQ ID NO: 31691 - protein, 12 aa, synthetic construct
ACDLLSDTDKLI

SEQ ID NO: 31692 - protein, 12 aa, synthetic construct
ACDMGDTCDKLI

SEQ ID NO: 31693 - protein, 12 aa, synthetic construct
ACDMGDTGEKHI

SEQ ID NO: 31694 - protein, 14 aa, synthetic construct
ACDMGDTPDTDKII

SEQ ID NO: 31695 - protein, 12 aa, synthetic construct
ACDMGGYADRLI

SEQ ID NO: 31696 - protein, 13 aa, synthetic construct
ACDMGWGITDKLI

SEQ ID NO: 31697 - protein, 12 aa, synthetic construct
ACDMGYTGDKLI

SEQ ID NO: 31698 - protein, 14 aa, synthetic construct
ACDMNGGPTTDKLI

SEQ ID NO: 31699 - protein, 14 aa, synthetic construct
ACDMSWGPNTDKLI

SEQ ID NO: 31700 - protein, 12 aa, synthetic construct
ACDMWYTGEKLI

SEQ ID NO: 31701 - protein, 12 aa, synthetic construct
ACDLLVDTDKLI

SEQ ID NO: 31702 - protein, 12 aa, synthetic construct
ACDLLGVTDKLI

SEQ ID NO: 31703 - protein, 12 aa, synthetic construct
ACDLGGYADKLI

SEQ ID NO: 31704 - protein, 12 aa, synthetic construct
ACDLLGDADKII

SEQ ID NO: 31705 - protein, 12 aa, synthetic construct
ACDLGGYAEKLI

SEQ ID NO: 31706 - protein, 14 aa, synthetic construct
ACDLGIRRTPRTSS

SEQ ID NO: 31707 - protein, 12 aa, synthetic construct
ACDLGTTPINSS

SEQ ID NO: 31708 - protein, 12 aa, synthetic construct
ACDLGYTGDKLI

SEQ ID NO: 31709 - protein, 12 aa, synthetic construct
ACDLGYTGDMLI

SEQ ID NO: 31710 - protein, 12 aa, synthetic construct
ACDLGYTGDTLI

SEQ ID NO: 31711 - protein, 12 aa, synthetic construct
ACDLLEDTDKLI

SEQ ID NO: 31712 - protein, 12 aa, synthetic construct
ACDLLGATDKLI

SEQ ID NO: 31713 - protein, 12 aa, synthetic construct
ACDLLGATEKLI

SEQ ID NO: 31714 - protein, 10 aa, synthetic construct
ACDLLGDKLI

SEQ ID NO: 31715 - protein, 12 aa, synthetic construct
ACDLLGTPINSS

SEQ ID NO: 31716 - protein, 12 aa, synthetic construct
ACDLLGDPAKLI

SEQ ID NO: 31717 - protein, 12 aa, synthetic construct
ACDLLGDPEDLI

SEQ ID NO: 31718 - protein, 12 aa, synthetic construct
ACDLLGDSERLV

SEQ ID NO: 31719 - protein, 12 aa, synthetic construct
ACDLLGDTDKFI

SEQ ID NO: 31720 - protein, 12 aa, synthetic construct
ACDLLGDTDKLV

SEQ ID NO: 31721 - protein, 12 aa, synthetic construct
ACDLLGDTDKRI

SEQ ID NO: 31722 - protein, 12 aa, synthetic construct
ACDLLGDTDTLI

SEQ ID NO: 31723 - protein, 12 aa, synthetic construct
ACDLLGGSDILI

SEQ ID NO: 31724 - protein, 13 aa, synthetic construct
ACDLLGNHTEKLI

SEQ ID NO: 31725 - protein, 13 aa, synthetic construct
ACDKRYGYTDKLI

SEQ ID NO: 31726 - protein, 12 aa, synthetic construct
ACDKRGYADKLI

SEQ ID NO: 31727 - protein, 12 aa, synthetic construct
ACDKRGYADKII

SEQ ID NO: 31728 - protein, 12 aa, synthetic construct
ACDIVGYADKII

SEQ ID NO: 31729 - protein, 15 aa, synthetic construct
ACDILGVSAPGTPDR

SEQ ID NO: 31730 - protein, 12 aa, synthetic construct
ACDILVGGEKLI

SEQ ID NO: 31731 - protein, 12 aa, synthetic construct
ACDILWDTDKLI

SEQ ID NO: 31732 - protein, 13 aa, synthetic construct
ACDIQGDTYDKLI

SEQ ID NO: 31733 - protein, 12 aa, synthetic construct
ACDIRGNTDKLI

SEQ ID NO: 31734 - protein, 12 aa, synthetic construct
ACDIRGYADKLI

SEQ ID NO: 31735 - protein, 13 aa, synthetic construct
ACDITGGYHDKLI

SEQ ID NO: 31736 - protein, 12 aa, synthetic construct
ACDIVGNTDKII

SEQ ID NO: 31737 - protein, 12 aa, synthetic construct
ACDIVGNTDTLI

SEQ ID NO: 31738 - protein, 12 aa, synthetic construct
ACDIVGYSDKLI

SEQ ID NO: 31739 - protein, 12 aa, synthetic construct
ACDILGNTDKLI

SEQ ID NO: 31740 - protein, 15 aa, synthetic construct
ACDIVLGDTATDKLI

SEQ ID NO: 31741 - protein, 12 aa, synthetic construct
ACDIVRYADKLI

SEQ ID NO: 31742 - protein, 12 aa, synthetic construct
ACDIWGNTDKLI

SEQ ID NO: 31743 - protein, 12 aa, synthetic construct
ACDIWGYADKLI

SEQ ID NO: 31744 - protein, 14 aa, synthetic construct
ACDIYWGPNTDKLI

SEQ ID NO: 31745 - protein, 13 aa, synthetic construct
ACDKGDGYTDKLI

SEQ ID NO: 31746 - protein, 13 aa, synthetic construct
ACDKGDTPNDKLI

SEQ ID NO: 31747 - protein, 13 aa, synthetic construct
ACDKGNGYTDKLI

SEQ ID NO: 31748 - protein, 13 aa, synthetic construct
ACDKGWGITDKLI

SEQ ID NO: 31749 - protein, 7 aa, synthetic construct
ACDILGV

SEQ ID NO: 31750 - protein, 13 aa, synthetic construct
ACDILGGTYDQLI

SEQ ID NO: 31751 - protein, 13 aa, synthetic construct
ACDKRGVYTDKLI

SEQ ID NO: 31752 - protein, 14 aa, synthetic construct
ACDILGDRTPINSS

SEQ ID NO: 31753 - protein, 12 aa, synthetic construct
ACDIGGYAEKRI

SEQ ID NO: 31754 - protein, 12 aa, synthetic construct
ACDIGGYAETLI

SEQ ID NO: 31755 - protein, 12 aa, synthetic construct
ACDIGGYAYKLI

SEQ ID NO: 31756 - protein, 12 aa, synthetic construct
ACDIGGYSDNSS

SEQ ID NO: 31757 - protein, 15 aa, synthetic construct
ACDIGGYVKRTINSS

SEQ ID NO: 31758 - protein, 12 aa, synthetic construct
ACDIGRYADKLI

SEQ ID NO: 31759 - protein, 12 aa, synthetic construct
ACDIGVNTDKLI

SEQ ID NO: 31760 - protein, 12 aa, synthetic construct
ACDIIGDTDKLI

SEQ ID NO: 31761 - protein, 13 aa, synthetic construct
ACDILGDPYDKLI

SEQ ID NO: 31762 - protein, 13 aa, synthetic construct
ACDILGDSYDKLI

SEQ ID NO: 31763 - protein, 13 aa, synthetic construct
ACDILGETYDKLI

SEQ ID NO: 31764 - protein, 12 aa, synthetic construct
ACDILGDTGKLI

SEQ ID NO: 31765 - protein, 13 aa, synthetic construct
ACDILGDTHDKLI

SEQ ID NO: 31766 - protein, 15 aa, synthetic construct
ACDILGDTHTPINSS

SEQ ID NO: 31767 - protein, 13 aa, synthetic construct
ACDILGDTNDKLI

SEQ ID NO: 31768 - protein, 13 aa, synthetic construct
ACDILGDTSDKLI

SEQ ID NO: 31769 - protein, 13 aa, synthetic construct
ACDILGDTYDELI

SEQ ID NO: 31770 - protein, 13 aa, synthetic construct
ACDILGDTYDKLF

SEQ ID NO: 31771 - protein, 13 aa, synthetic construct
ACDILGDTYDKLV

SEQ ID NO: 31772 - protein, 13 aa, synthetic construct
ACDILGDTYNKLI

SEQ ID NO: 31773 - protein, 13 aa, synthetic construct
ACDKGWGITEKII

SEQ ID NO: 31774 - protein, 15 aa, synthetic construct
ACDKGWGTPYTDKII

SEQ ID NO: 31775 - protein, 13 aa, synthetic construct
ACDKGYEYTDKLI

SEQ ID NO: 31776 - protein, 13 aa, synthetic construct
ACDKLGVYTYKLI

SEQ ID NO: 31777 - protein, 13 aa, synthetic construct
ACDKLGVSTDKII

SEQ ID NO: 31778 - protein, 13 aa, synthetic construct
ACDKLGVSTDKLF

SEQ ID NO: 31779 - protein, 13 aa, synthetic construct
ACDKLGVSTDTLI

SEQ ID NO: 31780 - protein, 13 aa, synthetic construct
ACDKLGVYNDRLI

SEQ ID NO: 31781 - protein, 13 aa, synthetic construct
ACDKLGVYPDKLI

SEQ ID NO: 31782 - protein, 13 aa, synthetic construct
ACDKLGVYTDKII

SEQ ID NO: 31783 - protein, 13 aa, synthetic construct
ACDKLGVYTDKLM

SEQ ID NO: 31784 - protein, 13 aa, synthetic construct
ACDKLGVYTEKLF

SEQ ID NO: 31785 - protein, 13 aa, synthetic construct
ACDKLGVYTNKLI

SEQ ID NO: 31786 - protein, 15 aa, synthetic construct
ACDKLLGDTATDKLI

SEQ ID NO: 31787 - protein, 13 aa, synthetic construct
ACDKGYGYSDKLI

SEQ ID NO: 31788 - protein, 15 aa, synthetic construct
ACDKLLGDTDTDKLI

SEQ ID NO: 31789 - protein, 13 aa, synthetic construct
ACDKLVVYTDKLI

SEQ ID NO: 31790 - protein, 12 aa, synthetic construct
ACDKMGDNDKLI

SEQ ID NO: 31791 - protein, 12 aa, synthetic construct
ACDKMGDTDKLI

SEQ ID NO: 31792 - protein, 13 aa, synthetic construct
ACDKMGVYTDKLI

SEQ ID NO: 31793 - protein, 13 aa, synthetic construct
ACDKMGVYTDRLI

SEQ ID NO: 31794 - protein, 13 aa, synthetic construct
ACDKPGVYTDKLI

SEQ ID NO: 31795 - protein, 14 aa, synthetic construct
ACDKQLDGITEKLI

SEQ ID NO: 31796 - protein, 13 aa, synthetic construct
ACDKQWVYTDKLI

SEQ ID NO: 31797 - protein, 13 aa, synthetic construct
ACDKLGVHTDKLI

SEQ ID NO: 31798 - protein, 13 aa, synthetic construct
ACDKLGVFTDKLF

SEQ ID NO: 31799 - protein, 13 aa, synthetic construct
ACDKLGSTPINSS

SEQ ID NO: 31800 - protein, 13 aa, synthetic construct
ACDKLGLYTDKLI

SEQ ID NO: 31801 - protein, 13 aa, synthetic construct
ACDKGYGYTAKLI

SEQ ID NO: 31802 - protein, 13 aa, synthetic construct
ACDKGYGYTDKII

SEQ ID NO: 31803 - protein, 13 aa, synthetic construct
ACDKGYGYTDNLI

SEQ ID NO: 31804 - protein, 13 aa, synthetic construct
ACDKGYGYTDRLI

SEQ ID NO: 31805 - protein, 13 aa, synthetic construct
ACDKGYRYTEKLI

SEQ ID NO: 31806 - protein, 13 aa, synthetic construct
ACDKGYWYTDKLI

SEQ ID NO: 31807 - protein, 13 aa, synthetic construct
ACDKHGVYTDKLI

SEQ ID NO: 31808 - protein, 13 aa, synthetic construct
ACDKLCVYTDKLI

SEQ ID NO: 31809 - protein, 7 aa, synthetic construct
ACDKLEG

SEQ ID NO: 31810 - protein, 13 aa, synthetic construct
ACDKLGAYTEKLI

SEQ ID NO: 31811 - protein, 12 aa, synthetic construct
ACDKLGDRSNSS

SEQ ID NO: 31812 - protein, 14 aa, synthetic construct
ACDKLGDRTPINSS

SEQ ID NO: 31813 - protein, 15 aa, synthetic construct
ACDKLGDTHTPINSS

SEQ ID NO: 31814 - protein, 13 aa, synthetic construct
ACDKLGDTPINSS

SEQ ID NO: 31815 - protein, 12 aa, synthetic construct
ACDKLGETDKLI

SEQ ID NO: 31816 - protein, 13 aa, synthetic construct
ACDKLGFYTDKLI

SEQ ID NO: 31817 - protein, 13 aa, synthetic construct
ACDKLGGYTDKLI

SEQ ID NO: 31818 - protein, 14 aa, synthetic construct
ACDKLGILTPINSS

SEQ ID NO: 31819 - protein, 13 aa, synthetic construct
ACDKLGIYTDKLI

SEQ ID NO: 31820 - protein, 12 aa, synthetic construct
ACDTEGDTNKLI

SEQ ID NO: 31821 - protein, 12 aa, synthetic construct
ACDTEGETDKLI

SEQ ID NO: 31822 - protein, 9 aa, synthetic construct
ACDTEGETH

SEQ ID NO: 31823 - protein, 14 aa, synthetic construct
ACDTRCGAGDDKLL

SEQ ID NO: 31824 - protein, 17 aa, synthetic construct
ACDTPQGVNEKQIMLQT

SEQ ID NO: 31825 - protein, 17 aa, synthetic construct
ACDTQFWGIRQTDDKLI

SEQ ID NO: 31826 - protein, 15 aa, synthetic construct
ACDTQLGDTATDKLI

SEQ ID NO: 31827 - protein, 14 aa, synthetic construct
ACDTQLGGINDKLN

SEQ ID NO: 31828 - protein, 14 aa, synthetic construct
ACDTQLGGITDKLI

SEQ ID NO: 31829 - protein, 12 aa, synthetic construct
ACDTQRSTDKLI

SEQ ID NO: 31830 - protein, 5 aa, synthetic construct
ACDTR

SEQ ID NO: 31831 - protein, 14 aa, synthetic construct
ACDTRCEPEHEILI

SEQ ID NO: 31832 - protein, 14 aa, synthetic construct
ACDTRCGAGDDKLI

SEQ ID NO: 31833 - protein, 12 aa, synthetic construct
ACDTRCYADKLI

SEQ ID NO: 31834 - protein, 14 aa, synthetic construct
ACDTPPGGITDKLI

SEQ ID NO: 31835 - protein, 13 aa, synthetic construct
ACDTRDGGTDKPI

SEQ ID NO: 31836 - protein, 13 aa, synthetic construct
ACDTRDKGTDKLI

SEQ ID NO: 31837 - protein, 13 aa, synthetic construct
ACDTRDRAPINSS

SEQ ID NO: 31838 - protein, 13 aa, synthetic construct
ACDTRDRCTDKPI

SEQ ID NO: 31839 - protein, 13 aa, synthetic construct
ACDTRDRDTDKPI

SEQ ID NO: 31840 - protein, 13 aa, synthetic construct
ACDTRDRGTDKHI

SEQ ID NO: 31841 - protein, 13 aa, synthetic construct
ACDTRDRGTDKII

SEQ ID NO: 31842 - protein, 13 aa, synthetic construct
ACDTRDRGTDKLN

SEQ ID NO: 31843 - protein, 13 aa, synthetic construct
ACDTRDRGTDKPN

SEQ ID NO: 31844 - protein, 14 aa, synthetic construct
ACDTPQGGITDKLI

SEQ ID NO: 31845 - protein, 14 aa, synthetic construct
ACDTPLWCITDKLI

SEQ ID NO: 31846 - protein, 13 aa, synthetic construct
ACDTRDRGTDRPI

SEQ ID NO: 31847 - protein, 14 aa, synthetic construct
ACDTPLGGITDKLF

SEQ ID NO: 31848 - protein, 10 aa, synthetic construct
ACDTPGDKLI

SEQ ID NO: 31849 - protein, 14 aa, synthetic construct
AADTGGYPYTDKLI

SEQ ID NO: 31850 - protein, 12 aa, synthetic construct
ACDTPGDTDQLI

SEQ ID NO: 31851 - protein, 14 aa, synthetic construct
ACDTPLGCITDKII

SEQ ID NO: 31852 - protein, 14 aa, synthetic construct
ACDTPLGDTGDKLI

SEQ ID NO: 31853 - protein, 14 aa, synthetic construct
ACDTPLGGISDKII

SEQ ID NO: 31854 - protein, 14 aa, synthetic construct
ACDTPLGGISDKLI

SEQ ID NO: 31855 - protein, 14 aa, synthetic construct
ACDTPLGGITAKLI

SEQ ID NO: 31856 - protein, 14 aa, synthetic construct
ACDTPLGGITDELI

SEQ ID NO: 31857 - protein, 14 aa, synthetic construct
ACDTPLGGITDKRI

SEQ ID NO: 31858 - protein, 14 aa, synthetic construct
ACDTPLRGITDKLI

SEQ ID NO: 31859 - protein, 14 aa, synthetic construct
ACDTPLGGITDKVI

SEQ ID NO: 31860 - protein, 14 aa, synthetic construct
ACDTPLGGITDNLI

SEQ ID NO: 31861 - protein, 14 aa, synthetic construct
ACDTPLGGITDQLI

SEQ ID NO: 31862 - protein, 14 aa, synthetic construct
ACDTPLGGITEKPI

SEQ ID NO: 31863 - protein, 14 aa, synthetic construct
ACDTPLGGITETLI

SEQ ID NO: 31864 - protein, 14 aa, synthetic construct
ACDTPLGGITNKLI

SEQ ID NO: 31865 - protein, 14 aa, synthetic construct
ACDTPLGGITVKLI

SEQ ID NO: 31866 - protein, 14 aa, synthetic construct
ACDTPLGGMTDKLI

SEQ ID NO: 31867 - protein, 14 aa, synthetic construct
ACDTPLGGTTDKLI

SEQ ID NO: 31868 - protein, 13 aa, synthetic construct
ACDTRDRGTDQPI

SEQ ID NO: 31869 - protein, 13 aa, synthetic construct
ACDTRDRGTDTLI

SEQ ID NO: 31870 - protein, 15 aa, synthetic construct
ACDTRWGTPYTEKLI

SEQ ID NO: 31871 - protein, 14 aa, synthetic construct
ACDTRWGAGDDNSS

SEQ ID NO: 31872 - protein, 14 aa, synthetic construct
ACDTRVGDTTINSS

SEQ ID NO: 31873 - protein, 14 aa, synthetic construct
ACDTRVGGITDKLI

SEQ ID NO: 31874 - protein, 12 aa, synthetic construct
ACDTRVYDDKLI

SEQ ID NO: 31875 - protein, 14 aa, synthetic construct
ACDTRWAAGDDKLI

SEQ ID NO: 31876 - protein, 14 aa, synthetic construct
ACDTRWAAGDDKLN

SEQ ID NO: 31877 - protein, 14 aa, synthetic construct
ACDTRWGAADDKLI

SEQ ID NO: 31878 - protein, 14 aa, synthetic construct
ACDTRWGAGADKLI

SEQ ID NO: 31879 - protein, 14 aa, synthetic construct
ACDTRWGAGDDKFI

SEQ ID NO: 31880 - protein, 14 aa, synthetic construct
ACDTRWGAGDDNLI

SEQ ID NO: 31881 - protein, 14 aa, synthetic construct
ACDTRWGAGDDVLI

SEQ ID NO: 31882 - protein, 10 aa, synthetic construct
ACDTRRPTII

SEQ ID NO: 31883 - protein, 14 aa, synthetic construct
ACDTRWGAGDENLI

SEQ ID NO: 31884 - protein, 14 aa, synthetic construct
ACDTRWGAGDETLI

SEQ ID NO: 31885 - protein, 14 aa, synthetic construct
ACDTRWGAGDYKLI

SEQ ID NO: 31886 - protein, 14 aa, synthetic construct
ACDTRWGAGTINSS

SEQ ID NO: 31887 - protein, 14 aa, synthetic construct
ACDTRWGAGYDKLI

SEQ ID NO: 31888 - protein, 14 aa, synthetic construct
ACDTRWGEGDDKVI

SEQ ID NO: 31889 - protein, 14 aa, synthetic construct
ACDTRWGGGDDKLI

SEQ ID NO: 31890 - protein, 13 aa, synthetic construct
ACDTRWGITDKLI

SEQ ID NO: 31891 - protein, 14 aa, synthetic construct
ACDTRWGTGDDKLI

SEQ ID NO: 31892 - protein, 13 aa, synthetic construct
ACDTRSGITDKLI

SEQ ID NO: 31893 - protein, 14 aa, synthetic construct
ACDTRRGAGEDKLI

SEQ ID NO: 31894 - protein, 12 aa, synthetic construct
ACDTRDRTDKLI

SEQ ID NO: 31895 - protein, 12 aa, synthetic construct
ACDTRGDTDIHS

SEQ ID NO: 31896 - protein, 12 aa, synthetic construct
ACDTRDRTDKNI

SEQ ID NO: 31897 - protein, 13 aa, synthetic construct
ACDTRDTPNDKLI

SEQ ID NO: 31898 - protein, 12 aa, synthetic construct
ACDTRDTTDKLI

SEQ ID NO: 31899 - protein, 13 aa, synthetic construct
ACDTRDWGTDKLI

SEQ ID NO: 31900 - protein, 12 aa, synthetic construct
ACDTREYADKLI

SEQ ID NO: 31901 - protein, 12 aa, synthetic construct
ACDTREYPDKLI

SEQ ID NO: 31902 - protein, 12 aa, synthetic construct
ACDTRGCADKLI

SEQ ID NO: 31903 - protein, 12 aa, synthetic construct
ACDTRGDADKLI

SEQ ID NO: 31904 - protein, 12 aa, synthetic construct
ACDTRGDAEKLI

SEQ ID NO: 31905 - protein, 14 aa, synthetic construct
ACDTRGGAGDVPLI

SEQ ID NO: 31906 - protein, 13 aa, synthetic construct
ACDTRQRGTDKPI

SEQ ID NO: 31907 - protein, 12 aa, synthetic construct
ACDTRGGSVKLI

SEQ ID NO: 31908 - protein, 12 aa, synthetic construct
ACDTRGYADELI

SEQ ID NO: 31909 - protein, 12 aa, synthetic construct
ACDTRGYADILI

SEQ ID NO: 31910 - protein, 12 aa, synthetic construct
ACDTRGYAEKLN

SEQ ID NO: 31911 - protein, 12 aa, synthetic construct
ACDTRGYAETLI

SEQ ID NO: 31912 - protein, 12 aa, synthetic construct
ACDTRGYAHKLI

SEQ ID NO: 31913 - protein, 13 aa, synthetic construct
ACDTRHRGTDKLI

SEQ ID NO: 31914 - protein, 14 aa, synthetic construct
ACDTRLGAGDDKLI

SEQ ID NO: 31915 - protein, 12 aa, synthetic construct
ACDTRLGPDKLI

SEQ ID NO: 31916 - protein, 14 aa, synthetic construct
ACDTNWGDTGDTLI

SEQ ID NO: 31917 - protein, 14 aa, synthetic construct
ACDTNWGDTGDKLI

SEQ ID NO: 31918 - protein, 14 aa, synthetic construct
ACDTNWAQTRDKLI

SEQ ID NO: 31919 - protein, 12 aa, synthetic construct
ACDTLGDTDELL

SEQ ID NO: 31920 - protein, 12 aa, synthetic construct
ACDTLGATDKPI

SEQ ID NO: 31921 - protein, 12 aa, synthetic construct
ACDTLGATEKLI

SEQ ID NO: 31922 - protein, 12 aa, synthetic construct
ACDTLGDIDKLI

SEQ ID NO: 31923 - protein, 12 aa, synthetic construct
ACDTLGDNDKLI

SEQ ID NO: 31924 - protein, 12 aa, synthetic construct
ACDTLGDPDKHI

SEQ ID NO: 31925 - protein, 12 aa, synthetic construct
ACDTLGDPEKLI

SEQ ID NO: 31926 - protein, 12 aa, synthetic construct
ACDTLGDRVKLI

SEQ ID NO: 31927 - protein, 12 aa, synthetic construct
ACDTLGDSDKLI

SEQ ID NO: 31928 - protein, 12 aa, synthetic construct
ACDTLGDTAKLI

SEQ ID NO: 31929 - protein, 12 aa, synthetic construct
ACDTLGDTDEPI

SEQ ID NO: 31930 - protein, 14 aa, synthetic construct
ACDTLFWGTSINSS

SEQ ID NO: 31931 - protein, 12 aa, synthetic construct
ACDTLGDTDKLF

SEQ ID NO: 31932 - protein, 12 aa, synthetic construct
ACDTLGDTDKLL

SEQ ID NO: 31933 - protein, 12 aa, synthetic construct
ACDTLGDTDKLS

SEQ ID NO: 31934 - protein, 12 aa, synthetic construct
ACDTLGDTDKLT

SEQ ID NO: 31935 - protein, 12 aa, synthetic construct
ACDTLGDTDNSS

SEQ ID NO: 31936 - protein, 12 aa, synthetic construct
ACDTLGDTDRPI

SEQ ID NO: 31937 - protein, 12 aa, synthetic construct
ACDTLGDTEKLF

SEQ ID NO: 31938 - protein, 12 aa, synthetic construct
ACDTLGDTEQLI

SEQ ID NO: 31939 - protein, 12 aa, synthetic construct
ACDTLGDTETLI

SEQ ID NO: 31940 - protein, 17 aa, synthetic construct
ACDTLFWVIRQTDDKLI

SEQ ID NO: 31941 - protein, 17 aa, synthetic construct
ACDTLFWGTRQTDDKLI

SEQ ID NO: 31942 - protein, 12 aa, synthetic construct
ACDTMVDTDKLI

SEQ ID NO: 31943 - protein, 17 aa, synthetic construct
ACDTLFWGIRQTDDKNI

SEQ ID NO: 31944 - protein, 17 aa, synthetic construct
ACDTLFWGIRAGPINSS

SEQ ID NO: 31945 - protein, 17 aa, synthetic construct
ACDTLFWGIRHTDDKLI

SEQ ID NO: 31946 - protein, 17 aa, synthetic construct
ACDTLFWGIRLTDDNLI

SEQ ID NO: 31947 - protein, 17 aa, synthetic construct
ACDTLFWGIRQKDYKLI

SEQ ID NO: 31948 - protein, 17 aa, synthetic construct
ACDTLFWGIRQTDAQLI

SEQ ID NO: 31949 - protein, 17 aa, synthetic construct
ACDTLFWGIRQTDDELI

SEQ ID NO: 31950 - protein, 17 aa, synthetic construct
ACDTLFWGIRQTDDKHI

SEQ ID NO: 31951 - protein, 17 aa, synthetic construct
ACDTLFWGIRQTDDKLL

SEQ ID NO: 31952 - protein, 17 aa, synthetic construct
ACDTLFWGIRQTDDKLT

SEQ ID NO: 31953 - protein, 17 aa, synthetic construct
ACDTLFWGIRQTDDNLI

SEQ ID NO: 31954 - protein, 17 aa, synthetic construct
ACDTLFWGRRQTDDKLS

SEQ ID NO: 31955 - protein, 17 aa, synthetic construct
ACDTLFWGIRQTDDNSS

SEQ ID NO: 31956 - protein, 17 aa, synthetic construct
ACDTLFWGIRQTDGKLI

SEQ ID NO: 31957 - protein, 17 aa, synthetic construct
ACDTLFWGIRRTDDELI

SEQ ID NO: 31958 - protein, 16 aa, synthetic construct
ACDTLFWGIRRTINSS

SEQ ID NO: 31959 - protein, 17 aa, synthetic construct
ACDTLFWGISQTDDKLI

SEQ ID NO: 31960 - protein, 17 aa, synthetic construct
ACDTLFWGLLQTDVKLI

SEQ ID NO: 31961 - protein, 17 aa, synthetic construct
ACDTLFWGLRQTDDKLI

SEQ ID NO: 31962 - protein, 17 aa, synthetic construct
ACDTLFWGLRQTDDQLI

SEQ ID NO: 31963 - protein, 17 aa, synthetic construct
ACDTLFWGMRQTDDKLI

SEQ ID NO: 31964 - protein, 14 aa, synthetic construct
ACDTLGDTGGINSS

SEQ ID NO: 31965 - protein, 12 aa, synthetic construct
ACDTLGETDKPL

SEQ ID NO: 31966 - protein, 13 aa, synthetic construct
ACDTLGFYTEKLI

SEQ ID NO: 31967 - protein, 17 aa, synthetic construct
ACDTLSWGIRQTDDKHI

SEQ ID NO: 31968 - protein, 15 aa, synthetic construct
ACDTLLGGTATDKLI

SEQ ID NO: 31969 - protein, 14 aa, synthetic construct
ACDTLLGIRPINSS

SEQ ID NO: 31970 - protein, 15 aa, synthetic construct
ACDTLLGVSATDKLI

SEQ ID NO: 31971 - protein, 15 aa, synthetic construct
ACDTLLGVTATDKLI

SEQ ID NO: 31972 - protein, 17 aa, synthetic construct
ACDTLLWGIRRTDDKLI

SEQ ID NO: 31973 - protein, 15 aa, synthetic construct
ACDTLMGDTAAEKLI

SEQ ID NO: 31974 - protein, 12 aa, synthetic construct
ACDTLRDTDKLI

SEQ ID NO: 31975 - protein, 13 aa, synthetic construct
ACDTLRGNTDKLI

SEQ ID NO: 31976 - protein, 15 aa, synthetic construct
ACDTLSGGPYTDKLI

SEQ ID NO: 31977 - protein, 10 aa, synthetic construct
ACDTLWAQTH

SEQ ID NO: 31978 - protein, 14 aa, synthetic construct
ACDTLGGAGDDKLI

SEQ ID NO: 31979 - protein, 12 aa, synthetic construct
ACDTLWDTDKHI

SEQ ID NO: 31980 - protein, 12 aa, synthetic construct
ACDTLWDTDKII

SEQ ID NO: 31981 - protein, 14 aa, synthetic construct
ACDTLWGAGDDKII

SEQ ID NO: 31982 - protein, 13 aa, synthetic construct
ACDTLWNHTDKLI

SEQ ID NO: 31983 - protein, 17 aa, synthetic construct
ACDTLYWGIRQTDDKLI

SEQ ID NO: 31984 - protein, 13 aa, synthetic construct
ACDTMDRGSDKTI

SEQ ID NO: 31985 - protein, 12 aa, synthetic construct
ACDTMGDTDRLI

SEQ ID NO: 31986 - protein, 12 aa, synthetic construct
ACDTMGGTEKQI

SEQ ID NO: 31987 - protein, 12 aa, synthetic construct
ACDTMGYADKLI

SEQ ID NO: 31988 - protein, 15 aa, synthetic construct
ACDTLLGDTSNDKLI

SEQ ID NO: 31989 - protein, 15 aa, synthetic construct
ACDTLLGDTDTDTLI

SEQ ID NO: 31990 - protein, 15 aa, synthetic construct
ACDTLLGDTATEKLN

SEQ ID NO: 31991 - protein, 15 aa, synthetic construct
ACDTLLGDTATDTLT

SEQ ID NO: 31992 - protein, 11 aa, synthetic construct
ACDTLGGTDKL

SEQ ID NO: 31993 - protein, 12 aa, synthetic construct
ACDTLGHTEQLI

SEQ ID NO: 31994 - protein, 12 aa, synthetic construct
ACDTLGIPIDSS

SEQ ID NO: 31995 - protein, 12 aa, synthetic construct
ACDTLGIPRNSS

SEQ ID NO: 31996 - protein, 15 aa, synthetic construct
ACDTLGISTRDTRQK

SEQ ID NO: 31997 - protein, 12 aa, synthetic construct
ACDTLGNTDKLI

SEQ ID NO: 31998 - protein, 12 aa, synthetic construct
ACDTLGTPINSS

SEQ ID NO: 31999 - protein, 13 aa, synthetic construct
ACDTLGVYTDNLI

SEQ ID NO: 32000 - protein, 17 aa, synthetic construct
ACDTLIWGIRQTDDKII

SEQ ID NO: 32001 - protein, 17 aa, synthetic construct
ACDTLIWGIRQTDDKLI

SEQ ID NO: 32002 - protein, 17 aa, synthetic construct
ACDTLIWGIRQTDDKVI

SEQ ID NO: 32003 - protein, 15 aa, synthetic construct
ACDTLLGAPATDKLI

SEQ ID NO: 32004 - protein, 15 aa, synthetic construct
ACDTLLGDTAADKHI

SEQ ID NO: 32005 - protein, 15 aa, synthetic construct
ACDTLLGDTANDKLI

SEQ ID NO: 32006 - protein, 15 aa, synthetic construct
ACDTLLGDTATDELI

SEQ ID NO: 32007 - protein, 15 aa, synthetic construct
ACDTLLGDTATDILI

SEQ ID NO: 32008 - protein, 15 aa, synthetic construct
ACDTLLGDTATDKII

SEQ ID NO: 32009 - protein, 15 aa, synthetic construct
ACDTLLGDTATDKLT

SEQ ID NO: 32010 - protein, 15 aa, synthetic construct
ACDTLLGDTATDKLV

SEQ ID NO: 32011 - protein, 15 aa, synthetic construct
ACDTRWGTPYTDKLI

SEQ ID NO: 32012 - protein, 14 aa, synthetic construct
ACDTRWVAGDDKLI

SEQ ID NO: 32013 - protein, 14 aa, synthetic construct
ACDTEGIRRPINSS

SEQ ID NO: 32014 - protein, 9 aa, synthetic construct
ACDTYLDQS

SEQ ID NO: 32015 - protein, 10 aa, synthetic construct
ACDTWGPQLI

SEQ ID NO: 32016 - protein, 10 aa, synthetic construct
ACDTWGPTHI

SEQ ID NO: 32017 - protein, 13 aa, synthetic construct
ACDTWGQGTINSS

SEQ ID NO: 32018 - protein, 12 aa, synthetic construct
ACDTWGYADKLI

SEQ ID NO: 32019 - protein, 15 aa, synthetic construct
ACDTWSGGPYTDKLI

SEQ ID NO: 32020 - protein, 13 aa, synthetic construct
ACDTWVTPNDKLI

SEQ ID NO: 32021 - protein, 15 aa, synthetic construct
ACDTWWGTPYTDKLI

SEQ ID NO: 32022 - protein, 13 aa, synthetic construct
ACDTYCAPTDKLI

SEQ ID NO: 32023 - protein, 15 aa, synthetic construct
ACDTYGGIRNTDKLI

SEQ ID NO: 32024 - protein, 15 aa, synthetic construct
ACDTYWGIRDTDKLI

SEQ ID NO: 32025 - protein, 10 aa, synthetic construct
ACDTWGPKLL

SEQ ID NO: 32026 - protein, 15 aa, synthetic construct
ACDTYWGIRNTDKLT

SEQ ID NO: 32027 - protein, 15 aa, synthetic construct
ACDTYWGIRNTDKPI

SEQ ID NO: 32028 - protein, 15 aa, synthetic construct
ACDTYWGIRNTEKLI

SEQ ID NO: 32029 - protein, 15 aa, synthetic construct
ACDTYWGIRTTDQLI

SEQ ID NO: 32030 - protein, 15 aa, synthetic construct
ACDTYWGLRNTDKLI

SEQ ID NO: 32031 - protein, 15 aa, synthetic construct
ACDTYWGTRNTDKLI

SEQ ID NO: 32032 - protein, 14 aa, synthetic construct
ACDTYWGVDTDRLI

SEQ ID NO: 32033 - protein, 15 aa, synthetic construct
ACDTYWVIRNTDKLI

SEQ ID NO: 32034 - protein, 11 aa, synthetic construct
ACDVEDTHKHK

SEQ ID NO: 32035 - protein, 10 aa, synthetic construct
ACDTWGPNLI

SEQ ID NO: 32036 - protein, 10 aa, synthetic construct
ACDTWGPKII

SEQ ID NO: 32037 - protein, 14 aa, synthetic construct
ACDVGDTPDTDKLI

SEQ ID NO: 32038 - protein, 15 aa, synthetic construct
ACDTVVGDTATDNLI

SEQ ID NO: 32039 - protein, 15 aa, synthetic construct
ACDTVRGTPYTDKLI

SEQ ID NO: 32040 - protein, 13 aa, synthetic construct
ACDTVRGTSDKLF

SEQ ID NO: 32041 - protein, 13 aa, synthetic construct
ACDTVRGTTDKHI

SEQ ID NO: 32042 - protein, 13 aa, synthetic construct
ACDTVRGTTDKLF

SEQ ID NO: 32043 - protein, 13 aa, synthetic construct
ACDTVRGTTEKLI

SEQ ID NO: 32044 - protein, 13 aa, synthetic construct
ACDTVRGYTDKLI

SEQ ID NO: 32045 - protein, 13 aa, synthetic construct
ACDTVRRNTDKLI

SEQ ID NO: 32046 - protein, 13 aa, synthetic construct
ACDTVRVNTDKLI

SEQ ID NO: 32047 - protein, 12 aa, synthetic construct
ACDTVRYPDKLI

SEQ ID NO: 32048 - protein, 14 aa, synthetic construct
ACDTVVSAPGTPDR

SEQ ID NO: 32049 - protein, 10 aa, synthetic construct
ACDTWGLKLI

SEQ ID NO: 32050 - protein, 12 aa, synthetic construct
ACDTVWGIDKLI

SEQ ID NO: 32051 - protein, 13 aa, synthetic construct
ACDTVWGITDKLI

SEQ ID NO: 32052 - protein, 12 aa, synthetic construct
ACDTWDTTDKLI

SEQ ID NO: 32053 - protein, 15 aa, synthetic construct
ACDTWEGLGAVDKLI

SEQ ID NO: 32054 - protein, 13 aa, synthetic construct
ACDTWEGVTDKII

SEQ ID NO: 32055 - protein, 10 aa, synthetic construct
ACDTWEPKLI

SEQ ID NO: 32056 - protein, 12 aa, synthetic construct
ACDTWGDPDKLI

SEQ ID NO: 32057 - protein, 12 aa, synthetic construct
ACDTWGDTDQLI

SEQ ID NO: 32058 - protein, 15 aa, synthetic construct
ACDTWGGLGAVDKLI

SEQ ID NO: 32059 - protein, 11 aa, synthetic construct
ACDVEGTDKLI

SEQ ID NO: 32060 - protein, 12 aa, synthetic construct
ACDVGGDAERLI

SEQ ID NO: 32061 - protein, 14 aa, synthetic construct
ACDTRWVEGDDKLI

SEQ ID NO: 32062 - protein, 14 aa, synthetic construct
ACECTGGPCTDTLI

SEQ ID NO: 32063 - protein, 14 aa, synthetic construct
ACDYWGMPYTDKLI

SEQ ID NO: 32064 - protein, 14 aa, synthetic construct
ACDYWGSPYTDQLL

SEQ ID NO: 32065 - protein, 12 aa, synthetic construct
ACDYWGTPINSS

SEQ ID NO: 32066 - protein, 14 aa, synthetic construct
ACDYWRIPYTDKLI

SEQ ID NO: 32067 - protein, 14 aa, synthetic construct
ACDYWWIPYTDNSS

SEQ ID NO: 32068 - protein, 13 aa, synthetic construct
ACEAGWGMTDEVF

SEQ ID NO: 32069 - protein, 13 aa, synthetic construct
ACEARGRGTDKLI

SEQ ID NO: 32070 - protein, 15 aa, synthetic construct
ACECCTGGYMGDKLI

SEQ ID NO: 32071 - protein, 15 aa, synthetic construct
ACECCTGGYRGEKLI

SEQ ID NO: 32072 - protein, 14 aa, synthetic construct
ACECTGGPSTAKLI

SEQ ID NO: 32073 - protein, 14 aa, synthetic construct
ACDYWGLRYTEKSR

SEQ ID NO: 32074 - protein, 14 aa, synthetic construct
ACECTGGPYADRLI

SEQ ID NO: 32075 - protein, 14 aa, synthetic construct
ACEGGETADTGQLF

SEQ ID NO: 32076 - protein, 13 aa, synthetic construct
ACEHWGVDTEKLF

SEQ ID NO: 32077 - protein, 12 aa, synthetic construct
ACEIGGYSDKLI

SEQ ID NO: 32078 - protein, 12 aa, synthetic construct
ACEIGGYSEKII

SEQ ID NO: 32079 - protein, 13 aa, synthetic construct
ACEILGDTYDKLI

SEQ ID NO: 32080 - protein, 13 aa, synthetic construct
ACEILGYNYYKLI

SEQ ID NO: 32081 - protein, 12 aa, synthetic construct
ACEIWGYTDKLI

SEQ ID NO: 32082 - protein, 13 aa, synthetic construct
ACEKGSGYTDKLI

SEQ ID NO: 32083 - protein, 14 aa, synthetic construct
ACDYWGMPYTDKII

SEQ ID NO: 32084 - protein, 10 aa, synthetic construct
ACDYWGITSS

SEQ ID NO: 32085 - protein, 13 aa, synthetic construct
ACDYCGIDTDKLI

SEQ ID NO: 32086 - protein, 14 aa, synthetic construct
ACDYWGIHYTENLI

SEQ ID NO: 32087 - protein, 14 aa, synthetic construct
ACDYGGIPYTDKLI

SEQ ID NO: 32088 - protein, 14 aa, synthetic construct
ACDYSGIPYTDKLI

SEQ ID NO: 32089 - protein, 14 aa, synthetic construct
ACDYSGSPYTEKLI

SEQ ID NO: 32090 - protein, 13 aa, synthetic construct
ACDYVLGETDKLI

SEQ ID NO: 32091 - protein, 13 aa, synthetic construct
ACDYVLGETTKLI

SEQ ID NO: 32092 - protein, 14 aa, synthetic construct
ACDYWAIPYTDKLI

SEQ ID NO: 32093 - protein, 6 aa, synthetic construct
ACDYWG

SEQ ID NO: 32094 - protein, 14 aa, synthetic construct
ACDYWGFPYTDKLI

SEQ ID NO: 32095 - protein, 14 aa, synthetic construct
ACDYWGIHYTDKII

SEQ ID NO: 32096 - protein, 14 aa, synthetic construct
ACDYWGIPDTDKLI

SEQ ID NO: 32097 - protein, 14 aa, synthetic construct
ACDYWGIRYTDKLI

SEQ ID NO: 32098 - protein, 14 aa, synthetic construct
ACDYWGIPNSDKII

SEQ ID NO: 32099 - protein, 14 aa, synthetic construct
ACDYWGIPNTDKVI

SEQ ID NO: 32100 - protein, 14 aa, synthetic construct
ACDYWGIPYADKLI

SEQ ID NO: 32101 - protein, 14 aa, synthetic construct
ACDYWGIPYTDKHI

SEQ ID NO: 32102 - protein, 14 aa, synthetic construct
ACDYWGIPYTDKLF

SEQ ID NO: 32103 - protein, 14 aa, synthetic construct
ACDYWGIPYTDKLT

SEQ ID NO: 32104 - protein, 14 aa, synthetic construct
ACDYWGIPYTDRLI

SEQ ID NO: 32105 - protein, 14 aa, synthetic construct
ACDYWGIPYTGKLI

SEQ ID NO: 32106 - protein, 13 aa, synthetic construct
ACDYWGIRAINSS

SEQ ID NO: 32107 - protein, 13 aa, synthetic construct
ACDTVRGSTDRLI

SEQ ID NO: 32108 - protein, 12 aa, synthetic construct
ACDTVRGPDKLI

SEQ ID NO: 32109 - protein, 12 aa, synthetic construct
ACDTVRGPDILI

SEQ ID NO: 32110 - protein, 10 aa, synthetic construct
ACDTTGEKLI

SEQ ID NO: 32111 - protein, 10 aa, synthetic construct
ACDTSGYKLI

SEQ ID NO: 32112 - protein, 10 aa, synthetic construct
ACDTSGYKLT

SEQ ID NO: 32113 - protein, 14 aa, synthetic construct
ACDTSLGGITDKLI

SEQ ID NO: 32114 - protein, 10 aa, synthetic construct
ACDTSVDKLI

SEQ ID NO: 32115 - protein, 10 aa, synthetic construct
ACDTSWDKLF

SEQ ID NO: 32116 - protein, 9 aa, synthetic construct
ACDTSWGIN

SEQ ID NO: 32117 - protein, 13 aa, synthetic construct
ACDTSWGITDKLI

SEQ ID NO: 32118 - protein, 13 aa, synthetic construct
ACDTSWGPTDKLI

SEQ ID NO: 32119 - protein, 10 aa, synthetic construct
ACDTTGDKHI

SEQ ID NO: 32120 - protein, 13 aa, synthetic construct
ACDTTGGYNDKLI

SEQ ID NO: 32121 - protein, 10 aa, synthetic construct
ACDTSGLKLI

SEQ ID NO: 32122 - protein, 14 aa, synthetic construct
ACDTTLWGITDKLI

SEQ ID NO: 32123 - protein, 10 aa, synthetic construct
ACDTTRENLI

SEQ ID NO: 32124 - protein, 12 aa, synthetic construct
ACDTTRGQEKQI

SEQ ID NO: 32125 - protein, 12 aa, synthetic construct
ACDTVDRTDKLI

SEQ ID NO: 32126 - protein, 12 aa, synthetic construct
ACDTVDRTDNSS

SEQ ID NO: 32127 - protein, 15 aa, synthetic construct
ACDTVEGLGDVDKLI

SEQ ID NO: 32128 - protein, 18 aa, synthetic construct
ACDTVEPKSQPPAKPSVF

SEQ ID NO: 32129 - protein, 13 aa, synthetic construct
ACDTVETYTDKLI

SEQ ID NO: 32130 - protein, 12 aa, synthetic construct
ACDTVGDTEKLI

SEQ ID NO: 32131 - protein, 10 aa, synthetic construct
ACDTSGVKLI

SEQ ID NO: 32132 - protein, 13 aa, synthetic construct
ACDTSGIAPINSS

SEQ ID NO: 32133 - protein, 13 aa, synthetic construct
ACDTVRGNTYKLI

SEQ ID NO: 32134 - protein, 10 aa, synthetic construct
ACDTSGDKLT

SEQ ID NO: 32135 - protein, 14 aa, synthetic construct
ACDTRWWAGDDELI

SEQ ID NO: 32136 - protein, 14 aa, synthetic construct
ACDTRWWAWDDKLI

SEQ ID NO: 32137 - protein, 13 aa, synthetic construct
ACDTSDRGTDKHI

SEQ ID NO: 32138 - protein, 13 aa, synthetic construct
ACDTSDRGTDKLI

SEQ ID NO: 32139 - protein, 10 aa, synthetic construct
ACDTSEGLLI

SEQ ID NO: 32140 - protein, 10 aa, synthetic construct
ACDTSGAKRM

SEQ ID NO: 32141 - protein, 10 aa, synthetic construct
ACDTSGDKFI

SEQ ID NO: 32142 - protein, 10 aa, synthetic construct
ACDTSGDKII

SEQ ID NO: 32143 - protein, 10 aa, synthetic construct
ACDTSGDKLN

SEQ ID NO: 32144 - protein, 15 aa, synthetic construct
ACDTSGDTRRTDKLI

SEQ ID NO: 32145 - protein, 12 aa, synthetic construct
ACDTSGGSVKLI

SEQ ID NO: 32146 - protein, 10 aa, synthetic construct
ACDTSGEKLL

SEQ ID NO: 32147 - protein, 10 aa, synthetic construct
ACDTSGGILI

SEQ ID NO: 32148 - protein, 10 aa, synthetic construct
ACDTSGGKLI

SEQ ID NO: 32149 - protein, 10 aa, synthetic construct
ACDTSGGLLF

SEQ ID NO: 32150 - protein, 10 aa, synthetic construct
ACDTSGGLLV

SEQ ID NO: 32151 - protein, 10 aa, synthetic construct
ACDTSGGLPI

SEQ ID NO: 32152 - protein, 10 aa, synthetic construct
ACDTSGGLVI

SEQ ID NO: 32153 - protein, 10 aa, synthetic construct
ACDTSGGPLI

SEQ ID NO: 32154 - protein, 10 aa, synthetic construct
ACDTSGGQLI

SEQ ID NO: 32155 - protein, 13 aa, synthetic construct
ACDTVGDTGDKLI

SEQ ID NO: 32156 - protein, 13 aa, synthetic construct
ACDTVGGNTDKLI

SEQ ID NO: 32157 - protein, 12 aa, synthetic construct
ACDTVGGTDKLL

SEQ ID NO: 32158 - protein, 15 aa, synthetic construct
ACDTVPGDTATAKLI

SEQ ID NO: 32159 - protein, 15 aa, synthetic construct
ACDTVLGDTATNKLI

SEQ ID NO: 32160 - protein, 15 aa, synthetic construct
ACDTVLGDTATVKLI

SEQ ID NO: 32161 - protein, 15 aa, synthetic construct
ACDTVLGDTDTDKHI

SEQ ID NO: 32162 - protein, 15 aa, synthetic construct
ACDTVLGEKDTDKLI

SEQ ID NO: 32163 - protein, 13 aa, synthetic construct
ACDTVLGETEKLI

SEQ ID NO: 32164 - protein, 15 aa, synthetic construct
ACDTVLVDTDTDKLI

SEQ ID NO: 32165 - protein, 15 aa, synthetic construct
ACDTVLWDTATDKLI

SEQ ID NO: 32166 - protein, 17 aa, synthetic construct
ACDTVLWGIRQTDDKLI

SEQ ID NO: 32167 - protein, 15 aa, synthetic construct
ACDTVMGDTDTYKLI

SEQ ID NO: 32168 - protein, 15 aa, synthetic construct
ACDTVPGDTATDKLI

SEQ ID NO: 32169 - protein, 15 aa, synthetic construct
ACDTVGISPWDTRQM

SEQ ID NO: 32170 - protein, 13 aa, synthetic construct
ACDTVPGNTDKLI

SEQ ID NO: 32171 - protein, 13 aa, synthetic construct
ACDTVRGDTDKLI

SEQ ID NO: 32172 - protein, 13 aa, synthetic construct
ACDTVRGHTEKLI

SEQ ID NO: 32173 - protein, 13 aa, synthetic construct
ACDTVRGKPINSS

SEQ ID NO: 32174 - protein, 13 aa, synthetic construct
ACDTVRGKTEKLI

SEQ ID NO: 32175 - protein, 13 aa, synthetic construct
ACDTVRGNTDKII

SEQ ID NO: 32176 - protein, 13 aa, synthetic construct
ACDTVRGNTDKLT

SEQ ID NO: 32177 - protein, 13 aa, synthetic construct
ACDTVRGNTDNSS

SEQ ID NO: 32178 - protein, 12 aa, synthetic construct
ACDTVRGNTRQM

SEQ ID NO: 32179 - protein, 15 aa, synthetic construct
ACDTVLGDTATEKLS

SEQ ID NO: 32180 - protein, 15 aa, synthetic construct
ACDTVLGDTATDRLI

SEQ ID NO: 32181 - protein, 15 aa, synthetic construct
ACDTVLGDTATDNSS

SEQ ID NO: 32182 - protein, 15 aa, synthetic construct
ACDTVLGDTATDKPI

SEQ ID NO: 32183 - protein, 15 aa, synthetic construct
ACDTVGISSWDTRPM

SEQ ID NO: 32184 - protein, 15 aa, synthetic construct
ACDTVGISSWDTRQV

SEQ ID NO: 32185 - protein, 15 aa, synthetic construct
ACDTVGISSWNARQM

SEQ ID NO: 32186 - protein, 15 aa, synthetic construct
ACDTVGLSSWDTRQM

SEQ ID NO: 32187 - protein, 15 aa, synthetic construct
ACDTVGMSSWDTRQM

SEQ ID NO: 32188 - protein, 12 aa, synthetic construct
ACDTVGYTDKLI

SEQ ID NO: 32189 - protein, 15 aa, synthetic construct
ACDTVIRDSWDTRQM

SEQ ID NO: 32190 - protein, 15 aa, synthetic construct
ACDTVLGATATDKLI

SEQ ID NO: 32191 - protein, 15 aa, synthetic construct
ACDTVLGATATEKLI

SEQ ID NO: 32192 - protein, 15 aa, synthetic construct
ACDTVLGDKATDKLI

SEQ ID NO: 32193 - protein, 11 aa, synthetic construct
ACDTVLGDKLI

SEQ ID NO: 32194 - protein, 15 aa, synthetic construct
ACDTVLGDRTPINSS

SEQ ID NO: 32195 - protein, 15 aa, synthetic construct
ACDTVLGDTAIDKLI

SEQ ID NO: 32196 - protein, 15 aa, synthetic construct
ACDTVLGDTAPDKLI

SEQ ID NO: 32197 - protein, 15 aa, synthetic construct
ACDTVLGDTASDKLI

SEQ ID NO: 32198 - protein, 15 aa, synthetic construct
ACDTVLGDTATDELI

SEQ ID NO: 32199 - protein, 15 aa, synthetic construct
ACDTVLGDTATDKIS

SEQ ID NO: 32200 - protein, 15 aa, synthetic construct
ACDTVLGDTATDKLF

SEQ ID NO: 32201 - protein, 15 aa, synthetic construct
ACDTVLGDTATDKLS

SEQ ID NO: 32202 - protein, 16 aa, synthetic construct
ACDTLFWGILTPINSS

SEQ ID NO: 32203 - protein, 17 aa, synthetic construct
ACDTLFWGILQTDYKLI

SEQ ID NO: 32204 - protein, 17 aa, synthetic construct
ACDTLFWGILQTDDKLI

SEQ ID NO: 32205 - protein, 13 aa, synthetic construct
ACDTGEGVTDKPI

SEQ ID NO: 32206 - protein, 13 aa, synthetic construct
ACDTGEGVADQLV

SEQ ID NO: 32207 - protein, 13 aa, synthetic construct
ACDTGEGVIDKLI

SEQ ID NO: 32208 - protein, 13 aa, synthetic construct
ACDTGEGVNDKLI

SEQ ID NO: 32209 - protein, 13 aa, synthetic construct
ACDTGEGVPDKLI

SEQ ID NO: 32210 - protein, 15 aa, synthetic construct
ACDTGEGVTAGINSS

SEQ ID NO: 32211 - protein, 13 aa, synthetic construct
ACDTGEGVTAKLI

SEQ ID NO: 32212 - protein, 13 aa, synthetic construct
ACDTGEGVTDELI

SEQ ID NO: 32213 - protein, 13 aa, synthetic construct
ACDTGEGVTDKHI

SEQ ID NO: 32214 - protein, 13 aa, synthetic construct
ACDTGEGVTDKLF

SEQ ID NO: 32215 - protein, 13 aa, synthetic construct
ACDTGEGVTDRLI

SEQ ID NO: 32216 - protein, 15 aa, synthetic construct
ACDTGEGRGAVDKLI

SEQ ID NO: 32217 - protein, 13 aa, synthetic construct
ACDTGEGVTGKLI

SEQ ID NO: 32218 - protein, 13 aa, synthetic construct
ACDTGEGVTSKLI

SEQ ID NO: 32219 - protein, 13 aa, synthetic construct
ACDTGERHTDKLI

SEQ ID NO: 32220 - protein, 12 aa, synthetic construct
ACDTGERTEKRV

SEQ ID NO: 32221 - protein, 15 aa, synthetic construct
ACDTGESLGAVDKLI

SEQ ID NO: 32222 - protein, 13 aa, synthetic construct
ACDTGETPNDKLI

SEQ ID NO: 32223 - protein, 13 aa, synthetic construct
ACDTGETPNEKLI

SEQ ID NO: 32224 - protein, 13 aa, synthetic construct
ACDTGETSTDKRI

SEQ ID NO: 32225 - protein, 13 aa, synthetic construct
ACDTGETYTDKLI

SEQ ID NO: 32226 - protein, 13 aa, synthetic construct
ACDTGEGVADKLI

SEQ ID NO: 32227 - protein, 15 aa, synthetic construct
ACDTGEGPGAVEKLI

SEQ ID NO: 32228 - protein, 14 aa, synthetic construct
ACDTGEYPYTDNLI

SEQ ID NO: 32229 - protein, 15 aa, synthetic construct
ACDTGEGLGAVDILI

SEQ ID NO: 32230 - protein, 6 aa, synthetic construct
ACDTGE

SEQ ID NO: 32231 - protein, 15 aa, synthetic construct
ACDTGEDLGAVDKLI

SEQ ID NO: 32232 - protein, 13 aa, synthetic construct
ACDTGEEVTGKPI

SEQ ID NO: 32233 - protein, 13 aa, synthetic construct
ACDTGEGGTDNLI

SEQ ID NO: 32234 - protein, 14 aa, synthetic construct
ACDTGEGIIPINSS

SEQ ID NO: 32235 - protein, 15 aa, synthetic construct
ACDTGEGLEAVDKLI

SEQ ID NO: 32236 - protein, 9 aa, synthetic construct
ACDTGEGLG

SEQ ID NO: 32237 - protein, 15 aa, synthetic construct
ACDTGEGLGADDKLI

SEQ ID NO: 32238 - protein, 15 aa, synthetic construct
ACDTGEGLGAVANLV

SEQ ID NO: 32239 - protein, 14 aa, synthetic construct
ACDTGEGLGAVDKL

SEQ ID NO: 32240 - protein, 15 aa, synthetic construct
ACDTGEGLWAVDKLI

SEQ ID NO: 32241 - protein, 15 aa, synthetic construct
ACDTGEGLGAVDQLI

SEQ ID NO: 32242 - protein, 15 aa, synthetic construct
ACDTGEGLGAVYKLI

SEQ ID NO: 32243 - protein, 15 aa, synthetic construct
ACDTGEGLGDDEKLI

SEQ ID NO: 32244 - protein, 15 aa, synthetic construct
ACDTGEGLGDVDKLN

SEQ ID NO: 32245 - protein, 15 aa, synthetic construct
ACDTGEGLGPSINSS

SEQ ID NO: 32246 - protein, 15 aa, synthetic construct
ACDTGEGLGTVDKLI

SEQ ID NO: 32247 - protein, 15 aa, synthetic construct
ACDTGEGLGTVDTLI

SEQ ID NO: 32248 - protein, 15 aa, synthetic construct
ACDTGEGLGVGDKLI

SEQ ID NO: 32249 - protein, 15 aa, synthetic construct
ACDTGEGLRAVEKLI

SEQ ID NO: 32250 - protein, 13 aa, synthetic construct
ACDTGEVVTDKLI

SEQ ID NO: 32251 - protein, 10 aa, synthetic construct
ACDTGGAELV

SEQ ID NO: 32252 - protein, 13 aa, synthetic construct
ACDTLFWGIGQTH

SEQ ID NO: 32253 - protein, 13 aa, synthetic construct
ACDTGGIRAINSS

SEQ ID NO: 32254 - protein, 12 aa, synthetic construct
ACDTGGGSVKFI

SEQ ID NO: 32255 - protein, 12 aa, synthetic construct
ACDTGGGSVKLN

SEQ ID NO: 32256 - protein, 12 aa, synthetic construct
ACDTGGGSVKRI

SEQ ID NO: 32257 - protein, 12 aa, synthetic construct
ACDTGGGSVTLI

SEQ ID NO: 32258 - protein, 12 aa, synthetic construct
ACDTGGGTVKLI

SEQ ID NO: 32259 - protein, 15 aa, synthetic construct
ACDTGGGVGAVDKLI

SEQ ID NO: 32260 - protein, 13 aa, synthetic construct
ACDTGGGYADKLI

SEQ ID NO: 32261 - protein, 12 aa, synthetic construct
ACDTGGHPDKLI

SEQ ID NO: 32262 - protein, 9 aa, synthetic construct
ACDTGGHTH

SEQ ID NO: 32263 - protein, 15 aa, synthetic construct
ACDTGGISSWDTRQM

SEQ ID NO: 32264 - protein, 12 aa, synthetic construct
ACDTGGGSGKLM

SEQ ID NO: 32265 - protein, 13 aa, synthetic construct
ACDTGGLATDKLI

SEQ ID NO: 32266 - protein, 9 aa, synthetic construct
ACDTGGLLI

SEQ ID NO: 32267 - protein, 12 aa, synthetic construct
ACDTGGNPDKLI

SEQ ID NO: 32268 - protein, 10 aa, synthetic construct
ACDTGGPINS

SEQ ID NO: 32269 - protein, 10 aa, synthetic construct
ACDTGGPNSS

SEQ ID NO: 32270 - protein, 10 aa, synthetic construct
ACDTGGPQLI

SEQ ID NO: 32271 - protein, 13 aa, synthetic construct
ACDTGGQATEKLI

SEQ ID NO: 32272 - protein, 12 aa, synthetic construct
ACDTGGRTDKLI

SEQ ID NO: 32273 - protein, 13 aa, synthetic construct
ACDTGGSATDKLV

SEQ ID NO: 32274 - protein, 12 aa, synthetic construct
ACDTGGGSVILI

SEQ ID NO: 32275 - protein, 12 aa, synthetic construct
ACDTGGGSGKLI

SEQ ID NO: 32276 - protein, 10 aa, synthetic construct
ACDTGGAQTH

SEQ ID NO: 32277 - protein, 14 aa, synthetic construct
ACDTGGFVSGVMAS

SEQ ID NO: 32278 - protein, 13 aa, synthetic construct
ACDTGGCKDDKLI

SEQ ID NO: 32279 - protein, 12 aa, synthetic construct
ACDTGGCPDKLI

SEQ ID NO: 32280 - protein, 12 aa, synthetic construct
ACDTGGCPEKLI

SEQ ID NO: 32281 - protein, 14 aa, synthetic construct
ACDTGGCPYAEKLI

SEQ ID NO: 32282 - protein, 14 aa, synthetic construct
ACDTGGCPYTDELI

SEQ ID NO: 32283 - protein, 14 aa, synthetic construct
ACDTGGCPYTDKLI

SEQ ID NO: 32284 - protein, 12 aa, synthetic construct
ACDTGGDAEKII

SEQ ID NO: 32285 - protein, 14 aa, synthetic construct
ACDTGGDPYTDKLI

SEQ ID NO: 32286 - protein, 13 aa, synthetic construct
ACDTGGEATEKLI

SEQ ID NO: 32287 - protein, 12 aa, synthetic construct
ACDTGGGAVKLI

SEQ ID NO: 32288 - protein, 13 aa, synthetic construct
ACDTGGGSGDKLI

SEQ ID NO: 32289 - protein, 15 aa, synthetic construct
ACDTGGGFLTPINSS

SEQ ID NO: 32290 - protein, 15 aa, synthetic construct
ACDTGGGGPYTDKLI

SEQ ID NO: 32291 - protein, 13 aa, synthetic construct
ACDTGGGGTDKLI

SEQ ID NO: 32292 - protein, 12 aa, synthetic construct
ACDTGGGIDKLN

SEQ ID NO: 32293 - protein, 13 aa, synthetic construct
ACDTGGGITEKLI

SEQ ID NO: 32294 - protein, 12 aa, synthetic construct
ACDTGGGLDKLI

SEQ ID NO: 32295 - protein, 15 aa, synthetic construct
ACDTGGGLGAVDKLI

SEQ ID NO: 32296 - protein, 12 aa, synthetic construct
ACDTGGGPINSS

SEQ ID NO: 32297 - protein, 12 aa, synthetic construct
ACDTGGGPVKLI

SEQ ID NO: 32298 - protein, 13 aa, synthetic construct
ACDTGDTYTDTLI

SEQ ID NO: 32299 - protein, 13 aa, synthetic construct
ACDTGDTYTDKIF

SEQ ID NO: 32300 - protein, 13 aa, synthetic construct
ACDTGDTYTDKHN

SEQ ID NO: 32301 - protein, 13 aa, synthetic construct
ACDTGDKPNDKLI

SEQ ID NO: 32302 - protein, 12 aa, synthetic construct
ACDTGATTDKLI

SEQ ID NO: 32303 - protein, 12 aa, synthetic construct
ACDTGATTEKLI

SEQ ID NO: 32304 - protein, 13 aa, synthetic construct
ACDTGATYTDKLI

SEQ ID NO: 32305 - protein, 13 aa, synthetic construct
ACDTGDAPNDKLI

SEQ ID NO: 32306 - protein, 13 aa, synthetic construct
ACDTGDAPNDKVI

SEQ ID NO: 32307 - protein, 12 aa, synthetic construct
ACDTGDATEKLI

SEQ ID NO: 32308 - protein, 13 aa, synthetic construct
ACDTGDAYTDKLI

SEQ ID NO: 32309 - protein, 12 aa, synthetic construct
ACDTGDCTNKLI

SEQ ID NO: 32310 - protein, 13 aa, synthetic construct
ACDTGDIHTDKLI

SEQ ID NO: 32311 - protein, 12 aa, synthetic construct
ACDTGDLTDKII

SEQ ID NO: 32312 - protein, 15 aa, synthetic construct
ACDTGAGLGAVDKLI

SEQ ID NO: 32313 - protein, 12 aa, synthetic construct
ACDTGDLTDKLI

SEQ ID NO: 32314 - protein, 12 aa, synthetic construct
ACDTGDNPDKLI

SEQ ID NO: 32315 - protein, 13 aa, synthetic construct
ACDTGDPPNDKLN

SEQ ID NO: 32316 - protein, 13 aa, synthetic construct
ACDTGDPYTDKIK

SEQ ID NO: 32317 - protein, 13 aa, synthetic construct
ACDTGDRGTDKLI

SEQ ID NO: 32318 - protein, 13 aa, synthetic construct
ACDTGDRGTDQPI

SEQ ID NO: 32319 - protein, 13 aa, synthetic construct
ACDTGDRHADKLI

SEQ ID NO: 32320 - protein, 13 aa, synthetic construct
ACDTGDRHAEKLI

SEQ ID NO: 32321 - protein, 13 aa, synthetic construct
ACDTGDRHPEKLI

SEQ ID NO: 32322 - protein, 13 aa, synthetic construct
ACDTGARHTDKRI

SEQ ID NO: 32323 - protein, 15 aa, synthetic construct
ACDTGAGLGADEKLI

SEQ ID NO: 32324 - protein, 13 aa, synthetic construct
ACDTGDTYTAKLI

SEQ ID NO: 32325 - protein, 12 aa, synthetic construct
ACDTEGYTDKLI

SEQ ID NO: 32326 - protein, 15 aa, synthetic construct
ACDTEGISSSDTRQM

SEQ ID NO: 32327 - protein, 15 aa, synthetic construct
ACDTEGISSWDTRQM

SEQ ID NO: 32328 - protein, 9 aa, synthetic construct
ACDTEGKTQ

SEQ ID NO: 32329 - protein, 9 aa, synthetic construct
ACDTEGPTH

SEQ ID NO: 32330 - protein, 9 aa, synthetic construct
ACDTEGQNH

SEQ ID NO: 32331 - protein, 9 aa, synthetic construct
ACDTEGQSH

SEQ ID NO: 32332 - protein, 9 aa, synthetic construct
ACDTEGQTD

SEQ ID NO: 32333 - protein, 12 aa, synthetic construct
ACDTEGTPINSS

SEQ ID NO: 32334 - protein, 12 aa, synthetic construct
ACDTEGVPINSS

SEQ ID NO: 32335 - protein, 15 aa, synthetic construct
ACDTEHGLGAVDKLI

SEQ ID NO: 32336 - protein, 13 aa, synthetic construct
ACDTFLGNTDKLI

SEQ ID NO: 32337 - protein, 12 aa, synthetic construct
ACDTERGPDKLI

SEQ ID NO: 32338 - protein, 13 aa, synthetic construct
ACDTERVNTDKHI

SEQ ID NO: 32339 - protein, 9 aa, synthetic construct
ACDTESQTH

SEQ ID NO: 32340 - protein, 12 aa, synthetic construct
ACDTEVDTDKLI

SEQ ID NO: 32341 - protein, 16 aa, synthetic construct
ACDTEVGDTRRTDKLI

SEQ ID NO: 32342 - protein, 12 aa, synthetic construct
ACDTEWDTEKLI

SEQ ID NO: 32343 - protein, 15 aa, synthetic construct
ACDTEWGTPYTDNLI

SEQ ID NO: 32344 - protein, 12 aa, synthetic construct
ACDTFGDTDKLI

SEQ ID NO: 32345 - protein, 10 aa, synthetic construct
ACDTFGGLLI

SEQ ID NO: 32346 - protein, 13 aa, synthetic construct
ACDTGDRHTANLI

SEQ ID NO: 32347 - protein, 13 aa, synthetic construct
ACDTGDRHTAQRI

SEQ ID NO: 32348 - protein, 13 aa, synthetic construct
ACDTGDRHTDGLI

SEQ ID NO: 32349 - protein, 13 aa, synthetic construct
ACDTGDTPSDKLI

SEQ ID NO: 32350 - protein, 12 aa, synthetic construct
ACDTGDRTNNSS

SEQ ID NO: 32351 - protein, 12 aa, synthetic construct
ACDTGDRTYKLI

SEQ ID NO: 32352 - protein, 13 aa, synthetic construct
ACDTGDTATDKLI

SEQ ID NO: 32353 - protein, 13 aa, synthetic construct
ACDTGDTCTDKLI

SEQ ID NO: 32354 - protein, 13 aa, synthetic construct
ACDTGDTLNDNLI

SEQ ID NO: 32355 - protein, 13 aa, synthetic construct
ACDTGDTPDDKLI

SEQ ID NO: 32356 - protein, 12 aa, synthetic construct
ACDTGDTPDTDK

SEQ ID NO: 32357 - protein, 14 aa, synthetic construct
ACDTGDTPDTDKLI

SEQ ID NO: 32358 - protein, 13 aa, synthetic construct
ACDTGDTPNDTLI

SEQ ID NO: 32359 - protein, 15 aa, synthetic construct
ACDTGDTRLLGHPTD

SEQ ID NO: 32360 - protein, 13 aa, synthetic construct
ACDTGDRHTDILI

SEQ ID NO: 32361 - protein, 13 aa, synthetic construct
ACDTGDTSNDKLI

SEQ ID NO: 32362 - protein, 12 aa, synthetic construct
ACDTGDTTDELI

SEQ ID NO: 32363 - protein, 12 aa, synthetic construct
ACDTGDTTDILI

SEQ ID NO: 32364 - protein, 12 aa, synthetic construct
ACDTGDTTDKFI

SEQ ID NO: 32365 - protein, 12 aa, synthetic construct
ACDTGDTTDKHI

SEQ ID NO: 32366 - protein, 12 aa, synthetic construct
ACDTGDTTDKLS

SEQ ID NO: 32367 - protein, 12 aa, synthetic construct
ACDTGDTTDNLI

SEQ ID NO: 32368 - protein, 12 aa, synthetic construct
ACDTGDTTDRLI

SEQ ID NO: 32369 - protein, 12 aa, synthetic construct
ACDTGDTTDTLV

SEQ ID NO: 32370 - protein, 12 aa, synthetic construct
ACDTGDRTNKLI

SEQ ID NO: 32371 - protein, 12 aa, synthetic construct
ACDTGDRTHKLN

SEQ ID NO: 32372 - protein, 12 aa, synthetic construct
ACDTGDRTERRI

SEQ ID NO: 32373 - protein, 12 aa, synthetic construct
ACDTGDRTDRLI

SEQ ID NO: 32374 - protein, 13 aa, synthetic construct
ACDTGDRHTDKHI

SEQ ID NO: 32375 - protein, 13 aa, synthetic construct
ACDTGDRHTDKLF

SEQ ID NO: 32376 - protein, 13 aa, synthetic construct
ACDTGDRHTDKLN

SEQ ID NO: 32377 - protein, 13 aa, synthetic construct
ACDTGDRHTDRRI

SEQ ID NO: 32378 - protein, 13 aa, synthetic construct
ACDTGDRHTDTLI

SEQ ID NO: 32379 - protein, 13 aa, synthetic construct
ACDTGDRHTYKLI

SEQ ID NO: 32380 - protein, 12 aa, synthetic construct
ACDTGDRIDKLI

SEQ ID NO: 32381 - protein, 12 aa, synthetic construct
ACDTGDRNDKLI

SEQ ID NO: 32382 - protein, 12 aa, synthetic construct
ACDTGDRPDKLI

SEQ ID NO: 32383 - protein, 13 aa, synthetic construct
ACDTGDRQTYKII

SEQ ID NO: 32384 - protein, 13 aa, synthetic construct
ACDTGDRRTDKLI

SEQ ID NO: 32385 - protein, 11 aa, synthetic construct
ACDTGDRSNSS

SEQ ID NO: 32386 - protein, 12 aa, synthetic construct
ACDTGDRTAKLI

SEQ ID NO: 32387 - protein, 12 aa, synthetic construct
ACDTGDRTDKFI

SEQ ID NO: 32388 - protein, 12 aa, synthetic construct
ACDTGDRTDKLF

SEQ ID NO: 32389 - protein, 12 aa, synthetic construct
ACDTGDRTDKLL

SEQ ID NO: 32390 - protein, 12 aa, synthetic construct
ACDTGDRTDKVI

SEQ ID NO: 32391 - protein, 12 aa, synthetic construct
ACDTGDRTDNLI

SEQ ID NO: 32392 - protein, 12 aa, synthetic construct
ACDTGDRTDQLI

SEQ ID NO: 32393 - protein, 13 aa, synthetic construct
ACDTGGSATEKLI

SEQ ID NO: 32394 - protein, 13 aa, synthetic construct
ACDTGGSKDDKLI

SEQ ID NO: 32395 - protein, 12 aa, synthetic construct
ACDTGGSPDKLI

SEQ ID NO: 32396 - protein, 12 aa, synthetic construct
ACDTGWGIDQLI

SEQ ID NO: 32397 - protein, 15 aa, synthetic construct
ACDTGWETPYTDKLI

SEQ ID NO: 32398 - protein, 14 aa, synthetic construct
ACDTGWGAGDDKLI

SEQ ID NO: 32399 - protein, 14 aa, synthetic construct
ACDTGWGAGDGQLS

SEQ ID NO: 32400 - protein, 14 aa, synthetic construct
ACDTGWGDTGDKLI

SEQ ID NO: 32401 - protein, 12 aa, synthetic construct
ACDTGWGIDELI

SEQ ID NO: 32402 - protein, 12 aa, synthetic construct
ACDTGWGIDILI

SEQ ID NO: 32403 - protein, 12 aa, synthetic construct
ACDTGWGIDKII

SEQ ID NO: 32404 - protein, 12 aa, synthetic construct
ACDTGWGIDKLS

SEQ ID NO: 32405 - protein, 12 aa, synthetic construct
ACDTGWGIDKRI

SEQ ID NO: 32406 - protein, 12 aa, synthetic construct
ACDTGWGIDRLI

SEQ ID NO: 32407 - protein, 13 aa, synthetic construct
ACDTGVRHTDKLI

SEQ ID NO: 32408 - protein, 14 aa, synthetic construct
ACDTGWGIDTDKLI

SEQ ID NO: 32409 - protein, 12 aa, synthetic construct
ACDTGWGIDTLI

SEQ ID NO: 32410 - protein, 12 aa, synthetic construct
ACDTGWGIGKLI

SEQ ID NO: 32411 - protein, 12 aa, synthetic construct
ACDTGWGIGQTH

SEQ ID NO: 32412 - protein, 13 aa, synthetic construct
ACDTGWGIPDKLI

SEQ ID NO: 32413 - protein, 13 aa, synthetic construct
ACDTGWGIPEKLI

SEQ ID NO: 32414 - protein, 14 aa, synthetic construct
ACDTGWGIPGGETH

SEQ ID NO: 32415 - protein, 15 aa, synthetic construct
ACDTGWGIPYTDKLI

SEQ ID NO: 32416 - protein, 16 aa, synthetic construct
ACDTGWGIRAGPINSS

SEQ ID NO: 32417 - protein, 12 aa, synthetic construct
ACDTGVRTDKLI

SEQ ID NO: 32418 - protein, 13 aa, synthetic construct
ACDTGVGVTDKLI

SEQ ID NO: 32419 - protein, 12 aa, synthetic construct
ACDTGRRPDKLI

SEQ ID NO: 32420 - protein, 15 aa, synthetic construct
ACDTGSGGPYTDTLI

SEQ ID NO: 32421 - protein, 15 aa, synthetic construct
ACDTGSGEPYTDKLI

SEQ ID NO: 32422 - protein, 15 aa, synthetic construct
ACDTGSGGPCTDKLI

SEQ ID NO: 32423 - protein, 15 aa, synthetic construct
ACDTGSGGPDTDKLI

SEQ ID NO: 32424 - protein, 15 aa, synthetic construct
ACDTGSGGPNTDKLI

SEQ ID NO: 32425 - protein, 15 aa, synthetic construct
ACDTGSGGPSTEKLI

SEQ ID NO: 32426 - protein, 15 aa, synthetic construct
ACDTGSGGPYTDKLN

SEQ ID NO: 32427 - protein, 15 aa, synthetic construct
ACDTGSGGPYTDKPI

SEQ ID NO: 32428 - protein, 15 aa, synthetic construct
ACDTGSGGPYTDNLI

SEQ ID NO: 32429 - protein, 15 aa, synthetic construct
ACDTGSGGPYTDQLI

SEQ ID NO: 32430 - protein, 15 aa, synthetic construct
ACDTGSGGPYTEKLT

SEQ ID NO: 32431 - protein, 15 aa, synthetic construct
ACDTGVGLGAVDKLI

SEQ ID NO: 32432 - protein, 15 aa, synthetic construct
ACDTGSGGSYTDKLI

SEQ ID NO: 32433 - protein, 12 aa, synthetic construct
ACDTGSGIDKLI

SEQ ID NO: 32434 - protein, 13 aa, synthetic construct
ACDTGSGITDKLI

SEQ ID NO: 32435 - protein, 13 aa, synthetic construct
ACDTGSGLPINSS

SEQ ID NO: 32436 - protein, 13 aa, synthetic construct
ACDTGSGVTDKLI

SEQ ID NO: 32437 - protein, 15 aa, synthetic construct
ACDTGSVGPYTDKLI

SEQ ID NO: 32438 - protein, 15 aa, synthetic construct
ACDTGTRGTRGGKII

SEQ ID NO: 32439 - protein, 15 aa, synthetic construct
ACDTGVGDPTPINSS

SEQ ID NO: 32440 - protein, 16 aa, synthetic construct
ACDTGVGDTGRTDKLI

SEQ ID NO: 32441 - protein, 14 aa, synthetic construct
ACDTGWGIRAINSS

SEQ ID NO: 32442 - protein, 15 aa, synthetic construct
ACDTGWGIRRPINSS

SEQ ID NO: 32443 - protein, 13 aa, synthetic construct
ACDTGWGITDKLF

SEQ ID NO: 32444 - protein, 15 aa, synthetic construct
ACDTGWVTPNTDKLI

SEQ ID NO: 32445 - protein, 15 aa, synthetic construct
ACDTGWGTPYTNKLI

SEQ ID NO: 32446 - protein, 15 aa, synthetic construct
ACDTGWGTPYTSKLI

SEQ ID NO: 32447 - protein, 15 aa, synthetic construct
ACDTGWGTPYTYKLI

SEQ ID NO: 32448 - protein, 15 aa, synthetic construct
ACDTGWGTSYTDKLI

SEQ ID NO: 32449 - protein, 13 aa, synthetic construct
ACDTGWGTTDDLF

SEQ ID NO: 32450 - protein, 13 aa, synthetic construct
ACDTGWGTTDQLI

SEQ ID NO: 32451 - protein, 12 aa, synthetic construct
ACDTGWRSEKLI

SEQ ID NO: 32452 - protein, 15 aa, synthetic construct
ACDTGWRTPYTDKLI

SEQ ID NO: 32453 - protein, 12 aa, synthetic construct
ACDTGWVIEKHI

SEQ ID NO: 32454 - protein, 13 aa, synthetic construct
ACDTGYGYTDKLI

SEQ ID NO: 32455 - protein, 13 aa, synthetic construct
ACDTGWGITDKLL

SEQ ID NO: 32456 - protein, 13 aa, synthetic construct
ACDTGYTYTDKLI

SEQ ID NO: 32457 - protein, 9 aa, synthetic construct
ACDTHGGKL

SEQ ID NO: 32458 - protein, 15 aa, synthetic construct
ACDTHWGIRNTDKLI

SEQ ID NO: 32459 - protein, 14 aa, synthetic construct
ACDTILGDTTINSS

SEQ ID NO: 32460 - protein, 12 aa, synthetic construct
ACDTKGDTDKLI

SEQ ID NO: 32461 - protein, 12 aa, synthetic construct
ACDTKGYADKLI

SEQ ID NO: 32462 - protein, 12 aa, synthetic construct
ACDTLADTDQLI

SEQ ID NO: 32463 - protein, 17 aa, synthetic construct
ACDTLFCGIRQTDDKLI

SEQ ID NO: 32464 - protein, 17 aa, synthetic construct
ACDTLFRGIRQSDDNLI

SEQ ID NO: 32465 - protein, 15 aa, synthetic construct
ACDTGWGTPYTGKLI

SEQ ID NO: 32466 - protein, 15 aa, synthetic construct
ACDTGWGTPYTDRLI

SEQ ID NO: 32467 - protein, 15 aa, synthetic construct
ACDTGWGTPYTDNSS

SEQ ID NO: 32468 - protein, 15 aa, synthetic construct
ACDTGWGTPYTDKLT

SEQ ID NO: 32469 - protein, 13 aa, synthetic construct
ACDTGWGITDNRI

SEQ ID NO: 32470 - protein, 13 aa, synthetic construct
ACDTGWGITDNSS

SEQ ID NO: 32471 - protein, 13 aa, synthetic construct
ACDTGWGITEKHI

SEQ ID NO: 32472 - protein, 13 aa, synthetic construct
ACDTGWGITEKRI

SEQ ID NO: 32473 - protein, 13 aa, synthetic construct
ACDTGWGITINSS

SEQ ID NO: 32474 - protein, 13 aa, synthetic construct
ACDTGWGRTDKLF

SEQ ID NO: 32475 - protein, 11 aa, synthetic construct
ACDTGWGSINS

SEQ ID NO: 32476 - protein, 15 aa, synthetic construct
ACDTGWGSPYTATLI

SEQ ID NO: 32477 - protein, 12 aa, synthetic construct
ACDTGWGTDKLI

SEQ ID NO: 32478 - protein, 15 aa, synthetic construct
ACDTGWGTLYTDKLI

SEQ ID NO: 32479 - protein, 15 aa, synthetic construct
ACDTGWGTPHTDKLI

SEQ ID NO: 32480 - protein, 15 aa, synthetic construct
ACDTGWGTPHTDNLI

SEQ ID NO: 32481 - protein, 15 aa, synthetic construct
ACDTGWGTPHTDTLI

SEQ ID NO: 32482 - protein, 15 aa, synthetic construct
ACDTGWGTPSTDKLI

SEQ ID NO: 32483 - protein, 15 aa, synthetic construct
ACDTGWGTPYIDKLI

SEQ ID NO: 32484 - protein, 15 aa, synthetic construct
ACDTGWGTPYNDKLI

SEQ ID NO: 32485 - protein, 15 aa, synthetic construct
ACDTGWGTPYTDHLI

SEQ ID NO: 32486 - protein, 15 aa, synthetic construct
ACDTGWGTPYTDKLL

SEQ ID NO: 32487 - protein, 15 aa, synthetic construct
ACDTGWGTPYTDKLN

SEQ ID NO: 32488 - protein, 12 aa, synthetic construct
ACDTGRYPDKLI

SEQ ID NO: 32489 - protein, 12 aa, synthetic construct
ACDTGRGSVKLI

SEQ ID NO: 32490 - protein, 14 aa, synthetic construct
ACDTGGSPYTDKLI

SEQ ID NO: 32491 - protein, 14 aa, synthetic construct
ACDTGGYPYTGKLF

SEQ ID NO: 32492 - protein, 14 aa, synthetic construct
ACDTGGYPYSDKLI

SEQ ID NO: 32493 - protein, 14 aa, synthetic construct
ACDTGGYPYTAKLI

SEQ ID NO: 32494 - protein, 14 aa, synthetic construct
ACDTGGYPYTDELI

SEQ ID NO: 32495 - protein, 14 aa, synthetic construct
ACDTGGYPYTDKII

SEQ ID NO: 32496 - protein, 14 aa, synthetic construct
ACDTGGYPYTDKLM

SEQ ID NO: 32497 - protein, 14 aa, synthetic construct
ACDTGGYPYTDQLL

SEQ ID NO: 32498 - protein, 14 aa, synthetic construct
ACDTGGYPYTDRLI

SEQ ID NO: 32499 - protein, 14 aa, synthetic construct
ACDTGGYPYTDTLI

SEQ ID NO: 32500 - protein, 14 aa, synthetic construct
ACDTGGYPYTEKLN

SEQ ID NO: 32501 - protein, 14 aa, synthetic construct
ACDTGGYQYTDKLI

SEQ ID NO: 32502 - protein, 12 aa, synthetic construct
ACDTGGYPVKLI

SEQ ID NO: 32503 - protein, 13 aa, synthetic construct
ACDTGGYRGDKLI

SEQ ID NO: 32504 - protein, 14 aa, synthetic construct
ACDTGGYSYTDKLI

SEQ ID NO: 32505 - protein, 12 aa, synthetic construct
ACDTGGYTDKII

SEQ ID NO: 32506 - protein, 12 aa, synthetic construct
ACDTGGYTDKLI

SEQ ID NO: 32507 - protein, 13 aa, synthetic construct
ACDTGHLHTDKLI

SEQ ID NO: 32508 - protein, 13 aa, synthetic construct
ACDTGHRHTDKLI

SEQ ID NO: 32509 - protein, 12 aa, synthetic construct
ACDTGHTTDKLI

SEQ ID NO: 32510 - protein, 13 aa, synthetic construct
ACDTGHTYTDKLI

SEQ ID NO: 32511 - protein, 13 aa, synthetic construct
ACDTGIDTPINSS

SEQ ID NO: 32512 - protein, 12 aa, synthetic construct
ACDTGGYPYKLI

SEQ ID NO: 32513 - protein, 14 aa, synthetic construct
ACDTGGYPKTKKNI

SEQ ID NO: 32514 - protein, 12 aa, synthetic construct
ACDTGRGSLKLI

SEQ ID NO: 32515 - protein, 12 aa, synthetic construct
ACDTGGYPDKII

SEQ ID NO: 32516 - protein, 14 aa, synthetic construct
ACDTGGSPYTDQLI

SEQ ID NO: 32517 - protein, 13 aa, synthetic construct
ACDTGGTPNDKLI

SEQ ID NO: 32518 - protein, 13 aa, synthetic construct
ACDTGGTPNDNSS

SEQ ID NO: 32519 - protein, 14 aa, synthetic construct
ACDTGGYAYTDKLI

SEQ ID NO: 32520 - protein, 13 aa, synthetic construct
ACDTGGYKDDKLT

SEQ ID NO: 32521 - protein, 13 aa, synthetic construct
ACDTGGYKDVKLI

SEQ ID NO: 32522 - protein, 13 aa, synthetic construct
ACDTGGYKYDKLI

SEQ ID NO: 32523 - protein, 12 aa, synthetic construct
ACDTGGYPAKHI

SEQ ID NO: 32524 - protein, 14 aa, synthetic construct
ACDTGGYPCTDKLI

SEQ ID NO: 32525 - protein, 12 aa, synthetic construct
ACDTGGYPDKLF

SEQ ID NO: 32526 - protein, 12 aa, synthetic construct
ACDTGGYPETLI

SEQ ID NO: 32527 - protein, 12 aa, synthetic construct
ACDTGGYPDKLV

SEQ ID NO: 32528 - protein, 12 aa, synthetic construct
ACDTGGYPDKPI

SEQ ID NO: 32529 - protein, 12 aa, synthetic construct
ACDTGGYPDNLI

SEQ ID NO: 32530 - protein, 12 aa, synthetic construct
ACDTGGYPDRFI

SEQ ID NO: 32531 - protein, 12 aa, synthetic construct
ACDTGGYPDRLI

SEQ ID NO: 32532 - protein, 14 aa, synthetic construct
ACDTGGYPDTDKVI

SEQ ID NO: 32533 - protein, 12 aa, synthetic construct
ACDTGGYPDTLI

SEQ ID NO: 32534 - protein, 12 aa, synthetic construct
ACDTGGYPENLI

SEQ ID NO: 32535 - protein, 12 aa, synthetic construct
ACDTGGYPERLI

SEQ ID NO: 32536 - protein, 15 aa, synthetic construct
ACDTGIHDSWDTRQM

SEQ ID NO: 32537 - protein, 15 aa, synthetic construct
ACDTGIIDSCDNRQM

SEQ ID NO: 32538 - protein, 13 aa, synthetic construct
ACDTGILTPIKSS

SEQ ID NO: 32539 - protein, 12 aa, synthetic construct
ACDTGRGPDTLI

SEQ ID NO: 32540 - protein, 13 aa, synthetic construct
ACDTGRGNTDKLI

SEQ ID NO: 32541 - protein, 12 aa, synthetic construct
ACDTGRGPAQLI

SEQ ID NO: 32542 - protein, 12 aa, synthetic construct
ACDTGRGPDELI

SEQ ID NO: 32543 - protein, 12 aa, synthetic construct
ACDTGRGPDILI

SEQ ID NO: 32544 - protein, 12 aa, synthetic construct
ACDTGRGPDKII

SEQ ID NO: 32545 - protein, 12 aa, synthetic construct
ACDTGRGPDKLT

SEQ ID NO: 32546 - protein, 12 aa, synthetic construct
ACDTGRGPDKPI

SEQ ID NO: 32547 - protein, 12 aa, synthetic construct
ACDTGRGPDNSP

SEQ ID NO: 32548 - protein, 12 aa, synthetic construct
ACDTGRGPDQLS

SEQ ID NO: 32549 - protein, 12 aa, synthetic construct
ACDTGRGPEKII

SEQ ID NO: 32550 - protein, 13 aa, synthetic construct
ACDTGILTPRTSS

SEQ ID NO: 32551 - protein, 12 aa, synthetic construct
ACDTGRGPENAS

SEQ ID NO: 32552 - protein, 12 aa, synthetic construct
ACDTGRGPNELI

SEQ ID NO: 32553 - protein, 12 aa, synthetic construct
ACDTGRGPNKLI

SEQ ID NO: 32554 - protein, 12 aa, synthetic construct
ACDTGRGPRNSS

SEQ ID NO: 32555 - protein, 15 aa, synthetic construct
ACDTGRGPRTSRNSS

SEQ ID NO: 32556 - protein, 20 aa, synthetic construct
ACDTGRGPVRVWVGRGARGG

SEQ ID NO: 32557 - protein, 12 aa, synthetic construct
ACDTGRGQGTIN

SEQ ID NO: 32558 - protein, 12 aa, synthetic construct
ACDTGRGRDKLI

SEQ ID NO: 32559 - protein, 12 aa, synthetic construct
ACDTGRGSDKLI

SEQ ID NO: 32560 - protein, 12 aa, synthetic construct
ACDTGRGHDKLI

SEQ ID NO: 32561 - protein, 12 aa, synthetic construct
ACDTGRGADKLI

SEQ ID NO: 32562 - protein, 12 aa, synthetic construct
ACDTGRAPDKLI

SEQ ID NO: 32563 - protein, 13 aa, synthetic construct
ACDTGQTPNDKLI

SEQ ID NO: 32564 - protein, 15 aa, synthetic construct
ACDTGIPDSSDTRQM

SEQ ID NO: 32565 - protein, 15 aa, synthetic construct
ACDTGIRASWDTRQM

SEQ ID NO: 32566 - protein, 15 aa, synthetic construct
ACDTGIRDSCDTRQM

SEQ ID NO: 32567 - protein, 15 aa, synthetic construct
ACDTGIRDSWDIRQM

SEQ ID NO: 32568 - protein, 16 aa, synthetic construct
ACDTGIRDSWDTDKPI

SEQ ID NO: 32569 - protein, 15 aa, synthetic construct
ACDTGIRDSWDTRWM

SEQ ID NO: 32570 - protein, 15 aa, synthetic construct
ACDTGIRDSWGTRQM

SEQ ID NO: 32571 - protein, 15 aa, synthetic construct
ACDTGIRDTWDTRQM

SEQ ID NO: 32572 - protein, 13 aa, synthetic construct
ACDTGIRNTDKLI

SEQ ID NO: 32573 - protein, 12 aa, synthetic construct
ACDTGIRPINSS

SEQ ID NO: 32574 - protein, 13 aa, synthetic construct
ACDTGIRRTINSS

SEQ ID NO: 32575 - protein, 15 aa, synthetic construct
ACDTGIRYSWETRQM

SEQ ID NO: 32576 - protein, 15 aa, synthetic construct
ACDTGISDSCDARQM

SEQ ID NO: 32577 - protein, 15 aa, synthetic construct
ACDTGKGLGAVDKLI

SEQ ID NO: 32578 - protein, 15 aa, synthetic construct
ACDTGLGTPYTDKLI

SEQ ID NO: 32579 - protein, 13 aa, synthetic construct
ACDTGNGVTDKLI

SEQ ID NO: 32580 - protein, 12 aa, synthetic construct
ACDTGNRTDKLI

SEQ ID NO: 32581 - protein, 12 aa, synthetic construct
ACDTGQGPDKLI

SEQ ID NO: 32582 - protein, 13 aa, synthetic construct
ACDTGQGVTDKLI

SEQ ID NO: 32583 - protein, 10 aa, synthetic construct
YCDTSGPKLI

SEQ ID NO: 32584 - protein, 5 aa, synthetic construct
AFTGG

SEQ ID NO: 32585 - skipped

SEQ ID NO: 32586 - protein, 5 aa, synthetic construct
AFFLR

SEQ ID NO: 32587 - protein, 5 aa, synthetic construct
AFPGG

SEQ ID NO: 32588 - protein, 5 aa, synthetic construct
AFLGV

SEQ ID NO: 32589 - protein, 6 aa, synthetic construct
AFLRWG

SEQ ID NO: 32590 - protein, 6 aa, synthetic construct
AFILTP

SEQ ID NO: 32591 - protein, 5 aa, synthetic construct
ASSTG

SEQ ID NO: 32592 - protein, 5 aa, synthetic construct
AFRLG

SEQ ID NO: 32593 - protein, 4 aa, synthetic construct
AFSY

SEQ ID NO: 32594 - protein, 5 aa, synthetic construct
AFLLR

SEQ ID NO: 32595 - protein, 5 aa, synthetic construct
AFRGY

SEQ ID NO: 32596 - skipped

SEQ ID NO: 32597 - protein, 5 aa, synthetic construct
AFKLG

SEQ ID NO: 32598 - protein, 5 aa, synthetic construct
AFNWG

SEQ ID NO: 32599 - protein, 7 aa, synthetic construct
ASGTGGH

SEQ ID NO: 32600 - protein, 6 aa, synthetic construct
AWLGDG

SEQ ID NO: 32601 - protein, 5 aa, synthetic construct
ASTGG

SEQ ID NO: 32602 - protein, 5 aa, synthetic construct
AFIPT

SEQ ID NO: 32603 - protein, 5 aa, synthetic construct
AFRPT

SEQ ID NO: 32604 - protein, 5 aa, synthetic construct
AFYWG

SEQ ID NO: 32605 - protein, 5 aa, synthetic construct
AFIWG

SEQ ID NO: 32606 - protein, 7 aa, synthetic construct
APCTDKL

SEQ ID NO: 32607 - protein, 6 aa, synthetic construct
AFPVPT

SEQ ID NO: 32608 - protein, 4 aa, synthetic construct
AFWG

SEQ ID NO: 32609-32610 - skipped (2 entries)

SEQ ID NO: 32611 - protein, 6 aa, synthetic construct
ASGDTP

SEQ ID NO: 32612 - protein, 5 aa, synthetic construct
AFSPT

SEQ ID NO: 32613 - protein, 4 aa, synthetic construct
AFLL

SEQ ID NO: 32614 - protein, 5 aa, synthetic construct
AFLLG

SEQ ID NO: 32615 - protein, 7 aa, synthetic construct
AFPPSSY

SEQ ID NO: 32616 - protein, 7 aa, synthetic construct
ALYWGTP

SEQ ID NO: 32617 - protein, 7 aa, synthetic construct
RGIAINS

SEQ ID NO: 32618 - protein, 7 aa, synthetic construct
ARRTDKL

SEQ ID NO: 32619 - protein, 6 aa, synthetic construct
ASLGLG

SEQ ID NO: 32620 - protein, 6 aa, synthetic construct
ARGLHR

SEQ ID NO: 32621 - protein, 6 aa, synthetic construct
AFWGTP

SEQ ID NO: 32622 - protein, 6 aa, synthetic construct
ATRGLI

SEQ ID NO: 32623 - protein, 7 aa, synthetic construct
AFKDTIN

SEQ ID NO: 32624 - protein, 5 aa, synthetic construct
AFVLR

SEQ ID NO: 32625 - protein, 5 aa, synthetic construct
AFSSY

SEQ ID NO: 32626 - protein, 5 aa, synthetic construct
AFLGG

SEQ ID NO: 32627 - protein, 7 aa, synthetic construct
AFGEKLI

SEQ ID NO: 32628 - protein, 5 aa, synthetic construct
ASLLG

SEQ ID NO: 32629 - protein, 6 aa, synthetic construct
AFPLLG

SEQ ID NO: 32630 - protein, 6 aa, synthetic construct
ACCTGA

SEQ ID NO: 32631 - protein, 6 aa, synthetic construct
ASIPGG

SEQ ID NO: 32632 - protein, 7 aa, synthetic construct
ASLLSGG

SEQ ID NO: 32633 - protein, 7 aa, synthetic construct
AAKGYTD

SEQ ID NO: 32634 - protein, 5 aa, synthetic construct
ASFLR

SEQ ID NO: 32635 - protein, 7 aa, synthetic construct
AWGSYTD

SEQ ID NO: 32636 - protein, 7 aa, synthetic construct
AFRILLG

SEQ ID NO: 32637 - protein, 5 aa, synthetic construct
AFNPT

SEQ ID NO: 32638 - protein, 7 aa, synthetic construct
AFRADKL

SEQ ID NO: 32639 - protein, 6 aa, synthetic construct
AWAYWG

SEQ ID NO: 32640 - protein, 6 aa, synthetic construct
ALNGGG

SEQ ID NO: 32641 - protein, 6 aa, synthetic construct
AFNVLR

SEQ ID NO: 32642 - protein, 5 aa, synthetic construct
AFEDT

SEQ ID NO: 32643 - protein, 6 aa, synthetic construct
AFSSWG

SEQ ID NO: 32644 - protein, 6 aa, synthetic construct
AWGFLR

SEQ ID NO: 32645 - protein, 6 aa, synthetic construct
AFQWGR

SEQ ID NO: 32646 - protein, 5 aa, synthetic construct
APLWG

SEQ ID NO: 32647 - protein, 7 aa, synthetic construct
AWTPINS

SEQ ID NO: 32648 - protein, 7 aa, synthetic construct
AFVLGTP

SEQ ID NO: 32649 - protein, 6 aa, synthetic construct
ASGGGV

SEQ ID NO: 32650 - protein, 6 aa, synthetic construct
ASFTGG

SEQ ID NO: 32651 - protein, 6 aa, synthetic construct
ASFILG

SEQ ID NO: 32652 - protein, 5 aa, synthetic construct
AFRWG

SEQ ID NO: 32653 - protein, 6 aa, synthetic construct
ASLGDK

SEQ ID NO: 32654 - protein, 5 aa, synthetic construct
ASNWG

SEQ ID NO: 32655 - protein, 6 aa, synthetic construct
AFSYWG

SEQ ID NO: 32656 - protein, 4 aa, synthetic construct
AQDT

SEQ ID NO: 32657 - protein, 7 aa, synthetic construct
AFEMYTD

SEQ ID NO: 32658 - protein, 4 aa, synthetic construct
AQYW

SEQ ID NO: 32659 - protein, 7 aa, synthetic construct
AFPGATD

SEQ ID NO: 32660 - protein, 6 aa, synthetic construct
AFSLGV

SEQ ID NO: 32661 - protein, 6 aa, synthetic construct
APGYTD

SEQ ID NO: 32662 - protein, 6 aa, synthetic construct
AFPLLR

SEQ ID NO: 32663 - protein, 6 aa, synthetic construct
ARRGAP

SEQ ID NO: 32664 - protein, 7 aa, synthetic construct
AFFPSGG

SEQ ID NO: 32665 - protein, 7 aa, synthetic construct
ALDTDKL

SEQ ID NO: 32666 - protein, 6 aa, synthetic construct
TTDKLI

SEQ ID NO: 32667 - protein, 7 aa, synthetic construct
SGGSYTD

SEQ ID NO: 32668 - protein, 5 aa, synthetic construct
AHTGE

SEQ ID NO: 32669 - protein, 4 aa, synthetic construct
ASGG

SEQ ID NO: 32670 - protein, 6 aa, synthetic construct
AFYPDP

SEQ ID NO: 32671 - protein, 4 aa, synthetic construct
AFCF

SEQ ID NO: 32672 - protein, 6 aa, synthetic construct
AFLPTG

SEQ ID NO: 32673 - protein, 6 aa, synthetic construct
AFLGGR

SEQ ID NO: 32674 - skipped

SEQ ID NO: 32675 - protein, 5 aa, synthetic construct
AAPMV

SEQ ID NO: 32676 - protein, 7 aa, synthetic construct
VLIPINS

SEQ ID NO: 32677 - protein, 6 aa, synthetic construct
ALGGYR

SEQ ID NO: 32678 - protein, 6 aa, synthetic construct
AFSGLP

SEQ ID NO: 32679 - protein, 6 aa, synthetic construct
RTDKLI

SEQ ID NO: 32680 - protein, 5 aa, synthetic construct
ASVPT

SEQ ID NO: 32681 - protein, 6 aa, synthetic construct
AFRTGG

SEQ ID NO: 32682 - protein, 4 aa, synthetic construct
AVSY

SEQ ID NO: 32683 - protein, 6 aa, synthetic construct
APAFLT

SEQ ID NO: 32684 - protein, 5 aa, synthetic construct
APASY

SEQ ID NO: 32685 - protein, 7 aa, synthetic construct
DLPPINS

SEQ ID NO: 32686 - protein, 6 aa, synthetic construct
AFSGMD

SEQ ID NO: 32687 - skipped

SEQ ID NO: 32688 - protein, 4 aa, synthetic construct
APSS

SEQ ID NO: 32689 - protein, 6 aa, synthetic construct
AFDWGH

SEQ ID NO: 32690 - protein, 6 aa, synthetic construct
AWFLTP

SEQ ID NO: 32691 - protein, 7 aa, synthetic construct
AFLLGDT

SEQ ID NO: 32692 - protein, 6 aa, synthetic construct
ANWGTP

SEQ ID NO: 32693 - protein, 7 aa, synthetic construct
AFDDKLI

SEQ ID NO: 32694 - skipped

SEQ ID NO: 32695 - protein, 5 aa, synthetic construct
AFILR

SEQ ID NO: 32696 - protein, 4 aa, synthetic construct
ASWG

SEQ ID NO: 32697 - protein, 6 aa, synthetic construct
AFPFLR

SEQ ID NO: 32698 - protein, 7 aa, synthetic construct
AFFRLGV

SEQ ID NO: 32699 - protein, 7 aa, synthetic construct
APSINSS

SEQ ID NO: 32700 - protein, 7 aa, synthetic construct
APTPINS

SEQ ID NO: 32701 - protein, 6 aa, synthetic construct
ARGKLI

SEQ ID NO: 32702 - protein, 6 aa, synthetic construct
AFKGGG

SEQ ID NO: 32703 - protein, 6 aa, synthetic construct
AFGGHR

SEQ ID NO: 32704 - protein, 5 aa, synthetic construct
AFGRI

SEQ ID NO: 32705 - protein, 4 aa, synthetic construct
APWG

SEQ ID NO: 32706 - protein, 7 aa, synthetic construct
APGGGTP

SEQ ID NO: 32707 - protein, 6 aa, synthetic construct
APILGE

SEQ ID NO: 32708 - protein, 6 aa, synthetic construct
APINSS

SEQ ID NO: 32709 - protein, 5 aa, synthetic construct
APVLG

SEQ ID NO: 32710 - protein, 7 aa, synthetic construct
AFFLKLG

SEQ ID NO: 32711 - protein, 6 aa, synthetic construct
AFISTG

SEQ ID NO: 32712 - protein, 7 aa, synthetic construct
ASGGPIN

SEQ ID NO: 32713 - protein, 6 aa, synthetic construct
AGGIGR

SEQ ID NO: 32714 - protein, 7 aa, synthetic construct
TGADKLI

SEQ ID NO: 32715 - protein, 5 aa, synthetic construct
AFSLG

SEQ ID NO: 32716 - protein, 7 aa, synthetic construct
ASWALPL

SEQ ID NO: 32717 - protein, 6 aa, synthetic construct
ASTYVG

SEQ ID NO: 32718 - protein, 6 aa, synthetic construct
GHDKLI

SEQ ID NO: 32719 - protein, 4 aa, synthetic construct
ASPT

SEQ ID NO: 32720 - protein, 7 aa, synthetic construct
AFSIVLG

SEQ ID NO: 32721 - protein, 6 aa, synthetic construct
AFRVHR

SEQ ID NO: 32722 - protein, 7 aa, synthetic construct
ASPALLG

SEQ ID NO: 32723 - protein, 6 aa, synthetic construct
AFLSYR

SEQ ID NO: 32724 - protein, 5 aa, synthetic construct
ASLLI

SEQ ID NO: 32725 - protein, 4 aa, synthetic construct
AFNP

SEQ ID NO: 32726 - protein, 6 aa, synthetic construct
AWGMYR

SEQ ID NO: 32727 - protein, 5 aa, synthetic construct
ALYWG

SEQ ID NO: 32728 - protein, 4 aa, synthetic construct
ASGE

SEQ ID NO: 32729 - protein, 6 aa, synthetic construct
AFRGWG

SEQ ID NO: 32730 - protein, 7 aa, synthetic construct
AFALSGG

SEQ ID NO: 32731 - protein, 4 aa, synthetic construct
AFYI

SEQ ID NO: 32732 - protein, 6 aa, synthetic construct
AVLGGH

SEQ ID NO: 32733 - protein, 6 aa, synthetic construct
AFSLPI

SEQ ID NO: 32734 - protein, 4 aa, synthetic construct
ALMG

SEQ ID NO: 32735 - protein, 7 aa, synthetic construct
AFSINSS

SEQ ID NO: 32736 - protein, 5 aa, synthetic construct
ASYWG

SEQ ID NO: 32737 - protein, 7 aa, synthetic construct
ARYTDKL

SEQ ID NO: 32738 - protein, 6 aa, synthetic construct
ASSSHR

SEQ ID NO: 32739 - protein, 6 aa, synthetic construct
ALGYWG

SEQ ID NO: 32740 - protein, 7 aa, synthetic construct
AFISSGG

SEQ ID NO: 32741 - protein, 6 aa, synthetic construct
AFPSGE

SEQ ID NO: 32742 - protein, 7 aa, synthetic construct
ASILGDT

SEQ ID NO: 32743 - protein, 6 aa, synthetic construct
APSYPG

SEQ ID NO: 32744 - protein, 6 aa, synthetic construct
ASRSTP

SEQ ID NO: 32745 - protein, 7 aa, synthetic construct
AFFPVLG

SEQ ID NO: 32746 - protein, 7 aa, synthetic construct
AFLLPLG

SEQ ID NO: 32747 - protein, 6 aa, synthetic construct
ASFPTT

SEQ ID NO: 32748 - protein, 6 aa, synthetic construct
AFKGTH

SEQ ID NO: 32749 - protein, 7 aa, synthetic construct
AFLWGDT

SEQ ID NO: 32750 - protein, 5 aa, synthetic construct
APSRI

SEQ ID NO: 32751 - protein, 6 aa, synthetic construct
AFGSDR

SEQ ID NO: 32752 - protein, 6 aa, synthetic construct
AFRYWG

SEQ ID NO: 32753 - protein, 6 aa, synthetic construct
ALTPHR

SEQ ID NO: 32754 - protein, 5 aa, synthetic construct
AFSGG

SEQ ID NO: 32755 - protein, 5 aa, synthetic construct
AFRAY

SEQ ID NO: 32756 - protein, 4 aa, synthetic construct
ALTP

SEQ ID NO: 32757 - protein, 5 aa, synthetic construct
AFNRV

SEQ ID NO: 32758 - protein, 6 aa, synthetic construct
ALRGWG

SEQ ID NO: 32759 - protein, 7 aa, synthetic construct
AFSLRFW

SEQ ID NO: 32760 - protein, 7 aa, synthetic construct
AFIFLLG

SEQ ID NO: 32761 - protein, 7 aa, synthetic construct
AFNSGGY

SEQ ID NO: 32762 - protein, 6 aa, synthetic construct
ALGNTG

SEQ ID NO: 32763 - protein, 7 aa, synthetic construct
AFKATLG

SEQ ID NO: 32764 - protein, 7 aa, synthetic construct
AFNPSGG

SEQ ID NO: 32765 - protein, 7 aa, synthetic construct
AFSYLLG

SEQ ID NO: 32766 - protein, 6 aa, synthetic construct
ALGGTP

SEQ ID NO: 32767 - protein, 5 aa, synthetic construct
ALGGS

SEQ ID NO: 32768 - protein, 7 aa, synthetic construct
AFTRSGG

SEQ ID NO: 32769 - protein, 7 aa, synthetic construct
ALGDDKL

SEQ ID NO: 32770 - protein, 5 aa, synthetic construct
AFKLL

SEQ ID NO: 32771 - protein, 4 aa, synthetic construct
ALWG

SEQ ID NO: 32772 - protein, 7 aa, synthetic construct
AFRGPWG

SEQ ID NO: 32773 - protein, 6 aa, synthetic construct
AFRGGT

SEQ ID NO: 32774 - protein, 4 aa, synthetic construct
APLG

SEQ ID NO: 32775 - protein, 7 aa, synthetic construct
ACTFSIN

SEQ ID NO: 32776 - protein, 7 aa, synthetic construct
AQATDKL

SEQ ID NO: 32777 - protein, 6 aa, synthetic construct
AFGGTD

SEQ ID NO: 32778 - protein, 5 aa, synthetic construct
ACPSK

SEQ ID NO: 32779 - skipped

SEQ ID NO: 32780 - protein, 5 aa, synthetic construct
ARGTR

SEQ ID NO: 32781 - protein, 4 aa, synthetic construct
APPT

SEQ ID NO: 32782 - protein, 7 aa, synthetic construct
APLRRGT

SEQ ID NO: 32783 - protein, 6 aa, synthetic construct
ATVNSS

SEQ ID NO: 32784 - protein, 7 aa, synthetic construct
ARPDKLI

SEQ ID NO: 32785 - protein, 7 aa, synthetic construct
LGDTSIN

SEQ ID NO: 32786 - protein, 6 aa, synthetic construct
APRTGG

SEQ ID NO: 32787 - protein, 5 aa, synthetic construct
AFSSW

SEQ ID NO: 32788 - protein, 7 aa, synthetic construct
AFNVLGV

SEQ ID NO: 32789 - protein, 6 aa, synthetic construct
AFNVGV

SEQ ID NO: 32790 - protein, 6 aa, synthetic construct
ALGGNR

SEQ ID NO: 32791 - protein, 6 aa, synthetic construct
ASSPVS

SEQ ID NO: 32792 - protein, 6 aa, synthetic construct
AFEAGG

SEQ ID NO: 32793 - protein, 7 aa, synthetic construct
AFTGGPL

SEQ ID NO: 32794 - skipped

SEQ ID NO: 32795 - protein, 6 aa, synthetic construct
AFRANR

SEQ ID NO: 32796 - protein, 6 aa, synthetic construct
AFKSYR

SEQ ID NO: 32797 - protein, 5 aa, synthetic construct
AFRFI

SEQ ID NO: 32798 - protein, 4 aa, synthetic construct
ARWP

SEQ ID NO: 32799 - protein, 5 aa, synthetic construct
AFYSY

SEQ ID NO: 32800 - protein, 6 aa, synthetic construct
ARSGIL

SEQ ID NO: 32801 - protein, 7 aa, synthetic construct
AFRLPGG

SEQ ID NO: 32802 - protein, 5 aa, synthetic construct
ALSPT

SEQ ID NO: 32803 - protein, 4 aa, synthetic construct
AVWG

SEQ ID NO: 32804 - protein, 5 aa, synthetic construct
ALIPT

SEQ ID NO: 32805 - protein, 6 aa, synthetic construct
AFGEHR

SEQ ID NO: 32806 - protein, 7 aa, synthetic construct
ACEGAGG

SEQ ID NO: 32807 - protein, 7 aa, synthetic construct
AFIRPGG

SEQ ID NO: 32808 - protein, 7 aa, synthetic construct
GGPINSS

SEQ ID NO: 32809 - protein, 7 aa, synthetic construct
AFSGGYT

SEQ ID NO: 32810 - protein, 7 aa, synthetic construct
ALLEVLG

SEQ ID NO: 32811 - skipped

SEQ ID NO: 32812 - protein, 7 aa, synthetic construct
AFPQYTD

SEQ ID NO: 32813 - protein, 7 aa, synthetic construct
AFPSPTT

SEQ ID NO: 32814 - protein, 5 aa, synthetic construct
AFRYL

SEQ ID NO: 32815 - protein, 6 aa, synthetic construct
AFLNSS

SEQ ID NO: 32816 - protein, 6 aa, synthetic construct
AFVRTG

SEQ ID NO: 32817 - protein, 6 aa, synthetic construct
ACTRTG

SEQ ID NO: 32818 - protein, 4 aa, synthetic construct
AFPT

SEQ ID NO: 32819 - protein, 5 aa, synthetic construct
AFWLG

SEQ ID NO: 32820 - protein, 7 aa, synthetic construct
AFRISPG

SEQ ID NO: 32821 - protein, 6 aa, synthetic construct
ASLTGG

SEQ ID NO: 32822 - protein, 7 aa, synthetic construct
AFTAPGT

SEQ ID NO: 32823 - protein, 7 aa, synthetic construct
NLKPINS

SEQ ID NO: 32824 - protein, 6 aa, synthetic construct
AFNFLR

SEQ ID NO: 32825 - protein, 7 aa, synthetic construct
ASRVYTD

SEQ ID NO: 32826 - protein, 5 aa, synthetic construct
ASSGG

SEQ ID NO: 32827 - protein, 6 aa, synthetic construct
DWGIHR

SEQ ID NO: 32828 - protein, 7 aa, synthetic construct
LGAVDST

SEQ ID NO: 32829 - protein, 6 aa, synthetic construct
AFRSWG

SEQ ID NO: 32830 - protein, 6 aa, synthetic construct
LFSVTG

SEQ ID NO: 32831 - protein, 7 aa, synthetic construct
AFSPSGG

SEQ ID NO: 32832 - protein, 4 aa, synthetic construct
AFSP

SEQ ID NO: 32833 - skipped

SEQ ID NO: 32834 - protein, 6 aa, synthetic construct
AFSNTP

SEQ ID NO: 32835 - protein, 7 aa, synthetic construct
AFPTGGH

SEQ ID NO: 32836 - protein, 6 aa, synthetic construct
AFGGTP

SEQ ID NO: 32837 - protein, 7 aa, synthetic construct
AFGRAWG

SEQ ID NO: 32838 - protein, 7 aa, synthetic construct
AFGDPIN

SEQ ID NO: 32839 - protein, 7 aa, synthetic construct
ALGGNTD

SEQ ID NO: 32840 - protein, 7 aa, synthetic construct
AFHSSLG

SEQ ID NO: 32841 - protein, 7 aa, synthetic construct
AFGLGGT

SEQ ID NO: 32842 - protein, 4 aa, synthetic construct
APQL

SEQ ID NO: 32843 - protein, 5 aa, synthetic construct
AFDFR

SEQ ID NO: 32844 - protein, 6 aa, synthetic construct
AFKVPT

SEQ ID NO: 32845 - protein, 4 aa, synthetic construct
APPP

SEQ ID NO: 32846 - protein, 4 aa, synthetic construct
AFLF

SEQ ID NO: 32847 - protein, 7 aa, synthetic construct
AFKGSWG

SEQ ID NO: 32848 - skipped

SEQ ID NO: 32849 - protein, 6 aa, synthetic construct
GAINSS

SEQ ID NO: 32850 - protein, 6 aa, synthetic construct
AFDTGG

SEQ ID NO: 32851 - protein, 7 aa, synthetic construct
ALLGDTD

SEQ ID NO: 32852 - protein, 7 aa, synthetic construct
AFTPSGG

SEQ ID NO: 32853 - protein, 5 aa, synthetic construct
AFGDK

SEQ ID NO: 32854 - protein, 6 aa, synthetic construct
AFLYTD

SEQ ID NO: 32855 - protein, 7 aa, synthetic construct
DTTPINS

SEQ ID NO: 32856 - protein, 5 aa, synthetic construct
ALRAD

SEQ ID NO: 32857 - protein, 5 aa, synthetic construct
AFKFR

SEQ ID NO: 32858 - protein, 4 aa, synthetic construct
ASSG

SEQ ID NO: 32859 - protein, 7 aa, synthetic construct
AYTYVLG

SEQ ID NO: 32860 - protein, 5 aa, synthetic construct
AHTGG

SEQ ID NO: 32861 - protein, 4 aa, synthetic construct
ASPG

SEQ ID NO: 32862 - protein, 5 aa, synthetic construct
AFTPT

SEQ ID NO: 32863 - protein, 6 aa, synthetic construct
ASWGTP

SEQ ID NO: 32864 - protein, 7 aa, synthetic construct
ASSYVWG

SEQ ID NO: 32865 - protein, 6 aa, synthetic construct
ARGISD

SEQ ID NO: 32866 - protein, 7 aa, synthetic construct
AQYAPIN

SEQ ID NO: 32867 - protein, 5 aa, synthetic construct
VPNLG

SEQ ID NO: 32868 - protein, 6 aa, synthetic construct
AQGNWG

SEQ ID NO: 32869 - protein, 7 aa, synthetic construct
ASAFPGG

SEQ ID NO: 32870 - protein, 4 aa, synthetic construct
AFPG

SEQ ID NO: 32871 - protein, 5 aa, synthetic construct
ALTGG

SEQ ID NO: 32872 - protein, 7 aa, synthetic construct
ASGGYRP

SEQ ID NO: 32873 - protein, 7 aa, synthetic construct
AASTVLG

SEQ ID NO: 32874 - protein, 6 aa, synthetic construct
PPINSS

SEQ ID NO: 32875 - protein, 7 aa, synthetic construct
APSTCWG

SEQ ID NO: 32876 - protein, 7 aa, synthetic construct
AFTYNWG

SEQ ID NO: 32877 - protein, 5 aa, synthetic construct
AFFPT

SEQ ID NO: 32878 - protein, 6 aa, synthetic construct
AWGAGG

SEQ ID NO: 32879 - protein, 7 aa, synthetic construct
AFPGVNS

SEQ ID NO: 32880 - protein, 4 aa, synthetic construct
AFKA

SEQ ID NO: 32881 - protein, 6 aa, synthetic construct
AFAFLR

SEQ ID NO: 32882 - protein, 5 aa, synthetic construct
AFRTY

SEQ ID NO: 32883 - protein, 6 aa, synthetic construct
AFGDTI

SEQ ID NO: 32884 - protein, 4 aa, synthetic construct
AFGW

SEQ ID NO: 32885 - protein, 7 aa, synthetic construct
AFRSPIN

SEQ ID NO: 32886 - protein, 6 aa, synthetic construct
AFRRPT

SEQ ID NO: 32887 - protein, 5 aa, synthetic construct
AFGGE

SEQ ID NO: 32888 - protein, 7 aa, synthetic construct
AFPYLGV

SEQ ID NO: 32889 - protein, 7 aa, synthetic construct
AFRLQLG

SEQ ID NO: 32890 - protein, 5 aa, synthetic construct
AFQIP

SEQ ID NO: 32891 - protein, 7 aa, synthetic construct
AFRCGWG

SEQ ID NO: 32892 - protein, 4 aa, synthetic construct
ANLP

SEQ ID NO: 32893 - protein, 6 aa, synthetic construct
AFRGTP

SEQ ID NO: 32894 - protein, 5 aa, synthetic construct
AFAGG

SEQ ID NO: 32895 - skipped

SEQ ID NO: 32896 - protein, 4 aa, synthetic construct
ASLS

SEQ ID NO: 32897 - protein, 6 aa, synthetic construct
AFSSYD

SEQ ID NO: 32898 - protein, 5 aa, synthetic construct
AFLGE

SEQ ID NO: 32899 - protein, 6 aa, synthetic construct
AFKVLL

SEQ ID NO: 32900 - protein, 6 aa, synthetic construct
ASGLPG

SEQ ID NO: 32901 - protein, 7 aa, synthetic construct
AFTVLGV

SEQ ID NO: 32902 - protein, 6 aa, synthetic construct
ACSPGE

SEQ ID NO: 32903 - protein, 7 aa, synthetic construct
AFTPTLG

SEQ ID NO: 32904 - protein, 7 aa, synthetic construct
AQAPGTP

SEQ ID NO: 32905 - protein, 7 aa, synthetic construct
AFKPGLG

SEQ ID NO: 32906 - protein, 6 aa, synthetic construct
AFTCWG

SEQ ID NO: 32907 - protein, 6 aa, synthetic construct
AFNGSP

SEQ ID NO: 32908 - protein, 7 aa, synthetic construct
AFSYAGG

SEQ ID NO: 32909 - protein, 5 aa, synthetic construct
AFSWG

SEQ ID NO: 32910 - protein, 7 aa, synthetic construct
AFTPINS

SEQ ID NO: 32911 - protein, 4 aa, synthetic construct
ASPP

SEQ ID NO: 32912 - protein, 7 aa, synthetic construct
AFEALPW

SEQ ID NO: 32913 - protein, 5 aa, synthetic construct
AYTGG

SEQ ID NO: 32914 - protein, 6 aa, synthetic construct
AHILHR

SEQ ID NO: 32915 - protein, 5 aa, synthetic construct
AFEEG

SEQ ID NO: 32916 - protein, 7 aa, synthetic construct
APSYVLG

SEQ ID NO: 32917 - protein, 4 aa, synthetic construct
ASSS

SEQ ID NO: 32918 - protein, 6 aa, synthetic construct
AFRNWG

SEQ ID NO: 32919 - protein, 5 aa, synthetic construct
AFTWG

SEQ ID NO: 32920 - protein, 4 aa, synthetic construct
ALSP

SEQ ID NO: 32921 - protein, 7 aa, synthetic construct
AFFLFSG

SEQ ID NO: 32922 - protein, 6 aa, synthetic construct
AFVLFT

SEQ ID NO: 32923 - protein, 7 aa, synthetic construct
AFLLLGL

SEQ ID NO: 32924 - protein, 7 aa, synthetic construct
VGDTDKL

SEQ ID NO: 32925 - protein, 6 aa, synthetic construct
AFRDTD

SEQ ID NO: 32926 - protein, 7 aa, synthetic construct
AAPINSS

SEQ ID NO: 32927 - protein, 6 aa, synthetic construct
AFLLGV

SEQ ID NO: 32928 - protein, 7 aa, synthetic construct
AFFPLLG

SEQ ID NO: 32929 - protein, 5 aa, synthetic construct
APQEP

SEQ ID NO: 32930 - protein, 5 aa, synthetic construct
ASLQP

SEQ ID NO: 32931 - protein, 5 aa, synthetic construct
ALFWG

SEQ ID NO: 32932 - protein, 6 aa, synthetic construct
AFPSYT

SEQ ID NO: 32933 - protein, 6 aa, synthetic construct
ASPFPT

SEQ ID NO: 32934 - protein, 5 aa, synthetic construct
AWGWG

SEQ ID NO: 32935 - protein, 5 aa, synthetic construct
GFAPT

SEQ ID NO: 32936 - protein, 7 aa, synthetic construct
AFIASGG

SEQ ID NO: 32937 - protein, 7 aa, synthetic construct
AFTDKLI

SEQ ID NO: 32938 - protein, 7 aa, synthetic construct
AFRVLWG

SEQ ID NO: 32939 - protein, 6 aa, synthetic construct
AFSPRT

SEQ ID NO: 32940 - protein, 6 aa, synthetic construct
ALRSLT

SEQ ID NO: 32941 - protein, 7 aa, synthetic construct
AVGISRP

SEQ ID NO: 32942 - protein, 5 aa, synthetic construct
AFRPN

SEQ ID NO: 32943 - protein, 6 aa, synthetic construct
ASLSYD

SEQ ID NO: 32944 - protein, 5 aa, synthetic construct
AWRGY

SEQ ID NO: 32945 - protein, 7 aa, synthetic construct
ASAFLLG

SEQ ID NO: 32946 - protein, 6 aa, synthetic construct
ASPFLR

SEQ ID NO: 32947 - protein, 7 aa, synthetic construct
GAKLLGH

SEQ ID NO: 32948 - protein, 6 aa, synthetic construct
AFRRGT

SEQ ID NO: 32949 - skipped

SEQ ID NO: 32950 - protein, 7 aa, synthetic construct
ASFLLWG

SEQ ID NO: 32951 - protein, 4 aa, synthetic construct
APGL

SEQ ID NO: 32952 - protein, 7 aa, synthetic construct
ASVLGSW

SEQ ID NO: 32953 - protein, 5 aa, synthetic construct
PRVPG

SEQ ID NO: 32954 - protein, 6 aa, synthetic construct
APAFSL

SEQ ID NO: 32955 - protein, 5 aa, synthetic construct
ASPWG

SEQ ID NO: 32956 - protein, 6 aa, synthetic construct
AFSPSY

SEQ ID NO: 32957 - protein, 7 aa, synthetic construct
AFRSYTG

SEQ ID NO: 32958 - protein, 4 aa, synthetic construct
ALLR

SEQ ID NO: 32959 - protein, 7 aa, synthetic construct
AFPTGGY

SEQ ID NO: 32960 - protein, 5 aa, synthetic construct
AFKTG

SEQ ID NO: 32961 - protein, 5 aa, synthetic construct
AFPYR

SEQ ID NO: 32962 - protein, 4 aa, synthetic construct
AFNS

SEQ ID NO: 32963 - protein, 6 aa, synthetic construct
AFIPTT

SEQ ID NO: 32964 - protein, 5 aa, synthetic construct
AFFLG

SEQ ID NO: 32965 - protein, 6 aa, synthetic construct
AFAYVV

SEQ ID NO: 32966 - protein, 7 aa, synthetic construct
AFREYWG

SEQ ID NO: 32967 - protein, 5 aa, synthetic construct
AFPSP

SEQ ID NO: 32968 - protein, 7 aa, synthetic construct
AFGEPIN

SEQ ID NO: 32969 - protein, 7 aa, synthetic construct
AFTAAGG

SEQ ID NO: 32970 - protein, 5 aa, synthetic construct
AFPTT

SEQ ID NO: 32971 - protein, 7 aa, synthetic construct
AFPSYSG

SEQ ID NO: 32972 - protein, 4 aa, synthetic construct
AFLG

SEQ ID NO: 32973 - protein, 7 aa, synthetic construct
AFSGVPG

SEQ ID NO: 32974 - protein, 7 aa, synthetic construct
ARGTDKL

SEQ ID NO: 32975 - protein, 4 aa, synthetic construct
AFPP

SEQ ID NO: 32976 - protein, 5 aa, synthetic construct
VFLLH

SEQ ID NO: 32977 - protein, 7 aa, synthetic construct
AFPINSS

SEQ ID NO: 32978 - protein, 6 aa, synthetic construct
PENPQR

SEQ ID NO: 32979 - protein, 6 aa, synthetic construct
AITGGG

SEQ ID NO: 32980 - protein, 5 aa, synthetic construct
AFNLV

SEQ ID NO: 32981 - protein, 7 aa, synthetic construct
AFSPLLG

SEQ ID NO: 32982 - protein, 6 aa, synthetic construct
AFPYWD

SEQ ID NO: 32983 - protein, 7 aa, synthetic construct
AFPPKLG

SEQ ID NO: 32984 - protein, 5 aa, synthetic construct
APERV

SEQ ID NO: 32985 - protein, 6 aa, synthetic construct
PRGVHR

SEQ ID NO: 32986 - protein, 4 aa, synthetic construct
AFGG

SEQ ID NO: 32987 - protein, 5 aa, synthetic construct
ALPTS

SEQ ID NO: 32988 - protein, 6 aa, synthetic construct
AFRFRG

SEQ ID NO: 32989 - protein, 7 aa, synthetic construct
AFRKSWG

SEQ ID NO: 32990 - protein, 7 aa, synthetic construct
AFRILGA

SEQ ID NO: 32991 - protein, 7 aa, synthetic construct
ASYWGTP

SEQ ID NO: 32992 - protein, 6 aa, synthetic construct
AQGTWG

SEQ ID NO: 32993 - protein, 5 aa, synthetic construct
AWLLG

SEQ ID NO: 32994 - protein, 6 aa, synthetic construct
AFRGHR

SEQ ID NO: 32995 - protein, 7 aa, synthetic construct
AFSASGG

SEQ ID NO: 32996 - protein, 4 aa, synthetic construct
ALGG

SEQ ID NO: 32997 - protein, 5 aa, synthetic construct
AFKGV

SEQ ID NO: 32998 - protein, 5 aa, synthetic construct
AFPSG

SEQ ID NO: 32999 - protein, 4 aa, synthetic construct
PSPT

SEQ ID NO: 33000 - skipped

SEQ ID NO: 33001 - protein, 4 aa, synthetic construct
MKTD

SEQ ID NO: 33002 - protein, 4 aa, synthetic construct
AFPL

SEQ ID NO: 33003 - protein, 4 aa, synthetic construct
RPSQ

SEQ ID NO: 33004 - protein, 7 aa, synthetic construct
ASLINSS

SEQ ID NO: 33005 - protein, 7 aa, synthetic construct
ASFLPWG

SEQ ID NO: 33006 - protein, 5 aa, synthetic construct
AFSLR

SEQ ID NO: 33007 - protein, 7 aa, synthetic construct
ALTPGWG

SEQ ID NO: 33008 - protein, 4 aa, synthetic construct
ALYR

SEQ ID NO: 33009 - protein, 7 aa, synthetic construct
AFKYTIN

SEQ ID NO: 33010 - protein, 7 aa, synthetic construct
AFGGTGG

SEQ ID NO: 33011 - protein, 7 aa, synthetic construct
AFSALLR

SEQ ID NO: 33012 - protein, 6 aa, synthetic construct
AFFRGE

SEQ ID NO: 33013 - protein, 4 aa, synthetic construct
TPDR

SEQ ID NO: 33014 - protein, 7 aa, synthetic construct
DRGHRET

SEQ ID NO: 33015 - protein, 7 aa, synthetic construct
APGGGDT

SEQ ID NO: 33016 - protein, 5 aa, synthetic construct
ACTGG

SEQ ID NO: 33017 - protein, 6 aa, synthetic construct
ALLGDT

SEQ ID NO: 33018 - protein, 6 aa, synthetic construct
AFLWGR

SEQ ID NO: 33019 - protein, 5 aa, synthetic construct
ASRGR

SEQ ID NO: 33020 - protein, 6 aa, synthetic construct
ALGVWG

SEQ ID NO: 33021 - protein, 5 aa, synthetic construct
ALGGP

SEQ ID NO: 33022 - protein, 7 aa, synthetic construct
AFPTPKL

SEQ ID NO: 33023 - protein, 7 aa, synthetic construct
AWPPPGG

SEQ ID NO: 33024 - protein, 6 aa, synthetic construct
AFRVVL

SEQ ID NO: 33025 - protein, 6 aa, synthetic construct
PPGGHR

SEQ ID NO: 33026 - protein, 5 aa, synthetic construct
PLVWG

SEQ ID NO: 33027 - protein, 6 aa, synthetic construct
AVRGWG

SEQ ID NO: 33028 - protein, 6 aa, synthetic construct
PLPTLG

SEQ ID NO: 33029 - skipped

SEQ ID NO: 33030 - protein, 5 aa, synthetic construct
AFVDK

SEQ ID NO: 33031 - protein, 7 aa, synthetic construct
ASAFILG

SEQ ID NO: 33032 - protein, 6 aa, synthetic construct
ARRTDK

SEQ ID NO: 33033 - protein, 7 aa, synthetic construct
PPGGSTD

SEQ ID NO: 33034 - protein, 5 aa, synthetic construct
AVPMV

SEQ ID NO: 33035 - skipped

SEQ ID NO: 33036 - protein, 6 aa, synthetic construct
AGEPPA

SEQ ID NO: 33037 - protein, 7 aa, synthetic construct
AFLRAGG

SEQ ID NO: 33038 - protein, 4 aa, synthetic construct
PLLG

SEQ ID NO: 33039 - protein, 6 aa, synthetic construct
PLTGGH

SEQ ID NO: 33040 - protein, 7 aa, synthetic construct
ARYWGTP

SEQ ID NO: 33041 - protein, 6 aa, synthetic construct
AVRTGG

SEQ ID NO: 33042 - protein, 6 aa, synthetic construct
AFKRGY

SEQ ID NO: 33043 - protein, 5 aa, synthetic construct
AVTGG

SEQ ID NO: 33044 - protein, 6 aa, synthetic construct
ASGVWG

SEQ ID NO: 33045 - protein, 4 aa, synthetic construct
AFDL

SEQ ID NO: 33046 - protein, 7 aa, synthetic construct
ALGVNTD

SEQ ID NO: 33047 - protein, 5 aa, synthetic construct
APLLG

SEQ ID NO: 33048 - protein, 6 aa, synthetic construct
DWGFLR

SEQ ID NO: 33049 - protein, 6 aa, synthetic construct
AFGDTP

SEQ ID NO: 33050 - protein, 5 aa, synthetic construct
ALNWG

SEQ ID NO: 33051 - protein, 6 aa, synthetic construct
ALREDT

SEQ ID NO: 33052 - protein, 7 aa, synthetic construct
ALRGAGG

SEQ ID NO: 33053 - protein, 7 aa, synthetic construct
ALRSAGG

SEQ ID NO: 33054 - protein, 6 aa, synthetic construct
DFRYWG

SEQ ID NO: 33055 - protein, 5 aa, synthetic construct
DPASY

SEQ ID NO: 33056 - protein, 6 aa, synthetic construct
APAFLG

SEQ ID NO: 33057 - protein, 7 aa, synthetic construct
DLPINSS

SEQ ID NO: 33058 - protein, 5 aa, synthetic construct
ALSWG

SEQ ID NO: 33059 - protein, 5 aa, synthetic construct
AFGGT

SEQ ID NO: 33060 - skipped

SEQ ID NO: 33061 - protein, 7 aa, synthetic construct
ALYWEHR

SEQ ID NO: 33062 - protein, 7 aa, synthetic construct
ALHRETH

SEQ ID NO: 33063 - protein, 7 aa, synthetic construct
ACGAPIN

SEQ ID NO: 33064 - protein, 5 aa, synthetic construct
PFYAG

SEQ ID NO: 33065 - protein, 7 aa, synthetic construct
ACFLKLG

SEQ ID NO: 33066 - protein, 5 aa, synthetic construct
APYWR

SEQ ID NO: 33067 - protein, 6 aa, synthetic construct
AWTYWG

SEQ ID NO: 33068 - protein, 5 aa, synthetic construct
AIPTT

SEQ ID NO: 33069 - protein, 6 aa, synthetic construct
APVNSS

SEQ ID NO: 33070 - protein, 4 aa, synthetic construct
PFPT

SEQ ID NO: 33071 - protein, 5 aa, synthetic construct
AITGG

SEQ ID NO: 33072 - protein, 4 aa, synthetic construct
PFLG

SEQ ID NO: 33073 - protein, 6 aa, synthetic construct
PEGVHR

SEQ ID NO: 33074 - protein, 4 aa, synthetic construct
LSGG

SEQ ID NO: 33075 - protein, 7 aa, synthetic construct
PRTDKLI

SEQ ID NO: 33076 - protein, 4 aa, synthetic construct
AFKL

SEQ ID NO: 33077 - protein, 6 aa, synthetic construct
ACEAGG

SEQ ID NO: 33078 - protein, 6 aa, synthetic construct
AFKGPH

SEQ ID NO: 33079 - protein, 6 aa, synthetic construct
ACGGHR

SEQ ID NO: 33080 - protein, 4 aa, synthetic construct
ACGG

SEQ ID NO: 33081 - protein, 5 aa, synthetic construct
PRLGV

SEQ ID NO: 33082 - protein, 6 aa, synthetic construct
PLSVLG

SEQ ID NO: 33083 - protein, 7 aa, synthetic construct
AFGGYSW

SEQ ID NO: 33084 - protein, 6 aa, synthetic construct
AFLYPT

SEQ ID NO: 33085 - protein, 7 aa, synthetic construct
ACRILLG

SEQ ID NO: 33086 - protein, 5 aa, synthetic construct
ASPGG

SEQ ID NO: 33087 - protein, 5 aa, synthetic construct
ACSSW

SEQ ID NO: 33088 - protein, 6 aa, synthetic construct
AFRPGG

SEQ ID NO: 33089 - protein, 7 aa, synthetic construct
AFNGTWG

SEQ ID NO: 33090 - protein, 6 aa, synthetic construct
AFPVGI

SEQ ID NO: 33091 - protein, 6 aa, synthetic construct
TSLTGG

SEQ ID NO: 33092 - protein, 6 aa, synthetic construct
RTDQLI

SEQ ID NO: 33093 - skipped

SEQ ID NO: 33094 - protein, 6 aa, synthetic construct
AFRYLP

SEQ ID NO: 33095 - protein, 6 aa, synthetic construct
ACRVHR

SEQ ID NO: 33096 - protein, 4 aa, synthetic construct
ASTP

SEQ ID NO: 33097 - protein, 6 aa, synthetic construct
AFSLGG

SEQ ID NO: 33098 - skipped

SEQ ID NO: 33099 - protein, 6 aa, synthetic construct
AFPNWG

SEQ ID NO: 33100 - protein, 6 aa, synthetic construct
ASPSSR

SEQ ID NO: 33101 - protein, 5 aa, synthetic construct
ASGGT

SEQ ID NO: 33102 - skipped

SEQ ID NO: 33103 - protein, 7 aa, synthetic construct
ASFPLWG

SEQ ID NO: 33104 - protein, 7 aa, synthetic construct
AFRGDTY

SEQ ID NO: 33105 - protein, 7 aa, synthetic construct
ACREYWG

SEQ ID NO: 33106 - protein, 5 aa, synthetic construct
AFLWG

SEQ ID NO: 33107 - protein, 6 aa, synthetic construct
AFTGGK

SEQ ID NO: 33108 - protein, 6 aa, synthetic construct
ACRGGT

SEQ ID NO: 33109 - protein, 7 aa, synthetic construct
AFTPCLG

SEQ ID NO: 33110 - protein, 7 aa, synthetic construct
ASRQHNS

SEQ ID NO: 33111 - protein, 7 aa, synthetic construct
ASALPGG

SEQ ID NO: 33112 - protein, 7 aa, synthetic construct
ACNVLGV

SEQ ID NO: 33113 - protein, 6 aa, synthetic construct
ASSYLG

SEQ ID NO: 33114 - protein, 5 aa, synthetic construct
ACRFI

SEQ ID NO: 33115 - protein, 5 aa, synthetic construct
DFAPT

SEQ ID NO: 33116 - protein, 4 aa, synthetic construct
DCVF

SEQ ID NO: 33117 - protein, 4 aa, synthetic construct
ACPG

SEQ ID NO: 33118 - skipped

SEQ ID NO: 33119 - protein, 6 aa, synthetic construct
AYVYWW

SEQ ID NO: 33120 - protein, 6 aa, synthetic construct
AYVYWG

SEQ ID NO: 33121 - protein, 6 aa, synthetic construct
ASVGTP

SEQ ID NO: 33122 - protein, 5 aa, synthetic construct
AYVLR

SEQ ID NO: 33123 - protein, 6 aa, synthetic construct
AYVGHR

SEQ ID NO: 33124 - protein, 5 aa, synthetic construct
ACNWG

SEQ ID NO: 33125 - protein, 5 aa, synthetic construct
ASTGA

SEQ ID NO: 33126 - protein, 7 aa, synthetic construct
AYTAPGT

SEQ ID NO: 33127 - protein, 6 aa, synthetic construct
AYPVPT

SEQ ID NO: 33128 - protein, 4 aa, synthetic construct
AYSR

SEQ ID NO: 33129 - protein, 6 aa, synthetic construct
AYSLGV

SEQ ID NO: 33130 - protein, 6 aa, synthetic construct
ASTGGD

SEQ ID NO: 33131 - protein, 7 aa, synthetic construct
AYNAPIN

SEQ ID NO: 33132 - protein, 7 aa, synthetic construct
AYNSPIN

SEQ ID NO: 33133 - protein, 4 aa, synthetic construct
AYRV

SEQ ID NO: 33134 - protein, 7 aa, synthetic construct
AYRLPGG

SEQ ID NO: 33135 - protein, 7 aa, synthetic construct
AYRILGA

SEQ ID NO: 33136 - protein, 7 aa, synthetic construct
DFTPSGG

SEQ ID NO: 33137 - protein, 6 aa, synthetic construct
AYRDTD

SEQ ID NO: 33138 - protein, 4 aa, synthetic construct
AYPV

SEQ ID NO: 33139 - protein, 6 aa, synthetic construct
ACNVGV

SEQ ID NO: 33140 - protein, 7 aa, synthetic construct
ASRRHNS

SEQ ID NO: 33141 - protein, 4 aa, synthetic construct
ASSY

SEQ ID NO: 33142 - protein, 5 aa, synthetic construct
ASSWG

SEQ ID NO: 33143 - protein, 7 aa, synthetic construct
DFEALPW

SEQ ID NO: 33144 - protein, 5 aa, synthetic construct
DFNLV

SEQ ID NO: 33145 - protein, 7 aa, synthetic construct
ASSLRFW

SEQ ID NO: 33146 - protein, 7 aa, synthetic construct
DFNVLGV

SEQ ID NO: 33147 - skipped

SEQ ID NO: 33148 - protein, 5 aa, synthetic construct
ASSLL

SEQ ID NO: 33149 - protein, 7 aa, synthetic construct
ASSCLPA

SEQ ID NO: 33150 - protein, 6 aa, synthetic construct
ASSLGD

SEQ ID NO: 33151 - protein, 5 aa, synthetic construct
ASSLG

SEQ ID NO: 33152 - protein, 7 aa, synthetic construct
DFPTGGH

SEQ ID NO: 33153 - protein, 7 aa, synthetic construct
DFRADKL

SEQ ID NO: 33154 - protein, 5 aa, synthetic construct
DFRPT

SEQ ID NO: 33155 - protein, 6 aa, synthetic construct
DFRTGG

SEQ ID NO: 33156 - protein, 7 aa, synthetic construct
ACRADKL

SEQ ID NO: 33157 - protein, 6 aa, synthetic construct
ACRDTS

SEQ ID NO: 33158 - protein, 5 aa, synthetic construct
DFSLG

SEQ ID NO: 33159 - protein, 7 aa, synthetic construct
DFSNGGG

SEQ ID NO: 33160 - protein, 7 aa, synthetic construct
DFNPSGG

SEQ ID NO: 33161 - protein, 6 aa, synthetic construct
ACPSYT

SEQ ID NO: 33162 - protein, 7 aa, synthetic construct
DFSPSGG

SEQ ID NO: 33163 - protein, 4 aa, synthetic construct
ACPS

SEQ ID NO: 33164 - protein, 7 aa, synthetic construct
ASSTSWG

SEQ ID NO: 33165 - protein, 4 aa, synthetic construct
DFGD

SEQ ID NO: 33166 - protein, 6 aa, synthetic construct
ASSTGG

SEQ ID NO: 33167 - protein, 5 aa, synthetic construct
DFGDK

SEQ ID NO: 33168 - protein, 7 aa, synthetic construct
DFGDPIN

SEQ ID NO: 33169 - protein, 6 aa, synthetic construct
DFGYWW

SEQ ID NO: 33170 - protein, 7 aa, synthetic construct
DFILVDT

SEQ ID NO: 33171 - protein, 5 aa, synthetic construct
ACPGG

SEQ ID NO: 33172 - protein, 7 aa, synthetic construct
ACPPPGG

SEQ ID NO: 33173 - protein, 5 aa, synthetic construct
AYMAY

SEQ ID NO: 33174 - protein, 6 aa, synthetic construct
DFTFTQ

SEQ ID NO: 33175 - protein, 5 aa, synthetic construct
DFIWG

SEQ ID NO: 33176 - protein, 5 aa, synthetic construct
DFLGE

SEQ ID NO: 33177 - protein, 5 aa, synthetic construct
DFLGV

SEQ ID NO: 33178 - skipped

SEQ ID NO: 33179 - protein, 7 aa, synthetic construct
ACNPSGG

SEQ ID NO: 33180 - protein, 6 aa, synthetic construct
ACKGGG

SEQ ID NO: 33181 - protein, 5 aa, synthetic construct
AYLGG

SEQ ID NO: 33182 - protein, 7 aa, synthetic construct
AVEMYTD

SEQ ID NO: 33183 - protein, 6 aa, synthetic construct
AVTGGY

SEQ ID NO: 33184 - skipped

SEQ ID NO: 33185 - protein, 7 aa, synthetic construct
AVEALPW

SEQ ID NO: 33186 - protein, 5 aa, synthetic construct
AVVLG

SEQ ID NO: 33187 - protein, 7 aa, synthetic construct
AVVLPPV

SEQ ID NO: 33188 - protein, 6 aa, synthetic construct
AVVRRE

SEQ ID NO: 33189 - protein, 6 aa, synthetic construct
ACKAVL

SEQ ID NO: 33190 - protein, 5 aa, synthetic construct
AVWWG

SEQ ID NO: 33191 - protein, 4 aa, synthetic construct
AVYI

SEQ ID NO: 33192 - protein, 5 aa, synthetic construct
AVYSY

SEQ ID NO: 33193 - protein, 4 aa, synthetic construct
ACKA

SEQ ID NO: 33194 - protein, 4 aa, synthetic construct
AVAG

SEQ ID NO: 33195 - protein, 7 aa, synthetic construct
AWDTPIN

SEQ ID NO: 33196 - protein, 5 aa, synthetic construct
ACIWG

SEQ ID NO: 33197 - protein, 7 aa, synthetic construct
ACIRPGG

SEQ ID NO: 33198 - skipped

SEQ ID NO: 33199 - protein, 7 aa, synthetic construct
ACKGSWG

SEQ ID NO: 33200 - protein, 5 aa, synthetic construct
DFTPT

SEQ ID NO: 33201 - protein, 7 aa, synthetic construct
AVTDKLI

SEQ ID NO: 33202 - protein, 6 aa, synthetic construct
AYKRGY

SEQ ID NO: 33203 - protein, 6 aa, synthetic construct
ACKCGG

SEQ ID NO: 33204 - protein, 5 aa, synthetic construct
AVLLG

SEQ ID NO: 33205 - protein, 7 aa, synthetic construct
AVLPGGG

SEQ ID NO: 33206 - protein, 6 aa, synthetic construct
AVLRWG

SEQ ID NO: 33207 - protein, 7 aa, synthetic construct
AVNRPGG

SEQ ID NO: 33208 - protein, 5 aa, synthetic construct
AVPGG

SEQ ID NO: 33209 - protein, 6 aa, synthetic construct
AVGVWG

SEQ ID NO: 33210 - protein, 7 aa, synthetic construct
AVGVLGV

SEQ ID NO: 33211 - protein, 7 aa, synthetic construct
AVRCGWG

SEQ ID NO: 33212 - protein, 4 aa, synthetic construct
AVGV

SEQ ID NO: 33213 - protein, 6 aa, synthetic construct
AVGSDR

SEQ ID NO: 33214 - protein, 7 aa, synthetic construct
AVRLLLG

SEQ ID NO: 33215 - protein, 7 aa, synthetic construct
AVRLPGG

SEQ ID NO: 33216 - protein, 5 aa, synthetic construct
ACKGQ

SEQ ID NO: 33217 - protein, 7 aa, synthetic construct
AVRSPIN

SEQ ID NO: 33218 - protein, 4 aa, synthetic construct
AVGG

SEQ ID NO: 33219 - protein, 7 aa, synthetic construct
AVSIVLG

SEQ ID NO: 33220 - protein, 4 aa, synthetic construct
AVFQ

SEQ ID NO: 33221 - protein, 5 aa, synthetic construct
ATVLG

SEQ ID NO: 33222 - protein, 5 aa, synthetic construct
AWGAS

SEQ ID NO: 33223 - protein, 5 aa, synthetic construct
ACIPT

SEQ ID NO: 33224 - protein, 6 aa, synthetic construct
ATVISS

SEQ ID NO: 33225 - protein, 6 aa, synthetic construct
AWVMYR

SEQ ID NO: 33226 - protein, 5 aa, synthetic construct
AWYWG

SEQ ID NO: 33227 - protein, 6 aa, synthetic construct
ATLGIQ

SEQ ID NO: 33228 - protein, 6 aa, synthetic construct
ATGYTD

SEQ ID NO: 33229 - protein, 5 aa, synthetic construct
ACLLG

SEQ ID NO: 33230 - protein, 7 aa, synthetic construct
ASWPLPL

SEQ ID NO: 33231 - protein, 6 aa, synthetic construct
ACLLGV

SEQ ID NO: 33232 - protein, 6 aa, synthetic construct
ACGGNR

SEQ ID NO: 33233 - protein, 7 aa, synthetic construct
ACLRPGG

SEQ ID NO: 33234 - skipped

SEQ ID NO: 33235 - protein, 7 aa, synthetic construct
AYFLKLG

SEQ ID NO: 33236 - protein, 5 aa, synthetic construct
AYFLR

SEQ ID NO: 33237 - protein, 6 aa, synthetic construct
ACNGSP

SEQ ID NO: 33238 - protein, 7 aa, synthetic construct
AYIAPIN

SEQ ID NO: 33239 - skipped

SEQ ID NO: 33240 - protein, 5 aa, synthetic construct
ACNLT

SEQ ID NO: 33241 - protein, 5 aa, synthetic construct
ASVLI

SEQ ID NO: 33242 - protein, 6 aa, synthetic construct
ATLGLI

SEQ ID NO: 33243 - protein, 6 aa, synthetic construct
ACGGPP

SEQ ID NO: 33244 - protein, 6 aa, synthetic construct
AWRRWG

SEQ ID NO: 33245 - protein, 4 aa, synthetic construct
AWLG

SEQ ID NO: 33246 - protein, 5 aa, synthetic construct
AWGGR

SEQ ID NO: 33247 - protein, 7 aa, synthetic construct
AWGGTGG

SEQ ID NO: 33248 - protein, 6 aa, synthetic construct
AWGISD

SEQ ID NO: 33249 - protein, 6 aa, synthetic construct
ACGSPG

SEQ ID NO: 33250 - protein, 5 aa, synthetic construct
ACGSD

SEQ ID NO: 33251 - protein, 6 aa, synthetic construct
AWGVWG

SEQ ID NO: 33252 - protein, 4 aa, synthetic construct
ACGS

SEQ ID NO: 33253 - protein, 7 aa, synthetic construct
ATTGGIW

SEQ ID NO: 33254 - protein, 5 aa, synthetic construct
ATLWG

SEQ ID NO: 33255 - protein, 7 aa, synthetic construct
ACGGTPV

SEQ ID NO: 33256 - protein, 4 aa, synthetic construct
ATQL

SEQ ID NO: 33257 - protein, 4 aa, synthetic construct
ATPL

SEQ ID NO: 33258 - protein, 7 aa, synthetic construct
ACGGTGG

SEQ ID NO: 33259 - protein, 7 aa, synthetic construct
AWRGYPH

SEQ ID NO: 33260 - protein, 6 aa, synthetic construct
ATPGIH

SEQ ID NO: 33261 - protein, 4 aa, synthetic construct
ATPG

SEQ ID NO: 33262 - protein, 7 aa, synthetic construct
AYISSGG

SEQ ID NO: 33263 - protein, 7 aa, synthetic construct
EGPRSTH

SEQ ID NO: 33264 - protein, 6 aa, synthetic construct
DFTYLG

SEQ ID NO: 33265 - protein, 6 aa, synthetic construct
PYGAGG

SEQ ID NO: 33266 - skipped

SEQ ID NO: 33267 - protein, 6 aa, synthetic construct
PSPHKL

SEQ ID NO: 33268 - protein, 6 aa, synthetic construct
PSPYWG

SEQ ID NO: 33269 - protein, 6 aa, synthetic construct
PSSVLG

SEQ ID NO: 33270 - protein, 7 aa, synthetic construct
PSYVVLG

SEQ ID NO: 33271 - protein, 7 aa, synthetic construct
PSYWEHR

SEQ ID NO: 33272 - protein, 7 aa, synthetic construct
PTPTFWG

SEQ ID NO: 33273 - protein, 7 aa, synthetic construct
PVEYWGL

SEQ ID NO: 33274 - protein, 7 aa, synthetic construct
PVLRGGT

SEQ ID NO: 33275 - protein, 7 aa, synthetic construct
PWGLPGT

SEQ ID NO: 33276 - protein, 7 aa, synthetic construct
RESAAQL

SEQ ID NO: 33277 - protein, 6 aa, synthetic construct
PLPLYL

SEQ ID NO: 33278 - protein, 7 aa, synthetic construct
RGGLGTD

SEQ ID NO: 33279 - protein, 7 aa, synthetic construct
AASPVLG

SEQ ID NO: 33280 - protein, 7 aa, synthetic construct
RGIALNS

SEQ ID NO: 33281 - protein, 7 aa, synthetic construct
RGISINS

SEQ ID NO: 33282 - protein, 7 aa, synthetic construct
RPSQNWG

SEQ ID NO: 33283 - protein, 4 aa, synthetic construct
RSGG

SEQ ID NO: 33284 - protein, 5 aa, synthetic construct
AAQGY

SEQ ID NO: 33285 - protein, 6 aa, synthetic construct
RTDKPI

SEQ ID NO: 33286 - protein, 7 aa, synthetic construct
RVPDKLI

SEQ ID NO: 33287 - protein, 7 aa, synthetic construct
SFNDKLI

SEQ ID NO: 33288 - protein, 6 aa, synthetic construct
PSFPTT

SEQ ID NO: 33289 - protein, 5 aa, synthetic construct
PRYWG

SEQ ID NO: 33290 - protein, 7 aa, synthetic construct
PRPPINS

SEQ ID NO: 33291 - protein, 5 aa, synthetic construct
PRFWG

SEQ ID NO: 33292 - protein, 7 aa, synthetic construct
PLRDKLI

SEQ ID NO: 33293 - protein, 7 aa, synthetic construct
PLRFYTD

SEQ ID NO: 33294 - protein, 7 aa, synthetic construct
PLRKTGA

SEQ ID NO: 33295 - protein, 6 aa, synthetic construct
PLSLHR

SEQ ID NO: 33296 - protein, 4 aa, synthetic construct
PLSY

SEQ ID NO: 33297 - protein, 7 aa, synthetic construct
PLTGDTD

SEQ ID NO: 33298 - protein, 5 aa, synthetic construct
PLTGG

SEQ ID NO: 33299 - protein, 6 aa, synthetic construct
PLVGAL

SEQ ID NO: 33300 - protein, 7 aa, synthetic construct
PLVGDKL

SEQ ID NO: 33301 - protein, 6 aa, synthetic construct
PLVLTD

SEQ ID NO: 33302 - protein, 6 aa, synthetic construct
PLWGAD

SEQ ID NO: 33303 - protein, 5 aa, synthetic construct
PLWGG

SEQ ID NO: 33304 - protein, 7 aa, synthetic construct
PPALCSS

SEQ ID NO: 33305 - protein, 4 aa, synthetic construct
PPGK

SEQ ID NO: 33306 - protein, 6 aa, synthetic construct
PPGPYP

SEQ ID NO: 33307 - protein, 7 aa, synthetic construct
ACAGAGG

SEQ ID NO: 33308 - skipped

SEQ ID NO: 33309 - protein, 5 aa, synthetic construct
PPPSY

SEQ ID NO: 33310 - protein, 6 aa, synthetic construct
PPPVLR

SEQ ID NO: 33311 - protein, 5 aa, synthetic construct
PPYWG

SEQ ID NO: 33312 - protein, 7 aa, synthetic construct
PPYWGTP

SEQ ID NO: 33313 - protein, 7 aa, synthetic construct
SFPPSSY

SEQ ID NO: 33314 - protein, 7 aa, synthetic construct
SFSASGG

SEQ ID NO: 33315 - protein, 7 aa, synthetic construct
SFVWDTG

SEQ ID NO: 33316 - protein, 6 aa, synthetic construct
TTDHLI

SEQ ID NO: 33317 - protein, 6 aa, synthetic construct
TTDKLN

SEQ ID NO: 33318 - protein, 5 aa, synthetic construct
VCGRI

SEQ ID NO: 33319 - skipped

SEQ ID NO: 33320 - protein, 5 aa, synthetic construct
VFDFR

SEQ ID NO: 33321 - protein, 5 aa, synthetic construct
VFLIH

SEQ ID NO: 33322 - protein, 5 aa, synthetic construct
VFLLR

SEQ ID NO: 33323 - protein, 5 aa, synthetic construct
VFMLH

SEQ ID NO: 33324 - protein, 6 aa, synthetic construct
VFRVHR

SEQ ID NO: 33325 - protein, 5 aa, synthetic construct
VFWLG

SEQ ID NO: 33326 - protein, 6 aa, synthetic construct
VFYPDP

SEQ ID NO: 33327 - protein, 7 aa, synthetic construct
AAPITSS

SEQ ID NO: 33328 - protein, 7 aa, synthetic construct
VGDTDQL

SEQ ID NO: 33329 - protein, 7 aa, synthetic construct
VLIPIDS

SEQ ID NO: 33330 - protein, 7 aa, synthetic construct
VLIPIIS

SEQ ID NO: 33331 - protein, 7 aa, synthetic construct
VLRPINS

SEQ ID NO: 33332 - protein, 7 aa, synthetic construct
VLTPINS

SEQ ID NO: 33333 - skipped

SEQ ID NO: 33334 - protein, 5 aa, synthetic construct
VQDLL

SEQ ID NO: 33335 - protein, 6 aa, synthetic construct
VRRGAP

SEQ ID NO: 33336 - protein, 7 aa, synthetic construct
WGTPINS

SEQ ID NO: 33337 - protein, 4 aa, synthetic construct
WPSQ

SEQ ID NO: 33338 - protein, 5 aa, synthetic construct
AAPLV

SEQ ID NO: 33339 - protein, 7 aa, synthetic construct
TRDRYTH

SEQ ID NO: 33340 - protein, 7 aa, synthetic construct
SGGSFTD

SEQ ID NO: 33341 - protein, 7 aa, synthetic construct
TPLRRGT

SEQ ID NO: 33342 - protein, 4 aa, synthetic construct
AAQG

SEQ ID NO: 33343 - skipped

SEQ ID NO: 33344 - protein, 4 aa, synthetic construct
SPPT

SEQ ID NO: 33345 - protein, 7 aa, synthetic construct
SRDRSTN

SEQ ID NO: 33346 - protein, 7 aa, synthetic construct
SRYTDKL

SEQ ID NO: 33347 - protein, 4 aa, synthetic construct
SSGA

SEQ ID NO: 33348 - protein, 7 aa, synthetic construct
SSILGDT

SEQ ID NO: 33349 - protein, 6 aa, synthetic construct
SSRSTP

SEQ ID NO: 33350 - protein, 6 aa, synthetic construct
SSTYVG

SEQ ID NO: 33351 - skipped

SEQ ID NO: 33352 - protein, 6 aa, synthetic construct
SWGMYR

SEQ ID NO: 33353 - skipped

SEQ ID NO: 33354 - protein, 7 aa, synthetic construct
TFGEPIN

SEQ ID NO: 33355 - protein, 5 aa, synthetic construct
TFKLL

SEQ ID NO: 33356 - protein, 5 aa, synthetic construct
TFTGG

SEQ ID NO: 33357 - protein, 4 aa, synthetic construct
TFWG

SEQ ID NO: 33358 - protein, 6 aa, synthetic construct
AAPSWG

SEQ ID NO: 33359 - protein, 7 aa, synthetic construct
TGANKLI

SEQ ID NO: 33360 - protein, 5 aa, synthetic construct
TGFWG

SEQ ID NO: 33361 - protein, 7 aa, synthetic construct
TLKPINS

SEQ ID NO: 33362 - protein, 5 aa, synthetic construct
TLLIM

SEQ ID NO: 33363 - protein, 4 aa, synthetic construct
PLRD

SEQ ID NO: 33364 - protein, 7 aa, synthetic construct
PLPINSS

SEQ ID NO: 33365 - protein, 5 aa, synthetic construct
DFVLR

SEQ ID NO: 33366 - protein, 5 aa, synthetic construct
ACGAG

SEQ ID NO: 33367 - protein, 5 aa, synthetic construct
DVRLG

SEQ ID NO: 33368 - protein, 6 aa, synthetic construct
ACGCRI

SEQ ID NO: 33369 - protein, 7 aa, synthetic construct
DWGSYTD

SEQ ID NO: 33370 - protein, 6 aa, synthetic construct
DYLPTG

SEQ ID NO: 33371 - protein, 5 aa, synthetic construct
DYSSY

SEQ ID NO: 33372 - protein, 5 aa, synthetic construct
EAGLG

SEQ ID NO: 33373 - protein, 7 aa, synthetic construct
EFPSPTT

SEQ ID NO: 33374 - protein, 7 aa, synthetic construct
EGPRETH

SEQ ID NO: 33375 - protein, 4 aa, synthetic construct
EVGG

SEQ ID NO: 33376 - protein, 4 aa, synthetic construct
GAGR

SEQ ID NO: 33377 - protein, 6 aa, synthetic construct
GARNSS

SEQ ID NO: 33378 - protein, 6 aa, synthetic construct
PLPFLG

SEQ ID NO: 33379 - protein, 5 aa, synthetic construct
ACFLR

SEQ ID NO: 33380 - protein, 6 aa, synthetic construct
GFPVPT

SEQ ID NO: 33381 - protein, 6 aa, synthetic construct
GGLGRT

SEQ ID NO: 33382 - protein, 5 aa, synthetic construct
ACFLG

SEQ ID NO: 33383 - protein, 6 aa, synthetic construct
GHDNLI

SEQ ID NO: 33384 - skipped

SEQ ID NO: 33385 - protein, 6 aa, synthetic construct
GRGFLN

SEQ ID NO: 33386 - protein, 5 aa, synthetic construct
HLVLG

SEQ ID NO: 33387 - skipped

SEQ ID NO: 33388 - protein, 6 aa, synthetic construct
HSGDTP

SEQ ID NO: 33389 - protein, 7 aa, synthetic construct
DVGIIRP

SEQ ID NO: 33390 - protein, 7 aa, synthetic construct
DTTPRNS

SEQ ID NO: 33391 - protein, 5 aa, synthetic construct
ACGDK

SEQ ID NO: 33392 - protein, 7 aa, synthetic construct
DTCTDKL

SEQ ID NO: 33393 - protein, 6 aa, synthetic construct
DFYPGA

SEQ ID NO: 33394 - protein, 6 aa, synthetic construct
DLFLTP

SEQ ID NO: 33395 - protein, 5 aa, synthetic construct
DLGPY

SEQ ID NO: 33396 - protein, 5 aa, synthetic construct
DLLRR

SEQ ID NO: 33397 - protein, 6 aa, synthetic construct
DLPASS

SEQ ID NO: 33398 - protein, 4 aa, synthetic construct
DLPP

SEQ ID NO: 33399 - protein, 6 aa, synthetic construct
ACGEHR

SEQ ID NO: 33400 - protein, 5 aa, synthetic construct
DLPPR

SEQ ID NO: 33401 - protein, 6 aa, synthetic construct
DLPPRN

SEQ ID NO: 33402 - protein, 7 aa, synthetic construct
DLYWGTP

SEQ ID NO: 33403 - protein, 7 aa, synthetic construct
DPGGWDT

SEQ ID NO: 33404 - protein, 5 aa, synthetic construct
DPILG

SEQ ID NO: 33405 - protein, 6 aa, synthetic construct
DPILGE

SEQ ID NO: 33406 - protein, 7 aa, synthetic construct
DPRPSSF

SEQ ID NO: 33407 - protein, 4 aa, synthetic construct
DPSS

SEQ ID NO: 33408 - protein, 6 aa, synthetic construct
DRGIHR

SEQ ID NO: 33409 - protein, 6 aa, synthetic construct
DRGKLI

SEQ ID NO: 33410 - protein, 6 aa, synthetic construct
DSLGDK

SEQ ID NO: 33411 - protein, 7 aa, synthetic construct
DSSFIPA

SEQ ID NO: 33412 - protein, 7 aa, synthetic construct
DSVLEDN

SEQ ID NO: 33413 - skipped

SEQ ID NO: 33414 - protein, 7 aa, synthetic construct
HTTPINS

SEQ ID NO: 33415 - protein, 7 aa, synthetic construct
IPTGDKL

SEQ ID NO: 33416 - protein, 7 aa, synthetic construct
IQHRSTH

SEQ ID NO: 33417 - protein, 6 aa, synthetic construct
PGGCTD

SEQ ID NO: 33418 - protein, 6 aa, synthetic construct
PGWGMD

SEQ ID NO: 33419 - protein, 4 aa, synthetic construct
PHWR

SEQ ID NO: 33420 - protein, 5 aa, synthetic construct
PHWWV

SEQ ID NO: 33421 - protein, 5 aa, synthetic construct
PILGR

SEQ ID NO: 33422 - protein, 7 aa, synthetic construct
PITYKLI

SEQ ID NO: 33423 - protein, 6 aa, synthetic construct
PKVLGV

SEQ ID NO: 33424 - skipped

SEQ ID NO: 33425 - protein, 4 aa, synthetic construct
PLAG

SEQ ID NO: 33426 - protein, 5 aa, synthetic construct
PLAPT

SEQ ID NO: 33427 - protein, 6 aa, synthetic construct
PLEDGG

SEQ ID NO: 33428 - protein, 7 aa, synthetic construct
PLEPINS

SEQ ID NO: 33429 - protein, 5 aa, synthetic construct
PLFLR

SEQ ID NO: 33430 - protein, 4 aa, synthetic construct
PLGE

SEQ ID NO: 33431 - protein, 7 aa, synthetic construct
PLKGPGG

SEQ ID NO: 33432 - protein, 7 aa, synthetic construct
PLLGDTD

SEQ ID NO: 33433 - protein, 5 aa, synthetic construct
PLLGV

SEQ ID NO: 33434 - protein, 6 aa, synthetic construct
PLLHTG

SEQ ID NO: 33435 - protein, 4 aa, synthetic construct
PLLR

SEQ ID NO: 33436 - protein, 6 aa, synthetic construct
PLLTWG

SEQ ID NO: 33437 - protein, 6 aa, synthetic construct
PLLVLG

SEQ ID NO: 33438 - protein, 5 aa, synthetic construct
PLLWW

SEQ ID NO: 33439 - protein, 5 aa, synthetic construct
PGGLG

SEQ ID NO: 33440 - protein, 4 aa, synthetic construct
PGAG

SEQ ID NO: 33441 - protein, 7 aa, synthetic construct
LGAGDST

SEQ ID NO: 33442 - protein, 7 aa, synthetic construct
PFYWGTP

SEQ ID NO: 33443 - protein, 7 aa, synthetic construct
LGATSIN

SEQ ID NO: 33444 - protein, 5 aa, synthetic construct
ACDFR

SEQ ID NO: 33445 - protein, 6 aa, synthetic construct
LGDRTP

SEQ ID NO: 33446 - protein, 7 aa, synthetic construct
LGDTAIN

SEQ ID NO: 33447 - protein, 7 aa, synthetic construct
ACDDKLI

SEQ ID NO: 33448 - protein, 5 aa, synthetic construct
LPNQG

SEQ ID NO: 33449 - protein, 4 aa, synthetic construct
LVWG

SEQ ID NO: 33450 - protein, 5 aa, synthetic construct
ACCPG

SEQ ID NO: 33451 - protein, 7 aa, synthetic construct
NLNPINS

SEQ ID NO: 33452 - protein, 6 aa, synthetic construct
PEGNSS

SEQ ID NO: 33453 - protein, 5 aa, synthetic construct
PFAGG

SEQ ID NO: 33454 - protein, 7 aa, synthetic construct
PFETINS

SEQ ID NO: 33455 - protein, 5 aa, synthetic construct
PFGWG

SEQ ID NO: 33456 - protein, 7 aa, synthetic construct
PFLGDTD

SEQ ID NO: 33457 - protein, 5 aa, synthetic construct
PFPWG

SEQ ID NO: 33458 - protein, 7 aa, synthetic construct
PFRGWIN

SEQ ID NO: 33459 - skipped

SEQ ID NO: 33460 - protein, 7 aa, synthetic construct
PFSGGTP

SEQ ID NO: 33461 - protein, 6 aa, synthetic construct
PFSLLT

SEQ ID NO: 33462 - protein, 4 aa, synthetic construct
PFSY

SEQ ID NO: 33463 - protein, 6 aa, synthetic construct
PFWGTP

SEQ ID NO: 33464 - protein, 6 aa, synthetic construct
ASRNSS

SEQ ID NO: 33465 - protein, 6 aa, synthetic construct
AFRGGR

SEQ ID NO: 33466 - protein, 7 aa, synthetic construct
ASRGAGG

SEQ ID NO: 33467 - protein, 6 aa, synthetic construct
AGVPDP

SEQ ID NO: 33468 - protein, 4 aa, synthetic construct
AGAG

SEQ ID NO: 33469 - skipped

SEQ ID NO: 33470 - protein, 6 aa, synthetic construct
AGGFLR

SEQ ID NO: 33471 - protein, 6 aa, synthetic construct
AGGGNR

SEQ ID NO: 33472 - protein, 7 aa, synthetic construct
AGGSYTD

SEQ ID NO: 33473 - protein, 4 aa, synthetic construct
AGHI

SEQ ID NO: 33474 - protein, 6 aa, synthetic construct
AGRTGG

SEQ ID NO: 33475 - protein, 7 aa, synthetic construct
AGTGGSW

SEQ ID NO: 33476 - protein, 6 aa, synthetic construct
AGVGGE

SEQ ID NO: 33477 - protein, 6 aa, synthetic construct
AGVGWG

SEQ ID NO: 33478 - protein, 4 aa, synthetic construct
AGWG

SEQ ID NO: 33479 - protein, 6 aa, synthetic construct
AFTYWG

SEQ ID NO: 33480 - protein, 7 aa, synthetic construct
AFKVLVL

SEQ ID NO: 33481 - protein, 6 aa, synthetic construct
AHGNWG

SEQ ID NO: 33482 - protein, 6 aa, synthetic construct
AHIRHR

SEQ ID NO: 33483 - protein, 6 aa, synthetic construct
AHLPTT

SEQ ID NO: 33484 - protein, 4 aa, synthetic construct
AHSY

SEQ ID NO: 33485 - protein, 7 aa, synthetic construct
AHTDKLI

SEQ ID NO: 33486 - protein, 7 aa, synthetic construct
AFKQFWG

SEQ ID NO: 33487 - protein, 5 aa, synthetic construct
AHWGL

SEQ ID NO: 33488 - protein, 6 aa, synthetic construct
AHYAPI

SEQ ID NO: 33489 - protein, 7 aa, synthetic construct
AIGGNTD

SEQ ID NO: 33490 - protein, 5 aa, synthetic construct
AFYWR

SEQ ID NO: 33491 - skipped

SEQ ID NO: 33492 - protein, 6 aa, synthetic construct
AFYVLG

SEQ ID NO: 33493 - protein, 5 aa, synthetic construct
AFLDS

SEQ ID NO: 33494 - protein, 6 aa, synthetic construct
AFVDPT

SEQ ID NO: 33495 - protein, 6 aa, synthetic construct
AFVEHR

SEQ ID NO: 33496 - protein, 6 aa, synthetic construct
AFVGTP

SEQ ID NO: 33497 - protein, 6 aa, synthetic construct
AFVIFT

SEQ ID NO: 33498 - protein, 7 aa, synthetic construct
AFLPSWG

SEQ ID NO: 33499 - protein, 5 aa, synthetic construct
AFVLG

SEQ ID NO: 33500 - protein, 7 aa, synthetic construct
AFVLGQP

SEQ ID NO: 33501 - protein, 7 aa, synthetic construct
AFLPLLG

SEQ ID NO: 33502 - protein, 6 aa, synthetic construct
AFLLWG

SEQ ID NO: 33503 - protein, 6 aa, synthetic construct
AFVPSY

SEQ ID NO: 33504 - protein, 5 aa, synthetic construct
AFVRI

SEQ ID NO: 33505 - protein, 5 aa, synthetic construct
AFLLT

SEQ ID NO: 33506 - protein, 7 aa, synthetic construct
AFVVKLI

SEQ ID NO: 33507 - protein, 6 aa, synthetic construct
AFLLGL

SEQ ID NO: 33508 - protein, 6 aa, synthetic construct
AFWGAP

SEQ ID NO: 33509 - protein, 6 aa, synthetic construct
AFLKSS

SEQ ID NO: 33510 - protein, 5 aa, synthetic construct
AFWGV

SEQ ID NO: 33511 - protein, 6 aa, synthetic construct
AFLIPT

SEQ ID NO: 33512 - protein, 5 aa, synthetic construct
AFWWG

SEQ ID NO: 33513 - protein, 6 aa, synthetic construct
AFYCGR

SEQ ID NO: 33514 - protein, 7 aa, synthetic construct
AFLGVNS

SEQ ID NO: 33515 - protein, 5 aa, synthetic construct
AIIWG

SEQ ID NO: 33516 - protein, 7 aa, synthetic construct
AILGDTD

SEQ ID NO: 33517 - protein, 6 aa, synthetic construct
AILTGG

SEQ ID NO: 33518 - protein, 5 aa, synthetic construct
ALGGG

SEQ ID NO: 33519 - protein, 6 aa, synthetic construct
ALGGHR

SEQ ID NO: 33520 - protein, 7 aa, synthetic construct
AFKGSTH

SEQ ID NO: 33521 - protein, 6 aa, synthetic construct
ALGGNT

SEQ ID NO: 33522 - protein, 6 aa, synthetic construct
ALGGPT

SEQ ID NO: 33523 - protein, 6 aa, synthetic construct
AFKGNH

SEQ ID NO: 33524 - protein, 7 aa, synthetic construct
AFKGGDP

SEQ ID NO: 33525 - protein, 7 aa, synthetic construct
ALGGTTD

SEQ ID NO: 33526 - protein, 6 aa, synthetic construct
AFKAVL

SEQ ID NO: 33527 - protein, 6 aa, synthetic construct
ALGHTG

SEQ ID NO: 33528 - protein, 7 aa, synthetic construct
ALGITGG

SEQ ID NO: 33529 - protein, 5 aa, synthetic construct
ALGLH

SEQ ID NO: 33530 - protein, 6 aa, synthetic construct
ALGLPT

SEQ ID NO: 33531 - protein, 7 aa, synthetic construct
AFITTGG

SEQ ID NO: 33532 - protein, 6 aa, synthetic construct
ALGPSG

SEQ ID NO: 33533 - protein, 6 aa, synthetic construct
ALGSDR

SEQ ID NO: 33534 - protein, 6 aa, synthetic construct
ALGSWG

SEQ ID NO: 33535 - protein, 4 aa, synthetic construct
ALGV

SEQ ID NO: 33536 - protein, 5 aa, synthetic construct
ALGWG

SEQ ID NO: 33537 - protein, 7 aa, synthetic construct
ALGYLNS

SEQ ID NO: 33538 - protein, 6 aa, synthetic construct
AFILPI

SEQ ID NO: 33539 - protein, 4 aa, synthetic construct
ALKF

SEQ ID NO: 33540 - protein, 6 aa, synthetic construct
ALGGGG

SEQ ID NO: 33541 - protein, 7 aa, synthetic construct
ALGGDTD

SEQ ID NO: 33542 - protein, 5 aa, synthetic construct
AINRV

SEQ ID NO: 33543 - protein, 5 aa, synthetic construct
ALGEI

SEQ ID NO: 33544 - protein, 6 aa, synthetic construct
AIRFRG

SEQ ID NO: 33545 - protein, 5 aa, synthetic construct
AIRTC

SEQ ID NO: 33546 - protein, 5 aa, synthetic construct
AKDTG

SEQ ID NO: 33547 - protein, 6 aa, synthetic construct
AKPSSW

SEQ ID NO: 33548 - protein, 7 aa, synthetic construct
ALAEPGG

SEQ ID NO: 33549 - protein, 6 aa, synthetic construct
ALAFLR

SEQ ID NO: 33550 - protein, 7 aa, synthetic construct
ALAPGWG

SEQ ID NO: 33551 - protein, 4 aa, synthetic construct
ALCF

SEQ ID NO: 33552 - protein, 5 aa, synthetic construct
ALCWG

SEQ ID NO: 33553 - protein, 6 aa, synthetic construct
ALDSGG

SEQ ID NO: 33554 - protein, 5 aa, synthetic construct
ALDTD

SEQ ID NO: 33555 - protein, 7 aa, synthetic construct
AFKPSWG

SEQ ID NO: 33556 - protein, 7 aa, synthetic construct
ALDTEKL

SEQ ID NO: 33557 - protein, 5 aa, synthetic construct
ALDTG

SEQ ID NO: 33558 - protein, 5 aa, synthetic construct
ALFLR

SEQ ID NO: 33559 - protein, 7 aa, synthetic construct
ALFRLGV

SEQ ID NO: 33560 - protein, 7 aa, synthetic construct
ALFVLLG

SEQ ID NO: 33561 - protein, 7 aa, synthetic construct
AFKPFWG

SEQ ID NO: 33562 - protein, 6 aa, synthetic construct
ALGDFT

SEQ ID NO: 33563 - protein, 7 aa, synthetic construct
ALGDPIN

SEQ ID NO: 33564 - protein, 7 aa, synthetic construct
ALGDYKL

SEQ ID NO: 33565 - skipped

SEQ ID NO: 33566 - protein, 6 aa, synthetic construct
AFLQTG

SEQ ID NO: 33567 - protein, 6 aa, synthetic construct
ALKVLL

SEQ ID NO: 33568 - protein, 7 aa, synthetic construct
AFPSGDT

SEQ ID NO: 33569 - protein, 4 aa, synthetic construct
AFPV

SEQ ID NO: 33570 - protein, 6 aa, synthetic construct
AFPTPQ

SEQ ID NO: 33571 - protein, 7 aa, synthetic construct
AFRTTLG

SEQ ID NO: 33572 - protein, 7 aa, synthetic construct
AFRVAGR

SEQ ID NO: 33573 - protein, 5 aa, synthetic construct
AFPTG

SEQ ID NO: 33574 - protein, 6 aa, synthetic construct
AFRVLV

SEQ ID NO: 33575 - protein, 6 aa, synthetic construct
AFRVPT

SEQ ID NO: 33576 - protein, 6 aa, synthetic construct
AFPSWG

SEQ ID NO: 33577 - protein, 7 aa, synthetic construct
AFPSSLG

SEQ ID NO: 33578 - protein, 6 aa, synthetic construct
AFRYLQ

SEQ ID NO: 33579 - protein, 7 aa, synthetic construct
AFSDSGG

SEQ ID NO: 33580 - protein, 6 aa, synthetic construct
AFTWPS

SEQ ID NO: 33581 - protein, 6 aa, synthetic construct
AFSFLR

SEQ ID NO: 33582 - protein, 7 aa, synthetic construct
AFPPPPT

SEQ ID NO: 33583 - protein, 4 aa, synthetic construct
AFSH

SEQ ID NO: 33584 - protein, 7 aa, synthetic construct
AFSIISS

SEQ ID NO: 33585 - protein, 7 aa, synthetic construct
AFPHLGV

SEQ ID NO: 33586 - protein, 5 aa, synthetic construct
AFSLL

SEQ ID NO: 33587 - protein, 4 aa, synthetic construct
AFPH

SEQ ID NO: 33588 - protein, 5 aa, synthetic construct
AFPGV

SEQ ID NO: 33589 - protein, 7 aa, synthetic construct
AFSLYSG

SEQ ID NO: 33590 - protein, 6 aa, synthetic construct
AFPGPT

SEQ ID NO: 33591 - protein, 7 aa, synthetic construct
AFRSLTG

SEQ ID NO: 33592 - protein, 6 aa, synthetic construct
AFRSLT

SEQ ID NO: 33593 - protein, 6 aa, synthetic construct
AFRSGG

SEQ ID NO: 33594 - protein, 7 aa, synthetic construct
AFRSDKL

SEQ ID NO: 33595 - protein, 5 aa, synthetic construct
AFRGI

SEQ ID NO: 33596 - protein, 7 aa, synthetic construct
AFRGILL

SEQ ID NO: 33597 - protein, 6 aa, synthetic construct
AFRGPP

SEQ ID NO: 33598 - protein, 7 aa, synthetic construct
AFRGSWG

SEQ ID NO: 33599 - protein, 6 aa, synthetic construct
AFRGAN

SEQ ID NO: 33600 - protein, 5 aa, synthetic construct
AFRGV

SEQ ID NO: 33601 - protein, 6 aa, synthetic construct
AFRGYL

SEQ ID NO: 33602 - protein, 7 aa, synthetic construct
AFRHGGY

SEQ ID NO: 33603 - protein, 7 aa, synthetic construct
AFRHRYT

SEQ ID NO: 33604 - protein, 6 aa, synthetic construct
AFRIIL

SEQ ID NO: 33605 - protein, 7 aa, synthetic construct
AFRDDKL

SEQ ID NO: 33606 - protein, 6 aa, synthetic construct
AFRISP

SEQ ID NO: 33607 - skipped

SEQ ID NO: 33608 - protein, 6 aa, synthetic construct
AFQVGV

SEQ ID NO: 33609 - protein, 5 aa, synthetic construct
AFRLI

SEQ ID NO: 33610 - protein, 7 aa, synthetic construct
AFQANWG

SEQ ID NO: 33611 - protein, 6 aa, synthetic construct
AFPYWG

SEQ ID NO: 33612 - protein, 5 aa, synthetic construct
AFRLT

SEQ ID NO: 33613 - protein, 6 aa, synthetic construct
AFPWLG

SEQ ID NO: 33614 - protein, 7 aa, synthetic construct
AFPVPSG

SEQ ID NO: 33615 - protein, 6 aa, synthetic construct
AFRRWG

SEQ ID NO: 33616 - protein, 4 aa, synthetic construct
AFPD

SEQ ID NO: 33617 - protein, 6 aa, synthetic construct
AFSPFS

SEQ ID NO: 33618 - protein, 6 aa, synthetic construct
AFSPLL

SEQ ID NO: 33619 - protein, 4 aa, synthetic construct
AFLY

SEQ ID NO: 33620 - protein, 6 aa, synthetic construct
AFTGYS

SEQ ID NO: 33621 - protein, 5 aa, synthetic construct
AFTLR

SEQ ID NO: 33622 - protein, 7 aa, synthetic construct
AFTLSGG

SEQ ID NO: 33623 - protein, 6 aa, synthetic construct
AFTNWG

SEQ ID NO: 33624 - protein, 6 aa, synthetic construct
AFLVGR

SEQ ID NO: 33625 - protein, 7 aa, synthetic construct
AFTPLLG

SEQ ID NO: 33626 - protein, 6 aa, synthetic construct
AFTPLR

SEQ ID NO: 33627 - protein, 6 aa, synthetic construct
AFLRTG

SEQ ID NO: 33628 - protein, 6 aa, synthetic construct
AFTPSY

SEQ ID NO: 33629 - protein, 7 aa, synthetic construct
AFTPSYD

SEQ ID NO: 33630 - protein, 6 aa, synthetic construct
AFLRSG

SEQ ID NO: 33631 - protein, 6 aa, synthetic construct
AFTPTG

SEQ ID NO: 33632 - protein, 5 aa, synthetic construct
AFLRR

SEQ ID NO: 33633 - protein, 7 aa, synthetic construct
AFTQINS

SEQ ID NO: 33634 - protein, 5 aa, synthetic construct
AFLRM

SEQ ID NO: 33635 - protein, 4 aa, synthetic construct
AFTS

SEQ ID NO: 33636 - protein, 6 aa, synthetic construct
AFTSTG

SEQ ID NO: 33637 - protein, 5 aa, synthetic construct
AFTTR

SEQ ID NO: 33638 - protein, 6 aa, synthetic construct
AFTVGH

SEQ ID NO: 33639 - protein, 7 aa, synthetic construct
AFLRLGV

SEQ ID NO: 33640 - protein, 6 aa, synthetic construct
AFTVPT

SEQ ID NO: 33641 - protein, 7 aa, synthetic construct
AFTGKLI

SEQ ID NO: 33642 - protein, 7 aa, synthetic construct
AFTDILI

SEQ ID NO: 33643 - protein, 6 aa, synthetic construct
AFPAPG

SEQ ID NO: 33644 - protein, 7 aa, synthetic construct
AFTCSGG

SEQ ID NO: 33645 - protein, 6 aa, synthetic construct
AFPAGG

SEQ ID NO: 33646 - protein, 5 aa, synthetic construct
AFNWW

SEQ ID NO: 33647 - protein, 6 aa, synthetic construct
AFSPYG

SEQ ID NO: 33648 - protein, 7 aa, synthetic construct
AFSRLLG

SEQ ID NO: 33649 - protein, 6 aa, synthetic construct
AFSSLL

SEQ ID NO: 33650 - protein, 6 aa, synthetic construct
AFSSPG

SEQ ID NO: 33651 - protein, 7 aa, synthetic construct
AFNWGIN

SEQ ID NO: 33652 - protein, 5 aa, synthetic construct
AFNLR

SEQ ID NO: 33653 - protein, 6 aa, synthetic construct
AFSVGH

SEQ ID NO: 33654 - protein, 6 aa, synthetic construct
AFSVHR

SEQ ID NO: 33655 - protein, 6 aa, synthetic construct
AFSVVL

SEQ ID NO: 33656 - protein, 5 aa, synthetic construct
AFNLP

SEQ ID NO: 33657 - protein, 6 aa, synthetic construct
AFSWWI

SEQ ID NO: 33658 - protein, 5 aa, synthetic construct
AFNIP

SEQ ID NO: 33659 - protein, 5 aa, synthetic construct
AFSYG

SEQ ID NO: 33660 - protein, 5 aa, synthetic construct
AFSYL

SEQ ID NO: 33661 - protein, 7 aa, synthetic construct
AFNFLGV

SEQ ID NO: 33662 - protein, 7 aa, synthetic construct
AFSYPTG

SEQ ID NO: 33663 - protein, 7 aa, synthetic construct
AFSYTPG

SEQ ID NO: 33664 - protein, 6 aa, synthetic construct
AFMHSY

SEQ ID NO: 33665 - protein, 5 aa, synthetic construct
AFMGY

SEQ ID NO: 33666 - protein, 6 aa, synthetic construct
ALKVLG

SEQ ID NO: 33667 - protein, 7 aa, synthetic construct
AFILPGG

SEQ ID NO: 33668 - protein, 5 aa, synthetic construct
ASQIT

SEQ ID NO: 33669 - protein, 5 aa, synthetic construct
ASAGG

SEQ ID NO: 33670 - protein, 4 aa, synthetic construct
ARWG

SEQ ID NO: 33671 - skipped

SEQ ID NO: 33672 - protein, 6 aa, synthetic construct
ARYGIL

SEQ ID NO: 33673 - protein, 5 aa, synthetic construct
ARYIL

SEQ ID NO: 33674 - protein, 5 aa, synthetic construct
ACWLG

SEQ ID NO: 33675 - skipped

SEQ ID NO: 33676 - protein, 7 aa, synthetic construct
ACVLGTP

SEQ ID NO: 33677 - protein, 7 aa, synthetic construct
ACTRSGG

SEQ ID NO: 33678 - protein, 6 aa, synthetic construct
ASAFQP

SEQ ID NO: 33679 - protein, 5 aa, synthetic construct
ASAFS

SEQ ID NO: 33680 - protein, 6 aa, synthetic construct
ASFHGG

SEQ ID NO: 33681 - protein, 6 aa, synthetic construct
AQVNWG

SEQ ID NO: 33682 - protein, 6 aa, synthetic construct
ACTRPG

SEQ ID NO: 33683 - protein, 7 aa, synthetic construct
ACTPINS

SEQ ID NO: 33684 - protein, 6 aa, synthetic construct
ACTGGL

SEQ ID NO: 33685 - protein, 4 aa, synthetic construct
ACTG

SEQ ID NO: 33686 - protein, 6 aa, synthetic construct
ASFTPT

SEQ ID NO: 33687 - protein, 4 aa, synthetic construct
ACSY

SEQ ID NO: 33688 - protein, 5 aa, synthetic construct
ACSWG

SEQ ID NO: 33689 - protein, 6 aa, synthetic construct
ACSSWG

SEQ ID NO: 33690 - protein, 7 aa, synthetic construct
ACSRSGG

SEQ ID NO: 33691 - protein, 5 aa, synthetic construct
ASGGR

SEQ ID NO: 33692 - protein, 5 aa, synthetic construct
ARVPR

SEQ ID NO: 33693 - skipped

SEQ ID NO: 33694 - protein, 4 aa, synthetic construct
ARTD

SEQ ID NO: 33695 - protein, 7 aa, synthetic construct
ARSTDQL

SEQ ID NO: 33696 - protein, 7 aa, synthetic construct
AQYSPIN

SEQ ID NO: 33697 - protein, 5 aa, synthetic construct
AFCWG

SEQ ID NO: 33698 - protein, 6 aa, synthetic construct
ARAGIL

SEQ ID NO: 33699 - protein, 5 aa, synthetic construct
ARDTG

SEQ ID NO: 33700 - protein, 6 aa, synthetic construct
AFCGTP

SEQ ID NO: 33701 - protein, 5 aa, synthetic construct
ARGKL

SEQ ID NO: 33702 - protein, 6 aa, synthetic construct
AFAGVT

SEQ ID NO: 33703 - protein, 6 aa, synthetic construct
ARGRSD

SEQ ID NO: 33704 - protein, 6 aa, synthetic construct
ARGTLI

SEQ ID NO: 33705 - protein, 7 aa, synthetic construct
AEHRYTH

SEQ ID NO: 33706 - protein, 7 aa, synthetic construct
ARLIRAG

SEQ ID NO: 33707 - protein, 7 aa, synthetic construct
AEHRSTH

SEQ ID NO: 33708 - protein, 7 aa, synthetic construct
ARPDTLI

SEQ ID NO: 33709 - protein, 6 aa, synthetic construct
ARPTPI

SEQ ID NO: 33710 - protein, 7 aa, synthetic construct
ARRDKLI

SEQ ID NO: 33711 - protein, 6 aa, synthetic construct
ADWGTP

SEQ ID NO: 33712 - protein, 5 aa, synthetic construct
ARRTD

SEQ ID NO: 33713 - protein, 7 aa, synthetic construct
ADSLDWW

SEQ ID NO: 33714 - protein, 6 aa, synthetic construct
ARSGAP

SEQ ID NO: 33715 - protein, 6 aa, synthetic construct
ADRAGG

SEQ ID NO: 33716 - protein, 6 aa, synthetic construct
ARSPGE

SEQ ID NO: 33717 - protein, 7 aa, synthetic construct
ASGGSRP

SEQ ID NO: 33718 - protein, 4 aa, synthetic construct
ACSQ

SEQ ID NO: 33719 - protein, 5 aa, synthetic construct
ACSPT

SEQ ID NO: 33720 - protein, 6 aa, synthetic construct
ASLSPS

SEQ ID NO: 33721 - protein, 6 aa, synthetic construct
ASLSTG

SEQ ID NO: 33722 - protein, 6 aa, synthetic construct
ACRSYD

SEQ ID NO: 33723 - protein, 6 aa, synthetic construct
ACRSWG

SEQ ID NO: 33724 - protein, 6 aa, synthetic construct
ASLWLG

SEQ ID NO: 33725 - protein, 4 aa, synthetic construct
ASLY

SEQ ID NO: 33726 - protein, 4 aa, synthetic construct
ASNS

SEQ ID NO: 33727 - protein, 7 aa, synthetic construct
ACRSPIN

SEQ ID NO: 33728 - protein, 5 aa, synthetic construct
ASPAF

SEQ ID NO: 33729 - protein, 5 aa, synthetic construct
ACRPT

SEQ ID NO: 33730 - protein, 5 aa, synthetic construct
ACRPN

SEQ ID NO: 33731 - protein, 7 aa, synthetic construct
ACRLPLG

SEQ ID NO: 33732 - protein, 7 aa, synthetic construct
ACRKSWG

SEQ ID NO: 33733 - protein, 6 aa, synthetic construct
ASPLMG

SEQ ID NO: 33734 - protein, 7 aa, synthetic construct
ASPLSGG

SEQ ID NO: 33735 - protein, 5 aa, synthetic construct
ASPPT

SEQ ID NO: 33736 - protein, 6 aa, synthetic construct
ASPRTG

SEQ ID NO: 33737 - protein, 5 aa, synthetic construct
ACRGY

SEQ ID NO: 33738 - protein, 5 aa, synthetic construct
ASPTY

SEQ ID NO: 33739 - protein, 6 aa, synthetic construct
ASPVLR

SEQ ID NO: 33740 - protein, 7 aa, synthetic construct
ASPVYWS

SEQ ID NO: 33741 - protein, 5 aa, synthetic construct
ASPYR

SEQ ID NO: 33742 - protein, 6 aa, synthetic construct
ASLSTD

SEQ ID NO: 33743 - protein, 5 aa, synthetic construct
ACRTY

SEQ ID NO: 33744 - protein, 6 aa, synthetic construct
ASGPGG

SEQ ID NO: 33745 - protein, 7 aa, synthetic construct
ASLRPGG

SEQ ID NO: 33746 - protein, 5 aa, synthetic construct
ASGPT

SEQ ID NO: 33747 - protein, 7 aa, synthetic construct
ASGRPGT

SEQ ID NO: 33748 - protein, 7 aa, synthetic construct
ACSPSWG

SEQ ID NO: 33749 - protein, 5 aa, synthetic construct
AFRGG

SEQ ID NO: 33750 - protein, 7 aa, synthetic construct
ACSPSGG

SEQ ID NO: 33751 - protein, 5 aa, synthetic construct
ASHTY

SEQ ID NO: 33752 - protein, 5 aa, synthetic construct
ASILG

SEQ ID NO: 33753 - protein, 4 aa, synthetic construct
ACSP

SEQ ID NO: 33754 - protein, 7 aa, synthetic construct
ASILLWG

SEQ ID NO: 33755 - protein, 5 aa, synthetic construct
ASILR

SEQ ID NO: 33756 - protein, 6 aa, synthetic construct
ACSLGV

SEQ ID NO: 33757 - protein, 6 aa, synthetic construct
ASITGG

SEQ ID NO: 33758 - protein, 5 aa, synthetic construct
ACSLG

SEQ ID NO: 33759 - protein, 7 aa, synthetic construct
ACSINSS

SEQ ID NO: 33760 - protein, 5 aa, synthetic construct
ACSGG

SEQ ID NO: 33761 - protein, 5 aa, synthetic construct
ACRYL

SEQ ID NO: 33762 - protein, 7 aa, synthetic construct
ASLLGLG

SEQ ID NO: 33763 - protein, 6 aa, synthetic construct
ASLLGV

SEQ ID NO: 33764 - protein, 5 aa, synthetic construct
ACRWG

SEQ ID NO: 33765 - protein, 7 aa, synthetic construct
ACRVLWG

SEQ ID NO: 33766 - protein, 4 aa, synthetic construct
ASLP

SEQ ID NO: 33767 - protein, 6 aa, synthetic construct
AFDDKL

SEQ ID NO: 33768 - protein, 7 aa, synthetic construct
AQSWVQW

SEQ ID NO: 33769 - protein, 4 aa, synthetic construct
ALLG

SEQ ID NO: 33770 - protein, 6 aa, synthetic construct
AFGGPT

SEQ ID NO: 33771 - protein, 4 aa, synthetic construct
ALSY

SEQ ID NO: 33772 - protein, 7 aa, synthetic construct
AFGLAWG

SEQ ID NO: 33773 - protein, 4 aa, synthetic construct
AFGL

SEQ ID NO: 33774 - protein, 4 aa, synthetic construct
AFGI

SEQ ID NO: 33775 - protein, 6 aa, synthetic construct
ALTRSY

SEQ ID NO: 33776 - protein, 6 aa, synthetic construct
ALVSYR

SEQ ID NO: 33777 - protein, 7 aa, synthetic construct
ALVWNTD

SEQ ID NO: 33778 - protein, 7 aa, synthetic construct
ALYCGTP

SEQ ID NO: 33779 - protein, 4 aa, synthetic construct
ALYL

SEQ ID NO: 33780 - protein, 6 aa, synthetic construct
AFGGWG

SEQ ID NO: 33781 - protein, 6 aa, synthetic construct
AFGGPP

SEQ ID NO: 33782 - protein, 6 aa, synthetic construct
AQPPYD

SEQ ID NO: 33783 - protein, 4 aa, synthetic construct
AFGF

SEQ ID NO: 33784 - protein, 7 aa, synthetic construct
AFGETYS

SEQ ID NO: 33785 - protein, 5 aa, synthetic construct
APAYL

SEQ ID NO: 33786 - protein, 7 aa, synthetic construct
APCSDKL

SEQ ID NO: 33787 - protein, 7 aa, synthetic construct
AFGETLI

SEQ ID NO: 33788 - protein, 7 aa, synthetic construct
APCTDQL

SEQ ID NO: 33789 - protein, 7 aa, synthetic construct
APDRYTH

SEQ ID NO: 33790 - protein, 7 aa, synthetic construct
APDTPIN

SEQ ID NO: 33791 - protein, 6 aa, synthetic construct
APEDTE

SEQ ID NO: 33792 - protein, 7 aa, synthetic construct
APESDTD

SEQ ID NO: 33793 - protein, 6 aa, synthetic construct
ALSSLT

SEQ ID NO: 33794 - protein, 6 aa, synthetic construct
AFGPTR

SEQ ID NO: 33795 - protein, 4 aa, synthetic construct
AFGR

SEQ ID NO: 33796 - protein, 7 aa, synthetic construct
ALSIISS

SEQ ID NO: 33797 - protein, 7 aa, synthetic construct
AFIADKL

SEQ ID NO: 33798 - protein, 5 aa, synthetic construct
ALLGR

SEQ ID NO: 33799 - protein, 6 aa, synthetic construct
ALLNSS

SEQ ID NO: 33800 - protein, 7 aa, synthetic construct
AAFIGGT

SEQ ID NO: 33801 - protein, 6 aa, synthetic construct
ALLSVG

SEQ ID NO: 33802 - protein, 6 aa, synthetic construct
ALLSYR

SEQ ID NO: 33803 - protein, 6 aa, synthetic construct
AFHTGG

SEQ ID NO: 33804 - protein, 5 aa, synthetic construct
AFHRV

SEQ ID NO: 33805 - protein, 6 aa, synthetic construct
ALNPHR

SEQ ID NO: 33806 - protein, 6 aa, synthetic construct
ALPLLR

SEQ ID NO: 33807 - protein, 6 aa, synthetic construct
ALPSSG

SEQ ID NO: 33808 - protein, 6 aa, synthetic construct
ALPTGE

SEQ ID NO: 33809 - protein, 7 aa, synthetic construct
AFHGVNS

SEQ ID NO: 33810 - protein, 6 aa, synthetic construct
ALRGGT

SEQ ID NO: 33811 - protein, 4 aa, synthetic construct
AFGV

SEQ ID NO: 33812 - protein, 6 aa, synthetic construct
AFGSWG

SEQ ID NO: 33813 - protein, 5 aa, synthetic construct
ALRSY

SEQ ID NO: 33814 - protein, 5 aa, synthetic construct
ALRWG

SEQ ID NO: 33815 - skipped

SEQ ID NO: 33816 - protein, 5 aa, synthetic construct
ALSGG

SEQ ID NO: 33817 - protein, 7 aa, synthetic construct
ALSGGYT

SEQ ID NO: 33818 - protein, 4 aa, synthetic construct
APGG

SEQ ID NO: 33819 - protein, 6 aa, synthetic construct
AFGEKL

SEQ ID NO: 33820 - protein, 4 aa, synthetic construct
APGY

SEQ ID NO: 33821 - protein, 7 aa, synthetic construct
APSFGWG

SEQ ID NO: 33822 - protein, 4 aa, synthetic construct
APSG

SEQ ID NO: 33823 - protein, 6 aa, synthetic construct
APSINS

SEQ ID NO: 33824 - protein, 7 aa, synthetic construct
AFFLLSW

SEQ ID NO: 33825 - protein, 6 aa, synthetic construct
APSITH

SEQ ID NO: 33826 - protein, 7 aa, synthetic construct
AFFIKLG

SEQ ID NO: 33827 - protein, 6 aa, synthetic construct
AFFGGE

SEQ ID NO: 33828 - protein, 7 aa, synthetic construct
AFFFPGG

SEQ ID NO: 33829 - protein, 4 aa, synthetic construct
AFES

SEQ ID NO: 33830 - protein, 5 aa, synthetic construct
AFEEV

SEQ ID NO: 33831 - protein, 7 aa, synthetic construct
APTTCWG

SEQ ID NO: 33832 - protein, 6 aa, synthetic construct
AFDWRI

SEQ ID NO: 33833 - protein, 5 aa, synthetic construct
APVSY

SEQ ID NO: 33834 - protein, 7 aa, synthetic construct
AFDRSWG

SEQ ID NO: 33835 - protein, 7 aa, synthetic construct
APYTDKL

SEQ ID NO: 33836 - protein, 6 aa, synthetic construct
APYWGK

SEQ ID NO: 33837 - protein, 6 aa, synthetic construct
APYWGL

SEQ ID NO: 33838 - protein, 7 aa, synthetic construct
AQATAKL

SEQ ID NO: 33839 - protein, 5 aa, synthetic construct
AFDGG

SEQ ID NO: 33840 - protein, 7 aa, synthetic construct
AQATDQL

SEQ ID NO: 33841 - protein, 7 aa, synthetic construct
AFDEKLI

SEQ ID NO: 33842 - protein, 7 aa, synthetic construct
AFDDRLI

SEQ ID NO: 33843 - protein, 6 aa, synthetic construct
APSFLQ

SEQ ID NO: 33844 - protein, 7 aa, synthetic construct
APSACWG

SEQ ID NO: 33845 - protein, 6 aa, synthetic construct
AFGDTT

SEQ ID NO: 33846 - protein, 7 aa, synthetic construct
AFFLVLG

SEQ ID NO: 33847 - protein, 7 aa, synthetic construct
AFGDTIS

SEQ ID NO: 33848 - protein, 7 aa, synthetic construct
APISSSW

SEQ ID NO: 33849 - protein, 5 aa, synthetic construct
AFGDR

SEQ ID NO: 33850 - protein, 7 aa, synthetic construct
AFGAGDT

SEQ ID NO: 33851 - protein, 4 aa, synthetic construct
APLP

SEQ ID NO: 33852 - protein, 7 aa, synthetic construct
AFGAGDN

SEQ ID NO: 33853 - protein, 5 aa, synthetic construct
APLTG

SEQ ID NO: 33854 - protein, 4 aa, synthetic construct
AFFT

SEQ ID NO: 33855 - protein, 5 aa, synthetic construct
APNLG

SEQ ID NO: 33856 - protein, 5 aa, synthetic construct
APPLG

SEQ ID NO: 33857 - protein, 7 aa, synthetic construct
AFFSLGV

SEQ ID NO: 33858 - protein, 4 aa, synthetic construct
APPS

SEQ ID NO: 33859 - protein, 6 aa, synthetic construct
APPSFL

SEQ ID NO: 33860 - protein, 4 aa, synthetic construct
AFFS

SEQ ID NO: 33861 - protein, 7 aa, synthetic construct
APQAPIN

SEQ ID NO: 33862 - protein, 7 aa, synthetic construct
AFFRVLG

SEQ ID NO: 33863 - protein, 6 aa, synthetic construct
AFFRLG

SEQ ID NO: 33864 - protein, 6 aa, synthetic construct
APRAGG

SEQ ID NO: 33865 - protein, 7 aa, synthetic construct
APRPSSF

SEQ ID NO: 33866 - protein, 6 aa, synthetic construct
APRPSY

SEQ ID NO: 33867 - protein, 6 aa, synthetic construct
APRPTY

SEQ ID NO: 33868 - protein, 5 aa, synthetic construct
YRTWG

SEQ ID NO: 33869 - protein, 13 aa, synthetic construct
AMREGLGDTDKLI

SEQ ID NO: 33870 - protein, 12 aa, synthetic construct
AMREGDSTDKLI

SEQ ID NO: 33871 - protein, 13 aa, synthetic construct
AMREGWGIPDKLI

SEQ ID NO: 33872 - protein, 14 aa, synthetic construct
AMREGDGGYTDKLI

SEQ ID NO: 33873 - protein, 12 aa, synthetic construct
AMREPGGPDKLI

SEQ ID NO: 33874 - protein, 10 aa, synthetic construct
ASPGYTDKLI

SEQ ID NO: 33875 - protein, 13 aa, synthetic construct
AMREVLGDTDKLI

SEQ ID NO: 33876 - protein, 13 aa, synthetic construct
AMREGEGYTDKLI

SEQ ID NO: 33877 - protein, 10 aa, synthetic construct
AMRENTDKLI

SEQ ID NO: 33878 - protein, 13 aa, synthetic construct
AMREGLGATINSS

SEQ ID NO: 33879 - protein, 13 aa, synthetic construct
AMREGTGGYDKLI

SEQ ID NO: 33880 - protein, 12 aa, synthetic construct
AMREGGWVDKLI

SEQ ID NO: 33881 - protein, 12 aa, synthetic construct
AMRDGGYADKLI

SEQ ID NO: 33882 - protein, 12 aa, synthetic construct
AMRPGGITDKLI

SEQ ID NO: 33883 - protein, 15 aa, synthetic construct
AMREGSVWGKGDKLI

SEQ ID NO: 33884 - protein, 12 aa, synthetic construct
AMREGGDTDKLI

SEQ ID NO: 33885 - protein, 12 aa, synthetic construct
AMRLLGDTDKLI

SEQ ID NO: 33886 - protein, 15 aa, synthetic construct
AMREGTGGPYTDKLI

SEQ ID NO: 33887 - protein, 13 aa, synthetic construct
AMREVLDPTDKLI

SEQ ID NO: 33888 - protein, 12 aa, synthetic construct
AMRVLGNTDKLI

SEQ ID NO: 33889 - protein, 12 aa, synthetic construct
AMRELGDTDKLI

SEQ ID NO: 33890 - protein, 15 aa, synthetic construct
AMREFLVLGATDKLI

SEQ ID NO: 33891 - protein, 10 aa, synthetic construct
AMRENPNKLI

SEQ ID NO: 33892 - protein, 13 aa, synthetic construct
AMREGRGDTDKLI

SEQ ID NO: 33893 - protein, 12 aa, synthetic construct
AMRVLGDTDKLI

SEQ ID NO: 33894 - protein, 16 aa, synthetic construct
AMREGDWGIPHTDKLI

SEQ ID NO: 33895 - protein, 15 aa, synthetic construct
AMRNTGGYEGTDKLI

SEQ ID NO: 33896 - protein, 15 aa, synthetic construct
AMREWDYWGTTDKLI

SEQ ID NO: 33897 - protein, 17 aa, synthetic construct
AMREPCLPRGDTGDKLI

SEQ ID NO: 33898 - protein, 5 aa, synthetic construct
EDKLI

SEQ ID NO: 33899 - protein, 12 aa, synthetic construct
AMRMGDTTDKLI

SEQ ID NO: 33900 - protein, 15 aa, synthetic construct
AMREGPPTGDTDKLI

SEQ ID NO: 33901 - protein, 14 aa, synthetic construct
AMREGLGEYTDKLI

SEQ ID NO: 33902 - protein, 15 aa, synthetic construct
AMREDSGRANTDKLI

SEQ ID NO: 33903 - protein, 14 aa, synthetic construct
AMREGGDFYTDKLI

SEQ ID NO: 33904 - protein, 11 aa, synthetic construct
AMRFKTGAKLI

SEQ ID NO: 33905 - protein, 13 aa, synthetic construct
AMSPVLGALDKLI

SEQ ID NO: 33906 - protein, 11 aa, synthetic construct
PKEVTISLRSS

SEQ ID NO: 33907 - protein, 12 aa, synthetic construct
AMREGGDPRGLI

SEQ ID NO: 33908 - protein, 15 aa, synthetic construct
AMREVLGDTGTDKLI

SEQ ID NO: 33909 - protein, 14 aa, synthetic construct
AMRESTSWGIDKLI

SEQ ID NO: 33910 - protein, 13 aa, synthetic construct
AMREYWGIRDKLI

SEQ ID NO: 33911 - protein, 13 aa, synthetic construct
AMREGPGGLDKLI

SEQ ID NO: 33912 - protein, 7 aa, synthetic construct
AMTDKLI

SEQ ID NO: 33913 - protein, 14 aa, synthetic construct
AMREGWGIRPDKLI

SEQ ID NO: 33914 - protein, 10 aa, synthetic construct
ATLGARDKLI

SEQ ID NO: 33915 - protein, 11 aa, synthetic construct
AMREGWPDKLI

SEQ ID NO: 33916 - protein, 13 aa, synthetic construct
AMRDVGKYTDKLI

SEQ ID NO: 33917 - protein, 17 aa, synthetic construct
AMREARLLGIRYTDKLI

SEQ ID NO: 33918 - protein, 11 aa, synthetic construct
AMRDPYTDKLI

SEQ ID NO: 33919 - protein, 15 aa, synthetic construct
AMREAGGWGYTDKLI

SEQ ID NO: 33920 - protein, 9 aa, synthetic construct
AMKSTDKLI

SEQ ID NO: 33921 - protein, 16 aa, synthetic construct
ANSYFLGDRGPTDKLI

SEQ ID NO: 33922 - protein, 16 aa, synthetic construct
AMRVFPLGGKYTDKLI

SEQ ID NO: 33923 - protein, 10 aa, synthetic construct
AMRDYTDKLI

SEQ ID NO: 33924 - protein, 12 aa, synthetic construct
AMRESPDTDKLI

SEQ ID NO: 33925 - protein, 13 aa, synthetic construct
AMREGVGDTDKLI

SEQ ID NO: 33926 - protein, 12 aa, synthetic construct
AMREGRGYGGLI

SEQ ID NO: 33927 - protein, 14 aa, synthetic construct
AMRECTGGYADKLI

SEQ ID NO: 33928 - protein, 13 aa, synthetic construct
AMRGVLGETDKLI

SEQ ID NO: 33929 - protein, 8 aa, synthetic construct
AMSPDKLI

SEQ ID NO: 33930 - protein, 14 aa, synthetic construct
AMREGSYLDTDKLI

SEQ ID NO: 33931 - protein, 15 aa, synthetic construct
AMRESVLGDTADKLI

SEQ ID NO: 33932 - protein, 13 aa, synthetic construct
AMREGLGNTDKLI

SEQ ID NO: 33933 - protein, 15 aa, synthetic construct
AMRPVLGDTGTDKLI

SEQ ID NO: 33934 - protein, 7 aa, synthetic construct
AMSCKLI

SEQ ID NO: 33935 - protein, 15 aa, synthetic construct
AMRENTGGYGTDKLI

SEQ ID NO: 33936 - protein, 10 aa, synthetic construct
AMRERGYALI

SEQ ID NO: 33937 - protein, 9 aa, synthetic construct
GGYGDDKLI

SEQ ID NO: 33938 - protein, 13 aa, synthetic construct
AMRVLGDTADKLI

SEQ ID NO: 33939 - protein, 12 aa, synthetic construct
AKWGIQYTDKLI

SEQ ID NO: 33940 - protein, 12 aa, synthetic construct
AMRVGVNTDKLI

SEQ ID NO: 33941 - protein, 13 aa, synthetic construct
AMRGVWGNTDKLI

SEQ ID NO: 33942 - protein, 14 aa, synthetic construct
AMREGRDTGSDKLI

SEQ ID NO: 33943 - protein, 12 aa, synthetic construct
AMREYGDTRPLI

SEQ ID NO: 33944 - protein, 13 aa, synthetic construct
AMRELLRDTDKLI

SEQ ID NO: 33945 - protein, 12 aa, synthetic construct
AMRGTGGYEALI

SEQ ID NO: 33946 - protein, 13 aa, synthetic construct
AMREYWGMSDKLI

SEQ ID NO: 33947 - protein, 13 aa, synthetic construct
AMIYWGIRSDKLI

SEQ ID NO: 33948 - protein, 15 aa, synthetic construct
AMREGLGDTHTDKLI

SEQ ID NO: 33949 - protein, 17 aa, synthetic construct
AMREGIPTSGAPPDKLI

SEQ ID NO: 33950 - protein, 16 aa, synthetic construct
AMRDLTGGYAFTDKLI

SEQ ID NO: 33951 - protein, 13 aa, synthetic construct
AMREGDTRTDKLI

SEQ ID NO: 33952 - protein, 12 aa, synthetic construct
AMREGGGIGKLI

SEQ ID NO: 33953 - protein, 11 aa, synthetic construct
AMRDFLRGKLI

SEQ ID NO: 33954 - protein, 12 aa, synthetic construct
AMREGGYTDKLI

SEQ ID NO: 33955 - protein, 12 aa, synthetic construct
AMREGRGTDKLI

SEQ ID NO: 33956 - protein, 11 aa, synthetic construct
AMRVGIRGKLI

SEQ ID NO: 33957 - protein, 13 aa, synthetic construct
AMREGGYHTDKLI

SEQ ID NO: 33958 - protein, 14 aa, synthetic construct
AIRGYEEAYTDKLI

SEQ ID NO: 33959 - protein, 14 aa, synthetic construct
AMREGQRVYTDKLI

SEQ ID NO: 33960 - protein, 17 aa, synthetic construct
AMREGPSTGGPYTDKLI

SEQ ID NO: 33961 - protein, 13 aa, synthetic construct
AMREGWGIADKLI

SEQ ID NO: 33962 - protein, 12 aa, synthetic construct
AMREKGYTDKLI

SEQ ID NO: 33963 - protein, 11 aa, synthetic construct
AMRERTRGRSS

SEQ ID NO: 33964 - protein, 12 aa, synthetic construct
AMRDWGIPDKLI

SEQ ID NO: 33965 - protein, 11 aa, synthetic construct
AMRELSIDKLI

SEQ ID NO: 33966 - protein, 14 aa, synthetic construct
AMRESEGVYTDKLI

SEQ ID NO: 33967 - protein, 14 aa, synthetic construct
AMREGYWGIPDKLI

SEQ ID NO: 33968 - protein, 17 aa, synthetic construct
AMREGLDWGILYTDKLI

SEQ ID NO: 33969 - protein, 8 aa, synthetic construct
ASDTDKLI

SEQ ID NO: 33970 - protein, 14 aa, synthetic construct
AMRGWGIQYTDKLI

SEQ ID NO: 33971 - protein, 12 aa, synthetic construct
AMREGWGIRLLI

SEQ ID NO: 33972 - protein, 16 aa, synthetic construct
AMRDDVLGDTITDKLI

SEQ ID NO: 33973 - protein, 11 aa, synthetic construct
AMSTGGSDKLI

SEQ ID NO: 33974 - protein, 12 aa, synthetic construct
AMRLGDTRDKLI

SEQ ID NO: 33975 - protein, 13 aa, synthetic construct
AMRGLGYHTDKLI

SEQ ID NO: 33976 - protein, 12 aa, synthetic construct
AMRIPPGDTVLI

SEQ ID NO: 33977 - protein, 13 aa, synthetic construct
AMREGPGVTDKLI

SEQ ID NO: 33978 - protein, 9 aa, synthetic construct
AMREGDKLI

SEQ ID NO: 33979 - protein, 16 aa, synthetic construct
AMREGLWGIRGTDKLI

SEQ ID NO: 33980 - protein, 13 aa, synthetic construct
AMREEVGYTDKLI

SEQ ID NO: 33981 - protein, 12 aa, synthetic construct
AMREEGDTDKLI

SEQ ID NO: 33982 - protein, 15 aa, synthetic construct
AMRETSGGYGGDKLI

SEQ ID NO: 33983 - protein, 10 aa, synthetic construct
AMRGYNDKLI

SEQ ID NO: 33984 - protein, 11 aa, synthetic construct
AMRERGTDKLI

SEQ ID NO: 33985 - protein, 14 aa, synthetic construct
AMREYWGVYTDKLI

SEQ ID NO: 33986 - protein, 17 aa, synthetic construct
AMREGEPSYAFTVDKLI

SEQ ID NO: 33987 - protein, 14 aa, synthetic construct
AMREGGYATPINSS

SEQ ID NO: 33988 - protein, 13 aa, synthetic construct
AMREGIRDTDKLI

SEQ ID NO: 33989 - protein, 12 aa, synthetic construct
AMRLGDTPDKLI

SEQ ID NO: 33990 - protein, 15 aa, synthetic construct
AMREGTGGYDTDKLI

SEQ ID NO: 33991 - protein, 11 aa, synthetic construct
AMRDRLLRGGG

SEQ ID NO: 33992 - protein, 15 aa, synthetic construct
AMREIPTCGDTDKLI

SEQ ID NO: 33993 - protein, 14 aa, synthetic construct
AMREGTGGSTDKLI

SEQ ID NO: 33994 - protein, 11 aa, synthetic construct
AMRGGPLDKLI

SEQ ID NO: 33995 - protein, 14 aa, synthetic construct
AMRGTGGYHTDKLI

SEQ ID NO: 33996 - protein, 6 aa, synthetic construct
ACDKLI

SEQ ID NO: 33997 - protein, 11 aa, synthetic construct
AMGLGDPDKLI

SEQ ID NO: 33998 - protein, 14 aa, synthetic construct
AMRAGGYAGTDKLI

SEQ ID NO: 33999 - protein, 10 aa, synthetic construct
AMREELGGLI

SEQ ID NO: 34000 - protein, 16 aa, synthetic construct
AMREGLPHWGVPDKLI

SEQ ID NO: 34001 - protein, 14 aa, synthetic construct
AMRESTGGRTDKLI

SEQ ID NO: 34002 - protein, 12 aa, synthetic construct
AMREGRGIDKLI

SEQ ID NO: 34003 - protein, 15 aa, synthetic construct
AMRECTGGTGTAQLF

SEQ ID NO: 34004 - protein, 15 aa, synthetic construct
AMREPSYGGTPINSS

SEQ ID NO: 34005 - protein, 15 aa, synthetic construct
AMREEVPGGYTDKLI

SEQ ID NO: 34006 - protein, 16 aa, synthetic construct
AMREGEPYVGGPDKLI

SEQ ID NO: 34007 - protein, 11 aa, synthetic construct
AMREGEPDKLI

SEQ ID NO: 34008 - protein, 13 aa, synthetic construct
AMREGWGDTDKLI

SEQ ID NO: 34009 - protein, 17 aa, synthetic construct
AMREGASPVLGDTDKLI

SEQ ID NO: 34010 - protein, 14 aa, synthetic construct
AMRKYWGPYTDKLI

SEQ ID NO: 34011 - protein, 14 aa, synthetic construct
AMSVLGDTRTDKLI

SEQ ID NO: 34012 - protein, 13 aa, synthetic construct
AMREGDTRTINSS

SEQ ID NO: 34013 - protein, 17 aa, synthetic construct
AMRGLPELGDTDTDKLI

SEQ ID NO: 34014 - protein, 14 aa, synthetic construct
AMRDTGGYNADKLI

SEQ ID NO: 34015 - protein, 13 aa, synthetic construct
AMREGGIPPDKLI

SEQ ID NO: 34016 - protein, 12 aa, synthetic construct
AMREILGAYKLI

SEQ ID NO: 34017 - protein, 12 aa, synthetic construct
AMREGTGNDKLI

SEQ ID NO: 34018 - protein, 14 aa, synthetic construct
AMREVLGAYTDKLI

SEQ ID NO: 34019 - protein, 13 aa, synthetic construct
AMRAILGDTDKLI

SEQ ID NO: 34020 - protein, 13 aa, synthetic construct
AMRGLPDTTDKLI

SEQ ID NO: 34021 - protein, 13 aa, synthetic construct
AMRATGGSGDKLI

SEQ ID NO: 34022 - protein, 15 aa, synthetic construct
AMREDPYGGYPINSS

SEQ ID NO: 34023 - protein, 13 aa, synthetic construct
AMREMGVYTDKLI

SEQ ID NO: 34024 - protein, 16 aa, synthetic construct
AMRGPYWGIRNTDKLI

SEQ ID NO: 34025 - protein, 15 aa, synthetic construct
AMREGGWGTDTDKLI

SEQ ID NO: 34026 - protein, 16 aa, synthetic construct
AMREWFLPGGYTDKLI

SEQ ID NO: 34027 - protein, 13 aa, synthetic construct
AMREWGIGTDKLI

SEQ ID NO: 34028 - protein, 13 aa, synthetic construct
AMREGGGFTDKLI

SEQ ID NO: 34029 - protein, 15 aa, synthetic construct
AMRETGGSGITDKLI

SEQ ID NO: 34030 - protein, 12 aa, synthetic construct
AMRLGDTPINSS

SEQ ID NO: 34031 - protein, 16 aa, synthetic construct
AMRAFLPLLGSPINSS

SEQ ID NO: 34032 - protein, 14 aa, synthetic construct
AMRESGGSRRDKLI

SEQ ID NO: 34033 - protein, 15 aa, synthetic construct
AMRDSHGSRDTDKLI

SEQ ID NO: 34034 - protein, 16 aa, synthetic construct
AMRDWGIRERSTDKLI

SEQ ID NO: 34035 - protein, 9 aa, synthetic construct
ALGDTDKLI

SEQ ID NO: 34036 - protein, 15 aa, synthetic construct
AMREDPLPRYTDKLI

SEQ ID NO: 34037 - protein, 13 aa, synthetic construct
AMTLPTGDPDKLI

SEQ ID NO: 34038 - protein, 14 aa, synthetic construct
AMREVLGENTDKLI

SEQ ID NO: 34039 - protein, 10 aa, synthetic construct
AMSWGADKLI

SEQ ID NO: 34040 - protein, 8 aa, synthetic construct
RGFPDKLI

SEQ ID NO: 34041 - protein, 12 aa, synthetic construct
AMREGAYGWGPI

SEQ ID NO: 34042 - protein, 15 aa, synthetic construct
AMREVLGDIGTDKLI

SEQ ID NO: 34043 - protein, 13 aa, synthetic construct
AMREGDWGPINSS

SEQ ID NO: 34044 - protein, 6 aa, synthetic construct
AMGGLI

SEQ ID NO: 34045 - protein, 14 aa, synthetic construct
AMREVGDTRTDKLI

SEQ ID NO: 34046 - protein, 15 aa, synthetic construct
AMREILLGGYTDKLI

SEQ ID NO: 34047 - protein, 16 aa, synthetic construct
AMREGFLPWGIPDKLI

SEQ ID NO: 34048 - protein, 10 aa, synthetic construct
AMRGATDKLI

SEQ ID NO: 34049 - protein, 12 aa, synthetic construct
AMRDHWGIDKLI

SEQ ID NO: 34050 - protein, 18 aa, synthetic construct
AMREGLLWGIRVYTDKLI

SEQ ID NO: 34051 - protein, 13 aa, synthetic construct
AMRGYWGIPINSS

SEQ ID NO: 34052 - protein, 13 aa, synthetic construct
AMREGNWGFYKLI

SEQ ID NO: 34053 - protein, 11 aa, synthetic construct
AMREGGGYELI

SEQ ID NO: 34054 - protein, 13 aa, synthetic construct
AMREGDSTPINSS

SEQ ID NO: 34055 - protein, 16 aa, synthetic construct
AMRLHSLLGDTPINSS

SEQ ID NO: 34056 - protein, 13 aa, synthetic construct
AMRLGDTYTDKLI

SEQ ID NO: 34057 - protein, 15 aa, synthetic construct
AMREGQGGYYTDKLI

SEQ ID NO: 34058 - protein, 14 aa, synthetic construct
AMREWGDTYTDKLI

SEQ ID NO: 34059 - protein, 15 aa, synthetic construct
AKHGGGYAPYTDKLI

SEQ ID NO: 34060 - protein, 13 aa, synthetic construct
AMRGRIREGDKLI

SEQ ID NO: 34061 - protein, 16 aa, synthetic construct
AMREAGGYPGSTDKLI

SEQ ID NO: 34062 - protein, 12 aa, synthetic construct
AMRNWADTDKLI

SEQ ID NO: 34063 - protein, 13 aa, synthetic construct
AMREGPPGPDKLI

SEQ ID NO: 34064 - protein, 13 aa, synthetic construct
AMREGTGDTDKLI

SEQ ID NO: 34065 - protein, 14 aa, synthetic construct
AMRERTGGWPDKLI

SEQ ID NO: 34066 - protein, 12 aa, synthetic construct
AMRERGGYAELI

SEQ ID NO: 34067 - protein, 14 aa, synthetic construct
AMRETTRAYTDKLI

SEQ ID NO: 34068 - protein, 12 aa, synthetic construct
AMSPAGDTDKLI

SEQ ID NO: 34069 - protein, 15 aa, synthetic construct
AMREGRVLGDPDKLI

SEQ ID NO: 34070 - protein, 14 aa, synthetic construct
AMREGRGGIADKLI

SEQ ID NO: 34071 - protein, 15 aa, synthetic construct
AMREGWWGVYTDKLI

SEQ ID NO: 34072 - protein, 15 aa, synthetic construct
AMREIPTSGGLDKLI

SEQ ID NO: 34073 - protein, 12 aa, synthetic construct
AMREWGIPDKLI

SEQ ID NO: 34074 - protein, 18 aa, synthetic construct
AMREKSYVSGGYGSDKLI

SEQ ID NO: 34075 - protein, 15 aa, synthetic construct
AMRENLGDTEADKLI

SEQ ID NO: 34076 - protein, 15 aa, synthetic construct
AMREPILGSYTDKLI

SEQ ID NO: 34077 - protein, 13 aa, synthetic construct
AMRGDTRGTDKLI

SEQ ID NO: 34078 - protein, 11 aa, synthetic construct
AMREGGIRGLI

SEQ ID NO: 34079 - protein, 12 aa, synthetic construct
AMNPTVDNDKLI

SEQ ID NO: 34080 - protein, 12 aa, synthetic construct
AMSLVLGDDKLI

SEQ ID NO: 34081 - protein, 15 aa, synthetic construct
AMREGYVGIPTDKLI

SEQ ID NO: 34082 - protein, 12 aa, synthetic construct
AMREGLGADKLI

SEQ ID NO: 34083 - protein, 11 aa, synthetic construct
AMRDWGTDKLI

SEQ ID NO: 34084 - protein, 4 aa, synthetic construct
DKLI

SEQ ID NO: 34085 - protein, 12 aa, synthetic construct
AMREGGYADKLI

SEQ ID NO: 34086 - protein, 11 aa, synthetic construct
AMRLPVTDKLI

SEQ ID NO: 34087 - protein, 16 aa, synthetic construct
AMRDLLWGIRDTDKLI

SEQ ID NO: 34088 - protein, 13 aa, synthetic construct
AMRAPSMYWGIPI

SEQ ID NO: 34089 - protein, 15 aa, synthetic construct
AMRESGGYAGTDKLI

SEQ ID NO: 34090 - protein, 10 aa, synthetic construct
AMRQLGDKLI

SEQ ID NO: 34091 - protein, 12 aa, synthetic construct
AMRDGMRTDKLI

SEQ ID NO: 34092 - protein, 16 aa, synthetic construct
AMRDLLGDTVSTDKLI

SEQ ID NO: 34093 - protein, 11 aa, synthetic construct
AMREGPTDKLI

SEQ ID NO: 34094 - protein, 12 aa, synthetic construct
AMRVVGDSDKLI

SEQ ID NO: 34095 - protein, 14 aa, synthetic construct
AMRGWGIREDSTTL

SEQ ID NO: 34096 - protein, 20 aa, synthetic construct
AMREGLPSPYWGIRGTDKLI

SEQ ID NO: 34097 - protein, 15 aa, synthetic construct
AMRDFLLGDYTDKLI

SEQ ID NO: 34098 - protein, 7 aa, synthetic construct
AMSNVLI

SEQ ID NO: 34099 - protein, 14 aa, synthetic construct
AMRDFLPSVTDKLI

SEQ ID NO: 34100 - protein, 16 aa, synthetic construct
AMREGVWGIQYTDKLI

SEQ ID NO: 34101 - protein, 15 aa, synthetic construct
AMRATGGYLTPINSS

SEQ ID NO: 34102 - protein, 8 aa, synthetic construct
ARYTDKLI

SEQ ID NO: 34103 - protein, 9 aa, synthetic construct
AMRNTDKLI

SEQ ID NO: 34104 - protein, 13 aa, synthetic construct
AMRDLPPFTDKLI

SEQ ID NO: 34105 - protein, 12 aa, synthetic construct
AMSRGGYTDKLI

SEQ ID NO: 34106 - protein, 12 aa, synthetic construct
AMRGTGGSHKLI

SEQ ID NO: 34107 - protein, 16 aa, synthetic construct
AMREGKYWGIRADKLI

SEQ ID NO: 34108 - protein, 12 aa, synthetic construct
AMSPYWGDDKLI

SEQ ID NO: 34109 - protein, 12 aa, synthetic construct
AMRGGPNTDKLI

SEQ ID NO: 34110 - protein, 14 aa, synthetic construct
AMREGWWGIPDKLI

SEQ ID NO: 34111 - protein, 9 aa, synthetic construct
AMREYGKLI

SEQ ID NO: 34112 - protein, 13 aa, synthetic construct
AMREWDTRTDKLI

SEQ ID NO: 34113 - protein, 12 aa, synthetic construct
AMRGPRITDKLI

SEQ ID NO: 34114 - protein, 14 aa, synthetic construct
AMRECLGAYTDKLI

SEQ ID NO: 34115 - protein, 15 aa, synthetic construct
AMREKYWGPYTDKLI

SEQ ID NO: 34116 - protein, 11 aa, synthetic construct
AMREAGGYKLI

SEQ ID NO: 34117 - protein, 13 aa, synthetic construct
AMRVPTGGPDKLI

SEQ ID NO: 34118 - protein, 15 aa, synthetic construct
AMREVLGDTSTDKLI

SEQ ID NO: 34119 - protein, 18 aa, synthetic construct
AMREAFLVYWGAYTDKLI

SEQ ID NO: 34120 - protein, 15 aa, synthetic construct
AMREDWGIRDTDKLI

SEQ ID NO: 34121 - protein, 14 aa, synthetic construct
AMRENGGYAGDKLI

SEQ ID NO: 34122 - protein, 13 aa, synthetic construct
AMREQLGDTDKLI

SEQ ID NO: 34123 - protein, 16 aa, synthetic construct
AMSLLPTGDTYTDKLI

SEQ ID NO: 34124 - protein, 8 aa, synthetic construct
VARADKLI

SEQ ID NO: 34125 - protein, 5 aa, synthetic construct
AMREG

SEQ ID NO: 34126 - protein, 8 aa, synthetic construct
RTTTDKLI

SEQ ID NO: 34127 - protein, 16 aa, synthetic construct
AMRPFLRWGNYTDKLI

SEQ ID NO: 34128 - protein, 17 aa, synthetic construct
AMRENYGWGIPTPINSS

SEQ ID NO: 34129 - protein, 12 aa, synthetic construct
AMRPLPLTDKLI

SEQ ID NO: 34130 - protein, 15 aa, synthetic construct
AMREAPTGGNTDKLI

SEQ ID NO: 34131 - protein, 12 aa, synthetic construct
AMREPWGIPGLI

SEQ ID NO: 34132 - protein, 13 aa, synthetic construct
AMRPAFLRGDKLI

SEQ ID NO: 34133 - protein, 13 aa, synthetic construct
AMRDWGIPTDKLI

SEQ ID NO: 34134 - protein, 16 aa, synthetic construct
AMREGPYVGDTGGKLI

SEQ ID NO: 34135 - protein, 12 aa, synthetic construct
AMREGPGGDKLI

SEQ ID NO: 34136 - protein, 12 aa, synthetic construct
AMRAWGISINSS

SEQ ID NO: 34137 - protein, 17 aa, synthetic construct
AMREYTTWDTRSTDKLI

SEQ ID NO: 34138 - protein, 12 aa, synthetic construct
AMREGRLCDKLI

SEQ ID NO: 34139 - protein, 9 aa, synthetic construct
ATGGTDKLI

SEQ ID NO: 34140 - protein, 11 aa, synthetic construct
AMREGHEGELI

SEQ ID NO: 34141 - protein, 14 aa, synthetic construct
AMREGRIRVPDKLI

SEQ ID NO: 34142 - protein, 13 aa, synthetic construct
AMREGGDTADKLI

SEQ ID NO: 34143 - protein, 14 aa, synthetic construct
AMRPSPVLGADKLI

SEQ ID NO: 34144 - protein, 13 aa, synthetic construct
AMRELTGGFINSS

SEQ ID NO: 34145 - protein, 11 aa, synthetic construct
AMRGIRPDKLI

SEQ ID NO: 34146 - protein, 14 aa, synthetic construct
AMRETFRRGGYLLI

SEQ ID NO: 34147 - protein, 13 aa, synthetic construct
AMRAWGIRPINSS

SEQ ID NO: 34148 - protein, 18 aa, synthetic construct
AMRETSTWGIRGYTDKLI

SEQ ID NO: 34149 - protein, 12 aa, synthetic construct
AMREGTGGYSLI

SEQ ID NO: 34150 - protein, 14 aa, synthetic construct
AMREGTGGDTDKLI

SEQ ID NO: 34151 - protein, 14 aa, synthetic construct
AMRESTGGHTDKLI

SEQ ID NO: 34152 - protein, 9 aa, synthetic construct
AMRGPDKLI

SEQ ID NO: 34153 - protein, 17 aa, synthetic construct
AMREDFLPLLGDTDKLI

SEQ ID NO: 34154 - protein, 13 aa, synthetic construct
AMRGNEGGTDKLI

SEQ ID NO: 34155 - protein, 15 aa, synthetic construct
AMRESRLGDTTDKLI

SEQ ID NO: 34156 - protein, 13 aa, synthetic construct
AMREGGGYPGELI

SEQ ID NO: 34157 - protein, 16 aa, synthetic construct
AMREVSYVGGDYDKLI

SEQ ID NO: 34158 - protein, 15 aa, synthetic construct
AMRDSSGGYAADKLI

SEQ ID NO: 34159 - protein, 19 aa, synthetic construct
AMREGGLLFHWGILSDKLI

SEQ ID NO: 34160 - protein, 13 aa, synthetic construct
AMREGPSYTDKLI

SEQ ID NO: 34161 - protein, 16 aa, synthetic construct
AMREAFLRTGDTDKLI

SEQ ID NO: 34162 - protein, 14 aa, synthetic construct
AMREGPTGDTLNSS

SEQ ID NO: 34163 - protein, 11 aa, synthetic construct
AMSTGGTINSS

SEQ ID NO: 34164 - protein, 12 aa, synthetic construct
AMREGIRSDKLI

SEQ ID NO: 34165 - protein, 14 aa, synthetic construct
AMREGLPGWPDKLI

SEQ ID NO: 34166 - protein, 15 aa, synthetic construct
AMTNTSTGQYTDKLI

SEQ ID NO: 34167 - protein, 15 aa, synthetic construct
AMREGRTGGSTDKLI

SEQ ID NO: 34168 - protein, 14 aa, synthetic construct
AMREGIRYGTDKLI

SEQ ID NO: 34169 - protein, 14 aa, synthetic construct
AMRDLTGGYPINSS

SEQ ID NO: 34170 - protein, 15 aa, synthetic construct
AMRGGLYWGYPDKLI

SEQ ID NO: 34171 - protein, 13 aa, synthetic construct
AMREAGGNTDKLI

SEQ ID NO: 34172 - protein, 12 aa, synthetic construct
AMRGGPTPINSS

SEQ ID NO: 34173 - protein, 11 aa, synthetic construct
AMRVWGIPKLI

SEQ ID NO: 34174 - protein, 12 aa, synthetic construct
AMRKHPMTAQLF

SEQ ID NO: 34175 - protein, 13 aa, synthetic construct
AMREGLGDTGKLI

SEQ ID NO: 34176 - protein, 16 aa, synthetic construct
AIREPYWGILYTDKLI

SEQ ID NO: 34177 - protein, 16 aa, synthetic construct
AMREGHPTCRDTDKLI

SEQ ID NO: 34178 - protein, 14 aa, synthetic construct
AMTCTGGYATDKLI

SEQ ID NO: 34179 - protein, 11 aa, synthetic construct
AMRELGDPKLI

SEQ ID NO: 34180 - protein, 16 aa, synthetic construct
AMREKSGDKGDTDKLI

SEQ ID NO: 34181 - protein, 14 aa, synthetic construct
AMREAVLGDTDKLI

SEQ ID NO: 34182 - protein, 15 aa, synthetic construct
AMRGLPTCWGMGKLI

SEQ ID NO: 34183 - protein, 11 aa, synthetic construct
AMRGTDTDKLI

SEQ ID NO: 34184 - protein, 16 aa, synthetic construct
AMREGGVGASSPDKLI

SEQ ID NO: 34185 - protein, 14 aa, synthetic construct
AMREGPGGYTDKLI

SEQ ID NO: 34186 - protein, 15 aa, synthetic construct
AMRELGDTPYTDKLI

SEQ ID NO: 34187 - protein, 15 aa, synthetic construct
AMIRKEYWGITDKLI

SEQ ID NO: 34188 - protein, 8 aa, synthetic construct
AIGYINSS

SEQ ID NO: 34189 - protein, 11 aa, synthetic construct
AMREKEGIQLI

SEQ ID NO: 34190 - protein, 15 aa, synthetic construct
AMRESTGGYKPDKLI

SEQ ID NO: 34191 - protein, 13 aa, synthetic construct
AMIGDNGYTDKLI

SEQ ID NO: 34192 - protein, 12 aa, synthetic construct
AMKGYWGTDKLI

SEQ ID NO: 34193 - protein, 11 aa, synthetic construct
AMRERDTDKLI

SEQ ID NO: 34194 - protein, 11 aa, synthetic construct
AMREGDTDKLI

SEQ ID NO: 34195 - protein, 16 aa, synthetic construct
AMREDTRTGYATDKLI

SEQ ID NO: 34196 - protein, 14 aa, synthetic construct
AMREGEGGHTDKLI

SEQ ID NO: 34197 - protein, 14 aa, synthetic construct
AMRAGLGDTPINSS

SEQ ID NO: 34198 - protein, 16 aa, synthetic construct
AMREDSYSGANTDKLI

SEQ ID NO: 34199 - protein, 15 aa, synthetic construct
AMREGHWGVYTDKLI

SEQ ID NO: 34200 - protein, 17 aa, synthetic construct
AMREGSTGGYGDPDKLI

SEQ ID NO: 34201 - protein, 11 aa, synthetic construct
AMREGGPDKLI

SEQ ID NO: 34202 - protein, 18 aa, synthetic construct
AMREVVLGDTTEYTDKLI

SEQ ID NO: 34203 - protein, 13 aa, synthetic construct
AMRDLGDTDDKLI

SEQ ID NO: 34204 - protein, 10 aa, synthetic construct
AMRDHTDKLI

SEQ ID NO: 34205 - protein, 15 aa, synthetic construct
AMREGTGGSYTDKLI

SEQ ID NO: 34206 - protein, 12 aa, synthetic construct
AMREGSLTAQLF

SEQ ID NO: 34207 - protein, 13 aa, synthetic construct
AMRGGIRYTDKLI

SEQ ID NO: 34208 - protein, 13 aa, synthetic construct
AMRDLGDRGDKLI

SEQ ID NO: 34209 - protein, 13 aa, synthetic construct
AMREGGIPSDKLI

SEQ ID NO: 34210 - protein, 13 aa, synthetic construct
AMREGVGNTDKLI

SEQ ID NO: 34211 - protein, 14 aa, synthetic construct
AMTTGGYMSADKLI

SEQ ID NO: 34212 - protein, 16 aa, synthetic construct
AMREGRGSGGYSDKLI

SEQ ID NO: 34213 - protein, 12 aa, synthetic construct
AMRVPTLGYELI

SEQ ID NO: 34214 - protein, 11 aa, synthetic construct
AMRPSTPINSS

SEQ ID NO: 34215 - protein, 15 aa, synthetic construct
AMREGLLGDEADKLI

SEQ ID NO: 34216 - protein, 15 aa, synthetic construct
AMREGGVGGYGDKLI

SEQ ID NO: 34217 - protein, 16 aa, synthetic construct
AMREGPYWGIRPDKLI

SEQ ID NO: 34218 - protein, 12 aa, synthetic construct
AMREGLGVLKLI

SEQ ID NO: 34219 - protein, 13 aa, synthetic construct
AMRDLSSYTDKLI

SEQ ID NO: 34220 - protein, 15 aa, synthetic construct
AMREGALGGYTDKLI

SEQ ID NO: 34221 - protein, 10 aa, synthetic construct
AMREGGRKLI

SEQ ID NO: 34222 - protein, 8 aa, synthetic construct
AMRPDKLI

SEQ ID NO: 34223 - protein, 14 aa, synthetic construct
AMREGGPKYTDKLI

SEQ ID NO: 34224 - protein, 11 aa, synthetic construct
AMREGNTDKLI

SEQ ID NO: 34225 - protein, 12 aa, synthetic construct
AMRILGDTRGLI

SEQ ID NO: 34226 - protein, 14 aa, synthetic construct
AMRGPYGDTPDKLI

SEQ ID NO: 34227 - protein, 16 aa, synthetic construct
AMRGVLGDTDYTDKLI

SEQ ID NO: 34228 - protein, 10 aa, synthetic construct
AMREGLDPLI

SEQ ID NO: 34229 - protein, 13 aa, synthetic construct
AMRGVLGDTDKLI

SEQ ID NO: 34230 - protein, 13 aa, synthetic construct
ANEKGGGYADKLI

SEQ ID NO: 34231 - protein, 16 aa, synthetic construct
AMREGPLPWGIRINSS

SEQ ID NO: 34232 - protein, 14 aa, synthetic construct
AMRGLGDIWTDKLI

SEQ ID NO: 34233 - protein, 15 aa, synthetic construct
AMRESSYRGIRGKLI

SEQ ID NO: 34234 - protein, 13 aa, synthetic construct
AMRVGGYRADKLI

SEQ ID NO: 34235 - protein, 17 aa, synthetic construct
AMREGSVTGGRYTDKLI

SEQ ID NO: 34236 - protein, 14 aa, synthetic construct
AMRAGGYASTDKLI

SEQ ID NO: 34237 - protein, 11 aa, synthetic construct
AMRSRYTDKLI

SEQ ID NO: 34238 - protein, 13 aa, synthetic construct
AMRVTGGRTDKLI

SEQ ID NO: 34239 - protein, 15 aa, synthetic construct
AMREGSGGIRTDKLI

SEQ ID NO: 34240 - protein, 18 aa, synthetic construct
AMRGLPRGGGYQATDKLI

SEQ ID NO: 34241 - protein, 14 aa, synthetic construct
AMREGLGDRTDKLI

SEQ ID NO: 34242 - protein, 12 aa, synthetic construct
AMRVLGDPDKLI

SEQ ID NO: 34243 - protein, 11 aa, synthetic construct
AMRERDTINSS

SEQ ID NO: 34244 - protein, 9 aa, synthetic construct
AMRGFLQSL

SEQ ID NO: 34245 - protein, 16 aa, synthetic construct
AMREGSTRIGIPINSS

SEQ ID NO: 34246 - protein, 17 aa, synthetic construct
AMREGYVVLGDHTDKLI

SEQ ID NO: 34247 - protein, 13 aa, synthetic construct
AMRLGDTRTDKLI

SEQ ID NO: 34248 - protein, 12 aa, synthetic construct
AMREGWGQRKLI

SEQ ID NO: 34249 - protein, 17 aa, synthetic construct
AMSLPSFLTGGYADKLI

SEQ ID NO: 34250 - protein, 16 aa, synthetic construct
AMREGGLGDRYTDKLI

SEQ ID NO: 34251 - protein, 13 aa, synthetic construct
AMREGGYGVDKLI

SEQ ID NO: 34252 - protein, 17 aa, synthetic construct
AMSPSYVLGDTATDKLI

SEQ ID NO: 34253 - protein, 16 aa, synthetic construct
AMREGPPLLGDTDKLI

SEQ ID NO: 34254 - protein, 17 aa, synthetic construct
AMREPFVTGGYDTDKLI

SEQ ID NO: 34255 - protein, 15 aa, synthetic construct
AMREVLLGDLTDKLI

SEQ ID NO: 34256 - protein, 13 aa, synthetic construct
AMSLGDRGGDKLI

SEQ ID NO: 34257 - protein, 14 aa, synthetic construct
AMREGGGSNTDKLI

SEQ ID NO: 34258 - protein, 14 aa, synthetic construct
AMRGFLPSIRGKLI

SEQ ID NO: 34259 - protein, 14 aa, synthetic construct
AMREVPTWGIDKLI

SEQ ID NO: 34260 - protein, 14 aa, synthetic construct
AMRDPTGGHTDKLI

SEQ ID NO: 34261 - protein, 14 aa, synthetic construct
AMREGGGGYPDKLI

SEQ ID NO: 34262 - protein, 15 aa, synthetic construct
AMRIPTSTGGTDKLI

SEQ ID NO: 34263 - protein, 13 aa, synthetic construct
AMRSFLPLLGGLI

SEQ ID NO: 34264 - protein, 14 aa, synthetic construct
AMREYWGEYTDKLI

SEQ ID NO: 34265 - protein, 17 aa, synthetic construct
AMRDPSYVWGSYTDKLI

SEQ ID NO: 34266 - protein, 18 aa, synthetic construct
AMREGGGLEPPGYTDKLI

SEQ ID NO: 34267 - protein, 14 aa, synthetic construct
AMREGWGPTPINSS

SEQ ID NO: 34268 - protein, 17 aa, synthetic construct
AMREYLRLGDTRAINSS

SEQ ID NO: 34269 - protein, 12 aa, synthetic construct
AMRCTGGTDKLI

SEQ ID NO: 34270 - protein, 15 aa, synthetic construct
AMRGLPTGGYTDKLI

SEQ ID NO: 34271 - protein, 13 aa, synthetic construct
AMREGYWGPLGLI

SEQ ID NO: 34272 - protein, 14 aa, synthetic construct
AMREVLGVHTDKLI

SEQ ID NO: 34273 - protein, 17 aa, synthetic construct
AMRERVPLGDTNTDKLI

SEQ ID NO: 34274 - protein, 15 aa, synthetic construct
AMRGLGDTRTPINSS

SEQ ID NO: 34275 - protein, 14 aa, synthetic construct
AMREGWLGDTDKLI

SEQ ID NO: 34276 - protein, 12 aa, synthetic construct
AMREEGHPAQLF

SEQ ID NO: 34277 - protein, 11 aa, synthetic construct
AMREWGILKLI

SEQ ID NO: 34278 - protein, 13 aa, synthetic construct
AMRVSSYGTDKLI

SEQ ID NO: 34279 - protein, 14 aa, synthetic construct
AMREGRRRNTDKLI

SEQ ID NO: 34280 - protein, 14 aa, synthetic construct
AMREGWGMYTDKLI

SEQ ID NO: 34281 - protein, 12 aa, synthetic construct
AMRESLLGDKLI

SEQ ID NO: 34282 - protein, 12 aa, synthetic construct
AMRETGGTDKLI

SEQ ID NO: 34283 - protein, 13 aa, synthetic construct
AMREGGGSTDKLI

SEQ ID NO: 34284 - protein, 12 aa, synthetic construct
AMRETPDTDKLI

SEQ ID NO: 34285 - protein, 12 aa, synthetic construct
AMREGRGSDKLI

SEQ ID NO: 34286 - protein, 10 aa, synthetic construct
AMRELLGSFI

SEQ ID NO: 34287 - protein, 15 aa, synthetic construct
AMREGGWGIRGDKLI

SEQ ID NO: 34288 - protein, 7 aa, synthetic construct
AMRGKLI

SEQ ID NO: 34289 - protein, 14 aa, synthetic construct
AMREKRGIRGDKLI

SEQ ID NO: 34290 - protein, 15 aa, synthetic construct
AMRGSTGGLGPDKLI

SEQ ID NO: 34291 - protein, 12 aa, synthetic construct
AMREGWGIRALI

SEQ ID NO: 34292 - protein, 13 aa, synthetic construct
AMRGTGGYPDKLI

SEQ ID NO: 34293 - protein, 17 aa, synthetic construct
AMREGLSHWGIRPINSS

SEQ ID NO: 34294 - protein, 15 aa, synthetic construct
AMRDWGIRGLTDKLI

SEQ ID NO: 34295 - protein, 13 aa, synthetic construct
AMIILGDYTDKLI

SEQ ID NO: 34296 - protein, 15 aa, synthetic construct
AMRESYWGIRGDKLI

SEQ ID NO: 34297 - protein, 14 aa, synthetic construct
AMRESYWVTPINSS

SEQ ID NO: 34298 - protein, 15 aa, synthetic construct
AMREAFLPGTPINSS

SEQ ID NO: 34299 - protein, 14 aa, synthetic construct
AMREVGGSYTDKLI

SEQ ID NO: 34300 - protein, 18 aa, synthetic construct
AMREPSSTGGYVYTDKLI

SEQ ID NO: 34301 - protein, 17 aa, synthetic construct
AMREPLRPYWGTPINSS

SEQ ID NO: 34302 - protein, 14 aa, synthetic construct
AMREGDPTDTDKLI

SEQ ID NO: 34303 - protein, 13 aa, synthetic construct
AMRVLRSPPDKLI

SEQ ID NO: 34304 - protein, 16 aa, synthetic construct
AMREAFLWGIPPDKLI

SEQ ID NO: 34305 - protein, 14 aa, synthetic construct
AMREGLGDTVDKLI

SEQ ID NO: 34306 - protein, 18 aa, synthetic construct
AMREPSYVATGGYTDKLI

SEQ ID NO: 34307 - protein, 15 aa, synthetic construct
AMREGPLGANTDKLI

SEQ ID NO: 34308 - protein, 11 aa, synthetic construct
AKLGEGTDKLI

SEQ ID NO: 34309 - protein, 14 aa, synthetic construct
AMRAFLRGDTDKLI

SEQ ID NO: 34310 - protein, 13 aa, synthetic construct
AMRILHWGTDKLI

SEQ ID NO: 34311 - protein, 12 aa, synthetic construct
AMSWGIQADKLI

SEQ ID NO: 34312 - protein, 15 aa, synthetic construct
AMRDLLPTWNADKLI

SEQ ID NO: 34313 - protein, 10 aa, synthetic construct
AMREPFDKLI

SEQ ID NO: 34314 - protein, 16 aa, synthetic construct
AMRDLPTCPRVPDKLI

SEQ ID NO: 34315 - protein, 13 aa, synthetic construct
AMREGGIRGINSS

SEQ ID NO: 34316 - protein, 14 aa, synthetic construct
AMREGSYVYSDKLI

SEQ ID NO: 34317 - protein, 15 aa, synthetic construct
AMREIPTGGYTDKLI

SEQ ID NO: 34318 - protein, 15 aa, synthetic construct
AMREGPRGDHTDKLI

SEQ ID NO: 34319 - protein, 14 aa, synthetic construct
AMTALRRGDGGPLI

SEQ ID NO: 34320 - protein, 12 aa, synthetic construct
AMRESTGGNKLI

SEQ ID NO: 34321 - protein, 15 aa, synthetic construct
AMREIPTYWGVDKLI

SEQ ID NO: 34322 - protein, 16 aa, synthetic construct
AMRESYVGIRGTDKLI

SEQ ID NO: 34323 - protein, 12 aa, synthetic construct
AMREVGGTDKLI

SEQ ID NO: 34324 - protein, 10 aa, synthetic construct
AILRGYDKLI

SEQ ID NO: 34325 - protein, 13 aa, synthetic construct
AMRESLTGADKLI

SEQ ID NO: 34326 - protein, 15 aa, synthetic construct
AMREVGDTPGPDKLI

SEQ ID NO: 34327 - protein, 12 aa, synthetic construct
AMREEGIPDKLI

SEQ ID NO: 34328 - protein, 15 aa, synthetic construct
AMREGPVLGDNDKLI

SEQ ID NO: 34329 - protein, 17 aa, synthetic construct
AMREGSYTLLGDPDKLI

SEQ ID NO: 34330 - protein, 14 aa, synthetic construct
AMRGKYWGIPDKLI

SEQ ID NO: 34331 - protein, 14 aa, synthetic construct
AMREEYEGNTDKLI

SEQ ID NO: 34332 - protein, 10 aa, synthetic construct
AMRESGDKLI

SEQ ID NO: 34333 - protein, 13 aa, synthetic construct
AMREVWGIPGKLI

SEQ ID NO: 34334 - protein, 20 aa, synthetic construct
AMREGQIPRLGVGAYTDKLI

SEQ ID NO: 34335 - protein, 15 aa, synthetic construct
AMREGLGDMYTDKLI

SEQ ID NO: 34336 - protein, 15 aa, synthetic construct
AIREGTGAPYTDKLI

SEQ ID NO: 34337 - protein, 17 aa, synthetic construct
AMREAFLLGDTYTDKLI

SEQ ID NO: 34338 - protein, 17 aa, synthetic construct
AMREGALLGVPYTDKLI

SEQ ID NO: 34339 - protein, 15 aa, synthetic construct
AMREGRLGDNTDKLI

SEQ ID NO: 34340 - protein, 13 aa, synthetic construct
AMREVLGDTCKLI

SEQ ID NO: 34341 - protein, 12 aa, synthetic construct
AMRMGDNTDKLI

SEQ ID NO: 34342 - protein, 13 aa, synthetic construct
AMREGSGDTLETH

SEQ ID NO: 34343 - protein, 12 aa, synthetic construct
AMWGGLYTDKLI

SEQ ID NO: 34344 - protein, 11 aa, synthetic construct
AMRSYWGIPLI

SEQ ID NO: 34345 - protein, 15 aa, synthetic construct
AMREGVGGGCTDKLI

SEQ ID NO: 34346 - protein, 11 aa, synthetic construct
AMREILGDKLI

SEQ ID NO: 34347 - protein, 13 aa, synthetic construct
AMREGGGYTDKLI

SEQ ID NO: 34348 - protein, 14 aa, synthetic construct
AMREGLGGHTDKLI

SEQ ID NO: 34349 - protein, 15 aa, synthetic construct
AMREVLGDRDTDKLI

SEQ ID NO: 34350 - protein, 12 aa, synthetic construct
AMREGPLGSKLI

SEQ ID NO: 34351 - protein, 18 aa, synthetic construct
AMRTFLPVLGVQYTDKLI

SEQ ID NO: 34352 - protein, 13 aa, synthetic construct
AMREASLCTGTLI

SEQ ID NO: 34353 - protein, 9 aa, synthetic construct
AMRRADKLI

SEQ ID NO: 34354 - protein, 14 aa, synthetic construct
AMRELGDTPTDKLI

SEQ ID NO: 34355 - protein, 15 aa, synthetic construct
AMREVLYWGIPKNSS

SEQ ID NO: 34356 - protein, 12 aa, synthetic construct
AMREGGDTRQLI

SEQ ID NO: 34357 - protein, 14 aa, synthetic construct
AMREGRGSLTAQLF

SEQ ID NO: 34358 - protein, 15 aa, synthetic construct
AMRDNHWGIGGDKLI

SEQ ID NO: 34359 - protein, 15 aa, synthetic construct
AMRDVLGDTDTDKLI

SEQ ID NO: 34360 - protein, 14 aa, synthetic construct
AMRALGEKYTDKLI

SEQ ID NO: 34361 - protein, 17 aa, synthetic construct
AMREVPTSRGSLTAQLF

SEQ ID NO: 34362 - protein, 19 aa, synthetic construct
AMRGSLPTGGGYEYTDKLI

SEQ ID NO: 34363 - protein, 15 aa, synthetic construct
AMREGNFWGTLDKLI

SEQ ID NO: 34364 - protein, 15 aa, synthetic construct
AMREITGGGHTDKLI

SEQ ID NO: 34365 - protein, 13 aa, synthetic construct
AMSPGGRTPINSS

SEQ ID NO: 34366 - protein, 14 aa, synthetic construct
AMREGGGPTPINSS

SEQ ID NO: 34367 - protein, 11 aa, synthetic construct
AMREGIRYKLI

SEQ ID NO: 34368 - protein, 13 aa, synthetic construct
AMRDYWGTGGKLI

SEQ ID NO: 34369 - protein, 10 aa, synthetic construct
AMWGIPINSS

SEQ ID NO: 34370 - protein, 17 aa, synthetic construct
AMREDYSYRGSYTNKLI

SEQ ID NO: 34371 - protein, 13 aa, synthetic construct
AMRPYWGITDKLI

SEQ ID NO: 34372 - protein, 10 aa, synthetic construct
AMRTGERGLI

SEQ ID NO: 34373 - protein, 15 aa, synthetic construct
AMREPCTGKYTDKLI

SEQ ID NO: 34374 - protein, 17 aa, synthetic construct
AMREGVLRRKGGGHKLI

SEQ ID NO: 34375 - protein, 15 aa, synthetic construct
AMRERLGDTGPINSS

SEQ ID NO: 34376 - protein, 13 aa, synthetic construct
AMRGWGIRPINSS

SEQ ID NO: 34377 - protein, 12 aa, synthetic construct
AMRERGEADKLI

SEQ ID NO: 34378 - protein, 19 aa, synthetic construct
AMREPGWVLGDTRNTDKLI

SEQ ID NO: 34379 - protein, 17 aa, synthetic construct
AMREGSLVLGEYTDKLI

SEQ ID NO: 34380 - protein, 13 aa, synthetic construct
AMREGEGDTGKLI

SEQ ID NO: 34381 - protein, 17 aa, synthetic construct
AMREGSRATGGYTDKLI

SEQ ID NO: 34382 - protein, 10 aa, synthetic construct
AMSAFLDKLI

SEQ ID NO: 34383 - protein, 13 aa, synthetic construct
AMRGGGYRAAQLF

SEQ ID NO: 34384 - protein, 10 aa, synthetic construct
AMRGDTDKLI

SEQ ID NO: 34385 - protein, 17 aa, synthetic construct
AMREAFSWGIPYTDKLI

SEQ ID NO: 34386 - protein, 11 aa, synthetic construct
AMREGTDDKLI

SEQ ID NO: 34387 - protein, 15 aa, synthetic construct
AMREGRGYRGPDKLI

SEQ ID NO: 34388 - protein, 13 aa, synthetic construct
AMRAWGEYTDKLI

SEQ ID NO: 34389 - protein, 13 aa, synthetic construct
AMRTSVGDTDKLI

SEQ ID NO: 34390 - protein, 14 aa, synthetic construct
AMREGRGGTPINSS

SEQ ID NO: 34391 - protein, 15 aa, synthetic construct
AMRGTGGYGTTDKLI

SEQ ID NO: 34392 - protein, 16 aa, synthetic construct
AMREGLYWGIYTDKLI

SEQ ID NO: 34393 - protein, 14 aa, synthetic construct
AMRETGGPDTDKLI

SEQ ID NO: 34394 - protein, 12 aa, synthetic construct
AMREGRGADKLI

SEQ ID NO: 34395 - protein, 15 aa, synthetic construct
AMRVPTYGGYGSKLI

SEQ ID NO: 34396 - protein, 15 aa, synthetic construct
AMRDPSYGGDTDKLI

SEQ ID NO: 34397 - protein, 13 aa, synthetic construct
AMRVRAGDEGKLI

SEQ ID NO: 34398 - protein, 9 aa, synthetic construct
AMREGRGTH

SEQ ID NO: 34399 - protein, 18 aa, synthetic construct
AMRESFLLVLGEYTDKLI

SEQ ID NO: 34400 - protein, 13 aa, synthetic construct
AMRVGDTPADKLI

SEQ ID NO: 34401 - protein, 14 aa, synthetic construct
AMRETGGYHEDKLI

SEQ ID NO: 34402 - protein, 16 aa, synthetic construct
AMRELPDWGIRADKLI

SEQ ID NO: 34403 - protein, 14 aa, synthetic construct
AMREGGGGHTDKLI

SEQ ID NO: 34404 - protein, 15 aa, synthetic construct
AMREGLPGADTDKLI

SEQ ID NO: 34405 - protein, 12 aa, synthetic construct
AMREGLLTAQLF

SEQ ID NO: 34406 - protein, 17 aa, synthetic construct
AMREGHLLLGDKGDKLI

SEQ ID NO: 34407 - protein, 14 aa, synthetic construct
AMRDLLGANTDKLI

SEQ ID NO: 34408 - protein, 13 aa, synthetic construct
AMREGIPDTDKLI

SEQ ID NO: 34409 - protein, 13 aa, synthetic construct
AMTYGGYGTDKLI

SEQ ID NO: 34410 - protein, 15 aa, synthetic construct
AMREGGGDKYTDKLI

SEQ ID NO: 34411 - protein, 18 aa, synthetic construct
AMRPFLRRDWGEYTDKLI

SEQ ID NO: 34412 - protein, 15 aa, synthetic construct
AMREAFTGGYGDKLI

SEQ ID NO: 34413 - protein, 19 aa, synthetic construct
AMREDLLPTRLGDTPINSS

SEQ ID NO: 34414 - protein, 18 aa, synthetic construct
AMRTGLPPYWGSYTDKLI

SEQ ID NO: 34415 - protein, 14 aa, synthetic construct
AMREGMGDTLDKLI

SEQ ID NO: 34416 - protein, 13 aa, synthetic construct
AMREGGGGADKLI

SEQ ID NO: 34417 - protein, 13 aa, synthetic construct
AMRAFLGDIDKLI

SEQ ID NO: 34418 - protein, 11 aa, synthetic construct
AMRGGTPINSS

SEQ ID NO: 34419 - protein, 11 aa, synthetic construct
AMREYWGMGSS

SEQ ID NO: 34420 - protein, 15 aa, synthetic construct
AMREGWGIGYTDKLI

SEQ ID NO: 34421 - protein, 14 aa, synthetic construct
AMREGWGIRTDKLI

SEQ ID NO: 34422 - protein, 16 aa, synthetic construct
AMREYVLGATYTDKLI

SEQ ID NO: 34423 - protein, 15 aa, synthetic construct
AMREGPYGDTGDKLI

SEQ ID NO: 34424 - protein, 14 aa, synthetic construct
AMREHTGGYGDKLI

SEQ ID NO: 34425 - protein, 17 aa, synthetic construct
AMREGSYVGDTRTDKLI

SEQ ID NO: 34426 - protein, 17 aa, synthetic construct
AMRELASGGDTENDKLI

SEQ ID NO: 34427 - protein, 10 aa, synthetic construct
AMREVLPTGT

SEQ ID NO: 34428 - protein, 11 aa, synthetic construct
AMRELYTDKLI

SEQ ID NO: 34429 - protein, 15 aa, synthetic construct
AMREGSGGSTPINSS

SEQ ID NO: 34430 - protein, 22 aa, synthetic construct
AMREGRSYDWGIRARVYTDKLI

SEQ ID NO: 34431 - protein, 13 aa, synthetic construct
AMREGRGYTDKLI

SEQ ID NO: 34432 - protein, 17 aa, synthetic construct
AMREPSYVEGYNTDKLI

SEQ ID NO: 34433 - protein, 16 aa, synthetic construct
AMREGSYDWGSTDKLI

SEQ ID NO: 34434 - protein, 12 aa, synthetic construct
AMREGVLIDKLI

SEQ ID NO: 34435 - protein, 14 aa, synthetic construct
AMRETGGYGTDKLI

SEQ ID NO: 34436 - protein, 14 aa, synthetic construct
AMRETSYGDTDKLI

SEQ ID NO: 34437 - protein, 13 aa, synthetic construct
AIGGGYGGPINSS

SEQ ID NO: 34438 - protein, 17 aa, synthetic construct
AMRERVVLGVPYTDKLI

SEQ ID NO: 34439 - protein, 13 aa, synthetic construct
AMREGRGDDDKLI

SEQ ID NO: 34440 - protein, 11 aa, synthetic construct
AMRIPYTDKLI

SEQ ID NO: 34441 - protein, 20 aa, synthetic construct
AMREGPACAYWGIQDPDKLI

SEQ ID NO: 34442 - protein, 12 aa, synthetic construct
AMREGRGIPKLI

SEQ ID NO: 34443 - protein, 16 aa, synthetic construct
AMRGLLGDTWNTDKLI

SEQ ID NO: 34444 - protein, 18 aa, synthetic construct
AMRGTFLHTGGYLTDKLI

SEQ ID NO: 34445 - protein, 20 aa, synthetic construct
AMREGWPSYWGNQLTPINSS

SEQ ID NO: 34446 - protein, 16 aa, synthetic construct
AMRESSTGGYACDKLI

SEQ ID NO: 34447 - protein, 15 aa, synthetic construct
AMREGWGIRGADKLI

SEQ ID NO: 34448 - protein, 14 aa, synthetic construct
AMREGWGIPTDKLI

SEQ ID NO: 34449 - protein, 13 aa, synthetic construct
AMREGWGIRDKLI

SEQ ID NO: 34450 - protein, 16 aa, synthetic construct
ASPSYEYWGIPTDKLI

SEQ ID NO: 34451 - protein, 16 aa, synthetic construct
AMREGWGIPSLTAQLF

SEQ ID NO: 34452 - protein, 14 aa, synthetic construct
AMSSLLGDTGDKLI

SEQ ID NO: 34453 - protein, 14 aa, synthetic construct
AMREGMGDTGDKLI

SEQ ID NO: 34454 - protein, 21 aa, synthetic construct
AMREGQPPCTGGYARYTDKLI

SEQ ID NO: 34455 - protein, 16 aa, synthetic construct
AMREGHTGGAYTDKLI

SEQ ID NO: 34456 - protein, 14 aa, synthetic construct
AMREYWGIRGDKLI

SEQ ID NO: 34457 - protein, 16 aa, synthetic construct
AMRESTGGYWDTDKLI

SEQ ID NO: 34458 - protein, 16 aa, synthetic construct
AMREGLWGIRNTDKLI

SEQ ID NO: 34459 - protein, 19 aa, synthetic construct
AMREGVEFLRCGGYPDKLI

SEQ ID NO: 34460 - protein, 12 aa, synthetic construct
AMREGTGGKGVI

SEQ ID NO: 34461 - protein, 14 aa, synthetic construct
AMRSTSLGDTVNSS

SEQ ID NO: 34462 - protein, 14 aa, synthetic construct
AMREGDTMYTDKLI

SEQ ID NO: 34463 - protein, 16 aa, synthetic construct
AMREGSHTGGSPINSS

SEQ ID NO: 34464 - protein, 14 aa, synthetic construct
AMREPTGGFTDKLI

SEQ ID NO: 34465 - protein, 18 aa, synthetic construct
AMRETVLGDTGPAIDKLI

SEQ ID NO: 34466 - protein, 13 aa, synthetic construct
AMRGNWGIPDKLI

SEQ ID NO: 34467 - protein, 11 aa, synthetic construct
AMREVLGAKLI

SEQ ID NO: 34468 - protein, 15 aa, synthetic construct
AMREGDWGIRTDKLI

SEQ ID NO: 34469 - protein, 14 aa, synthetic construct
AMSCVLGDKGDKLI

SEQ ID NO: 34470 - protein, 13 aa, synthetic construct
AMRGTYWGADKLI

SEQ ID NO: 34471 - protein, 14 aa, synthetic construct
AMREVLGDYTDKLI

SEQ ID NO: 34472 - protein, 13 aa, synthetic construct
AMREGSGAPDKLI

SEQ ID NO: 34473 - protein, 12 aa, synthetic construct
AMREASYTDKLI

SEQ ID NO: 34474 - protein, 16 aa, synthetic construct
AMREGLRLGDTPINSS

SEQ ID NO: 34475 - protein, 14 aa, synthetic construct
AMRDLLGLYTDKLI

SEQ ID NO: 34476 - protein, 15 aa, synthetic construct
AMRELLGDTPTDKLI

SEQ ID NO: 34477 - protein, 14 aa, synthetic construct
AMREEVGKYTDKLI

SEQ ID NO: 34478 - protein, 13 aa, synthetic construct
AMSLYWGIGDKLI

SEQ ID NO: 34479 - protein, 14 aa, synthetic construct
AMREGRGYGVDKLI

SEQ ID NO: 34480 - protein, 13 aa, synthetic construct
AMRGGGDEDDKLI

SEQ ID NO: 34481 - protein, 15 aa, synthetic construct
AMREHWGIRWSDKLI

SEQ ID NO: 34482 - protein, 21 aa, synthetic construct
AMREGTFLPYWGIRQNTDKLI

SEQ ID NO: 34483 - protein, 15 aa, synthetic construct
AMREGTGGYFTDKLI

SEQ ID NO: 34484 - protein, 14 aa, synthetic construct
AMREGRGILTDKLI

SEQ ID NO: 34485 - protein, 11 aa, synthetic construct
AMREGIADKLI

SEQ ID NO: 34486 - protein, 14 aa, synthetic construct
AMREGRGPCPAKVI

SEQ ID NO: 34487 - protein, 17 aa, synthetic construct
AMRDPTGLGAPYTDKLI

SEQ ID NO: 34488 - protein, 12 aa, synthetic construct
AMREYWGPDKLI

SEQ ID NO: 34489 - protein, 17 aa, synthetic construct
AMREYWGIQRPYTDKLI

SEQ ID NO: 34490 - protein, 16 aa, synthetic construct
AMRESTGGYRDTDKLI

SEQ ID NO: 34491 - protein, 19 aa, synthetic construct
AMREDTSYSYWGIPDDKLI

SEQ ID NO: 34492 - protein, 15 aa, synthetic construct
AMRETGGKGYTDKLI

SEQ ID NO: 34493 - protein, 13 aa, synthetic construct
AMREEDTGTDKLI

SEQ ID NO: 34494 - protein, 14 aa, synthetic construct
AMRVPVGDTGDKLI

SEQ ID NO: 34495 - protein, 11 aa, synthetic construct
AMREVGDTGLI

SEQ ID NO: 34496 - protein, 13 aa, synthetic construct
AMRRDWGIHDKLI

SEQ ID NO: 34497 - protein, 18 aa, synthetic construct
AMREAFLRVGGGHTDKLI

SEQ ID NO: 34498 - protein, 12 aa, synthetic construct
AMREVLGDLKLI

SEQ ID NO: 34499 - protein, 12 aa, synthetic construct
AMREVLGENKLI

SEQ ID NO: 34500 - protein, 16 aa, synthetic construct
AMREGFWGIRGTDKLI

SEQ ID NO: 34501 - protein, 14 aa, synthetic construct
AMREVLGGRGDKLI

SEQ ID NO: 34502 - protein, 13 aa, synthetic construct
AMRDWGIYTDKLI

SEQ ID NO: 34503 - protein, 16 aa, synthetic construct
AMRPFLRGDMGTDKLI

SEQ ID NO: 34504 - protein, 18 aa, synthetic construct
AMREILWGIREGYTDKLI

SEQ ID NO: 34505 - protein, 13 aa, synthetic construct
AMREVWGPTDKLI

SEQ ID NO: 34506 - protein, 18 aa, synthetic construct
AMREGGLKDTGGHTDKLI

SEQ ID NO: 34507 - protein, 15 aa, synthetic construct
AMREHPSFALGDKLI

SEQ ID NO: 34508 - protein, 14 aa, synthetic construct
AMRLRTGGYADKLI

SEQ ID NO: 34509 - protein, 15 aa, synthetic construct
AMRAVLGDKYTDKLI

SEQ ID NO: 34510 - protein, 15 aa, synthetic construct
AMRDLYWGSYTDKLI

SEQ ID NO: 34511 - protein, 17 aa, synthetic construct
AMREGLPTGGYDSDKLI

SEQ ID NO: 34512 - protein, 17 aa, synthetic construct
AMREGPPSLGIIADKLI

SEQ ID NO: 34513 - protein, 17 aa, synthetic construct
AMREGPPWYWGPTDKLI

SEQ ID NO: 34514 - protein, 16 aa, synthetic construct
AMRGLPTGDTRGDKLI

SEQ ID NO: 34515 - protein, 16 aa, synthetic construct
AMREGPSYEGGTDKLI

SEQ ID NO: 34516 - protein, 16 aa, synthetic construct
AMREGPLRGDRTDKLI

SEQ ID NO: 34517 - protein, 15 aa, synthetic construct
AMREGPTSWDTDKLI

SEQ ID NO: 34518 - protein, 17 aa, synthetic construct
AMREGLPTLWGYTDKLI

SEQ ID NO: 34519 - protein, 15 aa, synthetic construct
AMRGLGDTGRPINSS

SEQ ID NO: 34520 - protein, 15 aa, synthetic construct
AMREGPYWGIGDKLI

SEQ ID NO: 34521 - protein, 17 aa, synthetic construct
AMREGPLLGDTNTDKLI

SEQ ID NO: 34522 - protein, 14 aa, synthetic construct
AMREGRGENTDKLI

SEQ ID NO: 34523 - protein, 14 aa, synthetic construct
AMREGPGGYADKLI

SEQ ID NO: 34524 - protein, 13 aa, synthetic construct
AMRESLGAFDKLI

SEQ ID NO: 34525 - protein, 14 aa, synthetic construct
AMREGLGENTDKLI

SEQ ID NO: 34526 - protein, 14 aa, synthetic construct
AMREGWGGVTDKLI

SEQ ID NO: 34527 - protein, 16 aa, synthetic construct
AMREGASWGNTPINSS

SEQ ID NO: 34528 - protein, 16 aa, synthetic construct
AMRELYWGIRRTDKLI

SEQ ID NO: 34529 - protein, 17 aa, synthetic construct
AMREGRSTSLGDTDKLI

SEQ ID NO: 34530 - protein, 13 aa, synthetic construct
AMRGWGIHTDKLI

SEQ ID NO: 34531 - protein, 11 aa, synthetic construct
AMREGDPNKLI

SEQ ID NO: 34532 - protein, 15 aa, synthetic construct
AMREGGDDRTGDKLI

SEQ ID NO: 34533 - protein, 15 aa, synthetic construct
AMRYTGGYRRTDKLI

SEQ ID NO: 34534 - protein, 9 aa, synthetic construct
PGAHTDKLI

SEQ ID NO: 34535 - protein, 13 aa, synthetic construct
AMREGGDTPDKLI

SEQ ID NO: 34536 - protein, 13 aa, synthetic construct
AMRASYWGIDKLI

SEQ ID NO: 34537 - protein, 14 aa, synthetic construct
AMREVLGNGGDKLI

SEQ ID NO: 34538 - protein, 16 aa, synthetic construct
AMREFSWGIRGADKLI

SEQ ID NO: 34539 - protein, 14 aa, synthetic construct
AMREGFGGYENKLI

SEQ ID NO: 34540 - protein, 14 aa, synthetic construct
AMREQYWGMTDKLI

SEQ ID NO: 34541 - protein, 14 aa, synthetic construct
AMREGRGIRGDKLI

SEQ ID NO: 34542 - protein, 17 aa, synthetic construct
AMRETFLRRWGITDKLI

SEQ ID NO: 34543 - protein, 17 aa, synthetic construct
AMREDLPTPTGGADKLI

SEQ ID NO: 34544 - protein, 18 aa, synthetic construct
AMREDPSYWGIRDTDKLI

SEQ ID NO: 34545 - protein, 12 aa, synthetic construct
AMREPGGSDKLI

SEQ ID NO: 34546 - protein, 17 aa, synthetic construct
AMREGAYVWGSYTDKLI

SEQ ID NO: 34547 - protein, 21 aa, synthetic construct
AMREALFLRELGDTGGPDKLI

SEQ ID NO: 34548 - protein, 17 aa, synthetic construct
AMREDLFPDPAEPDKLI

SEQ ID NO: 34549 - protein, 14 aa, synthetic construct
AMREVWGMATDKLI

SEQ ID NO: 34550 - protein, 15 aa, synthetic construct
AMREGWGPAPGTPDR

SEQ ID NO: 34551 - protein, 18 aa, synthetic construct
AMREKGTFLPVWGGDKLI

SEQ ID NO: 34552 - protein, 15 aa, synthetic construct
AMREALGDTWTDKLI

SEQ ID NO: 34553 - protein, 14 aa, synthetic construct
AMRDWGIQFTDKLI

SEQ ID NO: 34554 - protein, 16 aa, synthetic construct
AMRELLPSELAPINSS

SEQ ID NO: 34555 - protein, 19 aa, synthetic construct
AMREVPSYVFTGGWADKLI

SEQ ID NO: 34556 - protein, 19 aa, synthetic construct
AMREGPFGTGGQALTAQLF

SEQ ID NO: 34557 - protein, 14 aa, synthetic construct
AMNLPTGGYSINSS

SEQ ID NO: 34558 - protein, 11 aa, synthetic construct
AMSPRGTDKLI

SEQ ID NO: 34559 - protein, 16 aa, synthetic construct
AMREGSVGGSYTDKLI

SEQ ID NO: 34560 - protein, 14 aa, synthetic construct
AMREYWGILTDKLI

SEQ ID NO: 34561 - protein, 16 aa, synthetic construct
AMREPTGGYRGTDKLI

SEQ ID NO: 34562 - protein, 13 aa, synthetic construct
AMREYWGIQAKLI

SEQ ID NO: 34563 - protein, 14 aa, synthetic construct
AMREGWGEYTDKLI

SEQ ID NO: 34564 - protein, 16 aa, synthetic construct
AMREGLFGWGGADKLI

SEQ ID NO: 34565 - protein, 17 aa, synthetic construct
AMREGSYGYWGYTDKLI

SEQ ID NO: 34566 - protein, 13 aa, synthetic construct
AMREGDTYTDKLI

SEQ ID NO: 34567 - protein, 15 aa, synthetic construct
AMILGDTQAYTDKLI

SEQ ID NO: 34568 - protein, 17 aa, synthetic construct
AMREGSYVLGQYTDKLI

SEQ ID NO: 34569 - protein, 12 aa, synthetic construct
AMRDGGYAINSS

SEQ ID NO: 34570 - protein, 14 aa, synthetic construct
AMRSPYWGIQAKLI

SEQ ID NO: 34571 - protein, 14 aa, synthetic construct
AMREGTGGHTDKLI

SEQ ID NO: 34572 - protein, 13 aa, synthetic construct
AMRSPYWGIRNSS

SEQ ID NO: 34573 - protein, 16 aa, synthetic construct
AMREGPLGDTPGTPDR

SEQ ID NO: 34574 - protein, 12 aa, synthetic construct
AMREKLGENKLI

SEQ ID NO: 34575 - protein, 17 aa, synthetic construct
AMRGGLPTLLGDTDKLI

SEQ ID NO: 34576 - protein, 12 aa, synthetic construct
AMREGWGVDKLI

SEQ ID NO: 34577 - protein, 18 aa, synthetic construct
AMREKNSYVWGIRADKLI

SEQ ID NO: 34578 - protein, 14 aa, synthetic construct
AMRVLGVRYTDKLI

SEQ ID NO: 34579 - protein, 12 aa, synthetic construct
AMREVPVTDKLI

SEQ ID NO: 34580 - protein, 17 aa, synthetic construct
AMREVPTSGGSDTDKLI

SEQ ID NO: 34581 - protein, 18 aa, synthetic construct
AMRDAFLRGGGRGADKLI

SEQ ID NO: 34582 - protein, 17 aa, synthetic construct
AMRESLPTGDTQTDKLI

SEQ ID NO: 34583 - protein, 20 aa, synthetic construct
AMREGLPTTWGTFALTAQLF

SEQ ID NO: 34584 - protein, 18 aa, synthetic construct
AMREGGVYGGYALTAQLF

SEQ ID NO: 34585 - protein, 13 aa, synthetic construct
AMGLPPYWGDKLI

SEQ ID NO: 34586 - protein, 18 aa, synthetic construct
AMRDFLPLLGDPLPINSS

SEQ ID NO: 34587 - protein, 19 aa, synthetic construct
AMREGGPPVLGDTRDTRQM

SEQ ID NO: 34588 - protein, 14 aa, synthetic construct
AMRATCGDRADKLI

SEQ ID NO: 34589 - protein, 15 aa, synthetic construct
AMREGFVGAYTDKLI

SEQ ID NO: 34590 - protein, 14 aa, synthetic construct
AMREGSGGYTDKLI

SEQ ID NO: 34591 - protein, 18 aa, synthetic construct
AMRGWPSSFTGGHTDKLI

SEQ ID NO: 34592 - protein, 18 aa, synthetic construct
AMREPFLPYWGMRGDKLI

SEQ ID NO: 34593 - protein, 17 aa, synthetic construct
AMRGAFLLWGILTDKLI

SEQ ID NO: 34594 - protein, 15 aa, synthetic construct
AMSVSYGDTLTDKLI

SEQ ID NO: 34595 - protein, 14 aa, synthetic construct
AMREQVLGDTDKLI

SEQ ID NO: 34596 - protein, 15 aa, synthetic construct
AMREVSVGDYTDKLI

SEQ ID NO: 34597 - protein, 14 aa, synthetic construct
AMREGWGILGDKLI

SEQ ID NO: 34598 - protein, 12 aa, synthetic construct
AMRGLKNTDKLI

SEQ ID NO: 34599 - protein, 14 aa, synthetic construct
AMSIYWGIRNDKLI

SEQ ID NO: 34600 - protein, 16 aa, synthetic construct
AMRFPSFWGAGTDKLI

SEQ ID NO: 34601 - protein, 10 aa, synthetic construct
ATGDTGDKLI

SEQ ID NO: 34602 - protein, 15 aa, synthetic construct
AMRELPTGGYADKLI

SEQ ID NO: 34603 - protein, 17 aa, synthetic construct
AMREGPHVGICTPINSS

SEQ ID NO: 34604 - protein, 14 aa, synthetic construct
AMREGGYGGTDKLI

SEQ ID NO: 34605 - protein, 18 aa, synthetic construct
AMREAFLLVLGDHTDKLI

SEQ ID NO: 34606 - protein, 13 aa, synthetic construct
AMREYWGDTDKLI

SEQ ID NO: 34607 - protein, 16 aa, synthetic construct
AMREGYWGPAWDTRQM

SEQ ID NO: 34608 - protein, 13 aa, synthetic construct
AMSVLGDYTDKLI

SEQ ID NO: 34609 - protein, 14 aa, synthetic construct
AMREMGATWDTRQM

SEQ ID NO: 34610 - protein, 15 aa, synthetic construct
AMREVLHWGIRGKLI

SEQ ID NO: 34611 - protein, 17 aa, synthetic construct
AMREPSYCTGGYTDKLI

SEQ ID NO: 34612 - protein, 13 aa, synthetic construct
AMRPTGGHTDKLI

SEQ ID NO: 34613 - protein, 10 aa, synthetic construct
AMKDYTDKLI

SEQ ID NO: 34614 - protein, 13 aa, synthetic construct
AMRGLGGYTDKLI

SEQ ID NO: 34615 - protein, 9 aa, synthetic construct
AMRGMDKLI

SEQ ID NO: 34616 - protein, 14 aa, synthetic construct
AIRVLPTGYTDKLI

SEQ ID NO: 34617 - protein, 15 aa, synthetic construct
AMRGPSFLLGDDKLI

SEQ ID NO: 34618 - protein, 14 aa, synthetic construct
AIREGLGDTTDKLI

SEQ ID NO: 34619 - protein, 17 aa, synthetic construct
AMREAPFLRGGGADKLI

SEQ ID NO: 34620 - protein, 14 aa, synthetic construct
AMREGAGSYTDKLI

SEQ ID NO: 34621 - protein, 17 aa, synthetic construct
AMRVRLPSVLGDTDKLI

SEQ ID NO: 34622 - protein, 13 aa, synthetic construct
AMREGRGSTDKLI

SEQ ID NO: 34623 - protein, 15 aa, synthetic construct
AMREAWGIRGTDKLI

SEQ ID NO: 34624 - protein, 14 aa, synthetic construct
AMREFLLGVTDKLI

SEQ ID NO: 34625 - protein, 16 aa, synthetic construct
AMREFLLGDTAPINSS

SEQ ID NO: 34626 - protein, 13 aa, synthetic construct
AMNPYWGILDKLI

SEQ ID NO: 34627 - protein, 15 aa, synthetic construct
AMREGRPSPYFDKLI

SEQ ID NO: 34628 - protein, 14 aa, synthetic construct
AMREGLGVHTDKLI

SEQ ID NO: 34629 - protein, 17 aa, synthetic construct
AMREGLRSGGLYTDKLI

SEQ ID NO: 34630 - protein, 12 aa, synthetic construct
AMRECTGGIKLI

SEQ ID NO: 34631 - protein, 14 aa, synthetic construct
AMRSTGYGAPDKLI

SEQ ID NO: 34632 - protein, 17 aa, synthetic construct
AMREGRSTTGVKTAQLF

SEQ ID NO: 34633 - protein, 15 aa, synthetic construct
AMPSFLRGNLTAQLF

SEQ ID NO: 34634 - protein, 15 aa, synthetic construct
AMREGLRGGIRDKLI

SEQ ID NO: 34635 - protein, 12 aa, synthetic construct
AMRESGESAQLF

SEQ ID NO: 34636 - protein, 13 aa, synthetic construct
AMRETGGPTDKLI

SEQ ID NO: 34637 - protein, 15 aa, synthetic construct
AMREYLGDTGTDKLI

SEQ ID NO: 34638 - protein, 15 aa, synthetic construct
AMRVPSYVRISINSS

SEQ ID NO: 34639 - protein, 16 aa, synthetic construct
AMRHYPTGGSPPDKLI

SEQ ID NO: 34640 - protein, 14 aa, synthetic construct
AMREGLGVGTDKLI

SEQ ID NO: 34641 - protein, 14 aa, synthetic construct
AMREYWGIGTDKLI

SEQ ID NO: 34642 - protein, 15 aa, synthetic construct
AMREAFLVLGGYKLI

SEQ ID NO: 34643 - protein, 13 aa, synthetic construct
AMREPLGDTRPLI

SEQ ID NO: 34644 - protein, 14 aa, synthetic construct
AMRDPWGSHTDKLI

SEQ ID NO: 34645 - protein, 16 aa, synthetic construct
AMREGPSTWGIRINSS

SEQ ID NO: 34646 - protein, 16 aa, synthetic construct
AMREAFLRGIRADKLI

SEQ ID NO: 34647 - protein, 16 aa, synthetic construct
AMREVLGAPPRSDKLI

SEQ ID NO: 34648 - protein, 17 aa, synthetic construct
AMREGYSYGDGVTDKLI

SEQ ID NO: 34649 - protein, 18 aa, synthetic construct
AMRDSFTGGYGCTPINSS

SEQ ID NO: 34650 - protein, 15 aa, synthetic construct
AMREGVLGDTPINSS

SEQ ID NO: 34651 - protein, 16 aa, synthetic construct
AMRDLLRRGTRADKLI

SEQ ID NO: 34652 - protein, 15 aa, synthetic construct
AMRGPGDTGDTDKLI

SEQ ID NO: 34653 - protein, 18 aa, synthetic construct
AMREGTPIVLGDTTDKLI

SEQ ID NO: 34654 - protein, 16 aa, synthetic construct
AMRELGDTRRYTDKLI

SEQ ID NO: 34655 - protein, 15 aa, synthetic construct
AMSLGDTRGYTDKLI

SEQ ID NO: 34656 - protein, 14 aa, synthetic construct
AMRGDTGLYTDKLI

SEQ ID NO: 34657 - protein, 17 aa, synthetic construct
AMREDSLPKGSYTDKLI

SEQ ID NO: 34658 - protein, 13 aa, synthetic construct
AMRAYVGPTDKLI

SEQ ID NO: 34659 - protein, 17 aa, synthetic construct
AMREGFLRGYAPTDKLI

SEQ ID NO: 34660 - protein, 17 aa, synthetic construct
AMRGHPIWGPPPPINSS

SEQ ID NO: 34661 - protein, 14 aa, synthetic construct
AMREGLVGDTDKLI

SEQ ID NO: 34662 - protein, 17 aa, synthetic construct
AMREGVPTFYWGIRKLI

SEQ ID NO: 34663 - protein, 10 aa, synthetic construct
AMGSWDTRQM

SEQ ID NO: 34664 - protein, 15 aa, synthetic construct
AMRELPTLGDTRKLI

SEQ ID NO: 34665 - protein, 19 aa, synthetic construct
AMREGLPSYWGILGTDKLI

SEQ ID NO: 34666 - protein, 13 aa, synthetic construct
AMRETGGATDKLI

SEQ ID NO: 34667 - protein, 16 aa, synthetic construct
AMRESLGDTGYTDKLI

SEQ ID NO: 34668 - protein, 19 aa, synthetic construct
AMREVLLGDTRRGATDKLI

SEQ ID NO: 34669 - protein, 15 aa, synthetic construct
AMREGRGDTDTDKLI

SEQ ID NO: 34670 - protein, 15 aa, synthetic construct
AMRESYVWGTARPLI

SEQ ID NO: 34671 - protein, 15 aa, synthetic construct
AMRGSSLVLGTDKLI

SEQ ID NO: 34672 - protein, 13 aa, synthetic construct
AMREILGDTDKLI

SEQ ID NO: 34673 - protein, 11 aa, synthetic construct
AMRELLGDKLI

SEQ ID NO: 34674 - protein, 16 aa, synthetic construct
AMRNLPTSTGGYRKLI

SEQ ID NO: 34675 - protein, 15 aa, synthetic construct
AMRAGGLSSWDTRQM

SEQ ID NO: 34676 - protein, 17 aa, synthetic construct
AMRGGRKTGGYSLDKLI

SEQ ID NO: 34677 - protein, 18 aa, synthetic construct
AMPRLPTFWGIRGRDKLI

SEQ ID NO: 34678 - protein, 16 aa, synthetic construct
AMRGYWGILGNTDKLI

SEQ ID NO: 34679 - protein, 14 aa, synthetic construct
AMREAGGYEGDKLI

SEQ ID NO: 34680 - protein, 14 aa, synthetic construct
AMREPGDTRTDKLI

SEQ ID NO: 34681 - protein, 17 aa, synthetic construct
AMRASFLLYWGNTDKLI

SEQ ID NO: 34682 - protein, 15 aa, synthetic construct
AMRETPTGGYDDKLI

SEQ ID NO: 34683 - protein, 13 aa, synthetic construct
AMRERLGDTDKLI

SEQ ID NO: 34684 - protein, 18 aa, synthetic construct
AMREPTSFLRLGDTIKLI

SEQ ID NO: 34685 - protein, 14 aa, synthetic construct
AMREPYWGIRVKLI

SEQ ID NO: 34686 - protein, 14 aa, synthetic construct
AMREGEGDTPINSS

SEQ ID NO: 34687 - protein, 17 aa, synthetic construct
AMRDPSYDWGIQGDKLI

SEQ ID NO: 34688 - protein, 13 aa, synthetic construct
AMREGDTRSDKLI

SEQ ID NO: 34689 - protein, 13 aa, synthetic construct
AMRVLLGDTDKLI

SEQ ID NO: 34690 - protein, 15 aa, synthetic construct
AMREGVVGDTADKLI

SEQ ID NO: 34691 - protein, 16 aa, synthetic construct
AMRDGVSDGRSTDKLI

SEQ ID NO: 34692 - protein, 15 aa, synthetic construct
AMRELMGDTNTDKLI

SEQ ID NO: 34693 - protein, 15 aa, synthetic construct
AMREYWGSSWDTRQM

SEQ ID NO: 34694 - protein, 13 aa, synthetic construct
AMREVLLGDVKLI

SEQ ID NO: 34695 - protein, 14 aa, synthetic construct
AMRDSGGYWDTRQM

SEQ ID NO: 34696 - protein, 21 aa, synthetic construct
AMREVPSYVPVLGDRETDKLI

SEQ ID NO: 34697 - protein, 17 aa, synthetic construct
AMREGLRGIRAETDKLI

SEQ ID NO: 34698 - protein, 13 aa, synthetic construct
AMREILEGPDKLI

SEQ ID NO: 34699 - protein, 15 aa, synthetic construct
AMRGITGGYVTDKLI

SEQ ID NO: 34700 - protein, 12 aa, synthetic construct
AMREGLVDDKLI

SEQ ID NO: 34701 - protein, 13 aa, synthetic construct
AMRERGYATDKLI

SEQ ID NO: 34702 - protein, 15 aa, synthetic construct
AMRAFLRSGGSRPLI

SEQ ID NO: 34703 - protein, 16 aa, synthetic construct
AMRGALLRGLDTDKLI

SEQ ID NO: 34704 - protein, 13 aa, synthetic construct
AMREAGGYTDKLI

SEQ ID NO: 34705 - protein, 12 aa, synthetic construct
AMRDLGDTDKLI

SEQ ID NO: 34706 - protein, 12 aa, synthetic construct
AMREGRGIYKLI

SEQ ID NO: 34707 - protein, 13 aa, synthetic construct
AMRGVWGNTGKLI

SEQ ID NO: 34708 - protein, 18 aa, synthetic construct
AMREGGPYWGIRGTDKLI

SEQ ID NO: 34709 - protein, 13 aa, synthetic construct
AMREGYANPDKLI

SEQ ID NO: 34710 - protein, 16 aa, synthetic construct
AMREGSFRGILTDKLI

SEQ ID NO: 34711 - protein, 16 aa, synthetic construct
AMREGRWGIRGTDKLI

SEQ ID NO: 34712 - protein, 14 aa, synthetic construct
AMREGELGDPDKLI

SEQ ID NO: 34713 - protein, 14 aa, synthetic construct
AMREGEGGYPDKLI

SEQ ID NO: 34714 - protein, 16 aa, synthetic construct
AMRESFLPYWGTDKLI

SEQ ID NO: 34715 - protein, 15 aa, synthetic construct
AMREGGWGPTPINSS

SEQ ID NO: 34716 - protein, 12 aa, synthetic construct
AMREGWGILRAH

SEQ ID NO: 34717 - protein, 16 aa, synthetic construct
AMREGGQLGAYTDKLI

SEQ ID NO: 34718 - protein, 12 aa, synthetic construct
AMGERIYTDKLI

SEQ ID NO: 34719 - protein, 16 aa, synthetic construct
AMREREVLGDTVDKLI

SEQ ID NO: 34720 - protein, 14 aa, synthetic construct
AMREYWGIRADKLI

SEQ ID NO: 34721 - protein, 14 aa, synthetic construct
AMREGLGVYTDKLI

SEQ ID NO: 34722 - protein, 14 aa, synthetic construct
AMSPTLWGDTDKLI

SEQ ID NO: 34723 - protein, 15 aa, synthetic construct
AMRVTGGSTSTDKLI

SEQ ID NO: 34724 - protein, 20 aa, synthetic construct
AMREELPLVLGGSSWDTRQM

SEQ ID NO: 34725 - protein, 15 aa, synthetic construct
AMREDWGIPYTDKLI

SEQ ID NO: 34726 - protein, 17 aa, synthetic construct
AMREGPLLILGDTLKLI

SEQ ID NO: 34727 - protein, 20 aa, synthetic construct
AMRESPSLPLVGASYTDKLI

SEQ ID NO: 34728 - protein, 18 aa, synthetic construct
AMREALPTLTGGYTDKLI

SEQ ID NO: 34729 - protein, 17 aa, synthetic construct
AMREGATLLGDTPINSS

SEQ ID NO: 34730 - protein, 18 aa, synthetic construct
AMREAFPPFPLYFGAGTR

SEQ ID NO: 34731 - protein, 12 aa, synthetic construct
AMRERTRGDKLI

SEQ ID NO: 34732 - protein, 13 aa, synthetic construct
AMREGPLPTDKLI

SEQ ID NO: 34733 - protein, 14 aa, synthetic construct
AMREDGGYHTDKLI

SEQ ID NO: 34734 - protein, 14 aa, synthetic construct
AMREGGDKYTDKLI

SEQ ID NO: 34735 - protein, 15 aa, synthetic construct
AMREALLGVYTDKLI

SEQ ID NO: 34736 - protein, 13 aa, synthetic construct
AMRETGGHTDKLI

SEQ ID NO: 34737 - protein, 20 aa, synthetic construct
AMREGPLPSRLLGAGADKLI

SEQ ID NO: 34738 - protein, 16 aa, synthetic construct
AMREGLPTGGYTDKLI

SEQ ID NO: 34739 - protein, 13 aa, synthetic construct
AMREGWGHTDKLI

SEQ ID NO: 34740 - protein, 16 aa, synthetic construct
AMREGGLGDTATDKLI

SEQ ID NO: 34741 - protein, 15 aa, synthetic construct
AMREGTGGYWADKLI

SEQ ID NO: 34742 - protein, 14 aa, synthetic construct
AMRDRDTRGTDKLI

SEQ ID NO: 34743 - protein, 14 aa, synthetic construct
AMRGLLGDTRDKLI

SEQ ID NO: 34744 - protein, 19 aa, synthetic construct
AMREGLSYVGGYDGTDKLI

SEQ ID NO: 34745 - protein, 18 aa, synthetic construct
AMREYLPTWGIPYPDKLI

SEQ ID NO: 34746 - protein, 15 aa, synthetic construct
AMREGWGDKTPINSS

SEQ ID NO: 34747 - protein, 16 aa, synthetic construct
AMREHWGIRGYTDKLI

SEQ ID NO: 34748 - protein, 9 aa, synthetic construct
AMRDWGTRI

SEQ ID NO: 34749 - protein, 13 aa, synthetic construct
AMREFLGDTDKLI

SEQ ID NO: 34750 - protein, 13 aa, synthetic construct
AMRETGGNTDKLV

SEQ ID NO: 34751 - protein, 14 aa, synthetic construct
AMRENTGGHTDKLI

SEQ ID NO: 34752 - protein, 16 aa, synthetic construct
AMREGWGITALTAQLF

SEQ ID NO: 34753 - protein, 15 aa, synthetic construct
AMREGPDRGYADKLI

SEQ ID NO: 34754 - protein, 16 aa, synthetic construct
AMREWGIRSSWDTRQM

SEQ ID NO: 34755 - protein, 18 aa, synthetic construct
AMRGLPTGRWGIPTDKLI

SEQ ID NO: 34756 - protein, 13 aa, synthetic construct
AMRSYWGIRDKLI

SEQ ID NO: 34757 - protein, 15 aa, synthetic construct
AMREPSTGGNTDKLI

SEQ ID NO: 34758 - protein, 14 aa, synthetic construct
AMRAFLVRWIPKLI

SEQ ID NO: 34759 - protein, 15 aa, synthetic construct
AMRASYLGAYTDKLI

SEQ ID NO: 34760 - protein, 13 aa, synthetic construct
AMREVWGDTGKLI

SEQ ID NO: 34761 - protein, 14 aa, synthetic construct
AMREAGGPFDSTTL

SEQ ID NO: 34762 - protein, 15 aa, synthetic construct
AMRAVLGDTLTAQLF

SEQ ID NO: 34763 - protein, 13 aa, synthetic construct
AMRVPGGYADKLI

SEQ ID NO: 34764 - protein, 16 aa, synthetic construct
AMRETPLTGGPEGPLI

SEQ ID NO: 34765 - protein, 18 aa, synthetic construct
AMRVPSLYWGIRDTDKLI

SEQ ID NO: 34766 - protein, 15 aa, synthetic construct
AMREGPLTGGYINSS

SEQ ID NO: 34767 - protein, 14 aa, synthetic construct
AMRVPTVYWPDKLI

SEQ ID NO: 34768 - protein, 16 aa, synthetic construct
AMRALPHGGRRPDKLI

SEQ ID NO: 34769 - protein, 14 aa, synthetic construct
AMREGGVPYTDKLI

SEQ ID NO: 34770 - protein, 13 aa, synthetic construct
AMREGPRGYVRLI

SEQ ID NO: 34771 - protein, 16 aa, synthetic construct
AMRENSYGLGDTDKLI

SEQ ID NO: 34772 - protein, 16 aa, synthetic construct
AMREYWGSRSWDTRQM

SEQ ID NO: 34773 - protein, 13 aa, synthetic construct
AMREAGEDIDKLI

SEQ ID NO: 34774 - protein, 15 aa, synthetic construct
AMREYWGISPGTPDR

SEQ ID NO: 34775 - protein, 18 aa, synthetic construct
AMREGSPGGTGGYTDKLI

SEQ ID NO: 34776 - protein, 15 aa, synthetic construct
AMREGDISSWDTRQM

SEQ ID NO: 34777 - protein, 15 aa, synthetic construct
AMRAFLLGDTTAQLF

SEQ ID NO: 34778 - protein, 21 aa, synthetic construct
AMREAYLPTSMGGRECTDKLI

SEQ ID NO: 34779 - protein, 16 aa, synthetic construct
AMRENTGGYLGTDKLI

SEQ ID NO: 34780 - protein, 18 aa, synthetic construct
AMRELPSPYWGQYTDKLI

SEQ ID NO: 34781 - protein, 17 aa, synthetic construct
AMREDYSYRGSYTDKLI

SEQ ID NO: 34782 - protein, 18 aa, synthetic construct
AMRDTFLQYWGKYTDKLI

SEQ ID NO: 34783 - protein, 17 aa, synthetic construct
AMREHSYVDWGYGDKLI

SEQ ID NO: 34784 - protein, 15 aa, synthetic construct
AMREGGLGVYTDKLI

SEQ ID NO: 34785 - protein, 17 aa, synthetic construct
AMRELPAYWGIQADKLI

SEQ ID NO: 34786 - protein, 14 aa, synthetic construct
AMREDASSWDTRQM

SEQ ID NO: 34787 - protein, 14 aa, synthetic construct
AMRVAGDTPTDKLI

SEQ ID NO: 34788 - protein, 17 aa, synthetic construct
AMREAPTSELGDTDKLI

SEQ ID NO: 34789 - protein, 18 aa, synthetic construct
AMREGRGSRVLGDTDKLI

SEQ ID NO: 34790 - protein, 11 aa, synthetic construct
AMRGGGYGKLI

SEQ ID NO: 34791 - protein, 21 aa, synthetic construct
AMRGVLGVVYACGSALTAQLF

SEQ ID NO: 34792 - protein, 17 aa, synthetic construct
AMREGFLRPGGYDDKLI

SEQ ID NO: 34793 - protein, 14 aa, synthetic construct
AMREAYWGITDKLI

SEQ ID NO: 34794 - protein, 18 aa, synthetic construct
AMREGTTWGILSWDTRQM

SEQ ID NO: 34795 - protein, 16 aa, synthetic construct
AMREVFLLGDYTDKLI

SEQ ID NO: 34796 - protein, 16 aa, synthetic construct
AMRSSLFVLGDTDKLI

SEQ ID NO: 34797 - protein, 14 aa, synthetic construct
AMRENWGILTDKLI

SEQ ID NO: 34798 - protein, 15 aa, synthetic construct
AMREGPTGGYTDKLI

SEQ ID NO: 34799 - protein, 16 aa, synthetic construct
AMRASSSYWGISYPLI

SEQ ID NO: 34800 - protein, 14 aa, synthetic construct
AMRETGGLYTDKLI

SEQ ID NO: 34801 - protein, 18 aa, synthetic construct
AMREGPSPTGGYDTDKLI

SEQ ID NO: 34802 - protein, 16 aa, synthetic construct
AMREVSCLGDYTDKLI

SEQ ID NO: 34803 - protein, 9 aa, synthetic construct
AMRETINSS

SEQ ID NO: 34804 - protein, 16 aa, synthetic construct
AMRDGGYASSWDTRQM

SEQ ID NO: 34805 - protein, 18 aa, synthetic construct
AMREPSFLFTGGYTDKLI

SEQ ID NO: 34806 - protein, 14 aa, synthetic construct
AMREILGDRTDKLI

SEQ ID NO: 34807 - protein, 18 aa, synthetic construct
AMREGGGLNLSSWDTQQM

SEQ ID NO: 34808 - protein, 15 aa, synthetic construct
AMREVVLGANTDKLI

SEQ ID NO: 34809 - protein, 17 aa, synthetic construct
AMREGFLPLGVYTDKLI

SEQ ID NO: 34810 - protein, 16 aa, synthetic construct
AMREVCWGIHWDTRQM

SEQ ID NO: 34811 - protein, 16 aa, synthetic construct
AMREGLPTWDTPMKLI

SEQ ID NO: 34812 - protein, 14 aa, synthetic construct
AMREVTGGNTDKLI

SEQ ID NO: 34813 - protein, 13 aa, synthetic construct
AMRETGGNTDKLI

SEQ ID NO: 34814 - protein, 16 aa, synthetic construct
AMREGLGDITWDTRQM

SEQ ID NO: 34815 - protein, 14 aa, synthetic construct
AMREVLGGYTDKLI

SEQ ID NO: 34816 - protein, 13 aa, synthetic construct
AMREGGANTDKLI

SEQ ID NO: 34817 - protein, 16 aa, synthetic construct
AMREGTLTGGYDDKLI

SEQ ID NO: 34818 - protein, 18 aa, synthetic construct
AMRETPSYVGGTYTDKLI

SEQ ID NO: 34819 - protein, 14 aa, synthetic construct
AMREGDLALTAQLF

SEQ ID NO: 34820 - protein, 15 aa, synthetic construct
AMREALPVGDTDKLI

SEQ ID NO: 34821 - protein, 7 aa, synthetic construct
AMREGRG

SEQ ID NO: 34822 - protein, 16 aa, synthetic construct
AMRAFLSTGGYTDKLI

SEQ ID NO: 34823 - protein, 15 aa, synthetic construct
AMRETPTGDVTDKLI

SEQ ID NO: 34824 - protein, 9 aa, synthetic construct
AMRESDKLI

SEQ ID NO: 34825 - protein, 15 aa, synthetic construct
AMRERGGGIVSDKLI

SEQ ID NO: 34826 - protein, 18 aa, synthetic construct
AMREGYYAGGYRRTDKLI

SEQ ID NO: 34827 - protein, 19 aa, synthetic construct
AMREGSLPRGVSSWDTRQM

SEQ ID NO: 34828 - protein, 17 aa, synthetic construct
AMREGPTWGYAATDKLI

SEQ ID NO: 34829 - protein, 17 aa, synthetic construct
AMRDPSFLGDRGTDKLI

SEQ ID NO: 34830 - protein, 17 aa, synthetic construct
AMREVPTGDTLLGHPTD

SEQ ID NO: 34831 - protein, 17 aa, synthetic construct
AMREGPPFLLVLVDKLI

SEQ ID NO: 34832 - protein, 11 aa, synthetic construct
AMREGSHDKLI

SEQ ID NO: 34833 - protein, 12 aa, synthetic construct
AMRGVGGPYKLI

SEQ ID NO: 34834 - protein, 17 aa, synthetic construct
AMREGFLLGGCDTDKLI

SEQ ID NO: 34835 - protein, 12 aa, synthetic construct
AMREGVGDDKLI

SEQ ID NO: 34836 - protein, 19 aa, synthetic construct
AMRDPSYVLGDTSWDTRQM

SEQ ID NO: 34837 - protein, 14 aa, synthetic construct
AMREGGDTGTDKLI

SEQ ID NO: 34838 - protein, 20 aa, synthetic construct
AMREGIVFLPKLGDATDKLI

SEQ ID NO: 34839 - protein, 13 aa, synthetic construct
AMREGGGHTDKLI

SEQ ID NO: 34840 - protein, 13 aa, synthetic construct
AMRDTRGYFDKLI

SEQ ID NO: 34841 - protein, 19 aa, synthetic construct
AMREAFLRCWGSPEPINSS

SEQ ID NO: 34842 - protein, 15 aa, synthetic construct
AMRVLGDTSWDTRQM

SEQ ID NO: 34843 - protein, 18 aa, synthetic construct
AMRETAFSILGVYTDKLI

SEQ ID NO: 34844 - protein, 19 aa, synthetic construct
AMREGGRRLGDTPHTDKLI

SEQ ID NO: 34845 - protein, 17 aa, synthetic construct
AMREPSLRHLGDTDKLI

SEQ ID NO: 34846 - protein, 16 aa, synthetic construct
AMTYLPTGGYYTDKLI

SEQ ID NO: 34847 - protein, 11 aa, synthetic construct
AMRGTGGHKLI

SEQ ID NO: 34848 - protein, 20 aa, synthetic construct
AMREAAFLGGDTRSWDTRQM

SEQ ID NO: 34849 - protein, 14 aa, synthetic construct
AMRVLGVPHTDKLI

SEQ ID NO: 34850 - protein, 17 aa, synthetic construct
AMREGSYGGYANTDKLI

SEQ ID NO: 34851 - protein, 19 aa, synthetic construct
AMREIPRTGGYELLGHPTD

SEQ ID NO: 34852 - protein, 14 aa, synthetic construct
AMREVEGGSADKLI

SEQ ID NO: 34853 - protein, 14 aa, synthetic construct
AMREGWGSDTDKLI

SEQ ID NO: 34854 - protein, 15 aa, synthetic construct
AMRPSYVSGGTDKLI

SEQ ID NO: 34855 - protein, 12 aa, synthetic construct
AMRGAGGPYKLI

SEQ ID NO: 34856 - protein, 14 aa, synthetic construct
AMRALTGGHTDKLI

SEQ ID NO: 34857 - protein, 13 aa, synthetic construct
AMREGPGGYNKLI

SEQ ID NO: 34858 - protein, 14 aa, synthetic construct
AMRETGGPDPINSS

SEQ ID NO: 34859 - protein, 18 aa, synthetic construct
AMREGLSSVLGDYTDKLI

SEQ ID NO: 34860 - protein, 14 aa, synthetic construct
QWPSLGDTRPINSS

SEQ ID NO: 34861 - protein, 14 aa, synthetic construct
AMREVWGWYTDKLI

SEQ ID NO: 34862 - protein, 18 aa, synthetic construct
AMRDLPSDWGSSWDTRQM

SEQ ID NO: 34863 - protein, 11 aa, synthetic construct
AMRVLGADKLI

SEQ ID NO: 34864 - protein, 18 aa, synthetic construct
AMRVLPTFLLGGYTDKLI

SEQ ID NO: 34865 - protein, 15 aa, synthetic construct
AMRVLGDNSWDTRQM

SEQ ID NO: 34866 - protein, 17 aa, synthetic construct
AMREGSYVGDRYTDKLI

SEQ ID NO: 34867 - protein, 19 aa, synthetic construct
AMREGPSYSGGRALTAQLF

SEQ ID NO: 34868 - protein, 16 aa, synthetic construct
AMRERLLYWGILDKLI

SEQ ID NO: 34869 - protein, 19 aa, synthetic construct
AMREGFPTSLGDTWDTRQM

SEQ ID NO: 34870 - protein, 20 aa, synthetic construct
AMREGLPPTGGPSSWDTRQM

SEQ ID NO: 34871 - protein, 13 aa, synthetic construct
AMRGGGMRTINSS

SEQ ID NO: 34872 - protein, 18 aa, synthetic construct
AMRETPPCTGGYYTDKLI

SEQ ID NO: 34873 - protein, 16 aa, synthetic construct
AMREGLLGATYTDKLI

SEQ ID NO: 34874 - protein, 18 aa, synthetic construct
AMRDGPLLGGLLYTDKLI

SEQ ID NO: 34875 - protein, 16 aa, synthetic construct
AMREPSYEVGDTDKLI

SEQ ID NO: 34876 - protein, 14 aa, synthetic construct
AMRGCTGGYSDKLI

SEQ ID NO: 34877 - protein, 16 aa, synthetic construct
AMREGSTGILYTDKLI

SEQ ID NO: 34878 - protein, 14 aa, synthetic construct
AMREGSGGYSDKLI

SEQ ID NO: 34879 - protein, 15 aa, synthetic construct
AMRILGVSSWDTRQM

SEQ ID NO: 34880 - protein, 16 aa, synthetic construct
AMRERVVLGDTTDKLI

SEQ ID NO: 34881 - protein, 14 aa, synthetic construct
AMREGGGTYTDKLI

SEQ ID NO: 34882 - protein, 12 aa, synthetic construct
AMRKLGDTDKLI

SEQ ID NO: 34883 - protein, 14 aa, synthetic construct
AMREGDTQYTDKLI

SEQ ID NO: 34884 - protein, 12 aa, synthetic construct
AMREGIHTDKLI

SEQ ID NO: 34885 - protein, 15 aa, synthetic construct
AMREVYWGIRGGKLI

SEQ ID NO: 34886 - protein, 20 aa, synthetic construct
AMREGLPLILGVSSWDTRQM

SEQ ID NO: 34887 - protein, 18 aa, synthetic construct
AMRIPTPVLGGGDTDKLI

SEQ ID NO: 34888 - protein, 12 aa, synthetic construct
AMRLGDTPTNSS

SEQ ID NO: 34889 - protein, 14 aa, synthetic construct
AMREGDGGYTGKLI

SEQ ID NO: 34890 - protein, 17 aa, synthetic construct
AMRESFLLYWGIPDKLI

SEQ ID NO: 34891 - protein, 16 aa, synthetic construct
AMREAPFTGGYTDKLI

SEQ ID NO: 34892 - protein, 21 aa, synthetic construct
AMRECLPPCTGGPSSWDTRQM

SEQ ID NO: 34893 - protein, 11 aa, synthetic construct
AMRNWGILKLI

SEQ ID NO: 34894 - protein, 16 aa, synthetic construct
AMREFPLGDTAPINSS

SEQ ID NO: 34895 - protein, 17 aa, synthetic construct
AMREARLLGILYTDKLI

SEQ ID NO: 34896 - protein, 16 aa, synthetic construct
AMRELPTAGGYAYKLI

SEQ ID NO: 34897 - protein, 15 aa, synthetic construct
AMREYLGGTGTDKLI

SEQ ID NO: 34898 - protein, 18 aa, synthetic construct
AMREGGLPTSLGDTDKLI

SEQ ID NO: 34899 - protein, 19 aa, synthetic construct
AMREGLPTDDWGIPARPLI

SEQ ID NO: 34900 - protein, 12 aa, synthetic construct
AMREGRGILRAH

SEQ ID NO: 34901 - protein, 18 aa, synthetic construct
AMRIPTPVLGGGTPINSS

SEQ ID NO: 34902 - protein, 9 aa, synthetic construct
AMRRADELI

SEQ ID NO: 34903 - protein, 13 aa, synthetic construct
AVREGTGGYDKLI

SEQ ID NO: 34904 - protein, 15 aa, synthetic construct
AMRVPSHVRISINSS

SEQ ID NO: 34905 - protein, 14 aa, synthetic construct
AMREGDTVYTDKLI

SEQ ID NO: 34906 - protein, 17 aa, synthetic construct
AMRVRLPSVLGDSDKLI

SEQ ID NO: 34907 - protein, 14 aa, synthetic construct
AMSPTLWGDTDNLI

SEQ ID NO: 34908 - protein, 15 aa, synthetic construct
VMRETPTGDVTDKLI

SEQ ID NO: 34909 - protein, 18 aa, synthetic construct
AMREGFQTGGYGYTDKLI

SEQ ID NO: 34910 - protein, 19 aa, synthetic construct
AMREGLLQGVSSSWDTRQM

SEQ ID NO: 34911 - protein, 16 aa, synthetic construct
AMRESRWGIRGTDKLI

SEQ ID NO: 34912 - protein, 13 aa, synthetic construct
TMREYWGIRDKLI

SEQ ID NO: 34913 - protein, 14 aa, synthetic construct
ATREGWGILGDKLI

SEQ ID NO: 34914 - protein, 13 aa, synthetic construct
AMREGGGPPINSS

SEQ ID NO: 34915 - protein, 18 aa, synthetic construct
AMREGIPLGGYAGTDKLI

SEQ ID NO: 34916 - protein, 15 aa, synthetic construct
AMREVPTGGYTDKLI

SEQ ID NO: 34917 - protein, 10 aa, synthetic construct
ATRENTDKLI

SEQ ID NO: 34918 - protein, 13 aa, synthetic construct
ATSVLGDYTDKLI

SEQ ID NO: 34919 - protein, 11 aa, synthetic construct
AMRGGNTDKLI

SEQ ID NO: 34920 - protein, 14 aa, synthetic construct
AMREHTGGYGDKLV

SEQ ID NO: 34921 - protein, 15 aa, synthetic construct
AMREGSGGIRTNKLI

SEQ ID NO: 34922 - protein, 11 aa, synthetic construct
AMGLGDPDNSS

SEQ ID NO: 34923 - protein, 17 aa, synthetic construct
AMSPSCVSGDTATDKLI

SEQ ID NO: 34924 - protein, 13 aa, synthetic construct
AMREGGVRGINSS

SEQ ID NO: 34925 - protein, 12 aa, synthetic construct
AIREGRGYGGLI

SEQ ID NO: 34926 - protein, 15 aa, synthetic construct
AMREGGWGIDTDKLI

SEQ ID NO: 34927 - protein, 12 aa, synthetic construct
AMRKLGDADKLI

SEQ ID NO: 34928 - protein, 17 aa, synthetic construct
AMREGATLLGDTPMNSS

SEQ ID NO: 34929 - protein, 17 aa, synthetic construct
AMREGIPTSGAPPINSS

SEQ ID NO: 34930 - protein, 14 aa, synthetic construct
ATRAFLVRWIPKLI

SEQ ID NO: 34931 - protein, 13 aa, synthetic construct
AMRDLLGDTRGLI

SEQ ID NO: 34932 - protein, 13 aa, synthetic construct
AMREGGIPPGKLI

SEQ ID NO: 34933 - protein, 13 aa, synthetic construct
AMRGVPGDTDKLI

SEQ ID NO: 34934 - protein, 15 aa, synthetic construct
AMRETGGYGYTDKLI

SEQ ID NO: 34935 - protein, 10 aa, synthetic construct
AMSTGGSDKL

SEQ ID NO: 34936 - protein, 14 aa, synthetic construct
AMREVWGKTPINSS

SEQ ID NO: 34937 - protein, 19 aa, synthetic construct
AMREGLPPRTGGYYTDKLI

SEQ ID NO: 34938 - protein, 14 aa, synthetic construct
AMRGLGDIRTDKLI

SEQ ID NO: 34939 - protein, 13 aa, synthetic construct
AMREGRGIPDKLI

SEQ ID NO: 34940 - protein, 18 aa, synthetic construct
AMREKGTFLPVWGGDKLV

SEQ ID NO: 34941 - protein, 17 aa, synthetic construct
AMREIPTYWGKGPINSS

SEQ ID NO: 34942 - protein, 11 aa, synthetic construct
AMRGTDTDKRI

SEQ ID NO: 34943 - protein, 13 aa, synthetic construct
AMRGWGGTPINSS

SEQ ID NO: 34944 - protein, 12 aa, synthetic construct
AMREGRGYDKLI

SEQ ID NO: 34945 - protein, 12 aa, synthetic construct
AMRELGIPINSS

SEQ ID NO: 34946 - protein, 19 aa, synthetic construct
AMREGGLKDTGGCTPINSS

SEQ ID NO: 34947 - protein, 13 aa, synthetic construct
AMREGRGNDDKLI

SEQ ID NO: 34948 - protein, 12 aa, synthetic construct
AMRELGGTDKLI

SEQ ID NO: 34949 - protein, 17 aa, synthetic construct
AMREGPPWYWGPTDRLI

SEQ ID NO: 34950 - protein, 18 aa, synthetic construct
AMRIPTPVRGGGDTDKLI

SEQ ID NO: 34951 - protein, 16 aa, synthetic construct
AMREGPWWGIRADKLI

SEQ ID NO: 34952 - protein, 15 aa, synthetic construct
AMRGLGDTGRPIYSS

SEQ ID NO: 34953 - protein, 16 aa, synthetic construct
AMREGPRGVRFPDKLI

SEQ ID NO: 34954 - protein, 11 aa, synthetic construct
AMRGRDTDKLI

SEQ ID NO: 34955 - protein, 17 aa, synthetic construct
AMREGIPTSGPPPINSS

SEQ ID NO: 34956 - protein, 13 aa, synthetic construct
AMRSYWGIRDKPI

SEQ ID NO: 34957 - protein, 15 aa, synthetic construct
AMRETSGGYGEINSS

SEQ ID NO: 34958 - protein, 15 aa, synthetic construct
AMREGHWGVYTDKLV

SEQ ID NO: 34959 - protein, 12 aa, synthetic construct
AMREGDSTGKLI

SEQ ID NO: 34960 - protein, 17 aa, synthetic construct
AMREGLRLGDTRAINSS

SEQ ID NO: 34961 - protein, 13 aa, synthetic construct
AMREGLGAFDKLI

SEQ ID NO: 34962 - protein, 15 aa, synthetic construct
AMRERVGPSYTDKLI

SEQ ID NO: 34963 - protein, 13 aa, synthetic construct
AMREGDTGSINSS

SEQ ID NO: 34964 - protein, 13 aa, synthetic construct
AMREYWGTPMNSS

SEQ ID NO: 34965 - protein, 13 aa, synthetic construct
AMREGDTPADKLI

SEQ ID NO: 34966 - protein, 18 aa, synthetic construct
AMREPSYAATGGYTDKLI

SEQ ID NO: 34967 - protein, 13 aa, synthetic construct
AMRGQGGYTDKLI

SEQ ID NO: 34968 - protein, 15 aa, synthetic construct
AMRESLGDTEADKLI

SEQ ID NO: 34969 - protein, 14 aa, synthetic construct
AMREPLRPYWGTRA

SEQ ID NO: 34970 - protein, 12 aa, synthetic construct
AMREGWGIFRAH

SEQ ID NO: 34971 - protein, 16 aa, synthetic construct
AMRESFLPYWGTDKPI

SEQ ID NO: 34972 - protein, 17 aa, synthetic construct
AMREGLRGIRAETDKLV

SEQ ID NO: 34973 - protein, 17 aa, synthetic construct
AMREGPSTGARTPINSS

SEQ ID NO: 34974 - protein, 12 aa, synthetic construct
AMRGTGDRINSS

SEQ ID NO: 34975 - protein, 10 aa, synthetic construct
AMRENPNELI

SEQ ID NO: 34976 - protein, 17 aa, synthetic construct
AMRGDLPTLLGDTDKLI

SEQ ID NO: 34977 - protein, 12 aa, synthetic construct
AMRESGESVQLF

SEQ ID NO: 34978 - protein, 13 aa, synthetic construct
AMREGWGVPDKLI

SEQ ID NO: 34979 - protein, 11 aa, synthetic construct
AMREGNTEKLI

SEQ ID NO: 34980 - protein, 15 aa, synthetic construct
AMRESGGYAGTGKLI

SEQ ID NO: 34981 - protein, 13 aa, synthetic construct
AMRENLGNQHNSS

SEQ ID NO: 34982 - protein, 14 aa, synthetic construct
AMREYLGDTPINSS

SEQ ID NO: 34983 - protein, 17 aa, synthetic construct
AMREEVPGGHLLGHPTD

SEQ ID NO: 34984 - protein, 10 aa, synthetic construct
AAGDTGDKLI

SEQ ID NO: 34985 - protein, 17 aa, synthetic construct
AVREDFLPLLGDTDKLI

SEQ ID NO: 34986 - protein, 11 aa, synthetic construct
AMRDPYIDKLI

SEQ ID NO: 34987 - protein, 13 aa, synthetic construct
ATREILEGPDKLI

SEQ ID NO: 34988 - protein, 15 aa, synthetic construct
AMGDSHGSRDTDKLI

SEQ ID NO: 34989 - protein, 13 aa, synthetic construct
ATREGYANPDKLI

SEQ ID NO: 34990 - protein, 17 aa, synthetic construct
ATREGSTGGYGDPDKLI

SEQ ID NO: 34991 - protein, 17 aa, synthetic construct
AMRDPSYVWGRTPINSS

SEQ ID NO: 34992 - protein, 12 aa, synthetic construct
AMRVPTLGCELI

SEQ ID NO: 34993 - protein, 12 aa, synthetic construct
NERGPGGHDKLI

SEQ ID NO: 34994 - protein, 12 aa, synthetic construct
AMSTGGYPDKLI

SEQ ID NO: 34995 - protein, 10 aa, synthetic construct
AIPRGYDKLI

SEQ ID NO: 34996 - protein, 12 aa, synthetic construct
AMRVQGNTDKLI

SEQ ID NO: 34997 - protein, 10 aa, synthetic construct
ATGDTGNKLI

SEQ ID NO: 34998 - protein, 13 aa, synthetic construct
AMKEASLCTGTLI

SEQ ID NO: 34999 - protein, 13 aa, synthetic construct
AVRTSVGDTDKLI

SEQ ID NO: 35000 - protein, 14 aa, synthetic construct
AMREAVLGDADKLI

SEQ ID NO: 35001 - protein, 15 aa, synthetic construct
AMKESYVWGTARPLI

SEQ ID NO: 35002 - protein, 13 aa, synthetic construct
AMRDGGLAPINSS

SEQ ID NO: 35003 - protein, 15 aa, synthetic construct
AMREAPTGGNTDKLV

SEQ ID NO: 35004 - protein, 13 aa, synthetic construct
AMRVTGERTDKLI

SEQ ID NO: 35005 - skipped

SEQ ID NO: 35006 - protein, 16 aa, synthetic construct
AMREAFLWGLPPDKLI

SEQ ID NO: 35007 - protein, 15 aa, synthetic construct
ALREGVVGDTADKLI

SEQ ID NO: 35008 - protein, 23 aa, synthetic construct
AMREAFPPFPLYFGAGTQLSVLE

SEQ ID NO: 35009 - protein, 19 aa, synthetic construct
AMREAFPPLPLVLWCGHPT

SEQ ID NO: 35010 - protein, 15 aa, synthetic construct
AMRAVSVGDYTDKLI

SEQ ID NO: 35011 - protein, 11 aa, synthetic construct
AMREAGGHKLI

SEQ ID NO: 35012 - protein, 12 aa, synthetic construct
AVREGWGIRLLT

SEQ ID NO: 35013 - protein, 14 aa, synthetic construct
VMREGDTMYTDKLI

SEQ ID NO: 35014 - protein, 14 aa, synthetic construct
AIREGWGMYTDKLI

SEQ ID NO: 35015 - protein, 19 aa, synthetic construct
AMREDLPPTRLGDTPINSS

SEQ ID NO: 35016 - protein, 10 aa, synthetic construct
AVRDHTDKLI

SEQ ID NO: 35017 - protein, 13 aa, synthetic construct
ATRVLLGDTDKLI

SEQ ID NO: 35018 - protein, 16 aa, synthetic construct
AMRDDVPGDTITDKLI

SEQ ID NO: 35019 - protein, 14 aa, synthetic construct
AMREKGGIRGDKLI

SEQ ID NO: 35020 - protein, 14 aa, synthetic construct
AMRDFLPPVTDKLI

SEQ ID NO: 35021 - protein, 15 aa, synthetic construct
AMRDVRRGDTSDKLI

SEQ ID NO: 35022 - protein, 15 aa, synthetic construct
AMRGWGIRGAPINSS

SEQ ID NO: 35023 - protein, 14 aa, synthetic construct
AMREGLGVKTAQLF

SEQ ID NO: 35024 - protein, 14 aa, synthetic construct
AMREGLGVHTNKLI

SEQ ID NO: 35025 - protein, 15 aa, synthetic construct
AMREITGRGHTDKLI

SEQ ID NO: 35026 - protein, 14 aa, synthetic construct
AMRGWGIQYTDKLV

SEQ ID NO: 35027 - protein, 14 aa, synthetic construct
ALREGGDFYTDKLI

SEQ ID NO: 35028 - protein, 13 aa, synthetic construct
AMRDARGYFDKLI

SEQ ID NO: 35029 - protein, 14 aa, synthetic construct
AMREGLLLTGYKLI

SEQ ID NO: 35030 - protein, 14 aa, synthetic construct
AMRGWGVQYTDKLI

SEQ ID NO: 35031 - protein, 12 aa, synthetic construct
AMRDGGCAINSS

SEQ ID NO: 35032 - protein, 18 aa, synthetic construct
AMREKGTFLPVWGGINSS

SEQ ID NO: 35033 - protein, 15 aa, synthetic construct
AMREIPTGGNTDKLI

SEQ ID NO: 35034 - protein, 12 aa, synthetic construct
AMREKLGDNKLI

SEQ ID NO: 35035 - protein, 14 aa, synthetic construct
AMREGGGTYTDKLT

SEQ ID NO: 35036 - protein, 14 aa, synthetic construct
AMRGYWGEYTDKLI

SEQ ID NO: 35037 - protein, 13 aa, synthetic construct
AMREVTGDGNKLI

SEQ ID NO: 35038 - protein, 13 aa, synthetic construct
AMREGLGDTDTLI

SEQ ID NO: 35039 - protein, 13 aa, synthetic construct
AMREGLGDTDKPI

SEQ ID NO: 35040 - protein, 11 aa, synthetic construct
GLREGGPDKLI

SEQ ID NO: 35041 - protein, 13 aa, synthetic construct
AMSLGVRGGDKLI

SEQ ID NO: 35042 - protein, 13 aa, synthetic construct
AMREGLGDPDKLI

SEQ ID NO: 35043 - protein, 15 aa, synthetic construct
AMTESVLGDTADKLI

SEQ ID NO: 35044 - protein, 16 aa, synthetic construct
AMRHYPTGGSPPEKLI

SEQ ID NO: 35045 - protein, 15 aa, synthetic construct
AMREKYWGPYTDKLV

SEQ ID NO: 35046 - protein, 10 aa, synthetic construct
AMWGVPINSS

SEQ ID NO: 35047 - protein, 13 aa, synthetic construct
ANEKGGDTPINSS

SEQ ID NO: 35048 - protein, 16 aa, synthetic construct
AMREGLFGGGGADKLI

SEQ ID NO: 35049 - protein, 11 aa, synthetic construct
AMRGVGFGKLI

SEQ ID NO: 35050 - protein, 15 aa, synthetic construct
AMREGLTGGYTDKLI

SEQ ID NO: 35051 - protein, 16 aa, synthetic construct
AMRASSSYWGISYPPI

SEQ ID NO: 35052 - protein, 13 aa, synthetic construct
EMRRDWGIHDKLI

SEQ ID NO: 35053 - protein, 17 aa, synthetic construct
AMREGLRSGGLYTDRLI

SEQ ID NO: 35054 - protein, 17 aa, synthetic construct
AMREGLRLGVPHTDKLI

SEQ ID NO: 35055 - protein, 15 aa, synthetic construct
AMREHWGIRWSDKPI

SEQ ID NO: 35056 - protein, 15 aa, synthetic construct
AMREHWGSSWDTRQM

SEQ ID NO: 35057 - protein, 13 aa, synthetic construct
AMRASYWGLDKLI

SEQ ID NO: 35058 - protein, 15 aa, synthetic construct
AMREWDYWGITDKLI

SEQ ID NO: 35059 - protein, 13 aa, synthetic construct
AMREGLRATINSS

SEQ ID NO: 35060 - protein, 13 aa, synthetic construct
AMRGTYWGADILI

SEQ ID NO: 35061 - protein, 14 aa, synthetic construct
EMSCVLGDKGDKLI

SEQ ID NO: 35062 - protein, 20 aa, synthetic construct
AMREGLPTTWGTFALPAQLF

SEQ ID NO: 35063 - protein, 14 aa, synthetic construct
AMRATGGYLTPINS

SEQ ID NO: 35064 - protein, 13 aa, synthetic construct
AMREVWGIPGNLI

SEQ ID NO: 35065 - protein, 14 aa, synthetic construct
ALREGLGGHTDKLI

SEQ ID NO: 35066 - protein, 15 aa, synthetic construct
AMRAVLGDIGTDKLI

SEQ ID NO: 35067 - protein, 16 aa, synthetic construct
AMREGGGPLLVPINSS

SEQ ID NO: 35068 - protein, 16 aa, synthetic construct
AMRPFLRGDLGTDKLI

SEQ ID NO: 35069 - protein, 8 aa, synthetic construct
AMRPDNSS

SEQ ID NO: 35070 - protein, 13 aa, synthetic construct
AMRGVLGETDNSS

SEQ ID NO: 35071 - protein, 15 aa, synthetic construct
AMRGVLGVSGTDKLI

SEQ ID NO: 35072 - protein, 19 aa, synthetic construct
AMREPGRVLGDTRNTDKLI

SEQ ID NO: 35073 - protein, 14 aa, synthetic construct
AKREGGDTGTDKLI

SEQ ID NO: 35074 - protein, 18 aa, synthetic construct
AMREILWGIREGYTDKLT

SEQ ID NO: 35075 - protein, 14 aa, synthetic construct
AMREIPGDRTDKLI

SEQ ID NO: 35076 - protein, 14 aa, synthetic construct
AMREGLMGDTDKLI

SEQ ID NO: 35077 - protein, 13 aa, synthetic construct
AMSLGVRGADKLI

SEQ ID NO: 35078 - protein, 12 aa, synthetic construct
AMRELGDADKLI

SEQ ID NO: 35079 - protein, 14 aa, synthetic construct
PMREGDGGYTDKLI

SEQ ID NO: 35080 - protein, 16 aa, synthetic construct
AMRDRLWGIRDTDKLI

SEQ ID NO: 35081 - protein, 15 aa, synthetic construct
AMRNTGGYKGTDKLI

SEQ ID NO: 35082 - protein, 15 aa, synthetic construct
AMREGGWGTDTDNSS

SEQ ID NO: 35083 - protein, 13 aa, synthetic construct
AKRGNWGIPDKLI

SEQ ID NO: 35084 - protein, 13 aa, synthetic construct
AMREGGWGPINSS

SEQ ID NO: 35085 - protein, 15 aa, synthetic construct
AMRDPPYGGDTDKLI

SEQ ID NO: 35086 - protein, 15 aa, synthetic construct
AMREVLLGDLPDKLI

SEQ ID NO: 35087 - protein, 17 aa, synthetic construct
AMREPCLPRGDTGGKLI

SEQ ID NO: 35088 - protein, 14 aa, synthetic construct
AMREMGATWDTRQT

SEQ ID NO: 35089 - protein, 13 aa, synthetic construct
AMREMGVYNDKLI

SEQ ID NO: 35090 - protein, 12 aa, synthetic construct
AMRMGNTTDKLI

SEQ ID NO: 35091 - protein, 16 aa, synthetic construct
AMREGGLGTGTPINSS

SEQ ID NO: 35092 - protein, 13 aa, synthetic construct
AMRLGDTYTNKLI

SEQ ID NO: 35093 - protein, 50 aa, synthetic construct
PKEVTISLRSSKKIVEFDPAIVISPSGKYSAVKLGQYGDSNSVTCSVQHN

SEQ ID NO: 35094 - protein, 17 aa, synthetic construct
AMREPCLPGGDTGDKLI

SEQ ID NO: 35095 - protein, 17 aa, synthetic construct
AMRENYGWGVPTPINSS

SEQ ID NO: 35096 - protein, 12 aa, synthetic construct
AKREGPGGDKLI

SEQ ID NO: 35097 - protein, 13 aa, synthetic construct
AMRENGGYENKLI

SEQ ID NO: 35098 - protein, 14 aa, synthetic construct
AMREGGTQYTDKLI

SEQ ID NO: 35099 - protein, 19 aa, synthetic construct
AMREGGLLSHWGILSDKLI

SEQ ID NO: 35100 - protein, 12 aa, synthetic construct
AMREGGSTDKLI

SEQ ID NO: 35101 - protein, 12 aa, synthetic construct
AMRLLGDTDELI

SEQ ID NO: 35102 - protein, 14 aa, synthetic construct
AMREVLGGTPINSS

SEQ ID NO: 35103 - protein, 10 aa, synthetic construct
AMREGGRNLI

SEQ ID NO: 35104 - protein, 17 aa, synthetic construct
PMRDPSYDWGIQGDKLI

SEQ ID NO: 35105 - protein, 11 aa, synthetic construct
PMREAGGYKLI

SEQ ID NO: 35106 - protein, 14 aa, synthetic construct
AMREVLGDYTDKHI

SEQ ID NO: 35107 - protein, 11 aa, synthetic construct
AMREVLGGGDT

SEQ ID NO: 35108 - protein, 18 aa, synthetic construct
AMREGGPYWGISTPINSS

SEQ ID NO: 35109 - protein, 16 aa, synthetic construct
AMRENSYGLGDADKLI

SEQ ID NO: 35110 - protein, 10 aa, synthetic construct
AMRENTDRLI

SEQ ID NO: 35111 - protein, 15 aa, synthetic construct
AMREPCTGKYTDKLV

SEQ ID NO: 35112 - protein, 14 aa, synthetic construct
AMRDLSGGDTDKLI

SEQ ID NO: 35113 - protein, 11 aa, synthetic construct
AMSTGGSDKPI

SEQ ID NO: 35114 - protein, 13 aa, synthetic construct
ALREGPGVTDKLI

SEQ ID NO: 35115 - protein, 15 aa, synthetic construct
AMREVLGDRGTDKLI

SEQ ID NO: 35116 - protein, 16 aa, synthetic construct
AMREGLFCWGGADKLI

SEQ ID NO: 35117 - protein, 17 aa, synthetic construct
AMREGLDWGSCTPINSS

SEQ ID NO: 35118 - protein, 7 aa, synthetic construct
AMTDNSS

SEQ ID NO: 35119 - protein, 17 aa, synthetic construct
AMREGLDWGILYADKLI

SEQ ID NO: 35120 - protein, 11 aa, synthetic construct
AMREGIRYKLV

SEQ ID NO: 35121 - protein, 14 aa, synthetic construct
AMREGIRYGTYKLI

SEQ ID NO: 35122 - protein, 14 aa, synthetic construct
AMRDHTGGYPINSS

SEQ ID NO: 35123 - protein, 11 aa, synthetic construct
AMRELLGDKLT

SEQ ID NO: 35124 - protein, 12 aa, synthetic construct
AMREGIRGDKLI

SEQ ID NO: 35125 - protein, 15 aa, synthetic construct
AMREGIPTSGDTPIN

SEQ ID NO: 35126 - protein, 17 aa, synthetic construct
AMREPFVTGGGDTDKLI

SEQ ID NO: 35127 - protein, 10 aa, synthetic construct
AMRDLGDKLI

SEQ ID NO: 35128 - protein, 12 aa, synthetic construct
AKWGVQYTDKLI

SEQ ID NO: 35129 - protein, 16 aa, synthetic construct
AMREVLGDTCRPINSS

SEQ ID NO: 35130 - protein, 17 aa, synthetic construct
AMREGIPTPGAPPDKLI

SEQ ID NO: 35131 - protein, 13 aa, synthetic construct
AMRDLGDTPINSS

SEQ ID NO: 35132 - protein, 13 aa, synthetic construct
AMRDLGDTVDKLI

SEQ ID NO: 35133 - protein, 15 aa, synthetic construct
AMREGHWGVYTDRLI

SEQ ID NO: 35134 - protein, 13 aa, synthetic construct
AMRDLLGALDKLI

SEQ ID NO: 35135 - protein, 15 aa, synthetic construct
AMREGHVGIPTDKLI

SEQ ID NO: 35136 - protein, 13 aa, synthetic construct
PMREGTGGYDKLI

SEQ ID NO: 35137 - protein, 18 aa, synthetic construct
AMRKGSPGGTGGYTDKLI

SEQ ID NO: 35138 - protein, 11 aa, synthetic construct
AMSTVGTINSS

SEQ ID NO: 35139 - protein, 15 aa, synthetic construct
AMRELPTGGYADRLI

SEQ ID NO: 35140 - protein, 16 aa, synthetic construct
AMRELPTGGYVTDKLI

SEQ ID NO: 35141 - protein, 12 aa, synthetic construct
AMREGGYTDKLN

SEQ ID NO: 35142 - protein, 11 aa, synthetic construct
AMSTGVTINSS

SEQ ID NO: 35143 - protein, 12 aa, synthetic construct
AMREVLGDLKHI

SEQ ID NO: 35144 - protein, 6 aa, synthetic construct
ACDKLF

SEQ ID NO: 35145 - protein, 12 aa, synthetic construct
AMRAPTLGYELI

SEQ ID NO: 35146 - protein, 14 aa, synthetic construct
ATREGRGYGVDKLI

SEQ ID NO: 35147 - protein, 11 aa, synthetic construct
ATREGIRYKLI

SEQ ID NO: 35148 - protein, 13 aa, synthetic construct
ATREGLGATINSS

SEQ ID NO: 35149 - protein, 15 aa, synthetic construct
ATREGLLGDEADKLI

SEQ ID NO: 35150 - protein, 16 aa, synthetic construct
AMREGRGPGGYSDKLI

SEQ ID NO: 35151 - protein, 14 aa, synthetic construct
AVRESGGSRRDKLI

SEQ ID NO: 35152 - protein, 14 aa, synthetic construct
AMGAFLVRWIPKLI

SEQ ID NO: 35153 - protein, 13 aa, synthetic construct
AMREGTGGYDNLI

SEQ ID NO: 35154 - protein, 13 aa, synthetic construct
AMREYWGTPINSS

SEQ ID NO: 35155 - protein, 14 aa, synthetic construct
AVREGWGMYTDKLI

SEQ ID NO: 35156 - protein, 14 aa, synthetic construct
AMRGAVLGDTDKLI

SEQ ID NO: 35157 - protein, 13 aa, synthetic construct
AMGVLGDTADKLI

SEQ ID NO: 35158 - protein, 13 aa, synthetic construct
AMREGRGYTDTLI

SEQ ID NO: 35159 - protein, 17 aa, synthetic construct
AMRGGSTGGYGDPDKLI

SEQ ID NO: 35160 - protein, 16 aa, synthetic construct
AMRGGRWGIRGTDKLI

SEQ ID NO: 35161 - protein, 13 aa, synthetic construct
AMRGAGGNTDKLI

SEQ ID NO: 35162 - protein, 14 aa, synthetic construct
AMAEPGGYATDKLI

SEQ ID NO: 35163 - protein, 17 aa, synthetic construct
AMRGAFLLSGILTDKLI

SEQ ID NO: 35164 - protein, 19 aa, synthetic construct
AMIEVLLGDTRRGATDKLI

SEQ ID NO: 35165 - protein, 13 aa, synthetic construct
ATREGDTRSDKLI

SEQ ID NO: 35166 - protein, 15 aa, synthetic construct
ATREGALGGYTDKLI

SEQ ID NO: 35167 - protein, 16 aa, synthetic construct
ATREDPYGGTTPINSS

SEQ ID NO: 35168 - protein, 11 aa, synthetic construct
AMRFNTGAKLI

SEQ ID NO: 35169 - protein, 13 aa, synthetic construct
AMREGRGDTDKPI

SEQ ID NO: 35170 - protein, 13 aa, synthetic construct
AMREGRGDTDKLV

SEQ ID NO: 35171 - protein, 15 aa, synthetic construct
AMREGRGDKTPINSS

SEQ ID NO: 35172 - protein, 10 aa, synthetic construct
ATLGARDKPI

SEQ ID NO: 35173 - protein, 17 aa, synthetic construct
AMIPSYVLGDTATDKLI

SEQ ID NO: 35174 - protein, 14 aa, synthetic construct
AMREYWGTRADKLI

SEQ ID NO: 35175 - protein, 15 aa, synthetic construct
AMRGLGDTSWDTRQM

SEQ ID NO: 35176 - protein, 16 aa, synthetic construct
AVREYVLGATYTDKLI

SEQ ID NO: 35177 - protein, 13 aa, synthetic construct
AMREGVGDTDTLI

SEQ ID NO: 35178 - protein, 14 aa, synthetic construct
AMGSPYWGIQAKLI

SEQ ID NO: 35179 - protein, 14 aa, synthetic construct
AMREGTGGHTDQLI

SEQ ID NO: 35180 - protein, 18 aa, synthetic construct
AVREGSPGGTGGYTDKLI

SEQ ID NO: 35181 - protein, 14 aa, synthetic construct
AMREGSGGSTPITH

SEQ ID NO: 35182 - protein, 14 aa, synthetic construct
AMGEGWGMYTDKLI

SEQ ID NO: 35183 - protein, 21 aa, synthetic construct
AVRECLPPCTGGPSSWDTRQM

SEQ ID NO: 35184 - protein, 18 aa, synthetic construct
AMGEKSYVSGGYGSDKLI

SEQ ID NO: 35185 - protein, 14 aa, synthetic construct
AVREGFGGYENKLI

SEQ ID NO: 35186 - protein, 15 aa, synthetic construct
AMGEGRTGGSTDKLI

SEQ ID NO: 35187 - protein, 11 aa, synthetic construct
AVRDPYTDKLI

SEQ ID NO: 35188 - protein, 12 aa, synthetic construct
AMGEGRGIYKLI

SEQ ID NO: 35189 - protein, 14 aa, synthetic construct
AMREGSYLGTDKLI

SEQ ID NO: 35190 - protein, 14 aa, synthetic construct
AMRGGLGGHTDKLI

SEQ ID NO: 35191 - protein, 13 aa, synthetic construct
AMRGGGIQGSTTL

SEQ ID NO: 35192 - protein, 15 aa, synthetic construct
AMGEVSVGDYTDKLI

SEQ ID NO: 35193 - protein, 13 aa, synthetic construct
AMRGGLYWGPNSS

SEQ ID NO: 35194 - protein, 14 aa, synthetic construct
AVREGLGEYTDKLI

SEQ ID NO: 35195 - protein, 15 aa, synthetic construct
AMRGGLYWRYPDKLI

SEQ ID NO: 35196 - protein, 12 aa, synthetic construct
ATRVLGNTDKLI

SEQ ID NO: 35197 - protein, 14 aa, synthetic construct
AMRGGRGENTDKLI

SEQ ID NO: 35198 - protein, 14 aa, synthetic construct
AMGEGPGGYNDKLI

SEQ ID NO: 35199 - protein, 15 aa, synthetic construct
AMREGSGGIRTDNSS

SEQ ID NO: 35200 - protein, 13 aa, synthetic construct
AMRGGEGDTGKLI

SEQ ID NO: 35201 - protein, 13 aa, synthetic construct
AMREGSGAPDKPI

SEQ ID NO: 35202 - protein, 20 aa, synthetic construct
AMRGGPHPSRLLGAGADKLI

SEQ ID NO: 35203 - protein, 11 aa, synthetic construct
AMRGGDPNKLI

SEQ ID NO: 35204 - protein, 18 aa, synthetic construct
AMREGRWGIRKLLGHPTD

SEQ ID NO: 35205 - protein, 12 aa, synthetic construct
AMREGRVLRELI

SEQ ID NO: 35206 - protein, 16 aa, synthetic construct
AMREGRTGGAYTDKLI

SEQ ID NO: 35207 - protein, 12 aa, synthetic construct
AMRGGPNADKLI

SEQ ID NO: 35208 - protein, 15 aa, synthetic construct
AMREGTGAPYTDKLI

SEQ ID NO: 35209 - protein, 14 aa, synthetic construct
AMGEGEGGYPDKLI

SEQ ID NO: 35210 - protein, 13 aa, synthetic construct
ATRERGYAADKLI

SEQ ID NO: 35211 - protein, 14 aa, synthetic construct
AMGEGDGGYTDKLI

SEQ ID NO: 35212 - protein, 21 aa, synthetic construct
AMREGQPPCTGGYARYTDQLI

SEQ ID NO: 35213 - protein, 12 aa, synthetic construct
AMREGQGSDKLI

SEQ ID NO: 35214 - protein, 10 aa, synthetic construct
AMRANTDKLI

SEQ ID NO: 35215 - protein, 14 aa, synthetic construct
AMREYRGIGTDKLI

SEQ ID NO: 35216 - protein, 15 aa, synthetic construct
AMREGWWGVCTDKLI

SEQ ID NO: 35217 - protein, 13 aa, synthetic construct
AMREGPHVGINSS

SEQ ID NO: 35218 - protein, 12 aa, synthetic construct
ALREGTGNDKLI

SEQ ID NO: 35219 - protein, 14 aa, synthetic construct
AMREGWREYTDKLI

SEQ ID NO: 35220 - protein, 13 aa, synthetic construct
AMRGRMREGDKLI

SEQ ID NO: 35221 - protein, 20 aa, synthetic construct
AMREGPLPSRLLGAGADELI

SEQ ID NO: 35222 - protein, 12 aa, synthetic construct
ARREPGGPDKLI

SEQ ID NO: 35223 - protein, 13 aa, synthetic construct
AMIYWGMRSDKLI

SEQ ID NO: 35224 - protein, 14 aa, synthetic construct
AMREGWGVGAINSS

SEQ ID NO: 35225 - protein, 14 aa, synthetic construct
AMREGWGTYTDKLI

SEQ ID NO: 35226 - protein, 15 aa, synthetic construct
AMREGPLPWGIPGLI

SEQ ID NO: 35227 - protein, 15 aa, synthetic construct
AMRAFLRTGGSRPLI

SEQ ID NO: 35228 - protein, 12 aa, synthetic construct
AMREGWGSDKLI

SEQ ID NO: 35229 - protein, 12 aa, synthetic construct
AMREGWGQRKLN

SEQ ID NO: 35230 - protein, 13 aa, synthetic construct
ALREGTGDTDKLI

SEQ ID NO: 35231 - protein, 15 aa, synthetic construct
AMREGPHGDTGDKLI

SEQ ID NO: 35232 - protein, 19 aa, synthetic construct
AMRGSPPTGGGYEYTDKLI

SEQ ID NO: 35233 - protein, 14 aa, synthetic construct
AMREGPGGYTDRLI

SEQ ID NO: 35234 - protein, 14 aa, synthetic construct
AMREGPGGYAEKLI

SEQ ID NO: 35235 - protein, 13 aa, synthetic construct
AMREGPGGLDKLT

SEQ ID NO: 35236 - protein, 14 aa, synthetic construct
AMREGPGGHTDKLI

SEQ ID NO: 35237 - protein, 15 aa, synthetic construct
AMRGSTGGFGPDKLI

SEQ ID NO: 35238 - protein, 15 aa, synthetic construct
AMREGYLGIPTDKLI

SEQ ID NO: 35239 - protein, 17 aa, synthetic construct
AMREPLRPYWGTSINSS

SEQ ID NO: 35240 - protein, 17 aa, synthetic construct
AMREGYSYGDGVTDRLI

SEQ ID NO: 35241 - protein, 13 aa, synthetic construct
AMRAILGDPDKLI

SEQ ID NO: 35242 - protein, 13 aa, synthetic construct
AMRGTEGGTDKLI

SEQ ID NO: 35243 - protein, 9 aa, synthetic construct
AMREYDKLI

SEQ ID NO: 35244 - protein, 17 aa, synthetic construct
AMREGYWGILSLTAQLF

SEQ ID NO: 35245 - protein, 12 aa, synthetic construct
AMREGMGDTWTH

SEQ ID NO: 35246 - protein, 15 aa, synthetic construct
AMRGTGGSGITDKLI

SEQ ID NO: 35247 - protein, 10 aa, synthetic construct
ALRENTDKLI

SEQ ID NO: 35248 - protein, 13 aa, synthetic construct
AMRAAGGSGDKLI

SEQ ID NO: 35249 - protein, 11 aa, synthetic construct
ALRERDTDKLI

SEQ ID NO: 35250 - protein, 13 aa, synthetic construct
AMREYWGIRAKLI

SEQ ID NO: 35251 - protein, 18 aa, synthetic construct
AVRGTFLHTGGYLTDKLI

SEQ ID NO: 35252 - protein, 18 aa, synthetic construct
AVRGTFLHTGGYLTDKLV

SEQ ID NO: 35253 - protein, 17 aa, synthetic construct
AMREGVLHRKGGGHKLI

SEQ ID NO: 35254 - protein, 16 aa, synthetic construct
AMKDLLGDTVSTDKLI

SEQ ID NO: 35255 - protein, 18 aa, synthetic construct
AMKEAFPPFPLYPGAGTR

SEQ ID NO: 35256 - protein, 17 aa, synthetic construct
AMREGPYVGDTRDTRQM

SEQ ID NO: 35257 - protein, 10 aa, synthetic construct
AVRTGERGLI

SEQ ID NO: 35258 - protein, 17 aa, synthetic construct
AMRGLPAYWGIQADKLI

SEQ ID NO: 35259 - protein, 11 aa, synthetic construct
ASREGGPDKLI

SEQ ID NO: 35260 - protein, 13 aa, synthetic construct
ASREGGIPPDKLI

SEQ ID NO: 35261 - protein, 13 aa, synthetic construct
AMREYWGMSDRLI

SEQ ID NO: 35262 - protein, 15 aa, synthetic construct
ALRGTGGYGTTDKLI

SEQ ID NO: 35263 - protein, 14 aa, synthetic construct
AVSCVLGDKGDKLI

SEQ ID NO: 35264 - protein, 15 aa, synthetic construct
AMREGPTGDTPINSS

SEQ ID NO: 35265 - protein, 13 aa, synthetic construct
AMREGPSYTNKLI

SEQ ID NO: 35266 - protein, 12 aa, synthetic construct
AMQGYWGTDKLI

SEQ ID NO: 35267 - protein, 8 aa, synthetic construct
ARYADKLI

SEQ ID NO: 35268 - protein, 12 aa, synthetic construct
AMKLGDTGTPDR

SEQ ID NO: 35269 - protein, 11 aa, synthetic construct
ALREWGILKLI

SEQ ID NO: 35270 - protein, 14 aa, synthetic construct
AMRGNTGGHTDKLI

SEQ ID NO: 35271 - protein, 14 aa, synthetic construct
AMREYWGIHTDKLI

SEQ ID NO: 35272 - protein, 13 aa, synthetic construct
AMREGWGIPDKHI

SEQ ID NO: 35273 - protein, 17 aa, synthetic construct
AMREGPRSGGPYTDKLI

SEQ ID NO: 35274 - protein, 15 aa, synthetic construct
AMREYWGIGYTDKLI

SEQ ID NO: 35275 - protein, 13 aa, synthetic construct
AMMSYWGIPDKLI

SEQ ID NO: 35276 - protein, 14 aa, synthetic construct
AMNLPTGGYPINSS

SEQ ID NO: 35277 - protein, 11 aa, synthetic construct
ALREVLGAKLI

SEQ ID NO: 35278 - protein, 14 aa, synthetic construct
ALREVEGGSADKLI

SEQ ID NO: 35279 - protein, 12 aa, synthetic construct
ARRGPRITDKLI

SEQ ID NO: 35280 - protein, 12 aa, synthetic construct
ALRESPDTDKLI

SEQ ID NO: 35281 - protein, 17 aa, synthetic construct
AMREPLRLYWGTPINSS

SEQ ID NO: 35282 - protein, 14 aa, synthetic construct
AMTCTGGYATDNSS

SEQ ID NO: 35283 - protein, 14 aa, synthetic construct
AMRETTRVYTDKLI

SEQ ID NO: 35284 - protein, 14 aa, synthetic construct
AMREGEGDTPIHSS

SEQ ID NO: 35285 - protein, 15 aa, synthetic construct
VMREAPVLGDNDKLI

SEQ ID NO: 35286 - protein, 18 aa, synthetic construct
AMREAFLLVLGDHSDKLI

SEQ ID NO: 35287 - protein, 13 aa, synthetic construct
AMREEDTGTDELI

SEQ ID NO: 35288 - protein, 13 aa, synthetic construct
AMSEGYWGPLGLI

SEQ ID NO: 35289 - protein, 17 aa, synthetic construct
AMRERPPSLGIIADKLI

SEQ ID NO: 35290 - protein, 14 aa, synthetic construct
AMRESYWGARGTPD

SEQ ID NO: 35291 - protein, 14 aa, synthetic construct
TMRERTGGWPDKLI

SEQ ID NO: 35292 - protein, 8 aa, synthetic construct
RTTADKLI

SEQ ID NO: 35293 - protein, 15 aa, synthetic construct
AMRESRLGGTTDKLI

SEQ ID NO: 35294 - protein, 15 aa, synthetic construct
AMRDYWGIRGTDKLI

SEQ ID NO: 35295 - protein, 15 aa, synthetic construct
AMRESYWGIFDSTTL

SEQ ID NO: 35296 - protein, 16 aa, synthetic construct
AMRESLGDTGYTDKII

SEQ ID NO: 35297 - protein, 13 aa, synthetic construct
VMREGEGYTDKLI

SEQ ID NO: 35298 - protein, 15 aa, synthetic construct
AMREFLLGDTAPINS

SEQ ID NO: 35299 - protein, 17 aa, synthetic construct
AMREAFSWGIPYTDELI

SEQ ID NO: 35300 - protein, 15 aa, synthetic construct
AMREEALGGYTDKLI

SEQ ID NO: 35301 - protein, 15 aa, synthetic construct
VMREGVGGGCTDKLI

SEQ ID NO: 35302 - protein, 14 aa, synthetic construct
AMRDWGYSSPINSS

SEQ ID NO: 35303 - protein, 12 aa, synthetic construct
AMRECTGGLKLI

SEQ ID NO: 35304 - protein, 17 aa, synthetic construct
AMREAPTSELGDTCKLI

SEQ ID NO: 35305 - protein, 20 aa, synthetic construct
AMRERTFLPYWGIIKGRETH

SEQ ID NO: 35306 - protein, 15 aa, synthetic construct
AMREEVPGGYTEKLI

SEQ ID NO: 35307 - protein, 13 aa, synthetic construct
AMREGGDTADRLI

SEQ ID NO: 35308 - protein, 15 aa, synthetic construct
AKHGGDTLRTPINSS

SEQ ID NO: 35309 - protein, 14 aa, synthetic construct
AMRPSPVLGAEKLI

SEQ ID NO: 35310 - protein, 9 aa, synthetic construct
AMRRADNSS

SEQ ID NO: 35311 - protein, 15 aa, synthetic construct
AMREDWGSPEPINSS

SEQ ID NO: 35312 - protein, 13 aa, synthetic construct
AMREGDTRPDKLI

SEQ ID NO: 35313 - protein, 16 aa, synthetic construct
AMREGATWGNTPINSS

SEQ ID NO: 35314 - protein, 17 aa, synthetic construct
AMREDYSYRGSYTIKLI

SEQ ID NO: 35315 - protein, 17 aa, synthetic construct
AMRECTGGGIRRTINSS

SEQ ID NO: 35316 - protein, 18 aa, synthetic construct
AMREGATWGILSWDTRQM

SEQ ID NO: 35317 - protein, 15 aa, synthetic construct
AMREAPTGIRAINSS

SEQ ID NO: 35318 - protein, 13 aa, synthetic construct
AIGGGYGGPINLS

SEQ ID NO: 35319 - protein, 15 aa, synthetic construct
TMRAGGLSSWDTRQM

SEQ ID NO: 35320 - protein, 14 aa, synthetic construct
AMREEVGTYTDKLI

SEQ ID NO: 35321 - protein, 15 aa, synthetic construct
AMREAFLVYWGAYTR

SEQ ID NO: 35322 - protein, 13 aa, synthetic construct
VMREGLGDTDKLI

SEQ ID NO: 35323 - skipped

SEQ ID NO: 35324 - protein, 13 aa, synthetic construct
AIRGLGYHTDKLI

SEQ ID NO: 35325 - protein, 15 aa, synthetic construct
AMRERLGDTGPINSP

SEQ ID NO: 35326 - protein, 12 aa, synthetic construct
AMREGDWGIQPH

SEQ ID NO: 35327 - protein, 15 aa, synthetic construct
AMREAYWGEYTDKLI

SEQ ID NO: 35328 - protein, 14 aa, synthetic construct
AMRVGPTGDTLNSS

SEQ ID NO: 35329 - protein, 16 aa, synthetic construct
AMRESLPTWDTPMKLI

SEQ ID NO: 35330 - protein, 14 aa, synthetic construct
AMREGFGGYENRLI

SEQ ID NO: 35331 - protein, 17 aa, synthetic construct
AMREAFLVYWGIPGKLI

SEQ ID NO: 35332 - protein, 11 aa, synthetic construct
AMRVGIRYKLI

SEQ ID NO: 35333 - protein, 15 aa, synthetic construct
AMREGALLGDTDKLI

SEQ ID NO: 35334 - protein, 10 aa, synthetic construct
AIRGYNDKLI

SEQ ID NO: 35335 - protein, 15 aa, synthetic construct
SMRPVLGDTGTDKLI

SEQ ID NO: 35336 - protein, 15 aa, synthetic construct
AIREVLHWGIRGKLI

SEQ ID NO: 35337 - protein, 14 aa, synthetic construct
AMREALGNGGDKLI

SEQ ID NO: 35338 - protein, 16 aa, synthetic construct
AMREGASWGNTPIDSS

SEQ ID NO: 35339 - protein, 12 aa, synthetic construct
AMREGDTRTITH

SEQ ID NO: 35340 - protein, 12 aa, synthetic construct
SMREGDSTDKLI

SEQ ID NO: 35341 - protein, 13 aa, synthetic construct
AMREALLGDVKLI

SEQ ID NO: 35342 - protein, 16 aa, synthetic construct
AMREREVLGDTVDKII

SEQ ID NO: 35343 - protein, 12 aa, synthetic construct
AMRVGVGDDKLI

SEQ ID NO: 35344 - protein, 13 aa, synthetic construct
AMREFLGTPINSS

SEQ ID NO: 35345 - protein, 17 aa, synthetic construct
AMREGASWGIRDTDKLI

SEQ ID NO: 35346 - protein, 13 aa, synthetic construct
AMRETGGPTDRLI

SEQ ID NO: 35347 - protein, 14 aa, synthetic construct
AMRVPVGDTGNKLI

SEQ ID NO: 35348 - protein, 16 aa, synthetic construct
AIREPYWGILYADKLI

SEQ ID NO: 35349 - protein, 17 aa, synthetic construct
AMSEGSYTLLGDPDKLI

SEQ ID NO: 35350 - protein, 16 aa, synthetic construct
AIREPYWGILYTDRLI

SEQ ID NO: 35351 - protein, 12 aa, synthetic construct
AMRPYWGIRNSS

SEQ ID NO: 35352 - protein, 14 aa, synthetic construct
AMREGERGHTDKLI

SEQ ID NO: 35353 - protein, 8 aa, synthetic construct
RDSPINSS

SEQ ID NO: 35354 - protein, 13 aa, synthetic construct
AMRETGGLTDKLI

SEQ ID NO: 35355 - protein, 13 aa, synthetic construct
AMRECTGGLPKLI

SEQ ID NO: 35356 - protein, 12 aa, synthetic construct
AMRVRGEADKLI

SEQ ID NO: 35357 - protein, 11 aa, synthetic construct
AMRSRYTDELI

SEQ ID NO: 35358 - protein, 13 aa, synthetic construct
AMRDWGIYTDKPI

SEQ ID NO: 35359 - protein, 12 aa, synthetic construct
AMRVVRDSDKLI

SEQ ID NO: 35360 - protein, 15 aa, synthetic construct
AMRESGGYAKGVNSS

SEQ ID NO: 35361 - protein, 12 aa, synthetic construct
AMRSTGGYEALI

SEQ ID NO: 35362 - protein, 14 aa, synthetic construct
AMRETTRAYTDKPI

SEQ ID NO: 35363 - protein, 18 aa, synthetic construct
AMRETVLGNTGPAIDKLI

SEQ ID NO: 35364 - protein, 15 aa, synthetic construct
AMRVNWGIPTPINSS

SEQ ID NO: 35365 - protein, 14 aa, synthetic construct
AMREGELGDRGETH

SEQ ID NO: 35366 - protein, 8 aa, synthetic construct
RAFPDKLI

SEQ ID NO: 35367 - protein, 16 aa, synthetic construct
AMRVFPLGGKYTDRLI

SEQ ID NO: 35368 - protein, 9 aa, synthetic construct
AMRETIKSS

SEQ ID NO: 35369 - protein, 12 aa, synthetic construct
AMRPGVITDKLI

SEQ ID NO: 35370 - protein, 15 aa, synthetic construct
TMREAPTGGNTDKLI

SEQ ID NO: 35371 - protein, 12 aa, synthetic construct
VMRMGDTTDKLI

SEQ ID NO: 35372 - protein, 15 aa, synthetic construct
AMREDSGRAHTDKLI

SEQ ID NO: 35373 - protein, 14 aa, synthetic construct
AMSGCTGGYSDKLI

SEQ ID NO: 35374 - protein, 12 aa, synthetic construct
AMRVLGGPDKLI

SEQ ID NO: 35375 - protein, 11 aa, synthetic construct
AMRVWGIPKLT

SEQ ID NO: 35376 - protein, 15 aa, synthetic construct
VMRAFLRSGGSRPLI

SEQ ID NO: 35377 - protein, 17 aa, synthetic construct
AMREPSLRHLGDTDKLV

SEQ ID NO: 35378 - protein, 16 aa, synthetic construct
AMREAGGYPGSTDNSS

SEQ ID NO: 35379 - protein, 13 aa, synthetic construct
TMREGPGVTDKLI

SEQ ID NO: 35380 - protein, 15 aa, synthetic construct
AMREDPYGGYSINSS

SEQ ID NO: 35381 - protein, 15 aa, synthetic construct
AMRERWGIRWSDKLI

SEQ ID NO: 35382 - protein, 12 aa, synthetic construct
AMRPGEITDKLI

SEQ ID NO: 35383 - protein, 14 aa, synthetic construct
AIRECLGAYTDKLI

SEQ ID NO: 35384 - protein, 13 aa, synthetic construct
VMRRGWGIHDKLI

SEQ ID NO: 35385 - protein, 12 aa, synthetic construct
AMREGGGIDKLI

SEQ ID NO: 35386 - protein, 13 aa, synthetic construct
AMSDWGIPTDKLI

SEQ ID NO: 35387 - protein, 18 aa, synthetic construct
AMREDPSYWGMRDTDKLI

SEQ ID NO: 35388 - protein, 11 aa, synthetic construct
AMRDWGTDKLN

SEQ ID NO: 35389 - protein, 13 aa, synthetic construct
AMRVSSYGTDKLT

SEQ ID NO: 35390 - protein, 16 aa, synthetic construct
AIRDLPTCPRVPDKLI

SEQ ID NO: 35391 - protein, 14 aa, synthetic construct
AMREGDAGYTDKLI

SEQ ID NO: 35392 - protein, 12 aa, synthetic construct
AMREGDTPINSS

SEQ ID NO: 35393 - protein, 15 aa, synthetic construct
AMREFLVLGATDNLS

SEQ ID NO: 35394 - protein, 13 aa, synthetic construct
AMRVPRSPPDKLI

SEQ ID NO: 35395 - protein, 12 aa, synthetic construct
AMRERGEADKLS

SEQ ID NO: 35396 - protein, 20 aa, synthetic construct
AMREAFLLYWGIRVSPKELI

SEQ ID NO: 35397 - protein, 15 aa, synthetic construct
TMRELLGDTPTDKLI

SEQ ID NO: 35398 - protein, 14 aa, synthetic construct
TMREGWGEYTDKLI

SEQ ID NO: 35399 - protein, 15 aa, synthetic construct
AMREAGASAPGTPDR

SEQ ID NO: 35400 - protein, 13 aa, synthetic construct
AMRVSFYGTDKLI

SEQ ID NO: 35401 - protein, 13 aa, synthetic construct
AMRECTGGSPINS

SEQ ID NO: 35402 - protein, 18 aa, synthetic construct
AMREPSYVATGDTPINSS

SEQ ID NO: 35403 - protein, 12 aa, synthetic construct
AIRGGPTPINSS

SEQ ID NO: 35404 - protein, 11 aa, synthetic construct
AMRDWGTEKLI

SEQ ID NO: 35405 - protein, 17 aa, synthetic construct
AMRVGAYVWGSYTDKLI

SEQ ID NO: 35406 - protein, 14 aa, synthetic construct
AKRALGEKYTDKLI

SEQ ID NO: 35407 - protein, 18 aa, synthetic construct
AMRSLPRGGGYQATDKLI

SEQ ID NO: 35408 - protein, 15 aa, synthetic construct
AMRSTGYGCTPINSS

SEQ ID NO: 35409 - protein, 13 aa, synthetic construct
AMRTSVGDTDNSS

SEQ ID NO: 35410 - protein, 14 aa, synthetic construct
AMRSTSLGDTANSS

SEQ ID NO: 35411 - protein, 15 aa, synthetic construct
AMREAGGWGYTDELI

SEQ ID NO: 35412 - protein, 14 aa, synthetic construct
AMREAGPKYTDKLI

SEQ ID NO: 35413 - protein, 15 aa, synthetic construct
AIREGPYWGIGDKLI

SEQ ID NO: 35414 - protein, 13 aa, synthetic construct
EMRDTRGYFDKLI

SEQ ID NO: 35415 - protein, 17 aa, synthetic construct
EMRDPTGLGAPYTDKLI

SEQ ID NO: 35416 - protein, 7 aa, synthetic construct
TMSCKLI

SEQ ID NO: 35417 - protein, 10 aa, synthetic construct
EKREVLPTGT

SEQ ID NO: 35418 - protein, 11 aa, synthetic construct
EKTSYWWIPLI

SEQ ID NO: 35419 - protein, 14 aa, synthetic construct
EMRDPGDTRTDKLI

SEQ ID NO: 35420 - protein, 13 aa, synthetic construct
EMRDLPPFTDKLI

SEQ ID NO: 35421 - protein, 15 aa, synthetic construct
AMREYWGISPGTLDR

SEQ ID NO: 35422 - protein, 15 aa, synthetic construct
AVSVSYGDTLTDKLI

SEQ ID NO: 35423 - protein, 15 aa, synthetic construct
AMREYWGISPGTPGR

SEQ ID NO: 35424 - protein, 14 aa, synthetic construct
EKREGTGGHTDKLI

SEQ ID NO: 35425 - protein, 14 aa, synthetic construct
AMREYWGIRADKII

SEQ ID NO: 35426 - protein, 12 aa, synthetic construct
EMNPTVDNDKLI

SEQ ID NO: 35427 - protein, 14 aa, synthetic construct
AMREYWGIRGEKLI

SEQ ID NO: 35428 - protein, 14 aa, synthetic construct
AMREYWGIRGDKHI

SEQ ID NO: 35429 - protein, 13 aa, synthetic construct
EKREGLGDTDKLI

SEQ ID NO: 35430 - protein, 8 aa, synthetic construct
TMSPDKLI

SEQ ID NO: 35431 - protein, 16 aa, synthetic construct
AMREYWGIRCPPINAS

SEQ ID NO: 35432 - protein, 17 aa, synthetic construct
EKREGLDWGILYTDKLI

SEQ ID NO: 35433 - protein, 13 aa, synthetic construct
EKTEWDTRTDKLI

SEQ ID NO: 35434 - protein, 12 aa, synthetic construct
EMRDGDSTDKLI

SEQ ID NO: 35435 - protein, 21 aa, synthetic construct
EKRGVLGVVYACGSALTAQLF

SEQ ID NO: 35436 - protein, 16 aa, synthetic construct
EMRAFVPLLGSPINSS

SEQ ID NO: 35437 - protein, 11 aa, synthetic construct
EISTGGTINSS

SEQ ID NO: 35438 - protein, 13 aa, synthetic construct
EMKERGYATDKLI

SEQ ID NO: 35439 - protein, 10 aa, synthetic construct
PMRTGERGLI

SEQ ID NO: 35440 - protein, 13 aa, synthetic construct
TMRVLRSPPDKLI

SEQ ID NO: 35441 - protein, 12 aa, synthetic construct
EMREGWGIRLLI

SEQ ID NO: 35442 - protein, 12 aa, synthetic construct
TMREPGGSDKLI

SEQ ID NO: 35443 - protein, 17 aa, synthetic construct
EMREGLRSGGLYTDKII

SEQ ID NO: 35444 - protein, 15 aa, synthetic construct
EMREGPGGPYTDKLI

SEQ ID NO: 35445 - protein, 14 aa, synthetic construct
TMREMGATWDTRQM

SEQ ID NO: 35446 - protein, 14 aa, synthetic construct
AMRETGGYAGDQLI

SEQ ID NO: 35447 - protein, 13 aa, synthetic construct
EMREGRGDTDKLI

SEQ ID NO: 35448 - protein, 14 aa, synthetic construct
TMREGTGGSTDKLI

SEQ ID NO: 35449 - protein, 18 aa, synthetic construct
EMREGRWGIRKLLGHTTD

SEQ ID NO: 35450 - protein, 17 aa, synthetic construct
AMREYLRLGDTRAIHSS

SEQ ID NO: 35451 - protein, 16 aa, synthetic construct
AMREYLLGDTAPINSS

SEQ ID NO: 35452 - protein, 12 aa, synthetic construct
EMREGSLTAQLF

SEQ ID NO: 35453 - protein, 13 aa, synthetic construct
EMREGTGDTDKII

SEQ ID NO: 35454 - protein, 15 aa, synthetic construct
AMREYLGDTVTYKLI

SEQ ID NO: 35455 - protein, 14 aa, synthetic construct
AMRETGGYTKINSS

SEQ ID NO: 35456 - protein, 14 aa, synthetic construct
EMREGWLGDTDKLI

SEQ ID NO: 35457 - protein, 11 aa, synthetic construct
TMRIPVTDKLI

SEQ ID NO: 35458 - protein, 15 aa, synthetic construct
AMREYLGDTGTDELI

SEQ ID NO: 35459 - protein, 7 aa, synthetic construct
TMREGRG

SEQ ID NO: 35460 - protein, 13 aa, synthetic construct
EMREILGDTDKLI

SEQ ID NO: 35461 - protein, 13 aa, synthetic construct
AMREYLGDTDKLI

SEQ ID NO: 35462 - protein, 18 aa, synthetic construct
AMREYHSYWGIRHTDKLI

SEQ ID NO: 35463 - protein, 12 aa, synthetic construct
AMREYGVSAQLF

SEQ ID NO: 35464 - protein, 9 aa, synthetic construct
AMREYGNRI

SEQ ID NO: 35465 - protein, 11 aa, synthetic construct
EMREKEGIQLI

SEQ ID NO: 35466 - protein, 9 aa, synthetic construct
AMREYGKII

SEQ ID NO: 35467 - protein, 15 aa, synthetic construct
EMREKYWGPYTDKLI

SEQ ID NO: 35468 - protein, 14 aa, synthetic construct
TMREGLGDRTDKLI

SEQ ID NO: 35469 - protein, 9 aa, synthetic construct
AMREYGKHN

SEQ ID NO: 35470 - protein, 17 aa, synthetic construct
EMREQCLPRGDTGDKLI

SEQ ID NO: 35471 - protein, 13 aa, synthetic construct
TMREGIRDTDKLI

SEQ ID NO: 35472 - protein, 16 aa, synthetic construct
EMREGLPTGGYTDKLI

SEQ ID NO: 35473 - protein, 14 aa, synthetic construct
AMRETGGYAGDKLI

SEQ ID NO: 35474 - protein, 17 aa, synthetic construct
AMREYTTRDTRSTDKLI

SEQ ID NO: 35475 - protein, 19 aa, synthetic construct
EMREGLPTDDWGIPARPLI

SEQ ID NO: 35476 - protein, 15 aa, synthetic construct
EMRDVRGDTGADKLI

SEQ ID NO: 35477 - protein, 15 aa, synthetic construct
AMRETGGSGITAKLI

SEQ ID NO: 35478 - protein, 14 aa, synthetic construct
AMREYWGIGTGKLI

SEQ ID NO: 35479 - protein, 14 aa, synthetic construct
EMRDVWGMATDKII

SEQ ID NO: 35480 - protein, 13 aa, synthetic construct
TMRGNWGIPDKLI

SEQ ID NO: 35481 - protein, 12 aa, synthetic construct
EMRDWGIPDKLI

SEQ ID NO: 35482 - protein, 14 aa, synthetic construct
TMRGFLPSIRGKLI

SEQ ID NO: 35483 - protein, 15 aa, synthetic construct
EMREAWGIRGTDKLI

SEQ ID NO: 35484 - protein, 15 aa, synthetic construct
AMRETGGSGVTDKLI

SEQ ID NO: 35485 - protein, 14 aa, synthetic construct
AMRETGGSTPINTS

SEQ ID NO: 35486 - protein, 19 aa, synthetic construct
EMREDTSYSYWGIPDDKLI

SEQ ID NO: 35487 - protein, 13 aa, synthetic construct
EMREEVGNTEKLI

SEQ ID NO: 35488 - protein, 11 aa, synthetic construct
TMREWGILKLI

SEQ ID NO: 35489 - protein, 14 aa, synthetic construct
EMREGAGSYTDKLI

SEQ ID NO: 35490 - protein, 12 aa, synthetic construct
EMREGAYGWGPI

SEQ ID NO: 35491 - protein, 13 aa, synthetic construct
AMREYWGIADKLI

SEQ ID NO: 35492 - protein, 13 aa, synthetic construct
EMREGDSTPINSS

SEQ ID NO: 35493 - protein, 13 aa, synthetic construct
AMREYWGDTDKRI

SEQ ID NO: 35494 - protein, 13 aa, synthetic construct
EMREGGGSTDKLI

SEQ ID NO: 35495 - protein, 14 aa, synthetic construct
AMREYWGIVTDKLI

SEQ ID NO: 35496 - protein, 16 aa, synthetic construct
AMREYVLGATYTEILR

SEQ ID NO: 35497 - protein, 17 aa, synthetic construct
EMREGIPTSGAPPDKLI

SEQ ID NO: 35498 - protein, 12 aa, synthetic construct
EMREGIRSDKLI

SEQ ID NO: 35499 - protein, 10 aa, synthetic construct
TMREVLPTGT

SEQ ID NO: 35500 - protein, 14 aa, synthetic construct
EMREGIRYGTDKLI

SEQ ID NO: 35501 - protein, 16 aa, synthetic construct
AMREYVLGATYTDKII

SEQ ID NO: 35502 - protein, 13 aa, synthetic construct
AMRETGGTPINSS

SEQ ID NO: 35503 - protein, 15 aa, synthetic construct
EMREGLGDMYTDKLI

SEQ ID NO: 35504 - protein, 17 aa, synthetic construct
AMREYTTWERRSTDRDI

SEQ ID NO: 35505 - protein, 11 aa, synthetic construct
AMREYWDDKLI

SEQ ID NO: 35506 - protein, 14 aa, synthetic construct
AVREYWGIRGDKLI

SEQ ID NO: 35507 - protein, 12 aa, synthetic construct
AVRVPTLGYDHI

SEQ ID NO: 35508 - protein, 14 aa, synthetic construct
AMREYWGKRGDKLI

SEQ ID NO: 35509 - protein, 13 aa, synthetic construct
AMRGDTWGTDKLI

SEQ ID NO: 35510 - protein, 13 aa, synthetic construct
AMRGDWGIPDKLI

SEQ ID NO: 35511 - protein, 15 aa, synthetic construct
AMRGDWGIRDTDKLI

SEQ ID NO: 35512 - protein, 14 aa, synthetic construct
AMRGFLPSIRGELI

SEQ ID NO: 35513 - protein, 15 aa, synthetic construct
AVREGRLRDNTDKLI

SEQ ID NO: 35514 - protein, 15 aa, synthetic construct
AMRESYVWGTARPRI

SEQ ID NO: 35515 - protein, 14 aa, synthetic construct
AMRGFLPSIRGKLV

SEQ ID NO: 35516 - protein, 14 aa, synthetic construct
AVREGRGILTDKLI

SEQ ID NO: 35517 - protein, 14 aa, synthetic construct
AMRGFLPSIRRKLN

SEQ ID NO: 35518 - protein, 16 aa, synthetic construct
AVREGPSTWGIRINSS

SEQ ID NO: 35519 - protein, 12 aa, synthetic construct
AVREGPGGDKLI

SEQ ID NO: 35520 - protein, 16 aa, synthetic construct
AMRGFSWGIRGADKLI

SEQ ID NO: 35521 - protein, 15 aa, synthetic construct
AMRESYVWGTARPPM

SEQ ID NO: 35522 - protein, 17 aa, synthetic construct
AMRGGATLLGDTPINSS

SEQ ID NO: 35523 - protein, 15 aa, synthetic construct
AVREGPDRGYADKLI

SEQ ID NO: 35524 - protein, 13 aa, synthetic construct
AMRGDTRSTDKLI

SEQ ID NO: 35525 - protein, 13 aa, synthetic construct
AMRGDTRRTDKLI

SEQ ID NO: 35526 - protein, 15 aa, synthetic construct
AVREGRPSPYFDELI

SEQ ID NO: 35527 - protein, 15 aa, synthetic construct
VMRELPTLGDTRKLI

SEQ ID NO: 35528 - protein, 14 aa, synthetic construct
AMRGCSGGYSDKLI

SEQ ID NO: 35529 - protein, 15 aa, synthetic construct
AMRGCTGGTGTAQLF

SEQ ID NO: 35530 - protein, 14 aa, synthetic construct
AMRESYWGILDKLI

SEQ ID NO: 35531 - protein, 12 aa, synthetic construct
AVREGVGDDKLI

SEQ ID NO: 35532 - protein, 14 aa, synthetic construct
AMRGCTGGYYDKLI

SEQ ID NO: 35533 - protein, 14 aa, synthetic construct
AMRGCTVGYSDKLI

SEQ ID NO: 35534 - protein, 15 aa, synthetic construct
AVREGTGGPYTDKLI

SEQ ID NO: 35535 - protein, 12 aa, synthetic construct
AVREGSLTAQLF

SEQ ID NO: 35536 - protein, 11 aa, synthetic construct
AMRGDNTDKLI

SEQ ID NO: 35537 - protein, 12 aa, synthetic construct
AVREGTGGKGVI

SEQ ID NO: 35538 - protein, 13 aa, synthetic construct
AVREGTGDTINSS

SEQ ID NO: 35539 - protein, 17 aa, synthetic construct
AMRGDSLPKGSYTDKLI

SEQ ID NO: 35540 - protein, 12 aa, synthetic construct
AMRESYVWGTRI

SEQ ID NO: 35541 - protein, 14 aa, synthetic construct
AMRGDTGLYTDKLV

SEQ ID NO: 35542 - protein, 17 aa, synthetic construct
VMREPLRPYWGTPINSS

SEQ ID NO: 35543 - protein, 14 aa, synthetic construct
VMREPTGGFTDKLI

SEQ ID NO: 35544 - protein, 13 aa, synthetic construct
VMREQLGDTDKLI

SEQ ID NO: 35545 - protein, 12 aa, synthetic construct
AMRGGGSTDKLI

SEQ ID NO: 35546 - protein, 15 aa, synthetic construct
AMRESVLGDTAHKLI

SEQ ID NO: 35547 - protein, 15 aa, synthetic construct
AMRESVLGDTADKLN

SEQ ID NO: 35548 - protein, 13 aa, synthetic construct
AVREGGIPPDKLI

SEQ ID NO: 35549 - protein, 15 aa, synthetic construct
VMRNTGGYEGTDKLI

SEQ ID NO: 35550 - protein, 12 aa, synthetic construct
VMRPGGITDKLI

SEQ ID NO: 35551 - protein, 10 aa, synthetic construct
AMRGGGRKLI

SEQ ID NO: 35552 - protein, 18 aa, synthetic construct
AVREGGGLNLSSWDTQQM

SEQ ID NO: 35553 - protein, 11 aa, synthetic construct
AMRGGGGYELI

SEQ ID NO: 35554 - protein, 13 aa, synthetic construct
AMRESVGALDKLI

SEQ ID NO: 35555 - protein, 14 aa, synthetic construct
AMRGGGVPYTDKLI

SEQ ID NO: 35556 - protein, 14 aa, synthetic construct
AMRGGGYGGTDKLI

SEQ ID NO: 35557 - protein, 12 aa, synthetic construct
AVREGDGTDKLI

SEQ ID NO: 35558 - protein, 14 aa, synthetic construct
AVREGAGSYTDKLI

SEQ ID NO: 35559 - protein, 13 aa, synthetic construct
AVREEDTGTDKLI

SEQ ID NO: 35560 - protein, 13 aa, synthetic construct
AMRGGGIDTDKLI

SEQ ID NO: 35561 - protein, 13 aa, synthetic construct
AVREGLGDTDKLI

SEQ ID NO: 35562 - protein, 13 aa, synthetic construct
AMRGGDTGQHNSS

SEQ ID NO: 35563 - protein, 14 aa, synthetic construct
AMRESWGILTDKLI

SEQ ID NO: 35564 - protein, 14 aa, synthetic construct
AVREGLVGDTDKLI

SEQ ID NO: 35565 - protein, 11 aa, synthetic construct
VMREVGDTGLI

SEQ ID NO: 35566 - protein, 17 aa, synthetic construct
AMRESYLLYWGIPDKLI

SEQ ID NO: 35567 - protein, 18 aa, synthetic construct
AMRGGFQTGGYGYTDKLI

SEQ ID NO: 35568 - protein, 20 aa, synthetic construct
AVREGLPSPYWGIRGTDKLI

SEQ ID NO: 35569 - protein, 15 aa, synthetic construct
VMREVLGDIGTDKLI

SEQ ID NO: 35570 - protein, 15 aa, synthetic construct
VMREVLGDTGTDKLI

SEQ ID NO: 35571 - protein, 11 aa, synthetic construct
AMRGGGFGKLI

SEQ ID NO: 35572 - protein, 16 aa, synthetic construct
AMRESVLWATYTDKLI

SEQ ID NO: 35573 - protein, 15 aa, synthetic construct
AMRESVLGYTADKLI

SEQ ID NO: 35574 - protein, 13 aa, synthetic construct
VMREYWGIRDKLI

SEQ ID NO: 35575 - protein, 15 aa, synthetic construct
AMRESVLGDTDDTLT

SEQ ID NO: 35576 - protein, 13 aa, synthetic construct
AMRGGGDTADKLI

SEQ ID NO: 35577 - protein, 13 aa, synthetic construct
AMRGGGDVDDKLI

SEQ ID NO: 35578 - protein, 14 aa, synthetic construct
AMRGCGIQNTDNLI

SEQ ID NO: 35579 - protein, 14 aa, synthetic construct
AMRESYWGIPINSS

SEQ ID NO: 35580 - protein, 17 aa, synthetic construct
VMRELASGGDTENDKLT

SEQ ID NO: 35581 - protein, 15 aa, synthetic construct
VMREGLGDMYTDKLI

SEQ ID NO: 35582 - protein, 15 aa, synthetic construct
AMREYWGSSWDTRRM

SEQ ID NO: 35583 - protein, 12 aa, synthetic construct
TMREGGDPRGLI

SEQ ID NO: 35584 - protein, 13 aa, synthetic construct
AVREYWGIRDKLI

SEQ ID NO: 35585 - protein, 14 aa, synthetic construct
AVREYWGEYTDKLI

SEQ ID NO: 35586 - protein, 17 aa, synthetic construct
AMREYWGTQRPYTDKLI

SEQ ID NO: 35587 - protein, 19 aa, synthetic construct
VMREGGPPVLGDTRDTRQM

SEQ ID NO: 35588 - protein, 15 aa, synthetic construct
AVREYLGDTGTDKLI

SEQ ID NO: 35589 - protein, 15 aa, synthetic construct
AMREYWGSSWDTRHR

SEQ ID NO: 35590 - protein, 14 aa, synthetic construct
AMREYWGVYTNKLI

SEQ ID NO: 35591 - protein, 13 aa, synthetic construct
AMRETGGATDKLM

SEQ ID NO: 35592 - protein, 14 aa, synthetic construct
AVREVWGMATDKLI

SEQ ID NO: 35593 - protein, 10 aa, synthetic construct
AMREYWGWAH

SEQ ID NO: 35594 - protein, 15 aa, synthetic construct
AMREYWVSSWDTRQM

SEQ ID NO: 35595 - protein, 14 aa, synthetic construct
AMREYWVVYTDKLI

SEQ ID NO: 35596 - protein, 11 aa, synthetic construct
AVRFKTGAKLI

SEQ ID NO: 35597 - protein, 15 aa, synthetic construct
AVRGPGDTGDTDKLI

SEQ ID NO: 35598 - protein, 13 aa, synthetic construct
AMRETGGATDKHM

SEQ ID NO: 35599 - protein, 13 aa, synthetic construct
AMREYWGMSGKLI

SEQ ID NO: 35600 - protein, 16 aa, synthetic construct
VIREPYWGILYTDKLI

SEQ ID NO: 35601 - protein, 11 aa, synthetic construct
AVRVLGADKLI

SEQ ID NO: 35602 - protein, 6 aa, synthetic construct
VMGGLI

SEQ ID NO: 35603 - protein, 13 aa, synthetic construct
AMREYWGMSEKLI

SEQ ID NO: 35604 - protein, 13 aa, synthetic construct
AMRETGGNTDRLV

SEQ ID NO: 35605 - protein, 13 aa, synthetic construct
VMRAWGIRPINSS

SEQ ID NO: 35606 - protein, 12 aa, synthetic construct
AMRETGGNDKLI

SEQ ID NO: 35607 - protein, 15 aa, synthetic construct
AMREYWGSSWDNRQM

SEQ ID NO: 35608 - protein, 14 aa, synthetic construct
AMREYWGPPGTPDR

SEQ ID NO: 35609 - protein, 14 aa, synthetic construct
AMRETGGLYTGKLI

SEQ ID NO: 35610 - protein, 16 aa, synthetic construct
AVRPFLRWGNYTDKLI

SEQ ID NO: 35611 - protein, 11 aa, synthetic construct
AMREYWGRKTH

SEQ ID NO: 35612 - protein, 15 aa, synthetic construct
VMRDSHGSRDTDKLI

SEQ ID NO: 35613 - protein, 9 aa, synthetic construct
VMRDWGTRI

SEQ ID NO: 35614 - protein, 15 aa, synthetic construct
AMREYWWISPGTTDR

SEQ ID NO: 35615 - protein, 15 aa, synthetic construct
AVREVLGDIGTDKLI

SEQ ID NO: 35616 - protein, 14 aa, synthetic construct
AVREGWGIRPDKLI

SEQ ID NO: 35617 - protein, 15 aa, synthetic construct
AMRGAPTGGNTDKLI

SEQ ID NO: 35618 - protein, 14 aa, synthetic construct
VMREGTGGSTDKLI

SEQ ID NO: 35619 - protein, 15 aa, synthetic construct
AVREPSTGGHTDKLI

SEQ ID NO: 35620 - protein, 12 aa, synthetic construct
AVREPGGPDKLI

SEQ ID NO: 35621 - protein, 18 aa, synthetic construct
AMRETALGVTGPPIDKLI

SEQ ID NO: 35622 - protein, 16 aa, synthetic construct
AVRELYWGIRRTDKLI

SEQ ID NO: 35623 - protein, 12 aa, synthetic construct
AMRGAPATWKLS

SEQ ID NO: 35624 - protein, 18 aa, synthetic construct
AMRGAPTVRGDHGLHRET

SEQ ID NO: 35625 - protein, 16 aa, synthetic construct
VMREGSYDWGSTDKLI

SEQ ID NO: 35626 - protein, 15 aa, synthetic construct
AVREIPTGGYTDKLI

SEQ ID NO: 35627 - protein, 15 aa, synthetic construct
AMRETAGKGYTDKLI

SEQ ID NO: 35628 - protein, 15 aa, synthetic construct
AVREHWGIGWSDKVM

SEQ ID NO: 35629 - protein, 18 aa, synthetic construct
AMRETAFSILGVYTVKLI

SEQ ID NO: 35630 - protein, 15 aa, synthetic construct
VMREGTGGYGPINSS

SEQ ID NO: 35631 - protein, 10 aa, synthetic construct
AMRGATNKLI

SEQ ID NO: 35632 - protein, 13 aa, synthetic construct
AMRGAGYWAAQLF

SEQ ID NO: 35633 - protein, 14 aa, synthetic construct
AMRGAGGYEGDKLI

SEQ ID NO: 35634 - protein, 14 aa, synthetic construct
AVREVGGSYTDKLI

SEQ ID NO: 35635 - protein, 14 aa, synthetic construct
AVRETRGIRGDKLI

SEQ ID NO: 35636 - protein, 16 aa, synthetic construct
VMREGLPTWDTPMKLI

SEQ ID NO: 35637 - protein, 16 aa, synthetic construct
AMRFPSFWEAGTDKLI

SEQ ID NO: 35638 - protein, 14 aa, synthetic construct
AVRETTRAYTDKLI

SEQ ID NO: 35639 - protein, 16 aa, synthetic construct
AMRFPSFWGASHEKLI

SEQ ID NO: 35640 - protein, 13 aa, synthetic construct
AMRETGGATDKFI

SEQ ID NO: 35641 - protein, 12 aa, synthetic construct
AMRFVGDSDKLI

SEQ ID NO: 35642 - protein, 15 aa, synthetic construct
AMRGACFLLGDEKLI

SEQ ID NO: 35643 - protein, 12 aa, synthetic construct
AMRGAGGPYKVS

SEQ ID NO: 35644 - protein, 14 aa, synthetic construct
AMRETGDLYTDKLI

SEQ ID NO: 35645 - protein, 12 aa, synthetic construct
AVRETPDTDKLI

SEQ ID NO: 35646 - protein, 15 aa, synthetic construct
VMREGPVLGDNDKLI

SEQ ID NO: 35647 - protein, 14 aa, synthetic construct
AVRETGGLYTDKLI

SEQ ID NO: 35648 - protein, 15 aa, synthetic construct
VMREGRLGDNTDKLI

SEQ ID NO: 35649 - protein, 12 aa, synthetic construct
AMRETFLRSWDT

SEQ ID NO: 35650 - protein, 12 aa, synthetic construct
AMREYGDARPLI

SEQ ID NO: 35651 - protein, 14 aa, synthetic construct
EMRGTGGYHTDKLI

SEQ ID NO: 35652 - protein, 17 aa, synthetic construct
AMREYFLPLLGDTDILI

SEQ ID NO: 35653 - protein, 8 aa, synthetic construct
MTTTDKLI

SEQ ID NO: 35654 - protein, 15 aa, synthetic construct
SMREGPYGDTGDKLI

SEQ ID NO: 35655 - protein, 16 aa, synthetic construct
NERGKVYDGGEDSTTL

SEQ ID NO: 35656 - protein, 13 aa, synthetic construct
AMREVLLGDVKLT

SEQ ID NO: 35657 - protein, 13 aa, synthetic construct
NERDLPTRALLTH

SEQ ID NO: 35658 - protein, 15 aa, synthetic construct
AMREVLLGGLTDKLI

SEQ ID NO: 35659 - protein, 15 aa, synthetic construct
AMREVLLGGYTDKLI

SEQ ID NO: 35660 - protein, 13 aa, synthetic construct
NERDLPTRAILTH

SEQ ID NO: 35661 - protein, 16 aa, synthetic construct
AMREVLRLGDTPINSS

SEQ ID NO: 35662 - protein, 16 aa, synthetic construct
SMREGTLTGGYDDKLI

SEQ ID NO: 35663 - protein, 18 aa, synthetic construct
AMREVLWGIREGYTDKLI

SEQ ID NO: 35664 - protein, 11 aa, synthetic construct
LKEVTIRLRSS

SEQ ID NO: 35665 - protein, 14 aa, synthetic construct
AMREVLWGYTDKLI

SEQ ID NO: 35666 - protein, 14 aa, synthetic construct
SMREGRGGIADKLI

SEQ ID NO: 35667 - protein, 14 aa, synthetic construct
SMREGRGPCPAKVI

SEQ ID NO: 35668 - protein, 15 aa, synthetic construct
SMREGSVWGKGDKLI

SEQ ID NO: 35669 - protein, 7 aa, synthetic construct
ILPINSS

SEQ ID NO: 35670 - protein, 14 aa, synthetic construct
SMREGAGSYTDKLI

SEQ ID NO: 35671 - protein, 9 aa, synthetic construct
NERGSGNSS

SEQ ID NO: 35672 - protein, 17 aa, synthetic construct
SMREARLLGIRYTDKLI

SEQ ID NO: 35673 - protein, 14 aa, synthetic construct
AMREVGDTSNVKII

SEQ ID NO: 35674 - protein, 13 aa, synthetic construct
AMREVLGILVNSS

SEQ ID NO: 35675 - protein, 50 aa, synthetic construct
PKEVTISLRSSKEIVEFDPAIVISPSGKYSAVKLGQYGDSNSVTCSVQHN

SEQ ID NO: 35676 - protein, 14 aa, synthetic construct
AMREVLGVDTDKLF

SEQ ID NO: 35677 - protein, 11 aa, synthetic construct
PKEETISLRSS

SEQ ID NO: 35678 - protein, 14 aa, synthetic construct
AMREVGGSYTDKLL

SEQ ID NO: 35679 - protein, 9 aa, synthetic construct
PGATPINSS

SEQ ID NO: 35680 - protein, 12 aa, synthetic construct
AMREVLGVLKLI

SEQ ID NO: 35681 - protein, 15 aa, synthetic construct
AMREVLGVTSTDKLI

SEQ ID NO: 35682 - protein, 9 aa, synthetic construct
PGANTDKLI

SEQ ID NO: 35683 - protein, 15 aa, synthetic construct
AMREVLHWGIRGTLI

SEQ ID NO: 35684 - protein, 15 aa, synthetic construct
SMRDSHGSRDTDKLI

SEQ ID NO: 35685 - protein, 9 aa, synthetic construct
PGAHTDKII

SEQ ID NO: 35686 - protein, 15 aa, synthetic construct
AMREVLHWGMRGKLI

SEQ ID NO: 35687 - protein, 14 aa, synthetic construct
AMREVGGGYPDKLI

SEQ ID NO: 35688 - protein, 10 aa, synthetic construct
NESDTPINSS

SEQ ID NO: 35689 - protein, 11 aa, synthetic construct
AMREVEPDKLI

SEQ ID NO: 35690 - skipped

SEQ ID NO: 35691 - protein, 17 aa, synthetic construct
AMREVPTSRGSLTEQLF

SEQ ID NO: 35692 - protein, 14 aa, synthetic construct
AMREVASSWDTRQM

SEQ ID NO: 35693 - protein, 14 aa, synthetic construct
AMREVDGGSADKLI

SEQ ID NO: 35694 - protein, 18 aa, synthetic construct
GMRGALSPFPLYFGAGTR

SEQ ID NO: 35695 - protein, 17 aa, synthetic construct
GMREYWGIQRPYTDKLI

SEQ ID NO: 35696 - protein, 18 aa, synthetic construct
AMREVPTGDMSSWDTRQM

SEQ ID NO: 35697 - protein, 16 aa, synthetic construct
AMREVCGGIHRDTRQM

SEQ ID NO: 35698 - protein, 13 aa, synthetic construct
GMREQLWDTDKLI

SEQ ID NO: 35699 - protein, 17 aa, synthetic construct
AMREVPTGDTLLGHSTD

SEQ ID NO: 35700 - protein, 13 aa, synthetic construct
GMREGWGIRDKLI

SEQ ID NO: 35701 - protein, 13 aa, synthetic construct
GNRDWGIYTDKLI

SEQ ID NO: 35702 - protein, 15 aa, synthetic construct
GMREGTGGPYTDKLI

SEQ ID NO: 35703 - protein, 15 aa, synthetic construct
AMREVPTSGGYGTLI

SEQ ID NO: 35704 - protein, 15 aa, synthetic construct
GMREGSFWGKGDKLI

SEQ ID NO: 35705 - protein, 17 aa, synthetic construct
AMREVPTSRGSLTAQHF

SEQ ID NO: 35706 - protein, 16 aa, synthetic construct
SMRENSYGLGDNDKLI

SEQ ID NO: 35707 - protein, 17 aa, synthetic construct
AMREVALMGVPYTDKLI

SEQ ID NO: 35708 - protein, 16 aa, synthetic construct
GMREGPYVGDTGGKLI

SEQ ID NO: 35709 - protein, 21 aa, synthetic construct
AMREVPSYVPVLGDRETEKLI

SEQ ID NO: 35710 - protein, 12 aa, synthetic construct
GMRPLPLTDKLI

SEQ ID NO: 35711 - protein, 17 aa, synthetic construct
GMRVPLGPYWGTPINSS

SEQ ID NO: 35712 - protein, 19 aa, synthetic construct
AMREVPSYVFTGGWSDKLI

SEQ ID NO: 35713 - protein, 10 aa, synthetic construct
GMWGIPLNSS

SEQ ID NO: 35714 - protein, 11 aa, synthetic construct
SMREILGDKLI

SEQ ID NO: 35715 - protein, 15 aa, synthetic construct
AMREVLYWWIPKNSS

SEQ ID NO: 35716 - protein, 12 aa, synthetic construct
AMREVPGDLKLI

SEQ ID NO: 35717 - protein, 15 aa, synthetic construct
AMREVPLGDLTDKLI

SEQ ID NO: 35718 - protein, 13 aa, synthetic construct
AMREVPLGDVKLI

SEQ ID NO: 35719 - protein, 15 aa, synthetic construct
AMREVPLRGYTDKLI

SEQ ID NO: 35720 - protein, 18 aa, synthetic construct
GMTEPSSTGGYVYTDKLI

SEQ ID NO: 35721 - protein, 10 aa, synthetic construct
AMREVPPTGT

SEQ ID NO: 35722 - protein, 13 aa, synthetic construct
AMREVEGDTRKQI

SEQ ID NO: 35723 - protein, 16 aa, synthetic construct
AMREVPSYEGGTDKLI

SEQ ID NO: 35724 - protein, 15 aa, synthetic construct
SMREIPTGGYTDKLI

SEQ ID NO: 35725 - protein, 17 aa, synthetic construct
GMTEGVLRRKGGGHKLI

SEQ ID NO: 35726 - protein, 8 aa, synthetic construct
GMSPDKLI

SEQ ID NO: 35727 - protein, 15 aa, synthetic construct
AMREVDWGIRTDKLI

SEQ ID NO: 35728 - protein, 8 aa, synthetic construct
RTTTGKLI

SEQ ID NO: 35729 - protein, 12 aa, synthetic construct
AMREVGGTEKHI

SEQ ID NO: 35730 - protein, 12 aa, synthetic construct
AMREVGGTEKLI

SEQ ID NO: 35731 - protein, 15 aa, synthetic construct
AMREVLGDPLTALLF

SEQ ID NO: 35732 - protein, 12 aa, synthetic construct
AMREVLGANKRI

SEQ ID NO: 35733 - protein, 10 aa, synthetic construct
QDRGTPINSS

SEQ ID NO: 35734 - protein, 15 aa, synthetic construct
PMREPSTGGNTDKLI

SEQ ID NO: 35735 - protein, 18 aa, synthetic construct
PMREKSYVSGGYGSDKLI

SEQ ID NO: 35736 - protein, 12 aa, synthetic construct
AMREVLGDLKPI

SEQ ID NO: 35737 - protein, 16 aa, synthetic construct
PMREKSGDKGYTDKLI

SEQ ID NO: 35738 - protein, 12 aa, synthetic construct
AMREVLGDLKVI

SEQ ID NO: 35739 - protein, 15 aa, synthetic construct
PMREILLGGYTDKLI

SEQ ID NO: 35740 - protein, 11 aa, synthetic construct
AMREVGGYELI

SEQ ID NO: 35741 - protein, 12 aa, synthetic construct
QLERGLLQHNST

SEQ ID NO: 35742 - protein, 13 aa, synthetic construct
PMREGVGDTDKLI

SEQ ID NO: 35743 - protein, 14 aa, synthetic construct
AMREVLGALAINSS

SEQ ID NO: 35744 - protein, 11 aa, synthetic construct
QNWGKGPIKSS

SEQ ID NO: 35745 - protein, 14 aa, synthetic construct
PMREGSYVYSDKLI

SEQ ID NO: 35746 - protein, 16 aa, synthetic construct
PMREGSVGGSYTDKLI

SEQ ID NO: 35747 - protein, 15 aa, synthetic construct
PMREGSGGIRTDKLI

SEQ ID NO: 35748 - protein, 18 aa, synthetic construct
QCPAFLRSGGYAGEINSS

SEQ ID NO: 35749 - protein, 15 aa, synthetic construct
AMREVLGDIVTDNLI

SEQ ID NO: 35750 - protein, 14 aa, synthetic construct
AMREVLGANTDKLI

SEQ ID NO: 35751 - protein, 14 aa, synthetic construct
PMRESEGVYTDKLI

SEQ ID NO: 35752 - protein, 16 aa, synthetic construct
AMREVLGAPPRSDKLT

SEQ ID NO: 35753 - protein, 16 aa, synthetic construct
AMREVLGAPPRSGTLI

SEQ ID NO: 35754 - protein, 12 aa, synthetic construct
PMRIPPGIRYSS

SEQ ID NO: 35755 - protein, 10 aa, synthetic construct
PMRGDTDKLI

SEQ ID NO: 35756 - protein, 13 aa, synthetic construct
AMREVLGAPINSS

SEQ ID NO: 35757 - protein, 16 aa, synthetic construct
AMREVLGASSWDTRQM

SEQ ID NO: 35758 - protein, 15 aa, synthetic construct
PMREVLGDIGTDKLI

SEQ ID NO: 35759 - protein, 16 aa, synthetic construct
PRPSYEYWGIPTDKLI

SEQ ID NO: 35760 - protein, 14 aa, synthetic construct
PMRESYWVTPINSS

SEQ ID NO: 35761 - protein, 14 aa, synthetic construct
AMREVLGAYTDKLT

SEQ ID NO: 35762 - protein, 14 aa, synthetic construct
PMRESTGGHTDKLI

SEQ ID NO: 35763 - protein, 14 aa, synthetic construct
AMREVLGDATDKLI

SEQ ID NO: 35764 - protein, 13 aa, synthetic construct
AMREVLGDDDKLI

SEQ ID NO: 35765 - protein, 20 aa, synthetic construct
PMRESPSLPLVGASYTDKLI

SEQ ID NO: 35766 - protein, 10 aa, synthetic construct
QARGTPINSS

SEQ ID NO: 35767 - protein, 15 aa, synthetic construct
AMREVLGDTDTDKLI

SEQ ID NO: 35768 - protein, 15 aa, synthetic construct
AMREVLGDTGPDKLI

SEQ ID NO: 35769 - protein, 16 aa, synthetic construct
PMREGRGSGGYSDKLI

SEQ ID NO: 35770 - protein, 13 aa, synthetic construct
PMREGDWGPINSS

SEQ ID NO: 35771 - protein, 16 aa, synthetic construct
PMREGAWGIPHTEKKN

SEQ ID NO: 35772 - protein, 12 aa, synthetic construct
PMREEGDTDKLI

SEQ ID NO: 35773 - protein, 15 aa, synthetic construct
AMREVLADTSTDKLI

SEQ ID NO: 35774 - protein, 13 aa, synthetic construct
AMREVLGETDKLI

SEQ ID NO: 35775 - protein, 14 aa, synthetic construct
AMREVLGEYTDELF

SEQ ID NO: 35776 - protein, 17 aa, synthetic construct
PMREARLLGIRYTDKLI

SEQ ID NO: 35777 - protein, 17 aa, synthetic construct
PMREAPFLRGGGADKLI

SEQ ID NO: 35778 - protein, 21 aa, synthetic construct
AMREVHSYVPVLGDRETDKLI

SEQ ID NO: 35779 - protein, 16 aa, synthetic construct
AMREVGLGDTATDKLI

SEQ ID NO: 35780 - protein, 14 aa, synthetic construct
AMREVGGYYTDKLI

SEQ ID NO: 35781 - protein, 16 aa, synthetic construct
PMRDLLRRGTRTDKLI

SEQ ID NO: 35782 - protein, 13 aa, synthetic construct
PMRAPSMYWGIPI

SEQ ID NO: 35783 - protein, 16 aa, synthetic construct
PMRALPHGGRRPDKLI

SEQ ID NO: 35784 - protein, 5 aa, synthetic construct
RINSS

SEQ ID NO: 35785 - protein, 17 aa, synthetic construct
PLRGGLPTLLGDTDKLI

SEQ ID NO: 35786 - protein, 16 aa, synthetic construct
PMREGDWGIPHTDKLI

SEQ ID NO: 35787 - protein, 16 aa, synthetic construct
PMREGHTGGAYTDKLI

SEQ ID NO: 35788 - protein, 15 aa, synthetic construct
AMREVLGDTGSDKLF

SEQ ID NO: 35789 - protein, 14 aa, synthetic construct
QWPSLGDTRPMNSS

SEQ ID NO: 35790 - protein, 13 aa, synthetic construct
AMREVLEPTDKLN

SEQ ID NO: 35791 - protein, 15 aa, synthetic construct
AMREVLGDTGTDKHI

SEQ ID NO: 35792 - protein, 14 aa, synthetic construct
QRERILGATPINSS

SEQ ID NO: 35793 - protein, 13 aa, synthetic construct
PMREGPRGYVRLI

SEQ ID NO: 35794 - protein, 13 aa, synthetic construct
PMREGPPGPDKLI

SEQ ID NO: 35795 - protein, 15 aa, synthetic construct
AMREVLGDTGTDKLV

SEQ ID NO: 35796 - protein, 13 aa, synthetic construct
AMREVLEPTDKLI

SEQ ID NO: 35797 - protein, 15 aa, synthetic construct
AMREVLGDTGTEKLI

SEQ ID NO: 35798 - protein, 14 aa, synthetic construct
QSPSLGDTRPINSS

SEQ ID NO: 35799 - protein, 15 aa, synthetic construct
AMREVLGDTGTGKLI

SEQ ID NO: 35800 - protein, 18 aa, synthetic construct
AMREVLGDTRRGIPINSS

SEQ ID NO: 35801 - protein, 15 aa, synthetic construct
AMREVLGDTRRGSTH

SEQ ID NO: 35802 - protein, 17 aa, synthetic construct
PMREGLRGIRAEADKLI

SEQ ID NO: 35803 - protein, 11 aa, synthetic construct
PMREGIADKLI

SEQ ID NO: 35804 - protein, 13 aa, synthetic construct
AMREVLEGPDKLI

SEQ ID NO: 35805 - protein, 14 aa, synthetic construct
GMREGPWGYTDKLI

SEQ ID NO: 35806 - protein, 19 aa, synthetic construct
GMREGPSYSGGRALTAQLF

SEQ ID NO: 35807 - protein, 15 aa, synthetic construct
EMRERLWDTGPINSS

SEQ ID NO: 35808 - protein, 15 aa, synthetic construct
AMREVYWGSYTDKLI

SEQ ID NO: 35809 - protein, 13 aa, synthetic construct
AMREVWVYGDKLI

SEQ ID NO: 35810 - protein, 9 aa, synthetic construct
EMSGFVQSL

SEQ ID NO: 35811 - protein, 13 aa, synthetic construct
EMSEGGVRGINSS

SEQ ID NO: 35812 - protein, 15 aa, synthetic construct
AMREVYWGIRGGRLI

SEQ ID NO: 35813 - protein, 15 aa, synthetic construct
AMREVYWGIRGRKLI

SEQ ID NO: 35814 - protein, 15 aa, synthetic construct
AMRETPTGGSDDKLI

SEQ ID NO: 35815 - protein, 15 aa, synthetic construct
AMRETPTGDVTDQLI

SEQ ID NO: 35816 - protein, 16 aa, synthetic construct
EMSEAFLRGIRADKLI

SEQ ID NO: 35817 - protein, 15 aa, synthetic construct
AMREWDYWGTTDQLI

SEQ ID NO: 35818 - protein, 13 aa, synthetic construct
AMREWDTRTDELI

SEQ ID NO: 35819 - protein, 13 aa, synthetic construct
AMREWDTRTDKLF

SEQ ID NO: 35820 - protein, 12 aa, synthetic construct
TMNPTVDNDKLI

SEQ ID NO: 35821 - protein, 14 aa, synthetic construct
EMRYTGYGDTDKLI

SEQ ID NO: 35822 - protein, 13 aa, synthetic construct
EMRVPTGGRDKLI

SEQ ID NO: 35823 - protein, 18 aa, synthetic construct
AMRETPSYVWGTYTDKLI

SEQ ID NO: 35824 - protein, 15 aa, synthetic construct
AMREWDYWGTTDKPI

SEQ ID NO: 35825 - protein, 13 aa, synthetic construct
EMSPVLGALVKLI

SEQ ID NO: 35826 - protein, 13 aa, synthetic construct
EMTEGETYTDKLI

SEQ ID NO: 35827 - protein, 13 aa, synthetic construct
AMREVWGPTDNSS

SEQ ID NO: 35828 - protein, 8 aa, synthetic construct
EMTPDKLI

SEQ ID NO: 35829 - protein, 14 aa, synthetic construct
AMRETSHGDTDKLI

SEQ ID NO: 35830 - protein, 10 aa, synthetic construct
ETLGARDKLI

SEQ ID NO: 35831 - protein, 13 aa, synthetic construct
AMREVWGIPINSS

SEQ ID NO: 35832 - protein, 13 aa, synthetic construct
AMREVWGIRRYTH

SEQ ID NO: 35833 - protein, 15 aa, synthetic construct
AMREVWGISPGTPDR

SEQ ID NO: 35834 - protein, 15 aa, synthetic construct
ETHGGGYAPYTDKLI

SEQ ID NO: 35835 - protein, 15 aa, synthetic construct
AMRETSGGSGGDKLI

SEQ ID NO: 35836 - protein, 9 aa, synthetic construct
ETGGTDKLI

SEQ ID NO: 35837 - protein, 18 aa, synthetic construct
AMRETPTWGIRGYTDKLI

SEQ ID NO: 35838 - protein, 10 aa, synthetic construct
ERWGIPINSS

SEQ ID NO: 35839 - protein, 16 aa, synthetic construct
ERREKAGDKGDTDKLI

SEQ ID NO: 35840 - protein, 14 aa, synthetic construct
AMREVWGMVTDKLI

SEQ ID NO: 35841 - protein, 15 aa, synthetic construct
TIREGTGAPYTDKLI

SEQ ID NO: 35842 - protein, 14 aa, synthetic construct
AMREVWGMYTDKLI

SEQ ID NO: 35843 - protein, 11 aa, synthetic construct
AMREVWGNKLI

SEQ ID NO: 35844 - protein, 12 aa, synthetic construct
TMRDGGYADKLI

SEQ ID NO: 35845 - protein, 15 aa, synthetic construct
AMREWDYWGTTDRLI

SEQ ID NO: 35846 - protein, 17 aa, synthetic construct
SMRENYGWGIPTPINSS

SEQ ID NO: 35847 - protein, 14 aa, synthetic construct
EMRETTRAYTDKLI

SEQ ID NO: 35848 - protein, 18 aa, synthetic construct
TMREDPSYWGIRDTDKLI

SEQ ID NO: 35849 - protein, 12 aa, synthetic construct
AMREWGTARPLI

SEQ ID NO: 35850 - protein, 11 aa, synthetic construct
EMREVGDTGLI

SEQ ID NO: 35851 - protein, 13 aa, synthetic construct
AMREWGYASDKLI

SEQ ID NO: 35852 - protein, 16 aa, synthetic construct
AMREWLLPGGYTDKLI

SEQ ID NO: 35853 - protein, 20 aa, synthetic construct
AMRETPPCTGGYELLGHPTD

SEQ ID NO: 35854 - protein, 14 aa, synthetic construct
EMREVDGGSADKLI

SEQ ID NO: 35855 - protein, 14 aa, synthetic construct
EMRETGGYGTDKLI

SEQ ID NO: 35856 - protein, 18 aa, synthetic construct
AMRETPSYVGGTYTDRLI

SEQ ID NO: 35857 - protein, 15 aa, synthetic construct
TMREDPYGGYPINSS

SEQ ID NO: 35858 - protein, 13 aa, synthetic construct
AMREWRGSTDKLI

SEQ ID NO: 35859 - protein, 13 aa, synthetic construct
AMREYCGDTDKLI

SEQ ID NO: 35860 - protein, 15 aa, synthetic construct
AMREYCGSSWDTRQM

SEQ ID NO: 35861 - protein, 15 aa, synthetic construct
AMREYCRSSWDTRQM

SEQ ID NO: 35862 - protein, 17 aa, synthetic construct
AMRETPPCTGGTPINSS

SEQ ID NO: 35863 - protein, 15 aa, synthetic construct
EMRERMGYTGPINSS

SEQ ID NO: 35864 - protein, 15 aa, synthetic construct
AMREWGSRSWDSRQM

SEQ ID NO: 35865 - protein, 13 aa, synthetic construct
AMREWGRRPINSS

SEQ ID NO: 35866 - protein, 10 aa, synthetic construct
EMREVLPTGT

SEQ ID NO: 35867 - protein, 12 aa, synthetic construct
AMREWGIPDKLV

SEQ ID NO: 35868 - protein, 14 aa, synthetic construct
EMRVAGDTPTDKLI

SEQ ID NO: 35869 - protein, 14 aa, synthetic construct
EMRSTGYGAPDKLI

SEQ ID NO: 35870 - protein, 14 aa, synthetic construct
TMRDPWGSHTDKLI

SEQ ID NO: 35871 - protein, 12 aa, synthetic construct
EMRPLPLADKLI

SEQ ID NO: 35872 - protein, 13 aa, synthetic construct
EMRGTYWGADKLI

SEQ ID NO: 35873 - protein, 13 aa, synthetic construct
AMREWGIGTDKLS

SEQ ID NO: 35874 - protein, 13 aa, synthetic construct
TMRDYWGTGGKLN

SEQ ID NO: 35875 - protein, 13 aa, synthetic construct
AMREWGILGDKLI

SEQ ID NO: 35876 - protein, 19 aa, synthetic construct
AMRETPRTGGYELLGHPTD

SEQ ID NO: 35877 - protein, 12 aa, synthetic construct
PMRLGDTPDKLI

SEQ ID NO: 35878 - protein, 12 aa, synthetic construct
EMRGGPNTDKLI

SEQ ID NO: 35879 - protein, 17 aa, synthetic construct
EMREYTTWDTRSKDKLI

SEQ ID NO: 35880 - protein, 11 aa, synthetic construct
AMREWGILKLT

SEQ ID NO: 35881 - protein, 12 aa, synthetic construct
EMREYGDTRPLI

SEQ ID NO: 35882 - protein, 13 aa, synthetic construct
EMREVWGPTDKLI

SEQ ID NO: 35883 - protein, 15 aa, synthetic construct
ETQGGGYAPYTDKLI

SEQ ID NO: 35884 - protein, 13 aa, synthetic construct
AMREVWGIPGKLT

SEQ ID NO: 35885 - protein, 13 aa, synthetic construct
AMREVWGIPGKLN

SEQ ID NO: 35886 - protein, 11 aa, synthetic construct
AMREVSHDKLI

SEQ ID NO: 35887 - protein, 17 aa, synthetic construct
GMRAPTGLGAPYTDKLI

SEQ ID NO: 35888 - protein, 15 aa, synthetic construct
GMRAGLGDTHTDKLI

SEQ ID NO: 35889 - protein, 18 aa, synthetic construct
SMREPSYVATGGYTDKLI

SEQ ID NO: 35890 - protein, 16 aa, synthetic construct
AMREVSCLGDYTDKHI

SEQ ID NO: 35891 - protein, 12 aa, synthetic construct
GMKESLLGDKLI

SEQ ID NO: 35892 - protein, 16 aa, synthetic construct
AMRETVLGETGPKNSS

SEQ ID NO: 35893 - protein, 13 aa, synthetic construct
SMRETGGHTDKLI

SEQ ID NO: 35894 - protein, 14 aa, synthetic construct
GMGGVLGGGGGGDT

SEQ ID NO: 35895 - protein, 14 aa, synthetic construct
AMRETSRAYTDKLI

SEQ ID NO: 35896 - protein, 17 aa, synthetic construct
AMREVSRATGGYTDKLI

SEQ ID NO: 35897 - protein, 13 aa, synthetic construct
SMREVLDPTDKLI

SEQ ID NO: 35898 - protein, 18 aa, synthetic construct
GKTEVVMGDTTEYTDKLI

SEQ ID NO: 35899 - protein, 16 aa, synthetic construct
AMREVSYAAGDYDKLI

SEQ ID NO: 35900 - protein, 16 aa, synthetic construct
GKTDLLRRGTRADKLI

SEQ ID NO: 35901 - protein, 16 aa, synthetic construct
AMREVSYAGGDYDKLI

SEQ ID NO: 35902 - protein, 17 aa, synthetic construct
GKRGHPIWGPPPPINSS

SEQ ID NO: 35903 - protein, 16 aa, synthetic construct
AMREVSCLGDYSEILS

SEQ ID NO: 35904 - protein, 17 aa, synthetic construct
AMREVSCLGDTITDKLI

SEQ ID NO: 35905 - protein, 15 aa, synthetic construct
AMREVRYWGIPKNSS

SEQ ID NO: 35906 - protein, 14 aa, synthetic construct
GMREGDTQYTDKLI

SEQ ID NO: 35907 - protein, 14 aa, synthetic construct
GMREGPGGYTDKLI

SEQ ID NO: 35908 - protein, 19 aa, synthetic construct
GMREGPFGTGGQALTAQLF

SEQ ID NO: 35909 - protein, 15 aa, synthetic construct
GMREGPATGDTDKLI

SEQ ID NO: 35910 - protein, 19 aa, synthetic construct
GMREGLPTDDWGIPARPLI

SEQ ID NO: 35911 - protein, 12 aa, synthetic construct
AMREVPVTEKLI

SEQ ID NO: 35912 - protein, 11 aa, synthetic construct
AMRGGGYGKPT

SEQ ID NO: 35913 - protein, 15 aa, synthetic construct
GMREGLGDTHTDKLI

SEQ ID NO: 35914 - protein, 17 aa, synthetic construct
GMREGHLLLGDKGDKLI

SEQ ID NO: 35915 - protein, 15 aa, synthetic construct
AMREVPYWEIGDTLI

SEQ ID NO: 35916 - protein, 14 aa, synthetic construct
AMRETWGILTDKLI

SEQ ID NO: 35917 - protein, 11 aa, synthetic construct
GMREGGPDKLI

SEQ ID NO: 35918 - protein, 18 aa, synthetic construct
AMRETVQGDTGPAIDKLI

SEQ ID NO: 35919 - protein, 13 aa, synthetic construct
AMREVRASTEKLI

SEQ ID NO: 35920 - protein, 12 aa, synthetic construct
AMREVRDTRPLI

SEQ ID NO: 35921 - protein, 12 aa, synthetic construct
AMREVRGSDKLI

SEQ ID NO: 35922 - protein, 16 aa, synthetic construct
GKRGALIRGLDTDKLI

SEQ ID NO: 35923 - protein, 16 aa, synthetic construct
AMREVTCLGDYTDKLI

SEQ ID NO: 35924 - protein, 14 aa, synthetic construct
AMRETTRAYTGKLI

SEQ ID NO: 35925 - protein, 14 aa, synthetic construct
AMRETSYGDTDKPI

SEQ ID NO: 35926 - protein, 12 aa, synthetic construct
GIIVLGYTDKLI

SEQ ID NO: 35927 - protein, 18 aa, synthetic construct
AMRETSTWGIRGHTDKLI

SEQ ID NO: 35928 - protein, 13 aa, synthetic construct
GIIVGCRIPDKLI

SEQ ID NO: 35929 - protein, 15 aa, synthetic construct
AMREVVLGSNTDNII

SEQ ID NO: 35930 - protein, 17 aa, synthetic construct
SRREVHTSGGSDTDKLI

SEQ ID NO: 35931 - protein, 13 aa, synthetic construct
GIIADNRYTDKLI

SEQ ID NO: 35932 - protein, 18 aa, synthetic construct
AMREVVRGDTTEYTDKLI

SEQ ID NO: 35933 - protein, 9 aa, synthetic construct
GGYWDDKLI

SEQ ID NO: 35934 - protein, 9 aa, synthetic construct
GGYWDDKFI

SEQ ID NO: 35935 - protein, 18 aa, synthetic construct
AMRETSTWGIRGCTDKLI

SEQ ID NO: 35936 - protein, 13 aa, synthetic construct
AMREVWGHTDKLI

SEQ ID NO: 35937 - protein, 9 aa, synthetic construct
GGYGVDKLI

SEQ ID NO: 35938 - protein, 14 aa, synthetic construct
AMREVWGIHPINSS

SEQ ID NO: 35939 - protein, 9 aa, synthetic construct
GGYGDDKHN

SEQ ID NO: 35940 - protein, 12 aa, synthetic construct
ETREGWDPRGLI

SEQ ID NO: 35941 - protein, 16 aa, synthetic construct
AMREVVGVQPQQDNYK

SEQ ID NO: 35942 - protein, 15 aa, synthetic construct
AMRETTGGYGTDKLI

SEQ ID NO: 35943 - protein, 13 aa, synthetic construct
GKREWGIGTDKLI

SEQ ID NO: 35944 - protein, 15 aa, synthetic construct
AMREVTGGYTGTPDR

SEQ ID NO: 35945 - protein, 15 aa, synthetic construct
AMREVTGGGHTDKLI

SEQ ID NO: 35946 - protein, 15 aa, synthetic construct
SMREVLGDRDTDKLI

SEQ ID NO: 35947 - protein, 14 aa, synthetic construct
AMRETTRADTDKLI

SEQ ID NO: 35948 - protein, 14 aa, synthetic construct
AMREVTGGHTDKLI

SEQ ID NO: 35949 - protein, 18 aa, synthetic construct
GKREVVMGIRPSTPINSS

SEQ ID NO: 35950 - protein, 10 aa, synthetic construct
GIRVSGDKLI

SEQ ID NO: 35951 - protein, 12 aa, synthetic construct
SMREVPVTDKLI

SEQ ID NO: 35952 - protein, 14 aa, synthetic construct
AMREVTGGNTDNLI

SEQ ID NO: 35953 - protein, 11 aa, synthetic construct
SMRGGPLDKLI

SEQ ID NO: 35954 - protein, 18 aa, synthetic construct
GIRVSFLLVLGEYTDKLI

SEQ ID NO: 35955 - protein, 14 aa, synthetic construct
GIRVGRGYGVDKLI

SEQ ID NO: 35956 - protein, 14 aa, synthetic construct
AMREVTGGNTDNNI

SEQ ID NO: 35957 - protein, 10 aa, synthetic construct
AMREVTGGTH

SEQ ID NO: 35958 - protein, 11 aa, synthetic construct
GIRDGGDGKLI

SEQ ID NO: 35959 - protein, 15 aa, synthetic construct
AMREVTGGYAADKLI

SEQ ID NO: 35960 - protein, 14 aa, synthetic construct
AMRVLGVRYTDKLN

SEQ ID NO: 35961 - protein, 14 aa, synthetic construct
AMRGKYWGYPINSS

SEQ ID NO: 35962 - protein, 13 aa, synthetic construct
AMRGGGYRAAKLF

SEQ ID NO: 35963 - protein, 8 aa, synthetic construct
AMRPDKLL

SEQ ID NO: 35964 - protein, 12 aa, synthetic construct
AMSPAGDTDKLT

SEQ ID NO: 35965 - protein, 12 aa, synthetic construct
AMSNWPDTDKLI

SEQ ID NO: 35966 - protein, 14 aa, synthetic construct
AMRNTGGTGTAQLF

SEQ ID NO: 35967 - protein, 15 aa, synthetic construct
AMRNTGGYEGNDKLI

SEQ ID NO: 35968 - protein, 15 aa, synthetic construct
AMRNTGGYEGTAKLI

SEQ ID NO: 35969 - protein, 12 aa, synthetic construct
AMSMGDNTDKLI

SEQ ID NO: 35970 - protein, 13 aa, synthetic construct
AMSLYWGIGYKLI

SEQ ID NO: 35971 - protein, 12 aa, synthetic construct
AMSLVLGGDKLI

SEQ ID NO: 35972 - protein, 16 aa, synthetic construct
AMSLRSLLGDTPINSS

SEQ ID NO: 35973 - protein, 13 aa, synthetic construct
AMSLQGANTDKLV

SEQ ID NO: 35974 - protein, 12 aa, synthetic construct
AMRNWADTEKLI

SEQ ID NO: 35975 - protein, 11 aa, synthetic construct
AMRNWGIDKLI

SEQ ID NO: 35976 - protein, 17 aa, synthetic construct
AMSLPSFLTGGYSDKLI

SEQ ID NO: 35977 - protein, 16 aa, synthetic construct
AMSLLPTGDTYTDKLT

SEQ ID NO: 35978 - protein, 13 aa, synthetic construct
AMRPAFLRGDKHI

SEQ ID NO: 35979 - protein, 16 aa, synthetic construct
AMSLLPTGDTYNEKLI

SEQ ID NO: 35980 - protein, 16 aa, synthetic construct
AMSLLPTGDTNTEILS

SEQ ID NO: 35981 - protein, 13 aa, synthetic construct
AMRPAFLRGDQLI

SEQ ID NO: 35982 - protein, 15 aa, synthetic construct
AMSLGDTRGYTDKLT

SEQ ID NO: 35983 - protein, 15 aa, synthetic construct
AMRNTGGCEGTDKLI

SEQ ID NO: 35984 - protein, 6 aa, synthetic construct
AMRNTG

SEQ ID NO: 35985 - protein, 12 aa, synthetic construct
AMSPAGDTENLI

SEQ ID NO: 35986 - protein, 11 aa, synthetic construct
AMSPRATDKLI

SEQ ID NO: 35987 - protein, 13 aa, synthetic construct
AMRLYWGIGDRLI

SEQ ID NO: 35988 - protein, 12 aa, synthetic construct
AMRMGDNADKLI

SEQ ID NO: 35989 - protein, 12 aa, synthetic construct
AMRMGDNTDKLF

SEQ ID NO: 35990 - protein, 11 aa, synthetic construct
AMSPRGTDRLI

SEQ ID NO: 35991 - protein, 11 aa, synthetic construct
AMSPRGTDILI

SEQ ID NO: 35992 - protein, 12 aa, synthetic construct
AMRMGDNTYKLI

SEQ ID NO: 35993 - protein, 11 aa, synthetic construct
AMSPRATDTLI

SEQ ID NO: 35994 - protein, 12 aa, synthetic construct
AMRMGDPTDKLI

SEQ ID NO: 35995 - protein, 12 aa, synthetic construct
AMSPPGDTDKLI

SEQ ID NO: 35996 - protein, 9 aa, synthetic construct
AMRNTDKII

SEQ ID NO: 35997 - protein, 12 aa, synthetic construct
AMSPLPLTDKLI

SEQ ID NO: 35998 - protein, 11 aa, synthetic construct
AMSPKGTDKLI

SEQ ID NO: 35999 - protein, 12 aa, synthetic construct
AMRMGDTTDKLN

SEQ ID NO: 36000 - protein, 11 aa, synthetic construct
AMSPGGTDTLI

SEQ ID NO: 36001 - protein, 12 aa, synthetic construct
AMSPDGVDDHLI

SEQ ID NO: 36002 - protein, 12 aa, synthetic construct
AMRMGNTPINSS

SEQ ID NO: 36003 - protein, 12 aa, synthetic construct
AMRMGVTPINSS

SEQ ID NO: 36004 - protein, 13 aa, synthetic construct
AMSPAGDTGDKLI

SEQ ID NO: 36005 - protein, 15 aa, synthetic construct
AMSLGDMRGYTDKLI

SEQ ID NO: 36006 - protein, 8 aa, synthetic construct
AMRPDKRI

SEQ ID NO: 36007 - protein, 17 aa, synthetic construct
AMSPSYVLGDTAADKLI

SEQ ID NO: 36008 - protein, 8 aa, synthetic construct
AMRPDNPS

SEQ ID NO: 36009 - protein, 15 aa, synthetic construct
AMRPGLGHTGTDKLI

SEQ ID NO: 36010 - protein, 12 aa, synthetic construct
AMRPGVMTDKLI

SEQ ID NO: 36011 - protein, 17 aa, synthetic construct
AMRPIFLRGGAYTDKLI

SEQ ID NO: 36012 - protein, 17 aa, synthetic construct
AMRPIFLRGGRTPINSS

SEQ ID NO: 36013 - protein, 13 aa, synthetic construct
AMRPIGGHTDKLI

SEQ ID NO: 36014 - protein, 16 aa, synthetic construct
AMRPILRWGNYTDKLI

SEQ ID NO: 36015 - protein, 14 aa, synthetic construct
AMRPLGEKYTDKLI

SEQ ID NO: 36016 - protein, 12 aa, synthetic construct
AMRPLPLTDKII

SEQ ID NO: 36017 - protein, 13 aa, synthetic construct
AMSEVLGNTCKLI

SEQ ID NO: 36018 - protein, 14 aa, synthetic construct
AMSEVLGNGGDKLI

SEQ ID NO: 36019 - protein, 12 aa, synthetic construct
AMRPLPLTHKLI

SEQ ID NO: 36020 - protein, 14 aa, synthetic construct
AMSEVLGDYTDKLI

SEQ ID NO: 36021 - protein, 14 aa, synthetic construct
AMRPPYWGIQAKLI

SEQ ID NO: 36022 - protein, 11 aa, synthetic construct
AMRPRTPINSS

SEQ ID NO: 36023 - protein, 14 aa, synthetic construct
AMRPSPVLGADILI

SEQ ID NO: 36024 - protein, 15 aa, synthetic construct
AMSEVLGDTSTDKLI

SEQ ID NO: 36025 - protein, 13 aa, synthetic construct
AMSESVGALDKLI

SEQ ID NO: 36026 - protein, 18 aa, synthetic construct
AMSESFLLVLGEYTDKLI

SEQ ID NO: 36027 - protein, 11 aa, synthetic construct
AMSERGTDKLI

SEQ ID NO: 36028 - protein, 11 aa, synthetic construct
AMSEVVGSKLI

SEQ ID NO: 36029 - protein, 12 aa, synthetic construct
AMRPGGITDRLI

SEQ ID NO: 36030 - protein, 15 aa, synthetic construct
AMSEVVGYIGTDKLI

SEQ ID NO: 36031 - protein, 16 aa, synthetic construct
AMRPFLRGDMGTDNSS

SEQ ID NO: 36032 - protein, 11 aa, synthetic construct
AMSKGIRYKLI

SEQ ID NO: 36033 - protein, 12 aa, synthetic construct
AMRPEGITDKLI

SEQ ID NO: 36034 - protein, 14 aa, synthetic construct
AMRPFLHWGTDKLI

SEQ ID NO: 36035 - protein, 14 aa, synthetic construct
AMSIYWGIRTDKLI

SEQ ID NO: 36036 - protein, 16 aa, synthetic construct
AMRPFLRGDMGTDELI

SEQ ID NO: 36037 - protein, 14 aa, synthetic construct
AMSIYWGIRNDKLF

SEQ ID NO: 36038 - protein, 14 aa, synthetic construct
AMSIYWGIQNDKLI

SEQ ID NO: 36039 - protein, 14 aa, synthetic construct
AMSIYRGIRNDKLI

SEQ ID NO: 36040 - protein, 16 aa, synthetic construct
AMRPFLRGEMGTDKLI

SEQ ID NO: 36041 - protein, 15 aa, synthetic construct
AMSEVVLGANTDKLI

SEQ ID NO: 36042 - protein, 13 aa, synthetic construct
AMSHVLGALDKLI

SEQ ID NO: 36043 - protein, 11 aa, synthetic construct
AMSGTGGHKLI

SEQ ID NO: 36044 - protein, 16 aa, synthetic construct
AMRPFLRWGNYTDKLV

SEQ ID NO: 36045 - protein, 14 aa, synthetic construct
AMSGLLGDTGDKLI

SEQ ID NO: 36046 - protein, 11 aa, synthetic construct
AMSGGTPINSP

SEQ ID NO: 36047 - protein, 9 aa, synthetic construct
AMSGFVQSL

SEQ ID NO: 36048 - protein, 10 aa, synthetic construct
AMRPGERGLI

SEQ ID NO: 36049 - protein, 12 aa, synthetic construct
AMRPGGITDKHI

SEQ ID NO: 36050 - protein, 11 aa, synthetic construct
AMSPRGTNKLI

SEQ ID NO: 36051 - protein, 14 aa, synthetic construct
AMRLQGDTRHRLTR

SEQ ID NO: 36052 - protein, 16 aa, synthetic construct
AMTDLLWGIRDTDKLI

SEQ ID NO: 36053 - protein, 14 aa, synthetic construct
AMRKYWGPYTDKLV

SEQ ID NO: 36054 - protein, 18 aa, synthetic construct
AMRKAFPTFPLYFGAGTR

SEQ ID NO: 36055 - protein, 13 aa, synthetic construct
AMSVSYGDTGETH

SEQ ID NO: 36056 - protein, 13 aa, synthetic construct
AMRKGMGHTDKLI

SEQ ID NO: 36057 - protein, 15 aa, synthetic construct
AMSVPTYVRISINSS

SEQ ID NO: 36058 - protein, 12 aa, synthetic construct
AMSVPALGYELI

SEQ ID NO: 36059 - protein, 14 aa, synthetic construct
AMRKGRGENTDKLI

SEQ ID NO: 36060 - protein, 17 aa, synthetic construct
AMRKGRSTTGVKTAQLF

SEQ ID NO: 36061 - protein, 15 aa, synthetic construct
AMRKGYVGIPTDKLI

SEQ ID NO: 36062 - protein, 12 aa, synthetic construct
AMSVLGEPINSS

SEQ ID NO: 36063 - protein, 8 aa, synthetic construct
AMRKHPMT

SEQ ID NO: 36064 - protein, 13 aa, synthetic construct
AMSVLGDYTEKLN

SEQ ID NO: 36065 - protein, 16 aa, synthetic construct
AMSVGFWGIRGTDKLI

SEQ ID NO: 36066 - protein, 20 aa, synthetic construct
AMSVDFPPFILGDRKGDKLI

SEQ ID NO: 36067 - protein, 11 aa, synthetic construct
AMSTVGTLNSS

SEQ ID NO: 36068 - protein, 12 aa, synthetic construct
AMRKPGGPDKLI

SEQ ID NO: 36069 - protein, 18 aa, synthetic construct
AMRKPSSTGGCVYTDKLV

SEQ ID NO: 36070 - protein, 13 aa, synthetic construct
AMRKSLGAFDKLI

SEQ ID NO: 36071 - protein, 16 aa, synthetic construct
AMRKSLGDTGYTDKLI

SEQ ID NO: 36072 - protein, 17 aa, synthetic construct
AMSTSYVLGDTATDKLI

SEQ ID NO: 36073 - protein, 11 aa, synthetic construct
AMRIQYTDKLI

SEQ ID NO: 36074 - protein, 13 aa, synthetic construct
AMRIQHWGTDKLI

SEQ ID NO: 36075 - protein, 11 aa, synthetic construct
AMRIPYTHKLI

SEQ ID NO: 36076 - protein, 18 aa, synthetic construct
AMRIPTPVRGGGDTAKLI

SEQ ID NO: 36077 - protein, 12 aa, synthetic construct
AMRIPPGDTVLT

SEQ ID NO: 36078 - protein, 16 aa, synthetic construct
AMRIPTFWGAGTDKLI

SEQ ID NO: 36079 - protein, 14 aa, synthetic construct
AMTCTGGYATDKLS

SEQ ID NO: 36080 - protein, 18 aa, synthetic construct
AMRIPTPVLGGGDTDRLI

SEQ ID NO: 36081 - protein, 9 aa, synthetic construct
AMTCTGGIP

SEQ ID NO: 36082 - protein, 14 aa, synthetic construct
AMTCNGGYATDTLI

SEQ ID NO: 36083 - protein, 14 aa, synthetic construct
AMTALRRGDGGLLI

SEQ ID NO: 36084 - protein, 12 aa, synthetic construct
AMSWWIQADKLI

SEQ ID NO: 36085 - protein, 10 aa, synthetic construct
AMSWRADKII

SEQ ID NO: 36086 - protein, 15 aa, synthetic construct
AMSVSYGDTRTDKLI

SEQ ID NO: 36087 - protein, 18 aa, synthetic construct
AMRIPTPVRGGGTPINSS

SEQ ID NO: 36088 - protein, 15 aa, synthetic construct
AMRIPTSTGGTDILI

SEQ ID NO: 36089 - protein, 10 aa, synthetic construct
AMSWGAENRI

SEQ ID NO: 36090 - protein, 10 aa, synthetic construct
AMSWGADKII

SEQ ID NO: 36091 - protein, 10 aa, synthetic construct
AMSWGADELI

SEQ ID NO: 36092 - protein, 15 aa, synthetic construct
AMRIPTSTGGTNKLI

SEQ ID NO: 36093 - protein, 14 aa, synthetic construct
AMSVVADTLTDNVI

SEQ ID NO: 36094 - protein, 11 aa, synthetic construct
AMRIPYTDKPI

SEQ ID NO: 36095 - protein, 14 aa, synthetic construct
AMRKYWGPNTDKLI

SEQ ID NO: 36096 - protein, 15 aa, synthetic construct
AMRKYWGRVERINSS

SEQ ID NO: 36097 - protein, 13 aa, synthetic construct
AMSPVLGALAKLI

SEQ ID NO: 36098 - protein, 12 aa, synthetic construct
AMRLADTTDKII

SEQ ID NO: 36099 - protein, 13 aa, synthetic construct
AMRLGDTYTDTLI

SEQ ID NO: 36100 - protein, 12 aa, synthetic construct
AMSQAEDTDKMS

SEQ ID NO: 36101 - protein, 12 aa, synthetic construct
AMRLGETPDKLI

SEQ ID NO: 36102 - protein, 12 aa, synthetic construct
AMSPYWGDDRLI

SEQ ID NO: 36103 - protein, 11 aa, synthetic construct
AMSPYWGDDKL

SEQ ID NO: 36104 - protein, 16 aa, synthetic construct
AMRLHSLLGDTPITSS

SEQ ID NO: 36105 - protein, 12 aa, synthetic construct
AMSPYWEDDKLI

SEQ ID NO: 36106 - protein, 13 aa, synthetic construct
AMRLLGDTPINSS

SEQ ID NO: 36107 - protein, 15 aa, synthetic construct
AMRLLGDTQYTDKLI

SEQ ID NO: 36108 - protein, 13 aa, synthetic construct
AMRLLGDTSINSS

SEQ ID NO: 36109 - protein, 15 aa, synthetic construct
AMSPWGYGVSPIYSS

SEQ ID NO: 36110 - protein, 13 aa, synthetic construct
AMSPVLWAHDKLI

SEQ ID NO: 36111 - protein, 12 aa, synthetic construct
AMRLLGDTVNSS

SEQ ID NO: 36112 - protein, 13 aa, synthetic construct
AMRLLGIRGHKLI

SEQ ID NO: 36113 - protein, 13 aa, synthetic construct
AMSPVLGALDQLI

SEQ ID NO: 36114 - protein, 16 aa, synthetic construct
AMRLLSLLGDTPINSS

SEQ ID NO: 36115 - protein, 13 aa, synthetic construct
AMRLMGATTDKLL

SEQ ID NO: 36116 - protein, 13 aa, synthetic construct
AMSPVLGALDKPI

SEQ ID NO: 36117 - protein, 16 aa, synthetic construct
AMRLPSFWGAGTDKLI

SEQ ID NO: 36118 - protein, 10 aa, synthetic construct
AMRLGDTYTD

SEQ ID NO: 36119 - protein, 13 aa, synthetic construct
AMRLGDTRTDRLI

SEQ ID NO: 36120 - protein, 11 aa, synthetic construct
AMSQAGGYKLI

SEQ ID NO: 36121 - protein, 14 aa, synthetic construct
AMSRVLGDLPISSS

SEQ ID NO: 36122 - protein, 11 aa, synthetic construct
AMSTGGSDKLL

SEQ ID NO: 36123 - protein, 14 aa, synthetic construct
AMSSTRYGAPDKLI

SEQ ID NO: 36124 - protein, 12 aa, synthetic construct
AMRLGDNTDKLI

SEQ ID NO: 36125 - protein, 14 aa, synthetic construct
AMSSLLGDTGDKLM

SEQ ID NO: 36126 - protein, 13 aa, synthetic construct
AMRLGDRGGDKLI

SEQ ID NO: 36127 - protein, 12 aa, synthetic construct
AMRLGDTADKLI

SEQ ID NO: 36128 - protein, 13 aa, synthetic construct
AMSRWGIGPINSS

SEQ ID NO: 36129 - protein, 12 aa, synthetic construct
AMRLGDTPDKPI

SEQ ID NO: 36130 - protein, 12 aa, synthetic construct
AMSRGGYTNKLI

SEQ ID NO: 36131 - protein, 15 aa, synthetic construct
AMSQGDTRGYTDKLI

SEQ ID NO: 36132 - protein, 12 aa, synthetic construct
AMSRGGYTDKLT

SEQ ID NO: 36133 - protein, 12 aa, synthetic construct
AMSRGGYTDKLN

SEQ ID NO: 36134 - protein, 10 aa, synthetic construct
AMSRGADKLI

SEQ ID NO: 36135 - protein, 10 aa, synthetic construct
AMSQLGDKLI

SEQ ID NO: 36136 - protein, 12 aa, synthetic construct
AMRLGDTRDELI

SEQ ID NO: 36137 - protein, 16 aa, synthetic construct
AMSQGNWGIPHTDKLI

SEQ ID NO: 36138 - protein, 14 aa, synthetic construct
AMSQGLGEYTEKLI

SEQ ID NO: 36139 - protein, 14 aa, synthetic construct
AMSQGLGEYTDKLI

SEQ ID NO: 36140 - protein, 11 aa, synthetic construct
AMRPSTTINSS

SEQ ID NO: 36141 - protein, 17 aa, synthetic construct
AMSEPAYCTGGYTDKLI

SEQ ID NO: 36142 - protein, 13 aa, synthetic construct
AMSEMGVYTDKLI

SEQ ID NO: 36143 - protein, 15 aa, synthetic construct
AMRVPTYGGCGSKLI

SEQ ID NO: 36144 - protein, 15 aa, synthetic construct
AMRVAFTGGYGDKLI

SEQ ID NO: 36145 - protein, 11 aa, synthetic construct
AMRVRGIPTLI

SEQ ID NO: 36146 - protein, 16 aa, synthetic construct
AMRVFPLGGKSTDKHI

SEQ ID NO: 36147 - protein, 16 aa, synthetic construct
AMRVFPLGGKYTDILI

SEQ ID NO: 36148 - protein, 12 aa, synthetic construct
AMRVRGDTDKLI

SEQ ID NO: 36149 - protein, 16 aa, synthetic construct
AMRVFPLGGSTPINSS

SEQ ID NO: 36150 - protein, 16 aa, synthetic construct
AMRVFPSGGSTPINSS

SEQ ID NO: 36151 - protein, 11 aa, synthetic construct
AMRVGDTDKLI

SEQ ID NO: 36152 - protein, 13 aa, synthetic construct
AMRVGDTPADELT

SEQ ID NO: 36153 - protein, 13 aa, synthetic construct
AMRVRAGTRVNSS

SEQ ID NO: 36154 - protein, 13 aa, synthetic construct
AMRVRAGDEVGGF

SEQ ID NO: 36155 - protein, 12 aa, synthetic construct
AMRVGGDPRGLI

SEQ ID NO: 36156 - protein, 13 aa, synthetic construct
AMRVQTGRPDKLI

SEQ ID NO: 36157 - protein, 13 aa, synthetic construct
AMRVGGTPADNLI

SEQ ID NO: 36158 - protein, 13 aa, synthetic construct
AMRVGGYRAAQLF

SEQ ID NO: 36159 - protein, 12 aa, synthetic construct
AMRVQGDPDKLI

SEQ ID NO: 36160 - protein, 13 aa, synthetic construct
AMRVGGYSADKLI

SEQ ID NO: 36161 - protein, 15 aa, synthetic construct
AMRVPTYVRISINSS

SEQ ID NO: 36162 - protein, 11 aa, synthetic construct
AMRVGIRGKLL

SEQ ID NO: 36163 - protein, 17 aa, synthetic construct
AMRVAFSWGIPYTDKLI

SEQ ID NO: 36164 - protein, 13 aa, synthetic construct
AMRVADRPADKLI

SEQ ID NO: 36165 - protein, 17 aa, synthetic construct
AMRVRHPSVQGDTDKLI

SEQ ID NO: 36166 - protein, 15 aa, synthetic construct
AMRVTGGSTSTDKLS

SEQ ID NO: 36167 - protein, 15 aa, synthetic construct
AMRSVLGNKYTDKLI

SEQ ID NO: 36168 - protein, 12 aa, synthetic construct
AMRVVGDSDQLI

SEQ ID NO: 36169 - protein, 11 aa, synthetic construct
AMRSYGGISLI

SEQ ID NO: 36170 - protein, 12 aa, synthetic construct
AMRVVGDSDKVI

SEQ ID NO: 36171 - protein, 13 aa, synthetic construct
AMRSYRGIRDKLI

SEQ ID NO: 36172 - protein, 11 aa, synthetic construct
AMRSYWGIPII

SEQ ID NO: 36173 - protein, 15 aa, synthetic construct
AMRVTGGYLTPINSS

SEQ ID NO: 36174 - protein, 11 aa, synthetic construct
AMRVTGGTINS

SEQ ID NO: 36175 - protein, 13 aa, synthetic construct
AMRSYWGIRDKLV

SEQ ID NO: 36176 - protein, 17 aa, synthetic construct
AMRVRLPSVLGGTDKLI

SEQ ID NO: 36177 - protein, 13 aa, synthetic construct
AMRVTGGRTDKHI

SEQ ID NO: 36178 - protein, 13 aa, synthetic construct
AMRSYWGIRDQLI

SEQ ID NO: 36179 - protein, 17 aa, synthetic construct
AMRSYWGIRLGYTDKLI

SEQ ID NO: 36180 - protein, 13 aa, synthetic construct
AMRTAFLRGDKLI

SEQ ID NO: 36181 - protein, 14 aa, synthetic construct
AMRVTGDKYTDKLI

SEQ ID NO: 36182 - protein, 18 aa, synthetic construct
AMRTFLHVMGVQYTDKLI

SEQ ID NO: 36183 - protein, 12 aa, synthetic construct
AMRTGDTTDKLI

SEQ ID NO: 36184 - protein, 18 aa, synthetic construct
AMRTGLPPYWGSYPDKLI

SEQ ID NO: 36185 - protein, 11 aa, synthetic construct
AMRVGIRGKLM

SEQ ID NO: 36186 - protein, 14 aa, synthetic construct
AMRVGLGDRTDKLI

SEQ ID NO: 36187 - protein, 13 aa, synthetic construct
AMRPTGGHTAKVI

SEQ ID NO: 36188 - protein, 14 aa, synthetic construct
AMRVPTVYWPDKHI

SEQ ID NO: 36189 - protein, 13 aa, synthetic construct
AMRVPIGGRDKLI

SEQ ID NO: 36190 - protein, 13 aa, synthetic construct
AMRVLGDTADQLI

SEQ ID NO: 36191 - protein, 13 aa, synthetic construct
AMRVLGDTDDKLI

SEQ ID NO: 36192 - protein, 10 aa, synthetic construct
AMRVLGDTDK

SEQ ID NO: 36193 - protein, 13 aa, synthetic construct
AMRVPGGYSDKLI

SEQ ID NO: 36194 - protein, 11 aa, synthetic construct
AMRVLGDTDKL

SEQ ID NO: 36195 - protein, 12 aa, synthetic construct
AMRVPALGYELI

SEQ ID NO: 36196 - protein, 12 aa, synthetic construct
AMRVLGDTDRLI

SEQ ID NO: 36197 - protein, 9 aa, synthetic construct
AMRVMDKLI

SEQ ID NO: 36198 - protein, 15 aa, synthetic construct
AMRVLGDTSRDTRQM

SEQ ID NO: 36199 - protein, 16 aa, synthetic construct
AMRVLYWGIGTPRNSS

SEQ ID NO: 36200 - protein, 12 aa, synthetic construct
AMRVLWNTNKLI

SEQ ID NO: 36201 - protein, 13 aa, synthetic construct
AMRVLGDYTDKLI

SEQ ID NO: 36202 - protein, 12 aa, synthetic construct
AMRVLVETDKLI

SEQ ID NO: 36203 - protein, 12 aa, synthetic construct
AMRVLGETDKLI

SEQ ID NO: 36204 - protein, 13 aa, synthetic construct
AMRVLRSPPDKPI

SEQ ID NO: 36205 - protein, 18 aa, synthetic construct
AMRVLPTLLLGGYTDKLI

SEQ ID NO: 36206 - protein, 15 aa, synthetic construct
AMRVLPTGGYTDKLI

SEQ ID NO: 36207 - protein, 18 aa, synthetic construct
AMRVLPTFLLGGFTDKLI

SEQ ID NO: 36208 - protein, 13 aa, synthetic construct
AMRVLGDTADKLN

SEQ ID NO: 36209 - protein, 12 aa, synthetic construct
AMRVLGDPDKLS

SEQ ID NO: 36210 - protein, 35 aa, synthetic construct
AMRVPRVIGYRSTQHRNSNPSDTRPKKPPTGQTNS

SEQ ID NO: 36211 - protein, 13 aa, synthetic construct
AMRVPTGGPEKLI

SEQ ID NO: 36212 - protein, 12 aa, synthetic construct
AMRVPTLGYELT

SEQ ID NO: 36213 - protein, 13 aa, synthetic construct
AMRVGLGNTDKLI

SEQ ID NO: 36214 - protein, 14 aa, synthetic construct
AMRVPTLGDTGETH

SEQ ID NO: 36215 - protein, 16 aa, synthetic construct
AMRVGLWGIRGTDKLI

SEQ ID NO: 36216 - protein, 9 aa, synthetic construct
AMRVGRGTH

SEQ ID NO: 36217 - protein, 22 aa, synthetic construct
AMRVGRSYDWGIRARVYTDKLI

SEQ ID NO: 36218 - protein, 13 aa, synthetic construct
AMRVGSGAPDKLI

SEQ ID NO: 36219 - protein, 13 aa, synthetic construct
AMRVGSGDTLETH

SEQ ID NO: 36220 - protein, 13 aa, synthetic construct
AMRVPTGGPDNLI

SEQ ID NO: 36221 - protein, 15 aa, synthetic construct
AMRVLGDNPWDTRQM

SEQ ID NO: 36222 - protein, 14 aa, synthetic construct
AMRVGWGMYTDKLI

SEQ ID NO: 36223 - protein, 13 aa, synthetic construct
AMRVPTGGPDELI

SEQ ID NO: 36224 - protein, 15 aa, synthetic construct
AMRVPSYVWISINSS

SEQ ID NO: 36225 - protein, 15 aa, synthetic construct
AMRVPSYRGYGSKLI

SEQ ID NO: 36226 - protein, 14 aa, synthetic construct
AMRVPSVYWPDKLI

SEQ ID NO: 36227 - protein, 13 aa, synthetic construct
AMRVLGATAYKHI

SEQ ID NO: 36228 - protein, 15 aa, synthetic construct
AMRVPSFLMGDDKLI

SEQ ID NO: 36229 - protein, 13 aa, synthetic construct
AMRVLGATAYKLI

SEQ ID NO: 36230 - protein, 15 aa, synthetic construct
AMRSVLGDKYTDKLI

SEQ ID NO: 36231 - protein, 12 aa, synthetic construct
AMRVVGESAQLF

SEQ ID NO: 36232 - protein, 14 aa, synthetic construct
AMRSTGYGAPDKLN

SEQ ID NO: 36233 - protein, 12 aa, synthetic construct
AMRVVGNTDKLM

SEQ ID NO: 36234 - protein, 13 aa, synthetic construct
AMRQGDWGPLGLI

SEQ ID NO: 36235 - protein, 12 aa, synthetic construct
AMRQGESPDKLI

SEQ ID NO: 36236 - protein, 15 aa, synthetic construct
AMSECTGGTGTAQLF

SEQ ID NO: 36237 - protein, 14 aa, synthetic construct
AMRQGGGILGDKLI

SEQ ID NO: 36238 - protein, 12 aa, synthetic construct
AMRQGPLGSKLI

SEQ ID NO: 36239 - protein, 16 aa, synthetic construct
AMRQGPSTWGIRINSS

SEQ ID NO: 36240 - protein, 16 aa, synthetic construct
AMRQGVLPWGIPDKLI

SEQ ID NO: 36241 - protein, 15 aa, synthetic construct
AMRQGWATAPGTPDR

SEQ ID NO: 36242 - protein, 20 aa, synthetic construct
AMRQGWPSYWGNQLTPINSS

SEQ ID NO: 36243 - protein, 10 aa, synthetic construct
AMRQLADKLI

SEQ ID NO: 36244 - protein, 15 aa, synthetic construct
AMSEAGGWGYTDKLI

SEQ ID NO: 36245 - protein, 16 aa, synthetic construct
AMSEAFLGGIRADNLI

SEQ ID NO: 36246 - protein, 10 aa, synthetic construct
AMRQLGDNLI

SEQ ID NO: 36247 - protein, 13 aa, synthetic construct
AMRQMEVYTDKLI

SEQ ID NO: 36248 - protein, 17 aa, synthetic construct
AMRQPLRPYWGTPIKSS

SEQ ID NO: 36249 - protein, 13 aa, synthetic construct
AMSDVGKNTDKLI

SEQ ID NO: 36250 - protein, 19 aa, synthetic construct
AMSDVASYSWGRALTAQLF

SEQ ID NO: 36251 - protein, 9 aa, synthetic construct
AMRRADELN

SEQ ID NO: 36252 - protein, 18 aa, synthetic construct
AMSDSITGGYGCTPINSS

SEQ ID NO: 36253 - protein, 12 aa, synthetic construct
AMRQGDSPDKLI

SEQ ID NO: 36254 - protein, 15 aa, synthetic construct
AMSEEVGHIGTDKLI

SEQ ID NO: 36255 - protein, 14 aa, synthetic construct
AMRQGAGSYTDKLI

SEQ ID NO: 36256 - protein, 19 aa, synthetic construct
AMSEGVPTDDWGIPARPLI

SEQ ID NO: 36257 - protein, 15 aa, synthetic construct
AMSEILLGGYTDKLI

SEQ ID NO: 36258 - protein, 13 aa, synthetic construct
AMRPTGGHTDKVI

SEQ ID NO: 36259 - protein, 15 aa, synthetic construct
AMRPVLRDTGTDKLI

SEQ ID NO: 36260 - protein, 16 aa, synthetic construct
AMSEGWGIPSLTAQLF

SEQ ID NO: 36261 - protein, 12 aa, synthetic construct
AMSEGWDPRGLI

SEQ ID NO: 36262 - protein, 8 aa, synthetic construct
AMRPYKHI

SEQ ID NO: 36263 - protein, 8 aa, synthetic construct
AMRPYKPI

SEQ ID NO: 36264 - protein, 14 aa, synthetic construct
AMSEGVVGDTDKLI

SEQ ID NO: 36265 - protein, 12 aa, synthetic construct
AMSEGRGSDKLI

SEQ ID NO: 36266 - protein, 15 aa, synthetic construct
AMRQGADRGYADKLI

SEQ ID NO: 36267 - protein, 13 aa, synthetic construct
AMSEGRGIPDKLI

SEQ ID NO: 36268 - protein, 13 aa, synthetic construct
AMRPYWGITDKFI

SEQ ID NO: 36269 - protein, 16 aa, synthetic construct
AMSEGGVGASSPDKLI

SEQ ID NO: 36270 - protein, 13 aa, synthetic construct
AMSEGGGYPGELI

SEQ ID NO: 36271 - protein, 14 aa, synthetic construct
AMSEGGGENTDKLI

SEQ ID NO: 36272 - protein, 13 aa, synthetic construct
AMRPYWGITINSS

SEQ ID NO: 36273 - protein, 13 aa, synthetic construct
AMSEGEGDTGKLI

SEQ ID NO: 36274 - protein, 17 aa, synthetic construct
AMRQADSHGDGVTDKLI

SEQ ID NO: 36275 - protein, 20 aa, synthetic construct
AMSDAYGGINDQHGSRLSHR

SEQ ID NO: 36276 - protein, 14 aa, synthetic construct
AMSCVPGDKGDKLI

SEQ ID NO: 36277 - protein, 13 aa, synthetic construct
AMRRDRGIHDKLI

SEQ ID NO: 36278 - protein, 14 aa, synthetic construct
AMRVYWGILTDKLI

SEQ ID NO: 36279 - protein, 18 aa, synthetic construct
AMRYTFLQYWGKYTDKLI

SEQ ID NO: 36280 - protein, 11 aa, synthetic construct
AMRSKTGAKLI

SEQ ID NO: 36281 - protein, 13 aa, synthetic construct
AMRYLGDTEDKLI

SEQ ID NO: 36282 - protein, 15 aa, synthetic construct
AMRYIHWRIGGDKLI

SEQ ID NO: 36283 - protein, 13 aa, synthetic construct
AMRWSGIGPINSS

SEQ ID NO: 36284 - protein, 17 aa, synthetic construct
AMRSPYWGIRGYTDKLI

SEQ ID NO: 36285 - protein, 12 aa, synthetic construct
AMRVYWGIPINS

SEQ ID NO: 36286 - protein, 13 aa, synthetic construct
AMRSPYWGIRNTS

SEQ ID NO: 36287 - protein, 11 aa, synthetic construct
AMRSRYTDKLT

SEQ ID NO: 36288 - protein, 13 aa, synthetic construct
AMRSHWGIRDKLI

SEQ ID NO: 36289 - protein, 16 aa, synthetic construct
AMRVYPLGGKYTDKLI

SEQ ID NO: 36290 - protein, 11 aa, synthetic construct
AMRSRYTDQLI

SEQ ID NO: 36291 - protein, 11 aa, synthetic construct
AMRVWVIPKLI

SEQ ID NO: 36292 - protein, 13 aa, synthetic construct
AMRSSFWGTRNST

SEQ ID NO: 36293 - protein, 16 aa, synthetic construct
AMRSSLFVLGALDKLI

SEQ ID NO: 36294 - protein, 11 aa, synthetic construct
AMRVWGTPKLI

SEQ ID NO: 36295 - protein, 14 aa, synthetic construct
AMRSTGGYIADKLI

SEQ ID NO: 36296 - protein, 15 aa, synthetic construct
AMRVVLGDTGTDKLI

SEQ ID NO: 36297 - protein, 15 aa, synthetic construct
AMRYTGGYRRTEKLI

SEQ ID NO: 36298 - protein, 10 aa, synthetic construct
AMSAFLDELI

SEQ ID NO: 36299 - protein, 14 aa, synthetic construct
AMSCVLGDTSDKLI

SEQ ID NO: 36300 - protein, 10 aa, synthetic construct
AMSAFLDRLI

SEQ ID NO: 36301 - protein, 10 aa, synthetic construct
AMSAYLDQLM

SEQ ID NO: 36302 - protein, 12 aa, synthetic construct
AMRRGDNTDKLI

SEQ ID NO: 36303 - protein, 12 aa, synthetic construct
AMRRGIRKDKLI

SEQ ID NO: 36304 - protein, 15 aa, synthetic construct
AMRRGLYWGYPDKLI

SEQ ID NO: 36305 - protein, 12 aa, synthetic construct
AMRRLPKGGDKQ

SEQ ID NO: 36306 - protein, 18 aa, synthetic construct
AMRRLPTFWGIRGRDKLI

SEQ ID NO: 36307 - protein, 15 aa, synthetic construct
AMRRLRDTRTPINSS

SEQ ID NO: 36308 - protein, 13 aa, synthetic construct
AMRRRIREGDKLI

SEQ ID NO: 36309 - protein, 13 aa, synthetic construct
AMRRVGGIADKLI

SEQ ID NO: 36310 - protein, 14 aa, synthetic construct
AMRSGGYAGTDKLI

SEQ ID NO: 36311 - protein, 16 aa, synthetic construct
AMRRVGGYQLLGHPTD

SEQ ID NO: 36312 - protein, 10 aa, synthetic construct
AMSAFLDKLV

SEQ ID NO: 36313 - protein, 13 aa, synthetic construct
AMRRWGIRPINSS

SEQ ID NO: 36314 - protein, 15 aa, synthetic construct
AMRSELGDKYTDKLI

SEQ ID NO: 36315 - protein, 10 aa, synthetic construct
AMSAFLDKII

SEQ ID NO: 36316 - protein, 13 aa, synthetic construct
AMRSFLPLPGGLI

SEQ ID NO: 36317 - protein, 15 aa, synthetic construct
AMRSFLRSGGSRPLI

SEQ ID NO: 36318 - protein, 16 aa, synthetic construct
AMRSFLTGYSTPINSS

SEQ ID NO: 36319 - protein, 14 aa, synthetic construct
AMTCTGGYATGKLI

SEQ ID NO: 36320 - protein, 13 aa, synthetic construct
AMRILRSPPDKLI

SEQ ID NO: 36321 - protein, 13 aa, synthetic construct
AMRGGGYRAAQRF

SEQ ID NO: 36322 - protein, 10 aa, synthetic construct
ASPGYTDKII

SEQ ID NO: 36323 - protein, 12 aa, synthetic construct
AMRGLKNTDNLI

SEQ ID NO: 36324 - protein, 12 aa, synthetic construct
AMRGLKNTEKLI

SEQ ID NO: 36325 - protein, 12 aa, synthetic construct
AMRGLLGDLKLI

SEQ ID NO: 36326 - protein, 14 aa, synthetic construct
AMRGLLGDPRDKLL

SEQ ID NO: 36327 - protein, 17 aa, synthetic construct
ASREPCLPRGDTGDKLI

SEQ ID NO: 36328 - protein, 14 aa, synthetic construct
AMRGLLGDTREKLI

SEQ ID NO: 36329 - protein, 13 aa, synthetic construct
ASREGTGGYDKLI

SEQ ID NO: 36330 - protein, 14 aa, synthetic construct
AMRGLLGDTRHKLI

SEQ ID NO: 36331 - protein, 16 aa, synthetic construct
AMRGLLGDTWNSEKLI

SEQ ID NO: 36332 - protein, 14 aa, synthetic construct
ASREGLGDTTDKLI

SEQ ID NO: 36333 - protein, 16 aa, synthetic construct
AMRGLLGDTWNTEKLI

SEQ ID NO: 36334 - protein, 13 aa, synthetic construct
AMRGLPDTPDKLI

SEQ ID NO: 36335 - protein, 17 aa, synthetic construct
AMRGLPELGDTDPDKLI

SEQ ID NO: 36336 - protein, 16 aa, synthetic construct
ASRDGGYASSWDTRQM

SEQ ID NO: 36337 - protein, 16 aa, synthetic construct
ASPSYEYWGYPPINSS

SEQ ID NO: 36338 - protein, 18 aa, synthetic construct
AMRGLPRGGGDQATDKLI

SEQ ID NO: 36339 - protein, 16 aa, synthetic construct
ASPSYEYCGIPTDKHI

SEQ ID NO: 36340 - protein, 15 aa, synthetic construct
AMRGLPTCRGMGKLI

SEQ ID NO: 36341 - protein, 10 aa, synthetic construct
ASPRYSDKLI

SEQ ID NO: 36342 - protein, 11 aa, synthetic construct
ASREWGILKLI

SEQ ID NO: 36343 - protein, 10 aa, synthetic construct
ASSAFLDKLI

SEQ ID NO: 36344 - protein, 13 aa, synthetic construct
AMRGLGYDTDKLI

SEQ ID NO: 36345 - protein, 13 aa, synthetic construct
ATRAYVGPTDKLI

SEQ ID NO: 36346 - protein, 18 aa, synthetic construct
AMRVLPKFLVGGYTDKHI

SEQ ID NO: 36347 - protein, 14 aa, synthetic construct
AMRGLGDIGTDKLI

SEQ ID NO: 36348 - protein, 17 aa, synthetic construct
ATREDYSYRGSYTNKLI

SEQ ID NO: 36349 - protein, 14 aa, synthetic construct
AMRGLGDPTPINSS

SEQ ID NO: 36350 - protein, 12 aa, synthetic construct
ATREASYTDKLI

SEQ ID NO: 36351 - protein, 15 aa, synthetic construct
ATREALLGVYTDKLI

SEQ ID NO: 36352 - protein, 15 aa, synthetic construct
AMRGLGDTGQPINSS

SEQ ID NO: 36353 - protein, 12 aa, synthetic construct
ATRDGGYAINSS

SEQ ID NO: 36354 - protein, 10 aa, synthetic construct
ATPGARDKLI

SEQ ID NO: 36355 - protein, 9 aa, synthetic construct
ATGGNDKLI

SEQ ID NO: 36356 - protein, 10 aa, synthetic construct
ATLGARDKLT

SEQ ID NO: 36357 - protein, 15 aa, synthetic construct
AMRGLGDTRGQHNSS

SEQ ID NO: 36358 - protein, 4 aa, synthetic construct
ATLG

SEQ ID NO: 36359 - protein, 14 aa, synthetic construct
AMRGLGEIWTDKLI

SEQ ID NO: 36360 - protein, 13 aa, synthetic construct
AMRGLGGHTDKLI

SEQ ID NO: 36361 - protein, 4 aa, synthetic construct
ATIY

SEQ ID NO: 36362 - protein, 14 aa, synthetic construct
AMRGLGGLWTDKLI

SEQ ID NO: 36363 - protein, 9 aa, synthetic construct
ATGGTDRLI

SEQ ID NO: 36364 - protein, 10 aa, synthetic construct
ASPGYTDKVS

SEQ ID NO: 36365 - protein, 15 aa, synthetic construct
AMRGLPTCWGMGKLN

SEQ ID NO: 36366 - protein, 13 aa, synthetic construct
ATREGEGDTGKLI

SEQ ID NO: 36367 - protein, 13 aa, synthetic construct
ASGGGYGGPINSS

SEQ ID NO: 36368 - protein, 13 aa, synthetic construct
AMRGNWGIPDKHI

SEQ ID NO: 36369 - protein, 11 aa, synthetic construct
ARRVLGADKLI

SEQ ID NO: 36370 - protein, 14 aa, synthetic construct
ARRVGLGGHTDKLI

SEQ ID NO: 36371 - protein, 13 aa, synthetic construct
AMRGNWGIPDKLV

SEQ ID NO: 36372 - protein, 13 aa, synthetic construct
ARRSYWGIRDKLI

SEQ ID NO: 36373 - protein, 13 aa, synthetic construct
AMRGNWGIPDKRI

SEQ ID NO: 36374 - protein, 16 aa, synthetic construct
AMRGPAGGHSWDTRQM

SEQ ID NO: 36375 - protein, 15 aa, synthetic construct
AMRGPFFLLGDEKLI

SEQ ID NO: 36376 - protein, 11 aa, synthetic construct
ARRSYWGIPLI

SEQ ID NO: 36377 - protein, 12 aa, synthetic construct
ARRPGGITDKLI

SEQ ID NO: 36378 - protein, 13 aa, synthetic construct
ARRGRIREGDKLI

SEQ ID NO: 36379 - protein, 15 aa, synthetic construct
ARRGPSILLGDDKLI

SEQ ID NO: 36380 - protein, 13 aa, synthetic construct
AMRGPGGYTDKLI

SEQ ID NO: 36381 - protein, 17 aa, synthetic construct
ARRGLTELGDTDTDKLI

SEQ ID NO: 36382 - protein, 13 aa, synthetic construct
AMRGPLGDTRPLI

SEQ ID NO: 36383 - protein, 16 aa, synthetic construct
ARRGGLLGATYTDKLI

SEQ ID NO: 36384 - protein, 15 aa, synthetic construct
AMRGPSFLLGGDKLI

SEQ ID NO: 36385 - protein, 15 aa, synthetic construct
AMRGPSFLLRDDKLI

SEQ ID NO: 36386 - protein, 17 aa, synthetic construct
AMRGPSYVEGYNTDKLI

SEQ ID NO: 36387 - protein, 10 aa, synthetic construct
AMRGNTDKLI

SEQ ID NO: 36388 - protein, 12 aa, synthetic construct
ARRVLGDPDKLI

SEQ ID NO: 36389 - protein, 17 aa, synthetic construct
ARSLPSCLTGGSAAKLI

SEQ ID NO: 36390 - protein, 18 aa, synthetic construct
AMRGLPTSLLGDGPINSS

SEQ ID NO: 36391 - protein, 15 aa, synthetic construct
AMRGLPTCWGMGNPI

SEQ ID NO: 36392 - protein, 15 aa, synthetic construct
AMRGLPTCWGMGNQI

SEQ ID NO: 36393 - protein, 16 aa, synthetic construct
AMRGLPTGDTRCDNLI

SEQ ID NO: 36394 - protein, 16 aa, synthetic construct
AMRGLPTGDTRCYKLI

SEQ ID NO: 36395 - protein, 8 aa, synthetic construct
ASDTNKLI

SEQ ID NO: 36396 - protein, 6 aa, synthetic construct
ASDKLI

SEQ ID NO: 36397 - protein, 8 aa, synthetic construct
ARYTDRLI

SEQ ID NO: 36398 - protein, 8 aa, synthetic construct
ARYTDKLV

SEQ ID NO: 36399 - protein, 10 aa, synthetic construct
ARWGIPINSS

SEQ ID NO: 36400 - protein, 11 aa, synthetic construct
AMRGNGGHNTS

SEQ ID NO: 36401 - protein, 15 aa, synthetic construct
ARTNTSTGQYTDKLI

SEQ ID NO: 36402 - protein, 13 aa, synthetic construct
AMRGLRSPPDKLI

SEQ ID NO: 36403 - protein, 17 aa, synthetic construct
AMRGLTALGDTDTDKLI

SEQ ID NO: 36404 - protein, 12 aa, synthetic construct
ARSWGIQAYKLI

SEQ ID NO: 36405 - protein, 13 aa, synthetic construct
ARSVLGDYTDKLI

SEQ ID NO: 36406 - protein, 13 aa, synthetic construct
AMRGNEGGTEKLI

SEQ ID NO: 36407 - protein, 13 aa, synthetic construct
ARSPGGRTPINSS

SEQ ID NO: 36408 - protein, 13 aa, synthetic construct
AMRGNEVRTYKLI

SEQ ID NO: 36409 - protein, 17 aa, synthetic construct
ATREGALLGVPYTDKLI

SEQ ID NO: 36410 - protein, 16 aa, synthetic construct
ATREGEPYVGGPDKLI

SEQ ID NO: 36411 - protein, 12 aa, synthetic construct
AMRILPGDTVLI

SEQ ID NO: 36412 - protein, 12 aa, synthetic construct
AMRGGPTLINSS

SEQ ID NO: 36413 - protein, 13 aa, synthetic construct
ATRSFLPLLGGLI

SEQ ID NO: 36414 - protein, 16 aa, synthetic construct
ATRPFLRRDMGTDKLI

SEQ ID NO: 36415 - protein, 13 aa, synthetic construct
ATRGNWGIPDKLI

SEQ ID NO: 36416 - protein, 13 aa, synthetic construct
AMRGGPGGLDKLI

SEQ ID NO: 36417 - protein, 15 aa, synthetic construct
ATRGLPTGGYTDKLI

SEQ ID NO: 36418 - protein, 15 aa, synthetic construct
ATRGLPTCWGMGKLI

SEQ ID NO: 36419 - protein, 16 aa, synthetic construct
AMRGGPIHWGIRKNSS

SEQ ID NO: 36420 - protein, 17 aa, synthetic construct
ATRGHPIWGPPPPINSS

SEQ ID NO: 36421 - protein, 10 aa, synthetic construct
ATRGARDKLI

SEQ ID NO: 36422 - protein, 11 aa, synthetic construct
AMRGGPLDKHI

SEQ ID NO: 36423 - protein, 12 aa, synthetic construct
ATREYWGPDKLI

SEQ ID NO: 36424 - protein, 11 aa, synthetic construct
AMRGGPLDTII

SEQ ID NO: 36425 - protein, 13 aa, synthetic construct
ATREWDTRTDKLI

SEQ ID NO: 36426 - protein, 16 aa, synthetic construct
AMRGGPLPWGIRINSS

SEQ ID NO: 36427 - protein, 14 aa, synthetic construct
ATREVLGVGAINSS

SEQ ID NO: 36428 - protein, 11 aa, synthetic construct
ATREVGDTGLI

SEQ ID NO: 36429 - protein, 16 aa, synthetic construct
AMRGGPPLLGDTDKLI

SEQ ID NO: 36430 - protein, 14 aa, synthetic construct
ATRETGGYHEDKLI

SEQ ID NO: 36431 - protein, 13 aa, synthetic construct
AMRGGPSYTDKLI

SEQ ID NO: 36432 - protein, 16 aa, synthetic construct
ATRSSLFVLGDTDKLI

SEQ ID NO: 36433 - protein, 14 aa, synthetic construct
AMRGGMGDTLDKLI

SEQ ID NO: 36434 - protein, 12 aa, synthetic construct
ATSPYWGDDKLI

SEQ ID NO: 36435 - protein, 15 aa, synthetic construct
AMRGGLGDMYTDKLI

SEQ ID NO: 36436 - protein, 13 aa, synthetic construct
AMRGGGYRAPQHI

SEQ ID NO: 36437 - protein, 12 aa, synthetic construct
AMRGGGYTDKLI

SEQ ID NO: 36438 - protein, 13 aa, synthetic construct
AMRGGIRAPINSS

SEQ ID NO: 36439 - protein, 21 aa, synthetic construct
AVRECLPPCTGGPSAWDTRQM

SEQ ID NO: 36440 - protein, 12 aa, synthetic construct
AVREASYTDKLI

SEQ ID NO: 36441 - protein, 17 aa, synthetic construct
AVREARLLGIRYTDKLI

SEQ ID NO: 36442 - protein, 11 aa, synthetic construct
AVREAGGYKLI

SEQ ID NO: 36443 - protein, 13 aa, synthetic construct
AMRGGIRYTDRLI

SEQ ID NO: 36444 - protein, 13 aa, synthetic construct
AMRGGLGDTDKLI

SEQ ID NO: 36445 - protein, 17 aa, synthetic construct
AMRGGLSHWGIRPINSS

SEQ ID NO: 36446 - protein, 14 aa, synthetic construct
AMRGGLGEYTDKLI

SEQ ID NO: 36447 - protein, 13 aa, synthetic construct
AVRAWGIRPINSS

SEQ ID NO: 36448 - protein, 15 aa, synthetic construct
AMRGGLPGADTDKLI

SEQ ID NO: 36449 - protein, 15 aa, synthetic construct
AVRAVLGDKYTDKLI

SEQ ID NO: 36450 - protein, 14 aa, synthetic construct
AVRAFLRGDTDKLI

SEQ ID NO: 36451 - protein, 13 aa, synthetic construct
AVIYWGIRSDKLI

SEQ ID NO: 36452 - protein, 17 aa, synthetic construct
AMRGGLPTLLGGTDKLI

SEQ ID NO: 36453 - protein, 17 aa, synthetic construct
AMRGGLRSGGLYTDKLI

SEQ ID NO: 36454 - protein, 14 aa, synthetic construct
ATRETGGYGTDKLI

SEQ ID NO: 36455 - protein, 12 aa, synthetic construct
AMRGGPTPINSA

SEQ ID NO: 36456 - protein, 17 aa, synthetic construct
ATREGFLPLGVYTDKLI

SEQ ID NO: 36457 - protein, 10 aa, synthetic construct
ATRESGDKLI

SEQ ID NO: 36458 - protein, 16 aa, synthetic construct
ATREGVWGIQYTDKLI

SEQ ID NO: 36459 - protein, 16 aa, synthetic construct
AMRGGYWGPAWDTRQM

SEQ ID NO: 36460 - protein, 13 aa, synthetic construct
ATREGPSYTDKLI

SEQ ID NO: 36461 - protein, 16 aa, synthetic construct
ATREGPSYEGGTDKLI

SEQ ID NO: 36462 - protein, 17 aa, synthetic construct
AMRGHSIWGPPPPINPS

SEQ ID NO: 36463 - protein, 12 aa, synthetic construct
ATREGPLGSKLI

SEQ ID NO: 36464 - protein, 14 aa, synthetic construct
AMRGHYGDTPDKLI

SEQ ID NO: 36465 - protein, 15 aa, synthetic construct
AMRGIPTGGYTDKLI

SEQ ID NO: 36466 - protein, 11 aa, synthetic construct
AMRGIRHDKLI

SEQ ID NO: 36467 - protein, 12 aa, synthetic construct
ATREGPGGDKLI

SEQ ID NO: 36468 - protein, 20 aa, synthetic construct
ATREGLPTTWGTFALTAQLF

SEQ ID NO: 36469 - protein, 11 aa, synthetic construct
AMRGIRSDKLI

SEQ ID NO: 36470 - protein, 13 aa, synthetic construct
ATREGLGNTDKLI

SEQ ID NO: 36471 - protein, 15 aa, synthetic construct
AMRGITGGCVTDKLI

SEQ ID NO: 36472 - protein, 18 aa, synthetic construct
AMRGKGTLLPVWGGDKLI

SEQ ID NO: 36473 - protein, 19 aa, synthetic construct
ATREGGRRLGDTPHTDKLI

SEQ ID NO: 36474 - protein, 13 aa, synthetic construct
ATREGGIRGINSS

SEQ ID NO: 36475 - protein, 13 aa, synthetic construct
ATREGGGGADKLI

SEQ ID NO: 36476 - protein, 13 aa, synthetic construct
ATREGGDTPDKLI

SEQ ID NO: 36477 - protein, 14 aa, synthetic construct
AMRGGWGPTPINSS

SEQ ID NO: 36478 - protein, 13 aa, synthetic construct
ATREGWGIPDKLI

SEQ ID NO: 36479 - protein, 15 aa, synthetic construct
AMRGGVLGDTPINSS

SEQ ID NO: 36480 - protein, 18 aa, synthetic construct
ATREPSYVATGGYTDKLI

SEQ ID NO: 36481 - protein, 17 aa, synthetic construct
ATRERVPLGDTNTDKLI

SEQ ID NO: 36482 - protein, 12 aa, synthetic construct
AMRGGPTPLTSA

SEQ ID NO: 36483 - protein, 12 aa, synthetic construct
AMRGGPTPTNSS

SEQ ID NO: 36484 - protein, 12 aa, synthetic construct
AMRGGRGIDKLI

SEQ ID NO: 36485 - protein, 9 aa, synthetic construct
AMRGGRGTH

SEQ ID NO: 36486 - protein, 17 aa, synthetic construct
ATREPSYVEGYNTDKLI

SEQ ID NO: 36487 - protein, 15 aa, synthetic construct
AMRGGRGYRGPDKLI

SEQ ID NO: 36488 - protein, 17 aa, synthetic construct
AMRGGRKTGGYSLATLI

SEQ ID NO: 36489 - protein, 14 aa, synthetic construct
AMRGGRRRNTDKLI

SEQ ID NO: 36490 - protein, 15 aa, synthetic construct
AMRGGVGGGCTVKLI

SEQ ID NO: 36491 - protein, 10 aa, synthetic construct
ATREPFDKLI

SEQ ID NO: 36492 - protein, 11 aa, synthetic construct
AMRGGTPIKSS

SEQ ID NO: 36493 - protein, 11 aa, synthetic construct
AMRGGTPINSP

SEQ ID NO: 36494 - protein, 15 aa, synthetic construct
ATREPCTGKYTDKLI

SEQ ID NO: 36495 - protein, 15 aa, synthetic construct
ATRENTGGYGTDKLI

SEQ ID NO: 36496 - protein, 13 aa, synthetic construct
AMRGGTRGTDKLI

SEQ ID NO: 36497 - protein, 15 aa, synthetic construct
ATRELMGDTNTDKLI

SEQ ID NO: 36498 - protein, 13 aa, synthetic construct
AMRGGVEEDDKLI

SEQ ID NO: 36499 - protein, 13 aa, synthetic construct
ARRGGIRYTDKLI

SEQ ID NO: 36500 - protein, 14 aa, synthetic construct
AMRGPYGDTPDKPI

SEQ ID NO: 36501 - protein, 16 aa, synthetic construct
ARREWGIRSSWDTRQM

SEQ ID NO: 36502 - protein, 16 aa, synthetic construct
AMTYLPTGGYYTDNSS

SEQ ID NO: 36503 - protein, 16 aa, synthetic construct
ANREGPPLLGDTDKLT

SEQ ID NO: 36504 - protein, 16 aa, synthetic construct
ANPYFLGDRGPTDKLI

SEQ ID NO: 36505 - protein, 16 aa, synthetic construct
ANFYFLGDRGPTDKLI

SEQ ID NO: 36506 - protein, 13 aa, synthetic construct
AMRGVLYPTDKLI

SEQ ID NO: 36507 - protein, 13 aa, synthetic construct
ANETGGGYADNLI

SEQ ID NO: 36508 - protein, 13 aa, synthetic construct
ANEKRGGYGDKLI

SEQ ID NO: 36509 - protein, 11 aa, synthetic construct
AMRGVRPDKLI

SEQ ID NO: 36510 - protein, 16 aa, synthetic construct
AMRGVSYVGGDYDKLI

SEQ ID NO: 36511 - protein, 14 aa, synthetic construct
AMRGVWGMATDKLI

SEQ ID NO: 36512 - protein, 13 aa, synthetic construct
AMWILHWGTDKLI

SEQ ID NO: 36513 - protein, 13 aa, synthetic construct
AMRGVWGNTEKLI

SEQ ID NO: 36514 - protein, 12 aa, synthetic construct
AMWGGPYTDKLI

SEQ ID NO: 36515 - protein, 13 aa, synthetic construct
AMRGVWGSTDKLI

SEQ ID NO: 36516 - protein, 12 aa, synthetic construct
AMWGGLYADKLI

SEQ ID NO: 36517 - protein, 12 aa, synthetic construct
AMWGACTPINSS

SEQ ID NO: 36518 - protein, 13 aa, synthetic construct
AMRGWGIHTDKLF

SEQ ID NO: 36519 - protein, 16 aa, synthetic construct
AMTYLSTGGYYTDKLI

SEQ ID NO: 36520 - protein, 13 aa, synthetic construct
AMRGWGIHTHKLI

SEQ ID NO: 36521 - protein, 16 aa, synthetic construct
AMTYLPTGGYYTDTLI

SEQ ID NO: 36522 - protein, 15 aa, synthetic construct
ANREGRGYRGPDKLI

SEQ ID NO: 36523 - protein, 17 aa, synthetic construct
ANRETCLPRGDTGDKII

SEQ ID NO: 36524 - protein, 21 aa, synthetic construct
AMRGVLGVVYACGSALTAKLF

SEQ ID NO: 36525 - protein, 16 aa, synthetic construct
ANSYFLGDRGPTEKLI

SEQ ID NO: 36526 - protein, 12 aa, synthetic construct
AQGEGARTRKHT

SEQ ID NO: 36527 - protein, 10 aa, synthetic construct
APRGARDKLI

SEQ ID NO: 36528 - protein, 15 aa, synthetic construct
AMRGVGDTPGPDKLI

SEQ ID NO: 36529 - protein, 13 aa, synthetic construct
AMRGVLGDADKLI

SEQ ID NO: 36530 - protein, 9 aa, synthetic construct
APGDTDKLI

SEQ ID NO: 36531 - protein, 16 aa, synthetic construct
AMRGVLGDKDYTDKLI

SEQ ID NO: 36532 - protein, 16 aa, synthetic construct
ANSYFVGDRGPTDKLI

SEQ ID NO: 36533 - protein, 13 aa, synthetic construct
AMRGVLGDTDKLV

SEQ ID NO: 36534 - protein, 16 aa, synthetic construct
ANSYFLGDREPTAKPV

SEQ ID NO: 36535 - protein, 21 aa, synthetic construct
AMRGVLGVVYACGSALTAILF

SEQ ID NO: 36536 - protein, 15 aa, synthetic construct
AMRGVLGDTGTDKLI

SEQ ID NO: 36537 - protein, 16 aa, synthetic construct
ANSNFMGDRGPTDKLI

SEQ ID NO: 36538 - protein, 10 aa, synthetic construct
ANSAFLDKLI

SEQ ID NO: 36539 - protein, 15 aa, synthetic construct
AMRGVLGDWVPINSS

SEQ ID NO: 36540 - protein, 12 aa, synthetic construct
ANRPGGITDKLI

SEQ ID NO: 36541 - protein, 13 aa, synthetic construct
AMRGVLGETDKLV

SEQ ID NO: 36542 - protein, 13 aa, synthetic construct
ANRGTGGYPDKLI

SEQ ID NO: 36543 - protein, 14 aa, synthetic construct
ANRETFRRGGYLLI

SEQ ID NO: 36544 - protein, 14 aa, synthetic construct
AMRGWGIQYTGKLI

SEQ ID NO: 36545 - protein, 13 aa, synthetic construct
AMTYGRYGTDKLI

SEQ ID NO: 36546 - protein, 14 aa, synthetic construct
AMRGPYGETPGKLI

SEQ ID NO: 36547 - protein, 13 aa, synthetic construct
AMTYGGYGTDRLI

SEQ ID NO: 36548 - protein, 15 aa, synthetic construct
AMRHSNGSRDTDKLI

SEQ ID NO: 36549 - protein, 12 aa, synthetic construct
AMTGGPNTDKLI

SEQ ID NO: 36550 - protein, 13 aa, synthetic construct
AMTEYWGIRDKLI

SEQ ID NO: 36551 - protein, 13 aa, synthetic construct
AMRHTGGHTDKLI

SEQ ID NO: 36552 - protein, 15 aa, synthetic construct
AMRHTLGSRDTEKLI

SEQ ID NO: 36553 - protein, 15 aa, synthetic construct
AMRHVLGDTGTDKLI

SEQ ID NO: 36554 - protein, 13 aa, synthetic construct
AMTEVLGDTDKLI

SEQ ID NO: 36555 - protein, 7 aa, synthetic construct
AMTEKLI

SEQ ID NO: 36556 - protein, 16 aa, synthetic construct
AMTEHWGIRGYTDKLI

SEQ ID NO: 36557 - protein, 16 aa, synthetic construct
AMRHYPTGGSPPINSS

SEQ ID NO: 36558 - protein, 14 aa, synthetic construct
AMTEGYWGIPDKLI

SEQ ID NO: 36559 - protein, 14 aa, synthetic construct
AMTEGWGSDTDKLI

SEQ ID NO: 36560 - protein, 14 aa, synthetic construct
AMTEGRIRVPDKLI

SEQ ID NO: 36561 - protein, 13 aa, synthetic construct
AMTEGLGDTDKLI

SEQ ID NO: 36562 - protein, 12 aa, synthetic construct
AMRILGDTRGLN

SEQ ID NO: 36563 - protein, 12 aa, synthetic construct
AMTEGGDTDKLI

SEQ ID NO: 36564 - protein, 14 aa, synthetic construct
AMRILHWGIPDKLI

SEQ ID NO: 36565 - protein, 16 aa, synthetic construct
AMTEGDWGIPHTDKLI

SEQ ID NO: 36566 - protein, 12 aa, synthetic construct
AMTEGDSTDKLI

SEQ ID NO: 36567 - protein, 13 aa, synthetic construct
AMTLHGDTRTKTQ

SEQ ID NO: 36568 - protein, 16 aa, synthetic construct
AMRHLLWGIRDTDKLI

SEQ ID NO: 36569 - protein, 16 aa, synthetic construct
AMRHGLSDGGSTDKLI

SEQ ID NO: 36570 - protein, 13 aa, synthetic construct
AMRGWRIHTDKLI

SEQ ID NO: 36571 - protein, 14 aa, synthetic construct
AMRGWGIREDSTTP

SEQ ID NO: 36572 - protein, 14 aa, synthetic construct
AMTTGGYKSADKVI

SEQ ID NO: 36573 - protein, 13 aa, synthetic construct
AMRGWGIRPISSS

SEQ ID NO: 36574 - protein, 13 aa, synthetic construct
AMRGWGIRPRNSS

SEQ ID NO: 36575 - protein, 13 aa, synthetic construct
AMRGWGSTPINSS

SEQ ID NO: 36576 - protein, 14 aa, synthetic construct
AMRGWGVQYNDKLI

SEQ ID NO: 36577 - protein, 14 aa, synthetic construct
AMTTGGYISADKLI

SEQ ID NO: 36578 - protein, 10 aa, synthetic construct
AMTTGGADKL

SEQ ID NO: 36579 - protein, 14 aa, synthetic construct
AMRGYEEAYTDKLI

SEQ ID NO: 36580 - protein, 12 aa, synthetic construct
AMRHGGITDKHI

SEQ ID NO: 36581 - protein, 14 aa, synthetic construct
AMTTGDTCRPINSS

SEQ ID NO: 36582 - protein, 10 aa, synthetic construct
AMRGYNEKLI

SEQ ID NO: 36583 - protein, 11 aa, synthetic construct
AMRGYQTINSS

SEQ ID NO: 36584 - protein, 15 aa, synthetic construct
AMTNTSTGKYTDKVI

SEQ ID NO: 36585 - protein, 15 aa, synthetic construct
AMTNTPTGQYTDKLI

SEQ ID NO: 36586 - protein, 13 aa, synthetic construct
AMTLPTGDPDTLI

SEQ ID NO: 36587 - protein, 16 aa, synthetic construct
AMTLHSLLGDTPINSS

SEQ ID NO: 36588 - protein, 12 aa, synthetic construct
AMRGYWGTDKLI

SEQ ID NO: 36589 - protein, 13 aa, synthetic construct
AMRGTYWGADKLN

SEQ ID NO: 36590 - protein, 15 aa, synthetic construct
AQRECTGGTGTAHLF

SEQ ID NO: 36591 - protein, 13 aa, synthetic construct
AMRGTWGIPDKLI

SEQ ID NO: 36592 - protein, 10 aa, synthetic construct
AQSWGADKLI

SEQ ID NO: 36593 - protein, 13 aa, synthetic construct
AMRGRRREGDKLI

SEQ ID NO: 36594 - protein, 11 aa, synthetic construct
ARRELSIDKLI

SEQ ID NO: 36595 - protein, 14 aa, synthetic construct
AMRGSLPSIRGKLI

SEQ ID NO: 36596 - protein, 17 aa, synthetic construct
AMRGSLPTGDTQTDKLI

SEQ ID NO: 36597 - protein, 15 aa, synthetic construct
ARRELLVLGATDKLI

SEQ ID NO: 36598 - protein, 14 aa, synthetic construct
ARREGYTQYTDKLI

SEQ ID NO: 36599 - protein, 15 aa, synthetic construct
AMRGSRLGDTTDKLI

SEQ ID NO: 36600 - protein, 12 aa, synthetic construct
ARREGWGIRLLI

SEQ ID NO: 36601 - protein, 13 aa, synthetic construct
ARREGWGIADKLI

SEQ ID NO: 36602 - protein, 15 aa, synthetic construct
ARREGWGGDAPINSS

SEQ ID NO: 36603 - protein, 13 aa, synthetic construct
ARREGWGDTDKLI

SEQ ID NO: 36604 - protein, 15 aa, synthetic construct
AMRGSSLVLGTDTLI

SEQ ID NO: 36605 - protein, 16 aa, synthetic construct
ARREGRWGIRGTDKLI

SEQ ID NO: 36606 - protein, 22 aa, synthetic construct
ARREGRSYDWGIRARVYTDKLI

SEQ ID NO: 36607 - protein, 13 aa, synthetic construct
ARREGRGSTDKLI

SEQ ID NO: 36608 - protein, 15 aa, synthetic construct
AMRGSTGGLCPDKLI

SEQ ID NO: 36609 - protein, 14 aa, synthetic construct
ARREGRGGVADKLI

SEQ ID NO: 36610 - protein, 12 aa, synthetic construct
AMRGSTGGNKLI

SEQ ID NO: 36611 - protein, 15 aa, synthetic construct
AMRGSTGRLGPDKLI

SEQ ID NO: 36612 - protein, 10 aa, synthetic construct
ARRENPNKLI

SEQ ID NO: 36613 - protein, 18 aa, synthetic construct
AMRGRPSSFTGRHTHKLI

SEQ ID NO: 36614 - protein, 10 aa, synthetic construct
ARRENTDKLI

SEQ ID NO: 36615 - protein, 14 aa, synthetic construct
AMRGRDTRGTDKLI

SEQ ID NO: 36616 - protein, 12 aa, synthetic construct
ARREWGIPDKLI

SEQ ID NO: 36617 - protein, 12 aa, synthetic construct
ARREVPVTDKLI

SEQ ID NO: 36618 - protein, 16 aa, synthetic construct
AMRGPYWGIRNTDNSS

SEQ ID NO: 36619 - protein, 14 aa, synthetic construct
AMRGPYWGIRVKLI

SEQ ID NO: 36620 - protein, 14 aa, synthetic construct
ARREVLGAYTDKLI

SEQ ID NO: 36621 - protein, 7 aa, synthetic construct
AMRGQLI

SEQ ID NO: 36622 - protein, 14 aa, synthetic construct
ARRETSYGDTDKLI

SEQ ID NO: 36623 - protein, 15 aa, synthetic construct
ARRESGGYAGTDQLI

SEQ ID NO: 36624 - protein, 16 aa, synthetic construct
ARRESFLPYWGTDKLI

SEQ ID NO: 36625 - protein, 10 aa, synthetic construct
ARREPFDKLI

SEQ ID NO: 36626 - protein, 13 aa, synthetic construct
AMRGRGAYTDKLI

SEQ ID NO: 36627 - protein, 16 aa, synthetic construct
ARRESEVLGDTVEKLI

SEQ ID NO: 36628 - protein, 13 aa, synthetic construct
AMRGRIREGDRLI

SEQ ID NO: 36629 - protein, 15 aa, synthetic construct
AMRGRLGDTGPINSS

SEQ ID NO: 36630 - protein, 11 aa, synthetic construct
AMRGRLLHGGG

SEQ ID NO: 36631 - protein, 11 aa, synthetic construct
AMRGRLLRGGG

SEQ ID NO: 36632 - protein, 18 aa, synthetic construct
AMRGRPRGGGYQSTDKLI

SEQ ID NO: 36633 - protein, 14 aa, synthetic construct
ARREPGDTRTDKLI

SEQ ID NO: 36634 - protein, 15 aa, synthetic construct
AMRGSTVGLGTANLV

SEQ ID NO: 36635 - protein, 16 aa, synthetic construct
ARREGPYWGIRPDKLI

SEQ ID NO: 36636 - protein, 15 aa, synthetic construct
ARREGPVLGDNDKLI

SEQ ID NO: 36637 - protein, 13 aa, synthetic construct
AMRGTGGYPINSS

SEQ ID NO: 36638 - protein, 12 aa, synthetic construct
AMRGTGGYLNSS

SEQ ID NO: 36639 - protein, 14 aa, synthetic construct
ARRDWGIQFTDKLI

SEQ ID NO: 36640 - protein, 16 aa, synthetic construct
ARRDLPTCPRVPDKLI

SEQ ID NO: 36641 - protein, 12 aa, synthetic construct
ARRDGMRTDKLI

SEQ ID NO: 36642 - protein, 12 aa, synthetic construct
ARRAWGLSINSS

SEQ ID NO: 36643 - protein, 15 aa, synthetic construct
ARRAVLGDTLTAQLF

SEQ ID NO: 36644 - protein, 13 aa, synthetic construct
AMRGTGGYPDKPI

SEQ ID NO: 36645 - protein, 13 aa, synthetic construct
ARRAGWGIPDKLI

SEQ ID NO: 36646 - protein, 13 aa, synthetic construct
AMRGTGGYTDKLI

SEQ ID NO: 36647 - protein, 14 aa, synthetic construct
AMRGTGGYHEDKLI

SEQ ID NO: 36648 - protein, 12 aa, synthetic construct
ARRAGGDTRQLI

SEQ ID NO: 36649 - protein, 12 aa, synthetic construct
AMRGTPDTDKLI

SEQ ID NO: 36650 - protein, 18 aa, synthetic construct
AMRGTPPCTGGYYTDKLI

SEQ ID NO: 36651 - protein, 14 aa, synthetic construct
AMRGTTRAYTDKLI

SEQ ID NO: 36652 - protein, 16 aa, synthetic construct
ARPSYEYWGIPTDKLI

SEQ ID NO: 36653 - protein, 13 aa, synthetic construct
ARIYWGIRSDKLN

SEQ ID NO: 36654 - protein, 11 aa, synthetic construct
AMRGTVTDKLI

SEQ ID NO: 36655 - protein, 15 aa, synthetic construct
ARESTGGYLLGHPTD

SEQ ID NO: 36656 - protein, 14 aa, synthetic construct
ARREEVGKYTDKLI

SEQ ID NO: 36657 - protein, 15 aa, synthetic construct
AMRGTGGYGTTDKLL

SEQ ID NO: 36658 - protein, 14 aa, synthetic construct
ARREGPTGDTLNSS

SEQ ID NO: 36659 - protein, 13 aa, synthetic construct
AMRGTGDTPINSS

SEQ ID NO: 36660 - protein, 19 aa, synthetic construct
ARREGPFGTGGQAFTAQLF

SEQ ID NO: 36661 - protein, 18 aa, synthetic construct
AMRGTFIHTGGYLTDKLI

SEQ ID NO: 36662 - protein, 14 aa, synthetic construct
ARREGLVGDTEMLI

SEQ ID NO: 36663 - protein, 12 aa, synthetic construct
ARREGLVDDKLI

SEQ ID NO: 36664 - protein, 13 aa, synthetic construct
ARREGLGDTDKLI

SEQ ID NO: 36665 - protein, 14 aa, synthetic construct
ARREGLGDATDKNI

SEQ ID NO: 36666 - protein, 18 aa, synthetic construct
AMRGTFLQYWGKYTDKLI

SEQ ID NO: 36667 - protein, 17 aa, synthetic construct
ARREGLDWGILYTDKLI

SEQ ID NO: 36668 - protein, 18 aa, synthetic construct
ARREGLASVLGDYTDKLI

SEQ ID NO: 36669 - protein, 12 aa, synthetic construct
ARREGCGIRALI

SEQ ID NO: 36670 - protein, 11 aa, synthetic construct
AMRGTGERGLI

SEQ ID NO: 36671 - protein, 15 aa, synthetic construct
ARREGHWGVYTDKLI

SEQ ID NO: 36672 - protein, 13 aa, synthetic construct
ARREGGYHTDQLI

SEQ ID NO: 36673 - protein, 12 aa, synthetic construct
ARREGGWVDKLI

SEQ ID NO: 36674 - protein, 12 aa, synthetic construct
AMRGTGGTDKLI

SEQ ID NO: 36675 - protein, 13 aa, synthetic construct
ARREGDTRTINSS

SEQ ID NO: 36676 - protein, 15 aa, synthetic construct
AMRGTGGYGGPINSS

SEQ ID NO: 36677 - protein, 13 aa, synthetic construct
ARREGDTRTDKLI

SEQ ID NO: 36678 - protein, 15 aa, synthetic construct
AMRESTSWGYPINSS

SEQ ID NO: 36679 - protein, 13 aa, synthetic construct
AMREGYMSADKLI

SEQ ID NO: 36680 - protein, 16 aa, synthetic construct
AMRESTRGYWDTDKLI

SEQ ID NO: 36681 - protein, 14 aa, synthetic construct
AMRDPFLMGYRLTG

SEQ ID NO: 36682 - protein, 12 aa, synthetic construct
AMRDLGDTDDKL

SEQ ID NO: 36683 - protein, 12 aa, synthetic construct
AMRDLGDTDKLV

SEQ ID NO: 36684 - protein, 16 aa, synthetic construct
AMRDLGIRERSTDKLI

SEQ ID NO: 36685 - protein, 12 aa, synthetic construct
AMRDLGYTDKLI

SEQ ID NO: 36686 - protein, 14 aa, synthetic construct
AMRDLLGANADKLI

SEQ ID NO: 36687 - protein, 14 aa, synthetic construct
AMRDLLGANTDKPI

SEQ ID NO: 36688 - protein, 14 aa, synthetic construct
AMRDLLGANTDKYI

SEQ ID NO: 36689 - protein, 14 aa, synthetic construct
AMRDLLGLTPINSS

SEQ ID NO: 36690 - protein, 14 aa, synthetic construct
AMRDLLGLYTDKLS

SEQ ID NO: 36691 - protein, 16 aa, synthetic construct
AMRDLLPSELAPINSS

SEQ ID NO: 36692 - protein, 13 aa, synthetic construct
AMRDLLRDTDKLI

SEQ ID NO: 36693 - protein, 16 aa, synthetic construct
AMRDLLRRGTRAAKLI

SEQ ID NO: 36694 - protein, 16 aa, synthetic construct
AMRDLLRRGTRAEKLI

SEQ ID NO: 36695 - protein, 15 aa, synthetic construct
AMRDLLRTWKADKLI

SEQ ID NO: 36696 - protein, 16 aa, synthetic construct
AMRDLLWDTVSTDKLI

SEQ ID NO: 36697 - protein, 13 aa, synthetic construct
AMRDLPPFTDHLI

SEQ ID NO: 36698 - protein, 16 aa, synthetic construct
AMRDLPTCPRVPDKLT

SEQ ID NO: 36699 - protein, 16 aa, synthetic construct
AMRDLPTCSRVPDKPI

SEQ ID NO: 36700 - protein, 13 aa, synthetic construct
AMRDLSSYTDKRI

SEQ ID NO: 36701 - protein, 12 aa, synthetic construct
AMRDLTGDDKLI

SEQ ID NO: 36702 - protein, 16 aa, synthetic construct
AMRDLTGGDAFTDKLF

SEQ ID NO: 36703 - protein, 16 aa, synthetic construct
AMRDLTGGYAFSDIVI

SEQ ID NO: 36704 - protein, 15 aa, synthetic construct
AMRDNHWGIGGEKLI

SEQ ID NO: 36705 - protein, 15 aa, synthetic construct
AMRDNHWGIGVDKLI

SEQ ID NO: 36706 - protein, 15 aa, synthetic construct
AMRDNNWRIGGDKLI

SEQ ID NO: 36707 - protein, 13 aa, synthetic construct
AMRDLGDTDDKHI

SEQ ID NO: 36708 - protein, 12 aa, synthetic construct
AMRDLGDIDKLI

SEQ ID NO: 36709 - protein, 11 aa, synthetic construct
AMRDKEGIQLI

SEQ ID NO: 36710 - protein, 17 aa, synthetic construct
AMRDGSYVLGQYTDKLN

SEQ ID NO: 36711 - protein, 14 aa, synthetic construct
AMRDGLGDTFDKLI

SEQ ID NO: 36712 - protein, 15 aa, synthetic construct
AMRDGLPGADTDKLI

SEQ ID NO: 36713 - protein, 12 aa, synthetic construct
AMRDGMRTDKLV

SEQ ID NO: 36714 - protein, 12 aa, synthetic construct
AMRDGMRTEKLI

SEQ ID NO: 36715 - protein, 18 aa, synthetic construct
AMRDGPLLGGLLYTYKLI

SEQ ID NO: 36716 - protein, 17 aa, synthetic construct
AMRDGPPWYWGPTDKLI

SEQ ID NO: 36717 - protein, 13 aa, synthetic construct
AMRDGPRGYGRFI

SEQ ID NO: 36718 - protein, 16 aa, synthetic construct
AMRDGPYWGIRPDKLI

SEQ ID NO: 36719 - protein, 16 aa, synthetic construct
AMRDGPYYEGGTDKLI

SEQ ID NO: 36720 - protein, 15 aa, synthetic construct
AMRDGRGDTDTYKLI

SEQ ID NO: 36721 - protein, 12 aa, synthetic construct
AMRDGRWGRDTH

SEQ ID NO: 36722 - protein, 15 aa, synthetic construct
AMRDGTGGYCADKLI

SEQ ID NO: 36723 - protein, 16 aa, synthetic construct
AMRDITEGYSDTDKLI

SEQ ID NO: 36724 - protein, 12 aa, synthetic construct
AMRDGTGNDKLI

SEQ ID NO: 36725 - protein, 16 aa, synthetic construct
AMRDGVSDGRSTDNLI

SEQ ID NO: 36726 - protein, 16 aa, synthetic construct
AMRDGVSDGRSTDNSS

SEQ ID NO: 36727 - protein, 16 aa, synthetic construct
AMRDGVSDGRSTGQLI

SEQ ID NO: 36728 - protein, 13 aa, synthetic construct
AMRDGWGIPDKLI

SEQ ID NO: 36729 - protein, 11 aa, synthetic construct
AMRDHLLRGGG

SEQ ID NO: 36730 - protein, 15 aa, synthetic construct
AMRDHLRTWKADKLI

SEQ ID NO: 36731 - protein, 15 aa, synthetic construct
AMRDHSYGGDTDKLI

SEQ ID NO: 36732 - protein, 10 aa, synthetic construct
AMRDHTEKLI

SEQ ID NO: 36733 - protein, 11 aa, synthetic construct
AMRDHWGNKTH

SEQ ID NO: 36734 - protein, 11 aa, synthetic construct
AMRDHYTDKLI

SEQ ID NO: 36735 - protein, 14 aa, synthetic construct
AMRDPDTRGTDKLI

SEQ ID NO: 36736 - protein, 14 aa, synthetic construct
AMRDPFLMGYRQTH

SEQ ID NO: 36737 - protein, 12 aa, synthetic construct
AMRDGGYSDKLI

SEQ ID NO: 36738 - protein, 15 aa, synthetic construct
AMRDPPYGGDTDTLI

SEQ ID NO: 36739 - protein, 17 aa, synthetic construct
AMRDSHGSRERSTDKLI

SEQ ID NO: 36740 - protein, 15 aa, synthetic construct
AMRDSHGSSDTDKFM

SEQ ID NO: 36741 - protein, 18 aa, synthetic construct
AMRDSSTGGFGCTPIHSS

SEQ ID NO: 36742 - protein, 18 aa, synthetic construct
AMRDSSTGGYGCTPIKSS

SEQ ID NO: 36743 - protein, 15 aa, synthetic construct
AMRDSTGGPYTDELI

SEQ ID NO: 36744 - protein, 16 aa, synthetic construct
AMRDSTGGYWDTDKLT

SEQ ID NO: 36745 - protein, 14 aa, synthetic construct
AMRDSYSVTPINSS

SEQ ID NO: 36746 - protein, 18 aa, synthetic construct
AMRDTFLQHWGKYTDKLI

SEQ ID NO: 36747 - protein, 18 aa, synthetic construct
AMRDTFLQYWGKYTDRLI

SEQ ID NO: 36748 - protein, 18 aa, synthetic construct
AMRDTFLQYWGKYTDRLL

SEQ ID NO: 36749 - protein, 18 aa, synthetic construct
AMRDTFLQYWGNYTDKLI

SEQ ID NO: 36750 - protein, 14 aa, synthetic construct
AMRDTGGYHADKLI

SEQ ID NO: 36751 - protein, 13 aa, synthetic construct
AMRDTGGYNADKL

SEQ ID NO: 36752 - protein, 14 aa, synthetic construct
AMRDTGGYSADKLI

SEQ ID NO: 36753 - protein, 15 aa, synthetic construct
AMRDTHWGIGGDKLI

SEQ ID NO: 36754 - protein, 14 aa, synthetic construct
AMRDTRGFLHRQTQ

SEQ ID NO: 36755 - protein, 13 aa, synthetic construct
AMRDTRGYFDQLI

SEQ ID NO: 36756 - protein, 18 aa, synthetic construct
AMRDTSTWGIRGHTDKLI

SEQ ID NO: 36757 - protein, 11 aa, synthetic construct
AMRDVGGYELI

SEQ ID NO: 36758 - protein, 13 aa, synthetic construct
AMRDVGKYTDKFI

SEQ ID NO: 36759 - protein, 13 aa, synthetic construct
AMRDVGRYTDKLI

SEQ ID NO: 36760 - protein, 11 aa, synthetic construct
AMRDVLGAKLI

SEQ ID NO: 36761 - protein, 13 aa, synthetic construct
AMRDVLGDTDKLI

SEQ ID NO: 36762 - protein, 15 aa, synthetic construct
AMRDVLGDTSTDKLI

SEQ ID NO: 36763 - protein, 13 aa, synthetic construct
AMRDVLGETDKLI

SEQ ID NO: 36764 - protein, 15 aa, synthetic construct
AMRDSHGSRDTEKLI

SEQ ID NO: 36765 - protein, 14 aa, synthetic construct
AMRDSGVSRRDKLI

SEQ ID NO: 36766 - protein, 18 aa, synthetic construct
AMRDSFTGGYGRTPINSS

SEQ ID NO: 36767 - protein, 14 aa, synthetic construct
AMRDPTGGHADKLI

SEQ ID NO: 36768 - protein, 17 aa, synthetic construct
AMRDPSFLGERGTDKLI

SEQ ID NO: 36769 - protein, 17 aa, synthetic construct
AMRDPSNVWGSYTDKLI

SEQ ID NO: 36770 - protein, 17 aa, synthetic construct
AMRDPSSVWGSYTDKLI

SEQ ID NO: 36771 - protein, 17 aa, synthetic construct
AMRDPSYCTGGYTDKLI

SEQ ID NO: 36772 - protein, 17 aa, synthetic construct
AMRDPSYDWGIQGNKLI

SEQ ID NO: 36773 - protein, 16 aa, synthetic construct
AMRDPSYEVCDTDKLI

SEQ ID NO: 36774 - protein, 15 aa, synthetic construct
AMRDPSYGGDTDKLN

SEQ ID NO: 36775 - protein, 16 aa, synthetic construct
AMRDPSYVGIGPINSS

SEQ ID NO: 36776 - protein, 17 aa, synthetic construct
AMRDPSYVWGSCTDKLI

SEQ ID NO: 36777 - protein, 17 aa, synthetic construct
AMRDPSYVWGSYTDKPI

SEQ ID NO: 36778 - protein, 14 aa, synthetic construct
AMRDPTAGHTDKLI

SEQ ID NO: 36779 - protein, 12 aa, synthetic construct
AMRDPTGGHTDK

SEQ ID NO: 36780 - protein, 18 aa, synthetic construct
AMRDSFTGGYGFKPINSS

SEQ ID NO: 36781 - protein, 14 aa, synthetic construct
AMRDPTGGHTDNSS

SEQ ID NO: 36782 - protein, 14 aa, synthetic construct
AMRDPTGGHTGKLI

SEQ ID NO: 36783 - protein, 11 aa, synthetic construct
AMRDPYTDKRI

SEQ ID NO: 36784 - protein, 11 aa, synthetic construct
AMRDPYTDRLI

SEQ ID NO: 36785 - protein, 14 aa, synthetic construct
AMRDRDTRGTEKLI

SEQ ID NO: 36786 - protein, 11 aa, synthetic construct
AMRDRGTDKLI

SEQ ID NO: 36787 - protein, 10 aa, synthetic construct
AMRDRTDKLI

SEQ ID NO: 36788 - protein, 13 aa, synthetic construct
AMRDRVIYIDKLI

SEQ ID NO: 36789 - protein, 12 aa, synthetic construct
AMRDRWGIDKLI

SEQ ID NO: 36790 - protein, 18 aa, synthetic construct
AMRDSFTGGYGCTLINSS

SEQ ID NO: 36791 - protein, 18 aa, synthetic construct
AMRDSFTGGYGCTPRNSS

SEQ ID NO: 36792 - protein, 17 aa, synthetic construct
AMRDGIPTSGAPPDKIN

SEQ ID NO: 36793 - protein, 12 aa, synthetic construct
AMRDGGYAYKLI

SEQ ID NO: 36794 - protein, 11 aa, synthetic construct
AMREGCPDKLI

SEQ ID NO: 36795 - protein, 16 aa, synthetic construct
AMRASSPYWGISYPLI

SEQ ID NO: 36796 - protein, 12 aa, synthetic construct
AMRAGGYTDKLI

SEQ ID NO: 36797 - protein, 16 aa, synthetic construct
AMRAGHTGGAYTDKLI

SEQ ID NO: 36798 - protein, 14 aa, synthetic construct
AMRAGLGDAPIYSS

SEQ ID NO: 36799 - protein, 14 aa, synthetic construct
AMRAGLGDTPKNSS

SEQ ID NO: 36800 - protein, 15 aa, synthetic construct
AMRAGLGDTRGDKLI

SEQ ID NO: 36801 - protein, 14 aa, synthetic construct
AMRAGLGGTPINSS

SEQ ID NO: 36802 - protein, 15 aa, synthetic construct
AMRAGLGHTGTDKLI

SEQ ID NO: 36803 - protein, 14 aa, synthetic construct
AMRAGLVDTPINSS

SEQ ID NO: 36804 - protein, 15 aa, synthetic construct
AMRAIPTGGYTDKLI

SEQ ID NO: 36805 - protein, 13 aa, synthetic construct
AMRALGEHTDKLI

SEQ ID NO: 36806 - protein, 14 aa, synthetic construct
AMRALGEKYTYKLI

SEQ ID NO: 36807 - protein, 13 aa, synthetic construct
AMRALGENTDKLI

SEQ ID NO: 36808 - protein, 14 aa, synthetic construct
AMRALGERYTDKLI

SEQ ID NO: 36809 - protein, 13 aa, synthetic construct
AMRALLGDTDQLI

SEQ ID NO: 36810 - protein, 16 aa, synthetic construct
AMRALPHGGRRPDELI

SEQ ID NO: 36811 - protein, 16 aa, synthetic construct
AMRALPHGGRRPDKHV

SEQ ID NO: 36812 - protein, 16 aa, synthetic construct
AMRALPHGGRRPDQLS

SEQ ID NO: 36813 - protein, 15 aa, synthetic construct
AMRALPSLGDTRKLI

SEQ ID NO: 36814 - protein, 14 aa, synthetic construct
AMRALTGGHTDKHI

SEQ ID NO: 36815 - protein, 14 aa, synthetic construct
AMRALTGGYTDKLI

SEQ ID NO: 36816 - protein, 13 aa, synthetic construct
AMRAPFMYWGIPI

SEQ ID NO: 36817 - protein, 13 aa, synthetic construct
AMRAPSMCWGIPI

SEQ ID NO: 36818 - protein, 13 aa, synthetic construct
AMRAPTGGPDKLI

SEQ ID NO: 36819 - protein, 14 aa, synthetic construct
AMRAQVLGDTDKLI

SEQ ID NO: 36820 - protein, 17 aa, synthetic construct
AMRASCLLCWGKTDKLI

SEQ ID NO: 36821 - protein, 14 aa, synthetic construct
AMRAGGYASTDQLM

SEQ ID NO: 36822 - protein, 14 aa, synthetic construct
AMRAGGYASTDQLI

SEQ ID NO: 36823 - protein, 14 aa, synthetic construct
AMRAGGYARTDKLI

SEQ ID NO: 36824 - protein, 15 aa, synthetic construct
AMRAFIRSGGSTPQI

SEQ ID NO: 36825 - protein, 18 aa, synthetic construct
AMMPFLRRDWGENTDKLI

SEQ ID NO: 36826 - protein, 13 aa, synthetic construct
AMMQGYSTPINSS

SEQ ID NO: 36827 - protein, 14 aa, synthetic construct
AMNLRTGGYSINSS

SEQ ID NO: 36828 - protein, 8 aa, synthetic construct
AMNPDKLI

SEQ ID NO: 36829 - protein, 13 aa, synthetic construct
AMNPYRGILDKLI

SEQ ID NO: 36830 - protein, 18 aa, synthetic construct
AMPRLHTFWGIRGRDKLI

SEQ ID NO: 36831 - protein, 18 aa, synthetic construct
AMPRLPTFWGIRGRDKLV

SEQ ID NO: 36832 - protein, 18 aa, synthetic construct
AMPRLPTIWGIRGRDKLI

SEQ ID NO: 36833 - protein, 15 aa, synthetic construct
AMPSFLRGNLTTQLF

SEQ ID NO: 36834 - protein, 14 aa, synthetic construct
AMRAALGDTPINSS

SEQ ID NO: 36835 - protein, 12 aa, synthetic construct
AMRAEGNPAQLF

SEQ ID NO: 36836 - protein, 15 aa, synthetic construct
AMRAFLGDKYTDKLI

SEQ ID NO: 36837 - protein, 15 aa, synthetic construct
AMRAGGLTSWDTRQM

SEQ ID NO: 36838 - protein, 17 aa, synthetic construct
AMRAFLLGDNSWDTRQM

SEQ ID NO: 36839 - protein, 16 aa, synthetic construct
AMRAFLPLPGSPINSS

SEQ ID NO: 36840 - protein, 16 aa, synthetic construct
AMRAFLRSGGHTDKLI

SEQ ID NO: 36841 - protein, 16 aa, synthetic construct
AMRAFLSTGGYTDKII

SEQ ID NO: 36842 - protein, 14 aa, synthetic construct
AMRAFLVRGIPKLI

SEQ ID NO: 36843 - protein, 14 aa, synthetic construct
AMRAFLVRWITKLF

SEQ ID NO: 36844 - protein, 12 aa, synthetic construct
AMRAGGDTDKLI

SEQ ID NO: 36845 - protein, 12 aa, synthetic construct
AMRAGGDTRQLI

SEQ ID NO: 36846 - protein, 13 aa, synthetic construct
AMRAGGGGADKLI

SEQ ID NO: 36847 - protein, 14 aa, synthetic construct
AMRAGGHASTDKLI

SEQ ID NO: 36848 - protein, 13 aa, synthetic construct
AMRAGGIPSDKLI

SEQ ID NO: 36849 - protein, 14 aa, synthetic construct
AMRASLVRWIPKLI

SEQ ID NO: 36850 - protein, 16 aa, synthetic construct
AMRASSSYWGISHPLI

SEQ ID NO: 36851 - protein, 12 aa, synthetic construct
AMRDGGYALNSS

SEQ ID NO: 36852 - protein, 15 aa, synthetic construct
AMRASTGGLGPDKLI

SEQ ID NO: 36853 - protein, 14 aa, synthetic construct
AMRCPYGDNTEKNI

SEQ ID NO: 36854 - protein, 14 aa, synthetic construct
AMRDAAAYEREKHN

SEQ ID NO: 36855 - protein, 18 aa, synthetic construct
AMRDAFLRGGGRGAINSS

SEQ ID NO: 36856 - protein, 13 aa, synthetic construct
AMRDAGEDIDKLI

SEQ ID NO: 36857 - protein, 15 aa, synthetic construct
AMRDAHGSRDTDKLI

SEQ ID NO: 36858 - protein, 12 aa, synthetic construct
AMRDCGIPDKLI

SEQ ID NO: 36859 - protein, 16 aa, synthetic construct
AMRDCLLGDSAPINSS

SEQ ID NO: 36860 - protein, 8 aa, synthetic construct
AMRDDLDT

SEQ ID NO: 36861 - protein, 13 aa, synthetic construct
AMRDDVLGAPGAH

SEQ ID NO: 36862 - protein, 16 aa, synthetic construct
AMRDDVLGDPPPINSS

SEQ ID NO: 36863 - protein, 16 aa, synthetic construct
AMRDDVLGDTTTDKLI

SEQ ID NO: 36864 - protein, 15 aa, synthetic construct
AMRDFLLGDYIDKLI

SEQ ID NO: 36865 - protein, 14 aa, synthetic construct
AMRDFLPSVTNKLI

SEQ ID NO: 36866 - protein, 18 aa, synthetic construct
AMRDFLPVLGDPLPINSS

SEQ ID NO: 36867 - protein, 11 aa, synthetic construct
AMRDFLRGKLT

SEQ ID NO: 36868 - protein, 16 aa, synthetic construct
AMRDGASDGRSTDKLI

SEQ ID NO: 36869 - protein, 14 aa, synthetic construct
AMRDGDGGYTDKLI

SEQ ID NO: 36870 - protein, 14 aa, synthetic construct
AMRDGDPTDSDKLI

SEQ ID NO: 36871 - protein, 13 aa, synthetic construct
AMRDGDWGPINSS

SEQ ID NO: 36872 - protein, 13 aa, synthetic construct
AMRDGGDNTDKLI

SEQ ID NO: 36873 - protein, 10 aa, synthetic construct
AMRDGGIKLL

SEQ ID NO: 36874 - protein, 14 aa, synthetic construct
AMRDGGIQFTDKVI

SEQ ID NO: 36875 - protein, 15 aa, synthetic construct
AMRDGGIRVLTDKLI

SEQ ID NO: 36876 - protein, 12 aa, synthetic construct
AMRDGGYADKHI

SEQ ID NO: 36877 - protein, 12 aa, synthetic construct
AMRDGGYADQLI

SEQ ID NO: 36878 - protein, 14 aa, synthetic construct
AMRAYWGVYTDKLI

SEQ ID NO: 36879 - protein, 14 aa, synthetic construct
AMRAYWGIFGDKLI

SEQ ID NO: 36880 - protein, 13 aa, synthetic construct
AMRAYVGPTEKLI

SEQ ID NO: 36881 - protein, 15 aa, synthetic construct
AMRAVLGDTLTAQLY

SEQ ID NO: 36882 - protein, 13 aa, synthetic construct
AMRASYCGIAKVI

SEQ ID NO: 36883 - protein, 13 aa, synthetic construct
AMRASYWGIGKLI

SEQ ID NO: 36884 - protein, 15 aa, synthetic construct
AMRASYWGILGDKLI

SEQ ID NO: 36885 - protein, 14 aa, synthetic construct
AMRATCGDGADKLI

SEQ ID NO: 36886 - protein, 14 aa, synthetic construct
AMRATCGDRADNLI

SEQ ID NO: 36887 - protein, 14 aa, synthetic construct
AMRATCVDRADKLI

SEQ ID NO: 36888 - protein, 17 aa, synthetic construct
AMRATFLLSWGKTDKLI

SEQ ID NO: 36889 - protein, 13 aa, synthetic construct
AMRATGGSCDKLI

SEQ ID NO: 36890 - protein, 15 aa, synthetic construct
AMRATGGYLTPINSP

SEQ ID NO: 36891 - protein, 14 aa, synthetic construct
AMRATGGYLTPITH

SEQ ID NO: 36892 - protein, 15 aa, synthetic construct
AMRAVLGDKYTDKLT

SEQ ID NO: 36893 - protein, 15 aa, synthetic construct
AMRAVLGETLTAQLF

SEQ ID NO: 36894 - protein, 13 aa, synthetic construct
AMRAYGGPTDKLI

SEQ ID NO: 36895 - protein, 15 aa, synthetic construct
AMRAVQGDTLTALLF

SEQ ID NO: 36896 - protein, 15 aa, synthetic construct
AMRAVQGDTLTAQLF

SEQ ID NO: 36897 - protein, 15 aa, synthetic construct
AMRAVRGDTLTAQLF

SEQ ID NO: 36898 - protein, 13 aa, synthetic construct
AMRAWGEYTDELI

SEQ ID NO: 36899 - protein, 13 aa, synthetic construct
AMRAWGEYTDKPI

SEQ ID NO: 36900 - protein, 13 aa, synthetic construct
AMRAWGILGHPTD

SEQ ID NO: 36901 - protein, 13 aa, synthetic construct
AMRAWGIRPIKSS

SEQ ID NO: 36902 - protein, 13 aa, synthetic construct
AMRAWGIRPKNSS

SEQ ID NO: 36903 - protein, 13 aa, synthetic construct
AMRAWGIRPVNSS

SEQ ID NO: 36904 - protein, 11 aa, synthetic construct
AMRAWGISINA

SEQ ID NO: 36905 - protein, 12 aa, synthetic construct
AMRAWGTPINSS

SEQ ID NO: 36906 - protein, 14 aa, synthetic construct
AMRDVLVVHTDKLI

SEQ ID NO: 36907 - protein, 15 aa, synthetic construct
AMRDVLYWGIPKNSS

SEQ ID NO: 36908 - protein, 14 aa, synthetic construct
AMRDVPNWGMDKLI

SEQ ID NO: 36909 - protein, 13 aa, synthetic construct
AMREEDTGTDKHI

SEQ ID NO: 36910 - protein, 17 aa, synthetic construct
AMREDLLPLLGDTDKLI

SEQ ID NO: 36911 - protein, 19 aa, synthetic construct
AMREDLLPTRLGDTPIDSS

SEQ ID NO: 36912 - protein, 19 aa, synthetic construct
AMREDLLPTRLGDTPINSA

SEQ ID NO: 36913 - protein, 17 aa, synthetic construct
AMREDLPTPTGGPINSS

SEQ ID NO: 36914 - protein, 14 aa, synthetic construct
AMREDPIWGIDKLI

SEQ ID NO: 36915 - protein, 17 aa, synthetic construct
AMREDPLLRAGGGDKII

SEQ ID NO: 36916 - protein, 15 aa, synthetic construct
AMREDPYGGYPRNSS

SEQ ID NO: 36917 - protein, 19 aa, synthetic construct
AMREDRFQLVGDTYTDKLI

SEQ ID NO: 36918 - protein, 15 aa, synthetic construct
AMREDRGIRDTDKLI

SEQ ID NO: 36919 - protein, 13 aa, synthetic construct
AMREDRGNDGKLI

SEQ ID NO: 36920 - protein, 15 aa, synthetic construct
AMREDSGRANADKLI

SEQ ID NO: 36921 - protein, 15 aa, synthetic construct
AMREDSGRANTVKLI

SEQ ID NO: 36922 - protein, 17 aa, synthetic construct
AMREDSLPKSSYTDKLI

SEQ ID NO: 36923 - protein, 15 aa, synthetic construct
AMREDSSRANTDKLI

SEQ ID NO: 36924 - protein, 17 aa, synthetic construct
AMREDSYVLGQSTDNLI

SEQ ID NO: 36925 - protein, 16 aa, synthetic construct
AMREDTRTGYETDKLI

SEQ ID NO: 36926 - protein, 20 aa, synthetic construct
AMREDTSYSYWGIGRPINSS

SEQ ID NO: 36927 - protein, 19 aa, synthetic construct
AMREDTSYSYWGIREGKPI

SEQ ID NO: 36928 - protein, 13 aa, synthetic construct
AMREDWDASINSS

SEQ ID NO: 36929 - protein, 15 aa, synthetic construct
AMREDWGIPYTDELI

SEQ ID NO: 36930 - protein, 15 aa, synthetic construct
AMREDWGIPYTDKLL

SEQ ID NO: 36931 - protein, 14 aa, synthetic construct
AMREDWGIRADKLI

SEQ ID NO: 36932 - protein, 15 aa, synthetic construct
AMREDWGIRDNDKLI

SEQ ID NO: 36933 - protein, 14 aa, synthetic construct
AMREDWGIRGDKVI

SEQ ID NO: 36934 - protein, 15 aa, synthetic construct
AMREDWGIRVTDKLI

SEQ ID NO: 36935 - protein, 10 aa, synthetic construct
AMREDLGGHI

SEQ ID NO: 36936 - protein, 17 aa, synthetic construct
AMREDLFPDTAEPEKLI

SEQ ID NO: 36937 - protein, 14 aa, synthetic construct
AMREDGGYHTDNLI

SEQ ID NO: 36938 - protein, 17 aa, synthetic construct
AMRECSYGYRGNNDKLN

SEQ ID NO: 36939 - protein, 14 aa, synthetic construct
AMREAYWGIADKLI

SEQ ID NO: 36940 - protein, 18 aa, synthetic construct
AMRECAGLEPPGYTDKLI

SEQ ID NO: 36941 - protein, 11 aa, synthetic construct
AMRECDPNKLI

SEQ ID NO: 36942 - protein, 12 aa, synthetic construct
AMRECGIPDKLI

SEQ ID NO: 36943 - protein, 14 aa, synthetic construct
AMRECLGAYTDKRI

SEQ ID NO: 36944 - protein, 15 aa, synthetic construct
AMRECLVLGDPDKLI

SEQ ID NO: 36945 - protein, 14 aa, synthetic construct
AMRECPGGYTDKLI

SEQ ID NO: 36946 - protein, 13 aa, synthetic construct
AMRECRGDTDKLI

SEQ ID NO: 36947 - protein, 14 aa, synthetic construct
AMRECRGHCPAKVI

SEQ ID NO: 36948 - protein, 15 aa, synthetic construct
AMRECRTGGSTDKLI

SEQ ID NO: 36949 - protein, 14 aa, synthetic construct
AMRECSGGYSDKLI

SEQ ID NO: 36950 - protein, 17 aa, synthetic construct
AMRECSYVLGQYTDKLI

SEQ ID NO: 36951 - protein, 14 aa, synthetic construct
AMREDGGYAGDKLI

SEQ ID NO: 36952 - protein, 15 aa, synthetic construct
AMRECTGGAGTAQLF

SEQ ID NO: 36953 - protein, 13 aa, synthetic construct
AMRECTGGLDKLI

SEQ ID NO: 36954 - protein, 15 aa, synthetic construct
AMRECTGGPGTAQLF

SEQ ID NO: 36955 - protein, 14 aa, synthetic construct
AMREDASSWDTQQM

SEQ ID NO: 36956 - protein, 15 aa, synthetic construct
AMREDCSYVYSDKLI

SEQ ID NO: 36957 - protein, 17 aa, synthetic construct
AMREDFCWGIPYTDKLI

SEQ ID NO: 36958 - protein, 17 aa, synthetic construct
AMREDFIPLLGDTDKLI

SEQ ID NO: 36959 - protein, 17 aa, synthetic construct
AMREDFLPLLADTDRVI

SEQ ID NO: 36960 - protein, 18 aa, synthetic construct
AMREDFLPLLGATPINSS

SEQ ID NO: 36961 - protein, 15 aa, synthetic construct
AMREDGGDKYTDKLI

SEQ ID NO: 36962 - protein, 13 aa, synthetic construct
AMREDGGNTDKLI

SEQ ID NO: 36963 - protein, 15 aa, synthetic construct
AMREEAPGGYTDKLI

SEQ ID NO: 36964 - protein, 13 aa, synthetic construct
AMREEDTGTDKPI

SEQ ID NO: 36965 - protein, 12 aa, synthetic construct
AMRDVRDTDKLI

SEQ ID NO: 36966 - protein, 12 aa, synthetic construct
AMREEGDTEKLI

SEQ ID NO: 36967 - protein, 11 aa, synthetic construct
AMREFSIDKLI

SEQ ID NO: 36968 - protein, 16 aa, synthetic construct
AMREFSWGIRGADDLI

SEQ ID NO: 36969 - protein, 16 aa, synthetic construct
AMREFSWGIRGAEKLI

SEQ ID NO: 36970 - protein, 16 aa, synthetic construct
AMREFSWGIRGAGKLI

SEQ ID NO: 36971 - protein, 16 aa, synthetic construct
AMREFSWGLRGSDDLI

SEQ ID NO: 36972 - protein, 13 aa, synthetic construct
AMREFTGGFINSS

SEQ ID NO: 36973 - protein, 17 aa, synthetic construct
AMREGACPVLGETDKLI

SEQ ID NO: 36974 - protein, 13 aa, synthetic construct
AMREGAGDTRDSH

SEQ ID NO: 36975 - protein, 13 aa, synthetic construct
AMREGAGGHRETH

SEQ ID NO: 36976 - protein, 13 aa, synthetic construct
AMREGAGGHRSTH

SEQ ID NO: 36977 - protein, 13 aa, synthetic construct
AMREGAGGYDKLI

SEQ ID NO: 36978 - protein, 15 aa, synthetic construct
AMREGALEGYTDKLI

SEQ ID NO: 36979 - protein, 15 aa, synthetic construct
AMREGALGGYADKLI

SEQ ID NO: 36980 - protein, 17 aa, synthetic construct
AMREGALLGVPDTDKLI

SEQ ID NO: 36981 - protein, 15 aa, synthetic construct
AMREGALWGYTDKLI

SEQ ID NO: 36982 - protein, 17 aa, synthetic construct
AMREGAPTFYWGIRKLI

SEQ ID NO: 36983 - protein, 17 aa, synthetic construct
AMREGASPVLGATDQLV

SEQ ID NO: 36984 - protein, 17 aa, synthetic construct
AMREGASPVLGDIDKLI

SEQ ID NO: 36985 - protein, 17 aa, synthetic construct
AMREGASPVLGDTGKLI

SEQ ID NO: 36986 - protein, 17 aa, synthetic construct
AMREGASPVLGTPINSS

SEQ ID NO: 36987 - protein, 17 aa, synthetic construct
AMREGATLLGDTPIHSS

SEQ ID NO: 36988 - protein, 17 aa, synthetic construct
AMREGATLLGYTPRHSS

SEQ ID NO: 36989 - protein, 12 aa, synthetic construct
AMREGAYGGGPI

SEQ ID NO: 36990 - protein, 17 aa, synthetic construct
AMREGAYVGGSYTEKLI

SEQ ID NO: 36991 - protein, 12 aa, synthetic construct
AMREGCGIRALI

SEQ ID NO: 36992 - protein, 16 aa, synthetic construct
AMREFSGGIRGADKLI

SEQ ID NO: 36993 - protein, 16 aa, synthetic construct
AMREFPTPLGGPDKLI

SEQ ID NO: 36994 - protein, 15 aa, synthetic construct
AMREFLVVGATDKLI

SEQ ID NO: 36995 - protein, 14 aa, synthetic construct
AMREEWGYHTDKII

SEQ ID NO: 36996 - protein, 12 aa, synthetic construct
AMREEGYTDKLI

SEQ ID NO: 36997 - protein, 15 aa, synthetic construct
AMREELGDRDTDKLI

SEQ ID NO: 36998 - protein, 10 aa, synthetic construct
AMREELGGLS

SEQ ID NO: 36999 - protein, 14 aa, synthetic construct
AMREELGGYTDKLI

SEQ ID NO: 37000 - protein, 20 aa, synthetic construct
AMREELPLLLGGSTWDTRHM

SEQ ID NO: 37001 - protein, 20 aa, synthetic construct
AMREELPLVLGGSSWDTRDM

SEQ ID NO: 37002 - protein, 10 aa, synthetic construct
AMREEQGGLI

SEQ ID NO: 37003 - protein, 13 aa, synthetic construct
AMREERGSTDKLI

SEQ ID NO: 37004 - protein, 14 aa, synthetic construct
AMREEVGKYTDELI

SEQ ID NO: 37005 - protein, 14 aa, synthetic construct
AMREEVGKYTDKLL

SEQ ID NO: 37006 - protein, 15 aa, synthetic construct
AMREEVPGGYTDKLT

SEQ ID NO: 37007 - protein, 14 aa, synthetic construct
AMREEYGGIPRETH

SEQ ID NO: 37008 - protein, 16 aa, synthetic construct
AMREFLVLGVYTDKLI

SEQ ID NO: 37009 - protein, 9 aa, synthetic construct
AMREFGKLI

SEQ ID NO: 37010 - protein, 19 aa, synthetic construct
AMREFHRTGGYELLGHPTD

SEQ ID NO: 37011 - protein, 13 aa, synthetic construct
AMREFLGDADKLI

SEQ ID NO: 37012 - protein, 13 aa, synthetic construct
AMREFLGDTDKLF

SEQ ID NO: 37013 - protein, 16 aa, synthetic construct
AMREFLLGDTAPINPS

SEQ ID NO: 37014 - protein, 16 aa, synthetic construct
AMREFLLGDTAPTNSS

SEQ ID NO: 37015 - protein, 15 aa, synthetic construct
AMREFLLLGATDKLI

SEQ ID NO: 37016 - protein, 16 aa, synthetic construct
AMREFLQGDTAPIHSS

SEQ ID NO: 37017 - protein, 15 aa, synthetic construct
AMREFLVLGATDTLI

SEQ ID NO: 37018 - protein, 15 aa, synthetic construct
AMREFLVLGDTDKLI

SEQ ID NO: 37019 - protein, 15 aa, synthetic construct
AMREFLVLGGTDKLI

SEQ ID NO: 37020 - protein, 21 aa, synthetic construct
AMREAYLPTTMGGRECTDKLI

SEQ ID NO: 37021 - protein, 21 aa, synthetic construct
AMREAYLPTSMGGRECTDNLI

SEQ ID NO: 37022 - protein, 21 aa, synthetic construct
AMREAYLPTSMGGRECADKLI

SEQ ID NO: 37023 - protein, 21 aa, synthetic construct
AMREAYLPTSMGGLECTDKLI

SEQ ID NO: 37024 - protein, 10 aa, synthetic construct
AMRDYTDKLN

SEQ ID NO: 37025 - protein, 10 aa, synthetic construct
AMRDYTDTLI

SEQ ID NO: 37026 - protein, 14 aa, synthetic construct
AMRDYWAVYTDKLI

SEQ ID NO: 37027 - protein, 14 aa, synthetic construct
AMRDYYWFTPINSS

SEQ ID NO: 37028 - protein, 20 aa, synthetic construct
AMREAAFLGGDTRSWDARQM

SEQ ID NO: 37029 - protein, 18 aa, synthetic construct
AMREAAFRLGELLGHPTD

SEQ ID NO: 37030 - protein, 12 aa, synthetic construct
AMREAAYGWGPI

SEQ ID NO: 37031 - protein, 15 aa, synthetic construct
AMREACTGGYGDKLI

SEQ ID NO: 37032 - protein, 14 aa, synthetic construct
AMREADPTDTDKLI

SEQ ID NO: 37033 - protein, 16 aa, synthetic construct
AMREADWAIPHTHKHI

SEQ ID NO: 37034 - protein, 18 aa, synthetic construct
AMREAELGGTGPAIDKLF

SEQ ID NO: 37035 - protein, 11 aa, synthetic construct
AMREAEPHKLI

SEQ ID NO: 37036 - protein, 17 aa, synthetic construct
AMREAEPSYAFTVDKLI

SEQ ID NO: 37037 - protein, 15 aa, synthetic construct
AMREAFIGGYGDKLI

SEQ ID NO: 37038 - protein, 16 aa, synthetic construct
AMREAFLCGIQPDKHI

SEQ ID NO: 37039 - protein, 17 aa, synthetic construct
AMREAFLLGDTYTDKPI

SEQ ID NO: 37040 - protein, 17 aa, synthetic construct
AMREAFLMGDTYTDKLI

SEQ ID NO: 37041 - protein, 15 aa, synthetic construct
AMREAFLPGTPISSS

SEQ ID NO: 37042 - protein, 18 aa, synthetic construct
AMREAFLRGGGRGADKLI

SEQ ID NO: 37043 - protein, 16 aa, synthetic construct
AMREAFLRGIRAEKLI

SEQ ID NO: 37044 - protein, 16 aa, synthetic construct
AMREAFLRGVRADKLI

SEQ ID NO: 37045 - protein, 15 aa, synthetic construct
AMREAFLRTGADKLI

SEQ ID NO: 37046 - protein, 18 aa, synthetic construct
AMREAFLRVGGATPINSS

SEQ ID NO: 37047 - protein, 18 aa, synthetic construct
AMREAFLRVGGGHTEKLI

SEQ ID NO: 37048 - protein, 18 aa, synthetic construct
AMREAFLVYGGAYTDKLI

SEQ ID NO: 37049 - protein, 15 aa, synthetic construct
AMRDYHWGIGGDKLI

SEQ ID NO: 37050 - protein, 13 aa, synthetic construct
AMRDWWIPTDKLI

SEQ ID NO: 37051 - protein, 12 aa, synthetic construct
AMRDWSDTDKLI

SEQ ID NO: 37052 - protein, 14 aa, synthetic construct
AMRDWGIQNTDKLI

SEQ ID NO: 37053 - protein, 15 aa, synthetic construct
AMRDVRRGGTARNGS

SEQ ID NO: 37054 - protein, 17 aa, synthetic construct
AMRDVRRGGYEYTDKLI

SEQ ID NO: 37055 - protein, 16 aa, synthetic construct
AMRDVSFDWRSTDKLI

SEQ ID NO: 37056 - protein, 14 aa, synthetic construct
AMRDVWAIRPDKLI

SEQ ID NO: 37057 - protein, 15 aa, synthetic construct
AMRDWDYWGTTDKLI

SEQ ID NO: 37058 - protein, 14 aa, synthetic construct
AMRDWGILYTDKLI

SEQ ID NO: 37059 - protein, 13 aa, synthetic construct
AMRDWGIPADKLI

SEQ ID NO: 37060 - protein, 12 aa, synthetic construct
AMRDWGIPKNSS

SEQ ID NO: 37061 - protein, 12 aa, synthetic construct
AMRDWGIPVKLI

SEQ ID NO: 37062 - protein, 14 aa, synthetic construct
AMRDWGIQFTDKLV

SEQ ID NO: 37063 - protein, 14 aa, synthetic construct
AMRDWGIQITDKLI

SEQ ID NO: 37064 - protein, 16 aa, synthetic construct
AMRDWGIRERSTDKII

SEQ ID NO: 37065 - protein, 12 aa, synthetic construct
AMRDWGYTDKLI

SEQ ID NO: 37066 - protein, 16 aa, synthetic construct
AMRDWGIRERSTDKLT

SEQ ID NO: 37067 - protein, 16 aa, synthetic construct
AMRDWGIRESSTDKLI

SEQ ID NO: 37068 - protein, 14 aa, synthetic construct
AMRDWGIRFTDKLI

SEQ ID NO: 37069 - protein, 14 aa, synthetic construct
AMRDWGIRGPINSS

SEQ ID NO: 37070 - protein, 18 aa, synthetic construct
AMRDWGIRQLGSTPINSS

SEQ ID NO: 37071 - protein, 13 aa, synthetic construct
AMRDWGPYTDKLI

SEQ ID NO: 37072 - protein, 11 aa, synthetic construct
AMRDWGTDKHI

SEQ ID NO: 37073 - protein, 11 aa, synthetic construct
AMRDWGTEKLN

SEQ ID NO: 37074 - protein, 11 aa, synthetic construct
AMRDWGTEKLT

SEQ ID NO: 37075 - protein, 12 aa, synthetic construct
AMRDWGTPDKLI

SEQ ID NO: 37076 - protein, 13 aa, synthetic construct
AMRDWGTYTDKLI

SEQ ID NO: 37077 - protein, 18 aa, synthetic construct
AMREAFLVYLVAYTDQLI

SEQ ID NO: 37078 - protein, 18 aa, synthetic construct
AMREAFLVYWGAYTDDLI

SEQ ID NO: 37079 - protein, 18 aa, synthetic construct
AMREAFLVYWGAYTDELI

SEQ ID NO: 37080 - protein, 13 aa, synthetic construct
AMREASLCTGTHI

SEQ ID NO: 37081 - protein, 19 aa, synthetic construct
AMREALPTRTGGYQTINSS

SEQ ID NO: 37082 - protein, 13 aa, synthetic construct
AMREALTGADKLI

SEQ ID NO: 37083 - protein, 16 aa, synthetic construct
AMREAPSTGGYTDKLI

SEQ ID NO: 37084 - protein, 17 aa, synthetic construct
AMREAPTAELGDTDKLI

SEQ ID NO: 37085 - protein, 15 aa, synthetic construct
AMREAPTGGNTELLN

SEQ ID NO: 37086 - protein, 17 aa, synthetic construct
AMREAPTSERGDTDKLI

SEQ ID NO: 37087 - protein, 17 aa, synthetic construct
AMREAPTSKLGDTDKLI

SEQ ID NO: 37088 - protein, 14 aa, synthetic construct
AMREARANGVDKLI

SEQ ID NO: 37089 - protein, 17 aa, synthetic construct
AMREARLMGIRYTDKLI

SEQ ID NO: 37090 - protein, 13 aa, synthetic construct
AMREARVTPINSS

SEQ ID NO: 37091 - protein, 13 aa, synthetic construct
AMREASLCTGALI

SEQ ID NO: 37092 - protein, 18 aa, synthetic construct
AMREAVLGGTGPAIDKLI

SEQ ID NO: 37093 - protein, 17 aa, synthetic construct
AMREALLLGDTYTDKLF

SEQ ID NO: 37094 - protein, 17 aa, synthetic construct
AMREAVLGRKGGGHKLI

SEQ ID NO: 37095 - protein, 14 aa, synthetic construct
AMREAVMGDADKLI

SEQ ID NO: 37096 - protein, 16 aa, synthetic construct
AMREAVWGIRPPINSS

SEQ ID NO: 37097 - protein, 13 aa, synthetic construct
AMREAWGDTGKLI

SEQ ID NO: 37098 - protein, 13 aa, synthetic construct
AMREAWGLHRETH

SEQ ID NO: 37099 - protein, 12 aa, synthetic construct
AMREAWGLRLLI

SEQ ID NO: 37100 - protein, 15 aa, synthetic construct
AMREAWRSSSDTRHM

SEQ ID NO: 37101 - protein, 11 aa, synthetic construct
AMREAWTDKLI

SEQ ID NO: 37102 - protein, 13 aa, synthetic construct
AMREAYLCTGTLN

SEQ ID NO: 37103 - protein, 21 aa, synthetic construct
AMREAYLPTSKGGRECTDKLI

SEQ ID NO: 37104 - protein, 21 aa, synthetic construct
AMREAYLPTSLGGRECTDKLI

SEQ ID NO: 37105 - protein, 15 aa, synthetic construct
AMREALLVVYTDKLI

SEQ ID NO: 37106 - protein, 15 aa, synthetic construct
AMREALGDTWTDRLI

SEQ ID NO: 37107 - protein, 16 aa, synthetic construct
AMREAFLWGIGPINSS

SEQ ID NO: 37108 - protein, 15 aa, synthetic construct
AMREAGGWGYTDKLN

SEQ ID NO: 37109 - protein, 16 aa, synthetic construct
AMREAFLWGIQPAKLF

SEQ ID NO: 37110 - protein, 15 aa, synthetic construct
AMREAFLWGIRDKLI

SEQ ID NO: 37111 - protein, 17 aa, synthetic construct
AMREAFSWGIGTPINSS

SEQ ID NO: 37112 - protein, 17 aa, synthetic construct
AMREAFSWGIPYTGKLI

SEQ ID NO: 37113 - protein, 15 aa, synthetic construct
AMREAFTGGYDDKLS

SEQ ID NO: 37114 - protein, 15 aa, synthetic construct
AMREAFTGGYGDKLT

SEQ ID NO: 37115 - protein, 16 aa, synthetic construct
AMREAFTGGYGTDKLI

SEQ ID NO: 37116 - protein, 15 aa, synthetic construct
AMREAGGGGYTDKLI

SEQ ID NO: 37117 - protein, 14 aa, synthetic construct
AMREAGGPLDSTTL

SEQ ID NO: 37118 - protein, 15 aa, synthetic construct
AMREAGGWGYTDILI

SEQ ID NO: 37119 - protein, 15 aa, synthetic construct
AMREAGGWGYTDKDI

SEQ ID NO: 37120 - protein, 15 aa, synthetic construct
AMREAGGWGYTDKLT

SEQ ID NO: 37121 - protein, 21 aa, synthetic construct
AMREALFLRELGDTVGPDKLI

SEQ ID NO: 37122 - protein, 11 aa, synthetic construct
AMREAGGYKLF

SEQ ID NO: 37123 - protein, 16 aa, synthetic construct
AMREAGGYPGSTDKPI

SEQ ID NO: 37124 - protein, 16 aa, synthetic construct
AMREAGGYPGSTGKLI

SEQ ID NO: 37125 - protein, 16 aa, synthetic construct
AMREAGGYPGSTNKLI

SEQ ID NO: 37126 - protein, 14 aa, synthetic construct
AMREAGGYVGDKLI

SEQ ID NO: 37127 - protein, 12 aa, synthetic construct
AMREAGHAAQLF

SEQ ID NO: 37128 - protein, 17 aa, synthetic construct
AMREAGLLGIRYTDKLI

SEQ ID NO: 37129 - protein, 15 aa, synthetic construct
AMREAHTGGNTDQLI

SEQ ID NO: 37130 - protein, 14 aa, synthetic construct
AMREAILGDTDKLI

SEQ ID NO: 37131 - protein, 12 aa, synthetic construct
AMREAIRIDKLI

SEQ ID NO: 37132 - protein, 21 aa, synthetic construct
AMREALFLRELGDTGGPDKLN

SEQ ID NO: 37133 - protein, 14 aa, synthetic construct
AMMLRTGGYADKLI

SEQ ID NO: 37134 - protein, 16 aa, synthetic construct
AMMEGLLGATYTDKLI

SEQ ID NO: 37135 - protein, 10 aa, synthetic construct
AMLGIPINSS

SEQ ID NO: 37136 - protein, 9 aa, synthetic construct
ALEDTDKLI

SEQ ID NO: 37137 - protein, 14 aa, synthetic construct
AKRETFRRGGYLLI

SEQ ID NO: 37138 - protein, 15 aa, synthetic construct
AKRETSGGYGGDKLI

SEQ ID NO: 37139 - protein, 14 aa, synthetic construct
AKREVLGAYTDKLI

SEQ ID NO: 37140 - protein, 15 aa, synthetic construct
AKREVLRDTSTDKLI

SEQ ID NO: 37141 - protein, 15 aa, synthetic construct
AKREWDYWGTTDKLI

SEQ ID NO: 37142 - protein, 13 aa, synthetic construct
AKREWETRTDKLI

SEQ ID NO: 37143 - protein, 10 aa, synthetic construct
AKRGATDKLI

SEQ ID NO: 37144 - protein, 14 aa, synthetic construct
AKRGFLPSIRGKLV

SEQ ID NO: 37145 - protein, 7 aa, synthetic construct
AKRGKLI

SEQ ID NO: 37146 - protein, 14 aa, synthetic construct
AKRGPTVYWPDKLI

SEQ ID NO: 37147 - protein, 13 aa, synthetic construct
AKRLGDTRTDKLI

SEQ ID NO: 37148 - protein, 12 aa, synthetic construct
AKRMGDTTDKLI

SEQ ID NO: 37149 - protein, 13 aa, synthetic construct
AKRSPYWGIRNSS

SEQ ID NO: 37150 - protein, 13 aa, synthetic construct
AKRSYWGIRDKLI

SEQ ID NO: 37151 - protein, 13 aa, synthetic construct
AKRVLGDTADKLI

SEQ ID NO: 37152 - protein, 12 aa, synthetic construct
AKRVLGNTDKLI

SEQ ID NO: 37153 - protein, 12 aa, synthetic construct
AKRVMGDPDKLI

SEQ ID NO: 37154 - protein, 16 aa, synthetic construct
AKRYSLIVLGDTDKLI

SEQ ID NO: 37155 - protein, 7 aa, synthetic construct
AKSCKLI

SEQ ID NO: 37156 - protein, 14 aa, synthetic construct
AKSCVLGDKGDKLV

SEQ ID NO: 37157 - protein, 17 aa, synthetic construct
AKSLPSFLTGGYADKLI

SEQ ID NO: 37158 - protein, 14 aa, synthetic construct
AKSPTLWGDTDNLI

SEQ ID NO: 37159 - protein, 11 aa, synthetic construct
AKSTGGTINSS

SEQ ID NO: 37160 - protein, 11 aa, synthetic construct
AKTEILWDKLI

SEQ ID NO: 37161 - protein, 11 aa, synthetic construct
AKTELGDPKLI

SEQ ID NO: 37162 - protein, 14 aa, synthetic construct
AKRESTSWGIDKLL

SEQ ID NO: 37163 - protein, 15 aa, synthetic construct
AKRESRLGDTTDKLI

SEQ ID NO: 37164 - protein, 13 aa, synthetic construct
AKREQLGDTDKLI

SEQ ID NO: 37165 - protein, 15 aa, synthetic construct
AKREGPNGDTGDKLI

SEQ ID NO: 37166 - protein, 19 aa, synthetic construct
AKREGGPPVLGDTRDTRQM

SEQ ID NO: 37167 - protein, 14 aa, synthetic construct
AKREGGYATPINSS

SEQ ID NO: 37168 - protein, 17 aa, synthetic construct
AKREGLDWGILYTDKLI

SEQ ID NO: 37169 - protein, 16 aa, synthetic construct
AKREGLGDITWDTRQI

SEQ ID NO: 37170 - protein, 13 aa, synthetic construct
AKREGLGDTDKLI

SEQ ID NO: 37171 - protein, 14 aa, synthetic construct
AKREGLGDTTDKLI

SEQ ID NO: 37172 - protein, 17 aa, synthetic construct
AKREGLLPLGVYTDKLI

SEQ ID NO: 37173 - protein, 12 aa, synthetic construct
AKREGLLTAQLF

SEQ ID NO: 37174 - protein, 15 aa, synthetic construct
AKREGLRGGIRDKLI

SEQ ID NO: 37175 - protein, 14 aa, synthetic construct
AKREGMGDTLDKLI

SEQ ID NO: 37176 - protein, 15 aa, synthetic construct
AKREGNFWGTLDKLI

SEQ ID NO: 37177 - protein, 15 aa, synthetic construct
AKREGRGIRAPINSS

SEQ ID NO: 37178 - protein, 18 aa, synthetic construct
AKREPSYVATGGYTDKLI

SEQ ID NO: 37179 - protein, 17 aa, synthetic construct
AKREGSRATGGYTDKLI

SEQ ID NO: 37180 - protein, 17 aa, synthetic construct
AKREGSVTGGRYTDKLI

SEQ ID NO: 37181 - protein, 12 aa, synthetic construct
AKREGTGGYSLI

SEQ ID NO: 37182 - protein, 13 aa, synthetic construct
AKREGWWIPDKLI

SEQ ID NO: 37183 - protein, 14 aa, synthetic construct
AKREHTGAYGDKLI

SEQ ID NO: 37184 - protein, 15 aa, synthetic construct
AKREIPTCGDTDKLI

SEQ ID NO: 37185 - protein, 15 aa, synthetic construct
AKRENTGGYGTDKLI

SEQ ID NO: 37186 - protein, 17 aa, synthetic construct
AKREPCLPRGDTGDKLI

SEQ ID NO: 37187 - protein, 10 aa, synthetic construct
AKREPFDKLI

SEQ ID NO: 37188 - protein, 14 aa, synthetic construct
AKREPGDTRTDKLI

SEQ ID NO: 37189 - protein, 18 aa, synthetic construct
AKREPSYVATGDTPINSS

SEQ ID NO: 37190 - protein, 12 aa, synthetic construct
AKWGIQYTDELI

SEQ ID NO: 37191 - protein, 9 aa, synthetic construct
ALGDNDKLI

SEQ ID NO: 37192 - protein, 15 aa, synthetic construct
ALREGNFWGTLDKLI

SEQ ID NO: 37193 - protein, 18 aa, synthetic construct
ALGEKGTFLPVWGGDKLI

SEQ ID NO: 37194 - protein, 17 aa, synthetic construct
ALREGATLLGDTPINSS

SEQ ID NO: 37195 - protein, 13 aa, synthetic construct
ALREGDTRTINSS

SEQ ID NO: 37196 - protein, 14 aa, synthetic construct
ALREGEGDTPINSS

SEQ ID NO: 37197 - protein, 14 aa, synthetic construct
ALREGEGGYPDKLI

SEQ ID NO: 37198 - protein, 12 aa, synthetic construct
ALREGGDPRGLI

SEQ ID NO: 37199 - protein, 14 aa, synthetic construct
ALREGGGGHTDKLI

SEQ ID NO: 37200 - protein, 12 aa, synthetic construct
ALREGGGIGKLI

SEQ ID NO: 37201 - protein, 12 aa, synthetic construct
ALREGGGIGRLI

SEQ ID NO: 37202 - protein, 18 aa, synthetic construct
ALREGGGLNLSSWDTQQM

SEQ ID NO: 37203 - protein, 13 aa, synthetic construct
ALREGGIPSDKLI

SEQ ID NO: 37204 - protein, 19 aa, synthetic construct
ALREGGLKDTGGCTPINSS

SEQ ID NO: 37205 - protein, 15 aa, synthetic construct
ALREGGVGGYGDKLI

SEQ ID NO: 37206 - protein, 15 aa, synthetic construct
ALREGGWGIRGDKLI

SEQ ID NO: 37207 - protein, 12 aa, synthetic construct
ALREGGWVDKLI

SEQ ID NO: 37208 - protein, 16 aa, synthetic construct
ALREGHPTCRDTDKLI

SEQ ID NO: 37209 - protein, 15 aa, synthetic construct
ALREGHWGVYTDKLI

SEQ ID NO: 37210 - protein, 13 aa, synthetic construct
ALREGLGDTAKLI

SEQ ID NO: 37211 - protein, 13 aa, synthetic construct
ALREGLGDTDKLI

SEQ ID NO: 37212 - protein, 14 aa, synthetic construct
ALREGLGEYTDKLI

SEQ ID NO: 37213 - protein, 14 aa, synthetic construct
ALREGLGVGTDKLI

SEQ ID NO: 37214 - protein, 14 aa, synthetic construct
ALREGLGVHTDKLV

SEQ ID NO: 37215 - protein, 17 aa, synthetic construct
ALREGLPTGGYDSDKLI

SEQ ID NO: 37216 - protein, 16 aa, synthetic construct
ALREGLPTGGYTDKLI

SEQ ID NO: 37217 - protein, 15 aa, synthetic construct
ALREGLRGGIRDKLI

SEQ ID NO: 37218 - protein, 14 aa, synthetic construct
ALREGLVGDTDKLI

SEQ ID NO: 37219 - protein, 17 aa, synthetic construct
ALREGASPVLGDTDTLI

SEQ ID NO: 37220 - protein, 15 aa, synthetic construct
ALREGALGGYTDKLI

SEQ ID NO: 37221 - protein, 5 aa, synthetic construct
ALREG

SEQ ID NO: 37222 - protein, 14 aa, synthetic construct
ALRDLLGLYTDKLI

SEQ ID NO: 37223 - protein, 13 aa, synthetic construct
ALGGGYGGPINSS

SEQ ID NO: 37224 - protein, 11 aa, synthetic construct
ALGLGDPDKLI

SEQ ID NO: 37225 - protein, 9 aa, synthetic construct
ALGTPINSS

SEQ ID NO: 37226 - protein, 13 aa, synthetic construct
ALIGDNGYTDKLI

SEQ ID NO: 37227 - protein, 13 aa, synthetic construct
ALIYWGIRSDKLI

SEQ ID NO: 37228 - protein, 13 aa, synthetic construct
ALRAILGDTDKLI

SEQ ID NO: 37229 - protein, 14 aa, synthetic construct
ALRALTGGHTDKLI

SEQ ID NO: 37230 - protein, 13 aa, synthetic construct
ALRAPSMYWGIPI

SEQ ID NO: 37231 - protein, 12 aa, synthetic construct
ALRAWGISIISS

SEQ ID NO: 37232 - protein, 13 aa, synthetic construct
ALRAYVGPTDKLI

SEQ ID NO: 37233 - protein, 14 aa, synthetic construct
ALRDLLGANTDKLI

SEQ ID NO: 37234 - protein, 13 aa, synthetic construct
ALRDLSSYTAQLI

SEQ ID NO: 37235 - protein, 14 aa, synthetic construct
ALREFLLGVTDKLI

SEQ ID NO: 37236 - protein, 15 aa, synthetic construct
ALRDSSGGYAADKLI

SEQ ID NO: 37237 - protein, 13 aa, synthetic construct
ALRDYWGTGGKLI

SEQ ID NO: 37238 - protein, 15 aa, synthetic construct
ALREAFLPGTPINSS

SEQ ID NO: 37239 - protein, 11 aa, synthetic construct
ALREAGGYKLI

SEQ ID NO: 37240 - protein, 14 aa, synthetic construct
ALREAVLGDADKLI

SEQ ID NO: 37241 - protein, 21 aa, synthetic construct
ALREAYLPTSMGGRECTDKLI

SEQ ID NO: 37242 - protein, 15 aa, synthetic construct
ALRECTGGTGTAQLF

SEQ ID NO: 37243 - protein, 14 aa, synthetic construct
ALREDASSWDTRQM

SEQ ID NO: 37244 - protein, 17 aa, synthetic construct
ALREDYSYRGSYTNKLI

SEQ ID NO: 37245 - protein, 13 aa, synthetic construct
ALREEDTGTDKLI

SEQ ID NO: 37246 - protein, 12 aa, synthetic construct
ALREEGHPAQLF

SEQ ID NO: 37247 - protein, 14 aa, synthetic construct
AKREGGGPTPMNSS

SEQ ID NO: 37248 - protein, 14 aa, synthetic construct
AKREGGGGYTDKLI

SEQ ID NO: 37249 - protein, 14 aa, synthetic construct
AKREGELGDPDKLI

SEQ ID NO: 37250 - protein, 10 aa, synthetic construct
AKREGDTQLI

SEQ ID NO: 37251 - protein, 16 aa, synthetic construct
AIRDLLGDTVYTDKLI

SEQ ID NO: 37252 - protein, 11 aa, synthetic construct
AIRDPYTDKLI

SEQ ID NO: 37253 - protein, 14 aa, synthetic construct
AIRDTGGYNADKII

SEQ ID NO: 37254 - protein, 18 aa, synthetic construct
AIREAFLRVGGGHTDKLI

SEQ ID NO: 37255 - protein, 15 aa, synthetic construct
AIREAWGIRGTDKLI

SEQ ID NO: 37256 - protein, 15 aa, synthetic construct
AIRECTGGTGTAQLF

SEQ ID NO: 37257 - protein, 17 aa, synthetic construct
AIREDFLPLLGDTDKLI

SEQ ID NO: 37258 - protein, 15 aa, synthetic construct
AIREGALGGYTDKLI

SEQ ID NO: 37259 - protein, 13 aa, synthetic construct
AIREGDGYTDKLI

SEQ ID NO: 37260 - protein, 16 aa, synthetic construct
AIREGDWGIPHTDKLI

SEQ ID NO: 37261 - protein, 17 aa, synthetic construct
AIREGEASYAFTVDKLI

SEQ ID NO: 37262 - protein, 13 aa, synthetic construct
AIREGGDTADKLI

SEQ ID NO: 37263 - protein, 13 aa, synthetic construct
AIREGGGFTDKLI

SEQ ID NO: 37264 - protein, 14 aa, synthetic construct
AIREGLGDTTEKLI

SEQ ID NO: 37265 - protein, 13 aa, synthetic construct
AIREGLGNTAKLI

SEQ ID NO: 37266 - protein, 14 aa, synthetic construct
AIREGLPGWPDKLI

SEQ ID NO: 37267 - protein, 15 aa, synthetic construct
AIREGNFWGTLDKLI

SEQ ID NO: 37268 - protein, 11 aa, synthetic construct
AIREGNTDKLI

SEQ ID NO: 37269 - protein, 13 aa, synthetic construct
AIREGNWGFYKLI

SEQ ID NO: 37270 - protein, 16 aa, synthetic construct
AIREGPPLLGDTDKLT

SEQ ID NO: 37271 - protein, 17 aa, synthetic construct
AIREGPPWYWGPTDKLI

SEQ ID NO: 37272 - protein, 12 aa, synthetic construct
AIREGRLCDKLI

SEQ ID NO: 37273 - protein, 16 aa, synthetic construct
AIREGSTRIGIPINSS

SEQ ID NO: 37274 - protein, 15 aa, synthetic construct
AIREGSVWGKGDKLI

SEQ ID NO: 37275 - protein, 15 aa, synthetic construct
AIREGTAAPYTDKLI

SEQ ID NO: 37276 - protein, 14 aa, synthetic construct
AIRDFLPSVTDKLI

SEQ ID NO: 37277 - protein, 13 aa, synthetic construct
AIRAWGKYTDKLI

SEQ ID NO: 37278 - protein, 13 aa, synthetic construct
AIRATGGSGDKLI

SEQ ID NO: 37279 - protein, 16 aa, synthetic construct
AHRDLPTCPRVPDKLI

SEQ ID NO: 37280 - protein, 6 aa, synthetic construct
ACDKLV

SEQ ID NO: 37281 - protein, 6 aa, synthetic construct
ACDKPI

SEQ ID NO: 37282 - skipped

SEQ ID NO: 37283 - protein, 13 aa, synthetic construct
ADREYWGMSDKLI

SEQ ID NO: 37284 - protein, 12 aa, synthetic construct
ADSPPPDTGTLI

SEQ ID NO: 37285 - protein, 12 aa, synthetic construct
ADSPPPYTAQLI

SEQ ID NO: 37286 - protein, 12 aa, synthetic construct
ADSPPPYTEKRI

SEQ ID NO: 37287 - protein, 12 aa, synthetic construct
ADSRPPVAVGVM

SEQ ID NO: 37288 - protein, 15 aa, synthetic construct
AEREGGWGPTPINSS

SEQ ID NO: 37289 - protein, 12 aa, synthetic construct
AEREGGWVDKLI

SEQ ID NO: 37290 - protein, 9 aa, synthetic construct
AGYGDDKLI

SEQ ID NO: 37291 - protein, 14 aa, synthetic construct
AHRGKYWGIPDKLI

SEQ ID NO: 37292 - protein, 16 aa, synthetic construct
AIRAGLLGATYTDKLI

SEQ ID NO: 37293 - protein, 13 aa, synthetic construct
AIEKGGGNPPKHQ

SEQ ID NO: 37294 - protein, 17 aa, synthetic construct
AIGEGLPTGGYDSDKLI

SEQ ID NO: 37295 - protein, 12 aa, synthetic construct
AIGGGYGVDKLI

SEQ ID NO: 37296 - protein, 13 aa, synthetic construct
AIIEGLGDTDKLI

SEQ ID NO: 37297 - protein, 13 aa, synthetic construct
AIIEWGKATDKLI

SEQ ID NO: 37298 - protein, 12 aa, synthetic construct
AIIVLGYTDKLI

SEQ ID NO: 37299 - protein, 10 aa, synthetic construct
AILQGYDKLI

SEQ ID NO: 37300 - protein, 10 aa, synthetic construct
AILRDTINSS

SEQ ID NO: 37301 - protein, 10 aa, synthetic construct
AILRGYDKPI

SEQ ID NO: 37302 - protein, 10 aa, synthetic construct
AIPRVYDKLI

SEQ ID NO: 37303 - protein, 14 aa, synthetic construct
AIRAGGYASTDKLI

SEQ ID NO: 37304 - protein, 15 aa, synthetic construct
AIREGTGAPYTDKFI

SEQ ID NO: 37305 - protein, 15 aa, synthetic construct
AIREGTGAPYTDKLN

SEQ ID NO: 37306 - protein, 15 aa, synthetic construct
AIREGTGAPYTHKHI

SEQ ID NO: 37307 - protein, 14 aa, synthetic construct
AKRAFLRGDTDKLI

SEQ ID NO: 37308 - protein, 16 aa, synthetic construct
AISLLPTGDTYTDKLI

SEQ ID NO: 37309 - protein, 12 aa, synthetic construct
AISRGGYTDKLN

SEQ ID NO: 37310 - protein, 14 aa, synthetic construct
AISSLLGDTGDKLI

SEQ ID NO: 37311 - protein, 11 aa, synthetic construct
AISTGGTINSS

SEQ ID NO: 37312 - protein, 13 aa, synthetic construct
AIVGGYGGPINSS

SEQ ID NO: 37313 - protein, 12 aa, synthetic construct
AIWGGLYTDKLI

SEQ ID NO: 37314 - protein, 14 aa, synthetic construct
AKIEGSIRVPDKLI

SEQ ID NO: 37315 - protein, 15 aa, synthetic construct
AKIRNENWGITDKLI

SEQ ID NO: 37316 - protein, 11 aa, synthetic construct
AKLGDGPINSS

SEQ ID NO: 37317 - protein, 11 aa, synthetic construct
AKLGEGSDKLI

SEQ ID NO: 37318 - protein, 15 aa, synthetic construct
AKQGEGYSPNTDKLI

SEQ ID NO: 37319 - protein, 15 aa, synthetic construct
AKRAVLRDTSTDKLI

SEQ ID NO: 37320 - protein, 15 aa, synthetic construct
AIRVSTRGLGPDKLI

SEQ ID NO: 37321 - protein, 12 aa, synthetic construct
AKRAWGISINSS

SEQ ID NO: 37322 - protein, 16 aa, synthetic construct
AKRDGASDGRSTDKHI

SEQ ID NO: 37323 - protein, 17 aa, synthetic construct
AKRDPSNDWGIQGDKLI

SEQ ID NO: 37324 - protein, 15 aa, synthetic construct
AKRDSQWSRDTDKLI

SEQ ID NO: 37325 - protein, 16 aa, synthetic construct
AKRDWGIRERSTDKLI

SEQ ID NO: 37326 - protein, 15 aa, synthetic construct
AKRDWGIRGLTDKLI

SEQ ID NO: 37327 - protein, 18 aa, synthetic construct
AKREAFLVYWGAYTDKLI

SEQ ID NO: 37328 - protein, 21 aa, synthetic construct
AKREAYLPTSMGGRECTDKLI

SEQ ID NO: 37329 - protein, 14 aa, synthetic construct
AKREEVGKYTDKLI

SEQ ID NO: 37330 - protein, 15 aa, synthetic construct
AKREEVPGGYTDKLI

SEQ ID NO: 37331 - protein, 14 aa, synthetic construct
AKREGAGSYTDKLI

SEQ ID NO: 37332 - protein, 10 aa, synthetic construct
AISAFLDKLI

SEQ ID NO: 37333 - protein, 14 aa, synthetic construct
AIRVLTTGYTDKLI

SEQ ID NO: 37334 - protein, 19 aa, synthetic construct
AIREGVEFIRCGGYPDKLI

SEQ ID NO: 37335 - protein, 18 aa, synthetic construct
AIREVVLGDTTEYTDKLI

SEQ ID NO: 37336 - protein, 12 aa, synthetic construct
AIREGWGQRKLI

SEQ ID NO: 37337 - protein, 11 aa, synthetic construct
AIREILGDKLI

SEQ ID NO: 37338 - protein, 15 aa, synthetic construct
AIREILLGGYTDKLI

SEQ ID NO: 37339 - protein, 12 aa, synthetic construct
AIRELGDTDKLI

SEQ ID NO: 37340 - protein, 18 aa, synthetic construct
AIREPSYCTGGCTPINSS

SEQ ID NO: 37341 - protein, 16 aa, synthetic construct
AIREPYCGILYTDKLI

SEQ ID NO: 37342 - protein, 11 aa, synthetic construct
AIRERARGRSS

SEQ ID NO: 37343 - protein, 16 aa, synthetic construct
AIREREVLGDTVDKLI

SEQ ID NO: 37344 - protein, 9 aa, synthetic construct
AIRETINSS

SEQ ID NO: 37345 - protein, 14 aa, synthetic construct
AIREVLGGYTDKLI

SEQ ID NO: 37346 - protein, 13 aa, synthetic construct
AIREVLWDTDKLI

SEQ ID NO: 37347 - protein, 14 aa, synthetic construct
AIREYEEAYTDKLI

SEQ ID NO: 37348 - protein, 14 aa, synthetic construct
AIRVLPTGYTGKLI

SEQ ID NO: 37349 - protein, 14 aa, synthetic construct
AIRGAVLGDTDKLI

SEQ ID NO: 37350 - protein, 10 aa, synthetic construct
AIRGDTDKLI

SEQ ID NO: 37351 - protein, 11 aa, synthetic construct
AIRGGPLDKLI

SEQ ID NO: 37352 - protein, 7 aa, synthetic construct
AIRGKLI

SEQ ID NO: 37353 - protein, 14 aa, synthetic construct
AIRGKYWGIPDKLI

SEQ ID NO: 37354 - protein, 8 aa, synthetic construct
AIRPDKLI

SEQ ID NO: 37355 - protein, 14 aa, synthetic construct
AIRSPYWGIQAKLI

SEQ ID NO: 37356 - protein, 13 aa, synthetic construct
AIRSYWGIRDKLI

SEQ ID NO: 37357 - protein, 16 aa, synthetic construct
AIRVFPLGGKYTDKLI

SEQ ID NO: 37358 - protein, 14 aa, synthetic construct
AIRVGDRGYTDKLI

SEQ ID NO: 37359 - protein, 12 aa, synthetic construct
AIRVLGNTDKLI

SEQ ID NO: 37360 - protein, 12 aa, synthetic construct
ALREGMGDTWTH

SEQ ID NO: 37361 - protein, 12 aa, synthetic construct
ALREGPGGDKLI

SEQ ID NO: 37362 - protein, 10 aa, synthetic construct
AMKVYTDKLI

SEQ ID NO: 37363 - protein, 18 aa, synthetic construct
AMIESFLLVLGEYTDKLI

SEQ ID NO: 37364 - protein, 13 aa, synthetic construct
AMGLPLYWGDKLI

SEQ ID NO: 37365 - protein, 13 aa, synthetic construct
AMGLPPYWGDKPI

SEQ ID NO: 37366 - protein, 13 aa, synthetic construct
AMGLPPYWGDRLI

SEQ ID NO: 37367 - protein, 12 aa, synthetic construct
AMGPYWGDDKLI

SEQ ID NO: 37368 - protein, 11 aa, synthetic construct
AMGQRDPDKLI

SEQ ID NO: 37369 - protein, 10 aa, synthetic construct
AMGSCDTRHM

SEQ ID NO: 37370 - protein, 14 aa, synthetic construct
AMGSTSLGDTVNSS

SEQ ID NO: 37371 - protein, 12 aa, synthetic construct
AMGVGVNTNKLI

SEQ ID NO: 37372 - protein, 10 aa, synthetic construct
AMIAFLDKLV

SEQ ID NO: 37373 - protein, 16 aa, synthetic construct
AMIDFLSNGVYTDKLI

SEQ ID NO: 37374 - protein, 16 aa, synthetic construct
AMIDLTVGYAFSDKLI

SEQ ID NO: 37375 - protein, 18 aa, synthetic construct
AMIDSFTGGYGCTPINSS

SEQ ID NO: 37376 - protein, 15 aa, synthetic construct
AMIEAFLVLGGYKLI

SEQ ID NO: 37377 - protein, 14 aa, synthetic construct
AMIEGGGGHTDKLI

SEQ ID NO: 37378 - protein, 15 aa, synthetic construct
AMIEGGWGTDTDKLI

SEQ ID NO: 37379 - protein, 14 aa, synthetic construct
AMIEGLGGHTDKLI

SEQ ID NO: 37380 - protein, 17 aa, synthetic construct
AMIEGPLLGDTNTYKLI

SEQ ID NO: 37381 - protein, 15 aa, synthetic construct
AMIEGRTGGSTDKLI

SEQ ID NO: 37382 - protein, 15 aa, synthetic construct
AMIEGSVWGKGDKLI

SEQ ID NO: 37383 - protein, 15 aa, synthetic construct
AMIEGVLGDTPINSS

SEQ ID NO: 37384 - protein, 13 aa, synthetic construct
AMIEGWGIRDKLI

SEQ ID NO: 37385 - protein, 16 aa, synthetic construct
AMIEGWGLPSLTAQLF

SEQ ID NO: 37386 - protein, 14 aa, synthetic construct
AMIEGYWGIPDKLI

SEQ ID NO: 37387 - protein, 13 aa, synthetic construct
AMIEILEGPDKLI

SEQ ID NO: 37388 - protein, 14 aa, synthetic construct
AMIENWGILTDKLI

SEQ ID NO: 37389 - protein, 11 aa, synthetic construct
AMGLGDPENLI

SEQ ID NO: 37390 - protein, 11 aa, synthetic construct
AMGLGDPDKLM

SEQ ID NO: 37391 - protein, 12 aa, synthetic construct
AMGLGDKGDKLI

SEQ ID NO: 37392 - protein, 13 aa, synthetic construct
AMGEVWGDTGKLI

SEQ ID NO: 37393 - protein, 15 aa, synthetic construct
AMGEGYVGIPTDKLI

SEQ ID NO: 37394 - protein, 18 aa, synthetic construct
AMGEKGTFLPVWGGDKLI

SEQ ID NO: 37395 - protein, 6 aa, synthetic construct
AMGELI

SEQ ID NO: 37396 - protein, 11 aa, synthetic construct
AMGERDTDKLI

SEQ ID NO: 37397 - protein, 10 aa, synthetic construct
AMGERGYALI

SEQ ID NO: 37398 - protein, 12 aa, synthetic construct
AMGERIYTNKLI

SEQ ID NO: 37399 - protein, 12 aa, synthetic construct
AMGESTGGNKLI

SEQ ID NO: 37400 - protein, 17 aa, synthetic construct
AMGETSQYWGIPLRLTH

SEQ ID NO: 37401 - protein, 12 aa, synthetic construct
AMGEVLGDLKLI

SEQ ID NO: 37402 - protein, 14 aa, synthetic construct
AMGEVLGGYTDKLI

SEQ ID NO: 37403 - protein, 15 aa, synthetic construct
AMGEVLYWGIPKNSS

SEQ ID NO: 37404 - protein, 17 aa, synthetic construct
AMGEYLRLGDTRAINSS

SEQ ID NO: 37405 - protein, 12 aa, synthetic construct
AMGKHPMTAQLF

SEQ ID NO: 37406 - protein, 13 aa, synthetic construct
AMGEYWGDTDKLI

SEQ ID NO: 37407 - protein, 21 aa, synthetic construct
AMGGALGVVYACGSALTAQLF

SEQ ID NO: 37408 - protein, 13 aa, synthetic construct
AMGGGYGGPINSA

SEQ ID NO: 37409 - protein, 10 aa, synthetic construct
AMGGIPINSS

SEQ ID NO: 37410 - protein, 6 aa, synthetic construct
AMGGLV

SEQ ID NO: 37411 - protein, 15 aa, synthetic construct
AMGGPGDTGDTDKLI

SEQ ID NO: 37412 - protein, 14 aa, synthetic construct
AMGGPYGDTPDKLI

SEQ ID NO: 37413 - protein, 13 aa, synthetic construct
AMGGTGGYPDKLI

SEQ ID NO: 37414 - protein, 14 aa, synthetic construct
AMGGWGIQYTDKLI

SEQ ID NO: 37415 - protein, 13 aa, synthetic construct
AMGILHWGTDKLI

SEQ ID NO: 37416 - protein, 15 aa, synthetic construct
AMGIPTSTGGTDKLI

SEQ ID NO: 37417 - protein, 15 aa, synthetic construct
AMIEPCTGKYTDKLI

SEQ ID NO: 37418 - protein, 16 aa, synthetic construct
AMIESLGDTGYTDKLI

SEQ ID NO: 37419 - protein, 16 aa, synthetic construct
ALREGPLGDTPGTPDR

SEQ ID NO: 37420 - protein, 12 aa, synthetic construct
AMIETPDTDKLI

SEQ ID NO: 37421 - protein, 13 aa, synthetic construct
AMIYWGTRSDKLI

SEQ ID NO: 37422 - protein, 14 aa, synthetic construct
AMKAGGYAGTDKLI

SEQ ID NO: 37423 - protein, 16 aa, synthetic construct
AMKEAGGYPGSTDKLI

SEQ ID NO: 37424 - protein, 14 aa, synthetic construct
AMKEAVLGDTDKLI

SEQ ID NO: 37425 - protein, 14 aa, synthetic construct
AMKECLGAYTDKLI

SEQ ID NO: 37426 - protein, 15 aa, synthetic construct
AMKEFLVLGATDKLI

SEQ ID NO: 37427 - protein, 15 aa, synthetic construct
AMKEGDWGIRTDKLI

SEQ ID NO: 37428 - protein, 14 aa, synthetic construct
AMKEGGYATPINSS

SEQ ID NO: 37429 - protein, 17 aa, synthetic construct
AMKEGHLLLGDKGDKLI

SEQ ID NO: 37430 - protein, 16 aa, synthetic construct
AMKEGHTGGAYTDKLI

SEQ ID NO: 37431 - protein, 12 aa, synthetic construct
AMKEGRGIPKLI

SEQ ID NO: 37432 - protein, 11 aa, synthetic construct
AMKEILGDKLI

SEQ ID NO: 37433 - protein, 13 aa, synthetic construct
AMKELLRDTDKLI

SEQ ID NO: 37434 - protein, 16 aa, synthetic construct
AMKESYGYWGYTDKLI

SEQ ID NO: 37435 - protein, 15 aa, synthetic construct
AMKESYVWGAARPLI

SEQ ID NO: 37436 - protein, 16 aa, synthetic construct
AMKESYVWGSYTDKLI

SEQ ID NO: 37437 - protein, 14 aa, synthetic construct
AMKEYWGIRGDKLI

SEQ ID NO: 37438 - protein, 15 aa, synthetic construct
AMKGITGGYVTDKLI

SEQ ID NO: 37439 - protein, 15 aa, synthetic construct
AMKGPGDTGDTDKLI

SEQ ID NO: 37440 - protein, 12 aa, synthetic construct
AMKGYWETDNLI

SEQ ID NO: 37441 - protein, 12 aa, synthetic construct
AMKGYWGNDKLI

SEQ ID NO: 37442 - protein, 12 aa, synthetic construct
AMKGYWGTDKII

SEQ ID NO: 37443 - protein, 12 aa, synthetic construct
AMKGYWGTDKPI

SEQ ID NO: 37444 - protein, 13 aa, synthetic construct
AMKLGDTPDRYTH

SEQ ID NO: 37445 - protein, 9 aa, synthetic construct
AMKSSNKII

SEQ ID NO: 37446 - protein, 12 aa, synthetic construct
AMIYWGITDKLI

SEQ ID NO: 37447 - protein, 13 aa, synthetic construct
AMIYWGIRSDKHI

SEQ ID NO: 37448 - protein, 12 aa, synthetic construct
AMIWGIRTDKLI

SEQ ID NO: 37449 - protein, 15 aa, synthetic construct
AMIGPSFLLGDDKLI

SEQ ID NO: 37450 - protein, 14 aa, synthetic construct
AMIETSYGDTDKLI

SEQ ID NO: 37451 - protein, 15 aa, synthetic construct
AMIEVLHWGIRGKLI

SEQ ID NO: 37452 - protein, 15 aa, synthetic construct
AMIEVLYWGIPKNSS

SEQ ID NO: 37453 - protein, 15 aa, synthetic construct
AMIEVWDTPGPDKLI

SEQ ID NO: 37454 - protein, 14 aa, synthetic construct
AMIEWGDTYTDKLI

SEQ ID NO: 37455 - protein, 17 aa, synthetic construct
AMIEYTTWDTRSTDKLI

SEQ ID NO: 37456 - protein, 13 aa, synthetic construct
AMIGDNGYSDKLI

SEQ ID NO: 37457 - protein, 13 aa, synthetic construct
AMIGDNGYTDKLT

SEQ ID NO: 37458 - protein, 13 aa, synthetic construct
AMIGDNGYTGKLI

SEQ ID NO: 37459 - protein, 11 aa, synthetic construct
AMIGGPLDKLI

SEQ ID NO: 37460 - protein, 11 aa, synthetic construct
AMIGGTLDKLI

SEQ ID NO: 37461 - protein, 15 aa, synthetic construct
AMIIKEYWGITDKLI

SEQ ID NO: 37462 - protein, 13 aa, synthetic construct
AMIWDNGYTDKLI

SEQ ID NO: 37463 - protein, 13 aa, synthetic construct
AMIILGDYTDKLT

SEQ ID NO: 37464 - protein, 13 aa, synthetic construct
AMIILGGYTDKHI

SEQ ID NO: 37465 - protein, 15 aa, synthetic construct
AMILGDPQAYTDKLI

SEQ ID NO: 37466 - protein, 13 aa, synthetic construct
AMILYWGIGDKLI

SEQ ID NO: 37467 - protein, 12 aa, synthetic construct
AMIPAVDTDKLI

SEQ ID NO: 37468 - protein, 15 aa, synthetic construct
AMIPVLRDTGTDKLI

SEQ ID NO: 37469 - protein, 12 aa, synthetic construct
AMIPYWGDDKLI

SEQ ID NO: 37470 - protein, 15 aa, synthetic construct
AMIRKEYWGITDRLI

SEQ ID NO: 37471 - protein, 13 aa, synthetic construct
AMISPYWGIRNST

SEQ ID NO: 37472 - protein, 13 aa, synthetic construct
AMIVSYGDTGDTH

SEQ ID NO: 37473 - protein, 11 aa, synthetic construct
AMIVWGVPKLI

SEQ ID NO: 37474 - protein, 12 aa, synthetic construct
AMGEGWGLLRAH

SEQ ID NO: 37475 - protein, 12 aa, synthetic construct
AMGEGWGIRLLI

SEQ ID NO: 37476 - protein, 15 aa, synthetic construct
AMGEGWGIRGADKLI

SEQ ID NO: 37477 - protein, 15 aa, synthetic construct
AMGEGTGGYFTDKLI

SEQ ID NO: 37478 - protein, 17 aa, synthetic construct
ALRENYGWGIPTPINSS

SEQ ID NO: 37479 - protein, 19 aa, synthetic construct
ALREPGRVLGDTRNTDKRL

SEQ ID NO: 37480 - protein, 16 aa, synthetic construct
ALRERVVLGDTTDKLI

SEQ ID NO: 37481 - protein, 12 aa, synthetic construct
ALRESPGTDKLI

SEQ ID NO: 37482 - protein, 17 aa, synthetic construct
ALRETFLRRWGITEKLI

SEQ ID NO: 37483 - protein, 15 aa, synthetic construct
ALRETTGGYGTDKLI

SEQ ID NO: 37484 - protein, 16 aa, synthetic construct
ALREVCWGIHWDPRQM

SEQ ID NO: 37485 - protein, 16 aa, synthetic construct
ALREVLGAPPRSEKLI

SEQ ID NO: 37486 - protein, 13 aa, synthetic construct
ALREVLGDTCKLI

SEQ ID NO: 37487 - protein, 14 aa, synthetic construct
ALREVLGNGGDKLI

SEQ ID NO: 37488 - protein, 15 aa, synthetic construct
ALREVLLGDLTDKLI

SEQ ID NO: 37489 - protein, 10 aa, synthetic construct
ALREVLPTGT

SEQ ID NO: 37490 - protein, 17 aa, synthetic construct
ALREVPTSRGSLTAQLF

SEQ ID NO: 37491 - protein, 14 aa, synthetic construct
ALREVPTWGIDKLI

SEQ ID NO: 37492 - protein, 18 aa, synthetic construct
ALREVVLGDTTEYTDKLI

SEQ ID NO: 37493 - protein, 18 aa, synthetic construct
ALREYLPTWGIPYPDKLI

SEQ ID NO: 37494 - protein, 17 aa, synthetic construct
ALREYLRLGDTRAINSS

SEQ ID NO: 37495 - protein, 14 aa, synthetic construct
ALREYWGEYTDKLI

SEQ ID NO: 37496 - protein, 14 aa, synthetic construct
ALREYWGIRADKLI

SEQ ID NO: 37497 - protein, 11 aa, synthetic construct
ALREYWGMGSS

SEQ ID NO: 37498 - protein, 10 aa, synthetic construct
ALRGDTDKLI

SEQ ID NO: 37499 - protein, 9 aa, synthetic construct
ALRGFLQSL

SEQ ID NO: 37500 - protein, 13 aa, synthetic construct
ALRGGGMRTINSS

SEQ ID NO: 37501 - protein, 11 aa, synthetic construct
ALRGGIPINSS

SEQ ID NO: 37502 - protein, 12 aa, synthetic construct
ALRGGPTLINSS

SEQ ID NO: 37503 - protein, 15 aa, synthetic construct
ALRENTGGYGTDKLI

SEQ ID NO: 37504 - protein, 12 aa, synthetic construct
ALRELGIPINSS

SEQ ID NO: 37505 - protein, 15 aa, synthetic construct
ALRELGDTPYTEKLI

SEQ ID NO: 37506 - protein, 12 aa, synthetic construct
ALREGRGTDKLI

SEQ ID NO: 37507 - protein, 20 aa, synthetic construct
ALREGPLPSRLLGAGADKLI

SEQ ID NO: 37508 - protein, 13 aa, synthetic construct
ALREGPLPTDKLI

SEQ ID NO: 37509 - protein, 16 aa, synthetic construct
ALREGPLPWGIRINSS

SEQ ID NO: 37510 - protein, 13 aa, synthetic construct
ALREGPRGYVRLI

SEQ ID NO: 37511 - protein, 15 aa, synthetic construct
ALREGPTSWDTDKLI

SEQ ID NO: 37512 - protein, 15 aa, synthetic construct
ALREGPVLGDNDKLI

SEQ ID NO: 37513 - protein, 15 aa, synthetic construct
ALREGPYGDPGDKLI

SEQ ID NO: 37514 - protein, 15 aa, synthetic construct
ALREGPYGDTGDKLI

SEQ ID NO: 37515 - protein, 12 aa, synthetic construct
ALREGRGADKLI

SEQ ID NO: 37516 - protein, 13 aa, synthetic construct
ALREGRGDTDKLI

SEQ ID NO: 37517 - protein, 13 aa, synthetic construct
ALREGRGSTDKLI

SEQ ID NO: 37518 - protein, 14 aa, synthetic construct
ALREGRIRVPDKLI

SEQ ID NO: 37519 - protein, 15 aa, synthetic construct
ALRELGDTPYTDKLI

SEQ ID NO: 37520 - protein, 12 aa, synthetic construct
ALREGRLCDKLI

SEQ ID NO: 37521 - protein, 15 aa, synthetic construct
ALREGRWDTDTDKLI

SEQ ID NO: 37522 - protein, 18 aa, synthetic construct
ALREGRWGIRKLLGHPTD

SEQ ID NO: 37523 - protein, 17 aa, synthetic construct
ALREGSYTLLGDPDKLI

SEQ ID NO: 37524 - protein, 15 aa, synthetic construct
ALREGTGGYFSDKLL

SEQ ID NO: 37525 - protein, 16 aa, synthetic construct
ALREGTGGYGTPINSS

SEQ ID NO: 37526 - protein, 19 aa, synthetic construct
ALREGVEFLRCGGYPDKLT

SEQ ID NO: 37527 - protein, 16 aa, synthetic construct
ALREGVWGIQYTDKLI

SEQ ID NO: 37528 - protein, 14 aa, synthetic construct
ALREGWGILGDKLI

SEQ ID NO: 37529 - protein, 13 aa, synthetic construct
ALREGWGYPINSS

SEQ ID NO: 37530 - protein, 13 aa, synthetic construct
ALREGYWGPLGLI

SEQ ID NO: 37531 - protein, 12 aa, synthetic construct
ALRGGPTPINSS

SEQ ID NO: 37532 - protein, 17 aa, synthetic construct
ALRGGRKTGGYSLDKLI

SEQ ID NO: 37533 - protein, 16 aa, synthetic construct
ALRGLLGDTWNTDKLI

SEQ ID NO: 37534 - protein, 13 aa, synthetic construct
AMGEGEGDTGKLI

SEQ ID NO: 37535 - protein, 14 aa, synthetic construct
AMGCVLGDKGDKLI

SEQ ID NO: 37536 - protein, 12 aa, synthetic construct
AMGDGGYADKLI

SEQ ID NO: 37537 - protein, 14 aa, synthetic construct
AMGDILVRWIPKLI

SEQ ID NO: 37538 - protein, 14 aa, synthetic construct
AMGEAGGPFDSTTL

SEQ ID NO: 37539 - protein, 15 aa, synthetic construct
AMGEALGDTWTDKLI

SEQ ID NO: 37540 - protein, 15 aa, synthetic construct
AMGEALLGVYTDKLI

SEQ ID NO: 37541 - protein, 14 aa, synthetic construct
AMGEEYEGNTDKLI

SEQ ID NO: 37542 - protein, 13 aa, synthetic construct
AMGEFLGDTDKLI

SEQ ID NO: 37543 - protein, 17 aa, synthetic construct
AMGEGALLGVPYTDKLI

SEQ ID NO: 37544 - protein, 17 aa, synthetic construct
AMGEGASPVLGDTDKLI

SEQ ID NO: 37545 - protein, 13 aa, synthetic construct
AMGEGDWGPINSS

SEQ ID NO: 37546 - protein, 17 aa, synthetic construct
AMGEGEPSYAFTVDKLI

SEQ ID NO: 37547 - protein, 15 aa, synthetic construct
AMGAVLGDKYTDKLI

SEQ ID NO: 37548 - protein, 14 aa, synthetic construct
AMGEGGDFYTDKLI

SEQ ID NO: 37549 - protein, 13 aa, synthetic construct
AMGEGGGPKPINS

SEQ ID NO: 37550 - protein, 13 aa, synthetic construct
AMGEGGYGVDKLI

SEQ ID NO: 37551 - protein, 13 aa, synthetic construct
AMGEGLGDTGKLI

SEQ ID NO: 37552 - protein, 17 aa, synthetic construct
AMGEGLPSYWGTTDKLI

SEQ ID NO: 37553 - protein, 14 aa, synthetic construct
AMGEGPGGYADKLI

SEQ ID NO: 37554 - protein, 17 aa, synthetic construct
AMGEGPHVGICTPINSS

SEQ ID NO: 37555 - protein, 14 aa, synthetic construct
AMGEGPTGDTLNSS

SEQ ID NO: 37556 - protein, 13 aa, synthetic construct
AMGEGRGDTDKLI

SEQ ID NO: 37557 - protein, 16 aa, synthetic construct
AMGEGSHTGGSPINSS

SEQ ID NO: 37558 - protein, 15 aa, synthetic construct
AMGEGSVWGKGDKLI

SEQ ID NO: 37559 - protein, 13 aa, synthetic construct
AMGAWGIRPINSS

SEQ ID NO: 37560 - protein, 17 aa, synthetic construct
AMGAFLVRWGSTPINSS

SEQ ID NO: 37561 - protein, 18 aa, synthetic construct
ALRGLPTGRWGIPTDKLI

SEQ ID NO: 37562 - protein, 14 aa, synthetic construct
ALRSPYWGIQAKLI

SEQ ID NO: 37563 - protein, 13 aa, synthetic construct
ALRGNEGGTDKLI

SEQ ID NO: 37564 - protein, 13 aa, synthetic construct
ALRGNWGIPDKLI

SEQ ID NO: 37565 - protein, 18 aa, synthetic construct
ALRGTFLHTGGYLTDKLI

SEQ ID NO: 37566 - protein, 13 aa, synthetic construct
ALRGVWGDTGKLI

SEQ ID NO: 37567 - protein, 14 aa, synthetic construct
ALRGWGIREDSTTL

SEQ ID NO: 37568 - protein, 18 aa, synthetic construct
ALRGWPSSFTGGHTDKLI

SEQ ID NO: 37569 - protein, 16 aa, synthetic construct
ALRGYWGILGNTDKLI

SEQ ID NO: 37570 - protein, 12 aa, synthetic construct
ALRKLGDADKLI

SEQ ID NO: 37571 - protein, 11 aa, synthetic construct
ALRLGGPINSS

SEQ ID NO: 37572 - protein, 12 aa, synthetic construct
ALRLLGDTDKLI

SEQ ID NO: 37573 - protein, 12 aa, synthetic construct
ALRMGDTTDKLI

SEQ ID NO: 37574 - protein, 12 aa, synthetic construct
ALRVGGDNDKLI

SEQ ID NO: 37575 - protein, 13 aa, synthetic construct
AMFPTPGIPINSS

SEQ ID NO: 37576 - protein, 13 aa, synthetic construct
ALRVGGYRADKLI

SEQ ID NO: 37577 - protein, 13 aa, synthetic construct
ALRVLGDTADKLI

SEQ ID NO: 37578 - protein, 12 aa, synthetic construct
ALRVLGDTDKLI

SEQ ID NO: 37579 - protein, 10 aa, synthetic construct
ALSAFLDKLI

SEQ ID NO: 37580 - protein, 19 aa, synthetic construct
ALSEGLPTDDWGIPARPLI

SEQ ID NO: 37581 - protein, 14 aa, synthetic construct
ALSIYWGIRNDKLI

SEQ ID NO: 37582 - protein, 12 aa, synthetic construct
ALSPYWGDDKLI

SEQ ID NO: 37583 - protein, 11 aa, synthetic construct
ALSTGGPINSS

SEQ ID NO: 37584 - protein, 13 aa, synthetic construct
AMCLPPNWGDKII

SEQ ID NO: 37585 - protein, 13 aa, synthetic construct
AMCLPPYWGDKLI

SEQ ID NO: 37586 - protein, 13 aa, synthetic construct
AMFGDNGYTDKLI

SEQ ID NO: 37587 - protein, 14 aa, synthetic construct
AMREGCGIRPHKII

SEQ ID NO: 37588 - protein, 14 aa, synthetic construct
AMREGDAGYTGKLI

SEQ ID NO: 37589 - protein, 16 aa, synthetic construct
AMRESTGGYSVTAKLF

SEQ ID NO: 37590 - protein, 12 aa, synthetic construct
AMREHPMTAQLF

SEQ ID NO: 37591 - protein, 16 aa, synthetic construct
AMREGWVIPSLTAQLF

SEQ ID NO: 37592 - protein, 14 aa, synthetic construct
AMREGWWGIPAKLI

SEQ ID NO: 37593 - protein, 14 aa, synthetic construct
AMREGWWGTPDKLI

SEQ ID NO: 37594 - protein, 15 aa, synthetic construct
AMREGWWGVYTDKII

SEQ ID NO: 37595 - protein, 15 aa, synthetic construct
AMREGWWGVYTDKLN

SEQ ID NO: 37596 - protein, 14 aa, synthetic construct
AMREGWYTGTDKII

SEQ ID NO: 37597 - protein, 14 aa, synthetic construct
AMREGYATGPINSS

SEQ ID NO: 37598 - protein, 18 aa, synthetic construct
AMREGYCAGGYRRTDKLI

SEQ ID NO: 37599 - protein, 15 aa, synthetic construct
AMREGYEGIPTDKLI

SEQ ID NO: 37600 - protein, 13 aa, synthetic construct
AMREGYGAPDKLI

SEQ ID NO: 37601 - protein, 10 aa, synthetic construct
AMREGYGPLI

SEQ ID NO: 37602 - protein, 17 aa, synthetic construct
AMREGYGVLGDHTDKLI

SEQ ID NO: 37603 - protein, 11 aa, synthetic construct
AMREGYTDKLI

SEQ ID NO: 37604 - protein, 16 aa, synthetic construct
AMREGYTRIGIPINSS

SEQ ID NO: 37605 - protein, 15 aa, synthetic construct
AMREGYVGIPIDKLI

SEQ ID NO: 37606 - protein, 15 aa, synthetic construct
AMREGYVGIPPINSS

SEQ ID NO: 37607 - protein, 17 aa, synthetic construct
AMREGYVVLGDHTDQLI

SEQ ID NO: 37608 - protein, 17 aa, synthetic construct
AMREGYVVLGDHTGKLI

SEQ ID NO: 37609 - protein, 17 aa, synthetic construct
AMREGYVVLGDTPINSS

SEQ ID NO: 37610 - protein, 17 aa, synthetic construct
AMREGYVVLGETPINSS

SEQ ID NO: 37611 - protein, 17 aa, synthetic construct
AMREGYVVQGDHTDKLS

SEQ ID NO: 37612 - protein, 13 aa, synthetic construct
AMREGYWGPLGPI

SEQ ID NO: 37613 - protein, 17 aa, synthetic construct
AMREGYYAGGYRPINSS

SEQ ID NO: 37614 - protein, 18 aa, synthetic construct
AMREGYYAGGYRRTDKPI

SEQ ID NO: 37615 - protein, 18 aa, synthetic construct
AMREGYYAGGYRRTNKLI

SEQ ID NO: 37616 - protein, 16 aa, synthetic construct
AMREGWRIPSLTAQLF

SEQ ID NO: 37617 - protein, 13 aa, synthetic construct
AMREGWRIPDKLI

SEQ ID NO: 37618 - protein, 11 aa, synthetic construct
AMREGWPEKLI

SEQ ID NO: 37619 - protein, 16 aa, synthetic construct
AMREGWGIPSLTAQIF

SEQ ID NO: 37620 - protein, 14 aa, synthetic construct
AMREGWAIPTDKLI

SEQ ID NO: 37621 - protein, 14 aa, synthetic construct
AMREGWAIRPDKLI

SEQ ID NO: 37622 - protein, 13 aa, synthetic construct
AMREGWGDADKLI

SEQ ID NO: 37623 - protein, 10 aa, synthetic construct
AMREGWGDSS

SEQ ID NO: 37624 - protein, 13 aa, synthetic construct
AMREGWGDTDELI

SEQ ID NO: 37625 - protein, 13 aa, synthetic construct
AMREGWGDTDKLF

SEQ ID NO: 37626 - protein, 14 aa, synthetic construct
AMREGWGEHTDKLI

SEQ ID NO: 37627 - protein, 14 aa, synthetic construct
AMREGWGGSPINSS

SEQ ID NO: 37628 - protein, 14 aa, synthetic construct
AMREGWGGVTHKLI

SEQ ID NO: 37629 - protein, 13 aa, synthetic construct
AMREGWGIPDHLI

SEQ ID NO: 37630 - protein, 13 aa, synthetic construct
AMREGWGIPDNLI

SEQ ID NO: 37631 - protein, 15 aa, synthetic construct
AMREGWGIQRPINSS

SEQ ID NO: 37632 - protein, 14 aa, synthetic construct
AMREGWLGDTDKLT

SEQ ID NO: 37633 - protein, 12 aa, synthetic construct
AMREGWGIRTLI

SEQ ID NO: 37634 - protein, 16 aa, synthetic construct
AMREGWGITALAAQLF

SEQ ID NO: 37635 - protein, 16 aa, synthetic construct
AMREGWGLPSLTAQLF

SEQ ID NO: 37636 - protein, 13 aa, synthetic construct
AMREGWGMPDKLI

SEQ ID NO: 37637 - protein, 14 aa, synthetic construct
AMREGWGMYTDKLV

SEQ ID NO: 37638 - protein, 13 aa, synthetic construct
AMREGWGNTGKLI

SEQ ID NO: 37639 - protein, 13 aa, synthetic construct
AMREGWGPHDKLI

SEQ ID NO: 37640 - protein, 12 aa, synthetic construct
AMREGWGRRKLI

SEQ ID NO: 37641 - protein, 15 aa, synthetic construct
AMREGWGSGTPINSS

SEQ ID NO: 37642 - protein, 14 aa, synthetic construct
AMREGWGSVHRYTH

SEQ ID NO: 37643 - protein, 13 aa, synthetic construct
AMREGWGTLDKLI

SEQ ID NO: 37644 - protein, 16 aa, synthetic construct
AMREGYYWGIYTDKLI

SEQ ID NO: 37645 - protein, 15 aa, synthetic construct
AMREHPPFALGDKLI

SEQ ID NO: 37646 - protein, 16 aa, synthetic construct
AMREGVWGIQYTDKII

SEQ ID NO: 37647 - protein, 15 aa, synthetic construct
AMREHPSLALGDKLI

SEQ ID NO: 37648 - protein, 18 aa, synthetic construct
AMREILWWISEGYTDKLI

SEQ ID NO: 37649 - protein, 11 aa, synthetic construct
AMREIPGDKLI

SEQ ID NO: 37650 - protein, 15 aa, synthetic construct
AMREIPMCGDTDKLI

SEQ ID NO: 37651 - protein, 19 aa, synthetic construct
AMREIPRTVGYEVLGHPTD

SEQ ID NO: 37652 - protein, 15 aa, synthetic construct
AMREIPTCWGMGKLI

SEQ ID NO: 37653 - protein, 15 aa, synthetic construct
AMREIPTGGDTDKLI

SEQ ID NO: 37654 - protein, 15 aa, synthetic construct
AMREIPTGGYTDKHI

SEQ ID NO: 37655 - protein, 10 aa, synthetic construct
AMREIPTKLI

SEQ ID NO: 37656 - protein, 15 aa, synthetic construct
AMREIPTSGGPDKLI

SEQ ID NO: 37657 - protein, 15 aa, synthetic construct
AMREIPTYWGVDKHI

SEQ ID NO: 37658 - protein, 15 aa, synthetic construct
AMREITGGGHTDKFI

SEQ ID NO: 37659 - protein, 15 aa, synthetic construct
AMREITGGGHTEKLI

SEQ ID NO: 37660 - protein, 12 aa, synthetic construct
AMREITGGNKLI

SEQ ID NO: 37661 - protein, 12 aa, synthetic construct
AMREIVGAYKLI

SEQ ID NO: 37662 - protein, 15 aa, synthetic construct
AMREIYWGIQTDKLI

SEQ ID NO: 37663 - protein, 15 aa, synthetic construct
AMREIYWGIQTDKTN

SEQ ID NO: 37664 - protein, 11 aa, synthetic construct
AMREKEAIQLI

SEQ ID NO: 37665 - protein, 11 aa, synthetic construct
AMREKEGIQLV

SEQ ID NO: 37666 - protein, 18 aa, synthetic construct
AMREKGTFLLVWGGDKLI

SEQ ID NO: 37667 - protein, 12 aa, synthetic construct
AMREKGYADKLI

SEQ ID NO: 37668 - protein, 14 aa, synthetic construct
AMREKGYGTPINSS

SEQ ID NO: 37669 - protein, 12 aa, synthetic construct
AMREKGYTEKHI

SEQ ID NO: 37670 - protein, 13 aa, synthetic construct
AMREKLGDTDKLI

SEQ ID NO: 37671 - protein, 7 aa, synthetic construct
AMREKLI

SEQ ID NO: 37672 - protein, 17 aa, synthetic construct
AMREKNSYVWGIPINSS

SEQ ID NO: 37673 - protein, 18 aa, synthetic construct
AMREILWGIREGYTEKLI

SEQ ID NO: 37674 - protein, 13 aa, synthetic construct
AMREILGVIDKLI

SEQ ID NO: 37675 - protein, 13 aa, synthetic construct
AMREILGEPDKLI

SEQ ID NO: 37676 - protein, 13 aa, synthetic construct
AMREILEGSDKLI

SEQ ID NO: 37677 - protein, 15 aa, synthetic construct
AMREHRGIRGSDKLI

SEQ ID NO: 37678 - protein, 14 aa, synthetic construct
AMREHTGGCGDKLI

SEQ ID NO: 37679 - protein, 15 aa, synthetic construct
AMREHWAIRWSDKLI

SEQ ID NO: 37680 - protein, 14 aa, synthetic construct
AMREHWGDPPINSS

SEQ ID NO: 37681 - protein, 14 aa, synthetic construct
AMREHWGDPPRETH

SEQ ID NO: 37682 - protein, 14 aa, synthetic construct
AMREHWGIPPDKLI

SEQ ID NO: 37683 - protein, 15 aa, synthetic construct
AMREHWGIRRSDKLI

SEQ ID NO: 37684 - protein, 15 aa, synthetic construct
AMREHWGIRWSDKLT

SEQ ID NO: 37685 - protein, 15 aa, synthetic construct
AMREHWGISPGTPDR

SEQ ID NO: 37686 - protein, 13 aa, synthetic construct
AMREILEGAAKVI

SEQ ID NO: 37687 - protein, 13 aa, synthetic construct
AMREILEGPDNSS

SEQ ID NO: 37688 - protein, 13 aa, synthetic construct
AMREILEGTDKLI

SEQ ID NO: 37689 - protein, 15 aa, synthetic construct
AMREILGDTRAPINS

SEQ ID NO: 37690 - protein, 13 aa, synthetic construct
AMREILEGTDKVI

SEQ ID NO: 37691 - protein, 13 aa, synthetic construct
AMREILERPDKLI

SEQ ID NO: 37692 - protein, 15 aa, synthetic construct
AMREILGDIGTDKLI

SEQ ID NO: 37693 - protein, 11 aa, synthetic construct
AMREILGDKII

SEQ ID NO: 37694 - protein, 14 aa, synthetic construct
AMREILGDKTDKLI

SEQ ID NO: 37695 - protein, 11 aa, synthetic construct
AMREILGDNSS

SEQ ID NO: 37696 - protein, 13 aa, synthetic construct
AMREILGDTDHLI

SEQ ID NO: 37697 - protein, 13 aa, synthetic construct
AMREILGDTDKII

SEQ ID NO: 37698 - protein, 13 aa, synthetic construct
AMREILGDTDKLL

SEQ ID NO: 37699 - protein, 13 aa, synthetic construct
AMREILGDTDRLI

SEQ ID NO: 37700 - protein, 14 aa, synthetic construct
AMREILGDTPINSS

SEQ ID NO: 37701 - protein, 16 aa, synthetic construct
AMREGVWGYSTPINSS

SEQ ID NO: 37702 - protein, 17 aa, synthetic construct
AMREGVPTSGAPPDKLI

SEQ ID NO: 37703 - protein, 15 aa, synthetic construct
AMREGDCGIRTDKLI

SEQ ID NO: 37704 - protein, 13 aa, synthetic construct
AMREGTGGHRENQ

SEQ ID NO: 37705 - protein, 20 aa, synthetic construct
AMREGSYTLLGDNGFDSTTL

SEQ ID NO: 37706 - protein, 20 aa, synthetic construct
AMREGSYTLLGDPDGPINSS

SEQ ID NO: 37707 - protein, 17 aa, synthetic construct
AMREGSYVGDKYTDKLI

SEQ ID NO: 37708 - protein, 17 aa, synthetic construct
AMREGSYVGDRDTDKLI

SEQ ID NO: 37709 - protein, 17 aa, synthetic construct
AMREGSYVGDRYNDILI

SEQ ID NO: 37710 - protein, 17 aa, synthetic construct
AMREGSYVGGTYTDRVI

SEQ ID NO: 37711 - protein, 17 aa, synthetic construct
AMREGSYVLEQYTDKLI

SEQ ID NO: 37712 - protein, 17 aa, synthetic construct
AMREGSYVLGDTPINSS

SEQ ID NO: 37713 - protein, 17 aa, synthetic construct
AMREGSYVWDRYTEKLI

SEQ ID NO: 37714 - protein, 14 aa, synthetic construct
AMREGSYVYGDKLI

SEQ ID NO: 37715 - protein, 14 aa, synthetic construct
AMREGSYVYSDKPI

SEQ ID NO: 37716 - protein, 14 aa, synthetic construct
AMREGSYVYSGKLI

SEQ ID NO: 37717 - protein, 11 aa, synthetic construct
AMREGTEDKRS

SEQ ID NO: 37718 - protein, 21 aa, synthetic construct
AMREGTFLPYWGIRQNADKLI

SEQ ID NO: 37719 - protein, 21 aa, synthetic construct
AMREGTFLPYWGIRQNTEKLI

SEQ ID NO: 37720 - protein, 21 aa, synthetic construct
AMREGTFLPYWGSRQNTDKLI

SEQ ID NO: 37721 - protein, 19 aa, synthetic construct
AMREGTFLPYWGTDTDKLI

SEQ ID NO: 37722 - protein, 21 aa, synthetic construct
AMREGTFLSLGDTRGNTDKLI

SEQ ID NO: 37723 - protein, 13 aa, synthetic construct
AMREGTGDTDKLF

SEQ ID NO: 37724 - protein, 13 aa, synthetic construct
AMREGTGDTDRLI

SEQ ID NO: 37725 - protein, 13 aa, synthetic construct
AMREGTGDTEKLI

SEQ ID NO: 37726 - protein, 16 aa, synthetic construct
AMREGTGEYPTPINSS

SEQ ID NO: 37727 - protein, 14 aa, synthetic construct
AMREGTGGDTDKLN

SEQ ID NO: 37728 - protein, 14 aa, synthetic construct
AMREGTGGDTDKLT

SEQ ID NO: 37729 - protein, 14 aa, synthetic construct
AMREGTGGDTNKLI

SEQ ID NO: 37730 - protein, 15 aa, synthetic construct
AMREGSYRGIRGKLI

SEQ ID NO: 37731 - protein, 16 aa, synthetic construct
AMREGSYNWGSTDKLI

SEQ ID NO: 37732 - protein, 17 aa, synthetic construct
AMREGSYGYWGYIDKLI

SEQ ID NO: 37733 - protein, 17 aa, synthetic construct
AMREGSLVVGEDTDKLI

SEQ ID NO: 37734 - protein, 14 aa, synthetic construct
AMREGSGGVTDKLI

SEQ ID NO: 37735 - protein, 14 aa, synthetic construct
AMREGSGGYPDKLI

SEQ ID NO: 37736 - protein, 14 aa, synthetic construct
AMREGSGGYSEKLI

SEQ ID NO: 37737 - protein, 13 aa, synthetic construct
AMREGSGIPDHLI

SEQ ID NO: 37738 - protein, 16 aa, synthetic construct
AMREGSGSGGYSDKLI

SEQ ID NO: 37739 - protein, 15 aa, synthetic construct
AMREGSGWGKGDKLI

SEQ ID NO: 37740 - protein, 16 aa, synthetic construct
AMREGSHTGGAPRNSS

SEQ ID NO: 37741 - protein, 17 aa, synthetic construct
AMREGSHVGDTRTDKLI

SEQ ID NO: 37742 - protein, 19 aa, synthetic construct
AMREGSLPGGVSSWDTRQM

SEQ ID NO: 37743 - protein, 17 aa, synthetic construct
AMREGSLVLGEDTDKLI

SEQ ID NO: 37744 - protein, 17 aa, synthetic construct
AMREGSLVLGEYTAKLI

SEQ ID NO: 37745 - protein, 17 aa, synthetic construct
AMREGSLVVGEDTDTLI

SEQ ID NO: 37746 - protein, 17 aa, synthetic construct
AMREGSYGYWGSTDKLI

SEQ ID NO: 37747 - protein, 15 aa, synthetic construct
AMREGSPTGDTDKLI

SEQ ID NO: 37748 - protein, 16 aa, synthetic construct
AMREGSTGILYTDKLV

SEQ ID NO: 37749 - protein, 16 aa, synthetic construct
AMREGSTGILYTVKLI

SEQ ID NO: 37750 - protein, 16 aa, synthetic construct
AMREGSTRIVIPINSS

SEQ ID NO: 37751 - protein, 13 aa, synthetic construct
AMREGSVAPDKLI

SEQ ID NO: 37752 - protein, 16 aa, synthetic construct
AMREGSVGGSYTDKPI

SEQ ID NO: 37753 - protein, 17 aa, synthetic construct
AMREGSVTGGLYNDILI

SEQ ID NO: 37754 - protein, 17 aa, synthetic construct
AMREGSVTGGRHTDKLI

SEQ ID NO: 37755 - protein, 15 aa, synthetic construct
AMREGSVWGKGAKLI

SEQ ID NO: 37756 - protein, 15 aa, synthetic construct
AMREGSVWGKGDRLI

SEQ ID NO: 37757 - protein, 15 aa, synthetic construct
AMREGSVWGNGDKLI

SEQ ID NO: 37758 - protein, 14 aa, synthetic construct
AMREGTGGFAINSS

SEQ ID NO: 37759 - protein, 13 aa, synthetic construct
AMREGTGGLDKLI

SEQ ID NO: 37760 - protein, 17 aa, synthetic construct
AMREGVPTLYWGIRKLI

SEQ ID NO: 37761 - protein, 15 aa, synthetic construct
AMREGTGGPDTDKLI

SEQ ID NO: 37762 - protein, 15 aa, synthetic construct
AMREGTYVGGYRETH

SEQ ID NO: 37763 - protein, 16 aa, synthetic construct
AMREGTYWGIRADKLI

SEQ ID NO: 37764 - protein, 19 aa, synthetic construct
AMREGVEFLRCEGYPDKLI

SEQ ID NO: 37765 - protein, 19 aa, synthetic construct
AMREGVEFLRCGGYPINSS

SEQ ID NO: 37766 - protein, 19 aa, synthetic construct
AMREGVEFLRRGGYPDKLI

SEQ ID NO: 37767 - protein, 13 aa, synthetic construct
AMREGVGDADKLI

SEQ ID NO: 37768 - protein, 12 aa, synthetic construct
AMREGVGDDRLI

SEQ ID NO: 37769 - protein, 13 aa, synthetic construct
AMREGVGDTGKLI

SEQ ID NO: 37770 - protein, 14 aa, synthetic construct
AMREGVGDTVDKLI

SEQ ID NO: 37771 - protein, 15 aa, synthetic construct
AMREGVGGGCTGKLI

SEQ ID NO: 37772 - protein, 15 aa, synthetic construct
AMREGVGGGCTNKLI

SEQ ID NO: 37773 - protein, 14 aa, synthetic construct
AMREGVGGHTDKLI

SEQ ID NO: 37774 - protein, 13 aa, synthetic construct
AMREGVGNTDKLV

SEQ ID NO: 37775 - protein, 14 aa, synthetic construct
AMREGVLGDTPITH

SEQ ID NO: 37776 - protein, 12 aa, synthetic construct
AMREGVLIDKII

SEQ ID NO: 37777 - protein, 12 aa, synthetic construct
AMREGVLIDTRI

SEQ ID NO: 37778 - protein, 12 aa, synthetic construct
AMREGVLIYKLI

SEQ ID NO: 37779 - protein, 19 aa, synthetic construct
AMREGVLLFHWGILSDKLI

SEQ ID NO: 37780 - protein, 17 aa, synthetic construct
AMREGVLRRKGGGHKLT

SEQ ID NO: 37781 - protein, 17 aa, synthetic construct
AMREGVLRRKRVGHNRI

SEQ ID NO: 37782 - protein, 17 aa, synthetic construct
AMREGVPTFFSGIRKLI

SEQ ID NO: 37783 - protein, 17 aa, synthetic construct
AMREGVPTFFWGIRKLI

SEQ ID NO: 37784 - protein, 17 aa, synthetic construct
AMREGVPTFYGGIRKLI

SEQ ID NO: 37785 - protein, 17 aa, synthetic construct
AMREGVPTFYWGIRQLI

SEQ ID NO: 37786 - protein, 17 aa, synthetic construct
AMREGVPTIYWGIGKLI

SEQ ID NO: 37787 - protein, 17 aa, synthetic construct
AMREGTYTLLGDTDKLI

SEQ ID NO: 37788 - protein, 17 aa, synthetic construct
AMREGTYGGYANTDKLI

SEQ ID NO: 37789 - protein, 15 aa, synthetic construct
AMREGTVGPYTDKLI

SEQ ID NO: 37790 - protein, 13 aa, synthetic construct
AMREGTGGYEKLI

SEQ ID NO: 37791 - protein, 15 aa, synthetic construct
AMREGTGGPYADKLI

SEQ ID NO: 37792 - protein, 15 aa, synthetic construct
AMREGTGGPYTDKHI

SEQ ID NO: 37793 - protein, 15 aa, synthetic construct
AMREGTGGPYTDKHL

SEQ ID NO: 37794 - protein, 12 aa, synthetic construct
AMREGTGGRGVI

SEQ ID NO: 37795 - protein, 15 aa, synthetic construct
AMREGTGGSCTDKLI

SEQ ID NO: 37796 - protein, 15 aa, synthetic construct
AMREGTGGSFSDKLI

SEQ ID NO: 37797 - protein, 15 aa, synthetic construct
AMREGTGGSFTDKLI

SEQ ID NO: 37798 - protein, 12 aa, synthetic construct
AMREGTGGYCLI

SEQ ID NO: 37799 - protein, 14 aa, synthetic construct
AMREGTGGYDSTTL

SEQ ID NO: 37800 - protein, 15 aa, synthetic construct
AMREGTGGYDTDKLT

SEQ ID NO: 37801 - protein, 15 aa, synthetic construct
AMREGTGGYEGDKLI

SEQ ID NO: 37802 - protein, 15 aa, synthetic construct
AMREGTGGYWADNLI

SEQ ID NO: 37803 - protein, 18 aa, synthetic construct
AMREGTSFLRLGDTIKLI

SEQ ID NO: 37804 - protein, 15 aa, synthetic construct
AMREGTGRYWADKLI

SEQ ID NO: 37805 - protein, 12 aa, synthetic construct
AMREGTGTDKLI

SEQ ID NO: 37806 - protein, 11 aa, synthetic construct
AMREGTGTPDR

SEQ ID NO: 37807 - protein, 13 aa, synthetic construct
AMREGTGVTDKLI

SEQ ID NO: 37808 - protein, 21 aa, synthetic construct
AMREGTILPYWGIRQNTDKLI

SEQ ID NO: 37809 - protein, 16 aa, synthetic construct
AMREGTLSGGYDDKLI

SEQ ID NO: 37810 - protein, 16 aa, synthetic construct
AMREGTLTGGYDDKLL

SEQ ID NO: 37811 - protein, 16 aa, synthetic construct
AMREGTPIVLGDDKLI

SEQ ID NO: 37812 - protein, 17 aa, synthetic construct
AMREGTPTSGAPPDKLI

SEQ ID NO: 37813 - protein, 12 aa, synthetic construct
AMREGTRGKGVI

SEQ ID NO: 37814 - protein, 18 aa, synthetic construct
AMREGTRIVLGDTTDKLI

SEQ ID NO: 37815 - protein, 18 aa, synthetic construct
AMREKNSYVWGIRADQLI

SEQ ID NO: 37816 - protein, 18 aa, synthetic construct
AMREKNSYVWGVRADKLI

SEQ ID NO: 37817 - protein, 15 aa, synthetic construct
AMREKRGIRGPINSS

SEQ ID NO: 37818 - protein, 14 aa, synthetic construct
AMRESEGVHTDKLI

SEQ ID NO: 37819 - protein, 12 aa, synthetic construct
AMRERIYTDKLI

SEQ ID NO: 37820 - protein, 10 aa, synthetic construct
AMRERLASFI

SEQ ID NO: 37821 - protein, 12 aa, synthetic construct
AMRERLGADKLI

SEQ ID NO: 37822 - protein, 15 aa, synthetic construct
AMRERLGDKYTDKLI

SEQ ID NO: 37823 - protein, 13 aa, synthetic construct
AMRERLGDTDKLV

SEQ ID NO: 37824 - protein, 15 aa, synthetic construct
AMRERLGDTGPRNSS

SEQ ID NO: 37825 - protein, 15 aa, synthetic construct
AMRERLGETGPRNTS

SEQ ID NO: 37826 - protein, 21 aa, synthetic construct
AMRERLPPCTGGPSSWDTRQM

SEQ ID NO: 37827 - protein, 17 aa, synthetic construct
AMRERLRPYWGTPIKSS

SEQ ID NO: 37828 - protein, 14 aa, synthetic construct
AMRERPGVGTDKLI

SEQ ID NO: 37829 - protein, 17 aa, synthetic construct
AMRERPHFRICTPINSS

SEQ ID NO: 37830 - protein, 16 aa, synthetic construct
AMRERPLGDTPGTPDR

SEQ ID NO: 37831 - protein, 15 aa, synthetic construct
AMRERQGDTGPINSS

SEQ ID NO: 37832 - protein, 16 aa, synthetic construct
AMRERRWGIRGTDKLI

SEQ ID NO: 37833 - protein, 14 aa, synthetic construct
AMRERTGGCPDKHI

SEQ ID NO: 37834 - protein, 14 aa, synthetic construct
AMRERTGGWPDRLI

SEQ ID NO: 37835 - protein, 12 aa, synthetic construct
AMRERTRGDKLS

SEQ ID NO: 37836 - protein, 12 aa, synthetic construct
AMRERTRGDQLI

SEQ ID NO: 37837 - protein, 12 aa, synthetic construct
AMRERVDTRQLI

SEQ ID NO: 37838 - protein, 12 aa, synthetic construct
AMRERVGYAELI

SEQ ID NO: 37839 - protein, 17 aa, synthetic construct
AMRERVSLGDTNTDKLI

SEQ ID NO: 37840 - protein, 17 aa, synthetic construct
AMRERVVLGVLYTDKLI

SEQ ID NO: 37841 - protein, 17 aa, synthetic construct
AMRERVVLGVPDTDKTH

SEQ ID NO: 37842 - protein, 14 aa, synthetic construct
AMRERVVPYTDNVI

SEQ ID NO: 37843 - protein, 17 aa, synthetic construct
AMRESDGWGIRGTDKLI

SEQ ID NO: 37844 - protein, 16 aa, synthetic construct
AMRERILGDTAPINSS

SEQ ID NO: 37845 - protein, 10 aa, synthetic construct
AMRERGYALF

SEQ ID NO: 37846 - protein, 15 aa, synthetic construct
AMRERGWGTDTDKLI

SEQ ID NO: 37847 - protein, 11 aa, synthetic construct
AMRERDTLNSS

SEQ ID NO: 37848 - protein, 12 aa, synthetic construct
AMREPWGYQGSS

SEQ ID NO: 37849 - protein, 14 aa, synthetic construct
AMREPYGGIRGKLI

SEQ ID NO: 37850 - protein, 11 aa, synthetic construct
AMREPYNDKVI

SEQ ID NO: 37851 - protein, 16 aa, synthetic construct
AMREPYWGIRRTDKLI

SEQ ID NO: 37852 - protein, 14 aa, synthetic construct
AMREPYWGKRVKLI

SEQ ID NO: 37853 - protein, 14 aa, synthetic construct
AMREPYWGVRVKLI

SEQ ID NO: 37854 - protein, 14 aa, synthetic construct
AMREQLGDTPINSS

SEQ ID NO: 37855 - protein, 14 aa, synthetic construct
AMREQVLGDTDRLI

SEQ ID NO: 37856 - protein, 14 aa, synthetic construct
AMREQVLGDTGKLI

SEQ ID NO: 37857 - protein, 14 aa, synthetic construct
AMREQVRGDTDKLI

SEQ ID NO: 37858 - protein, 14 aa, synthetic construct
AMREQYWGMTDKLV

SEQ ID NO: 37859 - protein, 12 aa, synthetic construct
AMRERDTSYEMM

SEQ ID NO: 37860 - protein, 11 aa, synthetic construct
AMRERGTYKLI

SEQ ID NO: 37861 - protein, 11 aa, synthetic construct
AMREREILKLI

SEQ ID NO: 37862 - protein, 16 aa, synthetic construct
AMRERELLGDTVDKII

SEQ ID NO: 37863 - protein, 16 aa, synthetic construct
AMREREVLGDNVDKLI

SEQ ID NO: 37864 - protein, 16 aa, synthetic construct
AMREREVQGDTVDKLI

SEQ ID NO: 37865 - protein, 15 aa, synthetic construct
AMRERGGGIVAINSS

SEQ ID NO: 37866 - protein, 13 aa, synthetic construct
AMRERGGIADKLI

SEQ ID NO: 37867 - protein, 13 aa, synthetic construct
AMRERGGTPINSS

SEQ ID NO: 37868 - protein, 15 aa, synthetic construct
AMRERGLGILTDKLI

SEQ ID NO: 37869 - protein, 13 aa, synthetic construct
AMRERGLRHRKTQ

SEQ ID NO: 37870 - protein, 11 aa, synthetic construct
AMRERGTDNLI

SEQ ID NO: 37871 - protein, 11 aa, synthetic construct
AMRERGTDRLI

SEQ ID NO: 37872 - protein, 14 aa, synthetic construct
AMRESEGFYTDKLI

SEQ ID NO: 37873 - protein, 14 aa, synthetic construct
AMRESEGVYTAKLI

SEQ ID NO: 37874 - protein, 16 aa, synthetic construct
AMREKSGDKGDNEKQI

SEQ ID NO: 37875 - protein, 14 aa, synthetic construct
AMRESEGYPAINSS

SEQ ID NO: 37876 - protein, 20 aa, synthetic construct
AMRESPPLPLAGASYTDKLI

SEQ ID NO: 37877 - protein, 20 aa, synthetic construct
AMRESPSLPLVGASYTAKLI

SEQ ID NO: 37878 - protein, 20 aa, synthetic construct
AMRESPSLPLVGASYTDNLI

SEQ ID NO: 37879 - protein, 20 aa, synthetic construct
AMRESPSLPLVGASYTEKLI

SEQ ID NO: 37880 - protein, 20 aa, synthetic construct
AMRESPSLPLVGASYTVTLI

SEQ ID NO: 37881 - protein, 20 aa, synthetic construct
AMRESPSVPLVGASNTDKLI

SEQ ID NO: 37882 - protein, 12 aa, synthetic construct
AMRESRDTDKLI

SEQ ID NO: 37883 - protein, 15 aa, synthetic construct
AMRESRGISTGTPDR

SEQ ID NO: 37884 - protein, 15 aa, synthetic construct
AMRESRLGDTTDKPI

SEQ ID NO: 37885 - protein, 15 aa, synthetic construct
AMRESRLGDTTGKLI

SEQ ID NO: 37886 - protein, 15 aa, synthetic construct
AMRESRLGETTDELI

SEQ ID NO: 37887 - protein, 16 aa, synthetic construct
AMRESRWGIRGTDKII

SEQ ID NO: 37888 - protein, 14 aa, synthetic construct
AMRESSGAVTDKLI

SEQ ID NO: 37889 - protein, 14 aa, synthetic construct
AMRESSGRDTDKII

SEQ ID NO: 37890 - protein, 15 aa, synthetic construct
AMRESSSRGIRGKLI

SEQ ID NO: 37891 - protein, 12 aa, synthetic construct
AMRESTAGNKLI

SEQ ID NO: 37892 - protein, 15 aa, synthetic construct
AMRESTGEYKPDLLI

SEQ ID NO: 37893 - protein, 16 aa, synthetic construct
AMRESTGGCRDTDNSS

SEQ ID NO: 37894 - protein, 14 aa, synthetic construct
AMRESTGGHTDRLI

SEQ ID NO: 37895 - protein, 12 aa, synthetic construct
AMRESTGGNTLI

SEQ ID NO: 37896 - protein, 14 aa, synthetic construct
AMRESTGGQTDKRI

SEQ ID NO: 37897 - protein, 16 aa, synthetic construct
AMRESTGGSGITDKLI

SEQ ID NO: 37898 - protein, 14 aa, synthetic construct
AMRESTGGSTDKLI

SEQ ID NO: 37899 - protein, 15 aa, synthetic construct
AMRESTGGYGTDKLI

SEQ ID NO: 37900 - protein, 16 aa, synthetic construct
AMRESTGGYLGTDKLI

SEQ ID NO: 37901 - protein, 12 aa, synthetic construct
AMRESPGGNKLI

SEQ ID NO: 37902 - protein, 12 aa, synthetic construct
AMRESPDTDKII

SEQ ID NO: 37903 - protein, 15 aa, synthetic construct
AMRESLVLGATDKLI

SEQ ID NO: 37904 - protein, 14 aa, synthetic construct
AMRESGGSRRDELI

SEQ ID NO: 37905 - protein, 17 aa, synthetic construct
AMRESFLHYWGIPDKLI

SEQ ID NO: 37906 - protein, 18 aa, synthetic construct
AMRESFLLVLGDYTDKLI

SEQ ID NO: 37907 - protein, 17 aa, synthetic construct
AMRESFLLYWGNTDKLI

SEQ ID NO: 37908 - protein, 16 aa, synthetic construct
AMRESFLPYWGIDKLI

SEQ ID NO: 37909 - protein, 16 aa, synthetic construct
AMRESFLPYWGTDKII

SEQ ID NO: 37910 - protein, 15 aa, synthetic construct
AMRESFVWGTARPLI

SEQ ID NO: 37911 - protein, 6 aa, synthetic construct
AMRESG

SEQ ID NO: 37912 - protein, 12 aa, synthetic construct
AMRESGDSAQLF

SEQ ID NO: 37913 - protein, 13 aa, synthetic construct
AMRESGESAQKYI

SEQ ID NO: 37914 - protein, 14 aa, synthetic construct
AMRESGGPTRDKLI

SEQ ID NO: 37915 - protein, 14 aa, synthetic construct
AMRESGGSRGDKLI

SEQ ID NO: 37916 - protein, 9 aa, synthetic construct
AMRESGGTH

SEQ ID NO: 37917 - protein, 18 aa, synthetic construct
AMRESLPTWGIPYPDKLI

SEQ ID NO: 37918 - protein, 11 aa, synthetic construct
AMRESGIRGLI

SEQ ID NO: 37919 - protein, 12 aa, synthetic construct
AMRESGVSAHLF

SEQ ID NO: 37920 - protein, 13 aa, synthetic construct
AMRESITGADKLI

SEQ ID NO: 37921 - protein, 13 aa, synthetic construct
AMRESLAAFDKLI

SEQ ID NO: 37922 - protein, 13 aa, synthetic construct
AMRESLAAFEKLI

SEQ ID NO: 37923 - protein, 13 aa, synthetic construct
AMRESLGAFDKII

SEQ ID NO: 37924 - protein, 13 aa, synthetic construct
AMRESLGALDKLI

SEQ ID NO: 37925 - protein, 14 aa, synthetic construct
AMRESLGEQPINSS

SEQ ID NO: 37926 - protein, 15 aa, synthetic construct
AMRESLGYTCTDKLI

SEQ ID NO: 37927 - protein, 17 aa, synthetic construct
AMRESLLQGIRRPINSS

SEQ ID NO: 37928 - protein, 17 aa, synthetic construct
AMRESLPTGETQTDKRI

SEQ ID NO: 37929 - protein, 14 aa, synthetic construct
AMREPWGYEGYNSS

SEQ ID NO: 37930 - protein, 17 aa, synthetic construct
AMREPWGIRKLLGHPTD

SEQ ID NO: 37931 - protein, 18 aa, synthetic construct
AMREPTSFLRLGDTSKLI

SEQ ID NO: 37932 - protein, 18 aa, synthetic construct
AMREPTSFLRLGDTMKLI

SEQ ID NO: 37933 - protein, 13 aa, synthetic construct
AMRELPDTTDKLI

SEQ ID NO: 37934 - protein, 16 aa, synthetic construct
AMRELPDWGIRADKLT

SEQ ID NO: 37935 - protein, 16 aa, synthetic construct
AMRELPDWGIRADKRI

SEQ ID NO: 37936 - protein, 16 aa, synthetic construct
AMRELPDWGIRADQLI

SEQ ID NO: 37937 - protein, 16 aa, synthetic construct
AMRELPDWGRRADKLI

SEQ ID NO: 37938 - protein, 16 aa, synthetic construct
AMRELPDWGYAPINSS

SEQ ID NO: 37939 - protein, 16 aa, synthetic construct
AMRELPTLGAYTDKLI

SEQ ID NO: 37940 - protein, 15 aa, synthetic construct
AMRELPTLGDTKKLI

SEQ ID NO: 37941 - protein, 14 aa, synthetic construct
AMRELQGGYTDNVI

SEQ ID NO: 37942 - protein, 11 aa, synthetic construct
AMRELSIDKHI

SEQ ID NO: 37943 - protein, 18 aa, synthetic construct
AMRELSSPYWGQYTDKLI

SEQ ID NO: 37944 - protein, 13 aa, synthetic construct
AMRELTGGCINSS

SEQ ID NO: 37945 - protein, 12 aa, synthetic construct
AMRELTGGFINS

SEQ ID NO: 37946 - protein, 13 aa, synthetic construct
AMRELTGGVINSS

SEQ ID NO: 37947 - protein, 13 aa, synthetic construct
AMRELTWGFINSS

SEQ ID NO: 37948 - protein, 16 aa, synthetic construct
AMRELYRGIRRTDKLV

SEQ ID NO: 37949 - protein, 16 aa, synthetic construct
AMRELYWGIRRTNKII

SEQ ID NO: 37950 - protein, 16 aa, synthetic construct
AMRELYWGIRRTNKLI

SEQ ID NO: 37951 - protein, 14 aa, synthetic construct
AMREMEASWDTRQM

SEQ ID NO: 37952 - protein, 14 aa, synthetic construct
AMREMGATWNTRQM

SEQ ID NO: 37953 - protein, 13 aa, synthetic construct
AMREMGATWTPDR

SEQ ID NO: 37954 - protein, 13 aa, synthetic construct
AMREMGVYKLKLI

SEQ ID NO: 37955 - protein, 13 aa, synthetic construct
AMREMGVYSAKII

SEQ ID NO: 37956 - protein, 13 aa, synthetic construct
AMREMGVYTDKLN

SEQ ID NO: 37957 - protein, 13 aa, synthetic construct
AMREMGVYTDNSS

SEQ ID NO: 37958 - protein, 18 aa, synthetic construct
AMRELPAYWGIREGGKLI

SEQ ID NO: 37959 - protein, 17 aa, synthetic construct
AMRELPAYWGIHADKLT

SEQ ID NO: 37960 - protein, 15 aa, synthetic construct
AMRELMWDTNTDKLI

SEQ ID NO: 37961 - protein, 14 aa, synthetic construct
AMRELGDTRPINSS

SEQ ID NO: 37962 - protein, 17 aa, synthetic construct
AMREKSYVSGGYGSDKL

SEQ ID NO: 37963 - protein, 18 aa, synthetic construct
AMREKVLWDTGPAIDKLI

SEQ ID NO: 37964 - protein, 12 aa, synthetic construct
AMREKVYTDKLI

SEQ ID NO: 37965 - protein, 15 aa, synthetic construct
AMREKYWGPYPDKLI

SEQ ID NO: 37966 - protein, 14 aa, synthetic construct
AMRELGDKYTDKLI

SEQ ID NO: 37967 - protein, 11 aa, synthetic construct
AMRELGDLKLI

SEQ ID NO: 37968 - protein, 12 aa, synthetic construct
AMRELGDPDKLI

SEQ ID NO: 37969 - protein, 11 aa, synthetic construct
AMRELGDPKRI

SEQ ID NO: 37970 - protein, 11 aa, synthetic construct
AMRELGDPQLI

SEQ ID NO: 37971 - protein, 13 aa, synthetic construct
AMRELGDTADKLI

SEQ ID NO: 37972 - protein, 12 aa, synthetic construct
AMRELGDTDKLL

SEQ ID NO: 37973 - protein, 16 aa, synthetic construct
AMRELGDTRRYTDNLL

SEQ ID NO: 37974 - protein, 15 aa, synthetic construct
AMRELMGDTTSDKLI

SEQ ID NO: 37975 - protein, 12 aa, synthetic construct
AMRELGNTDKLI

SEQ ID NO: 37976 - protein, 19 aa, synthetic construct
AMRELHRTVGYELLGHPTD

SEQ ID NO: 37977 - protein, 15 aa, synthetic construct
AMRELHTVGYADKLI

SEQ ID NO: 37978 - protein, 15 aa, synthetic construct
AMRELLGDTGTDILI

SEQ ID NO: 37979 - protein, 14 aa, synthetic construct
AMRELLGDYTDKLI

SEQ ID NO: 37980 - protein, 12 aa, synthetic construct
AMRELLGEDKLI

SEQ ID NO: 37981 - protein, 16 aa, synthetic construct
AMRELLGEPAYTDKLI

SEQ ID NO: 37982 - protein, 14 aa, synthetic construct
AMRELLGGRGDKLI

SEQ ID NO: 37983 - protein, 10 aa, synthetic construct
AMRELLGSII

SEQ ID NO: 37984 - protein, 16 aa, synthetic construct
AMRELLPPELAPINSS

SEQ ID NO: 37985 - protein, 13 aa, synthetic construct
AMRELLRDTNKLI

SEQ ID NO: 37986 - protein, 13 aa, synthetic construct
AMREMRVYTDKLI

SEQ ID NO: 37987 - protein, 10 aa, synthetic construct
AMRENADKLI

SEQ ID NO: 37988 - protein, 17 aa, synthetic construct
AMRENHGWGRPSPINSS

SEQ ID NO: 37989 - protein, 17 aa, synthetic construct
AMREPSLGHLGDTDKLI

SEQ ID NO: 37990 - protein, 12 aa, synthetic construct
AMREPGGPDKLV

SEQ ID NO: 37991 - protein, 12 aa, synthetic construct
AMREPGGPGKLI

SEQ ID NO: 37992 - protein, 12 aa, synthetic construct
AMREPGGSDKLT

SEQ ID NO: 37993 - protein, 19 aa, synthetic construct
AMREPGWVLGDTRNTDKPI

SEQ ID NO: 37994 - protein, 17 aa, synthetic construct
AMREPHFLRGGGSDKLI

SEQ ID NO: 37995 - protein, 15 aa, synthetic construct
AMREPILGSYTGKLI

SEQ ID NO: 37996 - protein, 15 aa, synthetic construct
AMREPLGDTTPINSS

SEQ ID NO: 37997 - protein, 12 aa, synthetic construct
AMREPLLGDKLI

SEQ ID NO: 37998 - protein, 17 aa, synthetic construct
AMREPLVTGGYDTDKLI

SEQ ID NO: 37999 - protein, 17 aa, synthetic construct
AMREPPAYWGIQADKLI

SEQ ID NO: 38000 - protein, 18 aa, synthetic construct
AMREPSFLFTGGYPINSS

SEQ ID NO: 38001 - protein, 15 aa, synthetic construct
AMREPSTGGHTDKLF

SEQ ID NO: 38002 - protein, 12 aa, synthetic construct
AMREPGGIPGLI

SEQ ID NO: 38003 - protein, 15 aa, synthetic construct
AMREPSTGGNTDNLI

SEQ ID NO: 38004 - protein, 17 aa, synthetic construct
AMREPSYEEGYNTDKLI

SEQ ID NO: 38005 - protein, 14 aa, synthetic construct
AMREPSYGDTDKPI

SEQ ID NO: 38006 - protein, 15 aa, synthetic construct
AMREPSYGGTPINPS

SEQ ID NO: 38007 - protein, 15 aa, synthetic construct
AMREPSYGGTQINSS

SEQ ID NO: 38008 - protein, 18 aa, synthetic construct
AMREPSYVATRVYTDKLI

SEQ ID NO: 38009 - protein, 17 aa, synthetic construct
AMREPSYVEGYDTDKLI

SEQ ID NO: 38010 - protein, 14 aa, synthetic construct
AMREPTGGFTDKLN

SEQ ID NO: 38011 - protein, 16 aa, synthetic construct
AMREPTGGYRGTDELI

SEQ ID NO: 38012 - protein, 16 aa, synthetic construct
AMREPTGGYRGTDKLT

SEQ ID NO: 38013 - protein, 18 aa, synthetic construct
AMREPTSFLRLGDRIKLI

SEQ ID NO: 38014 - protein, 12 aa, synthetic construct
AMREPGGPDKLS

SEQ ID NO: 38015 - protein, 17 aa, synthetic construct
AMREPFVTGGYDTDQLI

SEQ ID NO: 38016 - protein, 10 aa, synthetic construct
AMRENHNKLI

SEQ ID NO: 38017 - protein, 17 aa, synthetic construct
AMRENYGCGIPTPINSS

SEQ ID NO: 38018 - protein, 16 aa, synthetic construct
AMRENLPTVGAPKGLI

SEQ ID NO: 38019 - protein, 10 aa, synthetic construct
AMRENPSKLI

SEQ ID NO: 38020 - protein, 10 aa, synthetic construct
AMRENTDKPI

SEQ ID NO: 38021 - protein, 10 aa, synthetic construct
AMRENTDNLI

SEQ ID NO: 38022 - protein, 15 aa, synthetic construct
AMRENTGGDGPDNLI

SEQ ID NO: 38023 - protein, 14 aa, synthetic construct
AMRENTGGQTDKLI

SEQ ID NO: 38024 - protein, 14 aa, synthetic construct
AMRENTGGYPDKLI

SEQ ID NO: 38025 - protein, 15 aa, synthetic construct
AMRENTTSGDTDKLI

SEQ ID NO: 38026 - protein, 13 aa, synthetic construct
AMRENWGIPDKLI

SEQ ID NO: 38027 - protein, 15 aa, synthetic construct
AMRENWGIRGTDKLI

SEQ ID NO: 38028 - protein, 14 aa, synthetic construct
AMRENWGVYTDKLI

SEQ ID NO: 38029 - protein, 16 aa, synthetic construct
AMREPAGGYLGSDKLI

SEQ ID NO: 38030 - protein, 17 aa, synthetic construct
AMREPFVTGGYDTDKPI

SEQ ID NO: 38031 - protein, 17 aa, synthetic construct
AMREPCLPKGDTGDKLI

SEQ ID NO: 38032 - protein, 17 aa, synthetic construct
AMREPCLPRGDTGDELI

SEQ ID NO: 38033 - protein, 17 aa, synthetic construct
AMREPCLPRGDTGDNSS

SEQ ID NO: 38034 - protein, 17 aa, synthetic construct
AMREPCLPRGGTGDKLI

SEQ ID NO: 38035 - protein, 14 aa, synthetic construct
AMREPEDTRTDKLI

SEQ ID NO: 38036 - protein, 10 aa, synthetic construct
AMREPFDKII

SEQ ID NO: 38037 - protein, 10 aa, synthetic construct
AMREPFDKLN

SEQ ID NO: 38038 - protein, 10 aa, synthetic construct
AMREPFNKLI

SEQ ID NO: 38039 - protein, 17 aa, synthetic construct
AMREPFVTGGCDTDKLI

SEQ ID NO: 38040 - protein, 17 aa, synthetic construct
AMREPFVTGGPYTDKLI

SEQ ID NO: 38041 - protein, 17 aa, synthetic construct
AMREPFVTGGYDTDKLN

SEQ ID NO: 38042 - protein, 15 aa, synthetic construct
AMREGSGGRTPINSS

SEQ ID NO: 38043 - protein, 14 aa, synthetic construct
AMREGSGGNTDKLN

SEQ ID NO: 38044 - protein, 13 aa, synthetic construct
AMREGSGDALETH

SEQ ID NO: 38045 - protein, 15 aa, synthetic construct
AMREGGYGGYTDKLI

SEQ ID NO: 38046 - protein, 16 aa, synthetic construct
AMREGGQLGAYSDKLI

SEQ ID NO: 38047 - protein, 15 aa, synthetic construct
AMREGGRGTDTDKLI

SEQ ID NO: 38048 - protein, 19 aa, synthetic construct
AMREGGRRLGETPHTDKLI

SEQ ID NO: 38049 - protein, 14 aa, synthetic construct
AMREGGRSNTDKLI

SEQ ID NO: 38050 - protein, 17 aa, synthetic construct
AMREGGRWGIRGADKLI

SEQ ID NO: 38051 - protein, 13 aa, synthetic construct
AMREGGSHTDKLI

SEQ ID NO: 38052 - protein, 14 aa, synthetic construct
AMREGGSRTPINSS

SEQ ID NO: 38053 - protein, 17 aa, synthetic construct
AMREGGVGASSLADKLI

SEQ ID NO: 38054 - protein, 16 aa, synthetic construct
AMREGGVGASSPDNSS

SEQ ID NO: 38055 - protein, 16 aa, synthetic construct
AMREGGVGASSPEKLI

SEQ ID NO: 38056 - protein, 15 aa, synthetic construct
AMREGGVGGCGDKLI

SEQ ID NO: 38057 - protein, 15 aa, synthetic construct
AMREGGVGGYGDKPI

SEQ ID NO: 38058 - protein, 15 aa, synthetic construct
AMREGGVGGYGDRLI

SEQ ID NO: 38059 - protein, 15 aa, synthetic construct
AMREGGVGRYGDKVI

SEQ ID NO: 38060 - protein, 19 aa, synthetic construct
AMREGGVLFHWGILSDKLI

SEQ ID NO: 38061 - protein, 14 aa, synthetic construct
AMREGGVPYTEKLI

SEQ ID NO: 38062 - protein, 18 aa, synthetic construct
AMREGGVYGGYALAAQLF

SEQ ID NO: 38063 - protein, 18 aa, synthetic construct
AMREGGVYGGYALTAQLL

SEQ ID NO: 38064 - protein, 15 aa, synthetic construct
AMREGGWGICGDKLI

SEQ ID NO: 38065 - protein, 15 aa, synthetic construct
AMREGGWGIRGDQLI

SEQ ID NO: 38066 - protein, 12 aa, synthetic construct
AMREGGWVDKLL

SEQ ID NO: 38067 - protein, 12 aa, synthetic construct
AMREGGWVDKLM

SEQ ID NO: 38068 - protein, 12 aa, synthetic construct
AMREGGWVDNLI

SEQ ID NO: 38069 - protein, 12 aa, synthetic construct
AMREGGWVDTLF

SEQ ID NO: 38070 - protein, 12 aa, synthetic construct
AMREGGYAHKLL

SEQ ID NO: 38071 - protein, 13 aa, synthetic construct
AMREGGPTPINSS

SEQ ID NO: 38072 - protein, 17 aa, synthetic construct
AMREGGPRFYWGIRKLI

SEQ ID NO: 38073 - protein, 14 aa, synthetic construct
AMREGGPKYTDKPI

SEQ ID NO: 38074 - protein, 9 aa, synthetic construct
AMREGGKLI

SEQ ID NO: 38075 - protein, 13 aa, synthetic construct
AMREGGIHPINSS

SEQ ID NO: 38076 - protein, 10 aa, synthetic construct
AMREGGIPDR

SEQ ID NO: 38077 - protein, 13 aa, synthetic construct
AMREGGIPSDELI

SEQ ID NO: 38078 - protein, 13 aa, synthetic construct
AMREGGIPSDKLM

SEQ ID NO: 38079 - protein, 13 aa, synthetic construct
AMREGGIPSDKLT

SEQ ID NO: 38080 - protein, 14 aa, synthetic construct
AMREGGIQYTDKLI

SEQ ID NO: 38081 - protein, 12 aa, synthetic construct
AMREGGIRGNSS

SEQ ID NO: 38082 - protein, 15 aa, synthetic construct
AMREGGIRGVDRYSH

SEQ ID NO: 38083 - protein, 13 aa, synthetic construct
AMREGGIRPINSS

SEQ ID NO: 38084 - protein, 13 aa, synthetic construct
AMREGGISPDKLI

SEQ ID NO: 38085 - protein, 18 aa, synthetic construct
AMREGGIYGGYALTAQLF

SEQ ID NO: 38086 - protein, 16 aa, synthetic construct
AMREGGLGDRYTDELI

SEQ ID NO: 38087 - protein, 13 aa, synthetic construct
AMREGGPKYTDKL

SEQ ID NO: 38088 - protein, 16 aa, synthetic construct
AMREGGLGDRYTDKLF

SEQ ID NO: 38089 - protein, 15 aa, synthetic construct
AMREGGLGVCTDKLI

SEQ ID NO: 38090 - protein, 16 aa, synthetic construct
AMREGGLKDTGGHTDK

SEQ ID NO: 38091 - protein, 19 aa, synthetic construct
AMREGGLLFHWGILSDKFI

SEQ ID NO: 38092 - protein, 19 aa, synthetic construct
AMREGGLLFHWGYSAINSS

SEQ ID NO: 38093 - protein, 19 aa, synthetic construct
AMREGGLLLHWGILSDKLI

SEQ ID NO: 38094 - protein, 18 aa, synthetic construct
AMREGGLPTSVGDSAKLI

SEQ ID NO: 38095 - protein, 17 aa, synthetic construct
AMREGGLPTVYWPDKLI

SEQ ID NO: 38096 - protein, 13 aa, synthetic construct
AMREGGMRKINSS

SEQ ID NO: 38097 - protein, 11 aa, synthetic construct
AMREGGPDKLN

SEQ ID NO: 38098 - protein, 11 aa, synthetic construct
AMREGGPHKLI

SEQ ID NO: 38099 - protein, 14 aa, synthetic construct
AMREGGYGGTEKLI

SEQ ID NO: 38100 - protein, 13 aa, synthetic construct
AMREGGYGVDKLN

SEQ ID NO: 38101 - protein, 13 aa, synthetic construct
AMREGLGGHTDKL

SEQ ID NO: 38102 - protein, 13 aa, synthetic construct
AMREGGYGVEKLI

SEQ ID NO: 38103 - protein, 13 aa, synthetic construct
AMREGKGYTDNRI

SEQ ID NO: 38104 - protein, 14 aa, synthetic construct
AMREGKYSAVKLGQ

SEQ ID NO: 38105 - protein, 16 aa, synthetic construct
AMREGKYWGIRTDKLI

SEQ ID NO: 38106 - protein, 10 aa, synthetic construct
AMREGLDQLI

SEQ ID NO: 38107 - protein, 16 aa, synthetic construct
AMREGLDWGTYTDKLI

SEQ ID NO: 38108 - protein, 16 aa, synthetic construct
AMREGLFGWGGADKHI

SEQ ID NO: 38109 - protein, 16 aa, synthetic construct
AMREGLFGWGGAGKRI

SEQ ID NO: 38110 - protein, 17 aa, synthetic construct
AMREGLFYWGILSDKLI

SEQ ID NO: 38111 - protein, 7 aa, synthetic construct
AMREGLG

SEQ ID NO: 38112 - protein, 15 aa, synthetic construct
AMREGLGACTPINSS

SEQ ID NO: 38113 - protein, 12 aa, synthetic construct
AMREGLGANINS

SEQ ID NO: 38114 - protein, 13 aa, synthetic construct
AMREGLGATRNSS

SEQ ID NO: 38115 - protein, 13 aa, synthetic construct
AMREGLGATVNSS

SEQ ID NO: 38116 - protein, 14 aa, synthetic construct
AMREGLGCHTDKLI

SEQ ID NO: 38117 - protein, 14 aa, synthetic construct
AMREGLGDRTDKLV

SEQ ID NO: 38118 - protein, 13 aa, synthetic construct
AMREGLGDTDELI

SEQ ID NO: 38119 - protein, 12 aa, synthetic construct
AMREGLGDTDKL

SEQ ID NO: 38120 - protein, 13 aa, synthetic construct
AMREGLGDTHKLI

SEQ ID NO: 38121 - protein, 14 aa, synthetic construct
AMREGLGDTLDKLI

SEQ ID NO: 38122 - protein, 17 aa, synthetic construct
AMREGLGDTLRTPINSS

SEQ ID NO: 38123 - protein, 14 aa, synthetic construct
AMREGLGDTSINSS

SEQ ID NO: 38124 - protein, 14 aa, synthetic construct
AMREGLGDTVDKLF

SEQ ID NO: 38125 - protein, 14 aa, synthetic construct
AMREGLGDTVDKLK

SEQ ID NO: 38126 - protein, 14 aa, synthetic construct
AMREGLGDTVNKLI

SEQ ID NO: 38127 - protein, 14 aa, synthetic construct
AMREGLGENNVKLI

SEQ ID NO: 38128 - protein, 13 aa, synthetic construct
AMREGIWGLYKLI

SEQ ID NO: 38129 - protein, 17 aa, synthetic construct
AMREGIRTSGAPPDKLI

SEQ ID NO: 38130 - protein, 12 aa, synthetic construct
AMREGIRTDKLI

SEQ ID NO: 38131 - protein, 17 aa, synthetic construct
AMREGHTLGYAATDKLN

SEQ ID NO: 38132 - protein, 12 aa, synthetic construct
AMREGGYTGKLI

SEQ ID NO: 38133 - protein, 11 aa, synthetic construct
AMREGHEGHLI

SEQ ID NO: 38134 - protein, 15 aa, synthetic construct
AMREGHFWGTLDKLI

SEQ ID NO: 38135 - protein, 11 aa, synthetic construct
AMREGHGGELI

SEQ ID NO: 38136 - protein, 13 aa, synthetic construct
AMREGHGVTDNLI

SEQ ID NO: 38137 - protein, 17 aa, synthetic construct
AMREGHLLLGDKVDKLI

SEQ ID NO: 38138 - protein, 17 aa, synthetic construct
AMREGHLLRGDKGDKLS

SEQ ID NO: 38139 - protein, 13 aa, synthetic construct
AMREGHSYTDKLI

SEQ ID NO: 38140 - protein, 19 aa, synthetic construct
AMREGHSYVGGYDGTDKLI

SEQ ID NO: 38141 - protein, 17 aa, synthetic construct
AMREGHTGGYGEPTNSS

SEQ ID NO: 38142 - protein, 17 aa, synthetic construct
AMREGHTGGYGEPTNTS

SEQ ID NO: 38143 - protein, 13 aa, synthetic construct
AMREGHWGPLGLI

SEQ ID NO: 38144 - protein, 12 aa, synthetic construct
AMREGIRKEKHI

SEQ ID NO: 38145 - protein, 11 aa, synthetic construct
AMREGIAYKLI

SEQ ID NO: 38146 - protein, 12 aa, synthetic construct
AMREGIHTDKLT

SEQ ID NO: 38147 - protein, 18 aa, synthetic construct
AMREGIPLGGYAVTDKLI

SEQ ID NO: 38148 - protein, 17 aa, synthetic construct
AMREGIPSSGAPPDKLI

SEQ ID NO: 38149 - protein, 17 aa, synthetic construct
AMREGIPTSGAPPDKHI

SEQ ID NO: 38150 - protein, 17 aa, synthetic construct
AMREGIPTSGAPPDQLI

SEQ ID NO: 38151 - protein, 17 aa, synthetic construct
AMREGIPTSGAPPYKLI

SEQ ID NO: 38152 - protein, 17 aa, synthetic construct
AMREGIPTSGPHPVKLI

SEQ ID NO: 38153 - protein, 17 aa, synthetic construct
AMREGIPTSGVYTDKLI

SEQ ID NO: 38154 - protein, 13 aa, synthetic construct
AMREGIRDTGKLI

SEQ ID NO: 38155 - protein, 11 aa, synthetic construct
AMREGIRGKLI

SEQ ID NO: 38156 - protein, 12 aa, synthetic construct
AMREGGHPAQLF

SEQ ID NO: 38157 - protein, 13 aa, synthetic construct
AMREGGGYTYKLI

SEQ ID NO: 38158 - protein, 13 aa, synthetic construct
AMREGGGYTDKII

SEQ ID NO: 38159 - protein, 15 aa, synthetic construct
AMREGGGYRGPDKLI

SEQ ID NO: 38160 - protein, 16 aa, synthetic construct
AMREGDWGIPHTEILI

SEQ ID NO: 38161 - protein, 14 aa, synthetic construct
AMREGDWGIPINSS

SEQ ID NO: 38162 - protein, 15 aa, synthetic construct
AMREGDWGIRTDKLN

SEQ ID NO: 38163 - protein, 15 aa, synthetic construct
AMREGDWGIRTEKLI

SEQ ID NO: 38164 - protein, 12 aa, synthetic construct
AMREGDWGPINS

SEQ ID NO: 38165 - protein, 15 aa, synthetic construct
AMREGDWGPTPINSS

SEQ ID NO: 38166 - protein, 16 aa, synthetic construct
AMREGDWGRPHTHKLI

SEQ ID NO: 38167 - protein, 13 aa, synthetic construct
AMREGEGDTGKLT

SEQ ID NO: 38168 - protein, 14 aa, synthetic construct
AMREGEGDTPIKSS

SEQ ID NO: 38169 - protein, 13 aa, synthetic construct
AMREGEGETGKLI

SEQ ID NO: 38170 - protein, 14 aa, synthetic construct
AMREGEGGHTDKLL

SEQ ID NO: 38171 - protein, 15 aa, synthetic construct
AMREGEGGSTPIKSS

SEQ ID NO: 38172 - protein, 15 aa, synthetic construct
AMREGEGRYYTDKLI

SEQ ID NO: 38173 - protein, 13 aa, synthetic construct
AMREGEGYTDKLT

SEQ ID NO: 38174 - protein, 13 aa, synthetic construct
AMREGEGYTDQLI

SEQ ID NO: 38175 - protein, 13 aa, synthetic construct
AMREGEGYTEKLI

SEQ ID NO: 38176 - protein, 15 aa, synthetic construct
AMREGELGDQVRISS

SEQ ID NO: 38177 - protein, 14 aa, synthetic construct
AMREGELGGPDKLI

SEQ ID NO: 38178 - protein, 21 aa, synthetic construct
AMREGEPACTGGYARYTDKLI

SEQ ID NO: 38179 - protein, 11 aa, synthetic construct
AMREGEPEKLI

SEQ ID NO: 38180 - protein, 11 aa, synthetic construct
AMREGEPENLI

SEQ ID NO: 38181 - protein, 11 aa, synthetic construct
AMREGEPVKLI

SEQ ID NO: 38182 - protein, 16 aa, synthetic construct
AMREGEPYVGDPDKLI

SEQ ID NO: 38183 - protein, 16 aa, synthetic construct
AMREGEPYVGGPDKLT

SEQ ID NO: 38184 - protein, 13 aa, synthetic construct
AMREGEWGPINSS

SEQ ID NO: 38185 - protein, 16 aa, synthetic construct
AMREGDWGIPHTDNLI

SEQ ID NO: 38186 - protein, 15 aa, synthetic construct
AMREGDWEIRTDKLI

SEQ ID NO: 38187 - protein, 13 aa, synthetic construct
AMREGDTYTDKLN

SEQ ID NO: 38188 - protein, 15 aa, synthetic construct
AMREGDRGIRTDKLI

SEQ ID NO: 38189 - protein, 14 aa, synthetic construct
AMREGDGGYTDNSS

SEQ ID NO: 38190 - protein, 14 aa, synthetic construct
AMREGDGGYTDQLI

SEQ ID NO: 38191 - protein, 15 aa, synthetic construct
AMREGDISSCDTRQM

SEQ ID NO: 38192 - protein, 15 aa, synthetic construct
AMREGDISSWDTRPL

SEQ ID NO: 38193 - protein, 15 aa, synthetic construct
AMREGDLSSWDTRQM

SEQ ID NO: 38194 - protein, 12 aa, synthetic construct
AMREGDNTDKLI

SEQ ID NO: 38195 - protein, 11 aa, synthetic construct
AMREGDPHKLI

SEQ ID NO: 38196 - protein, 14 aa, synthetic construct
AMREGDPTDSGKLI

SEQ ID NO: 38197 - protein, 14 aa, synthetic construct
AMREGDPTDTDKLV

SEQ ID NO: 38198 - protein, 14 aa, synthetic construct
AMREGDPTDTDRLI

SEQ ID NO: 38199 - protein, 18 aa, synthetic construct
AMREGDPYWGIRGTDKLI

SEQ ID NO: 38200 - protein, 12 aa, synthetic construct
AMREGDSADKLI

SEQ ID NO: 38201 - protein, 16 aa, synthetic construct
AMREGDTWGYPPINSS

SEQ ID NO: 38202 - protein, 12 aa, synthetic construct
AMREGDSTDELI

SEQ ID NO: 38203 - protein, 12 aa, synthetic construct
AMREGDSTDKVI

SEQ ID NO: 38204 - protein, 12 aa, synthetic construct
AMREGDSTGNLS

SEQ ID NO: 38205 - protein, 11 aa, synthetic construct
AMREGDTDKPI

SEQ ID NO: 38206 - protein, 14 aa, synthetic construct
AMREGDTQNTDKLI

SEQ ID NO: 38207 - protein, 13 aa, synthetic construct
AMREGDTRMINSS

SEQ ID NO: 38208 - protein, 11 aa, synthetic construct
AMREGDTRPLI

SEQ ID NO: 38209 - protein, 13 aa, synthetic construct
AMREGDTRRINST

SEQ ID NO: 38210 - protein, 13 aa, synthetic construct
AMREGDTRSDQLI

SEQ ID NO: 38211 - protein, 13 aa, synthetic construct
AMREGDTRTDELI

SEQ ID NO: 38212 - protein, 13 aa, synthetic construct
AMREGDTRTVKLI

SEQ ID NO: 38213 - protein, 14 aa, synthetic construct
AMREGFEGYDNKLI

SEQ ID NO: 38214 - protein, 14 aa, synthetic construct
AMREGFGGYENKLK

SEQ ID NO: 38215 - protein, 18 aa, synthetic construct
AMREGFLGVGGGHTDKLI

SEQ ID NO: 38216 - protein, 18 aa, synthetic construct
AMREGGGLEPLGYTDKLI

SEQ ID NO: 38217 - protein, 14 aa, synthetic construct
AMREGGESNTDKLI

SEQ ID NO: 38218 - protein, 14 aa, synthetic construct
AMREGGETRNDKHI

SEQ ID NO: 38219 - protein, 13 aa, synthetic construct
AMREGGGEPINSS

SEQ ID NO: 38220 - protein, 15 aa, synthetic construct
AMREGGGGIRGEKRI

SEQ ID NO: 38221 - protein, 15 aa, synthetic construct
AMREGGGGKYTDKLI

SEQ ID NO: 38222 - protein, 13 aa, synthetic construct
AMREGGGGPINSS

SEQ ID NO: 38223 - protein, 14 aa, synthetic construct
AMREGGGGYTDKLI

SEQ ID NO: 38224 - protein, 12 aa, synthetic construct
AMREGGGIGNSS

SEQ ID NO: 38225 - protein, 13 aa, synthetic construct
AMREGGGIWFKLI

SEQ ID NO: 38226 - protein, 13 aa, synthetic construct
AMREGGGIWFKLS

SEQ ID NO: 38227 - protein, 18 aa, synthetic construct
AMREGGGLEHPGYTDKLI

SEQ ID NO: 38228 - protein, 18 aa, synthetic construct
AMREGGGLNLSSWGTQQM

SEQ ID NO: 38229 - protein, 12 aa, synthetic construct
AMREGGDTRHLI

SEQ ID NO: 38230 - protein, 12 aa, synthetic construct
AMREGGGPDKLI

SEQ ID NO: 38231 - protein, 14 aa, synthetic construct
AMREGGGPNTDKLI

SEQ ID NO: 38232 - protein, 13 aa, synthetic construct
AMREGGGPPINTS

SEQ ID NO: 38233 - protein, 12 aa, synthetic construct
AMREGGGPRGLI

SEQ ID NO: 38234 - protein, 14 aa, synthetic construct
AMREGGGPTPISSS

SEQ ID NO: 38235 - protein, 14 aa, synthetic construct
AMREGGGPYTDKLI

SEQ ID NO: 38236 - protein, 14 aa, synthetic construct
AMREGGGQYTDKLI

SEQ ID NO: 38237 - protein, 11 aa, synthetic construct
AMREGGGSELI

SEQ ID NO: 38238 - protein, 13 aa, synthetic construct
AMREGGGSTDKHI

SEQ ID NO: 38239 - protein, 12 aa, synthetic construct
AMREGGGTDKLI

SEQ ID NO: 38240 - protein, 12 aa, synthetic construct
AMREGGGVPKLI

SEQ ID NO: 38241 - protein, 14 aa, synthetic construct
AMREGGEEDTDKRI

SEQ ID NO: 38242 - protein, 13 aa, synthetic construct
AMREGGDTPDKTI

SEQ ID NO: 38243 - protein, 16 aa, synthetic construct
AMREGFLHWGIPDKLI

SEQ ID NO: 38244 - protein, 14 aa, synthetic construct
AMREGGDFYTDKLV

SEQ ID NO: 38245 - protein, 16 aa, synthetic construct
AMREGFLPCGTPDKLV

SEQ ID NO: 38246 - protein, 16 aa, synthetic construct
AMREGFLPWGIPDKLL

SEQ ID NO: 38247 - protein, 16 aa, synthetic construct
AMREGFLPWGIPDQLI

SEQ ID NO: 38248 - protein, 17 aa, synthetic construct
AMREGFPPSGAPPDKLI

SEQ ID NO: 38249 - protein, 15 aa, synthetic construct
AMREGFVWAYTDKLI

SEQ ID NO: 38250 - protein, 16 aa, synthetic construct
AMREGFWGIRGTDKII

SEQ ID NO: 38251 - protein, 13 aa, synthetic construct
AMREGGANTEKLI

SEQ ID NO: 38252 - protein, 14 aa, synthetic construct
AMREGGCGGTDKLI

SEQ ID NO: 38253 - protein, 15 aa, synthetic construct
AMREGGDDRSGDKLI

SEQ ID NO: 38254 - protein, 13 aa, synthetic construct
AMREGGDEDDKLI

SEQ ID NO: 38255 - protein, 14 aa, synthetic construct
AMREGGDFHTDKLI

SEQ ID NO: 38256 - protein, 14 aa, synthetic construct
AMREGGDKYTDKHI

SEQ ID NO: 38257 - protein, 13 aa, synthetic construct
AMREGGDTPDKPI

SEQ ID NO: 38258 - protein, 12 aa, synthetic construct
AMREGGDPRGRI

SEQ ID NO: 38259 - protein, 14 aa, synthetic construct
AMREGGDPTPINSS

SEQ ID NO: 38260 - protein, 13 aa, synthetic construct
AMREGGDTADKLK

SEQ ID NO: 38261 - protein, 13 aa, synthetic construct
AMREGGDTADKPI

SEQ ID NO: 38262 - protein, 13 aa, synthetic construct
AMREGGDTADSLI

SEQ ID NO: 38263 - protein, 11 aa, synthetic construct
AMREGGDTDKL

SEQ ID NO: 38264 - protein, 12 aa, synthetic construct
AMREGGDTDKLT

SEQ ID NO: 38265 - protein, 12 aa, synthetic construct
AMREGGDTDNLI

SEQ ID NO: 38266 - protein, 13 aa, synthetic construct
AMREGGDTPDHLI

SEQ ID NO: 38267 - protein, 13 aa, synthetic construct
AMREGGDTPDHRI

SEQ ID NO: 38268 - protein, 13 aa, synthetic construct
AMREGGDTPDKLV

SEQ ID NO: 38269 - protein, 14 aa, synthetic construct
AMREGLGGHTDILC

SEQ ID NO: 38270 - protein, 14 aa, synthetic construct
AMREGLGGHTDNLI

SEQ ID NO: 38271 - protein, 13 aa, synthetic construct
AMREGSGAPDKLT

SEQ ID NO: 38272 - protein, 12 aa, synthetic construct
AMREGRAYGGLI

SEQ ID NO: 38273 - protein, 18 aa, synthetic construct
AMREGPTSGDTRCTDKLI

SEQ ID NO: 38274 - protein, 15 aa, synthetic construct
AMREGPTSRDTDKLI

SEQ ID NO: 38275 - protein, 13 aa, synthetic construct
AMREGPTYTDKLI

SEQ ID NO: 38276 - protein, 20 aa, synthetic construct
AMREGPVCAYWGIQDPDKLI

SEQ ID NO: 38277 - protein, 15 aa, synthetic construct
AMREGPVLGDKDKLI

SEQ ID NO: 38278 - protein, 15 aa, synthetic construct
AMREGPVLGDNDQLI

SEQ ID NO: 38279 - protein, 16 aa, synthetic construct
AMREGPYEGDTGGKLI

SEQ ID NO: 38280 - protein, 15 aa, synthetic construct
AMREGPYGDKGDKLI

SEQ ID NO: 38281 - protein, 15 aa, synthetic construct
AMREGPYGDTADKLI

SEQ ID NO: 38282 - protein, 15 aa, synthetic construct
AMREGPYGDTGDKLV

SEQ ID NO: 38283 - protein, 16 aa, synthetic construct
AMREGPYGDTTPINSS

SEQ ID NO: 38284 - protein, 19 aa, synthetic construct
AMREGPYVGTGGSTPINSS

SEQ ID NO: 38285 - protein, 15 aa, synthetic construct
AMREGPYWEIGDKLI

SEQ ID NO: 38286 - protein, 16 aa, synthetic construct
AMREGPYWGIRADKLI

SEQ ID NO: 38287 - protein, 16 aa, synthetic construct
AMREGPYWGIRTHKLN

SEQ ID NO: 38288 - protein, 15 aa, synthetic construct
AMREGPYWGITINSS

SEQ ID NO: 38289 - protein, 16 aa, synthetic construct
AMREGPYWGVRPDKLI

SEQ ID NO: 38290 - protein, 15 aa, synthetic construct
AMREGQGGYYTDKLT

SEQ ID NO: 38291 - protein, 14 aa, synthetic construct
AMREGQGIRGDKLI

SEQ ID NO: 38292 - protein, 13 aa, synthetic construct
AMREGQGYTDKLI

SEQ ID NO: 38293 - protein, 15 aa, synthetic construct
AMREGQPGADTDKLI

SEQ ID NO: 38294 - protein, 21 aa, synthetic construct
AMREGQPPCTGGYARYADKLI

SEQ ID NO: 38295 - protein, 20 aa, synthetic construct
AMREGQPPCTGGYARYTDKL

SEQ ID NO: 38296 - protein, 21 aa, synthetic construct
AMREGQPPCTGGYARYTDTLI

SEQ ID NO: 38297 - protein, 21 aa, synthetic construct
AMREGQPPGTGGYARYTDKLI

SEQ ID NO: 38298 - protein, 15 aa, synthetic construct
AMREGPTGGYTDKHI

SEQ ID NO: 38299 - protein, 15 aa, synthetic construct
AMREGPTGGYTDILI

SEQ ID NO: 38300 - protein, 15 aa, synthetic construct
AMREGPTGGYADKLI

SEQ ID NO: 38301 - protein, 17 aa, synthetic construct
AMREGPSFLLVLVDKLI

SEQ ID NO: 38302 - protein, 16 aa, synthetic construct
AMREGPPLLGDTDELI

SEQ ID NO: 38303 - protein, 16 aa, synthetic construct
AMREGPPLLGDTDKHI

SEQ ID NO: 38304 - protein, 16 aa, synthetic construct
AMREGPPLLGDTDKLT

SEQ ID NO: 38305 - protein, 17 aa, synthetic construct
AMREGPPSLGLIADQLI

SEQ ID NO: 38306 - protein, 17 aa, synthetic construct
AMREGPPWYWGPTENLI

SEQ ID NO: 38307 - protein, 8 aa, synthetic construct
AMREGPQL

SEQ ID NO: 38308 - protein, 16 aa, synthetic construct
AMREGPQVGICTPINA

SEQ ID NO: 38309 - protein, 16 aa, synthetic construct
AMREGPRGGTPGTPDR

SEQ ID NO: 38310 - protein, 13 aa, synthetic construct
AMREGPRGYGRVI

SEQ ID NO: 38311 - protein, 17 aa, synthetic construct
AMREGPRTGGPYTDKLI

SEQ ID NO: 38312 - protein, 13 aa, synthetic construct
AMREGPRVTDKLI

SEQ ID NO: 38313 - protein, 18 aa, synthetic construct
AMREGPSPTGGYDTDKII

SEQ ID NO: 38314 - protein, 17 aa, synthetic construct
AMREGPTGDTVSTDKLI

SEQ ID NO: 38315 - protein, 17 aa, synthetic construct
AMREGPSTGGPYPDKLI

SEQ ID NO: 38316 - protein, 17 aa, synthetic construct
AMREGPSTGGPYTAKRI

SEQ ID NO: 38317 - protein, 17 aa, synthetic construct
AMREGPSTGGPYTDKLT

SEQ ID NO: 38318 - protein, 17 aa, synthetic construct
AMREGPSTGGPYTDKLV

SEQ ID NO: 38319 - protein, 16 aa, synthetic construct
AMREGPSTWGIRLNSS

SEQ ID NO: 38320 - protein, 16 aa, synthetic construct
AMREGPSWGIRPDKLI

SEQ ID NO: 38321 - protein, 16 aa, synthetic construct
AMREGPSYEGGADKLI

SEQ ID NO: 38322 - protein, 13 aa, synthetic construct
AMREGPSYTAKVI

SEQ ID NO: 38323 - protein, 17 aa, synthetic construct
AMREGPTCGSAPTDKLI

SEQ ID NO: 38324 - protein, 11 aa, synthetic construct
AMREGPTDKRI

SEQ ID NO: 38325 - protein, 14 aa, synthetic construct
AMREGPTGDTLISS

SEQ ID NO: 38326 - protein, 13 aa, synthetic construct
AMREGRAGGYELI

SEQ ID NO: 38327 - protein, 12 aa, synthetic construct
AMREGRDTDKLI

SEQ ID NO: 38328 - protein, 14 aa, synthetic construct
AMREGLGGRTDKLI

SEQ ID NO: 38329 - protein, 14 aa, synthetic construct
AMREGRDTGSDILI

SEQ ID NO: 38330 - protein, 13 aa, synthetic construct
AMREGRIPSDKLI

SEQ ID NO: 38331 - protein, 14 aa, synthetic construct
AMREGRIRDPDKLI

SEQ ID NO: 38332 - protein, 14 aa, synthetic construct
AMREGRIRGPDKLI

SEQ ID NO: 38333 - protein, 14 aa, synthetic construct
AMREGRIRVPDKLT

SEQ ID NO: 38334 - protein, 12 aa, synthetic construct
AMREGRLCDQLI

SEQ ID NO: 38335 - protein, 12 aa, synthetic construct
AMREGRLGDKLI

SEQ ID NO: 38336 - protein, 15 aa, synthetic construct
AMREGRLGDNADKLI

SEQ ID NO: 38337 - protein, 15 aa, synthetic construct
AMREGRLGDNNDKLI

SEQ ID NO: 38338 - protein, 14 aa, synthetic construct
AMREGRLGDTLKLI

SEQ ID NO: 38339 - protein, 18 aa, synthetic construct
AMREGRLKDTGGHTDKLI

SEQ ID NO: 38340 - protein, 12 aa, synthetic construct
AMREGRLSDKLI

SEQ ID NO: 38341 - protein, 21 aa, synthetic construct
AMREGRPPCTGGYARYTDKLI

SEQ ID NO: 38342 - protein, 15 aa, synthetic construct
AMREGRPSPCFDKLI

SEQ ID NO: 38343 - protein, 14 aa, synthetic construct
AMREGRRRNTDILT

SEQ ID NO: 38344 - protein, 14 aa, synthetic construct
AMREGRRRNTKTLI

SEQ ID NO: 38345 - protein, 14 aa, synthetic construct
AMREGRRRSTDKLI

SEQ ID NO: 38346 - protein, 17 aa, synthetic construct
AMREGRSTSLGDTDNSS

SEQ ID NO: 38347 - protein, 20 aa, synthetic construct
AMREGRSYDWGIGGPPINSS

SEQ ID NO: 38348 - protein, 22 aa, synthetic construct
AMREGRSYDWGIRARGYIDKLI

SEQ ID NO: 38349 - protein, 22 aa, synthetic construct
AMREGRSYDWGIRARVYTDKLT

SEQ ID NO: 38350 - protein, 22 aa, synthetic construct
AMREGRSYDWGIRSRAYSDKLI

SEQ ID NO: 38351 - protein, 15 aa, synthetic construct
AMREGRTGGSTEQLI

SEQ ID NO: 38352 - protein, 15 aa, synthetic construct
AMREGRTVGSTDKLI

SEQ ID NO: 38353 - protein, 15 aa, synthetic construct
AMREGRVLEDPDKLI

SEQ ID NO: 38354 - protein, 16 aa, synthetic construct
AMREGSFDWWSTDKLI

SEQ ID NO: 38355 - protein, 13 aa, synthetic construct
AMREGRGYSDKII

SEQ ID NO: 38356 - protein, 14 aa, synthetic construct
AMREGRGYGVYKLI

SEQ ID NO: 38357 - protein, 11 aa, synthetic construct
AMREGRGYGTH

SEQ ID NO: 38358 - protein, 14 aa, synthetic construct
AMREGRGIRGEKLI

SEQ ID NO: 38359 - protein, 19 aa, synthetic construct
AMREGRFQLVGDTYTDKLI

SEQ ID NO: 38360 - protein, 22 aa, synthetic construct
AMREGRFYDWGIRARVYTDKLI

SEQ ID NO: 38361 - protein, 12 aa, synthetic construct
AMREGRGADQLI

SEQ ID NO: 38362 - protein, 13 aa, synthetic construct
AMREGRGDPDKLI

SEQ ID NO: 38363 - protein, 13 aa, synthetic construct
AMREGRGDYDKII

SEQ ID NO: 38364 - protein, 14 aa, synthetic construct
AMREGRGENTDKKN

SEQ ID NO: 38365 - protein, 14 aa, synthetic construct
AMREGRGEYTDNHI

SEQ ID NO: 38366 - protein, 14 aa, synthetic construct
AMREGRGFTPINSS

SEQ ID NO: 38367 - protein, 14 aa, synthetic construct
AMREGRGGGTDKDI

SEQ ID NO: 38368 - protein, 16 aa, synthetic construct
AMREGRGGIRGTDKLI

SEQ ID NO: 38369 - protein, 12 aa, synthetic construct
AMREGRGINKLI

SEQ ID NO: 38370 - protein, 15 aa, synthetic construct
AMREGRGIRTPINSS

SEQ ID NO: 38371 - protein, 12 aa, synthetic construct
AMREGRGYGELI

SEQ ID NO: 38372 - protein, 14 aa, synthetic construct
AMREGRGKTPINSS

SEQ ID NO: 38373 - protein, 14 aa, synthetic construct
AMREGRGSCPAKVI

SEQ ID NO: 38374 - protein, 11 aa, synthetic construct
AMREGRGSDKL

SEQ ID NO: 38375 - protein, 12 aa, synthetic construct
AMREGRGSDKLT

SEQ ID NO: 38376 - protein, 12 aa, synthetic construct
AMREGRGSDKPI

SEQ ID NO: 38377 - protein, 14 aa, synthetic construct
AMREGRGSFTAQLF

SEQ ID NO: 38378 - protein, 12 aa, synthetic construct
AMREGRGSGKLI

SEQ ID NO: 38379 - protein, 13 aa, synthetic construct
AMREGRGSTDELI

SEQ ID NO: 38380 - protein, 12 aa, synthetic construct
AMREGRGSYKLI

SEQ ID NO: 38381 - protein, 12 aa, synthetic construct
AMREGRGTDKLV

SEQ ID NO: 38382 - protein, 13 aa, synthetic construct
AMREGRGTPINSS

SEQ ID NO: 38383 - protein, 18 aa, synthetic construct
AMREGPPLLGDPLPINSS

SEQ ID NO: 38384 - protein, 16 aa, synthetic construct
AMREGPPLLGDPDKLI

SEQ ID NO: 38385 - protein, 13 aa, synthetic construct
AMREGPPGYVRLI

SEQ ID NO: 38386 - protein, 14 aa, synthetic construct
AMREGPPGWPDKLI

SEQ ID NO: 38387 - protein, 20 aa, synthetic construct
AMREGLPLILGVSSWDTRRM

SEQ ID NO: 38388 - protein, 16 aa, synthetic construct
AMREGLPMWDTPMKLI

SEQ ID NO: 38389 - protein, 16 aa, synthetic construct
AMREGLPPGDTPMKLI

SEQ ID NO: 38390 - protein, 20 aa, synthetic construct
AMREGLPSPYCGIRGTDKLI

SEQ ID NO: 38391 - protein, 20 aa, synthetic construct
AMREGLPSPYGGIRRTDKLI

SEQ ID NO: 38392 - protein, 20 aa, synthetic construct
AMREGLPSPYWGIRGTYTLI

SEQ ID NO: 38393 - protein, 20 aa, synthetic construct
AMREGLPSPYWGITGTDTLI

SEQ ID NO: 38394 - protein, 17 aa, synthetic construct
AMREGLPTGDTIPINSS

SEQ ID NO: 38395 - protein, 17 aa, synthetic construct
AMREGLPTGGHDSDKLI

SEQ ID NO: 38396 - protein, 17 aa, synthetic construct
AMREGLPTGGYDSDTLI

SEQ ID NO: 38397 - protein, 17 aa, synthetic construct
AMREGLPTGGYVSGKLI

SEQ ID NO: 38398 - protein, 17 aa, synthetic construct
AMREGLPTLWGNTDKLI

SEQ ID NO: 38399 - protein, 17 aa, synthetic construct
AMREGLPTLWGYTDKPI

SEQ ID NO: 38400 - protein, 17 aa, synthetic construct
AMREGLPTSGAPPDKLI

SEQ ID NO: 38401 - protein, 20 aa, synthetic construct
AMREGLPTSWGSFALKAPLF

SEQ ID NO: 38402 - protein, 20 aa, synthetic construct
AMREGLPTTWGILGLRAPLF

SEQ ID NO: 38403 - protein, 15 aa, synthetic construct
AMREGLQGGIRDKLI

SEQ ID NO: 38404 - protein, 18 aa, synthetic construct
AMREGLQTGGYGYTDKLI

SEQ ID NO: 38405 - protein, 18 aa, synthetic construct
AMREGLQWGLRVYTDKLI

SEQ ID NO: 38406 - protein, 13 aa, synthetic construct
AMREGLRDTDKLI

SEQ ID NO: 38407 - protein, 17 aa, synthetic construct
AMREGLRGISAEPVKLI

SEQ ID NO: 38408 - protein, 16 aa, synthetic construct
AMREGLRLGDTTINSS

SEQ ID NO: 38409 - protein, 16 aa, synthetic construct
AMREGLRLGGTPINSS

SEQ ID NO: 38410 - protein, 16 aa, synthetic construct
AMREGLRLVDTPINSS

SEQ ID NO: 38411 - protein, 17 aa, synthetic construct
AMREGLRSGGPYTDKLI

SEQ ID NO: 38412 - protein, 16 aa, synthetic construct
AMREGLPHWGSPINSS

SEQ ID NO: 38413 - protein, 12 aa, synthetic construct
AMREGLMDDKLI

SEQ ID NO: 38414 - protein, 18 aa, synthetic construct
AMREGLLWGIRVYADKLI

SEQ ID NO: 38415 - protein, 14 aa, synthetic construct
AMREGLGVYTDKPI

SEQ ID NO: 38416 - protein, 14 aa, synthetic construct
AMREGLGGTPINSS

SEQ ID NO: 38417 - protein, 14 aa, synthetic construct
AMREGLGIGPINSS

SEQ ID NO: 38418 - protein, 14 aa, synthetic construct
AMREGLGIRVQKKI

SEQ ID NO: 38419 - protein, 13 aa, synthetic construct
AMREGLGNTDQLI

SEQ ID NO: 38420 - protein, 17 aa, synthetic construct
AMREGLGSGGLYTDKLI

SEQ ID NO: 38421 - protein, 14 aa, synthetic construct
AMREGLGTCTDKLI

SEQ ID NO: 38422 - protein, 13 aa, synthetic construct
AMREGLGTTDKLI

SEQ ID NO: 38423 - protein, 14 aa, synthetic construct
AMREGLGVGTDILI

SEQ ID NO: 38424 - protein, 14 aa, synthetic construct
AMREGLGVGTEKLI

SEQ ID NO: 38425 - protein, 11 aa, synthetic construct
AMREGLGVHTD

SEQ ID NO: 38426 - protein, 14 aa, synthetic construct
AMREGLGVHTDKLV

SEQ ID NO: 38427 - protein, 15 aa, synthetic construct
AMREGLGYRGHEKLI

SEQ ID NO: 38428 - protein, 19 aa, synthetic construct
AMREGLLWGIRDRRSINSS

SEQ ID NO: 38429 - protein, 13 aa, synthetic construct
AMREGLGYTDKLI

SEQ ID NO: 38430 - protein, 12 aa, synthetic construct
AMREGLLAAQLF

SEQ ID NO: 38431 - protein, 16 aa, synthetic construct
AMREGLLGATYTDELI

SEQ ID NO: 38432 - protein, 16 aa, synthetic construct
AMREGLLGATYTDKII

SEQ ID NO: 38433 - protein, 15 aa, synthetic construct
AMREGLLGDEADKLV

SEQ ID NO: 38434 - protein, 15 aa, synthetic construct
AMREGLLGDESDKLI

SEQ ID NO: 38435 - protein, 16 aa, synthetic construct
AMREGLLGDTRTDKLI

SEQ ID NO: 38436 - protein, 17 aa, synthetic construct
AMREGLLLGGCDTDKLI

SEQ ID NO: 38437 - protein, 17 aa, synthetic construct
AMREGLLPLGVYTDKLI

SEQ ID NO: 38438 - protein, 17 aa, synthetic construct
AMREGLLSGGLYTDTLI

SEQ ID NO: 38439 - protein, 17 aa, synthetic construct
AMREGLLTLWGYTDKLI

SEQ ID NO: 38440 - protein, 17 aa, synthetic construct
AMREGLSHWGIPPINSS

SEQ ID NO: 38441 - protein, 17 aa, synthetic construct
AMREGLSSGGLYTDKLI

SEQ ID NO: 38442 - protein, 14 aa, synthetic construct
AMREGLVGDTDKII

SEQ ID NO: 38443 - protein, 20 aa, synthetic construct
AMREGPLPSRLLGVGADKLI

SEQ ID NO: 38444 - protein, 13 aa, synthetic construct
AMREGPGVTEKLI

SEQ ID NO: 38445 - protein, 17 aa, synthetic construct
AMREGPHGGICTPIYSS

SEQ ID NO: 38446 - protein, 17 aa, synthetic construct
AMREGPHVGICTPIYSS

SEQ ID NO: 38447 - protein, 15 aa, synthetic construct
AMREGPHVGIPVNSS

SEQ ID NO: 38448 - protein, 16 aa, synthetic construct
AMREGPLGDNPGTPDR

SEQ ID NO: 38449 - protein, 16 aa, synthetic construct
AMREGPLGDTPGTPYR

SEQ ID NO: 38450 - protein, 19 aa, synthetic construct
AMREGPLLTGGYGNTDKLI

SEQ ID NO: 38451 - protein, 20 aa, synthetic construct
AMREGPLPSRFLGAWADKLI

SEQ ID NO: 38452 - protein, 20 aa, synthetic construct
AMREGPLPSRLLGAGADKII

SEQ ID NO: 38453 - protein, 20 aa, synthetic construct
AMREGPLPSRLLGAGAVKLI

SEQ ID NO: 38454 - protein, 20 aa, synthetic construct
AMREGPLPSRLLGAWADKLI

SEQ ID NO: 38455 - protein, 20 aa, synthetic construct
AMREGPLPSRLMGVGADKLI

SEQ ID NO: 38456 - protein, 13 aa, synthetic construct
AMREGPGVTDKLV

SEQ ID NO: 38457 - protein, 20 aa, synthetic construct
AMREGPLPSRVLGAGADKRI

SEQ ID NO: 38458 - protein, 16 aa, synthetic construct
AMREGPLPWGMRINSS

SEQ ID NO: 38459 - protein, 18 aa, synthetic construct
AMREGPLPWGTLYTDKLI

SEQ ID NO: 38460 - protein, 16 aa, synthetic construct
AMREGPLRGDRTDNLI

SEQ ID NO: 38461 - protein, 16 aa, synthetic construct
AMREGPLRGDRTDQLN

SEQ ID NO: 38462 - protein, 16 aa, synthetic construct
AMREGPLRGDRTEQLS

SEQ ID NO: 38463 - protein, 16 aa, synthetic construct
AMREGPLRGGYGRQTH

SEQ ID NO: 38464 - protein, 18 aa, synthetic construct
AMREGPLWGIRVYTDKLI

SEQ ID NO: 38465 - protein, 15 aa, synthetic construct
AMREGPPAGDTDKLI

SEQ ID NO: 38466 - protein, 17 aa, synthetic construct
AMREGPPFPLVLVDKLI

SEQ ID NO: 38467 - protein, 13 aa, synthetic construct
AMREGPPGPGKLI

SEQ ID NO: 38468 - protein, 13 aa, synthetic construct
AMREGPGVTDTVI

SEQ ID NO: 38469 - protein, 14 aa, synthetic construct
AMREGPGGYNDKLI

SEQ ID NO: 38470 - protein, 14 aa, synthetic construct
AMREGLYATPVKSS

SEQ ID NO: 38471 - protein, 15 aa, synthetic construct
AMREGNFWGTRDTLT

SEQ ID NO: 38472 - protein, 16 aa, synthetic construct
AMREGLYCWGGADKLI

SEQ ID NO: 38473 - protein, 16 aa, synthetic construct
AMREGLYGGIYTDKLI

SEQ ID NO: 38474 - protein, 15 aa, synthetic construct
AMREGLYWGIYTDKL

SEQ ID NO: 38475 - protein, 16 aa, synthetic construct
AMREGLYWGIYTDKLS

SEQ ID NO: 38476 - protein, 16 aa, synthetic construct
AMREGLYWGIYTDQLI

SEQ ID NO: 38477 - protein, 12 aa, synthetic construct
AMREGMGADKLI

SEQ ID NO: 38478 - protein, 15 aa, synthetic construct
AMREGMGDTHTDKLI

SEQ ID NO: 38479 - protein, 14 aa, synthetic construct
AMREGMGDTIDKLI

SEQ ID NO: 38480 - protein, 14 aa, synthetic construct
AMREGMGDTPINSS

SEQ ID NO: 38481 - protein, 14 aa, synthetic construct
AMREGMGGTGDKLI

SEQ ID NO: 38482 - protein, 16 aa, synthetic construct
AMREGNFWGTDTDKLI

SEQ ID NO: 38483 - protein, 13 aa, synthetic construct
AMREGNGGYDKLI

SEQ ID NO: 38484 - protein, 13 aa, synthetic construct
AMREGPGDTDKLI

SEQ ID NO: 38485 - protein, 17 aa, synthetic construct
AMREGNSYPDGVNDKLI

SEQ ID NO: 38486 - protein, 13 aa, synthetic construct
AMREGNWGFYELI

SEQ ID NO: 38487 - protein, 16 aa, synthetic construct
AMREGNYWGIRADKLI

SEQ ID NO: 38488 - protein, 20 aa, synthetic construct
AMREGPACAYWGIQDPDRLI

SEQ ID NO: 38489 - protein, 19 aa, synthetic construct
AMREGPFGAGGQAHTAQHL

SEQ ID NO: 38490 - protein, 19 aa, synthetic construct
AMREGPFGTGGKALTAQHF

SEQ ID NO: 38491 - protein, 19 aa, synthetic construct
AMREGPFGTGGQALTEQLF

SEQ ID NO: 38492 - protein, 17 aa, synthetic construct
AMREGPFLIMGDTLRLI

SEQ ID NO: 38493 - protein, 13 aa, synthetic construct
AMREGPGAPDKLI

SEQ ID NO: 38494 - protein, 13 aa, synthetic construct
AMREGPGATDKLI

SEQ ID NO: 38495 - protein, 12 aa, synthetic construct
AMREGPGDDKLT

SEQ ID NO: 38496 - protein, 13 aa, synthetic construct
VMRVTGGRTDKLI

SEQ ID NO: 38497 - protein, 14 aa, synthetic construct
AASMSGGYNTDKLI

SEQ ID NO: 38498 - protein, 11 aa, synthetic construct
AARLGDTDKLI

SEQ ID NO: 38499 - protein, 11 aa, synthetic construct
AASLGDTDKLI

SEQ ID NO: 38500 - protein, 11 aa, synthetic construct
AARVSWVDKLI

SEQ ID NO: 38501 - protein, 8 aa, synthetic construct
AASTDKLI

SEQ ID NO: 38502 - protein, 12 aa, synthetic construct
AASTGGYTDKLI

SEQ ID NO: 38503 - protein, 12 aa, synthetic construct
AASSGIRNDKLI

SEQ ID NO: 38504 - protein, 10 aa, synthetic construct
AASPVRTGGL

SEQ ID NO: 38505 - protein, 8 aa, synthetic construct
AVGDTWLI

SEQ ID NO: 38506 - protein, 10 aa, synthetic construct
AANWVPDKLI

SEQ ID NO: 38507 - protein, 10 aa, synthetic construct
AAAGVADKLI

SEQ ID NO: 38508 - protein, 13 aa, synthetic construct
AASKVWGHTDKLI

SEQ ID NO: 38509 - protein, 13 aa, synthetic construct
AASMRWGILDKLI

SEQ ID NO: 38510 - protein, 11 aa, synthetic construct
AAILHRGIRGA

SEQ ID NO: 38511 - protein, 10 aa, synthetic construct
GSEGGTDKLI

SEQ ID NO: 38512 - protein, 11 aa, synthetic construct
AADVGVPDKLI

SEQ ID NO: 38513 - protein, 13 aa, synthetic construct
AGLGDTREADKLI

SEQ ID NO: 38514 - protein, 7 aa, synthetic construct
AATDKLI

SEQ ID NO: 38515 - protein, 7 aa, synthetic construct
AAADKLI

SEQ ID NO: 38516 - protein, 12 aa, synthetic construct
AASTGGYADKLI

SEQ ID NO: 38517 - protein, 12 aa, synthetic construct
AAYWGIRGDKLI

SEQ ID NO: 38518 - protein, 10 aa, synthetic construct
AVSSPTDKLI

SEQ ID NO: 38519 - protein, 13 aa, synthetic construct
AASRSGGYTDKLI

SEQ ID NO: 38520 - protein, 13 aa, synthetic construct
AAVLYWGIPDKLI

SEQ ID NO: 38521 - protein, 15 aa, synthetic construct
AAKRPSGGYATDKLI

SEQ ID NO: 38522 - protein, 12 aa, synthetic construct
AARLAGGTDKLI

SEQ ID NO: 38523 - protein, 11 aa, synthetic construct
AAYWGIPDKLI

SEQ ID NO: 38524 - protein, 13 aa, synthetic construct
AARVLGDYTDKLI

SEQ ID NO: 38525 - protein, 8 aa, synthetic construct
AASRDKLI

SEQ ID NO: 38526 - protein, 11 aa, synthetic construct
AAVLGDTDKLI

SEQ ID NO: 38527 - protein, 16 aa, synthetic construct
AASPGHRRRLGDTDTD

SEQ ID NO: 38528 - protein, 12 aa, synthetic construct
AAMLGVYTDKLI

SEQ ID NO: 38529 - protein, 15 aa, synthetic construct
AAARTGGYGDTDKLI

SEQ ID NO: 38530 - protein, 11 aa, synthetic construct
AAMGAHTDKLI

SEQ ID NO: 38531 - protein, 10 aa, synthetic construct
AARTLGDKLI

SEQ ID NO: 38532 - protein, 14 aa, synthetic construct
AASRDWGIPADKLI

SEQ ID NO: 38533 - protein, 10 aa, synthetic construct
ATRGDTDKLI

SEQ ID NO: 38534 - protein, 9 aa, synthetic construct
AAGIPDKLI

SEQ ID NO: 38535 - protein, 15 aa, synthetic construct
AATFLRGTRYTDKLI

SEQ ID NO: 38536 - protein, 11 aa, synthetic construct
AASIEDPDKLI

SEQ ID NO: 38537 - protein, 14 aa, synthetic construct
AASPSCGIGTDKLI

SEQ ID NO: 38538 - protein, 12 aa, synthetic construct
AASPYWGISKLI

SEQ ID NO: 38539 - protein, 12 aa, synthetic construct
AATTGGYTDKLI

SEQ ID NO: 38540 - protein, 10 aa, synthetic construct
AASSWDTRQM

SEQ ID NO: 38541 - protein, 15 aa, synthetic construct
AASKTLYWGIPDKLI

SEQ ID NO: 38542 - protein, 12 aa, synthetic construct
AASSRGDTDKLI

SEQ ID NO: 38543 - protein, 14 aa, synthetic construct
AASKDWGIRPDKLI

SEQ ID NO: 38544 - protein, 12 aa, synthetic construct
AASRGYTPDKLI

SEQ ID NO: 38545 - protein, 13 aa, synthetic construct
AASGRGEYTDKLI

SEQ ID NO: 38546 - protein, 12 aa, synthetic construct
AGTGDTRADKLI

SEQ ID NO: 38547 - protein, 13 aa, synthetic construct
AAYWGIRDTDKLI

SEQ ID NO: 38548 - skipped

SEQ ID NO: 38549 - protein, 15 aa, synthetic construct
AARSLPTSDTGGRHR

SEQ ID NO: 38550 - protein, 11 aa, synthetic construct
AATVLGDDKLI

SEQ ID NO: 38551 - protein, 13 aa, synthetic construct
AAIYGGIDTDKLI

SEQ ID NO: 38552 - protein, 14 aa, synthetic construct
AASIPDWGILDKLI

SEQ ID NO: 38553 - protein, 13 aa, synthetic construct
AASGGYKYTDKLI

SEQ ID NO: 38554 - protein, 13 aa, synthetic construct
AASPLLGDTDKLI

SEQ ID NO: 38555 - protein, 9 aa, synthetic construct
AAREPINSS

SEQ ID NO: 38556 - protein, 15 aa, synthetic construct
AASMPRLGDTTDKLI

SEQ ID NO: 38557 - protein, 10 aa, synthetic construct
AASNWGILLI

SEQ ID NO: 38558 - protein, 13 aa, synthetic construct
AASTRLGDTDKLI

SEQ ID NO: 38559 - protein, 10 aa, synthetic construct
AAGGTPINSS

SEQ ID NO: 38560 - protein, 12 aa, synthetic construct
AASIGDPPDKLI

SEQ ID NO: 38561 - protein, 9 aa, synthetic construct
AARGPHKLI

SEQ ID NO: 38562 - protein, 15 aa, synthetic construct
AAWPSCDWGYTDKLI

SEQ ID NO: 38563 - protein, 9 aa, synthetic construct
AASNTDKLI

SEQ ID NO: 38564 - protein, 12 aa, synthetic construct
AASIPTLGYPLI

SEQ ID NO: 38565 - protein, 14 aa, synthetic construct
AAPYWGIQRTDKLI

SEQ ID NO: 38566 - protein, 15 aa, synthetic construct
AAFSCYWGILNDKLI

SEQ ID NO: 38567 - protein, 9 aa, synthetic construct
AASIPDKLI

SEQ ID NO: 38568 - protein, 12 aa, synthetic construct
AADRGIPADKLI

SEQ ID NO: 38569 - protein, 11 aa, synthetic construct
AASVLYTDKLI

SEQ ID NO: 38570 - protein, 15 aa, synthetic construct
AASPNWGIRHTDKLI

SEQ ID NO: 38571 - protein, 9 aa, synthetic construct
AASRPINSS

SEQ ID NO: 38572 - protein, 15 aa, synthetic construct
AASKSHCTGGHDKLI

SEQ ID NO: 38573 - protein, 13 aa, synthetic construct
AASISGMYTDKLI

SEQ ID NO: 38574 - protein, 10 aa, synthetic construct
AARGYPDKLI

SEQ ID NO: 38575 - protein, 9 aa, synthetic construct
AAMGEDKLI

SEQ ID NO: 38576 - protein, 13 aa, synthetic construct
AARGWGPHTDKLI

SEQ ID NO: 38577 - protein, 10 aa, synthetic construct
AASPGIDKLI

SEQ ID NO: 38578 - protein, 14 aa, synthetic construct
AASMPTWRDTDKLI

SEQ ID NO: 38579 - protein, 9 aa, synthetic construct
AASMPDKLI

SEQ ID NO: 38580 - protein, 12 aa, synthetic construct
AASRGGHPDKLI

SEQ ID NO: 38581 - protein, 8 aa, synthetic construct
AASPDKLI

SEQ ID NO: 38582 - protein, 9 aa, synthetic construct
AAFGGDKLI

SEQ ID NO: 38583 - protein, 8 aa, synthetic construct
AAYTDKLI

SEQ ID NO: 38584 - protein, 11 aa, synthetic construct
AASIRGYGKLI

SEQ ID NO: 38585 - protein, 16 aa, synthetic construct
AAASLPTWGILDDKLI

SEQ ID NO: 38586 - protein, 10 aa, synthetic construct
AAGSTPINSS

SEQ ID NO: 38587 - protein, 15 aa, synthetic construct
AASRPTGGSYTDKLI

SEQ ID NO: 38588 - protein, 15 aa, synthetic construct
AASMLALLGDTDKLI

SEQ ID NO: 38589 - protein, 5 aa, synthetic construct
ISKLI

SEQ ID NO: 38590 - protein, 8 aa, synthetic construct
GGYADKLI

SEQ ID NO: 38591 - protein, 13 aa, synthetic construct
AASFLLGGYDKLI

SEQ ID NO: 38592 - protein, 11 aa, synthetic construct
AATGGPTDKLI

SEQ ID NO: 38593 - protein, 11 aa, synthetic construct
AANWGIRDKLI

SEQ ID NO: 38594 - protein, 11 aa, synthetic construct
AASCWGTDKLI

SEQ ID NO: 38595 - protein, 13 aa, synthetic construct
AASGGGGYTDKLI

SEQ ID NO: 38596 - protein, 12 aa, synthetic construct
AASMGPYTDKLI

SEQ ID NO: 38597 - protein, 13 aa, synthetic construct
AASWGGIRDDKLI

SEQ ID NO: 38598 - protein, 14 aa, synthetic construct
AASFTGGQYTDKLI

SEQ ID NO: 38599 - protein, 16 aa, synthetic construct
AARMFHYWGIRGDKLI

SEQ ID NO: 38600 - protein, 12 aa, synthetic construct
AALLGGYTDKLI

SEQ ID NO: 38601 - protein, 12 aa, synthetic construct
AARMGEGADKLI

SEQ ID NO: 38602 - protein, 15 aa, synthetic construct
AASSLVRGSYTDKLI

SEQ ID NO: 38603 - protein, 12 aa, synthetic construct
AAAPPPRADKLI

SEQ ID NO: 38604 - protein, 5 aa, synthetic construct
AARLI

SEQ ID NO: 38605 - protein, 15 aa, synthetic construct
AARPSALGGSSWDTR

SEQ ID NO: 38606 - protein, 16 aa, synthetic construct
AAVPTPLGDTGTDKLI

SEQ ID NO: 38607 - protein, 14 aa, synthetic construct
AASIPFGGYAVWLI

SEQ ID NO: 38608 - protein, 11 aa, synthetic construct
AVLGMYTDKLI

SEQ ID NO: 38609 - protein, 6 aa, synthetic construct
GPDKLI

SEQ ID NO: 38610 - protein, 14 aa, synthetic construct
AASLLRWGPTDKLI

SEQ ID NO: 38611 - protein, 13 aa, synthetic construct
AARGGILDTDKLI

SEQ ID NO: 38612 - protein, 11 aa, synthetic construct
AADNWGSGKLI

SEQ ID NO: 38613 - protein, 12 aa, synthetic construct
AASFLPGFDKLI

SEQ ID NO: 38614 - protein, 13 aa, synthetic construct
AARGGIPGTDKLI

SEQ ID NO: 38615 - protein, 10 aa, synthetic construct
AASMLTDKLI

SEQ ID NO: 38616 - protein, 13 aa, synthetic construct
AARTGGYYTDKLI

SEQ ID NO: 38617 - protein, 10 aa, synthetic construct
AAGGGGDKLI

SEQ ID NO: 38618 - protein, 13 aa, synthetic construct
AASRGWGTPINSS

SEQ ID NO: 38619 - protein, 16 aa, synthetic construct
AASKALPVLGDAPINS

SEQ ID NO: 38620 - protein, 8 aa, synthetic construct
AAILCRSL

SEQ ID NO: 38621 - protein, 9 aa, synthetic construct
AASRDTSLI

SEQ ID NO: 38622 - protein, 11 aa, synthetic construct
AASPLLGDKLI

SEQ ID NO: 38623 - protein, 13 aa, synthetic construct
AASSRPPYTDKLI

SEQ ID NO: 38624 - protein, 12 aa, synthetic construct
AGGGGIHTDKLI

SEQ ID NO: 38625 - protein, 13 aa, synthetic construct
AASPYPYWADKLI

SEQ ID NO: 38626 - protein, 16 aa, synthetic construct
AAPYWGIRPRYTDKLI

SEQ ID NO: 38627 - protein, 8 aa, synthetic construct
AASIDKLI

SEQ ID NO: 38628 - protein, 11 aa, synthetic construct
AAPGGPPDKLI

SEQ ID NO: 38629 - protein, 10 aa, synthetic construct
AAGGYTDKLI

SEQ ID NO: 38630 - protein, 16 aa, synthetic construct
AAKDSSVTTGGYGKLI

SEQ ID NO: 38631 - protein, 14 aa, synthetic construct
AASGMGDTNTDKLI

SEQ ID NO: 38632 - protein, 10 aa, synthetic construct
AASGGYLNSS

SEQ ID NO: 38633 - protein, 11 aa, synthetic construct
ADVLGYTDKLI

SEQ ID NO: 38634 - protein, 16 aa, synthetic construct
AASNPLGDTRYTDKLI

SEQ ID NO: 38635 - protein, 10 aa, synthetic construct
AADWGIDKLI

SEQ ID NO: 38636 - protein, 12 aa, synthetic construct
AGPTGGPPDKLI

SEQ ID NO: 38637 - protein, 14 aa, synthetic construct
AASPPDWGITDKLI

SEQ ID NO: 38638 - protein, 10 aa, synthetic construct
AASPWDTRQM

SEQ ID NO: 38639 - protein, 11 aa, synthetic construct
AASGGGADKLI

SEQ ID NO: 38640 - protein, 13 aa, synthetic construct
AASMGDTLSDKLI

SEQ ID NO: 38641 - protein, 7 aa, synthetic construct
AFTDKLI

SEQ ID NO: 38642 - protein, 13 aa, synthetic construct
AAAYWDTNTDKLI

SEQ ID NO: 38643 - protein, 16 aa, synthetic construct
AASFLVLGVLYTDKLI

SEQ ID NO: 38644 - protein, 8 aa, synthetic construct
AASMGNSS

SEQ ID NO: 38645 - protein, 15 aa, synthetic construct
AAPAFLRGWGPPYTD

SEQ ID NO: 38646 - protein, 11 aa, synthetic construct
AATIHPFDKLI

SEQ ID NO: 38647 - protein, 11 aa, synthetic construct
AASWGPTDKLI

SEQ ID NO: 38648 - protein, 10 aa, synthetic construct
AASLPRYELI

SEQ ID NO: 38649 - protein, 10 aa, synthetic construct
AAKITTDKLI

SEQ ID NO: 38650 - protein, 13 aa, synthetic construct
AASMAGGYPDKLI

SEQ ID NO: 38651 - protein, 11 aa, synthetic construct
AARGAPPDKLI

SEQ ID NO: 38652 - protein, 10 aa, synthetic construct
AAREYTDKLI

SEQ ID NO: 38653 - protein, 13 aa, synthetic construct
AASRGGAYTDKLI

SEQ ID NO: 38654 - protein, 9 aa, synthetic construct
AASTPINSS

SEQ ID NO: 38655 - protein, 11 aa, synthetic construct
AAALGDTDKLI

SEQ ID NO: 38656 - protein, 13 aa, synthetic construct
AASTPFWGIRETH

SEQ ID NO: 38657 - protein, 8 aa, synthetic construct
AVTVDKLI

SEQ ID NO: 38658 - protein, 10 aa, synthetic construct
AASSEDRGLI

SEQ ID NO: 38659 - protein, 11 aa, synthetic construct
AASGGYADKLI

SEQ ID NO: 38660 - protein, 15 aa, synthetic construct
AASMRPFTGIRALTA

SEQ ID NO: 38661 - protein, 15 aa, synthetic construct
AAILPLGAPYTDKLI

SEQ ID NO: 38662 - protein, 15 aa, synthetic construct
AASTFLRGGPADKLI

SEQ ID NO: 38663 - protein, 9 aa, synthetic construct
AASMIDKLI

SEQ ID NO: 38664 - protein, 15 aa, synthetic construct
AASPVLGDTRTDKLI

SEQ ID NO: 38665 - protein, 12 aa, synthetic construct
AARLGEYTDKLI

SEQ ID NO: 38666 - protein, 12 aa, synthetic construct
AALPRGIQYKLI

SEQ ID NO: 38667 - protein, 10 aa, synthetic construct
AASLGGDKLI

SEQ ID NO: 38668 - protein, 12 aa, synthetic construct
AAYWGMVPDKLI

SEQ ID NO: 38669 - protein, 12 aa, synthetic construct
AASGDGHTDKLI

SEQ ID NO: 38670 - protein, 14 aa, synthetic construct
AAEGELGAHTDKLI

SEQ ID NO: 38671 - protein, 16 aa, synthetic construct
AAPYACYWGIHTDKLI

SEQ ID NO: 38672 - protein, 12 aa, synthetic construct
AASSGGPTDKLI

SEQ ID NO: 38673 - protein, 8 aa, synthetic construct
AANTDKLI

SEQ ID NO: 38674 - protein, 10 aa, synthetic construct
AATGIPDKLI

SEQ ID NO: 38675 - protein, 13 aa, synthetic construct
AASPGDTGGDKLI

SEQ ID NO: 38676 - protein, 11 aa, synthetic construct
AARGGYTDKLI

SEQ ID NO: 38677 - protein, 11 aa, synthetic construct
AARGIPPDKLI

SEQ ID NO: 38678 - protein, 9 aa, synthetic construct
AARGTDKLI

SEQ ID NO: 38679 - protein, 5 aa, synthetic construct
AAQLI

SEQ ID NO: 38680 - protein, 9 aa, synthetic construct
AILGDRPLI

SEQ ID NO: 38681 - protein, 10 aa, synthetic construct
AAWGDLDKLI

SEQ ID NO: 38682 - protein, 12 aa, synthetic construct
AASPLGDTDKLI

SEQ ID NO: 38683 - protein, 13 aa, synthetic construct
AATHWGIRPDKLI

SEQ ID NO: 38684 - protein, 14 aa, synthetic construct
AASTGGYADTDKLI

SEQ ID NO: 38685 - protein, 15 aa, synthetic construct
AASIPPPVGGLMYTD

SEQ ID NO: 38686 - protein, 15 aa, synthetic construct
AASWGIPRGATDKLI

SEQ ID NO: 38687 - protein, 13 aa, synthetic construct
AAIRGGPYTDKLI

SEQ ID NO: 38688 - protein, 11 aa, synthetic construct
AASKGDTDKLI

SEQ ID NO: 38689 - protein, 9 aa, synthetic construct
AASMTDKLI

SEQ ID NO: 38690 - protein, 15 aa, synthetic construct
AASIIPQGGYPDKLI

SEQ ID NO: 38691 - protein, 12 aa, synthetic construct
AASIGGYGDKLI

SEQ ID NO: 38692 - protein, 12 aa, synthetic construct
AADWGITSDKLI

SEQ ID NO: 38693 - protein, 10 aa, synthetic construct
AASIESDKLI

SEQ ID NO: 38694 - protein, 12 aa, synthetic construct
AASMPPYTDKLI

SEQ ID NO: 38695 - protein, 12 aa, synthetic construct
AASGDIGTDKLI

SEQ ID NO: 38696 - protein, 11 aa, synthetic construct
AASGDDTDKLI

SEQ ID NO: 38697 - protein, 15 aa, synthetic construct
AASIPTWAGGPINSS

SEQ ID NO: 38698 - protein, 9 aa, synthetic construct
AAYGMKETH

SEQ ID NO: 38699 - protein, 13 aa, synthetic construct
AASTVLGDIHKLI

SEQ ID NO: 38700 - protein, 14 aa, synthetic construct
AAAVLGDTFTDKLI

SEQ ID NO: 38701 - protein, 15 aa, synthetic construct
AADPQYWGSNTDKLI

SEQ ID NO: 38702 - protein, 14 aa, synthetic construct
AASRRGIPDTDKLI

SEQ ID NO: 38703 - protein, 12 aa, synthetic construct
AAIRGTHTDKLI

SEQ ID NO: 38704 - protein, 14 aa, synthetic construct
AASIPTLGDTDKLI

SEQ ID NO: 38705 - protein, 8 aa, synthetic construct
GKYTDKLI

SEQ ID NO: 38706 - protein, 13 aa, synthetic construct
AASMRYGDTGRVI

SEQ ID NO: 38707 - protein, 12 aa, synthetic construct
AGLYWGIPDKLI

SEQ ID NO: 38708 - protein, 11 aa, synthetic construct
AASLLGANKLI

SEQ ID NO: 38709 - protein, 13 aa, synthetic construct
AASMGLQRPINSS

SEQ ID NO: 38710 - protein, 10 aa, synthetic construct
AIWGGPINSS

SEQ ID NO: 38711 - protein, 13 aa, synthetic construct
APLLGVLYTDKLI

SEQ ID NO: 38712 - protein, 7 aa, synthetic construct
AAPRRAH

SEQ ID NO: 38713 - protein, 10 aa, synthetic construct
VLGDKTDKLI

SEQ ID NO: 38714 - protein, 14 aa, synthetic construct
AASSRGIRGTDKLI

SEQ ID NO: 38715 - protein, 13 aa, synthetic construct
AAFLRLGAVDKLI

SEQ ID NO: 38716 - protein, 13 aa, synthetic construct
AAEGLGDTQAQLF

SEQ ID NO: 38717 - protein, 12 aa, synthetic construct
AASGGLPPDKLI

SEQ ID NO: 38718 - protein, 14 aa, synthetic construct
AASYWGIPHTDKLI

SEQ ID NO: 38719 - protein, 11 aa, synthetic construct
AASNPPDDKLI

SEQ ID NO: 38720 - protein, 13 aa, synthetic construct
AAGGLDPRTDKLI

SEQ ID NO: 38721 - protein, 12 aa, synthetic construct
AASPADRPINSS

SEQ ID NO: 38722 - protein, 12 aa, synthetic construct
AASFLGYTDKLI

SEQ ID NO: 38723 - protein, 15 aa, synthetic construct
AASTGYVWGYTDKLI

SEQ ID NO: 38724 - protein, 13 aa, synthetic construct
AASIRGGQTAQLF

SEQ ID NO: 38725 - protein, 12 aa, synthetic construct
AASMGGYTDKLI

SEQ ID NO: 38726 - protein, 12 aa, synthetic construct
AALLGDTDPKLI

SEQ ID NO: 38727 - protein, 13 aa, synthetic construct
AASMRAPYTDKLI

SEQ ID NO: 38728 - protein, 16 aa, synthetic construct
AASLPLVLGDGTDKLI

SEQ ID NO: 38729 - protein, 7 aa, synthetic construct
AGTDKLI

SEQ ID NO: 38730 - protein, 14 aa, synthetic construct
AASEEMGDTPINSS

SEQ ID NO: 38731 - protein, 11 aa, synthetic construct
AASMATPLRLI

SEQ ID NO: 38732 - protein, 14 aa, synthetic construct
AASSSRSSWDTRQM

SEQ ID NO: 38733 - protein, 13 aa, synthetic construct
AASPLHWGLDKLI

SEQ ID NO: 38734 - protein, 14 aa, synthetic construct
AASWNTGGYTDKLI

SEQ ID NO: 38735 - protein, 12 aa, synthetic construct
AASYWGPPINSS

SEQ ID NO: 38736 - protein, 11 aa, synthetic construct
AASTLNTDKLI

SEQ ID NO: 38737 - protein, 12 aa, synthetic construct
AARFPGWPDKLI

SEQ ID NO: 38738 - protein, 13 aa, synthetic construct
AASMETGGYDKLI

SEQ ID NO: 38739 - protein, 14 aa, synthetic construct
AASRRGWGYTDKLI

SEQ ID NO: 38740 - protein, 15 aa, synthetic construct
AATFLRLWGDTDKLI

SEQ ID NO: 38741 - protein, 13 aa, synthetic construct
AARPGGYAPDKLI

SEQ ID NO: 38742 - protein, 15 aa, synthetic construct
AASNPTYWGSSINSS

SEQ ID NO: 38743 - protein, 13 aa, synthetic construct
AACLLGDTHLNSS

SEQ ID NO: 38744 - protein, 12 aa, synthetic construct
AAVPTGGPDKLI

SEQ ID NO: 38745 - protein, 16 aa, synthetic construct
AASSMSCTGGWTDKLI

SEQ ID NO: 38746 - protein, 11 aa, synthetic construct
AAILGDTDKLI

SEQ ID NO: 38747 - protein, 8 aa, synthetic construct
AASKGRGI

SEQ ID NO: 38748 - protein, 13 aa, synthetic construct
AASPYWGIPDKLI

SEQ ID NO: 38749 - protein, 13 aa, synthetic construct
AASWGIRGTDKLI

SEQ ID NO: 38750 - protein, 11 aa, synthetic construct
ATGGYWGDKLI

SEQ ID NO: 38751 - protein, 12 aa, synthetic construct
AASRRGYSDKLI

SEQ ID NO: 38752 - protein, 11 aa, synthetic construct
ASTGGYGDKLI

SEQ ID NO: 38753 - protein, 13 aa, synthetic construct
APTGGSQYTDKLI

SEQ ID NO: 38754 - protein, 8 aa, synthetic construct
AASIGKLI

SEQ ID NO: 38755 - protein, 15 aa, synthetic construct
AASGGTGGPYTDKLI

SEQ ID NO: 38756 - protein, 16 aa, synthetic construct
AAHLPTRGIPYTDKLI

SEQ ID NO: 38757 - protein, 6 aa, synthetic construct
AAPTLI

SEQ ID NO: 38758 - protein, 13 aa, synthetic construct
AARDWGVYTDKLI

SEQ ID NO: 38759 - protein, 14 aa, synthetic construct
AASWPSYWGYANSS

SEQ ID NO: 38760 - protein, 15 aa, synthetic construct
AASLLLPLGDTRELI

SEQ ID NO: 38761 - protein, 15 aa, synthetic construct
AASLGDTHGYTDKLI

SEQ ID NO: 38762 - protein, 13 aa, synthetic construct
AALLPGIRTDKLI

SEQ ID NO: 38763 - protein, 15 aa, synthetic construct
AASPAVLGDTTDKLI

SEQ ID NO: 38764 - protein, 11 aa, synthetic construct
AASRGLTAQLF

SEQ ID NO: 38765 - protein, 11 aa, synthetic construct
AALWGTPINSS

SEQ ID NO: 38766 - protein, 12 aa, synthetic construct
AASSGGYADKLI

SEQ ID NO: 38767 - protein, 9 aa, synthetic construct
AASVTDKLI

SEQ ID NO: 38768 - protein, 13 aa, synthetic construct
AAMYWGIRFDKLI

SEQ ID NO: 38769 - protein, 13 aa, synthetic construct
AAGGIVSWDTRQM

SEQ ID NO: 38770 - protein, 13 aa, synthetic construct
AASIGLGDTDKLI

SEQ ID NO: 38771 - protein, 11 aa, synthetic construct
AARVGVTDKLI

SEQ ID NO: 38772 - protein, 14 aa, synthetic construct
AALYVRGGLAINSS

SEQ ID NO: 38773 - protein, 13 aa, synthetic construct
AASNRGPYTDKLI

SEQ ID NO: 38774 - protein, 14 aa, synthetic construct
AASPSYVSAPINSS

SEQ ID NO: 38775 - protein, 10 aa, synthetic construct
AASAGADKLI

SEQ ID NO: 38776 - protein, 14 aa, synthetic construct
AARGLRGIRSDKLI

SEQ ID NO: 38777 - protein, 15 aa, synthetic construct
AASKAFLRIWGNKLI

SEQ ID NO: 38778 - protein, 13 aa, synthetic construct
AASASSLRGDKLI

SEQ ID NO: 38779 - protein, 14 aa, synthetic construct
AASRRTGGYVDKLI

SEQ ID NO: 38780 - protein, 14 aa, synthetic construct
AASFYWGIHTDKLI

SEQ ID NO: 38781 - protein, 10 aa, synthetic construct
AVLGDTDKLI

SEQ ID NO: 38782 - protein, 10 aa, synthetic construct
AASGDPPKLI

SEQ ID NO: 38783 - protein, 12 aa, synthetic construct
ARSGGRYTDKLI

SEQ ID NO: 38784 - protein, 12 aa, synthetic construct
AAEGDTSTDKLI

SEQ ID NO: 38785 - protein, 12 aa, synthetic construct
AAILGDSTDKLI

SEQ ID NO: 38786 - protein, 14 aa, synthetic construct
AASGDWGGVSDKLI

SEQ ID NO: 38787 - protein, 13 aa, synthetic construct
AASMPGLYTDKLI

SEQ ID NO: 38788 - protein, 16 aa, synthetic construct
AAVLLPTLGDRTDKLI

SEQ ID NO: 38789 - protein, 16 aa, synthetic construct
AASNLPSYWGITDKLI

SEQ ID NO: 38790 - protein, 12 aa, synthetic construct
AALGAPRTDKLI

SEQ ID NO: 38791 - protein, 14 aa, synthetic construct
AASTRGGPHTDKLI

SEQ ID NO: 38792 - protein, 14 aa, synthetic construct
AASTLGDPYTDKLI

SEQ ID NO: 38793 - protein, 13 aa, synthetic construct
AASREGYPTDKLI

SEQ ID NO: 38794 - protein, 14 aa, synthetic construct
AASMLLRLGDDKLI

SEQ ID NO: 38795 - protein, 12 aa, synthetic construct
AARGILYTDKLI

SEQ ID NO: 38796 - protein, 15 aa, synthetic construct
AASRYWGIPGTDKLI

SEQ ID NO: 38797 - protein, 9 aa, synthetic construct
AARGGDKLI

SEQ ID NO: 38798 - protein, 16 aa, synthetic construct
AGLPASTGGKYTDKLI

SEQ ID NO: 38799 - protein, 7 aa, synthetic construct
AASRSSY

SEQ ID NO: 38800 - protein, 14 aa, synthetic construct
AAPYWGTPYTDKLI

SEQ ID NO: 38801 - protein, 11 aa, synthetic construct
AASPYWGINSS

SEQ ID NO: 38802 - protein, 16 aa, synthetic construct
AAIRPLTGGYHTDKLI

SEQ ID NO: 38803 - protein, 12 aa, synthetic construct
AALLPWGPDKLI

SEQ ID NO: 38804 - protein, 11 aa, synthetic construct
AASMGLGGKLI

SEQ ID NO: 38805 - protein, 13 aa, synthetic construct
AASFVLGTTDKLI

SEQ ID NO: 38806 - protein, 14 aa, synthetic construct
AASPRGGIYTDKLI

SEQ ID NO: 38807 - protein, 12 aa, synthetic construct
AANTGVYTDKLI

SEQ ID NO: 38808 - protein, 14 aa, synthetic construct
AASRNWGIPPDKLI

SEQ ID NO: 38809 - protein, 16 aa, synthetic construct
AASRGPSCWGIRPDKL

SEQ ID NO: 38810 - protein, 16 aa, synthetic construct
AARSTFLLFWGILGTD

SEQ ID NO: 38811 - protein, 9 aa, synthetic construct
AASGYARTH

SEQ ID NO: 38812 - protein, 16 aa, synthetic construct
AASRGGTASSWDTRQM

SEQ ID NO: 38813 - protein, 14 aa, synthetic construct
AASNLGAPGTDKLI

SEQ ID NO: 38814 - protein, 16 aa, synthetic construct
AEPSYPYWGRYTDKLI

SEQ ID NO: 38815 - protein, 14 aa, synthetic construct
AASMVLGDTRDELI

SEQ ID NO: 38816 - protein, 14 aa, synthetic construct
AASKEPGVTPINSS

SEQ ID NO: 38817 - protein, 8 aa, synthetic construct
AARADKLI

SEQ ID NO: 38818 - protein, 13 aa, synthetic construct
AASLGDTTPINSS

SEQ ID NO: 38819 - protein, 14 aa, synthetic construct
AASRVGDSYTDKLI

SEQ ID NO: 38820 - protein, 15 aa, synthetic construct
AAPLPTSGGYTDKLI

SEQ ID NO: 38821 - protein, 13 aa, synthetic construct
AQEVGRLYTDKLI

SEQ ID NO: 38822 - protein, 16 aa, synthetic construct
AASLYWGIPPYTDKLI

SEQ ID NO: 38823 - protein, 12 aa, synthetic construct
AARGGSYTDKLI

SEQ ID NO: 38824 - protein, 14 aa, synthetic construct
AASPWGIRNTDKLI

SEQ ID NO: 38825 - protein, 16 aa, synthetic construct
AAFLRGILCSWDTRQM

SEQ ID NO: 38826 - protein, 14 aa, synthetic construct
AAIPARNDYTDKLI

SEQ ID NO: 38827 - protein, 15 aa, synthetic construct
AAGAFLQGDTRAKLI

SEQ ID NO: 38828 - protein, 13 aa, synthetic construct
AAEGIRGGTDKLI

SEQ ID NO: 38829 - protein, 13 aa, synthetic construct
AAIPTGGHTDKLI

SEQ ID NO: 38830 - protein, 16 aa, synthetic construct
AAILPLLLGEYTDKLI

SEQ ID NO: 38831 - protein, 15 aa, synthetic construct
AALLGDNSPGTDKLI

SEQ ID NO: 38832 - protein, 15 aa, synthetic construct
AASNYWGIRETDKLI

SEQ ID NO: 38833 - protein, 14 aa, synthetic construct
AAVPILGDTRYKLI

SEQ ID NO: 38834 - protein, 15 aa, synthetic construct
AASMPYWGSYTDKLI

SEQ ID NO: 38835 - protein, 14 aa, synthetic construct
AASKTYWGRTDKLI

SEQ ID NO: 38836 - protein, 14 aa, synthetic construct
AAEFGGYPYTDKLI

SEQ ID NO: 38837 - protein, 12 aa, synthetic construct
AAVGDTYTDKLI

SEQ ID NO: 38838 - protein, 15 aa, synthetic construct
AARGLPRSTGGLVHR

SEQ ID NO: 38839 - protein, 11 aa, synthetic construct
AALGDNADKLI

SEQ ID NO: 38840 - protein, 12 aa, synthetic construct
AASSGGYNDKLI

SEQ ID NO: 38841 - protein, 10 aa, synthetic construct
GGDTRTDKLI

SEQ ID NO: 38842 - protein, 15 aa, synthetic construct
AASSVLPVLGDTYTD

SEQ ID NO: 38843 - protein, 13 aa, synthetic construct
AASSLLGDTDKLI

SEQ ID NO: 38844 - protein, 14 aa, synthetic construct
AASIPGGGYTDKLI

SEQ ID NO: 38845 - protein, 16 aa, synthetic construct
AASPNSTGGPYTDKLI

SEQ ID NO: 38846 - protein, 15 aa, synthetic construct
AASPPTWGAYTDKLI

SEQ ID NO: 38847 - protein, 13 aa, synthetic construct
AASTGGSYTDKLI

SEQ ID NO: 38848 - protein, 15 aa, synthetic construct
AASRPTGGYSSDKLI

SEQ ID NO: 38849 - protein, 13 aa, synthetic construct
AAPLLLGDTDKLI

SEQ ID NO: 38850 - protein, 10 aa, synthetic construct
AASIVWDKLI

SEQ ID NO: 38851 - protein, 12 aa, synthetic construct
AALYWGYTDKLI

SEQ ID NO: 38852 - protein, 13 aa, synthetic construct
AASYVLGDRWKLI

SEQ ID NO: 38853 - protein, 13 aa, synthetic construct
AADVLGAYTDKLI

SEQ ID NO: 38854 - protein, 13 aa, synthetic construct
AASMGGINTDKLI

SEQ ID NO: 38855 - protein, 16 aa, synthetic construct
AARPFPSTGGPGSDKL

SEQ ID NO: 38856 - protein, 15 aa, synthetic construct
AAAPSSWGFHTDKLI

SEQ ID NO: 38857 - protein, 14 aa, synthetic construct
AASRTGGYAAAQLF

SEQ ID NO: 38858 - protein, 15 aa, synthetic construct
AAPLLGDTGTPINSS

SEQ ID NO: 38859 - protein, 12 aa, synthetic construct
AASRGDTPDKLI

SEQ ID NO: 38860 - protein, 15 aa, synthetic construct
AATFLQGIRYTDKLI

SEQ ID NO: 38861 - protein, 15 aa, synthetic construct
AASIAVLGASARPLI

SEQ ID NO: 38862 - protein, 14 aa, synthetic construct
AASIDWGIRADKLI

SEQ ID NO: 38863 - protein, 11 aa, synthetic construct
AASEGMTDKLI

SEQ ID NO: 38864 - protein, 10 aa, synthetic construct
GGYDQTDKLI

SEQ ID NO: 38865 - protein, 13 aa, synthetic construct
AARGLGDMTDKLI

SEQ ID NO: 38866 - protein, 14 aa, synthetic construct
AVGVWGIRHTDKLI

SEQ ID NO: 38867 - protein, 14 aa, synthetic construct
AASRGPSSWDTRQM

SEQ ID NO: 38868 - protein, 16 aa, synthetic construct
APWPSPGGGYAPINSS

SEQ ID NO: 38869 - protein, 16 aa, synthetic construct
AASRGLLLGDLTAQLF

SEQ ID NO: 38870 - protein, 10 aa, synthetic construct
AAFWGIDKLI

SEQ ID NO: 38871 - protein, 15 aa, synthetic construct
AARRPSSCTGGPDTD

SEQ ID NO: 38872 - protein, 15 aa, synthetic construct
AASIRTGGWDTDKLI

SEQ ID NO: 38873 - protein, 13 aa, synthetic construct
AASPWGIRTDKLI

SEQ ID NO: 38874 - protein, 12 aa, synthetic construct
AASPRAKTDKLI

SEQ ID NO: 38875 - protein, 8 aa, synthetic construct
AAPTAQLF

SEQ ID NO: 38876 - protein, 14 aa, synthetic construct
AASPLLRGDTRKLI

SEQ ID NO: 38877 - protein, 14 aa, synthetic construct
AAKGTGSRGAINSS

SEQ ID NO: 38878 - protein, 12 aa, synthetic construct
AANPYWYTDKLI

SEQ ID NO: 38879 - protein, 14 aa, synthetic construct
AASRDWGIATDKLI

SEQ ID NO: 38880 - protein, 15 aa, synthetic construct
AASPYWGIRESDKLI

SEQ ID NO: 38881 - protein, 16 aa, synthetic construct
AASPPTYWGPGTDKLI

SEQ ID NO: 38882 - protein, 16 aa, synthetic construct
AASEDSDWGIRDTDKL

SEQ ID NO: 38883 - protein, 9 aa, synthetic construct
AARGIAKLI

SEQ ID NO: 38884 - protein, 12 aa, synthetic construct
AANTGGPTDKLI

SEQ ID NO: 38885 - protein, 16 aa, synthetic construct
AAGAFLRNGGPSTPIN

SEQ ID NO: 38886 - protein, 16 aa, synthetic construct
AAAFLRAGGELLGHPT

SEQ ID NO: 38887 - protein, 15 aa, synthetic construct
AASMDWGIKNTDKLI

SEQ ID NO: 38888 - protein, 15 aa, synthetic construct
AASPPDWSSWDTRQM

SEQ ID NO: 38889 - protein, 16 aa, synthetic construct
AAFLRVLGDKSTDKLI

SEQ ID NO: 38890 - protein, 16 aa, synthetic construct
AASRNYLTGGYMTDKL

SEQ ID NO: 38891 - protein, 14 aa, synthetic construct
AARGGLGAPTDKLI

SEQ ID NO: 38892 - protein, 15 aa, synthetic construct
ADNFLRSQLLGHPTD

SEQ ID NO: 38893 - protein, 9 aa, synthetic construct
AAGLGARQM

SEQ ID NO: 38894 - protein, 13 aa, synthetic construct
AALWGIRYTDKLI

SEQ ID NO: 38895 - protein, 12 aa, synthetic construct
AALWGIRTDKLI

SEQ ID NO: 38896 - protein, 13 aa, synthetic construct
AASISLGATDKLI

SEQ ID NO: 38897 - protein, 16 aa, synthetic construct
GAFLLLGDTLHTDKLI

SEQ ID NO: 38898 - protein, 12 aa, synthetic construct
AAVPGTGGPNSS

SEQ ID NO: 38899 - protein, 15 aa, synthetic construct
AARRVPGGSHTDKLI

SEQ ID NO: 38900 - protein, 11 aa, synthetic construct
AASIRGIDKLI

SEQ ID NO: 38901 - protein, 15 aa, synthetic construct
AAFLRGGYAYTDKLI

SEQ ID NO: 38902 - protein, 11 aa, synthetic construct
AASSLYTDKLI

SEQ ID NO: 38903 - protein, 14 aa, synthetic construct
AASAWGDTLDSTTL

SEQ ID NO: 38904 - protein, 10 aa, synthetic construct
AASMMTAQLF

SEQ ID NO: 38905 - protein, 14 aa, synthetic construct
AASTRGGYAPDKLI

SEQ ID NO: 38906 - protein, 10 aa, synthetic construct
AAGDTTDKLI

SEQ ID NO: 38907 - protein, 16 aa, synthetic construct
AASPLPPTGGYTDKLI

SEQ ID NO: 38908 - protein, 10 aa, synthetic construct
AASPFQRETH

SEQ ID NO: 38909 - protein, 12 aa, synthetic construct
AASWGPPPINSS

SEQ ID NO: 38910 - protein, 14 aa, synthetic construct
AASLYWGIRDDKLI

SEQ ID NO: 38911 - protein, 14 aa, synthetic construct
AAPYTGGSPTDKLI

SEQ ID NO: 38912 - protein, 14 aa, synthetic construct
AVLGDTRRGTDKLI

SEQ ID NO: 38913 - protein, 16 aa, synthetic construct
AATFLRRLGAHTDKLI

SEQ ID NO: 38914 - protein, 12 aa, synthetic construct
AASQLGANDKLI

SEQ ID NO: 38915 - protein, 15 aa, synthetic construct
AASPSPVLGDTDKLI

SEQ ID NO: 38916 - protein, 14 aa, synthetic construct
AATLGEPWYTDKLI

SEQ ID NO: 38917 - protein, 15 aa, synthetic construct
AASPAFLQGIRLNSS

SEQ ID NO: 38918 - protein, 13 aa, synthetic construct
AAMAYGGGHDKLI

SEQ ID NO: 38919 - protein, 16 aa, synthetic construct
AAGLPRWGPTSPDKLI

SEQ ID NO: 38920 - protein, 15 aa, synthetic construct
AASPLPTCWGIRPLI

SEQ ID NO: 38921 - protein, 13 aa, synthetic construct
AASDWGIHTDKLI

SEQ ID NO: 38922 - protein, 11 aa, synthetic construct
AVSFPSPINSS

SEQ ID NO: 38923 - protein, 14 aa, synthetic construct
AATGGYAIWDTRQM

SEQ ID NO: 38924 - protein, 16 aa, synthetic construct
AASIPSTGGYYTDKLI

SEQ ID NO: 38925 - protein, 15 aa, synthetic construct
AASISGGYDYTDKLI

SEQ ID NO: 38926 - protein, 15 aa, synthetic construct
AASMIPTHWGILDTD

SEQ ID NO: 38927 - protein, 12 aa, synthetic construct
AAFLLGDNDKLI

SEQ ID NO: 38928 - protein, 11 aa, synthetic construct
AASMGDTHKLI

SEQ ID NO: 38929 - protein, 13 aa, synthetic construct
ATPFVLGDRGKLI

SEQ ID NO: 38930 - protein, 16 aa, synthetic construct
AANNPTPTGGGYTDKL

SEQ ID NO: 38931 - protein, 16 aa, synthetic construct
AARETPVLGDTPAQLF

SEQ ID NO: 38932 - protein, 15 aa, synthetic construct
AASIPAGGPSSWDTR

SEQ ID NO: 38933 - protein, 15 aa, synthetic construct
AASMELGDTLGDKLI

SEQ ID NO: 38934 - protein, 13 aa, synthetic construct
AALWGALLGHPTD

SEQ ID NO: 38935 - protein, 10 aa, synthetic construct
AATGRPHELI

SEQ ID NO: 38936 - protein, 16 aa, synthetic construct
AARPSYGLGESSWDTR

SEQ ID NO: 38937 - protein, 14 aa, synthetic construct
AEGGSTGGYTDKLI

SEQ ID NO: 38938 - protein, 16 aa, synthetic construct
AASNWGIPSSWDTRQM

SEQ ID NO: 38939 - protein, 11 aa, synthetic construct
AATGGYTDKLI

SEQ ID NO: 38940 - protein, 16 aa, synthetic construct
AASEAPYGDTGSSWDT

SEQ ID NO: 38941 - protein, 14 aa, synthetic construct
VSKGAGDPYTDKLI

SEQ ID NO: 38942 - protein, 13 aa, synthetic construct
AASNWGILGDKLI

SEQ ID NO: 38943 - protein, 16 aa, synthetic construct
AECLPTTVGDTYTDKL

SEQ ID NO: 38944 - protein, 16 aa, synthetic construct
AASMTLREGDTAPGTP

SEQ ID NO: 38945 - protein, 16 aa, synthetic construct
AAGLPCTGGYDTDKLI

SEQ ID NO: 38946 - protein, 13 aa, synthetic construct
AASRGDTHTDKLI

SEQ ID NO: 38947 - protein, 10 aa, synthetic construct
AASERDNKLI

SEQ ID NO: 38948 - protein, 13 aa, synthetic construct
AASNRGIHTDKLI

SEQ ID NO: 38949 - protein, 12 aa, synthetic construct
AVRLGDTADKLI

SEQ ID NO: 38950 - protein, 16 aa, synthetic construct
AARTSFGGYLYTDKLI

SEQ ID NO: 38951 - protein, 14 aa, synthetic construct
AALSNWGRYTDKLI

SEQ ID NO: 38952 - protein, 13 aa, synthetic construct
AAKAGLGDTDKLI

SEQ ID NO: 38953 - protein, 15 aa, synthetic construct
AARYDPPGGYADKLI

SEQ ID NO: 38954 - protein, 15 aa, synthetic construct
AASTRRVSSWDTRQM

SEQ ID NO: 38955 - protein, 14 aa, synthetic construct
AASKGGSSWDTRQM

SEQ ID NO: 38956 - protein, 15 aa, synthetic construct
AASTTGGYKLTAQLF

SEQ ID NO: 38957 - protein, 16 aa, synthetic construct
AASTALRMGYAGDKLI

SEQ ID NO: 38958 - protein, 10 aa, synthetic construct
AAISWDTRQM

SEQ ID NO: 38959 - protein, 16 aa, synthetic construct
AASRGVLGDTGTDKLI

SEQ ID NO: 38960 - protein, 13 aa, synthetic construct
AASRWGDITDKLI

SEQ ID NO: 38961 - protein, 16 aa, synthetic construct
AASPYSSPLLGDTDKL

SEQ ID NO: 38962 - protein, 15 aa, synthetic construct
AASEGGGQLLGHPTD

SEQ ID NO: 38963 - protein, 15 aa, synthetic construct
AAINSPTGGPTDKLI

SEQ ID NO: 38964 - protein, 15 aa, synthetic construct
AAPSYGGKALTAQLF

SEQ ID NO: 38965 - protein, 16 aa, synthetic construct
AASSYVGDTSWDTRQM

SEQ ID NO: 38966 - protein, 16 aa, synthetic construct
AASNCTGGYAMGDKLI

SEQ ID NO: 38967 - protein, 16 aa, synthetic construct
AAAFPAVLGDSTDKLI

SEQ ID NO: 38968 - protein, 16 aa, synthetic construct
AASLILVLGDTGTDKL

SEQ ID NO: 38969 - protein, 13 aa, synthetic construct
AASQLGAGTDKLI

SEQ ID NO: 38970 - protein, 15 aa, synthetic construct
AASSWGILSWDTRQM

SEQ ID NO: 38971 - protein, 13 aa, synthetic construct
AASPWGIQARPLI

SEQ ID NO: 38972 - protein, 16 aa, synthetic construct
AASPLPRGYAAIGKLI

SEQ ID NO: 38973 - protein, 16 aa, synthetic construct
AASSPFLRGGGCTDKL

SEQ ID NO: 38974 - protein, 8 aa, synthetic construct
DTRQHNSS

SEQ ID NO: 38975 - protein, 13 aa, synthetic construct
AASLSSFYTDKLI

SEQ ID NO: 38976 - protein, 15 aa, synthetic construct
AASGMFPSSWDTRQM

SEQ ID NO: 38977 - protein, 14 aa, synthetic construct
AASMRYWGINDKLI

SEQ ID NO: 38978 - protein, 12 aa, synthetic construct
AAERIPGGDKLI

SEQ ID NO: 38979 - protein, 16 aa, synthetic construct
AATFRCTGGYGDTDKL

SEQ ID NO: 38980 - protein, 12 aa, synthetic construct
AASKWGIRDKLI

SEQ ID NO: 38981 - protein, 16 aa, synthetic construct
AASRGFLRTGGRPDKL

SEQ ID NO: 38982 - protein, 16 aa, synthetic construct
AASINSTGGYDGDKLI

SEQ ID NO: 38983 - protein, 15 aa, synthetic construct
AASDPSSTGDYDKLI

SEQ ID NO: 38984 - protein, 15 aa, synthetic construct
AASGTFLRWGILKLI

SEQ ID NO: 38985 - protein, 16 aa, synthetic construct
AASMRAFLDWGILGKL

SEQ ID NO: 38986 - protein, 16 aa, synthetic construct
AASKNLPTSWGIPDKL

SEQ ID NO: 38987 - protein, 15 aa, synthetic construct
AAVLFLLGAWGDKLI

SEQ ID NO: 38988 - protein, 15 aa, synthetic construct
AASTLGDIPWDTRQM

SEQ ID NO: 38989 - protein, 15 aa, synthetic construct
AASTLRGGPYTDKLI

SEQ ID NO: 38990 - protein, 16 aa, synthetic construct
AASSTYWGIRGLLGHP

SEQ ID NO: 38991 - protein, 10 aa, synthetic construct
AANWGIDKLI

SEQ ID NO: 38992 - protein, 13 aa, synthetic construct
AAAFLFTGRDKLI

SEQ ID NO: 38993 - protein, 10 aa, synthetic construct
AASQYTDKLI

SEQ ID NO: 38994 - protein, 13 aa, synthetic construct
AARIYLGVPDKLI

SEQ ID NO: 38995 - protein, 16 aa, synthetic construct
AASRLYWGIRETDKLI

SEQ ID NO: 38996 - protein, 15 aa, synthetic construct
AASLTGGKPDIDKLI

SEQ ID NO: 38997 - protein, 11 aa, synthetic construct
AASLGDTGKLI

SEQ ID NO: 38998 - protein, 15 aa, synthetic construct
AALLRGYASWDTRQM

SEQ ID NO: 38999 - protein, 11 aa, synthetic construct
AASPFPGGIRG

SEQ ID NO: 39000 - protein, 16 aa, synthetic construct
AASPFLPTGGLSSWDT

SEQ ID NO: 39001 - protein, 14 aa, synthetic construct
AASISGSSWDTRQM

SEQ ID NO: 39002 - protein, 15 aa, synthetic construct
AASMGWGTPSSWDTR

SEQ ID NO: 39003 - protein, 16 aa, synthetic construct
AARPSYVLGDSADKLI

SEQ ID NO: 39004 - protein, 16 aa, synthetic construct
AASGTSYWGSSSWDTR

SEQ ID NO: 39005 - protein, 16 aa, synthetic construct
AAKPSYFYWGSRPPIN

SEQ ID NO: 39006 - protein, 15 aa, synthetic construct
AASNLGDTIGLVNSS

SEQ ID NO: 39007 - protein, 15 aa, synthetic construct
AASKAFLRIWGTKLI

SEQ ID NO: 39008 - protein, 11 aa, synthetic construct
AEVLGDNHKLI

SEQ ID NO: 39009 - protein, 16 aa, synthetic construct
EASPPLCTGGFYTDKL

SEQ ID NO: 39010 - protein, 13 aa, synthetic construct
AAPLLLGDTDKLN

SEQ ID NO: 39011 - protein, 14 aa, synthetic construct
AASNGGYSWDTRQM

SEQ ID NO: 39012 - protein, 15 aa, synthetic construct
AARGPSTGGLARPLI

SEQ ID NO: 39013 - protein, 10 aa, synthetic construct
AASMDTDKLI

SEQ ID NO: 39014 - protein, 14 aa, synthetic construct
AASPSYWGIREPLI

SEQ ID NO: 39015 - protein, 13 aa, synthetic construct
AEEGYGGGTDKLI

SEQ ID NO: 39016 - protein, 15 aa, synthetic construct
AASLFSTGGYTDKLI

SEQ ID NO: 39017 - protein, 16 aa, synthetic construct
AASKEGWGILYTDKLI

SEQ ID NO: 39018 - protein, 13 aa, synthetic construct
AAPGGSPYTDKLI

SEQ ID NO: 39019 - protein, 15 aa, synthetic construct
AASAGYVWGYTDKLI

SEQ ID NO: 39020 - protein, 15 aa, synthetic construct
AASFFLPSSWDTRQM

SEQ ID NO: 39021 - protein, 9 aa, synthetic construct
AASVPDKLI

SEQ ID NO: 39022 - protein, 10 aa, synthetic construct
AIWGGPINSP

SEQ ID NO: 39023 - protein, 12 aa, synthetic construct
AAEGGSYTDKLI

SEQ ID NO: 39024 - protein, 13 aa, synthetic construct
AASFLLGSPDKLI

SEQ ID NO: 39025 - protein, 15 aa, synthetic construct
AARTGGPSSWDTRQM

SEQ ID NO: 39026 - protein, 16 aa, synthetic construct
AASPHWGIHSWDTRQM

SEQ ID NO: 39027 - protein, 12 aa, synthetic construct
AASRGHTPDKLI

SEQ ID NO: 39028 - protein, 16 aa, synthetic construct
AASNPVGDTRYTDKLI

SEQ ID NO: 39029 - protein, 13 aa, synthetic construct
AAMRGGPYTDKLI

SEQ ID NO: 39030 - protein, 15 aa, synthetic construct
AASITGGYGYTDKLI

SEQ ID NO: 39031 - protein, 13 aa, synthetic construct
AASGRLGAPINSS

SEQ ID NO: 39032 - protein, 14 aa, synthetic construct
AASRDWGIVTDKLI

SEQ ID NO: 39033 - protein, 16 aa, synthetic construct
AGLPASTGGKYTDKPI

SEQ ID NO: 39034 - protein, 12 aa, synthetic construct
AAAPPPRADQLI

SEQ ID NO: 39035 - protein, 13 aa, synthetic construct
AASKTGGYHDKLI

SEQ ID NO: 39036 - protein, 16 aa, synthetic construct
AASTFLLLGDTGTDKL

SEQ ID NO: 39037 - protein, 11 aa, synthetic construct
ADALGYTDKLI

SEQ ID NO: 39038 - protein, 8 aa, synthetic construct
GTYTDKLI

SEQ ID NO: 39039 - protein, 16 aa, synthetic construct
AARFLRDVVTGVSDKL

SEQ ID NO: 39040 - protein, 13 aa, synthetic construct
AEEGYGGAPINSS

SEQ ID NO: 39041 - protein, 11 aa, synthetic construct
AGLGDTPINSS

SEQ ID NO: 39042 - protein, 12 aa, synthetic construct
QRTGGYGAINSS

SEQ ID NO: 39043 - protein, 11 aa, synthetic construct
AASRGLTAQHF

SEQ ID NO: 39044 - protein, 5 aa, synthetic construct
AATLG

SEQ ID NO: 39045 - protein, 7 aa, synthetic construct
RASRSTH

SEQ ID NO: 39046 - protein, 12 aa, synthetic construct
AASSGIRTDKLI

SEQ ID NO: 39047 - protein, 11 aa, synthetic construct
AASRGGTDKLI

SEQ ID NO: 39048 - protein, 12 aa, synthetic construct
AAERIPGGDKHI

SEQ ID NO: 39049 - protein, 10 aa, synthetic construct
AAAGVAEKLI

SEQ ID NO: 39050 - protein, 9 aa, synthetic construct
AAMGDDKLI

SEQ ID NO: 39051 - protein, 15 aa, synthetic construct
AASTTLYWGIPDKLI

SEQ ID NO: 39052 - protein, 11 aa, synthetic construct
AASSYVGDTSW

SEQ ID NO: 39053 - protein, 11 aa, synthetic construct
AAMGAHTDTLI

SEQ ID NO: 39054 - protein, 14 aa, synthetic construct
AASIDWGLRADKLI

SEQ ID NO: 39055 - protein, 10 aa, synthetic construct
AVSSPTDQLI

SEQ ID NO: 39056 - protein, 13 aa, synthetic construct
AACLLGDTQLNSS

SEQ ID NO: 39057 - protein, 12 aa, synthetic construct
AASWGDTRRETH

SEQ ID NO: 39058 - protein, 11 aa, synthetic construct
AASGGVPINSS

SEQ ID NO: 39059 - protein, 16 aa, synthetic construct
AAFLRVLGDKSTEKLI

SEQ ID NO: 39060 - protein, 15 aa, synthetic construct
AASGGPGGPYTDKLI

SEQ ID NO: 39061 - protein, 14 aa, synthetic construct
AARGGLGAPTEKLI

SEQ ID NO: 39062 - protein, 15 aa, synthetic construct
AAFPRGGYAYTDKLI

SEQ ID NO: 39063 - protein, 16 aa, synthetic construct
AASNPLGGTRYTDKLI

SEQ ID NO: 39064 - protein, 12 aa, synthetic construct
QQAGGSLPINSS

SEQ ID NO: 39065 - protein, 11 aa, synthetic construct
AVLGMYTEKLI

SEQ ID NO: 39066 - protein, 12 aa, synthetic construct
AGGGGSTPINSS

SEQ ID NO: 39067 - protein, 15 aa, synthetic construct
AAINSPTGGPTDRLI

SEQ ID NO: 39068 - protein, 15 aa, synthetic construct
AASNSLRRITPGTPD

SEQ ID NO: 39069 - protein, 10 aa, synthetic construct
GGDTRTDQLI

SEQ ID NO: 39070 - protein, 14 aa, synthetic construct
AASLYWGIRDGKLI

SEQ ID NO: 39071 - protein, 14 aa, synthetic construct
AASPSCGIGPDKLI

SEQ ID NO: 39072 - protein, 12 aa, synthetic construct
AARPADRPINSS

SEQ ID NO: 39073 - protein, 16 aa, synthetic construct
AAKDSSVTTGGYGQLI

SEQ ID NO: 39074 - protein, 14 aa, synthetic construct
AARRPSSCTGGPDT

SEQ ID NO: 39075 - protein, 12 aa, synthetic construct
AASPRGDTDKLI

SEQ ID NO: 39076 - protein, 12 aa, synthetic construct
AADWGIASDKLI

SEQ ID NO: 39077 - protein, 11 aa, synthetic construct
AAPGGPPEKLI

SEQ ID NO: 39078 - protein, 14 aa, synthetic construct
AASKDWGIRPDQLI

SEQ ID NO: 39079 - protein, 10 aa, synthetic construct
AANWVPEKLI

SEQ ID NO: 39080 - protein, 15 aa, synthetic construct
AAPAFLRGRGPPYTD

SEQ ID NO: 39081 - protein, 14 aa, synthetic construct
AASPRGGSTPINSS

SEQ ID NO: 39082 - protein, 14 aa, synthetic construct
AASNTYWGRTDKLI

SEQ ID NO: 39083 - protein, 14 aa, synthetic construct
AASRNWGIPPEKLI

SEQ ID NO: 39084 - protein, 14 aa, synthetic construct
AASPSYVSAPISSS

SEQ ID NO: 39085 - protein, 16 aa, synthetic construct
AASRLYWGIRGSDKLI

SEQ ID NO: 39086 - protein, 11 aa, synthetic construct
AASEGMTDKLN

SEQ ID NO: 39087 - protein, 13 aa, synthetic construct
AASNWGILGDKLV

SEQ ID NO: 39088 - protein, 15 aa, synthetic construct
AASNSLRRIPPGTPD

SEQ ID NO: 39089 - protein, 11 aa, synthetic construct
AASEGTTDKLI

SEQ ID NO: 39090 - protein, 13 aa, synthetic construct
AASNWGILGDQLI

SEQ ID NO: 39091 - protein, 11 aa, synthetic construct
AAYRGIPDKLI

SEQ ID NO: 39092 - protein, 9 aa, synthetic construct
AAYGMKDTH

SEQ ID NO: 39093 - protein, 9 aa, synthetic construct
AASNTEKLI

SEQ ID NO: 39094 - protein, 7 aa, synthetic construct
PHTDKLI

SEQ ID NO: 39095 - protein, 13 aa, synthetic construct
AASNRGTHTDKLI

SEQ ID NO: 39096 - protein, 16 aa, synthetic construct
AASRGVLGDTGTEKLI

SEQ ID NO: 39097 - protein, 12 aa, synthetic construct
AAYWGMRGDKLI

SEQ ID NO: 39098 - protein, 10 aa, synthetic construct
AAFWGIEKLI

SEQ ID NO: 39099 - protein, 15 aa, synthetic construct
AAGAFLQGDTPINSS

SEQ ID NO: 39100 - protein, 12 aa, synthetic construct
AASFMGYTDKLI

SEQ ID NO: 39101 - protein, 7 aa, synthetic construct
AATDKHI

SEQ ID NO: 39102 - protein, 13 aa, synthetic construct
AASNLPSYWGITD

SEQ ID NO: 39103 - protein, 16 aa, synthetic construct
AARMFHYWGIRGDTLI

SEQ ID NO: 39104 - protein, 16 aa, synthetic construct
AAASLPTWGILDEKLI

SEQ ID NO: 39105 - protein, 16 aa, synthetic construct
AARMFHYWGIRGEKLI

SEQ ID NO: 39106 - protein, 9 aa, synthetic construct
AAYWGIRGA

SEQ ID NO: 39107 - protein, 11 aa, synthetic construct
HLNWGIPDKLI

SEQ ID NO: 39108 - protein, 16 aa, synthetic construct
AASPVLPTGGLSSWDT

SEQ ID NO: 39109 - protein, 15 aa, synthetic construct
AATFLRGTRSTDKLI

SEQ ID NO: 39110 - protein, 8 aa, synthetic construct
AAYTDKLF

SEQ ID NO: 39111 - protein, 14 aa, synthetic construct
AASPSYVSVPINSS

SEQ ID NO: 39112 - protein, 15 aa, synthetic construct
AAWPSCDWGYTEKLI

SEQ ID NO: 39113 - protein, 15 aa, synthetic construct
AARPSALGGSSRDTR

SEQ ID NO: 39114 - protein, 8 aa, synthetic construct
AARPSALG

SEQ ID NO: 39115 - protein, 11 aa, synthetic construct
AASGADTDKLI

SEQ ID NO: 39116 - protein, 12 aa, synthetic construct
AATTGGYTEKLI

SEQ ID NO: 39117 - protein, 13 aa, synthetic construct
AAVLYWGIPDQLI

SEQ ID NO: 39118 - protein, 14 aa, synthetic construct
AASRDWGIPAEKLI

SEQ ID NO: 39119 - protein, 14 aa, synthetic construct
AASRDWGIRPDKLI

SEQ ID NO: 39120 - protein, 11 aa, synthetic construct
AATVLGDDNLI

SEQ ID NO: 39121 - protein, 12 aa, synthetic construct
AASPLGDTDNSS

SEQ ID NO: 39122 - protein, 15 aa, synthetic construct
AAVFLRGGGSSINSS

SEQ ID NO: 39123 - protein, 13 aa, synthetic construct
AASPLHWGLEKLI

SEQ ID NO: 39124 - protein, 9 aa, synthetic construct
AARSTFLLF

SEQ ID NO: 39125 - protein, 13 aa, synthetic construct
AAGGLDPRTEKLI

SEQ ID NO: 39126 - protein, 15 aa, synthetic construct
AAVLFLLGAWGDQLI

SEQ ID NO: 39127 - protein, 12 aa, synthetic construct
AARTGGYTDKLI

SEQ ID NO: 39128 - protein, 12 aa, synthetic construct
AARTGGYADKLI

SEQ ID NO: 39129 - protein, 14 aa, synthetic construct
AASRDWGLATDKLI

SEQ ID NO: 39130 - protein, 13 aa, synthetic construct
AARTGGDYTDKLI

SEQ ID NO: 39131 - protein, 16 aa, synthetic construct
AASPNSTGGPYTEKLI

SEQ ID NO: 39132 - protein, 15 aa, synthetic construct
AASPHWGIRGTDKLI

SEQ ID NO: 39133 - protein, 16 aa, synthetic construct
AASRGVLGDTGTDKPI

SEQ ID NO: 39134 - protein, 15 aa, synthetic construct
AASPNWGIRHTDQLI

SEQ ID NO: 39135 - protein, 10 aa, synthetic construct
AARTGDTKLI

SEQ ID NO: 39136 - protein, 15 aa, synthetic construct
AASPAVLGDMTDKLI

SEQ ID NO: 39137 - protein, 15 aa, synthetic construct
AASPAVLGGMTDKLI

SEQ ID NO: 39138 - protein, 14 aa, synthetic construct
AASPRGGIYTEKLI

SEQ ID NO: 39139 - protein, 12 aa, synthetic construct
AAAPPPRADTLI

SEQ ID NO: 39140 - protein, 16 aa, synthetic construct
AARPTYGLGESSWDTR

SEQ ID NO: 39141 - protein, 13 aa, synthetic construct
AASDRGIHTDKLI

SEQ ID NO: 39142 - protein, 15 aa, synthetic construct
AASDPSSTGDTDKLI

SEQ ID NO: 39143 - protein, 8 aa, synthetic construct
AASDLLLG

SEQ ID NO: 39144 - protein, 14 aa, synthetic construct
AASPPYWEYTDKLI

SEQ ID NO: 39145 - protein, 6 aa, synthetic construct
AASATS

SEQ ID NO: 39146 - protein, 16 aa, synthetic construct
AASRGETASSWDTRQM

SEQ ID NO: 39147 - protein, 13 aa, synthetic construct
VASKVWGHTDKLI

SEQ ID NO: 39148 - protein, 10 aa, synthetic construct
AASAGAEKLI

SEQ ID NO: 39149 - protein, 10 aa, synthetic construct
AASPGRTGGL

SEQ ID NO: 39150 - protein, 14 aa, synthetic construct
AATSYWGLTPINSS

SEQ ID NO: 39151 - protein, 13 aa, synthetic construct
AASWGIRDTDKLI

SEQ ID NO: 39152 - protein, 10 aa, synthetic construct
AAFWGIDQLI

SEQ ID NO: 39153 - protein, 12 aa, synthetic construct
AASTGGYTGKLI

SEQ ID NO: 39154 - protein, 13 aa, synthetic construct
AASMETGGSDKLI

SEQ ID NO: 39155 - protein, 14 aa, synthetic construct
AASKDWGVRPDKLI

SEQ ID NO: 39156 - protein, 12 aa, synthetic construct
QQAWGRTPINSS

SEQ ID NO: 39157 - protein, 12 aa, synthetic construct
AASSRGDTDELI

SEQ ID NO: 39158 - protein, 12 aa, synthetic construct
QQVLGDTPINSS

SEQ ID NO: 39159 - protein, 16 aa, synthetic construct
AASSPFLRGGDVPINS

SEQ ID NO: 39160 - protein, 12 aa, synthetic construct
AASMGGIPDKLI

SEQ ID NO: 39161 - protein, 14 aa, synthetic construct
AASIWGIRTPINSS

SEQ ID NO: 39162 - protein, 10 aa, synthetic construct
QQVLSREKLI

SEQ ID NO: 39163 - protein, 16 aa, synthetic construct
AASSMSCTGGRTDKLI

SEQ ID NO: 39164 - protein, 12 aa, synthetic construct
AASMGPSTDKLI

SEQ ID NO: 39165 - protein, 15 aa, synthetic construct
AASSLVRGSYTDKPI

SEQ ID NO: 39166 - protein, 14 aa, synthetic construct
AASISGSSRDTRQM

SEQ ID NO: 39167 - protein, 14 aa, synthetic construct
QQAVLGDTRQHNSS

SEQ ID NO: 39168 - protein, 11 aa, synthetic construct
AASMGLGGELI

SEQ ID NO: 39169 - protein, 12 aa, synthetic construct
AADRGIPAEKLI

SEQ ID NO: 39170 - protein, 11 aa, synthetic construct
AASIRGYGRLI

SEQ ID NO: 39171 - protein, 13 aa, synthetic construct
AAEGMRGGTDKLI

SEQ ID NO: 39172 - protein, 11 aa, synthetic construct
AASMGLGGQLI

SEQ ID NO: 39173 - protein, 13 aa, synthetic construct
QQATGGYWAINSS

SEQ ID NO: 39174 - protein, 12 aa, synthetic construct
AASSRGDTEKLI

SEQ ID NO: 39175 - protein, 11 aa, synthetic construct
AASKGDTDRLI

SEQ ID NO: 39176 - protein, 14 aa, synthetic construct
AASKGGRSWDTRQM

SEQ ID NO: 39177 - protein, 14 aa, synthetic construct
QQEKWGIRDTDKLI

SEQ ID NO: 39178 - protein, 11 aa, synthetic construct
AASLGDTDNSS

SEQ ID NO: 39179 - protein, 14 aa, synthetic construct
AASLLRWGPPINSS

SEQ ID NO: 39180 - protein, 13 aa, synthetic construct
AASKVWGTPINSS

SEQ ID NO: 39181 - protein, 12 aa, synthetic construct
QQRGIQAPINSS

SEQ ID NO: 39182 - protein, 13 aa, synthetic construct
AASKVWGHTDNLI

SEQ ID NO: 39183 - protein, 14 aa, synthetic construct
AASKVLGDTRDELI

SEQ ID NO: 39184 - protein, 13 aa, synthetic construct
AADVLGAYTEKLI

SEQ ID NO: 39185 - protein, 15 aa, synthetic construct
AASKTLYWGIPDQLI

SEQ ID NO: 39186 - protein, 14 aa, synthetic construct
AASLYWGIRDDKRI

SEQ ID NO: 39187 - protein, 15 aa, synthetic construct
QQGPSYRGIRVLNSS

SEQ ID NO: 39188 - protein, 13 aa, synthetic construct
AASSRPPYTDKLT

SEQ ID NO: 39189 - protein, 12 aa, synthetic construct
AASSRPPYTDKL

SEQ ID NO: 39190 - protein, 13 aa, synthetic construct
AASTGGHVHRETH

SEQ ID NO: 39191 - protein, 15 aa, synthetic construct
AASKSHCPGGHDKLI

SEQ ID NO: 39192 - protein, 12 aa, synthetic construct
AASTGGSADKLI

SEQ ID NO: 39193 - protein, 12 aa, synthetic construct
AASTGGSTDKLI

SEQ ID NO: 39194 - protein, 11 aa, synthetic construct
AADVGVPDQLI

SEQ ID NO: 39195 - protein, 10 aa, synthetic construct
QQTGYPINSS

SEQ ID NO: 39196 - protein, 11 aa, synthetic construct
AASMCLGGKLI

SEQ ID NO: 39197 - protein, 12 aa, synthetic construct
AADRGIPADNLI

SEQ ID NO: 39198 - protein, 15 aa, synthetic construct
AASTLGDTIGLVNSS

SEQ ID NO: 39199 - protein, 13 aa, synthetic construct
AAAYWDTNTAKLI

SEQ ID NO: 39200 - protein, 13 aa, synthetic construct
AASWGGIRDDELI

SEQ ID NO: 39201 - protein, 13 aa, synthetic construct
AASMRWGILDQLI

SEQ ID NO: 39202 - protein, 13 aa, synthetic construct
AASMRWGILEKLI

SEQ ID NO: 39203 - protein, 13 aa, synthetic construct
AASGRGEYTEKLI

SEQ ID NO: 39204 - protein, 13 aa, synthetic construct
AAFLRLGAVDQLI

SEQ ID NO: 39205 - protein, 13 aa, synthetic construct
AASMRWGILYKLI

SEQ ID NO: 39206 - protein, 14 aa, synthetic construct
AASMRYWGINDQLI

SEQ ID NO: 39207 - protein, 13 aa, synthetic construct
AASVSSFFTDKLI

SEQ ID NO: 39208 - protein, 14 aa, synthetic construct
QQALLGVSTPINSS

SEQ ID NO: 39209 - protein, 14 aa, synthetic construct
AASMSGGDNTDKLI

SEQ ID NO: 39210 - protein, 11 aa, synthetic construct
AASGGYADNLI

SEQ ID NO: 39211 - protein, 13 aa, synthetic construct
AASTPFWGIRDTH

SEQ ID NO: 39212 - protein, 9 aa, synthetic construct
AACIPDKLI

SEQ ID NO: 39213 - protein, 14 aa, synthetic construct
AASSYVGARPINSS

SEQ ID NO: 39214 - protein, 14 aa, synthetic construct
AASMSGGYNTDKLV

SEQ ID NO: 39215 - protein, 12 aa, synthetic construct
AASGGDTPDKLI

SEQ ID NO: 39216 - protein, 10 aa, synthetic construct
AASGDPPQLI

SEQ ID NO: 39217 - protein, 13 aa, synthetic construct
AASYGGIDTDKLI

SEQ ID NO: 39218 - protein, 11 aa, synthetic construct
QQAGDTPINSS

SEQ ID NO: 39219 - protein, 12 aa, synthetic construct
AASGDIGTEKLI

SEQ ID NO: 39220 - protein, 14 aa, synthetic construct
AASMSGGYNTDQLI

SEQ ID NO: 39221 - protein, 12 aa, synthetic construct
AASHLGANDKLI

SEQ ID NO: 39222 - protein, 15 aa, synthetic construct
AASRYWGIPGTEKLI

SEQ ID NO: 39223 - protein, 14 aa, synthetic construct
AASMPTWRDTDQLI

SEQ ID NO: 39224 - protein, 11 aa, synthetic construct
AASIEDPDQLI

SEQ ID NO: 39225 - protein, 9 aa, synthetic construct
AASMIEKLI

SEQ ID NO: 39226 - protein, 12 aa, synthetic construct
AASSGIRNEKLI

SEQ ID NO: 39227 - protein, 16 aa, synthetic construct
AASIPSPGGYYTDKLI

SEQ ID NO: 39228 - protein, 12 aa, synthetic construct
AASSGIRNDQLI

SEQ ID NO: 39229 - protein, 8 aa, synthetic construct
QQARGGAS

SEQ ID NO: 39230 - protein, 12 aa, synthetic construct
QQARGDTPINSS

SEQ ID NO: 39231 - protein, 13 aa, synthetic construct
QQARGDITPINSS

SEQ ID NO: 39232 - protein, 7 aa, synthetic construct
RASRETH

SEQ ID NO: 39233 - protein, 15 aa, synthetic construct
QQAQATFGVTPINSS

SEQ ID NO: 39234 - protein, 12 aa, synthetic construct
AASSGGYNDTLI

SEQ ID NO: 39235 - protein, 12 aa, synthetic construct
AASSGGPTDQLI

SEQ ID NO: 39236 - protein, 13 aa, synthetic construct
AASTRWGILDKLI

SEQ ID NO: 39237 - protein, 13 aa, synthetic construct
QQAPYWGIPINSS

SEQ ID NO: 39238 - protein, 13 aa, synthetic construct
AASIGLGDTDNSS

SEQ ID NO: 39239 - protein, 15 aa, synthetic construct
QQAPTGGYATPINSS

SEQ ID NO: 39240 - protein, 15 aa, synthetic construct
AASMPRRGDTTDKLI

SEQ ID NO: 39241 - protein, 13 aa, synthetic construct
AASTTQGGHRETH

SEQ ID NO: 39242 - protein, 9 aa, synthetic construct
QQAPGTPDR

SEQ ID NO: 39243 - protein, 14 aa, synthetic construct
QQAPGGYGTPINSS

SEQ ID NO: 39244 - protein, 16 aa, synthetic construct
AARMFHSWGIRGDKLI

SEQ ID NO: 39245 - protein, 11 aa, synthetic construct
AAIRGDTDKLI

SEQ ID NO: 39246 - protein, 12 aa, synthetic construct
AAYWGMVPDTLI

SEQ ID NO: 39247 - protein, 10 aa, synthetic construct
ASTGGYGDKL

SEQ ID NO: 39248 - protein, 12 aa, synthetic construct
AGTGDTRADELI

SEQ ID NO: 39249 - protein, 16 aa, synthetic construct
AAGNCTGGYAMGDKLI

SEQ ID NO: 39250 - protein, 8 aa, synthetic construct
AANTEKLI

SEQ ID NO: 39251 - protein, 12 aa, synthetic construct
AALGAPRTDTLI

SEQ ID NO: 39252 - protein, 15 aa, synthetic construct
AAQRPSGGYATDKLI

SEQ ID NO: 39253 - protein, 11 aa, synthetic construct
EAALGDTDKLI

SEQ ID NO: 39254 - protein, 11 aa, synthetic construct
ASTGGYGGKLI

SEQ ID NO: 39255 - protein, 13 aa, synthetic construct
AAQLGDRVHRETH

SEQ ID NO: 39256 - protein, 10 aa, synthetic construct
AIWGGPINPS

SEQ ID NO: 39257 - protein, 10 aa, synthetic construct
AAGNTTDKLI

SEQ ID NO: 39258 - protein, 10 aa, synthetic construct
EAKGGPINSS

SEQ ID NO: 39259 - protein, 10 aa, synthetic construct
AANWVHDKLI

SEQ ID NO: 39260 - protein, 12 aa, synthetic construct
AAILGDSTDTLI

SEQ ID NO: 39261 - protein, 10 aa, synthetic construct
AANWVPDQLI

SEQ ID NO: 39262 - protein, 10 aa, synthetic construct
AANWVSDKLI

SEQ ID NO: 39263 - protein, 13 aa, synthetic construct
AAIPTGAHTDKLI

SEQ ID NO: 39264 - protein, 14 aa, synthetic construct
AAKGTGSRGAITSS

SEQ ID NO: 39265 - protein, 16 aa, synthetic construct
AECPPTTVGDTYTDKL

SEQ ID NO: 39266 - protein, 10 aa, synthetic construct
ATNWVPDKLI

SEQ ID NO: 39267 - protein, 16 aa, synthetic construct
AANNPTPPGGGYTDKL

SEQ ID NO: 39268 - protein, 12 aa, synthetic construct
AARLAGGPDKLI

SEQ ID NO: 39269 - protein, 11 aa, synthetic construct
AAMGEYTDKLI

SEQ ID NO: 39270 - protein, 14 aa, synthetic construct
AALYVRGGVAINSS

SEQ ID NO: 39271 - protein, 10 aa, synthetic construct
GGDTRTDTLI

SEQ ID NO: 39272 - protein, 11 aa, synthetic construct
AARGAPPINSS

SEQ ID NO: 39273 - protein, 12 aa, synthetic construct
AGGGGIHTDKLN

SEQ ID NO: 39274 - protein, 13 aa, synthetic construct
ATSSRPPYTDKLI

SEQ ID NO: 39275 - protein, 12 aa, synthetic construct
AGLGDTYNDKLI

SEQ ID NO: 39276 - protein, 11 aa, synthetic construct
AVLGMCTDKLI

SEQ ID NO: 39277 - protein, 12 aa, synthetic construct
AARGGRTPINSS

SEQ ID NO: 39278 - protein, 14 aa, synthetic construct
AAREEMGDTPINSS

SEQ ID NO: 39279 - protein, 15 aa, synthetic construct
AARDILGMRSTDKLI

SEQ ID NO: 39280 - protein, 12 aa, synthetic construct
AGLYWGIPDQLI

SEQ ID NO: 39281 - protein, 8 aa, synthetic construct
GKYTAKLI

SEQ ID NO: 39282 - protein, 11 aa, synthetic construct
ATRLGDTDKLI

SEQ ID NO: 39283 - protein, 12 aa, synthetic construct
ATRLAGGTDRLI

SEQ ID NO: 39284 - protein, 14 aa, synthetic construct
AARGLRGIRSDKPI

SEQ ID NO: 39285 - protein, 11 aa, synthetic construct
AVSFPSPINSP

SEQ ID NO: 39286 - protein, 13 aa, synthetic construct
AAMYWGIRFDQLI

SEQ ID NO: 39287 - protein, 12 aa, synthetic construct
AGPTGGPPDTLI

SEQ ID NO: 39288 - protein, 16 aa, synthetic construct
AECLPTTVGDTYTDQL

SEQ ID NO: 39289 - protein, 6 aa, synthetic construct
DPINSS

SEQ ID NO: 39290 - protein, 13 aa, synthetic construct
AARGGGGYTDKLI

SEQ ID NO: 39291 - protein, 12 aa, synthetic construct
EASGGLPPDKLI

SEQ ID NO: 39292 - protein, 15 aa, synthetic construct
AAPSYRGKALTAQLF

SEQ ID NO: 39293 - protein, 15 aa, synthetic construct
AAPLPTSGGSTDKLI

SEQ ID NO: 39294 - protein, 16 aa, synthetic construct
AAGLPRWGPTSPDRLI

SEQ ID NO: 39295 - protein, 15 aa, synthetic construct
AAIQPLGAPYTDKLI

SEQ ID NO: 39296 - protein, 13 aa, synthetic construct
AAPSYGGYTDKLI

SEQ ID NO: 39297 - protein, 15 aa, synthetic construct
ADNFLRSQLMGHPTD

SEQ ID NO: 39298 - protein, 13 aa, synthetic construct
AAYWGVRDTDKLI

SEQ ID NO: 39299 - protein, 13 aa, synthetic construct
AAPGTGGLHRETH

SEQ ID NO: 39300 - protein, 16 aa, synthetic construct
AAGLPRWGPTLPDKLI

SEQ ID NO: 39301 - protein, 11 aa, synthetic construct
AAILGDTDQLI

SEQ ID NO: 39302 - protein, 11 aa, synthetic construct
AARLGDTDKLT

SEQ ID NO: 39303 - protein, 11 aa, synthetic construct
AARLGDTEKLI

SEQ ID NO: 39304 - protein, 12 aa, synthetic construct
ATRMGEGADKLI

SEQ ID NO: 39305 - protein, 12 aa, synthetic construct
AASSGIRNYKLI

SEQ ID NO: 39306 - protein, 16 aa, synthetic construct
QQGRLPYWGTRQHNSS

SEQ ID NO: 39307 - protein, 10 aa, synthetic construct
ATRGYTDKLI

SEQ ID NO: 39308 - protein, 12 aa, synthetic construct
AASSGIRNDTLI

SEQ ID NO: 39309 - protein, 15 aa, synthetic construct
AASTFLRGGPADKLT

SEQ ID NO: 39310 - protein, 12 aa, synthetic construct
AASSGIRNDNLI

SEQ ID NO: 39311 - protein, 15 aa, synthetic construct
ATSKAFLRIWGNQLI

SEQ ID NO: 39312 - protein, 12 aa, synthetic construct
QRTGGYRPINSS

SEQ ID NO: 39313 - protein, 8 aa, synthetic construct
QWGIRGSS

SEQ ID NO: 39314 - protein, 12 aa, synthetic construct
AASSGIRKDKLI

SEQ ID NO: 39315 - protein, 10 aa, synthetic construct
RAGDTHDKLI

SEQ ID NO: 39316 - protein, 15 aa, synthetic construct
AASTFLRGGPADQLI

SEQ ID NO: 39317 - protein, 15 aa, synthetic construct
AASTFLRGGPADTLI

SEQ ID NO: 39318 - protein, 12 aa, synthetic construct
EASSGGYSDKLI

SEQ ID NO: 39319 - protein, 12 aa, synthetic construct
AASSGIRGDKLI

SEQ ID NO: 39320 - protein, 12 aa, synthetic construct
AASSGGYSDKLI

SEQ ID NO: 39321 - protein, 10 aa, synthetic construct
ATRGYPDKLI

SEQ ID NO: 39322 - protein, 10 aa, synthetic construct
ATRGVPEKLV

SEQ ID NO: 39323 - protein, 12 aa, synthetic construct
AASSGIRTEKLI

SEQ ID NO: 39324 - protein, 12 aa, synthetic construct
ATSPYWGISKLI

SEQ ID NO: 39325 - protein, 10 aa, synthetic construct
ATRGDTDKLV

SEQ ID NO: 39326 - protein, 14 aa, synthetic construct
AASTFLLGGPADKL

SEQ ID NO: 39327 - protein, 9 aa, synthetic construct
QRGIPDRLI

SEQ ID NO: 39328 - protein, 15 aa, synthetic construct
AASSLVRGSYADKLI

SEQ ID NO: 39329 - protein, 11 aa, synthetic construct
AQVLGDNHKLI

SEQ ID NO: 39330 - protein, 15 aa, synthetic construct
AASSLVGGSYTDKLI

SEQ ID NO: 39331 - protein, 14 aa, synthetic construct
AASSLLRGLHRDTH

SEQ ID NO: 39332 - protein, 14 aa, synthetic construct
AASSLLIGLHRSTH

SEQ ID NO: 39333 - protein, 14 aa, synthetic construct
AASSLLIGLHRETN

SEQ ID NO: 39334 - protein, 10 aa, synthetic construct
ATRGDTDQLI

SEQ ID NO: 39335 - protein, 10 aa, synthetic construct
ATRGDTDRLI

SEQ ID NO: 39336 - protein, 10 aa, synthetic construct
ATRGDTDTLI

SEQ ID NO: 39337 - protein, 14 aa, synthetic construct
AASSLLIGLHRETH

SEQ ID NO: 39338 - protein, 13 aa, synthetic construct
QRNWGIEYTDKLI

SEQ ID NO: 39339 - protein, 13 aa, synthetic construct
AASSLLGDTEKLI

SEQ ID NO: 39340 - protein, 10 aa, synthetic construct
ATRGDTEKLI

SEQ ID NO: 39341 - protein, 15 aa, synthetic construct
AASTFLRGGPAAKLL

SEQ ID NO: 39342 - protein, 12 aa, synthetic construct
QRPSYRDSIKSS

SEQ ID NO: 39343 - protein, 11 aa, synthetic construct
QQGWGSPINSS

SEQ ID NO: 39344 - protein, 13 aa, synthetic construct
EASTVQGDIHKLI

SEQ ID NO: 39345 - protein, 12 aa, synthetic construct
AASSGYTPDKLI

SEQ ID NO: 39346 - protein, 12 aa, synthetic construct
AASSGVHPDKLI

SEQ ID NO: 39347 - protein, 12 aa, synthetic construct
ESSSVGYADKLI

SEQ ID NO: 39348 - protein, 13 aa, synthetic construct
ATSPGDTGGDKLI

SEQ ID NO: 39349 - protein, 12 aa, synthetic construct
AASSGGYNDILI

SEQ ID NO: 39350 - protein, 12 aa, synthetic construct
AASSGGYNDRLI

SEQ ID NO: 39351 - protein, 16 aa, synthetic construct
APWPSPGGGYARINSS

SEQ ID NO: 39352 - protein, 16 aa, synthetic construct
AASSAYWGIRGLLGHP

SEQ ID NO: 39353 - protein, 10 aa, synthetic construct
AVFWGIDKLI

SEQ ID NO: 39354 - protein, 8 aa, synthetic construct
AVGATWLI

SEQ ID NO: 39355 - protein, 15 aa, synthetic construct
EASSCVILSWDTLQM

SEQ ID NO: 39356 - protein, 9 aa, synthetic construct
SARWIAKLI

SEQ ID NO: 39357 - protein, 16 aa, synthetic construct
SASPNSTGGPYTDKLI

SEQ ID NO: 39358 - protein, 15 aa, synthetic construct
AASRYWGIPGTDKIV

SEQ ID NO: 39359 - protein, 13 aa, synthetic construct
AASRWGDPTDKLI

SEQ ID NO: 39360 - protein, 13 aa, synthetic construct
AASRWGDITEKLI

SEQ ID NO: 39361 - protein, 8 aa, synthetic construct
AVGDTWLF

SEQ ID NO: 39362 - protein, 14 aa, synthetic construct
AASRVWDSYTETLI

SEQ ID NO: 39363 - protein, 12 aa, synthetic construct
AASTGGPTDKLI

SEQ ID NO: 39364 - protein, 16 aa, synthetic construct
AASRVVLGDTGTDKLI

SEQ ID NO: 39365 - protein, 14 aa, synthetic construct
AASRVGDSYTVKLI

SEQ ID NO: 39366 - protein, 10 aa, synthetic construct
SASQYTDKLI

SEQ ID NO: 39367 - protein, 12 aa, synthetic construct
SASSGGYNDKLI

SEQ ID NO: 39368 - protein, 14 aa, synthetic construct
AASRVGDSYTAQLI

SEQ ID NO: 39369 - protein, 14 aa, synthetic construct
AASRVGDGYTDKII

SEQ ID NO: 39370 - protein, 16 aa, synthetic construct
AASRTYLTGGYMTDKL

SEQ ID NO: 39371 - protein, 9 aa, synthetic construct
EASRSSYYG

SEQ ID NO: 39372 - protein, 13 aa, synthetic construct
EVLVDTREADKHI

SEQ ID NO: 39373 - protein, 14 aa, synthetic construct
AVGDWGIPKPINST

SEQ ID NO: 39374 - protein, 14 aa, synthetic construct
AVGVWGIPTPINSS

SEQ ID NO: 39375 - protein, 10 aa, synthetic construct
AASSEDGGLI

SEQ ID NO: 39376 - protein, 10 aa, synthetic construct
AASSEDIGLI

SEQ ID NO: 39377 - protein, 10 aa, synthetic construct
SANWVPEKLI

SEQ ID NO: 39378 - protein, 12 aa, synthetic construct
AASSGGPTDKPI

SEQ ID NO: 39379 - protein, 13 aa, synthetic construct
ATSREGYPTDKLI

SEQ ID NO: 39380 - protein, 14 aa, synthetic construct
EASYWGIPHTDKLI

SEQ ID NO: 39381 - protein, 7 aa, synthetic construct
RASRYTH

SEQ ID NO: 39382 - protein, 12 aa, synthetic construct
AASSGGYAEKLI

SEQ ID NO: 39383 - protein, 6 aa, synthetic construct
RSPRLG

SEQ ID NO: 39384 - protein, 15 aa, synthetic construct
AASTFLRGGPAEKLI

SEQ ID NO: 39385 - protein, 12 aa, synthetic construct
AASSGGPTVKLI

SEQ ID NO: 39386 - protein, 12 aa, synthetic construct
AASSGGPTSQLI

SEQ ID NO: 39387 - protein, 14 aa, synthetic construct
EASSDCGIATDKLI

SEQ ID NO: 39388 - protein, 16 aa, synthetic construct
SAGLPCTGGYDTDKLI

SEQ ID NO: 39389 - protein, 13 aa, synthetic construct
AASTGDTLSDKLI

SEQ ID NO: 39390 - protein, 8 aa, synthetic construct
AVAVDKLI

SEQ ID NO: 39391 - protein, 12 aa, synthetic construct
AASSGGPTDKLT

SEQ ID NO: 39392 - protein, 12 aa, synthetic construct
AASSGGPTDKLS

SEQ ID NO: 39393 - protein, 11 aa, synthetic construct
SAIGGGADKLI

SEQ ID NO: 39394 - protein, 14 aa, synthetic construct
SALYVRGGLAINSS

SEQ ID NO: 39395 - protein, 12 aa, synthetic construct
AASSGGPIDKLI

SEQ ID NO: 39396 - protein, 14 aa, synthetic construct
AASSGGDTLDSATL

SEQ ID NO: 39397 - protein, 16 aa, synthetic construct
AASSFLPTGGLSSWDT

SEQ ID NO: 39398 - protein, 16 aa, synthetic construct
APWPSPGGGYAPRNSS

SEQ ID NO: 39399 - protein, 11 aa, synthetic construct
SAMVSWVDKLI

SEQ ID NO: 39400 - protein, 6 aa, synthetic construct
APVSTQ

SEQ ID NO: 39401 - protein, 10 aa, synthetic construct
QQVRCTDKLI

SEQ ID NO: 39402 - protein, 15 aa, synthetic construct
AASTAYLGGYTDKLI

SEQ ID NO: 39403 - protein, 10 aa, synthetic construct
ATRGDTDKLF

SEQ ID NO: 39404 - protein, 15 aa, synthetic construct
QQRGRLGDTRPINSS

SEQ ID NO: 39405 - protein, 13 aa, synthetic construct
ASSNVWGHTDKLI

SEQ ID NO: 39406 - protein, 13 aa, synthetic construct
AASSWGDITDKLI

SEQ ID NO: 39407 - protein, 7 aa, synthetic construct
QQPINSS

SEQ ID NO: 39408 - protein, 11 aa, synthetic construct
QQPSTLSINSS

SEQ ID NO: 39409 - protein, 16 aa, synthetic construct
AASSVSCTGGWTDKLI

SEQ ID NO: 39410 - protein, 10 aa, synthetic construct
ASFSCIRIQM

SEQ ID NO: 39411 - protein, 12 aa, synthetic construct
ASSSRGDTDKLI

SEQ ID NO: 39412 - protein, 11 aa, synthetic construct
QQPYWGMINSS

SEQ ID NO: 39413 - protein, 15 aa, synthetic construct
AASSVLPVLGDTSTD

SEQ ID NO: 39414 - protein, 13 aa, synthetic construct
ASSSRPPYTDKLI

SEQ ID NO: 39415 - protein, 16 aa, synthetic construct
AASSVLPVLGDTGPIN

SEQ ID NO: 39416 - protein, 10 aa, synthetic construct
ASGGGGDKLI

SEQ ID NO: 39417 - protein, 16 aa, synthetic construct
AASSTYWGIRGLMGHP

SEQ ID NO: 39418 - protein, 15 aa, synthetic construct
ASTFLRLWGDTDKLI

SEQ ID NO: 39419 - protein, 13 aa, synthetic construct
EPSNWGILGDKLI

SEQ ID NO: 39420 - protein, 16 aa, synthetic construct
AASSTSCTGGWTDKLI

SEQ ID NO: 39421 - protein, 15 aa, synthetic construct
AASSTHWGIRGLLGH

SEQ ID NO: 39422 - protein, 16 aa, synthetic construct
ASTFLRRLGAHTDKLI

SEQ ID NO: 39423 - protein, 12 aa, synthetic construct
AASSSRSSWDTR

SEQ ID NO: 39424 - protein, 8 aa, synthetic construct
ASDLPCTG

SEQ ID NO: 39425 - protein, 8 aa, synthetic construct
AASTDKLV

SEQ ID NO: 39426 - protein, 8 aa, synthetic construct
AASTDQLI

SEQ ID NO: 39427 - protein, 15 aa, synthetic construct
AASSWGILSRDTRQM

SEQ ID NO: 39428 - protein, 8 aa, synthetic construct
AASTDKLF

SEQ ID NO: 39429 - protein, 16 aa, synthetic construct
AASSMSCTGGWTDKHI

SEQ ID NO: 39430 - protein, 9 aa, synthetic construct
ASRGYERSH

SEQ ID NO: 39431 - protein, 8 aa, synthetic construct
AASTANLI

SEQ ID NO: 39432 - protein, 9 aa, synthetic construct
EQTYELQSP

SEQ ID NO: 39433 - protein, 16 aa, synthetic construct
AASTALRLGYAGDQLI

SEQ ID NO: 39434 - protein, 16 aa, synthetic construct
AASTALRLGYAGDKLI

SEQ ID NO: 39435 - protein, 8 aa, synthetic construct
AASTAKLI

SEQ ID NO: 39436 - protein, 15 aa, synthetic construct
QQLVLGDTGTPINSS

SEQ ID NO: 39437 - protein, 10 aa, synthetic construct
ASNWVPDKLI

SEQ ID NO: 39438 - protein, 15 aa, synthetic construct
AASTAFLRTWGNKLI

SEQ ID NO: 39439 - protein, 11 aa, synthetic construct
ASPGGYGETLI

SEQ ID NO: 39440 - protein, 15 aa, synthetic construct
AASTAFLRISGTHLI

SEQ ID NO: 39441 - protein, 11 aa, synthetic construct
QQLWGIPINSS

SEQ ID NO: 39442 - protein, 13 aa, synthetic construct
ASSFLLGGYDKLI

SEQ ID NO: 39443 - protein, 16 aa, synthetic construct
AASSYVGDTSWDIRQM

SEQ ID NO: 39444 - protein, 16 aa, synthetic construct
EPWPSPGGGYAPINSS

SEQ ID NO: 39445 - protein, 14 aa, synthetic construct
ASSARGDTLDSTTL

SEQ ID NO: 39446 - protein, 13 aa, synthetic construct
QQMYWGPTPINSS

SEQ ID NO: 39447 - protein, 16 aa, synthetic construct
AASSYLGDTSCDTRQM

SEQ ID NO: 39448 - protein, 11 aa, synthetic construct
AASSYEWMRNT

SEQ ID NO: 39449 - protein, 10 aa, synthetic construct
AASSWYSRQM

SEQ ID NO: 39450 - protein, 16 aa, synthetic construct
QQPFGVLGGTGTPINS

SEQ ID NO: 39451 - protein, 15 aa, synthetic construct
AASSWLILSWDTRQM

SEQ ID NO: 39452 - protein, 12 aa, synthetic construct
AASSWIRNDTLI

SEQ ID NO: 39453 - protein, 14 aa, synthetic construct
AASSSRRSWDNRQM

SEQ ID NO: 39454 - protein, 14 aa, synthetic construct
AASSSLSSVDTRQM

SEQ ID NO: 39455 - protein, 15 aa, synthetic construct
AASSSGGYDYTDKLI

SEQ ID NO: 39456 - protein, 6 aa, synthetic construct
ESRIPR

SEQ ID NO: 39457 - protein, 12 aa, synthetic construct
AASSRGDTDKLV

SEQ ID NO: 39458 - protein, 8 aa, synthetic construct
QQTPINSS

SEQ ID NO: 39459 - protein, 13 aa, synthetic construct
EAVLYWGIPDKLI

SEQ ID NO: 39460 - protein, 12 aa, synthetic construct
AASSRGDTDKLF

SEQ ID NO: 39461 - protein, 12 aa, synthetic construct
ARSGGRYTDTLI

SEQ ID NO: 39462 - protein, 11 aa, synthetic construct
ATGGYWGDQLI

SEQ ID NO: 39463 - protein, 12 aa, synthetic construct
AASSRGDTDKFI

SEQ ID NO: 39464 - protein, 8 aa, synthetic construct
QQTQIKSS

SEQ ID NO: 39465 - protein, 11 aa, synthetic construct
ATGGYWGETLI

SEQ ID NO: 39466 - protein, 9 aa, synthetic construct
AASSPRNSS

SEQ ID NO: 39467 - protein, 13 aa, synthetic construct
ATPVVLGDRGKLI

SEQ ID NO: 39468 - protein, 15 aa, synthetic construct
AASSRVRGSYAEKPI

SEQ ID NO: 39469 - protein, 16 aa, synthetic construct
AASSPFVRGGGCTDKL

SEQ ID NO: 39470 - protein, 16 aa, synthetic construct
AASSPFLRVGGCTDKL

SEQ ID NO: 39471 - protein, 16 aa, synthetic construct
AASSPFLRGRGCTDKL

SEQ ID NO: 39472 - protein, 10 aa, synthetic construct
ATRAAHRYTH

SEQ ID NO: 39473 - protein, 10 aa, synthetic construct
ATRGATDKLI

SEQ ID NO: 39474 - protein, 13 aa, synthetic construct
AASTETGGYDKLI

SEQ ID NO: 39475 - protein, 11 aa, synthetic construct
ASIMGDTDKLI

SEQ ID NO: 39476 - protein, 10 aa, synthetic construct
ATRGDSDQLS

SEQ ID NO: 39477 - protein, 16 aa, synthetic construct
AASSMSCTGGWTDQLI

SEQ ID NO: 39478 - protein, 10 aa, synthetic construct
ATRGDTDKHI

SEQ ID NO: 39479 - protein, 13 aa, synthetic construct
AASTELWDIHKLI

SEQ ID NO: 39480 - protein, 14 aa, synthetic construct
AVGVWGIRHSDKLI

SEQ ID NO: 39481 - protein, 12 aa, synthetic construct
AASSRGDTHKLN

SEQ ID NO: 39482 - protein, 11 aa, synthetic construct
ATGGSWGEKLI

SEQ ID NO: 39483 - protein, 15 aa, synthetic construct
AASSRVRGSYADKLI

SEQ ID NO: 39484 - protein, 13 aa, synthetic construct
QQLTGGYAPINSS

SEQ ID NO: 39485 - protein, 13 aa, synthetic construct
AASSRPSYTDKLI

SEQ ID NO: 39486 - protein, 12 aa, synthetic construct
EGGGGIHTDKLI

SEQ ID NO: 39487 - protein, 13 aa, synthetic construct
EERPVDTGGDKLI

SEQ ID NO: 39488 - protein, 13 aa, synthetic construct
AASSRPPYTEKLI

SEQ ID NO: 39489 - protein, 11 aa, synthetic construct
AASTEDPDKLI

SEQ ID NO: 39490 - protein, 13 aa, synthetic construct
AASSRPPYTDNLI

SEQ ID NO: 39491 - protein, 10 aa, synthetic construct
QQRGSPINSS

SEQ ID NO: 39492 - protein, 11 aa, synthetic construct
ASTGGYWDQLI

SEQ ID NO: 39493 - protein, 4 aa, synthetic construct
QQSF

SEQ ID NO: 39494 - protein, 8 aa, synthetic construct
AASTEKLI

SEQ ID NO: 39495 - protein, 10 aa, synthetic construct
ASTGRPHELI

SEQ ID NO: 39496 - protein, 13 aa, synthetic construct
AASSRPPSTDKLI

SEQ ID NO: 39497 - protein, 11 aa, synthetic construct
ASTWGYGDKLI

SEQ ID NO: 39498 - protein, 14 aa, synthetic construct
AASSRGVRGPDKLI

SEQ ID NO: 39499 - protein, 11 aa, synthetic construct
EAYCGIPDKLI

SEQ ID NO: 39500 - protein, 14 aa, synthetic construct
AASSRGIRGTDELI

SEQ ID NO: 39501 - protein, 13 aa, synthetic construct
ATFLRQGAVDKLI

SEQ ID NO: 39502 - protein, 14 aa, synthetic construct
AASSRGIRGTAKLI

SEQ ID NO: 39503 - protein, 11 aa, synthetic construct
ATGGSWGDKLI

SEQ ID NO: 39504 - protein, 16 aa, synthetic construct
AASSMSCTVGWTDKLI

SEQ ID NO: 39505 - protein, 13 aa, synthetic construct
AASRSGGYTGQLI

SEQ ID NO: 39506 - protein, 14 aa, synthetic construct
AASRTGGYSAAQLF

SEQ ID NO: 39507 - protein, 14 aa, synthetic construct
AASRDWGVPADQLI

SEQ ID NO: 39508 - protein, 10 aa, synthetic construct
EAITWDTRQK

SEQ ID NO: 39509 - protein, 13 aa, synthetic construct
VASTPFWGIRETH

SEQ ID NO: 39510 - protein, 14 aa, synthetic construct
AASRDWGLPADKLI

SEQ ID NO: 39511 - protein, 14 aa, synthetic construct
EASMSVGYNTDKLI

SEQ ID NO: 39512 - protein, 15 aa, synthetic construct
EAKRPSGGYATDKLI

SEQ ID NO: 39513 - protein, 11 aa, synthetic construct
EAKWGIRYKLI

SEQ ID NO: 39514 - protein, 13 aa, synthetic construct
EALLPGIRTEKLI

SEQ ID NO: 39515 - protein, 14 aa, synthetic construct
AASRDWGIPPDQLI

SEQ ID NO: 39516 - protein, 8 aa, synthetic construct
EANTDKLI

SEQ ID NO: 39517 - protein, 8 aa, synthetic construct
EANTDNLI

SEQ ID NO: 39518 - protein, 10 aa, synthetic construct
EANWVPDKLI

SEQ ID NO: 39519 - protein, 13 aa, synthetic construct
AASRDWGIPAEKL

SEQ ID NO: 39520 - protein, 15 aa, synthetic construct
EAPLLGDTCTPINSS

SEQ ID NO: 39521 - protein, 14 aa, synthetic construct
AASRDWGIPADKLL

SEQ ID NO: 39522 - protein, 11 aa, synthetic construct
VATSHPVDQVI

SEQ ID NO: 39523 - protein, 13 aa, synthetic construct
AASRDWGIPADKL

SEQ ID NO: 39524 - protein, 14 aa, synthetic construct
AASRDWGIATGKLI

SEQ ID NO: 39525 - protein, 14 aa, synthetic construct
AASRDWGIATDQLI

SEQ ID NO: 39526 - protein, 14 aa, synthetic construct
EAPYTGGSPTDKLI

SEQ ID NO: 39527 - protein, 13 aa, synthetic construct
EAQRDTREADKLI

SEQ ID NO: 39528 - protein, 14 aa, synthetic construct
AASRDWGIATDKHI

SEQ ID NO: 39529 - protein, 10 aa, synthetic construct
VAWGDLDKLI

SEQ ID NO: 39530 - protein, 13 aa, synthetic construct
VESMAGGYPDKLI

SEQ ID NO: 39531 - protein, 6 aa, synthetic construct
AASRDL

SEQ ID NO: 39532 - protein, 10 aa, synthetic construct
VLGDKTDQLI

SEQ ID NO: 39533 - protein, 16 aa, synthetic construct
VASRPSTGGSYTEKLI

SEQ ID NO: 39534 - protein, 14 aa, synthetic construct
VASPSYWGIREPLI

SEQ ID NO: 39535 - protein, 10 aa, synthetic construct
VLGDKTEKLI

SEQ ID NO: 39536 - protein, 13 aa, synthetic construct
AASREGYPTDQLI

SEQ ID NO: 39537 - protein, 12 aa, synthetic construct
AASRGGHPDKLL

SEQ ID NO: 39538 - protein, 13 aa, synthetic construct
VAPLLLGDTDKLI

SEQ ID NO: 39539 - protein, 12 aa, synthetic construct
AASRGGHPDILI

SEQ ID NO: 39540 - protein, 9 aa, synthetic construct
EASMTDKLI

SEQ ID NO: 39541 - protein, 8 aa, synthetic construct
VARADKLI

SEQ ID NO: 39542 - protein, 16 aa, synthetic construct
VARKNLHTSWGIHDKL

SEQ ID NO: 39543 - protein, 16 aa, synthetic construct
AASRGFLRTMGRPDKL

SEQ ID NO: 39544 - protein, 8 aa, synthetic construct
DPRELNSS

SEQ ID NO: 39545 - protein, 11 aa, synthetic construct
DSLCCGTDKLF

SEQ ID NO: 39546 - protein, 10 aa, synthetic construct
VARTLGDKLI

SEQ ID NO: 39547 - protein, 13 aa, synthetic construct
AASRGDTRTDKLI

SEQ ID NO: 39548 - protein, 12 aa, synthetic construct
AASRGDTPEKLI

SEQ ID NO: 39549 - protein, 8 aa, synthetic construct
DTRQLNSS

SEQ ID NO: 39550 - protein, 14 aa, synthetic construct
EAELVGYTYTDKLI

SEQ ID NO: 39551 - protein, 13 aa, synthetic construct
EAGGIVSWDTRQM

SEQ ID NO: 39552 - protein, 10 aa, synthetic construct
EAGVGGDKLI

SEQ ID NO: 39553 - protein, 14 aa, synthetic construct
EAIMRYWGINDKLI

SEQ ID NO: 39554 - protein, 12 aa, synthetic construct
AASRGDPPEKLI

SEQ ID NO: 39555 - protein, 13 aa, synthetic construct
AASRGDPHTDKLI

SEQ ID NO: 39556 - protein, 12 aa, synthetic construct
AASRGCTPDKLI

SEQ ID NO: 39557 - protein, 10 aa, synthetic construct
AASRESDKLS

SEQ ID NO: 39558 - protein, 10 aa, synthetic construct
AASRESDKLI

SEQ ID NO: 39559 - protein, 13 aa, synthetic construct
VASMRWGILDKLI

SEQ ID NO: 39560 - protein, 12 aa, synthetic construct
EAIRGTHTDKLI

SEQ ID NO: 39561 - protein, 8 aa, synthetic construct
AASREKLI

SEQ ID NO: 39562 - protein, 14 aa, synthetic construct
AASRAWGIPADKLI

SEQ ID NO: 39563 - protein, 10 aa, synthetic construct
AASQYTDTLI

SEQ ID NO: 39564 - protein, 14 aa, synthetic construct
AASRTGGYAAAQLL

SEQ ID NO: 39565 - protein, 16 aa, synthetic construct
EASEAPYGYTGSSWDT

SEQ ID NO: 39566 - protein, 12 aa, synthetic construct
AASPYWGIRKLI

SEQ ID NO: 39567 - protein, 11 aa, synthetic construct
EASGGGADKLI

SEQ ID NO: 39568 - protein, 15 aa, synthetic construct
AASPYWGIRDSDKLI

SEQ ID NO: 39569 - protein, 14 aa, synthetic construct
VSKGAGDPYTEKLI

SEQ ID NO: 39570 - protein, 11 aa, synthetic construct
EASGGYADNLI

SEQ ID NO: 39571 - protein, 15 aa, synthetic construct
AASPYWGILESDKLI

SEQ ID NO: 39572 - protein, 12 aa, synthetic construct
AASPYWGIIKLI

SEQ ID NO: 39573 - protein, 16 aa, synthetic construct
AASPYSSPYWGTPINS

SEQ ID NO: 39574 - protein, 16 aa, synthetic construct
AASPYSSPLLGDTDQL

SEQ ID NO: 39575 - protein, 15 aa, synthetic construct
EASMIPTHWGILDTD

SEQ ID NO: 39576 - protein, 13 aa, synthetic construct
EASGRLGAPINSS

SEQ ID NO: 39577 - protein, 9 aa, synthetic construct
EASGYARTH

SEQ ID NO: 39578 - protein, 13 aa, synthetic construct
AASPYPYWADTLI

SEQ ID NO: 39579 - protein, 13 aa, synthetic construct
EASISLGATDKLI

SEQ ID NO: 39580 - protein, 14 aa, synthetic construct
VSKGVGDPYADKLI

SEQ ID NO: 39581 - protein, 13 aa, synthetic construct
VSPLLLGDTDKLI

SEQ ID NO: 39582 - protein, 15 aa, synthetic construct
EASITPPVGGLMYTD

SEQ ID NO: 39583 - protein, 13 aa, synthetic construct
AASPYPNWAEQLI

SEQ ID NO: 39584 - protein, 14 aa, synthetic construct
AASPWGVRNTDKLI

SEQ ID NO: 39585 - protein, 8 aa, synthetic construct
WGYARETH

SEQ ID NO: 39586 - protein, 13 aa, synthetic construct
AASPWGIRTEKLI

SEQ ID NO: 39587 - protein, 13 aa, synthetic construct
AASPWGIRTDTLI

SEQ ID NO: 39588 - protein, 8 aa, synthetic construct
WVEARETS

SEQ ID NO: 39589 - protein, 16 aa, synthetic construct
EASKCTVGYAMGDKLI

SEQ ID NO: 39590 - protein, 13 aa, synthetic construct
AASPWGIRTDQLI

SEQ ID NO: 39591 - protein, 10 aa, synthetic construct
EASGDHPKLI

SEQ ID NO: 39592 - protein, 12 aa, synthetic construct
AASPYWGISQLI

SEQ ID NO: 39593 - protein, 16 aa, synthetic construct
EARFLVLGVLYTDKLI

SEQ ID NO: 39594 - protein, 13 aa, synthetic construct
EASDWGIHTDKLI

SEQ ID NO: 39595 - protein, 10 aa, synthetic construct
AASQSTDKLI

SEQ ID NO: 39596 - protein, 13 aa, synthetic construct
EARGGIPGTDKLN

SEQ ID NO: 39597 - protein, 12 aa, synthetic construct
AASQQGAHDKLI

SEQ ID NO: 39598 - protein, 15 aa, synthetic construct
AASQPLVLWEGTDNL

SEQ ID NO: 39599 - protein, 12 aa, synthetic construct
AASQLGANEKLI

SEQ ID NO: 39600 - protein, 12 aa, synthetic construct
AASQLGANDQLI

SEQ ID NO: 39601 - protein, 10 aa, synthetic construct
EARGYHDKLI

SEQ ID NO: 39602 - protein, 13 aa, synthetic construct
AASQLGAGTDKLT

SEQ ID NO: 39603 - protein, 10 aa, synthetic construct
EARIDSDKLI

SEQ ID NO: 39604 - protein, 16 aa, synthetic construct
AASQILVLADTGTDKL

SEQ ID NO: 39605 - protein, 12 aa, synthetic construct
AASPYWYTDKLI

SEQ ID NO: 39606 - protein, 13 aa, synthetic construct
AASPYWRIPDKLI

SEQ ID NO: 39607 - protein, 12 aa, synthetic construct
AASPYWGRSKLI

SEQ ID NO: 39608 - protein, 12 aa, synthetic construct
AASPYWGLSKLT

SEQ ID NO: 39609 - protein, 13 aa, synthetic construct
EARIGGINTDKII

SEQ ID NO: 39610 - protein, 14 aa, synthetic construct
EARRNSGIPPDKLI

SEQ ID NO: 39611 - protein, 15 aa, synthetic construct
EARRPSSCTGGPDTD

SEQ ID NO: 39612 - protein, 11 aa, synthetic construct
EARVGVTDKLI

SEQ ID NO: 39613 - protein, 9 aa, synthetic construct
EASMPDKLI

SEQ ID NO: 39614 - protein, 11 aa, synthetic construct
AASPYWGLNSS

SEQ ID NO: 39615 - protein, 10 aa, synthetic construct
AASPYWGITS

SEQ ID NO: 39616 - protein, 7 aa, synthetic construct
VRGDKTD

SEQ ID NO: 39617 - protein, 13 aa, synthetic construct
EASASSIRGDKII

SEQ ID NO: 39618 - protein, 12 aa, synthetic construct
EASCGDTRRSTH

SEQ ID NO: 39619 - protein, 10 aa, synthetic construct
AASPYWGITH

SEQ ID NO: 39620 - protein, 12 aa, synthetic construct
AASRGGHPDQLI

SEQ ID NO: 39621 - protein, 12 aa, synthetic construct
AASRGGHPEKLI

SEQ ID NO: 39622 - protein, 13 aa, synthetic construct
AASRGGRTPIKSS

SEQ ID NO: 39623 - protein, 14 aa, synthetic construct
AASRRTGDTSINSS

SEQ ID NO: 39624 - protein, 12 aa, synthetic construct
AASRRGYSDKLV

SEQ ID NO: 39625 - protein, 14 aa, synthetic construct
AVLGDTRRGTDKPI

SEQ ID NO: 39626 - protein, 8 aa, synthetic construct
SKYTDKLI

SEQ ID NO: 39627 - protein, 11 aa, synthetic construct
AASRRGYGKLI

SEQ ID NO: 39628 - protein, 14 aa, synthetic construct
AASRRGWGYTDTLI

SEQ ID NO: 39629 - protein, 12 aa, synthetic construct
SRGAGGYAGTTL

SEQ ID NO: 39630 - protein, 11 aa, synthetic construct
SVLRMYTDKLI

SEQ ID NO: 39631 - protein, 11 aa, synthetic construct
AASRRGWGYTD

SEQ ID NO: 39632 - protein, 12 aa, synthetic construct
EASRGDTPDKLI

SEQ ID NO: 39633 - protein, 14 aa, synthetic construct
AASRRGWGYTAKLI

SEQ ID NO: 39634 - protein, 11 aa, synthetic construct
AVLGMYTDQLI

SEQ ID NO: 39635 - protein, 14 aa, synthetic construct
AASRRGWGDTDKLS

SEQ ID NO: 39636 - protein, 14 aa, synthetic construct
AASRRGIPDTDQLI

SEQ ID NO: 39637 - protein, 9 aa, synthetic construct
AVREPINSS

SEQ ID NO: 39638 - protein, 10 aa, synthetic construct
TAFWGIDKLI

SEQ ID NO: 39639 - protein, 12 aa, synthetic construct
AASRRGFSDKLI

SEQ ID NO: 39640 - protein, 14 aa, synthetic construct
AASRRGCGYTVQLI

SEQ ID NO: 39641 - protein, 16 aa, synthetic construct
AASRRETRGGIHRSTH

SEQ ID NO: 39642 - protein, 8 aa, synthetic construct
TANTDKLI

SEQ ID NO: 39643 - protein, 16 aa, synthetic construct
AASRRDPRGGLHRYTH

SEQ ID NO: 39644 - protein, 12 aa, synthetic construct
AVRLGDPADKLI

SEQ ID NO: 39645 - protein, 9 aa, synthetic construct
AASRQINSS

SEQ ID NO: 39646 - protein, 13 aa, synthetic construct
TAPGGSPYTDKLI

SEQ ID NO: 39647 - protein, 12 aa, synthetic construct
AVRLGDTADELI

SEQ ID NO: 39648 - protein, 13 aa, synthetic construct
TASFLLGGYDKLI

SEQ ID NO: 39649 - protein, 12 aa, synthetic construct
AASRRGYSEKLI

SEQ ID NO: 39650 - protein, 13 aa, synthetic construct
AASRRTGGYDDKL

SEQ ID NO: 39651 - protein, 12 aa, synthetic construct
DGTGDTRADKLI

SEQ ID NO: 39652 - protein, 14 aa, synthetic construct
AASRRTGGYDDQLI

SEQ ID NO: 39653 - protein, 15 aa, synthetic construct
AASRSWGIPGTDKLI

SEQ ID NO: 39654 - protein, 13 aa, synthetic construct
AASRSVGYTDKLI

SEQ ID NO: 39655 - protein, 11 aa, synthetic construct
SASWGPTEKLI

SEQ ID NO: 39656 - protein, 15 aa, synthetic construct
SATFLRGTRYTDKLI

SEQ ID NO: 39657 - protein, 14 aa, synthetic construct
AVGVWGMRHTDKLI

SEQ ID NO: 39658 - protein, 11 aa, synthetic construct
AVLFPSPINSS

SEQ ID NO: 39659 - protein, 10 aa, synthetic construct
AVLGDIDKLI

SEQ ID NO: 39660 - protein, 13 aa, synthetic construct
AASRSGMYTDKLI

SEQ ID NO: 39661 - protein, 14 aa, synthetic construct
AASTGGSSWDTRQM

SEQ ID NO: 39662 - protein, 13 aa, synthetic construct
AASRSGGYTGKLI

SEQ ID NO: 39663 - protein, 16 aa, synthetic construct
EASRLYWGIRETDKLI

SEQ ID NO: 39664 - protein, 14 aa, synthetic construct
AVLGDSRRGTDKLI

SEQ ID NO: 39665 - protein, 13 aa, synthetic construct
AASRSGGYTEKLL

SEQ ID NO: 39666 - protein, 14 aa, synthetic construct
AVLGDTIRGTDKLI

SEQ ID NO: 39667 - protein, 13 aa, synthetic construct
SENRWIRDTDKLI

SEQ ID NO: 39668 - protein, 13 aa, synthetic construct
AASRSGGYTAKLI

SEQ ID NO: 39669 - protein, 14 aa, synthetic construct
AASRSGGYNTDKLI

SEQ ID NO: 39670 - protein, 14 aa, synthetic construct
AASRRYWGINDKLI

SEQ ID NO: 39671 - protein, 14 aa, synthetic construct
AVLGDTRRGTAKLI

SEQ ID NO: 39672 - protein, 14 aa, synthetic construct
AVLGDTRRGTDKLF

SEQ ID NO: 39673 - protein, 13 aa, synthetic construct
AASRRWGILDNLN

SEQ ID NO: 39674 - protein, 14 aa, synthetic construct
AASRRTVGYVYKLI

SEQ ID NO: 39675 - protein, 14 aa, synthetic construct
AASRRTGGYVEKLI

SEQ ID NO: 39676 - protein, 14 aa, synthetic construct
SGRNEPKRHPPAKQ

SEQ ID NO: 39677 - protein, 13 aa, synthetic construct
SKQDVLGEDRETH

SEQ ID NO: 39678 - protein, 15 aa, synthetic construct
AASRPTGGSYTDELI

SEQ ID NO: 39679 - protein, 15 aa, synthetic construct
AASRPTGGSSSDKLI

SEQ ID NO: 39680 - protein, 14 aa, synthetic construct
AASRPTERYSSDKL

SEQ ID NO: 39681 - protein, 15 aa, synthetic construct
AASRPPGGYSSAKLI

SEQ ID NO: 39682 - protein, 10 aa, synthetic construct
AVSSPTEKLL

SEQ ID NO: 39683 - protein, 16 aa, synthetic construct
AASRGVLGDTGTDRLI

SEQ ID NO: 39684 - protein, 10 aa, synthetic construct
AVSSPTETII

SEQ ID NO: 39685 - protein, 13 aa, synthetic construct
AVSSRPPYTDKLI

SEQ ID NO: 39686 - protein, 10 aa, synthetic construct
AVSSTTDKLI

SEQ ID NO: 39687 - protein, 8 aa, synthetic construct
AASRGRGI

SEQ ID NO: 39688 - protein, 8 aa, synthetic construct
AVTADKLI

SEQ ID NO: 39689 - protein, 14 aa, synthetic construct
AASRGPSSWDTRRM

SEQ ID NO: 39690 - protein, 8 aa, synthetic construct
AVTVAKLI

SEQ ID NO: 39691 - protein, 13 aa, synthetic construct
AASRGPSSWDTRQ

SEQ ID NO: 39692 - protein, 7 aa, synthetic construct
TTELQTP

SEQ ID NO: 39693 - protein, 11 aa, synthetic construct
AASRGPSSWDT

SEQ ID NO: 39694 - protein, 16 aa, synthetic construct
VAFLRVLGDKSTDKLI

SEQ ID NO: 39695 - protein, 8 aa, synthetic construct
AVTVEKLI

SEQ ID NO: 39696 - protein, 13 aa, synthetic construct
AASRGNTHTDKLI

SEQ ID NO: 39697 - protein, 8 aa, synthetic construct
AVTVEQLS

SEQ ID NO: 39698 - protein, 13 aa, synthetic construct
VAIYGGIDTDKLI

SEQ ID NO: 39699 - protein, 10 aa, synthetic construct
VANWVPDKLI

SEQ ID NO: 39700 - protein, 16 aa, synthetic construct
EASPGHRRRLGDTDTD

SEQ ID NO: 39701 - protein, 16 aa, synthetic construct
AASRGLLLGDVTAQLF

SEQ ID NO: 39702 - protein, 16 aa, synthetic construct
AVVLLPTLGDRTDKLI

SEQ ID NO: 39703 - protein, 12 aa, synthetic construct
AVYWGIRGDKLI

SEQ ID NO: 39704 - protein, 10 aa, synthetic construct
AWGPVHRSTH

SEQ ID NO: 39705 - protein, 10 aa, synthetic construct
DAISCETRQM

SEQ ID NO: 39706 - protein, 10 aa, synthetic construct
DASPWIDKLV

SEQ ID NO: 39707 - protein, 16 aa, synthetic construct
EASPPLCTGGSTPINS

SEQ ID NO: 39708 - protein, 16 aa, synthetic construct
AASRGVLGDTWTDKLI

SEQ ID NO: 39709 - protein, 16 aa, synthetic construct
EASPPLCTGGVYTDQL

SEQ ID NO: 39710 - protein, 13 aa, synthetic construct
AVRLGDTYTDKLI

SEQ ID NO: 39711 - protein, 12 aa, synthetic construct
TASIWDPPDKLN

SEQ ID NO: 39712 - protein, 15 aa, synthetic construct
AASRPPGGSYTDKLI

SEQ ID NO: 39713 - protein, 13 aa, synthetic construct
EASRCGEITDKIN

SEQ ID NO: 39714 - protein, 13 aa, synthetic construct
TASMRWGILDKLI

SEQ ID NO: 39715 - protein, 12 aa, synthetic construct
AVRLGDTADKLS

SEQ ID NO: 39716 - protein, 12 aa, synthetic construct
AVRLGDTADKLT

SEQ ID NO: 39717 - protein, 13 aa, synthetic construct
TASRGDTHTDKLI

SEQ ID NO: 39718 - protein, 14 aa, synthetic construct
AASRNYLTGGYAEP

SEQ ID NO: 39719 - protein, 12 aa, synthetic construct
AVRLGDTAEKLI

SEQ ID NO: 39720 - protein, 13 aa, synthetic construct
AVRLGDTRDRETH

SEQ ID NO: 39721 - protein, 15 aa, synthetic construct
TASSVLPVLGDTYTD

SEQ ID NO: 39722 - protein, 5 aa, synthetic construct
AASRN

SEQ ID NO: 39723 - protein, 10 aa, synthetic construct
AVSSPTDKLN

SEQ ID NO: 39724 - protein, 11 aa, synthetic construct
AVSFTSPINSS

SEQ ID NO: 39725 - protein, 16 aa, synthetic construct
AASRLYWGIRETEKLF

SEQ ID NO: 39726 - protein, 15 aa, synthetic construct
TATFLRGTRYTDKLI

SEQ ID NO: 39727 - protein, 15 aa, synthetic construct
AVSMPYWGSYTDKLI

SEQ ID NO: 39728 - protein, 10 aa, synthetic construct
AVSRPTDKLI

SEQ ID NO: 39729 - protein, 11 aa, synthetic construct
TATGGYTDKLI

SEQ ID NO: 39730 - protein, 12 aa, synthetic construct
AASRGYTPAKLI

SEQ ID NO: 39731 - protein, 10 aa, synthetic construct
AASRGYRYTH

SEQ ID NO: 39732 - protein, 13 aa, synthetic construct
AVSSLLGDTDKLI

SEQ ID NO: 39733 - protein, 6 aa, synthetic construct
TKLDST

SEQ ID NO: 39734 - protein, 16 aa, synthetic construct
EASPRWCTGGCYTDNL

SEQ ID NO: 39735 - protein, 14 aa, synthetic construct
AASTGGSADTDKLI

SEQ ID NO: 39736 - protein, 12 aa, synthetic construct
AASTGGYADKPI

SEQ ID NO: 39737 - protein, 12 aa, synthetic construct
APVSCGGELNSS

SEQ ID NO: 39738 - protein, 14 aa, synthetic construct
AESIPTLGDTDKLI

SEQ ID NO: 39739 - protein, 6 aa, synthetic construct
GPDQLI

SEQ ID NO: 39740 - protein, 16 aa, synthetic construct
AESKEVWGIMYTDKLI

SEQ ID NO: 39741 - protein, 14 aa, synthetic construct
AATLGEPWSTETLI

SEQ ID NO: 39742 - protein, 14 aa, synthetic construct
AATLGEPWSTDKLI

SEQ ID NO: 39743 - protein, 14 aa, synthetic construct
QKGALLGVTPINSS

SEQ ID NO: 39744 - protein, 11 aa, synthetic construct
AESKWDTDKLI

SEQ ID NO: 39745 - protein, 8 aa, synthetic construct
AATLCRSL

SEQ ID NO: 39746 - protein, 11 aa, synthetic construct
AESLGDTYQLI

SEQ ID NO: 39747 - protein, 9 aa, synthetic construct
AATIPHKLI

SEQ ID NO: 39748 - protein, 15 aa, synthetic construct
AATIIGADTTHILNS

SEQ ID NO: 39749 - protein, 11 aa, synthetic construct
AATIHPVDKLI

SEQ ID NO: 39750 - protein, 11 aa, synthetic construct
AESNAPDDKLI

SEQ ID NO: 39751 - protein, 11 aa, synthetic construct
QLLGGTPINSS

SEQ ID NO: 39752 - protein, 14 aa, synthetic construct
AATIHAELYNTNYK

SEQ ID NO: 39753 - protein, 15 aa, synthetic construct
AATIAVQGASARPLI

SEQ ID NO: 39754 - protein, 13 aa, synthetic construct
AATHWGMRPDTLI

SEQ ID NO: 39755 - protein, 13 aa, synthetic construct
AATHWGIRPEKLI

SEQ ID NO: 39756 - protein, 12 aa, synthetic construct
QLYWGIRTLNSS

SEQ ID NO: 39757 - protein, 13 aa, synthetic construct
QPAKGEPACKPER

SEQ ID NO: 39758 - protein, 10 aa, synthetic construct
AATGYPERLI

SEQ ID NO: 39759 - protein, 10 aa, synthetic construct
AATGSPHELI

SEQ ID NO: 39760 - protein, 16 aa, synthetic construct
AESSYPYWGRYTDKLI

SEQ ID NO: 39761 - protein, 10 aa, synthetic construct
AATGRPLELI

SEQ ID NO: 39762 - protein, 13 aa, synthetic construct
AESTRLGDTDTVI

SEQ ID NO: 39763 - protein, 8 aa, synthetic construct
GKYTDKHI

SEQ ID NO: 39764 - protein, 15 aa, synthetic construct
AATLLRVTRSTDKLI

SEQ ID NO: 39765 - protein, 16 aa, synthetic construct
AATLRCTGGSGDTDKL

SEQ ID NO: 39766 - protein, 10 aa, synthetic construct
AATWGYRSTH

SEQ ID NO: 39767 - protein, 9 aa, synthetic construct
AESGHHKLI

SEQ ID NO: 39768 - protein, 11 aa, synthetic construct
AATVLGDGKLI

SEQ ID NO: 39769 - protein, 16 aa, synthetic construct
AEPSYPYWGRYTDKHI

SEQ ID NO: 39770 - protein, 14 aa, synthetic construct
QHAPGGYGTPINSS

SEQ ID NO: 39771 - protein, 14 aa, synthetic construct
QHARGGYAVPINSS

SEQ ID NO: 39772 - protein, 10 aa, synthetic construct
AATVLGDDKL

SEQ ID NO: 39773 - protein, 13 aa, synthetic construct
QHPLPGAPGTPDR

SEQ ID NO: 39774 - protein, 12 aa, synthetic construct
AATTGGYTVKLI

SEQ ID NO: 39775 - protein, 12 aa, synthetic construct
AATTGGYTDTLI

SEQ ID NO: 39776 - protein, 12 aa, synthetic construct
AATTGGYTDQLI

SEQ ID NO: 39777 - protein, 12 aa, synthetic construct
AATTGGYTDKLT

SEQ ID NO: 39778 - protein, 12 aa, synthetic construct
AATTGGYTDKLN

SEQ ID NO: 39779 - protein, 13 aa, synthetic construct
QHPSYWGDTINSS

SEQ ID NO: 39780 - protein, 12 aa, synthetic construct
AATTGGYNDKLI

SEQ ID NO: 39781 - protein, 13 aa, synthetic construct
QHSFRGYAPINSS

SEQ ID NO: 39782 - protein, 12 aa, synthetic construct
AATSYWGNRYTH

SEQ ID NO: 39783 - protein, 12 aa, synthetic construct
AATSYWGNRSTH

SEQ ID NO: 39784 - protein, 12 aa, synthetic construct
AATSYWGNRETH

SEQ ID NO: 39785 - protein, 14 aa, synthetic construct
AATSYWGIPADKLI

SEQ ID NO: 39786 - protein, 14 aa, synthetic construct
AATRNWGIPPDKLI

SEQ ID NO: 39787 - protein, 11 aa, synthetic construct
AERVGFPDKHK

SEQ ID NO: 39788 - protein, 12 aa, synthetic construct
AATPRGIQYKLI

SEQ ID NO: 39789 - protein, 10 aa, synthetic construct
AATPIPEKLI

SEQ ID NO: 39790 - protein, 12 aa, synthetic construct
AATPGGYSDKLI

SEQ ID NO: 39791 - protein, 6 aa, synthetic construct
AATPGG

SEQ ID NO: 39792 - protein, 11 aa, synthetic construct
AATLRGDWGHN

SEQ ID NO: 39793 - protein, 10 aa, synthetic construct
AATGRPHDLI

SEQ ID NO: 39794 - protein, 14 aa, synthetic construct
AETLGEPWYTDKLI

SEQ ID NO: 39795 - protein, 11 aa, synthetic construct
AEVLGDGQRLV

SEQ ID NO: 39796 - protein, 11 aa, synthetic construct
AATGLGDDKLI

SEQ ID NO: 39797 - protein, 12 aa, synthetic construct
AGGGGIHTANLI

SEQ ID NO: 39798 - protein, 15 aa, synthetic construct
AATFLRLWGDTDQPI

SEQ ID NO: 39799 - protein, 12 aa, synthetic construct
QPVLGDTPINSS

SEQ ID NO: 39800 - protein, 15 aa, synthetic construct
AATFLRGTRYTEKLI

SEQ ID NO: 39801 - protein, 15 aa, synthetic construct
AATFLRGTRYTDTLI

SEQ ID NO: 39802 - protein, 15 aa, synthetic construct
QQAASGGGRTPINSS

SEQ ID NO: 39803 - protein, 15 aa, synthetic construct
AATFLRGTRYTDQLI

SEQ ID NO: 39804 - protein, 15 aa, synthetic construct
AATFLRGTRYTDNHI

SEQ ID NO: 39805 - protein, 15 aa, synthetic construct
QQAASYVLGDTDKLI

SEQ ID NO: 39806 - protein, 8 aa, synthetic construct
GGNADKLI

SEQ ID NO: 39807 - protein, 9 aa, synthetic construct
QQACPINSS

SEQ ID NO: 39808 - protein, 15 aa, synthetic construct
AATFLQGIRYTEKLI

SEQ ID NO: 39809 - protein, 15 aa, synthetic construct
AATFLQGIRCTDKLI

SEQ ID NO: 39810 - protein, 12 aa, synthetic construct
AGGGGIHTEKLI

SEQ ID NO: 39811 - protein, 15 aa, synthetic construct
AATFLKGIRYTDKLI

SEQ ID NO: 39812 - protein, 13 aa, synthetic construct
QQACVTGIRGGSS

SEQ ID NO: 39813 - protein, 15 aa, synthetic construct
AATFLKGIRNTDKRI

SEQ ID NO: 39814 - protein, 15 aa, synthetic construct
AATFIRGTRYTDKLI

SEQ ID NO: 39815 - protein, 15 aa, synthetic construct
AATFIQVIRYTDKLI

SEQ ID NO: 39816 - protein, 11 aa, synthetic construct
AATEVPTDKLI

SEQ ID NO: 39817 - protein, 7 aa, synthetic construct
AATEKLI

SEQ ID NO: 39818 - protein, 7 aa, synthetic construct
AATDQLI

SEQ ID NO: 39819 - protein, 7 aa, synthetic construct
AATDKPI

SEQ ID NO: 39820 - protein, 7 aa, synthetic construct
AATDKLV

SEQ ID NO: 39821 - protein, 10 aa, synthetic construct
GGEGGTDKLI

SEQ ID NO: 39822 - protein, 16 aa, synthetic construct
AATFLRQLGAHTDKLI

SEQ ID NO: 39823 - protein, 16 aa, synthetic construct
AATFLRRLGAHTATLI

SEQ ID NO: 39824 - protein, 16 aa, synthetic construct
AATFLRRLGAHTDKHI

SEQ ID NO: 39825 - protein, 14 aa, synthetic construct
AATGGYAIWDTRHM

SEQ ID NO: 39826 - protein, 10 aa, synthetic construct
AATGIPDQLI

SEQ ID NO: 39827 - protein, 13 aa, synthetic construct
QPPSYWGIGVNSS

SEQ ID NO: 39828 - protein, 14 aa, synthetic construct
AATGGYVIWDTRQM

SEQ ID NO: 39829 - protein, 11 aa, synthetic construct
AATGGYTDKPI

SEQ ID NO: 39830 - protein, 11 aa, synthetic construct
AEVLGDNQKLI

SEQ ID NO: 39831 - protein, 11 aa, synthetic construct
AATGGYTDKFI

SEQ ID NO: 39832 - protein, 14 aa, synthetic construct
AATGGYSIWDTRQM

SEQ ID NO: 39833 - protein, 10 aa, synthetic construct
AATGGYRYTH

SEQ ID NO: 39834 - protein, 10 aa, synthetic construct
GIEGGTDKLI

SEQ ID NO: 39835 - protein, 10 aa, synthetic construct
AEWVDLVKLI

SEQ ID NO: 39836 - protein, 14 aa, synthetic construct
QPSYWGCRTPINSS

SEQ ID NO: 39837 - protein, 11 aa, synthetic construct
AATGGSTDKLS

SEQ ID NO: 39838 - protein, 12 aa, synthetic construct
AGGGGIHADKLI

SEQ ID NO: 39839 - protein, 7 aa, synthetic construct
AFTDELI

SEQ ID NO: 39840 - protein, 10 aa, synthetic construct
GGYDQTDQLI

SEQ ID NO: 39841 - protein, 11 aa, synthetic construct
AATGDRPINSS

SEQ ID NO: 39842 - protein, 15 aa, synthetic construct
AATFREGIRYTDDLV

SEQ ID NO: 39843 - protein, 7 aa, synthetic construct
AFTDQLI

SEQ ID NO: 39844 - protein, 10 aa, synthetic construct
AGGDTHDKLI

SEQ ID NO: 39845 - protein, 10 aa, synthetic construct
AGGGGGDKLI

SEQ ID NO: 39846 - protein, 16 aa, synthetic construct
AATFRCTGGSGDTDKL

SEQ ID NO: 39847 - protein, 8 aa, synthetic construct
GGYADKLT

SEQ ID NO: 39848 - protein, 16 aa, synthetic construct
AATFLRRLGDPSTPIN

SEQ ID NO: 39849 - protein, 16 aa, synthetic construct
AATFLRRLGAHTEKLI

SEQ ID NO: 39850 - protein, 11 aa, synthetic construct
AATWGIRDKLI

SEQ ID NO: 39851 - protein, 16 aa, synthetic construct
AEPSYPYWGRYADKLI

SEQ ID NO: 39852 - protein, 12 aa, synthetic construct
AASTGGSTDRLI

SEQ ID NO: 39853 - protein, 11 aa, synthetic construct
ADVLGANHKLI

SEQ ID NO: 39854 - protein, 11 aa, synthetic construct
IAHDLTPVTQA

SEQ ID NO: 39855 - protein, 14 aa, synthetic construct
KQACPDRGIPPINS

SEQ ID NO: 39856 - protein, 9 aa, synthetic construct
AAYGLKETH

SEQ ID NO: 39857 - protein, 9 aa, synthetic construct
AAYGIKETH

SEQ ID NO: 39858 - protein, 12 aa, synthetic construct
AAYCGMVPDKLI

SEQ ID NO: 39859 - protein, 10 aa, synthetic construct
LLWDKTDKLI

SEQ ID NO: 39860 - protein, 10 aa, synthetic construct
GSDGGTDQLI

SEQ ID NO: 39861 - protein, 15 aa, synthetic construct
AAWPSCDWGYTAQLI

SEQ ID NO: 39862 - protein, 15 aa, synthetic construct
AAWPSCDWGTPINSS

SEQ ID NO: 39863 - protein, 5 aa, synthetic construct
LSKLI

SEQ ID NO: 39864 - protein, 15 aa, synthetic construct
AAWPSCDWGSTEKLI

SEQ ID NO: 39865 - protein, 15 aa, synthetic construct
AAWPSCDWGSTDKLT

SEQ ID NO: 39866 - protein, 15 aa, synthetic construct
AAWPSCDGGYTEKLI

SEQ ID NO: 39867 - protein, 15 aa, synthetic construct
AAWGPSTGGLARPLI

SEQ ID NO: 39868 - protein, 11 aa, synthetic construct
AEALGDTDKLI

SEQ ID NO: 39869 - protein, 10 aa, synthetic construct
AAWGDLDTLI

SEQ ID NO: 39870 - protein, 10 aa, synthetic construct
AAWGDLDQLI

SEQ ID NO: 39871 - protein, 5 aa, synthetic construct
MSKLI

SEQ ID NO: 39872 - protein, 10 aa, synthetic construct
AAVWGIDKLI

SEQ ID NO: 39873 - protein, 16 aa, synthetic construct
AECLPTTVGDTHTDKL

SEQ ID NO: 39874 - protein, 14 aa, synthetic construct
AAVPTWGILDDKLI

SEQ ID NO: 39875 - protein, 16 aa, synthetic construct
AAVPTPPGDTGTDKLI

SEQ ID NO: 39876 - protein, 16 aa, synthetic construct
AAVPTPLGDTGTVKLI

SEQ ID NO: 39877 - protein, 16 aa, synthetic construct
AAVPTPLGDTGTDTLI

SEQ ID NO: 39878 - protein, 12 aa, synthetic construct
PALLGETAHNTS

SEQ ID NO: 39879 - protein, 9 aa, synthetic construct
AAYGMKETY

SEQ ID NO: 39880 - protein, 11 aa, synthetic construct
AAYRGITDKLI

SEQ ID NO: 39881 - protein, 16 aa, synthetic construct
AATYLRRLAAHTHKLI

SEQ ID NO: 39882 - protein, 12 aa, synthetic construct
AAYRGMVPDKLI

SEQ ID NO: 39883 - protein, 12 aa, synthetic construct
AAYWGMRGDQLI

SEQ ID NO: 39884 - protein, 11 aa, synthetic construct
AAYWGTPDKLI

SEQ ID NO: 39885 - protein, 13 aa, synthetic construct
AAYWGTRDTDKLI

SEQ ID NO: 39886 - protein, 10 aa, synthetic construct
GSEGWTDKLT

SEQ ID NO: 39887 - protein, 11 aa, synthetic construct
AAYWGVPEKLI

SEQ ID NO: 39888 - protein, 13 aa, synthetic construct
AAYWGIRNTDKLI

SEQ ID NO: 39889 - protein, 7 aa, synthetic construct
ACTDQLI

SEQ ID NO: 39890 - protein, 10 aa, synthetic construct
AAYWGIRGSS

SEQ ID NO: 39891 - protein, 12 aa, synthetic construct
AAYWGIRGEKLI

SEQ ID NO: 39892 - protein, 8 aa, synthetic construct
GTYTEKLC

SEQ ID NO: 39893 - protein, 12 aa, synthetic construct
AAYWGIRGDKLF

SEQ ID NO: 39894 - protein, 12 aa, synthetic construct
AAYWGIRGDELI

SEQ ID NO: 39895 - protein, 12 aa, synthetic construct
AAYWGIRGAKLI

SEQ ID NO: 39896 - protein, 16 aa, synthetic construct
ADCLPTTVGDTYTDKL

SEQ ID NO: 39897 - protein, 13 aa, synthetic construct
AAYWGIRDTGKLI

SEQ ID NO: 39898 - protein, 10 aa, synthetic construct
GWDTRTDKLN

SEQ ID NO: 39899 - protein, 13 aa, synthetic construct
AAYWGIRDTDELF

SEQ ID NO: 39900 - protein, 13 aa, synthetic construct
AAYWGIRDTAKLI

SEQ ID NO: 39901 - protein, 13 aa, synthetic construct
AAYWGIRDADKLI

SEQ ID NO: 39902 - protein, 13 aa, synthetic construct
ADLWGALLGHPTD

SEQ ID NO: 39903 - protein, 8 aa, synthetic construct
AAYTYKLI

SEQ ID NO: 39904 - protein, 8 aa, synthetic construct
AAYTEQLI

SEQ ID NO: 39905 - protein, 12 aa, synthetic construct
ADLYWGIPDKLI

SEQ ID NO: 39906 - protein, 10 aa, synthetic construct
GSEGGTDQLI

SEQ ID NO: 39907 - protein, 12 aa, synthetic construct
AAYRGMVPDQLI

SEQ ID NO: 39908 - protein, 16 aa, synthetic construct
AAVPTPLGDPGTDKLI

SEQ ID NO: 39909 - protein, 12 aa, synthetic construct
AAVPTGVPDKLI

SEQ ID NO: 39910 - protein, 12 aa, synthetic construct
AAVPTGGPEKLI

SEQ ID NO: 39911 - protein, 12 aa, synthetic construct
AAVPTGGPDTLI

SEQ ID NO: 39912 - protein, 12 aa, synthetic construct
AEILPWGTYKLI

SEQ ID NO: 39913 - protein, 16 aa, synthetic construct
AAVLLPTLGARTDKLI

SEQ ID NO: 39914 - protein, 16 aa, synthetic construct
AAVLLPLGDFTPINSS

SEQ ID NO: 39915 - protein, 12 aa, synthetic construct
AENTGGPTEKLI

SEQ ID NO: 39916 - protein, 12 aa, synthetic construct
AAVLLGGPINSS

SEQ ID NO: 39917 - protein, 11 aa, synthetic construct
AAVLGETDKLI

SEQ ID NO: 39918 - protein, 11 aa, synthetic construct
AENWGIRDKLI

SEQ ID NO: 39919 - protein, 11 aa, synthetic construct
AAVLGDTDRLI

SEQ ID NO: 39920 - protein, 12 aa, synthetic construct
AAVLGDTDPKLI

SEQ ID NO: 39921 - protein, 9 aa, synthetic construct
AEPAFLRGW

SEQ ID NO: 39922 - protein, 11 aa, synthetic construct
AAVLGDTDKLV

SEQ ID NO: 39923 - protein, 14 aa, synthetic construct
PPRDKPERGEPPAQ

SEQ ID NO: 39924 - protein, 10 aa, synthetic construct
GREGGTDQLI

SEQ ID NO: 39925 - protein, 11 aa, synthetic construct
AEPGGPPDKLI

SEQ ID NO: 39926 - protein, 16 aa, synthetic construct
GPSYCWGILSTPINSS

SEQ ID NO: 39927 - protein, 16 aa, synthetic construct
AAVHTPLGDTGTDKLI

SEQ ID NO: 39928 - protein, 16 aa, synthetic construct
AEPSYPSWGRYTDKLI

SEQ ID NO: 39929 - protein, 11 aa, synthetic construct
PSTGGYGDKLI

SEQ ID NO: 39930 - protein, 12 aa, synthetic construct
AAVGDTYTDKHI

SEQ ID NO: 39931 - protein, 12 aa, synthetic construct
AAVGDTSTDKLI

SEQ ID NO: 39932 - protein, 12 aa, synthetic construct
AAVGDRYSDILI

SEQ ID NO: 39933 - protein, 12 aa, synthetic construct
AAVGAPRTDKLI

SEQ ID NO: 39934 - protein, 13 aa, synthetic construct
AAVFYWGIPDKLI

SEQ ID NO: 39935 - protein, 15 aa, synthetic construct
AAVFLRGGGYSIHSS

SEQ ID NO: 39936 - protein, 16 aa, synthetic construct
AEPSYPYWGRSTDKLI

SEQ ID NO: 39937 - protein, 14 aa, synthetic construct
AEGVCGIRHTDKLI

SEQ ID NO: 39938 - protein, 11 aa, synthetic construct
PLGDTGAINSS

SEQ ID NO: 39939 - protein, 16 aa, synthetic construct
AAVLLPTLGDRTEKLI

SEQ ID NO: 39940 - protein, 13 aa, synthetic construct
AEEGSGGGTDKLI

SEQ ID NO: 39941 - protein, 11 aa, synthetic construct
PASKGLGGKLI

SEQ ID NO: 39942 - protein, 14 aa, synthetic construct
AAVPSWGLRSRETH

SEQ ID NO: 39943 - protein, 14 aa, synthetic construct
AAVPSWGIRSRETH

SEQ ID NO: 39944 - protein, 13 aa, synthetic construct
AAVPSWGIPINSS

SEQ ID NO: 39945 - protein, 12 aa, synthetic construct
AAVPSGGPGKLI

SEQ ID NO: 39946 - protein, 14 aa, synthetic construct
AAVPLLGDTMYKLI

SEQ ID NO: 39947 - protein, 14 aa, synthetic construct
AAVPILGDTWYKLI

SEQ ID NO: 39948 - protein, 14 aa, synthetic construct
AAVPILGDTWSKLI

SEQ ID NO: 39949 - protein, 15 aa, synthetic construct
AECPSCDWGYTDKLI

SEQ ID NO: 39950 - protein, 14 aa, synthetic construct
AAVPILGDTRDKLI

SEQ ID NO: 39951 - protein, 12 aa, synthetic construct
AECWGCTPINSS

SEQ ID NO: 39952 - protein, 14 aa, synthetic construct
AAVPAWGIRSRETH

SEQ ID NO: 39953 - protein, 16 aa, synthetic construct
AAVLLPTLGDRTETLI

SEQ ID NO: 39954 - protein, 13 aa, synthetic construct
AAVLYWGTPDKLI

SEQ ID NO: 39955 - protein, 13 aa, synthetic construct
AAVLYWGIPDTLI

SEQ ID NO: 39956 - protein, 13 aa, synthetic construct
AAVLYWGIPDQLS

SEQ ID NO: 39957 - protein, 12 aa, synthetic construct
AEEGYGGAPIKS

SEQ ID NO: 39958 - protein, 7 aa, synthetic construct
PATRATH

SEQ ID NO: 39959 - protein, 13 aa, synthetic construct
AAVLYWGIPDKLT

SEQ ID NO: 39960 - protein, 13 aa, synthetic construct
AAVLYWGIPDKLS

SEQ ID NO: 39961 - protein, 9 aa, synthetic construct
PAYGGDKLI

SEQ ID NO: 39962 - protein, 15 aa, synthetic construct
AAVLYLLGAWGEKLT

SEQ ID NO: 39963 - protein, 13 aa, synthetic construct
AEGGLDPRTDKLI

SEQ ID NO: 39964 - protein, 14 aa, synthetic construct
AEGGSTGGYTDKLV

SEQ ID NO: 39965 - protein, 13 aa, synthetic construct
QQADGGSTPINSS

SEQ ID NO: 39966 - protein, 10 aa, synthetic construct
AGGGYARSTH

SEQ ID NO: 39967 - protein, 11 aa, synthetic construct
AATALGDDKLI

SEQ ID NO: 39968 - protein, 14 aa, synthetic construct
QQARGGIHLTAQLF

SEQ ID NO: 39969 - protein, 14 aa, synthetic construct
QQARGGYAVPINSS

SEQ ID NO: 39970 - protein, 12 aa, synthetic construct
AASTPGYTDNSS

SEQ ID NO: 39971 - protein, 9 aa, synthetic construct
QQASPINSS

SEQ ID NO: 39972 - protein, 9 aa, synthetic construct
AILGDSPLI

SEQ ID NO: 39973 - protein, 13 aa, synthetic construct
AASTPFWGIREPH

SEQ ID NO: 39974 - protein, 15 aa, synthetic construct
GAFLLLGDTLHTDKL

SEQ ID NO: 39975 - protein, 14 aa, synthetic construct
AASTNWGIRHTDKL

SEQ ID NO: 39976 - protein, 15 aa, synthetic construct
AASTLRGGYGTINSS

SEQ ID NO: 39977 - protein, 16 aa, synthetic construct
GAFLLLGDTLHTDELI

SEQ ID NO: 39978 - protein, 15 aa, synthetic construct
AASTLRGGPYTEKLI

SEQ ID NO: 39979 - protein, 11 aa, synthetic construct
QQASRTPINSS

SEQ ID NO: 39980 - protein, 15 aa, synthetic construct
AASTLRGGPYTDQLI

SEQ ID NO: 39981 - protein, 10 aa, synthetic construct
AIWGGPINTS

SEQ ID NO: 39982 - protein, 11 aa, synthetic construct
AASTLNTEKLI

SEQ ID NO: 39983 - protein, 13 aa, synthetic construct
QQASRVAPGTPDR

SEQ ID NO: 39984 - protein, 14 aa, synthetic construct
AASTLLSGDTRKLI

SEQ ID NO: 39985 - protein, 10 aa, synthetic construct
ALGAYTDKLI

SEQ ID NO: 39986 - protein, 14 aa, synthetic construct
AASTLGDPYTEKLI

SEQ ID NO: 39987 - protein, 12 aa, synthetic construct
QQASWDTPINSS

SEQ ID NO: 39988 - protein, 14 aa, synthetic construct
AASTLGDPYTDNLI

SEQ ID NO: 39989 - protein, 14 aa, synthetic construct
AASTLGDPYTDKPI

SEQ ID NO: 39990 - protein, 13 aa, synthetic construct
ANTFVQGDRAKLI

SEQ ID NO: 39991 - protein, 10 aa, synthetic construct
APKITTDKLI

SEQ ID NO: 39992 - protein, 14 aa, synthetic construct
AASTLGDPYTAKLI

SEQ ID NO: 39993 - protein, 13 aa, synthetic construct
APLLGVLSTDKLI

SEQ ID NO: 39994 - protein, 9 aa, synthetic construct
AASTPINSP

SEQ ID NO: 39995 - protein, 11 aa, synthetic construct
AASTPPDDKLI

SEQ ID NO: 39996 - protein, 12 aa, synthetic construct
AATAGGYTDKLI

SEQ ID NO: 39997 - protein, 13 aa, synthetic construct
AASTPVWGIRDTH

SEQ ID NO: 39998 - protein, 16 aa, synthetic construct
QQAPILLGARTPINSS

SEQ ID NO: 39999 - protein, 8 aa, synthetic construct
AASTSKLI

SEQ ID NO: 40000 - protein, 15 aa, synthetic construct
AASTSHCTRRHDKLI

SEQ ID NO: 40001 - protein, 10 aa, synthetic construct
GAGSTPINSS

SEQ ID NO: 40002 - protein, 15 aa, synthetic construct
AASTSHCTGGHDKLI

SEQ ID NO: 40003 - protein, 14 aa, synthetic construct
AASTSCGIGTDKLI

SEQ ID NO: 40004 - protein, 16 aa, synthetic construct
GAFLLLGGTLHTDKLI

SEQ ID NO: 40005 - protein, 13 aa, synthetic construct
AASTRYGDTGRFI

SEQ ID NO: 40006 - protein, 12 aa, synthetic construct
AGTGDTRADNLI

SEQ ID NO: 40007 - protein, 15 aa, synthetic construct
AASTRRVSSWGTRQM

SEQ ID NO: 40008 - protein, 12 aa, synthetic construct
AGTGDTRADQLI

SEQ ID NO: 40009 - protein, 13 aa, synthetic construct
AASTRLGDTEKLI

SEQ ID NO: 40010 - protein, 12 aa, synthetic construct
AGTGDTRADTLI

SEQ ID NO: 40011 - protein, 13 aa, synthetic construct
AASTRLGDTDTLI

SEQ ID NO: 40012 - protein, 13 aa, synthetic construct
AASTRLGDTDQLI

SEQ ID NO: 40013 - protein, 15 aa, synthetic construct
QQAQAPFGVTPINSS

SEQ ID NO: 40014 - protein, 16 aa, synthetic construct
GAFLLLGDTLHTEKLI

SEQ ID NO: 40015 - protein, 13 aa, synthetic construct
AASTRLGDTAKLI

SEQ ID NO: 40016 - protein, 12 aa, synthetic construct
AGTGDTRAEKLI

SEQ ID NO: 40017 - protein, 12 aa, synthetic construct
AGTRATRAEKLI

SEQ ID NO: 40018 - protein, 14 aa, synthetic construct
AASTRGGYAPDKII

SEQ ID NO: 40019 - protein, 14 aa, synthetic construct
AASTRGGYAPAKLS

SEQ ID NO: 40020 - protein, 9 aa, synthetic construct
AILGDRHLI

SEQ ID NO: 40021 - protein, 14 aa, synthetic construct
AASTRGGPHTAKLI

SEQ ID NO: 40022 - protein, 16 aa, synthetic construct
GAFLLLGDTLHTDRLI

SEQ ID NO: 40023 - protein, 13 aa, synthetic construct
APLLGVLYTAKLI

SEQ ID NO: 40024 - protein, 13 aa, synthetic construct
AASTLGDIPWDTR

SEQ ID NO: 40025 - protein, 16 aa, synthetic construct
GAFLLLGDPLHTDKLI

SEQ ID NO: 40026 - protein, 13 aa, synthetic construct
APLLGVPYTDKLI

SEQ ID NO: 40027 - protein, 12 aa, synthetic construct
AASTGGYADTRI

SEQ ID NO: 40028 - protein, 11 aa, synthetic construct
QQAWEYTDKLI

SEQ ID NO: 40029 - protein, 12 aa, synthetic construct
AASTGGYADTLI

SEQ ID NO: 40030 - protein, 14 aa, synthetic construct
AASTGGYADTEKLI

SEQ ID NO: 40031 - protein, 14 aa, synthetic construct
AASTGGYADTDKLL

SEQ ID NO: 40032 - protein, 9 aa, synthetic construct
QQEGGINSS

SEQ ID NO: 40033 - protein, 13 aa, synthetic construct
APTGGSQYTAKLI

SEQ ID NO: 40034 - protein, 14 aa, synthetic construct
AASTGGYADTDELI

SEQ ID NO: 40035 - protein, 12 aa, synthetic construct
AASTGGYADQLI

SEQ ID NO: 40036 - protein, 12 aa, synthetic construct
AASTGGYADNLI

SEQ ID NO: 40037 - protein, 8 aa, synthetic construct
GACTDTLI

SEQ ID NO: 40038 - protein, 12 aa, synthetic construct
AAYWGMRGEKLI

SEQ ID NO: 40039 - protein, 9 aa, synthetic construct
QQEGGIYSS

SEQ ID NO: 40040 - protein, 12 aa, synthetic construct
AASTGGYADKLL

SEQ ID NO: 40041 - protein, 13 aa, synthetic construct
QQEGGYSIPINSS

SEQ ID NO: 40042 - protein, 13 aa, synthetic construct
APTGGSQYTEKHI

SEQ ID NO: 40043 - protein, 13 aa, synthetic construct
APTGGSQYTEKLI

SEQ ID NO: 40044 - protein, 13 aa, synthetic construct
APTGGYHYTDKLI

SEQ ID NO: 40045 - protein, 12 aa, synthetic construct
EVRLGDTADKLI

SEQ ID NO: 40046 - protein, 13 aa, synthetic construct
QQGGGGPTPINSS

SEQ ID NO: 40047 - protein, 13 aa, synthetic construct
AASTGGSYTGKLI

SEQ ID NO: 40048 - protein, 13 aa, synthetic construct
AASTGGSYTDQLV

SEQ ID NO: 40049 - protein, 13 aa, synthetic construct
APTVGSEYTEKLI

SEQ ID NO: 40050 - protein, 13 aa, synthetic construct
AASTGGSYTDKLV

SEQ ID NO: 40051 - protein, 13 aa, synthetic construct
APVLGVLYTDKLI

SEQ ID NO: 40052 - protein, 12 aa, synthetic construct
AASTGGYAEKLI

SEQ ID NO: 40053 - protein, 12 aa, synthetic construct
AASTGGYSDKLI

SEQ ID NO: 40054 - protein, 13 aa, synthetic construct
APTGGSQYSEKLI

SEQ ID NO: 40055 - protein, 11 aa, synthetic construct
APRGGGADKLI

SEQ ID NO: 40056 - protein, 14 aa, synthetic construct
AASTLGAPGTETLI

SEQ ID NO: 40057 - protein, 14 aa, synthetic construct
AASTLGAPGTDTLI

SEQ ID NO: 40058 - protein, 15 aa, synthetic construct
AASTGYVWGYTEKLI

SEQ ID NO: 40059 - protein, 11 aa, synthetic construct
APMEAHTDKHI

SEQ ID NO: 40060 - protein, 15 aa, synthetic construct
AASTGYVWGYTDQLI

SEQ ID NO: 40061 - protein, 13 aa, synthetic construct
APPFVLGDRGKLI

SEQ ID NO: 40062 - protein, 14 aa, synthetic construct
QQAVLGVSPPINSS

SEQ ID NO: 40063 - protein, 11 aa, synthetic construct
APQLGDTRETH

SEQ ID NO: 40064 - protein, 15 aa, synthetic construct
AASTGYGWGYTDKLI

SEQ ID NO: 40065 - protein, 12 aa, synthetic construct
AASTGVYTDKLI

SEQ ID NO: 40066 - protein, 11 aa, synthetic construct
APQLGDTRSTH

SEQ ID NO: 40067 - protein, 12 aa, synthetic construct
AASTGRYADKLI

SEQ ID NO: 40068 - protein, 16 aa, synthetic construct
APTFLRRLGAHTDKLI

SEQ ID NO: 40069 - protein, 8 aa, synthetic construct
AASTGRGI

SEQ ID NO: 40070 - protein, 13 aa, synthetic construct
APSGLGEYTATLI

SEQ ID NO: 40071 - protein, 14 aa, synthetic construct
APSSRGIRGTDKLI

SEQ ID NO: 40072 - protein, 12 aa, synthetic construct
AASTGGYTETLI

SEQ ID NO: 40073 - protein, 12 aa, synthetic construct
AASTGGYTEKLI

SEQ ID NO: 40074 - protein, 12 aa, synthetic construct
AASTGGYTDTLI

SEQ ID NO: 40075 - protein, 10 aa, synthetic construct
APSSWDTRQM

SEQ ID NO: 40076 - protein, 12 aa, synthetic construct
AASTGGYTDQLI

SEQ ID NO: 40077 - protein, 12 aa, synthetic construct
AASTGGYTDNSS

SEQ ID NO: 40078 - protein, 13 aa, synthetic construct
GAEGLGDTQAQLF

SEQ ID NO: 40079 - protein, 12 aa, synthetic construct
AASTGGYTDKPI

SEQ ID NO: 40080 - protein, 15 aa, synthetic construct
AASTSLRRITPGTPD

SEQ ID NO: 40081 - protein, 16 aa, synthetic construct
AASTTEGVLGDTGPIN

SEQ ID NO: 40082 - protein, 7 aa, synthetic construct
AGTDTLI

SEQ ID NO: 40083 - protein, 16 aa, synthetic construct
AGLPASTGGKYTEKLI

SEQ ID NO: 40084 - protein, 14 aa, synthetic construct
AASWPSYCGYANSS

SEQ ID NO: 40085 - protein, 13 aa, synthetic construct
AGLGDTWEADKLI

SEQ ID NO: 40086 - protein, 14 aa, synthetic construct
QQAGILGDTPINSS

SEQ ID NO: 40087 - protein, 14 aa, synthetic construct
AASWNTGGCTDKLI

SEQ ID NO: 40088 - protein, 14 aa, synthetic construct
AASWNNGGYTDKLI

SEQ ID NO: 40089 - protein, 9 aa, synthetic construct
QQAGIPVSS

SEQ ID NO: 40090 - protein, 14 aa, synthetic construct
AASWHTGGYTDKLI

SEQ ID NO: 40091 - protein, 11 aa, synthetic construct
AASWGPTDQLI

SEQ ID NO: 40092 - protein, 14 aa, synthetic construct
QQAGVDGVTPINSS

SEQ ID NO: 40093 - protein, 14 aa, synthetic construct
QQAGWGIATPINSS

SEQ ID NO: 40094 - protein, 12 aa, synthetic construct
AASWGLTPINSS

SEQ ID NO: 40095 - protein, 11 aa, synthetic construct
AASWGLTAQLF

SEQ ID NO: 40096 - protein, 14 aa, synthetic construct
QQALEGSAPGTPDR

SEQ ID NO: 40097 - protein, 11 aa, synthetic construct
AGLGVTPINSS

SEQ ID NO: 40098 - protein, 12 aa, synthetic construct
AASWGIRGDKLI

SEQ ID NO: 40099 - protein, 12 aa, synthetic construct
GAVGDTYTDKLI

SEQ ID NO: 40100 - protein, 16 aa, synthetic construct
AGLPAPTGGKYTDKLI

SEQ ID NO: 40101 - protein, 15 aa, synthetic construct
AASWGIPRGATDRLI

SEQ ID NO: 40102 - protein, 16 aa, synthetic construct
QQALFPGDTPRLVNSS

SEQ ID NO: 40103 - protein, 11 aa, synthetic construct
AASWGIPDKLI

SEQ ID NO: 40104 - protein, 13 aa, synthetic construct
AASWGGIRDEKLI

SEQ ID NO: 40105 - protein, 12 aa, synthetic construct
QQALGDTAIISS

SEQ ID NO: 40106 - protein, 16 aa, synthetic construct
AGLPASPGGKYTDKLI

SEQ ID NO: 40107 - protein, 13 aa, synthetic construct
GASTWGMLGDKLF

SEQ ID NO: 40108 - protein, 12 aa, synthetic construct
QQALGDTAINSS

SEQ ID NO: 40109 - protein, 12 aa, synthetic construct
QQAGILAPINSS

SEQ ID NO: 40110 - protein, 10 aa, synthetic construct
GDTTIPINSS

SEQ ID NO: 40111 - protein, 14 aa, synthetic construct
AASWTTGGYTDKLI

SEQ ID NO: 40112 - protein, 14 aa, synthetic construct
AASYWGIPHAGKLI

SEQ ID NO: 40113 - protein, 14 aa, synthetic construct
AASYWWIPHTDKLI

SEQ ID NO: 40114 - protein, 10 aa, synthetic construct
AGGGYTDKLI

SEQ ID NO: 40115 - protein, 12 aa, synthetic construct
AASYWGYTDKLI

SEQ ID NO: 40116 - protein, 12 aa, synthetic construct
AASYWGPPRNSS

SEQ ID NO: 40117 - protein, 12 aa, synthetic construct
QQAEGDTPINSS

SEQ ID NO: 40118 - protein, 13 aa, synthetic construct
QQAEVGCTPINSS

SEQ ID NO: 40119 - protein, 12 aa, synthetic construct
AGLGDTGPINSS

SEQ ID NO: 40120 - protein, 12 aa, synthetic construct
AASYWGPPIDSS

SEQ ID NO: 40121 - protein, 12 aa, synthetic construct
AASYWGPPDKLI

SEQ ID NO: 40122 - protein, 14 aa, synthetic construct
AASYWGIPHTDQLI

SEQ ID NO: 40123 - protein, 13 aa, synthetic construct
AGLGDTREAAKLI

SEQ ID NO: 40124 - protein, 14 aa, synthetic construct
AASYWGIHHTDKLI

SEQ ID NO: 40125 - protein, 13 aa, synthetic construct
AASYGGFDTDTLS

SEQ ID NO: 40126 - protein, 15 aa, synthetic construct
QQAEVLGGPTPINSS

SEQ ID NO: 40127 - protein, 12 aa, synthetic construct
AASYVLGDRWTP

SEQ ID NO: 40128 - protein, 13 aa, synthetic construct
EASKVWGHTDKLI

SEQ ID NO: 40129 - protein, 13 aa, synthetic construct
AGLGDTREADKLV

SEQ ID NO: 40130 - protein, 13 aa, synthetic construct
AGLGDTREADQLI

SEQ ID NO: 40131 - protein, 13 aa, synthetic construct
AASYVLGDRRKLI

SEQ ID NO: 40132 - protein, 10 aa, synthetic construct
QQAFPDTTSS

SEQ ID NO: 40133 - protein, 12 aa, synthetic construct
AASYRGPPRNSS

SEQ ID NO: 40134 - protein, 13 aa, synthetic construct
AGLGDTREADTLI

SEQ ID NO: 40135 - protein, 13 aa, synthetic construct
AGLGDTREAEKLI

SEQ ID NO: 40136 - protein, 9 aa, synthetic construct
GGDTRAKLI

SEQ ID NO: 40137 - protein, 15 aa, synthetic construct
GASSELGDTLGDKLI

SEQ ID NO: 40138 - protein, 16 aa, synthetic construct
AGLPASTGGTYTDKLI

SEQ ID NO: 40139 - protein, 15 aa, synthetic construct
AASTTGGDKLTAQLF

SEQ ID NO: 40140 - protein, 12 aa, synthetic construct
AGLYCGIPDKLI

SEQ ID NO: 40141 - protein, 16 aa, synthetic construct
QQALTVLGDTTAINSS

SEQ ID NO: 40142 - protein, 16 aa, synthetic construct
AGPSYPYWGRYTDKLI

SEQ ID NO: 40143 - protein, 13 aa, synthetic construct
AASTVWGHTDTLI

SEQ ID NO: 40144 - protein, 13 aa, synthetic construct
AASTVWGHTDKLI

SEQ ID NO: 40145 - protein, 10 aa, synthetic construct
AASTVWDQLI

SEQ ID NO: 40146 - protein, 15 aa, synthetic construct
GASMERGDTLGDKLI

SEQ ID NO: 40147 - protein, 12 aa, synthetic construct
AGPTGGPPDQLI

SEQ ID NO: 40148 - protein, 13 aa, synthetic construct
AASTVLGHIHKLT

SEQ ID NO: 40149 - protein, 15 aa, synthetic construct
AASTVLGDTRTDKLI

SEQ ID NO: 40150 - protein, 13 aa, synthetic construct
AASTVLGDLHKLI

SEQ ID NO: 40151 - protein, 14 aa, synthetic construct
QQAPEGGPTPINSS

SEQ ID NO: 40152 - protein, 13 aa, synthetic construct
AASTVLGDIHNLI

SEQ ID NO: 40153 - protein, 13 aa, synthetic construct
AGRGDTREADQII

SEQ ID NO: 40154 - protein, 6 aa, synthetic construct
AGRTEP

SEQ ID NO: 40155 - protein, 10 aa, synthetic construct
AGRTEPKCQP

SEQ ID NO: 40156 - protein, 13 aa, synthetic construct
AASTTQGGHRSTH

SEQ ID NO: 40157 - protein, 12 aa, synthetic construct
AASTTQGGHRQT

SEQ ID NO: 40158 - protein, 14 aa, synthetic construct
AGRTEPKSQPPARP

SEQ ID NO: 40159 - protein, 10 aa, synthetic construct
AGRTLGEKLI

SEQ ID NO: 40160 - protein, 13 aa, synthetic construct
AASTTQGGHRATH

SEQ ID NO: 40161 - protein, 13 aa, synthetic construct
AGSSRPPYTDKLI

SEQ ID NO: 40162 - protein, 15 aa, synthetic construct
AASTTGGYQLTAHLF

SEQ ID NO: 40163 - protein, 13 aa, synthetic construct
GAIRGGPYTDKLI

SEQ ID NO: 40164 - protein, 15 aa, synthetic construct
AASTTGGYKLTAQHF

SEQ ID NO: 40165 - protein, 13 aa, synthetic construct
AASTTGGYKLTAQ

SEQ ID NO: 40166 - protein, 12 aa, synthetic construct
AASTWGCTDTLI

SEQ ID NO: 40167 - protein, 10 aa, synthetic construct
AASTWGLLLI

SEQ ID NO: 40168 - protein, 16 aa, synthetic construct
AGPPASTGGKYTDKLI

SEQ ID NO: 40169 - protein, 12 aa, synthetic construct
AGLYWGIPEKLI

SEQ ID NO: 40170 - protein, 14 aa, synthetic construct
AASWDWGIPADKLI

SEQ ID NO: 40171 - protein, 9 aa, synthetic construct
AASWDTRQM

SEQ ID NO: 40172 - protein, 16 aa, synthetic construct
QQALIPGDTPREVNSS

SEQ ID NO: 40173 - protein, 15 aa, synthetic construct
GASPVRGDTRTEKLI

SEQ ID NO: 40174 - protein, 11 aa, synthetic construct
AASVSSVDKLI

SEQ ID NO: 40175 - protein, 13 aa, synthetic construct
AASVRYGDTGRVI

SEQ ID NO: 40176 - protein, 11 aa, synthetic construct
AASVRGYGKLI

SEQ ID NO: 40177 - protein, 16 aa, synthetic construct
QQALPSSEGGDVPINS

SEQ ID NO: 40178 - protein, 13 aa, synthetic construct
AASVPGLYTDKLI

SEQ ID NO: 40179 - protein, 12 aa, synthetic construct
AASVPGGYRSTH

SEQ ID NO: 40180 - protein, 12 aa, synthetic construct
AASVPGGYRETH

SEQ ID NO: 40181 - protein, 12 aa, synthetic construct
AGLYWRIPDKLI

SEQ ID NO: 40182 - protein, 13 aa, synthetic construct
AASTWGTLHRETH

SEQ ID NO: 40183 - protein, 11 aa, synthetic construct
AASVLNTDKLI

SEQ ID NO: 40184 - protein, 7 aa, synthetic construct
AASVDVM

SEQ ID NO: 40185 - protein, 10 aa, synthetic construct
QQALSGINSS

SEQ ID NO: 40186 - protein, 14 aa, synthetic construct
AASVAEWGLLDRLF

SEQ ID NO: 40187 - protein, 15 aa, synthetic construct
AASTYWGIRETDKLI

SEQ ID NO: 40188 - protein, 15 aa, synthetic construct
AGNFLRSQLLGHPTD

SEQ ID NO: 40189 - protein, 15 aa, synthetic construct
AASTYHCTGGHDKLI

SEQ ID NO: 40190 - protein, 16 aa, synthetic construct
AGPPAATGVKYTDKLI

SEQ ID NO: 40191 - protein, 12 aa, synthetic construct
AASTWRIRDKLI

SEQ ID NO: 40192 - protein, 14 aa, synthetic construct
GASMPDWGLLDKLI

SEQ ID NO: 40193 - protein, 13 aa, synthetic construct
AASTWGTLHRQTH

SEQ ID NO: 40194 - protein, 13 aa, synthetic construct
AASYVLGDRWKLV

SEQ ID NO: 40195 - protein, 13 aa, synthetic construct
AASMRAPYTDTLF

SEQ ID NO: 40196 - protein, 14 aa, synthetic construct
AASPWGIRNTDKLT

SEQ ID NO: 40197 - protein, 15 aa, synthetic construct
AAPILGDTGTPINSS

SEQ ID NO: 40198 - protein, 13 aa, synthetic construct
AAPILLGDTDKLI

SEQ ID NO: 40199 - protein, 15 aa, synthetic construct
AAPLLGDTGPPIISS

SEQ ID NO: 40200 - protein, 15 aa, synthetic construct
AAPLLGDTGTPINPS

SEQ ID NO: 40201 - protein, 14 aa, synthetic construct
AAPLLGVPSPDKLI

SEQ ID NO: 40202 - protein, 13 aa, synthetic construct
AAPLLLGDTHKLI

SEQ ID NO: 40203 - protein, 13 aa, synthetic construct
AAPLLLWDTDKLI

SEQ ID NO: 40204 - protein, 15 aa, synthetic construct
AAPLPTSGGYTDNLI

SEQ ID NO: 40205 - protein, 12 aa, synthetic construct
AAPLPWGPDKLI

SEQ ID NO: 40206 - protein, 14 aa, synthetic construct
AAPNSGTPYTDKLI

SEQ ID NO: 40207 - protein, 7 aa, synthetic construct
AAPRRAQ

SEQ ID NO: 40208 - protein, 6 aa, synthetic construct
AAPSTH

SEQ ID NO: 40209 - protein, 11 aa, synthetic construct
AAPSYGGKALT

SEQ ID NO: 40210 - protein, 15 aa, synthetic construct
AAPSYGGKALTAQLL

SEQ ID NO: 40211 - protein, 15 aa, synthetic construct
AAPSYPTGPVHRSTH

SEQ ID NO: 40212 - protein, 12 aa, synthetic construct
AAPTGGSHRETH

SEQ ID NO: 40213 - protein, 15 aa, synthetic construct
AAPILGDTGTPRNSS

SEQ ID NO: 40214 - protein, 10 aa, synthetic construct
AAPGVADKLI

SEQ ID NO: 40215 - protein, 13 aa, synthetic construct
AALLPGIRTATLI

SEQ ID NO: 40216 - protein, 13 aa, synthetic construct
AAPGTGGLPRETH

SEQ ID NO: 40217 - protein, 11 aa, synthetic construct
AANWGIRAKLI

SEQ ID NO: 40218 - protein, 11 aa, synthetic construct
AANWGIREKLI

SEQ ID NO: 40219 - protein, 10 aa, synthetic construct
AANWGTPITH

SEQ ID NO: 40220 - protein, 10 aa, synthetic construct
AANWVPDKII

SEQ ID NO: 40221 - protein, 10 aa, synthetic construct
AANWVPDKLN

SEQ ID NO: 40222 - protein, 10 aa, synthetic construct
AANWVPDLLI

SEQ ID NO: 40223 - protein, 10 aa, synthetic construct
AANWVPDNLI

SEQ ID NO: 40224 - protein, 16 aa, synthetic construct
AAPAFLRGWGLRTPIN

SEQ ID NO: 40225 - protein, 15 aa, synthetic construct
AAPAFLRGWGPPDTD

SEQ ID NO: 40226 - protein, 14 aa, synthetic construct
AAPAFLRGWGPPYT

SEQ ID NO: 40227 - protein, 15 aa, synthetic construct
AAPASLRGWGPPYTD

SEQ ID NO: 40228 - protein, 11 aa, synthetic construct
AAPGGPPAKLI

SEQ ID NO: 40229 - protein, 11 aa, synthetic construct
AAPGGPPDELI

SEQ ID NO: 40230 - protein, 11 aa, synthetic construct
AAPGGPPDKPI

SEQ ID NO: 40231 - protein, 11 aa, synthetic construct
AAPGGPSDKLI

SEQ ID NO: 40232 - protein, 11 aa, synthetic construct
AAPVLGDDKLI

SEQ ID NO: 40233 - protein, 16 aa, synthetic construct
AAPYACYWGIHTDKPI

SEQ ID NO: 40234 - protein, 16 aa, synthetic construct
AAPYACYWGIHTDQLI

SEQ ID NO: 40235 - protein, 16 aa, synthetic construct
AAPYACYWGIHTDTLI

SEQ ID NO: 40236 - protein, 13 aa, synthetic construct
AAQLGDRVHRYTH

SEQ ID NO: 40237 - protein, 13 aa, synthetic construct
AAQLGDRVQRSTH

SEQ ID NO: 40238 - protein, 12 aa, synthetic construct
AAQLGGYTDKLI

SEQ ID NO: 40239 - protein, 15 aa, synthetic construct
AAQRPSGGNATDKLI

SEQ ID NO: 40240 - protein, 15 aa, synthetic construct
AAQRPSGGYGADRLI

SEQ ID NO: 40241 - skipped

SEQ ID NO: 40242 - protein, 8 aa, synthetic construct
AARADRLI

SEQ ID NO: 40243 - protein, 8 aa, synthetic construct
AARADTLI

SEQ ID NO: 40244 - protein, 10 aa, synthetic construct
AARAGADKLI

SEQ ID NO: 40245 - protein, 16 aa, synthetic construct
AARAPCLLGASHRSTH

SEQ ID NO: 40246 - protein, 16 aa, synthetic construct
AARAPCLLGDSHRSTH

SEQ ID NO: 40247 - protein, 16 aa, synthetic construct
AARAPFLLGDGHRYTH

SEQ ID NO: 40248 - protein, 16 aa, synthetic construct
AARAPFLLGDSHRETH

SEQ ID NO: 40249 - protein, 10 aa, synthetic construct
AARAYPDKLI

SEQ ID NO: 40250 - protein, 13 aa, synthetic construct
AARCWGPHTDKLI

SEQ ID NO: 40251 - protein, 14 aa, synthetic construct
AAQGTGSRGAINSS

SEQ ID NO: 40252 - protein, 15 aa, synthetic construct
AAQAFLRGWGPPNTD

SEQ ID NO: 40253 - protein, 14 aa, synthetic construct
AAPYWGTPYTDQLI

SEQ ID NO: 40254 - protein, 15 aa, synthetic construct
AAPYCGIRPRYTDKL

SEQ ID NO: 40255 - protein, 16 aa, synthetic construct
AAPYACYWGIHTEKLI

SEQ ID NO: 40256 - protein, 16 aa, synthetic construct
AAPYACYWGRHTDKLI

SEQ ID NO: 40257 - protein, 16 aa, synthetic construct
AAPYAGYWGIHTDKLI

SEQ ID NO: 40258 - protein, 16 aa, synthetic construct
AAPYAGYWGIHTEKLI

SEQ ID NO: 40259 - protein, 16 aa, synthetic construct
AAPYASYWGIHTDKLI

SEQ ID NO: 40260 - protein, 14 aa, synthetic construct
AAPYCGIQRTDQLS

SEQ ID NO: 40261 - protein, 14 aa, synthetic construct
AAPYCGTPYTDKLI

SEQ ID NO: 40262 - protein, 10 aa, synthetic construct
AAPYWGKVHR

SEQ ID NO: 40263 - protein, 14 aa, synthetic construct
AAPYSGIQRTDKLI

SEQ ID NO: 40264 - protein, 16 aa, synthetic construct
AAPYSGIRPPYTDKHI

SEQ ID NO: 40265 - protein, 15 aa, synthetic construct
AAPYSGTRHRYTDKL

SEQ ID NO: 40266 - protein, 14 aa, synthetic construct
AAPYTGGSPTDNSS

SEQ ID NO: 40267 - protein, 14 aa, synthetic construct
AAPYWGIQRTDKLT

SEQ ID NO: 40268 - protein, 16 aa, synthetic construct
AAPYWGIRPRYTAKLI

SEQ ID NO: 40269 - protein, 10 aa, synthetic construct
AANWGIDQLI

SEQ ID NO: 40270 - protein, 11 aa, synthetic construct
AANWGAYTDKL

SEQ ID NO: 40271 - protein, 12 aa, synthetic construct
AANTGVYTDRLI

SEQ ID NO: 40272 - protein, 12 aa, synthetic construct
AALYWGYTQKLI

SEQ ID NO: 40273 - protein, 14 aa, synthetic construct
AALSNWGRSTDKLI

SEQ ID NO: 40274 - protein, 14 aa, synthetic construct
AALSNWGRYSDKLI

SEQ ID NO: 40275 - protein, 12 aa, synthetic construct
AALSNWGRYTDK

SEQ ID NO: 40276 - protein, 13 aa, synthetic construct
AALSNWGRYTDKL

SEQ ID NO: 40277 - protein, 12 aa, synthetic construct
AALVPWGPDQLI

SEQ ID NO: 40278 - protein, 13 aa, synthetic construct
AALWGALLGHPPD

SEQ ID NO: 40279 - protein, 13 aa, synthetic construct
AALWGALLGHPTE

SEQ ID NO: 40280 - protein, 13 aa, synthetic construct
AALWGIRSPAKLI

SEQ ID NO: 40281 - protein, 13 aa, synthetic construct
AALWGIRYTDKPI

SEQ ID NO: 40282 - protein, 13 aa, synthetic construct
AALWGIRYTDTLI

SEQ ID NO: 40283 - protein, 11 aa, synthetic construct
AALWGTPRTSS

SEQ ID NO: 40284 - protein, 12 aa, synthetic construct
AALYLGYTDKLI

SEQ ID NO: 40285 - protein, 14 aa, synthetic construct
AALYNWGRYTDKLI

SEQ ID NO: 40286 - protein, 14 aa, synthetic construct
AALYVRGGVARNSS

SEQ ID NO: 40287 - protein, 12 aa, synthetic construct
AALYWGYSDKLI

SEQ ID NO: 40288 - protein, 14 aa, synthetic construct
AALSDRAGLARNSS

SEQ ID NO: 40289 - protein, 16 aa, synthetic construct
AALRPLTGGYHTDQLI

SEQ ID NO: 40290 - protein, 11 aa, synthetic construct
AALRGTPINSS

SEQ ID NO: 40291 - protein, 15 aa, synthetic construct
AALLVDNSPATHKLI

SEQ ID NO: 40292 - protein, 12 aa, synthetic construct
AALLPWGPDQLI

SEQ ID NO: 40293 - protein, 12 aa, synthetic construct
AALLPWRPDKLI

SEQ ID NO: 40294 - protein, 13 aa, synthetic construct
AALLRGCTPIHSS

SEQ ID NO: 40295 - protein, 13 aa, synthetic construct
AALLRGCTPINSS

SEQ ID NO: 40296 - protein, 13 aa, synthetic construct
AALLRLGAVDKLI

SEQ ID NO: 40297 - protein, 12 aa, synthetic construct
AALLRWGPDKLI

SEQ ID NO: 40298 - protein, 12 aa, synthetic construct
AALMGGYTDKLI

SEQ ID NO: 40299 - protein, 12 aa, synthetic construct
AALPRVIQYKLI

SEQ ID NO: 40300 - protein, 14 aa, synthetic construct
AALNVRGGLAINSS

SEQ ID NO: 40301 - protein, 14 aa, synthetic construct
AALPARNDYTDKLI

SEQ ID NO: 40302 - protein, 12 aa, synthetic construct
AALPPWGPEKLL

SEQ ID NO: 40303 - protein, 12 aa, synthetic construct
AALPRGIHYKLI

SEQ ID NO: 40304 - protein, 12 aa, synthetic construct
AALPRGIQDKLI

SEQ ID NO: 40305 - protein, 12 aa, synthetic construct
AALPRGIQYNLI

SEQ ID NO: 40306 - protein, 12 aa, synthetic construct
AALYWGYTDTLI

SEQ ID NO: 40307 - protein, 13 aa, synthetic construct
AAMAYGGGHDKPI

SEQ ID NO: 40308 - protein, 12 aa, synthetic construct
AANTGGYTDKLI

SEQ ID NO: 40309 - protein, 11 aa, synthetic construct
AAMGAHTDELI

SEQ ID NO: 40310 - protein, 16 aa, synthetic construct
AANFLPTGGERGPPIN

SEQ ID NO: 40311 - protein, 16 aa, synthetic construct
AANFLPTGGSRGTPIN

SEQ ID NO: 40312 - protein, 16 aa, synthetic construct
AANFLPTGRSRGTPIN

SEQ ID NO: 40313 - protein, 12 aa, synthetic construct
AANMGGYTDKLI

SEQ ID NO: 40314 - protein, 16 aa, synthetic construct
AANNPTPPGGEYTDKL

SEQ ID NO: 40315 - protein, 8 aa, synthetic construct
AANNQKLI

SEQ ID NO: 40316 - protein, 15 aa, synthetic construct
AANNRVPPANHILIK

SEQ ID NO: 40317 - protein, 12 aa, synthetic construct
AANPGGPTDKLI

SEQ ID NO: 40318 - protein, 12 aa, synthetic construct
AANPSWYTDKLI

SEQ ID NO: 40319 - protein, 12 aa, synthetic construct
AANPYWYTDNLI

SEQ ID NO: 40320 - protein, 12 aa, synthetic construct
AANPYWYTHKLI

SEQ ID NO: 40321 - protein, 16 aa, synthetic construct
AANSPTPTGGGYTDKL

SEQ ID NO: 40322 - protein, 8 aa, synthetic construct
AANTDTLI

SEQ ID NO: 40323 - protein, 12 aa, synthetic construct
AANTGGPPETLI

SEQ ID NO: 40324 - protein, 12 aa, synthetic construct
AANTGGPTEKLI

SEQ ID NO: 40325 - protein, 10 aa, synthetic construct
AANCVPDKLI

SEQ ID NO: 40326 - protein, 8 aa, synthetic construct
AANALQTH

SEQ ID NO: 40327 - protein, 13 aa, synthetic construct
AAMYWGRRFDTLI

SEQ ID NO: 40328 - protein, 9 aa, synthetic construct
AAMGVDKLI

SEQ ID NO: 40329 - protein, 11 aa, synthetic construct
AAMGAHTDKLL

SEQ ID NO: 40330 - protein, 11 aa, synthetic construct
AAMGAHTDKLV

SEQ ID NO: 40331 - protein, 11 aa, synthetic construct
AAMGAHTDQLI

SEQ ID NO: 40332 - protein, 11 aa, synthetic construct
AAMGAHTEKLI

SEQ ID NO: 40333 - protein, 9 aa, synthetic construct
AAMGEDQLI

SEQ ID NO: 40334 - protein, 11 aa, synthetic construct
AAMGSHTDKLI

SEQ ID NO: 40335 - protein, 12 aa, synthetic construct
AAMLGVYTDKLV

SEQ ID NO: 40336 - protein, 13 aa, synthetic construct
AAMYWGIRSDKLI

SEQ ID NO: 40337 - protein, 12 aa, synthetic construct
AAMLGVYTDTLI

SEQ ID NO: 40338 - protein, 12 aa, synthetic construct
AAMLGVYTEKLI

SEQ ID NO: 40339 - protein, 12 aa, synthetic construct
AAMMGEYTDKLI

SEQ ID NO: 40340 - protein, 12 aa, synthetic construct
AAMMGVYTDKLI

SEQ ID NO: 40341 - protein, 12 aa, synthetic construct
AAMRGVYTDKLI

SEQ ID NO: 40342 - protein, 13 aa, synthetic construct
AAMYCGIRFDKLI

SEQ ID NO: 40343 - protein, 15 aa, synthetic construct
AARDILGIRSTDKLI

SEQ ID NO: 40344 - protein, 9 aa, synthetic construct
AARDPINSS

SEQ ID NO: 40345 - protein, 9 aa, synthetic construct
AARDPISSS

SEQ ID NO: 40346 - protein, 14 aa, synthetic construct
AARMSGGYNTDKLI

SEQ ID NO: 40347 - protein, 13 aa, synthetic construct
AARMAGGYPDKLI

SEQ ID NO: 40348 - protein, 10 aa, synthetic construct
AARMDTDKLI

SEQ ID NO: 40349 - protein, 12 aa, synthetic construct
AARMEEGADKLI

SEQ ID NO: 40350 - protein, 15 aa, synthetic construct
AARMFHYWGIRGDKL

SEQ ID NO: 40351 - protein, 16 aa, synthetic construct
AARMFHYWGIRGYKLI

SEQ ID NO: 40352 - protein, 12 aa, synthetic construct
AARMGEGAENLI

SEQ ID NO: 40353 - protein, 13 aa, synthetic construct
AARMGLQRPINSS

SEQ ID NO: 40354 - protein, 13 aa, synthetic construct
AARMGLQRTIKSS

SEQ ID NO: 40355 - protein, 12 aa, synthetic construct
AARMGPYTDKLI

SEQ ID NO: 40356 - protein, 12 aa, synthetic construct
AARMGPYTYKHI

SEQ ID NO: 40357 - protein, 8 aa, synthetic construct
AARMGTSS

SEQ ID NO: 40358 - protein, 15 aa, synthetic construct
AARMLAPLGDTDKLI

SEQ ID NO: 40359 - protein, 13 aa, synthetic construct
AARMPGLYTDKLI

SEQ ID NO: 40360 - protein, 13 aa, synthetic construct
AARMPGWYTDKLS

SEQ ID NO: 40361 - protein, 15 aa, synthetic construct
AARMPRLGDTTEKLI

SEQ ID NO: 40362 - protein, 14 aa, synthetic construct
AARLYWGIRDDKLI

SEQ ID NO: 40363 - protein, 15 aa, synthetic construct
AARLVPGGSHTDRLI

SEQ ID NO: 40364 - protein, 11 aa, synthetic construct
AARLVDTDKLI

SEQ ID NO: 40365 - protein, 12 aa, synthetic construct
AARLGEYTHKLI

SEQ ID NO: 40366 - protein, 15 aa, synthetic construct
AARKSHCTGGHDKLI

SEQ ID NO: 40367 - protein, 12 aa, synthetic construct
AARLAGGADKLI

SEQ ID NO: 40368 - protein, 12 aa, synthetic construct
AARLAGGPDQLI

SEQ ID NO: 40369 - protein, 12 aa, synthetic construct
AARLAGGPYKLI

SEQ ID NO: 40370 - protein, 14 aa, synthetic construct
AARLGDTRYTDKLI

SEQ ID NO: 40371 - protein, 12 aa, synthetic construct
AARLGEYTAQLI

SEQ ID NO: 40372 - protein, 10 aa, synthetic construct
AARLGGDKLI

SEQ ID NO: 40373 - protein, 5 aa, synthetic construct
AARLV

SEQ ID NO: 40374 - protein, 9 aa, synthetic construct
AARLIDKLI

SEQ ID NO: 40375 - protein, 16 aa, synthetic construct
AARLILVLGDTGNDKL

SEQ ID NO: 40376 - protein, 16 aa, synthetic construct
AARLILVLGDTGTDQL

SEQ ID NO: 40377 - protein, 14 aa, synthetic construct
AARLLRWGPTDNSS

SEQ ID NO: 40378 - protein, 10 aa, synthetic construct
AARLPRYELI

SEQ ID NO: 40379 - protein, 14 aa, synthetic construct
AARLPTLGDTDKLI

SEQ ID NO: 40380 - protein, 15 aa, synthetic construct
AARMPYWGSYTDKLI

SEQ ID NO: 40381 - protein, 6 aa, synthetic construct
AARMVG

SEQ ID NO: 40382 - protein, 8 aa, synthetic construct
AARKGRAI

SEQ ID NO: 40383 - protein, 11 aa, synthetic construct
AARNAVNTEKH

SEQ ID NO: 40384 - protein, 15 aa, synthetic construct
AARPSALRGSSWDTR

SEQ ID NO: 40385 - protein, 14 aa, synthetic construct
AARPSCGIGTDTLI

SEQ ID NO: 40386 - protein, 16 aa, synthetic construct
AARPSSVLGDSAAKLI

SEQ ID NO: 40387 - protein, 11 aa, synthetic construct
AARPSYGLVDS

SEQ ID NO: 40388 - protein, 15 aa, synthetic construct
AARPSYLLGDSADKL

SEQ ID NO: 40389 - protein, 16 aa, synthetic construct
AARPSYVLGASADKLI

SEQ ID NO: 40390 - protein, 16 aa, synthetic construct
AARPSYVLGDRADKLI

SEQ ID NO: 40391 - protein, 14 aa, synthetic construct
AARPSYWGIREPLI

SEQ ID NO: 40392 - protein, 15 aa, synthetic construct
AARPYWGIRDSDKLI

SEQ ID NO: 40393 - protein, 6 aa, synthetic construct
AARQHR

SEQ ID NO: 40394 - protein, 8 aa, synthetic construct
AARRDKRI

SEQ ID NO: 40395 - protein, 14 aa, synthetic construct
AARRDWGIPADKLI

SEQ ID NO: 40396 - protein, 12 aa, synthetic construct
AARRGETPDKRI

SEQ ID NO: 40397 - protein, 13 aa, synthetic construct
AARRGGAYTDKLI

SEQ ID NO: 40398 - protein, 16 aa, synthetic construct
AARRGLLLGDLTAQLF

SEQ ID NO: 40399 - protein, 15 aa, synthetic construct
AARPSALGVSSWDTR

SEQ ID NO: 40400 - protein, 16 aa, synthetic construct
AARPSALGGSSWDSTT

SEQ ID NO: 40401 - protein, 15 aa, synthetic construct
AARPSALGGSSWDPR

SEQ ID NO: 40402 - protein, 16 aa, synthetic construct
AARPFPSPGGPGSDKL

SEQ ID NO: 40403 - protein, 11 aa, synthetic construct
AARNGDTDKLI

SEQ ID NO: 40404 - protein, 16 aa, synthetic construct
AARNGTGVYAMVYKLI

SEQ ID NO: 40405 - protein, 15 aa, synthetic construct
AARNLGDTIGLVNSS

SEQ ID NO: 40406 - protein, 12 aa, synthetic construct
AARNPLRVRETH

SEQ ID NO: 40407 - protein, 14 aa, synthetic construct
AARPARNDYTEKLI

SEQ ID NO: 40408 - protein, 16 aa, synthetic construct
AARPCPSTGGPRSDKL

SEQ ID NO: 40409 - protein, 10 aa, synthetic construct
AARPFQRETH

SEQ ID NO: 40410 - protein, 12 aa, synthetic construct
AARPRAKTEKLI

SEQ ID NO: 40411 - protein, 14 aa, synthetic construct
AARPLLRGDTRTLI

SEQ ID NO: 40412 - protein, 16 aa, synthetic construct
AARPLPRGYAASGQLI

SEQ ID NO: 40413 - protein, 15 aa, synthetic construct
AARPNSTGGPDTDKL

SEQ ID NO: 40414 - protein, 15 aa, synthetic construct
AARPNWGIRHTDKLN

SEQ ID NO: 40415 - protein, 11 aa, synthetic construct
AARPNWRINSS

SEQ ID NO: 40416 - protein, 16 aa, synthetic construct
AARPPTYWGPGTDKLI

SEQ ID NO: 40417 - protein, 16 aa, synthetic construct
AARKPLGDTRYTDKVI

SEQ ID NO: 40418 - protein, 14 aa, synthetic construct
AARKEPGVTPINSS

SEQ ID NO: 40419 - protein, 11 aa, synthetic construct
AARDSWVDKLI

SEQ ID NO: 40420 - protein, 12 aa, synthetic construct
AARGGVVHRETH

SEQ ID NO: 40421 - protein, 11 aa, synthetic construct
AARGAPPEKLI

SEQ ID NO: 40422 - protein, 11 aa, synthetic construct
AARGAPPGQLI

SEQ ID NO: 40423 - protein, 12 aa, synthetic construct
AARGDGHTAELS

SEQ ID NO: 40424 - protein, 12 aa, synthetic construct
AARGDGHTDKLI

SEQ ID NO: 40425 - protein, 10 aa, synthetic construct
AARGDPPHLI

SEQ ID NO: 40426 - protein, 10 aa, synthetic construct
AARGDPPKLI

SEQ ID NO: 40427 - protein, 11 aa, synthetic construct
AARGDTPINSS

SEQ ID NO: 40428 - protein, 10 aa, synthetic construct
AARGGIAKLI

SEQ ID NO: 40429 - protein, 13 aa, synthetic construct
AARGGILDPDKLI

SEQ ID NO: 40430 - protein, 13 aa, synthetic construct
AARGGILDTEKLI

SEQ ID NO: 40431 - protein, 13 aa, synthetic construct
AARGGIPGTDKII

SEQ ID NO: 40432 - protein, 13 aa, synthetic construct
AARGGIPGTDRLV

SEQ ID NO: 40433 - protein, 14 aa, synthetic construct
AARGGLGAPTDKLF

SEQ ID NO: 40434 - protein, 14 aa, synthetic construct
AARGGLGDPTDKLI

SEQ ID NO: 40435 - protein, 12 aa, synthetic construct
AARGGNPRTHKL

SEQ ID NO: 40436 - protein, 16 aa, synthetic construct
AARFIRDVVTGVSDKL

SEQ ID NO: 40437 - protein, 10 aa, synthetic construct
AAREYTEKLI

SEQ ID NO: 40438 - protein, 10 aa, synthetic construct
AAREYTDTLI

SEQ ID NO: 40439 - protein, 10 aa, synthetic construct
AAREDTDKLI

SEQ ID NO: 40440 - protein, 16 aa, synthetic construct
AARDTPVLGDTPAQLF

SEQ ID NO: 40441 - protein, 13 aa, synthetic construct
AARDWGIHTDKLI

SEQ ID NO: 40442 - protein, 13 aa, synthetic construct
AARDWGVYTDNSS

SEQ ID NO: 40443 - protein, 13 aa, synthetic construct
AARDWGVYTEKLI

SEQ ID NO: 40444 - protein, 16 aa, synthetic construct
AAREDSDWGIRDTDKL

SEQ ID NO: 40445 - protein, 16 aa, synthetic construct
AAREDSDWVIRDTDKL

SEQ ID NO: 40446 - protein, 11 aa, synthetic construct
AAREGMTDKLI

SEQ ID NO: 40447 - protein, 10 aa, synthetic construct
AAREYSDKLI

SEQ ID NO: 40448 - protein, 14 aa, synthetic construct
AAREMGDTRHRDTH

SEQ ID NO: 40449 - protein, 14 aa, synthetic construct
AAREMGDTRHRETH

SEQ ID NO: 40450 - protein, 8 aa, synthetic construct
AAREPINS

SEQ ID NO: 40451 - protein, 9 aa, synthetic construct
AAREPISSS

SEQ ID NO: 40452 - protein, 8 aa, synthetic construct
AAREPITH

SEQ ID NO: 40453 - protein, 15 aa, synthetic construct
AARETPVLGDTPAQL

SEQ ID NO: 40454 - protein, 12 aa, synthetic construct
AARGGRTPINAS

SEQ ID NO: 40455 - protein, 13 aa, synthetic construct
AARGGYKFTDKLI

SEQ ID NO: 40456 - protein, 16 aa, synthetic construct
AARKEGWWILYTDKLI

SEQ ID NO: 40457 - protein, 11 aa, synthetic construct
AARGGYTDIII

SEQ ID NO: 40458 - protein, 15 aa, synthetic construct
AARGTFLRGGIRQLI

SEQ ID NO: 40459 - protein, 13 aa, synthetic construct
AARGWGPGPINSS

SEQ ID NO: 40460 - protein, 13 aa, synthetic construct
AARGWGPHTAKLI

SEQ ID NO: 40461 - protein, 13 aa, synthetic construct
AARGWGPHTEKLI

SEQ ID NO: 40462 - protein, 10 aa, synthetic construct
AARGYPDTLI

SEQ ID NO: 40463 - protein, 8 aa, synthetic construct
AARIDNLI

SEQ ID NO: 40464 - protein, 12 aa, synthetic construct
AARIGGYGDKLI

SEQ ID NO: 40465 - protein, 9 aa, synthetic construct
AARIPDKLI

SEQ ID NO: 40466 - protein, 12 aa, synthetic construct
AARIPTLGYPLI

SEQ ID NO: 40467 - protein, 15 aa, synthetic construct
AARIPTWAGGPINSS

SEQ ID NO: 40468 - protein, 15 aa, synthetic construct
AARIPTWAGGPRNSS

SEQ ID NO: 40469 - protein, 11 aa, synthetic construct
AARIRGYGQLI

SEQ ID NO: 40470 - protein, 13 aa, synthetic construct
AARISLGVPEKLI

SEQ ID NO: 40471 - protein, 13 aa, synthetic construct
AARIYLGVPDKHI

SEQ ID NO: 40472 - protein, 13 aa, synthetic construct
AARIYLGVTEKLN

SEQ ID NO: 40473 - protein, 9 aa, synthetic construct
AARGTEKLI

SEQ ID NO: 40474 - protein, 9 aa, synthetic construct
AARGTDQLI

SEQ ID NO: 40475 - protein, 10 aa, synthetic construct
AARGSPDKPI

SEQ ID NO: 40476 - protein, 15 aa, synthetic construct
AARGLPRSTGGPVHR

SEQ ID NO: 40477 - protein, 11 aa, synthetic construct
AARGGYTDKHI

SEQ ID NO: 40478 - protein, 9 aa, synthetic construct
AARGHQKLI

SEQ ID NO: 40479 - protein, 9 aa, synthetic construct
AARGIEKLI

SEQ ID NO: 40480 - protein, 11 aa, synthetic construct
AARGIPPDQLI

SEQ ID NO: 40481 - protein, 13 aa, synthetic construct
AARGIVSWHTRQT

SEQ ID NO: 40482 - protein, 13 aa, synthetic construct
AARGLGEMTEKLI

SEQ ID NO: 40483 - protein, 14 aa, synthetic construct
AARGLRVIRSDKLI

SEQ ID NO: 40484 - protein, 15 aa, synthetic construct
AARGPSPGGLARPLI

SEQ ID NO: 40485 - protein, 15 aa, synthetic construct
AARGLTRSTGGLVHR

SEQ ID NO: 40486 - protein, 14 aa, synthetic construct
AARGMGDTNTDKLI

SEQ ID NO: 40487 - protein, 14 aa, synthetic construct
AARGMGDTNTEKLI

SEQ ID NO: 40488 - protein, 11 aa, synthetic construct
AARGMYTDKLI

SEQ ID NO: 40489 - protein, 9 aa, synthetic construct
AARGPHKII

SEQ ID NO: 40490 - protein, 9 aa, synthetic construct
AARGPHKLN

SEQ ID NO: 40491 - protein, 13 aa, synthetic construct
AALLPGIRTDKLT

SEQ ID NO: 40492 - protein, 13 aa, synthetic construct
AALLPGIRSDKLI

SEQ ID NO: 40493 - protein, 14 aa, synthetic construct
AASPWGIRNTDELI

SEQ ID NO: 40494 - protein, 14 aa, synthetic construct
AAEGELGARTDKLI

SEQ ID NO: 40495 - protein, 13 aa, synthetic construct
AAEGLGDMHAQLF

SEQ ID NO: 40496 - protein, 13 aa, synthetic construct
AAEGLGDTQAQLV

SEQ ID NO: 40497 - protein, 10 aa, synthetic construct
AAEGVADKLI

SEQ ID NO: 40498 - protein, 10 aa, synthetic construct
AAEGVADKLN

SEQ ID NO: 40499 - protein, 12 aa, synthetic construct
AAERIPEGDKLI

SEQ ID NO: 40500 - protein, 12 aa, synthetic construct
AAERIPGGDKLF

SEQ ID NO: 40501 - protein, 12 aa, synthetic construct
AAERIPGGDKLS

SEQ ID NO: 40502 - protein, 12 aa, synthetic construct
AAERIPGGDTLI

SEQ ID NO: 40503 - protein, 14 aa, synthetic construct
AAERNSTLLNSRHP

SEQ ID NO: 40504 - protein, 11 aa, synthetic construct
AAEVGVTDKHI

SEQ ID NO: 40505 - protein, 14 aa, synthetic construct
AAEVLGDTFTDKLI

SEQ ID NO: 40506 - protein, 10 aa, synthetic construct
AAFCGIDKLI

SEQ ID NO: 40507 - protein, 15 aa, synthetic construct
AAFFCYWGILNDKLI

SEQ ID NO: 40508 - protein, 9 aa, synthetic construct
AAFGGAKLI

SEQ ID NO: 40509 - protein, 12 aa, synthetic construct
AAFILGDNDTLI

SEQ ID NO: 40510 - protein, 12 aa, synthetic construct
AAEGGSYTAKLI

SEQ ID NO: 40511 - protein, 14 aa, synthetic construct
AAEGELGAHTEKLI

SEQ ID NO: 40512 - protein, 12 aa, synthetic construct
AALLGVYTEKLI

SEQ ID NO: 40513 - protein, 14 aa, synthetic construct
AAEGELGAHIDKLI

SEQ ID NO: 40514 - protein, 13 aa, synthetic construct
AADVPGAYTDKLI

SEQ ID NO: 40515 - protein, 11 aa, synthetic construct
AADVVVPDKLI

SEQ ID NO: 40516 - protein, 12 aa, synthetic construct
AADWGITSEKLI

SEQ ID NO: 40517 - protein, 12 aa, synthetic construct
AADWGITSETLN

SEQ ID NO: 40518 - protein, 12 aa, synthetic construct
AADWGPPPINSS

SEQ ID NO: 40519 - protein, 10 aa, synthetic construct
AADWGSDKLI

SEQ ID NO: 40520 - protein, 14 aa, synthetic construct
AAEFGGCPYTDKLI

SEQ ID NO: 40521 - protein, 14 aa, synthetic construct
AAEFGGYLYTDKLI

SEQ ID NO: 40522 - protein, 14 aa, synthetic construct
AAEFGGYPYTDKLM

SEQ ID NO: 40523 - protein, 14 aa, synthetic construct
AAEFGGYPYTDQLI

SEQ ID NO: 40524 - protein, 14 aa, synthetic construct
AAEFVGYPYTDKLI

SEQ ID NO: 40525 - protein, 12 aa, synthetic construct
AAEGDASTDKLI

SEQ ID NO: 40526 - protein, 12 aa, synthetic construct
AAEGDTSTDTLI

SEQ ID NO: 40527 - protein, 12 aa, synthetic construct
AAEGDTSTEKLI

SEQ ID NO: 40528 - protein, 7 aa, synthetic construct
AAEGELG

SEQ ID NO: 40529 - protein, 15 aa, synthetic construct
AAFIRGGYAYTDKLI

SEQ ID NO: 40530 - protein, 12 aa, synthetic construct
AAFLLGDKDKLI

SEQ ID NO: 40531 - protein, 14 aa, synthetic construct
AAFLLGVSTPINSS

SEQ ID NO: 40532 - protein, 14 aa, synthetic construct
AAFLRGGSAPINSS

SEQ ID NO: 40533 - protein, 10 aa, synthetic construct
AAFWGIDNLI

SEQ ID NO: 40534 - protein, 10 aa, synthetic construct
AAFWGLDKLI

SEQ ID NO: 40535 - protein, 15 aa, synthetic construct
AAGACLQGDTRAKLI

SEQ ID NO: 40536 - protein, 15 aa, synthetic construct
AAGAFLQGDTRAKII

SEQ ID NO: 40537 - protein, 15 aa, synthetic construct
AAGAFLQGDTRAQLI

SEQ ID NO: 40538 - protein, 15 aa, synthetic construct
AAGAFLQGGTRAKLI

SEQ ID NO: 40539 - protein, 15 aa, synthetic construct
AAGAFLQRDTRAKLI

SEQ ID NO: 40540 - protein, 14 aa, synthetic construct
AAGAFLRHGGPATP

SEQ ID NO: 40541 - protein, 15 aa, synthetic construct
AAGAFLRNGGPSTPI

SEQ ID NO: 40542 - protein, 16 aa, synthetic construct
AAGAFLRNGGPSTPRN

SEQ ID NO: 40543 - protein, 15 aa, synthetic construct
AAGAFPQGDTRAKLI

SEQ ID NO: 40544 - protein, 9 aa, synthetic construct
AAGDTRDTH

SEQ ID NO: 40545 - protein, 9 aa, synthetic construct
AAGDTRETH

SEQ ID NO: 40546 - protein, 9 aa, synthetic construct
AAGDTRYTR

SEQ ID NO: 40547 - protein, 10 aa, synthetic construct
AAGDTTAKLI

SEQ ID NO: 40548 - protein, 10 aa, synthetic construct
AAFWGIAKLI

SEQ ID NO: 40549 - protein, 15 aa, synthetic construct
AAFSCYWGLLNDKLI

SEQ ID NO: 40550 - protein, 15 aa, synthetic construct
AAFSCYWGIQNDQLI

SEQ ID NO: 40551 - protein, 16 aa, synthetic construct
AAFLRVLGDKSTDQLI

SEQ ID NO: 40552 - protein, 15 aa, synthetic construct
AAFLRGGYAYTDKPI

SEQ ID NO: 40553 - protein, 12 aa, synthetic construct
AAFLRGIPDKLI

SEQ ID NO: 40554 - protein, 13 aa, synthetic construct
AAFLRLGAVAKLI

SEQ ID NO: 40555 - protein, 13 aa, synthetic construct
AAFLRLWALDKLI

SEQ ID NO: 40556 - protein, 15 aa, synthetic construct
AAFLRVLGAKSTDKL

SEQ ID NO: 40557 - protein, 16 aa, synthetic construct
AAFLRVLGAKSTDKLI

SEQ ID NO: 40558 - protein, 16 aa, synthetic construct
AAFLRVLGDTSTDKLI

SEQ ID NO: 40559 - protein, 15 aa, synthetic construct
AAFSCYWGILNYKLI

SEQ ID NO: 40560 - protein, 16 aa, synthetic construct
AAFLRVLGYKSTDKLI

SEQ ID NO: 40561 - protein, 16 aa, synthetic construct
AAFPTPLGDTGTDKLI

SEQ ID NO: 40562 - protein, 15 aa, synthetic construct
AAFSCYCGILNDKLF

SEQ ID NO: 40563 - protein, 13 aa, synthetic construct
AAFSCYWGILKLI

SEQ ID NO: 40564 - protein, 15 aa, synthetic construct
AAFSCYWGILNEELI

SEQ ID NO: 40565 - protein, 15 aa, synthetic construct
AAFSCYWGILNEKLI

SEQ ID NO: 40566 - protein, 14 aa, synthetic construct
AADVLGDTGTPGTP

SEQ ID NO: 40567 - protein, 13 aa, synthetic construct
AADVLGAYSDKLI

SEQ ID NO: 40568 - protein, 13 aa, synthetic construct
AADVLGACTDTLI

SEQ ID NO: 40569 - protein, 15 aa, synthetic construct
AAARVAARLRSRPGT

SEQ ID NO: 40570 - protein, 11 aa, synthetic construct
AAALEDTDQLI

SEQ ID NO: 40571 - protein, 11 aa, synthetic construct
AAALGDTEKLI

SEQ ID NO: 40572 - protein, 15 aa, synthetic construct
AAALPTSGGYTDKLI

SEQ ID NO: 40573 - protein, 12 aa, synthetic construct
AAAPPPRADKPI

SEQ ID NO: 40574 - protein, 12 aa, synthetic construct
AAAPPPRAEKLI

SEQ ID NO: 40575 - protein, 12 aa, synthetic construct
AAAPPREPINSS

SEQ ID NO: 40576 - protein, 15 aa, synthetic construct
AAAPSSWGFHSDKLI

SEQ ID NO: 40577 - protein, 15 aa, synthetic construct
AAAPSSWGFHTAKLI

SEQ ID NO: 40578 - protein, 15 aa, synthetic construct
AAAPSSWGFNTDKLI

SEQ ID NO: 40579 - protein, 15 aa, synthetic construct
AAARPGGYGDTEKLI

SEQ ID NO: 40580 - protein, 15 aa, synthetic construct
AAARTGGSGDTDKLI

SEQ ID NO: 40581 - protein, 15 aa, synthetic construct
AAARTGGYGDTDELI

SEQ ID NO: 40582 - protein, 15 aa, synthetic construct
AAARTGGYGDTDKLF

SEQ ID NO: 40583 - protein, 15 aa, synthetic construct
AAARTGGYGDTDKLV

SEQ ID NO: 40584 - protein, 15 aa, synthetic construct
AAARTGGYGDTDRLI

SEQ ID NO: 40585 - protein, 12 aa, synthetic construct
AAAHWGIPINSS

SEQ ID NO: 40586 - protein, 10 aa, synthetic construct
AAAGVTDKLI

SEQ ID NO: 40587 - protein, 10 aa, synthetic construct
AAAGVDDKLI

SEQ ID NO: 40588 - protein, 16 aa, synthetic construct
AAAFPAVLVESTDKLI

SEQ ID NO: 40589 - protein, 7 aa, synthetic construct
AAADNSS

SEQ ID NO: 40590 - protein, 7 aa, synthetic construct
AAADQLI

SEQ ID NO: 40591 - protein, 7 aa, synthetic construct
AAADTLI

SEQ ID NO: 40592 - protein, 16 aa, synthetic construct
AAAFLCNGREKRLCGN

SEQ ID NO: 40593 - protein, 16 aa, synthetic construct
AAAFLRAGGELLGRPT

SEQ ID NO: 40594 - protein, 16 aa, synthetic construct
AAAFPAGLGDSTDKLI

SEQ ID NO: 40595 - protein, 10 aa, synthetic construct
AAAGVADELI

SEQ ID NO: 40596 - protein, 10 aa, synthetic construct
AAAGVAETLI

SEQ ID NO: 40597 - protein, 9 aa, synthetic construct
AAAGVADKL

SEQ ID NO: 40598 - protein, 10 aa, synthetic construct
AAAGVADKLN

SEQ ID NO: 40599 - protein, 10 aa, synthetic construct
AAAGVADQLF

SEQ ID NO: 40600 - protein, 10 aa, synthetic construct
AAAGVADQLI

SEQ ID NO: 40601 - protein, 10 aa, synthetic construct
AAAGVADQPI

SEQ ID NO: 40602 - protein, 10 aa, synthetic construct
AAAGVADTLI

SEQ ID NO: 40603 - protein, 15 aa, synthetic construct
AAARTGGYGDTGKLI

SEQ ID NO: 40604 - protein, 15 aa, synthetic construct
AAASLPTWGILDDKL

SEQ ID NO: 40605 - protein, 11 aa, synthetic construct
AADVGVPDNLI

SEQ ID NO: 40606 - protein, 16 aa, synthetic construct
AAASLPTWGILDDKPI

SEQ ID NO: 40607 - protein, 11 aa, synthetic construct
AADNWGSGQLI

SEQ ID NO: 40608 - protein, 14 aa, synthetic construct
AADPQYWGRHTDQL

SEQ ID NO: 40609 - protein, 15 aa, synthetic construct
AADPQYWGRTTDKLI

SEQ ID NO: 40610 - protein, 15 aa, synthetic construct
AADPQYWGSNTDKLT

SEQ ID NO: 40611 - protein, 15 aa, synthetic construct
AADPQYWGSNTDNLI

SEQ ID NO: 40612 - protein, 15 aa, synthetic construct
AADPQYWGSNTDQLI

SEQ ID NO: 40613 - protein, 12 aa, synthetic construct
AADREIPADKLI

SEQ ID NO: 40614 - protein, 12 aa, synthetic construct
AADRGIPADKLN

SEQ ID NO: 40615 - protein, 11 aa, synthetic construct
AADRGIPADTH

SEQ ID NO: 40616 - protein, 12 aa, synthetic construct
AADRGLPADKLI

SEQ ID NO: 40617 - protein, 12 aa, synthetic construct
AADRIPGGDKLI

SEQ ID NO: 40618 - protein, 15 aa, synthetic construct
AADRTGGYGDTDKLF

SEQ ID NO: 40619 - protein, 11 aa, synthetic construct
AADTWGSGKLI

SEQ ID NO: 40620 - protein, 12 aa, synthetic construct
AADVDTSTDKLI

SEQ ID NO: 40621 - protein, 11 aa, synthetic construct
AADVGVPDKPI

SEQ ID NO: 40622 - protein, 11 aa, synthetic construct
AADNCGSGKLI

SEQ ID NO: 40623 - protein, 11 aa, synthetic construct
AADKWGSGKLI

SEQ ID NO: 40624 - protein, 16 aa, synthetic construct
AADFPAVLGDSTDKLI

SEQ ID NO: 40625 - protein, 14 aa, synthetic construct
AACLLGAPGTDKLI

SEQ ID NO: 40626 - protein, 14 aa, synthetic construct
AAAVLGDTFTDKLL

SEQ ID NO: 40627 - protein, 14 aa, synthetic construct
AAAVLGDTFTDKLT

SEQ ID NO: 40628 - protein, 14 aa, synthetic construct
AAAVLGDTFTDQLI

SEQ ID NO: 40629 - protein, 14 aa, synthetic construct
AAAVLGDTLTDKLI

SEQ ID NO: 40630 - protein, 13 aa, synthetic construct
AAAYWDANTDKLI

SEQ ID NO: 40631 - protein, 13 aa, synthetic construct
AAAYWDTNTDQLI

SEQ ID NO: 40632 - protein, 13 aa, synthetic construct
AACLLGDTHLNSP

SEQ ID NO: 40633 - protein, 13 aa, synthetic construct
AACVLGGTRVISS

SEQ ID NO: 40634 - protein, 13 aa, synthetic construct
AACMRWGILDKLI

SEQ ID NO: 40635 - protein, 16 aa, synthetic construct
AACNPLGDTRYTDKLI

SEQ ID NO: 40636 - protein, 16 aa, synthetic construct
AACNTLGDTRYTDKLI

SEQ ID NO: 40637 - protein, 13 aa, synthetic construct
AACPGDPGGDKLI

SEQ ID NO: 40638 - protein, 16 aa, synthetic construct
AACRNYLTGGYMTDKL

SEQ ID NO: 40639 - protein, 13 aa, synthetic construct
AACTRLGDTDKLI

SEQ ID NO: 40640 - protein, 13 aa, synthetic construct
AAGFLLGSPDKLI

SEQ ID NO: 40641 - protein, 10 aa, synthetic construct
AAGGDHDKLN

SEQ ID NO: 40642 - protein, 12 aa, synthetic construct
AAGGDIGTDKLI

SEQ ID NO: 40643 - protein, 15 aa, synthetic construct
AAKAGLGAPYTDKLI

SEQ ID NO: 40644 - protein, 12 aa, synthetic construct
AAIRGTHTEKLI

SEQ ID NO: 40645 - protein, 16 aa, synthetic construct
AAIRPLTGGYHTAKLI

SEQ ID NO: 40646 - protein, 16 aa, synthetic construct
AAIRPLTGGYHTEKLI

SEQ ID NO: 40647 - protein, 12 aa, synthetic construct
AAIRVTHTDKLI

SEQ ID NO: 40648 - protein, 13 aa, synthetic construct
AAISGGSDTDQLI

SEQ ID NO: 40649 - protein, 6 aa, synthetic construct
AAISWD

SEQ ID NO: 40650 - protein, 8 aa, synthetic construct
AAITDKLI

SEQ ID NO: 40651 - protein, 14 aa, synthetic construct
AAITGGYADTDKLI

SEQ ID NO: 40652 - protein, 12 aa, synthetic construct
AAITGGYTDKLI

SEQ ID NO: 40653 - protein, 13 aa, synthetic construct
AAIYGGIDTDKLF

SEQ ID NO: 40654 - protein, 13 aa, synthetic construct
AAIYGGIDTEKLI

SEQ ID NO: 40655 - protein, 13 aa, synthetic construct
AAIYGGSDTDKLI

SEQ ID NO: 40656 - protein, 13 aa, synthetic construct
AAIYGWIDTDKLI

SEQ ID NO: 40657 - protein, 13 aa, synthetic construct
AAIYVGIDTDKLI

SEQ ID NO: 40658 - protein, 13 aa, synthetic construct
AAIYWGIDTDKLI

SEQ ID NO: 40659 - protein, 12 aa, synthetic construct
AAIRGTHTDTLI

SEQ ID NO: 40660 - protein, 11 aa, synthetic construct
AAIRGSPINSS

SEQ ID NO: 40661 - protein, 11 aa, synthetic construct
AAIRGIPDKLI

SEQ ID NO: 40662 - protein, 5 aa, synthetic construct
AAIPA

SEQ ID NO: 40663 - protein, 8 aa, synthetic construct
AAINQNQI

SEQ ID NO: 40664 - protein, 15 aa, synthetic construct
AAINSHTGGPTDRLI

SEQ ID NO: 40665 - protein, 15 aa, synthetic construct
AAINSPTGGPTDQLI

SEQ ID NO: 40666 - protein, 15 aa, synthetic construct
AAINSPTGGYPINSS

SEQ ID NO: 40667 - protein, 15 aa, synthetic construct
AAINSSTGGPTDKLI

SEQ ID NO: 40668 - protein, 15 aa, synthetic construct
AAINTPTGGPTHKLI

SEQ ID NO: 40669 - protein, 14 aa, synthetic construct
AAIPARNDYSDKLI

SEQ ID NO: 40670 - protein, 13 aa, synthetic construct
AAIRGGPYTYKLI

SEQ ID NO: 40671 - protein, 14 aa, synthetic construct
AAIPARTDYTDQLI

SEQ ID NO: 40672 - protein, 14 aa, synthetic construct
AAIPERNDYTDKLI

SEQ ID NO: 40673 - protein, 14 aa, synthetic construct
AAIPGRNDYTDKLI

SEQ ID NO: 40674 - protein, 16 aa, synthetic construct
AAIPLPRGYAAIGKLI

SEQ ID NO: 40675 - protein, 13 aa, synthetic construct
AAIPTGGHTDQLI

SEQ ID NO: 40676 - protein, 15 aa, synthetic construct
AAIQPLGAPSTDKLI

SEQ ID NO: 40677 - protein, 13 aa, synthetic construct
AAIYWGKVHRETH

SEQ ID NO: 40678 - protein, 14 aa, synthetic construct
AAKGNGYRGARKSS

SEQ ID NO: 40679 - protein, 11 aa, synthetic construct
AAILVDTDKLI

SEQ ID NO: 40680 - protein, 14 aa, synthetic construct
AAKGTGSSGAINSS

SEQ ID NO: 40681 - protein, 12 aa, synthetic construct
AALGAPPTDKLI

SEQ ID NO: 40682 - protein, 12 aa, synthetic construct
AALGAPRADKLI

SEQ ID NO: 40683 - protein, 9 aa, synthetic construct
AALGDDKLI

SEQ ID NO: 40684 - protein, 11 aa, synthetic construct
AALGDHAAKLI

SEQ ID NO: 40685 - protein, 13 aa, synthetic construct
AALGGALLGHPTD

SEQ ID NO: 40686 - protein, 13 aa, synthetic construct
AALGGGGYTHKLI

SEQ ID NO: 40687 - protein, 12 aa, synthetic construct
AALGPLAPRNSS

SEQ ID NO: 40688 - protein, 13 aa, synthetic construct
AALIPGIRTDKLI

SEQ ID NO: 40689 - protein, 15 aa, synthetic construct
AALITGGYGSTDKLI

SEQ ID NO: 40690 - protein, 12 aa, synthetic construct
AALLGDTDPTLI

SEQ ID NO: 40691 - protein, 15 aa, synthetic construct
AALLGDTSPGTEQLI

SEQ ID NO: 40692 - protein, 10 aa, synthetic construct
AALLGGINSS

SEQ ID NO: 40693 - protein, 12 aa, synthetic construct
AALLGSYTDKLI

SEQ ID NO: 40694 - protein, 12 aa, synthetic construct
AALLGVYTDKLI

SEQ ID NO: 40695 - protein, 12 aa, synthetic construct
AALLGVYTDQLI

SEQ ID NO: 40696 - protein, 11 aa, synthetic construct
AALGAHTDKLI

SEQ ID NO: 40697 - protein, 13 aa, synthetic construct
AAKVGQGDTDKLI

SEQ ID NO: 40698 - protein, 13 aa, synthetic construct
AAKVGQGDTAKLI

SEQ ID NO: 40699 - protein, 15 aa, synthetic construct
AAKRPSGGNATDKLI

SEQ ID NO: 40700 - protein, 10 aa, synthetic construct
AAKITTDKLF

SEQ ID NO: 40701 - protein, 10 aa, synthetic construct
AAKITTDQLI

SEQ ID NO: 40702 - protein, 10 aa, synthetic construct
AAKITTEKLI

SEQ ID NO: 40703 - protein, 9 aa, synthetic construct
AAKPSYFSW

SEQ ID NO: 40704 - protein, 16 aa, synthetic construct
AAKQTTVTTGGYGKLI

SEQ ID NO: 40705 - protein, 15 aa, synthetic construct
AAKRPAGGYATDKLI

SEQ ID NO: 40706 - protein, 15 aa, synthetic construct
AAKRPSGGYAADKLI

SEQ ID NO: 40707 - protein, 15 aa, synthetic construct
AAKRTSGGYATDKLI

SEQ ID NO: 40708 - protein, 15 aa, synthetic construct
AAKRPSGGYATDKLN

SEQ ID NO: 40709 - protein, 15 aa, synthetic construct
AAKRPSGGYATDNLI

SEQ ID NO: 40710 - protein, 15 aa, synthetic construct
AAKRPSGGYATEKLI

SEQ ID NO: 40711 - protein, 13 aa, synthetic construct
AAKRPSGGYDKLI

SEQ ID NO: 40712 - protein, 15 aa, synthetic construct
AAKRPSGGYSTDKLI

SEQ ID NO: 40713 - protein, 15 aa, synthetic construct
AAKRPSVGYATDKII

SEQ ID NO: 40714 - protein, 15 aa, synthetic construct
AAIMPRLWDTTDKLI

SEQ ID NO: 40715 - protein, 16 aa, synthetic construct
AAILPLLLGEYTEKLI

SEQ ID NO: 40716 - protein, 12 aa, synthetic construct
AAGGDTYTDKLI

SEQ ID NO: 40717 - protein, 16 aa, synthetic construct
AAGTSLGGYLYTDKLI

SEQ ID NO: 40718 - protein, 16 aa, synthetic construct
AAGLPCTGGDDTDKLI

SEQ ID NO: 40719 - protein, 16 aa, synthetic construct
AAGLPCTGGSDTDKLI

SEQ ID NO: 40720 - protein, 16 aa, synthetic construct
AAGLPKWGPTSPDKLI

SEQ ID NO: 40721 - protein, 16 aa, synthetic construct
AAGLPRGGPTSHDKLI

SEQ ID NO: 40722 - protein, 16 aa, synthetic construct
AAGLPRWGPTSPDQLI

SEQ ID NO: 40723 - protein, 13 aa, synthetic construct
AAGLPYWGPRETH

SEQ ID NO: 40724 - protein, 13 aa, synthetic construct
AAGLPYWGPRSTH

SEQ ID NO: 40725 - protein, 15 aa, synthetic construct
AAGPPTWGAYTDKLI

SEQ ID NO: 40726 - protein, 16 aa, synthetic construct
AAGPTPLGDTRTDTLI

SEQ ID NO: 40727 - protein, 9 aa, synthetic construct
AAGQGARQM

SEQ ID NO: 40728 - protein, 9 aa, synthetic construct
AAGQPDQLI

SEQ ID NO: 40729 - protein, 8 aa, synthetic construct
AAGRDKLI

SEQ ID NO: 40730 - protein, 11 aa, synthetic construct
AAGRGLTAQLF

SEQ ID NO: 40731 - protein, 14 aa, synthetic construct
AAGRGPSSWDTRQM

SEQ ID NO: 40732 - protein, 15 aa, synthetic construct
AAGRRDTRGAYTDRL

SEQ ID NO: 40733 - protein, 9 aa, synthetic construct
AAGLGSRQM

SEQ ID NO: 40734 - protein, 11 aa, synthetic construct
AAGLGDTDTLI

SEQ ID NO: 40735 - protein, 11 aa, synthetic construct
AAGLGDTDKLI

SEQ ID NO: 40736 - protein, 9 aa, synthetic construct
AAGGYARTH

SEQ ID NO: 40737 - protein, 14 aa, synthetic construct
AAGGFLTGDTRDKL

SEQ ID NO: 40738 - protein, 13 aa, synthetic construct
AAGGLDPRTAKLI

SEQ ID NO: 40739 - protein, 13 aa, synthetic construct
AAGGLEPRTDKLI

SEQ ID NO: 40740 - protein, 13 aa, synthetic construct
AAGGRVSWDTRQM

SEQ ID NO: 40741 - protein, 10 aa, synthetic construct
AAGGTPINPS

SEQ ID NO: 40742 - protein, 10 aa, synthetic construct
AAGGTPMSSS

SEQ ID NO: 40743 - protein, 10 aa, synthetic construct
AAGGYTDRLI

SEQ ID NO: 40744 - protein, 9 aa, synthetic construct
AAGLGARQI

SEQ ID NO: 40745 - protein, 10 aa, synthetic construct
AAGGYTDTLI

SEQ ID NO: 40746 - protein, 10 aa, synthetic construct
AAGGYTEKLI

SEQ ID NO: 40747 - protein, 9 aa, synthetic construct
AAGIPETLI

SEQ ID NO: 40748 - protein, 8 aa, synthetic construct
AAGIRGSS

SEQ ID NO: 40749 - protein, 9 aa, synthetic construct
AAGITPINS

SEQ ID NO: 40750 - protein, 15 aa, synthetic construct
AAGLFSTGGYTDKLI

SEQ ID NO: 40751 - protein, 10 aa, synthetic construct
AAGSTPRHSS

SEQ ID NO: 40752 - protein, 15 aa, synthetic construct
AAGTTGGYKLTAQLF

SEQ ID NO: 40753 - protein, 16 aa, synthetic construct
AAILPLLLGEYTDQLI

SEQ ID NO: 40754 - protein, 15 aa, synthetic construct
AAGVPRWGPTSPEQR

SEQ ID NO: 40755 - protein, 12 aa, synthetic construct
AAILGDSSDKLI

SEQ ID NO: 40756 - protein, 12 aa, synthetic construct
AAILGDSTEKLI

SEQ ID NO: 40757 - protein, 11 aa, synthetic construct
AAILGDTDQHI

SEQ ID NO: 40758 - protein, 12 aa, synthetic construct
AAILGTHTVKLI

SEQ ID NO: 40759 - protein, 11 aa, synthetic construct
AAILGYTDKLI

SEQ ID NO: 40760 - protein, 11 aa, synthetic construct
AAILHRGIRGS

SEQ ID NO: 40761 - protein, 11 aa, synthetic construct
AAILHRGYAEP

SEQ ID NO: 40762 - protein, 16 aa, synthetic construct
AAILMVLGDKSTDKLI

SEQ ID NO: 40763 - protein, 16 aa, synthetic construct
AAILPILLGEYTDKLI

SEQ ID NO: 40764 - protein, 15 aa, synthetic construct
AAILPLGAPLTDKLI

SEQ ID NO: 40765 - protein, 15 aa, synthetic construct
AAILPLGAPYTAKLI

SEQ ID NO: 40766 - protein, 15 aa, synthetic construct
AAILPLGAPYTDQLI

SEQ ID NO: 40767 - protein, 15 aa, synthetic construct
AAILPLGAPYTEKLI

SEQ ID NO: 40768 - protein, 16 aa, synthetic construct
AAILPLLLGEYADKLI

SEQ ID NO: 40769 - protein, 16 aa, synthetic construct
AAILPLLLGEYTDKPI

SEQ ID NO: 40770 - protein, 12 aa, synthetic construct
AAILADSTDKLI

SEQ ID NO: 40771 - protein, 8 aa, synthetic construct
AAIKPINS

SEQ ID NO: 40772 - protein, 15 aa, synthetic construct
AAIITGGYGYTEKLI

SEQ ID NO: 40773 - protein, 11 aa, synthetic construct
AAHVGVPDKLI

SEQ ID NO: 40774 - protein, 11 aa, synthetic construct
AAHFPGAEELI

SEQ ID NO: 40775 - protein, 11 aa, synthetic construct
AAHFPGAVNLI

SEQ ID NO: 40776 - protein, 11 aa, synthetic construct
AAHGGPPDKLI

SEQ ID NO: 40777 - protein, 16 aa, synthetic construct
AAHLPPRGIPYTDKLI

SEQ ID NO: 40778 - protein, 16 aa, synthetic construct
AAHLPTRGIPSTEKLI

SEQ ID NO: 40779 - protein, 16 aa, synthetic construct
AAHLPTRGIPYTDKPI

SEQ ID NO: 40780 - protein, 13 aa, synthetic construct
AAHWGIRDTDKLI

SEQ ID NO: 40781 - protein, 15 aa, synthetic construct
AAIHPTWGAYTDILI

SEQ ID NO: 40782 - protein, 10 aa, synthetic construct
AAHWVPDKLI

SEQ ID NO: 40783 - protein, 11 aa, synthetic construct
AAHYPRAEKHI

SEQ ID NO: 40784 - protein, 13 aa, synthetic construct
AAICGGIDTDKLI

SEQ ID NO: 40785 - protein, 10 aa, synthetic construct
AAIDSGRAQL

SEQ ID NO: 40786 - protein, 12 aa, synthetic construct
AAIGDIGTDKLI

SEQ ID NO: 40787 - protein, 15 aa, synthetic construct
AAIHNCGIRHTDKLI

SEQ ID NO: 40788 - protein, 16 aa, synthetic construct
AARRGPSCWGIRPDKL

SEQ ID NO: 40789 - protein, 13 aa, synthetic construct
AARRGWGTPINSS

SEQ ID NO: 40790 - protein, 16 aa, synthetic construct
AARRNYLTGGYMTDKL

SEQ ID NO: 40791 - protein, 13 aa, synthetic construct
AASMGLQKPINSS

SEQ ID NO: 40792 - protein, 12 aa, synthetic construct
AASMGPYTEKLI

SEQ ID NO: 40793 - protein, 11 aa, synthetic construct
AASMGVHRETH

SEQ ID NO: 40794 - protein, 11 aa, synthetic construct
AASMGVHRSTH

SEQ ID NO: 40795 - protein, 8 aa, synthetic construct
AASMGYSS

SEQ ID NO: 40796 - protein, 9 aa, synthetic construct
AASMIDKII

SEQ ID NO: 40797 - protein, 9 aa, synthetic construct
AASMIDTLI

SEQ ID NO: 40798 - protein, 15 aa, synthetic construct
AASMIHTHWGILDTD

SEQ ID NO: 40799 - protein, 15 aa, synthetic construct
AASMIHTHWGILYTD

SEQ ID NO: 40800 - protein, 15 aa, synthetic construct
AASMIPAHWGILDTD

SEQ ID NO: 40801 - protein, 14 aa, synthetic construct
AASMIPTHWGILDT

SEQ ID NO: 40802 - protein, 15 aa, synthetic construct
AASMLALLGDTEKLI

SEQ ID NO: 40803 - protein, 13 aa, synthetic construct
AASMLALLGGKLI

SEQ ID NO: 40804 - protein, 10 aa, synthetic construct
AASMMAAQLF

SEQ ID NO: 40805 - protein, 10 aa, synthetic construct
AASMMTAQHF

SEQ ID NO: 40806 - protein, 10 aa, synthetic construct
AASMMTAQLS

SEQ ID NO: 40807 - protein, 13 aa, synthetic construct
AASMGLQRPRNSS

SEQ ID NO: 40808 - protein, 13 aa, synthetic construct
AASMGLERPINSS

SEQ ID NO: 40809 - protein, 9 aa, synthetic construct
AARRPINSS

SEQ ID NO: 40810 - protein, 12 aa, synthetic construct
AASMGGYTGKLI

SEQ ID NO: 40811 - protein, 13 aa, synthetic construct
AASMGDTPSDKLI

SEQ ID NO: 40812 - protein, 14 aa, synthetic construct
AASMGGGYNTDKLM

SEQ ID NO: 40813 - protein, 13 aa, synthetic construct
AASMGGIHTDKLI

SEQ ID NO: 40814 - protein, 13 aa, synthetic construct
AASMGGINTDKLN

SEQ ID NO: 40815 - protein, 13 aa, synthetic construct
AASMGGINTDQLI

SEQ ID NO: 40816 - protein, 12 aa, synthetic construct
AASMGGSTDKLI

SEQ ID NO: 40817 - protein, 12 aa, synthetic construct
AASMGGYGDKLI

SEQ ID NO: 40818 - protein, 12 aa, synthetic construct
AASMGGYSDKLI

SEQ ID NO: 40819 - protein, 12 aa, synthetic construct
AASMGGYTDELI

SEQ ID NO: 40820 - protein, 12 aa, synthetic construct
AASMGGYTDKLF

SEQ ID NO: 40821 - protein, 12 aa, synthetic construct
AASMGGYTDKLV

SEQ ID NO: 40822 - protein, 12 aa, synthetic construct
AASMGGYTDKVI

SEQ ID NO: 40823 - protein, 12 aa, synthetic construct
AASMGGYTDNSS

SEQ ID NO: 40824 - protein, 12 aa, synthetic construct
AASMGGYTDQLI

SEQ ID NO: 40825 - protein, 12 aa, synthetic construct
AASMGGYTEKLI

SEQ ID NO: 40826 - protein, 10 aa, synthetic construct
AASMMTARLF

SEQ ID NO: 40827 - protein, 9 aa, synthetic construct
AASMPDNLL

SEQ ID NO: 40828 - protein, 9 aa, synthetic construct
AASMPEKLI

SEQ ID NO: 40829 - protein, 13 aa, synthetic construct
AASMPGLYTEKLI

SEQ ID NO: 40830 - protein, 7 aa, synthetic construct
AAADKII

SEQ ID NO: 40831 - protein, 13 aa, synthetic construct
AASMRAPYTDTLI

SEQ ID NO: 40832 - protein, 13 aa, synthetic construct
AASMRARTPINSS

SEQ ID NO: 40833 - protein, 12 aa, synthetic construct
AASMRGPPRETH

SEQ ID NO: 40834 - protein, 12 aa, synthetic construct
AASMRGPPRSTH

SEQ ID NO: 40835 - protein, 12 aa, synthetic construct
AASMRGPPRYTH

SEQ ID NO: 40836 - protein, 14 aa, synthetic construct
AASMRSWGINDKLN

SEQ ID NO: 40837 - protein, 14 aa, synthetic construct
AASMRSWGINDQLI

SEQ ID NO: 40838 - protein, 10 aa, synthetic construct
AASMRTDKLI

SEQ ID NO: 40839 - protein, 13 aa, synthetic construct
AASMRWGILDKLF

SEQ ID NO: 40840 - protein, 13 aa, synthetic construct
AASMRWGRLDKLI

SEQ ID NO: 40841 - protein, 13 aa, synthetic construct
AASMRWWILDKLI

SEQ ID NO: 40842 - protein, 14 aa, synthetic construct
AASMRYCGINDKII

SEQ ID NO: 40843 - protein, 13 aa, synthetic construct
AASMRYGATGRVI

SEQ ID NO: 40844 - protein, 13 aa, synthetic construct
AASMRYGDKGRVI

SEQ ID NO: 40845 - protein, 13 aa, synthetic construct
AASMRAPYTDNSS

SEQ ID NO: 40846 - protein, 13 aa, synthetic construct
AASMRAPYTAKLI

SEQ ID NO: 40847 - protein, 15 aa, synthetic construct
AASMPYWGSYTETLI

SEQ ID NO: 40848 - protein, 15 aa, synthetic construct
AASMPRLGDPTDKLI

SEQ ID NO: 40849 - protein, 15 aa, synthetic construct
AASMPNWGSDTAQLI

SEQ ID NO: 40850 - protein, 12 aa, synthetic construct
AASMPPSTDTLI

SEQ ID NO: 40851 - protein, 14 aa, synthetic construct
AASMPPWRDTDKLI

SEQ ID NO: 40852 - protein, 12 aa, synthetic construct
AASMPPYADKLI

SEQ ID NO: 40853 - protein, 12 aa, synthetic construct
AASMPPYTEKLI

SEQ ID NO: 40854 - protein, 15 aa, synthetic construct
AASMPRLGDATDKLI

SEQ ID NO: 40855 - protein, 15 aa, synthetic construct
AASMPRLGDTSDNLI

SEQ ID NO: 40856 - protein, 15 aa, synthetic construct
AASMPYWGSYTDELI

SEQ ID NO: 40857 - protein, 15 aa, synthetic construct
AASMPRLGDTTDQLI

SEQ ID NO: 40858 - protein, 15 aa, synthetic construct
AASMPRLGDTTEKLI

SEQ ID NO: 40859 - protein, 15 aa, synthetic construct
AASMPRLGDTTYKLS

SEQ ID NO: 40860 - protein, 14 aa, synthetic construct
AASMPTWRGTDQLI

SEQ ID NO: 40861 - protein, 13 aa, synthetic construct
AASMPVLYTDKLI

SEQ ID NO: 40862 - protein, 13 aa, synthetic construct
AASMPWLYTDKLI

SEQ ID NO: 40863 - protein, 13 aa, synthetic construct
AASMGDTLSEKLI

SEQ ID NO: 40864 - protein, 13 aa, synthetic construct
AASMGAINTDKLI

SEQ ID NO: 40865 - protein, 13 aa, synthetic construct
AASMETGGYDKLV

SEQ ID NO: 40866 - protein, 15 aa, synthetic construct
AASLGSGGSRPINSS

SEQ ID NO: 40867 - protein, 10 aa, synthetic construct
AASLCGDKQI

SEQ ID NO: 40868 - protein, 15 aa, synthetic construct
AASLFSTGGYTDQHI

SEQ ID NO: 40869 - protein, 15 aa, synthetic construct
AASLFSTGGYTDQLI

SEQ ID NO: 40870 - protein, 15 aa, synthetic construct
AASLFSTVGYTDKLI

SEQ ID NO: 40871 - protein, 11 aa, synthetic construct
AASLGATDQRL

SEQ ID NO: 40872 - protein, 13 aa, synthetic construct
AASLGDATPINSS

SEQ ID NO: 40873 - protein, 11 aa, synthetic construct
AASLGDTDTLI

SEQ ID NO: 40874 - protein, 15 aa, synthetic construct
AASLGDTHGSTDKLI

SEQ ID NO: 40875 - protein, 15 aa, synthetic construct
AASLGDTHGYTDKII

SEQ ID NO: 40876 - protein, 15 aa, synthetic construct
AASLGDTHGYTDQLI

SEQ ID NO: 40877 - protein, 15 aa, synthetic construct
AASLGDTQGSTDKLI

SEQ ID NO: 40878 - protein, 13 aa, synthetic construct
AASLGDTTPIISS

SEQ ID NO: 40879 - protein, 13 aa, synthetic construct
AASLGDTTPRNSS

SEQ ID NO: 40880 - protein, 11 aa, synthetic construct
AASLGDTYKLI

SEQ ID NO: 40881 - protein, 13 aa, synthetic construct
AASLGETPPLNSS

SEQ ID NO: 40882 - protein, 15 aa, synthetic construct
AASLAVLGDTTDKLI

SEQ ID NO: 40883 - protein, 14 aa, synthetic construct
AASKVWGSTPINSS

SEQ ID NO: 40884 - protein, 13 aa, synthetic construct
AASKVWGHTDKLT

SEQ ID NO: 40885 - protein, 15 aa, synthetic construct
AASKTLYWGIPEKLI

SEQ ID NO: 40886 - protein, 15 aa, synthetic construct
AASKSHCTGGHDKLF

SEQ ID NO: 40887 - protein, 15 aa, synthetic construct
AASKSHSTGGHDKLI

SEQ ID NO: 40888 - protein, 15 aa, synthetic construct
AASKSQCTGGHEKLI

SEQ ID NO: 40889 - protein, 13 aa, synthetic construct
AASKTGGYHDNLI

SEQ ID NO: 40890 - protein, 12 aa, synthetic construct
AASKTLYWGIPD

SEQ ID NO: 40891 - protein, 15 aa, synthetic construct
AASKTLYWGIPDKLF

SEQ ID NO: 40892 - protein, 15 aa, synthetic construct
AASKTLYWGITDKLN

SEQ ID NO: 40893 - protein, 13 aa, synthetic construct
AASKVWGHTDKLL

SEQ ID NO: 40894 - protein, 15 aa, synthetic construct
AASKTLYWGYPINSS

SEQ ID NO: 40895 - protein, 13 aa, synthetic construct
AASKTSGYHEKLI

SEQ ID NO: 40896 - protein, 14 aa, synthetic construct
AASKTYWGRTDELI

SEQ ID NO: 40897 - protein, 14 aa, synthetic construct
AASKVQGVTPINSS

SEQ ID NO: 40898 - protein, 13 aa, synthetic construct
AASKVWGHADTLI

SEQ ID NO: 40899 - protein, 13 aa, synthetic construct
AASKVWGHTDELI

SEQ ID NO: 40900 - protein, 12 aa, synthetic construct
AASLGPYTDKLI

SEQ ID NO: 40901 - protein, 8 aa, synthetic construct
AASLGTAS

SEQ ID NO: 40902 - protein, 13 aa, synthetic construct
AASMETGGSDQLI

SEQ ID NO: 40903 - protein, 16 aa, synthetic construct
AASLILELGDTGTDKL

SEQ ID NO: 40904 - protein, 14 aa, synthetic construct
AASLYWGIRDDQLI

SEQ ID NO: 40905 - protein, 14 aa, synthetic construct
AASLYWGLRDGKLI

SEQ ID NO: 40906 - protein, 13 aa, synthetic construct
AASMAGGYPEKLI

SEQ ID NO: 40907 - protein, 15 aa, synthetic construct
AASMALGDTLGDKLI

SEQ ID NO: 40908 - protein, 11 aa, synthetic construct
AASMAPPLRLI

SEQ ID NO: 40909 - protein, 11 aa, synthetic construct
AASMATPLLLI

SEQ ID NO: 40910 - protein, 14 aa, synthetic construct
AASMATPLRLIVGN

SEQ ID NO: 40911 - protein, 15 aa, synthetic construct
AASMAWGIKNTDKLI

SEQ ID NO: 40912 - protein, 11 aa, synthetic construct
AASMCGGYKTD

SEQ ID NO: 40913 - protein, 15 aa, synthetic construct
AASMDLGDTLGVNLI

SEQ ID NO: 40914 - protein, 15 aa, synthetic construct
AASMDWGIKNTYKLI

SEQ ID NO: 40915 - protein, 15 aa, synthetic construct
AASMDWGIQNTDKLI

SEQ ID NO: 40916 - protein, 14 aa, synthetic construct
AASMELGDTLADKL

SEQ ID NO: 40917 - protein, 13 aa, synthetic construct
AASMELGDTLGDK

SEQ ID NO: 40918 - protein, 15 aa, synthetic construct
AASMEPGDTLGDKLI

SEQ ID NO: 40919 - protein, 16 aa, synthetic construct
AASLYWGIPPYTDKPI

SEQ ID NO: 40920 - protein, 16 aa, synthetic construct
AASLYCGIPPYNYKLI

SEQ ID NO: 40921 - protein, 13 aa, synthetic construct
AASLTGGYTDKLI

SEQ ID NO: 40922 - protein, 13 aa, synthetic construct
AASLPSFYTDKLI

SEQ ID NO: 40923 - protein, 11 aa, synthetic construct
AASLLGADKLI

SEQ ID NO: 40924 - protein, 11 aa, synthetic construct
AASLLGATKLI

SEQ ID NO: 40925 - protein, 13 aa, synthetic construct
AASLLLGDTDQLI

SEQ ID NO: 40926 - protein, 15 aa, synthetic construct
AASLLLPLGDTRDLI

SEQ ID NO: 40927 - protein, 14 aa, synthetic construct
AASLLRWGPTDKLL

SEQ ID NO: 40928 - protein, 14 aa, synthetic construct
AASLPRYGTPINSS

SEQ ID NO: 40929 - protein, 13 aa, synthetic construct
AASLSSFYTDKFI

SEQ ID NO: 40930 - protein, 15 aa, synthetic construct
AASLTGGYGYTDKLI

SEQ ID NO: 40931 - protein, 13 aa, synthetic construct
AASLSSFYTDNLI

SEQ ID NO: 40932 - protein, 13 aa, synthetic construct
AASLSSFYTDQLI

SEQ ID NO: 40933 - protein, 13 aa, synthetic construct
AASLSSFYTEKLI

SEQ ID NO: 40934 - protein, 13 aa, synthetic construct
AASLTGGETAQLI

SEQ ID NO: 40935 - protein, 15 aa, synthetic construct
AASLTGGQPDIDKLI

SEQ ID NO: 40936 - protein, 14 aa, synthetic construct
AASLTGGQYTDKLI

SEQ ID NO: 40937 - protein, 13 aa, synthetic construct
AASMRYGDPGRVI

SEQ ID NO: 40938 - protein, 14 aa, synthetic construct
AASMSGGDNTDKLV

SEQ ID NO: 40939 - protein, 14 aa, synthetic construct
AASMSGGYDTDRLI

SEQ ID NO: 40940 - protein, 14 aa, synthetic construct
AASPPDWGITDQLI

SEQ ID NO: 40941 - protein, 13 aa, synthetic construct
AASPLLGIPINSS

SEQ ID NO: 40942 - protein, 16 aa, synthetic construct
AASPLLPTGGYTDKLI

SEQ ID NO: 40943 - protein, 14 aa, synthetic construct
AASPLLRWDTRTLI

SEQ ID NO: 40944 - protein, 16 aa, synthetic construct
AASPLPRGYAAICKLI

SEQ ID NO: 40945 - protein, 16 aa, synthetic construct
AASPLPRGYAASGKLI

SEQ ID NO: 40946 - protein, 15 aa, synthetic construct
AASPLPTCWGRRPLI

SEQ ID NO: 40947 - protein, 16 aa, synthetic construct
AASPLRTGGPAPINSS

SEQ ID NO: 40948 - protein, 10 aa, synthetic construct
AASPLRTWGL

SEQ ID NO: 40949 - protein, 16 aa, synthetic construct
AASPNSTGGPSTDKLI

SEQ ID NO: 40950 - protein, 13 aa, synthetic construct
AASPNSTGGPYTD

SEQ ID NO: 40951 - protein, 16 aa, synthetic construct
AASPNSTGGPYTDNLI

SEQ ID NO: 40952 - protein, 13 aa, synthetic construct
AASPNWGHADKLI

SEQ ID NO: 40953 - protein, 15 aa, synthetic construct
AASPNWGIRHTDRLI

SEQ ID NO: 40954 - protein, 15 aa, synthetic construct
AASPNWGIRHTEKLI

SEQ ID NO: 40955 - protein, 15 aa, synthetic construct
AASPNWGLRHTDKLI

SEQ ID NO: 40956 - protein, 11 aa, synthetic construct
AASPLLGDTLI

SEQ ID NO: 40957 - protein, 13 aa, synthetic construct
AASPLLGDTDQLI

SEQ ID NO: 40958 - protein, 13 aa, synthetic construct
AASPLHWGLATLI

SEQ ID NO: 40959 - protein, 10 aa, synthetic construct
AASPGIDQLI

SEQ ID NO: 40960 - protein, 13 aa, synthetic construct
AASPGDTTPINSS

SEQ ID NO: 40961 - protein, 13 aa, synthetic construct
AASPGGGYTDKLI

SEQ ID NO: 40962 - protein, 14 aa, synthetic construct
AASPGGVRNTDKLI

SEQ ID NO: 40963 - protein, 16 aa, synthetic construct
AASPGHRRRLGDTGTD

SEQ ID NO: 40964 - protein, 16 aa, synthetic construct
AASPGHRRRLGDTHTD

SEQ ID NO: 40965 - protein, 10 aa, synthetic construct
AASPGIDKII

SEQ ID NO: 40966 - protein, 11 aa, synthetic construct
AASPILGDKLI

SEQ ID NO: 40967 - protein, 16 aa, synthetic construct
AASPLHPTGGYTDNLI

SEQ ID NO: 40968 - protein, 6 aa, synthetic construct
AASPLG

SEQ ID NO: 40969 - protein, 12 aa, synthetic construct
AASPLGAHDKLI

SEQ ID NO: 40970 - protein, 12 aa, synthetic construct
AASPLGDTDILI

SEQ ID NO: 40971 - protein, 12 aa, synthetic construct
AASPLGDTDKLF

SEQ ID NO: 40972 - protein, 12 aa, synthetic construct
AASPLGDTDTLI

SEQ ID NO: 40973 - protein, 12 aa, synthetic construct
AASPLGDTEKLI

SEQ ID NO: 40974 - protein, 15 aa, synthetic construct
AASPNWGYATPINSS

SEQ ID NO: 40975 - protein, 12 aa, synthetic construct
AASPPDWGLTDK

SEQ ID NO: 40976 - protein, 10 aa, synthetic construct
AASPFQRDTR

SEQ ID NO: 40977 - protein, 12 aa, synthetic construct
AASPPDWSSWDT

SEQ ID NO: 40978 - protein, 14 aa, synthetic construct
AASPSCGMGTDKLI

SEQ ID NO: 40979 - protein, 14 aa, synthetic construct
AASPSCGRGAEKLI

SEQ ID NO: 40980 - protein, 14 aa, synthetic construct
AASPSCGRGTDKLI

SEQ ID NO: 40981 - protein, 14 aa, synthetic construct
AASPSCVIGTDKLI

SEQ ID NO: 40982 - protein, 15 aa, synthetic construct
AASPSPVLGDTGQLI

SEQ ID NO: 40983 - protein, 15 aa, synthetic construct
AASPSPVLVDTDKLI

SEQ ID NO: 40984 - protein, 13 aa, synthetic construct
AASPSPYWADKLI

SEQ ID NO: 40985 - protein, 15 aa, synthetic construct
AASPSWGIRESDKLI

SEQ ID NO: 40986 - protein, 14 aa, synthetic construct
AASPSWGRGTDKLI

SEQ ID NO: 40987 - protein, 14 aa, synthetic construct
AASPSYVSPPINSS

SEQ ID NO: 40988 - protein, 15 aa, synthetic construct
AASPVLGDTRTDQLI

SEQ ID NO: 40989 - protein, 10 aa, synthetic construct
AASPVRPGGL

SEQ ID NO: 40990 - protein, 10 aa, synthetic construct
AASPVRTGGH

SEQ ID NO: 40991 - protein, 10 aa, synthetic construct
AASPVRTGGR

SEQ ID NO: 40992 - protein, 8 aa, synthetic construct
AASPWDTR

SEQ ID NO: 40993 - protein, 11 aa, synthetic construct
AASPSCGIGTI

SEQ ID NO: 40994 - protein, 14 aa, synthetic construct
AASPSCGIGTAKLN

SEQ ID NO: 40995 - protein, 14 aa, synthetic construct
AASPSCGIGTAKLI

SEQ ID NO: 40996 - protein, 13 aa, synthetic construct
AASPPTSYLGDKL

SEQ ID NO: 40997 - protein, 16 aa, synthetic construct
AASPPPYWGPGTDKLI

SEQ ID NO: 40998 - protein, 15 aa, synthetic construct
AASPPRLELLGQPTD

SEQ ID NO: 40999 - protein, 15 aa, synthetic construct
AASPPRLGLLGHPTE

SEQ ID NO: 41000 - protein, 15 aa, synthetic construct
AASPPRRELLGHPTD

SEQ ID NO: 41001 - protein, 16 aa, synthetic construct
AASPPTDWGPGTDKLI

SEQ ID NO: 41002 - protein, 16 aa, synthetic construct
AASPPTSWGPGTDKLI

SEQ ID NO: 41003 - protein, 15 aa, synthetic construct
AASPPTWGACTDKLI

SEQ ID NO: 41004 - protein, 15 aa, synthetic construct
AASPSALGGSSWDTR

SEQ ID NO: 41005 - protein, 15 aa, synthetic construct
AASPPTWGASSDKLI

SEQ ID NO: 41006 - protein, 15 aa, synthetic construct
AASPPTWGASTDKLI

SEQ ID NO: 41007 - protein, 15 aa, synthetic construct
AASPPTWGAYTDKII

SEQ ID NO: 41008 - protein, 14 aa, synthetic construct
AASPPTWGAYTDKL

SEQ ID NO: 41009 - protein, 14 aa, synthetic construct
AASPRGGISTEKLI

SEQ ID NO: 41010 - protein, 14 aa, synthetic construct
AASPRGGIYTAKLI

SEQ ID NO: 41011 - protein, 13 aa, synthetic construct
AASPGDTGGDKLT

SEQ ID NO: 41012 - protein, 16 aa, synthetic construct
AASPFLPTGGLSSWYT

SEQ ID NO: 41013 - protein, 14 aa, synthetic construct
AASMSGGYNSYKLI

SEQ ID NO: 41014 - protein, 15 aa, synthetic construct
AASNPTYWGSSISSS

SEQ ID NO: 41015 - protein, 14 aa, synthetic construct
AASNLGAPGTGQLI

SEQ ID NO: 41016 - protein, 15 aa, synthetic construct
AASNLGDTRGTDKLI

SEQ ID NO: 41017 - protein, 14 aa, synthetic construct
AASNLPSYWGITDK

SEQ ID NO: 41018 - protein, 15 aa, synthetic construct
AASNLPSYWGITDKL

SEQ ID NO: 41019 - protein, 16 aa, synthetic construct
AASNLPSYWGITDTLI

SEQ ID NO: 41020 - protein, 11 aa, synthetic construct
AASNLRADKHI

SEQ ID NO: 41021 - protein, 14 aa, synthetic construct
AASNPLGASARPLI

SEQ ID NO: 41022 - protein, 16 aa, synthetic construct
AASNPLGDPRYTDKLI

SEQ ID NO: 41023 - protein, 12 aa, synthetic construct
AASNPLGGRYTH

SEQ ID NO: 41024 - protein, 11 aa, synthetic construct
AASNPPDDKLF

SEQ ID NO: 41025 - protein, 11 aa, synthetic construct
AASNPPDYKLI

SEQ ID NO: 41026 - protein, 15 aa, synthetic construct
AASNPPPVGGLMYTD

SEQ ID NO: 41027 - protein, 16 aa, synthetic construct
AASNPSGDTRYTDNLI

SEQ ID NO: 41028 - protein, 12 aa, synthetic construct
AASNPTLGNPQI

SEQ ID NO: 41029 - protein, 15 aa, synthetic construct
AASNPTSWGSSINSS

SEQ ID NO: 41030 - protein, 13 aa, synthetic construct
AASNHGPYTDKLI

SEQ ID NO: 41031 - protein, 13 aa, synthetic construct
AASNGGYIPRNSS

SEQ ID NO: 41032 - protein, 14 aa, synthetic construct
AASNGGSSWDTRQM

SEQ ID NO: 41033 - protein, 15 aa, synthetic construct
AASMTRLGDTTDKLI

SEQ ID NO: 41034 - protein, 14 aa, synthetic construct
AASMSGGYNTDNII

SEQ ID NO: 41035 - protein, 14 aa, synthetic construct
AASMSGGYNTEKLI

SEQ ID NO: 41036 - protein, 13 aa, synthetic construct
AASMSLGATDELI

SEQ ID NO: 41037 - protein, 15 aa, synthetic construct
AASMSPTHWGILDTD

SEQ ID NO: 41038 - protein, 13 aa, synthetic construct
AASMSWGILDKLI

SEQ ID NO: 41039 - protein, 15 aa, synthetic construct
AASMTRLGDTTDKII

SEQ ID NO: 41040 - protein, 14 aa, synthetic construct
AASMVLGDPRDELI

SEQ ID NO: 41041 - protein, 14 aa, synthetic construct
AASNEPGVTPISSS

SEQ ID NO: 41042 - protein, 14 aa, synthetic construct
AASMVLGDTRDDLI

SEQ ID NO: 41043 - protein, 14 aa, synthetic construct
AASMVLGETRDELI

SEQ ID NO: 41044 - protein, 14 aa, synthetic construct
AASMVLVDTRDELI

SEQ ID NO: 41045 - protein, 13 aa, synthetic construct
AASMWGINTDKLI

SEQ ID NO: 41046 - protein, 15 aa, synthetic construct
AASMWPFTGIRALTA

SEQ ID NO: 41047 - protein, 16 aa, synthetic construct
AASNCTGGYAIGDKLI

SEQ ID NO: 41048 - protein, 15 aa, synthetic construct
AASNPTYCGSSINSS

SEQ ID NO: 41049 - protein, 16 aa, synthetic construct
AASNPVGDTRYTEKLI

SEQ ID NO: 41050 - protein, 16 aa, synthetic construct
AASPFLPPGGLSSWDT

SEQ ID NO: 41051 - protein, 13 aa, synthetic construct
AASNRGIHADKLI

SEQ ID NO: 41052 - protein, 12 aa, synthetic construct
AASPADIPINSS

SEQ ID NO: 41053 - protein, 12 aa, synthetic construct
AASPADRPIDSS

SEQ ID NO: 41054 - protein, 15 aa, synthetic construct
AASPAFIQGIRLNSS

SEQ ID NO: 41055 - protein, 15 aa, synthetic construct
AASPAFLPGRRLNSS

SEQ ID NO: 41056 - protein, 8 aa, synthetic construct
AASPAKLI

SEQ ID NO: 41057 - protein, 15 aa, synthetic construct
AASPAVLGDMTDNLI

SEQ ID NO: 41058 - protein, 15 aa, synthetic construct
AASPAVLGDTTDQLI

SEQ ID NO: 41059 - protein, 16 aa, synthetic construct
AASPAVLGDTYTDKLI

SEQ ID NO: 41060 - protein, 16 aa, synthetic construct
AASPAVLGDTYTEKLI

SEQ ID NO: 41061 - protein, 8 aa, synthetic construct
AASPDKLL

SEQ ID NO: 41062 - protein, 8 aa, synthetic construct
AASPDKLV

SEQ ID NO: 41063 - protein, 8 aa, synthetic construct
AASPDNLI

SEQ ID NO: 41064 - protein, 8 aa, synthetic construct
AASPEKHI

SEQ ID NO: 41065 - protein, 8 aa, synthetic construct
AASPEKLI

SEQ ID NO: 41066 - protein, 16 aa, synthetic construct
AASPFIHTGGLSSWDT

SEQ ID NO: 41067 - protein, 6 aa, synthetic construct
AASPAD

SEQ ID NO: 41068 - protein, 15 aa, synthetic construct
AASNYWGIRETDKLF

SEQ ID NO: 41069 - protein, 15 aa, synthetic construct
AASNYCGIRETDKLI

SEQ ID NO: 41070 - protein, 9 aa, synthetic construct
AASNTDQLI

SEQ ID NO: 41071 - protein, 13 aa, synthetic construct
AASNRGPYTEKLI

SEQ ID NO: 41072 - protein, 13 aa, synthetic construct
AASNRGVHTDKLI

SEQ ID NO: 41073 - protein, 13 aa, synthetic construct
AASNRVPYTDKLI

SEQ ID NO: 41074 - protein, 16 aa, synthetic construct
AASNSLRRITPGGSIN

SEQ ID NO: 41075 - protein, 14 aa, synthetic construct
AASNSLRRITPGTP

SEQ ID NO: 41076 - protein, 8 aa, synthetic construct
AASNTDKL

SEQ ID NO: 41077 - protein, 15 aa, synthetic construct
AASNTGGYKLTAQLF

SEQ ID NO: 41078 - protein, 15 aa, synthetic construct
AASNWGIPSSWDTRQ

SEQ ID NO: 41079 - protein, 11 aa, synthetic construct
AASNTVRTGGL

SEQ ID NO: 41080 - protein, 14 aa, synthetic construct
AASNTYCGGPMNSS

SEQ ID NO: 41081 - protein, 15 aa, synthetic construct
AASNWGDTIGLVNSS

SEQ ID NO: 41082 - protein, 13 aa, synthetic construct
AASNWGILGDRLI

SEQ ID NO: 41083 - protein, 13 aa, synthetic construct
AASNWGILGDTLI

SEQ ID NO: 41084 - protein, 13 aa, synthetic construct
AASNWGILSDKLI

SEQ ID NO: 41085 - protein, 15 aa, synthetic construct
AASKSHCIGGHDKLI

SEQ ID NO: 41086 - protein, 15 aa, synthetic construct
AASKSCCTGGHDKLI

SEQ ID NO: 41087 - protein, 15 aa, synthetic construct
AASKREGDTPPINSS

SEQ ID NO: 41088 - protein, 13 aa, synthetic construct
AASEVWGHTDKLI

SEQ ID NO: 41089 - protein, 16 aa, synthetic construct
AASEAPYGDTGTSWDT

SEQ ID NO: 41090 - protein, 16 aa, synthetic construct
AASEDSDSGIRDTDKL

SEQ ID NO: 41091 - protein, 16 aa, synthetic construct
AASEDSDWGIRDTDIL

SEQ ID NO: 41092 - protein, 14 aa, synthetic construct
AASEEMGDIPINSS

SEQ ID NO: 41093 - protein, 15 aa, synthetic construct
AASEGGCKLLGHPTD

SEQ ID NO: 41094 - protein, 13 aa, synthetic construct
AASEGGGGPINSS

SEQ ID NO: 41095 - protein, 15 aa, synthetic construct
AASEGGGPLLGHPTD

SEQ ID NO: 41096 - protein, 14 aa, synthetic construct
AASEGGSSCDTRQM

SEQ ID NO: 41097 - protein, 11 aa, synthetic construct
AASEGMTDKHN

SEQ ID NO: 41098 - protein, 11 aa, synthetic construct
AASEGMTDQLI

SEQ ID NO: 41099 - protein, 11 aa, synthetic construct
AASEGRTDKLI

SEQ ID NO: 41100 - protein, 15 aa, synthetic construct
AASEPSSPGDYETLI

SEQ ID NO: 41101 - protein, 10 aa, synthetic construct
AASERDKKLI

SEQ ID NO: 41102 - protein, 10 aa, synthetic construct
AASERDTKLI

SEQ ID NO: 41103 - protein, 15 aa, synthetic construct
AASESHCTGGHDKLI

SEQ ID NO: 41104 - protein, 15 aa, synthetic construct
AASEAPYGDTGSSWD

SEQ ID NO: 41105 - protein, 16 aa, synthetic construct
AASEAPSGDTGSSWDT

SEQ ID NO: 41106 - protein, 13 aa, synthetic construct
AASDWGYTPINSS

SEQ ID NO: 41107 - protein, 11 aa, synthetic construct
AASCWGTDKRI

SEQ ID NO: 41108 - protein, 14 aa, synthetic construct
AASAWGDTLDSTTH

SEQ ID NO: 41109 - protein, 12 aa, synthetic construct
AASCGDTRRSTH

SEQ ID NO: 41110 - protein, 13 aa, synthetic construct
AASCLLGGYDKLI

SEQ ID NO: 41111 - protein, 14 aa, synthetic construct
AASCNMYRRHHKVI

SEQ ID NO: 41112 - protein, 14 aa, synthetic construct
AASCTGGQYTDKLI

SEQ ID NO: 41113 - protein, 11 aa, synthetic construct
AASCWGTAKLI

SEQ ID NO: 41114 - protein, 11 aa, synthetic construct
AASCWGTDNLI

SEQ ID NO: 41115 - protein, 12 aa, synthetic construct
AASDWGPPRHSS

SEQ ID NO: 41116 - protein, 11 aa, synthetic construct
AASCWGTEKLI

SEQ ID NO: 41117 - protein, 14 aa, synthetic construct
AASDLLLGIHRETH

SEQ ID NO: 41118 - protein, 15 aa, synthetic construct
AASDPSPTGDYDKLI

SEQ ID NO: 41119 - protein, 15 aa, synthetic construct
AASDPSSTGDYDNLI

SEQ ID NO: 41120 - protein, 13 aa, synthetic construct
AASDWGIHTGKLI

SEQ ID NO: 41121 - protein, 13 aa, synthetic construct
AASDWGIQTDKLI

SEQ ID NO: 41122 - protein, 16 aa, synthetic construct
AASETPVLGDTPINSS

SEQ ID NO: 41123 - protein, 14 aa, synthetic construct
AASFFYPAPGTPDR

SEQ ID NO: 41124 - protein, 14 aa, synthetic construct
AASAWGDTLDRTTL

SEQ ID NO: 41125 - protein, 12 aa, synthetic construct
AASFIPGFDKLI

SEQ ID NO: 41126 - protein, 16 aa, synthetic construct
AASFLVLGVPYTDKLI

SEQ ID NO: 41127 - protein, 16 aa, synthetic construct
AASFLVLRVLYTDKLI

SEQ ID NO: 41128 - protein, 16 aa, synthetic construct
AASFLVLVVLYTDKLI

SEQ ID NO: 41129 - protein, 12 aa, synthetic construct
AASFRPGFDKLI

SEQ ID NO: 41130 - protein, 14 aa, synthetic construct
AASFTGGQSTDKLV

SEQ ID NO: 41131 - protein, 14 aa, synthetic construct
AASFTGGQYTDKLV

SEQ ID NO: 41132 - protein, 14 aa, synthetic construct
AASFTGGQYTDQLI

SEQ ID NO: 41133 - protein, 14 aa, synthetic construct
AASFTGGQYTEKLI

SEQ ID NO: 41134 - protein, 14 aa, synthetic construct
AASFYWGIHTDTLI

SEQ ID NO: 41135 - protein, 16 aa, synthetic construct
AASFYWGIPPYTDKLI

SEQ ID NO: 41136 - protein, 14 aa, synthetic construct
AASFYWWIHTEKLI

SEQ ID NO: 41137 - protein, 12 aa, synthetic construct
AASGAIGTDKLI

SEQ ID NO: 41138 - protein, 10 aa, synthetic construct
AASGAPPKLI

SEQ ID NO: 41139 - protein, 16 aa, synthetic construct
AASGASYWGSSSWDTR

SEQ ID NO: 41140 - protein, 11 aa, synthetic construct
AASGDDTEKLI

SEQ ID NO: 41141 - protein, 16 aa, synthetic construct
AASFLVLGVLYTDKHI

SEQ ID NO: 41142 - protein, 16 aa, synthetic construct
AASFLVLGILYTDKLI

SEQ ID NO: 41143 - protein, 16 aa, synthetic construct
AASFLVLGFLYTDKLI

SEQ ID NO: 41144 - protein, 13 aa, synthetic construct
AASFLLGGYDTLI

SEQ ID NO: 41145 - protein, 12 aa, synthetic construct
AASFLEYTDKLI

SEQ ID NO: 41146 - protein, 12 aa, synthetic construct
AASFLGYTDELI

SEQ ID NO: 41147 - protein, 12 aa, synthetic construct
AASFLGYTDKLT

SEQ ID NO: 41148 - protein, 12 aa, synthetic construct
AASFLGYTDTLI

SEQ ID NO: 41149 - protein, 13 aa, synthetic construct
AASFLLGGSDKLI

SEQ ID NO: 41150 - protein, 13 aa, synthetic construct
AASFLLGGYAKLI

SEQ ID NO: 41151 - protein, 13 aa, synthetic construct
AASFLLGGYEKLI

SEQ ID NO: 41152 - protein, 12 aa, synthetic construct
AASFLPGVDQLI

SEQ ID NO: 41153 - protein, 13 aa, synthetic construct
AASFLLGGYGKLI

SEQ ID NO: 41154 - protein, 13 aa, synthetic construct
AASFLLVYPDKII

SEQ ID NO: 41155 - protein, 12 aa, synthetic construct
AASFLPGFDKLV

SEQ ID NO: 41156 - protein, 12 aa, synthetic construct
AASFLPGFDNLI

SEQ ID NO: 41157 - protein, 12 aa, synthetic construct
AASFLPGFDQLI

SEQ ID NO: 41158 - protein, 12 aa, synthetic construct
AASFLPGFYKLI

SEQ ID NO: 41159 - protein, 14 aa, synthetic construct
AASAWGDTLDSTPL

SEQ ID NO: 41160 - protein, 15 aa, synthetic construct
AASATGGYKLTAQLF

SEQ ID NO: 41161 - protein, 12 aa, synthetic construct
AASGDGHTHKLI

SEQ ID NO: 41162 - protein, 6 aa, synthetic construct
AARTLP

SEQ ID NO: 41163 - protein, 8 aa, synthetic construct
AARTDKLI

SEQ ID NO: 41164 - protein, 13 aa, synthetic construct
AARTEGYYTDKLI

SEQ ID NO: 41165 - protein, 13 aa, synthetic construct
AARTGGDYTEKII

SEQ ID NO: 41166 - protein, 15 aa, synthetic construct
AARTGGPSSCDNRQM

SEQ ID NO: 41167 - protein, 15 aa, synthetic construct
AARTGGPSSWGTRQM

SEQ ID NO: 41168 - protein, 13 aa, synthetic construct
AARTGGSYTDKLI

SEQ ID NO: 41169 - protein, 12 aa, synthetic construct
AARTGGYADKLL

SEQ ID NO: 41170 - protein, 10 aa, synthetic construct
AARTGGYETH

SEQ ID NO: 41171 - protein, 12 aa, synthetic construct
AARTGGYTEKLI

SEQ ID NO: 41172 - protein, 13 aa, synthetic construct
AARTGGYYADKLI

SEQ ID NO: 41173 - protein, 13 aa, synthetic construct
AARTGGYYSDKLI

SEQ ID NO: 41174 - protein, 13 aa, synthetic construct
AARTGGYYTDKPI

SEQ ID NO: 41175 - protein, 13 aa, synthetic construct
AARTGGYYTEKLI

SEQ ID NO: 41176 - protein, 15 aa, synthetic construct
AARTGYVWGYTDKLI

SEQ ID NO: 41177 - protein, 10 aa, synthetic construct
AARTLGDKLS

SEQ ID NO: 41178 - protein, 15 aa, synthetic construct
AARSTFLLFWGIPHR

SEQ ID NO: 41179 - protein, 16 aa, synthetic construct
AARSTFKLFWGILGTD

SEQ ID NO: 41180 - protein, 13 aa, synthetic construct
AARSRPPYTDQLI

SEQ ID NO: 41181 - protein, 13 aa, synthetic construct
AARRTGGYTDKLI

SEQ ID NO: 41182 - protein, 15 aa, synthetic construct
AARRPTSCTGGPDTD

SEQ ID NO: 41183 - protein, 10 aa, synthetic construct
AARRRDPRGG

SEQ ID NO: 41184 - protein, 12 aa, synthetic construct
AARRRGDTDKLI

SEQ ID NO: 41185 - protein, 14 aa, synthetic construct
AARRRGWGYTDKLI

SEQ ID NO: 41186 - protein, 14 aa, synthetic construct
AARRRTGGYVDKLI

SEQ ID NO: 41187 - protein, 13 aa, synthetic construct
AARRSGGYTDKLI

SEQ ID NO: 41188 - protein, 13 aa, synthetic construct
AARRWGDITDKLI

SEQ ID NO: 41189 - protein, 14 aa, synthetic construct
AARSRGIRGTETLI

SEQ ID NO: 41190 - protein, 12 aa, synthetic construct
AARSGGPTDKLI

SEQ ID NO: 41191 - protein, 12 aa, synthetic construct
AARSGGPTEKLI

SEQ ID NO: 41192 - protein, 13 aa, synthetic construct
AARSGGYYTDKLI

SEQ ID NO: 41193 - protein, 12 aa, synthetic construct
AARSGIRNDKLI

SEQ ID NO: 41194 - protein, 15 aa, synthetic construct
AARSLPTSAAGGRHR

SEQ ID NO: 41195 - protein, 11 aa, synthetic construct
AARSLYTDKLI

SEQ ID NO: 41196 - protein, 10 aa, synthetic construct
AARTLGDQLI

SEQ ID NO: 41197 - protein, 15 aa, synthetic construct
AARTLRGGPYTDKLI

SEQ ID NO: 41198 - protein, 13 aa, synthetic construct
AASASSLRGEKLI

SEQ ID NO: 41199 - protein, 16 aa, synthetic construct
AARTPFGGYLYTDKLI

SEQ ID NO: 41200 - protein, 11 aa, synthetic construct
AARVSWVERLI

SEQ ID NO: 41201 - protein, 11 aa, synthetic construct
AARVTWVDKLI

SEQ ID NO: 41202 - protein, 7 aa, synthetic construct
AARWGGG

SEQ ID NO: 41203 - protein, 14 aa, synthetic construct
AARWNTWGYTDKLI

SEQ ID NO: 41204 - protein, 12 aa, synthetic construct
AARWPSGGSATD

SEQ ID NO: 41205 - protein, 15 aa, synthetic construct
AARYDPPGGYADKPI

SEQ ID NO: 41206 - protein, 15 aa, synthetic construct
AARYDPPGGYTDKLI

SEQ ID NO: 41207 - protein, 12 aa, synthetic construct
AARYWGPPINSS

SEQ ID NO: 41208 - protein, 12 aa, synthetic construct
AARYWGPPRNSS

SEQ ID NO: 41209 - protein, 15 aa, synthetic construct
AASAAFLQGIRLNSS

SEQ ID NO: 41210 - protein, 10 aa, synthetic construct
AASAGADTLI

SEQ ID NO: 41211 - protein, 12 aa, synthetic construct
AASAGGYAAQLI

SEQ ID NO: 41212 - protein, 14 aa, synthetic construct
AASARGGPHTDNLI

SEQ ID NO: 41213 - protein, 14 aa, synthetic construct
AASARGLRGTDTLI

SEQ ID NO: 41214 - protein, 15 aa, synthetic construct
AASARRVSSWDTRQM

SEQ ID NO: 41215 - protein, 11 aa, synthetic construct
AARVSWVDQLI

SEQ ID NO: 41216 - protein, 13 aa, synthetic construct
AARVRGDYTDKLI

SEQ ID NO: 41217 - protein, 11 aa, synthetic construct
AARVPWVDKLI

SEQ ID NO: 41218 - protein, 11 aa, synthetic construct
AARVGSPINSS

SEQ ID NO: 41219 - protein, 10 aa, synthetic construct
AARTQGDKHI

SEQ ID NO: 41220 - protein, 14 aa, synthetic construct
AARTRGGPHTDKLI

SEQ ID NO: 41221 - protein, 16 aa, synthetic construct
AARTSCGGYLYTDKLI

SEQ ID NO: 41222 - protein, 16 aa, synthetic construct
AARTSFGGYLYTDTLI

SEQ ID NO: 41223 - protein, 16 aa, synthetic construct
AARTSFGGYLYTEKLI

SEQ ID NO: 41224 - protein, 9 aa, synthetic construct
AARVGDKLI

SEQ ID NO: 41225 - protein, 11 aa, synthetic construct
AARVGVTDKVI

SEQ ID NO: 41226 - protein, 11 aa, synthetic construct
AARVLYTAKLI

SEQ ID NO: 41227 - protein, 11 aa, synthetic construct
AARVGVTDQLN

SEQ ID NO: 41228 - protein, 13 aa, synthetic construct
AARVLGDYTDKLN

SEQ ID NO: 41229 - protein, 13 aa, synthetic construct
AARVLGGYTDKLI

SEQ ID NO: 41230 - protein, 15 aa, synthetic construct
AARVLPMSTGGLLHR

SEQ ID NO: 41231 - protein, 13 aa, synthetic construct
AARVLRDYTEKLI

SEQ ID NO: 41232 - protein, 13 aa, synthetic construct
AARVLWDYTDKLI

SEQ ID NO: 41233 - protein, 12 aa, synthetic construct
AASGDGHADKLI

SEQ ID NO: 41234 - protein, 10 aa, synthetic construct
AASGDHPKLI

SEQ ID NO: 41235 - protein, 15 aa, synthetic construct
AASKPRLGETTDKLI

SEQ ID NO: 41236 - protein, 15 aa, synthetic construct
AASIRTGGWDTEKLI

SEQ ID NO: 41237 - protein, 12 aa, synthetic construct
AASIPTHGYPQI

SEQ ID NO: 41238 - protein, 14 aa, synthetic construct
AASIPTLADTDKLI

SEQ ID NO: 41239 - protein, 14 aa, synthetic construct
AASIPTLGIPINSS

SEQ ID NO: 41240 - protein, 12 aa, synthetic construct
AASIPTLGYPQI

SEQ ID NO: 41241 - protein, 14 aa, synthetic construct
AASIPTRGDTDKLI

SEQ ID NO: 41242 - protein, 14 aa, synthetic construct
AASIPTWRDTDKLI

SEQ ID NO: 41243 - protein, 14 aa, synthetic construct
AASIPYVGYAVWLI

SEQ ID NO: 41244 - protein, 14 aa, synthetic construct
AASIPYWGILDKII

SEQ ID NO: 41245 - protein, 14 aa, synthetic construct
AASIPYWGILDKLI

SEQ ID NO: 41246 - protein, 13 aa, synthetic construct
AASIRGGQAAQLF

SEQ ID NO: 41247 - protein, 13 aa, synthetic construct
AASIRGGQTAQLI

SEQ ID NO: 41248 - protein, 13 aa, synthetic construct
AASIRGGQTAQLY

SEQ ID NO: 41249 - protein, 11 aa, synthetic construct
AASIRGIDKLS

SEQ ID NO: 41250 - protein, 11 aa, synthetic construct
AASIRGIDTLI

SEQ ID NO: 41251 - protein, 11 aa, synthetic construct
AASIRGSGTLI

SEQ ID NO: 41252 - protein, 6 aa, synthetic construct
AASIPT

SEQ ID NO: 41253 - protein, 16 aa, synthetic construct
AASIPSTGGSYTDKLI

SEQ ID NO: 41254 - protein, 16 aa, synthetic construct
AASIPSPGGSYTDKLI

SEQ ID NO: 41255 - protein, 14 aa, synthetic construct
AASIPDWGILDQLI

SEQ ID NO: 41256 - protein, 8 aa, synthetic construct
AASIPAGG

SEQ ID NO: 41257 - protein, 14 aa, synthetic construct
AASIPCGGYAVWLI

SEQ ID NO: 41258 - protein, 14 aa, synthetic construct
AASIPDGGILDELI

SEQ ID NO: 41259 - protein, 9 aa, synthetic construct
AASIPDKLN

SEQ ID NO: 41260 - protein, 9 aa, synthetic construct
AASIPDKPI

SEQ ID NO: 41261 - protein, 9 aa, synthetic construct
AASIPDQLI

SEQ ID NO: 41262 - protein, 14 aa, synthetic construct
AASIPDWGILDRLI

SEQ ID NO: 41263 - protein, 12 aa, synthetic construct
AASIPPYTDKLI

SEQ ID NO: 41264 - protein, 14 aa, synthetic construct
AASIPEGGYTDKLI

SEQ ID NO: 41265 - protein, 9 aa, synthetic construct
AASIPEKLI

SEQ ID NO: 41266 - protein, 14 aa, synthetic construct
AASIPPLGDTDKLI

SEQ ID NO: 41267 - protein, 15 aa, synthetic construct
AASIPPPFGGLMYTD

SEQ ID NO: 41268 - protein, 15 aa, synthetic construct
AASIPPPVGGLLYTD

SEQ ID NO: 41269 - protein, 14 aa, synthetic construct
AASIPPPVGGLMYT

SEQ ID NO: 41270 - protein, 11 aa, synthetic construct
AASIRGYGQLI

SEQ ID NO: 41271 - protein, 13 aa, synthetic construct
AASIRWGILDKLI

SEQ ID NO: 41272 - protein, 11 aa, synthetic construct
AASILVHRETR

SEQ ID NO: 41273 - protein, 15 aa, synthetic construct
AASISGGYDYTDELI

SEQ ID NO: 41274 - protein, 15 aa, synthetic construct
AASKAYLRIWGNKPI

SEQ ID NO: 41275 - protein, 10 aa, synthetic construct
AASKCGILLI

SEQ ID NO: 41276 - protein, 14 aa, synthetic construct
AASKDCGIRPDKLI

SEQ ID NO: 41277 - protein, 14 aa, synthetic construct
AASKDWGIRPEKHI

SEQ ID NO: 41278 - protein, 14 aa, synthetic construct
AASKDWWIRPDKLI

SEQ ID NO: 41279 - protein, 16 aa, synthetic construct
AASKEGWGILYTAQLI

SEQ ID NO: 41280 - protein, 16 aa, synthetic construct
AASKEGWGILYTEKLI

SEQ ID NO: 41281 - protein, 14 aa, synthetic construct
AASKEWGIRPDKLI

SEQ ID NO: 41282 - protein, 14 aa, synthetic construct
AASKGGSSWDTRQI

SEQ ID NO: 41283 - protein, 14 aa, synthetic construct
AASKILRLGDDKLI

SEQ ID NO: 41284 - protein, 15 aa, synthetic construct
AASKLALLGDTYKLI

SEQ ID NO: 41285 - protein, 16 aa, synthetic construct
AASKNLPTSWGTPDKL

SEQ ID NO: 41286 - protein, 16 aa, synthetic construct
AASKNLPTTWGIPDKL

SEQ ID NO: 41287 - protein, 16 aa, synthetic construct
AASKNLTTSWGIPDKL

SEQ ID NO: 41288 - protein, 15 aa, synthetic construct
AASKPEGDTPPIHSS

SEQ ID NO: 41289 - protein, 15 aa, synthetic construct
AASKALYWGIPDKLI

SEQ ID NO: 41290 - protein, 15 aa, synthetic construct
AASKALLRIWGNKLI

SEQ ID NO: 41291 - protein, 15 aa, synthetic construct
AASKAFLRTWGNKLI

SEQ ID NO: 41292 - protein, 14 aa, synthetic construct
AASITFGGYAVWLI

SEQ ID NO: 41293 - protein, 15 aa, synthetic construct
AASISGGYDYTEKLI

SEQ ID NO: 41294 - protein, 14 aa, synthetic construct
AASISGSSLDTRQM

SEQ ID NO: 41295 - protein, 14 aa, synthetic construct
AASISGSSWDPRQM

SEQ ID NO: 41296 - protein, 14 aa, synthetic construct
AASISGSSWDTRQI

SEQ ID NO: 41297 - protein, 8 aa, synthetic construct
AASISPTT

SEQ ID NO: 41298 - protein, 9 aa, synthetic construct
AASITDKLI

SEQ ID NO: 41299 - protein, 13 aa, synthetic construct
AASIVLGTTDKLI

SEQ ID NO: 41300 - protein, 15 aa, synthetic construct
AASKAFLRLWGTKLI

SEQ ID NO: 41301 - protein, 15 aa, synthetic construct
AASIVPQWGYPDKLI

SEQ ID NO: 41302 - protein, 12 aa, synthetic construct
AASIVPYTDRLI

SEQ ID NO: 41303 - protein, 10 aa, synthetic construct
AASIVWDKLS

SEQ ID NO: 41304 - protein, 10 aa, synthetic construct
AASIVWDQLI

SEQ ID NO: 41305 - protein, 15 aa, synthetic construct
AASKAFLRISGNKLI

SEQ ID NO: 41306 - protein, 15 aa, synthetic construct
AASKAFLRIWGNILI

SEQ ID NO: 41307 - protein, 16 aa, synthetic construct
AASINSTGGDDGDKLI

SEQ ID NO: 41308 - protein, 10 aa, synthetic construct
AASILTDKLI

SEQ ID NO: 41309 - protein, 12 aa, synthetic construct
AASGDIGTDTLI

SEQ ID NO: 41310 - protein, 12 aa, synthetic construct
AASGRGDTDKLI

SEQ ID NO: 41311 - protein, 13 aa, synthetic construct
AASGGRGYTDKLI

SEQ ID NO: 41312 - protein, 15 aa, synthetic construct
AASGGTGGPSTDKRI

SEQ ID NO: 41313 - protein, 15 aa, synthetic construct
AASGGTGGPSTDTLI

SEQ ID NO: 41314 - protein, 15 aa, synthetic construct
AASGGTGGPSTEKLI

SEQ ID NO: 41315 - protein, 13 aa, synthetic construct
AASGGYKYADKLI

SEQ ID NO: 41316 - protein, 13 aa, synthetic construct
AASGGYKYTDKLL

SEQ ID NO: 41317 - protein, 13 aa, synthetic construct
AASGGYKYTDKLT

SEQ ID NO: 41318 - protein, 13 aa, synthetic construct
AASGGYKYTDTLI

SEQ ID NO: 41319 - protein, 13 aa, synthetic construct
AASGGYKYTEKLI

SEQ ID NO: 41320 - protein, 10 aa, synthetic construct
AASGGYRSSP

SEQ ID NO: 41321 - protein, 12 aa, synthetic construct
AASGIRTPINSS

SEQ ID NO: 41322 - protein, 15 aa, synthetic construct
AASGMFPSSWDTRQT

SEQ ID NO: 41323 - protein, 14 aa, synthetic construct
AASGMGDTNTAKLS

SEQ ID NO: 41324 - protein, 14 aa, synthetic construct
AASGMGDTNTDNLI

SEQ ID NO: 41325 - protein, 14 aa, synthetic construct
AASGMGGTNTDKLI

SEQ ID NO: 41326 - protein, 13 aa, synthetic construct
AASGGRGSTAKLI

SEQ ID NO: 41327 - protein, 15 aa, synthetic construct
AASGGPGGPSTDKLI

SEQ ID NO: 41328 - protein, 12 aa, synthetic construct
AASGGLPPDRLI

SEQ ID NO: 41329 - protein, 11 aa, synthetic construct
AASGGGAAKLI

SEQ ID NO: 41330 - protein, 10 aa, synthetic construct
AASGDPPKLL

SEQ ID NO: 41331 - protein, 12 aa, synthetic construct
AASGDSGTDKLI

SEQ ID NO: 41332 - protein, 12 aa, synthetic construct
AASGDVHTDKLI

SEQ ID NO: 41333 - protein, 12 aa, synthetic construct
AASGEIGTEKLI

SEQ ID NO: 41334 - protein, 9 aa, synthetic construct
AASGEYQLI

SEQ ID NO: 41335 - protein, 13 aa, synthetic construct
AASGGFKYTDKLI

SEQ ID NO: 41336 - protein, 11 aa, synthetic construct
AASGGGADILI

SEQ ID NO: 41337 - protein, 12 aa, synthetic construct
AASGGLPPAKLI

SEQ ID NO: 41338 - protein, 11 aa, synthetic construct
AASGGGAETLI

SEQ ID NO: 41339 - protein, 13 aa, synthetic construct
AASGGGGYADKLI

SEQ ID NO: 41340 - protein, 13 aa, synthetic construct
AASGGGGYTDQLI

SEQ ID NO: 41341 - protein, 13 aa, synthetic construct
AASGGGGYTEKLI

SEQ ID NO: 41342 - protein, 13 aa, synthetic construct
AASGGGGYTNKLI

SEQ ID NO: 41343 - protein, 13 aa, synthetic construct
AASGGIRDTDRLI

SEQ ID NO: 41344 - protein, 14 aa, synthetic construct
AASGRGDPSTDKLI

SEQ ID NO: 41345 - protein, 14 aa, synthetic construct
AASGRGDTNTDKLI

SEQ ID NO: 41346 - protein, 15 aa, synthetic construct
AASIIPQGGYPDQLI

SEQ ID NO: 41347 - protein, 13 aa, synthetic construct
AASGRGESTDTLI

SEQ ID NO: 41348 - protein, 12 aa, synthetic construct
AASIGDPHDKLI

SEQ ID NO: 41349 - protein, 12 aa, synthetic construct
AASIGDPPDNLI

SEQ ID NO: 41350 - protein, 12 aa, synthetic construct
AASIGDPPDQLI

SEQ ID NO: 41351 - protein, 12 aa, synthetic construct
AASIGDPPDTLI

SEQ ID NO: 41352 - protein, 12 aa, synthetic construct
AASIGDPPGKLI

SEQ ID NO: 41353 - protein, 12 aa, synthetic construct
AASIGEPPDKLF

SEQ ID NO: 41354 - protein, 13 aa, synthetic construct
AASIGGGQTAQLF

SEQ ID NO: 41355 - protein, 12 aa, synthetic construct
AASIGGSGDKLI

SEQ ID NO: 41356 - protein, 9 aa, synthetic construct
AASIGGTTD

SEQ ID NO: 41357 - protein, 12 aa, synthetic construct
AASIGGYGEKLI

SEQ ID NO: 41358 - protein, 8 aa, synthetic construct
AASIGILI

SEQ ID NO: 41359 - protein, 13 aa, synthetic construct
AASIGLGDTAKLI

SEQ ID NO: 41360 - protein, 13 aa, synthetic construct
AASIGLGDTATLI

SEQ ID NO: 41361 - protein, 13 aa, synthetic construct
AASIGLGDTDQLI

SEQ ID NO: 41362 - protein, 11 aa, synthetic construct
AASIIGYGKLI

SEQ ID NO: 41363 - protein, 10 aa, synthetic construct
AASIESEKLI

SEQ ID NO: 41364 - protein, 11 aa, synthetic construct
AASIEEPDKLI

SEQ ID NO: 41365 - protein, 11 aa, synthetic construct
AASIEDPDKPI

SEQ ID NO: 41366 - protein, 15 aa, synthetic construct
AASGTSYLGSSYWDT

SEQ ID NO: 41367 - protein, 13 aa, synthetic construct
AASGRGEYADKLI

SEQ ID NO: 41368 - protein, 13 aa, synthetic construct
AASGRGEYTDKLS

SEQ ID NO: 41369 - protein, 13 aa, synthetic construct
AASGRGEYTDRLI

SEQ ID NO: 41370 - protein, 13 aa, synthetic construct
AASGRGSTPINSS

SEQ ID NO: 41371 - protein, 15 aa, synthetic construct
AASGTFLLWGILKLI

SEQ ID NO: 41372 - protein, 15 aa, synthetic construct
AASGTFLRWGILQLI

SEQ ID NO: 41373 - protein, 15 aa, synthetic construct
AASGWGILSWDTRQM

SEQ ID NO: 41374 - protein, 14 aa, synthetic construct
AASIDWGIRADTLI

SEQ ID NO: 41375 - protein, 9 aa, synthetic construct
AASGYAKTH

SEQ ID NO: 41376 - protein, 16 aa, synthetic construct
AASHNSTGGPSTDKLI

SEQ ID NO: 41377 - protein, 14 aa, synthetic construct
AASHPYWEYTDNLI

SEQ ID NO: 41378 - protein, 12 aa, synthetic construct
AASIADPPAKLI

SEQ ID NO: 41379 - protein, 8 aa, synthetic construct
AASIDNLI

SEQ ID NO: 41380 - protein, 14 aa, synthetic construct
AASIDWGIRADQLI

SEQ ID NO: 41381 - protein, 5 aa, synthetic construct
YLNSS

SEQ ID NO: 41382 - protein, 11 aa, synthetic construct
ALWEVNYYKKL

SEQ ID NO: 41383 - protein, 11 aa, synthetic construct
ALWEVTYYKKL

SEQ ID NO: 41384 - protein, 11 aa, synthetic construct
ASWEVNYYKKL

SEQ ID NO: 41385 - protein, 11 aa, synthetic construct
ALLEVNYYKKL

SEQ ID NO: 41386 - protein, 11 aa, synthetic construct
ALREVNYYKKL

SEQ ID NO: 41387 - protein, 11 aa, synthetic construct
ALCEVNYYKKL

SEQ ID NO: 41388 - protein, 11 aa, synthetic construct
ALWEVDYYKKL

SEQ ID NO: 41389 - protein, 11 aa, synthetic construct
ALWEVNYYKRL

SEQ ID NO: 41390 - protein, 11 aa, synthetic construct
ALWGVNYYKKL

SEQ ID NO: 41391 - protein, 11 aa, synthetic construct
ALWEVSYYKKL

SEQ ID NO: 41392 - protein, 11 aa, synthetic construct
ALWEANYYKKL

SEQ ID NO: 41393 - protein, 11 aa, synthetic construct
AWWEVNYYKKL

SEQ ID NO: 41394 - protein, 11 aa, synthetic construct
ALWEVKYYKKL

SEQ ID NO: 41395 - protein, 11 aa, synthetic construct
ALWEVNYYKEL

SEQ ID NO: 41396 - protein, 11 aa, synthetic construct
ALWEVNYFKKL

SEQ ID NO: 41397 - protein, 11 aa, synthetic construct
ALWEVNYYKKP

SEQ ID NO: 41398 - protein, 11 aa, synthetic construct
ALWEVNYHKKL

SEQ ID NO: 41399 - protein, 11 aa, synthetic construct
ALWEVNCYKKL

SEQ ID NO: 41400 - protein, 11 aa, synthetic construct
ALWDVNYYKKL

SEQ ID NO: 41401 - protein, 11 aa, synthetic construct
ALWEVNHYKKL

SEQ ID NO: 41402 - protein, 11 aa, synthetic construct
ALWEVNYYRKL

SEQ ID NO: 41403 - protein, 11 aa, synthetic construct
ALWEVNYYKTL

SEQ ID NO: 41404 - protein, 11 aa, synthetic construct
ALWEVNYCKKL

SEQ ID NO: 41405 - protein, 11 aa, synthetic construct
ALWEVNYYNKL

SEQ ID NO: 41406 - protein, 11 aa, synthetic construct
ALWEVNYYEKL

SEQ ID NO: 41407 - protein, 11 aa, synthetic construct
ALWVVNYYKKL

SEQ ID NO: 41408 - protein, 11 aa, synthetic construct
AMWEVNYYKKL

SEQ ID NO: 41409 - protein, 11 aa, synthetic construct
TLWEVNYYKKL

SEQ ID NO: 41410 - protein, 11 aa, synthetic construct
VLWEVNYYKKL

SEQ ID NO: 41411 - protein, 11 aa, synthetic construct
ALWEVNYYKKI

SEQ ID NO: 41412 - protein, 11 aa, synthetic construct
ALWEVNYNKKL

SEQ ID NO: 41413 - protein, 11 aa, synthetic construct
DLWEVNYYKKL

SEQ ID NO: 41414 - protein, 11 aa, synthetic construct
ALWEVNYDKKL

SEQ ID NO: 41415 - protein, 11 aa, synthetic construct
ALWEVYYYKKL

SEQ ID NO: 41416 - protein, 11 aa, synthetic construct
ALWELNYYKKL

SEQ ID NO: 41417 - protein, 11 aa, synthetic construct
ALWEVNYYKKH

SEQ ID NO: 41418 - protein, 11 aa, synthetic construct
SLWEVNYYKKL

SEQ ID NO: 41419 - protein, 11 aa, synthetic construct
AVWEVNYYKKL

SEQ ID NO: 41420 - protein, 11 aa, synthetic construct
ALWEVNYYKNL

SEQ ID NO: 41421 - protein, 11 aa, synthetic construct
ALWEVNYYMKL

SEQ ID NO: 41422 - protein, 11 aa, synthetic construct
ALWEVNSYKKL

SEQ ID NO: 41423 - protein, 11 aa, synthetic construct
ALWEMNYYKKL

SEQ ID NO: 41424 - protein, 11 aa, synthetic construct
ALWEVHYYKKL

SEQ ID NO: 41425 - protein, 11 aa, synthetic construct
ALWEGNYYKKL

SEQ ID NO: 41426 - protein, 11 aa, synthetic construct
ALWKVNYYKKL

SEQ ID NO: 41427 - protein, 10 aa, synthetic construct
ALWEVNYYKK

SEQ ID NO: 41428 - protein, 11 aa, synthetic construct
ALWEVNNYKKL

SEQ ID NO: 41429 - protein, 11 aa, synthetic construct
ALWEENYYKKL

SEQ ID NO: 41430 - protein, 9 aa, synthetic construct
ALWEVNYYK

SEQ ID NO: 41431 - protein, 11 aa, synthetic construct
ALWEVNDYKKL

SEQ ID NO: 41432 - protein, 8 aa, synthetic construct
ALWEVNYY

SEQ ID NO: 41433 - protein, 14 aa, synthetic construct
ALWEVQELGKKIKV

SEQ ID NO: 41434 - protein, 11 aa, synthetic construct
ALGEVNYYKKL

SEQ ID NO: 41435 - protein, 11 aa, synthetic construct
ALWEVTYYKTL

SEQ ID NO: 41436 - protein, 11 aa, synthetic construct
AFWEVNYYKKL

SEQ ID NO: 41437 - protein, 11 aa, synthetic construct
ALWAVNYYKKL

SEQ ID NO: 41438 - protein, 11 aa, synthetic construct
ALWEVNYYRNS

SEQ ID NO: 41439 - protein, 11 aa, synthetic construct
ALWEVNYYKKF

SEQ ID NO: 41440 - protein, 9 aa, synthetic construct
ALWEVFKKL

SEQ ID NO: 41441 - protein, 12 aa, synthetic construct
ALWEAPNYYKKL

SEQ ID NO: 41442 - protein, 11 aa, synthetic construct
AWWEVNYYKTL

SEQ ID NO: 41443 - protein, 11 aa, synthetic construct
AWWEVKYYKKL

SEQ ID NO: 41444 - protein, 11 aa, synthetic construct
ALWEVNYYQKL

SEQ ID NO: 41445 - protein, 7 aa, synthetic construct
ALWEVNY

SEQ ID NO: 41446 - protein, 11 aa, synthetic construct
ALWEVTYDKKL

SEQ ID NO: 41447 - protein, 11 aa, synthetic construct
ALWEVNYYKKR

SEQ ID NO: 41448 - protein, 11 aa, synthetic construct
ALWEVNYYKIL

SEQ ID NO: 41449 - protein, 11 aa, synthetic construct
ALWEVIYYKKL

SEQ ID NO: 41450 - protein, 11 aa, synthetic construct
ASWEVNYYKRL

SEQ ID NO: 41451 - protein, 11 aa, synthetic construct
PLWEVNYYKKL

SEQ ID NO: 41452 - protein, 11 aa, synthetic construct
AWWEVTYYKKL

SEQ ID NO: 41453 - protein, 11 aa, synthetic construct
ALWEATYYKKL

SEQ ID NO: 41454 - protein, 11 aa, synthetic construct
ALWEVNYSKKL

SEQ ID NO: 41455 - protein, 11 aa, synthetic construct
GLWEVNYYKKL

SEQ ID NO: 41456 - protein, 11 aa, synthetic construct
AWWEVNYNKKL

SEQ ID NO: 41457 - protein, 11 aa, synthetic construct
ALWEVTSYKKL

SEQ ID NO: 41458 - protein, 11 aa, synthetic construct
ALWEVEYYKKL

SEQ ID NO: 41459 - protein, 11 aa, synthetic construct
ALWEVNYYKKV

SEQ ID NO: 41460 - protein, 11 aa, synthetic construct
AWREVNYYKKL

SEQ ID NO: 41461 - protein, 11 aa, synthetic construct
ALWEVNFYKKL

SEQ ID NO: 41462 - protein, 11 aa, synthetic construct
ALWEVNYFKRL

SEQ ID NO: 41463 - protein, 11 aa, synthetic construct
ALWGVNYYKKP

SEQ ID NO: 41464 - protein, 11 aa, synthetic construct
AVLEVNYYKKL

SEQ ID NO: 41465 - protein, 11 aa, synthetic construct
ALCELNYYKKL

SEQ ID NO: 41466 - protein, 11 aa, synthetic construct
DLWELNYYKKL

SEQ ID NO: 41467 - protein, 11 aa, synthetic construct
ALWEVTYYKRL

SEQ ID NO: 41468 - protein, 11 aa, synthetic construct
ALWEVKYYKTL

SEQ ID NO: 41469 - protein, 11 aa, synthetic construct
ALWEVKYYKKI

SEQ ID NO: 41470 - protein, 11 aa, synthetic construct
ALCEVNYYKKI

SEQ ID NO: 41471 - protein, 11 aa, synthetic construct
ALWEVNYYKTP

SEQ ID NO: 41472 - protein, 11 aa, synthetic construct
ALWQVNYYKKL

SEQ ID NO: 41473 - protein, 11 aa, synthetic construct
AVWGVNYYKKL

SEQ ID NO: 41474 - protein, 11 aa, synthetic construct
ALWEVNYYKNS

SEQ ID NO: 41475 - protein, 11 aa, synthetic construct
ALCEVNYYKKP

SEQ ID NO: 41476 - protein, 11 aa, synthetic construct
AWWEVTYYKTL

SEQ ID NO: 41477 - protein, 11 aa, synthetic construct
ALWEVNYYQTL

SEQ ID NO: 41478 - protein, 11 aa, synthetic construct
AWWEVNYYKRL

SEQ ID NO: 41479 - protein, 11 aa, synthetic construct
ALWGVNCYKKL

SEQ ID NO: 41480 - protein, 11 aa, synthetic construct
ALWEVNYSKKF

SEQ ID NO: 41481 - protein, 11 aa, synthetic construct
ASWEVNYYKKP

SEQ ID NO: 41482 - protein, 11 aa, synthetic construct
ALWVVYYYKKL

SEQ ID NO: 41483 - protein, 11 aa, synthetic construct
ALWEVNYYTKL

SEQ ID NO: 41484 - protein, 11 aa, synthetic construct
ASLEVNYYKKL

SEQ ID NO: 41485 - protein, 11 aa, synthetic construct
ALWEVTDYKKL

SEQ ID NO: 41486 - protein, 11 aa, synthetic construct
AVWEVTYYKKL

SEQ ID NO: 41487 - protein, 11 aa, synthetic construct
ASWEVTYYKKL

SEQ ID NO: 41488 - protein, 11 aa, synthetic construct
ALLEVKYYKKL

SEQ ID NO: 41489 - protein, 11 aa, synthetic construct
ALWEVNYHKRL

SEQ ID NO: 41490 - protein, 11 aa, synthetic construct
ALWEVNYHKKP

SEQ ID NO: 41491 - protein, 11 aa, synthetic construct
ALWEVNNYKKH

SEQ ID NO: 41492 - protein, 11 aa, synthetic construct
ASWEVNYYKTL

SEQ ID NO: 41493 - protein, 11 aa, synthetic construct
AWWEANYYKKL

SEQ ID NO: 41494 - protein, 11 aa, synthetic construct
AVCEVNYYKKL

SEQ ID NO: 41495 - protein, 11 aa, synthetic construct
ALWEVDYYKKP

SEQ ID NO: 41496 - protein, 11 aa, synthetic construct
ALWGVDYYKKL

SEQ ID NO: 41497 - protein, 11 aa, synthetic construct
ALCEVNYYRKL

SEQ ID NO: 41498 - protein, 11 aa, synthetic construct
AWWEENYYKKL

SEQ ID NO: 41499 - protein, 11 aa, synthetic construct
AWWEGNYYKKL

SEQ ID NO: 41500 - protein, 11 aa, synthetic construct
ALREVNYHKKL

SEQ ID NO: 41501 - protein, 11 aa, synthetic construct
ALWEVNYYNKI

SEQ ID NO: 41502 - protein, 11 aa, synthetic construct
AVWEVNYDKKL

SEQ ID NO: 41503 - protein, 11 aa, synthetic construct
VLWEVNYYKKP

SEQ ID NO: 41504 - protein, 11 aa, synthetic construct
AVWELNYYKKL

SEQ ID NO: 41505 - protein, 11 aa, synthetic construct
ALWKVTYYKKL

SEQ ID NO: 41506 - protein, 11 aa, synthetic construct
AGWEVNYYKKL

SEQ ID NO: 41507 - protein, 11 aa, synthetic construct
TLWEVNYHKKL

SEQ ID NO: 41508 - protein, 11 aa, synthetic construct
TLCEVNYHKKL

SEQ ID NO: 41509 - protein, 11 aa, synthetic construct
ALWEVNYHEKL

SEQ ID NO: 41510 - protein, 11 aa, synthetic construct
ALWEVNYFKEL

SEQ ID NO: 41511 - protein, 11 aa, synthetic construct
ALCEANYYKKL

SEQ ID NO: 41512 - protein, 11 aa, synthetic construct
AWLEVNYYKKL

SEQ ID NO: 41513 - protein, 11 aa, synthetic construct
SLWEVNYYKNS

SEQ ID NO: 41514 - protein, 11 aa, synthetic construct
ALWGVNYYRKL

SEQ ID NO: 41515 - protein, 11 aa, synthetic construct
ALCEVKYYKKL

SEQ ID NO: 41516 - protein, 11 aa, synthetic construct
ALWEVNNSKKL

SEQ ID NO: 41517 - protein, 11 aa, synthetic construct
ALWEVNNNKKL

SEQ ID NO: 41518 - protein, 11 aa, synthetic construct
DLWEVNYYKKI

SEQ ID NO: 41519 - protein, 11 aa, synthetic construct
ALWGVNYYKEL

SEQ ID NO: 41520 - protein, 11 aa, synthetic construct
ALWEVNYYKQL

SEQ ID NO: 41521 - protein, 11 aa, synthetic construct
PCGRGIIIRNS

SEQ ID NO: 41522 - protein, 11 aa, synthetic construct
AWWEVDYYKKL

SEQ ID NO: 41523 - protein, 11 aa, synthetic construct
ALWEVDYYKEL

SEQ ID NO: 41524 - protein, 11 aa, synthetic construct
ASWEVNYFKKL

SEQ ID NO: 41525 - protein, 11 aa, synthetic construct
ALLEVNYYKTL

SEQ ID NO: 41526 - protein, 11 aa, synthetic construct
ALWEVSYYKKP

SEQ ID NO: 41527 - protein, 11 aa, synthetic construct
ALWEVTYYRKL

SEQ ID NO: 41528 - protein, 11 aa, synthetic construct
ALLDVNYYKKL

SEQ ID NO: 41529 - protein, 11 aa, synthetic construct
ALWEADYYKKL

SEQ ID NO: 41530 - protein, 11 aa, synthetic construct
ALWDVNYYKKP

SEQ ID NO: 41531 - protein, 11 aa, synthetic construct
ALLGVNYYKKL

SEQ ID NO: 41532 - protein, 11 aa, synthetic construct
ALWDVNYFKKL

SEQ ID NO: 41533 - protein, 11 aa, synthetic construct
AWWGVNYYKKL

SEQ ID NO: 41534 - protein, 11 aa, synthetic construct
ALWEVTYFKKL

SEQ ID NO: 41535 - protein, 11 aa, synthetic construct
ALWEVTYHKKL

SEQ ID NO: 41536 - protein, 11 aa, synthetic construct
ALREVDYYKKL

SEQ ID NO: 41537 - protein, 11 aa, synthetic construct
ALREVTYYKKL

SEQ ID NO: 41538 - protein, 11 aa, synthetic construct
ALREVNYYKTL

SEQ ID NO: 41539 - protein, 11 aa, synthetic construct
ALREVNYYKKP

SEQ ID NO: 41540 - protein, 11 aa, synthetic construct
ALREVNNYKKL

SEQ ID NO: 41541 - protein, 11 aa, synthetic construct
ALWEVTYYKKP

SEQ ID NO: 41542 - protein, 11 aa, synthetic construct
DLWEVNYNKKL

SEQ ID NO: 41543 - protein, 11 aa, synthetic construct
APWEVNYYKKL

SEQ ID NO: 41544 - protein, 11 aa, synthetic construct
ALWEGKYYKKL

SEQ ID NO: 41545 - protein, 11 aa, synthetic construct
AWWEVYYYKKL

SEQ ID NO: 41546 - protein, 11 aa, synthetic construct
ALWEVCYYKKL

SEQ ID NO: 41547 - protein, 11 aa, synthetic construct
AMWEADYYKKL

SEQ ID NO: 41548 - protein, 11 aa, synthetic construct
ALWEVDYCKKL

SEQ ID NO: 41549 - protein, 11 aa, synthetic construct
ALWEVYYYKKP

SEQ ID NO: 41550 - protein, 11 aa, synthetic construct
ASWEVNYYKKH

SEQ ID NO: 41551 - protein, 11 aa, synthetic construct
ALLEVNYHKKL

SEQ ID NO: 41552 - protein, 11 aa, synthetic construct
ALWGANYYKKL

SEQ ID NO: 41553 - protein, 11 aa, synthetic construct
ALWEGNYYKTL

SEQ ID NO: 41554 - protein, 11 aa, synthetic construct
AWWEVNNYKKL

SEQ ID NO: 41555 - protein, 11 aa, synthetic construct
ALWELTYYKKL

SEQ ID NO: 41556 - protein, 11 aa, synthetic construct
ASREVKYYKKL

SEQ ID NO: 41557 - protein, 11 aa, synthetic construct
ASWEVNYNKKL

SEQ ID NO: 41558 - protein, 11 aa, synthetic construct
ASREVNYYKKL

SEQ ID NO: 41559 - protein, 14 aa, synthetic construct
ALWVVQELGKKIKV

SEQ ID NO: 41560 - protein, 11 aa, synthetic construct
AMCEVNYYKKL

SEQ ID NO: 41561 - protein, 11 aa, synthetic construct
ALWVVSYYKKL

SEQ ID NO: 41562 - protein, 11 aa, synthetic construct
AVGGGNCCKRI

SEQ ID NO: 41563 - protein, 11 aa, synthetic construct
ARWEVNYYKKL

SEQ ID NO: 41564 - protein, 11 aa, synthetic construct
ASCELNYYKKL

SEQ ID NO: 41565 - protein, 11 aa, synthetic construct
AVGGVNCYKKL

SEQ ID NO: 41566 - protein, 11 aa, synthetic construct
ASWDVNYYKKL

SEQ ID NO: 41567 - protein, 11 aa, synthetic construct
ALWVVNYYVFL

SEQ ID NO: 41568 - protein, 11 aa, synthetic construct
ASWKVNYYKKL

SEQ ID NO: 41569 - protein, 11 aa, synthetic construct
ALWVVNYYKLV

SEQ ID NO: 41570 - protein, 11 aa, synthetic construct
ARWEGTYSPTL

SEQ ID NO: 41571 - protein, 11 aa, synthetic construct
AMLEVNYYKKL

SEQ ID NO: 41572 - protein, 11 aa, synthetic construct
ALWVVNYYKKP

SEQ ID NO: 41573 - protein, 11 aa, synthetic construct
AMWEANYYKKL

SEQ ID NO: 41574 - protein, 11 aa, synthetic construct
ALWVVYYYYKL

SEQ ID NO: 41575 - protein, 11 aa, synthetic construct
AMWEVNYYKKI

SEQ ID NO: 41576 - protein, 11 aa, synthetic construct
ASWEVKYYKKL

SEQ ID NO: 41577 - protein, 11 aa, synthetic construct
ASWEVNHYKKL

SEQ ID NO: 41578 - protein, 11 aa, synthetic construct
AMCEVNNYKKL

SEQ ID NO: 41579 - protein, 11 aa, synthetic construct
ASWEVNCYKKL

SEQ ID NO: 41580 - protein, 11 aa, synthetic construct
AMCELNYYKKL

SEQ ID NO: 41581 - protein, 11 aa, synthetic construct
AMWEVNYHKKL

SEQ ID NO: 41582 - protein, 11 aa, synthetic construct
AMCELNNYKKL

SEQ ID NO: 41583 - protein, 11 aa, synthetic construct
AVCEVNYYTKL

SEQ ID NO: 41584 - protein, 11 aa, synthetic construct
AMWEVNYNKKL

SEQ ID NO: 41585 - protein, 11 aa, synthetic construct
ALWWVNYYKKL

SEQ ID NO: 41586 - protein, 11 aa, synthetic construct
ASWEVDYYKKL

SEQ ID NO: 41587 - protein, 11 aa, synthetic construct
ASWEVNYYEKL

SEQ ID NO: 41588 - protein, 9 aa, synthetic construct
ASWEVNYYK

SEQ ID NO: 41589 - protein, 11 aa, synthetic construct
ASWEGTSDQKL

SEQ ID NO: 41590 - protein, 11 aa, synthetic construct
AVGEVNYYKKL

SEQ ID NO: 41591 - protein, 11 aa, synthetic construct
ASWEGNYDKKH

SEQ ID NO: 41592 - protein, 11 aa, synthetic construct
ASWEAKYYKKL

SEQ ID NO: 41593 - protein, 11 aa, synthetic construct
AMWEVNNYKKL

SEQ ID NO: 41594 - protein, 11 aa, synthetic construct
ASWVVNYYKKL

SEQ ID NO: 41595 - protein, 11 aa, synthetic construct
ASWDVNYYNKL

SEQ ID NO: 41596 - protein, 11 aa, synthetic construct
AVGEVSYDKKV

SEQ ID NO: 41597 - protein, 11 aa, synthetic construct
AECEVNYYKKL

SEQ ID NO: 41598 - protein, 11 aa, synthetic construct
AWWAVKYYKKL

SEQ ID NO: 41599 - protein, 11 aa, synthetic construct
AVLAVNYYKKL

SEQ ID NO: 41600 - protein, 11 aa, synthetic construct
AVWELNYDKKL

SEQ ID NO: 41601 - protein, 11 aa, synthetic construct
ELWEVNYYKKH

SEQ ID NO: 41602 - protein, 11 aa, synthetic construct
ELLELNYYKKL

SEQ ID NO: 41603 - protein, 11 aa, synthetic construct
DWWEVNYYKKL

SEQ ID NO: 41604 - protein, 11 aa, synthetic construct
DSWEVNYYKKL

SEQ ID NO: 41605 - protein, 11 aa, synthetic construct
DLWVVNYYKTL

SEQ ID NO: 41606 - protein, 11 aa, synthetic construct
DLWVVNYYKKL

SEQ ID NO: 41607 - protein, 11 aa, synthetic construct
DLWGVNYYKKL

SEQ ID NO: 41608 - protein, 11 aa, synthetic construct
DLWEVTYYKKL

SEQ ID NO: 41609 - protein, 11 aa, synthetic construct
DLWEVNYYNKL

SEQ ID NO: 41610 - protein, 11 aa, synthetic construct
DLWEVNYYNKI

SEQ ID NO: 41611 - protein, 11 aa, synthetic construct
DLWEVNYYKKH

SEQ ID NO: 41612 - protein, 11 aa, synthetic construct
DLWEVNYDKKL

SEQ ID NO: 41613 - protein, 11 aa, synthetic construct
DLWEVKYYKKL

SEQ ID NO: 41614 - protein, 11 aa, synthetic construct
DLWEVHYYKKL

SEQ ID NO: 41615 - protein, 11 aa, synthetic construct
DLWEFNYYKKL

SEQ ID NO: 41616 - protein, 11 aa, synthetic construct
DLWEANYYKKL

SEQ ID NO: 41617 - protein, 11 aa, synthetic construct
DLLEVNYYKKL

SEQ ID NO: 41618 - protein, 11 aa, synthetic construct
DLCEVNYYKKL

SEQ ID NO: 41619 - protein, 10 aa, synthetic construct
DKCGVNFYKK

SEQ ID NO: 41620 - protein, 11 aa, synthetic construct
DEWEVNYYKKL

SEQ ID NO: 41621 - protein, 11 aa, synthetic construct
AYWGVNYYKKL

SEQ ID NO: 41622 - protein, 11 aa, synthetic construct
AWWVVNYYKKL

SEQ ID NO: 41623 - protein, 11 aa, synthetic construct
AWWVVNYYEKL

SEQ ID NO: 41624 - protein, 11 aa, synthetic construct
ELWEVNYYKKL

SEQ ID NO: 41625 - protein, 9 aa, synthetic construct
GVGGVGGYW

SEQ ID NO: 41626 - protein, 11 aa, synthetic construct
GVWEVNYYKKL

SEQ ID NO: 41627 - protein, 7 aa, synthetic construct
SRRKENS

SEQ ID NO: 41628 - protein, 11 aa, synthetic construct
VLWEVNYYKKH

SEQ ID NO: 41629 - protein, 11 aa, synthetic construct
VLWEVNCYKRL

SEQ ID NO: 41630 - protein, 11 aa, synthetic construct
VLWEVKYYKKL

SEQ ID NO: 41631 - protein, 11 aa, synthetic construct
VLWDVNYYKKL

SEQ ID NO: 41632 - protein, 11 aa, synthetic construct
VLREVNYYKKL

SEQ ID NO: 41633 - protein, 11 aa, synthetic construct
VLLEVNYYKKL

SEQ ID NO: 41634 - protein, 11 aa, synthetic construct
TLCEVNYYKKL

SEQ ID NO: 41635 - protein, 11 aa, synthetic construct
SWWEVNYYKKI

SEQ ID NO: 41636 - protein, 11 aa, synthetic construct
SWWELNYYKKL

SEQ ID NO: 41637 - protein, 7 aa, synthetic construct
SRRRENS

SEQ ID NO: 41638 - protein, 11 aa, synthetic construct
SLWEVNYYKKN

SEQ ID NO: 41639 - protein, 11 aa, synthetic construct
GWWAGTYASTR

SEQ ID NO: 41640 - protein, 11 aa, synthetic construct
SLWEVNYNKKL

SEQ ID NO: 41641 - protein, 11 aa, synthetic construct
SLWEVDYYKKL

SEQ ID NO: 41642 - protein, 11 aa, synthetic construct
SLWEGNYYKKL

SEQ ID NO: 41643 - protein, 11 aa, synthetic construct
SLREVNYYKKL

SEQ ID NO: 41644 - protein, 11 aa, synthetic construct
SLCEVNYYKEL

SEQ ID NO: 41645 - protein, 11 aa, synthetic construct
PVWEVNYYKKL

SEQ ID NO: 41646 - protein, 11 aa, synthetic construct
PLWEVNNYKKL

SEQ ID NO: 41647 - protein, 11 aa, synthetic construct
PFWEENYYNKL

SEQ ID NO: 41648 - protein, 11 aa, synthetic construct
PCGRWIIIRNS

SEQ ID NO: 41649 - protein, 11 aa, synthetic construct
PCGRGISIRNS

SEQ ID NO: 41650 - protein, 11 aa, synthetic construct
AWWKVNYYRKL

SEQ ID NO: 41651 - protein, 11 aa, synthetic construct
AWWGVNHCKKL

SEQ ID NO: 41652 - protein, 11 aa, synthetic construct
AWWGVKYYKKL

SEQ ID NO: 41653 - protein, 11 aa, synthetic construct
AWCEVNYYKKL

SEQ ID NO: 41654 - protein, 11 aa, synthetic construct
AWWAVTYYKKL

SEQ ID NO: 41655 - protein, 11 aa, synthetic construct
AWWAVNYYQKL

SEQ ID NO: 41656 - protein, 11 aa, synthetic construct
AWWAVNYYKKL

SEQ ID NO: 41657 - protein, 11 aa, synthetic construct
AWWAVKYYQKL

SEQ ID NO: 41658 - protein, 11 aa, synthetic construct
ALWVVNYDKKL

SEQ ID NO: 41659 - protein, 11 aa, synthetic construct
AWRDVNYYKKL

SEQ ID NO: 41660 - protein, 11 aa, synthetic construct
AWLEVTYYKKL

SEQ ID NO: 41661 - protein, 11 aa, synthetic construct
AWGEVNYYKKL

SEQ ID NO: 41662 - protein, 11 aa, synthetic construct
AWGELNNYKKL

SEQ ID NO: 41663 - protein, 11 aa, synthetic construct
AWGELDYYKKL

SEQ ID NO: 41664 - protein, 11 aa, synthetic construct
AVWEVTYYQKL

SEQ ID NO: 41665 - protein, 11 aa, synthetic construct
AWWEENNYKKL

SEQ ID NO: 41666 - protein, 11 aa, synthetic construct
AVWEVNYYKTL

SEQ ID NO: 41667 - protein, 11 aa, synthetic construct
AVWEVNYYKKH

SEQ ID NO: 41668 - protein, 11 aa, synthetic construct
AVWEVNYNKKP

SEQ ID NO: 41669 - protein, 11 aa, synthetic construct
AVWEVNYNKKL

SEQ ID NO: 41670 - protein, 11 aa, synthetic construct
AVWEVNYCKKL

SEQ ID NO: 41671 - protein, 11 aa, synthetic construct
AVWEVNDYKKL

SEQ ID NO: 41672 - protein, 11 aa, synthetic construct
AVWEVKYYKTL

SEQ ID NO: 41673 - protein, 11 aa, synthetic construct
AVWEVKYYKKL

SEQ ID NO: 41674 - protein, 11 aa, synthetic construct
AVWEVKYNKKL

SEQ ID NO: 41675 - protein, 11 aa, synthetic construct
AVWEVIYYKKL

SEQ ID NO: 41676 - protein, 11 aa, synthetic construct
AWWDVNYYKKL

SEQ ID NO: 41677 - protein, 11 aa, synthetic construct
AWWEENYYKTL

SEQ ID NO: 41678 - protein, 11 aa, synthetic construct
AWWGVDDYKKL

SEQ ID NO: 41679 - protein, 11 aa, synthetic construct
AWWEVNYYQKL

SEQ ID NO: 41680 - protein, 10 aa, synthetic construct
AWWGGNNNKK

SEQ ID NO: 41681 - protein, 11 aa, synthetic construct
AWWEVYYYKTL

SEQ ID NO: 41682 - protein, 11 aa, synthetic construct
AWWEVTYYQNL

SEQ ID NO: 41683 - protein, 11 aa, synthetic construct
AWWEVTYYKTP

SEQ ID NO: 41684 - protein, 11 aa, synthetic construct
AWWEVTYYESL

SEQ ID NO: 41685 - protein, 11 aa, synthetic construct
AWWEVTSYKKL

SEQ ID NO: 41686 - protein, 11 aa, synthetic construct
AWWEVSYYKNL

SEQ ID NO: 41687 - protein, 11 aa, synthetic construct
AWWEVQYYKNI

SEQ ID NO: 41688 - protein, 11 aa, synthetic construct
AWWEVQSSKKL

SEQ ID NO: 41689 - protein, 11 aa, synthetic construct
AWWEVNYYQTL

SEQ ID NO: 41690 - protein, 11 aa, synthetic construct
AWWEVNYYNTL

SEQ ID NO: 41691 - protein, 11 aa, synthetic construct
AWWEGTSYKTL

SEQ ID NO: 41692 - protein, 11 aa, synthetic construct
AWWEVNYYNKL

SEQ ID NO: 41693 - protein, 11 aa, synthetic construct
AWWEVNYYKEL

SEQ ID NO: 41694 - protein, 11 aa, synthetic construct
AWWEVNYSQKL

SEQ ID NO: 41695 - protein, 11 aa, synthetic construct
AWWEVNYSKTP

SEQ ID NO: 41696 - protein, 11 aa, synthetic construct
AWWEVNYSKKL

SEQ ID NO: 41697 - protein, 11 aa, synthetic construct
AWWEVNYFKKL

SEQ ID NO: 41698 - protein, 11 aa, synthetic construct
AWWEVNYDKKL

SEQ ID NO: 41699 - protein, 11 aa, synthetic construct
AWWEVKYYKEL

SEQ ID NO: 41700 - protein, 11 aa, synthetic construct
AWWEVHYYKKL

SEQ ID NO: 41701 - protein, 11 aa, synthetic construct
AWWELNYYKKL

SEQ ID NO: 41702 - protein, 11 aa, synthetic construct
ALWVVNYNKKL

SEQ ID NO: 41703 - protein, 11 aa, synthetic construct
ALWEVSYYKKI

SEQ ID NO: 41704 - protein, 11 aa, synthetic construct
ALWVVKYYKKL

SEQ ID NO: 41705 - protein, 11 aa, synthetic construct
ALWEANYCKKL

SEQ ID NO: 41706 - protein, 11 aa, synthetic construct
ALWEAKYYKKL

SEQ ID NO: 41707 - protein, 11 aa, synthetic construct
ALWDVTYYKTL

SEQ ID NO: 41708 - protein, 11 aa, synthetic construct
ALWDVTYYKKL

SEQ ID NO: 41709 - protein, 11 aa, synthetic construct
ALWDVNYYKTL

SEQ ID NO: 41710 - protein, 11 aa, synthetic construct
ALWDVNYYEKL

SEQ ID NO: 41711 - protein, 11 aa, synthetic construct
ALWDVKYYKKI

SEQ ID NO: 41712 - protein, 11 aa, synthetic construct
ALWDVHYYKKL

SEQ ID NO: 41713 - protein, 11 aa, synthetic construct
ALWDENYYKKL

SEQ ID NO: 41714 - protein, 11 aa, synthetic construct
ALWAVTYYKKL

SEQ ID NO: 41715 - protein, 11 aa, synthetic construct
ALWAVSSYKKL

SEQ ID NO: 41716 - protein, 11 aa, synthetic construct
ALWAVNYYKTL

SEQ ID NO: 41717 - protein, 11 aa, synthetic construct
ALWAVNDYKKL

SEQ ID NO: 41718 - protein, 11 aa, synthetic construct
ALWAGTYYKKL

SEQ ID NO: 41719 - protein, 11 aa, synthetic construct
ALWAGNYCKNL

SEQ ID NO: 41720 - protein, 11 aa, synthetic construct
ALVEVNYYKKL

SEQ ID NO: 41721 - protein, 11 aa, synthetic construct
ALSEVNYYKTL

SEQ ID NO: 41722 - protein, 11 aa, synthetic construct
ALSEFNYYKKL

SEQ ID NO: 41723 - protein, 11 aa, synthetic construct
ALRGVNYYKKL

SEQ ID NO: 41724 - protein, 11 aa, synthetic construct
ALREVNYYKKI

SEQ ID NO: 41725 - protein, 11 aa, synthetic construct
ALREVNYYKEL

SEQ ID NO: 41726 - protein, 9 aa, synthetic construct
ALREVNYYK

SEQ ID NO: 41727 - protein, 11 aa, synthetic construct
ALWEANCYKKL

SEQ ID NO: 41728 - protein, 11 aa, synthetic construct
ALWEANYYKKI

SEQ ID NO: 41729 - protein, 11 aa, synthetic construct
ALWVLNYYKKL

SEQ ID NO: 41730 - protein, 11 aa, synthetic construct
ALWEEKYYKKL

SEQ ID NO: 41731 - protein, 11 aa, synthetic construct
ALWERTYYKKL

SEQ ID NO: 41732 - protein, 11 aa, synthetic construct
ALWEMNSYKKL

SEQ ID NO: 41733 - protein, 11 aa, synthetic construct
ALWELYYYKKL

SEQ ID NO: 41734 - protein, 11 aa, synthetic construct
ALWELNYYRKL

SEQ ID NO: 41735 - protein, 11 aa, synthetic construct
ALWELNYYKKI

SEQ ID NO: 41736 - protein, 11 aa, synthetic construct
ALWELNYNKKL

SEQ ID NO: 41737 - protein, 11 aa, synthetic construct
ALWELNNYKKL

SEQ ID NO: 41738 - protein, 11 aa, synthetic construct
ALWEGYYYKKL

SEQ ID NO: 41739 - protein, 11 aa, synthetic construct
ALWEGTYYKTL

SEQ ID NO: 41740 - protein, 11 aa, synthetic construct
ALWEGTYYKKL

SEQ ID NO: 41741 - protein, 11 aa, synthetic construct
ALWEGNYYQKL

SEQ ID NO: 41742 - protein, 11 aa, synthetic construct
ALWEGNYYNKL

SEQ ID NO: 41743 - protein, 11 aa, synthetic construct
ALWEGNYYKNL

SEQ ID NO: 41744 - protein, 11 aa, synthetic construct
ALWEGNSYKKL

SEQ ID NO: 41745 - protein, 11 aa, synthetic construct
ALWEGNKYKKL

SEQ ID NO: 41746 - protein, 11 aa, synthetic construct
ALWEGNDDKTL

SEQ ID NO: 41747 - protein, 11 aa, synthetic construct
ALWEGEYYKKL

SEQ ID NO: 41748 - protein, 11 aa, synthetic construct
ALWEFTYYKKL

SEQ ID NO: 41749 - protein, 12 aa, synthetic construct
ALWEEVGQKIKV

SEQ ID NO: 41750 - protein, 11 aa, synthetic construct
ALWEENYYKRL

SEQ ID NO: 41751 - protein, 11 aa, synthetic construct
ALWEENNNKKL

SEQ ID NO: 41752 - protein, 11 aa, synthetic construct
ALREVNYYEKL

SEQ ID NO: 41753 - protein, 11 aa, synthetic construct
ALREVNYNKKH

SEQ ID NO: 41754 - protein, 11 aa, synthetic construct
ALREVNYCKKL

SEQ ID NO: 41755 - protein, 11 aa, synthetic construct
ALREVNDYKKL

SEQ ID NO: 41756 - protein, 11 aa, synthetic construct
ALCEVNLYNKL

SEQ ID NO: 41757 - protein, 11 aa, synthetic construct
ALCEVDYYKKL

SEQ ID NO: 41758 - protein, 11 aa, synthetic construct
ALCELTYYKKL

SEQ ID NO: 41759 - protein, 11 aa, synthetic construct
ALCELNYYNKL

SEQ ID NO: 41760 - protein, 11 aa, synthetic construct
ALCELNNNKKL

SEQ ID NO: 41761 - protein, 11 aa, synthetic construct
ALCDVNYNKKL

SEQ ID NO: 41762 - protein, 11 aa, synthetic construct
ALCDVNYFKKL

SEQ ID NO: 41763 - protein, 11 aa, synthetic construct
AKWELNNSKKL

SEQ ID NO: 41764 - protein, 11 aa, synthetic construct
AKRGVNYYKKL

SEQ ID NO: 41765 - protein, 11 aa, synthetic construct
AKREGNYYKKL

SEQ ID NO: 41766 - protein, 11 aa, synthetic construct
AKREDNNYKKL

SEQ ID NO: 41767 - protein, 11 aa, synthetic construct
AKCEVNYNKKL

SEQ ID NO: 41768 - protein, 11 aa, synthetic construct
AGWEVNSYKKL

SEQ ID NO: 41769 - protein, 11 aa, synthetic construct
AGWEVKDEKTL

SEQ ID NO: 41770 - protein, 11 aa, synthetic construct
AGWAVKYYKKL

SEQ ID NO: 41771 - protein, 11 aa, synthetic construct
AFWEVNYYKKI

SEQ ID NO: 41772 - protein, 11 aa, synthetic construct
AFWEVNNYKKL

SEQ ID NO: 41773 - protein, 11 aa, synthetic construct
AFWEVDYYKKL

SEQ ID NO: 41774 - protein, 11 aa, synthetic construct
AFWELNYYKKL

SEQ ID NO: 41775 - protein, 11 aa, synthetic construct
AEWEVNYYKKL

SEQ ID NO: 41776 - protein, 11 aa, synthetic construct
AESELNNYNKL

SEQ ID NO: 41777 - protein, 11 aa, synthetic construct
ALCEVNNYKKL

SEQ ID NO: 41778 - protein, 11 aa, synthetic construct
ALCEVNYCKKL

SEQ ID NO: 41779 - protein, 11 aa, synthetic construct
ALCEVNYNKKL

SEQ ID NO: 41780 - protein, 11 aa, synthetic construct
ALLEVNYYEKL

SEQ ID NO: 41781 - protein, 11 aa, synthetic construct
ALREVHYYKKL

SEQ ID NO: 41782 - protein, 11 aa, synthetic construct
ALREGNYYKKL

SEQ ID NO: 41783 - protein, 11 aa, synthetic construct
ALREENYYKKL

SEQ ID NO: 41784 - protein, 11 aa, synthetic construct
ALLEVYYYKKI

SEQ ID NO: 41785 - protein, 11 aa, synthetic construct
ALLEVTYYKKL

SEQ ID NO: 41786 - protein, 11 aa, synthetic construct
ALLEVSYYKKL

SEQ ID NO: 41787 - protein, 11 aa, synthetic construct
ALLEVNYYNKL

SEQ ID NO: 41788 - protein, 11 aa, synthetic construct
ALLEVNYYKKI

SEQ ID NO: 41789 - protein, 11 aa, synthetic construct
ALLEVNYYKKH

SEQ ID NO: 41790 - protein, 8 aa, synthetic construct
ALLEVNYY

SEQ ID NO: 41791 - protein, 8 aa, synthetic construct
ALCEVNYY

SEQ ID NO: 41792 - protein, 11 aa, synthetic construct
ALLEVNYNKKL

SEQ ID NO: 41793 - protein, 11 aa, synthetic construct
ALLEVNYCKKL

SEQ ID NO: 41794 - protein, 11 aa, synthetic construct
ALLEANYYKKL

SEQ ID NO: 41795 - protein, 11 aa, synthetic construct
ALFEVNYYKKL

SEQ ID NO: 41796 - protein, 11 aa, synthetic construct
ALCEVTYYKKL

SEQ ID NO: 41797 - protein, 11 aa, synthetic construct
ALCEVSYYKKL

SEQ ID NO: 41798 - protein, 14 aa, synthetic construct
ALCEVQELGKKIKV

SEQ ID NO: 41799 - protein, 11 aa, synthetic construct
ALCEVNYYNKL

SEQ ID NO: 41800 - protein, 11 aa, synthetic construct
ALCEVNYYKEL

SEQ ID NO: 41801 - protein, 11 aa, synthetic construct
ALWEVAYYKKL

SEQ ID NO: 41802 - protein, 11 aa, synthetic construct
ALWEVDNNKTL

SEQ ID NO: 41803 - protein, 9 aa, synthetic construct
ALWEVDYYK

SEQ ID NO: 41804 - protein, 11 aa, synthetic construct
ALWEVNYYQKP

SEQ ID NO: 41805 - protein, 8 aa, synthetic construct
ALWEVTYY

SEQ ID NO: 41806 - protein, 11 aa, synthetic construct
ALWEVTYSKKL

SEQ ID NO: 41807 - protein, 11 aa, synthetic construct
ALWEVTYNKKL

SEQ ID NO: 41808 - protein, 11 aa, synthetic construct
ALWEVTYDKTL

SEQ ID NO: 41809 - protein, 11 aa, synthetic construct
ALWEVTSYKTL

SEQ ID NO: 41810 - protein, 11 aa, synthetic construct
ALWEVTNYKKL

SEQ ID NO: 41811 - protein, 11 aa, synthetic construct
ALWEVTHYKKL

SEQ ID NO: 41812 - protein, 11 aa, synthetic construct
ALWEVTDNKTH

SEQ ID NO: 41813 - protein, 11 aa, synthetic construct
ALWEVTDDKKL

SEQ ID NO: 41814 - protein, 11 aa, synthetic construct
ALWEVTAYKKL

SEQ ID NO: 41815 - protein, 11 aa, synthetic construct
ALWEVSYYKKV

SEQ ID NO: 41816 - protein, 11 aa, synthetic construct
AELEVNYYKKL

SEQ ID NO: 41817 - protein, 9 aa, synthetic construct
ALWEVSYYK

SEQ ID NO: 41818 - protein, 11 aa, synthetic construct
ALWEVSYFKKL

SEQ ID NO: 41819 - protein, 11 aa, synthetic construct
ALWEVSHYKKL

SEQ ID NO: 41820 - protein, 11 aa, synthetic construct
ALWEVSDYKKL

SEQ ID NO: 41821 - protein, 11 aa, synthetic construct
ALWEVQYYKTL

SEQ ID NO: 41822 - protein, 14 aa, synthetic construct
ALWEVQELGNKNQG

SEQ ID NO: 41823 - protein, 11 aa, synthetic construct
ALWEVPYYKTL

SEQ ID NO: 41824 - protein, 14 aa, synthetic construct
ALWEVPWLGKKIKV

SEQ ID NO: 41825 - protein, 11 aa, synthetic construct
ALWEVNYYRTL

SEQ ID NO: 41826 - protein, 11 aa, synthetic construct
ALWEVTYYEKL

SEQ ID NO: 41827 - protein, 11 aa, synthetic construct
ALWEVTYYKKI

SEQ ID NO: 41828 - protein, 11 aa, synthetic construct
ALWEVTYYKKR

SEQ ID NO: 41829 - protein, 11 aa, synthetic construct
ALWGVNYCKKL

SEQ ID NO: 41830 - protein, 11 aa, synthetic construct
ALWTVNYYKKL

SEQ ID NO: 41831 - protein, 11 aa, synthetic construct
ALWQVNYYKKH

SEQ ID NO: 41832 - protein, 11 aa, synthetic construct
ALWQVHYYKKL

SEQ ID NO: 41833 - protein, 11 aa, synthetic construct
ALWKVNSYKKL

SEQ ID NO: 41834 - protein, 11 aa, synthetic construct
ALWGVYYYNKN

SEQ ID NO: 41835 - protein, 11 aa, synthetic construct
ALWGVTYYKNL

SEQ ID NO: 41836 - protein, 11 aa, synthetic construct
ALWGVSYYKKL

SEQ ID NO: 41837 - protein, 11 aa, synthetic construct
ALWGVNYYKKF

SEQ ID NO: 41838 - protein, 11 aa, synthetic construct
ALWGVNYHKKL

SEQ ID NO: 41839 - protein, 11 aa, synthetic construct
ALWGVNSYKKL

SEQ ID NO: 41840 - protein, 11 aa, synthetic construct
ALWEVTYYKNL

SEQ ID NO: 41841 - protein, 15 aa, synthetic construct
ALWGVLELGKKKIKV

SEQ ID NO: 41842 - protein, 11 aa, synthetic construct
ALWGVDYYKKH

SEQ ID NO: 41843 - protein, 11 aa, synthetic construct
ALWGGTDYKKL

SEQ ID NO: 41844 - protein, 11 aa, synthetic construct
ALWGENYNKKL

SEQ ID NO: 41845 - protein, 11 aa, synthetic construct
ALWEWNYYKKL

SEQ ID NO: 41846 - protein, 11 aa, synthetic construct
ALWEVYYHKKL

SEQ ID NO: 41847 - protein, 11 aa, synthetic construct
ALWEVTYYQTL

SEQ ID NO: 41848 - protein, 11 aa, synthetic construct
ALWEVTYYQKL

SEQ ID NO: 41849 - protein, 11 aa, synthetic construct
ALWEVTYYKTR

SEQ ID NO: 41850 - protein, 11 aa, synthetic construct
ALWEVNYYQNL

SEQ ID NO: 41851 - protein, 11 aa, synthetic construct
ALWEVNYYQIL

SEQ ID NO: 41852 - protein, 11 aa, synthetic construct
ALWEVDYYKKH

SEQ ID NO: 41853 - protein, 11 aa, synthetic construct
ALWEVNYYNTL

SEQ ID NO: 41854 - protein, 11 aa, synthetic construct
ALWEVNCYKNL

SEQ ID NO: 41855 - protein, 11 aa, synthetic construct
ALWEVNCYKKP

SEQ ID NO: 41856 - protein, 11 aa, synthetic construct
ALWEVNCDKKL

SEQ ID NO: 41857 - protein, 14 aa, synthetic construct
ALWEVLELGKNKSR

SEQ ID NO: 41858 - protein, 14 aa, synthetic construct
ALWEVLELGKKNQG

SEQ ID NO: 41859 - protein, 15 aa, synthetic construct
ALWEVLELGKKKIKV

SEQ ID NO: 41860 - protein, 14 aa, synthetic construct
ALWEVLELGKKIKV

SEQ ID NO: 41861 - protein, 11 aa, synthetic construct
ALWEVKYYKHL

SEQ ID NO: 41862 - protein, 11 aa, synthetic construct
ALWEVKYYKEL

SEQ ID NO: 41863 - protein, 11 aa, synthetic construct
ALWEVKYSKKL

SEQ ID NO: 41864 - protein, 11 aa, synthetic construct
ALWEVKSYKKL

SEQ ID NO: 41865 - protein, 11 aa, synthetic construct
ALWEVKSYKIL

SEQ ID NO: 41866 - protein, 11 aa, synthetic construct
ALWEVKCYKKL

SEQ ID NO: 41867 - protein, 11 aa, synthetic construct
ALWEVHYYKNL

SEQ ID NO: 41868 - protein, 11 aa, synthetic construct
ALWEVHYSKKL

SEQ ID NO: 41869 - protein, 11 aa, synthetic construct
ALWEVHYDKKL

SEQ ID NO: 41870 - protein, 11 aa, synthetic construct
ALWEVESYKKL

SEQ ID NO: 41871 - protein, 11 aa, synthetic construct
ALWEVDYYVCV

SEQ ID NO: 41872 - protein, 11 aa, synthetic construct
ALWEVDYYNKL

SEQ ID NO: 41873 - protein, 11 aa, synthetic construct
ALWEVDYYKRL

SEQ ID NO: 41874 - protein, 11 aa, synthetic construct
ALWEVDYYKKV

SEQ ID NO: 41875 - protein, 11 aa, synthetic construct
ALWEVNNNKRL

SEQ ID NO: 41876 - protein, 11 aa, synthetic construct
ALWEVNNYKKI

SEQ ID NO: 41877 - protein, 11 aa, synthetic construct
ALWEVNSDKKL

SEQ ID NO: 41878 - protein, 11 aa, synthetic construct
ALWEVNYRKKL

SEQ ID NO: 41879 - protein, 10 aa, synthetic construct
ALWEVNYYNK

SEQ ID NO: 41880 - protein, 11 aa, synthetic construct
ALWEVNYYKNI

SEQ ID NO: 41881 - protein, 11 aa, synthetic construct
ALWEVNYYKKQ

SEQ ID NO: 41882 - protein, 11 aa, synthetic construct
ALWEVNYYKKN

SEQ ID NO: 41883 - protein, 11 aa, synthetic construct
ALWEVNYYKKK

SEQ ID NO: 41884 - protein, 11 aa, synthetic construct
ALWEVNYYKEI

SEQ ID NO: 41885 - protein, 11 aa, synthetic construct
ALWEVNYSQKL

SEQ ID NO: 41886 - protein, 11 aa, synthetic construct
ALWEVNYSNTL

SEQ ID NO: 41887 - protein, 11 aa, synthetic construct
ALWEVNYSKRL

SEQ ID NO: 41888 - protein, 11 aa, synthetic construct
ALWEVNYNNKL

SEQ ID NO: 41889 - protein, 11 aa, synthetic construct
ALWEVNSSQTL

SEQ ID NO: 41890 - protein, 11 aa, synthetic construct
ALWEVNYNKKQ

SEQ ID NO: 41891 - protein, 11 aa, synthetic construct
ALWEVNYNKKI

SEQ ID NO: 41892 - protein, 11 aa, synthetic construct
ALWEVNYNKKH

SEQ ID NO: 41893 - protein, 11 aa, synthetic construct
ALWEVNYHNKL

SEQ ID NO: 41894 - protein, 11 aa, synthetic construct
ALWEVNYDNKL

SEQ ID NO: 41895 - protein, 11 aa, synthetic construct
ALWEVNYDKTL

SEQ ID NO: 41896 - protein, 11 aa, synthetic construct
ALWEVNYDKKI

SEQ ID NO: 41897 - protein, 11 aa, synthetic construct
ALWEVNYCKTL

SEQ ID NO: 41898 - protein, 11 aa, synthetic construct
ALWEVNSYKRL

SEQ ID NO: 41899 - protein, 11 aa, synthetic construct
VLWEVSYYKKL

SEQ ID NO: 41900 - protein, 11 aa, synthetic construct
ALWEVHYYKKL

SEQ ID NO: 41901 - protein, 14 aa, synthetic construct
ALWEVQELGKKIKV

SEQ ID NO: 41902 - protein, 9 aa, synthetic construct
ALWEVFKKL

SEQ ID NO: 41903 - protein, 12 aa, synthetic construct
ALWEAPNYYKKL

SEQ ID NO: 41904 - protein, 14 aa, synthetic construct
ALWEVLELGKKNQG

SEQ ID NO: 41905 - protein, 15 aa, synthetic construct
ALWEVLELGKKKIKV

SEQ ID NO: 41906 - protein, 14 aa, synthetic construct
ALWEVLELGKKIKV

SEQ ID NO: 41907 - protein, 11 aa, synthetic construct
ALWEVGQKIKV

SEQ ID NO: 41908 - protein, 11 aa, synthetic construct
ALWEVNYYKKL

SEQ ID NO: 41909 - protein, 13 aa, synthetic construct
ALWEVQELGKKSR

SEQ ID NO: 41910 - protein, 14 aa, synthetic construct
ALWEVQELGTKIKV

SEQ ID NO: 41911 - protein, 14 aa, synthetic construct
ALWEVLELGKRKSR

SEQ ID NO: 41912 - protein, 14 aa, synthetic construct
ALWEVQELGKKKSR

SEQ ID NO: 41913 - protein, 14 aa, synthetic construct
ALWEVLELGKKKSR

SEQ ID NO: 41914 - protein, 11 aa, synthetic construct
ALWEVHYYKEL

SEQ ID NO: 41915 - protein, 11 aa, synthetic construct
ALWEVQYYKKL

SEQ ID NO: 41916 - protein, 11 aa, synthetic construct
ALWEAHYYKKL

SEQ ID NO: 41917 - protein, 14 aa, synthetic construct
ALWEAQELGKKIKV

SEQ ID NO: 41918 - protein, 11 aa, synthetic construct
ALWGVHYYKKL

SEQ ID NO: 41919 - protein, 11 aa, synthetic construct
ALWEVRYYKKL

SEQ ID NO: 41920 - protein, 12 aa, synthetic construct
ALWEVGQKKIKV

SEQ ID NO: 41921 - protein, 11 aa, synthetic construct
ASWEVHYYKKL

SEQ ID NO: 41922 - protein, 11 aa, synthetic construct
ALWEVHYYKTL

SEQ ID NO: 41923 - protein, 14 aa, synthetic construct
ALWGVQELGKKIKV

SEQ ID NO: 41924 - protein, 11 aa, synthetic construct
ALCEVHYYKKL

SEQ ID NO: 41925 - protein, 11 aa, synthetic construct
ALWEMHYYKKL

SEQ ID NO: 41926 - protein, 14 aa, synthetic construct
ALWEVQESGKKIKV

SEQ ID NO: 41927 - protein, 11 aa, synthetic construct
ALLEVHYYKKL

SEQ ID NO: 41928 - protein, 11 aa, synthetic construct
ALWEVHYHKKL

SEQ ID NO: 41929 - protein, 11 aa, synthetic construct
ALREVHYYKKL

SEQ ID NO: 41930 - protein, 13 aa, synthetic construct
ALWEEVGQKKIKV

SEQ ID NO: 41931 - protein, 14 aa, synthetic construct
ALREVQELGKKIKV

SEQ ID NO: 41932 - protein, 11 aa, synthetic construct
ALWEVHCYKKL

SEQ ID NO: 41933 - protein, 12 aa, synthetic construct
ALWEVPNYYKKL

SEQ ID NO: 41934 - protein, 14 aa, synthetic construct
ALWEVLELGKEKSR

SEQ ID NO: 41935 - protein, 11 aa, synthetic construct
AWWEVHYYKKL

SEQ ID NO: 41936 - protein, 14 aa, synthetic construct
ALWEVQGLGKKIKV

SEQ ID NO: 41937 - protein, 14 aa, synthetic construct
ALLEVQELGKKIKV

SEQ ID NO: 41938 - protein, 11 aa, synthetic construct
ALWEVHYYKKP

SEQ ID NO: 41939 - protein, 14 aa, synthetic construct
ALWEVQEFGKKIKV

SEQ ID NO: 41940 - protein, 13 aa, synthetic construct
PCGRCKSWAKKSR

SEQ ID NO: 41941 - protein, 14 aa, synthetic construct
AWWEVQELGKKIKV

SEQ ID NO: 41942 - protein, 11 aa, synthetic construct
ALWEVHYYEKL

SEQ ID NO: 41943 - protein, 12 aa, synthetic construct
ALWEAPNYYKKP

SEQ ID NO: 41944 - protein, 12 aa, synthetic construct
ALWEAPNYCKKL

SEQ ID NO: 41945 - protein, 9 aa, synthetic construct
ALWEVLKKL

SEQ ID NO: 41946 - protein, 11 aa, synthetic construct
PCGRCTIIRNS

SEQ ID NO: 41947 - protein, 14 aa, synthetic construct
ALWEVQELGKKIRV

SEQ ID NO: 41948 - protein, 14 aa, synthetic construct
ASWEVQELGKKIKV

SEQ ID NO: 41949 - protein, 9 aa, synthetic construct
ALWGVFKKL

SEQ ID NO: 41950 - protein, 14 aa, synthetic construct
ALWEVQELGKKIKL

SEQ ID NO: 41951 - protein, 14 aa, synthetic construct
ALWEVRELGKKIKV

SEQ ID NO: 41952 - protein, 12 aa, synthetic construct
ALWEAPKYYKKL

SEQ ID NO: 41953 - protein, 11 aa, synthetic construct
ALWDVHYYKKL

SEQ ID NO: 41954 - protein, 11 aa, synthetic construct
ALWEVLELGKK

SEQ ID NO: 41955 - protein, 11 aa, synthetic construct
ALWEVHSYKKL

SEQ ID NO: 41956 - protein, 14 aa, synthetic construct
ALCEVQELGKKIKV

SEQ ID NO: 41957 - protein, 14 aa, synthetic construct
ALWEVLELGKKESR

SEQ ID NO: 41958 - protein, 9 aa, synthetic construct
PCGRCLRNS

SEQ ID NO: 41959 - protein, 14 aa, synthetic construct
ALWEVHELGKKIKV

SEQ ID NO: 41960 - protein, 9 aa, synthetic construct
ALWEVFKRL

SEQ ID NO: 41961 - protein, 14 aa, synthetic construct
ALWEVQELGKKNQG

SEQ ID NO: 41962 - protein, 9 aa, synthetic construct
ALREVFKKL

SEQ ID NO: 41963 - protein, 12 aa, synthetic construct
ALWEAPTYYKKL

SEQ ID NO: 41964 - protein, 9 aa, synthetic construct
ALWEVFRKL

SEQ ID NO: 41965 - protein, 11 aa, synthetic construct
ALWEVHYCKKL

SEQ ID NO: 41966 - protein, 14 aa, synthetic construct
ALWEVQELGEKIKV

SEQ ID NO: 41967 - protein, 11 aa, synthetic construct
ALWVVHYYKKL

SEQ ID NO: 41968 - protein, 11 aa, synthetic construct
AMWEVHYYKKL

SEQ ID NO: 41969 - protein, 11 aa, synthetic construct
ALWRSLGWFKI

SEQ ID NO: 41970 - protein, 11 aa, synthetic construct
ALWEVHYYRKL

SEQ ID NO: 41971 - protein, 12 aa, synthetic construct
ALLEAPNYYKKL

SEQ ID NO: 41972 - protein, 11 aa, synthetic construct
ALWEVHYYKRL

SEQ ID NO: 41973 - protein, 11 aa, synthetic construct
ALWKLGKKIKV

SEQ ID NO: 41974 - protein, 9 aa, synthetic construct
ALWEVFKEL

SEQ ID NO: 41975 - protein, 14 aa, synthetic construct
ALWEVQELGKKIEV

SEQ ID NO: 41976 - protein, 11 aa, synthetic construct
ALWEVHYYQKL

SEQ ID NO: 41977 - protein, 9 aa, synthetic construct
ASWEVFKKL

SEQ ID NO: 41978 - protein, 11 aa, synthetic construct
ALWEVYYYKKL

SEQ ID NO: 41979 - protein, 11 aa, synthetic construct
ALWEVHHYKKL

SEQ ID NO: 41980 - protein, 9 aa, synthetic construct
ALLEVFKKL

SEQ ID NO: 41981 - protein, 11 aa, synthetic construct
DLWEVHYYKKL

SEQ ID NO: 41982 - protein, 14 aa, synthetic construct
ALWDVQELGKKIKV

SEQ ID NO: 41983 - protein, 9 aa, synthetic construct
ALWEVCKKL

SEQ ID NO: 41984 - protein, 9 aa, synthetic construct
ALWEVSKKL

SEQ ID NO: 41985 - protein, 12 aa, synthetic construct
ALREAPNYYKKL

SEQ ID NO: 41986 - protein, 9 aa, synthetic construct
ALCEVFKKL

SEQ ID NO: 41987 - protein, 9 aa, synthetic construct
ALWEVFKKP

SEQ ID NO: 41988 - protein, 14 aa, synthetic construct
ALWEVQELGKRIKV

SEQ ID NO: 41989 - protein, 14 aa, synthetic construct
ALWEVQELGRKIKV

SEQ ID NO: 41990 - protein, 12 aa, synthetic construct
ALWEAPNYYKRL

SEQ ID NO: 41991 - protein, 11 aa, synthetic construct
ALWEVHYYNKL

SEQ ID NO: 41992 - protein, 12 aa, synthetic construct
ALWGAPNYYKKL

SEQ ID NO: 41993 - protein, 11 aa, synthetic construct
PCGRCIIIRNS

SEQ ID NO: 41994 - protein, 11 aa, synthetic construct
ALWAVHYYKKL

SEQ ID NO: 41995 - protein, 12 aa, synthetic construct
PCGRPRIIIRNS

SEQ ID NO: 41996 - protein, 12 aa, synthetic construct
ASWEAPNYYKKL

SEQ ID NO: 41997 - protein, 9 aa, synthetic construct
AWWEVFKKL

SEQ ID NO: 41998 - protein, 12 aa, synthetic construct
ALWEEVGKKIKV

SEQ ID NO: 41999 - protein, 14 aa, synthetic construct
ALWEVQELCKKIKV

SEQ ID NO: 42000 - protein, 14 aa, synthetic construct
ALWEVQELGKEIKV

SEQ ID NO: 42001 - protein, 14 aa, synthetic construct
ALWEVLELGKKRSR

SEQ ID NO: 42002 - protein, 11 aa, synthetic construct
TLWEVHYYKKL

SEQ ID NO: 42003 - protein, 14 aa, synthetic construct
ALWEVQELGKKINV

SEQ ID NO: 42004 - protein, 12 aa, synthetic construct
ALWEAPNYYEKL

SEQ ID NO: 42005 - protein, 12 aa, synthetic construct
ALWEAPNYHKKL

SEQ ID NO: 42006 - protein, 12 aa, synthetic construct
ALWEAPNCYKKL

SEQ ID NO: 42007 - protein, 14 aa, synthetic construct
ALWEVLELGNKKSR

SEQ ID NO: 42008 - protein, 14 aa, synthetic construct
ALWEVQELGKKVKV

SEQ ID NO: 42009 - protein, 12 aa, synthetic construct
ALWEAPDYYKKL

SEQ ID NO: 42010 - protein, 14 aa, synthetic construct
ALWEVQELGKKIKE

SEQ ID NO: 42011 - protein, 11 aa, synthetic construct
ALWEVHYYKKH

SEQ ID NO: 42012 - protein, 14 aa, synthetic construct
ALWEVQELGKKTKV

SEQ ID NO: 42013 - protein, 12 aa, synthetic construct
ALWEAPNYYNKL

SEQ ID NO: 42014 - protein, 12 aa, synthetic construct
ALWEAPNYYKEL

SEQ ID NO: 42015 - protein, 14 aa, synthetic construct
ALWEVQELGNKIKV

SEQ ID NO: 42016 - protein, 11 aa, synthetic construct
ALWELHYYKKL

SEQ ID NO: 42017 - protein, 12 aa, synthetic construct
ALWRKLGKKIKV

SEQ ID NO: 42018 - protein, 11 aa, synthetic construct
ALWEVHDYKKL

SEQ ID NO: 42019 - protein, 14 aa, synthetic construct
ALWEVQELGKKIKA

SEQ ID NO: 42020 - protein, 11 aa, synthetic construct
ALWEVHYNKKL

SEQ ID NO: 42021 - protein, 13 aa, synthetic construct
ALWEVQELAKKSR

SEQ ID NO: 42022 - protein, 11 aa, synthetic construct
AVWEVHYYKKL

SEQ ID NO: 42023 - protein, 14 aa, synthetic construct
ALWEVQELGKNIKV

SEQ ID NO: 42024 - protein, 9 aa, synthetic construct
ALWEAFKKL

SEQ ID NO: 42025 - protein, 12 aa, synthetic construct
ALWEAPSYYKKL

SEQ ID NO: 42026 - protein, 12 aa, synthetic construct
VLWEAPNYYKKL

SEQ ID NO: 42027 - protein, 12 aa, synthetic construct
ALWEAPNYYRKL

SEQ ID NO: 42028 - protein, 11 aa, synthetic construct
ALWEVHYDKKL

SEQ ID NO: 42029 - protein, 14 aa, synthetic construct
AVWEVQELGKKIKV

SEQ ID NO: 42030 - protein, 14 aa, synthetic construct
ALWEVQELGKKIKI

SEQ ID NO: 42031 - protein, 12 aa, synthetic construct
ALWEATNYYKKL

SEQ ID NO: 42032 - protein, 14 aa, synthetic construct
ALWEVQELSKKIKV

SEQ ID NO: 42033 - protein, 12 aa, synthetic construct
ALWDAPNYYKKL

SEQ ID NO: 42034 - protein, 11 aa, synthetic construct
ALWEVHYYKKI

SEQ ID NO: 42035 - protein, 8 aa, synthetic construct
ALWEVHYY

SEQ ID NO: 42036 - protein, 14 aa, synthetic construct
VLWEVQELGKKIKV

SEQ ID NO: 42037 - protein, 9 aa, synthetic construct
ALWEVFEKL

SEQ ID NO: 42038 - protein, 11 aa, synthetic construct
ALWEEHYYKKL

SEQ ID NO: 42039 - protein, 9 aa, synthetic construct
DLWEVFKKL

SEQ ID NO: 42040 - protein, 14 aa, synthetic construct
ALWEVLELGTKNQG

SEQ ID NO: 42041 - protein, 9 aa, synthetic construct
ALWDVFKKL

SEQ ID NO: 42042 - protein, 14 aa, synthetic construct
ALLEVLELGKKNQG

SEQ ID NO: 42043 - protein, 14 aa, synthetic construct
ALWEMQELGKKIKV

SEQ ID NO: 42044 - protein, 14 aa, synthetic construct
ALWEVPWLGKKIKV

SEQ ID NO: 42045 - protein, 14 aa, synthetic construct
ALWKVQELGKKIKV

SEQ ID NO: 42046 - protein, 11 aa, synthetic construct
ALWEVHNYKKL

SEQ ID NO: 42047 - protein, 12 aa, synthetic construct
ALWEDPNYYKKL

SEQ ID NO: 42048 - protein, 14 aa, synthetic construct
AMWEVQELGKKIKV

SEQ ID NO: 42049 - protein, 12 aa, synthetic construct
ALWEAPNYNKKL

SEQ ID NO: 42050 - protein, 12 aa, synthetic construct
ALWEAPNDYKKL

SEQ ID NO: 42051 - protein, 14 aa, synthetic construct
ALWEVQEMGKKIKV

SEQ ID NO: 42052 - protein, 12 aa, synthetic construct
ALWEAPNYYKKI

SEQ ID NO: 42053 - protein, 14 aa, synthetic construct
ALWEVQELDKKIKV

SEQ ID NO: 42054 - protein, 11 aa, synthetic construct
SLWEVHYYKKL

SEQ ID NO: 42055 - protein, 9 aa, synthetic construct
ALWELFKKL

SEQ ID NO: 42056 - protein, 11 aa, synthetic construct
VLWEVHYYKKL

SEQ ID NO: 42057 - protein, 12 aa, synthetic construct
ALWEAPNNYKKL

SEQ ID NO: 42058 - protein, 12 aa, synthetic construct
ALWEAPNHYKKL

SEQ ID NO: 42059 - protein, 9 aa, synthetic construct
ALWEVFNKL

SEQ ID NO: 42060 - protein, 11 aa, synthetic construct
ALWKVHYYKKL

SEQ ID NO: 42061 - protein, 12 aa, synthetic construct
ALWEASNYYKKL

SEQ ID NO: 42062 - protein, 14 aa, synthetic construct
ALWEVLELGKKISR

SEQ ID NO: 42063 - protein, 9 aa, synthetic construct
ALWKVFKKL

SEQ ID NO: 42064 - protein, 11 aa, synthetic construct
ALWEVHYYKNL

SEQ ID NO: 42065 - protein, 11 aa, synthetic construct
ALWEVHYYKNS

SEQ ID NO: 42066 - protein, 12 aa, synthetic construct
ALCEAPNYYKKL

SEQ ID NO: 42067 - protein, 9 aa, synthetic construct
VLWEVFKKL

SEQ ID NO: 42068 - protein, 12 aa, synthetic construct
ALWEAPNYDKKL

SEQ ID NO: 42069 - protein, 14 aa, synthetic construct
AWWEVLELGKKNQG

SEQ ID NO: 42070 - protein, 9 aa, synthetic construct
ALWEVFKKI

SEQ ID NO: 42071 - protein, 9 aa, synthetic construct
ALWEVFKKH

SEQ ID NO: 42072 - protein, 9 aa, synthetic construct
AVWEVFKKL

SEQ ID NO: 42073 - protein, 9 aa, synthetic construct
ALWEVFMKL

SEQ ID NO: 42074 - protein, 11 aa, synthetic construct
ALWEEVGWFKI

SEQ ID NO: 42075 - protein, 14 aa, synthetic construct
ALWEVLRLGKKIKV

SEQ ID NO: 42076 - protein, 14 aa, synthetic construct
ALWEVKELGKKIKV

SEQ ID NO: 42077 - protein, 14 aa, synthetic construct
ALWEVQELGKKIMV

SEQ ID NO: 42078 - protein, 9 aa, synthetic construct
ALWVVFKKL

SEQ ID NO: 42079 - protein, 9 aa, synthetic construct
TLWEVFKKL

SEQ ID NO: 42080 - protein, 9 aa, synthetic construct
ALWEVYKKL

SEQ ID NO: 42081 - protein, 14 aa, synthetic construct
TLWEVQELGKKIKV

SEQ ID NO: 42082 - protein, 14 aa, synthetic construct
ALWVVQELGKKIKV

SEQ ID NO: 42083 - protein, 11 aa, synthetic construct
ALWEVPYYKKL

SEQ ID NO: 42084 - protein, 12 aa, synthetic construct
ALWEVHYYYKKL

SEQ ID NO: 42085 - protein, 14 aa, synthetic construct
ALWEVQELVKKIKV

SEQ ID NO: 42086 - protein, 14 aa, synthetic construct
AWWEVQELGTKIKV

SEQ ID NO: 42087 - protein, 10 aa, synthetic construct
ALWEVHYYKK

SEQ ID NO: 42088 - protein, 14 aa, synthetic construct
ALWEVQELGQKIKV

SEQ ID NO: 42089 - protein, 14 aa, synthetic construct
ALWEVQELGKKIKG

SEQ ID NO: 42090 - protein, 11 aa, synthetic construct
ALWEVLYYKEL

SEQ ID NO: 42091 - protein, 14 aa, synthetic construct
ALWEVPELGKKIKV

SEQ ID NO: 42092 - protein, 9 aa, synthetic construct
AMWEVFKKL

SEQ ID NO: 42093 - protein, 14 aa, synthetic construct
ALGEVQELGKKIKV

SEQ ID NO: 42094 - protein, 12 aa, synthetic construct
SLWEAPNYYKKL

SEQ ID NO: 42095 - protein, 13 aa, synthetic construct
LVGGARVGQKNQG

SEQ ID NO: 42096 - protein, 14 aa, synthetic construct
ALWEVQEVGKKIKV

SEQ ID NO: 42097 - protein, 11 aa, synthetic construct
ALWEGHYYKKL

SEQ ID NO: 42098 - protein, 14 aa, synthetic construct
ALWEVQKLGKKIKV

SEQ ID NO: 42099 - protein, 14 aa, synthetic construct
ALWEVLESGKKIKV

SEQ ID NO: 42100 - protein, 11 aa, synthetic construct
ALWEVGKKIKV

SEQ ID NO: 42101 - protein, 15 aa, synthetic construct
ALWEVLELGTKKIKV

SEQ ID NO: 42102 - protein, 13 aa, synthetic construct
ALWEVLELGKKSR

SEQ ID NO: 42103 - protein, 12 aa, synthetic construct
ALWEAPNYYKNL

SEQ ID NO: 42104 - protein, 9 aa, synthetic construct
ALWEAPNYY

SEQ ID NO: 42105 - protein, 11 aa, synthetic construct
ALWEVHYYMKL

SEQ ID NO: 42106 - protein, 9 aa, synthetic construct
ALWEVIKKL

SEQ ID NO: 42107 - protein, 14 aa, synthetic construct
DLWEVQELGKKIKV

SEQ ID NO: 42108 - protein, 15 aa, synthetic construct
ALWEVLELGKKKINV

SEQ ID NO: 42109 - protein, 9 aa, synthetic construct
ALWEVLELG

SEQ ID NO: 42110 - protein, 12 aa, synthetic construct
ALWEVGHYYKKL

SEQ ID NO: 42111 - protein, 15 aa, synthetic construct
ALWEGAGVGQKKIKV

SEQ ID NO: 42112 - protein, 11 aa, synthetic construct
AWWEVHYYKTL

SEQ ID NO: 42113 - protein, 12 aa, synthetic construct
AMWEAPNYYKKL

SEQ ID NO: 42114 - protein, 15 aa, synthetic construct
ALWEVQELGKKKIKV

SEQ ID NO: 42115 - protein, 14 aa, synthetic construct
ALWEVLELGKGKSR

SEQ ID NO: 42116 - protein, 12 aa, synthetic construct
ALWESPNYYKKL

SEQ ID NO: 42117 - protein, 14 aa, synthetic construct
ALWEVQELGKKITV

SEQ ID NO: 42118 - protein, 14 aa, synthetic construct
ALWEMLELGKKNQG

SEQ ID NO: 42119 - protein, 14 aa, synthetic construct
ASWEVLELGKKIKV

SEQ ID NO: 42120 - protein, 13 aa, synthetic construct
ALWEVRELGKKSR

SEQ ID NO: 42121 - protein, 14 aa, synthetic construct
ALWEVQDLGKKIKV

SEQ ID NO: 42122 - protein, 14 aa, synthetic construct
ALWEVLELGKKSQG

SEQ ID NO: 42123 - protein, 9 aa, synthetic construct
ALWEVVKKL

SEQ ID NO: 42124 - protein, 15 aa, synthetic construct
ALWEVLELGKKKIKA

SEQ ID NO: 42125 - protein, 9 aa, synthetic construct
ALWEVFKNL

SEQ ID NO: 42126 - protein, 14 aa, synthetic construct
AFWEVQELGKKIKV

SEQ ID NO: 42127 - protein, 11 aa, synthetic construct
AFWEVHYYKKL

SEQ ID NO: 42128 - protein, 15 aa, synthetic construct
AWWEVLELGKKKIKV

SEQ ID NO: 42129 - protein, 12 aa, synthetic construct
TLWEAPNYYKKL

SEQ ID NO: 42130 - protein, 15 aa, synthetic construct
ALREVLELGKKKIKV

SEQ ID NO: 42131 - protein, 9 aa, synthetic construct
GLWEVFKKL

SEQ ID NO: 42132 - protein, 9 aa, synthetic construct
PCGSCLRNS

SEQ ID NO: 42133 - protein, 12 aa, synthetic construct
ALWEAPNYYKKF

SEQ ID NO: 42134 - protein, 14 aa, synthetic construct
ALWAVQELGKKIKV

SEQ ID NO: 42135 - protein, 14 aa, synthetic construct
ALREVLELGKKNQG

SEQ ID NO: 42136 - protein, 11 aa, synthetic construct
ALWDVHYYEKL

SEQ ID NO: 42137 - protein, 14 aa, synthetic construct
SLWEVQELGKKIKV

SEQ ID NO: 42138 - protein, 14 aa, synthetic construct
ALWEVLELGKKNSR

SEQ ID NO: 42139 - protein, 9 aa, synthetic construct
ALWEVHYYK

SEQ ID NO: 42140 - protein, 12 aa, synthetic construct
ALWEAPNYYKTL

SEQ ID NO: 42141 - protein, 15 aa, synthetic construct
ALWEVLELGKKKIKL

SEQ ID NO: 42142 - protein, 9 aa, synthetic construct
ALWEVFKKF

SEQ ID NO: 42143 - protein, 8 aa, synthetic construct
ALWEVFKI

SEQ ID NO: 42144 - protein, 14 aa, synthetic construct
ALWEVQVLGKKIKV

SEQ ID NO: 42145 - protein, 12 aa, synthetic construct
ALWEAPNYYQKL

SEQ ID NO: 42146 - protein, 14 aa, synthetic construct
ALWEVLELGNKNQG

SEQ ID NO: 42147 - protein, 14 aa, synthetic construct
ALWEVQEFGKKIMV

SEQ ID NO: 42148 - protein, 12 aa, synthetic construct
ALWETPNYYKKL

SEQ ID NO: 42149 - protein, 15 aa, synthetic construct
AWWEVLELGTKKIKV

SEQ ID NO: 42150 - protein, 14 aa, synthetic construct
ALWEVLELGKKNKG

SEQ ID NO: 42151 - protein, 15 aa, synthetic construct
ALWEVLELGKKKKKV

SEQ ID NO: 42152 - protein, 13 aa, synthetic construct
ALWEVQELGKKIK

SEQ ID NO: 42153 - protein, 14 aa, synthetic construct
ALLEVQELGKKIKA

SEQ ID NO: 42154 - protein, 15 aa, synthetic construct
ALWEVLELGKKKNKV

SEQ ID NO: 42155 - protein, 14 aa, synthetic construct
ASWEVLELGKKNQG

SEQ ID NO: 42156 - protein, 12 aa, synthetic construct
ALWEAPYYYKKL

SEQ ID NO: 42157 - protein, 12 aa, synthetic construct
ALWQAPNYYKKL

SEQ ID NO: 42158 - protein, 12 aa, synthetic construct
ALWEVQELGKKI

SEQ ID NO: 42159 - protein, 14 aa, synthetic construct
ALWEVLGLGKKIKV

SEQ ID NO: 42160 - protein, 11 aa, synthetic construct
ALWEVPWWFKI

SEQ ID NO: 42161 - protein, 15 aa, synthetic construct
ALWEVRELGKKKIKV

SEQ ID NO: 42162 - protein, 14 aa, synthetic construct
ALWEVLELAKKIKV

SEQ ID NO: 42163 - protein, 11 aa, synthetic construct
ALCEVHYNKKL

SEQ ID NO: 42164 - protein, 11 aa, synthetic construct
ALWEVHYYRNS

SEQ ID NO: 42165 - protein, 9 aa, synthetic construct
ALWEMFKKL

SEQ ID NO: 42166 - protein, 14 aa, synthetic construct
ALWEVLELGEKNQG

SEQ ID NO: 42167 - protein, 12 aa, synthetic construct
DLWEAPNYYKKL

SEQ ID NO: 42168 - protein, 15 aa, synthetic construct
ALWEVLEFGKKKIKV

SEQ ID NO: 42169 - protein, 14 aa, synthetic construct
ALWEVLELGKKTKV

SEQ ID NO: 42170 - protein, 14 aa, synthetic construct
ALWEVLELGKTKSR

SEQ ID NO: 42171 - protein, 14 aa, synthetic construct
ALWEVLELGKIKSR

SEQ ID NO: 42172 - protein, 12 aa, synthetic construct
AFWEAPNYYKKL

SEQ ID NO: 42173 - protein, 14 aa, synthetic construct
PCGRCWSWAKKIKV

SEQ ID NO: 42174 - protein, 14 aa, synthetic construct
ALWEVQELGTKIKL

SEQ ID NO: 42175 - protein, 12 aa, synthetic construct
ALWEEVVQKIKV

SEQ ID NO: 42176 - protein, 14 aa, synthetic construct
ALWEVLELGKNKSR

SEQ ID NO: 42177 - protein, 7 aa, synthetic construct
ALWEVHY

SEQ ID NO: 42178 - protein, 11 aa, synthetic construct
ALWEVLYYKKL

SEQ ID NO: 42179 - protein, 14 aa, synthetic construct
AVWEVQELGTKIKV

SEQ ID NO: 42180 - protein, 15 aa, synthetic construct
ALWEVLELGKKIIKV

SEQ ID NO: 42181 - protein, 8 aa, synthetic construct
ALWEAPNY

SEQ ID NO: 42182 - protein, 11 aa, synthetic construct
PCGRCTIIRNP

SEQ ID NO: 42183 - protein, 14 aa, synthetic construct
ALWEVLELGKKKSM

SEQ ID NO: 42184 - protein, 11 aa, synthetic construct
ALWEVHNNKKL

SEQ ID NO: 42185 - protein, 14 aa, synthetic construct
ASLEVQELGKKIKV

SEQ ID NO: 42186 - protein, 14 aa, synthetic construct
ALWEVQELGIKIKV

SEQ ID NO: 42187 - protein, 14 aa, synthetic construct
ALWEVRELGKKNQG

SEQ ID NO: 42188 - protein, 12 aa, synthetic construct
ALWEAPHYYKKL

SEQ ID NO: 42189 - protein, 12 aa, synthetic construct
ALWGAPNYDKKL

SEQ ID NO: 42190 - protein, 8 aa, synthetic construct
ALWEVQEL

SEQ ID NO: 42191 - protein, 11 aa, synthetic construct
ALWEVHYHQKL

SEQ ID NO: 42192 - protein, 11 aa, synthetic construct
ALWEAGQKIKV

SEQ ID NO: 42193 - protein, 12 aa, synthetic construct
ALWVAPNYYKKL

SEQ ID NO: 42194 - protein, 12 aa, synthetic construct
ALWEAPNYSKKL

SEQ ID NO: 42195 - protein, 11 aa, synthetic construct
ALWEAPNYYKI

SEQ ID NO: 42196 - protein, 14 aa, synthetic construct
ALWEVHELGKKIKG

SEQ ID NO: 42197 - protein, 14 aa, synthetic construct
PCGRCWSWAKKNQG

SEQ ID NO: 42198 - protein, 14 aa, synthetic construct
ALWEVPELGKKKSR

SEQ ID NO: 42199 - protein, 15 aa, synthetic construct
ALWEVPELGKKKIKV

SEQ ID NO: 42200 - protein, 11 aa, synthetic construct
ALWEVTYYKKL

SEQ ID NO: 42201 - protein, 14 aa, synthetic construct
PCGRCKSWAKKSRS

SEQ ID NO: 42202 - protein, 12 aa, synthetic construct
ALWEAPNYYKQL

SEQ ID NO: 42203 - protein, 12 aa, synthetic construct
ALWEAPNYYMKL

SEQ ID NO: 42204 - protein, 11 aa, synthetic construct
ALWEVHYYTKL

SEQ ID NO: 42205 - protein, 11 aa, synthetic construct
ALWEVPCWFKI

SEQ ID NO: 42206 - protein, 12 aa, synthetic construct
ALWEAPNYYTKL

SEQ ID NO: 42207 - protein, 11 aa, synthetic construct
ALWEVNYYKNL

SEQ ID NO: 42208 - protein, 12 aa, synthetic construct
ALWEAPNSYKKL

SEQ ID NO: 42209 - protein, 15 aa, synthetic construct
ALWEVLELGKKKIEV

SEQ ID NO: 42210 - protein, 14 aa, synthetic construct
ALWEVQELGKKFKV

SEQ ID NO: 42211 - protein, 14 aa, synthetic construct
ALWEVHELGKKIEV

SEQ ID NO: 42212 - protein, 14 aa, synthetic construct
ALWEVQELGKKKQG

SEQ ID NO: 42213 - protein, 15 aa, synthetic construct
ALWEVQELGKKKSRS

SEQ ID NO: 42214 - protein, 14 aa, synthetic construct
ALWEVEELGKKIKV

SEQ ID NO: 42215 - protein, 14 aa, synthetic construct
ALWEVQELGKKNKV

SEQ ID NO: 42216 - protein, 14 aa, synthetic construct
ALWEVLELGTKIKV

SEQ ID NO: 42217 - protein, 13 aa, synthetic construct
ALWEEQELAKKSR

SEQ ID NO: 42218 - protein, 15 aa, synthetic construct
ALWEVLELGKKRIKV

SEQ ID NO: 42219 - protein, 11 aa, synthetic construct
ALCEVNYYKKL

SEQ ID NO: 42220 - protein, 14 aa, synthetic construct
ALCEVLELGKKNQG

SEQ ID NO: 42221 - protein, 14 aa, synthetic construct
ALWEVQEWGKKIKV

SEQ ID NO: 42222 - protein, 12 aa, synthetic construct
GLWEAPNYYKKL

SEQ ID NO: 42223 - protein, 9 aa, synthetic construct
ALCEVFNKL

SEQ ID NO: 42224 - protein, 14 aa, synthetic construct
ALWEVLELGKKTSR

SEQ ID NO: 42225 - protein, 15 aa, synthetic construct
ALWEVLELGRKKIKV

SEQ ID NO: 42226 - protein, 14 aa, synthetic construct
ALWEVQEMGTKIKV

SEQ ID NO: 42227 - protein, 15 aa, synthetic construct
ALWEVLELGQKKIKV

SEQ ID NO: 42228 - protein, 12 aa, synthetic construct
ALWEEVGHKIKV

SEQ ID NO: 42229 - protein, 12 aa, synthetic construct
ALWKAPNYYKKL

SEQ ID NO: 42230 - protein, 14 aa, synthetic construct
AVWEVLELGKKNQG

SEQ ID NO: 42231 - protein, 14 aa, synthetic construct
ALWEVLELGKRNQG

SEQ ID NO: 42232 - protein, 14 aa, synthetic construct
VLWEVLELGKKNQG

SEQ ID NO: 42233 - protein, 9 aa, synthetic construct
AFWEVFKKL

SEQ ID NO: 42234 - protein, 14 aa, synthetic construct
ALWEVQELGTKIKE

SEQ ID NO: 42235 - protein, 14 aa, synthetic construct
ALWEVQELGTKINV

SEQ ID NO: 42236 - protein, 12 aa, synthetic construct
ALWEEVGQKIKV

SEQ ID NO: 42237 - protein, 14 aa, synthetic construct
AVWEVQELGKKITV

SEQ ID NO: 42238 - protein, 13 aa, synthetic construct
ALWEEVGQKKIKL

SEQ ID NO: 42239 - protein, 13 aa, synthetic construct
LVGGAGVGQKKSR

SEQ ID NO: 42240 - protein, 8 aa, synthetic construct
ALWEVFKK

SEQ ID NO: 42241 - protein, 11 aa, synthetic construct
DLWELHYYKKL

SEQ ID NO: 42242 - protein, 12 aa, synthetic construct
ALWEDPNYYKKI

SEQ ID NO: 42243 - protein, 9 aa, synthetic construct
ALGEVFKKL

SEQ ID NO: 42244 - protein, 15 aa, synthetic construct
ALLEVLELGKKKIKV

SEQ ID NO: 42245 - protein, 12 aa, synthetic construct
ALLEAPNYYKKP

SEQ ID NO: 42246 - protein, 14 aa, synthetic construct
ALWEVLELGKKNKC

SEQ ID NO: 42247 - protein, 11 aa, synthetic construct
DLWEVNYYKKL

SEQ ID NO: 42248 - protein, 11 aa, synthetic construct
ALWEVQELGKK

SEQ ID NO: 42249 - protein, 9 aa, synthetic construct
SLWEVFKKL

SEQ ID NO: 42250 - protein, 9 aa, synthetic construct
ALWEVFTKL

SEQ ID NO: 42251 - protein, 14 aa, synthetic construct
ALWEVQELGKIIKV

SEQ ID NO: 42252 - protein, 11 aa, synthetic construct
ALWEVGQKKIK

SEQ ID NO: 42253 - protein, 14 aa, synthetic construct
ASWEVPWLGKKIKV

SEQ ID NO: 42254 - protein, 11 aa, synthetic construct
ALWEVQYYKTL

SEQ ID NO: 42255 - protein, 13 aa, synthetic construct
ALWEVQELGKKIR

SEQ ID NO: 42256 - protein, 12 aa, synthetic construct
ALGEAPNYYKKL

SEQ ID NO: 42257 - protein, 15 aa, synthetic construct
ALWEVLELGKKKVKV

SEQ ID NO: 42258 - protein, 14 aa, synthetic construct
ALWEVLELGTKKSR

SEQ ID NO: 42259 - protein, 9 aa, synthetic construct
ASWGVFKKL

SEQ ID NO: 42260 - protein, 9 aa, synthetic construct
ALWAVFKKL

SEQ ID NO: 42261 - protein, 14 aa, synthetic construct
AWWEVLELGKKIKV

SEQ ID NO: 42262 - protein, 14 aa, synthetic construct
ALWGVLELGKKKSR

SEQ ID NO: 42263 - protein, 11 aa, synthetic construct
PCGRCAIIRNS

SEQ ID NO: 42264 - protein, 14 aa, synthetic construct
ALWGVLELGKKRSR

SEQ ID NO: 42265 - protein, 11 aa, synthetic construct
ALWGVHSYKKL

SEQ ID NO: 42266 - protein, 13 aa, synthetic construct
PCGRCKSWAIKSR

SEQ ID NO: 42267 - protein, 14 aa, synthetic construct
ALWGVQELGKKIKL

SEQ ID NO: 42268 - protein, 11 aa, synthetic construct
PCGKLGKKKSR

SEQ ID NO: 42269 - protein, 7 aa, synthetic construct
PCGRCLR

SEQ ID NO: 42270 - protein, 11 aa, synthetic construct
ALWGVHYYKRL

SEQ ID NO: 42271 - protein, 14 aa, synthetic construct
ALWGVLELGKKIKV

SEQ ID NO: 42272 - protein, 11 aa, synthetic construct
ALWGVHYYKEL

SEQ ID NO: 42273 - protein, 11 aa, synthetic construct
ALWGVHYYKTL

SEQ ID NO: 42274 - protein, 11 aa, synthetic construct
ALWGVNYYKKL

SEQ ID NO: 42275 - protein, 11 aa, synthetic construct
ALWGVLYYKEL

SEQ ID NO: 42276 - protein, 14 aa, synthetic construct
ALWGVLELGKKNQG

SEQ ID NO: 42277 - protein, 13 aa, synthetic construct
PCGRCKSWAKKSM

SEQ ID NO: 42278 - protein, 12 aa, synthetic construct
AVWGAPNYYKKL

SEQ ID NO: 42279 - protein, 11 aa, synthetic construct
ALWGVHDYKKL

SEQ ID NO: 42280 - protein, 11 aa, synthetic construct
ALWGVDYCRKV

SEQ ID NO: 42281 - protein, 13 aa, synthetic construct
PRGRCKSWAKKSR

SEQ ID NO: 42282 - protein, 13 aa, synthetic construct
PSGRRKSWAKKSR

SEQ ID NO: 42283 - protein, 14 aa, synthetic construct
SLWEMQELVKKIKV

SEQ ID NO: 42284 - protein, 11 aa, synthetic construct
SLWEVHYNKKL

SEQ ID NO: 42285 - protein, 11 aa, synthetic construct
SLWEVQYYKKL

SEQ ID NO: 42286 - protein, 11 aa, synthetic construct
ALWEVQYYKEL

SEQ ID NO: 42287 - protein, 11 aa, synthetic construct
ALWEVQYYEKL

SEQ ID NO: 42288 - protein, 11 aa, synthetic construct
TLWEVHYYRKL

SEQ ID NO: 42289 - protein, 14 aa, synthetic construct
TLWEVLELGKKIKV

SEQ ID NO: 42290 - protein, 14 aa, synthetic construct
ALWEVQGLGKRIKV

SEQ ID NO: 42291 - protein, 14 aa, synthetic construct
TLWEVLELGKRKSR

SEQ ID NO: 42292 - protein, 14 aa, synthetic construct
ALWEVQEVGRKIEV

SEQ ID NO: 42293 - protein, 14 aa, synthetic construct
TLWEVQELGKRIKV

SEQ ID NO: 42294 - protein, 14 aa, synthetic construct
ALWEVQESGTKIKV

SEQ ID NO: 42295 - protein, 14 aa, synthetic construct
TVWEVQELGTKIKV

SEQ ID NO: 42296 - protein, 12 aa, synthetic construct
VLWEAPDYYKKL

SEQ ID NO: 42297 - protein, 12 aa, synthetic construct
ALWEVQESGKKI

SEQ ID NO: 42298 - protein, 14 aa, synthetic construct
ALWEVQEPGKKIKV

SEQ ID NO: 42299 - protein, 14 aa, synthetic construct
VLWEVKELGKKIKV

SEQ ID NO: 42300 - protein, 15 aa, synthetic construct
VLWEVLELGKKKIKV

SEQ ID NO: 42301 - protein, 14 aa, synthetic construct
ALWEVQELSNKIKV

SEQ ID NO: 42302 - protein, 14 aa, synthetic construct
ALWEVQELGTRIKV

SEQ ID NO: 42303 - protein, 14 aa, synthetic construct
ALWEVQELGTNNKE

SEQ ID NO: 42304 - protein, 11 aa, synthetic construct
PLWEVHYYKKL

SEQ ID NO: 42305 - protein, 12 aa, synthetic construct
PLWEAPNYYKKL

SEQ ID NO: 42306 - protein, 12 aa, synthetic construct
PLREAPNYYKKL

SEQ ID NO: 42307 - protein, 11 aa, synthetic construct
PCVRCIIIRNS

SEQ ID NO: 42308 - protein, 12 aa, synthetic construct
ALWGAPNYYNKL

SEQ ID NO: 42309 - protein, 11 aa, synthetic construct
ALWEVYYYKRL

SEQ ID NO: 42310 - protein, 14 aa, synthetic construct
PCGRCTSWAKKSRS

SEQ ID NO: 42311 - protein, 14 aa, synthetic construct
PCGRCWSWAKENQG

SEQ ID NO: 42312 - protein, 12 aa, synthetic construct
ALWEVVQKKIKV

SEQ ID NO: 42313 - protein, 14 aa, synthetic construct
PCGRCWSWAKKSQG

SEQ ID NO: 42314 - protein, 14 aa, synthetic construct
PCGRCWSWAKRNQG

SEQ ID NO: 42315 - protein, 12 aa, synthetic construct
PCGRHRIIIRNS

SEQ ID NO: 42316 - protein, 9 aa, synthetic construct
ALWEVVEKL

SEQ ID NO: 42317 - protein, 12 aa, synthetic construct
PCGRPRLILRNS

SEQ ID NO: 42318 - protein, 9 aa, synthetic construct
PCVRCLRNS

SEQ ID NO: 42319 - protein, 15 aa, synthetic construct
ALWEVRELGKKKIKG

SEQ ID NO: 42320 - protein, 13 aa, synthetic construct
LCGRCKSWAKKSR

SEQ ID NO: 42321 - protein, 11 aa, synthetic construct
ALWEVRQKNKL

SEQ ID NO: 42322 - protein, 11 aa, synthetic construct
PCWRCIIIRNS

SEQ ID NO: 42323 - protein, 14 aa, synthetic construct
ALWEVRESGKKIKV

SEQ ID NO: 42324 - protein, 14 aa, synthetic construct
ALWEVRESGEKIKV

SEQ ID NO: 42325 - protein, 12 aa, synthetic construct
PCWRPRNNIINS

SEQ ID NO: 42326 - protein, 14 aa, synthetic construct
ALWEVRELGNKIKV

SEQ ID NO: 42327 - protein, 11 aa, synthetic construct
PGGRCARVRDS

SEQ ID NO: 42328 - protein, 14 aa, synthetic construct
ALWEVRELGKKKSR

SEQ ID NO: 42329 - protein, 11 aa, synthetic construct
PGGRCIIIRNS

SEQ ID NO: 42330 - protein, 11 aa, synthetic construct
PCWELLRKKLG

SEQ ID NO: 42331 - protein, 14 aa, synthetic construct
DLWEVLELGKKISR

SEQ ID NO: 42332 - protein, 14 aa, synthetic construct
ALWGVQELGKKINV

SEQ ID NO: 42333 - protein, 11 aa, synthetic construct
ASWGVHYYKEL

SEQ ID NO: 42334 - protein, 11 aa, synthetic construct
AWWAVHYYKKL

SEQ ID NO: 42335 - protein, 11 aa, synthetic construct
AWWAVHYYKTL

SEQ ID NO: 42336 - protein, 12 aa, synthetic construct
AWWEAPNYEKNL

SEQ ID NO: 42337 - protein, 12 aa, synthetic construct
AWWEAPNYYKKL

SEQ ID NO: 42338 - protein, 14 aa, synthetic construct
ASWEVQKLGKKIKV

SEQ ID NO: 42339 - protein, 12 aa, synthetic construct
AWWEAPNYYKNL

SEQ ID NO: 42340 - protein, 14 aa, synthetic construct
ALWEVQELGTKNQG

SEQ ID NO: 42341 - protein, 12 aa, synthetic construct
AWWEASNYYKKL

SEQ ID NO: 42342 - protein, 14 aa, synthetic construct
ASWEVQGLGKKIKV

SEQ ID NO: 42343 - protein, 9 aa, synthetic construct
AWWEEFNKL

SEQ ID NO: 42344 - protein, 15 aa, synthetic construct
AWWEGAGVGQKKIKV

SEQ ID NO: 42345 - protein, 13 aa, synthetic construct
ASWEVQELGKKTR

SEQ ID NO: 42346 - protein, 9 aa, synthetic construct
AWWEGFKKL

SEQ ID NO: 42347 - protein, 9 aa, synthetic construct
AWWEVCKKL

SEQ ID NO: 42348 - protein, 14 aa, synthetic construct
ASWEVQELGKKKSR

SEQ ID NO: 42349 - protein, 14 aa, synthetic construct
ASWEVQELGKKKSM

SEQ ID NO: 42350 - protein, 9 aa, synthetic construct
AWWEVFNKL

SEQ ID NO: 42351 - protein, 14 aa, synthetic construct
ASWEVQELGKKIKL

SEQ ID NO: 42352 - protein, 11 aa, synthetic construct
AWWEVGKKIKV

SEQ ID NO: 42353 - protein, 14 aa, synthetic construct
AWWEVHELGKKIKV

SEQ ID NO: 42354 - protein, 15 aa, synthetic construct
ASWEVLELGKKKIKV

SEQ ID NO: 42355 - protein, 14 aa, synthetic construct
AWWEVHESGKKIKV

SEQ ID NO: 42356 - protein, 8 aa, synthetic construct
ASWEVLEL

SEQ ID NO: 42357 - protein, 11 aa, synthetic construct
AWWEVHYNKKL

SEQ ID NO: 42358 - protein, 11 aa, synthetic construct
AWWEVKYYKKL

SEQ ID NO: 42359 - protein, 14 aa, synthetic construct
ASWEVHELGKKIKV

SEQ ID NO: 42360 - protein, 11 aa, synthetic construct
AWWEVLDCEKL

SEQ ID NO: 42361 - protein, 14 aa, synthetic construct
AWWEVLELGKKNSR

SEQ ID NO: 42362 - protein, 12 aa, synthetic construct
ASWEAPNSYKKL

SEQ ID NO: 42363 - protein, 15 aa, synthetic construct
AWSEVLELGKKKIKV

SEQ ID NO: 42364 - protein, 11 aa, synthetic construct
AVLEVHYYKKL

SEQ ID NO: 42365 - protein, 14 aa, synthetic construct
ALWGVQELGKKNQG

SEQ ID NO: 42366 - protein, 9 aa, synthetic construct
AVREVFKKL

SEQ ID NO: 42367 - protein, 14 aa, synthetic construct
AVWEVQELGQQIKV

SEQ ID NO: 42368 - protein, 14 aa, synthetic construct
AVWEVQELGPQIKV

SEQ ID NO: 42369 - protein, 11 aa, synthetic construct
AVWGVHYYKKL

SEQ ID NO: 42370 - protein, 14 aa, synthetic construct
AVWEVQELGKKIKG

SEQ ID NO: 42371 - protein, 11 aa, synthetic construct
AVWEVNYYKKL

SEQ ID NO: 42372 - protein, 14 aa, synthetic construct
AVWVVLEVGKKIKV

SEQ ID NO: 42373 - protein, 14 aa, synthetic construct
AVWEVLELGTKNQG

SEQ ID NO: 42374 - protein, 14 aa, synthetic construct
AVWEVLELGTKNPG

SEQ ID NO: 42375 - protein, 14 aa, synthetic construct
AVWEVLELGTKIKV

SEQ ID NO: 42376 - protein, 14 aa, synthetic construct
AVWEVLELGKRKSR

SEQ ID NO: 42377 - protein, 15 aa, synthetic construct
AVWEVLELGKKKIKV

SEQ ID NO: 42378 - protein, 11 aa, synthetic construct
AVWEVHYYKTL

SEQ ID NO: 42379 - protein, 11 aa, synthetic construct
AVWEVHYHKKL

SEQ ID NO: 42380 - protein, 14 aa, synthetic construct
AVWEVHELGKKITV

SEQ ID NO: 42381 - protein, 9 aa, synthetic construct
AVWEVFKTL

SEQ ID NO: 42382 - protein, 9 aa, synthetic construct
AVWEVFKNL

SEQ ID NO: 42383 - protein, 11 aa, synthetic construct
AWCEVHYYKKL

SEQ ID NO: 42384 - protein, 13 aa, synthetic construct
AVWEEVGQKKIKG

SEQ ID NO: 42385 - protein, 14 aa, synthetic construct
AWGEVLELGKKIKV

SEQ ID NO: 42386 - protein, 12 aa, synthetic construct
AVWEAPTYYKKL

SEQ ID NO: 42387 - protein, 14 aa, synthetic construct
AWGEVQELGTKIKG

SEQ ID NO: 42388 - protein, 12 aa, synthetic construct
AWGGEVGKKINV

SEQ ID NO: 42389 - protein, 12 aa, synthetic construct
AVWEAPNYYKKL

SEQ ID NO: 42390 - protein, 12 aa, synthetic construct
AVWEAPNYCKKL

SEQ ID NO: 42391 - protein, 11 aa, synthetic construct
AVWEAHYYKKL

SEQ ID NO: 42392 - protein, 9 aa, synthetic construct
AVWAVCKKL

SEQ ID NO: 42393 - protein, 9 aa, synthetic construct
AWREVFKKL

SEQ ID NO: 42394 - protein, 11 aa, synthetic construct
AVSEVHYYKKL

SEQ ID NO: 42395 - protein, 11 aa, synthetic construct
AVREVHSYKKL

SEQ ID NO: 42396 - protein, 12 aa, synthetic construct
ASWEAPKYYKKL

SEQ ID NO: 42397 - protein, 12 aa, synthetic construct
ASREAPNYYKKL

SEQ ID NO: 42398 - protein, 14 aa, synthetic construct
AWWEVLELGKKRSR

SEQ ID NO: 42399 - protein, 14 aa, synthetic construct
ARWEVQEWGKKITG

SEQ ID NO: 42400 - protein, 15 aa, synthetic construct
ALWVVLELGKKKIKV

SEQ ID NO: 42401 - protein, 12 aa, synthetic construct
DLWEAPKDYKKL

SEQ ID NO: 42402 - protein, 14 aa, synthetic construct
ALWVVLELGKKIKV

SEQ ID NO: 42403 - protein, 12 aa, synthetic construct
DLWEAPNYYNKL

SEQ ID NO: 42404 - protein, 12 aa, synthetic construct
DLWEATNYYKKL

SEQ ID NO: 42405 - protein, 11 aa, synthetic construct
ALWVVHYCKKL

SEQ ID NO: 42406 - protein, 9 aa, synthetic construct
DLWEVFRKL

SEQ ID NO: 42407 - protein, 11 aa, synthetic construct
DLWEVHHNKTL

SEQ ID NO: 42408 - protein, 14 aa, synthetic construct
ALWVAQELGKKIKV

SEQ ID NO: 42409 - protein, 11 aa, synthetic construct
DLWEVHYNKKL

SEQ ID NO: 42410 - protein, 12 aa, synthetic construct
ALWVAPNYYKKI

SEQ ID NO: 42411 - protein, 12 aa, synthetic construct
ALWVAPNYSKKL

SEQ ID NO: 42412 - protein, 11 aa, synthetic construct
DLWEVHYYNKL

SEQ ID NO: 42413 - protein, 14 aa, synthetic construct
DLWEVKELGKKIKL

SEQ ID NO: 42414 - protein, 12 aa, synthetic construct
ALWRKVGKKIKV

SEQ ID NO: 42415 - protein, 14 aa, synthetic construct
DLWEVLELGKKNQG

SEQ ID NO: 42416 - protein, 14 aa, synthetic construct
DLWEVLELGNKKSR

SEQ ID NO: 42417 - protein, 11 aa, synthetic construct
ALWQVHYYKKL

SEQ ID NO: 42418 - protein, 9 aa, synthetic construct
ALWQVFKKL

SEQ ID NO: 42419 - protein, 13 aa, synthetic construct
ALWKVQELGKKSR

SEQ ID NO: 42420 - protein, 12 aa, synthetic construct
DMWEAPNYYKKL

SEQ ID NO: 42421 - protein, 14 aa, synthetic construct
ELWEFLELGKKNQV

SEQ ID NO: 42422 - protein, 11 aa, synthetic construct
ALWKMHYYKKL

SEQ ID NO: 42423 - protein, 11 aa, synthetic construct
ALWKLGKNIKV

SEQ ID NO: 42424 - protein, 11 aa, synthetic construct
ALWKLGKKTKV

SEQ ID NO: 42425 - protein, 9 aa, synthetic construct
GLWEVLKKL

SEQ ID NO: 42426 - protein, 11 aa, synthetic construct
ALWKLGKKIKA

SEQ ID NO: 42427 - protein, 14 aa, synthetic construct
GLWEVQELGKKIKV

SEQ ID NO: 42428 - protein, 14 aa, synthetic construct
ALWGVQELGNKIKV

SEQ ID NO: 42429 - protein, 14 aa, synthetic construct
ALWVVLGLGKKIKV

SEQ ID NO: 42430 - protein, 11 aa, synthetic construct
DLLEVHYYKKL

SEQ ID NO: 42431 - protein, 14 aa, synthetic construct
DLCEVQELGKKIKV

SEQ ID NO: 42432 - protein, 14 aa, synthetic construct
AWWEVQELGKKIKG

SEQ ID NO: 42433 - protein, 14 aa, synthetic construct
AWWEVLELGKQKSR

SEQ ID NO: 42434 - protein, 14 aa, synthetic construct
ARWEVQELGKKIKF

SEQ ID NO: 42435 - protein, 11 aa, synthetic construct
ARGGVHYYKKL

SEQ ID NO: 42436 - protein, 13 aa, synthetic construct
AMWEVQELGKKSR

SEQ ID NO: 42437 - protein, 14 aa, synthetic construct
AWWEVLELGKRKSR

SEQ ID NO: 42438 - protein, 14 aa, synthetic construct
AWWEVLELGNKKSR

SEQ ID NO: 42439 - protein, 14 aa, synthetic construct
AMWEVLELGTKNQG

SEQ ID NO: 42440 - protein, 14 aa, synthetic construct
AWWEVLELGTKNQG

SEQ ID NO: 42441 - protein, 14 aa, synthetic construct
AWWEVLELGTNNSK

SEQ ID NO: 42442 - protein, 14 aa, synthetic construct
AMWEVLELGKKNQG

SEQ ID NO: 42443 - protein, 14 aa, synthetic construct
AMWEVLELGKKKSR

SEQ ID NO: 42444 - protein, 11 aa, synthetic construct
AMWEVHYNKKL

SEQ ID NO: 42445 - protein, 11 aa, synthetic construct
AMWELHYYKKL

SEQ ID NO: 42446 - protein, 14 aa, synthetic construct
AWWEVQELGKKIKL

SEQ ID NO: 42447 - protein, 14 aa, synthetic construct
AWWVVQELGKKIKV

SEQ ID NO: 42448 - protein, 14 aa, synthetic construct
AMREVQELGTKIKV

SEQ ID NO: 42449 - protein, 13 aa, synthetic construct
AWWEVQELGKKSR

SEQ ID NO: 42450 - protein, 14 aa, synthetic construct
AWWEVQELGKNIKV

SEQ ID NO: 42451 - protein, 14 aa, synthetic construct
AWWEVQELVKKIMV

SEQ ID NO: 42452 - protein, 14 aa, synthetic construct
AWWEVQEVGKEITV

SEQ ID NO: 42453 - protein, 11 aa, synthetic construct
AMREVHYYKKL

SEQ ID NO: 42454 - protein, 14 aa, synthetic construct
AWWEVQGLGKKIKV

SEQ ID NO: 42455 - protein, 12 aa, synthetic construct
AMREAPNYYKKL

SEQ ID NO: 42456 - protein, 11 aa, synthetic construct
AWWEVQYYKKL

SEQ ID NO: 42457 - protein, 14 aa, synthetic construct
ALWWVQELGKKIKV

SEQ ID NO: 42458 - protein, 11 aa, synthetic construct
AWWGVHYYQKL

SEQ ID NO: 42459 - protein, 11 aa, synthetic construct
AWWKLGKKIKV

SEQ ID NO: 42460 - protein, 14 aa, synthetic construct
ALWVVQELGKKINV

SEQ ID NO: 42461 - protein, 13 aa, synthetic construct
ALWEVQELGTKSR

SEQ ID NO: 42462 - protein, 11 aa, synthetic construct
ACGRYRGWFKK

SEQ ID NO: 42463 - protein, 14 aa, synthetic construct
ALWEVQELGTKKSR

SEQ ID NO: 42464 - protein, 12 aa, synthetic construct
ALWEAPNYYKIL

SEQ ID NO: 42465 - protein, 12 aa, synthetic construct
ALWEAPNYYKKH

SEQ ID NO: 42466 - protein, 12 aa, synthetic construct
ALWEAPNYYKKR

SEQ ID NO: 42467 - protein, 12 aa, synthetic construct
ALWEAPNYYKNS

SEQ ID NO: 42468 - protein, 12 aa, synthetic construct
ALWEAPTYEKKL

SEQ ID NO: 42469 - protein, 12 aa, synthetic construct
ALWEAPTYSKKL

SEQ ID NO: 42470 - protein, 12 aa, synthetic construct
ALWEAPTYYKKI

SEQ ID NO: 42471 - protein, 12 aa, synthetic construct
ALWEAPTYYKRL

SEQ ID NO: 42472 - protein, 12 aa, synthetic construct
ALWEAPTYYQKL

SEQ ID NO: 42473 - protein, 14 aa, synthetic construct
ALWEAQELGKEIKV

SEQ ID NO: 42474 - protein, 14 aa, synthetic construct
ALWEAQELGKKIKE

SEQ ID NO: 42475 - protein, 14 aa, synthetic construct
ALWEAQELGKKIKL

SEQ ID NO: 42476 - protein, 14 aa, synthetic construct
ALWEAQELGKKINL

SEQ ID NO: 42477 - protein, 14 aa, synthetic construct
ALWEAQELGKKNQG

SEQ ID NO: 42478 - protein, 14 aa, synthetic construct
ALWEAQELGTKIKV

SEQ ID NO: 42479 - protein, 12 aa, synthetic construct
ALWEAQNYYKKL

SEQ ID NO: 42480 - protein, 11 aa, synthetic construct
ALWEAPNYYKK

SEQ ID NO: 42481 - protein, 10 aa, synthetic construct
ALWEAPNYYK

SEQ ID NO: 42482 - protein, 9 aa, synthetic construct
ALWEAFKEL

SEQ ID NO: 42483 - protein, 12 aa, synthetic construct
ALWEAPNYFKKL

SEQ ID NO: 42484 - protein, 15 aa, synthetic construct
ALWEALELGKKKIKV

SEQ ID NO: 42485 - protein, 14 aa, synthetic construct
ALWEALELGKKNQG

SEQ ID NO: 42486 - protein, 12 aa, synthetic construct
ALWEALNYYKKL

SEQ ID NO: 42487 - protein, 14 aa, synthetic construct
ALWEALRLGKKIKV

SEQ ID NO: 42488 - protein, 12 aa, synthetic construct
ALWEAPHDYKKL

SEQ ID NO: 42489 - protein, 12 aa, synthetic construct
ALWEAPKEDKKL

SEQ ID NO: 42490 - protein, 12 aa, synthetic construct
ALWEAPKNYKKL

SEQ ID NO: 42491 - protein, 12 aa, synthetic construct
ALWEAPKYYKKI

SEQ ID NO: 42492 - protein, 12 aa, synthetic construct
ALWEAPNDHKKL

SEQ ID NO: 42493 - protein, 12 aa, synthetic construct
ALWEAPNDYTKL

SEQ ID NO: 42494 - protein, 12 aa, synthetic construct
ALWEAPNHCKKL

SEQ ID NO: 42495 - protein, 12 aa, synthetic construct
ALWEAPNKYKKL

SEQ ID NO: 42496 - protein, 12 aa, synthetic construct
ALWEAPNNYKKI

SEQ ID NO: 42497 - protein, 12 aa, synthetic construct
ALWEAPNNYKTL

SEQ ID NO: 42498 - protein, 12 aa, synthetic construct
ALWEAPNYDKKH

SEQ ID NO: 42499 - protein, 11 aa, synthetic construct
ALWEAQYYKKL

SEQ ID NO: 42500 - protein, 12 aa, synthetic construct
ALWEARNYYKKL

SEQ ID NO: 42501 - protein, 11 aa, synthetic construct
ALWEARYYKKL

SEQ ID NO: 42502 - protein, 12 aa, synthetic construct
ALWEASKYYKKL

SEQ ID NO: 42503 - protein, 12 aa, synthetic construct
ALWEEQKYLKKL

SEQ ID NO: 42504 - protein, 9 aa, synthetic construct
ALWEEQYYK

SEQ ID NO: 42505 - protein, 10 aa, synthetic construct
ALWEEQYYKK

SEQ ID NO: 42506 - protein, 12 aa, synthetic construct
ALWEEVGHNIKV

SEQ ID NO: 42507 - protein, 12 aa, synthetic construct
ALWEEVGKKIKL

SEQ ID NO: 42508 - protein, 12 aa, synthetic construct
ALWEEVWQKIKV

SEQ ID NO: 42509 - protein, 13 aa, synthetic construct
ALWEEVWQKKIKV

SEQ ID NO: 42510 - protein, 9 aa, synthetic construct
ALWEGCKKL

SEQ ID NO: 42511 - protein, 9 aa, synthetic construct
ALWEGFKKL

SEQ ID NO: 42512 - protein, 14 aa, synthetic construct
ALWEGQELGKKIKV

SEQ ID NO: 42513 - protein, 11 aa, synthetic construct
ALWEGQNYKKN

SEQ ID NO: 42514 - protein, 11 aa, synthetic construct
ALWELHYFKKI

SEQ ID NO: 42515 - protein, 11 aa, synthetic construct
ALWELHYYKKH

SEQ ID NO: 42516 - protein, 14 aa, synthetic construct
ALWELKELGKKIKV

SEQ ID NO: 42517 - protein, 15 aa, synthetic construct
ALWELLELGKKKIKV

SEQ ID NO: 42518 - protein, 14 aa, synthetic construct
ALWEEQEMGTKIKV

SEQ ID NO: 42519 - protein, 14 aa, synthetic construct
ALWEEQELGKKIKV

SEQ ID NO: 42520 - protein, 12 aa, synthetic construct
ALWEEPNYSKKH

SEQ ID NO: 42521 - protein, 12 aa, synthetic construct
ALWEDPNYNKKL

SEQ ID NO: 42522 - protein, 12 aa, synthetic construct
ALWEATKYYKKL

SEQ ID NO: 42523 - protein, 11 aa, synthetic construct
ALWEAYYYKKL

SEQ ID NO: 42524 - protein, 12 aa, synthetic construct
ALWEDANYYKNL

SEQ ID NO: 42525 - protein, 11 aa, synthetic construct
ALWEDGQKIKV

SEQ ID NO: 42526 - protein, 11 aa, synthetic construct
ALWEDHYYKKL

SEQ ID NO: 42527 - protein, 12 aa, synthetic construct
ALWEDPNSYKKL

SEQ ID NO: 42528 - protein, 12 aa, synthetic construct
ALWEDTNYYKKL

SEQ ID NO: 42529 - protein, 11 aa, synthetic construct
ALWEELEKGKK

SEQ ID NO: 42530 - protein, 12 aa, synthetic construct
ALWEDVGQKIKV

SEQ ID NO: 42531 - protein, 9 aa, synthetic construct
ALWEECKEL

SEQ ID NO: 42532 - protein, 9 aa, synthetic construct
ALWEEFKKH

SEQ ID NO: 42533 - protein, 9 aa, synthetic construct
ALWEEFKKL

SEQ ID NO: 42534 - protein, 10 aa, synthetic construct
ALWEEHYYNK

SEQ ID NO: 42535 - protein, 13 aa, synthetic construct
ALWEEIGQKKIKV

SEQ ID NO: 42536 - protein, 11 aa, synthetic construct
ALWEAHYCKKL

SEQ ID NO: 42537 - protein, 12 aa, synthetic construct
ALWEAANYYKKL

SEQ ID NO: 42538 - protein, 15 aa, synthetic construct
ALWELLELGTKKIKV

SEQ ID NO: 42539 - protein, 14 aa, synthetic construct
ALCVVQELGKKIKV

SEQ ID NO: 42540 - protein, 14 aa, synthetic construct
ALFEVQELGKKIKV

SEQ ID NO: 42541 - protein, 11 aa, synthetic construct
ALGEVGQKIKV

SEQ ID NO: 42542 - protein, 11 aa, synthetic construct
ALGEVHYYKKL

SEQ ID NO: 42543 - protein, 14 aa, synthetic construct
ALGEVLELGKKNQG

SEQ ID NO: 42544 - protein, 14 aa, synthetic construct
ALGEVLELGKKRSR

SEQ ID NO: 42545 - protein, 14 aa, synthetic construct
ALGEVPWLGKKIKV

SEQ ID NO: 42546 - protein, 8 aa, synthetic construct
ALLEAPNY

SEQ ID NO: 42547 - protein, 15 aa, synthetic construct
ALLEVLELGIKKIKV

SEQ ID NO: 42548 - protein, 14 aa, synthetic construct
ALLEVLELGKKNQC

SEQ ID NO: 42549 - protein, 14 aa, synthetic construct
ALLEVLELGKKQSR

SEQ ID NO: 42550 - protein, 11 aa, synthetic construct
ALLEVPDDKKL

SEQ ID NO: 42551 - protein, 14 aa, synthetic construct
ALLEVQELGKEIKV

SEQ ID NO: 42552 - protein, 13 aa, synthetic construct
ALLEVQELGKKSR

SEQ ID NO: 42553 - protein, 14 aa, synthetic construct
ALLEVQELGKKTKV

SEQ ID NO: 42554 - protein, 14 aa, synthetic construct
ALLEVQELGKRIKV

SEQ ID NO: 42555 - protein, 14 aa, synthetic construct
ALEEVLELGKKESR

SEQ ID NO: 42556 - protein, 14 aa, synthetic construct
ALCQVQELGKKIKV

SEQ ID NO: 42557 - protein, 14 aa, synthetic construct
ALWDVQELGKKIMV

SEQ ID NO: 42558 - protein, 14 aa, synthetic construct
ALCGVQELGKKKSR

SEQ ID NO: 42559 - protein, 11 aa, synthetic construct
AFWEVHYYKTL

SEQ ID NO: 42560 - protein, 14 aa, synthetic construct
AGGEVQELGTKIKG

SEQ ID NO: 42561 - protein, 9 aa, synthetic construct
ALCDVFKKL

SEQ ID NO: 42562 - protein, 12 aa, synthetic construct
ALCEAPNNYKKL

SEQ ID NO: 42563 - protein, 12 aa, synthetic construct
ALCEAPNYHKKL

SEQ ID NO: 42564 - protein, 12 aa, synthetic construct
ALCEAPNYYKKP

SEQ ID NO: 42565 - protein, 9 aa, synthetic construct
ALCEVFEKL

SEQ ID NO: 42566 - protein, 9 aa, synthetic construct
ALCEVFKKI

SEQ ID NO: 42567 - protein, 9 aa, synthetic construct
ALCEVFKNL

SEQ ID NO: 42568 - protein, 14 aa, synthetic construct
ALCEVHELGKKIKV

SEQ ID NO: 42569 - protein, 11 aa, synthetic construct
ALCEVHYYNKL

SEQ ID NO: 42570 - protein, 14 aa, synthetic construct
ALCEVQELGKEIKV

SEQ ID NO: 42571 - protein, 14 aa, synthetic construct
ALCEVQELGTKIKV

SEQ ID NO: 42572 - protein, 11 aa, synthetic construct
ALCEVYYYKKL

SEQ ID NO: 42573 - protein, 14 aa, synthetic construct
ALCGVQELGKKIKV

SEQ ID NO: 42574 - protein, 9 aa, synthetic construct
ALLEVVKKL

SEQ ID NO: 42575 - protein, 11 aa, synthetic construct
ALLGVHYYKKL

SEQ ID NO: 42576 - protein, 14 aa, synthetic construct
ALMEVQELGKKIKV

SEQ ID NO: 42577 - protein, 11 aa, synthetic construct
ALRELHYYKKL

SEQ ID NO: 42578 - protein, 14 aa, synthetic construct
ALWAGPEVGPDIKV

SEQ ID NO: 42579 - protein, 9 aa, synthetic construct
ALWAVFKTL

SEQ ID NO: 42580 - protein, 11 aa, synthetic construct
ALWAVHSYKKL

SEQ ID NO: 42581 - protein, 11 aa, synthetic construct
ALWAVHYDKKL

SEQ ID NO: 42582 - protein, 11 aa, synthetic construct
ALWAVHYFKKL

SEQ ID NO: 42583 - protein, 14 aa, synthetic construct
ALWAVQELGTKIPV

SEQ ID NO: 42584 - protein, 12 aa, synthetic construct
ALWDDPNYYKKL

SEQ ID NO: 42585 - protein, 9 aa, synthetic construct
ALWDVFNKL

SEQ ID NO: 42586 - protein, 12 aa, synthetic construct
ALWDVGQKKIKV

SEQ ID NO: 42587 - protein, 11 aa, synthetic construct
ALWDVHDYKKL

SEQ ID NO: 42588 - protein, 11 aa, synthetic construct
ALWDVHYYKEL

SEQ ID NO: 42589 - protein, 11 aa, synthetic construct
ALWDVHYYKKI

SEQ ID NO: 42590 - protein, 11 aa, synthetic construct
ALWDVHYYRKL

SEQ ID NO: 42591 - protein, 14 aa, synthetic construct
ALWDVLELGKKKSR

SEQ ID NO: 42592 - protein, 14 aa, synthetic construct
ALWDVLELGKKNQG

SEQ ID NO: 42593 - protein, 12 aa, synthetic construct
ALWAAPTYYKTL

SEQ ID NO: 42594 - protein, 12 aa, synthetic construct
ALWAAPNYYKKL

SEQ ID NO: 42595 - protein, 12 aa, synthetic construct
ALWAAPNYDKKL

SEQ ID NO: 42596 - protein, 11 aa, synthetic construct
ALREVHYYKKI

SEQ ID NO: 42597 - protein, 9 aa, synthetic construct
ALREVFKKH

SEQ ID NO: 42598 - protein, 9 aa, synthetic construct
ALREVFKKI

SEQ ID NO: 42599 - protein, 11 aa, synthetic construct
ALREVGQKIKV

SEQ ID NO: 42600 - protein, 11 aa, synthetic construct
ALREVHYCKKL

SEQ ID NO: 42601 - protein, 11 aa, synthetic construct
ALREVHYHKKL

SEQ ID NO: 42602 - protein, 11 aa, synthetic construct
ALREVHYNKYV

SEQ ID NO: 42603 - protein, 14 aa, synthetic construct
ALREVKELGKKIKV

SEQ ID NO: 42604 - protein, 11 aa, synthetic construct
ALSEVHYYKKL

SEQ ID NO: 42605 - protein, 14 aa, synthetic construct
ALREVQELGKKINV

SEQ ID NO: 42606 - protein, 14 aa, synthetic construct
ALREVQELGTKIKV

SEQ ID NO: 42607 - protein, 14 aa, synthetic construct
ALREVQEVGKKIKE

SEQ ID NO: 42608 - protein, 11 aa, synthetic construct
ALREVYYYKKL

SEQ ID NO: 42609 - protein, 14 aa, synthetic construct
ALRGVLELGKRKSR

SEQ ID NO: 42610 - protein, 12 aa, synthetic construct
ALSEAPNYYKKL

SEQ ID NO: 42611 - protein, 14 aa, synthetic construct
ALWELLELGKKNQG

SEQ ID NO: 42612 - protein, 9 aa, synthetic construct
ALWELLKKL

SEQ ID NO: 42613 - protein, 14 aa, synthetic construct
ALWEVQELGTKIRV

SEQ ID NO: 42614 - protein, 15 aa, synthetic construct
ALWEVLELVKKKING

SEQ ID NO: 42615 - protein, 14 aa, synthetic construct
ALWEVLGLGTKIKV

SEQ ID NO: 42616 - protein, 11 aa, synthetic construct
ALWEVLGWFRI

SEQ ID NO: 42617 - protein, 14 aa, synthetic construct
ALWEVLKLGKNKSR

SEQ ID NO: 42618 - protein, 12 aa, synthetic construct
ALWEVLNYYKKL

SEQ ID NO: 42619 - protein, 14 aa, synthetic construct
ALWEVLRLDKKIKV

SEQ ID NO: 42620 - protein, 11 aa, synthetic construct
ALWEVLYYVKI

SEQ ID NO: 42621 - protein, 14 aa, synthetic construct
ALWEVMELGKKNQG

SEQ ID NO: 42622 - protein, 14 aa, synthetic construct
ALWEVMELGKKSQG

SEQ ID NO: 42623 - protein, 14 aa, synthetic construct
ALWEVMELGNKKSR

SEQ ID NO: 42624 - protein, 11 aa, synthetic construct
ALWEVNNYNKL

SEQ ID NO: 42625 - protein, 11 aa, synthetic construct
ALWEVNYFKKL

SEQ ID NO: 42626 - protein, 11 aa, synthetic construct
ALWEVNYYKKP

SEQ ID NO: 42627 - protein, 11 aa, synthetic construct
ALWEVNYYQKL

SEQ ID NO: 42628 - protein, 12 aa, synthetic construct
ALWEVPDYYKKL

SEQ ID NO: 42629 - protein, 14 aa, synthetic construct
ALWEVPELGKKNQG

SEQ ID NO: 42630 - protein, 14 aa, synthetic construct
ALWEVLEMGKKIKV

SEQ ID NO: 42631 - protein, 15 aa, synthetic construct
ALWEVLELVKKKIKV

SEQ ID NO: 42632 - protein, 14 aa, synthetic construct
ALWEVLELGKKMSR

SEQ ID NO: 42633 - protein, 15 aa, synthetic construct
ALWEVLELGTKNIKV

SEQ ID NO: 42634 - protein, 14 aa, synthetic construct
ALWEVLELGKKNQC

SEQ ID NO: 42635 - protein, 14 aa, synthetic construct
ALWEVLELGKKNQD

SEQ ID NO: 42636 - protein, 14 aa, synthetic construct
ALWEVLELGKKNQS

SEQ ID NO: 42637 - protein, 14 aa, synthetic construct
ALWEVLELGKKNRG

SEQ ID NO: 42638 - protein, 14 aa, synthetic construct
ALWEVLELGKKQSR

SEQ ID NO: 42639 - protein, 15 aa, synthetic construct
ALWEVLELGKKRIQG

SEQ ID NO: 42640 - protein, 14 aa, synthetic construct
ALWEVLELGKNKKR

SEQ ID NO: 42641 - protein, 14 aa, synthetic construct
ALWEVLELGKRDSR

SEQ ID NO: 42642 - protein, 15 aa, synthetic construct
ALWEVLELGKRKSRS

SEQ ID NO: 42643 - protein, 14 aa, synthetic construct
ALWEVLELGNKIKL

SEQ ID NO: 42644 - protein, 15 aa, synthetic construct
ALWEVLELGNKKIKV

SEQ ID NO: 42645 - protein, 11 aa, synthetic construct
AEWDDGQKIKV

SEQ ID NO: 42646 - protein, 14 aa, synthetic construct
ALWEVLELGNKRSR

SEQ ID NO: 42647 - protein, 14 aa, synthetic construct
ALWEVLELGRKNQG

SEQ ID NO: 42648 - protein, 14 aa, synthetic construct
ALWEVLELGTINQG

SEQ ID NO: 42649 - protein, 12 aa, synthetic construct
ALWEVPNYYRKL

SEQ ID NO: 42650 - protein, 11 aa, synthetic construct
ALWEVPWLFKI

SEQ ID NO: 42651 - protein, 11 aa, synthetic construct
ALWEVPYYNKQ

SEQ ID NO: 42652 - protein, 14 aa, synthetic construct
ALWEVQDLGTKIKV

SEQ ID NO: 42653 - protein, 14 aa, synthetic construct
ALWEVQELGKKSKV

SEQ ID NO: 42654 - protein, 14 aa, synthetic construct
ALWEVQELGKKSRS

SEQ ID NO: 42655 - protein, 13 aa, synthetic construct
ALWEVQELGKKSS

SEQ ID NO: 42656 - protein, 14 aa, synthetic construct
ALWEVQELGKKVKA

SEQ ID NO: 42657 - protein, 14 aa, synthetic construct
ALWEVQELGKNIKG

SEQ ID NO: 42658 - protein, 14 aa, synthetic construct
ALWEVQELGKQIRV

SEQ ID NO: 42659 - protein, 14 aa, synthetic construct
ALWEVQELGKRKSR

SEQ ID NO: 42660 - protein, 14 aa, synthetic construct
ALWEVQELGKRLKV

SEQ ID NO: 42661 - protein, 14 aa, synthetic construct
ALWEVQELGNGFKV

SEQ ID NO: 42662 - protein, 14 aa, synthetic construct
ALWEVQELGNIIKV

SEQ ID NO: 42663 - protein, 14 aa, synthetic construct
ALWEVQELGNKIKI

SEQ ID NO: 42664 - protein, 14 aa, synthetic construct
ALWEVQELGNNIMV

SEQ ID NO: 42665 - protein, 14 aa, synthetic construct
ALWEVQELGQKIKL

SEQ ID NO: 42666 - protein, 14 aa, synthetic construct
ALWEVQELGTEIKV

SEQ ID NO: 42667 - protein, 14 aa, synthetic construct
ALWEVQELGTKIQG

SEQ ID NO: 42668 - protein, 13 aa, synthetic construct
ALWEVQELGKKQG

SEQ ID NO: 42669 - protein, 14 aa, synthetic construct
ALWEVQELGKKKSK

SEQ ID NO: 42670 - protein, 14 aa, synthetic construct
ALWEVQELGKKKPR

SEQ ID NO: 42671 - protein, 14 aa, synthetic construct
ALWEVQELGIKIKG

SEQ ID NO: 42672 - protein, 14 aa, synthetic construct
ALWEVQEFGKKIKG

SEQ ID NO: 42673 - protein, 14 aa, synthetic construct
ALWEVQEFGKNIKE

SEQ ID NO: 42674 - protein, 13 aa, synthetic construct
ALWEVQELANKSR

SEQ ID NO: 42675 - protein, 14 aa, synthetic construct
ALWEVQELDRKIKV

SEQ ID NO: 42676 - protein, 10 aa, synthetic construct
ALWEVQELGE

SEQ ID NO: 42677 - protein, 14 aa, synthetic construct
ALWEVQELGEKIRV

SEQ ID NO: 42678 - protein, 14 aa, synthetic construct
ALWEVQELGIKIRV

SEQ ID NO: 42679 - protein, 14 aa, synthetic construct
ALWEVQELGKKKPG

SEQ ID NO: 42680 - protein, 14 aa, synthetic construct
ALWEVQELGIKNQG

SEQ ID NO: 42681 - protein, 14 aa, synthetic construct
ALWEVQELGINIKV

SEQ ID NO: 42682 - protein, 14 aa, synthetic construct
ALWEVQELGKKESR

SEQ ID NO: 42683 - protein, 14 aa, synthetic construct
ALWEVQELGKKIHV

SEQ ID NO: 42684 - protein, 14 aa, synthetic construct
ALWEVQELGKKIQV

SEQ ID NO: 42685 - protein, 14 aa, synthetic construct
ALWEVQELGKKIYV

SEQ ID NO: 42686 - protein, 15 aa, synthetic construct
ALWEVLELGKKNIKG

SEQ ID NO: 42687 - protein, 15 aa, synthetic construct
ALWEVLELGKKKYKE

SEQ ID NO: 42688 - protein, 11 aa, synthetic construct
ALWELNYNKKL

SEQ ID NO: 42689 - protein, 11 aa, synthetic construct
ALWEVEYYKKL

SEQ ID NO: 42690 - protein, 9 aa, synthetic construct
ALWEVFKKN

SEQ ID NO: 42691 - protein, 9 aa, synthetic construct
ALWEVFKYL

SEQ ID NO: 42692 - protein, 12 aa, synthetic construct
ALWEVGHKKIKV

SEQ ID NO: 42693 - protein, 11 aa, synthetic construct
ALWEVGQEIKV

SEQ ID NO: 42694 - protein, 15 aa, synthetic construct
ALWEVGQELGKKIKV

SEQ ID NO: 42695 - protein, 11 aa, synthetic construct
ALWEVGQKIKA

SEQ ID NO: 42696 - protein, 11 aa, synthetic construct
ALWEVGQKIKD

SEQ ID NO: 42697 - protein, 11 aa, synthetic construct
ALWEVGQKIRV

SEQ ID NO: 42698 - protein, 12 aa, synthetic construct
ALWEVGQKKIKL

SEQ ID NO: 42699 - protein, 12 aa, synthetic construct
ALWEVGQKKINV

SEQ ID NO: 42700 - protein, 11 aa, synthetic construct
ALWEVGQNIKV

SEQ ID NO: 42701 - protein, 12 aa, synthetic construct
ALWEVGQRKIKV

SEQ ID NO: 42702 - protein, 9 aa, synthetic construct
ALWEVHCYK

SEQ ID NO: 42703 - protein, 11 aa, synthetic construct
ALWEVHCYKTL

SEQ ID NO: 42704 - protein, 11 aa, synthetic construct
ALWEVHDYKTL

SEQ ID NO: 42705 - protein, 9 aa, synthetic construct
ALWEVFKKM

SEQ ID NO: 42706 - protein, 11 aa, synthetic construct
ALWEVEDNNKL

SEQ ID NO: 42707 - protein, 14 aa, synthetic construct
ALWEVLELGKKKTR

SEQ ID NO: 42708 - protein, 11 aa, synthetic construct
ALWEVDYYKKL

SEQ ID NO: 42709 - protein, 11 aa, synthetic construct
ALWELNYYKKL

SEQ ID NO: 42710 - protein, 14 aa, synthetic construct
ALWELQELCKKIRV

SEQ ID NO: 42711 - protein, 14 aa, synthetic construct
ALWELQELGKKIKI

SEQ ID NO: 42712 - protein, 14 aa, synthetic construct
ALWELQELGKKIKV

SEQ ID NO: 42713 - protein, 14 aa, synthetic construct
ALWELQESGKKIKV

SEQ ID NO: 42714 - protein, 11 aa, synthetic construct
ALWELQYYKKL

SEQ ID NO: 42715 - protein, 9 aa, synthetic construct
ALWELSKKL

SEQ ID NO: 42716 - protein, 11 aa, synthetic construct
ALWEMHSYKKL

SEQ ID NO: 42717 - protein, 15 aa, synthetic construct
ALWEMLELGKKKIKV

SEQ ID NO: 42718 - protein, 13 aa, synthetic construct
ALWEMQELGKKSR

SEQ ID NO: 42719 - protein, 12 aa, synthetic construct
ALWEPSKYYNKL

SEQ ID NO: 42720 - protein, 11 aa, synthetic construct
ALWESLGWFKI

SEQ ID NO: 42721 - protein, 12 aa, synthetic construct
ALWESPNYNKKL

SEQ ID NO: 42722 - protein, 12 aa, synthetic construct
ALWETPNYCRKL

SEQ ID NO: 42723 - protein, 5 aa, synthetic construct
ALWEV

SEQ ID NO: 42724 - protein, 11 aa, synthetic construct
ALWEVHDYRKI

SEQ ID NO: 42725 - protein, 14 aa, synthetic construct
ALWEVHELGKKITV

SEQ ID NO: 42726 - protein, 14 aa, synthetic construct
ALWEVHEMGKKIKV

SEQ ID NO: 42727 - protein, 11 aa, synthetic construct
ALWEVHFYKKL

SEQ ID NO: 42728 - protein, 9 aa, synthetic construct
ALWEVIKKI

SEQ ID NO: 42729 - protein, 14 aa, synthetic construct
ALWEVKELGKKINV

SEQ ID NO: 42730 - protein, 11 aa, synthetic construct
ALWEVKYYKKH

SEQ ID NO: 42731 - protein, 15 aa, synthetic construct
ALWEVLELCKIKIKV

SEQ ID NO: 42732 - protein, 15 aa, synthetic construct
ALWEVLELGEKKIKV

SEQ ID NO: 42733 - protein, 14 aa, synthetic construct
ALWEVLELGKINSR

SEQ ID NO: 42734 - protein, 12 aa, synthetic construct
ALWEVLELGKKI

SEQ ID NO: 42735 - protein, 13 aa, synthetic construct
ALWEVLELGKKIR

SEQ ID NO: 42736 - protein, 14 aa, synthetic construct
ALWEVLELGKKIRV

SEQ ID NO: 42737 - protein, 14 aa, synthetic construct
ALWEVLELGKKITR

SEQ ID NO: 42738 - protein, 15 aa, synthetic construct
ALWEVLELGKKKIKE

SEQ ID NO: 42739 - protein, 15 aa, synthetic construct
ALWEVLELGKKKIKG

SEQ ID NO: 42740 - protein, 15 aa, synthetic construct
ALWEVLELGKKKIRE

SEQ ID NO: 42741 - protein, 14 aa, synthetic construct
ALWEVLELGKKKPR

SEQ ID NO: 42742 - protein, 15 aa, synthetic construct
ALWEVLELGKKKTKV

SEQ ID NO: 42743 - protein, 11 aa, synthetic construct
ALWEVHYYQTL

SEQ ID NO: 42744 - protein, 10 aa, synthetic construct
ALWEVHYYQK

SEQ ID NO: 42745 - protein, 11 aa, synthetic construct
ALWEVHYYMNV

SEQ ID NO: 42746 - protein, 11 aa, synthetic construct
ALWEVHYEKKL

SEQ ID NO: 42747 - protein, 11 aa, synthetic construct
ALWEVHHYRKL

SEQ ID NO: 42748 - protein, 11 aa, synthetic construct
ALWEVHNYKKH

SEQ ID NO: 42749 - protein, 11 aa, synthetic construct
ALWEVHNYNKL

SEQ ID NO: 42750 - protein, 11 aa, synthetic construct
ALWEVHSYKTL

SEQ ID NO: 42751 - protein, 11 aa, synthetic construct
ALWEVHSYNKI

SEQ ID NO: 42752 - protein, 11 aa, synthetic construct
ALWEVHYDKNL

SEQ ID NO: 42753 - protein, 11 aa, synthetic construct
ALWEVHYNKTL

SEQ ID NO: 42754 - protein, 11 aa, synthetic construct
ALWEVHYYKKF

SEQ ID NO: 42755 - protein, 11 aa, synthetic construct
ALWEVHYNNKL

SEQ ID NO: 42756 - protein, 11 aa, synthetic construct
ALWEVHYSKKL

SEQ ID NO: 42757 - protein, 11 aa, synthetic construct
ALWEVHYYEKH

SEQ ID NO: 42758 - protein, 11 aa, synthetic construct
ALWEVHYYKEP

SEQ ID NO: 42759 - protein, 11 aa, synthetic construct
ALWEVHYYKGL

SEQ ID NO: 42760 - protein, 10 aa, synthetic construct
ALWEVHYYKI

SEQ ID NO: 42761 - protein, 14 aa, synthetic construct
ALWEVLELGNKKSM

SEQ ID NO: 42762 - protein, 12 aa, synthetic construct
AAWDYTTGWFKI

SEQ ID NO: 42763 - protein, 11 aa, synthetic construct
AAWDTTGWFKI

SEQ ID NO: 42764 - protein, 13 aa, synthetic construct
AAWDLGTTGWFKI

SEQ ID NO: 42765 - protein, 12 aa, synthetic construct
AAWDEATGWFKI

SEQ ID NO: 42766 - protein, 11 aa, synthetic construct
AAWKGTGWFKI

SEQ ID NO: 42767 - protein, 9 aa, synthetic construct
AAWPGWFKI

SEQ ID NO: 42768 - protein, 11 aa, synthetic construct
AAWDPTGWFKI

SEQ ID NO: 42769 - protein, 13 aa, synthetic construct
AAWDRDTTGWFKI

SEQ ID NO: 42770 - protein, 11 aa, synthetic construct
AAFYTTGWFKI

SEQ ID NO: 42771 - protein, 14 aa, synthetic construct
AAWDWVYTTGWFKI

SEQ ID NO: 42772 - protein, 11 aa, synthetic construct
AAWVFTGWFKI

SEQ ID NO: 42773 - protein, 12 aa, synthetic construct
AAWDWTTGWFKI

SEQ ID NO: 42774 - protein, 11 aa, synthetic construct
AAWETTGWFKI

SEQ ID NO: 42775 - protein, 13 aa, synthetic construct
AAWDQNTTGWFKI

SEQ ID NO: 42776 - protein, 11 aa, synthetic construct
AAWVSTGWFKI

SEQ ID NO: 42777 - protein, 13 aa, synthetic construct
AAWDRYTTGWFKI

SEQ ID NO: 42778 - protein, 14 aa, synthetic construct
AAWDPSHTTGWFKI

SEQ ID NO: 42779 - protein, 12 aa, synthetic construct
AAWANTTGWFKI

SEQ ID NO: 42780 - protein, 12 aa, synthetic construct
AAWEHTTGWFKI

SEQ ID NO: 42781 - protein, 12 aa, synthetic construct
AAWDYGTGWFKI

SEQ ID NO: 42782 - protein, 10 aa, synthetic construct
AAWDWYYKKL

SEQ ID NO: 42783 - protein, 12 aa, synthetic construct
AAWDYPTGWFKI

SEQ ID NO: 42784 - protein, 11 aa, synthetic construct
AAAGGGYYKKL

SEQ ID NO: 42785 - protein, 9 aa, synthetic construct
AAWDFYKKL

SEQ ID NO: 42786 - protein, 12 aa, synthetic construct
AAWDRGTGWFKI

SEQ ID NO: 42787 - protein, 10 aa, synthetic construct
AAWDWCYKKL

SEQ ID NO: 42788 - protein, 11 aa, synthetic construct
AAWKGPGWFKI

SEQ ID NO: 42789 - protein, 12 aa, synthetic construct
AAWEHTTGWFEI

SEQ ID NO: 42790 - protein, 14 aa, synthetic construct
AAWAWVYTTGWFKI

SEQ ID NO: 42791 - protein, 14 aa, synthetic construct
AAGDWVYTTGWFKI

SEQ ID NO: 42792 - protein, 11 aa, synthetic construct
AAWDSTGWFKI

SEQ ID NO: 42793 - protein, 13 aa, synthetic construct
AAGDLGTTGWFKI

SEQ ID NO: 42794 - protein, 12 aa, synthetic construct
AAWDYNTGWFKI

SEQ ID NO: 42795 - protein, 12 aa, synthetic construct
AAWAYTTGWFKI

SEQ ID NO: 42796 - protein, 12 aa, synthetic construct
AAWDYTTGWLKI

SEQ ID NO: 42797 - protein, 11 aa, synthetic construct
AAWGTTGWFKI

SEQ ID NO: 42798 - protein, 12 aa, synthetic construct
AAWDEATGWLKI

SEQ ID NO: 42799 - protein, 11 aa, synthetic construct
AAWDNTGWFKI

SEQ ID NO: 42800 - protein, 13 aa, synthetic construct
AAWDLRTTGWFKI

SEQ ID NO: 42801 - protein, 12 aa, synthetic construct
AAGDYGTGWFKI

SEQ ID NO: 42802 - protein, 11 aa, synthetic construct
AAAGGGYYKKI

SEQ ID NO: 42803 - protein, 12 aa, synthetic construct
AAWDYTTGWFKT

SEQ ID NO: 42804 - protein, 11 aa, synthetic construct
AAFYNTGWFKI

SEQ ID NO: 42805 - protein, 12 aa, synthetic construct
AAWGYTTGWFKI

SEQ ID NO: 42806 - protein, 13 aa, synthetic construct
AAWALGTTGWFKI

SEQ ID NO: 42807 - protein, 13 aa, synthetic construct
AAWDLGTTGWLKI

SEQ ID NO: 42808 - protein, 12 aa, synthetic construct
AAWDEAPGWFKI

SEQ ID NO: 42809 - protein, 11 aa, synthetic construct
AAAGGGYYKKH

SEQ ID NO: 42810 - protein, 11 aa, synthetic construct
AAWDTTGWLKI

SEQ ID NO: 42811 - protein, 11 aa, synthetic construct
AAWDTPGWFKI

SEQ ID NO: 42812 - protein, 10 aa, synthetic construct
AAWDWDYKKL

SEQ ID NO: 42813 - protein, 11 aa, synthetic construct
AAWVLTGWFKI

SEQ ID NO: 42814 - protein, 11 aa, synthetic construct
AAAGGGYYNKL

SEQ ID NO: 42815 - protein, 12 aa, synthetic construct
AAWDWTTGWLKI

SEQ ID NO: 42816 - protein, 11 aa, synthetic construct
AAWATTGWFKI

SEQ ID NO: 42817 - protein, 11 aa, synthetic construct
AAWKGTGWLKI

SEQ ID NO: 42818 - protein, 13 aa, synthetic construct
AAWARDTTGWFKI

SEQ ID NO: 42819 - protein, 11 aa, synthetic construct
AALDTTGWFKI

SEQ ID NO: 42820 - protein, 13 aa, synthetic construct
AAWGRDTTGWFKI

SEQ ID NO: 42821 - protein, 13 aa, synthetic construct
AAWDLGTPGWFKI

SEQ ID NO: 42822 - protein, 13 aa, synthetic construct
AAWDLGTTGLFKI

SEQ ID NO: 42823 - protein, 11 aa, synthetic construct
AAWETTGWLKI

SEQ ID NO: 42824 - protein, 12 aa, synthetic construct
AAGDWTTGWFKI

SEQ ID NO: 42825 - protein, 11 aa, synthetic construct
AARDTTGWFKI

SEQ ID NO: 42826 - protein, 12 aa, synthetic construct
AAWDHTTGWFKI

SEQ ID NO: 42827 - protein, 12 aa, synthetic construct
AAWDWTTGWFKT

SEQ ID NO: 42828 - protein, 12 aa, synthetic construct
AAWDYTPGWFKI

SEQ ID NO: 42829 - protein, 12 aa, synthetic construct
AAGDYTTGWFKI

SEQ ID NO: 42830 - protein, 13 aa, synthetic construct
AAWGLGTTGWFKI

SEQ ID NO: 42831 - protein, 12 aa, synthetic construct
AAWDRGPGWFKI

SEQ ID NO: 42832 - protein, 11 aa, synthetic construct
AAGDTTGWFKI

SEQ ID NO: 42833 - protein, 14 aa, synthetic construct
AAWDWVYNTGWFKI

SEQ ID NO: 42834 - protein, 12 aa, synthetic construct
AALDYTTGWFKI

SEQ ID NO: 42835 - protein, 13 aa, synthetic construct
AALDLGTTGWFKI

SEQ ID NO: 42836 - protein, 13 aa, synthetic construct
AAWDRYTTGWLKI

SEQ ID NO: 42837 - protein, 11 aa, synthetic construct
LRGIIPLVGSR

SEQ ID NO: 42838 - protein, 12 aa, synthetic construct
AAWDYTTCWFKI

SEQ ID NO: 42839 - protein, 11 aa, synthetic construct
AAWTGTGWFKI

SEQ ID NO: 42840 - protein, 12 aa, synthetic construct
AAWEHTTGWLKI

SEQ ID NO: 42841 - protein, 11 aa, synthetic construct
AAWVFTGWLKI

SEQ ID NO: 42842 - protein, 10 aa, synthetic construct
AAWDWYYKKI

SEQ ID NO: 42843 - protein, 13 aa, synthetic construct
AAWELGTTGWFKI

SEQ ID NO: 42844 - protein, 11 aa, synthetic construct
AAWENTGWFKI

SEQ ID NO: 42845 - protein, 9 aa, synthetic construct
AAWDFCKKL

SEQ ID NO: 42846 - protein, 11 aa, synthetic construct
AAWDTTGLFKI

SEQ ID NO: 42847 - protein, 12 aa, synthetic construct
AAWDYTTGWFEI

SEQ ID NO: 42848 - protein, 12 aa, synthetic construct
VAWDYTTGWFKI

SEQ ID NO: 42849 - protein, 12 aa, synthetic construct
AALDEATGWFKI

SEQ ID NO: 42850 - protein, 11 aa, synthetic construct
AAWVSTGWLKI

SEQ ID NO: 42851 - protein, 13 aa, synthetic construct
AAWDQNTTGWFEI

SEQ ID NO: 42852 - protein, 13 aa, synthetic construct
AALDRYTTGWFKI

SEQ ID NO: 42853 - protein, 12 aa, synthetic construct
AAGDEATGWFKI

SEQ ID NO: 42854 - protein, 12 aa, synthetic construct
AAWDYTTGWSKI

SEQ ID NO: 42855 - protein, 12 aa, synthetic construct
AARDYTTGWFKI

SEQ ID NO: 42856 - protein, 13 aa, synthetic construct
AAWDRDTTGWLKI

SEQ ID NO: 42857 - protein, 12 aa, synthetic construct
AAWDYTTGRFKI

SEQ ID NO: 42858 - protein, 12 aa, synthetic construct
AAWDYTTGWFRI

SEQ ID NO: 42859 - protein, 9 aa, synthetic construct
AAWPGWLKI

SEQ ID NO: 42860 - protein, 13 aa, synthetic construct
AAWDRDNTGWFKI

SEQ ID NO: 42861 - protein, 10 aa, synthetic construct
LRGIPLVGSR

SEQ ID NO: 42862 - protein, 11 aa, synthetic construct
AAWDPTGWLKI

SEQ ID NO: 42863 - protein, 12 aa, synthetic construct
AAWEYTTGWFKI

SEQ ID NO: 42864 - protein, 11 aa, synthetic construct
AAGVFTGWFKI

SEQ ID NO: 42865 - protein, 11 aa, synthetic construct
AARKGTGWFKI

SEQ ID NO: 42866 - protein, 11 aa, synthetic construct
AAWETAGWFKI

SEQ ID NO: 42867 - protein, 12 aa, synthetic construct
AAWDCTTGWFKI

SEQ ID NO: 42868 - protein, 11 aa, synthetic construct
AAFYTTGWLKI

SEQ ID NO: 42869 - protein, 10 aa, synthetic construct
AAWDWYYNKL

SEQ ID NO: 42870 - protein, 14 aa, synthetic construct
AAWDLVYTTGWFKI

SEQ ID NO: 42871 - protein, 12 aa, synthetic construct
AALDYPTGWFKI

SEQ ID NO: 42872 - protein, 11 aa, synthetic construct
AAWVSPGWFKI

SEQ ID NO: 42873 - protein, 11 aa, synthetic construct
AAWDTTGWFKT

SEQ ID NO: 42874 - protein, 11 aa, synthetic construct
LRGTIPLVGSR

SEQ ID NO: 42875 - protein, 14 aa, synthetic construct
AAGDPSHTTGWFKI

SEQ ID NO: 42876 - protein, 13 aa, synthetic construct
AAWDQNNTGWFKI

SEQ ID NO: 42877 - protein, 13 aa, synthetic construct
AAWARYTTGWFKI

SEQ ID NO: 42878 - protein, 11 aa, synthetic construct
AAWETPGWFKI

SEQ ID NO: 42879 - protein, 11 aa, synthetic construct
AAWVTTGWFKI

SEQ ID NO: 42880 - protein, 13 aa, synthetic construct
AAGDRYTTGWFKI

SEQ ID NO: 42881 - protein, 13 aa, synthetic construct
AAWDQNTTGWLKI

SEQ ID NO: 42882 - protein, 12 aa, synthetic construct
AAWDYGTGWLKI

SEQ ID NO: 42883 - protein, 13 aa, synthetic construct
AAWDLGTTGWFKV

SEQ ID NO: 42884 - protein, 13 aa, synthetic construct
AAWDLGTTGWFEI

SEQ ID NO: 42885 - protein, 13 aa, synthetic construct
AAWDLWTTGWFKI

SEQ ID NO: 42886 - protein, 11 aa, synthetic construct
AAWETTGWFEI

SEQ ID NO: 42887 - protein, 12 aa, synthetic construct
AAWDDTTGWFKI

SEQ ID NO: 42888 - protein, 13 aa, synthetic construct
AALDQNTTGWFKI

SEQ ID NO: 42889 - protein, 13 aa, synthetic construct
AAWDQNTTGLFKI

SEQ ID NO: 42890 - protein, 14 aa, synthetic construct
AAWDPSHTTGWLKI

SEQ ID NO: 42891 - protein, 11 aa, synthetic construct
AAWDPPGWFKI

SEQ ID NO: 42892 - protein, 10 aa, synthetic construct
LRGRALVGSR

SEQ ID NO: 42893 - protein, 13 aa, synthetic construct
AACDQNTTGWFKI

SEQ ID NO: 42894 - protein, 11 aa, synthetic construct
AAFYTTGWFKV

SEQ ID NO: 42895 - protein, 14 aa, synthetic construct
AAWDWVYTTGWLKI

SEQ ID NO: 42896 - protein, 11 aa, synthetic construct
AAWEPTGWFKI

SEQ ID NO: 42897 - protein, 12 aa, synthetic construct
AAWDYTTGLFKI

SEQ ID NO: 42898 - protein, 13 aa, synthetic construct
AAWDRYTTGWFKV

SEQ ID NO: 42899 - protein, 11 aa, synthetic construct
AAWYTTGWFKI

SEQ ID NO: 42900 - protein, 11 aa, synthetic construct
AALVSTGWFKI

SEQ ID NO: 42901 - protein, 12 aa, synthetic construct
LRGIGIPLVGSR

SEQ ID NO: 42902 - protein, 14 aa, synthetic construct
TAWDWVYTTGWFKI

SEQ ID NO: 42903 - protein, 14 aa, synthetic construct
AAWGPSHTTGWFKI

SEQ ID NO: 42904 - protein, 12 aa, synthetic construct
AAWDEAAGWFKI

SEQ ID NO: 42905 - protein, 12 aa, synthetic construct
AAWDDATGWFKI

SEQ ID NO: 42906 - protein, 11 aa, synthetic construct
AAWDTTGWFEI

SEQ ID NO: 42907 - protein, 10 aa, synthetic construct
AAWAWYYKKL

SEQ ID NO: 42908 - protein, 12 aa, synthetic construct
AAWAHTTGWFKI

SEQ ID NO: 42909 - protein, 12 aa, synthetic construct
AAWANTTGWLKI

SEQ ID NO: 42910 - protein, 11 aa, synthetic construct
AAFYTPGWFKI

SEQ ID NO: 42911 - protein, 12 aa, synthetic construct
AAWANNTGWFKI

SEQ ID NO: 42912 - protein, 14 aa, synthetic construct
AAWDPSHTTGWFRI

SEQ ID NO: 42913 - protein, 13 aa, synthetic construct
AAWGQNTTGWFKI

SEQ ID NO: 42914 - protein, 13 aa, synthetic construct
AAWDQKTTGWFKI

SEQ ID NO: 42915 - protein, 13 aa, synthetic construct
AAWDLGTTGRFKI

SEQ ID NO: 42916 - protein, 11 aa, synthetic construct
AAWDATGWFKI

SEQ ID NO: 42917 - protein, 12 aa, synthetic construct
AAWDVATGWFKI

SEQ ID NO: 42918 - protein, 11 aa, synthetic construct
AAGETTGWFKI

SEQ ID NO: 42919 - protein, 11 aa, synthetic construct
AALYTTGWFKI

SEQ ID NO: 42920 - protein, 14 aa, synthetic construct
AAGAWVYTTGWFKI

SEQ ID NO: 42921 - protein, 11 aa, synthetic construct
AVWDTTGWFKI

SEQ ID NO: 42922 - protein, 11 aa, synthetic construct
AAGKGTGWFKI

SEQ ID NO: 42923 - protein, 11 aa, synthetic construct
AAWEGTGWFKI

SEQ ID NO: 42924 - protein, 11 aa, synthetic construct
AAFYTTGWFEI

SEQ ID NO: 42925 - protein, 13 aa, synthetic construct
ATWDLGTTGWFKI

SEQ ID NO: 42926 - protein, 12 aa, synthetic construct
AAWDWTPGWFKI

SEQ ID NO: 42927 - protein, 13 aa, synthetic construct
AAWDRYNTGWFKI

SEQ ID NO: 42928 - protein, 12 aa, synthetic construct
AAGANTTGWFKI

SEQ ID NO: 42929 - protein, 13 aa, synthetic construct
AAWDRNTTGWFKI

SEQ ID NO: 42930 - protein, 10 aa, synthetic construct
LHSIPLVGSR

SEQ ID NO: 42931 - protein, 12 aa, synthetic construct
AAWDRGTGWLKI

SEQ ID NO: 42932 - protein, 13 aa, synthetic construct
AAWDRYTTGLFKI

SEQ ID NO: 42933 - protein, 14 aa, synthetic construct
AAWGWVYTTGWFKI

SEQ ID NO: 42934 - protein, 14 aa, synthetic construct
AAWDWVYTPGWFKI

SEQ ID NO: 42935 - protein, 13 aa, synthetic construct
AALDRDTTGWFKI

SEQ ID NO: 42936 - protein, 11 aa, synthetic construct
AAWDTTGWVKI

SEQ ID NO: 42937 - protein, 11 aa, synthetic construct
AAWKGTGRFKI

SEQ ID NO: 42938 - protein, 11 aa, synthetic construct
AAWDCSGWFKI

SEQ ID NO: 42939 - protein, 11 aa, synthetic construct
AAWDTTGWFNI

SEQ ID NO: 42940 - protein, 11 aa, synthetic construct
AAWDTTGWFKV

SEQ ID NO: 42941 - protein, 12 aa, synthetic construct
AAWDYTTGWFNI

SEQ ID NO: 42942 - protein, 11 aa, synthetic construct
AAWNGTGWFKI

SEQ ID NO: 42943 - protein, 13 aa, synthetic construct
AAWDRDTTGWFEI

SEQ ID NO: 42944 - protein, 11 aa, synthetic construct
AALETTGWFKI

SEQ ID NO: 42945 - protein, 11 aa, synthetic construct
AAWDPTGLFKI

SEQ ID NO: 42946 - protein, 13 aa, synthetic construct
AAWDQNTPGWFKI

SEQ ID NO: 42947 - protein, 9 aa, synthetic construct
AARPGWFKI

SEQ ID NO: 42948 - protein, 13 aa, synthetic construct
AARDRDTTGWFKI

SEQ ID NO: 42949 - protein, 11 aa, synthetic construct
AAWKGTGLFKI

SEQ ID NO: 42950 - protein, 13 aa, synthetic construct
AAWDSHTTGWFKI

SEQ ID NO: 42951 - protein, 11 aa, synthetic construct
AAWDTTGWFRI

SEQ ID NO: 42952 - protein, 14 aa, synthetic construct
AAWDPSHTTGWFNI

SEQ ID NO: 42953 - protein, 10 aa, synthetic construct
AAWDWYYKKH

SEQ ID NO: 42954 - protein, 9 aa, synthetic construct
AAWPGWSKI

SEQ ID NO: 42955 - protein, 11 aa, synthetic construct
AACDPTGWFKI

SEQ ID NO: 42956 - protein, 12 aa, synthetic construct
AAWDLTTGWFKI

SEQ ID NO: 42957 - protein, 14 aa, synthetic construct
AAWDWGYTTGWFKI

SEQ ID NO: 42958 - protein, 12 aa, synthetic construct
AALDYGTGWFKI

SEQ ID NO: 42959 - protein, 11 aa, synthetic construct
AARETTGWFKI

SEQ ID NO: 42960 - protein, 11 aa, synthetic construct
AAWVYTGWFKI

SEQ ID NO: 42961 - protein, 9 aa, synthetic construct
AAWDFYKKI

SEQ ID NO: 42962 - protein, 12 aa, synthetic construct
AARDYPTGWFKI

SEQ ID NO: 42963 - protein, 11 aa, synthetic construct
AAWEATGWFKI

SEQ ID NO: 42964 - protein, 13 aa, synthetic construct
AAWDRYTTGWFRI

SEQ ID NO: 42965 - protein, 13 aa, synthetic construct
AAWDRDTTSWFKI

SEQ ID NO: 42966 - protein, 13 aa, synthetic construct
LRGIGYIPLVGSR

SEQ ID NO: 42967 - protein, 11 aa, synthetic construct
AAWETTGLFKI

SEQ ID NO: 42968 - protein, 12 aa, synthetic construct
AAWDYSTGWFKI

SEQ ID NO: 42969 - protein, 11 aa, synthetic construct
AAAGGGYYKKN

SEQ ID NO: 42970 - protein, 13 aa, synthetic construct
AACDLGTTGWFKI

SEQ ID NO: 42971 - protein, 14 aa, synthetic construct
AAWDPSHTTGWSKI

SEQ ID NO: 42972 - protein, 12 aa, synthetic construct
LRGTKIPLVGSR

SEQ ID NO: 42973 - protein, 11 aa, synthetic construct
AALVFTGWFKI

SEQ ID NO: 42974 - protein, 9 aa, synthetic construct
AAWPGWFKL

SEQ ID NO: 42975 - protein, 12 aa, synthetic construct
AAWANTNGWFKI

SEQ ID NO: 42976 - protein, 13 aa, synthetic construct
AAWDRDTTGWFKM

SEQ ID NO: 42977 - protein, 12 aa, synthetic construct
AAWNYTTGWFKI

SEQ ID NO: 42978 - protein, 12 aa, synthetic construct
AAWDEATGRFKI

SEQ ID NO: 42979 - protein, 12 aa, synthetic construct
ATWDYTTGWFKI

SEQ ID NO: 42980 - protein, 13 aa, synthetic construct
AAWDLVTTGWFKI

SEQ ID NO: 42981 - protein, 12 aa, synthetic construct
AAWDYGTGWFKV

SEQ ID NO: 42982 - protein, 11 aa, synthetic construct
AAWNTTGWFKI

SEQ ID NO: 42983 - protein, 13 aa, synthetic construct
AACDRDTTGWFKI

SEQ ID NO: 42984 - protein, 11 aa, synthetic construct
AAWDPTGWFRI

SEQ ID NO: 42985 - protein, 12 aa, synthetic construct
AAWDWATGWFKI

SEQ ID NO: 42986 - protein, 12 aa, synthetic construct
AAWEHNTGWFKI

SEQ ID NO: 42987 - protein, 13 aa, synthetic construct
AAGDRDTTGWFKI

SEQ ID NO: 42988 - protein, 14 aa, synthetic construct
AAWDWVYTTGWSKI

SEQ ID NO: 42989 - protein, 12 aa, synthetic construct
AAWGHTTGWFKI

SEQ ID NO: 42990 - protein, 13 aa, synthetic construct
AAWDLGTTGWSKI

SEQ ID NO: 42991 - protein, 12 aa, synthetic construct
AAWDYNTGWLKI

SEQ ID NO: 42992 - protein, 12 aa, synthetic construct
AVWDRGTGWFKI

SEQ ID NO: 42993 - protein, 13 aa, synthetic construct
AAWDRDTTGRFKI

SEQ ID NO: 42994 - protein, 11 aa, synthetic construct
AAWDPTGWSKI

SEQ ID NO: 42995 - protein, 11 aa, synthetic construct
AAWGPTGWFKI

SEQ ID NO: 42996 - protein, 12 aa, synthetic construct
SAWEHTTGWFKI

SEQ ID NO: 42997 - protein, 12 aa, synthetic construct
AALANTTGWFKI

SEQ ID NO: 42998 - protein, 14 aa, synthetic construct
AAWDWVYTTGWFNI

SEQ ID NO: 42999 - protein, 12 aa, synthetic construct
AAWEYGTGWFKI

SEQ ID NO: 43000 - protein, 12 aa, synthetic construct
AALEHTTGWFKI

SEQ ID NO: 43001 - protein, 11 aa, synthetic construct
LRGQIPLVGSR

SEQ ID NO: 43002 - protein, 11 aa, synthetic construct
AARDPTGWFKI

SEQ ID NO: 43003 - protein, 14 aa, synthetic construct
AAWAPSHTTGWFKI

SEQ ID NO: 43004 - protein, 12 aa, synthetic construct
AAWAWTTGWFKI

SEQ ID NO: 43005 - protein, 9 aa, synthetic construct
AAWPGWFEI

SEQ ID NO: 43006 - protein, 12 aa, synthetic construct
AAWEQTTGWFKI

SEQ ID NO: 43007 - protein, 9 aa, synthetic construct
AAWDFYNKL

SEQ ID NO: 43008 - protein, 10 aa, synthetic construct
AARDWYYKKL

SEQ ID NO: 43009 - protein, 12 aa, synthetic construct
AAWANTTGLFKI

SEQ ID NO: 43010 - protein, 11 aa, synthetic construct
AACETTGWFKI

SEQ ID NO: 43011 - protein, 11 aa, synthetic construct
ATWDPTGWFKI

SEQ ID NO: 43012 - protein, 11 aa, synthetic construct
AAWVFTSWFKI

SEQ ID NO: 43013 - protein, 13 aa, synthetic construct
AAWDQYTTGWFKI

SEQ ID NO: 43014 - protein, 13 aa, synthetic construct
AAWDQNTTGRFKI

SEQ ID NO: 43015 - protein, 14 aa, synthetic construct
AAWDTSHTTGWFKI

SEQ ID NO: 43016 - protein, 14 aa, synthetic construct
AAWDPAHTTGWFKI

SEQ ID NO: 43017 - protein, 11 aa, synthetic construct
AALDPTGWFKI

SEQ ID NO: 43018 - protein, 13 aa, synthetic construct
AAWDRDTTGWYKI

SEQ ID NO: 43019 - protein, 12 aa, synthetic construct
LRGIDIPLVGSR

SEQ ID NO: 43020 - protein, 12 aa, synthetic construct
AAWDEATGWVKI

SEQ ID NO: 43021 - protein, 13 aa, synthetic construct
AAWDLGNTGWFKI

SEQ ID NO: 43022 - protein, 13 aa, synthetic construct
AAWDLGTTGWFKM

SEQ ID NO: 43023 - protein, 14 aa, synthetic construct
AAWEWVYTTGWFKI

SEQ ID NO: 43024 - protein, 13 aa, synthetic construct
AAWDRYTPGWFKI

SEQ ID NO: 43025 - protein, 11 aa, synthetic construct
SAWDTTGWFKI

SEQ ID NO: 43026 - protein, 12 aa, synthetic construct
TAWDYTTGWFKI

SEQ ID NO: 43027 - protein, 11 aa, synthetic construct
AAWVFTGLFKI

SEQ ID NO: 43028 - protein, 11 aa, synthetic construct
AARVFTGWFKI

SEQ ID NO: 43029 - protein, 12 aa, synthetic construct
AAWDWTTGWFQI

SEQ ID NO: 43030 - protein, 10 aa, synthetic construct
LRGTPLVGSR

SEQ ID NO: 43031 - protein, 13 aa, synthetic construct
AAWDQNTSGWFKI

SEQ ID NO: 43032 - protein, 12 aa, synthetic construct
SAWDYTTGWFKI

SEQ ID NO: 43033 - protein, 13 aa, synthetic construct
AAWDRDTPGWFKI

SEQ ID NO: 43034 - protein, 14 aa, synthetic construct
AAWDWVFTTGWFKI

SEQ ID NO: 43035 - protein, 11 aa, synthetic construct
AAWVFNGWFKI

SEQ ID NO: 43036 - protein, 14 aa, synthetic construct
AAWDPSHTPGWFKI

SEQ ID NO: 43037 - protein, 10 aa, synthetic construct
AAWEWYYKKL

SEQ ID NO: 43038 - protein, 11 aa, synthetic construct
AAFNTTGWFKI

SEQ ID NO: 43039 - protein, 14 aa, synthetic construct
AAWDPPHTTGWFKI

SEQ ID NO: 43040 - protein, 11 aa, synthetic construct
AAWDPTGWFKK

SEQ ID NO: 43041 - protein, 12 aa, synthetic construct
AAWVHTTGWFKI

SEQ ID NO: 43042 - protein, 14 aa, synthetic construct
AAWDPSHNTGWFKI

SEQ ID NO: 43043 - protein, 12 aa, synthetic construct
AAWDYITGWFKI

SEQ ID NO: 43044 - protein, 13 aa, synthetic construct
AAWDLGTTGWFNI

SEQ ID NO: 43045 - protein, 12 aa, synthetic construct
AAWDYGTGWSKI

SEQ ID NO: 43046 - protein, 12 aa, synthetic construct
AAWAYPTGWFKI

SEQ ID NO: 43047 - protein, 13 aa, synthetic construct
AAWDLGTTGWYKI

SEQ ID NO: 43048 - protein, 12 aa, synthetic construct
AAWAYGTGWFKI

SEQ ID NO: 43049 - protein, 9 aa, synthetic construct
AAGPGWFKI

SEQ ID NO: 43050 - protein, 13 aa, synthetic construct
AARDLGTTGWFKI

SEQ ID NO: 43051 - protein, 9 aa, synthetic construct
AAWDLYKKL

SEQ ID NO: 43052 - protein, 14 aa, synthetic construct
AAWDPSHTTGWFKM

SEQ ID NO: 43053 - protein, 12 aa, synthetic construct
AAWADTTGWFKI

SEQ ID NO: 43054 - protein, 12 aa, synthetic construct
AAWEHTPGWFKI

SEQ ID NO: 43055 - protein, 12 aa, synthetic construct
AAWDYTTGWVKI

SEQ ID NO: 43056 - protein, 11 aa, synthetic construct
AAWRGTGWFKI

SEQ ID NO: 43057 - protein, 12 aa, synthetic construct
AARDEATGWFKI

SEQ ID NO: 43058 - protein, 12 aa, synthetic construct
AALDRGTGWFKI

SEQ ID NO: 43059 - protein, 12 aa, synthetic construct
AAWDWNTGWFKI

SEQ ID NO: 43060 - protein, 11 aa, synthetic construct
AAWVSTGWFKV

SEQ ID NO: 43061 - protein, 14 aa, synthetic construct
AAWDPTHTTGWFKI

SEQ ID NO: 43062 - protein, 12 aa, synthetic construct
AAWDYTTSWFKI

SEQ ID NO: 43063 - protein, 11 aa, synthetic construct
AAFYTTGLFKI

SEQ ID NO: 43064 - protein, 11 aa, synthetic construct
AAWDPTGWVKI

SEQ ID NO: 43065 - protein, 12 aa, synthetic construct
AAWDYATGWFKI

SEQ ID NO: 43066 - protein, 12 aa, synthetic construct
AAWANTTGWSKI

SEQ ID NO: 43067 - protein, 11 aa, synthetic construct
AAWVSTGLFKI

SEQ ID NO: 43068 - protein, 11 aa, synthetic construct
AAFYTTGWFNI

SEQ ID NO: 43069 - protein, 9 aa, synthetic construct
AALPGWFKI

SEQ ID NO: 43070 - protein, 11 aa, synthetic construct
AAWETTGWFKL

SEQ ID NO: 43071 - protein, 12 aa, synthetic construct
AAWDWTTGLFKI

SEQ ID NO: 43072 - protein, 13 aa, synthetic construct
AAWDMDTTGWFKI

SEQ ID NO: 43073 - protein, 9 aa, synthetic construct
AACPGWFKI

SEQ ID NO: 43074 - protein, 12 aa, synthetic construct
AAWDYPTGWLKI

SEQ ID NO: 43075 - protein, 11 aa, synthetic construct
AAWVFTGWFKL

SEQ ID NO: 43076 - protein, 11 aa, synthetic construct
AAWDTNGWFKI

SEQ ID NO: 43077 - protein, 13 aa, synthetic construct
AAWDRHTTGWFKI

SEQ ID NO: 43078 - protein, 11 aa, synthetic construct
AAWKGTGWSKI

SEQ ID NO: 43079 - protein, 13 aa, synthetic construct
LRGIPLIPLVGSR

SEQ ID NO: 43080 - protein, 14 aa, synthetic construct
AAWDPSRTTGWFKI

SEQ ID NO: 43081 - protein, 11 aa, synthetic construct
AAWETTCWFKI

SEQ ID NO: 43082 - protein, 9 aa, synthetic construct
AAWPGWFMI

SEQ ID NO: 43083 - protein, 11 aa, synthetic construct
AAWVPTGWFKI

SEQ ID NO: 43084 - protein, 13 aa, synthetic construct
AAWDRYTTGWFNI

SEQ ID NO: 43085 - protein, 12 aa, synthetic construct
AAWDEATGWFNI

SEQ ID NO: 43086 - protein, 12 aa, synthetic construct
AAWDFATGWFKI

SEQ ID NO: 43087 - protein, 9 aa, synthetic construct
AAGDFYKKL

SEQ ID NO: 43088 - protein, 12 aa, synthetic construct
AAWEHTTGWFNI

SEQ ID NO: 43089 - protein, 13 aa, synthetic construct
AAWGRYTTGWFKI

SEQ ID NO: 43090 - protein, 11 aa, synthetic construct
AAWDTAGWFKI

SEQ ID NO: 43091 - protein, 11 aa, synthetic construct
AAWAPTGWFKI

SEQ ID NO: 43092 - protein, 9 aa, synthetic construct
AAWPGLFKI

SEQ ID NO: 43093 - protein, 9 aa, synthetic construct
AAWDFYKKH

SEQ ID NO: 43094 - protein, 13 aa, synthetic construct
AAWDWDTTGWFKI

SEQ ID NO: 43095 - protein, 13 aa, synthetic construct
AAWDLGPTGWFKI

SEQ ID NO: 43096 - protein, 14 aa, synthetic construct
AAWDWAYTTGWFKI

SEQ ID NO: 43097 - protein, 11 aa, synthetic construct
AAGVSTGWFKI

SEQ ID NO: 43098 - protein, 12 aa, synthetic construct
AAWDYGPGWFKI

SEQ ID NO: 43099 - protein, 12 aa, synthetic construct
AAWAEATGWFKI

SEQ ID NO: 43100 - protein, 10 aa, synthetic construct
AAWDWCYKKI

SEQ ID NO: 43101 - protein, 11 aa, synthetic construct
AAFYTTGWFKL

SEQ ID NO: 43102 - protein, 12 aa, synthetic construct
AAWDFTTGWFKI

SEQ ID NO: 43103 - protein, 13 aa, synthetic construct
AAWDFGTTGWFKI

SEQ ID NO: 43104 - protein, 12 aa, synthetic construct
AAWDEATGWFKM

SEQ ID NO: 43105 - protein, 14 aa, synthetic construct
AACDPSHTTGWFKI

SEQ ID NO: 43106 - protein, 12 aa, synthetic construct
AAWDYTAGWFKI

SEQ ID NO: 43107 - protein, 13 aa, synthetic construct
AAWDKNTTGWFKI

SEQ ID NO: 43108 - protein, 10 aa, synthetic construct
AAWDWSYKKL

SEQ ID NO: 43109 - protein, 8 aa, synthetic construct
LRGQVGSR

SEQ ID NO: 43110 - protein, 12 aa, synthetic construct
TAWDEATGWFKI

SEQ ID NO: 43111 - protein, 11 aa, synthetic construct
AAWKGTGWFKK

SEQ ID NO: 43112 - protein, 11 aa, synthetic construct
AAGDPTGWFKI

SEQ ID NO: 43113 - protein, 14 aa, synthetic construct
AAWDWVYTTGWFRI

SEQ ID NO: 43114 - protein, 9 aa, synthetic construct
AAWPGWFKR

SEQ ID NO: 43115 - protein, 11 aa, synthetic construct
AAEGGGYYKKL

SEQ ID NO: 43116 - protein, 11 aa, synthetic construct
AAFYTTCWFKI

SEQ ID NO: 43117 - protein, 12 aa, synthetic construct
DAWDEATGWFKI

SEQ ID NO: 43118 - protein, 12 aa, synthetic construct
AARANTTGWFKI

SEQ ID NO: 43119 - protein, 11 aa, synthetic construct
AAWVSTGWFNI

SEQ ID NO: 43120 - protein, 11 aa, synthetic construct
AAWKGTGWFKM

SEQ ID NO: 43121 - protein, 11 aa, synthetic construct
AASYTTGWFKI

SEQ ID NO: 43122 - protein, 12 aa, synthetic construct
AAWANTTGWFKT

SEQ ID NO: 43123 - protein, 11 aa, synthetic construct
ASWDTTGWFKI

SEQ ID NO: 43124 - protein, 11 aa, synthetic construct
AAWETTGWFKV

SEQ ID NO: 43125 - protein, 11 aa, synthetic construct
AAWVSTGWFRI

SEQ ID NO: 43126 - protein, 11 aa, synthetic construct
AAWVFTGWFEI

SEQ ID NO: 43127 - protein, 9 aa, synthetic construct
AAWPGWFKV

SEQ ID NO: 43128 - protein, 11 aa, synthetic construct
AAFYTTGWVKI

SEQ ID NO: 43129 - protein, 13 aa, synthetic construct
AAWDLYTTGWFKI

SEQ ID NO: 43130 - protein, 11 aa, synthetic construct
ATWKGTGWFKI

SEQ ID NO: 43131 - protein, 11 aa, synthetic construct
AAWDTTCWFKI

SEQ ID NO: 43132 - protein, 10 aa, synthetic construct
AAWDLYYKKL

SEQ ID NO: 43133 - protein, 9 aa, synthetic construct
AAWPGWFKT

SEQ ID NO: 43134 - protein, 13 aa, synthetic construct
AAWVRDTTGWFKI

SEQ ID NO: 43135 - protein, 11 aa, synthetic construct
AAWDCTGWFKI

SEQ ID NO: 43136 - protein, 13 aa, synthetic construct
AAWDLGTTGWVKI

SEQ ID NO: 43137 - protein, 11 aa, synthetic construct
AAWDPTGRFKI

SEQ ID NO: 43138 - protein, 11 aa, synthetic construct
AAAGGGYYNKH

SEQ ID NO: 43139 - protein, 13 aa, synthetic construct
AAWDQNTTGWFRI

SEQ ID NO: 43140 - protein, 11 aa, synthetic construct
AAWISPGWFKI

SEQ ID NO: 43141 - protein, 12 aa, synthetic construct
AAWDEATGWSKI

SEQ ID NO: 43142 - protein, 14 aa, synthetic construct
AARDWVYTTGWFKI

SEQ ID NO: 43143 - protein, 11 aa, synthetic construct
AAWVFAGWFKI

SEQ ID NO: 43144 - protein, 11 aa, synthetic construct
AAWDPTCWFKI

SEQ ID NO: 43145 - protein, 12 aa, synthetic construct
AACDYTTGWFKI

SEQ ID NO: 43146 - protein, 12 aa, synthetic construct
AAWDYTTGGFKI

SEQ ID NO: 43147 - protein, 11 aa, synthetic construct
AALKGTGWFKI

SEQ ID NO: 43148 - protein, 13 aa, synthetic construct
AAWDLGTTGWFKT

SEQ ID NO: 43149 - protein, 11 aa, synthetic construct
AAAVGGYYKKL

SEQ ID NO: 43150 - protein, 11 aa, synthetic construct
AAWKGTGWFEI

SEQ ID NO: 43151 - protein, 13 aa, synthetic construct
AAWDQNTAGWFKI

SEQ ID NO: 43152 - protein, 11 aa, synthetic construct
AAWDPTGWFQI

SEQ ID NO: 43153 - protein, 11 aa, synthetic construct
AAWVFTGWFKK

SEQ ID NO: 43154 - protein, 11 aa, synthetic construct
AAWDTTGWSKI

SEQ ID NO: 43155 - protein, 14 aa, synthetic construct
AAWDLVYNTGWFKI

SEQ ID NO: 43156 - protein, 13 aa, synthetic construct
AACDRYTTGWFKI

SEQ ID NO: 43157 - protein, 12 aa, synthetic construct
AAWDEVTGWFKI

SEQ ID NO: 43158 - protein, 10 aa, synthetic construct
ANNTTGWFKI

SEQ ID NO: 43159 - protein, 12 aa, synthetic construct
AAWDYPTGRFKI

SEQ ID NO: 43160 - protein, 12 aa, synthetic construct
AAWDYTTGWFQI

SEQ ID NO: 43161 - protein, 13 aa, synthetic construct
AAWERYTTGWFKI

SEQ ID NO: 43162 - protein, 12 aa, synthetic construct
SAWDEATGWFKI

SEQ ID NO: 43163 - protein, 14 aa, synthetic construct
AARDPSHTTGWFKI

SEQ ID NO: 43164 - protein, 12 aa, synthetic construct
AAWDEATGWYKI

SEQ ID NO: 43165 - protein, 12 aa, synthetic construct
AAWDRGTGLFKI

SEQ ID NO: 43166 - protein, 12 aa, synthetic construct
AAWDEATGWFEI

SEQ ID NO: 43167 - protein, 14 aa, synthetic construct
AAWDPSHTTGLFKI

SEQ ID NO: 43168 - protein, 12 aa, synthetic construct
AAWDWTTGRFKI

SEQ ID NO: 43169 - protein, 12 aa, synthetic construct
AAWGRGTGWFKI

SEQ ID NO: 43170 - protein, 13 aa, synthetic construct
AVWDRYTTGWFKI

SEQ ID NO: 43171 - protein, 12 aa, synthetic construct
AAWDWTTGWFEI

SEQ ID NO: 43172 - protein, 10 aa, synthetic construct
AAWPTGWFKI

SEQ ID NO: 43173 - protein, 13 aa, synthetic construct
AVWDLGTTGWFKI

SEQ ID NO: 43174 - protein, 13 aa, synthetic construct
AVWDRDTTGWFKI

SEQ ID NO: 43175 - protein, 12 aa, synthetic construct
AAWDWTTGWFKM

SEQ ID NO: 43176 - protein, 14 aa, synthetic construct
AAWDWVHTTGWFKI

SEQ ID NO: 43177 - protein, 12 aa, synthetic construct
AAWDWTTGWFRI

SEQ ID NO: 43178 - protein, 14 aa, synthetic construct
AAWDWVCTTGWFKI

SEQ ID NO: 43179 - protein, 11 aa, synthetic construct
AAWVFTGWFQI

SEQ ID NO: 43180 - protein, 13 aa, synthetic construct
AAWDRDPTGWFKI

SEQ ID NO: 43181 - protein, 11 aa, synthetic construct
AAWVSTGWFKT

SEQ ID NO: 43182 - protein, 12 aa, synthetic construct
AAWDKATGWFKI

SEQ ID NO: 43183 - protein, 11 aa, synthetic construct
AAWKGTGWFKV

SEQ ID NO: 43184 - protein, 13 aa, synthetic construct
AAWDLGATGWFKI

SEQ ID NO: 43185 - protein, 10 aa, synthetic construct
AAWDRYYKKL

SEQ ID NO: 43186 - protein, 12 aa, synthetic construct
AAWDLGTGWFKI

SEQ ID NO: 43187 - protein, 13 aa, synthetic construct
AAWDLGTSGWFKI

SEQ ID NO: 43188 - protein, 13 aa, synthetic construct
AAWYRDTTGWFKI

SEQ ID NO: 43189 - protein, 13 aa, synthetic construct
AAWDLGTTGWFKK

(The sequence listing continues in the following parts.)

What is claimed:

1. A genetically modified non-human animal, whose genome comprises: at least one unarranged human T cell receptor (TCR) V gene segment, at least one unarranged human TCR Dδ gene segment, and at least one unarranged human TCR Jδ gene segment, wherein the at least one unarranged human TCR Vδ gene segment, the at least one unarranged human TCR Dδ gene segment, and the at least one unarranged human TCR Jδ gene segment are operably linked to a functional non-human TCRδ constant gene sequence.

2. The animal of claim 1, wherein the at least one unarranged human TCR Vδ gene segment, the at least one unarranged human TCR Dδ gene segment, and the at least one unarranged human TCR Jδ gene segment are inserted into the endogenous TCRδ variable gene locus.

3. The animal of claim 1, wherein the at least one unarranged human TCR Vδ gene segment, the at least one unarranged human TCR Dδ gene segment, and the at least one unarranged human TCR Jδ gene segment replace the complete repertoire of unarranged endogenous TCR Vδ, Dδ and Jδ gene segments.

4. The animal of claim 1, wherein the at least one unarranged human TCR Vδ gene segment is selected from the unarranged repertoire of the human TCR Vδ gene segments VOL Vδ2, Vδ3, Vδ4, Vδ5, Vδ6, Vδ7, and Vδ8.

5. The animal of claim 1, wherein the amino acid sequence of the at least one unarranged human TCR Vδ segment has at least 90% sequence identity with a sequence selected from the group consisting of SEQ ID Nos: 65, 66, 67, 68, 69, 70, 71, 72.

6. The animal of claim 1, wherein the at least one unarranged human TCR Vδ gene segment, the at least one unarranged human TCR Dδ gene segment, and the at least one unarranged human TCR Jδ gene segment are capable of rearranging to form a rearranged human VDJ δ sequence.

7. The animal of claim 6, wherein the animal expresses a humanized TCRδ variable region comprising the rearranged human VDJ δ sequence on the surface of a γδ T cell population.

8. The animal of claim 7, wherein the sequence of the complementary determining region 3 (CDR3) of Vδ1 starts with amino acids ALGE, where E can be replaced by any of G, A, D, V or R; and/or ends with KLI or TRQM.

9. The animal of claim 7, wherein the CDR3 of Vδ2 starts with amino acids ACD, ACG, ACE, ARD, or ASD; and/or ends with KU or TRQM.

10. The animal of claim 7, wherein the CDR3 of Vδ3 starts with amino acids AL, AS, AC, AY, AT, or AV.

11. The animal of claim 7, wherein the first three amino acids of the CDR3 of Vδ4 are AMR, ASP, AMS, AMT, AMG, AMI, AIR, AKR, ATR, EMR, VMR, PMR, or ALP; and/or the last amino acids are KLI or TRQM.

12. The animal of claim 7, wherein the first three amino acids of the CDR3 of the Vδ6 are AAS or AAR; or the first four amino acids are AASP, where P can be replaced by T, G, M, V, L, or R.

13. The animal of claim 12, wherein the last three amino acids of the CDR3 of the Vδ6 are TRQ, KU, or KLN.

14. A genetically modified non-human animal, whose genome the genome comprises: at least one unarranged human TCR Vγ gene segment and at least one human TCR Jγ gene segment, wherein the at least one unarranged human TCR Vγ gene segment and the at least one human TCR Jγ gene segment are operably linked to a functional non-human TCRγ, constant gene.

15. The animal of claim 14, wherein the at least one unarranged human TCR Vγ gene segment, and the at least one unarranged human TCR Jγ gene segment are inserted into the endogenous TCRγ variable gene locus.

16. The animal of claim 14, wherein the at least one unarranged human TCR Vγ gene segment, and the at least one unarranged human TCR Jγ gene segment replace the complete repertoire of the unarranged endogenous TCR Vγ and Jγ gene segments.

17. The animal of claim 14, wherein the at least one unarranged human TCR Vγ gene segment is selected from the unarranged repertoire of the human TCR Vγ gene segments Vγ2, Vγ3, Vγ4, Vγ5, Vγ8, Vγ9, Vγ10, and Vγ11, preferably Vγ9, Vγ10, and Vγ11.

18. The animal of claim 17, wherein the amino acid sequence of the at least one unarranged human TCR Vγ segment has at least 90% sequence identity with SEQ ID NO: 62, SEQ ID NO: 63 or SEQ ID NO: 64.

19. The animal of claim 14, wherein the at least one unarranged human TCR Vγ gene segment, and the at least one unarranged human TCR Jγ gene segment are capable of rearranging to form a rearranged human VJ γ sequence.

20. The animal of claim 19, wherein the animal expresses a humanized TCRγ variable region comprising the rearranged human VJ γ sequence on the surface of a γδ T cell population.

21. The animal of claim 20, wherein:
the first four amino acids of the CDR3 of Vγ9 are selected from the group consisting of ALWE, ALWG, ASWE, AT CE, ALLE, ALRE, PCGR, AWWE, DLWE, ASWE, and AMWE; or
the last amino acids of the CDR3 of Vγ9 are selected from the group consisting of KTL, KEL, EKL, KNL, IKV, KSR, RNS, KNS, MKL, KRL, RKL, FKI, and KNQG; or
the first three amino acids of the CDR3 of Vγ10 are AAW; or
the first four amino acids of the CDR3 of the Vγ10 are AAWF, where the fourth position can be any of F, L, A, R, G, C, or V; or
the last three amino acids of Vγ10 are FKI.

22. A genetically modified non-human animal, whose genome comprises:
at least one unarranged human T cell receptor (TCR) Vδ gene segment, at least one unarranged human TCR Dδ gene segment, and at least one unarranged human TCR Jδ gene segment; and
at least one unarranged human TCR Vγ gene segment and at least one human TCR Jγ gene segment,
wherein the at least one unarranged human TCR Vδ gene segment, the at least one unarranged human TCR Dδ gene segment, and the at least one unarranged human TCR JE, gene segment are operably linked to a functional non-human TCRδ constant gene, and
wherein the at least one unarranged human TCR Vγ gene segment and the at least one human TCR Jγ gene segment are operably linked to a functional non-human TCRγ constant gene.

23. The animal of claim 22, wherein the at least one unarranged human TCR Vδ gene segment, the at least one unarranged human TCR DL gene segment, and the at least one unarranged human TCR Jδ gene segment are inserted into the endogenous TCR variable gene locus, and
wherein the at least one unarranged human TCR Vγ gene segment, and the at least one unarranged human TCR Jγ gene segment are inserted into the endogenous TCRγ variable gene locus.

24. The animal of claim 22, wherein the at least one unarranged human TCR Vδ gene segment, the at least one unarranged human TCR Dδ gene segment, and the at least one unarranged human TCR Jδ gene segment replace the complete repertoire of the unarranged endogenous TCR Vδ, Dδ and Jδ gene segments, and
wherein the at least one unarranged human TCR Vγ gene segment, and the at least one unarranged human TCR Jγ gene segment replace the complete repertoire of the unarranged endogenous TCR Vγ and Jγ gene segments.

25. The animal of claim 22, wherein the at least one unarranged human TCR Vδ gene segment is selected from the unarranged repertoire of the human TCR Vδ gene segments Vδ1, Vδ2, Vδ3, Vδ4, Vδ5, Vδ6, Vδ7, and Vδ8, and
wherein the at least one unarranged human TCR Vγ gene segment is selected from the unarranged repertoire of the human TCR Vγ gene segments Vγ2, Vγ3, Vγ4 Vγ5, Vγ8 Vγ9, Vγ10, and Vγ11, preferably Vγ9, Vγ10, and Vγ11.

26. The animal of claim 25, wherein the at least one unarranged human TCR Vδ gene segment, the at least one unarranged human TCR Dδ gene segment, and the at least one unarranged human TCR Jδ gene segment are capable of rearranging to form a rearranged human VDJ δ sequence, and
wherein the at least one unarranged human TCR Vγ gene segment, and the at least one unarranged human TCR Jγ gene segment are capable of rearranging to form a rearranged human VJγ sequence.

27. The animal of claim 26, wherein the animal expresses a humanized TCRγδ comprising the rearranged human VDJ δ sequence and the rearranged human VJ γ sequence on the surface of a γδ T cell population.

28. The animal of claim 22, wherein the amino acid sequence of the at least one Vγ segment has at least 90% sequence identity with a human Vγ sequence selected from the group consisting of SEQ ID Nos 62, 63 and 64 and wherein the amino acid sequence of the at least one Vδ segment has at least 90% sequence identity with a human Vδ sequence selected from the group consisting of SEQ ID Nos 64, 66, 67, 68, 69, 70, 71 and 72.

29. The animal of claim 22, wherein Dδ has at least 90% sequence identity with human D.

30. The animal of claim 22, wherein the Jγ and Jδ have at least 90% sequence identity with human Jγ and Jδ.

31. The animal of any one of claims 7, 20 and 27, wherein the humanized TCR is expressed with at least one mouse CD3 on the surface of a γδ T cell population.

32. The genetically modified animal of any of claims 1, 14 and 22, wherein the animal is a rodent.

33. The genetically modified animal of any of claims 1, 14 and 22, wherein the animal is a mouse.

34. The genetically modified animal of any of claims 1, 14 and 22, wherein the animal generates a population of central and effector memory γ/δ T cells to an internal or external antigen.

35. A method of producing a humanized TCR comprising: administering an antigen of interest to the genetically modified animal of any of claims 1, 14 and 22; and obtaining a humanized TCR that recognizes said antigen of interest.

36. A method of determining and/or analyzing the TCR repertoire of the humanized TCR produced in claim 35 by next-generation sequencing.

37. A method of establishing cancer comprising: administering a cancer cell to the genetically modified animal of any of claims 1, 14 and 22, and determining cancer growth.

38. A method of establishing an infection comprising: administering an antigen-derived pathogen to the genetically modified animal of any of claims 1, 14 and 22; and determining the repertoire of TCR expansion by sequencing.
